United States Patent Application Publication US 2024/0131133 A1 - sequence listing, part 2

SEQ ID NO: 26109 - protein, 9 aa, synthetic construct
  source 1..9: note = Seed: LVVVGARGV (KRAS G12R)
LVVVGKRGY

SEQ ID NO: 26110 - protein, 9 aa, synthetic construct
  source 1..9: note = Seed: LVVVGARGV (KRAS G12R)
LVVVGLRGA

SEQ ID NO: 26111 - protein, 9 aa, synthetic construct
  source 1..9: note = Seed: LVVVGARGV (KRAS G12R)
LVVVGLRGF

SEQ ID NO: 26112 - protein, 9 aa, synthetic construct
  source 1..9: note = Seed: LVVVGARGV (KRAS G12R)
LVVVGLRGG

SEQ ID NO: 26113 - protein, 9 aa, synthetic construct
  source 1..9: note = Seed: LVVVGARGV (KRAS G12R)
LVVVGLRGI

SEQ ID NO: 26114 - protein, 9 aa, synthetic construct
  source 1..9: note = Seed: LVVVGARGV (KRAS G12R)
LVVVGLRGL

SEQ ID NO: 26115 - protein, 9 aa, synthetic construct
  source 1..9: note = Seed: LVVVGARGV (KRAS G12R)
LVVVGLRGM

SEQ ID NO: 26116 - protein, 9 aa, synthetic construct
  source 1..9: note = Seed: LVVVGARGV (KRAS G12R)
LVVVGLRGQ

SEQ ID NO: 26117 - protein, 9 aa, synthetic construct
  source 1..9: note = Seed: LVVVGARGV (KRAS G12R)
LVVVGLRGR

SEQ ID NO: 26118 - protein, 9 aa, synthetic construct
  source 1..9: note = Seed: LVVVGARGV (KRAS G12R)
LVVVGLRGS

SEQ ID NO: 26119 - protein, 9 aa, synthetic construct
  source 1..9: note = Seed: LVVVGARGV (KRAS G12R)
LVVVGLRGV

SEQ ID NO: 26120 - protein, 9 aa, synthetic construct
  source 1..9: note = Seed: LVVVGARGV (KRAS G12R)
LVVVGLRGY

SEQ ID NO: 26121 - protein, 9 aa, synthetic construct
  source 1..9: note = Seed: LVVVGARGV (KRAS G12R)
LVVVGMRGA

SEQ ID NO: 26122 - protein, 9 aa, synthetic construct
  source 1..9: note = Seed: LVVVGARGV (KRAS G12R)
LVVVGMRGF

SEQ ID NO: 26123 - protein, 9 aa, synthetic construct
  source 1..9: note = Seed: LVVVGARGV (KRAS G12R)
LVVVGMRGG

SEQ ID NO: 26124 - protein, 9 aa, synthetic construct
  source 1..9: note = Seed: LVVVGARGV (KRAS G12R)
LVVVGMRGI

SEQ ID NO: 26125 - protein, 9 aa, synthetic construct
  source 1..9: note = Seed: LVVVGARGV (KRAS G12R)
LVVVGMRGK

SEQ ID NO: 26126 - protein, 9 aa, synthetic construct
  source 1..9: note = Seed: LVVVGARGV (KRAS G12R)
LVVVGMRGL

SEQ ID NO: 26127 - protein, 9 aa, synthetic construct
  source 1..9: note = Seed: LVVVGARGV (KRAS G12R)
LVVVGMRGM

SEQ ID NO: 26128 - protein, 9 aa, synthetic construct
  source 1..9: note = Seed: LVVVGARGV (KRAS G12R)
LVVVGMRGQ

SEQ ID NO: 26129 - protein, 9 aa, synthetic construct
  source 1..9: note = Seed: LVVVGARGV (KRAS G12R)
LVVVGMRGR

SEQ ID NO: 26130 - protein, 9 aa, synthetic construct
  source 1..9: note = Seed: LVVVGARGV (KRAS G12R)
LVVVGMRGV

SEQ ID NO: 26131 - protein, 9 aa, synthetic construct
  source 1..9: note = Seed: LVVVGARGV (KRAS G12R)
LVVVGMRGY

SEQ ID NO: 26132 - protein, 9 aa, synthetic construct
  source 1..9: note = Seed: LVVVGARGV (KRAS G12R)
LVVVGNRGA

SEQ ID NO: 26133 - protein, 9 aa, synthetic construct
  source 1..9: note = Seed: LVVVGARGV (KRAS G12R)
LVVVGNRGF

SEQ ID NO: 26134 - protein, 9 aa, synthetic construct
  source 1..9: note = Seed: LVVVGARGV (KRAS G12R)
LVVVGNRGH

SEQ ID NO: 26135 - protein, 9 aa, synthetic construct
  source 1..9: note = Seed: LVVVGARGV (KRAS G12R)
LVVVGNRGI

SEQ ID NO: 26136 - protein, 9 aa, synthetic construct
  source 1..9: note = Seed: LVVVGARGV (KRAS G12R)
LVVVGNRGK

SEQ ID NO: 26137 - protein, 9 aa, synthetic construct
  source 1..9: note = Seed: LVVVGARGV (KRAS G12R)
LVVVGNRGL

SEQ ID NO: 26138 - protein, 9 aa, synthetic construct
  source 1..9: note = Seed: LVVVGARGV (KRAS G12R)
LVVVGNRGM

SEQ ID NO: 26139 - protein, 9 aa, synthetic construct
  source 1..9: note = Seed: LVVVGARGV (KRAS G12R)
LVVVGNRGR

SEQ ID NO: 26140 - protein, 9 aa, synthetic construct
  source 1..9: note = Seed: LVVVGARGV (KRAS G12R)
LVVVGNRGS

SEQ ID NO: 26141 - protein, 9 aa, synthetic construct
  source 1..9: note = Seed: LVVVGARGV (KRAS G12R)
LVVVGNRGT

SEQ ID NO: 26142 - protein, 9 aa, synthetic construct
  source 1..9: note = Seed: LVVVGARGV (KRAS G12R)
LVVVGNRGV

SEQ ID NO: 26143 - protein, 9 aa, synthetic construct
  source 1..9: note = Seed: LVVVGARGV (KRAS G12R)
LVVVGNRGY

SEQ ID NO: 26144 - protein, 9 aa, synthetic construct
  source 1..9: note = Seed: LVVVGARGV (KRAS G12R)
LVVVGPRGA

SEQ ID NO: 26145 - protein, 9 aa, synthetic construct
  source 1..9: note = Seed: LVVVGARGV (KRAS G12R)
LVVVGPRGF

SEQ ID NO: 26146 - protein, 9 aa, synthetic construct
  source 1..9: note = Seed: LVVVGARGV (KRAS G12R)
LVVVGPRGI

SEQ ID NO: 26147 - protein, 9 aa, synthetic construct
  source 1..9: note = Seed: LVVVGARGV (KRAS G12R)
LVVVGPRGL

SEQ ID NO: 26148 - protein, 9 aa, synthetic construct
  source 1..9: note = Seed: LVVVGARGV (KRAS G12R)
LVVVGPRGM

SEQ ID NO: 26149 - protein, 9 aa, synthetic construct
  source 1..9: note = Seed: LVVVGARGV (KRAS G12R)
LVVVGPRGR

SEQ ID NO: 26150 - protein, 9 aa, synthetic construct
  source 1..9: note = Seed: LVVVGARGV (KRAS G12R)
LVVVGPRGS

SEQ ID NO: 26151 - protein, 9 aa, synthetic construct
  source 1..9: note = Seed: LVVVGARGV (KRAS G12R)
LVVVGPRGT

SEQ ID NO: 26152 - protein, 9 aa, synthetic construct
  source 1..9: note = Seed: LVVVGARGV (KRAS G12R)
LVVVGPRGV

SEQ ID NO: 26153 - protein, 9 aa, synthetic construct
  source 1..9: note = Seed: LVVVGARGV (KRAS G12R)
LVVVGPRGY

SEQ ID NO: 26154 - protein, 9 aa, synthetic construct
  source 1..9: note = Seed: LVVVGARGV (KRAS G12R)
LVVVGQRGA

SEQ ID NO: 26155 - protein, 9 aa, synthetic construct
  source 1..9: note = Seed: LVVVGARGV (KRAS G12R)
LVVVGQRGF

SEQ ID NO: 26156 - protein, 9 aa, synthetic construct
  source 1..9: note = Seed: LVVVGARGV (KRAS G12R)
LVVVGQRGI

SEQ ID NO: 26157 - protein, 9 aa, synthetic construct
  source 1..9: note = Seed: LVVVGARGV (KRAS G12R)
LVVVGQRGK

SEQ ID NO: 26158 - protein, 9 aa, synthetic construct
  source 1..9: note = Seed: LVVVGARGV (KRAS G12R)
LVVVGQRGL

SEQ ID NO: 26159 - protein, 9 aa, synthetic construct
  source 1..9: note = Seed: LVVVGARGV (KRAS G12R)
LVVVGQRGM

SEQ ID NO: 26160 - protein, 9 aa, synthetic construct
  source 1..9: note = Seed: LVVVGARGV (KRAS G12R)
LVVVGQRGR

SEQ ID NO: 26161 - protein, 9 aa, synthetic construct
  source 1..9: note = Seed: LVVVGARGV (KRAS G12R)
LVVVGQRGS

SEQ ID NO: 26162 - protein, 9 aa, synthetic construct
  source 1..9: note = Seed: LVVVGARGV (KRAS G12R)
LVVVGQRGY

SEQ ID NO: 26163 - protein, 9 aa, synthetic construct
  source 1..9: note = Seed: LVVVGARGV (KRAS G12R)
LVVVGRRGA

SEQ ID NO: 26164 - protein, 9 aa, synthetic construct
  source 1..9: note = Seed: LVVVGARGV (KRAS G12R)
LVVVGRRGC

SEQ ID NO: 26165 - protein, 9 aa, synthetic construct
  source 1..9: note = Seed: LVVVGARGV (KRAS G12R)
LVVVGRRGD

SEQ ID NO: 26166 - protein, 9 aa, synthetic construct
  source 1..9: note = Seed: LVVVGARGV (KRAS G12R)
LVVVGRRGE

SEQ ID NO: 26167 - protein, 9 aa, synthetic construct
  source 1..9: note = Seed: LVVVGARGV (KRAS G12R)
LVVVGRRGF

SEQ ID NO: 26168 - protein, 9 aa, synthetic construct
  source 1..9: note = Seed: LVVVGARGV (KRAS G12R)
LVVVGRRGG

SEQ ID NO: 26169 - protein, 9 aa, synthetic construct
  source 1..9: note = Seed: LVVVGARGV (KRAS G12R)
LVVVGRRGH

SEQ ID NO: 26170 - protein, 9 aa, synthetic construct
  source 1..9: note = Seed: LVVVGARGV (KRAS G12R)
LVVVGRRGI

SEQ ID NO: 26171 - protein, 9 aa, synthetic construct
  source 1..9: note = Seed: LVVVGARGV (KRAS G12R)
LVVVGRRGK

SEQ ID NO: 26172 - protein, 9 aa, synthetic construct
  source 1..9: note = Seed: LVVVGARGV (KRAS G12R)
LVVVGRRGL

SEQ ID NO: 26173 - protein, 9 aa, synthetic construct
  source 1..9: note = Seed: LVVVGARGV (KRAS G12R)
LVVVGRRGM

SEQ ID NO: 26174 - protein, 9 aa, synthetic construct
  source 1..9: note = Seed: LVVVGARGV (KRAS G12R)
LVVVGRRGN

SEQ ID NO: 26175 - protein, 9 aa, synthetic construct
  source 1..9: note = Seed: LVVVGARGV (KRAS G12R)
LVVVGRRGP

SEQ ID NO: 26176 - protein, 9 aa, synthetic construct
  source 1..9: note = Seed: LVVVGARGV (KRAS G12R)
LVVVGRRGQ

SEQ ID NO: 26177 - protein, 9 aa, synthetic construct
  source 1..9: note = Seed: LVVVGARGV (KRAS G12R)
LVVVGRRGR

SEQ ID NO: 26178 - protein, 9 aa, synthetic construct
  source 1..9: note = Seed: LVVVGARGV (KRAS G12R)
LVVVGRRGS

SEQ ID NO: 26179 - protein, 9 aa, synthetic construct
  source 1..9: note = Seed: LVVVGARGV (KRAS G12R)
LVVVGRRGT

SEQ ID NO: 26180 - protein, 9 aa, synthetic construct
  source 1..9: note = Seed: LVVVGARGV (KRAS G12R)
LVVVGRRGV

SEQ ID NO: 26181 - protein, 9 aa, synthetic construct
  source 1..9: note = Seed: LVVVGARGV (KRAS G12R)
LVVVGRRGW

SEQ ID NO: 26182 - protein, 9 aa, synthetic construct
  source 1..9: note = Seed: LVVVGARGV (KRAS G12R)
LVVVGRRGY

SEQ ID NO: 26183 - protein, 9 aa, synthetic construct
  source 1..9: note = Seed: LVVVGARGV (KRAS G12R)
LVVVGSRGA

SEQ ID NO: 26184 - protein, 9 aa, synthetic construct
  source 1..9: note = Seed: LVVVGARGV (KRAS G12R)
LVVVGSRGC

SEQ ID NO: 26185 - protein, 9 aa, synthetic construct
  source 1..9: note = Seed: LVVVGARGV (KRAS G12R)
LVVVGSRGF

SEQ ID NO: 26186 - protein, 9 aa, synthetic construct
  source 1..9: note = Seed: LVVVGARGV (KRAS G12R)
LVVVGSRGG

SEQ ID NO: 26187 - protein, 9 aa, synthetic construct
  source 1..9: note = Seed: LVVVGARGV (KRAS G12R)
LVVVGSRGH

SEQ ID NO: 26188 - protein, 9 aa, synthetic construct
  source 1..9: note = Seed: LVVVGARGV (KRAS G12R)
LVVVGSRGI

SEQ ID NO: 26189 - protein, 9 aa, synthetic construct
  source 1..9: note = Seed: LVVVGARGV (KRAS G12R)
LVVVGSRGK

SEQ ID NO: 26190 - protein, 9 aa, synthetic construct
  source 1..9: note = Seed: LVVVGARGV (KRAS G12R)
LVVVGSRGL

SEQ ID NO: 26191 - protein, 9 aa, synthetic construct
  source 1..9: note = Seed: LVVVGARGV (KRAS G12R)
LVVVGSRGM

SEQ ID NO: 26192 - protein, 9 aa, synthetic construct
  source 1..9: note = Seed: LVVVGARGV (KRAS G12R)
LVVVGSRGN

SEQ ID NO: 26193 - protein, 9 aa, synthetic construct
  source 1..9: note = Seed: LVVVGARGV (KRAS G12R)
LVVVGSRGQ

SEQ ID NO: 26194 - protein, 9 aa, synthetic construct
  source 1..9: note = Seed: LVVVGARGV (KRAS G12R)
LVVVGSRGR

SEQ ID NO: 26195 - protein, 9 aa, synthetic construct
  source 1..9: note = Seed: LVVVGARGV (KRAS G12R)
LVVVGSRGS

SEQ ID NO: 26196 - protein, 9 aa, synthetic construct
  source 1..9: note = Seed: LVVVGARGV (KRAS G12R)
LVVVGSRGT

SEQ ID NO: 26197 - protein, 9 aa, synthetic construct
  source 1..9: note = Seed: LVVVGARGV (KRAS G12R)
LVVVGSRGV

SEQ ID NO: 26198 - protein, 9 aa, synthetic construct
  source 1..9: note = Seed: LVVVGARGV (KRAS G12R)
LVVVGSRGY

SEQ ID NO: 26199 - protein, 9 aa, synthetic construct
  source 1..9: note = Seed: LVVVGARGV (KRAS G12R)
LVVVGTRGA

SEQ ID NO: 26200 - protein, 9 aa, synthetic construct
  source 1..9: note = Seed: LVVVGARGV (KRAS G12R)
LVVVGTRGF

SEQ ID NO: 26201 - protein, 9 aa, synthetic construct
  source 1..9: note = Seed: LVVVGARGV (KRAS G12R)
LVVVGTRGH

SEQ ID NO: 26202 - protein, 9 aa, synthetic construct
  source 1..9: note = Seed: LVVVGARGV (KRAS G12R)
LVVVGTRGI

SEQ ID NO: 26203 - protein, 9 aa, synthetic construct
  source 1..9: note = Seed: LVVVGARGV (KRAS G12R)
LVVVGTRGK

SEQ ID NO: 26204 - protein, 9 aa, synthetic construct
  source 1..9: note = Seed: LVVVGARGV (KRAS G12R)
LVVVGTRGL

SEQ ID NO: 26205 - protein, 9 aa, synthetic construct
  source 1..9: note = Seed: LVVVGARGV (KRAS G12R)
LVVVGTRGM

SEQ ID NO: 26206 - protein, 9 aa, synthetic construct
  source 1..9: note = Seed: LVVVGARGV (KRAS G12R)
LVVVGTRGQ

SEQ ID NO: 26207 - protein, 9 aa, synthetic construct
  source 1..9: note = Seed: LVVVGARGV (KRAS G12R)
LVVVGTRGR

SEQ ID NO: 26208 - protein, 9 aa, synthetic construct
  source 1..9: note = Seed: LVVVGARGV (KRAS G12R)
LVVVGTRGS

SEQ ID NO: 26209 - protein, 9 aa, synthetic construct
  source 1..9: note = Seed: LVVVGARGV (KRAS G12R)
LVVVGTRGT

SEQ ID NO: 26210 - protein, 9 aa, synthetic construct
  source 1..9: note = Seed: LVVVGARGV (KRAS G12R)
LVVVGTRGV

SEQ ID NO: 26211 - protein, 9 aa, synthetic construct
  source 1..9: note = Seed: LVVVGARGV (KRAS G12R)
LVVVGTRGY

SEQ ID NO: 26212 - protein, 9 aa, synthetic construct
  source 1..9: note = Seed: LVVVGARGV (KRAS G12R)
LVVVGVRGA

SEQ ID NO: 26213 - protein, 9 aa, synthetic construct
  source 1..9: note = Seed: LVVVGARGV (KRAS G12R)
LVVVGVRGF

SEQ ID NO: 26214 - protein, 9 aa, synthetic construct
  source 1..9: note = Seed: LVVVGARGV (KRAS G12R)
LVVVGVRGI

SEQ ID NO: 26215 - protein, 9 aa, synthetic construct
  source 1..9: note = Seed: LVVVGARGV (KRAS G12R)
LVVVGVRGK

SEQ ID NO: 26216 - protein, 9 aa, synthetic construct
  source 1..9: note = Seed: LVVVGARGV (KRAS G12R)
LVVVGVRGL

SEQ ID NO: 26217 - protein, 9 aa, synthetic construct
  source 1..9: note = Seed: LVVVGARGV (KRAS G12R)
LVVVGVRGM

SEQ ID NO: 26218 - protein, 9 aa, synthetic construct
  source 1..9: note = Seed: LVVVGARGV (KRAS G12R)
LVVVGVRGQ

SEQ ID NO: 26219 - protein, 9 aa, synthetic construct
  source 1..9: note = Seed: LVVVGARGV (KRAS G12R)
LVVVGVRGR

SEQ ID NO: 26220 - protein, 9 aa, synthetic construct
  source 1..9: note = Seed: LVVVGARGV (KRAS G12R)
LVVVGVRGS

SEQ ID NO: 26221 - protein, 9 aa, synthetic construct
  source 1..9: note = Seed: LVVVGARGV (KRAS G12R)
LVVVGVRGV

SEQ ID NO: 26222 - protein, 9 aa, synthetic construct
  source 1..9: note = Seed: LVVVGARGV (KRAS G12R)
LVVVGVRGY

SEQ ID NO: 26223 - protein, 9 aa, synthetic construct
  source 1..9: note = Seed: LVVVGARGV (KRAS G12R)
LVVVGWRGR

SEQ ID NO: 26224 - protein, 9 aa, synthetic construct
  source 1..9: note = Seed: LVVVGARGV (KRAS G12R)
LVVVGWRGY

SEQ ID NO: 26225 - protein, 9 aa, synthetic construct
  source 1..9: note = Seed: LVVVGARGV (KRAS G12R)
LVVVGYRGR

SEQ ID NO: 26226 - protein, 9 aa, synthetic construct
  source 1..9: note = Seed: LVVVGARGV (KRAS G12R)
LVVWGARGA

SEQ ID NO: 26227 - protein, 9 aa, synthetic construct
  source 1..9: note = Seed: LVVVGARGV (KRAS G12R)
LVVWGARGF

SEQ ID NO: 26228 - protein, 9 aa, synthetic construct
  source 1..9: note = Seed: LVVVGARGV (KRAS G12R)
LVVWGARGH

SEQ ID NO: 26229 - protein, 9 aa, synthetic construct
  source 1..9: note = Seed: LVVVGARGV (KRAS G12R)
LVVWGARGI

SEQ ID NO: 26230 - protein, 9 aa, synthetic construct
  source 1..9: note = Seed: LVVVGARGV (KRAS G12R)
LVVWGARGK

SEQ ID NO: 26231 - protein, 9 aa, synthetic construct
  source 1..9: note = Seed: LVVVGARGV (KRAS G12R)
LVVWGARGL

SEQ ID NO: 26232 - protein, 9 aa, synthetic construct
  source 1..9: note = Seed: LVVVGARGV (KRAS G12R)
LVVWGARGM

SEQ ID NO: 26233 - protein, 9 aa, synthetic construct
  source 1..9: note = Seed: LVVVGARGV (KRAS G12R)
LVVWGARGR

SEQ ID NO: 26234 - protein, 9 aa, synthetic construct
  source 1..9: note = Seed: LVVVGARGV (KRAS G12R)
LVVWGARGS

SEQ ID NO: 26235 - protein, 9 aa, synthetic construct
  source 1..9: note = Seed: LVVVGARGV (KRAS G12R)
LVVWGARGV

SEQ ID NO: 26236 - protein, 9 aa, synthetic construct
  source 1..9: note = Seed: LVVVGARGV (KRAS G12R)
LVVWGARGY

SEQ ID NO: 26237 - protein, 9 aa, synthetic construct
  source 1..9: note = Seed: LVVVGARGV (KRAS G12R)
LVVWGCRGR

SEQ ID NO: 26238 - protein, 9 aa, synthetic construct
  source 1..9: note = Seed: LVVVGARGV (KRAS G12R)
LVVWGDRGI

SEQ ID NO: 26239 - protein, 9 aa, synthetic construct
  source 1..9: note = Seed: LVVVGARGV (KRAS G12R)
LVVWGDRGL

SEQ ID NO: 26240 - protein, 9 aa, synthetic construct
  source 1..9: note = Seed: LVVVGARGV (KRAS G12R)
LVVWGDRGV

SEQ ID NO: 26241 - protein, 9 aa, synthetic construct
  source 1..9: note = Seed: LVVVGARGV (KRAS G12R)
LVVWGFRGR

SEQ ID NO: 26242 - protein, 9 aa, synthetic construct
  source 1..9: note = Seed: LVVVGARGV (KRAS G12R)
LVVWGGRGA

SEQ ID NO: 26243 - protein, 9 aa, synthetic construct
  source 1..9: note = Seed: LVVVGARGV (KRAS G12R)
LVVWGGRGF

SEQ ID NO: 26244 - protein, 9 aa, synthetic construct
  source 1..9: note = Seed: LVVVGARGV (KRAS G12R)
LVVWGGRGI

SEQ ID NO: 26245 - protein, 9 aa, synthetic construct
  source 1..9: note = Seed: LVVVGARGV (KRAS G12R)
LVVWGGRGK

SEQ ID NO: 26246 - protein, 9 aa, synthetic construct
  source 1..9: note = Seed: LVVVGARGV (KRAS G12R)
LVVWGGRGL

SEQ ID NO: 26247 - protein, 9 aa, synthetic construct
  source 1..9: note = Seed: LVVVGARGV (KRAS G12R)
LVVWGGRGM

SEQ ID NO: 26248 - protein, 9 aa, synthetic construct
  source 1..9: note = Seed: LVVVGARGV (KRAS G12R)
LVVWGGRGR

SEQ ID NO: 26249 - protein, 9 aa, synthetic construct
  source 1..9: note = Seed: LVVVGARGV (KRAS G12R)
LVVWGGRGV

SEQ ID NO: 26250 - protein, 9 aa, synthetic construct
  source 1..9: note = Seed: LVVVGARGV (KRAS G12R)
LVVWGHRGA

SEQ ID NO: 26251 - protein, 9 aa, synthetic construct
  source 1..9: note = Seed: LVVVGARGV (KRAS G12R)
LVVWGHRGF

SEQ ID NO: 26252 - protein, 9 aa, synthetic construct
  source 1..9: note = Seed: LVVVGARGV (KRAS G12R)
LVVWGHRGH

SEQ ID NO: 26253 - protein, 9 aa, synthetic construct
  source 1..9: note = Seed: LVVVGARGV (KRAS G12R)
LVVWGHRGI

SEQ ID NO: 26254 - protein, 9 aa, synthetic construct
  source 1..9: note = Seed: LVVVGARGV (KRAS G12R)
LVVWGHRGK

SEQ ID NO: 26255 - protein, 9 aa, synthetic construct
  source 1..9: note = Seed: LVVVGARGV (KRAS G12R)
LVVWGHRGL

SEQ ID NO: 26256 - protein, 9 aa, synthetic construct
  source 1..9: note = Seed: LVVVGARGV (KRAS G12R)
LVVWGHRGM

SEQ ID NO: 26257 - protein, 9 aa, synthetic construct
  source 1..9: note = Seed: LVVVGARGV (KRAS G12R)
LVVWGHRGQ

SEQ ID NO: 26258 - protein, 9 aa, synthetic construct
  source 1..9: note = Seed: LVVVGARGV (KRAS G12R)
LVVWGHRGR

SEQ ID NO: 26259 - protein, 9 aa, synthetic construct
  source 1..9: note = Seed: LVVVGARGV (KRAS G12R)
LVVWGHRGS

SEQ ID NO: 26260 - protein, 9 aa, synthetic construct
  source 1..9: note = Seed: LVVVGARGV (KRAS G12R)
LVVWGHRGV

SEQ ID NO: 26261 - protein, 9 aa, synthetic construct
  source 1..9: note = Seed: LVVVGARGV (KRAS G12R)
LVVWGHRGY

SEQ ID NO: 26262 - protein, 9 aa, synthetic construct
  source 1..9: note = Seed: LVVVGARGV (KRAS G12R)
LVVWGIRGA

SEQ ID NO: 26263 - protein, 9 aa, synthetic construct
  source 1..9: note = Seed: LVVVGARGV (KRAS G12R)
LVVWGIRGF

SEQ ID NO: 26264 - protein, 9 aa, synthetic construct
  source 1..9: note = Seed: LVVVGARGV (KRAS G12R)
LVVWGIRGH

SEQ ID NO: 26265 - protein, 9 aa, synthetic construct
  source 1..9: note = Seed: LVVVGARGV (KRAS G12R)
LVVWGIRGI

SEQ ID NO: 26266 - protein, 9 aa, synthetic construct
  source 1..9: note = Seed: LVVVGARGV (KRAS G12R)
LVVWGIRGK

SEQ ID NO: 26267 - protein, 9 aa, synthetic construct
  source 1..9: note = Seed: LVVVGARGV (KRAS G12R)
LVVWGIRGL

SEQ ID NO: 26268 - protein, 9 aa, synthetic construct
  source 1..9: note = Seed: LVVVGARGV (KRAS G12R)
LVVWGIRGM

SEQ ID NO: 26269 - protein, 9 aa, synthetic construct
  source 1..9: note = Seed: LVVVGARGV (KRAS G12R)
LVVWGIRGQ

SEQ ID NO: 26270 - protein, 9 aa, synthetic construct
  source 1..9: note = Seed: LVVVGARGV (KRAS G12R)
LVVWGIRGR

SEQ ID NO: 26271 - protein, 9 aa, synthetic construct
  source 1..9: note = Seed: LVVVGARGV (KRAS G12R)
LVVWGIRGS

SEQ ID NO: 26272 - protein, 9 aa, synthetic construct
  source 1..9: note = Seed: LVVVGARGV (KRAS G12R)
LVVWGIRGV

SEQ ID NO: 26273 - protein, 9 aa, synthetic construct
  source 1..9: note = Seed: LVVVGARGV (KRAS G12R)
LVVWGIRGY

SEQ ID NO: 26274 - protein, 9 aa, synthetic construct
  source 1..9: note = Seed: LVVVGARGV (KRAS G12R)
LVVWGKRGA

SEQ ID NO: 26275 - protein, 9 aa, synthetic construct
  source 1..9: note = Seed: LVVVGARGV (KRAS G12R)
LVVWGKRGC

SEQ ID NO: 26276 - protein, 9 aa, synthetic construct
  source 1..9: note = Seed: LVVVGARGV (KRAS G12R)
LVVWGKRGF

SEQ ID NO: 26277 - protein, 9 aa, synthetic construct
  source 1..9: note = Seed: LVVVGARGV (KRAS G12R)
LVVWGKRGG

SEQ ID NO: 26278 - protein, 9 aa, synthetic construct
  source 1..9: note = Seed: LVVVGARGV (KRAS G12R)
LVVWGKRGH

SEQ ID NO: 26279 - protein, 9 aa, synthetic construct
  source 1..9: note = Seed: LVVVGARGV (KRAS G12R)
LVVWGKRGI

SEQ ID NO: 26280 - protein, 9 aa, synthetic construct
  source 1..9: note = Seed: LVVVGARGV (KRAS G12R)
LVVWGKRGK

SEQ ID NO: 26281 - protein, 9 aa, synthetic construct
  source 1..9: note = Seed: LVVVGARGV (KRAS G12R)
LVVWGKRGL

SEQ ID NO: 26282 - protein, 9 aa, synthetic construct
  source 1..9: note = Seed: LVVVGARGV (KRAS G12R)
LVVWGKRGM

SEQ ID NO: 26283 - protein, 9 aa, synthetic construct
  source 1..9: note = Seed: LVVVGARGV (KRAS G12R)
LVVWGKRGN

SEQ ID NO: 26284 - protein, 9 aa, synthetic construct
  source 1..9: note = Seed: LVVVGARGV (KRAS G12R)
LVVWGKRGP

SEQ ID NO: 26285 - protein, 9 aa, synthetic construct
  source 1..9: note = Seed: LVVVGARGV (KRAS G12R)
LVVWGKRGQ

SEQ ID NO: 26286 - protein, 9 aa, synthetic construct
  source 1..9: note = Seed: LVVVGARGV (KRAS G12R)
LVVWGKRGR

SEQ ID NO: 26287 - protein, 9 aa, synthetic construct
  source 1..9: note = Seed: LVVVGARGV (KRAS G12R)
LVVWGKRGS

SEQ ID NO: 26288 - protein, 9 aa, synthetic construct
  source 1..9: note = Seed: LVVVGARGV (KRAS G12R)
LVVWGKRGT

SEQ ID NO: 26289 - protein, 9 aa, synthetic construct
  source 1..9: note = Seed: LVVVGARGV (KRAS G12R)
LVVWGKRGV

SEQ ID NO: 26290 - protein, 9 aa, synthetic construct
  source 1..9: note = Seed: LVVVGARGV (KRAS G12R)
LVVWGKRGW

SEQ ID NO: 26291 - protein, 9 aa, synthetic construct
  source 1..9: note = Seed: LVVVGARGV (KRAS G12R)
LVVWGKRGY

SEQ ID NO: 26292 - protein, 9 aa, synthetic construct
  source 1..9: note = Seed: LVVVGARGV (KRAS G12R)
LVVWGLRGA

SEQ ID NO: 26293 - protein, 9 aa, synthetic construct
  source 1..9: note = Seed: LVVVGARGV (KRAS G12R)
LVVWGLRGH

SEQ ID NO: 26294 - protein, 9 aa, synthetic construct
  source 1..9: note = Seed: LVVVGARGV (KRAS G12R)
LVVWGLRGI

SEQ ID NO: 26295 - protein, 9 aa, synthetic construct
  source 1..9: note = Seed: LVVVGARGV (KRAS G12R)
LVVWGLRGK

SEQ ID NO: 26296 - protein, 9 aa, synthetic construct
  source 1..9: note = Seed: LVVVGARGV (KRAS G12R)
LVVWGLRGL

SEQ ID NO: 26297 - protein, 9 aa, synthetic construct
  source 1..9: note = Seed: LVVVGARGV (KRAS G12R)
LVVWGLRGM

SEQ ID NO: 26298 - protein, 9 aa, synthetic construct
  source 1..9: note = Seed: LVVVGARGV (KRAS G12R)
LVVWGLRGR

SEQ ID NO: 26299 - protein, 9 aa, synthetic construct
  source 1..9: note = Seed: LVVVGARGV (KRAS G12R)
LVVWGLRGY

SEQ ID NO: 26300 - protein, 9 aa, synthetic construct
  source 1..9: note = Seed: LVVVGARGV (KRAS G12R)
LVVWGMRGA

SEQ ID NO: 26301 - protein, 9 aa, synthetic construct
  source 1..9: note = Seed: LVVVGARGV (KRAS G12R)
LVVWGMRGF

SEQ ID NO: 26302 - protein, 9 aa, synthetic construct
  source 1..9: note = Seed: LVVVGARGV (KRAS G12R)
LVVWGMRGH

SEQ ID NO: 26303 - protein, 9 aa, synthetic construct
  source 1..9: note = Seed: LVVVGARGV (KRAS G12R)
LVVWGMRGI

SEQ ID NO: 26304 - protein, 9 aa, synthetic construct
  source 1..9: note = Seed: LVVVGARGV (KRAS G12R)
LVVWGMRGK

SEQ ID NO: 26305 - protein, 9 aa, synthetic construct
  source 1..9: note = Seed: LVVVGARGV (KRAS G12R)
LVVWGMRGL

SEQ ID NO: 26306 - protein, 9 aa, synthetic construct
  source 1..9: note = Seed: LVVVGARGV (KRAS G12R)
LVVWGMRGM

SEQ ID NO: 26307 - protein, 9 aa, synthetic construct
  source 1..9: note = Seed: LVVVGARGV (KRAS G12R)
LVVWGMRGR

SEQ ID NO: 26308 - protein, 9 aa, synthetic construct
  source 1..9: note = Seed: LVVVGARGV (KRAS G12R)
LVVWGMRGV

SEQ ID NO: 26309 - protein, 9 aa, synthetic construct
  source 1..9: note = Seed: LVVVGARGV (KRAS G12R)
LVVWGMRGY

SEQ ID NO: 26310 - protein, 9 aa, synthetic construct
  source 1..9: note = Seed: LVVVGARGV (KRAS G12R)
LVVWGNRGA

SEQ ID NO: 26311 - protein, 9 aa, synthetic construct
  source 1..9: note = Seed: LVVVGARGV (KRAS G12R)
LVVWGNRGF

SEQ ID NO: 26312 - protein, 9 aa, synthetic construct
  source 1..9: note = Seed: LVVVGARGV (KRAS G12R)
LVVWGNRGH

SEQ ID NO: 26313 - protein, 9 aa, synthetic construct
  source 1..9: note = Seed: LVVVGARGV (KRAS G12R)
LVVWGNRGI

SEQ ID NO: 26314 - protein, 9 aa, synthetic construct
  source 1..9: note = Seed: LVVVGARGV (KRAS G12R)
LVVWGNRGK

SEQ ID NO: 26315 - protein, 9 aa, synthetic construct
  source 1..9: note = Seed: LVVVGARGV (KRAS G12R)
LVVWGNRGL

SEQ ID NO: 26316 - protein, 9 aa, synthetic construct
  source 1..9: note = Seed: LVVVGARGV (KRAS G12R)
LVVWGNRGM

SEQ ID NO: 26317 - protein, 9 aa, synthetic construct
  source 1..9: note = Seed: LVVVGARGV (KRAS G12R)
LVVWGNRGR

SEQ ID NO: 26318 - protein, 9 aa, synthetic construct
  source 1..9: note = Seed: LVVVGARGV (KRAS G12R)
LVVWGNRGS

SEQ ID NO: 26319 - protein, 9 aa, synthetic construct
  source 1..9: note = Seed: LVVVGARGV (KRAS G12R)
LVVWGNRGT

SEQ ID NO: 26320 - protein, 9 aa, synthetic construct
  source 1..9: note = Seed: LVVVGARGV (KRAS G12R)
LVVWGNRGV

SEQ ID NO: 26321 - protein, 9 aa, synthetic construct
  source 1..9: note = Seed: LVVVGARGV (KRAS G12R)
LVVWGNRGY

SEQ ID NO: 26322 - protein, 9 aa, synthetic construct
  source 1..9: note = Seed: LVVVGARGV (KRAS G12R)
LVVWGPRGK

SEQ ID NO: 26323 - protein, 9 aa, synthetic construct
  source 1..9: note = Seed: LVVVGARGV (KRAS G12R)
LVVWGPRGL

SEQ ID NO: 26324 - protein, 9 aa, synthetic construct
  source 1..9: note = Seed: LVVVGARGV (KRAS G12R)
LVVWGPRGM

SEQ ID NO: 26325 - protein, 9 aa, synthetic construct
  source 1..9: note = Seed: LVVVGARGV (KRAS G12R)
LVVWGPRGR

SEQ ID NO: 26326 - protein, 9 aa, synthetic construct
  source 1..9: note = Seed: LVVVGARGV (KRAS G12R)
LVVWGPRGY

SEQ ID NO: 26327 - protein, 9 aa, synthetic construct
  source 1..9: note = Seed: LVVVGARGV (KRAS G12R)
LVVWGQRGK

SEQ ID NO: 26328 - protein, 9 aa, synthetic construct
  source 1..9: note = Seed: LVVVGARGV (KRAS G12R)
LVVWGQRGL

SEQ ID NO: 26329 - protein, 9 aa, synthetic construct
  source 1..9: note = Seed: LVVVGARGV (KRAS G12R)
LVVWGQRGM

SEQ ID NO: 26330 - protein, 9 aa, synthetic construct
  source 1..9: note = Seed: LVVVGARGV (KRAS G12R)
LVVWGQRGR

SEQ ID NO: 26331 - protein, 9 aa, synthetic construct
  source 1..9: note = Seed: LVVVGARGV (KRAS G12R)
LVVWGRRGA

SEQ ID NO: 26332 - protein, 9 aa, synthetic construct
  source 1..9: note = Seed: LVVVGARGV (KRAS G12R)
LVVWGRRGC

SEQ ID NO: 26333 - protein, 9 aa, synthetic construct
  source 1..9: note = Seed: LVVVGARGV (KRAS G12R)
LVVWGRRGE

SEQ ID NO: 26334 - protein, 9 aa, synthetic construct
  source 1..9: note = Seed: LVVVGARGV (KRAS G12R)
LVVWGRRGF

SEQ ID NO: 26335 - protein, 9 aa, synthetic construct
  source 1..9: note = Seed: LVVVGARGV (KRAS G12R)
LVVWGRRGG

SEQ ID NO: 26336 - protein, 9 aa, synthetic construct
  source 1..9: note = Seed: LVVVGARGV (KRAS G12R)
LVVWGRRGH

SEQ ID NO: 26337 - protein, 9 aa, synthetic construct
  source 1..9: note = Seed: LVVVGARGV (KRAS G12R)
LVVWGRRGI

SEQ ID NO: 26338 - protein, 9 aa, synthetic construct
  source 1..9: note = Seed: LVVVGARGV (KRAS G12R)
LVVWGRRGK

SEQ ID NO: 26339 - protein, 9 aa, synthetic construct
  source 1..9: note = Seed: LVVVGARGV (KRAS G12R)
LVVWGRRGL

SEQ ID NO: 26340 - protein, 9 aa, synthetic construct
  source 1..9: note = Seed: LVVVGARGV (KRAS G12R)
LVVWGRRGM

SEQ ID NO: 26341 - protein, 9 aa, synthetic construct
  source 1..9: note = Seed: LVVVGARGV (KRAS G12R)
LVVWGRRGN

SEQ ID NO: 26342 - protein, 9 aa, synthetic construct
  source 1..9: note = Seed: LVVVGARGV (KRAS G12R)
LVVWGRRGP

SEQ ID NO: 26343 - protein, 9 aa, synthetic construct
  source 1..9: note = Seed: LVVVGARGV (KRAS G12R)
LVVWGRRGQ

SEQ ID NO: 26344 - protein, 9 aa, synthetic construct
  source 1..9: note = Seed: LVVVGARGV (KRAS G12R)
LVVWGRRGR

SEQ ID NO: 26345 - protein, 9 aa, synthetic construct
  source 1..9: note = Seed: LVVVGARGV (KRAS G12R)
LVVWGRRGS

SEQ ID NO: 26346 - protein, 9 aa, synthetic construct
  source 1..9: note = Seed: LVVVGARGV (KRAS G12R)
LVVWGRRGT

SEQ ID NO: 26347 - protein, 9 aa, synthetic construct
  source 1..9: note = Seed: LVVVGARGV (KRAS G12R)
LVVWGRRGV

SEQ ID NO: 26348 - protein, 9 aa, synthetic construct
  source 1..9: note = Seed: LVVVGARGV (KRAS G12R)
LVVWGRRGW

SEQ ID NO: 26349 - protein, 9 aa, synthetic construct
  source 1..9: note = Seed: LVVVGARGV (KRAS G12R)
LVVWGRRGY

SEQ ID NO: 26350 - protein, 9 aa, synthetic construct
  source 1..9: note = Seed: LVVVGARGV (KRAS G12R)
LVVWGSRGA

SEQ ID NO: 26351 - protein, 9 aa, synthetic construct
  source 1..9: note = Seed: LVVVGARGV (KRAS G12R)
LVVWGSRGF

SEQ ID NO: 26352 - protein, 9 aa, synthetic construct
  source 1..9: note = Seed: LVVVGARGV (KRAS G12R)
LVVWGSRGH

SEQ ID NO: 26353 - protein, 9 aa, synthetic construct
  source 1..9: note = Seed: LVVVGARGV (KRAS G12R)
LVVWGSRGI

SEQ ID NO: 26354 - protein, 9 aa, synthetic construct
  source 1..9: note = Seed: LVVVGARGV (KRAS G12R)
LVVWGSRGK

SEQ ID NO: 26355 - protein, 9 aa, synthetic construct
  source 1..9: note = Seed: LVVVGARGV (KRAS G12R)
LVVWGSRGL

SEQ ID NO: 26356 - protein, 9 aa, synthetic construct
  source 1..9: note = Seed: LVVVGARGV (KRAS G12R)
LVVWGSRGM

SEQ ID NO: 26357 - protein, 9 aa, synthetic construct
  source 1..9: note = Seed: LVVVGARGV (KRAS G12R)
LVVWGSRGR

SEQ ID NO: 26358 - protein, 9 aa, synthetic construct
  source 1..9: note = Seed: LVVVGARGV (KRAS G12R)
LVVWGSRGS

SEQ ID NO: 26359 - protein, 9 aa, synthetic construct
  source 1..9: note = Seed: LVVVGARGV (KRAS G12R)
LVVWGSRGT

SEQ ID NO: 26360 - protein, 9 aa, synthetic construct
  source 1..9: note = Seed: LVVVGARGV (KRAS G12R)
LVVWGSRGV

SEQ ID NO: 26361 - protein, 9 aa, synthetic construct
  source 1..9: note = Seed: LVVVGARGV (KRAS G12R)
LVVWGSRGY

SEQ ID NO: 26362 - protein, 9 aa, synthetic construct
  source 1..9: note = Seed: LVVVGARGV (KRAS G12R)
LVVWGTRGA

SEQ ID NO: 26363 - protein, 9 aa, synthetic construct
  source 1..9: note = Seed: LVVVGARGV (KRAS G12R)
LVVWGTRGF

SEQ ID NO: 26364 - protein, 9 aa, synthetic construct
  source 1..9: note = Seed: LVVVGARGV (KRAS G12R)
LVVWGTRGH

SEQ ID NO: 26365 - protein, 9 aa, synthetic construct
  source 1..9: note = Seed: LVVVGARGV (KRAS G12R)
LVVWGTRGI

SEQ ID NO: 26366 - protein, 9 aa, synthetic construct
  source 1..9: note = Seed: LVVVGARGV (KRAS G12R)
LVVWGTRGK

SEQ ID NO: 26367 - protein, 9 aa, synthetic construct
  source 1..9: note = Seed: LVVVGARGV (KRAS G12R)
LVVWGTRGL

SEQ ID NO: 26368 - protein, 9 aa, synthetic construct
  source 1..9: note = Seed: LVVVGARGV (KRAS G12R)
LVVWGTRGM

SEQ ID NO: 26369 - protein, 9 aa, synthetic construct
  source 1..9: note = Seed: LVVVGARGV (KRAS G12R)
LVVWGTRGR

SEQ ID NO: 26370 - protein, 9 aa, synthetic construct
  source 1..9: note = Seed: LVVVGARGV (KRAS G12R)
LVVWGTRGV

SEQ ID NO: 26371 - protein, 9 aa, synthetic construct
  source 1..9: note = Seed: LVVVGARGV (KRAS G12R)
LVVWGTRGY

SEQ ID NO: 26372 - protein, 9 aa, synthetic construct
  source 1..9: note = Seed: LVVVGARGV (KRAS G12R)
LVVWGVRGA

SEQ ID NO: 26373 - protein, 9 aa, synthetic construct
  source 1..9: note = Seed: LVVVGARGV (KRAS G12R)
LVVWGVRGF

SEQ ID NO: 26374 - protein, 9 aa, synthetic construct
  source 1..9: note = Seed: LVVVGARGV (KRAS G12R)
LVVWGVRGH

SEQ ID NO: 26375 - protein, 9 aa, synthetic construct
  source 1..9: note = Seed: LVVVGARGV (KRAS G12R)
LVVWGVRGI

SEQ ID NO: 26376 - protein, 9 aa, synthetic construct
  source 1..9: note = Seed: LVVVGARGV (KRAS G12R)
LVVWGVRGK

SEQ ID NO: 26377 - protein, 9 aa, synthetic construct
  source 1..9: note = Seed: LVVVGARGV (KRAS G12R)
LVVWGVRGL

SEQ ID NO: 26378 - protein, 9 aa, synthetic construct
  source 1..9: note = Seed: LVVVGARGV (KRAS G12R)
LVVWGVRGM

SEQ ID NO: 26379 - protein, 9 aa, synthetic construct
  source 1..9: note = Seed: LVVVGARGV (KRAS G12R)
LVVWGVRGR

SEQ ID NO: 26380 - protein, 9 aa, synthetic construct
  source 1..9: note = Seed: LVVVGARGV (KRAS G12R)
LVVWGVRGS

SEQ ID NO: 26381 - protein, 9 aa, synthetic construct
  source 1..9: note = Seed: LVVVGARGV (KRAS G12R)
LVVWGVRGV

SEQ ID NO: 26382 - protein, 9 aa, synthetic construct
  source 1..9: note = Seed: LVVVGARGV (KRAS G12R)
LVVWGVRGY

SEQ ID NO: 26383 - protein, 9 aa, synthetic construct
  source 1..9: note = Seed: LVVVGARGV (KRAS G12R)
LVVWGWRGR

SEQ ID NO: 26384 - protein, 9 aa, synthetic construct
  source 1..9: note = Seed: LVVVGARGV (KRAS G12R)
LVVWGYRGR

SEQ ID NO: 26385 - protein, 9 aa, synthetic construct
  source 1..9: note = Seed: LVVVGARGV (KRAS G12R)
LVVYGARGA

SEQ ID NO: 26386 - protein, 9 aa, synthetic construct
  source 1..9: note = Seed: LVVVGARGV (KRAS G12R)
LVVYGARGF

SEQ ID NO: 26387 - protein, 9 aa, synthetic construct
  source 1..9: note = Seed: LVVVGARGV (KRAS G12R)
LVVYGARGG

SEQ ID NO: 26388 - protein, 9 aa, synthetic construct
  source 1..9: note = Seed: LVVVGARGV (KRAS G12R)
LVVYGARGH

SEQ ID NO: 26389 - protein, 9 aa, synthetic construct
  source 1..9: note = Seed: LVVVGARGV (KRAS G12R)
LVVYGARGI

SEQ ID NO: 26390 - protein, 9 aa, synthetic construct
  source 1..9: note = Seed: LVVVGARGV (KRAS G12R)
LVVYGARGK

SEQ ID NO: 26391 - protein, 9 aa, synthetic construct
  source 1..9: note = Seed: LVVVGARGV (KRAS G12R)
LVVYGARGL

SEQ ID NO: 26392 - protein, 9 aa, synthetic construct
  source 1..9: note = Seed: LVVVGARGV (KRAS G12R)
LVVYGARGM

SEQ ID NO: 26393 - protein, 9 aa, synthetic construct
  source 1..9: note = Seed: LVVVGARGV (KRAS G12R)
LVVYGARGR

SEQ ID NO: 26394 - protein, 9 aa, synthetic construct
  source 1..9: note = Seed: LVVVGARGV (KRAS G12R)
LVVYGARGS

SEQ ID NO: 26395 - protein, 9 aa, synthetic construct
  source 1..9: note = Seed: LVVVGARGV (KRAS G12R)
LVVYGARGT

SEQ ID NO: 26396 - protein, 9 aa, synthetic construct
  source 1..9: note = Seed: LVVVGARGV (KRAS G12R)
LVVYGARGV

SEQ ID NO: 26397 - protein, 9 aa, synthetic construct
  source 1..9: note = Seed: LVVVGARGV (KRAS G12R)
LVVYGARGY

SEQ ID NO: 26398 - protein, 9 aa, synthetic construct
  source 1..9: note = Seed: LVVVGARGV (KRAS G12R)
LVVYGCRGR

SEQ ID NO: 26399 - protein, 9 aa, synthetic construct
  source 1..9: note = Seed: LVVVGARGV (KRAS G12R)
LVVYGDRGA

SEQ ID NO: 26400 - protein, 9 aa, synthetic construct
  source 1..9: note = Seed: LVVVGARGV (KRAS G12R)
LVVYGDRGF

SEQ ID NO: 26401 - protein, 9 aa, synthetic construct
  source 1..9: note = Seed: LVVVGARGV (KRAS G12R)
LVVYGDRGI

SEQ ID NO: 26402 - protein, 9 aa, synthetic construct
  source 1..9: note = Seed: LVVVGARGV (KRAS G12R)
LVVYGDRGL

SEQ ID NO: 26403 - protein, 9 aa, synthetic construct
  source 1..9: note = Seed: LVVVGARGV (KRAS G12R)
LVVYGDRGM

SEQ ID NO: 26404 - protein, 9 aa, synthetic construct
  source 1..9: note = Seed: LVVVGARGV (KRAS G12R)
LVVYGDRGV

SEQ ID NO: 26405 - protein, 9 aa, synthetic construct
  source 1..9: note = Seed: LVVVGARGV (KRAS G12R)
LVVYGFRGR

SEQ ID NO: 26406 - protein, 9 aa, synthetic construct
  source 1..9: note = Seed: LVVVGARGV (KRAS G12R)
LVVYGGRGA

SEQ ID NO: 26407 - protein, 9 aa, synthetic construct
  source 1..9: note = Seed: LVVVGARGV (KRAS G12R)
LVVYGGRGF

SEQ ID NO: 26408 - protein, 9 aa, synthetic construct
  source 1..9: note = Seed: LVVVGARGV (KRAS G12R)
LVVYGGRGH

SEQ ID NO: 26409 - protein, 9 aa, synthetic construct
  source 1..9: note = Seed: LVVVGARGV (KRAS G12R)
LVVYGGRGI

SEQ ID NO: 26410 - protein, 9 aa, synthetic construct
  source 1..9: note = Seed: LVVVGARGV (KRAS G12R)
LVVYGGRGK

SEQ ID NO: 26411 - protein, 9 aa, synthetic construct
  source 1..9: note = Seed: LVVVGARGV (KRAS G12R)
LVVYGGRGL

SEQ ID NO: 26412 - protein, 9 aa, synthetic construct
  source 1..9: note = Seed: LVVVGARGV (KRAS G12R)
LVVYGGRGM

SEQ ID NO: 26413 - protein, 9 aa, synthetic construct
  source 1..9: note = Seed: LVVVGARGV (KRAS G12R)
LVVYGGRGR

SEQ ID NO: 26414 - protein, 9 aa, synthetic construct
  source 1..9: note = Seed: LVVVGARGV (KRAS G12R)
LVVYGGRGS

SEQ ID NO: 26415 - protein, 9 aa, synthetic construct
  source 1..9: note = Seed: LVVVGARGV (KRAS G12R)
LVVYGGRGT

SEQ ID NO: 26416 - protein, 9 aa, synthetic construct
  source 1..9: note = Seed: LVVVGARGV (KRAS G12R)
LVVYGGRGV

SEQ ID NO: 26417 - protein, 9 aa, synthetic construct
  source 1..9: note = Seed: LVVVGARGV (KRAS G12R)
LVVYGGRGY

SEQ ID NO: 26418 - protein, 9 aa, synthetic construct
  source 1..9: note = Seed: LVVVGARGV (KRAS G12R)
LVVYGHRGA

SEQ ID NO: 26419 - protein, 9 aa, synthetic construct
  source 1..9: note = Seed: LVVVGARGV (KRAS G12R)
LVVYGHRGF

SEQ ID NO: 26420 - protein, 9 aa, synthetic construct
  source 1..9: note = Seed: LVVVGARGV (KRAS G12R)
LVVYGHRGH

SEQ ID NO: 26421 - protein, 9 aa, synthetic construct
  source 1..9: note = Seed: LVVVGARGV (KRAS G12R)
LVVYGHRGI

SEQ ID NO: 26422 - protein, 9 aa, synthetic construct
  source 1..9: note = Seed: LVVVGARGV (KRAS G12R)
LVVYGHRGK

SEQ ID NO: 26423 - protein, 9 aa, synthetic construct
  source 1..9: note = Seed: LVVVGARGV (KRAS G12R)
LVVYGHRGL

SEQ ID NO: 26424 - protein, 9 aa, synthetic construct
  source 1..9: note = Seed: LVVVGARGV (KRAS G12R)
LVVYGHRGM

SEQ ID NO: 26425 - protein, 9 aa, synthetic construct
  source 1..9: note = Seed: LVVVGARGV (KRAS G12R)
LVVYGHRGQ

SEQ ID NO: 26426 - protein, 9 aa, synthetic construct
  source 1..9: note = Seed: LVVVGARGV (KRAS G12R)
LVVYGHRGR

SEQ ID NO: 26427 - protein, 9 aa, synthetic construct
  source 1..9: note = Seed: LVVVGARGV (KRAS G12R)
LVVYGHRGS

SEQ ID NO: 26428 - protein, 9 aa, synthetic construct
  source 1..9: note = Seed: LVVVGARGV (KRAS G12R)
LVVYGHRGT

SEQ ID NO: 26429 - protein, 9 aa, synthetic construct
  source 1..9: note = Seed: LVVVGARGV (KRAS G12R)
LVVYGHRGV

SEQ ID NO: 26430 - protein, 9 aa, synthetic construct
  source 1..9: note = Seed: LVVVGARGV (KRAS G12R)
LVVYGHRGY

SEQ ID NO: 26431 - protein, 9 aa, synthetic construct
  source 1..9: note = Seed: LVVVGARGV (KRAS G12R)
LVVYGIRGA

SEQ ID NO: 26432 - protein, 9 aa, synthetic construct
  source 1..9: note = Seed: LVVVGARGV (KRAS G12R)
LVVYGIRGF

SEQ ID NO: 26433 - protein, 9 aa, synthetic construct
  source 1..9: note = Seed: LVVVGARGV (KRAS G12R)
LVVYGIRGH

SEQ ID NO: 26434 - protein, 9 aa, synthetic construct
  source 1..9: note = Seed: LVVVGARGV (KRAS G12R)
LVVYGIRGI

SEQ ID NO: 26435 - protein, 9 aa, synthetic construct
  source 1..9: note = Seed: LVVVGARGV (KRAS G12R)
LVVYGIRGK

SEQ ID NO: 26436 - protein, 9 aa, synthetic construct
  source 1..9: note = Seed: LVVVGARGV (KRAS G12R)
LVVYGIRGL

SEQ ID NO: 26437 - protein, 9 aa, synthetic construct
  source 1..9: note = Seed: LVVVGARGV (KRAS G12R)
LVVYGIRGM

SEQ ID NO: 26438 - protein, 9 aa, synthetic construct
  source 1..9: note = Seed: LVVVGARGV (KRAS G12R)
LVVYGIRGQ

SEQ ID NO: 26439 - protein, 9 aa, synthetic construct
  source 1..9: note = Seed: LVVVGARGV (KRAS G12R)
LVVYGIRGR

SEQ ID NO: 26440 - protein, 9 aa, synthetic construct
  source 1..9: note = Seed: LVVVGARGV (KRAS G12R)
LVVYGIRGS

SEQ ID NO: 26441 - protein, 9 aa, synthetic construct
  source 1..9: note = Seed: LVVVGARGV (KRAS G12R)
LVVYGIRGV

SEQ ID NO: 26442 - protein, 9 aa, synthetic construct
  source 1..9: note = Seed: LVVVGARGV (KRAS G12R)
LVVYGIRGY

SEQ ID NO: 26443 - protein, 9 aa, synthetic construct
  source 1..9: note = Seed: LVVVGARGV (KRAS G12R)
LVVYGKRGA

SEQ ID NO: 26444 - protein, 9 aa, synthetic construct
  source 1..9: note = Seed: LVVVGARGV (KRAS G12R)
LVVYGKRGF

SEQ ID NO: 26445 - protein, 9 aa, synthetic construct
  source 1..9: note = Seed: LVVVGARGV (KRAS G12R)
LVVYGKRGG

SEQ ID NO: 26446 - protein, 9 aa, synthetic construct
  source 1..9: note = Seed: LVVVGARGV (KRAS G12R)
LVVYGKRGH

SEQ ID NO: 26447 - protein, 9 aa, synthetic construct
  source 1..9: note = Seed: LVVVGARGV (KRAS G12R)
LVVYGKRGI

SEQ ID NO: 26448 - protein, 9 aa, synthetic construct
  source 1..9: note = Seed: LVVVGARGV (KRAS G12R)
LVVYGKRGK

SEQ ID NO: 26449 - protein, 9 aa, synthetic construct
  source 1..9: note = Seed: LVVVGARGV (KRAS G12R)
LVVYGKRGL

SEQ ID NO: 26450 - protein, 9 aa, synthetic construct
  source 1..9: note = Seed: LVVVGARGV (KRAS G12R)
LVVYGKRGM

SEQ ID NO: 26451 - protein, 9 aa, synthetic construct
  source 1..9: note = Seed: LVVVGARGV (KRAS G12R)
LVVYGKRGN

SEQ ID NO: 26452 - protein, 9 aa, synthetic construct
  source 1..9: note = Seed: LVVVGARGV (KRAS G12R)
LVVYGKRGP

SEQ ID NO: 26453 - protein, 9 aa, synthetic construct
  source 1..9: note = Seed: LVVVGARGV (KRAS G12R)
LVVYGKRGQ

SEQ ID NO: 26454 - protein, 9 aa, synthetic construct
  source 1..9: note = Seed: LVVVGARGV (KRAS G12R)
LVVYGKRGR

SEQ ID NO: 26455 - protein, 9 aa, synthetic construct
  source 1..9: note = Seed: LVVVGARGV (KRAS G12R)
LVVYGKRGS

SEQ ID NO: 26456 - protein, 9 aa, synthetic construct
  source 1..9: note = Seed: LVVVGARGV (KRAS G12R)
LVVYGKRGT

SEQ ID NO: 26457 - protein, 9 aa, synthetic construct
  source 1..9: note = Seed: LVVVGARGV (KRAS G12R)
LVVYGKRGV

SEQ ID NO: 26458 - protein, 9 aa, synthetic construct
  source 1..9: note = Seed: LVVVGARGV (KRAS G12R)
LVVYGKRGW

SEQ ID NO: 26459 - protein, 9 aa, synthetic construct
  source 1..9: note = Seed: LVVVGARGV (KRAS G12R)
LVVYGKRGY

SEQ ID NO: 26460 - protein, 9 aa, synthetic construct
  source 1..9: note = Seed: LVVVGARGV (KRAS G12R)
LVVYGLRGA

SEQ ID NO: 26461 - protein, 9 aa, synthetic construct
  source 1..9: note = Seed: LVVVGARGV (KRAS G12R)
LVVYGLRGF

SEQ ID NO: 26462 - protein, 9 aa, synthetic construct
  source 1..9: note = Seed: LVVVGARGV (KRAS G12R)
LVVYGLRGH

SEQ ID NO: 26463 - protein, 9 aa, synthetic construct
  source 1..9: note = Seed: LVVVGARGV (KRAS G12R)
LVVYGLRGK

SEQ ID NO: 26464 - protein, 9 aa, synthetic construct
  source 1..9: note = Seed: LVVVGARGV (KRAS G12R)
LVVYGLRGL

SEQ ID NO: 26465 - protein, 9 aa, synthetic construct
  source 1..9: note = Seed: LVVVGARGV (KRAS G12R)
LVVYGLRGM

SEQ ID NO: 26466 - protein, 9 aa, synthetic construct
  source 1..9: note = Seed: LVVVGARGV (KRAS G12R)
LVVYGLRGQ

SEQ ID NO: 26467 - protein, 9 aa, synthetic construct
  source 1..9: note = Seed: LVVVGARGV (KRAS G12R)
LVVYGLRGR

SEQ ID NO: 26468 - protein, 9 aa, synthetic construct
  source 1..9: note = Seed: LVVVGARGV (KRAS G12R)
LVVYGLRGV

SEQ ID NO: 26469 - protein, 9 aa, synthetic construct
  source 1..9: note = Seed: LVVVGARGV (KRAS G12R)
LVVYGLRGY

SEQ ID NO: 26470 - protein, 9 aa, synthetic construct
  source 1..9: note = Seed: LVVVGARGV (KRAS G12R)
LVVYGMRGA

SEQ ID NO: 26471 - protein, 9 aa, synthetic construct
  source 1..9: note = Seed: LVVVGARGV (KRAS G12R)
LVVYGMRGF

SEQ ID NO: 26472 - protein, 9 aa, synthetic construct
  source 1..9: note = Seed: LVVVGARGV (KRAS G12R)
LVVYGMRGH

SEQ ID NO: 26473 - protein, 9 aa, synthetic construct
  source 1..9: note = Seed: LVVVGARGV (KRAS G12R)
LVVYGMRGI

SEQ ID NO: 26474 - protein, 9 aa, synthetic construct
  source 1..9: note = Seed: LVVVGARGV (KRAS G12R)
LVVYGMRGK

SEQ ID NO: 26475 - protein, 9 aa, synthetic construct
  source 1..9: note = Seed: LVVVGARGV (KRAS G12R)
LVVYGMRGL

SEQ ID NO: 26476 - protein, 9 aa, synthetic construct
  source 1..9: note = Seed: LVVVGARGV (KRAS G12R)
LVVYGMRGM

SEQ ID NO: 26477 - protein, 9 aa, synthetic construct
  source 1..9: note = Seed: LVVVGARGV (KRAS G12R)
LVVYGMRGQ

SEQ ID NO: 26478 - protein, 9 aa, synthetic construct
  source 1..9: note = Seed: LVVVGARGV (KRAS G12R)
LVVYGMRGR

SEQ ID NO: 26479 - protein, 9 aa, synthetic construct
  source 1..9: note = Seed: LVVVGARGV (KRAS G12R)
LVVYGMRGV

SEQ ID NO: 26480 - protein, 9 aa, synthetic construct
  source 1..9: note = Seed: LVVVGARGV (KRAS G12R)
LVVYGMRGY

SEQ ID NO: 26481 - protein, 9 aa, synthetic construct
  source 1..9: note = Seed: LVVVGARGV (KRAS G12R)
LVVYGNRGA

SEQ ID NO: 26482 - protein, 9 aa, synthetic construct
  source 1..9: note = Seed: LVVVGARGV (KRAS G12R)
LVVYGNRGC

SEQ ID NO: 26483 - protein, 9 aa, synthetic construct
  source 1..9: note = Seed: LVVVGARGV (KRAS G12R)
LVVYGNRGE

SEQ ID NO: 26484 - protein, 9 aa, synthetic construct
  source 1..9: note = Seed: LVVVGARGV (KRAS G12R)
LVVYGNRGF

SEQ ID NO: 26485 - protein, 9 aa, synthetic construct
  source 1..9: note = Seed: LVVVGARGV (KRAS G12R)
LVVYGNRGG

SEQ ID NO: 26486 - protein, 9 aa, synthetic construct
  source 1..9: note = Seed: LVVVGARGV (KRAS G12R)
LVVYGNRGH

SEQ ID NO: 26487 - protein, 9 aa, synthetic construct
  source 1..9: note = Seed: LVVVGARGV (KRAS G12R)
LVVYGNRGI

SEQ ID NO: 26488 - protein, 9 aa, synthetic construct
  source 1..9: note = Seed: LVVVGARGV (KRAS G12R)
LVVYGNRGK

SEQ ID NO: 26489 - protein, 9 aa, synthetic construct
  source 1..9: note = Seed: LVVVGARGV (KRAS G12R)
LVVYGNRGL

SEQ ID NO: 26490 - protein, 9 aa, synthetic construct
  source 1..9: note = Seed: LVVVGARGV (KRAS G12R)
LVVYGNRGM

SEQ ID NO: 26491 - protein, 9 aa, synthetic construct
  source 1..9: note = Seed: LVVVGARGV (KRAS G12R)
LVVYGNRGN

SEQ ID NO: 26492 - protein, 9 aa, synthetic construct
  source 1..9: note = Seed: LVVVGARGV (KRAS G12R)
LVVYGNRGP

SEQ ID NO: 26493 - protein, 9 aa, synthetic construct
  source 1..9: note = Seed: LVVVGARGV (KRAS G12R)
LVVYGNRGQ

SEQ ID NO: 26494 - protein, 9 aa, synthetic construct
  source 1..9: note = Seed: LVVVGARGV (KRAS G12R)
LVVYGNRGR

SEQ ID NO: 26495 - protein, 9 aa, synthetic construct
  source 1..9: note = Seed: LVVVGARGV (KRAS G12R)
LVVYGNRGS

SEQ ID NO: 26496 - protein, 9 aa, synthetic construct
  source 1..9: note = Seed: LVVVGARGV (KRAS G12R)
LVVYGNRGT

SEQ ID NO: 26497 - protein, 9 aa, synthetic construct
  source 1..9: note = Seed: LVVVGARGV (KRAS G12R)
LVVYGNRGV

SEQ ID NO: 26498 - protein, 9 aa, synthetic construct
  source 1..9: note = Seed: LVVVGARGV (KRAS G12R)
LVVYGNRGW

SEQ ID NO: 26499 - protein, 9 aa, synthetic construct
  source 1..9: note = Seed: LVVVGARGV (KRAS G12R)
LVVYGNRGY

SEQ ID NO: 26500 - protein, 9 aa, synthetic construct
  source 1..9: note = Seed: LVVVGARGV (KRAS G12R)
LVVYGPRGA

SEQ ID NO: 26501 - protein, 9 aa, synthetic construct
  source 1..9: note = Seed: LVVVGARGV (KRAS G12R)
LVVYGPRGI

SEQ ID NO: 26502 - protein, 9 aa, synthetic construct
  source 1..9: note = Seed: LVVVGARGV (KRAS G12R)
LVVYGPRGK

SEQ ID NO: 26503 - protein, 9 aa, synthetic construct
  source 1..9: note = Seed: LVVVGARGV (KRAS G12R)
LVVYGPRGL

SEQ ID NO: 26504 - protein, 9 aa, synthetic construct
  source 1..9: note = Seed: LVVVGARGV (KRAS G12R)
LVVYGPRGM

SEQ ID NO: 26505 - protein, 9 aa, synthetic construct
  source 1..9: note = Seed: LVVVGARGV (KRAS G12R)
LVVYGPRGR

SEQ ID NO: 26506 - protein, 9 aa, synthetic construct
  source 1..9: note = Seed: LVVVGARGV (KRAS G12R)
LVVYGPRGV

SEQ ID NO: 26507 - protein, 9 aa, synthetic construct
  source 1..9: note = Seed: LVVVGARGV (KRAS G12R)
LVVYGQRGH

SEQ ID NO: 26508 - protein, 9 aa, synthetic construct
  source 1..9: note = Seed: LVVVGARGV (KRAS G12R)
LVVYGQRGI

SEQ ID NO: 26509 - protein, 9 aa, synthetic construct
  source 1..9: note = Seed: LVVVGARGV (KRAS G12R)
LVVYGQRGK

SEQ ID NO: 26510 - protein, 9 aa, synthetic construct
  source 1..9: note = Seed: LVVVGARGV (KRAS G12R)
LVVYGQRGL

SEQ ID NO: 26511 - protein, 9 aa, synthetic construct
  source 1..9: note = Seed: LVVVGARGV (KRAS G12R)
LVVYGQRGM

SEQ ID NO: 26512 - protein, 9 aa, synthetic construct
  source 1..9: note = Seed: LVVVGARGV (KRAS G12R)
LVVYGQRGR

SEQ ID NO: 26513 - protein, 9 aa, synthetic construct
  source 1..9: note = Seed: LVVVGARGV (KRAS G12R)
LVVYGQRGY

SEQ ID NO: 26514 - protein, 9 aa, synthetic construct
  source 1..9: note = Seed: LVVVGARGV (KRAS G12R)
LVVYGRRGA

SEQ ID NO: 26515 - protein, 9 aa, synthetic construct
  source 1..9: note = Seed: LVVVGARGV (KRAS G12R)
LVVYGRRGC

SEQ ID NO: 26516 - protein, 9 aa, synthetic construct
  source 1..9: note = Seed: LVVVGARGV (KRAS G12R)
LVVYGRRGF

SEQ ID NO: 26517 - protein, 9 aa, synthetic construct
  source 1..9: note = Seed: LVVVGARGV (KRAS G12R)
LVVYGRRGG

SEQ ID NO: 26518 - protein, 9 aa, synthetic construct
  source 1..9: note = Seed: LVVVGARGV (KRAS G12R)
LVVYGRRGH

SEQ ID NO: 26519 - protein, 9 aa, synthetic construct
  source 1..9: note = Seed: LVVVGARGV (KRAS G12R)
LVVYGRRGI

SEQ ID NO: 26520 - protein, 9 aa, synthetic construct
  source 1..9: note = Seed: LVVVGARGV (KRAS G12R)
LVVYGRRGK

SEQ ID NO: 26521 - protein, 9 aa, synthetic construct
  source 1..9: note = Seed: LVVVGARGV (KRAS G12R)
LVVYGRRGL

SEQ ID NO: 26522 - protein, 9 aa, synthetic construct
  source 1..9: note = Seed: LVVVGARGV (KRAS G12R)
LVVYGRRGM

SEQ ID NO: 26523 - protein, 9 aa, synthetic construct
  source 1..9: note = Seed: LVVVGARGV (KRAS G12R)
LVVYGRRGN

SEQ ID NO: 26524 - protein, 9 aa, synthetic construct
  source 1..9: note = Seed: LVVVGARGV (KRAS G12R)
LVVYGRRGP

SEQ ID NO: 26525 - protein, 9 aa, synthetic construct
  source 1..9: note = Seed: LVVVGARGV (KRAS G12R)
LVVYGRRGQ

SEQ ID NO: 26526 - protein, 9 aa, synthetic construct
  source 1..9: note = Seed: LVVVGARGV (KRAS G12R)
LVVYGRRGR

SEQ ID NO: 26527 - protein, 9 aa, synthetic construct
  source 1..9: note = Seed: LVVVGARGV (KRAS G12R)
LVVYGRRGS

SEQ ID NO: 26528 - protein, 9 aa, synthetic construct
  source 1..9: note = Seed: LVVVGARGV (KRAS G12R)
LVVYGRRGT

SEQ ID NO: 26529 - protein, 9 aa, synthetic construct
  source 1..9: note = Seed: LVVVGARGV (KRAS G12R)
LVVYGRRGV

SEQ ID NO: 26530 - protein, 9 aa, synthetic construct
  source 1..9: note = Seed: LVVVGARGV (KRAS G12R)
LVVYGRRGW

SEQ ID NO: 26531 - protein, 9 aa, synthetic construct
  source 1..9: note = Seed: LVVVGARGV (KRAS G12R)
LVVYGRRGY

SEQ ID NO: 26532 - protein, 9 aa, synthetic construct
  source 1..9: note = Seed: LVVVGARGV (KRAS G12R)
LVVYGSRGA

SEQ ID NO: 26533 - protein, 9 aa, synthetic construct
  source 1..9: note = Seed: LVVVGARGV (KRAS G12R)
LVVYGSRGC

SEQ ID NO: 26534 - protein, 9 aa, synthetic construct
  source 1..9: note = Seed: LVVVGARGV (KRAS G12R)
LVVYGSRGF

SEQ ID NO: 26535 - protein, 9 aa, synthetic construct
  source 1..9: note = Seed: LVVVGARGV (KRAS G12R)
LVVYGSRGG

SEQ ID NO: 26536 - protein, 9 aa, synthetic construct
  source 1..9: note = Seed: LVVVGARGV (KRAS G12R)
LVVYGSRGH

SEQ ID NO: 26537 - protein, 9 aa, synthetic construct
  source 1..9: note = Seed: LVVVGARGV (KRAS G12R)
LVVYGSRGI

SEQ ID NO: 26538 - protein, 9 aa, synthetic construct
  source 1..9: note = Seed: LVVVGARGV (KRAS G12R)
LVVYGSRGK

SEQ ID NO: 26539 - protein, 9 aa, synthetic construct
  source 1..9: note = Seed: LVVVGARGV (KRAS G12R)
LVVYGSRGL

SEQ ID NO: 26540 - protein, 9 aa, synthetic construct
  source 1..9: note = Seed: LVVVGARGV (KRAS G12R)
LVVYGSRGM

SEQ ID NO: 26541 - protein, 9 aa, synthetic construct
  source 1..9: note = Seed: LVVVGARGV (KRAS G12R)
LVVYGSRGN

SEQ ID NO: 26542 - protein, 9 aa, synthetic construct
  source 1..9: note = Seed: LVVVGARGV (KRAS G12R)
LVVYGSRGP

SEQ ID NO: 26543 - protein, 9 aa, synthetic construct
  source 1..9: note = Seed: LVVVGARGV (KRAS G12R)
LVVYGSRGQ

SEQ ID NO: 26544 - protein, 9 aa, synthetic construct
  source 1..9: note = Seed: LVVVGARGV (KRAS G12R)
LVVYGSRGR

SEQ ID NO: 26545 - protein, 9 aa, synthetic construct
  source 1..9: note = Seed: LVVVGARGV (KRAS G12R)
LVVYGSRGS

SEQ ID NO: 26546 - protein, 9 aa, synthetic construct
  source 1..9: note = Seed: LVVVGARGV (KRAS G12R)
LVVYGSRGT

SEQ ID NO: 26547 - protein, 9 aa, synthetic construct
  source 1..9: note = Seed: LVVVGARGV (KRAS G12R)
LVVYGSRGV

SEQ ID NO: 26548 - protein, 9 aa, synthetic construct
  source 1..9: note = Seed: LVVVGARGV (KRAS G12R)
LVVYGSRGW

SEQ ID NO: 26549 - protein, 9 aa, synthetic construct
  source 1..9: note = Seed: LVVVGARGV (KRAS G12R)
LVVYGSRGY

SEQ ID NO: 26550 - protein, 9 aa, synthetic construct
  source 1..9: note = Seed: LVVVGARGV (KRAS G12R)
LVVYGTRGA

SEQ ID NO: 26551 - protein, 9 aa, synthetic construct
  source 1..9: note = Seed: LVVVGARGV (KRAS G12R)
LVVYGTRGF

SEQ ID NO: 26552 - protein, 9 aa, synthetic construct
  source 1..9: note = Seed: LVVVGARGV (KRAS G12R)
LVVYGTRGH

SEQ ID NO: 26553 - protein, 9 aa, synthetic construct
  source 1..9: note = Seed: LVVVGARGV (KRAS G12R)
LVVYGTRGI

SEQ ID NO: 26554 - protein, 9 aa, synthetic construct
  source 1..9: note = Seed: LVVVGARGV (KRAS G12R)
LVVYGTRGK

SEQ ID NO: 26555 - protein, 9 aa, synthetic construct
  source 1..9: note = Seed: LVVVGARGV (KRAS G12R)
LVVYGTRGL

SEQ ID NO: 26556 - protein, 9 aa, synthetic construct
  source 1..9: note = Seed: LVVVGARGV (KRAS G12R)
LVVYGTRGM

SEQ ID NO: 26557 - protein, 9 aa, synthetic construct
  source 1..9: note = Seed: LVVVGARGV (KRAS G12R)
LVVYGTRGR

SEQ ID NO: 26558 - protein, 9 aa, synthetic construct
  source 1..9: note = Seed: LVVVGARGV (KRAS G12R)
LVVYGTRGS

SEQ ID NO: 26559 - protein, 9 aa, synthetic construct
  source 1..9: note = Seed: LVVVGARGV (KRAS G12R)
LVVYGTRGT

SEQ ID NO: 26560 - protein, 9 aa, synthetic construct
  source 1..9: note = Seed: LVVVGARGV (KRAS G12R)
LVVYGTRGV

SEQ ID NO: 26561 - protein, 9 aa, synthetic construct
  source 1..9: note = Seed: LVVVGARGV (KRAS G12R)
LVVYGTRGY

SEQ ID NO: 26562 - protein, 9 aa, synthetic construct
  source 1..9: note = Seed: LVVVGARGV (KRAS G12R)
LVVYGVRGA

SEQ ID NO: 26563 - protein, 9 aa, synthetic construct
  source 1..9: note = Seed: LVVVGARGV (KRAS G12R)
LVVYGVRGF

SEQ ID NO: 26564 - protein, 9 aa, synthetic construct
  source 1..9: note = Seed: LVVVGARGV (KRAS G12R)
LVVYGVRGH

SEQ ID NO: 26565 - protein, 9 aa, synthetic construct
  source 1..9: note = Seed: LVVVGARGV (KRAS G12R)
LVVYGVRGI

SEQ ID NO: 26566 - protein, 9 aa, synthetic construct
  source 1..9: note = Seed: LVVVGARGV (KRAS G12R)
LVVYGVRGK

SEQ ID NO: 26567 - protein, 9 aa, synthetic construct
  source 1..9: note = Seed: LVVVGARGV (KRAS G12R)
LVVYGVRGL

SEQ ID NO: 26568 - protein, 9 aa, synthetic construct
  source 1..9: note = Seed: LVVVGARGV (KRAS G12R)
LVVYGVRGM

SEQ ID NO: 26569 - protein, 9 aa, synthetic construct
  source 1..9: note = Seed: LVVVGARGV (KRAS G12R)
LVVYGVRGQ

SEQ ID NO: 26570 - protein, 9 aa, synthetic construct
  source 1..9: note = Seed: LVVVGARGV (KRAS G12R)
LVVYGVRGR

SEQ ID NO: 26571 - protein, 9 aa, synthetic construct
  source 1..9: note = Seed: LVVVGARGV (KRAS G12R)
LVVYGVRGS

SEQ ID NO: 26572 - protein, 9 aa, synthetic construct
  source 1..9: note = Seed: LVVVGARGV (KRAS G12R)
LVVYGVRGT

SEQ ID NO: 26573 - protein, 9 aa, synthetic construct
  source 1..9: note = Seed: LVVVGARGV (KRAS G12R)
LVVYGVRGV

SEQ ID NO: 26574 - protein, 9 aa, synthetic construct
  source 1..9: note = Seed: LVVVGARGV (KRAS G12R)
LVVYGVRGY

SEQ ID NO: 26575 - protein, 9 aa, synthetic construct
  source 1..9: note = Seed: LVVVGARGV (KRAS G12R)
LVVYGYRGL

SEQ ID NO: 26576 - protein, 9 aa, synthetic construct
  source 1..9: note = Seed: LVVVGARGV (KRAS G12R)
LVVYGYRGR

SEQ ID NO: 26577 - protein, 9 aa, synthetic construct
  source 1..9: note = Seed: LVVVGARGV (KRAS G12R)
LVVYGYRGV

SEQ ID NO: 26578 - protein, 9 aa, synthetic construct
  source 1..9: note = Seed: LVVVGARGV (KRAS G12R)
MVVAGARGA

SEQ ID NO: 26579 - protein, 9 aa, synthetic construct
  source 1..9: note = Seed: LVVVGARGV (KRAS G12R)
MVVAGARGC

SEQ ID NO: 26580 - protein, 9 aa, synthetic construct
  source 1..9: note = Seed: LVVVGARGV (KRAS G12R)
MVVAGARGF

SEQ ID NO: 26581 - protein, 9 aa, synthetic construct
  source 1..9: note = Seed: LVVVGARGV (KRAS G12R)
MVVAGARGG

SEQ ID NO: 26582 - protein, 9 aa, synthetic construct
  source 1..9: note = Seed: LVVVGARGV (KRAS G12R)
MVVAGARGH

SEQ ID NO: 26583 - protein, 9 aa, synthetic construct
  source 1..9: note = Seed: LVVVGARGV (KRAS G12R)
MVVAGARGI

SEQ ID NO: 26584 - protein, 9 aa, synthetic construct
  source 1..9: note = Seed: LVVVGARGV (KRAS G12R)
MVVAGARGL

SEQ ID NO: 26585 - protein, 9 aa, synthetic construct
  source 1..9: note = Seed: LVVVGARGV (KRAS G12R)
MVVAGARGM

SEQ ID NO: 26586 - protein, 9 aa, synthetic construct
  source 1..9: note = Seed: LVVVGARGV (KRAS G12R)
MVVAGARGN

SEQ ID NO: 26587 - protein, 9 aa, synthetic construct
  source 1..9: note = Seed: LVVVGARGV (KRAS G12R)
MVVAGARGR

SEQ ID NO: 26588 - protein, 9 aa, synthetic construct
  source 1..9: note = Seed: LVVVGARGV (KRAS G12R)
MVVAGARGS

SEQ ID NO: 26589 - protein, 9 aa, synthetic construct
  source 1..9: note = Seed: LVVVGARGV (KRAS G12R)
MVVAGARGT

SEQ ID NO: 26590 - protein, 9 aa, synthetic construct
  source 1..9: note = Seed: LVVVGARGV (KRAS G12R)
MVVAGARGV

SEQ ID NO: 26591 - protein, 9 aa, synthetic construct
  source 1..9: note = Seed: LVVVGARGV (KRAS G12R)
MVVAGARGW

SEQ ID NO: 26592 - protein, 9 aa, synthetic construct
  source 1..9: note = Seed: LVVVGARGV (KRAS G12R)
MVVAGARGY

SEQ ID NO: 26593 - protein, 9 aa, synthetic construct
  source 1..9: note = Seed: LVVVGARGV (KRAS G12R)
MVVAGCRGA

SEQ ID NO: 26594 - protein, 9 aa, synthetic construct
  source 1..9: note = Seed: LVVVGARGV (KRAS G12R)
MVVAGCRGI

SEQ ID NO: 26595 - protein, 9 aa, synthetic construct
  source 1..9: note = Seed: LVVVGARGV (KRAS G12R)
MVVAGCRGL

SEQ ID NO: 26596 - protein, 9 aa, synthetic construct
  source 1..9: note = Seed: LVVVGARGV (KRAS G12R)
MVVAGCRGM

SEQ ID NO: 26597 - protein, 9 aa, synthetic construct
  source 1..9: note = Seed: LVVVGARGV (KRAS G12R)
MVVAGCRGV

SEQ ID NO: 26598 - protein, 9 aa, synthetic construct
  source 1..9: note = Seed: LVVVGARGV (KRAS G12R)
MVVAGGRGA

SEQ ID NO: 26599 - protein, 9 aa, synthetic construct
  source 1..9: note = Seed: LVVVGARGV (KRAS G12R)
MVVAGGRGF

SEQ ID NO: 26600 - protein, 9 aa, synthetic construct
  source 1..9: note = Seed: LVVVGARGV (KRAS G12R)
MVVAGGRGI

SEQ ID NO: 26601 - protein, 9 aa, synthetic construct
  source 1..9: note = Seed: LVVVGARGV (KRAS G12R)
MVVAGGRGL

SEQ ID NO: 26602 - protein, 9 aa, synthetic construct
  source 1..9: note = Seed: LVVVGARGV (KRAS G12R)
MVVAGGRGM

SEQ ID NO: 26603 - protein, 9 aa, synthetic construct
  source 1..9: note = Seed: LVVVGARGV (KRAS G12R)
MVVAGGRGS

SEQ ID NO: 26604 - protein, 9 aa, synthetic construct
  source 1..9: note = Seed: LVVVGARGV (KRAS G12R)
MVVAGGRGT

SEQ ID NO: 26605 - protein, 9 aa, synthetic construct
  source 1..9: note = Seed: LVVVGARGV (KRAS G12R)
MVVAGGRGV

SEQ ID NO: 26606 - protein, 9 aa, synthetic construct
  source 1..9: note = Seed: LVVVGARGV (KRAS G12R)
MVVAGHRGA

SEQ ID NO: 26607 - protein, 9 aa, synthetic construct
  source 1..9: note = Seed: LVVVGARGV (KRAS G12R)
MVVAGHRGF

SEQ ID NO: 26608 - protein, 9 aa, synthetic construct
  source 1..9: note = Seed: LVVVGARGV (KRAS G12R)
MVVAGHRGI

SEQ ID NO: 26609 - protein, 9 aa, synthetic construct
  source 1..9: note = Seed: LVVVGARGV (KRAS G12R)
MVVAGHRGK

SEQ ID NO: 26610 - protein, 9 aa, synthetic construct
  source 1..9: note = Seed: LVVVGARGV (KRAS G12R)
MVVAGHRGL

SEQ ID NO: 26611 - protein, 9 aa, synthetic construct
  source 1..9: note = Seed: LVVVGARGV (KRAS G12R)
MVVAGHRGM

SEQ ID NO: 26612 - protein, 9 aa, synthetic construct
  source 1..9: note = Seed: LVVVGARGV (KRAS G12R)
MVVAGHRGR

SEQ ID NO: 26613 - protein, 9 aa, synthetic construct
  source 1..9: note = Seed: LVVVGARGV (KRAS G12R)
MVVAGHRGS

SEQ ID NO: 26614 - protein, 9 aa, synthetic construct
  source 1..9: note = Seed: LVVVGARGV (KRAS G12R)
MVVAGHRGV

SEQ ID NO: 26615 - protein, 9 aa, synthetic construct
  source 1..9: note = Seed: LVVVGARGV (KRAS G12R)
MVVAGHRGY

SEQ ID NO: 26616 - protein, 9 aa, synthetic construct
  source 1..9: note = Seed: LVVVGARGV (KRAS G12R)
MVVAGIRGA

SEQ ID NO: 26617 - protein, 9 aa, synthetic construct
  source 1..9: note = Seed: LVVVGARGV (KRAS G12R)
MVVAGIRGF

SEQ ID NO: 26618 - protein, 9 aa, synthetic construct
  source 1..9: note = Seed: LVVVGARGV (KRAS G12R)
MVVAGIRGI

SEQ ID NO: 26619 - protein, 9 aa, synthetic construct
  source 1..9: note = Seed: LVVVGARGV (KRAS G12R)
MVVAGIRGL

SEQ ID NO: 26620 - protein, 9 aa, synthetic construct
  source 1..9: note = Seed: LVVVGARGV (KRAS G12R)
MVVAGIRGM

SEQ ID NO: 26621 - protein, 9 aa, synthetic construct
  source 1..9: note = Seed: LVVVGARGV (KRAS G12R)
MVVAGIRGR

SEQ ID NO: 26622 - protein, 9 aa, synthetic construct
  source 1..9: note = Seed: LVVVGARGV (KRAS G12R)
MVVAGIRGV

SEQ ID NO: 26623 - protein, 9 aa, synthetic construct
  source 1..9: note = Seed: LVVVGARGV (KRAS G12R)
MVVAGIRGY

SEQ ID NO: 26624 - protein, 9 aa, synthetic construct
  source 1..9: note = Seed: LVVVGARGV (KRAS G12R)
MVVAGKRGA

SEQ ID NO: 26625 - protein, 9 aa, synthetic construct
  source 1..9: note = Seed: LVVVGARGV (KRAS G12R)
MVVAGKRGF

SEQ ID NO: 26626 - protein, 9 aa, synthetic construct
  source 1..9: note = Seed: LVVVGARGV (KRAS G12R)
MVVAGKRGG

SEQ ID NO: 26627 - protein, 9 aa, synthetic construct
  source 1..9: note = Seed: LVVVGARGV (KRAS G12R)
MVVAGKRGH

SEQ ID NO: 26628 - protein, 9 aa, synthetic construct
  source 1..9: note = Seed: LVVVGARGV (KRAS G12R)
MVVAGKRGI

SEQ ID NO: 26629 - protein, 9 aa, synthetic construct
  source 1..9: note = Seed: LVVVGARGV (KRAS G12R)
MVVAGKRGK

SEQ ID NO: 26630 - protein, 9 aa, synthetic construct
  source 1..9: note = Seed: LVVVGARGV (KRAS G12R)
MVVAGKRGL

SEQ ID NO: 26631 - protein, 9 aa, synthetic construct
  source 1..9: note = Seed: LVVVGARGV (KRAS G12R)
MVVAGKRGM

SEQ ID NO: 26632 - protein, 9 aa, synthetic construct
  source 1..9: note = Seed: LVVVGARGV (KRAS G12R)
MVVAGKRGN

SEQ ID NO: 26633 - protein, 9 aa, synthetic construct
  source 1..9: note = Seed: LVVVGARGV (KRAS G12R)
MVVAGKRGP

SEQ ID NO: 26634 - protein, 9 aa, synthetic construct
  source 1..9: note = Seed: LVVVGARGV (KRAS G12R)
MVVAGKRGQ

SEQ ID NO: 26635 - protein, 9 aa, synthetic construct
  source 1..9: note = Seed: LVVVGARGV (KRAS G12R)
MVVAGKRGR

SEQ ID NO: 26636 - protein, 9 aa, synthetic construct
  source 1..9: note = Seed: LVVVGARGV (KRAS G12R)
MVVAGKRGS

SEQ ID NO: 26637 - protein, 9 aa, synthetic construct
  source 1..9: note = Seed: LVVVGARGV (KRAS G12R)
MVVAGKRGT

SEQ ID NO: 26638 - protein, 9 aa, synthetic construct
  source 1..9: note = Seed: LVVVGARGV (KRAS G12R)
MVVAGKRGV

SEQ ID NO: 26639 - protein, 9 aa, synthetic construct
  source 1..9: note = Seed: LVVVGARGV (KRAS G12R)
MVVAGKRGW

SEQ ID NO: 26640 - protein, 9 aa, synthetic construct
  source 1..9: note = Seed: LVVVGARGV (KRAS G12R)
MVVAGKRGY

SEQ ID NO: 26641 - protein, 9 aa, synthetic construct
  source 1..9: note = Seed: LVVVGARGV (KRAS G12R)
MVVAGLRGR

SEQ ID NO: 26642 - protein, 9 aa, synthetic construct
  source 1..9: note = Seed: LVVVGARGV (KRAS G12R)
MVVAGMRGA

SEQ ID NO: 26643 - protein, 9 aa, synthetic construct
  source 1..9: note = Seed: LVVVGARGV (KRAS G12R)
MVVAGMRGF

SEQ ID NO: 26644 - protein, 9 aa, synthetic construct
  source 1..9: note = Seed: LVVVGARGV (KRAS G12R)
MVVAGMRGI

SEQ ID NO: 26645 - protein, 9 aa, synthetic construct
  source 1..9: note = Seed: LVVVGARGV (KRAS G12R)
MVVAGMRGL

SEQ ID NO: 26646 - protein, 9 aa, synthetic construct
  source 1..9: note = Seed: LVVVGARGV (KRAS G12R)
MVVAGMRGM

SEQ ID NO: 26647 - protein, 9 aa, synthetic construct
  source 1..9: note = Seed: LVVVGARGV (KRAS G12R)
MVVAGMRGR

SEQ ID NO: 26648 - protein, 9 aa, synthetic construct
  source 1..9: note = Seed: LVVVGARGV (KRAS G12R)
MVVAGMRGV

SEQ ID NO: 26649 - protein, 9 aa, synthetic construct
  source 1..9: note = Seed: LVVVGARGV (KRAS G12R)
MVVAGNRGA

SEQ ID NO: 26650 - protein, 9 aa, synthetic construct
  source 1..9: note = Seed: LVVVGARGV (KRAS G12R)
MVVAGNRGF

SEQ ID NO: 26651 - protein, 9 aa, synthetic construct
  source 1..9: note = Seed: LVVVGARGV (KRAS G12R)
MVVAGNRGI

SEQ ID NO: 26652 - protein, 9 aa, synthetic construct
  source 1..9: note = Seed: LVVVGARGV (KRAS G12R)
MVVAGNRGL

SEQ ID NO: 26653 - protein, 9 aa, synthetic construct
  source 1..9: note = Seed: LVVVGARGV (KRAS G12R)
MVVAGNRGM

SEQ ID NO: 26654 - protein, 9 aa, synthetic construct
  source 1..9: note = Seed: LVVVGARGV (KRAS G12R)
MVVAGNRGR

SEQ ID NO: 26655 - protein, 9 aa, synthetic construct
  source 1..9: note = Seed: LVVVGARGV (KRAS G12R)
MVVAGNRGS

SEQ ID NO: 26656 - protein, 9 aa, synthetic construct
  source 1..9: note = Seed: LVVVGARGV (KRAS G12R)
MVVAGNRGT

SEQ ID NO: 26657 - protein, 9 aa, synthetic construct
  source 1..9: note = Seed: LVVVGARGV (KRAS G12R)
MVVAGNRGV

SEQ ID NO: 26658 - protein, 9 aa, synthetic construct
  source 1..9: note = Seed: LVVVGARGV (KRAS G12R)
MVVAGNRGY

SEQ ID NO: 26659 - protein, 9 aa, synthetic construct
  source 1..9: note = Seed: LVVVGARGV (KRAS G12R)
MVVAGPRGA

SEQ ID NO: 26660 - protein, 9 aa, synthetic construct
  source 1..9: note = Seed: LVVVGARGV (KRAS G12R)
MVVAGPRGF

SEQ ID NO: 26661 - protein, 9 aa, synthetic construct
  source 1..9: note = Seed: LVVVGARGV (KRAS G12R)
MVVAGPRGI

SEQ ID NO: 26662 - protein, 9 aa, synthetic construct
  source 1..9: note = Seed: LVVVGARGV (KRAS G12R)
MVVAGPRGL

SEQ ID NO: 26663 - protein, 9 aa, synthetic construct
  source 1..9: note = Seed: LVVVGARGV (KRAS G12R)
MVVAGPRGM

SEQ ID NO: 26664 - protein, 9 aa, synthetic construct
  source 1..9: note = Seed: LVVVGARGV (KRAS G12R)
MVVAGPRGS

SEQ ID NO: 26665 - protein, 9 aa, synthetic construct
  source 1..9: note = Seed: LVVVGARGV (KRAS G12R)
MVVAGPRGT

SEQ ID NO: 26666 - protein, 9 aa, synthetic construct
  source 1..9: note = Seed: LVVVGARGV (KRAS G12R)
MVVAGPRGV

SEQ ID NO: 26667 - protein, 9 aa, synthetic construct
  source 1..9: note = Seed: LVVVGARGV (KRAS G12R)
MVVAGQRGL

SEQ ID NO: 26668 - protein, 9 aa, synthetic construct
  source 1..9: note = Seed: LVVVGARGV (KRAS G12R)
MVVAGRRGA

SEQ ID NO: 26669 - protein, 9 aa, synthetic construct
  source 1..9: note = Seed: LVVVGARGV (KRAS G12R)
MVVAGRRGC

SEQ ID NO: 26670 - protein, 9 aa, synthetic construct
  source 1..9: note = Seed: LVVVGARGV (KRAS G12R)
MVVAGRRGE

SEQ ID NO: 26671 - protein, 9 aa, synthetic construct
  source 1..9: note = Seed: LVVVGARGV (KRAS G12R)
MVVAGRRGF

SEQ ID NO: 26672 - protein, 9 aa, synthetic construct
  source 1..9: note = Seed: LVVVGARGV (KRAS G12R)
MVVAGRRGG

SEQ ID NO: 26673 - protein, 9 aa, synthetic construct
  source 1..9: note = Seed: LVVVGARGV (KRAS G12R)
MVVAGRRGH

SEQ ID NO: 26674 - protein, 9 aa, synthetic construct
  source 1..9: note = Seed: LVVVGARGV (KRAS G12R)
MVVAGRRGI

SEQ ID NO: 26675 - protein, 9 aa, synthetic construct
  source 1..9: note = Seed: LVVVGARGV (KRAS G12R)
MVVAGRRGK

SEQ ID NO: 26676 - protein, 9 aa, synthetic construct
  source 1..9: note = Seed: LVVVGARGV (KRAS G12R)
MVVAGRRGL

SEQ ID NO: 26677 - protein, 9 aa, synthetic construct
  source 1..9: note = Seed: LVVVGARGV (KRAS G12R)
MVVAGRRGM

SEQ ID NO: 26678 - protein, 9 aa, synthetic construct
  source 1..9: note = Seed: LVVVGARGV (KRAS G12R)
MVVAGRRGN

SEQ ID NO: 26679 - protein, 9 aa, synthetic construct
  source 1..9: note = Seed: LVVVGARGV (KRAS G12R)
MVVAGRRGP

SEQ ID NO: 26680 - protein, 9 aa, synthetic construct
  source 1..9: note = Seed: LVVVGARGV (KRAS G12R)
MVVAGRRGQ

SEQ ID NO: 26681 - protein, 9 aa, synthetic construct
  source 1..9: note = Seed: LVVVGARGV (KRAS G12R)
MVVAGRRGR

SEQ ID NO: 26682 - protein, 9 aa, synthetic construct
  source 1..9: note = Seed: LVVVGARGV (KRAS G12R)
MVVAGRRGS

SEQ ID NO: 26683 - protein, 9 aa, synthetic construct
  source 1..9: note = Seed: LVVVGARGV (KRAS G12R)
MVVAGRRGT

SEQ ID NO: 26684 - protein, 9 aa, synthetic construct
  source 1..9: note = Seed: LVVVGARGV (KRAS G12R)
MVVAGRRGV

SEQ ID NO: 26685 - protein, 9 aa, synthetic construct
  source 1..9: note = Seed: LVVVGARGV (KRAS G12R)
MVVAGRRGW

SEQ ID NO: 26686 - protein, 9 aa, synthetic construct
  source 1..9: note = Seed: LVVVGARGV (KRAS G12R)
MVVAGRRGY

SEQ ID NO: 26687 - protein, 9 aa, synthetic construct
  source 1..9: note = Seed: LVVVGARGV (KRAS G12R)
MVVAGSRGA

SEQ ID NO: 26688 - protein, 9 aa, synthetic construct
  source 1..9: note = Seed: LVVVGARGV (KRAS G12R)
MVVAGSRGF

SEQ ID NO: 26689 - protein, 9 aa, synthetic construct
  source 1..9: note = Seed: LVVVGARGV (KRAS G12R)
MVVAGSRGI

SEQ ID NO: 26690 - protein, 9 aa, synthetic construct
  source 1..9: note = Seed: LVVVGARGV (KRAS G12R)
MVVAGSRGL

SEQ ID NO: 26691 - protein, 9 aa, synthetic construct
  source 1..9: note = Seed: LVVVGARGV (KRAS G12R)
MVVAGSRGM

SEQ ID NO: 26692 - protein, 9 aa, synthetic construct
  source 1..9: note = Seed: LVVVGARGV (KRAS G12R)
MVVAGSRGR

SEQ ID NO: 26693 - protein, 9 aa, synthetic construct
  source 1..9: note = Seed: LVVVGARGV (KRAS G12R)
MVVAGSRGS

SEQ ID NO: 26694 - protein, 9 aa, synthetic construct
  source 1..9: note = Seed: LVVVGARGV (KRAS G12R)
MVVAGSRGT

SEQ ID NO: 26695 - protein, 9 aa, synthetic construct
  source 1..9: note = Seed: LVVVGARGV (KRAS G12R)
MVVAGSRGV

SEQ ID NO: 26696 - protein, 9 aa, synthetic construct
  source 1..9: note = Seed: LVVVGARGV (KRAS G12R)
MVVAGSRGY

SEQ ID NO: 26697 - protein, 9 aa, synthetic construct
  source 1..9: note = Seed: LVVVGARGV (KRAS G12R)
MVVAGTRGA

SEQ ID NO: 26698 - protein, 9 aa, synthetic construct
  source 1..9: note = Seed: LVVVGARGV (KRAS G12R)
MVVAGTRGI

SEQ ID NO: 26699 - protein, 9 aa, synthetic construct
  source 1..9: note = Seed: LVVVGARGV (KRAS G12R)
MVVAGTRGL

SEQ ID NO: 26700 - protein, 9 aa, synthetic construct
  source 1..9: note = Seed: LVVVGARGV (KRAS G12R)
MVVAGTRGM

SEQ ID NO: 26701 - protein, 9 aa, synthetic construct
  source 1..9: note = Seed: LVVVGARGV (KRAS G12R)
MVVAGTRGR

SEQ ID NO: 26702 - protein, 9 aa, synthetic construct
  source 1..9: note = Seed: LVVVGARGV (KRAS G12R)
MVVAGTRGS

SEQ ID NO: 26703 - protein, 9 aa, synthetic construct
  source 1..9: note = Seed: LVVVGARGV (KRAS G12R)
MVVAGTRGT

SEQ ID NO: 26704 - protein, 9 aa, synthetic construct
  source 1..9: note = Seed: LVVVGARGV (KRAS G12R)
MVVAGTRGV

SEQ ID NO: 26705 - protein, 9 aa, synthetic construct
  source 1..9: note = Seed: LVVVGARGV (KRAS G12R)
MVVAGTRGY

SEQ ID NO: 26706 - protein, 9 aa, synthetic construct
  source 1..9: note = Seed: LVVVGARGV (KRAS G12R)
MVVAGVRGA

SEQ ID NO: 26707 - protein, 9 aa, synthetic construct
  source 1..9: note = Seed: LVVVGARGV (KRAS G12R)
MVVAGVRGF

SEQ ID NO: 26708 - protein, 9 aa, synthetic construct
  source 1..9: note = Seed: LVVVGARGV (KRAS G12R)
MVVAGVRGI

SEQ ID NO: 26709 - protein, 9 aa, synthetic construct
  source 1..9: note = Seed: LVVVGARGV (KRAS G12R)
MVVAGVRGL

SEQ ID NO: 26710 - protein, 9 aa, synthetic construct
  source 1..9: note = Seed: LVVVGARGV (KRAS G12R)
MVVAGVRGM

SEQ ID NO: 26711 - protein, 9 aa, synthetic construct
  source 1..9: note = Seed: LVVVGARGV (KRAS G12R)
MVVAGVRGN

SEQ ID NO: 26712 - protein, 9 aa, synthetic construct
  source 1..9: note = Seed: LVVVGARGV (KRAS G12R)
MVVAGVRGR

SEQ ID NO: 26713 - protein, 9 aa, synthetic construct
  source 1..9: note = Seed: LVVVGARGV (KRAS G12R)
MVVAGVRGS

SEQ ID NO: 26714 - protein, 9 aa, synthetic construct
  source 1..9: note = Seed: LVVVGARGV (KRAS G12R)
MVVAGVRGT

SEQ ID NO: 26715 - protein, 9 aa, synthetic construct
  source 1..9: note = Seed: LVVVGARGV (KRAS G12R)
MVVAGVRGV

SEQ ID NO: 26716 - protein, 9 aa, synthetic construct
  source 1..9: note = Seed: LVVVGARGV (KRAS G12R)
MVVAGVRGY

SEQ ID NO: 26717 - protein, 9 aa, synthetic construct
  source 1..9: note = Seed: LVVVGARGV (KRAS G12R)
MVVCGARGL

SEQ ID NO: 26718 - protein, 9 aa, synthetic construct
  source 1..9: note = Seed: LVVVGARGV (KRAS G12R)
MVVCGKRGA

SEQ ID NO: 26719 - protein, 9 aa, synthetic construct
  source 1..9: note = Seed: LVVVGARGV (KRAS G12R)
MVVCGKRGM

SEQ ID NO: 26720 - protein, 9 aa, synthetic construct
  source 1..9: note = Seed: LVVVGARGV (KRAS G12R)
MVVCGKRGQ

SEQ ID NO: 26721 - protein, 9 aa, synthetic construct
  source 1..9: note = Seed: LVVVGARGV (KRAS G12R)
MVVCGKRGR

SEQ ID NO: 26722 - protein, 9 aa, synthetic construct
  source 1..9: note = Seed: LVVVGARGV (KRAS G12R)
MVVCGKRGS

SEQ ID NO: 26723 - protein, 9 aa, synthetic construct
  source 1..9: note = Seed: LVVVGARGV (KRAS G12R)
MVVCGRRGA

SEQ ID NO: 26724 - protein, 9 aa, synthetic construct
  source 1..9: note = Seed: LVVVGARGV (KRAS G12R)
MVVCGRRGH

SEQ ID NO: 26725 - protein, 9 aa, synthetic construct
  source 1..9: note = Seed: LVVVGARGV (KRAS G12R)
MVVCGRRGI

SEQ ID NO: 26726 - protein, 9 aa, synthetic construct
  source 1..9: note = Seed: LVVVGARGV (KRAS G12R)
MVVCGRRGK

SEQ ID NO: 26727 - protein, 9 aa, synthetic construct
  source 1..9: note = Seed: LVVVGARGV (KRAS G12R)
MVVCGRRGL

SEQ ID NO: 26728 - protein, 9 aa, synthetic construct
  source 1..9: note = Seed: LVVVGARGV (KRAS G12R)
MVVCGRRGM

SEQ ID NO: 26729 - protein, 9 aa, synthetic construct
  source 1..9: note = Seed: LVVVGARGV (KRAS G12R)
MVVCGRRGQ

SEQ ID NO: 26730 - protein, 9 aa, synthetic construct
  source 1..9: note = Seed: LVVVGARGV (KRAS G12R)
MVVCGRRGR

SEQ ID NO: 26731 - protein, 9 aa, synthetic construct
  source 1..9: note = Seed: LVVVGARGV (KRAS G12R)
MVVCGRRGS

SEQ ID NO: 26732 - protein, 9 aa, synthetic construct
  source 1..9: note = Seed: LVVVGARGV (KRAS G12R)
MVVCGRRGT

SEQ ID NO: 26733 - protein, 9 aa, synthetic construct
  source 1..9: note = Seed: LVVVGARGV (KRAS G12R)
MVVCGRRGV

SEQ ID NO: 26734 - protein, 9 aa, synthetic construct
  source 1..9: note = Seed: LVVVGARGV (KRAS G12R)
MVVCGRRGY

SEQ ID NO: 26735 - protein, 9 aa, synthetic construct
  source 1..9: note = Seed: LVVVGARGV (KRAS G12R)
MVVDGARGI

SEQ ID NO: 26736 - protein, 9 aa, synthetic construct
  source 1..9: note = Seed: LVVVGARGV (KRAS G12R)
MVVDGARGV

SEQ ID NO: 26737 - protein, 9 aa, synthetic construct
  source 1..9: note = Seed: LVVVGARGV (KRAS G12R)
MVVDGNRGI

SEQ ID NO: 26738 - protein, 9 aa, synthetic construct
  source 1..9: note = Seed: LVVVGARGV (KRAS G12R)
MVVDGNRGV

SEQ ID NO: 26739 - protein, 9 aa, synthetic construct
  source 1..9: note = Seed: LVVVGARGV (KRAS G12R)
MVVDGSRGI

SEQ ID NO: 26740 - protein, 9 aa, synthetic construct
  source 1..9: note = Seed: LVVVGARGV (KRAS G12R)
MVVEGARGA

SEQ ID NO: 26741 - protein, 9 aa, synthetic construct
  source 1..9: note = Seed: LVVVGARGV (KRAS G12R)
MVVEGARGI

SEQ ID NO: 26742 - protein, 9 aa, synthetic construct
  source 1..9: note = Seed: LVVVGARGV (KRAS G12R)
MVVEGARGL

SEQ ID NO: 26743 - protein, 9 aa, synthetic construct
  source 1..9: note = Seed: LVVVGARGV (KRAS G12R)
MVVEGARGM

SEQ ID NO: 26744 - protein, 9 aa, synthetic construct
  source 1..9: note = Seed: LVVVGARGV (KRAS G12R)
MVVEGARGV

SEQ ID NO: 26745 - protein, 9 aa, synthetic construct
  source 1..9: note = Seed: LVVVGARGV (KRAS G12R)
MVVEGFRGI

SEQ ID NO: 26746 - protein, 9 aa, synthetic construct
  source 1..9: note = Seed: LVVVGARGV (KRAS G12R)
MVVEGFRGL

SEQ ID NO: 26747 - protein, 9 aa, synthetic construct
  source 1..9: note = Seed: LVVVGARGV (KRAS G12R)
MVVEGFRGV

SEQ ID NO: 26748 - protein, 9 aa, synthetic construct
  source 1..9: note = Seed: LVVVGARGV (KRAS G12R)
MVVEGGRGA

SEQ ID NO: 26749 - protein, 9 aa, synthetic construct
  source 1..9: note = Seed: LVVVGARGV (KRAS G12R)
MVVEGGRGI

SEQ ID NO: 26750 - protein, 9 aa, synthetic construct
  source 1..9: note = Seed: LVVVGARGV (KRAS G12R)
MVVEGGRGL

SEQ ID NO: 26751 - protein, 9 aa, synthetic construct
  source 1..9: note = Seed: LVVVGARGV (KRAS G12R)
MVVEGGRGV

SEQ ID NO: 26752 - protein, 9 aa, synthetic construct
  source 1..9: note = Seed: LVVVGARGV (KRAS G12R)
MVVEGRRGA

SEQ ID NO: 26753 - protein, 9 aa, synthetic construct
  source 1..9: note = Seed: LVVVGARGV (KRAS G12R)
MVVEGRRGR

SEQ ID NO: 26754 - protein, 9 aa, synthetic construct
  source 1..9: note = Seed: LVVVGARGV (KRAS G12R)
MVVEGRRGS

SEQ ID NO: 26755 - protein, 9 aa, synthetic construct
  source 1..9: note = Seed: LVVVGARGV (KRAS G12R)
MVVEGSRGA

SEQ ID NO: 26756 - protein, 9 aa, synthetic construct
  source 1..9: note = Seed: LVVVGARGV (KRAS G12R)
MVVEGSRGI

SEQ ID NO: 26757 - protein, 9 aa, synthetic construct
  source 1..9: note = Seed: LVVVGARGV (KRAS G12R)
MVVEGSRGL

SEQ ID NO: 26758 - protein, 9 aa, synthetic construct
  source 1..9: note = Seed: LVVVGARGV (KRAS G12R)
MVVEGSRGV

SEQ ID NO: 26759 - protein, 9 aa, synthetic construct
  source 1..9: note = Seed: LVVVGARGV (KRAS G12R)
MVVFGARGA

SEQ ID NO: 26760 - protein, 9 aa, synthetic construct
  source 1..9: note = Seed: LVVVGARGV (KRAS G12R)
MVVFGARGF

SEQ ID NO: 26761 - protein, 9 aa, synthetic construct
  source 1..9: note = Seed: LVVVGARGV (KRAS G12R)
MVVFGARGH

SEQ ID NO: 26762 - protein, 9 aa, synthetic construct
  source 1..9: note = Seed: LVVVGARGV (KRAS G12R)
MVVFGARGI

SEQ ID NO: 26763 - protein, 9 aa, synthetic construct
  source 1..9: note = Seed: LVVVGARGV (KRAS G12R)
MVVFGARGK

SEQ ID NO: 26764 - protein, 9 aa, synthetic construct
  source 1..9: note = Seed: LVVVGARGV (KRAS G12R)
MVVFGARGL

SEQ ID NO: 26765 - protein, 9 aa, synthetic construct
  source 1..9: note = Seed: LVVVGARGV (KRAS G12R)
MVVFGARGM

SEQ ID NO: 26766 - protein, 9 aa, synthetic construct
  source 1..9: note = Seed: LVVVGARGV (KRAS G12R)
MVVFGARGR

SEQ ID NO: 26767 - protein, 9 aa, synthetic construct
  source 1..9: note = Seed: LVVVGARGV (KRAS G12R)
MVVFGARGS

SEQ ID NO: 26768 - protein, 9 aa, synthetic construct
  source 1..9: note = Seed: LVVVGARGV (KRAS G12R)
MVVFGARGT

SEQ ID NO: 26769 - protein, 9 aa, synthetic construct
  source 1..9: note = Seed: LVVVGARGV (KRAS G12R)
MVVFGARGV

SEQ ID NO: 26770 - protein, 9 aa, synthetic construct
  source 1..9: note = Seed: LVVVGARGV (KRAS G12R)
MVVFGARGY

SEQ ID NO: 26771 - protein, 9 aa, synthetic construct
  source 1..9: note = Seed: LVVVGARGV (KRAS G12R)
MVVFGDRGI

SEQ ID NO: 26772 - protein, 9 aa, synthetic construct
  source 1..9: note = Seed: LVVVGARGV (KRAS G12R)
MVVFGDRGL

SEQ ID NO: 26773 - protein, 9 aa, synthetic construct
  source 1..9: note = Seed: LVVVGARGV (KRAS G12R)
MVVFGDRGV

SEQ ID NO: 26774 - protein, 9 aa, synthetic construct
  source 1..9: note = Seed: LVVVGARGV (KRAS G12R)
MVVFGFRGI

SEQ ID NO: 26775 - protein, 9 aa, synthetic construct
  source 1..9: note = Seed: LVVVGARGV (KRAS G12R)
MVVFGFRGL

SEQ ID NO: 26776 - protein, 9 aa, synthetic construct
  source 1..9: note = Seed: LVVVGARGV (KRAS G12R)
MVVFGFRGR

SEQ ID NO: 26777 - protein, 9 aa, synthetic construct
  source 1..9: note = Seed: LVVVGARGV (KRAS G12R)
MVVFGFRGV

SEQ ID NO: 26778 - protein, 9 aa, synthetic construct
  source 1..9: note = Seed: LVVVGARGV (KRAS G12R)
MVVFGGRGA

SEQ ID NO: 26779 - protein, 9 aa, synthetic construct
  source 1..9: note = Seed: LVVVGARGV (KRAS G12R)
MVVFGGRGF

SEQ ID NO: 26780 - protein, 9 aa, synthetic construct
  source 1..9: note = Seed: LVVVGARGV (KRAS G12R)
MVVFGGRGI

SEQ ID NO: 26781 - protein, 9 aa, synthetic construct
  source 1..9: note = Seed: LVVVGARGV (KRAS G12R)
MVVFGGRGK

SEQ ID NO: 26782 - protein, 9 aa, synthetic construct
  source 1..9: note = Seed: LVVVGARGV (KRAS G12R)
MVVFGGRGL

SEQ ID NO: 26783 - protein, 9 aa, synthetic construct
  source 1..9: note = Seed: LVVVGARGV (KRAS G12R)
MVVFGGRGM

SEQ ID NO: 26784 - protein, 9 aa, synthetic construct
  source 1..9: note = Seed: LVVVGARGV (KRAS G12R)
MVVFGGRGR

SEQ ID NO: 26785 - protein, 9 aa, synthetic construct
  source 1..9: note = Seed: LVVVGARGV (KRAS G12R)
MVVFGGRGS

SEQ ID NO: 26786 - protein, 9 aa, synthetic construct
  source 1..9: note = Seed: LVVVGARGV (KRAS G12R)
MVVFGGRGT

SEQ ID NO: 26787 - protein, 9 aa, synthetic construct
  source 1..9: note = Seed: LVVVGARGV (KRAS G12R)
MVVFGGRGV

SEQ ID NO: 26788 - protein, 9 aa, synthetic construct
  source 1..9: note = Seed: LVVVGARGV (KRAS G12R)
MVVFGHRGA

SEQ ID NO: 26789 - protein, 9 aa, synthetic construct
  source 1..9: note = Seed: LVVVGARGV (KRAS G12R)
MVVFGHRGF

SEQ ID NO: 26790 - protein, 9 aa, synthetic construct
  source 1..9: note = Seed: LVVVGARGV (KRAS G12R)
MVVFGHRGG

SEQ ID NO: 26791 - protein, 9 aa, synthetic construct
  source 1..9: note = Seed: LVVVGARGV (KRAS G12R)
MVVFGHRGH

SEQ ID NO: 26792 - protein, 9 aa, synthetic construct
  source 1..9: note = Seed: LVVVGARGV (KRAS G12R)
MVVFGHRGI

SEQ ID NO: 26793 - protein, 9 aa, synthetic construct
  source 1..9: note = Seed: LVVVGARGV (KRAS G12R)
MVVFGHRGK

SEQ ID NO: 26794 - protein, 9 aa, synthetic construct
  source 1..9: note = Seed: LVVVGARGV (KRAS G12R)
MVVFGHRGL

SEQ ID NO: 26795 - protein, 9 aa, synthetic construct
  source 1..9: note = Seed: LVVVGARGV (KRAS G12R)
MVVFGHRGM

SEQ ID NO: 26796 - protein, 9 aa, synthetic construct
  source 1..9: note = Seed: LVVVGARGV (KRAS G12R)
MVVFGHRGQ

SEQ ID NO: 26797 - protein, 9 aa, synthetic construct
  source 1..9: note = Seed: LVVVGARGV (KRAS G12R)
MVVFGHRGR

SEQ ID NO: 26798 - protein, 9 aa, synthetic construct
  source 1..9: note = Seed: LVVVGARGV (KRAS G12R)
MVVFGHRGS

SEQ ID NO: 26799 - protein, 9 aa, synthetic construct
  source 1..9: note = Seed: LVVVGARGV (KRAS G12R)
MVVFGHRGT

SEQ ID NO: 26800 - protein, 9 aa, synthetic construct
  source 1..9: note = Seed: LVVVGARGV (KRAS G12R)
MVVFGHRGV

SEQ ID NO: 26801 - protein, 9 aa, synthetic construct
  source 1..9: note = Seed: LVVVGARGV (KRAS G12R)
MVVFGHRGY

SEQ ID NO: 26802 - protein, 9 aa, synthetic construct
  source 1..9: note = Seed: LVVVGARGV (KRAS G12R)
MVVFGIRGA

SEQ ID NO: 26803 - protein, 9 aa, synthetic construct
  source 1..9: note = Seed: LVVVGARGV (KRAS G12R)
MVVFGIRGF

SEQ ID NO: 26804 - protein, 9 aa, synthetic construct
  source 1..9: note = Seed: LVVVGARGV (KRAS G12R)
MVVFGIRGI

SEQ ID NO: 26805 - protein, 9 aa, synthetic construct
  source 1..9: note = Seed: LVVVGARGV (KRAS G12R)
MVVFGIRGK

SEQ ID NO: 26806 - protein, 9 aa, synthetic construct
  source 1..9: note = Seed: LVVVGARGV (KRAS G12R)
MVVFGIRGL

SEQ ID NO: 26807 - protein, 9 aa, synthetic construct
  source 1..9: note = Seed: LVVVGARGV (KRAS G12R)
MVVFGIRGM

SEQ ID NO: 26808 - protein, 9 aa, synthetic construct
  source 1..9: note = Seed: LVVVGARGV (KRAS G12R)
MVVFGIRGQ

SEQ ID NO: 26809 - protein, 9 aa, synthetic construct
  source 1..9: note = Seed: LVVVGARGV (KRAS G12R)
MVVFGIRGR

SEQ ID NO: 26810 - protein, 9 aa, synthetic construct
  source 1..9: note = Seed: LVVVGARGV (KRAS G12R)
MVVFGIRGS

SEQ ID NO: 26811 - protein, 9 aa, synthetic construct
  source 1..9: note = Seed: LVVVGARGV (KRAS G12R)
MVVFGIRGV

SEQ ID NO: 26812 - protein, 9 aa, synthetic construct
  source 1..9: note = Seed: LVVVGARGV (KRAS G12R)
MVVFGIRGY

SEQ ID NO: 26813 - protein, 9 aa, synthetic construct
  source 1..9: note = Seed: LVVVGARGV (KRAS G12R)
MVVFGKRGA

SEQ ID NO: 26814 - protein, 9 aa, synthetic construct
  source 1..9: note = Seed: LVVVGARGV (KRAS G12R)
MVVFGKRGC

SEQ ID NO: 26815 - protein, 9 aa, synthetic construct
  source 1..9: note = Seed: LVVVGARGV (KRAS G12R)
MVVFGKRGF

SEQ ID NO: 26816 - protein, 9 aa, synthetic construct
  source 1..9: note = Seed: LVVVGARGV (KRAS G12R)
MVVFGKRGG

SEQ ID NO: 26817 - protein, 9 aa, synthetic construct
  source 1..9: note = Seed: LVVVGARGV (KRAS G12R)
MVVFGKRGH

SEQ ID NO: 26818 - protein, 9 aa, synthetic construct
  source 1..9: note = Seed: LVVVGARGV (KRAS G12R)
MVVFGKRGI

SEQ ID NO: 26819 - protein, 9 aa, synthetic construct
  source 1..9: note = Seed: LVVVGARGV (KRAS G12R)
MVVFGKRGK

SEQ ID NO: 26820 - protein, 9 aa, synthetic construct
  source 1..9: note = Seed: LVVVGARGV (KRAS G12R)
MVVFGKRGL

SEQ ID NO: 26821 - protein, 9 aa, synthetic construct
  source 1..9: note = Seed: LVVVGARGV (KRAS G12R)
MVVFGKRGM

SEQ ID NO: 26822 - protein, 9 aa, synthetic construct
  source 1..9: note = Seed: LVVVGARGV (KRAS G12R)
MVVFGKRGN

SEQ ID NO: 26823 - protein, 9 aa, synthetic construct
  source 1..9: note = Seed: LVVVGARGV (KRAS G12R)
MVVFGKRGP

SEQ ID NO: 26824 - protein, 9 aa, synthetic construct
  source 1..9: note = Seed: LVVVGARGV (KRAS G12R)
MVVFGKRGQ

SEQ ID NO: 26825 - protein, 9 aa, synthetic construct
  source 1..9: note = Seed: LVVVGARGV (KRAS G12R)
MVVFGKRGR

SEQ ID NO: 26826 - protein, 9 aa, synthetic construct
  source 1..9: note = Seed: LVVVGARGV (KRAS G12R)
MVVFGKRGS

SEQ ID NO: 26827 - protein, 9 aa, synthetic construct
  source 1..9: note = Seed: LVVVGARGV (KRAS G12R)
MVVFGKRGT

SEQ ID NO: 26828 - protein, 9 aa, synthetic construct
  source 1..9: note = Seed: LVVVGARGV (KRAS G12R)
MVVFGKRGV

SEQ ID NO: 26829 - protein, 9 aa, synthetic construct
  source 1..9: note = Seed: LVVVGARGV (KRAS G12R)
MVVFGKRGW

SEQ ID NO: 26830 - protein, 9 aa, synthetic construct
  source 1..9: note = Seed: LVVVGARGV (KRAS G12R)
MVVFGKRGY

SEQ ID NO: 26831 - protein, 9 aa, synthetic construct
  source 1..9: note = Seed: LVVVGARGV (KRAS G12R)
MVVFGLRGA

SEQ ID NO: 26832 - protein, 9 aa, synthetic construct
  source 1..9: note = Seed: LVVVGARGV (KRAS G12R)
MVVFGLRGK

SEQ ID NO: 26833 - protein, 9 aa, synthetic construct
  source 1..9: note = Seed: LVVVGARGV (KRAS G12R)
MVVFGLRGL

SEQ ID NO: 26834 - protein, 9 aa, synthetic construct
  source 1..9: note = Seed: LVVVGARGV (KRAS G12R)
MVVFGLRGM

SEQ ID NO: 26835 - protein, 9 aa, synthetic construct
  source 1..9: note = Seed: LVVVGARGV (KRAS G12R)
MVVFGLRGR

SEQ ID NO: 26836 - protein, 9 aa, synthetic construct
  source 1..9: note = Seed: LVVVGARGV (KRAS G12R)
MVVFGLRGV

SEQ ID NO: 26837 - protein, 9 aa, synthetic construct
  source 1..9: note = Seed: LVVVGARGV (KRAS G12R)
MVVFGLRGY

SEQ ID NO: 26838 - protein, 9 aa, synthetic construct
  source 1..9: note = Seed: LVVVGARGV (KRAS G12R)
MVVFGMRGA

SEQ ID NO: 26839 - protein, 9 aa, synthetic construct
  source 1..9: note = Seed: LVVVGARGV (KRAS G12R)
MVVFGMRGF

SEQ ID NO: 26840 - protein, 9 aa, synthetic construct
  source 1..9: note = Seed: LVVVGARGV (KRAS G12R)
MVVFGMRGI

SEQ ID NO: 26841 - protein, 9 aa, synthetic construct
  source 1..9: note = Seed: LVVVGARGV (KRAS G12R)
MVVFGMRGK

SEQ ID NO: 26842 - protein, 9 aa, synthetic construct
  source 1..9: note = Seed: LVVVGARGV (KRAS G12R)
MVVFGMRGL

SEQ ID NO: 26843 - protein, 9 aa, synthetic construct
  source 1..9: note = Seed: LVVVGARGV (KRAS G12R)
MVVFGMRGM

SEQ ID NO: 26844 - protein, 9 aa, synthetic construct
  source 1..9: note = Seed: LVVVGARGV (KRAS G12R)
MVVFGMRGQ

SEQ ID NO: 26845 - protein, 9 aa, synthetic construct
  source 1..9: note = Seed: LVVVGARGV (KRAS G12R)
MVVFGMRGR

SEQ ID NO: 26846 - protein, 9 aa, synthetic construct
  source 1..9: note = Seed: LVVVGARGV (KRAS G12R)
MVVFGMRGV

SEQ ID NO: 26847 - protein, 9 aa, synthetic construct
  source 1..9: note = Seed: LVVVGARGV (KRAS G12R)
MVVFGMRGY

SEQ ID NO: 26848 - protein, 9 aa, synthetic construct
  source 1..9: note = Seed: LVVVGARGV (KRAS G12R)
MVVFGNRGA

SEQ ID NO: 26849 - protein, 9 aa, synthetic construct
  source 1..9: note = Seed: LVVVGARGV (KRAS G12R)
MVVFGNRGF

SEQ ID NO: 26850 - protein, 9 aa, synthetic construct
  source 1..9: note = Seed: LVVVGARGV (KRAS G12R)
MVVFGNRGH

SEQ ID NO: 26851 - protein, 9 aa, synthetic construct
  source 1..9: note = Seed: LVVVGARGV (KRAS G12R)
MVVFGNRGI

SEQ ID NO: 26852 - protein, 9 aa, synthetic construct
  source 1..9: note = Seed: LVVVGARGV (KRAS G12R)
MVVFGNRGK

SEQ ID NO: 26853 - protein, 9 aa, synthetic construct
  source 1..9: note = Seed: LVVVGARGV (KRAS G12R)
MVVFGNRGL

SEQ ID NO: 26854 - protein, 9 aa, synthetic construct
  source 1..9: note = Seed: LVVVGARGV (KRAS G12R)
MVVFGNRGM

SEQ ID NO: 26855 - protein, 9 aa, synthetic construct
  source 1..9: note = Seed: LVVVGARGV (KRAS G12R)
MVVFGNRGR

SEQ ID NO: 26856 - protein, 9 aa, synthetic construct
  source 1..9: note = Seed: LVVVGARGV (KRAS G12R)
MVVFGNRGS

SEQ ID NO: 26857 - protein, 9 aa, synthetic construct
  source 1..9: note = Seed: LVVVGARGV (KRAS G12R)
MVVFGNRGT

SEQ ID NO: 26858 - protein, 9 aa, synthetic construct
  source 1..9: note = Seed: LVVVGARGV (KRAS G12R)
MVVFGNRGV

SEQ ID NO: 26859 - protein, 9 aa, synthetic construct
  source 1..9: note = Seed: LVVVGARGV (KRAS G12R)
MVVFGNRGY

SEQ ID NO: 26860 - protein, 9 aa, synthetic construct
  source 1..9: note = Seed: LVVVGARGV (KRAS G12R)
MVVFGPRGI

SEQ ID NO: 26861 - protein, 9 aa, synthetic construct
  source 1..9: note = Seed: LVVVGARGV (KRAS G12R)
MVVFGPRGK

SEQ ID NO: 26862 - protein, 9 aa, synthetic construct
  source 1..9: note = Seed: LVVVGARGV (KRAS G12R)
MVVFGPRGL

SEQ ID NO: 26863 - protein, 9 aa, synthetic construct
  source 1..9: note = Seed: LVVVGARGV (KRAS G12R)
MVVFGPRGR

SEQ ID NO: 26864 - protein, 9 aa, synthetic construct
  source 1..9: note = Seed: LVVVGARGV (KRAS G12R)
MVVFGPRGV

SEQ ID NO: 26865 - protein, 9 aa, synthetic construct
  source 1..9: note = Seed: LVVVGARGV (KRAS G12R)
MVVFGQRGK

SEQ ID NO: 26866 - protein, 9 aa, synthetic construct
  source 1..9: note = Seed: LVVVGARGV (KRAS G12R)
MVVFGQRGL

SEQ ID NO: 26867 - protein, 9 aa, synthetic construct
  source 1..9: note = Seed: LVVVGARGV (KRAS G12R)
MVVFGQRGR

SEQ ID NO: 26868 - protein, 9 aa, synthetic construct
  source 1..9: note = Seed: LVVVGARGV (KRAS G12R)
MVVFGRRGA

SEQ ID NO: 26869 - protein, 9 aa, synthetic construct
  source 1..9: note = Seed: LVVVGARGV (KRAS G12R)
MVVFGRRGC

SEQ ID NO: 26870 - protein, 9 aa, synthetic construct
  source 1..9: note = Seed: LVVVGARGV (KRAS G12R)
MVVFGRRGE

SEQ ID NO: 26871 - protein, 9 aa, synthetic construct
  source 1..9: note = Seed: LVVVGARGV (KRAS G12R)
MVVFGRRGF

SEQ ID NO: 26872 - protein, 9 aa, synthetic construct
  source 1..9: note = Seed: LVVVGARGV (KRAS G12R)
MVVFGRRGG

SEQ ID NO: 26873 - protein, 9 aa, synthetic construct
  source 1..9: note = Seed: LVVVGARGV (KRAS G12R)
MVVFGRRGH

SEQ ID NO: 26874 - protein, 9 aa, synthetic construct
  source 1..9: note = Seed: LVVVGARGV (KRAS G12R)
MVVFGRRGI

SEQ ID NO: 26875 - protein, 9 aa, synthetic construct
  source 1..9: note = Seed: LVVVGARGV (KRAS G12R)
MVVFGRRGK

SEQ ID NO: 26876 - protein, 9 aa, synthetic construct
  source 1..9: note = Seed: LVVVGARGV (KRAS G12R)
MVVFGRRGL

SEQ ID NO: 26877 - protein, 9 aa, synthetic construct
  source 1..9: note = Seed: LVVVGARGV (KRAS G12R)
MVVFGRRGM

SEQ ID NO: 26878 - protein, 9 aa, synthetic construct
  source 1..9: note = Seed: LVVVGARGV (KRAS G12R)
MVVFGRRGN

SEQ ID NO: 26879 - protein, 9 aa, synthetic construct
  source 1..9: note = Seed: LVVVGARGV (KRAS G12R)
MVVFGRRGP

SEQ ID NO: 26880 - protein, 9 aa, synthetic construct
  source 1..9: note = Seed: LVVVGARGV (KRAS G12R)
MVVFGRRGQ

SEQ ID NO: 26881 - protein, 9 aa, synthetic construct
  source 1..9: note = Seed: LVVVGARGV (KRAS G12R)
MVVFGRRGR

SEQ ID NO: 26882 - protein, 9 aa, synthetic construct
  source 1..9: note = Seed: LVVVGARGV (KRAS G12R)
MVVFGRRGS

SEQ ID NO: 26883 - protein, 9 aa, synthetic construct
  source 1..9: note = Seed: LVVVGARGV (KRAS G12R)
MVVFGRRGT

SEQ ID NO: 26884 - protein, 9 aa, synthetic construct
  source 1..9: note = Seed: LVVVGARGV (KRAS G12R)
MVVFGRRGV

SEQ ID NO: 26885 - protein, 9 aa, synthetic construct
  source 1..9: note = Seed: LVVVGARGV (KRAS G12R)
MVVFGRRGW

SEQ ID NO: 26886 - protein, 9 aa, synthetic construct
  source 1..9: note = Seed: LVVVGARGV (KRAS G12R)
MVVFGRRGY

SEQ ID NO: 26887 - protein, 9 aa, synthetic construct
  source 1..9: note = Seed: LVVVGARGV (KRAS G12R)
MVVFGSRGA

SEQ ID NO: 26888 - protein, 9 aa, synthetic construct
  source 1..9: note = Seed: LVVVGARGV (KRAS G12R)
MVVFGSRGF

SEQ ID NO: 26889 - protein, 9 aa, synthetic construct
  source 1..9: note = Seed: LVVVGARGV (KRAS G12R)
MVVFGSRGH

SEQ ID NO: 26890 - protein, 9 aa, synthetic construct
  source 1..9: note = Seed: LVVVGARGV (KRAS G12R)
MVVFGSRGI

SEQ ID NO: 26891 - protein, 9 aa, synthetic construct
  source 1..9: note = Seed: LVVVGARGV (KRAS G12R)
MVVFGSRGK

SEQ ID NO: 26892 - protein, 9 aa, synthetic construct
  source 1..9: note = Seed: LVVVGARGV (KRAS G12R)
MVVFGSRGL

SEQ ID NO: 26893 - protein, 9 aa, synthetic construct
  source 1..9: note = Seed: LVVVGARGV (KRAS G12R)
MVVFGSRGM

SEQ ID NO: 26894 - protein, 9 aa, synthetic construct
  source 1..9: note = Seed: LVVVGARGV (KRAS G12R)
MVVFGSRGR

SEQ ID NO: 26895 - protein, 9 aa, synthetic construct
  source 1..9: note = Seed: LVVVGARGV (KRAS G12R)
MVVFGSRGS

SEQ ID NO: 26896 - protein, 9 aa, synthetic construct
  source 1..9: note = Seed: LVVVGARGV (KRAS G12R)
MVVFGSRGT

SEQ ID NO: 26897 - protein, 9 aa, synthetic construct
  source 1..9: note = Seed: LVVVGARGV (KRAS G12R)
MVVFGSRGV

SEQ ID NO: 26898 - protein, 9 aa, synthetic construct
  source 1..9: note = Seed: LVVVGARGV (KRAS G12R)
MVVFGSRGY

SEQ ID NO: 26899 - protein, 9 aa, synthetic construct
  source 1..9: note = Seed: LVVVGARGV (KRAS G12R)
MVVFGTRGA

SEQ ID NO: 26900 - protein, 9 aa, synthetic construct
  source 1..9: note = Seed: LVVVGARGV (KRAS G12R)
MVVFGTRGF

SEQ ID NO: 26901 - protein, 9 aa, synthetic construct
  source 1..9: note = Seed: LVVVGARGV (KRAS G12R)
MVVFGTRGH

SEQ ID NO: 26902 - protein, 9 aa, synthetic construct
  source 1..9: note = Seed: LVVVGARGV (KRAS G12R)
MVVFGTRGI

SEQ ID NO: 26903 - protein, 9 aa, synthetic construct
  source 1..9: note = Seed: LVVVGARGV (KRAS G12R)
MVVFGTRGK

SEQ ID NO: 26904 - protein, 9 aa, synthetic construct
  source 1..9: note = Seed: LVVVGARGV (KRAS G12R)
MVVFGTRGL

SEQ ID NO: 26905 - protein, 9 aa, synthetic construct
  source 1..9: note = Seed: LVVVGARGV (KRAS G12R)
MVVFGTRGM

SEQ ID NO: 26906 - protein, 9 aa, synthetic construct
  source 1..9: note = Seed: LVVVGARGV (KRAS G12R)
MVVFGTRGR

SEQ ID NO: 26907 - protein, 9 aa, synthetic construct
  source 1..9: note = Seed: LVVVGARGV (KRAS G12R)
MVVFGTRGS

SEQ ID NO: 26908 - protein, 9 aa, synthetic construct
  source 1..9: note = Seed: LVVVGARGV (KRAS G12R)
MVVFGTRGT

SEQ ID NO: 26909 - protein, 9 aa, synthetic construct
  source 1..9: note = Seed: LVVVGARGV (KRAS G12R)
MVVFGTRGV

SEQ ID NO: 26910 - protein, 9 aa, synthetic construct
  source 1..9: note = Seed: LVVVGARGV (KRAS G12R)
MVVFGTRGY

SEQ ID NO: 26911 - protein, 9 aa, synthetic construct
  source 1..9: note = Seed: LVVVGARGV (KRAS G12R)
MVVFGVRGA

SEQ ID NO: 26912 - protein, 9 aa, synthetic construct
  source 1..9: note = Seed: LVVVGARGV (KRAS G12R)
MVVFGVRGF

SEQ ID NO: 26913 - protein, 9 aa, synthetic construct
  source 1..9: note = Seed: LVVVGARGV (KRAS G12R)
MVVFGVRGH

SEQ ID NO: 26914 - protein, 9 aa, synthetic construct
  source 1..9: note = Seed: LVVVGARGV (KRAS G12R)
MVVFGVRGI

SEQ ID NO: 26915 - protein, 9 aa, synthetic construct
  source 1..9: note = Seed: LVVVGARGV (KRAS G12R)
MVVFGVRGK

SEQ ID NO: 26916 - protein, 9 aa, synthetic construct
  source 1..9: note = Seed: LVVVGARGV (KRAS G12R)
MVVFGVRGL

SEQ ID NO: 26917 - protein, 9 aa, synthetic construct
  source 1..9: note = Seed: LVVVGARGV (KRAS G12R)
MVVFGVRGM

SEQ ID NO: 26918 - protein, 9 aa, synthetic construct
  source 1..9: note = Seed: LVVVGARGV (KRAS G12R)
MVVFGVRGR

SEQ ID NO: 26919 - protein, 9 aa, synthetic construct
  source 1..9: note = Seed: LVVVGARGV (KRAS G12R)
MVVFGVRGS

SEQ ID NO: 26920 - protein, 9 aa, synthetic construct
  source 1..9: note = Seed: LVVVGARGV (KRAS G12R)
MVVFGVRGV

SEQ ID NO: 26921 - protein, 9 aa, synthetic construct
  source 1..9: note = Seed: LVVVGARGV (KRAS G12R)
MVVFGVRGY

SEQ ID NO: 26922 - protein, 9 aa, synthetic construct
  source 1..9: note = Seed: LVVVGARGV (KRAS G12R)
MVVFGYRGR

SEQ ID NO: 26923 - protein, 9 aa, synthetic construct
  source 1..9: note = Seed: LVVVGARGV (KRAS G12R)
MVVGGARGA

SEQ ID NO: 26924 - protein, 9 aa, synthetic construct
  source 1..9: note = Seed: LVVVGARGV (KRAS G12R)
MVVGGARGI

SEQ ID NO: 26925 - protein, 9 aa, synthetic construct
  source 1..9: note = Seed: LVVVGARGV (KRAS G12R)
MVVGGARGL

SEQ ID NO: 26926 - protein, 9 aa, synthetic construct
  source 1..9: note = Seed: LVVVGARGV (KRAS G12R)
MVVGGARGM

SEQ ID NO: 26927 - protein, 9 aa, synthetic construct
  source 1..9: note = Seed: LVVVGARGV (KRAS G12R)
MVVGGARGV

SEQ ID NO: 26928 - protein, 9 aa, synthetic construct
  source 1..9: note = Seed: LVVVGARGV (KRAS G12R)
MVVGGGRGL

SEQ ID NO: 26929 - protein, 9 aa, synthetic construct
  source 1..9: note = Seed: LVVVGARGV (KRAS G12R)
MVVGGIRGL

SEQ ID NO: 26930 - protein, 9 aa, synthetic construct
  source 1..9: note = Seed: LVVVGARGV (KRAS G12R)
MVVGGIRGV

SEQ ID NO: 26931 - protein, 9 aa, synthetic construct
  source 1..9: note = Seed: LVVVGARGV (KRAS G12R)
MVVGGRRGL

SEQ ID NO: 26932 - protein, 9 aa, synthetic construct
  source 1..9: note = Seed: LVVVGARGV (KRAS G12R)
MVVGGRRGM

SEQ ID NO: 26933 - protein, 9 aa, synthetic construct
  source 1..9: note = Seed: LVVVGARGV (KRAS G12R)
MVVGGRRGR

SEQ ID NO: 26934 - protein, 9 aa, synthetic construct
  source 1..9: note = Seed: LVVVGARGV (KRAS G12R)
MVVGGSRGI

SEQ ID NO: 26935 - protein, 9 aa, synthetic construct
  source 1..9: note = Seed: LVVVGARGV (KRAS G12R)
MVVGGSRGL

SEQ ID NO: 26936 - protein, 9 aa, synthetic construct
  source 1..9: note = Seed: LVVVGARGV (KRAS G12R)
MVVGGSRGV

SEQ ID NO: 26937 - protein, 9 aa, synthetic construct
  source 1..9: note = Seed: LVVVGARGV (KRAS G12R)
MVVGGVRGI

SEQ ID NO: 26938 - protein, 9 aa, synthetic construct
  source 1..9: note = Seed: LVVVGARGV (KRAS G12R)
MVVGGVRGL

SEQ ID NO: 26939 - protein, 9 aa, synthetic construct
  source 1..9: note = Seed: LVVVGARGV (KRAS G12R)
MVVGGVRGV

SEQ ID NO: 26940 - protein, 9 aa, synthetic construct
  source 1..9: note = Seed: LVVVGARGV (KRAS G12R)
MVVHGARGF

SEQ ID NO: 26941 - protein, 9 aa, synthetic construct
  source 1..9: note = Seed: LVVVGARGV (KRAS G12R)
MVVHGARGI

SEQ ID NO: 26942 - protein, 9 aa, synthetic construct
  source 1..9: note = Seed: LVVVGARGV (KRAS G12R)
MVVHGARGK

SEQ ID NO: 26943 - protein, 9 aa, synthetic construct
  source 1..9: note = Seed: LVVVGARGV (KRAS G12R)
MVVHGARGL

SEQ ID NO: 26944 - protein, 9 aa, synthetic construct
  source 1..9: note = Seed: LVVVGARGV (KRAS G12R)
MVVHGARGM

SEQ ID NO: 26945 - protein, 9 aa, synthetic construct
  source 1..9: note = Seed: LVVVGARGV (KRAS G12R)
MVVHGARGR

SEQ ID NO: 26946 - protein, 9 aa, synthetic construct
  source 1..9: note = Seed: LVVVGARGV (KRAS G12R)
MVVHGARGV

SEQ ID NO: 26947 - protein, 9 aa, synthetic construct
  source 1..9: note = Seed: LVVVGARGV (KRAS G12R)
MVVHGARGY

SEQ ID NO: 26948 - protein, 9 aa, synthetic construct
  source 1..9: note = Seed: LVVVGARGV (KRAS G12R)
MVVHGFRGR

SEQ ID NO: 26949 - protein, 9 aa, synthetic construct
  source 1..9: note = Seed: LVVVGARGV (KRAS G12R)
MVVHGHRGF

SEQ ID NO: 26950 - protein, 9 aa, synthetic construct
  source 1..9: note = Seed: LVVVGARGV (KRAS G12R)
MVVHGHRGI

SEQ ID NO: 26951 - protein, 9 aa, synthetic construct
  source 1..9: note = Seed: LVVVGARGV (KRAS G12R)
MVVHGHRGK

SEQ ID NO: 26952 - protein, 9 aa, synthetic construct
  source 1..9: note = Seed: LVVVGARGV (KRAS G12R)
MVVHGHRGL

SEQ ID NO: 26953 - protein, 9 aa, synthetic construct
  source 1..9: note = Seed: LVVVGARGV (KRAS G12R)
MVVHGHRGM

SEQ ID NO: 26954 - protein, 9 aa, synthetic construct
  source 1..9: note = Seed: LVVVGARGV (KRAS G12R)
MVVHGHRGR

SEQ ID NO: 26955 - protein, 9 aa, synthetic construct
  source 1..9: note = Seed: LVVVGARGV (KRAS G12R)
MVVHGHRGY

SEQ ID NO: 26956 - protein, 9 aa, synthetic construct
  source 1..9: note = Seed: LVVVGARGV (KRAS G12R)
MVVHGIRGA

SEQ ID NO: 26957 - protein, 9 aa, synthetic construct
  source 1..9: note = Seed: LVVVGARGV (KRAS G12R)
MVVHGIRGF

SEQ ID NO: 26958 - protein, 9 aa, synthetic construct
  source 1..9: note = Seed: LVVVGARGV (KRAS G12R)
MVVHGIRGI

SEQ ID NO: 26959 - protein, 9 aa, synthetic construct
  source 1..9: note = Seed: LVVVGARGV (KRAS G12R)
MVVHGIRGK

SEQ ID NO: 26960 - protein, 9 aa, synthetic construct
  source 1..9: note = Seed: LVVVGARGV (KRAS G12R)
MVVHGIRGL

SEQ ID NO: 26961 - protein, 9 aa, synthetic construct
  source 1..9: note = Seed: LVVVGARGV (KRAS G12R)
MVVHGIRGM

SEQ ID NO: 26962 - protein, 9 aa, synthetic construct
  source 1..9: note = Seed: LVVVGARGV (KRAS G12R)
MVVHGIRGR

SEQ ID NO: 26963 - protein, 9 aa, synthetic construct
  source 1..9: note = Seed: LVVVGARGV (KRAS G12R)
MVVHGIRGV

SEQ ID NO: 26964 - protein, 9 aa, synthetic construct
  source 1..9: note = Seed: LVVVGARGV (KRAS G12R)
MVVHGIRGY

SEQ ID NO: 26965 - protein, 9 aa, synthetic construct
  source 1..9: note = Seed: LVVVGARGV (KRAS G12R)
MVVHGKRGA

SEQ ID NO: 26966 - protein, 9 aa, synthetic construct
  source 1..9: note = Seed: LVVVGARGV (KRAS G12R)
MVVHGKRGF

SEQ ID NO: 26967 - protein, 9 aa, synthetic construct
  source 1..9: note = Seed: LVVVGARGV (KRAS G12R)
MVVHGKRGG

SEQ ID NO: 26968 - protein, 9 aa, synthetic construct
  source 1..9: note = Seed: LVVVGARGV (KRAS G12R)
MVVHGKRGH

SEQ ID NO: 26969 - protein, 9 aa, synthetic construct
  source 1..9: note = Seed: LVVVGARGV (KRAS G12R)
MVVHGKRGI

SEQ ID NO: 26970 - protein, 9 aa, synthetic construct
  source 1..9: note = Seed: LVVVGARGV (KRAS G12R)
MVVHGKRGK

SEQ ID NO: 26971 - protein, 9 aa, synthetic construct
  source 1..9: note = Seed: LVVVGARGV (KRAS G12R)
MVVHGKRGL

SEQ ID NO: 26972 - protein, 9 aa, synthetic construct
  source 1..9: note = Seed: LVVVGARGV (KRAS G12R)
MVVHGKRGM

SEQ ID NO: 26973 - protein, 9 aa, synthetic construct
  source 1..9: note = Seed: LVVVGARGV (KRAS G12R)
MVVHGKRGQ

SEQ ID NO: 26974 - protein, 9 aa, synthetic construct
  source 1..9: note = Seed: LVVVGARGV (KRAS G12R)
MVVHGKRGR

SEQ ID NO: 26975 - protein, 9 aa, synthetic construct
  source 1..9: note = Seed: LVVVGARGV (KRAS G12R)
MVVHGKRGS

SEQ ID NO: 26976 - protein, 9 aa, synthetic construct
  source 1..9: note = Seed: LVVVGARGV (KRAS G12R)
MVVHGKRGT

SEQ ID NO: 26977 - protein, 9 aa, synthetic construct
  source 1..9: note = Seed: LVVVGARGV (KRAS G12R)
MVVHGKRGV

SEQ ID NO: 26978 - protein, 9 aa, synthetic construct
  source 1..9: note = Seed: LVVVGARGV (KRAS G12R)
MVVHGKRGW

SEQ ID NO: 26979 - protein, 9 aa, synthetic construct
  source 1..9: note = Seed: LVVVGARGV (KRAS G12R)
MVVHGKRGY

SEQ ID NO: 26980 - protein, 9 aa, synthetic construct
  source 1..9: note = Seed: LVVVGARGV (KRAS G12R)
MVVHGLRGA

SEQ ID NO: 26981 - protein, 9 aa, synthetic construct
  source 1..9: note = Seed: LVVVGARGV (KRAS G12R)
MVVHGLRGF

SEQ ID NO: 26982 - protein, 9 aa, synthetic construct
  source 1..9: note = Seed: LVVVGARGV (KRAS G12R)
MVVHGLRGI

SEQ ID NO: 26983 - protein, 9 aa, synthetic construct
  source 1..9: note = Seed: LVVVGARGV (KRAS G12R)
MVVHGLRGK

SEQ ID NO: 26984 - protein, 9 aa, synthetic construct
  source 1..9: note = Seed: LVVVGARGV (KRAS G12R)
MVVHGLRGL

SEQ ID NO: 26985 - protein, 9 aa, synthetic construct
  source 1..9: note = Seed: LVVVGARGV (KRAS G12R)
MVVHGLRGM

SEQ ID NO: 26986 - protein, 9 aa, synthetic construct
  source 1..9: note = Seed: LVVVGARGV (KRAS G12R)
MVVHGLRGR

SEQ ID NO: 26987 - protein, 9 aa, synthetic construct
  source 1..9: note = Seed: LVVVGARGV (KRAS G12R)
MVVHGLRGV

SEQ ID NO: 26988 - protein, 9 aa, synthetic construct
  source 1..9: note = Seed: LVVVGARGV (KRAS G12R)
MVVHGLRGY

SEQ ID NO: 26989 - protein, 9 aa, synthetic construct
  source 1..9: note = Seed: LVVVGARGV (KRAS G12R)
MVVHGMRGA

SEQ ID NO: 26990 - protein, 9 aa, synthetic construct
  source 1..9: note = Seed: LVVVGARGV (KRAS G12R)
MVVHGMRGF

SEQ ID NO: 26991 - protein, 9 aa, synthetic construct
  source 1..9: note = Seed: LVVVGARGV (KRAS G12R)
MVVHGMRGI

SEQ ID NO: 26992 - protein, 9 aa, synthetic construct
  source 1..9: note = Seed: LVVVGARGV (KRAS G12R)
MVVHGMRGK

SEQ ID NO: 26993 - protein, 9 aa, synthetic construct
  source 1..9: note = Seed: LVVVGARGV (KRAS G12R)
MVVHGMRGL

SEQ ID NO: 26994 - protein, 9 aa, synthetic construct
  source 1..9: note = Seed: LVVVGARGV (KRAS G12R)
MVVHGMRGR

SEQ ID NO: 26995 - protein, 9 aa, synthetic construct
  source 1..9: note = Seed: LVVVGARGV (KRAS G12R)
MVVHGMRGY

SEQ ID NO: 26996 - protein, 9 aa, synthetic construct
  source 1..9: note = Seed: LVVVGARGV (KRAS G12R)
MVVHGNRGF

SEQ ID NO: 26997 - protein, 9 aa, synthetic construct
  source 1..9: note = Seed: LVVVGARGV (KRAS G12R)
MVVHGNRGI

SEQ ID NO: 26998 - protein, 9 aa, synthetic construct
  source 1..9: note = Seed: LVVVGARGV (KRAS G12R)
MVVHGNRGL

SEQ ID NO: 26999 - protein, 9 aa, synthetic construct
  source 1..9: note = Seed: LVVVGARGV (KRAS G12R)
MVVHGNRGM

SEQ ID NO: 27000 - protein, 9 aa, synthetic construct
  source 1..9: note = Seed: LVVVGARGV (KRAS G12R)
MVVHGNRGR

SEQ ID NO: 27001 - protein, 9 aa, synthetic construct
  source 1..9: note = Seed: LVVVGARGV (KRAS G12R)
MVVHGNRGY

SEQ ID NO: 27002 - protein, 9 aa, synthetic construct
  source 1..9: note = Seed: LVVVGARGV (KRAS G12R)
MVVHGPRGR

SEQ ID NO: 27003 - protein, 9 aa, synthetic construct
  source 1..9: note = Seed: LVVVGARGV (KRAS G12R)
MVVHGQRGR

SEQ ID NO: 27004 - protein, 9 aa, synthetic construct
  source 1..9: note = Seed: LVVVGARGV (KRAS G12R)
MVVHGRRGA

SEQ ID NO: 27005 - protein, 9 aa, synthetic construct
  source 1..9: note = Seed: LVVVGARGV (KRAS G12R)
MVVHGRRGF

SEQ ID NO: 27006 - protein, 9 aa, synthetic construct
  source 1..9: note = Seed: LVVVGARGV (KRAS G12R)
MVVHGRRGG

SEQ ID NO: 27007 - protein, 9 aa, synthetic construct
  source 1..9: note = Seed: LVVVGARGV (KRAS G12R)
MVVHGRRGH

SEQ ID NO: 27008 - protein, 9 aa, synthetic construct
  source 1..9: note = Seed: LVVVGARGV (KRAS G12R)
MVVHGRRGI

SEQ ID NO: 27009 - protein, 9 aa, synthetic construct
  source 1..9: note = Seed: LVVVGARGV (KRAS G12R)
MVVHGRRGK

SEQ ID NO: 27010 - protein, 9 aa, synthetic construct
  source 1..9: note = Seed: LVVVGARGV (KRAS G12R)
MVVHGRRGL

SEQ ID NO: 27011 - protein, 9 aa, synthetic construct
  source 1..9: note = Seed: LVVVGARGV (KRAS G12R)
MVVHGRRGM

SEQ ID NO: 27012 - protein, 9 aa, synthetic construct
  source 1..9: note = Seed: LVVVGARGV (KRAS G12R)
MVVHGRRGN

SEQ ID NO: 27013 - protein, 9 aa, synthetic construct
  source 1..9: note = Seed: LVVVGARGV (KRAS G12R)
MVVHGRRGP

SEQ ID NO: 27014 - protein, 9 aa, synthetic construct
  source 1..9: note = Seed: LVVVGARGV (KRAS G12R)
MVVHGRRGQ

SEQ ID NO: 27015 - protein, 9 aa, synthetic construct
  source 1..9: note = Seed: LVVVGARGV (KRAS G12R)
MVVHGRRGR

SEQ ID NO: 27016 - protein, 9 aa, synthetic construct
  source 1..9: note = Seed: LVVVGARGV (KRAS G12R)
MVVHGRRGS

SEQ ID NO: 27017 - protein, 9 aa, synthetic construct
  source 1..9: note = Seed: LVVVGARGV (KRAS G12R)
MVVHGRRGT

SEQ ID NO: 27018 - protein, 9 aa, synthetic construct
  source 1..9: note = Seed: LVVVGARGV (KRAS G12R)
MVVHGRRGV

SEQ ID NO: 27019 - protein, 9 aa, synthetic construct
  source 1..9: note = Seed: LVVVGARGV (KRAS G12R)
MVVHGRRGW

SEQ ID NO: 27020 - protein, 9 aa, synthetic construct
  source 1..9: note = Seed: LVVVGARGV (KRAS G12R)
MVVHGRRGY

SEQ ID NO: 27021 - protein, 9 aa, synthetic construct
  source 1..9: note = Seed: LVVVGARGV (KRAS G12R)
MVVHGSRGF

SEQ ID NO: 27022 - protein, 9 aa, synthetic construct
  source 1..9: note = Seed: LVVVGARGV (KRAS G12R)
MVVHGSRGI

SEQ ID NO: 27023 - protein, 9 aa, synthetic construct
  source 1..9: note = Seed: LVVVGARGV (KRAS G12R)
MVVHGSRGK

SEQ ID NO: 27024 - protein, 9 aa, synthetic construct
  source 1..9: note = Seed: LVVVGARGV (KRAS G12R)
MVVHGSRGL

SEQ ID NO: 27025 - protein, 9 aa, synthetic construct
  source 1..9: note = Seed: LVVVGARGV (KRAS G12R)
MVVHGSRGM

SEQ ID NO: 27026 - protein, 9 aa, synthetic construct
  source 1..9: note = Seed: LVVVGARGV (KRAS G12R)
MVVHGSRGR

SEQ ID NO: 27027 - protein, 9 aa, synthetic construct
  source 1..9: note = Seed: LVVVGARGV (KRAS G12R)
MVVHGSRGV

SEQ ID NO: 27028 - protein, 9 aa, synthetic construct
  source 1..9: note = Seed: LVVVGARGV (KRAS G12R)
MVVHGSRGY

SEQ ID NO: 27029 - protein, 9 aa, synthetic construct
  source 1..9: note = Seed: LVVVGARGV (KRAS G12R)
MVVHGTRGF

SEQ ID NO: 27030 - protein, 9 aa, synthetic construct
  source 1..9: note = Seed: LVVVGARGV (KRAS G12R)
MVVHGTRGI

SEQ ID NO: 27031 - protein, 9 aa, synthetic construct
  source 1..9: note = Seed: LVVVGARGV (KRAS G12R)
MVVHGTRGK

SEQ ID NO: 27032 - protein, 9 aa, synthetic construct
  source 1..9: note = Seed: LVVVGARGV (KRAS G12R)
MVVHGTRGL

SEQ ID NO: 27033 - protein, 9 aa, synthetic construct
  source 1..9: note = Seed: LVVVGARGV (KRAS G12R)
MVVHGTRGM

SEQ ID NO: 27034 - protein, 9 aa, synthetic construct
  source 1..9: note = Seed: LVVVGARGV (KRAS G12R)
MVVHGTRGR

SEQ ID NO: 27035 - protein, 9 aa, synthetic construct
  source 1..9: note = Seed: LVVVGARGV (KRAS G12R)
MVVHGTRGY

SEQ ID NO: 27036 - protein, 9 aa, synthetic construct
  source 1..9: note = Seed: LVVVGARGV (KRAS G12R)
MVVHGVRGF

SEQ ID NO: 27037 - protein, 9 aa, synthetic construct
  source 1..9: note = Seed: LVVVGARGV (KRAS G12R)
MVVHGVRGI

SEQ ID NO: 27038 - protein, 9 aa, synthetic construct
  source 1..9: note = Seed: LVVVGARGV (KRAS G12R)
MVVHGVRGK

SEQ ID NO: 27039 - protein, 9 aa, synthetic construct
  source 1..9: note = Seed: LVVVGARGV (KRAS G12R)
MVVHGVRGL

SEQ ID NO: 27040 - protein, 9 aa, synthetic construct
  source 1..9: note = Seed: LVVVGARGV (KRAS G12R)
MVVHGVRGM

SEQ ID NO: 27041 - protein, 9 aa, synthetic construct
  source 1..9: note = Seed: LVVVGARGV (KRAS G12R)
MVVHGVRGR

SEQ ID NO: 27042 - protein, 9 aa, synthetic construct
  source 1..9: note = Seed: LVVVGARGV (KRAS G12R)
MVVHGVRGV

SEQ ID NO: 27043 - protein, 9 aa, synthetic construct
  source 1..9: note = Seed: LVVVGARGV (KRAS G12R)
MVVHGVRGY

SEQ ID NO: 27044 - protein, 9 aa, synthetic construct
  source 1..9: note = Seed: LVVVGARGV (KRAS G12R)
MVVHGYRGR

SEQ ID NO: 27045 - protein, 9 aa, synthetic construct
  source 1..9: note = Seed: LVVVGARGV (KRAS G12R)
MVVIGARGA

SEQ ID NO: 27046 - protein, 9 aa, synthetic construct
  source 1..9: note = Seed: LVVVGARGV (KRAS G12R)
MVVIGARGC

SEQ ID NO: 27047 - protein, 9 aa, synthetic construct
  source 1..9: note = Seed: LVVVGARGV (KRAS G12R)
MVVIGARGF

SEQ ID NO: 27048 - protein, 9 aa, synthetic construct
  source 1..9: note = Seed: LVVVGARGV (KRAS G12R)
MVVIGARGG

SEQ ID NO: 27049 - protein, 9 aa, synthetic construct
  source 1..9: note = Seed: LVVVGARGV (KRAS G12R)
MVVIGARGI

SEQ ID NO: 27050 - protein, 9 aa, synthetic construct
  source 1..9: note = Seed: LVVVGARGV (KRAS G12R)
MVVIGARGK

SEQ ID NO: 27051 - protein, 9 aa, synthetic construct
  source 1..9: note = Seed: LVVVGARGV (KRAS G12R)
MVVIGARGL

SEQ ID NO: 27052 - protein, 9 aa, synthetic construct
  source 1..9: note = Seed: LVVVGARGV (KRAS G12R)
MVVIGARGM

SEQ ID NO: 27053 - protein, 9 aa, synthetic construct
  source 1..9: note = Seed: LVVVGARGV (KRAS G12R)
MVVIGARGN

SEQ ID NO: 27054 - protein, 9 aa, synthetic construct
  source 1..9: note = Seed: LVVVGARGV (KRAS G12R)
MVVIGARGQ

SEQ ID NO: 27055 - protein, 9 aa, synthetic construct
  source 1..9: note = Seed: LVVVGARGV (KRAS G12R)
MVVIGARGR

SEQ ID NO: 27056 - protein, 9 aa, synthetic construct
  source 1..9: note = Seed: LVVVGARGV (KRAS G12R)
MVVIGARGS

SEQ ID NO: 27057 - protein, 9 aa, synthetic construct
  source 1..9: note = Seed: LVVVGARGV (KRAS G12R)
MVVIGARGT

SEQ ID NO: 27058 - protein, 9 aa, synthetic construct
  source 1..9: note = Seed: LVVVGARGV (KRAS G12R)
MVVIGARGV

SEQ ID NO: 27059 - protein, 9 aa, synthetic construct
  source 1..9: note = Seed: LVVVGARGV (KRAS G12R)
MVVIGARGY

SEQ ID NO: 27060 - protein, 9 aa, synthetic construct
  source 1..9: note = Seed: LVVVGARGV (KRAS G12R)
MVVIGCRGR

SEQ ID NO: 27061 - protein, 9 aa, synthetic construct
  source 1..9: note = Seed: LVVVGARGV (KRAS G12R)
MVVIGFRGI

SEQ ID NO: 27062 - protein, 9 aa, synthetic construct
  source 1..9: note = Seed: LVVVGARGV (KRAS G12R)
MVVIGFRGL

SEQ ID NO: 27063 - protein, 9 aa, synthetic construct
  source 1..9: note = Seed: LVVVGARGV (KRAS G12R)
MVVIGFRGR

SEQ ID NO: 27064 - protein, 9 aa, synthetic construct
  source 1..9: note = Seed: LVVVGARGV (KRAS G12R)
MVVIGFRGV

SEQ ID NO: 27065 - protein, 9 aa, synthetic construct
  source 1..9: note = Seed: LVVVGARGV (KRAS G12R)
MVVIGGRGA

SEQ ID NO: 27066 - protein, 9 aa, synthetic construct
  source 1..9: note = Seed: LVVVGARGV (KRAS G12R)
MVVIGGRGF

SEQ ID NO: 27067 - protein, 9 aa, synthetic construct
  source 1..9: note = Seed: LVVVGARGV (KRAS G12R)
MVVIGGRGI

SEQ ID NO: 27068 - protein, 9 aa, synthetic construct
  source 1..9: note = Seed: LVVVGARGV (KRAS G12R)
MVVIGGRGL

SEQ ID NO: 27069 - protein, 9 aa, synthetic construct
  source 1..9: note = Seed: LVVVGARGV (KRAS G12R)
MVVIGGRGM

SEQ ID NO: 27070 - protein, 9 aa, synthetic construct
  source 1..9: note = Seed: LVVVGARGV (KRAS G12R)
MVVIGGRGR

SEQ ID NO: 27071 - protein, 9 aa, synthetic construct
  source 1..9: note = Seed: LVVVGARGV (KRAS G12R)
MVVIGGRGS

SEQ ID NO: 27072 - protein, 9 aa, synthetic construct
  source 1..9: note = Seed: LVVVGARGV (KRAS G12R)
MVVIGGRGT

SEQ ID NO: 27073 - protein, 9 aa, synthetic construct
  source 1..9: note = Seed: LVVVGARGV (KRAS G12R)
MVVIGGRGV

SEQ ID NO: 27074 - protein, 9 aa, synthetic construct
  source 1..9: note = Seed: LVVVGARGV (KRAS G12R)
MVVIGHRGA

SEQ ID NO: 27075 - protein, 9 aa, synthetic construct
  source 1..9: note = Seed: LVVVGARGV (KRAS G12R)
MVVIGHRGF

SEQ ID NO: 27076 - protein, 9 aa, synthetic construct
  source 1..9: note = Seed: LVVVGARGV (KRAS G12R)
MVVIGHRGG

SEQ ID NO: 27077 - protein, 9 aa, synthetic construct
  source 1..9: note = Seed: LVVVGARGV (KRAS G12R)
MVVIGHRGH

SEQ ID NO: 27078 - protein, 9 aa, synthetic construct
  source 1..9: note = Seed: LVVVGARGV (KRAS G12R)
MVVIGHRGI

SEQ ID NO: 27079 - protein, 9 aa, synthetic construct
  source 1..9: note = Seed: LVVVGARGV (KRAS G12R)
MVVIGHRGK

SEQ ID NO: 27080 - protein, 9 aa, synthetic construct
  source 1..9: note = Seed: LVVVGARGV (KRAS G12R)
MVVIGHRGL

SEQ ID NO: 27081 - protein, 9 aa, synthetic construct
  source 1..9: note = Seed: LVVVGARGV (KRAS G12R)
MVVIGHRGM

SEQ ID NO: 27082 - protein, 9 aa, synthetic construct
  source 1..9: note = Seed: LVVVGARGV (KRAS G12R)
MVVIGHRGN

SEQ ID NO: 27083 - protein, 9 aa, synthetic construct
  source 1..9: note = Seed: LVVVGARGV (KRAS G12R)
MVVIGHRGQ

SEQ ID NO: 27084 - protein, 9 aa, synthetic construct
  source 1..9: note = Seed: LVVVGARGV (KRAS G12R)
MVVIGHRGR

SEQ ID NO: 27085 - protein, 9 aa, synthetic construct
  source 1..9: note = Seed: LVVVGARGV (KRAS G12R)
MVVIGHRGS

SEQ ID NO: 27086 - protein, 9 aa, synthetic construct
  source 1..9: note = Seed: LVVVGARGV (KRAS G12R)
MVVIGHRGT

SEQ ID NO: 27087 - protein, 9 aa, synthetic construct
  source 1..9: note = Seed: LVVVGARGV (KRAS G12R)
MVVIGHRGV

SEQ ID NO: 27088 - protein, 9 aa, synthetic construct
  source 1..9: note = Seed: LVVVGARGV (KRAS G12R)
MVVIGHRGY

SEQ ID NO: 27089 - protein, 9 aa, synthetic construct
  source 1..9: note = Seed: LVVVGARGV (KRAS G12R)
MVVIGIRGA

SEQ ID NO: 27090 - protein, 9 aa, synthetic construct
  source 1..9: note = Seed: LVVVGARGV (KRAS G12R)
MVVIGIRGF

SEQ ID NO: 27091 - protein, 9 aa, synthetic construct
  source 1..9: note = Seed: LVVVGARGV (KRAS G12R)
MVVIGIRGG

SEQ ID NO: 27092 - protein, 9 aa, synthetic construct
  source 1..9: note = Seed: LVVVGARGV (KRAS G12R)
MVVIGIRGI

SEQ ID NO: 27093 - protein, 9 aa, synthetic construct
  source 1..9: note = Seed: LVVVGARGV (KRAS G12R)
MVVIGIRGK

SEQ ID NO: 27094 - protein, 9 aa, synthetic construct
  source 1..9: note = Seed: LVVVGARGV (KRAS G12R)
MVVIGIRGL

SEQ ID NO: 27095 - protein, 9 aa, synthetic construct
  source 1..9: note = Seed: LVVVGARGV (KRAS G12R)
MVVIGIRGM

SEQ ID NO: 27096 - protein, 9 aa, synthetic construct
  source 1..9: note = Seed: LVVVGARGV (KRAS G12R)
MVVIGIRGR

SEQ ID NO: 27097 - protein, 9 aa, synthetic construct
  source 1..9: note = Seed: LVVVGARGV (KRAS G12R)
MVVIGIRGS

SEQ ID NO: 27098 - protein, 9 aa, synthetic construct
  source 1..9: note = Seed: LVVVGARGV (KRAS G12R)
MVVIGIRGV

SEQ ID NO: 27099 - protein, 9 aa, synthetic construct
  source 1..9: note = Seed: LVVVGARGV (KRAS G12R)
MVVIGIRGY

SEQ ID NO: 27100 - protein, 9 aa, synthetic construct
  source 1..9: note = Seed: LVVVGARGV (KRAS G12R)
MVVIGKRGA

SEQ ID NO: 27101 - protein, 9 aa, synthetic construct
  source 1..9: note = Seed: LVVVGARGV (KRAS G12R)
MVVIGKRGC

SEQ ID NO: 27102 - protein, 9 aa, synthetic construct
  source 1..9: note = Seed: LVVVGARGV (KRAS G12R)
MVVIGKRGE

SEQ ID NO: 27103 - protein, 9 aa, synthetic construct
  source 1..9: note = Seed: LVVVGARGV (KRAS G12R)
MVVIGKRGF

SEQ ID NO: 27104 - protein, 9 aa, synthetic construct
  source 1..9: note = Seed: LVVVGARGV (KRAS G12R)
MVVIGKRGG

SEQ ID NO: 27105 - protein, 9 aa, synthetic construct
  source 1..9: note = Seed: LVVVGARGV (KRAS G12R)
MVVIGKRGH

SEQ ID NO: 27106 - protein, 9 aa, synthetic construct
  source 1..9: note = Seed: LVVVGARGV (KRAS G12R)
MVVIGKRGI

SEQ ID NO: 27107 - protein, 9 aa, synthetic construct
  source 1..9: note = Seed: LVVVGARGV (KRAS G12R)
MVVIGKRGK

SEQ ID NO: 27108 - protein, 9 aa, synthetic construct
  source 1..9: note = Seed: LVVVGARGV (KRAS G12R)
MVVIGKRGL

SEQ ID NO: 27109 - protein, 9 aa, synthetic construct
  source 1..9: note = Seed: LVVVGARGV (KRAS G12R)
MVVIGKRGM

SEQ ID NO: 27110 - protein, 9 aa, synthetic construct
  source 1..9: note = Seed: LVVVGARGV (KRAS G12R)
MVVIGKRGN

SEQ ID NO: 27111 - protein, 9 aa, synthetic construct
  source 1..9: note = Seed: LVVVGARGV (KRAS G12R)
MVVIGKRGP

SEQ ID NO: 27112 - protein, 9 aa, synthetic construct
  source 1..9: note = Seed: LVVVGARGV (KRAS G12R)
MVVIGKRGQ

SEQ ID NO: 27113 - protein, 9 aa, synthetic construct
  source 1..9: note = Seed: LVVVGARGV (KRAS G12R)
MVVIGKRGR

SEQ ID NO: 27114 - protein, 9 aa, synthetic construct
  source 1..9: note = Seed: LVVVGARGV (KRAS G12R)
MVVIGKRGS

SEQ ID NO: 27115 - protein, 9 aa, synthetic construct
  source 1..9: note = Seed: LVVVGARGV (KRAS G12R)
MVVIGKRGT

SEQ ID NO: 27116 - protein, 9 aa, synthetic construct
  source 1..9: note = Seed: LVVVGARGV (KRAS G12R)
MVVIGKRGV

SEQ ID NO: 27117 - protein, 9 aa, synthetic construct
  source 1..9: note = Seed: LVVVGARGV (KRAS G12R)
MVVIGKRGW

SEQ ID NO: 27118 - protein, 9 aa, synthetic construct
  source 1..9: note = Seed: LVVVGARGV (KRAS G12R)
MVVIGKRGY

SEQ ID NO: 27119 - protein, 9 aa, synthetic construct
  source 1..9: note = Seed: LVVVGARGV (KRAS G12R)
MVVIGLRGA

SEQ ID NO: 27120 - protein, 9 aa, synthetic construct
  source 1..9: note = Seed: LVVVGARGV (KRAS G12R)
MVVIGLRGC

SEQ ID NO: 27121 - protein, 9 aa, synthetic construct
  source 1..9: note = Seed: LVVVGARGV (KRAS G12R)
MVVIGLRGF

SEQ ID NO: 27122 - protein, 9 aa, synthetic construct
  source 1..9: note = Seed: LVVVGARGV (KRAS G12R)
MVVIGLRGI

SEQ ID NO: 27123 - protein, 9 aa, synthetic construct
  source 1..9: note = Seed: LVVVGARGV (KRAS G12R)
MVVIGLRGL

SEQ ID NO: 27124 - protein, 9 aa, synthetic construct
  source 1..9: note = Seed: LVVVGARGV (KRAS G12R)
MVVIGLRGM

SEQ ID NO: 27125 - protein, 9 aa, synthetic construct
  source 1..9: note = Seed: LVVVGARGV (KRAS G12R)
MVVIGLRGR

SEQ ID NO: 27126 - protein, 9 aa, synthetic construct
  source 1..9: note = Seed: LVVVGARGV (KRAS G12R)
MVVIGLRGV

SEQ ID NO: 27127 - protein, 9 aa, synthetic construct
  source 1..9: note = Seed: LVVVGARGV (KRAS G12R)
MVVIGLRGY

SEQ ID NO: 27128 - protein, 9 aa, synthetic construct
  source 1..9: note = Seed: LVVVGARGV (KRAS G12R)
MVVIGMRGA

SEQ ID NO: 27129 - protein, 9 aa, synthetic construct
  source 1..9: note = Seed: LVVVGARGV (KRAS G12R)
MVVIGMRGF

SEQ ID NO: 27130 - protein, 9 aa, synthetic construct
  source 1..9: note = Seed: LVVVGARGV (KRAS G12R)
MVVIGMRGI

SEQ ID NO: 27131 - protein, 9 aa, synthetic construct
  source 1..9: note = Seed: LVVVGARGV (KRAS G12R)
MVVIGMRGL

SEQ ID NO: 27132 - protein, 9 aa, synthetic construct
  source 1..9: note = Seed: LVVVGARGV (KRAS G12R)
MVVIGMRGM

SEQ ID NO: 27133 - protein, 9 aa, synthetic construct
  source 1..9: note = Seed: LVVVGARGV (KRAS G12R)
MVVIGMRGR

SEQ ID NO: 27134 - protein, 9 aa, synthetic construct
  source 1..9: note = Seed: LVVVGARGV (KRAS G12R)
MVVIGMRGV

SEQ ID NO: 27135 - protein, 9 aa, synthetic construct
  source 1..9: note = Seed: LVVVGARGV (KRAS G12R)
MVVIGMRGY

SEQ ID NO: 27136 - protein, 9 aa, synthetic construct
  source 1..9: note = Seed: LVVVGARGV (KRAS G12R)
MVVIGNRGA

SEQ ID NO: 27137 - protein, 9 aa, synthetic construct
  source 1..9: note = Seed: LVVVGARGV (KRAS G12R)
MVVIGNRGF

SEQ ID NO: 27138 - protein, 9 aa, synthetic construct
  source 1..9: note = Seed: LVVVGARGV (KRAS G12R)
MVVIGNRGI

SEQ ID NO: 27139 - protein, 9 aa, synthetic construct
  source 1..9: note = Seed: LVVVGARGV (KRAS G12R)
MVVIGNRGL

SEQ ID NO: 27140 - protein, 9 aa, synthetic construct
  source 1..9: note = Seed: LVVVGARGV (KRAS G12R)
MVVIGNRGM

SEQ ID NO: 27141 - protein, 9 aa, synthetic construct
  source 1..9: note = Seed: LVVVGARGV (KRAS G12R)
MVVIGNRGR

SEQ ID NO: 27142 - protein, 9 aa, synthetic construct
  source 1..9: note = Seed: LVVVGARGV (KRAS G12R)
MVVIGNRGS

SEQ ID NO: 27143 - protein, 9 aa, synthetic construct
  source 1..9: note = Seed: LVVVGARGV (KRAS G12R)
MVVIGNRGT

SEQ ID NO: 27144 - protein, 9 aa, synthetic construct
  source 1..9: note = Seed: LVVVGARGV (KRAS G12R)
MVVIGNRGV

SEQ ID NO: 27145 - protein, 9 aa, synthetic construct
  source 1..9: note = Seed: LVVVGARGV (KRAS G12R)
MVVIGNRGY

SEQ ID NO: 27146 - protein, 9 aa, synthetic construct
  source 1..9: note = Seed: LVVVGARGV (KRAS G12R)
MVVIGPRGA

SEQ ID NO: 27147 - protein, 9 aa, synthetic construct
  source 1..9: note = Seed: LVVVGARGV (KRAS G12R)
MVVIGPRGI

SEQ ID NO: 27148 - protein, 9 aa, synthetic construct
  source 1..9: note = Seed: LVVVGARGV (KRAS G12R)
MVVIGPRGL

SEQ ID NO: 27149 - protein, 9 aa, synthetic construct
  source 1..9: note = Seed: LVVVGARGV (KRAS G12R)
MVVIGPRGM

SEQ ID NO: 27150 - protein, 9 aa, synthetic construct
  source 1..9: note = Seed: LVVVGARGV (KRAS G12R)
MVVIGPRGR

SEQ ID NO: 27151 - protein, 9 aa, synthetic construct
  source 1..9: note = Seed: LVVVGARGV (KRAS G12R)
MVVIGPRGS

SEQ ID NO: 27152 - protein, 9 aa, synthetic construct
  source 1..9: note = Seed: LVVVGARGV (KRAS G12R)
MVVIGPRGT

SEQ ID NO: 27153 - protein, 9 aa, synthetic construct
  source 1..9: note = Seed: LVVVGARGV (KRAS G12R)
MVVIGPRGV

SEQ ID NO: 27154 - protein, 9 aa, synthetic construct
  source 1..9: note = Seed: LVVVGARGV (KRAS G12R)
MVVIGQRGA

SEQ ID NO: 27155 - protein, 9 aa, synthetic construct
  source 1..9: note = Seed: LVVVGARGV (KRAS G12R)
MVVIGQRGF

SEQ ID NO: 27156 - protein, 9 aa, synthetic construct
  source 1..9: note = Seed: LVVVGARGV (KRAS G12R)
MVVIGQRGI

SEQ ID NO: 27157 - protein, 9 aa, synthetic construct
  source 1..9: note = Seed: LVVVGARGV (KRAS G12R)
MVVIGQRGL

SEQ ID NO: 27158 - protein, 9 aa, synthetic construct
  source 1..9: note = Seed: LVVVGARGV (KRAS G12R)
MVVIGQRGQ

SEQ ID NO: 27159 - protein, 9 aa, synthetic construct
  source 1..9: note = Seed: LVVVGARGV (KRAS G12R)
MVVIGQRGR

SEQ ID NO: 27160 - protein, 9 aa, synthetic construct
  source 1..9: note = Seed: LVVVGARGV (KRAS G12R)
MVVIGQRGS

SEQ ID NO: 27161 - protein, 9 aa, synthetic construct
  source 1..9: note = Seed: LVVVGARGV (KRAS G12R)
MVVIGRRGA

SEQ ID NO: 27162 - protein, 9 aa, synthetic construct
  source 1..9: note = Seed: LVVVGARGV (KRAS G12R)
MVVIGRRGC

SEQ ID NO: 27163 - protein, 9 aa, synthetic construct
  source 1..9: note = Seed: LVVVGARGV (KRAS G12R)
MVVIGRRGD

SEQ ID NO: 27164 - protein, 9 aa, synthetic construct
  source 1..9: note = Seed: LVVVGARGV (KRAS G12R)
MVVIGRRGE

SEQ ID NO: 27165 - protein, 9 aa, synthetic construct
  source 1..9: note = Seed: LVVVGARGV (KRAS G12R)
MVVIGRRGF

SEQ ID NO: 27166 - protein, 9 aa, synthetic construct
  source 1..9: note = Seed: LVVVGARGV (KRAS G12R)
MVVIGRRGG

SEQ ID NO: 27167 - protein, 9 aa, synthetic construct
  source 1..9: note = Seed: LVVVGARGV (KRAS G12R)
MVVIGRRGH

SEQ ID NO: 27168 - protein, 9 aa, synthetic construct
  source 1..9: note = Seed: LVVVGARGV (KRAS G12R)
MVVIGRRGI

SEQ ID NO: 27169 - protein, 9 aa, synthetic construct
  source 1..9: note = Seed: LVVVGARGV (KRAS G12R)
MVVIGRRGK

SEQ ID NO: 27170 - protein, 9 aa, synthetic construct
  source 1..9: note = Seed: LVVVGARGV (KRAS G12R)
MVVIGRRGL

SEQ ID NO: 27171 - protein, 9 aa, synthetic construct
  source 1..9: note = Seed: LVVVGARGV (KRAS G12R)
MVVIGRRGM

SEQ ID NO: 27172 - protein, 9 aa, synthetic construct
  source 1..9: note = Seed: LVVVGARGV (KRAS G12R)
MVVIGRRGN

SEQ ID NO: 27173 - protein, 9 aa, synthetic construct
  source 1..9: note = Seed: LVVVGARGV (KRAS G12R)
MVVIGRRGP

SEQ ID NO: 27174 - protein, 9 aa, synthetic construct
  source 1..9: note = Seed: LVVVGARGV (KRAS G12R)
MVVIGRRGQ

SEQ ID NO: 27175 - protein, 9 aa, synthetic construct
  source 1..9: note = Seed: LVVVGARGV (KRAS G12R)
MVVIGRRGR

SEQ ID NO: 27176 - protein, 9 aa, synthetic construct
  source 1..9: note = Seed: LVVVGARGV (KRAS G12R)
MVVIGRRGS

SEQ ID NO: 27177 - protein, 9 aa, synthetic construct
  source 1..9: note = Seed: LVVVGARGV (KRAS G12R)
MVVIGRRGT

SEQ ID NO: 27178 - protein, 9 aa, synthetic construct
  source 1..9: note = Seed: LVVVGARGV (KRAS G12R)
MVVIGRRGV

SEQ ID NO: 27179 - protein, 9 aa, synthetic construct
  source 1..9: note = Seed: LVVVGARGV (KRAS G12R)
MVVIGRRGW

SEQ ID NO: 27180 - protein, 9 aa, synthetic construct
  source 1..9: note = Seed: LVVVGARGV (KRAS G12R)
MVVIGRRGY

SEQ ID NO: 27181 - protein, 9 aa, synthetic construct
  source 1..9: note = Seed: LVVVGARGV (KRAS G12R)
MVVIGSRGA

SEQ ID NO: 27182 - protein, 9 aa, synthetic construct
  source 1..9: note = Seed: LVVVGARGV (KRAS G12R)
MVVIGSRGF

SEQ ID NO: 27183 - protein, 9 aa, synthetic construct
  source 1..9: note = Seed: LVVVGARGV (KRAS G12R)
MVVIGSRGI

SEQ ID NO: 27184 - protein, 9 aa, synthetic construct
  source 1..9: note = Seed: LVVVGARGV (KRAS G12R)
MVVIGSRGK

SEQ ID NO: 27185 - protein, 9 aa, synthetic construct
  source 1..9: note = Seed: LVVVGARGV (KRAS G12R)
MVVIGSRGL

SEQ ID NO: 27186 - protein, 9 aa, synthetic construct
  source 1..9: note = Seed: LVVVGARGV (KRAS G12R)
MVVIGSRGM

SEQ ID NO: 27187 - protein, 9 aa, synthetic construct
  source 1..9: note = Seed: LVVVGARGV (KRAS G12R)
MVVIGSRGQ

SEQ ID NO: 27188 - protein, 9 aa, synthetic construct
  source 1..9: note = Seed: LVVVGARGV (KRAS G12R)
MVVIGSRGR

SEQ ID NO: 27189 - protein, 9 aa, synthetic construct
  source 1..9: note = Seed: LVVVGARGV (KRAS G12R)
MVVIGSRGS

SEQ ID NO: 27190 - protein, 9 aa, synthetic construct
  source 1..9: note = Seed: LVVVGARGV (KRAS G12R)
MVVIGSRGT

SEQ ID NO: 27191 - protein, 9 aa, synthetic construct
  source 1..9: note = Seed: LVVVGARGV (KRAS G12R)
MVVIGSRGV

SEQ ID NO: 27192 - protein, 9 aa, synthetic construct
  source 1..9: note = Seed: LVVVGARGV (KRAS G12R)
MVVIGSRGY

SEQ ID NO: 27193 - protein, 9 aa, synthetic construct
  source 1..9: note = Seed: LVVVGARGV (KRAS G12R)
MVVIGTRGA

SEQ ID NO: 27194 - protein, 9 aa, synthetic construct
  source 1..9: note = Seed: LVVVGARGV (KRAS G12R)
MVVIGTRGF

SEQ ID NO: 27195 - protein, 9 aa, synthetic construct
  source 1..9: note = Seed: LVVVGARGV (KRAS G12R)
MVVIGTRGI

SEQ ID NO: 27196 - protein, 9 aa, synthetic construct
  source 1..9: note = Seed: LVVVGARGV (KRAS G12R)
MVVIGTRGK

SEQ ID NO: 27197 - protein, 9 aa, synthetic construct
  source 1..9: note = Seed: LVVVGARGV (KRAS G12R)
MVVIGTRGL

SEQ ID NO: 27198 - protein, 9 aa, synthetic construct
  source 1..9: note = Seed: LVVVGARGV (KRAS G12R)
MVVIGTRGM

SEQ ID NO: 27199 - protein, 9 aa, synthetic construct
  source 1..9: note = Seed: LVVVGARGV (KRAS G12R)
MVVIGTRGQ

SEQ ID NO: 27200 - protein, 9 aa, synthetic construct
  source 1..9: note = Seed: LVVVGARGV (KRAS G12R)
MVVIGTRGR

SEQ ID NO: 27201 - protein, 9 aa, synthetic construct
  source 1..9: note = Seed: LVVVGARGV (KRAS G12R)
MVVIGTRGS

SEQ ID NO: 27202 - protein, 9 aa, synthetic construct
  source 1..9: note = Seed: LVVVGARGV (KRAS G12R)
MVVIGTRGT

SEQ ID NO: 27203 - protein, 9 aa, synthetic construct
  source 1..9: note = Seed: LVVVGARGV (KRAS G12R)
MVVIGTRGV

SEQ ID NO: 27204 - protein, 9 aa, synthetic construct
  source 1..9: note = Seed: LVVVGARGV (KRAS G12R)
MVVIGTRGY

SEQ ID NO: 27205 - protein, 9 aa, synthetic construct
  source 1..9: note = Seed: LVVVGARGV (KRAS G12R)
MVVIGVRGA

SEQ ID NO: 27206 - protein, 9 aa, synthetic construct
  source 1..9: note = Seed: LVVVGARGV (KRAS G12R)
MVVIGVRGF

SEQ ID NO: 27207 - protein, 9 aa, synthetic construct
  source 1..9: note = Seed: LVVVGARGV (KRAS G12R)
MVVIGVRGG

SEQ ID NO: 27208 - protein, 9 aa, synthetic construct
  source 1..9: note = Seed: LVVVGARGV (KRAS G12R)
MVVIGVRGI

SEQ ID NO: 27209 - protein, 9 aa, synthetic construct
  source 1..9: note = Seed: LVVVGARGV (KRAS G12R)
MVVIGVRGK

SEQ ID NO: 27210 - protein, 9 aa, synthetic construct
  source 1..9: note = Seed: LVVVGARGV (KRAS G12R)
MVVIGVRGL

SEQ ID NO: 27211 - protein, 9 aa, synthetic construct
  source 1..9: note = Seed: LVVVGARGV (KRAS G12R)
MVVIGVRGM

SEQ ID NO: 27212 - protein, 9 aa, synthetic construct
  source 1..9: note = Seed: LVVVGARGV (KRAS G12R)
MVVIGVRGN

SEQ ID NO: 27213 - protein, 9 aa, synthetic construct
  source 1..9: note = Seed: LVVVGARGV (KRAS G12R)
MVVIGVRGQ

SEQ ID NO: 27214 - protein, 9 aa, synthetic construct
  source 1..9: note = Seed: LVVVGARGV (KRAS G12R)
MVVIGVRGR

SEQ ID NO: 27215 - protein, 9 aa, synthetic construct
  source 1..9: note = Seed: LVVVGARGV (KRAS G12R)
MVVIGVRGS

SEQ ID NO: 27216 - protein, 9 aa, synthetic construct
  source 1..9: note = Seed: LVVVGARGV (KRAS G12R)
MVVIGVRGV

SEQ ID NO: 27217 - protein, 9 aa, synthetic construct
  source 1..9: note = Seed: LVVVGARGV (KRAS G12R)
MVVIGVRGY

SEQ ID NO: 27218 - protein, 9 aa, synthetic construct
  source 1..9: note = Seed: LVVVGARGV (KRAS G12R)
MVVIGWRGR

SEQ ID NO: 27219 - protein, 9 aa, synthetic construct
  source 1..9: note = Seed: LVVVGARGV (KRAS G12R)
MVVIGWRGY

SEQ ID NO: 27220 - protein, 9 aa, synthetic construct
  source 1..9: note = Seed: LVVVGARGV (KRAS G12R)
MVVIGYRGR

SEQ ID NO: 27221 - protein, 9 aa, synthetic construct
  source 1..9: note = Seed: LVVVGARGV (KRAS G12R)
MVVKGARGF

SEQ ID NO: 27222 - protein, 9 aa, synthetic construct
  source 1..9: note = Seed: LVVVGARGV (KRAS G12R)
MVVKGARGI

SEQ ID NO: 27223 - protein, 9 aa, synthetic construct
  source 1..9: note = Seed: LVVVGARGV (KRAS G12R)
MVVKGARGK

SEQ ID NO: 27224 - protein, 9 aa, synthetic construct
  source 1..9: note = Seed: LVVVGARGV (KRAS G12R)
MVVKGARGL

SEQ ID NO: 27225 - protein, 9 aa, synthetic construct
  source 1..9: note = Seed: LVVVGARGV (KRAS G12R)
MVVKGARGM

SEQ ID NO: 27226 - protein, 9 aa, synthetic construct
  source 1..9: note = Seed: LVVVGARGV (KRAS G12R)
MVVKGARGR

SEQ ID NO: 27227 - protein, 9 aa, synthetic construct
  source 1..9: note = Seed: LVVVGARGV (KRAS G12R)
MVVKGARGV

SEQ ID NO: 27228 - protein, 9 aa, synthetic construct
  source 1..9: note = Seed: LVVVGARGV (KRAS G12R)
MVVKGARGY

SEQ ID NO: 27229 - protein, 9 aa, synthetic construct
  source 1..9: note = Seed: LVVVGARGV (KRAS G12R)
MVVKGCRGR

SEQ ID NO: 27230 - protein, 9 aa, synthetic construct
  source 1..9: note = Seed: LVVVGARGV (KRAS G12R)
MVVKGGRGR

SEQ ID NO: 27231 - protein, 9 aa, synthetic construct
  source 1..9: note = Seed: LVVVGARGV (KRAS G12R)
MVVKGHRGA

SEQ ID NO: 27232 - protein, 9 aa, synthetic construct
  source 1..9: note = Seed: LVVVGARGV (KRAS G12R)
MVVKGHRGF

SEQ ID NO: 27233 - protein, 9 aa, synthetic construct
  source 1..9: note = Seed: LVVVGARGV (KRAS G12R)
MVVKGHRGI

SEQ ID NO: 27234 - protein, 9 aa, synthetic construct
  source 1..9: note = Seed: LVVVGARGV (KRAS G12R)
MVVKGHRGL

SEQ ID NO: 27235 - protein, 9 aa, synthetic construct
  source 1..9: note = Seed: LVVVGARGV (KRAS G12R)
MVVKGHRGM

SEQ ID NO: 27236 - protein, 9 aa, synthetic construct
  source 1..9: note = Seed: LVVVGARGV (KRAS G12R)
MVVKGHRGQ

SEQ ID NO: 27237 - protein, 9 aa, synthetic construct
  source 1..9: note = Seed: LVVVGARGV (KRAS G12R)
MVVKGHRGR

SEQ ID NO: 27238 - protein, 9 aa, synthetic construct
  source 1..9: note = Seed: LVVVGARGV (KRAS G12R)
MVVKGHRGS

SEQ ID NO: 27239 - protein, 9 aa, synthetic construct
  source 1..9: note = Seed: LVVVGARGV (KRAS G12R)
MVVKGHRGV

SEQ ID NO: 27240 - protein, 9 aa, synthetic construct
  source 1..9: note = Seed: LVVVGARGV (KRAS G12R)
MVVKGHRGY

SEQ ID NO: 27241 - protein, 9 aa, synthetic construct
  source 1..9: note = Seed: LVVVGARGV (KRAS G12R)
MVVKGIRGA

SEQ ID NO: 27242 - protein, 9 aa, synthetic construct
  source 1..9: note = Seed: LVVVGARGV (KRAS G12R)
MVVKGIRGF

SEQ ID NO: 27243 - protein, 9 aa, synthetic construct
  source 1..9: note = Seed: LVVVGARGV (KRAS G12R)
MVVKGIRGI

SEQ ID NO: 27244 - protein, 9 aa, synthetic construct
  source 1..9: note = Seed: LVVVGARGV (KRAS G12R)
MVVKGIRGL

SEQ ID NO: 27245 - protein, 9 aa, synthetic construct
  source 1..9: note = Seed: LVVVGARGV (KRAS G12R)
MVVKGIRGM

SEQ ID NO: 27246 - protein, 9 aa, synthetic construct
  source 1..9: note = Seed: LVVVGARGV (KRAS G12R)
MVVKGIRGQ

SEQ ID NO: 27247 - protein, 9 aa, synthetic construct
  source 1..9: note = Seed: LVVVGARGV (KRAS G12R)
MVVKGIRGR

SEQ ID NO: 27248 - protein, 9 aa, synthetic construct
  source 1..9: note = Seed: LVVVGARGV (KRAS G12R)
MVVKGIRGS

SEQ ID NO: 27249 - protein, 9 aa, synthetic construct
  source 1..9: note = Seed: LVVVGARGV (KRAS G12R)
MVVKGIRGV

SEQ ID NO: 27250 - protein, 9 aa, synthetic construct
  source 1..9: note = Seed: LVVVGARGV (KRAS G12R)
MVVKGIRGY

SEQ ID NO: 27251 - protein, 9 aa, synthetic construct
  source 1..9: note = Seed: LVVVGARGV (KRAS G12R)
MVVKGKRGA

SEQ ID NO: 27252 - protein, 9 aa, synthetic construct
  source 1..9: note = Seed: LVVVGARGV (KRAS G12R)
MVVKGKRGF

SEQ ID NO: 27253 - protein, 9 aa, synthetic construct
  source 1..9: note = Seed: LVVVGARGV (KRAS G12R)
MVVKGKRGG

SEQ ID NO: 27254 - protein, 9 aa, synthetic construct
  source 1..9: note = Seed: LVVVGARGV (KRAS G12R)
MVVKGKRGH

SEQ ID NO: 27255 - protein, 9 aa, synthetic construct
  source 1..9: note = Seed: LVVVGARGV (KRAS G12R)
MVVKGKRGI

SEQ ID NO: 27256 - protein, 9 aa, synthetic construct
  source 1..9: note = Seed: LVVVGARGV (KRAS G12R)
MVVKGKRGK

SEQ ID NO: 27257 - protein, 9 aa, synthetic construct
  source 1..9: note = Seed: LVVVGARGV (KRAS G12R)
MVVKGKRGL

SEQ ID NO: 27258 - protein, 9 aa, synthetic construct
  source 1..9: note = Seed: LVVVGARGV (KRAS G12R)
MVVKGKRGM

SEQ ID NO: 27259 - protein, 9 aa, synthetic construct
  source 1..9: note = Seed: LVVVGARGV (KRAS G12R)
MVVKGKRGQ

SEQ ID NO: 27260 - protein, 9 aa, synthetic construct
  source 1..9: note = Seed: LVVVGARGV (KRAS G12R)
MVVKGKRGR

SEQ ID NO: 27261 - protein, 9 aa, synthetic construct
  source 1..9: note = Seed: LVVVGARGV (KRAS G12R)
MVVKGKRGS

SEQ ID NO: 27262 - protein, 9 aa, synthetic construct
  source 1..9: note = Seed: LVVVGARGV (KRAS G12R)
MVVKGKRGT

SEQ ID NO: 27263 - protein, 9 aa, synthetic construct
  source 1..9: note = Seed: LVVVGARGV (KRAS G12R)
MVVKGKRGV

SEQ ID NO: 27264 - protein, 9 aa, synthetic construct
  source 1..9: note = Seed: LVVVGARGV (KRAS G12R)
MVVKGKRGW

SEQ ID NO: 27265 - protein, 9 aa, synthetic construct
  source 1..9: note = Seed: LVVVGARGV (KRAS G12R)
MVVKGKRGY

SEQ ID NO: 27266 - protein, 9 aa, synthetic construct
  source 1..9: note = Seed: LVVVGARGV (KRAS G12R)
MVVKGLRGF

SEQ ID NO: 27267 - protein, 9 aa, synthetic construct
  source 1..9: note = Seed: LVVVGARGV (KRAS G12R)
MVVKGLRGI

SEQ ID NO: 27268 - protein, 9 aa, synthetic construct
  source 1..9: note = Seed: LVVVGARGV (KRAS G12R)
MVVKGLRGL

SEQ ID NO: 27269 - protein, 9 aa, synthetic construct
  source 1..9: note = Seed: LVVVGARGV (KRAS G12R)
MVVKGLRGM

SEQ ID NO: 27270 - protein, 9 aa, synthetic construct
  source 1..9: note = Seed: LVVVGARGV (KRAS G12R)
MVVKGLRGR

SEQ ID NO: 27271 - protein, 9 aa, synthetic construct
  source 1..9: note = Seed: LVVVGARGV (KRAS G12R)
MVVKGLRGS

SEQ ID NO: 27272 - protein, 9 aa, synthetic construct
  source 1..9: note = Seed: LVVVGARGV (KRAS G12R)
MVVKGLRGV

SEQ ID NO: 27273 - protein, 9 aa, synthetic construct
  source 1..9: note = Seed: LVVVGARGV (KRAS G12R)
MVVKGLRGY

SEQ ID NO: 27274 - protein, 9 aa, synthetic construct
  source 1..9: note = Seed: LVVVGARGV (KRAS G12R)
MVVKGMRGF

SEQ ID NO: 27275 - protein, 9 aa, synthetic construct
  source 1..9: note = Seed: LVVVGARGV (KRAS G12R)
MVVKGMRGI

SEQ ID NO: 27276 - protein, 9 aa, synthetic construct
  source 1..9: note = Seed: LVVVGARGV (KRAS G12R)
MVVKGMRGM

SEQ ID NO: 27277 - protein, 9 aa, synthetic construct
  source 1..9: note = Seed: LVVVGARGV (KRAS G12R)
MVVKGMRGR

SEQ ID NO: 27278 - protein, 9 aa, synthetic construct
  source 1..9: note = Seed: LVVVGARGV (KRAS G12R)
MVVKGMRGY

SEQ ID NO: 27279 - protein, 9 aa, synthetic construct
  source 1..9: note = Seed: LVVVGARGV (KRAS G12R)
MVVKGNRGF

SEQ ID NO: 27280 - protein, 9 aa, synthetic construct
  source 1..9: note = Seed: LVVVGARGV (KRAS G12R)
MVVKGNRGK

SEQ ID NO: 27281 - protein, 9 aa, synthetic construct
  source 1..9: note = Seed: LVVVGARGV (KRAS G12R)
MVVKGNRGL

SEQ ID NO: 27282 - protein, 9 aa, synthetic construct
  source 1..9: note = Seed: LVVVGARGV (KRAS G12R)
MVVKGNRGM

SEQ ID NO: 27283 - protein, 9 aa, synthetic construct
  source 1..9: note = Seed: LVVVGARGV (KRAS G12R)
MVVKGNRGR

SEQ ID NO: 27284 - protein, 9 aa, synthetic construct
  source 1..9: note = Seed: LVVVGARGV (KRAS G12R)
MVVKGNRGY

SEQ ID NO: 27285 - protein, 9 aa, synthetic construct
  source 1..9: note = Seed: LVVVGARGV (KRAS G12R)
MVVKGPRGR

SEQ ID NO: 27286 - protein, 9 aa, synthetic construct
  source 1..9: note = Seed: LVVVGARGV (KRAS G12R)
MVVKGQRGF

SEQ ID NO: 27287 - protein, 9 aa, synthetic construct
  source 1..9: note = Seed: LVVVGARGV (KRAS G12R)
MVVKGQRGI

SEQ ID NO: 27288 - protein, 9 aa, synthetic construct
  source 1..9: note = Seed: LVVVGARGV (KRAS G12R)
MVVKGQRGK

SEQ ID NO: 27289 - protein, 9 aa, synthetic construct
  source 1..9: note = Seed: LVVVGARGV (KRAS G12R)
MVVKGQRGM

SEQ ID NO: 27290 - protein, 9 aa, synthetic construct
  source 1..9: note = Seed: LVVVGARGV (KRAS G12R)
MVVKGQRGR

SEQ ID NO: 27291 - protein, 9 aa, synthetic construct
  source 1..9: note = Seed: LVVVGARGV (KRAS G12R)
MVVKGQRGY

SEQ ID NO: 27292 - protein, 9 aa, synthetic construct
  source 1..9: note = Seed: LVVVGARGV (KRAS G12R)
MVVKGRRGA

SEQ ID NO: 27293 - protein, 9 aa, synthetic construct
  source 1..9: note = Seed: LVVVGARGV (KRAS G12R)
MVVKGRRGC

SEQ ID NO: 27294 - protein, 9 aa, synthetic construct
  source 1..9: note = Seed: LVVVGARGV (KRAS G12R)
MVVKGRRGE

SEQ ID NO: 27295 - protein, 9 aa, synthetic construct
  source 1..9: note = Seed: LVVVGARGV (KRAS G12R)
MVVKGRRGF

SEQ ID NO: 27296 - protein, 9 aa, synthetic construct
  source 1..9: note = Seed: LVVVGARGV (KRAS G12R)
MVVKGRRGG

SEQ ID NO: 27297 - protein, 9 aa, synthetic construct
  source 1..9: note = Seed: LVVVGARGV (KRAS G12R)
MVVKGRRGH

SEQ ID NO: 27298 - protein, 9 aa, synthetic construct
  source 1..9: note = Seed: LVVVGARGV (KRAS G12R)
MVVKGRRGI

SEQ ID NO: 27299 - protein, 9 aa, synthetic construct
  source 1..9: note = Seed: LVVVGARGV (KRAS G12R)
MVVKGRRGK

SEQ ID NO: 27300 - protein, 9 aa, synthetic construct
  source 1..9: note = Seed: LVVVGARGV (KRAS G12R)
MVVKGRRGL

SEQ ID NO: 27301 - protein, 9 aa, synthetic construct
  source 1..9: note = Seed: LVVVGARGV (KRAS G12R)
MVVKGRRGM

SEQ ID NO: 27302 - protein, 9 aa, synthetic construct
  source 1..9: note = Seed: LVVVGARGV (KRAS G12R)
MVVKGRRGN

SEQ ID NO: 27303 - protein, 9 aa, synthetic construct
  source 1..9: note = Seed: LVVVGARGV (KRAS G12R)
MVVKGRRGP

SEQ ID NO: 27304 - protein, 9 aa, synthetic construct
  source 1..9: note = Seed: LVVVGARGV (KRAS G12R)
MVVKGRRGQ

SEQ ID NO: 27305 - protein, 9 aa, synthetic construct
  source 1..9: note = Seed: LVVVGARGV (KRAS G12R)
MVVKGRRGR

SEQ ID NO: 27306 - protein, 9 aa, synthetic construct
  source 1..9: note = Seed: LVVVGARGV (KRAS G12R)
MVVKGRRGS

SEQ ID NO: 27307 - protein, 9 aa, synthetic construct
  source 1..9: note = Seed: LVVVGARGV (KRAS G12R)
MVVKGRRGT

SEQ ID NO: 27308 - protein, 9 aa, synthetic construct
  source 1..9: note = Seed: LVVVGARGV (KRAS G12R)
MVVKGRRGV

SEQ ID NO: 27309 - protein, 9 aa, synthetic construct
  source 1..9: note = Seed: LVVVGARGV (KRAS G12R)
MVVKGRRGW

SEQ ID NO: 27310 - protein, 9 aa, synthetic construct
  source 1..9: note = Seed: LVVVGARGV (KRAS G12R)
MVVKGRRGY

SEQ ID NO: 27311 - protein, 9 aa, synthetic construct
  source 1..9: note = Seed: LVVVGARGV (KRAS G12R)
MVVKGSRGF

SEQ ID NO: 27312 - protein, 9 aa, synthetic construct
  source 1..9: note = Seed: LVVVGARGV (KRAS G12R)
MVVKGSRGI

SEQ ID NO: 27313 - protein, 9 aa, synthetic construct
  source 1..9: note = Seed: LVVVGARGV (KRAS G12R)
MVVKGSRGK

SEQ ID NO: 27314 - protein, 9 aa, synthetic construct
  source 1..9: note = Seed: LVVVGARGV (KRAS G12R)
MVVKGSRGL

SEQ ID NO: 27315 - protein, 9 aa, synthetic construct
  source 1..9: note = Seed: LVVVGARGV (KRAS G12R)
MVVKGSRGM

SEQ ID NO: 27316 - protein, 9 aa, synthetic construct
  source 1..9: note = Seed: LVVVGARGV (KRAS G12R)
MVVKGSRGR

SEQ ID NO: 27317 - protein, 9 aa, synthetic construct
  source 1..9: note = Seed: LVVVGARGV (KRAS G12R)
MVVKGSRGV

SEQ ID NO: 27318 - protein, 9 aa, synthetic construct
  source 1..9: note = Seed: LVVVGARGV (KRAS G12R)
MVVKGSRGY

SEQ ID NO: 27319 - protein, 9 aa, synthetic construct
  source 1..9: note = Seed: LVVVGARGV (KRAS G12R)
MVVKGTRGF

SEQ ID NO: 27320 - protein, 9 aa, synthetic construct
  source 1..9: note = Seed: LVVVGARGV (KRAS G12R)
MVVKGTRGI

SEQ ID NO: 27321 - protein, 9 aa, synthetic construct
  source 1..9: note = Seed: LVVVGARGV (KRAS G12R)
MVVKGTRGK

SEQ ID NO: 27322 - protein, 9 aa, synthetic construct
  source 1..9: note = Seed: LVVVGARGV (KRAS G12R)
MVVKGTRGL

SEQ ID NO: 27323 - protein, 9 aa, synthetic construct
  source 1..9: note = Seed: LVVVGARGV (KRAS G12R)
MVVKGTRGM

SEQ ID NO: 27324 - protein, 9 aa, synthetic construct
  source 1..9: note = Seed: LVVVGARGV (KRAS G12R)
MVVKGTRGQ

SEQ ID NO: 27325 - protein, 9 aa, synthetic construct
  source 1..9: note = Seed: LVVVGARGV (KRAS G12R)
MVVKGTRGR

SEQ ID NO: 27326 - protein, 9 aa, synthetic construct
  source 1..9: note = Seed: LVVVGARGV (KRAS G12R)
MVVKGTRGV

SEQ ID NO: 27327 - protein, 9 aa, synthetic construct
  source 1..9: note = Seed: LVVVGARGV (KRAS G12R)
MVVKGTRGY

SEQ ID NO: 27328 - protein, 9 aa, synthetic construct
  source 1..9: note = Seed: LVVVGARGV (KRAS G12R)
MVVKGVRGA

SEQ ID NO: 27329 - protein, 9 aa, synthetic construct
  source 1..9: note = Seed: LVVVGARGV (KRAS G12R)
MVVKGVRGF

SEQ ID NO: 27330 - protein, 9 aa, synthetic construct
  source 1..9: note = Seed: LVVVGARGV (KRAS G12R)
MVVKGVRGI

SEQ ID NO: 27331 - protein, 9 aa, synthetic construct
  source 1..9: note = Seed: LVVVGARGV (KRAS G12R)
MVVKGVRGK

SEQ ID NO: 27332 - protein, 9 aa, synthetic construct
  source 1..9: note = Seed: LVVVGARGV (KRAS G12R)
MVVKGVRGL

SEQ ID NO: 27333 - protein, 9 aa, synthetic construct
  source 1..9: note = Seed: LVVVGARGV (KRAS G12R)
MVVKGVRGM

SEQ ID NO: 27334 - protein, 9 aa, synthetic construct
  source 1..9: note = Seed: LVVVGARGV (KRAS G12R)
MVVKGVRGQ

SEQ ID NO: 27335 - protein, 9 aa, synthetic construct
  source 1..9: note = Seed: LVVVGARGV (KRAS G12R)
MVVKGVRGR

SEQ ID NO: 27336 - protein, 9 aa, synthetic construct
  source 1..9: note = Seed: LVVVGARGV (KRAS G12R)
MVVKGVRGS

SEQ ID NO: 27337 - protein, 9 aa, synthetic construct
  source 1..9: note = Seed: LVVVGARGV (KRAS G12R)
MVVKGVRGV

SEQ ID NO: 27338 - protein, 9 aa, synthetic construct
  source 1..9: note = Seed: LVVVGARGV (KRAS G12R)
MVVKGVRGY

SEQ ID NO: 27339 - protein, 9 aa, synthetic construct
  source 1..9: note = Seed: LVVVGARGV (KRAS G12R)
MVVLGARGA

SEQ ID NO: 27340 - protein, 9 aa, synthetic construct
  source 1..9: note = Seed: LVVVGARGV (KRAS G12R)
MVVLGARGC

SEQ ID NO: 27341 - protein, 9 aa, synthetic construct
  source 1..9: note = Seed: LVVVGARGV (KRAS G12R)
MVVLGARGF

SEQ ID NO: 27342 - protein, 9 aa, synthetic construct
  source 1..9: note = Seed: LVVVGARGV (KRAS G12R)
MVVLGARGG

SEQ ID NO: 27343 - protein, 9 aa, synthetic construct
  source 1..9: note = Seed: LVVVGARGV (KRAS G12R)
MVVLGARGH

SEQ ID NO: 27344 - protein, 9 aa, synthetic construct
  source 1..9: note = Seed: LVVVGARGV (KRAS G12R)
MVVLGARGI

SEQ ID NO: 27345 - protein, 9 aa, synthetic construct
  source 1..9: note = Seed: LVVVGARGV (KRAS G12R)
MVVLGARGK

SEQ ID NO: 27346 - protein, 9 aa, synthetic construct
  source 1..9: note = Seed: LVVVGARGV (KRAS G12R)
MVVLGARGL

SEQ ID NO: 27347 - protein, 9 aa, synthetic construct
  source 1..9: note = Seed: LVVVGARGV (KRAS G12R)
MVVLGARGM

SEQ ID NO: 27348 - protein, 9 aa, synthetic construct
  source 1..9: note = Seed: LVVVGARGV (KRAS G12R)
MVVLGARGN

SEQ ID NO: 27349 - protein, 9 aa, synthetic construct
  source 1..9: note = Seed: LVVVGARGV (KRAS G12R)
MVVLGARGP

SEQ ID NO: 27350 - protein, 9 aa, synthetic construct
  source 1..9: note = Seed: LVVVGARGV (KRAS G12R)
MVVLGARGQ

SEQ ID NO: 27351 - protein, 9 aa, synthetic construct
  source 1..9: note = Seed: LVVVGARGV (KRAS G12R)
MVVLGARGR

SEQ ID NO: 27352 - protein, 9 aa, synthetic construct
  source 1..9: note = Seed: LVVVGARGV (KRAS G12R)
MVVLGARGS

SEQ ID NO: 27353 - protein, 9 aa, synthetic construct
  source 1..9: note = Seed: LVVVGARGV (KRAS G12R)
MVVLGARGT

SEQ ID NO: 27354 - protein, 9 aa, synthetic construct
  source 1..9: note = Seed: LVVVGARGV (KRAS G12R)
MVVLGARGV

SEQ ID NO: 27355 - protein, 9 aa, synthetic construct
  source 1..9: note = Seed: LVVVGARGV (KRAS G12R)
MVVLGARGW

SEQ ID NO: 27356 - protein, 9 aa, synthetic construct
  source 1..9: note = Seed: LVVVGARGV (KRAS G12R)
MVVLGARGY

SEQ ID NO: 27357 - protein, 9 aa, synthetic construct
  source 1..9: note = Seed: LVVVGARGV (KRAS G12R)
MVVLGCRGR

SEQ ID NO: 27358 - protein, 9 aa, synthetic construct
  source 1..9: note = Seed: LVVVGARGV (KRAS G12R)
MVVLGCRGV

SEQ ID NO: 27359 - protein, 9 aa, synthetic construct
  source 1..9: note = Seed: LVVVGARGV (KRAS G12R)
MVVLGERGR

SEQ ID NO: 27360 - protein, 9 aa, synthetic construct
  source 1..9: note = Seed: LVVVGARGV (KRAS G12R)
MVVLGFRGM

SEQ ID NO: 27361 - protein, 9 aa, synthetic construct
  source 1..9: note = Seed: LVVVGARGV (KRAS G12R)
MVVLGGRGA

SEQ ID NO: 27362 - protein, 9 aa, synthetic construct
  source 1..9: note = Seed: LVVVGARGV (KRAS G12R)
MVVLGGRGC

SEQ ID NO: 27363 - protein, 9 aa, synthetic construct
  source 1..9: note = Seed: LVVVGARGV (KRAS G12R)
MVVLGGRGF

SEQ ID NO: 27364 - protein, 9 aa, synthetic construct
  source 1..9: note = Seed: LVVVGARGV (KRAS G12R)
MVVLGGRGG

SEQ ID NO: 27365 - protein, 9 aa, synthetic construct
  source 1..9: note = Seed: LVVVGARGV (KRAS G12R)
MVVLGGRGI

SEQ ID NO: 27366 - protein, 9 aa, synthetic construct
  source 1..9: note = Seed: LVVVGARGV (KRAS G12R)
MVVLGGRGL

SEQ ID NO: 27367 - protein, 9 aa, synthetic construct
  source 1..9: note = Seed: LVVVGARGV (KRAS G12R)
MVVLGGRGM

SEQ ID NO: 27368 - protein, 9 aa, synthetic construct
  source 1..9: note = Seed: LVVVGARGV (KRAS G12R)
MVVLGGRGN

SEQ ID NO: 27369 - protein, 9 aa, synthetic construct
  source 1..9: note = Seed: LVVVGARGV (KRAS G12R)
MVVLGGRGP

SEQ ID NO: 27370 - protein, 9 aa, synthetic construct
  source 1..9: note = Seed: LVVVGARGV (KRAS G12R)
MVVLGGRGR

SEQ ID NO: 27371 - protein, 9 aa, synthetic construct
  source 1..9: note = Seed: LVVVGARGV (KRAS G12R)
MVVLGGRGS

SEQ ID NO: 27372 - protein, 9 aa, synthetic construct
  source 1..9: note = Seed: LVVVGARGV (KRAS G12R)
MVVLGGRGT

SEQ ID NO: 27373 - protein, 9 aa, synthetic construct
  source 1..9: note = Seed: LVVVGARGV (KRAS G12R)
MVVLGGRGV

SEQ ID NO: 27374 - protein, 9 aa, synthetic construct
  source 1..9: note = Seed: LVVVGARGV (KRAS G12R)
MVVLGHRGA

SEQ ID NO: 27375 - protein, 9 aa, synthetic construct
  source 1..9: note = Seed: LVVVGARGV (KRAS G12R)
MVVLGHRGF

SEQ ID NO: 27376 - protein, 9 aa, synthetic construct
  source 1..9: note = Seed: LVVVGARGV (KRAS G12R)
MVVLGHRGG

SEQ ID NO: 27377 - protein, 9 aa, synthetic construct
  source 1..9: note = Seed: LVVVGARGV (KRAS G12R)
MVVLGHRGH

SEQ ID NO: 27378 - protein, 9 aa, synthetic construct
  source 1..9: note = Seed: LVVVGARGV (KRAS G12R)
MVVLGHRGI

SEQ ID NO: 27379 - protein, 9 aa, synthetic construct
  source 1..9: note = Seed: LVVVGARGV (KRAS G12R)
MVVLGHRGK

SEQ ID NO: 27380 - protein, 9 aa, synthetic construct
  source 1..9: note = Seed: LVVVGARGV (KRAS G12R)
MVVLGHRGL

SEQ ID NO: 27381 - protein, 9 aa, synthetic construct
  source 1..9: note = Seed: LVVVGARGV (KRAS G12R)
MVVLGHRGM

SEQ ID NO: 27382 - protein, 9 aa, synthetic construct
  source 1..9: note = Seed: LVVVGARGV (KRAS G12R)
MVVLGHRGN

SEQ ID NO: 27383 - protein, 9 aa, synthetic construct
  source 1..9: note = Seed: LVVVGARGV (KRAS G12R)
MVVLGHRGP

SEQ ID NO: 27384 - protein, 9 aa, synthetic construct
  source 1..9: note = Seed: LVVVGARGV (KRAS G12R)
MVVLGHRGQ

SEQ ID NO: 27385 - protein, 9 aa, synthetic construct
  source 1..9: note = Seed: LVVVGARGV (KRAS G12R)
MVVLGHRGR

SEQ ID NO: 27386 - protein, 9 aa, synthetic construct
  source 1..9: note = Seed: LVVVGARGV (KRAS G12R)
MVVLGHRGS

SEQ ID NO: 27387 - protein, 9 aa, synthetic construct
  source 1..9: note = Seed: LVVVGARGV (KRAS G12R)
MVVLGHRGT

SEQ ID NO: 27388 - protein, 9 aa, synthetic construct
  source 1..9: note = Seed: LVVVGARGV (KRAS G12R)
MVVLGHRGV

SEQ ID NO: 27389 - protein, 9 aa, synthetic construct
  source 1..9: note = Seed: LVVVGARGV (KRAS G12R)
MVVLGHRGW

SEQ ID NO: 27390 - protein, 9 aa, synthetic construct
  source 1..9: note = Seed: LVVVGARGV (KRAS G12R)
MVVLGHRGY

SEQ ID NO: 27391 - protein, 9 aa, synthetic construct
  source 1..9: note = Seed: LVVVGARGV (KRAS G12R)
MVVLGIRGA

SEQ ID NO: 27392 - protein, 9 aa, synthetic construct
  source 1..9: note = Seed: LVVVGARGV (KRAS G12R)
MVVLGIRGF

SEQ ID NO: 27393 - protein, 9 aa, synthetic construct
  source 1..9: note = Seed: LVVVGARGV (KRAS G12R)
MVVLGIRGG

SEQ ID NO: 27394 - protein, 9 aa, synthetic construct
  source 1..9: note = Seed: LVVVGARGV (KRAS G12R)
MVVLGIRGI

SEQ ID NO: 27395 - protein, 9 aa, synthetic construct
  source 1..9: note = Seed: LVVVGARGV (KRAS G12R)
MVVLGIRGK

SEQ ID NO: 27396 - protein, 9 aa, synthetic construct
  source 1..9: note = Seed: LVVVGARGV (KRAS G12R)
MVVLGIRGL

SEQ ID NO: 27397 - protein, 9 aa, synthetic construct
  source 1..9: note = Seed: LVVVGARGV (KRAS G12R)
MVVLGIRGM

SEQ ID NO: 27398 - protein, 9 aa, synthetic construct
  source 1..9: note = Seed: LVVVGARGV (KRAS G12R)
MVVLGIRGN

SEQ ID NO: 27399 - protein, 9 aa, synthetic construct
  source 1..9: note = Seed: LVVVGARGV (KRAS G12R)
MVVLGIRGQ

SEQ ID NO: 27400 - protein, 9 aa, synthetic construct
  source 1..9: note = Seed: LVVVGARGV (KRAS G12R)
MVVLGIRGR

SEQ ID NO: 27401 - protein, 9 aa, synthetic construct
  source 1..9: note = Seed: LVVVGARGV (KRAS G12R)
MVVLGIRGS

SEQ ID NO: 27402 - protein, 9 aa, synthetic construct
  source 1..9: note = Seed: LVVVGARGV (KRAS G12R)
MVVLGIRGT

SEQ ID NO: 27403 - protein, 9 aa, synthetic construct
  source 1..9: note = Seed: LVVVGARGV (KRAS G12R)
MVVLGIRGV

SEQ ID NO: 27404 - protein, 9 aa, synthetic construct
  source 1..9: note = Seed: LVVVGARGV (KRAS G12R)
MVVLGIRGY

SEQ ID NO: 27405 - protein, 9 aa, synthetic construct
  source 1..9: note = Seed: LVVVGARGV (KRAS G12R)
MVVLGKRGA

SEQ ID NO: 27406 - protein, 9 aa, synthetic construct
  source 1..9: note = Seed: LVVVGARGV (KRAS G12R)
MVVLGKRGC

SEQ ID NO: 27407 - protein, 9 aa, synthetic construct
  source 1..9: note = Seed: LVVVGARGV (KRAS G12R)
MVVLGKRGD

SEQ ID NO: 27408 - protein, 9 aa, synthetic construct
  source 1..9: note = Seed: LVVVGARGV (KRAS G12R)
MVVLGKRGE

SEQ ID NO: 27409 - protein, 9 aa, synthetic construct
  source 1..9: note = Seed: LVVVGARGV (KRAS G12R)
MVVLGKRGF

SEQ ID NO: 27410 - protein, 9 aa, synthetic construct
  source 1..9: note = Seed: LVVVGARGV (KRAS G12R)
MVVLGKRGG

SEQ ID NO: 27411 - protein, 9 aa, synthetic construct
  source 1..9: note = Seed: LVVVGARGV (KRAS G12R)
MVVLGKRGH

SEQ ID NO: 27412 - protein, 9 aa, synthetic construct
  source 1..9: note = Seed: LVVVGARGV (KRAS G12R)
MVVLGKRGI

SEQ ID NO: 27413 - protein, 9 aa, synthetic construct
  source 1..9: note = Seed: LVVVGARGV (KRAS G12R)
MVVLGKRGK

SEQ ID NO: 27414 - protein, 9 aa, synthetic construct
  source 1..9: note = Seed: LVVVGARGV (KRAS G12R)
MVVLGKRGL

SEQ ID NO: 27415 - protein, 9 aa, synthetic construct
  source 1..9: note = Seed: LVVVGARGV (KRAS G12R)
MVVLGKRGM

SEQ ID NO: 27416 - protein, 9 aa, synthetic construct
  source 1..9: note = Seed: LVVVGARGV (KRAS G12R)
MVVLGKRGN

SEQ ID NO: 27417 - protein, 9 aa, synthetic construct
  source 1..9: note = Seed: LVVVGARGV (KRAS G12R)
MVVLGKRGP

SEQ ID NO: 27418 - protein, 9 aa, synthetic construct
  source 1..9: note = Seed: LVVVGARGV (KRAS G12R)
MVVLGKRGQ

SEQ ID NO: 27419 - protein, 9 aa, synthetic construct
  source 1..9: note = Seed: LVVVGARGV (KRAS G12R)
MVVLGKRGR

SEQ ID NO: 27420 - protein, 9 aa, synthetic construct
  source 1..9: note = Seed: LVVVGARGV (KRAS G12R)
MVVLGKRGS

SEQ ID NO: 27421 - protein, 9 aa, synthetic construct
  source 1..9: note = Seed: LVVVGARGV (KRAS G12R)
MVVLGKRGT

SEQ ID NO: 27422 - protein, 9 aa, synthetic construct
  source 1..9: note = Seed: LVVVGARGV (KRAS G12R)
MVVLGKRGV

SEQ ID NO: 27423 - protein, 9 aa, synthetic construct
  source 1..9: note = Seed: LVVVGARGV (KRAS G12R)
MVVLGKRGW

SEQ ID NO: 27424 - protein, 9 aa, synthetic construct
  source 1..9: note = Seed: LVVVGARGV (KRAS G12R)
MVVLGKRGY

SEQ ID NO: 27425 - protein, 9 aa, synthetic construct
  source 1..9: note = Seed: LVVVGARGV (KRAS G12R)
MVVLGLRGA

SEQ ID NO: 27426 - protein, 9 aa, synthetic construct
  source 1..9: note = Seed: LVVVGARGV (KRAS G12R)
MVVLGLRGG

SEQ ID NO: 27427 - protein, 9 aa, synthetic construct
  source 1..9: note = Seed: LVVVGARGV (KRAS G12R)
MVVLGLRGI

SEQ ID NO: 27428 - protein, 9 aa, synthetic construct
  source 1..9: note = Seed: LVVVGARGV (KRAS G12R)
MVVLGLRGL

SEQ ID NO: 27429 - protein, 9 aa, synthetic construct
  source 1..9: note = Seed: LVVVGARGV (KRAS G12R)
MVVLGLRGM

SEQ ID NO: 27430 - protein, 9 aa, synthetic construct
  source 1..9: note = Seed: LVVVGARGV (KRAS G12R)
MVVLGLRGQ

SEQ ID NO: 27431 - protein, 9 aa, synthetic construct
  source 1..9: note = Seed: LVVVGARGV (KRAS G12R)
MVVLGLRGR

SEQ ID NO: 27432 - protein, 9 aa, synthetic construct
  source 1..9: note = Seed: LVVVGARGV (KRAS G12R)
MVVLGLRGS

SEQ ID NO: 27433 - protein, 9 aa, synthetic construct
  source 1..9: note = Seed: LVVVGARGV (KRAS G12R)
MVVLGLRGV

SEQ ID NO: 27434 - protein, 9 aa, synthetic construct
  source 1..9: note = Seed: LVVVGARGV (KRAS G12R)
MVVLGLRGY

SEQ ID NO: 27435 - protein, 9 aa, synthetic construct
  source 1..9: note = Seed: LVVVGARGV (KRAS G12R)
MVVLGMRGA

SEQ ID NO: 27436 - protein, 9 aa, synthetic construct
  source 1..9: note = Seed: LVVVGARGV (KRAS G12R)
MVVLGMRGF

SEQ ID NO: 27437 - protein, 9 aa, synthetic construct
  source 1..9: note = Seed: LVVVGARGV (KRAS G12R)
MVVLGMRGG

SEQ ID NO: 27438 - protein, 9 aa, synthetic construct
  source 1..9: note = Seed: LVVVGARGV (KRAS G12R)
MVVLGMRGI

SEQ ID NO: 27439 - protein, 9 aa, synthetic construct
  source 1..9: note = Seed: LVVVGARGV (KRAS G12R)
MVVLGMRGL

SEQ ID NO: 27440 - protein, 9 aa, synthetic construct
  source 1..9: note = Seed: LVVVGARGV (KRAS G12R)
MVVLGMRGM

SEQ ID NO: 27441 - protein, 9 aa, synthetic construct
  source 1..9: note = Seed: LVVVGARGV (KRAS G12R)
MVVLGMRGQ

SEQ ID NO: 27442 - protein, 9 aa, synthetic construct
  source 1..9: note = Seed: LVVVGARGV (KRAS G12R)
MVVLGMRGR

SEQ ID NO: 27443 - protein, 9 aa, synthetic construct
  source 1..9: note = Seed: LVVVGARGV (KRAS G12R)
MVVLGMRGS

SEQ ID NO: 27444 - protein, 9 aa, synthetic construct
  source 1..9: note = Seed: LVVVGARGV (KRAS G12R)
MVVLGMRGT

SEQ ID NO: 27445 - protein, 9 aa, synthetic construct
  source 1..9: note = Seed: LVVVGARGV (KRAS G12R)
MVVLGMRGV

SEQ ID NO: 27446 - protein, 9 aa, synthetic construct
  source 1..9: note = Seed: LVVVGARGV (KRAS G12R)
MVVLGMRGY

SEQ ID NO: 27447 - protein, 9 aa, synthetic construct
  source 1..9: note = Seed: LVVVGARGV (KRAS G12R)
MVVLGNRGA

SEQ ID NO: 27448 - protein, 9 aa, synthetic construct
  source 1..9: note = Seed: LVVVGARGV (KRAS G12R)
MVVLGNRGF

SEQ ID NO: 27449 - protein, 9 aa, synthetic construct
  source 1..9: note = Seed: LVVVGARGV (KRAS G12R)
MVVLGNRGG

SEQ ID NO: 27450 - protein, 9 aa, synthetic construct
  source 1..9: note = Seed: LVVVGARGV (KRAS G12R)
MVVLGNRGH

SEQ ID NO: 27451 - protein, 9 aa, synthetic construct
  source 1..9: note = Seed: LVVVGARGV (KRAS G12R)
MVVLGNRGI

SEQ ID NO: 27452 - protein, 9 aa, synthetic construct
  source 1..9: note = Seed: LVVVGARGV (KRAS G12R)
MVVLGNRGK

SEQ ID NO: 27453 - protein, 9 aa, synthetic construct
  source 1..9: note = Seed: LVVVGARGV (KRAS G12R)
MVVLGNRGL

SEQ ID NO: 27454 - protein, 9 aa, synthetic construct
  source 1..9: note = Seed: LVVVGARGV (KRAS G12R)
MVVLGNRGM

SEQ ID NO: 27455 - protein, 9 aa, synthetic construct
  source 1..9: note = Seed: LVVVGARGV (KRAS G12R)
MVVLGNRGN

SEQ ID NO: 27456 - protein, 9 aa, synthetic construct
  source 1..9: note = Seed: LVVVGARGV (KRAS G12R)
MVVLGNRGQ

SEQ ID NO: 27457 - protein, 9 aa, synthetic construct
  source 1..9: note = Seed: LVVVGARGV (KRAS G12R)
MVVLGNRGR

SEQ ID NO: 27458 - protein, 9 aa, synthetic construct
  source 1..9: note = Seed: LVVVGARGV (KRAS G12R)
MVVLGNRGS

SEQ ID NO: 27459 - protein, 9 aa, synthetic construct
  source 1..9: note = Seed: LVVVGARGV (KRAS G12R)
MVVLGNRGT

SEQ ID NO: 27460 - protein, 9 aa, synthetic construct
  source 1..9: note = Seed: LVVVGARGV (KRAS G12R)
MVVLGNRGV

SEQ ID NO: 27461 - protein, 9 aa, synthetic construct
  source 1..9: note = Seed: LVVVGARGV (KRAS G12R)
MVVLGNRGY

SEQ ID NO: 27462 - protein, 9 aa, synthetic construct
  source 1..9: note = Seed: LVVVGARGV (KRAS G12R)
MVVLGPRGA

SEQ ID NO: 27463 - protein, 9 aa, synthetic construct
  source 1..9: note = Seed: LVVVGARGV (KRAS G12R)
MVVLGPRGF

SEQ ID NO: 27464 - protein, 9 aa, synthetic construct
  source 1..9: note = Seed: LVVVGARGV (KRAS G12R)
MVVLGPRGI

SEQ ID NO: 27465 - protein, 9 aa, synthetic construct
  source 1..9: note = Seed: LVVVGARGV (KRAS G12R)
MVVLGPRGL

SEQ ID NO: 27466 - protein, 9 aa, synthetic construct
  source 1..9: note = Seed: LVVVGARGV (KRAS G12R)
MVVLGPRGM

SEQ ID NO: 27467 - protein, 9 aa, synthetic construct
  source 1..9: note = Seed: LVVVGARGV (KRAS G12R)
MVVLGPRGQ

SEQ ID NO: 27468 - protein, 9 aa, synthetic construct
  source 1..9: note = Seed: LVVVGARGV (KRAS G12R)
MVVLGPRGR

SEQ ID NO: 27469 - protein, 9 aa, synthetic construct
  source 1..9: note = Seed: LVVVGARGV (KRAS G12R)
MVVLGPRGS

SEQ ID NO: 27470 - protein, 9 aa, synthetic construct
  source 1..9: note = Seed: LVVVGARGV (KRAS G12R)
MVVLGPRGT

SEQ ID NO: 27471 - protein, 9 aa, synthetic construct
  source 1..9: note = Seed: LVVVGARGV (KRAS G12R)
MVVLGPRGV

SEQ ID NO: 27472 - protein, 9 aa, synthetic construct
  source 1..9: note = Seed: LVVVGARGV (KRAS G12R)
MVVLGQRGA

SEQ ID NO: 27473 - protein, 9 aa, synthetic construct
  source 1..9: note = Seed: LVVVGARGV (KRAS G12R)
MVVLGQRGL

SEQ ID NO: 27474 - protein, 9 aa, synthetic construct
  source 1..9: note = Seed: LVVVGARGV (KRAS G12R)
MVVLGQRGM

SEQ ID NO: 27475 - protein, 9 aa, synthetic construct
  source 1..9: note = Seed: LVVVGARGV (KRAS G12R)
MVVLGQRGQ

SEQ ID NO: 27476 - protein, 9 aa, synthetic construct
  source 1..9: note = Seed: LVVVGARGV (KRAS G12R)
MVVLGQRGR

SEQ ID NO: 27477 - protein, 9 aa, synthetic construct
  source 1..9: note = Seed: LVVVGARGV (KRAS G12R)
MVVLGQRGS

SEQ ID NO: 27478 - protein, 9 aa, synthetic construct
  source 1..9: note = Seed: LVVVGARGV (KRAS G12R)
MVVLGQRGV

SEQ ID NO: 27479 - protein, 9 aa, synthetic construct
  source 1..9: note = Seed: LVVVGARGV (KRAS G12R)
MVVLGRRGA

SEQ ID NO: 27480 - protein, 9 aa, synthetic construct
  source 1..9: note = Seed: LVVVGARGV (KRAS G12R)
MVVLGRRGC

SEQ ID NO: 27481 - protein, 9 aa, synthetic construct
  source 1..9: note = Seed: LVVVGARGV (KRAS G12R)
MVVLGRRGD

SEQ ID NO: 27482 - protein, 9 aa, synthetic construct
  source 1..9: note = Seed: LVVVGARGV (KRAS G12R)
MVVLGRRGE

SEQ ID NO: 27483 - protein, 9 aa, synthetic construct
  source 1..9: note = Seed: LVVVGARGV (KRAS G12R)
MVVLGRRGF

SEQ ID NO: 27484 - protein, 9 aa, synthetic construct
  source 1..9: note = Seed: LVVVGARGV (KRAS G12R)
MVVLGRRGG

SEQ ID NO: 27485 - protein, 9 aa, synthetic construct
  source 1..9: note = Seed: LVVVGARGV (KRAS G12R)
MVVLGRRGH

SEQ ID NO: 27486 - protein, 9 aa, synthetic construct
  source 1..9: note = Seed: LVVVGARGV (KRAS G12R)
MVVLGRRGI

SEQ ID NO: 27487 - protein, 9 aa, synthetic construct
  source 1..9: note = Seed: LVVVGARGV (KRAS G12R)
MVVLGRRGK

SEQ ID NO: 27488 - protein, 9 aa, synthetic construct
  source 1..9: note = Seed: LVVVGARGV (KRAS G12R)
MVVLGRRGL

SEQ ID NO: 27489 - protein, 9 aa, synthetic construct
  source 1..9: note = Seed: LVVVGARGV (KRAS G12R)
MVVLGRRGM

SEQ ID NO: 27490 - protein, 9 aa, synthetic construct
  source 1..9: note = Seed: LVVVGARGV (KRAS G12R)
MVVLGRRGN

SEQ ID NO: 27491 - protein, 9 aa, synthetic construct
  source 1..9: note = Seed: LVVVGARGV (KRAS G12R)
MVVLGRRGP

SEQ ID NO: 27492 - protein, 9 aa, synthetic construct
  source 1..9: note = Seed: LVVVGARGV (KRAS G12R)
MVVLGRRGQ

SEQ ID NO: 27493 - protein, 9 aa, synthetic construct
  source 1..9: note = Seed: LVVVGARGV (KRAS G12R)
MVVLGRRGR

SEQ ID NO: 27494 - protein, 9 aa, synthetic construct
  source 1..9: note = Seed: LVVVGARGV (KRAS G12R)
MVVLGRRGS

SEQ ID NO: 27495 - protein, 9 aa, synthetic construct
  source 1..9: note = Seed: LVVVGARGV (KRAS G12R)
MVVLGRRGT

SEQ ID NO: 27496 - protein, 9 aa, synthetic construct
  source 1..9: note = Seed: LVVVGARGV (KRAS G12R)
MVVLGRRGV

SEQ ID NO: 27497 - protein, 9 aa, synthetic construct
  source 1..9: note = Seed: LVVVGARGV (KRAS G12R)
MVVLGRRGW

SEQ ID NO: 27498 - protein, 9 aa, synthetic construct
  source 1..9: note = Seed: LVVVGARGV (KRAS G12R)
MVVLGRRGY

SEQ ID NO: 27499 - protein, 9 aa, synthetic construct
  source 1..9: note = Seed: LVVVGARGV (KRAS G12R)
MVVLGSRGA

SEQ ID NO: 27500 - protein, 9 aa, synthetic construct
  source 1..9: note = Seed: LVVVGARGV (KRAS G12R)
MVVLGSRGC

SEQ ID NO: 27501 - protein, 9 aa, synthetic construct
  source 1..9: note = Seed: LVVVGARGV (KRAS G12R)
MVVLGSRGF

SEQ ID NO: 27502 - protein, 9 aa, synthetic construct
  source 1..9: note = Seed: LVVVGARGV (KRAS G12R)
MVVLGSRGG

SEQ ID NO: 27503 - protein, 9 aa, synthetic construct
  source 1..9: note = Seed: LVVVGARGV (KRAS G12R)
MVVLGSRGH

SEQ ID NO: 27504 - protein, 9 aa, synthetic construct
  source 1..9: note = Seed: LVVVGARGV (KRAS G12R)
MVVLGSRGI

SEQ ID NO: 27505 - protein, 9 aa, synthetic construct
  source 1..9: note = Seed: LVVVGARGV (KRAS G12R)
MVVLGSRGK

SEQ ID NO: 27506 - protein, 9 aa, synthetic construct
  source 1..9: note = Seed: LVVVGARGV (KRAS G12R)
MVVLGSRGL

SEQ ID NO: 27507 - protein, 9 aa, synthetic construct
  source 1..9: note = Seed: LVVVGARGV (KRAS G12R)
MVVLGSRGM

SEQ ID NO: 27508 - protein, 9 aa, synthetic construct
  source 1..9: note = Seed: LVVVGARGV (KRAS G12R)
MVVLGSRGN

SEQ ID NO: 27509 - protein, 9 aa, synthetic construct
  source 1..9: note = Seed: LVVVGARGV (KRAS G12R)
MVVLGSRGP

SEQ ID NO: 27510 - protein, 9 aa, synthetic construct
  source 1..9: note = Seed: LVVVGARGV (KRAS G12R)
MVVLGSRGQ

SEQ ID NO: 27511 - protein, 9 aa, synthetic construct
  source 1..9: note = Seed: LVVVGARGV (KRAS G12R)
MVVLGSRGR

SEQ ID NO: 27512 - protein, 9 aa, synthetic construct
  source 1..9: note = Seed: LVVVGARGV (KRAS G12R)
MVVLGSRGS

SEQ ID NO: 27513 - protein, 9 aa, synthetic construct
  source 1..9: note = Seed: LVVVGARGV (KRAS G12R)
MVVLGSRGT

SEQ ID NO: 27514 - protein, 9 aa, synthetic construct
  source 1..9: note = Seed: LVVVGARGV (KRAS G12R)
MVVLGSRGV

SEQ ID NO: 27515 - protein, 9 aa, synthetic construct
  source 1..9: note = Seed: LVVVGARGV (KRAS G12R)
MVVLGSRGY

SEQ ID NO: 27516 - protein, 9 aa, synthetic construct
  source 1..9: note = Seed: LVVVGARGV (KRAS G12R)
MVVLGTRGA

SEQ ID NO: 27517 - protein, 9 aa, synthetic construct
  source 1..9: note = Seed: LVVVGARGV (KRAS G12R)
MVVLGTRGF

SEQ ID NO: 27518 - protein, 9 aa, synthetic construct
  source 1..9: note = Seed: LVVVGARGV (KRAS G12R)
MVVLGTRGG

SEQ ID NO: 27519 - protein, 9 aa, synthetic construct
  source 1..9: note = Seed: LVVVGARGV (KRAS G12R)
MVVLGTRGH

SEQ ID NO: 27520 - protein, 9 aa, synthetic construct
  source 1..9: note = Seed: LVVVGARGV (KRAS G12R)
MVVLGTRGI

SEQ ID NO: 27521 - protein, 9 aa, synthetic construct
  source 1..9: note = Seed: LVVVGARGV (KRAS G12R)
MVVLGTRGK

SEQ ID NO: 27522 - protein, 9 aa, synthetic construct
  source 1..9: note = Seed: LVVVGARGV (KRAS G12R)
MVVLGTRGL

SEQ ID NO: 27523 - protein, 9 aa, synthetic construct
  source 1..9: note = Seed: LVVVGARGV (KRAS G12R)
MVVLGTRGM

SEQ ID NO: 27524 - protein, 9 aa, synthetic construct
  source 1..9: note = Seed: LVVVGARGV (KRAS G12R)
MVVLGTRGN

SEQ ID NO: 27525 - protein, 9 aa, synthetic construct
  source 1..9: note = Seed: LVVVGARGV (KRAS G12R)
MVVLGTRGQ

SEQ ID NO: 27526 - protein, 9 aa, synthetic construct
  source 1..9: note = Seed: LVVVGARGV (KRAS G12R)
MVVLGTRGR

SEQ ID NO: 27527 - protein, 9 aa, synthetic construct
  source 1..9: note = Seed: LVVVGARGV (KRAS G12R)
MVVLGTRGS

SEQ ID NO: 27528 - protein, 9 aa, synthetic construct
  source 1..9: note = Seed: LVVVGARGV (KRAS G12R)
MVVLGTRGT

SEQ ID NO: 27529 - protein, 9 aa, synthetic construct
  source 1..9: note = Seed: LVVVGARGV (KRAS G12R)
MVVLGTRGV

SEQ ID NO: 27530 - protein, 9 aa, synthetic construct
  source 1..9: note = Seed: LVVVGARGV (KRAS G12R)
MVVLGTRGY

SEQ ID NO: 27531 - protein, 9 aa, synthetic construct
  source 1..9: note = Seed: LVVVGARGV (KRAS G12R)
MVVLGVRGA

SEQ ID NO: 27532 - protein, 9 aa, synthetic construct
  source 1..9: note = Seed: LVVVGARGV (KRAS G12R)
MVVLGVRGF

SEQ ID NO: 27533 - protein, 9 aa, synthetic construct
  source 1..9: note = Seed: LVVVGARGV (KRAS G12R)
MVVLGVRGG

SEQ ID NO: 27534 - protein, 9 aa, synthetic construct
  source 1..9: note = Seed: LVVVGARGV (KRAS G12R)
MVVLGVRGI

SEQ ID NO: 27535 - protein, 9 aa, synthetic construct
  source 1..9: note = Seed: LVVVGARGV (KRAS G12R)
MVVLGVRGK

SEQ ID NO: 27536 - protein, 9 aa, synthetic construct
  source 1..9: note = Seed: LVVVGARGV (KRAS G12R)
MVVLGVRGL

SEQ ID NO: 27537 - protein, 9 aa, synthetic construct
  source 1..9: note = Seed: LVVVGARGV (KRAS G12R)
MVVLGVRGM

SEQ ID NO: 27538 - protein, 9 aa, synthetic construct
  source 1..9: note = Seed: LVVVGARGV (KRAS G12R)
MVVLGVRGN

SEQ ID NO: 27539 - protein, 9 aa, synthetic construct
  source 1..9: note = Seed: LVVVGARGV (KRAS G12R)
MVVLGVRGQ

SEQ ID NO: 27540 - protein, 9 aa, synthetic construct
  source 1..9: note = Seed: LVVVGARGV (KRAS G12R)
MVVLGVRGR

SEQ ID NO: 27541 - protein, 9 aa, synthetic construct
  source 1..9: note = Seed: LVVVGARGV (KRAS G12R)
MVVLGVRGS

SEQ ID NO: 27542 - protein, 9 aa, synthetic construct
  source 1..9: note = Seed: LVVVGARGV (KRAS G12R)
MVVLGVRGT

SEQ ID NO: 27543 - protein, 9 aa, synthetic construct
  source 1..9: note = Seed: LVVVGARGV (KRAS G12R)
MVVLGVRGV

SEQ ID NO: 27544 - protein, 9 aa, synthetic construct
  source 1..9: note = Seed: LVVVGARGV (KRAS G12R)
MVVLGVRGY

SEQ ID NO: 27545 - protein, 9 aa, synthetic construct
  source 1..9: note = Seed: LVVVGARGV (KRAS G12R)
MVVLGWRGR

SEQ ID NO: 27546 - protein, 9 aa, synthetic construct
  source 1..9: note = Seed: LVVVGARGV (KRAS G12R)
MVVMGARGA

SEQ ID NO: 27547 - protein, 9 aa, synthetic construct
  source 1..9: note = Seed: LVVVGARGV (KRAS G12R)
MVVMGARGC

SEQ ID NO: 27548 - protein, 9 aa, synthetic construct
  source 1..9: note = Seed: LVVVGARGV (KRAS G12R)
MVVMGARGF

SEQ ID NO: 27549 - protein, 9 aa, synthetic construct
  source 1..9: note = Seed: LVVVGARGV (KRAS G12R)
MVVMGARGG

SEQ ID NO: 27550 - protein, 9 aa, synthetic construct
  source 1..9: note = Seed: LVVVGARGV (KRAS G12R)
MVVMGARGH

SEQ ID NO: 27551 - protein, 9 aa, synthetic construct
  source 1..9: note = Seed: LVVVGARGV (KRAS G12R)
MVVMGARGI

SEQ ID NO: 27552 - protein, 9 aa, synthetic construct
  source 1..9: note = Seed: LVVVGARGV (KRAS G12R)
MVVMGARGK

SEQ ID NO: 27553 - protein, 9 aa, synthetic construct
  source 1..9: note = Seed: LVVVGARGV (KRAS G12R)
MVVMGARGL

SEQ ID NO: 27554 - protein, 9 aa, synthetic construct
  source 1..9: note = Seed: LVVVGARGV (KRAS G12R)
MVVMGARGM

SEQ ID NO: 27555 - protein, 9 aa, synthetic construct
  source 1..9: note = Seed: LVVVGARGV (KRAS G12R)
MVVMGARGN

SEQ ID NO: 27556 - protein, 9 aa, synthetic construct
  source 1..9: note = Seed: LVVVGARGV (KRAS G12R)
MVVMGARGP

SEQ ID NO: 27557 - protein, 9 aa, synthetic construct
  source 1..9: note = Seed: LVVVGARGV (KRAS G12R)
MVVMGARGQ

SEQ ID NO: 27558 - protein, 9 aa, synthetic construct
  source 1..9: note = Seed: LVVVGARGV (KRAS G12R)
MVVMGARGR

SEQ ID NO: 27559 - protein, 9 aa, synthetic construct
  source 1..9: note = Seed: LVVVGARGV (KRAS G12R)
MVVMGARGS

SEQ ID NO: 27560 - protein, 9 aa, synthetic construct
  source 1..9: note = Seed: LVVVGARGV (KRAS G12R)
MVVMGARGT

SEQ ID NO: 27561 - protein, 9 aa, synthetic construct
  source 1..9: note = Seed: LVVVGARGV (KRAS G12R)
MVVMGARGV

SEQ ID NO: 27562 - protein, 9 aa, synthetic construct
  source 1..9: note = Seed: LVVVGARGV (KRAS G12R)
MVVMGARGW

SEQ ID NO: 27563 - protein, 9 aa, synthetic construct
  source 1..9: note = Seed: LVVVGARGV (KRAS G12R)
MVVMGARGY

SEQ ID NO: 27564 - protein, 9 aa, synthetic construct
  source 1..9: note = Seed: LVVVGARGV (KRAS G12R)
MVVMGCRGL

SEQ ID NO: 27565 - protein, 9 aa, synthetic construct
  source 1..9: note = Seed: LVVVGARGV (KRAS G12R)
MVVMGCRGR

SEQ ID NO: 27566 - protein, 9 aa, synthetic construct
  source 1..9: note = Seed: LVVVGARGV (KRAS G12R)
MVVMGCRGV

SEQ ID NO: 27567 - protein, 9 aa, synthetic construct
  source 1..9: note = Seed: LVVVGARGV (KRAS G12R)
MVVMGERGR

SEQ ID NO: 27568 - protein, 9 aa, synthetic construct
  source 1..9: note = Seed: LVVVGARGV (KRAS G12R)
MVVMGFRGL

SEQ ID NO: 27569 - protein, 9 aa, synthetic construct
  source 1..9: note = Seed: LVVVGARGV (KRAS G12R)
MVVMGFRGR

SEQ ID NO: 27570 - protein, 9 aa, synthetic construct
  source 1..9: note = Seed: LVVVGARGV (KRAS G12R)
MVVMGFRGV

SEQ ID NO: 27571 - protein, 9 aa, synthetic construct
  source 1..9: note = Seed: LVVVGARGV (KRAS G12R)
MVVMGGRGA

SEQ ID NO: 27572 - protein, 9 aa, synthetic construct
  source 1..9: note = Seed: LVVVGARGV (KRAS G12R)
MVVMGGRGC

SEQ ID NO: 27573 - protein, 9 aa, synthetic construct
  source 1..9: note = Seed: LVVVGARGV (KRAS G12R)
MVVMGGRGF

SEQ ID NO: 27574 - protein, 9 aa, synthetic construct
  source 1..9: note = Seed: LVVVGARGV (KRAS G12R)
MVVMGGRGG

SEQ ID NO: 27575 - protein, 9 aa, synthetic construct
  source 1..9: note = Seed: LVVVGARGV (KRAS G12R)
MVVMGGRGI

SEQ ID NO: 27576 - protein, 9 aa, synthetic construct
  source 1..9: note = Seed: LVVVGARGV (KRAS G12R)
MVVMGGRGL

SEQ ID NO: 27577 - protein, 9 aa, synthetic construct
  source 1..9: note = Seed: LVVVGARGV (KRAS G12R)
MVVMGGRGM

SEQ ID NO: 27578 - protein, 9 aa, synthetic construct
  source 1..9: note = Seed: LVVVGARGV (KRAS G12R)
MVVMGGRGN

SEQ ID NO: 27579 - protein, 9 aa, synthetic construct
  source 1..9: note = Seed: LVVVGARGV (KRAS G12R)
MVVMGGRGR

SEQ ID NO: 27580 - protein, 9 aa, synthetic construct
  source 1..9: note = Seed: LVVVGARGV (KRAS G12R)
MVVMGGRGS

SEQ ID NO: 27581 - protein, 9 aa, synthetic construct
  source 1..9: note = Seed: LVVVGARGV (KRAS G12R)
MVVMGGRGT

SEQ ID NO: 27582 - protein, 9 aa, synthetic construct
  source 1..9: note = Seed: LVVVGARGV (KRAS G12R)
MVVMGGRGV

SEQ ID NO: 27583 - protein, 9 aa, synthetic construct
  source 1..9: note = Seed: LVVVGARGV (KRAS G12R)
MVVMGGRGY

SEQ ID NO: 27584 - protein, 9 aa, synthetic construct
  source 1..9: note = Seed: LVVVGARGV (KRAS G12R)
MVVMGHRGA

SEQ ID NO: 27585 - protein, 9 aa, synthetic construct
  source 1..9: note = Seed: LVVVGARGV (KRAS G12R)
MVVMGHRGF

SEQ ID NO: 27586 - protein, 9 aa, synthetic construct
  source 1..9: note = Seed: LVVVGARGV (KRAS G12R)
MVVMGHRGG

SEQ ID NO: 27587 - protein, 9 aa, synthetic construct
  source 1..9: note = Seed: LVVVGARGV (KRAS G12R)
MVVMGHRGH

SEQ ID NO: 27588 - protein, 9 aa, synthetic construct
  source 1..9: note = Seed: LVVVGARGV (KRAS G12R)
MVVMGHRGI

SEQ ID NO: 27589 - protein, 9 aa, synthetic construct
  source 1..9: note = Seed: LVVVGARGV (KRAS G12R)
MVVMGHRGK

SEQ ID NO: 27590 - protein, 9 aa, synthetic construct
  source 1..9: note = Seed: LVVVGARGV (KRAS G12R)
MVVMGHRGL

SEQ ID NO: 27591 - protein, 9 aa, synthetic construct
  source 1..9: note = Seed: LVVVGARGV (KRAS G12R)
MVVMGHRGM

SEQ ID NO: 27592 - protein, 9 aa, synthetic construct
  source 1..9: note = Seed: LVVVGARGV (KRAS G12R)
MVVMGHRGN

SEQ ID NO: 27593 - protein, 9 aa, synthetic construct
  source 1..9: note = Seed: LVVVGARGV (KRAS G12R)
MVVMGHRGP

SEQ ID NO: 27594 - protein, 9 aa, synthetic construct
  source 1..9: note = Seed: LVVVGARGV (KRAS G12R)
MVVMGHRGQ

SEQ ID NO: 27595 - protein, 9 aa, synthetic construct
  source 1..9: note = Seed: LVVVGARGV (KRAS G12R)
MVVMGHRGR

SEQ ID NO: 27596 - protein, 9 aa, synthetic construct
  source 1..9: note = Seed: LVVVGARGV (KRAS G12R)
MVVMGHRGS

SEQ ID NO: 27597 - protein, 9 aa, synthetic construct
  source 1..9: note = Seed: LVVVGARGV (KRAS G12R)
MVVMGHRGT

SEQ ID NO: 27598 - protein, 9 aa, synthetic construct
  source 1..9: note = Seed: LVVVGARGV (KRAS G12R)
MVVMGHRGV

SEQ ID NO: 27599 - protein, 9 aa, synthetic construct
  source 1..9: note = Seed: LVVVGARGV (KRAS G12R)
MVVMGHRGW

SEQ ID NO: 27600 - protein, 9 aa, synthetic construct
  source 1..9: note = Seed: LVVVGARGV (KRAS G12R)
MVVMGHRGY

SEQ ID NO: 27601 - protein, 9 aa, synthetic construct
  source 1..9: note = Seed: LVVVGARGV (KRAS G12R)
MVVMGIRGA

SEQ ID NO: 27602 - protein, 9 aa, synthetic construct
  source 1..9: note = Seed: LVVVGARGV (KRAS G12R)
MVVMGIRGF

SEQ ID NO: 27603 - protein, 9 aa, synthetic construct
  source 1..9: note = Seed: LVVVGARGV (KRAS G12R)
MVVMGIRGG

SEQ ID NO: 27604 - protein, 9 aa, synthetic construct
  source 1..9: note = Seed: LVVVGARGV (KRAS G12R)
MVVMGIRGI

SEQ ID NO: 27605 - protein, 9 aa, synthetic construct
  source 1..9: note = Seed: LVVVGARGV (KRAS G12R)
MVVMGIRGK

SEQ ID NO: 27606 - protein, 9 aa, synthetic construct
  source 1..9: note = Seed: LVVVGARGV (KRAS G12R)
MVVMGIRGL

SEQ ID NO: 27607 - protein, 9 aa, synthetic construct
  source 1..9: note = Seed: LVVVGARGV (KRAS G12R)
MVVMGIRGM

SEQ ID NO: 27608 - protein, 9 aa, synthetic construct
  source 1..9: note = Seed: LVVVGARGV (KRAS G12R)
MVVMGIRGN

SEQ ID NO: 27609 - protein, 9 aa, synthetic construct
  source 1..9: note = Seed: LVVVGARGV (KRAS G12R)
MVVMGIRGQ

SEQ ID NO: 27610 - protein, 9 aa, synthetic construct
  source 1..9: note = Seed: LVVVGARGV (KRAS G12R)
MVVMGIRGR

SEQ ID NO: 27611 - protein, 9 aa, synthetic construct
  source 1..9: note = Seed: LVVVGARGV (KRAS G12R)
MVVMGIRGS

SEQ ID NO: 27612 - protein, 9 aa, synthetic construct
  source 1..9: note = Seed: LVVVGARGV (KRAS G12R)
MVVMGIRGT

SEQ ID NO: 27613 - protein, 9 aa, synthetic construct
  source 1..9: note = Seed: LVVVGARGV (KRAS G12R)
MVVMGIRGV

SEQ ID NO: 27614 - protein, 9 aa, synthetic construct
  source 1..9: note = Seed: LVVVGARGV (KRAS G12R)
MVVMGIRGY

SEQ ID NO: 27615 - protein, 9 aa, synthetic construct
  source 1..9: note = Seed: LVVVGARGV (KRAS G12R)
MVVMGKRGA

SEQ ID NO: 27616 - protein, 9 aa, synthetic construct
  source 1..9: note = Seed: LVVVGARGV (KRAS G12R)
MVVMGKRGC

SEQ ID NO: 27617 - protein, 9 aa, synthetic construct
  source 1..9: note = Seed: LVVVGARGV (KRAS G12R)
MVVMGKRGD

SEQ ID NO: 27618 - protein, 9 aa, synthetic construct
  source 1..9: note = Seed: LVVVGARGV (KRAS G12R)
MVVMGKRGE

SEQ ID NO: 27619 - protein, 9 aa, synthetic construct
  source 1..9: note = Seed: LVVVGARGV (KRAS G12R)
MVVMGKRGF

SEQ ID NO: 27620 - protein, 9 aa, synthetic construct
  source 1..9: note = Seed: LVVVGARGV (KRAS G12R)
MVVMGKRGG

SEQ ID NO: 27621 - protein, 9 aa, synthetic construct
  source 1..9: note = Seed: LVVVGARGV (KRAS G12R)
MVVMGKRGH

SEQ ID NO: 27622 - protein, 9 aa, synthetic construct
  source 1..9: note = Seed: LVVVGARGV (KRAS G12R)
MVVMGKRGI

SEQ ID NO: 27623 - protein, 9 aa, synthetic construct
  source 1..9: note = Seed: LVVVGARGV (KRAS G12R)
MVVMGKRGK

SEQ ID NO: 27624 - protein, 9 aa, synthetic construct
  source 1..9: note = Seed: LVVVGARGV (KRAS G12R)
MVVMGKRGL

SEQ ID NO: 27625 - protein, 9 aa, synthetic construct
  source 1..9: note = Seed: LVVVGARGV (KRAS G12R)
MVVMGKRGM

SEQ ID NO: 27626 - protein, 9 aa, synthetic construct
  source 1..9: note = Seed: LVVVGARGV (KRAS G12R)
MVVMGKRGN

SEQ ID NO: 27627 - protein, 9 aa, synthetic construct
  source 1..9: note = Seed: LVVVGARGV (KRAS G12R)
MVVMGKRGP

SEQ ID NO: 27628 - protein, 9 aa, synthetic construct
  source 1..9: note = Seed: LVVVGARGV (KRAS G12R)
MVVMGKRGQ

SEQ ID NO: 27629 - protein, 9 aa, synthetic construct
  source 1..9: note = Seed: LVVVGARGV (KRAS G12R)
MVVMGKRGR

SEQ ID NO: 27630 - protein, 9 aa, synthetic construct
  source 1..9: note = Seed: LVVVGARGV (KRAS G12R)
MVVMGKRGS

SEQ ID NO: 27631 - protein, 9 aa, synthetic construct
  source 1..9: note = Seed: LVVVGARGV (KRAS G12R)
MVVMGKRGT

SEQ ID NO: 27632 - protein, 9 aa, synthetic construct
  source 1..9: note = Seed: LVVVGARGV (KRAS G12R)
MVVMGKRGV

SEQ ID NO: 27633 - protein, 9 aa, synthetic construct
  source 1..9: note = Seed: LVVVGARGV (KRAS G12R)
MVVMGKRGW

SEQ ID NO: 27634 - protein, 9 aa, synthetic construct
  source 1..9: note = Seed: LVVVGARGV (KRAS G12R)
MVVMGKRGY

SEQ ID NO: 27635 - protein, 9 aa, synthetic construct
  source 1..9: note = Seed: LVVVGARGV (KRAS G12R)
MVVMGLRGA

SEQ ID NO: 27636 - protein, 9 aa, synthetic construct
  source 1..9: note = Seed: LVVVGARGV (KRAS G12R)
MVVMGLRGC

SEQ ID NO: 27637 - protein, 9 aa, synthetic construct
  source 1..9: note = Seed: LVVVGARGV (KRAS G12R)
MVVMGLRGF

SEQ ID NO: 27638 - protein, 9 aa, synthetic construct
  source 1..9: note = Seed: LVVVGARGV (KRAS G12R)
MVVMGLRGG

SEQ ID NO: 27639 - protein, 9 aa, synthetic construct
  source 1..9: note = Seed: LVVVGARGV (KRAS G12R)
MVVMGLRGI

SEQ ID NO: 27640 - protein, 9 aa, synthetic construct
  source 1..9: note = Seed: LVVVGARGV (KRAS G12R)
MVVMGLRGL

SEQ ID NO: 27641 - protein, 9 aa, synthetic construct
  source 1..9: note = Seed: LVVVGARGV (KRAS G12R)
MVVMGLRGM

SEQ ID NO: 27642 - protein, 9 aa, synthetic construct
  source 1..9: note = Seed: LVVVGARGV (KRAS G12R)
MVVMGLRGQ

SEQ ID NO: 27643 - protein, 9 aa, synthetic construct
  source 1..9: note = Seed: LVVVGARGV (KRAS G12R)
MVVMGLRGR

SEQ ID NO: 27644 - protein, 9 aa, synthetic construct
  source 1..9: note = Seed: LVVVGARGV (KRAS G12R)
MVVMGLRGS

SEQ ID NO: 27645 - protein, 9 aa, synthetic construct
  source 1..9: note = Seed: LVVVGARGV (KRAS G12R)
MVVMGLRGT

SEQ ID NO: 27646 - protein, 9 aa, synthetic construct
  source 1..9: note = Seed: LVVVGARGV (KRAS G12R)
MVVMGLRGV

SEQ ID NO: 27647 - protein, 9 aa, synthetic construct
  source 1..9: note = Seed: LVVVGARGV (KRAS G12R)
MVVMGLRGY

SEQ ID NO: 27648 - protein, 9 aa, synthetic construct
  source 1..9: note = Seed: LVVVGARGV (KRAS G12R)
MVVMGMRGA

SEQ ID NO: 27649 - protein, 9 aa, synthetic construct
  source 1..9: note = Seed: LVVVGARGV (KRAS G12R)
MVVMGMRGC

SEQ ID NO: 27650 - protein, 9 aa, synthetic construct
  source 1..9: note = Seed: LVVVGARGV (KRAS G12R)
MVVMGMRGF

SEQ ID NO: 27651 - protein, 9 aa, synthetic construct
  source 1..9: note = Seed: LVVVGARGV (KRAS G12R)
MVVMGMRGG

SEQ ID NO: 27652 - protein, 9 aa, synthetic construct
  source 1..9: note = Seed: LVVVGARGV (KRAS G12R)
MVVMGMRGI

SEQ ID NO: 27653 - protein, 9 aa, synthetic construct
  source 1..9: note = Seed: LVVVGARGV (KRAS G12R)
MVVMGMRGL

SEQ ID NO: 27654 - protein, 9 aa, synthetic construct
  source 1..9: note = Seed: LVVVGARGV (KRAS G12R)
MVVMGMRGM

SEQ ID NO: 27655 - protein, 9 aa, synthetic construct
  source 1..9: note = Seed: LVVVGARGV (KRAS G12R)
MVVMGMRGQ

SEQ ID NO: 27656 - protein, 9 aa, synthetic construct
  source 1..9: note = Seed: LVVVGARGV (KRAS G12R)
MVVMGMRGR

SEQ ID NO: 27657 - protein, 9 aa, synthetic construct
  source 1..9: note = Seed: LVVVGARGV (KRAS G12R)
MVVMGMRGS

SEQ ID NO: 27658 - protein, 9 aa, synthetic construct
  source 1..9: note = Seed: LVVVGARGV (KRAS G12R)
MVVMGMRGT

SEQ ID NO: 27659 - protein, 9 aa, synthetic construct
  source 1..9: note = Seed: LVVVGARGV (KRAS G12R)
MVVMGMRGV

SEQ ID NO: 27660 - protein, 9 aa, synthetic construct
  source 1..9: note = Seed: LVVVGARGV (KRAS G12R)
MVVMGMRGY

SEQ ID NO: 27661 - protein, 9 aa, synthetic construct
  source 1..9: note = Seed: LVVVGARGV (KRAS G12R)
MVVMGNRGA

SEQ ID NO: 27662 - protein, 9 aa, synthetic construct
  source 1..9: note = Seed: LVVVGARGV (KRAS G12R)
MVVMGNRGF

SEQ ID NO: 27663 - protein, 9 aa, synthetic construct
  source 1..9: note = Seed: LVVVGARGV (KRAS G12R)
MVVMGNRGH

SEQ ID NO: 27664 - protein, 9 aa, synthetic construct
  source 1..9: note = Seed: LVVVGARGV (KRAS G12R)
MVVMGNRGI

SEQ ID NO: 27665 - protein, 9 aa, synthetic construct
  source 1..9: note = Seed: LVVVGARGV (KRAS G12R)
MVVMGNRGK

SEQ ID NO: 27666 - protein, 9 aa, synthetic construct
  source 1..9: note = Seed: LVVVGARGV (KRAS G12R)
MVVMGNRGL

SEQ ID NO: 27667 - protein, 9 aa, synthetic construct
  source 1..9: note = Seed: LVVVGARGV (KRAS G12R)
MVVMGNRGM

SEQ ID NO: 27668 - protein, 9 aa, synthetic construct
  source 1..9: note = Seed: LVVVGARGV (KRAS G12R)
MVVMGNRGQ

SEQ ID NO: 27669 - protein, 9 aa, synthetic construct
  source 1..9: note = Seed: LVVVGARGV (KRAS G12R)
MVVMGNRGR

SEQ ID NO: 27670 - protein, 9 aa, synthetic construct
  source 1..9: note = Seed: LVVVGARGV (KRAS G12R)
MVVMGNRGS

SEQ ID NO: 27671 - protein, 9 aa, synthetic construct
  source 1..9: note = Seed: LVVVGARGV (KRAS G12R)
MVVMGNRGT

SEQ ID NO: 27672 - protein, 9 aa, synthetic construct
  source 1..9: note = Seed: LVVVGARGV (KRAS G12R)
MVVMGNRGV

SEQ ID NO: 27673 - protein, 9 aa, synthetic construct
  source 1..9: note = Seed: LVVVGARGV (KRAS G12R)
MVVMGNRGY

SEQ ID NO: 27674 - protein, 9 aa, synthetic construct
  source 1..9: note = Seed: LVVVGARGV (KRAS G12R)
MVVMGPRGA

SEQ ID NO: 27675 - protein, 9 aa, synthetic construct
  source 1..9: note = Seed: LVVVGARGV (KRAS G12R)
MVVMGPRGF

SEQ ID NO: 27676 - protein, 9 aa, synthetic construct
  source 1..9: note = Seed: LVVVGARGV (KRAS G12R)
MVVMGPRGI

SEQ ID NO: 27677 - protein, 9 aa, synthetic construct
  source 1..9: note = Seed: LVVVGARGV (KRAS G12R)
MVVMGPRGL

SEQ ID NO: 27678 - protein, 9 aa, synthetic construct
  source 1..9: note = Seed: LVVVGARGV (KRAS G12R)
MVVMGPRGM

SEQ ID NO: 27679 - protein, 9 aa, synthetic construct
  source 1..9: note = Seed: LVVVGARGV (KRAS G12R)
MVVMGPRGQ

SEQ ID NO: 27680 - protein, 9 aa, synthetic construct
  source 1..9: note = Seed: LVVVGARGV (KRAS G12R)
MVVMGPRGR

SEQ ID NO: 27681 - protein, 9 aa, synthetic construct
  source 1..9: note = Seed: LVVVGARGV (KRAS G12R)
MVVMGPRGS

SEQ ID NO: 27682 - protein, 9 aa, synthetic construct
  source 1..9: note = Seed: LVVVGARGV (KRAS G12R)
MVVMGPRGT

SEQ ID NO: 27683 - protein, 9 aa, synthetic construct
  source 1..9: note = Seed: LVVVGARGV (KRAS G12R)
MVVMGPRGV

SEQ ID NO: 27684 - protein, 9 aa, synthetic construct
  source 1..9: note = Seed: LVVVGARGV (KRAS G12R)
MVVMGQRGA

SEQ ID NO: 27685 - protein, 9 aa, synthetic construct
  source 1..9: note = Seed: LVVVGARGV (KRAS G12R)
MVVMGQRGI

SEQ ID NO: 27686 - protein, 9 aa, synthetic construct
  source 1..9: note = Seed: LVVVGARGV (KRAS G12R)
MVVMGQRGK

SEQ ID NO: 27687 - protein, 9 aa, synthetic construct
  source 1..9: note = Seed: LVVVGARGV (KRAS G12R)
MVVMGQRGL

SEQ ID NO: 27688 - protein, 9 aa, synthetic construct
  source 1..9: note = Seed: LVVVGARGV (KRAS G12R)
MVVMGQRGM

SEQ ID NO: 27689 - protein, 9 aa, synthetic construct
  source 1..9: note = Seed: LVVVGARGV (KRAS G12R)
MVVMGQRGQ

SEQ ID NO: 27690 - protein, 9 aa, synthetic construct
  source 1..9: note = Seed: LVVVGARGV (KRAS G12R)
MVVMGQRGR

SEQ ID NO: 27691 - protein, 9 aa, synthetic construct
  source 1..9: note = Seed: LVVVGARGV (KRAS G12R)
MVVMGQRGS

SEQ ID NO: 27692 - protein, 9 aa, synthetic construct
  source 1..9: note = Seed: LVVVGARGV (KRAS G12R)
MVVMGQRGT

SEQ ID NO: 27693 - protein, 9 aa, synthetic construct
  source 1..9: note = Seed: LVVVGARGV (KRAS G12R)
MVVMGQRGV

SEQ ID NO: 27694 - protein, 9 aa, synthetic construct
  source 1..9: note = Seed: LVVVGARGV (KRAS G12R)
MVVMGRRGA

SEQ ID NO: 27695 - protein, 9 aa, synthetic construct
  source 1..9: note = Seed: LVVVGARGV (KRAS G12R)
MVVMGRRGC

SEQ ID NO: 27696 - protein, 9 aa, synthetic construct
  source 1..9: note = Seed: LVVVGARGV (KRAS G12R)
MVVMGRRGD

SEQ ID NO: 27697 - protein, 9 aa, synthetic construct
  source 1..9: note = Seed: LVVVGARGV (KRAS G12R)
MVVMGRRGE

SEQ ID NO: 27698 - protein, 9 aa, synthetic construct
  source 1..9: note = Seed: LVVVGARGV (KRAS G12R)
MVVMGRRGF

SEQ ID NO: 27699 - protein, 9 aa, synthetic construct
  source 1..9: note = Seed: LVVVGARGV (KRAS G12R)
MVVMGRRGG

SEQ ID NO: 27700 - protein, 9 aa, synthetic construct
  source 1..9: note = Seed: LVVVGARGV (KRAS G12R)
MVVMGRRGH

SEQ ID NO: 27701 - protein, 9 aa, synthetic construct
  source 1..9: note = Seed: LVVVGARGV (KRAS G12R)
MVVMGRRGI

SEQ ID NO: 27702 - protein, 9 aa, synthetic construct
  source 1..9: note = Seed: LVVVGARGV (KRAS G12R)
MVVMGRRGK

SEQ ID NO: 27703 - protein, 9 aa, synthetic construct
  source 1..9: note = Seed: LVVVGARGV (KRAS G12R)
MVVMGRRGL

SEQ ID NO: 27704 - protein, 9 aa, synthetic construct
  source 1..9: note = Seed: LVVVGARGV (KRAS G12R)
MVVMGRRGM

SEQ ID NO: 27705 - protein, 9 aa, synthetic construct
  source 1..9: note = Seed: LVVVGARGV (KRAS G12R)
MVVMGRRGN

SEQ ID NO: 27706 - protein, 9 aa, synthetic construct
  source 1..9: note = Seed: LVVVGARGV (KRAS G12R)
MVVMGRRGP

SEQ ID NO: 27707 - protein, 9 aa, synthetic construct
  source 1..9: note = Seed: LVVVGARGV (KRAS G12R)
MVVMGRRGQ

SEQ ID NO: 27708 - protein, 9 aa, synthetic construct
  source 1..9: note = Seed: LVVVGARGV (KRAS G12R)
MVVMGRRGR

SEQ ID NO: 27709 - protein, 9 aa, synthetic construct
  source 1..9: note = Seed: LVVVGARGV (KRAS G12R)
MVVMGRRGS

SEQ ID NO: 27710 - protein, 9 aa, synthetic construct
  source 1..9: note = Seed: LVVVGARGV (KRAS G12R)
MVVMGRRGT

SEQ ID NO: 27711 - protein, 9 aa, synthetic construct
  source 1..9: note = Seed: LVVVGARGV (KRAS G12R)
MVVMGRRGV

SEQ ID NO: 27712 - protein, 9 aa, synthetic construct
  source 1..9: note = Seed: LVVVGARGV (KRAS G12R)
MVVMGRRGW

SEQ ID NO: 27713 - protein, 9 aa, synthetic construct
  source 1..9: note = Seed: LVVVGARGV (KRAS G12R)
MVVMGRRGY

SEQ ID NO: 27714 - protein, 9 aa, synthetic construct
  source 1..9: note = Seed: LVVVGARGV (KRAS G12R)
MVVMGSRGA

SEQ ID NO: 27715 - protein, 9 aa, synthetic construct
  source 1..9: note = Seed: LVVVGARGV (KRAS G12R)
MVVMGSRGC

SEQ ID NO: 27716 - protein, 9 aa, synthetic construct
  source 1..9: note = Seed: LVVVGARGV (KRAS G12R)
MVVMGSRGF

SEQ ID NO: 27717 - protein, 9 aa, synthetic construct
  source 1..9: note = Seed: LVVVGARGV (KRAS G12R)
MVVMGSRGG

SEQ ID NO: 27718 - protein, 9 aa, synthetic construct
  source 1..9: note = Seed: LVVVGARGV (KRAS G12R)
MVVMGSRGH

SEQ ID NO: 27719 - protein, 9 aa, synthetic construct
  source 1..9: note = Seed: LVVVGARGV (KRAS G12R)
MVVMGSRGI

SEQ ID NO: 27720 - protein, 9 aa, synthetic construct
  source 1..9: note = Seed: LVVVGARGV (KRAS G12R)
MVVMGSRGK

SEQ ID NO: 27721 - protein, 9 aa, synthetic construct
  source 1..9: note = Seed: LVVVGARGV (KRAS G12R)
MVVMGSRGL

SEQ ID NO: 27722 - protein, 9 aa, synthetic construct
  source 1..9: note = Seed: LVVVGARGV (KRAS G12R)
MVVMGSRGM

SEQ ID NO: 27723 - protein, 9 aa, synthetic construct
  source 1..9: note = Seed: LVVVGARGV (KRAS G12R)
MVVMGSRGN

SEQ ID NO: 27724 - protein, 9 aa, synthetic construct
  source 1..9: note = Seed: LVVVGARGV (KRAS G12R)
MVVMGSRGQ

SEQ ID NO: 27725 - protein, 9 aa, synthetic construct
  source 1..9: note = Seed: LVVVGARGV (KRAS G12R)
MVVMGSRGR

SEQ ID NO: 27726 - protein, 9 aa, synthetic construct
  source 1..9: note = Seed: LVVVGARGV (KRAS G12R)
MVVMGSRGS

SEQ ID NO: 27727 - protein, 9 aa, synthetic construct
  source 1..9: note = Seed: LVVVGARGV (KRAS G12R)
MVVMGSRGT

SEQ ID NO: 27728 - protein, 9 aa, synthetic construct
  source 1..9: note = Seed: LVVVGARGV (KRAS G12R)
MVVMGSRGV

SEQ ID NO: 27729 - protein, 9 aa, synthetic construct
  source 1..9: note = Seed: LVVVGARGV (KRAS G12R)
MVVMGSRGW

SEQ ID NO: 27730 - protein, 9 aa, synthetic construct
  source 1..9: note = Seed: LVVVGARGV (KRAS G12R)
MVVMGSRGY

SEQ ID NO: 27731 - protein, 9 aa, synthetic construct
  source 1..9: note = Seed: LVVVGARGV (KRAS G12R)
MVVMGTRGA

SEQ ID NO: 27732 - protein, 9 aa, synthetic construct
  source 1..9: note = Seed: LVVVGARGV (KRAS G12R)
MVVMGTRGF

SEQ ID NO: 27733 - protein, 9 aa, synthetic construct
  source 1..9: note = Seed: LVVVGARGV (KRAS G12R)
MVVMGTRGG

SEQ ID NO: 27734 - protein, 9 aa, synthetic construct
  source 1..9: note = Seed: LVVVGARGV (KRAS G12R)
MVVMGTRGH

SEQ ID NO: 27735 - protein, 9 aa, synthetic construct
  source 1..9: note = Seed: LVVVGARGV (KRAS G12R)
MVVMGTRGI

SEQ ID NO: 27736 - protein, 9 aa, synthetic construct
  source 1..9: note = Seed: LVVVGARGV (KRAS G12R)
MVVMGTRGK

SEQ ID NO: 27737 - protein, 9 aa, synthetic construct
  source 1..9: note = Seed: LVVVGARGV (KRAS G12R)
MVVMGTRGL

SEQ ID NO: 27738 - protein, 9 aa, synthetic construct
  source 1..9: note = Seed: LVVVGARGV (KRAS G12R)
MVVMGTRGM

SEQ ID NO: 27739 - protein, 9 aa, synthetic construct
  source 1..9: note = Seed: LVVVGARGV (KRAS G12R)
MVVMGTRGN

SEQ ID NO: 27740 - protein, 9 aa, synthetic construct
  source 1..9: note = Seed: LVVVGARGV (KRAS G12R)
MVVMGTRGQ

SEQ ID NO: 27741 - protein, 9 aa, synthetic construct
  source 1..9: note = Seed: LVVVGARGV (KRAS G12R)
MVVMGTRGR

SEQ ID NO: 27742 - protein, 9 aa, synthetic construct
  source 1..9: note = Seed: LVVVGARGV (KRAS G12R)
MVVMGTRGS

SEQ ID NO: 27743 - protein, 9 aa, synthetic construct
  source 1..9: note = Seed: LVVVGARGV (KRAS G12R)
MVVMGTRGT

SEQ ID NO: 27744 - protein, 9 aa, synthetic construct
  source 1..9: note = Seed: LVVVGARGV (KRAS G12R)
MVVMGTRGV

SEQ ID NO: 27745 - protein, 9 aa, synthetic construct
  source 1..9: note = Seed: LVVVGARGV (KRAS G12R)
MVVMGTRGY

SEQ ID NO: 27746 - protein, 9 aa, synthetic construct
  source 1..9: note = Seed: LVVVGARGV (KRAS G12R)
MVVMGVRGA

SEQ ID NO: 27747 - protein, 9 aa, synthetic construct
  source 1..9: note = Seed: LVVVGARGV (KRAS G12R)
MVVMGVRGF

SEQ ID NO: 27748 - protein, 9 aa, synthetic construct
  source 1..9: note = Seed: LVVVGARGV (KRAS G12R)
MVVMGVRGG

SEQ ID NO: 27749 - protein, 9 aa, synthetic construct
  source 1..9: note = Seed: LVVVGARGV (KRAS G12R)
MVVMGVRGH

SEQ ID NO: 27750 - protein, 9 aa, synthetic construct
  source 1..9: note = Seed: LVVVGARGV (KRAS G12R)
MVVMGVRGI

SEQ ID NO: 27751 - protein, 9 aa, synthetic construct
  source 1..9: note = Seed: LVVVGARGV (KRAS G12R)
MVVMGVRGK

SEQ ID NO: 27752 - protein, 9 aa, synthetic construct
  source 1..9: note = Seed: LVVVGARGV (KRAS G12R)
MVVMGVRGL

SEQ ID NO: 27753 - protein, 9 aa, synthetic construct
  source 1..9: note = Seed: LVVVGARGV (KRAS G12R)
MVVMGVRGM

SEQ ID NO: 27754 - protein, 9 aa, synthetic construct
  source 1..9: note = Seed: LVVVGARGV (KRAS G12R)
MVVMGVRGN

SEQ ID NO: 27755 - protein, 9 aa, synthetic construct
  source 1..9: note = Seed: LVVVGARGV (KRAS G12R)
MVVMGVRGQ

SEQ ID NO: 27756 - protein, 9 aa, synthetic construct
  source 1..9: note = Seed: LVVVGARGV (KRAS G12R)
MVVMGVRGR

SEQ ID NO: 27757 - protein, 9 aa, synthetic construct
  source 1..9: note = Seed: LVVVGARGV (KRAS G12R)
MVVMGVRGS

SEQ ID NO: 27758 - protein, 9 aa, synthetic construct
  source 1..9: note = Seed: LVVVGARGV (KRAS G12R)
MVVMGVRGT

SEQ ID NO: 27759 - protein, 9 aa, synthetic construct
  source 1..9: note = Seed: LVVVGARGV (KRAS G12R)
MVVMGVRGV

SEQ ID NO: 27760 - protein, 9 aa, synthetic construct
  source 1..9: note = Seed: LVVVGARGV (KRAS G12R)
MVVMGVRGY

SEQ ID NO: 27761 - protein, 9 aa, synthetic construct
  source 1..9: note = Seed: LVVVGARGV (KRAS G12R)
MVVMGWRGL

SEQ ID NO: 27762 - protein, 9 aa, synthetic construct
  source 1..9: note = Seed: LVVVGARGV (KRAS G12R)
MVVMGWRGR

SEQ ID NO: 27763 - protein, 9 aa, synthetic construct
  source 1..9: note = Seed: LVVVGARGV (KRAS G12R)
MVVMGWRGV

SEQ ID NO: 27764 - protein, 9 aa, synthetic construct
  source 1..9: note = Seed: LVVVGARGV (KRAS G12R)
MVVMGYRGL

SEQ ID NO: 27765 - protein, 9 aa, synthetic construct
  source 1..9: note = Seed: LVVVGARGV (KRAS G12R)
MVVMGYRGR

SEQ ID NO: 27766 - protein, 9 aa, synthetic construct
  source 1..9: note = Seed: LVVVGARGV (KRAS G12R)
MVVMGYRGV

SEQ ID NO: 27767 - protein, 9 aa, synthetic construct
  source 1..9: note = Seed: LVVVGARGV (KRAS G12R)
MVVNGARGA

SEQ ID NO: 27768 - protein, 9 aa, synthetic construct
  source 1..9: note = Seed: LVVVGARGV (KRAS G12R)
MVVNGARGF

SEQ ID NO: 27769 - protein, 9 aa, synthetic construct
  source 1..9: note = Seed: LVVVGARGV (KRAS G12R)
MVVNGARGI

SEQ ID NO: 27770 - protein, 9 aa, synthetic construct
  source 1..9: note = Seed: LVVVGARGV (KRAS G12R)
MVVNGARGL

SEQ ID NO: 27771 - protein, 9 aa, synthetic construct
  source 1..9: note = Seed: LVVVGARGV (KRAS G12R)
MVVNGARGM

SEQ ID NO: 27772 - protein, 9 aa, synthetic construct
  source 1..9: note = Seed: LVVVGARGV (KRAS G12R)
MVVNGARGV

SEQ ID NO: 27773 - protein, 9 aa, synthetic construct
  source 1..9: note = Seed: LVVVGARGV (KRAS G12R)
MVVNGARGW

SEQ ID NO: 27774 - protein, 9 aa, synthetic construct
  source 1..9: note = Seed: LVVVGARGV (KRAS G12R)
MVVNGARGY

SEQ ID NO: 27775 - protein, 9 aa, synthetic construct
  source 1..9: note = Seed: LVVVGARGV (KRAS G12R)
MVVNGFRGI

SEQ ID NO: 27776 - protein, 9 aa, synthetic construct
  source 1..9: note = Seed: LVVVGARGV (KRAS G12R)
MVVNGGRGF

SEQ ID NO: 27777 - protein, 9 aa, synthetic construct
  source 1..9: note = Seed: LVVVGARGV (KRAS G12R)
MVVNGGRGI

SEQ ID NO: 27778 - protein, 9 aa, synthetic construct
  source 1..9: note = Seed: LVVVGARGV (KRAS G12R)
MVVNGGRGL

SEQ ID NO: 27779 - protein, 9 aa, synthetic construct
  source 1..9: note = Seed: LVVVGARGV (KRAS G12R)
MVVNGGRGM

SEQ ID NO: 27780 - protein, 9 aa, synthetic construct
  source 1..9: note = Seed: LVVVGARGV (KRAS G12R)
MVVNGGRGV

SEQ ID NO: 27781 - protein, 9 aa, synthetic construct
  source 1..9: note = Seed: LVVVGARGV (KRAS G12R)
MVVNGGRGY

SEQ ID NO: 27782 - protein, 9 aa, synthetic construct
  source 1..9: note = Seed: LVVVGARGV (KRAS G12R)
MVVNGHRGI

SEQ ID NO: 27783 - protein, 9 aa, synthetic construct
  source 1..9: note = Seed: LVVVGARGV (KRAS G12R)
MVVNGIRGA

SEQ ID NO: 27784 - protein, 9 aa, synthetic construct
  source 1..9: note = Seed: LVVVGARGV (KRAS G12R)
MVVNGIRGF

SEQ ID NO: 27785 - protein, 9 aa, synthetic construct
  source 1..9: note = Seed: LVVVGARGV (KRAS G12R)
MVVNGIRGI

SEQ ID NO: 27786 - protein, 9 aa, synthetic construct
  source 1..9: note = Seed: LVVVGARGV (KRAS G12R)
MVVNGIRGL

SEQ ID NO: 27787 - protein, 9 aa, synthetic construct
  source 1..9: note = Seed: LVVVGARGV (KRAS G12R)
MVVNGIRGM

SEQ ID NO: 27788 - protein, 9 aa, synthetic construct
  source 1..9: note = Seed: LVVVGARGV (KRAS G12R)
MVVNGIRGR

SEQ ID NO: 27789 - protein, 9 aa, synthetic construct
  source 1..9: note = Seed: LVVVGARGV (KRAS G12R)
MVVNGIRGV

SEQ ID NO: 27790 - protein, 9 aa, synthetic construct
  source 1..9: note = Seed: LVVVGARGV (KRAS G12R)
MVVNGIRGY

SEQ ID NO: 27791 - protein, 9 aa, synthetic construct
  source 1..9: note = Seed: LVVVGARGV (KRAS G12R)
MVVNGKRGL

SEQ ID NO: 27792 - protein, 9 aa, synthetic construct
  source 1..9: note = Seed: LVVVGARGV (KRAS G12R)
MVVNGKRGM

SEQ ID NO: 27793 - protein, 9 aa, synthetic construct
  source 1..9: note = Seed: LVVVGARGV (KRAS G12R)
MVVNGKRGR

SEQ ID NO: 27794 - protein, 9 aa, synthetic construct
  source 1..9: note = Seed: LVVVGARGV (KRAS G12R)
MVVNGLRGF

SEQ ID NO: 27795 - protein, 9 aa, synthetic construct
  source 1..9: note = Seed: LVVVGARGV (KRAS G12R)
MVVNGLRGI

SEQ ID NO: 27796 - protein, 9 aa, synthetic construct
  source 1..9: note = Seed: LVVVGARGV (KRAS G12R)
MVVNGLRGL

SEQ ID NO: 27797 - protein, 9 aa, synthetic construct
  source 1..9: note = Seed: LVVVGARGV (KRAS G12R)
MVVNGLRGM

SEQ ID NO: 27798 - protein, 9 aa, synthetic construct
  source 1..9: note = Seed: LVVVGARGV (KRAS G12R)
MVVNGLRGR

SEQ ID NO: 27799 - protein, 9 aa, synthetic construct
  source 1..9: note = Seed: LVVVGARGV (KRAS G12R)
MVVNGLRGV

SEQ ID NO: 27800 - protein, 9 aa, synthetic construct
  source 1..9: note = Seed: LVVVGARGV (KRAS G12R)
MVVNGLRGY

SEQ ID NO: 27801 - protein, 9 aa, synthetic construct
  source 1..9: note = Seed: LVVVGARGV (KRAS G12R)
MVVNGMRGF

SEQ ID NO: 27802 - protein, 9 aa, synthetic construct
  source 1..9: note = Seed: LVVVGARGV (KRAS G12R)
MVVNGMRGI

SEQ ID NO: 27803 - protein, 9 aa, synthetic construct
  source 1..9: note = Seed: LVVVGARGV (KRAS G12R)
MVVNGMRGL

SEQ ID NO: 27804 - protein, 9 aa, synthetic construct
  source 1..9: note = Seed: LVVVGARGV (KRAS G12R)
MVVNGMRGR

SEQ ID NO: 27805 - protein, 9 aa, synthetic construct
  source 1..9: note = Seed: LVVVGARGV (KRAS G12R)
MVVNGMRGV

SEQ ID NO: 27806 - protein, 9 aa, synthetic construct
  source 1..9: note = Seed: LVVVGARGV (KRAS G12R)
MVVNGNRGA

SEQ ID NO: 27807 - protein, 9 aa, synthetic construct
  source 1..9: note = Seed: LVVVGARGV (KRAS G12R)
MVVNGNRGF

SEQ ID NO: 27808 - protein, 9 aa, synthetic construct
  source 1..9: note = Seed: LVVVGARGV (KRAS G12R)
MVVNGNRGI

SEQ ID NO: 27809 - protein, 9 aa, synthetic construct
  source 1..9: note = Seed: LVVVGARGV (KRAS G12R)
MVVNGNRGL

SEQ ID NO: 27810 - protein, 9 aa, synthetic construct
  source 1..9: note = Seed: LVVVGARGV (KRAS G12R)
MVVNGNRGM

SEQ ID NO: 27811 - protein, 9 aa, synthetic construct
  source 1..9: note = Seed: LVVVGARGV (KRAS G12R)
MVVNGNRGV

SEQ ID NO: 27812 - protein, 9 aa, synthetic construct
  source 1..9: note = Seed: LVVVGARGV (KRAS G12R)
MVVNGNRGW

SEQ ID NO: 27813 - protein, 9 aa, synthetic construct
  source 1..9: note = Seed: LVVVGARGV (KRAS G12R)
MVVNGNRGY

SEQ ID NO: 27814 - protein, 9 aa, synthetic construct
  source 1..9: note = Seed: LVVVGARGV (KRAS G12R)
MVVNGPRGF

SEQ ID NO: 27815 - protein, 9 aa, synthetic construct
  source 1..9: note = Seed: LVVVGARGV (KRAS G12R)
MVVNGPRGI

SEQ ID NO: 27816 - protein, 9 aa, synthetic construct
  source 1..9: note = Seed: LVVVGARGV (KRAS G12R)
MVVNGPRGL

SEQ ID NO: 27817 - protein, 9 aa, synthetic construct
  source 1..9: note = Seed: LVVVGARGV (KRAS G12R)
MVVNGPRGM

SEQ ID NO: 27818 - protein, 9 aa, synthetic construct
  source 1..9: note = Seed: LVVVGARGV (KRAS G12R)
MVVNGPRGV

SEQ ID NO: 27819 - protein, 9 aa, synthetic construct
  source 1..9: note = Seed: LVVVGARGV (KRAS G12R)
MVVNGPRGY

SEQ ID NO: 27820 - protein, 9 aa, synthetic construct
  source 1..9: note = Seed: LVVVGARGV (KRAS G12R)
MVVNGRRGA

SEQ ID NO: 27821 - protein, 9 aa, synthetic construct
  source 1..9: note = Seed: LVVVGARGV (KRAS G12R)
MVVNGRRGF

SEQ ID NO: 27822 - protein, 9 aa, synthetic construct
  source 1..9: note = Seed: LVVVGARGV (KRAS G12R)
MVVNGRRGI

SEQ ID NO: 27823 - protein, 9 aa, synthetic construct
  source 1..9: note = Seed: LVVVGARGV (KRAS G12R)
MVVNGRRGK

SEQ ID NO: 27824 - protein, 9 aa, synthetic construct
  source 1..9: note = Seed: LVVVGARGV (KRAS G12R)
MVVNGRRGL

SEQ ID NO: 27825 - protein, 9 aa, synthetic construct
  source 1..9: note = Seed: LVVVGARGV (KRAS G12R)
MVVNGRRGM

SEQ ID NO: 27826 - protein, 9 aa, synthetic construct
  source 1..9: note = Seed: LVVVGARGV (KRAS G12R)
MVVNGRRGR

SEQ ID NO: 27827 - protein, 9 aa, synthetic construct
  source 1..9: note = Seed: LVVVGARGV (KRAS G12R)
MVVNGRRGS

SEQ ID NO: 27828 - protein, 9 aa, synthetic construct
  source 1..9: note = Seed: LVVVGARGV (KRAS G12R)
MVVNGRRGV

SEQ ID NO: 27829 - protein, 9 aa, synthetic construct
  source 1..9: note = Seed: LVVVGARGV (KRAS G12R)
MVVNGRRGY

SEQ ID NO: 27830 - protein, 9 aa, synthetic construct
  source 1..9: note = Seed: LVVVGARGV (KRAS G12R)
MVVNGSRGA

SEQ ID NO: 27831 - protein, 9 aa, synthetic construct
  source 1..9: note = Seed: LVVVGARGV (KRAS G12R)
MVVNGSRGF

SEQ ID NO: 27832 - protein, 9 aa, synthetic construct
  source 1..9: note = Seed: LVVVGARGV (KRAS G12R)
MVVNGSRGI

SEQ ID NO: 27833 - protein, 9 aa, synthetic construct
  source 1..9: note = Seed: LVVVGARGV (KRAS G12R)
MVVNGSRGL

SEQ ID NO: 27834 - protein, 9 aa, synthetic construct
  source 1..9: note = Seed: LVVVGARGV (KRAS G12R)
MVVNGSRGM

SEQ ID NO: 27835 - protein, 9 aa, synthetic construct
  source 1..9: note = Seed: LVVVGARGV (KRAS G12R)
MVVNGSRGV

SEQ ID NO: 27836 - protein, 9 aa, synthetic construct
  source 1..9: note = Seed: LVVVGARGV (KRAS G12R)
MVVNGSRGY

SEQ ID NO: 27837 - protein, 9 aa, synthetic construct
  source 1..9: note = Seed: LVVVGARGV (KRAS G12R)
MVVNGTRGF

SEQ ID NO: 27838 - protein, 9 aa, synthetic construct
  source 1..9: note = Seed: LVVVGARGV (KRAS G12R)
MVVNGTRGI

SEQ ID NO: 27839 - protein, 9 aa, synthetic construct
  source 1..9: note = Seed: LVVVGARGV (KRAS G12R)
MVVNGTRGL

SEQ ID NO: 27840 - protein, 9 aa, synthetic construct
  source 1..9: note = Seed: LVVVGARGV (KRAS G12R)
MVVNGTRGM

SEQ ID NO: 27841 - protein, 9 aa, synthetic construct
  source 1..9: note = Seed: LVVVGARGV (KRAS G12R)
MVVNGTRGV

SEQ ID NO: 27842 - protein, 9 aa, synthetic construct
  source 1..9: note = Seed: LVVVGARGV (KRAS G12R)
MVVNGTRGY

SEQ ID NO: 27843 - protein, 9 aa, synthetic construct
  source 1..9: note = Seed: LVVVGARGV (KRAS G12R)
MVVNGVRGF

SEQ ID NO: 27844 - protein, 9 aa, synthetic construct
  source 1..9: note = Seed: LVVVGARGV (KRAS G12R)
MVVNGVRGI

SEQ ID NO: 27845 - protein, 9 aa, synthetic construct
  source 1..9: note = Seed: LVVVGARGV (KRAS G12R)
MVVNGVRGL

SEQ ID NO: 27846 - protein, 9 aa, synthetic construct
  source 1..9: note = Seed: LVVVGARGV (KRAS G12R)
MVVNGVRGM

SEQ ID NO: 27847 - protein, 9 aa, synthetic construct
  source 1..9: note = Seed: LVVVGARGV (KRAS G12R)
MVVNGVRGR

SEQ ID NO: 27848 - protein, 9 aa, synthetic construct
  source 1..9: note = Seed: LVVVGARGV (KRAS G12R)
MVVNGVRGV

SEQ ID NO: 27849 - protein, 9 aa, synthetic construct
  source 1..9: note = Seed: LVVVGARGV (KRAS G12R)
MVVNGVRGY

SEQ ID NO: 27850 - protein, 9 aa, synthetic construct
  source 1..9: note = Seed: LVVVGARGV (KRAS G12R)
MVVQGARGA

SEQ ID NO: 27851 - protein, 9 aa, synthetic construct
  source 1..9: note = Seed: LVVVGARGV (KRAS G12R)
MVVQGARGF

SEQ ID NO: 27852 - protein, 9 aa, synthetic construct
  source 1..9: note = Seed: LVVVGARGV (KRAS G12R)
MVVQGARGI

SEQ ID NO: 27853 - protein, 9 aa, synthetic construct
  source 1..9: note = Seed: LVVVGARGV (KRAS G12R)
MVVQGARGL

SEQ ID NO: 27854 - protein, 9 aa, synthetic construct
  source 1..9: note = Seed: LVVVGARGV (KRAS G12R)
MVVQGARGM

SEQ ID NO: 27855 - protein, 9 aa, synthetic construct
  source 1..9: note = Seed: LVVVGARGV (KRAS G12R)
MVVQGARGR

SEQ ID NO: 27856 - protein, 9 aa, synthetic construct
  source 1..9: note = Seed: LVVVGARGV (KRAS G12R)
MVVQGARGS

SEQ ID NO: 27857 - protein, 9 aa, synthetic construct
  source 1..9: note = Seed: LVVVGARGV (KRAS G12R)
MVVQGARGT

SEQ ID NO: 27858 - protein, 9 aa, synthetic construct
  source 1..9: note = Seed: LVVVGARGV (KRAS G12R)
MVVQGARGV

SEQ ID NO: 27859 - protein, 9 aa, synthetic construct
  source 1..9: note = Seed: LVVVGARGV (KRAS G12R)
MVVQGARGY

SEQ ID NO: 27860 - protein, 9 aa, synthetic construct
  source 1..9: note = Seed: LVVVGARGV (KRAS G12R)
MVVQGGRGA

SEQ ID NO: 27861 - protein, 9 aa, synthetic construct
  source 1..9: note = Seed: LVVVGARGV (KRAS G12R)
MVVQGGRGI

SEQ ID NO: 27862 - protein, 9 aa, synthetic construct
  source 1..9: note = Seed: LVVVGARGV (KRAS G12R)
MVVQGGRGL

SEQ ID NO: 27863 - protein, 9 aa, synthetic construct
  source 1..9: note = Seed: LVVVGARGV (KRAS G12R)
MVVQGGRGM

SEQ ID NO: 27864 - protein, 9 aa, synthetic construct
  source 1..9: note = Seed: LVVVGARGV (KRAS G12R)
MVVQGGRGV

SEQ ID NO: 27865 - protein, 9 aa, synthetic construct
  source 1..9: note = Seed: LVVVGARGV (KRAS G12R)
MVVQGHRGF

SEQ ID NO: 27866 - protein, 9 aa, synthetic construct
  source 1..9: note = Seed: LVVVGARGV (KRAS G12R)
MVVQGHRGI

SEQ ID NO: 27867 - protein, 9 aa, synthetic construct
  source 1..9: note = Seed: LVVVGARGV (KRAS G12R)
MVVQGHRGL

SEQ ID NO: 27868 - protein, 9 aa, synthetic construct
  source 1..9: note = Seed: LVVVGARGV (KRAS G12R)
MVVQGHRGM

SEQ ID NO: 27869 - protein, 9 aa, synthetic construct
  source 1..9: note = Seed: LVVVGARGV (KRAS G12R)
MVVQGHRGR

SEQ ID NO: 27870 - protein, 9 aa, synthetic construct
  source 1..9: note = Seed: LVVVGARGV (KRAS G12R)
MVVQGIRGF

SEQ ID NO: 27871 - protein, 9 aa, synthetic construct
  source 1..9: note = Seed: LVVVGARGV (KRAS G12R)
MVVQGIRGI

SEQ ID NO: 27872 - protein, 9 aa, synthetic construct
  source 1..9: note = Seed: LVVVGARGV (KRAS G12R)
MVVQGIRGL

SEQ ID NO: 27873 - protein, 9 aa, synthetic construct
  source 1..9: note = Seed: LVVVGARGV (KRAS G12R)
MVVQGIRGR

SEQ ID NO: 27874 - protein, 9 aa, synthetic construct
  source 1..9: note = Seed: LVVVGARGV (KRAS G12R)
MVVQGIRGY

SEQ ID NO: 27875 - protein, 9 aa, synthetic construct
  source 1..9: note = Seed: LVVVGARGV (KRAS G12R)
MVVQGKRGA

SEQ ID NO: 27876 - protein, 9 aa, synthetic construct
  source 1..9: note = Seed: LVVVGARGV (KRAS G12R)
MVVQGKRGF

SEQ ID NO: 27877 - protein, 9 aa, synthetic construct
  source 1..9: note = Seed: LVVVGARGV (KRAS G12R)
MVVQGKRGH

SEQ ID NO: 27878 - protein, 9 aa, synthetic construct
  source 1..9: note = Seed: LVVVGARGV (KRAS G12R)
MVVQGKRGI

SEQ ID NO: 27879 - protein, 9 aa, synthetic construct
  source 1..9: note = Seed: LVVVGARGV (KRAS G12R)
MVVQGKRGK

SEQ ID NO: 27880 - protein, 9 aa, synthetic construct
  source 1..9: note = Seed: LVVVGARGV (KRAS G12R)
MVVQGKRGL

SEQ ID NO: 27881 - protein, 9 aa, synthetic construct
  source 1..9: note = Seed: LVVVGARGV (KRAS G12R)
MVVQGKRGM

SEQ ID NO: 27882 - protein, 9 aa, synthetic construct
  source 1..9: note = Seed: LVVVGARGV (KRAS G12R)
MVVQGKRGQ

SEQ ID NO: 27883 - protein, 9 aa, synthetic construct
  source 1..9: note = Seed: LVVVGARGV (KRAS G12R)
MVVQGKRGR

SEQ ID NO: 27884 - protein, 9 aa, synthetic construct
  source 1..9: note = Seed: LVVVGARGV (KRAS G12R)
MVVQGKRGS

SEQ ID NO: 27885 - protein, 9 aa, synthetic construct
  source 1..9: note = Seed: LVVVGARGV (KRAS G12R)
MVVQGKRGT

SEQ ID NO: 27886 - protein, 9 aa, synthetic construct
  source 1..9: note = Seed: LVVVGARGV (KRAS G12R)
MVVQGKRGV

SEQ ID NO: 27887 - protein, 9 aa, synthetic construct
  source 1..9: note = Seed: LVVVGARGV (KRAS G12R)
MVVQGKRGW

SEQ ID NO: 27888 - protein, 9 aa, synthetic construct
  source 1..9: note = Seed: LVVVGARGV (KRAS G12R)
MVVQGKRGY

SEQ ID NO: 27889 - protein, 9 aa, synthetic construct
  source 1..9: note = Seed: LVVVGARGV (KRAS G12R)
MVVQGLRGR

SEQ ID NO: 27890 - protein, 9 aa, synthetic construct
  source 1..9: note = Seed: LVVVGARGV (KRAS G12R)
MVVQGMRGL

SEQ ID NO: 27891 - protein, 9 aa, synthetic construct
  source 1..9: note = Seed: LVVVGARGV (KRAS G12R)
MVVQGMRGR

SEQ ID NO: 27892 - protein, 9 aa, synthetic construct
  source 1..9: note = Seed: LVVVGARGV (KRAS G12R)
MVVQGNRGF

SEQ ID NO: 27893 - protein, 9 aa, synthetic construct
  source 1..9: note = Seed: LVVVGARGV (KRAS G12R)
MVVQGNRGI

SEQ ID NO: 27894 - protein, 9 aa, synthetic construct
  source 1..9: note = Seed: LVVVGARGV (KRAS G12R)
MVVQGNRGL

SEQ ID NO: 27895 - protein, 9 aa, synthetic construct
  source 1..9: note = Seed: LVVVGARGV (KRAS G12R)
MVVQGNRGV

SEQ ID NO: 27896 - protein, 9 aa, synthetic construct
  source 1..9: note = Seed: LVVVGARGV (KRAS G12R)
MVVQGNRGY

SEQ ID NO: 27897 - protein, 9 aa, synthetic construct
  source 1..9: note = Seed: LVVVGARGV (KRAS G12R)
MVVQGPRGI

SEQ ID NO: 27898 - protein, 9 aa, synthetic construct
  source 1..9: note = Seed: LVVVGARGV (KRAS G12R)
MVVQGPRGL

SEQ ID NO: 27899 - protein, 9 aa, synthetic construct
  source 1..9: note = Seed: LVVVGARGV (KRAS G12R)
MVVQGPRGV

SEQ ID NO: 27900 - protein, 9 aa, synthetic construct
  source 1..9: note = Seed: LVVVGARGV (KRAS G12R)
MVVQGRRGA

SEQ ID NO: 27901 - protein, 9 aa, synthetic construct
  source 1..9: note = Seed: LVVVGARGV (KRAS G12R)
MVVQGRRGF

SEQ ID NO: 27902 - protein, 9 aa, synthetic construct
  source 1..9: note = Seed: LVVVGARGV (KRAS G12R)
MVVQGRRGG

SEQ ID NO: 27903 - protein, 9 aa, synthetic construct
  source 1..9: note = Seed: LVVVGARGV (KRAS G12R)
MVVQGRRGH

SEQ ID NO: 27904 - protein, 9 aa, synthetic construct
  source 1..9: note = Seed: LVVVGARGV (KRAS G12R)
MVVQGRRGI

SEQ ID NO: 27905 - protein, 9 aa, synthetic construct
  source 1..9: note = Seed: LVVVGARGV (KRAS G12R)
MVVQGRRGK

SEQ ID NO: 27906 - protein, 9 aa, synthetic construct
  source 1..9: note = Seed: LVVVGARGV (KRAS G12R)
MVVQGRRGL

SEQ ID NO: 27907 - protein, 9 aa, synthetic construct
  source 1..9: note = Seed: LVVVGARGV (KRAS G12R)
MVVQGRRGM

SEQ ID NO: 27908 - protein, 9 aa, synthetic construct
  source 1..9: note = Seed: LVVVGARGV (KRAS G12R)
MVVQGRRGN

SEQ ID NO: 27909 - protein, 9 aa, synthetic construct
  source 1..9: note = Seed: LVVVGARGV (KRAS G12R)
MVVQGRRGP

SEQ ID NO: 27910 - protein, 9 aa, synthetic construct
  source 1..9: note = Seed: LVVVGARGV (KRAS G12R)
MVVQGRRGQ

SEQ ID NO: 27911 - protein, 9 aa, synthetic construct
  source 1..9: note = Seed: LVVVGARGV (KRAS G12R)
MVVQGRRGR

SEQ ID NO: 27912 - protein, 9 aa, synthetic construct
  source 1..9: note = Seed: LVVVGARGV (KRAS G12R)
MVVQGRRGS

SEQ ID NO: 27913 - protein, 9 aa, synthetic construct
  source 1..9: note = Seed: LVVVGARGV (KRAS G12R)
MVVQGRRGT

SEQ ID NO: 27914 - protein, 9 aa, synthetic construct
  source 1..9: note = Seed: LVVVGARGV (KRAS G12R)
MVVQGRRGV

SEQ ID NO: 27915 - protein, 9 aa, synthetic construct
  source 1..9: note = Seed: LVVVGARGV (KRAS G12R)
MVVQGRRGW

SEQ ID NO: 27916 - protein, 9 aa, synthetic construct
  source 1..9: note = Seed: LVVVGARGV (KRAS G12R)
MVVQGRRGY

SEQ ID NO: 27917 - protein, 9 aa, synthetic construct
  source 1..9: note = Seed: LVVVGARGV (KRAS G12R)
MVVQGSRGA

SEQ ID NO: 27918 - protein, 9 aa, synthetic construct
  source 1..9: note = Seed: LVVVGARGV (KRAS G12R)
MVVQGSRGF

SEQ ID NO: 27919 - protein, 9 aa, synthetic construct
  source 1..9: note = Seed: LVVVGARGV (KRAS G12R)
MVVQGSRGI

SEQ ID NO: 27920 - protein, 9 aa, synthetic construct
  source 1..9: note = Seed: LVVVGARGV (KRAS G12R)
MVVQGSRGL

SEQ ID NO: 27921 - protein, 9 aa, synthetic construct
  source 1..9: note = Seed: LVVVGARGV (KRAS G12R)
MVVQGSRGM

SEQ ID NO: 27922 - protein, 9 aa, synthetic construct
  source 1..9: note = Seed: LVVVGARGV (KRAS G12R)
MVVQGSRGR

SEQ ID NO: 27923 - protein, 9 aa, synthetic construct
  source 1..9: note = Seed: LVVVGARGV (KRAS G12R)
MVVQGSRGV

SEQ ID NO: 27924 - protein, 9 aa, synthetic construct
  source 1..9: note = Seed: LVVVGARGV (KRAS G12R)
MVVQGSRGY

SEQ ID NO: 27925 - protein, 9 aa, synthetic construct
  source 1..9: note = Seed: LVVVGARGV (KRAS G12R)
MVVQGTRGI

SEQ ID NO: 27926 - protein, 9 aa, synthetic construct
  source 1..9: note = Seed: LVVVGARGV (KRAS G12R)
MVVQGTRGL

SEQ ID NO: 27927 - protein, 9 aa, synthetic construct
  source 1..9: note = Seed: LVVVGARGV (KRAS G12R)
MVVQGTRGR

SEQ ID NO: 27928 - protein, 9 aa, synthetic construct
  source 1..9: note = Seed: LVVVGARGV (KRAS G12R)
MVVQGTRGV

SEQ ID NO: 27929 - protein, 9 aa, synthetic construct
  source 1..9: note = Seed: LVVVGARGV (KRAS G12R)
MVVQGVRGF

SEQ ID NO: 27930 - protein, 9 aa, synthetic construct
  source 1..9: note = Seed: LVVVGARGV (KRAS G12R)
MVVQGVRGL

SEQ ID NO: 27931 - protein, 9 aa, synthetic construct
  source 1..9: note = Seed: LVVVGARGV (KRAS G12R)
MVVQGVRGR

SEQ ID NO: 27932 - protein, 9 aa, synthetic construct
  source 1..9: note = Seed: LVVVGARGV (KRAS G12R)
MVVQGVRGV

SEQ ID NO: 27933 - protein, 9 aa, synthetic construct
  source 1..9: note = Seed: LVVVGARGV (KRAS G12R)
MVVRGARGA

SEQ ID NO: 27934 - protein, 9 aa, synthetic construct
  source 1..9: note = Seed: LVVVGARGV (KRAS G12R)
MVVRGARGF

SEQ ID NO: 27935 - protein, 9 aa, synthetic construct
  source 1..9: note = Seed: LVVVGARGV (KRAS G12R)
MVVRGARGI

SEQ ID NO: 27936 - protein, 9 aa, synthetic construct
  source 1..9: note = Seed: LVVVGARGV (KRAS G12R)
MVVRGARGL

SEQ ID NO: 27937 - protein, 9 aa, synthetic construct
  source 1..9: note = Seed: LVVVGARGV (KRAS G12R)
MVVRGARGM

SEQ ID NO: 27938 - protein, 9 aa, synthetic construct
  source 1..9: note = Seed: LVVVGARGV (KRAS G12R)
MVVRGARGQ

SEQ ID NO: 27939 - protein, 9 aa, synthetic construct
  source 1..9: note = Seed: LVVVGARGV (KRAS G12R)
MVVRGARGR

SEQ ID NO: 27940 - protein, 9 aa, synthetic construct
  source 1..9: note = Seed: LVVVGARGV (KRAS G12R)
MVVRGARGV

SEQ ID NO: 27941 - protein, 9 aa, synthetic construct
  source 1..9: note = Seed: LVVVGARGV (KRAS G12R)
MVVRGARGW

SEQ ID NO: 27942 - protein, 9 aa, synthetic construct
  source 1..9: note = Seed: LVVVGARGV (KRAS G12R)
MVVRGARGY

SEQ ID NO: 27943 - protein, 9 aa, synthetic construct
  source 1..9: note = Seed: LVVVGARGV (KRAS G12R)
MVVRGCRGR

SEQ ID NO: 27944 - protein, 9 aa, synthetic construct
  source 1..9: note = Seed: LVVVGARGV (KRAS G12R)
MVVRGGRGR

SEQ ID NO: 27945 - protein, 9 aa, synthetic construct
  source 1..9: note = Seed: LVVVGARGV (KRAS G12R)
MVVRGHRGA

SEQ ID NO: 27946 - protein, 9 aa, synthetic construct
  source 1..9: note = Seed: LVVVGARGV (KRAS G12R)
MVVRGHRGF

SEQ ID NO: 27947 - protein, 9 aa, synthetic construct
  source 1..9: note = Seed: LVVVGARGV (KRAS G12R)
MVVRGHRGG

SEQ ID NO: 27948 - protein, 9 aa, synthetic construct
  source 1..9: note = Seed: LVVVGARGV (KRAS G12R)
MVVRGHRGI

SEQ ID NO: 27949 - protein, 9 aa, synthetic construct
  source 1..9: note = Seed: LVVVGARGV (KRAS G12R)
MVVRGHRGL

SEQ ID NO: 27950 - protein, 9 aa, synthetic construct
  source 1..9: note = Seed: LVVVGARGV (KRAS G12R)
MVVRGHRGM

SEQ ID NO: 27951 - protein, 9 aa, synthetic construct
  source 1..9: note = Seed: LVVVGARGV (KRAS G12R)
MVVRGHRGQ

SEQ ID NO: 27952 - protein, 9 aa, synthetic construct
  source 1..9: note = Seed: LVVVGARGV (KRAS G12R)
MVVRGHRGR

SEQ ID NO: 27953 - protein, 9 aa, synthetic construct
  source 1..9: note = Seed: LVVVGARGV (KRAS G12R)
MVVRGHRGS

SEQ ID NO: 27954 - protein, 9 aa, synthetic construct
  source 1..9: note = Seed: LVVVGARGV (KRAS G12R)
MVVRGHRGV

SEQ ID NO: 27955 - protein, 9 aa, synthetic construct
  source 1..9: note = Seed: LVVVGARGV (KRAS G12R)
MVVRGHRGY

SEQ ID NO: 27956 - protein, 9 aa, synthetic construct
  source 1..9: note = Seed: LVVVGARGV (KRAS G12R)
MVVRGIRGA

SEQ ID NO: 27957 - protein, 9 aa, synthetic construct
  source 1..9: note = Seed: LVVVGARGV (KRAS G12R)
MVVRGIRGC

SEQ ID NO: 27958 - protein, 9 aa, synthetic construct
  source 1..9: note = Seed: LVVVGARGV (KRAS G12R)
MVVRGIRGF

SEQ ID NO: 27959 - protein, 9 aa, synthetic construct
  source 1..9: note = Seed: LVVVGARGV (KRAS G12R)
MVVRGIRGG

SEQ ID NO: 27960 - protein, 9 aa, synthetic construct
  source 1..9: note = Seed: LVVVGARGV (KRAS G12R)
MVVRGIRGI

SEQ ID NO: 27961 - protein, 9 aa, synthetic construct
  source 1..9: note = Seed: LVVVGARGV (KRAS G12R)
MVVRGIRGK

SEQ ID NO: 27962 - protein, 9 aa, synthetic construct
  source 1..9: note = Seed: LVVVGARGV (KRAS G12R)
MVVRGIRGL

SEQ ID NO: 27963 - protein, 9 aa, synthetic construct
  source 1..9: note = Seed: LVVVGARGV (KRAS G12R)
MVVRGIRGM

SEQ ID NO: 27964 - protein, 9 aa, synthetic construct
  source 1..9: note = Seed: LVVVGARGV (KRAS G12R)
MVVRGIRGR

SEQ ID NO: 27965 - protein, 9 aa, synthetic construct
  source 1..9: note = Seed: LVVVGARGV (KRAS G12R)
MVVRGIRGV

SEQ ID NO: 27966 - protein, 9 aa, synthetic construct
  source 1..9: note = Seed: LVVVGARGV (KRAS G12R)
MVVRGIRGY

SEQ ID NO: 27967 - protein, 9 aa, synthetic construct
  source 1..9: note = Seed: LVVVGARGV (KRAS G12R)
MVVRGKRGA

SEQ ID NO: 27968 - protein, 9 aa, synthetic construct
  source 1..9: note = Seed: LVVVGARGV (KRAS G12R)
MVVRGKRGC

SEQ ID NO: 27969 - protein, 9 aa, synthetic construct
  source 1..9: note = Seed: LVVVGARGV (KRAS G12R)
MVVRGKRGF

SEQ ID NO: 27970 - protein, 9 aa, synthetic construct
  source 1..9: note = Seed: LVVVGARGV (KRAS G12R)
MVVRGKRGG

SEQ ID NO: 27971 - protein, 9 aa, synthetic construct
  source 1..9: note = Seed: LVVVGARGV (KRAS G12R)
MVVRGKRGH

SEQ ID NO: 27972 - protein, 9 aa, synthetic construct
  source 1..9: note = Seed: LVVVGARGV (KRAS G12R)
MVVRGKRGI

SEQ ID NO: 27973 - protein, 9 aa, synthetic construct
  source 1..9: note = Seed: LVVVGARGV (KRAS G12R)
MVVRGKRGL

SEQ ID NO: 27974 - protein, 9 aa, synthetic construct
  source 1..9: note = Seed: LVVVGARGV (KRAS G12R)
MVVRGKRGM

SEQ ID NO: 27975 - protein, 9 aa, synthetic construct
  source 1..9: note = Seed: LVVVGARGV (KRAS G12R)
MVVRGKRGN

SEQ ID NO: 27976 - protein, 9 aa, synthetic construct
  source 1..9: note = Seed: LVVVGARGV (KRAS G12R)
MVVRGKRGP

SEQ ID NO: 27977 - protein, 9 aa, synthetic construct
  source 1..9: note = Seed: LVVVGARGV (KRAS G12R)
MVVRGKRGQ

SEQ ID NO: 27978 - protein, 9 aa, synthetic construct
  source 1..9: note = Seed: LVVVGARGV (KRAS G12R)
MVVRGKRGR

SEQ ID NO: 27979 - protein, 9 aa, synthetic construct
  source 1..9: note = Seed: LVVVGARGV (KRAS G12R)
MVVRGKRGS

SEQ ID NO: 27980 - protein, 9 aa, synthetic construct
  source 1..9: note = Seed: LVVVGARGV (KRAS G12R)
MVVRGKRGT

SEQ ID NO: 27981 - protein, 9 aa, synthetic construct
  source 1..9: note = Seed: LVVVGARGV (KRAS G12R)
MVVRGKRGV

SEQ ID NO: 27982 - protein, 9 aa, synthetic construct
  source 1..9: note = Seed: LVVVGARGV (KRAS G12R)
MVVRGKRGW

SEQ ID NO: 27983 - protein, 9 aa, synthetic construct
  source 1..9: note = Seed: LVVVGARGV (KRAS G12R)
MVVRGKRGY

SEQ ID NO: 27984 - protein, 9 aa, synthetic construct
  source 1..9: note = Seed: LVVVGARGV (KRAS G12R)
MVVRGLRGA

SEQ ID NO: 27985 - protein, 9 aa, synthetic construct
  source 1..9: note = Seed: LVVVGARGV (KRAS G12R)
MVVRGLRGC

SEQ ID NO: 27986 - protein, 9 aa, synthetic construct
  source 1..9: note = Seed: LVVVGARGV (KRAS G12R)
MVVRGLRGF

SEQ ID NO: 27987 - protein, 9 aa, synthetic construct
  source 1..9: note = Seed: LVVVGARGV (KRAS G12R)
MVVRGLRGI

SEQ ID NO: 27988 - protein, 9 aa, synthetic construct
  source 1..9: note = Seed: LVVVGARGV (KRAS G12R)
MVVRGLRGK

SEQ ID NO: 27989 - protein, 9 aa, synthetic construct
  source 1..9: note = Seed: LVVVGARGV (KRAS G12R)
MVVRGLRGL

SEQ ID NO: 27990 - protein, 9 aa, synthetic construct
  source 1..9: note = Seed: LVVVGARGV (KRAS G12R)
MVVRGLRGM

SEQ ID NO: 27991 - protein, 9 aa, synthetic construct
  source 1..9: note = Seed: LVVVGARGV (KRAS G12R)
MVVRGLRGR

SEQ ID NO: 27992 - protein, 9 aa, synthetic construct
  source 1..9: note = Seed: LVVVGARGV (KRAS G12R)
MVVRGLRGV

SEQ ID NO: 27993 - protein, 9 aa, synthetic construct
  source 1..9: note = Seed: LVVVGARGV (KRAS G12R)
MVVRGLRGY

SEQ ID NO: 27994 - protein, 9 aa, synthetic construct
  source 1..9: note = Seed: LVVVGARGV (KRAS G12R)
MVVRGMRGC

SEQ ID NO: 27995 - protein, 9 aa, synthetic construct
  source 1..9: note = Seed: LVVVGARGV (KRAS G12R)
MVVRGMRGF

SEQ ID NO: 27996 - protein, 9 aa, synthetic construct
  source 1..9: note = Seed: LVVVGARGV (KRAS G12R)
MVVRGMRGI

SEQ ID NO: 27997 - protein, 9 aa, synthetic construct
  source 1..9: note = Seed: LVVVGARGV (KRAS G12R)
MVVRGMRGM

SEQ ID NO: 27998 - protein, 9 aa, synthetic construct
  source 1..9: note = Seed: LVVVGARGV (KRAS G12R)
MVVRGMRGR

SEQ ID NO: 27999 - protein, 9 aa, synthetic construct
  source 1..9: note = Seed: LVVVGARGV (KRAS G12R)
MVVRGMRGV

SEQ ID NO: 28000 - protein, 9 aa, synthetic construct
  source 1..9: note = Seed: LVVVGARGV (KRAS G12R)
MVVRGMRGY

SEQ ID NO: 28001 - protein, 9 aa, synthetic construct
  source 1..9: note = Seed: LVVVGARGV (KRAS G12R)
MVVRGNRGA

SEQ ID NO: 28002 - protein, 9 aa, synthetic construct
  source 1..9: note = Seed: LVVVGARGV (KRAS G12R)
MVVRGNRGF

SEQ ID NO: 28003 - protein, 9 aa, synthetic construct
  source 1..9: note = Seed: LVVVGARGV (KRAS G12R)
MVVRGNRGI

SEQ ID NO: 28004 - protein, 9 aa, synthetic construct
  source 1..9: note = Seed: LVVVGARGV (KRAS G12R)
MVVRGNRGL

SEQ ID NO: 28005 - protein, 9 aa, synthetic construct
  source 1..9: note = Seed: LVVVGARGV (KRAS G12R)
MVVRGNRGM

SEQ ID NO: 28006 - protein, 9 aa, synthetic construct
  source 1..9: note = Seed: LVVVGARGV (KRAS G12R)
MVVRGNRGR

SEQ ID NO: 28007 - protein, 9 aa, synthetic construct
  source 1..9: note = Seed: LVVVGARGV (KRAS G12R)
MVVRGNRGV

SEQ ID NO: 28008 - protein, 9 aa, synthetic construct
  source 1..9: note = Seed: LVVVGARGV (KRAS G12R)
MVVRGNRGY

SEQ ID NO: 28009 - protein, 9 aa, synthetic construct
  source 1..9: note = Seed: LVVVGARGV (KRAS G12R)
MVVRGQRGA

SEQ ID NO: 28010 - protein, 9 aa, synthetic construct
  source 1..9: note = Seed: LVVVGARGV (KRAS G12R)
MVVRGQRGF

SEQ ID NO: 28011 - protein, 9 aa, synthetic construct
  source 1..9: note = Seed: LVVVGARGV (KRAS G12R)
MVVRGQRGL

SEQ ID NO: 28012 - protein, 9 aa, synthetic construct
  source 1..9: note = Seed: LVVVGARGV (KRAS G12R)
MVVRGQRGR

SEQ ID NO: 28013 - protein, 9 aa, synthetic construct
  source 1..9: note = Seed: LVVVGARGV (KRAS G12R)
MVVRGQRGY

SEQ ID NO: 28014 - protein, 9 aa, synthetic construct
  source 1..9: note = Seed: LVVVGARGV (KRAS G12R)
MVVRGRRGA

SEQ ID NO: 28015 - protein, 9 aa, synthetic construct
  source 1..9: note = Seed: LVVVGARGV (KRAS G12R)
MVVRGRRGC

SEQ ID NO: 28016 - protein, 9 aa, synthetic construct
  source 1..9: note = Seed: LVVVGARGV (KRAS G12R)
MVVRGRRGD

SEQ ID NO: 28017 - protein, 9 aa, synthetic construct
  source 1..9: note = Seed: LVVVGARGV (KRAS G12R)
MVVRGRRGE

SEQ ID NO: 28018 - protein, 9 aa, synthetic construct
  source 1..9: note = Seed: LVVVGARGV (KRAS G12R)
MVVRGRRGF

SEQ ID NO: 28019 - protein, 9 aa, synthetic construct
  source 1..9: note = Seed: LVVVGARGV (KRAS G12R)
MVVRGRRGG

SEQ ID NO: 28020 - protein, 9 aa, synthetic construct
  source 1..9: note = Seed: LVVVGARGV (KRAS G12R)
MVVRGRRGH

SEQ ID NO: 28021 - protein, 9 aa, synthetic construct
  source 1..9: note = Seed: LVVVGARGV (KRAS G12R)
MVVRGRRGI

SEQ ID NO: 28022 - protein, 9 aa, synthetic construct
  source 1..9: note = Seed: LVVVGARGV (KRAS G12R)
MVVRGRRGK

SEQ ID NO: 28023 - protein, 9 aa, synthetic construct
  source 1..9: note = Seed: LVVVGARGV (KRAS G12R)
MVVRGRRGL

SEQ ID NO: 28024 - protein, 9 aa, synthetic construct
  source 1..9: note = Seed: LVVVGARGV (KRAS G12R)
MVVRGRRGM

SEQ ID NO: 28025 - protein, 9 aa, synthetic construct
  source 1..9: note = Seed: LVVVGARGV (KRAS G12R)
MVVRGRRGN

SEQ ID NO: 28026 - protein, 9 aa, synthetic construct
  source 1..9: note = Seed: LVVVGARGV (KRAS G12R)
MVVRGRRGP

SEQ ID NO: 28027 - protein, 9 aa, synthetic construct
  source 1..9: note = Seed: LVVVGARGV (KRAS G12R)
MVVRGRRGQ

SEQ ID NO: 28028 - protein, 9 aa, synthetic construct
  source 1..9: note = Seed: LVVVGARGV (KRAS G12R)
MVVRGRRGR

SEQ ID NO: 28029 - protein, 9 aa, synthetic construct
  source 1..9: note = Seed: LVVVGARGV (KRAS G12R)
MVVRGRRGS

SEQ ID NO: 28030 - protein, 9 aa, synthetic construct
  source 1..9: note = Seed: LVVVGARGV (KRAS G12R)
MVVRGRRGT

SEQ ID NO: 28031 - protein, 9 aa, synthetic construct
  source 1..9: note = Seed: LVVVGARGV (KRAS G12R)
MVVRGRRGV

SEQ ID NO: 28032 - protein, 9 aa, synthetic construct
  source 1..9: note = Seed: LVVVGARGV (KRAS G12R)
MVVRGRRGW

SEQ ID NO: 28033 - protein, 9 aa, synthetic construct
  source 1..9: note = Seed: LVVVGARGV (KRAS G12R)
MVVRGRRGY

SEQ ID NO: 28034 - protein, 9 aa, synthetic construct
  source 1..9: note = Seed: LVVVGARGV (KRAS G12R)
MVVRGSRGA

SEQ ID NO: 28035 - protein, 9 aa, synthetic construct
  source 1..9: note = Seed: LVVVGARGV (KRAS G12R)
MVVRGSRGF

SEQ ID NO: 28036 - protein, 9 aa, synthetic construct
  source 1..9: note = Seed: LVVVGARGV (KRAS G12R)
MVVRGSRGI

SEQ ID NO: 28037 - protein, 9 aa, synthetic construct
  source 1..9: note = Seed: LVVVGARGV (KRAS G12R)
MVVRGSRGL

SEQ ID NO: 28038 - protein, 9 aa, synthetic construct
  source 1..9: note = Seed: LVVVGARGV (KRAS G12R)
MVVRGSRGM

SEQ ID NO: 28039 - protein, 9 aa, synthetic construct
  source 1..9: note = Seed: LVVVGARGV (KRAS G12R)
MVVRGSRGR

SEQ ID NO: 28040 - protein, 9 aa, synthetic construct
  source 1..9: note = Seed: LVVVGARGV (KRAS G12R)
MVVRGSRGV

SEQ ID NO: 28041 - protein, 9 aa, synthetic construct
  source 1..9: note = Seed: LVVVGARGV (KRAS G12R)
MVVRGSRGY

SEQ ID NO: 28042 - protein, 9 aa, synthetic construct
  source 1..9: note = Seed: LVVVGARGV (KRAS G12R)
MVVRGTRGA

SEQ ID NO: 28043 - protein, 9 aa, synthetic construct
  source 1..9: note = Seed: LVVVGARGV (KRAS G12R)
MVVRGTRGF

SEQ ID NO: 28044 - protein, 9 aa, synthetic construct
  source 1..9: note = Seed: LVVVGARGV (KRAS G12R)
MVVRGTRGI

SEQ ID NO: 28045 - protein, 9 aa, synthetic construct
  source 1..9: note = Seed: LVVVGARGV (KRAS G12R)
MVVRGTRGL

SEQ ID NO: 28046 - protein, 9 aa, synthetic construct
  source 1..9: note = Seed: LVVVGARGV (KRAS G12R)
MVVRGTRGM

SEQ ID NO: 28047 - protein, 9 aa, synthetic construct
  source 1..9: note = Seed: LVVVGARGV (KRAS G12R)
MVVRGTRGR

SEQ ID NO: 28048 - protein, 9 aa, synthetic construct
  source 1..9: note = Seed: LVVVGARGV (KRAS G12R)
MVVRGTRGV

SEQ ID NO: 28049 - protein, 9 aa, synthetic construct
  source 1..9: note = Seed: LVVVGARGV (KRAS G12R)
MVVRGTRGY

SEQ ID NO: 28050 - protein, 9 aa, synthetic construct
  source 1..9: note = Seed: LVVVGARGV (KRAS G12R)
MVVRGVRGA

SEQ ID NO: 28051 - protein, 9 aa, synthetic construct
  source 1..9: note = Seed: LVVVGARGV (KRAS G12R)
MVVRGVRGF

SEQ ID NO: 28052 - protein, 9 aa, synthetic construct
  source 1..9: note = Seed: LVVVGARGV (KRAS G12R)
MVVRGVRGI

SEQ ID NO: 28053 - protein, 9 aa, synthetic construct
  source 1..9: note = Seed: LVVVGARGV (KRAS G12R)
MVVRGVRGK

SEQ ID NO: 28054 - protein, 9 aa, synthetic construct
  source 1..9: note = Seed: LVVVGARGV (KRAS G12R)
MVVRGVRGL

SEQ ID NO: 28055 - protein, 9 aa, synthetic construct
  source 1..9: note = Seed: LVVVGARGV (KRAS G12R)
MVVRGVRGM

SEQ ID NO: 28056 - protein, 9 aa, synthetic construct
  source 1..9: note = Seed: LVVVGARGV (KRAS G12R)
MVVRGVRGQ

SEQ ID NO: 28057 - protein, 9 aa, synthetic construct
  source 1..9: note = Seed: LVVVGARGV (KRAS G12R)
MVVRGVRGR

SEQ ID NO: 28058 - protein, 9 aa, synthetic construct
  source 1..9: note = Seed: LVVVGARGV (KRAS G12R)
MVVRGVRGS

SEQ ID NO: 28059 - protein, 9 aa, synthetic construct
  source 1..9: note = Seed: LVVVGARGV (KRAS G12R)
MVVRGVRGV

SEQ ID NO: 28060 - protein, 9 aa, synthetic construct
  source 1..9: note = Seed: LVVVGARGV (KRAS G12R)
MVVRGVRGY

SEQ ID NO: 28061 - protein, 9 aa, synthetic construct
  source 1..9: note = Seed: LVVVGARGV (KRAS G12R)
MVVSGARGA

SEQ ID NO: 28062 - protein, 9 aa, synthetic construct
  source 1..9: note = Seed: LVVVGARGV (KRAS G12R)
MVVSGARGF

SEQ ID NO: 28063 - protein, 9 aa, synthetic construct
  source 1..9: note = Seed: LVVVGARGV (KRAS G12R)
MVVSGARGI

SEQ ID NO: 28064 - protein, 9 aa, synthetic construct
  source 1..9: note = Seed: LVVVGARGV (KRAS G12R)
MVVSGARGL

SEQ ID NO: 28065 - protein, 9 aa, synthetic construct
  source 1..9: note = Seed: LVVVGARGV (KRAS G12R)
MVVSGARGM

SEQ ID NO: 28066 - protein, 9 aa, synthetic construct
  source 1..9: note = Seed: LVVVGARGV (KRAS G12R)
MVVSGARGR

SEQ ID NO: 28067 - protein, 9 aa, synthetic construct
  source 1..9: note = Seed: LVVVGARGV (KRAS G12R)
MVVSGARGS

SEQ ID NO: 28068 - protein, 9 aa, synthetic construct
  source 1..9: note = Seed: LVVVGARGV (KRAS G12R)
MVVSGARGT

SEQ ID NO: 28069 - protein, 9 aa, synthetic construct
  source 1..9: note = Seed: LVVVGARGV (KRAS G12R)
MVVSGARGV

SEQ ID NO: 28070 - protein, 9 aa, synthetic construct
  source 1..9: note = Seed: LVVVGARGV (KRAS G12R)
MVVSGARGY

SEQ ID NO: 28071 - protein, 9 aa, synthetic construct
  source 1..9: note = Seed: LVVVGARGV (KRAS G12R)
MVVSGFRGI

SEQ ID NO: 28072 - protein, 9 aa, synthetic construct
  source 1..9: note = Seed: LVVVGARGV (KRAS G12R)
MVVSGFRGL

SEQ ID NO: 28073 - protein, 9 aa, synthetic construct
  source 1..9: note = Seed: LVVVGARGV (KRAS G12R)
MVVSGFRGV

SEQ ID NO: 28074 - protein, 9 aa, synthetic construct
  source 1..9: note = Seed: LVVVGARGV (KRAS G12R)
MVVSGGRGA

SEQ ID NO: 28075 - protein, 9 aa, synthetic construct
  source 1..9: note = Seed: LVVVGARGV (KRAS G12R)
MVVSGGRGI

SEQ ID NO: 28076 - protein, 9 aa, synthetic construct
  source 1..9: note = Seed: LVVVGARGV (KRAS G12R)
MVVSGGRGL

SEQ ID NO: 28077 - protein, 9 aa, synthetic construct
  source 1..9: note = Seed: LVVVGARGV (KRAS G12R)
MVVSGGRGM

SEQ ID NO: 28078 - protein, 9 aa, synthetic construct
  source 1..9: note = Seed: LVVVGARGV (KRAS G12R)
MVVSGGRGV

SEQ ID NO: 28079 - protein, 9 aa, synthetic construct
  source 1..9: note = Seed: LVVVGARGV (KRAS G12R)
MVVSGHRGF

SEQ ID NO: 28080 - protein, 9 aa, synthetic construct
  source 1..9: note = Seed: LVVVGARGV (KRAS G12R)
MVVSGHRGL

SEQ ID NO: 28081 - protein, 9 aa, synthetic construct
  source 1..9: note = Seed: LVVVGARGV (KRAS G12R)
MVVSGHRGR

SEQ ID NO: 28082 - protein, 9 aa, synthetic construct
  source 1..9: note = Seed: LVVVGARGV (KRAS G12R)
MVVSGHRGY

SEQ ID NO: 28083 - protein, 9 aa, synthetic construct
  source 1..9: note = Seed: LVVVGARGV (KRAS G12R)
MVVSGIRGA

SEQ ID NO: 28084 - protein, 9 aa, synthetic construct
  source 1..9: note = Seed: LVVVGARGV (KRAS G12R)
MVVSGIRGF

SEQ ID NO: 28085 - protein, 9 aa, synthetic construct
  source 1..9: note = Seed: LVVVGARGV (KRAS G12R)
MVVSGIRGI

SEQ ID NO: 28086 - protein, 9 aa, synthetic construct
  source 1..9: note = Seed: LVVVGARGV (KRAS G12R)
MVVSGIRGL

SEQ ID NO: 28087 - protein, 9 aa, synthetic construct
  source 1..9: note = Seed: LVVVGARGV (KRAS G12R)
MVVSGIRGM

SEQ ID NO: 28088 - protein, 9 aa, synthetic construct
  source 1..9: note = Seed: LVVVGARGV (KRAS G12R)
MVVSGIRGR

SEQ ID NO: 28089 - protein, 9 aa, synthetic construct
  source 1..9: note = Seed: LVVVGARGV (KRAS G12R)
MVVSGIRGV

SEQ ID NO: 28090 - protein, 9 aa, synthetic construct
  source 1..9: note = Seed: LVVVGARGV (KRAS G12R)
MVVSGIRGY

SEQ ID NO: 28091 - protein, 9 aa, synthetic construct
  source 1..9: note = Seed: LVVVGARGV (KRAS G12R)
MVVSGKRGA

SEQ ID NO: 28092 - protein, 9 aa, synthetic construct
  source 1..9: note = Seed: LVVVGARGV (KRAS G12R)
MVVSGKRGF

SEQ ID NO: 28093 - protein, 9 aa, synthetic construct
  source 1..9: note = Seed: LVVVGARGV (KRAS G12R)
MVVSGKRGG

SEQ ID NO: 28094 - protein, 9 aa, synthetic construct
  source 1..9: note = Seed: LVVVGARGV (KRAS G12R)
MVVSGKRGH

SEQ ID NO: 28095 - protein, 9 aa, synthetic construct
  source 1..9: note = Seed: LVVVGARGV (KRAS G12R)
MVVSGKRGI

SEQ ID NO: 28096 - protein, 9 aa, synthetic construct
  source 1..9: note = Seed: LVVVGARGV (KRAS G12R)
MVVSGKRGK

SEQ ID NO: 28097 - protein, 9 aa, synthetic construct
  source 1..9: note = Seed: LVVVGARGV (KRAS G12R)
MVVSGKRGL

SEQ ID NO: 28098 - protein, 9 aa, synthetic construct
  source 1..9: note = Seed: LVVVGARGV (KRAS G12R)
MVVSGKRGM

SEQ ID NO: 28099 - protein, 9 aa, synthetic construct
  source 1..9: note = Seed: LVVVGARGV (KRAS G12R)
MVVSGKRGQ

SEQ ID NO: 28100 - protein, 9 aa, synthetic construct
  source 1..9: note = Seed: LVVVGARGV (KRAS G12R)
MVVSGKRGR

SEQ ID NO: 28101 - protein, 9 aa, synthetic construct
  source 1..9: note = Seed: LVVVGARGV (KRAS G12R)
MVVSGKRGS

SEQ ID NO: 28102 - protein, 9 aa, synthetic construct
  source 1..9: note = Seed: LVVVGARGV (KRAS G12R)
MVVSGKRGT

SEQ ID NO: 28103 - protein, 9 aa, synthetic construct
  source 1..9: note = Seed: LVVVGARGV (KRAS G12R)
MVVSGKRGV

SEQ ID NO: 28104 - protein, 9 aa, synthetic construct
  source 1..9: note = Seed: LVVVGARGV (KRAS G12R)
MVVSGKRGW

SEQ ID NO: 28105 - protein, 9 aa, synthetic construct
  source 1..9: note = Seed: LVVVGARGV (KRAS G12R)
MVVSGKRGY

SEQ ID NO: 28106 - protein, 9 aa, synthetic construct
  source 1..9: note = Seed: LVVVGARGV (KRAS G12R)
MVVSGLRGL

SEQ ID NO: 28107 - protein, 9 aa, synthetic construct
  source 1..9: note = Seed: LVVVGARGV (KRAS G12R)
MVVSGLRGR

SEQ ID NO: 28108 - protein, 9 aa, synthetic construct
  source 1..9: note = Seed: LVVVGARGV (KRAS G12R)
MVVSGMRGF

SEQ ID NO: 28109 - protein, 9 aa, synthetic construct
  source 1..9: note = Seed: LVVVGARGV (KRAS G12R)
MVVSGMRGI

SEQ ID NO: 28110 - protein, 9 aa, synthetic construct
  source 1..9: note = Seed: LVVVGARGV (KRAS G12R)
MVVSGMRGL

SEQ ID NO: 28111 - protein, 9 aa, synthetic construct
  source 1..9: note = Seed: LVVVGARGV (KRAS G12R)
MVVSGMRGR

SEQ ID NO: 28112 - protein, 9 aa, synthetic construct
  source 1..9: note = Seed: LVVVGARGV (KRAS G12R)
MVVSGMRGV

SEQ ID NO: 28113 - protein, 9 aa, synthetic construct
  source 1..9: note = Seed: LVVVGARGV (KRAS G12R)
MVVSGNRGF

SEQ ID NO: 28114 - protein, 9 aa, synthetic construct
  source 1..9: note = Seed: LVVVGARGV (KRAS G12R)
MVVSGNRGI

SEQ ID NO: 28115 - protein, 9 aa, synthetic construct
  source 1..9: note = Seed: LVVVGARGV (KRAS G12R)
MVVSGNRGL

SEQ ID NO: 28116 - protein, 9 aa, synthetic construct
  source 1..9: note = Seed: LVVVGARGV (KRAS G12R)
MVVSGNRGR

SEQ ID NO: 28117 - protein, 9 aa, synthetic construct
  source 1..9: note = Seed: LVVVGARGV (KRAS G12R)
MVVSGNRGV

SEQ ID NO: 28118 - protein, 9 aa, synthetic construct
  source 1..9: note = Seed: LVVVGARGV (KRAS G12R)
MVVSGNRGY

SEQ ID NO: 28119 - protein, 9 aa, synthetic construct
  source 1..9: note = Seed: LVVVGARGV (KRAS G12R)
MVVSGPRGA

SEQ ID NO: 28120 - protein, 9 aa, synthetic construct
  source 1..9: note = Seed: LVVVGARGV (KRAS G12R)
MVVSGPRGI

SEQ ID NO: 28121 - protein, 9 aa, synthetic construct
  source 1..9: note = Seed: LVVVGARGV (KRAS G12R)
MVVSGPRGL

SEQ ID NO: 28122 - protein, 9 aa, synthetic construct
  source 1..9: note = Seed: LVVVGARGV (KRAS G12R)
MVVSGPRGM

SEQ ID NO: 28123 - protein, 9 aa, synthetic construct
  source 1..9: note = Seed: LVVVGARGV (KRAS G12R)
MVVSGPRGV

SEQ ID NO: 28124 - protein, 9 aa, synthetic construct
  source 1..9: note = Seed: LVVVGARGV (KRAS G12R)
MVVSGRRGA

SEQ ID NO: 28125 - protein, 9 aa, synthetic construct
  source 1..9: note = Seed: LVVVGARGV (KRAS G12R)
MVVSGRRGF

SEQ ID NO: 28126 - protein, 9 aa, synthetic construct
  source 1..9: note = Seed: LVVVGARGV (KRAS G12R)
MVVSGRRGG

SEQ ID NO: 28127 - protein, 9 aa, synthetic construct
  source 1..9: note = Seed: LVVVGARGV (KRAS G12R)
MVVSGRRGH

SEQ ID NO: 28128 - protein, 9 aa, synthetic construct
  source 1..9: note = Seed: LVVVGARGV (KRAS G12R)
MVVSGRRGI

SEQ ID NO: 28129 - protein, 9 aa, synthetic construct
  source 1..9: note = Seed: LVVVGARGV (KRAS G12R)
MVVSGRRGK

SEQ ID NO: 28130 - protein, 9 aa, synthetic construct
  source 1..9: note = Seed: LVVVGARGV (KRAS G12R)
MVVSGRRGL

SEQ ID NO: 28131 - protein, 9 aa, synthetic construct
  source 1..9: note = Seed: LVVVGARGV (KRAS G12R)
MVVSGRRGM

SEQ ID NO: 28132 - protein, 9 aa, synthetic construct
  source 1..9: note = Seed: LVVVGARGV (KRAS G12R)
MVVSGRRGN

SEQ ID NO: 28133 - protein, 9 aa, synthetic construct
  source 1..9: note = Seed: LVVVGARGV (KRAS G12R)
MVVSGRRGP

SEQ ID NO: 28134 - protein, 9 aa, synthetic construct
  source 1..9: note = Seed: LVVVGARGV (KRAS G12R)
MVVSGRRGQ

SEQ ID NO: 28135 - protein, 9 aa, synthetic construct
  source 1..9: note = Seed: LVVVGARGV (KRAS G12R)
MVVSGRRGR

SEQ ID NO: 28136 - protein, 9 aa, synthetic construct
  source 1..9: note = Seed: LVVVGARGV (KRAS G12R)
MVVSGRRGS

SEQ ID NO: 28137 - protein, 9 aa, synthetic construct
  source 1..9: note = Seed: LVVVGARGV (KRAS G12R)
MVVSGRRGT

SEQ ID NO: 28138 - protein, 9 aa, synthetic construct
  source 1..9: note = Seed: LVVVGARGV (KRAS G12R)
MVVSGRRGV

SEQ ID NO: 28139 - protein, 9 aa, synthetic construct
  source 1..9: note = Seed: LVVVGARGV (KRAS G12R)
MVVSGRRGW

SEQ ID NO: 28140 - protein, 9 aa, synthetic construct
  source 1..9: note = Seed: LVVVGARGV (KRAS G12R)
MVVSGRRGY

SEQ ID NO: 28141 - protein, 9 aa, synthetic construct
  source 1..9: note = Seed: LVVVGARGV (KRAS G12R)
MVVSGSRGA

SEQ ID NO: 28142 - protein, 9 aa, synthetic construct
  source 1..9: note = Seed: LVVVGARGV (KRAS G12R)
MVVSGSRGF

SEQ ID NO: 28143 - protein, 9 aa, synthetic construct
  source 1..9: note = Seed: LVVVGARGV (KRAS G12R)
MVVSGSRGI

SEQ ID NO: 28144 - protein, 9 aa, synthetic construct
  source 1..9: note = Seed: LVVVGARGV (KRAS G12R)
MVVSGSRGL

SEQ ID NO: 28145 - protein, 9 aa, synthetic construct
  source 1..9: note = Seed: LVVVGARGV (KRAS G12R)
MVVSGSRGM

SEQ ID NO: 28146 - protein, 9 aa, synthetic construct
  source 1..9: note = Seed: LVVVGARGV (KRAS G12R)
MVVSGSRGR

SEQ ID NO: 28147 - protein, 9 aa, synthetic construct
  source 1..9: note = Seed: LVVVGARGV (KRAS G12R)
MVVSGSRGV

SEQ ID NO: 28148 - protein, 9 aa, synthetic construct
  source 1..9: note = Seed: LVVVGARGV (KRAS G12R)
MVVSGSRGY

SEQ ID NO: 28149 - protein, 9 aa, synthetic construct
  source 1..9: note = Seed: LVVVGARGV (KRAS G12R)
MVVSGTRGI

SEQ ID NO: 28150 - protein, 9 aa, synthetic construct
  source 1..9: note = Seed: LVVVGARGV (KRAS G12R)
MVVSGTRGL

SEQ ID NO: 28151 - protein, 9 aa, synthetic construct
  source 1..9: note = Seed: LVVVGARGV (KRAS G12R)
MVVSGTRGR

SEQ ID NO: 28152 - protein, 9 aa, synthetic construct
  source 1..9: note = Seed: LVVVGARGV (KRAS G12R)
MVVSGTRGV

SEQ ID NO: 28153 - protein, 9 aa, synthetic construct
  source 1..9: note = Seed: LVVVGARGV (KRAS G12R)
MVVSGTRGY

SEQ ID NO: 28154 - protein, 9 aa, synthetic construct
  source 1..9: note = Seed: LVVVGARGV (KRAS G12R)
MVVSGVRGA

SEQ ID NO: 28155 - protein, 9 aa, synthetic construct
  source 1..9: note = Seed: LVVVGARGV (KRAS G12R)
MVVSGVRGF

SEQ ID NO: 28156 - protein, 9 aa, synthetic construct
  source 1..9: note = Seed: LVVVGARGV (KRAS G12R)
MVVSGVRGI

SEQ ID NO: 28157 - protein, 9 aa, synthetic construct
  source 1..9: note = Seed: LVVVGARGV (KRAS G12R)
MVVSGVRGL

SEQ ID NO: 28158 - protein, 9 aa, synthetic construct
  source 1..9: note = Seed: LVVVGARGV (KRAS G12R)
MVVSGVRGM

SEQ ID NO: 28159 - protein, 9 aa, synthetic construct
  source 1..9: note = Seed: LVVVGARGV (KRAS G12R)
MVVSGVRGR

SEQ ID NO: 28160 - protein, 9 aa, synthetic construct
  source 1..9: note = Seed: LVVVGARGV (KRAS G12R)
MVVSGVRGV

SEQ ID NO: 28161 - protein, 9 aa, synthetic construct
  source 1..9: note = Seed: LVVVGARGV (KRAS G12R)
MVVSGVRGY

SEQ ID NO: 28162 - protein, 9 aa, synthetic construct
  source 1..9: note = Seed: LVVVGARGV (KRAS G12R)
MVVTGARGA

SEQ ID NO: 28163 - protein, 9 aa, synthetic construct
  source 1..9: note = Seed: LVVVGARGV (KRAS G12R)
MVVTGARGF

SEQ ID NO: 28164 - protein, 9 aa, synthetic construct
  source 1..9: note = Seed: LVVVGARGV (KRAS G12R)
MVVTGARGI

SEQ ID NO: 28165 - protein, 9 aa, synthetic construct
  source 1..9: note = Seed: LVVVGARGV (KRAS G12R)
MVVTGARGL

SEQ ID NO: 28166 - protein, 9 aa, synthetic construct
  source 1..9: note = Seed: LVVVGARGV (KRAS G12R)
MVVTGARGM

SEQ ID NO: 28167 - protein, 9 aa, synthetic construct
  source 1..9: note = Seed: LVVVGARGV (KRAS G12R)
MVVTGARGR

SEQ ID NO: 28168 - protein, 9 aa, synthetic construct
  source 1..9: note = Seed: LVVVGARGV (KRAS G12R)
MVVTGARGV

SEQ ID NO: 28169 - protein, 9 aa, synthetic construct
  source 1..9: note = Seed: LVVVGARGV (KRAS G12R)
MVVTGFRGI

SEQ ID NO: 28170 - protein, 9 aa, synthetic construct
  source 1..9: note = Seed: LVVVGARGV (KRAS G12R)
MVVTGFRGL

SEQ ID NO: 28171 - protein, 9 aa, synthetic construct
  source 1..9: note = Seed: LVVVGARGV (KRAS G12R)
MVVTGFRGV

SEQ ID NO: 28172 - protein, 9 aa, synthetic construct
  source 1..9: note = Seed: LVVVGARGV (KRAS G12R)
MVVTGGRGA

SEQ ID NO: 28173 - protein, 9 aa, synthetic construct
  source 1..9: note = Seed: LVVVGARGV (KRAS G12R)
MVVTGGRGI

SEQ ID NO: 28174 - protein, 9 aa, synthetic construct
  source 1..9: note = Seed: LVVVGARGV (KRAS G12R)
MVVTGGRGL

SEQ ID NO: 28175 - protein, 9 aa, synthetic construct
  source 1..9: note = Seed: LVVVGARGV (KRAS G12R)
MVVTGGRGV

SEQ ID NO: 28176 - protein, 9 aa, synthetic construct
  source 1..9: note = Seed: LVVVGARGV (KRAS G12R)
MVVTGHRGL

SEQ ID NO: 28177 - protein, 9 aa, synthetic construct
  source 1..9: note = Seed: LVVVGARGV (KRAS G12R)
MVVTGHRGR

SEQ ID NO: 28178 - protein, 9 aa, synthetic construct
  source 1..9: note = Seed: LVVVGARGV (KRAS G12R)
MVVTGIRGF

SEQ ID NO: 28179 - protein, 9 aa, synthetic construct
  source 1..9: note = Seed: LVVVGARGV (KRAS G12R)
MVVTGIRGL

SEQ ID NO: 28180 - protein, 9 aa, synthetic construct
  source 1..9: note = Seed: LVVVGARGV (KRAS G12R)
MVVTGIRGR

SEQ ID NO: 28181 - protein, 9 aa, synthetic construct
  source 1..9: note = Seed: LVVVGARGV (KRAS G12R)
MVVTGKRGA

SEQ ID NO: 28182 - protein, 9 aa, synthetic construct
  source 1..9: note = Seed: LVVVGARGV (KRAS G12R)
MVVTGKRGF

SEQ ID NO: 28183 - protein, 9 aa, synthetic construct
  source 1..9: note = Seed: LVVVGARGV (KRAS G12R)
MVVTGKRGG

SEQ ID NO: 28184 - protein, 9 aa, synthetic construct
  source 1..9: note = Seed: LVVVGARGV (KRAS G12R)
MVVTGKRGH

SEQ ID NO: 28185 - protein, 9 aa, synthetic construct
  source 1..9: note = Seed: LVVVGARGV (KRAS G12R)
MVVTGKRGI

SEQ ID NO: 28186 - protein, 9 aa, synthetic construct
  source 1..9: note = Seed: LVVVGARGV (KRAS G12R)
MVVTGKRGK

SEQ ID NO: 28187 - protein, 9 aa, synthetic construct
  source 1..9: note = Seed: LVVVGARGV (KRAS G12R)
MVVTGKRGL

SEQ ID NO: 28188 - protein, 9 aa, synthetic construct
  source 1..9: note = Seed: LVVVGARGV (KRAS G12R)
MVVTGKRGM

SEQ ID NO: 28189 - protein, 9 aa, synthetic construct
  source 1..9: note = Seed: LVVVGARGV (KRAS G12R)
MVVTGKRGQ

SEQ ID NO: 28190 - protein, 9 aa, synthetic construct
  source 1..9: note = Seed: LVVVGARGV (KRAS G12R)
MVVTGKRGR

SEQ ID NO: 28191 - protein, 9 aa, synthetic construct
  source 1..9: note = Seed: LVVVGARGV (KRAS G12R)
MVVTGKRGS

SEQ ID NO: 28192 - protein, 9 aa, synthetic construct
  source 1..9: note = Seed: LVVVGARGV (KRAS G12R)
MVVTGKRGT

SEQ ID NO: 28193 - protein, 9 aa, synthetic construct
  source 1..9: note = Seed: LVVVGARGV (KRAS G12R)
MVVTGKRGV

SEQ ID NO: 28194 - protein, 9 aa, synthetic construct
  source 1..9: note = Seed: LVVVGARGV (KRAS G12R)
MVVTGKRGW

SEQ ID NO: 28195 - protein, 9 aa, synthetic construct
  source 1..9: note = Seed: LVVVGARGV (KRAS G12R)
MVVTGKRGY

SEQ ID NO: 28196 - protein, 9 aa, synthetic construct
  source 1..9: note = Seed: LVVVGARGV (KRAS G12R)
MVVTGMRGI

SEQ ID NO: 28197 - protein, 9 aa, synthetic construct
  source 1..9: note = Seed: LVVVGARGV (KRAS G12R)
MVVTGMRGL

SEQ ID NO: 28198 - protein, 9 aa, synthetic construct
  source 1..9: note = Seed: LVVVGARGV (KRAS G12R)
MVVTGMRGR

SEQ ID NO: 28199 - protein, 9 aa, synthetic construct
  source 1..9: note = Seed: LVVVGARGV (KRAS G12R)
MVVTGMRGV

SEQ ID NO: 28200 - protein, 9 aa, synthetic construct
  source 1..9: note = Seed: LVVVGARGV (KRAS G12R)
MVVTGNRGI

SEQ ID NO: 28201 - protein, 9 aa, synthetic construct
  source 1..9: note = Seed: LVVVGARGV (KRAS G12R)
MVVTGNRGL

SEQ ID NO: 28202 - protein, 9 aa, synthetic construct
  source 1..9: note = Seed: LVVVGARGV (KRAS G12R)
MVVTGPRGI

SEQ ID NO: 28203 - protein, 9 aa, synthetic construct
  source 1..9: note = Seed: LVVVGARGV (KRAS G12R)
MVVTGPRGL

SEQ ID NO: 28204 - protein, 9 aa, synthetic construct
  source 1..9: note = Seed: LVVVGARGV (KRAS G12R)
MVVTGPRGV

SEQ ID NO: 28205 - protein, 9 aa, synthetic construct
  source 1..9: note = Seed: LVVVGARGV (KRAS G12R)
MVVTGRRGA

SEQ ID NO: 28206 - protein, 9 aa, synthetic construct
  source 1..9: note = Seed: LVVVGARGV (KRAS G12R)
MVVTGRRGF

SEQ ID NO: 28207 - protein, 9 aa, synthetic construct
  source 1..9: note = Seed: LVVVGARGV (KRAS G12R)
MVVTGRRGG

SEQ ID NO: 28208 - protein, 9 aa, synthetic construct
  source 1..9: note = Seed: LVVVGARGV (KRAS G12R)
MVVTGRRGH

SEQ ID NO: 28209 - protein, 9 aa, synthetic construct
  source 1..9: note = Seed: LVVVGARGV (KRAS G12R)
MVVTGRRGI

SEQ ID NO: 28210 - protein, 9 aa, synthetic construct
  source 1..9: note = Seed: LVVVGARGV (KRAS G12R)
MVVTGRRGK

SEQ ID NO: 28211 - protein, 9 aa, synthetic construct
  source 1..9: note = Seed: LVVVGARGV (KRAS G12R)
MVVTGRRGL

SEQ ID NO: 28212 - protein, 9 aa, synthetic construct
  source 1..9: note = Seed: LVVVGARGV (KRAS G12R)
MVVTGRRGM

SEQ ID NO: 28213 - protein, 9 aa, synthetic construct
  source 1..9: note = Seed: LVVVGARGV (KRAS G12R)
MVVTGRRGN

SEQ ID NO: 28214 - protein, 9 aa, synthetic construct
  source 1..9: note = Seed: LVVVGARGV (KRAS G12R)
MVVTGRRGP

SEQ ID NO: 28215 - protein, 9 aa, synthetic construct
  source 1..9: note = Seed: LVVVGARGV (KRAS G12R)
MVVTGRRGQ

SEQ ID NO: 28216 - protein, 9 aa, synthetic construct
  source 1..9: note = Seed: LVVVGARGV (KRAS G12R)
MVVTGRRGR

SEQ ID NO: 28217 - protein, 9 aa, synthetic construct
  source 1..9: note = Seed: LVVVGARGV (KRAS G12R)
MVVTGRRGS

SEQ ID NO: 28218 - protein, 9 aa, synthetic construct
  source 1..9: note = Seed: LVVVGARGV (KRAS G12R)
MVVTGRRGT

SEQ ID NO: 28219 - protein, 9 aa, synthetic construct
  source 1..9: note = Seed: LVVVGARGV (KRAS G12R)
MVVTGRRGV

SEQ ID NO: 28220 - protein, 9 aa, synthetic construct
  source 1..9: note = Seed: LVVVGARGV (KRAS G12R)
MVVTGRRGW

SEQ ID NO: 28221 - protein, 9 aa, synthetic construct
  source 1..9: note = Seed: LVVVGARGV (KRAS G12R)
MVVTGRRGY

SEQ ID NO: 28222 - protein, 9 aa, synthetic construct
  source 1..9: note = Seed: LVVVGARGV (KRAS G12R)
MVVTGSRGA

SEQ ID NO: 28223 - protein, 9 aa, synthetic construct
  source 1..9: note = Seed: LVVVGARGV (KRAS G12R)
MVVTGSRGF

SEQ ID NO: 28224 - protein, 9 aa, synthetic construct
  source 1..9: note = Seed: LVVVGARGV (KRAS G12R)
MVVTGSRGI

SEQ ID NO: 28225 - protein, 9 aa, synthetic construct
  source 1..9: note = Seed: LVVVGARGV (KRAS G12R)
MVVTGSRGL

SEQ ID NO: 28226 - protein, 9 aa, synthetic construct
  source 1..9: note = Seed: LVVVGARGV (KRAS G12R)
MVVTGSRGM

SEQ ID NO: 28227 - protein, 9 aa, synthetic construct
  source 1..9: note = Seed: LVVVGARGV (KRAS G12R)
MVVTGSRGV

SEQ ID NO: 28228 - protein, 9 aa, synthetic construct
  source 1..9: note = Seed: LVVVGARGV (KRAS G12R)
MVVTGTRGI

SEQ ID NO: 28229 - protein, 9 aa, synthetic construct
  source 1..9: note = Seed: LVVVGARGV (KRAS G12R)
MVVTGTRGL

SEQ ID NO: 28230 - protein, 9 aa, synthetic construct
  source 1..9: note = Seed: LVVVGARGV (KRAS G12R)
MVVTGTRGR

SEQ ID NO: 28231 - protein, 9 aa, synthetic construct
  source 1..9: note = Seed: LVVVGARGV (KRAS G12R)
MVVTGVRGI

SEQ ID NO: 28232 - protein, 9 aa, synthetic construct
  source 1..9: note = Seed: LVVVGARGV (KRAS G12R)
MVVTGVRGL

SEQ ID NO: 28233 - protein, 9 aa, synthetic construct
  source 1..9: note = Seed: LVVVGARGV (KRAS G12R)
MVVTGVRGR

SEQ ID NO: 28234 - protein, 9 aa, synthetic construct
  source 1..9: note = Seed: LVVVGARGV (KRAS G12R)
MVVVGARGA

SEQ ID NO: 28235 - protein, 9 aa, synthetic construct
  source 1..9: note = Seed: LVVVGARGV (KRAS G12R)
MVVVGARGF

SEQ ID NO: 28236 - protein, 9 aa, synthetic construct
  source 1..9: note = Seed: LVVVGARGV (KRAS G12R)
MVVVGARGI

SEQ ID NO: 28237 - protein, 9 aa, synthetic construct
  source 1..9: note = Seed: LVVVGARGV (KRAS G12R)
MVVVGARGL

SEQ ID NO: 28238 - protein, 9 aa, synthetic construct
  source 1..9: note = Seed: LVVVGARGV (KRAS G12R)
MVVVGARGM

SEQ ID NO: 28239 - protein, 9 aa, synthetic construct
  source 1..9: note = Seed: LVVVGARGV (KRAS G12R)
MVVVGARGR

SEQ ID NO: 28240 - protein, 9 aa, synthetic construct
  source 1..9: note = Seed: LVVVGARGV (KRAS G12R)
MVVVGARGS

SEQ ID NO: 28241 - protein, 9 aa, synthetic construct
  source 1..9: note = Seed: LVVVGARGV (KRAS G12R)
MVVVGARGT

SEQ ID NO: 28242 - protein, 9 aa, synthetic construct
  source 1..9: note = Seed: LVVVGARGV (KRAS G12R)
MVVVGARGV

SEQ ID NO: 28243 - protein, 9 aa, synthetic construct
  source 1..9: note = Seed: LVVVGARGV (KRAS G12R)
MVVVGARGY

SEQ ID NO: 28244 - protein, 9 aa, synthetic construct
  source 1..9: note = Seed: LVVVGARGV (KRAS G12R)
MVVVGFRGI

SEQ ID NO: 28245 - protein, 9 aa, synthetic construct
  source 1..9: note = Seed: LVVVGARGV (KRAS G12R)
MVVVGFRGL

SEQ ID NO: 28246 - protein, 9 aa, synthetic construct
  source 1..9: note = Seed: LVVVGARGV (KRAS G12R)
MVVVGFRGV

SEQ ID NO: 28247 - protein, 9 aa, synthetic construct
  source 1..9: note = Seed: LVVVGARGV (KRAS G12R)
MVVVGGRGA

SEQ ID NO: 28248 - protein, 9 aa, synthetic construct
  source 1..9: note = Seed: LVVVGARGV (KRAS G12R)
MVVVGGRGI

SEQ ID NO: 28249 - protein, 9 aa, synthetic construct
  source 1..9: note = Seed: LVVVGARGV (KRAS G12R)
MVVVGGRGL

SEQ ID NO: 28250 - protein, 9 aa, synthetic construct
  source 1..9: note = Seed: LVVVGARGV (KRAS G12R)
MVVVGGRGM

SEQ ID NO: 28251 - protein, 9 aa, synthetic construct
  source 1..9: note = Seed: LVVVGARGV (KRAS G12R)
MVVVGGRGS

SEQ ID NO: 28252 - protein, 9 aa, synthetic construct
  source 1..9: note = Seed: LVVVGARGV (KRAS G12R)
MVVVGGRGT

SEQ ID NO: 28253 - protein, 9 aa, synthetic construct
  source 1..9: note = Seed: LVVVGARGV (KRAS G12R)
MVVVGGRGV

SEQ ID NO: 28254 - protein, 9 aa, synthetic construct
  source 1..9: note = Seed: LVVVGARGV (KRAS G12R)
MVVVGHRGA

SEQ ID NO: 28255 - protein, 9 aa, synthetic construct
  source 1..9: note = Seed: LVVVGARGV (KRAS G12R)
MVVVGHRGF

SEQ ID NO: 28256 - protein, 9 aa, synthetic construct
  source 1..9: note = Seed: LVVVGARGV (KRAS G12R)
MVVVGHRGH

SEQ ID NO: 28257 - protein, 9 aa, synthetic construct
  source 1..9: note = Seed: LVVVGARGV (KRAS G12R)
MVVVGHRGI

SEQ ID NO: 28258 - protein, 9 aa, synthetic construct
  source 1..9: note = Seed: LVVVGARGV (KRAS G12R)
MVVVGHRGK

SEQ ID NO: 28259 - protein, 9 aa, synthetic construct
  source 1..9: note = Seed: LVVVGARGV (KRAS G12R)
MVVVGHRGL

SEQ ID NO: 28260 - protein, 9 aa, synthetic construct
  source 1..9: note = Seed: LVVVGARGV (KRAS G12R)
MVVVGHRGM

SEQ ID NO: 28261 - protein, 9 aa, synthetic construct
  source 1..9: note = Seed: LVVVGARGV (KRAS G12R)
MVVVGHRGQ

SEQ ID NO: 28262 - protein, 9 aa, synthetic construct
  source 1..9: note = Seed: LVVVGARGV (KRAS G12R)
MVVVGHRGR

SEQ ID NO: 28263 - protein, 9 aa, synthetic construct
  source 1..9: note = Seed: LVVVGARGV (KRAS G12R)
MVVVGHRGS

SEQ ID NO: 28264 - protein, 9 aa, synthetic construct
  source 1..9: note = Seed: LVVVGARGV (KRAS G12R)
MVVVGHRGT

SEQ ID NO: 28265 - protein, 9 aa, synthetic construct
  source 1..9: note = Seed: LVVVGARGV (KRAS G12R)
MVVVGHRGV

SEQ ID NO: 28266 - protein, 9 aa, synthetic construct
  source 1..9: note = Seed: LVVVGARGV (KRAS G12R)
MVVVGHRGY

SEQ ID NO: 28267 - protein, 9 aa, synthetic construct
  source 1..9: note = Seed: LVVVGARGV (KRAS G12R)
MVVVGIRGA

SEQ ID NO: 28268 - protein, 9 aa, synthetic construct
  source 1..9: note = Seed: LVVVGARGV (KRAS G12R)
MVVVGIRGF

SEQ ID NO: 28269 - protein, 9 aa, synthetic construct
  source 1..9: note = Seed: LVVVGARGV (KRAS G12R)
MVVVGIRGI

SEQ ID NO: 28270 - protein, 9 aa, synthetic construct
  source 1..9: note = Seed: LVVVGARGV (KRAS G12R)
MVVVGIRGM

SEQ ID NO: 28271 - protein, 9 aa, synthetic construct
  source 1..9: note = Seed: LVVVGARGV (KRAS G12R)
MVVVGIRGR

SEQ ID NO: 28272 - protein, 9 aa, synthetic construct
  source 1..9: note = Seed: LVVVGARGV (KRAS G12R)
MVVVGIRGY

SEQ ID NO: 28273 - protein, 9 aa, synthetic construct
  source 1..9: note = Seed: LVVVGARGV (KRAS G12R)
MVVVGKRGA

SEQ ID NO: 28274 - protein, 9 aa, synthetic construct
  source 1..9: note = Seed: LVVVGARGV (KRAS G12R)
MVVVGKRGC

SEQ ID NO: 28275 - protein, 9 aa, synthetic construct
  source 1..9: note = Seed: LVVVGARGV (KRAS G12R)
MVVVGKRGF

SEQ ID NO: 28276 - protein, 9 aa, synthetic construct
  source 1..9: note = Seed: LVVVGARGV (KRAS G12R)
MVVVGKRGG

SEQ ID NO: 28277 - protein, 9 aa, synthetic construct
  source 1..9: note = Seed: LVVVGARGV (KRAS G12R)
MVVVGKRGH

SEQ ID NO: 28278 - protein, 9 aa, synthetic construct
  source 1..9: note = Seed: LVVVGARGV (KRAS G12R)
MVVVGKRGI

SEQ ID NO: 28279 - protein, 9 aa, synthetic construct
  source 1..9: note = Seed: LVVVGARGV (KRAS G12R)
MVVVGKRGK

SEQ ID NO: 28280 - protein, 9 aa, synthetic construct
  source 1..9: note = Seed: LVVVGARGV (KRAS G12R)
MVVVGKRGL

SEQ ID NO: 28281 - protein, 9 aa, synthetic construct
  source 1..9: note = Seed: LVVVGARGV (KRAS G12R)
MVVVGKRGM

SEQ ID NO: 28282 - protein, 9 aa, synthetic construct
  source 1..9: note = Seed: LVVVGARGV (KRAS G12R)
MVVVGKRGN

SEQ ID NO: 28283 - protein, 9 aa, synthetic construct
  source 1..9: note = Seed: LVVVGARGV (KRAS G12R)
MVVVGKRGP

SEQ ID NO: 28284 - protein, 9 aa, synthetic construct
  source 1..9: note = Seed: LVVVGARGV (KRAS G12R)
MVVVGKRGQ

SEQ ID NO: 28285 - protein, 9 aa, synthetic construct
  source 1..9: note = Seed: LVVVGARGV (KRAS G12R)
MVVVGKRGR

SEQ ID NO: 28286 - protein, 9 aa, synthetic construct
  source 1..9: note = Seed: LVVVGARGV (KRAS G12R)
MVVVGKRGS

SEQ ID NO: 28287 - protein, 9 aa, synthetic construct
  source 1..9: note = Seed: LVVVGARGV (KRAS G12R)
MVVVGKRGT

SEQ ID NO: 28288 - protein, 9 aa, synthetic construct
  source 1..9: note = Seed: LVVVGARGV (KRAS G12R)
MVVVGKRGV

SEQ ID NO: 28289 - protein, 9 aa, synthetic construct
  source 1..9: note = Seed: LVVVGARGV (KRAS G12R)
MVVVGKRGW

SEQ ID NO: 28290 - protein, 9 aa, synthetic construct
  source 1..9: note = Seed: LVVVGARGV (KRAS G12R)
MVVVGKRGY

SEQ ID NO: 28291 - protein, 9 aa, synthetic construct
  source 1..9: note = Seed: LVVVGARGV (KRAS G12R)
MVVVGLRGR

SEQ ID NO: 28292 - protein, 9 aa, synthetic construct
  source 1..9: note = Seed: LVVVGARGV (KRAS G12R)
MVVVGLRGY

SEQ ID NO: 28293 - protein, 9 aa, synthetic construct
  source 1..9: note = Seed: LVVVGARGV (KRAS G12R)
MVVVGMRGL

SEQ ID NO: 28294 - protein, 9 aa, synthetic construct
  source 1..9: note = Seed: LVVVGARGV (KRAS G12R)
MVVVGMRGR

SEQ ID NO: 28295 - protein, 9 aa, synthetic construct
  source 1..9: note = Seed: LVVVGARGV (KRAS G12R)
MVVVGMRGY

SEQ ID NO: 28296 - protein, 9 aa, synthetic construct
  source 1..9: note = Seed: LVVVGARGV (KRAS G12R)
MVVVGNRGA

SEQ ID NO: 28297 - protein, 9 aa, synthetic construct
  source 1..9: note = Seed: LVVVGARGV (KRAS G12R)
MVVVGNRGF

SEQ ID NO: 28298 - protein, 9 aa, synthetic construct
  source 1..9: note = Seed: LVVVGARGV (KRAS G12R)
MVVVGNRGI

SEQ ID NO: 28299 - protein, 9 aa, synthetic construct
  source 1..9: note = Seed: LVVVGARGV (KRAS G12R)
MVVVGNRGL

SEQ ID NO: 28300 - protein, 9 aa, synthetic construct
  source 1..9: note = Seed: LVVVGARGV (KRAS G12R)
MVVVGNRGM

SEQ ID NO: 28301 - protein, 9 aa, synthetic construct
  source 1..9: note = Seed: LVVVGARGV (KRAS G12R)
MVVVGNRGR

SEQ ID NO: 28302 - protein, 9 aa, synthetic construct
  source 1..9: note = Seed: LVVVGARGV (KRAS G12R)
MVVVGNRGV

SEQ ID NO: 28303 - protein, 9 aa, synthetic construct
  source 1..9: note = Seed: LVVVGARGV (KRAS G12R)
MVVVGNRGY

SEQ ID NO: 28304 - protein, 9 aa, synthetic construct
  source 1..9: note = Seed: LVVVGARGV (KRAS G12R)
MVVVGPRGA

SEQ ID NO: 28305 - protein, 9 aa, synthetic construct
  source 1..9: note = Seed: LVVVGARGV (KRAS G12R)
MVVVGPRGI

SEQ ID NO: 28306 - protein, 9 aa, synthetic construct
  source 1..9: note = Seed: LVVVGARGV (KRAS G12R)
MVVVGPRGL

SEQ ID NO: 28307 - protein, 9 aa, synthetic construct
  source 1..9: note = Seed: LVVVGARGV (KRAS G12R)
MVVVGPRGM

SEQ ID NO: 28308 - protein, 9 aa, synthetic construct
  source 1..9: note = Seed: LVVVGARGV (KRAS G12R)
MVVVGPRGR

SEQ ID NO: 28309 - protein, 9 aa, synthetic construct
  source 1..9: note = Seed: LVVVGARGV (KRAS G12R)
MVVVGPRGV

SEQ ID NO: 28310 - protein, 9 aa, synthetic construct
  source 1..9: note = Seed: LVVVGARGV (KRAS G12R)
MVVVGQRGA

SEQ ID NO: 28311 - protein, 9 aa, synthetic construct
  source 1..9: note = Seed: LVVVGARGV (KRAS G12R)
MVVVGQRGL

SEQ ID NO: 28312 - protein, 9 aa, synthetic construct
  source 1..9: note = Seed: LVVVGARGV (KRAS G12R)
MVVVGQRGR

SEQ ID NO: 28313 - protein, 9 aa, synthetic construct
  source 1..9: note = Seed: LVVVGARGV (KRAS G12R)
MVVVGRRGA

SEQ ID NO: 28314 - protein, 9 aa, synthetic construct
  source 1..9: note = Seed: LVVVGARGV (KRAS G12R)
MVVVGRRGC

SEQ ID NO: 28315 - protein, 9 aa, synthetic construct
  source 1..9: note = Seed: LVVVGARGV (KRAS G12R)
MVVVGRRGD

SEQ ID NO: 28316 - protein, 9 aa, synthetic construct
  source 1..9: note = Seed: LVVVGARGV (KRAS G12R)
MVVVGRRGE

SEQ ID NO: 28317 - protein, 9 aa, synthetic construct
  source 1..9: note = Seed: LVVVGARGV (KRAS G12R)
MVVVGRRGF

SEQ ID NO: 28318 - protein, 9 aa, synthetic construct
  source 1..9: note = Seed: LVVVGARGV (KRAS G12R)
MVVVGRRGG

SEQ ID NO: 28319 - protein, 9 aa, synthetic construct
  source 1..9: note = Seed: LVVVGARGV (KRAS G12R)
MVVVGRRGH

SEQ ID NO: 28320 - protein, 9 aa, synthetic construct
  source 1..9: note = Seed: LVVVGARGV (KRAS G12R)
MVVVGRRGI

SEQ ID NO: 28321 - protein, 9 aa, synthetic construct
  source 1..9: note = Seed: LVVVGARGV (KRAS G12R)
MVVVGRRGK

SEQ ID NO: 28322 - protein, 9 aa, synthetic construct
  source 1..9: note = Seed: LVVVGARGV (KRAS G12R)
MVVVGRRGL

SEQ ID NO: 28323 - protein, 9 aa, synthetic construct
  source 1..9: note = Seed: LVVVGARGV (KRAS G12R)
MVVVGRRGM

SEQ ID NO: 28324 - protein, 9 aa, synthetic construct
  source 1..9: note = Seed: LVVVGARGV (KRAS G12R)
MVVVGRRGN

SEQ ID NO: 28325 - protein, 9 aa, synthetic construct
  source 1..9: note = Seed: LVVVGARGV (KRAS G12R)
MVVVGRRGP

SEQ ID NO: 28326 - protein, 9 aa, synthetic construct
  source 1..9: note = Seed: LVVVGARGV (KRAS G12R)
MVVVGRRGQ

SEQ ID NO: 28327 - protein, 9 aa, synthetic construct
  source 1..9: note = Seed: LVVVGARGV (KRAS G12R)
MVVVGRRGR

SEQ ID NO: 28328 - protein, 9 aa, synthetic construct
  source 1..9: note = Seed: LVVVGARGV (KRAS G12R)
MVVVGRRGS

SEQ ID NO: 28329 - protein, 9 aa, synthetic construct
  source 1..9: note = Seed: LVVVGARGV (KRAS G12R)
MVVVGRRGT

SEQ ID NO: 28330 - protein, 9 aa, synthetic construct
  source 1..9: note = Seed: LVVVGARGV (KRAS G12R)
MVVVGRRGV

SEQ ID NO: 28331 - protein, 9 aa, synthetic construct
  source 1..9: note = Seed: LVVVGARGV (KRAS G12R)
MVVVGRRGW

SEQ ID NO: 28332 - protein, 9 aa, synthetic construct
  source 1..9: note = Seed: LVVVGARGV (KRAS G12R)
MVVVGRRGY

SEQ ID NO: 28333 - protein, 9 aa, synthetic construct
  source 1..9: note = Seed: LVVVGARGV (KRAS G12R)
MVVVGSRGA

SEQ ID NO: 28334 - protein, 9 aa, synthetic construct
  source 1..9: note = Seed: LVVVGARGV (KRAS G12R)
MVVVGSRGF

SEQ ID NO: 28335 - protein, 9 aa, synthetic construct
  source 1..9: note = Seed: LVVVGARGV (KRAS G12R)
MVVVGSRGI

SEQ ID NO: 28336 - protein, 9 aa, synthetic construct
  source 1..9: note = Seed: LVVVGARGV (KRAS G12R)
MVVVGSRGL

SEQ ID NO: 28337 - protein, 9 aa, synthetic construct
  source 1..9: note = Seed: LVVVGARGV (KRAS G12R)
MVVVGSRGM

SEQ ID NO: 28338 - protein, 9 aa, synthetic construct
  source 1..9: note = Seed: LVVVGARGV (KRAS G12R)
MVVVGSRGR

SEQ ID NO: 28339 - protein, 9 aa, synthetic construct
  source 1..9: note = Seed: LVVVGARGV (KRAS G12R)
MVVVGSRGS

SEQ ID NO: 28340 - protein, 9 aa, synthetic construct
  source 1..9: note = Seed: LVVVGARGV (KRAS G12R)
MVVVGSRGT

SEQ ID NO: 28341 - protein, 9 aa, synthetic construct
  source 1..9: note = Seed: LVVVGARGV (KRAS G12R)
MVVVGSRGV

SEQ ID NO: 28342 - protein, 9 aa, synthetic construct
  source 1..9: note = Seed: LVVVGARGV (KRAS G12R)
MVVVGSRGY

SEQ ID NO: 28343 - protein, 9 aa, synthetic construct
  source 1..9: note = Seed: LVVVGARGV (KRAS G12R)
MVVVGTRGA

SEQ ID NO: 28344 - protein, 9 aa, synthetic construct
  source 1..9: note = Seed: LVVVGARGV (KRAS G12R)
MVVVGTRGF

SEQ ID NO: 28345 - protein, 9 aa, synthetic construct
  source 1..9: note = Seed: LVVVGARGV (KRAS G12R)
MVVVGTRGI

SEQ ID NO: 28346 - protein, 9 aa, synthetic construct
  source 1..9: note = Seed: LVVVGARGV (KRAS G12R)
MVVVGTRGL

SEQ ID NO: 28347 - protein, 9 aa, synthetic construct
  source 1..9: note = Seed: LVVVGARGV (KRAS G12R)
MVVVGTRGM

SEQ ID NO: 28348 - protein, 9 aa, synthetic construct
  source 1..9: note = Seed: LVVVGARGV (KRAS G12R)
MVVVGTRGR

SEQ ID NO: 28349 - protein, 9 aa, synthetic construct
  source 1..9: note = Seed: LVVVGARGV (KRAS G12R)
MVVVGTRGS

SEQ ID NO: 28350 - protein, 9 aa, synthetic construct
  source 1..9: note = Seed: LVVVGARGV (KRAS G12R)
MVVVGTRGV

SEQ ID NO: 28351 - protein, 9 aa, synthetic construct
  source 1..9: note = Seed: LVVVGARGV (KRAS G12R)
MVVVGTRGY

SEQ ID NO: 28352 - protein, 9 aa, synthetic construct
  source 1..9: note = Seed: LVVVGARGV (KRAS G12R)
MVVVGVRGA

SEQ ID NO: 28353 - protein, 9 aa, synthetic construct
  source 1..9: note = Seed: LVVVGARGV (KRAS G12R)
MVVVGVRGF

SEQ ID NO: 28354 - protein, 9 aa, synthetic construct
  source 1..9: note = Seed: LVVVGARGV (KRAS G12R)
MVVVGVRGI

SEQ ID NO: 28355 - protein, 9 aa, synthetic construct
  source 1..9: note = Seed: LVVVGARGV (KRAS G12R)
MVVVGVRGL

SEQ ID NO: 28356 - protein, 9 aa, synthetic construct
  source 1..9: note = Seed: LVVVGARGV (KRAS G12R)
MVVVGVRGM

SEQ ID NO: 28357 - protein, 9 aa, synthetic construct
  source 1..9: note = Seed: LVVVGARGV (KRAS G12R)
MVVVGVRGQ

SEQ ID NO: 28358 - protein, 9 aa, synthetic construct
  source 1..9: note = Seed: LVVVGARGV (KRAS G12R)
MVVVGVRGR

SEQ ID NO: 28359 - protein, 9 aa, synthetic construct
  source 1..9: note = Seed: LVVVGARGV (KRAS G12R)
MVVVGVRGS

SEQ ID NO: 28360 - protein, 9 aa, synthetic construct
  source 1..9: note = Seed: LVVVGARGV (KRAS G12R)
MVVVGVRGV

SEQ ID NO: 28361 - protein, 9 aa, synthetic construct
  source 1..9: note = Seed: LVVVGARGV (KRAS G12R)
MVVVGVRGY

SEQ ID NO: 28362 - protein, 9 aa, synthetic construct
  source 1..9: note = Seed: LVVVGARGV (KRAS G12R)
MVVVGWRGR

SEQ ID NO: 28363 - protein, 9 aa, synthetic construct
  source 1..9: note = Seed: LVVVGARGV (KRAS G12R)
MVVWGARGA

SEQ ID NO: 28364 - protein, 9 aa, synthetic construct
  source 1..9: note = Seed: LVVVGARGV (KRAS G12R)
MVVWGARGF

SEQ ID NO: 28365 - protein, 9 aa, synthetic construct
  source 1..9: note = Seed: LVVVGARGV (KRAS G12R)
MVVWGARGI

SEQ ID NO: 28366 - protein, 9 aa, synthetic construct
  source 1..9: note = Seed: LVVVGARGV (KRAS G12R)
MVVWGARGK

SEQ ID NO: 28367 - protein, 9 aa, synthetic construct
  source 1..9: note = Seed: LVVVGARGV (KRAS G12R)
MVVWGARGL

SEQ ID NO: 28368 - protein, 9 aa, synthetic construct
  source 1..9: note = Seed: LVVVGARGV (KRAS G12R)
MVVWGARGM

SEQ ID NO: 28369 - protein, 9 aa, synthetic construct
  source 1..9: note = Seed: LVVVGARGV (KRAS G12R)
MVVWGARGR

SEQ ID NO: 28370 - protein, 9 aa, synthetic construct
  source 1..9: note = Seed: LVVVGARGV (KRAS G12R)
MVVWGARGV

SEQ ID NO: 28371 - protein, 9 aa, synthetic construct
  source 1..9: note = Seed: LVVVGARGV (KRAS G12R)
MVVWGARGY

SEQ ID NO: 28372 - protein, 9 aa, synthetic construct
  source 1..9: note = Seed: LVVVGARGV (KRAS G12R)
MVVWGFRGR

SEQ ID NO: 28373 - protein, 9 aa, synthetic construct
  source 1..9: note = Seed: LVVVGARGV (KRAS G12R)
MVVWGGRGL

SEQ ID NO: 28374 - protein, 9 aa, synthetic construct
  source 1..9: note = Seed: LVVVGARGV (KRAS G12R)
MVVWGGRGR

SEQ ID NO: 28375 - protein, 9 aa, synthetic construct
  source 1..9: note = Seed: LVVVGARGV (KRAS G12R)
MVVWGHRGA

SEQ ID NO: 28376 - protein, 9 aa, synthetic construct
  source 1..9: note = Seed: LVVVGARGV (KRAS G12R)
MVVWGHRGF

SEQ ID NO: 28377 - protein, 9 aa, synthetic construct
  source 1..9: note = Seed: LVVVGARGV (KRAS G12R)
MVVWGHRGH

SEQ ID NO: 28378 - protein, 9 aa, synthetic construct
  source 1..9: note = Seed: LVVVGARGV (KRAS G12R)
MVVWGHRGI

SEQ ID NO: 28379 - protein, 9 aa, synthetic construct
  source 1..9: note = Seed: LVVVGARGV (KRAS G12R)
MVVWGHRGK

SEQ ID NO: 28380 - protein, 9 aa, synthetic construct
  source 1..9: note = Seed: LVVVGARGV (KRAS G12R)
MVVWGHRGL

SEQ ID NO: 28381 - protein, 9 aa, synthetic construct
  source 1..9: note = Seed: LVVVGARGV (KRAS G12R)
MVVWGHRGM

SEQ ID NO: 28382 - protein, 9 aa, synthetic construct
  source 1..9: note = Seed: LVVVGARGV (KRAS G12R)
MVVWGHRGR

SEQ ID NO: 28383 - protein, 9 aa, synthetic construct
  source 1..9: note = Seed: LVVVGARGV (KRAS G12R)
MVVWGHRGS

SEQ ID NO: 28384 - protein, 9 aa, synthetic construct
  source 1..9: note = Seed: LVVVGARGV (KRAS G12R)
MVVWGHRGV

SEQ ID NO: 28385 - protein, 9 aa, synthetic construct
  source 1..9: note = Seed: LVVVGARGV (KRAS G12R)
MVVWGHRGY

SEQ ID NO: 28386 - protein, 9 aa, synthetic construct
  source 1..9: note = Seed: LVVVGARGV (KRAS G12R)
MVVWGIRGA

SEQ ID NO: 28387 - protein, 9 aa, synthetic construct
  source 1..9: note = Seed: LVVVGARGV (KRAS G12R)
MVVWGIRGF

SEQ ID NO: 28388 - protein, 9 aa, synthetic construct
  source 1..9: note = Seed: LVVVGARGV (KRAS G12R)
MVVWGIRGI

SEQ ID NO: 28389 - protein, 9 aa, synthetic construct
  source 1..9: note = Seed: LVVVGARGV (KRAS G12R)
MVVWGIRGK

SEQ ID NO: 28390 - protein, 9 aa, synthetic construct
  source 1..9: note = Seed: LVVVGARGV (KRAS G12R)
MVVWGIRGL

SEQ ID NO: 28391 - protein, 9 aa, synthetic construct
  source 1..9: note = Seed: LVVVGARGV (KRAS G12R)
MVVWGIRGM

SEQ ID NO: 28392 - protein, 9 aa, synthetic construct
  source 1..9: note = Seed: LVVVGARGV (KRAS G12R)
MVVWGIRGR

SEQ ID NO: 28393 - protein, 9 aa, synthetic construct
  source 1..9: note = Seed: LVVVGARGV (KRAS G12R)
MVVWGIRGV

SEQ ID NO: 28394 - protein, 9 aa, synthetic construct
  source 1..9: note = Seed: LVVVGARGV (KRAS G12R)
MVVWGIRGY

SEQ ID NO: 28395 - protein, 9 aa, synthetic construct
  source 1..9: note = Seed: LVVVGARGV (KRAS G12R)
MVVWGKRGA

SEQ ID NO: 28396 - protein, 9 aa, synthetic construct
  source 1..9: note = Seed: LVVVGARGV (KRAS G12R)
MVVWGKRGF

SEQ ID NO: 28397 - protein, 9 aa, synthetic construct
  source 1..9: note = Seed: LVVVGARGV (KRAS G12R)
MVVWGKRGG

SEQ ID NO: 28398 - protein, 9 aa, synthetic construct
  source 1..9: note = Seed: LVVVGARGV (KRAS G12R)
MVVWGKRGH

SEQ ID NO: 28399 - protein, 9 aa, synthetic construct
  source 1..9: note = Seed: LVVVGARGV (KRAS G12R)
MVVWGKRGI

SEQ ID NO: 28400 - protein, 9 aa, synthetic construct
  source 1..9: note = Seed: LVVVGARGV (KRAS G12R)
MVVWGKRGK

SEQ ID NO: 28401 - protein, 9 aa, synthetic construct
  source 1..9: note = Seed: LVVVGARGV (KRAS G12R)
MVVWGKRGL

SEQ ID NO: 28402 - protein, 9 aa, synthetic construct
  source 1..9: note = Seed: LVVVGARGV (KRAS G12R)
MVVWGKRGM

SEQ ID NO: 28403 - protein, 9 aa, synthetic construct
  source 1..9: note = Seed: LVVVGARGV (KRAS G12R)
MVVWGKRGN

SEQ ID NO: 28404 - protein, 9 aa, synthetic construct
  source 1..9: note = Seed: LVVVGARGV (KRAS G12R)
MVVWGKRGP

SEQ ID NO: 28405 - protein, 9 aa, synthetic construct
  source 1..9: note = Seed: LVVVGARGV (KRAS G12R)
MVVWGKRGQ

SEQ ID NO: 28406 - protein, 9 aa, synthetic construct
  source 1..9: note = Seed: LVVVGARGV (KRAS G12R)
MVVWGKRGR

SEQ ID NO: 28407 - protein, 9 aa, synthetic construct
  source 1..9: note = Seed: LVVVGARGV (KRAS G12R)
MVVWGKRGS

SEQ ID NO: 28408 - protein, 9 aa, synthetic construct
  source 1..9: note = Seed: LVVVGARGV (KRAS G12R)
MVVWGKRGT

SEQ ID NO: 28409 - protein, 9 aa, synthetic construct
  source 1..9: note = Seed: LVVVGARGV (KRAS G12R)
MVVWGKRGV

SEQ ID NO: 28410 - protein, 9 aa, synthetic construct
  source 1..9: note = Seed: LVVVGARGV (KRAS G12R)
MVVWGKRGW

SEQ ID NO: 28411 - protein, 9 aa, synthetic construct
  source 1..9: note = Seed: LVVVGARGV (KRAS G12R)
MVVWGKRGY

SEQ ID NO: 28412 - protein, 9 aa, synthetic construct
  source 1..9: note = Seed: LVVVGARGV (KRAS G12R)
MVVWGLRGK

SEQ ID NO: 28413 - protein, 9 aa, synthetic construct
  source 1..9: note = Seed: LVVVGARGV (KRAS G12R)
MVVWGLRGM

SEQ ID NO: 28414 - protein, 9 aa, synthetic construct
  source 1..9: note = Seed: LVVVGARGV (KRAS G12R)
MVVWGLRGR

SEQ ID NO: 28415 - protein, 9 aa, synthetic construct
  source 1..9: note = Seed: LVVVGARGV (KRAS G12R)
MVVWGMRGK

SEQ ID NO: 28416 - protein, 9 aa, synthetic construct
  source 1..9: note = Seed: LVVVGARGV (KRAS G12R)
MVVWGMRGL

SEQ ID NO: 28417 - protein, 9 aa, synthetic construct
  source 1..9: note = Seed: LVVVGARGV (KRAS G12R)
MVVWGMRGM

SEQ ID NO: 28418 - protein, 9 aa, synthetic construct
  source 1..9: note = Seed: LVVVGARGV (KRAS G12R)
MVVWGMRGR

SEQ ID NO: 28419 - protein, 9 aa, synthetic construct
  source 1..9: note = Seed: LVVVGARGV (KRAS G12R)
MVVWGMRGY

SEQ ID NO: 28420 - protein, 9 aa, synthetic construct
  source 1..9: note = Seed: LVVVGARGV (KRAS G12R)
MVVWGNRGA

SEQ ID NO: 28421 - protein, 9 aa, synthetic construct
  source 1..9: note = Seed: LVVVGARGV (KRAS G12R)
MVVWGNRGF

SEQ ID NO: 28422 - protein, 9 aa, synthetic construct
  source 1..9: note = Seed: LVVVGARGV (KRAS G12R)
MVVWGNRGI

SEQ ID NO: 28423 - protein, 9 aa, synthetic construct
  source 1..9: note = Seed: LVVVGARGV (KRAS G12R)
MVVWGNRGK

SEQ ID NO: 28424 - protein, 9 aa, synthetic construct
  source 1..9: note = Seed: LVVVGARGV (KRAS G12R)
MVVWGNRGL

SEQ ID NO: 28425 - protein, 9 aa, synthetic construct
  source 1..9: note = Seed: LVVVGARGV (KRAS G12R)
MVVWGNRGM

SEQ ID NO: 28426 - protein, 9 aa, synthetic construct
  source 1..9: note = Seed: LVVVGARGV (KRAS G12R)
MVVWGNRGR

SEQ ID NO: 28427 - protein, 9 aa, synthetic construct
  source 1..9: note = Seed: LVVVGARGV (KRAS G12R)
MVVWGNRGV

SEQ ID NO: 28428 - protein, 9 aa, synthetic construct
  source 1..9: note = Seed: LVVVGARGV (KRAS G12R)
MVVWGNRGY

SEQ ID NO: 28429 - protein, 9 aa, synthetic construct
  source 1..9: note = Seed: LVVVGARGV (KRAS G12R)
MVVWGPRGK

SEQ ID NO: 28430 - protein, 9 aa, synthetic construct
  source 1..9: note = Seed: LVVVGARGV (KRAS G12R)
MVVWGPRGR

SEQ ID NO: 28431 - protein, 9 aa, synthetic construct
  source 1..9: note = Seed: LVVVGARGV (KRAS G12R)
MVVWGQRGR

SEQ ID NO: 28432 - protein, 9 aa, synthetic construct
  source 1..9: note = Seed: LVVVGARGV (KRAS G12R)
MVVWGRRGA

SEQ ID NO: 28433 - protein, 9 aa, synthetic construct
  source 1..9: note = Seed: LVVVGARGV (KRAS G12R)
MVVWGRRGC

SEQ ID NO: 28434 - protein, 9 aa, synthetic construct
  source 1..9: note = Seed: LVVVGARGV (KRAS G12R)
MVVWGRRGF

SEQ ID NO: 28435 - protein, 9 aa, synthetic construct
  source 1..9: note = Seed: LVVVGARGV (KRAS G12R)
MVVWGRRGG

SEQ ID NO: 28436 - protein, 9 aa, synthetic construct
  source 1..9: note = Seed: LVVVGARGV (KRAS G12R)
MVVWGRRGH

SEQ ID NO: 28437 - protein, 9 aa, synthetic construct
  source 1..9: note = Seed: LVVVGARGV (KRAS G12R)
MVVWGRRGI

SEQ ID NO: 28438 - protein, 9 aa, synthetic construct
  source 1..9: note = Seed: LVVVGARGV (KRAS G12R)
MVVWGRRGK

SEQ ID NO: 28439 - protein, 9 aa, synthetic construct
  source 1..9: note = Seed: LVVVGARGV (KRAS G12R)
MVVWGRRGL

SEQ ID NO: 28440 - protein, 9 aa, synthetic construct
  source 1..9: note = Seed: LVVVGARGV (KRAS G12R)
MVVWGRRGM

SEQ ID NO: 28441 - protein, 9 aa, synthetic construct
  source 1..9: note = Seed: LVVVGARGV (KRAS G12R)
MVVWGRRGN

SEQ ID NO: 28442 - protein, 9 aa, synthetic construct
  source 1..9: note = Seed: LVVVGARGV (KRAS G12R)
MVVWGRRGP

SEQ ID NO: 28443 - protein, 9 aa, synthetic construct
  source 1..9: note = Seed: LVVVGARGV (KRAS G12R)
MVVWGRRGQ

SEQ ID NO: 28444 - protein, 9 aa, synthetic construct
  source 1..9: note = Seed: LVVVGARGV (KRAS G12R)
MVVWGRRGR

SEQ ID NO: 28445 - protein, 9 aa, synthetic construct
  source 1..9: note = Seed: LVVVGARGV (KRAS G12R)
MVVWGRRGS

SEQ ID NO: 28446 - protein, 9 aa, synthetic construct
  source 1..9: note = Seed: LVVVGARGV (KRAS G12R)
MVVWGRRGT

SEQ ID NO: 28447 - protein, 9 aa, synthetic construct
  source 1..9: note = Seed: LVVVGARGV (KRAS G12R)
MVVWGRRGV

SEQ ID NO: 28448 - protein, 9 aa, synthetic construct
  source 1..9: note = Seed: LVVVGARGV (KRAS G12R)
MVVWGRRGW

SEQ ID NO: 28449 - protein, 9 aa, synthetic construct
  source 1..9: note = Seed: LVVVGARGV (KRAS G12R)
MVVWGRRGY

SEQ ID NO: 28450 - protein, 9 aa, synthetic construct
  source 1..9: note = Seed: LVVVGARGV (KRAS G12R)
MVVWGSRGA

SEQ ID NO: 28451 - protein, 9 aa, synthetic construct
  source 1..9: note = Seed: LVVVGARGV (KRAS G12R)
MVVWGSRGF

SEQ ID NO: 28452 - protein, 9 aa, synthetic construct
  source 1..9: note = Seed: LVVVGARGV (KRAS G12R)
MVVWGSRGI

SEQ ID NO: 28453 - protein, 9 aa, synthetic construct
  source 1..9: note = Seed: LVVVGARGV (KRAS G12R)
MVVWGSRGK

SEQ ID NO: 28454 - protein, 9 aa, synthetic construct
  source 1..9: note = Seed: LVVVGARGV (KRAS G12R)
MVVWGSRGL

SEQ ID NO: 28455 - protein, 9 aa, synthetic construct
  source 1..9: note = Seed: LVVVGARGV (KRAS G12R)
MVVWGSRGM

SEQ ID NO: 28456 - protein, 9 aa, synthetic construct
  source 1..9: note = Seed: LVVVGARGV (KRAS G12R)
MVVWGSRGR

SEQ ID NO: 28457 - protein, 9 aa, synthetic construct
  source 1..9: note = Seed: LVVVGARGV (KRAS G12R)
MVVWGSRGV

SEQ ID NO: 28458 - protein, 9 aa, synthetic construct
  source 1..9: note = Seed: LVVVGARGV (KRAS G12R)
MVVWGSRGY

SEQ ID NO: 28459 - protein, 9 aa, synthetic construct
  source 1..9: note = Seed: LVVVGARGV (KRAS G12R)
MVVWGTRGF

SEQ ID NO: 28460 - protein, 9 aa, synthetic construct
  source 1..9: note = Seed: LVVVGARGV (KRAS G12R)
MVVWGTRGI

SEQ ID NO: 28461 - protein, 9 aa, synthetic construct
  source 1..9: note = Seed: LVVVGARGV (KRAS G12R)
MVVWGTRGK

SEQ ID NO: 28462 - protein, 9 aa, synthetic construct
  source 1..9: note = Seed: LVVVGARGV (KRAS G12R)
MVVWGTRGL

SEQ ID NO: 28463 - protein, 9 aa, synthetic construct
  source 1..9: note = Seed: LVVVGARGV (KRAS G12R)
MVVWGTRGM

SEQ ID NO: 28464 - protein, 9 aa, synthetic construct
  source 1..9: note = Seed: LVVVGARGV (KRAS G12R)
MVVWGTRGR

SEQ ID NO: 28465 - protein, 9 aa, synthetic construct
  source 1..9: note = Seed: LVVVGARGV (KRAS G12R)
MVVWGTRGV

SEQ ID NO: 28466 - protein, 9 aa, synthetic construct
  source 1..9: note = Seed: LVVVGARGV (KRAS G12R)
MVVWGVRGA

SEQ ID NO: 28467 - protein, 9 aa, synthetic construct
  source 1..9: note = Seed: LVVVGARGV (KRAS G12R)
MVVWGVRGF

SEQ ID NO: 28468 - protein, 9 aa, synthetic construct
  source 1..9: note = Seed: LVVVGARGV (KRAS G12R)
MVVWGVRGI

SEQ ID NO: 28469 - protein, 9 aa, synthetic construct
  source 1..9: note = Seed: LVVVGARGV (KRAS G12R)
MVVWGVRGK

SEQ ID NO: 28470 - protein, 9 aa, synthetic construct
  source 1..9: note = Seed: LVVVGARGV (KRAS G12R)
MVVWGVRGL

SEQ ID NO: 28471 - protein, 9 aa, synthetic construct
  source 1..9: note = Seed: LVVVGARGV (KRAS G12R)
MVVWGVRGM

SEQ ID NO: 28472 - protein, 9 aa, synthetic construct
  source 1..9: note = Seed: LVVVGARGV (KRAS G12R)
MVVWGVRGR

SEQ ID NO: 28473 - protein, 9 aa, synthetic construct
  source 1..9: note = Seed: LVVVGARGV (KRAS G12R)
MVVWGVRGY

SEQ ID NO: 28474 - protein, 9 aa, synthetic construct
  source 1..9: note = Seed: LVVVGARGV (KRAS G12R)
MVVWGWRGR

SEQ ID NO: 28475 - protein, 9 aa, synthetic construct
  source 1..9: note = Seed: LVVVGARGV (KRAS G12R)
MVVWGYRGR

SEQ ID NO: 28476 - protein, 9 aa, synthetic construct
  source 1..9: note = Seed: LVVVGARGV (KRAS G12R)
MVVYGARGA

SEQ ID NO: 28477 - protein, 9 aa, synthetic construct
  source 1..9: note = Seed: LVVVGARGV (KRAS G12R)
MVVYGARGF

SEQ ID NO: 28478 - protein, 9 aa, synthetic construct
  source 1..9: note = Seed: LVVVGARGV (KRAS G12R)
MVVYGARGH

SEQ ID NO: 28479 - protein, 9 aa, synthetic construct
  source 1..9: note = Seed: LVVVGARGV (KRAS G12R)
MVVYGARGI

SEQ ID NO: 28480 - protein, 9 aa, synthetic construct
  source 1..9: note = Seed: LVVVGARGV (KRAS G12R)
MVVYGARGK

SEQ ID NO: 28481 - protein, 9 aa, synthetic construct
  source 1..9: note = Seed: LVVVGARGV (KRAS G12R)
MVVYGARGL

SEQ ID NO: 28482 - protein, 9 aa, synthetic construct
  source 1..9: note = Seed: LVVVGARGV (KRAS G12R)
MVVYGARGM

SEQ ID NO: 28483 - protein, 9 aa, synthetic construct
  source 1..9: note = Seed: LVVVGARGV (KRAS G12R)
MVVYGARGR

SEQ ID NO: 28484 - protein, 9 aa, synthetic construct
  source 1..9: note = Seed: LVVVGARGV (KRAS G12R)
MVVYGARGT

SEQ ID NO: 28485 - protein, 9 aa, synthetic construct
  source 1..9: note = Seed: LVVVGARGV (KRAS G12R)
MVVYGARGV

SEQ ID NO: 28486 - protein, 9 aa, synthetic construct
  source 1..9: note = Seed: LVVVGARGV (KRAS G12R)
MVVYGARGY

SEQ ID NO: 28487 - protein, 9 aa, synthetic construct
  source 1..9: note = Seed: LVVVGARGV (KRAS G12R)
MVVYGCRGR

SEQ ID NO: 28488 - protein, 9 aa, synthetic construct
  source 1..9: note = Seed: LVVVGARGV (KRAS G12R)
MVVYGDRGI

SEQ ID NO: 28489 - protein, 9 aa, synthetic construct
  source 1..9: note = Seed: LVVVGARGV (KRAS G12R)
MVVYGDRGL

SEQ ID NO: 28490 - protein, 9 aa, synthetic construct
  source 1..9: note = Seed: LVVVGARGV (KRAS G12R)
MVVYGDRGV

SEQ ID NO: 28491 - protein, 9 aa, synthetic construct
  source 1..9: note = Seed: LVVVGARGV (KRAS G12R)
MVVYGGRGA

SEQ ID NO: 28492 - protein, 9 aa, synthetic construct
  source 1..9: note = Seed: LVVVGARGV (KRAS G12R)
MVVYGGRGF

SEQ ID NO: 28493 - protein, 9 aa, synthetic construct
  source 1..9: note = Seed: LVVVGARGV (KRAS G12R)
MVVYGGRGI

SEQ ID NO: 28494 - protein, 9 aa, synthetic construct
  source 1..9: note = Seed: LVVVGARGV (KRAS G12R)
MVVYGGRGL

SEQ ID NO: 28495 - protein, 9 aa, synthetic construct
  source 1..9: note = Seed: LVVVGARGV (KRAS G12R)
MVVYGGRGM

SEQ ID NO: 28496 - protein, 9 aa, synthetic construct
  source 1..9: note = Seed: LVVVGARGV (KRAS G12R)
MVVYGGRGR

SEQ ID NO: 28497 - protein, 9 aa, synthetic construct
  source 1..9: note = Seed: LVVVGARGV (KRAS G12R)
MVVYGGRGT

SEQ ID NO: 28498 - protein, 9 aa, synthetic construct
  source 1..9: note = Seed: LVVVGARGV (KRAS G12R)
MVVYGGRGV

SEQ ID NO: 28499 - protein, 9 aa, synthetic construct
  source 1..9: note = Seed: LVVVGARGV (KRAS G12R)
MVVYGHRGA

SEQ ID NO: 28500 - protein, 9 aa, synthetic construct
  source 1..9: note = Seed: LVVVGARGV (KRAS G12R)
MVVYGHRGF

SEQ ID NO: 28501 - protein, 9 aa, synthetic construct
  source 1..9: note = Seed: LVVVGARGV (KRAS G12R)
MVVYGHRGH

SEQ ID NO: 28502 - protein, 9 aa, synthetic construct
  source 1..9: note = Seed: LVVVGARGV (KRAS G12R)
MVVYGHRGI

SEQ ID NO: 28503 - protein, 9 aa, synthetic construct
  source 1..9: note = Seed: LVVVGARGV (KRAS G12R)
MVVYGHRGK

SEQ ID NO: 28504 - protein, 9 aa, synthetic construct
  source 1..9: note = Seed: LVVVGARGV (KRAS G12R)
MVVYGHRGL

SEQ ID NO: 28505 - protein, 9 aa, synthetic construct
  source 1..9: note = Seed: LVVVGARGV (KRAS G12R)
MVVYGHRGM

SEQ ID NO: 28506 - protein, 9 aa, synthetic construct
  source 1..9: note = Seed: LVVVGARGV (KRAS G12R)
MVVYGHRGQ

SEQ ID NO: 28507 - protein, 9 aa, synthetic construct
  source 1..9: note = Seed: LVVVGARGV (KRAS G12R)
MVVYGHRGR

SEQ ID NO: 28508 - protein, 9 aa, synthetic construct
  source 1..9: note = Seed: LVVVGARGV (KRAS G12R)
MVVYGHRGS

SEQ ID NO: 28509 - protein, 9 aa, synthetic construct
  source 1..9: note = Seed: LVVVGARGV (KRAS G12R)
MVVYGHRGV

SEQ ID NO: 28510 - protein, 9 aa, synthetic construct
  source 1..9: note = Seed: LVVVGARGV (KRAS G12R)
MVVYGHRGY

SEQ ID NO: 28511 - protein, 9 aa, synthetic construct
  source 1..9: note = Seed: LVVVGARGV (KRAS G12R)
MVVYGIRGA

SEQ ID NO: 28512 - protein, 9 aa, synthetic construct
  source 1..9: note = Seed: LVVVGARGV (KRAS G12R)
MVVYGIRGF

SEQ ID NO: 28513 - protein, 9 aa, synthetic construct
  source 1..9: note = Seed: LVVVGARGV (KRAS G12R)
MVVYGIRGI

SEQ ID NO: 28514 - protein, 9 aa, synthetic construct
  source 1..9: note = Seed: LVVVGARGV (KRAS G12R)
MVVYGIRGK

SEQ ID NO: 28515 - protein, 9 aa, synthetic construct
  source 1..9: note = Seed: LVVVGARGV (KRAS G12R)
MVVYGIRGL

SEQ ID NO: 28516 - protein, 9 aa, synthetic construct
  source 1..9: note = Seed: LVVVGARGV (KRAS G12R)
MVVYGIRGM

SEQ ID NO: 28517 - protein, 9 aa, synthetic construct
  source 1..9: note = Seed: LVVVGARGV (KRAS G12R)
MVVYGIRGQ

SEQ ID NO: 28518 - protein, 9 aa, synthetic construct
  source 1..9: note = Seed: LVVVGARGV (KRAS G12R)
MVVYGIRGR

SEQ ID NO: 28519 - protein, 9 aa, synthetic construct
  source 1..9: note = Seed: LVVVGARGV (KRAS G12R)
MVVYGIRGV

SEQ ID NO: 28520 - protein, 9 aa, synthetic construct
  source 1..9: note = Seed: LVVVGARGV (KRAS G12R)
MVVYGIRGY

SEQ ID NO: 28521 - protein, 9 aa, synthetic construct
  source 1..9: note = Seed: LVVVGARGV (KRAS G12R)
MVVYGKRGA

SEQ ID NO: 28522 - protein, 9 aa, synthetic construct
  source 1..9: note = Seed: LVVVGARGV (KRAS G12R)
MVVYGKRGF

SEQ ID NO: 28523 - protein, 9 aa, synthetic construct
  source 1..9: note = Seed: LVVVGARGV (KRAS G12R)
MVVYGKRGG

SEQ ID NO: 28524 - protein, 9 aa, synthetic construct
  source 1..9: note = Seed: LVVVGARGV (KRAS G12R)
MVVYGKRGH

SEQ ID NO: 28525 - protein, 9 aa, synthetic construct
  source 1..9: note = Seed: LVVVGARGV (KRAS G12R)
MVVYGKRGI

SEQ ID NO: 28526 - protein, 9 aa, synthetic construct
  source 1..9: note = Seed: LVVVGARGV (KRAS G12R)
MVVYGKRGK

SEQ ID NO: 28527 - protein, 9 aa, synthetic construct
  source 1..9: note = Seed: LVVVGARGV (KRAS G12R)
MVVYGKRGL

SEQ ID NO: 28528 - protein, 9 aa, synthetic construct
  source 1..9: note = Seed: LVVVGARGV (KRAS G12R)
MVVYGKRGM

SEQ ID NO: 28529 - protein, 9 aa, synthetic construct
  source 1..9: note = Seed: LVVVGARGV (KRAS G12R)
MVVYGKRGN

SEQ ID NO: 28530 - protein, 9 aa, synthetic construct
  source 1..9: note = Seed: LVVVGARGV (KRAS G12R)
MVVYGKRGP

SEQ ID NO: 28531 - protein, 9 aa, synthetic construct
  source 1..9: note = Seed: LVVVGARGV (KRAS G12R)
MVVYGKRGQ

SEQ ID NO: 28532 - protein, 9 aa, synthetic construct
  source 1..9: note = Seed: LVVVGARGV (KRAS G12R)
MVVYGKRGR

SEQ ID NO: 28533 - protein, 9 aa, synthetic construct
  source 1..9: note = Seed: LVVVGARGV (KRAS G12R)
MVVYGKRGS

SEQ ID NO: 28534 - protein, 9 aa, synthetic construct
  source 1..9: note = Seed: LVVVGARGV (KRAS G12R)
MVVYGKRGT

SEQ ID NO: 28535 - protein, 9 aa, synthetic construct
  source 1..9: note = Seed: LVVVGARGV (KRAS G12R)
MVVYGKRGV

SEQ ID NO: 28536 - protein, 9 aa, synthetic construct
  source 1..9: note = Seed: LVVVGARGV (KRAS G12R)
MVVYGKRGW

SEQ ID NO: 28537 - protein, 9 aa, synthetic construct
  source 1..9: note = Seed: LVVVGARGV (KRAS G12R)
MVVYGKRGY

SEQ ID NO: 28538 - protein, 9 aa, synthetic construct
  source 1..9: note = Seed: LVVVGARGV (KRAS G12R)
MVVYGLRGA

SEQ ID NO: 28539 - protein, 9 aa, synthetic construct
  source 1..9: note = Seed: LVVVGARGV (KRAS G12R)
MVVYGLRGK

SEQ ID NO: 28540 - protein, 9 aa, synthetic construct
  source 1..9: note = Seed: LVVVGARGV (KRAS G12R)
MVVYGLRGL

SEQ ID NO: 28541 - protein, 9 aa, synthetic construct
  source 1..9: note = Seed: LVVVGARGV (KRAS G12R)
MVVYGLRGM

SEQ ID NO: 28542 - protein, 9 aa, synthetic construct
  source 1..9: note = Seed: LVVVGARGV (KRAS G12R)
MVVYGLRGQ

SEQ ID NO: 28543 - protein, 9 aa, synthetic construct
  source 1..9: note = Seed: LVVVGARGV (KRAS G12R)
MVVYGLRGR

SEQ ID NO: 28544 - protein, 9 aa, synthetic construct
  source 1..9: note = Seed: LVVVGARGV (KRAS G12R)
MVVYGMRGL

SEQ ID NO: 28545 - protein, 9 aa, synthetic construct
  source 1..9: note = Seed: LVVVGARGV (KRAS G12R)
MVVYGMRGM

SEQ ID NO: 28546 - protein, 9 aa, synthetic construct
  source 1..9: note = Seed: LVVVGARGV (KRAS G12R)
MVVYGMRGR

SEQ ID NO: 28547 - protein, 9 aa, synthetic construct
  source 1..9: note = Seed: LVVVGARGV (KRAS G12R)
MVVYGNRGA

SEQ ID NO: 28548 - protein, 9 aa, synthetic construct
  source 1..9: note = Seed: LVVVGARGV (KRAS G12R)
MVVYGNRGF

SEQ ID NO: 28549 - protein, 9 aa, synthetic construct
  source 1..9: note = Seed: LVVVGARGV (KRAS G12R)
MVVYGNRGI

SEQ ID NO: 28550 - protein, 9 aa, synthetic construct
  source 1..9: note = Seed: LVVVGARGV (KRAS G12R)
MVVYGNRGL

SEQ ID NO: 28551 - protein, 9 aa, synthetic construct
  source 1..9: note = Seed: LVVVGARGV (KRAS G12R)
MVVYGNRGM

SEQ ID NO: 28552 - protein, 9 aa, synthetic construct
  source 1..9: note = Seed: LVVVGARGV (KRAS G12R)
MVVYGNRGR

SEQ ID NO: 28553 - protein, 9 aa, synthetic construct
  source 1..9: note = Seed: LVVVGARGV (KRAS G12R)
MVVYGNRGS

SEQ ID NO: 28554 - protein, 9 aa, synthetic construct
  source 1..9: note = Seed: LVVVGARGV (KRAS G12R)
MVVYGNRGT

SEQ ID NO: 28555 - protein, 9 aa, synthetic construct
  source 1..9: note = Seed: LVVVGARGV (KRAS G12R)
MVVYGNRGV

SEQ ID NO: 28556 - protein, 9 aa, synthetic construct
  source 1..9: note = Seed: LVVVGARGV (KRAS G12R)
MVVYGNRGY

SEQ ID NO: 28557 - protein, 9 aa, synthetic construct
  source 1..9: note = Seed: LVVVGARGV (KRAS G12R)
MVVYGPRGL

SEQ ID NO: 28558 - protein, 9 aa, synthetic construct
  source 1..9: note = Seed: LVVVGARGV (KRAS G12R)
MVVYGPRGR

SEQ ID NO: 28559 - protein, 9 aa, synthetic construct
  source 1..9: note = Seed: LVVVGARGV (KRAS G12R)
MVVYGQRGM

SEQ ID NO: 28560 - protein, 9 aa, synthetic construct
  source 1..9: note = Seed: LVVVGARGV (KRAS G12R)
MVVYGQRGR

SEQ ID NO: 28561 - protein, 9 aa, synthetic construct
  source 1..9: note = Seed: LVVVGARGV (KRAS G12R)
MVVYGRRGA

SEQ ID NO: 28562 - protein, 9 aa, synthetic construct
  source 1..9: note = Seed: LVVVGARGV (KRAS G12R)
MVVYGRRGC

SEQ ID NO: 28563 - protein, 9 aa, synthetic construct
  source 1..9: note = Seed: LVVVGARGV (KRAS G12R)
MVVYGRRGF

SEQ ID NO: 28564 - protein, 9 aa, synthetic construct
  source 1..9: note = Seed: LVVVGARGV (KRAS G12R)
MVVYGRRGG

SEQ ID NO: 28565 - protein, 9 aa, synthetic construct
  source 1..9: note = Seed: LVVVGARGV (KRAS G12R)
MVVYGRRGH

SEQ ID NO: 28566 - protein, 9 aa, synthetic construct
  source 1..9: note = Seed: LVVVGARGV (KRAS G12R)
MVVYGRRGI

SEQ ID NO: 28567 - protein, 9 aa, synthetic construct
  source 1..9: note = Seed: LVVVGARGV (KRAS G12R)
MVVYGRRGK

SEQ ID NO: 28568 - protein, 9 aa, synthetic construct
  source 1..9: note = Seed: LVVVGARGV (KRAS G12R)
MVVYGRRGL

SEQ ID NO: 28569 - protein, 9 aa, synthetic construct
  source 1..9: note = Seed: LVVVGARGV (KRAS G12R)
MVVYGRRGM

SEQ ID NO: 28570 - protein, 9 aa, synthetic construct
  source 1..9: note = Seed: LVVVGARGV (KRAS G12R)
MVVYGRRGN

SEQ ID NO: 28571 - protein, 9 aa, synthetic construct
  source 1..9: note = Seed: LVVVGARGV (KRAS G12R)
MVVYGRRGP

SEQ ID NO: 28572 - protein, 9 aa, synthetic construct
  source 1..9: note = Seed: LVVVGARGV (KRAS G12R)
MVVYGRRGQ

SEQ ID NO: 28573 - protein, 9 aa, synthetic construct
  source 1..9: note = Seed: LVVVGARGV (KRAS G12R)
MVVYGRRGR

SEQ ID NO: 28574 - protein, 9 aa, synthetic construct
  source 1..9: note = Seed: LVVVGARGV (KRAS G12R)
MVVYGRRGS

SEQ ID NO: 28575 - protein, 9 aa, synthetic construct
  source 1..9: note = Seed: LVVVGARGV (KRAS G12R)
MVVYGRRGT

SEQ ID NO: 28576 - protein, 9 aa, synthetic construct
  source 1..9: note = Seed: LVVVGARGV (KRAS G12R)
MVVYGRRGV

SEQ ID NO: 28577 - protein, 9 aa, synthetic construct
  source 1..9: note = Seed: LVVVGARGV (KRAS G12R)
MVVYGRRGW

SEQ ID NO: 28578 - protein, 9 aa, synthetic construct
  source 1..9: note = Seed: LVVVGARGV (KRAS G12R)
MVVYGRRGY

SEQ ID NO: 28579 - protein, 9 aa, synthetic construct
  source 1..9: note = Seed: LVVVGARGV (KRAS G12R)
MVVYGSRGA

SEQ ID NO: 28580 - protein, 9 aa, synthetic construct
  source 1..9: note = Seed: LVVVGARGV (KRAS G12R)
MVVYGSRGF

SEQ ID NO: 28581 - protein, 9 aa, synthetic construct
  source 1..9: note = Seed: LVVVGARGV (KRAS G12R)
MVVYGSRGI

SEQ ID NO: 28582 - protein, 9 aa, synthetic construct
  source 1..9: note = Seed: LVVVGARGV (KRAS G12R)
MVVYGSRGK

SEQ ID NO: 28583 - protein, 9 aa, synthetic construct
  source 1..9: note = Seed: LVVVGARGV (KRAS G12R)
MVVYGSRGL

SEQ ID NO: 28584 - protein, 9 aa, synthetic construct
  source 1..9: note = Seed: LVVVGARGV (KRAS G12R)
MVVYGSRGM

SEQ ID NO: 28585 - protein, 9 aa, synthetic construct
  source 1..9: note = Seed: LVVVGARGV (KRAS G12R)
MVVYGSRGR

SEQ ID NO: 28586 - protein, 9 aa, synthetic construct
  source 1..9: note = Seed: LVVVGARGV (KRAS G12R)
MVVYGSRGS

SEQ ID NO: 28587 - protein, 9 aa, synthetic construct
  source 1..9: note = Seed: LVVVGARGV (KRAS G12R)
MVVYGSRGT

SEQ ID NO: 28588 - protein, 9 aa, synthetic construct
  source 1..9: note = Seed: LVVVGARGV (KRAS G12R)
MVVYGSRGV

SEQ ID NO: 28589 - protein, 9 aa, synthetic construct
  source 1..9: note = Seed: LVVVGARGV (KRAS G12R)
MVVYGSRGY

SEQ ID NO: 28590 - protein, 9 aa, synthetic construct
  source 1..9: note = Seed: LVVVGARGV (KRAS G12R)
MVVYGTRGA

SEQ ID NO: 28591 - protein, 9 aa, synthetic construct
  source 1..9: note = Seed: LVVVGARGV (KRAS G12R)
MVVYGTRGF

SEQ ID NO: 28592 - protein, 9 aa, synthetic construct
  source 1..9: note = Seed: LVVVGARGV (KRAS G12R)
MVVYGTRGI

SEQ ID NO: 28593 - protein, 9 aa, synthetic construct
  source 1..9: note = Seed: LVVVGARGV (KRAS G12R)
MVVYGTRGK

SEQ ID NO: 28594 - protein, 9 aa, synthetic construct
  source 1..9: note = Seed: LVVVGARGV (KRAS G12R)
MVVYGTRGL

SEQ ID NO: 28595 - protein, 9 aa, synthetic construct
  source 1..9: note = Seed: LVVVGARGV (KRAS G12R)
MVVYGTRGM

SEQ ID NO: 28596 - protein, 9 aa, synthetic construct
  source 1..9: note = Seed: LVVVGARGV (KRAS G12R)
MVVYGTRGR

SEQ ID NO: 28597 - protein, 9 aa, synthetic construct
  source 1..9: note = Seed: LVVVGARGV (KRAS G12R)
MVVYGTRGT

SEQ ID NO: 28598 - protein, 9 aa, synthetic construct
  source 1..9: note = Seed: LVVVGARGV (KRAS G12R)
MVVYGTRGV

SEQ ID NO: 28599 - protein, 9 aa, synthetic construct
  source 1..9: note = Seed: LVVVGARGV (KRAS G12R)
MVVYGTRGY

SEQ ID NO: 28600 - protein, 9 aa, synthetic construct
  source 1..9: note = Seed: LVVVGARGV (KRAS G12R)
MVVYGVRGA

SEQ ID NO: 28601 - protein, 9 aa, synthetic construct
  source 1..9: note = Seed: LVVVGARGV (KRAS G12R)
MVVYGVRGF

SEQ ID NO: 28602 - protein, 9 aa, synthetic construct
  source 1..9: note = Seed: LVVVGARGV (KRAS G12R)
MVVYGVRGI

SEQ ID NO: 28603 - protein, 9 aa, synthetic construct
  source 1..9: note = Seed: LVVVGARGV (KRAS G12R)
MVVYGVRGK

SEQ ID NO: 28604 - protein, 9 aa, synthetic construct
  source 1..9: note = Seed: LVVVGARGV (KRAS G12R)
MVVYGVRGL

SEQ ID NO: 28605 - protein, 9 aa, synthetic construct
  source 1..9: note = Seed: LVVVGARGV (KRAS G12R)
MVVYGVRGM

SEQ ID NO: 28606 - protein, 9 aa, synthetic construct
  source 1..9: note = Seed: LVVVGARGV (KRAS G12R)
MVVYGVRGR

SEQ ID NO: 28607 - protein, 9 aa, synthetic construct
  source 1..9: note = Seed: LVVVGARGV (KRAS G12R)
MVVYGVRGV

SEQ ID NO: 28608 - protein, 9 aa, synthetic construct
  source 1..9: note = Seed: LVVVGARGV (KRAS G12R)
MVVYGVRGY

SEQ ID NO: 28609 - protein, 9 aa, synthetic construct
  source 1..9: note = Seed: LVVVGARGV (KRAS G12R)
MVVYGYRGR

SEQ ID NO: 28610 - protein, 9 aa, synthetic construct
  source 1..9: note = Seed: LVVVGARGV (KRAS G12R)
NVVLGARGL

SEQ ID NO: 28611 - protein, 9 aa, synthetic construct
  source 1..9: note = Seed: LVVVGARGV (KRAS G12R)
QVVFGRRGA

SEQ ID NO: 28612 - protein, 9 aa, synthetic construct
  source 1..9: note = Seed: LVVVGARGV (KRAS G12R)
QVVLGARGI

SEQ ID NO: 28613 - protein, 9 aa, synthetic construct
  source 1..9: note = Seed: LVVVGARGV (KRAS G12R)
QVVLGARGL

SEQ ID NO: 28614 - protein, 9 aa, synthetic construct
  source 1..9: note = Seed: LVVVGARGV (KRAS G12R)
QVVLGARGV

SEQ ID NO: 28615 - protein, 9 aa, synthetic construct
  source 1..9: note = Seed: LVVVGARGV (KRAS G12R)
QVVLGRRGR

SEQ ID NO: 28616 - protein, 9 aa, synthetic construct
  source 1..9: note = Seed: LVVVGARGV (KRAS G12R)
QVVLGSRGL

SEQ ID NO: 28617 - protein, 9 aa, synthetic construct
  source 1..9: note = Seed: LVVVGARGV (KRAS G12R)
QVVLGSRGV

SEQ ID NO: 28618 - protein, 9 aa, synthetic construct
  source 1..9: note = Seed: LVVVGARGV (KRAS G12R)
QVVMGARGL

SEQ ID NO: 28619 - protein, 9 aa, synthetic construct
  source 1..9: note = Seed: LVVVGARGV (KRAS G12R)
QVVMGSRGL

SEQ ID NO: 28620 - protein, 9 aa, synthetic construct
  source 1..9: note = Seed: LVVVGARGV (KRAS G12R)
SVVLGARGI

SEQ ID NO: 28621 - protein, 9 aa, synthetic construct
  source 1..9: note = Seed: LVVVGARGV (KRAS G12R)
SVVLGARGL

SEQ ID NO: 28622 - protein, 9 aa, synthetic construct
  source 1..9: note = Seed: LVVVGARGV (KRAS G12R)
SVVLGARGV

SEQ ID NO: 28623 - protein, 9 aa, synthetic construct
  source 1..9: note = Seed: LVVVGARGV (KRAS G12R)
SVVLGSRGL

SEQ ID NO: 28624 - protein, 9 aa, synthetic construct
  source 1..9: note = Seed: LVVVGARGV (KRAS G12R)
SVVMGARGL

SEQ ID NO: 28625 - protein, 9 aa, synthetic construct
  source 1..9: note = Seed: LVVVGARGV (KRAS G12R)
TVVFGRRGA

SEQ ID NO: 28626 - protein, 9 aa, synthetic construct
  source 1..9: note = Seed: LVVVGARGV (KRAS G12R)
TVVFGRRGL

SEQ ID NO: 28627 - protein, 9 aa, synthetic construct
  source 1..9: note = Seed: LVVVGARGV (KRAS G12R)
TVVFGRRGS

SEQ ID NO: 28628 - protein, 9 aa, synthetic construct
  source 1..9: note = Seed: LVVVGARGV (KRAS G12R)
TVVFGRRGV

SEQ ID NO: 28629 - protein, 9 aa, synthetic construct
  source 1..9: note = Seed: LVVVGARGV (KRAS G12R)
TVVIGRRGR

SEQ ID NO: 28630 - protein, 9 aa, synthetic construct
  source 1..9: note = Seed: LVVVGARGV (KRAS G12R)
TVVLGARGI

SEQ ID NO: 28631 - protein, 9 aa, synthetic construct
  source 1..9: note = Seed: LVVVGARGV (KRAS G12R)
TVVLGARGL

SEQ ID NO: 28632 - protein, 9 aa, synthetic construct
  source 1..9: note = Seed: LVVVGARGV (KRAS G12R)
TVVLGARGV

SEQ ID NO: 28633 - protein, 9 aa, synthetic construct
  source 1..9: note = Seed: LVVVGARGV (KRAS G12R)
TVVLGGRGL

SEQ ID NO: 28634 - protein, 9 aa, synthetic construct
  source 1..9: note = Seed: LVVVGARGV (KRAS G12R)
TVVLGRRGG

SEQ ID NO: 28635 - protein, 9 aa, synthetic construct
  source 1..9: note = Seed: LVVVGARGV (KRAS G12R)
TVVLGRRGR

SEQ ID NO: 28636 - protein, 9 aa, synthetic construct
  source 1..9: note = Seed: LVVVGARGV (KRAS G12R)
TVVLGRRGS

SEQ ID NO: 28637 - protein, 9 aa, synthetic construct
  source 1..9: note = Seed: LVVVGARGV (KRAS G12R)
TVVLGSRGI

SEQ ID NO: 28638 - protein, 9 aa, synthetic construct
  source 1..9: note = Seed: LVVVGARGV (KRAS G12R)
TVVLGSRGL

SEQ ID NO: 28639 - protein, 9 aa, synthetic construct
  source 1..9: note = Seed: LVVVGARGV (KRAS G12R)
TVVLGSRGV

SEQ ID NO: 28640 - protein, 9 aa, synthetic construct
  source 1..9: note = Seed: LVVVGARGV (KRAS G12R)
TVVMGARGI

SEQ ID NO: 28641 - protein, 9 aa, synthetic construct
  source 1..9: note = Seed: LVVVGARGV (KRAS G12R)
TVVMGARGL

SEQ ID NO: 28642 - protein, 9 aa, synthetic construct
  source 1..9: note = Seed: LVVVGARGV (KRAS G12R)
TVVMGARGV

SEQ ID NO: 28643 - protein, 9 aa, synthetic construct
  source 1..9: note = Seed: LVVVGARGV (KRAS G12R)
TVVMGRRGA

SEQ ID NO: 28644 - protein, 9 aa, synthetic construct
  source 1..9: note = Seed: LVVVGARGV (KRAS G12R)
TVVMGRRGL

SEQ ID NO: 28645 - protein, 9 aa, synthetic construct
  source 1..9: note = Seed: LVVVGARGV (KRAS G12R)
TVVMGRRGR

SEQ ID NO: 28646 - protein, 9 aa, synthetic construct
  source 1..9: note = Seed: LVVVGARGV (KRAS G12R)
TVVMGRRGS

SEQ ID NO: 28647 - protein, 9 aa, synthetic construct
  source 1..9: note = Seed: LVVVGARGV (KRAS G12R)
TVVMGSRGL

SEQ ID NO: 28648 - protein, 9 aa, synthetic construct
  source 1..9: note = Seed: LVVVGARGV (KRAS G12R)
TVVWGRRGA

SEQ ID NO: 28649 - protein, 9 aa, synthetic construct
  source 1..9: note = Seed: LVVVGARGV (KRAS G12R)
TVVWGRRGM

SEQ ID NO: 28650 - protein, 9 aa, synthetic construct
  source 1..9: note = Seed: LVVVGARGV (KRAS G12R)
TVVWGRRGV

SEQ ID NO: 28651 - protein, 9 aa, synthetic construct
  source 1..9: note = Seed: LVVVGARGV (KRAS G12R)
VVVAGARGA

SEQ ID NO: 28652 - protein, 9 aa, synthetic construct
  source 1..9: note = Seed: LVVVGARGV (KRAS G12R)
VVVAGARGF

SEQ ID NO: 28653 - protein, 9 aa, synthetic construct
  source 1..9: note = Seed: LVVVGARGV (KRAS G12R)
VVVAGARGI

SEQ ID NO: 28654 - protein, 9 aa, synthetic construct
  source 1..9: note = Seed: LVVVGARGV (KRAS G12R)
VVVAGARGL

SEQ ID NO: 28655 - protein, 9 aa, synthetic construct
  source 1..9: note = Seed: LVVVGARGV (KRAS G12R)
VVVAGARGM

SEQ ID NO: 28656 - protein, 9 aa, synthetic construct
  source 1..9: note = Seed: LVVVGARGV (KRAS G12R)
VVVAGARGR

SEQ ID NO: 28657 - protein, 9 aa, synthetic construct
  source 1..9: note = Seed: LVVVGARGV (KRAS G12R)
VVVAGARGS

SEQ ID NO: 28658 - protein, 9 aa, synthetic construct
  source 1..9: note = Seed: LVVVGARGV (KRAS G12R)
VVVAGARGT

SEQ ID NO: 28659 - protein, 9 aa, synthetic construct
  source 1..9: note = Seed: LVVVGARGV (KRAS G12R)
VVVAGARGV

SEQ ID NO: 28660 - protein, 9 aa, synthetic construct
  source 1..9: note = Seed: LVVVGARGV (KRAS G12R)
VVVAGARGY

SEQ ID NO: 28661 - protein, 9 aa, synthetic construct
  source 1..9: note = Seed: LVVVGARGV (KRAS G12R)
VVVAGGRGA

SEQ ID NO: 28662 - protein, 9 aa, synthetic construct
  source 1..9: note = Seed: LVVVGARGV (KRAS G12R)
VVVAGGRGI

SEQ ID NO: 28663 - protein, 9 aa, synthetic construct
  source 1..9: note = Seed: LVVVGARGV (KRAS G12R)
VVVAGGRGL

SEQ ID NO: 28664 - protein, 9 aa, synthetic construct
  source 1..9: note = Seed: LVVVGARGV (KRAS G12R)
VVVAGGRGM

SEQ ID NO: 28665 - protein, 9 aa, synthetic construct
  source 1..9: note = Seed: LVVVGARGV (KRAS G12R)
VVVAGGRGS

SEQ ID NO: 28666 - protein, 9 aa, synthetic construct
  source 1..9: note = Seed: LVVVGARGV (KRAS G12R)
VVVAGGRGT

SEQ ID NO: 28667 - protein, 9 aa, synthetic construct
  source 1..9: note = Seed: LVVVGARGV (KRAS G12R)
VVVAGGRGV

SEQ ID NO: 28668 - protein, 9 aa, synthetic construct
  source 1..9: note = Seed: LVVVGARGV (KRAS G12R)
VVVAGHRGA

SEQ ID NO: 28669 - protein, 9 aa, synthetic construct
  source 1..9: note = Seed: LVVVGARGV (KRAS G12R)
VVVAGHRGF

SEQ ID NO: 28670 - protein, 9 aa, synthetic construct
  source 1..9: note = Seed: LVVVGARGV (KRAS G12R)
VVVAGHRGI

SEQ ID NO: 28671 - protein, 9 aa, synthetic construct
  source 1..9: note = Seed: LVVVGARGV (KRAS G12R)
VVVAGHRGK

SEQ ID NO: 28672 - protein, 9 aa, synthetic construct
  source 1..9: note = Seed: LVVVGARGV (KRAS G12R)
VVVAGHRGL

SEQ ID NO: 28673 - protein, 9 aa, synthetic construct
  source 1..9: note = Seed: LVVVGARGV (KRAS G12R)
VVVAGHRGM

SEQ ID NO: 28674 - protein, 9 aa, synthetic construct
  source 1..9: note = Seed: LVVVGARGV (KRAS G12R)
VVVAGHRGR

SEQ ID NO: 28675 - protein, 9 aa, synthetic construct
  source 1..9: note = Seed: LVVVGARGV (KRAS G12R)
VVVAGHRGV

SEQ ID NO: 28676 - protein, 9 aa, synthetic construct
  source 1..9: note = Seed: LVVVGARGV (KRAS G12R)
VVVAGHRGY

SEQ ID NO: 28677 - protein, 9 aa, synthetic construct
  source 1..9: note = Seed: LVVVGARGV (KRAS G12R)
VVVAGIRGA

SEQ ID NO: 28678 - protein, 9 aa, synthetic construct
  source 1..9: note = Seed: LVVVGARGV (KRAS G12R)
VVVAGIRGF

SEQ ID NO: 28679 - protein, 9 aa, synthetic construct
  source 1..9: note = Seed: LVVVGARGV (KRAS G12R)
VVVAGIRGI

SEQ ID NO: 28680 - protein, 9 aa, synthetic construct
  source 1..9: note = Seed: LVVVGARGV (KRAS G12R)
VVVAGIRGL

SEQ ID NO: 28681 - protein, 9 aa, synthetic construct
  source 1..9: note = Seed: LVVVGARGV (KRAS G12R)
VVVAGIRGM

SEQ ID NO: 28682 - protein, 9 aa, synthetic construct
  source 1..9: note = Seed: LVVVGARGV (KRAS G12R)
VVVAGIRGR

SEQ ID NO: 28683 - protein, 9 aa, synthetic construct
  source 1..9: note = Seed: LVVVGARGV (KRAS G12R)
VVVAGIRGV

SEQ ID NO: 28684 - protein, 9 aa, synthetic construct
  source 1..9: note = Seed: LVVVGARGV (KRAS G12R)
VVVAGIRGY

SEQ ID NO: 28685 - protein, 9 aa, synthetic construct
  source 1..9: note = Seed: LVVVGARGV (KRAS G12R)
VVVAGKRGA

SEQ ID NO: 28686 - protein, 9 aa, synthetic construct
  source 1..9: note = Seed: LVVVGARGV (KRAS G12R)
VVVAGKRGF

SEQ ID NO: 28687 - protein, 9 aa, synthetic construct
  source 1..9: note = Seed: LVVVGARGV (KRAS G12R)
VVVAGKRGG

SEQ ID NO: 28688 - protein, 9 aa, synthetic construct
  source 1..9: note = Seed: LVVVGARGV (KRAS G12R)
VVVAGKRGH

SEQ ID NO: 28689 - protein, 9 aa, synthetic construct
  source 1..9: note = Seed: LVVVGARGV (KRAS G12R)
VVVAGKRGI

SEQ ID NO: 28690 - protein, 9 aa, synthetic construct
  source 1..9: note = Seed: LVVVGARGV (KRAS G12R)
VVVAGKRGK

SEQ ID NO: 28691 - protein, 9 aa, synthetic construct
  source 1..9: note = Seed: LVVVGARGV (KRAS G12R)
VVVAGKRGL

SEQ ID NO: 28692 - protein, 9 aa, synthetic construct
  source 1..9: note = Seed: LVVVGARGV (KRAS G12R)
VVVAGKRGM

SEQ ID NO: 28693 - protein, 9 aa, synthetic construct
  source 1..9: note = Seed: LVVVGARGV (KRAS G12R)
VVVAGKRGN

SEQ ID NO: 28694 - protein, 9 aa, synthetic construct
  source 1..9: note = Seed: LVVVGARGV (KRAS G12R)
VVVAGKRGQ

SEQ ID NO: 28695 - protein, 9 aa, synthetic construct
  source 1..9: note = Seed: LVVVGARGV (KRAS G12R)
VVVAGKRGR

SEQ ID NO: 28696 - protein, 9 aa, synthetic construct
  source 1..9: note = Seed: LVVVGARGV (KRAS G12R)
VVVAGKRGS

SEQ ID NO: 28697 - protein, 9 aa, synthetic construct
  source 1..9: note = Seed: LVVVGARGV (KRAS G12R)
VVVAGKRGT

SEQ ID NO: 28698 - protein, 9 aa, synthetic construct
  source 1..9: note = Seed: LVVVGARGV (KRAS G12R)
VVVAGKRGV

SEQ ID NO: 28699 - protein, 9 aa, synthetic construct
  source 1..9: note = Seed: LVVVGARGV (KRAS G12R)
VVVAGKRGW

SEQ ID NO: 28700 - protein, 9 aa, synthetic construct
  source 1..9: note = Seed: LVVVGARGV (KRAS G12R)
VVVAGKRGY

SEQ ID NO: 28701 - protein, 9 aa, synthetic construct
  source 1..9: note = Seed: LVVVGARGV (KRAS G12R)
VVVAGLRGI

SEQ ID NO: 28702 - protein, 9 aa, synthetic construct
  source 1..9: note = Seed: LVVVGARGV (KRAS G12R)
VVVAGLRGL

SEQ ID NO: 28703 - protein, 9 aa, synthetic construct
  source 1..9: note = Seed: LVVVGARGV (KRAS G12R)
VVVAGLRGR

SEQ ID NO: 28704 - protein, 9 aa, synthetic construct
  source 1..9: note = Seed: LVVVGARGV (KRAS G12R)
VVVAGLRGV

SEQ ID NO: 28705 - protein, 9 aa, synthetic construct
  source 1..9: note = Seed: LVVVGARGV (KRAS G12R)
VVVAGMRGA

SEQ ID NO: 28706 - protein, 9 aa, synthetic construct
  source 1..9: note = Seed: LVVVGARGV (KRAS G12R)
VVVAGMRGI

SEQ ID NO: 28707 - protein, 9 aa, synthetic construct
  source 1..9: note = Seed: LVVVGARGV (KRAS G12R)
VVVAGMRGL

SEQ ID NO: 28708 - protein, 9 aa, synthetic construct
  source 1..9: note = Seed: LVVVGARGV (KRAS G12R)
VVVAGMRGM

SEQ ID NO: 28709 - protein, 9 aa, synthetic construct
  source 1..9: note = Seed: LVVVGARGV (KRAS G12R)
VVVAGMRGR

SEQ ID NO: 28710 - protein, 9 aa, synthetic construct
  source 1..9: note = Seed: LVVVGARGV (KRAS G12R)
VVVAGMRGV

SEQ ID NO: 28711 - protein, 9 aa, synthetic construct
  source 1..9: note = Seed: LVVVGARGV (KRAS G12R)
VVVAGNRGA

SEQ ID NO: 28712 - protein, 9 aa, synthetic construct
  source 1..9: note = Seed: LVVVGARGV (KRAS G12R)
VVVAGNRGF

SEQ ID NO: 28713 - protein, 9 aa, synthetic construct
  source 1..9: note = Seed: LVVVGARGV (KRAS G12R)
VVVAGNRGI

SEQ ID NO: 28714 - protein, 9 aa, synthetic construct
  source 1..9: note = Seed: LVVVGARGV (KRAS G12R)
VVVAGNRGL

SEQ ID NO: 28715 - protein, 9 aa, synthetic construct
  source 1..9: note = Seed: LVVVGARGV (KRAS G12R)
VVVAGNRGM

SEQ ID NO: 28716 - protein, 9 aa, synthetic construct
  source 1..9: note = Seed: LVVVGARGV (KRAS G12R)
VVVAGNRGR

SEQ ID NO: 28717 - protein, 9 aa, synthetic construct
  source 1..9: note = Seed: LVVVGARGV (KRAS G12R)
VVVAGNRGV

SEQ ID NO: 28718 - protein, 9 aa, synthetic construct
  source 1..9: note = Seed: LVVVGARGV (KRAS G12R)
VVVAGNRGY

SEQ ID NO: 28719 - protein, 9 aa, synthetic construct
  source 1..9: note = Seed: LVVVGARGV (KRAS G12R)
VVVAGPRGA

SEQ ID NO: 28720 - protein, 9 aa, synthetic construct
  source 1..9: note = Seed: LVVVGARGV (KRAS G12R)
VVVAGPRGI

SEQ ID NO: 28721 - protein, 9 aa, synthetic construct
  source 1..9: note = Seed: LVVVGARGV (KRAS G12R)
VVVAGPRGL

SEQ ID NO: 28722 - protein, 9 aa, synthetic construct
  source 1..9: note = Seed: LVVVGARGV (KRAS G12R)
VVVAGPRGM

SEQ ID NO: 28723 - protein, 9 aa, synthetic construct
  source 1..9: note = Seed: LVVVGARGV (KRAS G12R)
VVVAGPRGV

SEQ ID NO: 28724 - protein, 9 aa, synthetic construct
  source 1..9: note = Seed: LVVVGARGV (KRAS G12R)
VVVAGRRGA

SEQ ID NO: 28725 - protein, 9 aa, synthetic construct
  source 1..9: note = Seed: LVVVGARGV (KRAS G12R)
VVVAGRRGC

SEQ ID NO: 28726 - protein, 9 aa, synthetic construct
  source 1..9: note = Seed: LVVVGARGV (KRAS G12R)
VVVAGRRGF

SEQ ID NO: 28727 - protein, 9 aa, synthetic construct
  source 1..9: note = Seed: LVVVGARGV (KRAS G12R)
VVVAGRRGG

SEQ ID NO: 28728 - protein, 9 aa, synthetic construct
  source 1..9: note = Seed: LVVVGARGV (KRAS G12R)
VVVAGRRGH

SEQ ID NO: 28729 - protein, 9 aa, synthetic construct
  source 1..9: note = Seed: LVVVGARGV (KRAS G12R)
VVVAGRRGI

SEQ ID NO: 28730 - protein, 9 aa, synthetic construct
  source 1..9: note = Seed: LVVVGARGV (KRAS G12R)
VVVAGRRGK

SEQ ID NO: 28731 - protein, 9 aa, synthetic construct
  source 1..9: note = Seed: LVVVGARGV (KRAS G12R)
VVVAGRRGL

SEQ ID NO: 28732 - protein, 9 aa, synthetic construct
  source 1..9: note = Seed: LVVVGARGV (KRAS G12R)
VVVAGRRGM

SEQ ID NO: 28733 - protein, 9 aa, synthetic construct
  source 1..9: note = Seed: LVVVGARGV (KRAS G12R)
VVVAGRRGN

SEQ ID NO: 28734 - protein, 9 aa, synthetic construct
  source 1..9: note = Seed: LVVVGARGV (KRAS G12R)
VVVAGRRGP

SEQ ID NO: 28735 - protein, 9 aa, synthetic construct
  source 1..9: note = Seed: LVVVGARGV (KRAS G12R)
VVVAGRRGQ

SEQ ID NO: 28736 - protein, 9 aa, synthetic construct
  source 1..9: note = Seed: LVVVGARGV (KRAS G12R)
VVVAGRRGR

SEQ ID NO: 28737 - protein, 9 aa, synthetic construct
  source 1..9: note = Seed: LVVVGARGV (KRAS G12R)
VVVAGRRGS

SEQ ID NO: 28738 - protein, 9 aa, synthetic construct
  source 1..9: note = Seed: LVVVGARGV (KRAS G12R)
VVVAGRRGT

SEQ ID NO: 28739 - protein, 9 aa, synthetic construct
  source 1..9: note = Seed: LVVVGARGV (KRAS G12R)
VVVAGRRGV

SEQ ID NO: 28740 - protein, 9 aa, synthetic construct
  source 1..9: note = Seed: LVVVGARGV (KRAS G12R)
VVVAGRRGW

SEQ ID NO: 28741 - protein, 9 aa, synthetic construct
  source 1..9: note = Seed: LVVVGARGV (KRAS G12R)
VVVAGRRGY

SEQ ID NO: 28742 - protein, 9 aa, synthetic construct
  source 1..9: note = Seed: LVVVGARGV (KRAS G12R)
VVVAGSRGA

SEQ ID NO: 28743 - protein, 9 aa, synthetic construct
  source 1..9: note = Seed: LVVVGARGV (KRAS G12R)
VVVAGSRGF

SEQ ID NO: 28744 - protein, 9 aa, synthetic construct
  source 1..9: note = Seed: LVVVGARGV (KRAS G12R)
VVVAGSRGI

SEQ ID NO: 28745 - protein, 9 aa, synthetic construct
  source 1..9: note = Seed: LVVVGARGV (KRAS G12R)
VVVAGSRGL

SEQ ID NO: 28746 - protein, 9 aa, synthetic construct
  source 1..9: note = Seed: LVVVGARGV (KRAS G12R)
VVVAGSRGM

SEQ ID NO: 28747 - protein, 9 aa, synthetic construct
  source 1..9: note = Seed: LVVVGARGV (KRAS G12R)
VVVAGSRGR

SEQ ID NO: 28748 - protein, 9 aa, synthetic construct
  source 1..9: note = Seed: LVVVGARGV (KRAS G12R)
VVVAGSRGS

SEQ ID NO: 28749 - protein, 9 aa, synthetic construct
  source 1..9: note = Seed: LVVVGARGV (KRAS G12R)
VVVAGSRGT

SEQ ID NO: 28750 - protein, 9 aa, synthetic construct
  source 1..9: note = Seed: LVVVGARGV (KRAS G12R)
VVVAGSRGV

SEQ ID NO: 28751 - protein, 9 aa, synthetic construct
  source 1..9: note = Seed: LVVVGARGV (KRAS G12R)
VVVAGSRGY

SEQ ID NO: 28752 - protein, 9 aa, synthetic construct
  source 1..9: note = Seed: LVVVGARGV (KRAS G12R)
VVVAGTRGA

SEQ ID NO: 28753 - protein, 9 aa, synthetic construct
  source 1..9: note = Seed: LVVVGARGV (KRAS G12R)
VVVAGTRGF

SEQ ID NO: 28754 - protein, 9 aa, synthetic construct
  source 1..9: note = Seed: LVVVGARGV (KRAS G12R)
VVVAGTRGI

SEQ ID NO: 28755 - protein, 9 aa, synthetic construct
  source 1..9: note = Seed: LVVVGARGV (KRAS G12R)
VVVAGTRGL

SEQ ID NO: 28756 - protein, 9 aa, synthetic construct
  source 1..9: note = Seed: LVVVGARGV (KRAS G12R)
VVVAGTRGM

SEQ ID NO: 28757 - protein, 9 aa, synthetic construct
  source 1..9: note = Seed: LVVVGARGV (KRAS G12R)
VVVAGTRGR

SEQ ID NO: 28758 - protein, 9 aa, synthetic construct
  source 1..9: note = Seed: LVVVGARGV (KRAS G12R)
VVVAGTRGV

SEQ ID NO: 28759 - protein, 9 aa, synthetic construct
  source 1..9: note = Seed: LVVVGARGV (KRAS G12R)
VVVAGTRGY

SEQ ID NO: 28760 - protein, 9 aa, synthetic construct
  source 1..9: note = Seed: LVVVGARGV (KRAS G12R)
VVVAGVRGA

SEQ ID NO: 28761 - protein, 9 aa, synthetic construct
  source 1..9: note = Seed: LVVVGARGV (KRAS G12R)
VVVAGVRGF

SEQ ID NO: 28762 - protein, 9 aa, synthetic construct
  source 1..9: note = Seed: LVVVGARGV (KRAS G12R)
VVVAGVRGI

SEQ ID NO: 28763 - protein, 9 aa, synthetic construct
  source 1..9: note = Seed: LVVVGARGV (KRAS G12R)
VVVAGVRGL

SEQ ID NO: 28764 - protein, 9 aa, synthetic construct
  source 1..9: note = Seed: LVVVGARGV (KRAS G12R)
VVVAGVRGM

SEQ ID NO: 28765 - protein, 9 aa, synthetic construct
  source 1..9: note = Seed: LVVVGARGV (KRAS G12R)
VVVAGVRGR

SEQ ID NO: 28766 - protein, 9 aa, synthetic construct
  source 1..9: note = Seed: LVVVGARGV (KRAS G12R)
VVVAGVRGV

SEQ ID NO: 28767 - protein, 9 aa, synthetic construct
  source 1..9: note = Seed: LVVVGARGV (KRAS G12R)
VVVAGYRGR

SEQ ID NO: 28768 - protein, 9 aa, synthetic construct
  source 1..9: note = Seed: LVVVGARGV (KRAS G12R)
VVVCGARGL

SEQ ID NO: 28769 - protein, 9 aa, synthetic construct
  source 1..9: note = Seed: LVVVGARGV (KRAS G12R)
VVVCGKRGA

SEQ ID NO: 28770 - protein, 9 aa, synthetic construct
  source 1..9: note = Seed: LVVVGARGV (KRAS G12R)
VVVCGKRGL

SEQ ID NO: 28771 - protein, 9 aa, synthetic construct
  source 1..9: note = Seed: LVVVGARGV (KRAS G12R)
VVVCGKRGR

SEQ ID NO: 28772 - protein, 9 aa, synthetic construct
  source 1..9: note = Seed: LVVVGARGV (KRAS G12R)
VVVCGKRGS

SEQ ID NO: 28773 - protein, 9 aa, synthetic construct
  source 1..9: note = Seed: LVVVGARGV (KRAS G12R)
VVVCGRRGA

SEQ ID NO: 28774 - protein, 9 aa, synthetic construct
  source 1..9: note = Seed: LVVVGARGV (KRAS G12R)
VVVCGRRGF

SEQ ID NO: 28775 - protein, 9 aa, synthetic construct
  source 1..9: note = Seed: LVVVGARGV (KRAS G12R)
VVVCGRRGH

SEQ ID NO: 28776 - protein, 9 aa, synthetic construct
  source 1..9: note = Seed: LVVVGARGV (KRAS G12R)
VVVCGRRGI

SEQ ID NO: 28777 - protein, 9 aa, synthetic construct
  source 1..9: note = Seed: LVVVGARGV (KRAS G12R)
VVVCGRRGK

SEQ ID NO: 28778 - protein, 9 aa, synthetic construct
  source 1..9: note = Seed: LVVVGARGV (KRAS G12R)
VVVCGRRGL

SEQ ID NO: 28779 - protein, 9 aa, synthetic construct
  source 1..9: note = Seed: LVVVGARGV (KRAS G12R)
VVVCGRRGM

SEQ ID NO: 28780 - protein, 9 aa, synthetic construct
  source 1..9: note = Seed: LVVVGARGV (KRAS G12R)
VVVCGRRGQ

SEQ ID NO: 28781 - protein, 9 aa, synthetic construct
  source 1..9: note = Seed: LVVVGARGV (KRAS G12R)
VVVCGRRGR

SEQ ID NO: 28782 - protein, 9 aa, synthetic construct
  source 1..9: note = Seed: LVVVGARGV (KRAS G12R)
VVVCGRRGS

SEQ ID NO: 28783 - protein, 9 aa, synthetic construct
  source 1..9: note = Seed: LVVVGARGV (KRAS G12R)
VVVCGRRGT

SEQ ID NO: 28784 - protein, 9 aa, synthetic construct
  source 1..9: note = Seed: LVVVGARGV (KRAS G12R)
VVVCGRRGV

SEQ ID NO: 28785 - protein, 9 aa, synthetic construct
  source 1..9: note = Seed: LVVVGARGV (KRAS G12R)
VVVCGRRGY

SEQ ID NO: 28786 - protein, 9 aa, synthetic construct
  source 1..9: note = Seed: LVVVGARGV (KRAS G12R)
VVVDGARGI

SEQ ID NO: 28787 - protein, 9 aa, synthetic construct
  source 1..9: note = Seed: LVVVGARGV (KRAS G12R)
VVVDGARGL

SEQ ID NO: 28788 - protein, 9 aa, synthetic construct
  source 1..9: note = Seed: LVVVGARGV (KRAS G12R)
VVVDGARGV

SEQ ID NO: 28789 - protein, 9 aa, synthetic construct
  source 1..9: note = Seed: LVVVGARGV (KRAS G12R)
VVVDGNRGI

SEQ ID NO: 28790 - protein, 9 aa, synthetic construct
  source 1..9: note = Seed: LVVVGARGV (KRAS G12R)
VVVDGNRGV

SEQ ID NO: 28791 - protein, 9 aa, synthetic construct
  source 1..9: note = Seed: LVVVGARGV (KRAS G12R)
VVVDGSRGI

SEQ ID NO: 28792 - protein, 9 aa, synthetic construct
  source 1..9: note = Seed: LVVVGARGV (KRAS G12R)
VVVEGARGA

SEQ ID NO: 28793 - protein, 9 aa, synthetic construct
  source 1..9: note = Seed: LVVVGARGV (KRAS G12R)
VVVEGARGI

SEQ ID NO: 28794 - protein, 9 aa, synthetic construct
  source 1..9: note = Seed: LVVVGARGV (KRAS G12R)
VVVEGARGL

SEQ ID NO: 28795 - protein, 9 aa, synthetic construct
  source 1..9: note = Seed: LVVVGARGV (KRAS G12R)
VVVEGARGV

SEQ ID NO: 28796 - protein, 9 aa, synthetic construct
  source 1..9: note = Seed: LVVVGARGV (KRAS G12R)
VVVEGFRGI

SEQ ID NO: 28797 - protein, 9 aa, synthetic construct
  source 1..9: note = Seed: LVVVGARGV (KRAS G12R)
VVVEGFRGL

SEQ ID NO: 28798 - protein, 9 aa, synthetic construct
  source 1..9: note = Seed: LVVVGARGV (KRAS G12R)
VVVEGGRGI

SEQ ID NO: 28799 - protein, 9 aa, synthetic construct
  source 1..9: note = Seed: LVVVGARGV (KRAS G12R)
VVVEGGRGL

SEQ ID NO: 28800 - protein, 9 aa, synthetic construct
  source 1..9: note = Seed: LVVVGARGV (KRAS G12R)
VVVEGGRGV

SEQ ID NO: 28801 - protein, 9 aa, synthetic construct
  source 1..9: note = Seed: LVVVGARGV (KRAS G12R)
VVVEGRRGA

SEQ ID NO: 28802 - protein, 9 aa, synthetic construct
  source 1..9: note = Seed: LVVVGARGV (KRAS G12R)
VVVEGSRGI

SEQ ID NO: 28803 - protein, 9 aa, synthetic construct
  source 1..9: note = Seed: LVVVGARGV (KRAS G12R)
VVVEGSRGL

SEQ ID NO: 28804 - protein, 9 aa, synthetic construct
  source 1..9: note = Seed: LVVVGARGV (KRAS G12R)
VVVEGSRGV

SEQ ID NO: 28805 - protein, 9 aa, synthetic construct
  source 1..9: note = Seed: LVVVGARGV (KRAS G12R)
VVVFGARGA

SEQ ID NO: 28806 - protein, 9 aa, synthetic construct
  source 1..9: note = Seed: LVVVGARGV (KRAS G12R)
VVVFGARGF

SEQ ID NO: 28807 - protein, 9 aa, synthetic construct
  source 1..9: note = Seed: LVVVGARGV (KRAS G12R)
VVVFGARGH

SEQ ID NO: 28808 - protein, 9 aa, synthetic construct
  source 1..9: note = Seed: LVVVGARGV (KRAS G12R)
VVVFGARGI

SEQ ID NO: 28809 - protein, 9 aa, synthetic construct
  source 1..9: note = Seed: LVVVGARGV (KRAS G12R)
VVVFGARGK

SEQ ID NO: 28810 - protein, 9 aa, synthetic construct
  source 1..9: note = Seed: LVVVGARGV (KRAS G12R)
VVVFGARGL

SEQ ID NO: 28811 - protein, 9 aa, synthetic construct
  source 1..9: note = Seed: LVVVGARGV (KRAS G12R)
VVVFGARGM

SEQ ID NO: 28812 - protein, 9 aa, synthetic construct
  source 1..9: note = Seed: LVVVGARGV (KRAS G12R)
VVVFGARGR

SEQ ID NO: 28813 - protein, 9 aa, synthetic construct
  source 1..9: note = Seed: LVVVGARGV (KRAS G12R)
VVVFGARGS

SEQ ID NO: 28814 - protein, 9 aa, synthetic construct
  source 1..9: note = Seed: LVVVGARGV (KRAS G12R)
VVVFGARGT

SEQ ID NO: 28815 - protein, 9 aa, synthetic construct
  source 1..9: note = Seed: LVVVGARGV (KRAS G12R)
VVVFGARGV

SEQ ID NO: 28816 - protein, 9 aa, synthetic construct
  source 1..9: note = Seed: LVVVGARGV (KRAS G12R)
VVVFGARGY

SEQ ID NO: 28817 - protein, 9 aa, synthetic construct
  source 1..9: note = Seed: LVVVGARGV (KRAS G12R)
VVVFGDRGI

SEQ ID NO: 28818 - protein, 9 aa, synthetic construct
  source 1..9: note = Seed: LVVVGARGV (KRAS G12R)
VVVFGDRGL

SEQ ID NO: 28819 - protein, 9 aa, synthetic construct
  source 1..9: note = Seed: LVVVGARGV (KRAS G12R)
VVVFGDRGV

SEQ ID NO: 28820 - protein, 9 aa, synthetic construct
  source 1..9: note = Seed: LVVVGARGV (KRAS G12R)
VVVFGFRGR

SEQ ID NO: 28821 - protein, 9 aa, synthetic construct
  source 1..9: note = Seed: LVVVGARGV (KRAS G12R)
VVVFGGRGA

SEQ ID NO: 28822 - protein, 9 aa, synthetic construct
  source 1..9: note = Seed: LVVVGARGV (KRAS G12R)
VVVFGGRGF

SEQ ID NO: 28823 - protein, 9 aa, synthetic construct
  source 1..9: note = Seed: LVVVGARGV (KRAS G12R)
VVVFGGRGI

SEQ ID NO: 28824 - protein, 9 aa, synthetic construct
  source 1..9: note = Seed: LVVVGARGV (KRAS G12R)
VVVFGGRGK

SEQ ID NO: 28825 - protein, 9 aa, synthetic construct
  source 1..9: note = Seed: LVVVGARGV (KRAS G12R)
VVVFGGRGL

SEQ ID NO: 28826 - protein, 9 aa, synthetic construct
  source 1..9: note = Seed: LVVVGARGV (KRAS G12R)
VVVFGGRGM

SEQ ID NO: 28827 - protein, 9 aa, synthetic construct
  source 1..9: note = Seed: LVVVGARGV (KRAS G12R)
VVVFGGRGR

SEQ ID NO: 28828 - protein, 9 aa, synthetic construct
  source 1..9: note = Seed: LVVVGARGV (KRAS G12R)
VVVFGGRGS

SEQ ID NO: 28829 - protein, 9 aa, synthetic construct
  source 1..9: note = Seed: LVVVGARGV (KRAS G12R)
VVVFGGRGT

SEQ ID NO: 28830 - protein, 9 aa, synthetic construct
  source 1..9: note = Seed: LVVVGARGV (KRAS G12R)
VVVFGGRGV

SEQ ID NO: 28831 - protein, 9 aa, synthetic construct
  source 1..9: note = Seed: LVVVGARGV (KRAS G12R)
VVVFGHRGA

SEQ ID NO: 28832 - protein, 9 aa, synthetic construct
  source 1..9: note = Seed: LVVVGARGV (KRAS G12R)
VVVFGHRGF

SEQ ID NO: 28833 - protein, 9 aa, synthetic construct
  source 1..9: note = Seed: LVVVGARGV (KRAS G12R)
VVVFGHRGH

SEQ ID NO: 28834 - protein, 9 aa, synthetic construct
  source 1..9: note = Seed: LVVVGARGV (KRAS G12R)
VVVFGHRGI

SEQ ID NO: 28835 - protein, 9 aa, synthetic construct
  source 1..9: note = Seed: LVVVGARGV (KRAS G12R)
VVVFGHRGK

SEQ ID NO: 28836 - protein, 9 aa, synthetic construct
  source 1..9: note = Seed: LVVVGARGV (KRAS G12R)
VVVFGHRGL

SEQ ID NO: 28837 - protein, 9 aa, synthetic construct
  source 1..9: note = Seed: LVVVGARGV (KRAS G12R)
VVVFGHRGM

SEQ ID NO: 28838 - protein, 9 aa, synthetic construct
  source 1..9: note = Seed: LVVVGARGV (KRAS G12R)
VVVFGHRGQ

SEQ ID NO: 28839 - protein, 9 aa, synthetic construct
  source 1..9: note = Seed: LVVVGARGV (KRAS G12R)
VVVFGHRGR

SEQ ID NO: 28840 - protein, 9 aa, synthetic construct
  source 1..9: note = Seed: LVVVGARGV (KRAS G12R)
VVVFGHRGS

SEQ ID NO: 28841 - protein, 9 aa, synthetic construct
  source 1..9: note = Seed: LVVVGARGV (KRAS G12R)
VVVFGHRGT

SEQ ID NO: 28842 - protein, 9 aa, synthetic construct
  source 1..9: note = Seed: LVVVGARGV (KRAS G12R)
VVVFGHRGV

SEQ ID NO: 28843 - protein, 9 aa, synthetic construct
  source 1..9: note = Seed: LVVVGARGV (KRAS G12R)
VVVFGHRGY

SEQ ID NO: 28844 - protein, 9 aa, synthetic construct
  source 1..9: note = Seed: LVVVGARGV (KRAS G12R)
VVVFGIRGA

SEQ ID NO: 28845 - protein, 9 aa, synthetic construct
  source 1..9: note = Seed: LVVVGARGV (KRAS G12R)
VVVFGIRGF

SEQ ID NO: 28846 - protein, 9 aa, synthetic construct
  source 1..9: note = Seed: LVVVGARGV (KRAS G12R)
VVVFGIRGH

SEQ ID NO: 28847 - protein, 9 aa, synthetic construct
  source 1..9: note = Seed: LVVVGARGV (KRAS G12R)
VVVFGIRGI

SEQ ID NO: 28848 - protein, 9 aa, synthetic construct
  source 1..9: note = Seed: LVVVGARGV (KRAS G12R)
VVVFGIRGK

SEQ ID NO: 28849 - protein, 9 aa, synthetic construct
  source 1..9: note = Seed: LVVVGARGV (KRAS G12R)
VVVFGIRGL

SEQ ID NO: 28850 - protein, 9 aa, synthetic construct
  source 1..9: note = Seed: LVVVGARGV (KRAS G12R)
VVVFGIRGM

SEQ ID NO: 28851 - protein, 9 aa, synthetic construct
  source 1..9: note = Seed: LVVVGARGV (KRAS G12R)
VVVFGIRGR

SEQ ID NO: 28852 - protein, 9 aa, synthetic construct
  source 1..9: note = Seed: LVVVGARGV (KRAS G12R)
VVVFGIRGV

SEQ ID NO: 28853 - protein, 9 aa, synthetic construct
  source 1..9: note = Seed: LVVVGARGV (KRAS G12R)
VVVFGIRGY

SEQ ID NO: 28854 - protein, 9 aa, synthetic construct
  source 1..9: note = Seed: LVVVGARGV (KRAS G12R)
VVVFGKRGA

SEQ ID NO: 28855 - protein, 9 aa, synthetic construct
  source 1..9: note = Seed: LVVVGARGV (KRAS G12R)
VVVFGKRGC

SEQ ID NO: 28856 - protein, 9 aa, synthetic construct
  source 1..9: note = Seed: LVVVGARGV (KRAS G12R)
VVVFGKRGF

SEQ ID NO: 28857 - protein, 9 aa, synthetic construct
  source 1..9: note = Seed: LVVVGARGV (KRAS G12R)
VVVFGKRGG

SEQ ID NO: 28858 - protein, 9 aa, synthetic construct
  source 1..9: note = Seed: LVVVGARGV (KRAS G12R)
VVVFGKRGH

SEQ ID NO: 28859 - protein, 9 aa, synthetic construct
  source 1..9: note = Seed: LVVVGARGV (KRAS G12R)
VVVFGKRGI

SEQ ID NO: 28860 - protein, 9 aa, synthetic construct
  source 1..9: note = Seed: LVVVGARGV (KRAS G12R)
VVVFGKRGK

SEQ ID NO: 28861 - protein, 9 aa, synthetic construct
  source 1..9: note = Seed: LVVVGARGV (KRAS G12R)
VVVFGKRGL

SEQ ID NO: 28862 - protein, 9 aa, synthetic construct
  source 1..9: note = Seed: LVVVGARGV (KRAS G12R)
VVVFGKRGM

SEQ ID NO: 28863 - protein, 9 aa, synthetic construct
  source 1..9: note = Seed: LVVVGARGV (KRAS G12R)
VVVFGKRGN

SEQ ID NO: 28864 - protein, 9 aa, synthetic construct
  source 1..9: note = Seed: LVVVGARGV (KRAS G12R)
VVVFGKRGP

SEQ ID NO: 28865 - protein, 9 aa, synthetic construct
  source 1..9: note = Seed: LVVVGARGV (KRAS G12R)
VVVFGKRGQ

SEQ ID NO: 28866 - protein, 9 aa, synthetic construct
  source 1..9: note = Seed: LVVVGARGV (KRAS G12R)
VVVFGKRGR

SEQ ID NO: 28867 - protein, 9 aa, synthetic construct
  source 1..9: note = Seed: LVVVGARGV (KRAS G12R)
VVVFGKRGS

SEQ ID NO: 28868 - protein, 9 aa, synthetic construct
  source 1..9: note = Seed: LVVVGARGV (KRAS G12R)
VVVFGKRGT

SEQ ID NO: 28869 - protein, 9 aa, synthetic construct
  source 1..9: note = Seed: LVVVGARGV (KRAS G12R)
VVVFGKRGV

SEQ ID NO: 28870 - protein, 9 aa, synthetic construct
  source 1..9: note = Seed: LVVVGARGV (KRAS G12R)
VVVFGKRGW

SEQ ID NO: 28871 - protein, 9 aa, synthetic construct
  source 1..9: note = Seed: LVVVGARGV (KRAS G12R)
VVVFGKRGY

SEQ ID NO: 28872 - protein, 9 aa, synthetic construct
  source 1..9: note = Seed: LVVVGARGV (KRAS G12R)
VVVFGLRGA

SEQ ID NO: 28873 - protein, 9 aa, synthetic construct
  source 1..9: note = Seed: LVVVGARGV (KRAS G12R)
VVVFGLRGH

SEQ ID NO: 28874 - protein, 9 aa, synthetic construct
  source 1..9: note = Seed: LVVVGARGV (KRAS G12R)
VVVFGLRGK

SEQ ID NO: 28875 - protein, 9 aa, synthetic construct
  source 1..9: note = Seed: LVVVGARGV (KRAS G12R)
VVVFGLRGL

SEQ ID NO: 28876 - protein, 9 aa, synthetic construct
  source 1..9: note = Seed: LVVVGARGV (KRAS G12R)
VVVFGLRGR

SEQ ID NO: 28877 - protein, 9 aa, synthetic construct
  source 1..9: note = Seed: LVVVGARGV (KRAS G12R)
VVVFGLRGY

SEQ ID NO: 28878 - protein, 9 aa, synthetic construct
  source 1..9: note = Seed: LVVVGARGV (KRAS G12R)
VVVFGMRGA

SEQ ID NO: 28879 - protein, 9 aa, synthetic construct
  source 1..9: note = Seed: LVVVGARGV (KRAS G12R)
VVVFGMRGI

SEQ ID NO: 28880 - protein, 9 aa, synthetic construct
  source 1..9: note = Seed: LVVVGARGV (KRAS G12R)
VVVFGMRGK

SEQ ID NO: 28881 - protein, 9 aa, synthetic construct
  source 1..9: note = Seed: LVVVGARGV (KRAS G12R)
VVVFGMRGL

SEQ ID NO: 28882 - protein, 9 aa, synthetic construct
  source 1..9: note = Seed: LVVVGARGV (KRAS G12R)
VVVFGMRGM

SEQ ID NO: 28883 - protein, 9 aa, synthetic construct
  source 1..9: note = Seed: LVVVGARGV (KRAS G12R)
VVVFGMRGR

SEQ ID NO: 28884 - protein, 9 aa, synthetic construct
  source 1..9: note = Seed: LVVVGARGV (KRAS G12R)
VVVFGMRGV

SEQ ID NO: 28885 - protein, 9 aa, synthetic construct
  source 1..9: note = Seed: LVVVGARGV (KRAS G12R)
VVVFGMRGY

SEQ ID NO: 28886 - protein, 9 aa, synthetic construct
  source 1..9: note = Seed: LVVVGARGV (KRAS G12R)
VVVFGNRGA

SEQ ID NO: 28887 - protein, 9 aa, synthetic construct
  source 1..9: note = Seed: LVVVGARGV (KRAS G12R)
VVVFGNRGF

SEQ ID NO: 28888 - protein, 9 aa, synthetic construct
  source 1..9: note = Seed: LVVVGARGV (KRAS G12R)
VVVFGNRGH

SEQ ID NO: 28889 - protein, 9 aa, synthetic construct
  source 1..9: note = Seed: LVVVGARGV (KRAS G12R)
VVVFGNRGI

SEQ ID NO: 28890 - protein, 9 aa, synthetic construct
  source 1..9: note = Seed: LVVVGARGV (KRAS G12R)
VVVFGNRGK

SEQ ID NO: 28891 - protein, 9 aa, synthetic construct
  source 1..9: note = Seed: LVVVGARGV (KRAS G12R)
VVVFGNRGL

SEQ ID NO: 28892 - protein, 9 aa, synthetic construct
  source 1..9: note = Seed: LVVVGARGV (KRAS G12R)
VVVFGNRGM

SEQ ID NO: 28893 - protein, 9 aa, synthetic construct
  source 1..9: note = Seed: LVVVGARGV (KRAS G12R)
VVVFGNRGR

SEQ ID NO: 28894 - protein, 9 aa, synthetic construct
  source 1..9: note = Seed: LVVVGARGV (KRAS G12R)
VVVFGNRGS

SEQ ID NO: 28895 - protein, 9 aa, synthetic construct
  source 1..9: note = Seed: LVVVGARGV (KRAS G12R)
VVVFGNRGT

SEQ ID NO: 28896 - protein, 9 aa, synthetic construct
  source 1..9: note = Seed: LVVVGARGV (KRAS G12R)
VVVFGNRGV

SEQ ID NO: 28897 - protein, 9 aa, synthetic construct
  source 1..9: note = Seed: LVVVGARGV (KRAS G12R)
VVVFGNRGY

SEQ ID NO: 28898 - protein, 9 aa, synthetic construct
  source 1..9: note = Seed: LVVVGARGV (KRAS G12R)
VVVFGPRGI

SEQ ID NO: 28899 - protein, 9 aa, synthetic construct
  source 1..9: note = Seed: LVVVGARGV (KRAS G12R)
VVVFGPRGK

SEQ ID NO: 28900 - protein, 9 aa, synthetic construct
  source 1..9: note = Seed: LVVVGARGV (KRAS G12R)
VVVFGPRGL

SEQ ID NO: 28901 - protein, 9 aa, synthetic construct
  source 1..9: note = Seed: LVVVGARGV (KRAS G12R)
VVVFGPRGM

SEQ ID NO: 28902 - protein, 9 aa, synthetic construct
  source 1..9: note = Seed: LVVVGARGV (KRAS G12R)
VVVFGPRGR

SEQ ID NO: 28903 - protein, 9 aa, synthetic construct
  source 1..9: note = Seed: LVVVGARGV (KRAS G12R)
VVVFGPRGV

SEQ ID NO: 28904 - protein, 9 aa, synthetic construct
  source 1..9: note = Seed: LVVVGARGV (KRAS G12R)
VVVFGQRGK

SEQ ID NO: 28905 - protein, 9 aa, synthetic construct
  source 1..9: note = Seed: LVVVGARGV (KRAS G12R)
VVVFGQRGL

SEQ ID NO: 28906 - protein, 9 aa, synthetic construct
  source 1..9: note = Seed: LVVVGARGV (KRAS G12R)
VVVFGQRGM

SEQ ID NO: 28907 - protein, 9 aa, synthetic construct
  source 1..9: note = Seed: LVVVGARGV (KRAS G12R)
VVVFGQRGR

SEQ ID NO: 28908 - protein, 9 aa, synthetic construct
  source 1..9: note = Seed: LVVVGARGV (KRAS G12R)
VVVFGRRGA

SEQ ID NO: 28909 - protein, 9 aa, synthetic construct
  source 1..9: note = Seed: LVVVGARGV (KRAS G12R)
VVVFGRRGC

SEQ ID NO: 28910 - protein, 9 aa, synthetic construct
  source 1..9: note = Seed: LVVVGARGV (KRAS G12R)
VVVFGRRGE

SEQ ID NO: 28911 - protein, 9 aa, synthetic construct
  source 1..9: note = Seed: LVVVGARGV (KRAS G12R)
VVVFGRRGF

SEQ ID NO: 28912 - protein, 9 aa, synthetic construct
  source 1..9: note = Seed: LVVVGARGV (KRAS G12R)
VVVFGRRGG

SEQ ID NO: 28913 - protein, 9 aa, synthetic construct
  source 1..9: note = Seed: LVVVGARGV (KRAS G12R)
VVVFGRRGH

SEQ ID NO: 28914 - protein, 9 aa, synthetic construct
  source 1..9: note = Seed: LVVVGARGV (KRAS G12R)
VVVFGRRGI

SEQ ID NO: 28915 - protein, 9 aa, synthetic construct
  source 1..9: note = Seed: LVVVGARGV (KRAS G12R)
VVVFGRRGK

SEQ ID NO: 28916 - protein, 9 aa, synthetic construct
  source 1..9: note = Seed: LVVVGARGV (KRAS G12R)
VVVFGRRGL

SEQ ID NO: 28917 - protein, 9 aa, synthetic construct
  source 1..9: note = Seed: LVVVGARGV (KRAS G12R)
VVVFGRRGM

SEQ ID NO: 28918 - protein, 9 aa, synthetic construct
  source 1..9: note = Seed: LVVVGARGV (KRAS G12R)
VVVFGRRGN

SEQ ID NO: 28919 - protein, 9 aa, synthetic construct
  source 1..9: note = Seed: LVVVGARGV (KRAS G12R)
VVVFGRRGP

SEQ ID NO: 28920 - protein, 9 aa, synthetic construct
  source 1..9: note = Seed: LVVVGARGV (KRAS G12R)
VVVFGRRGQ

SEQ ID NO: 28921 - protein, 9 aa, synthetic construct
  source 1..9: note = Seed: LVVVGARGV (KRAS G12R)
VVVFGRRGR

SEQ ID NO: 28922 - protein, 9 aa, synthetic construct
  source 1..9: note = Seed: LVVVGARGV (KRAS G12R)
VVVFGRRGS

SEQ ID NO: 28923 - protein, 9 aa, synthetic construct
  source 1..9: note = Seed: LVVVGARGV (KRAS G12R)
VVVFGRRGT

SEQ ID NO: 28924 - protein, 9 aa, synthetic construct
  source 1..9: note = Seed: LVVVGARGV (KRAS G12R)
VVVFGRRGV

SEQ ID NO: 28925 - protein, 9 aa, synthetic construct
  source 1..9: note = Seed: LVVVGARGV (KRAS G12R)
VVVFGRRGW

SEQ ID NO: 28926 - protein, 9 aa, synthetic construct
  source 1..9: note = Seed: LVVVGARGV (KRAS G12R)
VVVFGRRGY

SEQ ID NO: 28927 - protein, 9 aa, synthetic construct
  source 1..9: note = Seed: LVVVGARGV (KRAS G12R)
VVVFGSRGA

SEQ ID NO: 28928 - protein, 9 aa, synthetic construct
  source 1..9: note = Seed: LVVVGARGV (KRAS G12R)
VVVFGSRGF

SEQ ID NO: 28929 - protein, 9 aa, synthetic construct
  source 1..9: note = Seed: LVVVGARGV (KRAS G12R)
VVVFGSRGG

SEQ ID NO: 28930 - protein, 9 aa, synthetic construct
  source 1..9: note = Seed: LVVVGARGV (KRAS G12R)
VVVFGSRGH

SEQ ID NO: 28931 - protein, 9 aa, synthetic construct
  source 1..9: note = Seed: LVVVGARGV (KRAS G12R)
VVVFGSRGI

SEQ ID NO: 28932 - protein, 9 aa, synthetic construct
  source 1..9: note = Seed: LVVVGARGV (KRAS G12R)
VVVFGSRGK

SEQ ID NO: 28933 - protein, 9 aa, synthetic construct
  source 1..9: note = Seed: LVVVGARGV (KRAS G12R)
VVVFGSRGL

SEQ ID NO: 28934 - protein, 9 aa, synthetic construct
  source 1..9: note = Seed: LVVVGARGV (KRAS G12R)
VVVFGSRGM

SEQ ID NO: 28935 - protein, 9 aa, synthetic construct
  source 1..9: note = Seed: LVVVGARGV (KRAS G12R)
VVVFGSRGN

SEQ ID NO: 28936 - protein, 9 aa, synthetic construct
  source 1..9: note = Seed: LVVVGARGV (KRAS G12R)
VVVFGSRGR

SEQ ID NO: 28937 - protein, 9 aa, synthetic construct
  source 1..9: note = Seed: LVVVGARGV (KRAS G12R)
VVVFGSRGS

SEQ ID NO: 28938 - protein, 9 aa, synthetic construct
  source 1..9: note = Seed: LVVVGARGV (KRAS G12R)
VVVFGSRGT

SEQ ID NO: 28939 - protein, 9 aa, synthetic construct
  source 1..9: note = Seed: LVVVGARGV (KRAS G12R)
VVVFGSRGV

SEQ ID NO: 28940 - protein, 9 aa, synthetic construct
  source 1..9: note = Seed: LVVVGARGV (KRAS G12R)
VVVFGSRGY

SEQ ID NO: 28941 - protein, 9 aa, synthetic construct
  source 1..9: note = Seed: LVVVGARGV (KRAS G12R)
VVVFGTRGA

SEQ ID NO: 28942 - protein, 9 aa, synthetic construct
  source 1..9: note = Seed: LVVVGARGV (KRAS G12R)
VVVFGTRGF

SEQ ID NO: 28943 - protein, 9 aa, synthetic construct
  source 1..9: note = Seed: LVVVGARGV (KRAS G12R)
VVVFGTRGH

SEQ ID NO: 28944 - protein, 9 aa, synthetic construct
  source 1..9: note = Seed: LVVVGARGV (KRAS G12R)
VVVFGTRGI

SEQ ID NO: 28945 - protein, 9 aa, synthetic construct
  source 1..9: note = Seed: LVVVGARGV (KRAS G12R)
VVVFGTRGK

SEQ ID NO: 28946 - protein, 9 aa, synthetic construct
  source 1..9: note = Seed: LVVVGARGV (KRAS G12R)
VVVFGTRGL

SEQ ID NO: 28947 - protein, 9 aa, synthetic construct
  source 1..9: note = Seed: LVVVGARGV (KRAS G12R)
VVVFGTRGM

SEQ ID NO: 28948 - protein, 9 aa, synthetic construct
  source 1..9: note = Seed: LVVVGARGV (KRAS G12R)
VVVFGTRGR

SEQ ID NO: 28949 - protein, 9 aa, synthetic construct
  source 1..9: note = Seed: LVVVGARGV (KRAS G12R)
VVVFGTRGT

SEQ ID NO: 28950 - protein, 9 aa, synthetic construct
  source 1..9: note = Seed: LVVVGARGV (KRAS G12R)
VVVFGTRGV

SEQ ID NO: 28951 - protein, 9 aa, synthetic construct
  source 1..9: note = Seed: LVVVGARGV (KRAS G12R)
VVVFGTRGY

SEQ ID NO: 28952 - protein, 9 aa, synthetic construct
  source 1..9: note = Seed: LVVVGARGV (KRAS G12R)
VVVFGVRGA

SEQ ID NO: 28953 - protein, 9 aa, synthetic construct
  source 1..9: note = Seed: LVVVGARGV (KRAS G12R)
VVVFGVRGF

SEQ ID NO: 28954 - protein, 9 aa, synthetic construct
  source 1..9: note = Seed: LVVVGARGV (KRAS G12R)
VVVFGVRGH

SEQ ID NO: 28955 - protein, 9 aa, synthetic construct
  source 1..9: note = Seed: LVVVGARGV (KRAS G12R)
VVVFGVRGI

SEQ ID NO: 28956 - protein, 9 aa, synthetic construct
  source 1..9: note = Seed: LVVVGARGV (KRAS G12R)
VVVFGVRGK

SEQ ID NO: 28957 - protein, 9 aa, synthetic construct
  source 1..9: note = Seed: LVVVGARGV (KRAS G12R)
VVVFGVRGL

SEQ ID NO: 28958 - protein, 9 aa, synthetic construct
  source 1..9: note = Seed: LVVVGARGV (KRAS G12R)
VVVFGVRGM

SEQ ID NO: 28959 - protein, 9 aa, synthetic construct
  source 1..9: note = Seed: LVVVGARGV (KRAS G12R)
VVVFGVRGR

SEQ ID NO: 28960 - protein, 9 aa, synthetic construct
  source 1..9: note = Seed: LVVVGARGV (KRAS G12R)
VVVFGVRGV

SEQ ID NO: 28961 - protein, 9 aa, synthetic construct
  source 1..9: note = Seed: LVVVGARGV (KRAS G12R)
VVVFGVRGY

SEQ ID NO: 28962 - protein, 9 aa, synthetic construct
  source 1..9: note = Seed: LVVVGARGV (KRAS G12R)
VVVFGWRGR

SEQ ID NO: 28963 - protein, 9 aa, synthetic construct
  source 1..9: note = Seed: LVVVGARGV (KRAS G12R)
VVVFGYRGR

SEQ ID NO: 28964 - protein, 9 aa, synthetic construct
  source 1..9: note = Seed: LVVVGARGV (KRAS G12R)
VVVGGARGA

SEQ ID NO: 28965 - protein, 9 aa, synthetic construct
  source 1..9: note = Seed: LVVVGARGV (KRAS G12R)
VVVGGARGI

SEQ ID NO: 28966 - protein, 9 aa, synthetic construct
  source 1..9: note = Seed: LVVVGARGV (KRAS G12R)
VVVGGARGL

SEQ ID NO: 28967 - protein, 9 aa, synthetic construct
  source 1..9: note = Seed: LVVVGARGV (KRAS G12R)
VVVGGARGS

SEQ ID NO: 28968 - protein, 9 aa, synthetic construct
  source 1..9: note = Seed: LVVVGARGV (KRAS G12R)
VVVGGARGT

SEQ ID NO: 28969 - protein, 9 aa, synthetic construct
  source 1..9: note = Seed: LVVVGARGV (KRAS G12R)
VVVGGARGV

SEQ ID NO: 28970 - protein, 9 aa, synthetic construct
  source 1..9: note = Seed: LVVVGARGV (KRAS G12R)
VVVGGRRGL

SEQ ID NO: 28971 - protein, 9 aa, synthetic construct
  source 1..9: note = Seed: LVVVGARGV (KRAS G12R)
VVVGGRRGR

SEQ ID NO: 28972 - protein, 9 aa, synthetic construct
  source 1..9: note = Seed: LVVVGARGV (KRAS G12R)
VVVGGSRGL

SEQ ID NO: 28973 - protein, 9 aa, synthetic construct
  source 1..9: note = Seed: LVVVGARGV (KRAS G12R)
VVVHGARGF

SEQ ID NO: 28974 - protein, 9 aa, synthetic construct
  source 1..9: note = Seed: LVVVGARGV (KRAS G12R)
VVVHGARGI

SEQ ID NO: 28975 - protein, 9 aa, synthetic construct
  source 1..9: note = Seed: LVVVGARGV (KRAS G12R)
VVVHGARGK

SEQ ID NO: 28976 - protein, 9 aa, synthetic construct
  source 1..9: note = Seed: LVVVGARGV (KRAS G12R)
VVVHGARGL

SEQ ID NO: 28977 - protein, 9 aa, synthetic construct
  source 1..9: note = Seed: LVVVGARGV (KRAS G12R)
VVVHGARGM

SEQ ID NO: 28978 - protein, 9 aa, synthetic construct
  source 1..9: note = Seed: LVVVGARGV (KRAS G12R)
VVVHGARGR

SEQ ID NO: 28979 - protein, 9 aa, synthetic construct
  source 1..9: note = Seed: LVVVGARGV (KRAS G12R)
VVVHGARGV

SEQ ID NO: 28980 - protein, 9 aa, synthetic construct
  source 1..9: note = Seed: LVVVGARGV (KRAS G12R)
VVVHGARGY

SEQ ID NO: 28981 - protein, 9 aa, synthetic construct
  source 1..9: note = Seed: LVVVGARGV (KRAS G12R)
VVVHGFRGR

SEQ ID NO: 28982 - protein, 9 aa, synthetic construct
  source 1..9: note = Seed: LVVVGARGV (KRAS G12R)
VVVHGHRGF

SEQ ID NO: 28983 - protein, 9 aa, synthetic construct
  source 1..9: note = Seed: LVVVGARGV (KRAS G12R)
VVVHGHRGI

SEQ ID NO: 28984 - protein, 9 aa, synthetic construct
  source 1..9: note = Seed: LVVVGARGV (KRAS G12R)
VVVHGHRGK

SEQ ID NO: 28985 - protein, 9 aa, synthetic construct
  source 1..9: note = Seed: LVVVGARGV (KRAS G12R)
VVVHGHRGL

SEQ ID NO: 28986 - protein, 9 aa, synthetic construct
  source 1..9: note = Seed: LVVVGARGV (KRAS G12R)
VVVHGHRGM

SEQ ID NO: 28987 - protein, 9 aa, synthetic construct
  source 1..9: note = Seed: LVVVGARGV (KRAS G12R)
VVVHGHRGR

SEQ ID NO: 28988 - protein, 9 aa, synthetic construct
  source 1..9: note = Seed: LVVVGARGV (KRAS G12R)
VVVHGHRGV

SEQ ID NO: 28989 - protein, 9 aa, synthetic construct
  source 1..9: note = Seed: LVVVGARGV (KRAS G12R)
VVVHGHRGY

SEQ ID NO: 28990 - protein, 9 aa, synthetic construct
  source 1..9: note = Seed: LVVVGARGV (KRAS G12R)
VVVHGIRGA

SEQ ID NO: 28991 - protein, 9 aa, synthetic construct
  source 1..9: note = Seed: LVVVGARGV (KRAS G12R)
VVVHGIRGF

SEQ ID NO: 28992 - protein, 9 aa, synthetic construct
  source 1..9: note = Seed: LVVVGARGV (KRAS G12R)
VVVHGIRGH

SEQ ID NO: 28993 - protein, 9 aa, synthetic construct
  source 1..9: note = Seed: LVVVGARGV (KRAS G12R)
VVVHGIRGI

SEQ ID NO: 28994 - protein, 9 aa, synthetic construct
  source 1..9: note = Seed: LVVVGARGV (KRAS G12R)
VVVHGIRGK

SEQ ID NO: 28995 - protein, 9 aa, synthetic construct
  source 1..9: note = Seed: LVVVGARGV (KRAS G12R)
VVVHGIRGL

SEQ ID NO: 28996 - protein, 9 aa, synthetic construct
  source 1..9: note = Seed: LVVVGARGV (KRAS G12R)
VVVHGIRGM

SEQ ID NO: 28997 - protein, 9 aa, synthetic construct
  source 1..9: note = Seed: LVVVGARGV (KRAS G12R)
VVVHGIRGR

SEQ ID NO: 28998 - protein, 9 aa, synthetic construct
  source 1..9: note = Seed: LVVVGARGV (KRAS G12R)
VVVHGIRGV

SEQ ID NO: 28999 - protein, 9 aa, synthetic construct
  source 1..9: note = Seed: LVVVGARGV (KRAS G12R)
VVVHGIRGY

SEQ ID NO: 29000 - protein, 9 aa, synthetic construct
  source 1..9: note = Seed: LVVVGARGV (KRAS G12R)
VVVHGKRGA

SEQ ID NO: 29001 - protein, 9 aa, synthetic construct
  source 1..9: note = Seed: LVVVGARGV (KRAS G12R)
VVVHGKRGF

SEQ ID NO: 29002 - protein, 9 aa, synthetic construct
  source 1..9: note = Seed: LVVVGARGV (KRAS G12R)
VVVHGKRGH

SEQ ID NO: 29003 - protein, 9 aa, synthetic construct
  source 1..9: note = Seed: LVVVGARGV (KRAS G12R)
VVVHGKRGI

SEQ ID NO: 29004 - protein, 9 aa, synthetic construct
  source 1..9: note = Seed: LVVVGARGV (KRAS G12R)
VVVHGKRGK

SEQ ID NO: 29005 - protein, 9 aa, synthetic construct
  source 1..9: note = Seed: LVVVGARGV (KRAS G12R)
VVVHGKRGL

SEQ ID NO: 29006 - protein, 9 aa, synthetic construct
  source 1..9: note = Seed: LVVVGARGV (KRAS G12R)
VVVHGKRGM

SEQ ID NO: 29007 - protein, 9 aa, synthetic construct
  source 1..9: note = Seed: LVVVGARGV (KRAS G12R)
VVVHGKRGQ

SEQ ID NO: 29008 - protein, 9 aa, synthetic construct
  source 1..9: note = Seed: LVVVGARGV (KRAS G12R)
VVVHGKRGR

SEQ ID NO: 29009 - protein, 9 aa, synthetic construct
  source 1..9: note = Seed: LVVVGARGV (KRAS G12R)
VVVHGKRGS

SEQ ID NO: 29010 - protein, 9 aa, synthetic construct
  source 1..9: note = Seed: LVVVGARGV (KRAS G12R)
VVVHGKRGT

SEQ ID NO: 29011 - protein, 9 aa, synthetic construct
  source 1..9: note = Seed: LVVVGARGV (KRAS G12R)
VVVHGKRGV

SEQ ID NO: 29012 - protein, 9 aa, synthetic construct
  source 1..9: note = Seed: LVVVGARGV (KRAS G12R)
VVVHGKRGW

SEQ ID NO: 29013 - protein, 9 aa, synthetic construct
  source 1..9: note = Seed: LVVVGARGV (KRAS G12R)
VVVHGKRGY

SEQ ID NO: 29014 - protein, 9 aa, synthetic construct
  source 1..9: note = Seed: LVVVGARGV (KRAS G12R)
VVVHGLRGA

SEQ ID NO: 29015 - protein, 9 aa, synthetic construct
  source 1..9: note = Seed: LVVVGARGV (KRAS G12R)
VVVHGLRGF

SEQ ID NO: 29016 - protein, 9 aa, synthetic construct
  source 1..9: note = Seed: LVVVGARGV (KRAS G12R)
VVVHGLRGI

SEQ ID NO: 29017 - protein, 9 aa, synthetic construct
  source 1..9: note = Seed: LVVVGARGV (KRAS G12R)
VVVHGLRGK

SEQ ID NO: 29018 - protein, 9 aa, synthetic construct
  source 1..9: note = Seed: LVVVGARGV (KRAS G12R)
VVVHGLRGL

SEQ ID NO: 29019 - protein, 9 aa, synthetic construct
  source 1..9: note = Seed: LVVVGARGV (KRAS G12R)
VVVHGLRGM

SEQ ID NO: 29020 - protein, 9 aa, synthetic construct
  source 1..9: note = Seed: LVVVGARGV (KRAS G12R)
VVVHGLRGR

SEQ ID NO: 29021 - protein, 9 aa, synthetic construct
  source 1..9: note = Seed: LVVVGARGV (KRAS G12R)
VVVHGLRGV

SEQ ID NO: 29022 - protein, 9 aa, synthetic construct
  source 1..9: note = Seed: LVVVGARGV (KRAS G12R)
VVVHGLRGY

SEQ ID NO: 29023 - protein, 9 aa, synthetic construct
  source 1..9: note = Seed: LVVVGARGV (KRAS G12R)
VVVHGMRGA

SEQ ID NO: 29024 - protein, 9 aa, synthetic construct
  source 1..9: note = Seed: LVVVGARGV (KRAS G12R)
VVVHGMRGF

SEQ ID NO: 29025 - protein, 9 aa, synthetic construct
  source 1..9: note = Seed: LVVVGARGV (KRAS G12R)
VVVHGMRGI

SEQ ID NO: 29026 - protein, 9 aa, synthetic construct
  source 1..9: note = Seed: LVVVGARGV (KRAS G12R)
VVVHGMRGK

SEQ ID NO: 29027 - protein, 9 aa, synthetic construct
  source 1..9: note = Seed: LVVVGARGV (KRAS G12R)
VVVHGMRGL

SEQ ID NO: 29028 - protein, 9 aa, synthetic construct
  source 1..9: note = Seed: LVVVGARGV (KRAS G12R)
VVVHGMRGM

SEQ ID NO: 29029 - protein, 9 aa, synthetic construct
  source 1..9: note = Seed: LVVVGARGV (KRAS G12R)
VVVHGMRGR

SEQ ID NO: 29030 - protein, 9 aa, synthetic construct
  source 1..9: note = Seed: LVVVGARGV (KRAS G12R)
VVVHGMRGV

SEQ ID NO: 29031 - protein, 9 aa, synthetic construct
  source 1..9: note = Seed: LVVVGARGV (KRAS G12R)
VVVHGMRGY

SEQ ID NO: 29032 - protein, 9 aa, synthetic construct
  source 1..9: note = Seed: LVVVGARGV (KRAS G12R)
VVVHGNRGF

SEQ ID NO: 29033 - protein, 9 aa, synthetic construct
  source 1..9: note = Seed: LVVVGARGV (KRAS G12R)
VVVHGNRGI

SEQ ID NO: 29034 - protein, 9 aa, synthetic construct
  source 1..9: note = Seed: LVVVGARGV (KRAS G12R)
VVVHGNRGL

SEQ ID NO: 29035 - protein, 9 aa, synthetic construct
  source 1..9: note = Seed: LVVVGARGV (KRAS G12R)
VVVHGNRGM

SEQ ID NO: 29036 - protein, 9 aa, synthetic construct
  source 1..9: note = Seed: LVVVGARGV (KRAS G12R)
VVVHGNRGR

SEQ ID NO: 29037 - protein, 9 aa, synthetic construct
  source 1..9: note = Seed: LVVVGARGV (KRAS G12R)
VVVHGNRGV

SEQ ID NO: 29038 - protein, 9 aa, synthetic construct
  source 1..9: note = Seed: LVVVGARGV (KRAS G12R)
VVVHGNRGY

SEQ ID NO: 29039 - protein, 9 aa, synthetic construct
  source 1..9: note = Seed: LVVVGARGV (KRAS G12R)
VVVHGQRGL

SEQ ID NO: 29040 - protein, 9 aa, synthetic construct
  source 1..9: note = Seed: LVVVGARGV (KRAS G12R)
VVVHGQRGR

SEQ ID NO: 29041 - protein, 9 aa, synthetic construct
  source 1..9: note = Seed: LVVVGARGV (KRAS G12R)
VVVHGRRGA

SEQ ID NO: 29042 - protein, 9 aa, synthetic construct
  source 1..9: note = Seed: LVVVGARGV (KRAS G12R)
VVVHGRRGF

SEQ ID NO: 29043 - protein, 9 aa, synthetic construct
  source 1..9: note = Seed: LVVVGARGV (KRAS G12R)
VVVHGRRGG

SEQ ID NO: 29044 - protein, 9 aa, synthetic construct
  source 1..9: note = Seed: LVVVGARGV (KRAS G12R)
VVVHGRRGH

SEQ ID NO: 29045 - protein, 9 aa, synthetic construct
  source 1..9: note = Seed: LVVVGARGV (KRAS G12R)
VVVHGRRGI

SEQ ID NO: 29046 - protein, 9 aa, synthetic construct
  source 1..9: note = Seed: LVVVGARGV (KRAS G12R)
VVVHGRRGK

SEQ ID NO: 29047 - protein, 9 aa, synthetic construct
  source 1..9: note = Seed: LVVVGARGV (KRAS G12R)
VVVHGRRGL

SEQ ID NO: 29048 - protein, 9 aa, synthetic construct
  source 1..9: note = Seed: LVVVGARGV (KRAS G12R)
VVVHGRRGM

SEQ ID NO: 29049 - protein, 9 aa, synthetic construct
  source 1..9: note = Seed: LVVVGARGV (KRAS G12R)
VVVHGRRGN

SEQ ID NO: 29050 - protein, 9 aa, synthetic construct
  source 1..9: note = Seed: LVVVGARGV (KRAS G12R)
VVVHGRRGP

SEQ ID NO: 29051 - protein, 9 aa, synthetic construct
  source 1..9: note = Seed: LVVVGARGV (KRAS G12R)
VVVHGRRGQ

SEQ ID NO: 29052 - protein, 9 aa, synthetic construct
  source 1..9: note = Seed: LVVVGARGV (KRAS G12R)
VVVHGRRGR

SEQ ID NO: 29053 - protein, 9 aa, synthetic construct
  source 1..9: note = Seed: LVVVGARGV (KRAS G12R)
VVVHGRRGS

SEQ ID NO: 29054 - protein, 9 aa, synthetic construct
  source 1..9: note = Seed: LVVVGARGV (KRAS G12R)
VVVHGRRGT

SEQ ID NO: 29055 - protein, 9 aa, synthetic construct
  source 1..9: note = Seed: LVVVGARGV (KRAS G12R)
VVVHGRRGV

SEQ ID NO: 29056 - protein, 9 aa, synthetic construct
  source 1..9: note = Seed: LVVVGARGV (KRAS G12R)
VVVHGRRGW

SEQ ID NO: 29057 - protein, 9 aa, synthetic construct
  source 1..9: note = Seed: LVVVGARGV (KRAS G12R)
VVVHGRRGY

SEQ ID NO: 29058 - protein, 9 aa, synthetic construct
  source 1..9: note = Seed: LVVVGARGV (KRAS G12R)
VVVHGSRGF

SEQ ID NO: 29059 - protein, 9 aa, synthetic construct
  source 1..9: note = Seed: LVVVGARGV (KRAS G12R)
VVVHGSRGI

SEQ ID NO: 29060 - protein, 9 aa, synthetic construct
  source 1..9: note = Seed: LVVVGARGV (KRAS G12R)
VVVHGSRGL

SEQ ID NO: 29061 - protein, 9 aa, synthetic construct
  source 1..9: note = Seed: LVVVGARGV (KRAS G12R)
VVVHGSRGM

SEQ ID NO: 29062 - protein, 9 aa, synthetic construct
  source 1..9: note = Seed: LVVVGARGV (KRAS G12R)
VVVHGSRGR

SEQ ID NO: 29063 - protein, 9 aa, synthetic construct
  source 1..9: note = Seed: LVVVGARGV (KRAS G12R)
VVVHGSRGV

SEQ ID NO: 29064 - protein, 9 aa, synthetic construct
  source 1..9: note = Seed: LVVVGARGV (KRAS G12R)
VVVHGSRGY

SEQ ID NO: 29065 - protein, 9 aa, synthetic construct
  source 1..9: note = Seed: LVVVGARGV (KRAS G12R)
VVVHGTRGF

SEQ ID NO: 29066 - protein, 9 aa, synthetic construct
  source 1..9: note = Seed: LVVVGARGV (KRAS G12R)
VVVHGTRGI

SEQ ID NO: 29067 - protein, 9 aa, synthetic construct
  source 1..9: note = Seed: LVVVGARGV (KRAS G12R)
VVVHGTRGL

SEQ ID NO: 29068 - protein, 9 aa, synthetic construct
  source 1..9: note = Seed: LVVVGARGV (KRAS G12R)
VVVHGTRGM

SEQ ID NO: 29069 - protein, 9 aa, synthetic construct
  source 1..9: note = Seed: LVVVGARGV (KRAS G12R)
VVVHGTRGR

SEQ ID NO: 29070 - protein, 9 aa, synthetic construct
  source 1..9: note = Seed: LVVVGARGV (KRAS G12R)
VVVHGTRGV

SEQ ID NO: 29071 - protein, 9 aa, synthetic construct
  source 1..9: note = Seed: LVVVGARGV (KRAS G12R)
VVVHGTRGY

SEQ ID NO: 29072 - protein, 9 aa, synthetic construct
  source 1..9: note = Seed: LVVVGARGV (KRAS G12R)
VVVHGVRGF

SEQ ID NO: 29073 - protein, 9 aa, synthetic construct
  source 1..9: note = Seed: LVVVGARGV (KRAS G12R)
VVVHGVRGI

SEQ ID NO: 29074 - protein, 9 aa, synthetic construct
  source 1..9: note = Seed: LVVVGARGV (KRAS G12R)
VVVHGVRGK

SEQ ID NO: 29075 - protein, 9 aa, synthetic construct
  source 1..9: note = Seed: LVVVGARGV (KRAS G12R)
VVVHGVRGL

SEQ ID NO: 29076 - protein, 9 aa, synthetic construct
  source 1..9: note = Seed: LVVVGARGV (KRAS G12R)
VVVHGVRGM

SEQ ID NO: 29077 - protein, 9 aa, synthetic construct
  source 1..9: note = Seed: LVVVGARGV (KRAS G12R)
VVVHGVRGR

SEQ ID NO: 29078 - protein, 9 aa, synthetic construct
  source 1..9: note = Seed: LVVVGARGV (KRAS G12R)
VVVHGVRGV

SEQ ID NO: 29079 - protein, 9 aa, synthetic construct
  source 1..9: note = Seed: LVVVGARGV (KRAS G12R)
VVVHGVRGY

SEQ ID NO: 29080 - protein, 9 aa, synthetic construct
  source 1..9: note = Seed: LVVVGARGV (KRAS G12R)
VVVHGWRGR

SEQ ID NO: 29081 - protein, 9 aa, synthetic construct
  source 1..9: note = Seed: LVVVGARGV (KRAS G12R)
VVVHGYRGR

SEQ ID NO: 29082 - protein, 9 aa, synthetic construct
  source 1..9: note = Seed: LVVVGARGV (KRAS G12R)
VVVIGARGA

SEQ ID NO: 29083 - protein, 9 aa, synthetic construct
  source 1..9: note = Seed: LVVVGARGV (KRAS G12R)
VVVIGARGF

SEQ ID NO: 29084 - protein, 9 aa, synthetic construct
  source 1..9: note = Seed: LVVVGARGV (KRAS G12R)
VVVIGARGI

SEQ ID NO: 29085 - protein, 9 aa, synthetic construct
  source 1..9: note = Seed: LVVVGARGV (KRAS G12R)
VVVIGARGK

SEQ ID NO: 29086 - protein, 9 aa, synthetic construct
  source 1..9: note = Seed: LVVVGARGV (KRAS G12R)
VVVIGARGL

SEQ ID NO: 29087 - protein, 9 aa, synthetic construct
  source 1..9: note = Seed: LVVVGARGV (KRAS G12R)
VVVIGARGM

SEQ ID NO: 29088 - protein, 9 aa, synthetic construct
  source 1..9: note = Seed: LVVVGARGV (KRAS G12R)
VVVIGARGR

SEQ ID NO: 29089 - protein, 9 aa, synthetic construct
  source 1..9: note = Seed: LVVVGARGV (KRAS G12R)
VVVIGARGS

SEQ ID NO: 29090 - protein, 9 aa, synthetic construct
  source 1..9: note = Seed: LVVVGARGV (KRAS G12R)
VVVIGARGT

SEQ ID NO: 29091 - protein, 9 aa, synthetic construct
  source 1..9: note = Seed: LVVVGARGV (KRAS G12R)
VVVIGARGV

SEQ ID NO: 29092 - protein, 9 aa, synthetic construct
  source 1..9: note = Seed: LVVVGARGV (KRAS G12R)
VVVIGARGY

SEQ ID NO: 29093 - protein, 9 aa, synthetic construct
  source 1..9: note = Seed: LVVVGARGV (KRAS G12R)
VVVIGFRGR

SEQ ID NO: 29094 - protein, 9 aa, synthetic construct
  source 1..9: note = Seed: LVVVGARGV (KRAS G12R)
VVVIGGRGA

SEQ ID NO: 29095 - protein, 9 aa, synthetic construct
  source 1..9: note = Seed: LVVVGARGV (KRAS G12R)
VVVIGGRGI

SEQ ID NO: 29096 - protein, 9 aa, synthetic construct
  source 1..9: note = Seed: LVVVGARGV (KRAS G12R)
VVVIGGRGL

SEQ ID NO: 29097 - protein, 9 aa, synthetic construct
  source 1..9: note = Seed: LVVVGARGV (KRAS G12R)
VVVIGGRGM

SEQ ID NO: 29098 - protein, 9 aa, synthetic construct
  source 1..9: note = Seed: LVVVGARGV (KRAS G12R)
VVVIGGRGR

SEQ ID NO: 29099 - protein, 9 aa, synthetic construct
  source 1..9: note = Seed: LVVVGARGV (KRAS G12R)
VVVIGGRGS

SEQ ID NO: 29100 - protein, 9 aa, synthetic construct
  source 1..9: note = Seed: LVVVGARGV (KRAS G12R)
VVVIGGRGT

SEQ ID NO: 29101 - protein, 9 aa, synthetic construct
  source 1..9: note = Seed: LVVVGARGV (KRAS G12R)
VVVIGGRGV

SEQ ID NO: 29102 - protein, 9 aa, synthetic construct
  source 1..9: note = Seed: LVVVGARGV (KRAS G12R)
VVVIGHRGA

SEQ ID NO: 29103 - protein, 9 aa, synthetic construct
  source 1..9: note = Seed: LVVVGARGV (KRAS G12R)
VVVIGHRGF

SEQ ID NO: 29104 - protein, 9 aa, synthetic construct
  source 1..9: note = Seed: LVVVGARGV (KRAS G12R)
VVVIGHRGG

SEQ ID NO: 29105 - protein, 9 aa, synthetic construct
  source 1..9: note = Seed: LVVVGARGV (KRAS G12R)
VVVIGHRGH

SEQ ID NO: 29106 - protein, 9 aa, synthetic construct
  source 1..9: note = Seed: LVVVGARGV (KRAS G12R)
VVVIGHRGI

SEQ ID NO: 29107 - protein, 9 aa, synthetic construct
  source 1..9: note = Seed: LVVVGARGV (KRAS G12R)
VVVIGHRGK

SEQ ID NO: 29108 - protein, 9 aa, synthetic construct
  source 1..9: note = Seed: LVVVGARGV (KRAS G12R)
VVVIGHRGL

SEQ ID NO: 29109 - protein, 9 aa, synthetic construct
  source 1..9: note = Seed: LVVVGARGV (KRAS G12R)
VVVIGHRGM

SEQ ID NO: 29110 - protein, 9 aa, synthetic construct
  source 1..9: note = Seed: LVVVGARGV (KRAS G12R)
VVVIGHRGN

SEQ ID NO: 29111 - protein, 9 aa, synthetic construct
  source 1..9: note = Seed: LVVVGARGV (KRAS G12R)
VVVIGHRGQ

SEQ ID NO: 29112 - protein, 9 aa, synthetic construct
  source 1..9: note = Seed: LVVVGARGV (KRAS G12R)
VVVIGHRGR

SEQ ID NO: 29113 - protein, 9 aa, synthetic construct
  source 1..9: note = Seed: LVVVGARGV (KRAS G12R)
VVVIGHRGS

SEQ ID NO: 29114 - protein, 9 aa, synthetic construct
  source 1..9: note = Seed: LVVVGARGV (KRAS G12R)
VVVIGHRGT

SEQ ID NO: 29115 - protein, 9 aa, synthetic construct
  source 1..9: note = Seed: LVVVGARGV (KRAS G12R)
VVVIGHRGV

SEQ ID NO: 29116 - protein, 9 aa, synthetic construct
  source 1..9: note = Seed: LVVVGARGV (KRAS G12R)
VVVIGHRGY

SEQ ID NO: 29117 - protein, 9 aa, synthetic construct
  source 1..9: note = Seed: LVVVGARGV (KRAS G12R)
VVVIGIRGA

SEQ ID NO: 29118 - protein, 9 aa, synthetic construct
  source 1..9: note = Seed: LVVVGARGV (KRAS G12R)
VVVIGIRGF

SEQ ID NO: 29119 - protein, 9 aa, synthetic construct
  source 1..9: note = Seed: LVVVGARGV (KRAS G12R)
VVVIGIRGI

SEQ ID NO: 29120 - protein, 9 aa, synthetic construct
  source 1..9: note = Seed: LVVVGARGV (KRAS G12R)
VVVIGIRGK

SEQ ID NO: 29121 - protein, 9 aa, synthetic construct
  source 1..9: note = Seed: LVVVGARGV (KRAS G12R)
VVVIGIRGL

SEQ ID NO: 29122 - protein, 9 aa, synthetic construct
  source 1..9: note = Seed: LVVVGARGV (KRAS G12R)
VVVIGIRGM

SEQ ID NO: 29123 - protein, 9 aa, synthetic construct
  source 1..9: note = Seed: LVVVGARGV (KRAS G12R)
VVVIGIRGQ

SEQ ID NO: 29124 - protein, 9 aa, synthetic construct
  source 1..9: note = Seed: LVVVGARGV (KRAS G12R)
VVVIGIRGR

SEQ ID NO: 29125 - protein, 9 aa, synthetic construct
  source 1..9: note = Seed: LVVVGARGV (KRAS G12R)
VVVIGIRGS

SEQ ID NO: 29126 - protein, 9 aa, synthetic construct
  source 1..9: note = Seed: LVVVGARGV (KRAS G12R)
VVVIGIRGV

SEQ ID NO: 29127 - protein, 9 aa, synthetic construct
  source 1..9: note = Seed: LVVVGARGV (KRAS G12R)
VVVIGIRGY

SEQ ID NO: 29128 - protein, 9 aa, synthetic construct
  source 1..9: note = Seed: LVVVGARGV (KRAS G12R)
VVVIGKRGA

SEQ ID NO: 29129 - protein, 9 aa, synthetic construct
  source 1..9: note = Seed: LVVVGARGV (KRAS G12R)
VVVIGKRGC

SEQ ID NO: 29130 - protein, 9 aa, synthetic construct
  source 1..9: note = Seed: LVVVGARGV (KRAS G12R)
VVVIGKRGE

SEQ ID NO: 29131 - protein, 9 aa, synthetic construct
  source 1..9: note = Seed: LVVVGARGV (KRAS G12R)
VVVIGKRGF

SEQ ID NO: 29132 - protein, 9 aa, synthetic construct
  source 1..9: note = Seed: LVVVGARGV (KRAS G12R)
VVVIGKRGG

SEQ ID NO: 29133 - protein, 9 aa, synthetic construct
  source 1..9: note = Seed: LVVVGARGV (KRAS G12R)
VVVIGKRGH

SEQ ID NO: 29134 - protein, 9 aa, synthetic construct
  source 1..9: note = Seed: LVVVGARGV (KRAS G12R)
VVVIGKRGI

SEQ ID NO: 29135 - protein, 9 aa, synthetic construct
  source 1..9: note = Seed: LVVVGARGV (KRAS G12R)
VVVIGKRGK

SEQ ID NO: 29136 - protein, 9 aa, synthetic construct
  source 1..9: note = Seed: LVVVGARGV (KRAS G12R)
VVVIGKRGL

SEQ ID NO: 29137 - protein, 9 aa, synthetic construct
  source 1..9: note = Seed: LVVVGARGV (KRAS G12R)
VVVIGKRGM

SEQ ID NO: 29138 - protein, 9 aa, synthetic construct
  source 1..9: note = Seed: LVVVGARGV (KRAS G12R)
VVVIGKRGN

SEQ ID NO: 29139 - protein, 9 aa, synthetic construct
  source 1..9: note = Seed: LVVVGARGV (KRAS G12R)
VVVIGKRGP

SEQ ID NO: 29140 - protein, 9 aa, synthetic construct
  source 1..9: note = Seed: LVVVGARGV (KRAS G12R)
VVVIGKRGQ

SEQ ID NO: 29141 - protein, 9 aa, synthetic construct
  source 1..9: note = Seed: LVVVGARGV (KRAS G12R)
VVVIGKRGR

SEQ ID NO: 29142 - protein, 9 aa, synthetic construct
  source 1..9: note = Seed: LVVVGARGV (KRAS G12R)
VVVIGKRGS

SEQ ID NO: 29143 - protein, 9 aa, synthetic construct
  source 1..9: note = Seed: LVVVGARGV (KRAS G12R)
VVVIGKRGT

SEQ ID NO: 29144 - protein, 9 aa, synthetic construct
  source 1..9: note = Seed: LVVVGARGV (KRAS G12R)
VVVIGKRGV

SEQ ID NO: 29145 - protein, 9 aa, synthetic construct
  source 1..9: note = Seed: LVVVGARGV (KRAS G12R)
VVVIGKRGW

SEQ ID NO: 29146 - protein, 9 aa, synthetic construct
  source 1..9: note = Seed: LVVVGARGV (KRAS G12R)
VVVIGKRGY

SEQ ID NO: 29147 - protein, 9 aa, synthetic construct
  source 1..9: note = Seed: LVVVGARGV (KRAS G12R)
VVVIGLRGA

SEQ ID NO: 29148 - protein, 9 aa, synthetic construct
  source 1..9: note = Seed: LVVVGARGV (KRAS G12R)
VVVIGLRGF

SEQ ID NO: 29149 - protein, 9 aa, synthetic construct
  source 1..9: note = Seed: LVVVGARGV (KRAS G12R)
VVVIGLRGG

SEQ ID NO: 29150 - protein, 9 aa, synthetic construct
  source 1..9: note = Seed: LVVVGARGV (KRAS G12R)
VVVIGLRGI

SEQ ID NO: 29151 - protein, 9 aa, synthetic construct
  source 1..9: note = Seed: LVVVGARGV (KRAS G12R)
VVVIGLRGK

SEQ ID NO: 29152 - protein, 9 aa, synthetic construct
  source 1..9: note = Seed: LVVVGARGV (KRAS G12R)
VVVIGLRGL

SEQ ID NO: 29153 - protein, 9 aa, synthetic construct
  source 1..9: note = Seed: LVVVGARGV (KRAS G12R)
VVVIGLRGM

SEQ ID NO: 29154 - protein, 9 aa, synthetic construct
  source 1..9: note = Seed: LVVVGARGV (KRAS G12R)
VVVIGLRGQ

SEQ ID NO: 29155 - protein, 9 aa, synthetic construct
  source 1..9: note = Seed: LVVVGARGV (KRAS G12R)
VVVIGLRGR

SEQ ID NO: 29156 - protein, 9 aa, synthetic construct
  source 1..9: note = Seed: LVVVGARGV (KRAS G12R)
VVVIGLRGV

SEQ ID NO: 29157 - protein, 9 aa, synthetic construct
  source 1..9: note = Seed: LVVVGARGV (KRAS G12R)
VVVIGLRGY

SEQ ID NO: 29158 - protein, 9 aa, synthetic construct
  source 1..9: note = Seed: LVVVGARGV (KRAS G12R)
VVVIGMRGA

SEQ ID NO: 29159 - protein, 9 aa, synthetic construct
  source 1..9: note = Seed: LVVVGARGV (KRAS G12R)
VVVIGMRGF

SEQ ID NO: 29160 - protein, 9 aa, synthetic construct
  source 1..9: note = Seed: LVVVGARGV (KRAS G12R)
VVVIGMRGI

SEQ ID NO: 29161 - protein, 9 aa, synthetic construct
  source 1..9: note = Seed: LVVVGARGV (KRAS G12R)
VVVIGMRGL

SEQ ID NO: 29162 - protein, 9 aa, synthetic construct
  source 1..9: note = Seed: LVVVGARGV (KRAS G12R)
VVVIGMRGM

SEQ ID NO: 29163 - protein, 9 aa, synthetic construct
  source 1..9: note = Seed: LVVVGARGV (KRAS G12R)
VVVIGMRGR

SEQ ID NO: 29164 - protein, 9 aa, synthetic construct
  source 1..9: note = Seed: LVVVGARGV (KRAS G12R)
VVVIGMRGV

SEQ ID NO: 29165 - protein, 9 aa, synthetic construct
  source 1..9: note = Seed: LVVVGARGV (KRAS G12R)
VVVIGMRGY

SEQ ID NO: 29166 - protein, 9 aa, synthetic construct
  source 1..9: note = Seed: LVVVGARGV (KRAS G12R)
VVVIGNRGA

SEQ ID NO: 29167 - protein, 9 aa, synthetic construct
  source 1..9: note = Seed: LVVVGARGV (KRAS G12R)
VVVIGNRGF

SEQ ID NO: 29168 - protein, 9 aa, synthetic construct
  source 1..9: note = Seed: LVVVGARGV (KRAS G12R)
VVVIGNRGI

SEQ ID NO: 29169 - protein, 9 aa, synthetic construct
  source 1..9: note = Seed: LVVVGARGV (KRAS G12R)
VVVIGNRGK

SEQ ID NO: 29170 - protein, 9 aa, synthetic construct
  source 1..9: note = Seed: LVVVGARGV (KRAS G12R)
VVVIGNRGL

SEQ ID NO: 29171 - protein, 9 aa, synthetic construct
  source 1..9: note = Seed: LVVVGARGV (KRAS G12R)
VVVIGNRGM

SEQ ID NO: 29172 - protein, 9 aa, synthetic construct
  source 1..9: note = Seed: LVVVGARGV (KRAS G12R)
VVVIGNRGR

SEQ ID NO: 29173 - protein, 9 aa, synthetic construct
  source 1..9: note = Seed: LVVVGARGV (KRAS G12R)
VVVIGNRGS

SEQ ID NO: 29174 - protein, 9 aa, synthetic construct
  source 1..9: note = Seed: LVVVGARGV (KRAS G12R)
VVVIGNRGT

SEQ ID NO: 29175 - protein, 9 aa, synthetic construct
  source 1..9: note = Seed: LVVVGARGV (KRAS G12R)
VVVIGNRGV

SEQ ID NO: 29176 - protein, 9 aa, synthetic construct
  source 1..9: note = Seed: LVVVGARGV (KRAS G12R)
VVVIGNRGY

SEQ ID NO: 29177 - protein, 9 aa, synthetic construct
  source 1..9: note = Seed: LVVVGARGV (KRAS G12R)
VVVIGPRGA

SEQ ID NO: 29178 - protein, 9 aa, synthetic construct
  source 1..9: note = Seed: LVVVGARGV (KRAS G12R)
VVVIGPRGI

SEQ ID NO: 29179 - protein, 9 aa, synthetic construct
  source 1..9: note = Seed: LVVVGARGV (KRAS G12R)
VVVIGPRGL

SEQ ID NO: 29180 - protein, 9 aa, synthetic construct
  source 1..9: note = Seed: LVVVGARGV (KRAS G12R)
VVVIGPRGM

SEQ ID NO: 29181 - protein, 9 aa, synthetic construct
  source 1..9: note = Seed: LVVVGARGV (KRAS G12R)
VVVIGPRGR

SEQ ID NO: 29182 - protein, 9 aa, synthetic construct
  source 1..9: note = Seed: LVVVGARGV (KRAS G12R)
VVVIGPRGV

SEQ ID NO: 29183 - protein, 9 aa, synthetic construct
  source 1..9: note = Seed: LVVVGARGV (KRAS G12R)
VVVIGQRGA

SEQ ID NO: 29184 - protein, 9 aa, synthetic construct
  source 1..9: note = Seed: LVVVGARGV (KRAS G12R)
VVVIGQRGF

SEQ ID NO: 29185 - protein, 9 aa, synthetic construct
  source 1..9: note = Seed: LVVVGARGV (KRAS G12R)
VVVIGQRGI

SEQ ID NO: 29186 - protein, 9 aa, synthetic construct
  source 1..9: note = Seed: LVVVGARGV (KRAS G12R)
VVVIGQRGL

SEQ ID NO: 29187 - protein, 9 aa, synthetic construct
  source 1..9: note = Seed: LVVVGARGV (KRAS G12R)
VVVIGQRGR

SEQ ID NO: 29188 - protein, 9 aa, synthetic construct
  source 1..9: note = Seed: LVVVGARGV (KRAS G12R)
VVVIGQRGS

SEQ ID NO: 29189 - protein, 9 aa, synthetic construct
  source 1..9: note = Seed: LVVVGARGV (KRAS G12R)
VVVIGQRGY

SEQ ID NO: 29190 - protein, 9 aa, synthetic construct
  source 1..9: note = Seed: LVVVGARGV (KRAS G12R)
VVVIGRRGA

SEQ ID NO: 29191 - protein, 9 aa, synthetic construct
  source 1..9: note = Seed: LVVVGARGV (KRAS G12R)
VVVIGRRGC

SEQ ID NO: 29192 - protein, 9 aa, synthetic construct
  source 1..9: note = Seed: LVVVGARGV (KRAS G12R)
VVVIGRRGD

SEQ ID NO: 29193 - protein, 9 aa, synthetic construct
  source 1..9: note = Seed: LVVVGARGV (KRAS G12R)
VVVIGRRGE

SEQ ID NO: 29194 - protein, 9 aa, synthetic construct
  source 1..9: note = Seed: LVVVGARGV (KRAS G12R)
VVVIGRRGF

SEQ ID NO: 29195 - protein, 9 aa, synthetic construct
  source 1..9: note = Seed: LVVVGARGV (KRAS G12R)
VVVIGRRGG

SEQ ID NO: 29196 - protein, 9 aa, synthetic construct
  source 1..9: note = Seed: LVVVGARGV (KRAS G12R)
VVVIGRRGH

SEQ ID NO: 29197 - protein, 9 aa, synthetic construct
  source 1..9: note = Seed: LVVVGARGV (KRAS G12R)
VVVIGRRGI

SEQ ID NO: 29198 - protein, 9 aa, synthetic construct
  source 1..9: note = Seed: LVVVGARGV (KRAS G12R)
VVVIGRRGK

SEQ ID NO: 29199 - protein, 9 aa, synthetic construct
  source 1..9: note = Seed: LVVVGARGV (KRAS G12R)
VVVIGRRGL

SEQ ID NO: 29200 - protein, 9 aa, synthetic construct
  source 1..9: note = Seed: LVVVGARGV (KRAS G12R)
VVVIGRRGM

SEQ ID NO: 29201 - protein, 9 aa, synthetic construct
  source 1..9: note = Seed: LVVVGARGV (KRAS G12R)
VVVIGRRGN

SEQ ID NO: 29202 - protein, 9 aa, synthetic construct
  source 1..9: note = Seed: LVVVGARGV (KRAS G12R)
VVVIGRRGP

SEQ ID NO: 29203 - protein, 9 aa, synthetic construct
  source 1..9: note = Seed: LVVVGARGV (KRAS G12R)
VVVIGRRGQ

SEQ ID NO: 29204 - protein, 9 aa, synthetic construct
  source 1..9: note = Seed: LVVVGARGV (KRAS G12R)
VVVIGRRGR

SEQ ID NO: 29205 - protein, 9 aa, synthetic construct
  source 1..9: note = Seed: LVVVGARGV (KRAS G12R)
VVVIGRRGS

SEQ ID NO: 29206 - protein, 9 aa, synthetic construct
  source 1..9: note = Seed: LVVVGARGV (KRAS G12R)
VVVIGRRGT

SEQ ID NO: 29207 - protein, 9 aa, synthetic construct
  source 1..9: note = Seed: LVVVGARGV (KRAS G12R)
VVVIGRRGV

SEQ ID NO: 29208 - protein, 9 aa, synthetic construct
  source 1..9: note = Seed: LVVVGARGV (KRAS G12R)
VVVIGRRGW

SEQ ID NO: 29209 - protein, 9 aa, synthetic construct
  source 1..9: note = Seed: LVVVGARGV (KRAS G12R)
VVVIGRRGY

SEQ ID NO: 29210 - protein, 9 aa, synthetic construct
  source 1..9: note = Seed: LVVVGARGV (KRAS G12R)
VVVIGSRGA

SEQ ID NO: 29211 - protein, 9 aa, synthetic construct
  source 1..9: note = Seed: LVVVGARGV (KRAS G12R)
VVVIGSRGF

SEQ ID NO: 29212 - protein, 9 aa, synthetic construct
  source 1..9: note = Seed: LVVVGARGV (KRAS G12R)
VVVIGSRGI

SEQ ID NO: 29213 - protein, 9 aa, synthetic construct
  source 1..9: note = Seed: LVVVGARGV (KRAS G12R)
VVVIGSRGK

SEQ ID NO: 29214 - protein, 9 aa, synthetic construct
  source 1..9: note = Seed: LVVVGARGV (KRAS G12R)
VVVIGSRGL

SEQ ID NO: 29215 - protein, 9 aa, synthetic construct
  source 1..9: note = Seed: LVVVGARGV (KRAS G12R)
VVVIGSRGM

SEQ ID NO: 29216 - protein, 9 aa, synthetic construct
  source 1..9: note = Seed: LVVVGARGV (KRAS G12R)
VVVIGSRGR

SEQ ID NO: 29217 - protein, 9 aa, synthetic construct
  source 1..9: note = Seed: LVVVGARGV (KRAS G12R)
VVVIGSRGS

SEQ ID NO: 29218 - protein, 9 aa, synthetic construct
  source 1..9: note = Seed: LVVVGARGV (KRAS G12R)
VVVIGSRGT

SEQ ID NO: 29219 - protein, 9 aa, synthetic construct
  source 1..9: note = Seed: LVVVGARGV (KRAS G12R)
VVVIGSRGV

SEQ ID NO: 29220 - protein, 9 aa, synthetic construct
  source 1..9: note = Seed: LVVVGARGV (KRAS G12R)
VVVIGSRGY

SEQ ID NO: 29221 - protein, 9 aa, synthetic construct
  source 1..9: note = Seed: LVVVGARGV (KRAS G12R)
VVVIGTRGA

SEQ ID NO: 29222 - protein, 9 aa, synthetic construct
  source 1..9: note = Seed: LVVVGARGV (KRAS G12R)
VVVIGTRGF

SEQ ID NO: 29223 - protein, 9 aa, synthetic construct
  source 1..9: note = Seed: LVVVGARGV (KRAS G12R)
VVVIGTRGI

SEQ ID NO: 29224 - protein, 9 aa, synthetic construct
  source 1..9: note = Seed: LVVVGARGV (KRAS G12R)
VVVIGTRGK

SEQ ID NO: 29225 - protein, 9 aa, synthetic construct
  source 1..9: note = Seed: LVVVGARGV (KRAS G12R)
VVVIGTRGL

SEQ ID NO: 29226 - protein, 9 aa, synthetic construct
  source 1..9: note = Seed: LVVVGARGV (KRAS G12R)
VVVIGTRGM

SEQ ID NO: 29227 - protein, 9 aa, synthetic construct
  source 1..9: note = Seed: LVVVGARGV (KRAS G12R)
VVVIGTRGQ

SEQ ID NO: 29228 - protein, 9 aa, synthetic construct
  source 1..9: note = Seed: LVVVGARGV (KRAS G12R)
VVVIGTRGR

SEQ ID NO: 29229 - protein, 9 aa, synthetic construct
  source 1..9: note = Seed: LVVVGARGV (KRAS G12R)
VVVIGTRGS

SEQ ID NO: 29230 - protein, 9 aa, synthetic construct
  source 1..9: note = Seed: LVVVGARGV (KRAS G12R)
VVVIGTRGV

SEQ ID NO: 29231 - protein, 9 aa, synthetic construct
  source 1..9: note = Seed: LVVVGARGV (KRAS G12R)
VVVIGTRGY

SEQ ID NO: 29232 - protein, 9 aa, synthetic construct
  source 1..9: note = Seed: LVVVGARGV (KRAS G12R)
VVVIGVRGA

SEQ ID NO: 29233 - protein, 9 aa, synthetic construct
  source 1..9: note = Seed: LVVVGARGV (KRAS G12R)
VVVIGVRGF

SEQ ID NO: 29234 - protein, 9 aa, synthetic construct
  source 1..9: note = Seed: LVVVGARGV (KRAS G12R)
VVVIGVRGI

SEQ ID NO: 29235 - protein, 9 aa, synthetic construct
  source 1..9: note = Seed: LVVVGARGV (KRAS G12R)
VVVIGVRGK

SEQ ID NO: 29236 - protein, 9 aa, synthetic construct
  source 1..9: note = Seed: LVVVGARGV (KRAS G12R)
VVVIGVRGL

SEQ ID NO: 29237 - protein, 9 aa, synthetic construct
  source 1..9: note = Seed: LVVVGARGV (KRAS G12R)
VVVIGVRGM

SEQ ID NO: 29238 - protein, 9 aa, synthetic construct
  source 1..9: note = Seed: LVVVGARGV (KRAS G12R)
VVVIGVRGQ

SEQ ID NO: 29239 - protein, 9 aa, synthetic construct
  source 1..9: note = Seed: LVVVGARGV (KRAS G12R)
VVVIGVRGR

SEQ ID NO: 29240 - protein, 9 aa, synthetic construct
  source 1..9: note = Seed: LVVVGARGV (KRAS G12R)
VVVIGVRGS

SEQ ID NO: 29241 - protein, 9 aa, synthetic construct
  source 1..9: note = Seed: LVVVGARGV (KRAS G12R)
VVVIGVRGV

SEQ ID NO: 29242 - protein, 9 aa, synthetic construct
  source 1..9: note = Seed: LVVVGARGV (KRAS G12R)
VVVIGVRGY

SEQ ID NO: 29243 - protein, 9 aa, synthetic construct
  source 1..9: note = Seed: LVVVGARGV (KRAS G12R)
VVVIGWRGR

SEQ ID NO: 29244 - protein, 9 aa, synthetic construct
  source 1..9: note = Seed: LVVVGARGV (KRAS G12R)
VVVIGYRGR

SEQ ID NO: 29245 - protein, 9 aa, synthetic construct
  source 1..9: note = Seed: LVVVGARGV (KRAS G12R)
VVVKGARGF

SEQ ID NO: 29246 - protein, 9 aa, synthetic construct
  source 1..9: note = Seed: LVVVGARGV (KRAS G12R)
VVVKGARGI

SEQ ID NO: 29247 - protein, 9 aa, synthetic construct
  source 1..9: note = Seed: LVVVGARGV (KRAS G12R)
VVVKGARGK

SEQ ID NO: 29248 - protein, 9 aa, synthetic construct
  source 1..9: note = Seed: LVVVGARGV (KRAS G12R)
VVVKGARGL

SEQ ID NO: 29249 - protein, 9 aa, synthetic construct
  source 1..9: note = Seed: LVVVGARGV (KRAS G12R)
VVVKGARGM

SEQ ID NO: 29250 - protein, 9 aa, synthetic construct
  source 1..9: note = Seed: LVVVGARGV (KRAS G12R)
VVVKGARGR

SEQ ID NO: 29251 - protein, 9 aa, synthetic construct
  source 1..9: note = Seed: LVVVGARGV (KRAS G12R)
VVVKGARGV

SEQ ID NO: 29252 - protein, 9 aa, synthetic construct
  source 1..9: note = Seed: LVVVGARGV (KRAS G12R)
VVVKGARGY

SEQ ID NO: 29253 - protein, 9 aa, synthetic construct
  source 1..9: note = Seed: LVVVGARGV (KRAS G12R)
VVVKGCRGR

SEQ ID NO: 29254 - protein, 9 aa, synthetic construct
  source 1..9: note = Seed: LVVVGARGV (KRAS G12R)
VVVKGHRGA

SEQ ID NO: 29255 - protein, 9 aa, synthetic construct
  source 1..9: note = Seed: LVVVGARGV (KRAS G12R)
VVVKGHRGF

SEQ ID NO: 29256 - protein, 9 aa, synthetic construct
  source 1..9: note = Seed: LVVVGARGV (KRAS G12R)
VVVKGHRGH

SEQ ID NO: 29257 - protein, 9 aa, synthetic construct
  source 1..9: note = Seed: LVVVGARGV (KRAS G12R)
VVVKGHRGI

SEQ ID NO: 29258 - protein, 9 aa, synthetic construct
  source 1..9: note = Seed: LVVVGARGV (KRAS G12R)
VVVKGHRGK

SEQ ID NO: 29259 - protein, 9 aa, synthetic construct
  source 1..9: note = Seed: LVVVGARGV (KRAS G12R)
VVVKGHRGL

SEQ ID NO: 29260 - protein, 9 aa, synthetic construct
  source 1..9: note = Seed: LVVVGARGV (KRAS G12R)
VVVKGHRGM

SEQ ID NO: 29261 - protein, 9 aa, synthetic construct
  source 1..9: note = Seed: LVVVGARGV (KRAS G12R)
VVVKGHRGQ

SEQ ID NO: 29262 - protein, 9 aa, synthetic construct
  source 1..9: note = Seed: LVVVGARGV (KRAS G12R)
VVVKGHRGR

SEQ ID NO: 29263 - protein, 9 aa, synthetic construct
  source 1..9: note = Seed: LVVVGARGV (KRAS G12R)
VVVKGHRGV

SEQ ID NO: 29264 - protein, 9 aa, synthetic construct
  source 1..9: note = Seed: LVVVGARGV (KRAS G12R)
VVVKGHRGW

SEQ ID NO: 29265 - protein, 9 aa, synthetic construct
  source 1..9: note = Seed: LVVVGARGV (KRAS G12R)
VVVKGHRGY

SEQ ID NO: 29266 - protein, 9 aa, synthetic construct
  source 1..9: note = Seed: LVVVGARGV (KRAS G12R)
VVVKGIRGA

SEQ ID NO: 29267 - protein, 9 aa, synthetic construct
  source 1..9: note = Seed: LVVVGARGV (KRAS G12R)
VVVKGIRGF

SEQ ID NO: 29268 - protein, 9 aa, synthetic construct
  source 1..9: note = Seed: LVVVGARGV (KRAS G12R)
VVVKGIRGI

SEQ ID NO: 29269 - protein, 9 aa, synthetic construct
  source 1..9: note = Seed: LVVVGARGV (KRAS G12R)
VVVKGIRGK

SEQ ID NO: 29270 - protein, 9 aa, synthetic construct
  source 1..9: note = Seed: LVVVGARGV (KRAS G12R)
VVVKGIRGL

SEQ ID NO: 29271 - protein, 9 aa, synthetic construct
  source 1..9: note = Seed: LVVVGARGV (KRAS G12R)
VVVKGIRGM

SEQ ID NO: 29272 - protein, 9 aa, synthetic construct
  source 1..9: note = Seed: LVVVGARGV (KRAS G12R)
VVVKGIRGQ

SEQ ID NO: 29273 - protein, 9 aa, synthetic construct
  source 1..9: note = Seed: LVVVGARGV (KRAS G12R)
VVVKGIRGR

SEQ ID NO: 29274 - protein, 9 aa, synthetic construct
  source 1..9: note = Seed: LVVVGARGV (KRAS G12R)
VVVKGIRGS

SEQ ID NO: 29275 - protein, 9 aa, synthetic construct
  source 1..9: note = Seed: LVVVGARGV (KRAS G12R)
VVVKGIRGV

SEQ ID NO: 29276 - protein, 9 aa, synthetic construct
  source 1..9: note = Seed: LVVVGARGV (KRAS G12R)
VVVKGIRGY

SEQ ID NO: 29277 - protein, 9 aa, synthetic construct
  source 1..9: note = Seed: LVVVGARGV (KRAS G12R)
VVVKGKRGA

SEQ ID NO: 29278 - protein, 9 aa, synthetic construct
  source 1..9: note = Seed: LVVVGARGV (KRAS G12R)
VVVKGKRGF

SEQ ID NO: 29279 - protein, 9 aa, synthetic construct
  source 1..9: note = Seed: LVVVGARGV (KRAS G12R)
VVVKGKRGH

SEQ ID NO: 29280 - protein, 9 aa, synthetic construct
  source 1..9: note = Seed: LVVVGARGV (KRAS G12R)
VVVKGKRGI

SEQ ID NO: 29281 - protein, 9 aa, synthetic construct
  source 1..9: note = Seed: LVVVGARGV (KRAS G12R)
VVVKGKRGK

SEQ ID NO: 29282 - protein, 9 aa, synthetic construct
  source 1..9: note = Seed: LVVVGARGV (KRAS G12R)
VVVKGKRGL

SEQ ID NO: 29283 - protein, 9 aa, synthetic construct
  source 1..9: note = Seed: LVVVGARGV (KRAS G12R)
VVVKGKRGM

SEQ ID NO: 29284 - protein, 9 aa, synthetic construct
  source 1..9: note = Seed: LVVVGARGV (KRAS G12R)
VVVKGKRGQ

SEQ ID NO: 29285 - protein, 9 aa, synthetic construct
  source 1..9: note = Seed: LVVVGARGV (KRAS G12R)
VVVKGKRGR

SEQ ID NO: 29286 - protein, 9 aa, synthetic construct
  source 1..9: note = Seed: LVVVGARGV (KRAS G12R)
VVVKGKRGS

SEQ ID NO: 29287 - protein, 9 aa, synthetic construct
  source 1..9: note = Seed: LVVVGARGV (KRAS G12R)
VVVKGKRGT

SEQ ID NO: 29288 - protein, 9 aa, synthetic construct
  source 1..9: note = Seed: LVVVGARGV (KRAS G12R)
VVVKGKRGV

SEQ ID NO: 29289 - protein, 9 aa, synthetic construct
  source 1..9: note = Seed: LVVVGARGV (KRAS G12R)
VVVKGKRGW

SEQ ID NO: 29290 - protein, 9 aa, synthetic construct
  source 1..9: note = Seed: LVVVGARGV (KRAS G12R)
VVVKGKRGY

SEQ ID NO: 29291 - protein, 9 aa, synthetic construct
  source 1..9: note = Seed: LVVVGARGV (KRAS G12R)
VVVKGLRGA

SEQ ID NO: 29292 - protein, 9 aa, synthetic construct
  source 1..9: note = Seed: LVVVGARGV (KRAS G12R)
VVVKGLRGF

SEQ ID NO: 29293 - protein, 9 aa, synthetic construct
  source 1..9: note = Seed: LVVVGARGV (KRAS G12R)
VVVKGLRGI

SEQ ID NO: 29294 - protein, 9 aa, synthetic construct
  source 1..9: note = Seed: LVVVGARGV (KRAS G12R)
VVVKGLRGL

SEQ ID NO: 29295 - protein, 9 aa, synthetic construct
  source 1..9: note = Seed: LVVVGARGV (KRAS G12R)
VVVKGLRGM

SEQ ID NO: 29296 - protein, 9 aa, synthetic construct
  source 1..9: note = Seed: LVVVGARGV (KRAS G12R)
VVVKGLRGQ

SEQ ID NO: 29297 - protein, 9 aa, synthetic construct
  source 1..9: note = Seed: LVVVGARGV (KRAS G12R)
VVVKGLRGR

SEQ ID NO: 29298 - protein, 9 aa, synthetic construct
  source 1..9: note = Seed: LVVVGARGV (KRAS G12R)
VVVKGLRGS

SEQ ID NO: 29299 - protein, 9 aa, synthetic construct
  source 1..9: note = Seed: LVVVGARGV (KRAS G12R)
VVVKGLRGY

SEQ ID NO: 29300 - protein, 9 aa, synthetic construct
  source 1..9: note = Seed: LVVVGARGV (KRAS G12R)
VVVKGMRGF

SEQ ID NO: 29301 - protein, 9 aa, synthetic construct
  source 1..9: note = Seed: LVVVGARGV (KRAS G12R)
VVVKGMRGI

SEQ ID NO: 29302 - protein, 9 aa, synthetic construct
  source 1..9: note = Seed: LVVVGARGV (KRAS G12R)
VVVKGMRGL

SEQ ID NO: 29303 - protein, 9 aa, synthetic construct
  source 1..9: note = Seed: LVVVGARGV (KRAS G12R)
VVVKGMRGQ

SEQ ID NO: 29304 - protein, 9 aa, synthetic construct
  source 1..9: note = Seed: LVVVGARGV (KRAS G12R)
VVVKGMRGR

SEQ ID NO: 29305 - protein, 9 aa, synthetic construct
  source 1..9: note = Seed: LVVVGARGV (KRAS G12R)
VVVKGMRGS

SEQ ID NO: 29306 - protein, 9 aa, synthetic construct
  source 1..9: note = Seed: LVVVGARGV (KRAS G12R)
VVVKGMRGY

SEQ ID NO: 29307 - protein, 9 aa, synthetic construct
  source 1..9: note = Seed: LVVVGARGV (KRAS G12R)
VVVKGNRGF

SEQ ID NO: 29308 - protein, 9 aa, synthetic construct
  source 1..9: note = Seed: LVVVGARGV (KRAS G12R)
VVVKGNRGL

SEQ ID NO: 29309 - protein, 9 aa, synthetic construct
  source 1..9: note = Seed: LVVVGARGV (KRAS G12R)
VVVKGNRGM

SEQ ID NO: 29310 - protein, 9 aa, synthetic construct
  source 1..9: note = Seed: LVVVGARGV (KRAS G12R)
VVVKGNRGR

SEQ ID NO: 29311 - protein, 9 aa, synthetic construct
  source 1..9: note = Seed: LVVVGARGV (KRAS G12R)
VVVKGPRGR

SEQ ID NO: 29312 - protein, 9 aa, synthetic construct
  source 1..9: note = Seed: LVVVGARGV (KRAS G12R)
VVVKGQRGF

SEQ ID NO: 29313 - protein, 9 aa, synthetic construct
  source 1..9: note = Seed: LVVVGARGV (KRAS G12R)
VVVKGQRGL

SEQ ID NO: 29314 - protein, 9 aa, synthetic construct
  source 1..9: note = Seed: LVVVGARGV (KRAS G12R)
VVVKGQRGM

SEQ ID NO: 29315 - protein, 9 aa, synthetic construct
  source 1..9: note = Seed: LVVVGARGV (KRAS G12R)
VVVKGQRGR

SEQ ID NO: 29316 - protein, 9 aa, synthetic construct
  source 1..9: note = Seed: LVVVGARGV (KRAS G12R)
VVVKGRRGA

SEQ ID NO: 29317 - protein, 9 aa, synthetic construct
  source 1..9: note = Seed: LVVVGARGV (KRAS G12R)
VVVKGRRGC

SEQ ID NO: 29318 - protein, 9 aa, synthetic construct
  source 1..9: note = Seed: LVVVGARGV (KRAS G12R)
VVVKGRRGF

SEQ ID NO: 29319 - protein, 9 aa, synthetic construct
  source 1..9: note = Seed: LVVVGARGV (KRAS G12R)
VVVKGRRGG

SEQ ID NO: 29320 - protein, 9 aa, synthetic construct
  source 1..9: note = Seed: LVVVGARGV (KRAS G12R)
VVVKGRRGH

SEQ ID NO: 29321 - protein, 9 aa, synthetic construct
  source 1..9: note = Seed: LVVVGARGV (KRAS G12R)
VVVKGRRGI

SEQ ID NO: 29322 - protein, 9 aa, synthetic construct
  source 1..9: note = Seed: LVVVGARGV (KRAS G12R)
VVVKGRRGK

SEQ ID NO: 29323 - protein, 9 aa, synthetic construct
  source 1..9: note = Seed: LVVVGARGV (KRAS G12R)
VVVKGRRGL

SEQ ID NO: 29324 - protein, 9 aa, synthetic construct
  source 1..9: note = Seed: LVVVGARGV (KRAS G12R)
VVVKGRRGM

SEQ ID NO: 29325 - protein, 9 aa, synthetic construct
  source 1..9: note = Seed: LVVVGARGV (KRAS G12R)
VVVKGRRGN

SEQ ID NO: 29326 - protein, 9 aa, synthetic construct
  source 1..9: note = Seed: LVVVGARGV (KRAS G12R)
VVVKGRRGP

SEQ ID NO: 29327 - protein, 9 aa, synthetic construct
  source 1..9: note = Seed: LVVVGARGV (KRAS G12R)
VVVKGRRGQ

SEQ ID NO: 29328 - protein, 9 aa, synthetic construct
  source 1..9: note = Seed: LVVVGARGV (KRAS G12R)
VVVKGRRGR

SEQ ID NO: 29329 - protein, 9 aa, synthetic construct
  source 1..9: note = Seed: LVVVGARGV (KRAS G12R)
VVVKGRRGS

SEQ ID NO: 29330 - protein, 9 aa, synthetic construct
  source 1..9: note = Seed: LVVVGARGV (KRAS G12R)
VVVKGRRGT

SEQ ID NO: 29331 - protein, 9 aa, synthetic construct
  source 1..9: note = Seed: LVVVGARGV (KRAS G12R)
VVVKGRRGV

SEQ ID NO: 29332 - protein, 9 aa, synthetic construct
  source 1..9: note = Seed: LVVVGARGV (KRAS G12R)
VVVKGRRGW

SEQ ID NO: 29333 - protein, 9 aa, synthetic construct
  source 1..9: note = Seed: LVVVGARGV (KRAS G12R)
VVVKGRRGY

SEQ ID NO: 29334 - protein, 9 aa, synthetic construct
  source 1..9: note = Seed: LVVVGARGV (KRAS G12R)
VVVKGSRGF

SEQ ID NO: 29335 - protein, 9 aa, synthetic construct
  source 1..9: note = Seed: LVVVGARGV (KRAS G12R)
VVVKGSRGI

SEQ ID NO: 29336 - protein, 9 aa, synthetic construct
  source 1..9: note = Seed: LVVVGARGV (KRAS G12R)
VVVKGSRGK

SEQ ID NO: 29337 - protein, 9 aa, synthetic construct
  source 1..9: note = Seed: LVVVGARGV (KRAS G12R)
VVVKGSRGL

SEQ ID NO: 29338 - protein, 9 aa, synthetic construct
  source 1..9: note = Seed: LVVVGARGV (KRAS G12R)
VVVKGSRGM

SEQ ID NO: 29339 - protein, 9 aa, synthetic construct
  source 1..9: note = Seed: LVVVGARGV (KRAS G12R)
VVVKGSRGR

SEQ ID NO: 29340 - protein, 9 aa, synthetic construct
  source 1..9: note = Seed: LVVVGARGV (KRAS G12R)
VVVKGSRGY

SEQ ID NO: 29341 - protein, 9 aa, synthetic construct
  source 1..9: note = Seed: LVVVGARGV (KRAS G12R)
VVVKGTRGA

SEQ ID NO: 29342 - protein, 9 aa, synthetic construct
  source 1..9: note = Seed: LVVVGARGV (KRAS G12R)
VVVKGTRGF

SEQ ID NO: 29343 - protein, 9 aa, synthetic construct
  source 1..9: note = Seed: LVVVGARGV (KRAS G12R)
VVVKGTRGI

SEQ ID NO: 29344 - protein, 9 aa, synthetic construct
  source 1..9: note = Seed: LVVVGARGV (KRAS G12R)
VVVKGTRGK

SEQ ID NO: 29345 - protein, 9 aa, synthetic construct
  source 1..9: note = Seed: LVVVGARGV (KRAS G12R)
VVVKGTRGL

SEQ ID NO: 29346 - protein, 9 aa, synthetic construct
  source 1..9: note = Seed: LVVVGARGV (KRAS G12R)
VVVKGTRGM

SEQ ID NO: 29347 - protein, 9 aa, synthetic construct
  source 1..9: note = Seed: LVVVGARGV (KRAS G12R)
VVVKGTRGR

SEQ ID NO: 29348 - protein, 9 aa, synthetic construct
  source 1..9: note = Seed: LVVVGARGV (KRAS G12R)
VVVKGTRGY

SEQ ID NO: 29349 - protein, 9 aa, synthetic construct
  source 1..9: note = Seed: LVVVGARGV (KRAS G12R)
VVVKGVRGA

SEQ ID NO: 29350 - protein, 9 aa, synthetic construct
  source 1..9: note = Seed: LVVVGARGV (KRAS G12R)
VVVKGVRGF

SEQ ID NO: 29351 - protein, 9 aa, synthetic construct
  source 1..9: note = Seed: LVVVGARGV (KRAS G12R)
VVVKGVRGH

SEQ ID NO: 29352 - protein, 9 aa, synthetic construct
  source 1..9: note = Seed: LVVVGARGV (KRAS G12R)
VVVKGVRGI

SEQ ID NO: 29353 - protein, 9 aa, synthetic construct
  source 1..9: note = Seed: LVVVGARGV (KRAS G12R)
VVVKGVRGK

SEQ ID NO: 29354 - protein, 9 aa, synthetic construct
  source 1..9: note = Seed: LVVVGARGV (KRAS G12R)
VVVKGVRGL

SEQ ID NO: 29355 - protein, 9 aa, synthetic construct
  source 1..9: note = Seed: LVVVGARGV (KRAS G12R)
VVVKGVRGM

SEQ ID NO: 29356 - protein, 9 aa, synthetic construct
  source 1..9: note = Seed: LVVVGARGV (KRAS G12R)
VVVKGVRGR

SEQ ID NO: 29357 - protein, 9 aa, synthetic construct
  source 1..9: note = Seed: LVVVGARGV (KRAS G12R)
VVVKGVRGV

SEQ ID NO: 29358 - protein, 9 aa, synthetic construct
  source 1..9: note = Seed: LVVVGARGV (KRAS G12R)
VVVKGVRGY

SEQ ID NO: 29359 - protein, 9 aa, synthetic construct
  source 1..9: note = Seed: LVVVGARGV (KRAS G12R)
VVVLGARGA

SEQ ID NO: 29360 - protein, 9 aa, synthetic construct
  source 1..9: note = Seed: LVVVGARGV (KRAS G12R)
VVVLGARGC

SEQ ID NO: 29361 - protein, 9 aa, synthetic construct
  source 1..9: note = Seed: LVVVGARGV (KRAS G12R)
VVVLGARGF

SEQ ID NO: 29362 - protein, 9 aa, synthetic construct
  source 1..9: note = Seed: LVVVGARGV (KRAS G12R)
VVVLGARGG

SEQ ID NO: 29363 - protein, 9 aa, synthetic construct
  source 1..9: note = Seed: LVVVGARGV (KRAS G12R)
VVVLGARGH

SEQ ID NO: 29364 - protein, 9 aa, synthetic construct
  source 1..9: note = Seed: LVVVGARGV (KRAS G12R)
VVVLGARGI

SEQ ID NO: 29365 - protein, 9 aa, synthetic construct
  source 1..9: note = Seed: LVVVGARGV (KRAS G12R)
VVVLGARGK

SEQ ID NO: 29366 - protein, 9 aa, synthetic construct
  source 1..9: note = Seed: LVVVGARGV (KRAS G12R)
VVVLGARGL

SEQ ID NO: 29367 - protein, 9 aa, synthetic construct
  source 1..9: note = Seed: LVVVGARGV (KRAS G12R)
VVVLGARGM

SEQ ID NO: 29368 - protein, 9 aa, synthetic construct
  source 1..9: note = Seed: LVVVGARGV (KRAS G12R)
VVVLGARGN

SEQ ID NO: 29369 - protein, 9 aa, synthetic construct
  source 1..9: note = Seed: LVVVGARGV (KRAS G12R)
VVVLGARGP

SEQ ID NO: 29370 - protein, 9 aa, synthetic construct
  source 1..9: note = Seed: LVVVGARGV (KRAS G12R)
VVVLGARGQ

SEQ ID NO: 29371 - protein, 9 aa, synthetic construct
  source 1..9: note = Seed: LVVVGARGV (KRAS G12R)
VVVLGARGR

SEQ ID NO: 29372 - protein, 9 aa, synthetic construct
  source 1..9: note = Seed: LVVVGARGV (KRAS G12R)
VVVLGARGS

SEQ ID NO: 29373 - protein, 9 aa, synthetic construct
  source 1..9: note = Seed: LVVVGARGV (KRAS G12R)
VVVLGARGT

SEQ ID NO: 29374 - protein, 9 aa, synthetic construct
  source 1..9: note = Seed: LVVVGARGV (KRAS G12R)
VVVLGARGV

SEQ ID NO: 29375 - protein, 9 aa, synthetic construct
  source 1..9: note = Seed: LVVVGARGV (KRAS G12R)
VVVLGARGY

SEQ ID NO: 29376 - protein, 9 aa, synthetic construct
  source 1..9: note = Seed: LVVVGARGV (KRAS G12R)
VVVLGCRGR

SEQ ID NO: 29377 - protein, 9 aa, synthetic construct
  source 1..9: note = Seed: LVVVGARGV (KRAS G12R)
VVVLGERGR

SEQ ID NO: 29378 - protein, 9 aa, synthetic construct
  source 1..9: note = Seed: LVVVGARGV (KRAS G12R)
VVVLGFRGR

SEQ ID NO: 29379 - protein, 9 aa, synthetic construct
  source 1..9: note = Seed: LVVVGARGV (KRAS G12R)
VVVLGGRGA

SEQ ID NO: 29380 - protein, 9 aa, synthetic construct
  source 1..9: note = Seed: LVVVGARGV (KRAS G12R)
VVVLGGRGC

SEQ ID NO: 29381 - protein, 9 aa, synthetic construct
  source 1..9: note = Seed: LVVVGARGV (KRAS G12R)
VVVLGGRGF

SEQ ID NO: 29382 - protein, 9 aa, synthetic construct
  source 1..9: note = Seed: LVVVGARGV (KRAS G12R)
VVVLGGRGG

SEQ ID NO: 29383 - protein, 9 aa, synthetic construct
  source 1..9: note = Seed: LVVVGARGV (KRAS G12R)
VVVLGGRGI

SEQ ID NO: 29384 - protein, 9 aa, synthetic construct
  source 1..9: note = Seed: LVVVGARGV (KRAS G12R)
VVVLGGRGL

SEQ ID NO: 29385 - protein, 9 aa, synthetic construct
  source 1..9: note = Seed: LVVVGARGV (KRAS G12R)
VVVLGGRGM

SEQ ID NO: 29386 - protein, 9 aa, synthetic construct
  source 1..9: note = Seed: LVVVGARGV (KRAS G12R)
VVVLGGRGN

SEQ ID NO: 29387 - protein, 9 aa, synthetic construct
  source 1..9: note = Seed: LVVVGARGV (KRAS G12R)
VVVLGGRGR

SEQ ID NO: 29388 - protein, 9 aa, synthetic construct
  source 1..9: note = Seed: LVVVGARGV (KRAS G12R)
VVVLGGRGS

SEQ ID NO: 29389 - protein, 9 aa, synthetic construct
  source 1..9: note = Seed: LVVVGARGV (KRAS G12R)
VVVLGGRGT

SEQ ID NO: 29390 - protein, 9 aa, synthetic construct
  source 1..9: note = Seed: LVVVGARGV (KRAS G12R)
VVVLGGRGV

SEQ ID NO: 29391 - protein, 9 aa, synthetic construct
  source 1..9: note = Seed: LVVVGARGV (KRAS G12R)
VVVLGHRGA

SEQ ID NO: 29392 - protein, 9 aa, synthetic construct
  source 1..9: note = Seed: LVVVGARGV (KRAS G12R)
VVVLGHRGF

SEQ ID NO: 29393 - protein, 9 aa, synthetic construct
  source 1..9: note = Seed: LVVVGARGV (KRAS G12R)
VVVLGHRGG

SEQ ID NO: 29394 - protein, 9 aa, synthetic construct
  source 1..9: note = Seed: LVVVGARGV (KRAS G12R)
VVVLGHRGH

SEQ ID NO: 29395 - protein, 9 aa, synthetic construct
  source 1..9: note = Seed: LVVVGARGV (KRAS G12R)
VVVLGHRGI

SEQ ID NO: 29396 - protein, 9 aa, synthetic construct
  source 1..9: note = Seed: LVVVGARGV (KRAS G12R)
VVVLGHRGK

SEQ ID NO: 29397 - protein, 9 aa, synthetic construct
  source 1..9: note = Seed: LVVVGARGV (KRAS G12R)
VVVLGHRGL

SEQ ID NO: 29398 - protein, 9 aa, synthetic construct
  source 1..9: note = Seed: LVVVGARGV (KRAS G12R)
VVVLGHRGM

SEQ ID NO: 29399 - protein, 9 aa, synthetic construct
  source 1..9: note = Seed: LVVVGARGV (KRAS G12R)
VVVLGHRGN

SEQ ID NO: 29400 - protein, 9 aa, synthetic construct
  source 1..9: note = Seed: LVVVGARGV (KRAS G12R)
VVVLGHRGP

SEQ ID NO: 29401 - protein, 9 aa, synthetic construct
  source 1..9: note = Seed: LVVVGARGV (KRAS G12R)
VVVLGHRGQ

SEQ ID NO: 29402 - protein, 9 aa, synthetic construct
  source 1..9: note = Seed: LVVVGARGV (KRAS G12R)
VVVLGHRGR

SEQ ID NO: 29403 - protein, 9 aa, synthetic construct
  source 1..9: note = Seed: LVVVGARGV (KRAS G12R)
VVVLGHRGS

SEQ ID NO: 29404 - protein, 9 aa, synthetic construct
  source 1..9: note = Seed: LVVVGARGV (KRAS G12R)
VVVLGHRGT

SEQ ID NO: 29405 - protein, 9 aa, synthetic construct
  source 1..9: note = Seed: LVVVGARGV (KRAS G12R)
VVVLGHRGV

SEQ ID NO: 29406 - protein, 9 aa, synthetic construct
  source 1..9: note = Seed: LVVVGARGV (KRAS G12R)
VVVLGHRGW

SEQ ID NO: 29407 - protein, 9 aa, synthetic construct
  source 1..9: note = Seed: LVVVGARGV (KRAS G12R)
VVVLGHRGY

SEQ ID NO: 29408 - protein, 9 aa, synthetic construct
  source 1..9: note = Seed: LVVVGARGV (KRAS G12R)
VVVLGIRGA

SEQ ID NO: 29409 - protein, 9 aa, synthetic construct
  source 1..9: note = Seed: LVVVGARGV (KRAS G12R)
VVVLGIRGF

SEQ ID NO: 29410 - protein, 9 aa, synthetic construct
  source 1..9: note = Seed: LVVVGARGV (KRAS G12R)
VVVLGIRGG

SEQ ID NO: 29411 - protein, 9 aa, synthetic construct
  source 1..9: note = Seed: LVVVGARGV (KRAS G12R)
VVVLGIRGI

SEQ ID NO: 29412 - protein, 9 aa, synthetic construct
  source 1..9: note = Seed: LVVVGARGV (KRAS G12R)
VVVLGIRGK

SEQ ID NO: 29413 - protein, 9 aa, synthetic construct
  source 1..9: note = Seed: LVVVGARGV (KRAS G12R)
VVVLGIRGL

SEQ ID NO: 29414 - protein, 9 aa, synthetic construct
  source 1..9: note = Seed: LVVVGARGV (KRAS G12R)
VVVLGIRGM

SEQ ID NO: 29415 - protein, 9 aa, synthetic construct
  source 1..9: note = Seed: LVVVGARGV (KRAS G12R)
VVVLGIRGQ

SEQ ID NO: 29416 - protein, 9 aa, synthetic construct
  source 1..9: note = Seed: LVVVGARGV (KRAS G12R)
VVVLGIRGR

SEQ ID NO: 29417 - protein, 9 aa, synthetic construct
  source 1..9: note = Seed: LVVVGARGV (KRAS G12R)
VVVLGIRGS

SEQ ID NO: 29418 - protein, 9 aa, synthetic construct
  source 1..9: note = Seed: LVVVGARGV (KRAS G12R)
VVVLGIRGV

SEQ ID NO: 29419 - protein, 9 aa, synthetic construct
  source 1..9: note = Seed: LVVVGARGV (KRAS G12R)
VVVLGIRGY

SEQ ID NO: 29420 - protein, 9 aa, synthetic construct
  source 1..9: note = Seed: LVVVGARGV (KRAS G12R)
VVVLGKRGA

SEQ ID NO: 29421 - protein, 9 aa, synthetic construct
  source 1..9: note = Seed: LVVVGARGV (KRAS G12R)
VVVLGKRGC

SEQ ID NO: 29422 - protein, 9 aa, synthetic construct
  source 1..9: note = Seed: LVVVGARGV (KRAS G12R)
VVVLGKRGE

SEQ ID NO: 29423 - protein, 9 aa, synthetic construct
  source 1..9: note = Seed: LVVVGARGV (KRAS G12R)
VVVLGKRGF

SEQ ID NO: 29424 - protein, 9 aa, synthetic construct
  source 1..9: note = Seed: LVVVGARGV (KRAS G12R)
VVVLGKRGG

SEQ ID NO: 29425 - protein, 9 aa, synthetic construct
  source 1..9: note = Seed: LVVVGARGV (KRAS G12R)
VVVLGKRGH

SEQ ID NO: 29426 - protein, 9 aa, synthetic construct
  source 1..9: note = Seed: LVVVGARGV (KRAS G12R)
VVVLGKRGI

SEQ ID NO: 29427 - protein, 9 aa, synthetic construct
  source 1..9: note = Seed: LVVVGARGV (KRAS G12R)
VVVLGKRGK

SEQ ID NO: 29428 - protein, 9 aa, synthetic construct
  source 1..9: note = Seed: LVVVGARGV (KRAS G12R)
VVVLGKRGL

SEQ ID NO: 29429 - protein, 9 aa, synthetic construct
  source 1..9: note = Seed: LVVVGARGV (KRAS G12R)
VVVLGKRGM

SEQ ID NO: 29430 - protein, 9 aa, synthetic construct
  source 1..9: note = Seed: LVVVGARGV (KRAS G12R)
VVVLGKRGN

SEQ ID NO: 29431 - protein, 9 aa, synthetic construct
  source 1..9: note = Seed: LVVVGARGV (KRAS G12R)
VVVLGKRGP

SEQ ID NO: 29432 - protein, 9 aa, synthetic construct
  source 1..9: note = Seed: LVVVGARGV (KRAS G12R)
VVVLGKRGQ

SEQ ID NO: 29433 - protein, 9 aa, synthetic construct
  source 1..9: note = Seed: LVVVGARGV (KRAS G12R)
VVVLGKRGR

SEQ ID NO: 29434 - protein, 9 aa, synthetic construct
  source 1..9: note = Seed: LVVVGARGV (KRAS G12R)
VVVLGKRGS

SEQ ID NO: 29435 - protein, 9 aa, synthetic construct
  source 1..9: note = Seed: LVVVGARGV (KRAS G12R)
VVVLGKRGT

SEQ ID NO: 29436 - protein, 9 aa, synthetic construct
  source 1..9: note = Seed: LVVVGARGV (KRAS G12R)
VVVLGKRGV

SEQ ID NO: 29437 - protein, 9 aa, synthetic construct
  source 1..9: note = Seed: LVVVGARGV (KRAS G12R)
VVVLGKRGW

SEQ ID NO: 29438 - protein, 9 aa, synthetic construct
  source 1..9: note = Seed: LVVVGARGV (KRAS G12R)
VVVLGKRGY

SEQ ID NO: 29439 - protein, 9 aa, synthetic construct
  source 1..9: note = Seed: LVVVGARGV (KRAS G12R)
VVVLGLRGA

SEQ ID NO: 29440 - protein, 9 aa, synthetic construct
  source 1..9: note = Seed: LVVVGARGV (KRAS G12R)
VVVLGLRGG

SEQ ID NO: 29441 - protein, 9 aa, synthetic construct
  source 1..9: note = Seed: LVVVGARGV (KRAS G12R)
VVVLGLRGI

SEQ ID NO: 29442 - protein, 9 aa, synthetic construct
  source 1..9: note = Seed: LVVVGARGV (KRAS G12R)
VVVLGLRGK

SEQ ID NO: 29443 - protein, 9 aa, synthetic construct
  source 1..9: note = Seed: LVVVGARGV (KRAS G12R)
VVVLGLRGL

SEQ ID NO: 29444 - protein, 9 aa, synthetic construct
  source 1..9: note = Seed: LVVVGARGV (KRAS G12R)
VVVLGLRGM

SEQ ID NO: 29445 - protein, 9 aa, synthetic construct
  source 1..9: note = Seed: LVVVGARGV (KRAS G12R)
VVVLGLRGQ

SEQ ID NO: 29446 - protein, 9 aa, synthetic construct
  source 1..9: note = Seed: LVVVGARGV (KRAS G12R)
VVVLGLRGR

SEQ ID NO: 29447 - protein, 9 aa, synthetic construct
  source 1..9: note = Seed: LVVVGARGV (KRAS G12R)
VVVLGLRGS

SEQ ID NO: 29448 - protein, 9 aa, synthetic construct
  source 1..9: note = Seed: LVVVGARGV (KRAS G12R)
VVVLGLRGV

SEQ ID NO: 29449 - protein, 9 aa, synthetic construct
  source 1..9: note = Seed: LVVVGARGV (KRAS G12R)
VVVLGLRGY

SEQ ID NO: 29450 - protein, 9 aa, synthetic construct
  source 1..9: note = Seed: LVVVGARGV (KRAS G12R)
VVVLGMRGA

SEQ ID NO: 29451 - protein, 9 aa, synthetic construct
  source 1..9: note = Seed: LVVVGARGV (KRAS G12R)
VVVLGMRGF

SEQ ID NO: 29452 - protein, 9 aa, synthetic construct
  source 1..9: note = Seed: LVVVGARGV (KRAS G12R)
VVVLGMRGG

SEQ ID NO: 29453 - protein, 9 aa, synthetic construct
  source 1..9: note = Seed: LVVVGARGV (KRAS G12R)
VVVLGMRGI

SEQ ID NO: 29454 - protein, 9 aa, synthetic construct
  source 1..9: note = Seed: LVVVGARGV (KRAS G12R)
VVVLGMRGL

SEQ ID NO: 29455 - protein, 9 aa, synthetic construct
  source 1..9: note = Seed: LVVVGARGV (KRAS G12R)
VVVLGMRGM

SEQ ID NO: 29456 - protein, 9 aa, synthetic construct
  source 1..9: note = Seed: LVVVGARGV (KRAS G12R)
VVVLGMRGQ

SEQ ID NO: 29457 - protein, 9 aa, synthetic construct
  source 1..9: note = Seed: LVVVGARGV (KRAS G12R)
VVVLGMRGR

SEQ ID NO: 29458 - protein, 9 aa, synthetic construct
  source 1..9: note = Seed: LVVVGARGV (KRAS G12R)
VVVLGMRGS

SEQ ID NO: 29459 - protein, 9 aa, synthetic construct
  source 1..9: note = Seed: LVVVGARGV (KRAS G12R)
VVVLGMRGV

SEQ ID NO: 29460 - protein, 9 aa, synthetic construct
  source 1..9: note = Seed: LVVVGARGV (KRAS G12R)
VVVLGMRGY

SEQ ID NO: 29461 - protein, 9 aa, synthetic construct
  source 1..9: note = Seed: LVVVGARGV (KRAS G12R)
VVVLGNRGA

SEQ ID NO: 29462 - protein, 9 aa, synthetic construct
  source 1..9: note = Seed: LVVVGARGV (KRAS G12R)
VVVLGNRGF

SEQ ID NO: 29463 - protein, 9 aa, synthetic construct
  source 1..9: note = Seed: LVVVGARGV (KRAS G12R)
VVVLGNRGH

SEQ ID NO: 29464 - protein, 9 aa, synthetic construct
  source 1..9: note = Seed: LVVVGARGV (KRAS G12R)
VVVLGNRGI

SEQ ID NO: 29465 - protein, 9 aa, synthetic construct
  source 1..9: note = Seed: LVVVGARGV (KRAS G12R)
VVVLGNRGK

SEQ ID NO: 29466 - protein, 9 aa, synthetic construct
  source 1..9: note = Seed: LVVVGARGV (KRAS G12R)
VVVLGNRGL

SEQ ID NO: 29467 - protein, 9 aa, synthetic construct
  source 1..9: note = Seed: LVVVGARGV (KRAS G12R)
VVVLGNRGM

SEQ ID NO: 29468 - protein, 9 aa, synthetic construct
  source 1..9: note = Seed: LVVVGARGV (KRAS G12R)
VVVLGNRGR

SEQ ID NO: 29469 - protein, 9 aa, synthetic construct
  source 1..9: note = Seed: LVVVGARGV (KRAS G12R)
VVVLGNRGS

SEQ ID NO: 29470 - protein, 9 aa, synthetic construct
  source 1..9: note = Seed: LVVVGARGV (KRAS G12R)
VVVLGNRGT

SEQ ID NO: 29471 - protein, 9 aa, synthetic construct
  source 1..9: note = Seed: LVVVGARGV (KRAS G12R)
VVVLGNRGV

SEQ ID NO: 29472 - protein, 9 aa, synthetic construct
  source 1..9: note = Seed: LVVVGARGV (KRAS G12R)
VVVLGNRGY

SEQ ID NO: 29473 - protein, 9 aa, synthetic construct
  source 1..9: note = Seed: LVVVGARGV (KRAS G12R)
VVVLGPRGA

SEQ ID NO: 29474 - protein, 9 aa, synthetic construct
  source 1..9: note = Seed: LVVVGARGV (KRAS G12R)
VVVLGPRGI

SEQ ID NO: 29475 - protein, 9 aa, synthetic construct
  source 1..9: note = Seed: LVVVGARGV (KRAS G12R)
VVVLGPRGL

SEQ ID NO: 29476 - protein, 9 aa, synthetic construct
  source 1..9: note = Seed: LVVVGARGV (KRAS G12R)
VVVLGPRGM

SEQ ID NO: 29477 - protein, 9 aa, synthetic construct
  source 1..9: note = Seed: LVVVGARGV (KRAS G12R)
VVVLGPRGR

SEQ ID NO: 29478 - protein, 9 aa, synthetic construct
  source 1..9: note = Seed: LVVVGARGV (KRAS G12R)
VVVLGPRGS

SEQ ID NO: 29479 - protein, 9 aa, synthetic construct
  source 1..9: note = Seed: LVVVGARGV (KRAS G12R)
VVVLGPRGT

SEQ ID NO: 29480 - protein, 9 aa, synthetic construct
  source 1..9: note = Seed: LVVVGARGV (KRAS G12R)
VVVLGPRGV

SEQ ID NO: 29481 - protein, 9 aa, synthetic construct
  source 1..9: note = Seed: LVVVGARGV (KRAS G12R)
VVVLGQRGA

SEQ ID NO: 29482 - protein, 9 aa, synthetic construct
  source 1..9: note = Seed: LVVVGARGV (KRAS G12R)
VVVLGQRGF

SEQ ID NO: 29483 - protein, 9 aa, synthetic construct
  source 1..9: note = Seed: LVVVGARGV (KRAS G12R)
VVVLGQRGI

SEQ ID NO: 29484 - protein, 9 aa, synthetic construct
  source 1..9: note = Seed: LVVVGARGV (KRAS G12R)
VVVLGQRGK

SEQ ID NO: 29485 - protein, 9 aa, synthetic construct
  source 1..9: note = Seed: LVVVGARGV (KRAS G12R)
VVVLGQRGL

SEQ ID NO: 29486 - protein, 9 aa, synthetic construct
  source 1..9: note = Seed: LVVVGARGV (KRAS G12R)
VVVLGQRGM

SEQ ID NO: 29487 - protein, 9 aa, synthetic construct
  source 1..9: note = Seed: LVVVGARGV (KRAS G12R)
VVVLGQRGR

SEQ ID NO: 29488 - protein, 9 aa, synthetic construct
  source 1..9: note = Seed: LVVVGARGV (KRAS G12R)
VVVLGQRGS

SEQ ID NO: 29489 - protein, 9 aa, synthetic construct
  source 1..9: note = Seed: LVVVGARGV (KRAS G12R)
VVVLGQRGV

SEQ ID NO: 29490 - protein, 9 aa, synthetic construct
  source 1..9: note = Seed: LVVVGARGV (KRAS G12R)
VVVLGRRGA

SEQ ID NO: 29491 - protein, 9 aa, synthetic construct
  source 1..9: note = Seed: LVVVGARGV (KRAS G12R)
VVVLGRRGC

SEQ ID NO: 29492 - protein, 9 aa, synthetic construct
  source 1..9: note = Seed: LVVVGARGV (KRAS G12R)
VVVLGRRGD

SEQ ID NO: 29493 - protein, 9 aa, synthetic construct
  source 1..9: note = Seed: LVVVGARGV (KRAS G12R)
VVVLGRRGE

SEQ ID NO: 29494 - protein, 9 aa, synthetic construct
  source 1..9: note = Seed: LVVVGARGV (KRAS G12R)
VVVLGRRGF

SEQ ID NO: 29495 - protein, 9 aa, synthetic construct
  source 1..9: note = Seed: LVVVGARGV (KRAS G12R)
VVVLGRRGG

SEQ ID NO: 29496 - protein, 9 aa, synthetic construct
  source 1..9: note = Seed: LVVVGARGV (KRAS G12R)
VVVLGRRGH

SEQ ID NO: 29497 - protein, 9 aa, synthetic construct
  source 1..9: note = Seed: LVVVGARGV (KRAS G12R)
VVVLGRRGI

SEQ ID NO: 29498 - protein, 9 aa, synthetic construct
  source 1..9: note = Seed: LVVVGARGV (KRAS G12R)
VVVLGRRGK

SEQ ID NO: 29499 - protein, 9 aa, synthetic construct
  source 1..9: note = Seed: LVVVGARGV (KRAS G12R)
VVVLGRRGL

SEQ ID NO: 29500 - protein, 9 aa, synthetic construct
  source 1..9: note = Seed: LVVVGARGV (KRAS G12R)
VVVLGRRGM

SEQ ID NO: 29501 - protein, 9 aa, synthetic construct
  source 1..9: note = Seed: LVVVGARGV (KRAS G12R)
VVVLGRRGN

SEQ ID NO: 29502 - protein, 9 aa, synthetic construct
  source 1..9: note = Seed: LVVVGARGV (KRAS G12R)
VVVLGRRGP

SEQ ID NO: 29503 - protein, 9 aa, synthetic construct
  source 1..9: note = Seed: LVVVGARGV (KRAS G12R)
VVVLGRRGQ

SEQ ID NO: 29504 - protein, 9 aa, synthetic construct
  source 1..9: note = Seed: LVVVGARGV (KRAS G12R)
VVVLGRRGR

SEQ ID NO: 29505 - protein, 9 aa, synthetic construct
  source 1..9: note = Seed: LVVVGARGV (KRAS G12R)
VVVLGRRGS

SEQ ID NO: 29506 - protein, 9 aa, synthetic construct
  source 1..9: note = Seed: LVVVGARGV (KRAS G12R)
VVVLGRRGT

SEQ ID NO: 29507 - protein, 9 aa, synthetic construct
  source 1..9: note = Seed: LVVVGARGV (KRAS G12R)
VVVLGRRGV

SEQ ID NO: 29508 - protein, 9 aa, synthetic construct
  source 1..9: note = Seed: LVVVGARGV (KRAS G12R)
VVVLGRRGW

SEQ ID NO: 29509 - protein, 9 aa, synthetic construct
  source 1..9: note = Seed: LVVVGARGV (KRAS G12R)
VVVLGRRGY

SEQ ID NO: 29510 - protein, 9 aa, synthetic construct
  source 1..9: note = Seed: LVVVGARGV (KRAS G12R)
VVVLGSRGA

SEQ ID NO: 29511 - protein, 9 aa, synthetic construct
  source 1..9: note = Seed: LVVVGARGV (KRAS G12R)
VVVLGSRGC

SEQ ID NO: 29512 - protein, 9 aa, synthetic construct
  source 1..9: note = Seed: LVVVGARGV (KRAS G12R)
VVVLGSRGF

SEQ ID NO: 29513 - protein, 9 aa, synthetic construct
  source 1..9: note = Seed: LVVVGARGV (KRAS G12R)
VVVLGSRGG

SEQ ID NO: 29514 - protein, 9 aa, synthetic construct
  source 1..9: note = Seed: LVVVGARGV (KRAS G12R)
VVVLGSRGH

SEQ ID NO: 29515 - protein, 9 aa, synthetic construct
  source 1..9: note = Seed: LVVVGARGV (KRAS G12R)
VVVLGSRGI

SEQ ID NO: 29516 - protein, 9 aa, synthetic construct
  source 1..9: note = Seed: LVVVGARGV (KRAS G12R)
VVVLGSRGK

SEQ ID NO: 29517 - protein, 9 aa, synthetic construct
  source 1..9: note = Seed: LVVVGARGV (KRAS G12R)
VVVLGSRGL

SEQ ID NO: 29518 - protein, 9 aa, synthetic construct
  source 1..9: note = Seed: LVVVGARGV (KRAS G12R)
VVVLGSRGM

SEQ ID NO: 29519 - protein, 9 aa, synthetic construct
  source 1..9: note = Seed: LVVVGARGV (KRAS G12R)
VVVLGSRGN

SEQ ID NO: 29520 - protein, 9 aa, synthetic construct
  source 1..9: note = Seed: LVVVGARGV (KRAS G12R)
VVVLGSRGQ

SEQ ID NO: 29521 - protein, 9 aa, synthetic construct
  source 1..9: note = Seed: LVVVGARGV (KRAS G12R)
VVVLGSRGR

SEQ ID NO: 29522 - protein, 9 aa, synthetic construct
  source 1..9: note = Seed: LVVVGARGV (KRAS G12R)
VVVLGSRGS

SEQ ID NO: 29523 - protein, 9 aa, synthetic construct
  source 1..9: note = Seed: LVVVGARGV (KRAS G12R)
VVVLGSRGT

SEQ ID NO: 29524 - protein, 9 aa, synthetic construct
  source 1..9: note = Seed: LVVVGARGV (KRAS G12R)
VVVLGSRGV

SEQ ID NO: 29525 - protein, 9 aa, synthetic construct
  source 1..9: note = Seed: LVVVGARGV (KRAS G12R)
VVVLGSRGY

SEQ ID NO: 29526 - protein, 9 aa, synthetic construct
  source 1..9: note = Seed: LVVVGARGV (KRAS G12R)
VVVLGTRGA

SEQ ID NO: 29527 - protein, 9 aa, synthetic construct
  source 1..9: note = Seed: LVVVGARGV (KRAS G12R)
VVVLGTRGF

SEQ ID NO: 29528 - protein, 9 aa, synthetic construct
  source 1..9: note = Seed: LVVVGARGV (KRAS G12R)
VVVLGTRGH

SEQ ID NO: 29529 - protein, 9 aa, synthetic construct
  source 1..9: note = Seed: LVVVGARGV (KRAS G12R)
VVVLGTRGI

SEQ ID NO: 29530 - protein, 9 aa, synthetic construct
  source 1..9: note = Seed: LVVVGARGV (KRAS G12R)
VVVLGTRGK

SEQ ID NO: 29531 - protein, 9 aa, synthetic construct
  source 1..9: note = Seed: LVVVGARGV (KRAS G12R)
VVVLGTRGL

SEQ ID NO: 29532 - protein, 9 aa, synthetic construct
  source 1..9: note = Seed: LVVVGARGV (KRAS G12R)
VVVLGTRGM

SEQ ID NO: 29533 - protein, 9 aa, synthetic construct
  source 1..9: note = Seed: LVVVGARGV (KRAS G12R)
VVVLGTRGQ

SEQ ID NO: 29534 - protein, 9 aa, synthetic construct
  source 1..9: note = Seed: LVVVGARGV (KRAS G12R)
VVVLGTRGR

SEQ ID NO: 29535 - protein, 9 aa, synthetic construct
  source 1..9: note = Seed: LVVVGARGV (KRAS G12R)
VVVLGTRGS

SEQ ID NO: 29536 - protein, 9 aa, synthetic construct
  source 1..9: note = Seed: LVVVGARGV (KRAS G12R)
VVVLGTRGT

SEQ ID NO: 29537 - protein, 9 aa, synthetic construct
  source 1..9: note = Seed: LVVVGARGV (KRAS G12R)
VVVLGTRGV

SEQ ID NO: 29538 - protein, 9 aa, synthetic construct
  source 1..9: note = Seed: LVVVGARGV (KRAS G12R)
VVVLGTRGY

SEQ ID NO: 29539 - protein, 9 aa, synthetic construct
  source 1..9: note = Seed: LVVVGARGV (KRAS G12R)
VVVLGVRGA

SEQ ID NO: 29540 - protein, 9 aa, synthetic construct
  source 1..9: note = Seed: LVVVGARGV (KRAS G12R)
VVVLGVRGF

SEQ ID NO: 29541 - protein, 9 aa, synthetic construct
  source 1..9: note = Seed: LVVVGARGV (KRAS G12R)
VVVLGVRGH

SEQ ID NO: 29542 - protein, 9 aa, synthetic construct
  source 1..9: note = Seed: LVVVGARGV (KRAS G12R)
VVVLGVRGI

SEQ ID NO: 29543 - protein, 9 aa, synthetic construct
  source 1..9: note = Seed: LVVVGARGV (KRAS G12R)
VVVLGVRGK

SEQ ID NO: 29544 - protein, 9 aa, synthetic construct
  source 1..9: note = Seed: LVVVGARGV (KRAS G12R)
VVVLGVRGL

SEQ ID NO: 29545 - protein, 9 aa, synthetic construct
  source 1..9: note = Seed: LVVVGARGV (KRAS G12R)
VVVLGVRGM

SEQ ID NO: 29546 - protein, 9 aa, synthetic construct
  source 1..9: note = Seed: LVVVGARGV (KRAS G12R)
VVVLGVRGQ

SEQ ID NO: 29547 - protein, 9 aa, synthetic construct
  source 1..9: note = Seed: LVVVGARGV (KRAS G12R)
VVVLGVRGR

SEQ ID NO: 29548 - protein, 9 aa, synthetic construct
  source 1..9: note = Seed: LVVVGARGV (KRAS G12R)
VVVLGVRGS

SEQ ID NO: 29549 - protein, 9 aa, synthetic construct
  source 1..9: note = Seed: LVVVGARGV (KRAS G12R)
VVVLGVRGT

SEQ ID NO: 29550 - protein, 9 aa, synthetic construct
  source 1..9: note = Seed: LVVVGARGV (KRAS G12R)
VVVLGVRGV

SEQ ID NO: 29551 - protein, 9 aa, synthetic construct
  source 1..9: note = Seed: LVVVGARGV (KRAS G12R)
VVVLGVRGY

SEQ ID NO: 29552 - protein, 9 aa, synthetic construct
  source 1..9: note = Seed: LVVVGARGV (KRAS G12R)
VVVLGWRGR

SEQ ID NO: 29553 - protein, 9 aa, synthetic construct
  source 1..9: note = Seed: LVVVGARGV (KRAS G12R)
VVVLGYRGR

SEQ ID NO: 29554 - protein, 9 aa, synthetic construct
  source 1..9: note = Seed: LVVVGARGV (KRAS G12R)
VVVMGARGA

SEQ ID NO: 29555 - protein, 9 aa, synthetic construct
  source 1..9: note = Seed: LVVVGARGV (KRAS G12R)
VVVMGARGC

SEQ ID NO: 29556 - protein, 9 aa, synthetic construct
  source 1..9: note = Seed: LVVVGARGV (KRAS G12R)
VVVMGARGF

SEQ ID NO: 29557 - protein, 9 aa, synthetic construct
  source 1..9: note = Seed: LVVVGARGV (KRAS G12R)
VVVMGARGG

SEQ ID NO: 29558 - protein, 9 aa, synthetic construct
  source 1..9: note = Seed: LVVVGARGV (KRAS G12R)
VVVMGARGH

SEQ ID NO: 29559 - protein, 9 aa, synthetic construct
  source 1..9: note = Seed: LVVVGARGV (KRAS G12R)
VVVMGARGI

SEQ ID NO: 29560 - protein, 9 aa, synthetic construct
  source 1..9: note = Seed: LVVVGARGV (KRAS G12R)
VVVMGARGK

SEQ ID NO: 29561 - protein, 9 aa, synthetic construct
  source 1..9: note = Seed: LVVVGARGV (KRAS G12R)
VVVMGARGL

SEQ ID NO: 29562 - protein, 9 aa, synthetic construct
  source 1..9: note = Seed: LVVVGARGV (KRAS G12R)
VVVMGARGM

SEQ ID NO: 29563 - protein, 9 aa, synthetic construct
  source 1..9: note = Seed: LVVVGARGV (KRAS G12R)
VVVMGARGN

SEQ ID NO: 29564 - protein, 9 aa, synthetic construct
  source 1..9: note = Seed: LVVVGARGV (KRAS G12R)
VVVMGARGQ

SEQ ID NO: 29565 - protein, 9 aa, synthetic construct
  source 1..9: note = Seed: LVVVGARGV (KRAS G12R)
VVVMGARGR

SEQ ID NO: 29566 - protein, 9 aa, synthetic construct
  source 1..9: note = Seed: LVVVGARGV (KRAS G12R)
VVVMGARGS

SEQ ID NO: 29567 - protein, 9 aa, synthetic construct
  source 1..9: note = Seed: LVVVGARGV (KRAS G12R)
VVVMGARGT

SEQ ID NO: 29568 - protein, 9 aa, synthetic construct
  source 1..9: note = Seed: LVVVGARGV (KRAS G12R)
VVVMGARGV

SEQ ID NO: 29569 - protein, 9 aa, synthetic construct
  source 1..9: note = Seed: LVVVGARGV (KRAS G12R)
VVVMGARGW

SEQ ID NO: 29570 - protein, 9 aa, synthetic construct
  source 1..9: note = Seed: LVVVGARGV (KRAS G12R)
VVVMGARGY

SEQ ID NO: 29571 - protein, 9 aa, synthetic construct
  source 1..9: note = Seed: LVVVGARGV (KRAS G12R)
VVVMGCRGR

SEQ ID NO: 29572 - protein, 9 aa, synthetic construct
  source 1..9: note = Seed: LVVVGARGV (KRAS G12R)
VVVMGFRGR

SEQ ID NO: 29573 - protein, 9 aa, synthetic construct
  source 1..9: note = Seed: LVVVGARGV (KRAS G12R)
VVVMGGRGA

SEQ ID NO: 29574 - protein, 9 aa, synthetic construct
  source 1..9: note = Seed: LVVVGARGV (KRAS G12R)
VVVMGGRGF

SEQ ID NO: 29575 - protein, 9 aa, synthetic construct
  source 1..9: note = Seed: LVVVGARGV (KRAS G12R)
VVVMGGRGI

SEQ ID NO: 29576 - protein, 9 aa, synthetic construct
  source 1..9: note = Seed: LVVVGARGV (KRAS G12R)
VVVMGGRGL

SEQ ID NO: 29577 - protein, 9 aa, synthetic construct
  source 1..9: note = Seed: LVVVGARGV (KRAS G12R)
VVVMGGRGM

SEQ ID NO: 29578 - protein, 9 aa, synthetic construct
  source 1..9: note = Seed: LVVVGARGV (KRAS G12R)
VVVMGGRGN

SEQ ID NO: 29579 - protein, 9 aa, synthetic construct
  source 1..9: note = Seed: LVVVGARGV (KRAS G12R)
VVVMGGRGR

SEQ ID NO: 29580 - protein, 9 aa, synthetic construct
  source 1..9: note = Seed: LVVVGARGV (KRAS G12R)
VVVMGGRGS

SEQ ID NO: 29581 - protein, 9 aa, synthetic construct
  source 1..9: note = Seed: LVVVGARGV (KRAS G12R)
VVVMGGRGT

SEQ ID NO: 29582 - protein, 9 aa, synthetic construct
  source 1..9: note = Seed: LVVVGARGV (KRAS G12R)
VVVMGGRGV

SEQ ID NO: 29583 - protein, 9 aa, synthetic construct
  source 1..9: note = Seed: LVVVGARGV (KRAS G12R)
VVVMGHRGA

SEQ ID NO: 29584 - protein, 9 aa, synthetic construct
  source 1..9: note = Seed: LVVVGARGV (KRAS G12R)
VVVMGHRGF

SEQ ID NO: 29585 - protein, 9 aa, synthetic construct
  source 1..9: note = Seed: LVVVGARGV (KRAS G12R)
VVVMGHRGG

SEQ ID NO: 29586 - protein, 9 aa, synthetic construct
  source 1..9: note = Seed: LVVVGARGV (KRAS G12R)
VVVMGHRGH

SEQ ID NO: 29587 - protein, 9 aa, synthetic construct
  source 1..9: note = Seed: LVVVGARGV (KRAS G12R)
VVVMGHRGI

SEQ ID NO: 29588 - protein, 9 aa, synthetic construct
  source 1..9: note = Seed: LVVVGARGV (KRAS G12R)
VVVMGHRGK

SEQ ID NO: 29589 - protein, 9 aa, synthetic construct
  source 1..9: note = Seed: LVVVGARGV (KRAS G12R)
VVVMGHRGL

SEQ ID NO: 29590 - protein, 9 aa, synthetic construct
  source 1..9: note = Seed: LVVVGARGV (KRAS G12R)
VVVMGHRGM

SEQ ID NO: 29591 - protein, 9 aa, synthetic construct
  source 1..9: note = Seed: LVVVGARGV (KRAS G12R)
VVVMGHRGN

SEQ ID NO: 29592 - protein, 9 aa, synthetic construct
  source 1..9: note = Seed: LVVVGARGV (KRAS G12R)
VVVMGHRGP

SEQ ID NO: 29593 - protein, 9 aa, synthetic construct
  source 1..9: note = Seed: LVVVGARGV (KRAS G12R)
VVVMGHRGQ

SEQ ID NO: 29594 - protein, 9 aa, synthetic construct
  source 1..9: note = Seed: LVVVGARGV (KRAS G12R)
VVVMGHRGR

SEQ ID NO: 29595 - protein, 9 aa, synthetic construct
  source 1..9: note = Seed: LVVVGARGV (KRAS G12R)
VVVMGHRGS

SEQ ID NO: 29596 - protein, 9 aa, synthetic construct
  source 1..9: note = Seed: LVVVGARGV (KRAS G12R)
VVVMGHRGT

SEQ ID NO: 29597 - protein, 9 aa, synthetic construct
  source 1..9: note = Seed: LVVVGARGV (KRAS G12R)
VVVMGHRGV

SEQ ID NO: 29598 - protein, 9 aa, synthetic construct
  source 1..9: note = Seed: LVVVGARGV (KRAS G12R)
VVVMGHRGW

SEQ ID NO: 29599 - protein, 9 aa, synthetic construct
  source 1..9: note = Seed: LVVVGARGV (KRAS G12R)
VVVMGHRGY

SEQ ID NO: 29600 - protein, 9 aa, synthetic construct
  source 1..9: note = Seed: LVVVGARGV (KRAS G12R)
VVVMGIRGA

SEQ ID NO: 29601 - protein, 9 aa, synthetic construct
  source 1..9: note = Seed: LVVVGARGV (KRAS G12R)
VVVMGIRGF

SEQ ID NO: 29602 - protein, 9 aa, synthetic construct
  source 1..9: note = Seed: LVVVGARGV (KRAS G12R)
VVVMGIRGG

SEQ ID NO: 29603 - protein, 9 aa, synthetic construct
  source 1..9: note = Seed: LVVVGARGV (KRAS G12R)
VVVMGIRGH

SEQ ID NO: 29604 - protein, 9 aa, synthetic construct
  source 1..9: note = Seed: LVVVGARGV (KRAS G12R)
VVVMGIRGI

SEQ ID NO: 29605 - protein, 9 aa, synthetic construct
  source 1..9: note = Seed: LVVVGARGV (KRAS G12R)
VVVMGIRGK

SEQ ID NO: 29606 - protein, 9 aa, synthetic construct
  source 1..9: note = Seed: LVVVGARGV (KRAS G12R)
VVVMGIRGL

SEQ ID NO: 29607 - protein, 9 aa, synthetic construct
  source 1..9: note = Seed: LVVVGARGV (KRAS G12R)
VVVMGIRGM

SEQ ID NO: 29608 - protein, 9 aa, synthetic construct
  source 1..9: note = Seed: LVVVGARGV (KRAS G12R)
VVVMGIRGQ

SEQ ID NO: 29609 - protein, 9 aa, synthetic construct
  source 1..9: note = Seed: LVVVGARGV (KRAS G12R)
VVVMGIRGR

SEQ ID NO: 29610 - protein, 9 aa, synthetic construct
  source 1..9: note = Seed: LVVVGARGV (KRAS G12R)
VVVMGIRGS

SEQ ID NO: 29611 - protein, 9 aa, synthetic construct
  source 1..9: note = Seed: LVVVGARGV (KRAS G12R)
VVVMGIRGV

SEQ ID NO: 29612 - protein, 9 aa, synthetic construct
  source 1..9: note = Seed: LVVVGARGV (KRAS G12R)
VVVMGIRGY

SEQ ID NO: 29613 - protein, 9 aa, synthetic construct
  source 1..9: note = Seed: LVVVGARGV (KRAS G12R)
VVVMGKRGA

SEQ ID NO: 29614 - protein, 9 aa, synthetic construct
  source 1..9: note = Seed: LVVVGARGV (KRAS G12R)
VVVMGKRGC

SEQ ID NO: 29615 - protein, 9 aa, synthetic construct
  source 1..9: note = Seed: LVVVGARGV (KRAS G12R)
VVVMGKRGE

SEQ ID NO: 29616 - protein, 9 aa, synthetic construct
  source 1..9: note = Seed: LVVVGARGV (KRAS G12R)
VVVMGKRGF

SEQ ID NO: 29617 - protein, 9 aa, synthetic construct
  source 1..9: note = Seed: LVVVGARGV (KRAS G12R)
VVVMGKRGG

SEQ ID NO: 29618 - protein, 9 aa, synthetic construct
  source 1..9: note = Seed: LVVVGARGV (KRAS G12R)
VVVMGKRGH

SEQ ID NO: 29619 - protein, 9 aa, synthetic construct
  source 1..9: note = Seed: LVVVGARGV (KRAS G12R)
VVVMGKRGI

SEQ ID NO: 29620 - protein, 9 aa, synthetic construct
  source 1..9: note = Seed: LVVVGARGV (KRAS G12R)
VVVMGKRGK

SEQ ID NO: 29621 - protein, 9 aa, synthetic construct
  source 1..9: note = Seed: LVVVGARGV (KRAS G12R)
VVVMGKRGL

SEQ ID NO: 29622 - protein, 9 aa, synthetic construct
  source 1..9: note = Seed: LVVVGARGV (KRAS G12R)
VVVMGKRGM

SEQ ID NO: 29623 - protein, 9 aa, synthetic construct
  source 1..9: note = Seed: LVVVGARGV (KRAS G12R)
VVVMGKRGN

SEQ ID NO: 29624 - protein, 9 aa, synthetic construct
  source 1..9: note = Seed: LVVVGARGV (KRAS G12R)
VVVMGKRGP

SEQ ID NO: 29625 - protein, 9 aa, synthetic construct
  source 1..9: note = Seed: LVVVGARGV (KRAS G12R)
VVVMGKRGQ

SEQ ID NO: 29626 - protein, 9 aa, synthetic construct
  source 1..9: note = Seed: LVVVGARGV (KRAS G12R)
VVVMGKRGR

SEQ ID NO: 29627 - protein, 9 aa, synthetic construct
  source 1..9: note = Seed: LVVVGARGV (KRAS G12R)
VVVMGKRGS

SEQ ID NO: 29628 - protein, 9 aa, synthetic construct
  source 1..9: note = Seed: LVVVGARGV (KRAS G12R)
VVVMGKRGT

SEQ ID NO: 29629 - protein, 9 aa, synthetic construct
  source 1..9: note = Seed: LVVVGARGV (KRAS G12R)
VVVMGKRGV

SEQ ID NO: 29630 - protein, 9 aa, synthetic construct
  source 1..9: note = Seed: LVVVGARGV (KRAS G12R)
VVVMGKRGW

SEQ ID NO: 29631 - protein, 9 aa, synthetic construct
  source 1..9: note = Seed: LVVVGARGV (KRAS G12R)
VVVMGKRGY

SEQ ID NO: 29632 - protein, 9 aa, synthetic construct
  source 1..9: note = Seed: LVVVGARGV (KRAS G12R)
VVVMGLRGA

SEQ ID NO: 29633 - protein, 9 aa, synthetic construct
  source 1..9: note = Seed: LVVVGARGV (KRAS G12R)
VVVMGLRGF

SEQ ID NO: 29634 - protein, 9 aa, synthetic construct
  source 1..9: note = Seed: LVVVGARGV (KRAS G12R)
VVVMGLRGG

SEQ ID NO: 29635 - protein, 9 aa, synthetic construct
  source 1..9: note = Seed: LVVVGARGV (KRAS G12R)
VVVMGLRGI

SEQ ID NO: 29636 - protein, 9 aa, synthetic construct
  source 1..9: note = Seed: LVVVGARGV (KRAS G12R)
VVVMGLRGK

SEQ ID NO: 29637 - protein, 9 aa, synthetic construct
  source 1..9: note = Seed: LVVVGARGV (KRAS G12R)
VVVMGLRGL

SEQ ID NO: 29638 - protein, 9 aa, synthetic construct
  source 1..9: note = Seed: LVVVGARGV (KRAS G12R)
VVVMGLRGM

SEQ ID NO: 29639 - protein, 9 aa, synthetic construct
  source 1..9: note = Seed: LVVVGARGV (KRAS G12R)
VVVMGLRGQ

SEQ ID NO: 29640 - protein, 9 aa, synthetic construct
  source 1..9: note = Seed: LVVVGARGV (KRAS G12R)
VVVMGLRGR

SEQ ID NO: 29641 - protein, 9 aa, synthetic construct
  source 1..9: note = Seed: LVVVGARGV (KRAS G12R)
VVVMGLRGS

SEQ ID NO: 29642 - protein, 9 aa, synthetic construct
  source 1..9: note = Seed: LVVVGARGV (KRAS G12R)
VVVMGLRGV

SEQ ID NO: 29643 - protein, 9 aa, synthetic construct
  source 1..9: note = Seed: LVVVGARGV (KRAS G12R)
VVVMGLRGY

SEQ ID NO: 29644 - protein, 9 aa, synthetic construct
  source 1..9: note = Seed: LVVVGARGV (KRAS G12R)
VVVMGMRGA

SEQ ID NO: 29645 - protein, 9 aa, synthetic construct
  source 1..9: note = Seed: LVVVGARGV (KRAS G12R)
VVVMGMRGF

SEQ ID NO: 29646 - protein, 9 aa, synthetic construct
  source 1..9: note = Seed: LVVVGARGV (KRAS G12R)
VVVMGMRGG

SEQ ID NO: 29647 - protein, 9 aa, synthetic construct
  source 1..9: note = Seed: LVVVGARGV (KRAS G12R)
VVVMGMRGI

SEQ ID NO: 29648 - protein, 9 aa, synthetic construct
  source 1..9: note = Seed: LVVVGARGV (KRAS G12R)
VVVMGMRGL

SEQ ID NO: 29649 - protein, 9 aa, synthetic construct
  source 1..9: note = Seed: LVVVGARGV (KRAS G12R)
VVVMGMRGM

SEQ ID NO: 29650 - protein, 9 aa, synthetic construct
  source 1..9: note = Seed: LVVVGARGV (KRAS G12R)
VVVMGMRGQ

SEQ ID NO: 29651 - protein, 9 aa, synthetic construct
  source 1..9: note = Seed: LVVVGARGV (KRAS G12R)
VVVMGMRGR

SEQ ID NO: 29652 - protein, 9 aa, synthetic construct
  source 1..9: note = Seed: LVVVGARGV (KRAS G12R)
VVVMGMRGS

SEQ ID NO: 29653 - protein, 9 aa, synthetic construct
  source 1..9: note = Seed: LVVVGARGV (KRAS G12R)
VVVMGMRGV

SEQ ID NO: 29654 - protein, 9 aa, synthetic construct
  source 1..9: note = Seed: LVVVGARGV (KRAS G12R)
VVVMGMRGY

SEQ ID NO: 29655 - protein, 9 aa, synthetic construct
  source 1..9: note = Seed: LVVVGARGV (KRAS G12R)
VVVMGNRGA

SEQ ID NO: 29656 - protein, 9 aa, synthetic construct
  source 1..9: note = Seed: LVVVGARGV (KRAS G12R)
VVVMGNRGF

SEQ ID NO: 29657 - protein, 9 aa, synthetic construct
  source 1..9: note = Seed: LVVVGARGV (KRAS G12R)
VVVMGNRGH

SEQ ID NO: 29658 - protein, 9 aa, synthetic construct
  source 1..9: note = Seed: LVVVGARGV (KRAS G12R)
VVVMGNRGI

SEQ ID NO: 29659 - protein, 9 aa, synthetic construct
  source 1..9: note = Seed: LVVVGARGV (KRAS G12R)
VVVMGNRGK

SEQ ID NO: 29660 - protein, 9 aa, synthetic construct
  source 1..9: note = Seed: LVVVGARGV (KRAS G12R)
VVVMGNRGL

SEQ ID NO: 29661 - protein, 9 aa, synthetic construct
  source 1..9: note = Seed: LVVVGARGV (KRAS G12R)
VVVMGNRGM

SEQ ID NO: 29662 - protein, 9 aa, synthetic construct
  source 1..9: note = Seed: LVVVGARGV (KRAS G12R)
VVVMGNRGR

SEQ ID NO: 29663 - protein, 9 aa, synthetic construct
  source 1..9: note = Seed: LVVVGARGV (KRAS G12R)
VVVMGNRGS

SEQ ID NO: 29664 - protein, 9 aa, synthetic construct
  source 1..9: note = Seed: LVVVGARGV (KRAS G12R)
VVVMGNRGT

SEQ ID NO: 29665 - protein, 9 aa, synthetic construct
  source 1..9: note = Seed: LVVVGARGV (KRAS G12R)
VVVMGNRGV

SEQ ID NO: 29666 - protein, 9 aa, synthetic construct
  source 1..9: note = Seed: LVVVGARGV (KRAS G12R)
VVVMGNRGY

SEQ ID NO: 29667 - protein, 9 aa, synthetic construct
  source 1..9: note = Seed: LVVVGARGV (KRAS G12R)
VVVMGPRGA

SEQ ID NO: 29668 - protein, 9 aa, synthetic construct
  source 1..9: note = Seed: LVVVGARGV (KRAS G12R)
VVVMGPRGI

SEQ ID NO: 29669 - protein, 9 aa, synthetic construct
  source 1..9: note = Seed: LVVVGARGV (KRAS G12R)
VVVMGPRGL

SEQ ID NO: 29670 - protein, 9 aa, synthetic construct
  source 1..9: note = Seed: LVVVGARGV (KRAS G12R)
VVVMGPRGM

SEQ ID NO: 29671 - protein, 9 aa, synthetic construct
  source 1..9: note = Seed: LVVVGARGV (KRAS G12R)
VVVMGPRGR

SEQ ID NO: 29672 - protein, 9 aa, synthetic construct
  source 1..9: note = Seed: LVVVGARGV (KRAS G12R)
VVVMGPRGS

SEQ ID NO: 29673 - protein, 9 aa, synthetic construct
  source 1..9: note = Seed: LVVVGARGV (KRAS G12R)
VVVMGPRGT

SEQ ID NO: 29674 - protein, 9 aa, synthetic construct
  source 1..9: note = Seed: LVVVGARGV (KRAS G12R)
VVVMGPRGV

SEQ ID NO: 29675 - protein, 9 aa, synthetic construct
  source 1..9: note = Seed: LVVVGARGV (KRAS G12R)
VVVMGQRGA

SEQ ID NO: 29676 - protein, 9 aa, synthetic construct
  source 1..9: note = Seed: LVVVGARGV (KRAS G12R)
VVVMGQRGF

SEQ ID NO: 29677 - protein, 9 aa, synthetic construct
  source 1..9: note = Seed: LVVVGARGV (KRAS G12R)
VVVMGQRGH

SEQ ID NO: 29678 - protein, 9 aa, synthetic construct
  source 1..9: note = Seed: LVVVGARGV (KRAS G12R)
VVVMGQRGI

SEQ ID NO: 29679 - protein, 9 aa, synthetic construct
  source 1..9: note = Seed: LVVVGARGV (KRAS G12R)
VVVMGQRGK

SEQ ID NO: 29680 - protein, 9 aa, synthetic construct
  source 1..9: note = Seed: LVVVGARGV (KRAS G12R)
VVVMGQRGL

SEQ ID NO: 29681 - protein, 9 aa, synthetic construct
  source 1..9: note = Seed: LVVVGARGV (KRAS G12R)
VVVMGQRGM

SEQ ID NO: 29682 - protein, 9 aa, synthetic construct
  source 1..9: note = Seed: LVVVGARGV (KRAS G12R)
VVVMGQRGR

SEQ ID NO: 29683 - protein, 9 aa, synthetic construct
  source 1..9: note = Seed: LVVVGARGV (KRAS G12R)
VVVMGQRGS

SEQ ID NO: 29684 - protein, 9 aa, synthetic construct
  source 1..9: note = Seed: LVVVGARGV (KRAS G12R)
VVVMGQRGT

SEQ ID NO: 29685 - protein, 9 aa, synthetic construct
  source 1..9: note = Seed: LVVVGARGV (KRAS G12R)
VVVMGQRGV

SEQ ID NO: 29686 - protein, 9 aa, synthetic construct
  source 1..9: note = Seed: LVVVGARGV (KRAS G12R)
VVVMGQRGY

SEQ ID NO: 29687 - protein, 9 aa, synthetic construct
  source 1..9: note = Seed: LVVVGARGV (KRAS G12R)
VVVMGRRGA

SEQ ID NO: 29688 - protein, 9 aa, synthetic construct
  source 1..9: note = Seed: LVVVGARGV (KRAS G12R)
VVVMGRRGC

SEQ ID NO: 29689 - protein, 9 aa, synthetic construct
  source 1..9: note = Seed: LVVVGARGV (KRAS G12R)
VVVMGRRGD

SEQ ID NO: 29690 - protein, 9 aa, synthetic construct
  source 1..9: note = Seed: LVVVGARGV (KRAS G12R)
VVVMGRRGE

SEQ ID NO: 29691 - protein, 9 aa, synthetic construct
  source 1..9: note = Seed: LVVVGARGV (KRAS G12R)
VVVMGRRGF

SEQ ID NO: 29692 - protein, 9 aa, synthetic construct
  source 1..9: note = Seed: LVVVGARGV (KRAS G12R)
VVVMGRRGG

SEQ ID NO: 29693 - protein, 9 aa, synthetic construct
  source 1..9: note = Seed: LVVVGARGV (KRAS G12R)
VVVMGRRGH

SEQ ID NO: 29694 - protein, 9 aa, synthetic construct
  source 1..9: note = Seed: LVVVGARGV (KRAS G12R)
VVVMGRRGI

SEQ ID NO: 29695 - protein, 9 aa, synthetic construct
  source 1..9: note = Seed: LVVVGARGV (KRAS G12R)
VVVMGRRGK

SEQ ID NO: 29696 - protein, 9 aa, synthetic construct
  source 1..9: note = Seed: LVVVGARGV (KRAS G12R)
VVVMGRRGL

SEQ ID NO: 29697 - protein, 9 aa, synthetic construct
  source 1..9: note = Seed: LVVVGARGV (KRAS G12R)
VVVMGRRGM

SEQ ID NO: 29698 - protein, 9 aa, synthetic construct
  source 1..9: note = Seed: LVVVGARGV (KRAS G12R)
VVVMGRRGN

SEQ ID NO: 29699 - protein, 9 aa, synthetic construct
  source 1..9: note = Seed: LVVVGARGV (KRAS G12R)
VVVMGRRGP

SEQ ID NO: 29700 - protein, 9 aa, synthetic construct
  source 1..9: note = Seed: LVVVGARGV (KRAS G12R)
VVVMGRRGQ

SEQ ID NO: 29701 - protein, 9 aa, synthetic construct
  source 1..9: note = Seed: LVVVGARGV (KRAS G12R)
VVVMGRRGR

SEQ ID NO: 29702 - protein, 9 aa, synthetic construct
  source 1..9: note = Seed: LVVVGARGV (KRAS G12R)
VVVMGRRGS

SEQ ID NO: 29703 - protein, 9 aa, synthetic construct
  source 1..9: note = Seed: LVVVGARGV (KRAS G12R)
VVVMGRRGT

SEQ ID NO: 29704 - protein, 9 aa, synthetic construct
  source 1..9: note = Seed: LVVVGARGV (KRAS G12R)
VVVMGRRGV

SEQ ID NO: 29705 - protein, 9 aa, synthetic construct
  source 1..9: note = Seed: LVVVGARGV (KRAS G12R)
VVVMGRRGW

SEQ ID NO: 29706 - protein, 9 aa, synthetic construct
  source 1..9: note = Seed: LVVVGARGV (KRAS G12R)
VVVMGRRGY

SEQ ID NO: 29707 - protein, 9 aa, synthetic construct
  source 1..9: note = Seed: LVVVGARGV (KRAS G12R)
VVVMGSRGA

SEQ ID NO: 29708 - protein, 9 aa, synthetic construct
  source 1..9: note = Seed: LVVVGARGV (KRAS G12R)
VVVMGSRGC

SEQ ID NO: 29709 - protein, 9 aa, synthetic construct
  source 1..9: note = Seed: LVVVGARGV (KRAS G12R)
VVVMGSRGF

SEQ ID NO: 29710 - protein, 9 aa, synthetic construct
  source 1..9: note = Seed: LVVVGARGV (KRAS G12R)
VVVMGSRGH

SEQ ID NO: 29711 - protein, 9 aa, synthetic construct
  source 1..9: note = Seed: LVVVGARGV (KRAS G12R)
VVVMGSRGI

SEQ ID NO: 29712 - protein, 9 aa, synthetic construct
  source 1..9: note = Seed: LVVVGARGV (KRAS G12R)
VVVMGSRGK

SEQ ID NO: 29713 - protein, 9 aa, synthetic construct
  source 1..9: note = Seed: LVVVGARGV (KRAS G12R)
VVVMGSRGL

SEQ ID NO: 29714 - protein, 9 aa, synthetic construct
  source 1..9: note = Seed: LVVVGARGV (KRAS G12R)
VVVMGSRGM

SEQ ID NO: 29715 - protein, 9 aa, synthetic construct
  source 1..9: note = Seed: LVVVGARGV (KRAS G12R)
VVVMGSRGN

SEQ ID NO: 29716 - protein, 9 aa, synthetic construct
  source 1..9: note = Seed: LVVVGARGV (KRAS G12R)
VVVMGSRGQ

SEQ ID NO: 29717 - protein, 9 aa, synthetic construct
  source 1..9: note = Seed: LVVVGARGV (KRAS G12R)
VVVMGSRGR

SEQ ID NO: 29718 - protein, 9 aa, synthetic construct
  source 1..9: note = Seed: LVVVGARGV (KRAS G12R)
VVVMGSRGS

SEQ ID NO: 29719 - protein, 9 aa, synthetic construct
  source 1..9: note = Seed: LVVVGARGV (KRAS G12R)
VVVMGSRGT

SEQ ID NO: 29720 - protein, 9 aa, synthetic construct
  source 1..9: note = Seed: LVVVGARGV (KRAS G12R)
VVVMGSRGV

SEQ ID NO: 29721 - protein, 9 aa, synthetic construct
  source 1..9: note = Seed: LVVVGARGV (KRAS G12R)
VVVMGSRGY

SEQ ID NO: 29722 - protein, 9 aa, synthetic construct
  source 1..9: note = Seed: LVVVGARGV (KRAS G12R)
VVVMGTRGA

SEQ ID NO: 29723 - protein, 9 aa, synthetic construct
  source 1..9: note = Seed: LVVVGARGV (KRAS G12R)
VVVMGTRGF

SEQ ID NO: 29724 - protein, 9 aa, synthetic construct
  source 1..9: note = Seed: LVVVGARGV (KRAS G12R)
VVVMGTRGH

SEQ ID NO: 29725 - protein, 9 aa, synthetic construct
  source 1..9: note = Seed: LVVVGARGV (KRAS G12R)
VVVMGTRGI

SEQ ID NO: 29726 - protein, 9 aa, synthetic construct
  source 1..9: note = Seed: LVVVGARGV (KRAS G12R)
VVVMGTRGK

SEQ ID NO: 29727 - protein, 9 aa, synthetic construct
  source 1..9: note = Seed: LVVVGARGV (KRAS G12R)
VVVMGTRGL

SEQ ID NO: 29728 - protein, 9 aa, synthetic construct
  source 1..9: note = Seed: LVVVGARGV (KRAS G12R)
VVVMGTRGM

SEQ ID NO: 29729 - protein, 9 aa, synthetic construct
  source 1..9: note = Seed: LVVVGARGV (KRAS G12R)
VVVMGTRGQ

SEQ ID NO: 29730 - protein, 9 aa, synthetic construct
  source 1..9: note = Seed: LVVVGARGV (KRAS G12R)
VVVMGTRGR

SEQ ID NO: 29731 - protein, 9 aa, synthetic construct
  source 1..9: note = Seed: LVVVGARGV (KRAS G12R)
VVVMGTRGS

SEQ ID NO: 29732 - protein, 9 aa, synthetic construct
  source 1..9: note = Seed: LVVVGARGV (KRAS G12R)
VVVMGTRGT

SEQ ID NO: 29733 - protein, 9 aa, synthetic construct
  source 1..9: note = Seed: LVVVGARGV (KRAS G12R)
VVVMGTRGV

SEQ ID NO: 29734 - protein, 9 aa, synthetic construct
  source 1..9: note = Seed: LVVVGARGV (KRAS G12R)
VVVMGTRGY

SEQ ID NO: 29735 - protein, 9 aa, synthetic construct
  source 1..9: note = Seed: LVVVGARGV (KRAS G12R)
VVVMGVRGA

SEQ ID NO: 29736 - protein, 9 aa, synthetic construct
  source 1..9: note = Seed: LVVVGARGV (KRAS G12R)
VVVMGVRGF

SEQ ID NO: 29737 - protein, 9 aa, synthetic construct
  source 1..9: note = Seed: LVVVGARGV (KRAS G12R)
VVVMGVRGH

SEQ ID NO: 29738 - protein, 9 aa, synthetic construct
  source 1..9: note = Seed: LVVVGARGV (KRAS G12R)
VVVMGVRGI

SEQ ID NO: 29739 - protein, 9 aa, synthetic construct
  source 1..9: note = Seed: LVVVGARGV (KRAS G12R)
VVVMGVRGK

SEQ ID NO: 29740 - protein, 9 aa, synthetic construct
  source 1..9: note = Seed: LVVVGARGV (KRAS G12R)
VVVMGVRGL

SEQ ID NO: 29741 - protein, 9 aa, synthetic construct
  source 1..9: note = Seed: LVVVGARGV (KRAS G12R)
VVVMGVRGM

SEQ ID NO: 29742 - protein, 9 aa, synthetic construct
  source 1..9: note = Seed: LVVVGARGV (KRAS G12R)
VVVMGVRGQ

SEQ ID NO: 29743 - protein, 9 aa, synthetic construct
  source 1..9: note = Seed: LVVVGARGV (KRAS G12R)
VVVMGVRGR

SEQ ID NO: 29744 - protein, 9 aa, synthetic construct
  source 1..9: note = Seed: LVVVGARGV (KRAS G12R)
VVVMGVRGS

SEQ ID NO: 29745 - protein, 9 aa, synthetic construct
  source 1..9: note = Seed: LVVVGARGV (KRAS G12R)
VVVMGVRGT

SEQ ID NO: 29746 - protein, 9 aa, synthetic construct
  source 1..9: note = Seed: LVVVGARGV (KRAS G12R)
VVVMGVRGV

SEQ ID NO: 29747 - protein, 9 aa, synthetic construct
  source 1..9: note = Seed: LVVVGARGV (KRAS G12R)
VVVMGVRGY

SEQ ID NO: 29748 - protein, 9 aa, synthetic construct
  source 1..9: note = Seed: LVVVGARGV (KRAS G12R)
VVVMGWRGR

SEQ ID NO: 29749 - protein, 9 aa, synthetic construct
  source 1..9: note = Seed: LVVVGARGV (KRAS G12R)
VVVMGYRGM

SEQ ID NO: 29750 - protein, 9 aa, synthetic construct
  source 1..9: note = Seed: LVVVGARGV (KRAS G12R)
VVVMGYRGR

SEQ ID NO: 29751 - protein, 9 aa, synthetic construct
  source 1..9: note = Seed: LVVVGARGV (KRAS G12R)
VVVNGARGA

SEQ ID NO: 29752 - protein, 9 aa, synthetic construct
  source 1..9: note = Seed: LVVVGARGV (KRAS G12R)
VVVNGARGF

SEQ ID NO: 29753 - protein, 9 aa, synthetic construct
  source 1..9: note = Seed: LVVVGARGV (KRAS G12R)
VVVNGARGI

SEQ ID NO: 29754 - protein, 9 aa, synthetic construct
  source 1..9: note = Seed: LVVVGARGV (KRAS G12R)
VVVNGARGL

SEQ ID NO: 29755 - protein, 9 aa, synthetic construct
  source 1..9: note = Seed: LVVVGARGV (KRAS G12R)
VVVNGARGM

SEQ ID NO: 29756 - protein, 9 aa, synthetic construct
  source 1..9: note = Seed: LVVVGARGV (KRAS G12R)
VVVNGARGT

SEQ ID NO: 29757 - protein, 9 aa, synthetic construct
  source 1..9: note = Seed: LVVVGARGV (KRAS G12R)
VVVNGARGV

SEQ ID NO: 29758 - protein, 9 aa, synthetic construct
  source 1..9: note = Seed: LVVVGARGV (KRAS G12R)
VVVNGARGW

SEQ ID NO: 29759 - protein, 9 aa, synthetic construct
  source 1..9: note = Seed: LVVVGARGV (KRAS G12R)
VVVNGARGY

SEQ ID NO: 29760 - protein, 9 aa, synthetic construct
  source 1..9: note = Seed: LVVVGARGV (KRAS G12R)
VVVNGCRGI

SEQ ID NO: 29761 - protein, 9 aa, synthetic construct
  source 1..9: note = Seed: LVVVGARGV (KRAS G12R)
VVVNGDRGI

SEQ ID NO: 29762 - protein, 9 aa, synthetic construct
  source 1..9: note = Seed: LVVVGARGV (KRAS G12R)
VVVNGFRGI

SEQ ID NO: 29763 - protein, 9 aa, synthetic construct
  source 1..9: note = Seed: LVVVGARGV (KRAS G12R)
VVVNGFRGV

SEQ ID NO: 29764 - protein, 9 aa, synthetic construct
  source 1..9: note = Seed: LVVVGARGV (KRAS G12R)
VVVNGGRGF

SEQ ID NO: 29765 - protein, 9 aa, synthetic construct
  source 1..9: note = Seed: LVVVGARGV (KRAS G12R)
VVVNGGRGI

SEQ ID NO: 29766 - protein, 9 aa, synthetic construct
  source 1..9: note = Seed: LVVVGARGV (KRAS G12R)
VVVNGGRGL

SEQ ID NO: 29767 - protein, 9 aa, synthetic construct
  source 1..9: note = Seed: LVVVGARGV (KRAS G12R)
VVVNGGRGM

SEQ ID NO: 29768 - protein, 9 aa, synthetic construct
  source 1..9: note = Seed: LVVVGARGV (KRAS G12R)
VVVNGGRGV

SEQ ID NO: 29769 - protein, 9 aa, synthetic construct
  source 1..9: note = Seed: LVVVGARGV (KRAS G12R)
VVVNGGRGY

SEQ ID NO: 29770 - protein, 9 aa, synthetic construct
  source 1..9: note = Seed: LVVVGARGV (KRAS G12R)
VVVNGHRGF

SEQ ID NO: 29771 - protein, 9 aa, synthetic construct
  source 1..9: note = Seed: LVVVGARGV (KRAS G12R)
VVVNGHRGI

SEQ ID NO: 29772 - protein, 9 aa, synthetic construct
  source 1..9: note = Seed: LVVVGARGV (KRAS G12R)
VVVNGHRGL

SEQ ID NO: 29773 - protein, 9 aa, synthetic construct
  source 1..9: note = Seed: LVVVGARGV (KRAS G12R)
VVVNGHRGV

SEQ ID NO: 29774 - protein, 9 aa, synthetic construct
  source 1..9: note = Seed: LVVVGARGV (KRAS G12R)
VVVNGIRGA

SEQ ID NO: 29775 - protein, 9 aa, synthetic construct
  source 1..9: note = Seed: LVVVGARGV (KRAS G12R)
VVVNGIRGF

SEQ ID NO: 29776 - protein, 9 aa, synthetic construct
  source 1..9: note = Seed: LVVVGARGV (KRAS G12R)
VVVNGIRGI

SEQ ID NO: 29777 - protein, 9 aa, synthetic construct
  source 1..9: note = Seed: LVVVGARGV (KRAS G12R)
VVVNGIRGL

SEQ ID NO: 29778 - protein, 9 aa, synthetic construct
  source 1..9: note = Seed: LVVVGARGV (KRAS G12R)
VVVNGIRGM

SEQ ID NO: 29779 - protein, 9 aa, synthetic construct
  source 1..9: note = Seed: LVVVGARGV (KRAS G12R)
VVVNGIRGN

SEQ ID NO: 29780 - protein, 9 aa, synthetic construct
  source 1..9: note = Seed: LVVVGARGV (KRAS G12R)
VVVNGIRGR

SEQ ID NO: 29781 - protein, 9 aa, synthetic construct
  source 1..9: note = Seed: LVVVGARGV (KRAS G12R)
VVVNGIRGV

SEQ ID NO: 29782 - protein, 9 aa, synthetic construct
  source 1..9: note = Seed: LVVVGARGV (KRAS G12R)
VVVNGIRGY

SEQ ID NO: 29783 - protein, 9 aa, synthetic construct
  source 1..9: note = Seed: LVVVGARGV (KRAS G12R)
VVVNGKRGL

SEQ ID NO: 29784 - protein, 9 aa, synthetic construct
  source 1..9: note = Seed: LVVVGARGV (KRAS G12R)
VVVNGKRGM

SEQ ID NO: 29785 - protein, 9 aa, synthetic construct
  source 1..9: note = Seed: LVVVGARGV (KRAS G12R)
VVVNGKRGR

SEQ ID NO: 29786 - protein, 9 aa, synthetic construct
  source 1..9: note = Seed: LVVVGARGV (KRAS G12R)
VVVNGLRGF

SEQ ID NO: 29787 - protein, 9 aa, synthetic construct
  source 1..9: note = Seed: LVVVGARGV (KRAS G12R)
VVVNGLRGI

SEQ ID NO: 29788 - protein, 9 aa, synthetic construct
  source 1..9: note = Seed: LVVVGARGV (KRAS G12R)
VVVNGLRGL

SEQ ID NO: 29789 - protein, 9 aa, synthetic construct
  source 1..9: note = Seed: LVVVGARGV (KRAS G12R)
VVVNGLRGM

SEQ ID NO: 29790 - protein, 9 aa, synthetic construct
  source 1..9: note = Seed: LVVVGARGV (KRAS G12R)
VVVNGLRGR

SEQ ID NO: 29791 - protein, 9 aa, synthetic construct
  source 1..9: note = Seed: LVVVGARGV (KRAS G12R)
VVVNGLRGV

SEQ ID NO: 29792 - protein, 9 aa, synthetic construct
  source 1..9: note = Seed: LVVVGARGV (KRAS G12R)
VVVNGLRGY

SEQ ID NO: 29793 - protein, 9 aa, synthetic construct
  source 1..9: note = Seed: LVVVGARGV (KRAS G12R)
VVVNGMRGF

SEQ ID NO: 29794 - protein, 9 aa, synthetic construct
  source 1..9: note = Seed: LVVVGARGV (KRAS G12R)
VVVNGMRGI

SEQ ID NO: 29795 - protein, 9 aa, synthetic construct
  source 1..9: note = Seed: LVVVGARGV (KRAS G12R)
VVVNGMRGL

SEQ ID NO: 29796 - protein, 9 aa, synthetic construct
  source 1..9: note = Seed: LVVVGARGV (KRAS G12R)
VVVNGMRGM

SEQ ID NO: 29797 - protein, 9 aa, synthetic construct
  source 1..9: note = Seed: LVVVGARGV (KRAS G12R)
VVVNGMRGR

SEQ ID NO: 29798 - protein, 9 aa, synthetic construct
  source 1..9: note = Seed: LVVVGARGV (KRAS G12R)
VVVNGMRGV

SEQ ID NO: 29799 - protein, 9 aa, synthetic construct
  source 1..9: note = Seed: LVVVGARGV (KRAS G12R)
VVVNGNRGA

SEQ ID NO: 29800 - protein, 9 aa, synthetic construct
  source 1..9: note = Seed: LVVVGARGV (KRAS G12R)
VVVNGNRGF

SEQ ID NO: 29801 - protein, 9 aa, synthetic construct
  source 1..9: note = Seed: LVVVGARGV (KRAS G12R)
VVVNGNRGI

SEQ ID NO: 29802 - protein, 9 aa, synthetic construct
  source 1..9: note = Seed: LVVVGARGV (KRAS G12R)
VVVNGNRGL

SEQ ID NO: 29803 - protein, 9 aa, synthetic construct
  source 1..9: note = Seed: LVVVGARGV (KRAS G12R)
VVVNGNRGM

SEQ ID NO: 29804 - protein, 9 aa, synthetic construct
  source 1..9: note = Seed: LVVVGARGV (KRAS G12R)
VVVNGNRGV

SEQ ID NO: 29805 - protein, 9 aa, synthetic construct
  source 1..9: note = Seed: LVVVGARGV (KRAS G12R)
VVVNGNRGW

SEQ ID NO: 29806 - protein, 9 aa, synthetic construct
  source 1..9: note = Seed: LVVVGARGV (KRAS G12R)
VVVNGNRGY

SEQ ID NO: 29807 - protein, 9 aa, synthetic construct
  source 1..9: note = Seed: LVVVGARGV (KRAS G12R)
VVVNGPRGF

SEQ ID NO: 29808 - protein, 9 aa, synthetic construct
  source 1..9: note = Seed: LVVVGARGV (KRAS G12R)
VVVNGPRGI

SEQ ID NO: 29809 - protein, 9 aa, synthetic construct
  source 1..9: note = Seed: LVVVGARGV (KRAS G12R)
VVVNGPRGL

SEQ ID NO: 29810 - protein, 9 aa, synthetic construct
  source 1..9: note = Seed: LVVVGARGV (KRAS G12R)
VVVNGPRGM

SEQ ID NO: 29811 - protein, 9 aa, synthetic construct
  source 1..9: note = Seed: LVVVGARGV (KRAS G12R)
VVVNGPRGV

SEQ ID NO: 29812 - protein, 9 aa, synthetic construct
  source 1..9: note = Seed: LVVVGARGV (KRAS G12R)
VVVNGPRGY

SEQ ID NO: 29813 - protein, 9 aa, synthetic construct
  source 1..9: note = Seed: LVVVGARGV (KRAS G12R)
VVVNGQRGI

SEQ ID NO: 29814 - protein, 9 aa, synthetic construct
  source 1..9: note = Seed: LVVVGARGV (KRAS G12R)
VVVNGRRGA

SEQ ID NO: 29815 - protein, 9 aa, synthetic construct
  source 1..9: note = Seed: LVVVGARGV (KRAS G12R)
VVVNGRRGF

SEQ ID NO: 29816 - protein, 9 aa, synthetic construct
  source 1..9: note = Seed: LVVVGARGV (KRAS G12R)
VVVNGRRGI

SEQ ID NO: 29817 - protein, 9 aa, synthetic construct
  source 1..9: note = Seed: LVVVGARGV (KRAS G12R)
VVVNGRRGK

SEQ ID NO: 29818 - protein, 9 aa, synthetic construct
  source 1..9: note = Seed: LVVVGARGV (KRAS G12R)
VVVNGRRGL

SEQ ID NO: 29819 - protein, 9 aa, synthetic construct
  source 1..9: note = Seed: LVVVGARGV (KRAS G12R)
VVVNGRRGM

SEQ ID NO: 29820 - protein, 9 aa, synthetic construct
  source 1..9: note = Seed: LVVVGARGV (KRAS G12R)
VVVNGRRGR

SEQ ID NO: 29821 - protein, 9 aa, synthetic construct
  source 1..9: note = Seed: LVVVGARGV (KRAS G12R)
VVVNGRRGV

SEQ ID NO: 29822 - protein, 9 aa, synthetic construct
  source 1..9: note = Seed: LVVVGARGV (KRAS G12R)
VVVNGRRGY

SEQ ID NO: 29823 - protein, 9 aa, synthetic construct
  source 1..9: note = Seed: LVVVGARGV (KRAS G12R)
VVVNGSRGA

SEQ ID NO: 29824 - protein, 9 aa, synthetic construct
  source 1..9: note = Seed: LVVVGARGV (KRAS G12R)
VVVNGSRGF

SEQ ID NO: 29825 - protein, 9 aa, synthetic construct
  source 1..9: note = Seed: LVVVGARGV (KRAS G12R)
VVVNGSRGI

SEQ ID NO: 29826 - protein, 9 aa, synthetic construct
  source 1..9: note = Seed: LVVVGARGV (KRAS G12R)
VVVNGSRGL

SEQ ID NO: 29827 - protein, 9 aa, synthetic construct
  source 1..9: note = Seed: LVVVGARGV (KRAS G12R)
VVVNGSRGM

SEQ ID NO: 29828 - protein, 9 aa, synthetic construct
  source 1..9: note = Seed: LVVVGARGV (KRAS G12R)
VVVNGSRGV

SEQ ID NO: 29829 - protein, 9 aa, synthetic construct
  source 1..9: note = Seed: LVVVGARGV (KRAS G12R)
VVVNGSRGW

SEQ ID NO: 29830 - protein, 9 aa, synthetic construct
  source 1..9: note = Seed: LVVVGARGV (KRAS G12R)
VVVNGSRGY

SEQ ID NO: 29831 - protein, 9 aa, synthetic construct
  source 1..9: note = Seed: LVVVGARGV (KRAS G12R)
VVVNGTRGF

SEQ ID NO: 29832 - protein, 9 aa, synthetic construct
  source 1..9: note = Seed: LVVVGARGV (KRAS G12R)
VVVNGTRGI

SEQ ID NO: 29833 - protein, 9 aa, synthetic construct
  source 1..9: note = Seed: LVVVGARGV (KRAS G12R)
VVVNGTRGL

SEQ ID NO: 29834 - protein, 9 aa, synthetic construct
  source 1..9: note = Seed: LVVVGARGV (KRAS G12R)
VVVNGTRGM

SEQ ID NO: 29835 - protein, 9 aa, synthetic construct
  source 1..9: note = Seed: LVVVGARGV (KRAS G12R)
VVVNGTRGV

SEQ ID NO: 29836 - protein, 9 aa, synthetic construct
  source 1..9: note = Seed: LVVVGARGV (KRAS G12R)
VVVNGTRGY

SEQ ID NO: 29837 - protein, 9 aa, synthetic construct
  source 1..9: note = Seed: LVVVGARGV (KRAS G12R)
VVVNGVRGA

SEQ ID NO: 29838 - protein, 9 aa, synthetic construct
  source 1..9: note = Seed: LVVVGARGV (KRAS G12R)
VVVNGVRGF

SEQ ID NO: 29839 - protein, 9 aa, synthetic construct
  source 1..9: note = Seed: LVVVGARGV (KRAS G12R)
VVVNGVRGI

SEQ ID NO: 29840 - protein, 9 aa, synthetic construct
  source 1..9: note = Seed: LVVVGARGV (KRAS G12R)
VVVNGVRGL

SEQ ID NO: 29841 - protein, 9 aa, synthetic construct
  source 1..9: note = Seed: LVVVGARGV (KRAS G12R)
VVVNGVRGM

SEQ ID NO: 29842 - protein, 9 aa, synthetic construct
  source 1..9: note = Seed: LVVVGARGV (KRAS G12R)
VVVNGVRGV

SEQ ID NO: 29843 - protein, 9 aa, synthetic construct
  source 1..9: note = Seed: LVVVGARGV (KRAS G12R)
VVVNGVRGY

SEQ ID NO: 29844 - protein, 9 aa, synthetic construct
  source 1..9: note = Seed: LVVVGARGV (KRAS G12R)
VVVNGYRGI

SEQ ID NO: 29845 - protein, 9 aa, synthetic construct
  source 1..9: note = Seed: LVVVGARGV (KRAS G12R)
VVVQGARGA

SEQ ID NO: 29846 - protein, 9 aa, synthetic construct
  source 1..9: note = Seed: LVVVGARGV (KRAS G12R)
VVVQGARGF

SEQ ID NO: 29847 - protein, 9 aa, synthetic construct
  source 1..9: note = Seed: LVVVGARGV (KRAS G12R)
VVVQGARGI

SEQ ID NO: 29848 - protein, 9 aa, synthetic construct
  source 1..9: note = Seed: LVVVGARGV (KRAS G12R)
VVVQGARGL

SEQ ID NO: 29849 - protein, 9 aa, synthetic construct
  source 1..9: note = Seed: LVVVGARGV (KRAS G12R)
VVVQGARGM

SEQ ID NO: 29850 - protein, 9 aa, synthetic construct
  source 1..9: note = Seed: LVVVGARGV (KRAS G12R)
VVVQGARGR

SEQ ID NO: 29851 - protein, 9 aa, synthetic construct
  source 1..9: note = Seed: LVVVGARGV (KRAS G12R)
VVVQGARGT

SEQ ID NO: 29852 - protein, 9 aa, synthetic construct
  source 1..9: note = Seed: LVVVGARGV (KRAS G12R)
VVVQGARGV

SEQ ID NO: 29853 - protein, 9 aa, synthetic construct
  source 1..9: note = Seed: LVVVGARGV (KRAS G12R)
VVVQGARGY

SEQ ID NO: 29854 - protein, 9 aa, synthetic construct
  source 1..9: note = Seed: LVVVGARGV (KRAS G12R)
VVVQGGRGA

SEQ ID NO: 29855 - protein, 9 aa, synthetic construct
  source 1..9: note = Seed: LVVVGARGV (KRAS G12R)
VVVQGGRGI

SEQ ID NO: 29856 - protein, 9 aa, synthetic construct
  source 1..9: note = Seed: LVVVGARGV (KRAS G12R)
VVVQGGRGL

SEQ ID NO: 29857 - protein, 9 aa, synthetic construct
  source 1..9: note = Seed: LVVVGARGV (KRAS G12R)
VVVQGGRGM

SEQ ID NO: 29858 - protein, 9 aa, synthetic construct
  source 1..9: note = Seed: LVVVGARGV (KRAS G12R)
VVVQGGRGV

SEQ ID NO: 29859 - protein, 9 aa, synthetic construct
  source 1..9: note = Seed: LVVVGARGV (KRAS G12R)
VVVQGHRGF

SEQ ID NO: 29860 - protein, 9 aa, synthetic construct
  source 1..9: note = Seed: LVVVGARGV (KRAS G12R)
VVVQGHRGI

SEQ ID NO: 29861 - protein, 9 aa, synthetic construct
  source 1..9: note = Seed: LVVVGARGV (KRAS G12R)
VVVQGHRGL

SEQ ID NO: 29862 - protein, 9 aa, synthetic construct
  source 1..9: note = Seed: LVVVGARGV (KRAS G12R)
VVVQGHRGM

SEQ ID NO: 29863 - protein, 9 aa, synthetic construct
  source 1..9: note = Seed: LVVVGARGV (KRAS G12R)
VVVQGHRGR

SEQ ID NO: 29864 - protein, 9 aa, synthetic construct
  source 1..9: note = Seed: LVVVGARGV (KRAS G12R)
VVVQGHRGV

SEQ ID NO: 29865 - protein, 9 aa, synthetic construct
  source 1..9: note = Seed: LVVVGARGV (KRAS G12R)
VVVQGIRGF

SEQ ID NO: 29866 - protein, 9 aa, synthetic construct
  source 1..9: note = Seed: LVVVGARGV (KRAS G12R)
VVVQGIRGI

SEQ ID NO: 29867 - protein, 9 aa, synthetic construct
  source 1..9: note = Seed: LVVVGARGV (KRAS G12R)
VVVQGIRGL

SEQ ID NO: 29868 - protein, 9 aa, synthetic construct
  source 1..9: note = Seed: LVVVGARGV (KRAS G12R)
VVVQGIRGR

SEQ ID NO: 29869 - protein, 9 aa, synthetic construct
  source 1..9: note = Seed: LVVVGARGV (KRAS G12R)
VVVQGIRGY

SEQ ID NO: 29870 - protein, 9 aa, synthetic construct
  source 1..9: note = Seed: LVVVGARGV (KRAS G12R)
VVVQGKRGA

SEQ ID NO: 29871 - protein, 9 aa, synthetic construct
  source 1..9: note = Seed: LVVVGARGV (KRAS G12R)
VVVQGKRGF

SEQ ID NO: 29872 - protein, 9 aa, synthetic construct
  source 1..9: note = Seed: LVVVGARGV (KRAS G12R)
VVVQGKRGH

SEQ ID NO: 29873 - protein, 9 aa, synthetic construct
  source 1..9: note = Seed: LVVVGARGV (KRAS G12R)
VVVQGKRGI

SEQ ID NO: 29874 - protein, 9 aa, synthetic construct
  source 1..9: note = Seed: LVVVGARGV (KRAS G12R)
VVVQGKRGK

SEQ ID NO: 29875 - protein, 9 aa, synthetic construct
  source 1..9: note = Seed: LVVVGARGV (KRAS G12R)
VVVQGKRGL

SEQ ID NO: 29876 - protein, 9 aa, synthetic construct
  source 1..9: note = Seed: LVVVGARGV (KRAS G12R)
VVVQGKRGM

SEQ ID NO: 29877 - protein, 9 aa, synthetic construct
  source 1..9: note = Seed: LVVVGARGV (KRAS G12R)
VVVQGKRGR

SEQ ID NO: 29878 - protein, 9 aa, synthetic construct
  source 1..9: note = Seed: LVVVGARGV (KRAS G12R)
VVVQGKRGS

SEQ ID NO: 29879 - protein, 9 aa, synthetic construct
  source 1..9: note = Seed: LVVVGARGV (KRAS G12R)
VVVQGKRGV

SEQ ID NO: 29880 - protein, 9 aa, synthetic construct
  source 1..9: note = Seed: LVVVGARGV (KRAS G12R)
VVVQGKRGY

SEQ ID NO: 29881 - protein, 9 aa, synthetic construct
  source 1..9: note = Seed: LVVVGARGV (KRAS G12R)
VVVQGLRGR

SEQ ID NO: 29882 - protein, 9 aa, synthetic construct
  source 1..9: note = Seed: LVVVGARGV (KRAS G12R)
VVVQGMRGL

SEQ ID NO: 29883 - protein, 9 aa, synthetic construct
  source 1..9: note = Seed: LVVVGARGV (KRAS G12R)
VVVQGMRGR

SEQ ID NO: 29884 - protein, 9 aa, synthetic construct
  source 1..9: note = Seed: LVVVGARGV (KRAS G12R)
VVVQGNRGF

SEQ ID NO: 29885 - protein, 9 aa, synthetic construct
  source 1..9: note = Seed: LVVVGARGV (KRAS G12R)
VVVQGNRGI

SEQ ID NO: 29886 - protein, 9 aa, synthetic construct
  source 1..9: note = Seed: LVVVGARGV (KRAS G12R)
VVVQGNRGL

SEQ ID NO: 29887 - protein, 9 aa, synthetic construct
  source 1..9: note = Seed: LVVVGARGV (KRAS G12R)
VVVQGNRGM

SEQ ID NO: 29888 - protein, 9 aa, synthetic construct
  source 1..9: note = Seed: LVVVGARGV (KRAS G12R)
VVVQGNRGV

SEQ ID NO: 29889 - protein, 9 aa, synthetic construct
  source 1..9: note = Seed: LVVVGARGV (KRAS G12R)
VVVQGNRGY

SEQ ID NO: 29890 - protein, 9 aa, synthetic construct
  source 1..9: note = Seed: LVVVGARGV (KRAS G12R)
VVVQGPRGI

SEQ ID NO: 29891 - protein, 9 aa, synthetic construct
  source 1..9: note = Seed: LVVVGARGV (KRAS G12R)
VVVQGPRGL

SEQ ID NO: 29892 - protein, 9 aa, synthetic construct
  source 1..9: note = Seed: LVVVGARGV (KRAS G12R)
VVVQGPRGV

SEQ ID NO: 29893 - protein, 9 aa, synthetic construct
  source 1..9: note = Seed: LVVVGARGV (KRAS G12R)
VVVQGRRGA

SEQ ID NO: 29894 - protein, 9 aa, synthetic construct
  source 1..9: note = Seed: LVVVGARGV (KRAS G12R)
VVVQGRRGF

SEQ ID NO: 29895 - protein, 9 aa, synthetic construct
  source 1..9: note = Seed: LVVVGARGV (KRAS G12R)
VVVQGRRGG

SEQ ID NO: 29896 - protein, 9 aa, synthetic construct
  source 1..9: note = Seed: LVVVGARGV (KRAS G12R)
VVVQGRRGH

SEQ ID NO: 29897 - protein, 9 aa, synthetic construct
  source 1..9: note = Seed: LVVVGARGV (KRAS G12R)
VVVQGRRGI

SEQ ID NO: 29898 - protein, 9 aa, synthetic construct
  source 1..9: note = Seed: LVVVGARGV (KRAS G12R)
VVVQGRRGK

SEQ ID NO: 29899 - protein, 9 aa, synthetic construct
  source 1..9: note = Seed: LVVVGARGV (KRAS G12R)
VVVQGRRGL

SEQ ID NO: 29900 - protein, 9 aa, synthetic construct
  source 1..9: note = Seed: LVVVGARGV (KRAS G12R)
VVVQGRRGM

SEQ ID NO: 29901 - protein, 9 aa, synthetic construct
  source 1..9: note = Seed: LVVVGARGV (KRAS G12R)
VVVQGRRGQ

SEQ ID NO: 29902 - protein, 9 aa, synthetic construct
  source 1..9: note = Seed: LVVVGARGV (KRAS G12R)
VVVQGRRGR

SEQ ID NO: 29903 - protein, 9 aa, synthetic construct
  source 1..9: note = Seed: LVVVGARGV (KRAS G12R)
VVVQGRRGS

SEQ ID NO: 29904 - protein, 9 aa, synthetic construct
  source 1..9: note = Seed: LVVVGARGV (KRAS G12R)
VVVQGRRGT

SEQ ID NO: 29905 - protein, 9 aa, synthetic construct
  source 1..9: note = Seed: LVVVGARGV (KRAS G12R)
VVVQGRRGV

SEQ ID NO: 29906 - protein, 9 aa, synthetic construct
  source 1..9: note = Seed: LVVVGARGV (KRAS G12R)
VVVQGRRGW

SEQ ID NO: 29907 - protein, 9 aa, synthetic construct
  source 1..9: note = Seed: LVVVGARGV (KRAS G12R)
VVVQGRRGY

SEQ ID NO: 29908 - protein, 9 aa, synthetic construct
  source 1..9: note = Seed: LVVVGARGV (KRAS G12R)
VVVQGSRGA

SEQ ID NO: 29909 - protein, 9 aa, synthetic construct
  source 1..9: note = Seed: LVVVGARGV (KRAS G12R)
VVVQGSRGF

SEQ ID NO: 29910 - protein, 9 aa, synthetic construct
  source 1..9: note = Seed: LVVVGARGV (KRAS G12R)
VVVQGSRGI

SEQ ID NO: 29911 - protein, 9 aa, synthetic construct
  source 1..9: note = Seed: LVVVGARGV (KRAS G12R)
VVVQGSRGL

SEQ ID NO: 29912 - protein, 9 aa, synthetic construct
  source 1..9: note = Seed: LVVVGARGV (KRAS G12R)
VVVQGSRGM

SEQ ID NO: 29913 - protein, 9 aa, synthetic construct
  source 1..9: note = Seed: LVVVGARGV (KRAS G12R)
VVVQGSRGR

SEQ ID NO: 29914 - protein, 9 aa, synthetic construct
  source 1..9: note = Seed: LVVVGARGV (KRAS G12R)
VVVQGSRGV

SEQ ID NO: 29915 - protein, 9 aa, synthetic construct
  source 1..9: note = Seed: LVVVGARGV (KRAS G12R)
VVVQGSRGY

SEQ ID NO: 29916 - protein, 9 aa, synthetic construct
  source 1..9: note = Seed: LVVVGARGV (KRAS G12R)
VVVQGTRGF

SEQ ID NO: 29917 - protein, 9 aa, synthetic construct
  source 1..9: note = Seed: LVVVGARGV (KRAS G12R)
VVVQGTRGI

SEQ ID NO: 29918 - protein, 9 aa, synthetic construct
  source 1..9: note = Seed: LVVVGARGV (KRAS G12R)
VVVQGTRGL

SEQ ID NO: 29919 - protein, 9 aa, synthetic construct
  source 1..9: note = Seed: LVVVGARGV (KRAS G12R)
VVVQGTRGR

SEQ ID NO: 29920 - protein, 9 aa, synthetic construct
  source 1..9: note = Seed: LVVVGARGV (KRAS G12R)
VVVQGVRGF

SEQ ID NO: 29921 - protein, 9 aa, synthetic construct
  source 1..9: note = Seed: LVVVGARGV (KRAS G12R)
VVVQGVRGI

SEQ ID NO: 29922 - protein, 9 aa, synthetic construct
  source 1..9: note = Seed: LVVVGARGV (KRAS G12R)
VVVQGVRGL

SEQ ID NO: 29923 - protein, 9 aa, synthetic construct
  source 1..9: note = Seed: LVVVGARGV (KRAS G12R)
VVVQGVRGR

SEQ ID NO: 29924 - protein, 9 aa, synthetic construct
  source 1..9: note = Seed: LVVVGARGV (KRAS G12R)
VVVRGARGA

SEQ ID NO: 29925 - protein, 9 aa, synthetic construct
  source 1..9: note = Seed: LVVVGARGV (KRAS G12R)
VVVRGARGF

SEQ ID NO: 29926 - protein, 9 aa, synthetic construct
  source 1..9: note = Seed: LVVVGARGV (KRAS G12R)
VVVRGARGI

SEQ ID NO: 29927 - protein, 9 aa, synthetic construct
  source 1..9: note = Seed: LVVVGARGV (KRAS G12R)
VVVRGARGL

SEQ ID NO: 29928 - protein, 9 aa, synthetic construct
  source 1..9: note = Seed: LVVVGARGV (KRAS G12R)
VVVRGARGM

SEQ ID NO: 29929 - protein, 9 aa, synthetic construct
  source 1..9: note = Seed: LVVVGARGV (KRAS G12R)
VVVRGARGR

SEQ ID NO: 29930 - protein, 9 aa, synthetic construct
  source 1..9: note = Seed: LVVVGARGV (KRAS G12R)
VVVRGARGV

SEQ ID NO: 29931 - protein, 9 aa, synthetic construct
  source 1..9: note = Seed: LVVVGARGV (KRAS G12R)
VVVRGARGY

SEQ ID NO: 29932 - protein, 9 aa, synthetic construct
  source 1..9: note = Seed: LVVVGARGV (KRAS G12R)
VVVRGCRGR

SEQ ID NO: 29933 - protein, 9 aa, synthetic construct
  source 1..9: note = Seed: LVVVGARGV (KRAS G12R)
VVVRGGRGR

SEQ ID NO: 29934 - protein, 9 aa, synthetic construct
  source 1..9: note = Seed: LVVVGARGV (KRAS G12R)
VVVRGHRGA

SEQ ID NO: 29935 - protein, 9 aa, synthetic construct
  source 1..9: note = Seed: LVVVGARGV (KRAS G12R)
VVVRGHRGF

SEQ ID NO: 29936 - protein, 9 aa, synthetic construct
  source 1..9: note = Seed: LVVVGARGV (KRAS G12R)
VVVRGHRGH

SEQ ID NO: 29937 - protein, 9 aa, synthetic construct
  source 1..9: note = Seed: LVVVGARGV (KRAS G12R)
VVVRGHRGI

SEQ ID NO: 29938 - protein, 9 aa, synthetic construct
  source 1..9: note = Seed: LVVVGARGV (KRAS G12R)
VVVRGHRGL

SEQ ID NO: 29939 - protein, 9 aa, synthetic construct
  source 1..9: note = Seed: LVVVGARGV (KRAS G12R)
VVVRGHRGM

SEQ ID NO: 29940 - protein, 9 aa, synthetic construct
  source 1..9: note = Seed: LVVVGARGV (KRAS G12R)
VVVRGHRGQ

SEQ ID NO: 29941 - protein, 9 aa, synthetic construct
  source 1..9: note = Seed: LVVVGARGV (KRAS G12R)
VVVRGHRGR

SEQ ID NO: 29942 - protein, 9 aa, synthetic construct
  source 1..9: note = Seed: LVVVGARGV (KRAS G12R)
VVVRGHRGS

SEQ ID NO: 29943 - protein, 9 aa, synthetic construct
  source 1..9: note = Seed: LVVVGARGV (KRAS G12R)
VVVRGHRGV

SEQ ID NO: 29944 - protein, 9 aa, synthetic construct
  source 1..9: note = Seed: LVVVGARGV (KRAS G12R)
VVVRGHRGY

SEQ ID NO: 29945 - protein, 9 aa, synthetic construct
  source 1..9: note = Seed: LVVVGARGV (KRAS G12R)
VVVRGIRGA

SEQ ID NO: 29946 - protein, 9 aa, synthetic construct
  source 1..9: note = Seed: LVVVGARGV (KRAS G12R)
VVVRGIRGF

SEQ ID NO: 29947 - protein, 9 aa, synthetic construct
  source 1..9: note = Seed: LVVVGARGV (KRAS G12R)
VVVRGIRGI

SEQ ID NO: 29948 - protein, 9 aa, synthetic construct
  source 1..9: note = Seed: LVVVGARGV (KRAS G12R)
VVVRGIRGK

SEQ ID NO: 29949 - protein, 9 aa, synthetic construct
  source 1..9: note = Seed: LVVVGARGV (KRAS G12R)
VVVRGIRGL

SEQ ID NO: 29950 - protein, 9 aa, synthetic construct
  source 1..9: note = Seed: LVVVGARGV (KRAS G12R)
VVVRGIRGM

SEQ ID NO: 29951 - protein, 9 aa, synthetic construct
  source 1..9: note = Seed: LVVVGARGV (KRAS G12R)
VVVRGIRGQ

SEQ ID NO: 29952 - protein, 9 aa, synthetic construct
  source 1..9: note = Seed: LVVVGARGV (KRAS G12R)
VVVRGIRGR

SEQ ID NO: 29953 - protein, 9 aa, synthetic construct
  source 1..9: note = Seed: LVVVGARGV (KRAS G12R)
VVVRGIRGS

SEQ ID NO: 29954 - protein, 9 aa, synthetic construct
  source 1..9: note = Seed: LVVVGARGV (KRAS G12R)
VVVRGIRGV

SEQ ID NO: 29955 - protein, 9 aa, synthetic construct
  source 1..9: note = Seed: LVVVGARGV (KRAS G12R)
VVVRGIRGY

SEQ ID NO: 29956 - protein, 9 aa, synthetic construct
  source 1..9: note = Seed: LVVVGARGV (KRAS G12R)
VVVRGKRGA

SEQ ID NO: 29957 - protein, 9 aa, synthetic construct
  source 1..9: note = Seed: LVVVGARGV (KRAS G12R)
VVVRGKRGF

SEQ ID NO: 29958 - protein, 9 aa, synthetic construct
  source 1..9: note = Seed: LVVVGARGV (KRAS G12R)
VVVRGKRGG

SEQ ID NO: 29959 - protein, 9 aa, synthetic construct
  source 1..9: note = Seed: LVVVGARGV (KRAS G12R)
VVVRGKRGH

SEQ ID NO: 29960 - protein, 9 aa, synthetic construct
  source 1..9: note = Seed: LVVVGARGV (KRAS G12R)
VVVRGKRGI

SEQ ID NO: 29961 - protein, 9 aa, synthetic construct
  source 1..9: note = Seed: LVVVGARGV (KRAS G12R)
VVVRGKRGK

SEQ ID NO: 29962 - protein, 9 aa, synthetic construct
  source 1..9: note = Seed: LVVVGARGV (KRAS G12R)
VVVRGKRGL

SEQ ID NO: 29963 - protein, 9 aa, synthetic construct
  source 1..9: note = Seed: LVVVGARGV (KRAS G12R)
VVVRGKRGM

SEQ ID NO: 29964 - protein, 9 aa, synthetic construct
  source 1..9: note = Seed: LVVVGARGV (KRAS G12R)
VVVRGKRGN

SEQ ID NO: 29965 - protein, 9 aa, synthetic construct
  source 1..9: note = Seed: LVVVGARGV (KRAS G12R)
VVVRGKRGQ

SEQ ID NO: 29966 - protein, 9 aa, synthetic construct
  source 1..9: note = Seed: LVVVGARGV (KRAS G12R)
VVVRGKRGR

SEQ ID NO: 29967 - protein, 9 aa, synthetic construct
  source 1..9: note = Seed: LVVVGARGV (KRAS G12R)
VVVRGKRGS

SEQ ID NO: 29968 - protein, 9 aa, synthetic construct
  source 1..9: note = Seed: LVVVGARGV (KRAS G12R)
VVVRGKRGT

SEQ ID NO: 29969 - protein, 9 aa, synthetic construct
  source 1..9: note = Seed: LVVVGARGV (KRAS G12R)
VVVRGKRGV

SEQ ID NO: 29970 - protein, 9 aa, synthetic construct
  source 1..9: note = Seed: LVVVGARGV (KRAS G12R)
VVVRGKRGW

SEQ ID NO: 29971 - protein, 9 aa, synthetic construct
  source 1..9: note = Seed: LVVVGARGV (KRAS G12R)
VVVRGKRGY

SEQ ID NO: 29972 - protein, 9 aa, synthetic construct
  source 1..9: note = Seed: LVVVGARGV (KRAS G12R)
VVVRGLRGA

SEQ ID NO: 29973 - protein, 9 aa, synthetic construct
  source 1..9: note = Seed: LVVVGARGV (KRAS G12R)
VVVRGLRGF

SEQ ID NO: 29974 - protein, 9 aa, synthetic construct
  source 1..9: note = Seed: LVVVGARGV (KRAS G12R)
VVVRGLRGG

SEQ ID NO: 29975 - protein, 9 aa, synthetic construct
  source 1..9: note = Seed: LVVVGARGV (KRAS G12R)
VVVRGLRGI

SEQ ID NO: 29976 - protein, 9 aa, synthetic construct
  source 1..9: note = Seed: LVVVGARGV (KRAS G12R)
VVVRGLRGL

SEQ ID NO: 29977 - protein, 9 aa, synthetic construct
  source 1..9: note = Seed: LVVVGARGV (KRAS G12R)
VVVRGLRGM

SEQ ID NO: 29978 - protein, 9 aa, synthetic construct
  source 1..9: note = Seed: LVVVGARGV (KRAS G12R)
VVVRGLRGR

SEQ ID NO: 29979 - protein, 9 aa, synthetic construct
  source 1..9: note = Seed: LVVVGARGV (KRAS G12R)
VVVRGLRGV

SEQ ID NO: 29980 - protein, 9 aa, synthetic construct
  source 1..9: note = Seed: LVVVGARGV (KRAS G12R)
VVVRGLRGY

SEQ ID NO: 29981 - protein, 9 aa, synthetic construct
  source 1..9: note = Seed: LVVVGARGV (KRAS G12R)
VVVRGMRGA

SEQ ID NO: 29982 - protein, 9 aa, synthetic construct
  source 1..9: note = Seed: LVVVGARGV (KRAS G12R)
VVVRGMRGF

SEQ ID NO: 29983 - protein, 9 aa, synthetic construct
  source 1..9: note = Seed: LVVVGARGV (KRAS G12R)
VVVRGMRGI

SEQ ID NO: 29984 - protein, 9 aa, synthetic construct
  source 1..9: note = Seed: LVVVGARGV (KRAS G12R)
VVVRGMRGM

SEQ ID NO: 29985 - protein, 9 aa, synthetic construct
  source 1..9: note = Seed: LVVVGARGV (KRAS G12R)
VVVRGMRGR

SEQ ID NO: 29986 - protein, 9 aa, synthetic construct
  source 1..9: note = Seed: LVVVGARGV (KRAS G12R)
VVVRGMRGV

SEQ ID NO: 29987 - protein, 9 aa, synthetic construct
  source 1..9: note = Seed: LVVVGARGV (KRAS G12R)
VVVRGMRGY

SEQ ID NO: 29988 - protein, 9 aa, synthetic construct
  source 1..9: note = Seed: LVVVGARGV (KRAS G12R)
VVVRGNRGF

SEQ ID NO: 29989 - protein, 9 aa, synthetic construct
  source 1..9: note = Seed: LVVVGARGV (KRAS G12R)
VVVRGNRGI

SEQ ID NO: 29990 - protein, 9 aa, synthetic construct
  source 1..9: note = Seed: LVVVGARGV (KRAS G12R)
VVVRGNRGK

SEQ ID NO: 29991 - protein, 9 aa, synthetic construct
  source 1..9: note = Seed: LVVVGARGV (KRAS G12R)
VVVRGNRGL

SEQ ID NO: 29992 - protein, 9 aa, synthetic construct
  source 1..9: note = Seed: LVVVGARGV (KRAS G12R)
VVVRGNRGM

SEQ ID NO: 29993 - protein, 9 aa, synthetic construct
  source 1..9: note = Seed: LVVVGARGV (KRAS G12R)
VVVRGNRGR

SEQ ID NO: 29994 - protein, 9 aa, synthetic construct
  source 1..9: note = Seed: LVVVGARGV (KRAS G12R)
VVVRGNRGV

SEQ ID NO: 29995 - protein, 9 aa, synthetic construct
  source 1..9: note = Seed: LVVVGARGV (KRAS G12R)
VVVRGNRGY

SEQ ID NO: 29996 - protein, 9 aa, synthetic construct
  source 1..9: note = Seed: LVVVGARGV (KRAS G12R)
VVVRGPRGR

SEQ ID NO: 29997 - protein, 9 aa, synthetic construct
  source 1..9: note = Seed: LVVVGARGV (KRAS G12R)
VVVRGQRGF

SEQ ID NO: 29998 - protein, 9 aa, synthetic construct
  source 1..9: note = Seed: LVVVGARGV (KRAS G12R)
VVVRGQRGI

SEQ ID NO: 29999 - protein, 9 aa, synthetic construct
  source 1..9: note = Seed: LVVVGARGV (KRAS G12R)
VVVRGQRGL

SEQ ID NO: 30000 - protein, 9 aa, synthetic construct
  source 1..9: note = Seed: LVVVGARGV (KRAS G12R)
VVVRGQRGM

SEQ ID NO: 30001 - protein, 9 aa, synthetic construct
  source 1..9: note = Seed: LVVVGARGV (KRAS G12R)
VVVRGQRGR

SEQ ID NO: 30002 - protein, 9 aa, synthetic construct
  source 1..9: note = Seed: LVVVGARGV (KRAS G12R)
VVVRGQRGV

SEQ ID NO: 30003 - protein, 9 aa, synthetic construct
  source 1..9: note = Seed: LVVVGARGV (KRAS G12R)
VVVRGQRGY

SEQ ID NO: 30004 - protein, 9 aa, synthetic construct
  source 1..9: note = Seed: LVVVGARGV (KRAS G12R)
VVVRGRRGA

SEQ ID NO: 30005 - protein, 9 aa, synthetic construct
  source 1..9: note = Seed: LVVVGARGV (KRAS G12R)
VVVRGRRGC

SEQ ID NO: 30006 - protein, 9 aa, synthetic construct
  source 1..9: note = Seed: LVVVGARGV (KRAS G12R)
VVVRGRRGE

SEQ ID NO: 30007 - protein, 9 aa, synthetic construct
  source 1..9: note = Seed: LVVVGARGV (KRAS G12R)
VVVRGRRGF

SEQ ID NO: 30008 - protein, 9 aa, synthetic construct
  source 1..9: note = Seed: LVVVGARGV (KRAS G12R)
VVVRGRRGG

SEQ ID NO: 30009 - protein, 9 aa, synthetic construct
  source 1..9: note = Seed: LVVVGARGV (KRAS G12R)
VVVRGRRGH

SEQ ID NO: 30010 - protein, 9 aa, synthetic construct
  source 1..9: note = Seed: LVVVGARGV (KRAS G12R)
VVVRGRRGI

SEQ ID NO: 30011 - protein, 9 aa, synthetic construct
  source 1..9: note = Seed: LVVVGARGV (KRAS G12R)
VVVRGRRGK

SEQ ID NO: 30012 - protein, 9 aa, synthetic construct
  source 1..9: note = Seed: LVVVGARGV (KRAS G12R)
VVVRGRRGL

SEQ ID NO: 30013 - protein, 9 aa, synthetic construct
  source 1..9: note = Seed: LVVVGARGV (KRAS G12R)
VVVRGRRGM

SEQ ID NO: 30014 - protein, 9 aa, synthetic construct
  source 1..9: note = Seed: LVVVGARGV (KRAS G12R)
VVVRGRRGN

SEQ ID NO: 30015 - protein, 9 aa, synthetic construct
  source 1..9: note = Seed: LVVVGARGV (KRAS G12R)
VVVRGRRGP

SEQ ID NO: 30016 - protein, 9 aa, synthetic construct
  source 1..9: note = Seed: LVVVGARGV (KRAS G12R)
VVVRGRRGQ

SEQ ID NO: 30017 - protein, 9 aa, synthetic construct
  source 1..9: note = Seed: LVVVGARGV (KRAS G12R)
VVVRGRRGR

SEQ ID NO: 30018 - protein, 9 aa, synthetic construct
  source 1..9: note = Seed: LVVVGARGV (KRAS G12R)
VVVRGRRGS

SEQ ID NO: 30019 - protein, 9 aa, synthetic construct
  source 1..9: note = Seed: LVVVGARGV (KRAS G12R)
VVVRGRRGT

SEQ ID NO: 30020 - protein, 9 aa, synthetic construct
  source 1..9: note = Seed: LVVVGARGV (KRAS G12R)
VVVRGRRGV

SEQ ID NO: 30021 - protein, 9 aa, synthetic construct
  source 1..9: note = Seed: LVVVGARGV (KRAS G12R)
VVVRGRRGW

SEQ ID NO: 30022 - protein, 9 aa, synthetic construct
  source 1..9: note = Seed: LVVVGARGV (KRAS G12R)
VVVRGRRGY

SEQ ID NO: 30023 - protein, 9 aa, synthetic construct
  source 1..9: note = Seed: LVVVGARGV (KRAS G12R)
VVVRGSRGF

SEQ ID NO: 30024 - protein, 9 aa, synthetic construct
  source 1..9: note = Seed: LVVVGARGV (KRAS G12R)
VVVRGSRGI

SEQ ID NO: 30025 - protein, 9 aa, synthetic construct
  source 1..9: note = Seed: LVVVGARGV (KRAS G12R)
VVVRGSRGK

SEQ ID NO: 30026 - protein, 9 aa, synthetic construct
  source 1..9: note = Seed: LVVVGARGV (KRAS G12R)
VVVRGSRGL

SEQ ID NO: 30027 - protein, 9 aa, synthetic construct
  source 1..9: note = Seed: LVVVGARGV (KRAS G12R)
VVVRGSRGM

SEQ ID NO: 30028 - protein, 9 aa, synthetic construct
  source 1..9: note = Seed: LVVVGARGV (KRAS G12R)
VVVRGSRGR

SEQ ID NO: 30029 - protein, 9 aa, synthetic construct
  source 1..9: note = Seed: LVVVGARGV (KRAS G12R)
VVVRGSRGV

SEQ ID NO: 30030 - protein, 9 aa, synthetic construct
  source 1..9: note = Seed: LVVVGARGV (KRAS G12R)
VVVRGSRGY

SEQ ID NO: 30031 - protein, 9 aa, synthetic construct
  source 1..9: note = Seed: LVVVGARGV (KRAS G12R)
VVVRGTRGF

SEQ ID NO: 30032 - protein, 9 aa, synthetic construct
  source 1..9: note = Seed: LVVVGARGV (KRAS G12R)
VVVRGTRGI

SEQ ID NO: 30033 - protein, 9 aa, synthetic construct
  source 1..9: note = Seed: LVVVGARGV (KRAS G12R)
VVVRGTRGK

SEQ ID NO: 30034 - protein, 9 aa, synthetic construct
  source 1..9: note = Seed: LVVVGARGV (KRAS G12R)
VVVRGTRGL

SEQ ID NO: 30035 - protein, 9 aa, synthetic construct
  source 1..9: note = Seed: LVVVGARGV (KRAS G12R)
VVVRGTRGM

SEQ ID NO: 30036 - protein, 9 aa, synthetic construct
  source 1..9: note = Seed: LVVVGARGV (KRAS G12R)
VVVRGTRGR

SEQ ID NO: 30037 - protein, 9 aa, synthetic construct
  source 1..9: note = Seed: LVVVGARGV (KRAS G12R)
VVVRGTRGV

SEQ ID NO: 30038 - protein, 9 aa, synthetic construct
  source 1..9: note = Seed: LVVVGARGV (KRAS G12R)
VVVRGTRGY

SEQ ID NO: 30039 - protein, 9 aa, synthetic construct
  source 1..9: note = Seed: LVVVGARGV (KRAS G12R)
VVVRGVRGA

SEQ ID NO: 30040 - protein, 9 aa, synthetic construct
  source 1..9: note = Seed: LVVVGARGV (KRAS G12R)
VVVRGVRGF

SEQ ID NO: 30041 - protein, 9 aa, synthetic construct
  source 1..9: note = Seed: LVVVGARGV (KRAS G12R)
VVVRGVRGI

SEQ ID NO: 30042 - protein, 9 aa, synthetic construct
  source 1..9: note = Seed: LVVVGARGV (KRAS G12R)
VVVRGVRGK

SEQ ID NO: 30043 - protein, 9 aa, synthetic construct
  source 1..9: note = Seed: LVVVGARGV (KRAS G12R)
VVVRGVRGL

SEQ ID NO: 30044 - protein, 9 aa, synthetic construct
  source 1..9: note = Seed: LVVVGARGV (KRAS G12R)
VVVRGVRGM

SEQ ID NO: 30045 - protein, 9 aa, synthetic construct
  source 1..9: note = Seed: LVVVGARGV (KRAS G12R)
VVVRGVRGQ

SEQ ID NO: 30046 - protein, 9 aa, synthetic construct
  source 1..9: note = Seed: LVVVGARGV (KRAS G12R)
VVVRGVRGR

SEQ ID NO: 30047 - protein, 9 aa, synthetic construct
  source 1..9: note = Seed: LVVVGARGV (KRAS G12R)
VVVRGVRGS

SEQ ID NO: 30048 - protein, 9 aa, synthetic construct
  source 1..9: note = Seed: LVVVGARGV (KRAS G12R)
VVVRGVRGV

SEQ ID NO: 30049 - protein, 9 aa, synthetic construct
  source 1..9: note = Seed: LVVVGARGV (KRAS G12R)
VVVRGVRGW

SEQ ID NO: 30050 - protein, 9 aa, synthetic construct
  source 1..9: note = Seed: LVVVGARGV (KRAS G12R)
VVVRGVRGY

SEQ ID NO: 30051 - protein, 9 aa, synthetic construct
  source 1..9: note = Seed: LVVVGARGV (KRAS G12R)
VVVSGARGA

SEQ ID NO: 30052 - protein, 9 aa, synthetic construct
  source 1..9: note = Seed: LVVVGARGV (KRAS G12R)
VVVSGARGF

SEQ ID NO: 30053 - protein, 9 aa, synthetic construct
  source 1..9: note = Seed: LVVVGARGV (KRAS G12R)
VVVSGARGI

SEQ ID NO: 30054 - protein, 9 aa, synthetic construct
  source 1..9: note = Seed: LVVVGARGV (KRAS G12R)
VVVSGARGL

SEQ ID NO: 30055 - protein, 9 aa, synthetic construct
  source 1..9: note = Seed: LVVVGARGV (KRAS G12R)
VVVSGARGM

SEQ ID NO: 30056 - protein, 9 aa, synthetic construct
  source 1..9: note = Seed: LVVVGARGV (KRAS G12R)
VVVSGARGR

SEQ ID NO: 30057 - protein, 9 aa, synthetic construct
  source 1..9: note = Seed: LVVVGARGV (KRAS G12R)
VVVSGARGV

SEQ ID NO: 30058 - protein, 9 aa, synthetic construct
  source 1..9: note = Seed: LVVVGARGV (KRAS G12R)
VVVSGARGY

SEQ ID NO: 30059 - protein, 9 aa, synthetic construct
  source 1..9: note = Seed: LVVVGARGV (KRAS G12R)
VVVSGFRGI

SEQ ID NO: 30060 - protein, 9 aa, synthetic construct
  source 1..9: note = Seed: LVVVGARGV (KRAS G12R)
VVVSGFRGL

SEQ ID NO: 30061 - protein, 9 aa, synthetic construct
  source 1..9: note = Seed: LVVVGARGV (KRAS G12R)
VVVSGFRGV

SEQ ID NO: 30062 - protein, 9 aa, synthetic construct
  source 1..9: note = Seed: LVVVGARGV (KRAS G12R)
VVVSGGRGI

SEQ ID NO: 30063 - protein, 9 aa, synthetic construct
  source 1..9: note = Seed: LVVVGARGV (KRAS G12R)
VVVSGGRGL

SEQ ID NO: 30064 - protein, 9 aa, synthetic construct
  source 1..9: note = Seed: LVVVGARGV (KRAS G12R)
VVVSGGRGV

SEQ ID NO: 30065 - protein, 9 aa, synthetic construct
  source 1..9: note = Seed: LVVVGARGV (KRAS G12R)
VVVSGHRGF

SEQ ID NO: 30066 - protein, 9 aa, synthetic construct
  source 1..9: note = Seed: LVVVGARGV (KRAS G12R)
VVVSGHRGI

SEQ ID NO: 30067 - protein, 9 aa, synthetic construct
  source 1..9: note = Seed: LVVVGARGV (KRAS G12R)
VVVSGHRGL

SEQ ID NO: 30068 - protein, 9 aa, synthetic construct
  source 1..9: note = Seed: LVVVGARGV (KRAS G12R)
VVVSGHRGM

SEQ ID NO: 30069 - protein, 9 aa, synthetic construct
  source 1..9: note = Seed: LVVVGARGV (KRAS G12R)
VVVSGHRGR

SEQ ID NO: 30070 - protein, 9 aa, synthetic construct
  source 1..9: note = Seed: LVVVGARGV (KRAS G12R)
VVVSGHRGY

SEQ ID NO: 30071 - protein, 9 aa, synthetic construct
  source 1..9: note = Seed: LVVVGARGV (KRAS G12R)
VVVSGIRGF

SEQ ID NO: 30072 - protein, 9 aa, synthetic construct
  source 1..9: note = Seed: LVVVGARGV (KRAS G12R)
VVVSGIRGI

SEQ ID NO: 30073 - protein, 9 aa, synthetic construct
  source 1..9: note = Seed: LVVVGARGV (KRAS G12R)
VVVSGIRGL

SEQ ID NO: 30074 - protein, 9 aa, synthetic construct
  source 1..9: note = Seed: LVVVGARGV (KRAS G12R)
VVVSGIRGM

SEQ ID NO: 30075 - protein, 9 aa, synthetic construct
  source 1..9: note = Seed: LVVVGARGV (KRAS G12R)
VVVSGIRGR

SEQ ID NO: 30076 - protein, 9 aa, synthetic construct
  source 1..9: note = Seed: LVVVGARGV (KRAS G12R)
VVVSGIRGY

SEQ ID NO: 30077 - protein, 9 aa, synthetic construct
  source 1..9: note = Seed: LVVVGARGV (KRAS G12R)
VVVSGKRGA

SEQ ID NO: 30078 - protein, 9 aa, synthetic construct
  source 1..9: note = Seed: LVVVGARGV (KRAS G12R)
VVVSGKRGF

SEQ ID NO: 30079 - protein, 9 aa, synthetic construct
  source 1..9: note = Seed: LVVVGARGV (KRAS G12R)
VVVSGKRGH

SEQ ID NO: 30080 - protein, 9 aa, synthetic construct
  source 1..9: note = Seed: LVVVGARGV (KRAS G12R)
VVVSGKRGI

SEQ ID NO: 30081 - protein, 9 aa, synthetic construct
  source 1..9: note = Seed: LVVVGARGV (KRAS G12R)
VVVSGKRGK

SEQ ID NO: 30082 - protein, 9 aa, synthetic construct
  source 1..9: note = Seed: LVVVGARGV (KRAS G12R)
VVVSGKRGL

SEQ ID NO: 30083 - protein, 9 aa, synthetic construct
  source 1..9: note = Seed: LVVVGARGV (KRAS G12R)
VVVSGKRGM

SEQ ID NO: 30084 - protein, 9 aa, synthetic construct
  source 1..9: note = Seed: LVVVGARGV (KRAS G12R)
VVVSGKRGQ

SEQ ID NO: 30085 - protein, 9 aa, synthetic construct
  source 1..9: note = Seed: LVVVGARGV (KRAS G12R)
VVVSGKRGR

SEQ ID NO: 30086 - protein, 9 aa, synthetic construct
  source 1..9: note = Seed: LVVVGARGV (KRAS G12R)
VVVSGKRGS

SEQ ID NO: 30087 - protein, 9 aa, synthetic construct
  source 1..9: note = Seed: LVVVGARGV (KRAS G12R)
VVVSGKRGT

SEQ ID NO: 30088 - protein, 9 aa, synthetic construct
  source 1..9: note = Seed: LVVVGARGV (KRAS G12R)
VVVSGKRGV

SEQ ID NO: 30089 - protein, 9 aa, synthetic construct
  source 1..9: note = Seed: LVVVGARGV (KRAS G12R)
VVVSGKRGY

SEQ ID NO: 30090 - protein, 9 aa, synthetic construct
  source 1..9: note = Seed: LVVVGARGV (KRAS G12R)
VVVSGLRGR

SEQ ID NO: 30091 - protein, 9 aa, synthetic construct
  source 1..9: note = Seed: LVVVGARGV (KRAS G12R)
VVVSGMRGL

SEQ ID NO: 30092 - protein, 9 aa, synthetic construct
  source 1..9: note = Seed: LVVVGARGV (KRAS G12R)
VVVSGMRGR

SEQ ID NO: 30093 - protein, 9 aa, synthetic construct
  source 1..9: note = Seed: LVVVGARGV (KRAS G12R)
VVVSGNRGF

SEQ ID NO: 30094 - protein, 9 aa, synthetic construct
  source 1..9: note = Seed: LVVVGARGV (KRAS G12R)
VVVSGNRGI

SEQ ID NO: 30095 - protein, 9 aa, synthetic construct
  source 1..9: note = Seed: LVVVGARGV (KRAS G12R)
VVVSGNRGL

SEQ ID NO: 30096 - protein, 9 aa, synthetic construct
  source 1..9: note = Seed: LVVVGARGV (KRAS G12R)
VVVSGNRGM

SEQ ID NO: 30097 - protein, 9 aa, synthetic construct
  source 1..9: note = Seed: LVVVGARGV (KRAS G12R)
VVVSGNRGR

SEQ ID NO: 30098 - protein, 9 aa, synthetic construct
  source 1..9: note = Seed: LVVVGARGV (KRAS G12R)
VVVSGNRGV

SEQ ID NO: 30099 - protein, 9 aa, synthetic construct
  source 1..9: note = Seed: LVVVGARGV (KRAS G12R)
VVVSGNRGY

SEQ ID NO: 30100 - protein, 9 aa, synthetic construct
  source 1..9: note = Seed: LVVVGARGV (KRAS G12R)
VVVSGPRGL

SEQ ID NO: 30101 - protein, 9 aa, synthetic construct
  source 1..9: note = Seed: LVVVGARGV (KRAS G12R)
VVVSGRRGA

SEQ ID NO: 30102 - protein, 9 aa, synthetic construct
  source 1..9: note = Seed: LVVVGARGV (KRAS G12R)
VVVSGRRGF

SEQ ID NO: 30103 - protein, 9 aa, synthetic construct
  source 1..9: note = Seed: LVVVGARGV (KRAS G12R)
VVVSGRRGG

SEQ ID NO: 30104 - protein, 9 aa, synthetic construct
  source 1..9: note = Seed: LVVVGARGV (KRAS G12R)
VVVSGRRGH

SEQ ID NO: 30105 - protein, 9 aa, synthetic construct
  source 1..9: note = Seed: LVVVGARGV (KRAS G12R)
VVVSGRRGI

SEQ ID NO: 30106 - protein, 9 aa, synthetic construct
  source 1..9: note = Seed: LVVVGARGV (KRAS G12R)
VVVSGRRGK

SEQ ID NO: 30107 - protein, 9 aa, synthetic construct
  source 1..9: note = Seed: LVVVGARGV (KRAS G12R)
VVVSGRRGL

SEQ ID NO: 30108 - protein, 9 aa, synthetic construct
  source 1..9: note = Seed: LVVVGARGV (KRAS G12R)
VVVSGRRGM

SEQ ID NO: 30109 - protein, 9 aa, synthetic construct
  source 1..9: note = Seed: LVVVGARGV (KRAS G12R)
VVVSGRRGN

SEQ ID NO: 30110 - protein, 9 aa, synthetic construct
  source 1..9: note = Seed: LVVVGARGV (KRAS G12R)
VVVSGRRGQ

SEQ ID NO: 30111 - protein, 9 aa, synthetic construct
  source 1..9: note = Seed: LVVVGARGV (KRAS G12R)
VVVSGRRGR

SEQ ID NO: 30112 - protein, 9 aa, synthetic construct
  source 1..9: note = Seed: LVVVGARGV (KRAS G12R)
VVVSGRRGS

SEQ ID NO: 30113 - protein, 9 aa, synthetic construct
  source 1..9: note = Seed: LVVVGARGV (KRAS G12R)
VVVSGRRGT

SEQ ID NO: 30114 - protein, 9 aa, synthetic construct
  source 1..9: note = Seed: LVVVGARGV (KRAS G12R)
VVVSGRRGV

SEQ ID NO: 30115 - protein, 9 aa, synthetic construct
  source 1..9: note = Seed: LVVVGARGV (KRAS G12R)
VVVSGRRGW

SEQ ID NO: 30116 - protein, 9 aa, synthetic construct
  source 1..9: note = Seed: LVVVGARGV (KRAS G12R)
VVVSGRRGY

SEQ ID NO: 30117 - protein, 9 aa, synthetic construct
  source 1..9: note = Seed: LVVVGARGV (KRAS G12R)
VVVSGSRGA

SEQ ID NO: 30118 - protein, 9 aa, synthetic construct
  source 1..9: note = Seed: LVVVGARGV (KRAS G12R)
VVVSGSRGF

SEQ ID NO: 30119 - protein, 9 aa, synthetic construct
  source 1..9: note = Seed: LVVVGARGV (KRAS G12R)
VVVSGSRGI

SEQ ID NO: 30120 - protein, 9 aa, synthetic construct
  source 1..9: note = Seed: LVVVGARGV (KRAS G12R)
VVVSGSRGL

SEQ ID NO: 30121 - protein, 9 aa, synthetic construct
  source 1..9: note = Seed: LVVVGARGV (KRAS G12R)
VVVSGSRGM

SEQ ID NO: 30122 - protein, 9 aa, synthetic construct
  source 1..9: note = Seed: LVVVGARGV (KRAS G12R)
VVVSGSRGR

SEQ ID NO: 30123 - protein, 9 aa, synthetic construct
  source 1..9: note = Seed: LVVVGARGV (KRAS G12R)
VVVSGSRGV

SEQ ID NO: 30124 - protein, 9 aa, synthetic construct
  source 1..9: note = Seed: LVVVGARGV (KRAS G12R)
VVVSGSRGY

SEQ ID NO: 30125 - protein, 9 aa, synthetic construct
  source 1..9: note = Seed: LVVVGARGV (KRAS G12R)
VVVSGTRGF

SEQ ID NO: 30126 - protein, 9 aa, synthetic construct
  source 1..9: note = Seed: LVVVGARGV (KRAS G12R)
VVVSGTRGL

SEQ ID NO: 30127 - protein, 9 aa, synthetic construct
  source 1..9: note = Seed: LVVVGARGV (KRAS G12R)
VVVSGTRGR

SEQ ID NO: 30128 - protein, 9 aa, synthetic construct
  source 1..9: note = Seed: LVVVGARGV (KRAS G12R)
VVVSGTRGY

SEQ ID NO: 30129 - protein, 9 aa, synthetic construct
  source 1..9: note = Seed: LVVVGARGV (KRAS G12R)
VVVSGVRGF

SEQ ID NO: 30130 - protein, 9 aa, synthetic construct
  source 1..9: note = Seed: LVVVGARGV (KRAS G12R)
VVVSGVRGL

SEQ ID NO: 30131 - protein, 9 aa, synthetic construct
  source 1..9: note = Seed: LVVVGARGV (KRAS G12R)
VVVSGVRGR

SEQ ID NO: 30132 - protein, 9 aa, synthetic construct
  source 1..9: note = Seed: LVVVGARGV (KRAS G12R)
VVVSGVRGY

SEQ ID NO: 30133 - protein, 9 aa, synthetic construct
  source 1..9: note = Seed: LVVVGARGV (KRAS G12R)
VVVTGARGA

SEQ ID NO: 30134 - protein, 9 aa, synthetic construct
  source 1..9: note = Seed: LVVVGARGV (KRAS G12R)
VVVTGARGI

SEQ ID NO: 30135 - protein, 9 aa, synthetic construct
  source 1..9: note = Seed: LVVVGARGV (KRAS G12R)
VVVTGARGL

SEQ ID NO: 30136 - protein, 9 aa, synthetic construct
  source 1..9: note = Seed: LVVVGARGV (KRAS G12R)
VVVTGARGV

SEQ ID NO: 30137 - protein, 9 aa, synthetic construct
  source 1..9: note = Seed: LVVVGARGV (KRAS G12R)
VVVTGFRGI

SEQ ID NO: 30138 - protein, 9 aa, synthetic construct
  source 1..9: note = Seed: LVVVGARGV (KRAS G12R)
VVVTGFRGL

SEQ ID NO: 30139 - protein, 9 aa, synthetic construct
  source 1..9: note = Seed: LVVVGARGV (KRAS G12R)
VVVTGFRGV

SEQ ID NO: 30140 - protein, 9 aa, synthetic construct
  source 1..9: note = Seed: LVVVGARGV (KRAS G12R)
VVVTGGRGI

SEQ ID NO: 30141 - protein, 9 aa, synthetic construct
  source 1..9: note = Seed: LVVVGARGV (KRAS G12R)
VVVTGGRGL

SEQ ID NO: 30142 - protein, 9 aa, synthetic construct
  source 1..9: note = Seed: LVVVGARGV (KRAS G12R)
VVVTGGRGV

SEQ ID NO: 30143 - protein, 9 aa, synthetic construct
  source 1..9: note = Seed: LVVVGARGV (KRAS G12R)
VVVTGHRGL

SEQ ID NO: 30144 - protein, 9 aa, synthetic construct
  source 1..9: note = Seed: LVVVGARGV (KRAS G12R)
VVVTGHRGR

SEQ ID NO: 30145 - protein, 9 aa, synthetic construct
  source 1..9: note = Seed: LVVVGARGV (KRAS G12R)
VVVTGIRGL

SEQ ID NO: 30146 - protein, 9 aa, synthetic construct
  source 1..9: note = Seed: LVVVGARGV (KRAS G12R)
VVVTGIRGR

SEQ ID NO: 30147 - protein, 9 aa, synthetic construct
  source 1..9: note = Seed: LVVVGARGV (KRAS G12R)
VVVTGKRGA

SEQ ID NO: 30148 - protein, 9 aa, synthetic construct
  source 1..9: note = Seed: LVVVGARGV (KRAS G12R)
VVVTGKRGF

SEQ ID NO: 30149 - protein, 9 aa, synthetic construct
  source 1..9: note = Seed: LVVVGARGV (KRAS G12R)
VVVTGKRGH

SEQ ID NO: 30150 - protein, 9 aa, synthetic construct
  source 1..9: note = Seed: LVVVGARGV (KRAS G12R)
VVVTGKRGI

SEQ ID NO: 30151 - protein, 9 aa, synthetic construct
  source 1..9: note = Seed: LVVVGARGV (KRAS G12R)
VVVTGKRGK

SEQ ID NO: 30152 - protein, 9 aa, synthetic construct
  source 1..9: note = Seed: LVVVGARGV (KRAS G12R)
VVVTGKRGL

SEQ ID NO: 30153 - protein, 9 aa, synthetic construct
  source 1..9: note = Seed: LVVVGARGV (KRAS G12R)
VVVTGKRGM

SEQ ID NO: 30154 - protein, 9 aa, synthetic construct
  source 1..9: note = Seed: LVVVGARGV (KRAS G12R)
VVVTGKRGQ

SEQ ID NO: 30155 - protein, 9 aa, synthetic construct
  source 1..9: note = Seed: LVVVGARGV (KRAS G12R)
VVVTGKRGR

SEQ ID NO: 30156 - protein, 9 aa, synthetic construct
  source 1..9: note = Seed: LVVVGARGV (KRAS G12R)
VVVTGKRGS

SEQ ID NO: 30157 - protein, 9 aa, synthetic construct
  source 1..9: note = Seed: LVVVGARGV (KRAS G12R)
VVVTGKRGV

SEQ ID NO: 30158 - protein, 9 aa, synthetic construct
  source 1..9: note = Seed: LVVVGARGV (KRAS G12R)
VVVTGKRGY

SEQ ID NO: 30159 - protein, 9 aa, synthetic construct
  source 1..9: note = Seed: LVVVGARGV (KRAS G12R)
VVVTGLRGR

SEQ ID NO: 30160 - protein, 9 aa, synthetic construct
  source 1..9: note = Seed: LVVVGARGV (KRAS G12R)
VVVTGMRGR

SEQ ID NO: 30161 - protein, 9 aa, synthetic construct
  source 1..9: note = Seed: LVVVGARGV (KRAS G12R)
VVVTGNRGI

SEQ ID NO: 30162 - protein, 9 aa, synthetic construct
  source 1..9: note = Seed: LVVVGARGV (KRAS G12R)
VVVTGNRGL

SEQ ID NO: 30163 - protein, 9 aa, synthetic construct
  source 1..9: note = Seed: LVVVGARGV (KRAS G12R)
VVVTGNRGY

SEQ ID NO: 30164 - protein, 9 aa, synthetic construct
  source 1..9: note = Seed: LVVVGARGV (KRAS G12R)
VVVTGRRGA

SEQ ID NO: 30165 - protein, 9 aa, synthetic construct
  source 1..9: note = Seed: LVVVGARGV (KRAS G12R)
VVVTGRRGF

SEQ ID NO: 30166 - protein, 9 aa, synthetic construct
  source 1..9: note = Seed: LVVVGARGV (KRAS G12R)
VVVTGRRGG

SEQ ID NO: 30167 - protein, 9 aa, synthetic construct
  source 1..9: note = Seed: LVVVGARGV (KRAS G12R)
VVVTGRRGH

SEQ ID NO: 30168 - protein, 9 aa, synthetic construct
  source 1..9: note = Seed: LVVVGARGV (KRAS G12R)
VVVTGRRGI

SEQ ID NO: 30169 - protein, 9 aa, synthetic construct
  source 1..9: note = Seed: LVVVGARGV (KRAS G12R)
VVVTGRRGK

SEQ ID NO: 30170 - protein, 9 aa, synthetic construct
  source 1..9: note = Seed: LVVVGARGV (KRAS G12R)
VVVTGRRGL

SEQ ID NO: 30171 - protein, 9 aa, synthetic construct
  source 1..9: note = Seed: LVVVGARGV (KRAS G12R)
VVVTGRRGM

SEQ ID NO: 30172 - protein, 9 aa, synthetic construct
  source 1..9: note = Seed: LVVVGARGV (KRAS G12R)
VVVTGRRGN

SEQ ID NO: 30173 - protein, 9 aa, synthetic construct
  source 1..9: note = Seed: LVVVGARGV (KRAS G12R)
VVVTGRRGQ

SEQ ID NO: 30174 - protein, 9 aa, synthetic construct
  source 1..9: note = Seed: LVVVGARGV (KRAS G12R)
VVVTGRRGR

SEQ ID NO: 30175 - protein, 9 aa, synthetic construct
  source 1..9: note = Seed: LVVVGARGV (KRAS G12R)
VVVTGRRGS

SEQ ID NO: 30176 - protein, 9 aa, synthetic construct
  source 1..9: note = Seed: LVVVGARGV (KRAS G12R)
VVVTGRRGT

SEQ ID NO: 30177 - protein, 9 aa, synthetic construct
  source 1..9: note = Seed: LVVVGARGV (KRAS G12R)
VVVTGRRGV

SEQ ID NO: 30178 - protein, 9 aa, synthetic construct
  source 1..9: note = Seed: LVVVGARGV (KRAS G12R)
VVVTGRRGW

SEQ ID NO: 30179 - protein, 9 aa, synthetic construct
  source 1..9: note = Seed: LVVVGARGV (KRAS G12R)
VVVTGRRGY

SEQ ID NO: 30180 - protein, 9 aa, synthetic construct
  source 1..9: note = Seed: LVVVGARGV (KRAS G12R)
VVVTGSRGF

SEQ ID NO: 30181 - protein, 9 aa, synthetic construct
  source 1..9: note = Seed: LVVVGARGV (KRAS G12R)
VVVTGSRGI

SEQ ID NO: 30182 - protein, 9 aa, synthetic construct
  source 1..9: note = Seed: LVVVGARGV (KRAS G12R)
VVVTGSRGL

SEQ ID NO: 30183 - protein, 9 aa, synthetic construct
  source 1..9: note = Seed: LVVVGARGV (KRAS G12R)
VVVTGSRGM

SEQ ID NO: 30184 - protein, 9 aa, synthetic construct
  source 1..9: note = Seed: LVVVGARGV (KRAS G12R)
VVVTGSRGV

SEQ ID NO: 30185 - protein, 9 aa, synthetic construct
  source 1..9: note = Seed: LVVVGARGV (KRAS G12R)
VVVTGTRGI

SEQ ID NO: 30186 - protein, 9 aa, synthetic construct
  source 1..9: note = Seed: LVVVGARGV (KRAS G12R)
VVVTGVRGR

SEQ ID NO: 30187 - protein, 9 aa, synthetic construct
  source 1..9: note = Seed: LVVVGARGV (KRAS G12R)
VVVVGARGA

SEQ ID NO: 30188 - protein, 9 aa, synthetic construct
  source 1..9: note = Seed: LVVVGARGV (KRAS G12R)
VVVVGARGF

SEQ ID NO: 30189 - protein, 9 aa, synthetic construct
  source 1..9: note = Seed: LVVVGARGV (KRAS G12R)
VVVVGARGI

SEQ ID NO: 30190 - protein, 9 aa, synthetic construct
  source 1..9: note = Seed: LVVVGARGV (KRAS G12R)
VVVVGARGK

SEQ ID NO: 30191 - protein, 9 aa, synthetic construct
  source 1..9: note = Seed: LVVVGARGV (KRAS G12R)
VVVVGARGL

SEQ ID NO: 30192 - protein, 9 aa, synthetic construct
  source 1..9: note = Seed: LVVVGARGV (KRAS G12R)
VVVVGARGM

SEQ ID NO: 30193 - protein, 9 aa, synthetic construct
  source 1..9: note = Seed: LVVVGARGV (KRAS G12R)
VVVVGARGR

SEQ ID NO: 30194 - protein, 9 aa, synthetic construct
  source 1..9: note = Seed: LVVVGARGV (KRAS G12R)
VVVVGARGS

SEQ ID NO: 30195 - protein, 9 aa, synthetic construct
  source 1..9: note = Seed: LVVVGARGV (KRAS G12R)
VVVVGARGT

SEQ ID NO: 30196 - protein, 9 aa, synthetic construct
  source 1..9: note = Seed: LVVVGARGV (KRAS G12R)
VVVVGARGV

SEQ ID NO: 30197 - protein, 9 aa, synthetic construct
  source 1..9: note = Seed: LVVVGARGV (KRAS G12R)
VVVVGARGY

SEQ ID NO: 30198 - protein, 9 aa, synthetic construct
  source 1..9: note = Seed: LVVVGARGV (KRAS G12R)
VVVVGGRGA

SEQ ID NO: 30199 - protein, 9 aa, synthetic construct
  source 1..9: note = Seed: LVVVGARGV (KRAS G12R)
VVVVGGRGI

SEQ ID NO: 30200 - protein, 9 aa, synthetic construct
  source 1..9: note = Seed: LVVVGARGV (KRAS G12R)
VVVVGGRGL

SEQ ID NO: 30201 - protein, 9 aa, synthetic construct
  source 1..9: note = Seed: LVVVGARGV (KRAS G12R)
VVVVGGRGM

SEQ ID NO: 30202 - protein, 9 aa, synthetic construct
  source 1..9: note = Seed: LVVVGARGV (KRAS G12R)
VVVVGGRGT

SEQ ID NO: 30203 - protein, 9 aa, synthetic construct
  source 1..9: note = Seed: LVVVGARGV (KRAS G12R)
VVVVGGRGV

SEQ ID NO: 30204 - protein, 9 aa, synthetic construct
  source 1..9: note = Seed: LVVVGARGV (KRAS G12R)
VVVVGHRGA

SEQ ID NO: 30205 - protein, 9 aa, synthetic construct
  source 1..9: note = Seed: LVVVGARGV (KRAS G12R)
VVVVGHRGF

SEQ ID NO: 30206 - protein, 9 aa, synthetic construct
  source 1..9: note = Seed: LVVVGARGV (KRAS G12R)
VVVVGHRGH

SEQ ID NO: 30207 - protein, 9 aa, synthetic construct
  source 1..9: note = Seed: LVVVGARGV (KRAS G12R)
VVVVGHRGI

SEQ ID NO: 30208 - protein, 9 aa, synthetic construct
  source 1..9: note = Seed: LVVVGARGV (KRAS G12R)
VVVVGHRGK

SEQ ID NO: 30209 - protein, 9 aa, synthetic construct
  source 1..9: note = Seed: LVVVGARGV (KRAS G12R)
VVVVGHRGL

SEQ ID NO: 30210 - protein, 9 aa, synthetic construct
  source 1..9: note = Seed: LVVVGARGV (KRAS G12R)
VVVVGHRGM

SEQ ID NO: 30211 - protein, 9 aa, synthetic construct
  source 1..9: note = Seed: LVVVGARGV (KRAS G12R)
VVVVGHRGQ

SEQ ID NO: 30212 - protein, 9 aa, synthetic construct
  source 1..9: note = Seed: LVVVGARGV (KRAS G12R)
VVVVGHRGR

SEQ ID NO: 30213 - protein, 9 aa, synthetic construct
  source 1..9: note = Seed: LVVVGARGV (KRAS G12R)
VVVVGHRGS

SEQ ID NO: 30214 - protein, 9 aa, synthetic construct
  source 1..9: note = Seed: LVVVGARGV (KRAS G12R)
VVVVGHRGV

SEQ ID NO: 30215 - protein, 9 aa, synthetic construct
  source 1..9: note = Seed: LVVVGARGV (KRAS G12R)
VVVVGHRGY

SEQ ID NO: 30216 - protein, 9 aa, synthetic construct
  source 1..9: note = Seed: LVVVGARGV (KRAS G12R)
VVVVGIRGA

SEQ ID NO: 30217 - protein, 9 aa, synthetic construct
  source 1..9: note = Seed: LVVVGARGV (KRAS G12R)
VVVVGIRGF

SEQ ID NO: 30218 - protein, 9 aa, synthetic construct
  source 1..9: note = Seed: LVVVGARGV (KRAS G12R)
VVVVGIRGI

SEQ ID NO: 30219 - protein, 9 aa, synthetic construct
  source 1..9: note = Seed: LVVVGARGV (KRAS G12R)
VVVVGIRGL

SEQ ID NO: 30220 - protein, 9 aa, synthetic construct
  source 1..9: note = Seed: LVVVGARGV (KRAS G12R)
VVVVGIRGM

SEQ ID NO: 30221 - protein, 9 aa, synthetic construct
  source 1..9: note = Seed: LVVVGARGV (KRAS G12R)
VVVVGIRGQ

SEQ ID NO: 30222 - protein, 9 aa, synthetic construct
  source 1..9: note = Seed: LVVVGARGV (KRAS G12R)
VVVVGIRGR

SEQ ID NO: 30223 - protein, 9 aa, synthetic construct
  source 1..9: note = Seed: LVVVGARGV (KRAS G12R)
VVVVGIRGS

SEQ ID NO: 30224 - protein, 9 aa, synthetic construct
  source 1..9: note = Seed: LVVVGARGV (KRAS G12R)
VVVVGIRGV

SEQ ID NO: 30225 - protein, 9 aa, synthetic construct
  source 1..9: note = Seed: LVVVGARGV (KRAS G12R)
VVVVGIRGY

SEQ ID NO: 30226 - protein, 9 aa, synthetic construct
  source 1..9: note = Seed: LVVVGARGV (KRAS G12R)
VVVVGKRGA

SEQ ID NO: 30227 - protein, 9 aa, synthetic construct
  source 1..9: note = Seed: LVVVGARGV (KRAS G12R)
VVVVGKRGC

SEQ ID NO: 30228 - protein, 9 aa, synthetic construct
  source 1..9: note = Seed: LVVVGARGV (KRAS G12R)
VVVVGKRGF

SEQ ID NO: 30229 - protein, 9 aa, synthetic construct
  source 1..9: note = Seed: LVVVGARGV (KRAS G12R)
VVVVGKRGG

SEQ ID NO: 30230 - protein, 9 aa, synthetic construct
  source 1..9: note = Seed: LVVVGARGV (KRAS G12R)
VVVVGKRGH

SEQ ID NO: 30231 - protein, 9 aa, synthetic construct
  source 1..9: note = Seed: LVVVGARGV (KRAS G12R)
VVVVGKRGI

SEQ ID NO: 30232 - protein, 9 aa, synthetic construct
  source 1..9: note = Seed: LVVVGARGV (KRAS G12R)
VVVVGKRGK

SEQ ID NO: 30233 - protein, 9 aa, synthetic construct
  source 1..9: note = Seed: LVVVGARGV (KRAS G12R)
VVVVGKRGL

SEQ ID NO: 30234 - protein, 9 aa, synthetic construct
  source 1..9: note = Seed: LVVVGARGV (KRAS G12R)
VVVVGKRGM

SEQ ID NO: 30235 - protein, 9 aa, synthetic construct
  source 1..9: note = Seed: LVVVGARGV (KRAS G12R)
VVVVGKRGN

SEQ ID NO: 30236 - protein, 9 aa, synthetic construct
  source 1..9: note = Seed: LVVVGARGV (KRAS G12R)
VVVVGKRGP

SEQ ID NO: 30237 - protein, 9 aa, synthetic construct
  source 1..9: note = Seed: LVVVGARGV (KRAS G12R)
VVVVGKRGQ

SEQ ID NO: 30238 - protein, 9 aa, synthetic construct
  source 1..9: note = Seed: LVVVGARGV (KRAS G12R)
VVVVGKRGR

SEQ ID NO: 30239 - protein, 9 aa, synthetic construct
  source 1..9: note = Seed: LVVVGARGV (KRAS G12R)
VVVVGKRGS

SEQ ID NO: 30240 - protein, 9 aa, synthetic construct
  source 1..9: note = Seed: LVVVGARGV (KRAS G12R)
VVVVGKRGT

SEQ ID NO: 30241 - protein, 9 aa, synthetic construct
  source 1..9: note = Seed: LVVVGARGV (KRAS G12R)
VVVVGKRGV

SEQ ID NO: 30242 - protein, 9 aa, synthetic construct
  source 1..9: note = Seed: LVVVGARGV (KRAS G12R)
VVVVGKRGW

SEQ ID NO: 30243 - protein, 9 aa, synthetic construct
  source 1..9: note = Seed: LVVVGARGV (KRAS G12R)
VVVVGKRGY

SEQ ID NO: 30244 - protein, 9 aa, synthetic construct
  source 1..9: note = Seed: LVVVGARGV (KRAS G12R)
VVVVGLRGM

SEQ ID NO: 30245 - protein, 9 aa, synthetic construct
  source 1..9: note = Seed: LVVVGARGV (KRAS G12R)
VVVVGLRGR

SEQ ID NO: 30246 - protein, 9 aa, synthetic construct
  source 1..9: note = Seed: LVVVGARGV (KRAS G12R)
VVVVGMRGF

SEQ ID NO: 30247 - protein, 9 aa, synthetic construct
  source 1..9: note = Seed: LVVVGARGV (KRAS G12R)
VVVVGMRGM

SEQ ID NO: 30248 - protein, 9 aa, synthetic construct
  source 1..9: note = Seed: LVVVGARGV (KRAS G12R)
VVVVGMRGR

SEQ ID NO: 30249 - protein, 9 aa, synthetic construct
  source 1..9: note = Seed: LVVVGARGV (KRAS G12R)
VVVVGMRGY

SEQ ID NO: 30250 - protein, 9 aa, synthetic construct
  source 1..9: note = Seed: LVVVGARGV (KRAS G12R)
VVVVGNRGF

SEQ ID NO: 30251 - protein, 9 aa, synthetic construct
  source 1..9: note = Seed: LVVVGARGV (KRAS G12R)
VVVVGNRGI

SEQ ID NO: 30252 - protein, 9 aa, synthetic construct
  source 1..9: note = Seed: LVVVGARGV (KRAS G12R)
VVVVGNRGL

SEQ ID NO: 30253 - protein, 9 aa, synthetic construct
  source 1..9: note = Seed: LVVVGARGV (KRAS G12R)
VVVVGNRGM

SEQ ID NO: 30254 - protein, 9 aa, synthetic construct
  source 1..9: note = Seed: LVVVGARGV (KRAS G12R)
VVVVGNRGR

SEQ ID NO: 30255 - protein, 9 aa, synthetic construct
  source 1..9: note = Seed: LVVVGARGV (KRAS G12R)
VVVVGNRGV

SEQ ID NO: 30256 - protein, 9 aa, synthetic construct
  source 1..9: note = Seed: LVVVGARGV (KRAS G12R)
VVVVGNRGY

SEQ ID NO: 30257 - protein, 9 aa, synthetic construct
  source 1..9: note = Seed: LVVVGARGV (KRAS G12R)
VVVVGPRGI

SEQ ID NO: 30258 - protein, 9 aa, synthetic construct
  source 1..9: note = Seed: LVVVGARGV (KRAS G12R)
VVVVGPRGL

SEQ ID NO: 30259 - protein, 9 aa, synthetic construct
  source 1..9: note = Seed: LVVVGARGV (KRAS G12R)
VVVVGPRGR

SEQ ID NO: 30260 - protein, 9 aa, synthetic construct
  source 1..9: note = Seed: LVVVGARGV (KRAS G12R)
VVVVGPRGV

SEQ ID NO: 30261 - protein, 9 aa, synthetic construct
  source 1..9: note = Seed: LVVVGARGV (KRAS G12R)
VVVVGQRGL

SEQ ID NO: 30262 - protein, 9 aa, synthetic construct
  source 1..9: note = Seed: LVVVGARGV (KRAS G12R)
VVVVGQRGR

SEQ ID NO: 30263 - protein, 9 aa, synthetic construct
  source 1..9: note = Seed: LVVVGARGV (KRAS G12R)
VVVVGRRGA

SEQ ID NO: 30264 - protein, 9 aa, synthetic construct
  source 1..9: note = Seed: LVVVGARGV (KRAS G12R)
VVVVGRRGC

SEQ ID NO: 30265 - protein, 9 aa, synthetic construct
  source 1..9: note = Seed: LVVVGARGV (KRAS G12R)
VVVVGRRGE

SEQ ID NO: 30266 - protein, 9 aa, synthetic construct
  source 1..9: note = Seed: LVVVGARGV (KRAS G12R)
VVVVGRRGF

SEQ ID NO: 30267 - protein, 9 aa, synthetic construct
  source 1..9: note = Seed: LVVVGARGV (KRAS G12R)
VVVVGRRGG

SEQ ID NO: 30268 - protein, 9 aa, synthetic construct
  source 1..9: note = Seed: LVVVGARGV (KRAS G12R)
VVVVGRRGH

SEQ ID NO: 30269 - protein, 9 aa, synthetic construct
  source 1..9: note = Seed: LVVVGARGV (KRAS G12R)
VVVVGRRGI

SEQ ID NO: 30270 - protein, 9 aa, synthetic construct
  source 1..9: note = Seed: LVVVGARGV (KRAS G12R)
VVVVGRRGK

SEQ ID NO: 30271 - protein, 9 aa, synthetic construct
  source 1..9: note = Seed: LVVVGARGV (KRAS G12R)
VVVVGRRGL

SEQ ID NO: 30272 - protein, 9 aa, synthetic construct
  source 1..9: note = Seed: LVVVGARGV (KRAS G12R)
VVVVGRRGM

SEQ ID NO: 30273 - protein, 9 aa, synthetic construct
  source 1..9: note = Seed: LVVVGARGV (KRAS G12R)
VVVVGRRGN

SEQ ID NO: 30274 - protein, 9 aa, synthetic construct
  source 1..9: note = Seed: LVVVGARGV (KRAS G12R)
VVVVGRRGP

SEQ ID NO: 30275 - protein, 9 aa, synthetic construct
  source 1..9: note = Seed: LVVVGARGV (KRAS G12R)
VVVVGRRGQ

SEQ ID NO: 30276 - protein, 9 aa, synthetic construct
  source 1..9: note = Seed: LVVVGARGV (KRAS G12R)
VVVVGRRGR

SEQ ID NO: 30277 - protein, 9 aa, synthetic construct
  source 1..9: note = Seed: LVVVGARGV (KRAS G12R)
VVVVGRRGS

SEQ ID NO: 30278 - protein, 9 aa, synthetic construct
  source 1..9: note = Seed: LVVVGARGV (KRAS G12R)
VVVVGRRGT

SEQ ID NO: 30279 - protein, 9 aa, synthetic construct
  source 1..9: note = Seed: LVVVGARGV (KRAS G12R)
VVVVGRRGV

SEQ ID NO: 30280 - protein, 9 aa, synthetic construct
  source 1..9: note = Seed: LVVVGARGV (KRAS G12R)
VVVVGRRGW

SEQ ID NO: 30281 - protein, 9 aa, synthetic construct
  source 1..9: note = Seed: LVVVGARGV (KRAS G12R)
VVVVGRRGY

SEQ ID NO: 30282 - protein, 9 aa, synthetic construct
  source 1..9: note = Seed: LVVVGARGV (KRAS G12R)
VVVVGSRGA

SEQ ID NO: 30283 - protein, 9 aa, synthetic construct
  source 1..9: note = Seed: LVVVGARGV (KRAS G12R)
VVVVGSRGF

SEQ ID NO: 30284 - protein, 9 aa, synthetic construct
  source 1..9: note = Seed: LVVVGARGV (KRAS G12R)
VVVVGSRGI

SEQ ID NO: 30285 - protein, 9 aa, synthetic construct
  source 1..9: note = Seed: LVVVGARGV (KRAS G12R)
VVVVGSRGK

SEQ ID NO: 30286 - protein, 9 aa, synthetic construct
  source 1..9: note = Seed: LVVVGARGV (KRAS G12R)
VVVVGSRGL

SEQ ID NO: 30287 - protein, 9 aa, synthetic construct
  source 1..9: note = Seed: LVVVGARGV (KRAS G12R)
VVVVGSRGM

SEQ ID NO: 30288 - protein, 9 aa, synthetic construct
  source 1..9: note = Seed: LVVVGARGV (KRAS G12R)
VVVVGSRGR

SEQ ID NO: 30289 - protein, 9 aa, synthetic construct
  source 1..9: note = Seed: LVVVGARGV (KRAS G12R)
VVVVGSRGT

SEQ ID NO: 30290 - protein, 9 aa, synthetic construct
  source 1..9: note = Seed: LVVVGARGV (KRAS G12R)
VVVVGSRGV

SEQ ID NO: 30291 - protein, 9 aa, synthetic construct
  source 1..9: note = Seed: LVVVGARGV (KRAS G12R)
VVVVGSRGY

SEQ ID NO: 30292 - protein, 9 aa, synthetic construct
  source 1..9: note = Seed: LVVVGARGV (KRAS G12R)
VVVVGTRGA

SEQ ID NO: 30293 - protein, 9 aa, synthetic construct
  source 1..9: note = Seed: LVVVGARGV (KRAS G12R)
VVVVGTRGF

SEQ ID NO: 30294 - protein, 9 aa, synthetic construct
  source 1..9: note = Seed: LVVVGARGV (KRAS G12R)
VVVVGTRGI

SEQ ID NO: 30295 - protein, 9 aa, synthetic construct
  source 1..9: note = Seed: LVVVGARGV (KRAS G12R)
VVVVGTRGK

SEQ ID NO: 30296 - protein, 9 aa, synthetic construct
  source 1..9: note = Seed: LVVVGARGV (KRAS G12R)
VVVVGTRGL

SEQ ID NO: 30297 - protein, 9 aa, synthetic construct
  source 1..9: note = Seed: LVVVGARGV (KRAS G12R)
VVVVGTRGM

SEQ ID NO: 30298 - protein, 9 aa, synthetic construct
  source 1..9: note = Seed: LVVVGARGV (KRAS G12R)
VVVVGTRGR

SEQ ID NO: 30299 - protein, 9 aa, synthetic construct
  source 1..9: note = Seed: LVVVGARGV (KRAS G12R)
VVVVGTRGV

SEQ ID NO: 30300 - protein, 9 aa, synthetic construct
  source 1..9: note = Seed: LVVVGARGV (KRAS G12R)
VVVVGTRGY

SEQ ID NO: 30301 - protein, 9 aa, synthetic construct
  source 1..9: note = Seed: LVVVGARGV (KRAS G12R)
VVVVGVRGA

SEQ ID NO: 30302 - protein, 9 aa, synthetic construct
  source 1..9: note = Seed: LVVVGARGV (KRAS G12R)
VVVVGVRGF

SEQ ID NO: 30303 - protein, 9 aa, synthetic construct
  source 1..9: note = Seed: LVVVGARGV (KRAS G12R)
VVVVGVRGI

SEQ ID NO: 30304 - protein, 9 aa, synthetic construct
  source 1..9: note = Seed: LVVVGARGV (KRAS G12R)
VVVVGVRGL

SEQ ID NO: 30305 - protein, 9 aa, synthetic construct
  source 1..9: note = Seed: LVVVGARGV (KRAS G12R)
VVVVGVRGM

SEQ ID NO: 30306 - protein, 9 aa, synthetic construct
  source 1..9: note = Seed: LVVVGARGV (KRAS G12R)
VVVVGVRGR

SEQ ID NO: 30307 - protein, 9 aa, synthetic construct
  source 1..9: note = Seed: LVVVGARGV (KRAS G12R)
VVVVGVRGY

SEQ ID NO: 30308 - protein, 9 aa, synthetic construct
  source 1..9: note = Seed: LVVVGARGV (KRAS G12R)
VVVWGARGF

SEQ ID NO: 30309 - protein, 9 aa, synthetic construct
  source 1..9: note = Seed: LVVVGARGV (KRAS G12R)
VVVWGARGI

SEQ ID NO: 30310 - protein, 9 aa, synthetic construct
  source 1..9: note = Seed: LVVVGARGV (KRAS G12R)
VVVWGARGK

SEQ ID NO: 30311 - protein, 9 aa, synthetic construct
  source 1..9: note = Seed: LVVVGARGV (KRAS G12R)
VVVWGARGL

SEQ ID NO: 30312 - protein, 9 aa, synthetic construct
  source 1..9: note = Seed: LVVVGARGV (KRAS G12R)
VVVWGARGM

SEQ ID NO: 30313 - protein, 9 aa, synthetic construct
  source 1..9: note = Seed: LVVVGARGV (KRAS G12R)
VVVWGARGR

SEQ ID NO: 30314 - protein, 9 aa, synthetic construct
  source 1..9: note = Seed: LVVVGARGV (KRAS G12R)
VVVWGARGV

SEQ ID NO: 30315 - protein, 9 aa, synthetic construct
  source 1..9: note = Seed: LVVVGARGV (KRAS G12R)
VVVWGFRGR

SEQ ID NO: 30316 - protein, 9 aa, synthetic construct
  source 1..9: note = Seed: LVVVGARGV (KRAS G12R)
VVVWGGRGI

SEQ ID NO: 30317 - protein, 9 aa, synthetic construct
  source 1..9: note = Seed: LVVVGARGV (KRAS G12R)
VVVWGGRGL

SEQ ID NO: 30318 - protein, 9 aa, synthetic construct
  source 1..9: note = Seed: LVVVGARGV (KRAS G12R)
VVVWGGRGR

SEQ ID NO: 30319 - protein, 9 aa, synthetic construct
  source 1..9: note = Seed: LVVVGARGV (KRAS G12R)
VVVWGGRGV

SEQ ID NO: 30320 - protein, 9 aa, synthetic construct
  source 1..9: note = Seed: LVVVGARGV (KRAS G12R)
VVVWGHRGA

SEQ ID NO: 30321 - protein, 9 aa, synthetic construct
  source 1..9: note = Seed: LVVVGARGV (KRAS G12R)
VVVWGHRGF

SEQ ID NO: 30322 - protein, 9 aa, synthetic construct
  source 1..9: note = Seed: LVVVGARGV (KRAS G12R)
VVVWGHRGH

SEQ ID NO: 30323 - protein, 9 aa, synthetic construct
  source 1..9: note = Seed: LVVVGARGV (KRAS G12R)
VVVWGHRGI

SEQ ID NO: 30324 - protein, 9 aa, synthetic construct
  source 1..9: note = Seed: LVVVGARGV (KRAS G12R)
VVVWGHRGK

SEQ ID NO: 30325 - protein, 9 aa, synthetic construct
  source 1..9: note = Seed: LVVVGARGV (KRAS G12R)
VVVWGHRGL

SEQ ID NO: 30326 - protein, 9 aa, synthetic construct
  source 1..9: note = Seed: LVVVGARGV (KRAS G12R)
VVVWGHRGM

SEQ ID NO: 30327 - protein, 9 aa, synthetic construct
  source 1..9: note = Seed: LVVVGARGV (KRAS G12R)
VVVWGHRGR

SEQ ID NO: 30328 - protein, 9 aa, synthetic construct
  source 1..9: note = Seed: LVVVGARGV (KRAS G12R)
VVVWGHRGV

SEQ ID NO: 30329 - protein, 9 aa, synthetic construct
  source 1..9: note = Seed: LVVVGARGV (KRAS G12R)
VVVWGHRGY

SEQ ID NO: 30330 - protein, 9 aa, synthetic construct
  source 1..9: note = Seed: LVVVGARGV (KRAS G12R)
VVVWGIRGA

SEQ ID NO: 30331 - protein, 9 aa, synthetic construct
  source 1..9: note = Seed: LVVVGARGV (KRAS G12R)
VVVWGIRGF

SEQ ID NO: 30332 - protein, 9 aa, synthetic construct
  source 1..9: note = Seed: LVVVGARGV (KRAS G12R)
VVVWGIRGH

SEQ ID NO: 30333 - protein, 9 aa, synthetic construct
  source 1..9: note = Seed: LVVVGARGV (KRAS G12R)
VVVWGIRGI

SEQ ID NO: 30334 - protein, 9 aa, synthetic construct
  source 1..9: note = Seed: LVVVGARGV (KRAS G12R)
VVVWGIRGK

SEQ ID NO: 30335 - protein, 9 aa, synthetic construct
  source 1..9: note = Seed: LVVVGARGV (KRAS G12R)
VVVWGIRGL

SEQ ID NO: 30336 - protein, 9 aa, synthetic construct
  source 1..9: note = Seed: LVVVGARGV (KRAS G12R)
VVVWGIRGM

SEQ ID NO: 30337 - protein, 9 aa, synthetic construct
  source 1..9: note = Seed: LVVVGARGV (KRAS G12R)
VVVWGIRGR

SEQ ID NO: 30338 - protein, 9 aa, synthetic construct
  source 1..9: note = Seed: LVVVGARGV (KRAS G12R)
VVVWGIRGY

SEQ ID NO: 30339 - protein, 9 aa, synthetic construct
  source 1..9: note = Seed: LVVVGARGV (KRAS G12R)
VVVWGKRGA

SEQ ID NO: 30340 - protein, 9 aa, synthetic construct
  source 1..9: note = Seed: LVVVGARGV (KRAS G12R)
VVVWGKRGF

SEQ ID NO: 30341 - protein, 9 aa, synthetic construct
  source 1..9: note = Seed: LVVVGARGV (KRAS G12R)
VVVWGKRGG

SEQ ID NO: 30342 - protein, 9 aa, synthetic construct
  source 1..9: note = Seed: LVVVGARGV (KRAS G12R)
VVVWGKRGH

SEQ ID NO: 30343 - protein, 9 aa, synthetic construct
  source 1..9: note = Seed: LVVVGARGV (KRAS G12R)
VVVWGKRGI

SEQ ID NO: 30344 - protein, 9 aa, synthetic construct
  source 1..9: note = Seed: LVVVGARGV (KRAS G12R)
VVVWGKRGK

SEQ ID NO: 30345 - protein, 9 aa, synthetic construct
  source 1..9: note = Seed: LVVVGARGV (KRAS G12R)
VVVWGKRGL

SEQ ID NO: 30346 - protein, 9 aa, synthetic construct
  source 1..9: note = Seed: LVVVGARGV (KRAS G12R)
VVVWGKRGM

SEQ ID NO: 30347 - protein, 9 aa, synthetic construct
  source 1..9: note = Seed: LVVVGARGV (KRAS G12R)
VVVWGKRGN

SEQ ID NO: 30348 - protein, 9 aa, synthetic construct
  source 1..9: note = Seed: LVVVGARGV (KRAS G12R)
VVVWGKRGQ

SEQ ID NO: 30349 - protein, 9 aa, synthetic construct
  source 1..9: note = Seed: LVVVGARGV (KRAS G12R)
VVVWGKRGR

SEQ ID NO: 30350 - protein, 9 aa, synthetic construct
  source 1..9: note = Seed: LVVVGARGV (KRAS G12R)
VVVWGKRGS

SEQ ID NO: 30351 - protein, 9 aa, synthetic construct
  source 1..9: note = Seed: LVVVGARGV (KRAS G12R)
VVVWGKRGT

SEQ ID NO: 30352 - protein, 9 aa, synthetic construct
  source 1..9: note = Seed: LVVVGARGV (KRAS G12R)
VVVWGKRGV

SEQ ID NO: 30353 - protein, 9 aa, synthetic construct
  source 1..9: note = Seed: LVVVGARGV (KRAS G12R)
VVVWGKRGW

SEQ ID NO: 30354 - protein, 9 aa, synthetic construct
  source 1..9: note = Seed: LVVVGARGV (KRAS G12R)
VVVWGKRGY

SEQ ID NO: 30355 - protein, 9 aa, synthetic construct
  source 1..9: note = Seed: LVVVGARGV (KRAS G12R)
VVVWGLRGK

SEQ ID NO: 30356 - protein, 9 aa, synthetic construct
  source 1..9: note = Seed: LVVVGARGV (KRAS G12R)
VVVWGLRGL

SEQ ID NO: 30357 - protein, 9 aa, synthetic construct
  source 1..9: note = Seed: LVVVGARGV (KRAS G12R)
VVVWGLRGM

SEQ ID NO: 30358 - protein, 9 aa, synthetic construct
  source 1..9: note = Seed: LVVVGARGV (KRAS G12R)
VVVWGLRGR

SEQ ID NO: 30359 - protein, 9 aa, synthetic construct
  source 1..9: note = Seed: LVVVGARGV (KRAS G12R)
VVVWGLRGY

SEQ ID NO: 30360 - protein, 9 aa, synthetic construct
  source 1..9: note = Seed: LVVVGARGV (KRAS G12R)
VVVWGMRGI

SEQ ID NO: 30361 - protein, 9 aa, synthetic construct
  source 1..9: note = Seed: LVVVGARGV (KRAS G12R)
VVVWGMRGK

SEQ ID NO: 30362 - protein, 9 aa, synthetic construct
  source 1..9: note = Seed: LVVVGARGV (KRAS G12R)
VVVWGMRGL

SEQ ID NO: 30363 - protein, 9 aa, synthetic construct
  source 1..9: note = Seed: LVVVGARGV (KRAS G12R)
VVVWGMRGM

SEQ ID NO: 30364 - protein, 9 aa, synthetic construct
  source 1..9: note = Seed: LVVVGARGV (KRAS G12R)
VVVWGMRGR

SEQ ID NO: 30365 - protein, 9 aa, synthetic construct
  source 1..9: note = Seed: LVVVGARGV (KRAS G12R)
VVVWGMRGV

SEQ ID NO: 30366 - protein, 9 aa, synthetic construct
  source 1..9: note = Seed: LVVVGARGV (KRAS G12R)
VVVWGMRGY

SEQ ID NO: 30367 - protein, 9 aa, synthetic construct
  source 1..9: note = Seed: LVVVGARGV (KRAS G12R)
VVVWGNRGA

SEQ ID NO: 30368 - protein, 9 aa, synthetic construct
  source 1..9: note = Seed: LVVVGARGV (KRAS G12R)
VVVWGNRGF

SEQ ID NO: 30369 - protein, 9 aa, synthetic construct
  source 1..9: note = Seed: LVVVGARGV (KRAS G12R)
VVVWGNRGI

SEQ ID NO: 30370 - protein, 9 aa, synthetic construct
  source 1..9: note = Seed: LVVVGARGV (KRAS G12R)
VVVWGNRGK

SEQ ID NO: 30371 - protein, 9 aa, synthetic construct
  source 1..9: note = Seed: LVVVGARGV (KRAS G12R)
VVVWGNRGL

SEQ ID NO: 30372 - protein, 9 aa, synthetic construct
  source 1..9: note = Seed: LVVVGARGV (KRAS G12R)
VVVWGNRGM

SEQ ID NO: 30373 - protein, 9 aa, synthetic construct
  source 1..9: note = Seed: LVVVGARGV (KRAS G12R)
VVVWGNRGR

SEQ ID NO: 30374 - protein, 9 aa, synthetic construct
  source 1..9: note = Seed: LVVVGARGV (KRAS G12R)
VVVWGNRGV

SEQ ID NO: 30375 - protein, 9 aa, synthetic construct
  source 1..9: note = Seed: LVVVGARGV (KRAS G12R)
VVVWGNRGY

SEQ ID NO: 30376 - protein, 9 aa, synthetic construct
  source 1..9: note = Seed: LVVVGARGV (KRAS G12R)
VVVWGPRGR

SEQ ID NO: 30377 - protein, 9 aa, synthetic construct
  source 1..9: note = Seed: LVVVGARGV (KRAS G12R)
VVVWGQRGR

SEQ ID NO: 30378 - protein, 9 aa, synthetic construct
  source 1..9: note = Seed: LVVVGARGV (KRAS G12R)
VVVWGRRGA

SEQ ID NO: 30379 - protein, 9 aa, synthetic construct
  source 1..9: note = Seed: LVVVGARGV (KRAS G12R)
VVVWGRRGC

SEQ ID NO: 30380 - protein, 9 aa, synthetic construct
  source 1..9: note = Seed: LVVVGARGV (KRAS G12R)
VVVWGRRGF

SEQ ID NO: 30381 - protein, 9 aa, synthetic construct
  source 1..9: note = Seed: LVVVGARGV (KRAS G12R)
VVVWGRRGG

SEQ ID NO: 30382 - protein, 9 aa, synthetic construct
  source 1..9: note = Seed: LVVVGARGV (KRAS G12R)
VVVWGRRGH

SEQ ID NO: 30383 - protein, 9 aa, synthetic construct
  source 1..9: note = Seed: LVVVGARGV (KRAS G12R)
VVVWGRRGI

SEQ ID NO: 30384 - protein, 9 aa, synthetic construct
  source 1..9: note = Seed: LVVVGARGV (KRAS G12R)
VVVWGRRGK

SEQ ID NO: 30385 - protein, 9 aa, synthetic construct
  source 1..9: note = Seed: LVVVGARGV (KRAS G12R)
VVVWGRRGL

SEQ ID NO: 30386 - protein, 9 aa, synthetic construct
  source 1..9: note = Seed: LVVVGARGV (KRAS G12R)
VVVWGRRGM

SEQ ID NO: 30387 - protein, 9 aa, synthetic construct
  source 1..9: note = Seed: LVVVGARGV (KRAS G12R)
VVVWGRRGN

SEQ ID NO: 30388 - protein, 9 aa, synthetic construct
  source 1..9: note = Seed: LVVVGARGV (KRAS G12R)
VVVWGRRGP

SEQ ID NO: 30389 - protein, 9 aa, synthetic construct
  source 1..9: note = Seed: LVVVGARGV (KRAS G12R)
VVVWGRRGQ

SEQ ID NO: 30390 - protein, 9 aa, synthetic construct
  source 1..9: note = Seed: LVVVGARGV (KRAS G12R)
VVVWGRRGR

SEQ ID NO: 30391 - protein, 9 aa, synthetic construct
  source 1..9: note = Seed: LVVVGARGV (KRAS G12R)
VVVWGRRGS

SEQ ID NO: 30392 - protein, 9 aa, synthetic construct
  source 1..9: note = Seed: LVVVGARGV (KRAS G12R)
VVVWGRRGT

SEQ ID NO: 30393 - protein, 9 aa, synthetic construct
  source 1..9: note = Seed: LVVVGARGV (KRAS G12R)
VVVWGRRGV

SEQ ID NO: 30394 - protein, 9 aa, synthetic construct
  source 1..9: note = Seed: LVVVGARGV (KRAS G12R)
VVVWGRRGW

SEQ ID NO: 30395 - protein, 9 aa, synthetic construct
  source 1..9: note = Seed: LVVVGARGV (KRAS G12R)
VVVWGRRGY

SEQ ID NO: 30396 - protein, 9 aa, synthetic construct
  source 1..9: note = Seed: LVVVGARGV (KRAS G12R)
VVVWGSRGA

SEQ ID NO: 30397 - protein, 9 aa, synthetic construct
  source 1..9: note = Seed: LVVVGARGV (KRAS G12R)
VVVWGSRGF

SEQ ID NO: 30398 - protein, 9 aa, synthetic construct
  source 1..9: note = Seed: LVVVGARGV (KRAS G12R)
VVVWGSRGI

SEQ ID NO: 30399 - protein, 9 aa, synthetic construct
  source 1..9: note = Seed: LVVVGARGV (KRAS G12R)
VVVWGSRGK

SEQ ID NO: 30400 - protein, 9 aa, synthetic construct
  source 1..9: note = Seed: LVVVGARGV (KRAS G12R)
VVVWGSRGL

SEQ ID NO: 30401 - protein, 9 aa, synthetic construct
  source 1..9: note = Seed: LVVVGARGV (KRAS G12R)
VVVWGSRGM

SEQ ID NO: 30402 - protein, 9 aa, synthetic construct
  source 1..9: note = Seed: LVVVGARGV (KRAS G12R)
VVVWGSRGR

SEQ ID NO: 30403 - protein, 9 aa, synthetic construct
  source 1..9: note = Seed: LVVVGARGV (KRAS G12R)
VVVWGSRGV

SEQ ID NO: 30404 - protein, 9 aa, synthetic construct
  source 1..9: note = Seed: LVVVGARGV (KRAS G12R)
VVVWGTRGF

SEQ ID NO: 30405 - protein, 9 aa, synthetic construct
  source 1..9: note = Seed: LVVVGARGV (KRAS G12R)
VVVWGTRGI

SEQ ID NO: 30406 - protein, 9 aa, synthetic construct
  source 1..9: note = Seed: LVVVGARGV (KRAS G12R)
VVVWGTRGK

SEQ ID NO: 30407 - protein, 9 aa, synthetic construct
  source 1..9: note = Seed: LVVVGARGV (KRAS G12R)
VVVWGTRGL

SEQ ID NO: 30408 - protein, 9 aa, synthetic construct
  source 1..9: note = Seed: LVVVGARGV (KRAS G12R)
VVVWGTRGM

SEQ ID NO: 30409 - protein, 9 aa, synthetic construct
  source 1..9: note = Seed: LVVVGARGV (KRAS G12R)
VVVWGTRGR

SEQ ID NO: 30410 - protein, 9 aa, synthetic construct
  source 1..9: note = Seed: LVVVGARGV (KRAS G12R)
VVVWGTRGV

SEQ ID NO: 30411 - protein, 9 aa, synthetic construct
  source 1..9: note = Seed: LVVVGARGV (KRAS G12R)
VVVWGVRGH

SEQ ID NO: 30412 - protein, 9 aa, synthetic construct
  source 1..9: note = Seed: LVVVGARGV (KRAS G12R)
VVVWGVRGI

SEQ ID NO: 30413 - protein, 9 aa, synthetic construct
  source 1..9: note = Seed: LVVVGARGV (KRAS G12R)
VVVWGVRGK

SEQ ID NO: 30414 - protein, 9 aa, synthetic construct
  source 1..9: note = Seed: LVVVGARGV (KRAS G12R)
VVVWGVRGL

SEQ ID NO: 30415 - protein, 9 aa, synthetic construct
  source 1..9: note = Seed: LVVVGARGV (KRAS G12R)
VVVWGVRGM

SEQ ID NO: 30416 - protein, 9 aa, synthetic construct
  source 1..9: note = Seed: LVVVGARGV (KRAS G12R)
VVVWGVRGR

SEQ ID NO: 30417 - protein, 9 aa, synthetic construct
  source 1..9: note = Seed: LVVVGARGV (KRAS G12R)
VVVWGWRGR

SEQ ID NO: 30418 - protein, 9 aa, synthetic construct
  source 1..9: note = Seed: LVVVGARGV (KRAS G12R)
VVVWGYRGR

SEQ ID NO: 30419 - protein, 9 aa, synthetic construct
  source 1..9: note = Seed: LVVVGARGV (KRAS G12R)
VVVYGARGA

SEQ ID NO: 30420 - protein, 9 aa, synthetic construct
  source 1..9: note = Seed: LVVVGARGV (KRAS G12R)
VVVYGARGF

SEQ ID NO: 30421 - protein, 9 aa, synthetic construct
  source 1..9: note = Seed: LVVVGARGV (KRAS G12R)
VVVYGARGH

SEQ ID NO: 30422 - protein, 9 aa, synthetic construct
  source 1..9: note = Seed: LVVVGARGV (KRAS G12R)
VVVYGARGI

SEQ ID NO: 30423 - protein, 9 aa, synthetic construct
  source 1..9: note = Seed: LVVVGARGV (KRAS G12R)
VVVYGARGK

SEQ ID NO: 30424 - protein, 9 aa, synthetic construct
  source 1..9: note = Seed: LVVVGARGV (KRAS G12R)
VVVYGARGL

SEQ ID NO: 30425 - protein, 9 aa, synthetic construct
  source 1..9: note = Seed: LVVVGARGV (KRAS G12R)
VVVYGARGM

SEQ ID NO: 30426 - protein, 9 aa, synthetic construct
  source 1..9: note = Seed: LVVVGARGV (KRAS G12R)
VVVYGARGR

SEQ ID NO: 30427 - protein, 9 aa, synthetic construct
  source 1..9: note = Seed: LVVVGARGV (KRAS G12R)
VVVYGARGS

SEQ ID NO: 30428 - protein, 9 aa, synthetic construct
  source 1..9: note = Seed: LVVVGARGV (KRAS G12R)
VVVYGARGT

SEQ ID NO: 30429 - protein, 9 aa, synthetic construct
  source 1..9: note = Seed: LVVVGARGV (KRAS G12R)
VVVYGARGV

SEQ ID NO: 30430 - protein, 9 aa, synthetic construct
  source 1..9: note = Seed: LVVVGARGV (KRAS G12R)
VVVYGDRGI

SEQ ID NO: 30431 - protein, 9 aa, synthetic construct
  source 1..9: note = Seed: LVVVGARGV (KRAS G12R)
VVVYGDRGL

SEQ ID NO: 30432 - protein, 9 aa, synthetic construct
  source 1..9: note = Seed: LVVVGARGV (KRAS G12R)
VVVYGDRGV

SEQ ID NO: 30433 - protein, 9 aa, synthetic construct
  source 1..9: note = Seed: LVVVGARGV (KRAS G12R)
VVVYGGRGA

SEQ ID NO: 30434 - protein, 9 aa, synthetic construct
  source 1..9: note = Seed: LVVVGARGV (KRAS G12R)
VVVYGGRGF

SEQ ID NO: 30435 - protein, 9 aa, synthetic construct
  source 1..9: note = Seed: LVVVGARGV (KRAS G12R)
VVVYGGRGI

SEQ ID NO: 30436 - protein, 9 aa, synthetic construct
  source 1..9: note = Seed: LVVVGARGV (KRAS G12R)
VVVYGGRGL

SEQ ID NO: 30437 - protein, 9 aa, synthetic construct
  source 1..9: note = Seed: LVVVGARGV (KRAS G12R)
VVVYGGRGM

SEQ ID NO: 30438 - protein, 9 aa, synthetic construct
  source 1..9: note = Seed: LVVVGARGV (KRAS G12R)
VVVYGGRGR

SEQ ID NO: 30439 - protein, 9 aa, synthetic construct
  source 1..9: note = Seed: LVVVGARGV (KRAS G12R)
VVVYGGRGS

SEQ ID NO: 30440 - protein, 9 aa, synthetic construct
  source 1..9: note = Seed: LVVVGARGV (KRAS G12R)
VVVYGGRGT

SEQ ID NO: 30441 - protein, 9 aa, synthetic construct
  source 1..9: note = Seed: LVVVGARGV (KRAS G12R)
VVVYGGRGV

SEQ ID NO: 30442 - protein, 9 aa, synthetic construct
  source 1..9: note = Seed: LVVVGARGV (KRAS G12R)
VVVYGHRGA

SEQ ID NO: 30443 - protein, 9 aa, synthetic construct
  source 1..9: note = Seed: LVVVGARGV (KRAS G12R)
VVVYGHRGF

SEQ ID NO: 30444 - protein, 9 aa, synthetic construct
  source 1..9: note = Seed: LVVVGARGV (KRAS G12R)
VVVYGHRGH

SEQ ID NO: 30445 - protein, 9 aa, synthetic construct
  source 1..9: note = Seed: LVVVGARGV (KRAS G12R)
VVVYGHRGI

SEQ ID NO: 30446 - protein, 9 aa, synthetic construct
  source 1..9: note = Seed: LVVVGARGV (KRAS G12R)
VVVYGHRGK

SEQ ID NO: 30447 - protein, 9 aa, synthetic construct
  source 1..9: note = Seed: LVVVGARGV (KRAS G12R)
VVVYGHRGL

SEQ ID NO: 30448 - protein, 9 aa, synthetic construct
  source 1..9: note = Seed: LVVVGARGV (KRAS G12R)
VVVYGHRGM

SEQ ID NO: 30449 - protein, 9 aa, synthetic construct
  source 1..9: note = Seed: LVVVGARGV (KRAS G12R)
VVVYGHRGQ

SEQ ID NO: 30450 - protein, 9 aa, synthetic construct
  source 1..9: note = Seed: LVVVGARGV (KRAS G12R)
VVVYGHRGR

SEQ ID NO: 30451 - protein, 9 aa, synthetic construct
  source 1..9: note = Seed: LVVVGARGV (KRAS G12R)
VVVYGHRGV

SEQ ID NO: 30452 - protein, 9 aa, synthetic construct
  source 1..9: note = Seed: LVVVGARGV (KRAS G12R)
VVVYGHRGY

SEQ ID NO: 30453 - protein, 9 aa, synthetic construct
  source 1..9: note = Seed: LVVVGARGV (KRAS G12R)
VVVYGIRGA

SEQ ID NO: 30454 - protein, 9 aa, synthetic construct
  source 1..9: note = Seed: LVVVGARGV (KRAS G12R)
VVVYGIRGF

SEQ ID NO: 30455 - protein, 9 aa, synthetic construct
  source 1..9: note = Seed: LVVVGARGV (KRAS G12R)
VVVYGIRGI

SEQ ID NO: 30456 - protein, 9 aa, synthetic construct
  source 1..9: note = Seed: LVVVGARGV (KRAS G12R)
VVVYGIRGK

SEQ ID NO: 30457 - protein, 9 aa, synthetic construct
  source 1..9: note = Seed: LVVVGARGV (KRAS G12R)
VVVYGIRGL

SEQ ID NO: 30458 - protein, 9 aa, synthetic construct
  source 1..9: note = Seed: LVVVGARGV (KRAS G12R)
VVVYGIRGM

SEQ ID NO: 30459 - protein, 9 aa, synthetic construct
  source 1..9: note = Seed: LVVVGARGV (KRAS G12R)
VVVYGIRGQ

SEQ ID NO: 30460 - protein, 9 aa, synthetic construct
  source 1..9: note = Seed: LVVVGARGV (KRAS G12R)
VVVYGIRGR

SEQ ID NO: 30461 - protein, 9 aa, synthetic construct
  source 1..9: note = Seed: LVVVGARGV (KRAS G12R)
VVVYGIRGV

SEQ ID NO: 30462 - protein, 9 aa, synthetic construct
  source 1..9: note = Seed: LVVVGARGV (KRAS G12R)
VVVYGIRGY

SEQ ID NO: 30463 - protein, 9 aa, synthetic construct
  source 1..9: note = Seed: LVVVGARGV (KRAS G12R)
VVVYGKRGA

SEQ ID NO: 30464 - protein, 9 aa, synthetic construct
  source 1..9: note = Seed: LVVVGARGV (KRAS G12R)
VVVYGKRGF

SEQ ID NO: 30465 - protein, 9 aa, synthetic construct
  source 1..9: note = Seed: LVVVGARGV (KRAS G12R)
VVVYGKRGH

SEQ ID NO: 30466 - protein, 9 aa, synthetic construct
  source 1..9: note = Seed: LVVVGARGV (KRAS G12R)
VVVYGKRGI

SEQ ID NO: 30467 - protein, 9 aa, synthetic construct
  source 1..9: note = Seed: LVVVGARGV (KRAS G12R)
VVVYGKRGK

SEQ ID NO: 30468 - protein, 9 aa, synthetic construct
  source 1..9: note = Seed: LVVVGARGV (KRAS G12R)
VVVYGKRGL

SEQ ID NO: 30469 - protein, 9 aa, synthetic construct
  source 1..9: note = Seed: LVVVGARGV (KRAS G12R)
VVVYGKRGM

SEQ ID NO: 30470 - protein, 9 aa, synthetic construct
  source 1..9: note = Seed: LVVVGARGV (KRAS G12R)
VVVYGKRGP

SEQ ID NO: 30471 - protein, 9 aa, synthetic construct
  source 1..9: note = Seed: LVVVGARGV (KRAS G12R)
VVVYGKRGQ

SEQ ID NO: 30472 - protein, 9 aa, synthetic construct
  source 1..9: note = Seed: LVVVGARGV (KRAS G12R)
VVVYGKRGR

SEQ ID NO: 30473 - protein, 9 aa, synthetic construct
  source 1..9: note = Seed: LVVVGARGV (KRAS G12R)
VVVYGKRGS

SEQ ID NO: 30474 - protein, 9 aa, synthetic construct
  source 1..9: note = Seed: LVVVGARGV (KRAS G12R)
VVVYGKRGT

SEQ ID NO: 30475 - protein, 9 aa, synthetic construct
  source 1..9: note = Seed: LVVVGARGV (KRAS G12R)
VVVYGKRGV

SEQ ID NO: 30476 - protein, 9 aa, synthetic construct
  source 1..9: note = Seed: LVVVGARGV (KRAS G12R)
VVVYGKRGW

SEQ ID NO: 30477 - protein, 9 aa, synthetic construct
  source 1..9: note = Seed: LVVVGARGV (KRAS G12R)
VVVYGKRGY

SEQ ID NO: 30478 - protein, 9 aa, synthetic construct
  source 1..9: note = Seed: LVVVGARGV (KRAS G12R)
VVVYGLRGA

SEQ ID NO: 30479 - protein, 9 aa, synthetic construct
  source 1..9: note = Seed: LVVVGARGV (KRAS G12R)
VVVYGLRGK

SEQ ID NO: 30480 - protein, 9 aa, synthetic construct
  source 1..9: note = Seed: LVVVGARGV (KRAS G12R)
VVVYGLRGM

SEQ ID NO: 30481 - protein, 9 aa, synthetic construct
  source 1..9: note = Seed: LVVVGARGV (KRAS G12R)
VVVYGLRGQ

SEQ ID NO: 30482 - protein, 9 aa, synthetic construct
  source 1..9: note = Seed: LVVVGARGV (KRAS G12R)
VVVYGLRGR

SEQ ID NO: 30483 - protein, 9 aa, synthetic construct
  source 1..9: note = Seed: LVVVGARGV (KRAS G12R)
VVVYGLRGY

SEQ ID NO: 30484 - protein, 9 aa, synthetic construct
  source 1..9: note = Seed: LVVVGARGV (KRAS G12R)
VVVYGMRGA

SEQ ID NO: 30485 - protein, 9 aa, synthetic construct
  source 1..9: note = Seed: LVVVGARGV (KRAS G12R)
VVVYGMRGK

SEQ ID NO: 30486 - protein, 9 aa, synthetic construct
  source 1..9: note = Seed: LVVVGARGV (KRAS G12R)
VVVYGMRGL

SEQ ID NO: 30487 - protein, 9 aa, synthetic construct
  source 1..9: note = Seed: LVVVGARGV (KRAS G12R)
VVVYGMRGM

SEQ ID NO: 30488 - protein, 9 aa, synthetic construct
  source 1..9: note = Seed: LVVVGARGV (KRAS G12R)
VVVYGMRGR

SEQ ID NO: 30489 - protein, 9 aa, synthetic construct
  source 1..9: note = Seed: LVVVGARGV (KRAS G12R)
VVVYGNRGA

SEQ ID NO: 30490 - protein, 9 aa, synthetic construct
  source 1..9: note = Seed: LVVVGARGV (KRAS G12R)
VVVYGNRGF

SEQ ID NO: 30491 - protein, 9 aa, synthetic construct
  source 1..9: note = Seed: LVVVGARGV (KRAS G12R)
VVVYGNRGI

SEQ ID NO: 30492 - protein, 9 aa, synthetic construct
  source 1..9: note = Seed: LVVVGARGV (KRAS G12R)
VVVYGNRGK

SEQ ID NO: 30493 - protein, 9 aa, synthetic construct
  source 1..9: note = Seed: LVVVGARGV (KRAS G12R)
VVVYGNRGL

SEQ ID NO: 30494 - protein, 9 aa, synthetic construct
  source 1..9: note = Seed: LVVVGARGV (KRAS G12R)
VVVYGNRGM

SEQ ID NO: 30495 - protein, 9 aa, synthetic construct
  source 1..9: note = Seed: LVVVGARGV (KRAS G12R)
VVVYGNRGR

SEQ ID NO: 30496 - protein, 9 aa, synthetic construct
  source 1..9: note = Seed: LVVVGARGV (KRAS G12R)
VVVYGNRGS

SEQ ID NO: 30497 - protein, 9 aa, synthetic construct
  source 1..9: note = Seed: LVVVGARGV (KRAS G12R)
VVVYGNRGT

SEQ ID NO: 30498 - protein, 9 aa, synthetic construct
  source 1..9: note = Seed: LVVVGARGV (KRAS G12R)
VVVYGNRGV

SEQ ID NO: 30499 - protein, 9 aa, synthetic construct
  source 1..9: note = Seed: LVVVGARGV (KRAS G12R)
VVVYGNRGY

SEQ ID NO: 30500 - protein, 9 aa, synthetic construct
  source 1..9: note = Seed: LVVVGARGV (KRAS G12R)
VVVYGPRGI

SEQ ID NO: 30501 - protein, 9 aa, synthetic construct
  source 1..9: note = Seed: LVVVGARGV (KRAS G12R)
VVVYGPRGL

SEQ ID NO: 30502 - protein, 9 aa, synthetic construct
  source 1..9: note = Seed: LVVVGARGV (KRAS G12R)
VVVYGPRGR

SEQ ID NO: 30503 - protein, 9 aa, synthetic construct
  source 1..9: note = Seed: LVVVGARGV (KRAS G12R)
VVVYGPRGV

SEQ ID NO: 30504 - protein, 9 aa, synthetic construct
  source 1..9: note = Seed: LVVVGARGV (KRAS G12R)
VVVYGQRGL

SEQ ID NO: 30505 - protein, 9 aa, synthetic construct
  source 1..9: note = Seed: LVVVGARGV (KRAS G12R)
VVVYGQRGM

SEQ ID NO: 30506 - protein, 9 aa, synthetic construct
  source 1..9: note = Seed: LVVVGARGV (KRAS G12R)
VVVYGQRGR

SEQ ID NO: 30507 - protein, 9 aa, synthetic construct
  source 1..9: note = Seed: LVVVGARGV (KRAS G12R)
VVVYGRRGA

SEQ ID NO: 30508 - protein, 9 aa, synthetic construct
  source 1..9: note = Seed: LVVVGARGV (KRAS G12R)
VVVYGRRGC

SEQ ID NO: 30509 - protein, 9 aa, synthetic construct
  source 1..9: note = Seed: LVVVGARGV (KRAS G12R)
VVVYGRRGF

SEQ ID NO: 30510 - protein, 9 aa, synthetic construct
  source 1..9: note = Seed: LVVVGARGV (KRAS G12R)
VVVYGRRGG

SEQ ID NO: 30511 - protein, 9 aa, synthetic construct
  source 1..9: note = Seed: LVVVGARGV (KRAS G12R)
VVVYGRRGH

SEQ ID NO: 30512 - protein, 9 aa, synthetic construct
  source 1..9: note = Seed: LVVVGARGV (KRAS G12R)
VVVYGRRGI

SEQ ID NO: 30513 - protein, 9 aa, synthetic construct
  source 1..9: note = Seed: LVVVGARGV (KRAS G12R)
VVVYGRRGK

SEQ ID NO: 30514 - protein, 9 aa, synthetic construct
  source 1..9: note = Seed: LVVVGARGV (KRAS G12R)
VVVYGRRGL

SEQ ID NO: 30515 - protein, 9 aa, synthetic construct
  source 1..9: note = Seed: LVVVGARGV (KRAS G12R)
VVVYGRRGM

SEQ ID NO: 30516 - protein, 9 aa, synthetic construct
  source 1..9: note = Seed: LVVVGARGV (KRAS G12R)
VVVYGRRGN

SEQ ID NO: 30517 - protein, 9 aa, synthetic construct
  source 1..9: note = Seed: LVVVGARGV (KRAS G12R)
VVVYGRRGP

SEQ ID NO: 30518 - protein, 9 aa, synthetic construct
  source 1..9: note = Seed: LVVVGARGV (KRAS G12R)
VVVYGRRGQ

SEQ ID NO: 30519 - protein, 9 aa, synthetic construct
  source 1..9: note = Seed: LVVVGARGV (KRAS G12R)
VVVYGRRGR

SEQ ID NO: 30520 - protein, 9 aa, synthetic construct
  source 1..9: note = Seed: LVVVGARGV (KRAS G12R)
VVVYGRRGS

SEQ ID NO: 30521 - protein, 9 aa, synthetic construct
  source 1..9: note = Seed: LVVVGARGV (KRAS G12R)
VVVYGRRGT

SEQ ID NO: 30522 - protein, 9 aa, synthetic construct
  source 1..9: note = Seed: LVVVGARGV (KRAS G12R)
VVVYGRRGV

SEQ ID NO: 30523 - protein, 9 aa, synthetic construct
  source 1..9: note = Seed: LVVVGARGV (KRAS G12R)
VVVYGRRGW

SEQ ID NO: 30524 - protein, 9 aa, synthetic construct
  source 1..9: note = Seed: LVVVGARGV (KRAS G12R)
VVVYGRRGY

SEQ ID NO: 30525 - protein, 9 aa, synthetic construct
  source 1..9: note = Seed: LVVVGARGV (KRAS G12R)
VVVYGSRGA

SEQ ID NO: 30526 - protein, 9 aa, synthetic construct
  source 1..9: note = Seed: LVVVGARGV (KRAS G12R)
VVVYGSRGF

SEQ ID NO: 30527 - protein, 9 aa, synthetic construct
  source 1..9: note = Seed: LVVVGARGV (KRAS G12R)
VVVYGSRGH

SEQ ID NO: 30528 - protein, 9 aa, synthetic construct
  source 1..9: note = Seed: LVVVGARGV (KRAS G12R)
VVVYGSRGI

SEQ ID NO: 30529 - protein, 9 aa, synthetic construct
  source 1..9: note = Seed: LVVVGARGV (KRAS G12R)
VVVYGSRGK

SEQ ID NO: 30530 - protein, 9 aa, synthetic construct
  source 1..9: note = Seed: LVVVGARGV (KRAS G12R)
VVVYGSRGL

SEQ ID NO: 30531 - protein, 9 aa, synthetic construct
  source 1..9: note = Seed: LVVVGARGV (KRAS G12R)
VVVYGSRGM

SEQ ID NO: 30532 - protein, 9 aa, synthetic construct
  source 1..9: note = Seed: LVVVGARGV (KRAS G12R)
VVVYGSRGR

SEQ ID NO: 30533 - protein, 9 aa, synthetic construct
  source 1..9: note = Seed: LVVVGARGV (KRAS G12R)
VVVYGSRGS

SEQ ID NO: 30534 - protein, 9 aa, synthetic construct
  source 1..9: note = Seed: LVVVGARGV (KRAS G12R)
VVVYGSRGT

SEQ ID NO: 30535 - protein, 9 aa, synthetic construct
  source 1..9: note = Seed: LVVVGARGV (KRAS G12R)
VVVYGSRGV

SEQ ID NO: 30536 - protein, 9 aa, synthetic construct
  source 1..9: note = Seed: LVVVGARGV (KRAS G12R)
VVVYGSRGY

SEQ ID NO: 30537 - protein, 9 aa, synthetic construct
  source 1..9: note = Seed: LVVVGARGV (KRAS G12R)
VVVYGTRGA

SEQ ID NO: 30538 - protein, 9 aa, synthetic construct
  source 1..9: note = Seed: LVVVGARGV (KRAS G12R)
VVVYGTRGF

SEQ ID NO: 30539 - protein, 9 aa, synthetic construct
  source 1..9: note = Seed: LVVVGARGV (KRAS G12R)
VVVYGTRGH

SEQ ID NO: 30540 - protein, 9 aa, synthetic construct
  source 1..9: note = Seed: LVVVGARGV (KRAS G12R)
VVVYGTRGI

SEQ ID NO: 30541 - protein, 9 aa, synthetic construct
  source 1..9: note = Seed: LVVVGARGV (KRAS G12R)
VVVYGTRGK

SEQ ID NO: 30542 - protein, 9 aa, synthetic construct
  source 1..9: note = Seed: LVVVGARGV (KRAS G12R)
VVVYGTRGL

SEQ ID NO: 30543 - protein, 9 aa, synthetic construct
  source 1..9: note = Seed: LVVVGARGV (KRAS G12R)
VVVYGTRGM

SEQ ID NO: 30544 - protein, 9 aa, synthetic construct
  source 1..9: note = Seed: LVVVGARGV (KRAS G12R)
VVVYGTRGR

SEQ ID NO: 30545 - protein, 9 aa, synthetic construct
  source 1..9: note = Seed: LVVVGARGV (KRAS G12R)
VVVYGTRGT

SEQ ID NO: 30546 - protein, 9 aa, synthetic construct
  source 1..9: note = Seed: LVVVGARGV (KRAS G12R)
VVVYGTRGV

SEQ ID NO: 30547 - protein, 9 aa, synthetic construct
  source 1..9: note = Seed: LVVVGARGV (KRAS G12R)
VVVYGVRGA

SEQ ID NO: 30548 - protein, 9 aa, synthetic construct
  source 1..9: note = Seed: LVVVGARGV (KRAS G12R)
VVVYGVRGF

SEQ ID NO: 30549 - protein, 9 aa, synthetic construct
  source 1..9: note = Seed: LVVVGARGV (KRAS G12R)
VVVYGVRGH

SEQ ID NO: 30550 - protein, 9 aa, synthetic construct
  source 1..9: note = Seed: LVVVGARGV (KRAS G12R)
VVVYGVRGI

SEQ ID NO: 30551 - protein, 9 aa, synthetic construct
  source 1..9: note = Seed: LVVVGARGV (KRAS G12R)
VVVYGVRGK

SEQ ID NO: 30552 - protein, 9 aa, synthetic construct
  source 1..9: note = Seed: LVVVGARGV (KRAS G12R)
VVVYGVRGL

SEQ ID NO: 30553 - protein, 9 aa, synthetic construct
  source 1..9: note = Seed: LVVVGARGV (KRAS G12R)
VVVYGVRGM

SEQ ID NO: 30554 - protein, 9 aa, synthetic construct
  source 1..9: note = Seed: LVVVGARGV (KRAS G12R)
VVVYGVRGR

SEQ ID NO: 30555 - protein, 9 aa, synthetic construct
  source 1..9: note = Seed: LVVVGARGV (KRAS G12R)
VVVYGVRGV

SEQ ID NO: 30556 - protein, 9 aa, synthetic construct
  source 1..9: note = Seed: LVVVGARGV (KRAS G12R)
VVVYGVRGY

SEQ ID NO: 30557 - protein, 9 aa, synthetic construct
  source 1..9: note = Seed: LVVVGARGV (KRAS G12R)
VVVYGYRGR

SEQ ID NO: 30558 - protein, 9 aa, synthetic construct
  source 1..9: note = Seed: LVVVGARGV (KRAS G12R)
WVVAGARGA

SEQ ID NO: 30559 - protein, 9 aa, synthetic construct
  source 1..9: note = Seed: LVVVGARGV (KRAS G12R)
WVVAGARGC

SEQ ID NO: 30560 - protein, 9 aa, synthetic construct
  source 1..9: note = Seed: LVVVGARGV (KRAS G12R)
WVVAGARGF

SEQ ID NO: 30561 - protein, 9 aa, synthetic construct
  source 1..9: note = Seed: LVVVGARGV (KRAS G12R)
WVVAGARGG

SEQ ID NO: 30562 - protein, 9 aa, synthetic construct
  source 1..9: note = Seed: LVVVGARGV (KRAS G12R)
WVVAGARGH

SEQ ID NO: 30563 - protein, 9 aa, synthetic construct
  source 1..9: note = Seed: LVVVGARGV (KRAS G12R)
WVVAGARGI

SEQ ID NO: 30564 - protein, 9 aa, synthetic construct
  source 1..9: note = Seed: LVVVGARGV (KRAS G12R)
WVVAGARGK

SEQ ID NO: 30565 - protein, 9 aa, synthetic construct
  source 1..9: note = Seed: LVVVGARGV (KRAS G12R)
WVVAGARGL

SEQ ID NO: 30566 - protein, 9 aa, synthetic construct
  source 1..9: note = Seed: LVVVGARGV (KRAS G12R)
WVVAGARGM

SEQ ID NO: 30567 - protein, 9 aa, synthetic construct
  source 1..9: note = Seed: LVVVGARGV (KRAS G12R)
WVVAGARGN

SEQ ID NO: 30568 - protein, 9 aa, synthetic construct
  source 1..9: note = Seed: LVVVGARGV (KRAS G12R)
WVVAGARGP

SEQ ID NO: 30569 - protein, 9 aa, synthetic construct
  source 1..9: note = Seed: LVVVGARGV (KRAS G12R)
WVVAGARGQ

SEQ ID NO: 30570 - protein, 9 aa, synthetic construct
  source 1..9: note = Seed: LVVVGARGV (KRAS G12R)
WVVAGARGR

SEQ ID NO: 30571 - protein, 9 aa, synthetic construct
  source 1..9: note = Seed: LVVVGARGV (KRAS G12R)
WVVAGARGS

SEQ ID NO: 30572 - protein, 9 aa, synthetic construct
  source 1..9: note = Seed: LVVVGARGV (KRAS G12R)
WVVAGARGT

SEQ ID NO: 30573 - protein, 9 aa, synthetic construct
  source 1..9: note = Seed: LVVVGARGV (KRAS G12R)
WVVAGARGV

SEQ ID NO: 30574 - protein, 9 aa, synthetic construct
  source 1..9: note = Seed: LVVVGARGV (KRAS G12R)
WVVAGARGW

SEQ ID NO: 30575 - protein, 9 aa, synthetic construct
  source 1..9: note = Seed: LVVVGARGV (KRAS G12R)
WVVAGARGY

SEQ ID NO: 30576 - protein, 9 aa, synthetic construct
  source 1..9: note = Seed: LVVVGARGV (KRAS G12R)
WVVAGCRGI

SEQ ID NO: 30577 - protein, 9 aa, synthetic construct
  source 1..9: note = Seed: LVVVGARGV (KRAS G12R)
WVVAGCRGL

SEQ ID NO: 30578 - protein, 9 aa, synthetic construct
  source 1..9: note = Seed: LVVVGARGV (KRAS G12R)
WVVAGCRGV

SEQ ID NO: 30579 - protein, 9 aa, synthetic construct
  source 1..9: note = Seed: LVVVGARGV (KRAS G12R)
WVVAGDRGL

SEQ ID NO: 30580 - protein, 9 aa, synthetic construct
  source 1..9: note = Seed: LVVVGARGV (KRAS G12R)
WVVAGFRGI

SEQ ID NO: 30581 - protein, 9 aa, synthetic construct
  source 1..9: note = Seed: LVVVGARGV (KRAS G12R)
WVVAGFRGL

SEQ ID NO: 30582 - protein, 9 aa, synthetic construct
  source 1..9: note = Seed: LVVVGARGV (KRAS G12R)
WVVAGFRGV

SEQ ID NO: 30583 - protein, 9 aa, synthetic construct
  source 1..9: note = Seed: LVVVGARGV (KRAS G12R)
WVVAGGRGA

SEQ ID NO: 30584 - protein, 9 aa, synthetic construct
  source 1..9: note = Seed: LVVVGARGV (KRAS G12R)
WVVAGGRGC

SEQ ID NO: 30585 - protein, 9 aa, synthetic construct
  source 1..9: note = Seed: LVVVGARGV (KRAS G12R)
WVVAGGRGF

SEQ ID NO: 30586 - protein, 9 aa, synthetic construct
  source 1..9: note = Seed: LVVVGARGV (KRAS G12R)
WVVAGGRGG

SEQ ID NO: 30587 - protein, 9 aa, synthetic construct
  source 1..9: note = Seed: LVVVGARGV (KRAS G12R)
WVVAGGRGI

SEQ ID NO: 30588 - protein, 9 aa, synthetic construct
  source 1..9: note = Seed: LVVVGARGV (KRAS G12R)
WVVAGGRGL

SEQ ID NO: 30589 - protein, 9 aa, synthetic construct
  source 1..9: note = Seed: LVVVGARGV (KRAS G12R)
WVVAGGRGM

SEQ ID NO: 30590 - protein, 9 aa, synthetic construct
  source 1..9: note = Seed: LVVVGARGV (KRAS G12R)
WVVAGGRGN

SEQ ID NO: 30591 - protein, 9 aa, synthetic construct
  source 1..9: note = Seed: LVVVGARGV (KRAS G12R)
WVVAGGRGS

SEQ ID NO: 30592 - protein, 9 aa, synthetic construct
  source 1..9: note = Seed: LVVVGARGV (KRAS G12R)
WVVAGGRGT

SEQ ID NO: 30593 - protein, 9 aa, synthetic construct
  source 1..9: note = Seed: LVVVGARGV (KRAS G12R)
WVVAGGRGV

SEQ ID NO: 30594 - protein, 9 aa, synthetic construct
  source 1..9: note = Seed: LVVVGARGV (KRAS G12R)
WVVAGGRGY

SEQ ID NO: 30595 - protein, 9 aa, synthetic construct
  source 1..9: note = Seed: LVVVGARGV (KRAS G12R)
WVVAGHRGL

SEQ ID NO: 30596 - protein, 9 aa, synthetic construct
  source 1..9: note = Seed: LVVVGARGV (KRAS G12R)
WVVAGIRGA

SEQ ID NO: 30597 - protein, 9 aa, synthetic construct
  source 1..9: note = Seed: LVVVGARGV (KRAS G12R)
WVVAGIRGI

SEQ ID NO: 30598 - protein, 9 aa, synthetic construct
  source 1..9: note = Seed: LVVVGARGV (KRAS G12R)
WVVAGIRGL

SEQ ID NO: 30599 - protein, 9 aa, synthetic construct
  source 1..9: note = Seed: LVVVGARGV (KRAS G12R)
WVVAGIRGM

SEQ ID NO: 30600 - protein, 9 aa, synthetic construct
  source 1..9: note = Seed: LVVVGARGV (KRAS G12R)
WVVAGIRGN

SEQ ID NO: 30601 - protein, 9 aa, synthetic construct
  source 1..9: note = Seed: LVVVGARGV (KRAS G12R)
WVVAGIRGS

SEQ ID NO: 30602 - protein, 9 aa, synthetic construct
  source 1..9: note = Seed: LVVVGARGV (KRAS G12R)
WVVAGIRGT

SEQ ID NO: 30603 - protein, 9 aa, synthetic construct
  source 1..9: note = Seed: LVVVGARGV (KRAS G12R)
WVVAGIRGV

SEQ ID NO: 30604 - protein, 9 aa, synthetic construct
  source 1..9: note = Seed: LVVVGARGV (KRAS G12R)
WVVAGKRGA

SEQ ID NO: 30605 - protein, 9 aa, synthetic construct
  source 1..9: note = Seed: LVVVGARGV (KRAS G12R)
WVVAGKRGF

SEQ ID NO: 30606 - protein, 9 aa, synthetic construct
  source 1..9: note = Seed: LVVVGARGV (KRAS G12R)
WVVAGKRGH

SEQ ID NO: 30607 - protein, 9 aa, synthetic construct
  source 1..9: note = Seed: LVVVGARGV (KRAS G12R)
WVVAGKRGI

SEQ ID NO: 30608 - protein, 9 aa, synthetic construct
  source 1..9: note = Seed: LVVVGARGV (KRAS G12R)
WVVAGKRGK

SEQ ID NO: 30609 - protein, 9 aa, synthetic construct
  source 1..9: note = Seed: LVVVGARGV (KRAS G12R)
WVVAGKRGL

SEQ ID NO: 30610 - protein, 9 aa, synthetic construct
  source 1..9: note = Seed: LVVVGARGV (KRAS G12R)
WVVAGKRGM

SEQ ID NO: 30611 - protein, 9 aa, synthetic construct
  source 1..9: note = Seed: LVVVGARGV (KRAS G12R)
WVVAGKRGQ

SEQ ID NO: 30612 - protein, 9 aa, synthetic construct
  source 1..9: note = Seed: LVVVGARGV (KRAS G12R)
WVVAGKRGR

SEQ ID NO: 30613 - protein, 9 aa, synthetic construct
  source 1..9: note = Seed: LVVVGARGV (KRAS G12R)
WVVAGKRGS

SEQ ID NO: 30614 - protein, 9 aa, synthetic construct
  source 1..9: note = Seed: LVVVGARGV (KRAS G12R)
WVVAGKRGT

SEQ ID NO: 30615 - protein, 9 aa, synthetic construct
  source 1..9: note = Seed: LVVVGARGV (KRAS G12R)
WVVAGKRGV

SEQ ID NO: 30616 - protein, 9 aa, synthetic construct
  source 1..9: note = Seed: LVVVGARGV (KRAS G12R)
WVVAGKRGW

SEQ ID NO: 30617 - protein, 9 aa, synthetic construct
  source 1..9: note = Seed: LVVVGARGV (KRAS G12R)
WVVAGKRGY

SEQ ID NO: 30618 - protein, 9 aa, synthetic construct
  source 1..9: note = Seed: LVVVGARGV (KRAS G12R)
WVVAGLRGA

SEQ ID NO: 30619 - protein, 9 aa, synthetic construct
  source 1..9: note = Seed: LVVVGARGV (KRAS G12R)
WVVAGLRGI

SEQ ID NO: 30620 - protein, 9 aa, synthetic construct
  source 1..9: note = Seed: LVVVGARGV (KRAS G12R)
WVVAGLRGL

SEQ ID NO: 30621 - protein, 9 aa, synthetic construct
  source 1..9: note = Seed: LVVVGARGV (KRAS G12R)
WVVAGLRGM

SEQ ID NO: 30622 - protein, 9 aa, synthetic construct
  source 1..9: note = Seed: LVVVGARGV (KRAS G12R)
WVVAGLRGV

SEQ ID NO: 30623 - protein, 9 aa, synthetic construct
  source 1..9: note = Seed: LVVVGARGV (KRAS G12R)
WVVAGMRGA

SEQ ID NO: 30624 - protein, 9 aa, synthetic construct
  source 1..9: note = Seed: LVVVGARGV (KRAS G12R)
WVVAGMRGI

SEQ ID NO: 30625 - protein, 9 aa, synthetic construct
  source 1..9: note = Seed: LVVVGARGV (KRAS G12R)
WVVAGMRGL

SEQ ID NO: 30626 - protein, 9 aa, synthetic construct
  source 1..9: note = Seed: LVVVGARGV (KRAS G12R)
WVVAGMRGM

SEQ ID NO: 30627 - protein, 9 aa, synthetic construct
  source 1..9: note = Seed: LVVVGARGV (KRAS G12R)
WVVAGMRGV

SEQ ID NO: 30628 - protein, 9 aa, synthetic construct
  source 1..9: note = Seed: LVVVGARGV (KRAS G12R)
WVVAGNRGA

SEQ ID NO: 30629 - protein, 9 aa, synthetic construct
  source 1..9: note = Seed: LVVVGARGV (KRAS G12R)
WVVAGNRGF

SEQ ID NO: 30630 - protein, 9 aa, synthetic construct
  source 1..9: note = Seed: LVVVGARGV (KRAS G12R)
WVVAGNRGI

SEQ ID NO: 30631 - protein, 9 aa, synthetic construct
  source 1..9: note = Seed: LVVVGARGV (KRAS G12R)
WVVAGNRGL

SEQ ID NO: 30632 - protein, 9 aa, synthetic construct
  source 1..9: note = Seed: LVVVGARGV (KRAS G12R)
WVVAGNRGM

SEQ ID NO: 30633 - protein, 9 aa, synthetic construct
  source 1..9: note = Seed: LVVVGARGV (KRAS G12R)
WVVAGNRGN

SEQ ID NO: 30634 - protein, 9 aa, synthetic construct
  source 1..9: note = Seed: LVVVGARGV (KRAS G12R)
WVVAGNRGS

SEQ ID NO: 30635 - protein, 9 aa, synthetic construct
  source 1..9: note = Seed: LVVVGARGV (KRAS G12R)
WVVAGNRGT

SEQ ID NO: 30636 - protein, 9 aa, synthetic construct
  source 1..9: note = Seed: LVVVGARGV (KRAS G12R)
WVVAGNRGV

SEQ ID NO: 30637 - protein, 9 aa, synthetic construct
  source 1..9: note = Seed: LVVVGARGV (KRAS G12R)
WVVAGPRGA

SEQ ID NO: 30638 - protein, 9 aa, synthetic construct
  source 1..9: note = Seed: LVVVGARGV (KRAS G12R)
WVVAGPRGF

SEQ ID NO: 30639 - protein, 9 aa, synthetic construct
  source 1..9: note = Seed: LVVVGARGV (KRAS G12R)
WVVAGPRGI

SEQ ID NO: 30640 - protein, 9 aa, synthetic construct
  source 1..9: note = Seed: LVVVGARGV (KRAS G12R)
WVVAGPRGL

SEQ ID NO: 30641 - protein, 9 aa, synthetic construct
  source 1..9: note = Seed: LVVVGARGV (KRAS G12R)
WVVAGPRGM

SEQ ID NO: 30642 - protein, 9 aa, synthetic construct
  source 1..9: note = Seed: LVVVGARGV (KRAS G12R)
WVVAGPRGN

SEQ ID NO: 30643 - protein, 9 aa, synthetic construct
  source 1..9: note = Seed: LVVVGARGV (KRAS G12R)
WVVAGPRGS

SEQ ID NO: 30644 - protein, 9 aa, synthetic construct
  source 1..9: note = Seed: LVVVGARGV (KRAS G12R)
WVVAGPRGT

SEQ ID NO: 30645 - protein, 9 aa, synthetic construct
  source 1..9: note = Seed: LVVVGARGV (KRAS G12R)
WVVAGPRGV

SEQ ID NO: 30646 - protein, 9 aa, synthetic construct
  source 1..9: note = Seed: LVVVGARGV (KRAS G12R)
WVVAGPRGW

SEQ ID NO: 30647 - protein, 9 aa, synthetic construct
  source 1..9: note = Seed: LVVVGARGV (KRAS G12R)
WVVAGQRGI

SEQ ID NO: 30648 - protein, 9 aa, synthetic construct
  source 1..9: note = Seed: LVVVGARGV (KRAS G12R)
WVVAGQRGL

SEQ ID NO: 30649 - protein, 9 aa, synthetic construct
  source 1..9: note = Seed: LVVVGARGV (KRAS G12R)
WVVAGQRGV

SEQ ID NO: 30650 - protein, 9 aa, synthetic construct
  source 1..9: note = Seed: LVVVGARGV (KRAS G12R)
WVVAGRRGA

SEQ ID NO: 30651 - protein, 9 aa, synthetic construct
  source 1..9: note = Seed: LVVVGARGV (KRAS G12R)
WVVAGRRGF

SEQ ID NO: 30652 - protein, 9 aa, synthetic construct
  source 1..9: note = Seed: LVVVGARGV (KRAS G12R)
WVVAGRRGG

SEQ ID NO: 30653 - protein, 9 aa, synthetic construct
  source 1..9: note = Seed: LVVVGARGV (KRAS G12R)
WVVAGRRGH

SEQ ID NO: 30654 - protein, 9 aa, synthetic construct
  source 1..9: note = Seed: LVVVGARGV (KRAS G12R)
WVVAGRRGI

SEQ ID NO: 30655 - protein, 9 aa, synthetic construct
  source 1..9: note = Seed: LVVVGARGV (KRAS G12R)
WVVAGRRGK

SEQ ID NO: 30656 - protein, 9 aa, synthetic construct
  source 1..9: note = Seed: LVVVGARGV (KRAS G12R)
WVVAGRRGL

SEQ ID NO: 30657 - protein, 9 aa, synthetic construct
  source 1..9: note = Seed: LVVVGARGV (KRAS G12R)
WVVAGRRGM

SEQ ID NO: 30658 - protein, 9 aa, synthetic construct
  source 1..9: note = Seed: LVVVGARGV (KRAS G12R)
WVVAGRRGN

SEQ ID NO: 30659 - protein, 9 aa, synthetic construct
  source 1..9: note = Seed: LVVVGARGV (KRAS G12R)
WVVAGRRGQ

SEQ ID NO: 30660 - protein, 9 aa, synthetic construct
  source 1..9: note = Seed: LVVVGARGV (KRAS G12R)
WVVAGRRGR

SEQ ID NO: 30661 - protein, 9 aa, synthetic construct
  source 1..9: note = Seed: LVVVGARGV (KRAS G12R)
WVVAGRRGS

SEQ ID NO: 30662 - protein, 9 aa, synthetic construct
  source 1..9: note = Seed: LVVVGARGV (KRAS G12R)
WVVAGRRGT

SEQ ID NO: 30663 - protein, 9 aa, synthetic construct
  source 1..9: note = Seed: LVVVGARGV (KRAS G12R)
WVVAGRRGV

SEQ ID NO: 30664 - protein, 9 aa, synthetic construct
  source 1..9: note = Seed: LVVVGARGV (KRAS G12R)
WVVAGRRGW

SEQ ID NO: 30665 - protein, 9 aa, synthetic construct
  source 1..9: note = Seed: LVVVGARGV (KRAS G12R)
WVVAGRRGY

SEQ ID NO: 30666 - protein, 9 aa, synthetic construct
  source 1..9: note = Seed: LVVVGARGV (KRAS G12R)
WVVAGSRGA

SEQ ID NO: 30667 - protein, 9 aa, synthetic construct
  source 1..9: note = Seed: LVVVGARGV (KRAS G12R)
WVVAGSRGC

SEQ ID NO: 30668 - protein, 9 aa, synthetic construct
  source 1..9: note = Seed: LVVVGARGV (KRAS G12R)
WVVAGSRGF

SEQ ID NO: 30669 - protein, 9 aa, synthetic construct
  source 1..9: note = Seed: LVVVGARGV (KRAS G12R)
WVVAGSRGG

SEQ ID NO: 30670 - protein, 9 aa, synthetic construct
  source 1..9: note = Seed: LVVVGARGV (KRAS G12R)
WVVAGSRGH

SEQ ID NO: 30671 - protein, 9 aa, synthetic construct
  source 1..9: note = Seed: LVVVGARGV (KRAS G12R)
WVVAGSRGI

SEQ ID NO: 30672 - protein, 9 aa, synthetic construct
  source 1..9: note = Seed: LVVVGARGV (KRAS G12R)
WVVAGSRGL

SEQ ID NO: 30673 - protein, 9 aa, synthetic construct
  source 1..9: note = Seed: LVVVGARGV (KRAS G12R)
WVVAGSRGM

SEQ ID NO: 30674 - protein, 9 aa, synthetic construct
  source 1..9: note = Seed: LVVVGARGV (KRAS G12R)
WVVAGSRGN

SEQ ID NO: 30675 - protein, 9 aa, synthetic construct
  source 1..9: note = Seed: LVVVGARGV (KRAS G12R)
WVVAGSRGS

SEQ ID NO: 30676 - protein, 9 aa, synthetic construct
  source 1..9: note = Seed: LVVVGARGV (KRAS G12R)
WVVAGSRGT

SEQ ID NO: 30677 - protein, 9 aa, synthetic construct
  source 1..9: note = Seed: LVVVGARGV (KRAS G12R)
WVVAGSRGV

SEQ ID NO: 30678 - protein, 9 aa, synthetic construct
  source 1..9: note = Seed: LVVVGARGV (KRAS G12R)
WVVAGSRGW

SEQ ID NO: 30679 - protein, 9 aa, synthetic construct
  source 1..9: note = Seed: LVVVGARGV (KRAS G12R)
WVVAGSRGY

SEQ ID NO: 30680 - protein, 9 aa, synthetic construct
  source 1..9: note = Seed: LVVVGARGV (KRAS G12R)
WVVAGTRGA

SEQ ID NO: 30681 - protein, 9 aa, synthetic construct
  source 1..9: note = Seed: LVVVGARGV (KRAS G12R)
WVVAGTRGF

SEQ ID NO: 30682 - protein, 9 aa, synthetic construct
  source 1..9: note = Seed: LVVVGARGV (KRAS G12R)
WVVAGTRGI

SEQ ID NO: 30683 - protein, 9 aa, synthetic construct
  source 1..9: note = Seed: LVVVGARGV (KRAS G12R)
WVVAGTRGL

SEQ ID NO: 30684 - protein, 9 aa, synthetic construct
  source 1..9: note = Seed: LVVVGARGV (KRAS G12R)
WVVAGTRGM

SEQ ID NO: 30685 - protein, 9 aa, synthetic construct
  source 1..9: note = Seed: LVVVGARGV (KRAS G12R)
WVVAGTRGN

SEQ ID NO: 30686 - protein, 9 aa, synthetic construct
  source 1..9: note = Seed: LVVVGARGV (KRAS G12R)
WVVAGTRGS

SEQ ID NO: 30687 - protein, 9 aa, synthetic construct
  source 1..9: note = Seed: LVVVGARGV (KRAS G12R)
WVVAGTRGT

SEQ ID NO: 30688 - protein, 9 aa, synthetic construct
  source 1..9: note = Seed: LVVVGARGV (KRAS G12R)
WVVAGTRGV

SEQ ID NO: 30689 - protein, 9 aa, synthetic construct
  source 1..9: note = Seed: LVVVGARGV (KRAS G12R)
WVVAGVRGA

SEQ ID NO: 30690 - protein, 9 aa, synthetic construct
  source 1..9: note = Seed: LVVVGARGV (KRAS G12R)
WVVAGVRGF

SEQ ID NO: 30691 - protein, 9 aa, synthetic construct
  source 1..9: note = Seed: LVVVGARGV (KRAS G12R)
WVVAGVRGG

SEQ ID NO: 30692 - protein, 9 aa, synthetic construct
  source 1..9: note = Seed: LVVVGARGV (KRAS G12R)
WVVAGVRGH

SEQ ID NO: 30693 - protein, 9 aa, synthetic construct
  source 1..9: note = Seed: LVVVGARGV (KRAS G12R)
WVVAGVRGI

SEQ ID NO: 30694 - protein, 9 aa, synthetic construct
  source 1..9: note = Seed: LVVVGARGV (KRAS G12R)
WVVAGVRGL

SEQ ID NO: 30695 - protein, 9 aa, synthetic construct
  source 1..9: note = Seed: LVVVGARGV (KRAS G12R)
WVVAGVRGM

SEQ ID NO: 30696 - protein, 9 aa, synthetic construct
  source 1..9: note = Seed: LVVVGARGV (KRAS G12R)
WVVAGVRGN

SEQ ID NO: 30697 - protein, 9 aa, synthetic construct
  source 1..9: note = Seed: LVVVGARGV (KRAS G12R)
WVVAGVRGS

SEQ ID NO: 30698 - protein, 9 aa, synthetic construct
  source 1..9: note = Seed: LVVVGARGV (KRAS G12R)
WVVAGVRGT

SEQ ID NO: 30699 - protein, 9 aa, synthetic construct
  source 1..9: note = Seed: LVVVGARGV (KRAS G12R)
WVVAGVRGV

SEQ ID NO: 30700 - protein, 9 aa, synthetic construct
  source 1..9: note = Seed: LVVVGARGV (KRAS G12R)
WVVAGVRGY

SEQ ID NO: 30701 - protein, 9 aa, synthetic construct
  source 1..9: note = Seed: LVVVGARGV (KRAS G12R)
WVVAGWRGI

SEQ ID NO: 30702 - protein, 9 aa, synthetic construct
  source 1..9: note = Seed: LVVVGARGV (KRAS G12R)
WVVAGWRGL

SEQ ID NO: 30703 - protein, 9 aa, synthetic construct
  source 1..9: note = Seed: LVVVGARGV (KRAS G12R)
WVVAGWRGV

SEQ ID NO: 30704 - protein, 9 aa, synthetic construct
  source 1..9: note = Seed: LVVVGARGV (KRAS G12R)
WVVCGARGA

SEQ ID NO: 30705 - protein, 9 aa, synthetic construct
  source 1..9: note = Seed: LVVVGARGV (KRAS G12R)
WVVCGARGI

SEQ ID NO: 30706 - protein, 9 aa, synthetic construct
  source 1..9: note = Seed: LVVVGARGV (KRAS G12R)
WVVCGARGL

SEQ ID NO: 30707 - protein, 9 aa, synthetic construct
  source 1..9: note = Seed: LVVVGARGV (KRAS G12R)
WVVCGARGM

SEQ ID NO: 30708 - protein, 9 aa, synthetic construct
  source 1..9: note = Seed: LVVVGARGV (KRAS G12R)
WVVCGARGV

SEQ ID NO: 30709 - protein, 9 aa, synthetic construct
  source 1..9: note = Seed: LVVVGARGV (KRAS G12R)
WVVCGGRGI

SEQ ID NO: 30710 - protein, 9 aa, synthetic construct
  source 1..9: note = Seed: LVVVGARGV (KRAS G12R)
WVVCGGRGL

SEQ ID NO: 30711 - protein, 9 aa, synthetic construct
  source 1..9: note = Seed: LVVVGARGV (KRAS G12R)
WVVCGGRGV

SEQ ID NO: 30712 - protein, 9 aa, synthetic construct
  source 1..9: note = Seed: LVVVGARGV (KRAS G12R)
WVVCGNRGI

SEQ ID NO: 30713 - protein, 9 aa, synthetic construct
  source 1..9: note = Seed: LVVVGARGV (KRAS G12R)
WVVCGNRGL

SEQ ID NO: 30714 - protein, 9 aa, synthetic construct
  source 1..9: note = Seed: LVVVGARGV (KRAS G12R)
WVVCGNRGV

SEQ ID NO: 30715 - protein, 9 aa, synthetic construct
  source 1..9: note = Seed: LVVVGARGV (KRAS G12R)
WVVCGPRGI

SEQ ID NO: 30716 - protein, 9 aa, synthetic construct
  source 1..9: note = Seed: LVVVGARGV (KRAS G12R)
WVVCGPRGL

SEQ ID NO: 30717 - protein, 9 aa, synthetic construct
  source 1..9: note = Seed: LVVVGARGV (KRAS G12R)
WVVCGPRGV

SEQ ID NO: 30718 - protein, 9 aa, synthetic construct
  source 1..9: note = Seed: LVVVGARGV (KRAS G12R)
WVVCGSRGA

SEQ ID NO: 30719 - protein, 9 aa, synthetic construct
  source 1..9: note = Seed: LVVVGARGV (KRAS G12R)
WVVCGSRGI

SEQ ID NO: 30720 - protein, 9 aa, synthetic construct
  source 1..9: note = Seed: LVVVGARGV (KRAS G12R)
WVVCGSRGL

SEQ ID NO: 30721 - protein, 9 aa, synthetic construct
  source 1..9: note = Seed: LVVVGARGV (KRAS G12R)
WVVCGSRGM

SEQ ID NO: 30722 - protein, 9 aa, synthetic construct
  source 1..9: note = Seed: LVVVGARGV (KRAS G12R)
WVVCGSRGV

SEQ ID NO: 30723 - protein, 9 aa, synthetic construct
  source 1..9: note = Seed: LVVVGARGV (KRAS G12R)
WVVCGTRGI

SEQ ID NO: 30724 - protein, 9 aa, synthetic construct
  source 1..9: note = Seed: LVVVGARGV (KRAS G12R)
WVVCGTRGL

SEQ ID NO: 30725 - protein, 9 aa, synthetic construct
  source 1..9: note = Seed: LVVVGARGV (KRAS G12R)
WVVCGTRGV

SEQ ID NO: 30726 - protein, 9 aa, synthetic construct
  source 1..9: note = Seed: LVVVGARGV (KRAS G12R)
WVVDGARGA

SEQ ID NO: 30727 - protein, 9 aa, synthetic construct
  source 1..9: note = Seed: LVVVGARGV (KRAS G12R)
WVVDGARGI

SEQ ID NO: 30728 - protein, 9 aa, synthetic construct
  source 1..9: note = Seed: LVVVGARGV (KRAS G12R)
WVVDGARGL

SEQ ID NO: 30729 - protein, 9 aa, synthetic construct
  source 1..9: note = Seed: LVVVGARGV (KRAS G12R)
WVVDGARGV

SEQ ID NO: 30730 - protein, 9 aa, synthetic construct
  source 1..9: note = Seed: LVVVGARGV (KRAS G12R)
WVVDGNRGA

SEQ ID NO: 30731 - protein, 9 aa, synthetic construct
  source 1..9: note = Seed: LVVVGARGV (KRAS G12R)
WVVDGNRGI

SEQ ID NO: 30732 - protein, 9 aa, synthetic construct
  source 1..9: note = Seed: LVVVGARGV (KRAS G12R)
WVVEGARGA

SEQ ID NO: 30733 - protein, 9 aa, synthetic construct
  source 1..9: note = Seed: LVVVGARGV (KRAS G12R)
WVVEGARGF

SEQ ID NO: 30734 - protein, 9 aa, synthetic construct
  source 1..9: note = Seed: LVVVGARGV (KRAS G12R)
WVVEGARGI

SEQ ID NO: 30735 - protein, 9 aa, synthetic construct
  source 1..9: note = Seed: LVVVGARGV (KRAS G12R)
WVVEGARGL

SEQ ID NO: 30736 - protein, 9 aa, synthetic construct
  source 1..9: note = Seed: LVVVGARGV (KRAS G12R)
WVVEGARGM

SEQ ID NO: 30737 - protein, 9 aa, synthetic construct
  source 1..9: note = Seed: LVVVGARGV (KRAS G12R)
WVVEGARGS

SEQ ID NO: 30738 - protein, 9 aa, synthetic construct
  source 1..9: note = Seed: LVVVGARGV (KRAS G12R)
WVVEGARGT

SEQ ID NO: 30739 - protein, 9 aa, synthetic construct
  source 1..9: note = Seed: LVVVGARGV (KRAS G12R)
WVVEGARGV

SEQ ID NO: 30740 - protein, 9 aa, synthetic construct
  source 1..9: note = Seed: LVVVGARGV (KRAS G12R)
WVVEGFRGI

SEQ ID NO: 30741 - protein, 9 aa, synthetic construct
  source 1..9: note = Seed: LVVVGARGV (KRAS G12R)
WVVEGFRGL

SEQ ID NO: 30742 - protein, 9 aa, synthetic construct
  source 1..9: note = Seed: LVVVGARGV (KRAS G12R)
WVVEGFRGV

SEQ ID NO: 30743 - protein, 9 aa, synthetic construct
  source 1..9: note = Seed: LVVVGARGV (KRAS G12R)
WVVEGGRGA

SEQ ID NO: 30744 - protein, 9 aa, synthetic construct
  source 1..9: note = Seed: LVVVGARGV (KRAS G12R)
WVVEGGRGI

SEQ ID NO: 30745 - protein, 9 aa, synthetic construct
  source 1..9: note = Seed: LVVVGARGV (KRAS G12R)
WVVEGGRGL

SEQ ID NO: 30746 - protein, 9 aa, synthetic construct
  source 1..9: note = Seed: LVVVGARGV (KRAS G12R)
WVVEGGRGM

SEQ ID NO: 30747 - protein, 9 aa, synthetic construct
  source 1..9: note = Seed: LVVVGARGV (KRAS G12R)
WVVEGGRGS

SEQ ID NO: 30748 - protein, 9 aa, synthetic construct
  source 1..9: note = Seed: LVVVGARGV (KRAS G12R)
WVVEGGRGT

SEQ ID NO: 30749 - protein, 9 aa, synthetic construct
  source 1..9: note = Seed: LVVVGARGV (KRAS G12R)
WVVEGGRGV

SEQ ID NO: 30750 - protein, 9 aa, synthetic construct
  source 1..9: note = Seed: LVVVGARGV (KRAS G12R)
WVVEGNRGA

SEQ ID NO: 30751 - protein, 9 aa, synthetic construct
  source 1..9: note = Seed: LVVVGARGV (KRAS G12R)
WVVEGNRGI

SEQ ID NO: 30752 - protein, 9 aa, synthetic construct
  source 1..9: note = Seed: LVVVGARGV (KRAS G12R)
WVVEGNRGL

SEQ ID NO: 30753 - protein, 9 aa, synthetic construct
  source 1..9: note = Seed: LVVVGARGV (KRAS G12R)
WVVEGNRGM

SEQ ID NO: 30754 - protein, 9 aa, synthetic construct
  source 1..9: note = Seed: LVVVGARGV (KRAS G12R)
WVVEGNRGV

SEQ ID NO: 30755 - protein, 9 aa, synthetic construct
  source 1..9: note = Seed: LVVVGARGV (KRAS G12R)
WVVEGPRGA

SEQ ID NO: 30756 - protein, 9 aa, synthetic construct
  source 1..9: note = Seed: LVVVGARGV (KRAS G12R)
WVVEGPRGI

SEQ ID NO: 30757 - protein, 9 aa, synthetic construct
  source 1..9: note = Seed: LVVVGARGV (KRAS G12R)
WVVEGPRGL

SEQ ID NO: 30758 - protein, 9 aa, synthetic construct
  source 1..9: note = Seed: LVVVGARGV (KRAS G12R)
WVVEGPRGM

SEQ ID NO: 30759 - protein, 9 aa, synthetic construct
  source 1..9: note = Seed: LVVVGARGV (KRAS G12R)
WVVEGPRGV

SEQ ID NO: 30760 - protein, 9 aa, synthetic construct
  source 1..9: note = Seed: LVVVGARGV (KRAS G12R)
WVVEGSRGA

SEQ ID NO: 30761 - protein, 9 aa, synthetic construct
  source 1..9: note = Seed: LVVVGARGV (KRAS G12R)
WVVEGSRGI

SEQ ID NO: 30762 - protein, 9 aa, synthetic construct
  source 1..9: note = Seed: LVVVGARGV (KRAS G12R)
WVVEGSRGL

SEQ ID NO: 30763 - protein, 9 aa, synthetic construct
  source 1..9: note = Seed: LVVVGARGV (KRAS G12R)
WVVEGSRGM

SEQ ID NO: 30764 - protein, 9 aa, synthetic construct
  source 1..9: note = Seed: LVVVGARGV (KRAS G12R)
WVVEGSRGS

SEQ ID NO: 30765 - protein, 9 aa, synthetic construct
  source 1..9: note = Seed: LVVVGARGV (KRAS G12R)
WVVEGSRGT

SEQ ID NO: 30766 - protein, 9 aa, synthetic construct
  source 1..9: note = Seed: LVVVGARGV (KRAS G12R)
WVVEGSRGV

SEQ ID NO: 30767 - protein, 9 aa, synthetic construct
  source 1..9: note = Seed: LVVVGARGV (KRAS G12R)
WVVEGTRGA

SEQ ID NO: 30768 - protein, 9 aa, synthetic construct
  source 1..9: note = Seed: LVVVGARGV (KRAS G12R)
WVVEGTRGI

SEQ ID NO: 30769 - protein, 9 aa, synthetic construct
  source 1..9: note = Seed: LVVVGARGV (KRAS G12R)
WVVEGTRGL

SEQ ID NO: 30770 - protein, 9 aa, synthetic construct
  source 1..9: note = Seed: LVVVGARGV (KRAS G12R)
WVVEGTRGM

SEQ ID NO: 30771 - protein, 9 aa, synthetic construct
  source 1..9: note = Seed: LVVVGARGV (KRAS G12R)
WVVEGTRGV

SEQ ID NO: 30772 - protein, 9 aa, synthetic construct
  source 1..9: note = Seed: LVVVGARGV (KRAS G12R)
WVVEGVRGA

SEQ ID NO: 30773 - protein, 9 aa, synthetic construct
  source 1..9: note = Seed: LVVVGARGV (KRAS G12R)
WVVEGVRGI

SEQ ID NO: 30774 - protein, 9 aa, synthetic construct
  source 1..9: note = Seed: LVVVGARGV (KRAS G12R)
WVVEGVRGL

SEQ ID NO: 30775 - protein, 9 aa, synthetic construct
  source 1..9: note = Seed: LVVVGARGV (KRAS G12R)
WVVEGVRGV

SEQ ID NO: 30776 - protein, 9 aa, synthetic construct
  source 1..9: note = Seed: LVVVGARGV (KRAS G12R)
WVVFGARGA

SEQ ID NO: 30777 - protein, 9 aa, synthetic construct
  source 1..9: note = Seed: LVVVGARGV (KRAS G12R)
WVVFGARGF

SEQ ID NO: 30778 - protein, 9 aa, synthetic construct
  source 1..9: note = Seed: LVVVGARGV (KRAS G12R)
WVVFGARGG

SEQ ID NO: 30779 - protein, 9 aa, synthetic construct
  source 1..9: note = Seed: LVVVGARGV (KRAS G12R)
WVVFGARGI

SEQ ID NO: 30780 - protein, 9 aa, synthetic construct
  source 1..9: note = Seed: LVVVGARGV (KRAS G12R)
WVVFGARGL

SEQ ID NO: 30781 - protein, 9 aa, synthetic construct
  source 1..9: note = Seed: LVVVGARGV (KRAS G12R)
WVVFGARGM

SEQ ID NO: 30782 - protein, 9 aa, synthetic construct
  source 1..9: note = Seed: LVVVGARGV (KRAS G12R)
WVVFGARGR

SEQ ID NO: 30783 - protein, 9 aa, synthetic construct
  source 1..9: note = Seed: LVVVGARGV (KRAS G12R)
WVVFGARGS

SEQ ID NO: 30784 - protein, 9 aa, synthetic construct
  source 1..9: note = Seed: LVVVGARGV (KRAS G12R)
WVVFGARGT

SEQ ID NO: 30785 - protein, 9 aa, synthetic construct
  source 1..9: note = Seed: LVVVGARGV (KRAS G12R)
WVVFGARGV

SEQ ID NO: 30786 - protein, 9 aa, synthetic construct
  source 1..9: note = Seed: LVVVGARGV (KRAS G12R)
WVVFGFRGF

SEQ ID NO: 30787 - protein, 9 aa, synthetic construct
  source 1..9: note = Seed: LVVVGARGV (KRAS G12R)
WVVFGFRGI

SEQ ID NO: 30788 - protein, 9 aa, synthetic construct
  source 1..9: note = Seed: LVVVGARGV (KRAS G12R)
WVVFGFRGL

SEQ ID NO: 30789 - protein, 9 aa, synthetic construct
  source 1..9: note = Seed: LVVVGARGV (KRAS G12R)
WVVFGFRGV

SEQ ID NO: 30790 - protein, 9 aa, synthetic construct
  source 1..9: note = Seed: LVVVGARGV (KRAS G12R)
WVVFGGRGA

SEQ ID NO: 30791 - protein, 9 aa, synthetic construct
  source 1..9: note = Seed: LVVVGARGV (KRAS G12R)
WVVFGGRGI

SEQ ID NO: 30792 - protein, 9 aa, synthetic construct
  source 1..9: note = Seed: LVVVGARGV (KRAS G12R)
WVVFGGRGL

SEQ ID NO: 30793 - protein, 9 aa, synthetic construct
  source 1..9: note = Seed: LVVVGARGV (KRAS G12R)
WVVFGGRGM

SEQ ID NO: 30794 - protein, 9 aa, synthetic construct
  source 1..9: note = Seed: LVVVGARGV (KRAS G12R)
WVVFGGRGS

SEQ ID NO: 30795 - protein, 9 aa, synthetic construct
  source 1..9: note = Seed: LVVVGARGV (KRAS G12R)
WVVFGGRGT

SEQ ID NO: 30796 - protein, 9 aa, synthetic construct
  source 1..9: note = Seed: LVVVGARGV (KRAS G12R)
WVVFGGRGV

SEQ ID NO: 30797 - protein, 9 aa, synthetic construct
  source 1..9: note = Seed: LVVVGARGV (KRAS G12R)
WVVFGHRGA

SEQ ID NO: 30798 - protein, 9 aa, synthetic construct
  source 1..9: note = Seed: LVVVGARGV (KRAS G12R)
WVVFGHRGF

SEQ ID NO: 30799 - protein, 9 aa, synthetic construct
  source 1..9: note = Seed: LVVVGARGV (KRAS G12R)
WVVFGHRGL

SEQ ID NO: 30800 - protein, 9 aa, synthetic construct
  source 1..9: note = Seed: LVVVGARGV (KRAS G12R)
WVVFGHRGM

SEQ ID NO: 30801 - protein, 9 aa, synthetic construct
  source 1..9: note = Seed: LVVVGARGV (KRAS G12R)
WVVFGHRGR

SEQ ID NO: 30802 - protein, 9 aa, synthetic construct
  source 1..9: note = Seed: LVVVGARGV (KRAS G12R)
WVVFGHRGV

SEQ ID NO: 30803 - protein, 9 aa, synthetic construct
  source 1..9: note = Seed: LVVVGARGV (KRAS G12R)
WVVFGHRGY

SEQ ID NO: 30804 - protein, 9 aa, synthetic construct
  source 1..9: note = Seed: LVVVGARGV (KRAS G12R)
WVVFGIRGR

SEQ ID NO: 30805 - protein, 9 aa, synthetic construct
  source 1..9: note = Seed: LVVVGARGV (KRAS G12R)
WVVFGIRGV

SEQ ID NO: 30806 - protein, 9 aa, synthetic construct
  source 1..9: note = Seed: LVVVGARGV (KRAS G12R)
WVVFGKRGA

SEQ ID NO: 30807 - protein, 9 aa, synthetic construct
  source 1..9: note = Seed: LVVVGARGV (KRAS G12R)
WVVFGKRGF

SEQ ID NO: 30808 - protein, 9 aa, synthetic construct
  source 1..9: note = Seed: LVVVGARGV (KRAS G12R)
WVVFGKRGG

SEQ ID NO: 30809 - protein, 9 aa, synthetic construct
  source 1..9: note = Seed: LVVVGARGV (KRAS G12R)
WVVFGKRGH

SEQ ID NO: 30810 - protein, 9 aa, synthetic construct
  source 1..9: note = Seed: LVVVGARGV (KRAS G12R)
WVVFGKRGI

SEQ ID NO: 30811 - protein, 9 aa, synthetic construct
  source 1..9: note = Seed: LVVVGARGV (KRAS G12R)
WVVFGKRGK

SEQ ID NO: 30812 - protein, 9 aa, synthetic construct
  source 1..9: note = Seed: LVVVGARGV (KRAS G12R)
WVVFGKRGL

SEQ ID NO: 30813 - protein, 9 aa, synthetic construct
  source 1..9: note = Seed: LVVVGARGV (KRAS G12R)
WVVFGKRGM

SEQ ID NO: 30814 - protein, 9 aa, synthetic construct
  source 1..9: note = Seed: LVVVGARGV (KRAS G12R)
WVVFGKRGQ

SEQ ID NO: 30815 - protein, 9 aa, synthetic construct
  source 1..9: note = Seed: LVVVGARGV (KRAS G12R)
WVVFGKRGR

SEQ ID NO: 30816 - protein, 9 aa, synthetic construct
  source 1..9: note = Seed: LVVVGARGV (KRAS G12R)
WVVFGKRGS

SEQ ID NO: 30817 - protein, 9 aa, synthetic construct
  source 1..9: note = Seed: LVVVGARGV (KRAS G12R)
WVVFGKRGT

SEQ ID NO: 30818 - protein, 9 aa, synthetic construct
  source 1..9: note = Seed: LVVVGARGV (KRAS G12R)
WVVFGKRGV

SEQ ID NO: 30819 - protein, 9 aa, synthetic construct
  source 1..9: note = Seed: LVVVGARGV (KRAS G12R)
WVVFGKRGW

SEQ ID NO: 30820 - protein, 9 aa, synthetic construct
  source 1..9: note = Seed: LVVVGARGV (KRAS G12R)
WVVFGKRGY

SEQ ID NO: 30821 - protein, 9 aa, synthetic construct
  source 1..9: note = Seed: LVVVGARGV (KRAS G12R)
WVVFGLRGR

SEQ ID NO: 30822 - protein, 9 aa, synthetic construct
  source 1..9: note = Seed: LVVVGARGV (KRAS G12R)
WVVFGMRGR

SEQ ID NO: 30823 - protein, 9 aa, synthetic construct
  source 1..9: note = Seed: LVVVGARGV (KRAS G12R)
WVVFGNRGA

SEQ ID NO: 30824 - protein, 9 aa, synthetic construct
  source 1..9: note = Seed: LVVVGARGV (KRAS G12R)
WVVFGNRGI

SEQ ID NO: 30825 - protein, 9 aa, synthetic construct
  source 1..9: note = Seed: LVVVGARGV (KRAS G12R)
WVVFGNRGL

SEQ ID NO: 30826 - protein, 9 aa, synthetic construct
  source 1..9: note = Seed: LVVVGARGV (KRAS G12R)
WVVFGNRGM

SEQ ID NO: 30827 - protein, 9 aa, synthetic construct
  source 1..9: note = Seed: LVVVGARGV (KRAS G12R)
WVVFGNRGR

SEQ ID NO: 30828 - protein, 9 aa, synthetic construct
  source 1..9: note = Seed: LVVVGARGV (KRAS G12R)
WVVFGNRGV

SEQ ID NO: 30829 - protein, 9 aa, synthetic construct
  source 1..9: note = Seed: LVVVGARGV (KRAS G12R)
WVVFGPRGA

SEQ ID NO: 30830 - protein, 9 aa, synthetic construct
  source 1..9: note = Seed: LVVVGARGV (KRAS G12R)
WVVFGPRGI

SEQ ID NO: 30831 - protein, 9 aa, synthetic construct
  source 1..9: note = Seed: LVVVGARGV (KRAS G12R)
WVVFGPRGL

SEQ ID NO: 30832 - protein, 9 aa, synthetic construct
  source 1..9: note = Seed: LVVVGARGV (KRAS G12R)
WVVFGPRGM

SEQ ID NO: 30833 - protein, 9 aa, synthetic construct
  source 1..9: note = Seed: LVVVGARGV (KRAS G12R)
WVVFGPRGV

SEQ ID NO: 30834 - protein, 9 aa, synthetic construct
  source 1..9: note = Seed: LVVVGARGV (KRAS G12R)
WVVFGQRGR

SEQ ID NO: 30835 - protein, 9 aa, synthetic construct
  source 1..9: note = Seed: LVVVGARGV (KRAS G12R)
WVVFGRRGA

SEQ ID NO: 30836 - protein, 9 aa, synthetic construct
  source 1..9: note = Seed: LVVVGARGV (KRAS G12R)
WVVFGRRGF

SEQ ID NO: 30837 - protein, 9 aa, synthetic construct
  source 1..9: note = Seed: LVVVGARGV (KRAS G12R)
WVVFGRRGG

SEQ ID NO: 30838 - protein, 9 aa, synthetic construct
  source 1..9: note = Seed: LVVVGARGV (KRAS G12R)
WVVFGRRGH

SEQ ID NO: 30839 - protein, 9 aa, synthetic construct
  source 1..9: note = Seed: LVVVGARGV (KRAS G12R)
WVVFGRRGI

SEQ ID NO: 30840 - protein, 9 aa, synthetic construct
  source 1..9: note = Seed: LVVVGARGV (KRAS G12R)
WVVFGRRGK

SEQ ID NO: 30841 - protein, 9 aa, synthetic construct
  source 1..9: note = Seed: LVVVGARGV (KRAS G12R)
WVVFGRRGL

SEQ ID NO: 30842 - protein, 9 aa, synthetic construct
  source 1..9: note = Seed: LVVVGARGV (KRAS G12R)
WVVFGRRGM

SEQ ID NO: 30843 - protein, 9 aa, synthetic construct
  source 1..9: note = Seed: LVVVGARGV (KRAS G12R)
WVVFGRRGN

SEQ ID NO: 30844 - protein, 9 aa, synthetic construct
  source 1..9: note = Seed: LVVVGARGV (KRAS G12R)
WVVFGRRGP

SEQ ID NO: 30845 - protein, 9 aa, synthetic construct
  source 1..9: note = Seed: LVVVGARGV (KRAS G12R)
WVVFGRRGQ

SEQ ID NO: 30846 - protein, 9 aa, synthetic construct
  source 1..9: note = Seed: LVVVGARGV (KRAS G12R)
WVVFGRRGR

SEQ ID NO: 30847 - protein, 9 aa, synthetic construct
  source 1..9: note = Seed: LVVVGARGV (KRAS G12R)
WVVFGRRGS

SEQ ID NO: 30848 - protein, 9 aa, synthetic construct
  source 1..9: note = Seed: LVVVGARGV (KRAS G12R)
WVVFGRRGT

SEQ ID NO: 30849 - protein, 9 aa, synthetic construct
  source 1..9: note = Seed: LVVVGARGV (KRAS G12R)
WVVFGRRGV

SEQ ID NO: 30850 - protein, 9 aa, synthetic construct
  source 1..9: note = Seed: LVVVGARGV (KRAS G12R)
WVVFGRRGW

SEQ ID NO: 30851 - protein, 9 aa, synthetic construct
  source 1..9: note = Seed: LVVVGARGV (KRAS G12R)
WVVFGRRGY

SEQ ID NO: 30852 - protein, 9 aa, synthetic construct
  source 1..9: note = Seed: LVVVGARGV (KRAS G12R)
WVVFGSRGA

SEQ ID NO: 30853 - protein, 9 aa, synthetic construct
  source 1..9: note = Seed: LVVVGARGV (KRAS G12R)
WVVFGSRGF

SEQ ID NO: 30854 - protein, 9 aa, synthetic construct
  source 1..9: note = Seed: LVVVGARGV (KRAS G12R)
WVVFGSRGI

SEQ ID NO: 30855 - protein, 9 aa, synthetic construct
  source 1..9: note = Seed: LVVVGARGV (KRAS G12R)
WVVFGSRGK

SEQ ID NO: 30856 - protein, 9 aa, synthetic construct
  source 1..9: note = Seed: LVVVGARGV (KRAS G12R)
WVVFGSRGL

SEQ ID NO: 30857 - protein, 9 aa, synthetic construct
  source 1..9: note = Seed: LVVVGARGV (KRAS G12R)
WVVFGSRGM

SEQ ID NO: 30858 - protein, 9 aa, synthetic construct
  source 1..9: note = Seed: LVVVGARGV (KRAS G12R)
WVVFGSRGR

SEQ ID NO: 30859 - protein, 9 aa, synthetic construct
  source 1..9: note = Seed: LVVVGARGV (KRAS G12R)
WVVFGSRGS

SEQ ID NO: 30860 - protein, 9 aa, synthetic construct
  source 1..9: note = Seed: LVVVGARGV (KRAS G12R)
WVVFGSRGT

SEQ ID NO: 30861 - protein, 9 aa, synthetic construct
  source 1..9: note = Seed: LVVVGARGV (KRAS G12R)
WVVFGSRGV

SEQ ID NO: 30862 - protein, 9 aa, synthetic construct
  source 1..9: note = Seed: LVVVGARGV (KRAS G12R)
WVVFGTRGA

SEQ ID NO: 30863 - protein, 9 aa, synthetic construct
  source 1..9: note = Seed: LVVVGARGV (KRAS G12R)
WVVFGTRGI

SEQ ID NO: 30864 - protein, 9 aa, synthetic construct
  source 1..9: note = Seed: LVVVGARGV (KRAS G12R)
WVVFGTRGL

SEQ ID NO: 30865 - protein, 9 aa, synthetic construct
  source 1..9: note = Seed: LVVVGARGV (KRAS G12R)
WVVFGTRGM

SEQ ID NO: 30866 - protein, 9 aa, synthetic construct
  source 1..9: note = Seed: LVVVGARGV (KRAS G12R)
WVVFGTRGR

SEQ ID NO: 30867 - protein, 9 aa, synthetic construct
  source 1..9: note = Seed: LVVVGARGV (KRAS G12R)
WVVFGTRGV

SEQ ID NO: 30868 - protein, 9 aa, synthetic construct
  source 1..9: note = Seed: LVVVGARGV (KRAS G12R)
WVVFGVRGA

SEQ ID NO: 30869 - protein, 9 aa, synthetic construct
  source 1..9: note = Seed: LVVVGARGV (KRAS G12R)
WVVFGVRGI

SEQ ID NO: 30870 - protein, 9 aa, synthetic construct
  source 1..9: note = Seed: LVVVGARGV (KRAS G12R)
WVVFGVRGL

SEQ ID NO: 30871 - protein, 9 aa, synthetic construct
  source 1..9: note = Seed: LVVVGARGV (KRAS G12R)
WVVFGVRGR

SEQ ID NO: 30872 - protein, 9 aa, synthetic construct
  source 1..9: note = Seed: LVVVGARGV (KRAS G12R)
WVVFGVRGV

SEQ ID NO: 30873 - protein, 9 aa, synthetic construct
  source 1..9: note = Seed: LVVVGARGV (KRAS G12R)
WVVGGARGA

SEQ ID NO: 30874 - protein, 9 aa, synthetic construct
  source 1..9: note = Seed: LVVVGARGV (KRAS G12R)
WVVGGARGF

SEQ ID NO: 30875 - protein, 9 aa, synthetic construct
  source 1..9: note = Seed: LVVVGARGV (KRAS G12R)
WVVGGARGI

SEQ ID NO: 30876 - protein, 9 aa, synthetic construct
  source 1..9: note = Seed: LVVVGARGV (KRAS G12R)
WVVGGARGL

SEQ ID NO: 30877 - protein, 9 aa, synthetic construct
  source 1..9: note = Seed: LVVVGARGV (KRAS G12R)
WVVGGARGM

SEQ ID NO: 30878 - protein, 9 aa, synthetic construct
  source 1..9: note = Seed: LVVVGARGV (KRAS G12R)
WVVGGARGS

SEQ ID NO: 30879 - protein, 9 aa, synthetic construct
  source 1..9: note = Seed: LVVVGARGV (KRAS G12R)
WVVGGARGT

SEQ ID NO: 30880 - protein, 9 aa, synthetic construct
  source 1..9: note = Seed: LVVVGARGV (KRAS G12R)
WVVGGARGV

SEQ ID NO: 30881 - protein, 9 aa, synthetic construct
  source 1..9: note = Seed: LVVVGARGV (KRAS G12R)
WVVGGGRGI

SEQ ID NO: 30882 - protein, 9 aa, synthetic construct
  source 1..9: note = Seed: LVVVGARGV (KRAS G12R)
WVVGGGRGL

SEQ ID NO: 30883 - protein, 9 aa, synthetic construct
  source 1..9: note = Seed: LVVVGARGV (KRAS G12R)
WVVGGGRGM

SEQ ID NO: 30884 - protein, 9 aa, synthetic construct
  source 1..9: note = Seed: LVVVGARGV (KRAS G12R)
WVVGGGRGV

SEQ ID NO: 30885 - protein, 9 aa, synthetic construct
  source 1..9: note = Seed: LVVVGARGV (KRAS G12R)
WVVGGIRGI

SEQ ID NO: 30886 - protein, 9 aa, synthetic construct
  source 1..9: note = Seed: LVVVGARGV (KRAS G12R)
WVVGGIRGL

SEQ ID NO: 30887 - protein, 9 aa, synthetic construct
  source 1..9: note = Seed: LVVVGARGV (KRAS G12R)
WVVGGIRGV

SEQ ID NO: 30888 - protein, 9 aa, synthetic construct
  source 1..9: note = Seed: LVVVGARGV (KRAS G12R)
WVVGGNRGI

SEQ ID NO: 30889 - protein, 9 aa, synthetic construct
  source 1..9: note = Seed: LVVVGARGV (KRAS G12R)
WVVGGNRGL

SEQ ID NO: 30890 - protein, 9 aa, synthetic construct
  source 1..9: note = Seed: LVVVGARGV (KRAS G12R)
WVVGGNRGV

SEQ ID NO: 30891 - protein, 9 aa, synthetic construct
  source 1..9: note = Seed: LVVVGARGV (KRAS G12R)
WVVGGPRGI

SEQ ID NO: 30892 - protein, 9 aa, synthetic construct
  source 1..9: note = Seed: LVVVGARGV (KRAS G12R)
WVVGGPRGL

SEQ ID NO: 30893 - protein, 9 aa, synthetic construct
  source 1..9: note = Seed: LVVVGARGV (KRAS G12R)
WVVGGPRGV

SEQ ID NO: 30894 - protein, 9 aa, synthetic construct
  source 1..9: note = Seed: LVVVGARGV (KRAS G12R)
WVVGGSRGA

SEQ ID NO: 30895 - protein, 9 aa, synthetic construct
  source 1..9: note = Seed: LVVVGARGV (KRAS G12R)
WVVGGSRGI

SEQ ID NO: 30896 - protein, 9 aa, synthetic construct
  source 1..9: note = Seed: LVVVGARGV (KRAS G12R)
WVVGGSRGL

SEQ ID NO: 30897 - protein, 9 aa, synthetic construct
  source 1..9: note = Seed: LVVVGARGV (KRAS G12R)
WVVGGSRGM

SEQ ID NO: 30898 - protein, 9 aa, synthetic construct
  source 1..9: note = Seed: LVVVGARGV (KRAS G12R)
WVVGGSRGV

SEQ ID NO: 30899 - protein, 9 aa, synthetic construct
  source 1..9: note = Seed: LVVVGARGV (KRAS G12R)
WVVGGTRGI

SEQ ID NO: 30900 - protein, 9 aa, synthetic construct
  source 1..9: note = Seed: LVVVGARGV (KRAS G12R)
WVVGGTRGL

SEQ ID NO: 30901 - protein, 9 aa, synthetic construct
  source 1..9: note = Seed: LVVVGARGV (KRAS G12R)
WVVGGTRGV

SEQ ID NO: 30902 - protein, 9 aa, synthetic construct
  source 1..9: note = Seed: LVVVGARGV (KRAS G12R)
WVVGGVRGA

SEQ ID NO: 30903 - protein, 9 aa, synthetic construct
  source 1..9: note = Seed: LVVVGARGV (KRAS G12R)
WVVGGVRGI

SEQ ID NO: 30904 - protein, 9 aa, synthetic construct
  source 1..9: note = Seed: LVVVGARGV (KRAS G12R)
WVVGGVRGL

SEQ ID NO: 30905 - protein, 9 aa, synthetic construct
  source 1..9: note = Seed: LVVVGARGV (KRAS G12R)
WVVGGVRGM

SEQ ID NO: 30906 - protein, 9 aa, synthetic construct
  source 1..9: note = Seed: LVVVGARGV (KRAS G12R)
WVVGGVRGV

SEQ ID NO: 30907 - protein, 9 aa, synthetic construct
  source 1..9: note = Seed: LVVVGARGV (KRAS G12R)
WVVHGARGA

SEQ ID NO: 30908 - protein, 9 aa, synthetic construct
  source 1..9: note = Seed: LVVVGARGV (KRAS G12R)
WVVHGARGI

SEQ ID NO: 30909 - protein, 9 aa, synthetic construct
  source 1..9: note = Seed: LVVVGARGV (KRAS G12R)
WVVHGARGL

SEQ ID NO: 30910 - protein, 9 aa, synthetic construct
  source 1..9: note = Seed: LVVVGARGV (KRAS G12R)
WVVHGARGM

SEQ ID NO: 30911 - protein, 9 aa, synthetic construct
  source 1..9: note = Seed: LVVVGARGV (KRAS G12R)
WVVHGARGR

SEQ ID NO: 30912 - protein, 9 aa, synthetic construct
  source 1..9: note = Seed: LVVVGARGV (KRAS G12R)
WVVHGARGV

SEQ ID NO: 30913 - protein, 9 aa, synthetic construct
  source 1..9: note = Seed: LVVVGARGV (KRAS G12R)
WVVHGFRGI

SEQ ID NO: 30914 - protein, 9 aa, synthetic construct
  source 1..9: note = Seed: LVVVGARGV (KRAS G12R)
WVVHGFRGL

SEQ ID NO: 30915 - protein, 9 aa, synthetic construct
  source 1..9: note = Seed: LVVVGARGV (KRAS G12R)
WVVHGFRGV

SEQ ID NO: 30916 - protein, 9 aa, synthetic construct
  source 1..9: note = Seed: LVVVGARGV (KRAS G12R)
WVVHGGRGI

SEQ ID NO: 30917 - protein, 9 aa, synthetic construct
  source 1..9: note = Seed: LVVVGARGV (KRAS G12R)
WVVHGGRGL

SEQ ID NO: 30918 - protein, 9 aa, synthetic construct
  source 1..9: note = Seed: LVVVGARGV (KRAS G12R)
WVVHGGRGV

SEQ ID NO: 30919 - protein, 9 aa, synthetic construct
  source 1..9: note = Seed: LVVVGARGV (KRAS G12R)
WVVHGHRGR

SEQ ID NO: 30920 - protein, 9 aa, synthetic construct
  source 1..9: note = Seed: LVVVGARGV (KRAS G12R)
WVVHGIRGL

SEQ ID NO: 30921 - protein, 9 aa, synthetic construct
  source 1..9: note = Seed: LVVVGARGV (KRAS G12R)
WVVHGIRGR

SEQ ID NO: 30922 - protein, 9 aa, synthetic construct
  source 1..9: note = Seed: LVVVGARGV (KRAS G12R)
WVVHGIRGY

SEQ ID NO: 30923 - protein, 9 aa, synthetic construct
  source 1..9: note = Seed: LVVVGARGV (KRAS G12R)
WVVHGKRGI

SEQ ID NO: 30924 - protein, 9 aa, synthetic construct
  source 1..9: note = Seed: LVVVGARGV (KRAS G12R)
WVVHGKRGL

SEQ ID NO: 30925 - protein, 9 aa, synthetic construct
  source 1..9: note = Seed: LVVVGARGV (KRAS G12R)
WVVHGKRGM

SEQ ID NO: 30926 - protein, 9 aa, synthetic construct
  source 1..9: note = Seed: LVVVGARGV (KRAS G12R)
WVVHGKRGR

SEQ ID NO: 30927 - protein, 9 aa, synthetic construct
  source 1..9: note = Seed: LVVVGARGV (KRAS G12R)
WVVHGKRGY

SEQ ID NO: 30928 - protein, 9 aa, synthetic construct
  source 1..9: note = Seed: LVVVGARGV (KRAS G12R)
WVVHGLRGR

SEQ ID NO: 30929 - protein, 9 aa, synthetic construct
  source 1..9: note = Seed: LVVVGARGV (KRAS G12R)
WVVHGLRGY

SEQ ID NO: 30930 - protein, 9 aa, synthetic construct
  source 1..9: note = Seed: LVVVGARGV (KRAS G12R)
WVVHGMRGR

SEQ ID NO: 30931 - protein, 9 aa, synthetic construct
  source 1..9: note = Seed: LVVVGARGV (KRAS G12R)
WVVHGRRGA

SEQ ID NO: 30932 - protein, 9 aa, synthetic construct
  source 1..9: note = Seed: LVVVGARGV (KRAS G12R)
WVVHGRRGF

SEQ ID NO: 30933 - protein, 9 aa, synthetic construct
  source 1..9: note = Seed: LVVVGARGV (KRAS G12R)
WVVHGRRGH

SEQ ID NO: 30934 - protein, 9 aa, synthetic construct
  source 1..9: note = Seed: LVVVGARGV (KRAS G12R)
WVVHGRRGI

SEQ ID NO: 30935 - protein, 9 aa, synthetic construct
  source 1..9: note = Seed: LVVVGARGV (KRAS G12R)
WVVHGRRGK

SEQ ID NO: 30936 - protein, 9 aa, synthetic construct
  source 1..9: note = Seed: LVVVGARGV (KRAS G12R)
WVVHGRRGL

SEQ ID NO: 30937 - protein, 9 aa, synthetic construct
  source 1..9: note = Seed: LVVVGARGV (KRAS G12R)
WVVHGRRGM

SEQ ID NO: 30938 - protein, 9 aa, synthetic construct
  source 1..9: note = Seed: LVVVGARGV (KRAS G12R)
WVVHGRRGQ

SEQ ID NO: 30939 - protein, 9 aa, synthetic construct
  source 1..9: note = Seed: LVVVGARGV (KRAS G12R)
WVVHGRRGR

SEQ ID NO: 30940 - protein, 9 aa, synthetic construct
  source 1..9: note = Seed: LVVVGARGV (KRAS G12R)
WVVHGRRGS

SEQ ID NO: 30941 - protein, 9 aa, synthetic construct
  source 1..9: note = Seed: LVVVGARGV (KRAS G12R)
WVVHGRRGV

SEQ ID NO: 30942 - protein, 9 aa, synthetic construct
  source 1..9: note = Seed: LVVVGARGV (KRAS G12R)
WVVHGRRGW

SEQ ID NO: 30943 - protein, 9 aa, synthetic construct
  source 1..9: note = Seed: LVVVGARGV (KRAS G12R)
WVVHGRRGY

SEQ ID NO: 30944 - protein, 9 aa, synthetic construct
  source 1..9: note = Seed: LVVVGARGV (KRAS G12R)
WVVHGSRGI

SEQ ID NO: 30945 - protein, 9 aa, synthetic construct
  source 1..9: note = Seed: LVVVGARGV (KRAS G12R)
WVVHGSRGL

SEQ ID NO: 30946 - protein, 9 aa, synthetic construct
  source 1..9: note = Seed: LVVVGARGV (KRAS G12R)
WVVHGSRGV

SEQ ID NO: 30947 - protein, 9 aa, synthetic construct
  source 1..9: note = Seed: LVVVGARGV (KRAS G12R)
WVVHGTRGR

SEQ ID NO: 30948 - protein, 9 aa, synthetic construct
  source 1..9: note = Seed: LVVVGARGV (KRAS G12R)
WVVHGVRGR

SEQ ID NO: 30949 - protein, 9 aa, synthetic construct
  source 1..9: note = Seed: LVVVGARGV (KRAS G12R)
WVVIGARGA

SEQ ID NO: 30950 - protein, 9 aa, synthetic construct
  source 1..9: note = Seed: LVVVGARGV (KRAS G12R)
WVVIGARGC

SEQ ID NO: 30951 - protein, 9 aa, synthetic construct
  source 1..9: note = Seed: LVVVGARGV (KRAS G12R)
WVVIGARGF

SEQ ID NO: 30952 - protein, 9 aa, synthetic construct
  source 1..9: note = Seed: LVVVGARGV (KRAS G12R)
WVVIGARGG

SEQ ID NO: 30953 - protein, 9 aa, synthetic construct
  source 1..9: note = Seed: LVVVGARGV (KRAS G12R)
WVVIGARGH

SEQ ID NO: 30954 - protein, 9 aa, synthetic construct
  source 1..9: note = Seed: LVVVGARGV (KRAS G12R)
WVVIGARGI

SEQ ID NO: 30955 - protein, 9 aa, synthetic construct
  source 1..9: note = Seed: LVVVGARGV (KRAS G12R)
WVVIGARGK

SEQ ID NO: 30956 - protein, 9 aa, synthetic construct
  source 1..9: note = Seed: LVVVGARGV (KRAS G12R)
WVVIGARGL

SEQ ID NO: 30957 - protein, 9 aa, synthetic construct
  source 1..9: note = Seed: LVVVGARGV (KRAS G12R)
WVVIGARGM

SEQ ID NO: 30958 - protein, 9 aa, synthetic construct
  source 1..9: note = Seed: LVVVGARGV (KRAS G12R)
WVVIGARGN

SEQ ID NO: 30959 - protein, 9 aa, synthetic construct
  source 1..9: note = Seed: LVVVGARGV (KRAS G12R)
WVVIGARGP

SEQ ID NO: 30960 - protein, 9 aa, synthetic construct
  source 1..9: note = Seed: LVVVGARGV (KRAS G12R)
WVVIGARGQ

SEQ ID NO: 30961 - protein, 9 aa, synthetic construct
  source 1..9: note = Seed: LVVVGARGV (KRAS G12R)
WVVIGARGR

SEQ ID NO: 30962 - protein, 9 aa, synthetic construct
  source 1..9: note = Seed: LVVVGARGV (KRAS G12R)
WVVIGARGS

SEQ ID NO: 30963 - protein, 9 aa, synthetic construct
  source 1..9: note = Seed: LVVVGARGV (KRAS G12R)
WVVIGARGT

SEQ ID NO: 30964 - protein, 9 aa, synthetic construct
  source 1..9: note = Seed: LVVVGARGV (KRAS G12R)
WVVIGARGV

SEQ ID NO: 30965 - protein, 9 aa, synthetic construct
  source 1..9: note = Seed: LVVVGARGV (KRAS G12R)
WVVIGARGW

SEQ ID NO: 30966 - protein, 9 aa, synthetic construct
  source 1..9: note = Seed: LVVVGARGV (KRAS G12R)
WVVIGARGY

SEQ ID NO: 30967 - protein, 9 aa, synthetic construct
  source 1..9: note = Seed: LVVVGARGV (KRAS G12R)
WVVIGCRGI

SEQ ID NO: 30968 - protein, 9 aa, synthetic construct
  source 1..9: note = Seed: LVVVGARGV (KRAS G12R)
WVVIGCRGL

SEQ ID NO: 30969 - protein, 9 aa, synthetic construct
  source 1..9: note = Seed: LVVVGARGV (KRAS G12R)
WVVIGCRGV

SEQ ID NO: 30970 - protein, 9 aa, synthetic construct
  source 1..9: note = Seed: LVVVGARGV (KRAS G12R)
WVVIGDRGI

SEQ ID NO: 30971 - protein, 9 aa, synthetic construct
  source 1..9: note = Seed: LVVVGARGV (KRAS G12R)
WVVIGDRGL

SEQ ID NO: 30972 - protein, 9 aa, synthetic construct
  source 1..9: note = Seed: LVVVGARGV (KRAS G12R)
WVVIGDRGV

SEQ ID NO: 30973 - protein, 9 aa, synthetic construct
  source 1..9: note = Seed: LVVVGARGV (KRAS G12R)
WVVIGERGL

SEQ ID NO: 30974 - protein, 9 aa, synthetic construct
  source 1..9: note = Seed: LVVVGARGV (KRAS G12R)
WVVIGFRGI

SEQ ID NO: 30975 - protein, 9 aa, synthetic construct
  source 1..9: note = Seed: LVVVGARGV (KRAS G12R)
WVVIGFRGL

SEQ ID NO: 30976 - protein, 9 aa, synthetic construct
  source 1..9: note = Seed: LVVVGARGV (KRAS G12R)
WVVIGFRGV

SEQ ID NO: 30977 - protein, 9 aa, synthetic construct
  source 1..9: note = Seed: LVVVGARGV (KRAS G12R)
WVVIGGRGA

SEQ ID NO: 30978 - protein, 9 aa, synthetic construct
  source 1..9: note = Seed: LVVVGARGV (KRAS G12R)
WVVIGGRGC

SEQ ID NO: 30979 - protein, 9 aa, synthetic construct
  source 1..9: note = Seed: LVVVGARGV (KRAS G12R)
WVVIGGRGF

SEQ ID NO: 30980 - protein, 9 aa, synthetic construct
  source 1..9: note = Seed: LVVVGARGV (KRAS G12R)
WVVIGGRGG

SEQ ID NO: 30981 - protein, 9 aa, synthetic construct
  source 1..9: note = Seed: LVVVGARGV (KRAS G12R)
WVVIGGRGH

SEQ ID NO: 30982 - protein, 9 aa, synthetic construct
  source 1..9: note = Seed: LVVVGARGV (KRAS G12R)
WVVIGGRGI

SEQ ID NO: 30983 - protein, 9 aa, synthetic construct
  source 1..9: note = Seed: LVVVGARGV (KRAS G12R)
WVVIGGRGL

SEQ ID NO: 30984 - protein, 9 aa, synthetic construct
  source 1..9: note = Seed: LVVVGARGV (KRAS G12R)
WVVIGGRGM

SEQ ID NO: 30985 - protein, 9 aa, synthetic construct
  source 1..9: note = Seed: LVVVGARGV (KRAS G12R)
WVVIGGRGN

SEQ ID NO: 30986 - protein, 9 aa, synthetic construct
  source 1..9: note = Seed: LVVVGARGV (KRAS G12R)
WVVIGGRGP

SEQ ID NO: 30987 - protein, 9 aa, synthetic construct
  source 1..9: note = Seed: LVVVGARGV (KRAS G12R)
WVVIGGRGQ

SEQ ID NO: 30988 - protein, 9 aa, synthetic construct
  source 1..9: note = Seed: LVVVGARGV (KRAS G12R)
WVVIGGRGS

SEQ ID NO: 30989 - protein, 9 aa, synthetic construct
  source 1..9: note = Seed: LVVVGARGV (KRAS G12R)
WVVIGGRGT

SEQ ID NO: 30990 - protein, 9 aa, synthetic construct
  source 1..9: note = Seed: LVVVGARGV (KRAS G12R)
WVVIGGRGV

SEQ ID NO: 30991 - protein, 9 aa, synthetic construct
  source 1..9: note = Seed: LVVVGARGV (KRAS G12R)
WVVIGGRGY

SEQ ID NO: 30992 - protein, 9 aa, synthetic construct
  source 1..9: note = Seed: LVVVGARGV (KRAS G12R)
WVVIGHRGA

SEQ ID NO: 30993 - protein, 9 aa, synthetic construct
  source 1..9: note = Seed: LVVVGARGV (KRAS G12R)
WVVIGHRGF

SEQ ID NO: 30994 - protein, 9 aa, synthetic construct
  source 1..9: note = Seed: LVVVGARGV (KRAS G12R)
WVVIGHRGI

SEQ ID NO: 30995 - protein, 9 aa, synthetic construct
  source 1..9: note = Seed: LVVVGARGV (KRAS G12R)
WVVIGHRGL

SEQ ID NO: 30996 - protein, 9 aa, synthetic construct
  source 1..9: note = Seed: LVVVGARGV (KRAS G12R)
WVVIGHRGM

SEQ ID NO: 30997 - protein, 9 aa, synthetic construct
  source 1..9: note = Seed: LVVVGARGV (KRAS G12R)
WVVIGHRGQ

SEQ ID NO: 30998 - protein, 9 aa, synthetic construct
  source 1..9: note = Seed: LVVVGARGV (KRAS G12R)
WVVIGHRGR

SEQ ID NO: 30999 - protein, 9 aa, synthetic construct
  source 1..9: note = Seed: LVVVGARGV (KRAS G12R)
WVVIGHRGS

SEQ ID NO: 31000 - protein, 9 aa, synthetic construct
  source 1..9: note = Seed: LVVVGARGV (KRAS G12R)
WVVIGHRGV

SEQ ID NO: 31001 - protein, 9 aa, synthetic construct
  source 1..9: note = Seed: LVVVGARGV (KRAS G12R)
WVVIGIRGA

SEQ ID NO: 31002 - protein, 9 aa, synthetic construct
  source 1..9: note = Seed: LVVVGARGV (KRAS G12R)
WVVIGIRGF

SEQ ID NO: 31003 - protein, 9 aa, synthetic construct
  source 1..9: note = Seed: LVVVGARGV (KRAS G12R)
WVVIGIRGI

SEQ ID NO: 31004 - protein, 9 aa, synthetic construct
  source 1..9: note = Seed: LVVVGARGV (KRAS G12R)
WVVIGIRGL

SEQ ID NO: 31005 - protein, 9 aa, synthetic construct
  source 1..9: note = Seed: LVVVGARGV (KRAS G12R)
WVVIGIRGM

SEQ ID NO: 31006 - protein, 9 aa, synthetic construct
  source 1..9: note = Seed: LVVVGARGV (KRAS G12R)
WVVIGIRGN

SEQ ID NO: 31007 - protein, 9 aa, synthetic construct
  source 1..9: note = Seed: LVVVGARGV (KRAS G12R)
WVVIGIRGR

SEQ ID NO: 31008 - protein, 9 aa, synthetic construct
  source 1..9: note = Seed: LVVVGARGV (KRAS G12R)
WVVIGIRGS

SEQ ID NO: 31009 - protein, 9 aa, synthetic construct
  source 1..9: note = Seed: LVVVGARGV (KRAS G12R)
WVVIGIRGT

SEQ ID NO: 31010 - protein, 9 aa, synthetic construct
  source 1..9: note = Seed: LVVVGARGV (KRAS G12R)
WVVIGIRGV

SEQ ID NO: 31011 - protein, 9 aa, synthetic construct
  source 1..9: note = Seed: LVVVGARGV (KRAS G12R)
WVVIGKRGA

SEQ ID NO: 31012 - protein, 9 aa, synthetic construct
  source 1..9: note = Seed: LVVVGARGV (KRAS G12R)
WVVIGKRGF

SEQ ID NO: 31013 - protein, 9 aa, synthetic construct
  source 1..9: note = Seed: LVVVGARGV (KRAS G12R)
WVVIGKRGG

SEQ ID NO: 31014 - protein, 9 aa, synthetic construct
  source 1..9: note = Seed: LVVVGARGV (KRAS G12R)
WVVIGKRGH

SEQ ID NO: 31015 - protein, 9 aa, synthetic construct
  source 1..9: note = Seed: LVVVGARGV (KRAS G12R)
WVVIGKRGI

SEQ ID NO: 31016 - protein, 9 aa, synthetic construct
  source 1..9: note = Seed: LVVVGARGV (KRAS G12R)
WVVIGKRGK

SEQ ID NO: 31017 - protein, 9 aa, synthetic construct
  source 1..9: note = Seed: LVVVGARGV (KRAS G12R)
WVVIGKRGL

SEQ ID NO: 31018 - protein, 9 aa, synthetic construct
  source 1..9: note = Seed: LVVVGARGV (KRAS G12R)
WVVIGKRGM

SEQ ID NO: 31019 - protein, 9 aa, synthetic construct
  source 1..9: note = Seed: LVVVGARGV (KRAS G12R)
WVVIGKRGN

SEQ ID NO: 31020 - protein, 9 aa, synthetic construct
  source 1..9: note = Seed: LVVVGARGV (KRAS G12R)
WVVIGKRGP

SEQ ID NO: 31021 - protein, 9 aa, synthetic construct
  source 1..9: note = Seed: LVVVGARGV (KRAS G12R)
WVVIGKRGQ

SEQ ID NO: 31022 - protein, 9 aa, synthetic construct
  source 1..9: note = Seed: LVVVGARGV (KRAS G12R)
WVVIGKRGR

SEQ ID NO: 31023 - protein, 9 aa, synthetic construct
  source 1..9: note = Seed: LVVVGARGV (KRAS G12R)
WVVIGKRGS

SEQ ID NO: 31024 - protein, 9 aa, synthetic construct
  source 1..9: note = Seed: LVVVGARGV (KRAS G12R)
WVVIGKRGT

SEQ ID NO: 31025 - protein, 9 aa, synthetic construct
  source 1..9: note = Seed: LVVVGARGV (KRAS G12R)
WVVIGKRGV

SEQ ID NO: 31026 - protein, 9 aa, synthetic construct
  source 1..9: note = Seed: LVVVGARGV (KRAS G12R)
WVVIGKRGY

SEQ ID NO: 31027 - protein, 9 aa, synthetic construct
  source 1..9: note = Seed: LVVVGARGV (KRAS G12R)
WVVIGLRGA

SEQ ID NO: 31028 - protein, 9 aa, synthetic construct
  source 1..9: note = Seed: LVVVGARGV (KRAS G12R)
WVVIGLRGI

SEQ ID NO: 31029 - protein, 9 aa, synthetic construct
  source 1..9: note = Seed: LVVVGARGV (KRAS G12R)
WVVIGLRGL

SEQ ID NO: 31030 - protein, 9 aa, synthetic construct
  source 1..9: note = Seed: LVVVGARGV (KRAS G12R)
WVVIGLRGM

SEQ ID NO: 31031 - protein, 9 aa, synthetic construct
  source 1..9: note = Seed: LVVVGARGV (KRAS G12R)
WVVIGLRGN

SEQ ID NO: 31032 - protein, 9 aa, synthetic construct
  source 1..9: note = Seed: LVVVGARGV (KRAS G12R)
WVVIGLRGR

SEQ ID NO: 31033 - protein, 9 aa, synthetic construct
  source 1..9: note = Seed: LVVVGARGV (KRAS G12R)
WVVIGLRGV

SEQ ID NO: 31034 - protein, 9 aa, synthetic construct
  source 1..9: note = Seed: LVVVGARGV (KRAS G12R)
WVVIGMRGA

SEQ ID NO: 31035 - protein, 9 aa, synthetic construct
  source 1..9: note = Seed: LVVVGARGV (KRAS G12R)
WVVIGMRGI

SEQ ID NO: 31036 - protein, 9 aa, synthetic construct
  source 1..9: note = Seed: LVVVGARGV (KRAS G12R)
WVVIGMRGL

SEQ ID NO: 31037 - protein, 9 aa, synthetic construct
  source 1..9: note = Seed: LVVVGARGV (KRAS G12R)
WVVIGMRGM

SEQ ID NO: 31038 - protein, 9 aa, synthetic construct
  source 1..9: note = Seed: LVVVGARGV (KRAS G12R)
WVVIGMRGR

SEQ ID NO: 31039 - protein, 9 aa, synthetic construct
  source 1..9: note = Seed: LVVVGARGV (KRAS G12R)
WVVIGMRGV

SEQ ID NO: 31040 - protein, 9 aa, synthetic construct
  source 1..9: note = Seed: LVVVGARGV (KRAS G12R)
WVVIGNRGA

SEQ ID NO: 31041 - protein, 9 aa, synthetic construct
  source 1..9: note = Seed: LVVVGARGV (KRAS G12R)
WVVIGNRGC

SEQ ID NO: 31042 - protein, 9 aa, synthetic construct
  source 1..9: note = Seed: LVVVGARGV (KRAS G12R)
WVVIGNRGF

SEQ ID NO: 31043 - protein, 9 aa, synthetic construct
  source 1..9: note = Seed: LVVVGARGV (KRAS G12R)
WVVIGNRGG

SEQ ID NO: 31044 - protein, 9 aa, synthetic construct
  source 1..9: note = Seed: LVVVGARGV (KRAS G12R)
WVVIGNRGI

SEQ ID NO: 31045 - protein, 9 aa, synthetic construct
  source 1..9: note = Seed: LVVVGARGV (KRAS G12R)
WVVIGNRGL

SEQ ID NO: 31046 - protein, 9 aa, synthetic construct
  source 1..9: note = Seed: LVVVGARGV (KRAS G12R)
WVVIGNRGM

SEQ ID NO: 31047 - protein, 9 aa, synthetic construct
  source 1..9: note = Seed: LVVVGARGV (KRAS G12R)
WVVIGNRGN

SEQ ID NO: 31048 - protein, 9 aa, synthetic construct
  source 1..9: note = Seed: LVVVGARGV (KRAS G12R)
WVVIGNRGS

SEQ ID NO: 31049 - protein, 9 aa, synthetic construct
  source 1..9: note = Seed: LVVVGARGV (KRAS G12R)
WVVIGNRGT

SEQ ID NO: 31050 - protein, 9 aa, synthetic construct
  source 1..9: note = Seed: LVVVGARGV (KRAS G12R)
WVVIGNRGV

SEQ ID NO: 31051 - protein, 9 aa, synthetic construct
  source 1..9: note = Seed: LVVVGARGV (KRAS G12R)
WVVIGPRGA

SEQ ID NO: 31052 - protein, 9 aa, synthetic construct
  source 1..9: note = Seed: LVVVGARGV (KRAS G12R)
WVVIGPRGC

SEQ ID NO: 31053 - protein, 9 aa, synthetic construct
  source 1..9: note = Seed: LVVVGARGV (KRAS G12R)
WVVIGPRGF

SEQ ID NO: 31054 - protein, 9 aa, synthetic construct
  source 1..9: note = Seed: LVVVGARGV (KRAS G12R)
WVVIGPRGG

SEQ ID NO: 31055 - protein, 9 aa, synthetic construct
  source 1..9: note = Seed: LVVVGARGV (KRAS G12R)
WVVIGPRGI

SEQ ID NO: 31056 - protein, 9 aa, synthetic construct
  source 1..9: note = Seed: LVVVGARGV (KRAS G12R)
WVVIGPRGL

SEQ ID NO: 31057 - protein, 9 aa, synthetic construct
  source 1..9: note = Seed: LVVVGARGV (KRAS G12R)
WVVIGPRGM

SEQ ID NO: 31058 - protein, 9 aa, synthetic construct
  source 1..9: note = Seed: LVVVGARGV (KRAS G12R)
WVVIGPRGN

SEQ ID NO: 31059 - protein, 9 aa, synthetic construct
  source 1..9: note = Seed: LVVVGARGV (KRAS G12R)
WVVIGPRGS

SEQ ID NO: 31060 - protein, 9 aa, synthetic construct
  source 1..9: note = Seed: LVVVGARGV (KRAS G12R)
WVVIGPRGT

SEQ ID NO: 31061 - protein, 9 aa, synthetic construct
  source 1..9: note = Seed: LVVVGARGV (KRAS G12R)
WVVIGPRGV

SEQ ID NO: 31062 - protein, 9 aa, synthetic construct
  source 1..9: note = Seed: LVVVGARGV (KRAS G12R)
WVVIGQRGI

SEQ ID NO: 31063 - protein, 9 aa, synthetic construct
  source 1..9: note = Seed: LVVVGARGV (KRAS G12R)
WVVIGQRGL

SEQ ID NO: 31064 - protein, 9 aa, synthetic construct
  source 1..9: note = Seed: LVVVGARGV (KRAS G12R)
WVVIGQRGV

SEQ ID NO: 31065 - protein, 9 aa, synthetic construct
  source 1..9: note = Seed: LVVVGARGV (KRAS G12R)
WVVIGRRGA

SEQ ID NO: 31066 - protein, 9 aa, synthetic construct
  source 1..9: note = Seed: LVVVGARGV (KRAS G12R)
WVVIGRRGC

SEQ ID NO: 31067 - protein, 9 aa, synthetic construct
  source 1..9: note = Seed: LVVVGARGV (KRAS G12R)
WVVIGRRGE

SEQ ID NO: 31068 - protein, 9 aa, synthetic construct
  source 1..9: note = Seed: LVVVGARGV (KRAS G12R)
WVVIGRRGF

SEQ ID NO: 31069 - protein, 9 aa, synthetic construct
  source 1..9: note = Seed: LVVVGARGV (KRAS G12R)
WVVIGRRGG

SEQ ID NO: 31070 - protein, 9 aa, synthetic construct
  source 1..9: note = Seed: LVVVGARGV (KRAS G12R)
WVVIGRRGH

SEQ ID NO: 31071 - protein, 9 aa, synthetic construct
  source 1..9: note = Seed: LVVVGARGV (KRAS G12R)
WVVIGRRGI

SEQ ID NO: 31072 - protein, 9 aa, synthetic construct
  source 1..9: note = Seed: LVVVGARGV (KRAS G12R)
WVVIGRRGK

SEQ ID NO: 31073 - protein, 9 aa, synthetic construct
  source 1..9: note = Seed: LVVVGARGV (KRAS G12R)
WVVIGRRGL

SEQ ID NO: 31074 - protein, 9 aa, synthetic construct
  source 1..9: note = Seed: LVVVGARGV (KRAS G12R)
WVVIGRRGM

SEQ ID NO: 31075 - protein, 9 aa, synthetic construct
  source 1..9: note = Seed: LVVVGARGV (KRAS G12R)
WVVIGRRGN

SEQ ID NO: 31076 - protein, 9 aa, synthetic construct
  source 1..9: note = Seed: LVVVGARGV (KRAS G12R)
WVVIGRRGP

SEQ ID NO: 31077 - protein, 9 aa, synthetic construct
  source 1..9: note = Seed: LVVVGARGV (KRAS G12R)
WVVIGRRGQ

SEQ ID NO: 31078 - protein, 9 aa, synthetic construct
  source 1..9: note = Seed: LVVVGARGV (KRAS G12R)
WVVIGRRGR

SEQ ID NO: 31079 - protein, 9 aa, synthetic construct
  source 1..9: note = Seed: LVVVGARGV (KRAS G12R)
WVVIGRRGS

SEQ ID NO: 31080 - protein, 9 aa, synthetic construct
  source 1..9: note = Seed: LVVVGARGV (KRAS G12R)
WVVIGRRGT

SEQ ID NO: 31081 - protein, 9 aa, synthetic construct
  source 1..9: note = Seed: LVVVGARGV (KRAS G12R)
WVVIGRRGV

SEQ ID NO: 31082 - protein, 9 aa, synthetic construct
  source 1..9: note = Seed: LVVVGARGV (KRAS G12R)
WVVIGRRGW

SEQ ID NO: 31083 - protein, 9 aa, synthetic construct
  source 1..9: note = Seed: LVVVGARGV (KRAS G12R)
WVVIGRRGY

SEQ ID NO: 31084 - protein, 9 aa, synthetic construct
  source 1..9: note = Seed: LVVVGARGV (KRAS G12R)
WVVIGSRGA

SEQ ID NO: 31085 - protein, 9 aa, synthetic construct
  source 1..9: note = Seed: LVVVGARGV (KRAS G12R)
WVVIGSRGC

SEQ ID NO: 31086 - protein, 9 aa, synthetic construct
  source 1..9: note = Seed: LVVVGARGV (KRAS G12R)
WVVIGSRGF

SEQ ID NO: 31087 - protein, 9 aa, synthetic construct
  source 1..9: note = Seed: LVVVGARGV (KRAS G12R)
WVVIGSRGG

SEQ ID NO: 31088 - protein, 9 aa, synthetic construct
  source 1..9: note = Seed: LVVVGARGV (KRAS G12R)
WVVIGSRGH

SEQ ID NO: 31089 - protein, 9 aa, synthetic construct
  source 1..9: note = Seed: LVVVGARGV (KRAS G12R)
WVVIGSRGI

SEQ ID NO: 31090 - protein, 9 aa, synthetic construct
  source 1..9: note = Seed: LVVVGARGV (KRAS G12R)
WVVIGSRGL

SEQ ID NO: 31091 - protein, 9 aa, synthetic construct
  source 1..9: note = Seed: LVVVGARGV (KRAS G12R)
WVVIGSRGM

SEQ ID NO: 31092 - protein, 9 aa, synthetic construct
  source 1..9: note = Seed: LVVVGARGV (KRAS G12R)
WVVIGSRGN

SEQ ID NO: 31093 - protein, 9 aa, synthetic construct
  source 1..9: note = Seed: LVVVGARGV (KRAS G12R)
WVVIGSRGP

SEQ ID NO: 31094 - protein, 9 aa, synthetic construct
  source 1..9: note = Seed: LVVVGARGV (KRAS G12R)
WVVIGSRGQ

SEQ ID NO: 31095 - protein, 9 aa, synthetic construct
  source 1..9: note = Seed: LVVVGARGV (KRAS G12R)
WVVIGSRGR

SEQ ID NO: 31096 - protein, 9 aa, synthetic construct
  source 1..9: note = Seed: LVVVGARGV (KRAS G12R)
WVVIGSRGS

SEQ ID NO: 31097 - protein, 9 aa, synthetic construct
  source 1..9: note = Seed: LVVVGARGV (KRAS G12R)
WVVIGSRGT

SEQ ID NO: 31098 - protein, 9 aa, synthetic construct
  source 1..9: note = Seed: LVVVGARGV (KRAS G12R)
WVVIGSRGV

SEQ ID NO: 31099 - protein, 9 aa, synthetic construct
  source 1..9: note = Seed: LVVVGARGV (KRAS G12R)
WVVIGSRGW

SEQ ID NO: 31100 - protein, 9 aa, synthetic construct
  source 1..9: note = Seed: LVVVGARGV (KRAS G12R)
WVVIGSRGY

SEQ ID NO: 31101 - protein, 9 aa, synthetic construct
  source 1..9: note = Seed: LVVVGARGV (KRAS G12R)
WVVIGTRGA

SEQ ID NO: 31102 - protein, 9 aa, synthetic construct
  source 1..9: note = Seed: LVVVGARGV (KRAS G12R)
WVVIGTRGC

SEQ ID NO: 31103 - protein, 9 aa, synthetic construct
  source 1..9: note = Seed: LVVVGARGV (KRAS G12R)
WVVIGTRGF

SEQ ID NO: 31104 - protein, 9 aa, synthetic construct
  source 1..9: note = Seed: LVVVGARGV (KRAS G12R)
WVVIGTRGG

SEQ ID NO: 31105 - protein, 9 aa, synthetic construct
  source 1..9: note = Seed: LVVVGARGV (KRAS G12R)
WVVIGTRGI

SEQ ID NO: 31106 - protein, 9 aa, synthetic construct
  source 1..9: note = Seed: LVVVGARGV (KRAS G12R)
WVVIGTRGL

SEQ ID NO: 31107 - protein, 9 aa, synthetic construct
  source 1..9: note = Seed: LVVVGARGV (KRAS G12R)
WVVIGTRGM

SEQ ID NO: 31108 - protein, 9 aa, synthetic construct
  source 1..9: note = Seed: LVVVGARGV (KRAS G12R)
WVVIGTRGN

SEQ ID NO: 31109 - protein, 9 aa, synthetic construct
  source 1..9: note = Seed: LVVVGARGV (KRAS G12R)
WVVIGTRGR

SEQ ID NO: 31110 - protein, 9 aa, synthetic construct
  source 1..9: note = Seed: LVVVGARGV (KRAS G12R)
WVVIGTRGS

SEQ ID NO: 31111 - protein, 9 aa, synthetic construct
  source 1..9: note = Seed: LVVVGARGV (KRAS G12R)
WVVIGTRGT

SEQ ID NO: 31112 - protein, 9 aa, synthetic construct
  source 1..9: note = Seed: LVVVGARGV (KRAS G12R)
WVVIGTRGV

SEQ ID NO: 31113 - protein, 9 aa, synthetic construct
  source 1..9: note = Seed: LVVVGARGV (KRAS G12R)
WVVIGVRGA

SEQ ID NO: 31114 - protein, 9 aa, synthetic construct
  source 1..9: note = Seed: LVVVGARGV (KRAS G12R)
WVVIGVRGG

SEQ ID NO: 31115 - protein, 9 aa, synthetic construct
  source 1..9: note = Seed: LVVVGARGV (KRAS G12R)
WVVIGVRGH

SEQ ID NO: 31116 - protein, 9 aa, synthetic construct
  source 1..9: note = Seed: LVVVGARGV (KRAS G12R)
WVVIGVRGI

SEQ ID NO: 31117 - protein, 9 aa, synthetic construct
  source 1..9: note = Seed: LVVVGARGV (KRAS G12R)
WVVIGVRGL

SEQ ID NO: 31118 - protein, 9 aa, synthetic construct
  source 1..9: note = Seed: LVVVGARGV (KRAS G12R)
WVVIGVRGM

SEQ ID NO: 31119 - protein, 9 aa, synthetic construct
  source 1..9: note = Seed: LVVVGARGV (KRAS G12R)
WVVIGVRGN

SEQ ID NO: 31120 - protein, 9 aa, synthetic construct
  source 1..9: note = Seed: LVVVGARGV (KRAS G12R)
WVVIGVRGQ

SEQ ID NO: 31121 - protein, 9 aa, synthetic construct
  source 1..9: note = Seed: LVVVGARGV (KRAS G12R)
WVVIGVRGR

SEQ ID NO: 31122 - protein, 9 aa, synthetic construct
  source 1..9: note = Seed: LVVVGARGV (KRAS G12R)
WVVIGVRGS

SEQ ID NO: 31123 - protein, 9 aa, synthetic construct
  source 1..9: note = Seed: LVVVGARGV (KRAS G12R)
WVVIGVRGT

SEQ ID NO: 31124 - protein, 9 aa, synthetic construct
  source 1..9: note = Seed: LVVVGARGV (KRAS G12R)
WVVIGVRGV

SEQ ID NO: 31125 - protein, 9 aa, synthetic construct
  source 1..9: note = Seed: LVVVGARGV (KRAS G12R)
WVVKGARGL

SEQ ID NO: 31126 - protein, 9 aa, synthetic construct
  source 1..9: note = Seed: LVVVGARGV (KRAS G12R)
WVVKGARGR

SEQ ID NO: 31127 - protein, 9 aa, synthetic construct
  source 1..9: note = Seed: LVVVGARGV (KRAS G12R)
WVVKGIRGF

SEQ ID NO: 31128 - protein, 9 aa, synthetic construct
  source 1..9: note = Seed: LVVVGARGV (KRAS G12R)
WVVKGIRGL

SEQ ID NO: 31129 - protein, 9 aa, synthetic construct
  source 1..9: note = Seed: LVVVGARGV (KRAS G12R)
WVVKGIRGR

SEQ ID NO: 31130 - protein, 9 aa, synthetic construct
  source 1..9: note = Seed: LVVVGARGV (KRAS G12R)
WVVKGKRGA

SEQ ID NO: 31131 - protein, 9 aa, synthetic construct
  source 1..9: note = Seed: LVVVGARGV (KRAS G12R)
WVVKGKRGF

SEQ ID NO: 31132 - protein, 9 aa, synthetic construct
  source 1..9: note = Seed: LVVVGARGV (KRAS G12R)
WVVKGKRGI

SEQ ID NO: 31133 - protein, 9 aa, synthetic construct
  source 1..9: note = Seed: LVVVGARGV (KRAS G12R)
WVVKGKRGL

SEQ ID NO: 31134 - protein, 9 aa, synthetic construct
  source 1..9: note = Seed: LVVVGARGV (KRAS G12R)
WVVKGKRGM

SEQ ID NO: 31135 - protein, 9 aa, synthetic construct
  source 1..9: note = Seed: LVVVGARGV (KRAS G12R)
WVVKGKRGR

SEQ ID NO: 31136 - protein, 9 aa, synthetic construct
  source 1..9: note = Seed: LVVVGARGV (KRAS G12R)
WVVKGKRGV

SEQ ID NO: 31137 - protein, 9 aa, synthetic construct
  source 1..9: note = Seed: LVVVGARGV (KRAS G12R)
WVVKGKRGW

SEQ ID NO: 31138 - protein, 9 aa, synthetic construct
  source 1..9: note = Seed: LVVVGARGV (KRAS G12R)
WVVKGKRGY

SEQ ID NO: 31139 - protein, 9 aa, synthetic construct
  source 1..9: note = Seed: LVVVGARGV (KRAS G12R)
WVVKGLRGR

SEQ ID NO: 31140 - protein, 9 aa, synthetic construct
  source 1..9: note = Seed: LVVVGARGV (KRAS G12R)
WVVKGQRGR

SEQ ID NO: 31141 - protein, 9 aa, synthetic construct
  source 1..9: note = Seed: LVVVGARGV (KRAS G12R)
WVVKGRRGA

SEQ ID NO: 31142 - protein, 9 aa, synthetic construct
  source 1..9: note = Seed: LVVVGARGV (KRAS G12R)
WVVKGRRGF

SEQ ID NO: 31143 - protein, 9 aa, synthetic construct
  source 1..9: note = Seed: LVVVGARGV (KRAS G12R)
WVVKGRRGH

SEQ ID NO: 31144 - protein, 9 aa, synthetic construct
  source 1..9: note = Seed: LVVVGARGV (KRAS G12R)
WVVKGRRGI

SEQ ID NO: 31145 - protein, 9 aa, synthetic construct
  source 1..9: note = Seed: LVVVGARGV (KRAS G12R)
WVVKGRRGL

SEQ ID NO: 31146 - protein, 9 aa, synthetic construct
  source 1..9: note = Seed: LVVVGARGV (KRAS G12R)
WVVKGRRGM

SEQ ID NO: 31147 - protein, 9 aa, synthetic construct
  source 1..9: note = Seed: LVVVGARGV (KRAS G12R)
WVVKGRRGQ

SEQ ID NO: 31148 - protein, 9 aa, synthetic construct
  source 1..9: note = Seed: LVVVGARGV (KRAS G12R)
WVVKGRRGR

SEQ ID NO: 31149 - protein, 9 aa, synthetic construct
  source 1..9: note = Seed: LVVVGARGV (KRAS G12R)
WVVKGRRGS

SEQ ID NO: 31150 - protein, 9 aa, synthetic construct
  source 1..9: note = Seed: LVVVGARGV (KRAS G12R)
WVVKGRRGT

SEQ ID NO: 31151 - protein, 9 aa, synthetic construct
  source 1..9: note = Seed: LVVVGARGV (KRAS G12R)
WVVKGRRGV

SEQ ID NO: 31152 - protein, 9 aa, synthetic construct
  source 1..9: note = Seed: LVVVGARGV (KRAS G12R)
WVVKGRRGW

SEQ ID NO: 31153 - protein, 9 aa, synthetic construct
  source 1..9: note = Seed: LVVVGARGV (KRAS G12R)
WVVKGRRGY

SEQ ID NO: 31154 - protein, 9 aa, synthetic construct
  source 1..9: note = Seed: LVVVGARGV (KRAS G12R)
WVVKGSRGR

SEQ ID NO: 31155 - protein, 9 aa, synthetic construct
  source 1..9: note = Seed: LVVVGARGV (KRAS G12R)
WVVKGTRGL

SEQ ID NO: 31156 - protein, 9 aa, synthetic construct
  source 1..9: note = Seed: LVVVGARGV (KRAS G12R)
WVVKGTRGM

SEQ ID NO: 31157 - protein, 9 aa, synthetic construct
  source 1..9: note = Seed: LVVVGARGV (KRAS G12R)
WVVKGTRGR

SEQ ID NO: 31158 - protein, 9 aa, synthetic construct
  source 1..9: note = Seed: LVVVGARGV (KRAS G12R)
WVVKGVRGL

SEQ ID NO: 31159 - protein, 9 aa, synthetic construct
  source 1..9: note = Seed: LVVVGARGV (KRAS G12R)
WVVKGVRGR

SEQ ID NO: 31160 - protein, 9 aa, synthetic construct
  source 1..9: note = Seed: LVVVGARGV (KRAS G12R)
WVVKGVRGY

SEQ ID NO: 31161 - protein, 9 aa, synthetic construct
  source 1..9: note = Seed: LVVVGARGV (KRAS G12R)
WVVLGARGA

SEQ ID NO: 31162 - protein, 9 aa, synthetic construct
  source 1..9: note = Seed: LVVVGARGV (KRAS G12R)
WVVLGARGC

SEQ ID NO: 31163 - protein, 9 aa, synthetic construct
  source 1..9: note = Seed: LVVVGARGV (KRAS G12R)
WVVLGARGD

SEQ ID NO: 31164 - protein, 9 aa, synthetic construct
  source 1..9: note = Seed: LVVVGARGV (KRAS G12R)
WVVLGARGE

SEQ ID NO: 31165 - protein, 9 aa, synthetic construct
  source 1..9: note = Seed: LVVVGARGV (KRAS G12R)
WVVLGARGF

SEQ ID NO: 31166 - protein, 9 aa, synthetic construct
  source 1..9: note = Seed: LVVVGARGV (KRAS G12R)
WVVLGARGG

SEQ ID NO: 31167 - protein, 9 aa, synthetic construct
  source 1..9: note = Seed: LVVVGARGV (KRAS G12R)
WVVLGARGH

SEQ ID NO: 31168 - protein, 9 aa, synthetic construct
  source 1..9: note = Seed: LVVVGARGV (KRAS G12R)
WVVLGARGI

SEQ ID NO: 31169 - protein, 9 aa, synthetic construct
  source 1..9: note = Seed: LVVVGARGV (KRAS G12R)
WVVLGARGK

SEQ ID NO: 31170 - protein, 9 aa, synthetic construct
  source 1..9: note = Seed: LVVVGARGV (KRAS G12R)
WVVLGARGL

SEQ ID NO: 31171 - protein, 9 aa, synthetic construct
  source 1..9: note = Seed: LVVVGARGV (KRAS G12R)
WVVLGARGM

SEQ ID NO: 31172 - protein, 9 aa, synthetic construct
  source 1..9: note = Seed: LVVVGARGV (KRAS G12R)
WVVLGARGN

SEQ ID NO: 31173 - protein, 9 aa, synthetic construct
  source 1..9: note = Seed: LVVVGARGV (KRAS G12R)
WVVLGARGP

SEQ ID NO: 31174 - protein, 9 aa, synthetic construct
  source 1..9: note = Seed: LVVVGARGV (KRAS G12R)
WVVLGARGQ

SEQ ID NO: 31175 - protein, 9 aa, synthetic construct
  source 1..9: note = Seed: LVVVGARGV (KRAS G12R)
WVVLGARGR

SEQ ID NO: 31176 - protein, 9 aa, synthetic construct
  source 1..9: note = Seed: LVVVGARGV (KRAS G12R)
WVVLGARGS

SEQ ID NO: 31177 - protein, 9 aa, synthetic construct
  source 1..9: note = Seed: LVVVGARGV (KRAS G12R)
WVVLGARGT

SEQ ID NO: 31178 - protein, 9 aa, synthetic construct
  source 1..9: note = Seed: LVVVGARGV (KRAS G12R)
WVVLGARGV

SEQ ID NO: 31179 - protein, 9 aa, synthetic construct
  source 1..9: note = Seed: LVVVGARGV (KRAS G12R)
WVVLGARGW

SEQ ID NO: 31180 - protein, 9 aa, synthetic construct
  source 1..9: note = Seed: LVVVGARGV (KRAS G12R)
WVVLGARGY

SEQ ID NO: 31181 - protein, 9 aa, synthetic construct
  source 1..9: note = Seed: LVVVGARGV (KRAS G12R)
WVVLGCRGA

SEQ ID NO: 31182 - protein, 9 aa, synthetic construct
  source 1..9: note = Seed: LVVVGARGV (KRAS G12R)
WVVLGCRGI

SEQ ID NO: 31183 - protein, 9 aa, synthetic construct
  source 1..9: note = Seed: LVVVGARGV (KRAS G12R)
WVVLGCRGL

SEQ ID NO: 31184 - protein, 9 aa, synthetic construct
  source 1..9: note = Seed: LVVVGARGV (KRAS G12R)
WVVLGCRGM

SEQ ID NO: 31185 - protein, 9 aa, synthetic construct
  source 1..9: note = Seed: LVVVGARGV (KRAS G12R)
WVVLGCRGT

SEQ ID NO: 31186 - protein, 9 aa, synthetic construct
  source 1..9: note = Seed: LVVVGARGV (KRAS G12R)
WVVLGCRGV

SEQ ID NO: 31187 - protein, 9 aa, synthetic construct
  source 1..9: note = Seed: LVVVGARGV (KRAS G12R)
WVVLGDRGA

SEQ ID NO: 31188 - protein, 9 aa, synthetic construct
  source 1..9: note = Seed: LVVVGARGV (KRAS G12R)
WVVLGDRGI

SEQ ID NO: 31189 - protein, 9 aa, synthetic construct
  source 1..9: note = Seed: LVVVGARGV (KRAS G12R)
WVVLGDRGL

SEQ ID NO: 31190 - protein, 9 aa, synthetic construct
  source 1..9: note = Seed: LVVVGARGV (KRAS G12R)
WVVLGDRGV

SEQ ID NO: 31191 - protein, 9 aa, synthetic construct
  source 1..9: note = Seed: LVVVGARGV (KRAS G12R)
WVVLGERGA

SEQ ID NO: 31192 - protein, 9 aa, synthetic construct
  source 1..9: note = Seed: LVVVGARGV (KRAS G12R)
WVVLGERGI

SEQ ID NO: 31193 - protein, 9 aa, synthetic construct
  source 1..9: note = Seed: LVVVGARGV (KRAS G12R)
WVVLGERGL

SEQ ID NO: 31194 - protein, 9 aa, synthetic construct
  source 1..9: note = Seed: LVVVGARGV (KRAS G12R)
WVVLGERGV

SEQ ID NO: 31195 - protein, 9 aa, synthetic construct
  source 1..9: note = Seed: LVVVGARGV (KRAS G12R)
WVVLGFRGL

SEQ ID NO: 31196 - protein, 9 aa, synthetic construct
  source 1..9: note = Seed: LVVVGARGV (KRAS G12R)
WVVLGGRGA

SEQ ID NO: 31197 - protein, 9 aa, synthetic construct
  source 1..9: note = Seed: LVVVGARGV (KRAS G12R)
WVVLGGRGC

SEQ ID NO: 31198 - protein, 9 aa, synthetic construct
  source 1..9: note = Seed: LVVVGARGV (KRAS G12R)
WVVLGGRGD

SEQ ID NO: 31199 - protein, 9 aa, synthetic construct
  source 1..9: note = Seed: LVVVGARGV (KRAS G12R)
WVVLGGRGE

SEQ ID NO: 31200 - protein, 9 aa, synthetic construct
  source 1..9: note = Seed: LVVVGARGV (KRAS G12R)
WVVLGGRGF

SEQ ID NO: 31201 - protein, 9 aa, synthetic construct
  source 1..9: note = Seed: LVVVGARGV (KRAS G12R)
WVVLGGRGG

SEQ ID NO: 31202 - protein, 9 aa, synthetic construct
  source 1..9: note = Seed: LVVVGARGV (KRAS G12R)
WVVLGGRGH

SEQ ID NO: 31203 - protein, 9 aa, synthetic construct
  source 1..9: note = Seed: LVVVGARGV (KRAS G12R)
WVVLGGRGI

SEQ ID NO: 31204 - protein, 9 aa, synthetic construct
  source 1..9: note = Seed: LVVVGARGV (KRAS G12R)
WVVLGGRGL

SEQ ID NO: 31205 - protein, 9 aa, synthetic construct
  source 1..9: note = Seed: LVVVGARGV (KRAS G12R)
WVVLGGRGM

SEQ ID NO: 31206 - protein, 9 aa, synthetic construct
  source 1..9: note = Seed: LVVVGARGV (KRAS G12R)
WVVLGGRGN

SEQ ID NO: 31207 - protein, 9 aa, synthetic construct
  source 1..9: note = Seed: LVVVGARGV (KRAS G12R)
WVVLGGRGP

SEQ ID NO: 31208 - protein, 9 aa, synthetic construct
  source 1..9: note = Seed: LVVVGARGV (KRAS G12R)
WVVLGGRGQ

SEQ ID NO: 31209 - protein, 9 aa, synthetic construct
  source 1..9: note = Seed: LVVVGARGV (KRAS G12R)
WVVLGGRGR

SEQ ID NO: 31210 - protein, 9 aa, synthetic construct
  source 1..9: note = Seed: LVVVGARGV (KRAS G12R)
WVVLGGRGS

SEQ ID NO: 31211 - protein, 9 aa, synthetic construct
  source 1..9: note = Seed: LVVVGARGV (KRAS G12R)
WVVLGGRGT

SEQ ID NO: 31212 - protein, 9 aa, synthetic construct
  source 1..9: note = Seed: LVVVGARGV (KRAS G12R)
WVVLGGRGV

SEQ ID NO: 31213 - protein, 9 aa, synthetic construct
  source 1..9: note = Seed: LVVVGARGV (KRAS G12R)
WVVLGGRGW

SEQ ID NO: 31214 - protein, 9 aa, synthetic construct
  source 1..9: note = Seed: LVVVGARGV (KRAS G12R)
WVVLGGRGY

SEQ ID NO: 31215 - protein, 9 aa, synthetic construct
  source 1..9: note = Seed: LVVVGARGV (KRAS G12R)
WVVLGHRGA

SEQ ID NO: 31216 - protein, 9 aa, synthetic construct
  source 1..9: note = Seed: LVVVGARGV (KRAS G12R)
WVVLGHRGF

SEQ ID NO: 31217 - protein, 9 aa, synthetic construct
  source 1..9: note = Seed: LVVVGARGV (KRAS G12R)
WVVLGHRGH

SEQ ID NO: 31218 - protein, 9 aa, synthetic construct
  source 1..9: note = Seed: LVVVGARGV (KRAS G12R)
WVVLGHRGI

SEQ ID NO: 31219 - protein, 9 aa, synthetic construct
  source 1..9: note = Seed: LVVVGARGV (KRAS G12R)
WVVLGHRGL

SEQ ID NO: 31220 - protein, 9 aa, synthetic construct
  source 1..9: note = Seed: LVVVGARGV (KRAS G12R)
WVVLGHRGM

SEQ ID NO: 31221 - protein, 9 aa, synthetic construct
  source 1..9: note = Seed: LVVVGARGV (KRAS G12R)
WVVLGHRGQ

SEQ ID NO: 31222 - protein, 9 aa, synthetic construct
  source 1..9: note = Seed: LVVVGARGV (KRAS G12R)
WVVLGHRGR

SEQ ID NO: 31223 - protein, 9 aa, synthetic construct
  source 1..9: note = Seed: LVVVGARGV (KRAS G12R)
WVVLGHRGS

SEQ ID NO: 31224 - protein, 9 aa, synthetic construct
  source 1..9: note = Seed: LVVVGARGV (KRAS G12R)
WVVLGHRGT

SEQ ID NO: 31225 - protein, 9 aa, synthetic construct
  source 1..9: note = Seed: LVVVGARGV (KRAS G12R)
WVVLGHRGV

SEQ ID NO: 31226 - protein, 9 aa, synthetic construct
  source 1..9: note = Seed: LVVVGARGV (KRAS G12R)
WVVLGHRGY

SEQ ID NO: 31227 - protein, 9 aa, synthetic construct
  source 1..9: note = Seed: LVVVGARGV (KRAS G12R)
WVVLGIRGA

SEQ ID NO: 31228 - protein, 9 aa, synthetic construct
  source 1..9: note = Seed: LVVVGARGV (KRAS G12R)
WVVLGIRGF

SEQ ID NO: 31229 - protein, 9 aa, synthetic construct
  source 1..9: note = Seed: LVVVGARGV (KRAS G12R)
WVVLGIRGG

SEQ ID NO: 31230 - protein, 9 aa, synthetic construct
  source 1..9: note = Seed: LVVVGARGV (KRAS G12R)
WVVLGIRGH

SEQ ID NO: 31231 - protein, 9 aa, synthetic construct
  source 1..9: note = Seed: LVVVGARGV (KRAS G12R)
WVVLGIRGI

SEQ ID NO: 31232 - protein, 9 aa, synthetic construct
  source 1..9: note = Seed: LVVVGARGV (KRAS G12R)
WVVLGIRGL

SEQ ID NO: 31233 - protein, 9 aa, synthetic construct
  source 1..9: note = Seed: LVVVGARGV (KRAS G12R)
WVVLGIRGM

SEQ ID NO: 31234 - protein, 9 aa, synthetic construct
  source 1..9: note = Seed: LVVVGARGV (KRAS G12R)
WVVLGIRGN

SEQ ID NO: 31235 - protein, 9 aa, synthetic construct
  source 1..9: note = Seed: LVVVGARGV (KRAS G12R)
WVVLGIRGQ

SEQ ID NO: 31236 - protein, 9 aa, synthetic construct
  source 1..9: note = Seed: LVVVGARGV (KRAS G12R)
WVVLGIRGR

SEQ ID NO: 31237 - protein, 9 aa, synthetic construct
  source 1..9: note = Seed: LVVVGARGV (KRAS G12R)
WVVLGIRGS

SEQ ID NO: 31238 - protein, 9 aa, synthetic construct
  source 1..9: note = Seed: LVVVGARGV (KRAS G12R)
WVVLGIRGT

SEQ ID NO: 31239 - protein, 9 aa, synthetic construct
  source 1..9: note = Seed: LVVVGARGV (KRAS G12R)
WVVLGIRGV

SEQ ID NO: 31240 - protein, 9 aa, synthetic construct
  source 1..9: note = Seed: LVVVGARGV (KRAS G12R)
WVVLGKRGA

SEQ ID NO: 31241 - protein, 9 aa, synthetic construct
  source 1..9: note = Seed: LVVVGARGV (KRAS G12R)
WVVLGKRGF

SEQ ID NO: 31242 - protein, 9 aa, synthetic construct
  source 1..9: note = Seed: LVVVGARGV (KRAS G12R)
WVVLGKRGG

SEQ ID NO: 31243 - protein, 9 aa, synthetic construct
  source 1..9: note = Seed: LVVVGARGV (KRAS G12R)
WVVLGKRGH

SEQ ID NO: 31244 - protein, 9 aa, synthetic construct
  source 1..9: note = Seed: LVVVGARGV (KRAS G12R)
WVVLGKRGI

SEQ ID NO: 31245 - protein, 9 aa, synthetic construct
  source 1..9: note = Seed: LVVVGARGV (KRAS G12R)
WVVLGKRGK

SEQ ID NO: 31246 - protein, 9 aa, synthetic construct
  source 1..9: note = Seed: LVVVGARGV (KRAS G12R)
WVVLGKRGL

SEQ ID NO: 31247 - protein, 9 aa, synthetic construct
  source 1..9: note = Seed: LVVVGARGV (KRAS G12R)
WVVLGKRGM

SEQ ID NO: 31248 - protein, 9 aa, synthetic construct
  source 1..9: note = Seed: LVVVGARGV (KRAS G12R)
WVVLGKRGN

SEQ ID NO: 31249 - protein, 9 aa, synthetic construct
  source 1..9: note = Seed: LVVVGARGV (KRAS G12R)
WVVLGKRGP

SEQ ID NO: 31250 - protein, 9 aa, synthetic construct
  source 1..9: note = Seed: LVVVGARGV (KRAS G12R)
WVVLGKRGQ

SEQ ID NO: 31251 - protein, 9 aa, synthetic construct
  source 1..9: note = Seed: LVVVGARGV (KRAS G12R)
WVVLGKRGR

SEQ ID NO: 31252 - protein, 9 aa, synthetic construct
  source 1..9: note = Seed: LVVVGARGV (KRAS G12R)
WVVLGKRGS

SEQ ID NO: 31253 - protein, 9 aa, synthetic construct
  source 1..9: note = Seed: LVVVGARGV (KRAS G12R)
WVVLGKRGT

SEQ ID NO: 31254 - protein, 9 aa, synthetic construct
  source 1..9: note = Seed: LVVVGARGV (KRAS G12R)
WVVLGKRGV

SEQ ID NO: 31255 - protein, 9 aa, synthetic construct
  source 1..9: note = Seed: LVVVGARGV (KRAS G12R)
WVVLGKRGW

SEQ ID NO: 31256 - protein, 9 aa, synthetic construct
  source 1..9: note = Seed: LVVVGARGV (KRAS G12R)
WVVLGKRGY

SEQ ID NO: 31257 - protein, 9 aa, synthetic construct
  source 1..9: note = Seed: LVVVGARGV (KRAS G12R)
WVVLGLRGA

SEQ ID NO: 31258 - protein, 9 aa, synthetic construct
  source 1..9: note = Seed: LVVVGARGV (KRAS G12R)
WVVLGLRGI

SEQ ID NO: 31259 - protein, 9 aa, synthetic construct
  source 1..9: note = Seed: LVVVGARGV (KRAS G12R)
WVVLGLRGL

SEQ ID NO: 31260 - protein, 9 aa, synthetic construct
  source 1..9: note = Seed: LVVVGARGV (KRAS G12R)
WVVLGLRGM

SEQ ID NO: 31261 - protein, 9 aa, synthetic construct
  source 1..9: note = Seed: LVVVGARGV (KRAS G12R)
WVVLGLRGN

SEQ ID NO: 31262 - protein, 9 aa, synthetic construct
  source 1..9: note = Seed: LVVVGARGV (KRAS G12R)
WVVLGLRGQ

SEQ ID NO: 31263 - protein, 9 aa, synthetic construct
  source 1..9: note = Seed: LVVVGARGV (KRAS G12R)
WVVLGLRGR

SEQ ID NO: 31264 - protein, 9 aa, synthetic construct
  source 1..9: note = Seed: LVVVGARGV (KRAS G12R)
WVVLGLRGS

SEQ ID NO: 31265 - protein, 9 aa, synthetic construct
  source 1..9: note = Seed: LVVVGARGV (KRAS G12R)
WVVLGLRGT

SEQ ID NO: 31266 - protein, 9 aa, synthetic construct
  source 1..9: note = Seed: LVVVGARGV (KRAS G12R)
WVVLGLRGV

SEQ ID NO: 31267 - protein, 9 aa, synthetic construct
  source 1..9: note = Seed: LVVVGARGV (KRAS G12R)
WVVLGMRGA

SEQ ID NO: 31268 - protein, 9 aa, synthetic construct
  source 1..9: note = Seed: LVVVGARGV (KRAS G12R)
WVVLGMRGF

SEQ ID NO: 31269 - protein, 9 aa, synthetic construct
  source 1..9: note = Seed: LVVVGARGV (KRAS G12R)
WVVLGMRGI

SEQ ID NO: 31270 - protein, 9 aa, synthetic construct
  source 1..9: note = Seed: LVVVGARGV (KRAS G12R)
WVVLGMRGL

SEQ ID NO: 31271 - protein, 9 aa, synthetic construct
  source 1..9: note = Seed: LVVVGARGV (KRAS G12R)
WVVLGMRGM

SEQ ID NO: 31272 - protein, 9 aa, synthetic construct
  source 1..9: note = Seed: LVVVGARGV (KRAS G12R)
WVVLGMRGN

SEQ ID NO: 31273 - protein, 9 aa, synthetic construct
  source 1..9: note = Seed: LVVVGARGV (KRAS G12R)
WVVLGMRGR

SEQ ID NO: 31274 - protein, 9 aa, synthetic construct
  source 1..9: note = Seed: LVVVGARGV (KRAS G12R)
WVVLGMRGS

SEQ ID NO: 31275 - protein, 9 aa, synthetic construct
  source 1..9: note = Seed: LVVVGARGV (KRAS G12R)
WVVLGMRGT

SEQ ID NO: 31276 - protein, 9 aa, synthetic construct
  source 1..9: note = Seed: LVVVGARGV (KRAS G12R)
WVVLGMRGV

SEQ ID NO: 31277 - protein, 9 aa, synthetic construct
  source 1..9: note = Seed: LVVVGARGV (KRAS G12R)
WVVLGNRGA

SEQ ID NO: 31278 - protein, 9 aa, synthetic construct
  source 1..9: note = Seed: LVVVGARGV (KRAS G12R)
WVVLGNRGC

SEQ ID NO: 31279 - protein, 9 aa, synthetic construct
  source 1..9: note = Seed: LVVVGARGV (KRAS G12R)
WVVLGNRGF

SEQ ID NO: 31280 - protein, 9 aa, synthetic construct
  source 1..9: note = Seed: LVVVGARGV (KRAS G12R)
WVVLGNRGG

SEQ ID NO: 31281 - protein, 9 aa, synthetic construct
  source 1..9: note = Seed: LVVVGARGV (KRAS G12R)
WVVLGNRGH

SEQ ID NO: 31282 - protein, 9 aa, synthetic construct
  source 1..9: note = Seed: LVVVGARGV (KRAS G12R)
WVVLGNRGI

SEQ ID NO: 31283 - protein, 9 aa, synthetic construct
  source 1..9: note = Seed: LVVVGARGV (KRAS G12R)
WVVLGNRGL

SEQ ID NO: 31284 - protein, 9 aa, synthetic construct
  source 1..9: note = Seed: LVVVGARGV (KRAS G12R)
WVVLGNRGM

SEQ ID NO: 31285 - protein, 9 aa, synthetic construct
  source 1..9: note = Seed: LVVVGARGV (KRAS G12R)
WVVLGNRGN

SEQ ID NO: 31286 - protein, 9 aa, synthetic construct
  source 1..9: note = Seed: LVVVGARGV (KRAS G12R)
WVVLGNRGP

SEQ ID NO: 31287 - protein, 9 aa, synthetic construct
  source 1..9: note = Seed: LVVVGARGV (KRAS G12R)
WVVLGNRGQ

SEQ ID NO: 31288 - protein, 9 aa, synthetic construct
  source 1..9: note = Seed: LVVVGARGV (KRAS G12R)
WVVLGNRGR

SEQ ID NO: 31289 - protein, 9 aa, synthetic construct
  source 1..9: note = Seed: LVVVGARGV (KRAS G12R)
WVVLGNRGS

SEQ ID NO: 31290 - protein, 9 aa, synthetic construct
  source 1..9: note = Seed: LVVVGARGV (KRAS G12R)
WVVLGNRGT

SEQ ID NO: 31291 - protein, 9 aa, synthetic construct
  source 1..9: note = Seed: LVVVGARGV (KRAS G12R)
WVVLGNRGV

SEQ ID NO: 31292 - protein, 9 aa, synthetic construct
  source 1..9: note = Seed: LVVVGARGV (KRAS G12R)
WVVLGNRGW

SEQ ID NO: 31293 - protein, 9 aa, synthetic construct
  source 1..9: note = Seed: LVVVGARGV (KRAS G12R)
WVVLGNRGY

SEQ ID NO: 31294 - protein, 9 aa, synthetic construct
  source 1..9: note = Seed: LVVVGARGV (KRAS G12R)
WVVLGPRGA

SEQ ID NO: 31295 - protein, 9 aa, synthetic construct
  source 1..9: note = Seed: LVVVGARGV (KRAS G12R)
WVVLGPRGC

SEQ ID NO: 31296 - protein, 9 aa, synthetic construct
  source 1..9: note = Seed: LVVVGARGV (KRAS G12R)
WVVLGPRGF

SEQ ID NO: 31297 - protein, 9 aa, synthetic construct
  source 1..9: note = Seed: LVVVGARGV (KRAS G12R)
WVVLGPRGG

SEQ ID NO: 31298 - protein, 9 aa, synthetic construct
  source 1..9: note = Seed: LVVVGARGV (KRAS G12R)
WVVLGPRGH

SEQ ID NO: 31299 - protein, 9 aa, synthetic construct
  source 1..9: note = Seed: LVVVGARGV (KRAS G12R)
WVVLGPRGI

SEQ ID NO: 31300 - protein, 9 aa, synthetic construct
  source 1..9: note = Seed: LVVVGARGV (KRAS G12R)
WVVLGPRGL

SEQ ID NO: 31301 - protein, 9 aa, synthetic construct
  source 1..9: note = Seed: LVVVGARGV (KRAS G12R)
WVVLGPRGM

SEQ ID NO: 31302 - protein, 9 aa, synthetic construct
  source 1..9: note = Seed: LVVVGARGV (KRAS G12R)
WVVLGPRGN

SEQ ID NO: 31303 - protein, 9 aa, synthetic construct
  source 1..9: note = Seed: LVVVGARGV (KRAS G12R)
WVVLGPRGP

SEQ ID NO: 31304 - protein, 9 aa, synthetic construct
  source 1..9: note = Seed: LVVVGARGV (KRAS G12R)
WVVLGPRGQ

SEQ ID NO: 31305 - protein, 9 aa, synthetic construct
  source 1..9: note = Seed: LVVVGARGV (KRAS G12R)
WVVLGPRGS

SEQ ID NO: 31306 - protein, 9 aa, synthetic construct
  source 1..9: note = Seed: LVVVGARGV (KRAS G12R)
WVVLGPRGT

SEQ ID NO: 31307 - protein, 9 aa, synthetic construct
  source 1..9: note = Seed: LVVVGARGV (KRAS G12R)
WVVLGPRGV

SEQ ID NO: 31308 - protein, 9 aa, synthetic construct
  source 1..9: note = Seed: LVVVGARGV (KRAS G12R)
WVVLGPRGW

SEQ ID NO: 31309 - protein, 9 aa, synthetic construct
  source 1..9: note = Seed: LVVVGARGV (KRAS G12R)
WVVLGPRGY

SEQ ID NO: 31310 - protein, 9 aa, synthetic construct
  source 1..9: note = Seed: LVVVGARGV (KRAS G12R)
WVVLGQRGA

SEQ ID NO: 31311 - protein, 9 aa, synthetic construct
  source 1..9: note = Seed: LVVVGARGV (KRAS G12R)
WVVLGQRGI

SEQ ID NO: 31312 - protein, 9 aa, synthetic construct
  source 1..9: note = Seed: LVVVGARGV (KRAS G12R)
WVVLGQRGL

SEQ ID NO: 31313 - protein, 9 aa, synthetic construct
  source 1..9: note = Seed: LVVVGARGV (KRAS G12R)
WVVLGQRGM

SEQ ID NO: 31314 - protein, 9 aa, synthetic construct
  source 1..9: note = Seed: LVVVGARGV (KRAS G12R)
WVVLGQRGV

SEQ ID NO: 31315 - protein, 9 aa, synthetic construct
  source 1..9: note = Seed: LVVVGARGV (KRAS G12R)
WVVLGRRGA

SEQ ID NO: 31316 - protein, 9 aa, synthetic construct
  source 1..9: note = Seed: LVVVGARGV (KRAS G12R)
WVVLGRRGC

SEQ ID NO: 31317 - protein, 9 aa, synthetic construct
  source 1..9: note = Seed: LVVVGARGV (KRAS G12R)
WVVLGRRGE

SEQ ID NO: 31318 - protein, 9 aa, synthetic construct
  source 1..9: note = Seed: LVVVGARGV (KRAS G12R)
WVVLGRRGF

SEQ ID NO: 31319 - protein, 9 aa, synthetic construct
  source 1..9: note = Seed: LVVVGARGV (KRAS G12R)
WVVLGRRGG

SEQ ID NO: 31320 - protein, 9 aa, synthetic construct
  source 1..9: note = Seed: LVVVGARGV (KRAS G12R)
WVVLGRRGH

SEQ ID NO: 31321 - protein, 9 aa, synthetic construct
  source 1..9: note = Seed: LVVVGARGV (KRAS G12R)
WVVLGRRGI

SEQ ID NO: 31322 - protein, 9 aa, synthetic construct
  source 1..9: note = Seed: LVVVGARGV (KRAS G12R)
WVVLGRRGK

SEQ ID NO: 31323 - protein, 9 aa, synthetic construct
  source 1..9: note = Seed: LVVVGARGV (KRAS G12R)
WVVLGRRGL

SEQ ID NO: 31324 - protein, 9 aa, synthetic construct
  source 1..9: note = Seed: LVVVGARGV (KRAS G12R)
WVVLGRRGM

SEQ ID NO: 31325 - protein, 9 aa, synthetic construct
  source 1..9: note = Seed: LVVVGARGV (KRAS G12R)
WVVLGRRGN

SEQ ID NO: 31326 - protein, 9 aa, synthetic construct
  source 1..9: note = Seed: LVVVGARGV (KRAS G12R)
WVVLGRRGP

SEQ ID NO: 31327 - protein, 9 aa, synthetic construct
  source 1..9: note = Seed: LVVVGARGV (KRAS G12R)
WVVLGRRGQ

SEQ ID NO: 31328 - protein, 9 aa, synthetic construct
  source 1..9: note = Seed: LVVVGARGV (KRAS G12R)
WVVLGRRGR

SEQ ID NO: 31329 - protein, 9 aa, synthetic construct
  source 1..9: note = Seed: LVVVGARGV (KRAS G12R)
WVVLGRRGS

SEQ ID NO: 31330 - protein, 9 aa, synthetic construct
  source 1..9: note = Seed: LVVVGARGV (KRAS G12R)
WVVLGRRGT

SEQ ID NO: 31331 - protein, 9 aa, synthetic construct
  source 1..9: note = Seed: LVVVGARGV (KRAS G12R)
WVVLGRRGV

SEQ ID NO: 31332 - protein, 9 aa, synthetic construct
  source 1..9: note = Seed: LVVVGARGV (KRAS G12R)
WVVLGRRGW

SEQ ID NO: 31333 - protein, 9 aa, synthetic construct
  source 1..9: note = Seed: LVVVGARGV (KRAS G12R)
WVVLGRRGY

SEQ ID NO: 31334 - protein, 9 aa, synthetic construct
  source 1..9: note = Seed: LVVVGARGV (KRAS G12R)
WVVLGSRGA

SEQ ID NO: 31335 - protein, 9 aa, synthetic construct
  source 1..9: note = Seed: LVVVGARGV (KRAS G12R)
WVVLGSRGC

SEQ ID NO: 31336 - protein, 9 aa, synthetic construct
  source 1..9: note = Seed: LVVVGARGV (KRAS G12R)
WVVLGSRGE

SEQ ID NO: 31337 - protein, 9 aa, synthetic construct
  source 1..9: note = Seed: LVVVGARGV (KRAS G12R)
WVVLGSRGF

SEQ ID NO: 31338 - protein, 9 aa, synthetic construct
  source 1..9: note = Seed: LVVVGARGV (KRAS G12R)
WVVLGSRGG

SEQ ID NO: 31339 - protein, 9 aa, synthetic construct
  source 1..9: note = Seed: LVVVGARGV (KRAS G12R)
WVVLGSRGH

SEQ ID NO: 31340 - protein, 9 aa, synthetic construct
  source 1..9: note = Seed: LVVVGARGV (KRAS G12R)
WVVLGSRGI

SEQ ID NO: 31341 - protein, 9 aa, synthetic construct
  source 1..9: note = Seed: LVVVGARGV (KRAS G12R)
WVVLGSRGK

SEQ ID NO: 31342 - protein, 9 aa, synthetic construct
  source 1..9: note = Seed: LVVVGARGV (KRAS G12R)
WVVLGSRGL

SEQ ID NO: 31343 - protein, 9 aa, synthetic construct
  source 1..9: note = Seed: LVVVGARGV (KRAS G12R)
WVVLGSRGM

SEQ ID NO: 31344 - protein, 9 aa, synthetic construct
  source 1..9: note = Seed: LVVVGARGV (KRAS G12R)
WVVLGSRGN

SEQ ID NO: 31345 - protein, 9 aa, synthetic construct
  source 1..9: note = Seed: LVVVGARGV (KRAS G12R)
WVVLGSRGP

SEQ ID NO: 31346 - protein, 9 aa, synthetic construct
  source 1..9: note = Seed: LVVVGARGV (KRAS G12R)
WVVLGSRGQ

SEQ ID NO: 31347 - protein, 9 aa, synthetic construct
  source 1..9: note = Seed: LVVVGARGV (KRAS G12R)
WVVLGSRGR

SEQ ID NO: 31348 - protein, 9 aa, synthetic construct
  source 1..9: note = Seed: LVVVGARGV (KRAS G12R)
WVVLGSRGS

SEQ ID NO: 31349 - protein, 9 aa, synthetic construct
  source 1..9: note = Seed: LVVVGARGV (KRAS G12R)
WVVLGSRGT

SEQ ID NO: 31350 - protein, 9 aa, synthetic construct
  source 1..9: note = Seed: LVVVGARGV (KRAS G12R)
WVVLGSRGV

SEQ ID NO: 31351 - protein, 9 aa, synthetic construct
  source 1..9: note = Seed: LVVVGARGV (KRAS G12R)
WVVLGSRGW

SEQ ID NO: 31352 - protein, 9 aa, synthetic construct
  source 1..9: note = Seed: LVVVGARGV (KRAS G12R)
WVVLGSRGY

SEQ ID NO: 31353 - protein, 9 aa, synthetic construct
  source 1..9: note = Seed: LVVVGARGV (KRAS G12R)
WVVLGTRGA

SEQ ID NO: 31354 - protein, 9 aa, synthetic construct
  source 1..9: note = Seed: LVVVGARGV (KRAS G12R)
WVVLGTRGC

SEQ ID NO: 31355 - protein, 9 aa, synthetic construct
  source 1..9: note = Seed: LVVVGARGV (KRAS G12R)
WVVLGTRGF

SEQ ID NO: 31356 - protein, 9 aa, synthetic construct
  source 1..9: note = Seed: LVVVGARGV (KRAS G12R)
WVVLGTRGG

SEQ ID NO: 31357 - protein, 9 aa, synthetic construct
  source 1..9: note = Seed: LVVVGARGV (KRAS G12R)
WVVLGTRGH

SEQ ID NO: 31358 - protein, 9 aa, synthetic construct
  source 1..9: note = Seed: LVVVGARGV (KRAS G12R)
WVVLGTRGI

SEQ ID NO: 31359 - protein, 9 aa, synthetic construct
  source 1..9: note = Seed: LVVVGARGV (KRAS G12R)
WVVLGTRGL

SEQ ID NO: 31360 - protein, 9 aa, synthetic construct
  source 1..9: note = Seed: LVVVGARGV (KRAS G12R)
WVVLGTRGM

SEQ ID NO: 31361 - protein, 9 aa, synthetic construct
  source 1..9: note = Seed: LVVVGARGV (KRAS G12R)
WVVLGTRGN

SEQ ID NO: 31362 - protein, 9 aa, synthetic construct
  source 1..9: note = Seed: LVVVGARGV (KRAS G12R)
WVVLGTRGP

SEQ ID NO: 31363 - protein, 9 aa, synthetic construct
  source 1..9: note = Seed: LVVVGARGV (KRAS G12R)
WVVLGTRGQ

SEQ ID NO: 31364 - protein, 9 aa, synthetic construct
  source 1..9: note = Seed: LVVVGARGV (KRAS G12R)
WVVLGTRGR

SEQ ID NO: 31365 - protein, 9 aa, synthetic construct
  source 1..9: note = Seed: LVVVGARGV (KRAS G12R)
WVVLGTRGS

SEQ ID NO: 31366 - protein, 9 aa, synthetic construct
  source 1..9: note = Seed: LVVVGARGV (KRAS G12R)
WVVLGTRGT

SEQ ID NO: 31367 - protein, 9 aa, synthetic construct
  source 1..9: note = Seed: LVVVGARGV (KRAS G12R)
WVVLGTRGV

SEQ ID NO: 31368 - protein, 9 aa, synthetic construct
  source 1..9: note = Seed: LVVVGARGV (KRAS G12R)
WVVLGTRGW

SEQ ID NO: 31369 - protein, 9 aa, synthetic construct
  source 1..9: note = Seed: LVVVGARGV (KRAS G12R)
WVVLGTRGY

SEQ ID NO: 31370 - protein, 9 aa, synthetic construct
  source 1..9: note = Seed: LVVVGARGV (KRAS G12R)
WVVLGVRGA

SEQ ID NO: 31371 - protein, 9 aa, synthetic construct
  source 1..9: note = Seed: LVVVGARGV (KRAS G12R)
WVVLGVRGC

SEQ ID NO: 31372 - protein, 9 aa, synthetic construct
  source 1..9: note = Seed: LVVVGARGV (KRAS G12R)
WVVLGVRGD

SEQ ID NO: 31373 - protein, 9 aa, synthetic construct
  source 1..9: note = Seed: LVVVGARGV (KRAS G12R)
WVVLGVRGF

SEQ ID NO: 31374 - protein, 9 aa, synthetic construct
  source 1..9: note = Seed: LVVVGARGV (KRAS G12R)
WVVLGVRGG

SEQ ID NO: 31375 - protein, 9 aa, synthetic construct
  source 1..9: note = Seed: LVVVGARGV (KRAS G12R)
WVVLGVRGH

SEQ ID NO: 31376 - protein, 9 aa, synthetic construct
  source 1..9: note = Seed: LVVVGARGV (KRAS G12R)
WVVLGVRGI

SEQ ID NO: 31377 - protein, 9 aa, synthetic construct
  source 1..9: note = Seed: LVVVGARGV (KRAS G12R)
WVVLGVRGL

SEQ ID NO: 31378 - protein, 9 aa, synthetic construct
  source 1..9: note = Seed: LVVVGARGV (KRAS G12R)
WVVLGVRGM

SEQ ID NO: 31379 - protein, 9 aa, synthetic construct
  source 1..9: note = Seed: LVVVGARGV (KRAS G12R)
WVVLGVRGN

SEQ ID NO: 31380 - protein, 9 aa, synthetic construct
  source 1..9: note = Seed: LVVVGARGV (KRAS G12R)
WVVLGVRGP

SEQ ID NO: 31381 - protein, 9 aa, synthetic construct
  source 1..9: note = Seed: LVVVGARGV (KRAS G12R)
WVVLGVRGQ

SEQ ID NO: 31382 - protein, 9 aa, synthetic construct
  source 1..9: note = Seed: LVVVGARGV (KRAS G12R)
WVVLGVRGR

SEQ ID NO: 31383 - protein, 9 aa, synthetic construct
  source 1..9: note = Seed: LVVVGARGV (KRAS G12R)
WVVLGVRGS

SEQ ID NO: 31384 - protein, 9 aa, synthetic construct
  source 1..9: note = Seed: LVVVGARGV (KRAS G12R)
WVVLGVRGT

SEQ ID NO: 31385 - protein, 9 aa, synthetic construct
  source 1..9: note = Seed: LVVVGARGV (KRAS G12R)
WVVLGVRGV

SEQ ID NO: 31386 - protein, 9 aa, synthetic construct
  source 1..9: note = Seed: LVVVGARGV (KRAS G12R)
WVVLGWRGA

SEQ ID NO: 31387 - protein, 9 aa, synthetic construct
  source 1..9: note = Seed: LVVVGARGV (KRAS G12R)
WVVLGWRGI

SEQ ID NO: 31388 - protein, 9 aa, synthetic construct
  source 1..9: note = Seed: LVVVGARGV (KRAS G12R)
WVVLGWRGL

SEQ ID NO: 31389 - protein, 9 aa, synthetic construct
  source 1..9: note = Seed: LVVVGARGV (KRAS G12R)
WVVLGWRGV

SEQ ID NO: 31390 - protein, 9 aa, synthetic construct
  source 1..9: note = Seed: LVVVGARGV (KRAS G12R)
WVVMGARGA

SEQ ID NO: 31391 - protein, 9 aa, synthetic construct
  source 1..9: note = Seed: LVVVGARGV (KRAS G12R)
WVVMGARGC

SEQ ID NO: 31392 - protein, 9 aa, synthetic construct
  source 1..9: note = Seed: LVVVGARGV (KRAS G12R)
WVVMGARGD

SEQ ID NO: 31393 - protein, 9 aa, synthetic construct
  source 1..9: note = Seed: LVVVGARGV (KRAS G12R)
WVVMGARGE

SEQ ID NO: 31394 - protein, 9 aa, synthetic construct
  source 1..9: note = Seed: LVVVGARGV (KRAS G12R)
WVVMGARGF

SEQ ID NO: 31395 - protein, 9 aa, synthetic construct
  source 1..9: note = Seed: LVVVGARGV (KRAS G12R)
WVVMGARGG

SEQ ID NO: 31396 - protein, 9 aa, synthetic construct
  source 1..9: note = Seed: LVVVGARGV (KRAS G12R)
WVVMGARGH

SEQ ID NO: 31397 - protein, 9 aa, synthetic construct
  source 1..9: note = Seed: LVVVGARGV (KRAS G12R)
WVVMGARGI

SEQ ID NO: 31398 - protein, 9 aa, synthetic construct
  source 1..9: note = Seed: LVVVGARGV (KRAS G12R)
WVVMGARGK

SEQ ID NO: 31399 - protein, 9 aa, synthetic construct
  source 1..9: note = Seed: LVVVGARGV (KRAS G12R)
WVVMGARGL

SEQ ID NO: 31400 - protein, 9 aa, synthetic construct
  source 1..9: note = Seed: LVVVGARGV (KRAS G12R)
WVVMGARGM

SEQ ID NO: 31401 - protein, 9 aa, synthetic construct
  source 1..9: note = Seed: LVVVGARGV (KRAS G12R)
WVVMGARGN

SEQ ID NO: 31402 - protein, 9 aa, synthetic construct
  source 1..9: note = Seed: LVVVGARGV (KRAS G12R)
WVVMGARGP

SEQ ID NO: 31403 - protein, 9 aa, synthetic construct
  source 1..9: note = Seed: LVVVGARGV (KRAS G12R)
WVVMGARGQ

SEQ ID NO: 31404 - protein, 9 aa, synthetic construct
  source 1..9: note = Seed: LVVVGARGV (KRAS G12R)
WVVMGARGR

SEQ ID NO: 31405 - protein, 9 aa, synthetic construct
  source 1..9: note = Seed: LVVVGARGV (KRAS G12R)
WVVMGARGS

SEQ ID NO: 31406 - protein, 9 aa, synthetic construct
  source 1..9: note = Seed: LVVVGARGV (KRAS G12R)
WVVMGARGT

SEQ ID NO: 31407 - protein, 9 aa, synthetic construct
  source 1..9: note = Seed: LVVVGARGV (KRAS G12R)
WVVMGARGV

SEQ ID NO: 31408 - protein, 9 aa, synthetic construct
  source 1..9: note = Seed: LVVVGARGV (KRAS G12R)
WVVMGARGW

SEQ ID NO: 31409 - protein, 9 aa, synthetic construct
  source 1..9: note = Seed: LVVVGARGV (KRAS G12R)
WVVMGARGY

SEQ ID NO: 31410 - protein, 9 aa, synthetic construct
  source 1..9: note = Seed: LVVVGARGV (KRAS G12R)
WVVMGCRGA

SEQ ID NO: 31411 - protein, 9 aa, synthetic construct
  source 1..9: note = Seed: LVVVGARGV (KRAS G12R)
WVVMGCRGI

SEQ ID NO: 31412 - protein, 9 aa, synthetic construct
  source 1..9: note = Seed: LVVVGARGV (KRAS G12R)
WVVMGCRGL

SEQ ID NO: 31413 - protein, 9 aa, synthetic construct
  source 1..9: note = Seed: LVVVGARGV (KRAS G12R)
WVVMGCRGM

SEQ ID NO: 31414 - protein, 9 aa, synthetic construct
  source 1..9: note = Seed: LVVVGARGV (KRAS G12R)
WVVMGCRGV

SEQ ID NO: 31415 - protein, 9 aa, synthetic construct
  source 1..9: note = Seed: LVVVGARGV (KRAS G12R)
WVVMGDRGA

SEQ ID NO: 31416 - protein, 9 aa, synthetic construct
  source 1..9: note = Seed: LVVVGARGV (KRAS G12R)
WVVMGDRGI

SEQ ID NO: 31417 - protein, 9 aa, synthetic construct
  source 1..9: note = Seed: LVVVGARGV (KRAS G12R)
WVVMGDRGL

SEQ ID NO: 31418 - protein, 9 aa, synthetic construct
  source 1..9: note = Seed: LVVVGARGV (KRAS G12R)
WVVMGDRGV

SEQ ID NO: 31419 - protein, 9 aa, synthetic construct
  source 1..9: note = Seed: LVVVGARGV (KRAS G12R)
WVVMGERGA

SEQ ID NO: 31420 - protein, 9 aa, synthetic construct
  source 1..9: note = Seed: LVVVGARGV (KRAS G12R)
WVVMGERGI

SEQ ID NO: 31421 - protein, 9 aa, synthetic construct
  source 1..9: note = Seed: LVVVGARGV (KRAS G12R)
WVVMGERGL

SEQ ID NO: 31422 - protein, 9 aa, synthetic construct
  source 1..9: note = Seed: LVVVGARGV (KRAS G12R)
WVVMGERGM

SEQ ID NO: 31423 - protein, 9 aa, synthetic construct
  source 1..9: note = Seed: LVVVGARGV (KRAS G12R)
WVVMGERGV

SEQ ID NO: 31424 - protein, 9 aa, synthetic construct
  source 1..9: note = Seed: LVVVGARGV (KRAS G12R)
WVVMGFRGL

SEQ ID NO: 31425 - protein, 9 aa, synthetic construct
  source 1..9: note = Seed: LVVVGARGV (KRAS G12R)
WVVMGFRGM

SEQ ID NO: 31426 - protein, 9 aa, synthetic construct
  source 1..9: note = Seed: LVVVGARGV (KRAS G12R)
WVVMGGRGA

SEQ ID NO: 31427 - protein, 9 aa, synthetic construct
  source 1..9: note = Seed: LVVVGARGV (KRAS G12R)
WVVMGGRGC

SEQ ID NO: 31428 - protein, 9 aa, synthetic construct
  source 1..9: note = Seed: LVVVGARGV (KRAS G12R)
WVVMGGRGE

SEQ ID NO: 31429 - protein, 9 aa, synthetic construct
  source 1..9: note = Seed: LVVVGARGV (KRAS G12R)
WVVMGGRGF

SEQ ID NO: 31430 - protein, 9 aa, synthetic construct
  source 1..9: note = Seed: LVVVGARGV (KRAS G12R)
WVVMGGRGG

SEQ ID NO: 31431 - protein, 9 aa, synthetic construct
  source 1..9: note = Seed: LVVVGARGV (KRAS G12R)
WVVMGGRGH

SEQ ID NO: 31432 - protein, 9 aa, synthetic construct
  source 1..9: note = Seed: LVVVGARGV (KRAS G12R)
WVVMGGRGI

SEQ ID NO: 31433 - protein, 9 aa, synthetic construct
  source 1..9: note = Seed: LVVVGARGV (KRAS G12R)
WVVMGGRGL

SEQ ID NO: 31434 - protein, 9 aa, synthetic construct
  source 1..9: note = Seed: LVVVGARGV (KRAS G12R)
WVVMGGRGM

SEQ ID NO: 31435 - protein, 9 aa, synthetic construct
  source 1..9: note = Seed: LVVVGARGV (KRAS G12R)
WVVMGGRGN

SEQ ID NO: 31436 - protein, 9 aa, synthetic construct
  source 1..9: note = Seed: LVVVGARGV (KRAS G12R)
WVVMGGRGP

SEQ ID NO: 31437 - protein, 9 aa, synthetic construct
  source 1..9: note = Seed: LVVVGARGV (KRAS G12R)
WVVMGGRGQ

SEQ ID NO: 31438 - protein, 9 aa, synthetic construct
  source 1..9: note = Seed: LVVVGARGV (KRAS G12R)
WVVMGGRGR

SEQ ID NO: 31439 - protein, 9 aa, synthetic construct
  source 1..9: note = Seed: LVVVGARGV (KRAS G12R)
WVVMGGRGS

SEQ ID NO: 31440 - protein, 9 aa, synthetic construct
  source 1..9: note = Seed: LVVVGARGV (KRAS G12R)
WVVMGGRGT

SEQ ID NO: 31441 - protein, 9 aa, synthetic construct
  source 1..9: note = Seed: LVVVGARGV (KRAS G12R)
WVVMGGRGV

SEQ ID NO: 31442 - protein, 9 aa, synthetic construct
  source 1..9: note = Seed: LVVVGARGV (KRAS G12R)
WVVMGGRGW

SEQ ID NO: 31443 - protein, 9 aa, synthetic construct
  source 1..9: note = Seed: LVVVGARGV (KRAS G12R)
WVVMGGRGY

SEQ ID NO: 31444 - protein, 9 aa, synthetic construct
  source 1..9: note = Seed: LVVVGARGV (KRAS G12R)
WVVMGHRGA

SEQ ID NO: 31445 - protein, 9 aa, synthetic construct
  source 1..9: note = Seed: LVVVGARGV (KRAS G12R)
WVVMGHRGH

SEQ ID NO: 31446 - protein, 9 aa, synthetic construct
  source 1..9: note = Seed: LVVVGARGV (KRAS G12R)
WVVMGHRGI

SEQ ID NO: 31447 - protein, 9 aa, synthetic construct
  source 1..9: note = Seed: LVVVGARGV (KRAS G12R)
WVVMGHRGL

SEQ ID NO: 31448 - protein, 9 aa, synthetic construct
  source 1..9: note = Seed: LVVVGARGV (KRAS G12R)
WVVMGHRGM

SEQ ID NO: 31449 - protein, 9 aa, synthetic construct
  source 1..9: note = Seed: LVVVGARGV (KRAS G12R)
WVVMGHRGQ

SEQ ID NO: 31450 - protein, 9 aa, synthetic construct
  source 1..9: note = Seed: LVVVGARGV (KRAS G12R)
WVVMGHRGR

SEQ ID NO: 31451 - protein, 9 aa, synthetic construct
  source 1..9: note = Seed: LVVVGARGV (KRAS G12R)
WVVMGHRGS

SEQ ID NO: 31452 - protein, 9 aa, synthetic construct
  source 1..9: note = Seed: LVVVGARGV (KRAS G12R)
WVVMGHRGT

SEQ ID NO: 31453 - protein, 9 aa, synthetic construct
  source 1..9: note = Seed: LVVVGARGV (KRAS G12R)
WVVMGHRGV

SEQ ID NO: 31454 - protein, 9 aa, synthetic construct
  source 1..9: note = Seed: LVVVGARGV (KRAS G12R)
WVVMGHRGY

SEQ ID NO: 31455 - protein, 9 aa, synthetic construct
  source 1..9: note = Seed: LVVVGARGV (KRAS G12R)
WVVMGIRGA

SEQ ID NO: 31456 - protein, 9 aa, synthetic construct
  source 1..9: note = Seed: LVVVGARGV (KRAS G12R)
WVVMGIRGF

SEQ ID NO: 31457 - protein, 9 aa, synthetic construct
  source 1..9: note = Seed: LVVVGARGV (KRAS G12R)
WVVMGIRGG

SEQ ID NO: 31458 - protein, 9 aa, synthetic construct
  source 1..9: note = Seed: LVVVGARGV (KRAS G12R)
WVVMGIRGH

SEQ ID NO: 31459 - protein, 9 aa, synthetic construct
  source 1..9: note = Seed: LVVVGARGV (KRAS G12R)
WVVMGIRGI

SEQ ID NO: 31460 - protein, 9 aa, synthetic construct
  source 1..9: note = Seed: LVVVGARGV (KRAS G12R)
WVVMGIRGL

SEQ ID NO: 31461 - protein, 9 aa, synthetic construct
  source 1..9: note = Seed: LVVVGARGV (KRAS G12R)
WVVMGIRGM

SEQ ID NO: 31462 - protein, 9 aa, synthetic construct
  source 1..9: note = Seed: LVVVGARGV (KRAS G12R)
WVVMGIRGN

SEQ ID NO: 31463 - protein, 9 aa, synthetic construct
  source 1..9: note = Seed: LVVVGARGV (KRAS G12R)
WVVMGIRGQ

SEQ ID NO: 31464 - protein, 9 aa, synthetic construct
  source 1..9: note = Seed: LVVVGARGV (KRAS G12R)
WVVMGIRGR

SEQ ID NO: 31465 - protein, 9 aa, synthetic construct
  source 1..9: note = Seed: LVVVGARGV (KRAS G12R)
WVVMGIRGS

SEQ ID NO: 31466 - protein, 9 aa, synthetic construct
  source 1..9: note = Seed: LVVVGARGV (KRAS G12R)
WVVMGIRGT

SEQ ID NO: 31467 - protein, 9 aa, synthetic construct
  source 1..9: note = Seed: LVVVGARGV (KRAS G12R)
WVVMGIRGV

SEQ ID NO: 31468 - protein, 9 aa, synthetic construct
  source 1..9: note = Seed: LVVVGARGV (KRAS G12R)
WVVMGKRGA

SEQ ID NO: 31469 - protein, 9 aa, synthetic construct
  source 1..9: note = Seed: LVVVGARGV (KRAS G12R)
WVVMGKRGF

SEQ ID NO: 31470 - protein, 9 aa, synthetic construct
  source 1..9: note = Seed: LVVVGARGV (KRAS G12R)
WVVMGKRGG

SEQ ID NO: 31471 - protein, 9 aa, synthetic construct
  source 1..9: note = Seed: LVVVGARGV (KRAS G12R)
WVVMGKRGH

SEQ ID NO: 31472 - protein, 9 aa, synthetic construct
  source 1..9: note = Seed: LVVVGARGV (KRAS G12R)
WVVMGKRGI

SEQ ID NO: 31473 - protein, 9 aa, synthetic construct
  source 1..9: note = Seed: LVVVGARGV (KRAS G12R)
WVVMGKRGK

SEQ ID NO: 31474 - protein, 9 aa, synthetic construct
  source 1..9: note = Seed: LVVVGARGV (KRAS G12R)
WVVMGKRGL

SEQ ID NO: 31475 - protein, 9 aa, synthetic construct
  source 1..9: note = Seed: LVVVGARGV (KRAS G12R)
WVVMGKRGM

SEQ ID NO: 31476 - protein, 9 aa, synthetic construct
  source 1..9: note = Seed: LVVVGARGV (KRAS G12R)
WVVMGKRGN

SEQ ID NO: 31477 - protein, 9 aa, synthetic construct
  source 1..9: note = Seed: LVVVGARGV (KRAS G12R)
WVVMGKRGP

SEQ ID NO: 31478 - protein, 9 aa, synthetic construct
  source 1..9: note = Seed: LVVVGARGV (KRAS G12R)
WVVMGKRGQ

SEQ ID NO: 31479 - protein, 9 aa, synthetic construct
  source 1..9: note = Seed: LVVVGARGV (KRAS G12R)
WVVMGKRGR

SEQ ID NO: 31480 - protein, 9 aa, synthetic construct
  source 1..9: note = Seed: LVVVGARGV (KRAS G12R)
WVVMGKRGS

SEQ ID NO: 31481 - protein, 9 aa, synthetic construct
  source 1..9: note = Seed: LVVVGARGV (KRAS G12R)
WVVMGKRGT

SEQ ID NO: 31482 - protein, 9 aa, synthetic construct
  source 1..9: note = Seed: LVVVGARGV (KRAS G12R)
WVVMGKRGV

SEQ ID NO: 31483 - protein, 9 aa, synthetic construct
  source 1..9: note = Seed: LVVVGARGV (KRAS G12R)
WVVMGKRGW

SEQ ID NO: 31484 - protein, 9 aa, synthetic construct
  source 1..9: note = Seed: LVVVGARGV (KRAS G12R)
WVVMGKRGY

SEQ ID NO: 31485 - protein, 9 aa, synthetic construct
  source 1..9: note = Seed: LVVVGARGV (KRAS G12R)
WVVMGLRGA

SEQ ID NO: 31486 - protein, 9 aa, synthetic construct
  source 1..9: note = Seed: LVVVGARGV (KRAS G12R)
WVVMGLRGG

SEQ ID NO: 31487 - protein, 9 aa, synthetic construct
  source 1..9: note = Seed: LVVVGARGV (KRAS G12R)
WVVMGLRGI

SEQ ID NO: 31488 - protein, 9 aa, synthetic construct
  source 1..9: note = Seed: LVVVGARGV (KRAS G12R)
WVVMGLRGL

SEQ ID NO: 31489 - protein, 9 aa, synthetic construct
  source 1..9: note = Seed: LVVVGARGV (KRAS G12R)
WVVMGLRGM

SEQ ID NO: 31490 - protein, 9 aa, synthetic construct
  source 1..9: note = Seed: LVVVGARGV (KRAS G12R)
WVVMGLRGN

SEQ ID NO: 31491 - protein, 9 aa, synthetic construct
  source 1..9: note = Seed: LVVVGARGV (KRAS G12R)
WVVMGLRGQ

SEQ ID NO: 31492 - protein, 9 aa, synthetic construct
  source 1..9: note = Seed: LVVVGARGV (KRAS G12R)
WVVMGLRGR

SEQ ID NO: 31493 - protein, 9 aa, synthetic construct
  source 1..9: note = Seed: LVVVGARGV (KRAS G12R)
WVVMGLRGS

SEQ ID NO: 31494 - protein, 9 aa, synthetic construct
  source 1..9: note = Seed: LVVVGARGV (KRAS G12R)
WVVMGLRGT

SEQ ID NO: 31495 - protein, 9 aa, synthetic construct
  source 1..9: note = Seed: LVVVGARGV (KRAS G12R)
WVVMGLRGV

SEQ ID NO: 31496 - protein, 9 aa, synthetic construct
  source 1..9: note = Seed: LVVVGARGV (KRAS G12R)
WVVMGMRGA

SEQ ID NO: 31497 - protein, 9 aa, synthetic construct
  source 1..9: note = Seed: LVVVGARGV (KRAS G12R)
WVVMGMRGF

SEQ ID NO: 31498 - protein, 9 aa, synthetic construct
  source 1..9: note = Seed: LVVVGARGV (KRAS G12R)
WVVMGMRGI

SEQ ID NO: 31499 - protein, 9 aa, synthetic construct
  source 1..9: note = Seed: LVVVGARGV (KRAS G12R)
WVVMGMRGL

SEQ ID NO: 31500 - protein, 9 aa, synthetic construct
  source 1..9: note = Seed: LVVVGARGV (KRAS G12R)
WVVMGMRGM

SEQ ID NO: 31501 - protein, 9 aa, synthetic construct
  source 1..9: note = Seed: LVVVGARGV (KRAS G12R)
WVVMGMRGN

SEQ ID NO: 31502 - protein, 9 aa, synthetic construct
  source 1..9: note = Seed: LVVVGARGV (KRAS G12R)
WVVMGMRGR

SEQ ID NO: 31503 - protein, 9 aa, synthetic construct
  source 1..9: note = Seed: LVVVGARGV (KRAS G12R)
WVVMGMRGS

SEQ ID NO: 31504 - protein, 9 aa, synthetic construct
  source 1..9: note = Seed: LVVVGARGV (KRAS G12R)
WVVMGMRGT

SEQ ID NO: 31505 - protein, 9 aa, synthetic construct
  source 1..9: note = Seed: LVVVGARGV (KRAS G12R)
WVVMGMRGV

SEQ ID NO: 31506 - protein, 9 aa, synthetic construct
  source 1..9: note = Seed: LVVVGARGV (KRAS G12R)
WVVMGNRGA

SEQ ID NO: 31507 - protein, 9 aa, synthetic construct
  source 1..9: note = Seed: LVVVGARGV (KRAS G12R)
WVVMGNRGC

SEQ ID NO: 31508 - protein, 9 aa, synthetic construct
  source 1..9: note = Seed: LVVVGARGV (KRAS G12R)
WVVMGNRGF

SEQ ID NO: 31509 - protein, 9 aa, synthetic construct
  source 1..9: note = Seed: LVVVGARGV (KRAS G12R)
WVVMGNRGG

SEQ ID NO: 31510 - protein, 9 aa, synthetic construct
  source 1..9: note = Seed: LVVVGARGV (KRAS G12R)
WVVMGNRGH

SEQ ID NO: 31511 - protein, 9 aa, synthetic construct
  source 1..9: note = Seed: LVVVGARGV (KRAS G12R)
WVVMGNRGI

SEQ ID NO: 31512 - protein, 9 aa, synthetic construct
  source 1..9: note = Seed: LVVVGARGV (KRAS G12R)
WVVMGNRGL

SEQ ID NO: 31513 - protein, 9 aa, synthetic construct
  source 1..9: note = Seed: LVVVGARGV (KRAS G12R)
WVVMGNRGM

SEQ ID NO: 31514 - protein, 9 aa, synthetic construct
  source 1..9: note = Seed: LVVVGARGV (KRAS G12R)
WVVMGNRGN

SEQ ID NO: 31515 - protein, 9 aa, synthetic construct
  source 1..9: note = Seed: LVVVGARGV (KRAS G12R)
WVVMGNRGP

SEQ ID NO: 31516 - protein, 9 aa, synthetic construct
  source 1..9: note = Seed: LVVVGARGV (KRAS G12R)
WVVMGNRGQ

SEQ ID NO: 31517 - protein, 9 aa, synthetic construct
  source 1..9: note = Seed: LVVVGARGV (KRAS G12R)
WVVMGNRGR

SEQ ID NO: 31518 - protein, 9 aa, synthetic construct
  source 1..9: note = Seed: LVVVGARGV (KRAS G12R)
WVVMGNRGS

SEQ ID NO: 31519 - protein, 9 aa, synthetic construct
  source 1..9: note = Seed: LVVVGARGV (KRAS G12R)
WVVMGNRGT

SEQ ID NO: 31520 - protein, 9 aa, synthetic construct
  source 1..9: note = Seed: LVVVGARGV (KRAS G12R)
WVVMGNRGV

SEQ ID NO: 31521 - protein, 9 aa, synthetic construct
  source 1..9: note = Seed: LVVVGARGV (KRAS G12R)
WVVMGNRGW

SEQ ID NO: 31522 - protein, 9 aa, synthetic construct
  source 1..9: note = Seed: LVVVGARGV (KRAS G12R)
WVVMGNRGY

SEQ ID NO: 31523 - protein, 9 aa, synthetic construct
  source 1..9: note = Seed: LVVVGARGV (KRAS G12R)
WVVMGPRGA

SEQ ID NO: 31524 - protein, 9 aa, synthetic construct
  source 1..9: note = Seed: LVVVGARGV (KRAS G12R)
WVVMGPRGC

SEQ ID NO: 31525 - protein, 9 aa, synthetic construct
  source 1..9: note = Seed: LVVVGARGV (KRAS G12R)
WVVMGPRGF

SEQ ID NO: 31526 - protein, 9 aa, synthetic construct
  source 1..9: note = Seed: LVVVGARGV (KRAS G12R)
WVVMGPRGG

SEQ ID NO: 31527 - protein, 9 aa, synthetic construct
  source 1..9: note = Seed: LVVVGARGV (KRAS G12R)
WVVMGPRGH

SEQ ID NO: 31528 - protein, 9 aa, synthetic construct
  source 1..9: note = Seed: LVVVGARGV (KRAS G12R)
WVVMGPRGI

SEQ ID NO: 31529 - protein, 9 aa, synthetic construct
  source 1..9: note = Seed: LVVVGARGV (KRAS G12R)
WVVMGPRGL

SEQ ID NO: 31530 - protein, 9 aa, synthetic construct
  source 1..9: note = Seed: LVVVGARGV (KRAS G12R)
WVVMGPRGM

SEQ ID NO: 31531 - protein, 9 aa, synthetic construct
  source 1..9: note = Seed: LVVVGARGV (KRAS G12R)
WVVMGPRGN

SEQ ID NO: 31532 - protein, 9 aa, synthetic construct
  source 1..9: note = Seed: LVVVGARGV (KRAS G12R)
WVVMGPRGP

SEQ ID NO: 31533 - protein, 9 aa, synthetic construct
  source 1..9: note = Seed: LVVVGARGV (KRAS G12R)
WVVMGPRGQ

SEQ ID NO: 31534 - protein, 9 aa, synthetic construct
  source 1..9: note = Seed: LVVVGARGV (KRAS G12R)
WVVMGPRGS

SEQ ID NO: 31535 - protein, 9 aa, synthetic construct
  source 1..9: note = Seed: LVVVGARGV (KRAS G12R)
WVVMGPRGT

SEQ ID NO: 31536 - protein, 9 aa, synthetic construct
  source 1..9: note = Seed: LVVVGARGV (KRAS G12R)
WVVMGPRGV

SEQ ID NO: 31537 - protein, 9 aa, synthetic construct
  source 1..9: note = Seed: LVVVGARGV (KRAS G12R)
WVVMGPRGW

SEQ ID NO: 31538 - protein, 9 aa, synthetic construct
  source 1..9: note = Seed: LVVVGARGV (KRAS G12R)
WVVMGPRGY

SEQ ID NO: 31539 - protein, 9 aa, synthetic construct
  source 1..9: note = Seed: LVVVGARGV (KRAS G12R)
WVVMGQRGA

SEQ ID NO: 31540 - protein, 9 aa, synthetic construct
  source 1..9: note = Seed: LVVVGARGV (KRAS G12R)
WVVMGQRGI

SEQ ID NO: 31541 - protein, 9 aa, synthetic construct
  source 1..9: note = Seed: LVVVGARGV (KRAS G12R)
WVVMGQRGL

SEQ ID NO: 31542 - protein, 9 aa, synthetic construct
  source 1..9: note = Seed: LVVVGARGV (KRAS G12R)
WVVMGQRGM

SEQ ID NO: 31543 - protein, 9 aa, synthetic construct
  source 1..9: note = Seed: LVVVGARGV (KRAS G12R)
WVVMGQRGR

SEQ ID NO: 31544 - protein, 9 aa, synthetic construct
  source 1..9: note = Seed: LVVVGARGV (KRAS G12R)
WVVMGQRGV

SEQ ID NO: 31545 - protein, 9 aa, synthetic construct
  source 1..9: note = Seed: LVVVGARGV (KRAS G12R)
WVVMGRRGA

SEQ ID NO: 31546 - protein, 9 aa, synthetic construct
  source 1..9: note = Seed: LVVVGARGV (KRAS G12R)
WVVMGRRGC

SEQ ID NO: 31547 - protein, 9 aa, synthetic construct
  source 1..9: note = Seed: LVVVGARGV (KRAS G12R)
WVVMGRRGE

SEQ ID NO: 31548 - protein, 9 aa, synthetic construct
  source 1..9: note = Seed: LVVVGARGV (KRAS G12R)
WVVMGRRGF

SEQ ID NO: 31549 - protein, 9 aa, synthetic construct
  source 1..9: note = Seed: LVVVGARGV (KRAS G12R)
WVVMGRRGG

SEQ ID NO: 31550 - protein, 9 aa, synthetic construct
  source 1..9: note = Seed: LVVVGARGV (KRAS G12R)
WVVMGRRGH

SEQ ID NO: 31551 - protein, 9 aa, synthetic construct
  source 1..9: note = Seed: LVVVGARGV (KRAS G12R)
WVVMGRRGI

SEQ ID NO: 31552 - protein, 9 aa, synthetic construct
  source 1..9: note = Seed: LVVVGARGV (KRAS G12R)
WVVMGRRGK

SEQ ID NO: 31553 - protein, 9 aa, synthetic construct
  source 1..9: note = Seed: LVVVGARGV (KRAS G12R)
WVVMGRRGL

SEQ ID NO: 31554 - protein, 9 aa, synthetic construct
  source 1..9: note = Seed: LVVVGARGV (KRAS G12R)
WVVMGRRGM

SEQ ID NO: 31555 - protein, 9 aa, synthetic construct
  source 1..9: note = Seed: LVVVGARGV (KRAS G12R)
WVVMGRRGN

SEQ ID NO: 31556 - protein, 9 aa, synthetic construct
  source 1..9: note = Seed: LVVVGARGV (KRAS G12R)
WVVMGRRGP

SEQ ID NO: 31557 - protein, 9 aa, synthetic construct
  source 1..9: note = Seed: LVVVGARGV (KRAS G12R)
WVVMGRRGQ

SEQ ID NO: 31558 - protein, 9 aa, synthetic construct
  source 1..9: note = Seed: LVVVGARGV (KRAS G12R)
WVVMGRRGR

SEQ ID NO: 31559 - protein, 9 aa, synthetic construct
  source 1..9: note = Seed: LVVVGARGV (KRAS G12R)
WVVMGRRGS

SEQ ID NO: 31560 - protein, 9 aa, synthetic construct
  source 1..9: note = Seed: LVVVGARGV (KRAS G12R)
WVVMGRRGT

SEQ ID NO: 31561 - protein, 9 aa, synthetic construct
  source 1..9: note = Seed: LVVVGARGV (KRAS G12R)
WVVMGRRGV

SEQ ID NO: 31562 - protein, 9 aa, synthetic construct
  source 1..9: note = Seed: LVVVGARGV (KRAS G12R)
WVVMGRRGW

SEQ ID NO: 31563 - protein, 9 aa, synthetic construct
  source 1..9: note = Seed: LVVVGARGV (KRAS G12R)
WVVMGRRGY

SEQ ID NO: 31564 - protein, 9 aa, synthetic construct
  source 1..9: note = Seed: LVVVGARGV (KRAS G12R)
WVVMGSRGA

SEQ ID NO: 31565 - protein, 9 aa, synthetic construct
  source 1..9: note = Seed: LVVVGARGV (KRAS G12R)
WVVMGSRGC

SEQ ID NO: 31566 - protein, 9 aa, synthetic construct
  source 1..9: note = Seed: LVVVGARGV (KRAS G12R)
WVVMGSRGF

SEQ ID NO: 31567 - protein, 9 aa, synthetic construct
  source 1..9: note = Seed: LVVVGARGV (KRAS G12R)
WVVMGSRGG

SEQ ID NO: 31568 - protein, 9 aa, synthetic construct
  source 1..9: note = Seed: LVVVGARGV (KRAS G12R)
WVVMGSRGH

SEQ ID NO: 31569 - protein, 9 aa, synthetic construct
  source 1..9: note = Seed: LVVVGARGV (KRAS G12R)
WVVMGSRGI

SEQ ID NO: 31570 - protein, 9 aa, synthetic construct
  source 1..9: note = Seed: LVVVGARGV (KRAS G12R)
WVVMGSRGK

SEQ ID NO: 31571 - protein, 9 aa, synthetic construct
  source 1..9: note = Seed: LVVVGARGV (KRAS G12R)
WVVMGSRGL

SEQ ID NO: 31572 - protein, 9 aa, synthetic construct
  source 1..9: note = Seed: LVVVGARGV (KRAS G12R)
WVVMGSRGM

SEQ ID NO: 31573 - protein, 9 aa, synthetic construct
  source 1..9: note = Seed: LVVVGARGV (KRAS G12R)
WVVMGSRGN

SEQ ID NO: 31574 - protein, 9 aa, synthetic construct
  source 1..9: note = Seed: LVVVGARGV (KRAS G12R)
WVVMGSRGP

SEQ ID NO: 31575 - protein, 9 aa, synthetic construct
  source 1..9: note = Seed: LVVVGARGV (KRAS G12R)
WVVMGSRGQ

SEQ ID NO: 31576 - protein, 9 aa, synthetic construct
  source 1..9: note = Seed: LVVVGARGV (KRAS G12R)
WVVMGSRGR

SEQ ID NO: 31577 - protein, 9 aa, synthetic construct
  source 1..9: note = Seed: LVVVGARGV (KRAS G12R)
WVVMGSRGS

SEQ ID NO: 31578 - protein, 9 aa, synthetic construct
  source 1..9: note = Seed: LVVVGARGV (KRAS G12R)
WVVMGSRGT

SEQ ID NO: 31579 - protein, 9 aa, synthetic construct
  source 1..9: note = Seed: LVVVGARGV (KRAS G12R)
WVVMGSRGV

SEQ ID NO: 31580 - protein, 9 aa, synthetic construct
  source 1..9: note = Seed: LVVVGARGV (KRAS G12R)
WVVMGSRGW

SEQ ID NO: 31581 - protein, 9 aa, synthetic construct
  source 1..9: note = Seed: LVVVGARGV (KRAS G12R)
WVVMGSRGY

SEQ ID NO: 31582 - protein, 9 aa, synthetic construct
  source 1..9: note = Seed: LVVVGARGV (KRAS G12R)
WVVMGTRGA

SEQ ID NO: 31583 - protein, 9 aa, synthetic construct
  source 1..9: note = Seed: LVVVGARGV (KRAS G12R)
WVVMGTRGC

SEQ ID NO: 31584 - protein, 9 aa, synthetic construct
  source 1..9: note = Seed: LVVVGARGV (KRAS G12R)
WVVMGTRGF

SEQ ID NO: 31585 - protein, 9 aa, synthetic construct
  source 1..9: note = Seed: LVVVGARGV (KRAS G12R)
WVVMGTRGG

SEQ ID NO: 31586 - protein, 9 aa, synthetic construct
  source 1..9: note = Seed: LVVVGARGV (KRAS G12R)
WVVMGTRGH

SEQ ID NO: 31587 - protein, 9 aa, synthetic construct
  source 1..9: note = Seed: LVVVGARGV (KRAS G12R)
WVVMGTRGI

SEQ ID NO: 31588 - protein, 9 aa, synthetic construct
  source 1..9: note = Seed: LVVVGARGV (KRAS G12R)
WVVMGTRGL

SEQ ID NO: 31589 - protein, 9 aa, synthetic construct
  source 1..9: note = Seed: LVVVGARGV (KRAS G12R)
WVVMGTRGM

SEQ ID NO: 31590 - protein, 9 aa, synthetic construct
  source 1..9: note = Seed: LVVVGARGV (KRAS G12R)
WVVMGTRGN

SEQ ID NO: 31591 - protein, 9 aa, synthetic construct
  source 1..9: note = Seed: LVVVGARGV (KRAS G12R)
WVVMGTRGP

SEQ ID NO: 31592 - protein, 9 aa, synthetic construct
  source 1..9: note = Seed: LVVVGARGV (KRAS G12R)
WVVMGTRGQ

SEQ ID NO: 31593 - protein, 9 aa, synthetic construct
  source 1..9: note = Seed: LVVVGARGV (KRAS G12R)
WVVMGTRGR

SEQ ID NO: 31594 - protein, 9 aa, synthetic construct
  source 1..9: note = Seed: LVVVGARGV (KRAS G12R)
WVVMGTRGS

SEQ ID NO: 31595 - protein, 9 aa, synthetic construct
  source 1..9: note = Seed: LVVVGARGV (KRAS G12R)
WVVMGTRGT

SEQ ID NO: 31596 - protein, 9 aa, synthetic construct
  source 1..9: note = Seed: LVVVGARGV (KRAS G12R)
WVVMGTRGV

SEQ ID NO: 31597 - protein, 9 aa, synthetic construct
  source 1..9: note = Seed: LVVVGARGV (KRAS G12R)
WVVMGTRGW

SEQ ID NO: 31598 - protein, 9 aa, synthetic construct
  source 1..9: note = Seed: LVVVGARGV (KRAS G12R)
WVVMGTRGY

SEQ ID NO: 31599 - protein, 9 aa, synthetic construct
  source 1..9: note = Seed: LVVVGARGV (KRAS G12R)
WVVMGVRGA

SEQ ID NO: 31600 - protein, 9 aa, synthetic construct
  source 1..9: note = Seed: LVVVGARGV (KRAS G12R)
WVVMGVRGC

SEQ ID NO: 31601 - protein, 9 aa, synthetic construct
  source 1..9: note = Seed: LVVVGARGV (KRAS G12R)
WVVMGVRGD

SEQ ID NO: 31602 - protein, 9 aa, synthetic construct
  source 1..9: note = Seed: LVVVGARGV (KRAS G12R)
WVVMGVRGF

SEQ ID NO: 31603 - protein, 9 aa, synthetic construct
  source 1..9: note = Seed: LVVVGARGV (KRAS G12R)
WVVMGVRGG

SEQ ID NO: 31604 - protein, 9 aa, synthetic construct
  source 1..9: note = Seed: LVVVGARGV (KRAS G12R)
WVVMGVRGH

SEQ ID NO: 31605 - protein, 9 aa, synthetic construct
  source 1..9: note = Seed: LVVVGARGV (KRAS G12R)
WVVMGVRGI

SEQ ID NO: 31606 - protein, 9 aa, synthetic construct
  source 1..9: note = Seed: LVVVGARGV (KRAS G12R)
WVVMGVRGL

SEQ ID NO: 31607 - protein, 9 aa, synthetic construct
  source 1..9: note = Seed: LVVVGARGV (KRAS G12R)
WVVMGVRGM

SEQ ID NO: 31608 - protein, 9 aa, synthetic construct
  source 1..9: note = Seed: LVVVGARGV (KRAS G12R)
WVVMGVRGN

SEQ ID NO: 31609 - protein, 9 aa, synthetic construct
  source 1..9: note = Seed: LVVVGARGV (KRAS G12R)
WVVMGVRGQ

SEQ ID NO: 31610 - protein, 9 aa, synthetic construct
  source 1..9: note = Seed: LVVVGARGV (KRAS G12R)
WVVMGVRGR

SEQ ID NO: 31611 - protein, 9 aa, synthetic construct
  source 1..9: note = Seed: LVVVGARGV (KRAS G12R)
WVVMGVRGS

SEQ ID NO: 31612 - protein, 9 aa, synthetic construct
  source 1..9: note = Seed: LVVVGARGV (KRAS G12R)
WVVMGVRGT

SEQ ID NO: 31613 - protein, 9 aa, synthetic construct
  source 1..9: note = Seed: LVVVGARGV (KRAS G12R)
WVVMGVRGV

SEQ ID NO: 31614 - protein, 9 aa, synthetic construct
  source 1..9: note = Seed: LVVVGARGV (KRAS G12R)
WVVMGVRGY

SEQ ID NO: 31615 - protein, 9 aa, synthetic construct
  source 1..9: note = Seed: LVVVGARGV (KRAS G12R)
WVVMGWRGA

SEQ ID NO: 31616 - protein, 9 aa, synthetic construct
  source 1..9: note = Seed: LVVVGARGV (KRAS G12R)
WVVMGWRGI

SEQ ID NO: 31617 - protein, 9 aa, synthetic construct
  source 1..9: note = Seed: LVVVGARGV (KRAS G12R)
WVVMGWRGL

SEQ ID NO: 31618 - protein, 9 aa, synthetic construct
  source 1..9: note = Seed: LVVVGARGV (KRAS G12R)
WVVMGWRGM

SEQ ID NO: 31619 - protein, 9 aa, synthetic construct
  source 1..9: note = Seed: LVVVGARGV (KRAS G12R)
WVVMGWRGV

SEQ ID NO: 31620 - protein, 9 aa, synthetic construct
  source 1..9: note = Seed: LVVVGARGV (KRAS G12R)
WVVMGYRGL

SEQ ID NO: 31621 - protein, 9 aa, synthetic construct
  source 1..9: note = Seed: LVVVGARGV (KRAS G12R)
WVVNGARGA

SEQ ID NO: 31622 - protein, 9 aa, synthetic construct
  source 1..9: note = Seed: LVVVGARGV (KRAS G12R)
WVVNGARGF

SEQ ID NO: 31623 - protein, 9 aa, synthetic construct
  source 1..9: note = Seed: LVVVGARGV (KRAS G12R)
WVVNGARGI

SEQ ID NO: 31624 - protein, 9 aa, synthetic construct
  source 1..9: note = Seed: LVVVGARGV (KRAS G12R)
WVVNGARGL

SEQ ID NO: 31625 - protein, 9 aa, synthetic construct
  source 1..9: note = Seed: LVVVGARGV (KRAS G12R)
WVVNGARGM

SEQ ID NO: 31626 - protein, 9 aa, synthetic construct
  source 1..9: note = Seed: LVVVGARGV (KRAS G12R)
WVVNGARGV

SEQ ID NO: 31627 - protein, 9 aa, synthetic construct
  source 1..9: note = Seed: LVVVGARGV (KRAS G12R)
WVVNGARGY

SEQ ID NO: 31628 - protein, 9 aa, synthetic construct
  source 1..9: note = Seed: LVVVGARGV (KRAS G12R)
WVVNGGRGF

SEQ ID NO: 31629 - protein, 9 aa, synthetic construct
  source 1..9: note = Seed: LVVVGARGV (KRAS G12R)
WVVNGGRGI

SEQ ID NO: 31630 - protein, 9 aa, synthetic construct
  source 1..9: note = Seed: LVVVGARGV (KRAS G12R)
WVVNGGRGL

SEQ ID NO: 31631 - protein, 9 aa, synthetic construct
  source 1..9: note = Seed: LVVVGARGV (KRAS G12R)
WVVNGGRGV

SEQ ID NO: 31632 - protein, 9 aa, synthetic construct
  source 1..9: note = Seed: LVVVGARGV (KRAS G12R)
WVVNGIRGF

SEQ ID NO: 31633 - protein, 9 aa, synthetic construct
  source 1..9: note = Seed: LVVVGARGV (KRAS G12R)
WVVNGIRGI

SEQ ID NO: 31634 - protein, 9 aa, synthetic construct
  source 1..9: note = Seed: LVVVGARGV (KRAS G12R)
WVVNGIRGL

SEQ ID NO: 31635 - protein, 9 aa, synthetic construct
  source 1..9: note = Seed: LVVVGARGV (KRAS G12R)
WVVNGIRGM

SEQ ID NO: 31636 - protein, 9 aa, synthetic construct
  source 1..9: note = Seed: LVVVGARGV (KRAS G12R)
WVVNGIRGV

SEQ ID NO: 31637 - protein, 9 aa, synthetic construct
  source 1..9: note = Seed: LVVVGARGV (KRAS G12R)
WVVNGIRGY

SEQ ID NO: 31638 - protein, 9 aa, synthetic construct
  source 1..9: note = Seed: LVVVGARGV (KRAS G12R)
WVVNGLRGF

SEQ ID NO: 31639 - protein, 9 aa, synthetic construct
  source 1..9: note = Seed: LVVVGARGV (KRAS G12R)
WVVNGLRGI

SEQ ID NO: 31640 - protein, 9 aa, synthetic construct
  source 1..9: note = Seed: LVVVGARGV (KRAS G12R)
WVVNGLRGL

SEQ ID NO: 31641 - protein, 9 aa, synthetic construct
  source 1..9: note = Seed: LVVVGARGV (KRAS G12R)
WVVNGLRGV

SEQ ID NO: 31642 - protein, 9 aa, synthetic construct
  source 1..9: note = Seed: LVVVGARGV (KRAS G12R)
WVVNGMRGF

SEQ ID NO: 31643 - protein, 9 aa, synthetic construct
  source 1..9: note = Seed: LVVVGARGV (KRAS G12R)
WVVNGMRGI

SEQ ID NO: 31644 - protein, 9 aa, synthetic construct
  source 1..9: note = Seed: LVVVGARGV (KRAS G12R)
WVVNGMRGL

SEQ ID NO: 31645 - protein, 9 aa, synthetic construct
  source 1..9: note = Seed: LVVVGARGV (KRAS G12R)
WVVNGMRGV

SEQ ID NO: 31646 - protein, 9 aa, synthetic construct
  source 1..9: note = Seed: LVVVGARGV (KRAS G12R)
WVVNGNRGF

SEQ ID NO: 31647 - protein, 9 aa, synthetic construct
  source 1..9: note = Seed: LVVVGARGV (KRAS G12R)
WVVNGNRGI

SEQ ID NO: 31648 - protein, 9 aa, synthetic construct
  source 1..9: note = Seed: LVVVGARGV (KRAS G12R)
WVVNGNRGL

SEQ ID NO: 31649 - protein, 9 aa, synthetic construct
  source 1..9: note = Seed: LVVVGARGV (KRAS G12R)
WVVNGNRGM

SEQ ID NO: 31650 - protein, 9 aa, synthetic construct
  source 1..9: note = Seed: LVVVGARGV (KRAS G12R)
WVVNGNRGV

SEQ ID NO: 31651 - protein, 9 aa, synthetic construct
  source 1..9: note = Seed: LVVVGARGV (KRAS G12R)
WVVNGNRGY

SEQ ID NO: 31652 - protein, 9 aa, synthetic construct
  source 1..9: note = Seed: LVVVGARGV (KRAS G12R)
WVVNGPRGF

SEQ ID NO: 31653 - protein, 9 aa, synthetic construct
  source 1..9: note = Seed: LVVVGARGV (KRAS G12R)
WVVNGPRGI

SEQ ID NO: 31654 - protein, 9 aa, synthetic construct
  source 1..9: note = Seed: LVVVGARGV (KRAS G12R)
WVVNGPRGL

SEQ ID NO: 31655 - protein, 9 aa, synthetic construct
  source 1..9: note = Seed: LVVVGARGV (KRAS G12R)
WVVNGPRGV

SEQ ID NO: 31656 - protein, 9 aa, synthetic construct
  source 1..9: note = Seed: LVVVGARGV (KRAS G12R)
WVVNGPRGY

SEQ ID NO: 31657 - protein, 9 aa, synthetic construct
  source 1..9: note = Seed: LVVVGARGV (KRAS G12R)
WVVNGRRGL

SEQ ID NO: 31658 - protein, 9 aa, synthetic construct
  source 1..9: note = Seed: LVVVGARGV (KRAS G12R)
WVVNGRRGR

SEQ ID NO: 31659 - protein, 9 aa, synthetic construct
  source 1..9: note = Seed: LVVVGARGV (KRAS G12R)
WVVNGSRGF

SEQ ID NO: 31660 - protein, 9 aa, synthetic construct
  source 1..9: note = Seed: LVVVGARGV (KRAS G12R)
WVVNGSRGI

SEQ ID NO: 31661 - protein, 9 aa, synthetic construct
  source 1..9: note = Seed: LVVVGARGV (KRAS G12R)
WVVNGSRGL

SEQ ID NO: 31662 - protein, 9 aa, synthetic construct
  source 1..9: note = Seed: LVVVGARGV (KRAS G12R)
WVVNGSRGM

SEQ ID NO: 31663 - protein, 9 aa, synthetic construct
  source 1..9: note = Seed: LVVVGARGV (KRAS G12R)
WVVNGSRGV

SEQ ID NO: 31664 - protein, 9 aa, synthetic construct
  source 1..9: note = Seed: LVVVGARGV (KRAS G12R)
WVVNGSRGY

SEQ ID NO: 31665 - protein, 9 aa, synthetic construct
  source 1..9: note = Seed: LVVVGARGV (KRAS G12R)
WVVNGTRGF

SEQ ID NO: 31666 - protein, 9 aa, synthetic construct
  source 1..9: note = Seed: LVVVGARGV (KRAS G12R)
WVVNGTRGI

SEQ ID NO: 31667 - protein, 9 aa, synthetic construct
  source 1..9: note = Seed: LVVVGARGV (KRAS G12R)
WVVNGTRGL

SEQ ID NO: 31668 - protein, 9 aa, synthetic construct
  source 1..9: note = Seed: LVVVGARGV (KRAS G12R)
WVVNGTRGM

SEQ ID NO: 31669 - protein, 9 aa, synthetic construct
  source 1..9: note = Seed: LVVVGARGV (KRAS G12R)
WVVNGTRGV

SEQ ID NO: 31670 - protein, 9 aa, synthetic construct
  source 1..9: note = Seed: LVVVGARGV (KRAS G12R)
WVVNGTRGY

SEQ ID NO: 31671 - protein, 9 aa, synthetic construct
  source 1..9: note = Seed: LVVVGARGV (KRAS G12R)
WVVNGVRGF

SEQ ID NO: 31672 - protein, 9 aa, synthetic construct
  source 1..9: note = Seed: LVVVGARGV (KRAS G12R)
WVVNGVRGI

SEQ ID NO: 31673 - protein, 9 aa, synthetic construct
  source 1..9: note = Seed: LVVVGARGV (KRAS G12R)
WVVNGVRGL

SEQ ID NO: 31674 - protein, 9 aa, synthetic construct
  source 1..9: note = Seed: LVVVGARGV (KRAS G12R)
WVVNGVRGM

SEQ ID NO: 31675 - protein, 9 aa, synthetic construct
  source 1..9: note = Seed: LVVVGARGV (KRAS G12R)
WVVNGVRGV

SEQ ID NO: 31676 - protein, 9 aa, synthetic construct
  source 1..9: note = Seed: LVVVGARGV (KRAS G12R)
WVVNGVRGY

SEQ ID NO: 31677 - protein, 9 aa, synthetic construct
  source 1..9: note = Seed: LVVVGARGV (KRAS G12R)
WVVQGARGA

SEQ ID NO: 31678 - protein, 9 aa, synthetic construct
  source 1..9: note = Seed: LVVVGARGV (KRAS G12R)
WVVQGARGC

SEQ ID NO: 31679 - protein, 9 aa, synthetic construct
  source 1..9: note = Seed: LVVVGARGV (KRAS G12R)
WVVQGARGF

SEQ ID NO: 31680 - protein, 9 aa, synthetic construct
  source 1..9: note = Seed: LVVVGARGV (KRAS G12R)
WVVQGARGG

SEQ ID NO: 31681 - protein, 9 aa, synthetic construct
  source 1..9: note = Seed: LVVVGARGV (KRAS G12R)
WVVQGARGI

SEQ ID NO: 31682 - protein, 9 aa, synthetic construct
  source 1..9: note = Seed: LVVVGARGV (KRAS G12R)
WVVQGARGL

SEQ ID NO: 31683 - protein, 9 aa, synthetic construct
  source 1..9: note = Seed: LVVVGARGV (KRAS G12R)
WVVQGARGM

SEQ ID NO: 31684 - protein, 9 aa, synthetic construct
  source 1..9: note = Seed: LVVVGARGV (KRAS G12R)
WVVQGARGN

SEQ ID NO: 31685 - protein, 9 aa, synthetic construct
  source 1..9: note = Seed: LVVVGARGV (KRAS G12R)
WVVQGARGS

SEQ ID NO: 31686 - protein, 9 aa, synthetic construct
  source 1..9: note = Seed: LVVVGARGV (KRAS G12R)
WVVQGARGT

SEQ ID NO: 31687 - protein, 9 aa, synthetic construct
  source 1..9: note = Seed: LVVVGARGV (KRAS G12R)
WVVQGARGV

SEQ ID NO: 31688 - protein, 9 aa, synthetic construct
  source 1..9: note = Seed: LVVVGARGV (KRAS G12R)
WVVQGARGW

SEQ ID NO: 31689 - protein, 9 aa, synthetic construct
  source 1..9: note = Seed: LVVVGARGV (KRAS G12R)
WVVQGGRGA

SEQ ID NO: 31690 - protein, 9 aa, synthetic construct
  source 1..9: note = Seed: LVVVGARGV (KRAS G12R)
WVVQGGRGF

SEQ ID NO: 31691 - protein, 9 aa, synthetic construct
  source 1..9: note = Seed: LVVVGARGV (KRAS G12R)
WVVQGGRGI

SEQ ID NO: 31692 - protein, 9 aa, synthetic construct
  source 1..9: note = Seed: LVVVGARGV (KRAS G12R)
WVVQGGRGL

SEQ ID NO: 31693 - protein, 9 aa, synthetic construct
  source 1..9: note = Seed: LVVVGARGV (KRAS G12R)
WVVQGGRGM

SEQ ID NO: 31694 - protein, 9 aa, synthetic construct
  source 1..9: note = Seed: LVVVGARGV (KRAS G12R)
WVVQGGRGS

SEQ ID NO: 31695 - protein, 9 aa, synthetic construct
  source 1..9: note = Seed: LVVVGARGV (KRAS G12R)
WVVQGGRGT

SEQ ID NO: 31696 - protein, 9 aa, synthetic construct
  source 1..9: note = Seed: LVVVGARGV (KRAS G12R)
WVVQGGRGV

SEQ ID NO: 31697 - protein, 9 aa, synthetic construct
  source 1..9: note = Seed: LVVVGARGV (KRAS G12R)
WVVQGIRGA

SEQ ID NO: 31698 - protein, 9 aa, synthetic construct
  source 1..9: note = Seed: LVVVGARGV (KRAS G12R)
WVVQGIRGI

SEQ ID NO: 31699 - protein, 9 aa, synthetic construct
  source 1..9: note = Seed: LVVVGARGV (KRAS G12R)
WVVQGIRGL

SEQ ID NO: 31700 - protein, 9 aa, synthetic construct
  source 1..9: note = Seed: LVVVGARGV (KRAS G12R)
WVVQGIRGR

SEQ ID NO: 31701 - protein, 9 aa, synthetic construct
  source 1..9: note = Seed: LVVVGARGV (KRAS G12R)
WVVQGIRGV

SEQ ID NO: 31702 - protein, 9 aa, synthetic construct
  source 1..9: note = Seed: LVVVGARGV (KRAS G12R)
WVVQGKRGA

SEQ ID NO: 31703 - protein, 9 aa, synthetic construct
  source 1..9: note = Seed: LVVVGARGV (KRAS G12R)
WVVQGKRGL

SEQ ID NO: 31704 - protein, 9 aa, synthetic construct
  source 1..9: note = Seed: LVVVGARGV (KRAS G12R)
WVVQGKRGM

SEQ ID NO: 31705 - protein, 9 aa, synthetic construct
  source 1..9: note = Seed: LVVVGARGV (KRAS G12R)
WVVQGKRGR

SEQ ID NO: 31706 - protein, 9 aa, synthetic construct
  source 1..9: note = Seed: LVVVGARGV (KRAS G12R)
WVVQGLRGR

SEQ ID NO: 31707 - protein, 9 aa, synthetic construct
  source 1..9: note = Seed: LVVVGARGV (KRAS G12R)
WVVQGMRGL

SEQ ID NO: 31708 - protein, 9 aa, synthetic construct
  source 1..9: note = Seed: LVVVGARGV (KRAS G12R)
WVVQGNRGA

SEQ ID NO: 31709 - protein, 9 aa, synthetic construct
  source 1..9: note = Seed: LVVVGARGV (KRAS G12R)
WVVQGNRGI

SEQ ID NO: 31710 - protein, 9 aa, synthetic construct
  source 1..9: note = Seed: LVVVGARGV (KRAS G12R)
WVVQGNRGL

SEQ ID NO: 31711 - protein, 9 aa, synthetic construct
  source 1..9: note = Seed: LVVVGARGV (KRAS G12R)
WVVQGNRGM

SEQ ID NO: 31712 - protein, 9 aa, synthetic construct
  source 1..9: note = Seed: LVVVGARGV (KRAS G12R)
WVVQGNRGS

SEQ ID NO: 31713 - protein, 9 aa, synthetic construct
  source 1..9: note = Seed: LVVVGARGV (KRAS G12R)
WVVQGNRGT

SEQ ID NO: 31714 - protein, 9 aa, synthetic construct
  source 1..9: note = Seed: LVVVGARGV (KRAS G12R)
WVVQGNRGV

SEQ ID NO: 31715 - protein, 9 aa, synthetic construct
  source 1..9: note = Seed: LVVVGARGV (KRAS G12R)
WVVQGPRGA

SEQ ID NO: 31716 - protein, 9 aa, synthetic construct
  source 1..9: note = Seed: LVVVGARGV (KRAS G12R)
WVVQGPRGI

SEQ ID NO: 31717 - protein, 9 aa, synthetic construct
  source 1..9: note = Seed: LVVVGARGV (KRAS G12R)
WVVQGPRGL

SEQ ID NO: 31718 - protein, 9 aa, synthetic construct
  source 1..9: note = Seed: LVVVGARGV (KRAS G12R)
WVVQGPRGM

SEQ ID NO: 31719 - protein, 9 aa, synthetic construct
  source 1..9: note = Seed: LVVVGARGV (KRAS G12R)
WVVQGPRGT

SEQ ID NO: 31720 - protein, 9 aa, synthetic construct
  source 1..9: note = Seed: LVVVGARGV (KRAS G12R)
WVVQGPRGV

SEQ ID NO: 31721 - protein, 9 aa, synthetic construct
  source 1..9: note = Seed: LVVVGARGV (KRAS G12R)
WVVQGRRGA

SEQ ID NO: 31722 - protein, 9 aa, synthetic construct
  source 1..9: note = Seed: LVVVGARGV (KRAS G12R)
WVVQGRRGF

SEQ ID NO: 31723 - protein, 9 aa, synthetic construct
  source 1..9: note = Seed: LVVVGARGV (KRAS G12R)
WVVQGRRGH

SEQ ID NO: 31724 - protein, 9 aa, synthetic construct
  source 1..9: note = Seed: LVVVGARGV (KRAS G12R)
WVVQGRRGI

SEQ ID NO: 31725 - protein, 9 aa, synthetic construct
  source 1..9: note = Seed: LVVVGARGV (KRAS G12R)
WVVQGRRGK

SEQ ID NO: 31726 - protein, 9 aa, synthetic construct
  source 1..9: note = Seed: LVVVGARGV (KRAS G12R)
WVVQGRRGL

SEQ ID NO: 31727 - protein, 9 aa, synthetic construct
  source 1..9: note = Seed: LVVVGARGV (KRAS G12R)
WVVQGRRGM

SEQ ID NO: 31728 - protein, 9 aa, synthetic construct
  source 1..9: note = Seed: LVVVGARGV (KRAS G12R)
WVVQGRRGQ

SEQ ID NO: 31729 - protein, 9 aa, synthetic construct
  source 1..9: note = Seed: LVVVGARGV (KRAS G12R)
WVVQGRRGR

SEQ ID NO: 31730 - protein, 9 aa, synthetic construct
  source 1..9: note = Seed: LVVVGARGV (KRAS G12R)
WVVQGRRGS

SEQ ID NO: 31731 - protein, 9 aa, synthetic construct
  source 1..9: note = Seed: LVVVGARGV (KRAS G12R)
WVVQGRRGV

SEQ ID NO: 31732 - protein, 9 aa, synthetic construct
  source 1..9: note = Seed: LVVVGARGV (KRAS G12R)
WVVQGRRGW

SEQ ID NO: 31733 - protein, 9 aa, synthetic construct
  source 1..9: note = Seed: LVVVGARGV (KRAS G12R)
WVVQGRRGY

SEQ ID NO: 31734 - protein, 9 aa, synthetic construct
  source 1..9: note = Seed: LVVVGARGV (KRAS G12R)
WVVQGSRGA

SEQ ID NO: 31735 - protein, 9 aa, synthetic construct
  source 1..9: note = Seed: LVVVGARGV (KRAS G12R)
WVVQGSRGC

SEQ ID NO: 31736 - protein, 9 aa, synthetic construct
  source 1..9: note = Seed: LVVVGARGV (KRAS G12R)
WVVQGSRGF

SEQ ID NO: 31737 - protein, 9 aa, synthetic construct
  source 1..9: note = Seed: LVVVGARGV (KRAS G12R)
WVVQGSRGI

SEQ ID NO: 31738 - protein, 9 aa, synthetic construct
  source 1..9: note = Seed: LVVVGARGV (KRAS G12R)
WVVQGSRGL

SEQ ID NO: 31739 - protein, 9 aa, synthetic construct
  source 1..9: note = Seed: LVVVGARGV (KRAS G12R)
WVVQGSRGM

SEQ ID NO: 31740 - protein, 9 aa, synthetic construct
  source 1..9: note = Seed: LVVVGARGV (KRAS G12R)
WVVQGSRGS

SEQ ID NO: 31741 - protein, 9 aa, synthetic construct
  source 1..9: note = Seed: LVVVGARGV (KRAS G12R)
WVVQGSRGT

SEQ ID NO: 31742 - protein, 9 aa, synthetic construct
  source 1..9: note = Seed: LVVVGARGV (KRAS G12R)
WVVQGSRGV

SEQ ID NO: 31743 - protein, 9 aa, synthetic construct
  source 1..9: note = Seed: LVVVGARGV (KRAS G12R)
WVVQGTRGA

SEQ ID NO: 31744 - protein, 9 aa, synthetic construct
  source 1..9: note = Seed: LVVVGARGV (KRAS G12R)
WVVQGTRGI

SEQ ID NO: 31745 - protein, 9 aa, synthetic construct
  source 1..9: note = Seed: LVVVGARGV (KRAS G12R)
WVVQGTRGL

SEQ ID NO: 31746 - protein, 9 aa, synthetic construct
  source 1..9: note = Seed: LVVVGARGV (KRAS G12R)
WVVQGTRGM

SEQ ID NO: 31747 - protein, 9 aa, synthetic construct
  source 1..9: note = Seed: LVVVGARGV (KRAS G12R)
WVVQGTRGT

SEQ ID NO: 31748 - protein, 9 aa, synthetic construct
  source 1..9: note = Seed: LVVVGARGV (KRAS G12R)
WVVQGTRGV

SEQ ID NO: 31749 - protein, 9 aa, synthetic construct
  source 1..9: note = Seed: LVVVGARGV (KRAS G12R)
WVVQGVRGA

SEQ ID NO: 31750 - protein, 9 aa, synthetic construct
  source 1..9: note = Seed: LVVVGARGV (KRAS G12R)
WVVQGVRGI

SEQ ID NO: 31751 - protein, 9 aa, synthetic construct
  source 1..9: note = Seed: LVVVGARGV (KRAS G12R)
WVVQGVRGL

SEQ ID NO: 31752 - protein, 9 aa, synthetic construct
  source 1..9: note = Seed: LVVVGARGV (KRAS G12R)
WVVQGVRGM

SEQ ID NO: 31753 - protein, 9 aa, synthetic construct
  source 1..9: note = Seed: LVVVGARGV (KRAS G12R)
WVVQGVRGT

SEQ ID NO: 31754 - protein, 9 aa, synthetic construct
  source 1..9: note = Seed: LVVVGARGV (KRAS G12R)
WVVQGVRGV

SEQ ID NO: 31755 - protein, 9 aa, synthetic construct
  source 1..9: note = Seed: LVVVGARGV (KRAS G12R)
WVVRGARGF

SEQ ID NO: 31756 - protein, 9 aa, synthetic construct
  source 1..9: note = Seed: LVVVGARGV (KRAS G12R)
WVVRGARGL

SEQ ID NO: 31757 - protein, 9 aa, synthetic construct
  source 1..9: note = Seed: LVVVGARGV (KRAS G12R)
WVVRGHRGF

SEQ ID NO: 31758 - protein, 9 aa, synthetic construct
  source 1..9: note = Seed: LVVVGARGV (KRAS G12R)
WVVRGIRGF

SEQ ID NO: 31759 - protein, 9 aa, synthetic construct
  source 1..9: note = Seed: LVVVGARGV (KRAS G12R)
WVVRGIRGI

SEQ ID NO: 31760 - protein, 9 aa, synthetic construct
  source 1..9: note = Seed: LVVVGARGV (KRAS G12R)
WVVRGIRGR

SEQ ID NO: 31761 - protein, 9 aa, synthetic construct
  source 1..9: note = Seed: LVVVGARGV (KRAS G12R)
WVVRGIRGV

SEQ ID NO: 31762 - protein, 9 aa, synthetic construct
  source 1..9: note = Seed: LVVVGARGV (KRAS G12R)
WVVRGIRGY

SEQ ID NO: 31763 - protein, 9 aa, synthetic construct
  source 1..9: note = Seed: LVVVGARGV (KRAS G12R)
WVVRGKRGA

SEQ ID NO: 31764 - protein, 9 aa, synthetic construct
  source 1..9: note = Seed: LVVVGARGV (KRAS G12R)
WVVRGKRGI

SEQ ID NO: 31765 - protein, 9 aa, synthetic construct
  source 1..9: note = Seed: LVVVGARGV (KRAS G12R)
WVVRGKRGL

SEQ ID NO: 31766 - protein, 9 aa, synthetic construct
  source 1..9: note = Seed: LVVVGARGV (KRAS G12R)
WVVRGKRGM

SEQ ID NO: 31767 - protein, 9 aa, synthetic construct
  source 1..9: note = Seed: LVVVGARGV (KRAS G12R)
WVVRGKRGQ

SEQ ID NO: 31768 - protein, 9 aa, synthetic construct
  source 1..9: note = Seed: LVVVGARGV (KRAS G12R)
WVVRGKRGR

SEQ ID NO: 31769 - protein, 9 aa, synthetic construct
  source 1..9: note = Seed: LVVVGARGV (KRAS G12R)
WVVRGKRGS

SEQ ID NO: 31770 - protein, 9 aa, synthetic construct
  source 1..9: note = Seed: LVVVGARGV (KRAS G12R)
WVVRGKRGV

SEQ ID NO: 31771 - protein, 9 aa, synthetic construct
  source 1..9: note = Seed: LVVVGARGV (KRAS G12R)
WVVRGKRGY

SEQ ID NO: 31772 - protein, 9 aa, synthetic construct
  source 1..9: note = Seed: LVVVGARGV (KRAS G12R)
WVVRGLRGF

SEQ ID NO: 31773 - protein, 9 aa, synthetic construct
  source 1..9: note = Seed: LVVVGARGV (KRAS G12R)
WVVRGLRGI

SEQ ID NO: 31774 - protein, 9 aa, synthetic construct
  source 1..9: note = Seed: LVVVGARGV (KRAS G12R)
WVVRGLRGR

SEQ ID NO: 31775 - protein, 9 aa, synthetic construct
  source 1..9: note = Seed: LVVVGARGV (KRAS G12R)
WVVRGMRGR

SEQ ID NO: 31776 - protein, 9 aa, synthetic construct
  source 1..9: note = Seed: LVVVGARGV (KRAS G12R)
WVVRGMRGV

SEQ ID NO: 31777 - protein, 9 aa, synthetic construct
  source 1..9: note = Seed: LVVVGARGV (KRAS G12R)
WVVRGRRGA

SEQ ID NO: 31778 - protein, 9 aa, synthetic construct
  source 1..9: note = Seed: LVVVGARGV (KRAS G12R)
WVVRGRRGC

SEQ ID NO: 31779 - protein, 9 aa, synthetic construct
  source 1..9: note = Seed: LVVVGARGV (KRAS G12R)
WVVRGRRGF

SEQ ID NO: 31780 - protein, 9 aa, synthetic construct
  source 1..9: note = Seed: LVVVGARGV (KRAS G12R)
WVVRGRRGG

SEQ ID NO: 31781 - protein, 9 aa, synthetic construct
  source 1..9: note = Seed: LVVVGARGV (KRAS G12R)
WVVRGRRGI

SEQ ID NO: 31782 - protein, 9 aa, synthetic construct
  source 1..9: note = Seed: LVVVGARGV (KRAS G12R)
WVVRGRRGL

SEQ ID NO: 31783 - protein, 9 aa, synthetic construct
  source 1..9: note = Seed: LVVVGARGV (KRAS G12R)
WVVRGRRGM

SEQ ID NO: 31784 - protein, 9 aa, synthetic construct
  source 1..9: note = Seed: LVVVGARGV (KRAS G12R)
WVVRGRRGQ

SEQ ID NO: 31785 - protein, 9 aa, synthetic construct
  source 1..9: note = Seed: LVVVGARGV (KRAS G12R)
WVVRGRRGR

SEQ ID NO: 31786 - protein, 9 aa, synthetic construct
  source 1..9: note = Seed: LVVVGARGV (KRAS G12R)
WVVRGRRGS

SEQ ID NO: 31787 - protein, 9 aa, synthetic construct
  source 1..9: note = Seed: LVVVGARGV (KRAS G12R)
WVVRGRRGT

SEQ ID NO: 31788 - protein, 9 aa, synthetic construct
  source 1..9: note = Seed: LVVVGARGV (KRAS G12R)
WVVRGRRGV

SEQ ID NO: 31789 - protein, 9 aa, synthetic construct
  source 1..9: note = Seed: LVVVGARGV (KRAS G12R)
WVVRGRRGY

SEQ ID NO: 31790 - protein, 9 aa, synthetic construct
  source 1..9: note = Seed: LVVVGARGV (KRAS G12R)
WVVRGSRGL

SEQ ID NO: 31791 - protein, 9 aa, synthetic construct
  source 1..9: note = Seed: LVVVGARGV (KRAS G12R)
WVVRGTRGL

SEQ ID NO: 31792 - protein, 9 aa, synthetic construct
  source 1..9: note = Seed: LVVVGARGV (KRAS G12R)
WVVRGTRGR

SEQ ID NO: 31793 - protein, 9 aa, synthetic construct
  source 1..9: note = Seed: LVVVGARGV (KRAS G12R)
WVVRGTRGY

SEQ ID NO: 31794 - protein, 9 aa, synthetic construct
  source 1..9: note = Seed: LVVVGARGV (KRAS G12R)
WVVRGVRGF

SEQ ID NO: 31795 - protein, 9 aa, synthetic construct
  source 1..9: note = Seed: LVVVGARGV (KRAS G12R)
WVVRGVRGI

SEQ ID NO: 31796 - protein, 9 aa, synthetic construct
  source 1..9: note = Seed: LVVVGARGV (KRAS G12R)
WVVRGVRGL

SEQ ID NO: 31797 - protein, 9 aa, synthetic construct
  source 1..9: note = Seed: LVVVGARGV (KRAS G12R)
WVVRGVRGM

SEQ ID NO: 31798 - protein, 9 aa, synthetic construct
  source 1..9: note = Seed: LVVVGARGV (KRAS G12R)
WVVRGVRGR

SEQ ID NO: 31799 - protein, 9 aa, synthetic construct
  source 1..9: note = Seed: LVVVGARGV (KRAS G12R)
WVVRGVRGV

SEQ ID NO: 31800 - protein, 9 aa, synthetic construct
  source 1..9: note = Seed: LVVVGARGV (KRAS G12R)
WVVSGARGA

SEQ ID NO: 31801 - protein, 9 aa, synthetic construct
  source 1..9: note = Seed: LVVVGARGV (KRAS G12R)
WVVSGARGC

SEQ ID NO: 31802 - protein, 9 aa, synthetic construct
  source 1..9: note = Seed: LVVVGARGV (KRAS G12R)
WVVSGARGF

SEQ ID NO: 31803 - protein, 9 aa, synthetic construct
  source 1..9: note = Seed: LVVVGARGV (KRAS G12R)
WVVSGARGG

SEQ ID NO: 31804 - protein, 9 aa, synthetic construct
  source 1..9: note = Seed: LVVVGARGV (KRAS G12R)
WVVSGARGI

SEQ ID NO: 31805 - protein, 9 aa, synthetic construct
  source 1..9: note = Seed: LVVVGARGV (KRAS G12R)
WVVSGARGL

SEQ ID NO: 31806 - protein, 9 aa, synthetic construct
  source 1..9: note = Seed: LVVVGARGV (KRAS G12R)
WVVSGARGM

SEQ ID NO: 31807 - protein, 9 aa, synthetic construct
  source 1..9: note = Seed: LVVVGARGV (KRAS G12R)
WVVSGARGN

SEQ ID NO: 31808 - protein, 9 aa, synthetic construct
  source 1..9: note = Seed: LVVVGARGV (KRAS G12R)
WVVSGARGS

SEQ ID NO: 31809 - protein, 9 aa, synthetic construct
  source 1..9: note = Seed: LVVVGARGV (KRAS G12R)
WVVSGARGT

SEQ ID NO: 31810 - protein, 9 aa, synthetic construct
  source 1..9: note = Seed: LVVVGARGV (KRAS G12R)
WVVSGARGV

SEQ ID NO: 31811 - protein, 9 aa, synthetic construct
  source 1..9: note = Seed: LVVVGARGV (KRAS G12R)
WVVSGARGW

SEQ ID NO: 31812 - protein, 9 aa, synthetic construct
  source 1..9: note = Seed: LVVVGARGV (KRAS G12R)
WVVSGARGY

SEQ ID NO: 31813 - protein, 9 aa, synthetic construct
  source 1..9: note = Seed: LVVVGARGV (KRAS G12R)
WVVSGFRGF

SEQ ID NO: 31814 - protein, 9 aa, synthetic construct
  source 1..9: note = Seed: LVVVGARGV (KRAS G12R)
WVVSGFRGI

SEQ ID NO: 31815 - protein, 9 aa, synthetic construct
  source 1..9: note = Seed: LVVVGARGV (KRAS G12R)
WVVSGFRGL

SEQ ID NO: 31816 - protein, 9 aa, synthetic construct
  source 1..9: note = Seed: LVVVGARGV (KRAS G12R)
WVVSGFRGV

SEQ ID NO: 31817 - protein, 9 aa, synthetic construct
  source 1..9: note = Seed: LVVVGARGV (KRAS G12R)
WVVSGGRGA

SEQ ID NO: 31818 - protein, 9 aa, synthetic construct
  source 1..9: note = Seed: LVVVGARGV (KRAS G12R)
WVVSGGRGF

SEQ ID NO: 31819 - protein, 9 aa, synthetic construct
  source 1..9: note = Seed: LVVVGARGV (KRAS G12R)
WVVSGGRGI

SEQ ID NO: 31820 - protein, 9 aa, synthetic construct
  source 1..9: note = Seed: LVVVGARGV (KRAS G12R)
WVVSGGRGL

SEQ ID NO: 31821 - protein, 9 aa, synthetic construct
  source 1..9: note = Seed: LVVVGARGV (KRAS G12R)
WVVSGGRGM

SEQ ID NO: 31822 - protein, 9 aa, synthetic construct
  source 1..9: note = Seed: LVVVGARGV (KRAS G12R)
WVVSGGRGS

SEQ ID NO: 31823 - protein, 9 aa, synthetic construct
  source 1..9: note = Seed: LVVVGARGV (KRAS G12R)
WVVSGGRGT

SEQ ID NO: 31824 - protein, 9 aa, synthetic construct
  source 1..9: note = Seed: LVVVGARGV (KRAS G12R)
WVVSGGRGV

SEQ ID NO: 31825 - protein, 9 aa, synthetic construct
  source 1..9: note = Seed: LVVVGARGV (KRAS G12R)
WVVSGIRGA

SEQ ID NO: 31826 - protein, 9 aa, synthetic construct
  source 1..9: note = Seed: LVVVGARGV (KRAS G12R)
WVVSGIRGI

SEQ ID NO: 31827 - protein, 9 aa, synthetic construct
  source 1..9: note = Seed: LVVVGARGV (KRAS G12R)
WVVSGIRGL

SEQ ID NO: 31828 - protein, 9 aa, synthetic construct
  source 1..9: note = Seed: LVVVGARGV (KRAS G12R)
WVVSGIRGM

SEQ ID NO: 31829 - protein, 9 aa, synthetic construct
  source 1..9: note = Seed: LVVVGARGV (KRAS G12R)
WVVSGIRGV

SEQ ID NO: 31830 - protein, 9 aa, synthetic construct
  source 1..9: note = Seed: LVVVGARGV (KRAS G12R)
WVVSGKRGA

SEQ ID NO: 31831 - protein, 9 aa, synthetic construct
  source 1..9: note = Seed: LVVVGARGV (KRAS G12R)
WVVSGKRGL

SEQ ID NO: 31832 - protein, 9 aa, synthetic construct
  source 1..9: note = Seed: LVVVGARGV (KRAS G12R)
WVVSGKRGM

SEQ ID NO: 31833 - protein, 9 aa, synthetic construct
  source 1..9: note = Seed: LVVVGARGV (KRAS G12R)
WVVSGKRGR

SEQ ID NO: 31834 - protein, 9 aa, synthetic construct
  source 1..9: note = Seed: LVVVGARGV (KRAS G12R)
WVVSGMRGI

SEQ ID NO: 31835 - protein, 9 aa, synthetic construct
  source 1..9: note = Seed: LVVVGARGV (KRAS G12R)
WVVSGMRGL

SEQ ID NO: 31836 - protein, 9 aa, synthetic construct
  source 1..9: note = Seed: LVVVGARGV (KRAS G12R)
WVVSGMRGV

SEQ ID NO: 31837 - protein, 9 aa, synthetic construct
  source 1..9: note = Seed: LVVVGARGV (KRAS G12R)
WVVSGNRGA

SEQ ID NO: 31838 - protein, 9 aa, synthetic construct
  source 1..9: note = Seed: LVVVGARGV (KRAS G12R)
WVVSGNRGF

SEQ ID NO: 31839 - protein, 9 aa, synthetic construct
  source 1..9: note = Seed: LVVVGARGV (KRAS G12R)
WVVSGNRGI

SEQ ID NO: 31840 - protein, 9 aa, synthetic construct
  source 1..9: note = Seed: LVVVGARGV (KRAS G12R)
WVVSGNRGL

SEQ ID NO: 31841 - protein, 9 aa, synthetic construct
  source 1..9: note = Seed: LVVVGARGV (KRAS G12R)
WVVSGNRGM

SEQ ID NO: 31842 - protein, 9 aa, synthetic construct
  source 1..9: note = Seed: LVVVGARGV (KRAS G12R)
WVVSGNRGV

SEQ ID NO: 31843 - protein, 9 aa, synthetic construct
  source 1..9: note = Seed: LVVVGARGV (KRAS G12R)
WVVSGPRGA

SEQ ID NO: 31844 - protein, 9 aa, synthetic construct
  source 1..9: note = Seed: LVVVGARGV (KRAS G12R)
WVVSGPRGI

SEQ ID NO: 31845 - protein, 9 aa, synthetic construct
  source 1..9: note = Seed: LVVVGARGV (KRAS G12R)
WVVSGPRGL

SEQ ID NO: 31846 - protein, 9 aa, synthetic construct
  source 1..9: note = Seed: LVVVGARGV (KRAS G12R)
WVVSGPRGM

SEQ ID NO: 31847 - protein, 9 aa, synthetic construct
  source 1..9: note = Seed: LVVVGARGV (KRAS G12R)
WVVSGPRGV

SEQ ID NO: 31848 - protein, 9 aa, synthetic construct
  source 1..9: note = Seed: LVVVGARGV (KRAS G12R)
WVVSGRRGA

SEQ ID NO: 31849 - protein, 9 aa, synthetic construct
  source 1..9: note = Seed: LVVVGARGV (KRAS G12R)
WVVSGRRGF

SEQ ID NO: 31850 - protein, 9 aa, synthetic construct
  source 1..9: note = Seed: LVVVGARGV (KRAS G12R)
WVVSGRRGH

SEQ ID NO: 31851 - protein, 9 aa, synthetic construct
  source 1..9: note = Seed: LVVVGARGV (KRAS G12R)
WVVSGRRGI

SEQ ID NO: 31852 - protein, 9 aa, synthetic construct
  source 1..9: note = Seed: LVVVGARGV (KRAS G12R)
WVVSGRRGK

SEQ ID NO: 31853 - protein, 9 aa, synthetic construct
  source 1..9: note = Seed: LVVVGARGV (KRAS G12R)
WVVSGRRGL

SEQ ID NO: 31854 - protein, 9 aa, synthetic construct
  source 1..9: note = Seed: LVVVGARGV (KRAS G12R)
WVVSGRRGM

SEQ ID NO: 31855 - protein, 9 aa, synthetic construct
  source 1..9: note = Seed: LVVVGARGV (KRAS G12R)
WVVSGRRGQ

SEQ ID NO: 31856 - protein, 9 aa, synthetic construct
  source 1..9: note = Seed: LVVVGARGV (KRAS G12R)
WVVSGRRGR

SEQ ID NO: 31857 - protein, 9 aa, synthetic construct
  source 1..9: note = Seed: LVVVGARGV (KRAS G12R)
WVVSGRRGS

SEQ ID NO: 31858 - protein, 9 aa, synthetic construct
  source 1..9: note = Seed: LVVVGARGV (KRAS G12R)
WVVSGRRGT

SEQ ID NO: 31859 - protein, 9 aa, synthetic construct
  source 1..9: note = Seed: LVVVGARGV (KRAS G12R)
WVVSGRRGV

SEQ ID NO: 31860 - protein, 9 aa, synthetic construct
  source 1..9: note = Seed: LVVVGARGV (KRAS G12R)
WVVSGRRGW

SEQ ID NO: 31861 - protein, 9 aa, synthetic construct
  source 1..9: note = Seed: LVVVGARGV (KRAS G12R)
WVVSGRRGY

SEQ ID NO: 31862 - protein, 9 aa, synthetic construct
  source 1..9: note = Seed: LVVVGARGV (KRAS G12R)
WVVSGSRGA

SEQ ID NO: 31863 - protein, 9 aa, synthetic construct
  source 1..9: note = Seed: LVVVGARGV (KRAS G12R)
WVVSGSRGF

SEQ ID NO: 31864 - protein, 9 aa, synthetic construct
  source 1..9: note = Seed: LVVVGARGV (KRAS G12R)
WVVSGSRGI

SEQ ID NO: 31865 - protein, 9 aa, synthetic construct
  source 1..9: note = Seed: LVVVGARGV (KRAS G12R)
WVVSGSRGL

SEQ ID NO: 31866 - protein, 9 aa, synthetic construct
  source 1..9: note = Seed: LVVVGARGV (KRAS G12R)
WVVSGSRGM

SEQ ID NO: 31867 - protein, 9 aa, synthetic construct
  source 1..9: note = Seed: LVVVGARGV (KRAS G12R)
WVVSGSRGS

SEQ ID NO: 31868 - protein, 9 aa, synthetic construct
  source 1..9: note = Seed: LVVVGARGV (KRAS G12R)
WVVSGSRGT

SEQ ID NO: 31869 - protein, 9 aa, synthetic construct
  source 1..9: note = Seed: LVVVGARGV (KRAS G12R)
WVVSGSRGV

SEQ ID NO: 31870 - protein, 9 aa, synthetic construct
  source 1..9: note = Seed: LVVVGARGV (KRAS G12R)
WVVSGSRGY

SEQ ID NO: 31871 - protein, 9 aa, synthetic construct
  source 1..9: note = Seed: LVVVGARGV (KRAS G12R)
WVVSGTRGA

SEQ ID NO: 31872 - protein, 9 aa, synthetic construct
  source 1..9: note = Seed: LVVVGARGV (KRAS G12R)
WVVSGTRGF

SEQ ID NO: 31873 - protein, 9 aa, synthetic construct
  source 1..9: note = Seed: LVVVGARGV (KRAS G12R)
WVVSGTRGI

SEQ ID NO: 31874 - protein, 9 aa, synthetic construct
  source 1..9: note = Seed: LVVVGARGV (KRAS G12R)
WVVSGTRGL

SEQ ID NO: 31875 - protein, 9 aa, synthetic construct
  source 1..9: note = Seed: LVVVGARGV (KRAS G12R)
WVVSGTRGM

SEQ ID NO: 31876 - protein, 9 aa, synthetic construct
  source 1..9: note = Seed: LVVVGARGV (KRAS G12R)
WVVSGTRGV

SEQ ID NO: 31877 - protein, 9 aa, synthetic construct
  source 1..9: note = Seed: LVVVGARGV (KRAS G12R)
WVVSGVRGA

SEQ ID NO: 31878 - protein, 9 aa, synthetic construct
  source 1..9: note = Seed: LVVVGARGV (KRAS G12R)
WVVSGVRGF

SEQ ID NO: 31879 - protein, 9 aa, synthetic construct
  source 1..9: note = Seed: LVVVGARGV (KRAS G12R)
WVVSGVRGI

SEQ ID NO: 31880 - protein, 9 aa, synthetic construct
  source 1..9: note = Seed: LVVVGARGV (KRAS G12R)
WVVSGVRGL

SEQ ID NO: 31881 - protein, 9 aa, synthetic construct
  source 1..9: note = Seed: LVVVGARGV (KRAS G12R)
WVVSGVRGM

SEQ ID NO: 31882 - protein, 9 aa, synthetic construct
  source 1..9: note = Seed: LVVVGARGV (KRAS G12R)
WVVSGVRGV

SEQ ID NO: 31883 - protein, 9 aa, synthetic construct
  source 1..9: note = Seed: LVVVGARGV (KRAS G12R)
WVVTGARGA

SEQ ID NO: 31884 - protein, 9 aa, synthetic construct
  source 1..9: note = Seed: LVVVGARGV (KRAS G12R)
WVVTGARGF

SEQ ID NO: 31885 - protein, 9 aa, synthetic construct
  source 1..9: note = Seed: LVVVGARGV (KRAS G12R)
WVVTGARGI

SEQ ID NO: 31886 - protein, 9 aa, synthetic construct
  source 1..9: note = Seed: LVVVGARGV (KRAS G12R)
WVVTGARGL

SEQ ID NO: 31887 - protein, 9 aa, synthetic construct
  source 1..9: note = Seed: LVVVGARGV (KRAS G12R)
WVVTGARGM

SEQ ID NO: 31888 - protein, 9 aa, synthetic construct
  source 1..9: note = Seed: LVVVGARGV (KRAS G12R)
WVVTGARGS

SEQ ID NO: 31889 - protein, 9 aa, synthetic construct
  source 1..9: note = Seed: LVVVGARGV (KRAS G12R)
WVVTGARGT

SEQ ID NO: 31890 - protein, 9 aa, synthetic construct
  source 1..9: note = Seed: LVVVGARGV (KRAS G12R)
WVVTGARGV

SEQ ID NO: 31891 - protein, 9 aa, synthetic construct
  source 1..9: note = Seed: LVVVGARGV (KRAS G12R)
WVVTGFRGF

SEQ ID NO: 31892 - protein, 9 aa, synthetic construct
  source 1..9: note = Seed: LVVVGARGV (KRAS G12R)
WVVTGFRGI

SEQ ID NO: 31893 - protein, 9 aa, synthetic construct
  source 1..9: note = Seed: LVVVGARGV (KRAS G12R)
WVVTGFRGL

SEQ ID NO: 31894 - protein, 9 aa, synthetic construct
  source 1..9: note = Seed: LVVVGARGV (KRAS G12R)
WVVTGFRGM

SEQ ID NO: 31895 - protein, 9 aa, synthetic construct
  source 1..9: note = Seed: LVVVGARGV (KRAS G12R)
WVVTGFRGV

SEQ ID NO: 31896 - protein, 9 aa, synthetic construct
  source 1..9: note = Seed: LVVVGARGV (KRAS G12R)
WVVTGGRGA

SEQ ID NO: 31897 - protein, 9 aa, synthetic construct
  source 1..9: note = Seed: LVVVGARGV (KRAS G12R)
WVVTGGRGF

SEQ ID NO: 31898 - protein, 9 aa, synthetic construct
  source 1..9: note = Seed: LVVVGARGV (KRAS G12R)
WVVTGGRGI

SEQ ID NO: 31899 - protein, 9 aa, synthetic construct
  source 1..9: note = Seed: LVVVGARGV (KRAS G12R)
WVVTGGRGL

SEQ ID NO: 31900 - protein, 9 aa, synthetic construct
  source 1..9: note = Seed: LVVVGARGV (KRAS G12R)
WVVTGGRGM

SEQ ID NO: 31901 - protein, 9 aa, synthetic construct
  source 1..9: note = Seed: LVVVGARGV (KRAS G12R)
WVVTGGRGT

SEQ ID NO: 31902 - protein, 9 aa, synthetic construct
  source 1..9: note = Seed: LVVVGARGV (KRAS G12R)
WVVTGGRGV

SEQ ID NO: 31903 - protein, 9 aa, synthetic construct
  source 1..9: note = Seed: LVVVGARGV (KRAS G12R)
WVVTGIRGI

SEQ ID NO: 31904 - protein, 9 aa, synthetic construct
  source 1..9: note = Seed: LVVVGARGV (KRAS G12R)
WVVTGIRGL

SEQ ID NO: 31905 - protein, 9 aa, synthetic construct
  source 1..9: note = Seed: LVVVGARGV (KRAS G12R)
WVVTGIRGV

SEQ ID NO: 31906 - protein, 9 aa, synthetic construct
  source 1..9: note = Seed: LVVVGARGV (KRAS G12R)
WVVTGKRGR

SEQ ID NO: 31907 - protein, 9 aa, synthetic construct
  source 1..9: note = Seed: LVVVGARGV (KRAS G12R)
WVVTGNRGA

SEQ ID NO: 31908 - protein, 9 aa, synthetic construct
  source 1..9: note = Seed: LVVVGARGV (KRAS G12R)
WVVTGNRGF

SEQ ID NO: 31909 - protein, 9 aa, synthetic construct
  source 1..9: note = Seed: LVVVGARGV (KRAS G12R)
WVVTGNRGI

SEQ ID NO: 31910 - protein, 9 aa, synthetic construct
  source 1..9: note = Seed: LVVVGARGV (KRAS G12R)
WVVTGNRGL

SEQ ID NO: 31911 - protein, 9 aa, synthetic construct
  source 1..9: note = Seed: LVVVGARGV (KRAS G12R)
WVVTGNRGM

SEQ ID NO: 31912 - protein, 9 aa, synthetic construct
  source 1..9: note = Seed: LVVVGARGV (KRAS G12R)
WVVTGNRGV

SEQ ID NO: 31913 - protein, 9 aa, synthetic construct
  source 1..9: note = Seed: LVVVGARGV (KRAS G12R)
WVVTGPRGA

SEQ ID NO: 31914 - protein, 9 aa, synthetic construct
  source 1..9: note = Seed: LVVVGARGV (KRAS G12R)
WVVTGPRGF

SEQ ID NO: 31915 - protein, 9 aa, synthetic construct
  source 1..9: note = Seed: LVVVGARGV (KRAS G12R)
WVVTGPRGI

SEQ ID NO: 31916 - protein, 9 aa, synthetic construct
  source 1..9: note = Seed: LVVVGARGV (KRAS G12R)
WVVTGPRGL

SEQ ID NO: 31917 - protein, 9 aa, synthetic construct
  source 1..9: note = Seed: LVVVGARGV (KRAS G12R)
WVVTGPRGM

SEQ ID NO: 31918 - protein, 9 aa, synthetic construct
  source 1..9: note = Seed: LVVVGARGV (KRAS G12R)
WVVTGPRGV

SEQ ID NO: 31919 - protein, 9 aa, synthetic construct
  source 1..9: note = Seed: LVVVGARGV (KRAS G12R)
WVVTGRRGA

SEQ ID NO: 31920 - protein, 9 aa, synthetic construct
  source 1..9: note = Seed: LVVVGARGV (KRAS G12R)
WVVTGRRGF

SEQ ID NO: 31921 - protein, 9 aa, synthetic construct
  source 1..9: note = Seed: LVVVGARGV (KRAS G12R)
WVVTGRRGH

SEQ ID NO: 31922 - protein, 9 aa, synthetic construct
  source 1..9: note = Seed: LVVVGARGV (KRAS G12R)
WVVTGRRGI

SEQ ID NO: 31923 - protein, 9 aa, synthetic construct
  source 1..9: note = Seed: LVVVGARGV (KRAS G12R)
WVVTGRRGK

SEQ ID NO: 31924 - protein, 9 aa, synthetic construct
  source 1..9: note = Seed: LVVVGARGV (KRAS G12R)
WVVTGRRGL

SEQ ID NO: 31925 - protein, 9 aa, synthetic construct
  source 1..9: note = Seed: LVVVGARGV (KRAS G12R)
WVVTGRRGM

SEQ ID NO: 31926 - protein, 9 aa, synthetic construct
  source 1..9: note = Seed: LVVVGARGV (KRAS G12R)
WVVTGRRGR

SEQ ID NO: 31927 - protein, 9 aa, synthetic construct
  source 1..9: note = Seed: LVVVGARGV (KRAS G12R)
WVVTGRRGS

SEQ ID NO: 31928 - protein, 9 aa, synthetic construct
  source 1..9: note = Seed: LVVVGARGV (KRAS G12R)
WVVTGRRGV

SEQ ID NO: 31929 - protein, 9 aa, synthetic construct
  source 1..9: note = Seed: LVVVGARGV (KRAS G12R)
WVVTGRRGW

SEQ ID NO: 31930 - protein, 9 aa, synthetic construct
  source 1..9: note = Seed: LVVVGARGV (KRAS G12R)
WVVTGRRGY

SEQ ID NO: 31931 - protein, 9 aa, synthetic construct
  source 1..9: note = Seed: LVVVGARGV (KRAS G12R)
WVVTGSRGA

SEQ ID NO: 31932 - protein, 9 aa, synthetic construct
  source 1..9: note = Seed: LVVVGARGV (KRAS G12R)
WVVTGSRGF

SEQ ID NO: 31933 - protein, 9 aa, synthetic construct
  source 1..9: note = Seed: LVVVGARGV (KRAS G12R)
WVVTGSRGI

SEQ ID NO: 31934 - protein, 9 aa, synthetic construct
  source 1..9: note = Seed: LVVVGARGV (KRAS G12R)
WVVTGSRGL

SEQ ID NO: 31935 - protein, 9 aa, synthetic construct
  source 1..9: note = Seed: LVVVGARGV (KRAS G12R)
WVVTGSRGM

SEQ ID NO: 31936 - protein, 9 aa, synthetic construct
  source 1..9: note = Seed: LVVVGARGV (KRAS G12R)
WVVTGSRGS

SEQ ID NO: 31937 - protein, 9 aa, synthetic construct
  source 1..9: note = Seed: LVVVGARGV (KRAS G12R)
WVVTGSRGT

SEQ ID NO: 31938 - protein, 9 aa, synthetic construct
  source 1..9: note = Seed: LVVVGARGV (KRAS G12R)
WVVTGSRGV

SEQ ID NO: 31939 - protein, 9 aa, synthetic construct
  source 1..9: note = Seed: LVVVGARGV (KRAS G12R)
WVVTGSRGY

SEQ ID NO: 31940 - protein, 9 aa, synthetic construct
  source 1..9: note = Seed: LVVVGARGV (KRAS G12R)
WVVTGTRGA

SEQ ID NO: 31941 - protein, 9 aa, synthetic construct
  source 1..9: note = Seed: LVVVGARGV (KRAS G12R)
WVVTGTRGF

SEQ ID NO: 31942 - protein, 9 aa, synthetic construct
  source 1..9: note = Seed: LVVVGARGV (KRAS G12R)
WVVTGTRGI

SEQ ID NO: 31943 - protein, 9 aa, synthetic construct
  source 1..9: note = Seed: LVVVGARGV (KRAS G12R)
WVVTGTRGL

SEQ ID NO: 31944 - protein, 9 aa, synthetic construct
  source 1..9: note = Seed: LVVVGARGV (KRAS G12R)
WVVTGTRGM

SEQ ID NO: 31945 - protein, 9 aa, synthetic construct
  source 1..9: note = Seed: LVVVGARGV (KRAS G12R)
WVVTGTRGV

SEQ ID NO: 31946 - protein, 9 aa, synthetic construct
  source 1..9: note = Seed: LVVVGARGV (KRAS G12R)
WVVTGVRGA

SEQ ID NO: 31947 - protein, 9 aa, synthetic construct
  source 1..9: note = Seed: LVVVGARGV (KRAS G12R)
WVVTGVRGF

SEQ ID NO: 31948 - protein, 9 aa, synthetic construct
  source 1..9: note = Seed: LVVVGARGV (KRAS G12R)
WVVTGVRGI

SEQ ID NO: 31949 - protein, 9 aa, synthetic construct
  source 1..9: note = Seed: LVVVGARGV (KRAS G12R)
WVVTGVRGL

SEQ ID NO: 31950 - protein, 9 aa, synthetic construct
  source 1..9: note = Seed: LVVVGARGV (KRAS G12R)
WVVTGVRGM

SEQ ID NO: 31951 - protein, 9 aa, synthetic construct
  source 1..9: note = Seed: LVVVGARGV (KRAS G12R)
WVVTGVRGV

SEQ ID NO: 31952 - protein, 9 aa, synthetic construct
  source 1..9: note = Seed: LVVVGARGV (KRAS G12R)
WVVVGARGA

SEQ ID NO: 31953 - protein, 9 aa, synthetic construct
  source 1..9: note = Seed: LVVVGARGV (KRAS G12R)
WVVVGARGC

SEQ ID NO: 31954 - protein, 9 aa, synthetic construct
  source 1..9: note = Seed: LVVVGARGV (KRAS G12R)
WVVVGARGF

SEQ ID NO: 31955 - protein, 9 aa, synthetic construct
  source 1..9: note = Seed: LVVVGARGV (KRAS G12R)
WVVVGARGG

SEQ ID NO: 31956 - protein, 9 aa, synthetic construct
  source 1..9: note = Seed: LVVVGARGV (KRAS G12R)
WVVVGARGH

SEQ ID NO: 31957 - protein, 9 aa, synthetic construct
  source 1..9: note = Seed: LVVVGARGV (KRAS G12R)
WVVVGARGI

SEQ ID NO: 31958 - protein, 9 aa, synthetic construct
  source 1..9: note = Seed: LVVVGARGV (KRAS G12R)
WVVVGARGL

SEQ ID NO: 31959 - protein, 9 aa, synthetic construct
  source 1..9: note = Seed: LVVVGARGV (KRAS G12R)
WVVVGARGM

SEQ ID NO: 31960 - protein, 9 aa, synthetic construct
  source 1..9: note = Seed: LVVVGARGV (KRAS G12R)
WVVVGARGN

SEQ ID NO: 31961 - protein, 9 aa, synthetic construct
  source 1..9: note = Seed: LVVVGARGV (KRAS G12R)
WVVVGARGS

SEQ ID NO: 31962 - protein, 9 aa, synthetic construct
  source 1..9: note = Seed: LVVVGARGV (KRAS G12R)
WVVVGARGT

SEQ ID NO: 31963 - protein, 9 aa, synthetic construct
  source 1..9: note = Seed: LVVVGARGV (KRAS G12R)
WVVVGARGV

SEQ ID NO: 31964 - protein, 9 aa, synthetic construct
  source 1..9: note = Seed: LVVVGARGV (KRAS G12R)
WVVVGARGY

SEQ ID NO: 31965 - protein, 9 aa, synthetic construct
  source 1..9: note = Seed: LVVVGARGV (KRAS G12R)
WVVVGFRGI

SEQ ID NO: 31966 - protein, 9 aa, synthetic construct
  source 1..9: note = Seed: LVVVGARGV (KRAS G12R)
WVVVGFRGL

SEQ ID NO: 31967 - protein, 9 aa, synthetic construct
  source 1..9: note = Seed: LVVVGARGV (KRAS G12R)
WVVVGFRGV

SEQ ID NO: 31968 - protein, 9 aa, synthetic construct
  source 1..9: note = Seed: LVVVGARGV (KRAS G12R)
WVVVGGRGA

SEQ ID NO: 31969 - protein, 9 aa, synthetic construct
  source 1..9: note = Seed: LVVVGARGV (KRAS G12R)
WVVVGGRGC

SEQ ID NO: 31970 - protein, 9 aa, synthetic construct
  source 1..9: note = Seed: LVVVGARGV (KRAS G12R)
WVVVGGRGF

SEQ ID NO: 31971 - protein, 9 aa, synthetic construct
  source 1..9: note = Seed: LVVVGARGV (KRAS G12R)
WVVVGGRGG

SEQ ID NO: 31972 - protein, 9 aa, synthetic construct
  source 1..9: note = Seed: LVVVGARGV (KRAS G12R)
WVVVGGRGI

SEQ ID NO: 31973 - protein, 9 aa, synthetic construct
  source 1..9: note = Seed: LVVVGARGV (KRAS G12R)
WVVVGGRGL

SEQ ID NO: 31974 - protein, 9 aa, synthetic construct
  source 1..9: note = Seed: LVVVGARGV (KRAS G12R)
WVVVGGRGM

SEQ ID NO: 31975 - protein, 9 aa, synthetic construct
  source 1..9: note = Seed: LVVVGARGV (KRAS G12R)
WVVVGGRGN

SEQ ID NO: 31976 - protein, 9 aa, synthetic construct
  source 1..9: note = Seed: LVVVGARGV (KRAS G12R)
WVVVGGRGS

SEQ ID NO: 31977 - protein, 9 aa, synthetic construct
  source 1..9: note = Seed: LVVVGARGV (KRAS G12R)
WVVVGGRGT

SEQ ID NO: 31978 - protein, 9 aa, synthetic construct
  source 1..9: note = Seed: LVVVGARGV (KRAS G12R)
WVVVGGRGV

SEQ ID NO: 31979 - protein, 9 aa, synthetic construct
  source 1..9: note = Seed: LVVVGARGV (KRAS G12R)
WVVVGHRGA

SEQ ID NO: 31980 - protein, 9 aa, synthetic construct
  source 1..9: note = Seed: LVVVGARGV (KRAS G12R)
WVVVGHRGL

SEQ ID NO: 31981 - protein, 9 aa, synthetic construct
  source 1..9: note = Seed: LVVVGARGV (KRAS G12R)
WVVVGIRGA

SEQ ID NO: 31982 - protein, 9 aa, synthetic construct
  source 1..9: note = Seed: LVVVGARGV (KRAS G12R)
WVVVGIRGI

SEQ ID NO: 31983 - protein, 9 aa, synthetic construct
  source 1..9: note = Seed: LVVVGARGV (KRAS G12R)
WVVVGIRGL

SEQ ID NO: 31984 - protein, 9 aa, synthetic construct
  source 1..9: note = Seed: LVVVGARGV (KRAS G12R)
WVVVGIRGN

SEQ ID NO: 31985 - protein, 9 aa, synthetic construct
  source 1..9: note = Seed: LVVVGARGV (KRAS G12R)
WVVVGIRGR

SEQ ID NO: 31986 - protein, 9 aa, synthetic construct
  source 1..9: note = Seed: LVVVGARGV (KRAS G12R)
WVVVGIRGS

SEQ ID NO: 31987 - protein, 9 aa, synthetic construct
  source 1..9: note = Seed: LVVVGARGV (KRAS G12R)
WVVVGIRGV

SEQ ID NO: 31988 - protein, 9 aa, synthetic construct
  source 1..9: note = Seed: LVVVGARGV (KRAS G12R)
WVVVGKRGA

SEQ ID NO: 31989 - protein, 9 aa, synthetic construct
  source 1..9: note = Seed: LVVVGARGV (KRAS G12R)
WVVVGKRGF

SEQ ID NO: 31990 - protein, 9 aa, synthetic construct
  source 1..9: note = Seed: LVVVGARGV (KRAS G12R)
WVVVGKRGG

SEQ ID NO: 31991 - protein, 9 aa, synthetic construct
  source 1..9: note = Seed: LVVVGARGV (KRAS G12R)
WVVVGKRGH

SEQ ID NO: 31992 - protein, 9 aa, synthetic construct
  source 1..9: note = Seed: LVVVGARGV (KRAS G12R)
WVVVGKRGI

SEQ ID NO: 31993 - protein, 9 aa, synthetic construct
  source 1..9: note = Seed: LVVVGARGV (KRAS G12R)
WVVVGKRGL

SEQ ID NO: 31994 - protein, 9 aa, synthetic construct
  source 1..9: note = Seed: LVVVGARGV (KRAS G12R)
WVVVGKRGM

SEQ ID NO: 31995 - protein, 9 aa, synthetic construct
  source 1..9: note = Seed: LVVVGARGV (KRAS G12R)
WVVVGKRGN

SEQ ID NO: 31996 - protein, 9 aa, synthetic construct
  source 1..9: note = Seed: LVVVGARGV (KRAS G12R)
WVVVGKRGQ

SEQ ID NO: 31997 - protein, 9 aa, synthetic construct
  source 1..9: note = Seed: LVVVGARGV (KRAS G12R)
WVVVGKRGR

SEQ ID NO: 31998 - protein, 9 aa, synthetic construct
  source 1..9: note = Seed: LVVVGARGV (KRAS G12R)
WVVVGKRGS

SEQ ID NO: 31999 - protein, 9 aa, synthetic construct
  source 1..9: note = Seed: LVVVGARGV (KRAS G12R)
WVVVGKRGT

SEQ ID NO: 32000 - protein, 9 aa, synthetic construct
  source 1..9: note = Seed: LVVVGARGV (KRAS G12R)
WVVVGKRGV

SEQ ID NO: 32001 - protein, 9 aa, synthetic construct
  source 1..9: note = Seed: LVVVGARGV (KRAS G12R)
WVVVGKRGW

SEQ ID NO: 32002 - protein, 9 aa, synthetic construct
  source 1..9: note = Seed: LVVVGARGV (KRAS G12R)
WVVVGKRGY

SEQ ID NO: 32003 - protein, 9 aa, synthetic construct
  source 1..9: note = Seed: LVVVGARGV (KRAS G12R)
WVVVGLRGL

SEQ ID NO: 32004 - protein, 9 aa, synthetic construct
  source 1..9: note = Seed: LVVVGARGV (KRAS G12R)
WVVVGLRGV

SEQ ID NO: 32005 - protein, 9 aa, synthetic construct
  source 1..9: note = Seed: LVVVGARGV (KRAS G12R)
WVVVGMRGA

SEQ ID NO: 32006 - protein, 9 aa, synthetic construct
  source 1..9: note = Seed: LVVVGARGV (KRAS G12R)
WVVVGMRGI

SEQ ID NO: 32007 - protein, 9 aa, synthetic construct
  source 1..9: note = Seed: LVVVGARGV (KRAS G12R)
WVVVGMRGL

SEQ ID NO: 32008 - protein, 9 aa, synthetic construct
  source 1..9: note = Seed: LVVVGARGV (KRAS G12R)
WVVVGMRGR

SEQ ID NO: 32009 - protein, 9 aa, synthetic construct
  source 1..9: note = Seed: LVVVGARGV (KRAS G12R)
WVVVGMRGV

SEQ ID NO: 32010 - protein, 9 aa, synthetic construct
  source 1..9: note = Seed: LVVVGARGV (KRAS G12R)
WVVVGNRGA

SEQ ID NO: 32011 - protein, 9 aa, synthetic construct
  source 1..9: note = Seed: LVVVGARGV (KRAS G12R)
WVVVGNRGF

SEQ ID NO: 32012 - protein, 9 aa, synthetic construct
  source 1..9: note = Seed: LVVVGARGV (KRAS G12R)
WVVVGNRGI

SEQ ID NO: 32013 - protein, 9 aa, synthetic construct
  source 1..9: note = Seed: LVVVGARGV (KRAS G12R)
WVVVGNRGL

SEQ ID NO: 32014 - protein, 9 aa, synthetic construct
  source 1..9: note = Seed: LVVVGARGV (KRAS G12R)
WVVVGNRGM

SEQ ID NO: 32015 - protein, 9 aa, synthetic construct
  source 1..9: note = Seed: LVVVGARGV (KRAS G12R)
WVVVGNRGS

SEQ ID NO: 32016 - protein, 9 aa, synthetic construct
  source 1..9: note = Seed: LVVVGARGV (KRAS G12R)
WVVVGNRGT

SEQ ID NO: 32017 - protein, 9 aa, synthetic construct
  source 1..9: note = Seed: LVVVGARGV (KRAS G12R)
WVVVGNRGV

SEQ ID NO: 32018 - protein, 9 aa, synthetic construct
  source 1..9: note = Seed: LVVVGARGV (KRAS G12R)
WVVVGPRGA

SEQ ID NO: 32019 - protein, 9 aa, synthetic construct
  source 1..9: note = Seed: LVVVGARGV (KRAS G12R)
WVVVGPRGI

SEQ ID NO: 32020 - protein, 9 aa, synthetic construct
  source 1..9: note = Seed: LVVVGARGV (KRAS G12R)
WVVVGPRGL

SEQ ID NO: 32021 - protein, 9 aa, synthetic construct
  source 1..9: note = Seed: LVVVGARGV (KRAS G12R)
WVVVGPRGM

SEQ ID NO: 32022 - protein, 9 aa, synthetic construct
  source 1..9: note = Seed: LVVVGARGV (KRAS G12R)
WVVVGPRGN

SEQ ID NO: 32023 - protein, 9 aa, synthetic construct
  source 1..9: note = Seed: LVVVGARGV (KRAS G12R)
WVVVGPRGS

SEQ ID NO: 32024 - protein, 9 aa, synthetic construct
  source 1..9: note = Seed: LVVVGARGV (KRAS G12R)
WVVVGPRGT

SEQ ID NO: 32025 - protein, 9 aa, synthetic construct
  source 1..9: note = Seed: LVVVGARGV (KRAS G12R)
WVVVGPRGV

SEQ ID NO: 32026 - protein, 9 aa, synthetic construct
  source 1..9: note = Seed: LVVVGARGV (KRAS G12R)
WVVVGRRGA

SEQ ID NO: 32027 - protein, 9 aa, synthetic construct
  source 1..9: note = Seed: LVVVGARGV (KRAS G12R)
WVVVGRRGF

SEQ ID NO: 32028 - protein, 9 aa, synthetic construct
  source 1..9: note = Seed: LVVVGARGV (KRAS G12R)
WVVVGRRGG

SEQ ID NO: 32029 - protein, 9 aa, synthetic construct
  source 1..9: note = Seed: LVVVGARGV (KRAS G12R)
WVVVGRRGH

SEQ ID NO: 32030 - protein, 9 aa, synthetic construct
  source 1..9: note = Seed: LVVVGARGV (KRAS G12R)
WVVVGRRGI

SEQ ID NO: 32031 - protein, 9 aa, synthetic construct
  source 1..9: note = Seed: LVVVGARGV (KRAS G12R)
WVVVGRRGK

SEQ ID NO: 32032 - protein, 9 aa, synthetic construct
  source 1..9: note = Seed: LVVVGARGV (KRAS G12R)
WVVVGRRGL

SEQ ID NO: 32033 - protein, 9 aa, synthetic construct
  source 1..9: note = Seed: LVVVGARGV (KRAS G12R)
WVVVGRRGM

SEQ ID NO: 32034 - protein, 9 aa, synthetic construct
  source 1..9: note = Seed: LVVVGARGV (KRAS G12R)
WVVVGRRGN

SEQ ID NO: 32035 - protein, 9 aa, synthetic construct
  source 1..9: note = Seed: LVVVGARGV (KRAS G12R)
WVVVGRRGP

SEQ ID NO: 32036 - protein, 9 aa, synthetic construct
  source 1..9: note = Seed: LVVVGARGV (KRAS G12R)
WVVVGRRGQ

SEQ ID NO: 32037 - protein, 9 aa, synthetic construct
  source 1..9: note = Seed: LVVVGARGV (KRAS G12R)
WVVVGRRGR

SEQ ID NO: 32038 - protein, 9 aa, synthetic construct
  source 1..9: note = Seed: LVVVGARGV (KRAS G12R)
WVVVGRRGS

SEQ ID NO: 32039 - protein, 9 aa, synthetic construct
  source 1..9: note = Seed: LVVVGARGV (KRAS G12R)
WVVVGRRGT

SEQ ID NO: 32040 - protein, 9 aa, synthetic construct
  source 1..9: note = Seed: LVVVGARGV (KRAS G12R)
WVVVGRRGV

SEQ ID NO: 32041 - protein, 9 aa, synthetic construct
  source 1..9: note = Seed: LVVVGARGV (KRAS G12R)
WVVVGRRGW

SEQ ID NO: 32042 - protein, 9 aa, synthetic construct
  source 1..9: note = Seed: LVVVGARGV (KRAS G12R)
WVVVGRRGY

SEQ ID NO: 32043 - protein, 9 aa, synthetic construct
  source 1..9: note = Seed: LVVVGARGV (KRAS G12R)
WVVVGSRGA

SEQ ID NO: 32044 - protein, 9 aa, synthetic construct
  source 1..9: note = Seed: LVVVGARGV (KRAS G12R)
WVVVGSRGC

SEQ ID NO: 32045 - protein, 9 aa, synthetic construct
  source 1..9: note = Seed: LVVVGARGV (KRAS G12R)
WVVVGSRGF

SEQ ID NO: 32046 - protein, 9 aa, synthetic construct
  source 1..9: note = Seed: LVVVGARGV (KRAS G12R)
WVVVGSRGG

SEQ ID NO: 32047 - protein, 9 aa, synthetic construct
  source 1..9: note = Seed: LVVVGARGV (KRAS G12R)
WVVVGSRGI

SEQ ID NO: 32048 - protein, 9 aa, synthetic construct
  source 1..9: note = Seed: LVVVGARGV (KRAS G12R)
WVVVGSRGL

SEQ ID NO: 32049 - protein, 9 aa, synthetic construct
  source 1..9: note = Seed: LVVVGARGV (KRAS G12R)
WVVVGSRGM

SEQ ID NO: 32050 - protein, 9 aa, synthetic construct
  source 1..9: note = Seed: LVVVGARGV (KRAS G12R)
WVVVGSRGN

SEQ ID NO: 32051 - protein, 9 aa, synthetic construct
  source 1..9: note = Seed: LVVVGARGV (KRAS G12R)
WVVVGSRGS

SEQ ID NO: 32052 - protein, 9 aa, synthetic construct
  source 1..9: note = Seed: LVVVGARGV (KRAS G12R)
WVVVGSRGT

SEQ ID NO: 32053 - protein, 9 aa, synthetic construct
  source 1..9: note = Seed: LVVVGARGV (KRAS G12R)
WVVVGSRGV

SEQ ID NO: 32054 - protein, 9 aa, synthetic construct
  source 1..9: note = Seed: LVVVGARGV (KRAS G12R)
WVVVGTRGA

SEQ ID NO: 32055 - protein, 9 aa, synthetic construct
  source 1..9: note = Seed: LVVVGARGV (KRAS G12R)
WVVVGTRGF

SEQ ID NO: 32056 - protein, 9 aa, synthetic construct
  source 1..9: note = Seed: LVVVGARGV (KRAS G12R)
WVVVGTRGI

SEQ ID NO: 32057 - protein, 9 aa, synthetic construct
  source 1..9: note = Seed: LVVVGARGV (KRAS G12R)
WVVVGTRGL

SEQ ID NO: 32058 - protein, 9 aa, synthetic construct
  source 1..9: note = Seed: LVVVGARGV (KRAS G12R)
WVVVGTRGM

SEQ ID NO: 32059 - protein, 9 aa, synthetic construct
  source 1..9: note = Seed: LVVVGARGV (KRAS G12R)
WVVVGTRGN

SEQ ID NO: 32060 - protein, 9 aa, synthetic construct
  source 1..9: note = Seed: LVVVGARGV (KRAS G12R)
WVVVGTRGS

SEQ ID NO: 32061 - protein, 9 aa, synthetic construct
  source 1..9: note = Seed: LVVVGARGV (KRAS G12R)
WVVVGTRGT

SEQ ID NO: 32062 - protein, 9 aa, synthetic construct
  source 1..9: note = Seed: LVVVGARGV (KRAS G12R)
WVVVGTRGV

SEQ ID NO: 32063 - protein, 9 aa, synthetic construct
  source 1..9: note = Seed: LVVVGARGV (KRAS G12R)
WVVVGVRGA

SEQ ID NO: 32064 - protein, 9 aa, synthetic construct
  source 1..9: note = Seed: LVVVGARGV (KRAS G12R)
WVVVGVRGI

SEQ ID NO: 32065 - protein, 9 aa, synthetic construct
  source 1..9: note = Seed: LVVVGARGV (KRAS G12R)
WVVVGVRGL

SEQ ID NO: 32066 - protein, 9 aa, synthetic construct
  source 1..9: note = Seed: LVVVGARGV (KRAS G12R)
WVVVGVRGM

SEQ ID NO: 32067 - protein, 9 aa, synthetic construct
  source 1..9: note = Seed: LVVVGARGV (KRAS G12R)
WVVVGVRGN

SEQ ID NO: 32068 - protein, 9 aa, synthetic construct
  source 1..9: note = Seed: LVVVGARGV (KRAS G12R)
WVVVGVRGR

SEQ ID NO: 32069 - protein, 9 aa, synthetic construct
  source 1..9: note = Seed: LVVVGARGV (KRAS G12R)
WVVVGVRGS

SEQ ID NO: 32070 - protein, 9 aa, synthetic construct
  source 1..9: note = Seed: LVVVGARGV (KRAS G12R)
WVVVGVRGT

SEQ ID NO: 32071 - protein, 9 aa, synthetic construct
  source 1..9: note = Seed: LVVVGARGV (KRAS G12R)
WVVVGVRGV

SEQ ID NO: 32072 - protein, 9 aa, synthetic construct
  source 1..9: note = Seed: LVVVGARGV (KRAS G12R)
WVVWGARGA

SEQ ID NO: 32073 - protein, 9 aa, synthetic construct
  source 1..9: note = Seed: LVVVGARGV (KRAS G12R)
WVVWGARGI

SEQ ID NO: 32074 - protein, 9 aa, synthetic construct
  source 1..9: note = Seed: LVVVGARGV (KRAS G12R)
WVVWGARGL

SEQ ID NO: 32075 - protein, 9 aa, synthetic construct
  source 1..9: note = Seed: LVVVGARGV (KRAS G12R)
WVVWGARGM

SEQ ID NO: 32076 - protein, 9 aa, synthetic construct
  source 1..9: note = Seed: LVVVGARGV (KRAS G12R)
WVVWGARGR

SEQ ID NO: 32077 - protein, 9 aa, synthetic construct
  source 1..9: note = Seed: LVVVGARGV (KRAS G12R)
WVVWGARGV

SEQ ID NO: 32078 - protein, 9 aa, synthetic construct
  source 1..9: note = Seed: LVVVGARGV (KRAS G12R)
WVVWGHRGL

SEQ ID NO: 32079 - protein, 9 aa, synthetic construct
  source 1..9: note = Seed: LVVVGARGV (KRAS G12R)
WVVWGHRGM

SEQ ID NO: 32080 - protein, 9 aa, synthetic construct
  source 1..9: note = Seed: LVVVGARGV (KRAS G12R)
WVVWGHRGR

SEQ ID NO: 32081 - protein, 9 aa, synthetic construct
  source 1..9: note = Seed: LVVVGARGV (KRAS G12R)
WVVWGIRGK

SEQ ID NO: 32082 - protein, 9 aa, synthetic construct
  source 1..9: note = Seed: LVVVGARGV (KRAS G12R)
WVVWGIRGR

SEQ ID NO: 32083 - protein, 9 aa, synthetic construct
  source 1..9: note = Seed: LVVVGARGV (KRAS G12R)
WVVWGKRGA

SEQ ID NO: 32084 - protein, 9 aa, synthetic construct
  source 1..9: note = Seed: LVVVGARGV (KRAS G12R)
WVVWGKRGF

SEQ ID NO: 32085 - protein, 9 aa, synthetic construct
  source 1..9: note = Seed: LVVVGARGV (KRAS G12R)
WVVWGKRGH

SEQ ID NO: 32086 - protein, 9 aa, synthetic construct
  source 1..9: note = Seed: LVVVGARGV (KRAS G12R)
WVVWGKRGI

SEQ ID NO: 32087 - protein, 9 aa, synthetic construct
  source 1..9: note = Seed: LVVVGARGV (KRAS G12R)
WVVWGKRGK

SEQ ID NO: 32088 - protein, 9 aa, synthetic construct
  source 1..9: note = Seed: LVVVGARGV (KRAS G12R)
WVVWGKRGL

SEQ ID NO: 32089 - protein, 9 aa, synthetic construct
  source 1..9: note = Seed: LVVVGARGV (KRAS G12R)
WVVWGKRGM

SEQ ID NO: 32090 - protein, 9 aa, synthetic construct
  source 1..9: note = Seed: LVVVGARGV (KRAS G12R)
WVVWGKRGR

SEQ ID NO: 32091 - protein, 9 aa, synthetic construct
  source 1..9: note = Seed: LVVVGARGV (KRAS G12R)
WVVWGKRGS

SEQ ID NO: 32092 - protein, 9 aa, synthetic construct
  source 1..9: note = Seed: LVVVGARGV (KRAS G12R)
WVVWGKRGV

SEQ ID NO: 32093 - protein, 9 aa, synthetic construct
  source 1..9: note = Seed: LVVVGARGV (KRAS G12R)
WVVWGKRGY

SEQ ID NO: 32094 - protein, 9 aa, synthetic construct
  source 1..9: note = Seed: LVVVGARGV (KRAS G12R)
WVVWGLRGR

SEQ ID NO: 32095 - protein, 9 aa, synthetic construct
  source 1..9: note = Seed: LVVVGARGV (KRAS G12R)
WVVWGMRGR

SEQ ID NO: 32096 - protein, 9 aa, synthetic construct
  source 1..9: note = Seed: LVVVGARGV (KRAS G12R)
WVVWGNRGL

SEQ ID NO: 32097 - protein, 9 aa, synthetic construct
  source 1..9: note = Seed: LVVVGARGV (KRAS G12R)
WVVWGNRGR

SEQ ID NO: 32098 - protein, 9 aa, synthetic construct
  source 1..9: note = Seed: LVVVGARGV (KRAS G12R)
WVVWGQRGR

SEQ ID NO: 32099 - protein, 9 aa, synthetic construct
  source 1..9: note = Seed: LVVVGARGV (KRAS G12R)
WVVWGRRGA

SEQ ID NO: 32100 - protein, 9 aa, synthetic construct
  source 1..9: note = Seed: LVVVGARGV (KRAS G12R)
WVVWGRRGF

SEQ ID NO: 32101 - protein, 9 aa, synthetic construct
  source 1..9: note = Seed: LVVVGARGV (KRAS G12R)
WVVWGRRGH

SEQ ID NO: 32102 - protein, 9 aa, synthetic construct
  source 1..9: note = Seed: LVVVGARGV (KRAS G12R)
WVVWGRRGI

SEQ ID NO: 32103 - protein, 9 aa, synthetic construct
  source 1..9: note = Seed: LVVVGARGV (KRAS G12R)
WVVWGRRGK

SEQ ID NO: 32104 - protein, 9 aa, synthetic construct
  source 1..9: note = Seed: LVVVGARGV (KRAS G12R)
WVVWGRRGL

SEQ ID NO: 32105 - protein, 9 aa, synthetic construct
  source 1..9: note = Seed: LVVVGARGV (KRAS G12R)
WVVWGRRGM

SEQ ID NO: 32106 - protein, 9 aa, synthetic construct
  source 1..9: note = Seed: LVVVGARGV (KRAS G12R)
WVVWGRRGQ

SEQ ID NO: 32107 - protein, 9 aa, synthetic construct
  source 1..9: note = Seed: LVVVGARGV (KRAS G12R)
WVVWGRRGR

SEQ ID NO: 32108 - protein, 9 aa, synthetic construct
  source 1..9: note = Seed: LVVVGARGV (KRAS G12R)
WVVWGRRGS

SEQ ID NO: 32109 - protein, 9 aa, synthetic construct
  source 1..9: note = Seed: LVVVGARGV (KRAS G12R)
WVVWGRRGT

SEQ ID NO: 32110 - protein, 9 aa, synthetic construct
  source 1..9: note = Seed: LVVVGARGV (KRAS G12R)
WVVWGRRGV

SEQ ID NO: 32111 - protein, 9 aa, synthetic construct
  source 1..9: note = Seed: LVVVGARGV (KRAS G12R)
WVVWGRRGW

SEQ ID NO: 32112 - protein, 9 aa, synthetic construct
  source 1..9: note = Seed: LVVVGARGV (KRAS G12R)
WVVWGRRGY

SEQ ID NO: 32113 - protein, 9 aa, synthetic construct
  source 1..9: note = Seed: LVVVGARGV (KRAS G12R)
WVVWGSRGL

SEQ ID NO: 32114 - protein, 9 aa, synthetic construct
  source 1..9: note = Seed: LVVVGARGV (KRAS G12R)
WVVWGSRGR

SEQ ID NO: 32115 - protein, 9 aa, synthetic construct
  source 1..9: note = Seed: LVVVGARGV (KRAS G12R)
WVVWGSRGV

SEQ ID NO: 32116 - protein, 9 aa, synthetic construct
  source 1..9: note = Seed: LVVVGARGV (KRAS G12R)
WVVWGTRGR

SEQ ID NO: 32117 - protein, 9 aa, synthetic construct
  source 1..9: note = Seed: LVVVGARGV (KRAS G12R)
WVVWGVRGK

SEQ ID NO: 32118 - protein, 9 aa, synthetic construct
  source 1..9: note = Seed: LVVVGARGV (KRAS G12R)
WVVWGVRGR

SEQ ID NO: 32119 - protein, 9 aa, synthetic construct
  source 1..9: note = Seed: LVVVGARGV (KRAS G12R)
WVVYGARGL

SEQ ID NO: 32120 - protein, 9 aa, synthetic construct
  source 1..9: note = Seed: LVVVGARGV (KRAS G12R)
WVVYGARGR

SEQ ID NO: 32121 - protein, 9 aa, synthetic construct
  source 1..9: note = Seed: LVVVGARGV (KRAS G12R)
WVVYGHRGR

SEQ ID NO: 32122 - protein, 9 aa, synthetic construct
  source 1..9: note = Seed: LVVVGARGV (KRAS G12R)
WVVYGHRGY

SEQ ID NO: 32123 - protein, 9 aa, synthetic construct
  source 1..9: note = Seed: LVVVGARGV (KRAS G12R)
WVVYGIRGR

SEQ ID NO: 32124 - protein, 9 aa, synthetic construct
  source 1..9: note = Seed: LVVVGARGV (KRAS G12R)
WVVYGKRGA

SEQ ID NO: 32125 - protein, 9 aa, synthetic construct
  source 1..9: note = Seed: LVVVGARGV (KRAS G12R)
WVVYGKRGF

SEQ ID NO: 32126 - protein, 9 aa, synthetic construct
  source 1..9: note = Seed: LVVVGARGV (KRAS G12R)
WVVYGKRGH

SEQ ID NO: 32127 - protein, 9 aa, synthetic construct
  source 1..9: note = Seed: LVVVGARGV (KRAS G12R)
WVVYGKRGI

SEQ ID NO: 32128 - protein, 9 aa, synthetic construct
  source 1..9: note = Seed: LVVVGARGV (KRAS G12R)
WVVYGKRGK

SEQ ID NO: 32129 - protein, 9 aa, synthetic construct
  source 1..9: note = Seed: LVVVGARGV (KRAS G12R)
WVVYGKRGL

SEQ ID NO: 32130 - protein, 9 aa, synthetic construct
  source 1..9: note = Seed: LVVVGARGV (KRAS G12R)
WVVYGKRGM

SEQ ID NO: 32131 - protein, 9 aa, synthetic construct
  source 1..9: note = Seed: LVVVGARGV (KRAS G12R)
WVVYGKRGR

SEQ ID NO: 32132 - protein, 9 aa, synthetic construct
  source 1..9: note = Seed: LVVVGARGV (KRAS G12R)
WVVYGKRGV

SEQ ID NO: 32133 - protein, 9 aa, synthetic construct
  source 1..9: note = Seed: LVVVGARGV (KRAS G12R)
WVVYGKRGY

SEQ ID NO: 32134 - protein, 9 aa, synthetic construct
  source 1..9: note = Seed: LVVVGARGV (KRAS G12R)
WVVYGLRGR

SEQ ID NO: 32135 - protein, 9 aa, synthetic construct
  source 1..9: note = Seed: LVVVGARGV (KRAS G12R)
WVVYGNRGI

SEQ ID NO: 32136 - protein, 9 aa, synthetic construct
  source 1..9: note = Seed: LVVVGARGV (KRAS G12R)
WVVYGNRGL

SEQ ID NO: 32137 - protein, 9 aa, synthetic construct
  source 1..9: note = Seed: LVVVGARGV (KRAS G12R)
WVVYGNRGM

SEQ ID NO: 32138 - protein, 9 aa, synthetic construct
  source 1..9: note = Seed: LVVVGARGV (KRAS G12R)
WVVYGNRGR

SEQ ID NO: 32139 - protein, 9 aa, synthetic construct
  source 1..9: note = Seed: LVVVGARGV (KRAS G12R)
WVVYGNRGV

SEQ ID NO: 32140 - protein, 9 aa, synthetic construct
  source 1..9: note = Seed: LVVVGARGV (KRAS G12R)
WVVYGRRGA

SEQ ID NO: 32141 - protein, 9 aa, synthetic construct
  source 1..9: note = Seed: LVVVGARGV (KRAS G12R)
WVVYGRRGF

SEQ ID NO: 32142 - protein, 9 aa, synthetic construct
  source 1..9: note = Seed: LVVVGARGV (KRAS G12R)
WVVYGRRGH

SEQ ID NO: 32143 - protein, 9 aa, synthetic construct
  source 1..9: note = Seed: LVVVGARGV (KRAS G12R)
WVVYGRRGI

SEQ ID NO: 32144 - protein, 9 aa, synthetic construct
  source 1..9: note = Seed: LVVVGARGV (KRAS G12R)
WVVYGRRGK

SEQ ID NO: 32145 - protein, 9 aa, synthetic construct
  source 1..9: note = Seed: LVVVGARGV (KRAS G12R)
WVVYGRRGL

SEQ ID NO: 32146 - protein, 9 aa, synthetic construct
  source 1..9: note = Seed: LVVVGARGV (KRAS G12R)
WVVYGRRGM

SEQ ID NO: 32147 - protein, 9 aa, synthetic construct
  source 1..9: note = Seed: LVVVGARGV (KRAS G12R)
WVVYGRRGQ

SEQ ID NO: 32148 - protein, 9 aa, synthetic construct
  source 1..9: note = Seed: LVVVGARGV (KRAS G12R)
WVVYGRRGR

SEQ ID NO: 32149 - protein, 9 aa, synthetic construct
  source 1..9: note = Seed: LVVVGARGV (KRAS G12R)
WVVYGRRGS

SEQ ID NO: 32150 - protein, 9 aa, synthetic construct
  source 1..9: note = Seed: LVVVGARGV (KRAS G12R)
WVVYGRRGV

SEQ ID NO: 32151 - protein, 9 aa, synthetic construct
  source 1..9: note = Seed: LVVVGARGV (KRAS G12R)
WVVYGRRGW

SEQ ID NO: 32152 - protein, 9 aa, synthetic construct
  source 1..9: note = Seed: LVVVGARGV (KRAS G12R)
WVVYGRRGY

SEQ ID NO: 32153 - protein, 9 aa, synthetic construct
  source 1..9: note = Seed: LVVVGARGV (KRAS G12R)
WVVYGSRGI

SEQ ID NO: 32154 - protein, 9 aa, synthetic construct
  source 1..9: note = Seed: LVVVGARGV (KRAS G12R)
WVVYGSRGL

SEQ ID NO: 32155 - protein, 9 aa, synthetic construct
  source 1..9: note = Seed: LVVVGARGV (KRAS G12R)
WVVYGSRGM

SEQ ID NO: 32156 - protein, 9 aa, synthetic construct
  source 1..9: note = Seed: LVVVGARGV (KRAS G12R)
WVVYGSRGV

SEQ ID NO: 32157 - protein, 9 aa, synthetic construct
  source 1..9: note = Seed: LVVVGARGV (KRAS G12R)
WVVYGTRGR

SEQ ID NO: 32158 - protein, 9 aa, synthetic construct
  source 1..9: note = Seed: LVVVGARGV (KRAS G12R)
WVVYGVRGR

SEQ ID NO: 32159 - protein, 9 aa, synthetic construct
  source 1..9: note = Seed: LVVVGARGV (KRAS G12R)
YVVAGARGA

SEQ ID NO: 32160 - protein, 9 aa, synthetic construct
  source 1..9: note = Seed: LVVVGARGV (KRAS G12R)
YVVAGARGC

SEQ ID NO: 32161 - protein, 9 aa, synthetic construct
  source 1..9: note = Seed: LVVVGARGV (KRAS G12R)
YVVAGARGD

SEQ ID NO: 32162 - protein, 9 aa, synthetic construct
  source 1..9: note = Seed: LVVVGARGV (KRAS G12R)
YVVAGARGE

SEQ ID NO: 32163 - protein, 9 aa, synthetic construct
  source 1..9: note = Seed: LVVVGARGV (KRAS G12R)
YVVAGARGF

SEQ ID NO: 32164 - protein, 9 aa, synthetic construct
  source 1..9: note = Seed: LVVVGARGV (KRAS G12R)
YVVAGARGG

SEQ ID NO: 32165 - protein, 9 aa, synthetic construct
  source 1..9: note = Seed: LVVVGARGV (KRAS G12R)
YVVAGARGH

SEQ ID NO: 32166 - protein, 9 aa, synthetic construct
  source 1..9: note = Seed: LVVVGARGV (KRAS G12R)
YVVAGARGI

SEQ ID NO: 32167 - protein, 9 aa, synthetic construct
  source 1..9: note = Seed: LVVVGARGV (KRAS G12R)
YVVAGARGK

SEQ ID NO: 32168 - protein, 9 aa, synthetic construct
  source 1..9: note = Seed: LVVVGARGV (KRAS G12R)
YVVAGARGM

SEQ ID NO: 32169 - protein, 9 aa, synthetic construct
  source 1..9: note = Seed: LVVVGARGV (KRAS G12R)
YVVAGARGN

SEQ ID NO: 32170 - protein, 9 aa, synthetic construct
  source 1..9: note = Seed: LVVVGARGV (KRAS G12R)
YVVAGARGP

SEQ ID NO: 32171 - protein, 9 aa, synthetic construct
  source 1..9: note = Seed: LVVVGARGV (KRAS G12R)
YVVAGARGQ

SEQ ID NO: 32172 - protein, 9 aa, synthetic construct
  source 1..9: note = Seed: LVVVGARGV (KRAS G12R)
YVVAGARGR

SEQ ID NO: 32173 - protein, 9 aa, synthetic construct
  source 1..9: note = Seed: LVVVGARGV (KRAS G12R)
YVVAGARGS

SEQ ID NO: 32174 - protein, 9 aa, synthetic construct
  source 1..9: note = Seed: LVVVGARGV (KRAS G12R)
YVVAGARGT

SEQ ID NO: 32175 - protein, 9 aa, synthetic construct
  source 1..9: note = Seed: LVVVGARGV (KRAS G12R)
YVVAGARGV

SEQ ID NO: 32176 - protein, 9 aa, synthetic construct
  source 1..9: note = Seed: LVVVGARGV (KRAS G12R)
YVVAGARGW

SEQ ID NO: 32177 - protein, 9 aa, synthetic construct
  source 1..9: note = Seed: LVVVGARGV (KRAS G12R)
YVVAGARGY

SEQ ID NO: 32178 - protein, 9 aa, synthetic construct
  source 1..9: note = Seed: LVVVGARGV (KRAS G12R)
YVVAGCRGA

SEQ ID NO: 32179 - protein, 9 aa, synthetic construct
  source 1..9: note = Seed: LVVVGARGV (KRAS G12R)
YVVAGCRGF

SEQ ID NO: 32180 - protein, 9 aa, synthetic construct
  source 1..9: note = Seed: LVVVGARGV (KRAS G12R)
YVVAGCRGI

SEQ ID NO: 32181 - protein, 9 aa, synthetic construct
  source 1..9: note = Seed: LVVVGARGV (KRAS G12R)
YVVAGCRGL

SEQ ID NO: 32182 - protein, 9 aa, synthetic construct
  source 1..9: note = Seed: LVVVGARGV (KRAS G12R)
YVVAGCRGM

SEQ ID NO: 32183 - protein, 9 aa, synthetic construct
  source 1..9: note = Seed: LVVVGARGV (KRAS G12R)
YVVAGCRGS

SEQ ID NO: 32184 - protein, 9 aa, synthetic construct
  source 1..9: note = Seed: LVVVGARGV (KRAS G12R)
YVVAGCRGT

SEQ ID NO: 32185 - protein, 9 aa, synthetic construct
  source 1..9: note = Seed: LVVVGARGV (KRAS G12R)
YVVAGCRGV

SEQ ID NO: 32186 - protein, 9 aa, synthetic construct
  source 1..9: note = Seed: LVVVGARGV (KRAS G12R)
YVVAGDRGI

SEQ ID NO: 32187 - protein, 9 aa, synthetic construct
  source 1..9: note = Seed: LVVVGARGV (KRAS G12R)
YVVAGDRGL

SEQ ID NO: 32188 - protein, 9 aa, synthetic construct
  source 1..9: note = Seed: LVVVGARGV (KRAS G12R)
YVVAGDRGV

SEQ ID NO: 32189 - protein, 9 aa, synthetic construct
  source 1..9: note = Seed: LVVVGARGV (KRAS G12R)
YVVAGERGA

SEQ ID NO: 32190 - protein, 9 aa, synthetic construct
  source 1..9: note = Seed: LVVVGARGV (KRAS G12R)
YVVAGERGI

SEQ ID NO: 32191 - protein, 9 aa, synthetic construct
  source 1..9: note = Seed: LVVVGARGV (KRAS G12R)
YVVAGERGL

SEQ ID NO: 32192 - protein, 9 aa, synthetic construct
  source 1..9: note = Seed: LVVVGARGV (KRAS G12R)
YVVAGERGV

SEQ ID NO: 32193 - protein, 9 aa, synthetic construct
  source 1..9: note = Seed: LVVVGARGV (KRAS G12R)
YVVAGFRGA

SEQ ID NO: 32194 - protein, 9 aa, synthetic construct
  source 1..9: note = Seed: LVVVGARGV (KRAS G12R)
YVVAGFRGF

SEQ ID NO: 32195 - protein, 9 aa, synthetic construct
  source 1..9: note = Seed: LVVVGARGV (KRAS G12R)
YVVAGFRGI

SEQ ID NO: 32196 - protein, 9 aa, synthetic construct
  source 1..9: note = Seed: LVVVGARGV (KRAS G12R)
YVVAGFRGL

SEQ ID NO: 32197 - protein, 9 aa, synthetic construct
  source 1..9: note = Seed: LVVVGARGV (KRAS G12R)
YVVAGFRGM

SEQ ID NO: 32198 - protein, 9 aa, synthetic construct
  source 1..9: note = Seed: LVVVGARGV (KRAS G12R)
YVVAGFRGS

SEQ ID NO: 32199 - protein, 9 aa, synthetic construct
  source 1..9: note = Seed: LVVVGARGV (KRAS G12R)
YVVAGFRGV

SEQ ID NO: 32200 - protein, 9 aa, synthetic construct
  source 1..9: note = Seed: LVVVGARGV (KRAS G12R)
YVVAGGRGA

SEQ ID NO: 32201 - protein, 9 aa, synthetic construct
  source 1..9: note = Seed: LVVVGARGV (KRAS G12R)
YVVAGGRGC

SEQ ID NO: 32202 - protein, 9 aa, synthetic construct
  source 1..9: note = Seed: LVVVGARGV (KRAS G12R)
YVVAGGRGF

SEQ ID NO: 32203 - protein, 9 aa, synthetic construct
  source 1..9: note = Seed: LVVVGARGV (KRAS G12R)
YVVAGGRGG

SEQ ID NO: 32204 - protein, 9 aa, synthetic construct
  source 1..9: note = Seed: LVVVGARGV (KRAS G12R)
YVVAGGRGH

SEQ ID NO: 32205 - protein, 9 aa, synthetic construct
  source 1..9: note = Seed: LVVVGARGV (KRAS G12R)
YVVAGGRGI

SEQ ID NO: 32206 - protein, 9 aa, synthetic construct
  source 1..9: note = Seed: LVVVGARGV (KRAS G12R)
YVVAGGRGL

SEQ ID NO: 32207 - protein, 9 aa, synthetic construct
  source 1..9: note = Seed: LVVVGARGV (KRAS G12R)
YVVAGGRGM

SEQ ID NO: 32208 - protein, 9 aa, synthetic construct
  source 1..9: note = Seed: LVVVGARGV (KRAS G12R)
YVVAGGRGN

SEQ ID NO: 32209 - protein, 9 aa, synthetic construct
  source 1..9: note = Seed: LVVVGARGV (KRAS G12R)
YVVAGGRGP

SEQ ID NO: 32210 - protein, 9 aa, synthetic construct
  source 1..9: note = Seed: LVVVGARGV (KRAS G12R)
YVVAGGRGQ

SEQ ID NO: 32211 - protein, 9 aa, synthetic construct
  source 1..9: note = Seed: LVVVGARGV (KRAS G12R)
YVVAGGRGS

SEQ ID NO: 32212 - protein, 9 aa, synthetic construct
  source 1..9: note = Seed: LVVVGARGV (KRAS G12R)
YVVAGGRGT

SEQ ID NO: 32213 - protein, 9 aa, synthetic construct
  source 1..9: note = Seed: LVVVGARGV (KRAS G12R)
YVVAGGRGV

SEQ ID NO: 32214 - protein, 9 aa, synthetic construct
  source 1..9: note = Seed: LVVVGARGV (KRAS G12R)
YVVAGGRGW

SEQ ID NO: 32215 - protein, 9 aa, synthetic construct
  source 1..9: note = Seed: LVVVGARGV (KRAS G12R)
YVVAGGRGY

SEQ ID NO: 32216 - protein, 9 aa, synthetic construct
  source 1..9: note = Seed: LVVVGARGV (KRAS G12R)
YVVAGHRGA

SEQ ID NO: 32217 - protein, 9 aa, synthetic construct
  source 1..9: note = Seed: LVVVGARGV (KRAS G12R)
YVVAGHRGI

SEQ ID NO: 32218 - protein, 9 aa, synthetic construct
  source 1..9: note = Seed: LVVVGARGV (KRAS G12R)
YVVAGHRGL

SEQ ID NO: 32219 - protein, 9 aa, synthetic construct
  source 1..9: note = Seed: LVVVGARGV (KRAS G12R)
YVVAGHRGM

SEQ ID NO: 32220 - protein, 9 aa, synthetic construct
  source 1..9: note = Seed: LVVVGARGV (KRAS G12R)
YVVAGHRGR

SEQ ID NO: 32221 - protein, 9 aa, synthetic construct
  source 1..9: note = Seed: LVVVGARGV (KRAS G12R)
YVVAGHRGV

SEQ ID NO: 32222 - protein, 9 aa, synthetic construct
  source 1..9: note = Seed: LVVVGARGV (KRAS G12R)
YVVAGIRGA

SEQ ID NO: 32223 - protein, 9 aa, synthetic construct
  source 1..9: note = Seed: LVVVGARGV (KRAS G12R)
YVVAGIRGC

SEQ ID NO: 32224 - protein, 9 aa, synthetic construct
  source 1..9: note = Seed: LVVVGARGV (KRAS G12R)
YVVAGIRGD

SEQ ID NO: 32225 - protein, 9 aa, synthetic construct
  source 1..9: note = Seed: LVVVGARGV (KRAS G12R)
YVVAGIRGE

SEQ ID NO: 32226 - protein, 9 aa, synthetic construct
  source 1..9: note = Seed: LVVVGARGV (KRAS G12R)
YVVAGIRGF

SEQ ID NO: 32227 - protein, 9 aa, synthetic construct
  source 1..9: note = Seed: LVVVGARGV (KRAS G12R)
YVVAGIRGG

SEQ ID NO: 32228 - protein, 9 aa, synthetic construct
  source 1..9: note = Seed: LVVVGARGV (KRAS G12R)
YVVAGIRGH

SEQ ID NO: 32229 - protein, 9 aa, synthetic construct
  source 1..9: note = Seed: LVVVGARGV (KRAS G12R)
YVVAGIRGI

SEQ ID NO: 32230 - protein, 9 aa, synthetic construct
  source 1..9: note = Seed: LVVVGARGV (KRAS G12R)
YVVAGIRGL

SEQ ID NO: 32231 - protein, 9 aa, synthetic construct
  source 1..9: note = Seed: LVVVGARGV (KRAS G12R)
YVVAGIRGM

SEQ ID NO: 32232 - protein, 9 aa, synthetic construct
  source 1..9: note = Seed: LVVVGARGV (KRAS G12R)
YVVAGIRGN

SEQ ID NO: 32233 - protein, 9 aa, synthetic construct
  source 1..9: note = Seed: LVVVGARGV (KRAS G12R)
YVVAGIRGP

SEQ ID NO: 32234 - protein, 9 aa, synthetic construct
  source 1..9: note = Seed: LVVVGARGV (KRAS G12R)
YVVAGIRGQ

SEQ ID NO: 32235 - protein, 9 aa, synthetic construct
  source 1..9: note = Seed: LVVVGARGV (KRAS G12R)
YVVAGIRGR

SEQ ID NO: 32236 - protein, 9 aa, synthetic construct
  source 1..9: note = Seed: LVVVGARGV (KRAS G12R)
YVVAGIRGS

SEQ ID NO: 32237 - protein, 9 aa, synthetic construct
  source 1..9: note = Seed: LVVVGARGV (KRAS G12R)
YVVAGIRGT

SEQ ID NO: 32238 - protein, 9 aa, synthetic construct
  source 1..9: note = Seed: LVVVGARGV (KRAS G12R)
YVVAGIRGV

SEQ ID NO: 32239 - protein, 9 aa, synthetic construct
  source 1..9: note = Seed: LVVVGARGV (KRAS G12R)
YVVAGIRGW

SEQ ID NO: 32240 - protein, 9 aa, synthetic construct
  source 1..9: note = Seed: LVVVGARGV (KRAS G12R)
YVVAGIRGY

SEQ ID NO: 32241 - protein, 9 aa, synthetic construct
  source 1..9: note = Seed: LVVVGARGV (KRAS G12R)
YVVAGKRGA

SEQ ID NO: 32242 - protein, 9 aa, synthetic construct
  source 1..9: note = Seed: LVVVGARGV (KRAS G12R)
YVVAGKRGF

SEQ ID NO: 32243 - protein, 9 aa, synthetic construct
  source 1..9: note = Seed: LVVVGARGV (KRAS G12R)
YVVAGKRGH

SEQ ID NO: 32244 - protein, 9 aa, synthetic construct
  source 1..9: note = Seed: LVVVGARGV (KRAS G12R)
YVVAGKRGI

SEQ ID NO: 32245 - protein, 9 aa, synthetic construct
  source 1..9: note = Seed: LVVVGARGV (KRAS G12R)
YVVAGKRGL

SEQ ID NO: 32246 - protein, 9 aa, synthetic construct
  source 1..9: note = Seed: LVVVGARGV (KRAS G12R)
YVVAGKRGM

SEQ ID NO: 32247 - protein, 9 aa, synthetic construct
  source 1..9: note = Seed: LVVVGARGV (KRAS G12R)
YVVAGKRGQ

SEQ ID NO: 32248 - protein, 9 aa, synthetic construct
  source 1..9: note = Seed: LVVVGARGV (KRAS G12R)
YVVAGKRGR

SEQ ID NO: 32249 - protein, 9 aa, synthetic construct
  source 1..9: note = Seed: LVVVGARGV (KRAS G12R)
YVVAGKRGS

SEQ ID NO: 32250 - protein, 9 aa, synthetic construct
  source 1..9: note = Seed: LVVVGARGV (KRAS G12R)
YVVAGKRGT

SEQ ID NO: 32251 - protein, 9 aa, synthetic construct
  source 1..9: note = Seed: LVVVGARGV (KRAS G12R)
YVVAGKRGV

SEQ ID NO: 32252 - protein, 9 aa, synthetic construct
  source 1..9: note = Seed: LVVVGARGV (KRAS G12R)
YVVAGKRGW

SEQ ID NO: 32253 - protein, 9 aa, synthetic construct
  source 1..9: note = Seed: LVVVGARGV (KRAS G12R)
YVVAGKRGY

SEQ ID NO: 32254 - protein, 9 aa, synthetic construct
  source 1..9: note = Seed: LVVVGARGV (KRAS G12R)
YVVAGLRGA

SEQ ID NO: 32255 - protein, 9 aa, synthetic construct
  source 1..9: note = Seed: LVVVGARGV (KRAS G12R)
YVVAGLRGC

SEQ ID NO: 32256 - protein, 9 aa, synthetic construct
  source 1..9: note = Seed: LVVVGARGV (KRAS G12R)
YVVAGLRGF

SEQ ID NO: 32257 - protein, 9 aa, synthetic construct
  source 1..9: note = Seed: LVVVGARGV (KRAS G12R)
YVVAGLRGI

SEQ ID NO: 32258 - protein, 9 aa, synthetic construct
  source 1..9: note = Seed: LVVVGARGV (KRAS G12R)
YVVAGLRGL

SEQ ID NO: 32259 - protein, 9 aa, synthetic construct
  source 1..9: note = Seed: LVVVGARGV (KRAS G12R)
YVVAGLRGM

SEQ ID NO: 32260 - protein, 9 aa, synthetic construct
  source 1..9: note = Seed: LVVVGARGV (KRAS G12R)
YVVAGLRGN

SEQ ID NO: 32261 - protein, 9 aa, synthetic construct
  source 1..9: note = Seed: LVVVGARGV (KRAS G12R)
YVVAGLRGQ

SEQ ID NO: 32262 - protein, 9 aa, synthetic construct
  source 1..9: note = Seed: LVVVGARGV (KRAS G12R)
YVVAGLRGS

SEQ ID NO: 32263 - protein, 9 aa, synthetic construct
  source 1..9: note = Seed: LVVVGARGV (KRAS G12R)
YVVAGLRGT

SEQ ID NO: 32264 - protein, 9 aa, synthetic construct
  source 1..9: note = Seed: LVVVGARGV (KRAS G12R)
YVVAGLRGV

SEQ ID NO: 32265 - protein, 9 aa, synthetic construct
  source 1..9: note = Seed: LVVVGARGV (KRAS G12R)
YVVAGLRGY

SEQ ID NO: 32266 - protein, 9 aa, synthetic construct
  source 1..9: note = Seed: LVVVGARGV (KRAS G12R)
YVVAGMRGA

SEQ ID NO: 32267 - protein, 9 aa, synthetic construct
  source 1..9: note = Seed: LVVVGARGV (KRAS G12R)
YVVAGMRGC

SEQ ID NO: 32268 - protein, 9 aa, synthetic construct
  source 1..9: note = Seed: LVVVGARGV (KRAS G12R)
YVVAGMRGF

SEQ ID NO: 32269 - protein, 9 aa, synthetic construct
  source 1..9: note = Seed: LVVVGARGV (KRAS G12R)
YVVAGMRGH

SEQ ID NO: 32270 - protein, 9 aa, synthetic construct
  source 1..9: note = Seed: LVVVGARGV (KRAS G12R)
YVVAGMRGI

SEQ ID NO: 32271 - protein, 9 aa, synthetic construct
  source 1..9: note = Seed: LVVVGARGV (KRAS G12R)
YVVAGMRGL

SEQ ID NO: 32272 - protein, 9 aa, synthetic construct
  source 1..9: note = Seed: LVVVGARGV (KRAS G12R)
YVVAGMRGM

SEQ ID NO: 32273 - protein, 9 aa, synthetic construct
  source 1..9: note = Seed: LVVVGARGV (KRAS G12R)
YVVAGMRGN

SEQ ID NO: 32274 - protein, 9 aa, synthetic construct
  source 1..9: note = Seed: LVVVGARGV (KRAS G12R)
YVVAGMRGQ

SEQ ID NO: 32275 - protein, 9 aa, synthetic construct
  source 1..9: note = Seed: LVVVGARGV (KRAS G12R)
YVVAGMRGR

SEQ ID NO: 32276 - protein, 9 aa, synthetic construct
  source 1..9: note = Seed: LVVVGARGV (KRAS G12R)
YVVAGMRGS

SEQ ID NO: 32277 - protein, 9 aa, synthetic construct
  source 1..9: note = Seed: LVVVGARGV (KRAS G12R)
YVVAGMRGT

SEQ ID NO: 32278 - protein, 9 aa, synthetic construct
  source 1..9: note = Seed: LVVVGARGV (KRAS G12R)
YVVAGMRGV

SEQ ID NO: 32279 - protein, 9 aa, synthetic construct
  source 1..9: note = Seed: LVVVGARGV (KRAS G12R)
YVVAGMRGW

SEQ ID NO: 32280 - protein, 9 aa, synthetic construct
  source 1..9: note = Seed: LVVVGARGV (KRAS G12R)
YVVAGMRGY

SEQ ID NO: 32281 - protein, 9 aa, synthetic construct
  source 1..9: note = Seed: LVVVGARGV (KRAS G12R)
YVVAGNRGA

SEQ ID NO: 32282 - protein, 9 aa, synthetic construct
  source 1..9: note = Seed: LVVVGARGV (KRAS G12R)
YVVAGNRGC

SEQ ID NO: 32283 - protein, 9 aa, synthetic construct
  source 1..9: note = Seed: LVVVGARGV (KRAS G12R)
YVVAGNRGF

SEQ ID NO: 32284 - protein, 9 aa, synthetic construct
  source 1..9: note = Seed: LVVVGARGV (KRAS G12R)
YVVAGNRGG

SEQ ID NO: 32285 - protein, 9 aa, synthetic construct
  source 1..9: note = Seed: LVVVGARGV (KRAS G12R)
YVVAGNRGH

SEQ ID NO: 32286 - protein, 9 aa, synthetic construct
  source 1..9: note = Seed: LVVVGARGV (KRAS G12R)
YVVAGNRGI

SEQ ID NO: 32287 - protein, 9 aa, synthetic construct
  source 1..9: note = Seed: LVVVGARGV (KRAS G12R)
YVVAGNRGL

SEQ ID NO: 32288 - protein, 9 aa, synthetic construct
  source 1..9: note = Seed: LVVVGARGV (KRAS G12R)
YVVAGNRGM

SEQ ID NO: 32289 - protein, 9 aa, synthetic construct
  source 1..9: note = Seed: LVVVGARGV (KRAS G12R)
YVVAGNRGN

SEQ ID NO: 32290 - protein, 9 aa, synthetic construct
  source 1..9: note = Seed: LVVVGARGV (KRAS G12R)
YVVAGNRGP

SEQ ID NO: 32291 - protein, 9 aa, synthetic construct
  source 1..9: note = Seed: LVVVGARGV (KRAS G12R)
YVVAGNRGQ

SEQ ID NO: 32292 - protein, 9 aa, synthetic construct
  source 1..9: note = Seed: LVVVGARGV (KRAS G12R)
YVVAGNRGR

SEQ ID NO: 32293 - protein, 9 aa, synthetic construct
  source 1..9: note = Seed: LVVVGARGV (KRAS G12R)
YVVAGNRGS

SEQ ID NO: 32294 - protein, 9 aa, synthetic construct
  source 1..9: note = Seed: LVVVGARGV (KRAS G12R)
YVVAGNRGT

SEQ ID NO: 32295 - protein, 9 aa, synthetic construct
  source 1..9: note = Seed: LVVVGARGV (KRAS G12R)
YVVAGNRGV

SEQ ID NO: 32296 - protein, 9 aa, synthetic construct
  source 1..9: note = Seed: LVVVGARGV (KRAS G12R)
YVVAGNRGW

SEQ ID NO: 32297 - protein, 9 aa, synthetic construct
  source 1..9: note = Seed: LVVVGARGV (KRAS G12R)
YVVAGNRGY

SEQ ID NO: 32298 - protein, 9 aa, synthetic construct
  source 1..9: note = Seed: LVVVGARGV (KRAS G12R)
YVVAGPRGA

SEQ ID NO: 32299 - protein, 9 aa, synthetic construct
  source 1..9: note = Seed: LVVVGARGV (KRAS G12R)
YVVAGPRGC

SEQ ID NO: 32300 - protein, 9 aa, synthetic construct
  source 1..9: note = Seed: LVVVGARGV (KRAS G12R)
YVVAGPRGF

SEQ ID NO: 32301 - protein, 9 aa, synthetic construct
  source 1..9: note = Seed: LVVVGARGV (KRAS G12R)
YVVAGPRGG

SEQ ID NO: 32302 - protein, 9 aa, synthetic construct
  source 1..9: note = Seed: LVVVGARGV (KRAS G12R)
YVVAGPRGH

SEQ ID NO: 32303 - protein, 9 aa, synthetic construct
  source 1..9: note = Seed: LVVVGARGV (KRAS G12R)
YVVAGPRGI

SEQ ID NO: 32304 - protein, 9 aa, synthetic construct
  source 1..9: note = Seed: LVVVGARGV (KRAS G12R)
YVVAGPRGL

SEQ ID NO: 32305 - protein, 9 aa, synthetic construct
  source 1..9: note = Seed: LVVVGARGV (KRAS G12R)
YVVAGPRGM

SEQ ID NO: 32306 - protein, 9 aa, synthetic construct
  source 1..9: note = Seed: LVVVGARGV (KRAS G12R)
YVVAGPRGN

SEQ ID NO: 32307 - protein, 9 aa, synthetic construct
  source 1..9: note = Seed: LVVVGARGV (KRAS G12R)
YVVAGPRGP

SEQ ID NO: 32308 - protein, 9 aa, synthetic construct
  source 1..9: note = Seed: LVVVGARGV (KRAS G12R)
YVVAGPRGQ

SEQ ID NO: 32309 - protein, 9 aa, synthetic construct
  source 1..9: note = Seed: LVVVGARGV (KRAS G12R)
YVVAGPRGR

SEQ ID NO: 32310 - protein, 9 aa, synthetic construct
  source 1..9: note = Seed: LVVVGARGV (KRAS G12R)
YVVAGPRGS

SEQ ID NO: 32311 - protein, 9 aa, synthetic construct
  source 1..9: note = Seed: LVVVGARGV (KRAS G12R)
YVVAGPRGT

SEQ ID NO: 32312 - protein, 9 aa, synthetic construct
  source 1..9: note = Seed: LVVVGARGV (KRAS G12R)
YVVAGPRGV

SEQ ID NO: 32313 - protein, 9 aa, synthetic construct
  source 1..9: note = Seed: LVVVGARGV (KRAS G12R)
YVVAGPRGW

SEQ ID NO: 32314 - protein, 9 aa, synthetic construct
  source 1..9: note = Seed: LVVVGARGV (KRAS G12R)
YVVAGPRGY

SEQ ID NO: 32315 - protein, 9 aa, synthetic construct
  source 1..9: note = Seed: LVVVGARGV (KRAS G12R)
YVVAGQRGA

SEQ ID NO: 32316 - protein, 9 aa, synthetic construct
  source 1..9: note = Seed: LVVVGARGV (KRAS G12R)
YVVAGQRGI

SEQ ID NO: 32317 - protein, 9 aa, synthetic construct
  source 1..9: note = Seed: LVVVGARGV (KRAS G12R)
YVVAGQRGL

SEQ ID NO: 32318 - protein, 9 aa, synthetic construct
  source 1..9: note = Seed: LVVVGARGV (KRAS G12R)
YVVAGQRGM

SEQ ID NO: 32319 - protein, 9 aa, synthetic construct
  source 1..9: note = Seed: LVVVGARGV (KRAS G12R)
YVVAGQRGV

SEQ ID NO: 32320 - protein, 9 aa, synthetic construct
  source 1..9: note = Seed: LVVVGARGV (KRAS G12R)
YVVAGRRGA

SEQ ID NO: 32321 - protein, 9 aa, synthetic construct
  source 1..9: note = Seed: LVVVGARGV (KRAS G12R)
YVVAGRRGF

SEQ ID NO: 32322 - protein, 9 aa, synthetic construct
  source 1..9: note = Seed: LVVVGARGV (KRAS G12R)
YVVAGRRGG

SEQ ID NO: 32323 - protein, 9 aa, synthetic construct
  source 1..9: note = Seed: LVVVGARGV (KRAS G12R)
YVVAGRRGH

SEQ ID NO: 32324 - protein, 9 aa, synthetic construct
  source 1..9: note = Seed: LVVVGARGV (KRAS G12R)
YVVAGRRGI

SEQ ID NO: 32325 - protein, 9 aa, synthetic construct
  source 1..9: note = Seed: LVVVGARGV (KRAS G12R)
YVVAGRRGK

SEQ ID NO: 32326 - protein, 9 aa, synthetic construct
  source 1..9: note = Seed: LVVVGARGV (KRAS G12R)
YVVAGRRGL

SEQ ID NO: 32327 - protein, 9 aa, synthetic construct
  source 1..9: note = Seed: LVVVGARGV (KRAS G12R)
YVVAGRRGM

SEQ ID NO: 32328 - protein, 9 aa, synthetic construct
  source 1..9: note = Seed: LVVVGARGV (KRAS G12R)
YVVAGRRGN

SEQ ID NO: 32329 - protein, 9 aa, synthetic construct
  source 1..9: note = Seed: LVVVGARGV (KRAS G12R)
YVVAGRRGP

SEQ ID NO: 32330 - protein, 9 aa, synthetic construct
  source 1..9: note = Seed: LVVVGARGV (KRAS G12R)
YVVAGRRGQ

SEQ ID NO: 32331 - protein, 9 aa, synthetic construct
  source 1..9: note = Seed: LVVVGARGV (KRAS G12R)
YVVAGRRGR

SEQ ID NO: 32332 - protein, 9 aa, synthetic construct
  source 1..9: note = Seed: LVVVGARGV (KRAS G12R)
YVVAGRRGS

SEQ ID NO: 32333 - protein, 9 aa, synthetic construct
  source 1..9: note = Seed: LVVVGARGV (KRAS G12R)
YVVAGRRGT

SEQ ID NO: 32334 - protein, 9 aa, synthetic construct
  source 1..9: note = Seed: LVVVGARGV (KRAS G12R)
YVVAGRRGV

SEQ ID NO: 32335 - protein, 9 aa, synthetic construct
  source 1..9: note = Seed: LVVVGARGV (KRAS G12R)
YVVAGRRGW

SEQ ID NO: 32336 - protein, 9 aa, synthetic construct
  source 1..9: note = Seed: LVVVGARGV (KRAS G12R)
YVVAGRRGY

SEQ ID NO: 32337 - protein, 9 aa, synthetic construct
  source 1..9: note = Seed: LVVVGARGV (KRAS G12R)
YVVAGSRGA

SEQ ID NO: 32338 - protein, 9 aa, synthetic construct
  source 1..9: note = Seed: LVVVGARGV (KRAS G12R)
YVVAGSRGC

SEQ ID NO: 32339 - protein, 9 aa, synthetic construct
  source 1..9: note = Seed: LVVVGARGV (KRAS G12R)
YVVAGSRGE

SEQ ID NO: 32340 - protein, 9 aa, synthetic construct
  source 1..9: note = Seed: LVVVGARGV (KRAS G12R)
YVVAGSRGF

SEQ ID NO: 32341 - protein, 9 aa, synthetic construct
  source 1..9: note = Seed: LVVVGARGV (KRAS G12R)
YVVAGSRGG

SEQ ID NO: 32342 - protein, 9 aa, synthetic construct
  source 1..9: note = Seed: LVVVGARGV (KRAS G12R)
YVVAGSRGH

SEQ ID NO: 32343 - protein, 9 aa, synthetic construct
  source 1..9: note = Seed: LVVVGARGV (KRAS G12R)
YVVAGSRGI

SEQ ID NO: 32344 - protein, 9 aa, synthetic construct
  source 1..9: note = Seed: LVVVGARGV (KRAS G12R)
YVVAGSRGK

SEQ ID NO: 32345 - protein, 9 aa, synthetic construct
  source 1..9: note = Seed: LVVVGARGV (KRAS G12R)
YVVAGSRGL

SEQ ID NO: 32346 - protein, 9 aa, synthetic construct
  source 1..9: note = Seed: LVVVGARGV (KRAS G12R)
YVVAGSRGM

SEQ ID NO: 32347 - protein, 9 aa, synthetic construct
  source 1..9: note = Seed: LVVVGARGV (KRAS G12R)
YVVAGSRGN

SEQ ID NO: 32348 - protein, 9 aa, synthetic construct
  source 1..9: note = Seed: LVVVGARGV (KRAS G12R)
YVVAGSRGP

SEQ ID NO: 32349 - protein, 9 aa, synthetic construct
  source 1..9: note = Seed: LVVVGARGV (KRAS G12R)
YVVAGSRGQ

SEQ ID NO: 32350 - protein, 9 aa, synthetic construct
  source 1..9: note = Seed: LVVVGARGV (KRAS G12R)
YVVAGSRGR

SEQ ID NO: 32351 - protein, 9 aa, synthetic construct
  source 1..9: note = Seed: LVVVGARGV (KRAS G12R)
YVVAGSRGS

SEQ ID NO: 32352 - protein, 9 aa, synthetic construct
  source 1..9: note = Seed: LVVVGARGV (KRAS G12R)
YVVAGSRGT

SEQ ID NO: 32353 - protein, 9 aa, synthetic construct
  source 1..9: note = Seed: LVVVGARGV (KRAS G12R)
YVVAGSRGV

SEQ ID NO: 32354 - protein, 9 aa, synthetic construct
  source 1..9: note = Seed: LVVVGARGV (KRAS G12R)
YVVAGSRGW

SEQ ID NO: 32355 - protein, 9 aa, synthetic construct
  source 1..9: note = Seed: LVVVGARGV (KRAS G12R)
YVVAGSRGY

SEQ ID NO: 32356 - protein, 9 aa, synthetic construct
  source 1..9: note = Seed: LVVVGARGV (KRAS G12R)
YVVAGTRGA

SEQ ID NO: 32357 - protein, 9 aa, synthetic construct
  source 1..9: note = Seed: LVVVGARGV (KRAS G12R)
YVVAGTRGC

SEQ ID NO: 32358 - protein, 9 aa, synthetic construct
  source 1..9: note = Seed: LVVVGARGV (KRAS G12R)
YVVAGTRGF

SEQ ID NO: 32359 - protein, 9 aa, synthetic construct
  source 1..9: note = Seed: LVVVGARGV (KRAS G12R)
YVVAGTRGG

SEQ ID NO: 32360 - protein, 9 aa, synthetic construct
  source 1..9: note = Seed: LVVVGARGV (KRAS G12R)
YVVAGTRGH

SEQ ID NO: 32361 - protein, 9 aa, synthetic construct
  source 1..9: note = Seed: LVVVGARGV (KRAS G12R)
YVVAGTRGI

SEQ ID NO: 32362 - protein, 9 aa, synthetic construct
  source 1..9: note = Seed: LVVVGARGV (KRAS G12R)
YVVAGTRGL

SEQ ID NO: 32363 - protein, 9 aa, synthetic construct
  source 1..9: note = Seed: LVVVGARGV (KRAS G12R)
YVVAGTRGM

SEQ ID NO: 32364 - protein, 9 aa, synthetic construct
  source 1..9: note = Seed: LVVVGARGV (KRAS G12R)
YVVAGTRGN

SEQ ID NO: 32365 - protein, 9 aa, synthetic construct
  source 1..9: note = Seed: LVVVGARGV (KRAS G12R)
YVVAGTRGP

SEQ ID NO: 32366 - protein, 9 aa, synthetic construct
  source 1..9: note = Seed: LVVVGARGV (KRAS G12R)
YVVAGTRGQ

SEQ ID NO: 32367 - protein, 9 aa, synthetic construct
  source 1..9: note = Seed: LVVVGARGV (KRAS G12R)
YVVAGTRGS

SEQ ID NO: 32368 - protein, 9 aa, synthetic construct
  source 1..9: note = Seed: LVVVGARGV (KRAS G12R)
YVVAGTRGT

SEQ ID NO: 32369 - protein, 9 aa, synthetic construct
  source 1..9: note = Seed: LVVVGARGV (KRAS G12R)
YVVAGTRGV

SEQ ID NO: 32370 - protein, 9 aa, synthetic construct
  source 1..9: note = Seed: LVVVGARGV (KRAS G12R)
YVVAGTRGW

SEQ ID NO: 32371 - protein, 9 aa, synthetic construct
  source 1..9: note = Seed: LVVVGARGV (KRAS G12R)
YVVAGTRGY

SEQ ID NO: 32372 - protein, 9 aa, synthetic construct
  source 1..9: note = Seed: LVVVGARGV (KRAS G12R)
YVVAGVRGA

SEQ ID NO: 32373 - protein, 9 aa, synthetic construct
  source 1..9: note = Seed: LVVVGARGV (KRAS G12R)
YVVAGVRGC

SEQ ID NO: 32374 - protein, 9 aa, synthetic construct
  source 1..9: note = Seed: LVVVGARGV (KRAS G12R)
YVVAGVRGD

SEQ ID NO: 32375 - protein, 9 aa, synthetic construct
  source 1..9: note = Seed: LVVVGARGV (KRAS G12R)
YVVAGVRGE

SEQ ID NO: 32376 - protein, 9 aa, synthetic construct
  source 1..9: note = Seed: LVVVGARGV (KRAS G12R)
YVVAGVRGF

SEQ ID NO: 32377 - protein, 9 aa, synthetic construct
  source 1..9: note = Seed: LVVVGARGV (KRAS G12R)
YVVAGVRGG

SEQ ID NO: 32378 - protein, 9 aa, synthetic construct
  source 1..9: note = Seed: LVVVGARGV (KRAS G12R)
YVVAGVRGH

SEQ ID NO: 32379 - protein, 9 aa, synthetic construct
  source 1..9: note = Seed: LVVVGARGV (KRAS G12R)
YVVAGVRGI

SEQ ID NO: 32380 - protein, 9 aa, synthetic construct
  source 1..9: note = Seed: LVVVGARGV (KRAS G12R)
YVVAGVRGK

SEQ ID NO: 32381 - protein, 9 aa, synthetic construct
  source 1..9: note = Seed: LVVVGARGV (KRAS G12R)
YVVAGVRGL

SEQ ID NO: 32382 - protein, 9 aa, synthetic construct
  source 1..9: note = Seed: LVVVGARGV (KRAS G12R)
YVVAGVRGM

SEQ ID NO: 32383 - protein, 9 aa, synthetic construct
  source 1..9: note = Seed: LVVVGARGV (KRAS G12R)
YVVAGVRGN

SEQ ID NO: 32384 - protein, 9 aa, synthetic construct
  source 1..9: note = Seed: LVVVGARGV (KRAS G12R)
YVVAGVRGP

SEQ ID NO: 32385 - protein, 9 aa, synthetic construct
  source 1..9: note = Seed: LVVVGARGV (KRAS G12R)
YVVAGVRGQ

SEQ ID NO: 32386 - protein, 9 aa, synthetic construct
  source 1..9: note = Seed: LVVVGARGV (KRAS G12R)
YVVAGVRGR

SEQ ID NO: 32387 - protein, 9 aa, synthetic construct
  source 1..9: note = Seed: LVVVGARGV (KRAS G12R)
YVVAGVRGS

SEQ ID NO: 32388 - protein, 9 aa, synthetic construct
  source 1..9: note = Seed: LVVVGARGV (KRAS G12R)
YVVAGVRGT

SEQ ID NO: 32389 - protein, 9 aa, synthetic construct
  source 1..9: note = Seed: LVVVGARGV (KRAS G12R)
YVVAGVRGV

SEQ ID NO: 32390 - protein, 9 aa, synthetic construct
  source 1..9: note = Seed: LVVVGARGV (KRAS G12R)
YVVAGVRGW

SEQ ID NO: 32391 - protein, 9 aa, synthetic construct
  source 1..9: note = Seed: LVVVGARGV (KRAS G12R)
YVVAGVRGY

SEQ ID NO: 32392 - protein, 9 aa, synthetic construct
  source 1..9: note = Seed: LVVVGARGV (KRAS G12R)
YVVAGWRGA

SEQ ID NO: 32393 - protein, 9 aa, synthetic construct
  source 1..9: note = Seed: LVVVGARGV (KRAS G12R)
YVVAGWRGI

SEQ ID NO: 32394 - protein, 9 aa, synthetic construct
  source 1..9: note = Seed: LVVVGARGV (KRAS G12R)
YVVAGWRGL

SEQ ID NO: 32395 - protein, 9 aa, synthetic construct
  source 1..9: note = Seed: LVVVGARGV (KRAS G12R)
YVVAGWRGM

SEQ ID NO: 32396 - protein, 9 aa, synthetic construct
  source 1..9: note = Seed: LVVVGARGV (KRAS G12R)
YVVAGWRGV

SEQ ID NO: 32397 - protein, 9 aa, synthetic construct
  source 1..9: note = Seed: LVVVGARGV (KRAS G12R)
YVVAGYRGA

SEQ ID NO: 32398 - protein, 9 aa, synthetic construct
  source 1..9: note = Seed: LVVVGARGV (KRAS G12R)
YVVAGYRGI

SEQ ID NO: 32399 - protein, 9 aa, synthetic construct
  source 1..9: note = Seed: LVVVGARGV (KRAS G12R)
YVVAGYRGL

SEQ ID NO: 32400 - protein, 9 aa, synthetic construct
  source 1..9: note = Seed: LVVVGARGV (KRAS G12R)
YVVAGYRGM

SEQ ID NO: 32401 - protein, 9 aa, synthetic construct
  source 1..9: note = Seed: LVVVGARGV (KRAS G12R)
YVVAGYRGV

SEQ ID NO: 32402 - protein, 9 aa, synthetic construct
  source 1..9: note = Seed: LVVVGARGV (KRAS G12R)
YVVCGARGA

SEQ ID NO: 32403 - protein, 9 aa, synthetic construct
  source 1..9: note = Seed: LVVVGARGV (KRAS G12R)
YVVCGARGF

SEQ ID NO: 32404 - protein, 9 aa, synthetic construct
  source 1..9: note = Seed: LVVVGARGV (KRAS G12R)
YVVCGARGI

SEQ ID NO: 32405 - protein, 9 aa, synthetic construct
  source 1..9: note = Seed: LVVVGARGV (KRAS G12R)
YVVCGARGL

SEQ ID NO: 32406 - protein, 9 aa, synthetic construct
  source 1..9: note = Seed: LVVVGARGV (KRAS G12R)
YVVCGARGM

SEQ ID NO: 32407 - protein, 9 aa, synthetic construct
  source 1..9: note = Seed: LVVVGARGV (KRAS G12R)
YVVCGARGS

SEQ ID NO: 32408 - protein, 9 aa, synthetic construct
  source 1..9: note = Seed: LVVVGARGV (KRAS G12R)
YVVCGARGT

SEQ ID NO: 32409 - protein, 9 aa, synthetic construct
  source 1..9: note = Seed: LVVVGARGV (KRAS G12R)
YVVCGARGV

SEQ ID NO: 32410 - protein, 9 aa, synthetic construct
  source 1..9: note = Seed: LVVVGARGV (KRAS G12R)
YVVCGGRGA

SEQ ID NO: 32411 - protein, 9 aa, synthetic construct
  source 1..9: note = Seed: LVVVGARGV (KRAS G12R)
YVVCGGRGI

SEQ ID NO: 32412 - protein, 9 aa, synthetic construct
  source 1..9: note = Seed: LVVVGARGV (KRAS G12R)
YVVCGGRGL

SEQ ID NO: 32413 - protein, 9 aa, synthetic construct
  source 1..9: note = Seed: LVVVGARGV (KRAS G12R)
YVVCGGRGM

SEQ ID NO: 32414 - protein, 9 aa, synthetic construct
  source 1..9: note = Seed: LVVVGARGV (KRAS G12R)
YVVCGGRGV

SEQ ID NO: 32415 - protein, 9 aa, synthetic construct
  source 1..9: note = Seed: LVVVGARGV (KRAS G12R)
YVVCGNRGI

SEQ ID NO: 32416 - protein, 9 aa, synthetic construct
  source 1..9: note = Seed: LVVVGARGV (KRAS G12R)
YVVCGNRGL

SEQ ID NO: 32417 - protein, 9 aa, synthetic construct
  source 1..9: note = Seed: LVVVGARGV (KRAS G12R)
YVVCGNRGV

SEQ ID NO: 32418 - protein, 9 aa, synthetic construct
  source 1..9: note = Seed: LVVVGARGV (KRAS G12R)
YVVCGPRGA

SEQ ID NO: 32419 - protein, 9 aa, synthetic construct
  source 1..9: note = Seed: LVVVGARGV (KRAS G12R)
YVVCGPRGI

SEQ ID NO: 32420 - protein, 9 aa, synthetic construct
  source 1..9: note = Seed: LVVVGARGV (KRAS G12R)
YVVCGPRGL

SEQ ID NO: 32421 - protein, 9 aa, synthetic construct
  source 1..9: note = Seed: LVVVGARGV (KRAS G12R)
YVVCGPRGM

SEQ ID NO: 32422 - protein, 9 aa, synthetic construct
  source 1..9: note = Seed: LVVVGARGV (KRAS G12R)
YVVCGPRGV

SEQ ID NO: 32423 - protein, 9 aa, synthetic construct
  source 1..9: note = Seed: LVVVGARGV (KRAS G12R)
YVVCGSRGA

SEQ ID NO: 32424 - protein, 9 aa, synthetic construct
  source 1..9: note = Seed: LVVVGARGV (KRAS G12R)
YVVCGSRGI

SEQ ID NO: 32425 - protein, 9 aa, synthetic construct
  source 1..9: note = Seed: LVVVGARGV (KRAS G12R)
YVVCGSRGL

SEQ ID NO: 32426 - protein, 9 aa, synthetic construct
  source 1..9: note = Seed: LVVVGARGV (KRAS G12R)
YVVCGSRGM

SEQ ID NO: 32427 - protein, 9 aa, synthetic construct
  source 1..9: note = Seed: LVVVGARGV (KRAS G12R)
YVVCGSRGV

SEQ ID NO: 32428 - protein, 9 aa, synthetic construct
  source 1..9: note = Seed: LVVVGARGV (KRAS G12R)
YVVCGTRGI

SEQ ID NO: 32429 - protein, 9 aa, synthetic construct
  source 1..9: note = Seed: LVVVGARGV (KRAS G12R)
YVVCGTRGL

SEQ ID NO: 32430 - protein, 9 aa, synthetic construct
  source 1..9: note = Seed: LVVVGARGV (KRAS G12R)
YVVCGTRGV

SEQ ID NO: 32431 - protein, 9 aa, synthetic construct
  source 1..9: note = Seed: LVVVGARGV (KRAS G12R)
YVVCGVRGI

SEQ ID NO: 32432 - protein, 9 aa, synthetic construct
  source 1..9: note = Seed: LVVVGARGV (KRAS G12R)
YVVCGVRGL

SEQ ID NO: 32433 - protein, 9 aa, synthetic construct
  source 1..9: note = Seed: LVVVGARGV (KRAS G12R)
YVVCGVRGV

SEQ ID NO: 32434 - protein, 9 aa, synthetic construct
  source 1..9: note = Seed: LVVVGARGV (KRAS G12R)
YVVDGARGA

SEQ ID NO: 32435 - protein, 9 aa, synthetic construct
  source 1..9: note = Seed: LVVVGARGV (KRAS G12R)
YVVDGARGI

SEQ ID NO: 32436 - protein, 9 aa, synthetic construct
  source 1..9: note = Seed: LVVVGARGV (KRAS G12R)
YVVDGARGL

SEQ ID NO: 32437 - protein, 9 aa, synthetic construct
  source 1..9: note = Seed: LVVVGARGV (KRAS G12R)
YVVDGARGM

SEQ ID NO: 32438 - protein, 9 aa, synthetic construct
  source 1..9: note = Seed: LVVVGARGV (KRAS G12R)
YVVDGARGV

SEQ ID NO: 32439 - protein, 9 aa, synthetic construct
  source 1..9: note = Seed: LVVVGARGV (KRAS G12R)
YVVDGGRGI

SEQ ID NO: 32440 - protein, 9 aa, synthetic construct
  source 1..9: note = Seed: LVVVGARGV (KRAS G12R)
YVVDGGRGL

SEQ ID NO: 32441 - protein, 9 aa, synthetic construct
  source 1..9: note = Seed: LVVVGARGV (KRAS G12R)
YVVDGGRGV

SEQ ID NO: 32442 - protein, 9 aa, synthetic construct
  source 1..9: note = Seed: LVVVGARGV (KRAS G12R)
YVVDGNRGA

SEQ ID NO: 32443 - protein, 9 aa, synthetic construct
  source 1..9: note = Seed: LVVVGARGV (KRAS G12R)
YVVDGNRGI

SEQ ID NO: 32444 - protein, 9 aa, synthetic construct
  source 1..9: note = Seed: LVVVGARGV (KRAS G12R)
YVVDGNRGS

SEQ ID NO: 32445 - protein, 9 aa, synthetic construct
  source 1..9: note = Seed: LVVVGARGV (KRAS G12R)
YVVDGNRGV

SEQ ID NO: 32446 - protein, 9 aa, synthetic construct
  source 1..9: note = Seed: LVVVGARGV (KRAS G12R)
YVVDGSRGA

SEQ ID NO: 32447 - protein, 9 aa, synthetic construct
  source 1..9: note = Seed: LVVVGARGV (KRAS G12R)
YVVDGSRGI

SEQ ID NO: 32448 - protein, 9 aa, synthetic construct
  source 1..9: note = Seed: LVVVGARGV (KRAS G12R)
YVVDGSRGL

SEQ ID NO: 32449 - protein, 9 aa, synthetic construct
  source 1..9: note = Seed: LVVVGARGV (KRAS G12R)
YVVDGSRGV

SEQ ID NO: 32450 - protein, 9 aa, synthetic construct
  source 1..9: note = Seed: LVVVGARGV (KRAS G12R)
YVVDGTRGA

SEQ ID NO: 32451 - protein, 9 aa, synthetic construct
  source 1..9: note = Seed: LVVVGARGV (KRAS G12R)
YVVDGTRGS

SEQ ID NO: 32452 - protein, 9 aa, synthetic construct
  source 1..9: note = Seed: LVVVGARGV (KRAS G12R)
YVVDGVRGA

SEQ ID NO: 32453 - protein, 9 aa, synthetic construct
  source 1..9: note = Seed: LVVVGARGV (KRAS G12R)
YVVEGARGA

SEQ ID NO: 32454 - protein, 9 aa, synthetic construct
  source 1..9: note = Seed: LVVVGARGV (KRAS G12R)
YVVEGARGC

SEQ ID NO: 32455 - protein, 9 aa, synthetic construct
  source 1..9: note = Seed: LVVVGARGV (KRAS G12R)
YVVEGARGF

SEQ ID NO: 32456 - protein, 9 aa, synthetic construct
  source 1..9: note = Seed: LVVVGARGV (KRAS G12R)
YVVEGARGG

SEQ ID NO: 32457 - protein, 9 aa, synthetic construct
  source 1..9: note = Seed: LVVVGARGV (KRAS G12R)
YVVEGARGI

SEQ ID NO: 32458 - protein, 9 aa, synthetic construct
  source 1..9: note = Seed: LVVVGARGV (KRAS G12R)
YVVEGARGL

SEQ ID NO: 32459 - protein, 9 aa, synthetic construct
  source 1..9: note = Seed: LVVVGARGV (KRAS G12R)
YVVEGARGM

SEQ ID NO: 32460 - protein, 9 aa, synthetic construct
  source 1..9: note = Seed: LVVVGARGV (KRAS G12R)
YVVEGARGN

SEQ ID NO: 32461 - protein, 9 aa, synthetic construct
  source 1..9: note = Seed: LVVVGARGV (KRAS G12R)
YVVEGARGS

SEQ ID NO: 32462 - protein, 9 aa, synthetic construct
  source 1..9: note = Seed: LVVVGARGV (KRAS G12R)
YVVEGARGT

SEQ ID NO: 32463 - protein, 9 aa, synthetic construct
  source 1..9: note = Seed: LVVVGARGV (KRAS G12R)
YVVEGARGV

SEQ ID NO: 32464 - protein, 9 aa, synthetic construct
  source 1..9: note = Seed: LVVVGARGV (KRAS G12R)
YVVEGFRGF

SEQ ID NO: 32465 - protein, 9 aa, synthetic construct
  source 1..9: note = Seed: LVVVGARGV (KRAS G12R)
YVVEGFRGI

SEQ ID NO: 32466 - protein, 9 aa, synthetic construct
  source 1..9: note = Seed: LVVVGARGV (KRAS G12R)
YVVEGFRGL

SEQ ID NO: 32467 - protein, 9 aa, synthetic construct
  source 1..9: note = Seed: LVVVGARGV (KRAS G12R)
YVVEGFRGV

SEQ ID NO: 32468 - protein, 9 aa, synthetic construct
  source 1..9: note = Seed: LVVVGARGV (KRAS G12R)
YVVEGGRGA

SEQ ID NO: 32469 - protein, 9 aa, synthetic construct
  source 1..9: note = Seed: LVVVGARGV (KRAS G12R)
YVVEGGRGF

SEQ ID NO: 32470 - protein, 9 aa, synthetic construct
  source 1..9: note = Seed: LVVVGARGV (KRAS G12R)
YVVEGGRGI

SEQ ID NO: 32471 - protein, 9 aa, synthetic construct
  source 1..9: note = Seed: LVVVGARGV (KRAS G12R)
YVVEGGRGL

SEQ ID NO: 32472 - protein, 9 aa, synthetic construct
  source 1..9: note = Seed: LVVVGARGV (KRAS G12R)
YVVEGGRGM

SEQ ID NO: 32473 - protein, 9 aa, synthetic construct
  source 1..9: note = Seed: LVVVGARGV (KRAS G12R)
YVVEGGRGS

SEQ ID NO: 32474 - protein, 9 aa, synthetic construct
  source 1..9: note = Seed: LVVVGARGV (KRAS G12R)
YVVEGGRGT

SEQ ID NO: 32475 - protein, 9 aa, synthetic construct
  source 1..9: note = Seed: LVVVGARGV (KRAS G12R)
YVVEGGRGV

SEQ ID NO: 32476 - protein, 9 aa, synthetic construct
  source 1..9: note = Seed: LVVVGARGV (KRAS G12R)
YVVEGIRGA

SEQ ID NO: 32477 - protein, 9 aa, synthetic construct
  source 1..9: note = Seed: LVVVGARGV (KRAS G12R)
YVVEGIRGI

SEQ ID NO: 32478 - protein, 9 aa, synthetic construct
  source 1..9: note = Seed: LVVVGARGV (KRAS G12R)
YVVEGIRGL

SEQ ID NO: 32479 - protein, 9 aa, synthetic construct
  source 1..9: note = Seed: LVVVGARGV (KRAS G12R)
YVVEGIRGN

SEQ ID NO: 32480 - protein, 9 aa, synthetic construct
  source 1..9: note = Seed: LVVVGARGV (KRAS G12R)
YVVEGIRGS

SEQ ID NO: 32481 - protein, 9 aa, synthetic construct
  source 1..9: note = Seed: LVVVGARGV (KRAS G12R)
YVVEGIRGV

SEQ ID NO: 32482 - protein, 9 aa, synthetic construct
  source 1..9: note = Seed: LVVVGARGV (KRAS G12R)
YVVEGMRGL

SEQ ID NO: 32483 - protein, 9 aa, synthetic construct
  source 1..9: note = Seed: LVVVGARGV (KRAS G12R)
YVVEGNRGA

SEQ ID NO: 32484 - protein, 9 aa, synthetic construct
  source 1..9: note = Seed: LVVVGARGV (KRAS G12R)
YVVEGNRGI

SEQ ID NO: 32485 - protein, 9 aa, synthetic construct
  source 1..9: note = Seed: LVVVGARGV (KRAS G12R)
YVVEGNRGL

SEQ ID NO: 32486 - protein, 9 aa, synthetic construct
  source 1..9: note = Seed: LVVVGARGV (KRAS G12R)
YVVEGNRGM

SEQ ID NO: 32487 - protein, 9 aa, synthetic construct
  source 1..9: note = Seed: LVVVGARGV (KRAS G12R)
YVVEGNRGS

SEQ ID NO: 32488 - protein, 9 aa, synthetic construct
  source 1..9: note = Seed: LVVVGARGV (KRAS G12R)
YVVEGNRGT

SEQ ID NO: 32489 - protein, 9 aa, synthetic construct
  source 1..9: note = Seed: LVVVGARGV (KRAS G12R)
YVVEGNRGV

SEQ ID NO: 32490 - protein, 9 aa, synthetic construct
  source 1..9: note = Seed: LVVVGARGV (KRAS G12R)
YVVEGPRGA

SEQ ID NO: 32491 - protein, 9 aa, synthetic construct
  source 1..9: note = Seed: LVVVGARGV (KRAS G12R)
YVVEGPRGI

SEQ ID NO: 32492 - protein, 9 aa, synthetic construct
  source 1..9: note = Seed: LVVVGARGV (KRAS G12R)
YVVEGPRGL

SEQ ID NO: 32493 - protein, 9 aa, synthetic construct
  source 1..9: note = Seed: LVVVGARGV (KRAS G12R)
YVVEGPRGM

SEQ ID NO: 32494 - protein, 9 aa, synthetic construct
  source 1..9: note = Seed: LVVVGARGV (KRAS G12R)
YVVEGPRGS

SEQ ID NO: 32495 - protein, 9 aa, synthetic construct
  source 1..9: note = Seed: LVVVGARGV (KRAS G12R)
YVVEGPRGT

SEQ ID NO: 32496 - protein, 9 aa, synthetic construct
  source 1..9: note = Seed: LVVVGARGV (KRAS G12R)
YVVEGPRGV

SEQ ID NO: 32497 - protein, 9 aa, synthetic construct
  source 1..9: note = Seed: LVVVGARGV (KRAS G12R)
YVVEGSRGA

SEQ ID NO: 32498 - protein, 9 aa, synthetic construct
  source 1..9: note = Seed: LVVVGARGV (KRAS G12R)
YVVEGSRGF

SEQ ID NO: 32499 - protein, 9 aa, synthetic construct
  source 1..9: note = Seed: LVVVGARGV (KRAS G12R)
YVVEGSRGI

SEQ ID NO: 32500 - protein, 9 aa, synthetic construct
  source 1..9: note = Seed: LVVVGARGV (KRAS G12R)
YVVEGSRGL

SEQ ID NO: 32501 - protein, 9 aa, synthetic construct
  source 1..9: note = Seed: LVVVGARGV (KRAS G12R)
YVVEGSRGM

SEQ ID NO: 32502 - protein, 9 aa, synthetic construct
  source 1..9: note = Seed: LVVVGARGV (KRAS G12R)
YVVEGSRGS

SEQ ID NO: 32503 - protein, 9 aa, synthetic construct
  source 1..9: note = Seed: LVVVGARGV (KRAS G12R)
YVVEGSRGT

SEQ ID NO: 32504 - protein, 9 aa, synthetic construct
  source 1..9: note = Seed: LVVVGARGV (KRAS G12R)
YVVEGSRGV

SEQ ID NO: 32505 - protein, 9 aa, synthetic construct
  source 1..9: note = Seed: LVVVGARGV (KRAS G12R)
YVVEGTRGA

SEQ ID NO: 32506 - protein, 9 aa, synthetic construct
  source 1..9: note = Seed: LVVVGARGV (KRAS G12R)
YVVEGTRGI

SEQ ID NO: 32507 - protein, 9 aa, synthetic construct
  source 1..9: note = Seed: LVVVGARGV (KRAS G12R)
YVVEGTRGL

SEQ ID NO: 32508 - protein, 9 aa, synthetic construct
  source 1..9: note = Seed: LVVVGARGV (KRAS G12R)
YVVEGTRGM

SEQ ID NO: 32509 - protein, 9 aa, synthetic construct
  source 1..9: note = Seed: LVVVGARGV (KRAS G12R)
YVVEGTRGT

SEQ ID NO: 32510 - protein, 9 aa, synthetic construct
  source 1..9: note = Seed: LVVVGARGV (KRAS G12R)
YVVEGTRGV

SEQ ID NO: 32511 - protein, 9 aa, synthetic construct
  source 1..9: note = Seed: LVVVGARGV (KRAS G12R)
YVVEGVRGA

SEQ ID NO: 32512 - protein, 9 aa, synthetic construct
  source 1..9: note = Seed: LVVVGARGV (KRAS G12R)
YVVEGVRGI

SEQ ID NO: 32513 - protein, 9 aa, synthetic construct
  source 1..9: note = Seed: LVVVGARGV (KRAS G12R)
YVVEGVRGL

SEQ ID NO: 32514 - protein, 9 aa, synthetic construct
  source 1..9: note = Seed: LVVVGARGV (KRAS G12R)
YVVEGVRGM

SEQ ID NO: 32515 - protein, 9 aa, synthetic construct
  source 1..9: note = Seed: LVVVGARGV (KRAS G12R)
YVVEGVRGN

SEQ ID NO: 32516 - protein, 9 aa, synthetic construct
  source 1..9: note = Seed: LVVVGARGV (KRAS G12R)
YVVEGVRGS

SEQ ID NO: 32517 - protein, 9 aa, synthetic construct
  source 1..9: note = Seed: LVVVGARGV (KRAS G12R)
YVVEGVRGT

SEQ ID NO: 32518 - protein, 9 aa, synthetic construct
  source 1..9: note = Seed: LVVVGARGV (KRAS G12R)
YVVEGVRGV

SEQ ID NO: 32519 - protein, 9 aa, synthetic construct
  source 1..9: note = Seed: LVVVGARGV (KRAS G12R)
YVVFGARGA

SEQ ID NO: 32520 - protein, 9 aa, synthetic construct
  source 1..9: note = Seed: LVVVGARGV (KRAS G12R)
YVVFGARGC

SEQ ID NO: 32521 - protein, 9 aa, synthetic construct
  source 1..9: note = Seed: LVVVGARGV (KRAS G12R)
YVVFGARGF

SEQ ID NO: 32522 - protein, 9 aa, synthetic construct
  source 1..9: note = Seed: LVVVGARGV (KRAS G12R)
YVVFGARGG

SEQ ID NO: 32523 - protein, 9 aa, synthetic construct
  source 1..9: note = Seed: LVVVGARGV (KRAS G12R)
YVVFGARGH

SEQ ID NO: 32524 - protein, 9 aa, synthetic construct
  source 1..9: note = Seed: LVVVGARGV (KRAS G12R)
YVVFGARGI

SEQ ID NO: 32525 - protein, 9 aa, synthetic construct
  source 1..9: note = Seed: LVVVGARGV (KRAS G12R)
YVVFGARGK

SEQ ID NO: 32526 - protein, 9 aa, synthetic construct
  source 1..9: note = Seed: LVVVGARGV (KRAS G12R)
YVVFGARGL

SEQ ID NO: 32527 - protein, 9 aa, synthetic construct
  source 1..9: note = Seed: LVVVGARGV (KRAS G12R)
YVVFGARGM

SEQ ID NO: 32528 - protein, 9 aa, synthetic construct
  source 1..9: note = Seed: LVVVGARGV (KRAS G12R)
YVVFGARGN

SEQ ID NO: 32529 - protein, 9 aa, synthetic construct
  source 1..9: note = Seed: LVVVGARGV (KRAS G12R)
YVVFGARGP

SEQ ID NO: 32530 - protein, 9 aa, synthetic construct
  source 1..9: note = Seed: LVVVGARGV (KRAS G12R)
YVVFGARGR

SEQ ID NO: 32531 - protein, 9 aa, synthetic construct
  source 1..9: note = Seed: LVVVGARGV (KRAS G12R)
YVVFGARGS

SEQ ID NO: 32532 - protein, 9 aa, synthetic construct
  source 1..9: note = Seed: LVVVGARGV (KRAS G12R)
YVVFGARGT

SEQ ID NO: 32533 - protein, 9 aa, synthetic construct
  source 1..9: note = Seed: LVVVGARGV (KRAS G12R)
YVVFGARGV

SEQ ID NO: 32534 - protein, 9 aa, synthetic construct
  source 1..9: note = Seed: LVVVGARGV (KRAS G12R)
YVVFGARGW

SEQ ID NO: 32535 - protein, 9 aa, synthetic construct
  source 1..9: note = Seed: LVVVGARGV (KRAS G12R)
YVVFGARGY

SEQ ID NO: 32536 - protein, 9 aa, synthetic construct
  source 1..9: note = Seed: LVVVGARGV (KRAS G12R)
YVVFGFRGF

SEQ ID NO: 32537 - protein, 9 aa, synthetic construct
  source 1..9: note = Seed: LVVVGARGV (KRAS G12R)
YVVFGFRGI

SEQ ID NO: 32538 - protein, 9 aa, synthetic construct
  source 1..9: note = Seed: LVVVGARGV (KRAS G12R)
YVVFGFRGL

SEQ ID NO: 32539 - protein, 9 aa, synthetic construct
  source 1..9: note = Seed: LVVVGARGV (KRAS G12R)
YVVFGFRGM

SEQ ID NO: 32540 - protein, 9 aa, synthetic construct
  source 1..9: note = Seed: LVVVGARGV (KRAS G12R)
YVVFGFRGV

SEQ ID NO: 32541 - protein, 9 aa, synthetic construct
  source 1..9: note = Seed: LVVVGARGV (KRAS G12R)
YVVFGGRGA

SEQ ID NO: 32542 - protein, 9 aa, synthetic construct
  source 1..9: note = Seed: LVVVGARGV (KRAS G12R)
YVVFGGRGF

SEQ ID NO: 32543 - protein, 9 aa, synthetic construct
  source 1..9: note = Seed: LVVVGARGV (KRAS G12R)
YVVFGGRGG

SEQ ID NO: 32544 - protein, 9 aa, synthetic construct
  source 1..9: note = Seed: LVVVGARGV (KRAS G12R)
YVVFGGRGI

SEQ ID NO: 32545 - protein, 9 aa, synthetic construct
  source 1..9: note = Seed: LVVVGARGV (KRAS G12R)
YVVFGGRGL

SEQ ID NO: 32546 - protein, 9 aa, synthetic construct
  source 1..9: note = Seed: LVVVGARGV (KRAS G12R)
YVVFGGRGM

SEQ ID NO: 32547 - protein, 9 aa, synthetic construct
  source 1..9: note = Seed: LVVVGARGV (KRAS G12R)
YVVFGGRGR

SEQ ID NO: 32548 - protein, 9 aa, synthetic construct
  source 1..9: note = Seed: LVVVGARGV (KRAS G12R)
YVVFGGRGS

SEQ ID NO: 32549 - protein, 9 aa, synthetic construct
  source 1..9: note = Seed: LVVVGARGV (KRAS G12R)
YVVFGGRGT

SEQ ID NO: 32550 - protein, 9 aa, synthetic construct
  source 1..9: note = Seed: LVVVGARGV (KRAS G12R)
YVVFGGRGV

SEQ ID NO: 32551 - protein, 9 aa, synthetic construct
  source 1..9: note = Seed: LVVVGARGV (KRAS G12R)
YVVFGHRGA

SEQ ID NO: 32552 - protein, 9 aa, synthetic construct
  source 1..9: note = Seed: LVVVGARGV (KRAS G12R)
YVVFGHRGF

SEQ ID NO: 32553 - protein, 9 aa, synthetic construct
  source 1..9: note = Seed: LVVVGARGV (KRAS G12R)
YVVFGHRGH

SEQ ID NO: 32554 - protein, 9 aa, synthetic construct
  source 1..9: note = Seed: LVVVGARGV (KRAS G12R)
YVVFGHRGI

SEQ ID NO: 32555 - protein, 9 aa, synthetic construct
  source 1..9: note = Seed: LVVVGARGV (KRAS G12R)
YVVFGHRGL

SEQ ID NO: 32556 - protein, 9 aa, synthetic construct
  source 1..9: note = Seed: LVVVGARGV (KRAS G12R)
YVVFGHRGM

SEQ ID NO: 32557 - protein, 9 aa, synthetic construct
  source 1..9: note = Seed: LVVVGARGV (KRAS G12R)
YVVFGHRGR

SEQ ID NO: 32558 - protein, 9 aa, synthetic construct
  source 1..9: note = Seed: LVVVGARGV (KRAS G12R)
YVVFGHRGV

SEQ ID NO: 32559 - protein, 9 aa, synthetic construct
  source 1..9: note = Seed: LVVVGARGV (KRAS G12R)
YVVFGHRGY

SEQ ID NO: 32560 - protein, 9 aa, synthetic construct
  source 1..9: note = Seed: LVVVGARGV (KRAS G12R)
YVVFGIRGA

SEQ ID NO: 32561 - protein, 9 aa, synthetic construct
  source 1..9: note = Seed: LVVVGARGV (KRAS G12R)
YVVFGIRGI

SEQ ID NO: 32562 - protein, 9 aa, synthetic construct
  source 1..9: note = Seed: LVVVGARGV (KRAS G12R)
YVVFGIRGL

SEQ ID NO: 32563 - protein, 9 aa, synthetic construct
  source 1..9: note = Seed: LVVVGARGV (KRAS G12R)
YVVFGIRGM

SEQ ID NO: 32564 - protein, 9 aa, synthetic construct
  source 1..9: note = Seed: LVVVGARGV (KRAS G12R)
YVVFGIRGN

SEQ ID NO: 32565 - protein, 9 aa, synthetic construct
  source 1..9: note = Seed: LVVVGARGV (KRAS G12R)
YVVFGIRGR

SEQ ID NO: 32566 - protein, 9 aa, synthetic construct
  source 1..9: note = Seed: LVVVGARGV (KRAS G12R)
YVVFGIRGS

SEQ ID NO: 32567 - protein, 9 aa, synthetic construct
  source 1..9: note = Seed: LVVVGARGV (KRAS G12R)
YVVFGIRGV

SEQ ID NO: 32568 - protein, 9 aa, synthetic construct
  source 1..9: note = Seed: LVVVGARGV (KRAS G12R)
YVVFGIRGY

SEQ ID NO: 32569 - protein, 9 aa, synthetic construct
  source 1..9: note = Seed: LVVVGARGV (KRAS G12R)
YVVFGKRGA

SEQ ID NO: 32570 - protein, 9 aa, synthetic construct
  source 1..9: note = Seed: LVVVGARGV (KRAS G12R)
YVVFGKRGF

SEQ ID NO: 32571 - protein, 9 aa, synthetic construct
  source 1..9: note = Seed: LVVVGARGV (KRAS G12R)
YVVFGKRGG

SEQ ID NO: 32572 - protein, 9 aa, synthetic construct
  source 1..9: note = Seed: LVVVGARGV (KRAS G12R)
YVVFGKRGH

SEQ ID NO: 32573 - protein, 9 aa, synthetic construct
  source 1..9: note = Seed: LVVVGARGV (KRAS G12R)
YVVFGKRGI

SEQ ID NO: 32574 - protein, 9 aa, synthetic construct
  source 1..9: note = Seed: LVVVGARGV (KRAS G12R)
YVVFGKRGK

SEQ ID NO: 32575 - protein, 9 aa, synthetic construct
  source 1..9: note = Seed: LVVVGARGV (KRAS G12R)
YVVFGKRGL

SEQ ID NO: 32576 - protein, 9 aa, synthetic construct
  source 1..9: note = Seed: LVVVGARGV (KRAS G12R)
YVVFGKRGM

SEQ ID NO: 32577 - protein, 9 aa, synthetic construct
  source 1..9: note = Seed: LVVVGARGV (KRAS G12R)
YVVFGKRGN

SEQ ID NO: 32578 - protein, 9 aa, synthetic construct
  source 1..9: note = Seed: LVVVGARGV (KRAS G12R)
YVVFGKRGP

SEQ ID NO: 32579 - protein, 9 aa, synthetic construct
  source 1..9: note = Seed: LVVVGARGV (KRAS G12R)
YVVFGKRGQ

SEQ ID NO: 32580 - protein, 9 aa, synthetic construct
  source 1..9: note = Seed: LVVVGARGV (KRAS G12R)
YVVFGKRGR

SEQ ID NO: 32581 - protein, 9 aa, synthetic construct
  source 1..9: note = Seed: LVVVGARGV (KRAS G12R)
YVVFGKRGS

SEQ ID NO: 32582 - protein, 9 aa, synthetic construct
  source 1..9: note = Seed: LVVVGARGV (KRAS G12R)
YVVFGKRGT

SEQ ID NO: 32583 - protein, 9 aa, synthetic construct
  source 1..9: note = Seed: LVVVGARGV (KRAS G12R)
YVVFGKRGV

SEQ ID NO: 32584 - protein, 9 aa, synthetic construct
  source 1..9: note = Seed: LVVVGARGV (KRAS G12R)
YVVFGKRGW

SEQ ID NO: 32585 - protein, 9 aa, synthetic construct
  source 1..9: note = Seed: LVVVGARGV (KRAS G12R)
YVVFGKRGY

SEQ ID NO: 32586 - protein, 9 aa, synthetic construct
  source 1..9: note = Seed: LVVVGARGV (KRAS G12R)
YVVFGLRGA

SEQ ID NO: 32587 - protein, 9 aa, synthetic construct
  source 1..9: note = Seed: LVVVGARGV (KRAS G12R)
YVVFGLRGI

SEQ ID NO: 32588 - protein, 9 aa, synthetic construct
  source 1..9: note = Seed: LVVVGARGV (KRAS G12R)
YVVFGLRGL

SEQ ID NO: 32589 - protein, 9 aa, synthetic construct
  source 1..9: note = Seed: LVVVGARGV (KRAS G12R)
YVVFGLRGR

SEQ ID NO: 32590 - protein, 9 aa, synthetic construct
  source 1..9: note = Seed: LVVVGARGV (KRAS G12R)
YVVFGLRGV

SEQ ID NO: 32591 - protein, 9 aa, synthetic construct
  source 1..9: note = Seed: LVVVGARGV (KRAS G12R)
YVVFGLRGY

SEQ ID NO: 32592 - protein, 9 aa, synthetic construct
  source 1..9: note = Seed: LVVVGARGV (KRAS G12R)
YVVFGMRGA

SEQ ID NO: 32593 - protein, 9 aa, synthetic construct
  source 1..9: note = Seed: LVVVGARGV (KRAS G12R)
YVVFGMRGI

SEQ ID NO: 32594 - protein, 9 aa, synthetic construct
  source 1..9: note = Seed: LVVVGARGV (KRAS G12R)
YVVFGMRGL

SEQ ID NO: 32595 - protein, 9 aa, synthetic construct
  source 1..9: note = Seed: LVVVGARGV (KRAS G12R)
YVVFGMRGR

SEQ ID NO: 32596 - protein, 9 aa, synthetic construct
  source 1..9: note = Seed: LVVVGARGV (KRAS G12R)
YVVFGMRGV

SEQ ID NO: 32597 - protein, 9 aa, synthetic construct
  source 1..9: note = Seed: LVVVGARGV (KRAS G12R)
YVVFGNRGA

SEQ ID NO: 32598 - protein, 9 aa, synthetic construct
  source 1..9: note = Seed: LVVVGARGV (KRAS G12R)
YVVFGNRGF

SEQ ID NO: 32599 - protein, 9 aa, synthetic construct
  source 1..9: note = Seed: LVVVGARGV (KRAS G12R)
YVVFGNRGI

SEQ ID NO: 32600 - protein, 9 aa, synthetic construct
  source 1..9: note = Seed: LVVVGARGV (KRAS G12R)
YVVFGNRGL

SEQ ID NO: 32601 - protein, 9 aa, synthetic construct
  source 1..9: note = Seed: LVVVGARGV (KRAS G12R)
YVVFGNRGM

SEQ ID NO: 32602 - protein, 9 aa, synthetic construct
  source 1..9: note = Seed: LVVVGARGV (KRAS G12R)
YVVFGNRGR

SEQ ID NO: 32603 - protein, 9 aa, synthetic construct
  source 1..9: note = Seed: LVVVGARGV (KRAS G12R)
YVVFGNRGS

SEQ ID NO: 32604 - protein, 9 aa, synthetic construct
  source 1..9: note = Seed: LVVVGARGV (KRAS G12R)
YVVFGNRGT

SEQ ID NO: 32605 - protein, 9 aa, synthetic construct
  source 1..9: note = Seed: LVVVGARGV (KRAS G12R)
YVVFGNRGV

SEQ ID NO: 32606 - protein, 9 aa, synthetic construct
  source 1..9: note = Seed: LVVVGARGV (KRAS G12R)
YVVFGPRGA

SEQ ID NO: 32607 - protein, 9 aa, synthetic construct
  source 1..9: note = Seed: LVVVGARGV (KRAS G12R)
YVVFGPRGF

SEQ ID NO: 32608 - protein, 9 aa, synthetic construct
  source 1..9: note = Seed: LVVVGARGV (KRAS G12R)
YVVFGPRGI

SEQ ID NO: 32609 - protein, 9 aa, synthetic construct
  source 1..9: note = Seed: LVVVGARGV (KRAS G12R)
YVVFGPRGL

SEQ ID NO: 32610 - protein, 9 aa, synthetic construct
  source 1..9: note = Seed: LVVVGARGV (KRAS G12R)
YVVFGPRGM

SEQ ID NO: 32611 - protein, 9 aa, synthetic construct
  source 1..9: note = Seed: LVVVGARGV (KRAS G12R)
YVVFGPRGN

SEQ ID NO: 32612 - protein, 9 aa, synthetic construct
  source 1..9: note = Seed: LVVVGARGV (KRAS G12R)
YVVFGPRGR

SEQ ID NO: 32613 - protein, 9 aa, synthetic construct
  source 1..9: note = Seed: LVVVGARGV (KRAS G12R)
YVVFGPRGS

SEQ ID NO: 32614 - protein, 9 aa, synthetic construct
  source 1..9: note = Seed: LVVVGARGV (KRAS G12R)
YVVFGPRGT

SEQ ID NO: 32615 - protein, 9 aa, synthetic construct
  source 1..9: note = Seed: LVVVGARGV (KRAS G12R)
YVVFGPRGV

SEQ ID NO: 32616 - protein, 9 aa, synthetic construct
  source 1..9: note = Seed: LVVVGARGV (KRAS G12R)
YVVFGQRGR

SEQ ID NO: 32617 - protein, 9 aa, synthetic construct
  source 1..9: note = Seed: LVVVGARGV (KRAS G12R)
YVVFGRRGA

SEQ ID NO: 32618 - protein, 9 aa, synthetic construct
  source 1..9: note = Seed: LVVVGARGV (KRAS G12R)
YVVFGRRGF

SEQ ID NO: 32619 - protein, 9 aa, synthetic construct
  source 1..9: note = Seed: LVVVGARGV (KRAS G12R)
YVVFGRRGG

SEQ ID NO: 32620 - protein, 9 aa, synthetic construct
  source 1..9: note = Seed: LVVVGARGV (KRAS G12R)
YVVFGRRGH

SEQ ID NO: 32621 - protein, 9 aa, synthetic construct
  source 1..9: note = Seed: LVVVGARGV (KRAS G12R)
YVVFGRRGI

SEQ ID NO: 32622 - protein, 9 aa, synthetic construct
  source 1..9: note = Seed: LVVVGARGV (KRAS G12R)
YVVFGRRGK

SEQ ID NO: 32623 - protein, 9 aa, synthetic construct
  source 1..9: note = Seed: LVVVGARGV (KRAS G12R)
YVVFGRRGL

SEQ ID NO: 32624 - protein, 9 aa, synthetic construct
  source 1..9: note = Seed: LVVVGARGV (KRAS G12R)
YVVFGRRGM

SEQ ID NO: 32625 - protein, 9 aa, synthetic construct
  source 1..9: note = Seed: LVVVGARGV (KRAS G12R)
YVVFGRRGN

SEQ ID NO: 32626 - protein, 9 aa, synthetic construct
  source 1..9: note = Seed: LVVVGARGV (KRAS G12R)
YVVFGRRGP

SEQ ID NO: 32627 - protein, 9 aa, synthetic construct
  source 1..9: note = Seed: LVVVGARGV (KRAS G12R)
YVVFGRRGQ

SEQ ID NO: 32628 - protein, 9 aa, synthetic construct
  source 1..9: note = Seed: LVVVGARGV (KRAS G12R)
YVVFGRRGR

SEQ ID NO: 32629 - protein, 9 aa, synthetic construct
  source 1..9: note = Seed: LVVVGARGV (KRAS G12R)
YVVFGRRGS

SEQ ID NO: 32630 - protein, 9 aa, synthetic construct
  source 1..9: note = Seed: LVVVGARGV (KRAS G12R)
YVVFGRRGT

SEQ ID NO: 32631 - protein, 9 aa, synthetic construct
  source 1..9: note = Seed: LVVVGARGV (KRAS G12R)
YVVFGRRGV

SEQ ID NO: 32632 - protein, 9 aa, synthetic construct
  source 1..9: note = Seed: LVVVGARGV (KRAS G12R)
YVVFGRRGW

SEQ ID NO: 32633 - protein, 9 aa, synthetic construct
  source 1..9: note = Seed: LVVVGARGV (KRAS G12R)
YVVFGRRGY

SEQ ID NO: 32634 - protein, 9 aa, synthetic construct
  source 1..9: note = Seed: LVVVGARGV (KRAS G12R)
YVVFGSRGA

SEQ ID NO: 32635 - protein, 9 aa, synthetic construct
  source 1..9: note = Seed: LVVVGARGV (KRAS G12R)
YVVFGSRGF

SEQ ID NO: 32636 - protein, 9 aa, synthetic construct
  source 1..9: note = Seed: LVVVGARGV (KRAS G12R)
YVVFGSRGG

SEQ ID NO: 32637 - protein, 9 aa, synthetic construct
  source 1..9: note = Seed: LVVVGARGV (KRAS G12R)
YVVFGSRGH

SEQ ID NO: 32638 - protein, 9 aa, synthetic construct
  source 1..9: note = Seed: LVVVGARGV (KRAS G12R)
YVVFGSRGI

SEQ ID NO: 32639 - protein, 9 aa, synthetic construct
  source 1..9: note = Seed: LVVVGARGV (KRAS G12R)
YVVFGSRGK

SEQ ID NO: 32640 - protein, 9 aa, synthetic construct
  source 1..9: note = Seed: LVVVGARGV (KRAS G12R)
YVVFGSRGL

SEQ ID NO: 32641 - protein, 9 aa, synthetic construct
  source 1..9: note = Seed: LVVVGARGV (KRAS G12R)
YVVFGSRGM

SEQ ID NO: 32642 - protein, 9 aa, synthetic construct
  source 1..9: note = Seed: LVVVGARGV (KRAS G12R)
YVVFGSRGN

SEQ ID NO: 32643 - protein, 9 aa, synthetic construct
  source 1..9: note = Seed: LVVVGARGV (KRAS G12R)
YVVFGSRGR

SEQ ID NO: 32644 - protein, 9 aa, synthetic construct
  source 1..9: note = Seed: LVVVGARGV (KRAS G12R)
YVVFGSRGS

SEQ ID NO: 32645 - protein, 9 aa, synthetic construct
  source 1..9: note = Seed: LVVVGARGV (KRAS G12R)
YVVFGSRGT

SEQ ID NO: 32646 - protein, 9 aa, synthetic construct
  source 1..9: note = Seed: LVVVGARGV (KRAS G12R)
YVVFGSRGV

SEQ ID NO: 32647 - protein, 9 aa, synthetic construct
  source 1..9: note = Seed: LVVVGARGV (KRAS G12R)
YVVFGSRGY

SEQ ID NO: 32648 - protein, 9 aa, synthetic construct
  source 1..9: note = Seed: LVVVGARGV (KRAS G12R)
YVVFGTRGA

SEQ ID NO: 32649 - protein, 9 aa, synthetic construct
  source 1..9: note = Seed: LVVVGARGV (KRAS G12R)
YVVFGTRGF

SEQ ID NO: 32650 - protein, 9 aa, synthetic construct
  source 1..9: note = Seed: LVVVGARGV (KRAS G12R)
YVVFGTRGI

SEQ ID NO: 32651 - protein, 9 aa, synthetic construct
  source 1..9: note = Seed: LVVVGARGV (KRAS G12R)
YVVFGTRGL

SEQ ID NO: 32652 - protein, 9 aa, synthetic construct
  source 1..9: note = Seed: LVVVGARGV (KRAS G12R)
YVVFGTRGM

SEQ ID NO: 32653 - protein, 9 aa, synthetic construct
  source 1..9: note = Seed: LVVVGARGV (KRAS G12R)
YVVFGTRGN

SEQ ID NO: 32654 - protein, 9 aa, synthetic construct
  source 1..9: note = Seed: LVVVGARGV (KRAS G12R)
YVVFGTRGR

SEQ ID NO: 32655 - protein, 9 aa, synthetic construct
  source 1..9: note = Seed: LVVVGARGV (KRAS G12R)
YVVFGTRGS

SEQ ID NO: 32656 - protein, 9 aa, synthetic construct
  source 1..9: note = Seed: LVVVGARGV (KRAS G12R)
YVVFGTRGT

SEQ ID NO: 32657 - protein, 9 aa, synthetic construct
  source 1..9: note = Seed: LVVVGARGV (KRAS G12R)
YVVFGTRGV

SEQ ID NO: 32658 - protein, 9 aa, synthetic construct
  source 1..9: note = Seed: LVVVGARGV (KRAS G12R)
YVVFGVRGA

SEQ ID NO: 32659 - protein, 9 aa, synthetic construct
  source 1..9: note = Seed: LVVVGARGV (KRAS G12R)
YVVFGVRGI

SEQ ID NO: 32660 - protein, 9 aa, synthetic construct
  source 1..9: note = Seed: LVVVGARGV (KRAS G12R)
YVVFGVRGL

SEQ ID NO: 32661 - protein, 9 aa, synthetic construct
  source 1..9: note = Seed: LVVVGARGV (KRAS G12R)
YVVFGVRGM

SEQ ID NO: 32662 - protein, 9 aa, synthetic construct
  source 1..9: note = Seed: LVVVGARGV (KRAS G12R)
YVVFGVRGN

SEQ ID NO: 32663 - protein, 9 aa, synthetic construct
  source 1..9: note = Seed: LVVVGARGV (KRAS G12R)
YVVFGVRGR

SEQ ID NO: 32664 - protein, 9 aa, synthetic construct
  source 1..9: note = Seed: LVVVGARGV (KRAS G12R)
YVVFGVRGS

SEQ ID NO: 32665 - protein, 9 aa, synthetic construct
  source 1..9: note = Seed: LVVVGARGV (KRAS G12R)
YVVFGVRGT

SEQ ID NO: 32666 - protein, 9 aa, synthetic construct
  source 1..9: note = Seed: LVVVGARGV (KRAS G12R)
YVVFGVRGV

SEQ ID NO: 32667 - protein, 9 aa, synthetic construct
  source 1..9: note = Seed: LVVVGARGV (KRAS G12R)
YVVGGARGA

SEQ ID NO: 32668 - protein, 9 aa, synthetic construct
  source 1..9: note = Seed: LVVVGARGV (KRAS G12R)
YVVGGARGF

SEQ ID NO: 32669 - protein, 9 aa, synthetic construct
  source 1..9: note = Seed: LVVVGARGV (KRAS G12R)
YVVGGARGI

SEQ ID NO: 32670 - protein, 9 aa, synthetic construct
  source 1..9: note = Seed: LVVVGARGV (KRAS G12R)
YVVGGARGL

SEQ ID NO: 32671 - protein, 9 aa, synthetic construct
  source 1..9: note = Seed: LVVVGARGV (KRAS G12R)
YVVGGARGM

SEQ ID NO: 32672 - protein, 9 aa, synthetic construct
  source 1..9: note = Seed: LVVVGARGV (KRAS G12R)
YVVGGARGS

SEQ ID NO: 32673 - protein, 9 aa, synthetic construct
  source 1..9: note = Seed: LVVVGARGV (KRAS G12R)
YVVGGARGT

SEQ ID NO: 32674 - protein, 9 aa, synthetic construct
  source 1..9: note = Seed: LVVVGARGV (KRAS G12R)
YVVGGARGV

SEQ ID NO: 32675 - protein, 9 aa, synthetic construct
  source 1..9: note = Seed: LVVVGARGV (KRAS G12R)
YVVGGARGY

SEQ ID NO: 32676 - protein, 9 aa, synthetic construct
  source 1..9: note = Seed: LVVVGARGV (KRAS G12R)
YVVGGGRGA

SEQ ID NO: 32677 - protein, 9 aa, synthetic construct
  source 1..9: note = Seed: LVVVGARGV (KRAS G12R)
YVVGGGRGI

SEQ ID NO: 32678 - protein, 9 aa, synthetic construct
  source 1..9: note = Seed: LVVVGARGV (KRAS G12R)
YVVGGGRGL

SEQ ID NO: 32679 - protein, 9 aa, synthetic construct
  source 1..9: note = Seed: LVVVGARGV (KRAS G12R)
YVVGGGRGM

SEQ ID NO: 32680 - protein, 9 aa, synthetic construct
  source 1..9: note = Seed: LVVVGARGV (KRAS G12R)
YVVGGGRGV

SEQ ID NO: 32681 - protein, 9 aa, synthetic construct
  source 1..9: note = Seed: LVVVGARGV (KRAS G12R)
YVVGGIRGA

SEQ ID NO: 32682 - protein, 9 aa, synthetic construct
  source 1..9: note = Seed: LVVVGARGV (KRAS G12R)
YVVGGIRGI

SEQ ID NO: 32683 - protein, 9 aa, synthetic construct
  source 1..9: note = Seed: LVVVGARGV (KRAS G12R)
YVVGGIRGL

SEQ ID NO: 32684 - protein, 9 aa, synthetic construct
  source 1..9: note = Seed: LVVVGARGV (KRAS G12R)
YVVGGIRGM

SEQ ID NO: 32685 - protein, 9 aa, synthetic construct
  source 1..9: note = Seed: LVVVGARGV (KRAS G12R)
YVVGGIRGV

SEQ ID NO: 32686 - protein, 9 aa, synthetic construct
  source 1..9: note = Seed: LVVVGARGV (KRAS G12R)
YVVGGLRGI

SEQ ID NO: 32687 - protein, 9 aa, synthetic construct
  source 1..9: note = Seed: LVVVGARGV (KRAS G12R)
YVVGGLRGL

SEQ ID NO: 32688 - protein, 9 aa, synthetic construct
  source 1..9: note = Seed: LVVVGARGV (KRAS G12R)
YVVGGLRGV

SEQ ID NO: 32689 - protein, 9 aa, synthetic construct
  source 1..9: note = Seed: LVVVGARGV (KRAS G12R)
YVVGGMRGI

SEQ ID NO: 32690 - protein, 9 aa, synthetic construct
  source 1..9: note = Seed: LVVVGARGV (KRAS G12R)
YVVGGMRGL

SEQ ID NO: 32691 - protein, 9 aa, synthetic construct
  source 1..9: note = Seed: LVVVGARGV (KRAS G12R)
YVVGGMRGV

SEQ ID NO: 32692 - protein, 9 aa, synthetic construct
  source 1..9: note = Seed: LVVVGARGV (KRAS G12R)
YVVGGNRGA

SEQ ID NO: 32693 - protein, 9 aa, synthetic construct
  source 1..9: note = Seed: LVVVGARGV (KRAS G12R)
YVVGGNRGI

SEQ ID NO: 32694 - protein, 9 aa, synthetic construct
  source 1..9: note = Seed: LVVVGARGV (KRAS G12R)
YVVGGNRGL

SEQ ID NO: 32695 - protein, 9 aa, synthetic construct
  source 1..9: note = Seed: LVVVGARGV (KRAS G12R)
YVVGGNRGM

SEQ ID NO: 32696 - protein, 9 aa, synthetic construct
  source 1..9: note = Seed: LVVVGARGV (KRAS G12R)
YVVGGNRGV

SEQ ID NO: 32697 - protein, 9 aa, synthetic construct
  source 1..9: note = Seed: LVVVGARGV (KRAS G12R)
YVVGGPRGA

SEQ ID NO: 32698 - protein, 9 aa, synthetic construct
  source 1..9: note = Seed: LVVVGARGV (KRAS G12R)
YVVGGPRGI

SEQ ID NO: 32699 - protein, 9 aa, synthetic construct
  source 1..9: note = Seed: LVVVGARGV (KRAS G12R)
YVVGGPRGL

SEQ ID NO: 32700 - protein, 9 aa, synthetic construct
  source 1..9: note = Seed: LVVVGARGV (KRAS G12R)
YVVGGPRGM

SEQ ID NO: 32701 - protein, 9 aa, synthetic construct
  source 1..9: note = Seed: LVVVGARGV (KRAS G12R)
YVVGGPRGV

SEQ ID NO: 32702 - protein, 9 aa, synthetic construct
  source 1..9: note = Seed: LVVVGARGV (KRAS G12R)
YVVGGSRGA

SEQ ID NO: 32703 - protein, 9 aa, synthetic construct
  source 1..9: note = Seed: LVVVGARGV (KRAS G12R)
YVVGGSRGF

SEQ ID NO: 32704 - protein, 9 aa, synthetic construct
  source 1..9: note = Seed: LVVVGARGV (KRAS G12R)
YVVGGSRGI

SEQ ID NO: 32705 - protein, 9 aa, synthetic construct
  source 1..9: note = Seed: LVVVGARGV (KRAS G12R)
YVVGGSRGL

SEQ ID NO: 32706 - protein, 9 aa, synthetic construct
  source 1..9: note = Seed: LVVVGARGV (KRAS G12R)
YVVGGSRGM

SEQ ID NO: 32707 - protein, 9 aa, synthetic construct
  source 1..9: note = Seed: LVVVGARGV (KRAS G12R)
YVVGGSRGS

SEQ ID NO: 32708 - protein, 9 aa, synthetic construct
  source 1..9: note = Seed: LVVVGARGV (KRAS G12R)
YVVGGSRGT

SEQ ID NO: 32709 - protein, 9 aa, synthetic construct
  source 1..9: note = Seed: LVVVGARGV (KRAS G12R)
YVVGGSRGV

SEQ ID NO: 32710 - protein, 9 aa, synthetic construct
  source 1..9: note = Seed: LVVVGARGV (KRAS G12R)
YVVGGTRGA

SEQ ID NO: 32711 - protein, 9 aa, synthetic construct
  source 1..9: note = Seed: LVVVGARGV (KRAS G12R)
YVVGGTRGI

SEQ ID NO: 32712 - protein, 9 aa, synthetic construct
  source 1..9: note = Seed: LVVVGARGV (KRAS G12R)
YVVGGTRGL

SEQ ID NO: 32713 - protein, 9 aa, synthetic construct
  source 1..9: note = Seed: LVVVGARGV (KRAS G12R)
YVVGGTRGM

SEQ ID NO: 32714 - protein, 9 aa, synthetic construct
  source 1..9: note = Seed: LVVVGARGV (KRAS G12R)
YVVGGTRGV

SEQ ID NO: 32715 - protein, 9 aa, synthetic construct
  source 1..9: note = Seed: LVVVGARGV (KRAS G12R)
YVVGGVRGA

SEQ ID NO: 32716 - protein, 9 aa, synthetic construct
  source 1..9: note = Seed: LVVVGARGV (KRAS G12R)
YVVGGVRGF

SEQ ID NO: 32717 - protein, 9 aa, synthetic construct
  source 1..9: note = Seed: LVVVGARGV (KRAS G12R)
YVVGGVRGI

SEQ ID NO: 32718 - protein, 9 aa, synthetic construct
  source 1..9: note = Seed: LVVVGARGV (KRAS G12R)
YVVGGVRGL

SEQ ID NO: 32719 - protein, 9 aa, synthetic construct
  source 1..9: note = Seed: LVVVGARGV (KRAS G12R)
YVVGGVRGM

SEQ ID NO: 32720 - protein, 9 aa, synthetic construct
  source 1..9: note = Seed: LVVVGARGV (KRAS G12R)
YVVGGVRGS

SEQ ID NO: 32721 - protein, 9 aa, synthetic construct
  source 1..9: note = Seed: LVVVGARGV (KRAS G12R)
YVVGGVRGT

SEQ ID NO: 32722 - protein, 9 aa, synthetic construct
  source 1..9: note = Seed: LVVVGARGV (KRAS G12R)
YVVGGVRGV

SEQ ID NO: 32723 - protein, 9 aa, synthetic construct
  source 1..9: note = Seed: LVVVGARGV (KRAS G12R)
YVVHGARGA

SEQ ID NO: 32724 - protein, 9 aa, synthetic construct
  source 1..9: note = Seed: LVVVGARGV (KRAS G12R)
YVVHGARGF

SEQ ID NO: 32725 - protein, 9 aa, synthetic construct
  source 1..9: note = Seed: LVVVGARGV (KRAS G12R)
YVVHGARGI

SEQ ID NO: 32726 - protein, 9 aa, synthetic construct
  source 1..9: note = Seed: LVVVGARGV (KRAS G12R)
YVVHGARGL

SEQ ID NO: 32727 - protein, 9 aa, synthetic construct
  source 1..9: note = Seed: LVVVGARGV (KRAS G12R)
YVVHGARGM

SEQ ID NO: 32728 - protein, 9 aa, synthetic construct
  source 1..9: note = Seed: LVVVGARGV (KRAS G12R)
YVVHGARGR

SEQ ID NO: 32729 - protein, 9 aa, synthetic construct
  source 1..9: note = Seed: LVVVGARGV (KRAS G12R)
YVVHGARGS

SEQ ID NO: 32730 - protein, 9 aa, synthetic construct
  source 1..9: note = Seed: LVVVGARGV (KRAS G12R)
YVVHGARGT

SEQ ID NO: 32731 - protein, 9 aa, synthetic construct
  source 1..9: note = Seed: LVVVGARGV (KRAS G12R)
YVVHGARGV

SEQ ID NO: 32732 - protein, 9 aa, synthetic construct
  source 1..9: note = Seed: LVVVGARGV (KRAS G12R)
YVVHGFRGF

SEQ ID NO: 32733 - protein, 9 aa, synthetic construct
  source 1..9: note = Seed: LVVVGARGV (KRAS G12R)
YVVHGFRGI

SEQ ID NO: 32734 - protein, 9 aa, synthetic construct
  source 1..9: note = Seed: LVVVGARGV (KRAS G12R)
YVVHGFRGL

SEQ ID NO: 32735 - protein, 9 aa, synthetic construct
  source 1..9: note = Seed: LVVVGARGV (KRAS G12R)
YVVHGFRGV

SEQ ID NO: 32736 - protein, 9 aa, synthetic construct
  source 1..9: note = Seed: LVVVGARGV (KRAS G12R)
YVVHGGRGA

SEQ ID NO: 32737 - protein, 9 aa, synthetic construct
  source 1..9: note = Seed: LVVVGARGV (KRAS G12R)
YVVHGGRGI

SEQ ID NO: 32738 - protein, 9 aa, synthetic construct
  source 1..9: note = Seed: LVVVGARGV (KRAS G12R)
YVVHGGRGL

SEQ ID NO: 32739 - protein, 9 aa, synthetic construct
  source 1..9: note = Seed: LVVVGARGV (KRAS G12R)
YVVHGGRGM

SEQ ID NO: 32740 - protein, 9 aa, synthetic construct
  source 1..9: note = Seed: LVVVGARGV (KRAS G12R)
YVVHGGRGV

SEQ ID NO: 32741 - protein, 9 aa, synthetic construct
  source 1..9: note = Seed: LVVVGARGV (KRAS G12R)
YVVHGHRGM

SEQ ID NO: 32742 - protein, 9 aa, synthetic construct
  source 1..9: note = Seed: LVVVGARGV (KRAS G12R)
YVVHGHRGR

SEQ ID NO: 32743 - protein, 9 aa, synthetic construct
  source 1..9: note = Seed: LVVVGARGV (KRAS G12R)
YVVHGIRGF

SEQ ID NO: 32744 - protein, 9 aa, synthetic construct
  source 1..9: note = Seed: LVVVGARGV (KRAS G12R)
YVVHGIRGL

SEQ ID NO: 32745 - protein, 9 aa, synthetic construct
  source 1..9: note = Seed: LVVVGARGV (KRAS G12R)
YVVHGIRGR

SEQ ID NO: 32746 - protein, 9 aa, synthetic construct
  source 1..9: note = Seed: LVVVGARGV (KRAS G12R)
YVVHGIRGY

SEQ ID NO: 32747 - protein, 9 aa, synthetic construct
  source 1..9: note = Seed: LVVVGARGV (KRAS G12R)
YVVHGKRGA

SEQ ID NO: 32748 - protein, 9 aa, synthetic construct
  source 1..9: note = Seed: LVVVGARGV (KRAS G12R)
YVVHGKRGI

SEQ ID NO: 32749 - protein, 9 aa, synthetic construct
  source 1..9: note = Seed: LVVVGARGV (KRAS G12R)
YVVHGKRGL

SEQ ID NO: 32750 - protein, 9 aa, synthetic construct
  source 1..9: note = Seed: LVVVGARGV (KRAS G12R)
YVVHGKRGM

SEQ ID NO: 32751 - protein, 9 aa, synthetic construct
  source 1..9: note = Seed: LVVVGARGV (KRAS G12R)
YVVHGKRGR

SEQ ID NO: 32752 - protein, 9 aa, synthetic construct
  source 1..9: note = Seed: LVVVGARGV (KRAS G12R)
YVVHGKRGY

SEQ ID NO: 32753 - protein, 9 aa, synthetic construct
  source 1..9: note = Seed: LVVVGARGV (KRAS G12R)
YVVHGLRGF

SEQ ID NO: 32754 - protein, 9 aa, synthetic construct
  source 1..9: note = Seed: LVVVGARGV (KRAS G12R)
YVVHGLRGR

SEQ ID NO: 32755 - protein, 9 aa, synthetic construct
  source 1..9: note = Seed: LVVVGARGV (KRAS G12R)
YVVHGLRGY

SEQ ID NO: 32756 - protein, 9 aa, synthetic construct
  source 1..9: note = Seed: LVVVGARGV (KRAS G12R)
YVVHGMRGL

SEQ ID NO: 32757 - protein, 9 aa, synthetic construct
  source 1..9: note = Seed: LVVVGARGV (KRAS G12R)
YVVHGMRGR

SEQ ID NO: 32758 - protein, 9 aa, synthetic construct
  source 1..9: note = Seed: LVVVGARGV (KRAS G12R)
YVVHGMRGY

SEQ ID NO: 32759 - protein, 9 aa, synthetic construct
  source 1..9: note = Seed: LVVVGARGV (KRAS G12R)
YVVHGNRGI

SEQ ID NO: 32760 - protein, 9 aa, synthetic construct
  source 1..9: note = Seed: LVVVGARGV (KRAS G12R)
YVVHGNRGL

SEQ ID NO: 32761 - protein, 9 aa, synthetic construct
  source 1..9: note = Seed: LVVVGARGV (KRAS G12R)
YVVHGNRGV

SEQ ID NO: 32762 - protein, 9 aa, synthetic construct
  source 1..9: note = Seed: LVVVGARGV (KRAS G12R)
YVVHGPRGI

SEQ ID NO: 32763 - protein, 9 aa, synthetic construct
  source 1..9: note = Seed: LVVVGARGV (KRAS G12R)
YVVHGPRGL

SEQ ID NO: 32764 - protein, 9 aa, synthetic construct
  source 1..9: note = Seed: LVVVGARGV (KRAS G12R)
YVVHGPRGV

SEQ ID NO: 32765 - protein, 9 aa, synthetic construct
  source 1..9: note = Seed: LVVVGARGV (KRAS G12R)
YVVHGRRGA

SEQ ID NO: 32766 - protein, 9 aa, synthetic construct
  source 1..9: note = Seed: LVVVGARGV (KRAS G12R)
YVVHGRRGF

SEQ ID NO: 32767 - protein, 9 aa, synthetic construct
  source 1..9: note = Seed: LVVVGARGV (KRAS G12R)
YVVHGRRGH

SEQ ID NO: 32768 - protein, 9 aa, synthetic construct
  source 1..9: note = Seed: LVVVGARGV (KRAS G12R)
YVVHGRRGI

SEQ ID NO: 32769 - protein, 9 aa, synthetic construct
  source 1..9: note = Seed: LVVVGARGV (KRAS G12R)
YVVHGRRGK

SEQ ID NO: 32770 - protein, 9 aa, synthetic construct
  source 1..9: note = Seed: LVVVGARGV (KRAS G12R)
YVVHGRRGL

SEQ ID NO: 32771 - protein, 9 aa, synthetic construct
  source 1..9: note = Seed: LVVVGARGV (KRAS G12R)
YVVHGRRGM

SEQ ID NO: 32772 - protein, 9 aa, synthetic construct
  source 1..9: note = Seed: LVVVGARGV (KRAS G12R)
YVVHGRRGQ

SEQ ID NO: 32773 - protein, 9 aa, synthetic construct
  source 1..9: note = Seed: LVVVGARGV (KRAS G12R)
YVVHGRRGR

SEQ ID NO: 32774 - protein, 9 aa, synthetic construct
  source 1..9: note = Seed: LVVVGARGV (KRAS G12R)
YVVHGRRGS

SEQ ID NO: 32775 - protein, 9 aa, synthetic construct
  source 1..9: note = Seed: LVVVGARGV (KRAS G12R)
YVVHGRRGV

SEQ ID NO: 32776 - protein, 9 aa, synthetic construct
  source 1..9: note = Seed: LVVVGARGV (KRAS G12R)
YVVHGRRGW

SEQ ID NO: 32777 - protein, 9 aa, synthetic construct
  source 1..9: note = Seed: LVVVGARGV (KRAS G12R)
YVVHGRRGY

SEQ ID NO: 32778 - protein, 9 aa, synthetic construct
  source 1..9: note = Seed: LVVVGARGV (KRAS G12R)
YVVHGSRGA

SEQ ID NO: 32779 - protein, 9 aa, synthetic construct
  source 1..9: note = Seed: LVVVGARGV (KRAS G12R)
YVVHGSRGF

SEQ ID NO: 32780 - protein, 9 aa, synthetic construct
  source 1..9: note = Seed: LVVVGARGV (KRAS G12R)
YVVHGSRGI

SEQ ID NO: 32781 - protein, 9 aa, synthetic construct
  source 1..9: note = Seed: LVVVGARGV (KRAS G12R)
YVVHGSRGL

SEQ ID NO: 32782 - protein, 9 aa, synthetic construct
  source 1..9: note = Seed: LVVVGARGV (KRAS G12R)
YVVHGSRGM

SEQ ID NO: 32783 - protein, 9 aa, synthetic construct
  source 1..9: note = Seed: LVVVGARGV (KRAS G12R)
YVVHGSRGR

SEQ ID NO: 32784 - protein, 9 aa, synthetic construct
  source 1..9: note = Seed: LVVVGARGV (KRAS G12R)
YVVHGSRGV

SEQ ID NO: 32785 - protein, 9 aa, synthetic construct
  source 1..9: note = Seed: LVVVGARGV (KRAS G12R)
YVVHGTRGI

SEQ ID NO: 32786 - protein, 9 aa, synthetic construct
  source 1..9: note = Seed: LVVVGARGV (KRAS G12R)
YVVHGTRGL

SEQ ID NO: 32787 - protein, 9 aa, synthetic construct
  source 1..9: note = Seed: LVVVGARGV (KRAS G12R)
YVVHGTRGR

SEQ ID NO: 32788 - protein, 9 aa, synthetic construct
  source 1..9: note = Seed: LVVVGARGV (KRAS G12R)
YVVHGTRGV

SEQ ID NO: 32789 - protein, 9 aa, synthetic construct
  source 1..9: note = Seed: LVVVGARGV (KRAS G12R)
YVVHGVRGF

SEQ ID NO: 32790 - protein, 9 aa, synthetic construct
  source 1..9: note = Seed: LVVVGARGV (KRAS G12R)
YVVHGVRGI

SEQ ID NO: 32791 - protein, 9 aa, synthetic construct
  source 1..9: note = Seed: LVVVGARGV (KRAS G12R)
YVVHGVRGL

SEQ ID NO: 32792 - protein, 9 aa, synthetic construct
  source 1..9: note = Seed: LVVVGARGV (KRAS G12R)
YVVHGVRGR

SEQ ID NO: 32793 - protein, 9 aa, synthetic construct
  source 1..9: note = Seed: LVVVGARGV (KRAS G12R)
YVVHGVRGV

SEQ ID NO: 32794 - protein, 9 aa, synthetic construct
  source 1..9: note = Seed: LVVVGARGV (KRAS G12R)
YVVIGARGA

SEQ ID NO: 32795 - protein, 9 aa, synthetic construct
  source 1..9: note = Seed: LVVVGARGV (KRAS G12R)
YVVIGARGC

SEQ ID NO: 32796 - protein, 9 aa, synthetic construct
  source 1..9: note = Seed: LVVVGARGV (KRAS G12R)
YVVIGARGD

SEQ ID NO: 32797 - protein, 9 aa, synthetic construct
  source 1..9: note = Seed: LVVVGARGV (KRAS G12R)
YVVIGARGE

SEQ ID NO: 32798 - protein, 9 aa, synthetic construct
  source 1..9: note = Seed: LVVVGARGV (KRAS G12R)
YVVIGARGF

SEQ ID NO: 32799 - protein, 9 aa, synthetic construct
  source 1..9: note = Seed: LVVVGARGV (KRAS G12R)
YVVIGARGG

SEQ ID NO: 32800 - protein, 9 aa, synthetic construct
  source 1..9: note = Seed: LVVVGARGV (KRAS G12R)
YVVIGARGH

SEQ ID NO: 32801 - protein, 9 aa, synthetic construct
  source 1..9: note = Seed: LVVVGARGV (KRAS G12R)
YVVIGARGK

SEQ ID NO: 32802 - protein, 9 aa, synthetic construct
  source 1..9: note = Seed: LVVVGARGV (KRAS G12R)
YVVIGARGM

SEQ ID NO: 32803 - protein, 9 aa, synthetic construct
  source 1..9: note = Seed: LVVVGARGV (KRAS G12R)
YVVIGARGN

SEQ ID NO: 32804 - protein, 9 aa, synthetic construct
  source 1..9: note = Seed: LVVVGARGV (KRAS G12R)
YVVIGARGP

SEQ ID NO: 32805 - protein, 9 aa, synthetic construct
  source 1..9: note = Seed: LVVVGARGV (KRAS G12R)
YVVIGARGQ

SEQ ID NO: 32806 - protein, 9 aa, synthetic construct
  source 1..9: note = Seed: LVVVGARGV (KRAS G12R)
YVVIGARGR

SEQ ID NO: 32807 - protein, 9 aa, synthetic construct
  source 1..9: note = Seed: LVVVGARGV (KRAS G12R)
YVVIGARGS

SEQ ID NO: 32808 - protein, 9 aa, synthetic construct
  source 1..9: note = Seed: LVVVGARGV (KRAS G12R)
YVVIGARGT

SEQ ID NO: 32809 - protein, 9 aa, synthetic construct
  source 1..9: note = Seed: LVVVGARGV (KRAS G12R)
YVVIGARGW

SEQ ID NO: 32810 - protein, 9 aa, synthetic construct
  source 1..9: note = Seed: LVVVGARGV (KRAS G12R)
YVVIGARGY

SEQ ID NO: 32811 - protein, 9 aa, synthetic construct
  source 1..9: note = Seed: LVVVGARGV (KRAS G12R)
YVVIGCRGA

SEQ ID NO: 32812 - protein, 9 aa, synthetic construct
  source 1..9: note = Seed: LVVVGARGV (KRAS G12R)
YVVIGCRGI

SEQ ID NO: 32813 - protein, 9 aa, synthetic construct
  source 1..9: note = Seed: LVVVGARGV (KRAS G12R)
YVVIGCRGL

SEQ ID NO: 32814 - protein, 9 aa, synthetic construct
  source 1..9: note = Seed: LVVVGARGV (KRAS G12R)
YVVIGCRGM

SEQ ID NO: 32815 - protein, 9 aa, synthetic construct
  source 1..9: note = Seed: LVVVGARGV (KRAS G12R)
YVVIGCRGT

SEQ ID NO: 32816 - protein, 9 aa, synthetic construct
  source 1..9: note = Seed: LVVVGARGV (KRAS G12R)
YVVIGCRGV

SEQ ID NO: 32817 - protein, 9 aa, synthetic construct
  source 1..9: note = Seed: LVVVGARGV (KRAS G12R)
YVVIGDRGA

SEQ ID NO: 32818 - protein, 9 aa, synthetic construct
  source 1..9: note = Seed: LVVVGARGV (KRAS G12R)
YVVIGDRGI

SEQ ID NO: 32819 - protein, 9 aa, synthetic construct
  source 1..9: note = Seed: LVVVGARGV (KRAS G12R)
YVVIGDRGL

SEQ ID NO: 32820 - protein, 9 aa, synthetic construct
  source 1..9: note = Seed: LVVVGARGV (KRAS G12R)
YVVIGDRGV

SEQ ID NO: 32821 - protein, 9 aa, synthetic construct
  source 1..9: note = Seed: LVVVGARGV (KRAS G12R)
YVVIGERGA

SEQ ID NO: 32822 - protein, 9 aa, synthetic construct
  source 1..9: note = Seed: LVVVGARGV (KRAS G12R)
YVVIGERGI

SEQ ID NO: 32823 - protein, 9 aa, synthetic construct
  source 1..9: note = Seed: LVVVGARGV (KRAS G12R)
YVVIGERGL

SEQ ID NO: 32824 - protein, 9 aa, synthetic construct
  source 1..9: note = Seed: LVVVGARGV (KRAS G12R)
YVVIGERGM

SEQ ID NO: 32825 - protein, 9 aa, synthetic construct
  source 1..9: note = Seed: LVVVGARGV (KRAS G12R)
YVVIGERGV

SEQ ID NO: 32826 - protein, 9 aa, synthetic construct
  source 1..9: note = Seed: LVVVGARGV (KRAS G12R)
YVVIGFRGA

SEQ ID NO: 32827 - protein, 9 aa, synthetic construct
  source 1..9: note = Seed: LVVVGARGV (KRAS G12R)
YVVIGFRGF

SEQ ID NO: 32828 - protein, 9 aa, synthetic construct
  source 1..9: note = Seed: LVVVGARGV (KRAS G12R)
YVVIGFRGI

SEQ ID NO: 32829 - protein, 9 aa, synthetic construct
  source 1..9: note = Seed: LVVVGARGV (KRAS G12R)
YVVIGFRGL

SEQ ID NO: 32830 - protein, 9 aa, synthetic construct
  source 1..9: note = Seed: LVVVGARGV (KRAS G12R)
YVVIGFRGM

SEQ ID NO: 32831 - protein, 9 aa, synthetic construct
  source 1..9: note = Seed: LVVVGARGV (KRAS G12R)
YVVIGFRGV

SEQ ID NO: 32832 - protein, 9 aa, synthetic construct
  source 1..9: note = Seed: LVVVGARGV (KRAS G12R)
YVVIGGRGA

SEQ ID NO: 32833 - protein, 9 aa, synthetic construct
  source 1..9: note = Seed: LVVVGARGV (KRAS G12R)
YVVIGGRGC

SEQ ID NO: 32834 - protein, 9 aa, synthetic construct
  source 1..9: note = Seed: LVVVGARGV (KRAS G12R)
YVVIGGRGE

SEQ ID NO: 32835 - protein, 9 aa, synthetic construct
  source 1..9: note = Seed: LVVVGARGV (KRAS G12R)
YVVIGGRGF

SEQ ID NO: 32836 - protein, 9 aa, synthetic construct
  source 1..9: note = Seed: LVVVGARGV (KRAS G12R)
YVVIGGRGG

SEQ ID NO: 32837 - protein, 9 aa, synthetic construct
  source 1..9: note = Seed: LVVVGARGV (KRAS G12R)
YVVIGGRGH

SEQ ID NO: 32838 - protein, 9 aa, synthetic construct
  source 1..9: note = Seed: LVVVGARGV (KRAS G12R)
YVVIGGRGI

SEQ ID NO: 32839 - protein, 9 aa, synthetic construct
  source 1..9: note = Seed: LVVVGARGV (KRAS G12R)
YVVIGGRGK

SEQ ID NO: 32840 - protein, 9 aa, synthetic construct
  source 1..9: note = Seed: LVVVGARGV (KRAS G12R)
YVVIGGRGM

SEQ ID NO: 32841 - protein, 9 aa, synthetic construct
  source 1..9: note = Seed: LVVVGARGV (KRAS G12R)
YVVIGGRGN

SEQ ID NO: 32842 - protein, 9 aa, synthetic construct
  source 1..9: note = Seed: LVVVGARGV (KRAS G12R)
YVVIGGRGP

SEQ ID NO: 32843 - protein, 9 aa, synthetic construct
  source 1..9: note = Seed: LVVVGARGV (KRAS G12R)
YVVIGGRGQ

SEQ ID NO: 32844 - protein, 9 aa, synthetic construct
  source 1..9: note = Seed: LVVVGARGV (KRAS G12R)
YVVIGGRGR

SEQ ID NO: 32845 - protein, 9 aa, synthetic construct
  source 1..9: note = Seed: LVVVGARGV (KRAS G12R)
YVVIGGRGS

SEQ ID NO: 32846 - protein, 9 aa, synthetic construct
  source 1..9: note = Seed: LVVVGARGV (KRAS G12R)
YVVIGGRGT

SEQ ID NO: 32847 - protein, 9 aa, synthetic construct
  source 1..9: note = Seed: LVVVGARGV (KRAS G12R)
YVVIGGRGW

SEQ ID NO: 32848 - protein, 9 aa, synthetic construct
  source 1..9: note = Seed: LVVVGARGV (KRAS G12R)
YVVIGGRGY

SEQ ID NO: 32849 - protein, 9 aa, synthetic construct
  source 1..9: note = Seed: LVVVGARGV (KRAS G12R)
YVVIGHRGA

SEQ ID NO: 32850 - protein, 9 aa, synthetic construct
  source 1..9: note = Seed: LVVVGARGV (KRAS G12R)
YVVIGHRGF

SEQ ID NO: 32851 - protein, 9 aa, synthetic construct
  source 1..9: note = Seed: LVVVGARGV (KRAS G12R)
YVVIGHRGI

SEQ ID NO: 32852 - protein, 9 aa, synthetic construct
  source 1..9: note = Seed: LVVVGARGV (KRAS G12R)
YVVIGHRGL

SEQ ID NO: 32853 - protein, 9 aa, synthetic construct
  source 1..9: note = Seed: LVVVGARGV (KRAS G12R)
YVVIGHRGM

SEQ ID NO: 32854 - protein, 9 aa, synthetic construct
  source 1..9: note = Seed: LVVVGARGV (KRAS G12R)
YVVIGHRGQ

SEQ ID NO: 32855 - protein, 9 aa, synthetic construct
  source 1..9: note = Seed: LVVVGARGV (KRAS G12R)
YVVIGHRGR

SEQ ID NO: 32856 - protein, 9 aa, synthetic construct
  source 1..9: note = Seed: LVVVGARGV (KRAS G12R)
YVVIGHRGS

SEQ ID NO: 32857 - protein, 9 aa, synthetic construct
  source 1..9: note = Seed: LVVVGARGV (KRAS G12R)
YVVIGHRGV

SEQ ID NO: 32858 - protein, 9 aa, synthetic construct
  source 1..9: note = Seed: LVVVGARGV (KRAS G12R)
YVVIGHRGY

SEQ ID NO: 32859 - protein, 9 aa, synthetic construct
  source 1..9: note = Seed: LVVVGARGV (KRAS G12R)
YVVIGIRGA

SEQ ID NO: 32860 - protein, 9 aa, synthetic construct
  source 1..9: note = Seed: LVVVGARGV (KRAS G12R)
YVVIGIRGC

SEQ ID NO: 32861 - protein, 9 aa, synthetic construct
  source 1..9: note = Seed: LVVVGARGV (KRAS G12R)
YVVIGIRGD

SEQ ID NO: 32862 - protein, 9 aa, synthetic construct
  source 1..9: note = Seed: LVVVGARGV (KRAS G12R)
YVVIGIRGE

SEQ ID NO: 32863 - protein, 9 aa, synthetic construct
  source 1..9: note = Seed: LVVVGARGV (KRAS G12R)
YVVIGIRGF

SEQ ID NO: 32864 - protein, 9 aa, synthetic construct
  source 1..9: note = Seed: LVVVGARGV (KRAS G12R)
YVVIGIRGG

SEQ ID NO: 32865 - protein, 9 aa, synthetic construct
  source 1..9: note = Seed: LVVVGARGV (KRAS G12R)
YVVIGIRGH

SEQ ID NO: 32866 - protein, 9 aa, synthetic construct
  source 1..9: note = Seed: LVVVGARGV (KRAS G12R)
YVVIGIRGI

SEQ ID NO: 32867 - protein, 9 aa, synthetic construct
  source 1..9: note = Seed: LVVVGARGV (KRAS G12R)
YVVIGIRGL

SEQ ID NO: 32868 - protein, 9 aa, synthetic construct
  source 1..9: note = Seed: LVVVGARGV (KRAS G12R)
YVVIGIRGM

SEQ ID NO: 32869 - protein, 9 aa, synthetic construct
  source 1..9: note = Seed: LVVVGARGV (KRAS G12R)
YVVIGIRGN

SEQ ID NO: 32870 - protein, 9 aa, synthetic construct
  source 1..9: note = Seed: LVVVGARGV (KRAS G12R)
YVVIGIRGP

SEQ ID NO: 32871 - protein, 9 aa, synthetic construct
  source 1..9: note = Seed: LVVVGARGV (KRAS G12R)
YVVIGIRGQ

SEQ ID NO: 32872 - protein, 9 aa, synthetic construct
  source 1..9: note = Seed: LVVVGARGV (KRAS G12R)
YVVIGIRGR

SEQ ID NO: 32873 - protein, 9 aa, synthetic construct
  source 1..9: note = Seed: LVVVGARGV (KRAS G12R)
YVVIGIRGS

SEQ ID NO: 32874 - protein, 9 aa, synthetic construct
  source 1..9: note = Seed: LVVVGARGV (KRAS G12R)
YVVIGIRGT

SEQ ID NO: 32875 - protein, 9 aa, synthetic construct
  source 1..9: note = Seed: LVVVGARGV (KRAS G12R)
YVVIGIRGV

SEQ ID NO: 32876 - protein, 9 aa, synthetic construct
  source 1..9: note = Seed: LVVVGARGV (KRAS G12R)
YVVIGIRGY

SEQ ID NO: 32877 - protein, 9 aa, synthetic construct
  source 1..9: note = Seed: LVVVGARGV (KRAS G12R)
YVVIGKRGA

SEQ ID NO: 32878 - protein, 9 aa, synthetic construct
  source 1..9: note = Seed: LVVVGARGV (KRAS G12R)
YVVIGKRGC

SEQ ID NO: 32879 - protein, 9 aa, synthetic construct
  source 1..9: note = Seed: LVVVGARGV (KRAS G12R)
YVVIGKRGF

SEQ ID NO: 32880 - protein, 9 aa, synthetic construct
  source 1..9: note = Seed: LVVVGARGV (KRAS G12R)
YVVIGKRGG

SEQ ID NO: 32881 - protein, 9 aa, synthetic construct
  source 1..9: note = Seed: LVVVGARGV (KRAS G12R)
YVVIGKRGH

SEQ ID NO: 32882 - protein, 9 aa, synthetic construct
  source 1..9: note = Seed: LVVVGARGV (KRAS G12R)
YVVIGKRGI

SEQ ID NO: 32883 - protein, 9 aa, synthetic construct
  source 1..9: note = Seed: LVVVGARGV (KRAS G12R)
YVVIGKRGK

SEQ ID NO: 32884 - protein, 9 aa, synthetic construct
  source 1..9: note = Seed: LVVVGARGV (KRAS G12R)
YVVIGKRGL

SEQ ID NO: 32885 - protein, 9 aa, synthetic construct
  source 1..9: note = Seed: LVVVGARGV (KRAS G12R)
YVVIGKRGM

SEQ ID NO: 32886 - protein, 9 aa, synthetic construct
  source 1..9: note = Seed: LVVVGARGV (KRAS G12R)
YVVIGKRGN

SEQ ID NO: 32887 - protein, 9 aa, synthetic construct
  source 1..9: note = Seed: LVVVGARGV (KRAS G12R)
YVVIGKRGP

SEQ ID NO: 32888 - protein, 9 aa, synthetic construct
  source 1..9: note = Seed: LVVVGARGV (KRAS G12R)
YVVIGKRGQ

SEQ ID NO: 32889 - protein, 9 aa, synthetic construct
  source 1..9: note = Seed: LVVVGARGV (KRAS G12R)
YVVIGKRGR

SEQ ID NO: 32890 - protein, 9 aa, synthetic construct
  source 1..9: note = Seed: LVVVGARGV (KRAS G12R)
YVVIGKRGS

SEQ ID NO: 32891 - protein, 9 aa, synthetic construct
  source 1..9: note = Seed: LVVVGARGV (KRAS G12R)
YVVIGKRGT

SEQ ID NO: 32892 - protein, 9 aa, synthetic construct
  source 1..9: note = Seed: LVVVGARGV (KRAS G12R)
YVVIGKRGV

SEQ ID NO: 32893 - protein, 9 aa, synthetic construct
  source 1..9: note = Seed: LVVVGARGV (KRAS G12R)
YVVIGKRGW

SEQ ID NO: 32894 - protein, 9 aa, synthetic construct
  source 1..9: note = Seed: LVVVGARGV (KRAS G12R)
YVVIGKRGY

SEQ ID NO: 32895 - protein, 9 aa, synthetic construct
  source 1..9: note = Seed: LVVVGARGV (KRAS G12R)
YVVIGLRGA

SEQ ID NO: 32896 - protein, 9 aa, synthetic construct
  source 1..9: note = Seed: LVVVGARGV (KRAS G12R)
YVVIGLRGF

SEQ ID NO: 32897 - protein, 9 aa, synthetic construct
  source 1..9: note = Seed: LVVVGARGV (KRAS G12R)
YVVIGLRGG

SEQ ID NO: 32898 - protein, 9 aa, synthetic construct
  source 1..9: note = Seed: LVVVGARGV (KRAS G12R)
YVVIGLRGH

SEQ ID NO: 32899 - protein, 9 aa, synthetic construct
  source 1..9: note = Seed: LVVVGARGV (KRAS G12R)
YVVIGLRGI

SEQ ID NO: 32900 - protein, 9 aa, synthetic construct
  source 1..9: note = Seed: LVVVGARGV (KRAS G12R)
YVVIGLRGL

SEQ ID NO: 32901 - protein, 9 aa, synthetic construct
  source 1..9: note = Seed: LVVVGARGV (KRAS G12R)
YVVIGLRGM

SEQ ID NO: 32902 - protein, 9 aa, synthetic construct
  source 1..9: note = Seed: LVVVGARGV (KRAS G12R)
YVVIGLRGN

SEQ ID NO: 32903 - protein, 9 aa, synthetic construct
  source 1..9: note = Seed: LVVVGARGV (KRAS G12R)
YVVIGLRGQ

SEQ ID NO: 32904 - protein, 9 aa, synthetic construct
  source 1..9: note = Seed: LVVVGARGV (KRAS G12R)
YVVIGLRGR

SEQ ID NO: 32905 - protein, 9 aa, synthetic construct
  source 1..9: note = Seed: LVVVGARGV (KRAS G12R)
YVVIGLRGS

SEQ ID NO: 32906 - protein, 9 aa, synthetic construct
  source 1..9: note = Seed: LVVVGARGV (KRAS G12R)
YVVIGLRGT

SEQ ID NO: 32907 - protein, 9 aa, synthetic construct
  source 1..9: note = Seed: LVVVGARGV (KRAS G12R)
YVVIGLRGV

SEQ ID NO: 32908 - protein, 9 aa, synthetic construct
  source 1..9: note = Seed: LVVVGARGV (KRAS G12R)
YVVIGLRGY

SEQ ID NO: 32909 - protein, 9 aa, synthetic construct
  source 1..9: note = Seed: LVVVGARGV (KRAS G12R)
YVVIGMRGA

SEQ ID NO: 32910 - protein, 9 aa, synthetic construct
  source 1..9: note = Seed: LVVVGARGV (KRAS G12R)
YVVIGMRGF

SEQ ID NO: 32911 - protein, 9 aa, synthetic construct
  source 1..9: note = Seed: LVVVGARGV (KRAS G12R)
YVVIGMRGG

SEQ ID NO: 32912 - protein, 9 aa, synthetic construct
  source 1..9: note = Seed: LVVVGARGV (KRAS G12R)
YVVIGMRGH

SEQ ID NO: 32913 - protein, 9 aa, synthetic construct
  source 1..9: note = Seed: LVVVGARGV (KRAS G12R)
YVVIGMRGI

SEQ ID NO: 32914 - protein, 9 aa, synthetic construct
  source 1..9: note = Seed: LVVVGARGV (KRAS G12R)
YVVIGMRGL

SEQ ID NO: 32915 - protein, 9 aa, synthetic construct
  source 1..9: note = Seed: LVVVGARGV (KRAS G12R)
YVVIGMRGM

SEQ ID NO: 32916 - protein, 9 aa, synthetic construct
  source 1..9: note = Seed: LVVVGARGV (KRAS G12R)
YVVIGMRGN

SEQ ID NO: 32917 - protein, 9 aa, synthetic construct
  source 1..9: note = Seed: LVVVGARGV (KRAS G12R)
YVVIGMRGQ

SEQ ID NO: 32918 - protein, 9 aa, synthetic construct
  source 1..9: note = Seed: LVVVGARGV (KRAS G12R)
YVVIGMRGR

SEQ ID NO: 32919 - protein, 9 aa, synthetic construct
  source 1..9: note = Seed: LVVVGARGV (KRAS G12R)
YVVIGMRGS

SEQ ID NO: 32920 - protein, 9 aa, synthetic construct
  source 1..9: note = Seed: LVVVGARGV (KRAS G12R)
YVVIGMRGT

SEQ ID NO: 32921 - protein, 9 aa, synthetic construct
  source 1..9: note = Seed: LVVVGARGV (KRAS G12R)
YVVIGMRGV

SEQ ID NO: 32922 - protein, 9 aa, synthetic construct
  source 1..9: note = Seed: LVVVGARGV (KRAS G12R)
YVVIGMRGY

SEQ ID NO: 32923 - protein, 9 aa, synthetic construct
  source 1..9: note = Seed: LVVVGARGV (KRAS G12R)
YVVIGNRGA

SEQ ID NO: 32924 - protein, 9 aa, synthetic construct
  source 1..9: note = Seed: LVVVGARGV (KRAS G12R)
YVVIGNRGC

SEQ ID NO: 32925 - protein, 9 aa, synthetic construct
  source 1..9: note = Seed: LVVVGARGV (KRAS G12R)
YVVIGNRGD

SEQ ID NO: 32926 - protein, 9 aa, synthetic construct
  source 1..9: note = Seed: LVVVGARGV (KRAS G12R)
YVVIGNRGE

SEQ ID NO: 32927 - protein, 9 aa, synthetic construct
  source 1..9: note = Seed: LVVVGARGV (KRAS G12R)
YVVIGNRGF

SEQ ID NO: 32928 - protein, 9 aa, synthetic construct
  source 1..9: note = Seed: LVVVGARGV (KRAS G12R)
YVVIGNRGG

SEQ ID NO: 32929 - protein, 9 aa, synthetic construct
  source 1..9: note = Seed: LVVVGARGV (KRAS G12R)
YVVIGNRGH

SEQ ID NO: 32930 - protein, 9 aa, synthetic construct
  source 1..9: note = Seed: LVVVGARGV (KRAS G12R)
YVVIGNRGI

SEQ ID NO: 32931 - protein, 9 aa, synthetic construct
  source 1..9: note = Seed: LVVVGARGV (KRAS G12R)
YVVIGNRGL

SEQ ID NO: 32932 - protein, 9 aa, synthetic construct
  source 1..9: note = Seed: LVVVGARGV (KRAS G12R)
YVVIGNRGM

SEQ ID NO: 32933 - protein, 9 aa, synthetic construct
  source 1..9: note = Seed: LVVVGARGV (KRAS G12R)
YVVIGNRGN

SEQ ID NO: 32934 - protein, 9 aa, synthetic construct
  source 1..9: note = Seed: LVVVGARGV (KRAS G12R)
YVVIGNRGP

SEQ ID NO: 32935 - protein, 9 aa, synthetic construct
  source 1..9: note = Seed: LVVVGARGV (KRAS G12R)
YVVIGNRGQ

SEQ ID NO: 32936 - protein, 9 aa, synthetic construct
  source 1..9: note = Seed: LVVVGARGV (KRAS G12R)
YVVIGNRGR

SEQ ID NO: 32937 - protein, 9 aa, synthetic construct
  source 1..9: note = Seed: LVVVGARGV (KRAS G12R)
YVVIGNRGS

SEQ ID NO: 32938 - protein, 9 aa, synthetic construct
  source 1..9: note = Seed: LVVVGARGV (KRAS G12R)
YVVIGNRGT

SEQ ID NO: 32939 - protein, 9 aa, synthetic construct
  source 1..9: note = Seed: LVVVGARGV (KRAS G12R)
YVVIGNRGV

SEQ ID NO: 32940 - protein, 9 aa, synthetic construct
  source 1..9: note = Seed: LVVVGARGV (KRAS G12R)
YVVIGNRGW

SEQ ID NO: 32941 - protein, 9 aa, synthetic construct
  source 1..9: note = Seed: LVVVGARGV (KRAS G12R)
YVVIGNRGY

SEQ ID NO: 32942 - protein, 9 aa, synthetic construct
  source 1..9: note = Seed: LVVVGARGV (KRAS G12R)
YVVIGPRGA

SEQ ID NO: 32943 - protein, 9 aa, synthetic construct
  source 1..9: note = Seed: LVVVGARGV (KRAS G12R)
YVVIGPRGC

SEQ ID NO: 32944 - protein, 9 aa, synthetic construct
  source 1..9: note = Seed: LVVVGARGV (KRAS G12R)
YVVIGPRGD

SEQ ID NO: 32945 - protein, 9 aa, synthetic construct
  source 1..9: note = Seed: LVVVGARGV (KRAS G12R)
YVVIGPRGE

SEQ ID NO: 32946 - protein, 9 aa, synthetic construct
  source 1..9: note = Seed: LVVVGARGV (KRAS G12R)
YVVIGPRGF

SEQ ID NO: 32947 - protein, 9 aa, synthetic construct
  source 1..9: note = Seed: LVVVGARGV (KRAS G12R)
YVVIGPRGG

SEQ ID NO: 32948 - protein, 9 aa, synthetic construct
  source 1..9: note = Seed: LVVVGARGV (KRAS G12R)
YVVIGPRGH

SEQ ID NO: 32949 - protein, 9 aa, synthetic construct
  source 1..9: note = Seed: LVVVGARGV (KRAS G12R)
YVVIGPRGI

SEQ ID NO: 32950 - protein, 9 aa, synthetic construct
  source 1..9: note = Seed: LVVVGARGV (KRAS G12R)
YVVIGPRGL

SEQ ID NO: 32951 - protein, 9 aa, synthetic construct
  source 1..9: note = Seed: LVVVGARGV (KRAS G12R)
YVVIGPRGM

SEQ ID NO: 32952 - protein, 9 aa, synthetic construct
  source 1..9: note = Seed: LVVVGARGV (KRAS G12R)
YVVIGPRGN

SEQ ID NO: 32953 - protein, 9 aa, synthetic construct
  source 1..9: note = Seed: LVVVGARGV (KRAS G12R)
YVVIGPRGP

SEQ ID NO: 32954 - protein, 9 aa, synthetic construct
  source 1..9: note = Seed: LVVVGARGV (KRAS G12R)
YVVIGPRGQ

SEQ ID NO: 32955 - protein, 9 aa, synthetic construct
  source 1..9: note = Seed: LVVVGARGV (KRAS G12R)
YVVIGPRGR

SEQ ID NO: 32956 - protein, 9 aa, synthetic construct
  source 1..9: note = Seed: LVVVGARGV (KRAS G12R)
YVVIGPRGS

SEQ ID NO: 32957 - protein, 9 aa, synthetic construct
  source 1..9: note = Seed: LVVVGARGV (KRAS G12R)
YVVIGPRGT

SEQ ID NO: 32958 - protein, 9 aa, synthetic construct
  source 1..9: note = Seed: LVVVGARGV (KRAS G12R)
YVVIGPRGV

SEQ ID NO: 32959 - protein, 9 aa, synthetic construct
  source 1..9: note = Seed: LVVVGARGV (KRAS G12R)
YVVIGPRGW

SEQ ID NO: 32960 - protein, 9 aa, synthetic construct
  source 1..9: note = Seed: LVVVGARGV (KRAS G12R)
YVVIGPRGY

SEQ ID NO: 32961 - protein, 9 aa, synthetic construct
  source 1..9: note = Seed: LVVVGARGV (KRAS G12R)
YVVIGQRGA

SEQ ID NO: 32962 - protein, 9 aa, synthetic construct
  source 1..9: note = Seed: LVVVGARGV (KRAS G12R)
YVVIGQRGI

SEQ ID NO: 32963 - protein, 9 aa, synthetic construct
  source 1..9: note = Seed: LVVVGARGV (KRAS G12R)
YVVIGQRGL

SEQ ID NO: 32964 - protein, 9 aa, synthetic construct
  source 1..9: note = Seed: LVVVGARGV (KRAS G12R)
YVVIGQRGM

SEQ ID NO: 32965 - protein, 9 aa, synthetic construct
  source 1..9: note = Seed: LVVVGARGV (KRAS G12R)
YVVIGQRGT

SEQ ID NO: 32966 - protein, 9 aa, synthetic construct
  source 1..9: note = Seed: LVVVGARGV (KRAS G12R)
YVVIGQRGV

SEQ ID NO: 32967 - protein, 9 aa, synthetic construct
  source 1..9: note = Seed: LVVVGARGV (KRAS G12R)
YVVIGRRGA

SEQ ID NO: 32968 - protein, 9 aa, synthetic construct
  source 1..9: note = Seed: LVVVGARGV (KRAS G12R)
YVVIGRRGC

SEQ ID NO: 32969 - protein, 9 aa, synthetic construct
  source 1..9: note = Seed: LVVVGARGV (KRAS G12R)
YVVIGRRGD

SEQ ID NO: 32970 - protein, 9 aa, synthetic construct
  source 1..9: note = Seed: LVVVGARGV (KRAS G12R)
YVVIGRRGE

SEQ ID NO: 32971 - protein, 9 aa, synthetic construct
  source 1..9: note = Seed: LVVVGARGV (KRAS G12R)
YVVIGRRGF

SEQ ID NO: 32972 - protein, 9 aa, synthetic construct
  source 1..9: note = Seed: LVVVGARGV (KRAS G12R)
YVVIGRRGG

SEQ ID NO: 32973 - protein, 9 aa, synthetic construct
  source 1..9: note = Seed: LVVVGARGV (KRAS G12R)
YVVIGRRGH

SEQ ID NO: 32974 - protein, 9 aa, synthetic construct
  source 1..9: note = Seed: LVVVGARGV (KRAS G12R)
YVVIGRRGI

SEQ ID NO: 32975 - protein, 9 aa, synthetic construct
  source 1..9: note = Seed: LVVVGARGV (KRAS G12R)
YVVIGRRGK

SEQ ID NO: 32976 - protein, 9 aa, synthetic construct
  source 1..9: note = Seed: LVVVGARGV (KRAS G12R)
YVVIGRRGL

SEQ ID NO: 32977 - protein, 9 aa, synthetic construct
  source 1..9: note = Seed: LVVVGARGV (KRAS G12R)
YVVIGRRGM

SEQ ID NO: 32978 - protein, 9 aa, synthetic construct
  source 1..9: note = Seed: LVVVGARGV (KRAS G12R)
YVVIGRRGN

SEQ ID NO: 32979 - protein, 9 aa, synthetic construct
  source 1..9: note = Seed: LVVVGARGV (KRAS G12R)
YVVIGRRGP

SEQ ID NO: 32980 - protein, 9 aa, synthetic construct
  source 1..9: note = Seed: LVVVGARGV (KRAS G12R)
YVVIGRRGQ

SEQ ID NO: 32981 - protein, 9 aa, synthetic construct
  source 1..9: note = Seed: LVVVGARGV (KRAS G12R)
YVVIGRRGR

SEQ ID NO: 32982 - protein, 9 aa, synthetic construct
  source 1..9: note = Seed: LVVVGARGV (KRAS G12R)
YVVIGRRGS

SEQ ID NO: 32983 - protein, 9 aa, synthetic construct
  source 1..9: note = Seed: LVVVGARGV (KRAS G12R)
YVVIGRRGT

SEQ ID NO: 32984 - protein, 9 aa, synthetic construct
  source 1..9: note = Seed: LVVVGARGV (KRAS G12R)
YVVIGRRGV

SEQ ID NO: 32985 - protein, 9 aa, synthetic construct
  source 1..9: note = Seed: LVVVGARGV (KRAS G12R)
YVVIGRRGW

SEQ ID NO: 32986 - protein, 9 aa, synthetic construct
  source 1..9: note = Seed: LVVVGARGV (KRAS G12R)
YVVIGRRGY

SEQ ID NO: 32987 - protein, 9 aa, synthetic construct
  source 1..9: note = Seed: LVVVGARGV (KRAS G12R)
YVVIGSRGA

SEQ ID NO: 32988 - protein, 9 aa, synthetic construct
  source 1..9: note = Seed: LVVVGARGV (KRAS G12R)
YVVIGSRGC

SEQ ID NO: 32989 - protein, 9 aa, synthetic construct
  source 1..9: note = Seed: LVVVGARGV (KRAS G12R)
YVVIGSRGD

SEQ ID NO: 32990 - protein, 9 aa, synthetic construct
  source 1..9: note = Seed: LVVVGARGV (KRAS G12R)
YVVIGSRGE

SEQ ID NO: 32991 - protein, 9 aa, synthetic construct
  source 1..9: note = Seed: LVVVGARGV (KRAS G12R)
YVVIGSRGF

SEQ ID NO: 32992 - protein, 9 aa, synthetic construct
  source 1..9: note = Seed: LVVVGARGV (KRAS G12R)
YVVIGSRGG

SEQ ID NO: 32993 - protein, 9 aa, synthetic construct
  source 1..9: note = Seed: LVVVGARGV (KRAS G12R)
YVVIGSRGH

SEQ ID NO: 32994 - protein, 9 aa, synthetic construct
  source 1..9: note = Seed: LVVVGARGV (KRAS G12R)
YVVIGSRGI

SEQ ID NO: 32995 - protein, 9 aa, synthetic construct
  source 1..9: note = Seed: LVVVGARGV (KRAS G12R)
YVVIGSRGK

SEQ ID NO: 32996 - protein, 9 aa, synthetic construct
  source 1..9: note = Seed: LVVVGARGV (KRAS G12R)
YVVIGSRGM

SEQ ID NO: 32997 - protein, 9 aa, synthetic construct
  source 1..9: note = Seed: LVVVGARGV (KRAS G12R)
YVVIGSRGN

SEQ ID NO: 32998 - protein, 9 aa, synthetic construct
  source 1..9: note = Seed: LVVVGARGV (KRAS G12R)
YVVIGSRGP

SEQ ID NO: 32999 - protein, 9 aa, synthetic construct
  source 1..9: note = Seed: LVVVGARGV (KRAS G12R)
YVVIGSRGQ

SEQ ID NO: 33000 - protein, 9 aa, synthetic construct
  source 1..9: note = Seed: LVVVGARGV (KRAS G12R)
YVVIGSRGR

SEQ ID NO: 33001 - protein, 9 aa, synthetic construct
  source 1..9: note = Seed: LVVVGARGV (KRAS G12R)
YVVIGSRGS

SEQ ID NO: 33002 - protein, 9 aa, synthetic construct
  source 1..9: note = Seed: LVVVGARGV (KRAS G12R)
YVVIGSRGT

SEQ ID NO: 33003 - protein, 9 aa, synthetic construct
  source 1..9: note = Seed: LVVVGARGV (KRAS G12R)
YVVIGSRGW

SEQ ID NO: 33004 - protein, 9 aa, synthetic construct
  source 1..9: note = Seed: LVVVGARGV (KRAS G12R)
YVVIGSRGY

SEQ ID NO: 33005 - protein, 9 aa, synthetic construct
  source 1..9: note = Seed: LVVVGARGV (KRAS G12R)
YVVIGTRGA

SEQ ID NO: 33006 - protein, 9 aa, synthetic construct
  source 1..9: note = Seed: LVVVGARGV (KRAS G12R)
YVVIGTRGC

SEQ ID NO: 33007 - protein, 9 aa, synthetic construct
  source 1..9: note = Seed: LVVVGARGV (KRAS G12R)
YVVIGTRGD

SEQ ID NO: 33008 - protein, 9 aa, synthetic construct
  source 1..9: note = Seed: LVVVGARGV (KRAS G12R)
YVVIGTRGE

SEQ ID NO: 33009 - protein, 9 aa, synthetic construct
  source 1..9: note = Seed: LVVVGARGV (KRAS G12R)
YVVIGTRGF

SEQ ID NO: 33010 - protein, 9 aa, synthetic construct
  source 1..9: note = Seed: LVVVGARGV (KRAS G12R)
YVVIGTRGG

SEQ ID NO: 33011 - protein, 9 aa, synthetic construct
  source 1..9: note = Seed: LVVVGARGV (KRAS G12R)
YVVIGTRGH

SEQ ID NO: 33012 - protein, 9 aa, synthetic construct
  source 1..9: note = Seed: LVVVGARGV (KRAS G12R)
YVVIGTRGI

SEQ ID NO: 33013 - protein, 9 aa, synthetic construct
  source 1..9: note = Seed: LVVVGARGV (KRAS G12R)
YVVIGTRGL

SEQ ID NO: 33014 - protein, 9 aa, synthetic construct
  source 1..9: note = Seed: LVVVGARGV (KRAS G12R)
YVVIGTRGM

SEQ ID NO: 33015 - protein, 9 aa, synthetic construct
  source 1..9: note = Seed: LVVVGARGV (KRAS G12R)
YVVIGTRGN

SEQ ID NO: 33016 - protein, 9 aa, synthetic construct
  source 1..9: note = Seed: LVVVGARGV (KRAS G12R)
YVVIGTRGP

SEQ ID NO: 33017 - protein, 9 aa, synthetic construct
  source 1..9: note = Seed: LVVVGARGV (KRAS G12R)
YVVIGTRGQ

SEQ ID NO: 33018 - protein, 9 aa, synthetic construct
  source 1..9: note = Seed: LVVVGARGV (KRAS G12R)
YVVIGTRGR

SEQ ID NO: 33019 - protein, 9 aa, synthetic construct
  source 1..9: note = Seed: LVVVGARGV (KRAS G12R)
YVVIGTRGS

SEQ ID NO: 33020 - protein, 9 aa, synthetic construct
  source 1..9: note = Seed: LVVVGARGV (KRAS G12R)
YVVIGTRGT

SEQ ID NO: 33021 - protein, 9 aa, synthetic construct
  source 1..9: note = Seed: LVVVGARGV (KRAS G12R)
YVVIGTRGV

SEQ ID NO: 33022 - protein, 9 aa, synthetic construct
  source 1..9: note = Seed: LVVVGARGV (KRAS G12R)
YVVIGTRGW

SEQ ID NO: 33023 - protein, 9 aa, synthetic construct
  source 1..9: note = Seed: LVVVGARGV (KRAS G12R)
YVVIGTRGY

SEQ ID NO: 33024 - protein, 9 aa, synthetic construct
  source 1..9: note = Seed: LVVVGARGV (KRAS G12R)
YVVIGVRGA

SEQ ID NO: 33025 - protein, 9 aa, synthetic construct
  source 1..9: note = Seed: LVVVGARGV (KRAS G12R)
YVVIGVRGC

SEQ ID NO: 33026 - protein, 9 aa, synthetic construct
  source 1..9: note = Seed: LVVVGARGV (KRAS G12R)
YVVIGVRGD

SEQ ID NO: 33027 - protein, 9 aa, synthetic construct
  source 1..9: note = Seed: LVVVGARGV (KRAS G12R)
YVVIGVRGE

SEQ ID NO: 33028 - protein, 9 aa, synthetic construct
  source 1..9: note = Seed: LVVVGARGV (KRAS G12R)
YVVIGVRGF

SEQ ID NO: 33029 - protein, 9 aa, synthetic construct
  source 1..9: note = Seed: LVVVGARGV (KRAS G12R)
YVVIGVRGG

SEQ ID NO: 33030 - protein, 9 aa, synthetic construct
  source 1..9: note = Seed: LVVVGARGV (KRAS G12R)
YVVIGVRGH

SEQ ID NO: 33031 - protein, 9 aa, synthetic construct
  source 1..9: note = Seed: LVVVGARGV (KRAS G12R)
YVVIGVRGI

SEQ ID NO: 33032 - protein, 9 aa, synthetic construct
  source 1..9: note = Seed: LVVVGARGV (KRAS G12R)
YVVIGVRGK

SEQ ID NO: 33033 - protein, 9 aa, synthetic construct
  source 1..9: note = Seed: LVVVGARGV (KRAS G12R)
YVVIGVRGL

SEQ ID NO: 33034 - protein, 9 aa, synthetic construct
  source 1..9: note = Seed: LVVVGARGV (KRAS G12R)
YVVIGVRGM

SEQ ID NO: 33035 - protein, 9 aa, synthetic construct
  source 1..9: note = Seed: LVVVGARGV (KRAS G12R)
YVVIGVRGN

SEQ ID NO: 33036 - protein, 9 aa, synthetic construct
  source 1..9: note = Seed: LVVVGARGV (KRAS G12R)
YVVIGVRGP

SEQ ID NO: 33037 - protein, 9 aa, synthetic construct
  source 1..9: note = Seed: LVVVGARGV (KRAS G12R)
YVVIGVRGQ

SEQ ID NO: 33038 - protein, 9 aa, synthetic construct
  source 1..9: note = Seed: LVVVGARGV (KRAS G12R)
YVVIGVRGR

SEQ ID NO: 33039 - protein, 9 aa, synthetic construct
  source 1..9: note = Seed: LVVVGARGV (KRAS G12R)
YVVIGVRGS

SEQ ID NO: 33040 - protein, 9 aa, synthetic construct
  source 1..9: note = Seed: LVVVGARGV (KRAS G12R)
YVVIGVRGT

SEQ ID NO: 33041 - protein, 9 aa, synthetic construct
  source 1..9: note = Seed: LVVVGARGV (KRAS G12R)
YVVIGVRGV

SEQ ID NO: 33042 - protein, 9 aa, synthetic construct
  source 1..9: note = Seed: LVVVGARGV (KRAS G12R)
YVVIGVRGY

SEQ ID NO: 33043 - protein, 9 aa, synthetic construct
  source 1..9: note = Seed: LVVVGARGV (KRAS G12R)
YVVIGWRGA

SEQ ID NO: 33044 - protein, 9 aa, synthetic construct
  source 1..9: note = Seed: LVVVGARGV (KRAS G12R)
YVVIGWRGI

SEQ ID NO: 33045 - protein, 9 aa, synthetic construct
  source 1..9: note = Seed: LVVVGARGV (KRAS G12R)
YVVIGWRGL

SEQ ID NO: 33046 - protein, 9 aa, synthetic construct
  source 1..9: note = Seed: LVVVGARGV (KRAS G12R)
YVVIGWRGM

SEQ ID NO: 33047 - protein, 9 aa, synthetic construct
  source 1..9: note = Seed: LVVVGARGV (KRAS G12R)
YVVIGWRGV

SEQ ID NO: 33048 - protein, 9 aa, synthetic construct
  source 1..9: note = Seed: LVVVGARGV (KRAS G12R)
YVVIGYRGA

SEQ ID NO: 33049 - protein, 9 aa, synthetic construct
  source 1..9: note = Seed: LVVVGARGV (KRAS G12R)
YVVIGYRGI

SEQ ID NO: 33050 - protein, 9 aa, synthetic construct
  source 1..9: note = Seed: LVVVGARGV (KRAS G12R)
YVVIGYRGL

SEQ ID NO: 33051 - protein, 9 aa, synthetic construct
  source 1..9: note = Seed: LVVVGARGV (KRAS G12R)
YVVIGYRGM

SEQ ID NO: 33052 - protein, 9 aa, synthetic construct
  source 1..9: note = Seed: LVVVGARGV (KRAS G12R)
YVVIGYRGV

SEQ ID NO: 33053 - protein, 9 aa, synthetic construct
  source 1..9: note = Seed: LVVVGARGV (KRAS G12R)
YVVKGARGF

SEQ ID NO: 33054 - protein, 9 aa, synthetic construct
  source 1..9: note = Seed: LVVVGARGV (KRAS G12R)
YVVKGARGI

SEQ ID NO: 33055 - protein, 9 aa, synthetic construct
  source 1..9: note = Seed: LVVVGARGV (KRAS G12R)
YVVKGARGL

SEQ ID NO: 33056 - protein, 9 aa, synthetic construct
  source 1..9: note = Seed: LVVVGARGV (KRAS G12R)
YVVKGARGM

SEQ ID NO: 33057 - protein, 9 aa, synthetic construct
  source 1..9: note = Seed: LVVVGARGV (KRAS G12R)
YVVKGARGR

SEQ ID NO: 33058 - protein, 9 aa, synthetic construct
  source 1..9: note = Seed: LVVVGARGV (KRAS G12R)
YVVKGARGV

SEQ ID NO: 33059 - protein, 9 aa, synthetic construct
  source 1..9: note = Seed: LVVVGARGV (KRAS G12R)
YVVKGGRGL

SEQ ID NO: 33060 - protein, 9 aa, synthetic construct
  source 1..9: note = Seed: LVVVGARGV (KRAS G12R)
YVVKGHRGA

SEQ ID NO: 33061 - protein, 9 aa, synthetic construct
  source 1..9: note = Seed: LVVVGARGV (KRAS G12R)
YVVKGHRGY

SEQ ID NO: 33062 - protein, 9 aa, synthetic construct
  source 1..9: note = Seed: LVVVGARGV (KRAS G12R)
YVVKGIRGF

SEQ ID NO: 33063 - protein, 9 aa, synthetic construct
  source 1..9: note = Seed: LVVVGARGV (KRAS G12R)
YVVKGIRGI

SEQ ID NO: 33064 - protein, 9 aa, synthetic construct
  source 1..9: note = Seed: LVVVGARGV (KRAS G12R)
YVVKGIRGL

SEQ ID NO: 33065 - protein, 9 aa, synthetic construct
  source 1..9: note = Seed: LVVVGARGV (KRAS G12R)
YVVKGIRGR

SEQ ID NO: 33066 - protein, 9 aa, synthetic construct
  source 1..9: note = Seed: LVVVGARGV (KRAS G12R)
YVVKGKRGA

SEQ ID NO: 33067 - protein, 9 aa, synthetic construct
  source 1..9: note = Seed: LVVVGARGV (KRAS G12R)
YVVKGKRGF

SEQ ID NO: 33068 - protein, 9 aa, synthetic construct
  source 1..9: note = Seed: LVVVGARGV (KRAS G12R)
YVVKGKRGI

SEQ ID NO: 33069 - protein, 9 aa, synthetic construct
  source 1..9: note = Seed: LVVVGARGV (KRAS G12R)
YVVKGKRGL

SEQ ID NO: 33070 - protein, 9 aa, synthetic construct
  source 1..9: note = Seed: LVVVGARGV (KRAS G12R)
YVVKGKRGM

SEQ ID NO: 33071 - protein, 9 aa, synthetic construct
  source 1..9: note = Seed: LVVVGARGV (KRAS G12R)
YVVKGKRGQ

SEQ ID NO: 33072 - protein, 9 aa, synthetic construct
  source 1..9: note = Seed: LVVVGARGV (KRAS G12R)
YVVKGKRGR

SEQ ID NO: 33073 - protein, 9 aa, synthetic construct
  source 1..9: note = Seed: LVVVGARGV (KRAS G12R)
YVVKGKRGS

SEQ ID NO: 33074 - protein, 9 aa, synthetic construct
  source 1..9: note = Seed: LVVVGARGV (KRAS G12R)
YVVKGKRGV

SEQ ID NO: 33075 - protein, 9 aa, synthetic construct
  source 1..9: note = Seed: LVVVGARGV (KRAS G12R)
YVVKGKRGW

SEQ ID NO: 33076 - protein, 9 aa, synthetic construct
  source 1..9: note = Seed: LVVVGARGV (KRAS G12R)
YVVKGKRGY

SEQ ID NO: 33077 - protein, 9 aa, synthetic construct
  source 1..9: note = Seed: LVVVGARGV (KRAS G12R)
YVVKGLRGF

SEQ ID NO: 33078 - protein, 9 aa, synthetic construct
  source 1..9: note = Seed: LVVVGARGV (KRAS G12R)
YVVKGLRGR

SEQ ID NO: 33079 - protein, 9 aa, synthetic construct
  source 1..9: note = Seed: LVVVGARGV (KRAS G12R)
YVVKGMRGF

SEQ ID NO: 33080 - protein, 9 aa, synthetic construct
  source 1..9: note = Seed: LVVVGARGV (KRAS G12R)
YVVKGNRGR

SEQ ID NO: 33081 - protein, 9 aa, synthetic construct
  source 1..9: note = Seed: LVVVGARGV (KRAS G12R)
YVVKGQRGM

SEQ ID NO: 33082 - protein, 9 aa, synthetic construct
  source 1..9: note = Seed: LVVVGARGV (KRAS G12R)
YVVKGQRGR

SEQ ID NO: 33083 - protein, 9 aa, synthetic construct
  source 1..9: note = Seed: LVVVGARGV (KRAS G12R)
YVVKGRRGA

SEQ ID NO: 33084 - protein, 9 aa, synthetic construct
  source 1..9: note = Seed: LVVVGARGV (KRAS G12R)
YVVKGRRGF

SEQ ID NO: 33085 - protein, 9 aa, synthetic construct
  source 1..9: note = Seed: LVVVGARGV (KRAS G12R)
YVVKGRRGG

SEQ ID NO: 33086 - protein, 9 aa, synthetic construct
  source 1..9: note = Seed: LVVVGARGV (KRAS G12R)
YVVKGRRGH

SEQ ID NO: 33087 - protein, 9 aa, synthetic construct
  source 1..9: note = Seed: LVVVGARGV (KRAS G12R)
YVVKGRRGI

SEQ ID NO: 33088 - protein, 9 aa, synthetic construct
  source 1..9: note = Seed: LVVVGARGV (KRAS G12R)
YVVKGRRGK

SEQ ID NO: 33089 - protein, 9 aa, synthetic construct
  source 1..9: note = Seed: LVVVGARGV (KRAS G12R)
YVVKGRRGL

SEQ ID NO: 33090 - protein, 9 aa, synthetic construct
  source 1..9: note = Seed: LVVVGARGV (KRAS G12R)
YVVKGRRGM

SEQ ID NO: 33091 - protein, 9 aa, synthetic construct
  source 1..9: note = Seed: LVVVGARGV (KRAS G12R)
YVVKGRRGN

SEQ ID NO: 33092 - protein, 9 aa, synthetic construct
  source 1..9: note = Seed: LVVVGARGV (KRAS G12R)
YVVKGRRGP

SEQ ID NO: 33093 - protein, 9 aa, synthetic construct
  source 1..9: note = Seed: LVVVGARGV (KRAS G12R)
YVVKGRRGQ

SEQ ID NO: 33094 - protein, 9 aa, synthetic construct
  source 1..9: note = Seed: LVVVGARGV (KRAS G12R)
YVVKGRRGR

SEQ ID NO: 33095 - protein, 9 aa, synthetic construct
  source 1..9: note = Seed: LVVVGARGV (KRAS G12R)
YVVKGRRGS

SEQ ID NO: 33096 - protein, 9 aa, synthetic construct
  source 1..9: note = Seed: LVVVGARGV (KRAS G12R)
YVVKGRRGT

SEQ ID NO: 33097 - protein, 9 aa, synthetic construct
  source 1..9: note = Seed: LVVVGARGV (KRAS G12R)
YVVKGRRGV

SEQ ID NO: 33098 - protein, 9 aa, synthetic construct
  source 1..9: note = Seed: LVVVGARGV (KRAS G12R)
YVVKGRRGW

SEQ ID NO: 33099 - protein, 9 aa, synthetic construct
  source 1..9: note = Seed: LVVVGARGV (KRAS G12R)
YVVKGRRGY

SEQ ID NO: 33100 - protein, 9 aa, synthetic construct
  source 1..9: note = Seed: LVVVGARGV (KRAS G12R)
YVVKGSRGI

SEQ ID NO: 33101 - protein, 9 aa, synthetic construct
  source 1..9: note = Seed: LVVVGARGV (KRAS G12R)
YVVKGSRGL

SEQ ID NO: 33102 - protein, 9 aa, synthetic construct
  source 1..9: note = Seed: LVVVGARGV (KRAS G12R)
YVVKGSRGM

SEQ ID NO: 33103 - protein, 9 aa, synthetic construct
  source 1..9: note = Seed: LVVVGARGV (KRAS G12R)
YVVKGSRGR

SEQ ID NO: 33104 - protein, 9 aa, synthetic construct
  source 1..9: note = Seed: LVVVGARGV (KRAS G12R)
YVVKGSRGV

SEQ ID NO: 33105 - protein, 9 aa, synthetic construct
  source 1..9: note = Seed: LVVVGARGV (KRAS G12R)
YVVKGTRGF

SEQ ID NO: 33106 - protein, 9 aa, synthetic construct
  source 1..9: note = Seed: LVVVGARGV (KRAS G12R)
YVVKGTRGI

SEQ ID NO: 33107 - protein, 9 aa, synthetic construct
  source 1..9: note = Seed: LVVVGARGV (KRAS G12R)
YVVKGTRGM

SEQ ID NO: 33108 - protein, 9 aa, synthetic construct
  source 1..9: note = Seed: LVVVGARGV (KRAS G12R)
YVVKGTRGR

SEQ ID NO: 33109 - protein, 9 aa, synthetic construct
  source 1..9: note = Seed: LVVVGARGV (KRAS G12R)
YVVKGTRGY

SEQ ID NO: 33110 - protein, 9 aa, synthetic construct
  source 1..9: note = Seed: LVVVGARGV (KRAS G12R)
YVVKGVRGA

SEQ ID NO: 33111 - protein, 9 aa, synthetic construct
  source 1..9: note = Seed: LVVVGARGV (KRAS G12R)
YVVKGVRGF

SEQ ID NO: 33112 - protein, 9 aa, synthetic construct
  source 1..9: note = Seed: LVVVGARGV (KRAS G12R)
YVVKGVRGL

SEQ ID NO: 33113 - protein, 9 aa, synthetic construct
  source 1..9: note = Seed: LVVVGARGV (KRAS G12R)
YVVKGVRGR

SEQ ID NO: 33114 - protein, 9 aa, synthetic construct
  source 1..9: note = Seed: LVVVGARGV (KRAS G12R)
YVVKGVRGY

SEQ ID NO: 33115 - protein, 9 aa, synthetic construct
  source 1..9: note = Seed: LVVVGARGV (KRAS G12R)
YVVLGARGC

SEQ ID NO: 33116 - protein, 9 aa, synthetic construct
  source 1..9: note = Seed: LVVVGARGV (KRAS G12R)
YVVLGARGD

SEQ ID NO: 33117 - protein, 9 aa, synthetic construct
  source 1..9: note = Seed: LVVVGARGV (KRAS G12R)
YVVLGARGE

SEQ ID NO: 33118 - protein, 9 aa, synthetic construct
  source 1..9: note = Seed: LVVVGARGV (KRAS G12R)
YVVLGARGF

SEQ ID NO: 33119 - protein, 9 aa, synthetic construct
  source 1..9: note = Seed: LVVVGARGV (KRAS G12R)
YVVLGARGG

SEQ ID NO: 33120 - protein, 9 aa, synthetic construct
  source 1..9: note = Seed: LVVVGARGV (KRAS G12R)
YVVLGARGH

SEQ ID NO: 33121 - protein, 9 aa, synthetic construct
  source 1..9: note = Seed: LVVVGARGV (KRAS G12R)
YVVLGARGK

SEQ ID NO: 33122 - protein, 9 aa, synthetic construct
  source 1..9: note = Seed: LVVVGARGV (KRAS G12R)
YVVLGARGM

SEQ ID NO: 33123 - protein, 9 aa, synthetic construct
  source 1..9: note = Seed: LVVVGARGV (KRAS G12R)
YVVLGARGN

SEQ ID NO: 33124 - protein, 9 aa, synthetic construct
  source 1..9: note = Seed: LVVVGARGV (KRAS G12R)
YVVLGARGP

SEQ ID NO: 33125 - protein, 9 aa, synthetic construct
  source 1..9: note = Seed: LVVVGARGV (KRAS G12R)
YVVLGARGQ

SEQ ID NO: 33126 - protein, 9 aa, synthetic construct
  source 1..9: note = Seed: LVVVGARGV (KRAS G12R)
YVVLGARGR

SEQ ID NO: 33127 - protein, 9 aa, synthetic construct
  source 1..9: note = Seed: LVVVGARGV (KRAS G12R)
YVVLGARGS

SEQ ID NO: 33128 - protein, 9 aa, synthetic construct
  source 1..9: note = Seed: LVVVGARGV (KRAS G12R)
YVVLGARGW

SEQ ID NO: 33129 - protein, 9 aa, synthetic construct
  source 1..9: note = Seed: LVVVGARGV (KRAS G12R)
YVVLGARGY

SEQ ID NO: 33130 - protein, 9 aa, synthetic construct
  source 1..9: note = Seed: LVVVGARGV (KRAS G12R)
YVVLGCRGA

SEQ ID NO: 33131 - protein, 9 aa, synthetic construct
  source 1..9: note = Seed: LVVVGARGV (KRAS G12R)
YVVLGCRGI

SEQ ID NO: 33132 - protein, 9 aa, synthetic construct
  source 1..9: note = Seed: LVVVGARGV (KRAS G12R)
YVVLGCRGL

SEQ ID NO: 33133 - protein, 9 aa, synthetic construct
  source 1..9: note = Seed: LVVVGARGV (KRAS G12R)
YVVLGCRGM

SEQ ID NO: 33134 - protein, 9 aa, synthetic construct
  source 1..9: note = Seed: LVVVGARGV (KRAS G12R)
YVVLGCRGR

SEQ ID NO: 33135 - protein, 9 aa, synthetic construct
  source 1..9: note = Seed: LVVVGARGV (KRAS G12R)
YVVLGCRGS

SEQ ID NO: 33136 - protein, 9 aa, synthetic construct
  source 1..9: note = Seed: LVVVGARGV (KRAS G12R)
YVVLGCRGT

SEQ ID NO: 33137 - protein, 9 aa, synthetic construct
  source 1..9: note = Seed: LVVVGARGV (KRAS G12R)
YVVLGCRGV

SEQ ID NO: 33138 - protein, 9 aa, synthetic construct
  source 1..9: note = Seed: LVVVGARGV (KRAS G12R)
YVVLGDRGA

SEQ ID NO: 33139 - protein, 9 aa, synthetic construct
  source 1..9: note = Seed: LVVVGARGV (KRAS G12R)
YVVLGDRGI

SEQ ID NO: 33140 - protein, 9 aa, synthetic construct
  source 1..9: note = Seed: LVVVGARGV (KRAS G12R)
YVVLGDRGL

SEQ ID NO: 33141 - protein, 9 aa, synthetic construct
  source 1..9: note = Seed: LVVVGARGV (KRAS G12R)
YVVLGDRGM

SEQ ID NO: 33142 - protein, 9 aa, synthetic construct
  source 1..9: note = Seed: LVVVGARGV (KRAS G12R)
YVVLGDRGT

SEQ ID NO: 33143 - protein, 9 aa, synthetic construct
  source 1..9: note = Seed: LVVVGARGV (KRAS G12R)
YVVLGDRGV

SEQ ID NO: 33144 - protein, 9 aa, synthetic construct
  source 1..9: note = Seed: LVVVGARGV (KRAS G12R)
YVVLGERGA

SEQ ID NO: 33145 - protein, 9 aa, synthetic construct
  source 1..9: note = Seed: LVVVGARGV (KRAS G12R)
YVVLGERGI

SEQ ID NO: 33146 - protein, 9 aa, synthetic construct
  source 1..9: note = Seed: LVVVGARGV (KRAS G12R)
YVVLGERGL

SEQ ID NO: 33147 - protein, 9 aa, synthetic construct
  source 1..9: note = Seed: LVVVGARGV (KRAS G12R)
YVVLGERGM

SEQ ID NO: 33148 - protein, 9 aa, synthetic construct
  source 1..9: note = Seed: LVVVGARGV (KRAS G12R)
YVVLGERGT

SEQ ID NO: 33149 - protein, 9 aa, synthetic construct
  source 1..9: note = Seed: LVVVGARGV (KRAS G12R)
YVVLGERGV

SEQ ID NO: 33150 - protein, 9 aa, synthetic construct
  source 1..9: note = Seed: LVVVGARGV (KRAS G12R)
YVVLGFRGA

SEQ ID NO: 33151 - protein, 9 aa, synthetic construct
  source 1..9: note = Seed: LVVVGARGV (KRAS G12R)
YVVLGFRGI

SEQ ID NO: 33152 - protein, 9 aa, synthetic construct
  source 1..9: note = Seed: LVVVGARGV (KRAS G12R)
YVVLGFRGL

SEQ ID NO: 33153 - protein, 9 aa, synthetic construct
  source 1..9: note = Seed: LVVVGARGV (KRAS G12R)
YVVLGFRGM

SEQ ID NO: 33154 - protein, 9 aa, synthetic construct
  source 1..9: note = Seed: LVVVGARGV (KRAS G12R)
YVVLGFRGV

SEQ ID NO: 33155 - protein, 9 aa, synthetic construct
  source 1..9: note = Seed: LVVVGARGV (KRAS G12R)
YVVLGGRGC

SEQ ID NO: 33156 - protein, 9 aa, synthetic construct
  source 1..9: note = Seed: LVVVGARGV (KRAS G12R)
YVVLGGRGD

SEQ ID NO: 33157 - protein, 9 aa, synthetic construct
  source 1..9: note = Seed: LVVVGARGV (KRAS G12R)
YVVLGGRGE

SEQ ID NO: 33158 - protein, 9 aa, synthetic construct
  source 1..9: note = Seed: LVVVGARGV (KRAS G12R)
YVVLGGRGF

SEQ ID NO: 33159 - protein, 9 aa, synthetic construct
  source 1..9: note = Seed: LVVVGARGV (KRAS G12R)
YVVLGGRGG

SEQ ID NO: 33160 - protein, 9 aa, synthetic construct
  source 1..9: note = Seed: LVVVGARGV (KRAS G12R)
YVVLGGRGH

SEQ ID NO: 33161 - protein, 9 aa, synthetic construct
  source 1..9: note = Seed: LVVVGARGV (KRAS G12R)
YVVLGGRGK

SEQ ID NO: 33162 - protein, 9 aa, synthetic construct
  source 1..9: note = Seed: LVVVGARGV (KRAS G12R)
YVVLGGRGM

SEQ ID NO: 33163 - protein, 9 aa, synthetic construct
  source 1..9: note = Seed: LVVVGARGV (KRAS G12R)
YVVLGGRGN

SEQ ID NO: 33164 - protein, 9 aa, synthetic construct
  source 1..9: note = Seed: LVVVGARGV (KRAS G12R)
YVVLGGRGP

SEQ ID NO: 33165 - protein, 9 aa, synthetic construct
  source 1..9: note = Seed: LVVVGARGV (KRAS G12R)
YVVLGGRGQ

SEQ ID NO: 33166 - protein, 9 aa, synthetic construct
  source 1..9: note = Seed: LVVVGARGV (KRAS G12R)
YVVLGGRGR

SEQ ID NO: 33167 - protein, 9 aa, synthetic construct
  source 1..9: note = Seed: LVVVGARGV (KRAS G12R)
YVVLGGRGS

SEQ ID NO: 33168 - protein, 9 aa, synthetic construct
  source 1..9: note = Seed: LVVVGARGV (KRAS G12R)
YVVLGGRGT

SEQ ID NO: 33169 - protein, 9 aa, synthetic construct
  source 1..9: note = Seed: LVVVGARGV (KRAS G12R)
YVVLGGRGW

SEQ ID NO: 33170 - protein, 9 aa, synthetic construct
  source 1..9: note = Seed: LVVVGARGV (KRAS G12R)
YVVLGGRGY

SEQ ID NO: 33171 - protein, 9 aa, synthetic construct
  source 1..9: note = Seed: LVVVGARGV (KRAS G12R)
YVVLGHRGA

SEQ ID NO: 33172 - protein, 9 aa, synthetic construct
  source 1..9: note = Seed: LVVVGARGV (KRAS G12R)
YVVLGHRGF

SEQ ID NO: 33173 - protein, 9 aa, synthetic construct
  source 1..9: note = Seed: LVVVGARGV (KRAS G12R)
YVVLGHRGH

SEQ ID NO: 33174 - protein, 9 aa, synthetic construct
  source 1..9: note = Seed: LVVVGARGV (KRAS G12R)
YVVLGHRGI

SEQ ID NO: 33175 - protein, 9 aa, synthetic construct
  source 1..9: note = Seed: LVVVGARGV (KRAS G12R)
YVVLGHRGL

SEQ ID NO: 33176 - protein, 9 aa, synthetic construct
  source 1..9: note = Seed: LVVVGARGV (KRAS G12R)
YVVLGHRGM

SEQ ID NO: 33177 - protein, 9 aa, synthetic construct
  source 1..9: note = Seed: LVVVGARGV (KRAS G12R)
YVVLGHRGQ

SEQ ID NO: 33178 - protein, 9 aa, synthetic construct
  source 1..9: note = Seed: LVVVGARGV (KRAS G12R)
YVVLGHRGR

SEQ ID NO: 33179 - protein, 9 aa, synthetic construct
  source 1..9: note = Seed: LVVVGARGV (KRAS G12R)
YVVLGHRGS

SEQ ID NO: 33180 - protein, 9 aa, synthetic construct
  source 1..9: note = Seed: LVVVGARGV (KRAS G12R)
YVVLGHRGT

SEQ ID NO: 33181 - protein, 9 aa, synthetic construct
  source 1..9: note = Seed: LVVVGARGV (KRAS G12R)
YVVLGHRGV

SEQ ID NO: 33182 - protein, 9 aa, synthetic construct
  source 1..9: note = Seed: LVVVGARGV (KRAS G12R)
YVVLGHRGW

SEQ ID NO: 33183 - protein, 9 aa, synthetic construct
  source 1..9: note = Seed: LVVVGARGV (KRAS G12R)
YVVLGHRGY

SEQ ID NO: 33184 - protein, 9 aa, synthetic construct
  source 1..9: note = Seed: LVVVGARGV (KRAS G12R)
YVVLGIRGA

SEQ ID NO: 33185 - protein, 9 aa, synthetic construct
  source 1..9: note = Seed: LVVVGARGV (KRAS G12R)
YVVLGIRGC

SEQ ID NO: 33186 - protein, 9 aa, synthetic construct
  source 1..9: note = Seed: LVVVGARGV (KRAS G12R)
YVVLGIRGD

SEQ ID NO: 33187 - protein, 9 aa, synthetic construct
  source 1..9: note = Seed: LVVVGARGV (KRAS G12R)
YVVLGIRGE

SEQ ID NO: 33188 - protein, 9 aa, synthetic construct
  source 1..9: note = Seed: LVVVGARGV (KRAS G12R)
YVVLGIRGF

SEQ ID NO: 33189 - protein, 9 aa, synthetic construct
  source 1..9: note = Seed: LVVVGARGV (KRAS G12R)
YVVLGIRGG

SEQ ID NO: 33190 - protein, 9 aa, synthetic construct
  source 1..9: note = Seed: LVVVGARGV (KRAS G12R)
YVVLGIRGH

SEQ ID NO: 33191 - protein, 9 aa, synthetic construct
  source 1..9: note = Seed: LVVVGARGV (KRAS G12R)
YVVLGIRGI

SEQ ID NO: 33192 - protein, 9 aa, synthetic construct
  source 1..9: note = Seed: LVVVGARGV (KRAS G12R)
YVVLGIRGK

SEQ ID NO: 33193 - protein, 9 aa, synthetic construct
  source 1..9: note = Seed: LVVVGARGV (KRAS G12R)
YVVLGIRGL

SEQ ID NO: 33194 - protein, 9 aa, synthetic construct
  source 1..9: note = Seed: LVVVGARGV (KRAS G12R)
YVVLGIRGM

SEQ ID NO: 33195 - protein, 9 aa, synthetic construct
  source 1..9: note = Seed: LVVVGARGV (KRAS G12R)
YVVLGIRGN

SEQ ID NO: 33196 - protein, 9 aa, synthetic construct
  source 1..9: note = Seed: LVVVGARGV (KRAS G12R)
YVVLGIRGP

SEQ ID NO: 33197 - protein, 9 aa, synthetic construct
  source 1..9: note = Seed: LVVVGARGV (KRAS G12R)
YVVLGIRGQ

SEQ ID NO: 33198 - protein, 9 aa, synthetic construct
  source 1..9: note = Seed: LVVVGARGV (KRAS G12R)
YVVLGIRGR

SEQ ID NO: 33199 - protein, 9 aa, synthetic construct
  source 1..9: note = Seed: LVVVGARGV (KRAS G12R)
YVVLGIRGS

SEQ ID NO: 33200 - protein, 9 aa, synthetic construct
  source 1..9: note = Seed: LVVVGARGV (KRAS G12R)
YVVLGIRGT

SEQ ID NO: 33201 - protein, 9 aa, synthetic construct
  source 1..9: note = Seed: LVVVGARGV (KRAS G12R)
YVVLGIRGV

SEQ ID NO: 33202 - protein, 9 aa, synthetic construct
  source 1..9: note = Seed: LVVVGARGV (KRAS G12R)
YVVLGIRGY

SEQ ID NO: 33203 - protein, 9 aa, synthetic construct
  source 1..9: note = Seed: LVVVGARGV (KRAS G12R)
YVVLGKRGA

SEQ ID NO: 33204 - protein, 9 aa, synthetic construct
  source 1..9: note = Seed: LVVVGARGV (KRAS G12R)
YVVLGKRGC

SEQ ID NO: 33205 - protein, 9 aa, synthetic construct
  source 1..9: note = Seed: LVVVGARGV (KRAS G12R)
YVVLGKRGF

SEQ ID NO: 33206 - protein, 9 aa, synthetic construct
  source 1..9: note = Seed: LVVVGARGV (KRAS G12R)
YVVLGKRGG

SEQ ID NO: 33207 - protein, 9 aa, synthetic construct
  source 1..9: note = Seed: LVVVGARGV (KRAS G12R)
YVVLGKRGH

SEQ ID NO: 33208 - protein, 9 aa, synthetic construct
  source 1..9: note = Seed: LVVVGARGV (KRAS G12R)
YVVLGKRGI

SEQ ID NO: 33209 - protein, 9 aa, synthetic construct
  source 1..9: note = Seed: LVVVGARGV (KRAS G12R)
YVVLGKRGK

SEQ ID NO: 33210 - protein, 9 aa, synthetic construct
  source 1..9: note = Seed: LVVVGARGV (KRAS G12R)
YVVLGKRGL

SEQ ID NO: 33211 - protein, 9 aa, synthetic construct
  source 1..9: note = Seed: LVVVGARGV (KRAS G12R)
YVVLGKRGM

SEQ ID NO: 33212 - protein, 9 aa, synthetic construct
  source 1..9: note = Seed: LVVVGARGV (KRAS G12R)
YVVLGKRGN

SEQ ID NO: 33213 - protein, 9 aa, synthetic construct
  source 1..9: note = Seed: LVVVGARGV (KRAS G12R)
YVVLGKRGP

SEQ ID NO: 33214 - protein, 9 aa, synthetic construct
  source 1..9: note = Seed: LVVVGARGV (KRAS G12R)
YVVLGKRGQ

SEQ ID NO: 33215 - protein, 9 aa, synthetic construct
  source 1..9: note = Seed: LVVVGARGV (KRAS G12R)
YVVLGKRGR

SEQ ID NO: 33216 - protein, 9 aa, synthetic construct
  source 1..9: note = Seed: LVVVGARGV (KRAS G12R)
YVVLGKRGS

SEQ ID NO: 33217 - protein, 9 aa, synthetic construct
  source 1..9: note = Seed: LVVVGARGV (KRAS G12R)
YVVLGKRGT

SEQ ID NO: 33218 - protein, 9 aa, synthetic construct
  source 1..9: note = Seed: LVVVGARGV (KRAS G12R)
YVVLGKRGV

SEQ ID NO: 33219 - protein, 9 aa, synthetic construct
  source 1..9: note = Seed: LVVVGARGV (KRAS G12R)
YVVLGKRGW

SEQ ID NO: 33220 - protein, 9 aa, synthetic construct
  source 1..9: note = Seed: LVVVGARGV (KRAS G12R)
YVVLGKRGY

SEQ ID NO: 33221 - protein, 9 aa, synthetic construct
  source 1..9: note = Seed: LVVVGARGV (KRAS G12R)
YVVLGLRGA

SEQ ID NO: 33222 - protein, 9 aa, synthetic construct
  source 1..9: note = Seed: LVVVGARGV (KRAS G12R)
YVVLGLRGF

SEQ ID NO: 33223 - protein, 9 aa, synthetic construct
  source 1..9: note = Seed: LVVVGARGV (KRAS G12R)
YVVLGLRGG

SEQ ID NO: 33224 - protein, 9 aa, synthetic construct
  source 1..9: note = Seed: LVVVGARGV (KRAS G12R)
YVVLGLRGH

SEQ ID NO: 33225 - protein, 9 aa, synthetic construct
  source 1..9: note = Seed: LVVVGARGV (KRAS G12R)
YVVLGLRGI

SEQ ID NO: 33226 - protein, 9 aa, synthetic construct
  source 1..9: note = Seed: LVVVGARGV (KRAS G12R)
YVVLGLRGL

SEQ ID NO: 33227 - protein, 9 aa, synthetic construct
  source 1..9: note = Seed: LVVVGARGV (KRAS G12R)
YVVLGLRGM

SEQ ID NO: 33228 - protein, 9 aa, synthetic construct
  source 1..9: note = Seed: LVVVGARGV (KRAS G12R)
YVVLGLRGN

SEQ ID NO: 33229 - protein, 9 aa, synthetic construct
  source 1..9: note = Seed: LVVVGARGV (KRAS G12R)
YVVLGLRGQ

SEQ ID NO: 33230 - protein, 9 aa, synthetic construct
  source 1..9: note = Seed: LVVVGARGV (KRAS G12R)
YVVLGLRGR

SEQ ID NO: 33231 - protein, 9 aa, synthetic construct
  source 1..9: note = Seed: LVVVGARGV (KRAS G12R)
YVVLGLRGS

SEQ ID NO: 33232 - protein, 9 aa, synthetic construct
  source 1..9: note = Seed: LVVVGARGV (KRAS G12R)
YVVLGLRGT

SEQ ID NO: 33233 - protein, 9 aa, synthetic construct
  source 1..9: note = Seed: LVVVGARGV (KRAS G12R)
YVVLGLRGV

SEQ ID NO: 33234 - protein, 9 aa, synthetic construct
  source 1..9: note = Seed: LVVVGARGV (KRAS G12R)
YVVLGLRGY

SEQ ID NO: 33235 - protein, 9 aa, synthetic construct
  source 1..9: note = Seed: LVVVGARGV (KRAS G12R)
YVVLGMRGA

SEQ ID NO: 33236 - protein, 9 aa, synthetic construct
  source 1..9: note = Seed: LVVVGARGV (KRAS G12R)
YVVLGMRGF

SEQ ID NO: 33237 - protein, 9 aa, synthetic construct
  source 1..9: note = Seed: LVVVGARGV (KRAS G12R)
YVVLGMRGG

SEQ ID NO: 33238 - protein, 9 aa, synthetic construct
  source 1..9: note = Seed: LVVVGARGV (KRAS G12R)
YVVLGMRGH

SEQ ID NO: 33239 - protein, 9 aa, synthetic construct
  source 1..9: note = Seed: LVVVGARGV (KRAS G12R)
YVVLGMRGI

SEQ ID NO: 33240 - protein, 9 aa, synthetic construct
  source 1..9: note = Seed: LVVVGARGV (KRAS G12R)
YVVLGMRGL

SEQ ID NO: 33241 - protein, 9 aa, synthetic construct
  source 1..9: note = Seed: LVVVGARGV (KRAS G12R)
YVVLGMRGM

SEQ ID NO: 33242 - protein, 9 aa, synthetic construct
  source 1..9: note = Seed: LVVVGARGV (KRAS G12R)
YVVLGMRGN

SEQ ID NO: 33243 - protein, 9 aa, synthetic construct
  source 1..9: note = Seed: LVVVGARGV (KRAS G12R)
YVVLGMRGP

SEQ ID NO: 33244 - protein, 9 aa, synthetic construct
  source 1..9: note = Seed: LVVVGARGV (KRAS G12R)
YVVLGMRGQ

SEQ ID NO: 33245 - protein, 9 aa, synthetic construct
  source 1..9: note = Seed: LVVVGARGV (KRAS G12R)
YVVLGMRGR

SEQ ID NO: 33246 - protein, 9 aa, synthetic construct
  source 1..9: note = Seed: LVVVGARGV (KRAS G12R)
YVVLGMRGS

SEQ ID NO: 33247 - protein, 9 aa, synthetic construct
  source 1..9: note = Seed: LVVVGARGV (KRAS G12R)
YVVLGMRGT

SEQ ID NO: 33248 - protein, 9 aa, synthetic construct
  source 1..9: note = Seed: LVVVGARGV (KRAS G12R)
YVVLGMRGV

SEQ ID NO: 33249 - protein, 9 aa, synthetic construct
  source 1..9: note = Seed: LVVVGARGV (KRAS G12R)
YVVLGMRGY

SEQ ID NO: 33250 - protein, 9 aa, synthetic construct
  source 1..9: note = Seed: LVVVGARGV (KRAS G12R)
YVVLGNRGA

SEQ ID NO: 33251 - protein, 9 aa, synthetic construct
  source 1..9: note = Seed: LVVVGARGV (KRAS G12R)
YVVLGNRGC

SEQ ID NO: 33252 - protein, 9 aa, synthetic construct
  source 1..9: note = Seed: LVVVGARGV (KRAS G12R)
YVVLGNRGD

SEQ ID NO: 33253 - protein, 9 aa, synthetic construct
  source 1..9: note = Seed: LVVVGARGV (KRAS G12R)
YVVLGNRGE

SEQ ID NO: 33254 - protein, 9 aa, synthetic construct
  source 1..9: note = Seed: LVVVGARGV (KRAS G12R)
YVVLGNRGF

SEQ ID NO: 33255 - protein, 9 aa, synthetic construct
  source 1..9: note = Seed: LVVVGARGV (KRAS G12R)
YVVLGNRGG

SEQ ID NO: 33256 - protein, 9 aa, synthetic construct
  source 1..9: note = Seed: LVVVGARGV (KRAS G12R)
YVVLGNRGH

SEQ ID NO: 33257 - protein, 9 aa, synthetic construct
  source 1..9: note = Seed: LVVVGARGV (KRAS G12R)
YVVLGNRGI

SEQ ID NO: 33258 - protein, 9 aa, synthetic construct
  source 1..9: note = Seed: LVVVGARGV (KRAS G12R)
YVVLGNRGK

SEQ ID NO: 33259 - protein, 9 aa, synthetic construct
  source 1..9: note = Seed: LVVVGARGV (KRAS G12R)
YVVLGNRGL

SEQ ID NO: 33260 - protein, 9 aa, synthetic construct
  source 1..9: note = Seed: LVVVGARGV (KRAS G12R)
YVVLGNRGM

SEQ ID NO: 33261 - protein, 9 aa, synthetic construct
  source 1..9: note = Seed: LVVVGARGV (KRAS G12R)
YVVLGNRGN

SEQ ID NO: 33262 - protein, 9 aa, synthetic construct
  source 1..9: note = Seed: LVVVGARGV (KRAS G12R)
YVVLGNRGP

SEQ ID NO: 33263 - protein, 9 aa, synthetic construct
  source 1..9: note = Seed: LVVVGARGV (KRAS G12R)
YVVLGNRGQ

SEQ ID NO: 33264 - protein, 9 aa, synthetic construct
  source 1..9: note = Seed: LVVVGARGV (KRAS G12R)
YVVLGNRGR

SEQ ID NO: 33265 - protein, 9 aa, synthetic construct
  source 1..9: note = Seed: LVVVGARGV (KRAS G12R)
YVVLGNRGS

SEQ ID NO: 33266 - protein, 9 aa, synthetic construct
  source 1..9: note = Seed: LVVVGARGV (KRAS G12R)
YVVLGNRGT

SEQ ID NO: 33267 - protein, 9 aa, synthetic construct
  source 1..9: note = Seed: LVVVGARGV (KRAS G12R)
YVVLGNRGV

SEQ ID NO: 33268 - protein, 9 aa, synthetic construct
  source 1..9: note = Seed: LVVVGARGV (KRAS G12R)
YVVLGNRGW

SEQ ID NO: 33269 - protein, 9 aa, synthetic construct
  source 1..9: note = Seed: LVVVGARGV (KRAS G12R)
YVVLGNRGY

SEQ ID NO: 33270 - protein, 9 aa, synthetic construct
  source 1..9: note = Seed: LVVVGARGV (KRAS G12R)
YVVLGPRGA

SEQ ID NO: 33271 - protein, 9 aa, synthetic construct
  source 1..9: note = Seed: LVVVGARGV (KRAS G12R)
YVVLGPRGC

SEQ ID NO: 33272 - protein, 9 aa, synthetic construct
  source 1..9: note = Seed: LVVVGARGV (KRAS G12R)
YVVLGPRGD

SEQ ID NO: 33273 - protein, 9 aa, synthetic construct
  source 1..9: note = Seed: LVVVGARGV (KRAS G12R)
YVVLGPRGE

SEQ ID NO: 33274 - protein, 9 aa, synthetic construct
  source 1..9: note = Seed: LVVVGARGV (KRAS G12R)
YVVLGPRGF

SEQ ID NO: 33275 - protein, 9 aa, synthetic construct
  source 1..9: note = Seed: LVVVGARGV (KRAS G12R)
YVVLGPRGG

SEQ ID NO: 33276 - protein, 9 aa, synthetic construct
  source 1..9: note = Seed: LVVVGARGV (KRAS G12R)
YVVLGPRGH

SEQ ID NO: 33277 - protein, 9 aa, synthetic construct
  source 1..9: note = Seed: LVVVGARGV (KRAS G12R)
YVVLGPRGI

SEQ ID NO: 33278 - protein, 9 aa, synthetic construct
  source 1..9: note = Seed: LVVVGARGV (KRAS G12R)
YVVLGPRGK

SEQ ID NO: 33279 - protein, 9 aa, synthetic construct
  source 1..9: note = Seed: LVVVGARGV (KRAS G12R)
YVVLGPRGM

SEQ ID NO: 33280 - protein, 9 aa, synthetic construct
  source 1..9: note = Seed: LVVVGARGV (KRAS G12R)
YVVLGPRGN

SEQ ID NO: 33281 - protein, 9 aa, synthetic construct
  source 1..9: note = Seed: LVVVGARGV (KRAS G12R)
YVVLGPRGP

SEQ ID NO: 33282 - protein, 9 aa, synthetic construct
  source 1..9: note = Seed: LVVVGARGV (KRAS G12R)
YVVLGPRGQ

SEQ ID NO: 33283 - protein, 9 aa, synthetic construct
  source 1..9: note = Seed: LVVVGARGV (KRAS G12R)
YVVLGPRGR

SEQ ID NO: 33284 - protein, 9 aa, synthetic construct
  source 1..9: note = Seed: LVVVGARGV (KRAS G12R)
YVVLGPRGS

SEQ ID NO: 33285 - protein, 9 aa, synthetic construct
  source 1..9: note = Seed: LVVVGARGV (KRAS G12R)
YVVLGPRGT

SEQ ID NO: 33286 - protein, 9 aa, synthetic construct
  source 1..9: note = Seed: LVVVGARGV (KRAS G12R)
YVVLGPRGW

SEQ ID NO: 33287 - protein, 9 aa, synthetic construct
  source 1..9: note = Seed: LVVVGARGV (KRAS G12R)
YVVLGPRGY

SEQ ID NO: 33288 - protein, 9 aa, synthetic construct
  source 1..9: note = Seed: LVVVGARGV (KRAS G12R)
YVVLGQRGA

SEQ ID NO: 33289 - protein, 9 aa, synthetic construct
  source 1..9: note = Seed: LVVVGARGV (KRAS G12R)
YVVLGQRGF

SEQ ID NO: 33290 - protein, 9 aa, synthetic construct
  source 1..9: note = Seed: LVVVGARGV (KRAS G12R)
YVVLGQRGI

SEQ ID NO: 33291 - protein, 9 aa, synthetic construct
  source 1..9: note = Seed: LVVVGARGV (KRAS G12R)
YVVLGQRGL

SEQ ID NO: 33292 - protein, 9 aa, synthetic construct
  source 1..9: note = Seed: LVVVGARGV (KRAS G12R)
YVVLGQRGM

SEQ ID NO: 33293 - protein, 9 aa, synthetic construct
  source 1..9: note = Seed: LVVVGARGV (KRAS G12R)
YVVLGQRGR

SEQ ID NO: 33294 - protein, 9 aa, synthetic construct
  source 1..9: note = Seed: LVVVGARGV (KRAS G12R)
YVVLGQRGS

SEQ ID NO: 33295 - protein, 9 aa, synthetic construct
  source 1..9: note = Seed: LVVVGARGV (KRAS G12R)
YVVLGQRGT

SEQ ID NO: 33296 - protein, 9 aa, synthetic construct
  source 1..9: note = Seed: LVVVGARGV (KRAS G12R)
YVVLGQRGV

SEQ ID NO: 33297 - protein, 9 aa, synthetic construct
  source 1..9: note = Seed: LVVVGARGV (KRAS G12R)
YVVLGRRGA

SEQ ID NO: 33298 - protein, 9 aa, synthetic construct
  source 1..9: note = Seed: LVVVGARGV (KRAS G12R)
YVVLGRRGC

SEQ ID NO: 33299 - protein, 9 aa, synthetic construct
  source 1..9: note = Seed: LVVVGARGV (KRAS G12R)
YVVLGRRGD

SEQ ID NO: 33300 - protein, 9 aa, synthetic construct
  source 1..9: note = Seed: LVVVGARGV (KRAS G12R)
YVVLGRRGE

SEQ ID NO: 33301 - protein, 9 aa, synthetic construct
  source 1..9: note = Seed: LVVVGARGV (KRAS G12R)
YVVLGRRGF

SEQ ID NO: 33302 - protein, 9 aa, synthetic construct
  source 1..9: note = Seed: LVVVGARGV (KRAS G12R)
YVVLGRRGG

SEQ ID NO: 33303 - protein, 9 aa, synthetic construct
  source 1..9: note = Seed: LVVVGARGV (KRAS G12R)
YVVLGRRGH

SEQ ID NO: 33304 - protein, 9 aa, synthetic construct
  source 1..9: note = Seed: LVVVGARGV (KRAS G12R)
YVVLGRRGI

SEQ ID NO: 33305 - protein, 9 aa, synthetic construct
  source 1..9: note = Seed: LVVVGARGV (KRAS G12R)
YVVLGRRGK

SEQ ID NO: 33306 - protein, 9 aa, synthetic construct
  source 1..9: note = Seed: LVVVGARGV (KRAS G12R)
YVVLGRRGL

SEQ ID NO: 33307 - protein, 9 aa, synthetic construct
  source 1..9: note = Seed: LVVVGARGV (KRAS G12R)
YVVLGRRGM

SEQ ID NO: 33308 - protein, 9 aa, synthetic construct
  source 1..9: note = Seed: LVVVGARGV (KRAS G12R)
YVVLGRRGN

SEQ ID NO: 33309 - protein, 9 aa, synthetic construct
  source 1..9: note = Seed: LVVVGARGV (KRAS G12R)
YVVLGRRGP

SEQ ID NO: 33310 - protein, 9 aa, synthetic construct
  source 1..9: note = Seed: LVVVGARGV (KRAS G12R)
YVVLGRRGQ

SEQ ID NO: 33311 - protein, 9 aa, synthetic construct
  source 1..9: note = Seed: LVVVGARGV (KRAS G12R)
YVVLGRRGR

SEQ ID NO: 33312 - protein, 9 aa, synthetic construct
  source 1..9: note = Seed: LVVVGARGV (KRAS G12R)
YVVLGRRGS

SEQ ID NO: 33313 - protein, 9 aa, synthetic construct
  source 1..9: note = Seed: LVVVGARGV (KRAS G12R)
YVVLGRRGT

SEQ ID NO: 33314 - protein, 9 aa, synthetic construct
  source 1..9: note = Seed: LVVVGARGV (KRAS G12R)
YVVLGRRGV

SEQ ID NO: 33315 - protein, 9 aa, synthetic construct
  source 1..9: note = Seed: LVVVGARGV (KRAS G12R)
YVVLGRRGW

SEQ ID NO: 33316 - protein, 9 aa, synthetic construct
  source 1..9: note = Seed: LVVVGARGV (KRAS G12R)
YVVLGRRGY

SEQ ID NO: 33317 - protein, 9 aa, synthetic construct
  source 1..9: note = Seed: LVVVGARGV (KRAS G12R)
YVVLGSRGC

SEQ ID NO: 33318 - protein, 9 aa, synthetic construct
  source 1..9: note = Seed: LVVVGARGV (KRAS G12R)
YVVLGSRGD

SEQ ID NO: 33319 - protein, 9 aa, synthetic construct
  source 1..9: note = Seed: LVVVGARGV (KRAS G12R)
YVVLGSRGE

SEQ ID NO: 33320 - protein, 9 aa, synthetic construct
  source 1..9: note = Seed: LVVVGARGV (KRAS G12R)
YVVLGSRGF

SEQ ID NO: 33321 - protein, 9 aa, synthetic construct
  source 1..9: note = Seed: LVVVGARGV (KRAS G12R)
YVVLGSRGG

SEQ ID NO: 33322 - protein, 9 aa, synthetic construct
  source 1..9: note = Seed: LVVVGARGV (KRAS G12R)
YVVLGSRGH

SEQ ID NO: 33323 - protein, 9 aa, synthetic construct
  source 1..9: note = Seed: LVVVGARGV (KRAS G12R)
YVVLGSRGK

SEQ ID NO: 33324 - protein, 9 aa, synthetic construct
  source 1..9: note = Seed: LVVVGARGV (KRAS G12R)
YVVLGSRGM

SEQ ID NO: 33325 - protein, 9 aa, synthetic construct
  source 1..9: note = Seed: LVVVGARGV (KRAS G12R)
YVVLGSRGN

SEQ ID NO: 33326 - protein, 9 aa, synthetic construct
  source 1..9: note = Seed: LVVVGARGV (KRAS G12R)
YVVLGSRGP

SEQ ID NO: 33327 - protein, 9 aa, synthetic construct
  source 1..9: note = Seed: LVVVGARGV (KRAS G12R)
YVVLGSRGQ

SEQ ID NO: 33328 - protein, 9 aa, synthetic construct
  source 1..9: note = Seed: LVVVGARGV (KRAS G12R)
YVVLGSRGR

SEQ ID NO: 33329 - protein, 9 aa, synthetic construct
  source 1..9: note = Seed: LVVVGARGV (KRAS G12R)
YVVLGSRGS

SEQ ID NO: 33330 - protein, 9 aa, synthetic construct
  source 1..9: note = Seed: LVVVGARGV (KRAS G12R)
YVVLGSRGT

SEQ ID NO: 33331 - protein, 9 aa, synthetic construct
  source 1..9: note = Seed: LVVVGARGV (KRAS G12R)
YVVLGSRGW

SEQ ID NO: 33332 - protein, 9 aa, synthetic construct
  source 1..9: note = Seed: LVVVGARGV (KRAS G12R)
YVVLGSRGY

SEQ ID NO: 33333 - protein, 9 aa, synthetic construct
  source 1..9: note = Seed: LVVVGARGV (KRAS G12R)
YVVLGTRGA

SEQ ID NO: 33334 - protein, 9 aa, synthetic construct
  source 1..9: note = Seed: LVVVGARGV (KRAS G12R)
YVVLGTRGC

SEQ ID NO: 33335 - protein, 9 aa, synthetic construct
  source 1..9: note = Seed: LVVVGARGV (KRAS G12R)
YVVLGTRGD

SEQ ID NO: 33336 - protein, 9 aa, synthetic construct
  source 1..9: note = Seed: LVVVGARGV (KRAS G12R)
YVVLGTRGE

SEQ ID NO: 33337 - protein, 9 aa, synthetic construct
  source 1..9: note = Seed: LVVVGARGV (KRAS G12R)
YVVLGTRGF

SEQ ID NO: 33338 - protein, 9 aa, synthetic construct
  source 1..9: note = Seed: LVVVGARGV (KRAS G12R)
YVVLGTRGG

SEQ ID NO: 33339 - protein, 9 aa, synthetic construct
  source 1..9: note = Seed: LVVVGARGV (KRAS G12R)
YVVLGTRGH

SEQ ID NO: 33340 - protein, 9 aa, synthetic construct
  source 1..9: note = Seed: LVVVGARGV (KRAS G12R)
YVVLGTRGI

SEQ ID NO: 33341 - protein, 9 aa, synthetic construct
  source 1..9: note = Seed: LVVVGARGV (KRAS G12R)
YVVLGTRGK

SEQ ID NO: 33342 - protein, 9 aa, synthetic construct
  source 1..9: note = Seed: LVVVGARGV (KRAS G12R)
YVVLGTRGL

SEQ ID NO: 33343 - protein, 9 aa, synthetic construct
  source 1..9: note = Seed: LVVVGARGV (KRAS G12R)
YVVLGTRGM

SEQ ID NO: 33344 - protein, 9 aa, synthetic construct
  source 1..9: note = Seed: LVVVGARGV (KRAS G12R)
YVVLGTRGN

SEQ ID NO: 33345 - protein, 9 aa, synthetic construct
  source 1..9: note = Seed: LVVVGARGV (KRAS G12R)
YVVLGTRGP

SEQ ID NO: 33346 - protein, 9 aa, synthetic construct
  source 1..9: note = Seed: LVVVGARGV (KRAS G12R)
YVVLGTRGQ

SEQ ID NO: 33347 - protein, 9 aa, synthetic construct
  source 1..9: note = Seed: LVVVGARGV (KRAS G12R)
YVVLGTRGR

SEQ ID NO: 33348 - protein, 9 aa, synthetic construct
  source 1..9: note = Seed: LVVVGARGV (KRAS G12R)
YVVLGTRGS

SEQ ID NO: 33349 - protein, 9 aa, synthetic construct
  source 1..9: note = Seed: LVVVGARGV (KRAS G12R)
YVVLGTRGT

SEQ ID NO: 33350 - protein, 9 aa, synthetic construct
  source 1..9: note = Seed: LVVVGARGV (KRAS G12R)
YVVLGTRGV

SEQ ID NO: 33351 - protein, 9 aa, synthetic construct
  source 1..9: note = Seed: LVVVGARGV (KRAS G12R)
YVVLGTRGW

SEQ ID NO: 33352 - protein, 9 aa, synthetic construct
  source 1..9: note = Seed: LVVVGARGV (KRAS G12R)
YVVLGTRGY

SEQ ID NO: 33353 - protein, 9 aa, synthetic construct
  source 1..9: note = Seed: LVVVGARGV (KRAS G12R)
YVVLGVRGA

SEQ ID NO: 33354 - protein, 9 aa, synthetic construct
  source 1..9: note = Seed: LVVVGARGV (KRAS G12R)
YVVLGVRGC

SEQ ID NO: 33355 - protein, 9 aa, synthetic construct
  source 1..9: note = Seed: LVVVGARGV (KRAS G12R)
YVVLGVRGD

SEQ ID NO: 33356 - protein, 9 aa, synthetic construct
  source 1..9: note = Seed: LVVVGARGV (KRAS G12R)
YVVLGVRGE

SEQ ID NO: 33357 - protein, 9 aa, synthetic construct
  source 1..9: note = Seed: LVVVGARGV (KRAS G12R)
YVVLGVRGF

SEQ ID NO: 33358 - protein, 9 aa, synthetic construct
  source 1..9: note = Seed: LVVVGARGV (KRAS G12R)
YVVLGVRGG

SEQ ID NO: 33359 - protein, 9 aa, synthetic construct
  source 1..9: note = Seed: LVVVGARGV (KRAS G12R)
YVVLGVRGH

SEQ ID NO: 33360 - protein, 9 aa, synthetic construct
  source 1..9: note = Seed: LVVVGARGV (KRAS G12R)
YVVLGVRGI

SEQ ID NO: 33361 - protein, 9 aa, synthetic construct
  source 1..9: note = Seed: LVVVGARGV (KRAS G12R)
YVVLGVRGK

SEQ ID NO: 33362 - protein, 9 aa, synthetic construct
  source 1..9: note = Seed: LVVVGARGV (KRAS G12R)
YVVLGVRGL

SEQ ID NO: 33363 - protein, 9 aa, synthetic construct
  source 1..9: note = Seed: LVVVGARGV (KRAS G12R)
YVVLGVRGM

SEQ ID NO: 33364 - protein, 9 aa, synthetic construct
  source 1..9: note = Seed: LVVVGARGV (KRAS G12R)
YVVLGVRGN

SEQ ID NO: 33365 - protein, 9 aa, synthetic construct
  source 1..9: note = Seed: LVVVGARGV (KRAS G12R)
YVVLGVRGP

SEQ ID NO: 33366 - protein, 9 aa, synthetic construct
  source 1..9: note = Seed: LVVVGARGV (KRAS G12R)
YVVLGVRGQ

SEQ ID NO: 33367 - protein, 9 aa, synthetic construct
  source 1..9: note = Seed: LVVVGARGV (KRAS G12R)
YVVLGVRGR

SEQ ID NO: 33368 - protein, 9 aa, synthetic construct
  source 1..9: note = Seed: LVVVGARGV (KRAS G12R)
YVVLGVRGS

SEQ ID NO: 33369 - protein, 9 aa, synthetic construct
  source 1..9: note = Seed: LVVVGARGV (KRAS G12R)
YVVLGVRGT

SEQ ID NO: 33370 - protein, 9 aa, synthetic construct
  source 1..9: note = Seed: LVVVGARGV (KRAS G12R)
YVVLGVRGV

SEQ ID NO: 33371 - protein, 9 aa, synthetic construct
  source 1..9: note = Seed: LVVVGARGV (KRAS G12R)
YVVLGVRGW

SEQ ID NO: 33372 - protein, 9 aa, synthetic construct
  source 1..9: note = Seed: LVVVGARGV (KRAS G12R)
YVVLGVRGY

SEQ ID NO: 33373 - protein, 9 aa, synthetic construct
  source 1..9: note = Seed: LVVVGARGV (KRAS G12R)
YVVLGWRGA

SEQ ID NO: 33374 - protein, 9 aa, synthetic construct
  source 1..9: note = Seed: LVVVGARGV (KRAS G12R)
YVVLGWRGI

SEQ ID NO: 33375 - protein, 9 aa, synthetic construct
  source 1..9: note = Seed: LVVVGARGV (KRAS G12R)
YVVLGWRGL

SEQ ID NO: 33376 - protein, 9 aa, synthetic construct
  source 1..9: note = Seed: LVVVGARGV (KRAS G12R)
YVVLGWRGM

SEQ ID NO: 33377 - protein, 9 aa, synthetic construct
  source 1..9: note = Seed: LVVVGARGV (KRAS G12R)
YVVLGWRGT

SEQ ID NO: 33378 - protein, 9 aa, synthetic construct
  source 1..9: note = Seed: LVVVGARGV (KRAS G12R)
YVVLGWRGV

SEQ ID NO: 33379 - protein, 9 aa, synthetic construct
  source 1..9: note = Seed: LVVVGARGV (KRAS G12R)
YVVLGYRGA

SEQ ID NO: 33380 - protein, 9 aa, synthetic construct
  source 1..9: note = Seed: LVVVGARGV (KRAS G12R)
YVVLGYRGI

SEQ ID NO: 33381 - protein, 9 aa, synthetic construct
  source 1..9: note = Seed: LVVVGARGV (KRAS G12R)
YVVLGYRGL

SEQ ID NO: 33382 - protein, 9 aa, synthetic construct
  source 1..9: note = Seed: LVVVGARGV (KRAS G12R)
YVVLGYRGM

SEQ ID NO: 33383 - protein, 9 aa, synthetic construct
  source 1..9: note = Seed: LVVVGARGV (KRAS G12R)
YVVLGYRGV

SEQ ID NO: 33384 - protein, 9 aa, synthetic construct
  source 1..9: note = Seed: LVVVGARGV (KRAS G12R)
YVVMGARGA

SEQ ID NO: 33385 - protein, 9 aa, synthetic construct
  source 1..9: note = Seed: LVVVGARGV (KRAS G12R)
YVVMGARGC

SEQ ID NO: 33386 - protein, 9 aa, synthetic construct
  source 1..9: note = Seed: LVVVGARGV (KRAS G12R)
YVVMGARGD

SEQ ID NO: 33387 - protein, 9 aa, synthetic construct
  source 1..9: note = Seed: LVVVGARGV (KRAS G12R)
YVVMGARGE

SEQ ID NO: 33388 - protein, 9 aa, synthetic construct
  source 1..9: note = Seed: LVVVGARGV (KRAS G12R)
YVVMGARGF

SEQ ID NO: 33389 - protein, 9 aa, synthetic construct
  source 1..9: note = Seed: LVVVGARGV (KRAS G12R)
YVVMGARGG

SEQ ID NO: 33390 - protein, 9 aa, synthetic construct
  source 1..9: note = Seed: LVVVGARGV (KRAS G12R)
YVVMGARGH

SEQ ID NO: 33391 - protein, 9 aa, synthetic construct
  source 1..9: note = Seed: LVVVGARGV (KRAS G12R)
YVVMGARGK

SEQ ID NO: 33392 - protein, 9 aa, synthetic construct
  source 1..9: note = Seed: LVVVGARGV (KRAS G12R)
YVVMGARGM

SEQ ID NO: 33393 - protein, 9 aa, synthetic construct
  source 1..9: note = Seed: LVVVGARGV (KRAS G12R)
YVVMGARGN

SEQ ID NO: 33394 - protein, 9 aa, synthetic construct
  source 1..9: note = Seed: LVVVGARGV (KRAS G12R)
YVVMGARGP

SEQ ID NO: 33395 - protein, 9 aa, synthetic construct
  source 1..9: note = Seed: LVVVGARGV (KRAS G12R)
YVVMGARGQ

SEQ ID NO: 33396 - protein, 9 aa, synthetic construct
  source 1..9: note = Seed: LVVVGARGV (KRAS G12R)
YVVMGARGR

SEQ ID NO: 33397 - protein, 9 aa, synthetic construct
  source 1..9: note = Seed: LVVVGARGV (KRAS G12R)
YVVMGARGS

SEQ ID NO: 33398 - protein, 9 aa, synthetic construct
  source 1..9: note = Seed: LVVVGARGV (KRAS G12R)
YVVMGARGT

SEQ ID NO: 33399 - protein, 9 aa, synthetic construct
  source 1..9: note = Seed: LVVVGARGV (KRAS G12R)
YVVMGARGW

SEQ ID NO: 33400 - protein, 9 aa, synthetic construct
  source 1..9: note = Seed: LVVVGARGV (KRAS G12R)
YVVMGARGY

SEQ ID NO: 33401 - protein, 9 aa, synthetic construct
  source 1..9: note = Seed: LVVVGARGV (KRAS G12R)
YVVMGCRGA

SEQ ID NO: 33402 - protein, 9 aa, synthetic construct
  source 1..9: note = Seed: LVVVGARGV (KRAS G12R)
YVVMGCRGI

SEQ ID NO: 33403 - protein, 9 aa, synthetic construct
  source 1..9: note = Seed: LVVVGARGV (KRAS G12R)
YVVMGCRGL

SEQ ID NO: 33404 - protein, 9 aa, synthetic construct
  source 1..9: note = Seed: LVVVGARGV (KRAS G12R)
YVVMGCRGM

SEQ ID NO: 33405 - protein, 9 aa, synthetic construct
  source 1..9: note = Seed: LVVVGARGV (KRAS G12R)
YVVMGCRGR

SEQ ID NO: 33406 - protein, 9 aa, synthetic construct
  source 1..9: note = Seed: LVVVGARGV (KRAS G12R)
YVVMGCRGS

SEQ ID NO: 33407 - protein, 9 aa, synthetic construct
  source 1..9: note = Seed: LVVVGARGV (KRAS G12R)
YVVMGCRGT

SEQ ID NO: 33408 - protein, 9 aa, synthetic construct
  source 1..9: note = Seed: LVVVGARGV (KRAS G12R)
YVVMGCRGV

SEQ ID NO: 33409 - protein, 9 aa, synthetic construct
  source 1..9: note = Seed: LVVVGARGV (KRAS G12R)
YVVMGDRGA

SEQ ID NO: 33410 - protein, 9 aa, synthetic construct
  source 1..9: note = Seed: LVVVGARGV (KRAS G12R)
YVVMGDRGI

SEQ ID NO: 33411 - protein, 9 aa, synthetic construct
  source 1..9: note = Seed: LVVVGARGV (KRAS G12R)
YVVMGDRGL

SEQ ID NO: 33412 - protein, 9 aa, synthetic construct
  source 1..9: note = Seed: LVVVGARGV (KRAS G12R)
YVVMGDRGM

SEQ ID NO: 33413 - protein, 9 aa, synthetic construct
  source 1..9: note = Seed: LVVVGARGV (KRAS G12R)
YVVMGDRGT

SEQ ID NO: 33414 - protein, 9 aa, synthetic construct
  source 1..9: note = Seed: LVVVGARGV (KRAS G12R)
YVVMGDRGV

SEQ ID NO: 33415 - protein, 9 aa, synthetic construct
  source 1..9: note = Seed: LVVVGARGV (KRAS G12R)
YVVMGERGA

SEQ ID NO: 33416 - protein, 9 aa, synthetic construct
  source 1..9: note = Seed: LVVVGARGV (KRAS G12R)
YVVMGERGI

SEQ ID NO: 33417 - protein, 9 aa, synthetic construct
  source 1..9: note = Seed: LVVVGARGV (KRAS G12R)
YVVMGERGL

SEQ ID NO: 33418 - protein, 9 aa, synthetic construct
  source 1..9: note = Seed: LVVVGARGV (KRAS G12R)
YVVMGERGM

SEQ ID NO: 33419 - protein, 9 aa, synthetic construct
  source 1..9: note = Seed: LVVVGARGV (KRAS G12R)
YVVMGERGT

SEQ ID NO: 33420 - protein, 9 aa, synthetic construct
  source 1..9: note = Seed: LVVVGARGV (KRAS G12R)
YVVMGERGV

SEQ ID NO: 33421 - protein, 9 aa, synthetic construct
  source 1..9: note = Seed: LVVVGARGV (KRAS G12R)
YVVMGFRGA

SEQ ID NO: 33422 - protein, 9 aa, synthetic construct
  source 1..9: note = Seed: LVVVGARGV (KRAS G12R)
YVVMGFRGI

SEQ ID NO: 33423 - protein, 9 aa, synthetic construct
  source 1..9: note = Seed: LVVVGARGV (KRAS G12R)
YVVMGFRGL

SEQ ID NO: 33424 - protein, 9 aa, synthetic construct
  source 1..9: note = Seed: LVVVGARGV (KRAS G12R)
YVVMGFRGM

SEQ ID NO: 33425 - protein, 9 aa, synthetic construct
  source 1..9: note = Seed: LVVVGARGV (KRAS G12R)
YVVMGFRGS

SEQ ID NO: 33426 - protein, 9 aa, synthetic construct
  source 1..9: note = Seed: LVVVGARGV (KRAS G12R)
YVVMGFRGT

SEQ ID NO: 33427 - protein, 9 aa, synthetic construct
  source 1..9: note = Seed: LVVVGARGV (KRAS G12R)
YVVMGFRGV

SEQ ID NO: 33428 - protein, 9 aa, synthetic construct
  source 1..9: note = Seed: LVVVGARGV (KRAS G12R)
YVVMGGRGA

SEQ ID NO: 33429 - protein, 9 aa, synthetic construct
  source 1..9: note = Seed: LVVVGARGV (KRAS G12R)
YVVMGGRGC

SEQ ID NO: 33430 - protein, 9 aa, synthetic construct
  source 1..9: note = Seed: LVVVGARGV (KRAS G12R)
YVVMGGRGD

SEQ ID NO: 33431 - protein, 9 aa, synthetic construct
  source 1..9: note = Seed: LVVVGARGV (KRAS G12R)
YVVMGGRGE

SEQ ID NO: 33432 - protein, 9 aa, synthetic construct
  source 1..9: note = Seed: LVVVGARGV (KRAS G12R)
YVVMGGRGF

SEQ ID NO: 33433 - protein, 9 aa, synthetic construct
  source 1..9: note = Seed: LVVVGARGV (KRAS G12R)
YVVMGGRGG

SEQ ID NO: 33434 - protein, 9 aa, synthetic construct
  source 1..9: note = Seed: LVVVGARGV (KRAS G12R)
YVVMGGRGH

SEQ ID NO: 33435 - protein, 9 aa, synthetic construct
  source 1..9: note = Seed: LVVVGARGV (KRAS G12R)
YVVMGGRGK

SEQ ID NO: 33436 - protein, 9 aa, synthetic construct
  source 1..9: note = Seed: LVVVGARGV (KRAS G12R)
YVVMGGRGM

SEQ ID NO: 33437 - protein, 9 aa, synthetic construct
  source 1..9: note = Seed: LVVVGARGV (KRAS G12R)
YVVMGGRGN

SEQ ID NO: 33438 - protein, 9 aa, synthetic construct
  source 1..9: note = Seed: LVVVGARGV (KRAS G12R)
YVVMGGRGP

SEQ ID NO: 33439 - protein, 9 aa, synthetic construct
  source 1..9: note = Seed: LVVVGARGV (KRAS G12R)
YVVMGGRGQ

SEQ ID NO: 33440 - protein, 9 aa, synthetic construct
  source 1..9: note = Seed: LVVVGARGV (KRAS G12R)
YVVMGGRGR

SEQ ID NO: 33441 - protein, 9 aa, synthetic construct
  source 1..9: note = Seed: LVVVGARGV (KRAS G12R)
YVVMGGRGS

SEQ ID NO: 33442 - protein, 9 aa, synthetic construct
  source 1..9: note = Seed: LVVVGARGV (KRAS G12R)
YVVMGGRGT

SEQ ID NO: 33443 - protein, 9 aa, synthetic construct
  source 1..9: note = Seed: LVVVGARGV (KRAS G12R)
YVVMGGRGW

SEQ ID NO: 33444 - protein, 9 aa, synthetic construct
  source 1..9: note = Seed: LVVVGARGV (KRAS G12R)
YVVMGGRGY

SEQ ID NO: 33445 - protein, 9 aa, synthetic construct
  source 1..9: note = Seed: LVVVGARGV (KRAS G12R)
YVVMGHRGA

SEQ ID NO: 33446 - protein, 9 aa, synthetic construct
  source 1..9: note = Seed: LVVVGARGV (KRAS G12R)
YVVMGHRGF

SEQ ID NO: 33447 - protein, 9 aa, synthetic construct
  source 1..9: note = Seed: LVVVGARGV (KRAS G12R)
YVVMGHRGH

SEQ ID NO: 33448 - protein, 9 aa, synthetic construct
  source 1..9: note = Seed: LVVVGARGV (KRAS G12R)
YVVMGHRGI

SEQ ID NO: 33449 - protein, 9 aa, synthetic construct
  source 1..9: note = Seed: LVVVGARGV (KRAS G12R)
YVVMGHRGL

SEQ ID NO: 33450 - protein, 9 aa, synthetic construct
  source 1..9: note = Seed: LVVVGARGV (KRAS G12R)
YVVMGHRGM

SEQ ID NO: 33451 - protein, 9 aa, synthetic construct
  source 1..9: note = Seed: LVVVGARGV (KRAS G12R)
YVVMGHRGQ

SEQ ID NO: 33452 - protein, 9 aa, synthetic construct
  source 1..9: note = Seed: LVVVGARGV (KRAS G12R)
YVVMGHRGR

SEQ ID NO: 33453 - protein, 9 aa, synthetic construct
  source 1..9: note = Seed: LVVVGARGV (KRAS G12R)
YVVMGHRGS

SEQ ID NO: 33454 - protein, 9 aa, synthetic construct
  source 1..9: note = Seed: LVVVGARGV (KRAS G12R)
YVVMGHRGT

SEQ ID NO: 33455 - protein, 9 aa, synthetic construct
  source 1..9: note = Seed: LVVVGARGV (KRAS G12R)
YVVMGHRGV

SEQ ID NO: 33456 - protein, 9 aa, synthetic construct
  source 1..9: note = Seed: LVVVGARGV (KRAS G12R)
YVVMGHRGW

SEQ ID NO: 33457 - protein, 9 aa, synthetic construct
  source 1..9: note = Seed: LVVVGARGV (KRAS G12R)
YVVMGHRGY

SEQ ID NO: 33458 - protein, 9 aa, synthetic construct
  source 1..9: note = Seed: LVVVGARGV (KRAS G12R)
YVVMGIRGA

SEQ ID NO: 33459 - protein, 9 aa, synthetic construct
  source 1..9: note = Seed: LVVVGARGV (KRAS G12R)
YVVMGIRGC

SEQ ID NO: 33460 - protein, 9 aa, synthetic construct
  source 1..9: note = Seed: LVVVGARGV (KRAS G12R)
YVVMGIRGD

SEQ ID NO: 33461 - protein, 9 aa, synthetic construct
  source 1..9: note = Seed: LVVVGARGV (KRAS G12R)
YVVMGIRGE

SEQ ID NO: 33462 - protein, 9 aa, synthetic construct
  source 1..9: note = Seed: LVVVGARGV (KRAS G12R)
YVVMGIRGF

SEQ ID NO: 33463 - protein, 9 aa, synthetic construct
  source 1..9: note = Seed: LVVVGARGV (KRAS G12R)
YVVMGIRGG

SEQ ID NO: 33464 - protein, 9 aa, synthetic construct
  source 1..9: note = Seed: LVVVGARGV (KRAS G12R)
YVVMGIRGH

SEQ ID NO: 33465 - protein, 9 aa, synthetic construct
  source 1..9: note = Seed: LVVVGARGV (KRAS G12R)
YVVMGIRGI

SEQ ID NO: 33466 - protein, 9 aa, synthetic construct
  source 1..9: note = Seed: LVVVGARGV (KRAS G12R)
YVVMGIRGK

SEQ ID NO: 33467 - protein, 9 aa, synthetic construct
  source 1..9: note = Seed: LVVVGARGV (KRAS G12R)
YVVMGIRGL

SEQ ID NO: 33468 - protein, 9 aa, synthetic construct
  source 1..9: note = Seed: LVVVGARGV (KRAS G12R)
YVVMGIRGM

SEQ ID NO: 33469 - protein, 9 aa, synthetic construct
  source 1..9: note = Seed: LVVVGARGV (KRAS G12R)
YVVMGIRGN

SEQ ID NO: 33470 - protein, 9 aa, synthetic construct
  source 1..9: note = Seed: LVVVGARGV (KRAS G12R)
YVVMGIRGP

SEQ ID NO: 33471 - protein, 9 aa, synthetic construct
  source 1..9: note = Seed: LVVVGARGV (KRAS G12R)
YVVMGIRGQ

SEQ ID NO: 33472 - protein, 9 aa, synthetic construct
  source 1..9: note = Seed: LVVVGARGV (KRAS G12R)
YVVMGIRGR

SEQ ID NO: 33473 - protein, 9 aa, synthetic construct
  source 1..9: note = Seed: LVVVGARGV (KRAS G12R)
YVVMGIRGS

SEQ ID NO: 33474 - protein, 9 aa, synthetic construct
  source 1..9: note = Seed: LVVVGARGV (KRAS G12R)
YVVMGIRGT

SEQ ID NO: 33475 - protein, 9 aa, synthetic construct
  source 1..9: note = Seed: LVVVGARGV (KRAS G12R)
YVVMGIRGV

SEQ ID NO: 33476 - protein, 9 aa, synthetic construct
  source 1..9: note = Seed: LVVVGARGV (KRAS G12R)
YVVMGIRGW

SEQ ID NO: 33477 - protein, 9 aa, synthetic construct
  source 1..9: note = Seed: LVVVGARGV (KRAS G12R)
YVVMGIRGY

SEQ ID NO: 33478 - protein, 9 aa, synthetic construct
  source 1..9: note = Seed: LVVVGARGV (KRAS G12R)
YVVMGKRGA

SEQ ID NO: 33479 - protein, 9 aa, synthetic construct
  source 1..9: note = Seed: LVVVGARGV (KRAS G12R)
YVVMGKRGC

SEQ ID NO: 33480 - protein, 9 aa, synthetic construct
  source 1..9: note = Seed: LVVVGARGV (KRAS G12R)
YVVMGKRGF

SEQ ID NO: 33481 - protein, 9 aa, synthetic construct
  source 1..9: note = Seed: LVVVGARGV (KRAS G12R)
YVVMGKRGG

SEQ ID NO: 33482 - protein, 9 aa, synthetic construct
  source 1..9: note = Seed: LVVVGARGV (KRAS G12R)
YVVMGKRGH

SEQ ID NO: 33483 - protein, 9 aa, synthetic construct
  source 1..9: note = Seed: LVVVGARGV (KRAS G12R)
YVVMGKRGI

SEQ ID NO: 33484 - protein, 9 aa, synthetic construct
  source 1..9: note = Seed: LVVVGARGV (KRAS G12R)
YVVMGKRGK

SEQ ID NO: 33485 - protein, 9 aa, synthetic construct
  source 1..9: note = Seed: LVVVGARGV (KRAS G12R)
YVVMGKRGL

SEQ ID NO: 33486 - protein, 9 aa, synthetic construct
  source 1..9: note = Seed: LVVVGARGV (KRAS G12R)
YVVMGKRGM

SEQ ID NO: 33487 - protein, 9 aa, synthetic construct
  source 1..9: note = Seed: LVVVGARGV (KRAS G12R)
YVVMGKRGN

SEQ ID NO: 33488 - protein, 9 aa, synthetic construct
  source 1..9: note = Seed: LVVVGARGV (KRAS G12R)
YVVMGKRGP

SEQ ID NO: 33489 - protein, 9 aa, synthetic construct
  source 1..9: note = Seed: LVVVGARGV (KRAS G12R)
YVVMGKRGQ

SEQ ID NO: 33490 - protein, 9 aa, synthetic construct
  source 1..9: note = Seed: LVVVGARGV (KRAS G12R)
YVVMGKRGR

SEQ ID NO: 33491 - protein, 9 aa, synthetic construct
  source 1..9: note = Seed: LVVVGARGV (KRAS G12R)
YVVMGKRGS

SEQ ID NO: 33492 - protein, 9 aa, synthetic construct
  source 1..9: note = Seed: LVVVGARGV (KRAS G12R)
YVVMGKRGT

SEQ ID NO: 33493 - protein, 9 aa, synthetic construct
  source 1..9: note = Seed: LVVVGARGV (KRAS G12R)
YVVMGKRGV

SEQ ID NO: 33494 - protein, 9 aa, synthetic construct
  source 1..9: note = Seed: LVVVGARGV (KRAS G12R)
YVVMGKRGW

SEQ ID NO: 33495 - protein, 9 aa, synthetic construct
  source 1..9: note = Seed: LVVVGARGV (KRAS G12R)
YVVMGKRGY

SEQ ID NO: 33496 - protein, 9 aa, synthetic construct
  source 1..9: note = Seed: LVVVGARGV (KRAS G12R)
YVVMGLRGA

SEQ ID NO: 33497 - protein, 9 aa, synthetic construct
  source 1..9: note = Seed: LVVVGARGV (KRAS G12R)
YVVMGLRGD

SEQ ID NO: 33498 - protein, 9 aa, synthetic construct
  source 1..9: note = Seed: LVVVGARGV (KRAS G12R)
YVVMGLRGE

SEQ ID NO: 33499 - protein, 9 aa, synthetic construct
  source 1..9: note = Seed: LVVVGARGV (KRAS G12R)
YVVMGLRGF

SEQ ID NO: 33500 - protein, 9 aa, synthetic construct
  source 1..9: note = Seed: LVVVGARGV (KRAS G12R)
YVVMGLRGG

SEQ ID NO: 33501 - protein, 9 aa, synthetic construct
  source 1..9: note = Seed: LVVVGARGV (KRAS G12R)
YVVMGLRGH

SEQ ID NO: 33502 - protein, 9 aa, synthetic construct
  source 1..9: note = Seed: LVVVGARGV (KRAS G12R)
YVVMGLRGI

SEQ ID NO: 33503 - protein, 9 aa, synthetic construct
  source 1..9: note = Seed: LVVVGARGV (KRAS G12R)
YVVMGLRGL

SEQ ID NO: 33504 - protein, 9 aa, synthetic construct
  source 1..9: note = Seed: LVVVGARGV (KRAS G12R)
YVVMGLRGM

SEQ ID NO: 33505 - protein, 9 aa, synthetic construct
  source 1..9: note = Seed: LVVVGARGV (KRAS G12R)
YVVMGLRGN

SEQ ID NO: 33506 - protein, 9 aa, synthetic construct
  source 1..9: note = Seed: LVVVGARGV (KRAS G12R)
YVVMGLRGP

SEQ ID NO: 33507 - protein, 9 aa, synthetic construct
  source 1..9: note = Seed: LVVVGARGV (KRAS G12R)
YVVMGLRGQ

SEQ ID NO: 33508 - protein, 9 aa, synthetic construct
  source 1..9: note = Seed: LVVVGARGV (KRAS G12R)
YVVMGLRGR

SEQ ID NO: 33509 - protein, 9 aa, synthetic construct
  source 1..9: note = Seed: LVVVGARGV (KRAS G12R)
YVVMGLRGS

SEQ ID NO: 33510 - protein, 9 aa, synthetic construct
  source 1..9: note = Seed: LVVVGARGV (KRAS G12R)
YVVMGLRGT

SEQ ID NO: 33511 - protein, 9 aa, synthetic construct
  source 1..9: note = Seed: LVVVGARGV (KRAS G12R)
YVVMGLRGV

SEQ ID NO: 33512 - protein, 9 aa, synthetic construct
  source 1..9: note = Seed: LVVVGARGV (KRAS G12R)
YVVMGLRGY

SEQ ID NO: 33513 - protein, 9 aa, synthetic construct
  source 1..9: note = Seed: LVVVGARGV (KRAS G12R)
YVVMGMRGA

SEQ ID NO: 33514 - protein, 9 aa, synthetic construct
  source 1..9: note = Seed: LVVVGARGV (KRAS G12R)
YVVMGMRGF

SEQ ID NO: 33515 - protein, 9 aa, synthetic construct
  source 1..9: note = Seed: LVVVGARGV (KRAS G12R)
YVVMGMRGG

SEQ ID NO: 33516 - protein, 9 aa, synthetic construct
  source 1..9: note = Seed: LVVVGARGV (KRAS G12R)
YVVMGMRGH

SEQ ID NO: 33517 - protein, 9 aa, synthetic construct
  source 1..9: note = Seed: LVVVGARGV (KRAS G12R)
YVVMGMRGI

SEQ ID NO: 33518 - protein, 9 aa, synthetic construct
  source 1..9: note = Seed: LVVVGARGV (KRAS G12R)
YVVMGMRGL

SEQ ID NO: 33519 - protein, 9 aa, synthetic construct
  source 1..9: note = Seed: LVVVGARGV (KRAS G12R)
YVVMGMRGM

SEQ ID NO: 33520 - protein, 9 aa, synthetic construct
  source 1..9: note = Seed: LVVVGARGV (KRAS G12R)
YVVMGMRGN

SEQ ID NO: 33521 - protein, 9 aa, synthetic construct
  source 1..9: note = Seed: LVVVGARGV (KRAS G12R)
YVVMGMRGQ

SEQ ID NO: 33522 - protein, 9 aa, synthetic construct
  source 1..9: note = Seed: LVVVGARGV (KRAS G12R)
YVVMGMRGR

SEQ ID NO: 33523 - protein, 9 aa, synthetic construct
  source 1..9: note = Seed: LVVVGARGV (KRAS G12R)
YVVMGMRGS

SEQ ID NO: 33524 - protein, 9 aa, synthetic construct
  source 1..9: note = Seed: LVVVGARGV (KRAS G12R)
YVVMGMRGT

SEQ ID NO: 33525 - protein, 9 aa, synthetic construct
  source 1..9: note = Seed: LVVVGARGV (KRAS G12R)
YVVMGMRGV

SEQ ID NO: 33526 - protein, 9 aa, synthetic construct
  source 1..9: note = Seed: LVVVGARGV (KRAS G12R)
YVVMGMRGY

SEQ ID NO: 33527 - protein, 9 aa, synthetic construct
  source 1..9: note = Seed: LVVVGARGV (KRAS G12R)
YVVMGNRGA

SEQ ID NO: 33528 - protein, 9 aa, synthetic construct
  source 1..9: note = Seed: LVVVGARGV (KRAS G12R)
YVVMGNRGC

SEQ ID NO: 33529 - protein, 9 aa, synthetic construct
  source 1..9: note = Seed: LVVVGARGV (KRAS G12R)
YVVMGNRGD

SEQ ID NO: 33530 - protein, 9 aa, synthetic construct
  source 1..9: note = Seed: LVVVGARGV (KRAS G12R)
YVVMGNRGE

SEQ ID NO: 33531 - protein, 9 aa, synthetic construct
  source 1..9: note = Seed: LVVVGARGV (KRAS G12R)
YVVMGNRGF

SEQ ID NO: 33532 - protein, 9 aa, synthetic construct
  source 1..9: note = Seed: LVVVGARGV (KRAS G12R)
YVVMGNRGG

SEQ ID NO: 33533 - protein, 9 aa, synthetic construct
  source 1..9: note = Seed: LVVVGARGV (KRAS G12R)
YVVMGNRGH

SEQ ID NO: 33534 - protein, 9 aa, synthetic construct
  source 1..9: note = Seed: LVVVGARGV (KRAS G12R)
YVVMGNRGI

SEQ ID NO: 33535 - protein, 9 aa, synthetic construct
  source 1..9: note = Seed: LVVVGARGV (KRAS G12R)
YVVMGNRGK

SEQ ID NO: 33536 - protein, 9 aa, synthetic construct
  source 1..9: note = Seed: LVVVGARGV (KRAS G12R)
YVVMGNRGL

SEQ ID NO: 33537 - protein, 9 aa, synthetic construct
  source 1..9: note = Seed: LVVVGARGV (KRAS G12R)
YVVMGNRGM

SEQ ID NO: 33538 - protein, 9 aa, synthetic construct
  source 1..9: note = Seed: LVVVGARGV (KRAS G12R)
YVVMGNRGN

SEQ ID NO: 33539 - protein, 9 aa, synthetic construct
  source 1..9: note = Seed: LVVVGARGV (KRAS G12R)
YVVMGNRGP

SEQ ID NO: 33540 - protein, 9 aa, synthetic construct
  source 1..9: note = Seed: LVVVGARGV (KRAS G12R)
YVVMGNRGQ

SEQ ID NO: 33541 - protein, 9 aa, synthetic construct
  source 1..9: note = Seed: LVVVGARGV (KRAS G12R)
YVVMGNRGR

SEQ ID NO: 33542 - protein, 9 aa, synthetic construct
  source 1..9: note = Seed: LVVVGARGV (KRAS G12R)
YVVMGNRGS

SEQ ID NO: 33543 - protein, 9 aa, synthetic construct
  source 1..9: note = Seed: LVVVGARGV (KRAS G12R)
YVVMGNRGT

SEQ ID NO: 33544 - protein, 9 aa, synthetic construct
  source 1..9: note = Seed: LVVVGARGV (KRAS G12R)
YVVMGNRGV

SEQ ID NO: 33545 - protein, 9 aa, synthetic construct
  source 1..9: note = Seed: LVVVGARGV (KRAS G12R)
YVVMGNRGW

SEQ ID NO: 33546 - protein, 9 aa, synthetic construct
  source 1..9: note = Seed: LVVVGARGV (KRAS G12R)
YVVMGNRGY

SEQ ID NO: 33547 - protein, 9 aa, synthetic construct
  source 1..9: note = Seed: LVVVGARGV (KRAS G12R)
YVVMGPRGA

SEQ ID NO: 33548 - protein, 9 aa, synthetic construct
  source 1..9: note = Seed: LVVVGARGV (KRAS G12R)
YVVMGPRGC

SEQ ID NO: 33549 - protein, 9 aa, synthetic construct
  source 1..9: note = Seed: LVVVGARGV (KRAS G12R)
YVVMGPRGD

SEQ ID NO: 33550 - protein, 9 aa, synthetic construct
  source 1..9: note = Seed: LVVVGARGV (KRAS G12R)
YVVMGPRGE

SEQ ID NO: 33551 - protein, 9 aa, synthetic construct
  source 1..9: note = Seed: LVVVGARGV (KRAS G12R)
YVVMGPRGF

SEQ ID NO: 33552 - protein, 9 aa, synthetic construct
  source 1..9: note = Seed: LVVVGARGV (KRAS G12R)
YVVMGPRGG

SEQ ID NO: 33553 - protein, 9 aa, synthetic construct
  source 1..9: note = Seed: LVVVGARGV (KRAS G12R)
YVVMGPRGH

SEQ ID NO: 33554 - protein, 9 aa, synthetic construct
  source 1..9: note = Seed: LVVVGARGV (KRAS G12R)
YVVMGPRGI

SEQ ID NO: 33555 - protein, 9 aa, synthetic construct
  source 1..9: note = Seed: LVVVGARGV (KRAS G12R)
YVVMGPRGK

SEQ ID NO: 33556 - protein, 9 aa, synthetic construct
  source 1..9: note = Seed: LVVVGARGV (KRAS G12R)
YVVMGPRGL

SEQ ID NO: 33557 - protein, 9 aa, synthetic construct
  source 1..9: note = Seed: LVVVGARGV (KRAS G12R)
YVVMGPRGM

SEQ ID NO: 33558 - protein, 9 aa, synthetic construct
  source 1..9: note = Seed: LVVVGARGV (KRAS G12R)
YVVMGPRGN

SEQ ID NO: 33559 - protein, 9 aa, synthetic construct
  source 1..9: note = Seed: LVVVGARGV (KRAS G12R)
YVVMGPRGP

SEQ ID NO: 33560 - protein, 9 aa, synthetic construct
  source 1..9: note = Seed: LVVVGARGV (KRAS G12R)
YVVMGPRGQ

SEQ ID NO: 33561 - protein, 9 aa, synthetic construct
  source 1..9: note = Seed: LVVVGARGV (KRAS G12R)
YVVMGPRGR

SEQ ID NO: 33562 - protein, 9 aa, synthetic construct
  source 1..9: note = Seed: LVVVGARGV (KRAS G12R)
YVVMGPRGS

SEQ ID NO: 33563 - protein, 9 aa, synthetic construct
  source 1..9: note = Seed: LVVVGARGV (KRAS G12R)
YVVMGPRGT

SEQ ID NO: 33564 - protein, 9 aa, synthetic construct
  source 1..9: note = Seed: LVVVGARGV (KRAS G12R)
YVVMGPRGV

SEQ ID NO: 33565 - protein, 9 aa, synthetic construct
  source 1..9: note = Seed: LVVVGARGV (KRAS G12R)
YVVMGPRGW

SEQ ID NO: 33566 - protein, 9 aa, synthetic construct
  source 1..9: note = Seed: LVVVGARGV (KRAS G12R)
YVVMGPRGY

SEQ ID NO: 33567 - protein, 9 aa, synthetic construct
  source 1..9: note = Seed: LVVVGARGV (KRAS G12R)
YVVMGQRGA

SEQ ID NO: 33568 - protein, 9 aa, synthetic construct
  source 1..9: note = Seed: LVVVGARGV (KRAS G12R)
YVVMGQRGF

SEQ ID NO: 33569 - protein, 9 aa, synthetic construct
  source 1..9: note = Seed: LVVVGARGV (KRAS G12R)
YVVMGQRGI

SEQ ID NO: 33570 - protein, 9 aa, synthetic construct
  source 1..9: note = Seed: LVVVGARGV (KRAS G12R)
YVVMGQRGL

SEQ ID NO: 33571 - protein, 9 aa, synthetic construct
  source 1..9: note = Seed: LVVVGARGV (KRAS G12R)
YVVMGQRGM

SEQ ID NO: 33572 - protein, 9 aa, synthetic construct
  source 1..9: note = Seed: LVVVGARGV (KRAS G12R)
YVVMGQRGR

SEQ ID NO: 33573 - protein, 9 aa, synthetic construct
  source 1..9: note = Seed: LVVVGARGV (KRAS G12R)
YVVMGQRGS

SEQ ID NO: 33574 - protein, 9 aa, synthetic construct
  source 1..9: note = Seed: LVVVGARGV (KRAS G12R)
YVVMGQRGT

SEQ ID NO: 33575 - protein, 9 aa, synthetic construct
  source 1..9: note = Seed: LVVVGARGV (KRAS G12R)
YVVMGQRGV

SEQ ID NO: 33576 - protein, 9 aa, synthetic construct
  source 1..9: note = Seed: LVVVGARGV (KRAS G12R)
YVVMGQRGY

SEQ ID NO: 33577 - protein, 9 aa, synthetic construct
  source 1..9: note = Seed: LVVVGARGV (KRAS G12R)
YVVMGRRGA

SEQ ID NO: 33578 - protein, 9 aa, synthetic construct
  source 1..9: note = Seed: LVVVGARGV (KRAS G12R)
YVVMGRRGC

SEQ ID NO: 33579 - protein, 9 aa, synthetic construct
  source 1..9: note = Seed: LVVVGARGV (KRAS G12R)
YVVMGRRGD

SEQ ID NO: 33580 - protein, 9 aa, synthetic construct
  source 1..9: note = Seed: LVVVGARGV (KRAS G12R)
YVVMGRRGE

SEQ ID NO: 33581 - protein, 9 aa, synthetic construct
  source 1..9: note = Seed: LVVVGARGV (KRAS G12R)
YVVMGRRGF

SEQ ID NO: 33582 - protein, 9 aa, synthetic construct
  source 1..9: note = Seed: LVVVGARGV (KRAS G12R)
YVVMGRRGG

SEQ ID NO: 33583 - protein, 9 aa, synthetic construct
  source 1..9: note = Seed: LVVVGARGV (KRAS G12R)
YVVMGRRGH

SEQ ID NO: 33584 - protein, 9 aa, synthetic construct
  source 1..9: note = Seed: LVVVGARGV (KRAS G12R)
YVVMGRRGI

SEQ ID NO: 33585 - protein, 9 aa, synthetic construct
  source 1..9: note = Seed: LVVVGARGV (KRAS G12R)
YVVMGRRGK

SEQ ID NO: 33586 - protein, 9 aa, synthetic construct
  source 1..9: note = Seed: LVVVGARGV (KRAS G12R)
YVVMGRRGL

SEQ ID NO: 33587 - protein, 9 aa, synthetic construct
  source 1..9: note = Seed: LVVVGARGV (KRAS G12R)
YVVMGRRGM

SEQ ID NO: 33588 - protein, 9 aa, synthetic construct
  source 1..9: note = Seed: LVVVGARGV (KRAS G12R)
YVVMGRRGN

SEQ ID NO: 33589 - protein, 9 aa, synthetic construct
  source 1..9: note = Seed: LVVVGARGV (KRAS G12R)
YVVMGRRGP

SEQ ID NO: 33590 - protein, 9 aa, synthetic construct
  source 1..9: note = Seed: LVVVGARGV (KRAS G12R)
YVVMGRRGQ

SEQ ID NO: 33591 - protein, 9 aa, synthetic construct
  source 1..9: note = Seed: LVVVGARGV (KRAS G12R)
YVVMGRRGR

SEQ ID NO: 33592 - protein, 9 aa, synthetic construct
  source 1..9: note = Seed: LVVVGARGV (KRAS G12R)
YVVMGRRGS

SEQ ID NO: 33593 - protein, 9 aa, synthetic construct
  source 1..9: note = Seed: LVVVGARGV (KRAS G12R)
YVVMGRRGT

SEQ ID NO: 33594 - protein, 9 aa, synthetic construct
  source 1..9: note = Seed: LVVVGARGV (KRAS G12R)
YVVMGRRGV

SEQ ID NO: 33595 - protein, 9 aa, synthetic construct
  source 1..9: note = Seed: LVVVGARGV (KRAS G12R)
YVVMGRRGW

SEQ ID NO: 33596 - protein, 9 aa, synthetic construct
  source 1..9: note = Seed: LVVVGARGV (KRAS G12R)
YVVMGRRGY

SEQ ID NO: 33597 - protein, 9 aa, synthetic construct
  source 1..9: note = Seed: LVVVGARGV (KRAS G12R)
YVVMGSRGA

SEQ ID NO: 33598 - protein, 9 aa, synthetic construct
  source 1..9: note = Seed: LVVVGARGV (KRAS G12R)
YVVMGSRGC

SEQ ID NO: 33599 - protein, 9 aa, synthetic construct
  source 1..9: note = Seed: LVVVGARGV (KRAS G12R)
YVVMGSRGD

SEQ ID NO: 33600 - protein, 9 aa, synthetic construct
  source 1..9: note = Seed: LVVVGARGV (KRAS G12R)
YVVMGSRGE

SEQ ID NO: 33601 - protein, 9 aa, synthetic construct
  source 1..9: note = Seed: LVVVGARGV (KRAS G12R)
YVVMGSRGF

SEQ ID NO: 33602 - protein, 9 aa, synthetic construct
  source 1..9: note = Seed: LVVVGARGV (KRAS G12R)
YVVMGSRGG

SEQ ID NO: 33603 - protein, 9 aa, synthetic construct
  source 1..9: note = Seed: LVVVGARGV (KRAS G12R)
YVVMGSRGH

SEQ ID NO: 33604 - protein, 9 aa, synthetic construct
  source 1..9: note = Seed: LVVVGARGV (KRAS G12R)
YVVMGSRGK

SEQ ID NO: 33605 - protein, 9 aa, synthetic construct
  source 1..9: note = Seed: LVVVGARGV (KRAS G12R)
YVVMGSRGM

SEQ ID NO: 33606 - protein, 9 aa, synthetic construct
  source 1..9: note = Seed: LVVVGARGV (KRAS G12R)
YVVMGSRGN

SEQ ID NO: 33607 - protein, 9 aa, synthetic construct
  source 1..9: note = Seed: LVVVGARGV (KRAS G12R)
YVVMGSRGP

SEQ ID NO: 33608 - protein, 9 aa, synthetic construct
  source 1..9: note = Seed: LVVVGARGV (KRAS G12R)
YVVMGSRGQ

SEQ ID NO: 33609 - protein, 9 aa, synthetic construct
  source 1..9: note = Seed: LVVVGARGV (KRAS G12R)
YVVMGSRGR

SEQ ID NO: 33610 - protein, 9 aa, synthetic construct
  source 1..9: note = Seed: LVVVGARGV (KRAS G12R)
YVVMGSRGS

SEQ ID NO: 33611 - protein, 9 aa, synthetic construct
  source 1..9: note = Seed: LVVVGARGV (KRAS G12R)
YVVMGSRGT

SEQ ID NO: 33612 - protein, 9 aa, synthetic construct
  source 1..9: note = Seed: LVVVGARGV (KRAS G12R)
YVVMGSRGW

SEQ ID NO: 33613 - protein, 9 aa, synthetic construct
  source 1..9: note = Seed: LVVVGARGV (KRAS G12R)
YVVMGSRGY

SEQ ID NO: 33614 - protein, 9 aa, synthetic construct
  source 1..9: note = Seed: LVVVGARGV (KRAS G12R)
YVVMGTRGA

SEQ ID NO: 33615 - protein, 9 aa, synthetic construct
  source 1..9: note = Seed: LVVVGARGV (KRAS G12R)
YVVMGTRGC

SEQ ID NO: 33616 - protein, 9 aa, synthetic construct
  source 1..9: note = Seed: LVVVGARGV (KRAS G12R)
YVVMGTRGD

SEQ ID NO: 33617 - protein, 9 aa, synthetic construct
  source 1..9: note = Seed: LVVVGARGV (KRAS G12R)
YVVMGTRGE

SEQ ID NO: 33618 - protein, 9 aa, synthetic construct
  source 1..9: note = Seed: LVVVGARGV (KRAS G12R)
YVVMGTRGF

SEQ ID NO: 33619 - protein, 9 aa, synthetic construct
  source 1..9: note = Seed: LVVVGARGV (KRAS G12R)
YVVMGTRGG

SEQ ID NO: 33620 - protein, 9 aa, synthetic construct
  source 1..9: note = Seed: LVVVGARGV (KRAS G12R)
YVVMGTRGH

SEQ ID NO: 33621 - protein, 9 aa, synthetic construct
  source 1..9: note = Seed: LVVVGARGV (KRAS G12R)
YVVMGTRGI

SEQ ID NO: 33622 - protein, 9 aa, synthetic construct
  source 1..9: note = Seed: LVVVGARGV (KRAS G12R)
YVVMGTRGK

SEQ ID NO: 33623 - protein, 9 aa, synthetic construct
  source 1..9: note = Seed: LVVVGARGV (KRAS G12R)
YVVMGTRGL

SEQ ID NO: 33624 - protein, 9 aa, synthetic construct
  source 1..9: note = Seed: LVVVGARGV (KRAS G12R)
YVVMGTRGM

SEQ ID NO: 33625 - protein, 9 aa, synthetic construct
  source 1..9: note = Seed: LVVVGARGV (KRAS G12R)
YVVMGTRGN

SEQ ID NO: 33626 - protein, 9 aa, synthetic construct
  source 1..9: note = Seed: LVVVGARGV (KRAS G12R)
YVVMGTRGP

SEQ ID NO: 33627 - protein, 9 aa, synthetic construct
  source 1..9: note = Seed: LVVVGARGV (KRAS G12R)
YVVMGTRGQ

SEQ ID NO: 33628 - protein, 9 aa, synthetic construct
  source 1..9: note = Seed: LVVVGARGV (KRAS G12R)
YVVMGTRGR

SEQ ID NO: 33629 - protein, 9 aa, synthetic construct
  source 1..9: note = Seed: LVVVGARGV (KRAS G12R)
YVVMGTRGS

SEQ ID NO: 33630 - protein, 9 aa, synthetic construct
  source 1..9: note = Seed: LVVVGARGV (KRAS G12R)
YVVMGTRGT

SEQ ID NO: 33631 - protein, 9 aa, synthetic construct
  source 1..9: note = Seed: LVVVGARGV (KRAS G12R)
YVVMGTRGV

SEQ ID NO: 33632 - protein, 9 aa, synthetic construct
  source 1..9: note = Seed: LVVVGARGV (KRAS G12R)
YVVMGTRGW

SEQ ID NO: 33633 - protein, 9 aa, synthetic construct
  source 1..9: note = Seed: LVVVGARGV (KRAS G12R)
YVVMGTRGY

SEQ ID NO: 33634 - protein, 9 aa, synthetic construct
  source 1..9: note = Seed: LVVVGARGV (KRAS G12R)
YVVMGVRGA

SEQ ID NO: 33635 - protein, 9 aa, synthetic construct
  source 1..9: note = Seed: LVVVGARGV (KRAS G12R)
YVVMGVRGC

SEQ ID NO: 33636 - protein, 9 aa, synthetic construct
  source 1..9: note = Seed: LVVVGARGV (KRAS G12R)
YVVMGVRGD

SEQ ID NO: 33637 - protein, 9 aa, synthetic construct
  source 1..9: note = Seed: LVVVGARGV (KRAS G12R)
YVVMGVRGE

SEQ ID NO: 33638 - protein, 9 aa, synthetic construct
  source 1..9: note = Seed: LVVVGARGV (KRAS G12R)
YVVMGVRGF

SEQ ID NO: 33639 - protein, 9 aa, synthetic construct
  source 1..9: note = Seed: LVVVGARGV (KRAS G12R)
YVVMGVRGG

SEQ ID NO: 33640 - protein, 9 aa, synthetic construct
  source 1..9: note = Seed: LVVVGARGV (KRAS G12R)
YVVMGVRGH

SEQ ID NO: 33641 - protein, 9 aa, synthetic construct
  source 1..9: note = Seed: LVVVGARGV (KRAS G12R)
YVVMGVRGI

SEQ ID NO: 33642 - protein, 9 aa, synthetic construct
  source 1..9: note = Seed: LVVVGARGV (KRAS G12R)
YVVMGVRGK

SEQ ID NO: 33643 - protein, 9 aa, synthetic construct
  source 1..9: note = Seed: LVVVGARGV (KRAS G12R)
YVVMGVRGL

SEQ ID NO: 33644 - protein, 9 aa, synthetic construct
  source 1..9: note = Seed: LVVVGARGV (KRAS G12R)
YVVMGVRGM

SEQ ID NO: 33645 - protein, 9 aa, synthetic construct
  source 1..9: note = Seed: LVVVGARGV (KRAS G12R)
YVVMGVRGN

SEQ ID NO: 33646 - protein, 9 aa, synthetic construct
  source 1..9: note = Seed: LVVVGARGV (KRAS G12R)
YVVMGVRGP

SEQ ID NO: 33647 - protein, 9 aa, synthetic construct
  source 1..9: note = Seed: LVVVGARGV (KRAS G12R)
YVVMGVRGQ

SEQ ID NO: 33648 - protein, 9 aa, synthetic construct
  source 1..9: note = Seed: LVVVGARGV (KRAS G12R)
YVVMGVRGR

SEQ ID NO: 33649 - protein, 9 aa, synthetic construct
  source 1..9: note = Seed: LVVVGARGV (KRAS G12R)
YVVMGVRGS

SEQ ID NO: 33650 - protein, 9 aa, synthetic construct
  source 1..9: note = Seed: LVVVGARGV (KRAS G12R)
YVVMGVRGT

SEQ ID NO: 33651 - protein, 9 aa, synthetic construct
  source 1..9: note = Seed: LVVVGARGV (KRAS G12R)
YVVMGVRGV

SEQ ID NO: 33652 - protein, 9 aa, synthetic construct
  source 1..9: note = Seed: LVVVGARGV (KRAS G12R)
YVVMGVRGW

SEQ ID NO: 33653 - protein, 9 aa, synthetic construct
  source 1..9: note = Seed: LVVVGARGV (KRAS G12R)
YVVMGVRGY

SEQ ID NO: 33654 - protein, 9 aa, synthetic construct
  source 1..9: note = Seed: LVVVGARGV (KRAS G12R)
YVVMGWRGA

SEQ ID NO: 33655 - protein, 9 aa, synthetic construct
  source 1..9: note = Seed: LVVVGARGV (KRAS G12R)
YVVMGWRGI

SEQ ID NO: 33656 - protein, 9 aa, synthetic construct
  source 1..9: note = Seed: LVVVGARGV (KRAS G12R)
YVVMGWRGL

SEQ ID NO: 33657 - protein, 9 aa, synthetic construct
  source 1..9: note = Seed: LVVVGARGV (KRAS G12R)
YVVMGWRGM

SEQ ID NO: 33658 - protein, 9 aa, synthetic construct
  source 1..9: note = Seed: LVVVGARGV (KRAS G12R)
YVVMGWRGT

SEQ ID NO: 33659 - protein, 9 aa, synthetic construct
  source 1..9: note = Seed: LVVVGARGV (KRAS G12R)
YVVMGWRGV

SEQ ID NO: 33660 - protein, 9 aa, synthetic construct
  source 1..9: note = Seed: LVVVGARGV (KRAS G12R)
YVVMGYRGA

SEQ ID NO: 33661 - protein, 9 aa, synthetic construct
  source 1..9: note = Seed: LVVVGARGV (KRAS G12R)
YVVMGYRGI

SEQ ID NO: 33662 - protein, 9 aa, synthetic construct
  source 1..9: note = Seed: LVVVGARGV (KRAS G12R)
YVVMGYRGL

SEQ ID NO: 33663 - protein, 9 aa, synthetic construct
  source 1..9: note = Seed: LVVVGARGV (KRAS G12R)
YVVMGYRGM

SEQ ID NO: 33664 - protein, 9 aa, synthetic construct
  source 1..9: note = Seed: LVVVGARGV (KRAS G12R)
YVVMGYRGV

SEQ ID NO: 33665 - protein, 9 aa, synthetic construct
  source 1..9: note = Seed: LVVVGARGV (KRAS G12R)
YVVNGARGA

SEQ ID NO: 33666 - protein, 9 aa, synthetic construct
  source 1..9: note = Seed: LVVVGARGV (KRAS G12R)
YVVNGARGF

SEQ ID NO: 33667 - protein, 9 aa, synthetic construct
  source 1..9: note = Seed: LVVVGARGV (KRAS G12R)
YVVNGARGI

SEQ ID NO: 33668 - protein, 9 aa, synthetic construct
  source 1..9: note = Seed: LVVVGARGV (KRAS G12R)
YVVNGARGL

SEQ ID NO: 33669 - protein, 9 aa, synthetic construct
  source 1..9: note = Seed: LVVVGARGV (KRAS G12R)
YVVNGARGM

SEQ ID NO: 33670 - protein, 9 aa, synthetic construct
  source 1..9: note = Seed: LVVVGARGV (KRAS G12R)
YVVNGARGS

SEQ ID NO: 33671 - protein, 9 aa, synthetic construct
  source 1..9: note = Seed: LVVVGARGV (KRAS G12R)
YVVNGARGT

SEQ ID NO: 33672 - protein, 9 aa, synthetic construct
  source 1..9: note = Seed: LVVVGARGV (KRAS G12R)
YVVNGARGV

SEQ ID NO: 33673 - protein, 9 aa, synthetic construct
  source 1..9: note = Seed: LVVVGARGV (KRAS G12R)
YVVNGARGY

SEQ ID NO: 33674 - protein, 9 aa, synthetic construct
  source 1..9: note = Seed: LVVVGARGV (KRAS G12R)
YVVNGFRGI

SEQ ID NO: 33675 - protein, 9 aa, synthetic construct
  source 1..9: note = Seed: LVVVGARGV (KRAS G12R)
YVVNGFRGL

SEQ ID NO: 33676 - protein, 9 aa, synthetic construct
  source 1..9: note = Seed: LVVVGARGV (KRAS G12R)
YVVNGFRGM

SEQ ID NO: 33677 - protein, 9 aa, synthetic construct
  source 1..9: note = Seed: LVVVGARGV (KRAS G12R)
YVVNGFRGV

SEQ ID NO: 33678 - protein, 9 aa, synthetic construct
  source 1..9: note = Seed: LVVVGARGV (KRAS G12R)
YVVNGGRGA

SEQ ID NO: 33679 - protein, 9 aa, synthetic construct
  source 1..9: note = Seed: LVVVGARGV (KRAS G12R)
YVVNGGRGF

SEQ ID NO: 33680 - protein, 9 aa, synthetic construct
  source 1..9: note = Seed: LVVVGARGV (KRAS G12R)
YVVNGGRGI

SEQ ID NO: 33681 - protein, 9 aa, synthetic construct
  source 1..9: note = Seed: LVVVGARGV (KRAS G12R)
YVVNGGRGL

SEQ ID NO: 33682 - protein, 9 aa, synthetic construct
  source 1..9: note = Seed: LVVVGARGV (KRAS G12R)
YVVNGGRGM

SEQ ID NO: 33683 - protein, 9 aa, synthetic construct
  source 1..9: note = Seed: LVVVGARGV (KRAS G12R)
YVVNGGRGV

SEQ ID NO: 33684 - protein, 9 aa, synthetic construct
  source 1..9: note = Seed: LVVVGARGV (KRAS G12R)
YVVNGGRGY

SEQ ID NO: 33685 - protein, 9 aa, synthetic construct
  source 1..9: note = Seed: LVVVGARGV (KRAS G12R)
YVVNGHRGI

SEQ ID NO: 33686 - protein, 9 aa, synthetic construct
  source 1..9: note = Seed: LVVVGARGV (KRAS G12R)
YVVNGHRGV

SEQ ID NO: 33687 - protein, 9 aa, synthetic construct
  source 1..9: note = Seed: LVVVGARGV (KRAS G12R)
YVVNGIRGA

SEQ ID NO: 33688 - protein, 9 aa, synthetic construct
  source 1..9: note = Seed: LVVVGARGV (KRAS G12R)
YVVNGIRGF

SEQ ID NO: 33689 - protein, 9 aa, synthetic construct
  source 1..9: note = Seed: LVVVGARGV (KRAS G12R)
YVVNGIRGI

SEQ ID NO: 33690 - protein, 9 aa, synthetic construct
  source 1..9: note = Seed: LVVVGARGV (KRAS G12R)
YVVNGIRGL

SEQ ID NO: 33691 - protein, 9 aa, synthetic construct
  source 1..9: note = Seed: LVVVGARGV (KRAS G12R)
YVVNGIRGM

SEQ ID NO: 33692 - protein, 9 aa, synthetic construct
  source 1..9: note = Seed: LVVVGARGV (KRAS G12R)
YVVNGIRGV

SEQ ID NO: 33693 - protein, 9 aa, synthetic construct
  source 1..9: note = Seed: LVVVGARGV (KRAS G12R)
YVVNGIRGY

SEQ ID NO: 33694 - protein, 9 aa, synthetic construct
  source 1..9: note = Seed: LVVVGARGV (KRAS G12R)
YVVNGLRGF

SEQ ID NO: 33695 - protein, 9 aa, synthetic construct
  source 1..9: note = Seed: LVVVGARGV (KRAS G12R)
YVVNGLRGI

SEQ ID NO: 33696 - protein, 9 aa, synthetic construct
  source 1..9: note = Seed: LVVVGARGV (KRAS G12R)
YVVNGLRGL

SEQ ID NO: 33697 - protein, 9 aa, synthetic construct
  source 1..9: note = Seed: LVVVGARGV (KRAS G12R)
YVVNGLRGR

SEQ ID NO: 33698 - protein, 9 aa, synthetic construct
  source 1..9: note = Seed: LVVVGARGV (KRAS G12R)
YVVNGLRGV

SEQ ID NO: 33699 - protein, 9 aa, synthetic construct
  source 1..9: note = Seed: LVVVGARGV (KRAS G12R)
YVVNGLRGY

SEQ ID NO: 33700 - protein, 9 aa, synthetic construct
  source 1..9: note = Seed: LVVVGARGV (KRAS G12R)
YVVNGMRGF

SEQ ID NO: 33701 - protein, 9 aa, synthetic construct
  source 1..9: note = Seed: LVVVGARGV (KRAS G12R)
YVVNGMRGI

SEQ ID NO: 33702 - protein, 9 aa, synthetic construct
  source 1..9: note = Seed: LVVVGARGV (KRAS G12R)
YVVNGMRGL

SEQ ID NO: 33703 - protein, 9 aa, synthetic construct
  source 1..9: note = Seed: LVVVGARGV (KRAS G12R)
YVVNGMRGR

SEQ ID NO: 33704 - protein, 9 aa, synthetic construct
  source 1..9: note = Seed: LVVVGARGV (KRAS G12R)
YVVNGMRGV

SEQ ID NO: 33705 - protein, 9 aa, synthetic construct
  source 1..9: note = Seed: LVVVGARGV (KRAS G12R)
YVVNGMRGY

SEQ ID NO: 33706 - protein, 9 aa, synthetic construct
  source 1..9: note = Seed: LVVVGARGV (KRAS G12R)
YVVNGNRGA

SEQ ID NO: 33707 - protein, 9 aa, synthetic construct
  source 1..9: note = Seed: LVVVGARGV (KRAS G12R)
YVVNGNRGF

SEQ ID NO: 33708 - protein, 9 aa, synthetic construct
  source 1..9: note = Seed: LVVVGARGV (KRAS G12R)
YVVNGNRGI

SEQ ID NO: 33709 - protein, 9 aa, synthetic construct
  source 1..9: note = Seed: LVVVGARGV (KRAS G12R)
YVVNGNRGL

SEQ ID NO: 33710 - protein, 9 aa, synthetic construct
  source 1..9: note = Seed: LVVVGARGV (KRAS G12R)
YVVNGNRGM

SEQ ID NO: 33711 - protein, 9 aa, synthetic construct
  source 1..9: note = Seed: LVVVGARGV (KRAS G12R)
YVVNGNRGV

SEQ ID NO: 33712 - protein, 9 aa, synthetic construct
  source 1..9: note = Seed: LVVVGARGV (KRAS G12R)
YVVNGNRGY

SEQ ID NO: 33713 - protein, 9 aa, synthetic construct
  source 1..9: note = Seed: LVVVGARGV (KRAS G12R)
YVVNGPRGA

SEQ ID NO: 33714 - protein, 9 aa, synthetic construct
  source 1..9: note = Seed: LVVVGARGV (KRAS G12R)
YVVNGPRGF

SEQ ID NO: 33715 - protein, 9 aa, synthetic construct
  source 1..9: note = Seed: LVVVGARGV (KRAS G12R)
YVVNGPRGI

SEQ ID NO: 33716 - protein, 9 aa, synthetic construct
  source 1..9: note = Seed: LVVVGARGV (KRAS G12R)
YVVNGPRGL

SEQ ID NO: 33717 - protein, 9 aa, synthetic construct
  source 1..9: note = Seed: LVVVGARGV (KRAS G12R)
YVVNGPRGM

SEQ ID NO: 33718 - protein, 9 aa, synthetic construct
  source 1..9: note = Seed: LVVVGARGV (KRAS G12R)
YVVNGPRGV

SEQ ID NO: 33719 - protein, 9 aa, synthetic construct
  source 1..9: note = Seed: LVVVGARGV (KRAS G12R)
YVVNGPRGY

SEQ ID NO: 33720 - protein, 9 aa, synthetic construct
  source 1..9: note = Seed: LVVVGARGV (KRAS G12R)
YVVNGRRGL

SEQ ID NO: 33721 - protein, 9 aa, synthetic construct
  source 1..9: note = Seed: LVVVGARGV (KRAS G12R)
YVVNGRRGM

SEQ ID NO: 33722 - protein, 9 aa, synthetic construct
  source 1..9: note = Seed: LVVVGARGV (KRAS G12R)
YVVNGRRGR

SEQ ID NO: 33723 - protein, 9 aa, synthetic construct
  source 1..9: note = Seed: LVVVGARGV (KRAS G12R)
YVVNGSRGA

SEQ ID NO: 33724 - protein, 9 aa, synthetic construct
  source 1..9: note = Seed: LVVVGARGV (KRAS G12R)
YVVNGSRGF

SEQ ID NO: 33725 - protein, 9 aa, synthetic construct
  source 1..9: note = Seed: LVVVGARGV (KRAS G12R)
YVVNGSRGI

SEQ ID NO: 33726 - protein, 9 aa, synthetic construct
  source 1..9: note = Seed: LVVVGARGV (KRAS G12R)
YVVNGSRGL

SEQ ID NO: 33727 - protein, 9 aa, synthetic construct
  source 1..9: note = Seed: LVVVGARGV (KRAS G12R)
YVVNGSRGM

SEQ ID NO: 33728 - protein, 9 aa, synthetic construct
  source 1..9: note = Seed: LVVVGARGV (KRAS G12R)
YVVNGSRGV

SEQ ID NO: 33729 - protein, 9 aa, synthetic construct
  source 1..9: note = Seed: LVVVGARGV (KRAS G12R)
YVVNGSRGY

SEQ ID NO: 33730 - protein, 9 aa, synthetic construct
  source 1..9: note = Seed: LVVVGARGV (KRAS G12R)
YVVNGTRGF

SEQ ID NO: 33731 - protein, 9 aa, synthetic construct
  source 1..9: note = Seed: LVVVGARGV (KRAS G12R)
YVVNGTRGI

SEQ ID NO: 33732 - protein, 9 aa, synthetic construct
  source 1..9: note = Seed: LVVVGARGV (KRAS G12R)
YVVNGTRGL

SEQ ID NO: 33733 - protein, 9 aa, synthetic construct
  source 1..9: note = Seed: LVVVGARGV (KRAS G12R)
YVVNGTRGM

SEQ ID NO: 33734 - protein, 9 aa, synthetic construct
  source 1..9: note = Seed: LVVVGARGV (KRAS G12R)
YVVNGTRGV

SEQ ID NO: 33735 - protein, 9 aa, synthetic construct
  source 1..9: note = Seed: LVVVGARGV (KRAS G12R)
YVVNGTRGY

SEQ ID NO: 33736 - protein, 9 aa, synthetic construct
  source 1..9: note = Seed: LVVVGARGV (KRAS G12R)
YVVNGVRGA

SEQ ID NO: 33737 - protein, 9 aa, synthetic construct
  source 1..9: note = Seed: LVVVGARGV (KRAS G12R)
YVVNGVRGF

SEQ ID NO: 33738 - protein, 9 aa, synthetic construct
  source 1..9: note = Seed: LVVVGARGV (KRAS G12R)
YVVNGVRGI

SEQ ID NO: 33739 - protein, 9 aa, synthetic construct
  source 1..9: note = Seed: LVVVGARGV (KRAS G12R)
YVVNGVRGL

SEQ ID NO: 33740 - protein, 9 aa, synthetic construct
  source 1..9: note = Seed: LVVVGARGV (KRAS G12R)
YVVNGVRGM

SEQ ID NO: 33741 - protein, 9 aa, synthetic construct
  source 1..9: note = Seed: LVVVGARGV (KRAS G12R)
YVVNGVRGV

SEQ ID NO: 33742 - protein, 9 aa, synthetic construct
  source 1..9: note = Seed: LVVVGARGV (KRAS G12R)
YVVNGVRGY

SEQ ID NO: 33743 - protein, 9 aa, synthetic construct
  source 1..9: note = Seed: LVVVGARGV (KRAS G12R)
YVVPGARGL

SEQ ID NO: 33744 - protein, 9 aa, synthetic construct
  source 1..9: note = Seed: LVVVGARGV (KRAS G12R)
YVVQGARGA

SEQ ID NO: 33745 - protein, 9 aa, synthetic construct
  source 1..9: note = Seed: LVVVGARGV (KRAS G12R)
YVVQGARGC

SEQ ID NO: 33746 - protein, 9 aa, synthetic construct
  source 1..9: note = Seed: LVVVGARGV (KRAS G12R)
YVVQGARGF

SEQ ID NO: 33747 - protein, 9 aa, synthetic construct
  source 1..9: note = Seed: LVVVGARGV (KRAS G12R)
YVVQGARGG

SEQ ID NO: 33748 - protein, 9 aa, synthetic construct
  source 1..9: note = Seed: LVVVGARGV (KRAS G12R)
YVVQGARGH

SEQ ID NO: 33749 - protein, 9 aa, synthetic construct
  source 1..9: note = Seed: LVVVGARGV (KRAS G12R)
YVVQGARGI

SEQ ID NO: 33750 - protein, 9 aa, synthetic construct
  source 1..9: note = Seed: LVVVGARGV (KRAS G12R)
YVVQGARGL

SEQ ID NO: 33751 - protein, 9 aa, synthetic construct
  source 1..9: note = Seed: LVVVGARGV (KRAS G12R)
YVVQGARGM

SEQ ID NO: 33752 - protein, 9 aa, synthetic construct
  source 1..9: note = Seed: LVVVGARGV (KRAS G12R)
YVVQGARGN

SEQ ID NO: 33753 - protein, 9 aa, synthetic construct
  source 1..9: note = Seed: LVVVGARGV (KRAS G12R)
YVVQGARGP

SEQ ID NO: 33754 - protein, 9 aa, synthetic construct
  source 1..9: note = Seed: LVVVGARGV (KRAS G12R)
YVVQGARGQ

SEQ ID NO: 33755 - protein, 9 aa, synthetic construct
  source 1..9: note = Seed: LVVVGARGV (KRAS G12R)
YVVQGARGR

SEQ ID NO: 33756 - protein, 9 aa, synthetic construct
  source 1..9: note = Seed: LVVVGARGV (KRAS G12R)
YVVQGARGS

SEQ ID NO: 33757 - protein, 9 aa, synthetic construct
  source 1..9: note = Seed: LVVVGARGV (KRAS G12R)
YVVQGARGT

SEQ ID NO: 33758 - protein, 9 aa, synthetic construct
  source 1..9: note = Seed: LVVVGARGV (KRAS G12R)
YVVQGARGV

SEQ ID NO: 33759 - protein, 9 aa, synthetic construct
  source 1..9: note = Seed: LVVVGARGV (KRAS G12R)
YVVQGARGW

SEQ ID NO: 33760 - protein, 9 aa, synthetic construct
  source 1..9: note = Seed: LVVVGARGV (KRAS G12R)
YVVQGARGY

SEQ ID NO: 33761 - protein, 9 aa, synthetic construct
  source 1..9: note = Seed: LVVVGARGV (KRAS G12R)
YVVQGCRGA

SEQ ID NO: 33762 - protein, 9 aa, synthetic construct
  source 1..9: note = Seed: LVVVGARGV (KRAS G12R)
YVVQGCRGI

SEQ ID NO: 33763 - protein, 9 aa, synthetic construct
  source 1..9: note = Seed: LVVVGARGV (KRAS G12R)
YVVQGCRGL

SEQ ID NO: 33764 - protein, 9 aa, synthetic construct
  source 1..9: note = Seed: LVVVGARGV (KRAS G12R)
YVVQGCRGV

SEQ ID NO: 33765 - protein, 9 aa, synthetic construct
  source 1..9: note = Seed: LVVVGARGV (KRAS G12R)
YVVQGDRGL

SEQ ID NO: 33766 - protein, 9 aa, synthetic construct
  source 1..9: note = Seed: LVVVGARGV (KRAS G12R)
YVVQGERGL

SEQ ID NO: 33767 - protein, 9 aa, synthetic construct
  source 1..9: note = Seed: LVVVGARGV (KRAS G12R)
YVVQGFRGI

SEQ ID NO: 33768 - protein, 9 aa, synthetic construct
  source 1..9: note = Seed: LVVVGARGV (KRAS G12R)
YVVQGFRGL

SEQ ID NO: 33769 - protein, 9 aa, synthetic construct
  source 1..9: note = Seed: LVVVGARGV (KRAS G12R)
YVVQGFRGM

SEQ ID NO: 33770 - protein, 9 aa, synthetic construct
  source 1..9: note = Seed: LVVVGARGV (KRAS G12R)
YVVQGFRGV

SEQ ID NO: 33771 - protein, 9 aa, synthetic construct
  source 1..9: note = Seed: LVVVGARGV (KRAS G12R)
YVVQGGRGA

SEQ ID NO: 33772 - protein, 9 aa, synthetic construct
  source 1..9: note = Seed: LVVVGARGV (KRAS G12R)
YVVQGGRGC

SEQ ID NO: 33773 - protein, 9 aa, synthetic construct
  source 1..9: note = Seed: LVVVGARGV (KRAS G12R)
YVVQGGRGF

SEQ ID NO: 33774 - protein, 9 aa, synthetic construct
  source 1..9: note = Seed: LVVVGARGV (KRAS G12R)
YVVQGGRGG

SEQ ID NO: 33775 - protein, 9 aa, synthetic construct
  source 1..9: note = Seed: LVVVGARGV (KRAS G12R)
YVVQGGRGI

SEQ ID NO: 33776 - protein, 9 aa, synthetic construct
  source 1..9: note = Seed: LVVVGARGV (KRAS G12R)
YVVQGGRGL

SEQ ID NO: 33777 - protein, 9 aa, synthetic construct
  source 1..9: note = Seed: LVVVGARGV (KRAS G12R)
YVVQGGRGM

SEQ ID NO: 33778 - protein, 9 aa, synthetic construct
  source 1..9: note = Seed: LVVVGARGV (KRAS G12R)
YVVQGGRGN

SEQ ID NO: 33779 - protein, 9 aa, synthetic construct
  source 1..9: note = Seed: LVVVGARGV (KRAS G12R)
YVVQGGRGS

SEQ ID NO: 33780 - protein, 9 aa, synthetic construct
  source 1..9: note = Seed: LVVVGARGV (KRAS G12R)
YVVQGGRGT

SEQ ID NO: 33781 - protein, 9 aa, synthetic construct
  source 1..9: note = Seed: LVVVGARGV (KRAS G12R)
YVVQGGRGV

SEQ ID NO: 33782 - protein, 9 aa, synthetic construct
  source 1..9: note = Seed: LVVVGARGV (KRAS G12R)
YVVQGGRGW

SEQ ID NO: 33783 - protein, 9 aa, synthetic construct
  source 1..9: note = Seed: LVVVGARGV (KRAS G12R)
YVVQGHRGL

SEQ ID NO: 33784 - protein, 9 aa, synthetic construct
  source 1..9: note = Seed: LVVVGARGV (KRAS G12R)
YVVQGIRGA

SEQ ID NO: 33785 - protein, 9 aa, synthetic construct
  source 1..9: note = Seed: LVVVGARGV (KRAS G12R)
YVVQGIRGI

SEQ ID NO: 33786 - protein, 9 aa, synthetic construct
  source 1..9: note = Seed: LVVVGARGV (KRAS G12R)
YVVQGIRGL

SEQ ID NO: 33787 - protein, 9 aa, synthetic construct
  source 1..9: note = Seed: LVVVGARGV (KRAS G12R)
YVVQGIRGM

SEQ ID NO: 33788 - protein, 9 aa, synthetic construct
  source 1..9: note = Seed: LVVVGARGV (KRAS G12R)
YVVQGIRGN

SEQ ID NO: 33789 - protein, 9 aa, synthetic construct
  source 1..9: note = Seed: LVVVGARGV (KRAS G12R)
YVVQGIRGR

SEQ ID NO: 33790 - protein, 9 aa, synthetic construct
  source 1..9: note = Seed: LVVVGARGV (KRAS G12R)
YVVQGIRGS

SEQ ID NO: 33791 - protein, 9 aa, synthetic construct
  source 1..9: note = Seed: LVVVGARGV (KRAS G12R)
YVVQGIRGT

SEQ ID NO: 33792 - protein, 9 aa, synthetic construct
  source 1..9: note = Seed: LVVVGARGV (KRAS G12R)
YVVQGIRGV

SEQ ID NO: 33793 - protein, 9 aa, synthetic construct
  source 1..9: note = Seed: LVVVGARGV (KRAS G12R)
YVVQGKRGA

SEQ ID NO: 33794 - protein, 9 aa, synthetic construct
  source 1..9: note = Seed: LVVVGARGV (KRAS G12R)
YVVQGKRGL

SEQ ID NO: 33795 - protein, 9 aa, synthetic construct
  source 1..9: note = Seed: LVVVGARGV (KRAS G12R)
YVVQGKRGM

SEQ ID NO: 33796 - protein, 9 aa, synthetic construct
  source 1..9: note = Seed: LVVVGARGV (KRAS G12R)
YVVQGKRGR

SEQ ID NO: 33797 - protein, 9 aa, synthetic construct
  source 1..9: note = Seed: LVVVGARGV (KRAS G12R)
YVVQGKRGS

SEQ ID NO: 33798 - protein, 9 aa, synthetic construct
  source 1..9: note = Seed: LVVVGARGV (KRAS G12R)
YVVQGLRGA

SEQ ID NO: 33799 - protein, 9 aa, synthetic construct
  source 1..9: note = Seed: LVVVGARGV (KRAS G12R)
YVVQGLRGI

SEQ ID NO: 33800 - protein, 9 aa, synthetic construct
  source 1..9: note = Seed: LVVVGARGV (KRAS G12R)
YVVQGLRGL

SEQ ID NO: 33801 - protein, 9 aa, synthetic construct
  source 1..9: note = Seed: LVVVGARGV (KRAS G12R)
YVVQGLRGM

SEQ ID NO: 33802 - protein, 9 aa, synthetic construct
  source 1..9: note = Seed: LVVVGARGV (KRAS G12R)
YVVQGLRGR

SEQ ID NO: 33803 - protein, 9 aa, synthetic construct
  source 1..9: note = Seed: LVVVGARGV (KRAS G12R)
YVVQGLRGV

SEQ ID NO: 33804 - protein, 9 aa, synthetic construct
  source 1..9: note = Seed: LVVVGARGV (KRAS G12R)
YVVQGMRGA

SEQ ID NO: 33805 - protein, 9 aa, synthetic construct
  source 1..9: note = Seed: LVVVGARGV (KRAS G12R)
YVVQGMRGI

SEQ ID NO: 33806 - protein, 9 aa, synthetic construct
  source 1..9: note = Seed: LVVVGARGV (KRAS G12R)
YVVQGMRGL

SEQ ID NO: 33807 - protein, 9 aa, synthetic construct
  source 1..9: note = Seed: LVVVGARGV (KRAS G12R)
YVVQGMRGM

SEQ ID NO: 33808 - protein, 9 aa, synthetic construct
  source 1..9: note = Seed: LVVVGARGV (KRAS G12R)
YVVQGMRGR

SEQ ID NO: 33809 - protein, 9 aa, synthetic construct
  source 1..9: note = Seed: LVVVGARGV (KRAS G12R)
YVVQGMRGV

SEQ ID NO: 33810 - protein, 9 aa, synthetic construct
  source 1..9: note = Seed: LVVVGARGV (KRAS G12R)
YVVQGNRGA

SEQ ID NO: 33811 - protein, 9 aa, synthetic construct
  source 1..9: note = Seed: LVVVGARGV (KRAS G12R)
YVVQGNRGF

SEQ ID NO: 33812 - protein, 9 aa, synthetic construct
  source 1..9: note = Seed: LVVVGARGV (KRAS G12R)
YVVQGNRGI

SEQ ID NO: 33813 - protein, 9 aa, synthetic construct
  source 1..9: note = Seed: LVVVGARGV (KRAS G12R)
YVVQGNRGL

SEQ ID NO: 33814 - protein, 9 aa, synthetic construct
  source 1..9: note = Seed: LVVVGARGV (KRAS G12R)
YVVQGNRGM

SEQ ID NO: 33815 - protein, 9 aa, synthetic construct
  source 1..9: note = Seed: LVVVGARGV (KRAS G12R)
YVVQGNRGS

SEQ ID NO: 33816 - protein, 9 aa, synthetic construct
  source 1..9: note = Seed: LVVVGARGV (KRAS G12R)
YVVQGNRGT

SEQ ID NO: 33817 - protein, 9 aa, synthetic construct
  source 1..9: note = Seed: LVVVGARGV (KRAS G12R)
YVVQGNRGV

SEQ ID NO: 33818 - protein, 9 aa, synthetic construct
  source 1..9: note = Seed: LVVVGARGV (KRAS G12R)
YVVQGNRGW

SEQ ID NO: 33819 - protein, 9 aa, synthetic construct
  source 1..9: note = Seed: LVVVGARGV (KRAS G12R)
YVVQGPRGA

SEQ ID NO: 33820 - protein, 9 aa, synthetic construct
  source 1..9: note = Seed: LVVVGARGV (KRAS G12R)
YVVQGPRGF

SEQ ID NO: 33821 - protein, 9 aa, synthetic construct
  source 1..9: note = Seed: LVVVGARGV (KRAS G12R)
YVVQGPRGI

SEQ ID NO: 33822 - protein, 9 aa, synthetic construct
  source 1..9: note = Seed: LVVVGARGV (KRAS G12R)
YVVQGPRGL

SEQ ID NO: 33823 - protein, 9 aa, synthetic construct
  source 1..9: note = Seed: LVVVGARGV (KRAS G12R)
YVVQGPRGM

SEQ ID NO: 33824 - protein, 9 aa, synthetic construct
  source 1..9: note = Seed: LVVVGARGV (KRAS G12R)
YVVQGPRGS

SEQ ID NO: 33825 - protein, 9 aa, synthetic construct
  source 1..9: note = Seed: LVVVGARGV (KRAS G12R)
YVVQGPRGT

SEQ ID NO: 33826 - protein, 9 aa, synthetic construct
  source 1..9: note = Seed: LVVVGARGV (KRAS G12R)
YVVQGPRGV

SEQ ID NO: 33827 - protein, 9 aa, synthetic construct
  source 1..9: note = Seed: LVVVGARGV (KRAS G12R)
YVVQGQRGI

SEQ ID NO: 33828 - protein, 9 aa, synthetic construct
  source 1..9: note = Seed: LVVVGARGV (KRAS G12R)
YVVQGQRGL

SEQ ID NO: 33829 - protein, 9 aa, synthetic construct
  source 1..9: note = Seed: LVVVGARGV (KRAS G12R)
YVVQGQRGV

SEQ ID NO: 33830 - protein, 9 aa, synthetic construct
  source 1..9: note = Seed: LVVVGARGV (KRAS G12R)
YVVQGRRGA

SEQ ID NO: 33831 - protein, 9 aa, synthetic construct
  source 1..9: note = Seed: LVVVGARGV (KRAS G12R)
YVVQGRRGF

SEQ ID NO: 33832 - protein, 9 aa, synthetic construct
  source 1..9: note = Seed: LVVVGARGV (KRAS G12R)
YVVQGRRGH

SEQ ID NO: 33833 - protein, 9 aa, synthetic construct
  source 1..9: note = Seed: LVVVGARGV (KRAS G12R)
YVVQGRRGI

SEQ ID NO: 33834 - protein, 9 aa, synthetic construct
  source 1..9: note = Seed: LVVVGARGV (KRAS G12R)
YVVQGRRGK

SEQ ID NO: 33835 - protein, 9 aa, synthetic construct
  source 1..9: note = Seed: LVVVGARGV (KRAS G12R)
YVVQGRRGL

SEQ ID NO: 33836 - protein, 9 aa, synthetic construct
  source 1..9: note = Seed: LVVVGARGV (KRAS G12R)
YVVQGRRGM

SEQ ID NO: 33837 - protein, 9 aa, synthetic construct
  source 1..9: note = Seed: LVVVGARGV (KRAS G12R)
YVVQGRRGQ

SEQ ID NO: 33838 - protein, 9 aa, synthetic construct
  source 1..9: note = Seed: LVVVGARGV (KRAS G12R)
YVVQGRRGR

SEQ ID NO: 33839 - protein, 9 aa, synthetic construct
  source 1..9: note = Seed: LVVVGARGV (KRAS G12R)
YVVQGRRGS

SEQ ID NO: 33840 - protein, 9 aa, synthetic construct
  source 1..9: note = Seed: LVVVGARGV (KRAS G12R)
YVVQGRRGT

SEQ ID NO: 33841 - protein, 9 aa, synthetic construct
  source 1..9: note = Seed: LVVVGARGV (KRAS G12R)
YVVQGRRGV

SEQ ID NO: 33842 - protein, 9 aa, synthetic construct
  source 1..9: note = Seed: LVVVGARGV (KRAS G12R)
YVVQGRRGW

SEQ ID NO: 33843 - protein, 9 aa, synthetic construct
  source 1..9: note = Seed: LVVVGARGV (KRAS G12R)
YVVQGRRGY

SEQ ID NO: 33844 - protein, 9 aa, synthetic construct
  source 1..9: note = Seed: LVVVGARGV (KRAS G12R)
YVVQGSRGA

SEQ ID NO: 33845 - protein, 9 aa, synthetic construct
  source 1..9: note = Seed: LVVVGARGV (KRAS G12R)
YVVQGSRGC

SEQ ID NO: 33846 - protein, 9 aa, synthetic construct
  source 1..9: note = Seed: LVVVGARGV (KRAS G12R)
YVVQGSRGF

SEQ ID NO: 33847 - protein, 9 aa, synthetic construct
  source 1..9: note = Seed: LVVVGARGV (KRAS G12R)
YVVQGSRGG

SEQ ID NO: 33848 - protein, 9 aa, synthetic construct
  source 1..9: note = Seed: LVVVGARGV (KRAS G12R)
YVVQGSRGH

SEQ ID NO: 33849 - protein, 9 aa, synthetic construct
  source 1..9: note = Seed: LVVVGARGV (KRAS G12R)
YVVQGSRGI

SEQ ID NO: 33850 - protein, 9 aa, synthetic construct
  source 1..9: note = Seed: LVVVGARGV (KRAS G12R)
YVVQGSRGL

SEQ ID NO: 33851 - protein, 9 aa, synthetic construct
  source 1..9: note = Seed: LVVVGARGV (KRAS G12R)
YVVQGSRGM

SEQ ID NO: 33852 - protein, 9 aa, synthetic construct
  source 1..9: note = Seed: LVVVGARGV (KRAS G12R)
YVVQGSRGN

SEQ ID NO: 33853 - protein, 9 aa, synthetic construct
  source 1..9: note = Seed: LVVVGARGV (KRAS G12R)
YVVQGSRGP

SEQ ID NO: 33854 - protein, 9 aa, synthetic construct
  source 1..9: note = Seed: LVVVGARGV (KRAS G12R)
YVVQGSRGS

SEQ ID NO: 33855 - protein, 9 aa, synthetic construct
  source 1..9: note = Seed: LVVVGARGV (KRAS G12R)
YVVQGSRGT

SEQ ID NO: 33856 - protein, 9 aa, synthetic construct
  source 1..9: note = Seed: LVVVGARGV (KRAS G12R)
YVVQGSRGV

SEQ ID NO: 33857 - protein, 9 aa, synthetic construct
  source 1..9: note = Seed: LVVVGARGV (KRAS G12R)
YVVQGSRGW

SEQ ID NO: 33858 - protein, 9 aa, synthetic construct
  source 1..9: note = Seed: LVVVGARGV (KRAS G12R)
YVVQGSRGY

SEQ ID NO: 33859 - protein, 9 aa, synthetic construct
  source 1..9: note = Seed: LVVVGARGV (KRAS G12R)
YVVQGTRGA

SEQ ID NO: 33860 - protein, 9 aa, synthetic construct
  source 1..9: note = Seed: LVVVGARGV (KRAS G12R)
YVVQGTRGF

SEQ ID NO: 33861 - protein, 9 aa, synthetic construct
  source 1..9: note = Seed: LVVVGARGV (KRAS G12R)
YVVQGTRGI

SEQ ID NO: 33862 - protein, 9 aa, synthetic construct
  source 1..9: note = Seed: LVVVGARGV (KRAS G12R)
YVVQGTRGL

SEQ ID NO: 33863 - protein, 9 aa, synthetic construct
  source 1..9: note = Seed: LVVVGARGV (KRAS G12R)
YVVQGTRGM

SEQ ID NO: 33864 - protein, 9 aa, synthetic construct
  source 1..9: note = Seed: LVVVGARGV (KRAS G12R)
YVVQGTRGN

SEQ ID NO: 33865 - protein, 9 aa, synthetic construct
  source 1..9: note = Seed: LVVVGARGV (KRAS G12R)
YVVQGTRGS

SEQ ID NO: 33866 - protein, 9 aa, synthetic construct
  source 1..9: note = Seed: LVVVGARGV (KRAS G12R)
YVVQGTRGT

SEQ ID NO: 33867 - protein, 9 aa, synthetic construct
  source 1..9: note = Seed: LVVVGARGV (KRAS G12R)
YVVQGTRGV

SEQ ID NO: 33868 - protein, 9 aa, synthetic construct
  source 1..9: note = Seed: LVVVGARGV (KRAS G12R)
YVVQGVRGA

SEQ ID NO: 33869 - protein, 9 aa, synthetic construct
  source 1..9: note = Seed: LVVVGARGV (KRAS G12R)
YVVQGVRGF

SEQ ID NO: 33870 - protein, 9 aa, synthetic construct
  source 1..9: note = Seed: LVVVGARGV (KRAS G12R)
YVVQGVRGI

SEQ ID NO: 33871 - protein, 9 aa, synthetic construct
  source 1..9: note = Seed: LVVVGARGV (KRAS G12R)
YVVQGVRGL

SEQ ID NO: 33872 - protein, 9 aa, synthetic construct
  source 1..9: note = Seed: LVVVGARGV (KRAS G12R)
YVVQGVRGM

SEQ ID NO: 33873 - protein, 9 aa, synthetic construct
  source 1..9: note = Seed: LVVVGARGV (KRAS G12R)
YVVQGVRGN

SEQ ID NO: 33874 - protein, 9 aa, synthetic construct
  source 1..9: note = Seed: LVVVGARGV (KRAS G12R)
YVVQGVRGS

SEQ ID NO: 33875 - protein, 9 aa, synthetic construct
  source 1..9: note = Seed: LVVVGARGV (KRAS G12R)
YVVQGVRGT

SEQ ID NO: 33876 - protein, 9 aa, synthetic construct
  source 1..9: note = Seed: LVVVGARGV (KRAS G12R)
YVVQGVRGV

SEQ ID NO: 33877 - protein, 9 aa, synthetic construct
  source 1..9: note = Seed: LVVVGARGV (KRAS G12R)
YVVRGARGF

SEQ ID NO: 33878 - protein, 9 aa, synthetic construct
  source 1..9: note = Seed: LVVVGARGV (KRAS G12R)
YVVRGARGI

SEQ ID NO: 33879 - protein, 9 aa, synthetic construct
  source 1..9: note = Seed: LVVVGARGV (KRAS G12R)
YVVRGARGL

SEQ ID NO: 33880 - protein, 9 aa, synthetic construct
  source 1..9: note = Seed: LVVVGARGV (KRAS G12R)
YVVRGARGV

SEQ ID NO: 33881 - protein, 9 aa, synthetic construct
  source 1..9: note = Seed: LVVVGARGV (KRAS G12R)
YVVRGCRGR

SEQ ID NO: 33882 - protein, 9 aa, synthetic construct
  source 1..9: note = Seed: LVVVGARGV (KRAS G12R)
YVVRGHRGF

SEQ ID NO: 33883 - protein, 9 aa, synthetic construct
  source 1..9: note = Seed: LVVVGARGV (KRAS G12R)
YVVRGHRGM

SEQ ID NO: 33884 - protein, 9 aa, synthetic construct
  source 1..9: note = Seed: LVVVGARGV (KRAS G12R)
YVVRGHRGQ

SEQ ID NO: 33885 - protein, 9 aa, synthetic construct
  source 1..9: note = Seed: LVVVGARGV (KRAS G12R)
YVVRGHRGV

SEQ ID NO: 33886 - protein, 9 aa, synthetic construct
  source 1..9: note = Seed: LVVVGARGV (KRAS G12R)
YVVRGIRGF

SEQ ID NO: 33887 - protein, 9 aa, synthetic construct
  source 1..9: note = Seed: LVVVGARGV (KRAS G12R)
YVVRGIRGR

SEQ ID NO: 33888 - protein, 9 aa, synthetic construct
  source 1..9: note = Seed: LVVVGARGV (KRAS G12R)
YVVRGIRGV

SEQ ID NO: 33889 - protein, 9 aa, synthetic construct
  source 1..9: note = Seed: LVVVGARGV (KRAS G12R)
YVVRGIRGY

SEQ ID NO: 33890 - protein, 9 aa, synthetic construct
  source 1..9: note = Seed: LVVVGARGV (KRAS G12R)
YVVRGKRGA

SEQ ID NO: 33891 - protein, 9 aa, synthetic construct
  source 1..9: note = Seed: LVVVGARGV (KRAS G12R)
YVVRGKRGF

SEQ ID NO: 33892 - protein, 9 aa, synthetic construct
  source 1..9: note = Seed: LVVVGARGV (KRAS G12R)
YVVRGKRGI

SEQ ID NO: 33893 - protein, 9 aa, synthetic construct
  source 1..9: note = Seed: LVVVGARGV (KRAS G12R)
YVVRGKRGL

SEQ ID NO: 33894 - protein, 9 aa, synthetic construct
  source 1..9: note = Seed: LVVVGARGV (KRAS G12R)
YVVRGKRGM

SEQ ID NO: 33895 - protein, 9 aa, synthetic construct
  source 1..9: note = Seed: LVVVGARGV (KRAS G12R)
YVVRGKRGQ

SEQ ID NO: 33896 - protein, 9 aa, synthetic construct
  source 1..9: note = Seed: LVVVGARGV (KRAS G12R)
YVVRGKRGR

SEQ ID NO: 33897 - protein, 9 aa, synthetic construct
  source 1..9: note = Seed: LVVVGARGV (KRAS G12R)
YVVRGKRGS

SEQ ID NO: 33898 - protein, 9 aa, synthetic construct
  source 1..9: note = Seed: LVVVGARGV (KRAS G12R)
YVVRGKRGT

SEQ ID NO: 33899 - protein, 9 aa, synthetic construct
  source 1..9: note = Seed: LVVVGARGV (KRAS G12R)
YVVRGKRGV

SEQ ID NO: 33900 - protein, 9 aa, synthetic construct
  source 1..9: note = Seed: LVVVGARGV (KRAS G12R)
YVVRGKRGW

SEQ ID NO: 33901 - protein, 9 aa, synthetic construct
  source 1..9: note = Seed: LVVVGARGV (KRAS G12R)
YVVRGKRGY

SEQ ID NO: 33902 - protein, 9 aa, synthetic construct
  source 1..9: note = Seed: LVVVGARGV (KRAS G12R)
YVVRGLRGF

SEQ ID NO: 33903 - protein, 9 aa, synthetic construct
  source 1..9: note = Seed: LVVVGARGV (KRAS G12R)
YVVRGLRGR

SEQ ID NO: 33904 - protein, 9 aa, synthetic construct
  source 1..9: note = Seed: LVVVGARGV (KRAS G12R)
YVVRGLRGY

SEQ ID NO: 33905 - protein, 9 aa, synthetic construct
  source 1..9: note = Seed: LVVVGARGV (KRAS G12R)
YVVRGMRGR

SEQ ID NO: 33906 - protein, 9 aa, synthetic construct
  source 1..9: note = Seed: LVVVGARGV (KRAS G12R)
YVVRGMRGY

SEQ ID NO: 33907 - protein, 9 aa, synthetic construct
  source 1..9: note = Seed: LVVVGARGV (KRAS G12R)
YVVRGNRGL

SEQ ID NO: 33908 - protein, 9 aa, synthetic construct
  source 1..9: note = Seed: LVVVGARGV (KRAS G12R)
YVVRGQRGL

SEQ ID NO: 33909 - protein, 9 aa, synthetic construct
  source 1..9: note = Seed: LVVVGARGV (KRAS G12R)
YVVRGRRGA

SEQ ID NO: 33910 - protein, 9 aa, synthetic construct
  source 1..9: note = Seed: LVVVGARGV (KRAS G12R)
YVVRGRRGC

SEQ ID NO: 33911 - protein, 9 aa, synthetic construct
  source 1..9: note = Seed: LVVVGARGV (KRAS G12R)
YVVRGRRGF

SEQ ID NO: 33912 - protein, 9 aa, synthetic construct
  source 1..9: note = Seed: LVVVGARGV (KRAS G12R)
YVVRGRRGG

SEQ ID NO: 33913 - protein, 9 aa, synthetic construct
  source 1..9: note = Seed: LVVVGARGV (KRAS G12R)
YVVRGRRGH

SEQ ID NO: 33914 - protein, 9 aa, synthetic construct
  source 1..9: note = Seed: LVVVGARGV (KRAS G12R)
YVVRGRRGI

SEQ ID NO: 33915 - protein, 9 aa, synthetic construct
  source 1..9: note = Seed: LVVVGARGV (KRAS G12R)
YVVRGRRGL

SEQ ID NO: 33916 - protein, 9 aa, synthetic construct
  source 1..9: note = Seed: LVVVGARGV (KRAS G12R)
YVVRGRRGM

SEQ ID NO: 33917 - protein, 9 aa, synthetic construct
  source 1..9: note = Seed: LVVVGARGV (KRAS G12R)
YVVRGRRGN

SEQ ID NO: 33918 - protein, 9 aa, synthetic construct
  source 1..9: note = Seed: LVVVGARGV (KRAS G12R)
YVVRGRRGQ

SEQ ID NO: 33919 - protein, 9 aa, synthetic construct
  source 1..9: note = Seed: LVVVGARGV (KRAS G12R)
YVVRGRRGR

SEQ ID NO: 33920 - protein, 9 aa, synthetic construct
  source 1..9: note = Seed: LVVVGARGV (KRAS G12R)
YVVRGRRGS

SEQ ID NO: 33921 - protein, 9 aa, synthetic construct
  source 1..9: note = Seed: LVVVGARGV (KRAS G12R)
YVVRGRRGT

SEQ ID NO: 33922 - protein, 9 aa, synthetic construct
  source 1..9: note = Seed: LVVVGARGV (KRAS G12R)
YVVRGRRGV

SEQ ID NO: 33923 - protein, 9 aa, synthetic construct
  source 1..9: note = Seed: LVVVGARGV (KRAS G12R)
YVVRGRRGW

SEQ ID NO: 33924 - protein, 9 aa, synthetic construct
  source 1..9: note = Seed: LVVVGARGV (KRAS G12R)
YVVRGRRGY

SEQ ID NO: 33925 - protein, 9 aa, synthetic construct
  source 1..9: note = Seed: LVVVGARGV (KRAS G12R)
YVVRGSRGF

SEQ ID NO: 33926 - protein, 9 aa, synthetic construct
  source 1..9: note = Seed: LVVVGARGV (KRAS G12R)
YVVRGSRGL

SEQ ID NO: 33927 - protein, 9 aa, synthetic construct
  source 1..9: note = Seed: LVVVGARGV (KRAS G12R)
YVVRGSRGY

SEQ ID NO: 33928 - protein, 9 aa, synthetic construct
  source 1..9: note = Seed: LVVVGARGV (KRAS G12R)
YVVRGTRGF

SEQ ID NO: 33929 - protein, 9 aa, synthetic construct
  source 1..9: note = Seed: LVVVGARGV (KRAS G12R)
YVVRGTRGL

SEQ ID NO: 33930 - protein, 9 aa, synthetic construct
  source 1..9: note = Seed: LVVVGARGV (KRAS G12R)
YVVRGTRGR

SEQ ID NO: 33931 - protein, 9 aa, synthetic construct
  source 1..9: note = Seed: LVVVGARGV (KRAS G12R)
YVVRGTRGY

SEQ ID NO: 33932 - protein, 9 aa, synthetic construct
  source 1..9: note = Seed: LVVVGARGV (KRAS G12R)
YVVRGVRGF

SEQ ID NO: 33933 - protein, 9 aa, synthetic construct
  source 1..9: note = Seed: LVVVGARGV (KRAS G12R)
YVVRGVRGI

SEQ ID NO: 33934 - protein, 9 aa, synthetic construct
  source 1..9: note = Seed: LVVVGARGV (KRAS G12R)
YVVRGVRGL

SEQ ID NO: 33935 - protein, 9 aa, synthetic construct
  source 1..9: note = Seed: LVVVGARGV (KRAS G12R)
YVVRGVRGM

SEQ ID NO: 33936 - protein, 9 aa, synthetic construct
  source 1..9: note = Seed: LVVVGARGV (KRAS G12R)
YVVRGVRGR

SEQ ID NO: 33937 - protein, 9 aa, synthetic construct
  source 1..9: note = Seed: LVVVGARGV (KRAS G12R)
YVVRGVRGV

SEQ ID NO: 33938 - protein, 9 aa, synthetic construct
  source 1..9: note = Seed: LVVVGARGV (KRAS G12R)
YVVRGVRGY

SEQ ID NO: 33939 - protein, 9 aa, synthetic construct
  source 1..9: note = Seed: LVVVGARGV (KRAS G12R)
YVVSGARGA

SEQ ID NO: 33940 - protein, 9 aa, synthetic construct
  source 1..9: note = Seed: LVVVGARGV (KRAS G12R)
YVVSGARGC

SEQ ID NO: 33941 - protein, 9 aa, synthetic construct
  source 1..9: note = Seed: LVVVGARGV (KRAS G12R)
YVVSGARGF

SEQ ID NO: 33942 - protein, 9 aa, synthetic construct
  source 1..9: note = Seed: LVVVGARGV (KRAS G12R)
YVVSGARGG

SEQ ID NO: 33943 - protein, 9 aa, synthetic construct
  source 1..9: note = Seed: LVVVGARGV (KRAS G12R)
YVVSGARGH

SEQ ID NO: 33944 - protein, 9 aa, synthetic construct
  source 1..9: note = Seed: LVVVGARGV (KRAS G12R)
YVVSGARGI

SEQ ID NO: 33945 - protein, 9 aa, synthetic construct
  source 1..9: note = Seed: LVVVGARGV (KRAS G12R)
YVVSGARGK

SEQ ID NO: 33946 - protein, 9 aa, synthetic construct
  source 1..9: note = Seed: LVVVGARGV (KRAS G12R)
YVVSGARGL

SEQ ID NO: 33947 - protein, 9 aa, synthetic construct
  source 1..9: note = Seed: LVVVGARGV (KRAS G12R)
YVVSGARGM

SEQ ID NO: 33948 - protein, 9 aa, synthetic construct
  source 1..9: note = Seed: LVVVGARGV (KRAS G12R)
YVVSGARGN

SEQ ID NO: 33949 - protein, 9 aa, synthetic construct
  source 1..9: note = Seed: LVVVGARGV (KRAS G12R)
YVVSGARGP

SEQ ID NO: 33950 - protein, 9 aa, synthetic construct
  source 1..9: note = Seed: LVVVGARGV (KRAS G12R)
YVVSGARGQ

SEQ ID NO: 33951 - protein, 9 aa, synthetic construct
  source 1..9: note = Seed: LVVVGARGV (KRAS G12R)
YVVSGARGR

SEQ ID NO: 33952 - protein, 9 aa, synthetic construct
  source 1..9: note = Seed: LVVVGARGV (KRAS G12R)
YVVSGARGS

SEQ ID NO: 33953 - protein, 9 aa, synthetic construct
  source 1..9: note = Seed: LVVVGARGV (KRAS G12R)
YVVSGARGT

SEQ ID NO: 33954 - protein, 9 aa, synthetic construct
  source 1..9: note = Seed: LVVVGARGV (KRAS G12R)
YVVSGARGV

SEQ ID NO: 33955 - protein, 9 aa, synthetic construct
  source 1..9: note = Seed: LVVVGARGV (KRAS G12R)
YVVSGARGW

SEQ ID NO: 33956 - protein, 9 aa, synthetic construct
  source 1..9: note = Seed: LVVVGARGV (KRAS G12R)
YVVSGARGY

SEQ ID NO: 33957 - protein, 9 aa, synthetic construct
  source 1..9: note = Seed: LVVVGARGV (KRAS G12R)
YVVSGCRGA

SEQ ID NO: 33958 - protein, 9 aa, synthetic construct
  source 1..9: note = Seed: LVVVGARGV (KRAS G12R)
YVVSGCRGI

SEQ ID NO: 33959 - protein, 9 aa, synthetic construct
  source 1..9: note = Seed: LVVVGARGV (KRAS G12R)
YVVSGCRGL

SEQ ID NO: 33960 - protein, 9 aa, synthetic construct
  source 1..9: note = Seed: LVVVGARGV (KRAS G12R)
YVVSGCRGV

SEQ ID NO: 33961 - protein, 9 aa, synthetic construct
  source 1..9: note = Seed: LVVVGARGV (KRAS G12R)
YVVSGFRGF

SEQ ID NO: 33962 - protein, 9 aa, synthetic construct
  source 1..9: note = Seed: LVVVGARGV (KRAS G12R)
YVVSGFRGI

SEQ ID NO: 33963 - protein, 9 aa, synthetic construct
  source 1..9: note = Seed: LVVVGARGV (KRAS G12R)
YVVSGFRGL

SEQ ID NO: 33964 - protein, 9 aa, synthetic construct
  source 1..9: note = Seed: LVVVGARGV (KRAS G12R)
YVVSGFRGM

SEQ ID NO: 33965 - protein, 9 aa, synthetic construct
  source 1..9: note = Seed: LVVVGARGV (KRAS G12R)
YVVSGFRGV

SEQ ID NO: 33966 - protein, 9 aa, synthetic construct
  source 1..9: note = Seed: LVVVGARGV (KRAS G12R)
YVVSGGRGA

SEQ ID NO: 33967 - protein, 9 aa, synthetic construct
  source 1..9: note = Seed: LVVVGARGV (KRAS G12R)
YVVSGGRGF

SEQ ID NO: 33968 - protein, 9 aa, synthetic construct
  source 1..9: note = Seed: LVVVGARGV (KRAS G12R)
YVVSGGRGG

SEQ ID NO: 33969 - protein, 9 aa, synthetic construct
  source 1..9: note = Seed: LVVVGARGV (KRAS G12R)
YVVSGGRGI

SEQ ID NO: 33970 - protein, 9 aa, synthetic construct
  source 1..9: note = Seed: LVVVGARGV (KRAS G12R)
YVVSGGRGL

SEQ ID NO: 33971 - protein, 9 aa, synthetic construct
  source 1..9: note = Seed: LVVVGARGV (KRAS G12R)
YVVSGGRGM

SEQ ID NO: 33972 - protein, 9 aa, synthetic construct
  source 1..9: note = Seed: LVVVGARGV (KRAS G12R)
YVVSGGRGN

SEQ ID NO: 33973 - protein, 9 aa, synthetic construct
  source 1..9: note = Seed: LVVVGARGV (KRAS G12R)
YVVSGGRGS

SEQ ID NO: 33974 - protein, 9 aa, synthetic construct
  source 1..9: note = Seed: LVVVGARGV (KRAS G12R)
YVVSGGRGT

SEQ ID NO: 33975 - protein, 9 aa, synthetic construct
  source 1..9: note = Seed: LVVVGARGV (KRAS G12R)
YVVSGGRGV

SEQ ID NO: 33976 - protein, 9 aa, synthetic construct
  source 1..9: note = Seed: LVVVGARGV (KRAS G12R)
YVVSGHRGI

SEQ ID NO: 33977 - protein, 9 aa, synthetic construct
  source 1..9: note = Seed: LVVVGARGV (KRAS G12R)
YVVSGHRGL

SEQ ID NO: 33978 - protein, 9 aa, synthetic construct
  source 1..9: note = Seed: LVVVGARGV (KRAS G12R)
YVVSGHRGV

SEQ ID NO: 33979 - protein, 9 aa, synthetic construct
  source 1..9: note = Seed: LVVVGARGV (KRAS G12R)
YVVSGIRGA

SEQ ID NO: 33980 - protein, 9 aa, synthetic construct
  source 1..9: note = Seed: LVVVGARGV (KRAS G12R)
YVVSGIRGF

SEQ ID NO: 33981 - protein, 9 aa, synthetic construct
  source 1..9: note = Seed: LVVVGARGV (KRAS G12R)
YVVSGIRGI

SEQ ID NO: 33982 - protein, 9 aa, synthetic construct
  source 1..9: note = Seed: LVVVGARGV (KRAS G12R)
YVVSGIRGL

SEQ ID NO: 33983 - protein, 9 aa, synthetic construct
  source 1..9: note = Seed: LVVVGARGV (KRAS G12R)
YVVSGIRGM

SEQ ID NO: 33984 - protein, 9 aa, synthetic construct
  source 1..9: note = Seed: LVVVGARGV (KRAS G12R)
YVVSGIRGN

SEQ ID NO: 33985 - protein, 9 aa, synthetic construct
  source 1..9: note = Seed: LVVVGARGV (KRAS G12R)
YVVSGIRGS

SEQ ID NO: 33986 - protein, 9 aa, synthetic construct
  source 1..9: note = Seed: LVVVGARGV (KRAS G12R)
YVVSGIRGT

SEQ ID NO: 33987 - protein, 9 aa, synthetic construct
  source 1..9: note = Seed: LVVVGARGV (KRAS G12R)
YVVSGIRGV

SEQ ID NO: 33988 - protein, 9 aa, synthetic construct
  source 1..9: note = Seed: LVVVGARGV (KRAS G12R)
YVVSGKRGA

SEQ ID NO: 33989 - protein, 9 aa, synthetic construct
  source 1..9: note = Seed: LVVVGARGV (KRAS G12R)
YVVSGKRGI

SEQ ID NO: 33990 - protein, 9 aa, synthetic construct
  source 1..9: note = Seed: LVVVGARGV (KRAS G12R)
YVVSGKRGL

SEQ ID NO: 33991 - protein, 9 aa, synthetic construct
  source 1..9: note = Seed: LVVVGARGV (KRAS G12R)
YVVSGKRGM

SEQ ID NO: 33992 - protein, 9 aa, synthetic construct
  source 1..9: note = Seed: LVVVGARGV (KRAS G12R)
YVVSGKRGR

SEQ ID NO: 33993 - protein, 9 aa, synthetic construct
  source 1..9: note = Seed: LVVVGARGV (KRAS G12R)
YVVSGKRGY

SEQ ID NO: 33994 - protein, 9 aa, synthetic construct
  source 1..9: note = Seed: LVVVGARGV (KRAS G12R)
YVVSGLRGA

SEQ ID NO: 33995 - protein, 9 aa, synthetic construct
  source 1..9: note = Seed: LVVVGARGV (KRAS G12R)
YVVSGLRGF

SEQ ID NO: 33996 - protein, 9 aa, synthetic construct
  source 1..9: note = Seed: LVVVGARGV (KRAS G12R)
YVVSGLRGI

SEQ ID NO: 33997 - protein, 9 aa, synthetic construct
  source 1..9: note = Seed: LVVVGARGV (KRAS G12R)
YVVSGLRGL

SEQ ID NO: 33998 - protein, 9 aa, synthetic construct
  source 1..9: note = Seed: LVVVGARGV (KRAS G12R)
YVVSGLRGM

SEQ ID NO: 33999 - protein, 9 aa, synthetic construct
  source 1..9: note = Seed: LVVVGARGV (KRAS G12R)
YVVSGLRGN

SEQ ID NO: 34000 - protein, 9 aa, synthetic construct
  source 1..9: note = Seed: LVVVGARGV (KRAS G12R)
YVVSGLRGV

SEQ ID NO: 34001 - protein, 9 aa, synthetic construct
  source 1..9: note = Seed: LVVVGARGV (KRAS G12R)
YVVSGMRGA

SEQ ID NO: 34002 - protein, 9 aa, synthetic construct
  source 1..9: note = Seed: LVVVGARGV (KRAS G12R)
YVVSGMRGF

SEQ ID NO: 34003 - protein, 9 aa, synthetic construct
  source 1..9: note = Seed: LVVVGARGV (KRAS G12R)
YVVSGMRGI

SEQ ID NO: 34004 - protein, 9 aa, synthetic construct
  source 1..9: note = Seed: LVVVGARGV (KRAS G12R)
YVVSGMRGL

SEQ ID NO: 34005 - protein, 9 aa, synthetic construct
  source 1..9: note = Seed: LVVVGARGV (KRAS G12R)
YVVSGMRGM

SEQ ID NO: 34006 - protein, 9 aa, synthetic construct
  source 1..9: note = Seed: LVVVGARGV (KRAS G12R)
YVVSGMRGV

SEQ ID NO: 34007 - protein, 9 aa, synthetic construct
  source 1..9: note = Seed: LVVVGARGV (KRAS G12R)
YVVSGNRGA

SEQ ID NO: 34008 - protein, 9 aa, synthetic construct
  source 1..9: note = Seed: LVVVGARGV (KRAS G12R)
YVVSGNRGF

SEQ ID NO: 34009 - protein, 9 aa, synthetic construct
  source 1..9: note = Seed: LVVVGARGV (KRAS G12R)
YVVSGNRGI

SEQ ID NO: 34010 - protein, 9 aa, synthetic construct
  source 1..9: note = Seed: LVVVGARGV (KRAS G12R)
YVVSGNRGL

SEQ ID NO: 34011 - protein, 9 aa, synthetic construct
  source 1..9: note = Seed: LVVVGARGV (KRAS G12R)
YVVSGNRGM

SEQ ID NO: 34012 - protein, 9 aa, synthetic construct
  source 1..9: note = Seed: LVVVGARGV (KRAS G12R)
YVVSGNRGS

SEQ ID NO: 34013 - protein, 9 aa, synthetic construct
  source 1..9: note = Seed: LVVVGARGV (KRAS G12R)
YVVSGNRGT

SEQ ID NO: 34014 - protein, 9 aa, synthetic construct
  source 1..9: note = Seed: LVVVGARGV (KRAS G12R)
YVVSGNRGV

SEQ ID NO: 34015 - protein, 9 aa, synthetic construct
  source 1..9: note = Seed: LVVVGARGV (KRAS G12R)
YVVSGPRGA

SEQ ID NO: 34016 - protein, 9 aa, synthetic construct
  source 1..9: note = Seed: LVVVGARGV (KRAS G12R)
YVVSGPRGF

SEQ ID NO: 34017 - protein, 9 aa, synthetic construct
  source 1..9: note = Seed: LVVVGARGV (KRAS G12R)
YVVSGPRGI

SEQ ID NO: 34018 - protein, 9 aa, synthetic construct
  source 1..9: note = Seed: LVVVGARGV (KRAS G12R)
YVVSGPRGL

SEQ ID NO: 34019 - protein, 9 aa, synthetic construct
  source 1..9: note = Seed: LVVVGARGV (KRAS G12R)
YVVSGPRGM

SEQ ID NO: 34020 - protein, 9 aa, synthetic construct
  source 1..9: note = Seed: LVVVGARGV (KRAS G12R)
YVVSGPRGN

SEQ ID NO: 34021 - protein, 9 aa, synthetic construct
  source 1..9: note = Seed: LVVVGARGV (KRAS G12R)
YVVSGPRGS

SEQ ID NO: 34022 - protein, 9 aa, synthetic construct
  source 1..9: note = Seed: LVVVGARGV (KRAS G12R)
YVVSGPRGT

SEQ ID NO: 34023 - protein, 9 aa, synthetic construct
  source 1..9: note = Seed: LVVVGARGV (KRAS G12R)
YVVSGPRGV

SEQ ID NO: 34024 - protein, 9 aa, synthetic construct
  source 1..9: note = Seed: LVVVGARGV (KRAS G12R)
YVVSGPRGW

SEQ ID NO: 34025 - protein, 9 aa, synthetic construct
  source 1..9: note = Seed: LVVVGARGV (KRAS G12R)
YVVSGQRGI

SEQ ID NO: 34026 - protein, 9 aa, synthetic construct
  source 1..9: note = Seed: LVVVGARGV (KRAS G12R)
YVVSGQRGL

SEQ ID NO: 34027 - protein, 9 aa, synthetic construct
  source 1..9: note = Seed: LVVVGARGV (KRAS G12R)
YVVSGQRGV

SEQ ID NO: 34028 - protein, 9 aa, synthetic construct
  source 1..9: note = Seed: LVVVGARGV (KRAS G12R)
YVVSGRRGA

SEQ ID NO: 34029 - protein, 9 aa, synthetic construct
  source 1..9: note = Seed: LVVVGARGV (KRAS G12R)
YVVSGRRGF

SEQ ID NO: 34030 - protein, 9 aa, synthetic construct
  source 1..9: note = Seed: LVVVGARGV (KRAS G12R)
YVVSGRRGH

SEQ ID NO: 34031 - protein, 9 aa, synthetic construct
  source 1..9: note = Seed: LVVVGARGV (KRAS G12R)
YVVSGRRGI

SEQ ID NO: 34032 - protein, 9 aa, synthetic construct
  source 1..9: note = Seed: LVVVGARGV (KRAS G12R)
YVVSGRRGK

SEQ ID NO: 34033 - protein, 9 aa, synthetic construct
  source 1..9: note = Seed: LVVVGARGV (KRAS G12R)
YVVSGRRGL

SEQ ID NO: 34034 - protein, 9 aa, synthetic construct
  source 1..9: note = Seed: LVVVGARGV (KRAS G12R)
YVVSGRRGM

SEQ ID NO: 34035 - protein, 9 aa, synthetic construct
  source 1..9: note = Seed: LVVVGARGV (KRAS G12R)
YVVSGRRGQ

SEQ ID NO: 34036 - protein, 9 aa, synthetic construct
  source 1..9: note = Seed: LVVVGARGV (KRAS G12R)
YVVSGRRGR

SEQ ID NO: 34037 - protein, 9 aa, synthetic construct
  source 1..9: note = Seed: LVVVGARGV (KRAS G12R)
YVVSGRRGS

SEQ ID NO: 34038 - protein, 9 aa, synthetic construct
  source 1..9: note = Seed: LVVVGARGV (KRAS G12R)
YVVSGRRGT

SEQ ID NO: 34039 - protein, 9 aa, synthetic construct
  source 1..9: note = Seed: LVVVGARGV (KRAS G12R)
YVVSGRRGV

SEQ ID NO: 34040 - protein, 9 aa, synthetic construct
  source 1..9: note = Seed: LVVVGARGV (KRAS G12R)
YVVSGRRGW

SEQ ID NO: 34041 - protein, 9 aa, synthetic construct
  source 1..9: note = Seed: LVVVGARGV (KRAS G12R)
YVVSGRRGY

SEQ ID NO: 34042 - protein, 9 aa, synthetic construct
  source 1..9: note = Seed: LVVVGARGV (KRAS G12R)
YVVSGSRGA

SEQ ID NO: 34043 - protein, 9 aa, synthetic construct
  source 1..9: note = Seed: LVVVGARGV (KRAS G12R)
YVVSGSRGC

SEQ ID NO: 34044 - protein, 9 aa, synthetic construct
  source 1..9: note = Seed: LVVVGARGV (KRAS G12R)
YVVSGSRGF

SEQ ID NO: 34045 - protein, 9 aa, synthetic construct
  source 1..9: note = Seed: LVVVGARGV (KRAS G12R)
YVVSGSRGG

SEQ ID NO: 34046 - protein, 9 aa, synthetic construct
  source 1..9: note = Seed: LVVVGARGV (KRAS G12R)
YVVSGSRGI

SEQ ID NO: 34047 - protein, 9 aa, synthetic construct
  source 1..9: note = Seed: LVVVGARGV (KRAS G12R)
YVVSGSRGL

SEQ ID NO: 34048 - protein, 9 aa, synthetic construct
  source 1..9: note = Seed: LVVVGARGV (KRAS G12R)
YVVSGSRGM

SEQ ID NO: 34049 - protein, 9 aa, synthetic construct
  source 1..9: note = Seed: LVVVGARGV (KRAS G12R)
YVVSGSRGN

SEQ ID NO: 34050 - protein, 9 aa, synthetic construct
  source 1..9: note = Seed: LVVVGARGV (KRAS G12R)
YVVSGSRGS

SEQ ID NO: 34051 - protein, 9 aa, synthetic construct
  source 1..9: note = Seed: LVVVGARGV (KRAS G12R)
YVVSGSRGT

SEQ ID NO: 34052 - protein, 9 aa, synthetic construct
  source 1..9: note = Seed: LVVVGARGV (KRAS G12R)
YVVSGSRGV

SEQ ID NO: 34053 - protein, 9 aa, synthetic construct
  source 1..9: note = Seed: LVVVGARGV (KRAS G12R)
YVVSGSRGW

SEQ ID NO: 34054 - protein, 9 aa, synthetic construct
  source 1..9: note = Seed: LVVVGARGV (KRAS G12R)
YVVSGSRGY

SEQ ID NO: 34055 - protein, 9 aa, synthetic construct
  source 1..9: note = Seed: LVVVGARGV (KRAS G12R)
YVVSGTRGA

SEQ ID NO: 34056 - protein, 9 aa, synthetic construct
  source 1..9: note = Seed: LVVVGARGV (KRAS G12R)
YVVSGTRGF

SEQ ID NO: 34057 - protein, 9 aa, synthetic construct
  source 1..9: note = Seed: LVVVGARGV (KRAS G12R)
YVVSGTRGI

SEQ ID NO: 34058 - protein, 9 aa, synthetic construct
  source 1..9: note = Seed: LVVVGARGV (KRAS G12R)
YVVSGTRGL

SEQ ID NO: 34059 - protein, 9 aa, synthetic construct
  source 1..9: note = Seed: LVVVGARGV (KRAS G12R)
YVVSGTRGM

SEQ ID NO: 34060 - protein, 9 aa, synthetic construct
  source 1..9: note = Seed: LVVVGARGV (KRAS G12R)
YVVSGTRGN

SEQ ID NO: 34061 - protein, 9 aa, synthetic construct
  source 1..9: note = Seed: LVVVGARGV (KRAS G12R)
YVVSGTRGS

SEQ ID NO: 34062 - protein, 9 aa, synthetic construct
  source 1..9: note = Seed: LVVVGARGV (KRAS G12R)
YVVSGTRGT

SEQ ID NO: 34063 - protein, 9 aa, synthetic construct
  source 1..9: note = Seed: LVVVGARGV (KRAS G12R)
YVVSGTRGV

SEQ ID NO: 34064 - protein, 9 aa, synthetic construct
  source 1..9: note = Seed: LVVVGARGV (KRAS G12R)
YVVSGVRGA

SEQ ID NO: 34065 - protein, 9 aa, synthetic construct
  source 1..9: note = Seed: LVVVGARGV (KRAS G12R)
YVVSGVRGF

SEQ ID NO: 34066 - protein, 9 aa, synthetic construct
  source 1..9: note = Seed: LVVVGARGV (KRAS G12R)
YVVSGVRGI

SEQ ID NO: 34067 - protein, 9 aa, synthetic construct
  source 1..9: note = Seed: LVVVGARGV (KRAS G12R)
YVVSGVRGL

SEQ ID NO: 34068 - protein, 9 aa, synthetic construct
  source 1..9: note = Seed: LVVVGARGV (KRAS G12R)
YVVSGVRGM

SEQ ID NO: 34069 - protein, 9 aa, synthetic construct
  source 1..9: note = Seed: LVVVGARGV (KRAS G12R)
YVVSGVRGN

SEQ ID NO: 34070 - protein, 9 aa, synthetic construct
  source 1..9: note = Seed: LVVVGARGV (KRAS G12R)
YVVSGVRGS

SEQ ID NO: 34071 - protein, 9 aa, synthetic construct
  source 1..9: note = Seed: LVVVGARGV (KRAS G12R)
YVVSGVRGT

SEQ ID NO: 34072 - protein, 9 aa, synthetic construct
  source 1..9: note = Seed: LVVVGARGV (KRAS G12R)
YVVSGVRGV

SEQ ID NO: 34073 - protein, 9 aa, synthetic construct
  source 1..9: note = Seed: LVVVGARGV (KRAS G12R)
YVVSGVRGY

SEQ ID NO: 34074 - protein, 9 aa, synthetic construct
  source 1..9: note = Seed: LVVVGARGV (KRAS G12R)
YVVSGWRGI

SEQ ID NO: 34075 - protein, 9 aa, synthetic construct
  source 1..9: note = Seed: LVVVGARGV (KRAS G12R)
YVVSGWRGL

SEQ ID NO: 34076 - protein, 9 aa, synthetic construct
  source 1..9: note = Seed: LVVVGARGV (KRAS G12R)
YVVSGWRGV

SEQ ID NO: 34077 - protein, 9 aa, synthetic construct
  source 1..9: note = Seed: LVVVGARGV (KRAS G12R)
YVVTGARGA

SEQ ID NO: 34078 - protein, 9 aa, synthetic construct
  source 1..9: note = Seed: LVVVGARGV (KRAS G12R)
YVVTGARGC

SEQ ID NO: 34079 - protein, 9 aa, synthetic construct
  source 1..9: note = Seed: LVVVGARGV (KRAS G12R)
YVVTGARGF

SEQ ID NO: 34080 - protein, 9 aa, synthetic construct
  source 1..9: note = Seed: LVVVGARGV (KRAS G12R)
YVVTGARGG

SEQ ID NO: 34081 - protein, 9 aa, synthetic construct
  source 1..9: note = Seed: LVVVGARGV (KRAS G12R)
YVVTGARGH

SEQ ID NO: 34082 - protein, 9 aa, synthetic construct
  source 1..9: note = Seed: LVVVGARGV (KRAS G12R)
YVVTGARGI

SEQ ID NO: 34083 - protein, 9 aa, synthetic construct
  source 1..9: note = Seed: LVVVGARGV (KRAS G12R)
YVVTGARGL

SEQ ID NO: 34084 - protein, 9 aa, synthetic construct
  source 1..9: note = Seed: LVVVGARGV (KRAS G12R)
YVVTGARGM

SEQ ID NO: 34085 - protein, 9 aa, synthetic construct
  source 1..9: note = Seed: LVVVGARGV (KRAS G12R)
YVVTGARGN

SEQ ID NO: 34086 - protein, 9 aa, synthetic construct
  source 1..9: note = Seed: LVVVGARGV (KRAS G12R)
YVVTGARGQ

SEQ ID NO: 34087 - protein, 9 aa, synthetic construct
  source 1..9: note = Seed: LVVVGARGV (KRAS G12R)
YVVTGARGS

SEQ ID NO: 34088 - protein, 9 aa, synthetic construct
  source 1..9: note = Seed: LVVVGARGV (KRAS G12R)
YVVTGARGT

SEQ ID NO: 34089 - protein, 9 aa, synthetic construct
  source 1..9: note = Seed: LVVVGARGV (KRAS G12R)
YVVTGARGV

SEQ ID NO: 34090 - protein, 9 aa, synthetic construct
  source 1..9: note = Seed: LVVVGARGV (KRAS G12R)
YVVTGARGW

SEQ ID NO: 34091 - protein, 9 aa, synthetic construct
  source 1..9: note = Seed: LVVVGARGV (KRAS G12R)
YVVTGARGY

SEQ ID NO: 34092 - protein, 9 aa, synthetic construct
  source 1..9: note = Seed: LVVVGARGV (KRAS G12R)
YVVTGFRGF

SEQ ID NO: 34093 - protein, 9 aa, synthetic construct
  source 1..9: note = Seed: LVVVGARGV (KRAS G12R)
YVVTGFRGI

SEQ ID NO: 34094 - protein, 9 aa, synthetic construct
  source 1..9: note = Seed: LVVVGARGV (KRAS G12R)
YVVTGFRGL

SEQ ID NO: 34095 - protein, 9 aa, synthetic construct
  source 1..9: note = Seed: LVVVGARGV (KRAS G12R)
YVVTGFRGM

SEQ ID NO: 34096 - protein, 9 aa, synthetic construct
  source 1..9: note = Seed: LVVVGARGV (KRAS G12R)
YVVTGFRGV

SEQ ID NO: 34097 - protein, 9 aa, synthetic construct
  source 1..9: note = Seed: LVVVGARGV (KRAS G12R)
YVVTGGRGA

SEQ ID NO: 34098 - protein, 9 aa, synthetic construct
  source 1..9: note = Seed: LVVVGARGV (KRAS G12R)
YVVTGGRGF

SEQ ID NO: 34099 - protein, 9 aa, synthetic construct
  source 1..9: note = Seed: LVVVGARGV (KRAS G12R)
YVVTGGRGI

SEQ ID NO: 34100 - protein, 9 aa, synthetic construct
  source 1..9: note = Seed: LVVVGARGV (KRAS G12R)
YVVTGGRGL

SEQ ID NO: 34101 - protein, 9 aa, synthetic construct
  source 1..9: note = Seed: LVVVGARGV (KRAS G12R)
YVVTGGRGM

SEQ ID NO: 34102 - protein, 9 aa, synthetic construct
  source 1..9: note = Seed: LVVVGARGV (KRAS G12R)
YVVTGGRGS

SEQ ID NO: 34103 - protein, 9 aa, synthetic construct
  source 1..9: note = Seed: LVVVGARGV (KRAS G12R)
YVVTGGRGT

SEQ ID NO: 34104 - protein, 9 aa, synthetic construct
  source 1..9: note = Seed: LVVVGARGV (KRAS G12R)
YVVTGGRGV

SEQ ID NO: 34105 - protein, 9 aa, synthetic construct
  source 1..9: note = Seed: LVVVGARGV (KRAS G12R)
YVVTGIRGA

SEQ ID NO: 34106 - protein, 9 aa, synthetic construct
  source 1..9: note = Seed: LVVVGARGV (KRAS G12R)
YVVTGIRGF

SEQ ID NO: 34107 - protein, 9 aa, synthetic construct
  source 1..9: note = Seed: LVVVGARGV (KRAS G12R)
YVVTGIRGI

SEQ ID NO: 34108 - protein, 9 aa, synthetic construct
  source 1..9: note = Seed: LVVVGARGV (KRAS G12R)
YVVTGIRGL

SEQ ID NO: 34109 - protein, 9 aa, synthetic construct
  source 1..9: note = Seed: LVVVGARGV (KRAS G12R)
YVVTGIRGM

SEQ ID NO: 34110 - protein, 9 aa, synthetic construct
  source 1..9: note = Seed: LVVVGARGV (KRAS G12R)
YVVTGIRGN

SEQ ID NO: 34111 - protein, 9 aa, synthetic construct
  source 1..9: note = Seed: LVVVGARGV (KRAS G12R)
YVVTGIRGS

SEQ ID NO: 34112 - protein, 9 aa, synthetic construct
  source 1..9: note = Seed: LVVVGARGV (KRAS G12R)
YVVTGIRGT

SEQ ID NO: 34113 - protein, 9 aa, synthetic construct
  source 1..9: note = Seed: LVVVGARGV (KRAS G12R)
YVVTGIRGV

SEQ ID NO: 34114 - protein, 9 aa, synthetic construct
  source 1..9: note = Seed: LVVVGARGV (KRAS G12R)
YVVTGKRGL

SEQ ID NO: 34115 - protein, 9 aa, synthetic construct
  source 1..9: note = Seed: LVVVGARGV (KRAS G12R)
YVVTGKRGM

SEQ ID NO: 34116 - protein, 9 aa, synthetic construct
  source 1..9: note = Seed: LVVVGARGV (KRAS G12R)
YVVTGKRGR

SEQ ID NO: 34117 - protein, 9 aa, synthetic construct
  source 1..9: note = Seed: LVVVGARGV (KRAS G12R)
YVVTGLRGA

SEQ ID NO: 34118 - protein, 9 aa, synthetic construct
  source 1..9: note = Seed: LVVVGARGV (KRAS G12R)
YVVTGLRGI

SEQ ID NO: 34119 - protein, 9 aa, synthetic construct
  source 1..9: note = Seed: LVVVGARGV (KRAS G12R)
YVVTGLRGL

SEQ ID NO: 34120 - protein, 9 aa, synthetic construct
  source 1..9: note = Seed: LVVVGARGV (KRAS G12R)
YVVTGLRGN

SEQ ID NO: 34121 - protein, 9 aa, synthetic construct
  source 1..9: note = Seed: LVVVGARGV (KRAS G12R)
YVVTGLRGV

SEQ ID NO: 34122 - protein, 9 aa, synthetic construct
  source 1..9: note = Seed: LVVVGARGV (KRAS G12R)
YVVTGMRGA

SEQ ID NO: 34123 - protein, 9 aa, synthetic construct
  source 1..9: note = Seed: LVVVGARGV (KRAS G12R)
YVVTGMRGI

SEQ ID NO: 34124 - protein, 9 aa, synthetic construct
  source 1..9: note = Seed: LVVVGARGV (KRAS G12R)
YVVTGMRGL

SEQ ID NO: 34125 - protein, 9 aa, synthetic construct
  source 1..9: note = Seed: LVVVGARGV (KRAS G12R)
YVVTGMRGM

SEQ ID NO: 34126 - protein, 9 aa, synthetic construct
  source 1..9: note = Seed: LVVVGARGV (KRAS G12R)
YVVTGMRGV

SEQ ID NO: 34127 - protein, 9 aa, synthetic construct
  source 1..9: note = Seed: LVVVGARGV (KRAS G12R)
YVVTGNRGA

SEQ ID NO: 34128 - protein, 9 aa, synthetic construct
  source 1..9: note = Seed: LVVVGARGV (KRAS G12R)
YVVTGNRGF

SEQ ID NO: 34129 - protein, 9 aa, synthetic construct
  source 1..9: note = Seed: LVVVGARGV (KRAS G12R)
YVVTGNRGI

SEQ ID NO: 34130 - protein, 9 aa, synthetic construct
  source 1..9: note = Seed: LVVVGARGV (KRAS G12R)
YVVTGNRGL

SEQ ID NO: 34131 - protein, 9 aa, synthetic construct
  source 1..9: note = Seed: LVVVGARGV (KRAS G12R)
YVVTGNRGM

SEQ ID NO: 34132 - protein, 9 aa, synthetic construct
  source 1..9: note = Seed: LVVVGARGV (KRAS G12R)
YVVTGNRGS

SEQ ID NO: 34133 - protein, 9 aa, synthetic construct
  source 1..9: note = Seed: LVVVGARGV (KRAS G12R)
YVVTGNRGT

SEQ ID NO: 34134 - protein, 9 aa, synthetic construct
  source 1..9: note = Seed: LVVVGARGV (KRAS G12R)
YVVTGNRGV

SEQ ID NO: 34135 - protein, 9 aa, synthetic construct
  source 1..9: note = Seed: LVVVGARGV (KRAS G12R)
YVVTGPRGA

SEQ ID NO: 34136 - protein, 9 aa, synthetic construct
  source 1..9: note = Seed: LVVVGARGV (KRAS G12R)
YVVTGPRGF

SEQ ID NO: 34137 - protein, 9 aa, synthetic construct
  source 1..9: note = Seed: LVVVGARGV (KRAS G12R)
YVVTGPRGI

SEQ ID NO: 34138 - protein, 9 aa, synthetic construct
  source 1..9: note = Seed: LVVVGARGV (KRAS G12R)
YVVTGPRGL

SEQ ID NO: 34139 - protein, 9 aa, synthetic construct
  source 1..9: note = Seed: LVVVGARGV (KRAS G12R)
YVVTGPRGM

SEQ ID NO: 34140 - protein, 9 aa, synthetic construct
  source 1..9: note = Seed: LVVVGARGV (KRAS G12R)
YVVTGPRGN

SEQ ID NO: 34141 - protein, 9 aa, synthetic construct
  source 1..9: note = Seed: LVVVGARGV (KRAS G12R)
YVVTGPRGS

SEQ ID NO: 34142 - protein, 9 aa, synthetic construct
  source 1..9: note = Seed: LVVVGARGV (KRAS G12R)
YVVTGPRGT

SEQ ID NO: 34143 - protein, 9 aa, synthetic construct
  source 1..9: note = Seed: LVVVGARGV (KRAS G12R)
YVVTGPRGV

SEQ ID NO: 34144 - protein, 9 aa, synthetic construct
  source 1..9: note = Seed: LVVVGARGV (KRAS G12R)
YVVTGRRGA

SEQ ID NO: 34145 - protein, 9 aa, synthetic construct
  source 1..9: note = Seed: LVVVGARGV (KRAS G12R)
YVVTGRRGF

SEQ ID NO: 34146 - protein, 9 aa, synthetic construct
  source 1..9: note = Seed: LVVVGARGV (KRAS G12R)
YVVTGRRGH

SEQ ID NO: 34147 - protein, 9 aa, synthetic construct
  source 1..9: note = Seed: LVVVGARGV (KRAS G12R)
YVVTGRRGI

SEQ ID NO: 34148 - protein, 9 aa, synthetic construct
  source 1..9: note = Seed: LVVVGARGV (KRAS G12R)
YVVTGRRGK

SEQ ID NO: 34149 - protein, 9 aa, synthetic construct
  source 1..9: note = Seed: LVVVGARGV (KRAS G12R)
YVVTGRRGL

SEQ ID NO: 34150 - protein, 9 aa, synthetic construct
  source 1..9: note = Seed: LVVVGARGV (KRAS G12R)
YVVTGRRGM

SEQ ID NO: 34151 - protein, 9 aa, synthetic construct
  source 1..9: note = Seed: LVVVGARGV (KRAS G12R)
YVVTGRRGQ

SEQ ID NO: 34152 - protein, 9 aa, synthetic construct
  source 1..9: note = Seed: LVVVGARGV (KRAS G12R)
YVVTGRRGR

SEQ ID NO: 34153 - protein, 9 aa, synthetic construct
  source 1..9: note = Seed: LVVVGARGV (KRAS G12R)
YVVTGRRGS

SEQ ID NO: 34154 - protein, 9 aa, synthetic construct
  source 1..9: note = Seed: LVVVGARGV (KRAS G12R)
YVVTGRRGT

SEQ ID NO: 34155 - protein, 9 aa, synthetic construct
  source 1..9: note = Seed: LVVVGARGV (KRAS G12R)
YVVTGRRGV

SEQ ID NO: 34156 - protein, 9 aa, synthetic construct
  source 1..9: note = Seed: LVVVGARGV (KRAS G12R)
YVVTGRRGW

SEQ ID NO: 34157 - protein, 9 aa, synthetic construct
  source 1..9: note = Seed: LVVVGARGV (KRAS G12R)
YVVTGRRGY

SEQ ID NO: 34158 - protein, 9 aa, synthetic construct
  source 1..9: note = Seed: LVVVGARGV (KRAS G12R)
YVVTGSRGA

SEQ ID NO: 34159 - protein, 9 aa, synthetic construct
  source 1..9: note = Seed: LVVVGARGV (KRAS G12R)
YVVTGSRGF

SEQ ID NO: 34160 - protein, 9 aa, synthetic construct
  source 1..9: note = Seed: LVVVGARGV (KRAS G12R)
YVVTGSRGI

SEQ ID NO: 34161 - protein, 9 aa, synthetic construct
  source 1..9: note = Seed: LVVVGARGV (KRAS G12R)
YVVTGSRGL

SEQ ID NO: 34162 - protein, 9 aa, synthetic construct
  source 1..9: note = Seed: LVVVGARGV (KRAS G12R)
YVVTGSRGM

SEQ ID NO: 34163 - protein, 9 aa, synthetic construct
  source 1..9: note = Seed: LVVVGARGV (KRAS G12R)
YVVTGSRGN

SEQ ID NO: 34164 - protein, 9 aa, synthetic construct
  source 1..9: note = Seed: LVVVGARGV (KRAS G12R)
YVVTGSRGS

SEQ ID NO: 34165 - protein, 9 aa, synthetic construct
  source 1..9: note = Seed: LVVVGARGV (KRAS G12R)
YVVTGSRGT

SEQ ID NO: 34166 - protein, 9 aa, synthetic construct
  source 1..9: note = Seed: LVVVGARGV (KRAS G12R)
YVVTGSRGV

SEQ ID NO: 34167 - protein, 9 aa, synthetic construct
  source 1..9: note = Seed: LVVVGARGV (KRAS G12R)
YVVTGSRGW

SEQ ID NO: 34168 - protein, 9 aa, synthetic construct
  source 1..9: note = Seed: LVVVGARGV (KRAS G12R)
YVVTGSRGY

SEQ ID NO: 34169 - protein, 9 aa, synthetic construct
  source 1..9: note = Seed: LVVVGARGV (KRAS G12R)
YVVTGTRGA

SEQ ID NO: 34170 - protein, 9 aa, synthetic construct
  source 1..9: note = Seed: LVVVGARGV (KRAS G12R)
YVVTGTRGF

SEQ ID NO: 34171 - protein, 9 aa, synthetic construct
  source 1..9: note = Seed: LVVVGARGV (KRAS G12R)
YVVTGTRGI

SEQ ID NO: 34172 - protein, 9 aa, synthetic construct
  source 1..9: note = Seed: LVVVGARGV (KRAS G12R)
YVVTGTRGL

SEQ ID NO: 34173 - protein, 9 aa, synthetic construct
  source 1..9: note = Seed: LVVVGARGV (KRAS G12R)
YVVTGTRGM

SEQ ID NO: 34174 - protein, 9 aa, synthetic construct
  source 1..9: note = Seed: LVVVGARGV (KRAS G12R)
YVVTGTRGN

SEQ ID NO: 34175 - protein, 9 aa, synthetic construct
  source 1..9: note = Seed: LVVVGARGV (KRAS G12R)
YVVTGTRGT

SEQ ID NO: 34176 - protein, 9 aa, synthetic construct
  source 1..9: note = Seed: LVVVGARGV (KRAS G12R)
YVVTGTRGV

SEQ ID NO: 34177 - protein, 9 aa, synthetic construct
  source 1..9: note = Seed: LVVVGARGV (KRAS G12R)
YVVTGVRGA

SEQ ID NO: 34178 - protein, 9 aa, synthetic construct
  source 1..9: note = Seed: LVVVGARGV (KRAS G12R)
YVVTGVRGF

SEQ ID NO: 34179 - protein, 9 aa, synthetic construct
  source 1..9: note = Seed: LVVVGARGV (KRAS G12R)
YVVTGVRGI

SEQ ID NO: 34180 - protein, 9 aa, synthetic construct
  source 1..9: note = Seed: LVVVGARGV (KRAS G12R)
YVVTGVRGL

SEQ ID NO: 34181 - protein, 9 aa, synthetic construct
  source 1..9: note = Seed: LVVVGARGV (KRAS G12R)
YVVTGVRGM

SEQ ID NO: 34182 - protein, 9 aa, synthetic construct
  source 1..9: note = Seed: LVVVGARGV (KRAS G12R)
YVVTGVRGN

SEQ ID NO: 34183 - protein, 9 aa, synthetic construct
  source 1..9: note = Seed: LVVVGARGV (KRAS G12R)
YVVTGVRGS

SEQ ID NO: 34184 - protein, 9 aa, synthetic construct
  source 1..9: note = Seed: LVVVGARGV (KRAS G12R)
YVVTGVRGT

SEQ ID NO: 34185 - protein, 9 aa, synthetic construct
  source 1..9: note = Seed: LVVVGARGV (KRAS G12R)
YVVTGVRGV

SEQ ID NO: 34186 - protein, 9 aa, synthetic construct
  source 1..9: note = Seed: LVVVGARGV (KRAS G12R)
YVVTGWRGL

SEQ ID NO: 34187 - protein, 9 aa, synthetic construct
  source 1..9: note = Seed: LVVVGARGV (KRAS G12R)
YVVVGARGA

SEQ ID NO: 34188 - protein, 9 aa, synthetic construct
  source 1..9: note = Seed: LVVVGARGV (KRAS G12R)
YVVVGARGC

SEQ ID NO: 34189 - protein, 9 aa, synthetic construct
  source 1..9: note = Seed: LVVVGARGV (KRAS G12R)
YVVVGARGD

SEQ ID NO: 34190 - protein, 9 aa, synthetic construct
  source 1..9: note = Seed: LVVVGARGV (KRAS G12R)
YVVVGARGE

SEQ ID NO: 34191 - protein, 9 aa, synthetic construct
  source 1..9: note = Seed: LVVVGARGV (KRAS G12R)
YVVVGARGF

SEQ ID NO: 34192 - protein, 9 aa, synthetic construct
  source 1..9: note = Seed: LVVVGARGV (KRAS G12R)
YVVVGARGG

SEQ ID NO: 34193 - protein, 9 aa, synthetic construct
  source 1..9: note = Seed: LVVVGARGV (KRAS G12R)
YVVVGARGH

SEQ ID NO: 34194 - protein, 9 aa, synthetic construct
  source 1..9: note = Seed: LVVVGARGV (KRAS G12R)
YVVVGARGI

SEQ ID NO: 34195 - protein, 9 aa, synthetic construct
  source 1..9: note = Seed: LVVVGARGV (KRAS G12R)
YVVVGARGK

SEQ ID NO: 34196 - protein, 9 aa, synthetic construct
  source 1..9: note = Seed: LVVVGARGV (KRAS G12R)
YVVVGARGL

SEQ ID NO: 34197 - protein, 9 aa, synthetic construct
  source 1..9: note = Seed: LVVVGARGV (KRAS G12R)
YVVVGARGM

SEQ ID NO: 34198 - protein, 9 aa, synthetic construct
  source 1..9: note = Seed: LVVVGARGV (KRAS G12R)
YVVVGARGN

SEQ ID NO: 34199 - protein, 9 aa, synthetic construct
  source 1..9: note = Seed: LVVVGARGV (KRAS G12R)
YVVVGARGP

SEQ ID NO: 34200 - protein, 9 aa, synthetic construct
  source 1..9: note = Seed: LVVVGARGV (KRAS G12R)
YVVVGARGQ

SEQ ID NO: 34201 - protein, 9 aa, synthetic construct
  source 1..9: note = Seed: LVVVGARGV (KRAS G12R)
YVVVGARGR

SEQ ID NO: 34202 - protein, 9 aa, synthetic construct
  source 1..9: note = Seed: LVVVGARGV (KRAS G12R)
YVVVGARGS

SEQ ID NO: 34203 - protein, 9 aa, synthetic construct
  source 1..9: note = Seed: LVVVGARGV (KRAS G12R)
YVVVGARGT

SEQ ID NO: 34204 - protein, 9 aa, synthetic construct
  source 1..9: note = Seed: LVVVGARGV (KRAS G12R)
YVVVGARGV

SEQ ID NO: 34205 - protein, 9 aa, synthetic construct
  source 1..9: note = Seed: LVVVGARGV (KRAS G12R)
YVVVGARGW

SEQ ID NO: 34206 - protein, 9 aa, synthetic construct
  source 1..9: note = Seed: LVVVGARGV (KRAS G12R)
YVVVGARGY

SEQ ID NO: 34207 - protein, 9 aa, synthetic construct
  source 1..9: note = Seed: LVVVGARGV (KRAS G12R)
YVVVGCRGA

SEQ ID NO: 34208 - protein, 9 aa, synthetic construct
  source 1..9: note = Seed: LVVVGARGV (KRAS G12R)
YVVVGCRGI

SEQ ID NO: 34209 - protein, 9 aa, synthetic construct
  source 1..9: note = Seed: LVVVGARGV (KRAS G12R)
YVVVGCRGL

SEQ ID NO: 34210 - protein, 9 aa, synthetic construct
  source 1..9: note = Seed: LVVVGARGV (KRAS G12R)
YVVVGCRGV

SEQ ID NO: 34211 - protein, 9 aa, synthetic construct
  source 1..9: note = Seed: LVVVGARGV (KRAS G12R)
YVVVGDRGL

SEQ ID NO: 34212 - protein, 9 aa, synthetic construct
  source 1..9: note = Seed: LVVVGARGV (KRAS G12R)
YVVVGERGL

SEQ ID NO: 34213 - protein, 9 aa, synthetic construct
  source 1..9: note = Seed: LVVVGARGV (KRAS G12R)
YVVVGFRGF

SEQ ID NO: 34214 - protein, 9 aa, synthetic construct
  source 1..9: note = Seed: LVVVGARGV (KRAS G12R)
YVVVGFRGI

SEQ ID NO: 34215 - protein, 9 aa, synthetic construct
  source 1..9: note = Seed: LVVVGARGV (KRAS G12R)
YVVVGFRGL

SEQ ID NO: 34216 - protein, 9 aa, synthetic construct
  source 1..9: note = Seed: LVVVGARGV (KRAS G12R)
YVVVGFRGM

SEQ ID NO: 34217 - protein, 9 aa, synthetic construct
  source 1..9: note = Seed: LVVVGARGV (KRAS G12R)
YVVVGFRGV

SEQ ID NO: 34218 - protein, 9 aa, synthetic construct
  source 1..9: note = Seed: LVVVGARGV (KRAS G12R)
YVVVGGRGA

SEQ ID NO: 34219 - protein, 9 aa, synthetic construct
  source 1..9: note = Seed: LVVVGARGV (KRAS G12R)
YVVVGGRGC

SEQ ID NO: 34220 - protein, 9 aa, synthetic construct
  source 1..9: note = Seed: LVVVGARGV (KRAS G12R)
YVVVGGRGF

SEQ ID NO: 34221 - protein, 9 aa, synthetic construct
  source 1..9: note = Seed: LVVVGARGV (KRAS G12R)
YVVVGGRGG

SEQ ID NO: 34222 - protein, 9 aa, synthetic construct
  source 1..9: note = Seed: LVVVGARGV (KRAS G12R)
YVVVGGRGH

SEQ ID NO: 34223 - protein, 9 aa, synthetic construct
  source 1..9: note = Seed: LVVVGARGV (KRAS G12R)
YVVVGGRGI

SEQ ID NO: 34224 - protein, 9 aa, synthetic construct
  source 1..9: note = Seed: LVVVGARGV (KRAS G12R)
YVVVGGRGL

SEQ ID NO: 34225 - protein, 9 aa, synthetic construct
  source 1..9: note = Seed: LVVVGARGV (KRAS G12R)
YVVVGGRGM

SEQ ID NO: 34226 - protein, 9 aa, synthetic construct
  source 1..9: note = Seed: LVVVGARGV (KRAS G12R)
YVVVGGRGN

SEQ ID NO: 34227 - protein, 9 aa, synthetic construct
  source 1..9: note = Seed: LVVVGARGV (KRAS G12R)
YVVVGGRGP

SEQ ID NO: 34228 - protein, 9 aa, synthetic construct
  source 1..9: note = Seed: LVVVGARGV (KRAS G12R)
YVVVGGRGQ

SEQ ID NO: 34229 - protein, 9 aa, synthetic construct
  source 1..9: note = Seed: LVVVGARGV (KRAS G12R)
YVVVGGRGS

SEQ ID NO: 34230 - protein, 9 aa, synthetic construct
  source 1..9: note = Seed: LVVVGARGV (KRAS G12R)
YVVVGGRGT

SEQ ID NO: 34231 - protein, 9 aa, synthetic construct
  source 1..9: note = Seed: LVVVGARGV (KRAS G12R)
YVVVGGRGV

SEQ ID NO: 34232 - protein, 9 aa, synthetic construct
  source 1..9: note = Seed: LVVVGARGV (KRAS G12R)
YVVVGGRGW

SEQ ID NO: 34233 - protein, 9 aa, synthetic construct
  source 1..9: note = Seed: LVVVGARGV (KRAS G12R)
YVVVGGRGY

SEQ ID NO: 34234 - protein, 9 aa, synthetic construct
  source 1..9: note = Seed: LVVVGARGV (KRAS G12R)
YVVVGHRGA

SEQ ID NO: 34235 - protein, 9 aa, synthetic construct
  source 1..9: note = Seed: LVVVGARGV (KRAS G12R)
YVVVGHRGF

SEQ ID NO: 34236 - protein, 9 aa, synthetic construct
  source 1..9: note = Seed: LVVVGARGV (KRAS G12R)
YVVVGHRGI

SEQ ID NO: 34237 - protein, 9 aa, synthetic construct
  source 1..9: note = Seed: LVVVGARGV (KRAS G12R)
YVVVGHRGL

SEQ ID NO: 34238 - protein, 9 aa, synthetic construct
  source 1..9: note = Seed: LVVVGARGV (KRAS G12R)
YVVVGHRGM

SEQ ID NO: 34239 - protein, 9 aa, synthetic construct
  source 1..9: note = Seed: LVVVGARGV (KRAS G12R)
YVVVGHRGV

SEQ ID NO: 34240 - protein, 9 aa, synthetic construct
  source 1..9: note = Seed: LVVVGARGV (KRAS G12R)
YVVVGIRGA

SEQ ID NO: 34241 - protein, 9 aa, synthetic construct
  source 1..9: note = Seed: LVVVGARGV (KRAS G12R)
YVVVGIRGF

SEQ ID NO: 34242 - protein, 9 aa, synthetic construct
  source 1..9: note = Seed: LVVVGARGV (KRAS G12R)
YVVVGIRGG

SEQ ID NO: 34243 - protein, 9 aa, synthetic construct
  source 1..9: note = Seed: LVVVGARGV (KRAS G12R)
YVVVGIRGH

SEQ ID NO: 34244 - protein, 9 aa, synthetic construct
  source 1..9: note = Seed: LVVVGARGV (KRAS G12R)
YVVVGIRGI

SEQ ID NO: 34245 - protein, 9 aa, synthetic construct
  source 1..9: note = Seed: LVVVGARGV (KRAS G12R)
YVVVGIRGL

SEQ ID NO: 34246 - protein, 9 aa, synthetic construct
  source 1..9: note = Seed: LVVVGARGV (KRAS G12R)
YVVVGIRGM

SEQ ID NO: 34247 - protein, 9 aa, synthetic construct
  source 1..9: note = Seed: LVVVGARGV (KRAS G12R)
YVVVGIRGN

SEQ ID NO: 34248 - protein, 9 aa, synthetic construct
  source 1..9: note = Seed: LVVVGARGV (KRAS G12R)
YVVVGIRGQ

SEQ ID NO: 34249 - protein, 9 aa, synthetic construct
  source 1..9: note = Seed: LVVVGARGV (KRAS G12R)
YVVVGIRGR

SEQ ID NO: 34250 - protein, 9 aa, synthetic construct
  source 1..9: note = Seed: LVVVGARGV (KRAS G12R)
YVVVGIRGS

SEQ ID NO: 34251 - protein, 9 aa, synthetic construct
  source 1..9: note = Seed: LVVVGARGV (KRAS G12R)
YVVVGIRGT

SEQ ID NO: 34252 - protein, 9 aa, synthetic construct
  source 1..9: note = Seed: LVVVGARGV (KRAS G12R)
YVVVGIRGV

SEQ ID NO: 34253 - protein, 9 aa, synthetic construct
  source 1..9: note = Seed: LVVVGARGV (KRAS G12R)
YVVVGKRGA

SEQ ID NO: 34254 - protein, 9 aa, synthetic construct
  source 1..9: note = Seed: LVVVGARGV (KRAS G12R)
YVVVGKRGF

SEQ ID NO: 34255 - protein, 9 aa, synthetic construct
  source 1..9: note = Seed: LVVVGARGV (KRAS G12R)
YVVVGKRGG

SEQ ID NO: 34256 - protein, 9 aa, synthetic construct
  source 1..9: note = Seed: LVVVGARGV (KRAS G12R)
YVVVGKRGH

SEQ ID NO: 34257 - protein, 9 aa, synthetic construct
  source 1..9: note = Seed: LVVVGARGV (KRAS G12R)
YVVVGKRGI

SEQ ID NO: 34258 - protein, 9 aa, synthetic construct
  source 1..9: note = Seed: LVVVGARGV (KRAS G12R)
YVVVGKRGK

SEQ ID NO: 34259 - protein, 9 aa, synthetic construct
  source 1..9: note = Seed: LVVVGARGV (KRAS G12R)
YVVVGKRGL

SEQ ID NO: 34260 - protein, 9 aa, synthetic construct
  source 1..9: note = Seed: LVVVGARGV (KRAS G12R)
YVVVGKRGM

SEQ ID NO: 34261 - protein, 9 aa, synthetic construct
  source 1..9: note = Seed: LVVVGARGV (KRAS G12R)
YVVVGKRGN

SEQ ID NO: 34262 - protein, 9 aa, synthetic construct
  source 1..9: note = Seed: LVVVGARGV (KRAS G12R)
YVVVGKRGP

SEQ ID NO: 34263 - protein, 9 aa, synthetic construct
  source 1..9: note = Seed: LVVVGARGV (KRAS G12R)
YVVVGKRGQ

SEQ ID NO: 34264 - protein, 9 aa, synthetic construct
  source 1..9: note = Seed: LVVVGARGV (KRAS G12R)
YVVVGKRGR

SEQ ID NO: 34265 - protein, 9 aa, synthetic construct
  source 1..9: note = Seed: LVVVGARGV (KRAS G12R)
YVVVGKRGS

SEQ ID NO: 34266 - protein, 9 aa, synthetic construct
  source 1..9: note = Seed: LVVVGARGV (KRAS G12R)
YVVVGKRGT

SEQ ID NO: 34267 - protein, 9 aa, synthetic construct
  source 1..9: note = Seed: LVVVGARGV (KRAS G12R)
YVVVGKRGV

SEQ ID NO: 34268 - protein, 9 aa, synthetic construct
  source 1..9: note = Seed: LVVVGARGV (KRAS G12R)
YVVVGKRGW

SEQ ID NO: 34269 - protein, 9 aa, synthetic construct
  source 1..9: note = Seed: LVVVGARGV (KRAS G12R)
YVVVGKRGY

SEQ ID NO: 34270 - protein, 9 aa, synthetic construct
  source 1..9: note = Seed: LVVVGARGV (KRAS G12R)
YVVVGLRGA

SEQ ID NO: 34271 - protein, 9 aa, synthetic construct
  source 1..9: note = Seed: LVVVGARGV (KRAS G12R)
YVVVGLRGI

SEQ ID NO: 34272 - protein, 9 aa, synthetic construct
  source 1..9: note = Seed: LVVVGARGV (KRAS G12R)
YVVVGLRGL

SEQ ID NO: 34273 - protein, 9 aa, synthetic construct
  source 1..9: note = Seed: LVVVGARGV (KRAS G12R)
YVVVGLRGM

SEQ ID NO: 34274 - protein, 9 aa, synthetic construct
  source 1..9: note = Seed: LVVVGARGV (KRAS G12R)
YVVVGLRGN

SEQ ID NO: 34275 - protein, 9 aa, synthetic construct
  source 1..9: note = Seed: LVVVGARGV (KRAS G12R)
YVVVGLRGR

SEQ ID NO: 34276 - protein, 9 aa, synthetic construct
  source 1..9: note = Seed: LVVVGARGV (KRAS G12R)
YVVVGLRGS

SEQ ID NO: 34277 - protein, 9 aa, synthetic construct
  source 1..9: note = Seed: LVVVGARGV (KRAS G12R)
YVVVGLRGT

SEQ ID NO: 34278 - protein, 9 aa, synthetic construct
  source 1..9: note = Seed: LVVVGARGV (KRAS G12R)
YVVVGLRGV

SEQ ID NO: 34279 - protein, 9 aa, synthetic construct
  source 1..9: note = Seed: LVVVGARGV (KRAS G12R)
YVVVGMRGA

SEQ ID NO: 34280 - protein, 9 aa, synthetic construct
  source 1..9: note = Seed: LVVVGARGV (KRAS G12R)
YVVVGMRGF

SEQ ID NO: 34281 - protein, 9 aa, synthetic construct
  source 1..9: note = Seed: LVVVGARGV (KRAS G12R)
YVVVGMRGI

SEQ ID NO: 34282 - protein, 9 aa, synthetic construct
  source 1..9: note = Seed: LVVVGARGV (KRAS G12R)
YVVVGMRGL

SEQ ID NO: 34283 - protein, 9 aa, synthetic construct
  source 1..9: note = Seed: LVVVGARGV (KRAS G12R)
YVVVGMRGM

SEQ ID NO: 34284 - protein, 9 aa, synthetic construct
  source 1..9: note = Seed: LVVVGARGV (KRAS G12R)
YVVVGMRGN

SEQ ID NO: 34285 - protein, 9 aa, synthetic construct
  source 1..9: note = Seed: LVVVGARGV (KRAS G12R)
YVVVGMRGR

SEQ ID NO: 34286 - protein, 9 aa, synthetic construct
  source 1..9: note = Seed: LVVVGARGV (KRAS G12R)
YVVVGMRGS

SEQ ID NO: 34287 - protein, 9 aa, synthetic construct
  source 1..9: note = Seed: LVVVGARGV (KRAS G12R)
YVVVGMRGT

SEQ ID NO: 34288 - protein, 9 aa, synthetic construct
  source 1..9: note = Seed: LVVVGARGV (KRAS G12R)
YVVVGMRGV

SEQ ID NO: 34289 - protein, 9 aa, synthetic construct
  source 1..9: note = Seed: LVVVGARGV (KRAS G12R)
YVVVGNRGA

SEQ ID NO: 34290 - protein, 9 aa, synthetic construct
  source 1..9: note = Seed: LVVVGARGV (KRAS G12R)
YVVVGNRGC

SEQ ID NO: 34291 - protein, 9 aa, synthetic construct
  source 1..9: note = Seed: LVVVGARGV (KRAS G12R)
YVVVGNRGF

SEQ ID NO: 34292 - protein, 9 aa, synthetic construct
  source 1..9: note = Seed: LVVVGARGV (KRAS G12R)
YVVVGNRGG

SEQ ID NO: 34293 - protein, 9 aa, synthetic construct
  source 1..9: note = Seed: LVVVGARGV (KRAS G12R)
YVVVGNRGI

SEQ ID NO: 34294 - protein, 9 aa, synthetic construct
  source 1..9: note = Seed: LVVVGARGV (KRAS G12R)
YVVVGNRGL

SEQ ID NO: 34295 - protein, 9 aa, synthetic construct
  source 1..9: note = Seed: LVVVGARGV (KRAS G12R)
YVVVGNRGM

SEQ ID NO: 34296 - protein, 9 aa, synthetic construct
  source 1..9: note = Seed: LVVVGARGV (KRAS G12R)
YVVVGNRGN

SEQ ID NO: 34297 - protein, 9 aa, synthetic construct
  source 1..9: note = Seed: LVVVGARGV (KRAS G12R)
YVVVGNRGP

SEQ ID NO: 34298 - protein, 9 aa, synthetic construct
  source 1..9: note = Seed: LVVVGARGV (KRAS G12R)
YVVVGNRGR

SEQ ID NO: 34299 - protein, 9 aa, synthetic construct
  source 1..9: note = Seed: LVVVGARGV (KRAS G12R)
YVVVGNRGS

SEQ ID NO: 34300 - protein, 9 aa, synthetic construct
  source 1..9: note = Seed: LVVVGARGV (KRAS G12R)
YVVVGNRGT

SEQ ID NO: 34301 - protein, 9 aa, synthetic construct
  source 1..9: note = Seed: LVVVGARGV (KRAS G12R)
YVVVGNRGV

SEQ ID NO: 34302 - protein, 9 aa, synthetic construct
  source 1..9: note = Seed: LVVVGARGV (KRAS G12R)
YVVVGNRGW

SEQ ID NO: 34303 - protein, 9 aa, synthetic construct
  source 1..9: note = Seed: LVVVGARGV (KRAS G12R)
YVVVGNRGY

SEQ ID NO: 34304 - protein, 9 aa, synthetic construct
  source 1..9: note = Seed: LVVVGARGV (KRAS G12R)
YVVVGPRGA

SEQ ID NO: 34305 - protein, 9 aa, synthetic construct
  source 1..9: note = Seed: LVVVGARGV (KRAS G12R)
YVVVGPRGC

SEQ ID NO: 34306 - protein, 9 aa, synthetic construct
  source 1..9: note = Seed: LVVVGARGV (KRAS G12R)
YVVVGPRGF

SEQ ID NO: 34307 - protein, 9 aa, synthetic construct
  source 1..9: note = Seed: LVVVGARGV (KRAS G12R)
YVVVGPRGG

SEQ ID NO: 34308 - protein, 9 aa, synthetic construct
  source 1..9: note = Seed: LVVVGARGV (KRAS G12R)
YVVVGPRGH

SEQ ID NO: 34309 - protein, 9 aa, synthetic construct
  source 1..9: note = Seed: LVVVGARGV (KRAS G12R)
YVVVGPRGI

SEQ ID NO: 34310 - protein, 9 aa, synthetic construct
  source 1..9: note = Seed: LVVVGARGV (KRAS G12R)
YVVVGPRGL

SEQ ID NO: 34311 - protein, 9 aa, synthetic construct
  source 1..9: note = Seed: LVVVGARGV (KRAS G12R)
YVVVGPRGM

SEQ ID NO: 34312 - protein, 9 aa, synthetic construct
  source 1..9: note = Seed: LVVVGARGV (KRAS G12R)
YVVVGPRGN

SEQ ID NO: 34313 - protein, 9 aa, synthetic construct
  source 1..9: note = Seed: LVVVGARGV (KRAS G12R)
YVVVGPRGP

SEQ ID NO: 34314 - protein, 9 aa, synthetic construct
  source 1..9: note = Seed: LVVVGARGV (KRAS G12R)
YVVVGPRGQ

SEQ ID NO: 34315 - protein, 9 aa, synthetic construct
  source 1..9: note = Seed: LVVVGARGV (KRAS G12R)
YVVVGPRGS

SEQ ID NO: 34316 - protein, 9 aa, synthetic construct
  source 1..9: note = Seed: LVVVGARGV (KRAS G12R)
YVVVGPRGT

SEQ ID NO: 34317 - protein, 9 aa, synthetic construct
  source 1..9: note = Seed: LVVVGARGV (KRAS G12R)
YVVVGPRGV

SEQ ID NO: 34318 - protein, 9 aa, synthetic construct
  source 1..9: note = Seed: LVVVGARGV (KRAS G12R)
YVVVGPRGW

SEQ ID NO: 34319 - protein, 9 aa, synthetic construct
  source 1..9: note = Seed: LVVVGARGV (KRAS G12R)
YVVVGPRGY

SEQ ID NO: 34320 - protein, 9 aa, synthetic construct
  source 1..9: note = Seed: LVVVGARGV (KRAS G12R)
YVVVGQRGA

SEQ ID NO: 34321 - protein, 9 aa, synthetic construct
  source 1..9: note = Seed: LVVVGARGV (KRAS G12R)
YVVVGQRGI

SEQ ID NO: 34322 - protein, 9 aa, synthetic construct
  source 1..9: note = Seed: LVVVGARGV (KRAS G12R)
YVVVGQRGL

SEQ ID NO: 34323 - protein, 9 aa, synthetic construct
  source 1..9: note = Seed: LVVVGARGV (KRAS G12R)
YVVVGQRGV

SEQ ID NO: 34324 - protein, 9 aa, synthetic construct
  source 1..9: note = Seed: LVVVGARGV (KRAS G12R)
YVVVGRRGA

SEQ ID NO: 34325 - protein, 9 aa, synthetic construct
  source 1..9: note = Seed: LVVVGARGV (KRAS G12R)
YVVVGRRGC

SEQ ID NO: 34326 - protein, 9 aa, synthetic construct
  source 1..9: note = Seed: LVVVGARGV (KRAS G12R)
YVVVGRRGF

SEQ ID NO: 34327 - protein, 9 aa, synthetic construct
  source 1..9: note = Seed: LVVVGARGV (KRAS G12R)
YVVVGRRGG

SEQ ID NO: 34328 - protein, 9 aa, synthetic construct
  source 1..9: note = Seed: LVVVGARGV (KRAS G12R)
YVVVGRRGH

SEQ ID NO: 34329 - protein, 9 aa, synthetic construct
  source 1..9: note = Seed: LVVVGARGV (KRAS G12R)
YVVVGRRGI

SEQ ID NO: 34330 - protein, 9 aa, synthetic construct
  source 1..9: note = Seed: LVVVGARGV (KRAS G12R)
YVVVGRRGK

SEQ ID NO: 34331 - protein, 9 aa, synthetic construct
  source 1..9: note = Seed: LVVVGARGV (KRAS G12R)
YVVVGRRGL

SEQ ID NO: 34332 - protein, 9 aa, synthetic construct
  source 1..9: note = Seed: LVVVGARGV (KRAS G12R)
YVVVGRRGM

SEQ ID NO: 34333 - protein, 9 aa, synthetic construct
  source 1..9: note = Seed: LVVVGARGV (KRAS G12R)
YVVVGRRGN

SEQ ID NO: 34334 - protein, 9 aa, synthetic construct
  source 1..9: note = Seed: LVVVGARGV (KRAS G12R)
YVVVGRRGP

SEQ ID NO: 34335 - protein, 9 aa, synthetic construct
  source 1..9: note = Seed: LVVVGARGV (KRAS G12R)
YVVVGRRGQ

SEQ ID NO: 34336 - protein, 9 aa, synthetic construct
  source 1..9: note = Seed: LVVVGARGV (KRAS G12R)
YVVVGRRGR

SEQ ID NO: 34337 - protein, 9 aa, synthetic construct
  source 1..9: note = Seed: LVVVGARGV (KRAS G12R)
YVVVGRRGS

SEQ ID NO: 34338 - protein, 9 aa, synthetic construct
  source 1..9: note = Seed: LVVVGARGV (KRAS G12R)
YVVVGRRGT

SEQ ID NO: 34339 - protein, 9 aa, synthetic construct
  source 1..9: note = Seed: LVVVGARGV (KRAS G12R)
YVVVGRRGV

SEQ ID NO: 34340 - protein, 9 aa, synthetic construct
  source 1..9: note = Seed: LVVVGARGV (KRAS G12R)
YVVVGRRGW

SEQ ID NO: 34341 - protein, 9 aa, synthetic construct
  source 1..9: note = Seed: LVVVGARGV (KRAS G12R)
YVVVGRRGY

SEQ ID NO: 34342 - protein, 9 aa, synthetic construct
  source 1..9: note = Seed: LVVVGARGV (KRAS G12R)
YVVVGSRGA

SEQ ID NO: 34343 - protein, 9 aa, synthetic construct
  source 1..9: note = Seed: LVVVGARGV (KRAS G12R)
YVVVGSRGC

SEQ ID NO: 34344 - protein, 9 aa, synthetic construct
  source 1..9: note = Seed: LVVVGARGV (KRAS G12R)
YVVVGSRGF

SEQ ID NO: 34345 - protein, 9 aa, synthetic construct
  source 1..9: note = Seed: LVVVGARGV (KRAS G12R)
YVVVGSRGG

SEQ ID NO: 34346 - protein, 9 aa, synthetic construct
  source 1..9: note = Seed: LVVVGARGV (KRAS G12R)
YVVVGSRGH

SEQ ID NO: 34347 - protein, 9 aa, synthetic construct
  source 1..9: note = Seed: LVVVGARGV (KRAS G12R)
YVVVGSRGI

SEQ ID NO: 34348 - protein, 9 aa, synthetic construct
  source 1..9: note = Seed: LVVVGARGV (KRAS G12R)
YVVVGSRGL

SEQ ID NO: 34349 - protein, 9 aa, synthetic construct
  source 1..9: note = Seed: LVVVGARGV (KRAS G12R)
YVVVGSRGM

SEQ ID NO: 34350 - protein, 9 aa, synthetic construct
  source 1..9: note = Seed: LVVVGARGV (KRAS G12R)
YVVVGSRGN

SEQ ID NO: 34351 - protein, 9 aa, synthetic construct
  source 1..9: note = Seed: LVVVGARGV (KRAS G12R)
YVVVGSRGP

SEQ ID NO: 34352 - protein, 9 aa, synthetic construct
  source 1..9: note = Seed: LVVVGARGV (KRAS G12R)
YVVVGSRGQ

SEQ ID NO: 34353 - protein, 9 aa, synthetic construct
  source 1..9: note = Seed: LVVVGARGV (KRAS G12R)
YVVVGSRGR

SEQ ID NO: 34354 - protein, 9 aa, synthetic construct
  source 1..9: note = Seed: LVVVGARGV (KRAS G12R)
YVVVGSRGS

SEQ ID NO: 34355 - protein, 9 aa, synthetic construct
  source 1..9: note = Seed: LVVVGARGV (KRAS G12R)
YVVVGSRGT

SEQ ID NO: 34356 - protein, 9 aa, synthetic construct
  source 1..9: note = Seed: LVVVGARGV (KRAS G12R)
YVVVGSRGV

SEQ ID NO: 34357 - protein, 9 aa, synthetic construct
  source 1..9: note = Seed: LVVVGARGV (KRAS G12R)
YVVVGSRGW

SEQ ID NO: 34358 - protein, 9 aa, synthetic construct
  source 1..9: note = Seed: LVVVGARGV (KRAS G12R)
YVVVGSRGY

SEQ ID NO: 34359 - protein, 9 aa, synthetic construct
  source 1..9: note = Seed: LVVVGARGV (KRAS G12R)
YVVVGTRGA

SEQ ID NO: 34360 - protein, 9 aa, synthetic construct
  source 1..9: note = Seed: LVVVGARGV (KRAS G12R)
YVVVGTRGC

SEQ ID NO: 34361 - protein, 9 aa, synthetic construct
  source 1..9: note = Seed: LVVVGARGV (KRAS G12R)
YVVVGTRGF

SEQ ID NO: 34362 - protein, 9 aa, synthetic construct
  source 1..9: note = Seed: LVVVGARGV (KRAS G12R)
YVVVGTRGG

SEQ ID NO: 34363 - protein, 9 aa, synthetic construct
  source 1..9: note = Seed: LVVVGARGV (KRAS G12R)
YVVVGTRGI

SEQ ID NO: 34364 - protein, 9 aa, synthetic construct
  source 1..9: note = Seed: LVVVGARGV (KRAS G12R)
YVVVGTRGL

SEQ ID NO: 34365 - protein, 9 aa, synthetic construct
  source 1..9: note = Seed: LVVVGARGV (KRAS G12R)
YVVVGTRGM

SEQ ID NO: 34366 - protein, 9 aa, synthetic construct
  source 1..9: note = Seed: LVVVGARGV (KRAS G12R)
YVVVGTRGN

SEQ ID NO: 34367 - protein, 9 aa, synthetic construct
  source 1..9: note = Seed: LVVVGARGV (KRAS G12R)
YVVVGTRGS

SEQ ID NO: 34368 - protein, 9 aa, synthetic construct
  source 1..9: note = Seed: LVVVGARGV (KRAS G12R)
YVVVGTRGT

SEQ ID NO: 34369 - protein, 9 aa, synthetic construct
  source 1..9: note = Seed: LVVVGARGV (KRAS G12R)
YVVVGTRGV

SEQ ID NO: 34370 - protein, 9 aa, synthetic construct
  source 1..9: note = Seed: LVVVGARGV (KRAS G12R)
YVVVGVRGA

SEQ ID NO: 34371 - protein, 9 aa, synthetic construct
  source 1..9: note = Seed: LVVVGARGV (KRAS G12R)
YVVVGVRGD

SEQ ID NO: 34372 - protein, 9 aa, synthetic construct
  source 1..9: note = Seed: LVVVGARGV (KRAS G12R)
YVVVGVRGF

SEQ ID NO: 34373 - protein, 9 aa, synthetic construct
  source 1..9: note = Seed: LVVVGARGV (KRAS G12R)
YVVVGVRGG

SEQ ID NO: 34374 - protein, 9 aa, synthetic construct
  source 1..9: note = Seed: LVVVGARGV (KRAS G12R)
YVVVGVRGH

SEQ ID NO: 34375 - protein, 9 aa, synthetic construct
  source 1..9: note = Seed: LVVVGARGV (KRAS G12R)
YVVVGVRGI

SEQ ID NO: 34376 - protein, 9 aa, synthetic construct
  source 1..9: note = Seed: LVVVGARGV (KRAS G12R)
YVVVGVRGL

SEQ ID NO: 34377 - protein, 9 aa, synthetic construct
  source 1..9: note = Seed: LVVVGARGV (KRAS G12R)
YVVVGVRGM

SEQ ID NO: 34378 - protein, 9 aa, synthetic construct
  source 1..9: note = Seed: LVVVGARGV (KRAS G12R)
YVVVGVRGN

SEQ ID NO: 34379 - protein, 9 aa, synthetic construct
  source 1..9: note = Seed: LVVVGARGV (KRAS G12R)
YVVVGVRGP

SEQ ID NO: 34380 - protein, 9 aa, synthetic construct
  source 1..9: note = Seed: LVVVGARGV (KRAS G12R)
YVVVGVRGQ

SEQ ID NO: 34381 - protein, 9 aa, synthetic construct
  source 1..9: note = Seed: LVVVGARGV (KRAS G12R)
YVVVGVRGR

SEQ ID NO: 34382 - protein, 9 aa, synthetic construct
  source 1..9: note = Seed: LVVVGARGV (KRAS G12R)
YVVVGVRGS

SEQ ID NO: 34383 - protein, 9 aa, synthetic construct
  source 1..9: note = Seed: LVVVGARGV (KRAS G12R)
YVVVGVRGT

SEQ ID NO: 34384 - protein, 9 aa, synthetic construct
  source 1..9: note = Seed: LVVVGARGV (KRAS G12R)
YVVVGVRGV

SEQ ID NO: 34385 - protein, 9 aa, synthetic construct
  source 1..9: note = Seed: LVVVGARGV (KRAS G12R)
YVVVGWRGI

SEQ ID NO: 34386 - protein, 9 aa, synthetic construct
  source 1..9: note = Seed: LVVVGARGV (KRAS G12R)
YVVVGWRGL

SEQ ID NO: 34387 - protein, 9 aa, synthetic construct
  source 1..9: note = Seed: LVVVGARGV (KRAS G12R)
YVVVGWRGV

SEQ ID NO: 34388 - protein, 9 aa, synthetic construct
  source 1..9: note = Seed: LVVVGARGV (KRAS G12R)
YVVVGYRGL

SEQ ID NO: 34389 - protein, 9 aa, synthetic construct
  source 1..9: note = Seed: LVVVGARGV (KRAS G12R)
YVVWGARGA

SEQ ID NO: 34390 - protein, 9 aa, synthetic construct
  source 1..9: note = Seed: LVVVGARGV (KRAS G12R)
YVVWGARGI

SEQ ID NO: 34391 - protein, 9 aa, synthetic construct
  source 1..9: note = Seed: LVVVGARGV (KRAS G12R)
YVVWGARGL

SEQ ID NO: 34392 - protein, 9 aa, synthetic construct
  source 1..9: note = Seed: LVVVGARGV (KRAS G12R)
YVVWGARGM

SEQ ID NO: 34393 - protein, 9 aa, synthetic construct
  source 1..9: note = Seed: LVVVGARGV (KRAS G12R)
YVVWGARGR

SEQ ID NO: 34394 - protein, 9 aa, synthetic construct
  source 1..9: note = Seed: LVVVGARGV (KRAS G12R)
YVVWGARGV

SEQ ID NO: 34395 - protein, 9 aa, synthetic construct
  source 1..9: note = Seed: LVVVGARGV (KRAS G12R)
YVVWGFRGR

SEQ ID NO: 34396 - protein, 9 aa, synthetic construct
  source 1..9: note = Seed: LVVVGARGV (KRAS G12R)
YVVWGGRGI

SEQ ID NO: 34397 - protein, 9 aa, synthetic construct
  source 1..9: note = Seed: LVVVGARGV (KRAS G12R)
YVVWGGRGL

SEQ ID NO: 34398 - protein, 9 aa, synthetic construct
  source 1..9: note = Seed: LVVVGARGV (KRAS G12R)
YVVWGGRGV

SEQ ID NO: 34399 - protein, 9 aa, synthetic construct
  source 1..9: note = Seed: LVVVGARGV (KRAS G12R)
YVVWGHRGK

SEQ ID NO: 34400 - protein, 9 aa, synthetic construct
  source 1..9: note = Seed: LVVVGARGV (KRAS G12R)
YVVWGHRGL

SEQ ID NO: 34401 - protein, 9 aa, synthetic construct
  source 1..9: note = Seed: LVVVGARGV (KRAS G12R)
YVVWGHRGM

SEQ ID NO: 34402 - protein, 9 aa, synthetic construct
  source 1..9: note = Seed: LVVVGARGV (KRAS G12R)
YVVWGHRGR

SEQ ID NO: 34403 - protein, 9 aa, synthetic construct
  source 1..9: note = Seed: LVVVGARGV (KRAS G12R)
YVVWGHRGY

SEQ ID NO: 34404 - protein, 9 aa, synthetic construct
  source 1..9: note = Seed: LVVVGARGV (KRAS G12R)
YVVWGIRGA

SEQ ID NO: 34405 - protein, 9 aa, synthetic construct
  source 1..9: note = Seed: LVVVGARGV (KRAS G12R)
YVVWGIRGK

SEQ ID NO: 34406 - protein, 9 aa, synthetic construct
  source 1..9: note = Seed: LVVVGARGV (KRAS G12R)
YVVWGIRGL

SEQ ID NO: 34407 - protein, 9 aa, synthetic construct
  source 1..9: note = Seed: LVVVGARGV (KRAS G12R)
YVVWGIRGM

SEQ ID NO: 34408 - protein, 9 aa, synthetic construct
  source 1..9: note = Seed: LVVVGARGV (KRAS G12R)
YVVWGIRGR

SEQ ID NO: 34409 - protein, 9 aa, synthetic construct
  source 1..9: note = Seed: LVVVGARGV (KRAS G12R)
YVVWGIRGY

SEQ ID NO: 34410 - protein, 9 aa, synthetic construct
  source 1..9: note = Seed: LVVVGARGV (KRAS G12R)
YVVWGKRGA

SEQ ID NO: 34411 - protein, 9 aa, synthetic construct
  source 1..9: note = Seed: LVVVGARGV (KRAS G12R)
YVVWGKRGF

SEQ ID NO: 34412 - protein, 9 aa, synthetic construct
  source 1..9: note = Seed: LVVVGARGV (KRAS G12R)
YVVWGKRGH

SEQ ID NO: 34413 - protein, 9 aa, synthetic construct
  source 1..9: note = Seed: LVVVGARGV (KRAS G12R)
YVVWGKRGI

SEQ ID NO: 34414 - protein, 9 aa, synthetic construct
  source 1..9: note = Seed: LVVVGARGV (KRAS G12R)
YVVWGKRGK

SEQ ID NO: 34415 - protein, 9 aa, synthetic construct
  source 1..9: note = Seed: LVVVGARGV (KRAS G12R)
YVVWGKRGL

SEQ ID NO: 34416 - protein, 9 aa, synthetic construct
  source 1..9: note = Seed: LVVVGARGV (KRAS G12R)
YVVWGKRGM

SEQ ID NO: 34417 - protein, 9 aa, synthetic construct
  source 1..9: note = Seed: LVVVGARGV (KRAS G12R)
YVVWGKRGQ

SEQ ID NO: 34418 - protein, 9 aa, synthetic construct
  source 1..9: note = Seed: LVVVGARGV (KRAS G12R)
YVVWGKRGR

SEQ ID NO: 34419 - protein, 9 aa, synthetic construct
  source 1..9: note = Seed: LVVVGARGV (KRAS G12R)
YVVWGKRGS

SEQ ID NO: 34420 - protein, 9 aa, synthetic construct
  source 1..9: note = Seed: LVVVGARGV (KRAS G12R)
YVVWGKRGV

SEQ ID NO: 34421 - protein, 9 aa, synthetic construct
  source 1..9: note = Seed: LVVVGARGV (KRAS G12R)
YVVWGKRGY

SEQ ID NO: 34422 - protein, 9 aa, synthetic construct
  source 1..9: note = Seed: LVVVGARGV (KRAS G12R)
YVVWGLRGK

SEQ ID NO: 34423 - protein, 9 aa, synthetic construct
  source 1..9: note = Seed: LVVVGARGV (KRAS G12R)
YVVWGLRGM

SEQ ID NO: 34424 - protein, 9 aa, synthetic construct
  source 1..9: note = Seed: LVVVGARGV (KRAS G12R)
YVVWGLRGR

SEQ ID NO: 34425 - protein, 9 aa, synthetic construct
  source 1..9: note = Seed: LVVVGARGV (KRAS G12R)
YVVWGMRGK

SEQ ID NO: 34426 - protein, 9 aa, synthetic construct
  source 1..9: note = Seed: LVVVGARGV (KRAS G12R)
YVVWGMRGR

SEQ ID NO: 34427 - protein, 9 aa, synthetic construct
  source 1..9: note = Seed: LVVVGARGV (KRAS G12R)
YVVWGMRGY

SEQ ID NO: 34428 - protein, 9 aa, synthetic construct
  source 1..9: note = Seed: LVVVGARGV (KRAS G12R)
YVVWGNRGI

SEQ ID NO: 34429 - protein, 9 aa, synthetic construct
  source 1..9: note = Seed: LVVVGARGV (KRAS G12R)
YVVWGNRGL

SEQ ID NO: 34430 - protein, 9 aa, synthetic construct
  source 1..9: note = Seed: LVVVGARGV (KRAS G12R)
YVVWGNRGR

SEQ ID NO: 34431 - protein, 9 aa, synthetic construct
  source 1..9: note = Seed: LVVVGARGV (KRAS G12R)
YVVWGNRGV

SEQ ID NO: 34432 - protein, 9 aa, synthetic construct
  source 1..9: note = Seed: LVVVGARGV (KRAS G12R)
YVVWGPRGI

SEQ ID NO: 34433 - protein, 9 aa, synthetic construct
  source 1..9: note = Seed: LVVVGARGV (KRAS G12R)
YVVWGPRGL

SEQ ID NO: 34434 - protein, 9 aa, synthetic construct
  source 1..9: note = Seed: LVVVGARGV (KRAS G12R)
YVVWGPRGR

SEQ ID NO: 34435 - protein, 9 aa, synthetic construct
  source 1..9: note = Seed: LVVVGARGV (KRAS G12R)
YVVWGPRGV

SEQ ID NO: 34436 - protein, 9 aa, synthetic construct
  source 1..9: note = Seed: LVVVGARGV (KRAS G12R)
YVVWGQRGR

SEQ ID NO: 34437 - protein, 9 aa, synthetic construct
  source 1..9: note = Seed: LVVVGARGV (KRAS G12R)
YVVWGRRGA

SEQ ID NO: 34438 - protein, 9 aa, synthetic construct
  source 1..9: note = Seed: LVVVGARGV (KRAS G12R)
YVVWGRRGF

SEQ ID NO: 34439 - protein, 9 aa, synthetic construct
  source 1..9: note = Seed: LVVVGARGV (KRAS G12R)
YVVWGRRGH

SEQ ID NO: 34440 - protein, 9 aa, synthetic construct
  source 1..9: note = Seed: LVVVGARGV (KRAS G12R)
YVVWGRRGI

SEQ ID NO: 34441 - protein, 9 aa, synthetic construct
  source 1..9: note = Seed: LVVVGARGV (KRAS G12R)
YVVWGRRGK

SEQ ID NO: 34442 - protein, 9 aa, synthetic construct
  source 1..9: note = Seed: LVVVGARGV (KRAS G12R)
YVVWGRRGL

SEQ ID NO: 34443 - protein, 9 aa, synthetic construct
  source 1..9: note = Seed: LVVVGARGV (KRAS G12R)
YVVWGRRGM

SEQ ID NO: 34444 - protein, 9 aa, synthetic construct
  source 1..9: note = Seed: LVVVGARGV (KRAS G12R)
YVVWGRRGQ

SEQ ID NO: 34445 - protein, 9 aa, synthetic construct
  source 1..9: note = Seed: LVVVGARGV (KRAS G12R)
YVVWGRRGR

SEQ ID NO: 34446 - protein, 9 aa, synthetic construct
  source 1..9: note = Seed: LVVVGARGV (KRAS G12R)
YVVWGRRGS

SEQ ID NO: 34447 - protein, 9 aa, synthetic construct
  source 1..9: note = Seed: LVVVGARGV (KRAS G12R)
YVVWGRRGT

SEQ ID NO: 34448 - protein, 9 aa, synthetic construct
  source 1..9: note = Seed: LVVVGARGV (KRAS G12R)
YVVWGRRGV

SEQ ID NO: 34449 - protein, 9 aa, synthetic construct
  source 1..9: note = Seed: LVVVGARGV (KRAS G12R)
YVVWGRRGW

SEQ ID NO: 34450 - protein, 9 aa, synthetic construct
  source 1..9: note = Seed: LVVVGARGV (KRAS G12R)
YVVWGRRGY

SEQ ID NO: 34451 - protein, 9 aa, synthetic construct
  source 1..9: note = Seed: LVVVGARGV (KRAS G12R)
YVVWGSRGA

SEQ ID NO: 34452 - protein, 9 aa, synthetic construct
  source 1..9: note = Seed: LVVVGARGV (KRAS G12R)
YVVWGSRGI

SEQ ID NO: 34453 - protein, 9 aa, synthetic construct
  source 1..9: note = Seed: LVVVGARGV (KRAS G12R)
YVVWGSRGL

SEQ ID NO: 34454 - protein, 9 aa, synthetic construct
  source 1..9: note = Seed: LVVVGARGV (KRAS G12R)
YVVWGSRGM

SEQ ID NO: 34455 - protein, 9 aa, synthetic construct
  source 1..9: note = Seed: LVVVGARGV (KRAS G12R)
YVVWGSRGR

SEQ ID NO: 34456 - protein, 9 aa, synthetic construct
  source 1..9: note = Seed: LVVVGARGV (KRAS G12R)
YVVWGSRGV

SEQ ID NO: 34457 - protein, 9 aa, synthetic construct
  source 1..9: note = Seed: LVVVGARGV (KRAS G12R)
YVVWGTRGI

SEQ ID NO: 34458 - protein, 9 aa, synthetic construct
  source 1..9: note = Seed: LVVVGARGV (KRAS G12R)
YVVWGTRGK

SEQ ID NO: 34459 - protein, 9 aa, synthetic construct
  source 1..9: note = Seed: LVVVGARGV (KRAS G12R)
YVVWGTRGL

SEQ ID NO: 34460 - protein, 9 aa, synthetic construct
  source 1..9: note = Seed: LVVVGARGV (KRAS G12R)
YVVWGTRGR

SEQ ID NO: 34461 - protein, 9 aa, synthetic construct
  source 1..9: note = Seed: LVVVGARGV (KRAS G12R)
YVVWGTRGV

SEQ ID NO: 34462 - protein, 9 aa, synthetic construct
  source 1..9: note = Seed: LVVVGARGV (KRAS G12R)
YVVWGVRGK

SEQ ID NO: 34463 - protein, 9 aa, synthetic construct
  source 1..9: note = Seed: LVVVGARGV (KRAS G12R)
YVVWGVRGL

SEQ ID NO: 34464 - protein, 9 aa, synthetic construct
  source 1..9: note = Seed: LVVVGARGV (KRAS G12R)
YVVWGVRGM

SEQ ID NO: 34465 - protein, 9 aa, synthetic construct
  source 1..9: note = Seed: LVVVGARGV (KRAS G12R)
YVVWGVRGR

SEQ ID NO: 34466 - protein, 9 aa, synthetic construct
  source 1..9: note = Seed: LVVVGARGV (KRAS G12R)
YVVYGARGA

SEQ ID NO: 34467 - protein, 9 aa, synthetic construct
  source 1..9: note = Seed: LVVVGARGV (KRAS G12R)
YVVYGARGI

SEQ ID NO: 34468 - protein, 9 aa, synthetic construct
  source 1..9: note = Seed: LVVVGARGV (KRAS G12R)
YVVYGARGL

SEQ ID NO: 34469 - protein, 9 aa, synthetic construct
  source 1..9: note = Seed: LVVVGARGV (KRAS G12R)
YVVYGARGM

SEQ ID NO: 34470 - protein, 9 aa, synthetic construct
  source 1..9: note = Seed: LVVVGARGV (KRAS G12R)
YVVYGARGR

SEQ ID NO: 34471 - protein, 9 aa, synthetic construct
  source 1..9: note = Seed: LVVVGARGV (KRAS G12R)
YVVYGARGV

SEQ ID NO: 34472 - protein, 9 aa, synthetic construct
  source 1..9: note = Seed: LVVVGARGV (KRAS G12R)
YVVYGGRGL

SEQ ID NO: 34473 - protein, 9 aa, synthetic construct
  source 1..9: note = Seed: LVVVGARGV (KRAS G12R)
YVVYGHRGF

SEQ ID NO: 34474 - protein, 9 aa, synthetic construct
  source 1..9: note = Seed: LVVVGARGV (KRAS G12R)
YVVYGHRGL

SEQ ID NO: 34475 - protein, 9 aa, synthetic construct
  source 1..9: note = Seed: LVVVGARGV (KRAS G12R)
YVVYGHRGM

SEQ ID NO: 34476 - protein, 9 aa, synthetic construct
  source 1..9: note = Seed: LVVVGARGV (KRAS G12R)
YVVYGHRGR

SEQ ID NO: 34477 - protein, 9 aa, synthetic construct
  source 1..9: note = Seed: LVVVGARGV (KRAS G12R)
YVVYGHRGV

SEQ ID NO: 34478 - protein, 9 aa, synthetic construct
  source 1..9: note = Seed: LVVVGARGV (KRAS G12R)
YVVYGHRGY

SEQ ID NO: 34479 - protein, 9 aa, synthetic construct
  source 1..9: note = Seed: LVVVGARGV (KRAS G12R)
YVVYGIRGF

SEQ ID NO: 34480 - protein, 9 aa, synthetic construct
  source 1..9: note = Seed: LVVVGARGV (KRAS G12R)
YVVYGIRGL

SEQ ID NO: 34481 - protein, 9 aa, synthetic construct
  source 1..9: note = Seed: LVVVGARGV (KRAS G12R)
YVVYGIRGR

SEQ ID NO: 34482 - protein, 9 aa, synthetic construct
  source 1..9: note = Seed: LVVVGARGV (KRAS G12R)
YVVYGIRGY

SEQ ID NO: 34483 - protein, 9 aa, synthetic construct
  source 1..9: note = Seed: LVVVGARGV (KRAS G12R)
YVVYGKRGA

SEQ ID NO: 34484 - protein, 9 aa, synthetic construct
  source 1..9: note = Seed: LVVVGARGV (KRAS G12R)
YVVYGKRGF

SEQ ID NO: 34485 - protein, 9 aa, synthetic construct
  source 1..9: note = Seed: LVVVGARGV (KRAS G12R)
YVVYGKRGH

SEQ ID NO: 34486 - protein, 9 aa, synthetic construct
  source 1..9: note = Seed: LVVVGARGV (KRAS G12R)
YVVYGKRGI

SEQ ID NO: 34487 - protein, 9 aa, synthetic construct
  source 1..9: note = Seed: LVVVGARGV (KRAS G12R)
YVVYGKRGK

SEQ ID NO: 34488 - protein, 9 aa, synthetic construct
  source 1..9: note = Seed: LVVVGARGV (KRAS G12R)
YVVYGKRGL

SEQ ID NO: 34489 - protein, 9 aa, synthetic construct
  source 1..9: note = Seed: LVVVGARGV (KRAS G12R)
YVVYGKRGM

SEQ ID NO: 34490 - protein, 9 aa, synthetic construct
  source 1..9: note = Seed: LVVVGARGV (KRAS G12R)
YVVYGKRGR

SEQ ID NO: 34491 - protein, 9 aa, synthetic construct
  source 1..9: note = Seed: LVVVGARGV (KRAS G12R)
YVVYGKRGV

SEQ ID NO: 34492 - protein, 9 aa, synthetic construct
  source 1..9: note = Seed: LVVVGARGV (KRAS G12R)
YVVYGKRGY

SEQ ID NO: 34493 - protein, 9 aa, synthetic construct
  source 1..9: note = Seed: LVVVGARGV (KRAS G12R)
YVVYGLRGR

SEQ ID NO: 34494 - protein, 9 aa, synthetic construct
  source 1..9: note = Seed: LVVVGARGV (KRAS G12R)
YVVYGMRGR

SEQ ID NO: 34495 - protein, 9 aa, synthetic construct
  source 1..9: note = Seed: LVVVGARGV (KRAS G12R)
YVVYGNRGA

SEQ ID NO: 34496 - protein, 9 aa, synthetic construct
  source 1..9: note = Seed: LVVVGARGV (KRAS G12R)
YVVYGNRGI

SEQ ID NO: 34497 - protein, 9 aa, synthetic construct
  source 1..9: note = Seed: LVVVGARGV (KRAS G12R)
YVVYGNRGL

SEQ ID NO: 34498 - protein, 9 aa, synthetic construct
  source 1..9: note = Seed: LVVVGARGV (KRAS G12R)
YVVYGNRGM

SEQ ID NO: 34499 - protein, 9 aa, synthetic construct
  source 1..9: note = Seed: LVVVGARGV (KRAS G12R)
YVVYGNRGR

SEQ ID NO: 34500 - protein, 9 aa, synthetic construct
  source 1..9: note = Seed: LVVVGARGV (KRAS G12R)
YVVYGNRGV

SEQ ID NO: 34501 - protein, 9 aa, synthetic construct
  source 1..9: note = Seed: LVVVGARGV (KRAS G12R)
YVVYGRRGA

SEQ ID NO: 34502 - protein, 9 aa, synthetic construct
  source 1..9: note = Seed: LVVVGARGV (KRAS G12R)
YVVYGRRGF

SEQ ID NO: 34503 - protein, 9 aa, synthetic construct
  source 1..9: note = Seed: LVVVGARGV (KRAS G12R)
YVVYGRRGH

SEQ ID NO: 34504 - protein, 9 aa, synthetic construct
  source 1..9: note = Seed: LVVVGARGV (KRAS G12R)
YVVYGRRGI

SEQ ID NO: 34505 - protein, 9 aa, synthetic construct
  source 1..9: note = Seed: LVVVGARGV (KRAS G12R)
YVVYGRRGK

SEQ ID NO: 34506 - protein, 9 aa, synthetic construct
  source 1..9: note = Seed: LVVVGARGV (KRAS G12R)
YVVYGRRGL

SEQ ID NO: 34507 - protein, 9 aa, synthetic construct
  source 1..9: note = Seed: LVVVGARGV (KRAS G12R)
YVVYGRRGM

SEQ ID NO: 34508 - protein, 9 aa, synthetic construct
  source 1..9: note = Seed: LVVVGARGV (KRAS G12R)
YVVYGRRGQ

SEQ ID NO: 34509 - protein, 9 aa, synthetic construct
  source 1..9: note = Seed: LVVVGARGV (KRAS G12R)
YVVYGRRGR

SEQ ID NO: 34510 - protein, 9 aa, synthetic construct
  source 1..9: note = Seed: LVVVGARGV (KRAS G12R)
YVVYGRRGS

SEQ ID NO: 34511 - protein, 9 aa, synthetic construct
  source 1..9: note = Seed: LVVVGARGV (KRAS G12R)
YVVYGRRGT

SEQ ID NO: 34512 - protein, 9 aa, synthetic construct
  source 1..9: note = Seed: LVVVGARGV (KRAS G12R)
YVVYGRRGV

SEQ ID NO: 34513 - protein, 9 aa, synthetic construct
  source 1..9: note = Seed: LVVVGARGV (KRAS G12R)
YVVYGRRGW

SEQ ID NO: 34514 - protein, 9 aa, synthetic construct
  source 1..9: note = Seed: LVVVGARGV (KRAS G12R)
YVVYGRRGY

SEQ ID NO: 34515 - protein, 9 aa, synthetic construct
  source 1..9: note = Seed: LVVVGARGV (KRAS G12R)
YVVYGSRGA

SEQ ID NO: 34516 - protein, 9 aa, synthetic construct
  source 1..9: note = Seed: LVVVGARGV (KRAS G12R)
YVVYGSRGF

SEQ ID NO: 34517 - protein, 9 aa, synthetic construct
  source 1..9: note = Seed: LVVVGARGV (KRAS G12R)
YVVYGSRGI

SEQ ID NO: 34518 - protein, 9 aa, synthetic construct
  source 1..9: note = Seed: LVVVGARGV (KRAS G12R)
YVVYGSRGL

SEQ ID NO: 34519 - protein, 9 aa, synthetic construct
  source 1..9: note = Seed: LVVVGARGV (KRAS G12R)
YVVYGSRGM

SEQ ID NO: 34520 - protein, 9 aa, synthetic construct
  source 1..9: note = Seed: LVVVGARGV (KRAS G12R)
YVVYGSRGR

SEQ ID NO: 34521 - protein, 9 aa, synthetic construct
  source 1..9: note = Seed: LVVVGARGV (KRAS G12R)
YVVYGSRGV

SEQ ID NO: 34522 - protein, 9 aa, synthetic construct
  source 1..9: note = Seed: LVVVGARGV (KRAS G12R)
YVVYGTRGI

SEQ ID NO: 34523 - protein, 9 aa, synthetic construct
  source 1..9: note = Seed: LVVVGARGV (KRAS G12R)
YVVYGTRGL

SEQ ID NO: 34524 - protein, 9 aa, synthetic construct
  source 1..9: note = Seed: LVVVGARGV (KRAS G12R)
YVVYGTRGM

SEQ ID NO: 34525 - protein, 9 aa, synthetic construct
  source 1..9: note = Seed: LVVVGARGV (KRAS G12R)
YVVYGTRGR

SEQ ID NO: 34526 - protein, 9 aa, synthetic construct
  source 1..9: note = Seed: LVVVGARGV (KRAS G12R)
YVVYGTRGV

SEQ ID NO: 34527 - protein, 9 aa, synthetic construct
  source 1..9: note = Seed: LVVVGARGV (KRAS G12R)
YVVYGVRGR

SEQ ID NO: 34528 - protein, 9 aa, synthetic construct
  source 1..9: note = Seed: VVGARGVGK (KRAS G12R)
AVGARAVGA

SEQ ID NO: 34529 - protein, 9 aa, synthetic construct
  source 1..9: note = Seed: VVGARGVGK (KRAS G12R)
AVGARAVGC

SEQ ID NO: 34530 - protein, 9 aa, synthetic construct
  source 1..9: note = Seed: VVGARGVGK (KRAS G12R)
AVGARAVGD

SEQ ID NO: 34531 - protein, 9 aa, synthetic construct
  source 1..9: note = Seed: VVGARGVGK (KRAS G12R)
AVGARAVGE

SEQ ID NO: 34532 - protein, 9 aa, synthetic construct
  source 1..9: note = Seed: VVGARGVGK (KRAS G12R)
AVGARAVGF

SEQ ID NO: 34533 - protein, 9 aa, synthetic construct
  source 1..9: note = Seed: VVGARGVGK (KRAS G12R)
AVGARAVGG

SEQ ID NO: 34534 - protein, 9 aa, synthetic construct
  source 1..9: note = Seed: VVGARGVGK (KRAS G12R)
AVGARAVGH

SEQ ID NO: 34535 - protein, 9 aa, synthetic construct
  source 1..9: note = Seed: VVGARGVGK (KRAS G12R)
AVGARAVGI

SEQ ID NO: 34536 - protein, 9 aa, synthetic construct
  source 1..9: note = Seed: VVGARGVGK (KRAS G12R)
AVGARAVGL

SEQ ID NO: 34537 - protein, 9 aa, synthetic construct
  source 1..9: note = Seed: VVGARGVGK (KRAS G12R)
AVGARAVGM

SEQ ID NO: 34538 - protein, 9 aa, synthetic construct
  source 1..9: note = Seed: VVGARGVGK (KRAS G12R)
AVGARAVGN

SEQ ID NO: 34539 - protein, 9 aa, synthetic construct
  source 1..9: note = Seed: VVGARGVGK (KRAS G12R)
AVGARAVGP

SEQ ID NO: 34540 - protein, 9 aa, synthetic construct
  source 1..9: note = Seed: VVGARGVGK (KRAS G12R)
AVGARAVGQ

SEQ ID NO: 34541 - protein, 9 aa, synthetic construct
  source 1..9: note = Seed: VVGARGVGK (KRAS G12R)
AVGARAVGS

SEQ ID NO: 34542 - protein, 9 aa, synthetic construct
  source 1..9: note = Seed: VVGARGVGK (KRAS G12R)
AVGARAVGT

SEQ ID NO: 34543 - protein, 9 aa, synthetic construct
  source 1..9: note = Seed: VVGARGVGK (KRAS G12R)
AVGARAVGV

SEQ ID NO: 34544 - protein, 9 aa, synthetic construct
  source 1..9: note = Seed: VVGARGVGK (KRAS G12R)
AVGARAVGW

SEQ ID NO: 34545 - protein, 9 aa, synthetic construct
  source 1..9: note = Seed: VVGARGVGK (KRAS G12R)
AVGARAVGY

SEQ ID NO: 34546 - protein, 9 aa, synthetic construct
  source 1..9: note = Seed: VVGARGVGK (KRAS G12R)
AVGARCVGA

SEQ ID NO: 34547 - protein, 9 aa, synthetic construct
  source 1..9: note = Seed: VVGARGVGK (KRAS G12R)
AVGARCVGS

SEQ ID NO: 34548 - protein, 9 aa, synthetic construct
  source 1..9: note = Seed: VVGARGVGK (KRAS G12R)
AVGARGVGA

SEQ ID NO: 34549 - protein, 9 aa, synthetic construct
  source 1..9: note = Seed: VVGARGVGK (KRAS G12R)
AVGARGVGS

SEQ ID NO: 34550 - protein, 9 aa, synthetic construct
  source 1..9: note = Seed: VVGARGVGK (KRAS G12R)
AVGARGVGT

SEQ ID NO: 34551 - protein, 9 aa, synthetic construct
  source 1..9: note = Seed: VVGARGVGK (KRAS G12R)
AVGARGVGV

SEQ ID NO: 34552 - protein, 9 aa, synthetic construct
  source 1..9: note = Seed: VVGARGVGK (KRAS G12R)
AVGARIVGA

SEQ ID NO: 34553 - protein, 9 aa, synthetic construct
  source 1..9: note = Seed: VVGARGVGK (KRAS G12R)
AVGARIVGC

SEQ ID NO: 34554 - protein, 9 aa, synthetic construct
  source 1..9: note = Seed: VVGARGVGK (KRAS G12R)
AVGARIVGG

SEQ ID NO: 34555 - protein, 9 aa, synthetic construct
  source 1..9: note = Seed: VVGARGVGK (KRAS G12R)
AVGARIVGI

SEQ ID NO: 34556 - protein, 9 aa, synthetic construct
  source 1..9: note = Seed: VVGARGVGK (KRAS G12R)
AVGARIVGL

SEQ ID NO: 34557 - protein, 9 aa, synthetic construct
  source 1..9: note = Seed: VVGARGVGK (KRAS G12R)
AVGARIVGM

SEQ ID NO: 34558 - protein, 9 aa, synthetic construct
  source 1..9: note = Seed: VVGARGVGK (KRAS G12R)
AVGARIVGN

SEQ ID NO: 34559 - protein, 9 aa, synthetic construct
  source 1..9: note = Seed: VVGARGVGK (KRAS G12R)
AVGARIVGS

SEQ ID NO: 34560 - protein, 9 aa, synthetic construct
  source 1..9: note = Seed: VVGARGVGK (KRAS G12R)
AVGARIVGT

SEQ ID NO: 34561 - protein, 9 aa, synthetic construct
  source 1..9: note = Seed: VVGARGVGK (KRAS G12R)
AVGARIVGV

SEQ ID NO: 34562 - protein, 9 aa, synthetic construct
  source 1..9: note = Seed: VVGARGVGK (KRAS G12R)
AVGARLVGA

SEQ ID NO: 34563 - protein, 9 aa, synthetic construct
  source 1..9: note = Seed: VVGARGVGK (KRAS G12R)
AVGARLVGS

SEQ ID NO: 34564 - protein, 9 aa, synthetic construct
  source 1..9: note = Seed: VVGARGVGK (KRAS G12R)
AVGARLVGT

SEQ ID NO: 34565 - protein, 9 aa, synthetic construct
  source 1..9: note = Seed: VVGARGVGK (KRAS G12R)
AVGARLVGV

SEQ ID NO: 34566 - protein, 9 aa, synthetic construct
  source 1..9: note = Seed: VVGARGVGK (KRAS G12R)
AVGARMVGA

SEQ ID NO: 34567 - protein, 9 aa, synthetic construct
  source 1..9: note = Seed: VVGARGVGK (KRAS G12R)
AVGARMVGS

SEQ ID NO: 34568 - protein, 9 aa, synthetic construct
  source 1..9: note = Seed: VVGARGVGK (KRAS G12R)
AVGARMVGT

SEQ ID NO: 34569 - protein, 9 aa, synthetic construct
  source 1..9: note = Seed: VVGARGVGK (KRAS G12R)
AVGARMVGV

SEQ ID NO: 34570 - protein, 9 aa, synthetic construct
  source 1..9: note = Seed: VVGARGVGK (KRAS G12R)
AVGARPVGA

SEQ ID NO: 34571 - protein, 9 aa, synthetic construct
  source 1..9: note = Seed: VVGARGVGK (KRAS G12R)
AVGARPVGC

SEQ ID NO: 34572 - protein, 9 aa, synthetic construct
  source 1..9: note = Seed: VVGARGVGK (KRAS G12R)
AVGARPVGF

SEQ ID NO: 34573 - protein, 9 aa, synthetic construct
  source 1..9: note = Seed: VVGARGVGK (KRAS G12R)
AVGARPVGG

SEQ ID NO: 34574 - protein, 9 aa, synthetic construct
  source 1..9: note = Seed: VVGARGVGK (KRAS G12R)
AVGARPVGI

SEQ ID NO: 34575 - protein, 9 aa, synthetic construct
  source 1..9: note = Seed: VVGARGVGK (KRAS G12R)
AVGARPVGL

SEQ ID NO: 34576 - protein, 9 aa, synthetic construct
  source 1..9: note = Seed: VVGARGVGK (KRAS G12R)
AVGARPVGM

SEQ ID NO: 34577 - protein, 9 aa, synthetic construct
  source 1..9: note = Seed: VVGARGVGK (KRAS G12R)
AVGARPVGN

SEQ ID NO: 34578 - protein, 9 aa, synthetic construct
  source 1..9: note = Seed: VVGARGVGK (KRAS G12R)
AVGARPVGP

SEQ ID NO: 34579 - protein, 9 aa, synthetic construct
  source 1..9: note = Seed: VVGARGVGK (KRAS G12R)
AVGARPVGS

SEQ ID NO: 34580 - protein, 9 aa, synthetic construct
  source 1..9: note = Seed: VVGARGVGK (KRAS G12R)
AVGARPVGT

SEQ ID NO: 34581 - protein, 9 aa, synthetic construct
  source 1..9: note = Seed: VVGARGVGK (KRAS G12R)
AVGARPVGV

SEQ ID NO: 34582 - protein, 9 aa, synthetic construct
  source 1..9: note = Seed: VVGARGVGK (KRAS G12R)
AVGARPVGW

SEQ ID NO: 34583 - protein, 9 aa, synthetic construct
  source 1..9: note = Seed: VVGARGVGK (KRAS G12R)
AVGARSVGA

SEQ ID NO: 34584 - protein, 9 aa, synthetic construct
  source 1..9: note = Seed: VVGARGVGK (KRAS G12R)
AVGARSVGG

SEQ ID NO: 34585 - protein, 9 aa, synthetic construct
  source 1..9: note = Seed: VVGARGVGK (KRAS G12R)
AVGARSVGI

SEQ ID NO: 34586 - protein, 9 aa, synthetic construct
  source 1..9: note = Seed: VVGARGVGK (KRAS G12R)
AVGARSVGL

SEQ ID NO: 34587 - protein, 9 aa, synthetic construct
  source 1..9: note = Seed: VVGARGVGK (KRAS G12R)
AVGARSVGM

SEQ ID NO: 34588 - protein, 9 aa, synthetic construct
  source 1..9: note = Seed: VVGARGVGK (KRAS G12R)
AVGARSVGN

SEQ ID NO: 34589 - protein, 9 aa, synthetic construct
  source 1..9: note = Seed: VVGARGVGK (KRAS G12R)
AVGARSVGS

SEQ ID NO: 34590 - protein, 9 aa, synthetic construct
  source 1..9: note = Seed: VVGARGVGK (KRAS G12R)
AVGARSVGT

SEQ ID NO: 34591 - protein, 9 aa, synthetic construct
  source 1..9: note = Seed: VVGARGVGK (KRAS G12R)
AVGARSVGV

SEQ ID NO: 34592 - protein, 9 aa, synthetic construct
  source 1..9: note = Seed: VVGARGVGK (KRAS G12R)
AVGARTVGA

SEQ ID NO: 34593 - protein, 9 aa, synthetic construct
  source 1..9: note = Seed: VVGARGVGK (KRAS G12R)
AVGARTVGG

SEQ ID NO: 34594 - protein, 9 aa, synthetic construct
  source 1..9: note = Seed: VVGARGVGK (KRAS G12R)
AVGARTVGI

SEQ ID NO: 34595 - protein, 9 aa, synthetic construct
  source 1..9: note = Seed: VVGARGVGK (KRAS G12R)
AVGARTVGM

SEQ ID NO: 34596 - protein, 9 aa, synthetic construct
  source 1..9: note = Seed: VVGARGVGK (KRAS G12R)
AVGARTVGN

SEQ ID NO: 34597 - protein, 9 aa, synthetic construct
  source 1..9: note = Seed: VVGARGVGK (KRAS G12R)
AVGARTVGS

SEQ ID NO: 34598 - protein, 9 aa, synthetic construct
  source 1..9: note = Seed: VVGARGVGK (KRAS G12R)
AVGARTVGT

SEQ ID NO: 34599 - protein, 9 aa, synthetic construct
  source 1..9: note = Seed: VVGARGVGK (KRAS G12R)
AVGARTVGV

SEQ ID NO: 34600 - protein, 9 aa, synthetic construct
  source 1..9: note = Seed: VVGARGVGK (KRAS G12R)
AVGARVVGA

SEQ ID NO: 34601 - protein, 9 aa, synthetic construct
  source 1..9: note = Seed: VVGARGVGK (KRAS G12R)
AVGARVVGC

SEQ ID NO: 34602 - protein, 9 aa, synthetic construct
  source 1..9: note = Seed: VVGARGVGK (KRAS G12R)
AVGARVVGD

SEQ ID NO: 34603 - protein, 9 aa, synthetic construct
  source 1..9: note = Seed: VVGARGVGK (KRAS G12R)
AVGARVVGG

SEQ ID NO: 34604 - protein, 9 aa, synthetic construct
  source 1..9: note = Seed: VVGARGVGK (KRAS G12R)
AVGARVVGH

SEQ ID NO: 34605 - protein, 9 aa, synthetic construct
  source 1..9: note = Seed: VVGARGVGK (KRAS G12R)
AVGARVVGI

SEQ ID NO: 34606 - protein, 9 aa, synthetic construct
  source 1..9: note = Seed: VVGARGVGK (KRAS G12R)
AVGARVVGL

SEQ ID NO: 34607 - protein, 9 aa, synthetic construct
  source 1..9: note = Seed: VVGARGVGK (KRAS G12R)
AVGARVVGM

SEQ ID NO: 34608 - protein, 9 aa, synthetic construct
  source 1..9: note = Seed: VVGARGVGK (KRAS G12R)
AVGARVVGN

SEQ ID NO: 34609 - protein, 9 aa, synthetic construct
  source 1..9: note = Seed: VVGARGVGK (KRAS G12R)
AVGARVVGP

SEQ ID NO: 34610 - protein, 9 aa, synthetic construct
  source 1..9: note = Seed: VVGARGVGK (KRAS G12R)
AVGARVVGQ

SEQ ID NO: 34611 - protein, 9 aa, synthetic construct
  source 1..9: note = Seed: VVGARGVGK (KRAS G12R)
AVGARVVGS

SEQ ID NO: 34612 - protein, 9 aa, synthetic construct
  source 1..9: note = Seed: VVGARGVGK (KRAS G12R)
AVGARVVGT

SEQ ID NO: 34613 - protein, 9 aa, synthetic construct
  source 1..9: note = Seed: VVGARGVGK (KRAS G12R)
AVGARVVGV

SEQ ID NO: 34614 - protein, 9 aa, synthetic construct
  source 1..9: note = Seed: VVGARGVGK (KRAS G12R)
AVGFRKVGR

SEQ ID NO: 34615 - protein, 9 aa, synthetic construct
  source 1..9: note = Seed: VVGARGVGK (KRAS G12R)
AVGGRAVGA

SEQ ID NO: 34616 - protein, 9 aa, synthetic construct
  source 1..9: note = Seed: VVGARGVGK (KRAS G12R)
AVGGRAVGC

SEQ ID NO: 34617 - protein, 9 aa, synthetic construct
  source 1..9: note = Seed: VVGARGVGK (KRAS G12R)
AVGGRAVGD

SEQ ID NO: 34618 - protein, 9 aa, synthetic construct
  source 1..9: note = Seed: VVGARGVGK (KRAS G12R)
AVGGRAVGE

SEQ ID NO: 34619 - protein, 9 aa, synthetic construct
  source 1..9: note = Seed: VVGARGVGK (KRAS G12R)
AVGGRAVGF

SEQ ID NO: 34620 - protein, 9 aa, synthetic construct
  source 1..9: note = Seed: VVGARGVGK (KRAS G12R)
AVGGRAVGG

SEQ ID NO: 34621 - protein, 9 aa, synthetic construct
  source 1..9: note = Seed: VVGARGVGK (KRAS G12R)
AVGGRAVGH

SEQ ID NO: 34622 - protein, 9 aa, synthetic construct
  source 1..9: note = Seed: VVGARGVGK (KRAS G12R)
AVGGRAVGI

SEQ ID NO: 34623 - protein, 9 aa, synthetic construct
  source 1..9: note = Seed: VVGARGVGK (KRAS G12R)
AVGGRAVGL

SEQ ID NO: 34624 - protein, 9 aa, synthetic construct
  source 1..9: note = Seed: VVGARGVGK (KRAS G12R)
AVGGRAVGM

SEQ ID NO: 34625 - protein, 9 aa, synthetic construct
  source 1..9: note = Seed: VVGARGVGK (KRAS G12R)
AVGGRAVGN

SEQ ID NO: 34626 - protein, 9 aa, synthetic construct
  source 1..9: note = Seed: VVGARGVGK (KRAS G12R)
AVGGRAVGP

SEQ ID NO: 34627 - protein, 9 aa, synthetic construct
  source 1..9: note = Seed: VVGARGVGK (KRAS G12R)
AVGGRAVGQ

SEQ ID NO: 34628 - protein, 9 aa, synthetic construct
  source 1..9: note = Seed: VVGARGVGK (KRAS G12R)
AVGGRAVGS

SEQ ID NO: 34629 - protein, 9 aa, synthetic construct
  source 1..9: note = Seed: VVGARGVGK (KRAS G12R)
AVGGRAVGT

SEQ ID NO: 34630 - protein, 9 aa, synthetic construct
  source 1..9: note = Seed: VVGARGVGK (KRAS G12R)
AVGGRAVGV

SEQ ID NO: 34631 - protein, 9 aa, synthetic construct
  source 1..9: note = Seed: VVGARGVGK (KRAS G12R)
AVGGRAVGW

SEQ ID NO: 34632 - protein, 9 aa, synthetic construct
  source 1..9: note = Seed: VVGARGVGK (KRAS G12R)
AVGGRAVGY

SEQ ID NO: 34633 - protein, 9 aa, synthetic construct
  source 1..9: note = Seed: VVGARGVGK (KRAS G12R)
AVGGRCVGA

SEQ ID NO: 34634 - protein, 9 aa, synthetic construct
  source 1..9: note = Seed: VVGARGVGK (KRAS G12R)
AVGGRGVGA

SEQ ID NO: 34635 - protein, 9 aa, synthetic construct
  source 1..9: note = Seed: VVGARGVGK (KRAS G12R)
AVGGRGVGV

SEQ ID NO: 34636 - protein, 9 aa, synthetic construct
  source 1..9: note = Seed: VVGARGVGK (KRAS G12R)
AVGGRIVGA

SEQ ID NO: 34637 - protein, 9 aa, synthetic construct
  source 1..9: note = Seed: VVGARGVGK (KRAS G12R)
AVGGRIVGC

SEQ ID NO: 34638 - protein, 9 aa, synthetic construct
  source 1..9: note = Seed: VVGARGVGK (KRAS G12R)
AVGGRIVGG

SEQ ID NO: 34639 - protein, 9 aa, synthetic construct
  source 1..9: note = Seed: VVGARGVGK (KRAS G12R)
AVGGRIVGI

SEQ ID NO: 34640 - protein, 9 aa, synthetic construct
  source 1..9: note = Seed: VVGARGVGK (KRAS G12R)
AVGGRIVGL

SEQ ID NO: 34641 - protein, 9 aa, synthetic construct
  source 1..9: note = Seed: VVGARGVGK (KRAS G12R)
AVGGRIVGM

SEQ ID NO: 34642 - protein, 9 aa, synthetic construct
  source 1..9: note = Seed: VVGARGVGK (KRAS G12R)
AVGGRIVGN

SEQ ID NO: 34643 - protein, 9 aa, synthetic construct
  source 1..9: note = Seed: VVGARGVGK (KRAS G12R)
AVGGRIVGS

SEQ ID NO: 34644 - protein, 9 aa, synthetic construct
  source 1..9: note = Seed: VVGARGVGK (KRAS G12R)
AVGGRIVGT

SEQ ID NO: 34645 - protein, 9 aa, synthetic construct
  source 1..9: note = Seed: VVGARGVGK (KRAS G12R)
AVGGRIVGV

SEQ ID NO: 34646 - protein, 9 aa, synthetic construct
  source 1..9: note = Seed: VVGARGVGK (KRAS G12R)
AVGGRLVGA

SEQ ID NO: 34647 - protein, 9 aa, synthetic construct
  source 1..9: note = Seed: VVGARGVGK (KRAS G12R)
AVGGRLVGS

SEQ ID NO: 34648 - protein, 9 aa, synthetic construct
  source 1..9: note = Seed: VVGARGVGK (KRAS G12R)
AVGGRLVGT

SEQ ID NO: 34649 - protein, 9 aa, synthetic construct
  source 1..9: note = Seed: VVGARGVGK (KRAS G12R)
AVGGRLVGV

SEQ ID NO: 34650 - protein, 9 aa, synthetic construct
  source 1..9: note = Seed: VVGARGVGK (KRAS G12R)
AVGGRMVGA

SEQ ID NO: 34651 - protein, 9 aa, synthetic construct
  source 1..9: note = Seed: VVGARGVGK (KRAS G12R)
AVGGRMVGS

SEQ ID NO: 34652 - protein, 9 aa, synthetic construct
  source 1..9: note = Seed: VVGARGVGK (KRAS G12R)
AVGGRMVGT

SEQ ID NO: 34653 - protein, 9 aa, synthetic construct
  source 1..9: note = Seed: VVGARGVGK (KRAS G12R)
AVGGRMVGV

SEQ ID NO: 34654 - protein, 9 aa, synthetic construct
  source 1..9: note = Seed: VVGARGVGK (KRAS G12R)
AVGGRPVGA

SEQ ID NO: 34655 - protein, 9 aa, synthetic construct
  source 1..9: note = Seed: VVGARGVGK (KRAS G12R)
AVGGRPVGC

SEQ ID NO: 34656 - protein, 9 aa, synthetic construct
  source 1..9: note = Seed: VVGARGVGK (KRAS G12R)
AVGGRPVGG

SEQ ID NO: 34657 - protein, 9 aa, synthetic construct
  source 1..9: note = Seed: VVGARGVGK (KRAS G12R)
AVGGRPVGI

SEQ ID NO: 34658 - protein, 9 aa, synthetic construct
  source 1..9: note = Seed: VVGARGVGK (KRAS G12R)
AVGGRPVGL

SEQ ID NO: 34659 - protein, 9 aa, synthetic construct
  source 1..9: note = Seed: VVGARGVGK (KRAS G12R)
AVGGRPVGM

SEQ ID NO: 34660 - protein, 9 aa, synthetic construct
  source 1..9: note = Seed: VVGARGVGK (KRAS G12R)
AVGGRPVGN

SEQ ID NO: 34661 - protein, 9 aa, synthetic construct
  source 1..9: note = Seed: VVGARGVGK (KRAS G12R)
AVGGRPVGS

SEQ ID NO: 34662 - protein, 9 aa, synthetic construct
  source 1..9: note = Seed: VVGARGVGK (KRAS G12R)
AVGGRPVGT

SEQ ID NO: 34663 - protein, 9 aa, synthetic construct
  source 1..9: note = Seed: VVGARGVGK (KRAS G12R)
AVGGRPVGV

SEQ ID NO: 34664 - protein, 9 aa, synthetic construct
  source 1..9: note = Seed: VVGARGVGK (KRAS G12R)
AVGGRSVGA

SEQ ID NO: 34665 - protein, 9 aa, synthetic construct
  source 1..9: note = Seed: VVGARGVGK (KRAS G12R)
AVGGRSVGI

SEQ ID NO: 34666 - protein, 9 aa, synthetic construct
  source 1..9: note = Seed: VVGARGVGK (KRAS G12R)
AVGGRSVGM

SEQ ID NO: 34667 - protein, 9 aa, synthetic construct
  source 1..9: note = Seed: VVGARGVGK (KRAS G12R)
AVGGRSVGS

SEQ ID NO: 34668 - protein, 9 aa, synthetic construct
  source 1..9: note = Seed: VVGARGVGK (KRAS G12R)
AVGGRSVGT

SEQ ID NO: 34669 - protein, 9 aa, synthetic construct
  source 1..9: note = Seed: VVGARGVGK (KRAS G12R)
AVGGRSVGV

SEQ ID NO: 34670 - protein, 9 aa, synthetic construct
  source 1..9: note = Seed: VVGARGVGK (KRAS G12R)
AVGGRTVGA

SEQ ID NO: 34671 - protein, 9 aa, synthetic construct
  source 1..9: note = Seed: VVGARGVGK (KRAS G12R)
AVGGRTVGG

SEQ ID NO: 34672 - protein, 9 aa, synthetic construct
  source 1..9: note = Seed: VVGARGVGK (KRAS G12R)
AVGGRTVGI

SEQ ID NO: 34673 - protein, 9 aa, synthetic construct
  source 1..9: note = Seed: VVGARGVGK (KRAS G12R)
AVGGRTVGS

SEQ ID NO: 34674 - protein, 9 aa, synthetic construct
  source 1..9: note = Seed: VVGARGVGK (KRAS G12R)
AVGGRTVGT

SEQ ID NO: 34675 - protein, 9 aa, synthetic construct
  source 1..9: note = Seed: VVGARGVGK (KRAS G12R)
AVGGRTVGV

SEQ ID NO: 34676 - protein, 9 aa, synthetic construct
  source 1..9: note = Seed: VVGARGVGK (KRAS G12R)
AVGGRVVGA

SEQ ID NO: 34677 - protein, 9 aa, synthetic construct
  source 1..9: note = Seed: VVGARGVGK (KRAS G12R)
AVGGRVVGC

SEQ ID NO: 34678 - protein, 9 aa, synthetic construct
  source 1..9: note = Seed: VVGARGVGK (KRAS G12R)
AVGGRVVGD

SEQ ID NO: 34679 - protein, 9 aa, synthetic construct
  source 1..9: note = Seed: VVGARGVGK (KRAS G12R)
AVGGRVVGE

SEQ ID NO: 34680 - protein, 9 aa, synthetic construct
  source 1..9: note = Seed: VVGARGVGK (KRAS G12R)
AVGGRVVGG

SEQ ID NO: 34681 - protein, 9 aa, synthetic construct
  source 1..9: note = Seed: VVGARGVGK (KRAS G12R)
AVGGRVVGH

SEQ ID NO: 34682 - protein, 9 aa, synthetic construct
  source 1..9: note = Seed: VVGARGVGK (KRAS G12R)
AVGGRVVGI

SEQ ID NO: 34683 - protein, 9 aa, synthetic construct
  source 1..9: note = Seed: VVGARGVGK (KRAS G12R)
AVGGRVVGL

SEQ ID NO: 34684 - protein, 9 aa, synthetic construct
  source 1..9: note = Seed: VVGARGVGK (KRAS G12R)
AVGGRVVGM

SEQ ID NO: 34685 - protein, 9 aa, synthetic construct
  source 1..9: note = Seed: VVGARGVGK (KRAS G12R)
AVGGRVVGN

SEQ ID NO: 34686 - protein, 9 aa, synthetic construct
  source 1..9: note = Seed: VVGARGVGK (KRAS G12R)
AVGGRVVGP

SEQ ID NO: 34687 - protein, 9 aa, synthetic construct
  source 1..9: note = Seed: VVGARGVGK (KRAS G12R)
AVGGRVVGS

SEQ ID NO: 34688 - protein, 9 aa, synthetic construct
  source 1..9: note = Seed: VVGARGVGK (KRAS G12R)
AVGGRVVGT

SEQ ID NO: 34689 - protein, 9 aa, synthetic construct
  source 1..9: note = Seed: VVGARGVGK (KRAS G12R)
AVGGRVVGV

SEQ ID NO: 34690 - protein, 9 aa, synthetic construct
  source 1..9: note = Seed: VVGARGVGK (KRAS G12R)
AVGIRAVGL

SEQ ID NO: 34691 - protein, 9 aa, synthetic construct
  source 1..9: note = Seed: VVGARGVGK (KRAS G12R)
AVGIRAVGM

SEQ ID NO: 34692 - protein, 9 aa, synthetic construct
  source 1..9: note = Seed: VVGARGVGK (KRAS G12R)
AVGKRRVGY

SEQ ID NO: 34693 - protein, 9 aa, synthetic construct
  source 1..9: note = Seed: VVGARGVGK (KRAS G12R)
AVGLRAVGI

SEQ ID NO: 34694 - protein, 9 aa, synthetic construct
  source 1..9: note = Seed: VVGARGVGK (KRAS G12R)
AVGLRAVGL

SEQ ID NO: 34695 - protein, 9 aa, synthetic construct
  source 1..9: note = Seed: VVGARGVGK (KRAS G12R)
AVGLRAVGM

SEQ ID NO: 34696 - protein, 9 aa, synthetic construct
  source 1..9: note = Seed: VVGARGVGK (KRAS G12R)
AVGLRAVGV

SEQ ID NO: 34697 - protein, 9 aa, synthetic construct
  source 1..9: note = Seed: VVGARGVGK (KRAS G12R)
AVGLRGVGI

SEQ ID NO: 34698 - protein, 9 aa, synthetic construct
  source 1..9: note = Seed: VVGARGVGK (KRAS G12R)
AVGLRGVGL

SEQ ID NO: 34699 - protein, 9 aa, synthetic construct
  source 1..9: note = Seed: VVGARGVGK (KRAS G12R)
AVGLRGVGM

SEQ ID NO: 34700 - protein, 9 aa, synthetic construct
  source 1..9: note = Seed: VVGARGVGK (KRAS G12R)
AVGLRGVGT

SEQ ID NO: 34701 - protein, 9 aa, synthetic construct
  source 1..9: note = Seed: VVGARGVGK (KRAS G12R)
AVGLRGVGV

SEQ ID NO: 34702 - protein, 9 aa, synthetic construct
  source 1..9: note = Seed: VVGARGVGK (KRAS G12R)
AVGLRPVGI

SEQ ID NO: 34703 - protein, 9 aa, synthetic construct
  source 1..9: note = Seed: VVGARGVGK (KRAS G12R)
AVGLRPVGL

SEQ ID NO: 34704 - protein, 9 aa, synthetic construct
  source 1..9: note = Seed: VVGARGVGK (KRAS G12R)
AVGLRPVGV

SEQ ID NO: 34705 - protein, 9 aa, synthetic construct
  source 1..9: note = Seed: VVGARGVGK (KRAS G12R)
AVGLRSVGI

SEQ ID NO: 34706 - protein, 9 aa, synthetic construct
  source 1..9: note = Seed: VVGARGVGK (KRAS G12R)
AVGLRSVGL

SEQ ID NO: 34707 - protein, 9 aa, synthetic construct
  source 1..9: note = Seed: VVGARGVGK (KRAS G12R)
AVGLRSVGM

SEQ ID NO: 34708 - protein, 9 aa, synthetic construct
  source 1..9: note = Seed: VVGARGVGK (KRAS G12R)
AVGMRAVGI

SEQ ID NO: 34709 - protein, 9 aa, synthetic construct
  source 1..9: note = Seed: VVGARGVGK (KRAS G12R)
AVGMRAVGL

SEQ ID NO: 34710 - protein, 9 aa, synthetic construct
  source 1..9: note = Seed: VVGARGVGK (KRAS G12R)
AVGMRAVGM

SEQ ID NO: 34711 - protein, 9 aa, synthetic construct
  source 1..9: note = Seed: VVGARGVGK (KRAS G12R)
AVGMRAVGV

SEQ ID NO: 34712 - protein, 9 aa, synthetic construct
  source 1..9: note = Seed: VVGARGVGK (KRAS G12R)
AVGMRGVGI

SEQ ID NO: 34713 - protein, 9 aa, synthetic construct
  source 1..9: note = Seed: VVGARGVGK (KRAS G12R)
AVGMRGVGL

SEQ ID NO: 34714 - protein, 9 aa, synthetic construct
  source 1..9: note = Seed: VVGARGVGK (KRAS G12R)
AVGMRGVGM

SEQ ID NO: 34715 - protein, 9 aa, synthetic construct
  source 1..9: note = Seed: VVGARGVGK (KRAS G12R)
AVGMRGVGV

SEQ ID NO: 34716 - protein, 9 aa, synthetic construct
  source 1..9: note = Seed: VVGARGVGK (KRAS G12R)
AVGMRPVGI

SEQ ID NO: 34717 - protein, 9 aa, synthetic construct
  source 1..9: note = Seed: VVGARGVGK (KRAS G12R)
AVGMRPVGV

SEQ ID NO: 34718 - protein, 9 aa, synthetic construct
  source 1..9: note = Seed: VVGARGVGK (KRAS G12R)
AVGMRSVGI

SEQ ID NO: 34719 - protein, 9 aa, synthetic construct
  source 1..9: note = Seed: VVGARGVGK (KRAS G12R)
AVGMRSVGL

SEQ ID NO: 34720 - protein, 9 aa, synthetic construct
  source 1..9: note = Seed: VVGARGVGK (KRAS G12R)
AVGMRSVGV

SEQ ID NO: 34721 - protein, 9 aa, synthetic construct
  source 1..9: note = Seed: VVGARGVGK (KRAS G12R)
AVGSRAVGA

SEQ ID NO: 34722 - protein, 9 aa, synthetic construct
  source 1..9: note = Seed: VVGARGVGK (KRAS G12R)
AVGSRAVGC

SEQ ID NO: 34723 - protein, 9 aa, synthetic construct
  source 1..9: note = Seed: VVGARGVGK (KRAS G12R)
AVGSRAVGG

SEQ ID NO: 34724 - protein, 9 aa, synthetic construct
  source 1..9: note = Seed: VVGARGVGK (KRAS G12R)
AVGSRAVGI

SEQ ID NO: 34725 - protein, 9 aa, synthetic construct
  source 1..9: note = Seed: VVGARGVGK (KRAS G12R)
AVGSRAVGL

SEQ ID NO: 34726 - protein, 9 aa, synthetic construct
  source 1..9: note = Seed: VVGARGVGK (KRAS G12R)
AVGSRAVGM

SEQ ID NO: 34727 - protein, 9 aa, synthetic construct
  source 1..9: note = Seed: VVGARGVGK (KRAS G12R)
AVGSRAVGN

SEQ ID NO: 34728 - protein, 9 aa, synthetic construct
  source 1..9: note = Seed: VVGARGVGK (KRAS G12R)
AVGSRAVGS

SEQ ID NO: 34729 - protein, 9 aa, synthetic construct
  source 1..9: note = Seed: VVGARGVGK (KRAS G12R)
AVGSRAVGT

SEQ ID NO: 34730 - protein, 9 aa, synthetic construct
  source 1..9: note = Seed: VVGARGVGK (KRAS G12R)
AVGSRAVGV

SEQ ID NO: 34731 - protein, 9 aa, synthetic construct
  source 1..9: note = Seed: VVGARGVGK (KRAS G12R)
AVGSRIVGA

SEQ ID NO: 34732 - protein, 9 aa, synthetic construct
  source 1..9: note = Seed: VVGARGVGK (KRAS G12R)
AVGSRIVGS

SEQ ID NO: 34733 - protein, 9 aa, synthetic construct
  source 1..9: note = Seed: VVGARGVGK (KRAS G12R)
AVGSRIVGT

SEQ ID NO: 34734 - protein, 9 aa, synthetic construct
  source 1..9: note = Seed: VVGARGVGK (KRAS G12R)
AVGSRIVGV

SEQ ID NO: 34735 - protein, 9 aa, synthetic construct
  source 1..9: note = Seed: VVGARGVGK (KRAS G12R)
AVGSRMVGA

SEQ ID NO: 34736 - protein, 9 aa, synthetic construct
  source 1..9: note = Seed: VVGARGVGK (KRAS G12R)
AVGSRPVGA

SEQ ID NO: 34737 - protein, 9 aa, synthetic construct
  source 1..9: note = Seed: VVGARGVGK (KRAS G12R)
AVGSRPVGG

SEQ ID NO: 34738 - protein, 9 aa, synthetic construct
  source 1..9: note = Seed: VVGARGVGK (KRAS G12R)
AVGSRPVGI

SEQ ID NO: 34739 - protein, 9 aa, synthetic construct
  source 1..9: note = Seed: VVGARGVGK (KRAS G12R)
AVGSRPVGS

SEQ ID NO: 34740 - protein, 9 aa, synthetic construct
  source 1..9: note = Seed: VVGARGVGK (KRAS G12R)
AVGSRPVGT

SEQ ID NO: 34741 - protein, 9 aa, synthetic construct
  source 1..9: note = Seed: VVGARGVGK (KRAS G12R)
AVGSRPVGV

SEQ ID NO: 34742 - protein, 9 aa, synthetic construct
  source 1..9: note = Seed: VVGARGVGK (KRAS G12R)
AVGSRSVGA

SEQ ID NO: 34743 - protein, 9 aa, synthetic construct
  source 1..9: note = Seed: VVGARGVGK (KRAS G12R)
AVGSRSVGI

SEQ ID NO: 34744 - protein, 9 aa, synthetic construct
  source 1..9: note = Seed: VVGARGVGK (KRAS G12R)
AVGSRSVGS

SEQ ID NO: 34745 - protein, 9 aa, synthetic construct
  source 1..9: note = Seed: VVGARGVGK (KRAS G12R)
AVGSRSVGV

SEQ ID NO: 34746 - protein, 9 aa, synthetic construct
  source 1..9: note = Seed: VVGARGVGK (KRAS G12R)
AVGSRTVGA

SEQ ID NO: 34747 - protein, 9 aa, synthetic construct
  source 1..9: note = Seed: VVGARGVGK (KRAS G12R)
AVGSRVVGA

SEQ ID NO: 34748 - protein, 9 aa, synthetic construct
  source 1..9: note = Seed: VVGARGVGK (KRAS G12R)
AVGSRVVGG

SEQ ID NO: 34749 - protein, 9 aa, synthetic construct
  source 1..9: note = Seed: VVGARGVGK (KRAS G12R)
AVGSRVVGI

SEQ ID NO: 34750 - protein, 9 aa, synthetic construct
  source 1..9: note = Seed: VVGARGVGK (KRAS G12R)
AVGSRVVGN

SEQ ID NO: 34751 - protein, 9 aa, synthetic construct
  source 1..9: note = Seed: VVGARGVGK (KRAS G12R)
AVGSRVVGS

SEQ ID NO: 34752 - protein, 9 aa, synthetic construct
  source 1..9: note = Seed: VVGARGVGK (KRAS G12R)
AVGSRVVGT

SEQ ID NO: 34753 - protein, 9 aa, synthetic construct
  source 1..9: note = Seed: VVGARGVGK (KRAS G12R)
AVGSRVVGV

SEQ ID NO: 34754 - protein, 9 aa, synthetic construct
  source 1..9: note = Seed: VVGARGVGK (KRAS G12R)
AVGTRAVGA

SEQ ID NO: 34755 - protein, 9 aa, synthetic construct
  source 1..9: note = Seed: VVGARGVGK (KRAS G12R)
AVGTRAVGI

SEQ ID NO: 34756 - protein, 9 aa, synthetic construct
  source 1..9: note = Seed: VVGARGVGK (KRAS G12R)
AVGTRAVGS

SEQ ID NO: 34757 - protein, 9 aa, synthetic construct
  source 1..9: note = Seed: VVGARGVGK (KRAS G12R)
AVGTRAVGT

SEQ ID NO: 34758 - protein, 9 aa, synthetic construct
  source 1..9: note = Seed: VVGARGVGK (KRAS G12R)
AVGTRAVGV

SEQ ID NO: 34759 - protein, 9 aa, synthetic construct
  source 1..9: note = Seed: VVGARGVGK (KRAS G12R)
AVGTRPVGA

SEQ ID NO: 34760 - protein, 9 aa, synthetic construct
  source 1..9: note = Seed: VVGARGVGK (KRAS G12R)
AVGTRSVGI

SEQ ID NO: 34761 - protein, 9 aa, synthetic construct
  source 1..9: note = Seed: VVGARGVGK (KRAS G12R)
AVGTRSVGL

SEQ ID NO: 34762 - protein, 9 aa, synthetic construct
  source 1..9: note = Seed: VVGARGVGK (KRAS G12R)
AVGTRSVGV

SEQ ID NO: 34763 - protein, 9 aa, synthetic construct
  source 1..9: note = Seed: VVGARGVGK (KRAS G12R)
AVGTRVVGA

SEQ ID NO: 34764 - protein, 9 aa, synthetic construct
  source 1..9: note = Seed: VVGARGVGK (KRAS G12R)
AVGVRAVGA

SEQ ID NO: 34765 - protein, 9 aa, synthetic construct
  source 1..9: note = Seed: VVGARGVGK (KRAS G12R)
AVGVRSVGI

SEQ ID NO: 34766 - protein, 9 aa, synthetic construct
  source 1..9: note = Seed: VVGARGVGK (KRAS G12R)
AVGWRKVGR

SEQ ID NO: 34767 - protein, 9 aa, synthetic construct
  source 1..9: note = Seed: VVGARGVGK (KRAS G12R)
AVGWRRVGR

SEQ ID NO: 34768 - protein, 9 aa, synthetic construct
  source 1..9: note = Seed: VVGARGVGK (KRAS G12R)
AVGYRRVGR

SEQ ID NO: 34769 - protein, 9 aa, synthetic construct
  source 1..9: note = Seed: VVGARGVGK (KRAS G12R)
CVGARAVGA

SEQ ID NO: 34770 - protein, 9 aa, synthetic construct
  source 1..9: note = Seed: VVGARGVGK (KRAS G12R)
CVGARAVGF

SEQ ID NO: 34771 - protein, 9 aa, synthetic construct
  source 1..9: note = Seed: VVGARGVGK (KRAS G12R)
CVGARAVGG

SEQ ID NO: 34772 - protein, 9 aa, synthetic construct
  source 1..9: note = Seed: VVGARGVGK (KRAS G12R)
CVGARAVGI

SEQ ID NO: 34773 - protein, 9 aa, synthetic construct
  source 1..9: note = Seed: VVGARGVGK (KRAS G12R)
CVGARAVGL

SEQ ID NO: 34774 - protein, 9 aa, synthetic construct
  source 1..9: note = Seed: VVGARGVGK (KRAS G12R)
CVGARAVGM

SEQ ID NO: 34775 - protein, 9 aa, synthetic construct
  source 1..9: note = Seed: VVGARGVGK (KRAS G12R)
CVGARAVGS

SEQ ID NO: 34776 - protein, 9 aa, synthetic construct
  source 1..9: note = Seed: VVGARGVGK (KRAS G12R)
CVGARAVGT

SEQ ID NO: 34777 - protein, 9 aa, synthetic construct
  source 1..9: note = Seed: VVGARGVGK (KRAS G12R)
CVGARAVGV

SEQ ID NO: 34778 - protein, 9 aa, synthetic construct
  source 1..9: note = Seed: VVGARGVGK (KRAS G12R)
CVGARGVGI

SEQ ID NO: 34779 - protein, 9 aa, synthetic construct
  source 1..9: note = Seed: VVGARGVGK (KRAS G12R)
CVGARGVGL

SEQ ID NO: 34780 - protein, 9 aa, synthetic construct
  source 1..9: note = Seed: VVGARGVGK (KRAS G12R)
CVGARGVGV

SEQ ID NO: 34781 - protein, 9 aa, synthetic construct
  source 1..9: note = Seed: VVGARGVGK (KRAS G12R)
CVGARIVGA

SEQ ID NO: 34782 - protein, 9 aa, synthetic construct
  source 1..9: note = Seed: VVGARGVGK (KRAS G12R)
CVGARIVGS

SEQ ID NO: 34783 - protein, 9 aa, synthetic construct
  source 1..9: note = Seed: VVGARGVGK (KRAS G12R)
CVGARIVGT

SEQ ID NO: 34784 - protein, 9 aa, synthetic construct
  source 1..9: note = Seed: VVGARGVGK (KRAS G12R)
CVGARIVGV

SEQ ID NO: 34785 - protein, 9 aa, synthetic construct
  source 1..9: note = Seed: VVGARGVGK (KRAS G12R)
CVGARPVGA

SEQ ID NO: 34786 - protein, 9 aa, synthetic construct
  source 1..9: note = Seed: VVGARGVGK (KRAS G12R)
CVGARPVGI

SEQ ID NO: 34787 - protein, 9 aa, synthetic construct
  source 1..9: note = Seed: VVGARGVGK (KRAS G12R)
CVGARPVGL

SEQ ID NO: 34788 - protein, 9 aa, synthetic construct
  source 1..9: note = Seed: VVGARGVGK (KRAS G12R)
CVGARPVGS

SEQ ID NO: 34789 - protein, 9 aa, synthetic construct
  source 1..9: note = Seed: VVGARGVGK (KRAS G12R)
CVGARPVGT

SEQ ID NO: 34790 - protein, 9 aa, synthetic construct
  source 1..9: note = Seed: VVGARGVGK (KRAS G12R)
CVGARPVGV

SEQ ID NO: 34791 - protein, 9 aa, synthetic construct
  source 1..9: note = Seed: VVGARGVGK (KRAS G12R)
CVGARSVGA

SEQ ID NO: 34792 - protein, 9 aa, synthetic construct
  source 1..9: note = Seed: VVGARGVGK (KRAS G12R)
CVGARSVGI

SEQ ID NO: 34793 - protein, 9 aa, synthetic construct
  source 1..9: note = Seed: VVGARGVGK (KRAS G12R)
CVGARSVGL

SEQ ID NO: 34794 - protein, 9 aa, synthetic construct
  source 1..9: note = Seed: VVGARGVGK (KRAS G12R)
CVGARSVGV

SEQ ID NO: 34795 - protein, 9 aa, synthetic construct
  source 1..9: note = Seed: VVGARGVGK (KRAS G12R)
CVGARTVGA

SEQ ID NO: 34796 - protein, 9 aa, synthetic construct
  source 1..9: note = Seed: VVGARGVGK (KRAS G12R)
CVGARTVGV

SEQ ID NO: 34797 - protein, 9 aa, synthetic construct
  source 1..9: note = Seed: VVGARGVGK (KRAS G12R)
CVGARVVGA

SEQ ID NO: 34798 - protein, 9 aa, synthetic construct
  source 1..9: note = Seed: VVGARGVGK (KRAS G12R)
CVGARVVGI

SEQ ID NO: 34799 - protein, 9 aa, synthetic construct
  source 1..9: note = Seed: VVGARGVGK (KRAS G12R)
CVGARVVGS

SEQ ID NO: 34800 - protein, 9 aa, synthetic construct
  source 1..9: note = Seed: VVGARGVGK (KRAS G12R)
CVGARVVGT

SEQ ID NO: 34801 - protein, 9 aa, synthetic construct
  source 1..9: note = Seed: VVGARGVGK (KRAS G12R)
CVGARVVGV

SEQ ID NO: 34802 - protein, 9 aa, synthetic construct
  source 1..9: note = Seed: VVGARGVGK (KRAS G12R)
CVGGRAVGA

SEQ ID NO: 34803 - protein, 9 aa, synthetic construct
  source 1..9: note = Seed: VVGARGVGK (KRAS G12R)
CVGGRAVGG

SEQ ID NO: 34804 - protein, 9 aa, synthetic construct
  source 1..9: note = Seed: VVGARGVGK (KRAS G12R)
CVGGRAVGI

SEQ ID NO: 34805 - protein, 9 aa, synthetic construct
  source 1..9: note = Seed: VVGARGVGK (KRAS G12R)
CVGGRAVGL

SEQ ID NO: 34806 - protein, 9 aa, synthetic construct
  source 1..9: note = Seed: VVGARGVGK (KRAS G12R)
CVGGRAVGM

SEQ ID NO: 34807 - protein, 9 aa, synthetic construct
  source 1..9: note = Seed: VVGARGVGK (KRAS G12R)
CVGGRAVGS

SEQ ID NO: 34808 - protein, 9 aa, synthetic construct
  source 1..9: note = Seed: VVGARGVGK (KRAS G12R)
CVGGRAVGT

SEQ ID NO: 34809 - protein, 9 aa, synthetic construct
  source 1..9: note = Seed: VVGARGVGK (KRAS G12R)
CVGGRAVGV

SEQ ID NO: 34810 - protein, 9 aa, synthetic construct
  source 1..9: note = Seed: VVGARGVGK (KRAS G12R)
CVGGRIVGA

SEQ ID NO: 34811 - protein, 9 aa, synthetic construct
  source 1..9: note = Seed: VVGARGVGK (KRAS G12R)
CVGGRIVGS

SEQ ID NO: 34812 - protein, 9 aa, synthetic construct
  source 1..9: note = Seed: VVGARGVGK (KRAS G12R)
CVGGRIVGT

SEQ ID NO: 34813 - protein, 9 aa, synthetic construct
  source 1..9: note = Seed: VVGARGVGK (KRAS G12R)
CVGGRIVGV

SEQ ID NO: 34814 - protein, 9 aa, synthetic construct
  source 1..9: note = Seed: VVGARGVGK (KRAS G12R)
CVGGRPVGA

SEQ ID NO: 34815 - protein, 9 aa, synthetic construct
  source 1..9: note = Seed: VVGARGVGK (KRAS G12R)
CVGGRPVGI

SEQ ID NO: 34816 - protein, 9 aa, synthetic construct
  source 1..9: note = Seed: VVGARGVGK (KRAS G12R)
CVGGRPVGS

SEQ ID NO: 34817 - protein, 9 aa, synthetic construct
  source 1..9: note = Seed: VVGARGVGK (KRAS G12R)
CVGGRPVGT

SEQ ID NO: 34818 - protein, 9 aa, synthetic construct
  source 1..9: note = Seed: VVGARGVGK (KRAS G12R)
CVGGRPVGV

SEQ ID NO: 34819 - protein, 9 aa, synthetic construct
  source 1..9: note = Seed: VVGARGVGK (KRAS G12R)
CVGGRSVGA

SEQ ID NO: 34820 - protein, 9 aa, synthetic construct
  source 1..9: note = Seed: VVGARGVGK (KRAS G12R)
CVGGRTVGA

SEQ ID NO: 34821 - protein, 9 aa, synthetic construct
  source 1..9: note = Seed: VVGARGVGK (KRAS G12R)
CVGGRVVGA

SEQ ID NO: 34822 - protein, 9 aa, synthetic construct
  source 1..9: note = Seed: VVGARGVGK (KRAS G12R)
CVGGRVVGI

SEQ ID NO: 34823 - protein, 9 aa, synthetic construct
  source 1..9: note = Seed: VVGARGVGK (KRAS G12R)
CVGGRVVGS

SEQ ID NO: 34824 - protein, 9 aa, synthetic construct
  source 1..9: note = Seed: VVGARGVGK (KRAS G12R)
CVGGRVVGT

SEQ ID NO: 34825 - protein, 9 aa, synthetic construct
  source 1..9: note = Seed: VVGARGVGK (KRAS G12R)
CVGGRVVGV

SEQ ID NO: 34826 - protein, 9 aa, synthetic construct
  source 1..9: note = Seed: VVGARGVGK (KRAS G12R)
CVGIRAVGI

SEQ ID NO: 34827 - protein, 9 aa, synthetic construct
  source 1..9: note = Seed: VVGARGVGK (KRAS G12R)
CVGIRAVGL

SEQ ID NO: 34828 - protein, 9 aa, synthetic construct
  source 1..9: note = Seed: VVGARGVGK (KRAS G12R)
CVGIRAVGM

SEQ ID NO: 34829 - protein, 9 aa, synthetic construct
  source 1..9: note = Seed: VVGARGVGK (KRAS G12R)
CVGIRAVGV

SEQ ID NO: 34830 - protein, 9 aa, synthetic construct
  source 1..9: note = Seed: VVGARGVGK (KRAS G12R)
CVGIRGVGI

SEQ ID NO: 34831 - protein, 9 aa, synthetic construct
  source 1..9: note = Seed: VVGARGVGK (KRAS G12R)
CVGIRGVGL

SEQ ID NO: 34832 - protein, 9 aa, synthetic construct
  source 1..9: note = Seed: VVGARGVGK (KRAS G12R)
CVGIRGVGM

SEQ ID NO: 34833 - protein, 9 aa, synthetic construct
  source 1..9: note = Seed: VVGARGVGK (KRAS G12R)
CVGIRGVGV

SEQ ID NO: 34834 - protein, 9 aa, synthetic construct
  source 1..9: note = Seed: VVGARGVGK (KRAS G12R)
CVGIRPVGI

SEQ ID NO: 34835 - protein, 9 aa, synthetic construct
  source 1..9: note = Seed: VVGARGVGK (KRAS G12R)
CVGIRPVGL

SEQ ID NO: 34836 - protein, 9 aa, synthetic construct
  source 1..9: note = Seed: VVGARGVGK (KRAS G12R)
CVGIRPVGV

SEQ ID NO: 34837 - protein, 9 aa, synthetic construct
  source 1..9: note = Seed: VVGARGVGK (KRAS G12R)
CVGIRSVGI

SEQ ID NO: 34838 - protein, 9 aa, synthetic construct
  source 1..9: note = Seed: VVGARGVGK (KRAS G12R)
CVGIRSVGL

SEQ ID NO: 34839 - protein, 9 aa, synthetic construct
  source 1..9: note = Seed: VVGARGVGK (KRAS G12R)
CVGIRSVGM

SEQ ID NO: 34840 - protein, 9 aa, synthetic construct
  source 1..9: note = Seed: VVGARGVGK (KRAS G12R)
CVGLRAVGF

SEQ ID NO: 34841 - protein, 9 aa, synthetic construct
  source 1..9: note = Seed: VVGARGVGK (KRAS G12R)
CVGLRAVGI

SEQ ID NO: 34842 - protein, 9 aa, synthetic construct
  source 1..9: note = Seed: VVGARGVGK (KRAS G12R)
CVGLRAVGL

SEQ ID NO: 34843 - protein, 9 aa, synthetic construct
  source 1..9: note = Seed: VVGARGVGK (KRAS G12R)
CVGLRAVGM

SEQ ID NO: 34844 - protein, 9 aa, synthetic construct
  source 1..9: note = Seed: VVGARGVGK (KRAS G12R)
CVGLRAVGT

SEQ ID NO: 34845 - protein, 9 aa, synthetic construct
  source 1..9: note = Seed: VVGARGVGK (KRAS G12R)
CVGLRAVGV

SEQ ID NO: 34846 - protein, 9 aa, synthetic construct
  source 1..9: note = Seed: VVGARGVGK (KRAS G12R)
CVGLRAVGY

SEQ ID NO: 34847 - protein, 9 aa, synthetic construct
  source 1..9: note = Seed: VVGARGVGK (KRAS G12R)
CVGLRGVGA

SEQ ID NO: 34848 - protein, 9 aa, synthetic construct
  source 1..9: note = Seed: VVGARGVGK (KRAS G12R)
CVGLRGVGI

SEQ ID NO: 34849 - protein, 9 aa, synthetic construct
  source 1..9: note = Seed: VVGARGVGK (KRAS G12R)
CVGLRGVGL

SEQ ID NO: 34850 - protein, 9 aa, synthetic construct
  source 1..9: note = Seed: VVGARGVGK (KRAS G12R)
CVGLRGVGM

SEQ ID NO: 34851 - protein, 9 aa, synthetic construct
  source 1..9: note = Seed: VVGARGVGK (KRAS G12R)
CVGLRGVGS

SEQ ID NO: 34852 - protein, 9 aa, synthetic construct
  source 1..9: note = Seed: VVGARGVGK (KRAS G12R)
CVGLRGVGT

SEQ ID NO: 34853 - protein, 9 aa, synthetic construct
  source 1..9: note = Seed: VVGARGVGK (KRAS G12R)
CVGLRGVGV

SEQ ID NO: 34854 - protein, 9 aa, synthetic construct
  source 1..9: note = Seed: VVGARGVGK (KRAS G12R)
CVGLRNVGI

SEQ ID NO: 34855 - protein, 9 aa, synthetic construct
  source 1..9: note = Seed: VVGARGVGK (KRAS G12R)
CVGLRNVGL

SEQ ID NO: 34856 - protein, 9 aa, synthetic construct
  source 1..9: note = Seed: VVGARGVGK (KRAS G12R)
CVGLRNVGV

SEQ ID NO: 34857 - protein, 9 aa, synthetic construct
  source 1..9: note = Seed: VVGARGVGK (KRAS G12R)
CVGLRPVGI

SEQ ID NO: 34858 - protein, 9 aa, synthetic construct
  source 1..9: note = Seed: VVGARGVGK (KRAS G12R)
CVGLRPVGL

SEQ ID NO: 34859 - protein, 9 aa, synthetic construct
  source 1..9: note = Seed: VVGARGVGK (KRAS G12R)
CVGLRPVGM

SEQ ID NO: 34860 - protein, 9 aa, synthetic construct
  source 1..9: note = Seed: VVGARGVGK (KRAS G12R)
CVGLRPVGT

SEQ ID NO: 34861 - protein, 9 aa, synthetic construct
  source 1..9: note = Seed: VVGARGVGK (KRAS G12R)
CVGLRPVGV

SEQ ID NO: 34862 - protein, 9 aa, synthetic construct
  source 1..9: note = Seed: VVGARGVGK (KRAS G12R)
CVGLRSVGI

SEQ ID NO: 34863 - protein, 9 aa, synthetic construct
  source 1..9: note = Seed: VVGARGVGK (KRAS G12R)
CVGLRSVGL

SEQ ID NO: 34864 - protein, 9 aa, synthetic construct
  source 1..9: note = Seed: VVGARGVGK (KRAS G12R)
CVGLRSVGM

SEQ ID NO: 34865 - protein, 9 aa, synthetic construct
  source 1..9: note = Seed: VVGARGVGK (KRAS G12R)
CVGLRSVGT

SEQ ID NO: 34866 - protein, 9 aa, synthetic construct
  source 1..9: note = Seed: VVGARGVGK (KRAS G12R)
CVGLRSVGV

SEQ ID NO: 34867 - protein, 9 aa, synthetic construct
  source 1..9: note = Seed: VVGARGVGK (KRAS G12R)
CVGLRTVGI

SEQ ID NO: 34868 - protein, 9 aa, synthetic construct
  source 1..9: note = Seed: VVGARGVGK (KRAS G12R)
CVGLRTVGL

SEQ ID NO: 34869 - protein, 9 aa, synthetic construct
  source 1..9: note = Seed: VVGARGVGK (KRAS G12R)
CVGLRTVGM

SEQ ID NO: 34870 - protein, 9 aa, synthetic construct
  source 1..9: note = Seed: VVGARGVGK (KRAS G12R)
CVGLRTVGV

SEQ ID NO: 34871 - protein, 9 aa, synthetic construct
  source 1..9: note = Seed: VVGARGVGK (KRAS G12R)
CVGLRVVGI

SEQ ID NO: 34872 - protein, 9 aa, synthetic construct
  source 1..9: note = Seed: VVGARGVGK (KRAS G12R)
CVGLRVVGV

SEQ ID NO: 34873 - protein, 9 aa, synthetic construct
  source 1..9: note = Seed: VVGARGVGK (KRAS G12R)
CVGMRAVGF

SEQ ID NO: 34874 - protein, 9 aa, synthetic construct
  source 1..9: note = Seed: VVGARGVGK (KRAS G12R)
CVGMRAVGI

SEQ ID NO: 34875 - protein, 9 aa, synthetic construct
  source 1..9: note = Seed: VVGARGVGK (KRAS G12R)
CVGMRAVGL

SEQ ID NO: 34876 - protein, 9 aa, synthetic construct
  source 1..9: note = Seed: VVGARGVGK (KRAS G12R)
CVGMRAVGM

SEQ ID NO: 34877 - protein, 9 aa, synthetic construct
  source 1..9: note = Seed: VVGARGVGK (KRAS G12R)
CVGMRAVGT

SEQ ID NO: 34878 - protein, 9 aa, synthetic construct
  source 1..9: note = Seed: VVGARGVGK (KRAS G12R)
CVGMRAVGV

SEQ ID NO: 34879 - protein, 9 aa, synthetic construct
  source 1..9: note = Seed: VVGARGVGK (KRAS G12R)
CVGMRAVGY

SEQ ID NO: 34880 - protein, 9 aa, synthetic construct
  source 1..9: note = Seed: VVGARGVGK (KRAS G12R)
CVGMRGVGA

SEQ ID NO: 34881 - protein, 9 aa, synthetic construct
  source 1..9: note = Seed: VVGARGVGK (KRAS G12R)
CVGMRGVGI

SEQ ID NO: 34882 - protein, 9 aa, synthetic construct
  source 1..9: note = Seed: VVGARGVGK (KRAS G12R)
CVGMRGVGL

SEQ ID NO: 34883 - protein, 9 aa, synthetic construct
  source 1..9: note = Seed: VVGARGVGK (KRAS G12R)
CVGMRGVGM

SEQ ID NO: 34884 - protein, 9 aa, synthetic construct
  source 1..9: note = Seed: VVGARGVGK (KRAS G12R)
CVGMRGVGS

SEQ ID NO: 34885 - protein, 9 aa, synthetic construct
  source 1..9: note = Seed: VVGARGVGK (KRAS G12R)
CVGMRGVGT

SEQ ID NO: 34886 - protein, 9 aa, synthetic construct
  source 1..9: note = Seed: VVGARGVGK (KRAS G12R)
CVGMRGVGV

SEQ ID NO: 34887 - protein, 9 aa, synthetic construct
  source 1..9: note = Seed: VVGARGVGK (KRAS G12R)
CVGMRNVGI

SEQ ID NO: 34888 - protein, 9 aa, synthetic construct
  source 1..9: note = Seed: VVGARGVGK (KRAS G12R)
CVGMRNVGL

SEQ ID NO: 34889 - protein, 9 aa, synthetic construct
  source 1..9: note = Seed: VVGARGVGK (KRAS G12R)
CVGMRNVGV

SEQ ID NO: 34890 - protein, 9 aa, synthetic construct
  source 1..9: note = Seed: VVGARGVGK (KRAS G12R)
CVGMRPVGI

SEQ ID NO: 34891 - protein, 9 aa, synthetic construct
  source 1..9: note = Seed: VVGARGVGK (KRAS G12R)
CVGMRPVGL

SEQ ID NO: 34892 - protein, 9 aa, synthetic construct
  source 1..9: note = Seed: VVGARGVGK (KRAS G12R)
CVGMRPVGM

SEQ ID NO: 34893 - protein, 9 aa, synthetic construct
  source 1..9: note = Seed: VVGARGVGK (KRAS G12R)
CVGMRPVGV

SEQ ID NO: 34894 - protein, 9 aa, synthetic construct
  source 1..9: note = Seed: VVGARGVGK (KRAS G12R)
CVGMRSVGI

SEQ ID NO: 34895 - protein, 9 aa, synthetic construct
  source 1..9: note = Seed: VVGARGVGK (KRAS G12R)
CVGMRSVGL

SEQ ID NO: 34896 - protein, 9 aa, synthetic construct
  source 1..9: note = Seed: VVGARGVGK (KRAS G12R)
CVGMRSVGM

SEQ ID NO: 34897 - protein, 9 aa, synthetic construct
  source 1..9: note = Seed: VVGARGVGK (KRAS G12R)
CVGMRSVGT

SEQ ID NO: 34898 - protein, 9 aa, synthetic construct
  source 1..9: note = Seed: VVGARGVGK (KRAS G12R)
CVGMRSVGV

SEQ ID NO: 34899 - protein, 9 aa, synthetic construct
  source 1..9: note = Seed: VVGARGVGK (KRAS G12R)
CVGMRTVGI

SEQ ID NO: 34900 - protein, 9 aa, synthetic construct
  source 1..9: note = Seed: VVGARGVGK (KRAS G12R)
CVGMRTVGL

SEQ ID NO: 34901 - protein, 9 aa, synthetic construct
  source 1..9: note = Seed: VVGARGVGK (KRAS G12R)
CVGMRTVGM

SEQ ID NO: 34902 - protein, 9 aa, synthetic construct
  source 1..9: note = Seed: VVGARGVGK (KRAS G12R)
CVGMRTVGV

SEQ ID NO: 34903 - protein, 9 aa, synthetic construct
  source 1..9: note = Seed: VVGARGVGK (KRAS G12R)
CVGMRVVGI

SEQ ID NO: 34904 - protein, 9 aa, synthetic construct
  source 1..9: note = Seed: VVGARGVGK (KRAS G12R)
CVGMRVVGL

SEQ ID NO: 34905 - protein, 9 aa, synthetic construct
  source 1..9: note = Seed: VVGARGVGK (KRAS G12R)
CVGMRVVGV

SEQ ID NO: 34906 - protein, 9 aa, synthetic construct
  source 1..9: note = Seed: VVGARGVGK (KRAS G12R)
CVGQRAVGI

SEQ ID NO: 34907 - protein, 9 aa, synthetic construct
  source 1..9: note = Seed: VVGARGVGK (KRAS G12R)
CVGQRAVGL

SEQ ID NO: 34908 - protein, 9 aa, synthetic construct
  source 1..9: note = Seed: VVGARGVGK (KRAS G12R)
CVGQRAVGV

SEQ ID NO: 34909 - protein, 9 aa, synthetic construct
  source 1..9: note = Seed: VVGARGVGK (KRAS G12R)
CVGQRGVGI

SEQ ID NO: 34910 - protein, 9 aa, synthetic construct
  source 1..9: note = Seed: VVGARGVGK (KRAS G12R)
CVGQRGVGL

SEQ ID NO: 34911 - protein, 9 aa, synthetic construct
  source 1..9: note = Seed: VVGARGVGK (KRAS G12R)
CVGQRGVGV

SEQ ID NO: 34912 - protein, 9 aa, synthetic construct
  source 1..9: note = Seed: VVGARGVGK (KRAS G12R)
CVGSRAVGA

SEQ ID NO: 34913 - protein, 9 aa, synthetic construct
  source 1..9: note = Seed: VVGARGVGK (KRAS G12R)
CVGSRAVGI

SEQ ID NO: 34914 - protein, 9 aa, synthetic construct
  source 1..9: note = Seed: VVGARGVGK (KRAS G12R)
CVGSRAVGL

SEQ ID NO: 34915 - protein, 9 aa, synthetic construct
  source 1..9: note = Seed: VVGARGVGK (KRAS G12R)
CVGSRAVGS

SEQ ID NO: 34916 - protein, 9 aa, synthetic construct
  source 1..9: note = Seed: VVGARGVGK (KRAS G12R)
CVGSRAVGT

SEQ ID NO: 34917 - protein, 9 aa, synthetic construct
  source 1..9: note = Seed: VVGARGVGK (KRAS G12R)
CVGSRAVGV

SEQ ID NO: 34918 - protein, 9 aa, synthetic construct
  source 1..9: note = Seed: VVGARGVGK (KRAS G12R)
CVGSRIVGA

SEQ ID NO: 34919 - protein, 9 aa, synthetic construct
  source 1..9: note = Seed: VVGARGVGK (KRAS G12R)
CVGSRIVGS

SEQ ID NO: 34920 - protein, 9 aa, synthetic construct
  source 1..9: note = Seed: VVGARGVGK (KRAS G12R)
CVGSRPVGA

SEQ ID NO: 34921 - protein, 9 aa, synthetic construct
  source 1..9: note = Seed: VVGARGVGK (KRAS G12R)
CVGSRSVGI

SEQ ID NO: 34922 - protein, 9 aa, synthetic construct
  source 1..9: note = Seed: VVGARGVGK (KRAS G12R)
CVGSRSVGL

SEQ ID NO: 34923 - protein, 9 aa, synthetic construct
  source 1..9: note = Seed: VVGARGVGK (KRAS G12R)
CVGSRSVGV

SEQ ID NO: 34924 - protein, 9 aa, synthetic construct
  source 1..9: note = Seed: VVGARGVGK (KRAS G12R)
CVGSRVVGA

SEQ ID NO: 34925 - protein, 9 aa, synthetic construct
  source 1..9: note = Seed: VVGARGVGK (KRAS G12R)
CVGTRAVGI

SEQ ID NO: 34926 - protein, 9 aa, synthetic construct
  source 1..9: note = Seed: VVGARGVGK (KRAS G12R)
CVGTRAVGL

SEQ ID NO: 34927 - protein, 9 aa, synthetic construct
  source 1..9: note = Seed: VVGARGVGK (KRAS G12R)
CVGTRAVGV

SEQ ID NO: 34928 - protein, 9 aa, synthetic construct
  source 1..9: note = Seed: VVGARGVGK (KRAS G12R)
CVGTRGVGI

SEQ ID NO: 34929 - protein, 9 aa, synthetic construct
  source 1..9: note = Seed: VVGARGVGK (KRAS G12R)
CVGTRSVGI

SEQ ID NO: 34930 - protein, 9 aa, synthetic construct
  source 1..9: note = Seed: VVGARGVGK (KRAS G12R)
CVGTRSVGL

SEQ ID NO: 34931 - protein, 9 aa, synthetic construct
  source 1..9: note = Seed: VVGARGVGK (KRAS G12R)
CVGTRSVGV

SEQ ID NO: 34932 - protein, 9 aa, synthetic construct
  source 1..9: note = Seed: VVGARGVGK (KRAS G12R)
CVGVRAVGI

SEQ ID NO: 34933 - protein, 9 aa, synthetic construct
  source 1..9: note = Seed: VVGARGVGK (KRAS G12R)
CVGVRAVGL

SEQ ID NO: 34934 - protein, 9 aa, synthetic construct
  source 1..9: note = Seed: VVGARGVGK (KRAS G12R)
CVGVRAVGM

SEQ ID NO: 34935 - protein, 9 aa, synthetic construct
  source 1..9: note = Seed: VVGARGVGK (KRAS G12R)
CVGVRAVGV

SEQ ID NO: 34936 - protein, 9 aa, synthetic construct
  source 1..9: note = Seed: VVGARGVGK (KRAS G12R)
CVGVRGVGI

SEQ ID NO: 34937 - protein, 9 aa, synthetic construct
  source 1..9: note = Seed: VVGARGVGK (KRAS G12R)
CVGVRGVGL

SEQ ID NO: 34938 - protein, 9 aa, synthetic construct
  source 1..9: note = Seed: VVGARGVGK (KRAS G12R)
CVGVRGVGV

SEQ ID NO: 34939 - protein, 9 aa, synthetic construct
  source 1..9: note = Seed: VVGARGVGK (KRAS G12R)
CVGVRPVGV

SEQ ID NO: 34940 - protein, 9 aa, synthetic construct
  source 1..9: note = Seed: VVGARGVGK (KRAS G12R)
CVGVRSVGI

SEQ ID NO: 34941 - protein, 9 aa, synthetic construct
  source 1..9: note = Seed: VVGARGVGK (KRAS G12R)
CVGVRSVGL

SEQ ID NO: 34942 - protein, 9 aa, synthetic construct
  source 1..9: note = Seed: VVGARGVGK (KRAS G12R)
CVGVRSVGV

SEQ ID NO: 34943 - protein, 9 aa, synthetic construct
  source 1..9: note = Seed: VVGARGVGK (KRAS G12R)
CVGYRRVGR

SEQ ID NO: 34944 - protein, 9 aa, synthetic construct
  source 1..9: note = Seed: VVGARGVGK (KRAS G12R)
DVGARAVGA

SEQ ID NO: 34945 - protein, 9 aa, synthetic construct
  source 1..9: note = Seed: VVGARGVGK (KRAS G12R)
DVGARAVGG

SEQ ID NO: 34946 - protein, 9 aa, synthetic construct
  source 1..9: note = Seed: VVGARGVGK (KRAS G12R)
DVGARAVGI

SEQ ID NO: 34947 - protein, 9 aa, synthetic construct
  source 1..9: note = Seed: VVGARGVGK (KRAS G12R)
DVGARAVGS

SEQ ID NO: 34948 - protein, 9 aa, synthetic construct
  source 1..9: note = Seed: VVGARGVGK (KRAS G12R)
DVGARAVGT

SEQ ID NO: 34949 - protein, 9 aa, synthetic construct
  source 1..9: note = Seed: VVGARGVGK (KRAS G12R)
DVGARAVGV

SEQ ID NO: 34950 - protein, 9 aa, synthetic construct
  source 1..9: note = Seed: VVGARGVGK (KRAS G12R)
DVGARIVGA

SEQ ID NO: 34951 - protein, 9 aa, synthetic construct
  source 1..9: note = Seed: VVGARGVGK (KRAS G12R)
DVGARIVGS

SEQ ID NO: 34952 - protein, 9 aa, synthetic construct
  source 1..9: note = Seed: VVGARGVGK (KRAS G12R)
DVGARPVGA

SEQ ID NO: 34953 - protein, 9 aa, synthetic construct
  source 1..9: note = Seed: VVGARGVGK (KRAS G12R)
DVGARVVGA

SEQ ID NO: 34954 - protein, 9 aa, synthetic construct
  source 1..9: note = Seed: VVGARGVGK (KRAS G12R)
DVGARVVGS

SEQ ID NO: 34955 - protein, 9 aa, synthetic construct
  source 1..9: note = Seed: VVGARGVGK (KRAS G12R)
DVGARVVGT

SEQ ID NO: 34956 - protein, 9 aa, synthetic construct
  source 1..9: note = Seed: VVGARGVGK (KRAS G12R)
DVGARVVGV

SEQ ID NO: 34957 - protein, 9 aa, synthetic construct
  source 1..9: note = Seed: VVGARGVGK (KRAS G12R)
DVGGRAVGA

SEQ ID NO: 34958 - protein, 9 aa, synthetic construct
  source 1..9: note = Seed: VVGARGVGK (KRAS G12R)
DVGGRAVGG

SEQ ID NO: 34959 - protein, 9 aa, synthetic construct
  source 1..9: note = Seed: VVGARGVGK (KRAS G12R)
DVGGRAVGI

SEQ ID NO: 34960 - protein, 9 aa, synthetic construct
  source 1..9: note = Seed: VVGARGVGK (KRAS G12R)
DVGGRAVGS

SEQ ID NO: 34961 - protein, 9 aa, synthetic construct
  source 1..9: note = Seed: VVGARGVGK (KRAS G12R)
DVGGRAVGT

SEQ ID NO: 34962 - protein, 9 aa, synthetic construct
  source 1..9: note = Seed: VVGARGVGK (KRAS G12R)
DVGGRAVGV

SEQ ID NO: 34963 - protein, 9 aa, synthetic construct
  source 1..9: note = Seed: VVGARGVGK (KRAS G12R)
DVGGRIVGA

SEQ ID NO: 34964 - protein, 9 aa, synthetic construct
  source 1..9: note = Seed: VVGARGVGK (KRAS G12R)
DVGGRVVGA

SEQ ID NO: 34965 - protein, 9 aa, synthetic construct
  source 1..9: note = Seed: VVGARGVGK (KRAS G12R)
DVGGRVVGS

SEQ ID NO: 34966 - protein, 9 aa, synthetic construct
  source 1..9: note = Seed: VVGARGVGK (KRAS G12R)
DVGGRVVGT

SEQ ID NO: 34967 - protein, 9 aa, synthetic construct
  source 1..9: note = Seed: VVGARGVGK (KRAS G12R)
DVGGRVVGV

SEQ ID NO: 34968 - protein, 9 aa, synthetic construct
  source 1..9: note = Seed: VVGARGVGK (KRAS G12R)
DVGLRAVGI

SEQ ID NO: 34969 - protein, 9 aa, synthetic construct
  source 1..9: note = Seed: VVGARGVGK (KRAS G12R)
DVGLRAVGL

SEQ ID NO: 34970 - protein, 9 aa, synthetic construct
  source 1..9: note = Seed: VVGARGVGK (KRAS G12R)
DVGLRAVGV

SEQ ID NO: 34971 - protein, 9 aa, synthetic construct
  source 1..9: note = Seed: VVGARGVGK (KRAS G12R)
DVGLRGVGI

SEQ ID NO: 34972 - protein, 9 aa, synthetic construct
  source 1..9: note = Seed: VVGARGVGK (KRAS G12R)
DVGLRGVGL

SEQ ID NO: 34973 - protein, 9 aa, synthetic construct
  source 1..9: note = Seed: VVGARGVGK (KRAS G12R)
DVGLRGVGV

SEQ ID NO: 34974 - protein, 9 aa, synthetic construct
  source 1..9: note = Seed: VVGARGVGK (KRAS G12R)
DVGLRSVGI

SEQ ID NO: 34975 - protein, 9 aa, synthetic construct
  source 1..9: note = Seed: VVGARGVGK (KRAS G12R)
DVGLRSVGL

SEQ ID NO: 34976 - protein, 9 aa, synthetic construct
  source 1..9: note = Seed: VVGARGVGK (KRAS G12R)
DVGMRAVGI

SEQ ID NO: 34977 - protein, 9 aa, synthetic construct
  source 1..9: note = Seed: VVGARGVGK (KRAS G12R)
DVGMRAVGL

SEQ ID NO: 34978 - protein, 9 aa, synthetic construct
  source 1..9: note = Seed: VVGARGVGK (KRAS G12R)
DVGMRAVGV

SEQ ID NO: 34979 - protein, 9 aa, synthetic construct
  source 1..9: note = Seed: VVGARGVGK (KRAS G12R)
DVGSRAVGA

SEQ ID NO: 34980 - protein, 9 aa, synthetic construct
  source 1..9: note = Seed: VVGARGVGK (KRAS G12R)
EVGARAVGA

SEQ ID NO: 34981 - protein, 9 aa, synthetic construct
  source 1..9: note = Seed: VVGARGVGK (KRAS G12R)
EVGARAVGC

SEQ ID NO: 34982 - protein, 9 aa, synthetic construct
  source 1..9: note = Seed: VVGARGVGK (KRAS G12R)
EVGARAVGG

SEQ ID NO: 34983 - protein, 9 aa, synthetic construct
  source 1..9: note = Seed: VVGARGVGK (KRAS G12R)
EVGARAVGI

SEQ ID NO: 34984 - protein, 9 aa, synthetic construct
  source 1..9: note = Seed: VVGARGVGK (KRAS G12R)
EVGARAVGL

SEQ ID NO: 34985 - protein, 9 aa, synthetic construct
  source 1..9: note = Seed: VVGARGVGK (KRAS G12R)
EVGARAVGM

SEQ ID NO: 34986 - protein, 9 aa, synthetic construct
  source 1..9: note = Seed: VVGARGVGK (KRAS G12R)
EVGARAVGS

SEQ ID NO: 34987 - protein, 9 aa, synthetic construct
  source 1..9: note = Seed: VVGARGVGK (KRAS G12R)
EVGARAVGT

SEQ ID NO: 34988 - protein, 9 aa, synthetic construct
  source 1..9: note = Seed: VVGARGVGK (KRAS G12R)
EVGARAVGV

SEQ ID NO: 34989 - protein, 9 aa, synthetic construct
  source 1..9: note = Seed: VVGARGVGK (KRAS G12R)
EVGARGVGA

SEQ ID NO: 34990 - protein, 9 aa, synthetic construct
  source 1..9: note = Seed: VVGARGVGK (KRAS G12R)
EVGARIVGA

SEQ ID NO: 34991 - protein, 9 aa, synthetic construct
  source 1..9: note = Seed: VVGARGVGK (KRAS G12R)
EVGARIVGI

SEQ ID NO: 34992 - protein, 9 aa, synthetic construct
  source 1..9: note = Seed: VVGARGVGK (KRAS G12R)
EVGARIVGS

SEQ ID NO: 34993 - protein, 9 aa, synthetic construct
  source 1..9: note = Seed: VVGARGVGK (KRAS G12R)
EVGARIVGT

SEQ ID NO: 34994 - protein, 9 aa, synthetic construct
  source 1..9: note = Seed: VVGARGVGK (KRAS G12R)
EVGARIVGV

SEQ ID NO: 34995 - protein, 9 aa, synthetic construct
  source 1..9: note = Seed: VVGARGVGK (KRAS G12R)
EVGARPVGA

SEQ ID NO: 34996 - protein, 9 aa, synthetic construct
  source 1..9: note = Seed: VVGARGVGK (KRAS G12R)
EVGARPVGI

SEQ ID NO: 34997 - protein, 9 aa, synthetic construct
  source 1..9: note = Seed: VVGARGVGK (KRAS G12R)
EVGARPVGS

SEQ ID NO: 34998 - protein, 9 aa, synthetic construct
  source 1..9: note = Seed: VVGARGVGK (KRAS G12R)
EVGARPVGT

SEQ ID NO: 34999 - protein, 9 aa, synthetic construct
  source 1..9: note = Seed: VVGARGVGK (KRAS G12R)
EVGARPVGV

SEQ ID NO: 35000 - protein, 9 aa, synthetic construct
  source 1..9: note = Seed: VVGARGVGK (KRAS G12R)
EVGARSVGA

SEQ ID NO: 35001 - protein, 9 aa, synthetic construct
  source 1..9: note = Seed: VVGARGVGK (KRAS G12R)
EVGARSVGS

SEQ ID NO: 35002 - protein, 9 aa, synthetic construct
  source 1..9: note = Seed: VVGARGVGK (KRAS G12R)
EVGARSVGV

SEQ ID NO: 35003 - protein, 9 aa, synthetic construct
  source 1..9: note = Seed: VVGARGVGK (KRAS G12R)
EVGARTVGA

SEQ ID NO: 35004 - protein, 9 aa, synthetic construct
  source 1..9: note = Seed: VVGARGVGK (KRAS G12R)
EVGARTVGG

SEQ ID NO: 35005 - protein, 9 aa, synthetic construct
  source 1..9: note = Seed: VVGARGVGK (KRAS G12R)
EVGARTVGV

SEQ ID NO: 35006 - protein, 9 aa, synthetic construct
  source 1..9: note = Seed: VVGARGVGK (KRAS G12R)
EVGARVVGA

SEQ ID NO: 35007 - protein, 9 aa, synthetic construct
  source 1..9: note = Seed: VVGARGVGK (KRAS G12R)
EVGARVVGG

SEQ ID NO: 35008 - protein, 9 aa, synthetic construct
  source 1..9: note = Seed: VVGARGVGK (KRAS G12R)
EVGARVVGI

SEQ ID NO: 35009 - protein, 9 aa, synthetic construct
  source 1..9: note = Seed: VVGARGVGK (KRAS G12R)
EVGARVVGM

SEQ ID NO: 35010 - protein, 9 aa, synthetic construct
  source 1..9: note = Seed: VVGARGVGK (KRAS G12R)
EVGARVVGN

SEQ ID NO: 35011 - protein, 9 aa, synthetic construct
  source 1..9: note = Seed: VVGARGVGK (KRAS G12R)
EVGARVVGS

SEQ ID NO: 35012 - protein, 9 aa, synthetic construct
  source 1..9: note = Seed: VVGARGVGK (KRAS G12R)
EVGARVVGT

SEQ ID NO: 35013 - protein, 9 aa, synthetic construct
  source 1..9: note = Seed: VVGARGVGK (KRAS G12R)
EVGARVVGV

SEQ ID NO: 35014 - protein, 9 aa, synthetic construct
  source 1..9: note = Seed: VVGARGVGK (KRAS G12R)
EVGGRAVGA

SEQ ID NO: 35015 - protein, 9 aa, synthetic construct
  source 1..9: note = Seed: VVGARGVGK (KRAS G12R)
EVGGRAVGG

SEQ ID NO: 35016 - protein, 9 aa, synthetic construct
  source 1..9: note = Seed: VVGARGVGK (KRAS G12R)
EVGGRAVGI

SEQ ID NO: 35017 - protein, 9 aa, synthetic construct
  source 1..9: note = Seed: VVGARGVGK (KRAS G12R)
EVGGRAVGL

SEQ ID NO: 35018 - protein, 9 aa, synthetic construct
  source 1..9: note = Seed: VVGARGVGK (KRAS G12R)
EVGGRAVGM

SEQ ID NO: 35019 - protein, 9 aa, synthetic construct
  source 1..9: note = Seed: VVGARGVGK (KRAS G12R)
EVGGRAVGS

SEQ ID NO: 35020 - protein, 9 aa, synthetic construct
  source 1..9: note = Seed: VVGARGVGK (KRAS G12R)
EVGGRAVGT

SEQ ID NO: 35021 - protein, 9 aa, synthetic construct
  source 1..9: note = Seed: VVGARGVGK (KRAS G12R)
EVGGRAVGV

SEQ ID NO: 35022 - protein, 9 aa, synthetic construct
  source 1..9: note = Seed: VVGARGVGK (KRAS G12R)
EVGGRIVGA

SEQ ID NO: 35023 - protein, 9 aa, synthetic construct
  source 1..9: note = Seed: VVGARGVGK (KRAS G12R)
EVGGRIVGI

SEQ ID NO: 35024 - protein, 9 aa, synthetic construct
  source 1..9: note = Seed: VVGARGVGK (KRAS G12R)
EVGGRIVGS

SEQ ID NO: 35025 - protein, 9 aa, synthetic construct
  source 1..9: note = Seed: VVGARGVGK (KRAS G12R)
EVGGRIVGT

SEQ ID NO: 35026 - protein, 9 aa, synthetic construct
  source 1..9: note = Seed: VVGARGVGK (KRAS G12R)
EVGGRIVGV

SEQ ID NO: 35027 - protein, 9 aa, synthetic construct
  source 1..9: note = Seed: VVGARGVGK (KRAS G12R)
EVGGRPVGA

SEQ ID NO: 35028 - protein, 9 aa, synthetic construct
  source 1..9: note = Seed: VVGARGVGK (KRAS G12R)
EVGGRPVGI

SEQ ID NO: 35029 - protein, 9 aa, synthetic construct
  source 1..9: note = Seed: VVGARGVGK (KRAS G12R)
EVGGRPVGS

SEQ ID NO: 35030 - protein, 9 aa, synthetic construct
  source 1..9: note = Seed: VVGARGVGK (KRAS G12R)
EVGGRPVGT

SEQ ID NO: 35031 - protein, 9 aa, synthetic construct
  source 1..9: note = Seed: VVGARGVGK (KRAS G12R)
EVGGRPVGV

SEQ ID NO: 35032 - protein, 9 aa, synthetic construct
  source 1..9: note = Seed: VVGARGVGK (KRAS G12R)
EVGGRSVGA

SEQ ID NO: 35033 - protein, 9 aa, synthetic construct
  source 1..9: note = Seed: VVGARGVGK (KRAS G12R)
EVGGRSVGV

SEQ ID NO: 35034 - protein, 9 aa, synthetic construct
  source 1..9: note = Seed: VVGARGVGK (KRAS G12R)
EVGGRTVGA

SEQ ID NO: 35035 - protein, 9 aa, synthetic construct
  source 1..9: note = Seed: VVGARGVGK (KRAS G12R)
EVGGRTVGV

SEQ ID NO: 35036 - protein, 9 aa, synthetic construct
  source 1..9: note = Seed: VVGARGVGK (KRAS G12R)
EVGGRVVGA

SEQ ID NO: 35037 - protein, 9 aa, synthetic construct
  source 1..9: note = Seed: VVGARGVGK (KRAS G12R)
EVGGRVVGG

SEQ ID NO: 35038 - protein, 9 aa, synthetic construct
  source 1..9: note = Seed: VVGARGVGK (KRAS G12R)
EVGGRVVGI

SEQ ID NO: 35039 - protein, 9 aa, synthetic construct
  source 1..9: note = Seed: VVGARGVGK (KRAS G12R)
EVGGRVVGL

SEQ ID NO: 35040 - protein, 9 aa, synthetic construct
  source 1..9: note = Seed: VVGARGVGK (KRAS G12R)
EVGGRVVGM

SEQ ID NO: 35041 - protein, 9 aa, synthetic construct
  source 1..9: note = Seed: VVGARGVGK (KRAS G12R)
EVGGRVVGN

SEQ ID NO: 35042 - protein, 9 aa, synthetic construct
  source 1..9: note = Seed: VVGARGVGK (KRAS G12R)
EVGGRVVGS

SEQ ID NO: 35043 - protein, 9 aa, synthetic construct
  source 1..9: note = Seed: VVGARGVGK (KRAS G12R)
EVGGRVVGT

SEQ ID NO: 35044 - protein, 9 aa, synthetic construct
  source 1..9: note = Seed: VVGARGVGK (KRAS G12R)
EVGGRVVGV

SEQ ID NO: 35045 - protein, 9 aa, synthetic construct
  source 1..9: note = Seed: VVGARGVGK (KRAS G12R)
EVGLRAVGI

SEQ ID NO: 35046 - protein, 9 aa, synthetic construct
  source 1..9: note = Seed: VVGARGVGK (KRAS G12R)
EVGLRAVGL

SEQ ID NO: 35047 - protein, 9 aa, synthetic construct
  source 1..9: note = Seed: VVGARGVGK (KRAS G12R)
EVGLRAVGM

SEQ ID NO: 35048 - protein, 9 aa, synthetic construct
  source 1..9: note = Seed: VVGARGVGK (KRAS G12R)
EVGLRAVGV

SEQ ID NO: 35049 - protein, 9 aa, synthetic construct
  source 1..9: note = Seed: VVGARGVGK (KRAS G12R)
EVGLRGVGI

SEQ ID NO: 35050 - protein, 9 aa, synthetic construct
  source 1..9: note = Seed: VVGARGVGK (KRAS G12R)
EVGLRGVGL

SEQ ID NO: 35051 - protein, 9 aa, synthetic construct
  source 1..9: note = Seed: VVGARGVGK (KRAS G12R)
EVGLRGVGV

SEQ ID NO: 35052 - protein, 9 aa, synthetic construct
  source 1..9: note = Seed: VVGARGVGK (KRAS G12R)
EVGLRSVGI

SEQ ID NO: 35053 - protein, 9 aa, synthetic construct
  source 1..9: note = Seed: VVGARGVGK (KRAS G12R)
EVGLRSVGL

SEQ ID NO: 35054 - protein, 9 aa, synthetic construct
  source 1..9: note = Seed: VVGARGVGK (KRAS G12R)
EVGMRAVGI

SEQ ID NO: 35055 - protein, 9 aa, synthetic construct
  source 1..9: note = Seed: VVGARGVGK (KRAS G12R)
EVGMRAVGL

SEQ ID NO: 35056 - protein, 9 aa, synthetic construct
  source 1..9: note = Seed: VVGARGVGK (KRAS G12R)
EVGMRAVGV

SEQ ID NO: 35057 - protein, 9 aa, synthetic construct
  source 1..9: note = Seed: VVGARGVGK (KRAS G12R)
EVGMRGVGV

SEQ ID NO: 35058 - protein, 9 aa, synthetic construct
  source 1..9: note = Seed: VVGARGVGK (KRAS G12R)
EVGMRSVGV

SEQ ID NO: 35059 - protein, 9 aa, synthetic construct
  source 1..9: note = Seed: VVGARGVGK (KRAS G12R)
EVGSRAVGA

SEQ ID NO: 35060 - protein, 9 aa, synthetic construct
  source 1..9: note = Seed: VVGARGVGK (KRAS G12R)
EVGSRAVGG

SEQ ID NO: 35061 - protein, 9 aa, synthetic construct
  source 1..9: note = Seed: VVGARGVGK (KRAS G12R)
EVGSRAVGS

SEQ ID NO: 35062 - protein, 9 aa, synthetic construct
  source 1..9: note = Seed: VVGARGVGK (KRAS G12R)
EVGSRAVGT

SEQ ID NO: 35063 - protein, 9 aa, synthetic construct
  source 1..9: note = Seed: VVGARGVGK (KRAS G12R)
EVGSRAVGV

SEQ ID NO: 35064 - protein, 9 aa, synthetic construct
  source 1..9: note = Seed: VVGARGVGK (KRAS G12R)
EVGSRPVGA

SEQ ID NO: 35065 - protein, 9 aa, synthetic construct
  source 1..9: note = Seed: VVGARGVGK (KRAS G12R)
EVGSRVVGA

SEQ ID NO: 35066 - protein, 9 aa, synthetic construct
  source 1..9: note = Seed: VVGARGVGK (KRAS G12R)
EVGSRVVGS

SEQ ID NO: 35067 - protein, 9 aa, synthetic construct
  source 1..9: note = Seed: VVGARGVGK (KRAS G12R)
EVGSRVVGT

SEQ ID NO: 35068 - protein, 9 aa, synthetic construct
  source 1..9: note = Seed: VVGARGVGK (KRAS G12R)
EVGSRVVGV

SEQ ID NO: 35069 - protein, 9 aa, synthetic construct
  source 1..9: note = Seed: VVGARGVGK (KRAS G12R)
EVGTRAVGA

SEQ ID NO: 35070 - protein, 9 aa, synthetic construct
  source 1..9: note = Seed: VVGARGVGK (KRAS G12R)
FVGARAVGA

SEQ ID NO: 35071 - protein, 9 aa, synthetic construct
  source 1..9: note = Seed: VVGARGVGK (KRAS G12R)
FVGARAVGC

SEQ ID NO: 35072 - protein, 9 aa, synthetic construct
  source 1..9: note = Seed: VVGARGVGK (KRAS G12R)
FVGARAVGD

SEQ ID NO: 35073 - protein, 9 aa, synthetic construct
  source 1..9: note = Seed: VVGARGVGK (KRAS G12R)
FVGARAVGE

SEQ ID NO: 35074 - protein, 9 aa, synthetic construct
  source 1..9: note = Seed: VVGARGVGK (KRAS G12R)
FVGARAVGF

SEQ ID NO: 35075 - protein, 9 aa, synthetic construct
  source 1..9: note = Seed: VVGARGVGK (KRAS G12R)
FVGARAVGG

SEQ ID NO: 35076 - protein, 9 aa, synthetic construct
  source 1..9: note = Seed: VVGARGVGK (KRAS G12R)
FVGARAVGH

SEQ ID NO: 35077 - protein, 9 aa, synthetic construct
  source 1..9: note = Seed: VVGARGVGK (KRAS G12R)
FVGARAVGI

SEQ ID NO: 35078 - protein, 9 aa, synthetic construct
  source 1..9: note = Seed: VVGARGVGK (KRAS G12R)
FVGARAVGK

SEQ ID NO: 35079 - protein, 9 aa, synthetic construct
  source 1..9: note = Seed: VVGARGVGK (KRAS G12R)
FVGARAVGL

SEQ ID NO: 35080 - protein, 9 aa, synthetic construct
  source 1..9: note = Seed: VVGARGVGK (KRAS G12R)
FVGARAVGM

SEQ ID NO: 35081 - protein, 9 aa, synthetic construct
  source 1..9: note = Seed: VVGARGVGK (KRAS G12R)
FVGARAVGN

SEQ ID NO: 35082 - protein, 9 aa, synthetic construct
  source 1..9: note = Seed: VVGARGVGK (KRAS G12R)
FVGARAVGP

SEQ ID NO: 35083 - protein, 9 aa, synthetic construct
  source 1..9: note = Seed: VVGARGVGK (KRAS G12R)
FVGARAVGQ

SEQ ID NO: 35084 - protein, 9 aa, synthetic construct
  source 1..9: note = Seed: VVGARGVGK (KRAS G12R)
FVGARAVGR

SEQ ID NO: 35085 - protein, 9 aa, synthetic construct
  source 1..9: note = Seed: VVGARGVGK (KRAS G12R)
FVGARAVGS

SEQ ID NO: 35086 - protein, 9 aa, synthetic construct
  source 1..9: note = Seed: VVGARGVGK (KRAS G12R)
FVGARAVGT

SEQ ID NO: 35087 - protein, 9 aa, synthetic construct
  source 1..9: note = Seed: VVGARGVGK (KRAS G12R)
FVGARAVGV

SEQ ID NO: 35088 - protein, 9 aa, synthetic construct
  source 1..9: note = Seed: VVGARGVGK (KRAS G12R)
FVGARAVGW

SEQ ID NO: 35089 - protein, 9 aa, synthetic construct
  source 1..9: note = Seed: VVGARGVGK (KRAS G12R)
FVGARAVGY

SEQ ID NO: 35090 - protein, 9 aa, synthetic construct
  source 1..9: note = Seed: VVGARGVGK (KRAS G12R)
FVGARCVGA

SEQ ID NO: 35091 - protein, 9 aa, synthetic construct
  source 1..9: note = Seed: VVGARGVGK (KRAS G12R)
FVGARCVGG

SEQ ID NO: 35092 - protein, 9 aa, synthetic construct
  source 1..9: note = Seed: VVGARGVGK (KRAS G12R)
FVGARCVGI

SEQ ID NO: 35093 - protein, 9 aa, synthetic construct
  source 1..9: note = Seed: VVGARGVGK (KRAS G12R)
FVGARCVGK

SEQ ID NO: 35094 - protein, 9 aa, synthetic construct
  source 1..9: note = Seed: VVGARGVGK (KRAS G12R)
FVGARCVGL

SEQ ID NO: 35095 - protein, 9 aa, synthetic construct
  source 1..9: note = Seed: VVGARGVGK (KRAS G12R)
FVGARCVGM

SEQ ID NO: 35096 - protein, 9 aa, synthetic construct
  source 1..9: note = Seed: VVGARGVGK (KRAS G12R)
FVGARCVGN

SEQ ID NO: 35097 - protein, 9 aa, synthetic construct
  source 1..9: note = Seed: VVGARGVGK (KRAS G12R)
FVGARCVGR

SEQ ID NO: 35098 - protein, 9 aa, synthetic construct
  source 1..9: note = Seed: VVGARGVGK (KRAS G12R)
FVGARCVGS

SEQ ID NO: 35099 - protein, 9 aa, synthetic construct
  source 1..9: note = Seed: VVGARGVGK (KRAS G12R)
FVGARCVGT

SEQ ID NO: 35100 - protein, 9 aa, synthetic construct
  source 1..9: note = Seed: VVGARGVGK (KRAS G12R)
FVGARCVGV

SEQ ID NO: 35101 - protein, 9 aa, synthetic construct
  source 1..9: note = Seed: VVGARGVGK (KRAS G12R)
FVGARDVGA

SEQ ID NO: 35102 - protein, 9 aa, synthetic construct
  source 1..9: note = Seed: VVGARGVGK (KRAS G12R)
FVGARDVGI

SEQ ID NO: 35103 - protein, 9 aa, synthetic construct
  source 1..9: note = Seed: VVGARGVGK (KRAS G12R)
FVGARDVGL

SEQ ID NO: 35104 - protein, 9 aa, synthetic construct
  source 1..9: note = Seed: VVGARGVGK (KRAS G12R)
FVGARDVGM

SEQ ID NO: 35105 - protein, 9 aa, synthetic construct
  source 1..9: note = Seed: VVGARGVGK (KRAS G12R)
FVGARDVGV

SEQ ID NO: 35106 - protein, 9 aa, synthetic construct
  source 1..9: note = Seed: VVGARGVGK (KRAS G12R)
FVGAREVGA

SEQ ID NO: 35107 - protein, 9 aa, synthetic construct
  source 1..9: note = Seed: VVGARGVGK (KRAS G12R)
FVGAREVGG

SEQ ID NO: 35108 - protein, 9 aa, synthetic construct
  source 1..9: note = Seed: VVGARGVGK (KRAS G12R)
FVGAREVGI

SEQ ID NO: 35109 - protein, 9 aa, synthetic construct
  source 1..9: note = Seed: VVGARGVGK (KRAS G12R)
FVGAREVGL

SEQ ID NO: 35110 - protein, 9 aa, synthetic construct
  source 1..9: note = Seed: VVGARGVGK (KRAS G12R)
FVGAREVGM

SEQ ID NO: 35111 - protein, 9 aa, synthetic construct
  source 1..9: note = Seed: VVGARGVGK (KRAS G12R)
FVGAREVGN

SEQ ID NO: 35112 - protein, 9 aa, synthetic construct
  source 1..9: note = Seed: VVGARGVGK (KRAS G12R)
FVGAREVGS

SEQ ID NO: 35113 - protein, 9 aa, synthetic construct
  source 1..9: note = Seed: VVGARGVGK (KRAS G12R)
FVGAREVGT

SEQ ID NO: 35114 - protein, 9 aa, synthetic construct
  source 1..9: note = Seed: VVGARGVGK (KRAS G12R)
FVGAREVGV

SEQ ID NO: 35115 - protein, 9 aa, synthetic construct
  source 1..9: note = Seed: VVGARGVGK (KRAS G12R)
FVGARFVGA

SEQ ID NO: 35116 - protein, 9 aa, synthetic construct
  source 1..9: note = Seed: VVGARGVGK (KRAS G12R)
FVGARFVGI

SEQ ID NO: 35117 - protein, 9 aa, synthetic construct
  source 1..9: note = Seed: VVGARGVGK (KRAS G12R)
FVGARFVGV

SEQ ID NO: 35118 - protein, 9 aa, synthetic construct
  source 1..9: note = Seed: VVGARGVGK (KRAS G12R)
FVGARGVGA

SEQ ID NO: 35119 - protein, 9 aa, synthetic construct
  source 1..9: note = Seed: VVGARGVGK (KRAS G12R)
FVGARGVGC

SEQ ID NO: 35120 - protein, 9 aa, synthetic construct
  source 1..9: note = Seed: VVGARGVGK (KRAS G12R)
FVGARGVGD

SEQ ID NO: 35121 - protein, 9 aa, synthetic construct
  source 1..9: note = Seed: VVGARGVGK (KRAS G12R)
FVGARGVGE

SEQ ID NO: 35122 - protein, 9 aa, synthetic construct
  source 1..9: note = Seed: VVGARGVGK (KRAS G12R)
FVGARGVGF

SEQ ID NO: 35123 - protein, 9 aa, synthetic construct
  source 1..9: note = Seed: VVGARGVGK (KRAS G12R)
FVGARGVGG

SEQ ID NO: 35124 - protein, 9 aa, synthetic construct
  source 1..9: note = Seed: VVGARGVGK (KRAS G12R)
FVGARGVGH

SEQ ID NO: 35125 - protein, 9 aa, synthetic construct
  source 1..9: note = Seed: VVGARGVGK (KRAS G12R)
FVGARGVGI

SEQ ID NO: 35126 - protein, 9 aa, synthetic construct
  source 1..9: note = Seed: VVGARGVGK (KRAS G12R)
FVGARGVGK

SEQ ID NO: 35127 - protein, 9 aa, synthetic construct
  source 1..9: note = Seed: VVGARGVGK (KRAS G12R)
FVGARGVGL

SEQ ID NO: 35128 - protein, 9 aa, synthetic construct
  source 1..9: note = Seed: VVGARGVGK (KRAS G12R)
FVGARGVGM

SEQ ID NO: 35129 - protein, 9 aa, synthetic construct
  source 1..9: note = Seed: VVGARGVGK (KRAS G12R)
FVGARGVGN

SEQ ID NO: 35130 - protein, 9 aa, synthetic construct
  source 1..9: note = Seed: VVGARGVGK (KRAS G12R)
FVGARGVGP

SEQ ID NO: 35131 - protein, 9 aa, synthetic construct
  source 1..9: note = Seed: VVGARGVGK (KRAS G12R)
FVGARGVGQ

SEQ ID NO: 35132 - protein, 9 aa, synthetic construct
  source 1..9: note = Seed: VVGARGVGK (KRAS G12R)
FVGARGVGR

SEQ ID NO: 35133 - protein, 9 aa, synthetic construct
  source 1..9: note = Seed: VVGARGVGK (KRAS G12R)
FVGARGVGS

SEQ ID NO: 35134 - protein, 9 aa, synthetic construct
  source 1..9: note = Seed: VVGARGVGK (KRAS G12R)
FVGARGVGT

SEQ ID NO: 35135 - protein, 9 aa, synthetic construct
  source 1..9: note = Seed: VVGARGVGK (KRAS G12R)
FVGARGVGV

SEQ ID NO: 35136 - protein, 9 aa, synthetic construct
  source 1..9: note = Seed: VVGARGVGK (KRAS G12R)
FVGARGVGW

SEQ ID NO: 35137 - protein, 9 aa, synthetic construct
  source 1..9: note = Seed: VVGARGVGK (KRAS G12R)
FVGARGVGY

SEQ ID NO: 35138 - protein, 9 aa, synthetic construct
  source 1..9: note = Seed: VVGARGVGK (KRAS G12R)
FVGARHVGA

SEQ ID NO: 35139 - protein, 9 aa, synthetic construct
  source 1..9: note = Seed: VVGARGVGK (KRAS G12R)
FVGARHVGC

SEQ ID NO: 35140 - protein, 9 aa, synthetic construct
  source 1..9: note = Seed: VVGARGVGK (KRAS G12R)
FVGARHVGD

SEQ ID NO: 35141 - protein, 9 aa, synthetic construct
  source 1..9: note = Seed: VVGARGVGK (KRAS G12R)
FVGARHVGE

SEQ ID NO: 35142 - protein, 9 aa, synthetic construct
  source 1..9: note = Seed: VVGARGVGK (KRAS G12R)
FVGARHVGF

SEQ ID NO: 35143 - protein, 9 aa, synthetic construct
  source 1..9: note = Seed: VVGARGVGK (KRAS G12R)
FVGARHVGG

SEQ ID NO: 35144 - protein, 9 aa, synthetic construct
  source 1..9: note = Seed: VVGARGVGK (KRAS G12R)
FVGARHVGH

SEQ ID NO: 35145 - protein, 9 aa, synthetic construct
  source 1..9: note = Seed: VVGARGVGK (KRAS G12R)
FVGARHVGI

SEQ ID NO: 35146 - protein, 9 aa, synthetic construct
  source 1..9: note = Seed: VVGARGVGK (KRAS G12R)
FVGARHVGL

SEQ ID NO: 35147 - protein, 9 aa, synthetic construct
  source 1..9: note = Seed: VVGARGVGK (KRAS G12R)
FVGARHVGM

SEQ ID NO: 35148 - protein, 9 aa, synthetic construct
  source 1..9: note = Seed: VVGARGVGK (KRAS G12R)
FVGARHVGN

SEQ ID NO: 35149 - protein, 9 aa, synthetic construct
  source 1..9: note = Seed: VVGARGVGK (KRAS G12R)
FVGARHVGP

SEQ ID NO: 35150 - protein, 9 aa, synthetic construct
  source 1..9: note = Seed: VVGARGVGK (KRAS G12R)
FVGARHVGQ

SEQ ID NO: 35151 - protein, 9 aa, synthetic construct
  source 1..9: note = Seed: VVGARGVGK (KRAS G12R)
FVGARHVGR

SEQ ID NO: 35152 - protein, 9 aa, synthetic construct
  source 1..9: note = Seed: VVGARGVGK (KRAS G12R)
FVGARHVGS

SEQ ID NO: 35153 - protein, 9 aa, synthetic construct
  source 1..9: note = Seed: VVGARGVGK (KRAS G12R)
FVGARHVGT

SEQ ID NO: 35154 - protein, 9 aa, synthetic construct
  source 1..9: note = Seed: VVGARGVGK (KRAS G12R)
FVGARHVGV

SEQ ID NO: 35155 - protein, 9 aa, synthetic construct
  source 1..9: note = Seed: VVGARGVGK (KRAS G12R)
FVGARHVGW

SEQ ID NO: 35156 - protein, 9 aa, synthetic construct
  source 1..9: note = Seed: VVGARGVGK (KRAS G12R)
FVGARHVGY

SEQ ID NO: 35157 - protein, 9 aa, synthetic construct
  source 1..9: note = Seed: VVGARGVGK (KRAS G12R)
FVGARIVGA

SEQ ID NO: 35158 - protein, 9 aa, synthetic construct
  source 1..9: note = Seed: VVGARGVGK (KRAS G12R)
FVGARIVGC

SEQ ID NO: 35159 - protein, 9 aa, synthetic construct
  source 1..9: note = Seed: VVGARGVGK (KRAS G12R)
FVGARIVGD

SEQ ID NO: 35160 - protein, 9 aa, synthetic construct
  source 1..9: note = Seed: VVGARGVGK (KRAS G12R)
FVGARIVGE

SEQ ID NO: 35161 - protein, 9 aa, synthetic construct
  source 1..9: note = Seed: VVGARGVGK (KRAS G12R)
FVGARIVGF

SEQ ID NO: 35162 - protein, 9 aa, synthetic construct
  source 1..9: note = Seed: VVGARGVGK (KRAS G12R)
FVGARIVGG

SEQ ID NO: 35163 - protein, 9 aa, synthetic construct
  source 1..9: note = Seed: VVGARGVGK (KRAS G12R)
FVGARIVGH

SEQ ID NO: 35164 - protein, 9 aa, synthetic construct
  source 1..9: note = Seed: VVGARGVGK (KRAS G12R)
FVGARIVGI

SEQ ID NO: 35165 - protein, 9 aa, synthetic construct
  source 1..9: note = Seed: VVGARGVGK (KRAS G12R)
FVGARIVGK

SEQ ID NO: 35166 - protein, 9 aa, synthetic construct
  source 1..9: note = Seed: VVGARGVGK (KRAS G12R)
FVGARIVGL

SEQ ID NO: 35167 - protein, 9 aa, synthetic construct
  source 1..9: note = Seed: VVGARGVGK (KRAS G12R)
FVGARIVGM

SEQ ID NO: 35168 - protein, 9 aa, synthetic construct
  source 1..9: note = Seed: VVGARGVGK (KRAS G12R)
FVGARIVGN

SEQ ID NO: 35169 - protein, 9 aa, synthetic construct
  source 1..9: note = Seed: VVGARGVGK (KRAS G12R)
FVGARIVGP

SEQ ID NO: 35170 - protein, 9 aa, synthetic construct
  source 1..9: note = Seed: VVGARGVGK (KRAS G12R)
FVGARIVGQ

SEQ ID NO: 35171 - protein, 9 aa, synthetic construct
  source 1..9: note = Seed: VVGARGVGK (KRAS G12R)
FVGARIVGR

SEQ ID NO: 35172 - protein, 9 aa, synthetic construct
  source 1..9: note = Seed: VVGARGVGK (KRAS G12R)
FVGARIVGS

SEQ ID NO: 35173 - protein, 9 aa, synthetic construct
  source 1..9: note = Seed: VVGARGVGK (KRAS G12R)
FVGARIVGT

SEQ ID NO: 35174 - protein, 9 aa, synthetic construct
  source 1..9: note = Seed: VVGARGVGK (KRAS G12R)
FVGARIVGV

SEQ ID NO: 35175 - protein, 9 aa, synthetic construct
  source 1..9: note = Seed: VVGARGVGK (KRAS G12R)
FVGARIVGW

SEQ ID NO: 35176 - protein, 9 aa, synthetic construct
  source 1..9: note = Seed: VVGARGVGK (KRAS G12R)
FVGARIVGY

SEQ ID NO: 35177 - protein, 9 aa, synthetic construct
  source 1..9: note = Seed: VVGARGVGK (KRAS G12R)
FVGARKVGA

SEQ ID NO: 35178 - protein, 9 aa, synthetic construct
  source 1..9: note = Seed: VVGARGVGK (KRAS G12R)
FVGARKVGC

SEQ ID NO: 35179 - protein, 9 aa, synthetic construct
  source 1..9: note = Seed: VVGARGVGK (KRAS G12R)
FVGARKVGD

SEQ ID NO: 35180 - protein, 9 aa, synthetic construct
  source 1..9: note = Seed: VVGARGVGK (KRAS G12R)
FVGARKVGE

SEQ ID NO: 35181 - protein, 9 aa, synthetic construct
  source 1..9: note = Seed: VVGARGVGK (KRAS G12R)
FVGARKVGF

SEQ ID NO: 35182 - protein, 9 aa, synthetic construct
  source 1..9: note = Seed: VVGARGVGK (KRAS G12R)
FVGARKVGG

SEQ ID NO: 35183 - protein, 9 aa, synthetic construct
  source 1..9: note = Seed: VVGARGVGK (KRAS G12R)
FVGARKVGH

SEQ ID NO: 35184 - protein, 9 aa, synthetic construct
  source 1..9: note = Seed: VVGARGVGK (KRAS G12R)
FVGARKVGI

SEQ ID NO: 35185 - protein, 9 aa, synthetic construct
  source 1..9: note = Seed: VVGARGVGK (KRAS G12R)
FVGARKVGK

SEQ ID NO: 35186 - protein, 9 aa, synthetic construct
  source 1..9: note = Seed: VVGARGVGK (KRAS G12R)
FVGARKVGL

SEQ ID NO: 35187 - protein, 9 aa, synthetic construct
  source 1..9: note = Seed: VVGARGVGK (KRAS G12R)
FVGARKVGM

SEQ ID NO: 35188 - protein, 9 aa, synthetic construct
  source 1..9: note = Seed: VVGARGVGK (KRAS G12R)
FVGARKVGN

SEQ ID NO: 35189 - protein, 9 aa, synthetic construct
  source 1..9: note = Seed: VVGARGVGK (KRAS G12R)
FVGARKVGP

SEQ ID NO: 35190 - protein, 9 aa, synthetic construct
  source 1..9: note = Seed: VVGARGVGK (KRAS G12R)
FVGARKVGQ

SEQ ID NO: 35191 - protein, 9 aa, synthetic construct
  source 1..9: note = Seed: VVGARGVGK (KRAS G12R)
FVGARKVGR

SEQ ID NO: 35192 - protein, 9 aa, synthetic construct
  source 1..9: note = Seed: VVGARGVGK (KRAS G12R)
FVGARKVGS

SEQ ID NO: 35193 - protein, 9 aa, synthetic construct
  source 1..9: note = Seed: VVGARGVGK (KRAS G12R)
FVGARKVGT

SEQ ID NO: 35194 - protein, 9 aa, synthetic construct
  source 1..9: note = Seed: VVGARGVGK (KRAS G12R)
FVGARKVGV

SEQ ID NO: 35195 - protein, 9 aa, synthetic construct
  source 1..9: note = Seed: VVGARGVGK (KRAS G12R)
FVGARKVGW

SEQ ID NO: 35196 - protein, 9 aa, synthetic construct
  source 1..9: note = Seed: VVGARGVGK (KRAS G12R)
FVGARKVGY

SEQ ID NO: 35197 - protein, 9 aa, synthetic construct
  source 1..9: note = Seed: VVGARGVGK (KRAS G12R)
FVGARLVGA

SEQ ID NO: 35198 - protein, 9 aa, synthetic construct
  source 1..9: note = Seed: VVGARGVGK (KRAS G12R)
FVGARLVGC

SEQ ID NO: 35199 - protein, 9 aa, synthetic construct
  source 1..9: note = Seed: VVGARGVGK (KRAS G12R)
FVGARLVGD

SEQ ID NO: 35200 - protein, 9 aa, synthetic construct
  source 1..9: note = Seed: VVGARGVGK (KRAS G12R)
FVGARLVGG

SEQ ID NO: 35201 - protein, 9 aa, synthetic construct
  source 1..9: note = Seed: VVGARGVGK (KRAS G12R)
FVGARLVGH

SEQ ID NO: 35202 - protein, 9 aa, synthetic construct
  source 1..9: note = Seed: VVGARGVGK (KRAS G12R)
FVGARLVGI

SEQ ID NO: 35203 - protein, 9 aa, synthetic construct
  source 1..9: note = Seed: VVGARGVGK (KRAS G12R)
FVGARLVGL

SEQ ID NO: 35204 - protein, 9 aa, synthetic construct
  source 1..9: note = Seed: VVGARGVGK (KRAS G12R)
FVGARLVGM

SEQ ID NO: 35205 - protein, 9 aa, synthetic construct
  source 1..9: note = Seed: VVGARGVGK (KRAS G12R)
FVGARLVGN

SEQ ID NO: 35206 - protein, 9 aa, synthetic construct
  source 1..9: note = Seed: VVGARGVGK (KRAS G12R)
FVGARLVGQ

SEQ ID NO: 35207 - protein, 9 aa, synthetic construct
  source 1..9: note = Seed: VVGARGVGK (KRAS G12R)
FVGARLVGS

SEQ ID NO: 35208 - protein, 9 aa, synthetic construct
  source 1..9: note = Seed: VVGARGVGK (KRAS G12R)
FVGARLVGT

SEQ ID NO: 35209 - protein, 9 aa, synthetic construct
  source 1..9: note = Seed: VVGARGVGK (KRAS G12R)
FVGARLVGV

SEQ ID NO: 35210 - protein, 9 aa, synthetic construct
  source 1..9: note = Seed: VVGARGVGK (KRAS G12R)
FVGARMVGA

SEQ ID NO: 35211 - protein, 9 aa, synthetic construct
  source 1..9: note = Seed: VVGARGVGK (KRAS G12R)
FVGARMVGC

SEQ ID NO: 35212 - protein, 9 aa, synthetic construct
  source 1..9: note = Seed: VVGARGVGK (KRAS G12R)
FVGARMVGD

SEQ ID NO: 35213 - protein, 9 aa, synthetic construct
  source 1..9: note = Seed: VVGARGVGK (KRAS G12R)
FVGARMVGG

SEQ ID NO: 35214 - protein, 9 aa, synthetic construct
  source 1..9: note = Seed: VVGARGVGK (KRAS G12R)
FVGARMVGH

SEQ ID NO: 35215 - protein, 9 aa, synthetic construct
  source 1..9: note = Seed: VVGARGVGK (KRAS G12R)
FVGARMVGI

SEQ ID NO: 35216 - protein, 9 aa, synthetic construct
  source 1..9: note = Seed: VVGARGVGK (KRAS G12R)
FVGARMVGL

SEQ ID NO: 35217 - protein, 9 aa, synthetic construct
  source 1..9: note = Seed: VVGARGVGK (KRAS G12R)
FVGARMVGM

SEQ ID NO: 35218 - protein, 9 aa, synthetic construct
  source 1..9: note = Seed: VVGARGVGK (KRAS G12R)
FVGARMVGN

SEQ ID NO: 35219 - protein, 9 aa, synthetic construct
  source 1..9: note = Seed: VVGARGVGK (KRAS G12R)
FVGARMVGP

SEQ ID NO: 35220 - protein, 9 aa, synthetic construct
  source 1..9: note = Seed: VVGARGVGK (KRAS G12R)
FVGARMVGQ

SEQ ID NO: 35221 - protein, 9 aa, synthetic construct
  source 1..9: note = Seed: VVGARGVGK (KRAS G12R)
FVGARMVGS

SEQ ID NO: 35222 - protein, 9 aa, synthetic construct
  source 1..9: note = Seed: VVGARGVGK (KRAS G12R)
FVGARMVGT

SEQ ID NO: 35223 - protein, 9 aa, synthetic construct
  source 1..9: note = Seed: VVGARGVGK (KRAS G12R)
FVGARMVGV

SEQ ID NO: 35224 - protein, 9 aa, synthetic construct
  source 1..9: note = Seed: VVGARGVGK (KRAS G12R)
FVGARNVGA

SEQ ID NO: 35225 - protein, 9 aa, synthetic construct
  source 1..9: note = Seed: VVGARGVGK (KRAS G12R)
FVGARNVGC

SEQ ID NO: 35226 - protein, 9 aa, synthetic construct
  source 1..9: note = Seed: VVGARGVGK (KRAS G12R)
FVGARNVGD

SEQ ID NO: 35227 - protein, 9 aa, synthetic construct
  source 1..9: note = Seed: VVGARGVGK (KRAS G12R)
FVGARNVGE

SEQ ID NO: 35228 - protein, 9 aa, synthetic construct
  source 1..9: note = Seed: VVGARGVGK (KRAS G12R)
FVGARNVGF

SEQ ID NO: 35229 - protein, 9 aa, synthetic construct
  source 1..9: note = Seed: VVGARGVGK (KRAS G12R)
FVGARNVGG

SEQ ID NO: 35230 - protein, 9 aa, synthetic construct
  source 1..9: note = Seed: VVGARGVGK (KRAS G12R)
FVGARNVGH

SEQ ID NO: 35231 - protein, 9 aa, synthetic construct
  source 1..9: note = Seed: VVGARGVGK (KRAS G12R)
FVGARNVGI

SEQ ID NO: 35232 - protein, 9 aa, synthetic construct
  source 1..9: note = Seed: VVGARGVGK (KRAS G12R)
FVGARNVGK

SEQ ID NO: 35233 - protein, 9 aa, synthetic construct
  source 1..9: note = Seed: VVGARGVGK (KRAS G12R)
FVGARNVGL

SEQ ID NO: 35234 - protein, 9 aa, synthetic construct
  source 1..9: note = Seed: VVGARGVGK (KRAS G12R)
FVGARNVGM

SEQ ID NO: 35235 - protein, 9 aa, synthetic construct
  source 1..9: note = Seed: VVGARGVGK (KRAS G12R)
FVGARNVGN

SEQ ID NO: 35236 - protein, 9 aa, synthetic construct
  source 1..9: note = Seed: VVGARGVGK (KRAS G12R)
FVGARNVGP

SEQ ID NO: 35237 - protein, 9 aa, synthetic construct
  source 1..9: note = Seed: VVGARGVGK (KRAS G12R)
FVGARNVGQ

SEQ ID NO: 35238 - protein, 9 aa, synthetic construct
  source 1..9: note = Seed: VVGARGVGK (KRAS G12R)
FVGARNVGR

SEQ ID NO: 35239 - protein, 9 aa, synthetic construct
  source 1..9: note = Seed: VVGARGVGK (KRAS G12R)
FVGARNVGS

SEQ ID NO: 35240 - protein, 9 aa, synthetic construct
  source 1..9: note = Seed: VVGARGVGK (KRAS G12R)
FVGARNVGT

SEQ ID NO: 35241 - protein, 9 aa, synthetic construct
  source 1..9: note = Seed: VVGARGVGK (KRAS G12R)
FVGARNVGV

SEQ ID NO: 35242 - protein, 9 aa, synthetic construct
  source 1..9: note = Seed: VVGARGVGK (KRAS G12R)
FVGARNVGW

SEQ ID NO: 35243 - protein, 9 aa, synthetic construct
  source 1..9: note = Seed: VVGARGVGK (KRAS G12R)
FVGARNVGY

SEQ ID NO: 35244 - protein, 9 aa, synthetic construct
  source 1..9: note = Seed: VVGARGVGK (KRAS G12R)
FVGARPVGA

SEQ ID NO: 35245 - protein, 9 aa, synthetic construct
  source 1..9: note = Seed: VVGARGVGK (KRAS G12R)
FVGARPVGC

SEQ ID NO: 35246 - protein, 9 aa, synthetic construct
  source 1..9: note = Seed: VVGARGVGK (KRAS G12R)
FVGARPVGD

SEQ ID NO: 35247 - protein, 9 aa, synthetic construct
  source 1..9: note = Seed: VVGARGVGK (KRAS G12R)
FVGARPVGE

SEQ ID NO: 35248 - protein, 9 aa, synthetic construct
  source 1..9: note = Seed: VVGARGVGK (KRAS G12R)
FVGARPVGF

SEQ ID NO: 35249 - protein, 9 aa, synthetic construct
  source 1..9: note = Seed: VVGARGVGK (KRAS G12R)
FVGARPVGG

SEQ ID NO: 35250 - protein, 9 aa, synthetic construct
  source 1..9: note = Seed: VVGARGVGK (KRAS G12R)
FVGARPVGH

SEQ ID NO: 35251 - protein, 9 aa, synthetic construct
  source 1..9: note = Seed: VVGARGVGK (KRAS G12R)
FVGARPVGI

SEQ ID NO: 35252 - protein, 9 aa, synthetic construct
  source 1..9: note = Seed: VVGARGVGK (KRAS G12R)
FVGARPVGK

SEQ ID NO: 35253 - protein, 9 aa, synthetic construct
  source 1..9: note = Seed: VVGARGVGK (KRAS G12R)
FVGARPVGL

SEQ ID NO: 35254 - protein, 9 aa, synthetic construct
  source 1..9: note = Seed: VVGARGVGK (KRAS G12R)
FVGARPVGM

SEQ ID NO: 35255 - protein, 9 aa, synthetic construct
  source 1..9: note = Seed: VVGARGVGK (KRAS G12R)
FVGARPVGN

SEQ ID NO: 35256 - protein, 9 aa, synthetic construct
  source 1..9: note = Seed: VVGARGVGK (KRAS G12R)
FVGARPVGP

SEQ ID NO: 35257 - protein, 9 aa, synthetic construct
  source 1..9: note = Seed: VVGARGVGK (KRAS G12R)
FVGARPVGQ

SEQ ID NO: 35258 - protein, 9 aa, synthetic construct
  source 1..9: note = Seed: VVGARGVGK (KRAS G12R)
FVGARPVGR

SEQ ID NO: 35259 - protein, 9 aa, synthetic construct
  source 1..9: note = Seed: VVGARGVGK (KRAS G12R)
FVGARPVGS

SEQ ID NO: 35260 - protein, 9 aa, synthetic construct
  source 1..9: note = Seed: VVGARGVGK (KRAS G12R)
FVGARPVGT

SEQ ID NO: 35261 - protein, 9 aa, synthetic construct
  source 1..9: note = Seed: VVGARGVGK (KRAS G12R)
FVGARPVGV

SEQ ID NO: 35262 - protein, 9 aa, synthetic construct
  source 1..9: note = Seed: VVGARGVGK (KRAS G12R)
FVGARPVGW

SEQ ID NO: 35263 - protein, 9 aa, synthetic construct
  source 1..9: note = Seed: VVGARGVGK (KRAS G12R)
FVGARPVGY

SEQ ID NO: 35264 - protein, 9 aa, synthetic construct
  source 1..9: note = Seed: VVGARGVGK (KRAS G12R)
FVGARQVGA

SEQ ID NO: 35265 - protein, 9 aa, synthetic construct
  source 1..9: note = Seed: VVGARGVGK (KRAS G12R)
FVGARQVGC

SEQ ID NO: 35266 - protein, 9 aa, synthetic construct
  source 1..9: note = Seed: VVGARGVGK (KRAS G12R)
FVGARQVGF

SEQ ID NO: 35267 - protein, 9 aa, synthetic construct
  source 1..9: note = Seed: VVGARGVGK (KRAS G12R)
FVGARQVGG

SEQ ID NO: 35268 - protein, 9 aa, synthetic construct
  source 1..9: note = Seed: VVGARGVGK (KRAS G12R)
FVGARQVGH

SEQ ID NO: 35269 - protein, 9 aa, synthetic construct
  source 1..9: note = Seed: VVGARGVGK (KRAS G12R)
FVGARQVGI

SEQ ID NO: 35270 - protein, 9 aa, synthetic construct
  source 1..9: note = Seed: VVGARGVGK (KRAS G12R)
FVGARQVGK

SEQ ID NO: 35271 - protein, 9 aa, synthetic construct
  source 1..9: note = Seed: VVGARGVGK (KRAS G12R)
FVGARQVGL

SEQ ID NO: 35272 - protein, 9 aa, synthetic construct
  source 1..9: note = Seed: VVGARGVGK (KRAS G12R)
FVGARQVGM

SEQ ID NO: 35273 - protein, 9 aa, synthetic construct
  source 1..9: note = Seed: VVGARGVGK (KRAS G12R)
FVGARQVGN

SEQ ID NO: 35274 - protein, 9 aa, synthetic construct
  source 1..9: note = Seed: VVGARGVGK (KRAS G12R)
FVGARQVGP

SEQ ID NO: 35275 - protein, 9 aa, synthetic construct
  source 1..9: note = Seed: VVGARGVGK (KRAS G12R)
FVGARQVGQ

SEQ ID NO: 35276 - protein, 9 aa, synthetic construct
  source 1..9: note = Seed: VVGARGVGK (KRAS G12R)
FVGARQVGR

SEQ ID NO: 35277 - protein, 9 aa, synthetic construct
  source 1..9: note = Seed: VVGARGVGK (KRAS G12R)
FVGARQVGS

SEQ ID NO: 35278 - protein, 9 aa, synthetic construct
  source 1..9: note = Seed: VVGARGVGK (KRAS G12R)
FVGARQVGT

SEQ ID NO: 35279 - protein, 9 aa, synthetic construct
  source 1..9: note = Seed: VVGARGVGK (KRAS G12R)
FVGARQVGV

SEQ ID NO: 35280 - protein, 9 aa, synthetic construct
  source 1..9: note = Seed: VVGARGVGK (KRAS G12R)
FVGARQVGW

SEQ ID NO: 35281 - protein, 9 aa, synthetic construct
  source 1..9: note = Seed: VVGARGVGK (KRAS G12R)
FVGARQVGY

SEQ ID NO: 35282 - protein, 9 aa, synthetic construct
  source 1..9: note = Seed: VVGARGVGK (KRAS G12R)
FVGARRVGA

SEQ ID NO: 35283 - protein, 9 aa, synthetic construct
  source 1..9: note = Seed: VVGARGVGK (KRAS G12R)
FVGARRVGC

SEQ ID NO: 35284 - protein, 9 aa, synthetic construct
  source 1..9: note = Seed: VVGARGVGK (KRAS G12R)
FVGARRVGD

SEQ ID NO: 35285 - protein, 9 aa, synthetic construct
  source 1..9: note = Seed: VVGARGVGK (KRAS G12R)
FVGARRVGE

SEQ ID NO: 35286 - protein, 9 aa, synthetic construct
  source 1..9: note = Seed: VVGARGVGK (KRAS G12R)
FVGARRVGF

SEQ ID NO: 35287 - protein, 9 aa, synthetic construct
  source 1..9: note = Seed: VVGARGVGK (KRAS G12R)
FVGARRVGG

SEQ ID NO: 35288 - protein, 9 aa, synthetic construct
  source 1..9: note = Seed: VVGARGVGK (KRAS G12R)
FVGARRVGH

SEQ ID NO: 35289 - protein, 9 aa, synthetic construct
  source 1..9: note = Seed: VVGARGVGK (KRAS G12R)
FVGARRVGI

SEQ ID NO: 35290 - protein, 9 aa, synthetic construct
  source 1..9: note = Seed: VVGARGVGK (KRAS G12R)
FVGARRVGK

SEQ ID NO: 35291 - protein, 9 aa, synthetic construct
  source 1..9: note = Seed: VVGARGVGK (KRAS G12R)
FVGARRVGL

SEQ ID NO: 35292 - protein, 9 aa, synthetic construct
  source 1..9: note = Seed: VVGARGVGK (KRAS G12R)
FVGARRVGM

SEQ ID NO: 35293 - protein, 9 aa, synthetic construct
  source 1..9: note = Seed: VVGARGVGK (KRAS G12R)
FVGARRVGN

SEQ ID NO: 35294 - protein, 9 aa, synthetic construct
  source 1..9: note = Seed: VVGARGVGK (KRAS G12R)
FVGARRVGQ

SEQ ID NO: 35295 - protein, 9 aa, synthetic construct
  source 1..9: note = Seed: VVGARGVGK (KRAS G12R)
FVGARRVGR

SEQ ID NO: 35296 - protein, 9 aa, synthetic construct
  source 1..9: note = Seed: VVGARGVGK (KRAS G12R)
FVGARRVGS

SEQ ID NO: 35297 - protein, 9 aa, synthetic construct
  source 1..9: note = Seed: VVGARGVGK (KRAS G12R)
FVGARRVGT

SEQ ID NO: 35298 - protein, 9 aa, synthetic construct
  source 1..9: note = Seed: VVGARGVGK (KRAS G12R)
FVGARRVGV

SEQ ID NO: 35299 - protein, 9 aa, synthetic construct
  source 1..9: note = Seed: VVGARGVGK (KRAS G12R)
FVGARRVGW

SEQ ID NO: 35300 - protein, 9 aa, synthetic construct
  source 1..9: note = Seed: VVGARGVGK (KRAS G12R)
FVGARRVGY

SEQ ID NO: 35301 - protein, 9 aa, synthetic construct
  source 1..9: note = Seed: VVGARGVGK (KRAS G12R)
FVGARSVGA

SEQ ID NO: 35302 - protein, 9 aa, synthetic construct
  source 1..9: note = Seed: VVGARGVGK (KRAS G12R)
FVGARSVGC

SEQ ID NO: 35303 - protein, 9 aa, synthetic construct
  source 1..9: note = Seed: VVGARGVGK (KRAS G12R)
FVGARSVGD

SEQ ID NO: 35304 - protein, 9 aa, synthetic construct
  source 1..9: note = Seed: VVGARGVGK (KRAS G12R)
FVGARSVGE

SEQ ID NO: 35305 - protein, 9 aa, synthetic construct
  source 1..9: note = Seed: VVGARGVGK (KRAS G12R)
FVGARSVGF

SEQ ID NO: 35306 - protein, 9 aa, synthetic construct
  source 1..9: note = Seed: VVGARGVGK (KRAS G12R)
FVGARSVGG

SEQ ID NO: 35307 - protein, 9 aa, synthetic construct
  source 1..9: note = Seed: VVGARGVGK (KRAS G12R)
FVGARSVGH

SEQ ID NO: 35308 - protein, 9 aa, synthetic construct
  source 1..9: note = Seed: VVGARGVGK (KRAS G12R)
FVGARSVGI

SEQ ID NO: 35309 - protein, 9 aa, synthetic construct
  source 1..9: note = Seed: VVGARGVGK (KRAS G12R)
FVGARSVGK

SEQ ID NO: 35310 - protein, 9 aa, synthetic construct
  source 1..9: note = Seed: VVGARGVGK (KRAS G12R)
FVGARSVGL

SEQ ID NO: 35311 - protein, 9 aa, synthetic construct
  source 1..9: note = Seed: VVGARGVGK (KRAS G12R)
FVGARSVGM

SEQ ID NO: 35312 - protein, 9 aa, synthetic construct
  source 1..9: note = Seed: VVGARGVGK (KRAS G12R)
FVGARSVGN

SEQ ID NO: 35313 - protein, 9 aa, synthetic construct
  source 1..9: note = Seed: VVGARGVGK (KRAS G12R)
FVGARSVGP

SEQ ID NO: 35314 - protein, 9 aa, synthetic construct
  source 1..9: note = Seed: VVGARGVGK (KRAS G12R)
FVGARSVGQ

SEQ ID NO: 35315 - protein, 9 aa, synthetic construct
  source 1..9: note = Seed: VVGARGVGK (KRAS G12R)
FVGARSVGR

SEQ ID NO: 35316 - protein, 9 aa, synthetic construct
  source 1..9: note = Seed: VVGARGVGK (KRAS G12R)
FVGARSVGS

SEQ ID NO: 35317 - protein, 9 aa, synthetic construct
  source 1..9: note = Seed: VVGARGVGK (KRAS G12R)
FVGARSVGT

SEQ ID NO: 35318 - protein, 9 aa, synthetic construct
  source 1..9: note = Seed: VVGARGVGK (KRAS G12R)
FVGARSVGV

SEQ ID NO: 35319 - protein, 9 aa, synthetic construct
  source 1..9: note = Seed: VVGARGVGK (KRAS G12R)
FVGARSVGW

SEQ ID NO: 35320 - protein, 9 aa, synthetic construct
  source 1..9: note = Seed: VVGARGVGK (KRAS G12R)
FVGARSVGY

SEQ ID NO: 35321 - protein, 9 aa, synthetic construct
  source 1..9: note = Seed: VVGARGVGK (KRAS G12R)
FVGARTVGA

SEQ ID NO: 35322 - protein, 9 aa, synthetic construct
  source 1..9: note = Seed: VVGARGVGK (KRAS G12R)
FVGARTVGC

SEQ ID NO: 35323 - protein, 9 aa, synthetic construct
  source 1..9: note = Seed: VVGARGVGK (KRAS G12R)
FVGARTVGD

SEQ ID NO: 35324 - protein, 9 aa, synthetic construct
  source 1..9: note = Seed: VVGARGVGK (KRAS G12R)
FVGARTVGE

SEQ ID NO: 35325 - protein, 9 aa, synthetic construct
  source 1..9: note = Seed: VVGARGVGK (KRAS G12R)
FVGARTVGF

SEQ ID NO: 35326 - protein, 9 aa, synthetic construct
  source 1..9: note = Seed: VVGARGVGK (KRAS G12R)
FVGARTVGG

SEQ ID NO: 35327 - protein, 9 aa, synthetic construct
  source 1..9: note = Seed: VVGARGVGK (KRAS G12R)
FVGARTVGH

SEQ ID NO: 35328 - protein, 9 aa, synthetic construct
  source 1..9: note = Seed: VVGARGVGK (KRAS G12R)
FVGARTVGI

SEQ ID NO: 35329 - protein, 9 aa, synthetic construct
  source 1..9: note = Seed: VVGARGVGK (KRAS G12R)
FVGARTVGK

SEQ ID NO: 35330 - protein, 9 aa, synthetic construct
  source 1..9: note = Seed: VVGARGVGK (KRAS G12R)
FVGARTVGL

SEQ ID NO: 35331 - protein, 9 aa, synthetic construct
  source 1..9: note = Seed: VVGARGVGK (KRAS G12R)
FVGARTVGM

SEQ ID NO: 35332 - protein, 9 aa, synthetic construct
  source 1..9: note = Seed: VVGARGVGK (KRAS G12R)
FVGARTVGN

SEQ ID NO: 35333 - protein, 9 aa, synthetic construct
  source 1..9: note = Seed: VVGARGVGK (KRAS G12R)
FVGARTVGP

SEQ ID NO: 35334 - protein, 9 aa, synthetic construct
  source 1..9: note = Seed: VVGARGVGK (KRAS G12R)
FVGARTVGQ

SEQ ID NO: 35335 - protein, 9 aa, synthetic construct
  source 1..9: note = Seed: VVGARGVGK (KRAS G12R)
FVGARTVGR

SEQ ID NO: 35336 - protein, 9 aa, synthetic construct
  source 1..9: note = Seed: VVGARGVGK (KRAS G12R)
FVGARTVGS

SEQ ID NO: 35337 - protein, 9 aa, synthetic construct
  source 1..9: note = Seed: VVGARGVGK (KRAS G12R)
FVGARTVGT

SEQ ID NO: 35338 - protein, 9 aa, synthetic construct
  source 1..9: note = Seed: VVGARGVGK (KRAS G12R)
FVGARTVGV

SEQ ID NO: 35339 - protein, 9 aa, synthetic construct
  source 1..9: note = Seed: VVGARGVGK (KRAS G12R)
FVGARTVGW

SEQ ID NO: 35340 - protein, 9 aa, synthetic construct
  source 1..9: note = Seed: VVGARGVGK (KRAS G12R)
FVGARTVGY

SEQ ID NO: 35341 - protein, 9 aa, synthetic construct
  source 1..9: note = Seed: VVGARGVGK (KRAS G12R)
FVGARVVGA

SEQ ID NO: 35342 - protein, 9 aa, synthetic construct
  source 1..9: note = Seed: VVGARGVGK (KRAS G12R)
FVGARVVGC

SEQ ID NO: 35343 - protein, 9 aa, synthetic construct
  source 1..9: note = Seed: VVGARGVGK (KRAS G12R)
FVGARVVGD

SEQ ID NO: 35344 - protein, 9 aa, synthetic construct
  source 1..9: note = Seed: VVGARGVGK (KRAS G12R)
FVGARVVGE

SEQ ID NO: 35345 - protein, 9 aa, synthetic construct
  source 1..9: note = Seed: VVGARGVGK (KRAS G12R)
FVGARVVGF

SEQ ID NO: 35346 - protein, 9 aa, synthetic construct
  source 1..9: note = Seed: VVGARGVGK (KRAS G12R)
FVGARVVGG

SEQ ID NO: 35347 - protein, 9 aa, synthetic construct
  source 1..9: note = Seed: VVGARGVGK (KRAS G12R)
FVGARVVGH

SEQ ID NO: 35348 - protein, 9 aa, synthetic construct
  source 1..9: note = Seed: VVGARGVGK (KRAS G12R)
FVGARVVGI

SEQ ID NO: 35349 - protein, 9 aa, synthetic construct
  source 1..9: note = Seed: VVGARGVGK (KRAS G12R)
FVGARVVGK

SEQ ID NO: 35350 - protein, 9 aa, synthetic construct
  source 1..9: note = Seed: VVGARGVGK (KRAS G12R)
FVGARVVGL

SEQ ID NO: 35351 - protein, 9 aa, synthetic construct
  source 1..9: note = Seed: VVGARGVGK (KRAS G12R)
FVGARVVGM

SEQ ID NO: 35352 - protein, 9 aa, synthetic construct
  source 1..9: note = Seed: VVGARGVGK (KRAS G12R)
FVGARVVGN

SEQ ID NO: 35353 - protein, 9 aa, synthetic construct
  source 1..9: note = Seed: VVGARGVGK (KRAS G12R)
FVGARVVGP

SEQ ID NO: 35354 - protein, 9 aa, synthetic construct
  source 1..9: note = Seed: VVGARGVGK (KRAS G12R)
FVGARVVGQ

SEQ ID NO: 35355 - protein, 9 aa, synthetic construct
  source 1..9: note = Seed: VVGARGVGK (KRAS G12R)
FVGARVVGR

SEQ ID NO: 35356 - protein, 9 aa, synthetic construct
  source 1..9: note = Seed: VVGARGVGK (KRAS G12R)
FVGARVVGS

SEQ ID NO: 35357 - protein, 9 aa, synthetic construct
  source 1..9: note = Seed: VVGARGVGK (KRAS G12R)
FVGARVVGT

SEQ ID NO: 35358 - protein, 9 aa, synthetic construct
  source 1..9: note = Seed: VVGARGVGK (KRAS G12R)
FVGARVVGV

SEQ ID NO: 35359 - protein, 9 aa, synthetic construct
  source 1..9: note = Seed: VVGARGVGK (KRAS G12R)
FVGARVVGW

SEQ ID NO: 35360 - protein, 9 aa, synthetic construct
  source 1..9: note = Seed: VVGARGVGK (KRAS G12R)
FVGARVVGY

SEQ ID NO: 35361 - protein, 9 aa, synthetic construct
  source 1..9: note = Seed: VVGARGVGK (KRAS G12R)
FVGARWVGA

SEQ ID NO: 35362 - protein, 9 aa, synthetic construct
  source 1..9: note = Seed: VVGARGVGK (KRAS G12R)
FVGARWVGI

SEQ ID NO: 35363 - protein, 9 aa, synthetic construct
  source 1..9: note = Seed: VVGARGVGK (KRAS G12R)
FVGARWVGL

SEQ ID NO: 35364 - protein, 9 aa, synthetic construct
  source 1..9: note = Seed: VVGARGVGK (KRAS G12R)
FVGARWVGM

SEQ ID NO: 35365 - protein, 9 aa, synthetic construct
  source 1..9: note = Seed: VVGARGVGK (KRAS G12R)
FVGARWVGS

SEQ ID NO: 35366 - protein, 9 aa, synthetic construct
  source 1..9: note = Seed: VVGARGVGK (KRAS G12R)
FVGARWVGV

SEQ ID NO: 35367 - protein, 9 aa, synthetic construct
  source 1..9: note = Seed: VVGARGVGK (KRAS G12R)
FVGARYVGA

SEQ ID NO: 35368 - protein, 9 aa, synthetic construct
  source 1..9: note = Seed: VVGARGVGK (KRAS G12R)
FVGARYVGF

SEQ ID NO: 35369 - protein, 9 aa, synthetic construct
  source 1..9: note = Seed: VVGARGVGK (KRAS G12R)
FVGARYVGG

SEQ ID NO: 35370 - protein, 9 aa, synthetic construct
  source 1..9: note = Seed: VVGARGVGK (KRAS G12R)
FVGARYVGH

SEQ ID NO: 35371 - protein, 9 aa, synthetic construct
  source 1..9: note = Seed: VVGARGVGK (KRAS G12R)
FVGARYVGI

SEQ ID NO: 35372 - protein, 9 aa, synthetic construct
  source 1..9: note = Seed: VVGARGVGK (KRAS G12R)
FVGARYVGL

SEQ ID NO: 35373 - protein, 9 aa, synthetic construct
  source 1..9: note = Seed: VVGARGVGK (KRAS G12R)
FVGARYVGM

SEQ ID NO: 35374 - protein, 9 aa, synthetic construct
  source 1..9: note = Seed: VVGARGVGK (KRAS G12R)
FVGARYVGN

SEQ ID NO: 35375 - protein, 9 aa, synthetic construct
  source 1..9: note = Seed: VVGARGVGK (KRAS G12R)
FVGARYVGR

SEQ ID NO: 35376 - protein, 9 aa, synthetic construct
  source 1..9: note = Seed: VVGARGVGK (KRAS G12R)
FVGARYVGS

SEQ ID NO: 35377 - protein, 9 aa, synthetic construct
  source 1..9: note = Seed: VVGARGVGK (KRAS G12R)
FVGARYVGT

SEQ ID NO: 35378 - protein, 9 aa, synthetic construct
  source 1..9: note = Seed: VVGARGVGK (KRAS G12R)
FVGARYVGV

SEQ ID NO: 35379 - protein, 9 aa, synthetic construct
  source 1..9: note = Seed: VVGARGVGK (KRAS G12R)
FVGARYVGY

SEQ ID NO: 35380 - protein, 9 aa, synthetic construct
  source 1..9: note = Seed: VVGARGVGK (KRAS G12R)
FVGCRAVGA

SEQ ID NO: 35381 - protein, 9 aa, synthetic construct
  source 1..9: note = Seed: VVGARGVGK (KRAS G12R)
FVGCRAVGC

SEQ ID NO: 35382 - protein, 9 aa, synthetic construct
  source 1..9: note = Seed: VVGARGVGK (KRAS G12R)
FVGCRAVGF

SEQ ID NO: 35383 - protein, 9 aa, synthetic construct
  source 1..9: note = Seed: VVGARGVGK (KRAS G12R)
FVGCRAVGG

SEQ ID NO: 35384 - protein, 9 aa, synthetic construct
  source 1..9: note = Seed: VVGARGVGK (KRAS G12R)
FVGCRAVGH

SEQ ID NO: 35385 - protein, 9 aa, synthetic construct
  source 1..9: note = Seed: VVGARGVGK (KRAS G12R)
FVGCRAVGI

SEQ ID NO: 35386 - protein, 9 aa, synthetic construct
  source 1..9: note = Seed: VVGARGVGK (KRAS G12R)
FVGCRAVGL

SEQ ID NO: 35387 - protein, 9 aa, synthetic construct
  source 1..9: note = Seed: VVGARGVGK (KRAS G12R)
FVGCRAVGM

SEQ ID NO: 35388 - protein, 9 aa, synthetic construct
  source 1..9: note = Seed: VVGARGVGK (KRAS G12R)
FVGCRAVGN

SEQ ID NO: 35389 - protein, 9 aa, synthetic construct
  source 1..9: note = Seed: VVGARGVGK (KRAS G12R)
FVGCRAVGP

SEQ ID NO: 35390 - protein, 9 aa, synthetic construct
  source 1..9: note = Seed: VVGARGVGK (KRAS G12R)
FVGCRAVGQ

SEQ ID NO: 35391 - protein, 9 aa, synthetic construct
  source 1..9: note = Seed: VVGARGVGK (KRAS G12R)
FVGCRAVGS

SEQ ID NO: 35392 - protein, 9 aa, synthetic construct
  source 1..9: note = Seed: VVGARGVGK (KRAS G12R)
FVGCRAVGT

SEQ ID NO: 35393 - protein, 9 aa, synthetic construct
  source 1..9: note = Seed: VVGARGVGK (KRAS G12R)
FVGCRAVGV

SEQ ID NO: 35394 - protein, 9 aa, synthetic construct
  source 1..9: note = Seed: VVGARGVGK (KRAS G12R)
FVGCRAVGY

SEQ ID NO: 35395 - protein, 9 aa, synthetic construct
  source 1..9: note = Seed: VVGARGVGK (KRAS G12R)
FVGCRGVGA

SEQ ID NO: 35396 - protein, 9 aa, synthetic construct
  source 1..9: note = Seed: VVGARGVGK (KRAS G12R)
FVGCRGVGG

SEQ ID NO: 35397 - protein, 9 aa, synthetic construct
  source 1..9: note = Seed: VVGARGVGK (KRAS G12R)
FVGCRGVGI

SEQ ID NO: 35398 - protein, 9 aa, synthetic construct
  source 1..9: note = Seed: VVGARGVGK (KRAS G12R)
FVGCRGVGL

SEQ ID NO: 35399 - protein, 9 aa, synthetic construct
  source 1..9: note = Seed: VVGARGVGK (KRAS G12R)
FVGCRGVGM

SEQ ID NO: 35400 - protein, 9 aa, synthetic construct
  source 1..9: note = Seed: VVGARGVGK (KRAS G12R)
FVGCRGVGS

SEQ ID NO: 35401 - protein, 9 aa, synthetic construct
  source 1..9: note = Seed: VVGARGVGK (KRAS G12R)
FVGCRGVGT

SEQ ID NO: 35402 - protein, 9 aa, synthetic construct
  source 1..9: note = Seed: VVGARGVGK (KRAS G12R)
FVGCRGVGV

SEQ ID NO: 35403 - protein, 9 aa, synthetic construct
  source 1..9: note = Seed: VVGARGVGK (KRAS G12R)
FVGCRHVGA

SEQ ID NO: 35404 - protein, 9 aa, synthetic construct
  source 1..9: note = Seed: VVGARGVGK (KRAS G12R)
FVGCRIVGA

SEQ ID NO: 35405 - protein, 9 aa, synthetic construct
  source 1..9: note = Seed: VVGARGVGK (KRAS G12R)
FVGCRIVGG

SEQ ID NO: 35406 - protein, 9 aa, synthetic construct
  source 1..9: note = Seed: VVGARGVGK (KRAS G12R)
FVGCRIVGI

SEQ ID NO: 35407 - protein, 9 aa, synthetic construct
  source 1..9: note = Seed: VVGARGVGK (KRAS G12R)
FVGCRIVGL

SEQ ID NO: 35408 - protein, 9 aa, synthetic construct
  source 1..9: note = Seed: VVGARGVGK (KRAS G12R)
FVGCRIVGM

SEQ ID NO: 35409 - protein, 9 aa, synthetic construct
  source 1..9: note = Seed: VVGARGVGK (KRAS G12R)
FVGCRIVGN

SEQ ID NO: 35410 - protein, 9 aa, synthetic construct
  source 1..9: note = Seed: VVGARGVGK (KRAS G12R)
FVGCRIVGS

SEQ ID NO: 35411 - protein, 9 aa, synthetic construct
  source 1..9: note = Seed: VVGARGVGK (KRAS G12R)
FVGCRIVGT

SEQ ID NO: 35412 - protein, 9 aa, synthetic construct
  source 1..9: note = Seed: VVGARGVGK (KRAS G12R)
FVGCRIVGV

SEQ ID NO: 35413 - protein, 9 aa, synthetic construct
  source 1..9: note = Seed: VVGARGVGK (KRAS G12R)
FVGCRKVGA

SEQ ID NO: 35414 - protein, 9 aa, synthetic construct
  source 1..9: note = Seed: VVGARGVGK (KRAS G12R)
FVGCRLVGA

SEQ ID NO: 35415 - protein, 9 aa, synthetic construct
  source 1..9: note = Seed: VVGARGVGK (KRAS G12R)
FVGCRLVGG

SEQ ID NO: 35416 - protein, 9 aa, synthetic construct
  source 1..9: note = Seed: VVGARGVGK (KRAS G12R)
FVGCRLVGI

SEQ ID NO: 35417 - protein, 9 aa, synthetic construct
  source 1..9: note = Seed: VVGARGVGK (KRAS G12R)
FVGCRLVGN

SEQ ID NO: 35418 - protein, 9 aa, synthetic construct
  source 1..9: note = Seed: VVGARGVGK (KRAS G12R)
FVGCRLVGS

SEQ ID NO: 35419 - protein, 9 aa, synthetic construct
  source 1..9: note = Seed: VVGARGVGK (KRAS G12R)
FVGCRLVGT

SEQ ID NO: 35420 - protein, 9 aa, synthetic construct
  source 1..9: note = Seed: VVGARGVGK (KRAS G12R)
FVGCRLVGV

SEQ ID NO: 35421 - protein, 9 aa, synthetic construct
  source 1..9: note = Seed: VVGARGVGK (KRAS G12R)
FVGCRMVGA

SEQ ID NO: 35422 - protein, 9 aa, synthetic construct
  source 1..9: note = Seed: VVGARGVGK (KRAS G12R)
FVGCRMVGI

SEQ ID NO: 35423 - protein, 9 aa, synthetic construct
  source 1..9: note = Seed: VVGARGVGK (KRAS G12R)
FVGCRMVGL

SEQ ID NO: 35424 - protein, 9 aa, synthetic construct
  source 1..9: note = Seed: VVGARGVGK (KRAS G12R)
FVGCRMVGM

SEQ ID NO: 35425 - protein, 9 aa, synthetic construct
  source 1..9: note = Seed: VVGARGVGK (KRAS G12R)
FVGCRMVGS

SEQ ID NO: 35426 - protein, 9 aa, synthetic construct
  source 1..9: note = Seed: VVGARGVGK (KRAS G12R)
FVGCRMVGT

SEQ ID NO: 35427 - protein, 9 aa, synthetic construct
  source 1..9: note = Seed: VVGARGVGK (KRAS G12R)
FVGCRMVGV

SEQ ID NO: 35428 - protein, 9 aa, synthetic construct
  source 1..9: note = Seed: VVGARGVGK (KRAS G12R)
FVGCRNVGA

SEQ ID NO: 35429 - protein, 9 aa, synthetic construct
  source 1..9: note = Seed: VVGARGVGK (KRAS G12R)
FVGCRNVGI

SEQ ID NO: 35430 - protein, 9 aa, synthetic construct
  source 1..9: note = Seed: VVGARGVGK (KRAS G12R)
FVGCRNVGL

SEQ ID NO: 35431 - protein, 9 aa, synthetic construct
  source 1..9: note = Seed: VVGARGVGK (KRAS G12R)
FVGCRNVGV

SEQ ID NO: 35432 - protein, 9 aa, synthetic construct
  source 1..9: note = Seed: VVGARGVGK (KRAS G12R)
FVGCRPVGA

SEQ ID NO: 35433 - protein, 9 aa, synthetic construct
  source 1..9: note = Seed: VVGARGVGK (KRAS G12R)
FVGCRPVGF

SEQ ID NO: 35434 - protein, 9 aa, synthetic construct
  source 1..9: note = Seed: VVGARGVGK (KRAS G12R)
FVGCRPVGG

SEQ ID NO: 35435 - protein, 9 aa, synthetic construct
  source 1..9: note = Seed: VVGARGVGK (KRAS G12R)
FVGCRPVGI

SEQ ID NO: 35436 - protein, 9 aa, synthetic construct
  source 1..9: note = Seed: VVGARGVGK (KRAS G12R)
FVGCRPVGL

SEQ ID NO: 35437 - protein, 9 aa, synthetic construct
  source 1..9: note = Seed: VVGARGVGK (KRAS G12R)
FVGCRPVGM

SEQ ID NO: 35438 - protein, 9 aa, synthetic construct
  source 1..9: note = Seed: VVGARGVGK (KRAS G12R)
FVGCRPVGN

SEQ ID NO: 35439 - protein, 9 aa, synthetic construct
  source 1..9: note = Seed: VVGARGVGK (KRAS G12R)
FVGCRPVGS

SEQ ID NO: 35440 - protein, 9 aa, synthetic construct
  source 1..9: note = Seed: VVGARGVGK (KRAS G12R)
FVGCRPVGT

SEQ ID NO: 35441 - protein, 9 aa, synthetic construct
  source 1..9: note = Seed: VVGARGVGK (KRAS G12R)
FVGCRPVGV

SEQ ID NO: 35442 - protein, 9 aa, synthetic construct
  source 1..9: note = Seed: VVGARGVGK (KRAS G12R)
FVGCRRVGA

SEQ ID NO: 35443 - protein, 9 aa, synthetic construct
  source 1..9: note = Seed: VVGARGVGK (KRAS G12R)
FVGCRRVGR

SEQ ID NO: 35444 - protein, 9 aa, synthetic construct
  source 1..9: note = Seed: VVGARGVGK (KRAS G12R)
FVGCRSVGA

SEQ ID NO: 35445 - protein, 9 aa, synthetic construct
  source 1..9: note = Seed: VVGARGVGK (KRAS G12R)
FVGCRSVGF

SEQ ID NO: 35446 - protein, 9 aa, synthetic construct
  source 1..9: note = Seed: VVGARGVGK (KRAS G12R)
FVGCRSVGG

SEQ ID NO: 35447 - protein, 9 aa, synthetic construct
  source 1..9: note = Seed: VVGARGVGK (KRAS G12R)
FVGCRSVGI

SEQ ID NO: 35448 - protein, 9 aa, synthetic construct
  source 1..9: note = Seed: VVGARGVGK (KRAS G12R)
FVGCRSVGL

SEQ ID NO: 35449 - protein, 9 aa, synthetic construct
  source 1..9: note = Seed: VVGARGVGK (KRAS G12R)
FVGCRSVGM

SEQ ID NO: 35450 - protein, 9 aa, synthetic construct
  source 1..9: note = Seed: VVGARGVGK (KRAS G12R)
FVGCRSVGN

SEQ ID NO: 35451 - protein, 9 aa, synthetic construct
  source 1..9: note = Seed: VVGARGVGK (KRAS G12R)
FVGCRSVGS

SEQ ID NO: 35452 - protein, 9 aa, synthetic construct
  source 1..9: note = Seed: VVGARGVGK (KRAS G12R)
FVGCRSVGT

SEQ ID NO: 35453 - protein, 9 aa, synthetic construct
  source 1..9: note = Seed: VVGARGVGK (KRAS G12R)
FVGCRSVGV

SEQ ID NO: 35454 - protein, 9 aa, synthetic construct
  source 1..9: note = Seed: VVGARGVGK (KRAS G12R)
FVGCRTVGA

SEQ ID NO: 35455 - protein, 9 aa, synthetic construct
  source 1..9: note = Seed: VVGARGVGK (KRAS G12R)
FVGCRTVGG

SEQ ID NO: 35456 - protein, 9 aa, synthetic construct
  source 1..9: note = Seed: VVGARGVGK (KRAS G12R)
FVGCRTVGI

SEQ ID NO: 35457 - protein, 9 aa, synthetic construct
  source 1..9: note = Seed: VVGARGVGK (KRAS G12R)
FVGCRTVGL

SEQ ID NO: 35458 - protein, 9 aa, synthetic construct
  source 1..9: note = Seed: VVGARGVGK (KRAS G12R)
FVGCRTVGM

SEQ ID NO: 35459 - protein, 9 aa, synthetic construct
  source 1..9: note = Seed: VVGARGVGK (KRAS G12R)
FVGCRTVGN

SEQ ID NO: 35460 - protein, 9 aa, synthetic construct
  source 1..9: note = Seed: VVGARGVGK (KRAS G12R)
FVGCRTVGS

SEQ ID NO: 35461 - protein, 9 aa, synthetic construct
  source 1..9: note = Seed: VVGARGVGK (KRAS G12R)
FVGCRTVGT

SEQ ID NO: 35462 - protein, 9 aa, synthetic construct
  source 1..9: note = Seed: VVGARGVGK (KRAS G12R)
FVGCRTVGV

SEQ ID NO: 35463 - protein, 9 aa, synthetic construct
  source 1..9: note = Seed: VVGARGVGK (KRAS G12R)
FVGCRVVGA

SEQ ID NO: 35464 - protein, 9 aa, synthetic construct
  source 1..9: note = Seed: VVGARGVGK (KRAS G12R)
FVGCRVVGG

SEQ ID NO: 35465 - protein, 9 aa, synthetic construct
  source 1..9: note = Seed: VVGARGVGK (KRAS G12R)
FVGCRVVGI

SEQ ID NO: 35466 - protein, 9 aa, synthetic construct
  source 1..9: note = Seed: VVGARGVGK (KRAS G12R)
FVGCRVVGL

SEQ ID NO: 35467 - protein, 9 aa, synthetic construct
  source 1..9: note = Seed: VVGARGVGK (KRAS G12R)
FVGCRVVGM

SEQ ID NO: 35468 - protein, 9 aa, synthetic construct
  source 1..9: note = Seed: VVGARGVGK (KRAS G12R)
FVGCRVVGN

SEQ ID NO: 35469 - protein, 9 aa, synthetic construct
  source 1..9: note = Seed: VVGARGVGK (KRAS G12R)
FVGCRVVGS

SEQ ID NO: 35470 - protein, 9 aa, synthetic construct
  source 1..9: note = Seed: VVGARGVGK (KRAS G12R)
FVGCRVVGT

SEQ ID NO: 35471 - protein, 9 aa, synthetic construct
  source 1..9: note = Seed: VVGARGVGK (KRAS G12R)
FVGCRVVGV

SEQ ID NO: 35472 - protein, 9 aa, synthetic construct
  source 1..9: note = Seed: VVGARGVGK (KRAS G12R)
FVGDRAVGA

SEQ ID NO: 35473 - protein, 9 aa, synthetic construct
  source 1..9: note = Seed: VVGARGVGK (KRAS G12R)
FVGDRAVGG

SEQ ID NO: 35474 - protein, 9 aa, synthetic construct
  source 1..9: note = Seed: VVGARGVGK (KRAS G12R)
FVGDRAVGI

SEQ ID NO: 35475 - protein, 9 aa, synthetic construct
  source 1..9: note = Seed: VVGARGVGK (KRAS G12R)
FVGDRAVGL

SEQ ID NO: 35476 - protein, 9 aa, synthetic construct
  source 1..9: note = Seed: VVGARGVGK (KRAS G12R)
FVGDRAVGM

SEQ ID NO: 35477 - protein, 9 aa, synthetic construct
  source 1..9: note = Seed: VVGARGVGK (KRAS G12R)
FVGDRAVGN

SEQ ID NO: 35478 - protein, 9 aa, synthetic construct
  source 1..9: note = Seed: VVGARGVGK (KRAS G12R)
FVGDRAVGS

SEQ ID NO: 35479 - protein, 9 aa, synthetic construct
  source 1..9: note = Seed: VVGARGVGK (KRAS G12R)
FVGDRAVGT

SEQ ID NO: 35480 - protein, 9 aa, synthetic construct
  source 1..9: note = Seed: VVGARGVGK (KRAS G12R)
FVGDRAVGV

SEQ ID NO: 35481 - protein, 9 aa, synthetic construct
  source 1..9: note = Seed: VVGARGVGK (KRAS G12R)
FVGDRGVGA

SEQ ID NO: 35482 - protein, 9 aa, synthetic construct
  source 1..9: note = Seed: VVGARGVGK (KRAS G12R)
FVGDRGVGI

SEQ ID NO: 35483 - protein, 9 aa, synthetic construct
  source 1..9: note = Seed: VVGARGVGK (KRAS G12R)
FVGDRGVGL

SEQ ID NO: 35484 - protein, 9 aa, synthetic construct
  source 1..9: note = Seed: VVGARGVGK (KRAS G12R)
FVGDRGVGM

SEQ ID NO: 35485 - protein, 9 aa, synthetic construct
  source 1..9: note = Seed: VVGARGVGK (KRAS G12R)
FVGDRGVGV

SEQ ID NO: 35486 - protein, 9 aa, synthetic construct
  source 1..9: note = Seed: VVGARGVGK (KRAS G12R)
FVGDRPVGA

SEQ ID NO: 35487 - protein, 9 aa, synthetic construct
  source 1..9: note = Seed: VVGARGVGK (KRAS G12R)
FVGDRPVGI

SEQ ID NO: 35488 - protein, 9 aa, synthetic construct
  source 1..9: note = Seed: VVGARGVGK (KRAS G12R)
FVGDRPVGL

SEQ ID NO: 35489 - protein, 9 aa, synthetic construct
  source 1..9: note = Seed: VVGARGVGK (KRAS G12R)
FVGDRPVGM

SEQ ID NO: 35490 - protein, 9 aa, synthetic construct
  source 1..9: note = Seed: VVGARGVGK (KRAS G12R)
FVGDRPVGV

SEQ ID NO: 35491 - protein, 9 aa, synthetic construct
  source 1..9: note = Seed: VVGARGVGK (KRAS G12R)
FVGDRSVGA

SEQ ID NO: 35492 - protein, 9 aa, synthetic construct
  source 1..9: note = Seed: VVGARGVGK (KRAS G12R)
FVGDRSVGI

SEQ ID NO: 35493 - protein, 9 aa, synthetic construct
  source 1..9: note = Seed: VVGARGVGK (KRAS G12R)
FVGDRSVGL

SEQ ID NO: 35494 - protein, 9 aa, synthetic construct
  source 1..9: note = Seed: VVGARGVGK (KRAS G12R)
FVGDRSVGM

SEQ ID NO: 35495 - protein, 9 aa, synthetic construct
  source 1..9: note = Seed: VVGARGVGK (KRAS G12R)
FVGDRSVGV

SEQ ID NO: 35496 - protein, 9 aa, synthetic construct
  source 1..9: note = Seed: VVGARGVGK (KRAS G12R)
FVGERAVGA

SEQ ID NO: 35497 - protein, 9 aa, synthetic construct
  source 1..9: note = Seed: VVGARGVGK (KRAS G12R)
FVGERAVGC

SEQ ID NO: 35498 - protein, 9 aa, synthetic construct
  source 1..9: note = Seed: VVGARGVGK (KRAS G12R)
FVGERAVGD

SEQ ID NO: 35499 - protein, 9 aa, synthetic construct
  source 1..9: note = Seed: VVGARGVGK (KRAS G12R)
FVGERAVGE

SEQ ID NO: 35500 - protein, 9 aa, synthetic construct
  source 1..9: note = Seed: VVGARGVGK (KRAS G12R)
FVGERAVGF

SEQ ID NO: 35501 - protein, 9 aa, synthetic construct
  source 1..9: note = Seed: VVGARGVGK (KRAS G12R)
FVGERAVGG

SEQ ID NO: 35502 - protein, 9 aa, synthetic construct
  source 1..9: note = Seed: VVGARGVGK (KRAS G12R)
FVGERAVGH

SEQ ID NO: 35503 - protein, 9 aa, synthetic construct
  source 1..9: note = Seed: VVGARGVGK (KRAS G12R)
FVGERAVGI

SEQ ID NO: 35504 - protein, 9 aa, synthetic construct
  source 1..9: note = Seed: VVGARGVGK (KRAS G12R)
FVGERAVGK

SEQ ID NO: 35505 - protein, 9 aa, synthetic construct
  source 1..9: note = Seed: VVGARGVGK (KRAS G12R)
FVGERAVGL

SEQ ID NO: 35506 - protein, 9 aa, synthetic construct
  source 1..9: note = Seed: VVGARGVGK (KRAS G12R)
FVGERAVGM

SEQ ID NO: 35507 - protein, 9 aa, synthetic construct
  source 1..9: note = Seed: VVGARGVGK (KRAS G12R)
FVGERAVGN

SEQ ID NO: 35508 - protein, 9 aa, synthetic construct
  source 1..9: note = Seed: VVGARGVGK (KRAS G12R)
FVGERAVGP

SEQ ID NO: 35509 - protein, 9 aa, synthetic construct
  source 1..9: note = Seed: VVGARGVGK (KRAS G12R)
FVGERAVGQ

SEQ ID NO: 35510 - protein, 9 aa, synthetic construct
  source 1..9: note = Seed: VVGARGVGK (KRAS G12R)
FVGERAVGR

SEQ ID NO: 35511 - protein, 9 aa, synthetic construct
  source 1..9: note = Seed: VVGARGVGK (KRAS G12R)
FVGERAVGS

SEQ ID NO: 35512 - protein, 9 aa, synthetic construct
  source 1..9: note = Seed: VVGARGVGK (KRAS G12R)
FVGERAVGT

SEQ ID NO: 35513 - protein, 9 aa, synthetic construct
  source 1..9: note = Seed: VVGARGVGK (KRAS G12R)
FVGERAVGV

SEQ ID NO: 35514 - protein, 9 aa, synthetic construct
  source 1..9: note = Seed: VVGARGVGK (KRAS G12R)
FVGERAVGW

SEQ ID NO: 35515 - protein, 9 aa, synthetic construct
  source 1..9: note = Seed: VVGARGVGK (KRAS G12R)
FVGERAVGY

SEQ ID NO: 35516 - protein, 9 aa, synthetic construct
  source 1..9: note = Seed: VVGARGVGK (KRAS G12R)
FVGERGVGA

SEQ ID NO: 35517 - protein, 9 aa, synthetic construct
  source 1..9: note = Seed: VVGARGVGK (KRAS G12R)
FVGERGVGC

SEQ ID NO: 35518 - protein, 9 aa, synthetic construct
  source 1..9: note = Seed: VVGARGVGK (KRAS G12R)
FVGERGVGF

SEQ ID NO: 35519 - protein, 9 aa, synthetic construct
  source 1..9: note = Seed: VVGARGVGK (KRAS G12R)
FVGERGVGG

SEQ ID NO: 35520 - protein, 9 aa, synthetic construct
  source 1..9: note = Seed: VVGARGVGK (KRAS G12R)
FVGERGVGH

SEQ ID NO: 35521 - protein, 9 aa, synthetic construct
  source 1..9: note = Seed: VVGARGVGK (KRAS G12R)
FVGERGVGI

SEQ ID NO: 35522 - protein, 9 aa, synthetic construct
  source 1..9: note = Seed: VVGARGVGK (KRAS G12R)
FVGERGVGL

SEQ ID NO: 35523 - protein, 9 aa, synthetic construct
  source 1..9: note = Seed: VVGARGVGK (KRAS G12R)
FVGERGVGM

SEQ ID NO: 35524 - protein, 9 aa, synthetic construct
  source 1..9: note = Seed: VVGARGVGK (KRAS G12R)
FVGERGVGN

SEQ ID NO: 35525 - protein, 9 aa, synthetic construct
  source 1..9: note = Seed: VVGARGVGK (KRAS G12R)
FVGERGVGP

SEQ ID NO: 35526 - protein, 9 aa, synthetic construct
  source 1..9: note = Seed: VVGARGVGK (KRAS G12R)
FVGERGVGQ

SEQ ID NO: 35527 - protein, 9 aa, synthetic construct
  source 1..9: note = Seed: VVGARGVGK (KRAS G12R)
FVGERGVGS

SEQ ID NO: 35528 - protein, 9 aa, synthetic construct
  source 1..9: note = Seed: VVGARGVGK (KRAS G12R)
FVGERGVGT

SEQ ID NO: 35529 - protein, 9 aa, synthetic construct
  source 1..9: note = Seed: VVGARGVGK (KRAS G12R)
FVGERGVGV

SEQ ID NO: 35530 - protein, 9 aa, synthetic construct
  source 1..9: note = Seed: VVGARGVGK (KRAS G12R)
FVGERGVGY

SEQ ID NO: 35531 - protein, 9 aa, synthetic construct
  source 1..9: note = Seed: VVGARGVGK (KRAS G12R)
FVGERIVGA

SEQ ID NO: 35532 - protein, 9 aa, synthetic construct
  source 1..9: note = Seed: VVGARGVGK (KRAS G12R)
FVGERIVGG

SEQ ID NO: 35533 - protein, 9 aa, synthetic construct
  source 1..9: note = Seed: VVGARGVGK (KRAS G12R)
FVGERIVGI

SEQ ID NO: 35534 - protein, 9 aa, synthetic construct
  source 1..9: note = Seed: VVGARGVGK (KRAS G12R)
FVGERIVGL

SEQ ID NO: 35535 - protein, 9 aa, synthetic construct
  source 1..9: note = Seed: VVGARGVGK (KRAS G12R)
FVGERIVGM

SEQ ID NO: 35536 - protein, 9 aa, synthetic construct
  source 1..9: note = Seed: VVGARGVGK (KRAS G12R)
FVGERIVGN

SEQ ID NO: 35537 - protein, 9 aa, synthetic construct
  source 1..9: note = Seed: VVGARGVGK (KRAS G12R)
FVGERIVGS

SEQ ID NO: 35538 - protein, 9 aa, synthetic construct
  source 1..9: note = Seed: VVGARGVGK (KRAS G12R)
FVGERIVGT

SEQ ID NO: 35539 - protein, 9 aa, synthetic construct
  source 1..9: note = Seed: VVGARGVGK (KRAS G12R)
FVGERIVGV

SEQ ID NO: 35540 - protein, 9 aa, synthetic construct
  source 1..9: note = Seed: VVGARGVGK (KRAS G12R)
FVGERLVGA

SEQ ID NO: 35541 - protein, 9 aa, synthetic construct
  source 1..9: note = Seed: VVGARGVGK (KRAS G12R)
FVGERMVGA

SEQ ID NO: 35542 - protein, 9 aa, synthetic construct
  source 1..9: note = Seed: VVGARGVGK (KRAS G12R)
FVGERMVGI

SEQ ID NO: 35543 - protein, 9 aa, synthetic construct
  source 1..9: note = Seed: VVGARGVGK (KRAS G12R)
FVGERMVGL

SEQ ID NO: 35544 - protein, 9 aa, synthetic construct
  source 1..9: note = Seed: VVGARGVGK (KRAS G12R)
FVGERMVGV

SEQ ID NO: 35545 - protein, 9 aa, synthetic construct
  source 1..9: note = Seed: VVGARGVGK (KRAS G12R)
FVGERNVGA

SEQ ID NO: 35546 - protein, 9 aa, synthetic construct
  source 1..9: note = Seed: VVGARGVGK (KRAS G12R)
FVGERNVGG

SEQ ID NO: 35547 - protein, 9 aa, synthetic construct
  source 1..9: note = Seed: VVGARGVGK (KRAS G12R)
FVGERNVGI

SEQ ID NO: 35548 - protein, 9 aa, synthetic construct
  source 1..9: note = Seed: VVGARGVGK (KRAS G12R)
FVGERNVGL

SEQ ID NO: 35549 - protein, 9 aa, synthetic construct
  source 1..9: note = Seed: VVGARGVGK (KRAS G12R)
FVGERNVGM

SEQ ID NO: 35550 - protein, 9 aa, synthetic construct
  source 1..9: note = Seed: VVGARGVGK (KRAS G12R)
FVGERNVGN

SEQ ID NO: 35551 - protein, 9 aa, synthetic construct
  source 1..9: note = Seed: VVGARGVGK (KRAS G12R)
FVGERNVGS

SEQ ID NO: 35552 - protein, 9 aa, synthetic construct
  source 1..9: note = Seed: VVGARGVGK (KRAS G12R)
FVGERNVGT

SEQ ID NO: 35553 - protein, 9 aa, synthetic construct
  source 1..9: note = Seed: VVGARGVGK (KRAS G12R)
FVGERNVGV

SEQ ID NO: 35554 - protein, 9 aa, synthetic construct
  source 1..9: note = Seed: VVGARGVGK (KRAS G12R)
FVGERPVGA

SEQ ID NO: 35555 - protein, 9 aa, synthetic construct
  source 1..9: note = Seed: VVGARGVGK (KRAS G12R)
FVGERPVGC

SEQ ID NO: 35556 - protein, 9 aa, synthetic construct
  source 1..9: note = Seed: VVGARGVGK (KRAS G12R)
FVGERPVGF

SEQ ID NO: 35557 - protein, 9 aa, synthetic construct
  source 1..9: note = Seed: VVGARGVGK (KRAS G12R)
FVGERPVGG

SEQ ID NO: 35558 - protein, 9 aa, synthetic construct
  source 1..9: note = Seed: VVGARGVGK (KRAS G12R)
FVGERPVGH

SEQ ID NO: 35559 - protein, 9 aa, synthetic construct
  source 1..9: note = Seed: VVGARGVGK (KRAS G12R)
FVGERPVGI

SEQ ID NO: 35560 - protein, 9 aa, synthetic construct
  source 1..9: note = Seed: VVGARGVGK (KRAS G12R)
FVGERPVGL

SEQ ID NO: 35561 - protein, 9 aa, synthetic construct
  source 1..9: note = Seed: VVGARGVGK (KRAS G12R)
FVGERPVGM

SEQ ID NO: 35562 - protein, 9 aa, synthetic construct
  source 1..9: note = Seed: VVGARGVGK (KRAS G12R)
FVGERPVGN

SEQ ID NO: 35563 - protein, 9 aa, synthetic construct
  source 1..9: note = Seed: VVGARGVGK (KRAS G12R)
FVGERPVGQ

SEQ ID NO: 35564 - protein, 9 aa, synthetic construct
  source 1..9: note = Seed: VVGARGVGK (KRAS G12R)
FVGERPVGS

SEQ ID NO: 35565 - protein, 9 aa, synthetic construct
  source 1..9: note = Seed: VVGARGVGK (KRAS G12R)
FVGERPVGT

SEQ ID NO: 35566 - protein, 9 aa, synthetic construct
  source 1..9: note = Seed: VVGARGVGK (KRAS G12R)
FVGERPVGV

SEQ ID NO: 35567 - protein, 9 aa, synthetic construct
  source 1..9: note = Seed: VVGARGVGK (KRAS G12R)
FVGERPVGW

SEQ ID NO: 35568 - protein, 9 aa, synthetic construct
  source 1..9: note = Seed: VVGARGVGK (KRAS G12R)
FVGERPVGY

SEQ ID NO: 35569 - protein, 9 aa, synthetic construct
  source 1..9: note = Seed: VVGARGVGK (KRAS G12R)
FVGERSVGA

SEQ ID NO: 35570 - protein, 9 aa, synthetic construct
  source 1..9: note = Seed: VVGARGVGK (KRAS G12R)
FVGERSVGC

SEQ ID NO: 35571 - protein, 9 aa, synthetic construct
  source 1..9: note = Seed: VVGARGVGK (KRAS G12R)
FVGERSVGF

SEQ ID NO: 35572 - protein, 9 aa, synthetic construct
  source 1..9: note = Seed: VVGARGVGK (KRAS G12R)
FVGERSVGG

SEQ ID NO: 35573 - protein, 9 aa, synthetic construct
  source 1..9: note = Seed: VVGARGVGK (KRAS G12R)
FVGERSVGH

SEQ ID NO: 35574 - protein, 9 aa, synthetic construct
  source 1..9: note = Seed: VVGARGVGK (KRAS G12R)
FVGERSVGI

SEQ ID NO: 35575 - protein, 9 aa, synthetic construct
  source 1..9: note = Seed: VVGARGVGK (KRAS G12R)
FVGERSVGL

SEQ ID NO: 35576 - protein, 9 aa, synthetic construct
  source 1..9: note = Seed: VVGARGVGK (KRAS G12R)
FVGERSVGM

SEQ ID NO: 35577 - protein, 9 aa, synthetic construct
  source 1..9: note = Seed: VVGARGVGK (KRAS G12R)
FVGERSVGN

SEQ ID NO: 35578 - protein, 9 aa, synthetic construct
  source 1..9: note = Seed: VVGARGVGK (KRAS G12R)
FVGERSVGQ

SEQ ID NO: 35579 - protein, 9 aa, synthetic construct
  source 1..9: note = Seed: VVGARGVGK (KRAS G12R)
FVGERSVGS

SEQ ID NO: 35580 - protein, 9 aa, synthetic construct
  source 1..9: note = Seed: VVGARGVGK (KRAS G12R)
FVGERSVGT

SEQ ID NO: 35581 - protein, 9 aa, synthetic construct
  source 1..9: note = Seed: VVGARGVGK (KRAS G12R)
FVGERSVGV

SEQ ID NO: 35582 - protein, 9 aa, synthetic construct
  source 1..9: note = Seed: VVGARGVGK (KRAS G12R)
FVGERSVGY

SEQ ID NO: 35583 - protein, 9 aa, synthetic construct
  source 1..9: note = Seed: VVGARGVGK (KRAS G12R)
FVGERTVGA

SEQ ID NO: 35584 - protein, 9 aa, synthetic construct
  source 1..9: note = Seed: VVGARGVGK (KRAS G12R)
FVGERTVGG

SEQ ID NO: 35585 - protein, 9 aa, synthetic construct
  source 1..9: note = Seed: VVGARGVGK (KRAS G12R)
FVGERTVGH

SEQ ID NO: 35586 - protein, 9 aa, synthetic construct
  source 1..9: note = Seed: VVGARGVGK (KRAS G12R)
FVGERTVGI

SEQ ID NO: 35587 - protein, 9 aa, synthetic construct
  source 1..9: note = Seed: VVGARGVGK (KRAS G12R)
FVGERTVGL

SEQ ID NO: 35588 - protein, 9 aa, synthetic construct
  source 1..9: note = Seed: VVGARGVGK (KRAS G12R)
FVGERTVGM

SEQ ID NO: 35589 - protein, 9 aa, synthetic construct
  source 1..9: note = Seed: VVGARGVGK (KRAS G12R)
FVGERTVGN

SEQ ID NO: 35590 - protein, 9 aa, synthetic construct
  source 1..9: note = Seed: VVGARGVGK (KRAS G12R)
FVGERTVGQ

SEQ ID NO: 35591 - protein, 9 aa, synthetic construct
  source 1..9: note = Seed: VVGARGVGK (KRAS G12R)
FVGERTVGS

SEQ ID NO: 35592 - protein, 9 aa, synthetic construct
  source 1..9: note = Seed: VVGARGVGK (KRAS G12R)
FVGERTVGT

SEQ ID NO: 35593 - protein, 9 aa, synthetic construct
  source 1..9: note = Seed: VVGARGVGK (KRAS G12R)
FVGERTVGV

SEQ ID NO: 35594 - protein, 9 aa, synthetic construct
  source 1..9: note = Seed: VVGARGVGK (KRAS G12R)
FVGERVVGA

SEQ ID NO: 35595 - protein, 9 aa, synthetic construct
  source 1..9: note = Seed: VVGARGVGK (KRAS G12R)
FVGERVVGG

SEQ ID NO: 35596 - protein, 9 aa, synthetic construct
  source 1..9: note = Seed: VVGARGVGK (KRAS G12R)
FVGERVVGH

SEQ ID NO: 35597 - protein, 9 aa, synthetic construct
  source 1..9: note = Seed: VVGARGVGK (KRAS G12R)
FVGERVVGI

SEQ ID NO: 35598 - protein, 9 aa, synthetic construct
  source 1..9: note = Seed: VVGARGVGK (KRAS G12R)
FVGERVVGL

SEQ ID NO: 35599 - protein, 9 aa, synthetic construct
  source 1..9: note = Seed: VVGARGVGK (KRAS G12R)
FVGERVVGM

SEQ ID NO: 35600 - protein, 9 aa, synthetic construct
  source 1..9: note = Seed: VVGARGVGK (KRAS G12R)
FVGERVVGN

SEQ ID NO: 35601 - protein, 9 aa, synthetic construct
  source 1..9: note = Seed: VVGARGVGK (KRAS G12R)
FVGERVVGQ

SEQ ID NO: 35602 - protein, 9 aa, synthetic construct
  source 1..9: note = Seed: VVGARGVGK (KRAS G12R)
FVGERVVGS

SEQ ID NO: 35603 - protein, 9 aa, synthetic construct
  source 1..9: note = Seed: VVGARGVGK (KRAS G12R)
FVGERVVGT

SEQ ID NO: 35604 - protein, 9 aa, synthetic construct
  source 1..9: note = Seed: VVGARGVGK (KRAS G12R)
FVGERVVGV

SEQ ID NO: 35605 - protein, 9 aa, synthetic construct
  source 1..9: note = Seed: VVGARGVGK (KRAS G12R)
FVGFRAVGA

SEQ ID NO: 35606 - protein, 9 aa, synthetic construct
  source 1..9: note = Seed: VVGARGVGK (KRAS G12R)
FVGFRAVGC

SEQ ID NO: 35607 - protein, 9 aa, synthetic construct
  source 1..9: note = Seed: VVGARGVGK (KRAS G12R)
FVGFRAVGD

SEQ ID NO: 35608 - protein, 9 aa, synthetic construct
  source 1..9: note = Seed: VVGARGVGK (KRAS G12R)
FVGFRAVGE

SEQ ID NO: 35609 - protein, 9 aa, synthetic construct
  source 1..9: note = Seed: VVGARGVGK (KRAS G12R)
FVGFRAVGF

SEQ ID NO: 35610 - protein, 9 aa, synthetic construct
  source 1..9: note = Seed: VVGARGVGK (KRAS G12R)
FVGFRAVGG

SEQ ID NO: 35611 - protein, 9 aa, synthetic construct
  source 1..9: note = Seed: VVGARGVGK (KRAS G12R)
FVGFRAVGH

SEQ ID NO: 35612 - protein, 9 aa, synthetic construct
  source 1..9: note = Seed: VVGARGVGK (KRAS G12R)
FVGFRAVGI

SEQ ID NO: 35613 - protein, 9 aa, synthetic construct
  source 1..9: note = Seed: VVGARGVGK (KRAS G12R)
FVGFRAVGK

SEQ ID NO: 35614 - protein, 9 aa, synthetic construct
  source 1..9: note = Seed: VVGARGVGK (KRAS G12R)
FVGFRAVGL

SEQ ID NO: 35615 - protein, 9 aa, synthetic construct
  source 1..9: note = Seed: VVGARGVGK (KRAS G12R)
FVGFRAVGM

SEQ ID NO: 35616 - protein, 9 aa, synthetic construct
  source 1..9: note = Seed: VVGARGVGK (KRAS G12R)
FVGFRAVGN

SEQ ID NO: 35617 - protein, 9 aa, synthetic construct
  source 1..9: note = Seed: VVGARGVGK (KRAS G12R)
FVGFRAVGQ

SEQ ID NO: 35618 - protein, 9 aa, synthetic construct
  source 1..9: note = Seed: VVGARGVGK (KRAS G12R)
FVGFRAVGR

SEQ ID NO: 35619 - protein, 9 aa, synthetic construct
  source 1..9: note = Seed: VVGARGVGK (KRAS G12R)
FVGFRAVGS

SEQ ID NO: 35620 - protein, 9 aa, synthetic construct
  source 1..9: note = Seed: VVGARGVGK (KRAS G12R)
FVGFRAVGT

SEQ ID NO: 35621 - protein, 9 aa, synthetic construct
  source 1..9: note = Seed: VVGARGVGK (KRAS G12R)
FVGFRAVGV

SEQ ID NO: 35622 - protein, 9 aa, synthetic construct
  source 1..9: note = Seed: VVGARGVGK (KRAS G12R)
FVGFRAVGW

SEQ ID NO: 35623 - protein, 9 aa, synthetic construct
  source 1..9: note = Seed: VVGARGVGK (KRAS G12R)
FVGFRAVGY

SEQ ID NO: 35624 - protein, 9 aa, synthetic construct
  source 1..9: note = Seed: VVGARGVGK (KRAS G12R)
FVGFREVGV

SEQ ID NO: 35625 - protein, 9 aa, synthetic construct
  source 1..9: note = Seed: VVGARGVGK (KRAS G12R)
FVGFRGVGA

SEQ ID NO: 35626 - protein, 9 aa, synthetic construct
  source 1..9: note = Seed: VVGARGVGK (KRAS G12R)
FVGFRGVGC

SEQ ID NO: 35627 - protein, 9 aa, synthetic construct
  source 1..9: note = Seed: VVGARGVGK (KRAS G12R)
FVGFRGVGF

SEQ ID NO: 35628 - protein, 9 aa, synthetic construct
  source 1..9: note = Seed: VVGARGVGK (KRAS G12R)
FVGFRGVGG

SEQ ID NO: 35629 - protein, 9 aa, synthetic construct
  source 1..9: note = Seed: VVGARGVGK (KRAS G12R)
FVGFRGVGH

SEQ ID NO: 35630 - protein, 9 aa, synthetic construct
  source 1..9: note = Seed: VVGARGVGK (KRAS G12R)
FVGFRGVGI

SEQ ID NO: 35631 - protein, 9 aa, synthetic construct
  source 1..9: note = Seed: VVGARGVGK (KRAS G12R)
FVGFRGVGK

SEQ ID NO: 35632 - protein, 9 aa, synthetic construct
  source 1..9: note = Seed: VVGARGVGK (KRAS G12R)
FVGFRGVGL

SEQ ID NO: 35633 - protein, 9 aa, synthetic construct
  source 1..9: note = Seed: VVGARGVGK (KRAS G12R)
FVGFRGVGM

SEQ ID NO: 35634 - protein, 9 aa, synthetic construct
  source 1..9: note = Seed: VVGARGVGK (KRAS G12R)
FVGFRGVGN

SEQ ID NO: 35635 - protein, 9 aa, synthetic construct
  source 1..9: note = Seed: VVGARGVGK (KRAS G12R)
FVGFRGVGQ

SEQ ID NO: 35636 - protein, 9 aa, synthetic construct
  source 1..9: note = Seed: VVGARGVGK (KRAS G12R)
FVGFRGVGR

SEQ ID NO: 35637 - protein, 9 aa, synthetic construct
  source 1..9: note = Seed: VVGARGVGK (KRAS G12R)
FVGFRGVGS

SEQ ID NO: 35638 - protein, 9 aa, synthetic construct
  source 1..9: note = Seed: VVGARGVGK (KRAS G12R)
FVGFRGVGT

SEQ ID NO: 35639 - protein, 9 aa, synthetic construct
  source 1..9: note = Seed: VVGARGVGK (KRAS G12R)
FVGFRGVGV

SEQ ID NO: 35640 - protein, 9 aa, synthetic construct
  source 1..9: note = Seed: VVGARGVGK (KRAS G12R)
FVGFRGVGY

SEQ ID NO: 35641 - protein, 9 aa, synthetic construct
  source 1..9: note = Seed: VVGARGVGK (KRAS G12R)
FVGFRHVGL

SEQ ID NO: 35642 - protein, 9 aa, synthetic construct
  source 1..9: note = Seed: VVGARGVGK (KRAS G12R)
FVGFRHVGM

SEQ ID NO: 35643 - protein, 9 aa, synthetic construct
  source 1..9: note = Seed: VVGARGVGK (KRAS G12R)
FVGFRHVGQ

SEQ ID NO: 35644 - protein, 9 aa, synthetic construct
  source 1..9: note = Seed: VVGARGVGK (KRAS G12R)
FVGFRHVGR

SEQ ID NO: 35645 - protein, 9 aa, synthetic construct
  source 1..9: note = Seed: VVGARGVGK (KRAS G12R)
FVGFRKVGH

SEQ ID NO: 35646 - protein, 9 aa, synthetic construct
  source 1..9: note = Seed: VVGARGVGK (KRAS G12R)
FVGFRKVGK

SEQ ID NO: 35647 - protein, 9 aa, synthetic construct
  source 1..9: note = Seed: VVGARGVGK (KRAS G12R)
FVGFRKVGL

SEQ ID NO: 35648 - protein, 9 aa, synthetic construct
  source 1..9: note = Seed: VVGARGVGK (KRAS G12R)
FVGFRKVGM

SEQ ID NO: 35649 - protein, 9 aa, synthetic construct
  source 1..9: note = Seed: VVGARGVGK (KRAS G12R)
FVGFRKVGR

SEQ ID NO: 35650 - protein, 9 aa, synthetic construct
  source 1..9: note = Seed: VVGARGVGK (KRAS G12R)
FVGFRKVGY

SEQ ID NO: 35651 - protein, 9 aa, synthetic construct
  source 1..9: note = Seed: VVGARGVGK (KRAS G12R)
FVGFRNVGA

SEQ ID NO: 35652 - protein, 9 aa, synthetic construct
  source 1..9: note = Seed: VVGARGVGK (KRAS G12R)
FVGFRNVGF

SEQ ID NO: 35653 - protein, 9 aa, synthetic construct
  source 1..9: note = Seed: VVGARGVGK (KRAS G12R)
FVGFRNVGG

SEQ ID NO: 35654 - protein, 9 aa, synthetic construct
  source 1..9: note = Seed: VVGARGVGK (KRAS G12R)
FVGFRNVGH

SEQ ID NO: 35655 - protein, 9 aa, synthetic construct
  source 1..9: note = Seed: VVGARGVGK (KRAS G12R)
FVGFRNVGI

SEQ ID NO: 35656 - protein, 9 aa, synthetic construct
  source 1..9: note = Seed: VVGARGVGK (KRAS G12R)
FVGFRNVGL

SEQ ID NO: 35657 - protein, 9 aa, synthetic construct
  source 1..9: note = Seed: VVGARGVGK (KRAS G12R)
FVGFRNVGM

SEQ ID NO: 35658 - protein, 9 aa, synthetic construct
  source 1..9: note = Seed: VVGARGVGK (KRAS G12R)
FVGFRNVGN

SEQ ID NO: 35659 - protein, 9 aa, synthetic construct
  source 1..9: note = Seed: VVGARGVGK (KRAS G12R)
FVGFRNVGQ

SEQ ID NO: 35660 - protein, 9 aa, synthetic construct
  source 1..9: note = Seed: VVGARGVGK (KRAS G12R)
FVGFRNVGR

SEQ ID NO: 35661 - protein, 9 aa, synthetic construct
  source 1..9: note = Seed: VVGARGVGK (KRAS G12R)
FVGFRNVGS

SEQ ID NO: 35662 - protein, 9 aa, synthetic construct
  source 1..9: note = Seed: VVGARGVGK (KRAS G12R)
FVGFRNVGV

SEQ ID NO: 35663 - protein, 9 aa, synthetic construct
  source 1..9: note = Seed: VVGARGVGK (KRAS G12R)
FVGFRNVGY

SEQ ID NO: 35664 - protein, 9 aa, synthetic construct
  source 1..9: note = Seed: VVGARGVGK (KRAS G12R)
FVGFRPVGA

SEQ ID NO: 35665 - protein, 9 aa, synthetic construct
  source 1..9: note = Seed: VVGARGVGK (KRAS G12R)
FVGFRPVGC

SEQ ID NO: 35666 - protein, 9 aa, synthetic construct
  source 1..9: note = Seed: VVGARGVGK (KRAS G12R)
FVGFRPVGD

SEQ ID NO: 35667 - protein, 9 aa, synthetic construct
  source 1..9: note = Seed: VVGARGVGK (KRAS G12R)
FVGFRPVGE

SEQ ID NO: 35668 - protein, 9 aa, synthetic construct
  source 1..9: note = Seed: VVGARGVGK (KRAS G12R)
FVGFRPVGF

SEQ ID NO: 35669 - protein, 9 aa, synthetic construct
  source 1..9: note = Seed: VVGARGVGK (KRAS G12R)
FVGFRPVGG

SEQ ID NO: 35670 - protein, 9 aa, synthetic construct
  source 1..9: note = Seed: VVGARGVGK (KRAS G12R)
FVGFRPVGH

SEQ ID NO: 35671 - protein, 9 aa, synthetic construct
  source 1..9: note = Seed: VVGARGVGK (KRAS G12R)
FVGFRPVGI

SEQ ID NO: 35672 - protein, 9 aa, synthetic construct
  source 1..9: note = Seed: VVGARGVGK (KRAS G12R)
FVGFRPVGK

SEQ ID NO: 35673 - protein, 9 aa, synthetic construct
  source 1..9: note = Seed: VVGARGVGK (KRAS G12R)
FVGFRPVGL

SEQ ID NO: 35674 - protein, 9 aa, synthetic construct
  source 1..9: note = Seed: VVGARGVGK (KRAS G12R)
FVGFRPVGM

SEQ ID NO: 35675 - protein, 9 aa, synthetic construct
  source 1..9: note = Seed: VVGARGVGK (KRAS G12R)
FVGFRPVGN

SEQ ID NO: 35676 - protein, 9 aa, synthetic construct
  source 1..9: note = Seed: VVGARGVGK (KRAS G12R)
FVGFRPVGQ

SEQ ID NO: 35677 - protein, 9 aa, synthetic construct
  source 1..9: note = Seed: VVGARGVGK (KRAS G12R)
FVGFRPVGR

SEQ ID NO: 35678 - protein, 9 aa, synthetic construct
  source 1..9: note = Seed: VVGARGVGK (KRAS G12R)
FVGFRPVGS

SEQ ID NO: 35679 - protein, 9 aa, synthetic construct
  source 1..9: note = Seed: VVGARGVGK (KRAS G12R)
FVGFRPVGT

SEQ ID NO: 35680 - protein, 9 aa, synthetic construct
  source 1..9: note = Seed: VVGARGVGK (KRAS G12R)
FVGFRPVGV

SEQ ID NO: 35681 - protein, 9 aa, synthetic construct
  source 1..9: note = Seed: VVGARGVGK (KRAS G12R)
FVGFRPVGW

SEQ ID NO: 35682 - protein, 9 aa, synthetic construct
  source 1..9: note = Seed: VVGARGVGK (KRAS G12R)
FVGFRPVGY

SEQ ID NO: 35683 - protein, 9 aa, synthetic construct
  source 1..9: note = Seed: VVGARGVGK (KRAS G12R)
FVGFRQVGL

SEQ ID NO: 35684 - protein, 9 aa, synthetic construct
  source 1..9: note = Seed: VVGARGVGK (KRAS G12R)
FVGFRQVGM

SEQ ID NO: 35685 - protein, 9 aa, synthetic construct
  source 1..9: note = Seed: VVGARGVGK (KRAS G12R)
FVGFRQVGR

SEQ ID NO: 35686 - protein, 9 aa, synthetic construct
  source 1..9: note = Seed: VVGARGVGK (KRAS G12R)
FVGFRRVGA

SEQ ID NO: 35687 - protein, 9 aa, synthetic construct
  source 1..9: note = Seed: VVGARGVGK (KRAS G12R)
FVGFRRVGH

SEQ ID NO: 35688 - protein, 9 aa, synthetic construct
  source 1..9: note = Seed: VVGARGVGK (KRAS G12R)
FVGFRRVGK

SEQ ID NO: 35689 - protein, 9 aa, synthetic construct
  source 1..9: note = Seed: VVGARGVGK (KRAS G12R)
FVGFRRVGL

SEQ ID NO: 35690 - protein, 9 aa, synthetic construct
  source 1..9: note = Seed: VVGARGVGK (KRAS G12R)
FVGFRRVGM

SEQ ID NO: 35691 - protein, 9 aa, synthetic construct
  source 1..9: note = Seed: VVGARGVGK (KRAS G12R)
FVGFRRVGR

SEQ ID NO: 35692 - protein, 9 aa, synthetic construct
  source 1..9: note = Seed: VVGARGVGK (KRAS G12R)
FVGFRRVGS

SEQ ID NO: 35693 - protein, 9 aa, synthetic construct
  source 1..9: note = Seed: VVGARGVGK (KRAS G12R)
FVGFRRVGY

SEQ ID NO: 35694 - protein, 9 aa, synthetic construct
  source 1..9: note = Seed: VVGARGVGK (KRAS G12R)
FVGFRSVGA

SEQ ID NO: 35695 - protein, 9 aa, synthetic construct
  source 1..9: note = Seed: VVGARGVGK (KRAS G12R)
FVGFRSVGC

SEQ ID NO: 35696 - protein, 9 aa, synthetic construct
  source 1..9: note = Seed: VVGARGVGK (KRAS G12R)
FVGFRSVGD

SEQ ID NO: 35697 - protein, 9 aa, synthetic construct
  source 1..9: note = Seed: VVGARGVGK (KRAS G12R)
FVGFRSVGF

SEQ ID NO: 35698 - protein, 9 aa, synthetic construct
  source 1..9: note = Seed: VVGARGVGK (KRAS G12R)
FVGFRSVGG

SEQ ID NO: 35699 - protein, 9 aa, synthetic construct
  source 1..9: note = Seed: VVGARGVGK (KRAS G12R)
FVGFRSVGH

SEQ ID NO: 35700 - protein, 9 aa, synthetic construct
  source 1..9: note = Seed: VVGARGVGK (KRAS G12R)
FVGFRSVGI

SEQ ID NO: 35701 - protein, 9 aa, synthetic construct
  source 1..9: note = Seed: VVGARGVGK (KRAS G12R)
FVGFRSVGK

SEQ ID NO: 35702 - protein, 9 aa, synthetic construct
  source 1..9: note = Seed: VVGARGVGK (KRAS G12R)
FVGFRSVGL

SEQ ID NO: 35703 - protein, 9 aa, synthetic construct
  source 1..9: note = Seed: VVGARGVGK (KRAS G12R)
FVGFRSVGM

SEQ ID NO: 35704 - protein, 9 aa, synthetic construct
  source 1..9: note = Seed: VVGARGVGK (KRAS G12R)
FVGFRSVGN

SEQ ID NO: 35705 - protein, 9 aa, synthetic construct
  source 1..9: note = Seed: VVGARGVGK (KRAS G12R)
FVGFRSVGQ

SEQ ID NO: 35706 - protein, 9 aa, synthetic construct
  source 1..9: note = Seed: VVGARGVGK (KRAS G12R)
FVGFRSVGR

SEQ ID NO: 35707 - protein, 9 aa, synthetic construct
  source 1..9: note = Seed: VVGARGVGK (KRAS G12R)
FVGFRSVGS

SEQ ID NO: 35708 - protein, 9 aa, synthetic construct
  source 1..9: note = Seed: VVGARGVGK (KRAS G12R)
FVGFRSVGT

SEQ ID NO: 35709 - protein, 9 aa, synthetic construct
  source 1..9: note = Seed: VVGARGVGK (KRAS G12R)
FVGFRSVGV

SEQ ID NO: 35710 - protein, 9 aa, synthetic construct
  source 1..9: note = Seed: VVGARGVGK (KRAS G12R)
FVGFRSVGY

SEQ ID NO: 35711 - protein, 9 aa, synthetic construct
  source 1..9: note = Seed: VVGARGVGK (KRAS G12R)
FVGFRTVGA

SEQ ID NO: 35712 - protein, 9 aa, synthetic construct
  source 1..9: note = Seed: VVGARGVGK (KRAS G12R)
FVGFRTVGD

SEQ ID NO: 35713 - protein, 9 aa, synthetic construct
  source 1..9: note = Seed: VVGARGVGK (KRAS G12R)
FVGFRTVGE

SEQ ID NO: 35714 - protein, 9 aa, synthetic construct
  source 1..9: note = Seed: VVGARGVGK (KRAS G12R)
FVGFRTVGF

SEQ ID NO: 35715 - protein, 9 aa, synthetic construct
  source 1..9: note = Seed: VVGARGVGK (KRAS G12R)
FVGFRTVGG

SEQ ID NO: 35716 - protein, 9 aa, synthetic construct
  source 1..9: note = Seed: VVGARGVGK (KRAS G12R)
FVGFRTVGH

SEQ ID NO: 35717 - protein, 9 aa, synthetic construct
  source 1..9: note = Seed: VVGARGVGK (KRAS G12R)
FVGFRTVGI

SEQ ID NO: 35718 - protein, 9 aa, synthetic construct
  source 1..9: note = Seed: VVGARGVGK (KRAS G12R)
FVGFRTVGL

SEQ ID NO: 35719 - protein, 9 aa, synthetic construct
  source 1..9: note = Seed: VVGARGVGK (KRAS G12R)
FVGFRTVGM

SEQ ID NO: 35720 - protein, 9 aa, synthetic construct
  source 1..9: note = Seed: VVGARGVGK (KRAS G12R)
FVGFRTVGN

SEQ ID NO: 35721 - protein, 9 aa, synthetic construct
  source 1..9: note = Seed: VVGARGVGK (KRAS G12R)
FVGFRTVGQ

SEQ ID NO: 35722 - protein, 9 aa, synthetic construct
  source 1..9: note = Seed: VVGARGVGK (KRAS G12R)
FVGFRTVGR

SEQ ID NO: 35723 - protein, 9 aa, synthetic construct
  source 1..9: note = Seed: VVGARGVGK (KRAS G12R)
FVGFRTVGS

SEQ ID NO: 35724 - protein, 9 aa, synthetic construct
  source 1..9: note = Seed: VVGARGVGK (KRAS G12R)
FVGFRTVGV

SEQ ID NO: 35725 - protein, 9 aa, synthetic construct
  source 1..9: note = Seed: VVGARGVGK (KRAS G12R)
FVGFRTVGY

SEQ ID NO: 35726 - protein, 9 aa, synthetic construct
  source 1..9: note = Seed: VVGARGVGK (KRAS G12R)
FVGFRVVGD

SEQ ID NO: 35727 - protein, 9 aa, synthetic construct
  source 1..9: note = Seed: VVGARGVGK (KRAS G12R)
FVGFRVVGH

SEQ ID NO: 35728 - protein, 9 aa, synthetic construct
  source 1..9: note = Seed: VVGARGVGK (KRAS G12R)
FVGFRVVGL

SEQ ID NO: 35729 - protein, 9 aa, synthetic construct
  source 1..9: note = Seed: VVGARGVGK (KRAS G12R)
FVGFRVVGM

SEQ ID NO: 35730 - protein, 9 aa, synthetic construct
  source 1..9: note = Seed: VVGARGVGK (KRAS G12R)
FVGFRVVGN

SEQ ID NO: 35731 - protein, 9 aa, synthetic construct
  source 1..9: note = Seed: VVGARGVGK (KRAS G12R)
FVGFRVVGQ

SEQ ID NO: 35732 - protein, 9 aa, synthetic construct
  source 1..9: note = Seed: VVGARGVGK (KRAS G12R)
FVGGRAVGA

SEQ ID NO: 35733 - protein, 9 aa, synthetic construct
  source 1..9: note = Seed: VVGARGVGK (KRAS G12R)
FVGGRAVGC

SEQ ID NO: 35734 - protein, 9 aa, synthetic construct
  source 1..9: note = Seed: VVGARGVGK (KRAS G12R)
FVGGRAVGD

SEQ ID NO: 35735 - protein, 9 aa, synthetic construct
  source 1..9: note = Seed: VVGARGVGK (KRAS G12R)
FVGGRAVGE

SEQ ID NO: 35736 - protein, 9 aa, synthetic construct
  source 1..9: note = Seed: VVGARGVGK (KRAS G12R)
FVGGRAVGF

SEQ ID NO: 35737 - protein, 9 aa, synthetic construct
  source 1..9: note = Seed: VVGARGVGK (KRAS G12R)
FVGGRAVGG

SEQ ID NO: 35738 - protein, 9 aa, synthetic construct
  source 1..9: note = Seed: VVGARGVGK (KRAS G12R)
FVGGRAVGH

SEQ ID NO: 35739 - protein, 9 aa, synthetic construct
  source 1..9: note = Seed: VVGARGVGK (KRAS G12R)
FVGGRAVGI

SEQ ID NO: 35740 - protein, 9 aa, synthetic construct
  source 1..9: note = Seed: VVGARGVGK (KRAS G12R)
FVGGRAVGK

SEQ ID NO: 35741 - protein, 9 aa, synthetic construct
  source 1..9: note = Seed: VVGARGVGK (KRAS G12R)
FVGGRAVGL

SEQ ID NO: 35742 - protein, 9 aa, synthetic construct
  source 1..9: note = Seed: VVGARGVGK (KRAS G12R)
FVGGRAVGM

SEQ ID NO: 35743 - protein, 9 aa, synthetic construct
  source 1..9: note = Seed: VVGARGVGK (KRAS G12R)
FVGGRAVGN

SEQ ID NO: 35744 - protein, 9 aa, synthetic construct
  source 1..9: note = Seed: VVGARGVGK (KRAS G12R)
FVGGRAVGP

SEQ ID NO: 35745 - protein, 9 aa, synthetic construct
  source 1..9: note = Seed: VVGARGVGK (KRAS G12R)
FVGGRAVGQ

SEQ ID NO: 35746 - protein, 9 aa, synthetic construct
  source 1..9: note = Seed: VVGARGVGK (KRAS G12R)
FVGGRAVGR

SEQ ID NO: 35747 - protein, 9 aa, synthetic construct
  source 1..9: note = Seed: VVGARGVGK (KRAS G12R)
FVGGRAVGS

SEQ ID NO: 35748 - protein, 9 aa, synthetic construct
  source 1..9: note = Seed: VVGARGVGK (KRAS G12R)
FVGGRAVGT

SEQ ID NO: 35749 - protein, 9 aa, synthetic construct
  source 1..9: note = Seed: VVGARGVGK (KRAS G12R)
FVGGRAVGV

SEQ ID NO: 35750 - protein, 9 aa, synthetic construct
  source 1..9: note = Seed: VVGARGVGK (KRAS G12R)
FVGGRAVGW

SEQ ID NO: 35751 - protein, 9 aa, synthetic construct
  source 1..9: note = Seed: VVGARGVGK (KRAS G12R)
FVGGRAVGY

SEQ ID NO: 35752 - protein, 9 aa, synthetic construct
  source 1..9: note = Seed: VVGARGVGK (KRAS G12R)
FVGGRCVGA

SEQ ID NO: 35753 - protein, 9 aa, synthetic construct
  source 1..9: note = Seed: VVGARGVGK (KRAS G12R)
FVGGRCVGI

SEQ ID NO: 35754 - protein, 9 aa, synthetic construct
  source 1..9: note = Seed: VVGARGVGK (KRAS G12R)
FVGGRCVGL

SEQ ID NO: 35755 - protein, 9 aa, synthetic construct
  source 1..9: note = Seed: VVGARGVGK (KRAS G12R)
FVGGRCVGS

SEQ ID NO: 35756 - protein, 9 aa, synthetic construct
  source 1..9: note = Seed: VVGARGVGK (KRAS G12R)
FVGGRCVGV

SEQ ID NO: 35757 - protein, 9 aa, synthetic construct
  source 1..9: note = Seed: VVGARGVGK (KRAS G12R)
FVGGREVGL

SEQ ID NO: 35758 - protein, 9 aa, synthetic construct
  source 1..9: note = Seed: VVGARGVGK (KRAS G12R)
FVGGREVGV

SEQ ID NO: 35759 - protein, 9 aa, synthetic construct
  source 1..9: note = Seed: VVGARGVGK (KRAS G12R)
FVGGRGVGA

SEQ ID NO: 35760 - protein, 9 aa, synthetic construct
  source 1..9: note = Seed: VVGARGVGK (KRAS G12R)
FVGGRGVGF

SEQ ID NO: 35761 - protein, 9 aa, synthetic construct
  source 1..9: note = Seed: VVGARGVGK (KRAS G12R)
FVGGRGVGG

SEQ ID NO: 35762 - protein, 9 aa, synthetic construct
  source 1..9: note = Seed: VVGARGVGK (KRAS G12R)
FVGGRGVGI

SEQ ID NO: 35763 - protein, 9 aa, synthetic construct
  source 1..9: note = Seed: VVGARGVGK (KRAS G12R)
FVGGRGVGL

SEQ ID NO: 35764 - protein, 9 aa, synthetic construct
  source 1..9: note = Seed: VVGARGVGK (KRAS G12R)
FVGGRGVGM

SEQ ID NO: 35765 - protein, 9 aa, synthetic construct
  source 1..9: note = Seed: VVGARGVGK (KRAS G12R)
FVGGRGVGN

SEQ ID NO: 35766 - protein, 9 aa, synthetic construct
  source 1..9: note = Seed: VVGARGVGK (KRAS G12R)
FVGGRGVGQ

SEQ ID NO: 35767 - protein, 9 aa, synthetic construct
  source 1..9: note = Seed: VVGARGVGK (KRAS G12R)
FVGGRGVGS

SEQ ID NO: 35768 - protein, 9 aa, synthetic construct
  source 1..9: note = Seed: VVGARGVGK (KRAS G12R)
FVGGRGVGT

SEQ ID NO: 35769 - protein, 9 aa, synthetic construct
  source 1..9: note = Seed: VVGARGVGK (KRAS G12R)
FVGGRGVGV

SEQ ID NO: 35770 - protein, 9 aa, synthetic construct
  source 1..9: note = Seed: VVGARGVGK (KRAS G12R)
FVGGRGVGY

SEQ ID NO: 35771 - protein, 9 aa, synthetic construct
  source 1..9: note = Seed: VVGARGVGK (KRAS G12R)
FVGGRHVGA

SEQ ID NO: 35772 - protein, 9 aa, synthetic construct
  source 1..9: note = Seed: VVGARGVGK (KRAS G12R)
FVGGRHVGF

SEQ ID NO: 35773 - protein, 9 aa, synthetic construct
  source 1..9: note = Seed: VVGARGVGK (KRAS G12R)
FVGGRHVGI

SEQ ID NO: 35774 - protein, 9 aa, synthetic construct
  source 1..9: note = Seed: VVGARGVGK (KRAS G12R)
FVGGRHVGL

SEQ ID NO: 35775 - protein, 9 aa, synthetic construct
  source 1..9: note = Seed: VVGARGVGK (KRAS G12R)
FVGGRHVGM

SEQ ID NO: 35776 - protein, 9 aa, synthetic construct
  source 1..9: note = Seed: VVGARGVGK (KRAS G12R)
FVGGRHVGN

SEQ ID NO: 35777 - protein, 9 aa, synthetic construct
  source 1..9: note = Seed: VVGARGVGK (KRAS G12R)
FVGGRHVGS

SEQ ID NO: 35778 - protein, 9 aa, synthetic construct
  source 1..9: note = Seed: VVGARGVGK (KRAS G12R)
FVGGRHVGT

SEQ ID NO: 35779 - protein, 9 aa, synthetic construct
  source 1..9: note = Seed: VVGARGVGK (KRAS G12R)
FVGGRHVGV

SEQ ID NO: 35780 - protein, 9 aa, synthetic construct
  source 1..9: note = Seed: VVGARGVGK (KRAS G12R)
FVGGRHVGY

SEQ ID NO: 35781 - protein, 9 aa, synthetic construct
  source 1..9: note = Seed: VVGARGVGK (KRAS G12R)
FVGGRIVGA

SEQ ID NO: 35782 - protein, 9 aa, synthetic construct
  source 1..9: note = Seed: VVGARGVGK (KRAS G12R)
FVGGRIVGC

SEQ ID NO: 35783 - protein, 9 aa, synthetic construct
  source 1..9: note = Seed: VVGARGVGK (KRAS G12R)
FVGGRIVGD

SEQ ID NO: 35784 - protein, 9 aa, synthetic construct
  source 1..9: note = Seed: VVGARGVGK (KRAS G12R)
FVGGRIVGE

SEQ ID NO: 35785 - protein, 9 aa, synthetic construct
  source 1..9: note = Seed: VVGARGVGK (KRAS G12R)
FVGGRIVGF

SEQ ID NO: 35786 - protein, 9 aa, synthetic construct
  source 1..9: note = Seed: VVGARGVGK (KRAS G12R)
FVGGRIVGG

SEQ ID NO: 35787 - protein, 9 aa, synthetic construct
  source 1..9: note = Seed: VVGARGVGK (KRAS G12R)
FVGGRIVGH

SEQ ID NO: 35788 - protein, 9 aa, synthetic construct
  source 1..9: note = Seed: VVGARGVGK (KRAS G12R)
FVGGRIVGI

SEQ ID NO: 35789 - protein, 9 aa, synthetic construct
  source 1..9: note = Seed: VVGARGVGK (KRAS G12R)
FVGGRIVGL

SEQ ID NO: 35790 - protein, 9 aa, synthetic construct
  source 1..9: note = Seed: VVGARGVGK (KRAS G12R)
FVGGRIVGM

SEQ ID NO: 35791 - protein, 9 aa, synthetic construct
  source 1..9: note = Seed: VVGARGVGK (KRAS G12R)
FVGGRIVGN

SEQ ID NO: 35792 - protein, 9 aa, synthetic construct
  source 1..9: note = Seed: VVGARGVGK (KRAS G12R)
FVGGRIVGP

SEQ ID NO: 35793 - protein, 9 aa, synthetic construct
  source 1..9: note = Seed: VVGARGVGK (KRAS G12R)
FVGGRIVGQ

SEQ ID NO: 35794 - protein, 9 aa, synthetic construct
  source 1..9: note = Seed: VVGARGVGK (KRAS G12R)
FVGGRIVGR

SEQ ID NO: 35795 - protein, 9 aa, synthetic construct
  source 1..9: note = Seed: VVGARGVGK (KRAS G12R)
FVGGRIVGS

SEQ ID NO: 35796 - protein, 9 aa, synthetic construct
  source 1..9: note = Seed: VVGARGVGK (KRAS G12R)
FVGGRIVGT

SEQ ID NO: 35797 - protein, 9 aa, synthetic construct
  source 1..9: note = Seed: VVGARGVGK (KRAS G12R)
FVGGRIVGV

SEQ ID NO: 35798 - protein, 9 aa, synthetic construct
  source 1..9: note = Seed: VVGARGVGK (KRAS G12R)
FVGGRIVGY

SEQ ID NO: 35799 - protein, 9 aa, synthetic construct
  source 1..9: note = Seed: VVGARGVGK (KRAS G12R)
FVGGRKVGA

SEQ ID NO: 35800 - protein, 9 aa, synthetic construct
  source 1..9: note = Seed: VVGARGVGK (KRAS G12R)
FVGGRKVGF

SEQ ID NO: 35801 - protein, 9 aa, synthetic construct
  source 1..9: note = Seed: VVGARGVGK (KRAS G12R)
FVGGRKVGG

SEQ ID NO: 35802 - protein, 9 aa, synthetic construct
  source 1..9: note = Seed: VVGARGVGK (KRAS G12R)
FVGGRKVGI

SEQ ID NO: 35803 - protein, 9 aa, synthetic construct
  source 1..9: note = Seed: VVGARGVGK (KRAS G12R)
FVGGRKVGL

SEQ ID NO: 35804 - protein, 9 aa, synthetic construct
  source 1..9: note = Seed: VVGARGVGK (KRAS G12R)
FVGGRKVGM

SEQ ID NO: 35805 - protein, 9 aa, synthetic construct
  source 1..9: note = Seed: VVGARGVGK (KRAS G12R)
FVGGRKVGN

SEQ ID NO: 35806 - protein, 9 aa, synthetic construct
  source 1..9: note = Seed: VVGARGVGK (KRAS G12R)
FVGGRKVGQ

SEQ ID NO: 35807 - protein, 9 aa, synthetic construct
  source 1..9: note = Seed: VVGARGVGK (KRAS G12R)
FVGGRKVGS

SEQ ID NO: 35808 - protein, 9 aa, synthetic construct
  source 1..9: note = Seed: VVGARGVGK (KRAS G12R)
FVGGRKVGT

SEQ ID NO: 35809 - protein, 9 aa, synthetic construct
  source 1..9: note = Seed: VVGARGVGK (KRAS G12R)
FVGGRKVGV

SEQ ID NO: 35810 - protein, 9 aa, synthetic construct
  source 1..9: note = Seed: VVGARGVGK (KRAS G12R)
FVGGRKVGY

SEQ ID NO: 35811 - protein, 9 aa, synthetic construct
  source 1..9: note = Seed: VVGARGVGK (KRAS G12R)
FVGGRLVGA

SEQ ID NO: 35812 - protein, 9 aa, synthetic construct
  source 1..9: note = Seed: VVGARGVGK (KRAS G12R)
FVGGRLVGF

SEQ ID NO: 35813 - protein, 9 aa, synthetic construct
  source 1..9: note = Seed: VVGARGVGK (KRAS G12R)
FVGGRLVGG

SEQ ID NO: 35814 - protein, 9 aa, synthetic construct
  source 1..9: note = Seed: VVGARGVGK (KRAS G12R)
FVGGRLVGI

SEQ ID NO: 35815 - protein, 9 aa, synthetic construct
  source 1..9: note = Seed: VVGARGVGK (KRAS G12R)
FVGGRLVGL

SEQ ID NO: 35816 - protein, 9 aa, synthetic construct
  source 1..9: note = Seed: VVGARGVGK (KRAS G12R)
FVGGRLVGM

SEQ ID NO: 35817 - protein, 9 aa, synthetic construct
  source 1..9: note = Seed: VVGARGVGK (KRAS G12R)
FVGGRLVGN

SEQ ID NO: 35818 - protein, 9 aa, synthetic construct
  source 1..9: note = Seed: VVGARGVGK (KRAS G12R)
FVGGRLVGS

SEQ ID NO: 35819 - protein, 9 aa, synthetic construct
  source 1..9: note = Seed: VVGARGVGK (KRAS G12R)
FVGGRLVGT

SEQ ID NO: 35820 - protein, 9 aa, synthetic construct
  source 1..9: note = Seed: VVGARGVGK (KRAS G12R)
FVGGRLVGV

SEQ ID NO: 35821 - protein, 9 aa, synthetic construct
  source 1..9: note = Seed: VVGARGVGK (KRAS G12R)
FVGGRLVGY

SEQ ID NO: 35822 - protein, 9 aa, synthetic construct
  source 1..9: note = Seed: VVGARGVGK (KRAS G12R)
FVGGRMVGA

SEQ ID NO: 35823 - protein, 9 aa, synthetic construct
  source 1..9: note = Seed: VVGARGVGK (KRAS G12R)
FVGGRMVGF

SEQ ID NO: 35824 - protein, 9 aa, synthetic construct
  source 1..9: note = Seed: VVGARGVGK (KRAS G12R)
FVGGRMVGG

SEQ ID NO: 35825 - protein, 9 aa, synthetic construct
  source 1..9: note = Seed: VVGARGVGK (KRAS G12R)
FVGGRMVGI

SEQ ID NO: 35826 - protein, 9 aa, synthetic construct
  source 1..9: note = Seed: VVGARGVGK (KRAS G12R)
FVGGRMVGL

SEQ ID NO: 35827 - protein, 9 aa, synthetic construct
  source 1..9: note = Seed: VVGARGVGK (KRAS G12R)
FVGGRMVGM

SEQ ID NO: 35828 - protein, 9 aa, synthetic construct
  source 1..9: note = Seed: VVGARGVGK (KRAS G12R)
FVGGRMVGN

SEQ ID NO: 35829 - protein, 9 aa, synthetic construct
  source 1..9: note = Seed: VVGARGVGK (KRAS G12R)
FVGGRMVGS

SEQ ID NO: 35830 - protein, 9 aa, synthetic construct
  source 1..9: note = Seed: VVGARGVGK (KRAS G12R)
FVGGRMVGT

SEQ ID NO: 35831 - protein, 9 aa, synthetic construct
  source 1..9: note = Seed: VVGARGVGK (KRAS G12R)
FVGGRMVGV

SEQ ID NO: 35832 - protein, 9 aa, synthetic construct
  source 1..9: note = Seed: VVGARGVGK (KRAS G12R)
FVGGRNVGA

SEQ ID NO: 35833 - protein, 9 aa, synthetic construct
  source 1..9: note = Seed: VVGARGVGK (KRAS G12R)
FVGGRNVGF

SEQ ID NO: 35834 - protein, 9 aa, synthetic construct
  source 1..9: note = Seed: VVGARGVGK (KRAS G12R)
FVGGRNVGG

SEQ ID NO: 35835 - protein, 9 aa, synthetic construct
  source 1..9: note = Seed: VVGARGVGK (KRAS G12R)
FVGGRNVGI

SEQ ID NO: 35836 - protein, 9 aa, synthetic construct
  source 1..9: note = Seed: VVGARGVGK (KRAS G12R)
FVGGRNVGL

SEQ ID NO: 35837 - protein, 9 aa, synthetic construct
  source 1..9: note = Seed: VVGARGVGK (KRAS G12R)
FVGGRNVGM

SEQ ID NO: 35838 - protein, 9 aa, synthetic construct
  source 1..9: note = Seed: VVGARGVGK (KRAS G12R)
FVGGRNVGN

SEQ ID NO: 35839 - protein, 9 aa, synthetic construct
  source 1..9: note = Seed: VVGARGVGK (KRAS G12R)
FVGGRNVGS

SEQ ID NO: 35840 - protein, 9 aa, synthetic construct
  source 1..9: note = Seed: VVGARGVGK (KRAS G12R)
FVGGRNVGT

SEQ ID NO: 35841 - protein, 9 aa, synthetic construct
  source 1..9: note = Seed: VVGARGVGK (KRAS G12R)
FVGGRNVGV

SEQ ID NO: 35842 - protein, 9 aa, synthetic construct
  source 1..9: note = Seed: VVGARGVGK (KRAS G12R)
FVGGRNVGY

SEQ ID NO: 35843 - protein, 9 aa, synthetic construct
  source 1..9: note = Seed: VVGARGVGK (KRAS G12R)
FVGGRPVGA

SEQ ID NO: 35844 - protein, 9 aa, synthetic construct
  source 1..9: note = Seed: VVGARGVGK (KRAS G12R)
FVGGRPVGC

SEQ ID NO: 35845 - protein, 9 aa, synthetic construct
  source 1..9: note = Seed: VVGARGVGK (KRAS G12R)
FVGGRPVGD

SEQ ID NO: 35846 - protein, 9 aa, synthetic construct
  source 1..9: note = Seed: VVGARGVGK (KRAS G12R)
FVGGRPVGE

SEQ ID NO: 35847 - protein, 9 aa, synthetic construct
  source 1..9: note = Seed: VVGARGVGK (KRAS G12R)
FVGGRPVGF

SEQ ID NO: 35848 - protein, 9 aa, synthetic construct
  source 1..9: note = Seed: VVGARGVGK (KRAS G12R)
FVGGRPVGG

SEQ ID NO: 35849 - protein, 9 aa, synthetic construct
  source 1..9: note = Seed: VVGARGVGK (KRAS G12R)
FVGGRPVGH

SEQ ID NO: 35850 - protein, 9 aa, synthetic construct
  source 1..9: note = Seed: VVGARGVGK (KRAS G12R)
FVGGRPVGI

SEQ ID NO: 35851 - protein, 9 aa, synthetic construct
  source 1..9: note = Seed: VVGARGVGK (KRAS G12R)
FVGGRPVGK

SEQ ID NO: 35852 - protein, 9 aa, synthetic construct
  source 1..9: note = Seed: VVGARGVGK (KRAS G12R)
FVGGRPVGL

SEQ ID NO: 35853 - protein, 9 aa, synthetic construct
  source 1..9: note = Seed: VVGARGVGK (KRAS G12R)
FVGGRPVGM

SEQ ID NO: 35854 - protein, 9 aa, synthetic construct
  source 1..9: note = Seed: VVGARGVGK (KRAS G12R)
FVGGRPVGN

SEQ ID NO: 35855 - protein, 9 aa, synthetic construct
  source 1..9: note = Seed: VVGARGVGK (KRAS G12R)
FVGGRPVGP

SEQ ID NO: 35856 - protein, 9 aa, synthetic construct
  source 1..9: note = Seed: VVGARGVGK (KRAS G12R)
FVGGRPVGQ

SEQ ID NO: 35857 - protein, 9 aa, synthetic construct
  source 1..9: note = Seed: VVGARGVGK (KRAS G12R)
FVGGRPVGR

SEQ ID NO: 35858 - protein, 9 aa, synthetic construct
  source 1..9: note = Seed: VVGARGVGK (KRAS G12R)
FVGGRPVGS

SEQ ID NO: 35859 - protein, 9 aa, synthetic construct
  source 1..9: note = Seed: VVGARGVGK (KRAS G12R)
FVGGRPVGT

SEQ ID NO: 35860 - protein, 9 aa, synthetic construct
  source 1..9: note = Seed: VVGARGVGK (KRAS G12R)
FVGGRPVGV

SEQ ID NO: 35861 - protein, 9 aa, synthetic construct
  source 1..9: note = Seed: VVGARGVGK (KRAS G12R)
FVGGRPVGW

SEQ ID NO: 35862 - protein, 9 aa, synthetic construct
  source 1..9: note = Seed: VVGARGVGK (KRAS G12R)
FVGGRPVGY

SEQ ID NO: 35863 - protein, 9 aa, synthetic construct
  source 1..9: note = Seed: VVGARGVGK (KRAS G12R)
FVGGRQVGA

SEQ ID NO: 35864 - protein, 9 aa, synthetic construct
  source 1..9: note = Seed: VVGARGVGK (KRAS G12R)
FVGGRQVGI

SEQ ID NO: 35865 - protein, 9 aa, synthetic construct
  source 1..9: note = Seed: VVGARGVGK (KRAS G12R)
FVGGRQVGL

SEQ ID NO: 35866 - protein, 9 aa, synthetic construct
  source 1..9: note = Seed: VVGARGVGK (KRAS G12R)
FVGGRQVGM

SEQ ID NO: 35867 - protein, 9 aa, synthetic construct
  source 1..9: note = Seed: VVGARGVGK (KRAS G12R)
FVGGRQVGV

SEQ ID NO: 35868 - protein, 9 aa, synthetic construct
  source 1..9: note = Seed: VVGARGVGK (KRAS G12R)
FVGGRRVGA

SEQ ID NO: 35869 - protein, 9 aa, synthetic construct
  source 1..9: note = Seed: VVGARGVGK (KRAS G12R)
FVGGRRVGF

SEQ ID NO: 35870 - protein, 9 aa, synthetic construct
  source 1..9: note = Seed: VVGARGVGK (KRAS G12R)
FVGGRRVGG

SEQ ID NO: 35871 - protein, 9 aa, synthetic construct
  source 1..9: note = Seed: VVGARGVGK (KRAS G12R)
FVGGRRVGI

SEQ ID NO: 35872 - protein, 9 aa, synthetic construct
  source 1..9: note = Seed: VVGARGVGK (KRAS G12R)
FVGGRRVGL

SEQ ID NO: 35873 - protein, 9 aa, synthetic construct
  source 1..9: note = Seed: VVGARGVGK (KRAS G12R)
FVGGRRVGM

SEQ ID NO: 35874 - protein, 9 aa, synthetic construct
  source 1..9: note = Seed: VVGARGVGK (KRAS G12R)
FVGGRRVGN

SEQ ID NO: 35875 - protein, 9 aa, synthetic construct
  source 1..9: note = Seed: VVGARGVGK (KRAS G12R)
FVGGRRVGR

SEQ ID NO: 35876 - protein, 9 aa, synthetic construct
  source 1..9: note = Seed: VVGARGVGK (KRAS G12R)
FVGGRRVGS

SEQ ID NO: 35877 - protein, 9 aa, synthetic construct
  source 1..9: note = Seed: VVGARGVGK (KRAS G12R)
FVGGRRVGT

SEQ ID NO: 35878 - protein, 9 aa, synthetic construct
  source 1..9: note = Seed: VVGARGVGK (KRAS G12R)
FVGGRRVGV

SEQ ID NO: 35879 - protein, 9 aa, synthetic construct
  source 1..9: note = Seed: VVGARGVGK (KRAS G12R)
FVGGRRVGY

SEQ ID NO: 35880 - protein, 9 aa, synthetic construct
  source 1..9: note = Seed: VVGARGVGK (KRAS G12R)
FVGGRSVGA

SEQ ID NO: 35881 - protein, 9 aa, synthetic construct
  source 1..9: note = Seed: VVGARGVGK (KRAS G12R)
FVGGRSVGC

SEQ ID NO: 35882 - protein, 9 aa, synthetic construct
  source 1..9: note = Seed: VVGARGVGK (KRAS G12R)
FVGGRSVGF

SEQ ID NO: 35883 - protein, 9 aa, synthetic construct
  source 1..9: note = Seed: VVGARGVGK (KRAS G12R)
FVGGRSVGG

SEQ ID NO: 35884 - protein, 9 aa, synthetic construct
  source 1..9: note = Seed: VVGARGVGK (KRAS G12R)
FVGGRSVGH

SEQ ID NO: 35885 - protein, 9 aa, synthetic construct
  source 1..9: note = Seed: VVGARGVGK (KRAS G12R)
FVGGRSVGI

SEQ ID NO: 35886 - protein, 9 aa, synthetic construct
  source 1..9: note = Seed: VVGARGVGK (KRAS G12R)
FVGGRSVGK

SEQ ID NO: 35887 - protein, 9 aa, synthetic construct
  source 1..9: note = Seed: VVGARGVGK (KRAS G12R)
FVGGRSVGL

SEQ ID NO: 35888 - protein, 9 aa, synthetic construct
  source 1..9: note = Seed: VVGARGVGK (KRAS G12R)
FVGGRSVGM

SEQ ID NO: 35889 - protein, 9 aa, synthetic construct
  source 1..9: note = Seed: VVGARGVGK (KRAS G12R)
FVGGRSVGN

SEQ ID NO: 35890 - protein, 9 aa, synthetic construct
  source 1..9: note = Seed: VVGARGVGK (KRAS G12R)
FVGGRSVGP

SEQ ID NO: 35891 - protein, 9 aa, synthetic construct
  source 1..9: note = Seed: VVGARGVGK (KRAS G12R)
FVGGRSVGQ

SEQ ID NO: 35892 - protein, 9 aa, synthetic construct
  source 1..9: note = Seed: VVGARGVGK (KRAS G12R)
FVGGRSVGR

SEQ ID NO: 35893 - protein, 9 aa, synthetic construct
  source 1..9: note = Seed: VVGARGVGK (KRAS G12R)
FVGGRSVGS

SEQ ID NO: 35894 - protein, 9 aa, synthetic construct
  source 1..9: note = Seed: VVGARGVGK (KRAS G12R)
FVGGRSVGT

SEQ ID NO: 35895 - protein, 9 aa, synthetic construct
  source 1..9: note = Seed: VVGARGVGK (KRAS G12R)
FVGGRSVGV

SEQ ID NO: 35896 - protein, 9 aa, synthetic construct
  source 1..9: note = Seed: VVGARGVGK (KRAS G12R)
FVGGRSVGW

SEQ ID NO: 35897 - protein, 9 aa, synthetic construct
  source 1..9: note = Seed: VVGARGVGK (KRAS G12R)
FVGGRSVGY

SEQ ID NO: 35898 - protein, 9 aa, synthetic construct
  source 1..9: note = Seed: VVGARGVGK (KRAS G12R)
FVGGRTVGA

SEQ ID NO: 35899 - protein, 9 aa, synthetic construct
  source 1..9: note = Seed: VVGARGVGK (KRAS G12R)
FVGGRTVGF

SEQ ID NO: 35900 - protein, 9 aa, synthetic construct
  source 1..9: note = Seed: VVGARGVGK (KRAS G12R)
FVGGRTVGG

SEQ ID NO: 35901 - protein, 9 aa, synthetic construct
  source 1..9: note = Seed: VVGARGVGK (KRAS G12R)
FVGGRTVGH

SEQ ID NO: 35902 - protein, 9 aa, synthetic construct
  source 1..9: note = Seed: VVGARGVGK (KRAS G12R)
FVGGRTVGI

SEQ ID NO: 35903 - protein, 9 aa, synthetic construct
  source 1..9: note = Seed: VVGARGVGK (KRAS G12R)
FVGGRTVGK

SEQ ID NO: 35904 - protein, 9 aa, synthetic construct
  source 1..9: note = Seed: VVGARGVGK (KRAS G12R)
FVGGRTVGL

SEQ ID NO: 35905 - protein, 9 aa, synthetic construct
  source 1..9: note = Seed: VVGARGVGK (KRAS G12R)
FVGGRTVGM

SEQ ID NO: 35906 - protein, 9 aa, synthetic construct
  source 1..9: note = Seed: VVGARGVGK (KRAS G12R)
FVGGRTVGN

SEQ ID NO: 35907 - protein, 9 aa, synthetic construct
  source 1..9: note = Seed: VVGARGVGK (KRAS G12R)
FVGGRTVGQ

SEQ ID NO: 35908 - protein, 9 aa, synthetic construct
  source 1..9: note = Seed: VVGARGVGK (KRAS G12R)
FVGGRTVGR

SEQ ID NO: 35909 - protein, 9 aa, synthetic construct
  source 1..9: note = Seed: VVGARGVGK (KRAS G12R)
FVGGRTVGS

SEQ ID NO: 35910 - protein, 9 aa, synthetic construct
  source 1..9: note = Seed: VVGARGVGK (KRAS G12R)
FVGGRTVGT

SEQ ID NO: 35911 - protein, 9 aa, synthetic construct
  source 1..9: note = Seed: VVGARGVGK (KRAS G12R)
FVGGRTVGV

SEQ ID NO: 35912 - protein, 9 aa, synthetic construct
  source 1..9: note = Seed: VVGARGVGK (KRAS G12R)
FVGGRTVGY

SEQ ID NO: 35913 - protein, 9 aa, synthetic construct
  source 1..9: note = Seed: VVGARGVGK (KRAS G12R)
FVGGRVVGA

SEQ ID NO: 35914 - protein, 9 aa, synthetic construct
  source 1..9: note = Seed: VVGARGVGK (KRAS G12R)
FVGGRVVGC

SEQ ID NO: 35915 - protein, 9 aa, synthetic construct
  source 1..9: note = Seed: VVGARGVGK (KRAS G12R)
FVGGRVVGD

SEQ ID NO: 35916 - protein, 9 aa, synthetic construct
  source 1..9: note = Seed: VVGARGVGK (KRAS G12R)
FVGGRVVGE

SEQ ID NO: 35917 - protein, 9 aa, synthetic construct
  source 1..9: note = Seed: VVGARGVGK (KRAS G12R)
FVGGRVVGF

SEQ ID NO: 35918 - protein, 9 aa, synthetic construct
  source 1..9: note = Seed: VVGARGVGK (KRAS G12R)
FVGGRVVGG

SEQ ID NO: 35919 - protein, 9 aa, synthetic construct
  source 1..9: note = Seed: VVGARGVGK (KRAS G12R)
FVGGRVVGH

SEQ ID NO: 35920 - protein, 9 aa, synthetic construct
  source 1..9: note = Seed: VVGARGVGK (KRAS G12R)
FVGGRVVGI

SEQ ID NO: 35921 - protein, 9 aa, synthetic construct
  source 1..9: note = Seed: VVGARGVGK (KRAS G12R)
FVGGRVVGK

SEQ ID NO: 35922 - protein, 9 aa, synthetic construct
  source 1..9: note = Seed: VVGARGVGK (KRAS G12R)
FVGGRVVGL

SEQ ID NO: 35923 - protein, 9 aa, synthetic construct
  source 1..9: note = Seed: VVGARGVGK (KRAS G12R)
FVGGRVVGM

SEQ ID NO: 35924 - protein, 9 aa, synthetic construct
  source 1..9: note = Seed: VVGARGVGK (KRAS G12R)
FVGGRVVGN

SEQ ID NO: 35925 - protein, 9 aa, synthetic construct
  source 1..9: note = Seed: VVGARGVGK (KRAS G12R)
FVGGRVVGP

SEQ ID NO: 35926 - protein, 9 aa, synthetic construct
  source 1..9: note = Seed: VVGARGVGK (KRAS G12R)
FVGGRVVGQ

SEQ ID NO: 35927 - protein, 9 aa, synthetic construct
  source 1..9: note = Seed: VVGARGVGK (KRAS G12R)
FVGGRVVGR

SEQ ID NO: 35928 - protein, 9 aa, synthetic construct
  source 1..9: note = Seed: VVGARGVGK (KRAS G12R)
FVGGRVVGS

SEQ ID NO: 35929 - protein, 9 aa, synthetic construct
  source 1..9: note = Seed: VVGARGVGK (KRAS G12R)
FVGGRVVGT

SEQ ID NO: 35930 - protein, 9 aa, synthetic construct
  source 1..9: note = Seed: VVGARGVGK (KRAS G12R)
FVGGRVVGV

SEQ ID NO: 35931 - protein, 9 aa, synthetic construct
  source 1..9: note = Seed: VVGARGVGK (KRAS G12R)
FVGGRVVGY

SEQ ID NO: 35932 - protein, 9 aa, synthetic construct
  source 1..9: note = Seed: VVGARGVGK (KRAS G12R)
FVGGRYVGA

SEQ ID NO: 35933 - protein, 9 aa, synthetic construct
  source 1..9: note = Seed: VVGARGVGK (KRAS G12R)
FVGGRYVGI

SEQ ID NO: 35934 - protein, 9 aa, synthetic construct
  source 1..9: note = Seed: VVGARGVGK (KRAS G12R)
FVGGRYVGL

SEQ ID NO: 35935 - protein, 9 aa, synthetic construct
  source 1..9: note = Seed: VVGARGVGK (KRAS G12R)
FVGGRYVGV

SEQ ID NO: 35936 - protein, 9 aa, synthetic construct
  source 1..9: note = Seed: VVGARGVGK (KRAS G12R)
FVGHRAVGA

SEQ ID NO: 35937 - protein, 9 aa, synthetic construct
  source 1..9: note = Seed: VVGARGVGK (KRAS G12R)
FVGHRAVGC

SEQ ID NO: 35938 - protein, 9 aa, synthetic construct
  source 1..9: note = Seed: VVGARGVGK (KRAS G12R)
FVGHRAVGF

SEQ ID NO: 35939 - protein, 9 aa, synthetic construct
  source 1..9: note = Seed: VVGARGVGK (KRAS G12R)
FVGHRAVGG

SEQ ID NO: 35940 - protein, 9 aa, synthetic construct
  source 1..9: note = Seed: VVGARGVGK (KRAS G12R)
FVGHRAVGH

SEQ ID NO: 35941 - protein, 9 aa, synthetic construct
  source 1..9: note = Seed: VVGARGVGK (KRAS G12R)
FVGHRAVGI

SEQ ID NO: 35942 - protein, 9 aa, synthetic construct
  source 1..9: note = Seed: VVGARGVGK (KRAS G12R)
FVGHRAVGK

SEQ ID NO: 35943 - protein, 9 aa, synthetic construct
  source 1..9: note = Seed: VVGARGVGK (KRAS G12R)
FVGHRAVGL

SEQ ID NO: 35944 - protein, 9 aa, synthetic construct
  source 1..9: note = Seed: VVGARGVGK (KRAS G12R)
FVGHRAVGM

SEQ ID NO: 35945 - protein, 9 aa, synthetic construct
  source 1..9: note = Seed: VVGARGVGK (KRAS G12R)
FVGHRAVGN

SEQ ID NO: 35946 - protein, 9 aa, synthetic construct
  source 1..9: note = Seed: VVGARGVGK (KRAS G12R)
FVGHRAVGQ

SEQ ID NO: 35947 - protein, 9 aa, synthetic construct
  source 1..9: note = Seed: VVGARGVGK (KRAS G12R)
FVGHRAVGR

SEQ ID NO: 35948 - protein, 9 aa, synthetic construct
  source 1..9: note = Seed: VVGARGVGK (KRAS G12R)
FVGHRAVGS

SEQ ID NO: 35949 - protein, 9 aa, synthetic construct
  source 1..9: note = Seed: VVGARGVGK (KRAS G12R)
FVGHRAVGT

SEQ ID NO: 35950 - protein, 9 aa, synthetic construct
  source 1..9: note = Seed: VVGARGVGK (KRAS G12R)
FVGHRAVGV

SEQ ID NO: 35951 - protein, 9 aa, synthetic construct
  source 1..9: note = Seed: VVGARGVGK (KRAS G12R)
FVGHRAVGW

SEQ ID NO: 35952 - protein, 9 aa, synthetic construct
  source 1..9: note = Seed: VVGARGVGK (KRAS G12R)
FVGHRAVGY

SEQ ID NO: 35953 - protein, 9 aa, synthetic construct
  source 1..9: note = Seed: VVGARGVGK (KRAS G12R)
FVGHRGVGA

SEQ ID NO: 35954 - protein, 9 aa, synthetic construct
  source 1..9: note = Seed: VVGARGVGK (KRAS G12R)
FVGHRGVGF

SEQ ID NO: 35955 - protein, 9 aa, synthetic construct
  source 1..9: note = Seed: VVGARGVGK (KRAS G12R)
FVGHRGVGG

SEQ ID NO: 35956 - protein, 9 aa, synthetic construct
  source 1..9: note = Seed: VVGARGVGK (KRAS G12R)
FVGHRGVGI

SEQ ID NO: 35957 - protein, 9 aa, synthetic construct
  source 1..9: note = Seed: VVGARGVGK (KRAS G12R)
FVGHRGVGL

SEQ ID NO: 35958 - protein, 9 aa, synthetic construct
  source 1..9: note = Seed: VVGARGVGK (KRAS G12R)
FVGHRGVGM

SEQ ID NO: 35959 - protein, 9 aa, synthetic construct
  source 1..9: note = Seed: VVGARGVGK (KRAS G12R)
FVGHRGVGR

SEQ ID NO: 35960 - protein, 9 aa, synthetic construct
  source 1..9: note = Seed: VVGARGVGK (KRAS G12R)
FVGHRGVGS

SEQ ID NO: 35961 - protein, 9 aa, synthetic construct
  source 1..9: note = Seed: VVGARGVGK (KRAS G12R)
FVGHRGVGT

SEQ ID NO: 35962 - protein, 9 aa, synthetic construct
  source 1..9: note = Seed: VVGARGVGK (KRAS G12R)
FVGHRGVGV

SEQ ID NO: 35963 - protein, 9 aa, synthetic construct
  source 1..9: note = Seed: VVGARGVGK (KRAS G12R)
FVGHRIVGA

SEQ ID NO: 35964 - protein, 9 aa, synthetic construct
  source 1..9: note = Seed: VVGARGVGK (KRAS G12R)
FVGHRIVGI

SEQ ID NO: 35965 - protein, 9 aa, synthetic construct
  source 1..9: note = Seed: VVGARGVGK (KRAS G12R)
FVGHRIVGL

SEQ ID NO: 35966 - protein, 9 aa, synthetic construct
  source 1..9: note = Seed: VVGARGVGK (KRAS G12R)
FVGHRIVGM

SEQ ID NO: 35967 - protein, 9 aa, synthetic construct
  source 1..9: note = Seed: VVGARGVGK (KRAS G12R)
FVGHRIVGR

SEQ ID NO: 35968 - protein, 9 aa, synthetic construct
  source 1..9: note = Seed: VVGARGVGK (KRAS G12R)
FVGHRIVGS

SEQ ID NO: 35969 - protein, 9 aa, synthetic construct
  source 1..9: note = Seed: VVGARGVGK (KRAS G12R)
FVGHRIVGV

SEQ ID NO: 35970 - protein, 9 aa, synthetic construct
  source 1..9: note = Seed: VVGARGVGK (KRAS G12R)
FVGHRKVGF

SEQ ID NO: 35971 - protein, 9 aa, synthetic construct
  source 1..9: note = Seed: VVGARGVGK (KRAS G12R)
FVGHRKVGI

SEQ ID NO: 35972 - protein, 9 aa, synthetic construct
  source 1..9: note = Seed: VVGARGVGK (KRAS G12R)
FVGHRKVGK

SEQ ID NO: 35973 - protein, 9 aa, synthetic construct
  source 1..9: note = Seed: VVGARGVGK (KRAS G12R)
FVGHRKVGL

SEQ ID NO: 35974 - protein, 9 aa, synthetic construct
  source 1..9: note = Seed: VVGARGVGK (KRAS G12R)
FVGHRKVGM

SEQ ID NO: 35975 - protein, 9 aa, synthetic construct
  source 1..9: note = Seed: VVGARGVGK (KRAS G12R)
FVGHRKVGR

SEQ ID NO: 35976 - protein, 9 aa, synthetic construct
  source 1..9: note = Seed: VVGARGVGK (KRAS G12R)
FVGHRKVGV

SEQ ID NO: 35977 - protein, 9 aa, synthetic construct
  source 1..9: note = Seed: VVGARGVGK (KRAS G12R)
FVGHRKVGY

SEQ ID NO: 35978 - protein, 9 aa, synthetic construct
  source 1..9: note = Seed: VVGARGVGK (KRAS G12R)
FVGHRLVGR

SEQ ID NO: 35979 - protein, 9 aa, synthetic construct
  source 1..9: note = Seed: VVGARGVGK (KRAS G12R)
FVGHRMVGR

SEQ ID NO: 35980 - protein, 9 aa, synthetic construct
  source 1..9: note = Seed: VVGARGVGK (KRAS G12R)
FVGHRNVGA

SEQ ID NO: 35981 - protein, 9 aa, synthetic construct
  source 1..9: note = Seed: VVGARGVGK (KRAS G12R)
FVGHRNVGI

SEQ ID NO: 35982 - protein, 9 aa, synthetic construct
  source 1..9: note = Seed: VVGARGVGK (KRAS G12R)
FVGHRNVGL

SEQ ID NO: 35983 - protein, 9 aa, synthetic construct
  source 1..9: note = Seed: VVGARGVGK (KRAS G12R)
FVGHRNVGM

SEQ ID NO: 35984 - protein, 9 aa, synthetic construct
  source 1..9: note = Seed: VVGARGVGK (KRAS G12R)
FVGHRNVGR

SEQ ID NO: 35985 - protein, 9 aa, synthetic construct
  source 1..9: note = Seed: VVGARGVGK (KRAS G12R)
FVGHRNVGV

SEQ ID NO: 35986 - protein, 9 aa, synthetic construct
  source 1..9: note = Seed: VVGARGVGK (KRAS G12R)
FVGHRNVGY

SEQ ID NO: 35987 - protein, 9 aa, synthetic construct
  source 1..9: note = Seed: VVGARGVGK (KRAS G12R)
FVGHRPVGA

SEQ ID NO: 35988 - protein, 9 aa, synthetic construct
  source 1..9: note = Seed: VVGARGVGK (KRAS G12R)
FVGHRPVGF

SEQ ID NO: 35989 - protein, 9 aa, synthetic construct
  source 1..9: note = Seed: VVGARGVGK (KRAS G12R)
FVGHRPVGG

SEQ ID NO: 35990 - protein, 9 aa, synthetic construct
  source 1..9: note = Seed: VVGARGVGK (KRAS G12R)
FVGHRPVGI

SEQ ID NO: 35991 - protein, 9 aa, synthetic construct
  source 1..9: note = Seed: VVGARGVGK (KRAS G12R)
FVGHRPVGL

SEQ ID NO: 35992 - protein, 9 aa, synthetic construct
  source 1..9: note = Seed: VVGARGVGK (KRAS G12R)
FVGHRPVGM

SEQ ID NO: 35993 - protein, 9 aa, synthetic construct
  source 1..9: note = Seed: VVGARGVGK (KRAS G12R)
FVGHRPVGN

SEQ ID NO: 35994 - protein, 9 aa, synthetic construct
  source 1..9: note = Seed: VVGARGVGK (KRAS G12R)
FVGHRPVGR

SEQ ID NO: 35995 - protein, 9 aa, synthetic construct
  source 1..9: note = Seed: VVGARGVGK (KRAS G12R)
FVGHRPVGS

SEQ ID NO: 35996 - protein, 9 aa, synthetic construct
  source 1..9: note = Seed: VVGARGVGK (KRAS G12R)
FVGHRPVGT

SEQ ID NO: 35997 - protein, 9 aa, synthetic construct
  source 1..9: note = Seed: VVGARGVGK (KRAS G12R)
FVGHRPVGV

SEQ ID NO: 35998 - protein, 9 aa, synthetic construct
  source 1..9: note = Seed: VVGARGVGK (KRAS G12R)
FVGHRPVGY

SEQ ID NO: 35999 - protein, 9 aa, synthetic construct
  source 1..9: note = Seed: VVGARGVGK (KRAS G12R)
FVGHRQVGR

SEQ ID NO: 36000 - protein, 9 aa, synthetic construct
  source 1..9: note = Seed: VVGARGVGK (KRAS G12R)
FVGHRRVGA

SEQ ID NO: 36001 - protein, 9 aa, synthetic construct
  source 1..9: note = Seed: VVGARGVGK (KRAS G12R)
FVGHRRVGF

SEQ ID NO: 36002 - protein, 9 aa, synthetic construct
  source 1..9: note = Seed: VVGARGVGK (KRAS G12R)
FVGHRRVGH

SEQ ID NO: 36003 - protein, 9 aa, synthetic construct
  source 1..9: note = Seed: VVGARGVGK (KRAS G12R)
FVGHRRVGI

SEQ ID NO: 36004 - protein, 9 aa, synthetic construct
  source 1..9: note = Seed: VVGARGVGK (KRAS G12R)
FVGHRRVGK

SEQ ID NO: 36005 - protein, 9 aa, synthetic construct
  source 1..9: note = Seed: VVGARGVGK (KRAS G12R)
FVGHRRVGL

SEQ ID NO: 36006 - protein, 9 aa, synthetic construct
  source 1..9: note = Seed: VVGARGVGK (KRAS G12R)
FVGHRRVGM

SEQ ID NO: 36007 - protein, 9 aa, synthetic construct
  source 1..9: note = Seed: VVGARGVGK (KRAS G12R)
FVGHRRVGR

SEQ ID NO: 36008 - protein, 9 aa, synthetic construct
  source 1..9: note = Seed: VVGARGVGK (KRAS G12R)
FVGHRRVGS

SEQ ID NO: 36009 - protein, 9 aa, synthetic construct
  source 1..9: note = Seed: VVGARGVGK (KRAS G12R)
FVGHRRVGV

SEQ ID NO: 36010 - protein, 9 aa, synthetic construct
  source 1..9: note = Seed: VVGARGVGK (KRAS G12R)
FVGHRRVGW

SEQ ID NO: 36011 - protein, 9 aa, synthetic construct
  source 1..9: note = Seed: VVGARGVGK (KRAS G12R)
FVGHRRVGY

SEQ ID NO: 36012 - protein, 9 aa, synthetic construct
  source 1..9: note = Seed: VVGARGVGK (KRAS G12R)
FVGHRSVGA

SEQ ID NO: 36013 - protein, 9 aa, synthetic construct
  source 1..9: note = Seed: VVGARGVGK (KRAS G12R)
FVGHRSVGF

SEQ ID NO: 36014 - protein, 9 aa, synthetic construct
  source 1..9: note = Seed: VVGARGVGK (KRAS G12R)
FVGHRSVGG

SEQ ID NO: 36015 - protein, 9 aa, synthetic construct
  source 1..9: note = Seed: VVGARGVGK (KRAS G12R)
FVGHRSVGI

SEQ ID NO: 36016 - protein, 9 aa, synthetic construct
  source 1..9: note = Seed: VVGARGVGK (KRAS G12R)
FVGHRSVGL

SEQ ID NO: 36017 - protein, 9 aa, synthetic construct
  source 1..9: note = Seed: VVGARGVGK (KRAS G12R)
FVGHRSVGM

SEQ ID NO: 36018 - protein, 9 aa, synthetic construct
  source 1..9: note = Seed: VVGARGVGK (KRAS G12R)
FVGHRSVGN

SEQ ID NO: 36019 - protein, 9 aa, synthetic construct
  source 1..9: note = Seed: VVGARGVGK (KRAS G12R)
FVGHRSVGR

SEQ ID NO: 36020 - protein, 9 aa, synthetic construct
  source 1..9: note = Seed: VVGARGVGK (KRAS G12R)
FVGHRSVGS

SEQ ID NO: 36021 - protein, 9 aa, synthetic construct
  source 1..9: note = Seed: VVGARGVGK (KRAS G12R)
FVGHRSVGT

SEQ ID NO: 36022 - protein, 9 aa, synthetic construct
  source 1..9: note = Seed: VVGARGVGK (KRAS G12R)
FVGHRSVGV

SEQ ID NO: 36023 - protein, 9 aa, synthetic construct
  source 1..9: note = Seed: VVGARGVGK (KRAS G12R)
FVGHRSVGW

SEQ ID NO: 36024 - protein, 9 aa, synthetic construct
  source 1..9: note = Seed: VVGARGVGK (KRAS G12R)
FVGHRSVGY

SEQ ID NO: 36025 - protein, 9 aa, synthetic construct
  source 1..9: note = Seed: VVGARGVGK (KRAS G12R)
FVGHRTVGA

SEQ ID NO: 36026 - protein, 9 aa, synthetic construct
  source 1..9: note = Seed: VVGARGVGK (KRAS G12R)
FVGHRTVGF

SEQ ID NO: 36027 - protein, 9 aa, synthetic construct
  source 1..9: note = Seed: VVGARGVGK (KRAS G12R)
FVGHRTVGI

SEQ ID NO: 36028 - protein, 9 aa, synthetic construct
  source 1..9: note = Seed: VVGARGVGK (KRAS G12R)
FVGHRTVGL

SEQ ID NO: 36029 - protein, 9 aa, synthetic construct
  source 1..9: note = Seed: VVGARGVGK (KRAS G12R)
FVGHRTVGM

SEQ ID NO: 36030 - protein, 9 aa, synthetic construct
  source 1..9: note = Seed: VVGARGVGK (KRAS G12R)
FVGHRTVGN

SEQ ID NO: 36031 - protein, 9 aa, synthetic construct
  source 1..9: note = Seed: VVGARGVGK (KRAS G12R)
FVGHRTVGR

SEQ ID NO: 36032 - protein, 9 aa, synthetic construct
  source 1..9: note = Seed: VVGARGVGK (KRAS G12R)
FVGHRTVGS

SEQ ID NO: 36033 - protein, 9 aa, synthetic construct
  source 1..9: note = Seed: VVGARGVGK (KRAS G12R)
FVGHRTVGT

SEQ ID NO: 36034 - protein, 9 aa, synthetic construct
  source 1..9: note = Seed: VVGARGVGK (KRAS G12R)
FVGHRTVGV

SEQ ID NO: 36035 - protein, 9 aa, synthetic construct
  source 1..9: note = Seed: VVGARGVGK (KRAS G12R)
FVGHRTVGY

SEQ ID NO: 36036 - protein, 9 aa, synthetic construct
  source 1..9: note = Seed: VVGARGVGK (KRAS G12R)
FVGHRVVGA

SEQ ID NO: 36037 - protein, 9 aa, synthetic construct
  source 1..9: note = Seed: VVGARGVGK (KRAS G12R)
FVGHRVVGF

SEQ ID NO: 36038 - protein, 9 aa, synthetic construct
  source 1..9: note = Seed: VVGARGVGK (KRAS G12R)
FVGHRVVGI

SEQ ID NO: 36039 - protein, 9 aa, synthetic construct
  source 1..9: note = Seed: VVGARGVGK (KRAS G12R)
FVGHRVVGL

SEQ ID NO: 36040 - protein, 9 aa, synthetic construct
  source 1..9: note = Seed: VVGARGVGK (KRAS G12R)
FVGHRVVGM

SEQ ID NO: 36041 - protein, 9 aa, synthetic construct
  source 1..9: note = Seed: VVGARGVGK (KRAS G12R)
FVGHRVVGN

SEQ ID NO: 36042 - protein, 9 aa, synthetic construct
  source 1..9: note = Seed: VVGARGVGK (KRAS G12R)
FVGHRVVGR

SEQ ID NO: 36043 - protein, 9 aa, synthetic construct
  source 1..9: note = Seed: VVGARGVGK (KRAS G12R)
FVGHRVVGS

SEQ ID NO: 36044 - protein, 9 aa, synthetic construct
  source 1..9: note = Seed: VVGARGVGK (KRAS G12R)
FVGHRVVGV

SEQ ID NO: 36045 - protein, 9 aa, synthetic construct
  source 1..9: note = Seed: VVGARGVGK (KRAS G12R)
FVGHRVVGY

SEQ ID NO: 36046 - protein, 9 aa, synthetic construct
  source 1..9: note = Seed: VVGARGVGK (KRAS G12R)
FVGIRAVGA

SEQ ID NO: 36047 - protein, 9 aa, synthetic construct
  source 1..9: note = Seed: VVGARGVGK (KRAS G12R)
FVGIRAVGC

SEQ ID NO: 36048 - protein, 9 aa, synthetic construct
  source 1..9: note = Seed: VVGARGVGK (KRAS G12R)
FVGIRAVGD

SEQ ID NO: 36049 - protein, 9 aa, synthetic construct
  source 1..9: note = Seed: VVGARGVGK (KRAS G12R)
FVGIRAVGE

SEQ ID NO: 36050 - protein, 9 aa, synthetic construct
  source 1..9: note = Seed: VVGARGVGK (KRAS G12R)
FVGIRAVGF

SEQ ID NO: 36051 - protein, 9 aa, synthetic construct
  source 1..9: note = Seed: VVGARGVGK (KRAS G12R)
FVGIRAVGG

SEQ ID NO: 36052 - protein, 9 aa, synthetic construct
  source 1..9: note = Seed: VVGARGVGK (KRAS G12R)
FVGIRAVGH

SEQ ID NO: 36053 - protein, 9 aa, synthetic construct
  source 1..9: note = Seed: VVGARGVGK (KRAS G12R)
FVGIRAVGI

SEQ ID NO: 36054 - protein, 9 aa, synthetic construct
  source 1..9: note = Seed: VVGARGVGK (KRAS G12R)
FVGIRAVGK

SEQ ID NO: 36055 - protein, 9 aa, synthetic construct
  source 1..9: note = Seed: VVGARGVGK (KRAS G12R)
FVGIRAVGL

SEQ ID NO: 36056 - protein, 9 aa, synthetic construct
  source 1..9: note = Seed: VVGARGVGK (KRAS G12R)
FVGIRAVGM

SEQ ID NO: 36057 - protein, 9 aa, synthetic construct
  source 1..9: note = Seed: VVGARGVGK (KRAS G12R)
FVGIRAVGN

SEQ ID NO: 36058 - protein, 9 aa, synthetic construct
  source 1..9: note = Seed: VVGARGVGK (KRAS G12R)
FVGIRAVGP

SEQ ID NO: 36059 - protein, 9 aa, synthetic construct
  source 1..9: note = Seed: VVGARGVGK (KRAS G12R)
FVGIRAVGQ

SEQ ID NO: 36060 - protein, 9 aa, synthetic construct
  source 1..9: note = Seed: VVGARGVGK (KRAS G12R)
FVGIRAVGR

SEQ ID NO: 36061 - protein, 9 aa, synthetic construct
  source 1..9: note = Seed: VVGARGVGK (KRAS G12R)
FVGIRAVGS

SEQ ID NO: 36062 - protein, 9 aa, synthetic construct
  source 1..9: note = Seed: VVGARGVGK (KRAS G12R)
FVGIRAVGT

SEQ ID NO: 36063 - protein, 9 aa, synthetic construct
  source 1..9: note = Seed: VVGARGVGK (KRAS G12R)
FVGIRAVGV

SEQ ID NO: 36064 - protein, 9 aa, synthetic construct
  source 1..9: note = Seed: VVGARGVGK (KRAS G12R)
FVGIRAVGW

SEQ ID NO: 36065 - protein, 9 aa, synthetic construct
  source 1..9: note = Seed: VVGARGVGK (KRAS G12R)
FVGIRAVGY

SEQ ID NO: 36066 - protein, 9 aa, synthetic construct
  source 1..9: note = Seed: VVGARGVGK (KRAS G12R)
FVGIRCVGA

SEQ ID NO: 36067 - protein, 9 aa, synthetic construct
  source 1..9: note = Seed: VVGARGVGK (KRAS G12R)
FVGIRCVGI

SEQ ID NO: 36068 - protein, 9 aa, synthetic construct
  source 1..9: note = Seed: VVGARGVGK (KRAS G12R)
FVGIRCVGL

SEQ ID NO: 36069 - protein, 9 aa, synthetic construct
  source 1..9: note = Seed: VVGARGVGK (KRAS G12R)
FVGIRCVGN

SEQ ID NO: 36070 - protein, 9 aa, synthetic construct
  source 1..9: note = Seed: VVGARGVGK (KRAS G12R)
FVGIRCVGS

SEQ ID NO: 36071 - protein, 9 aa, synthetic construct
  source 1..9: note = Seed: VVGARGVGK (KRAS G12R)
FVGIRCVGT

SEQ ID NO: 36072 - protein, 9 aa, synthetic construct
  source 1..9: note = Seed: VVGARGVGK (KRAS G12R)
FVGIRCVGV

SEQ ID NO: 36073 - protein, 9 aa, synthetic construct
  source 1..9: note = Seed: VVGARGVGK (KRAS G12R)
FVGIRDVGA

SEQ ID NO: 36074 - protein, 9 aa, synthetic construct
  source 1..9: note = Seed: VVGARGVGK (KRAS G12R)
FVGIRDVGI

SEQ ID NO: 36075 - protein, 9 aa, synthetic construct
  source 1..9: note = Seed: VVGARGVGK (KRAS G12R)
FVGIRDVGL

SEQ ID NO: 36076 - protein, 9 aa, synthetic construct
  source 1..9: note = Seed: VVGARGVGK (KRAS G12R)
FVGIRDVGM

SEQ ID NO: 36077 - protein, 9 aa, synthetic construct
  source 1..9: note = Seed: VVGARGVGK (KRAS G12R)
FVGIRDVGN

SEQ ID NO: 36078 - protein, 9 aa, synthetic construct
  source 1..9: note = Seed: VVGARGVGK (KRAS G12R)
FVGIRDVGS

SEQ ID NO: 36079 - protein, 9 aa, synthetic construct
  source 1..9: note = Seed: VVGARGVGK (KRAS G12R)
FVGIRDVGT

SEQ ID NO: 36080 - protein, 9 aa, synthetic construct
  source 1..9: note = Seed: VVGARGVGK (KRAS G12R)
FVGIRDVGV

SEQ ID NO: 36081 - protein, 9 aa, synthetic construct
  source 1..9: note = Seed: VVGARGVGK (KRAS G12R)
FVGIREVGA

SEQ ID NO: 36082 - protein, 9 aa, synthetic construct
  source 1..9: note = Seed: VVGARGVGK (KRAS G12R)
FVGIREVGG

SEQ ID NO: 36083 - protein, 9 aa, synthetic construct
  source 1..9: note = Seed: VVGARGVGK (KRAS G12R)
FVGIREVGI

SEQ ID NO: 36084 - protein, 9 aa, synthetic construct
  source 1..9: note = Seed: VVGARGVGK (KRAS G12R)
FVGIREVGL

SEQ ID NO: 36085 - protein, 9 aa, synthetic construct
  source 1..9: note = Seed: VVGARGVGK (KRAS G12R)
FVGIREVGM

SEQ ID NO: 36086 - protein, 9 aa, synthetic construct
  source 1..9: note = Seed: VVGARGVGK (KRAS G12R)
FVGIREVGN

SEQ ID NO: 36087 - protein, 9 aa, synthetic construct
  source 1..9: note = Seed: VVGARGVGK (KRAS G12R)
FVGIREVGS

SEQ ID NO: 36088 - protein, 9 aa, synthetic construct
  source 1..9: note = Seed: VVGARGVGK (KRAS G12R)
FVGIREVGT

SEQ ID NO: 36089 - protein, 9 aa, synthetic construct
  source 1..9: note = Seed: VVGARGVGK (KRAS G12R)
FVGIREVGV

SEQ ID NO: 36090 - protein, 9 aa, synthetic construct
  source 1..9: note = Seed: VVGARGVGK (KRAS G12R)
FVGIRGVGA

SEQ ID NO: 36091 - protein, 9 aa, synthetic construct
  source 1..9: note = Seed: VVGARGVGK (KRAS G12R)
FVGIRGVGC

SEQ ID NO: 36092 - protein, 9 aa, synthetic construct
  source 1..9: note = Seed: VVGARGVGK (KRAS G12R)
FVGIRGVGD

SEQ ID NO: 36093 - protein, 9 aa, synthetic construct
  source 1..9: note = Seed: VVGARGVGK (KRAS G12R)
FVGIRGVGE

SEQ ID NO: 36094 - protein, 9 aa, synthetic construct
  source 1..9: note = Seed: VVGARGVGK (KRAS G12R)
FVGIRGVGF

SEQ ID NO: 36095 - protein, 9 aa, synthetic construct
  source 1..9: note = Seed: VVGARGVGK (KRAS G12R)
FVGIRGVGG

SEQ ID NO: 36096 - protein, 9 aa, synthetic construct
  source 1..9: note = Seed: VVGARGVGK (KRAS G12R)
FVGIRGVGH

SEQ ID NO: 36097 - protein, 9 aa, synthetic construct
  source 1..9: note = Seed: VVGARGVGK (KRAS G12R)
FVGIRGVGI

SEQ ID NO: 36098 - protein, 9 aa, synthetic construct
  source 1..9: note = Seed: VVGARGVGK (KRAS G12R)
FVGIRGVGK

SEQ ID NO: 36099 - protein, 9 aa, synthetic construct
  source 1..9: note = Seed: VVGARGVGK (KRAS G12R)
FVGIRGVGL

SEQ ID NO: 36100 - protein, 9 aa, synthetic construct
  source 1..9: note = Seed: VVGARGVGK (KRAS G12R)
FVGIRGVGM

SEQ ID NO: 36101 - protein, 9 aa, synthetic construct
  source 1..9: note = Seed: VVGARGVGK (KRAS G12R)
FVGIRGVGN

SEQ ID NO: 36102 - protein, 9 aa, synthetic construct
  source 1..9: note = Seed: VVGARGVGK (KRAS G12R)
FVGIRGVGP

SEQ ID NO: 36103 - protein, 9 aa, synthetic construct
  source 1..9: note = Seed: VVGARGVGK (KRAS G12R)
FVGIRGVGQ

SEQ ID NO: 36104 - protein, 9 aa, synthetic construct
  source 1..9: note = Seed: VVGARGVGK (KRAS G12R)
FVGIRGVGR

SEQ ID NO: 36105 - protein, 9 aa, synthetic construct
  source 1..9: note = Seed: VVGARGVGK (KRAS G12R)
FVGIRGVGS

SEQ ID NO: 36106 - protein, 9 aa, synthetic construct
  source 1..9: note = Seed: VVGARGVGK (KRAS G12R)
FVGIRGVGT

SEQ ID NO: 36107 - protein, 9 aa, synthetic construct
  source 1..9: note = Seed: VVGARGVGK (KRAS G12R)
FVGIRGVGV

SEQ ID NO: 36108 - protein, 9 aa, synthetic construct
  source 1..9: note = Seed: VVGARGVGK (KRAS G12R)
FVGIRGVGW

SEQ ID NO: 36109 - protein, 9 aa, synthetic construct
  source 1..9: note = Seed: VVGARGVGK (KRAS G12R)
FVGIRGVGY

SEQ ID NO: 36110 - protein, 9 aa, synthetic construct
  source 1..9: note = Seed: VVGARGVGK (KRAS G12R)
FVGIRHVGA

SEQ ID NO: 36111 - protein, 9 aa, synthetic construct
  source 1..9: note = Seed: VVGARGVGK (KRAS G12R)
FVGIRHVGF

SEQ ID NO: 36112 - protein, 9 aa, synthetic construct
  source 1..9: note = Seed: VVGARGVGK (KRAS G12R)
FVGIRHVGG

SEQ ID NO: 36113 - protein, 9 aa, synthetic construct
  source 1..9: note = Seed: VVGARGVGK (KRAS G12R)
FVGIRHVGI

SEQ ID NO: 36114 - protein, 9 aa, synthetic construct
  source 1..9: note = Seed: VVGARGVGK (KRAS G12R)
FVGIRHVGL

SEQ ID NO: 36115 - protein, 9 aa, synthetic construct
  source 1..9: note = Seed: VVGARGVGK (KRAS G12R)
FVGIRHVGM

SEQ ID NO: 36116 - protein, 9 aa, synthetic construct
  source 1..9: note = Seed: VVGARGVGK (KRAS G12R)
FVGIRHVGN

SEQ ID NO: 36117 - protein, 9 aa, synthetic construct
  source 1..9: note = Seed: VVGARGVGK (KRAS G12R)
FVGIRHVGQ

SEQ ID NO: 36118 - protein, 9 aa, synthetic construct
  source 1..9: note = Seed: VVGARGVGK (KRAS G12R)
FVGIRHVGR

SEQ ID NO: 36119 - protein, 9 aa, synthetic construct
  source 1..9: note = Seed: VVGARGVGK (KRAS G12R)
FVGIRHVGS

SEQ ID NO: 36120 - protein, 9 aa, synthetic construct
  source 1..9: note = Seed: VVGARGVGK (KRAS G12R)
FVGIRHVGT

SEQ ID NO: 36121 - protein, 9 aa, synthetic construct
  source 1..9: note = Seed: VVGARGVGK (KRAS G12R)
FVGIRHVGV

SEQ ID NO: 36122 - protein, 9 aa, synthetic construct
  source 1..9: note = Seed: VVGARGVGK (KRAS G12R)
FVGIRHVGW

SEQ ID NO: 36123 - protein, 9 aa, synthetic construct
  source 1..9: note = Seed: VVGARGVGK (KRAS G12R)
FVGIRHVGY

SEQ ID NO: 36124 - protein, 9 aa, synthetic construct
  source 1..9: note = Seed: VVGARGVGK (KRAS G12R)
FVGIRIVGA

SEQ ID NO: 36125 - protein, 9 aa, synthetic construct
  source 1..9: note = Seed: VVGARGVGK (KRAS G12R)
FVGIRIVGD

SEQ ID NO: 36126 - protein, 9 aa, synthetic construct
  source 1..9: note = Seed: VVGARGVGK (KRAS G12R)
FVGIRIVGE

SEQ ID NO: 36127 - protein, 9 aa, synthetic construct
  source 1..9: note = Seed: VVGARGVGK (KRAS G12R)
FVGIRIVGG

SEQ ID NO: 36128 - protein, 9 aa, synthetic construct
  source 1..9: note = Seed: VVGARGVGK (KRAS G12R)
FVGIRIVGH

SEQ ID NO: 36129 - protein, 9 aa, synthetic construct
  source 1..9: note = Seed: VVGARGVGK (KRAS G12R)
FVGIRIVGI

SEQ ID NO: 36130 - protein, 9 aa, synthetic construct
  source 1..9: note = Seed: VVGARGVGK (KRAS G12R)
FVGIRIVGK

SEQ ID NO: 36131 - protein, 9 aa, synthetic construct
  source 1..9: note = Seed: VVGARGVGK (KRAS G12R)
FVGIRIVGL

SEQ ID NO: 36132 - protein, 9 aa, synthetic construct
  source 1..9: note = Seed: VVGARGVGK (KRAS G12R)
FVGIRIVGM

SEQ ID NO: 36133 - protein, 9 aa, synthetic construct
  source 1..9: note = Seed: VVGARGVGK (KRAS G12R)
FVGIRIVGN

SEQ ID NO: 36134 - protein, 9 aa, synthetic construct
  source 1..9: note = Seed: VVGARGVGK (KRAS G12R)
FVGIRIVGQ

SEQ ID NO: 36135 - protein, 9 aa, synthetic construct
  source 1..9: note = Seed: VVGARGVGK (KRAS G12R)
FVGIRIVGR

SEQ ID NO: 36136 - protein, 9 aa, synthetic construct
  source 1..9: note = Seed: VVGARGVGK (KRAS G12R)
FVGIRIVGS

SEQ ID NO: 36137 - protein, 9 aa, synthetic construct
  source 1..9: note = Seed: VVGARGVGK (KRAS G12R)
FVGIRIVGT

SEQ ID NO: 36138 - protein, 9 aa, synthetic construct
  source 1..9: note = Seed: VVGARGVGK (KRAS G12R)
FVGIRIVGV

SEQ ID NO: 36139 - protein, 9 aa, synthetic construct
  source 1..9: note = Seed: VVGARGVGK (KRAS G12R)
FVGIRIVGY

SEQ ID NO: 36140 - protein, 9 aa, synthetic construct
  source 1..9: note = Seed: VVGARGVGK (KRAS G12R)
FVGIRKVGA

SEQ ID NO: 36141 - protein, 9 aa, synthetic construct
  source 1..9: note = Seed: VVGARGVGK (KRAS G12R)
FVGIRKVGF

SEQ ID NO: 36142 - protein, 9 aa, synthetic construct
  source 1..9: note = Seed: VVGARGVGK (KRAS G12R)
FVGIRKVGG

SEQ ID NO: 36143 - protein, 9 aa, synthetic construct
  source 1..9: note = Seed: VVGARGVGK (KRAS G12R)
FVGIRKVGI

SEQ ID NO: 36144 - protein, 9 aa, synthetic construct
  source 1..9: note = Seed: VVGARGVGK (KRAS G12R)
FVGIRKVGL

SEQ ID NO: 36145 - protein, 9 aa, synthetic construct
  source 1..9: note = Seed: VVGARGVGK (KRAS G12R)
FVGIRKVGM

SEQ ID NO: 36146 - protein, 9 aa, synthetic construct
  source 1..9: note = Seed: VVGARGVGK (KRAS G12R)
FVGIRKVGN

SEQ ID NO: 36147 - protein, 9 aa, synthetic construct
  source 1..9: note = Seed: VVGARGVGK (KRAS G12R)
FVGIRKVGP

SEQ ID NO: 36148 - protein, 9 aa, synthetic construct
  source 1..9: note = Seed: VVGARGVGK (KRAS G12R)
FVGIRKVGQ

SEQ ID NO: 36149 - protein, 9 aa, synthetic construct
  source 1..9: note = Seed: VVGARGVGK (KRAS G12R)
FVGIRKVGR

SEQ ID NO: 36150 - protein, 9 aa, synthetic construct
  source 1..9: note = Seed: VVGARGVGK (KRAS G12R)
FVGIRKVGS

SEQ ID NO: 36151 - protein, 9 aa, synthetic construct
  source 1..9: note = Seed: VVGARGVGK (KRAS G12R)
FVGIRKVGT

SEQ ID NO: 36152 - protein, 9 aa, synthetic construct
  source 1..9: note = Seed: VVGARGVGK (KRAS G12R)
FVGIRKVGV

SEQ ID NO: 36153 - protein, 9 aa, synthetic construct
  source 1..9: note = Seed: VVGARGVGK (KRAS G12R)
FVGIRKVGW

SEQ ID NO: 36154 - protein, 9 aa, synthetic construct
  source 1..9: note = Seed: VVGARGVGK (KRAS G12R)
FVGIRKVGY

SEQ ID NO: 36155 - protein, 9 aa, synthetic construct
  source 1..9: note = Seed: VVGARGVGK (KRAS G12R)
FVGIRLVGA

SEQ ID NO: 36156 - protein, 9 aa, synthetic construct
  source 1..9: note = Seed: VVGARGVGK (KRAS G12R)
FVGIRLVGD

SEQ ID NO: 36157 - protein, 9 aa, synthetic construct
  source 1..9: note = Seed: VVGARGVGK (KRAS G12R)
FVGIRLVGG

SEQ ID NO: 36158 - protein, 9 aa, synthetic construct
  source 1..9: note = Seed: VVGARGVGK (KRAS G12R)
FVGIRLVGH

SEQ ID NO: 36159 - protein, 9 aa, synthetic construct
  source 1..9: note = Seed: VVGARGVGK (KRAS G12R)
FVGIRLVGI

SEQ ID NO: 36160 - protein, 9 aa, synthetic construct
  source 1..9: note = Seed: VVGARGVGK (KRAS G12R)
FVGIRLVGL

SEQ ID NO: 36161 - protein, 9 aa, synthetic construct
  source 1..9: note = Seed: VVGARGVGK (KRAS G12R)
FVGIRLVGM

SEQ ID NO: 36162 - protein, 9 aa, synthetic construct
  source 1..9: note = Seed: VVGARGVGK (KRAS G12R)
FVGIRLVGN

SEQ ID NO: 36163 - protein, 9 aa, synthetic construct
  source 1..9: note = Seed: VVGARGVGK (KRAS G12R)
FVGIRLVGQ

SEQ ID NO: 36164 - protein, 9 aa, synthetic construct
  source 1..9: note = Seed: VVGARGVGK (KRAS G12R)
FVGIRLVGS

SEQ ID NO: 36165 - protein, 9 aa, synthetic construct
  source 1..9: note = Seed: VVGARGVGK (KRAS G12R)
FVGIRLVGV

SEQ ID NO: 36166 - protein, 9 aa, synthetic construct
  source 1..9: note = Seed: VVGARGVGK (KRAS G12R)
FVGIRMVGD

SEQ ID NO: 36167 - protein, 9 aa, synthetic construct
  source 1..9: note = Seed: VVGARGVGK (KRAS G12R)
FVGIRMVGG

SEQ ID NO: 36168 - protein, 9 aa, synthetic construct
  source 1..9: note = Seed: VVGARGVGK (KRAS G12R)
FVGIRMVGH

SEQ ID NO: 36169 - protein, 9 aa, synthetic construct
  source 1..9: note = Seed: VVGARGVGK (KRAS G12R)
FVGIRMVGI

SEQ ID NO: 36170 - protein, 9 aa, synthetic construct
  source 1..9: note = Seed: VVGARGVGK (KRAS G12R)
FVGIRMVGL

SEQ ID NO: 36171 - protein, 9 aa, synthetic construct
  source 1..9: note = Seed: VVGARGVGK (KRAS G12R)
FVGIRMVGM

SEQ ID NO: 36172 - protein, 9 aa, synthetic construct
  source 1..9: note = Seed: VVGARGVGK (KRAS G12R)
FVGIRMVGN

SEQ ID NO: 36173 - protein, 9 aa, synthetic construct
  source 1..9: note = Seed: VVGARGVGK (KRAS G12R)
FVGIRMVGQ

SEQ ID NO: 36174 - protein, 9 aa, synthetic construct
  source 1..9: note = Seed: VVGARGVGK (KRAS G12R)
FVGIRMVGR

SEQ ID NO: 36175 - protein, 9 aa, synthetic construct
  source 1..9: note = Seed: VVGARGVGK (KRAS G12R)
FVGIRMVGS

SEQ ID NO: 36176 - protein, 9 aa, synthetic construct
  source 1..9: note = Seed: VVGARGVGK (KRAS G12R)
FVGIRNVGA

SEQ ID NO: 36177 - protein, 9 aa, synthetic construct
  source 1..9: note = Seed: VVGARGVGK (KRAS G12R)
FVGIRNVGC

SEQ ID NO: 36178 - protein, 9 aa, synthetic construct
  source 1..9: note = Seed: VVGARGVGK (KRAS G12R)
FVGIRNVGD

SEQ ID NO: 36179 - protein, 9 aa, synthetic construct
  source 1..9: note = Seed: VVGARGVGK (KRAS G12R)
FVGIRNVGE

SEQ ID NO: 36180 - protein, 9 aa, synthetic construct
  source 1..9: note = Seed: VVGARGVGK (KRAS G12R)
FVGIRNVGF

SEQ ID NO: 36181 - protein, 9 aa, synthetic construct
  source 1..9: note = Seed: VVGARGVGK (KRAS G12R)
FVGIRNVGG

SEQ ID NO: 36182 - protein, 9 aa, synthetic construct
  source 1..9: note = Seed: VVGARGVGK (KRAS G12R)
FVGIRNVGH

SEQ ID NO: 36183 - protein, 9 aa, synthetic construct
  source 1..9: note = Seed: VVGARGVGK (KRAS G12R)
FVGIRNVGI

SEQ ID NO: 36184 - protein, 9 aa, synthetic construct
  source 1..9: note = Seed: VVGARGVGK (KRAS G12R)
FVGIRNVGK

SEQ ID NO: 36185 - protein, 9 aa, synthetic construct
  source 1..9: note = Seed: VVGARGVGK (KRAS G12R)
FVGIRNVGL

SEQ ID NO: 36186 - protein, 9 aa, synthetic construct
  source 1..9: note = Seed: VVGARGVGK (KRAS G12R)
FVGIRNVGM

SEQ ID NO: 36187 - protein, 9 aa, synthetic construct
  source 1..9: note = Seed: VVGARGVGK (KRAS G12R)
FVGIRNVGN

SEQ ID NO: 36188 - protein, 9 aa, synthetic construct
  source 1..9: note = Seed: VVGARGVGK (KRAS G12R)
FVGIRNVGP

SEQ ID NO: 36189 - protein, 9 aa, synthetic construct
  source 1..9: note = Seed: VVGARGVGK (KRAS G12R)
FVGIRNVGQ

SEQ ID NO: 36190 - protein, 9 aa, synthetic construct
  source 1..9: note = Seed: VVGARGVGK (KRAS G12R)
FVGIRNVGR

SEQ ID NO: 36191 - protein, 9 aa, synthetic construct
  source 1..9: note = Seed: VVGARGVGK (KRAS G12R)
FVGIRNVGS

SEQ ID NO: 36192 - protein, 9 aa, synthetic construct
  source 1..9: note = Seed: VVGARGVGK (KRAS G12R)
FVGIRNVGT

SEQ ID NO: 36193 - protein, 9 aa, synthetic construct
  source 1..9: note = Seed: VVGARGVGK (KRAS G12R)
FVGIRNVGV

SEQ ID NO: 36194 - protein, 9 aa, synthetic construct
  source 1..9: note = Seed: VVGARGVGK (KRAS G12R)
FVGIRNVGW

SEQ ID NO: 36195 - protein, 9 aa, synthetic construct
  source 1..9: note = Seed: VVGARGVGK (KRAS G12R)
FVGIRNVGY

SEQ ID NO: 36196 - protein, 9 aa, synthetic construct
  source 1..9: note = Seed: VVGARGVGK (KRAS G12R)
FVGIRPVGA

SEQ ID NO: 36197 - protein, 9 aa, synthetic construct
  source 1..9: note = Seed: VVGARGVGK (KRAS G12R)
FVGIRPVGC

SEQ ID NO: 36198 - protein, 9 aa, synthetic construct
  source 1..9: note = Seed: VVGARGVGK (KRAS G12R)
FVGIRPVGD

SEQ ID NO: 36199 - protein, 9 aa, synthetic construct
  source 1..9: note = Seed: VVGARGVGK (KRAS G12R)
FVGIRPVGE

SEQ ID NO: 36200 - protein, 9 aa, synthetic construct
  source 1..9: note = Seed: VVGARGVGK (KRAS G12R)
FVGIRPVGF

SEQ ID NO: 36201 - protein, 9 aa, synthetic construct
  source 1..9: note = Seed: VVGARGVGK (KRAS G12R)
FVGIRPVGG

SEQ ID NO: 36202 - protein, 9 aa, synthetic construct
  source 1..9: note = Seed: VVGARGVGK (KRAS G12R)
FVGIRPVGH

SEQ ID NO: 36203 - protein, 9 aa, synthetic construct
  source 1..9: note = Seed: VVGARGVGK (KRAS G12R)
FVGIRPVGI

SEQ ID NO: 36204 - protein, 9 aa, synthetic construct
  source 1..9: note = Seed: VVGARGVGK (KRAS G12R)
FVGIRPVGK

SEQ ID NO: 36205 - protein, 9 aa, synthetic construct
  source 1..9: note = Seed: VVGARGVGK (KRAS G12R)
FVGIRPVGL

SEQ ID NO: 36206 - protein, 9 aa, synthetic construct
  source 1..9: note = Seed: VVGARGVGK (KRAS G12R)
FVGIRPVGM

SEQ ID NO: 36207 - protein, 9 aa, synthetic construct
  source 1..9: note = Seed: VVGARGVGK (KRAS G12R)
FVGIRPVGN

SEQ ID NO: 36208 - protein, 9 aa, synthetic construct
  source 1..9: note = Seed: VVGARGVGK (KRAS G12R)
FVGIRPVGP

SEQ ID NO: 36209 - protein, 9 aa, synthetic construct
  source 1..9: note = Seed: VVGARGVGK (KRAS G12R)
FVGIRPVGQ

SEQ ID NO: 36210 - protein, 9 aa, synthetic construct
  source 1..9: note = Seed: VVGARGVGK (KRAS G12R)
FVGIRPVGR

SEQ ID NO: 36211 - protein, 9 aa, synthetic construct
  source 1..9: note = Seed: VVGARGVGK (KRAS G12R)
FVGIRPVGS

SEQ ID NO: 36212 - protein, 9 aa, synthetic construct
  source 1..9: note = Seed: VVGARGVGK (KRAS G12R)
FVGIRPVGT

SEQ ID NO: 36213 - protein, 9 aa, synthetic construct
  source 1..9: note = Seed: VVGARGVGK (KRAS G12R)
FVGIRPVGV

SEQ ID NO: 36214 - protein, 9 aa, synthetic construct
  source 1..9: note = Seed: VVGARGVGK (KRAS G12R)
FVGIRPVGW

SEQ ID NO: 36215 - protein, 9 aa, synthetic construct
  source 1..9: note = Seed: VVGARGVGK (KRAS G12R)
FVGIRPVGY

SEQ ID NO: 36216 - protein, 9 aa, synthetic construct
  source 1..9: note = Seed: VVGARGVGK (KRAS G12R)
FVGIRQVGA

SEQ ID NO: 36217 - protein, 9 aa, synthetic construct
  source 1..9: note = Seed: VVGARGVGK (KRAS G12R)
FVGIRQVGF

SEQ ID NO: 36218 - protein, 9 aa, synthetic construct
  source 1..9: note = Seed: VVGARGVGK (KRAS G12R)
FVGIRQVGG

SEQ ID NO: 36219 - protein, 9 aa, synthetic construct
  source 1..9: note = Seed: VVGARGVGK (KRAS G12R)
FVGIRQVGI

SEQ ID NO: 36220 - protein, 9 aa, synthetic construct
  source 1..9: note = Seed: VVGARGVGK (KRAS G12R)
FVGIRQVGL

SEQ ID NO: 36221 - protein, 9 aa, synthetic construct
  source 1..9: note = Seed: VVGARGVGK (KRAS G12R)
FVGIRQVGM

SEQ ID NO: 36222 - protein, 9 aa, synthetic construct
  source 1..9: note = Seed: VVGARGVGK (KRAS G12R)
FVGIRQVGN

SEQ ID NO: 36223 - protein, 9 aa, synthetic construct
  source 1..9: note = Seed: VVGARGVGK (KRAS G12R)
FVGIRQVGS

SEQ ID NO: 36224 - protein, 9 aa, synthetic construct
  source 1..9: note = Seed: VVGARGVGK (KRAS G12R)
FVGIRQVGT

SEQ ID NO: 36225 - protein, 9 aa, synthetic construct
  source 1..9: note = Seed: VVGARGVGK (KRAS G12R)
FVGIRQVGV

SEQ ID NO: 36226 - protein, 9 aa, synthetic construct
  source 1..9: note = Seed: VVGARGVGK (KRAS G12R)
FVGIRQVGY

SEQ ID NO: 36227 - protein, 9 aa, synthetic construct
  source 1..9: note = Seed: VVGARGVGK (KRAS G12R)
FVGIRRVGA

SEQ ID NO: 36228 - protein, 9 aa, synthetic construct
  source 1..9: note = Seed: VVGARGVGK (KRAS G12R)
FVGIRRVGF

SEQ ID NO: 36229 - protein, 9 aa, synthetic construct
  source 1..9: note = Seed: VVGARGVGK (KRAS G12R)
FVGIRRVGG

SEQ ID NO: 36230 - protein, 9 aa, synthetic construct
  source 1..9: note = Seed: VVGARGVGK (KRAS G12R)
FVGIRRVGI

SEQ ID NO: 36231 - protein, 9 aa, synthetic construct
  source 1..9: note = Seed: VVGARGVGK (KRAS G12R)
FVGIRRVGL

SEQ ID NO: 36232 - protein, 9 aa, synthetic construct
  source 1..9: note = Seed: VVGARGVGK (KRAS G12R)
FVGIRRVGM

SEQ ID NO: 36233 - protein, 9 aa, synthetic construct
  source 1..9: note = Seed: VVGARGVGK (KRAS G12R)
FVGIRRVGN

SEQ ID NO: 36234 - protein, 9 aa, synthetic construct
  source 1..9: note = Seed: VVGARGVGK (KRAS G12R)
FVGIRRVGP

SEQ ID NO: 36235 - protein, 9 aa, synthetic construct
  source 1..9: note = Seed: VVGARGVGK (KRAS G12R)
FVGIRRVGQ

SEQ ID NO: 36236 - protein, 9 aa, synthetic construct
  source 1..9: note = Seed: VVGARGVGK (KRAS G12R)
FVGIRRVGR

SEQ ID NO: 36237 - protein, 9 aa, synthetic construct
  source 1..9: note = Seed: VVGARGVGK (KRAS G12R)
FVGIRRVGS

SEQ ID NO: 36238 - protein, 9 aa, synthetic construct
  source 1..9: note = Seed: VVGARGVGK (KRAS G12R)
FVGIRRVGT

SEQ ID NO: 36239 - protein, 9 aa, synthetic construct
  source 1..9: note = Seed: VVGARGVGK (KRAS G12R)
FVGIRRVGV

SEQ ID NO: 36240 - protein, 9 aa, synthetic construct
  source 1..9: note = Seed: VVGARGVGK (KRAS G12R)
FVGIRRVGW

SEQ ID NO: 36241 - protein, 9 aa, synthetic construct
  source 1..9: note = Seed: VVGARGVGK (KRAS G12R)
FVGIRRVGY

SEQ ID NO: 36242 - protein, 9 aa, synthetic construct
  source 1..9: note = Seed: VVGARGVGK (KRAS G12R)
FVGIRSVGA

SEQ ID NO: 36243 - protein, 9 aa, synthetic construct
  source 1..9: note = Seed: VVGARGVGK (KRAS G12R)
FVGIRSVGC

SEQ ID NO: 36244 - protein, 9 aa, synthetic construct
  source 1..9: note = Seed: VVGARGVGK (KRAS G12R)
FVGIRSVGD

SEQ ID NO: 36245 - protein, 9 aa, synthetic construct
  source 1..9: note = Seed: VVGARGVGK (KRAS G12R)
FVGIRSVGE

SEQ ID NO: 36246 - protein, 9 aa, synthetic construct
  source 1..9: note = Seed: VVGARGVGK (KRAS G12R)
FVGIRSVGF

SEQ ID NO: 36247 - protein, 9 aa, synthetic construct
  source 1..9: note = Seed: VVGARGVGK (KRAS G12R)
FVGIRSVGG

SEQ ID NO: 36248 - protein, 9 aa, synthetic construct
  source 1..9: note = Seed: VVGARGVGK (KRAS G12R)
FVGIRSVGH

SEQ ID NO: 36249 - protein, 9 aa, synthetic construct
  source 1..9: note = Seed: VVGARGVGK (KRAS G12R)
FVGIRSVGI

SEQ ID NO: 36250 - protein, 9 aa, synthetic construct
  source 1..9: note = Seed: VVGARGVGK (KRAS G12R)
FVGIRSVGK

SEQ ID NO: 36251 - protein, 9 aa, synthetic construct
  source 1..9: note = Seed: VVGARGVGK (KRAS G12R)
FVGIRSVGL

SEQ ID NO: 36252 - protein, 9 aa, synthetic construct
  source 1..9: note = Seed: VVGARGVGK (KRAS G12R)
FVGIRSVGM

SEQ ID NO: 36253 - protein, 9 aa, synthetic construct
  source 1..9: note = Seed: VVGARGVGK (KRAS G12R)
FVGIRSVGN

SEQ ID NO: 36254 - protein, 9 aa, synthetic construct
  source 1..9: note = Seed: VVGARGVGK (KRAS G12R)
FVGIRSVGP

SEQ ID NO: 36255 - protein, 9 aa, synthetic construct
  source 1..9: note = Seed: VVGARGVGK (KRAS G12R)
FVGIRSVGQ

SEQ ID NO: 36256 - protein, 9 aa, synthetic construct
  source 1..9: note = Seed: VVGARGVGK (KRAS G12R)
FVGIRSVGR

SEQ ID NO: 36257 - protein, 9 aa, synthetic construct
  source 1..9: note = Seed: VVGARGVGK (KRAS G12R)
FVGIRSVGS

SEQ ID NO: 36258 - protein, 9 aa, synthetic construct
  source 1..9: note = Seed: VVGARGVGK (KRAS G12R)
FVGIRSVGT

SEQ ID NO: 36259 - protein, 9 aa, synthetic construct
  source 1..9: note = Seed: VVGARGVGK (KRAS G12R)
FVGIRSVGV

SEQ ID NO: 36260 - protein, 9 aa, synthetic construct
  source 1..9: note = Seed: VVGARGVGK (KRAS G12R)
FVGIRSVGW

SEQ ID NO: 36261 - protein, 9 aa, synthetic construct
  source 1..9: note = Seed: VVGARGVGK (KRAS G12R)
FVGIRSVGY

SEQ ID NO: 36262 - protein, 9 aa, synthetic construct
  source 1..9: note = Seed: VVGARGVGK (KRAS G12R)
FVGIRTVGA

SEQ ID NO: 36263 - protein, 9 aa, synthetic construct
  source 1..9: note = Seed: VVGARGVGK (KRAS G12R)
FVGIRTVGC

SEQ ID NO: 36264 - protein, 9 aa, synthetic construct
  source 1..9: note = Seed: VVGARGVGK (KRAS G12R)
FVGIRTVGD

SEQ ID NO: 36265 - protein, 9 aa, synthetic construct
  source 1..9: note = Seed: VVGARGVGK (KRAS G12R)
FVGIRTVGE

SEQ ID NO: 36266 - protein, 9 aa, synthetic construct
  source 1..9: note = Seed: VVGARGVGK (KRAS G12R)
FVGIRTVGF

SEQ ID NO: 36267 - protein, 9 aa, synthetic construct
  source 1..9: note = Seed: VVGARGVGK (KRAS G12R)
FVGIRTVGG

SEQ ID NO: 36268 - protein, 9 aa, synthetic construct
  source 1..9: note = Seed: VVGARGVGK (KRAS G12R)
FVGIRTVGH

SEQ ID NO: 36269 - protein, 9 aa, synthetic construct
  source 1..9: note = Seed: VVGARGVGK (KRAS G12R)
FVGIRTVGI

SEQ ID NO: 36270 - protein, 9 aa, synthetic construct
  source 1..9: note = Seed: VVGARGVGK (KRAS G12R)
FVGIRTVGK

SEQ ID NO: 36271 - protein, 9 aa, synthetic construct
  source 1..9: note = Seed: VVGARGVGK (KRAS G12R)
FVGIRTVGL

SEQ ID NO: 36272 - protein, 9 aa, synthetic construct
  source 1..9: note = Seed: VVGARGVGK (KRAS G12R)
FVGIRTVGM

SEQ ID NO: 36273 - protein, 9 aa, synthetic construct
  source 1..9: note = Seed: VVGARGVGK (KRAS G12R)
FVGIRTVGN

SEQ ID NO: 36274 - protein, 9 aa, synthetic construct
  source 1..9: note = Seed: VVGARGVGK (KRAS G12R)
FVGIRTVGP

SEQ ID NO: 36275 - protein, 9 aa, synthetic construct
  source 1..9: note = Seed: VVGARGVGK (KRAS G12R)
FVGIRTVGQ

SEQ ID NO: 36276 - protein, 9 aa, synthetic construct
  source 1..9: note = Seed: VVGARGVGK (KRAS G12R)
FVGIRTVGR

SEQ ID NO: 36277 - protein, 9 aa, synthetic construct
  source 1..9: note = Seed: VVGARGVGK (KRAS G12R)
FVGIRTVGS

SEQ ID NO: 36278 - protein, 9 aa, synthetic construct
  source 1..9: note = Seed: VVGARGVGK (KRAS G12R)
FVGIRTVGT

SEQ ID NO: 36279 - protein, 9 aa, synthetic construct
  source 1..9: note = Seed: VVGARGVGK (KRAS G12R)
FVGIRTVGV

SEQ ID NO: 36280 - protein, 9 aa, synthetic construct
  source 1..9: note = Seed: VVGARGVGK (KRAS G12R)
FVGIRTVGW

SEQ ID NO: 36281 - protein, 9 aa, synthetic construct
  source 1..9: note = Seed: VVGARGVGK (KRAS G12R)
FVGIRTVGY

SEQ ID NO: 36282 - protein, 9 aa, synthetic construct
  source 1..9: note = Seed: VVGARGVGK (KRAS G12R)
FVGIRVVGA

SEQ ID NO: 36283 - protein, 9 aa, synthetic construct
  source 1..9: note = Seed: VVGARGVGK (KRAS G12R)
FVGIRVVGD

SEQ ID NO: 36284 - protein, 9 aa, synthetic construct
  source 1..9: note = Seed: VVGARGVGK (KRAS G12R)
FVGIRVVGE

SEQ ID NO: 36285 - protein, 9 aa, synthetic construct
  source 1..9: note = Seed: VVGARGVGK (KRAS G12R)
FVGIRVVGF

SEQ ID NO: 36286 - protein, 9 aa, synthetic construct
  source 1..9: note = Seed: VVGARGVGK (KRAS G12R)
FVGIRVVGG

SEQ ID NO: 36287 - protein, 9 aa, synthetic construct
  source 1..9: note = Seed: VVGARGVGK (KRAS G12R)
FVGIRVVGH

SEQ ID NO: 36288 - protein, 9 aa, synthetic construct
  source 1..9: note = Seed: VVGARGVGK (KRAS G12R)
FVGIRVVGI

SEQ ID NO: 36289 - protein, 9 aa, synthetic construct
  source 1..9: note = Seed: VVGARGVGK (KRAS G12R)
FVGIRVVGK

SEQ ID NO: 36290 - protein, 9 aa, synthetic construct
  source 1..9: note = Seed: VVGARGVGK (KRAS G12R)
FVGIRVVGL

SEQ ID NO: 36291 - protein, 9 aa, synthetic construct
  source 1..9: note = Seed: VVGARGVGK (KRAS G12R)
FVGIRVVGM

SEQ ID NO: 36292 - protein, 9 aa, synthetic construct
  source 1..9: note = Seed: VVGARGVGK (KRAS G12R)
FVGIRVVGN

SEQ ID NO: 36293 - protein, 9 aa, synthetic construct
  source 1..9: note = Seed: VVGARGVGK (KRAS G12R)
FVGIRVVGP

SEQ ID NO: 36294 - protein, 9 aa, synthetic construct
  source 1..9: note = Seed: VVGARGVGK (KRAS G12R)
FVGIRVVGQ

SEQ ID NO: 36295 - protein, 9 aa, synthetic construct
  source 1..9: note = Seed: VVGARGVGK (KRAS G12R)
FVGIRVVGR

SEQ ID NO: 36296 - protein, 9 aa, synthetic construct
  source 1..9: note = Seed: VVGARGVGK (KRAS G12R)
FVGIRVVGS

SEQ ID NO: 36297 - protein, 9 aa, synthetic construct
  source 1..9: note = Seed: VVGARGVGK (KRAS G12R)
FVGIRVVGT

SEQ ID NO: 36298 - protein, 9 aa, synthetic construct
  source 1..9: note = Seed: VVGARGVGK (KRAS G12R)
FVGIRVVGV

SEQ ID NO: 36299 - protein, 9 aa, synthetic construct
  source 1..9: note = Seed: VVGARGVGK (KRAS G12R)
FVGIRVVGY

SEQ ID NO: 36300 - protein, 9 aa, synthetic construct
  source 1..9: note = Seed: VVGARGVGK (KRAS G12R)
FVGIRWVGL

SEQ ID NO: 36301 - protein, 9 aa, synthetic construct
  source 1..9: note = Seed: VVGARGVGK (KRAS G12R)
FVGIRWVGM

SEQ ID NO: 36302 - protein, 9 aa, synthetic construct
  source 1..9: note = Seed: VVGARGVGK (KRAS G12R)
FVGIRYVGL

SEQ ID NO: 36303 - protein, 9 aa, synthetic construct
  source 1..9: note = Seed: VVGARGVGK (KRAS G12R)
FVGIRYVGM

SEQ ID NO: 36304 - protein, 9 aa, synthetic construct
  source 1..9: note = Seed: VVGARGVGK (KRAS G12R)
FVGKRAVGA

SEQ ID NO: 36305 - protein, 9 aa, synthetic construct
  source 1..9: note = Seed: VVGARGVGK (KRAS G12R)
FVGKRAVGF

SEQ ID NO: 36306 - protein, 9 aa, synthetic construct
  source 1..9: note = Seed: VVGARGVGK (KRAS G12R)
FVGKRAVGG

SEQ ID NO: 36307 - protein, 9 aa, synthetic construct
  source 1..9: note = Seed: VVGARGVGK (KRAS G12R)
FVGKRAVGI

SEQ ID NO: 36308 - protein, 9 aa, synthetic construct
  source 1..9: note = Seed: VVGARGVGK (KRAS G12R)
FVGKRAVGK

SEQ ID NO: 36309 - protein, 9 aa, synthetic construct
  source 1..9: note = Seed: VVGARGVGK (KRAS G12R)
FVGKRAVGL

SEQ ID NO: 36310 - protein, 9 aa, synthetic construct
  source 1..9: note = Seed: VVGARGVGK (KRAS G12R)
FVGKRAVGM

SEQ ID NO: 36311 - protein, 9 aa, synthetic construct
  source 1..9: note = Seed: VVGARGVGK (KRAS G12R)
FVGKRAVGN

SEQ ID NO: 36312 - protein, 9 aa, synthetic construct
  source 1..9: note = Seed: VVGARGVGK (KRAS G12R)
FVGKRAVGR

SEQ ID NO: 36313 - protein, 9 aa, synthetic construct
  source 1..9: note = Seed: VVGARGVGK (KRAS G12R)
FVGKRAVGS

SEQ ID NO: 36314 - protein, 9 aa, synthetic construct
  source 1..9: note = Seed: VVGARGVGK (KRAS G12R)
FVGKRAVGT

SEQ ID NO: 36315 - protein, 9 aa, synthetic construct
  source 1..9: note = Seed: VVGARGVGK (KRAS G12R)
FVGKRAVGV

SEQ ID NO: 36316 - protein, 9 aa, synthetic construct
  source 1..9: note = Seed: VVGARGVGK (KRAS G12R)
FVGKRAVGY

SEQ ID NO: 36317 - protein, 9 aa, synthetic construct
  source 1..9: note = Seed: VVGARGVGK (KRAS G12R)
FVGKRGVGA

SEQ ID NO: 36318 - protein, 9 aa, synthetic construct
  source 1..9: note = Seed: VVGARGVGK (KRAS G12R)
FVGKRGVGI

SEQ ID NO: 36319 - protein, 9 aa, synthetic construct
  source 1..9: note = Seed: VVGARGVGK (KRAS G12R)
FVGKRGVGL

SEQ ID NO: 36320 - protein, 9 aa, synthetic construct
  source 1..9: note = Seed: VVGARGVGK (KRAS G12R)
FVGKRGVGM

SEQ ID NO: 36321 - protein, 9 aa, synthetic construct
  source 1..9: note = Seed: VVGARGVGK (KRAS G12R)
FVGKRGVGV

SEQ ID NO: 36322 - protein, 9 aa, synthetic construct
  source 1..9: note = Seed: VVGARGVGK (KRAS G12R)
FVGKRHVGR

SEQ ID NO: 36323 - protein, 9 aa, synthetic construct
  source 1..9: note = Seed: VVGARGVGK (KRAS G12R)
FVGKRIVGA

SEQ ID NO: 36324 - protein, 9 aa, synthetic construct
  source 1..9: note = Seed: VVGARGVGK (KRAS G12R)
FVGKRIVGR

SEQ ID NO: 36325 - protein, 9 aa, synthetic construct
  source 1..9: note = Seed: VVGARGVGK (KRAS G12R)
FVGKRIVGV

SEQ ID NO: 36326 - protein, 9 aa, synthetic construct
  source 1..9: note = Seed: VVGARGVGK (KRAS G12R)
FVGKRKVGA

SEQ ID NO: 36327 - protein, 9 aa, synthetic construct
  source 1..9: note = Seed: VVGARGVGK (KRAS G12R)
FVGKRKVGF

SEQ ID NO: 36328 - protein, 9 aa, synthetic construct
  source 1..9: note = Seed: VVGARGVGK (KRAS G12R)
FVGKRKVGH

SEQ ID NO: 36329 - protein, 9 aa, synthetic construct
  source 1..9: note = Seed: VVGARGVGK (KRAS G12R)
FVGKRKVGI

SEQ ID NO: 36330 - protein, 9 aa, synthetic construct
  source 1..9: note = Seed: VVGARGVGK (KRAS G12R)
FVGKRKVGK

SEQ ID NO: 36331 - protein, 9 aa, synthetic construct
  source 1..9: note = Seed: VVGARGVGK (KRAS G12R)
FVGKRKVGL

SEQ ID NO: 36332 - protein, 9 aa, synthetic construct
  source 1..9: note = Seed: VVGARGVGK (KRAS G12R)
FVGKRKVGM

SEQ ID NO: 36333 - protein, 9 aa, synthetic construct
  source 1..9: note = Seed: VVGARGVGK (KRAS G12R)
FVGKRKVGR

SEQ ID NO: 36334 - protein, 9 aa, synthetic construct
  source 1..9: note = Seed: VVGARGVGK (KRAS G12R)
FVGKRKVGS

SEQ ID NO: 36335 - protein, 9 aa, synthetic construct
  source 1..9: note = Seed: VVGARGVGK (KRAS G12R)
FVGKRKVGV

SEQ ID NO: 36336 - protein, 9 aa, synthetic construct
  source 1..9: note = Seed: VVGARGVGK (KRAS G12R)
FVGKRKVGW

SEQ ID NO: 36337 - protein, 9 aa, synthetic construct
  source 1..9: note = Seed: VVGARGVGK (KRAS G12R)
FVGKRKVGY

SEQ ID NO: 36338 - protein, 9 aa, synthetic construct
  source 1..9: note = Seed: VVGARGVGK (KRAS G12R)
FVGKRMVGR

SEQ ID NO: 36339 - protein, 9 aa, synthetic construct
  source 1..9: note = Seed: VVGARGVGK (KRAS G12R)
FVGKRNVGA

SEQ ID NO: 36340 - protein, 9 aa, synthetic construct
  source 1..9: note = Seed: VVGARGVGK (KRAS G12R)
FVGKRNVGI

SEQ ID NO: 36341 - protein, 9 aa, synthetic construct
  source 1..9: note = Seed: VVGARGVGK (KRAS G12R)
FVGKRNVGL

SEQ ID NO: 36342 - protein, 9 aa, synthetic construct
  source 1..9: note = Seed: VVGARGVGK (KRAS G12R)
FVGKRNVGR

SEQ ID NO: 36343 - protein, 9 aa, synthetic construct
  source 1..9: note = Seed: VVGARGVGK (KRAS G12R)
FVGKRNVGV

SEQ ID NO: 36344 - protein, 9 aa, synthetic construct
  source 1..9: note = Seed: VVGARGVGK (KRAS G12R)
FVGKRPVGA

SEQ ID NO: 36345 - protein, 9 aa, synthetic construct
  source 1..9: note = Seed: VVGARGVGK (KRAS G12R)
FVGKRPVGI

SEQ ID NO: 36346 - protein, 9 aa, synthetic construct
  source 1..9: note = Seed: VVGARGVGK (KRAS G12R)
FVGKRPVGL

SEQ ID NO: 36347 - protein, 9 aa, synthetic construct
  source 1..9: note = Seed: VVGARGVGK (KRAS G12R)
FVGKRPVGM

SEQ ID NO: 36348 - protein, 9 aa, synthetic construct
  source 1..9: note = Seed: VVGARGVGK (KRAS G12R)
FVGKRPVGR

SEQ ID NO: 36349 - protein, 9 aa, synthetic construct
  source 1..9: note = Seed: VVGARGVGK (KRAS G12R)
FVGKRPVGV

SEQ ID NO: 36350 - protein, 9 aa, synthetic construct
  source 1..9: note = Seed: VVGARGVGK (KRAS G12R)
FVGKRPVGY

SEQ ID NO: 36351 - protein, 9 aa, synthetic construct
  source 1..9: note = Seed: VVGARGVGK (KRAS G12R)
FVGKRQVGR

SEQ ID NO: 36352 - protein, 9 aa, synthetic construct
  source 1..9: note = Seed: VVGARGVGK (KRAS G12R)
FVGKRRVGA

SEQ ID NO: 36353 - protein, 9 aa, synthetic construct
  source 1..9: note = Seed: VVGARGVGK (KRAS G12R)
FVGKRRVGE

SEQ ID NO: 36354 - protein, 9 aa, synthetic construct
  source 1..9: note = Seed: VVGARGVGK (KRAS G12R)
FVGKRRVGF

SEQ ID NO: 36355 - protein, 9 aa, synthetic construct
  source 1..9: note = Seed: VVGARGVGK (KRAS G12R)
FVGKRRVGG

SEQ ID NO: 36356 - protein, 9 aa, synthetic construct
  source 1..9: note = Seed: VVGARGVGK (KRAS G12R)
FVGKRRVGH

SEQ ID NO: 36357 - protein, 9 aa, synthetic construct
  source 1..9: note = Seed: VVGARGVGK (KRAS G12R)
FVGKRRVGI

SEQ ID NO: 36358 - protein, 9 aa, synthetic construct
  source 1..9: note = Seed: VVGARGVGK (KRAS G12R)
FVGKRRVGK

SEQ ID NO: 36359 - protein, 9 aa, synthetic construct
  source 1..9: note = Seed: VVGARGVGK (KRAS G12R)
FVGKRRVGL

SEQ ID NO: 36360 - protein, 9 aa, synthetic construct
  source 1..9: note = Seed: VVGARGVGK (KRAS G12R)
FVGKRRVGM

SEQ ID NO: 36361 - protein, 9 aa, synthetic construct
  source 1..9: note = Seed: VVGARGVGK (KRAS G12R)
FVGKRRVGQ

SEQ ID NO: 36362 - protein, 9 aa, synthetic construct
  source 1..9: note = Seed: VVGARGVGK (KRAS G12R)
FVGKRRVGR

SEQ ID NO: 36363 - protein, 9 aa, synthetic construct
  source 1..9: note = Seed: VVGARGVGK (KRAS G12R)
FVGKRRVGS

SEQ ID NO: 36364 - protein, 9 aa, synthetic construct
  source 1..9: note = Seed: VVGARGVGK (KRAS G12R)
FVGKRRVGT

SEQ ID NO: 36365 - protein, 9 aa, synthetic construct
  source 1..9: note = Seed: VVGARGVGK (KRAS G12R)
FVGKRRVGV

SEQ ID NO: 36366 - protein, 9 aa, synthetic construct
  source 1..9: note = Seed: VVGARGVGK (KRAS G12R)
FVGKRRVGW

SEQ ID NO: 36367 - protein, 9 aa, synthetic construct
  source 1..9: note = Seed: VVGARGVGK (KRAS G12R)
FVGKRRVGY

SEQ ID NO: 36368 - protein, 9 aa, synthetic construct
  source 1..9: note = Seed: VVGARGVGK (KRAS G12R)
FVGKRSVGA

SEQ ID NO: 36369 - protein, 9 aa, synthetic construct
  source 1..9: note = Seed: VVGARGVGK (KRAS G12R)
FVGKRSVGF

SEQ ID NO: 36370 - protein, 9 aa, synthetic construct
  source 1..9: note = Seed: VVGARGVGK (KRAS G12R)
FVGKRSVGI

SEQ ID NO: 36371 - protein, 9 aa, synthetic construct
  source 1..9: note = Seed: VVGARGVGK (KRAS G12R)
FVGKRSVGL

SEQ ID NO: 36372 - protein, 9 aa, synthetic construct
  source 1..9: note = Seed: VVGARGVGK (KRAS G12R)
FVGKRSVGM

SEQ ID NO: 36373 - protein, 9 aa, synthetic construct
  source 1..9: note = Seed: VVGARGVGK (KRAS G12R)
FVGKRSVGR

SEQ ID NO: 36374 - protein, 9 aa, synthetic construct
  source 1..9: note = Seed: VVGARGVGK (KRAS G12R)
FVGKRSVGS

SEQ ID NO: 36375 - protein, 9 aa, synthetic construct
  source 1..9: note = Seed: VVGARGVGK (KRAS G12R)
FVGKRSVGT

SEQ ID NO: 36376 - protein, 9 aa, synthetic construct
  source 1..9: note = Seed: VVGARGVGK (KRAS G12R)
FVGKRSVGV

SEQ ID NO: 36377 - protein, 9 aa, synthetic construct
  source 1..9: note = Seed: VVGARGVGK (KRAS G12R)
FVGKRSVGY

SEQ ID NO: 36378 - protein, 9 aa, synthetic construct
  source 1..9: note = Seed: VVGARGVGK (KRAS G12R)
FVGKRTVGA

SEQ ID NO: 36379 - protein, 9 aa, synthetic construct
  source 1..9: note = Seed: VVGARGVGK (KRAS G12R)
FVGKRTVGI

SEQ ID NO: 36380 - protein, 9 aa, synthetic construct
  source 1..9: note = Seed: VVGARGVGK (KRAS G12R)
FVGKRTVGL

SEQ ID NO: 36381 - protein, 9 aa, synthetic construct
  source 1..9: note = Seed: VVGARGVGK (KRAS G12R)
FVGKRTVGM

SEQ ID NO: 36382 - protein, 9 aa, synthetic construct
  source 1..9: note = Seed: VVGARGVGK (KRAS G12R)
FVGKRTVGR

SEQ ID NO: 36383 - protein, 9 aa, synthetic construct
  source 1..9: note = Seed: VVGARGVGK (KRAS G12R)
FVGKRTVGV

SEQ ID NO: 36384 - protein, 9 aa, synthetic construct
  source 1..9: note = Seed: VVGARGVGK (KRAS G12R)
FVGKRTVGY

SEQ ID NO: 36385 - protein, 9 aa, synthetic construct
  source 1..9: note = Seed: VVGARGVGK (KRAS G12R)
FVGKRVVGA

SEQ ID NO: 36386 - protein, 9 aa, synthetic construct
  source 1..9: note = Seed: VVGARGVGK (KRAS G12R)
FVGKRVVGI

SEQ ID NO: 36387 - protein, 9 aa, synthetic construct
  source 1..9: note = Seed: VVGARGVGK (KRAS G12R)
FVGKRVVGL

SEQ ID NO: 36388 - protein, 9 aa, synthetic construct
  source 1..9: note = Seed: VVGARGVGK (KRAS G12R)
FVGKRVVGM

SEQ ID NO: 36389 - protein, 9 aa, synthetic construct
  source 1..9: note = Seed: VVGARGVGK (KRAS G12R)
FVGKRVVGR

SEQ ID NO: 36390 - protein, 9 aa, synthetic construct
  source 1..9: note = Seed: VVGARGVGK (KRAS G12R)
FVGKRVVGV

SEQ ID NO: 36391 - protein, 9 aa, synthetic construct
  source 1..9: note = Seed: VVGARGVGK (KRAS G12R)
FVGLRAVGA

SEQ ID NO: 36392 - protein, 9 aa, synthetic construct
  source 1..9: note = Seed: VVGARGVGK (KRAS G12R)
FVGLRAVGC

SEQ ID NO: 36393 - protein, 9 aa, synthetic construct
  source 1..9: note = Seed: VVGARGVGK (KRAS G12R)
FVGLRAVGD

SEQ ID NO: 36394 - protein, 9 aa, synthetic construct
  source 1..9: note = Seed: VVGARGVGK (KRAS G12R)
FVGLRAVGE

SEQ ID NO: 36395 - protein, 9 aa, synthetic construct
  source 1..9: note = Seed: VVGARGVGK (KRAS G12R)
FVGLRAVGF

SEQ ID NO: 36396 - protein, 9 aa, synthetic construct
  source 1..9: note = Seed: VVGARGVGK (KRAS G12R)
FVGLRAVGG

SEQ ID NO: 36397 - protein, 9 aa, synthetic construct
  source 1..9: note = Seed: VVGARGVGK (KRAS G12R)
FVGLRAVGH

SEQ ID NO: 36398 - protein, 9 aa, synthetic construct
  source 1..9: note = Seed: VVGARGVGK (KRAS G12R)
FVGLRAVGI

SEQ ID NO: 36399 - protein, 9 aa, synthetic construct
  source 1..9: note = Seed: VVGARGVGK (KRAS G12R)
FVGLRAVGK

SEQ ID NO: 36400 - protein, 9 aa, synthetic construct
  source 1..9: note = Seed: VVGARGVGK (KRAS G12R)
FVGLRAVGL

SEQ ID NO: 36401 - protein, 9 aa, synthetic construct
  source 1..9: note = Seed: VVGARGVGK (KRAS G12R)
FVGLRAVGM

SEQ ID NO: 36402 - protein, 9 aa, synthetic construct
  source 1..9: note = Seed: VVGARGVGK (KRAS G12R)
FVGLRAVGN

SEQ ID NO: 36403 - protein, 9 aa, synthetic construct
  source 1..9: note = Seed: VVGARGVGK (KRAS G12R)
FVGLRAVGP

SEQ ID NO: 36404 - protein, 9 aa, synthetic construct
  source 1..9: note = Seed: VVGARGVGK (KRAS G12R)
FVGLRAVGQ

SEQ ID NO: 36405 - protein, 9 aa, synthetic construct
  source 1..9: note = Seed: VVGARGVGK (KRAS G12R)
FVGLRAVGR

SEQ ID NO: 36406 - protein, 9 aa, synthetic construct
  source 1..9: note = Seed: VVGARGVGK (KRAS G12R)
FVGLRAVGS

SEQ ID NO: 36407 - protein, 9 aa, synthetic construct
  source 1..9: note = Seed: VVGARGVGK (KRAS G12R)
FVGLRAVGT

SEQ ID NO: 36408 - protein, 9 aa, synthetic construct
  source 1..9: note = Seed: VVGARGVGK (KRAS G12R)
FVGLRAVGV

SEQ ID NO: 36409 - protein, 9 aa, synthetic construct
  source 1..9: note = Seed: VVGARGVGK (KRAS G12R)
FVGLRAVGW

SEQ ID NO: 36410 - protein, 9 aa, synthetic construct
  source 1..9: note = Seed: VVGARGVGK (KRAS G12R)
FVGLRAVGY

SEQ ID NO: 36411 - protein, 9 aa, synthetic construct
  source 1..9: note = Seed: VVGARGVGK (KRAS G12R)
FVGLRCVGA

SEQ ID NO: 36412 - protein, 9 aa, synthetic construct
  source 1..9: note = Seed: VVGARGVGK (KRAS G12R)
FVGLRCVGG

SEQ ID NO: 36413 - protein, 9 aa, synthetic construct
  source 1..9: note = Seed: VVGARGVGK (KRAS G12R)
FVGLRCVGI

SEQ ID NO: 36414 - protein, 9 aa, synthetic construct
  source 1..9: note = Seed: VVGARGVGK (KRAS G12R)
FVGLRCVGL

SEQ ID NO: 36415 - protein, 9 aa, synthetic construct
  source 1..9: note = Seed: VVGARGVGK (KRAS G12R)
FVGLRCVGM

SEQ ID NO: 36416 - protein, 9 aa, synthetic construct
  source 1..9: note = Seed: VVGARGVGK (KRAS G12R)
FVGLRCVGN

SEQ ID NO: 36417 - protein, 9 aa, synthetic construct
  source 1..9: note = Seed: VVGARGVGK (KRAS G12R)
FVGLRCVGS

SEQ ID NO: 36418 - protein, 9 aa, synthetic construct
  source 1..9: note = Seed: VVGARGVGK (KRAS G12R)
FVGLRCVGT

SEQ ID NO: 36419 - protein, 9 aa, synthetic construct
  source 1..9: note = Seed: VVGARGVGK (KRAS G12R)
FVGLRCVGV

SEQ ID NO: 36420 - protein, 9 aa, synthetic construct
  source 1..9: note = Seed: VVGARGVGK (KRAS G12R)
FVGLRDVGA

SEQ ID NO: 36421 - protein, 9 aa, synthetic construct
  source 1..9: note = Seed: VVGARGVGK (KRAS G12R)
FVGLRDVGG

SEQ ID NO: 36422 - protein, 9 aa, synthetic construct
  source 1..9: note = Seed: VVGARGVGK (KRAS G12R)
FVGLRDVGI

SEQ ID NO: 36423 - protein, 9 aa, synthetic construct
  source 1..9: note = Seed: VVGARGVGK (KRAS G12R)
FVGLRDVGL

SEQ ID NO: 36424 - protein, 9 aa, synthetic construct
  source 1..9: note = Seed: VVGARGVGK (KRAS G12R)
FVGLRDVGM

SEQ ID NO: 36425 - protein, 9 aa, synthetic construct
  source 1..9: note = Seed: VVGARGVGK (KRAS G12R)
FVGLRDVGN

SEQ ID NO: 36426 - protein, 9 aa, synthetic construct
  source 1..9: note = Seed: VVGARGVGK (KRAS G12R)
FVGLRDVGS

SEQ ID NO: 36427 - protein, 9 aa, synthetic construct
  source 1..9: note = Seed: VVGARGVGK (KRAS G12R)
FVGLRDVGT

SEQ ID NO: 36428 - protein, 9 aa, synthetic construct
  source 1..9: note = Seed: VVGARGVGK (KRAS G12R)
FVGLRDVGV

SEQ ID NO: 36429 - protein, 9 aa, synthetic construct
  source 1..9: note = Seed: VVGARGVGK (KRAS G12R)
FVGLREVGA

SEQ ID NO: 36430 - protein, 9 aa, synthetic construct
  source 1..9: note = Seed: VVGARGVGK (KRAS G12R)
FVGLREVGF

SEQ ID NO: 36431 - protein, 9 aa, synthetic construct
  source 1..9: note = Seed: VVGARGVGK (KRAS G12R)
FVGLREVGG

SEQ ID NO: 36432 - protein, 9 aa, synthetic construct
  source 1..9: note = Seed: VVGARGVGK (KRAS G12R)
FVGLREVGH

SEQ ID NO: 36433 - protein, 9 aa, synthetic construct
  source 1..9: note = Seed: VVGARGVGK (KRAS G12R)
FVGLREVGI

SEQ ID NO: 36434 - protein, 9 aa, synthetic construct
  source 1..9: note = Seed: VVGARGVGK (KRAS G12R)
FVGLREVGL

SEQ ID NO: 36435 - protein, 9 aa, synthetic construct
  source 1..9: note = Seed: VVGARGVGK (KRAS G12R)
FVGLREVGM

SEQ ID NO: 36436 - protein, 9 aa, synthetic construct
  source 1..9: note = Seed: VVGARGVGK (KRAS G12R)
FVGLREVGN

SEQ ID NO: 36437 - protein, 9 aa, synthetic construct
  source 1..9: note = Seed: VVGARGVGK (KRAS G12R)
FVGLREVGR

SEQ ID NO: 36438 - protein, 9 aa, synthetic construct
  source 1..9: note = Seed: VVGARGVGK (KRAS G12R)
FVGLREVGS

SEQ ID NO: 36439 - protein, 9 aa, synthetic construct
  source 1..9: note = Seed: VVGARGVGK (KRAS G12R)
FVGLREVGT

SEQ ID NO: 36440 - protein, 9 aa, synthetic construct
  source 1..9: note = Seed: VVGARGVGK (KRAS G12R)
FVGLREVGV

SEQ ID NO: 36441 - protein, 9 aa, synthetic construct
  source 1..9: note = Seed: VVGARGVGK (KRAS G12R)
FVGLRFVGI

SEQ ID NO: 36442 - protein, 9 aa, synthetic construct
  source 1..9: note = Seed: VVGARGVGK (KRAS G12R)
FVGLRFVGL

SEQ ID NO: 36443 - protein, 9 aa, synthetic construct
  source 1..9: note = Seed: VVGARGVGK (KRAS G12R)
FVGLRFVGM

SEQ ID NO: 36444 - protein, 9 aa, synthetic construct
  source 1..9: note = Seed: VVGARGVGK (KRAS G12R)
FVGLRFVGV

SEQ ID NO: 36445 - protein, 9 aa, synthetic construct
  source 1..9: note = Seed: VVGARGVGK (KRAS G12R)
FVGLRGVGA

SEQ ID NO: 36446 - protein, 9 aa, synthetic construct
  source 1..9: note = Seed: VVGARGVGK (KRAS G12R)
FVGLRGVGC

SEQ ID NO: 36447 - protein, 9 aa, synthetic construct
  source 1..9: note = Seed: VVGARGVGK (KRAS G12R)
FVGLRGVGD

SEQ ID NO: 36448 - protein, 9 aa, synthetic construct
  source 1..9: note = Seed: VVGARGVGK (KRAS G12R)
FVGLRGVGE

SEQ ID NO: 36449 - protein, 9 aa, synthetic construct
  source 1..9: note = Seed: VVGARGVGK (KRAS G12R)
FVGLRGVGF

SEQ ID NO: 36450 - protein, 9 aa, synthetic construct
  source 1..9: note = Seed: VVGARGVGK (KRAS G12R)
FVGLRGVGG

SEQ ID NO: 36451 - protein, 9 aa, synthetic construct
  source 1..9: note = Seed: VVGARGVGK (KRAS G12R)
FVGLRGVGH

SEQ ID NO: 36452 - protein, 9 aa, synthetic construct
  source 1..9: note = Seed: VVGARGVGK (KRAS G12R)
FVGLRGVGI

SEQ ID NO: 36453 - protein, 9 aa, synthetic construct
  source 1..9: note = Seed: VVGARGVGK (KRAS G12R)
FVGLRGVGK

SEQ ID NO: 36454 - protein, 9 aa, synthetic construct
  source 1..9: note = Seed: VVGARGVGK (KRAS G12R)
FVGLRGVGL

SEQ ID NO: 36455 - protein, 9 aa, synthetic construct
  source 1..9: note = Seed: VVGARGVGK (KRAS G12R)
FVGLRGVGM

SEQ ID NO: 36456 - protein, 9 aa, synthetic construct
  source 1..9: note = Seed: VVGARGVGK (KRAS G12R)
FVGLRGVGN

SEQ ID NO: 36457 - protein, 9 aa, synthetic construct
  source 1..9: note = Seed: VVGARGVGK (KRAS G12R)
FVGLRGVGP

SEQ ID NO: 36458 - protein, 9 aa, synthetic construct
  source 1..9: note = Seed: VVGARGVGK (KRAS G12R)
FVGLRGVGQ

SEQ ID NO: 36459 - protein, 9 aa, synthetic construct
  source 1..9: note = Seed: VVGARGVGK (KRAS G12R)
FVGLRGVGR

SEQ ID NO: 36460 - protein, 9 aa, synthetic construct
  source 1..9: note = Seed: VVGARGVGK (KRAS G12R)
FVGLRGVGS

SEQ ID NO: 36461 - protein, 9 aa, synthetic construct
  source 1..9: note = Seed: VVGARGVGK (KRAS G12R)
FVGLRGVGT

SEQ ID NO: 36462 - protein, 9 aa, synthetic construct
  source 1..9: note = Seed: VVGARGVGK (KRAS G12R)
FVGLRGVGV

SEQ ID NO: 36463 - protein, 9 aa, synthetic construct
  source 1..9: note = Seed: VVGARGVGK (KRAS G12R)
FVGLRGVGW

SEQ ID NO: 36464 - protein, 9 aa, synthetic construct
  source 1..9: note = Seed: VVGARGVGK (KRAS G12R)
FVGLRGVGY

SEQ ID NO: 36465 - protein, 9 aa, synthetic construct
  source 1..9: note = Seed: VVGARGVGK (KRAS G12R)
FVGLRHVGA

SEQ ID NO: 36466 - protein, 9 aa, synthetic construct
  source 1..9: note = Seed: VVGARGVGK (KRAS G12R)
FVGLRHVGF

SEQ ID NO: 36467 - protein, 9 aa, synthetic construct
  source 1..9: note = Seed: VVGARGVGK (KRAS G12R)
FVGLRHVGG

SEQ ID NO: 36468 - protein, 9 aa, synthetic construct
  source 1..9: note = Seed: VVGARGVGK (KRAS G12R)
FVGLRHVGH

SEQ ID NO: 36469 - protein, 9 aa, synthetic construct
  source 1..9: note = Seed: VVGARGVGK (KRAS G12R)
FVGLRHVGI

SEQ ID NO: 36470 - protein, 9 aa, synthetic construct
  source 1..9: note = Seed: VVGARGVGK (KRAS G12R)
FVGLRHVGL

SEQ ID NO: 36471 - protein, 9 aa, synthetic construct
  source 1..9: note = Seed: VVGARGVGK (KRAS G12R)
FVGLRHVGM

SEQ ID NO: 36472 - protein, 9 aa, synthetic construct
  source 1..9: note = Seed: VVGARGVGK (KRAS G12R)
FVGLRHVGN

SEQ ID NO: 36473 - protein, 9 aa, synthetic construct
  source 1..9: note = Seed: VVGARGVGK (KRAS G12R)
FVGLRHVGQ

SEQ ID NO: 36474 - protein, 9 aa, synthetic construct
  source 1..9: note = Seed: VVGARGVGK (KRAS G12R)
FVGLRHVGR

SEQ ID NO: 36475 - protein, 9 aa, synthetic construct
  source 1..9: note = Seed: VVGARGVGK (KRAS G12R)
FVGLRHVGS

SEQ ID NO: 36476 - protein, 9 aa, synthetic construct
  source 1..9: note = Seed: VVGARGVGK (KRAS G12R)
FVGLRHVGT

SEQ ID NO: 36477 - protein, 9 aa, synthetic construct
  source 1..9: note = Seed: VVGARGVGK (KRAS G12R)
FVGLRHVGV

SEQ ID NO: 36478 - protein, 9 aa, synthetic construct
  source 1..9: note = Seed: VVGARGVGK (KRAS G12R)
FVGLRHVGW

SEQ ID NO: 36479 - protein, 9 aa, synthetic construct
  source 1..9: note = Seed: VVGARGVGK (KRAS G12R)
FVGLRHVGY

SEQ ID NO: 36480 - protein, 9 aa, synthetic construct
  source 1..9: note = Seed: VVGARGVGK (KRAS G12R)
FVGLRIVGA

SEQ ID NO: 36481 - protein, 9 aa, synthetic construct
  source 1..9: note = Seed: VVGARGVGK (KRAS G12R)
FVGLRIVGD

SEQ ID NO: 36482 - protein, 9 aa, synthetic construct
  source 1..9: note = Seed: VVGARGVGK (KRAS G12R)
FVGLRIVGE

SEQ ID NO: 36483 - protein, 9 aa, synthetic construct
  source 1..9: note = Seed: VVGARGVGK (KRAS G12R)
FVGLRIVGF

SEQ ID NO: 36484 - protein, 9 aa, synthetic construct
  source 1..9: note = Seed: VVGARGVGK (KRAS G12R)
FVGLRIVGG

SEQ ID NO: 36485 - protein, 9 aa, synthetic construct
  source 1..9: note = Seed: VVGARGVGK (KRAS G12R)
FVGLRIVGH

SEQ ID NO: 36486 - protein, 9 aa, synthetic construct
  source 1..9: note = Seed: VVGARGVGK (KRAS G12R)
FVGLRIVGI

SEQ ID NO: 36487 - protein, 9 aa, synthetic construct
  source 1..9: note = Seed: VVGARGVGK (KRAS G12R)
FVGLRIVGK

SEQ ID NO: 36488 - protein, 9 aa, synthetic construct
  source 1..9: note = Seed: VVGARGVGK (KRAS G12R)
FVGLRIVGL

SEQ ID NO: 36489 - protein, 9 aa, synthetic construct
  source 1..9: note = Seed: VVGARGVGK (KRAS G12R)
FVGLRIVGM

SEQ ID NO: 36490 - protein, 9 aa, synthetic construct
  source 1..9: note = Seed: VVGARGVGK (KRAS G12R)
FVGLRIVGN

SEQ ID NO: 36491 - protein, 9 aa, synthetic construct
  source 1..9: note = Seed: VVGARGVGK (KRAS G12R)
FVGLRIVGP

SEQ ID NO: 36492 - protein, 9 aa, synthetic construct
  source 1..9: note = Seed: VVGARGVGK (KRAS G12R)
FVGLRIVGQ

SEQ ID NO: 36493 - protein, 9 aa, synthetic construct
  source 1..9: note = Seed: VVGARGVGK (KRAS G12R)
FVGLRIVGR

SEQ ID NO: 36494 - protein, 9 aa, synthetic construct
  source 1..9: note = Seed: VVGARGVGK (KRAS G12R)
FVGLRIVGS

SEQ ID NO: 36495 - protein, 9 aa, synthetic construct
  source 1..9: note = Seed: VVGARGVGK (KRAS G12R)
FVGLRIVGT

SEQ ID NO: 36496 - protein, 9 aa, synthetic construct
  source 1..9: note = Seed: VVGARGVGK (KRAS G12R)
FVGLRIVGV

SEQ ID NO: 36497 - protein, 9 aa, synthetic construct
  source 1..9: note = Seed: VVGARGVGK (KRAS G12R)
FVGLRIVGY

SEQ ID NO: 36498 - protein, 9 aa, synthetic construct
  source 1..9: note = Seed: VVGARGVGK (KRAS G12R)
FVGLRKVGA

SEQ ID NO: 36499 - protein, 9 aa, synthetic construct
  source 1..9: note = Seed: VVGARGVGK (KRAS G12R)
FVGLRKVGI

SEQ ID NO: 36500 - protein, 9 aa, synthetic construct
  source 1..9: note = Seed: VVGARGVGK (KRAS G12R)
FVGLRKVGL

SEQ ID NO: 36501 - protein, 9 aa, synthetic construct
  source 1..9: note = Seed: VVGARGVGK (KRAS G12R)
FVGLRKVGM

SEQ ID NO: 36502 - protein, 9 aa, synthetic construct
  source 1..9: note = Seed: VVGARGVGK (KRAS G12R)
FVGLRKVGN

SEQ ID NO: 36503 - protein, 9 aa, synthetic construct
  source 1..9: note = Seed: VVGARGVGK (KRAS G12R)
FVGLRKVGR

SEQ ID NO: 36504 - protein, 9 aa, synthetic construct
  source 1..9: note = Seed: VVGARGVGK (KRAS G12R)
FVGLRKVGS

SEQ ID NO: 36505 - protein, 9 aa, synthetic construct
  source 1..9: note = Seed: VVGARGVGK (KRAS G12R)
FVGLRKVGT

SEQ ID NO: 36506 - protein, 9 aa, synthetic construct
  source 1..9: note = Seed: VVGARGVGK (KRAS G12R)
FVGLRKVGV

SEQ ID NO: 36507 - protein, 9 aa, synthetic construct
  source 1..9: note = Seed: VVGARGVGK (KRAS G12R)
FVGLRKVGY

SEQ ID NO: 36508 - protein, 9 aa, synthetic construct
  source 1..9: note = Seed: VVGARGVGK (KRAS G12R)
FVGLRLVGA

SEQ ID NO: 36509 - protein, 9 aa, synthetic construct
  source 1..9: note = Seed: VVGARGVGK (KRAS G12R)
FVGLRLVGD

SEQ ID NO: 36510 - protein, 9 aa, synthetic construct
  source 1..9: note = Seed: VVGARGVGK (KRAS G12R)
FVGLRLVGE

SEQ ID NO: 36511 - protein, 9 aa, synthetic construct
  source 1..9: note = Seed: VVGARGVGK (KRAS G12R)
FVGLRLVGG

SEQ ID NO: 36512 - protein, 9 aa, synthetic construct
  source 1..9: note = Seed: VVGARGVGK (KRAS G12R)
FVGLRLVGH

SEQ ID NO: 36513 - protein, 9 aa, synthetic construct
  source 1..9: note = Seed: VVGARGVGK (KRAS G12R)
FVGLRLVGI

SEQ ID NO: 36514 - protein, 9 aa, synthetic construct
  source 1..9: note = Seed: VVGARGVGK (KRAS G12R)
FVGLRLVGL

SEQ ID NO: 36515 - protein, 9 aa, synthetic construct
  source 1..9: note = Seed: VVGARGVGK (KRAS G12R)
FVGLRLVGM

SEQ ID NO: 36516 - protein, 9 aa, synthetic construct
  source 1..9: note = Seed: VVGARGVGK (KRAS G12R)
FVGLRLVGN

SEQ ID NO: 36517 - protein, 9 aa, synthetic construct
  source 1..9: note = Seed: VVGARGVGK (KRAS G12R)
FVGLRLVGQ

SEQ ID NO: 36518 - protein, 9 aa, synthetic construct
  source 1..9: note = Seed: VVGARGVGK (KRAS G12R)
FVGLRLVGR

SEQ ID NO: 36519 - protein, 9 aa, synthetic construct
  source 1..9: note = Seed: VVGARGVGK (KRAS G12R)
FVGLRLVGS

SEQ ID NO: 36520 - protein, 9 aa, synthetic construct
  source 1..9: note = Seed: VVGARGVGK (KRAS G12R)
FVGLRLVGT

SEQ ID NO: 36521 - protein, 9 aa, synthetic construct
  source 1..9: note = Seed: VVGARGVGK (KRAS G12R)
FVGLRLVGV

SEQ ID NO: 36522 - protein, 9 aa, synthetic construct
  source 1..9: note = Seed: VVGARGVGK (KRAS G12R)
FVGLRMVGA

SEQ ID NO: 36523 - protein, 9 aa, synthetic construct
  source 1..9: note = Seed: VVGARGVGK (KRAS G12R)
FVGLRMVGD

SEQ ID NO: 36524 - protein, 9 aa, synthetic construct
  source 1..9: note = Seed: VVGARGVGK (KRAS G12R)
FVGLRMVGE

SEQ ID NO: 36525 - protein, 9 aa, synthetic construct
  source 1..9: note = Seed: VVGARGVGK (KRAS G12R)
FVGLRMVGF

SEQ ID NO: 36526 - protein, 9 aa, synthetic construct
  source 1..9: note = Seed: VVGARGVGK (KRAS G12R)
FVGLRMVGG

SEQ ID NO: 36527 - protein, 9 aa, synthetic construct
  source 1..9: note = Seed: VVGARGVGK (KRAS G12R)
FVGLRMVGH

SEQ ID NO: 36528 - protein, 9 aa, synthetic construct
  source 1..9: note = Seed: VVGARGVGK (KRAS G12R)
FVGLRMVGI

SEQ ID NO: 36529 - protein, 9 aa, synthetic construct
  source 1..9: note = Seed: VVGARGVGK (KRAS G12R)
FVGLRMVGK

SEQ ID NO: 36530 - protein, 9 aa, synthetic construct
  source 1..9: note = Seed: VVGARGVGK (KRAS G12R)
FVGLRMVGL

SEQ ID NO: 36531 - protein, 9 aa, synthetic construct
  source 1..9: note = Seed: VVGARGVGK (KRAS G12R)
FVGLRMVGM

SEQ ID NO: 36532 - protein, 9 aa, synthetic construct
  source 1..9: note = Seed: VVGARGVGK (KRAS G12R)
FVGLRMVGN

SEQ ID NO: 36533 - protein, 9 aa, synthetic construct
  source 1..9: note = Seed: VVGARGVGK (KRAS G12R)
FVGLRMVGQ

SEQ ID NO: 36534 - protein, 9 aa, synthetic construct
  source 1..9: note = Seed: VVGARGVGK (KRAS G12R)
FVGLRMVGR

SEQ ID NO: 36535 - protein, 9 aa, synthetic construct
  source 1..9: note = Seed: VVGARGVGK (KRAS G12R)
FVGLRMVGS

SEQ ID NO: 36536 - protein, 9 aa, synthetic construct
  source 1..9: note = Seed: VVGARGVGK (KRAS G12R)
FVGLRMVGT

SEQ ID NO: 36537 - protein, 9 aa, synthetic construct
  source 1..9: note = Seed: VVGARGVGK (KRAS G12R)
FVGLRMVGV

SEQ ID NO: 36538 - protein, 9 aa, synthetic construct
  source 1..9: note = Seed: VVGARGVGK (KRAS G12R)
FVGLRMVGY

SEQ ID NO: 36539 - protein, 9 aa, synthetic construct
  source 1..9: note = Seed: VVGARGVGK (KRAS G12R)
FVGLRNVGA

SEQ ID NO: 36540 - protein, 9 aa, synthetic construct
  source 1..9: note = Seed: VVGARGVGK (KRAS G12R)
FVGLRNVGC

SEQ ID NO: 36541 - protein, 9 aa, synthetic construct
  source 1..9: note = Seed: VVGARGVGK (KRAS G12R)
FVGLRNVGD

SEQ ID NO: 36542 - protein, 9 aa, synthetic construct
  source 1..9: note = Seed: VVGARGVGK (KRAS G12R)
FVGLRNVGE

SEQ ID NO: 36543 - protein, 9 aa, synthetic construct
  source 1..9: note = Seed: VVGARGVGK (KRAS G12R)
FVGLRNVGF

SEQ ID NO: 36544 - protein, 9 aa, synthetic construct
  source 1..9: note = Seed: VVGARGVGK (KRAS G12R)
FVGLRNVGG

SEQ ID NO: 36545 - protein, 9 aa, synthetic construct
  source 1..9: note = Seed: VVGARGVGK (KRAS G12R)
FVGLRNVGH

SEQ ID NO: 36546 - protein, 9 aa, synthetic construct
  source 1..9: note = Seed: VVGARGVGK (KRAS G12R)
FVGLRNVGI

SEQ ID NO: 36547 - protein, 9 aa, synthetic construct
  source 1..9: note = Seed: VVGARGVGK (KRAS G12R)
FVGLRNVGK

SEQ ID NO: 36548 - protein, 9 aa, synthetic construct
  source 1..9: note = Seed: VVGARGVGK (KRAS G12R)
FVGLRNVGL

SEQ ID NO: 36549 - protein, 9 aa, synthetic construct
  source 1..9: note = Seed: VVGARGVGK (KRAS G12R)
FVGLRNVGM

SEQ ID NO: 36550 - protein, 9 aa, synthetic construct
  source 1..9: note = Seed: VVGARGVGK (KRAS G12R)
FVGLRNVGN

SEQ ID NO: 36551 - protein, 9 aa, synthetic construct
  source 1..9: note = Seed: VVGARGVGK (KRAS G12R)
FVGLRNVGP

SEQ ID NO: 36552 - protein, 9 aa, synthetic construct
  source 1..9: note = Seed: VVGARGVGK (KRAS G12R)
FVGLRNVGQ

SEQ ID NO: 36553 - protein, 9 aa, synthetic construct
  source 1..9: note = Seed: VVGARGVGK (KRAS G12R)
FVGLRNVGR

SEQ ID NO: 36554 - protein, 9 aa, synthetic construct
  source 1..9: note = Seed: VVGARGVGK (KRAS G12R)
FVGLRNVGS

SEQ ID NO: 36555 - protein, 9 aa, synthetic construct
  source 1..9: note = Seed: VVGARGVGK (KRAS G12R)
FVGLRNVGT

SEQ ID NO: 36556 - protein, 9 aa, synthetic construct
  source 1..9: note = Seed: VVGARGVGK (KRAS G12R)
FVGLRNVGV

SEQ ID NO: 36557 - protein, 9 aa, synthetic construct
  source 1..9: note = Seed: VVGARGVGK (KRAS G12R)
FVGLRNVGW

SEQ ID NO: 36558 - protein, 9 aa, synthetic construct
  source 1..9: note = Seed: VVGARGVGK (KRAS G12R)
FVGLRNVGY

SEQ ID NO: 36559 - protein, 9 aa, synthetic construct
  source 1..9: note = Seed: VVGARGVGK (KRAS G12R)
FVGLRPVGA

SEQ ID NO: 36560 - protein, 9 aa, synthetic construct
  source 1..9: note = Seed: VVGARGVGK (KRAS G12R)
FVGLRPVGC

SEQ ID NO: 36561 - protein, 9 aa, synthetic construct
  source 1..9: note = Seed: VVGARGVGK (KRAS G12R)
FVGLRPVGD

SEQ ID NO: 36562 - protein, 9 aa, synthetic construct
  source 1..9: note = Seed: VVGARGVGK (KRAS G12R)
FVGLRPVGE

SEQ ID NO: 36563 - protein, 9 aa, synthetic construct
  source 1..9: note = Seed: VVGARGVGK (KRAS G12R)
FVGLRPVGF

SEQ ID NO: 36564 - protein, 9 aa, synthetic construct
  source 1..9: note = Seed: VVGARGVGK (KRAS G12R)
FVGLRPVGG

SEQ ID NO: 36565 - protein, 9 aa, synthetic construct
  source 1..9: note = Seed: VVGARGVGK (KRAS G12R)
FVGLRPVGH

SEQ ID NO: 36566 - protein, 9 aa, synthetic construct
  source 1..9: note = Seed: VVGARGVGK (KRAS G12R)
FVGLRPVGI

SEQ ID NO: 36567 - protein, 9 aa, synthetic construct
  source 1..9: note = Seed: VVGARGVGK (KRAS G12R)
FVGLRPVGK

SEQ ID NO: 36568 - protein, 9 aa, synthetic construct
  source 1..9: note = Seed: VVGARGVGK (KRAS G12R)
FVGLRPVGL

SEQ ID NO: 36569 - protein, 9 aa, synthetic construct
  source 1..9: note = Seed: VVGARGVGK (KRAS G12R)
FVGLRPVGM

SEQ ID NO: 36570 - protein, 9 aa, synthetic construct
  source 1..9: note = Seed: VVGARGVGK (KRAS G12R)
FVGLRPVGN

SEQ ID NO: 36571 - protein, 9 aa, synthetic construct
  source 1..9: note = Seed: VVGARGVGK (KRAS G12R)
FVGLRPVGP

SEQ ID NO: 36572 - protein, 9 aa, synthetic construct
  source 1..9: note = Seed: VVGARGVGK (KRAS G12R)
FVGLRPVGQ

SEQ ID NO: 36573 - protein, 9 aa, synthetic construct
  source 1..9: note = Seed: VVGARGVGK (KRAS G12R)
FVGLRPVGR

SEQ ID NO: 36574 - protein, 9 aa, synthetic construct
  source 1..9: note = Seed: VVGARGVGK (KRAS G12R)
FVGLRPVGS

SEQ ID NO: 36575 - protein, 9 aa, synthetic construct
  source 1..9: note = Seed: VVGARGVGK (KRAS G12R)
FVGLRPVGT

SEQ ID NO: 36576 - protein, 9 aa, synthetic construct
  source 1..9: note = Seed: VVGARGVGK (KRAS G12R)
FVGLRPVGV

SEQ ID NO: 36577 - protein, 9 aa, synthetic construct
  source 1..9: note = Seed: VVGARGVGK (KRAS G12R)
FVGLRPVGW

SEQ ID NO: 36578 - protein, 9 aa, synthetic construct
  source 1..9: note = Seed: VVGARGVGK (KRAS G12R)
FVGLRPVGY

SEQ ID NO: 36579 - protein, 9 aa, synthetic construct
  source 1..9: note = Seed: VVGARGVGK (KRAS G12R)
FVGLRQVGA

SEQ ID NO: 36580 - protein, 9 aa, synthetic construct
  source 1..9: note = Seed: VVGARGVGK (KRAS G12R)
FVGLRQVGF

SEQ ID NO: 36581 - protein, 9 aa, synthetic construct
  source 1..9: note = Seed: VVGARGVGK (KRAS G12R)
FVGLRQVGG

SEQ ID NO: 36582 - protein, 9 aa, synthetic construct
  source 1..9: note = Seed: VVGARGVGK (KRAS G12R)
FVGLRQVGH

SEQ ID NO: 36583 - protein, 9 aa, synthetic construct
  source 1..9: note = Seed: VVGARGVGK (KRAS G12R)
FVGLRQVGI

SEQ ID NO: 36584 - protein, 9 aa, synthetic construct
  source 1..9: note = Seed: VVGARGVGK (KRAS G12R)
FVGLRQVGL

SEQ ID NO: 36585 - protein, 9 aa, synthetic construct
  source 1..9: note = Seed: VVGARGVGK (KRAS G12R)
FVGLRQVGM

SEQ ID NO: 36586 - protein, 9 aa, synthetic construct
  source 1..9: note = Seed: VVGARGVGK (KRAS G12R)
FVGLRQVGN

SEQ ID NO: 36587 - protein, 9 aa, synthetic construct
  source 1..9: note = Seed: VVGARGVGK (KRAS G12R)
FVGLRQVGR

SEQ ID NO: 36588 - protein, 9 aa, synthetic construct
  source 1..9: note = Seed: VVGARGVGK (KRAS G12R)
FVGLRQVGS

SEQ ID NO: 36589 - protein, 9 aa, synthetic construct
  source 1..9: note = Seed: VVGARGVGK (KRAS G12R)
FVGLRQVGT

SEQ ID NO: 36590 - protein, 9 aa, synthetic construct
  source 1..9: note = Seed: VVGARGVGK (KRAS G12R)
FVGLRQVGV

SEQ ID NO: 36591 - protein, 9 aa, synthetic construct
  source 1..9: note = Seed: VVGARGVGK (KRAS G12R)
FVGLRQVGY

SEQ ID NO: 36592 - protein, 9 aa, synthetic construct
  source 1..9: note = Seed: VVGARGVGK (KRAS G12R)
FVGLRRVGA

SEQ ID NO: 36593 - protein, 9 aa, synthetic construct
  source 1..9: note = Seed: VVGARGVGK (KRAS G12R)
FVGLRRVGF

SEQ ID NO: 36594 - protein, 9 aa, synthetic construct
  source 1..9: note = Seed: VVGARGVGK (KRAS G12R)
FVGLRRVGH

SEQ ID NO: 36595 - protein, 9 aa, synthetic construct
  source 1..9: note = Seed: VVGARGVGK (KRAS G12R)
FVGLRRVGI

SEQ ID NO: 36596 - protein, 9 aa, synthetic construct
  source 1..9: note = Seed: VVGARGVGK (KRAS G12R)
FVGLRRVGL

SEQ ID NO: 36597 - protein, 9 aa, synthetic construct
  source 1..9: note = Seed: VVGARGVGK (KRAS G12R)
FVGLRRVGM

SEQ ID NO: 36598 - protein, 9 aa, synthetic construct
  source 1..9: note = Seed: VVGARGVGK (KRAS G12R)
FVGLRRVGR

SEQ ID NO: 36599 - protein, 9 aa, synthetic construct
  source 1..9: note = Seed: VVGARGVGK (KRAS G12R)
FVGLRRVGS

SEQ ID NO: 36600 - protein, 9 aa, synthetic construct
  source 1..9: note = Seed: VVGARGVGK (KRAS G12R)
FVGLRRVGT

SEQ ID NO: 36601 - protein, 9 aa, synthetic construct
  source 1..9: note = Seed: VVGARGVGK (KRAS G12R)
FVGLRRVGV

SEQ ID NO: 36602 - protein, 9 aa, synthetic construct
  source 1..9: note = Seed: VVGARGVGK (KRAS G12R)
FVGLRRVGY

SEQ ID NO: 36603 - protein, 9 aa, synthetic construct
  source 1..9: note = Seed: VVGARGVGK (KRAS G12R)
FVGLRSVGA

SEQ ID NO: 36604 - protein, 9 aa, synthetic construct
  source 1..9: note = Seed: VVGARGVGK (KRAS G12R)
FVGLRSVGC

SEQ ID NO: 36605 - protein, 9 aa, synthetic construct
  source 1..9: note = Seed: VVGARGVGK (KRAS G12R)
FVGLRSVGD

SEQ ID NO: 36606 - protein, 9 aa, synthetic construct
  source 1..9: note = Seed: VVGARGVGK (KRAS G12R)
FVGLRSVGE

SEQ ID NO: 36607 - protein, 9 aa, synthetic construct
  source 1..9: note = Seed: VVGARGVGK (KRAS G12R)
FVGLRSVGF

SEQ ID NO: 36608 - protein, 9 aa, synthetic construct
  source 1..9: note = Seed: VVGARGVGK (KRAS G12R)
FVGLRSVGG

SEQ ID NO: 36609 - protein, 9 aa, synthetic construct
  source 1..9: note = Seed: VVGARGVGK (KRAS G12R)
FVGLRSVGH

SEQ ID NO: 36610 - protein, 9 aa, synthetic construct
  source 1..9: note = Seed: VVGARGVGK (KRAS G12R)
FVGLRSVGI

SEQ ID NO: 36611 - protein, 9 aa, synthetic construct
  source 1..9: note = Seed: VVGARGVGK (KRAS G12R)
FVGLRSVGK

SEQ ID NO: 36612 - protein, 9 aa, synthetic construct
  source 1..9: note = Seed: VVGARGVGK (KRAS G12R)
FVGLRSVGL

SEQ ID NO: 36613 - protein, 9 aa, synthetic construct
  source 1..9: note = Seed: VVGARGVGK (KRAS G12R)
FVGLRSVGM

SEQ ID NO: 36614 - protein, 9 aa, synthetic construct
  source 1..9: note = Seed: VVGARGVGK (KRAS G12R)
FVGLRSVGN

SEQ ID NO: 36615 - protein, 9 aa, synthetic construct
  source 1..9: note = Seed: VVGARGVGK (KRAS G12R)
FVGLRSVGP

SEQ ID NO: 36616 - protein, 9 aa, synthetic construct
  source 1..9: note = Seed: VVGARGVGK (KRAS G12R)
FVGLRSVGQ

SEQ ID NO: 36617 - protein, 9 aa, synthetic construct
  source 1..9: note = Seed: VVGARGVGK (KRAS G12R)
FVGLRSVGR

SEQ ID NO: 36618 - protein, 9 aa, synthetic construct
  source 1..9: note = Seed: VVGARGVGK (KRAS G12R)
FVGLRSVGS

SEQ ID NO: 36619 - protein, 9 aa, synthetic construct
  source 1..9: note = Seed: VVGARGVGK (KRAS G12R)
FVGLRSVGT

SEQ ID NO: 36620 - protein, 9 aa, synthetic construct
  source 1..9: note = Seed: VVGARGVGK (KRAS G12R)
FVGLRSVGV

SEQ ID NO: 36621 - protein, 9 aa, synthetic construct
  source 1..9: note = Seed: VVGARGVGK (KRAS G12R)
FVGLRSVGW

SEQ ID NO: 36622 - protein, 9 aa, synthetic construct
  source 1..9: note = Seed: VVGARGVGK (KRAS G12R)
FVGLRSVGY

SEQ ID NO: 36623 - protein, 9 aa, synthetic construct
  source 1..9: note = Seed: VVGARGVGK (KRAS G12R)
FVGLRTVGA

SEQ ID NO: 36624 - protein, 9 aa, synthetic construct
  source 1..9: note = Seed: VVGARGVGK (KRAS G12R)
FVGLRTVGC

SEQ ID NO: 36625 - protein, 9 aa, synthetic construct
  source 1..9: note = Seed: VVGARGVGK (KRAS G12R)
FVGLRTVGD

SEQ ID NO: 36626 - protein, 9 aa, synthetic construct
  source 1..9: note = Seed: VVGARGVGK (KRAS G12R)
FVGLRTVGE

SEQ ID NO: 36627 - protein, 9 aa, synthetic construct
  source 1..9: note = Seed: VVGARGVGK (KRAS G12R)
FVGLRTVGF

SEQ ID NO: 36628 - protein, 9 aa, synthetic construct
  source 1..9: note = Seed: VVGARGVGK (KRAS G12R)
FVGLRTVGG

SEQ ID NO: 36629 - protein, 9 aa, synthetic construct
  source 1..9: note = Seed: VVGARGVGK (KRAS G12R)
FVGLRTVGH

SEQ ID NO: 36630 - protein, 9 aa, synthetic construct
  source 1..9: note = Seed: VVGARGVGK (KRAS G12R)
FVGLRTVGI

SEQ ID NO: 36631 - protein, 9 aa, synthetic construct
  source 1..9: note = Seed: VVGARGVGK (KRAS G12R)
FVGLRTVGK

SEQ ID NO: 36632 - protein, 9 aa, synthetic construct
  source 1..9: note = Seed: VVGARGVGK (KRAS G12R)
FVGLRTVGL

SEQ ID NO: 36633 - protein, 9 aa, synthetic construct
  source 1..9: note = Seed: VVGARGVGK (KRAS G12R)
FVGLRTVGM

SEQ ID NO: 36634 - protein, 9 aa, synthetic construct
  source 1..9: note = Seed: VVGARGVGK (KRAS G12R)
FVGLRTVGN

SEQ ID NO: 36635 - protein, 9 aa, synthetic construct
  source 1..9: note = Seed: VVGARGVGK (KRAS G12R)
FVGLRTVGP

SEQ ID NO: 36636 - protein, 9 aa, synthetic construct
  source 1..9: note = Seed: VVGARGVGK (KRAS G12R)
FVGLRTVGQ

SEQ ID NO: 36637 - protein, 9 aa, synthetic construct
  source 1..9: note = Seed: VVGARGVGK (KRAS G12R)
FVGLRTVGR

SEQ ID NO: 36638 - protein, 9 aa, synthetic construct
  source 1..9: note = Seed: VVGARGVGK (KRAS G12R)
FVGLRTVGS

SEQ ID NO: 36639 - protein, 9 aa, synthetic construct
  source 1..9: note = Seed: VVGARGVGK (KRAS G12R)
FVGLRTVGT

SEQ ID NO: 36640 - protein, 9 aa, synthetic construct
  source 1..9: note = Seed: VVGARGVGK (KRAS G12R)
FVGLRTVGV

SEQ ID NO: 36641 - protein, 9 aa, synthetic construct
  source 1..9: note = Seed: VVGARGVGK (KRAS G12R)
FVGLRTVGW

SEQ ID NO: 36642 - protein, 9 aa, synthetic construct
  source 1..9: note = Seed: VVGARGVGK (KRAS G12R)
FVGLRTVGY

SEQ ID NO: 36643 - protein, 9 aa, synthetic construct
  source 1..9: note = Seed: VVGARGVGK (KRAS G12R)
FVGLRVVGA

SEQ ID NO: 36644 - protein, 9 aa, synthetic construct
  source 1..9: note = Seed: VVGARGVGK (KRAS G12R)
FVGLRVVGC

SEQ ID NO: 36645 - protein, 9 aa, synthetic construct
  source 1..9: note = Seed: VVGARGVGK (KRAS G12R)
FVGLRVVGD

SEQ ID NO: 36646 - protein, 9 aa, synthetic construct
  source 1..9: note = Seed: VVGARGVGK (KRAS G12R)
FVGLRVVGE

SEQ ID NO: 36647 - protein, 9 aa, synthetic construct
  source 1..9: note = Seed: VVGARGVGK (KRAS G12R)
FVGLRVVGF

SEQ ID NO: 36648 - protein, 9 aa, synthetic construct
  source 1..9: note = Seed: VVGARGVGK (KRAS G12R)
FVGLRVVGG

SEQ ID NO: 36649 - protein, 9 aa, synthetic construct
  source 1..9: note = Seed: VVGARGVGK (KRAS G12R)
FVGLRVVGH

SEQ ID NO: 36650 - protein, 9 aa, synthetic construct
  source 1..9: note = Seed: VVGARGVGK (KRAS G12R)
FVGLRVVGI

SEQ ID NO: 36651 - protein, 9 aa, synthetic construct
  source 1..9: note = Seed: VVGARGVGK (KRAS G12R)
FVGLRVVGK

SEQ ID NO: 36652 - protein, 9 aa, synthetic construct
  source 1..9: note = Seed: VVGARGVGK (KRAS G12R)
FVGLRVVGL

SEQ ID NO: 36653 - protein, 9 aa, synthetic construct
  source 1..9: note = Seed: VVGARGVGK (KRAS G12R)
FVGLRVVGM

SEQ ID NO: 36654 - protein, 9 aa, synthetic construct
  source 1..9: note = Seed: VVGARGVGK (KRAS G12R)
FVGLRVVGN

SEQ ID NO: 36655 - protein, 9 aa, synthetic construct
  source 1..9: note = Seed: VVGARGVGK (KRAS G12R)
FVGLRVVGP

SEQ ID NO: 36656 - protein, 9 aa, synthetic construct
  source 1..9: note = Seed: VVGARGVGK (KRAS G12R)
FVGLRVVGQ

SEQ ID NO: 36657 - protein, 9 aa, synthetic construct
  source 1..9: note = Seed: VVGARGVGK (KRAS G12R)
FVGLRVVGR

SEQ ID NO: 36658 - protein, 9 aa, synthetic construct
  source 1..9: note = Seed: VVGARGVGK (KRAS G12R)
FVGLRVVGS

SEQ ID NO: 36659 - protein, 9 aa, synthetic construct
  source 1..9: note = Seed: VVGARGVGK (KRAS G12R)
FVGLRVVGT

SEQ ID NO: 36660 - protein, 9 aa, synthetic construct
  source 1..9: note = Seed: VVGARGVGK (KRAS G12R)
FVGLRVVGV

SEQ ID NO: 36661 - protein, 9 aa, synthetic construct
  source 1..9: note = Seed: VVGARGVGK (KRAS G12R)
FVGLRVVGY

SEQ ID NO: 36662 - protein, 9 aa, synthetic construct
  source 1..9: note = Seed: VVGARGVGK (KRAS G12R)
FVGLRWVGI

SEQ ID NO: 36663 - protein, 9 aa, synthetic construct
  source 1..9: note = Seed: VVGARGVGK (KRAS G12R)
FVGLRWVGL

SEQ ID NO: 36664 - protein, 9 aa, synthetic construct
  source 1..9: note = Seed: VVGARGVGK (KRAS G12R)
FVGLRWVGM

SEQ ID NO: 36665 - protein, 9 aa, synthetic construct
  source 1..9: note = Seed: VVGARGVGK (KRAS G12R)
FVGLRWVGN

SEQ ID NO: 36666 - protein, 9 aa, synthetic construct
  source 1..9: note = Seed: VVGARGVGK (KRAS G12R)
FVGLRWVGS

SEQ ID NO: 36667 - protein, 9 aa, synthetic construct
  source 1..9: note = Seed: VVGARGVGK (KRAS G12R)
FVGLRWVGV

SEQ ID NO: 36668 - protein, 9 aa, synthetic construct
  source 1..9: note = Seed: VVGARGVGK (KRAS G12R)
FVGLRYVGI

SEQ ID NO: 36669 - protein, 9 aa, synthetic construct
  source 1..9: note = Seed: VVGARGVGK (KRAS G12R)
FVGLRYVGL

SEQ ID NO: 36670 - protein, 9 aa, synthetic construct
  source 1..9: note = Seed: VVGARGVGK (KRAS G12R)
FVGLRYVGM

SEQ ID NO: 36671 - protein, 9 aa, synthetic construct
  source 1..9: note = Seed: VVGARGVGK (KRAS G12R)
FVGLRYVGN

SEQ ID NO: 36672 - protein, 9 aa, synthetic construct
  source 1..9: note = Seed: VVGARGVGK (KRAS G12R)
FVGLRYVGV

SEQ ID NO: 36673 - protein, 9 aa, synthetic construct
  source 1..9: note = Seed: VVGARGVGK (KRAS G12R)
FVGMRAVGA

SEQ ID NO: 36674 - protein, 9 aa, synthetic construct
  source 1..9: note = Seed: VVGARGVGK (KRAS G12R)
FVGMRAVGC

SEQ ID NO: 36675 - protein, 9 aa, synthetic construct
  source 1..9: note = Seed: VVGARGVGK (KRAS G12R)
FVGMRAVGD

SEQ ID NO: 36676 - protein, 9 aa, synthetic construct
  source 1..9: note = Seed: VVGARGVGK (KRAS G12R)
FVGMRAVGE

SEQ ID NO: 36677 - protein, 9 aa, synthetic construct
  source 1..9: note = Seed: VVGARGVGK (KRAS G12R)
FVGMRAVGF

SEQ ID NO: 36678 - protein, 9 aa, synthetic construct
  source 1..9: note = Seed: VVGARGVGK (KRAS G12R)
FVGMRAVGG

SEQ ID NO: 36679 - protein, 9 aa, synthetic construct
  source 1..9: note = Seed: VVGARGVGK (KRAS G12R)
FVGMRAVGH

SEQ ID NO: 36680 - protein, 9 aa, synthetic construct
  source 1..9: note = Seed: VVGARGVGK (KRAS G12R)
FVGMRAVGI

SEQ ID NO: 36681 - protein, 9 aa, synthetic construct
  source 1..9: note = Seed: VVGARGVGK (KRAS G12R)
FVGMRAVGK

SEQ ID NO: 36682 - protein, 9 aa, synthetic construct
  source 1..9: note = Seed: VVGARGVGK (KRAS G12R)
FVGMRAVGL

SEQ ID NO: 36683 - protein, 9 aa, synthetic construct
  source 1..9: note = Seed: VVGARGVGK (KRAS G12R)
FVGMRAVGM

SEQ ID NO: 36684 - protein, 9 aa, synthetic construct
  source 1..9: note = Seed: VVGARGVGK (KRAS G12R)
FVGMRAVGN

SEQ ID NO: 36685 - protein, 9 aa, synthetic construct
  source 1..9: note = Seed: VVGARGVGK (KRAS G12R)
FVGMRAVGP

SEQ ID NO: 36686 - protein, 9 aa, synthetic construct
  source 1..9: note = Seed: VVGARGVGK (KRAS G12R)
FVGMRAVGQ

SEQ ID NO: 36687 - protein, 9 aa, synthetic construct
  source 1..9: note = Seed: VVGARGVGK (KRAS G12R)
FVGMRAVGR

SEQ ID NO: 36688 - protein, 9 aa, synthetic construct
  source 1..9: note = Seed: VVGARGVGK (KRAS G12R)
FVGMRAVGS

SEQ ID NO: 36689 - protein, 9 aa, synthetic construct
  source 1..9: note = Seed: VVGARGVGK (KRAS G12R)
FVGMRAVGT

SEQ ID NO: 36690 - protein, 9 aa, synthetic construct
  source 1..9: note = Seed: VVGARGVGK (KRAS G12R)
FVGMRAVGV

SEQ ID NO: 36691 - protein, 9 aa, synthetic construct
  source 1..9: note = Seed: VVGARGVGK (KRAS G12R)
FVGMRAVGW

SEQ ID NO: 36692 - protein, 9 aa, synthetic construct
  source 1..9: note = Seed: VVGARGVGK (KRAS G12R)
FVGMRAVGY

SEQ ID NO: 36693 - protein, 9 aa, synthetic construct
  source 1..9: note = Seed: VVGARGVGK (KRAS G12R)
FVGMRCVGA

SEQ ID NO: 36694 - protein, 9 aa, synthetic construct
  source 1..9: note = Seed: VVGARGVGK (KRAS G12R)
FVGMRCVGG

SEQ ID NO: 36695 - protein, 9 aa, synthetic construct
  source 1..9: note = Seed: VVGARGVGK (KRAS G12R)
FVGMRCVGH

SEQ ID NO: 36696 - protein, 9 aa, synthetic construct
  source 1..9: note = Seed: VVGARGVGK (KRAS G12R)
FVGMRCVGI

SEQ ID NO: 36697 - protein, 9 aa, synthetic construct
  source 1..9: note = Seed: VVGARGVGK (KRAS G12R)
FVGMRCVGL

SEQ ID NO: 36698 - protein, 9 aa, synthetic construct
  source 1..9: note = Seed: VVGARGVGK (KRAS G12R)
FVGMRCVGM

SEQ ID NO: 36699 - protein, 9 aa, synthetic construct
  source 1..9: note = Seed: VVGARGVGK (KRAS G12R)
FVGMRCVGN

SEQ ID NO: 36700 - protein, 9 aa, synthetic construct
  source 1..9: note = Seed: VVGARGVGK (KRAS G12R)
FVGMRCVGS

SEQ ID NO: 36701 - protein, 9 aa, synthetic construct
  source 1..9: note = Seed: VVGARGVGK (KRAS G12R)
FVGMRCVGT

SEQ ID NO: 36702 - protein, 9 aa, synthetic construct
  source 1..9: note = Seed: VVGARGVGK (KRAS G12R)
FVGMRCVGV

SEQ ID NO: 36703 - protein, 9 aa, synthetic construct
  source 1..9: note = Seed: VVGARGVGK (KRAS G12R)
FVGMRDVGA

SEQ ID NO: 36704 - protein, 9 aa, synthetic construct
  source 1..9: note = Seed: VVGARGVGK (KRAS G12R)
FVGMRDVGG

SEQ ID NO: 36705 - protein, 9 aa, synthetic construct
  source 1..9: note = Seed: VVGARGVGK (KRAS G12R)
FVGMRDVGI

SEQ ID NO: 36706 - protein, 9 aa, synthetic construct
  source 1..9: note = Seed: VVGARGVGK (KRAS G12R)
FVGMRDVGL

SEQ ID NO: 36707 - protein, 9 aa, synthetic construct
  source 1..9: note = Seed: VVGARGVGK (KRAS G12R)
FVGMRDVGM

SEQ ID NO: 36708 - protein, 9 aa, synthetic construct
  source 1..9: note = Seed: VVGARGVGK (KRAS G12R)
FVGMRDVGN

SEQ ID NO: 36709 - protein, 9 aa, synthetic construct
  source 1..9: note = Seed: VVGARGVGK (KRAS G12R)
FVGMRDVGS

SEQ ID NO: 36710 - protein, 9 aa, synthetic construct
  source 1..9: note = Seed: VVGARGVGK (KRAS G12R)
FVGMRDVGT

SEQ ID NO: 36711 - protein, 9 aa, synthetic construct
  source 1..9: note = Seed: VVGARGVGK (KRAS G12R)
FVGMRDVGV

SEQ ID NO: 36712 - protein, 9 aa, synthetic construct
  source 1..9: note = Seed: VVGARGVGK (KRAS G12R)
FVGMREVGA

SEQ ID NO: 36713 - protein, 9 aa, synthetic construct
  source 1..9: note = Seed: VVGARGVGK (KRAS G12R)
FVGMREVGF

SEQ ID NO: 36714 - protein, 9 aa, synthetic construct
  source 1..9: note = Seed: VVGARGVGK (KRAS G12R)
FVGMREVGG

SEQ ID NO: 36715 - protein, 9 aa, synthetic construct
  source 1..9: note = Seed: VVGARGVGK (KRAS G12R)
FVGMREVGH

SEQ ID NO: 36716 - protein, 9 aa, synthetic construct
  source 1..9: note = Seed: VVGARGVGK (KRAS G12R)
FVGMREVGI

SEQ ID NO: 36717 - protein, 9 aa, synthetic construct
  source 1..9: note = Seed: VVGARGVGK (KRAS G12R)
FVGMREVGL

SEQ ID NO: 36718 - protein, 9 aa, synthetic construct
  source 1..9: note = Seed: VVGARGVGK (KRAS G12R)
FVGMREVGM

SEQ ID NO: 36719 - protein, 9 aa, synthetic construct
  source 1..9: note = Seed: VVGARGVGK (KRAS G12R)
FVGMREVGN

SEQ ID NO: 36720 - protein, 9 aa, synthetic construct
  source 1..9: note = Seed: VVGARGVGK (KRAS G12R)
FVGMREVGR

SEQ ID NO: 36721 - protein, 9 aa, synthetic construct
  source 1..9: note = Seed: VVGARGVGK (KRAS G12R)
FVGMREVGS

SEQ ID NO: 36722 - protein, 9 aa, synthetic construct
  source 1..9: note = Seed: VVGARGVGK (KRAS G12R)
FVGMREVGT

SEQ ID NO: 36723 - protein, 9 aa, synthetic construct
  source 1..9: note = Seed: VVGARGVGK (KRAS G12R)
FVGMREVGV

SEQ ID NO: 36724 - protein, 9 aa, synthetic construct
  source 1..9: note = Seed: VVGARGVGK (KRAS G12R)
FVGMRFVGH

SEQ ID NO: 36725 - protein, 9 aa, synthetic construct
  source 1..9: note = Seed: VVGARGVGK (KRAS G12R)
FVGMRFVGI

SEQ ID NO: 36726 - protein, 9 aa, synthetic construct
  source 1..9: note = Seed: VVGARGVGK (KRAS G12R)
FVGMRFVGL

SEQ ID NO: 36727 - protein, 9 aa, synthetic construct
  source 1..9: note = Seed: VVGARGVGK (KRAS G12R)
FVGMRFVGM

SEQ ID NO: 36728 - protein, 9 aa, synthetic construct
  source 1..9: note = Seed: VVGARGVGK (KRAS G12R)
FVGMRFVGN

SEQ ID NO: 36729 - protein, 9 aa, synthetic construct
  source 1..9: note = Seed: VVGARGVGK (KRAS G12R)
FVGMRFVGR

SEQ ID NO: 36730 - protein, 9 aa, synthetic construct
  source 1..9: note = Seed: VVGARGVGK (KRAS G12R)
FVGMRFVGS

SEQ ID NO: 36731 - protein, 9 aa, synthetic construct
  source 1..9: note = Seed: VVGARGVGK (KRAS G12R)
FVGMRFVGV

SEQ ID NO: 36732 - protein, 9 aa, synthetic construct
  source 1..9: note = Seed: VVGARGVGK (KRAS G12R)
FVGMRGVGA

SEQ ID NO: 36733 - protein, 9 aa, synthetic construct
  source 1..9: note = Seed: VVGARGVGK (KRAS G12R)
FVGMRGVGC

SEQ ID NO: 36734 - protein, 9 aa, synthetic construct
  source 1..9: note = Seed: VVGARGVGK (KRAS G12R)
FVGMRGVGD

SEQ ID NO: 36735 - protein, 9 aa, synthetic construct
  source 1..9: note = Seed: VVGARGVGK (KRAS G12R)
FVGMRGVGE

SEQ ID NO: 36736 - protein, 9 aa, synthetic construct
  source 1..9: note = Seed: VVGARGVGK (KRAS G12R)
FVGMRGVGF

SEQ ID NO: 36737 - protein, 9 aa, synthetic construct
  source 1..9: note = Seed: VVGARGVGK (KRAS G12R)
FVGMRGVGG

SEQ ID NO: 36738 - protein, 9 aa, synthetic construct
  source 1..9: note = Seed: VVGARGVGK (KRAS G12R)
FVGMRGVGH

SEQ ID NO: 36739 - protein, 9 aa, synthetic construct
  source 1..9: note = Seed: VVGARGVGK (KRAS G12R)
FVGMRGVGI

SEQ ID NO: 36740 - protein, 9 aa, synthetic construct
  source 1..9: note = Seed: VVGARGVGK (KRAS G12R)
FVGMRGVGK

SEQ ID NO: 36741 - protein, 9 aa, synthetic construct
  source 1..9: note = Seed: VVGARGVGK (KRAS G12R)
FVGMRGVGL

SEQ ID NO: 36742 - protein, 9 aa, synthetic construct
  source 1..9: note = Seed: VVGARGVGK (KRAS G12R)
FVGMRGVGM

SEQ ID NO: 36743 - protein, 9 aa, synthetic construct
  source 1..9: note = Seed: VVGARGVGK (KRAS G12R)
FVGMRGVGN

SEQ ID NO: 36744 - protein, 9 aa, synthetic construct
  source 1..9: note = Seed: VVGARGVGK (KRAS G12R)
FVGMRGVGP

SEQ ID NO: 36745 - protein, 9 aa, synthetic construct
  source 1..9: note = Seed: VVGARGVGK (KRAS G12R)
FVGMRGVGQ

SEQ ID NO: 36746 - protein, 9 aa, synthetic construct
  source 1..9: note = Seed: VVGARGVGK (KRAS G12R)
FVGMRGVGR

SEQ ID NO: 36747 - protein, 9 aa, synthetic construct
  source 1..9: note = Seed: VVGARGVGK (KRAS G12R)
FVGMRGVGS

SEQ ID NO: 36748 - protein, 9 aa, synthetic construct
  source 1..9: note = Seed: VVGARGVGK (KRAS G12R)
FVGMRGVGT

SEQ ID NO: 36749 - protein, 9 aa, synthetic construct
  source 1..9: note = Seed: VVGARGVGK (KRAS G12R)
FVGMRGVGV

SEQ ID NO: 36750 - protein, 9 aa, synthetic construct
  source 1..9: note = Seed: VVGARGVGK (KRAS G12R)
FVGMRGVGW

SEQ ID NO: 36751 - protein, 9 aa, synthetic construct
  source 1..9: note = Seed: VVGARGVGK (KRAS G12R)
FVGMRGVGY

SEQ ID NO: 36752 - protein, 9 aa, synthetic construct
  source 1..9: note = Seed: VVGARGVGK (KRAS G12R)
FVGMRHVGA

SEQ ID NO: 36753 - protein, 9 aa, synthetic construct
  source 1..9: note = Seed: VVGARGVGK (KRAS G12R)
FVGMRHVGC

SEQ ID NO: 36754 - protein, 9 aa, synthetic construct
  source 1..9: note = Seed: VVGARGVGK (KRAS G12R)
FVGMRHVGD

SEQ ID NO: 36755 - protein, 9 aa, synthetic construct
  source 1..9: note = Seed: VVGARGVGK (KRAS G12R)
FVGMRHVGF

SEQ ID NO: 36756 - protein, 9 aa, synthetic construct
  source 1..9: note = Seed: VVGARGVGK (KRAS G12R)
FVGMRHVGG

SEQ ID NO: 36757 - protein, 9 aa, synthetic construct
  source 1..9: note = Seed: VVGARGVGK (KRAS G12R)
FVGMRHVGH

SEQ ID NO: 36758 - protein, 9 aa, synthetic construct
  source 1..9: note = Seed: VVGARGVGK (KRAS G12R)
FVGMRHVGI

SEQ ID NO: 36759 - protein, 9 aa, synthetic construct
  source 1..9: note = Seed: VVGARGVGK (KRAS G12R)
FVGMRHVGL

SEQ ID NO: 36760 - protein, 9 aa, synthetic construct
  source 1..9: note = Seed: VVGARGVGK (KRAS G12R)
FVGMRHVGM

SEQ ID NO: 36761 - protein, 9 aa, synthetic construct
  source 1..9: note = Seed: VVGARGVGK (KRAS G12R)
FVGMRHVGN

SEQ ID NO: 36762 - protein, 9 aa, synthetic construct
  source 1..9: note = Seed: VVGARGVGK (KRAS G12R)
FVGMRHVGP

SEQ ID NO: 36763 - protein, 9 aa, synthetic construct
  source 1..9: note = Seed: VVGARGVGK (KRAS G12R)
FVGMRHVGQ

SEQ ID NO: 36764 - protein, 9 aa, synthetic construct
  source 1..9: note = Seed: VVGARGVGK (KRAS G12R)
FVGMRHVGR

SEQ ID NO: 36765 - protein, 9 aa, synthetic construct
  source 1..9: note = Seed: VVGARGVGK (KRAS G12R)
FVGMRHVGS

SEQ ID NO: 36766 - protein, 9 aa, synthetic construct
  source 1..9: note = Seed: VVGARGVGK (KRAS G12R)
FVGMRHVGT

SEQ ID NO: 36767 - protein, 9 aa, synthetic construct
  source 1..9: note = Seed: VVGARGVGK (KRAS G12R)
FVGMRHVGV

SEQ ID NO: 36768 - protein, 9 aa, synthetic construct
  source 1..9: note = Seed: VVGARGVGK (KRAS G12R)
FVGMRHVGW

SEQ ID NO: 36769 - protein, 9 aa, synthetic construct
  source 1..9: note = Seed: VVGARGVGK (KRAS G12R)
FVGMRHVGY

SEQ ID NO: 36770 - protein, 9 aa, synthetic construct
  source 1..9: note = Seed: VVGARGVGK (KRAS G12R)
FVGMRIVGA

SEQ ID NO: 36771 - protein, 9 aa, synthetic construct
  source 1..9: note = Seed: VVGARGVGK (KRAS G12R)
FVGMRIVGD

SEQ ID NO: 36772 - protein, 9 aa, synthetic construct
  source 1..9: note = Seed: VVGARGVGK (KRAS G12R)
FVGMRIVGE

SEQ ID NO: 36773 - protein, 9 aa, synthetic construct
  source 1..9: note = Seed: VVGARGVGK (KRAS G12R)
FVGMRIVGF

SEQ ID NO: 36774 - protein, 9 aa, synthetic construct
  source 1..9: note = Seed: VVGARGVGK (KRAS G12R)
FVGMRIVGG

SEQ ID NO: 36775 - protein, 9 aa, synthetic construct
  source 1..9: note = Seed: VVGARGVGK (KRAS G12R)
FVGMRIVGH

SEQ ID NO: 36776 - protein, 9 aa, synthetic construct
  source 1..9: note = Seed: VVGARGVGK (KRAS G12R)
FVGMRIVGI

SEQ ID NO: 36777 - protein, 9 aa, synthetic construct
  source 1..9: note = Seed: VVGARGVGK (KRAS G12R)
FVGMRIVGK

SEQ ID NO: 36778 - protein, 9 aa, synthetic construct
  source 1..9: note = Seed: VVGARGVGK (KRAS G12R)
FVGMRIVGL

SEQ ID NO: 36779 - protein, 9 aa, synthetic construct
  source 1..9: note = Seed: VVGARGVGK (KRAS G12R)
FVGMRIVGM

SEQ ID NO: 36780 - protein, 9 aa, synthetic construct
  source 1..9: note = Seed: VVGARGVGK (KRAS G12R)
FVGMRIVGN

SEQ ID NO: 36781 - protein, 9 aa, synthetic construct
  source 1..9: note = Seed: VVGARGVGK (KRAS G12R)
FVGMRIVGP

SEQ ID NO: 36782 - protein, 9 aa, synthetic construct
  source 1..9: note = Seed: VVGARGVGK (KRAS G12R)
FVGMRIVGQ

SEQ ID NO: 36783 - protein, 9 aa, synthetic construct
  source 1..9: note = Seed: VVGARGVGK (KRAS G12R)
FVGMRIVGR

SEQ ID NO: 36784 - protein, 9 aa, synthetic construct
  source 1..9: note = Seed: VVGARGVGK (KRAS G12R)
FVGMRIVGS

SEQ ID NO: 36785 - protein, 9 aa, synthetic construct
  source 1..9: note = Seed: VVGARGVGK (KRAS G12R)
FVGMRIVGT

SEQ ID NO: 36786 - protein, 9 aa, synthetic construct
  source 1..9: note = Seed: VVGARGVGK (KRAS G12R)
FVGMRIVGV

SEQ ID NO: 36787 - protein, 9 aa, synthetic construct
  source 1..9: note = Seed: VVGARGVGK (KRAS G12R)
FVGMRIVGY

SEQ ID NO: 36788 - protein, 9 aa, synthetic construct
  source 1..9: note = Seed: VVGARGVGK (KRAS G12R)
FVGMRKVGA

SEQ ID NO: 36789 - protein, 9 aa, synthetic construct
  source 1..9: note = Seed: VVGARGVGK (KRAS G12R)
FVGMRKVGF

SEQ ID NO: 36790 - protein, 9 aa, synthetic construct
  source 1..9: note = Seed: VVGARGVGK (KRAS G12R)
FVGMRKVGH

SEQ ID NO: 36791 - protein, 9 aa, synthetic construct
  source 1..9: note = Seed: VVGARGVGK (KRAS G12R)
FVGMRKVGI

SEQ ID NO: 36792 - protein, 9 aa, synthetic construct
  source 1..9: note = Seed: VVGARGVGK (KRAS G12R)
FVGMRKVGK

SEQ ID NO: 36793 - protein, 9 aa, synthetic construct
  source 1..9: note = Seed: VVGARGVGK (KRAS G12R)
FVGMRKVGL

SEQ ID NO: 36794 - protein, 9 aa, synthetic construct
  source 1..9: note = Seed: VVGARGVGK (KRAS G12R)
FVGMRKVGM

SEQ ID NO: 36795 - protein, 9 aa, synthetic construct
  source 1..9: note = Seed: VVGARGVGK (KRAS G12R)
FVGMRKVGN

SEQ ID NO: 36796 - protein, 9 aa, synthetic construct
  source 1..9: note = Seed: VVGARGVGK (KRAS G12R)
FVGMRKVGR

SEQ ID NO: 36797 - protein, 9 aa, synthetic construct
  source 1..9: note = Seed: VVGARGVGK (KRAS G12R)
FVGMRKVGS

SEQ ID NO: 36798 - protein, 9 aa, synthetic construct
  source 1..9: note = Seed: VVGARGVGK (KRAS G12R)
FVGMRKVGT

SEQ ID NO: 36799 - protein, 9 aa, synthetic construct
  source 1..9: note = Seed: VVGARGVGK (KRAS G12R)
FVGMRKVGV

SEQ ID NO: 36800 - protein, 9 aa, synthetic construct
  source 1..9: note = Seed: VVGARGVGK (KRAS G12R)
FVGMRKVGY

SEQ ID NO: 36801 - protein, 9 aa, synthetic construct
  source 1..9: note = Seed: VVGARGVGK (KRAS G12R)
FVGMRLVGA

SEQ ID NO: 36802 - protein, 9 aa, synthetic construct
  source 1..9: note = Seed: VVGARGVGK (KRAS G12R)
FVGMRLVGD

SEQ ID NO: 36803 - protein, 9 aa, synthetic construct
  source 1..9: note = Seed: VVGARGVGK (KRAS G12R)
FVGMRLVGE

SEQ ID NO: 36804 - protein, 9 aa, synthetic construct
  source 1..9: note = Seed: VVGARGVGK (KRAS G12R)
FVGMRLVGG

SEQ ID NO: 36805 - protein, 9 aa, synthetic construct
  source 1..9: note = Seed: VVGARGVGK (KRAS G12R)
FVGMRLVGH

SEQ ID NO: 36806 - protein, 9 aa, synthetic construct
  source 1..9: note = Seed: VVGARGVGK (KRAS G12R)
FVGMRLVGI

SEQ ID NO: 36807 - protein, 9 aa, synthetic construct
  source 1..9: note = Seed: VVGARGVGK (KRAS G12R)
FVGMRLVGK

SEQ ID NO: 36808 - protein, 9 aa, synthetic construct
  source 1..9: note = Seed: VVGARGVGK (KRAS G12R)
FVGMRLVGL

SEQ ID NO: 36809 - protein, 9 aa, synthetic construct
  source 1..9: note = Seed: VVGARGVGK (KRAS G12R)
FVGMRLVGM

SEQ ID NO: 36810 - protein, 9 aa, synthetic construct
  source 1..9: note = Seed: VVGARGVGK (KRAS G12R)
FVGMRLVGN

SEQ ID NO: 36811 - protein, 9 aa, synthetic construct
  source 1..9: note = Seed: VVGARGVGK (KRAS G12R)
FVGMRLVGQ

SEQ ID NO: 36812 - protein, 9 aa, synthetic construct
  source 1..9: note = Seed: VVGARGVGK (KRAS G12R)
FVGMRLVGR

SEQ ID NO: 36813 - protein, 9 aa, synthetic construct
  source 1..9: note = Seed: VVGARGVGK (KRAS G12R)
FVGMRLVGS

SEQ ID NO: 36814 - protein, 9 aa, synthetic construct
  source 1..9: note = Seed: VVGARGVGK (KRAS G12R)
FVGMRLVGT

SEQ ID NO: 36815 - protein, 9 aa, synthetic construct
  source 1..9: note = Seed: VVGARGVGK (KRAS G12R)
FVGMRLVGV

SEQ ID NO: 36816 - protein, 9 aa, synthetic construct
  source 1..9: note = Seed: VVGARGVGK (KRAS G12R)
FVGMRLVGY

SEQ ID NO: 36817 - protein, 9 aa, synthetic construct
  source 1..9: note = Seed: VVGARGVGK (KRAS G12R)
FVGMRMVGA

SEQ ID NO: 36818 - protein, 9 aa, synthetic construct
  source 1..9: note = Seed: VVGARGVGK (KRAS G12R)
FVGMRMVGD

SEQ ID NO: 36819 - protein, 9 aa, synthetic construct
  source 1..9: note = Seed: VVGARGVGK (KRAS G12R)
FVGMRMVGE

SEQ ID NO: 36820 - protein, 9 aa, synthetic construct
  source 1..9: note = Seed: VVGARGVGK (KRAS G12R)
FVGMRMVGG

SEQ ID NO: 36821 - protein, 9 aa, synthetic construct
  source 1..9: note = Seed: VVGARGVGK (KRAS G12R)
FVGMRMVGH

SEQ ID NO: 36822 - protein, 9 aa, synthetic construct
  source 1..9: note = Seed: VVGARGVGK (KRAS G12R)
FVGMRMVGI

SEQ ID NO: 36823 - protein, 9 aa, synthetic construct
  source 1..9: note = Seed: VVGARGVGK (KRAS G12R)
FVGMRMVGK

SEQ ID NO: 36824 - protein, 9 aa, synthetic construct
  source 1..9: note = Seed: VVGARGVGK (KRAS G12R)
FVGMRMVGL

SEQ ID NO: 36825 - protein, 9 aa, synthetic construct
  source 1..9: note = Seed: VVGARGVGK (KRAS G12R)
FVGMRMVGM

SEQ ID NO: 36826 - protein, 9 aa, synthetic construct
  source 1..9: note = Seed: VVGARGVGK (KRAS G12R)
FVGMRMVGN

SEQ ID NO: 36827 - protein, 9 aa, synthetic construct
  source 1..9: note = Seed: VVGARGVGK (KRAS G12R)
FVGMRMVGQ

SEQ ID NO: 36828 - protein, 9 aa, synthetic construct
  source 1..9: note = Seed: VVGARGVGK (KRAS G12R)
FVGMRMVGR

SEQ ID NO: 36829 - protein, 9 aa, synthetic construct
  source 1..9: note = Seed: VVGARGVGK (KRAS G12R)
FVGMRMVGS

SEQ ID NO: 36830 - protein, 9 aa, synthetic construct
  source 1..9: note = Seed: VVGARGVGK (KRAS G12R)
FVGMRMVGT

SEQ ID NO: 36831 - protein, 9 aa, synthetic construct
  source 1..9: note = Seed: VVGARGVGK (KRAS G12R)
FVGMRMVGV

SEQ ID NO: 36832 - protein, 9 aa, synthetic construct
  source 1..9: note = Seed: VVGARGVGK (KRAS G12R)
FVGMRMVGY

SEQ ID NO: 36833 - protein, 9 aa, synthetic construct
  source 1..9: note = Seed: VVGARGVGK (KRAS G12R)
FVGMRNVGA

SEQ ID NO: 36834 - protein, 9 aa, synthetic construct
  source 1..9: note = Seed: VVGARGVGK (KRAS G12R)
FVGMRNVGC

SEQ ID NO: 36835 - protein, 9 aa, synthetic construct
  source 1..9: note = Seed: VVGARGVGK (KRAS G12R)
FVGMRNVGD

SEQ ID NO: 36836 - protein, 9 aa, synthetic construct
  source 1..9: note = Seed: VVGARGVGK (KRAS G12R)
FVGMRNVGE

SEQ ID NO: 36837 - protein, 9 aa, synthetic construct
  source 1..9: note = Seed: VVGARGVGK (KRAS G12R)
FVGMRNVGF

SEQ ID NO: 36838 - protein, 9 aa, synthetic construct
  source 1..9: note = Seed: VVGARGVGK (KRAS G12R)
FVGMRNVGG

SEQ ID NO: 36839 - protein, 9 aa, synthetic construct
  source 1..9: note = Seed: VVGARGVGK (KRAS G12R)
FVGMRNVGH

SEQ ID NO: 36840 - protein, 9 aa, synthetic construct
  source 1..9: note = Seed: VVGARGVGK (KRAS G12R)
FVGMRNVGI

SEQ ID NO: 36841 - protein, 9 aa, synthetic construct
  source 1..9: note = Seed: VVGARGVGK (KRAS G12R)
FVGMRNVGK

SEQ ID NO: 36842 - protein, 9 aa, synthetic construct
  source 1..9: note = Seed: VVGARGVGK (KRAS G12R)
FVGMRNVGL

SEQ ID NO: 36843 - protein, 9 aa, synthetic construct
  source 1..9: note = Seed: VVGARGVGK (KRAS G12R)
FVGMRNVGM

SEQ ID NO: 36844 - protein, 9 aa, synthetic construct
  source 1..9: note = Seed: VVGARGVGK (KRAS G12R)
FVGMRNVGN

SEQ ID NO: 36845 - protein, 9 aa, synthetic construct
  source 1..9: note = Seed: VVGARGVGK (KRAS G12R)
FVGMRNVGP

SEQ ID NO: 36846 - protein, 9 aa, synthetic construct
  source 1..9: note = Seed: VVGARGVGK (KRAS G12R)
FVGMRNVGQ

SEQ ID NO: 36847 - protein, 9 aa, synthetic construct
  source 1..9: note = Seed: VVGARGVGK (KRAS G12R)
FVGMRNVGR

SEQ ID NO: 36848 - protein, 9 aa, synthetic construct
  source 1..9: note = Seed: VVGARGVGK (KRAS G12R)
FVGMRNVGS

SEQ ID NO: 36849 - protein, 9 aa, synthetic construct
  source 1..9: note = Seed: VVGARGVGK (KRAS G12R)
FVGMRNVGT

SEQ ID NO: 36850 - protein, 9 aa, synthetic construct
  source 1..9: note = Seed: VVGARGVGK (KRAS G12R)
FVGMRNVGV

SEQ ID NO: 36851 - protein, 9 aa, synthetic construct
  source 1..9: note = Seed: VVGARGVGK (KRAS G12R)
FVGMRNVGW

SEQ ID NO: 36852 - protein, 9 aa, synthetic construct
  source 1..9: note = Seed: VVGARGVGK (KRAS G12R)
FVGMRNVGY

SEQ ID NO: 36853 - protein, 9 aa, synthetic construct
  source 1..9: note = Seed: VVGARGVGK (KRAS G12R)
FVGMRPVGA

SEQ ID NO: 36854 - protein, 9 aa, synthetic construct
  source 1..9: note = Seed: VVGARGVGK (KRAS G12R)
FVGMRPVGC

SEQ ID NO: 36855 - protein, 9 aa, synthetic construct
  source 1..9: note = Seed: VVGARGVGK (KRAS G12R)
FVGMRPVGD

SEQ ID NO: 36856 - protein, 9 aa, synthetic construct
  source 1..9: note = Seed: VVGARGVGK (KRAS G12R)
FVGMRPVGE

SEQ ID NO: 36857 - protein, 9 aa, synthetic construct
  source 1..9: note = Seed: VVGARGVGK (KRAS G12R)
FVGMRPVGF

SEQ ID NO: 36858 - protein, 9 aa, synthetic construct
  source 1..9: note = Seed: VVGARGVGK (KRAS G12R)
FVGMRPVGG

SEQ ID NO: 36859 - protein, 9 aa, synthetic construct
  source 1..9: note = Seed: VVGARGVGK (KRAS G12R)
FVGMRPVGH

SEQ ID NO: 36860 - protein, 9 aa, synthetic construct
  source 1..9: note = Seed: VVGARGVGK (KRAS G12R)
FVGMRPVGI

SEQ ID NO: 36861 - protein, 9 aa, synthetic construct
  source 1..9: note = Seed: VVGARGVGK (KRAS G12R)
FVGMRPVGK

SEQ ID NO: 36862 - protein, 9 aa, synthetic construct
  source 1..9: note = Seed: VVGARGVGK (KRAS G12R)
FVGMRPVGL

SEQ ID NO: 36863 - protein, 9 aa, synthetic construct
  source 1..9: note = Seed: VVGARGVGK (KRAS G12R)
FVGMRPVGM

SEQ ID NO: 36864 - protein, 9 aa, synthetic construct
  source 1..9: note = Seed: VVGARGVGK (KRAS G12R)
FVGMRPVGN

SEQ ID NO: 36865 - protein, 9 aa, synthetic construct
  source 1..9: note = Seed: VVGARGVGK (KRAS G12R)
FVGMRPVGP

SEQ ID NO: 36866 - protein, 9 aa, synthetic construct
  source 1..9: note = Seed: VVGARGVGK (KRAS G12R)
FVGMRPVGQ

SEQ ID NO: 36867 - protein, 9 aa, synthetic construct
  source 1..9: note = Seed: VVGARGVGK (KRAS G12R)
FVGMRPVGR

SEQ ID NO: 36868 - protein, 9 aa, synthetic construct
  source 1..9: note = Seed: VVGARGVGK (KRAS G12R)
FVGMRPVGS

SEQ ID NO: 36869 - protein, 9 aa, synthetic construct
  source 1..9: note = Seed: VVGARGVGK (KRAS G12R)
FVGMRPVGT

SEQ ID NO: 36870 - protein, 9 aa, synthetic construct
  source 1..9: note = Seed: VVGARGVGK (KRAS G12R)
FVGMRPVGV

SEQ ID NO: 36871 - protein, 9 aa, synthetic construct
  source 1..9: note = Seed: VVGARGVGK (KRAS G12R)
FVGMRPVGW

SEQ ID NO: 36872 - protein, 9 aa, synthetic construct
  source 1..9: note = Seed: VVGARGVGK (KRAS G12R)
FVGMRPVGY

SEQ ID NO: 36873 - protein, 9 aa, synthetic construct
  source 1..9: note = Seed: VVGARGVGK (KRAS G12R)
FVGMRQVGA

SEQ ID NO: 36874 - protein, 9 aa, synthetic construct
  source 1..9: note = Seed: VVGARGVGK (KRAS G12R)
FVGMRQVGF

SEQ ID NO: 36875 - protein, 9 aa, synthetic construct
  source 1..9: note = Seed: VVGARGVGK (KRAS G12R)
FVGMRQVGG

SEQ ID NO: 36876 - protein, 9 aa, synthetic construct
  source 1..9: note = Seed: VVGARGVGK (KRAS G12R)
FVGMRQVGH

SEQ ID NO: 36877 - protein, 9 aa, synthetic construct
  source 1..9: note = Seed: VVGARGVGK (KRAS G12R)
FVGMRQVGI

SEQ ID NO: 36878 - protein, 9 aa, synthetic construct
  source 1..9: note = Seed: VVGARGVGK (KRAS G12R)
FVGMRQVGL

SEQ ID NO: 36879 - protein, 9 aa, synthetic construct
  source 1..9: note = Seed: VVGARGVGK (KRAS G12R)
FVGMRQVGM

SEQ ID NO: 36880 - protein, 9 aa, synthetic construct
  source 1..9: note = Seed: VVGARGVGK (KRAS G12R)
FVGMRQVGN

SEQ ID NO: 36881 - protein, 9 aa, synthetic construct
  source 1..9: note = Seed: VVGARGVGK (KRAS G12R)
FVGMRQVGQ

SEQ ID NO: 36882 - protein, 9 aa, synthetic construct
  source 1..9: note = Seed: VVGARGVGK (KRAS G12R)
FVGMRQVGR

SEQ ID NO: 36883 - protein, 9 aa, synthetic construct
  source 1..9: note = Seed: VVGARGVGK (KRAS G12R)
FVGMRQVGS

SEQ ID NO: 36884 - protein, 9 aa, synthetic construct
  source 1..9: note = Seed: VVGARGVGK (KRAS G12R)
FVGMRQVGT

SEQ ID NO: 36885 - protein, 9 aa, synthetic construct
  source 1..9: note = Seed: VVGARGVGK (KRAS G12R)
FVGMRQVGV

SEQ ID NO: 36886 - protein, 9 aa, synthetic construct
  source 1..9: note = Seed: VVGARGVGK (KRAS G12R)
FVGMRQVGY

SEQ ID NO: 36887 - protein, 9 aa, synthetic construct
  source 1..9: note = Seed: VVGARGVGK (KRAS G12R)
FVGMRRVGA

SEQ ID NO: 36888 - protein, 9 aa, synthetic construct
  source 1..9: note = Seed: VVGARGVGK (KRAS G12R)
FVGMRRVGF

SEQ ID NO: 36889 - protein, 9 aa, synthetic construct
  source 1..9: note = Seed: VVGARGVGK (KRAS G12R)
FVGMRRVGH

SEQ ID NO: 36890 - protein, 9 aa, synthetic construct
  source 1..9: note = Seed: VVGARGVGK (KRAS G12R)
FVGMRRVGI

SEQ ID NO: 36891 - protein, 9 aa, synthetic construct
  source 1..9: note = Seed: VVGARGVGK (KRAS G12R)
FVGMRRVGK

SEQ ID NO: 36892 - protein, 9 aa, synthetic construct
  source 1..9: note = Seed: VVGARGVGK (KRAS G12R)
FVGMRRVGL

SEQ ID NO: 36893 - protein, 9 aa, synthetic construct
  source 1..9: note = Seed: VVGARGVGK (KRAS G12R)
FVGMRRVGM

SEQ ID NO: 36894 - protein, 9 aa, synthetic construct
  source 1..9: note = Seed: VVGARGVGK (KRAS G12R)
FVGMRRVGR

SEQ ID NO: 36895 - protein, 9 aa, synthetic construct
  source 1..9: note = Seed: VVGARGVGK (KRAS G12R)
FVGMRRVGS

SEQ ID NO: 36896 - protein, 9 aa, synthetic construct
  source 1..9: note = Seed: VVGARGVGK (KRAS G12R)
FVGMRRVGT

SEQ ID NO: 36897 - protein, 9 aa, synthetic construct
  source 1..9: note = Seed: VVGARGVGK (KRAS G12R)
FVGMRRVGV

SEQ ID NO: 36898 - protein, 9 aa, synthetic construct
  source 1..9: note = Seed: VVGARGVGK (KRAS G12R)
FVGMRRVGY

SEQ ID NO: 36899 - protein, 9 aa, synthetic construct
  source 1..9: note = Seed: VVGARGVGK (KRAS G12R)
FVGMRSVGA

SEQ ID NO: 36900 - protein, 9 aa, synthetic construct
  source 1..9: note = Seed: VVGARGVGK (KRAS G12R)
FVGMRSVGC

SEQ ID NO: 36901 - protein, 9 aa, synthetic construct
  source 1..9: note = Seed: VVGARGVGK (KRAS G12R)
FVGMRSVGD

SEQ ID NO: 36902 - protein, 9 aa, synthetic construct
  source 1..9: note = Seed: VVGARGVGK (KRAS G12R)
FVGMRSVGE

SEQ ID NO: 36903 - protein, 9 aa, synthetic construct
  source 1..9: note = Seed: VVGARGVGK (KRAS G12R)
FVGMRSVGF

SEQ ID NO: 36904 - protein, 9 aa, synthetic construct
  source 1..9: note = Seed: VVGARGVGK (KRAS G12R)
FVGMRSVGG

SEQ ID NO: 36905 - protein, 9 aa, synthetic construct
  source 1..9: note = Seed: VVGARGVGK (KRAS G12R)
FVGMRSVGH

SEQ ID NO: 36906 - protein, 9 aa, synthetic construct
  source 1..9: note = Seed: VVGARGVGK (KRAS G12R)
FVGMRSVGI

SEQ ID NO: 36907 - protein, 9 aa, synthetic construct
  source 1..9: note = Seed: VVGARGVGK (KRAS G12R)
FVGMRSVGK

SEQ ID NO: 36908 - protein, 9 aa, synthetic construct
  source 1..9: note = Seed: VVGARGVGK (KRAS G12R)
FVGMRSVGL

SEQ ID NO: 36909 - protein, 9 aa, synthetic construct
  source 1..9: note = Seed: VVGARGVGK (KRAS G12R)
FVGMRSVGM

SEQ ID NO: 36910 - protein, 9 aa, synthetic construct
  source 1..9: note = Seed: VVGARGVGK (KRAS G12R)
FVGMRSVGN

SEQ ID NO: 36911 - protein, 9 aa, synthetic construct
  source 1..9: note = Seed: VVGARGVGK (KRAS G12R)
FVGMRSVGP

SEQ ID NO: 36912 - protein, 9 aa, synthetic construct
  source 1..9: note = Seed: VVGARGVGK (KRAS G12R)
FVGMRSVGQ

SEQ ID NO: 36913 - protein, 9 aa, synthetic construct
  source 1..9: note = Seed: VVGARGVGK (KRAS G12R)
FVGMRSVGR

SEQ ID NO: 36914 - protein, 9 aa, synthetic construct
  source 1..9: note = Seed: VVGARGVGK (KRAS G12R)
FVGMRSVGS

SEQ ID NO: 36915 - protein, 9 aa, synthetic construct
  source 1..9: note = Seed: VVGARGVGK (KRAS G12R)
FVGMRSVGT

SEQ ID NO: 36916 - protein, 9 aa, synthetic construct
  source 1..9: note = Seed: VVGARGVGK (KRAS G12R)
FVGMRSVGV

SEQ ID NO: 36917 - protein, 9 aa, synthetic construct
  source 1..9: note = Seed: VVGARGVGK (KRAS G12R)
FVGMRSVGW

SEQ ID NO: 36918 - protein, 9 aa, synthetic construct
  source 1..9: note = Seed: VVGARGVGK (KRAS G12R)
FVGMRSVGY

SEQ ID NO: 36919 - protein, 9 aa, synthetic construct
  source 1..9: note = Seed: VVGARGVGK (KRAS G12R)
FVGMRTVGA

SEQ ID NO: 36920 - protein, 9 aa, synthetic construct
  source 1..9: note = Seed: VVGARGVGK (KRAS G12R)
FVGMRTVGC

SEQ ID NO: 36921 - protein, 9 aa, synthetic construct
  source 1..9: note = Seed: VVGARGVGK (KRAS G12R)
FVGMRTVGD

SEQ ID NO: 36922 - protein, 9 aa, synthetic construct
  source 1..9: note = Seed: VVGARGVGK (KRAS G12R)
FVGMRTVGE

SEQ ID NO: 36923 - protein, 9 aa, synthetic construct
  source 1..9: note = Seed: VVGARGVGK (KRAS G12R)
FVGMRTVGF

SEQ ID NO: 36924 - protein, 9 aa, synthetic construct
  source 1..9: note = Seed: VVGARGVGK (KRAS G12R)
FVGMRTVGG

SEQ ID NO: 36925 - protein, 9 aa, synthetic construct
  source 1..9: note = Seed: VVGARGVGK (KRAS G12R)
FVGMRTVGH

SEQ ID NO: 36926 - protein, 9 aa, synthetic construct
  source 1..9: note = Seed: VVGARGVGK (KRAS G12R)
FVGMRTVGI

SEQ ID NO: 36927 - protein, 9 aa, synthetic construct
  source 1..9: note = Seed: VVGARGVGK (KRAS G12R)
FVGMRTVGK

SEQ ID NO: 36928 - protein, 9 aa, synthetic construct
  source 1..9: note = Seed: VVGARGVGK (KRAS G12R)
FVGMRTVGL

SEQ ID NO: 36929 - protein, 9 aa, synthetic construct
  source 1..9: note = Seed: VVGARGVGK (KRAS G12R)
FVGMRTVGM

SEQ ID NO: 36930 - protein, 9 aa, synthetic construct
  source 1..9: note = Seed: VVGARGVGK (KRAS G12R)
FVGMRTVGN

SEQ ID NO: 36931 - protein, 9 aa, synthetic construct
  source 1..9: note = Seed: VVGARGVGK (KRAS G12R)
FVGMRTVGP

SEQ ID NO: 36932 - protein, 9 aa, synthetic construct
  source 1..9: note = Seed: VVGARGVGK (KRAS G12R)
FVGMRTVGQ

SEQ ID NO: 36933 - protein, 9 aa, synthetic construct
  source 1..9: note = Seed: VVGARGVGK (KRAS G12R)
FVGMRTVGR

SEQ ID NO: 36934 - protein, 9 aa, synthetic construct
  source 1..9: note = Seed: VVGARGVGK (KRAS G12R)
FVGMRTVGS

SEQ ID NO: 36935 - protein, 9 aa, synthetic construct
  source 1..9: note = Seed: VVGARGVGK (KRAS G12R)
FVGMRTVGT

SEQ ID NO: 36936 - protein, 9 aa, synthetic construct
  source 1..9: note = Seed: VVGARGVGK (KRAS G12R)
FVGMRTVGV

SEQ ID NO: 36937 - protein, 9 aa, synthetic construct
  source 1..9: note = Seed: VVGARGVGK (KRAS G12R)
FVGMRTVGW

SEQ ID NO: 36938 - protein, 9 aa, synthetic construct
  source 1..9: note = Seed: VVGARGVGK (KRAS G12R)
FVGMRTVGY

SEQ ID NO: 36939 - protein, 9 aa, synthetic construct
  source 1..9: note = Seed: VVGARGVGK (KRAS G12R)
FVGMRVVGA

SEQ ID NO: 36940 - protein, 9 aa, synthetic construct
  source 1..9: note = Seed: VVGARGVGK (KRAS G12R)
FVGMRVVGC

SEQ ID NO: 36941 - protein, 9 aa, synthetic construct
  source 1..9: note = Seed: VVGARGVGK (KRAS G12R)
FVGMRVVGD

SEQ ID NO: 36942 - protein, 9 aa, synthetic construct
  source 1..9: note = Seed: VVGARGVGK (KRAS G12R)
FVGMRVVGE

SEQ ID NO: 36943 - protein, 9 aa, synthetic construct
  source 1..9: note = Seed: VVGARGVGK (KRAS G12R)
FVGMRVVGF

SEQ ID NO: 36944 - protein, 9 aa, synthetic construct
  source 1..9: note = Seed: VVGARGVGK (KRAS G12R)
FVGMRVVGG

SEQ ID NO: 36945 - protein, 9 aa, synthetic construct
  source 1..9: note = Seed: VVGARGVGK (KRAS G12R)
FVGMRVVGH

SEQ ID NO: 36946 - protein, 9 aa, synthetic construct
  source 1..9: note = Seed: VVGARGVGK (KRAS G12R)
FVGMRVVGI

SEQ ID NO: 36947 - protein, 9 aa, synthetic construct
  source 1..9: note = Seed: VVGARGVGK (KRAS G12R)
FVGMRVVGK

SEQ ID NO: 36948 - protein, 9 aa, synthetic construct
  source 1..9: note = Seed: VVGARGVGK (KRAS G12R)
FVGMRVVGL

SEQ ID NO: 36949 - protein, 9 aa, synthetic construct
  source 1..9: note = Seed: VVGARGVGK (KRAS G12R)
FVGMRVVGM

SEQ ID NO: 36950 - protein, 9 aa, synthetic construct
  source 1..9: note = Seed: VVGARGVGK (KRAS G12R)
FVGMRVVGN

SEQ ID NO: 36951 - protein, 9 aa, synthetic construct
  source 1..9: note = Seed: VVGARGVGK (KRAS G12R)
FVGMRVVGP

SEQ ID NO: 36952 - protein, 9 aa, synthetic construct
  source 1..9: note = Seed: VVGARGVGK (KRAS G12R)
FVGMRVVGQ

SEQ ID NO: 36953 - protein, 9 aa, synthetic construct
  source 1..9: note = Seed: VVGARGVGK (KRAS G12R)
FVGMRVVGR

SEQ ID NO: 36954 - protein, 9 aa, synthetic construct
  source 1..9: note = Seed: VVGARGVGK (KRAS G12R)
FVGMRVVGS

SEQ ID NO: 36955 - protein, 9 aa, synthetic construct
  source 1..9: note = Seed: VVGARGVGK (KRAS G12R)
FVGMRVVGT

SEQ ID NO: 36956 - protein, 9 aa, synthetic construct
  source 1..9: note = Seed: VVGARGVGK (KRAS G12R)
FVGMRVVGV

SEQ ID NO: 36957 - protein, 9 aa, synthetic construct
  source 1..9: note = Seed: VVGARGVGK (KRAS G12R)
FVGMRVVGY

SEQ ID NO: 36958 - protein, 9 aa, synthetic construct
  source 1..9: note = Seed: VVGARGVGK (KRAS G12R)
FVGMRWVGI

SEQ ID NO: 36959 - protein, 9 aa, synthetic construct
  source 1..9: note = Seed: VVGARGVGK (KRAS G12R)
FVGMRWVGL

SEQ ID NO: 36960 - protein, 9 aa, synthetic construct
  source 1..9: note = Seed: VVGARGVGK (KRAS G12R)
FVGMRWVGM

SEQ ID NO: 36961 - protein, 9 aa, synthetic construct
  source 1..9: note = Seed: VVGARGVGK (KRAS G12R)
FVGMRWVGN

SEQ ID NO: 36962 - protein, 9 aa, synthetic construct
  source 1..9: note = Seed: VVGARGVGK (KRAS G12R)
FVGMRWVGS

SEQ ID NO: 36963 - protein, 9 aa, synthetic construct
  source 1..9: note = Seed: VVGARGVGK (KRAS G12R)
FVGMRWVGV

SEQ ID NO: 36964 - protein, 9 aa, synthetic construct
  source 1..9: note = Seed: VVGARGVGK (KRAS G12R)
FVGMRYVGI

SEQ ID NO: 36965 - protein, 9 aa, synthetic construct
  source 1..9: note = Seed: VVGARGVGK (KRAS G12R)
FVGMRYVGL

SEQ ID NO: 36966 - protein, 9 aa, synthetic construct
  source 1..9: note = Seed: VVGARGVGK (KRAS G12R)
FVGMRYVGM

SEQ ID NO: 36967 - protein, 9 aa, synthetic construct
  source 1..9: note = Seed: VVGARGVGK (KRAS G12R)
FVGMRYVGN

SEQ ID NO: 36968 - protein, 9 aa, synthetic construct
  source 1..9: note = Seed: VVGARGVGK (KRAS G12R)
FVGMRYVGS

SEQ ID NO: 36969 - protein, 9 aa, synthetic construct
  source 1..9: note = Seed: VVGARGVGK (KRAS G12R)
FVGMRYVGV

SEQ ID NO: 36970 - protein, 9 aa, synthetic construct
  source 1..9: note = Seed: VVGARGVGK (KRAS G12R)
FVGNRAVGA

SEQ ID NO: 36971 - protein, 9 aa, synthetic construct
  source 1..9: note = Seed: VVGARGVGK (KRAS G12R)
FVGNRAVGC

SEQ ID NO: 36972 - protein, 9 aa, synthetic construct
  source 1..9: note = Seed: VVGARGVGK (KRAS G12R)
FVGNRAVGE

SEQ ID NO: 36973 - protein, 9 aa, synthetic construct
  source 1..9: note = Seed: VVGARGVGK (KRAS G12R)
FVGNRAVGF

SEQ ID NO: 36974 - protein, 9 aa, synthetic construct
  source 1..9: note = Seed: VVGARGVGK (KRAS G12R)
FVGNRAVGG

SEQ ID NO: 36975 - protein, 9 aa, synthetic construct
  source 1..9: note = Seed: VVGARGVGK (KRAS G12R)
FVGNRAVGH

SEQ ID NO: 36976 - protein, 9 aa, synthetic construct
  source 1..9: note = Seed: VVGARGVGK (KRAS G12R)
FVGNRAVGI

SEQ ID NO: 36977 - protein, 9 aa, synthetic construct
  source 1..9: note = Seed: VVGARGVGK (KRAS G12R)
FVGNRAVGK

SEQ ID NO: 36978 - protein, 9 aa, synthetic construct
  source 1..9: note = Seed: VVGARGVGK (KRAS G12R)
FVGNRAVGL

SEQ ID NO: 36979 - protein, 9 aa, synthetic construct
  source 1..9: note = Seed: VVGARGVGK (KRAS G12R)
FVGNRAVGM

SEQ ID NO: 36980 - protein, 9 aa, synthetic construct
  source 1..9: note = Seed: VVGARGVGK (KRAS G12R)
FVGNRAVGN

SEQ ID NO: 36981 - protein, 9 aa, synthetic construct
  source 1..9: note = Seed: VVGARGVGK (KRAS G12R)
FVGNRAVGP

SEQ ID NO: 36982 - protein, 9 aa, synthetic construct
  source 1..9: note = Seed: VVGARGVGK (KRAS G12R)
FVGNRAVGQ

SEQ ID NO: 36983 - protein, 9 aa, synthetic construct
  source 1..9: note = Seed: VVGARGVGK (KRAS G12R)
FVGNRAVGR

SEQ ID NO: 36984 - protein, 9 aa, synthetic construct
  source 1..9: note = Seed: VVGARGVGK (KRAS G12R)
FVGNRAVGS

SEQ ID NO: 36985 - protein, 9 aa, synthetic construct
  source 1..9: note = Seed: VVGARGVGK (KRAS G12R)
FVGNRAVGT

SEQ ID NO: 36986 - protein, 9 aa, synthetic construct
  source 1..9: note = Seed: VVGARGVGK (KRAS G12R)
FVGNRAVGV

SEQ ID NO: 36987 - protein, 9 aa, synthetic construct
  source 1..9: note = Seed: VVGARGVGK (KRAS G12R)
FVGNRAVGW

SEQ ID NO: 36988 - protein, 9 aa, synthetic construct
  source 1..9: note = Seed: VVGARGVGK (KRAS G12R)
FVGNRAVGY

SEQ ID NO: 36989 - protein, 9 aa, synthetic construct
  source 1..9: note = Seed: VVGARGVGK (KRAS G12R)
FVGNRGVGA

SEQ ID NO: 36990 - protein, 9 aa, synthetic construct
  source 1..9: note = Seed: VVGARGVGK (KRAS G12R)
FVGNRGVGF

SEQ ID NO: 36991 - protein, 9 aa, synthetic construct
  source 1..9: note = Seed: VVGARGVGK (KRAS G12R)
FVGNRGVGG

SEQ ID NO: 36992 - protein, 9 aa, synthetic construct
  source 1..9: note = Seed: VVGARGVGK (KRAS G12R)
FVGNRGVGI

SEQ ID NO: 36993 - protein, 9 aa, synthetic construct
  source 1..9: note = Seed: VVGARGVGK (KRAS G12R)
FVGNRGVGL

SEQ ID NO: 36994 - protein, 9 aa, synthetic construct
  source 1..9: note = Seed: VVGARGVGK (KRAS G12R)
FVGNRGVGM

SEQ ID NO: 36995 - protein, 9 aa, synthetic construct
  source 1..9: note = Seed: VVGARGVGK (KRAS G12R)
FVGNRGVGN

SEQ ID NO: 36996 - protein, 9 aa, synthetic construct
  source 1..9: note = Seed: VVGARGVGK (KRAS G12R)
FVGNRGVGS

SEQ ID NO: 36997 - protein, 9 aa, synthetic construct
  source 1..9: note = Seed: VVGARGVGK (KRAS G12R)
FVGNRGVGT

SEQ ID NO: 36998 - protein, 9 aa, synthetic construct
  source 1..9: note = Seed: VVGARGVGK (KRAS G12R)
FVGNRGVGV

SEQ ID NO: 36999 - protein, 9 aa, synthetic construct
  source 1..9: note = Seed: VVGARGVGK (KRAS G12R)
FVGNRGVGY

SEQ ID NO: 37000 - protein, 9 aa, synthetic construct
  source 1..9: note = Seed: VVGARGVGK (KRAS G12R)
FVGNRHVGA

SEQ ID NO: 37001 - protein, 9 aa, synthetic construct
  source 1..9: note = Seed: VVGARGVGK (KRAS G12R)
FVGNRHVGL

SEQ ID NO: 37002 - protein, 9 aa, synthetic construct
  source 1..9: note = Seed: VVGARGVGK (KRAS G12R)
FVGNRHVGM

SEQ ID NO: 37003 - protein, 9 aa, synthetic construct
  source 1..9: note = Seed: VVGARGVGK (KRAS G12R)
FVGNRHVGV

SEQ ID NO: 37004 - protein, 9 aa, synthetic construct
  source 1..9: note = Seed: VVGARGVGK (KRAS G12R)
FVGNRIVGA

SEQ ID NO: 37005 - protein, 9 aa, synthetic construct
  source 1..9: note = Seed: VVGARGVGK (KRAS G12R)
FVGNRIVGG

SEQ ID NO: 37006 - protein, 9 aa, synthetic construct
  source 1..9: note = Seed: VVGARGVGK (KRAS G12R)
FVGNRIVGI

SEQ ID NO: 37007 - protein, 9 aa, synthetic construct
  source 1..9: note = Seed: VVGARGVGK (KRAS G12R)
FVGNRIVGL

SEQ ID NO: 37008 - protein, 9 aa, synthetic construct
  source 1..9: note = Seed: VVGARGVGK (KRAS G12R)
FVGNRIVGM

SEQ ID NO: 37009 - protein, 9 aa, synthetic construct
  source 1..9: note = Seed: VVGARGVGK (KRAS G12R)
FVGNRIVGN

SEQ ID NO: 37010 - protein, 9 aa, synthetic construct
  source 1..9: note = Seed: VVGARGVGK (KRAS G12R)
FVGNRIVGR

SEQ ID NO: 37011 - protein, 9 aa, synthetic construct
  source 1..9: note = Seed: VVGARGVGK (KRAS G12R)
FVGNRIVGS

SEQ ID NO: 37012 - protein, 9 aa, synthetic construct
  source 1..9: note = Seed: VVGARGVGK (KRAS G12R)
FVGNRIVGT

SEQ ID NO: 37013 - protein, 9 aa, synthetic construct
  source 1..9: note = Seed: VVGARGVGK (KRAS G12R)
FVGNRIVGV

SEQ ID NO: 37014 - protein, 9 aa, synthetic construct
  source 1..9: note = Seed: VVGARGVGK (KRAS G12R)
FVGNRIVGY

SEQ ID NO: 37015 - protein, 9 aa, synthetic construct
  source 1..9: note = Seed: VVGARGVGK (KRAS G12R)
FVGNRKVGR

SEQ ID NO: 37016 - protein, 9 aa, synthetic construct
  source 1..9: note = Seed: VVGARGVGK (KRAS G12R)
FVGNRLVGA

SEQ ID NO: 37017 - protein, 9 aa, synthetic construct
  source 1..9: note = Seed: VVGARGVGK (KRAS G12R)
FVGNRLVGG

SEQ ID NO: 37018 - protein, 9 aa, synthetic construct
  source 1..9: note = Seed: VVGARGVGK (KRAS G12R)
FVGNRLVGI

SEQ ID NO: 37019 - protein, 9 aa, synthetic construct
  source 1..9: note = Seed: VVGARGVGK (KRAS G12R)
FVGNRLVGL

SEQ ID NO: 37020 - protein, 9 aa, synthetic construct
  source 1..9: note = Seed: VVGARGVGK (KRAS G12R)
FVGNRLVGM

SEQ ID NO: 37021 - protein, 9 aa, synthetic construct
  source 1..9: note = Seed: VVGARGVGK (KRAS G12R)
FVGNRLVGN

SEQ ID NO: 37022 - protein, 9 aa, synthetic construct
  source 1..9: note = Seed: VVGARGVGK (KRAS G12R)
FVGNRLVGS

SEQ ID NO: 37023 - protein, 9 aa, synthetic construct
  source 1..9: note = Seed: VVGARGVGK (KRAS G12R)
FVGNRLVGV

SEQ ID NO: 37024 - protein, 9 aa, synthetic construct
  source 1..9: note = Seed: VVGARGVGK (KRAS G12R)
FVGNRMVGA

SEQ ID NO: 37025 - protein, 9 aa, synthetic construct
  source 1..9: note = Seed: VVGARGVGK (KRAS G12R)
FVGNRMVGG

SEQ ID NO: 37026 - protein, 9 aa, synthetic construct
  source 1..9: note = Seed: VVGARGVGK (KRAS G12R)
FVGNRMVGI

SEQ ID NO: 37027 - protein, 9 aa, synthetic construct
  source 1..9: note = Seed: VVGARGVGK (KRAS G12R)
FVGNRMVGL

SEQ ID NO: 37028 - protein, 9 aa, synthetic construct
  source 1..9: note = Seed: VVGARGVGK (KRAS G12R)
FVGNRMVGM

SEQ ID NO: 37029 - protein, 9 aa, synthetic construct
  source 1..9: note = Seed: VVGARGVGK (KRAS G12R)
FVGNRMVGN

SEQ ID NO: 37030 - protein, 9 aa, synthetic construct
  source 1..9: note = Seed: VVGARGVGK (KRAS G12R)
FVGNRMVGS

SEQ ID NO: 37031 - protein, 9 aa, synthetic construct
  source 1..9: note = Seed: VVGARGVGK (KRAS G12R)
FVGNRMVGT

SEQ ID NO: 37032 - protein, 9 aa, synthetic construct
  source 1..9: note = Seed: VVGARGVGK (KRAS G12R)
FVGNRMVGV

SEQ ID NO: 37033 - protein, 9 aa, synthetic construct
  source 1..9: note = Seed: VVGARGVGK (KRAS G12R)
FVGNRNVGA

SEQ ID NO: 37034 - protein, 9 aa, synthetic construct
  source 1..9: note = Seed: VVGARGVGK (KRAS G12R)
FVGNRNVGI

SEQ ID NO: 37035 - protein, 9 aa, synthetic construct
  source 1..9: note = Seed: VVGARGVGK (KRAS G12R)
FVGNRNVGL

SEQ ID NO: 37036 - protein, 9 aa, synthetic construct
  source 1..9: note = Seed: VVGARGVGK (KRAS G12R)
FVGNRNVGM

SEQ ID NO: 37037 - protein, 9 aa, synthetic construct
  source 1..9: note = Seed: VVGARGVGK (KRAS G12R)
FVGNRNVGS

SEQ ID NO: 37038 - protein, 9 aa, synthetic construct
  source 1..9: note = Seed: VVGARGVGK (KRAS G12R)
FVGNRNVGT

SEQ ID NO: 37039 - protein, 9 aa, synthetic construct
  source 1..9: note = Seed: VVGARGVGK (KRAS G12R)
FVGNRNVGV

SEQ ID NO: 37040 - protein, 9 aa, synthetic construct
  source 1..9: note = Seed: VVGARGVGK (KRAS G12R)
FVGNRPVGA

SEQ ID NO: 37041 - protein, 9 aa, synthetic construct
  source 1..9: note = Seed: VVGARGVGK (KRAS G12R)
FVGNRPVGC

SEQ ID NO: 37042 - protein, 9 aa, synthetic construct
  source 1..9: note = Seed: VVGARGVGK (KRAS G12R)
FVGNRPVGF

SEQ ID NO: 37043 - protein, 9 aa, synthetic construct
  source 1..9: note = Seed: VVGARGVGK (KRAS G12R)
FVGNRPVGG

SEQ ID NO: 37044 - protein, 9 aa, synthetic construct
  source 1..9: note = Seed: VVGARGVGK (KRAS G12R)
FVGNRPVGH

SEQ ID NO: 37045 - protein, 9 aa, synthetic construct
  source 1..9: note = Seed: VVGARGVGK (KRAS G12R)
FVGNRPVGI

SEQ ID NO: 37046 - protein, 9 aa, synthetic construct
  source 1..9: note = Seed: VVGARGVGK (KRAS G12R)
FVGNRPVGL

SEQ ID NO: 37047 - protein, 9 aa, synthetic construct
  source 1..9: note = Seed: VVGARGVGK (KRAS G12R)
FVGNRPVGM

SEQ ID NO: 37048 - protein, 9 aa, synthetic construct
  source 1..9: note = Seed: VVGARGVGK (KRAS G12R)
FVGNRPVGN

SEQ ID NO: 37049 - protein, 9 aa, synthetic construct
  source 1..9: note = Seed: VVGARGVGK (KRAS G12R)
FVGNRPVGQ

SEQ ID NO: 37050 - protein, 9 aa, synthetic construct
  source 1..9: note = Seed: VVGARGVGK (KRAS G12R)
FVGNRPVGR

SEQ ID NO: 37051 - protein, 9 aa, synthetic construct
  source 1..9: note = Seed: VVGARGVGK (KRAS G12R)
FVGNRPVGS

SEQ ID NO: 37052 - protein, 9 aa, synthetic construct
  source 1..9: note = Seed: VVGARGVGK (KRAS G12R)
FVGNRPVGT

SEQ ID NO: 37053 - protein, 9 aa, synthetic construct
  source 1..9: note = Seed: VVGARGVGK (KRAS G12R)
FVGNRPVGV

SEQ ID NO: 37054 - protein, 9 aa, synthetic construct
  source 1..9: note = Seed: VVGARGVGK (KRAS G12R)
FVGNRPVGW

SEQ ID NO: 37055 - protein, 9 aa, synthetic construct
  source 1..9: note = Seed: VVGARGVGK (KRAS G12R)
FVGNRPVGY

SEQ ID NO: 37056 - protein, 9 aa, synthetic construct
  source 1..9: note = Seed: VVGARGVGK (KRAS G12R)
FVGNRQVGA

SEQ ID NO: 37057 - protein, 9 aa, synthetic construct
  source 1..9: note = Seed: VVGARGVGK (KRAS G12R)
FVGNRQVGI

SEQ ID NO: 37058 - protein, 9 aa, synthetic construct
  source 1..9: note = Seed: VVGARGVGK (KRAS G12R)
FVGNRQVGL

SEQ ID NO: 37059 - protein, 9 aa, synthetic construct
  source 1..9: note = Seed: VVGARGVGK (KRAS G12R)
FVGNRQVGV

SEQ ID NO: 37060 - protein, 9 aa, synthetic construct
  source 1..9: note = Seed: VVGARGVGK (KRAS G12R)
FVGNRRVGA

SEQ ID NO: 37061 - protein, 9 aa, synthetic construct
  source 1..9: note = Seed: VVGARGVGK (KRAS G12R)
FVGNRRVGF

SEQ ID NO: 37062 - protein, 9 aa, synthetic construct
  source 1..9: note = Seed: VVGARGVGK (KRAS G12R)
FVGNRRVGI

SEQ ID NO: 37063 - protein, 9 aa, synthetic construct
  source 1..9: note = Seed: VVGARGVGK (KRAS G12R)
FVGNRRVGK

SEQ ID NO: 37064 - protein, 9 aa, synthetic construct
  source 1..9: note = Seed: VVGARGVGK (KRAS G12R)
FVGNRRVGL

SEQ ID NO: 37065 - protein, 9 aa, synthetic construct
  source 1..9: note = Seed: VVGARGVGK (KRAS G12R)
FVGNRRVGM

SEQ ID NO: 37066 - protein, 9 aa, synthetic construct
  source 1..9: note = Seed: VVGARGVGK (KRAS G12R)
FVGNRRVGR

SEQ ID NO: 37067 - protein, 9 aa, synthetic construct
  source 1..9: note = Seed: VVGARGVGK (KRAS G12R)
FVGNRRVGV

SEQ ID NO: 37068 - protein, 9 aa, synthetic construct
  source 1..9: note = Seed: VVGARGVGK (KRAS G12R)
FVGNRRVGY

SEQ ID NO: 37069 - protein, 9 aa, synthetic construct
  source 1..9: note = Seed: VVGARGVGK (KRAS G12R)
FVGNRSVGA

SEQ ID NO: 37070 - protein, 9 aa, synthetic construct
  source 1..9: note = Seed: VVGARGVGK (KRAS G12R)
FVGNRSVGC

SEQ ID NO: 37071 - protein, 9 aa, synthetic construct
  source 1..9: note = Seed: VVGARGVGK (KRAS G12R)
FVGNRSVGF

SEQ ID NO: 37072 - protein, 9 aa, synthetic construct
  source 1..9: note = Seed: VVGARGVGK (KRAS G12R)
FVGNRSVGG

SEQ ID NO: 37073 - protein, 9 aa, synthetic construct
  source 1..9: note = Seed: VVGARGVGK (KRAS G12R)
FVGNRSVGI

SEQ ID NO: 37074 - protein, 9 aa, synthetic construct
  source 1..9: note = Seed: VVGARGVGK (KRAS G12R)
FVGNRSVGL

SEQ ID NO: 37075 - protein, 9 aa, synthetic construct
  source 1..9: note = Seed: VVGARGVGK (KRAS G12R)
FVGNRSVGM

SEQ ID NO: 37076 - protein, 9 aa, synthetic construct
  source 1..9: note = Seed: VVGARGVGK (KRAS G12R)
FVGNRSVGN

SEQ ID NO: 37077 - protein, 9 aa, synthetic construct
  source 1..9: note = Seed: VVGARGVGK (KRAS G12R)
FVGNRSVGQ

SEQ ID NO: 37078 - protein, 9 aa, synthetic construct
  source 1..9: note = Seed: VVGARGVGK (KRAS G12R)
FVGNRSVGS

SEQ ID NO: 37079 - protein, 9 aa, synthetic construct
  source 1..9: note = Seed: VVGARGVGK (KRAS G12R)
FVGNRSVGT

SEQ ID NO: 37080 - protein, 9 aa, synthetic construct
  source 1..9: note = Seed: VVGARGVGK (KRAS G12R)
FVGNRSVGV

SEQ ID NO: 37081 - protein, 9 aa, synthetic construct
  source 1..9: note = Seed: VVGARGVGK (KRAS G12R)
FVGNRSVGY

SEQ ID NO: 37082 - protein, 9 aa, synthetic construct
  source 1..9: note = Seed: VVGARGVGK (KRAS G12R)
FVGNRTVGA

SEQ ID NO: 37083 - protein, 9 aa, synthetic construct
  source 1..9: note = Seed: VVGARGVGK (KRAS G12R)
FVGNRTVGF

SEQ ID NO: 37084 - protein, 9 aa, synthetic construct
  source 1..9: note = Seed: VVGARGVGK (KRAS G12R)
FVGNRTVGG

SEQ ID NO: 37085 - protein, 9 aa, synthetic construct
  source 1..9: note = Seed: VVGARGVGK (KRAS G12R)
FVGNRTVGI

SEQ ID NO: 37086 - protein, 9 aa, synthetic construct
  source 1..9: note = Seed: VVGARGVGK (KRAS G12R)
FVGNRTVGL

SEQ ID NO: 37087 - protein, 9 aa, synthetic construct
  source 1..9: note = Seed: VVGARGVGK (KRAS G12R)
FVGNRTVGM

SEQ ID NO: 37088 - protein, 9 aa, synthetic construct
  source 1..9: note = Seed: VVGARGVGK (KRAS G12R)
FVGNRTVGN

SEQ ID NO: 37089 - protein, 9 aa, synthetic construct
  source 1..9: note = Seed: VVGARGVGK (KRAS G12R)
FVGNRTVGS

SEQ ID NO: 37090 - protein, 9 aa, synthetic construct
  source 1..9: note = Seed: VVGARGVGK (KRAS G12R)
FVGNRTVGT

SEQ ID NO: 37091 - protein, 9 aa, synthetic construct
  source 1..9: note = Seed: VVGARGVGK (KRAS G12R)
FVGNRTVGV

SEQ ID NO: 37092 - protein, 9 aa, synthetic construct
  source 1..9: note = Seed: VVGARGVGK (KRAS G12R)
FVGNRTVGY

SEQ ID NO: 37093 - protein, 9 aa, synthetic construct
  source 1..9: note = Seed: VVGARGVGK (KRAS G12R)
FVGNRVVGA

SEQ ID NO: 37094 - protein, 9 aa, synthetic construct
  source 1..9: note = Seed: VVGARGVGK (KRAS G12R)
FVGNRVVGF

SEQ ID NO: 37095 - protein, 9 aa, synthetic construct
  source 1..9: note = Seed: VVGARGVGK (KRAS G12R)
FVGNRVVGG

SEQ ID NO: 37096 - protein, 9 aa, synthetic construct
  source 1..9: note = Seed: VVGARGVGK (KRAS G12R)
FVGNRVVGH

SEQ ID NO: 37097 - protein, 9 aa, synthetic construct
  source 1..9: note = Seed: VVGARGVGK (KRAS G12R)
FVGNRVVGI

SEQ ID NO: 37098 - protein, 9 aa, synthetic construct
  source 1..9: note = Seed: VVGARGVGK (KRAS G12R)
FVGNRVVGL

SEQ ID NO: 37099 - protein, 9 aa, synthetic construct
  source 1..9: note = Seed: VVGARGVGK (KRAS G12R)
FVGNRVVGM

SEQ ID NO: 37100 - protein, 9 aa, synthetic construct
  source 1..9: note = Seed: VVGARGVGK (KRAS G12R)
FVGNRVVGN

SEQ ID NO: 37101 - protein, 9 aa, synthetic construct
  source 1..9: note = Seed: VVGARGVGK (KRAS G12R)
FVGNRVVGR

SEQ ID NO: 37102 - protein, 9 aa, synthetic construct
  source 1..9: note = Seed: VVGARGVGK (KRAS G12R)
FVGNRVVGS

SEQ ID NO: 37103 - protein, 9 aa, synthetic construct
  source 1..9: note = Seed: VVGARGVGK (KRAS G12R)
FVGNRVVGT

SEQ ID NO: 37104 - protein, 9 aa, synthetic construct
  source 1..9: note = Seed: VVGARGVGK (KRAS G12R)
FVGNRVVGV

SEQ ID NO: 37105 - protein, 9 aa, synthetic construct
  source 1..9: note = Seed: VVGARGVGK (KRAS G12R)
FVGNRVVGY

SEQ ID NO: 37106 - protein, 9 aa, synthetic construct
  source 1..9: note = Seed: VVGARGVGK (KRAS G12R)
FVGNRYVGA

SEQ ID NO: 37107 - protein, 9 aa, synthetic construct
  source 1..9: note = Seed: VVGARGVGK (KRAS G12R)
FVGPRAVGA

SEQ ID NO: 37108 - protein, 9 aa, synthetic construct
  source 1..9: note = Seed: VVGARGVGK (KRAS G12R)
FVGPRAVGF

SEQ ID NO: 37109 - protein, 9 aa, synthetic construct
  source 1..9: note = Seed: VVGARGVGK (KRAS G12R)
FVGPRAVGI

SEQ ID NO: 37110 - protein, 9 aa, synthetic construct
  source 1..9: note = Seed: VVGARGVGK (KRAS G12R)
FVGPRAVGL

SEQ ID NO: 37111 - protein, 9 aa, synthetic construct
  source 1..9: note = Seed: VVGARGVGK (KRAS G12R)
FVGPRAVGM

SEQ ID NO: 37112 - protein, 9 aa, synthetic construct
  source 1..9: note = Seed: VVGARGVGK (KRAS G12R)
FVGPRAVGS

SEQ ID NO: 37113 - protein, 9 aa, synthetic construct
  source 1..9: note = Seed: VVGARGVGK (KRAS G12R)
FVGPRAVGT

SEQ ID NO: 37114 - protein, 9 aa, synthetic construct
  source 1..9: note = Seed: VVGARGVGK (KRAS G12R)
FVGPRAVGV

SEQ ID NO: 37115 - protein, 9 aa, synthetic construct
  source 1..9: note = Seed: VVGARGVGK (KRAS G12R)
FVGPRAVGY

SEQ ID NO: 37116 - protein, 9 aa, synthetic construct
  source 1..9: note = Seed: VVGARGVGK (KRAS G12R)
FVGPRGVGI

SEQ ID NO: 37117 - protein, 9 aa, synthetic construct
  source 1..9: note = Seed: VVGARGVGK (KRAS G12R)
FVGPRGVGL

SEQ ID NO: 37118 - protein, 9 aa, synthetic construct
  source 1..9: note = Seed: VVGARGVGK (KRAS G12R)
FVGPRGVGV

SEQ ID NO: 37119 - protein, 9 aa, synthetic construct
  source 1..9: note = Seed: VVGARGVGK (KRAS G12R)
FVGPRIVGI

SEQ ID NO: 37120 - protein, 9 aa, synthetic construct
  source 1..9: note = Seed: VVGARGVGK (KRAS G12R)
FVGPRIVGL

SEQ ID NO: 37121 - protein, 9 aa, synthetic construct
  source 1..9: note = Seed: VVGARGVGK (KRAS G12R)
FVGPRIVGM

SEQ ID NO: 37122 - protein, 9 aa, synthetic construct
  source 1..9: note = Seed: VVGARGVGK (KRAS G12R)
FVGPRIVGV

SEQ ID NO: 37123 - protein, 9 aa, synthetic construct
  source 1..9: note = Seed: VVGARGVGK (KRAS G12R)
FVGPRLVGI

SEQ ID NO: 37124 - protein, 9 aa, synthetic construct
  source 1..9: note = Seed: VVGARGVGK (KRAS G12R)
FVGPRLVGV

SEQ ID NO: 37125 - protein, 9 aa, synthetic construct
  source 1..9: note = Seed: VVGARGVGK (KRAS G12R)
FVGPRMVGI

SEQ ID NO: 37126 - protein, 9 aa, synthetic construct
  source 1..9: note = Seed: VVGARGVGK (KRAS G12R)
FVGPRMVGL

SEQ ID NO: 37127 - protein, 9 aa, synthetic construct
  source 1..9: note = Seed: VVGARGVGK (KRAS G12R)
FVGPRMVGV

SEQ ID NO: 37128 - protein, 9 aa, synthetic construct
  source 1..9: note = Seed: VVGARGVGK (KRAS G12R)
FVGPRNVGL

SEQ ID NO: 37129 - protein, 9 aa, synthetic construct
  source 1..9: note = Seed: VVGARGVGK (KRAS G12R)
FVGPRNVGV

SEQ ID NO: 37130 - protein, 9 aa, synthetic construct
  source 1..9: note = Seed: VVGARGVGK (KRAS G12R)
FVGPRPVGI

SEQ ID NO: 37131 - protein, 9 aa, synthetic construct
  source 1..9: note = Seed: VVGARGVGK (KRAS G12R)
FVGPRPVGL

SEQ ID NO: 37132 - protein, 9 aa, synthetic construct
  source 1..9: note = Seed: VVGARGVGK (KRAS G12R)
FVGPRPVGM

SEQ ID NO: 37133 - protein, 9 aa, synthetic construct
  source 1..9: note = Seed: VVGARGVGK (KRAS G12R)
FVGPRPVGV

SEQ ID NO: 37134 - protein, 9 aa, synthetic construct
  source 1..9: note = Seed: VVGARGVGK (KRAS G12R)
FVGPRSVGA

SEQ ID NO: 37135 - protein, 9 aa, synthetic construct
  source 1..9: note = Seed: VVGARGVGK (KRAS G12R)
FVGPRSVGI

SEQ ID NO: 37136 - protein, 9 aa, synthetic construct
  source 1..9: note = Seed: VVGARGVGK (KRAS G12R)
FVGPRSVGL

SEQ ID NO: 37137 - protein, 9 aa, synthetic construct
  source 1..9: note = Seed: VVGARGVGK (KRAS G12R)
FVGPRSVGM

SEQ ID NO: 37138 - protein, 9 aa, synthetic construct
  source 1..9: note = Seed: VVGARGVGK (KRAS G12R)
FVGPRSVGV

SEQ ID NO: 37139 - protein, 9 aa, synthetic construct
  source 1..9: note = Seed: VVGARGVGK (KRAS G12R)
FVGPRTVGI

SEQ ID NO: 37140 - protein, 9 aa, synthetic construct
  source 1..9: note = Seed: VVGARGVGK (KRAS G12R)
FVGPRTVGL

SEQ ID NO: 37141 - protein, 9 aa, synthetic construct
  source 1..9: note = Seed: VVGARGVGK (KRAS G12R)
FVGPRTVGM

SEQ ID NO: 37142 - protein, 9 aa, synthetic construct
  source 1..9: note = Seed: VVGARGVGK (KRAS G12R)
FVGPRTVGV

SEQ ID NO: 37143 - protein, 9 aa, synthetic construct
  source 1..9: note = Seed: VVGARGVGK (KRAS G12R)
FVGPRVVGI

SEQ ID NO: 37144 - protein, 9 aa, synthetic construct
  source 1..9: note = Seed: VVGARGVGK (KRAS G12R)
FVGPRVVGL

SEQ ID NO: 37145 - protein, 9 aa, synthetic construct
  source 1..9: note = Seed: VVGARGVGK (KRAS G12R)
FVGPRVVGM

SEQ ID NO: 37146 - protein, 9 aa, synthetic construct
  source 1..9: note = Seed: VVGARGVGK (KRAS G12R)
FVGPRVVGV

SEQ ID NO: 37147 - protein, 9 aa, synthetic construct
  source 1..9: note = Seed: VVGARGVGK (KRAS G12R)
FVGQRAVGA

SEQ ID NO: 37148 - protein, 9 aa, synthetic construct
  source 1..9: note = Seed: VVGARGVGK (KRAS G12R)
FVGQRAVGC

SEQ ID NO: 37149 - protein, 9 aa, synthetic construct
  source 1..9: note = Seed: VVGARGVGK (KRAS G12R)
FVGQRAVGD

SEQ ID NO: 37150 - protein, 9 aa, synthetic construct
  source 1..9: note = Seed: VVGARGVGK (KRAS G12R)
FVGQRAVGE

SEQ ID NO: 37151 - protein, 9 aa, synthetic construct
  source 1..9: note = Seed: VVGARGVGK (KRAS G12R)
FVGQRAVGF

SEQ ID NO: 37152 - protein, 9 aa, synthetic construct
  source 1..9: note = Seed: VVGARGVGK (KRAS G12R)
FVGQRAVGG

SEQ ID NO: 37153 - protein, 9 aa, synthetic construct
  source 1..9: note = Seed: VVGARGVGK (KRAS G12R)
FVGQRAVGH

SEQ ID NO: 37154 - protein, 9 aa, synthetic construct
  source 1..9: note = Seed: VVGARGVGK (KRAS G12R)
FVGQRAVGI

SEQ ID NO: 37155 - protein, 9 aa, synthetic construct
  source 1..9: note = Seed: VVGARGVGK (KRAS G12R)
FVGQRAVGK

SEQ ID NO: 37156 - protein, 9 aa, synthetic construct
  source 1..9: note = Seed: VVGARGVGK (KRAS G12R)
FVGQRAVGL

SEQ ID NO: 37157 - protein, 9 aa, synthetic construct
  source 1..9: note = Seed: VVGARGVGK (KRAS G12R)
FVGQRAVGM

SEQ ID NO: 37158 - protein, 9 aa, synthetic construct
  source 1..9: note = Seed: VVGARGVGK (KRAS G12R)
FVGQRAVGN

SEQ ID NO: 37159 - protein, 9 aa, synthetic construct
  source 1..9: note = Seed: VVGARGVGK (KRAS G12R)
FVGQRAVGP

SEQ ID NO: 37160 - protein, 9 aa, synthetic construct
  source 1..9: note = Seed: VVGARGVGK (KRAS G12R)
FVGQRAVGQ

SEQ ID NO: 37161 - protein, 9 aa, synthetic construct
  source 1..9: note = Seed: VVGARGVGK (KRAS G12R)
FVGQRAVGR

SEQ ID NO: 37162 - protein, 9 aa, synthetic construct
  source 1..9: note = Seed: VVGARGVGK (KRAS G12R)
FVGQRAVGS

SEQ ID NO: 37163 - protein, 9 aa, synthetic construct
  source 1..9: note = Seed: VVGARGVGK (KRAS G12R)
FVGQRAVGT

SEQ ID NO: 37164 - protein, 9 aa, synthetic construct
  source 1..9: note = Seed: VVGARGVGK (KRAS G12R)
FVGQRAVGV

SEQ ID NO: 37165 - protein, 9 aa, synthetic construct
  source 1..9: note = Seed: VVGARGVGK (KRAS G12R)
FVGQRAVGW

SEQ ID NO: 37166 - protein, 9 aa, synthetic construct
  source 1..9: note = Seed: VVGARGVGK (KRAS G12R)
FVGQRAVGY

SEQ ID NO: 37167 - protein, 9 aa, synthetic construct
  source 1..9: note = Seed: VVGARGVGK (KRAS G12R)
FVGQRCVGA

SEQ ID NO: 37168 - protein, 9 aa, synthetic construct
  source 1..9: note = Seed: VVGARGVGK (KRAS G12R)
FVGQRCVGI

SEQ ID NO: 37169 - protein, 9 aa, synthetic construct
  source 1..9: note = Seed: VVGARGVGK (KRAS G12R)
FVGQRCVGL

SEQ ID NO: 37170 - protein, 9 aa, synthetic construct
  source 1..9: note = Seed: VVGARGVGK (KRAS G12R)
FVGQRCVGV

SEQ ID NO: 37171 - protein, 9 aa, synthetic construct
  source 1..9: note = Seed: VVGARGVGK (KRAS G12R)
FVGQRDVGI

SEQ ID NO: 37172 - protein, 9 aa, synthetic construct
  source 1..9: note = Seed: VVGARGVGK (KRAS G12R)
FVGQRDVGL

SEQ ID NO: 37173 - protein, 9 aa, synthetic construct
  source 1..9: note = Seed: VVGARGVGK (KRAS G12R)
FVGQRDVGV

SEQ ID NO: 37174 - protein, 9 aa, synthetic construct
  source 1..9: note = Seed: VVGARGVGK (KRAS G12R)
FVGQREVGA

SEQ ID NO: 37175 - protein, 9 aa, synthetic construct
  source 1..9: note = Seed: VVGARGVGK (KRAS G12R)
FVGQREVGI

SEQ ID NO: 37176 - protein, 9 aa, synthetic construct
  source 1..9: note = Seed: VVGARGVGK (KRAS G12R)
FVGQREVGL

SEQ ID NO: 37177 - protein, 9 aa, synthetic construct
  source 1..9: note = Seed: VVGARGVGK (KRAS G12R)
FVGQREVGM

SEQ ID NO: 37178 - protein, 9 aa, synthetic construct
  source 1..9: note = Seed: VVGARGVGK (KRAS G12R)
FVGQREVGV

SEQ ID NO: 37179 - protein, 9 aa, synthetic construct
  source 1..9: note = Seed: VVGARGVGK (KRAS G12R)
FVGQRGVGA

SEQ ID NO: 37180 - protein, 9 aa, synthetic construct
  source 1..9: note = Seed: VVGARGVGK (KRAS G12R)
FVGQRGVGC

SEQ ID NO: 37181 - protein, 9 aa, synthetic construct
  source 1..9: note = Seed: VVGARGVGK (KRAS G12R)
FVGQRGVGD

SEQ ID NO: 37182 - protein, 9 aa, synthetic construct
  source 1..9: note = Seed: VVGARGVGK (KRAS G12R)
FVGQRGVGE

SEQ ID NO: 37183 - protein, 9 aa, synthetic construct
  source 1..9: note = Seed: VVGARGVGK (KRAS G12R)
FVGQRGVGF

SEQ ID NO: 37184 - protein, 9 aa, synthetic construct
  source 1..9: note = Seed: VVGARGVGK (KRAS G12R)
FVGQRGVGG

SEQ ID NO: 37185 - protein, 9 aa, synthetic construct
  source 1..9: note = Seed: VVGARGVGK (KRAS G12R)
FVGQRGVGH

SEQ ID NO: 37186 - protein, 9 aa, synthetic construct
  source 1..9: note = Seed: VVGARGVGK (KRAS G12R)
FVGQRGVGI

SEQ ID NO: 37187 - protein, 9 aa, synthetic construct
  source 1..9: note = Seed: VVGARGVGK (KRAS G12R)
FVGQRGVGK

SEQ ID NO: 37188 - protein, 9 aa, synthetic construct
  source 1..9: note = Seed: VVGARGVGK (KRAS G12R)
FVGQRGVGL

SEQ ID NO: 37189 - protein, 9 aa, synthetic construct
  source 1..9: note = Seed: VVGARGVGK (KRAS G12R)
FVGQRGVGM

SEQ ID NO: 37190 - protein, 9 aa, synthetic construct
  source 1..9: note = Seed: VVGARGVGK (KRAS G12R)
FVGQRGVGN

SEQ ID NO: 37191 - protein, 9 aa, synthetic construct
  source 1..9: note = Seed: VVGARGVGK (KRAS G12R)
FVGQRGVGP

SEQ ID NO: 37192 - protein, 9 aa, synthetic construct
  source 1..9: note = Seed: VVGARGVGK (KRAS G12R)
FVGQRGVGQ

SEQ ID NO: 37193 - protein, 9 aa, synthetic construct
  source 1..9: note = Seed: VVGARGVGK (KRAS G12R)
FVGQRGVGR

SEQ ID NO: 37194 - protein, 9 aa, synthetic construct
  source 1..9: note = Seed: VVGARGVGK (KRAS G12R)
FVGQRGVGS

SEQ ID NO: 37195 - protein, 9 aa, synthetic construct
  source 1..9: note = Seed: VVGARGVGK (KRAS G12R)
FVGQRGVGT

SEQ ID NO: 37196 - protein, 9 aa, synthetic construct
  source 1..9: note = Seed: VVGARGVGK (KRAS G12R)
FVGQRGVGV

SEQ ID NO: 37197 - protein, 9 aa, synthetic construct
  source 1..9: note = Seed: VVGARGVGK (KRAS G12R)
FVGQRGVGW

SEQ ID NO: 37198 - protein, 9 aa, synthetic construct
  source 1..9: note = Seed: VVGARGVGK (KRAS G12R)
FVGQRGVGY

SEQ ID NO: 37199 - protein, 9 aa, synthetic construct
  source 1..9: note = Seed: VVGARGVGK (KRAS G12R)
FVGQRHVGA

SEQ ID NO: 37200 - protein, 9 aa, synthetic construct
  source 1..9: note = Seed: VVGARGVGK (KRAS G12R)
FVGQRHVGI

SEQ ID NO: 37201 - protein, 9 aa, synthetic construct
  source 1..9: note = Seed: VVGARGVGK (KRAS G12R)
FVGQRHVGL

SEQ ID NO: 37202 - protein, 9 aa, synthetic construct
  source 1..9: note = Seed: VVGARGVGK (KRAS G12R)
FVGQRHVGV

SEQ ID NO: 37203 - protein, 9 aa, synthetic construct
  source 1..9: note = Seed: VVGARGVGK (KRAS G12R)
FVGQRIVGA

SEQ ID NO: 37204 - protein, 9 aa, synthetic construct
  source 1..9: note = Seed: VVGARGVGK (KRAS G12R)
FVGQRIVGD

SEQ ID NO: 37205 - protein, 9 aa, synthetic construct
  source 1..9: note = Seed: VVGARGVGK (KRAS G12R)
FVGQRIVGG

SEQ ID NO: 37206 - protein, 9 aa, synthetic construct
  source 1..9: note = Seed: VVGARGVGK (KRAS G12R)
FVGQRIVGH

SEQ ID NO: 37207 - protein, 9 aa, synthetic construct
  source 1..9: note = Seed: VVGARGVGK (KRAS G12R)
FVGQRIVGI

SEQ ID NO: 37208 - protein, 9 aa, synthetic construct
  source 1..9: note = Seed: VVGARGVGK (KRAS G12R)
FVGQRIVGL

SEQ ID NO: 37209 - protein, 9 aa, synthetic construct
  source 1..9: note = Seed: VVGARGVGK (KRAS G12R)
FVGQRIVGM

SEQ ID NO: 37210 - protein, 9 aa, synthetic construct
  source 1..9: note = Seed: VVGARGVGK (KRAS G12R)
FVGQRIVGN

SEQ ID NO: 37211 - protein, 9 aa, synthetic construct
  source 1..9: note = Seed: VVGARGVGK (KRAS G12R)
FVGQRIVGQ

SEQ ID NO: 37212 - protein, 9 aa, synthetic construct
  source 1..9: note = Seed: VVGARGVGK (KRAS G12R)
FVGQRIVGS

SEQ ID NO: 37213 - protein, 9 aa, synthetic construct
  source 1..9: note = Seed: VVGARGVGK (KRAS G12R)
FVGQRIVGT

SEQ ID NO: 37214 - protein, 9 aa, synthetic construct
  source 1..9: note = Seed: VVGARGVGK (KRAS G12R)
FVGQRIVGV

SEQ ID NO: 37215 - protein, 9 aa, synthetic construct
  source 1..9: note = Seed: VVGARGVGK (KRAS G12R)
FVGQRKVGR

SEQ ID NO: 37216 - protein, 9 aa, synthetic construct
  source 1..9: note = Seed: VVGARGVGK (KRAS G12R)
FVGQRKVGY

SEQ ID NO: 37217 - protein, 9 aa, synthetic construct
  source 1..9: note = Seed: VVGARGVGK (KRAS G12R)
FVGQRLVGA

SEQ ID NO: 37218 - protein, 9 aa, synthetic construct
  source 1..9: note = Seed: VVGARGVGK (KRAS G12R)
FVGQRLVGI

SEQ ID NO: 37219 - protein, 9 aa, synthetic construct
  source 1..9: note = Seed: VVGARGVGK (KRAS G12R)
FVGQRLVGL

SEQ ID NO: 37220 - protein, 9 aa, synthetic construct
  source 1..9: note = Seed: VVGARGVGK (KRAS G12R)
FVGQRLVGM

SEQ ID NO: 37221 - protein, 9 aa, synthetic construct
  source 1..9: note = Seed: VVGARGVGK (KRAS G12R)
FVGQRLVGN

SEQ ID NO: 37222 - protein, 9 aa, synthetic construct
  source 1..9: note = Seed: VVGARGVGK (KRAS G12R)
FVGQRLVGS

SEQ ID NO: 37223 - protein, 9 aa, synthetic construct
  source 1..9: note = Seed: VVGARGVGK (KRAS G12R)
FVGQRLVGT

SEQ ID NO: 37224 - protein, 9 aa, synthetic construct
  source 1..9: note = Seed: VVGARGVGK (KRAS G12R)
FVGQRLVGV

SEQ ID NO: 37225 - protein, 9 aa, synthetic construct
  source 1..9: note = Seed: VVGARGVGK (KRAS G12R)
FVGQRMVGA

SEQ ID NO: 37226 - protein, 9 aa, synthetic construct
  source 1..9: note = Seed: VVGARGVGK (KRAS G12R)
FVGQRMVGI

SEQ ID NO: 37227 - protein, 9 aa, synthetic construct
  source 1..9: note = Seed: VVGARGVGK (KRAS G12R)
FVGQRMVGL

SEQ ID NO: 37228 - protein, 9 aa, synthetic construct
  source 1..9: note = Seed: VVGARGVGK (KRAS G12R)
FVGQRMVGM

SEQ ID NO: 37229 - protein, 9 aa, synthetic construct
  source 1..9: note = Seed: VVGARGVGK (KRAS G12R)
FVGQRMVGN

SEQ ID NO: 37230 - protein, 9 aa, synthetic construct
  source 1..9: note = Seed: VVGARGVGK (KRAS G12R)
FVGQRMVGS

SEQ ID NO: 37231 - protein, 9 aa, synthetic construct
  source 1..9: note = Seed: VVGARGVGK (KRAS G12R)
FVGQRMVGT

SEQ ID NO: 37232 - protein, 9 aa, synthetic construct
  source 1..9: note = Seed: VVGARGVGK (KRAS G12R)
FVGQRMVGV

SEQ ID NO: 37233 - protein, 9 aa, synthetic construct
  source 1..9: note = Seed: VVGARGVGK (KRAS G12R)
FVGQRNVGA

SEQ ID NO: 37234 - protein, 9 aa, synthetic construct
  source 1..9: note = Seed: VVGARGVGK (KRAS G12R)
FVGQRNVGC

SEQ ID NO: 37235 - protein, 9 aa, synthetic construct
  source 1..9: note = Seed: VVGARGVGK (KRAS G12R)
FVGQRNVGF

SEQ ID NO: 37236 - protein, 9 aa, synthetic construct
  source 1..9: note = Seed: VVGARGVGK (KRAS G12R)
FVGQRNVGG

SEQ ID NO: 37237 - protein, 9 aa, synthetic construct
  source 1..9: note = Seed: VVGARGVGK (KRAS G12R)
FVGQRNVGH

SEQ ID NO: 37238 - protein, 9 aa, synthetic construct
  source 1..9: note = Seed: VVGARGVGK (KRAS G12R)
FVGQRNVGI

SEQ ID NO: 37239 - protein, 9 aa, synthetic construct
  source 1..9: note = Seed: VVGARGVGK (KRAS G12R)
FVGQRNVGL

SEQ ID NO: 37240 - protein, 9 aa, synthetic construct
  source 1..9: note = Seed: VVGARGVGK (KRAS G12R)
FVGQRNVGM

SEQ ID NO: 37241 - protein, 9 aa, synthetic construct
  source 1..9: note = Seed: VVGARGVGK (KRAS G12R)
FVGQRNVGN

SEQ ID NO: 37242 - protein, 9 aa, synthetic construct
  source 1..9: note = Seed: VVGARGVGK (KRAS G12R)
FVGQRNVGQ

SEQ ID NO: 37243 - protein, 9 aa, synthetic construct
  source 1..9: note = Seed: VVGARGVGK (KRAS G12R)
FVGQRNVGS

SEQ ID NO: 37244 - protein, 9 aa, synthetic construct
  source 1..9: note = Seed: VVGARGVGK (KRAS G12R)
FVGQRNVGT

SEQ ID NO: 37245 - protein, 9 aa, synthetic construct
  source 1..9: note = Seed: VVGARGVGK (KRAS G12R)
FVGQRNVGV

SEQ ID NO: 37246 - protein, 9 aa, synthetic construct
  source 1..9: note = Seed: VVGARGVGK (KRAS G12R)
FVGQRNVGY

SEQ ID NO: 37247 - protein, 9 aa, synthetic construct
  source 1..9: note = Seed: VVGARGVGK (KRAS G12R)
FVGQRPVGA

SEQ ID NO: 37248 - protein, 9 aa, synthetic construct
  source 1..9: note = Seed: VVGARGVGK (KRAS G12R)
FVGQRPVGC

SEQ ID NO: 37249 - protein, 9 aa, synthetic construct
  source 1..9: note = Seed: VVGARGVGK (KRAS G12R)
FVGQRPVGD

SEQ ID NO: 37250 - protein, 9 aa, synthetic construct
  source 1..9: note = Seed: VVGARGVGK (KRAS G12R)
FVGQRPVGE

SEQ ID NO: 37251 - protein, 9 aa, synthetic construct
  source 1..9: note = Seed: VVGARGVGK (KRAS G12R)
FVGQRPVGF

SEQ ID NO: 37252 - protein, 9 aa, synthetic construct
  source 1..9: note = Seed: VVGARGVGK (KRAS G12R)
FVGQRPVGG

SEQ ID NO: 37253 - protein, 9 aa, synthetic construct
  source 1..9: note = Seed: VVGARGVGK (KRAS G12R)
FVGQRPVGH

SEQ ID NO: 37254 - protein, 9 aa, synthetic construct
  source 1..9: note = Seed: VVGARGVGK (KRAS G12R)
FVGQRPVGI

SEQ ID NO: 37255 - protein, 9 aa, synthetic construct
  source 1..9: note = Seed: VVGARGVGK (KRAS G12R)
FVGQRPVGL

SEQ ID NO: 37256 - protein, 9 aa, synthetic construct
  source 1..9: note = Seed: VVGARGVGK (KRAS G12R)
FVGQRPVGM

SEQ ID NO: 37257 - protein, 9 aa, synthetic construct
  source 1..9: note = Seed: VVGARGVGK (KRAS G12R)
FVGQRPVGN

SEQ ID NO: 37258 - protein, 9 aa, synthetic construct
  source 1..9: note = Seed: VVGARGVGK (KRAS G12R)
FVGQRPVGP

SEQ ID NO: 37259 - protein, 9 aa, synthetic construct
  source 1..9: note = Seed: VVGARGVGK (KRAS G12R)
FVGQRPVGQ

SEQ ID NO: 37260 - protein, 9 aa, synthetic construct
  source 1..9: note = Seed: VVGARGVGK (KRAS G12R)
FVGQRPVGR

SEQ ID NO: 37261 - protein, 9 aa, synthetic construct
  source 1..9: note = Seed: VVGARGVGK (KRAS G12R)
FVGQRPVGS

SEQ ID NO: 37262 - protein, 9 aa, synthetic construct
  source 1..9: note = Seed: VVGARGVGK (KRAS G12R)
FVGQRPVGT

SEQ ID NO: 37263 - protein, 9 aa, synthetic construct
  source 1..9: note = Seed: VVGARGVGK (KRAS G12R)
FVGQRPVGV

SEQ ID NO: 37264 - protein, 9 aa, synthetic construct
  source 1..9: note = Seed: VVGARGVGK (KRAS G12R)
FVGQRPVGW

SEQ ID NO: 37265 - protein, 9 aa, synthetic construct
  source 1..9: note = Seed: VVGARGVGK (KRAS G12R)
FVGQRPVGY

SEQ ID NO: 37266 - protein, 9 aa, synthetic construct
  source 1..9: note = Seed: VVGARGVGK (KRAS G12R)
FVGQRQVGA

SEQ ID NO: 37267 - protein, 9 aa, synthetic construct
  source 1..9: note = Seed: VVGARGVGK (KRAS G12R)
FVGQRQVGI

SEQ ID NO: 37268 - protein, 9 aa, synthetic construct
  source 1..9: note = Seed: VVGARGVGK (KRAS G12R)
FVGQRQVGL

SEQ ID NO: 37269 - protein, 9 aa, synthetic construct
  source 1..9: note = Seed: VVGARGVGK (KRAS G12R)
FVGQRQVGM

SEQ ID NO: 37270 - protein, 9 aa, synthetic construct
  source 1..9: note = Seed: VVGARGVGK (KRAS G12R)
FVGQRQVGV

SEQ ID NO: 37271 - protein, 9 aa, synthetic construct
  source 1..9: note = Seed: VVGARGVGK (KRAS G12R)
FVGQRRVGF

SEQ ID NO: 37272 - protein, 9 aa, synthetic construct
  source 1..9: note = Seed: VVGARGVGK (KRAS G12R)
FVGQRRVGI

SEQ ID NO: 37273 - protein, 9 aa, synthetic construct
  source 1..9: note = Seed: VVGARGVGK (KRAS G12R)
FVGQRRVGK

SEQ ID NO: 37274 - protein, 9 aa, synthetic construct
  source 1..9: note = Seed: VVGARGVGK (KRAS G12R)
FVGQRRVGL

SEQ ID NO: 37275 - protein, 9 aa, synthetic construct
  source 1..9: note = Seed: VVGARGVGK (KRAS G12R)
FVGQRRVGM

SEQ ID NO: 37276 - protein, 9 aa, synthetic construct
  source 1..9: note = Seed: VVGARGVGK (KRAS G12R)
FVGQRRVGR

SEQ ID NO: 37277 - protein, 9 aa, synthetic construct
  source 1..9: note = Seed: VVGARGVGK (KRAS G12R)
FVGQRRVGV

SEQ ID NO: 37278 - protein, 9 aa, synthetic construct
  source 1..9: note = Seed: VVGARGVGK (KRAS G12R)
FVGQRRVGY

SEQ ID NO: 37279 - protein, 9 aa, synthetic construct
  source 1..9: note = Seed: VVGARGVGK (KRAS G12R)
FVGQRSVGA

SEQ ID NO: 37280 - protein, 9 aa, synthetic construct
  source 1..9: note = Seed: VVGARGVGK (KRAS G12R)
FVGQRSVGC

SEQ ID NO: 37281 - protein, 9 aa, synthetic construct
  source 1..9: note = Seed: VVGARGVGK (KRAS G12R)
FVGQRSVGD

SEQ ID NO: 37282 - protein, 9 aa, synthetic construct
  source 1..9: note = Seed: VVGARGVGK (KRAS G12R)
FVGQRSVGE

SEQ ID NO: 37283 - protein, 9 aa, synthetic construct
  source 1..9: note = Seed: VVGARGVGK (KRAS G12R)
FVGQRSVGF

SEQ ID NO: 37284 - protein, 9 aa, synthetic construct
  source 1..9: note = Seed: VVGARGVGK (KRAS G12R)
FVGQRSVGG

SEQ ID NO: 37285 - protein, 9 aa, synthetic construct
  source 1..9: note = Seed: VVGARGVGK (KRAS G12R)
FVGQRSVGH

SEQ ID NO: 37286 - protein, 9 aa, synthetic construct
  source 1..9: note = Seed: VVGARGVGK (KRAS G12R)
FVGQRSVGI

SEQ ID NO: 37287 - protein, 9 aa, synthetic construct
  source 1..9: note = Seed: VVGARGVGK (KRAS G12R)
FVGQRSVGK

SEQ ID NO: 37288 - protein, 9 aa, synthetic construct
  source 1..9: note = Seed: VVGARGVGK (KRAS G12R)
FVGQRSVGL

SEQ ID NO: 37289 - protein, 9 aa, synthetic construct
  source 1..9: note = Seed: VVGARGVGK (KRAS G12R)
FVGQRSVGM

SEQ ID NO: 37290 - protein, 9 aa, synthetic construct
  source 1..9: note = Seed: VVGARGVGK (KRAS G12R)
FVGQRSVGN

SEQ ID NO: 37291 - protein, 9 aa, synthetic construct
  source 1..9: note = Seed: VVGARGVGK (KRAS G12R)
FVGQRSVGP

SEQ ID NO: 37292 - protein, 9 aa, synthetic construct
  source 1..9: note = Seed: VVGARGVGK (KRAS G12R)
FVGQRSVGQ

SEQ ID NO: 37293 - protein, 9 aa, synthetic construct
  source 1..9: note = Seed: VVGARGVGK (KRAS G12R)
FVGQRSVGR

SEQ ID NO: 37294 - protein, 9 aa, synthetic construct
  source 1..9: note = Seed: VVGARGVGK (KRAS G12R)
FVGQRSVGS

SEQ ID NO: 37295 - protein, 9 aa, synthetic construct
  source 1..9: note = Seed: VVGARGVGK (KRAS G12R)
FVGQRSVGT

SEQ ID NO: 37296 - protein, 9 aa, synthetic construct
  source 1..9: note = Seed: VVGARGVGK (KRAS G12R)
FVGQRSVGV

SEQ ID NO: 37297 - protein, 9 aa, synthetic construct
  source 1..9: note = Seed: VVGARGVGK (KRAS G12R)
FVGQRSVGW

SEQ ID NO: 37298 - protein, 9 aa, synthetic construct
  source 1..9: note = Seed: VVGARGVGK (KRAS G12R)
FVGQRSVGY

SEQ ID NO: 37299 - protein, 9 aa, synthetic construct
  source 1..9: note = Seed: VVGARGVGK (KRAS G12R)
FVGQRTVGA

SEQ ID NO: 37300 - protein, 9 aa, synthetic construct
  source 1..9: note = Seed: VVGARGVGK (KRAS G12R)
FVGQRTVGC

SEQ ID NO: 37301 - protein, 9 aa, synthetic construct
  source 1..9: note = Seed: VVGARGVGK (KRAS G12R)
FVGQRTVGD

SEQ ID NO: 37302 - protein, 9 aa, synthetic construct
  source 1..9: note = Seed: VVGARGVGK (KRAS G12R)
FVGQRTVGE

SEQ ID NO: 37303 - protein, 9 aa, synthetic construct
  source 1..9: note = Seed: VVGARGVGK (KRAS G12R)
FVGQRTVGF

SEQ ID NO: 37304 - protein, 9 aa, synthetic construct
  source 1..9: note = Seed: VVGARGVGK (KRAS G12R)
FVGQRTVGG

SEQ ID NO: 37305 - protein, 9 aa, synthetic construct
  source 1..9: note = Seed: VVGARGVGK (KRAS G12R)
FVGQRTVGH

SEQ ID NO: 37306 - protein, 9 aa, synthetic construct
  source 1..9: note = Seed: VVGARGVGK (KRAS G12R)
FVGQRTVGI

SEQ ID NO: 37307 - protein, 9 aa, synthetic construct
  source 1..9: note = Seed: VVGARGVGK (KRAS G12R)
FVGQRTVGL

SEQ ID NO: 37308 - protein, 9 aa, synthetic construct
  source 1..9: note = Seed: VVGARGVGK (KRAS G12R)
FVGQRTVGM

SEQ ID NO: 37309 - protein, 9 aa, synthetic construct
  source 1..9: note = Seed: VVGARGVGK (KRAS G12R)
FVGQRTVGN

SEQ ID NO: 37310 - protein, 9 aa, synthetic construct
  source 1..9: note = Seed: VVGARGVGK (KRAS G12R)
FVGQRTVGP

SEQ ID NO: 37311 - protein, 9 aa, synthetic construct
  source 1..9: note = Seed: VVGARGVGK (KRAS G12R)
FVGQRTVGQ

SEQ ID NO: 37312 - protein, 9 aa, synthetic construct
  source 1..9: note = Seed: VVGARGVGK (KRAS G12R)
FVGQRTVGR

SEQ ID NO: 37313 - protein, 9 aa, synthetic construct
  source 1..9: note = Seed: VVGARGVGK (KRAS G12R)
FVGQRTVGS

SEQ ID NO: 37314 - protein, 9 aa, synthetic construct
  source 1..9: note = Seed: VVGARGVGK (KRAS G12R)
FVGQRTVGT

SEQ ID NO: 37315 - protein, 9 aa, synthetic construct
  source 1..9: note = Seed: VVGARGVGK (KRAS G12R)
FVGQRTVGV

SEQ ID NO: 37316 - protein, 9 aa, synthetic construct
  source 1..9: note = Seed: VVGARGVGK (KRAS G12R)
FVGQRTVGW

SEQ ID NO: 37317 - protein, 9 aa, synthetic construct
  source 1..9: note = Seed: VVGARGVGK (KRAS G12R)
FVGQRTVGY

SEQ ID NO: 37318 - protein, 9 aa, synthetic construct
  source 1..9: note = Seed: VVGARGVGK (KRAS G12R)
FVGQRVVGA

SEQ ID NO: 37319 - protein, 9 aa, synthetic construct
  source 1..9: note = Seed: VVGARGVGK (KRAS G12R)
FVGQRVVGC

SEQ ID NO: 37320 - protein, 9 aa, synthetic construct
  source 1..9: note = Seed: VVGARGVGK (KRAS G12R)
FVGQRVVGD

SEQ ID NO: 37321 - protein, 9 aa, synthetic construct
  source 1..9: note = Seed: VVGARGVGK (KRAS G12R)
FVGQRVVGE

SEQ ID NO: 37322 - protein, 9 aa, synthetic construct
  source 1..9: note = Seed: VVGARGVGK (KRAS G12R)
FVGQRVVGF

SEQ ID NO: 37323 - protein, 9 aa, synthetic construct
  source 1..9: note = Seed: VVGARGVGK (KRAS G12R)
FVGQRVVGG

SEQ ID NO: 37324 - protein, 9 aa, synthetic construct
  source 1..9: note = Seed: VVGARGVGK (KRAS G12R)
FVGQRVVGH

SEQ ID NO: 37325 - protein, 9 aa, synthetic construct
  source 1..9: note = Seed: VVGARGVGK (KRAS G12R)
FVGQRVVGI

SEQ ID NO: 37326 - protein, 9 aa, synthetic construct
  source 1..9: note = Seed: VVGARGVGK (KRAS G12R)
FVGQRVVGL

SEQ ID NO: 37327 - protein, 9 aa, synthetic construct
  source 1..9: note = Seed: VVGARGVGK (KRAS G12R)
FVGQRVVGM

SEQ ID NO: 37328 - protein, 9 aa, synthetic construct
  source 1..9: note = Seed: VVGARGVGK (KRAS G12R)
FVGQRVVGN

SEQ ID NO: 37329 - protein, 9 aa, synthetic construct
  source 1..9: note = Seed: VVGARGVGK (KRAS G12R)
FVGQRVVGP

SEQ ID NO: 37330 - protein, 9 aa, synthetic construct
  source 1..9: note = Seed: VVGARGVGK (KRAS G12R)
FVGQRVVGQ

SEQ ID NO: 37331 - protein, 9 aa, synthetic construct
  source 1..9: note = Seed: VVGARGVGK (KRAS G12R)
FVGQRVVGR

SEQ ID NO: 37332 - protein, 9 aa, synthetic construct
  source 1..9: note = Seed: VVGARGVGK (KRAS G12R)
FVGQRVVGS

SEQ ID NO: 37333 - protein, 9 aa, synthetic construct
  source 1..9: note = Seed: VVGARGVGK (KRAS G12R)
FVGQRVVGT

SEQ ID NO: 37334 - protein, 9 aa, synthetic construct
  source 1..9: note = Seed: VVGARGVGK (KRAS G12R)
FVGQRVVGV

SEQ ID NO: 37335 - protein, 9 aa, synthetic construct
  source 1..9: note = Seed: VVGARGVGK (KRAS G12R)
FVGQRVVGY

SEQ ID NO: 37336 - protein, 9 aa, synthetic construct
  source 1..9: note = Seed: VVGARGVGK (KRAS G12R)
FVGRRAVGA

SEQ ID NO: 37337 - protein, 9 aa, synthetic construct
  source 1..9: note = Seed: VVGARGVGK (KRAS G12R)
FVGRRAVGF

SEQ ID NO: 37338 - protein, 9 aa, synthetic construct
  source 1..9: note = Seed: VVGARGVGK (KRAS G12R)
FVGRRAVGI

SEQ ID NO: 37339 - protein, 9 aa, synthetic construct
  source 1..9: note = Seed: VVGARGVGK (KRAS G12R)
FVGRRAVGK

SEQ ID NO: 37340 - protein, 9 aa, synthetic construct
  source 1..9: note = Seed: VVGARGVGK (KRAS G12R)
FVGRRAVGL

SEQ ID NO: 37341 - protein, 9 aa, synthetic construct
  source 1..9: note = Seed: VVGARGVGK (KRAS G12R)
FVGRRAVGM

SEQ ID NO: 37342 - protein, 9 aa, synthetic construct
  source 1..9: note = Seed: VVGARGVGK (KRAS G12R)
FVGRRAVGR

SEQ ID NO: 37343 - protein, 9 aa, synthetic construct
  source 1..9: note = Seed: VVGARGVGK (KRAS G12R)
FVGRRAVGS

SEQ ID NO: 37344 - protein, 9 aa, synthetic construct
  source 1..9: note = Seed: VVGARGVGK (KRAS G12R)
FVGRRAVGT

SEQ ID NO: 37345 - protein, 9 aa, synthetic construct
  source 1..9: note = Seed: VVGARGVGK (KRAS G12R)
FVGRRAVGV

SEQ ID NO: 37346 - protein, 9 aa, synthetic construct
  source 1..9: note = Seed: VVGARGVGK (KRAS G12R)
FVGRRAVGY

SEQ ID NO: 37347 - protein, 9 aa, synthetic construct
  source 1..9: note = Seed: VVGARGVGK (KRAS G12R)
FVGRRGVGA

SEQ ID NO: 37348 - protein, 9 aa, synthetic construct
  source 1..9: note = Seed: VVGARGVGK (KRAS G12R)
FVGRRGVGI

SEQ ID NO: 37349 - protein, 9 aa, synthetic construct
  source 1..9: note = Seed: VVGARGVGK (KRAS G12R)
FVGRRGVGL

SEQ ID NO: 37350 - protein, 9 aa, synthetic construct
  source 1..9: note = Seed: VVGARGVGK (KRAS G12R)
FVGRRGVGM

SEQ ID NO: 37351 - protein, 9 aa, synthetic construct
  source 1..9: note = Seed: VVGARGVGK (KRAS G12R)
FVGRRGVGR

SEQ ID NO: 37352 - protein, 9 aa, synthetic construct
  source 1..9: note = Seed: VVGARGVGK (KRAS G12R)
FVGRRGVGV

SEQ ID NO: 37353 - protein, 9 aa, synthetic construct
  source 1..9: note = Seed: VVGARGVGK (KRAS G12R)
FVGRRHVGR

SEQ ID NO: 37354 - protein, 9 aa, synthetic construct
  source 1..9: note = Seed: VVGARGVGK (KRAS G12R)
FVGRRHVGY

SEQ ID NO: 37355 - protein, 9 aa, synthetic construct
  source 1..9: note = Seed: VVGARGVGK (KRAS G12R)
FVGRRIVGR

SEQ ID NO: 37356 - protein, 9 aa, synthetic construct
  source 1..9: note = Seed: VVGARGVGK (KRAS G12R)
FVGRRKVGA

SEQ ID NO: 37357 - protein, 9 aa, synthetic construct
  source 1..9: note = Seed: VVGARGVGK (KRAS G12R)
FVGRRKVGF

SEQ ID NO: 37358 - protein, 9 aa, synthetic construct
  source 1..9: note = Seed: VVGARGVGK (KRAS G12R)
FVGRRKVGH

SEQ ID NO: 37359 - protein, 9 aa, synthetic construct
  source 1..9: note = Seed: VVGARGVGK (KRAS G12R)
FVGRRKVGI

SEQ ID NO: 37360 - protein, 9 aa, synthetic construct
  source 1..9: note = Seed: VVGARGVGK (KRAS G12R)
FVGRRKVGK

SEQ ID NO: 37361 - protein, 9 aa, synthetic construct
  source 1..9: note = Seed: VVGARGVGK (KRAS G12R)
FVGRRKVGL

SEQ ID NO: 37362 - protein, 9 aa, synthetic construct
  source 1..9: note = Seed: VVGARGVGK (KRAS G12R)
FVGRRKVGM

SEQ ID NO: 37363 - protein, 9 aa, synthetic construct
  source 1..9: note = Seed: VVGARGVGK (KRAS G12R)
FVGRRKVGQ

SEQ ID NO: 37364 - protein, 9 aa, synthetic construct
  source 1..9: note = Seed: VVGARGVGK (KRAS G12R)
FVGRRKVGR

SEQ ID NO: 37365 - protein, 9 aa, synthetic construct
  source 1..9: note = Seed: VVGARGVGK (KRAS G12R)
FVGRRKVGS

SEQ ID NO: 37366 - protein, 9 aa, synthetic construct
  source 1..9: note = Seed: VVGARGVGK (KRAS G12R)
FVGRRKVGT

SEQ ID NO: 37367 - protein, 9 aa, synthetic construct
  source 1..9: note = Seed: VVGARGVGK (KRAS G12R)
FVGRRKVGV

SEQ ID NO: 37368 - protein, 9 aa, synthetic construct
  source 1..9: note = Seed: VVGARGVGK (KRAS G12R)
FVGRRKVGW

SEQ ID NO: 37369 - protein, 9 aa, synthetic construct
  source 1..9: note = Seed: VVGARGVGK (KRAS G12R)
FVGRRKVGY

SEQ ID NO: 37370 - protein, 9 aa, synthetic construct
  source 1..9: note = Seed: VVGARGVGK (KRAS G12R)
FVGRRMVGR

SEQ ID NO: 37371 - protein, 9 aa, synthetic construct
  source 1..9: note = Seed: VVGARGVGK (KRAS G12R)
FVGRRNVGF

SEQ ID NO: 37372 - protein, 9 aa, synthetic construct
  source 1..9: note = Seed: VVGARGVGK (KRAS G12R)
FVGRRNVGI

SEQ ID NO: 37373 - protein, 9 aa, synthetic construct
  source 1..9: note = Seed: VVGARGVGK (KRAS G12R)
FVGRRNVGL

SEQ ID NO: 37374 - protein, 9 aa, synthetic construct
  source 1..9: note = Seed: VVGARGVGK (KRAS G12R)
FVGRRNVGR

SEQ ID NO: 37375 - protein, 9 aa, synthetic construct
  source 1..9: note = Seed: VVGARGVGK (KRAS G12R)
FVGRRNVGV

SEQ ID NO: 37376 - protein, 9 aa, synthetic construct
  source 1..9: note = Seed: VVGARGVGK (KRAS G12R)
FVGRRNVGY

SEQ ID NO: 37377 - protein, 9 aa, synthetic construct
  source 1..9: note = Seed: VVGARGVGK (KRAS G12R)
FVGRRPVGF

SEQ ID NO: 37378 - protein, 9 aa, synthetic construct
  source 1..9: note = Seed: VVGARGVGK (KRAS G12R)
FVGRRPVGI

SEQ ID NO: 37379 - protein, 9 aa, synthetic construct
  source 1..9: note = Seed: VVGARGVGK (KRAS G12R)
FVGRRPVGK

SEQ ID NO: 37380 - protein, 9 aa, synthetic construct
  source 1..9: note = Seed: VVGARGVGK (KRAS G12R)
FVGRRPVGL

SEQ ID NO: 37381 - protein, 9 aa, synthetic construct
  source 1..9: note = Seed: VVGARGVGK (KRAS G12R)
FVGRRPVGM

SEQ ID NO: 37382 - protein, 9 aa, synthetic construct
  source 1..9: note = Seed: VVGARGVGK (KRAS G12R)
FVGRRPVGR

SEQ ID NO: 37383 - protein, 9 aa, synthetic construct
  source 1..9: note = Seed: VVGARGVGK (KRAS G12R)
FVGRRPVGV

SEQ ID NO: 37384 - protein, 9 aa, synthetic construct
  source 1..9: note = Seed: VVGARGVGK (KRAS G12R)
FVGRRPVGY

SEQ ID NO: 37385 - protein, 9 aa, synthetic construct
  source 1..9: note = Seed: VVGARGVGK (KRAS G12R)
FVGRRQVGR

SEQ ID NO: 37386 - protein, 9 aa, synthetic construct
  source 1..9: note = Seed: VVGARGVGK (KRAS G12R)
FVGRRRVGA

SEQ ID NO: 37387 - protein, 9 aa, synthetic construct
  source 1..9: note = Seed: VVGARGVGK (KRAS G12R)
FVGRRRVGD

SEQ ID NO: 37388 - protein, 9 aa, synthetic construct
  source 1..9: note = Seed: VVGARGVGK (KRAS G12R)
FVGRRRVGE

SEQ ID NO: 37389 - protein, 9 aa, synthetic construct
  source 1..9: note = Seed: VVGARGVGK (KRAS G12R)
FVGRRRVGF

SEQ ID NO: 37390 - protein, 9 aa, synthetic construct
  source 1..9: note = Seed: VVGARGVGK (KRAS G12R)
FVGRRRVGG

SEQ ID NO: 37391 - protein, 9 aa, synthetic construct
  source 1..9: note = Seed: VVGARGVGK (KRAS G12R)
FVGRRRVGH

SEQ ID NO: 37392 - protein, 9 aa, synthetic construct
  source 1..9: note = Seed: VVGARGVGK (KRAS G12R)
FVGRRRVGI

SEQ ID NO: 37393 - protein, 9 aa, synthetic construct
  source 1..9: note = Seed: VVGARGVGK (KRAS G12R)
FVGRRRVGK

SEQ ID NO: 37394 - protein, 9 aa, synthetic construct
  source 1..9: note = Seed: VVGARGVGK (KRAS G12R)
FVGRRRVGL

SEQ ID NO: 37395 - protein, 9 aa, synthetic construct
  source 1..9: note = Seed: VVGARGVGK (KRAS G12R)
FVGRRRVGM

SEQ ID NO: 37396 - protein, 9 aa, synthetic construct
  source 1..9: note = Seed: VVGARGVGK (KRAS G12R)
FVGRRRVGQ

SEQ ID NO: 37397 - protein, 9 aa, synthetic construct
  source 1..9: note = Seed: VVGARGVGK (KRAS G12R)
FVGRRRVGR

SEQ ID NO: 37398 - protein, 9 aa, synthetic construct
  source 1..9: note = Seed: VVGARGVGK (KRAS G12R)
FVGRRRVGS

SEQ ID NO: 37399 - protein, 9 aa, synthetic construct
  source 1..9: note = Seed: VVGARGVGK (KRAS G12R)
FVGRRRVGT

SEQ ID NO: 37400 - protein, 9 aa, synthetic construct
  source 1..9: note = Seed: VVGARGVGK (KRAS G12R)
FVGRRRVGV

SEQ ID NO: 37401 - protein, 9 aa, synthetic construct
  source 1..9: note = Seed: VVGARGVGK (KRAS G12R)
FVGRRRVGY

SEQ ID NO: 37402 - protein, 9 aa, synthetic construct
  source 1..9: note = Seed: VVGARGVGK (KRAS G12R)
FVGRRSVGA

SEQ ID NO: 37403 - protein, 9 aa, synthetic construct
  source 1..9: note = Seed: VVGARGVGK (KRAS G12R)
FVGRRSVGF

SEQ ID NO: 37404 - protein, 9 aa, synthetic construct
  source 1..9: note = Seed: VVGARGVGK (KRAS G12R)
FVGRRSVGI

SEQ ID NO: 37405 - protein, 9 aa, synthetic construct
  source 1..9: note = Seed: VVGARGVGK (KRAS G12R)
FVGRRSVGL

SEQ ID NO: 37406 - protein, 9 aa, synthetic construct
  source 1..9: note = Seed: VVGARGVGK (KRAS G12R)
FVGRRSVGM

SEQ ID NO: 37407 - protein, 9 aa, synthetic construct
  source 1..9: note = Seed: VVGARGVGK (KRAS G12R)
FVGRRSVGR

SEQ ID NO: 37408 - protein, 9 aa, synthetic construct
  source 1..9: note = Seed: VVGARGVGK (KRAS G12R)
FVGRRSVGV

SEQ ID NO: 37409 - protein, 9 aa, synthetic construct
  source 1..9: note = Seed: VVGARGVGK (KRAS G12R)
FVGRRSVGY

SEQ ID NO: 37410 - protein, 9 aa, synthetic construct
  source 1..9: note = Seed: VVGARGVGK (KRAS G12R)
FVGRRTVGI

SEQ ID NO: 37411 - protein, 9 aa, synthetic construct
  source 1..9: note = Seed: VVGARGVGK (KRAS G12R)
FVGRRTVGL

SEQ ID NO: 37412 - protein, 9 aa, synthetic construct
  source 1..9: note = Seed: VVGARGVGK (KRAS G12R)
FVGRRTVGM

SEQ ID NO: 37413 - protein, 9 aa, synthetic construct
  source 1..9: note = Seed: VVGARGVGK (KRAS G12R)
FVGRRTVGR

SEQ ID NO: 37414 - protein, 9 aa, synthetic construct
  source 1..9: note = Seed: VVGARGVGK (KRAS G12R)
FVGRRTVGV

SEQ ID NO: 37415 - protein, 9 aa, synthetic construct
  source 1..9: note = Seed: VVGARGVGK (KRAS G12R)
FVGRRTVGY

SEQ ID NO: 37416 - protein, 9 aa, synthetic construct
  source 1..9: note = Seed: VVGARGVGK (KRAS G12R)
FVGRRVVGA

SEQ ID NO: 37417 - protein, 9 aa, synthetic construct
  source 1..9: note = Seed: VVGARGVGK (KRAS G12R)
FVGRRVVGI

SEQ ID NO: 37418 - protein, 9 aa, synthetic construct
  source 1..9: note = Seed: VVGARGVGK (KRAS G12R)
FVGRRVVGK

SEQ ID NO: 37419 - protein, 9 aa, synthetic construct
  source 1..9: note = Seed: VVGARGVGK (KRAS G12R)
FVGRRVVGL

SEQ ID NO: 37420 - protein, 9 aa, synthetic construct
  source 1..9: note = Seed: VVGARGVGK (KRAS G12R)
FVGRRVVGR

SEQ ID NO: 37421 - protein, 9 aa, synthetic construct
  source 1..9: note = Seed: VVGARGVGK (KRAS G12R)
FVGRRVVGV

SEQ ID NO: 37422 - protein, 9 aa, synthetic construct
  source 1..9: note = Seed: VVGARGVGK (KRAS G12R)
FVGRRVVGY

SEQ ID NO: 37423 - protein, 9 aa, synthetic construct
  source 1..9: note = Seed: VVGARGVGK (KRAS G12R)
FVGSRAVGA

SEQ ID NO: 37424 - protein, 9 aa, synthetic construct
  source 1..9: note = Seed: VVGARGVGK (KRAS G12R)
FVGSRAVGC

SEQ ID NO: 37425 - protein, 9 aa, synthetic construct
  source 1..9: note = Seed: VVGARGVGK (KRAS G12R)
FVGSRAVGD

SEQ ID NO: 37426 - protein, 9 aa, synthetic construct
  source 1..9: note = Seed: VVGARGVGK (KRAS G12R)
FVGSRAVGE

SEQ ID NO: 37427 - protein, 9 aa, synthetic construct
  source 1..9: note = Seed: VVGARGVGK (KRAS G12R)
FVGSRAVGF

SEQ ID NO: 37428 - protein, 9 aa, synthetic construct
  source 1..9: note = Seed: VVGARGVGK (KRAS G12R)
FVGSRAVGG

SEQ ID NO: 37429 - protein, 9 aa, synthetic construct
  source 1..9: note = Seed: VVGARGVGK (KRAS G12R)
FVGSRAVGH

SEQ ID NO: 37430 - protein, 9 aa, synthetic construct
  source 1..9: note = Seed: VVGARGVGK (KRAS G12R)
FVGSRAVGI

SEQ ID NO: 37431 - protein, 9 aa, synthetic construct
  source 1..9: note = Seed: VVGARGVGK (KRAS G12R)
FVGSRAVGK

SEQ ID NO: 37432 - protein, 9 aa, synthetic construct
  source 1..9: note = Seed: VVGARGVGK (KRAS G12R)
FVGSRAVGL

SEQ ID NO: 37433 - protein, 9 aa, synthetic construct
  source 1..9: note = Seed: VVGARGVGK (KRAS G12R)
FVGSRAVGM

SEQ ID NO: 37434 - protein, 9 aa, synthetic construct
  source 1..9: note = Seed: VVGARGVGK (KRAS G12R)
FVGSRAVGN

SEQ ID NO: 37435 - protein, 9 aa, synthetic construct
  source 1..9: note = Seed: VVGARGVGK (KRAS G12R)
FVGSRAVGP

SEQ ID NO: 37436 - protein, 9 aa, synthetic construct
  source 1..9: note = Seed: VVGARGVGK (KRAS G12R)
FVGSRAVGQ

SEQ ID NO: 37437 - protein, 9 aa, synthetic construct
  source 1..9: note = Seed: VVGARGVGK (KRAS G12R)
FVGSRAVGR

SEQ ID NO: 37438 - protein, 9 aa, synthetic construct
  source 1..9: note = Seed: VVGARGVGK (KRAS G12R)
FVGSRAVGS

SEQ ID NO: 37439 - protein, 9 aa, synthetic construct
  source 1..9: note = Seed: VVGARGVGK (KRAS G12R)
FVGSRAVGT

SEQ ID NO: 37440 - protein, 9 aa, synthetic construct
  source 1..9: note = Seed: VVGARGVGK (KRAS G12R)
FVGSRAVGV

SEQ ID NO: 37441 - protein, 9 aa, synthetic construct
  source 1..9: note = Seed: VVGARGVGK (KRAS G12R)
FVGSRAVGW

SEQ ID NO: 37442 - protein, 9 aa, synthetic construct
  source 1..9: note = Seed: VVGARGVGK (KRAS G12R)
FVGSRAVGY

SEQ ID NO: 37443 - protein, 9 aa, synthetic construct
  source 1..9: note = Seed: VVGARGVGK (KRAS G12R)
FVGSRCVGA

SEQ ID NO: 37444 - protein, 9 aa, synthetic construct
  source 1..9: note = Seed: VVGARGVGK (KRAS G12R)
FVGSRCVGI

SEQ ID NO: 37445 - protein, 9 aa, synthetic construct
  source 1..9: note = Seed: VVGARGVGK (KRAS G12R)
FVGSRCVGL

SEQ ID NO: 37446 - protein, 9 aa, synthetic construct
  source 1..9: note = Seed: VVGARGVGK (KRAS G12R)
FVGSRCVGM

SEQ ID NO: 37447 - protein, 9 aa, synthetic construct
  source 1..9: note = Seed: VVGARGVGK (KRAS G12R)
FVGSRCVGV

SEQ ID NO: 37448 - protein, 9 aa, synthetic construct
  source 1..9: note = Seed: VVGARGVGK (KRAS G12R)
FVGSRDVGI

SEQ ID NO: 37449 - protein, 9 aa, synthetic construct
  source 1..9: note = Seed: VVGARGVGK (KRAS G12R)
FVGSRDVGL

SEQ ID NO: 37450 - protein, 9 aa, synthetic construct
  source 1..9: note = Seed: VVGARGVGK (KRAS G12R)
FVGSRDVGV

SEQ ID NO: 37451 - protein, 9 aa, synthetic construct
  source 1..9: note = Seed: VVGARGVGK (KRAS G12R)
FVGSREVGI

SEQ ID NO: 37452 - protein, 9 aa, synthetic construct
  source 1..9: note = Seed: VVGARGVGK (KRAS G12R)
FVGSREVGL

SEQ ID NO: 37453 - protein, 9 aa, synthetic construct
  source 1..9: note = Seed: VVGARGVGK (KRAS G12R)
FVGSREVGV

SEQ ID NO: 37454 - protein, 9 aa, synthetic construct
  source 1..9: note = Seed: VVGARGVGK (KRAS G12R)
FVGSRFVGI

SEQ ID NO: 37455 - protein, 9 aa, synthetic construct
  source 1..9: note = Seed: VVGARGVGK (KRAS G12R)
FVGSRGVGA

SEQ ID NO: 37456 - protein, 9 aa, synthetic construct
  source 1..9: note = Seed: VVGARGVGK (KRAS G12R)
FVGSRGVGC

SEQ ID NO: 37457 - protein, 9 aa, synthetic construct
  source 1..9: note = Seed: VVGARGVGK (KRAS G12R)
FVGSRGVGF

SEQ ID NO: 37458 - protein, 9 aa, synthetic construct
  source 1..9: note = Seed: VVGARGVGK (KRAS G12R)
FVGSRGVGG

SEQ ID NO: 37459 - protein, 9 aa, synthetic construct
  source 1..9: note = Seed: VVGARGVGK (KRAS G12R)
FVGSRGVGH

SEQ ID NO: 37460 - protein, 9 aa, synthetic construct
  source 1..9: note = Seed: VVGARGVGK (KRAS G12R)
FVGSRGVGI

SEQ ID NO: 37461 - protein, 9 aa, synthetic construct
  source 1..9: note = Seed: VVGARGVGK (KRAS G12R)
FVGSRGVGK

SEQ ID NO: 37462 - protein, 9 aa, synthetic construct
  source 1..9: note = Seed: VVGARGVGK (KRAS G12R)
FVGSRGVGL

SEQ ID NO: 37463 - protein, 9 aa, synthetic construct
  source 1..9: note = Seed: VVGARGVGK (KRAS G12R)
FVGSRGVGM

SEQ ID NO: 37464 - protein, 9 aa, synthetic construct
  source 1..9: note = Seed: VVGARGVGK (KRAS G12R)
FVGSRGVGN

SEQ ID NO: 37465 - protein, 9 aa, synthetic construct
  source 1..9: note = Seed: VVGARGVGK (KRAS G12R)
FVGSRGVGP

SEQ ID NO: 37466 - protein, 9 aa, synthetic construct
  source 1..9: note = Seed: VVGARGVGK (KRAS G12R)
FVGSRGVGQ

SEQ ID NO: 37467 - protein, 9 aa, synthetic construct
  source 1..9: note = Seed: VVGARGVGK (KRAS G12R)
FVGSRGVGR

SEQ ID NO: 37468 - protein, 9 aa, synthetic construct
  source 1..9: note = Seed: VVGARGVGK (KRAS G12R)
FVGSRGVGS

SEQ ID NO: 37469 - protein, 9 aa, synthetic construct
  source 1..9: note = Seed: VVGARGVGK (KRAS G12R)
FVGSRGVGT

SEQ ID NO: 37470 - protein, 9 aa, synthetic construct
  source 1..9: note = Seed: VVGARGVGK (KRAS G12R)
FVGSRGVGV

SEQ ID NO: 37471 - protein, 9 aa, synthetic construct
  source 1..9: note = Seed: VVGARGVGK (KRAS G12R)
FVGSRGVGW

SEQ ID NO: 37472 - protein, 9 aa, synthetic construct
  source 1..9: note = Seed: VVGARGVGK (KRAS G12R)
FVGSRGVGY

SEQ ID NO: 37473 - protein, 9 aa, synthetic construct
  source 1..9: note = Seed: VVGARGVGK (KRAS G12R)
FVGSRHVGA

SEQ ID NO: 37474 - protein, 9 aa, synthetic construct
  source 1..9: note = Seed: VVGARGVGK (KRAS G12R)
FVGSRHVGF

SEQ ID NO: 37475 - protein, 9 aa, synthetic construct
  source 1..9: note = Seed: VVGARGVGK (KRAS G12R)
FVGSRHVGG

SEQ ID NO: 37476 - protein, 9 aa, synthetic construct
  source 1..9: note = Seed: VVGARGVGK (KRAS G12R)
FVGSRHVGI

SEQ ID NO: 37477 - protein, 9 aa, synthetic construct
  source 1..9: note = Seed: VVGARGVGK (KRAS G12R)
FVGSRHVGL

SEQ ID NO: 37478 - protein, 9 aa, synthetic construct
  source 1..9: note = Seed: VVGARGVGK (KRAS G12R)
FVGSRHVGM

SEQ ID NO: 37479 - protein, 9 aa, synthetic construct
  source 1..9: note = Seed: VVGARGVGK (KRAS G12R)
FVGSRHVGN

SEQ ID NO: 37480 - protein, 9 aa, synthetic construct
  source 1..9: note = Seed: VVGARGVGK (KRAS G12R)
FVGSRHVGQ

SEQ ID NO: 37481 - protein, 9 aa, synthetic construct
  source 1..9: note = Seed: VVGARGVGK (KRAS G12R)
FVGSRHVGR

SEQ ID NO: 37482 - protein, 9 aa, synthetic construct
  source 1..9: note = Seed: VVGARGVGK (KRAS G12R)
FVGSRHVGS

SEQ ID NO: 37483 - protein, 9 aa, synthetic construct
  source 1..9: note = Seed: VVGARGVGK (KRAS G12R)
FVGSRHVGT

SEQ ID NO: 37484 - protein, 9 aa, synthetic construct
  source 1..9: note = Seed: VVGARGVGK (KRAS G12R)
FVGSRHVGV

SEQ ID NO: 37485 - protein, 9 aa, synthetic construct
  source 1..9: note = Seed: VVGARGVGK (KRAS G12R)
FVGSRHVGY

SEQ ID NO: 37486 - protein, 9 aa, synthetic construct
  source 1..9: note = Seed: VVGARGVGK (KRAS G12R)
FVGSRIVGA

SEQ ID NO: 37487 - protein, 9 aa, synthetic construct
  source 1..9: note = Seed: VVGARGVGK (KRAS G12R)
FVGSRIVGF

SEQ ID NO: 37488 - protein, 9 aa, synthetic construct
  source 1..9: note = Seed: VVGARGVGK (KRAS G12R)
FVGSRIVGG

SEQ ID NO: 37489 - protein, 9 aa, synthetic construct
  source 1..9: note = Seed: VVGARGVGK (KRAS G12R)
FVGSRIVGH

SEQ ID NO: 37490 - protein, 9 aa, synthetic construct
  source 1..9: note = Seed: VVGARGVGK (KRAS G12R)
FVGSRIVGI

SEQ ID NO: 37491 - protein, 9 aa, synthetic construct
  source 1..9: note = Seed: VVGARGVGK (KRAS G12R)
FVGSRIVGL

SEQ ID NO: 37492 - protein, 9 aa, synthetic construct
  source 1..9: note = Seed: VVGARGVGK (KRAS G12R)
FVGSRIVGM

SEQ ID NO: 37493 - protein, 9 aa, synthetic construct
  source 1..9: note = Seed: VVGARGVGK (KRAS G12R)
FVGSRIVGN

SEQ ID NO: 37494 - protein, 9 aa, synthetic construct
  source 1..9: note = Seed: VVGARGVGK (KRAS G12R)
FVGSRIVGQ

SEQ ID NO: 37495 - protein, 9 aa, synthetic construct
  source 1..9: note = Seed: VVGARGVGK (KRAS G12R)
FVGSRIVGR

SEQ ID NO: 37496 - protein, 9 aa, synthetic construct
  source 1..9: note = Seed: VVGARGVGK (KRAS G12R)
FVGSRIVGS

SEQ ID NO: 37497 - protein, 9 aa, synthetic construct
  source 1..9: note = Seed: VVGARGVGK (KRAS G12R)
FVGSRIVGT

SEQ ID NO: 37498 - protein, 9 aa, synthetic construct
  source 1..9: note = Seed: VVGARGVGK (KRAS G12R)
FVGSRIVGV

SEQ ID NO: 37499 - protein, 9 aa, synthetic construct
  source 1..9: note = Seed: VVGARGVGK (KRAS G12R)
FVGSRIVGY

SEQ ID NO: 37500 - protein, 9 aa, synthetic construct
  source 1..9: note = Seed: VVGARGVGK (KRAS G12R)
FVGSRKVGA

SEQ ID NO: 37501 - protein, 9 aa, synthetic construct
  source 1..9: note = Seed: VVGARGVGK (KRAS G12R)
FVGSRKVGF

SEQ ID NO: 37502 - protein, 9 aa, synthetic construct
  source 1..9: note = Seed: VVGARGVGK (KRAS G12R)
FVGSRKVGG

SEQ ID NO: 37503 - protein, 9 aa, synthetic construct
  source 1..9: note = Seed: VVGARGVGK (KRAS G12R)
FVGSRKVGI

SEQ ID NO: 37504 - protein, 9 aa, synthetic construct
  source 1..9: note = Seed: VVGARGVGK (KRAS G12R)
FVGSRKVGK

SEQ ID NO: 37505 - protein, 9 aa, synthetic construct
  source 1..9: note = Seed: VVGARGVGK (KRAS G12R)
FVGSRKVGL

SEQ ID NO: 37506 - protein, 9 aa, synthetic construct
  source 1..9: note = Seed: VVGARGVGK (KRAS G12R)
FVGSRKVGM

SEQ ID NO: 37507 - protein, 9 aa, synthetic construct
  source 1..9: note = Seed: VVGARGVGK (KRAS G12R)
FVGSRKVGN

SEQ ID NO: 37508 - protein, 9 aa, synthetic construct
  source 1..9: note = Seed: VVGARGVGK (KRAS G12R)
FVGSRKVGQ

SEQ ID NO: 37509 - protein, 9 aa, synthetic construct
  source 1..9: note = Seed: VVGARGVGK (KRAS G12R)
FVGSRKVGR

SEQ ID NO: 37510 - protein, 9 aa, synthetic construct
  source 1..9: note = Seed: VVGARGVGK (KRAS G12R)
FVGSRKVGS

SEQ ID NO: 37511 - protein, 9 aa, synthetic construct
  source 1..9: note = Seed: VVGARGVGK (KRAS G12R)
FVGSRKVGT

SEQ ID NO: 37512 - protein, 9 aa, synthetic construct
  source 1..9: note = Seed: VVGARGVGK (KRAS G12R)
FVGSRKVGV

SEQ ID NO: 37513 - protein, 9 aa, synthetic construct
  source 1..9: note = Seed: VVGARGVGK (KRAS G12R)
FVGSRKVGW

SEQ ID NO: 37514 - protein, 9 aa, synthetic construct
  source 1..9: note = Seed: VVGARGVGK (KRAS G12R)
FVGSRKVGY

SEQ ID NO: 37515 - protein, 9 aa, synthetic construct
  source 1..9: note = Seed: VVGARGVGK (KRAS G12R)
FVGSRLVGA

SEQ ID NO: 37516 - protein, 9 aa, synthetic construct
  source 1..9: note = Seed: VVGARGVGK (KRAS G12R)
FVGSRLVGG

SEQ ID NO: 37517 - protein, 9 aa, synthetic construct
  source 1..9: note = Seed: VVGARGVGK (KRAS G12R)
FVGSRLVGI

SEQ ID NO: 37518 - protein, 9 aa, synthetic construct
  source 1..9: note = Seed: VVGARGVGK (KRAS G12R)
FVGSRLVGL

SEQ ID NO: 37519 - protein, 9 aa, synthetic construct
  source 1..9: note = Seed: VVGARGVGK (KRAS G12R)
FVGSRLVGM

SEQ ID NO: 37520 - protein, 9 aa, synthetic construct
  source 1..9: note = Seed: VVGARGVGK (KRAS G12R)
FVGSRLVGN

SEQ ID NO: 37521 - protein, 9 aa, synthetic construct
  source 1..9: note = Seed: VVGARGVGK (KRAS G12R)
FVGSRLVGS

SEQ ID NO: 37522 - protein, 9 aa, synthetic construct
  source 1..9: note = Seed: VVGARGVGK (KRAS G12R)
FVGSRLVGT

SEQ ID NO: 37523 - protein, 9 aa, synthetic construct
  source 1..9: note = Seed: VVGARGVGK (KRAS G12R)
FVGSRLVGV

SEQ ID NO: 37524 - protein, 9 aa, synthetic construct
  source 1..9: note = Seed: VVGARGVGK (KRAS G12R)
FVGSRMVGA

SEQ ID NO: 37525 - protein, 9 aa, synthetic construct
  source 1..9: note = Seed: VVGARGVGK (KRAS G12R)
FVGSRMVGF

SEQ ID NO: 37526 - protein, 9 aa, synthetic construct
  source 1..9: note = Seed: VVGARGVGK (KRAS G12R)
FVGSRMVGG

SEQ ID NO: 37527 - protein, 9 aa, synthetic construct
  source 1..9: note = Seed: VVGARGVGK (KRAS G12R)
FVGSRMVGI

SEQ ID NO: 37528 - protein, 9 aa, synthetic construct
  source 1..9: note = Seed: VVGARGVGK (KRAS G12R)
FVGSRMVGL

SEQ ID NO: 37529 - protein, 9 aa, synthetic construct
  source 1..9: note = Seed: VVGARGVGK (KRAS G12R)
FVGSRMVGM

SEQ ID NO: 37530 - protein, 9 aa, synthetic construct
  source 1..9: note = Seed: VVGARGVGK (KRAS G12R)
FVGSRMVGN

SEQ ID NO: 37531 - protein, 9 aa, synthetic construct
  source 1..9: note = Seed: VVGARGVGK (KRAS G12R)
FVGSRMVGS

SEQ ID NO: 37532 - protein, 9 aa, synthetic construct
  source 1..9: note = Seed: VVGARGVGK (KRAS G12R)
FVGSRMVGT

SEQ ID NO: 37533 - protein, 9 aa, synthetic construct
  source 1..9: note = Seed: VVGARGVGK (KRAS G12R)
FVGSRMVGV

SEQ ID NO: 37534 - protein, 9 aa, synthetic construct
  source 1..9: note = Seed: VVGARGVGK (KRAS G12R)
FVGSRMVGY

SEQ ID NO: 37535 - protein, 9 aa, synthetic construct
  source 1..9: note = Seed: VVGARGVGK (KRAS G12R)
FVGSRNVGA

SEQ ID NO: 37536 - protein, 9 aa, synthetic construct
  source 1..9: note = Seed: VVGARGVGK (KRAS G12R)
FVGSRNVGC

SEQ ID NO: 37537 - protein, 9 aa, synthetic construct
  source 1..9: note = Seed: VVGARGVGK (KRAS G12R)
FVGSRNVGF

SEQ ID NO: 37538 - protein, 9 aa, synthetic construct
  source 1..9: note = Seed: VVGARGVGK (KRAS G12R)
FVGSRNVGG

SEQ ID NO: 37539 - protein, 9 aa, synthetic construct
  source 1..9: note = Seed: VVGARGVGK (KRAS G12R)
FVGSRNVGI

SEQ ID NO: 37540 - protein, 9 aa, synthetic construct
  source 1..9: note = Seed: VVGARGVGK (KRAS G12R)
FVGSRNVGK

SEQ ID NO: 37541 - protein, 9 aa, synthetic construct
  source 1..9: note = Seed: VVGARGVGK (KRAS G12R)
FVGSRNVGL

SEQ ID NO: 37542 - protein, 9 aa, synthetic construct
  source 1..9: note = Seed: VVGARGVGK (KRAS G12R)
FVGSRNVGM

SEQ ID NO: 37543 - protein, 9 aa, synthetic construct
  source 1..9: note = Seed: VVGARGVGK (KRAS G12R)
FVGSRNVGN

SEQ ID NO: 37544 - protein, 9 aa, synthetic construct
  source 1..9: note = Seed: VVGARGVGK (KRAS G12R)
FVGSRNVGR

SEQ ID NO: 37545 - protein, 9 aa, synthetic construct
  source 1..9: note = Seed: VVGARGVGK (KRAS G12R)
FVGSRNVGS

SEQ ID NO: 37546 - protein, 9 aa, synthetic construct
  source 1..9: note = Seed: VVGARGVGK (KRAS G12R)
FVGSRNVGT

SEQ ID NO: 37547 - protein, 9 aa, synthetic construct
  source 1..9: note = Seed: VVGARGVGK (KRAS G12R)
FVGSRNVGV

SEQ ID NO: 37548 - protein, 9 aa, synthetic construct
  source 1..9: note = Seed: VVGARGVGK (KRAS G12R)
FVGSRNVGY

SEQ ID NO: 37549 - protein, 9 aa, synthetic construct
  source 1..9: note = Seed: VVGARGVGK (KRAS G12R)
FVGSRPVGA

SEQ ID NO: 37550 - protein, 9 aa, synthetic construct
  source 1..9: note = Seed: VVGARGVGK (KRAS G12R)
FVGSRPVGC

SEQ ID NO: 37551 - protein, 9 aa, synthetic construct
  source 1..9: note = Seed: VVGARGVGK (KRAS G12R)
FVGSRPVGD

SEQ ID NO: 37552 - protein, 9 aa, synthetic construct
  source 1..9: note = Seed: VVGARGVGK (KRAS G12R)
FVGSRPVGE

SEQ ID NO: 37553 - protein, 9 aa, synthetic construct
  source 1..9: note = Seed: VVGARGVGK (KRAS G12R)
FVGSRPVGF

SEQ ID NO: 37554 - protein, 9 aa, synthetic construct
  source 1..9: note = Seed: VVGARGVGK (KRAS G12R)
FVGSRPVGG

SEQ ID NO: 37555 - protein, 9 aa, synthetic construct
  source 1..9: note = Seed: VVGARGVGK (KRAS G12R)
FVGSRPVGH

SEQ ID NO: 37556 - protein, 9 aa, synthetic construct
  source 1..9: note = Seed: VVGARGVGK (KRAS G12R)
FVGSRPVGI

SEQ ID NO: 37557 - protein, 9 aa, synthetic construct
  source 1..9: note = Seed: VVGARGVGK (KRAS G12R)
FVGSRPVGK

SEQ ID NO: 37558 - protein, 9 aa, synthetic construct
  source 1..9: note = Seed: VVGARGVGK (KRAS G12R)
FVGSRPVGL

SEQ ID NO: 37559 - protein, 9 aa, synthetic construct
  source 1..9: note = Seed: VVGARGVGK (KRAS G12R)
FVGSRPVGM

SEQ ID NO: 37560 - protein, 9 aa, synthetic construct
  source 1..9: note = Seed: VVGARGVGK (KRAS G12R)
FVGSRPVGN

SEQ ID NO: 37561 - protein, 9 aa, synthetic construct
  source 1..9: note = Seed: VVGARGVGK (KRAS G12R)
FVGSRPVGP

SEQ ID NO: 37562 - protein, 9 aa, synthetic construct
  source 1..9: note = Seed: VVGARGVGK (KRAS G12R)
FVGSRPVGQ

SEQ ID NO: 37563 - protein, 9 aa, synthetic construct
  source 1..9: note = Seed: VVGARGVGK (KRAS G12R)
FVGSRPVGR

SEQ ID NO: 37564 - protein, 9 aa, synthetic construct
  source 1..9: note = Seed: VVGARGVGK (KRAS G12R)
FVGSRPVGS

SEQ ID NO: 37565 - protein, 9 aa, synthetic construct
  source 1..9: note = Seed: VVGARGVGK (KRAS G12R)
FVGSRPVGT

SEQ ID NO: 37566 - protein, 9 aa, synthetic construct
  source 1..9: note = Seed: VVGARGVGK (KRAS G12R)
FVGSRPVGV

SEQ ID NO: 37567 - protein, 9 aa, synthetic construct
  source 1..9: note = Seed: VVGARGVGK (KRAS G12R)
FVGSRPVGW

SEQ ID NO: 37568 - protein, 9 aa, synthetic construct
  source 1..9: note = Seed: VVGARGVGK (KRAS G12R)
FVGSRPVGY

SEQ ID NO: 37569 - protein, 9 aa, synthetic construct
  source 1..9: note = Seed: VVGARGVGK (KRAS G12R)
FVGSRQVGA

SEQ ID NO: 37570 - protein, 9 aa, synthetic construct
  source 1..9: note = Seed: VVGARGVGK (KRAS G12R)
FVGSRQVGF

SEQ ID NO: 37571 - protein, 9 aa, synthetic construct
  source 1..9: note = Seed: VVGARGVGK (KRAS G12R)
FVGSRQVGI

SEQ ID NO: 37572 - protein, 9 aa, synthetic construct
  source 1..9: note = Seed: VVGARGVGK (KRAS G12R)
FVGSRQVGL

SEQ ID NO: 37573 - protein, 9 aa, synthetic construct
  source 1..9: note = Seed: VVGARGVGK (KRAS G12R)
FVGSRQVGM

SEQ ID NO: 37574 - protein, 9 aa, synthetic construct
  source 1..9: note = Seed: VVGARGVGK (KRAS G12R)
FVGSRQVGR

SEQ ID NO: 37575 - protein, 9 aa, synthetic construct
  source 1..9: note = Seed: VVGARGVGK (KRAS G12R)
FVGSRQVGS

SEQ ID NO: 37576 - protein, 9 aa, synthetic construct
  source 1..9: note = Seed: VVGARGVGK (KRAS G12R)
FVGSRQVGT

SEQ ID NO: 37577 - protein, 9 aa, synthetic construct
  source 1..9: note = Seed: VVGARGVGK (KRAS G12R)
FVGSRQVGV

SEQ ID NO: 37578 - protein, 9 aa, synthetic construct
  source 1..9: note = Seed: VVGARGVGK (KRAS G12R)
FVGSRRVGA

SEQ ID NO: 37579 - protein, 9 aa, synthetic construct
  source 1..9: note = Seed: VVGARGVGK (KRAS G12R)
FVGSRRVGD

SEQ ID NO: 37580 - protein, 9 aa, synthetic construct
  source 1..9: note = Seed: VVGARGVGK (KRAS G12R)
FVGSRRVGF

SEQ ID NO: 37581 - protein, 9 aa, synthetic construct
  source 1..9: note = Seed: VVGARGVGK (KRAS G12R)
FVGSRRVGG

SEQ ID NO: 37582 - protein, 9 aa, synthetic construct
  source 1..9: note = Seed: VVGARGVGK (KRAS G12R)
FVGSRRVGH

SEQ ID NO: 37583 - protein, 9 aa, synthetic construct
  source 1..9: note = Seed: VVGARGVGK (KRAS G12R)
FVGSRRVGI

SEQ ID NO: 37584 - protein, 9 aa, synthetic construct
  source 1..9: note = Seed: VVGARGVGK (KRAS G12R)
FVGSRRVGK

SEQ ID NO: 37585 - protein, 9 aa, synthetic construct
  source 1..9: note = Seed: VVGARGVGK (KRAS G12R)
FVGSRRVGL

SEQ ID NO: 37586 - protein, 9 aa, synthetic construct
  source 1..9: note = Seed: VVGARGVGK (KRAS G12R)
FVGSRRVGM

SEQ ID NO: 37587 - protein, 9 aa, synthetic construct
  source 1..9: note = Seed: VVGARGVGK (KRAS G12R)
FVGSRRVGN

SEQ ID NO: 37588 - protein, 9 aa, synthetic construct
  source 1..9: note = Seed: VVGARGVGK (KRAS G12R)
FVGSRRVGQ

SEQ ID NO: 37589 - protein, 9 aa, synthetic construct
  source 1..9: note = Seed: VVGARGVGK (KRAS G12R)
FVGSRRVGR

SEQ ID NO: 37590 - protein, 9 aa, synthetic construct
  source 1..9: note = Seed: VVGARGVGK (KRAS G12R)
FVGSRRVGS

SEQ ID NO: 37591 - protein, 9 aa, synthetic construct
  source 1..9: note = Seed: VVGARGVGK (KRAS G12R)
FVGSRRVGT

SEQ ID NO: 37592 - protein, 9 aa, synthetic construct
  source 1..9: note = Seed: VVGARGVGK (KRAS G12R)
FVGSRRVGV

SEQ ID NO: 37593 - protein, 9 aa, synthetic construct
  source 1..9: note = Seed: VVGARGVGK (KRAS G12R)
FVGSRRVGW

SEQ ID NO: 37594 - protein, 9 aa, synthetic construct
  source 1..9: note = Seed: VVGARGVGK (KRAS G12R)
FVGSRRVGY

SEQ ID NO: 37595 - protein, 9 aa, synthetic construct
  source 1..9: note = Seed: VVGARGVGK (KRAS G12R)
FVGSRSVGA

SEQ ID NO: 37596 - protein, 9 aa, synthetic construct
  source 1..9: note = Seed: VVGARGVGK (KRAS G12R)
FVGSRSVGC

SEQ ID NO: 37597 - protein, 9 aa, synthetic construct
  source 1..9: note = Seed: VVGARGVGK (KRAS G12R)
FVGSRSVGD

SEQ ID NO: 37598 - protein, 9 aa, synthetic construct
  source 1..9: note = Seed: VVGARGVGK (KRAS G12R)
FVGSRSVGE

SEQ ID NO: 37599 - protein, 9 aa, synthetic construct
  source 1..9: note = Seed: VVGARGVGK (KRAS G12R)
FVGSRSVGF

SEQ ID NO: 37600 - protein, 9 aa, synthetic construct
  source 1..9: note = Seed: VVGARGVGK (KRAS G12R)
FVGSRSVGG

SEQ ID NO: 37601 - protein, 9 aa, synthetic construct
  source 1..9: note = Seed: VVGARGVGK (KRAS G12R)
FVGSRSVGH

SEQ ID NO: 37602 - protein, 9 aa, synthetic construct
  source 1..9: note = Seed: VVGARGVGK (KRAS G12R)
FVGSRSVGI

SEQ ID NO: 37603 - protein, 9 aa, synthetic construct
  source 1..9: note = Seed: VVGARGVGK (KRAS G12R)
FVGSRSVGK

SEQ ID NO: 37604 - protein, 9 aa, synthetic construct
  source 1..9: note = Seed: VVGARGVGK (KRAS G12R)
FVGSRSVGL

SEQ ID NO: 37605 - protein, 9 aa, synthetic construct
  source 1..9: note = Seed: VVGARGVGK (KRAS G12R)
FVGSRSVGM

SEQ ID NO: 37606 - protein, 9 aa, synthetic construct
  source 1..9: note = Seed: VVGARGVGK (KRAS G12R)
FVGSRSVGN

SEQ ID NO: 37607 - protein, 9 aa, synthetic construct
  source 1..9: note = Seed: VVGARGVGK (KRAS G12R)
FVGSRSVGP

SEQ ID NO: 37608 - protein, 9 aa, synthetic construct
  source 1..9: note = Seed: VVGARGVGK (KRAS G12R)
FVGSRSVGQ

SEQ ID NO: 37609 - protein, 9 aa, synthetic construct
  source 1..9: note = Seed: VVGARGVGK (KRAS G12R)
FVGSRSVGR

SEQ ID NO: 37610 - protein, 9 aa, synthetic construct
  source 1..9: note = Seed: VVGARGVGK (KRAS G12R)
FVGSRSVGS

SEQ ID NO: 37611 - protein, 9 aa, synthetic construct
  source 1..9: note = Seed: VVGARGVGK (KRAS G12R)
FVGSRSVGT

SEQ ID NO: 37612 - protein, 9 aa, synthetic construct
  source 1..9: note = Seed: VVGARGVGK (KRAS G12R)
FVGSRSVGV

SEQ ID NO: 37613 - protein, 9 aa, synthetic construct
  source 1..9: note = Seed: VVGARGVGK (KRAS G12R)
FVGSRSVGW

SEQ ID NO: 37614 - protein, 9 aa, synthetic construct
  source 1..9: note = Seed: VVGARGVGK (KRAS G12R)
FVGSRSVGY

SEQ ID NO: 37615 - protein, 9 aa, synthetic construct
  source 1..9: note = Seed: VVGARGVGK (KRAS G12R)
FVGSRTVGA

SEQ ID NO: 37616 - protein, 9 aa, synthetic construct
  source 1..9: note = Seed: VVGARGVGK (KRAS G12R)
FVGSRTVGC

SEQ ID NO: 37617 - protein, 9 aa, synthetic construct
  source 1..9: note = Seed: VVGARGVGK (KRAS G12R)
FVGSRTVGF

SEQ ID NO: 37618 - protein, 9 aa, synthetic construct
  source 1..9: note = Seed: VVGARGVGK (KRAS G12R)
FVGSRTVGG

SEQ ID NO: 37619 - protein, 9 aa, synthetic construct
  source 1..9: note = Seed: VVGARGVGK (KRAS G12R)
FVGSRTVGH

SEQ ID NO: 37620 - protein, 9 aa, synthetic construct
  source 1..9: note = Seed: VVGARGVGK (KRAS G12R)
FVGSRTVGI

SEQ ID NO: 37621 - protein, 9 aa, synthetic construct
  source 1..9: note = Seed: VVGARGVGK (KRAS G12R)
FVGSRTVGK

SEQ ID NO: 37622 - protein, 9 aa, synthetic construct
  source 1..9: note = Seed: VVGARGVGK (KRAS G12R)
FVGSRTVGL

SEQ ID NO: 37623 - protein, 9 aa, synthetic construct
  source 1..9: note = Seed: VVGARGVGK (KRAS G12R)
FVGSRTVGM

SEQ ID NO: 37624 - protein, 9 aa, synthetic construct
  source 1..9: note = Seed: VVGARGVGK (KRAS G12R)
FVGSRTVGN

SEQ ID NO: 37625 - protein, 9 aa, synthetic construct
  source 1..9: note = Seed: VVGARGVGK (KRAS G12R)
FVGSRTVGP

SEQ ID NO: 37626 - protein, 9 aa, synthetic construct
  source 1..9: note = Seed: VVGARGVGK (KRAS G12R)
FVGSRTVGQ

SEQ ID NO: 37627 - protein, 9 aa, synthetic construct
  source 1..9: note = Seed: VVGARGVGK (KRAS G12R)
FVGSRTVGR

SEQ ID NO: 37628 - protein, 9 aa, synthetic construct
  source 1..9: note = Seed: VVGARGVGK (KRAS G12R)
FVGSRTVGS

SEQ ID NO: 37629 - protein, 9 aa, synthetic construct
  source 1..9: note = Seed: VVGARGVGK (KRAS G12R)
FVGSRTVGT

SEQ ID NO: 37630 - protein, 9 aa, synthetic construct
  source 1..9: note = Seed: VVGARGVGK (KRAS G12R)
FVGSRTVGV

SEQ ID NO: 37631 - protein, 9 aa, synthetic construct
  source 1..9: note = Seed: VVGARGVGK (KRAS G12R)
FVGSRTVGW

SEQ ID NO: 37632 - protein, 9 aa, synthetic construct
  source 1..9: note = Seed: VVGARGVGK (KRAS G12R)
FVGSRTVGY

SEQ ID NO: 37633 - protein, 9 aa, synthetic construct
  source 1..9: note = Seed: VVGARGVGK (KRAS G12R)
FVGSRVVGA

SEQ ID NO: 37634 - protein, 9 aa, synthetic construct
  source 1..9: note = Seed: VVGARGVGK (KRAS G12R)
FVGSRVVGC

SEQ ID NO: 37635 - protein, 9 aa, synthetic construct
  source 1..9: note = Seed: VVGARGVGK (KRAS G12R)
FVGSRVVGF

SEQ ID NO: 37636 - protein, 9 aa, synthetic construct
  source 1..9: note = Seed: VVGARGVGK (KRAS G12R)
FVGSRVVGG

SEQ ID NO: 37637 - protein, 9 aa, synthetic construct
  source 1..9: note = Seed: VVGARGVGK (KRAS G12R)
FVGSRVVGH

SEQ ID NO: 37638 - protein, 9 aa, synthetic construct
  source 1..9: note = Seed: VVGARGVGK (KRAS G12R)
FVGSRVVGI

SEQ ID NO: 37639 - protein, 9 aa, synthetic construct
  source 1..9: note = Seed: VVGARGVGK (KRAS G12R)
FVGSRVVGK

SEQ ID NO: 37640 - protein, 9 aa, synthetic construct
  source 1..9: note = Seed: VVGARGVGK (KRAS G12R)
FVGSRVVGL

SEQ ID NO: 37641 - protein, 9 aa, synthetic construct
  source 1..9: note = Seed: VVGARGVGK (KRAS G12R)
FVGSRVVGM

SEQ ID NO: 37642 - protein, 9 aa, synthetic construct
  source 1..9: note = Seed: VVGARGVGK (KRAS G12R)
FVGSRVVGN

SEQ ID NO: 37643 - protein, 9 aa, synthetic construct
  source 1..9: note = Seed: VVGARGVGK (KRAS G12R)
FVGSRVVGP

SEQ ID NO: 37644 - protein, 9 aa, synthetic construct
  source 1..9: note = Seed: VVGARGVGK (KRAS G12R)
FVGSRVVGQ

SEQ ID NO: 37645 - protein, 9 aa, synthetic construct
  source 1..9: note = Seed: VVGARGVGK (KRAS G12R)
FVGSRVVGR

SEQ ID NO: 37646 - protein, 9 aa, synthetic construct
  source 1..9: note = Seed: VVGARGVGK (KRAS G12R)
FVGSRVVGS

SEQ ID NO: 37647 - protein, 9 aa, synthetic construct
  source 1..9: note = Seed: VVGARGVGK (KRAS G12R)
FVGSRVVGT

SEQ ID NO: 37648 - protein, 9 aa, synthetic construct
  source 1..9: note = Seed: VVGARGVGK (KRAS G12R)
FVGSRVVGV

SEQ ID NO: 37649 - protein, 9 aa, synthetic construct
  source 1..9: note = Seed: VVGARGVGK (KRAS G12R)
FVGSRVVGY

SEQ ID NO: 37650 - protein, 9 aa, synthetic construct
  source 1..9: note = Seed: VVGARGVGK (KRAS G12R)
FVGSRWVGI

SEQ ID NO: 37651 - protein, 9 aa, synthetic construct
  source 1..9: note = Seed: VVGARGVGK (KRAS G12R)
FVGSRWVGL

SEQ ID NO: 37652 - protein, 9 aa, synthetic construct
  source 1..9: note = Seed: VVGARGVGK (KRAS G12R)
FVGSRWVGV

SEQ ID NO: 37653 - protein, 9 aa, synthetic construct
  source 1..9: note = Seed: VVGARGVGK (KRAS G12R)
FVGSRYVGA

SEQ ID NO: 37654 - protein, 9 aa, synthetic construct
  source 1..9: note = Seed: VVGARGVGK (KRAS G12R)
FVGSRYVGI

SEQ ID NO: 37655 - protein, 9 aa, synthetic construct
  source 1..9: note = Seed: VVGARGVGK (KRAS G12R)
FVGSRYVGL

SEQ ID NO: 37656 - protein, 9 aa, synthetic construct
  source 1..9: note = Seed: VVGARGVGK (KRAS G12R)
FVGSRYVGM

SEQ ID NO: 37657 - protein, 9 aa, synthetic construct
  source 1..9: note = Seed: VVGARGVGK (KRAS G12R)
FVGSRYVGV

SEQ ID NO: 37658 - protein, 9 aa, synthetic construct
  source 1..9: note = Seed: VVGARGVGK (KRAS G12R)
FVGTRAVGA

SEQ ID NO: 37659 - protein, 9 aa, synthetic construct
  source 1..9: note = Seed: VVGARGVGK (KRAS G12R)
FVGTRAVGC

SEQ ID NO: 37660 - protein, 9 aa, synthetic construct
  source 1..9: note = Seed: VVGARGVGK (KRAS G12R)
FVGTRAVGD

SEQ ID NO: 37661 - protein, 9 aa, synthetic construct
  source 1..9: note = Seed: VVGARGVGK (KRAS G12R)
FVGTRAVGE

SEQ ID NO: 37662 - protein, 9 aa, synthetic construct
  source 1..9: note = Seed: VVGARGVGK (KRAS G12R)
FVGTRAVGF

SEQ ID NO: 37663 - protein, 9 aa, synthetic construct
  source 1..9: note = Seed: VVGARGVGK (KRAS G12R)
FVGTRAVGG

SEQ ID NO: 37664 - protein, 9 aa, synthetic construct
  source 1..9: note = Seed: VVGARGVGK (KRAS G12R)
FVGTRAVGH

SEQ ID NO: 37665 - protein, 9 aa, synthetic construct
  source 1..9: note = Seed: VVGARGVGK (KRAS G12R)
FVGTRAVGI

SEQ ID NO: 37666 - protein, 9 aa, synthetic construct
  source 1..9: note = Seed: VVGARGVGK (KRAS G12R)
FVGTRAVGK

SEQ ID NO: 37667 - protein, 9 aa, synthetic construct
  source 1..9: note = Seed: VVGARGVGK (KRAS G12R)
FVGTRAVGL

SEQ ID NO: 37668 - protein, 9 aa, synthetic construct
  source 1..9: note = Seed: VVGARGVGK (KRAS G12R)
FVGTRAVGM

SEQ ID NO: 37669 - protein, 9 aa, synthetic construct
  source 1..9: note = Seed: VVGARGVGK (KRAS G12R)
FVGTRAVGN

SEQ ID NO: 37670 - protein, 9 aa, synthetic construct
  source 1..9: note = Seed: VVGARGVGK (KRAS G12R)
FVGTRAVGP

SEQ ID NO: 37671 - protein, 9 aa, synthetic construct
  source 1..9: note = Seed: VVGARGVGK (KRAS G12R)
FVGTRAVGQ

SEQ ID NO: 37672 - protein, 9 aa, synthetic construct
  source 1..9: note = Seed: VVGARGVGK (KRAS G12R)
FVGTRAVGR

SEQ ID NO: 37673 - protein, 9 aa, synthetic construct
  source 1..9: note = Seed: VVGARGVGK (KRAS G12R)
FVGTRAVGS

SEQ ID NO: 37674 - protein, 9 aa, synthetic construct
  source 1..9: note = Seed: VVGARGVGK (KRAS G12R)
FVGTRAVGT

SEQ ID NO: 37675 - protein, 9 aa, synthetic construct
  source 1..9: note = Seed: VVGARGVGK (KRAS G12R)
FVGTRAVGV

SEQ ID NO: 37676 - protein, 9 aa, synthetic construct
  source 1..9: note = Seed: VVGARGVGK (KRAS G12R)
FVGTRAVGW

SEQ ID NO: 37677 - protein, 9 aa, synthetic construct
  source 1..9: note = Seed: VVGARGVGK (KRAS G12R)
FVGTRAVGY

SEQ ID NO: 37678 - protein, 9 aa, synthetic construct
  source 1..9: note = Seed: VVGARGVGK (KRAS G12R)
FVGTRCVGI

SEQ ID NO: 37679 - protein, 9 aa, synthetic construct
  source 1..9: note = Seed: VVGARGVGK (KRAS G12R)
FVGTRCVGV

SEQ ID NO: 37680 - protein, 9 aa, synthetic construct
  source 1..9: note = Seed: VVGARGVGK (KRAS G12R)
FVGTRDVGI

SEQ ID NO: 37681 - protein, 9 aa, synthetic construct
  source 1..9: note = Seed: VVGARGVGK (KRAS G12R)
FVGTRDVGL

SEQ ID NO: 37682 - protein, 9 aa, synthetic construct
  source 1..9: note = Seed: VVGARGVGK (KRAS G12R)
FVGTRDVGV

SEQ ID NO: 37683 - protein, 9 aa, synthetic construct
  source 1..9: note = Seed: VVGARGVGK (KRAS G12R)
FVGTREVGI

SEQ ID NO: 37684 - protein, 9 aa, synthetic construct
  source 1..9: note = Seed: VVGARGVGK (KRAS G12R)
FVGTREVGL

SEQ ID NO: 37685 - protein, 9 aa, synthetic construct
  source 1..9: note = Seed: VVGARGVGK (KRAS G12R)
FVGTREVGV

SEQ ID NO: 37686 - protein, 9 aa, synthetic construct
  source 1..9: note = Seed: VVGARGVGK (KRAS G12R)
FVGTRFVGI

SEQ ID NO: 37687 - protein, 9 aa, synthetic construct
  source 1..9: note = Seed: VVGARGVGK (KRAS G12R)
FVGTRFVGV

SEQ ID NO: 37688 - protein, 9 aa, synthetic construct
  source 1..9: note = Seed: VVGARGVGK (KRAS G12R)
FVGTRGVGA

SEQ ID NO: 37689 - protein, 9 aa, synthetic construct
  source 1..9: note = Seed: VVGARGVGK (KRAS G12R)
FVGTRGVGC

SEQ ID NO: 37690 - protein, 9 aa, synthetic construct
  source 1..9: note = Seed: VVGARGVGK (KRAS G12R)
FVGTRGVGD

SEQ ID NO: 37691 - protein, 9 aa, synthetic construct
  source 1..9: note = Seed: VVGARGVGK (KRAS G12R)
FVGTRGVGF

SEQ ID NO: 37692 - protein, 9 aa, synthetic construct
  source 1..9: note = Seed: VVGARGVGK (KRAS G12R)
FVGTRGVGG

SEQ ID NO: 37693 - protein, 9 aa, synthetic construct
  source 1..9: note = Seed: VVGARGVGK (KRAS G12R)
FVGTRGVGH

SEQ ID NO: 37694 - protein, 9 aa, synthetic construct
  source 1..9: note = Seed: VVGARGVGK (KRAS G12R)
FVGTRGVGI

SEQ ID NO: 37695 - protein, 9 aa, synthetic construct
  source 1..9: note = Seed: VVGARGVGK (KRAS G12R)
FVGTRGVGK

SEQ ID NO: 37696 - protein, 9 aa, synthetic construct
  source 1..9: note = Seed: VVGARGVGK (KRAS G12R)
FVGTRGVGL

SEQ ID NO: 37697 - protein, 9 aa, synthetic construct
  source 1..9: note = Seed: VVGARGVGK (KRAS G12R)
FVGTRGVGM

SEQ ID NO: 37698 - protein, 9 aa, synthetic construct
  source 1..9: note = Seed: VVGARGVGK (KRAS G12R)
FVGTRGVGN

SEQ ID NO: 37699 - protein, 9 aa, synthetic construct
  source 1..9: note = Seed: VVGARGVGK (KRAS G12R)
FVGTRGVGQ

SEQ ID NO: 37700 - protein, 9 aa, synthetic construct
  source 1..9: note = Seed: VVGARGVGK (KRAS G12R)
FVGTRGVGR

SEQ ID NO: 37701 - protein, 9 aa, synthetic construct
  source 1..9: note = Seed: VVGARGVGK (KRAS G12R)
FVGTRGVGS

SEQ ID NO: 37702 - protein, 9 aa, synthetic construct
  source 1..9: note = Seed: VVGARGVGK (KRAS G12R)
FVGTRGVGT

SEQ ID NO: 37703 - protein, 9 aa, synthetic construct
  source 1..9: note = Seed: VVGARGVGK (KRAS G12R)
FVGTRGVGV

SEQ ID NO: 37704 - protein, 9 aa, synthetic construct
  source 1..9: note = Seed: VVGARGVGK (KRAS G12R)
FVGTRGVGW

SEQ ID NO: 37705 - protein, 9 aa, synthetic construct
  source 1..9: note = Seed: VVGARGVGK (KRAS G12R)
FVGTRGVGY

SEQ ID NO: 37706 - protein, 9 aa, synthetic construct
  source 1..9: note = Seed: VVGARGVGK (KRAS G12R)
FVGTRHVGA

SEQ ID NO: 37707 - protein, 9 aa, synthetic construct
  source 1..9: note = Seed: VVGARGVGK (KRAS G12R)
FVGTRHVGF

SEQ ID NO: 37708 - protein, 9 aa, synthetic construct
  source 1..9: note = Seed: VVGARGVGK (KRAS G12R)
FVGTRHVGI

SEQ ID NO: 37709 - protein, 9 aa, synthetic construct
  source 1..9: note = Seed: VVGARGVGK (KRAS G12R)
FVGTRHVGL

SEQ ID NO: 37710 - protein, 9 aa, synthetic construct
  source 1..9: note = Seed: VVGARGVGK (KRAS G12R)
FVGTRHVGM

SEQ ID NO: 37711 - protein, 9 aa, synthetic construct
  source 1..9: note = Seed: VVGARGVGK (KRAS G12R)
FVGTRHVGV

SEQ ID NO: 37712 - protein, 9 aa, synthetic construct
  source 1..9: note = Seed: VVGARGVGK (KRAS G12R)
FVGTRIVGA

SEQ ID NO: 37713 - protein, 9 aa, synthetic construct
  source 1..9: note = Seed: VVGARGVGK (KRAS G12R)
FVGTRIVGF

SEQ ID NO: 37714 - protein, 9 aa, synthetic construct
  source 1..9: note = Seed: VVGARGVGK (KRAS G12R)
FVGTRIVGI

SEQ ID NO: 37715 - protein, 9 aa, synthetic construct
  source 1..9: note = Seed: VVGARGVGK (KRAS G12R)
FVGTRIVGL

SEQ ID NO: 37716 - protein, 9 aa, synthetic construct
  source 1..9: note = Seed: VVGARGVGK (KRAS G12R)
FVGTRIVGM

SEQ ID NO: 37717 - protein, 9 aa, synthetic construct
  source 1..9: note = Seed: VVGARGVGK (KRAS G12R)
FVGTRIVGN

SEQ ID NO: 37718 - protein, 9 aa, synthetic construct
  source 1..9: note = Seed: VVGARGVGK (KRAS G12R)
FVGTRIVGR

SEQ ID NO: 37719 - protein, 9 aa, synthetic construct
  source 1..9: note = Seed: VVGARGVGK (KRAS G12R)
FVGTRIVGS

SEQ ID NO: 37720 - protein, 9 aa, synthetic construct
  source 1..9: note = Seed: VVGARGVGK (KRAS G12R)
FVGTRIVGT

SEQ ID NO: 37721 - protein, 9 aa, synthetic construct
  source 1..9: note = Seed: VVGARGVGK (KRAS G12R)
FVGTRIVGV

SEQ ID NO: 37722 - protein, 9 aa, synthetic construct
  source 1..9: note = Seed: VVGARGVGK (KRAS G12R)
FVGTRIVGY

SEQ ID NO: 37723 - protein, 9 aa, synthetic construct
  source 1..9: note = Seed: VVGARGVGK (KRAS G12R)
FVGTRKVGA

SEQ ID NO: 37724 - protein, 9 aa, synthetic construct
  source 1..9: note = Seed: VVGARGVGK (KRAS G12R)
FVGTRKVGI

SEQ ID NO: 37725 - protein, 9 aa, synthetic construct
  source 1..9: note = Seed: VVGARGVGK (KRAS G12R)
FVGTRKVGL

SEQ ID NO: 37726 - protein, 9 aa, synthetic construct
  source 1..9: note = Seed: VVGARGVGK (KRAS G12R)
FVGTRKVGM

SEQ ID NO: 37727 - protein, 9 aa, synthetic construct
  source 1..9: note = Seed: VVGARGVGK (KRAS G12R)
FVGTRKVGR

SEQ ID NO: 37728 - protein, 9 aa, synthetic construct
  source 1..9: note = Seed: VVGARGVGK (KRAS G12R)
FVGTRKVGV

SEQ ID NO: 37729 - protein, 9 aa, synthetic construct
  source 1..9: note = Seed: VVGARGVGK (KRAS G12R)
FVGTRKVGY

SEQ ID NO: 37730 - protein, 9 aa, synthetic construct
  source 1..9: note = Seed: VVGARGVGK (KRAS G12R)
FVGTRLVGI

SEQ ID NO: 37731 - protein, 9 aa, synthetic construct
  source 1..9: note = Seed: VVGARGVGK (KRAS G12R)
FVGTRLVGL

SEQ ID NO: 37732 - protein, 9 aa, synthetic construct
  source 1..9: note = Seed: VVGARGVGK (KRAS G12R)
FVGTRLVGM

SEQ ID NO: 37733 - protein, 9 aa, synthetic construct
  source 1..9: note = Seed: VVGARGVGK (KRAS G12R)
FVGTRLVGN

SEQ ID NO: 37734 - protein, 9 aa, synthetic construct
  source 1..9: note = Seed: VVGARGVGK (KRAS G12R)
FVGTRLVGV

SEQ ID NO: 37735 - protein, 9 aa, synthetic construct
  source 1..9: note = Seed: VVGARGVGK (KRAS G12R)
FVGTRMVGA

SEQ ID NO: 37736 - protein, 9 aa, synthetic construct
  source 1..9: note = Seed: VVGARGVGK (KRAS G12R)
FVGTRMVGF

SEQ ID NO: 37737 - protein, 9 aa, synthetic construct
  source 1..9: note = Seed: VVGARGVGK (KRAS G12R)
FVGTRMVGI

SEQ ID NO: 37738 - protein, 9 aa, synthetic construct
  source 1..9: note = Seed: VVGARGVGK (KRAS G12R)
FVGTRMVGL

SEQ ID NO: 37739 - protein, 9 aa, synthetic construct
  source 1..9: note = Seed: VVGARGVGK (KRAS G12R)
FVGTRMVGM

SEQ ID NO: 37740 - protein, 9 aa, synthetic construct
  source 1..9: note = Seed: VVGARGVGK (KRAS G12R)
FVGTRMVGN

SEQ ID NO: 37741 - protein, 9 aa, synthetic construct
  source 1..9: note = Seed: VVGARGVGK (KRAS G12R)
FVGTRMVGS

SEQ ID NO: 37742 - protein, 9 aa, synthetic construct
  source 1..9: note = Seed: VVGARGVGK (KRAS G12R)
FVGTRMVGT

SEQ ID NO: 37743 - protein, 9 aa, synthetic construct
  source 1..9: note = Seed: VVGARGVGK (KRAS G12R)
FVGTRMVGV

SEQ ID NO: 37744 - protein, 9 aa, synthetic construct
  source 1..9: note = Seed: VVGARGVGK (KRAS G12R)
FVGTRMVGY

SEQ ID NO: 37745 - protein, 9 aa, synthetic construct
  source 1..9: note = Seed: VVGARGVGK (KRAS G12R)
FVGTRNVGA

SEQ ID NO: 37746 - protein, 9 aa, synthetic construct
  source 1..9: note = Seed: VVGARGVGK (KRAS G12R)
FVGTRNVGF

SEQ ID NO: 37747 - protein, 9 aa, synthetic construct
  source 1..9: note = Seed: VVGARGVGK (KRAS G12R)
FVGTRNVGG

SEQ ID NO: 37748 - protein, 9 aa, synthetic construct
  source 1..9: note = Seed: VVGARGVGK (KRAS G12R)
FVGTRNVGI

SEQ ID NO: 37749 - protein, 9 aa, synthetic construct
  source 1..9: note = Seed: VVGARGVGK (KRAS G12R)
FVGTRNVGL

SEQ ID NO: 37750 - protein, 9 aa, synthetic construct
  source 1..9: note = Seed: VVGARGVGK (KRAS G12R)
FVGTRNVGM

SEQ ID NO: 37751 - protein, 9 aa, synthetic construct
  source 1..9: note = Seed: VVGARGVGK (KRAS G12R)
FVGTRNVGN

SEQ ID NO: 37752 - protein, 9 aa, synthetic construct
  source 1..9: note = Seed: VVGARGVGK (KRAS G12R)
FVGTRNVGS

SEQ ID NO: 37753 - protein, 9 aa, synthetic construct
  source 1..9: note = Seed: VVGARGVGK (KRAS G12R)
FVGTRNVGT

SEQ ID NO: 37754 - protein, 9 aa, synthetic construct
  source 1..9: note = Seed: VVGARGVGK (KRAS G12R)
FVGTRNVGV

SEQ ID NO: 37755 - protein, 9 aa, synthetic construct
  source 1..9: note = Seed: VVGARGVGK (KRAS G12R)
FVGTRNVGY

SEQ ID NO: 37756 - protein, 9 aa, synthetic construct
  source 1..9: note = Seed: VVGARGVGK (KRAS G12R)
FVGTRPVGA

SEQ ID NO: 37757 - protein, 9 aa, synthetic construct
  source 1..9: note = Seed: VVGARGVGK (KRAS G12R)
FVGTRPVGC

SEQ ID NO: 37758 - protein, 9 aa, synthetic construct
  source 1..9: note = Seed: VVGARGVGK (KRAS G12R)
FVGTRPVGF

SEQ ID NO: 37759 - protein, 9 aa, synthetic construct
  source 1..9: note = Seed: VVGARGVGK (KRAS G12R)
FVGTRPVGG

SEQ ID NO: 37760 - protein, 9 aa, synthetic construct
  source 1..9: note = Seed: VVGARGVGK (KRAS G12R)
FVGTRPVGH

SEQ ID NO: 37761 - protein, 9 aa, synthetic construct
  source 1..9: note = Seed: VVGARGVGK (KRAS G12R)
FVGTRPVGI

SEQ ID NO: 37762 - protein, 9 aa, synthetic construct
  source 1..9: note = Seed: VVGARGVGK (KRAS G12R)
FVGTRPVGK

SEQ ID NO: 37763 - protein, 9 aa, synthetic construct
  source 1..9: note = Seed: VVGARGVGK (KRAS G12R)
FVGTRPVGL

SEQ ID NO: 37764 - protein, 9 aa, synthetic construct
  source 1..9: note = Seed: VVGARGVGK (KRAS G12R)
FVGTRPVGM

SEQ ID NO: 37765 - protein, 9 aa, synthetic construct
  source 1..9: note = Seed: VVGARGVGK (KRAS G12R)
FVGTRPVGN

SEQ ID NO: 37766 - protein, 9 aa, synthetic construct
  source 1..9: note = Seed: VVGARGVGK (KRAS G12R)
FVGTRPVGP

SEQ ID NO: 37767 - protein, 9 aa, synthetic construct
  source 1..9: note = Seed: VVGARGVGK (KRAS G12R)
FVGTRPVGQ

SEQ ID NO: 37768 - protein, 9 aa, synthetic construct
  source 1..9: note = Seed: VVGARGVGK (KRAS G12R)
FVGTRPVGR

SEQ ID NO: 37769 - protein, 9 aa, synthetic construct
  source 1..9: note = Seed: VVGARGVGK (KRAS G12R)
FVGTRPVGS

SEQ ID NO: 37770 - protein, 9 aa, synthetic construct
  source 1..9: note = Seed: VVGARGVGK (KRAS G12R)
FVGTRPVGT

SEQ ID NO: 37771 - protein, 9 aa, synthetic construct
  source 1..9: note = Seed: VVGARGVGK (KRAS G12R)
FVGTRPVGV

SEQ ID NO: 37772 - protein, 9 aa, synthetic construct
  source 1..9: note = Seed: VVGARGVGK (KRAS G12R)
FVGTRPVGW

SEQ ID NO: 37773 - protein, 9 aa, synthetic construct
  source 1..9: note = Seed: VVGARGVGK (KRAS G12R)
FVGTRPVGY

SEQ ID NO: 37774 - protein, 9 aa, synthetic construct
  source 1..9: note = Seed: VVGARGVGK (KRAS G12R)
FVGTRQVGA

SEQ ID NO: 37775 - protein, 9 aa, synthetic construct
  source 1..9: note = Seed: VVGARGVGK (KRAS G12R)
FVGTRQVGF

SEQ ID NO: 37776 - protein, 9 aa, synthetic construct
  source 1..9: note = Seed: VVGARGVGK (KRAS G12R)
FVGTRQVGI

SEQ ID NO: 37777 - protein, 9 aa, synthetic construct
  source 1..9: note = Seed: VVGARGVGK (KRAS G12R)
FVGTRQVGL

SEQ ID NO: 37778 - protein, 9 aa, synthetic construct
  source 1..9: note = Seed: VVGARGVGK (KRAS G12R)
FVGTRQVGM

SEQ ID NO: 37779 - protein, 9 aa, synthetic construct
  source 1..9: note = Seed: VVGARGVGK (KRAS G12R)
FVGTRQVGV

SEQ ID NO: 37780 - protein, 9 aa, synthetic construct
  source 1..9: note = Seed: VVGARGVGK (KRAS G12R)
FVGTRRVGA

SEQ ID NO: 37781 - protein, 9 aa, synthetic construct
  source 1..9: note = Seed: VVGARGVGK (KRAS G12R)
FVGTRRVGF

SEQ ID NO: 37782 - protein, 9 aa, synthetic construct
  source 1..9: note = Seed: VVGARGVGK (KRAS G12R)
FVGTRRVGH

SEQ ID NO: 37783 - protein, 9 aa, synthetic construct
  source 1..9: note = Seed: VVGARGVGK (KRAS G12R)
FVGTRRVGI

SEQ ID NO: 37784 - protein, 9 aa, synthetic construct
  source 1..9: note = Seed: VVGARGVGK (KRAS G12R)
FVGTRRVGK

SEQ ID NO: 37785 - protein, 9 aa, synthetic construct
  source 1..9: note = Seed: VVGARGVGK (KRAS G12R)
FVGTRRVGL

SEQ ID NO: 37786 - protein, 9 aa, synthetic construct
  source 1..9: note = Seed: VVGARGVGK (KRAS G12R)
FVGTRRVGM

SEQ ID NO: 37787 - protein, 9 aa, synthetic construct
  source 1..9: note = Seed: VVGARGVGK (KRAS G12R)
FVGTRRVGR

SEQ ID NO: 37788 - protein, 9 aa, synthetic construct
  source 1..9: note = Seed: VVGARGVGK (KRAS G12R)
FVGTRRVGS

SEQ ID NO: 37789 - protein, 9 aa, synthetic construct
  source 1..9: note = Seed: VVGARGVGK (KRAS G12R)
FVGTRRVGV

SEQ ID NO: 37790 - protein, 9 aa, synthetic construct
  source 1..9: note = Seed: VVGARGVGK (KRAS G12R)
FVGTRRVGY

SEQ ID NO: 37791 - protein, 9 aa, synthetic construct
  source 1..9: note = Seed: VVGARGVGK (KRAS G12R)
FVGTRSVGA

SEQ ID NO: 37792 - protein, 9 aa, synthetic construct
  source 1..9: note = Seed: VVGARGVGK (KRAS G12R)
FVGTRSVGC

SEQ ID NO: 37793 - protein, 9 aa, synthetic construct
  source 1..9: note = Seed: VVGARGVGK (KRAS G12R)
FVGTRSVGD

SEQ ID NO: 37794 - protein, 9 aa, synthetic construct
  source 1..9: note = Seed: VVGARGVGK (KRAS G12R)
FVGTRSVGE

SEQ ID NO: 37795 - protein, 9 aa, synthetic construct
  source 1..9: note = Seed: VVGARGVGK (KRAS G12R)
FVGTRSVGF

SEQ ID NO: 37796 - protein, 9 aa, synthetic construct
  source 1..9: note = Seed: VVGARGVGK (KRAS G12R)
FVGTRSVGG

SEQ ID NO: 37797 - protein, 9 aa, synthetic construct
  source 1..9: note = Seed: VVGARGVGK (KRAS G12R)
FVGTRSVGH

SEQ ID NO: 37798 - protein, 9 aa, synthetic construct
  source 1..9: note = Seed: VVGARGVGK (KRAS G12R)
FVGTRSVGI

SEQ ID NO: 37799 - protein, 9 aa, synthetic construct
  source 1..9: note = Seed: VVGARGVGK (KRAS G12R)
FVGTRSVGK

SEQ ID NO: 37800 - protein, 9 aa, synthetic construct
  source 1..9: note = Seed: VVGARGVGK (KRAS G12R)
FVGTRSVGL

SEQ ID NO: 37801 - protein, 9 aa, synthetic construct
  source 1..9: note = Seed: VVGARGVGK (KRAS G12R)
FVGTRSVGM

SEQ ID NO: 37802 - protein, 9 aa, synthetic construct
  source 1..9: note = Seed: VVGARGVGK (KRAS G12R)
FVGTRSVGN

SEQ ID NO: 37803 - protein, 9 aa, synthetic construct
  source 1..9: note = Seed: VVGARGVGK (KRAS G12R)
FVGTRSVGP

SEQ ID NO: 37804 - protein, 9 aa, synthetic construct
  source 1..9: note = Seed: VVGARGVGK (KRAS G12R)
FVGTRSVGQ

SEQ ID NO: 37805 - protein, 9 aa, synthetic construct
  source 1..9: note = Seed: VVGARGVGK (KRAS G12R)
FVGTRSVGR

SEQ ID NO: 37806 - protein, 9 aa, synthetic construct
  source 1..9: note = Seed: VVGARGVGK (KRAS G12R)
FVGTRSVGS

SEQ ID NO: 37807 - protein, 9 aa, synthetic construct
  source 1..9: note = Seed: VVGARGVGK (KRAS G12R)
FVGTRSVGT

SEQ ID NO: 37808 - protein, 9 aa, synthetic construct
  source 1..9: note = Seed: VVGARGVGK (KRAS G12R)
FVGTRSVGV

SEQ ID NO: 37809 - protein, 9 aa, synthetic construct
  source 1..9: note = Seed: VVGARGVGK (KRAS G12R)
FVGTRSVGW

SEQ ID NO: 37810 - protein, 9 aa, synthetic construct
  source 1..9: note = Seed: VVGARGVGK (KRAS G12R)
FVGTRSVGY

SEQ ID NO: 37811 - protein, 9 aa, synthetic construct
  source 1..9: note = Seed: VVGARGVGK (KRAS G12R)
FVGTRTVGA

SEQ ID NO: 37812 - protein, 9 aa, synthetic construct
  source 1..9: note = Seed: VVGARGVGK (KRAS G12R)
FVGTRTVGF

SEQ ID NO: 37813 - protein, 9 aa, synthetic construct
  source 1..9: note = Seed: VVGARGVGK (KRAS G12R)
FVGTRTVGG

SEQ ID NO: 37814 - protein, 9 aa, synthetic construct
  source 1..9: note = Seed: VVGARGVGK (KRAS G12R)
FVGTRTVGH

SEQ ID NO: 37815 - protein, 9 aa, synthetic construct
  source 1..9: note = Seed: VVGARGVGK (KRAS G12R)
FVGTRTVGI

SEQ ID NO: 37816 - protein, 9 aa, synthetic construct
  source 1..9: note = Seed: VVGARGVGK (KRAS G12R)
FVGTRTVGL

SEQ ID NO: 37817 - protein, 9 aa, synthetic construct
  source 1..9: note = Seed: VVGARGVGK (KRAS G12R)
FVGTRTVGM

SEQ ID NO: 37818 - protein, 9 aa, synthetic construct
  source 1..9: note = Seed: VVGARGVGK (KRAS G12R)
FVGTRTVGN

SEQ ID NO: 37819 - protein, 9 aa, synthetic construct
  source 1..9: note = Seed: VVGARGVGK (KRAS G12R)
FVGTRTVGQ

SEQ ID NO: 37820 - protein, 9 aa, synthetic construct
  source 1..9: note = Seed: VVGARGVGK (KRAS G12R)
FVGTRTVGR

SEQ ID NO: 37821 - protein, 9 aa, synthetic construct
  source 1..9: note = Seed: VVGARGVGK (KRAS G12R)
FVGTRTVGS

SEQ ID NO: 37822 - protein, 9 aa, synthetic construct
  source 1..9: note = Seed: VVGARGVGK (KRAS G12R)
FVGTRTVGT

SEQ ID NO: 37823 - protein, 9 aa, synthetic construct
  source 1..9: note = Seed: VVGARGVGK (KRAS G12R)
FVGTRTVGV

SEQ ID NO: 37824 - protein, 9 aa, synthetic construct
  source 1..9: note = Seed: VVGARGVGK (KRAS G12R)
FVGTRTVGW

SEQ ID NO: 37825 - protein, 9 aa, synthetic construct
  source 1..9: note = Seed: VVGARGVGK (KRAS G12R)
FVGTRTVGY

SEQ ID NO: 37826 - protein, 9 aa, synthetic construct
  source 1..9: note = Seed: VVGARGVGK (KRAS G12R)
FVGTRVVGA

SEQ ID NO: 37827 - protein, 9 aa, synthetic construct
  source 1..9: note = Seed: VVGARGVGK (KRAS G12R)
FVGTRVVGF

SEQ ID NO: 37828 - protein, 9 aa, synthetic construct
  source 1..9: note = Seed: VVGARGVGK (KRAS G12R)
FVGTRVVGG

SEQ ID NO: 37829 - protein, 9 aa, synthetic construct
  source 1..9: note = Seed: VVGARGVGK (KRAS G12R)
FVGTRVVGH

SEQ ID NO: 37830 - protein, 9 aa, synthetic construct
  source 1..9: note = Seed: VVGARGVGK (KRAS G12R)
FVGTRVVGI

SEQ ID NO: 37831 - protein, 9 aa, synthetic construct
  source 1..9: note = Seed: VVGARGVGK (KRAS G12R)
FVGTRVVGL

SEQ ID NO: 37832 - protein, 9 aa, synthetic construct
  source 1..9: note = Seed: VVGARGVGK (KRAS G12R)
FVGTRVVGM

SEQ ID NO: 37833 - protein, 9 aa, synthetic construct
  source 1..9: note = Seed: VVGARGVGK (KRAS G12R)
FVGTRVVGN

SEQ ID NO: 37834 - protein, 9 aa, synthetic construct
  source 1..9: note = Seed: VVGARGVGK (KRAS G12R)
FVGTRVVGQ

SEQ ID NO: 37835 - protein, 9 aa, synthetic construct
  source 1..9: note = Seed: VVGARGVGK (KRAS G12R)
FVGTRVVGR

SEQ ID NO: 37836 - protein, 9 aa, synthetic construct
  source 1..9: note = Seed: VVGARGVGK (KRAS G12R)
FVGTRVVGS

SEQ ID NO: 37837 - protein, 9 aa, synthetic construct
  source 1..9: note = Seed: VVGARGVGK (KRAS G12R)
FVGTRVVGT

SEQ ID NO: 37838 - protein, 9 aa, synthetic construct
  source 1..9: note = Seed: VVGARGVGK (KRAS G12R)
FVGTRVVGV

SEQ ID NO: 37839 - protein, 9 aa, synthetic construct
  source 1..9: note = Seed: VVGARGVGK (KRAS G12R)
FVGTRVVGY

SEQ ID NO: 37840 - protein, 9 aa, synthetic construct
  source 1..9: note = Seed: VVGARGVGK (KRAS G12R)
FVGTRWVGI

SEQ ID NO: 37841 - protein, 9 aa, synthetic construct
  source 1..9: note = Seed: VVGARGVGK (KRAS G12R)
FVGTRWVGL

SEQ ID NO: 37842 - protein, 9 aa, synthetic construct
  source 1..9: note = Seed: VVGARGVGK (KRAS G12R)
FVGTRWVGV

SEQ ID NO: 37843 - protein, 9 aa, synthetic construct
  source 1..9: note = Seed: VVGARGVGK (KRAS G12R)
FVGTRYVGI

SEQ ID NO: 37844 - protein, 9 aa, synthetic construct
  source 1..9: note = Seed: VVGARGVGK (KRAS G12R)
FVGTRYVGL

SEQ ID NO: 37845 - protein, 9 aa, synthetic construct
  source 1..9: note = Seed: VVGARGVGK (KRAS G12R)
FVGTRYVGM

SEQ ID NO: 37846 - protein, 9 aa, synthetic construct
  source 1..9: note = Seed: VVGARGVGK (KRAS G12R)
FVGTRYVGV

SEQ ID NO: 37847 - protein, 9 aa, synthetic construct
  source 1..9: note = Seed: VVGARGVGK (KRAS G12R)
FVGVRAVGA

SEQ ID NO: 37848 - protein, 9 aa, synthetic construct
  source 1..9: note = Seed: VVGARGVGK (KRAS G12R)
FVGVRAVGC

SEQ ID NO: 37849 - protein, 9 aa, synthetic construct
  source 1..9: note = Seed: VVGARGVGK (KRAS G12R)
FVGVRAVGD

SEQ ID NO: 37850 - protein, 9 aa, synthetic construct
  source 1..9: note = Seed: VVGARGVGK (KRAS G12R)
FVGVRAVGE

SEQ ID NO: 37851 - protein, 9 aa, synthetic construct
  source 1..9: note = Seed: VVGARGVGK (KRAS G12R)
FVGVRAVGF

SEQ ID NO: 37852 - protein, 9 aa, synthetic construct
  source 1..9: note = Seed: VVGARGVGK (KRAS G12R)
FVGVRAVGG

SEQ ID NO: 37853 - protein, 9 aa, synthetic construct
  source 1..9: note = Seed: VVGARGVGK (KRAS G12R)
FVGVRAVGH

SEQ ID NO: 37854 - protein, 9 aa, synthetic construct
  source 1..9: note = Seed: VVGARGVGK (KRAS G12R)
FVGVRAVGI

SEQ ID NO: 37855 - protein, 9 aa, synthetic construct
  source 1..9: note = Seed: VVGARGVGK (KRAS G12R)
FVGVRAVGK

SEQ ID NO: 37856 - protein, 9 aa, synthetic construct
  source 1..9: note = Seed: VVGARGVGK (KRAS G12R)
FVGVRAVGL

SEQ ID NO: 37857 - protein, 9 aa, synthetic construct
  source 1..9: note = Seed: VVGARGVGK (KRAS G12R)
FVGVRAVGM

SEQ ID NO: 37858 - protein, 9 aa, synthetic construct
  source 1..9: note = Seed: VVGARGVGK (KRAS G12R)
FVGVRAVGN

SEQ ID NO: 37859 - protein, 9 aa, synthetic construct
  source 1..9: note = Seed: VVGARGVGK (KRAS G12R)
FVGVRAVGP

SEQ ID NO: 37860 - protein, 9 aa, synthetic construct
  source 1..9: note = Seed: VVGARGVGK (KRAS G12R)
FVGVRAVGQ

SEQ ID NO: 37861 - protein, 9 aa, synthetic construct
  source 1..9: note = Seed: VVGARGVGK (KRAS G12R)
FVGVRAVGR

SEQ ID NO: 37862 - protein, 9 aa, synthetic construct
  source 1..9: note = Seed: VVGARGVGK (KRAS G12R)
FVGVRAVGS

SEQ ID NO: 37863 - protein, 9 aa, synthetic construct
  source 1..9: note = Seed: VVGARGVGK (KRAS G12R)
FVGVRAVGT

SEQ ID NO: 37864 - protein, 9 aa, synthetic construct
  source 1..9: note = Seed: VVGARGVGK (KRAS G12R)
FVGVRAVGV

SEQ ID NO: 37865 - protein, 9 aa, synthetic construct
  source 1..9: note = Seed: VVGARGVGK (KRAS G12R)
FVGVRAVGW

SEQ ID NO: 37866 - protein, 9 aa, synthetic construct
  source 1..9: note = Seed: VVGARGVGK (KRAS G12R)
FVGVRAVGY

SEQ ID NO: 37867 - protein, 9 aa, synthetic construct
  source 1..9: note = Seed: VVGARGVGK (KRAS G12R)
FVGVRCVGV

SEQ ID NO: 37868 - protein, 9 aa, synthetic construct
  source 1..9: note = Seed: VVGARGVGK (KRAS G12R)
FVGVRDVGI

SEQ ID NO: 37869 - protein, 9 aa, synthetic construct
  source 1..9: note = Seed: VVGARGVGK (KRAS G12R)
FVGVRDVGL

SEQ ID NO: 37870 - protein, 9 aa, synthetic construct
  source 1..9: note = Seed: VVGARGVGK (KRAS G12R)
FVGVRDVGV

SEQ ID NO: 37871 - protein, 9 aa, synthetic construct
  source 1..9: note = Seed: VVGARGVGK (KRAS G12R)
FVGVREVGA

SEQ ID NO: 37872 - protein, 9 aa, synthetic construct
  source 1..9: note = Seed: VVGARGVGK (KRAS G12R)
FVGVREVGI

SEQ ID NO: 37873 - protein, 9 aa, synthetic construct
  source 1..9: note = Seed: VVGARGVGK (KRAS G12R)
FVGVREVGL

SEQ ID NO: 37874 - protein, 9 aa, synthetic construct
  source 1..9: note = Seed: VVGARGVGK (KRAS G12R)
FVGVREVGN

SEQ ID NO: 37875 - protein, 9 aa, synthetic construct
  source 1..9: note = Seed: VVGARGVGK (KRAS G12R)
FVGVREVGS

SEQ ID NO: 37876 - protein, 9 aa, synthetic construct
  source 1..9: note = Seed: VVGARGVGK (KRAS G12R)
FVGVREVGV

SEQ ID NO: 37877 - protein, 9 aa, synthetic construct
  source 1..9: note = Seed: VVGARGVGK (KRAS G12R)
FVGVRGVGA

SEQ ID NO: 37878 - protein, 9 aa, synthetic construct
  source 1..9: note = Seed: VVGARGVGK (KRAS G12R)
FVGVRGVGC

SEQ ID NO: 37879 - protein, 9 aa, synthetic construct
  source 1..9: note = Seed: VVGARGVGK (KRAS G12R)
FVGVRGVGD

SEQ ID NO: 37880 - protein, 9 aa, synthetic construct
  source 1..9: note = Seed: VVGARGVGK (KRAS G12R)
FVGVRGVGE

SEQ ID NO: 37881 - protein, 9 aa, synthetic construct
  source 1..9: note = Seed: VVGARGVGK (KRAS G12R)
FVGVRGVGF

SEQ ID NO: 37882 - protein, 9 aa, synthetic construct
  source 1..9: note = Seed: VVGARGVGK (KRAS G12R)
FVGVRGVGG

SEQ ID NO: 37883 - protein, 9 aa, synthetic construct
  source 1..9: note = Seed: VVGARGVGK (KRAS G12R)
FVGVRGVGH

SEQ ID NO: 37884 - protein, 9 aa, synthetic construct
  source 1..9: note = Seed: VVGARGVGK (KRAS G12R)
FVGVRGVGI

SEQ ID NO: 37885 - protein, 9 aa, synthetic construct
  source 1..9: note = Seed: VVGARGVGK (KRAS G12R)
FVGVRGVGK

SEQ ID NO: 37886 - protein, 9 aa, synthetic construct
  source 1..9: note = Seed: VVGARGVGK (KRAS G12R)
FVGVRGVGL

SEQ ID NO: 37887 - protein, 9 aa, synthetic construct
  source 1..9: note = Seed: VVGARGVGK (KRAS G12R)
FVGVRGVGM

SEQ ID NO: 37888 - protein, 9 aa, synthetic construct
  source 1..9: note = Seed: VVGARGVGK (KRAS G12R)
FVGVRGVGN

SEQ ID NO: 37889 - protein, 9 aa, synthetic construct
  source 1..9: note = Seed: VVGARGVGK (KRAS G12R)
FVGVRGVGP

SEQ ID NO: 37890 - protein, 9 aa, synthetic construct
  source 1..9: note = Seed: VVGARGVGK (KRAS G12R)
FVGVRGVGQ

SEQ ID NO: 37891 - protein, 9 aa, synthetic construct
  source 1..9: note = Seed: VVGARGVGK (KRAS G12R)
FVGVRGVGR

SEQ ID NO: 37892 - protein, 9 aa, synthetic construct
  source 1..9: note = Seed: VVGARGVGK (KRAS G12R)
FVGVRGVGS

SEQ ID NO: 37893 - protein, 9 aa, synthetic construct
  source 1..9: note = Seed: VVGARGVGK (KRAS G12R)
FVGVRGVGT

SEQ ID NO: 37894 - protein, 9 aa, synthetic construct
  source 1..9: note = Seed: VVGARGVGK (KRAS G12R)
FVGVRGVGV

SEQ ID NO: 37895 - protein, 9 aa, synthetic construct
  source 1..9: note = Seed: VVGARGVGK (KRAS G12R)
FVGVRGVGY

SEQ ID NO: 37896 - protein, 9 aa, synthetic construct
  source 1..9: note = Seed: VVGARGVGK (KRAS G12R)
FVGVRHVGA

SEQ ID NO: 37897 - protein, 9 aa, synthetic construct
  source 1..9: note = Seed: VVGARGVGK (KRAS G12R)
FVGVRHVGI

SEQ ID NO: 37898 - protein, 9 aa, synthetic construct
  source 1..9: note = Seed: VVGARGVGK (KRAS G12R)
FVGVRHVGL

SEQ ID NO: 37899 - protein, 9 aa, synthetic construct
  source 1..9: note = Seed: VVGARGVGK (KRAS G12R)
FVGVRHVGM

SEQ ID NO: 37900 - protein, 9 aa, synthetic construct
  source 1..9: note = Seed: VVGARGVGK (KRAS G12R)
FVGVRHVGN

SEQ ID NO: 37901 - protein, 9 aa, synthetic construct
  source 1..9: note = Seed: VVGARGVGK (KRAS G12R)
FVGVRHVGS

SEQ ID NO: 37902 - protein, 9 aa, synthetic construct
  source 1..9: note = Seed: VVGARGVGK (KRAS G12R)
FVGVRHVGT

SEQ ID NO: 37903 - protein, 9 aa, synthetic construct
  source 1..9: note = Seed: VVGARGVGK (KRAS G12R)
FVGVRHVGV

SEQ ID NO: 37904 - protein, 9 aa, synthetic construct
  source 1..9: note = Seed: VVGARGVGK (KRAS G12R)
FVGVRIVGA

SEQ ID NO: 37905 - protein, 9 aa, synthetic construct
  source 1..9: note = Seed: VVGARGVGK (KRAS G12R)
FVGVRIVGD

SEQ ID NO: 37906 - protein, 9 aa, synthetic construct
  source 1..9: note = Seed: VVGARGVGK (KRAS G12R)
FVGVRIVGG

SEQ ID NO: 37907 - protein, 9 aa, synthetic construct
  source 1..9: note = Seed: VVGARGVGK (KRAS G12R)
FVGVRIVGH

SEQ ID NO: 37908 - protein, 9 aa, synthetic construct
  source 1..9: note = Seed: VVGARGVGK (KRAS G12R)
FVGVRIVGI

SEQ ID NO: 37909 - protein, 9 aa, synthetic construct
  source 1..9: note = Seed: VVGARGVGK (KRAS G12R)
FVGVRIVGL

SEQ ID NO: 37910 - protein, 9 aa, synthetic construct
  source 1..9: note = Seed: VVGARGVGK (KRAS G12R)
FVGVRIVGM

SEQ ID NO: 37911 - protein, 9 aa, synthetic construct
  source 1..9: note = Seed: VVGARGVGK (KRAS G12R)
FVGVRIVGN

SEQ ID NO: 37912 - protein, 9 aa, synthetic construct
  source 1..9: note = Seed: VVGARGVGK (KRAS G12R)
FVGVRIVGQ

SEQ ID NO: 37913 - protein, 9 aa, synthetic construct
  source 1..9: note = Seed: VVGARGVGK (KRAS G12R)
FVGVRIVGR

SEQ ID NO: 37914 - protein, 9 aa, synthetic construct
  source 1..9: note = Seed: VVGARGVGK (KRAS G12R)
FVGVRIVGS

SEQ ID NO: 37915 - protein, 9 aa, synthetic construct
  source 1..9: note = Seed: VVGARGVGK (KRAS G12R)
FVGVRIVGT

SEQ ID NO: 37916 - protein, 9 aa, synthetic construct
  source 1..9: note = Seed: VVGARGVGK (KRAS G12R)
FVGVRIVGV

SEQ ID NO: 37917 - protein, 9 aa, synthetic construct
  source 1..9: note = Seed: VVGARGVGK (KRAS G12R)
FVGVRKVGA

SEQ ID NO: 37918 - protein, 9 aa, synthetic construct
  source 1..9: note = Seed: VVGARGVGK (KRAS G12R)
FVGVRKVGF

SEQ ID NO: 37919 - protein, 9 aa, synthetic construct
  source 1..9: note = Seed: VVGARGVGK (KRAS G12R)
FVGVRKVGH

SEQ ID NO: 37920 - protein, 9 aa, synthetic construct
  source 1..9: note = Seed: VVGARGVGK (KRAS G12R)
FVGVRKVGI

SEQ ID NO: 37921 - protein, 9 aa, synthetic construct
  source 1..9: note = Seed: VVGARGVGK (KRAS G12R)
FVGVRKVGL

SEQ ID NO: 37922 - protein, 9 aa, synthetic construct
  source 1..9: note = Seed: VVGARGVGK (KRAS G12R)
FVGVRKVGM

SEQ ID NO: 37923 - protein, 9 aa, synthetic construct
  source 1..9: note = Seed: VVGARGVGK (KRAS G12R)
FVGVRKVGR

SEQ ID NO: 37924 - protein, 9 aa, synthetic construct
  source 1..9: note = Seed: VVGARGVGK (KRAS G12R)
FVGVRKVGS

SEQ ID NO: 37925 - protein, 9 aa, synthetic construct
  source 1..9: note = Seed: VVGARGVGK (KRAS G12R)
FVGVRKVGV

SEQ ID NO: 37926 - protein, 9 aa, synthetic construct
  source 1..9: note = Seed: VVGARGVGK (KRAS G12R)
FVGVRKVGY

SEQ ID NO: 37927 - protein, 9 aa, synthetic construct
  source 1..9: note = Seed: VVGARGVGK (KRAS G12R)
FVGVRLVGA

SEQ ID NO: 37928 - protein, 9 aa, synthetic construct
  source 1..9: note = Seed: VVGARGVGK (KRAS G12R)
FVGVRLVGH

SEQ ID NO: 37929 - protein, 9 aa, synthetic construct
  source 1..9: note = Seed: VVGARGVGK (KRAS G12R)
FVGVRLVGN

SEQ ID NO: 37930 - protein, 9 aa, synthetic construct
  source 1..9: note = Seed: VVGARGVGK (KRAS G12R)
FVGVRLVGS

SEQ ID NO: 37931 - protein, 9 aa, synthetic construct
  source 1..9: note = Seed: VVGARGVGK (KRAS G12R)
FVGVRLVGT

SEQ ID NO: 37932 - protein, 9 aa, synthetic construct
  source 1..9: note = Seed: VVGARGVGK (KRAS G12R)
FVGVRMVGA

SEQ ID NO: 37933 - protein, 9 aa, synthetic construct
  source 1..9: note = Seed: VVGARGVGK (KRAS G12R)
FVGVRMVGG

SEQ ID NO: 37934 - protein, 9 aa, synthetic construct
  source 1..9: note = Seed: VVGARGVGK (KRAS G12R)
FVGVRMVGH

SEQ ID NO: 37935 - protein, 9 aa, synthetic construct
  source 1..9: note = Seed: VVGARGVGK (KRAS G12R)
FVGVRMVGI

SEQ ID NO: 37936 - protein, 9 aa, synthetic construct
  source 1..9: note = Seed: VVGARGVGK (KRAS G12R)
FVGVRMVGL

SEQ ID NO: 37937 - protein, 9 aa, synthetic construct
  source 1..9: note = Seed: VVGARGVGK (KRAS G12R)
FVGVRMVGM

SEQ ID NO: 37938 - protein, 9 aa, synthetic construct
  source 1..9: note = Seed: VVGARGVGK (KRAS G12R)
FVGVRMVGN

SEQ ID NO: 37939 - protein, 9 aa, synthetic construct
  source 1..9: note = Seed: VVGARGVGK (KRAS G12R)
FVGVRMVGS

SEQ ID NO: 37940 - protein, 9 aa, synthetic construct
  source 1..9: note = Seed: VVGARGVGK (KRAS G12R)
FVGVRMVGT

SEQ ID NO: 37941 - protein, 9 aa, synthetic construct
  source 1..9: note = Seed: VVGARGVGK (KRAS G12R)
FVGVRMVGV

SEQ ID NO: 37942 - protein, 9 aa, synthetic construct
  source 1..9: note = Seed: VVGARGVGK (KRAS G12R)
FVGVRNVGA

SEQ ID NO: 37943 - protein, 9 aa, synthetic construct
  source 1..9: note = Seed: VVGARGVGK (KRAS G12R)
FVGVRNVGC

SEQ ID NO: 37944 - protein, 9 aa, synthetic construct
  source 1..9: note = Seed: VVGARGVGK (KRAS G12R)
FVGVRNVGD

SEQ ID NO: 37945 - protein, 9 aa, synthetic construct
  source 1..9: note = Seed: VVGARGVGK (KRAS G12R)
FVGVRNVGE

SEQ ID NO: 37946 - protein, 9 aa, synthetic construct
  source 1..9: note = Seed: VVGARGVGK (KRAS G12R)
FVGVRNVGF

SEQ ID NO: 37947 - protein, 9 aa, synthetic construct
  source 1..9: note = Seed: VVGARGVGK (KRAS G12R)
FVGVRNVGG

SEQ ID NO: 37948 - protein, 9 aa, synthetic construct
  source 1..9: note = Seed: VVGARGVGK (KRAS G12R)
FVGVRNVGH

SEQ ID NO: 37949 - protein, 9 aa, synthetic construct
  source 1..9: note = Seed: VVGARGVGK (KRAS G12R)
FVGVRNVGI

SEQ ID NO: 37950 - protein, 9 aa, synthetic construct
  source 1..9: note = Seed: VVGARGVGK (KRAS G12R)
FVGVRNVGK

SEQ ID NO: 37951 - protein, 9 aa, synthetic construct
  source 1..9: note = Seed: VVGARGVGK (KRAS G12R)
FVGVRNVGL

SEQ ID NO: 37952 - protein, 9 aa, synthetic construct
  source 1..9: note = Seed: VVGARGVGK (KRAS G12R)
FVGVRNVGM

SEQ ID NO: 37953 - protein, 9 aa, synthetic construct
  source 1..9: note = Seed: VVGARGVGK (KRAS G12R)
FVGVRNVGN

SEQ ID NO: 37954 - protein, 9 aa, synthetic construct
  source 1..9: note = Seed: VVGARGVGK (KRAS G12R)
FVGVRNVGP

SEQ ID NO: 37955 - protein, 9 aa, synthetic construct
  source 1..9: note = Seed: VVGARGVGK (KRAS G12R)
FVGVRNVGQ

SEQ ID NO: 37956 - protein, 9 aa, synthetic construct
  source 1..9: note = Seed: VVGARGVGK (KRAS G12R)
FVGVRNVGR

SEQ ID NO: 37957 - protein, 9 aa, synthetic construct
  source 1..9: note = Seed: VVGARGVGK (KRAS G12R)
FVGVRNVGS

SEQ ID NO: 37958 - protein, 9 aa, synthetic construct
  source 1..9: note = Seed: VVGARGVGK (KRAS G12R)
FVGVRNVGT

SEQ ID NO: 37959 - protein, 9 aa, synthetic construct
  source 1..9: note = Seed: VVGARGVGK (KRAS G12R)
FVGVRNVGV

SEQ ID NO: 37960 - protein, 9 aa, synthetic construct
  source 1..9: note = Seed: VVGARGVGK (KRAS G12R)
FVGVRNVGY

SEQ ID NO: 37961 - protein, 9 aa, synthetic construct
  source 1..9: note = Seed: VVGARGVGK (KRAS G12R)
FVGVRPVGA

SEQ ID NO: 37962 - protein, 9 aa, synthetic construct
  source 1..9: note = Seed: VVGARGVGK (KRAS G12R)
FVGVRPVGC

SEQ ID NO: 37963 - protein, 9 aa, synthetic construct
  source 1..9: note = Seed: VVGARGVGK (KRAS G12R)
FVGVRPVGD

SEQ ID NO: 37964 - protein, 9 aa, synthetic construct
  source 1..9: note = Seed: VVGARGVGK (KRAS G12R)
FVGVRPVGE

SEQ ID NO: 37965 - protein, 9 aa, synthetic construct
  source 1..9: note = Seed: VVGARGVGK (KRAS G12R)
FVGVRPVGF

SEQ ID NO: 37966 - protein, 9 aa, synthetic construct
  source 1..9: note = Seed: VVGARGVGK (KRAS G12R)
FVGVRPVGG

SEQ ID NO: 37967 - protein, 9 aa, synthetic construct
  source 1..9: note = Seed: VVGARGVGK (KRAS G12R)
FVGVRPVGH

SEQ ID NO: 37968 - protein, 9 aa, synthetic construct
  source 1..9: note = Seed: VVGARGVGK (KRAS G12R)
FVGVRPVGI

SEQ ID NO: 37969 - protein, 9 aa, synthetic construct
  source 1..9: note = Seed: VVGARGVGK (KRAS G12R)
FVGVRPVGK

SEQ ID NO: 37970 - protein, 9 aa, synthetic construct
  source 1..9: note = Seed: VVGARGVGK (KRAS G12R)
FVGVRPVGL

SEQ ID NO: 37971 - protein, 9 aa, synthetic construct
  source 1..9: note = Seed: VVGARGVGK (KRAS G12R)
FVGVRPVGM

SEQ ID NO: 37972 - protein, 9 aa, synthetic construct
  source 1..9: note = Seed: VVGARGVGK (KRAS G12R)
FVGVRPVGN

SEQ ID NO: 37973 - protein, 9 aa, synthetic construct
  source 1..9: note = Seed: VVGARGVGK (KRAS G12R)
FVGVRPVGP

SEQ ID NO: 37974 - protein, 9 aa, synthetic construct
  source 1..9: note = Seed: VVGARGVGK (KRAS G12R)
FVGVRPVGQ

SEQ ID NO: 37975 - protein, 9 aa, synthetic construct
  source 1..9: note = Seed: VVGARGVGK (KRAS G12R)
FVGVRPVGR

SEQ ID NO: 37976 - protein, 9 aa, synthetic construct
  source 1..9: note = Seed: VVGARGVGK (KRAS G12R)
FVGVRPVGS

SEQ ID NO: 37977 - protein, 9 aa, synthetic construct
  source 1..9: note = Seed: VVGARGVGK (KRAS G12R)
FVGVRPVGT

SEQ ID NO: 37978 - protein, 9 aa, synthetic construct
  source 1..9: note = Seed: VVGARGVGK (KRAS G12R)
FVGVRPVGV

SEQ ID NO: 37979 - protein, 9 aa, synthetic construct
  source 1..9: note = Seed: VVGARGVGK (KRAS G12R)
FVGVRPVGW

SEQ ID NO: 37980 - protein, 9 aa, synthetic construct
  source 1..9: note = Seed: VVGARGVGK (KRAS G12R)
FVGVRPVGY

SEQ ID NO: 37981 - protein, 9 aa, synthetic construct
  source 1..9: note = Seed: VVGARGVGK (KRAS G12R)
FVGVRQVGA

SEQ ID NO: 37982 - protein, 9 aa, synthetic construct
  source 1..9: note = Seed: VVGARGVGK (KRAS G12R)
FVGVRQVGI

SEQ ID NO: 37983 - protein, 9 aa, synthetic construct
  source 1..9: note = Seed: VVGARGVGK (KRAS G12R)
FVGVRQVGL

SEQ ID NO: 37984 - protein, 9 aa, synthetic construct
  source 1..9: note = Seed: VVGARGVGK (KRAS G12R)
FVGVRQVGM

SEQ ID NO: 37985 - protein, 9 aa, synthetic construct
  source 1..9: note = Seed: VVGARGVGK (KRAS G12R)
FVGVRQVGN

SEQ ID NO: 37986 - protein, 9 aa, synthetic construct
  source 1..9: note = Seed: VVGARGVGK (KRAS G12R)
FVGVRQVGS

SEQ ID NO: 37987 - protein, 9 aa, synthetic construct
  source 1..9: note = Seed: VVGARGVGK (KRAS G12R)
FVGVRQVGV

SEQ ID NO: 37988 - protein, 9 aa, synthetic construct
  source 1..9: note = Seed: VVGARGVGK (KRAS G12R)
FVGVRRVGA

SEQ ID NO: 37989 - protein, 9 aa, synthetic construct
  source 1..9: note = Seed: VVGARGVGK (KRAS G12R)
FVGVRRVGF

SEQ ID NO: 37990 - protein, 9 aa, synthetic construct
  source 1..9: note = Seed: VVGARGVGK (KRAS G12R)
FVGVRRVGI

SEQ ID NO: 37991 - protein, 9 aa, synthetic construct
  source 1..9: note = Seed: VVGARGVGK (KRAS G12R)
FVGVRRVGL

SEQ ID NO: 37992 - protein, 9 aa, synthetic construct
  source 1..9: note = Seed: VVGARGVGK (KRAS G12R)
FVGVRRVGM

SEQ ID NO: 37993 - protein, 9 aa, synthetic construct
  source 1..9: note = Seed: VVGARGVGK (KRAS G12R)
FVGVRRVGR

SEQ ID NO: 37994 - protein, 9 aa, synthetic construct
  source 1..9: note = Seed: VVGARGVGK (KRAS G12R)
FVGVRRVGS

SEQ ID NO: 37995 - protein, 9 aa, synthetic construct
  source 1..9: note = Seed: VVGARGVGK (KRAS G12R)
FVGVRRVGT

SEQ ID NO: 37996 - protein, 9 aa, synthetic construct
  source 1..9: note = Seed: VVGARGVGK (KRAS G12R)
FVGVRRVGV

SEQ ID NO: 37997 - protein, 9 aa, synthetic construct
  source 1..9: note = Seed: VVGARGVGK (KRAS G12R)
FVGVRRVGY

SEQ ID NO: 37998 - protein, 9 aa, synthetic construct
  source 1..9: note = Seed: VVGARGVGK (KRAS G12R)
FVGVRSVGA

SEQ ID NO: 37999 - protein, 9 aa, synthetic construct
  source 1..9: note = Seed: VVGARGVGK (KRAS G12R)
FVGVRSVGC

SEQ ID NO: 38000 - protein, 9 aa, synthetic construct
  source 1..9: note = Seed: VVGARGVGK (KRAS G12R)
FVGVRSVGD

SEQ ID NO: 38001 - protein, 9 aa, synthetic construct
  source 1..9: note = Seed: VVGARGVGK (KRAS G12R)
FVGVRSVGE

SEQ ID NO: 38002 - protein, 9 aa, synthetic construct
  source 1..9: note = Seed: VVGARGVGK (KRAS G12R)
FVGVRSVGF

SEQ ID NO: 38003 - protein, 9 aa, synthetic construct
  source 1..9: note = Seed: VVGARGVGK (KRAS G12R)
FVGVRSVGG

SEQ ID NO: 38004 - protein, 9 aa, synthetic construct
  source 1..9: note = Seed: VVGARGVGK (KRAS G12R)
FVGVRSVGH

SEQ ID NO: 38005 - protein, 9 aa, synthetic construct
  source 1..9: note = Seed: VVGARGVGK (KRAS G12R)
FVGVRSVGI

SEQ ID NO: 38006 - protein, 9 aa, synthetic construct
  source 1..9: note = Seed: VVGARGVGK (KRAS G12R)
FVGVRSVGK

SEQ ID NO: 38007 - protein, 9 aa, synthetic construct
  source 1..9: note = Seed: VVGARGVGK (KRAS G12R)
FVGVRSVGL

SEQ ID NO: 38008 - protein, 9 aa, synthetic construct
  source 1..9: note = Seed: VVGARGVGK (KRAS G12R)
FVGVRSVGM

SEQ ID NO: 38009 - protein, 9 aa, synthetic construct
  source 1..9: note = Seed: VVGARGVGK (KRAS G12R)
FVGVRSVGN

SEQ ID NO: 38010 - protein, 9 aa, synthetic construct
  source 1..9: note = Seed: VVGARGVGK (KRAS G12R)
FVGVRSVGP

SEQ ID NO: 38011 - protein, 9 aa, synthetic construct
  source 1..9: note = Seed: VVGARGVGK (KRAS G12R)
FVGVRSVGQ

SEQ ID NO: 38012 - protein, 9 aa, synthetic construct
  source 1..9: note = Seed: VVGARGVGK (KRAS G12R)
FVGVRSVGR

SEQ ID NO: 38013 - protein, 9 aa, synthetic construct
  source 1..9: note = Seed: VVGARGVGK (KRAS G12R)
FVGVRSVGS

SEQ ID NO: 38014 - protein, 9 aa, synthetic construct
  source 1..9: note = Seed: VVGARGVGK (KRAS G12R)
FVGVRSVGT

SEQ ID NO: 38015 - protein, 9 aa, synthetic construct
  source 1..9: note = Seed: VVGARGVGK (KRAS G12R)
FVGVRSVGV

SEQ ID NO: 38016 - protein, 9 aa, synthetic construct
  source 1..9: note = Seed: VVGARGVGK (KRAS G12R)
FVGVRSVGW

SEQ ID NO: 38017 - protein, 9 aa, synthetic construct
  source 1..9: note = Seed: VVGARGVGK (KRAS G12R)
FVGVRSVGY

SEQ ID NO: 38018 - protein, 9 aa, synthetic construct
  source 1..9: note = Seed: VVGARGVGK (KRAS G12R)
FVGVRTVGA

SEQ ID NO: 38019 - protein, 9 aa, synthetic construct
  source 1..9: note = Seed: VVGARGVGK (KRAS G12R)
FVGVRTVGC

SEQ ID NO: 38020 - protein, 9 aa, synthetic construct
  source 1..9: note = Seed: VVGARGVGK (KRAS G12R)
FVGVRTVGD

SEQ ID NO: 38021 - protein, 9 aa, synthetic construct
  source 1..9: note = Seed: VVGARGVGK (KRAS G12R)
FVGVRTVGE

SEQ ID NO: 38022 - protein, 9 aa, synthetic construct
  source 1..9: note = Seed: VVGARGVGK (KRAS G12R)
FVGVRTVGF

SEQ ID NO: 38023 - protein, 9 aa, synthetic construct
  source 1..9: note = Seed: VVGARGVGK (KRAS G12R)
FVGVRTVGG

SEQ ID NO: 38024 - protein, 9 aa, synthetic construct
  source 1..9: note = Seed: VVGARGVGK (KRAS G12R)
FVGVRTVGH

SEQ ID NO: 38025 - protein, 9 aa, synthetic construct
  source 1..9: note = Seed: VVGARGVGK (KRAS G12R)
FVGVRTVGI

SEQ ID NO: 38026 - protein, 9 aa, synthetic construct
  source 1..9: note = Seed: VVGARGVGK (KRAS G12R)
FVGVRTVGK

SEQ ID NO: 38027 - protein, 9 aa, synthetic construct
  source 1..9: note = Seed: VVGARGVGK (KRAS G12R)
FVGVRTVGL

SEQ ID NO: 38028 - protein, 9 aa, synthetic construct
  source 1..9: note = Seed: VVGARGVGK (KRAS G12R)
FVGVRTVGM

SEQ ID NO: 38029 - protein, 9 aa, synthetic construct
  source 1..9: note = Seed: VVGARGVGK (KRAS G12R)
FVGVRTVGN

SEQ ID NO: 38030 - protein, 9 aa, synthetic construct
  source 1..9: note = Seed: VVGARGVGK (KRAS G12R)
FVGVRTVGP

SEQ ID NO: 38031 - protein, 9 aa, synthetic construct
  source 1..9: note = Seed: VVGARGVGK (KRAS G12R)
FVGVRTVGQ

SEQ ID NO: 38032 - protein, 9 aa, synthetic construct
  source 1..9: note = Seed: VVGARGVGK (KRAS G12R)
FVGVRTVGR

SEQ ID NO: 38033 - protein, 9 aa, synthetic construct
  source 1..9: note = Seed: VVGARGVGK (KRAS G12R)
FVGVRTVGS

SEQ ID NO: 38034 - protein, 9 aa, synthetic construct
  source 1..9: note = Seed: VVGARGVGK (KRAS G12R)
FVGVRTVGT

SEQ ID NO: 38035 - protein, 9 aa, synthetic construct
  source 1..9: note = Seed: VVGARGVGK (KRAS G12R)
FVGVRTVGV

SEQ ID NO: 38036 - protein, 9 aa, synthetic construct
  source 1..9: note = Seed: VVGARGVGK (KRAS G12R)
FVGVRTVGY

SEQ ID NO: 38037 - protein, 9 aa, synthetic construct
  source 1..9: note = Seed: VVGARGVGK (KRAS G12R)
FVGVRVVGA

SEQ ID NO: 38038 - protein, 9 aa, synthetic construct
  source 1..9: note = Seed: VVGARGVGK (KRAS G12R)
FVGVRVVGD

SEQ ID NO: 38039 - protein, 9 aa, synthetic construct
  source 1..9: note = Seed: VVGARGVGK (KRAS G12R)
FVGVRVVGE

SEQ ID NO: 38040 - protein, 9 aa, synthetic construct
  source 1..9: note = Seed: VVGARGVGK (KRAS G12R)
FVGVRVVGG

SEQ ID NO: 38041 - protein, 9 aa, synthetic construct
  source 1..9: note = Seed: VVGARGVGK (KRAS G12R)
FVGVRVVGH

SEQ ID NO: 38042 - protein, 9 aa, synthetic construct
  source 1..9: note = Seed: VVGARGVGK (KRAS G12R)
FVGVRVVGI

SEQ ID NO: 38043 - protein, 9 aa, synthetic construct
  source 1..9: note = Seed: VVGARGVGK (KRAS G12R)
FVGVRVVGK

SEQ ID NO: 38044 - protein, 9 aa, synthetic construct
  source 1..9: note = Seed: VVGARGVGK (KRAS G12R)
FVGVRVVGL

SEQ ID NO: 38045 - protein, 9 aa, synthetic construct
  source 1..9: note = Seed: VVGARGVGK (KRAS G12R)
FVGVRVVGM

SEQ ID NO: 38046 - protein, 9 aa, synthetic construct
  source 1..9: note = Seed: VVGARGVGK (KRAS G12R)
FVGVRVVGN

SEQ ID NO: 38047 - protein, 9 aa, synthetic construct
  source 1..9: note = Seed: VVGARGVGK (KRAS G12R)
FVGVRVVGP

SEQ ID NO: 38048 - protein, 9 aa, synthetic construct
  source 1..9: note = Seed: VVGARGVGK (KRAS G12R)
FVGVRVVGQ

SEQ ID NO: 38049 - protein, 9 aa, synthetic construct
  source 1..9: note = Seed: VVGARGVGK (KRAS G12R)
FVGVRVVGR

SEQ ID NO: 38050 - protein, 9 aa, synthetic construct
  source 1..9: note = Seed: VVGARGVGK (KRAS G12R)
FVGVRVVGS

SEQ ID NO: 38051 - protein, 9 aa, synthetic construct
  source 1..9: note = Seed: VVGARGVGK (KRAS G12R)
FVGVRVVGT

SEQ ID NO: 38052 - protein, 9 aa, synthetic construct
  source 1..9: note = Seed: VVGARGVGK (KRAS G12R)
FVGVRVVGV

SEQ ID NO: 38053 - protein, 9 aa, synthetic construct
  source 1..9: note = Seed: VVGARGVGK (KRAS G12R)
FVGVRVVGY

SEQ ID NO: 38054 - protein, 9 aa, synthetic construct
  source 1..9: note = Seed: VVGARGVGK (KRAS G12R)
FVGVRWVGV

SEQ ID NO: 38055 - protein, 9 aa, synthetic construct
  source 1..9: note = Seed: VVGARGVGK (KRAS G12R)
FVGWRAVGA

SEQ ID NO: 38056 - protein, 9 aa, synthetic construct
  source 1..9: note = Seed: VVGARGVGK (KRAS G12R)
FVGWRAVGC

SEQ ID NO: 38057 - protein, 9 aa, synthetic construct
  source 1..9: note = Seed: VVGARGVGK (KRAS G12R)
FVGWRAVGF

SEQ ID NO: 38058 - protein, 9 aa, synthetic construct
  source 1..9: note = Seed: VVGARGVGK (KRAS G12R)
FVGWRAVGG

SEQ ID NO: 38059 - protein, 9 aa, synthetic construct
  source 1..9: note = Seed: VVGARGVGK (KRAS G12R)
FVGWRAVGH

SEQ ID NO: 38060 - protein, 9 aa, synthetic construct
  source 1..9: note = Seed: VVGARGVGK (KRAS G12R)
FVGWRAVGI

SEQ ID NO: 38061 - protein, 9 aa, synthetic construct
  source 1..9: note = Seed: VVGARGVGK (KRAS G12R)
FVGWRAVGL

SEQ ID NO: 38062 - protein, 9 aa, synthetic construct
  source 1..9: note = Seed: VVGARGVGK (KRAS G12R)
FVGWRAVGM

SEQ ID NO: 38063 - protein, 9 aa, synthetic construct
  source 1..9: note = Seed: VVGARGVGK (KRAS G12R)
FVGWRAVGN

SEQ ID NO: 38064 - protein, 9 aa, synthetic construct
  source 1..9: note = Seed: VVGARGVGK (KRAS G12R)
FVGWRAVGQ

SEQ ID NO: 38065 - protein, 9 aa, synthetic construct
  source 1..9: note = Seed: VVGARGVGK (KRAS G12R)
FVGWRAVGR

SEQ ID NO: 38066 - protein, 9 aa, synthetic construct
  source 1..9: note = Seed: VVGARGVGK (KRAS G12R)
FVGWRAVGS

SEQ ID NO: 38067 - protein, 9 aa, synthetic construct
  source 1..9: note = Seed: VVGARGVGK (KRAS G12R)
FVGWRAVGV

SEQ ID NO: 38068 - protein, 9 aa, synthetic construct
  source 1..9: note = Seed: VVGARGVGK (KRAS G12R)
FVGWRAVGY

SEQ ID NO: 38069 - protein, 9 aa, synthetic construct
  source 1..9: note = Seed: VVGARGVGK (KRAS G12R)
FVGWRGVGA

SEQ ID NO: 38070 - protein, 9 aa, synthetic construct
  source 1..9: note = Seed: VVGARGVGK (KRAS G12R)
FVGWRGVGI

SEQ ID NO: 38071 - protein, 9 aa, synthetic construct
  source 1..9: note = Seed: VVGARGVGK (KRAS G12R)
FVGWRGVGL

SEQ ID NO: 38072 - protein, 9 aa, synthetic construct
  source 1..9: note = Seed: VVGARGVGK (KRAS G12R)
FVGWRGVGM

SEQ ID NO: 38073 - protein, 9 aa, synthetic construct
  source 1..9: note = Seed: VVGARGVGK (KRAS G12R)
FVGWRGVGN

SEQ ID NO: 38074 - protein, 9 aa, synthetic construct
  source 1..9: note = Seed: VVGARGVGK (KRAS G12R)
FVGWRGVGS

SEQ ID NO: 38075 - protein, 9 aa, synthetic construct
  source 1..9: note = Seed: VVGARGVGK (KRAS G12R)
FVGWRGVGT

SEQ ID NO: 38076 - protein, 9 aa, synthetic construct
  source 1..9: note = Seed: VVGARGVGK (KRAS G12R)
FVGWRGVGV

SEQ ID NO: 38077 - protein, 9 aa, synthetic construct
  source 1..9: note = Seed: VVGARGVGK (KRAS G12R)
FVGWRHVGL

SEQ ID NO: 38078 - protein, 9 aa, synthetic construct
  source 1..9: note = Seed: VVGARGVGK (KRAS G12R)
FVGWRHVGR

SEQ ID NO: 38079 - protein, 9 aa, synthetic construct
  source 1..9: note = Seed: VVGARGVGK (KRAS G12R)
FVGWRIVGR

SEQ ID NO: 38080 - protein, 9 aa, synthetic construct
  source 1..9: note = Seed: VVGARGVGK (KRAS G12R)
FVGWRKVGF

SEQ ID NO: 38081 - protein, 9 aa, synthetic construct
  source 1..9: note = Seed: VVGARGVGK (KRAS G12R)
FVGWRKVGK

SEQ ID NO: 38082 - protein, 9 aa, synthetic construct
  source 1..9: note = Seed: VVGARGVGK (KRAS G12R)
FVGWRKVGM

SEQ ID NO: 38083 - protein, 9 aa, synthetic construct
  source 1..9: note = Seed: VVGARGVGK (KRAS G12R)
FVGWRKVGR

SEQ ID NO: 38084 - protein, 9 aa, synthetic construct
  source 1..9: note = Seed: VVGARGVGK (KRAS G12R)
FVGWRKVGY

SEQ ID NO: 38085 - protein, 9 aa, synthetic construct
  source 1..9: note = Seed: VVGARGVGK (KRAS G12R)
FVGWRLVGR

SEQ ID NO: 38086 - protein, 9 aa, synthetic construct
  source 1..9: note = Seed: VVGARGVGK (KRAS G12R)
FVGWRNVGI

SEQ ID NO: 38087 - protein, 9 aa, synthetic construct
  source 1..9: note = Seed: VVGARGVGK (KRAS G12R)
FVGWRNVGL

SEQ ID NO: 38088 - protein, 9 aa, synthetic construct
  source 1..9: note = Seed: VVGARGVGK (KRAS G12R)
FVGWRNVGM

SEQ ID NO: 38089 - protein, 9 aa, synthetic construct
  source 1..9: note = Seed: VVGARGVGK (KRAS G12R)
FVGWRNVGR

SEQ ID NO: 38090 - protein, 9 aa, synthetic construct
  source 1..9: note = Seed: VVGARGVGK (KRAS G12R)
FVGWRNVGV

SEQ ID NO: 38091 - protein, 9 aa, synthetic construct
  source 1..9: note = Seed: VVGARGVGK (KRAS G12R)
FVGWRPVGA

SEQ ID NO: 38092 - protein, 9 aa, synthetic construct
  source 1..9: note = Seed: VVGARGVGK (KRAS G12R)
FVGWRPVGF

SEQ ID NO: 38093 - protein, 9 aa, synthetic construct
  source 1..9: note = Seed: VVGARGVGK (KRAS G12R)
FVGWRPVGG

SEQ ID NO: 38094 - protein, 9 aa, synthetic construct
  source 1..9: note = Seed: VVGARGVGK (KRAS G12R)
FVGWRPVGH

SEQ ID NO: 38095 - protein, 9 aa, synthetic construct
  source 1..9: note = Seed: VVGARGVGK (KRAS G12R)
FVGWRPVGI

SEQ ID NO: 38096 - protein, 9 aa, synthetic construct
  source 1..9: note = Seed: VVGARGVGK (KRAS G12R)
FVGWRPVGL

SEQ ID NO: 38097 - protein, 9 aa, synthetic construct
  source 1..9: note = Seed: VVGARGVGK (KRAS G12R)
FVGWRPVGM

SEQ ID NO: 38098 - protein, 9 aa, synthetic construct
  source 1..9: note = Seed: VVGARGVGK (KRAS G12R)
FVGWRPVGN

SEQ ID NO: 38099 - protein, 9 aa, synthetic construct
  source 1..9: note = Seed: VVGARGVGK (KRAS G12R)
FVGWRPVGR

SEQ ID NO: 38100 - protein, 9 aa, synthetic construct
  source 1..9: note = Seed: VVGARGVGK (KRAS G12R)
FVGWRPVGS

SEQ ID NO: 38101 - protein, 9 aa, synthetic construct
  source 1..9: note = Seed: VVGARGVGK (KRAS G12R)
FVGWRPVGV

SEQ ID NO: 38102 - protein, 9 aa, synthetic construct
  source 1..9: note = Seed: VVGARGVGK (KRAS G12R)
FVGWRRVGA

SEQ ID NO: 38103 - protein, 9 aa, synthetic construct
  source 1..9: note = Seed: VVGARGVGK (KRAS G12R)
FVGWRRVGF

SEQ ID NO: 38104 - protein, 9 aa, synthetic construct
  source 1..9: note = Seed: VVGARGVGK (KRAS G12R)
FVGWRRVGH

SEQ ID NO: 38105 - protein, 9 aa, synthetic construct
  source 1..9: note = Seed: VVGARGVGK (KRAS G12R)
FVGWRRVGI

SEQ ID NO: 38106 - protein, 9 aa, synthetic construct
  source 1..9: note = Seed: VVGARGVGK (KRAS G12R)
FVGWRRVGK

SEQ ID NO: 38107 - protein, 9 aa, synthetic construct
  source 1..9: note = Seed: VVGARGVGK (KRAS G12R)
FVGWRRVGL

SEQ ID NO: 38108 - protein, 9 aa, synthetic construct
  source 1..9: note = Seed: VVGARGVGK (KRAS G12R)
FVGWRRVGM

SEQ ID NO: 38109 - protein, 9 aa, synthetic construct
  source 1..9: note = Seed: VVGARGVGK (KRAS G12R)
FVGWRRVGR

SEQ ID NO: 38110 - protein, 9 aa, synthetic construct
  source 1..9: note = Seed: VVGARGVGK (KRAS G12R)
FVGWRRVGV

SEQ ID NO: 38111 - protein, 9 aa, synthetic construct
  source 1..9: note = Seed: VVGARGVGK (KRAS G12R)
FVGWRRVGY

SEQ ID NO: 38112 - protein, 9 aa, synthetic construct
  source 1..9: note = Seed: VVGARGVGK (KRAS G12R)
FVGWRSVGA

SEQ ID NO: 38113 - protein, 9 aa, synthetic construct
  source 1..9: note = Seed: VVGARGVGK (KRAS G12R)
FVGWRSVGF

SEQ ID NO: 38114 - protein, 9 aa, synthetic construct
  source 1..9: note = Seed: VVGARGVGK (KRAS G12R)
FVGWRSVGI

SEQ ID NO: 38115 - protein, 9 aa, synthetic construct
  source 1..9: note = Seed: VVGARGVGK (KRAS G12R)
FVGWRSVGL

SEQ ID NO: 38116 - protein, 9 aa, synthetic construct
  source 1..9: note = Seed: VVGARGVGK (KRAS G12R)
FVGWRSVGM

SEQ ID NO: 38117 - protein, 9 aa, synthetic construct
  source 1..9: note = Seed: VVGARGVGK (KRAS G12R)
FVGWRSVGN

SEQ ID NO: 38118 - protein, 9 aa, synthetic construct
  source 1..9: note = Seed: VVGARGVGK (KRAS G12R)
FVGWRSVGR

SEQ ID NO: 38119 - protein, 9 aa, synthetic construct
  source 1..9: note = Seed: VVGARGVGK (KRAS G12R)
FVGWRSVGS

SEQ ID NO: 38120 - protein, 9 aa, synthetic construct
  source 1..9: note = Seed: VVGARGVGK (KRAS G12R)
FVGWRSVGV

SEQ ID NO: 38121 - protein, 9 aa, synthetic construct
  source 1..9: note = Seed: VVGARGVGK (KRAS G12R)
FVGWRSVGY

SEQ ID NO: 38122 - protein, 9 aa, synthetic construct
  source 1..9: note = Seed: VVGARGVGK (KRAS G12R)
FVGWRTVGA

SEQ ID NO: 38123 - protein, 9 aa, synthetic construct
  source 1..9: note = Seed: VVGARGVGK (KRAS G12R)
FVGWRTVGG

SEQ ID NO: 38124 - protein, 9 aa, synthetic construct
  source 1..9: note = Seed: VVGARGVGK (KRAS G12R)
FVGWRTVGH

SEQ ID NO: 38125 - protein, 9 aa, synthetic construct
  source 1..9: note = Seed: VVGARGVGK (KRAS G12R)
FVGWRTVGI

SEQ ID NO: 38126 - protein, 9 aa, synthetic construct
  source 1..9: note = Seed: VVGARGVGK (KRAS G12R)
FVGWRTVGL

SEQ ID NO: 38127 - protein, 9 aa, synthetic construct
  source 1..9: note = Seed: VVGARGVGK (KRAS G12R)
FVGWRTVGM

SEQ ID NO: 38128 - protein, 9 aa, synthetic construct
  source 1..9: note = Seed: VVGARGVGK (KRAS G12R)
FVGWRTVGN

SEQ ID NO: 38129 - protein, 9 aa, synthetic construct
  source 1..9: note = Seed: VVGARGVGK (KRAS G12R)
FVGWRTVGR

SEQ ID NO: 38130 - protein, 9 aa, synthetic construct
  source 1..9: note = Seed: VVGARGVGK (KRAS G12R)
FVGWRTVGS

SEQ ID NO: 38131 - protein, 9 aa, synthetic construct
  source 1..9: note = Seed: VVGARGVGK (KRAS G12R)
FVGWRTVGV

SEQ ID NO: 38132 - protein, 9 aa, synthetic construct
  source 1..9: note = Seed: VVGARGVGK (KRAS G12R)
FVGWRVVGI

SEQ ID NO: 38133 - protein, 9 aa, synthetic construct
  source 1..9: note = Seed: VVGARGVGK (KRAS G12R)
FVGWRVVGL

SEQ ID NO: 38134 - protein, 9 aa, synthetic construct
  source 1..9: note = Seed: VVGARGVGK (KRAS G12R)
FVGWRVVGM

SEQ ID NO: 38135 - protein, 9 aa, synthetic construct
  source 1..9: note = Seed: VVGARGVGK (KRAS G12R)
FVGWRVVGR

SEQ ID NO: 38136 - protein, 9 aa, synthetic construct
  source 1..9: note = Seed: VVGARGVGK (KRAS G12R)
FVGYRAVGC

SEQ ID NO: 38137 - protein, 9 aa, synthetic construct
  source 1..9: note = Seed: VVGARGVGK (KRAS G12R)
FVGYRAVGF

SEQ ID NO: 38138 - protein, 9 aa, synthetic construct
  source 1..9: note = Seed: VVGARGVGK (KRAS G12R)
FVGYRAVGI

SEQ ID NO: 38139 - protein, 9 aa, synthetic construct
  source 1..9: note = Seed: VVGARGVGK (KRAS G12R)
FVGYRAVGL

SEQ ID NO: 38140 - protein, 9 aa, synthetic construct
  source 1..9: note = Seed: VVGARGVGK (KRAS G12R)
FVGYRAVGM

SEQ ID NO: 38141 - protein, 9 aa, synthetic construct
  source 1..9: note = Seed: VVGARGVGK (KRAS G12R)
FVGYRAVGR

SEQ ID NO: 38142 - protein, 9 aa, synthetic construct
  source 1..9: note = Seed: VVGARGVGK (KRAS G12R)
FVGYRAVGV

SEQ ID NO: 38143 - protein, 9 aa, synthetic construct
  source 1..9: note = Seed: VVGARGVGK (KRAS G12R)
FVGYRGVGI

SEQ ID NO: 38144 - protein, 9 aa, synthetic construct
  source 1..9: note = Seed: VVGARGVGK (KRAS G12R)
FVGYRGVGL

SEQ ID NO: 38145 - protein, 9 aa, synthetic construct
  source 1..9: note = Seed: VVGARGVGK (KRAS G12R)
FVGYRGVGM

SEQ ID NO: 38146 - protein, 9 aa, synthetic construct
  source 1..9: note = Seed: VVGARGVGK (KRAS G12R)
FVGYRGVGV

SEQ ID NO: 38147 - protein, 9 aa, synthetic construct
  source 1..9: note = Seed: VVGARGVGK (KRAS G12R)
FVGYRKVGR

SEQ ID NO: 38148 - protein, 9 aa, synthetic construct
  source 1..9: note = Seed: VVGARGVGK (KRAS G12R)
FVGYRNVGI

SEQ ID NO: 38149 - protein, 9 aa, synthetic construct
  source 1..9: note = Seed: VVGARGVGK (KRAS G12R)
FVGYRNVGL

SEQ ID NO: 38150 - protein, 9 aa, synthetic construct
  source 1..9: note = Seed: VVGARGVGK (KRAS G12R)
FVGYRNVGM

SEQ ID NO: 38151 - protein, 9 aa, synthetic construct
  source 1..9: note = Seed: VVGARGVGK (KRAS G12R)
FVGYRPVGI

SEQ ID NO: 38152 - protein, 9 aa, synthetic construct
  source 1..9: note = Seed: VVGARGVGK (KRAS G12R)
FVGYRPVGL

SEQ ID NO: 38153 - protein, 9 aa, synthetic construct
  source 1..9: note = Seed: VVGARGVGK (KRAS G12R)
FVGYRPVGM

SEQ ID NO: 38154 - protein, 9 aa, synthetic construct
  source 1..9: note = Seed: VVGARGVGK (KRAS G12R)
FVGYRPVGR

SEQ ID NO: 38155 - protein, 9 aa, synthetic construct
  source 1..9: note = Seed: VVGARGVGK (KRAS G12R)
FVGYRRVGK

SEQ ID NO: 38156 - protein, 9 aa, synthetic construct
  source 1..9: note = Seed: VVGARGVGK (KRAS G12R)
FVGYRRVGR

SEQ ID NO: 38157 - protein, 9 aa, synthetic construct
  source 1..9: note = Seed: VVGARGVGK (KRAS G12R)
FVGYRRVGY

SEQ ID NO: 38158 - protein, 9 aa, synthetic construct
  source 1..9: note = Seed: VVGARGVGK (KRAS G12R)
FVGYRSVGI

SEQ ID NO: 38159 - protein, 9 aa, synthetic construct
  source 1..9: note = Seed: VVGARGVGK (KRAS G12R)
FVGYRSVGL

SEQ ID NO: 38160 - protein, 9 aa, synthetic construct
  source 1..9: note = Seed: VVGARGVGK (KRAS G12R)
FVGYRSVGM

SEQ ID NO: 38161 - protein, 9 aa, synthetic construct
  source 1..9: note = Seed: VVGARGVGK (KRAS G12R)
FVGYRSVGR

SEQ ID NO: 38162 - protein, 9 aa, synthetic construct
  source 1..9: note = Seed: VVGARGVGK (KRAS G12R)
FVGYRTVGL

SEQ ID NO: 38163 - protein, 9 aa, synthetic construct
  source 1..9: note = Seed: VVGARGVGK (KRAS G12R)
FVGYRTVGR

SEQ ID NO: 38164 - protein, 9 aa, synthetic construct
  source 1..9: note = Seed: VVGARGVGK (KRAS G12R)
FVGYRVVGR

SEQ ID NO: 38165 - protein, 9 aa, synthetic construct
  source 1..9: note = Seed: VVGARGVGK (KRAS G12R)
GVGARAVGA

SEQ ID NO: 38166 - protein, 9 aa, synthetic construct
  source 1..9: note = Seed: VVGARGVGK (KRAS G12R)
GVGARAVGG

SEQ ID NO: 38167 - protein, 9 aa, synthetic construct
  source 1..9: note = Seed: VVGARGVGK (KRAS G12R)
GVGARAVGI

SEQ ID NO: 38168 - protein, 9 aa, synthetic construct
  source 1..9: note = Seed: VVGARGVGK (KRAS G12R)
GVGARAVGM

SEQ ID NO: 38169 - protein, 9 aa, synthetic construct
  source 1..9: note = Seed: VVGARGVGK (KRAS G12R)
GVGARAVGS

SEQ ID NO: 38170 - protein, 9 aa, synthetic construct
  source 1..9: note = Seed: VVGARGVGK (KRAS G12R)
GVGARAVGT

SEQ ID NO: 38171 - protein, 9 aa, synthetic construct
  source 1..9: note = Seed: VVGARGVGK (KRAS G12R)
GVGARAVGV

SEQ ID NO: 38172 - protein, 9 aa, synthetic construct
  source 1..9: note = Seed: VVGARGVGK (KRAS G12R)
GVGARIVGA

SEQ ID NO: 38173 - protein, 9 aa, synthetic construct
  source 1..9: note = Seed: VVGARGVGK (KRAS G12R)
GVGARIVGS

SEQ ID NO: 38174 - protein, 9 aa, synthetic construct
  source 1..9: note = Seed: VVGARGVGK (KRAS G12R)
GVGARIVGT

SEQ ID NO: 38175 - protein, 9 aa, synthetic construct
  source 1..9: note = Seed: VVGARGVGK (KRAS G12R)
GVGARLVGA

SEQ ID NO: 38176 - protein, 9 aa, synthetic construct
  source 1..9: note = Seed: VVGARGVGK (KRAS G12R)
GVGARMVGA

SEQ ID NO: 38177 - protein, 9 aa, synthetic construct
  source 1..9: note = Seed: VVGARGVGK (KRAS G12R)
GVGARMVGS

SEQ ID NO: 38178 - protein, 9 aa, synthetic construct
  source 1..9: note = Seed: VVGARGVGK (KRAS G12R)
GVGARPVGA

SEQ ID NO: 38179 - protein, 9 aa, synthetic construct
  source 1..9: note = Seed: VVGARGVGK (KRAS G12R)
GVGARPVGS

SEQ ID NO: 38180 - protein, 9 aa, synthetic construct
  source 1..9: note = Seed: VVGARGVGK (KRAS G12R)
GVGARPVGT

SEQ ID NO: 38181 - protein, 9 aa, synthetic construct
  source 1..9: note = Seed: VVGARGVGK (KRAS G12R)
GVGARPVGV

SEQ ID NO: 38182 - protein, 9 aa, synthetic construct
  source 1..9: note = Seed: VVGARGVGK (KRAS G12R)
GVGARVVGA

SEQ ID NO: 38183 - protein, 9 aa, synthetic construct
  source 1..9: note = Seed: VVGARGVGK (KRAS G12R)
GVGARVVGS

SEQ ID NO: 38184 - protein, 9 aa, synthetic construct
  source 1..9: note = Seed: VVGARGVGK (KRAS G12R)
GVGARVVGT

SEQ ID NO: 38185 - protein, 9 aa, synthetic construct
  source 1..9: note = Seed: VVGARGVGK (KRAS G12R)
GVGARVVGV

SEQ ID NO: 38186 - protein, 9 aa, synthetic construct
  source 1..9: note = Seed: VVGARGVGK (KRAS G12R)
GVGGRAVGA

SEQ ID NO: 38187 - protein, 9 aa, synthetic construct
  source 1..9: note = Seed: VVGARGVGK (KRAS G12R)
GVGGRAVGI

SEQ ID NO: 38188 - protein, 9 aa, synthetic construct
  source 1..9: note = Seed: VVGARGVGK (KRAS G12R)
GVGGRAVGS

SEQ ID NO: 38189 - protein, 9 aa, synthetic construct
  source 1..9: note = Seed: VVGARGVGK (KRAS G12R)
GVGGRAVGT

SEQ ID NO: 38190 - protein, 9 aa, synthetic construct
  source 1..9: note = Seed: VVGARGVGK (KRAS G12R)
GVGGRAVGV

SEQ ID NO: 38191 - protein, 9 aa, synthetic construct
  source 1..9: note = Seed: VVGARGVGK (KRAS G12R)
GVGGRIVGA

SEQ ID NO: 38192 - protein, 9 aa, synthetic construct
  source 1..9: note = Seed: VVGARGVGK (KRAS G12R)
GVGGRVVGA

SEQ ID NO: 38193 - protein, 9 aa, synthetic construct
  source 1..9: note = Seed: VVGARGVGK (KRAS G12R)
GVGGRVVGS

SEQ ID NO: 38194 - protein, 9 aa, synthetic construct
  source 1..9: note = Seed: VVGARGVGK (KRAS G12R)
GVGGRVVGT

SEQ ID NO: 38195 - protein, 9 aa, synthetic construct
  source 1..9: note = Seed: VVGARGVGK (KRAS G12R)
GVGGRVVGV

SEQ ID NO: 38196 - protein, 9 aa, synthetic construct
  source 1..9: note = Seed: VVGARGVGK (KRAS G12R)
GVGLRAVGI

SEQ ID NO: 38197 - protein, 9 aa, synthetic construct
  source 1..9: note = Seed: VVGARGVGK (KRAS G12R)
GVGLRAVGL

SEQ ID NO: 38198 - protein, 9 aa, synthetic construct
  source 1..9: note = Seed: VVGARGVGK (KRAS G12R)
GVGLRAVGM

SEQ ID NO: 38199 - protein, 9 aa, synthetic construct
  source 1..9: note = Seed: VVGARGVGK (KRAS G12R)
GVGLRGVGI

SEQ ID NO: 38200 - protein, 9 aa, synthetic construct
  source 1..9: note = Seed: VVGARGVGK (KRAS G12R)
GVGLRGVGL

SEQ ID NO: 38201 - protein, 9 aa, synthetic construct
  source 1..9: note = Seed: VVGARGVGK (KRAS G12R)
GVGLRGVGV

SEQ ID NO: 38202 - protein, 9 aa, synthetic construct
  source 1..9: note = Seed: VVGARGVGK (KRAS G12R)
GVGLRSVGL

SEQ ID NO: 38203 - protein, 9 aa, synthetic construct
  source 1..9: note = Seed: VVGARGVGK (KRAS G12R)
GVGMRAVGI

SEQ ID NO: 38204 - protein, 9 aa, synthetic construct
  source 1..9: note = Seed: VVGARGVGK (KRAS G12R)
GVGMRAVGL

SEQ ID NO: 38205 - protein, 9 aa, synthetic construct
  source 1..9: note = Seed: VVGARGVGK (KRAS G12R)
GVGMRAVGM

SEQ ID NO: 38206 - protein, 9 aa, synthetic construct
  source 1..9: note = Seed: VVGARGVGK (KRAS G12R)
GVGMRGVGI

SEQ ID NO: 38207 - protein, 9 aa, synthetic construct
  source 1..9: note = Seed: VVGARGVGK (KRAS G12R)
GVGMRGVGL

SEQ ID NO: 38208 - protein, 9 aa, synthetic construct
  source 1..9: note = Seed: VVGARGVGK (KRAS G12R)
GVGMRGVGV

SEQ ID NO: 38209 - protein, 9 aa, synthetic construct
  source 1..9: note = Seed: VVGARGVGK (KRAS G12R)
GVGMRSVGL

SEQ ID NO: 38210 - protein, 9 aa, synthetic construct
  source 1..9: note = Seed: VVGARGVGK (KRAS G12R)
GVGSRAVGA

SEQ ID NO: 38211 - protein, 9 aa, synthetic construct
  source 1..9: note = Seed: VVGARGVGK (KRAS G12R)
GVGSRAVGS

SEQ ID NO: 38212 - protein, 9 aa, synthetic construct
  source 1..9: note = Seed: VVGARGVGK (KRAS G12R)
GVGSRAVGV

SEQ ID NO: 38213 - protein, 9 aa, synthetic construct
  source 1..9: note = Seed: VVGARGVGK (KRAS G12R)
GVGSRIVGA

SEQ ID NO: 38214 - protein, 9 aa, synthetic construct
  source 1..9: note = Seed: VVGARGVGK (KRAS G12R)
GVGSRVVGA

SEQ ID NO: 38215 - protein, 9 aa, synthetic construct
  source 1..9: note = Seed: VVGARGVGK (KRAS G12R)
HVGARAVGA

SEQ ID NO: 38216 - protein, 9 aa, synthetic construct
  source 1..9: note = Seed: VVGARGVGK (KRAS G12R)
HVGARAVGG

SEQ ID NO: 38217 - protein, 9 aa, synthetic construct
  source 1..9: note = Seed: VVGARGVGK (KRAS G12R)
HVGARAVGI

SEQ ID NO: 38218 - protein, 9 aa, synthetic construct
  source 1..9: note = Seed: VVGARGVGK (KRAS G12R)
HVGARAVGL

SEQ ID NO: 38219 - protein, 9 aa, synthetic construct
  source 1..9: note = Seed: VVGARGVGK (KRAS G12R)
HVGARAVGM

SEQ ID NO: 38220 - protein, 9 aa, synthetic construct
  source 1..9: note = Seed: VVGARGVGK (KRAS G12R)
HVGARAVGS

SEQ ID NO: 38221 - protein, 9 aa, synthetic construct
  source 1..9: note = Seed: VVGARGVGK (KRAS G12R)
HVGARAVGT

SEQ ID NO: 38222 - protein, 9 aa, synthetic construct
  source 1..9: note = Seed: VVGARGVGK (KRAS G12R)
HVGARAVGV

SEQ ID NO: 38223 - protein, 9 aa, synthetic construct
  source 1..9: note = Seed: VVGARGVGK (KRAS G12R)
HVGARGVGA

SEQ ID NO: 38224 - protein, 9 aa, synthetic construct
  source 1..9: note = Seed: VVGARGVGK (KRAS G12R)
HVGARIVGA

SEQ ID NO: 38225 - protein, 9 aa, synthetic construct
  source 1..9: note = Seed: VVGARGVGK (KRAS G12R)
HVGARIVGI

SEQ ID NO: 38226 - protein, 9 aa, synthetic construct
  source 1..9: note = Seed: VVGARGVGK (KRAS G12R)
HVGARIVGS

SEQ ID NO: 38227 - protein, 9 aa, synthetic construct
  source 1..9: note = Seed: VVGARGVGK (KRAS G12R)
HVGARIVGT

SEQ ID NO: 38228 - protein, 9 aa, synthetic construct
  source 1..9: note = Seed: VVGARGVGK (KRAS G12R)
HVGARIVGV

SEQ ID NO: 38229 - protein, 9 aa, synthetic construct
  source 1..9: note = Seed: VVGARGVGK (KRAS G12R)
HVGARLVGA

SEQ ID NO: 38230 - protein, 9 aa, synthetic construct
  source 1..9: note = Seed: VVGARGVGK (KRAS G12R)
HVGARMVGA

SEQ ID NO: 38231 - protein, 9 aa, synthetic construct
  source 1..9: note = Seed: VVGARGVGK (KRAS G12R)
HVGARPVGA

SEQ ID NO: 38232 - protein, 9 aa, synthetic construct
  source 1..9: note = Seed: VVGARGVGK (KRAS G12R)
HVGARPVGI

SEQ ID NO: 38233 - protein, 9 aa, synthetic construct
  source 1..9: note = Seed: VVGARGVGK (KRAS G12R)
HVGARPVGL

SEQ ID NO: 38234 - protein, 9 aa, synthetic construct
  source 1..9: note = Seed: VVGARGVGK (KRAS G12R)
HVGARPVGS

SEQ ID NO: 38235 - protein, 9 aa, synthetic construct
  source 1..9: note = Seed: VVGARGVGK (KRAS G12R)
HVGARPVGT

SEQ ID NO: 38236 - protein, 9 aa, synthetic construct
  source 1..9: note = Seed: VVGARGVGK (KRAS G12R)
HVGARPVGV

SEQ ID NO: 38237 - protein, 9 aa, synthetic construct
  source 1..9: note = Seed: VVGARGVGK (KRAS G12R)
HVGARSVGA

SEQ ID NO: 38238 - protein, 9 aa, synthetic construct
  source 1..9: note = Seed: VVGARGVGK (KRAS G12R)
HVGARSVGI

SEQ ID NO: 38239 - protein, 9 aa, synthetic construct
  source 1..9: note = Seed: VVGARGVGK (KRAS G12R)
HVGARSVGL

SEQ ID NO: 38240 - protein, 9 aa, synthetic construct
  source 1..9: note = Seed: VVGARGVGK (KRAS G12R)
HVGARSVGV

SEQ ID NO: 38241 - protein, 9 aa, synthetic construct
  source 1..9: note = Seed: VVGARGVGK (KRAS G12R)
HVGARTVGA

SEQ ID NO: 38242 - protein, 9 aa, synthetic construct
  source 1..9: note = Seed: VVGARGVGK (KRAS G12R)
HVGARTVGS

SEQ ID NO: 38243 - protein, 9 aa, synthetic construct
  source 1..9: note = Seed: VVGARGVGK (KRAS G12R)
HVGARTVGV

SEQ ID NO: 38244 - protein, 9 aa, synthetic construct
  source 1..9: note = Seed: VVGARGVGK (KRAS G12R)
HVGARVVGA

SEQ ID NO: 38245 - protein, 9 aa, synthetic construct
  source 1..9: note = Seed: VVGARGVGK (KRAS G12R)
HVGARVVGG

SEQ ID NO: 38246 - protein, 9 aa, synthetic construct
  source 1..9: note = Seed: VVGARGVGK (KRAS G12R)
HVGARVVGI

SEQ ID NO: 38247 - protein, 9 aa, synthetic construct
  source 1..9: note = Seed: VVGARGVGK (KRAS G12R)
HVGARVVGL

SEQ ID NO: 38248 - protein, 9 aa, synthetic construct
  source 1..9: note = Seed: VVGARGVGK (KRAS G12R)
HVGARVVGM

SEQ ID NO: 38249 - protein, 9 aa, synthetic construct
  source 1..9: note = Seed: VVGARGVGK (KRAS G12R)
HVGARVVGS

SEQ ID NO: 38250 - protein, 9 aa, synthetic construct
  source 1..9: note = Seed: VVGARGVGK (KRAS G12R)
HVGARVVGT

SEQ ID NO: 38251 - protein, 9 aa, synthetic construct
  source 1..9: note = Seed: VVGARGVGK (KRAS G12R)
HVGARVVGV

SEQ ID NO: 38252 - protein, 9 aa, synthetic construct
  source 1..9: note = Seed: VVGARGVGK (KRAS G12R)
HVGGRAVGA

SEQ ID NO: 38253 - protein, 9 aa, synthetic construct
  source 1..9: note = Seed: VVGARGVGK (KRAS G12R)
HVGGRAVGG

SEQ ID NO: 38254 - protein, 9 aa, synthetic construct
  source 1..9: note = Seed: VVGARGVGK (KRAS G12R)
HVGGRAVGI

SEQ ID NO: 38255 - protein, 9 aa, synthetic construct
  source 1..9: note = Seed: VVGARGVGK (KRAS G12R)
HVGGRAVGL

SEQ ID NO: 38256 - protein, 9 aa, synthetic construct
  source 1..9: note = Seed: VVGARGVGK (KRAS G12R)
HVGGRAVGM

SEQ ID NO: 38257 - protein, 9 aa, synthetic construct
  source 1..9: note = Seed: VVGARGVGK (KRAS G12R)
HVGGRAVGS

SEQ ID NO: 38258 - protein, 9 aa, synthetic construct
  source 1..9: note = Seed: VVGARGVGK (KRAS G12R)
HVGGRAVGT

SEQ ID NO: 38259 - protein, 9 aa, synthetic construct
  source 1..9: note = Seed: VVGARGVGK (KRAS G12R)
HVGGRAVGV

SEQ ID NO: 38260 - protein, 9 aa, synthetic construct
  source 1..9: note = Seed: VVGARGVGK (KRAS G12R)
HVGGRIVGA

SEQ ID NO: 38261 - protein, 9 aa, synthetic construct
  source 1..9: note = Seed: VVGARGVGK (KRAS G12R)
HVGGRIVGI

SEQ ID NO: 38262 - protein, 9 aa, synthetic construct
  source 1..9: note = Seed: VVGARGVGK (KRAS G12R)
HVGGRIVGS

SEQ ID NO: 38263 - protein, 9 aa, synthetic construct
  source 1..9: note = Seed: VVGARGVGK (KRAS G12R)
HVGGRIVGT

SEQ ID NO: 38264 - protein, 9 aa, synthetic construct
  source 1..9: note = Seed: VVGARGVGK (KRAS G12R)
HVGGRIVGV

SEQ ID NO: 38265 - protein, 9 aa, synthetic construct
  source 1..9: note = Seed: VVGARGVGK (KRAS G12R)
HVGGRPVGA

SEQ ID NO: 38266 - protein, 9 aa, synthetic construct
  source 1..9: note = Seed: VVGARGVGK (KRAS G12R)
HVGGRPVGI

SEQ ID NO: 38267 - protein, 9 aa, synthetic construct
  source 1..9: note = Seed: VVGARGVGK (KRAS G12R)
HVGGRPVGS

SEQ ID NO: 38268 - protein, 9 aa, synthetic construct
  source 1..9: note = Seed: VVGARGVGK (KRAS G12R)
HVGGRPVGT

SEQ ID NO: 38269 - protein, 9 aa, synthetic construct
  source 1..9: note = Seed: VVGARGVGK (KRAS G12R)
HVGGRPVGV

SEQ ID NO: 38270 - protein, 9 aa, synthetic construct
  source 1..9: note = Seed: VVGARGVGK (KRAS G12R)
HVGGRSVGA

SEQ ID NO: 38271 - protein, 9 aa, synthetic construct
  source 1..9: note = Seed: VVGARGVGK (KRAS G12R)
HVGGRTVGA

SEQ ID NO: 38272 - protein, 9 aa, synthetic construct
  source 1..9: note = Seed: VVGARGVGK (KRAS G12R)
HVGGRVVGA

SEQ ID NO: 38273 - protein, 9 aa, synthetic construct
  source 1..9: note = Seed: VVGARGVGK (KRAS G12R)
HVGGRVVGG

SEQ ID NO: 38274 - protein, 9 aa, synthetic construct
  source 1..9: note = Seed: VVGARGVGK (KRAS G12R)
HVGGRVVGI

SEQ ID NO: 38275 - protein, 9 aa, synthetic construct
  source 1..9: note = Seed: VVGARGVGK (KRAS G12R)
HVGGRVVGL

SEQ ID NO: 38276 - protein, 9 aa, synthetic construct
  source 1..9: note = Seed: VVGARGVGK (KRAS G12R)
HVGGRVVGM

SEQ ID NO: 38277 - protein, 9 aa, synthetic construct
  source 1..9: note = Seed: VVGARGVGK (KRAS G12R)
HVGGRVVGS

SEQ ID NO: 38278 - protein, 9 aa, synthetic construct
  source 1..9: note = Seed: VVGARGVGK (KRAS G12R)
HVGGRVVGT

SEQ ID NO: 38279 - protein, 9 aa, synthetic construct
  source 1..9: note = Seed: VVGARGVGK (KRAS G12R)
HVGGRVVGV

SEQ ID NO: 38280 - protein, 9 aa, synthetic construct
  source 1..9: note = Seed: VVGARGVGK (KRAS G12R)
HVGIRAVGL

SEQ ID NO: 38281 - protein, 9 aa, synthetic construct
  source 1..9: note = Seed: VVGARGVGK (KRAS G12R)
HVGIRGVGI

SEQ ID NO: 38282 - protein, 9 aa, synthetic construct
  source 1..9: note = Seed: VVGARGVGK (KRAS G12R)
HVGIRGVGL

SEQ ID NO: 38283 - protein, 9 aa, synthetic construct
  source 1..9: note = Seed: VVGARGVGK (KRAS G12R)
HVGLRAVGF

SEQ ID NO: 38284 - protein, 9 aa, synthetic construct
  source 1..9: note = Seed: VVGARGVGK (KRAS G12R)
HVGLRAVGI

SEQ ID NO: 38285 - protein, 9 aa, synthetic construct
  source 1..9: note = Seed: VVGARGVGK (KRAS G12R)
HVGLRAVGL

SEQ ID NO: 38286 - protein, 9 aa, synthetic construct
  source 1..9: note = Seed: VVGARGVGK (KRAS G12R)
HVGLRAVGM

SEQ ID NO: 38287 - protein, 9 aa, synthetic construct
  source 1..9: note = Seed: VVGARGVGK (KRAS G12R)
HVGLRAVGV

SEQ ID NO: 38288 - protein, 9 aa, synthetic construct
  source 1..9: note = Seed: VVGARGVGK (KRAS G12R)
HVGLRGVGI

SEQ ID NO: 38289 - protein, 9 aa, synthetic construct
  source 1..9: note = Seed: VVGARGVGK (KRAS G12R)
HVGLRGVGL

SEQ ID NO: 38290 - protein, 9 aa, synthetic construct
  source 1..9: note = Seed: VVGARGVGK (KRAS G12R)
HVGLRGVGM

SEQ ID NO: 38291 - protein, 9 aa, synthetic construct
  source 1..9: note = Seed: VVGARGVGK (KRAS G12R)
HVGLRGVGT

SEQ ID NO: 38292 - protein, 9 aa, synthetic construct
  source 1..9: note = Seed: VVGARGVGK (KRAS G12R)
HVGLRGVGV

SEQ ID NO: 38293 - protein, 9 aa, synthetic construct
  source 1..9: note = Seed: VVGARGVGK (KRAS G12R)
HVGLRNVGV

SEQ ID NO: 38294 - protein, 9 aa, synthetic construct
  source 1..9: note = Seed: VVGARGVGK (KRAS G12R)
HVGLRPVGI

SEQ ID NO: 38295 - protein, 9 aa, synthetic construct
  source 1..9: note = Seed: VVGARGVGK (KRAS G12R)
HVGLRPVGL

SEQ ID NO: 38296 - protein, 9 aa, synthetic construct
  source 1..9: note = Seed: VVGARGVGK (KRAS G12R)
HVGLRPVGM

SEQ ID NO: 38297 - protein, 9 aa, synthetic construct
  source 1..9: note = Seed: VVGARGVGK (KRAS G12R)
HVGLRPVGV

SEQ ID NO: 38298 - protein, 9 aa, synthetic construct
  source 1..9: note = Seed: VVGARGVGK (KRAS G12R)
HVGLRSVGI

SEQ ID NO: 38299 - protein, 9 aa, synthetic construct
  source 1..9: note = Seed: VVGARGVGK (KRAS G12R)
HVGLRSVGL

SEQ ID NO: 38300 - protein, 9 aa, synthetic construct
  source 1..9: note = Seed: VVGARGVGK (KRAS G12R)
HVGLRSVGM

SEQ ID NO: 38301 - protein, 9 aa, synthetic construct
  source 1..9: note = Seed: VVGARGVGK (KRAS G12R)
HVGLRSVGV

SEQ ID NO: 38302 - protein, 9 aa, synthetic construct
  source 1..9: note = Seed: VVGARGVGK (KRAS G12R)
HVGLRTVGI

SEQ ID NO: 38303 - protein, 9 aa, synthetic construct
  source 1..9: note = Seed: VVGARGVGK (KRAS G12R)
HVGLRTVGL

SEQ ID NO: 38304 - protein, 9 aa, synthetic construct
  source 1..9: note = Seed: VVGARGVGK (KRAS G12R)
HVGMRAVGF

SEQ ID NO: 38305 - protein, 9 aa, synthetic construct
  source 1..9: note = Seed: VVGARGVGK (KRAS G12R)
HVGMRAVGI

SEQ ID NO: 38306 - protein, 9 aa, synthetic construct
  source 1..9: note = Seed: VVGARGVGK (KRAS G12R)
HVGMRAVGL

SEQ ID NO: 38307 - protein, 9 aa, synthetic construct
  source 1..9: note = Seed: VVGARGVGK (KRAS G12R)
HVGMRAVGM

SEQ ID NO: 38308 - protein, 9 aa, synthetic construct
  source 1..9: note = Seed: VVGARGVGK (KRAS G12R)
HVGMRAVGV

SEQ ID NO: 38309 - protein, 9 aa, synthetic construct
  source 1..9: note = Seed: VVGARGVGK (KRAS G12R)
HVGMRGVGI

SEQ ID NO: 38310 - protein, 9 aa, synthetic construct
  source 1..9: note = Seed: VVGARGVGK (KRAS G12R)
HVGMRGVGL

SEQ ID NO: 38311 - protein, 9 aa, synthetic construct
  source 1..9: note = Seed: VVGARGVGK (KRAS G12R)
HVGMRGVGM

SEQ ID NO: 38312 - protein, 9 aa, synthetic construct
  source 1..9: note = Seed: VVGARGVGK (KRAS G12R)
HVGMRGVGV

SEQ ID NO: 38313 - protein, 9 aa, synthetic construct
  source 1..9: note = Seed: VVGARGVGK (KRAS G12R)
HVGMRPVGI

SEQ ID NO: 38314 - protein, 9 aa, synthetic construct
  source 1..9: note = Seed: VVGARGVGK (KRAS G12R)
HVGMRPVGL

SEQ ID NO: 38315 - protein, 9 aa, synthetic construct
  source 1..9: note = Seed: VVGARGVGK (KRAS G12R)
HVGMRPVGV

SEQ ID NO: 38316 - protein, 9 aa, synthetic construct
  source 1..9: note = Seed: VVGARGVGK (KRAS G12R)
HVGMRSVGI

SEQ ID NO: 38317 - protein, 9 aa, synthetic construct
  source 1..9: note = Seed: VVGARGVGK (KRAS G12R)
HVGMRSVGL

SEQ ID NO: 38318 - protein, 9 aa, synthetic construct
  source 1..9: note = Seed: VVGARGVGK (KRAS G12R)
HVGMRSVGM

SEQ ID NO: 38319 - protein, 9 aa, synthetic construct
  source 1..9: note = Seed: VVGARGVGK (KRAS G12R)
HVGMRSVGV

SEQ ID NO: 38320 - protein, 9 aa, synthetic construct
  source 1..9: note = Seed: VVGARGVGK (KRAS G12R)
HVGMRTVGI

SEQ ID NO: 38321 - protein, 9 aa, synthetic construct
  source 1..9: note = Seed: VVGARGVGK (KRAS G12R)
HVGMRTVGL

SEQ ID NO: 38322 - protein, 9 aa, synthetic construct
  source 1..9: note = Seed: VVGARGVGK (KRAS G12R)
HVGMRTVGV

SEQ ID NO: 38323 - protein, 9 aa, synthetic construct
  source 1..9: note = Seed: VVGARGVGK (KRAS G12R)
HVGSRAVGA

SEQ ID NO: 38324 - protein, 9 aa, synthetic construct
  source 1..9: note = Seed: VVGARGVGK (KRAS G12R)
HVGSRAVGI

SEQ ID NO: 38325 - protein, 9 aa, synthetic construct
  source 1..9: note = Seed: VVGARGVGK (KRAS G12R)
HVGSRAVGL

SEQ ID NO: 38326 - protein, 9 aa, synthetic construct
  source 1..9: note = Seed: VVGARGVGK (KRAS G12R)
HVGSRAVGS

SEQ ID NO: 38327 - protein, 9 aa, synthetic construct
  source 1..9: note = Seed: VVGARGVGK (KRAS G12R)
HVGSRAVGT

SEQ ID NO: 38328 - protein, 9 aa, synthetic construct
  source 1..9: note = Seed: VVGARGVGK (KRAS G12R)
HVGSRAVGV

SEQ ID NO: 38329 - protein, 9 aa, synthetic construct
  source 1..9: note = Seed: VVGARGVGK (KRAS G12R)
HVGSRIVGA

SEQ ID NO: 38330 - protein, 9 aa, synthetic construct
  source 1..9: note = Seed: VVGARGVGK (KRAS G12R)
HVGSRIVGS

SEQ ID NO: 38331 - protein, 9 aa, synthetic construct
  source 1..9: note = Seed: VVGARGVGK (KRAS G12R)
HVGSRPVGA

SEQ ID NO: 38332 - protein, 9 aa, synthetic construct
  source 1..9: note = Seed: VVGARGVGK (KRAS G12R)
HVGSRSVGI

SEQ ID NO: 38333 - protein, 9 aa, synthetic construct
  source 1..9: note = Seed: VVGARGVGK (KRAS G12R)
HVGSRSVGL

SEQ ID NO: 38334 - protein, 9 aa, synthetic construct
  source 1..9: note = Seed: VVGARGVGK (KRAS G12R)
HVGSRVVGA

SEQ ID NO: 38335 - protein, 9 aa, synthetic construct
  source 1..9: note = Seed: VVGARGVGK (KRAS G12R)
HVGSRVVGS

SEQ ID NO: 38336 - protein, 9 aa, synthetic construct
  source 1..9: note = Seed: VVGARGVGK (KRAS G12R)
HVGSRVVGT

SEQ ID NO: 38337 - protein, 9 aa, synthetic construct
  source 1..9: note = Seed: VVGARGVGK (KRAS G12R)
HVGSRVVGV

SEQ ID NO: 38338 - protein, 9 aa, synthetic construct
  source 1..9: note = Seed: VVGARGVGK (KRAS G12R)
HVGTRAVGI

SEQ ID NO: 38339 - protein, 9 aa, synthetic construct
  source 1..9: note = Seed: VVGARGVGK (KRAS G12R)
HVGTRAVGL

SEQ ID NO: 38340 - protein, 9 aa, synthetic construct
  source 1..9: note = Seed: VVGARGVGK (KRAS G12R)
HVGTRSVGI

SEQ ID NO: 38341 - protein, 9 aa, synthetic construct
  source 1..9: note = Seed: VVGARGVGK (KRAS G12R)
HVGTRSVGL

SEQ ID NO: 38342 - protein, 9 aa, synthetic construct
  source 1..9: note = Seed: VVGARGVGK (KRAS G12R)
HVGTRSVGV

SEQ ID NO: 38343 - protein, 9 aa, synthetic construct
  source 1..9: note = Seed: VVGARGVGK (KRAS G12R)
HVGVRAVGI

SEQ ID NO: 38344 - protein, 9 aa, synthetic construct
  source 1..9: note = Seed: VVGARGVGK (KRAS G12R)
HVGVRAVGL

SEQ ID NO: 38345 - protein, 9 aa, synthetic construct
  source 1..9: note = Seed: VVGARGVGK (KRAS G12R)
HVGVRSVGI

SEQ ID NO: 38346 - protein, 9 aa, synthetic construct
  source 1..9: note = Seed: VVGARGVGK (KRAS G12R)
IVGARAVGA

SEQ ID NO: 38347 - protein, 9 aa, synthetic construct
  source 1..9: note = Seed: VVGARGVGK (KRAS G12R)
IVGARAVGC

SEQ ID NO: 38348 - protein, 9 aa, synthetic construct
  source 1..9: note = Seed: VVGARGVGK (KRAS G12R)
IVGARAVGD

SEQ ID NO: 38349 - protein, 9 aa, synthetic construct
  source 1..9: note = Seed: VVGARGVGK (KRAS G12R)
IVGARAVGE

SEQ ID NO: 38350 - protein, 9 aa, synthetic construct
  source 1..9: note = Seed: VVGARGVGK (KRAS G12R)
IVGARAVGF

SEQ ID NO: 38351 - protein, 9 aa, synthetic construct
  source 1..9: note = Seed: VVGARGVGK (KRAS G12R)
IVGARAVGG

SEQ ID NO: 38352 - protein, 9 aa, synthetic construct
  source 1..9: note = Seed: VVGARGVGK (KRAS G12R)
IVGARAVGH

SEQ ID NO: 38353 - protein, 9 aa, synthetic construct
  source 1..9: note = Seed: VVGARGVGK (KRAS G12R)
IVGARAVGI

SEQ ID NO: 38354 - protein, 9 aa, synthetic construct
  source 1..9: note = Seed: VVGARGVGK (KRAS G12R)
IVGARAVGK

SEQ ID NO: 38355 - protein, 9 aa, synthetic construct
  source 1..9: note = Seed: VVGARGVGK (KRAS G12R)
IVGARAVGL

SEQ ID NO: 38356 - protein, 9 aa, synthetic construct
  source 1..9: note = Seed: VVGARGVGK (KRAS G12R)
IVGARAVGM

SEQ ID NO: 38357 - protein, 9 aa, synthetic construct
  source 1..9: note = Seed: VVGARGVGK (KRAS G12R)
IVGARAVGN

SEQ ID NO: 38358 - protein, 9 aa, synthetic construct
  source 1..9: note = Seed: VVGARGVGK (KRAS G12R)
IVGARAVGP

SEQ ID NO: 38359 - protein, 9 aa, synthetic construct
  source 1..9: note = Seed: VVGARGVGK (KRAS G12R)
IVGARAVGQ

SEQ ID NO: 38360 - protein, 9 aa, synthetic construct
  source 1..9: note = Seed: VVGARGVGK (KRAS G12R)
IVGARAVGR

SEQ ID NO: 38361 - protein, 9 aa, synthetic construct
  source 1..9: note = Seed: VVGARGVGK (KRAS G12R)
IVGARAVGS

SEQ ID NO: 38362 - protein, 9 aa, synthetic construct
  source 1..9: note = Seed: VVGARGVGK (KRAS G12R)
IVGARAVGT

SEQ ID NO: 38363 - protein, 9 aa, synthetic construct
  source 1..9: note = Seed: VVGARGVGK (KRAS G12R)
IVGARAVGV

SEQ ID NO: 38364 - protein, 9 aa, synthetic construct
  source 1..9: note = Seed: VVGARGVGK (KRAS G12R)
IVGARAVGW

SEQ ID NO: 38365 - protein, 9 aa, synthetic construct
  source 1..9: note = Seed: VVGARGVGK (KRAS G12R)
IVGARAVGY

SEQ ID NO: 38366 - protein, 9 aa, synthetic construct
  source 1..9: note = Seed: VVGARGVGK (KRAS G12R)
IVGARCVGA

SEQ ID NO: 38367 - protein, 9 aa, synthetic construct
  source 1..9: note = Seed: VVGARGVGK (KRAS G12R)
IVGARCVGS

SEQ ID NO: 38368 - protein, 9 aa, synthetic construct
  source 1..9: note = Seed: VVGARGVGK (KRAS G12R)
IVGARCVGV

SEQ ID NO: 38369 - protein, 9 aa, synthetic construct
  source 1..9: note = Seed: VVGARGVGK (KRAS G12R)
IVGARGVGA

SEQ ID NO: 38370 - protein, 9 aa, synthetic construct
  source 1..9: note = Seed: VVGARGVGK (KRAS G12R)
IVGARGVGC

SEQ ID NO: 38371 - protein, 9 aa, synthetic construct
  source 1..9: note = Seed: VVGARGVGK (KRAS G12R)
IVGARGVGF

SEQ ID NO: 38372 - protein, 9 aa, synthetic construct
  source 1..9: note = Seed: VVGARGVGK (KRAS G12R)
IVGARGVGG

SEQ ID NO: 38373 - protein, 9 aa, synthetic construct
  source 1..9: note = Seed: VVGARGVGK (KRAS G12R)
IVGARGVGH

SEQ ID NO: 38374 - protein, 9 aa, synthetic construct
  source 1..9: note = Seed: VVGARGVGK (KRAS G12R)
IVGARGVGI

SEQ ID NO: 38375 - protein, 9 aa, synthetic construct
  source 1..9: note = Seed: VVGARGVGK (KRAS G12R)
IVGARGVGK

SEQ ID NO: 38376 - protein, 9 aa, synthetic construct
  source 1..9: note = Seed: VVGARGVGK (KRAS G12R)
IVGARGVGL

SEQ ID NO: 38377 - protein, 9 aa, synthetic construct
  source 1..9: note = Seed: VVGARGVGK (KRAS G12R)
IVGARGVGM

SEQ ID NO: 38378 - protein, 9 aa, synthetic construct
  source 1..9: note = Seed: VVGARGVGK (KRAS G12R)
IVGARGVGN

SEQ ID NO: 38379 - protein, 9 aa, synthetic construct
  source 1..9: note = Seed: VVGARGVGK (KRAS G12R)
IVGARGVGQ

SEQ ID NO: 38380 - protein, 9 aa, synthetic construct
  source 1..9: note = Seed: VVGARGVGK (KRAS G12R)
IVGARGVGR

SEQ ID NO: 38381 - protein, 9 aa, synthetic construct
  source 1..9: note = Seed: VVGARGVGK (KRAS G12R)
IVGARGVGS

SEQ ID NO: 38382 - protein, 9 aa, synthetic construct
  source 1..9: note = Seed: VVGARGVGK (KRAS G12R)
IVGARGVGT

SEQ ID NO: 38383 - protein, 9 aa, synthetic construct
  source 1..9: note = Seed: VVGARGVGK (KRAS G12R)
IVGARGVGV

SEQ ID NO: 38384 - protein, 9 aa, synthetic construct
  source 1..9: note = Seed: VVGARGVGK (KRAS G12R)
IVGARGVGY

SEQ ID NO: 38385 - protein, 9 aa, synthetic construct
  source 1..9: note = Seed: VVGARGVGK (KRAS G12R)
IVGARHVGA

SEQ ID NO: 38386 - protein, 9 aa, synthetic construct
  source 1..9: note = Seed: VVGARGVGK (KRAS G12R)
IVGARHVGF

SEQ ID NO: 38387 - protein, 9 aa, synthetic construct
  source 1..9: note = Seed: VVGARGVGK (KRAS G12R)
IVGARHVGG

SEQ ID NO: 38388 - protein, 9 aa, synthetic construct
  source 1..9: note = Seed: VVGARGVGK (KRAS G12R)
IVGARHVGI

SEQ ID NO: 38389 - protein, 9 aa, synthetic construct
  source 1..9: note = Seed: VVGARGVGK (KRAS G12R)
IVGARHVGK

SEQ ID NO: 38390 - protein, 9 aa, synthetic construct
  source 1..9: note = Seed: VVGARGVGK (KRAS G12R)
IVGARHVGL

SEQ ID NO: 38391 - protein, 9 aa, synthetic construct
  source 1..9: note = Seed: VVGARGVGK (KRAS G12R)
IVGARHVGM

SEQ ID NO: 38392 - protein, 9 aa, synthetic construct
  source 1..9: note = Seed: VVGARGVGK (KRAS G12R)
IVGARHVGN

SEQ ID NO: 38393 - protein, 9 aa, synthetic construct
  source 1..9: note = Seed: VVGARGVGK (KRAS G12R)
IVGARHVGQ

SEQ ID NO: 38394 - protein, 9 aa, synthetic construct
  source 1..9: note = Seed: VVGARGVGK (KRAS G12R)
IVGARHVGR

SEQ ID NO: 38395 - protein, 9 aa, synthetic construct
  source 1..9: note = Seed: VVGARGVGK (KRAS G12R)
IVGARHVGS

SEQ ID NO: 38396 - protein, 9 aa, synthetic construct
  source 1..9: note = Seed: VVGARGVGK (KRAS G12R)
IVGARHVGT

SEQ ID NO: 38397 - protein, 9 aa, synthetic construct
  source 1..9: note = Seed: VVGARGVGK (KRAS G12R)
IVGARHVGV

SEQ ID NO: 38398 - protein, 9 aa, synthetic construct
  source 1..9: note = Seed: VVGARGVGK (KRAS G12R)
IVGARHVGY

SEQ ID NO: 38399 - protein, 9 aa, synthetic construct
  source 1..9: note = Seed: VVGARGVGK (KRAS G12R)
IVGARIVGA

SEQ ID NO: 38400 - protein, 9 aa, synthetic construct
  source 1..9: note = Seed: VVGARGVGK (KRAS G12R)
IVGARIVGC

SEQ ID NO: 38401 - protein, 9 aa, synthetic construct
  source 1..9: note = Seed: VVGARGVGK (KRAS G12R)
IVGARIVGD

SEQ ID NO: 38402 - protein, 9 aa, synthetic construct
  source 1..9: note = Seed: VVGARGVGK (KRAS G12R)
IVGARIVGE

SEQ ID NO: 38403 - protein, 9 aa, synthetic construct
  source 1..9: note = Seed: VVGARGVGK (KRAS G12R)
IVGARIVGG

SEQ ID NO: 38404 - protein, 9 aa, synthetic construct
  source 1..9: note = Seed: VVGARGVGK (KRAS G12R)
IVGARIVGH

SEQ ID NO: 38405 - protein, 9 aa, synthetic construct
  source 1..9: note = Seed: VVGARGVGK (KRAS G12R)
IVGARIVGI

SEQ ID NO: 38406 - protein, 9 aa, synthetic construct
  source 1..9: note = Seed: VVGARGVGK (KRAS G12R)
IVGARIVGL

SEQ ID NO: 38407 - protein, 9 aa, synthetic construct
  source 1..9: note = Seed: VVGARGVGK (KRAS G12R)
IVGARIVGM

SEQ ID NO: 38408 - protein, 9 aa, synthetic construct
  source 1..9: note = Seed: VVGARGVGK (KRAS G12R)
IVGARIVGN

SEQ ID NO: 38409 - protein, 9 aa, synthetic construct
  source 1..9: note = Seed: VVGARGVGK (KRAS G12R)
IVGARIVGP

SEQ ID NO: 38410 - protein, 9 aa, synthetic construct
  source 1..9: note = Seed: VVGARGVGK (KRAS G12R)
IVGARIVGQ

SEQ ID NO: 38411 - protein, 9 aa, synthetic construct
  source 1..9: note = Seed: VVGARGVGK (KRAS G12R)
IVGARIVGR

SEQ ID NO: 38412 - protein, 9 aa, synthetic construct
  source 1..9: note = Seed: VVGARGVGK (KRAS G12R)
IVGARIVGS

SEQ ID NO: 38413 - protein, 9 aa, synthetic construct
  source 1..9: note = Seed: VVGARGVGK (KRAS G12R)
IVGARIVGT

SEQ ID NO: 38414 - protein, 9 aa, synthetic construct
  source 1..9: note = Seed: VVGARGVGK (KRAS G12R)
IVGARIVGV

SEQ ID NO: 38415 - protein, 9 aa, synthetic construct
  source 1..9: note = Seed: VVGARGVGK (KRAS G12R)
IVGARIVGY

SEQ ID NO: 38416 - protein, 9 aa, synthetic construct
  source 1..9: note = Seed: VVGARGVGK (KRAS G12R)
IVGARKVGA

SEQ ID NO: 38417 - protein, 9 aa, synthetic construct
  source 1..9: note = Seed: VVGARGVGK (KRAS G12R)
IVGARKVGF

SEQ ID NO: 38418 - protein, 9 aa, synthetic construct
  source 1..9: note = Seed: VVGARGVGK (KRAS G12R)
IVGARKVGG

SEQ ID NO: 38419 - protein, 9 aa, synthetic construct
  source 1..9: note = Seed: VVGARGVGK (KRAS G12R)
IVGARKVGH

SEQ ID NO: 38420 - protein, 9 aa, synthetic construct
  source 1..9: note = Seed: VVGARGVGK (KRAS G12R)
IVGARKVGI

SEQ ID NO: 38421 - protein, 9 aa, synthetic construct
  source 1..9: note = Seed: VVGARGVGK (KRAS G12R)
IVGARKVGK

SEQ ID NO: 38422 - protein, 9 aa, synthetic construct
  source 1..9: note = Seed: VVGARGVGK (KRAS G12R)
IVGARKVGL

SEQ ID NO: 38423 - protein, 9 aa, synthetic construct
  source 1..9: note = Seed: VVGARGVGK (KRAS G12R)
IVGARKVGM

SEQ ID NO: 38424 - protein, 9 aa, synthetic construct
  source 1..9: note = Seed: VVGARGVGK (KRAS G12R)
IVGARKVGN

SEQ ID NO: 38425 - protein, 9 aa, synthetic construct
  source 1..9: note = Seed: VVGARGVGK (KRAS G12R)
IVGARKVGQ

SEQ ID NO: 38426 - protein, 9 aa, synthetic construct
  source 1..9: note = Seed: VVGARGVGK (KRAS G12R)
IVGARKVGR

SEQ ID NO: 38427 - protein, 9 aa, synthetic construct
  source 1..9: note = Seed: VVGARGVGK (KRAS G12R)
IVGARKVGS

SEQ ID NO: 38428 - protein, 9 aa, synthetic construct
  source 1..9: note = Seed: VVGARGVGK (KRAS G12R)
IVGARKVGT

SEQ ID NO: 38429 - protein, 9 aa, synthetic construct
  source 1..9: note = Seed: VVGARGVGK (KRAS G12R)
IVGARKVGV

SEQ ID NO: 38430 - protein, 9 aa, synthetic construct
  source 1..9: note = Seed: VVGARGVGK (KRAS G12R)
IVGARKVGW

SEQ ID NO: 38431 - protein, 9 aa, synthetic construct
  source 1..9: note = Seed: VVGARGVGK (KRAS G12R)
IVGARKVGY

SEQ ID NO: 38432 - protein, 9 aa, synthetic construct
  source 1..9: note = Seed: VVGARGVGK (KRAS G12R)
IVGARLVGA

SEQ ID NO: 38433 - protein, 9 aa, synthetic construct
  source 1..9: note = Seed: VVGARGVGK (KRAS G12R)
IVGARLVGG

SEQ ID NO: 38434 - protein, 9 aa, synthetic construct
  source 1..9: note = Seed: VVGARGVGK (KRAS G12R)
IVGARLVGL

SEQ ID NO: 38435 - protein, 9 aa, synthetic construct
  source 1..9: note = Seed: VVGARGVGK (KRAS G12R)
IVGARLVGM

SEQ ID NO: 38436 - protein, 9 aa, synthetic construct
  source 1..9: note = Seed: VVGARGVGK (KRAS G12R)
IVGARLVGR

SEQ ID NO: 38437 - protein, 9 aa, synthetic construct
  source 1..9: note = Seed: VVGARGVGK (KRAS G12R)
IVGARLVGS

SEQ ID NO: 38438 - protein, 9 aa, synthetic construct
  source 1..9: note = Seed: VVGARGVGK (KRAS G12R)
IVGARLVGT

SEQ ID NO: 38439 - protein, 9 aa, synthetic construct
  source 1..9: note = Seed: VVGARGVGK (KRAS G12R)
IVGARLVGV

SEQ ID NO: 38440 - protein, 9 aa, synthetic construct
  source 1..9: note = Seed: VVGARGVGK (KRAS G12R)
IVGARMVGA

SEQ ID NO: 38441 - protein, 9 aa, synthetic construct
  source 1..9: note = Seed: VVGARGVGK (KRAS G12R)
IVGARMVGG

SEQ ID NO: 38442 - protein, 9 aa, synthetic construct
  source 1..9: note = Seed: VVGARGVGK (KRAS G12R)
IVGARMVGL

SEQ ID NO: 38443 - protein, 9 aa, synthetic construct
  source 1..9: note = Seed: VVGARGVGK (KRAS G12R)
IVGARMVGM

SEQ ID NO: 38444 - protein, 9 aa, synthetic construct
  source 1..9: note = Seed: VVGARGVGK (KRAS G12R)
IVGARMVGR

SEQ ID NO: 38445 - protein, 9 aa, synthetic construct
  source 1..9: note = Seed: VVGARGVGK (KRAS G12R)
IVGARMVGS

SEQ ID NO: 38446 - protein, 9 aa, synthetic construct
  source 1..9: note = Seed: VVGARGVGK (KRAS G12R)
IVGARMVGT

SEQ ID NO: 38447 - protein, 9 aa, synthetic construct
  source 1..9: note = Seed: VVGARGVGK (KRAS G12R)
IVGARMVGV

SEQ ID NO: 38448 - protein, 9 aa, synthetic construct
  source 1..9: note = Seed: VVGARGVGK (KRAS G12R)
IVGARNVGA

SEQ ID NO: 38449 - protein, 9 aa, synthetic construct
  source 1..9: note = Seed: VVGARGVGK (KRAS G12R)
IVGARNVGF

SEQ ID NO: 38450 - protein, 9 aa, synthetic construct
  source 1..9: note = Seed: VVGARGVGK (KRAS G12R)
IVGARNVGG

SEQ ID NO: 38451 - protein, 9 aa, synthetic construct
  source 1..9: note = Seed: VVGARGVGK (KRAS G12R)
IVGARNVGI

SEQ ID NO: 38452 - protein, 9 aa, synthetic construct
  source 1..9: note = Seed: VVGARGVGK (KRAS G12R)
IVGARNVGK

SEQ ID NO: 38453 - protein, 9 aa, synthetic construct
  source 1..9: note = Seed: VVGARGVGK (KRAS G12R)
IVGARNVGL

SEQ ID NO: 38454 - protein, 9 aa, synthetic construct
  source 1..9: note = Seed: VVGARGVGK (KRAS G12R)
IVGARNVGM

SEQ ID NO: 38455 - protein, 9 aa, synthetic construct
  source 1..9: note = Seed: VVGARGVGK (KRAS G12R)
IVGARNVGN

SEQ ID NO: 38456 - protein, 9 aa, synthetic construct
  source 1..9: note = Seed: VVGARGVGK (KRAS G12R)
IVGARNVGR

SEQ ID NO: 38457 - protein, 9 aa, synthetic construct
  source 1..9: note = Seed: VVGARGVGK (KRAS G12R)
IVGARNVGS

SEQ ID NO: 38458 - protein, 9 aa, synthetic construct
  source 1..9: note = Seed: VVGARGVGK (KRAS G12R)
IVGARNVGT

SEQ ID NO: 38459 - protein, 9 aa, synthetic construct
  source 1..9: note = Seed: VVGARGVGK (KRAS G12R)
IVGARNVGV

SEQ ID NO: 38460 - protein, 9 aa, synthetic construct
  source 1..9: note = Seed: VVGARGVGK (KRAS G12R)
IVGARNVGY

SEQ ID NO: 38461 - protein, 9 aa, synthetic construct
  source 1..9: note = Seed: VVGARGVGK (KRAS G12R)
IVGARPVGA

SEQ ID NO: 38462 - protein, 9 aa, synthetic construct
  source 1..9: note = Seed: VVGARGVGK (KRAS G12R)
IVGARPVGC

SEQ ID NO: 38463 - protein, 9 aa, synthetic construct
  source 1..9: note = Seed: VVGARGVGK (KRAS G12R)
IVGARPVGD

SEQ ID NO: 38464 - protein, 9 aa, synthetic construct
  source 1..9: note = Seed: VVGARGVGK (KRAS G12R)
IVGARPVGE

SEQ ID NO: 38465 - protein, 9 aa, synthetic construct
  source 1..9: note = Seed: VVGARGVGK (KRAS G12R)
IVGARPVGF

SEQ ID NO: 38466 - protein, 9 aa, synthetic construct
  source 1..9: note = Seed: VVGARGVGK (KRAS G12R)
IVGARPVGG

SEQ ID NO: 38467 - protein, 9 aa, synthetic construct
  source 1..9: note = Seed: VVGARGVGK (KRAS G12R)
IVGARPVGH

SEQ ID NO: 38468 - protein, 9 aa, synthetic construct
  source 1..9: note = Seed: VVGARGVGK (KRAS G12R)
IVGARPVGI

SEQ ID NO: 38469 - protein, 9 aa, synthetic construct
  source 1..9: note = Seed: VVGARGVGK (KRAS G12R)
IVGARPVGK

SEQ ID NO: 38470 - protein, 9 aa, synthetic construct
  source 1..9: note = Seed: VVGARGVGK (KRAS G12R)
IVGARPVGL

SEQ ID NO: 38471 - protein, 9 aa, synthetic construct
  source 1..9: note = Seed: VVGARGVGK (KRAS G12R)
IVGARPVGM

SEQ ID NO: 38472 - protein, 9 aa, synthetic construct
  source 1..9: note = Seed: VVGARGVGK (KRAS G12R)
IVGARPVGN

SEQ ID NO: 38473 - protein, 9 aa, synthetic construct
  source 1..9: note = Seed: VVGARGVGK (KRAS G12R)
IVGARPVGP

SEQ ID NO: 38474 - protein, 9 aa, synthetic construct
  source 1..9: note = Seed: VVGARGVGK (KRAS G12R)
IVGARPVGQ

SEQ ID NO: 38475 - protein, 9 aa, synthetic construct
  source 1..9: note = Seed: VVGARGVGK (KRAS G12R)
IVGARPVGR

SEQ ID NO: 38476 - protein, 9 aa, synthetic construct
  source 1..9: note = Seed: VVGARGVGK (KRAS G12R)
IVGARPVGS

SEQ ID NO: 38477 - protein, 9 aa, synthetic construct
  source 1..9: note = Seed: VVGARGVGK (KRAS G12R)
IVGARPVGT

SEQ ID NO: 38478 - protein, 9 aa, synthetic construct
  source 1..9: note = Seed: VVGARGVGK (KRAS G12R)
IVGARPVGV

SEQ ID NO: 38479 - protein, 9 aa, synthetic construct
  source 1..9: note = Seed: VVGARGVGK (KRAS G12R)
IVGARPVGW

SEQ ID NO: 38480 - protein, 9 aa, synthetic construct
  source 1..9: note = Seed: VVGARGVGK (KRAS G12R)
IVGARPVGY

SEQ ID NO: 38481 - protein, 9 aa, synthetic construct
  source 1..9: note = Seed: VVGARGVGK (KRAS G12R)
IVGARQVGA

SEQ ID NO: 38482 - protein, 9 aa, synthetic construct
  source 1..9: note = Seed: VVGARGVGK (KRAS G12R)
IVGARQVGI

SEQ ID NO: 38483 - protein, 9 aa, synthetic construct
  source 1..9: note = Seed: VVGARGVGK (KRAS G12R)
IVGARQVGL

SEQ ID NO: 38484 - protein, 9 aa, synthetic construct
  source 1..9: note = Seed: VVGARGVGK (KRAS G12R)
IVGARQVGM

SEQ ID NO: 38485 - protein, 9 aa, synthetic construct
  source 1..9: note = Seed: VVGARGVGK (KRAS G12R)
IVGARQVGR

SEQ ID NO: 38486 - protein, 9 aa, synthetic construct
  source 1..9: note = Seed: VVGARGVGK (KRAS G12R)
IVGARQVGV

SEQ ID NO: 38487 - protein, 9 aa, synthetic construct
  source 1..9: note = Seed: VVGARGVGK (KRAS G12R)
IVGARRVGA

SEQ ID NO: 38488 - protein, 9 aa, synthetic construct
  source 1..9: note = Seed: VVGARGVGK (KRAS G12R)
IVGARRVGE

SEQ ID NO: 38489 - protein, 9 aa, synthetic construct
  source 1..9: note = Seed: VVGARGVGK (KRAS G12R)
IVGARRVGF

SEQ ID NO: 38490 - protein, 9 aa, synthetic construct
  source 1..9: note = Seed: VVGARGVGK (KRAS G12R)
IVGARRVGG

SEQ ID NO: 38491 - protein, 9 aa, synthetic construct
  source 1..9: note = Seed: VVGARGVGK (KRAS G12R)
IVGARRVGH

SEQ ID NO: 38492 - protein, 9 aa, synthetic construct
  source 1..9: note = Seed: VVGARGVGK (KRAS G12R)
IVGARRVGI

SEQ ID NO: 38493 - protein, 9 aa, synthetic construct
  source 1..9: note = Seed: VVGARGVGK (KRAS G12R)
IVGARRVGK

SEQ ID NO: 38494 - protein, 9 aa, synthetic construct
  source 1..9: note = Seed: VVGARGVGK (KRAS G12R)
IVGARRVGL

SEQ ID NO: 38495 - protein, 9 aa, synthetic construct
  source 1..9: note = Seed: VVGARGVGK (KRAS G12R)
IVGARRVGM

SEQ ID NO: 38496 - protein, 9 aa, synthetic construct
  source 1..9: note = Seed: VVGARGVGK (KRAS G12R)
IVGARRVGN

SEQ ID NO: 38497 - protein, 9 aa, synthetic construct
  source 1..9: note = Seed: VVGARGVGK (KRAS G12R)
IVGARRVGP

SEQ ID NO: 38498 - protein, 9 aa, synthetic construct
  source 1..9: note = Seed: VVGARGVGK (KRAS G12R)
IVGARRVGQ

SEQ ID NO: 38499 - protein, 9 aa, synthetic construct
  source 1..9: note = Seed: VVGARGVGK (KRAS G12R)
IVGARRVGR

SEQ ID NO: 38500 - protein, 9 aa, synthetic construct
  source 1..9: note = Seed: VVGARGVGK (KRAS G12R)
IVGARRVGS

SEQ ID NO: 38501 - protein, 9 aa, synthetic construct
  source 1..9: note = Seed: VVGARGVGK (KRAS G12R)
IVGARRVGT

SEQ ID NO: 38502 - protein, 9 aa, synthetic construct
  source 1..9: note = Seed: VVGARGVGK (KRAS G12R)
IVGARRVGV

SEQ ID NO: 38503 - protein, 9 aa, synthetic construct
  source 1..9: note = Seed: VVGARGVGK (KRAS G12R)
IVGARRVGW

SEQ ID NO: 38504 - protein, 9 aa, synthetic construct
  source 1..9: note = Seed: VVGARGVGK (KRAS G12R)
IVGARRVGY

SEQ ID NO: 38505 - protein, 9 aa, synthetic construct
  source 1..9: note = Seed: VVGARGVGK (KRAS G12R)
IVGARSVGA

SEQ ID NO: 38506 - protein, 9 aa, synthetic construct
  source 1..9: note = Seed: VVGARGVGK (KRAS G12R)
IVGARSVGC

SEQ ID NO: 38507 - protein, 9 aa, synthetic construct
  source 1..9: note = Seed: VVGARGVGK (KRAS G12R)
IVGARSVGF

SEQ ID NO: 38508 - protein, 9 aa, synthetic construct
  source 1..9: note = Seed: VVGARGVGK (KRAS G12R)
IVGARSVGG

SEQ ID NO: 38509 - protein, 9 aa, synthetic construct
  source 1..9: note = Seed: VVGARGVGK (KRAS G12R)
IVGARSVGH

SEQ ID NO: 38510 - protein, 9 aa, synthetic construct
  source 1..9: note = Seed: VVGARGVGK (KRAS G12R)
IVGARSVGI

SEQ ID NO: 38511 - protein, 9 aa, synthetic construct
  source 1..9: note = Seed: VVGARGVGK (KRAS G12R)
IVGARSVGK

SEQ ID NO: 38512 - protein, 9 aa, synthetic construct
  source 1..9: note = Seed: VVGARGVGK (KRAS G12R)
IVGARSVGL

SEQ ID NO: 38513 - protein, 9 aa, synthetic construct
  source 1..9: note = Seed: VVGARGVGK (KRAS G12R)
IVGARSVGM

SEQ ID NO: 38514 - protein, 9 aa, synthetic construct
  source 1..9: note = Seed: VVGARGVGK (KRAS G12R)
IVGARSVGN

SEQ ID NO: 38515 - protein, 9 aa, synthetic construct
  source 1..9: note = Seed: VVGARGVGK (KRAS G12R)
IVGARSVGP

SEQ ID NO: 38516 - protein, 9 aa, synthetic construct
  source 1..9: note = Seed: VVGARGVGK (KRAS G12R)
IVGARSVGQ

SEQ ID NO: 38517 - protein, 9 aa, synthetic construct
  source 1..9: note = Seed: VVGARGVGK (KRAS G12R)
IVGARSVGR

SEQ ID NO: 38518 - protein, 9 aa, synthetic construct
  source 1..9: note = Seed: VVGARGVGK (KRAS G12R)
IVGARSVGS

SEQ ID NO: 38519 - protein, 9 aa, synthetic construct
  source 1..9: note = Seed: VVGARGVGK (KRAS G12R)
IVGARSVGT

SEQ ID NO: 38520 - protein, 9 aa, synthetic construct
  source 1..9: note = Seed: VVGARGVGK (KRAS G12R)
IVGARSVGV

SEQ ID NO: 38521 - protein, 9 aa, synthetic construct
  source 1..9: note = Seed: VVGARGVGK (KRAS G12R)
IVGARSVGW

SEQ ID NO: 38522 - protein, 9 aa, synthetic construct
  source 1..9: note = Seed: VVGARGVGK (KRAS G12R)
IVGARSVGY

SEQ ID NO: 38523 - protein, 9 aa, synthetic construct
  source 1..9: note = Seed: VVGARGVGK (KRAS G12R)
IVGARTVGA

SEQ ID NO: 38524 - protein, 9 aa, synthetic construct
  source 1..9: note = Seed: VVGARGVGK (KRAS G12R)
IVGARTVGC

SEQ ID NO: 38525 - protein, 9 aa, synthetic construct
  source 1..9: note = Seed: VVGARGVGK (KRAS G12R)
IVGARTVGF

SEQ ID NO: 38526 - protein, 9 aa, synthetic construct
  source 1..9: note = Seed: VVGARGVGK (KRAS G12R)
IVGARTVGG

SEQ ID NO: 38527 - protein, 9 aa, synthetic construct
  source 1..9: note = Seed: VVGARGVGK (KRAS G12R)
IVGARTVGH

SEQ ID NO: 38528 - protein, 9 aa, synthetic construct
  source 1..9: note = Seed: VVGARGVGK (KRAS G12R)
IVGARTVGI

SEQ ID NO: 38529 - protein, 9 aa, synthetic construct
  source 1..9: note = Seed: VVGARGVGK (KRAS G12R)
IVGARTVGK

SEQ ID NO: 38530 - protein, 9 aa, synthetic construct
  source 1..9: note = Seed: VVGARGVGK (KRAS G12R)
IVGARTVGL

SEQ ID NO: 38531 - protein, 9 aa, synthetic construct
  source 1..9: note = Seed: VVGARGVGK (KRAS G12R)
IVGARTVGM

SEQ ID NO: 38532 - protein, 9 aa, synthetic construct
  source 1..9: note = Seed: VVGARGVGK (KRAS G12R)
IVGARTVGN

SEQ ID NO: 38533 - protein, 9 aa, synthetic construct
  source 1..9: note = Seed: VVGARGVGK (KRAS G12R)
IVGARTVGQ

SEQ ID NO: 38534 - protein, 9 aa, synthetic construct
  source 1..9: note = Seed: VVGARGVGK (KRAS G12R)
IVGARTVGR

SEQ ID NO: 38535 - protein, 9 aa, synthetic construct
  source 1..9: note = Seed: VVGARGVGK (KRAS G12R)
IVGARTVGS

SEQ ID NO: 38536 - protein, 9 aa, synthetic construct
  source 1..9: note = Seed: VVGARGVGK (KRAS G12R)
IVGARTVGT

SEQ ID NO: 38537 - protein, 9 aa, synthetic construct
  source 1..9: note = Seed: VVGARGVGK (KRAS G12R)
IVGARTVGV

SEQ ID NO: 38538 - protein, 9 aa, synthetic construct
  source 1..9: note = Seed: VVGARGVGK (KRAS G12R)
IVGARTVGY

SEQ ID NO: 38539 - protein, 9 aa, synthetic construct
  source 1..9: note = Seed: VVGARGVGK (KRAS G12R)
IVGARVVGA

SEQ ID NO: 38540 - protein, 9 aa, synthetic construct
  source 1..9: note = Seed: VVGARGVGK (KRAS G12R)
IVGARVVGC

SEQ ID NO: 38541 - protein, 9 aa, synthetic construct
  source 1..9: note = Seed: VVGARGVGK (KRAS G12R)
IVGARVVGD

SEQ ID NO: 38542 - protein, 9 aa, synthetic construct
  source 1..9: note = Seed: VVGARGVGK (KRAS G12R)
IVGARVVGE

SEQ ID NO: 38543 - protein, 9 aa, synthetic construct
  source 1..9: note = Seed: VVGARGVGK (KRAS G12R)
IVGARVVGF

SEQ ID NO: 38544 - protein, 9 aa, synthetic construct
  source 1..9: note = Seed: VVGARGVGK (KRAS G12R)
IVGARVVGG

SEQ ID NO: 38545 - protein, 9 aa, synthetic construct
  source 1..9: note = Seed: VVGARGVGK (KRAS G12R)
IVGARVVGH

SEQ ID NO: 38546 - protein, 9 aa, synthetic construct
  source 1..9: note = Seed: VVGARGVGK (KRAS G12R)
IVGARVVGI

SEQ ID NO: 38547 - protein, 9 aa, synthetic construct
  source 1..9: note = Seed: VVGARGVGK (KRAS G12R)
IVGARVVGK

SEQ ID NO: 38548 - protein, 9 aa, synthetic construct
  source 1..9: note = Seed: VVGARGVGK (KRAS G12R)
IVGARVVGL

SEQ ID NO: 38549 - protein, 9 aa, synthetic construct
  source 1..9: note = Seed: VVGARGVGK (KRAS G12R)
IVGARVVGM

SEQ ID NO: 38550 - protein, 9 aa, synthetic construct
  source 1..9: note = Seed: VVGARGVGK (KRAS G12R)
IVGARVVGN

SEQ ID NO: 38551 - protein, 9 aa, synthetic construct
  source 1..9: note = Seed: VVGARGVGK (KRAS G12R)
IVGARVVGP

SEQ ID NO: 38552 - protein, 9 aa, synthetic construct
  source 1..9: note = Seed: VVGARGVGK (KRAS G12R)
IVGARVVGQ

SEQ ID NO: 38553 - protein, 9 aa, synthetic construct
  source 1..9: note = Seed: VVGARGVGK (KRAS G12R)
IVGARVVGR

SEQ ID NO: 38554 - protein, 9 aa, synthetic construct
  source 1..9: note = Seed: VVGARGVGK (KRAS G12R)
IVGARVVGS

SEQ ID NO: 38555 - protein, 9 aa, synthetic construct
  source 1..9: note = Seed: VVGARGVGK (KRAS G12R)
IVGARVVGT

SEQ ID NO: 38556 - protein, 9 aa, synthetic construct
  source 1..9: note = Seed: VVGARGVGK (KRAS G12R)
IVGARVVGV

SEQ ID NO: 38557 - protein, 9 aa, synthetic construct
  source 1..9: note = Seed: VVGARGVGK (KRAS G12R)
IVGARVVGY

SEQ ID NO: 38558 - protein, 9 aa, synthetic construct
  source 1..9: note = Seed: VVGARGVGK (KRAS G12R)
IVGARYVGS

SEQ ID NO: 38559 - protein, 9 aa, synthetic construct
  source 1..9: note = Seed: VVGARGVGK (KRAS G12R)
IVGARYVGV

SEQ ID NO: 38560 - protein, 9 aa, synthetic construct
  source 1..9: note = Seed: VVGARGVGK (KRAS G12R)
IVGCRAVGA

SEQ ID NO: 38561 - protein, 9 aa, synthetic construct
  source 1..9: note = Seed: VVGARGVGK (KRAS G12R)
IVGCRAVGG

SEQ ID NO: 38562 - protein, 9 aa, synthetic construct
  source 1..9: note = Seed: VVGARGVGK (KRAS G12R)
IVGCRAVGI

SEQ ID NO: 38563 - protein, 9 aa, synthetic construct
  source 1..9: note = Seed: VVGARGVGK (KRAS G12R)
IVGCRAVGL

SEQ ID NO: 38564 - protein, 9 aa, synthetic construct
  source 1..9: note = Seed: VVGARGVGK (KRAS G12R)
IVGCRAVGM

SEQ ID NO: 38565 - protein, 9 aa, synthetic construct
  source 1..9: note = Seed: VVGARGVGK (KRAS G12R)
IVGCRAVGR

SEQ ID NO: 38566 - protein, 9 aa, synthetic construct
  source 1..9: note = Seed: VVGARGVGK (KRAS G12R)
IVGCRAVGS

SEQ ID NO: 38567 - protein, 9 aa, synthetic construct
  source 1..9: note = Seed: VVGARGVGK (KRAS G12R)
IVGCRAVGT

SEQ ID NO: 38568 - protein, 9 aa, synthetic construct
  source 1..9: note = Seed: VVGARGVGK (KRAS G12R)
IVGCRAVGV

SEQ ID NO: 38569 - protein, 9 aa, synthetic construct
  source 1..9: note = Seed: VVGARGVGK (KRAS G12R)
IVGCRGVGA

SEQ ID NO: 38570 - protein, 9 aa, synthetic construct
  source 1..9: note = Seed: VVGARGVGK (KRAS G12R)
IVGCRGVGI

SEQ ID NO: 38571 - protein, 9 aa, synthetic construct
  source 1..9: note = Seed: VVGARGVGK (KRAS G12R)
IVGCRGVGL

SEQ ID NO: 38572 - protein, 9 aa, synthetic construct
  source 1..9: note = Seed: VVGARGVGK (KRAS G12R)
IVGCRGVGM

SEQ ID NO: 38573 - protein, 9 aa, synthetic construct
  source 1..9: note = Seed: VVGARGVGK (KRAS G12R)
IVGCRGVGV

SEQ ID NO: 38574 - protein, 9 aa, synthetic construct
  source 1..9: note = Seed: VVGARGVGK (KRAS G12R)
IVGCRIVGA

SEQ ID NO: 38575 - protein, 9 aa, synthetic construct
  source 1..9: note = Seed: VVGARGVGK (KRAS G12R)
IVGCRIVGR

SEQ ID NO: 38576 - protein, 9 aa, synthetic construct
  source 1..9: note = Seed: VVGARGVGK (KRAS G12R)
IVGCRIVGS

SEQ ID NO: 38577 - protein, 9 aa, synthetic construct
  source 1..9: note = Seed: VVGARGVGK (KRAS G12R)
IVGCRKVGF

SEQ ID NO: 38578 - protein, 9 aa, synthetic construct
  source 1..9: note = Seed: VVGARGVGK (KRAS G12R)
IVGCRKVGI

SEQ ID NO: 38579 - protein, 9 aa, synthetic construct
  source 1..9: note = Seed: VVGARGVGK (KRAS G12R)
IVGCRKVGK

SEQ ID NO: 38580 - protein, 9 aa, synthetic construct
  source 1..9: note = Seed: VVGARGVGK (KRAS G12R)
IVGCRKVGL

SEQ ID NO: 38581 - protein, 9 aa, synthetic construct
  source 1..9: note = Seed: VVGARGVGK (KRAS G12R)
IVGCRKVGM

SEQ ID NO: 38582 - protein, 9 aa, synthetic construct
  source 1..9: note = Seed: VVGARGVGK (KRAS G12R)
IVGCRKVGR

SEQ ID NO: 38583 - protein, 9 aa, synthetic construct
  source 1..9: note = Seed: VVGARGVGK (KRAS G12R)
IVGCRKVGY

SEQ ID NO: 38584 - protein, 9 aa, synthetic construct
  source 1..9: note = Seed: VVGARGVGK (KRAS G12R)
IVGCRPVGA

SEQ ID NO: 38585 - protein, 9 aa, synthetic construct
  source 1..9: note = Seed: VVGARGVGK (KRAS G12R)
IVGCRPVGI

SEQ ID NO: 38586 - protein, 9 aa, synthetic construct
  source 1..9: note = Seed: VVGARGVGK (KRAS G12R)
IVGCRPVGL

SEQ ID NO: 38587 - protein, 9 aa, synthetic construct
  source 1..9: note = Seed: VVGARGVGK (KRAS G12R)
IVGCRPVGV

SEQ ID NO: 38588 - protein, 9 aa, synthetic construct
  source 1..9: note = Seed: VVGARGVGK (KRAS G12R)
IVGCRRVGA

SEQ ID NO: 38589 - protein, 9 aa, synthetic construct
  source 1..9: note = Seed: VVGARGVGK (KRAS G12R)
IVGCRRVGF

SEQ ID NO: 38590 - protein, 9 aa, synthetic construct
  source 1..9: note = Seed: VVGARGVGK (KRAS G12R)
IVGCRRVGI

SEQ ID NO: 38591 - protein, 9 aa, synthetic construct
  source 1..9: note = Seed: VVGARGVGK (KRAS G12R)
IVGCRRVGK

SEQ ID NO: 38592 - protein, 9 aa, synthetic construct
  source 1..9: note = Seed: VVGARGVGK (KRAS G12R)
IVGCRRVGL

SEQ ID NO: 38593 - protein, 9 aa, synthetic construct
  source 1..9: note = Seed: VVGARGVGK (KRAS G12R)
IVGCRRVGM

SEQ ID NO: 38594 - protein, 9 aa, synthetic construct
  source 1..9: note = Seed: VVGARGVGK (KRAS G12R)
IVGCRRVGR

SEQ ID NO: 38595 - protein, 9 aa, synthetic construct
  source 1..9: note = Seed: VVGARGVGK (KRAS G12R)
IVGCRRVGV

SEQ ID NO: 38596 - protein, 9 aa, synthetic construct
  source 1..9: note = Seed: VVGARGVGK (KRAS G12R)
IVGCRRVGY

SEQ ID NO: 38597 - protein, 9 aa, synthetic construct
  source 1..9: note = Seed: VVGARGVGK (KRAS G12R)
IVGCRSVGA

SEQ ID NO: 38598 - protein, 9 aa, synthetic construct
  source 1..9: note = Seed: VVGARGVGK (KRAS G12R)
IVGCRSVGI

SEQ ID NO: 38599 - protein, 9 aa, synthetic construct
  source 1..9: note = Seed: VVGARGVGK (KRAS G12R)
IVGCRSVGL

SEQ ID NO: 38600 - protein, 9 aa, synthetic construct
  source 1..9: note = Seed: VVGARGVGK (KRAS G12R)
IVGCRSVGR

SEQ ID NO: 38601 - protein, 9 aa, synthetic construct
  source 1..9: note = Seed: VVGARGVGK (KRAS G12R)
IVGCRSVGS

SEQ ID NO: 38602 - protein, 9 aa, synthetic construct
  source 1..9: note = Seed: VVGARGVGK (KRAS G12R)
IVGCRSVGV

SEQ ID NO: 38603 - protein, 9 aa, synthetic construct
  source 1..9: note = Seed: VVGARGVGK (KRAS G12R)
IVGCRTVGA

SEQ ID NO: 38604 - protein, 9 aa, synthetic construct
  source 1..9: note = Seed: VVGARGVGK (KRAS G12R)
IVGCRVVGA

SEQ ID NO: 38605 - protein, 9 aa, synthetic construct
  source 1..9: note = Seed: VVGARGVGK (KRAS G12R)
IVGCRVVGR

SEQ ID NO: 38606 - protein, 9 aa, synthetic construct
  source 1..9: note = Seed: VVGARGVGK (KRAS G12R)
IVGCRVVGS

SEQ ID NO: 38607 - protein, 9 aa, synthetic construct
  source 1..9: note = Seed: VVGARGVGK (KRAS G12R)
IVGERAVGA

SEQ ID NO: 38608 - protein, 9 aa, synthetic construct
  source 1..9: note = Seed: VVGARGVGK (KRAS G12R)
IVGERAVGG

SEQ ID NO: 38609 - protein, 9 aa, synthetic construct
  source 1..9: note = Seed: VVGARGVGK (KRAS G12R)
IVGERAVGI

SEQ ID NO: 38610 - protein, 9 aa, synthetic construct
  source 1..9: note = Seed: VVGARGVGK (KRAS G12R)
IVGERAVGL

SEQ ID NO: 38611 - protein, 9 aa, synthetic construct
  source 1..9: note = Seed: VVGARGVGK (KRAS G12R)
IVGERAVGM

SEQ ID NO: 38612 - protein, 9 aa, synthetic construct
  source 1..9: note = Seed: VVGARGVGK (KRAS G12R)
IVGERAVGN

SEQ ID NO: 38613 - protein, 9 aa, synthetic construct
  source 1..9: note = Seed: VVGARGVGK (KRAS G12R)
IVGERAVGS

SEQ ID NO: 38614 - protein, 9 aa, synthetic construct
  source 1..9: note = Seed: VVGARGVGK (KRAS G12R)
IVGERAVGT

SEQ ID NO: 38615 - protein, 9 aa, synthetic construct
  source 1..9: note = Seed: VVGARGVGK (KRAS G12R)
IVGERAVGV

SEQ ID NO: 38616 - protein, 9 aa, synthetic construct
  source 1..9: note = Seed: VVGARGVGK (KRAS G12R)
IVGERGVGA

SEQ ID NO: 38617 - protein, 9 aa, synthetic construct
  source 1..9: note = Seed: VVGARGVGK (KRAS G12R)
IVGERGVGG

SEQ ID NO: 38618 - protein, 9 aa, synthetic construct
  source 1..9: note = Seed: VVGARGVGK (KRAS G12R)
IVGERGVGI

SEQ ID NO: 38619 - protein, 9 aa, synthetic construct
  source 1..9: note = Seed: VVGARGVGK (KRAS G12R)
IVGERGVGL

SEQ ID NO: 38620 - protein, 9 aa, synthetic construct
  source 1..9: note = Seed: VVGARGVGK (KRAS G12R)
IVGERGVGM

SEQ ID NO: 38621 - protein, 9 aa, synthetic construct
  source 1..9: note = Seed: VVGARGVGK (KRAS G12R)
IVGERGVGS

SEQ ID NO: 38622 - protein, 9 aa, synthetic construct
  source 1..9: note = Seed: VVGARGVGK (KRAS G12R)
IVGERGVGT

SEQ ID NO: 38623 - protein, 9 aa, synthetic construct
  source 1..9: note = Seed: VVGARGVGK (KRAS G12R)
IVGERGVGV

SEQ ID NO: 38624 - protein, 9 aa, synthetic construct
  source 1..9: note = Seed: VVGARGVGK (KRAS G12R)
IVGERKVGF

SEQ ID NO: 38625 - protein, 9 aa, synthetic construct
  source 1..9: note = Seed: VVGARGVGK (KRAS G12R)
IVGERKVGI

SEQ ID NO: 38626 - protein, 9 aa, synthetic construct
  source 1..9: note = Seed: VVGARGVGK (KRAS G12R)
IVGERKVGM

SEQ ID NO: 38627 - protein, 9 aa, synthetic construct
  source 1..9: note = Seed: VVGARGVGK (KRAS G12R)
IVGERKVGR

SEQ ID NO: 38628 - protein, 9 aa, synthetic construct
  source 1..9: note = Seed: VVGARGVGK (KRAS G12R)
IVGERKVGV

SEQ ID NO: 38629 - protein, 9 aa, synthetic construct
  source 1..9: note = Seed: VVGARGVGK (KRAS G12R)
IVGERKVGY

SEQ ID NO: 38630 - protein, 9 aa, synthetic construct
  source 1..9: note = Seed: VVGARGVGK (KRAS G12R)
IVGERNVGA

SEQ ID NO: 38631 - protein, 9 aa, synthetic construct
  source 1..9: note = Seed: VVGARGVGK (KRAS G12R)
IVGERNVGI

SEQ ID NO: 38632 - protein, 9 aa, synthetic construct
  source 1..9: note = Seed: VVGARGVGK (KRAS G12R)
IVGERNVGL

SEQ ID NO: 38633 - protein, 9 aa, synthetic construct
  source 1..9: note = Seed: VVGARGVGK (KRAS G12R)
IVGERNVGV

SEQ ID NO: 38634 - protein, 9 aa, synthetic construct
  source 1..9: note = Seed: VVGARGVGK (KRAS G12R)
IVGERPVGA

SEQ ID NO: 38635 - protein, 9 aa, synthetic construct
  source 1..9: note = Seed: VVGARGVGK (KRAS G12R)
IVGERPVGI

SEQ ID NO: 38636 - protein, 9 aa, synthetic construct
  source 1..9: note = Seed: VVGARGVGK (KRAS G12R)
IVGERPVGL

SEQ ID NO: 38637 - protein, 9 aa, synthetic construct
  source 1..9: note = Seed: VVGARGVGK (KRAS G12R)
IVGERPVGM

SEQ ID NO: 38638 - protein, 9 aa, synthetic construct
  source 1..9: note = Seed: VVGARGVGK (KRAS G12R)
IVGERPVGS

SEQ ID NO: 38639 - protein, 9 aa, synthetic construct
  source 1..9: note = Seed: VVGARGVGK (KRAS G12R)
IVGERPVGT

SEQ ID NO: 38640 - protein, 9 aa, synthetic construct
  source 1..9: note = Seed: VVGARGVGK (KRAS G12R)
IVGERPVGV

SEQ ID NO: 38641 - protein, 9 aa, synthetic construct
  source 1..9: note = Seed: VVGARGVGK (KRAS G12R)
IVGERRVGF

SEQ ID NO: 38642 - protein, 9 aa, synthetic construct
  source 1..9: note = Seed: VVGARGVGK (KRAS G12R)
IVGERRVGI

SEQ ID NO: 38643 - protein, 9 aa, synthetic construct
  source 1..9: note = Seed: VVGARGVGK (KRAS G12R)
IVGERRVGK

SEQ ID NO: 38644 - protein, 9 aa, synthetic construct
  source 1..9: note = Seed: VVGARGVGK (KRAS G12R)
IVGERRVGL

SEQ ID NO: 38645 - protein, 9 aa, synthetic construct
  source 1..9: note = Seed: VVGARGVGK (KRAS G12R)
IVGERRVGM

SEQ ID NO: 38646 - protein, 9 aa, synthetic construct
  source 1..9: note = Seed: VVGARGVGK (KRAS G12R)
IVGERRVGR

SEQ ID NO: 38647 - protein, 9 aa, synthetic construct
  source 1..9: note = Seed: VVGARGVGK (KRAS G12R)
IVGERRVGV

SEQ ID NO: 38648 - protein, 9 aa, synthetic construct
  source 1..9: note = Seed: VVGARGVGK (KRAS G12R)
IVGERRVGY

SEQ ID NO: 38649 - protein, 9 aa, synthetic construct
  source 1..9: note = Seed: VVGARGVGK (KRAS G12R)
IVGERSVGA

SEQ ID NO: 38650 - protein, 9 aa, synthetic construct
  source 1..9: note = Seed: VVGARGVGK (KRAS G12R)
IVGERSVGI

SEQ ID NO: 38651 - protein, 9 aa, synthetic construct
  source 1..9: note = Seed: VVGARGVGK (KRAS G12R)
IVGERSVGL

SEQ ID NO: 38652 - protein, 9 aa, synthetic construct
  source 1..9: note = Seed: VVGARGVGK (KRAS G12R)
IVGERSVGM

SEQ ID NO: 38653 - protein, 9 aa, synthetic construct
  source 1..9: note = Seed: VVGARGVGK (KRAS G12R)
IVGERSVGS

SEQ ID NO: 38654 - protein, 9 aa, synthetic construct
  source 1..9: note = Seed: VVGARGVGK (KRAS G12R)
IVGERSVGT

SEQ ID NO: 38655 - protein, 9 aa, synthetic construct
  source 1..9: note = Seed: VVGARGVGK (KRAS G12R)
IVGERSVGV

SEQ ID NO: 38656 - protein, 9 aa, synthetic construct
  source 1..9: note = Seed: VVGARGVGK (KRAS G12R)
IVGERTVGA

SEQ ID NO: 38657 - protein, 9 aa, synthetic construct
  source 1..9: note = Seed: VVGARGVGK (KRAS G12R)
IVGERTVGI

SEQ ID NO: 38658 - protein, 9 aa, synthetic construct
  source 1..9: note = Seed: VVGARGVGK (KRAS G12R)
IVGERTVGL

SEQ ID NO: 38659 - protein, 9 aa, synthetic construct
  source 1..9: note = Seed: VVGARGVGK (KRAS G12R)
IVGERTVGV

SEQ ID NO: 38660 - protein, 9 aa, synthetic construct
  source 1..9: note = Seed: VVGARGVGK (KRAS G12R)
IVGFRAVGA

SEQ ID NO: 38661 - protein, 9 aa, synthetic construct
  source 1..9: note = Seed: VVGARGVGK (KRAS G12R)
IVGFRAVGC

SEQ ID NO: 38662 - protein, 9 aa, synthetic construct
  source 1..9: note = Seed: VVGARGVGK (KRAS G12R)
IVGFRAVGF

SEQ ID NO: 38663 - protein, 9 aa, synthetic construct
  source 1..9: note = Seed: VVGARGVGK (KRAS G12R)
IVGFRAVGH

SEQ ID NO: 38664 - protein, 9 aa, synthetic construct
  source 1..9: note = Seed: VVGARGVGK (KRAS G12R)
IVGFRAVGI

SEQ ID NO: 38665 - protein, 9 aa, synthetic construct
  source 1..9: note = Seed: VVGARGVGK (KRAS G12R)
IVGFRAVGK

SEQ ID NO: 38666 - protein, 9 aa, synthetic construct
  source 1..9: note = Seed: VVGARGVGK (KRAS G12R)
IVGFRAVGL

SEQ ID NO: 38667 - protein, 9 aa, synthetic construct
  source 1..9: note = Seed: VVGARGVGK (KRAS G12R)
IVGFRAVGM

SEQ ID NO: 38668 - protein, 9 aa, synthetic construct
  source 1..9: note = Seed: VVGARGVGK (KRAS G12R)
IVGFRAVGR

SEQ ID NO: 38669 - protein, 9 aa, synthetic construct
  source 1..9: note = Seed: VVGARGVGK (KRAS G12R)
IVGFRAVGT

SEQ ID NO: 38670 - protein, 9 aa, synthetic construct
  source 1..9: note = Seed: VVGARGVGK (KRAS G12R)
IVGFRAVGV

SEQ ID NO: 38671 - protein, 9 aa, synthetic construct
  source 1..9: note = Seed: VVGARGVGK (KRAS G12R)
IVGFRAVGY

SEQ ID NO: 38672 - protein, 9 aa, synthetic construct
  source 1..9: note = Seed: VVGARGVGK (KRAS G12R)
IVGFRGVGA

SEQ ID NO: 38673 - protein, 9 aa, synthetic construct
  source 1..9: note = Seed: VVGARGVGK (KRAS G12R)
IVGFRGVGI

SEQ ID NO: 38674 - protein, 9 aa, synthetic construct
  source 1..9: note = Seed: VVGARGVGK (KRAS G12R)
IVGFRGVGK

SEQ ID NO: 38675 - protein, 9 aa, synthetic construct
  source 1..9: note = Seed: VVGARGVGK (KRAS G12R)
IVGFRGVGL

SEQ ID NO: 38676 - protein, 9 aa, synthetic construct
  source 1..9: note = Seed: VVGARGVGK (KRAS G12R)
IVGFRGVGM

SEQ ID NO: 38677 - protein, 9 aa, synthetic construct
  source 1..9: note = Seed: VVGARGVGK (KRAS G12R)
IVGFRGVGR

SEQ ID NO: 38678 - protein, 9 aa, synthetic construct
  source 1..9: note = Seed: VVGARGVGK (KRAS G12R)
IVGFRGVGV

SEQ ID NO: 38679 - protein, 9 aa, synthetic construct
  source 1..9: note = Seed: VVGARGVGK (KRAS G12R)
IVGFRHVGA

SEQ ID NO: 38680 - protein, 9 aa, synthetic construct
  source 1..9: note = Seed: VVGARGVGK (KRAS G12R)
IVGFRHVGH

SEQ ID NO: 38681 - protein, 9 aa, synthetic construct
  source 1..9: note = Seed: VVGARGVGK (KRAS G12R)
IVGFRHVGK

SEQ ID NO: 38682 - protein, 9 aa, synthetic construct
  source 1..9: note = Seed: VVGARGVGK (KRAS G12R)
IVGFRHVGR

SEQ ID NO: 38683 - protein, 9 aa, synthetic construct
  source 1..9: note = Seed: VVGARGVGK (KRAS G12R)
IVGFRHVGY

SEQ ID NO: 38684 - protein, 9 aa, synthetic construct
  source 1..9: note = Seed: VVGARGVGK (KRAS G12R)
IVGFRIVGR

SEQ ID NO: 38685 - protein, 9 aa, synthetic construct
  source 1..9: note = Seed: VVGARGVGK (KRAS G12R)
IVGFRKVGA

SEQ ID NO: 38686 - protein, 9 aa, synthetic construct
  source 1..9: note = Seed: VVGARGVGK (KRAS G12R)
IVGFRKVGF

SEQ ID NO: 38687 - protein, 9 aa, synthetic construct
  source 1..9: note = Seed: VVGARGVGK (KRAS G12R)
IVGFRKVGG

SEQ ID NO: 38688 - protein, 9 aa, synthetic construct
  source 1..9: note = Seed: VVGARGVGK (KRAS G12R)
IVGFRKVGH

SEQ ID NO: 38689 - protein, 9 aa, synthetic construct
  source 1..9: note = Seed: VVGARGVGK (KRAS G12R)
IVGFRKVGI

SEQ ID NO: 38690 - protein, 9 aa, synthetic construct
  source 1..9: note = Seed: VVGARGVGK (KRAS G12R)
IVGFRKVGK

SEQ ID NO: 38691 - protein, 9 aa, synthetic construct
  source 1..9: note = Seed: VVGARGVGK (KRAS G12R)
IVGFRKVGL

SEQ ID NO: 38692 - protein, 9 aa, synthetic construct
  source 1..9: note = Seed: VVGARGVGK (KRAS G12R)
IVGFRKVGM

SEQ ID NO: 38693 - protein, 9 aa, synthetic construct
  source 1..9: note = Seed: VVGARGVGK (KRAS G12R)
IVGFRKVGN

SEQ ID NO: 38694 - protein, 9 aa, synthetic construct
  source 1..9: note = Seed: VVGARGVGK (KRAS G12R)
IVGFRKVGP

SEQ ID NO: 38695 - protein, 9 aa, synthetic construct
  source 1..9: note = Seed: VVGARGVGK (KRAS G12R)
IVGFRKVGQ

SEQ ID NO: 38696 - protein, 9 aa, synthetic construct
  source 1..9: note = Seed: VVGARGVGK (KRAS G12R)
IVGFRKVGR

SEQ ID NO: 38697 - protein, 9 aa, synthetic construct
  source 1..9: note = Seed: VVGARGVGK (KRAS G12R)
IVGFRKVGS

SEQ ID NO: 38698 - protein, 9 aa, synthetic construct
  source 1..9: note = Seed: VVGARGVGK (KRAS G12R)
IVGFRKVGT

SEQ ID NO: 38699 - protein, 9 aa, synthetic construct
  source 1..9: note = Seed: VVGARGVGK (KRAS G12R)
IVGFRKVGV

SEQ ID NO: 38700 - protein, 9 aa, synthetic construct
  source 1..9: note = Seed: VVGARGVGK (KRAS G12R)
IVGFRKVGY

SEQ ID NO: 38701 - protein, 9 aa, synthetic construct
  source 1..9: note = Seed: VVGARGVGK (KRAS G12R)
IVGFRLVGR

SEQ ID NO: 38702 - protein, 9 aa, synthetic construct
  source 1..9: note = Seed: VVGARGVGK (KRAS G12R)
IVGFRNVGI

SEQ ID NO: 38703 - protein, 9 aa, synthetic construct
  source 1..9: note = Seed: VVGARGVGK (KRAS G12R)
IVGFRNVGK

SEQ ID NO: 38704 - protein, 9 aa, synthetic construct
  source 1..9: note = Seed: VVGARGVGK (KRAS G12R)
IVGFRNVGL

SEQ ID NO: 38705 - protein, 9 aa, synthetic construct
  source 1..9: note = Seed: VVGARGVGK (KRAS G12R)
IVGFRNVGM

SEQ ID NO: 38706 - protein, 9 aa, synthetic construct
  source 1..9: note = Seed: VVGARGVGK (KRAS G12R)
IVGFRNVGR

SEQ ID NO: 38707 - protein, 9 aa, synthetic construct
  source 1..9: note = Seed: VVGARGVGK (KRAS G12R)
IVGFRNVGV

SEQ ID NO: 38708 - protein, 9 aa, synthetic construct
  source 1..9: note = Seed: VVGARGVGK (KRAS G12R)
IVGFRNVGY

SEQ ID NO: 38709 - protein, 9 aa, synthetic construct
  source 1..9: note = Seed: VVGARGVGK (KRAS G12R)
IVGFRPVGF

SEQ ID NO: 38710 - protein, 9 aa, synthetic construct
  source 1..9: note = Seed: VVGARGVGK (KRAS G12R)
IVGFRPVGH

SEQ ID NO: 38711 - protein, 9 aa, synthetic construct
  source 1..9: note = Seed: VVGARGVGK (KRAS G12R)
IVGFRPVGI

SEQ ID NO: 38712 - protein, 9 aa, synthetic construct
  source 1..9: note = Seed: VVGARGVGK (KRAS G12R)
IVGFRPVGK

SEQ ID NO: 38713 - protein, 9 aa, synthetic construct
  source 1..9: note = Seed: VVGARGVGK (KRAS G12R)
IVGFRPVGL

SEQ ID NO: 38714 - protein, 9 aa, synthetic construct
  source 1..9: note = Seed: VVGARGVGK (KRAS G12R)
IVGFRPVGM

SEQ ID NO: 38715 - protein, 9 aa, synthetic construct
  source 1..9: note = Seed: VVGARGVGK (KRAS G12R)
IVGFRPVGR

SEQ ID NO: 38716 - protein, 9 aa, synthetic construct
  source 1..9: note = Seed: VVGARGVGK (KRAS G12R)
IVGFRPVGV

SEQ ID NO: 38717 - protein, 9 aa, synthetic construct
  source 1..9: note = Seed: VVGARGVGK (KRAS G12R)
IVGFRPVGY

SEQ ID NO: 38718 - protein, 9 aa, synthetic construct
  source 1..9: note = Seed: VVGARGVGK (KRAS G12R)
IVGFRQVGK

SEQ ID NO: 38719 - protein, 9 aa, synthetic construct
  source 1..9: note = Seed: VVGARGVGK (KRAS G12R)
IVGFRQVGR

SEQ ID NO: 38720 - protein, 9 aa, synthetic construct
  source 1..9: note = Seed: VVGARGVGK (KRAS G12R)
IVGFRRVGA

SEQ ID NO: 38721 - protein, 9 aa, synthetic construct
  source 1..9: note = Seed: VVGARGVGK (KRAS G12R)
IVGFRRVGF

SEQ ID NO: 38722 - protein, 9 aa, synthetic construct
  source 1..9: note = Seed: VVGARGVGK (KRAS G12R)
IVGFRRVGG

SEQ ID NO: 38723 - protein, 9 aa, synthetic construct
  source 1..9: note = Seed: VVGARGVGK (KRAS G12R)
IVGFRRVGH

SEQ ID NO: 38724 - protein, 9 aa, synthetic construct
  source 1..9: note = Seed: VVGARGVGK (KRAS G12R)
IVGFRRVGI

SEQ ID NO: 38725 - protein, 9 aa, synthetic construct
  source 1..9: note = Seed: VVGARGVGK (KRAS G12R)
IVGFRRVGK

SEQ ID NO: 38726 - protein, 9 aa, synthetic construct
  source 1..9: note = Seed: VVGARGVGK (KRAS G12R)
IVGFRRVGL

SEQ ID NO: 38727 - protein, 9 aa, synthetic construct
  source 1..9: note = Seed: VVGARGVGK (KRAS G12R)
IVGFRRVGM

SEQ ID NO: 38728 - protein, 9 aa, synthetic construct
  source 1..9: note = Seed: VVGARGVGK (KRAS G12R)
IVGFRRVGN

SEQ ID NO: 38729 - protein, 9 aa, synthetic construct
  source 1..9: note = Seed: VVGARGVGK (KRAS G12R)
IVGFRRVGP

SEQ ID NO: 38730 - protein, 9 aa, synthetic construct
  source 1..9: note = Seed: VVGARGVGK (KRAS G12R)
IVGFRRVGQ

SEQ ID NO: 38731 - protein, 9 aa, synthetic construct
  source 1..9: note = Seed: VVGARGVGK (KRAS G12R)
IVGFRRVGR

SEQ ID NO: 38732 - protein, 9 aa, synthetic construct
  source 1..9: note = Seed: VVGARGVGK (KRAS G12R)
IVGFRRVGS

SEQ ID NO: 38733 - protein, 9 aa, synthetic construct
  source 1..9: note = Seed: VVGARGVGK (KRAS G12R)
IVGFRRVGT

SEQ ID NO: 38734 - protein, 9 aa, synthetic construct
  source 1..9: note = Seed: VVGARGVGK (KRAS G12R)
IVGFRRVGV

SEQ ID NO: 38735 - protein, 9 aa, synthetic construct
  source 1..9: note = Seed: VVGARGVGK (KRAS G12R)
IVGFRRVGY

SEQ ID NO: 38736 - protein, 9 aa, synthetic construct
  source 1..9: note = Seed: VVGARGVGK (KRAS G12R)
IVGFRSVGF

SEQ ID NO: 38737 - protein, 9 aa, synthetic construct
  source 1..9: note = Seed: VVGARGVGK (KRAS G12R)
IVGFRSVGH

SEQ ID NO: 38738 - protein, 9 aa, synthetic construct
  source 1..9: note = Seed: VVGARGVGK (KRAS G12R)
IVGFRSVGI

SEQ ID NO: 38739 - protein, 9 aa, synthetic construct
  source 1..9: note = Seed: VVGARGVGK (KRAS G12R)
IVGFRSVGK

SEQ ID NO: 38740 - protein, 9 aa, synthetic construct
  source 1..9: note = Seed: VVGARGVGK (KRAS G12R)
IVGFRSVGL

SEQ ID NO: 38741 - protein, 9 aa, synthetic construct
  source 1..9: note = Seed: VVGARGVGK (KRAS G12R)
IVGFRSVGM

SEQ ID NO: 38742 - protein, 9 aa, synthetic construct
  source 1..9: note = Seed: VVGARGVGK (KRAS G12R)
IVGFRSVGR

SEQ ID NO: 38743 - protein, 9 aa, synthetic construct
  source 1..9: note = Seed: VVGARGVGK (KRAS G12R)
IVGFRSVGY

SEQ ID NO: 38744 - protein, 9 aa, synthetic construct
  source 1..9: note = Seed: VVGARGVGK (KRAS G12R)
IVGFRTVGI

SEQ ID NO: 38745 - protein, 9 aa, synthetic construct
  source 1..9: note = Seed: VVGARGVGK (KRAS G12R)
IVGFRTVGK

SEQ ID NO: 38746 - protein, 9 aa, synthetic construct
  source 1..9: note = Seed: VVGARGVGK (KRAS G12R)
IVGFRTVGL

SEQ ID NO: 38747 - protein, 9 aa, synthetic construct
  source 1..9: note = Seed: VVGARGVGK (KRAS G12R)
IVGFRTVGR

SEQ ID NO: 38748 - protein, 9 aa, synthetic construct
  source 1..9: note = Seed: VVGARGVGK (KRAS G12R)
IVGFRTVGY

SEQ ID NO: 38749 - protein, 9 aa, synthetic construct
  source 1..9: note = Seed: VVGARGVGK (KRAS G12R)
IVGFRVVGR

SEQ ID NO: 38750 - protein, 9 aa, synthetic construct
  source 1..9: note = Seed: VVGARGVGK (KRAS G12R)
IVGGRAVGA

SEQ ID NO: 38751 - protein, 9 aa, synthetic construct
  source 1..9: note = Seed: VVGARGVGK (KRAS G12R)
IVGGRAVGC

SEQ ID NO: 38752 - protein, 9 aa, synthetic construct
  source 1..9: note = Seed: VVGARGVGK (KRAS G12R)
IVGGRAVGD

SEQ ID NO: 38753 - protein, 9 aa, synthetic construct
  source 1..9: note = Seed: VVGARGVGK (KRAS G12R)
IVGGRAVGE

SEQ ID NO: 38754 - protein, 9 aa, synthetic construct
  source 1..9: note = Seed: VVGARGVGK (KRAS G12R)
IVGGRAVGF

SEQ ID NO: 38755 - protein, 9 aa, synthetic construct
  source 1..9: note = Seed: VVGARGVGK (KRAS G12R)
IVGGRAVGG

SEQ ID NO: 38756 - protein, 9 aa, synthetic construct
  source 1..9: note = Seed: VVGARGVGK (KRAS G12R)
IVGGRAVGH

SEQ ID NO: 38757 - protein, 9 aa, synthetic construct
  source 1..9: note = Seed: VVGARGVGK (KRAS G12R)
IVGGRAVGI

SEQ ID NO: 38758 - protein, 9 aa, synthetic construct
  source 1..9: note = Seed: VVGARGVGK (KRAS G12R)
IVGGRAVGK

SEQ ID NO: 38759 - protein, 9 aa, synthetic construct
  source 1..9: note = Seed: VVGARGVGK (KRAS G12R)
IVGGRAVGL

SEQ ID NO: 38760 - protein, 9 aa, synthetic construct
  source 1..9: note = Seed: VVGARGVGK (KRAS G12R)
IVGGRAVGM

SEQ ID NO: 38761 - protein, 9 aa, synthetic construct
  source 1..9: note = Seed: VVGARGVGK (KRAS G12R)
IVGGRAVGN

SEQ ID NO: 38762 - protein, 9 aa, synthetic construct
  source 1..9: note = Seed: VVGARGVGK (KRAS G12R)
IVGGRAVGP

SEQ ID NO: 38763 - protein, 9 aa, synthetic construct
  source 1..9: note = Seed: VVGARGVGK (KRAS G12R)
IVGGRAVGQ

SEQ ID NO: 38764 - protein, 9 aa, synthetic construct
  source 1..9: note = Seed: VVGARGVGK (KRAS G12R)
IVGGRAVGR

SEQ ID NO: 38765 - protein, 9 aa, synthetic construct
  source 1..9: note = Seed: VVGARGVGK (KRAS G12R)
IVGGRAVGS

SEQ ID NO: 38766 - protein, 9 aa, synthetic construct
  source 1..9: note = Seed: VVGARGVGK (KRAS G12R)
IVGGRAVGT

SEQ ID NO: 38767 - protein, 9 aa, synthetic construct
  source 1..9: note = Seed: VVGARGVGK (KRAS G12R)
IVGGRAVGV

SEQ ID NO: 38768 - protein, 9 aa, synthetic construct
  source 1..9: note = Seed: VVGARGVGK (KRAS G12R)
IVGGRAVGW

SEQ ID NO: 38769 - protein, 9 aa, synthetic construct
  source 1..9: note = Seed: VVGARGVGK (KRAS G12R)
IVGGRAVGY

SEQ ID NO: 38770 - protein, 9 aa, synthetic construct
  source 1..9: note = Seed: VVGARGVGK (KRAS G12R)
IVGGRCVGA

SEQ ID NO: 38771 - protein, 9 aa, synthetic construct
  source 1..9: note = Seed: VVGARGVGK (KRAS G12R)
IVGGRCVGS

SEQ ID NO: 38772 - protein, 9 aa, synthetic construct
  source 1..9: note = Seed: VVGARGVGK (KRAS G12R)
IVGGRCVGT

SEQ ID NO: 38773 - protein, 9 aa, synthetic construct
  source 1..9: note = Seed: VVGARGVGK (KRAS G12R)
IVGGRCVGV

SEQ ID NO: 38774 - protein, 9 aa, synthetic construct
  source 1..9: note = Seed: VVGARGVGK (KRAS G12R)
IVGGRGVGA

SEQ ID NO: 38775 - protein, 9 aa, synthetic construct
  source 1..9: note = Seed: VVGARGVGK (KRAS G12R)
IVGGRGVGG

SEQ ID NO: 38776 - protein, 9 aa, synthetic construct
  source 1..9: note = Seed: VVGARGVGK (KRAS G12R)
IVGGRGVGI

SEQ ID NO: 38777 - protein, 9 aa, synthetic construct
  source 1..9: note = Seed: VVGARGVGK (KRAS G12R)
IVGGRGVGL

SEQ ID NO: 38778 - protein, 9 aa, synthetic construct
  source 1..9: note = Seed: VVGARGVGK (KRAS G12R)
IVGGRGVGM

SEQ ID NO: 38779 - protein, 9 aa, synthetic construct
  source 1..9: note = Seed: VVGARGVGK (KRAS G12R)
IVGGRGVGS

SEQ ID NO: 38780 - protein, 9 aa, synthetic construct
  source 1..9: note = Seed: VVGARGVGK (KRAS G12R)
IVGGRGVGT

SEQ ID NO: 38781 - protein, 9 aa, synthetic construct
  source 1..9: note = Seed: VVGARGVGK (KRAS G12R)
IVGGRGVGV

SEQ ID NO: 38782 - protein, 9 aa, synthetic construct
  source 1..9: note = Seed: VVGARGVGK (KRAS G12R)
IVGGRHVGA

SEQ ID NO: 38783 - protein, 9 aa, synthetic construct
  source 1..9: note = Seed: VVGARGVGK (KRAS G12R)
IVGGRHVGL

SEQ ID NO: 38784 - protein, 9 aa, synthetic construct
  source 1..9: note = Seed: VVGARGVGK (KRAS G12R)
IVGGRHVGV

SEQ ID NO: 38785 - protein, 9 aa, synthetic construct
  source 1..9: note = Seed: VVGARGVGK (KRAS G12R)
IVGGRIVGA

SEQ ID NO: 38786 - protein, 9 aa, synthetic construct
  source 1..9: note = Seed: VVGARGVGK (KRAS G12R)
IVGGRIVGC

SEQ ID NO: 38787 - protein, 9 aa, synthetic construct
  source 1..9: note = Seed: VVGARGVGK (KRAS G12R)
IVGGRIVGD

SEQ ID NO: 38788 - protein, 9 aa, synthetic construct
  source 1..9: note = Seed: VVGARGVGK (KRAS G12R)
IVGGRIVGE

SEQ ID NO: 38789 - protein, 9 aa, synthetic construct
  source 1..9: note = Seed: VVGARGVGK (KRAS G12R)
IVGGRIVGF

SEQ ID NO: 38790 - protein, 9 aa, synthetic construct
  source 1..9: note = Seed: VVGARGVGK (KRAS G12R)
IVGGRIVGG

SEQ ID NO: 38791 - protein, 9 aa, synthetic construct
  source 1..9: note = Seed: VVGARGVGK (KRAS G12R)
IVGGRIVGH

SEQ ID NO: 38792 - protein, 9 aa, synthetic construct
  source 1..9: note = Seed: VVGARGVGK (KRAS G12R)
IVGGRIVGI

SEQ ID NO: 38793 - protein, 9 aa, synthetic construct
  source 1..9: note = Seed: VVGARGVGK (KRAS G12R)
IVGGRIVGL

SEQ ID NO: 38794 - protein, 9 aa, synthetic construct
  source 1..9: note = Seed: VVGARGVGK (KRAS G12R)
IVGGRIVGM

SEQ ID NO: 38795 - protein, 9 aa, synthetic construct
  source 1..9: note = Seed: VVGARGVGK (KRAS G12R)
IVGGRIVGN

SEQ ID NO: 38796 - protein, 9 aa, synthetic construct
  source 1..9: note = Seed: VVGARGVGK (KRAS G12R)
IVGGRIVGP

SEQ ID NO: 38797 - protein, 9 aa, synthetic construct
  source 1..9: note = Seed: VVGARGVGK (KRAS G12R)
IVGGRIVGQ

SEQ ID NO: 38798 - protein, 9 aa, synthetic construct
  source 1..9: note = Seed: VVGARGVGK (KRAS G12R)
IVGGRIVGS

SEQ ID NO: 38799 - protein, 9 aa, synthetic construct
  source 1..9: note = Seed: VVGARGVGK (KRAS G12R)
IVGGRIVGT

SEQ ID NO: 38800 - protein, 9 aa, synthetic construct
  source 1..9: note = Seed: VVGARGVGK (KRAS G12R)
IVGGRIVGV

SEQ ID NO: 38801 - protein, 9 aa, synthetic construct
  source 1..9: note = Seed: VVGARGVGK (KRAS G12R)
IVGGRIVGY

SEQ ID NO: 38802 - protein, 9 aa, synthetic construct
  source 1..9: note = Seed: VVGARGVGK (KRAS G12R)
IVGGRKVGA

SEQ ID NO: 38803 - protein, 9 aa, synthetic construct
  source 1..9: note = Seed: VVGARGVGK (KRAS G12R)
IVGGRKVGR

SEQ ID NO: 38804 - protein, 9 aa, synthetic construct
  source 1..9: note = Seed: VVGARGVGK (KRAS G12R)
IVGGRKVGV

SEQ ID NO: 38805 - protein, 9 aa, synthetic construct
  source 1..9: note = Seed: VVGARGVGK (KRAS G12R)
IVGGRKVGY

SEQ ID NO: 38806 - protein, 9 aa, synthetic construct
  source 1..9: note = Seed: VVGARGVGK (KRAS G12R)
IVGGRLVGA

SEQ ID NO: 38807 - protein, 9 aa, synthetic construct
  source 1..9: note = Seed: VVGARGVGK (KRAS G12R)
IVGGRLVGG

SEQ ID NO: 38808 - protein, 9 aa, synthetic construct
  source 1..9: note = Seed: VVGARGVGK (KRAS G12R)
IVGGRLVGI

SEQ ID NO: 38809 - protein, 9 aa, synthetic construct
  source 1..9: note = Seed: VVGARGVGK (KRAS G12R)
IVGGRLVGL

SEQ ID NO: 38810 - protein, 9 aa, synthetic construct
  source 1..9: note = Seed: VVGARGVGK (KRAS G12R)
IVGGRLVGM

SEQ ID NO: 38811 - protein, 9 aa, synthetic construct
  source 1..9: note = Seed: VVGARGVGK (KRAS G12R)
IVGGRLVGN

SEQ ID NO: 38812 - protein, 9 aa, synthetic construct
  source 1..9: note = Seed: VVGARGVGK (KRAS G12R)
IVGGRLVGS

SEQ ID NO: 38813 - protein, 9 aa, synthetic construct
  source 1..9: note = Seed: VVGARGVGK (KRAS G12R)
IVGGRLVGT

SEQ ID NO: 38814 - protein, 9 aa, synthetic construct
  source 1..9: note = Seed: VVGARGVGK (KRAS G12R)
IVGGRLVGV

SEQ ID NO: 38815 - protein, 9 aa, synthetic construct
  source 1..9: note = Seed: VVGARGVGK (KRAS G12R)
IVGGRMVGA

SEQ ID NO: 38816 - protein, 9 aa, synthetic construct
  source 1..9: note = Seed: VVGARGVGK (KRAS G12R)
IVGGRMVGI

SEQ ID NO: 38817 - protein, 9 aa, synthetic construct
  source 1..9: note = Seed: VVGARGVGK (KRAS G12R)
IVGGRMVGL

SEQ ID NO: 38818 - protein, 9 aa, synthetic construct
  source 1..9: note = Seed: VVGARGVGK (KRAS G12R)
IVGGRMVGM

SEQ ID NO: 38819 - protein, 9 aa, synthetic construct
  source 1..9: note = Seed: VVGARGVGK (KRAS G12R)
IVGGRMVGS

SEQ ID NO: 38820 - protein, 9 aa, synthetic construct
  source 1..9: note = Seed: VVGARGVGK (KRAS G12R)
IVGGRMVGT

SEQ ID NO: 38821 - protein, 9 aa, synthetic construct
  source 1..9: note = Seed: VVGARGVGK (KRAS G12R)
IVGGRMVGV

SEQ ID NO: 38822 - protein, 9 aa, synthetic construct
  source 1..9: note = Seed: VVGARGVGK (KRAS G12R)
IVGGRNVGA

SEQ ID NO: 38823 - protein, 9 aa, synthetic construct
  source 1..9: note = Seed: VVGARGVGK (KRAS G12R)
IVGGRNVGI

SEQ ID NO: 38824 - protein, 9 aa, synthetic construct
  source 1..9: note = Seed: VVGARGVGK (KRAS G12R)
IVGGRNVGL

SEQ ID NO: 38825 - protein, 9 aa, synthetic construct
  source 1..9: note = Seed: VVGARGVGK (KRAS G12R)
IVGGRNVGV

SEQ ID NO: 38826 - protein, 9 aa, synthetic construct
  source 1..9: note = Seed: VVGARGVGK (KRAS G12R)
IVGGRPVGA

SEQ ID NO: 38827 - protein, 9 aa, synthetic construct
  source 1..9: note = Seed: VVGARGVGK (KRAS G12R)
IVGGRPVGC

SEQ ID NO: 38828 - protein, 9 aa, synthetic construct
  source 1..9: note = Seed: VVGARGVGK (KRAS G12R)
IVGGRPVGD

SEQ ID NO: 38829 - protein, 9 aa, synthetic construct
  source 1..9: note = Seed: VVGARGVGK (KRAS G12R)
IVGGRPVGE

SEQ ID NO: 38830 - protein, 9 aa, synthetic construct
  source 1..9: note = Seed: VVGARGVGK (KRAS G12R)
IVGGRPVGF

SEQ ID NO: 38831 - protein, 9 aa, synthetic construct
  source 1..9: note = Seed: VVGARGVGK (KRAS G12R)
IVGGRPVGG

SEQ ID NO: 38832 - protein, 9 aa, synthetic construct
  source 1..9: note = Seed: VVGARGVGK (KRAS G12R)
IVGGRPVGH

SEQ ID NO: 38833 - protein, 9 aa, synthetic construct
  source 1..9: note = Seed: VVGARGVGK (KRAS G12R)
IVGGRPVGI

SEQ ID NO: 38834 - protein, 9 aa, synthetic construct
  source 1..9: note = Seed: VVGARGVGK (KRAS G12R)
IVGGRPVGK

SEQ ID NO: 38835 - protein, 9 aa, synthetic construct
  source 1..9: note = Seed: VVGARGVGK (KRAS G12R)
IVGGRPVGL

SEQ ID NO: 38836 - protein, 9 aa, synthetic construct
  source 1..9: note = Seed: VVGARGVGK (KRAS G12R)
IVGGRPVGM

SEQ ID NO: 38837 - protein, 9 aa, synthetic construct
  source 1..9: note = Seed: VVGARGVGK (KRAS G12R)
IVGGRPVGN

SEQ ID NO: 38838 - protein, 9 aa, synthetic construct
  source 1..9: note = Seed: VVGARGVGK (KRAS G12R)
IVGGRPVGP

SEQ ID NO: 38839 - protein, 9 aa, synthetic construct
  source 1..9: note = Seed: VVGARGVGK (KRAS G12R)
IVGGRPVGQ

SEQ ID NO: 38840 - protein, 9 aa, synthetic construct
  source 1..9: note = Seed: VVGARGVGK (KRAS G12R)
IVGGRPVGR

SEQ ID NO: 38841 - protein, 9 aa, synthetic construct
  source 1..9: note = Seed: VVGARGVGK (KRAS G12R)
IVGGRPVGS

SEQ ID NO: 38842 - protein, 9 aa, synthetic construct
  source 1..9: note = Seed: VVGARGVGK (KRAS G12R)
IVGGRPVGT

SEQ ID NO: 38843 - protein, 9 aa, synthetic construct
  source 1..9: note = Seed: VVGARGVGK (KRAS G12R)
IVGGRPVGV

SEQ ID NO: 38844 - protein, 9 aa, synthetic construct
  source 1..9: note = Seed: VVGARGVGK (KRAS G12R)
IVGGRPVGW

SEQ ID NO: 38845 - protein, 9 aa, synthetic construct
  source 1..9: note = Seed: VVGARGVGK (KRAS G12R)
IVGGRPVGY

SEQ ID NO: 38846 - protein, 9 aa, synthetic construct
  source 1..9: note = Seed: VVGARGVGK (KRAS G12R)
IVGGRRVGA

SEQ ID NO: 38847 - protein, 9 aa, synthetic construct
  source 1..9: note = Seed: VVGARGVGK (KRAS G12R)
IVGGRRVGF

SEQ ID NO: 38848 - protein, 9 aa, synthetic construct
  source 1..9: note = Seed: VVGARGVGK (KRAS G12R)
IVGGRRVGI

SEQ ID NO: 38849 - protein, 9 aa, synthetic construct
  source 1..9: note = Seed: VVGARGVGK (KRAS G12R)
IVGGRRVGK

SEQ ID NO: 38850 - protein, 9 aa, synthetic construct
  source 1..9: note = Seed: VVGARGVGK (KRAS G12R)
IVGGRRVGL

SEQ ID NO: 38851 - protein, 9 aa, synthetic construct
  source 1..9: note = Seed: VVGARGVGK (KRAS G12R)
IVGGRRVGM

SEQ ID NO: 38852 - protein, 9 aa, synthetic construct
  source 1..9: note = Seed: VVGARGVGK (KRAS G12R)
IVGGRRVGR

SEQ ID NO: 38853 - protein, 9 aa, synthetic construct
  source 1..9: note = Seed: VVGARGVGK (KRAS G12R)
IVGGRRVGV

SEQ ID NO: 38854 - protein, 9 aa, synthetic construct
  source 1..9: note = Seed: VVGARGVGK (KRAS G12R)
IVGGRRVGY

SEQ ID NO: 38855 - protein, 9 aa, synthetic construct
  source 1..9: note = Seed: VVGARGVGK (KRAS G12R)
IVGGRSVGA

SEQ ID NO: 38856 - protein, 9 aa, synthetic construct
  source 1..9: note = Seed: VVGARGVGK (KRAS G12R)
IVGGRSVGC

SEQ ID NO: 38857 - protein, 9 aa, synthetic construct
  source 1..9: note = Seed: VVGARGVGK (KRAS G12R)
IVGGRSVGG

SEQ ID NO: 38858 - protein, 9 aa, synthetic construct
  source 1..9: note = Seed: VVGARGVGK (KRAS G12R)
IVGGRSVGI

SEQ ID NO: 38859 - protein, 9 aa, synthetic construct
  source 1..9: note = Seed: VVGARGVGK (KRAS G12R)
IVGGRSVGL

SEQ ID NO: 38860 - protein, 9 aa, synthetic construct
  source 1..9: note = Seed: VVGARGVGK (KRAS G12R)
IVGGRSVGM

SEQ ID NO: 38861 - protein, 9 aa, synthetic construct
  source 1..9: note = Seed: VVGARGVGK (KRAS G12R)
IVGGRSVGN

SEQ ID NO: 38862 - protein, 9 aa, synthetic construct
  source 1..9: note = Seed: VVGARGVGK (KRAS G12R)
IVGGRSVGS

SEQ ID NO: 38863 - protein, 9 aa, synthetic construct
  source 1..9: note = Seed: VVGARGVGK (KRAS G12R)
IVGGRSVGT

SEQ ID NO: 38864 - protein, 9 aa, synthetic construct
  source 1..9: note = Seed: VVGARGVGK (KRAS G12R)
IVGGRSVGV

SEQ ID NO: 38865 - protein, 9 aa, synthetic construct
  source 1..9: note = Seed: VVGARGVGK (KRAS G12R)
IVGGRTVGA

SEQ ID NO: 38866 - protein, 9 aa, synthetic construct
  source 1..9: note = Seed: VVGARGVGK (KRAS G12R)
IVGGRTVGG

SEQ ID NO: 38867 - protein, 9 aa, synthetic construct
  source 1..9: note = Seed: VVGARGVGK (KRAS G12R)
IVGGRTVGI

SEQ ID NO: 38868 - protein, 9 aa, synthetic construct
  source 1..9: note = Seed: VVGARGVGK (KRAS G12R)
IVGGRTVGL

SEQ ID NO: 38869 - protein, 9 aa, synthetic construct
  source 1..9: note = Seed: VVGARGVGK (KRAS G12R)
IVGGRTVGM

SEQ ID NO: 38870 - protein, 9 aa, synthetic construct
  source 1..9: note = Seed: VVGARGVGK (KRAS G12R)
IVGGRTVGN

SEQ ID NO: 38871 - protein, 9 aa, synthetic construct
  source 1..9: note = Seed: VVGARGVGK (KRAS G12R)
IVGGRTVGS

SEQ ID NO: 38872 - protein, 9 aa, synthetic construct
  source 1..9: note = Seed: VVGARGVGK (KRAS G12R)
IVGGRTVGT

SEQ ID NO: 38873 - protein, 9 aa, synthetic construct
  source 1..9: note = Seed: VVGARGVGK (KRAS G12R)
IVGGRTVGV

SEQ ID NO: 38874 - protein, 9 aa, synthetic construct
  source 1..9: note = Seed: VVGARGVGK (KRAS G12R)
IVGGRVVGA

SEQ ID NO: 38875 - protein, 9 aa, synthetic construct
  source 1..9: note = Seed: VVGARGVGK (KRAS G12R)
IVGGRVVGC

SEQ ID NO: 38876 - protein, 9 aa, synthetic construct
  source 1..9: note = Seed: VVGARGVGK (KRAS G12R)
IVGGRVVGD

SEQ ID NO: 38877 - protein, 9 aa, synthetic construct
  source 1..9: note = Seed: VVGARGVGK (KRAS G12R)
IVGGRVVGE

SEQ ID NO: 38878 - protein, 9 aa, synthetic construct
  source 1..9: note = Seed: VVGARGVGK (KRAS G12R)
IVGGRVVGF

SEQ ID NO: 38879 - protein, 9 aa, synthetic construct
  source 1..9: note = Seed: VVGARGVGK (KRAS G12R)
IVGGRVVGG

SEQ ID NO: 38880 - protein, 9 aa, synthetic construct
  source 1..9: note = Seed: VVGARGVGK (KRAS G12R)
IVGGRVVGH

SEQ ID NO: 38881 - protein, 9 aa, synthetic construct
  source 1..9: note = Seed: VVGARGVGK (KRAS G12R)
IVGGRVVGI

SEQ ID NO: 38882 - protein, 9 aa, synthetic construct
  source 1..9: note = Seed: VVGARGVGK (KRAS G12R)
IVGGRVVGL

SEQ ID NO: 38883 - protein, 9 aa, synthetic construct
  source 1..9: note = Seed: VVGARGVGK (KRAS G12R)
IVGGRVVGM

SEQ ID NO: 38884 - protein, 9 aa, synthetic construct
  source 1..9: note = Seed: VVGARGVGK (KRAS G12R)
IVGGRVVGN

SEQ ID NO: 38885 - protein, 9 aa, synthetic construct
  source 1..9: note = Seed: VVGARGVGK (KRAS G12R)
IVGGRVVGP

SEQ ID NO: 38886 - protein, 9 aa, synthetic construct
  source 1..9: note = Seed: VVGARGVGK (KRAS G12R)
IVGGRVVGQ

SEQ ID NO: 38887 - protein, 9 aa, synthetic construct
  source 1..9: note = Seed: VVGARGVGK (KRAS G12R)
IVGGRVVGS

SEQ ID NO: 38888 - protein, 9 aa, synthetic construct
  source 1..9: note = Seed: VVGARGVGK (KRAS G12R)
IVGGRVVGT

SEQ ID NO: 38889 - protein, 9 aa, synthetic construct
  source 1..9: note = Seed: VVGARGVGK (KRAS G12R)
IVGGRVVGV

SEQ ID NO: 38890 - protein, 9 aa, synthetic construct
  source 1..9: note = Seed: VVGARGVGK (KRAS G12R)
IVGGRVVGY

SEQ ID NO: 38891 - protein, 9 aa, synthetic construct
  source 1..9: note = Seed: VVGARGVGK (KRAS G12R)
IVGHRAVGA

SEQ ID NO: 38892 - protein, 9 aa, synthetic construct
  source 1..9: note = Seed: VVGARGVGK (KRAS G12R)
IVGHRAVGF

SEQ ID NO: 38893 - protein, 9 aa, synthetic construct
  source 1..9: note = Seed: VVGARGVGK (KRAS G12R)
IVGHRAVGH

SEQ ID NO: 38894 - protein, 9 aa, synthetic construct
  source 1..9: note = Seed: VVGARGVGK (KRAS G12R)
IVGHRAVGI

SEQ ID NO: 38895 - protein, 9 aa, synthetic construct
  source 1..9: note = Seed: VVGARGVGK (KRAS G12R)
IVGHRAVGK

SEQ ID NO: 38896 - protein, 9 aa, synthetic construct
  source 1..9: note = Seed: VVGARGVGK (KRAS G12R)
IVGHRAVGL

SEQ ID NO: 38897 - protein, 9 aa, synthetic construct
  source 1..9: note = Seed: VVGARGVGK (KRAS G12R)
IVGHRAVGM

SEQ ID NO: 38898 - protein, 9 aa, synthetic construct
  source 1..9: note = Seed: VVGARGVGK (KRAS G12R)
IVGHRAVGQ

SEQ ID NO: 38899 - protein, 9 aa, synthetic construct
  source 1..9: note = Seed: VVGARGVGK (KRAS G12R)
IVGHRAVGR

SEQ ID NO: 38900 - protein, 9 aa, synthetic construct
  source 1..9: note = Seed: VVGARGVGK (KRAS G12R)
IVGHRAVGS

SEQ ID NO: 38901 - protein, 9 aa, synthetic construct
  source 1..9: note = Seed: VVGARGVGK (KRAS G12R)
IVGHRAVGT

SEQ ID NO: 38902 - protein, 9 aa, synthetic construct
  source 1..9: note = Seed: VVGARGVGK (KRAS G12R)
IVGHRAVGV

SEQ ID NO: 38903 - protein, 9 aa, synthetic construct
  source 1..9: note = Seed: VVGARGVGK (KRAS G12R)
IVGHRAVGW

SEQ ID NO: 38904 - protein, 9 aa, synthetic construct
  source 1..9: note = Seed: VVGARGVGK (KRAS G12R)
IVGHRAVGY

SEQ ID NO: 38905 - protein, 9 aa, synthetic construct
  source 1..9: note = Seed: VVGARGVGK (KRAS G12R)
IVGHRCVGR

SEQ ID NO: 38906 - protein, 9 aa, synthetic construct
  source 1..9: note = Seed: VVGARGVGK (KRAS G12R)
IVGHREVGR

SEQ ID NO: 38907 - protein, 9 aa, synthetic construct
  source 1..9: note = Seed: VVGARGVGK (KRAS G12R)
IVGHRGVGA

SEQ ID NO: 38908 - protein, 9 aa, synthetic construct
  source 1..9: note = Seed: VVGARGVGK (KRAS G12R)
IVGHRGVGF

SEQ ID NO: 38909 - protein, 9 aa, synthetic construct
  source 1..9: note = Seed: VVGARGVGK (KRAS G12R)
IVGHRGVGI

SEQ ID NO: 38910 - protein, 9 aa, synthetic construct
  source 1..9: note = Seed: VVGARGVGK (KRAS G12R)
IVGHRGVGK

SEQ ID NO: 38911 - protein, 9 aa, synthetic construct
  source 1..9: note = Seed: VVGARGVGK (KRAS G12R)
IVGHRGVGL

SEQ ID NO: 38912 - protein, 9 aa, synthetic construct
  source 1..9: note = Seed: VVGARGVGK (KRAS G12R)
IVGHRGVGM

SEQ ID NO: 38913 - protein, 9 aa, synthetic construct
  source 1..9: note = Seed: VVGARGVGK (KRAS G12R)
IVGHRGVGR

SEQ ID NO: 38914 - protein, 9 aa, synthetic construct
  source 1..9: note = Seed: VVGARGVGK (KRAS G12R)
IVGHRGVGV

SEQ ID NO: 38915 - protein, 9 aa, synthetic construct
  source 1..9: note = Seed: VVGARGVGK (KRAS G12R)
IVGHRGVGY

SEQ ID NO: 38916 - protein, 9 aa, synthetic construct
  source 1..9: note = Seed: VVGARGVGK (KRAS G12R)
IVGHRHVGA

SEQ ID NO: 38917 - protein, 9 aa, synthetic construct
  source 1..9: note = Seed: VVGARGVGK (KRAS G12R)
IVGHRHVGF

SEQ ID NO: 38918 - protein, 9 aa, synthetic construct
  source 1..9: note = Seed: VVGARGVGK (KRAS G12R)
IVGHRHVGH

SEQ ID NO: 38919 - protein, 9 aa, synthetic construct
  source 1..9: note = Seed: VVGARGVGK (KRAS G12R)
IVGHRHVGI

SEQ ID NO: 38920 - protein, 9 aa, synthetic construct
  source 1..9: note = Seed: VVGARGVGK (KRAS G12R)
IVGHRHVGK

SEQ ID NO: 38921 - protein, 9 aa, synthetic construct
  source 1..9: note = Seed: VVGARGVGK (KRAS G12R)
IVGHRHVGL

SEQ ID NO: 38922 - protein, 9 aa, synthetic construct
  source 1..9: note = Seed: VVGARGVGK (KRAS G12R)
IVGHRHVGM

SEQ ID NO: 38923 - protein, 9 aa, synthetic construct
  source 1..9: note = Seed: VVGARGVGK (KRAS G12R)
IVGHRHVGR

SEQ ID NO: 38924 - protein, 9 aa, synthetic construct
  source 1..9: note = Seed: VVGARGVGK (KRAS G12R)
IVGHRHVGS

SEQ ID NO: 38925 - protein, 9 aa, synthetic construct
  source 1..9: note = Seed: VVGARGVGK (KRAS G12R)
IVGHRHVGV

SEQ ID NO: 38926 - protein, 9 aa, synthetic construct
  source 1..9: note = Seed: VVGARGVGK (KRAS G12R)
IVGHRHVGW

SEQ ID NO: 38927 - protein, 9 aa, synthetic construct
  source 1..9: note = Seed: VVGARGVGK (KRAS G12R)
IVGHRHVGY

SEQ ID NO: 38928 - protein, 9 aa, synthetic construct
  source 1..9: note = Seed: VVGARGVGK (KRAS G12R)
IVGHRIVGF

SEQ ID NO: 38929 - protein, 9 aa, synthetic construct
  source 1..9: note = Seed: VVGARGVGK (KRAS G12R)
IVGHRIVGH

SEQ ID NO: 38930 - protein, 9 aa, synthetic construct
  source 1..9: note = Seed: VVGARGVGK (KRAS G12R)
IVGHRIVGI

SEQ ID NO: 38931 - protein, 9 aa, synthetic construct
  source 1..9: note = Seed: VVGARGVGK (KRAS G12R)
IVGHRIVGK

SEQ ID NO: 38932 - protein, 9 aa, synthetic construct
  source 1..9: note = Seed: VVGARGVGK (KRAS G12R)
IVGHRIVGM

SEQ ID NO: 38933 - protein, 9 aa, synthetic construct
  source 1..9: note = Seed: VVGARGVGK (KRAS G12R)
IVGHRIVGR

SEQ ID NO: 38934 - protein, 9 aa, synthetic construct
  source 1..9: note = Seed: VVGARGVGK (KRAS G12R)
IVGHRIVGV

SEQ ID NO: 38935 - protein, 9 aa, synthetic construct
  source 1..9: note = Seed: VVGARGVGK (KRAS G12R)
IVGHRIVGY

SEQ ID NO: 38936 - protein, 9 aa, synthetic construct
  source 1..9: note = Seed: VVGARGVGK (KRAS G12R)
IVGHRKVGA

SEQ ID NO: 38937 - protein, 9 aa, synthetic construct
  source 1..9: note = Seed: VVGARGVGK (KRAS G12R)
IVGHRKVGF

SEQ ID NO: 38938 - protein, 9 aa, synthetic construct
  source 1..9: note = Seed: VVGARGVGK (KRAS G12R)
IVGHRKVGG

SEQ ID NO: 38939 - protein, 9 aa, synthetic construct
  source 1..9: note = Seed: VVGARGVGK (KRAS G12R)
IVGHRKVGH

SEQ ID NO: 38940 - protein, 9 aa, synthetic construct
  source 1..9: note = Seed: VVGARGVGK (KRAS G12R)
IVGHRKVGI

SEQ ID NO: 38941 - protein, 9 aa, synthetic construct
  source 1..9: note = Seed: VVGARGVGK (KRAS G12R)
IVGHRKVGK

SEQ ID NO: 38942 - protein, 9 aa, synthetic construct
  source 1..9: note = Seed: VVGARGVGK (KRAS G12R)
IVGHRKVGL

SEQ ID NO: 38943 - protein, 9 aa, synthetic construct
  source 1..9: note = Seed: VVGARGVGK (KRAS G12R)
IVGHRKVGM

SEQ ID NO: 38944 - protein, 9 aa, synthetic construct
  source 1..9: note = Seed: VVGARGVGK (KRAS G12R)
IVGHRKVGN

SEQ ID NO: 38945 - protein, 9 aa, synthetic construct
  source 1..9: note = Seed: VVGARGVGK (KRAS G12R)
IVGHRKVGP

SEQ ID NO: 38946 - protein, 9 aa, synthetic construct
  source 1..9: note = Seed: VVGARGVGK (KRAS G12R)
IVGHRKVGQ

SEQ ID NO: 38947 - protein, 9 aa, synthetic construct
  source 1..9: note = Seed: VVGARGVGK (KRAS G12R)
IVGHRKVGR

SEQ ID NO: 38948 - protein, 9 aa, synthetic construct
  source 1..9: note = Seed: VVGARGVGK (KRAS G12R)
IVGHRKVGS

SEQ ID NO: 38949 - protein, 9 aa, synthetic construct
  source 1..9: note = Seed: VVGARGVGK (KRAS G12R)
IVGHRKVGT

SEQ ID NO: 38950 - protein, 9 aa, synthetic construct
  source 1..9: note = Seed: VVGARGVGK (KRAS G12R)
IVGHRKVGV

SEQ ID NO: 38951 - protein, 9 aa, synthetic construct
  source 1..9: note = Seed: VVGARGVGK (KRAS G12R)
IVGHRKVGW

SEQ ID NO: 38952 - protein, 9 aa, synthetic construct
  source 1..9: note = Seed: VVGARGVGK (KRAS G12R)
IVGHRKVGY

SEQ ID NO: 38953 - protein, 9 aa, synthetic construct
  source 1..9: note = Seed: VVGARGVGK (KRAS G12R)
IVGHRLVGK

SEQ ID NO: 38954 - protein, 9 aa, synthetic construct
  source 1..9: note = Seed: VVGARGVGK (KRAS G12R)
IVGHRLVGM

SEQ ID NO: 38955 - protein, 9 aa, synthetic construct
  source 1..9: note = Seed: VVGARGVGK (KRAS G12R)
IVGHRLVGR

SEQ ID NO: 38956 - protein, 9 aa, synthetic construct
  source 1..9: note = Seed: VVGARGVGK (KRAS G12R)
IVGHRLVGY

SEQ ID NO: 38957 - protein, 9 aa, synthetic construct
  source 1..9: note = Seed: VVGARGVGK (KRAS G12R)
IVGHRMVGK

SEQ ID NO: 38958 - protein, 9 aa, synthetic construct
  source 1..9: note = Seed: VVGARGVGK (KRAS G12R)
IVGHRMVGR

SEQ ID NO: 38959 - protein, 9 aa, synthetic construct
  source 1..9: note = Seed: VVGARGVGK (KRAS G12R)
IVGHRMVGY

SEQ ID NO: 38960 - protein, 9 aa, synthetic construct
  source 1..9: note = Seed: VVGARGVGK (KRAS G12R)
IVGHRNVGA

SEQ ID NO: 38961 - protein, 9 aa, synthetic construct
  source 1..9: note = Seed: VVGARGVGK (KRAS G12R)
IVGHRNVGF

SEQ ID NO: 38962 - protein, 9 aa, synthetic construct
  source 1..9: note = Seed: VVGARGVGK (KRAS G12R)
IVGHRNVGH

SEQ ID NO: 38963 - protein, 9 aa, synthetic construct
  source 1..9: note = Seed: VVGARGVGK (KRAS G12R)
IVGHRNVGI

SEQ ID NO: 38964 - protein, 9 aa, synthetic construct
  source 1..9: note = Seed: VVGARGVGK (KRAS G12R)
IVGHRNVGK

SEQ ID NO: 38965 - protein, 9 aa, synthetic construct
  source 1..9: note = Seed: VVGARGVGK (KRAS G12R)
IVGHRNVGL

SEQ ID NO: 38966 - protein, 9 aa, synthetic construct
  source 1..9: note = Seed: VVGARGVGK (KRAS G12R)
IVGHRNVGM

SEQ ID NO: 38967 - protein, 9 aa, synthetic construct
  source 1..9: note = Seed: VVGARGVGK (KRAS G12R)
IVGHRNVGR

SEQ ID NO: 38968 - protein, 9 aa, synthetic construct
  source 1..9: note = Seed: VVGARGVGK (KRAS G12R)
IVGHRNVGS

SEQ ID NO: 38969 - protein, 9 aa, synthetic construct
  source 1..9: note = Seed: VVGARGVGK (KRAS G12R)
IVGHRNVGV

SEQ ID NO: 38970 - protein, 9 aa, synthetic construct
  source 1..9: note = Seed: VVGARGVGK (KRAS G12R)
IVGHRNVGY

SEQ ID NO: 38971 - protein, 9 aa, synthetic construct
  source 1..9: note = Seed: VVGARGVGK (KRAS G12R)
IVGHRPVGA

SEQ ID NO: 38972 - protein, 9 aa, synthetic construct
  source 1..9: note = Seed: VVGARGVGK (KRAS G12R)
IVGHRPVGF

SEQ ID NO: 38973 - protein, 9 aa, synthetic construct
  source 1..9: note = Seed: VVGARGVGK (KRAS G12R)
IVGHRPVGH

SEQ ID NO: 38974 - protein, 9 aa, synthetic construct
  source 1..9: note = Seed: VVGARGVGK (KRAS G12R)
IVGHRPVGI

SEQ ID NO: 38975 - protein, 9 aa, synthetic construct
  source 1..9: note = Seed: VVGARGVGK (KRAS G12R)
IVGHRPVGK

SEQ ID NO: 38976 - protein, 9 aa, synthetic construct
  source 1..9: note = Seed: VVGARGVGK (KRAS G12R)
IVGHRPVGL

SEQ ID NO: 38977 - protein, 9 aa, synthetic construct
  source 1..9: note = Seed: VVGARGVGK (KRAS G12R)
IVGHRPVGM

SEQ ID NO: 38978 - protein, 9 aa, synthetic construct
  source 1..9: note = Seed: VVGARGVGK (KRAS G12R)
IVGHRPVGR

SEQ ID NO: 38979 - protein, 9 aa, synthetic construct
  source 1..9: note = Seed: VVGARGVGK (KRAS G12R)
IVGHRPVGS

SEQ ID NO: 38980 - protein, 9 aa, synthetic construct
  source 1..9: note = Seed: VVGARGVGK (KRAS G12R)
IVGHRPVGV

SEQ ID NO: 38981 - protein, 9 aa, synthetic construct
  source 1..9: note = Seed: VVGARGVGK (KRAS G12R)
IVGHRPVGY

SEQ ID NO: 38982 - protein, 9 aa, synthetic construct
  source 1..9: note = Seed: VVGARGVGK (KRAS G12R)
IVGHRQVGF

SEQ ID NO: 38983 - protein, 9 aa, synthetic construct
  source 1..9: note = Seed: VVGARGVGK (KRAS G12R)
IVGHRQVGI

SEQ ID NO: 38984 - protein, 9 aa, synthetic construct
  source 1..9: note = Seed: VVGARGVGK (KRAS G12R)
IVGHRQVGK

SEQ ID NO: 38985 - protein, 9 aa, synthetic construct
  source 1..9: note = Seed: VVGARGVGK (KRAS G12R)
IVGHRQVGL

SEQ ID NO: 38986 - protein, 9 aa, synthetic construct
  source 1..9: note = Seed: VVGARGVGK (KRAS G12R)
IVGHRQVGM

SEQ ID NO: 38987 - protein, 9 aa, synthetic construct
  source 1..9: note = Seed: VVGARGVGK (KRAS G12R)
IVGHRQVGR

SEQ ID NO: 38988 - protein, 9 aa, synthetic construct
  source 1..9: note = Seed: VVGARGVGK (KRAS G12R)
IVGHRQVGV

SEQ ID NO: 38989 - protein, 9 aa, synthetic construct
  source 1..9: note = Seed: VVGARGVGK (KRAS G12R)
IVGHRQVGY

SEQ ID NO: 38990 - protein, 9 aa, synthetic construct
  source 1..9: note = Seed: VVGARGVGK (KRAS G12R)
IVGHRRVGA

SEQ ID NO: 38991 - protein, 9 aa, synthetic construct
  source 1..9: note = Seed: VVGARGVGK (KRAS G12R)
IVGHRRVGC

SEQ ID NO: 38992 - protein, 9 aa, synthetic construct
  source 1..9: note = Seed: VVGARGVGK (KRAS G12R)
IVGHRRVGE

SEQ ID NO: 38993 - protein, 9 aa, synthetic construct
  source 1..9: note = Seed: VVGARGVGK (KRAS G12R)
IVGHRRVGF

SEQ ID NO: 38994 - protein, 9 aa, synthetic construct
  source 1..9: note = Seed: VVGARGVGK (KRAS G12R)
IVGHRRVGG

SEQ ID NO: 38995 - protein, 9 aa, synthetic construct
  source 1..9: note = Seed: VVGARGVGK (KRAS G12R)
IVGHRRVGH

SEQ ID NO: 38996 - protein, 9 aa, synthetic construct
  source 1..9: note = Seed: VVGARGVGK (KRAS G12R)
IVGHRRVGI

SEQ ID NO: 38997 - protein, 9 aa, synthetic construct
  source 1..9: note = Seed: VVGARGVGK (KRAS G12R)
IVGHRRVGK

SEQ ID NO: 38998 - protein, 9 aa, synthetic construct
  source 1..9: note = Seed: VVGARGVGK (KRAS G12R)
IVGHRRVGL

SEQ ID NO: 38999 - protein, 9 aa, synthetic construct
  source 1..9: note = Seed: VVGARGVGK (KRAS G12R)
IVGHRRVGM

SEQ ID NO: 39000 - protein, 9 aa, synthetic construct
  source 1..9: note = Seed: VVGARGVGK (KRAS G12R)
IVGHRRVGN

SEQ ID NO: 39001 - protein, 9 aa, synthetic construct
  source 1..9: note = Seed: VVGARGVGK (KRAS G12R)
IVGHRRVGP

SEQ ID NO: 39002 - protein, 9 aa, synthetic construct
  source 1..9: note = Seed: VVGARGVGK (KRAS G12R)
IVGHRRVGQ

SEQ ID NO: 39003 - protein, 9 aa, synthetic construct
  source 1..9: note = Seed: VVGARGVGK (KRAS G12R)
IVGHRRVGR

SEQ ID NO: 39004 - protein, 9 aa, synthetic construct
  source 1..9: note = Seed: VVGARGVGK (KRAS G12R)
IVGHRRVGS

SEQ ID NO: 39005 - protein, 9 aa, synthetic construct
  source 1..9: note = Seed: VVGARGVGK (KRAS G12R)
IVGHRRVGT

SEQ ID NO: 39006 - protein, 9 aa, synthetic construct
  source 1..9: note = Seed: VVGARGVGK (KRAS G12R)
IVGHRRVGV

SEQ ID NO: 39007 - protein, 9 aa, synthetic construct
  source 1..9: note = Seed: VVGARGVGK (KRAS G12R)
IVGHRRVGW

SEQ ID NO: 39008 - protein, 9 aa, synthetic construct
  source 1..9: note = Seed: VVGARGVGK (KRAS G12R)
IVGHRRVGY

SEQ ID NO: 39009 - protein, 9 aa, synthetic construct
  source 1..9: note = Seed: VVGARGVGK (KRAS G12R)
IVGHRSVGA

SEQ ID NO: 39010 - protein, 9 aa, synthetic construct
  source 1..9: note = Seed: VVGARGVGK (KRAS G12R)
IVGHRSVGF

SEQ ID NO: 39011 - protein, 9 aa, synthetic construct
  source 1..9: note = Seed: VVGARGVGK (KRAS G12R)
IVGHRSVGH

SEQ ID NO: 39012 - protein, 9 aa, synthetic construct
  source 1..9: note = Seed: VVGARGVGK (KRAS G12R)
IVGHRSVGI

SEQ ID NO: 39013 - protein, 9 aa, synthetic construct
  source 1..9: note = Seed: VVGARGVGK (KRAS G12R)
IVGHRSVGK

SEQ ID NO: 39014 - protein, 9 aa, synthetic construct
  source 1..9: note = Seed: VVGARGVGK (KRAS G12R)
IVGHRSVGL

SEQ ID NO: 39015 - protein, 9 aa, synthetic construct
  source 1..9: note = Seed: VVGARGVGK (KRAS G12R)
IVGHRSVGM

SEQ ID NO: 39016 - protein, 9 aa, synthetic construct
  source 1..9: note = Seed: VVGARGVGK (KRAS G12R)
IVGHRSVGR

SEQ ID NO: 39017 - protein, 9 aa, synthetic construct
  source 1..9: note = Seed: VVGARGVGK (KRAS G12R)
IVGHRSVGS

SEQ ID NO: 39018 - protein, 9 aa, synthetic construct
  source 1..9: note = Seed: VVGARGVGK (KRAS G12R)
IVGHRSVGV

SEQ ID NO: 39019 - protein, 9 aa, synthetic construct
  source 1..9: note = Seed: VVGARGVGK (KRAS G12R)
IVGHRSVGY

SEQ ID NO: 39020 - protein, 9 aa, synthetic construct
  source 1..9: note = Seed: VVGARGVGK (KRAS G12R)
IVGHRTVGA

SEQ ID NO: 39021 - protein, 9 aa, synthetic construct
  source 1..9: note = Seed: VVGARGVGK (KRAS G12R)
IVGHRTVGF

SEQ ID NO: 39022 - protein, 9 aa, synthetic construct
  source 1..9: note = Seed: VVGARGVGK (KRAS G12R)
IVGHRTVGH

SEQ ID NO: 39023 - protein, 9 aa, synthetic construct
  source 1..9: note = Seed: VVGARGVGK (KRAS G12R)
IVGHRTVGI

SEQ ID NO: 39024 - protein, 9 aa, synthetic construct
  source 1..9: note = Seed: VVGARGVGK (KRAS G12R)
IVGHRTVGK

SEQ ID NO: 39025 - protein, 9 aa, synthetic construct
  source 1..9: note = Seed: VVGARGVGK (KRAS G12R)
IVGHRTVGL

SEQ ID NO: 39026 - protein, 9 aa, synthetic construct
  source 1..9: note = Seed: VVGARGVGK (KRAS G12R)
IVGHRTVGM

SEQ ID NO: 39027 - protein, 9 aa, synthetic construct
  source 1..9: note = Seed: VVGARGVGK (KRAS G12R)
IVGHRTVGR

SEQ ID NO: 39028 - protein, 9 aa, synthetic construct
  source 1..9: note = Seed: VVGARGVGK (KRAS G12R)
IVGHRTVGV

SEQ ID NO: 39029 - protein, 9 aa, synthetic construct
  source 1..9: note = Seed: VVGARGVGK (KRAS G12R)
IVGHRTVGY

SEQ ID NO: 39030 - protein, 9 aa, synthetic construct
  source 1..9: note = Seed: VVGARGVGK (KRAS G12R)
IVGHRVVGF

SEQ ID NO: 39031 - protein, 9 aa, synthetic construct
  source 1..9: note = Seed: VVGARGVGK (KRAS G12R)
IVGHRVVGH

SEQ ID NO: 39032 - protein, 9 aa, synthetic construct
  source 1..9: note = Seed: VVGARGVGK (KRAS G12R)
IVGHRVVGI

SEQ ID NO: 39033 - protein, 9 aa, synthetic construct
  source 1..9: note = Seed: VVGARGVGK (KRAS G12R)
IVGHRVVGK

SEQ ID NO: 39034 - protein, 9 aa, synthetic construct
  source 1..9: note = Seed: VVGARGVGK (KRAS G12R)
IVGHRVVGL

SEQ ID NO: 39035 - protein, 9 aa, synthetic construct
  source 1..9: note = Seed: VVGARGVGK (KRAS G12R)
IVGHRVVGM

SEQ ID NO: 39036 - protein, 9 aa, synthetic construct
  source 1..9: note = Seed: VVGARGVGK (KRAS G12R)
IVGHRVVGR

SEQ ID NO: 39037 - protein, 9 aa, synthetic construct
  source 1..9: note = Seed: VVGARGVGK (KRAS G12R)
IVGHRVVGV

SEQ ID NO: 39038 - protein, 9 aa, synthetic construct
  source 1..9: note = Seed: VVGARGVGK (KRAS G12R)
IVGHRVVGY

SEQ ID NO: 39039 - protein, 9 aa, synthetic construct
  source 1..9: note = Seed: VVGARGVGK (KRAS G12R)
IVGHRWVGR

SEQ ID NO: 39040 - protein, 9 aa, synthetic construct
  source 1..9: note = Seed: VVGARGVGK (KRAS G12R)
IVGHRYVGR

SEQ ID NO: 39041 - protein, 9 aa, synthetic construct
  source 1..9: note = Seed: VVGARGVGK (KRAS G12R)
IVGIRAVGA

SEQ ID NO: 39042 - protein, 9 aa, synthetic construct
  source 1..9: note = Seed: VVGARGVGK (KRAS G12R)
IVGIRAVGC

SEQ ID NO: 39043 - protein, 9 aa, synthetic construct
  source 1..9: note = Seed: VVGARGVGK (KRAS G12R)
IVGIRAVGF

SEQ ID NO: 39044 - protein, 9 aa, synthetic construct
  source 1..9: note = Seed: VVGARGVGK (KRAS G12R)
IVGIRAVGG

SEQ ID NO: 39045 - protein, 9 aa, synthetic construct
  source 1..9: note = Seed: VVGARGVGK (KRAS G12R)
IVGIRAVGH

SEQ ID NO: 39046 - protein, 9 aa, synthetic construct
  source 1..9: note = Seed: VVGARGVGK (KRAS G12R)
IVGIRAVGI

SEQ ID NO: 39047 - protein, 9 aa, synthetic construct
  source 1..9: note = Seed: VVGARGVGK (KRAS G12R)
IVGIRAVGK

SEQ ID NO: 39048 - protein, 9 aa, synthetic construct
  source 1..9: note = Seed: VVGARGVGK (KRAS G12R)
IVGIRAVGL

SEQ ID NO: 39049 - protein, 9 aa, synthetic construct
  source 1..9: note = Seed: VVGARGVGK (KRAS G12R)
IVGIRAVGM

SEQ ID NO: 39050 - protein, 9 aa, synthetic construct
  source 1..9: note = Seed: VVGARGVGK (KRAS G12R)
IVGIRAVGN

SEQ ID NO: 39051 - protein, 9 aa, synthetic construct
  source 1..9: note = Seed: VVGARGVGK (KRAS G12R)
IVGIRAVGQ

SEQ ID NO: 39052 - protein, 9 aa, synthetic construct
  source 1..9: note = Seed: VVGARGVGK (KRAS G12R)
IVGIRAVGR

SEQ ID NO: 39053 - protein, 9 aa, synthetic construct
  source 1..9: note = Seed: VVGARGVGK (KRAS G12R)
IVGIRAVGS

SEQ ID NO: 39054 - protein, 9 aa, synthetic construct
  source 1..9: note = Seed: VVGARGVGK (KRAS G12R)
IVGIRAVGT

SEQ ID NO: 39055 - protein, 9 aa, synthetic construct
  source 1..9: note = Seed: VVGARGVGK (KRAS G12R)
IVGIRAVGV

SEQ ID NO: 39056 - protein, 9 aa, synthetic construct
  source 1..9: note = Seed: VVGARGVGK (KRAS G12R)
IVGIRAVGY

SEQ ID NO: 39057 - protein, 9 aa, synthetic construct
  source 1..9: note = Seed: VVGARGVGK (KRAS G12R)
IVGIRGVGA

SEQ ID NO: 39058 - protein, 9 aa, synthetic construct
  source 1..9: note = Seed: VVGARGVGK (KRAS G12R)
IVGIRGVGC

SEQ ID NO: 39059 - protein, 9 aa, synthetic construct
  source 1..9: note = Seed: VVGARGVGK (KRAS G12R)
IVGIRGVGF

SEQ ID NO: 39060 - protein, 9 aa, synthetic construct
  source 1..9: note = Seed: VVGARGVGK (KRAS G12R)
IVGIRGVGG

SEQ ID NO: 39061 - protein, 9 aa, synthetic construct
  source 1..9: note = Seed: VVGARGVGK (KRAS G12R)
IVGIRGVGH

SEQ ID NO: 39062 - protein, 9 aa, synthetic construct
  source 1..9: note = Seed: VVGARGVGK (KRAS G12R)
IVGIRGVGI

SEQ ID NO: 39063 - protein, 9 aa, synthetic construct
  source 1..9: note = Seed: VVGARGVGK (KRAS G12R)
IVGIRGVGL

SEQ ID NO: 39064 - protein, 9 aa, synthetic construct
  source 1..9: note = Seed: VVGARGVGK (KRAS G12R)
IVGIRGVGM

SEQ ID NO: 39065 - protein, 9 aa, synthetic construct
  source 1..9: note = Seed: VVGARGVGK (KRAS G12R)
IVGIRGVGN

SEQ ID NO: 39066 - protein, 9 aa, synthetic construct
  source 1..9: note = Seed: VVGARGVGK (KRAS G12R)
IVGIRGVGQ

SEQ ID NO: 39067 - protein, 9 aa, synthetic construct
  source 1..9: note = Seed: VVGARGVGK (KRAS G12R)
IVGIRGVGR

SEQ ID NO: 39068 - protein, 9 aa, synthetic construct
  source 1..9: note = Seed: VVGARGVGK (KRAS G12R)
IVGIRGVGS

SEQ ID NO: 39069 - protein, 9 aa, synthetic construct
  source 1..9: note = Seed: VVGARGVGK (KRAS G12R)
IVGIRGVGT

SEQ ID NO: 39070 - protein, 9 aa, synthetic construct
  source 1..9: note = Seed: VVGARGVGK (KRAS G12R)
IVGIRGVGV

SEQ ID NO: 39071 - protein, 9 aa, synthetic construct
  source 1..9: note = Seed: VVGARGVGK (KRAS G12R)
IVGIRGVGY

SEQ ID NO: 39072 - protein, 9 aa, synthetic construct
  source 1..9: note = Seed: VVGARGVGK (KRAS G12R)
IVGIRHVGA

SEQ ID NO: 39073 - protein, 9 aa, synthetic construct
  source 1..9: note = Seed: VVGARGVGK (KRAS G12R)
IVGIRHVGF

SEQ ID NO: 39074 - protein, 9 aa, synthetic construct
  source 1..9: note = Seed: VVGARGVGK (KRAS G12R)
IVGIRHVGI

SEQ ID NO: 39075 - protein, 9 aa, synthetic construct
  source 1..9: note = Seed: VVGARGVGK (KRAS G12R)
IVGIRHVGL

SEQ ID NO: 39076 - protein, 9 aa, synthetic construct
  source 1..9: note = Seed: VVGARGVGK (KRAS G12R)
IVGIRHVGM

SEQ ID NO: 39077 - protein, 9 aa, synthetic construct
  source 1..9: note = Seed: VVGARGVGK (KRAS G12R)
IVGIRHVGR

SEQ ID NO: 39078 - protein, 9 aa, synthetic construct
  source 1..9: note = Seed: VVGARGVGK (KRAS G12R)
IVGIRHVGS

SEQ ID NO: 39079 - protein, 9 aa, synthetic construct
  source 1..9: note = Seed: VVGARGVGK (KRAS G12R)
IVGIRHVGV

SEQ ID NO: 39080 - protein, 9 aa, synthetic construct
  source 1..9: note = Seed: VVGARGVGK (KRAS G12R)
IVGIRHVGY

SEQ ID NO: 39081 - protein, 9 aa, synthetic construct
  source 1..9: note = Seed: VVGARGVGK (KRAS G12R)
IVGIRIVGN

SEQ ID NO: 39082 - protein, 9 aa, synthetic construct
  source 1..9: note = Seed: VVGARGVGK (KRAS G12R)
IVGIRIVGS

SEQ ID NO: 39083 - protein, 9 aa, synthetic construct
  source 1..9: note = Seed: VVGARGVGK (KRAS G12R)
IVGIRKVGA

SEQ ID NO: 39084 - protein, 9 aa, synthetic construct
  source 1..9: note = Seed: VVGARGVGK (KRAS G12R)
IVGIRKVGF

SEQ ID NO: 39085 - protein, 9 aa, synthetic construct
  source 1..9: note = Seed: VVGARGVGK (KRAS G12R)
IVGIRKVGG

SEQ ID NO: 39086 - protein, 9 aa, synthetic construct
  source 1..9: note = Seed: VVGARGVGK (KRAS G12R)
IVGIRKVGH

SEQ ID NO: 39087 - protein, 9 aa, synthetic construct
  source 1..9: note = Seed: VVGARGVGK (KRAS G12R)
IVGIRKVGI

SEQ ID NO: 39088 - protein, 9 aa, synthetic construct
  source 1..9: note = Seed: VVGARGVGK (KRAS G12R)
IVGIRKVGK

SEQ ID NO: 39089 - protein, 9 aa, synthetic construct
  source 1..9: note = Seed: VVGARGVGK (KRAS G12R)
IVGIRKVGL

SEQ ID NO: 39090 - protein, 9 aa, synthetic construct
  source 1..9: note = Seed: VVGARGVGK (KRAS G12R)
IVGIRKVGM

SEQ ID NO: 39091 - protein, 9 aa, synthetic construct
  source 1..9: note = Seed: VVGARGVGK (KRAS G12R)
IVGIRKVGN

SEQ ID NO: 39092 - protein, 9 aa, synthetic construct
  source 1..9: note = Seed: VVGARGVGK (KRAS G12R)
IVGIRKVGP

SEQ ID NO: 39093 - protein, 9 aa, synthetic construct
  source 1..9: note = Seed: VVGARGVGK (KRAS G12R)
IVGIRKVGQ

SEQ ID NO: 39094 - protein, 9 aa, synthetic construct
  source 1..9: note = Seed: VVGARGVGK (KRAS G12R)
IVGIRKVGR

SEQ ID NO: 39095 - protein, 9 aa, synthetic construct
  source 1..9: note = Seed: VVGARGVGK (KRAS G12R)
IVGIRKVGS

SEQ ID NO: 39096 - protein, 9 aa, synthetic construct
  source 1..9: note = Seed: VVGARGVGK (KRAS G12R)
IVGIRKVGT

SEQ ID NO: 39097 - protein, 9 aa, synthetic construct
  source 1..9: note = Seed: VVGARGVGK (KRAS G12R)
IVGIRKVGV

SEQ ID NO: 39098 - protein, 9 aa, synthetic construct
  source 1..9: note = Seed: VVGARGVGK (KRAS G12R)
IVGIRKVGW

SEQ ID NO: 39099 - protein, 9 aa, synthetic construct
  source 1..9: note = Seed: VVGARGVGK (KRAS G12R)
IVGIRKVGY

SEQ ID NO: 39100 - protein, 9 aa, synthetic construct
  source 1..9: note = Seed: VVGARGVGK (KRAS G12R)
IVGIRNVGA

SEQ ID NO: 39101 - protein, 9 aa, synthetic construct
  source 1..9: note = Seed: VVGARGVGK (KRAS G12R)
IVGIRNVGI

SEQ ID NO: 39102 - protein, 9 aa, synthetic construct
  source 1..9: note = Seed: VVGARGVGK (KRAS G12R)
IVGIRNVGL

SEQ ID NO: 39103 - protein, 9 aa, synthetic construct
  source 1..9: note = Seed: VVGARGVGK (KRAS G12R)
IVGIRNVGM

SEQ ID NO: 39104 - protein, 9 aa, synthetic construct
  source 1..9: note = Seed: VVGARGVGK (KRAS G12R)
IVGIRNVGN

SEQ ID NO: 39105 - protein, 9 aa, synthetic construct
  source 1..9: note = Seed: VVGARGVGK (KRAS G12R)
IVGIRNVGS

SEQ ID NO: 39106 - protein, 9 aa, synthetic construct
  source 1..9: note = Seed: VVGARGVGK (KRAS G12R)
IVGIRNVGT

SEQ ID NO: 39107 - protein, 9 aa, synthetic construct
  source 1..9: note = Seed: VVGARGVGK (KRAS G12R)
IVGIRNVGV

SEQ ID NO: 39108 - protein, 9 aa, synthetic construct
  source 1..9: note = Seed: VVGARGVGK (KRAS G12R)
IVGIRNVGY

SEQ ID NO: 39109 - protein, 9 aa, synthetic construct
  source 1..9: note = Seed: VVGARGVGK (KRAS G12R)
IVGIRPVGA

SEQ ID NO: 39110 - protein, 9 aa, synthetic construct
  source 1..9: note = Seed: VVGARGVGK (KRAS G12R)
IVGIRPVGC

SEQ ID NO: 39111 - protein, 9 aa, synthetic construct
  source 1..9: note = Seed: VVGARGVGK (KRAS G12R)
IVGIRPVGF

SEQ ID NO: 39112 - protein, 9 aa, synthetic construct
  source 1..9: note = Seed: VVGARGVGK (KRAS G12R)
IVGIRPVGG

SEQ ID NO: 39113 - protein, 9 aa, synthetic construct
  source 1..9: note = Seed: VVGARGVGK (KRAS G12R)
IVGIRPVGH

SEQ ID NO: 39114 - protein, 9 aa, synthetic construct
  source 1..9: note = Seed: VVGARGVGK (KRAS G12R)
IVGIRPVGI

SEQ ID NO: 39115 - protein, 9 aa, synthetic construct
  source 1..9: note = Seed: VVGARGVGK (KRAS G12R)
IVGIRPVGL

SEQ ID NO: 39116 - protein, 9 aa, synthetic construct
  source 1..9: note = Seed: VVGARGVGK (KRAS G12R)
IVGIRPVGM

SEQ ID NO: 39117 - protein, 9 aa, synthetic construct
  source 1..9: note = Seed: VVGARGVGK (KRAS G12R)
IVGIRPVGN

SEQ ID NO: 39118 - protein, 9 aa, synthetic construct
  source 1..9: note = Seed: VVGARGVGK (KRAS G12R)
IVGIRPVGQ

SEQ ID NO: 39119 - protein, 9 aa, synthetic construct
  source 1..9: note = Seed: VVGARGVGK (KRAS G12R)
IVGIRPVGR

SEQ ID NO: 39120 - protein, 9 aa, synthetic construct
  source 1..9: note = Seed: VVGARGVGK (KRAS G12R)
IVGIRPVGS

SEQ ID NO: 39121 - protein, 9 aa, synthetic construct
  source 1..9: note = Seed: VVGARGVGK (KRAS G12R)
IVGIRPVGT

SEQ ID NO: 39122 - protein, 9 aa, synthetic construct
  source 1..9: note = Seed: VVGARGVGK (KRAS G12R)
IVGIRPVGV

SEQ ID NO: 39123 - protein, 9 aa, synthetic construct
  source 1..9: note = Seed: VVGARGVGK (KRAS G12R)
IVGIRPVGY

SEQ ID NO: 39124 - protein, 9 aa, synthetic construct
  source 1..9: note = Seed: VVGARGVGK (KRAS G12R)
IVGIRRVGA

SEQ ID NO: 39125 - protein, 9 aa, synthetic construct
  source 1..9: note = Seed: VVGARGVGK (KRAS G12R)
IVGIRRVGD

SEQ ID NO: 39126 - protein, 9 aa, synthetic construct
  source 1..9: note = Seed: VVGARGVGK (KRAS G12R)
IVGIRRVGE

SEQ ID NO: 39127 - protein, 9 aa, synthetic construct
  source 1..9: note = Seed: VVGARGVGK (KRAS G12R)
IVGIRRVGF

SEQ ID NO: 39128 - protein, 9 aa, synthetic construct
  source 1..9: note = Seed: VVGARGVGK (KRAS G12R)
IVGIRRVGG

SEQ ID NO: 39129 - protein, 9 aa, synthetic construct
  source 1..9: note = Seed: VVGARGVGK (KRAS G12R)
IVGIRRVGH

SEQ ID NO: 39130 - protein, 9 aa, synthetic construct
  source 1..9: note = Seed: VVGARGVGK (KRAS G12R)
IVGIRRVGI

SEQ ID NO: 39131 - protein, 9 aa, synthetic construct
  source 1..9: note = Seed: VVGARGVGK (KRAS G12R)
IVGIRRVGK

SEQ ID NO: 39132 - protein, 9 aa, synthetic construct
  source 1..9: note = Seed: VVGARGVGK (KRAS G12R)
IVGIRRVGL

SEQ ID NO: 39133 - protein, 9 aa, synthetic construct
  source 1..9: note = Seed: VVGARGVGK (KRAS G12R)
IVGIRRVGM

SEQ ID NO: 39134 - protein, 9 aa, synthetic construct
  source 1..9: note = Seed: VVGARGVGK (KRAS G12R)
IVGIRRVGN

SEQ ID NO: 39135 - protein, 9 aa, synthetic construct
  source 1..9: note = Seed: VVGARGVGK (KRAS G12R)
IVGIRRVGP

SEQ ID NO: 39136 - protein, 9 aa, synthetic construct
  source 1..9: note = Seed: VVGARGVGK (KRAS G12R)
IVGIRRVGQ

SEQ ID NO: 39137 - protein, 9 aa, synthetic construct
  source 1..9: note = Seed: VVGARGVGK (KRAS G12R)
IVGIRRVGR

SEQ ID NO: 39138 - protein, 9 aa, synthetic construct
  source 1..9: note = Seed: VVGARGVGK (KRAS G12R)
IVGIRRVGS

SEQ ID NO: 39139 - protein, 9 aa, synthetic construct
  source 1..9: note = Seed: VVGARGVGK (KRAS G12R)
IVGIRRVGT

SEQ ID NO: 39140 - protein, 9 aa, synthetic construct
  source 1..9: note = Seed: VVGARGVGK (KRAS G12R)
IVGIRRVGV

SEQ ID NO: 39141 - protein, 9 aa, synthetic construct
  source 1..9: note = Seed: VVGARGVGK (KRAS G12R)
IVGIRRVGW

SEQ ID NO: 39142 - protein, 9 aa, synthetic construct
  source 1..9: note = Seed: VVGARGVGK (KRAS G12R)
IVGIRRVGY

SEQ ID NO: 39143 - protein, 9 aa, synthetic construct
  source 1..9: note = Seed: VVGARGVGK (KRAS G12R)
IVGIRSVGA

SEQ ID NO: 39144 - protein, 9 aa, synthetic construct
  source 1..9: note = Seed: VVGARGVGK (KRAS G12R)
IVGIRSVGC

SEQ ID NO: 39145 - protein, 9 aa, synthetic construct
  source 1..9: note = Seed: VVGARGVGK (KRAS G12R)
IVGIRSVGF

SEQ ID NO: 39146 - protein, 9 aa, synthetic construct
  source 1..9: note = Seed: VVGARGVGK (KRAS G12R)
IVGIRSVGG

SEQ ID NO: 39147 - protein, 9 aa, synthetic construct
  source 1..9: note = Seed: VVGARGVGK (KRAS G12R)
IVGIRSVGI

SEQ ID NO: 39148 - protein, 9 aa, synthetic construct
  source 1..9: note = Seed: VVGARGVGK (KRAS G12R)
IVGIRSVGK

SEQ ID NO: 39149 - protein, 9 aa, synthetic construct
  source 1..9: note = Seed: VVGARGVGK (KRAS G12R)
IVGIRSVGL

SEQ ID NO: 39150 - protein, 9 aa, synthetic construct
  source 1..9: note = Seed: VVGARGVGK (KRAS G12R)
IVGIRSVGM

SEQ ID NO: 39151 - protein, 9 aa, synthetic construct
  source 1..9: note = Seed: VVGARGVGK (KRAS G12R)
IVGIRSVGN

SEQ ID NO: 39152 - protein, 9 aa, synthetic construct
  source 1..9: note = Seed: VVGARGVGK (KRAS G12R)
IVGIRSVGR

SEQ ID NO: 39153 - protein, 9 aa, synthetic construct
  source 1..9: note = Seed: VVGARGVGK (KRAS G12R)
IVGIRSVGS

SEQ ID NO: 39154 - protein, 9 aa, synthetic construct
  source 1..9: note = Seed: VVGARGVGK (KRAS G12R)
IVGIRSVGT

SEQ ID NO: 39155 - protein, 9 aa, synthetic construct
  source 1..9: note = Seed: VVGARGVGK (KRAS G12R)
IVGIRSVGV

SEQ ID NO: 39156 - protein, 9 aa, synthetic construct
  source 1..9: note = Seed: VVGARGVGK (KRAS G12R)
IVGIRSVGY

SEQ ID NO: 39157 - protein, 9 aa, synthetic construct
  source 1..9: note = Seed: VVGARGVGK (KRAS G12R)
IVGIRTVGA

SEQ ID NO: 39158 - protein, 9 aa, synthetic construct
  source 1..9: note = Seed: VVGARGVGK (KRAS G12R)
IVGIRTVGH

SEQ ID NO: 39159 - protein, 9 aa, synthetic construct
  source 1..9: note = Seed: VVGARGVGK (KRAS G12R)
IVGIRTVGI

SEQ ID NO: 39160 - protein, 9 aa, synthetic construct
  source 1..9: note = Seed: VVGARGVGK (KRAS G12R)
IVGIRTVGL

SEQ ID NO: 39161 - protein, 9 aa, synthetic construct
  source 1..9: note = Seed: VVGARGVGK (KRAS G12R)
IVGIRTVGM

SEQ ID NO: 39162 - protein, 9 aa, synthetic construct
  source 1..9: note = Seed: VVGARGVGK (KRAS G12R)
IVGIRTVGN

SEQ ID NO: 39163 - protein, 9 aa, synthetic construct
  source 1..9: note = Seed: VVGARGVGK (KRAS G12R)
IVGIRTVGR

SEQ ID NO: 39164 - protein, 9 aa, synthetic construct
  source 1..9: note = Seed: VVGARGVGK (KRAS G12R)
IVGIRTVGS

SEQ ID NO: 39165 - protein, 9 aa, synthetic construct
  source 1..9: note = Seed: VVGARGVGK (KRAS G12R)
IVGIRTVGT

SEQ ID NO: 39166 - protein, 9 aa, synthetic construct
  source 1..9: note = Seed: VVGARGVGK (KRAS G12R)
IVGIRTVGV

SEQ ID NO: 39167 - protein, 9 aa, synthetic construct
  source 1..9: note = Seed: VVGARGVGK (KRAS G12R)
IVGIRTVGY

SEQ ID NO: 39168 - protein, 9 aa, synthetic construct
  source 1..9: note = Seed: VVGARGVGK (KRAS G12R)
IVGIRVVGA

SEQ ID NO: 39169 - protein, 9 aa, synthetic construct
  source 1..9: note = Seed: VVGARGVGK (KRAS G12R)
IVGIRVVGH

SEQ ID NO: 39170 - protein, 9 aa, synthetic construct
  source 1..9: note = Seed: VVGARGVGK (KRAS G12R)
IVGIRVVGI

SEQ ID NO: 39171 - protein, 9 aa, synthetic construct
  source 1..9: note = Seed: VVGARGVGK (KRAS G12R)
IVGIRVVGL

SEQ ID NO: 39172 - protein, 9 aa, synthetic construct
  source 1..9: note = Seed: VVGARGVGK (KRAS G12R)
IVGIRVVGM

SEQ ID NO: 39173 - protein, 9 aa, synthetic construct
  source 1..9: note = Seed: VVGARGVGK (KRAS G12R)
IVGIRVVGN

SEQ ID NO: 39174 - protein, 9 aa, synthetic construct
  source 1..9: note = Seed: VVGARGVGK (KRAS G12R)
IVGIRVVGS

SEQ ID NO: 39175 - protein, 9 aa, synthetic construct
  source 1..9: note = Seed: VVGARGVGK (KRAS G12R)
IVGIRVVGV

SEQ ID NO: 39176 - protein, 9 aa, synthetic construct
  source 1..9: note = Seed: VVGARGVGK (KRAS G12R)
IVGIRVVGY

SEQ ID NO: 39177 - protein, 9 aa, synthetic construct
  source 1..9: note = Seed: VVGARGVGK (KRAS G12R)
IVGKRAVGA

SEQ ID NO: 39178 - protein, 9 aa, synthetic construct
  source 1..9: note = Seed: VVGARGVGK (KRAS G12R)
IVGKRAVGF

SEQ ID NO: 39179 - protein, 9 aa, synthetic construct
  source 1..9: note = Seed: VVGARGVGK (KRAS G12R)
IVGKRAVGH

SEQ ID NO: 39180 - protein, 9 aa, synthetic construct
  source 1..9: note = Seed: VVGARGVGK (KRAS G12R)
IVGKRAVGI

SEQ ID NO: 39181 - protein, 9 aa, synthetic construct
  source 1..9: note = Seed: VVGARGVGK (KRAS G12R)
IVGKRAVGK

SEQ ID NO: 39182 - protein, 9 aa, synthetic construct
  source 1..9: note = Seed: VVGARGVGK (KRAS G12R)
IVGKRAVGL

SEQ ID NO: 39183 - protein, 9 aa, synthetic construct
  source 1..9: note = Seed: VVGARGVGK (KRAS G12R)
IVGKRAVGM

SEQ ID NO: 39184 - protein, 9 aa, synthetic construct
  source 1..9: note = Seed: VVGARGVGK (KRAS G12R)
IVGKRAVGQ

SEQ ID NO: 39185 - protein, 9 aa, synthetic construct
  source 1..9: note = Seed: VVGARGVGK (KRAS G12R)
IVGKRAVGR

SEQ ID NO: 39186 - protein, 9 aa, synthetic construct
  source 1..9: note = Seed: VVGARGVGK (KRAS G12R)
IVGKRAVGS

SEQ ID NO: 39187 - protein, 9 aa, synthetic construct
  source 1..9: note = Seed: VVGARGVGK (KRAS G12R)
IVGKRAVGV

SEQ ID NO: 39188 - protein, 9 aa, synthetic construct
  source 1..9: note = Seed: VVGARGVGK (KRAS G12R)
IVGKRAVGW

SEQ ID NO: 39189 - protein, 9 aa, synthetic construct
  source 1..9: note = Seed: VVGARGVGK (KRAS G12R)
IVGKRAVGY

SEQ ID NO: 39190 - protein, 9 aa, synthetic construct
  source 1..9: note = Seed: VVGARGVGK (KRAS G12R)
IVGKRGVGF

SEQ ID NO: 39191 - protein, 9 aa, synthetic construct
  source 1..9: note = Seed: VVGARGVGK (KRAS G12R)
IVGKRGVGI

SEQ ID NO: 39192 - protein, 9 aa, synthetic construct
  source 1..9: note = Seed: VVGARGVGK (KRAS G12R)
IVGKRGVGK

SEQ ID NO: 39193 - protein, 9 aa, synthetic construct
  source 1..9: note = Seed: VVGARGVGK (KRAS G12R)
IVGKRGVGL

SEQ ID NO: 39194 - protein, 9 aa, synthetic construct
  source 1..9: note = Seed: VVGARGVGK (KRAS G12R)
IVGKRGVGM

SEQ ID NO: 39195 - protein, 9 aa, synthetic construct
  source 1..9: note = Seed: VVGARGVGK (KRAS G12R)
IVGKRGVGR

SEQ ID NO: 39196 - protein, 9 aa, synthetic construct
  source 1..9: note = Seed: VVGARGVGK (KRAS G12R)
IVGKRGVGV

SEQ ID NO: 39197 - protein, 9 aa, synthetic construct
  source 1..9: note = Seed: VVGARGVGK (KRAS G12R)
IVGKRGVGY

SEQ ID NO: 39198 - protein, 9 aa, synthetic construct
  source 1..9: note = Seed: VVGARGVGK (KRAS G12R)
IVGKRHVGA

SEQ ID NO: 39199 - protein, 9 aa, synthetic construct
  source 1..9: note = Seed: VVGARGVGK (KRAS G12R)
IVGKRHVGF

SEQ ID NO: 39200 - protein, 9 aa, synthetic construct
  source 1..9: note = Seed: VVGARGVGK (KRAS G12R)
IVGKRHVGI

SEQ ID NO: 39201 - protein, 9 aa, synthetic construct
  source 1..9: note = Seed: VVGARGVGK (KRAS G12R)
IVGKRHVGK

SEQ ID NO: 39202 - protein, 9 aa, synthetic construct
  source 1..9: note = Seed: VVGARGVGK (KRAS G12R)
IVGKRHVGL

SEQ ID NO: 39203 - protein, 9 aa, synthetic construct
  source 1..9: note = Seed: VVGARGVGK (KRAS G12R)
IVGKRHVGM

SEQ ID NO: 39204 - protein, 9 aa, synthetic construct
  source 1..9: note = Seed: VVGARGVGK (KRAS G12R)
IVGKRHVGR

SEQ ID NO: 39205 - protein, 9 aa, synthetic construct
  source 1..9: note = Seed: VVGARGVGK (KRAS G12R)
IVGKRHVGS

SEQ ID NO: 39206 - protein, 9 aa, synthetic construct
  source 1..9: note = Seed: VVGARGVGK (KRAS G12R)
IVGKRHVGV

SEQ ID NO: 39207 - protein, 9 aa, synthetic construct
  source 1..9: note = Seed: VVGARGVGK (KRAS G12R)
IVGKRHVGY

SEQ ID NO: 39208 - protein, 9 aa, synthetic construct
  source 1..9: note = Seed: VVGARGVGK (KRAS G12R)
IVGKRIVGK

SEQ ID NO: 39209 - protein, 9 aa, synthetic construct
  source 1..9: note = Seed: VVGARGVGK (KRAS G12R)
IVGKRIVGM

SEQ ID NO: 39210 - protein, 9 aa, synthetic construct
  source 1..9: note = Seed: VVGARGVGK (KRAS G12R)
IVGKRIVGR

SEQ ID NO: 39211 - protein, 9 aa, synthetic construct
  source 1..9: note = Seed: VVGARGVGK (KRAS G12R)
IVGKRIVGY

SEQ ID NO: 39212 - protein, 9 aa, synthetic construct
  source 1..9: note = Seed: VVGARGVGK (KRAS G12R)
IVGKRKVGA

SEQ ID NO: 39213 - protein, 9 aa, synthetic construct
  source 1..9: note = Seed: VVGARGVGK (KRAS G12R)
IVGKRKVGE

SEQ ID NO: 39214 - protein, 9 aa, synthetic construct
  source 1..9: note = Seed: VVGARGVGK (KRAS G12R)
IVGKRKVGF

SEQ ID NO: 39215 - protein, 9 aa, synthetic construct
  source 1..9: note = Seed: VVGARGVGK (KRAS G12R)
IVGKRKVGG

SEQ ID NO: 39216 - protein, 9 aa, synthetic construct
  source 1..9: note = Seed: VVGARGVGK (KRAS G12R)
IVGKRKVGH

SEQ ID NO: 39217 - protein, 9 aa, synthetic construct
  source 1..9: note = Seed: VVGARGVGK (KRAS G12R)
IVGKRKVGI

SEQ ID NO: 39218 - protein, 9 aa, synthetic construct
  source 1..9: note = Seed: VVGARGVGK (KRAS G12R)
IVGKRKVGK

SEQ ID NO: 39219 - protein, 9 aa, synthetic construct
  source 1..9: note = Seed: VVGARGVGK (KRAS G12R)
IVGKRKVGL

SEQ ID NO: 39220 - protein, 9 aa, synthetic construct
  source 1..9: note = Seed: VVGARGVGK (KRAS G12R)
IVGKRKVGM

SEQ ID NO: 39221 - protein, 9 aa, synthetic construct
  source 1..9: note = Seed: VVGARGVGK (KRAS G12R)
IVGKRKVGN

SEQ ID NO: 39222 - protein, 9 aa, synthetic construct
  source 1..9: note = Seed: VVGARGVGK (KRAS G12R)
IVGKRKVGP

SEQ ID NO: 39223 - protein, 9 aa, synthetic construct
  source 1..9: note = Seed: VVGARGVGK (KRAS G12R)
IVGKRKVGQ

SEQ ID NO: 39224 - protein, 9 aa, synthetic construct
  source 1..9: note = Seed: VVGARGVGK (KRAS G12R)
IVGKRKVGR

SEQ ID NO: 39225 - protein, 9 aa, synthetic construct
  source 1..9: note = Seed: VVGARGVGK (KRAS G12R)
IVGKRKVGS

SEQ ID NO: 39226 - protein, 9 aa, synthetic construct
  source 1..9: note = Seed: VVGARGVGK (KRAS G12R)
IVGKRKVGT

SEQ ID NO: 39227 - protein, 9 aa, synthetic construct
  source 1..9: note = Seed: VVGARGVGK (KRAS G12R)
IVGKRKVGV

SEQ ID NO: 39228 - protein, 9 aa, synthetic construct
  source 1..9: note = Seed: VVGARGVGK (KRAS G12R)
IVGKRKVGW

SEQ ID NO: 39229 - protein, 9 aa, synthetic construct
  source 1..9: note = Seed: VVGARGVGK (KRAS G12R)
IVGKRKVGY

SEQ ID NO: 39230 - protein, 9 aa, synthetic construct
  source 1..9: note = Seed: VVGARGVGK (KRAS G12R)
IVGKRLVGR

SEQ ID NO: 39231 - protein, 9 aa, synthetic construct
  source 1..9: note = Seed: VVGARGVGK (KRAS G12R)
IVGKRLVGY

SEQ ID NO: 39232 - protein, 9 aa, synthetic construct
  source 1..9: note = Seed: VVGARGVGK (KRAS G12R)
IVGKRMVGF

SEQ ID NO: 39233 - protein, 9 aa, synthetic construct
  source 1..9: note = Seed: VVGARGVGK (KRAS G12R)
IVGKRMVGI

SEQ ID NO: 39234 - protein, 9 aa, synthetic construct
  source 1..9: note = Seed: VVGARGVGK (KRAS G12R)
IVGKRMVGK

SEQ ID NO: 39235 - protein, 9 aa, synthetic construct
  source 1..9: note = Seed: VVGARGVGK (KRAS G12R)
IVGKRMVGL

SEQ ID NO: 39236 - protein, 9 aa, synthetic construct
  source 1..9: note = Seed: VVGARGVGK (KRAS G12R)
IVGKRMVGM

SEQ ID NO: 39237 - protein, 9 aa, synthetic construct
  source 1..9: note = Seed: VVGARGVGK (KRAS G12R)
IVGKRMVGR

SEQ ID NO: 39238 - protein, 9 aa, synthetic construct
  source 1..9: note = Seed: VVGARGVGK (KRAS G12R)
IVGKRMVGV

SEQ ID NO: 39239 - protein, 9 aa, synthetic construct
  source 1..9: note = Seed: VVGARGVGK (KRAS G12R)
IVGKRMVGY

SEQ ID NO: 39240 - protein, 9 aa, synthetic construct
  source 1..9: note = Seed: VVGARGVGK (KRAS G12R)
IVGKRNVGA

SEQ ID NO: 39241 - protein, 9 aa, synthetic construct
  source 1..9: note = Seed: VVGARGVGK (KRAS G12R)
IVGKRNVGF

SEQ ID NO: 39242 - protein, 9 aa, synthetic construct
  source 1..9: note = Seed: VVGARGVGK (KRAS G12R)
IVGKRNVGI

SEQ ID NO: 39243 - protein, 9 aa, synthetic construct
  source 1..9: note = Seed: VVGARGVGK (KRAS G12R)
IVGKRNVGK

SEQ ID NO: 39244 - protein, 9 aa, synthetic construct
  source 1..9: note = Seed: VVGARGVGK (KRAS G12R)
IVGKRNVGL

SEQ ID NO: 39245 - protein, 9 aa, synthetic construct
  source 1..9: note = Seed: VVGARGVGK (KRAS G12R)
IVGKRNVGM

SEQ ID NO: 39246 - protein, 9 aa, synthetic construct
  source 1..9: note = Seed: VVGARGVGK (KRAS G12R)
IVGKRNVGR

SEQ ID NO: 39247 - protein, 9 aa, synthetic construct
  source 1..9: note = Seed: VVGARGVGK (KRAS G12R)
IVGKRNVGV

SEQ ID NO: 39248 - protein, 9 aa, synthetic construct
  source 1..9: note = Seed: VVGARGVGK (KRAS G12R)
IVGKRNVGY

SEQ ID NO: 39249 - protein, 9 aa, synthetic construct
  source 1..9: note = Seed: VVGARGVGK (KRAS G12R)
IVGKRPVGA

SEQ ID NO: 39250 - protein, 9 aa, synthetic construct
  source 1..9: note = Seed: VVGARGVGK (KRAS G12R)
IVGKRPVGF

SEQ ID NO: 39251 - protein, 9 aa, synthetic construct
  source 1..9: note = Seed: VVGARGVGK (KRAS G12R)
IVGKRPVGI

SEQ ID NO: 39252 - protein, 9 aa, synthetic construct
  source 1..9: note = Seed: VVGARGVGK (KRAS G12R)
IVGKRPVGK

SEQ ID NO: 39253 - protein, 9 aa, synthetic construct
  source 1..9: note = Seed: VVGARGVGK (KRAS G12R)
IVGKRPVGL

SEQ ID NO: 39254 - protein, 9 aa, synthetic construct
  source 1..9: note = Seed: VVGARGVGK (KRAS G12R)
IVGKRPVGM

SEQ ID NO: 39255 - protein, 9 aa, synthetic construct
  source 1..9: note = Seed: VVGARGVGK (KRAS G12R)
IVGKRPVGR

SEQ ID NO: 39256 - protein, 9 aa, synthetic construct
  source 1..9: note = Seed: VVGARGVGK (KRAS G12R)
IVGKRPVGS

SEQ ID NO: 39257 - protein, 9 aa, synthetic construct
  source 1..9: note = Seed: VVGARGVGK (KRAS G12R)
IVGKRPVGV

SEQ ID NO: 39258 - protein, 9 aa, synthetic construct
  source 1..9: note = Seed: VVGARGVGK (KRAS G12R)
IVGKRPVGW

SEQ ID NO: 39259 - protein, 9 aa, synthetic construct
  source 1..9: note = Seed: VVGARGVGK (KRAS G12R)
IVGKRPVGY

SEQ ID NO: 39260 - protein, 9 aa, synthetic construct
  source 1..9: note = Seed: VVGARGVGK (KRAS G12R)
IVGKRQVGF

SEQ ID NO: 39261 - protein, 9 aa, synthetic construct
  source 1..9: note = Seed: VVGARGVGK (KRAS G12R)
IVGKRQVGI

SEQ ID NO: 39262 - protein, 9 aa, synthetic construct
  source 1..9: note = Seed: VVGARGVGK (KRAS G12R)
IVGKRQVGK

SEQ ID NO: 39263 - protein, 9 aa, synthetic construct
  source 1..9: note = Seed: VVGARGVGK (KRAS G12R)
IVGKRQVGL

SEQ ID NO: 39264 - protein, 9 aa, synthetic construct
  source 1..9: note = Seed: VVGARGVGK (KRAS G12R)
IVGKRQVGM

SEQ ID NO: 39265 - protein, 9 aa, synthetic construct
  source 1..9: note = Seed: VVGARGVGK (KRAS G12R)
IVGKRQVGR

SEQ ID NO: 39266 - protein, 9 aa, synthetic construct
  source 1..9: note = Seed: VVGARGVGK (KRAS G12R)
IVGKRQVGV

SEQ ID NO: 39267 - protein, 9 aa, synthetic construct
  source 1..9: note = Seed: VVGARGVGK (KRAS G12R)
IVGKRQVGY

SEQ ID NO: 39268 - protein, 9 aa, synthetic construct
  source 1..9: note = Seed: VVGARGVGK (KRAS G12R)
IVGKRRVGA

SEQ ID NO: 39269 - protein, 9 aa, synthetic construct
  source 1..9: note = Seed: VVGARGVGK (KRAS G12R)
IVGKRRVGC

SEQ ID NO: 39270 - protein, 9 aa, synthetic construct
  source 1..9: note = Seed: VVGARGVGK (KRAS G12R)
IVGKRRVGD

SEQ ID NO: 39271 - protein, 9 aa, synthetic construct
  source 1..9: note = Seed: VVGARGVGK (KRAS G12R)
IVGKRRVGE

SEQ ID NO: 39272 - protein, 9 aa, synthetic construct
  source 1..9: note = Seed: VVGARGVGK (KRAS G12R)
IVGKRRVGF

SEQ ID NO: 39273 - protein, 9 aa, synthetic construct
  source 1..9: note = Seed: VVGARGVGK (KRAS G12R)
IVGKRRVGG

SEQ ID NO: 39274 - protein, 9 aa, synthetic construct
  source 1..9: note = Seed: VVGARGVGK (KRAS G12R)
IVGKRRVGH

SEQ ID NO: 39275 - protein, 9 aa, synthetic construct
  source 1..9: note = Seed: VVGARGVGK (KRAS G12R)
IVGKRRVGI

SEQ ID NO: 39276 - protein, 9 aa, synthetic construct
  source 1..9: note = Seed: VVGARGVGK (KRAS G12R)
IVGKRRVGK

SEQ ID NO: 39277 - protein, 9 aa, synthetic construct
  source 1..9: note = Seed: VVGARGVGK (KRAS G12R)
IVGKRRVGL

SEQ ID NO: 39278 - protein, 9 aa, synthetic construct
  source 1..9: note = Seed: VVGARGVGK (KRAS G12R)
IVGKRRVGM

SEQ ID NO: 39279 - protein, 9 aa, synthetic construct
  source 1..9: note = Seed: VVGARGVGK (KRAS G12R)
IVGKRRVGN

SEQ ID NO: 39280 - protein, 9 aa, synthetic construct
  source 1..9: note = Seed: VVGARGVGK (KRAS G12R)
IVGKRRVGP

SEQ ID NO: 39281 - protein, 9 aa, synthetic construct
  source 1..9: note = Seed: VVGARGVGK (KRAS G12R)
IVGKRRVGQ

SEQ ID NO: 39282 - protein, 9 aa, synthetic construct
  source 1..9: note = Seed: VVGARGVGK (KRAS G12R)
IVGKRRVGR

SEQ ID NO: 39283 - protein, 9 aa, synthetic construct
  source 1..9: note = Seed: VVGARGVGK (KRAS G12R)
IVGKRRVGS

SEQ ID NO: 39284 - protein, 9 aa, synthetic construct
  source 1..9: note = Seed: VVGARGVGK (KRAS G12R)
IVGKRRVGT

SEQ ID NO: 39285 - protein, 9 aa, synthetic construct
  source 1..9: note = Seed: VVGARGVGK (KRAS G12R)
IVGKRRVGV

SEQ ID NO: 39286 - protein, 9 aa, synthetic construct
  source 1..9: note = Seed: VVGARGVGK (KRAS G12R)
IVGKRRVGW

SEQ ID NO: 39287 - protein, 9 aa, synthetic construct
  source 1..9: note = Seed: VVGARGVGK (KRAS G12R)
IVGKRRVGY

SEQ ID NO: 39288 - protein, 9 aa, synthetic construct
  source 1..9: note = Seed: VVGARGVGK (KRAS G12R)
IVGKRSVGA

SEQ ID NO: 39289 - protein, 9 aa, synthetic construct
  source 1..9: note = Seed: VVGARGVGK (KRAS G12R)
IVGKRSVGF

SEQ ID NO: 39290 - protein, 9 aa, synthetic construct
  source 1..9: note = Seed: VVGARGVGK (KRAS G12R)
IVGKRSVGH

SEQ ID NO: 39291 - protein, 9 aa, synthetic construct
  source 1..9: note = Seed: VVGARGVGK (KRAS G12R)
IVGKRSVGI

SEQ ID NO: 39292 - protein, 9 aa, synthetic construct
  source 1..9: note = Seed: VVGARGVGK (KRAS G12R)
IVGKRSVGK

SEQ ID NO: 39293 - protein, 9 aa, synthetic construct
  source 1..9: note = Seed: VVGARGVGK (KRAS G12R)
IVGKRSVGL

SEQ ID NO: 39294 - protein, 9 aa, synthetic construct
  source 1..9: note = Seed: VVGARGVGK (KRAS G12R)
IVGKRSVGM

SEQ ID NO: 39295 - protein, 9 aa, synthetic construct
  source 1..9: note = Seed: VVGARGVGK (KRAS G12R)
IVGKRSVGR

SEQ ID NO: 39296 - protein, 9 aa, synthetic construct
  source 1..9: note = Seed: VVGARGVGK (KRAS G12R)
IVGKRSVGV

SEQ ID NO: 39297 - protein, 9 aa, synthetic construct
  source 1..9: note = Seed: VVGARGVGK (KRAS G12R)
IVGKRSVGY

SEQ ID NO: 39298 - protein, 9 aa, synthetic construct
  source 1..9: note = Seed: VVGARGVGK (KRAS G12R)
IVGKRTVGF

SEQ ID NO: 39299 - protein, 9 aa, synthetic construct
  source 1..9: note = Seed: VVGARGVGK (KRAS G12R)
IVGKRTVGH

SEQ ID NO: 39300 - protein, 9 aa, synthetic construct
  source 1..9: note = Seed: VVGARGVGK (KRAS G12R)
IVGKRTVGI

SEQ ID NO: 39301 - protein, 9 aa, synthetic construct
  source 1..9: note = Seed: VVGARGVGK (KRAS G12R)
IVGKRTVGK

SEQ ID NO: 39302 - protein, 9 aa, synthetic construct
  source 1..9: note = Seed: VVGARGVGK (KRAS G12R)
IVGKRTVGL

SEQ ID NO: 39303 - protein, 9 aa, synthetic construct
  source 1..9: note = Seed: VVGARGVGK (KRAS G12R)
IVGKRTVGM

SEQ ID NO: 39304 - protein, 9 aa, synthetic construct
  source 1..9: note = Seed: VVGARGVGK (KRAS G12R)
IVGKRTVGR

SEQ ID NO: 39305 - protein, 9 aa, synthetic construct
  source 1..9: note = Seed: VVGARGVGK (KRAS G12R)
IVGKRTVGV

SEQ ID NO: 39306 - protein, 9 aa, synthetic construct
  source 1..9: note = Seed: VVGARGVGK (KRAS G12R)
IVGKRTVGY

SEQ ID NO: 39307 - protein, 9 aa, synthetic construct
  source 1..9: note = Seed: VVGARGVGK (KRAS G12R)
IVGKRVVGF

SEQ ID NO: 39308 - protein, 9 aa, synthetic construct
  source 1..9: note = Seed: VVGARGVGK (KRAS G12R)
IVGKRVVGH

SEQ ID NO: 39309 - protein, 9 aa, synthetic construct
  source 1..9: note = Seed: VVGARGVGK (KRAS G12R)
IVGKRVVGI

SEQ ID NO: 39310 - protein, 9 aa, synthetic construct
  source 1..9: note = Seed: VVGARGVGK (KRAS G12R)
IVGKRVVGK

SEQ ID NO: 39311 - protein, 9 aa, synthetic construct
  source 1..9: note = Seed: VVGARGVGK (KRAS G12R)
IVGKRVVGL

SEQ ID NO: 39312 - protein, 9 aa, synthetic construct
  source 1..9: note = Seed: VVGARGVGK (KRAS G12R)
IVGKRVVGM

SEQ ID NO: 39313 - protein, 9 aa, synthetic construct
  source 1..9: note = Seed: VVGARGVGK (KRAS G12R)
IVGKRVVGR

SEQ ID NO: 39314 - protein, 9 aa, synthetic construct
  source 1..9: note = Seed: VVGARGVGK (KRAS G12R)
IVGKRVVGV

SEQ ID NO: 39315 - protein, 9 aa, synthetic construct
  source 1..9: note = Seed: VVGARGVGK (KRAS G12R)
IVGKRVVGY

SEQ ID NO: 39316 - protein, 9 aa, synthetic construct
  source 1..9: note = Seed: VVGARGVGK (KRAS G12R)
IVGLRAVGA

SEQ ID NO: 39317 - protein, 9 aa, synthetic construct
  source 1..9: note = Seed: VVGARGVGK (KRAS G12R)
IVGLRAVGC

SEQ ID NO: 39318 - protein, 9 aa, synthetic construct
  source 1..9: note = Seed: VVGARGVGK (KRAS G12R)
IVGLRAVGD

SEQ ID NO: 39319 - protein, 9 aa, synthetic construct
  source 1..9: note = Seed: VVGARGVGK (KRAS G12R)
IVGLRAVGE

SEQ ID NO: 39320 - protein, 9 aa, synthetic construct
  source 1..9: note = Seed: VVGARGVGK (KRAS G12R)
IVGLRAVGF

SEQ ID NO: 39321 - protein, 9 aa, synthetic construct
  source 1..9: note = Seed: VVGARGVGK (KRAS G12R)
IVGLRAVGG

SEQ ID NO: 39322 - protein, 9 aa, synthetic construct
  source 1..9: note = Seed: VVGARGVGK (KRAS G12R)
IVGLRAVGH

SEQ ID NO: 39323 - protein, 9 aa, synthetic construct
  source 1..9: note = Seed: VVGARGVGK (KRAS G12R)
IVGLRAVGI

SEQ ID NO: 39324 - protein, 9 aa, synthetic construct
  source 1..9: note = Seed: VVGARGVGK (KRAS G12R)
IVGLRAVGK

SEQ ID NO: 39325 - protein, 9 aa, synthetic construct
  source 1..9: note = Seed: VVGARGVGK (KRAS G12R)
IVGLRAVGL

SEQ ID NO: 39326 - protein, 9 aa, synthetic construct
  source 1..9: note = Seed: VVGARGVGK (KRAS G12R)
IVGLRAVGM

SEQ ID NO: 39327 - protein, 9 aa, synthetic construct
  source 1..9: note = Seed: VVGARGVGK (KRAS G12R)
IVGLRAVGN

SEQ ID NO: 39328 - protein, 9 aa, synthetic construct
  source 1..9: note = Seed: VVGARGVGK (KRAS G12R)
IVGLRAVGP

SEQ ID NO: 39329 - protein, 9 aa, synthetic construct
  source 1..9: note = Seed: VVGARGVGK (KRAS G12R)
IVGLRAVGQ

SEQ ID NO: 39330 - protein, 9 aa, synthetic construct
  source 1..9: note = Seed: VVGARGVGK (KRAS G12R)
IVGLRAVGR

SEQ ID NO: 39331 - protein, 9 aa, synthetic construct
  source 1..9: note = Seed: VVGARGVGK (KRAS G12R)
IVGLRAVGS

SEQ ID NO: 39332 - protein, 9 aa, synthetic construct
  source 1..9: note = Seed: VVGARGVGK (KRAS G12R)
IVGLRAVGT

SEQ ID NO: 39333 - protein, 9 aa, synthetic construct
  source 1..9: note = Seed: VVGARGVGK (KRAS G12R)
IVGLRAVGV

SEQ ID NO: 39334 - protein, 9 aa, synthetic construct
  source 1..9: note = Seed: VVGARGVGK (KRAS G12R)
IVGLRAVGW

SEQ ID NO: 39335 - protein, 9 aa, synthetic construct
  source 1..9: note = Seed: VVGARGVGK (KRAS G12R)
IVGLRAVGY

SEQ ID NO: 39336 - protein, 9 aa, synthetic construct
  source 1..9: note = Seed: VVGARGVGK (KRAS G12R)
IVGLRCVGV

SEQ ID NO: 39337 - protein, 9 aa, synthetic construct
  source 1..9: note = Seed: VVGARGVGK (KRAS G12R)
IVGLRDVGI

SEQ ID NO: 39338 - protein, 9 aa, synthetic construct
  source 1..9: note = Seed: VVGARGVGK (KRAS G12R)
IVGLRDVGL

SEQ ID NO: 39339 - protein, 9 aa, synthetic construct
  source 1..9: note = Seed: VVGARGVGK (KRAS G12R)
IVGLRDVGV

SEQ ID NO: 39340 - protein, 9 aa, synthetic construct
  source 1..9: note = Seed: VVGARGVGK (KRAS G12R)
IVGLREVGA

SEQ ID NO: 39341 - protein, 9 aa, synthetic construct
  source 1..9: note = Seed: VVGARGVGK (KRAS G12R)
IVGLREVGI

SEQ ID NO: 39342 - protein, 9 aa, synthetic construct
  source 1..9: note = Seed: VVGARGVGK (KRAS G12R)
IVGLREVGL

SEQ ID NO: 39343 - protein, 9 aa, synthetic construct
  source 1..9: note = Seed: VVGARGVGK (KRAS G12R)
IVGLREVGV

SEQ ID NO: 39344 - protein, 9 aa, synthetic construct
  source 1..9: note = Seed: VVGARGVGK (KRAS G12R)
IVGLRGVGA

SEQ ID NO: 39345 - protein, 9 aa, synthetic construct
  source 1..9: note = Seed: VVGARGVGK (KRAS G12R)
IVGLRGVGC

SEQ ID NO: 39346 - protein, 9 aa, synthetic construct
  source 1..9: note = Seed: VVGARGVGK (KRAS G12R)
IVGLRGVGD

SEQ ID NO: 39347 - protein, 9 aa, synthetic construct
  source 1..9: note = Seed: VVGARGVGK (KRAS G12R)
IVGLRGVGE

SEQ ID NO: 39348 - protein, 9 aa, synthetic construct
  source 1..9: note = Seed: VVGARGVGK (KRAS G12R)
IVGLRGVGF

SEQ ID NO: 39349 - protein, 9 aa, synthetic construct
  source 1..9: note = Seed: VVGARGVGK (KRAS G12R)
IVGLRGVGG

SEQ ID NO: 39350 - protein, 9 aa, synthetic construct
  source 1..9: note = Seed: VVGARGVGK (KRAS G12R)
IVGLRGVGH

SEQ ID NO: 39351 - protein, 9 aa, synthetic construct
  source 1..9: note = Seed: VVGARGVGK (KRAS G12R)
IVGLRGVGI

SEQ ID NO: 39352 - protein, 9 aa, synthetic construct
  source 1..9: note = Seed: VVGARGVGK (KRAS G12R)
IVGLRGVGK

SEQ ID NO: 39353 - protein, 9 aa, synthetic construct
  source 1..9: note = Seed: VVGARGVGK (KRAS G12R)
IVGLRGVGL

SEQ ID NO: 39354 - protein, 9 aa, synthetic construct
  source 1..9: note = Seed: VVGARGVGK (KRAS G12R)
IVGLRGVGM

SEQ ID NO: 39355 - protein, 9 aa, synthetic construct
  source 1..9: note = Seed: VVGARGVGK (KRAS G12R)
IVGLRGVGN

SEQ ID NO: 39356 - protein, 9 aa, synthetic construct
  source 1..9: note = Seed: VVGARGVGK (KRAS G12R)
IVGLRGVGP

SEQ ID NO: 39357 - protein, 9 aa, synthetic construct
  source 1..9: note = Seed: VVGARGVGK (KRAS G12R)
IVGLRGVGQ

SEQ ID NO: 39358 - protein, 9 aa, synthetic construct
  source 1..9: note = Seed: VVGARGVGK (KRAS G12R)
IVGLRGVGR

SEQ ID NO: 39359 - protein, 9 aa, synthetic construct
  source 1..9: note = Seed: VVGARGVGK (KRAS G12R)
IVGLRGVGS

SEQ ID NO: 39360 - protein, 9 aa, synthetic construct
  source 1..9: note = Seed: VVGARGVGK (KRAS G12R)
IVGLRGVGT

SEQ ID NO: 39361 - protein, 9 aa, synthetic construct
  source 1..9: note = Seed: VVGARGVGK (KRAS G12R)
IVGLRGVGV

SEQ ID NO: 39362 - protein, 9 aa, synthetic construct
  source 1..9: note = Seed: VVGARGVGK (KRAS G12R)
IVGLRGVGY

SEQ ID NO: 39363 - protein, 9 aa, synthetic construct
  source 1..9: note = Seed: VVGARGVGK (KRAS G12R)
IVGLRHVGI

SEQ ID NO: 39364 - protein, 9 aa, synthetic construct
  source 1..9: note = Seed: VVGARGVGK (KRAS G12R)
IVGLRHVGL

SEQ ID NO: 39365 - protein, 9 aa, synthetic construct
  source 1..9: note = Seed: VVGARGVGK (KRAS G12R)
IVGLRHVGM

SEQ ID NO: 39366 - protein, 9 aa, synthetic construct
  source 1..9: note = Seed: VVGARGVGK (KRAS G12R)
IVGLRHVGR

SEQ ID NO: 39367 - protein, 9 aa, synthetic construct
  source 1..9: note = Seed: VVGARGVGK (KRAS G12R)
IVGLRHVGV

SEQ ID NO: 39368 - protein, 9 aa, synthetic construct
  source 1..9: note = Seed: VVGARGVGK (KRAS G12R)
IVGLRHVGY

SEQ ID NO: 39369 - protein, 9 aa, synthetic construct
  source 1..9: note = Seed: VVGARGVGK (KRAS G12R)
IVGLRIVGA

SEQ ID NO: 39370 - protein, 9 aa, synthetic construct
  source 1..9: note = Seed: VVGARGVGK (KRAS G12R)
IVGLRIVGH

SEQ ID NO: 39371 - protein, 9 aa, synthetic construct
  source 1..9: note = Seed: VVGARGVGK (KRAS G12R)
IVGLRIVGI

SEQ ID NO: 39372 - protein, 9 aa, synthetic construct
  source 1..9: note = Seed: VVGARGVGK (KRAS G12R)
IVGLRIVGL

SEQ ID NO: 39373 - protein, 9 aa, synthetic construct
  source 1..9: note = Seed: VVGARGVGK (KRAS G12R)
IVGLRIVGM

SEQ ID NO: 39374 - protein, 9 aa, synthetic construct
  source 1..9: note = Seed: VVGARGVGK (KRAS G12R)
IVGLRIVGN

SEQ ID NO: 39375 - protein, 9 aa, synthetic construct
  source 1..9: note = Seed: VVGARGVGK (KRAS G12R)
IVGLRIVGS

SEQ ID NO: 39376 - protein, 9 aa, synthetic construct
  source 1..9: note = Seed: VVGARGVGK (KRAS G12R)
IVGLRIVGT

SEQ ID NO: 39377 - protein, 9 aa, synthetic construct
  source 1..9: note = Seed: VVGARGVGK (KRAS G12R)
IVGLRIVGV

SEQ ID NO: 39378 - protein, 9 aa, synthetic construct
  source 1..9: note = Seed: VVGARGVGK (KRAS G12R)
IVGLRKVGA

SEQ ID NO: 39379 - protein, 9 aa, synthetic construct
  source 1..9: note = Seed: VVGARGVGK (KRAS G12R)
IVGLRKVGF

SEQ ID NO: 39380 - protein, 9 aa, synthetic construct
  source 1..9: note = Seed: VVGARGVGK (KRAS G12R)
IVGLRKVGG

SEQ ID NO: 39381 - protein, 9 aa, synthetic construct
  source 1..9: note = Seed: VVGARGVGK (KRAS G12R)
IVGLRKVGH

SEQ ID NO: 39382 - protein, 9 aa, synthetic construct
  source 1..9: note = Seed: VVGARGVGK (KRAS G12R)
IVGLRKVGI

SEQ ID NO: 39383 - protein, 9 aa, synthetic construct
  source 1..9: note = Seed: VVGARGVGK (KRAS G12R)
IVGLRKVGK

SEQ ID NO: 39384 - protein, 9 aa, synthetic construct
  source 1..9: note = Seed: VVGARGVGK (KRAS G12R)
IVGLRKVGL

SEQ ID NO: 39385 - protein, 9 aa, synthetic construct
  source 1..9: note = Seed: VVGARGVGK (KRAS G12R)
IVGLRKVGM

SEQ ID NO: 39386 - protein, 9 aa, synthetic construct
  source 1..9: note = Seed: VVGARGVGK (KRAS G12R)
IVGLRKVGN

SEQ ID NO: 39387 - protein, 9 aa, synthetic construct
  source 1..9: note = Seed: VVGARGVGK (KRAS G12R)
IVGLRKVGP

SEQ ID NO: 39388 - protein, 9 aa, synthetic construct
  source 1..9: note = Seed: VVGARGVGK (KRAS G12R)
IVGLRKVGQ

SEQ ID NO: 39389 - protein, 9 aa, synthetic construct
  source 1..9: note = Seed: VVGARGVGK (KRAS G12R)
IVGLRKVGR

SEQ ID NO: 39390 - protein, 9 aa, synthetic construct
  source 1..9: note = Seed: VVGARGVGK (KRAS G12R)
IVGLRKVGS

SEQ ID NO: 39391 - protein, 9 aa, synthetic construct
  source 1..9: note = Seed: VVGARGVGK (KRAS G12R)
IVGLRKVGT

SEQ ID NO: 39392 - protein, 9 aa, synthetic construct
  source 1..9: note = Seed: VVGARGVGK (KRAS G12R)
IVGLRKVGV

SEQ ID NO: 39393 - protein, 9 aa, synthetic construct
  source 1..9: note = Seed: VVGARGVGK (KRAS G12R)
IVGLRKVGY

SEQ ID NO: 39394 - protein, 9 aa, synthetic construct
  source 1..9: note = Seed: VVGARGVGK (KRAS G12R)
IVGLRLVGI

SEQ ID NO: 39395 - protein, 9 aa, synthetic construct
  source 1..9: note = Seed: VVGARGVGK (KRAS G12R)
IVGLRLVGM

SEQ ID NO: 39396 - protein, 9 aa, synthetic construct
  source 1..9: note = Seed: VVGARGVGK (KRAS G12R)
IVGLRLVGN

SEQ ID NO: 39397 - protein, 9 aa, synthetic construct
  source 1..9: note = Seed: VVGARGVGK (KRAS G12R)
IVGLRLVGS

SEQ ID NO: 39398 - protein, 9 aa, synthetic construct
  source 1..9: note = Seed: VVGARGVGK (KRAS G12R)
IVGLRMVGI

SEQ ID NO: 39399 - protein, 9 aa, synthetic construct
  source 1..9: note = Seed: VVGARGVGK (KRAS G12R)
IVGLRMVGL

SEQ ID NO: 39400 - protein, 9 aa, synthetic construct
  source 1..9: note = Seed: VVGARGVGK (KRAS G12R)
IVGLRMVGM

SEQ ID NO: 39401 - protein, 9 aa, synthetic construct
  source 1..9: note = Seed: VVGARGVGK (KRAS G12R)
IVGLRNVGA

SEQ ID NO: 39402 - protein, 9 aa, synthetic construct
  source 1..9: note = Seed: VVGARGVGK (KRAS G12R)
IVGLRNVGC

SEQ ID NO: 39403 - protein, 9 aa, synthetic construct
  source 1..9: note = Seed: VVGARGVGK (KRAS G12R)
IVGLRNVGF

SEQ ID NO: 39404 - protein, 9 aa, synthetic construct
  source 1..9: note = Seed: VVGARGVGK (KRAS G12R)
IVGLRNVGG

SEQ ID NO: 39405 - protein, 9 aa, synthetic construct
  source 1..9: note = Seed: VVGARGVGK (KRAS G12R)
IVGLRNVGH

SEQ ID NO: 39406 - protein, 9 aa, synthetic construct
  source 1..9: note = Seed: VVGARGVGK (KRAS G12R)
IVGLRNVGI

SEQ ID NO: 39407 - protein, 9 aa, synthetic construct
  source 1..9: note = Seed: VVGARGVGK (KRAS G12R)
IVGLRNVGL

SEQ ID NO: 39408 - protein, 9 aa, synthetic construct
  source 1..9: note = Seed: VVGARGVGK (KRAS G12R)
IVGLRNVGM

SEQ ID NO: 39409 - protein, 9 aa, synthetic construct
  source 1..9: note = Seed: VVGARGVGK (KRAS G12R)
IVGLRNVGN

SEQ ID NO: 39410 - protein, 9 aa, synthetic construct
  source 1..9: note = Seed: VVGARGVGK (KRAS G12R)
IVGLRNVGQ

SEQ ID NO: 39411 - protein, 9 aa, synthetic construct
  source 1..9: note = Seed: VVGARGVGK (KRAS G12R)
IVGLRNVGR

SEQ ID NO: 39412 - protein, 9 aa, synthetic construct
  source 1..9: note = Seed: VVGARGVGK (KRAS G12R)
IVGLRNVGS

SEQ ID NO: 39413 - protein, 9 aa, synthetic construct
  source 1..9: note = Seed: VVGARGVGK (KRAS G12R)
IVGLRNVGT

SEQ ID NO: 39414 - protein, 9 aa, synthetic construct
  source 1..9: note = Seed: VVGARGVGK (KRAS G12R)
IVGLRNVGV

SEQ ID NO: 39415 - protein, 9 aa, synthetic construct
  source 1..9: note = Seed: VVGARGVGK (KRAS G12R)
IVGLRNVGY

SEQ ID NO: 39416 - protein, 9 aa, synthetic construct
  source 1..9: note = Seed: VVGARGVGK (KRAS G12R)
IVGLRPVGA

SEQ ID NO: 39417 - protein, 9 aa, synthetic construct
  source 1..9: note = Seed: VVGARGVGK (KRAS G12R)
IVGLRPVGC

SEQ ID NO: 39418 - protein, 9 aa, synthetic construct
  source 1..9: note = Seed: VVGARGVGK (KRAS G12R)
IVGLRPVGD

SEQ ID NO: 39419 - protein, 9 aa, synthetic construct
  source 1..9: note = Seed: VVGARGVGK (KRAS G12R)
IVGLRPVGE

SEQ ID NO: 39420 - protein, 9 aa, synthetic construct
  source 1..9: note = Seed: VVGARGVGK (KRAS G12R)
IVGLRPVGF

SEQ ID NO: 39421 - protein, 9 aa, synthetic construct
  source 1..9: note = Seed: VVGARGVGK (KRAS G12R)
IVGLRPVGG

SEQ ID NO: 39422 - protein, 9 aa, synthetic construct
  source 1..9: note = Seed: VVGARGVGK (KRAS G12R)
IVGLRPVGH

SEQ ID NO: 39423 - protein, 9 aa, synthetic construct
  source 1..9: note = Seed: VVGARGVGK (KRAS G12R)
IVGLRPVGI

SEQ ID NO: 39424 - protein, 9 aa, synthetic construct
  source 1..9: note = Seed: VVGARGVGK (KRAS G12R)
IVGLRPVGK

SEQ ID NO: 39425 - protein, 9 aa, synthetic construct
  source 1..9: note = Seed: VVGARGVGK (KRAS G12R)
IVGLRPVGL

SEQ ID NO: 39426 - protein, 9 aa, synthetic construct
  source 1..9: note = Seed: VVGARGVGK (KRAS G12R)
IVGLRPVGM

SEQ ID NO: 39427 - protein, 9 aa, synthetic construct
  source 1..9: note = Seed: VVGARGVGK (KRAS G12R)
IVGLRPVGN

SEQ ID NO: 39428 - protein, 9 aa, synthetic construct
  source 1..9: note = Seed: VVGARGVGK (KRAS G12R)
IVGLRPVGP

SEQ ID NO: 39429 - protein, 9 aa, synthetic construct
  source 1..9: note = Seed: VVGARGVGK (KRAS G12R)
IVGLRPVGQ

SEQ ID NO: 39430 - protein, 9 aa, synthetic construct
  source 1..9: note = Seed: VVGARGVGK (KRAS G12R)
IVGLRPVGR

SEQ ID NO: 39431 - protein, 9 aa, synthetic construct
  source 1..9: note = Seed: VVGARGVGK (KRAS G12R)
IVGLRPVGS

SEQ ID NO: 39432 - protein, 9 aa, synthetic construct
  source 1..9: note = Seed: VVGARGVGK (KRAS G12R)
IVGLRPVGT

SEQ ID NO: 39433 - protein, 9 aa, synthetic construct
  source 1..9: note = Seed: VVGARGVGK (KRAS G12R)
IVGLRPVGV

SEQ ID NO: 39434 - protein, 9 aa, synthetic construct
  source 1..9: note = Seed: VVGARGVGK (KRAS G12R)
IVGLRPVGW

SEQ ID NO: 39435 - protein, 9 aa, synthetic construct
  source 1..9: note = Seed: VVGARGVGK (KRAS G12R)
IVGLRPVGY

SEQ ID NO: 39436 - protein, 9 aa, synthetic construct
  source 1..9: note = Seed: VVGARGVGK (KRAS G12R)
IVGLRQVGI

SEQ ID NO: 39437 - protein, 9 aa, synthetic construct
  source 1..9: note = Seed: VVGARGVGK (KRAS G12R)
IVGLRQVGL

SEQ ID NO: 39438 - protein, 9 aa, synthetic construct
  source 1..9: note = Seed: VVGARGVGK (KRAS G12R)
IVGLRQVGR

SEQ ID NO: 39439 - protein, 9 aa, synthetic construct
  source 1..9: note = Seed: VVGARGVGK (KRAS G12R)
IVGLRQVGV

SEQ ID NO: 39440 - protein, 9 aa, synthetic construct
  source 1..9: note = Seed: VVGARGVGK (KRAS G12R)
IVGLRRVGA

SEQ ID NO: 39441 - protein, 9 aa, synthetic construct
  source 1..9: note = Seed: VVGARGVGK (KRAS G12R)
IVGLRRVGF

SEQ ID NO: 39442 - protein, 9 aa, synthetic construct
  source 1..9: note = Seed: VVGARGVGK (KRAS G12R)
IVGLRRVGG

SEQ ID NO: 39443 - protein, 9 aa, synthetic construct
  source 1..9: note = Seed: VVGARGVGK (KRAS G12R)
IVGLRRVGH

SEQ ID NO: 39444 - protein, 9 aa, synthetic construct
  source 1..9: note = Seed: VVGARGVGK (KRAS G12R)
IVGLRRVGI

SEQ ID NO: 39445 - protein, 9 aa, synthetic construct
  source 1..9: note = Seed: VVGARGVGK (KRAS G12R)
IVGLRRVGK

SEQ ID NO: 39446 - protein, 9 aa, synthetic construct
  source 1..9: note = Seed: VVGARGVGK (KRAS G12R)
IVGLRRVGL

SEQ ID NO: 39447 - protein, 9 aa, synthetic construct
  source 1..9: note = Seed: VVGARGVGK (KRAS G12R)
IVGLRRVGM

SEQ ID NO: 39448 - protein, 9 aa, synthetic construct
  source 1..9: note = Seed: VVGARGVGK (KRAS G12R)
IVGLRRVGN

SEQ ID NO: 39449 - protein, 9 aa, synthetic construct
  source 1..9: note = Seed: VVGARGVGK (KRAS G12R)
IVGLRRVGP

SEQ ID NO: 39450 - protein, 9 aa, synthetic construct
  source 1..9: note = Seed: VVGARGVGK (KRAS G12R)
IVGLRRVGQ

SEQ ID NO: 39451 - protein, 9 aa, synthetic construct
  source 1..9: note = Seed: VVGARGVGK (KRAS G12R)
IVGLRRVGR

SEQ ID NO: 39452 - protein, 9 aa, synthetic construct
  source 1..9: note = Seed: VVGARGVGK (KRAS G12R)
IVGLRRVGS

SEQ ID NO: 39453 - protein, 9 aa, synthetic construct
  source 1..9: note = Seed: VVGARGVGK (KRAS G12R)
IVGLRRVGT

SEQ ID NO: 39454 - protein, 9 aa, synthetic construct
  source 1..9: note = Seed: VVGARGVGK (KRAS G12R)
IVGLRRVGV

SEQ ID NO: 39455 - protein, 9 aa, synthetic construct
  source 1..9: note = Seed: VVGARGVGK (KRAS G12R)
IVGLRRVGW

SEQ ID NO: 39456 - protein, 9 aa, synthetic construct
  source 1..9: note = Seed: VVGARGVGK (KRAS G12R)
IVGLRRVGY

SEQ ID NO: 39457 - protein, 9 aa, synthetic construct
  source 1..9: note = Seed: VVGARGVGK (KRAS G12R)
IVGLRSVGA

SEQ ID NO: 39458 - protein, 9 aa, synthetic construct
  source 1..9: note = Seed: VVGARGVGK (KRAS G12R)
IVGLRSVGC

SEQ ID NO: 39459 - protein, 9 aa, synthetic construct
  source 1..9: note = Seed: VVGARGVGK (KRAS G12R)
IVGLRSVGF

SEQ ID NO: 39460 - protein, 9 aa, synthetic construct
  source 1..9: note = Seed: VVGARGVGK (KRAS G12R)
IVGLRSVGG

SEQ ID NO: 39461 - protein, 9 aa, synthetic construct
  source 1..9: note = Seed: VVGARGVGK (KRAS G12R)
IVGLRSVGH

SEQ ID NO: 39462 - protein, 9 aa, synthetic construct
  source 1..9: note = Seed: VVGARGVGK (KRAS G12R)
IVGLRSVGI

SEQ ID NO: 39463 - protein, 9 aa, synthetic construct
  source 1..9: note = Seed: VVGARGVGK (KRAS G12R)
IVGLRSVGK

SEQ ID NO: 39464 - protein, 9 aa, synthetic construct
  source 1..9: note = Seed: VVGARGVGK (KRAS G12R)
IVGLRSVGL

SEQ ID NO: 39465 - protein, 9 aa, synthetic construct
  source 1..9: note = Seed: VVGARGVGK (KRAS G12R)
IVGLRSVGM

SEQ ID NO: 39466 - protein, 9 aa, synthetic construct
  source 1..9: note = Seed: VVGARGVGK (KRAS G12R)
IVGLRSVGN

SEQ ID NO: 39467 - protein, 9 aa, synthetic construct
  source 1..9: note = Seed: VVGARGVGK (KRAS G12R)
IVGLRSVGQ

SEQ ID NO: 39468 - protein, 9 aa, synthetic construct
  source 1..9: note = Seed: VVGARGVGK (KRAS G12R)
IVGLRSVGR

SEQ ID NO: 39469 - protein, 9 aa, synthetic construct
  source 1..9: note = Seed: VVGARGVGK (KRAS G12R)
IVGLRSVGS

SEQ ID NO: 39470 - protein, 9 aa, synthetic construct
  source 1..9: note = Seed: VVGARGVGK (KRAS G12R)
IVGLRSVGT

SEQ ID NO: 39471 - protein, 9 aa, synthetic construct
  source 1..9: note = Seed: VVGARGVGK (KRAS G12R)
IVGLRSVGV

SEQ ID NO: 39472 - protein, 9 aa, synthetic construct
  source 1..9: note = Seed: VVGARGVGK (KRAS G12R)
IVGLRSVGY

SEQ ID NO: 39473 - protein, 9 aa, synthetic construct
  source 1..9: note = Seed: VVGARGVGK (KRAS G12R)
IVGLRTVGA

SEQ ID NO: 39474 - protein, 9 aa, synthetic construct
  source 1..9: note = Seed: VVGARGVGK (KRAS G12R)
IVGLRTVGC

SEQ ID NO: 39475 - protein, 9 aa, synthetic construct
  source 1..9: note = Seed: VVGARGVGK (KRAS G12R)
IVGLRTVGF

SEQ ID NO: 39476 - protein, 9 aa, synthetic construct
  source 1..9: note = Seed: VVGARGVGK (KRAS G12R)
IVGLRTVGG

SEQ ID NO: 39477 - protein, 9 aa, synthetic construct
  source 1..9: note = Seed: VVGARGVGK (KRAS G12R)
IVGLRTVGH

SEQ ID NO: 39478 - protein, 9 aa, synthetic construct
  source 1..9: note = Seed: VVGARGVGK (KRAS G12R)
IVGLRTVGI

SEQ ID NO: 39479 - protein, 9 aa, synthetic construct
  source 1..9: note = Seed: VVGARGVGK (KRAS G12R)
IVGLRTVGK

SEQ ID NO: 39480 - protein, 9 aa, synthetic construct
  source 1..9: note = Seed: VVGARGVGK (KRAS G12R)
IVGLRTVGL

SEQ ID NO: 39481 - protein, 9 aa, synthetic construct
  source 1..9: note = Seed: VVGARGVGK (KRAS G12R)
IVGLRTVGM

SEQ ID NO: 39482 - protein, 9 aa, synthetic construct
  source 1..9: note = Seed: VVGARGVGK (KRAS G12R)
IVGLRTVGN

SEQ ID NO: 39483 - protein, 9 aa, synthetic construct
  source 1..9: note = Seed: VVGARGVGK (KRAS G12R)
IVGLRTVGQ

SEQ ID NO: 39484 - protein, 9 aa, synthetic construct
  source 1..9: note = Seed: VVGARGVGK (KRAS G12R)
IVGLRTVGR

SEQ ID NO: 39485 - protein, 9 aa, synthetic construct
  source 1..9: note = Seed: VVGARGVGK (KRAS G12R)
IVGLRTVGS

SEQ ID NO: 39486 - protein, 9 aa, synthetic construct
  source 1..9: note = Seed: VVGARGVGK (KRAS G12R)
IVGLRTVGT

SEQ ID NO: 39487 - protein, 9 aa, synthetic construct
  source 1..9: note = Seed: VVGARGVGK (KRAS G12R)
IVGLRTVGV

SEQ ID NO: 39488 - protein, 9 aa, synthetic construct
  source 1..9: note = Seed: VVGARGVGK (KRAS G12R)
IVGLRTVGY

SEQ ID NO: 39489 - protein, 9 aa, synthetic construct
  source 1..9: note = Seed: VVGARGVGK (KRAS G12R)
IVGLRVVGA

SEQ ID NO: 39490 - protein, 9 aa, synthetic construct
  source 1..9: note = Seed: VVGARGVGK (KRAS G12R)
IVGLRVVGG

SEQ ID NO: 39491 - protein, 9 aa, synthetic construct
  source 1..9: note = Seed: VVGARGVGK (KRAS G12R)
IVGLRVVGH

SEQ ID NO: 39492 - protein, 9 aa, synthetic construct
  source 1..9: note = Seed: VVGARGVGK (KRAS G12R)
IVGLRVVGI

SEQ ID NO: 39493 - protein, 9 aa, synthetic construct
  source 1..9: note = Seed: VVGARGVGK (KRAS G12R)
IVGLRVVGL

SEQ ID NO: 39494 - protein, 9 aa, synthetic construct
  source 1..9: note = Seed: VVGARGVGK (KRAS G12R)
IVGLRVVGM

SEQ ID NO: 39495 - protein, 9 aa, synthetic construct
  source 1..9: note = Seed: VVGARGVGK (KRAS G12R)
IVGLRVVGN

SEQ ID NO: 39496 - protein, 9 aa, synthetic construct
  source 1..9: note = Seed: VVGARGVGK (KRAS G12R)
IVGLRVVGR

SEQ ID NO: 39497 - protein, 9 aa, synthetic construct
  source 1..9: note = Seed: VVGARGVGK (KRAS G12R)
IVGLRVVGS

SEQ ID NO: 39498 - protein, 9 aa, synthetic construct
  source 1..9: note = Seed: VVGARGVGK (KRAS G12R)
IVGLRVVGT

SEQ ID NO: 39499 - protein, 9 aa, synthetic construct
  source 1..9: note = Seed: VVGARGVGK (KRAS G12R)
IVGLRVVGV

SEQ ID NO: 39500 - protein, 9 aa, synthetic construct
  source 1..9: note = Seed: VVGARGVGK (KRAS G12R)
IVGMRAVGA

SEQ ID NO: 39501 - protein, 9 aa, synthetic construct
  source 1..9: note = Seed: VVGARGVGK (KRAS G12R)
IVGMRAVGC

SEQ ID NO: 39502 - protein, 9 aa, synthetic construct
  source 1..9: note = Seed: VVGARGVGK (KRAS G12R)
IVGMRAVGD

SEQ ID NO: 39503 - protein, 9 aa, synthetic construct
  source 1..9: note = Seed: VVGARGVGK (KRAS G12R)
IVGMRAVGE

SEQ ID NO: 39504 - protein, 9 aa, synthetic construct
  source 1..9: note = Seed: VVGARGVGK (KRAS G12R)
IVGMRAVGF

SEQ ID NO: 39505 - protein, 9 aa, synthetic construct
  source 1..9: note = Seed: VVGARGVGK (KRAS G12R)
IVGMRAVGG

SEQ ID NO: 39506 - protein, 9 aa, synthetic construct
  source 1..9: note = Seed: VVGARGVGK (KRAS G12R)
IVGMRAVGH

SEQ ID NO: 39507 - protein, 9 aa, synthetic construct
  source 1..9: note = Seed: VVGARGVGK (KRAS G12R)
IVGMRAVGI

SEQ ID NO: 39508 - protein, 9 aa, synthetic construct
  source 1..9: note = Seed: VVGARGVGK (KRAS G12R)
IVGMRAVGK

SEQ ID NO: 39509 - protein, 9 aa, synthetic construct
  source 1..9: note = Seed: VVGARGVGK (KRAS G12R)
IVGMRAVGL

SEQ ID NO: 39510 - protein, 9 aa, synthetic construct
  source 1..9: note = Seed: VVGARGVGK (KRAS G12R)
IVGMRAVGM

SEQ ID NO: 39511 - protein, 9 aa, synthetic construct
  source 1..9: note = Seed: VVGARGVGK (KRAS G12R)
IVGMRAVGN

SEQ ID NO: 39512 - protein, 9 aa, synthetic construct
  source 1..9: note = Seed: VVGARGVGK (KRAS G12R)
IVGMRAVGP

SEQ ID NO: 39513 - protein, 9 aa, synthetic construct
  source 1..9: note = Seed: VVGARGVGK (KRAS G12R)
IVGMRAVGQ

SEQ ID NO: 39514 - protein, 9 aa, synthetic construct
  source 1..9: note = Seed: VVGARGVGK (KRAS G12R)
IVGMRAVGR

SEQ ID NO: 39515 - protein, 9 aa, synthetic construct
  source 1..9: note = Seed: VVGARGVGK (KRAS G12R)
IVGMRAVGS

SEQ ID NO: 39516 - protein, 9 aa, synthetic construct
  source 1..9: note = Seed: VVGARGVGK (KRAS G12R)
IVGMRAVGT

SEQ ID NO: 39517 - protein, 9 aa, synthetic construct
  source 1..9: note = Seed: VVGARGVGK (KRAS G12R)
IVGMRAVGV

SEQ ID NO: 39518 - protein, 9 aa, synthetic construct
  source 1..9: note = Seed: VVGARGVGK (KRAS G12R)
IVGMRAVGW

SEQ ID NO: 39519 - protein, 9 aa, synthetic construct
  source 1..9: note = Seed: VVGARGVGK (KRAS G12R)
IVGMRAVGY

SEQ ID NO: 39520 - protein, 9 aa, synthetic construct
  source 1..9: note = Seed: VVGARGVGK (KRAS G12R)
IVGMRCVGV

SEQ ID NO: 39521 - protein, 9 aa, synthetic construct
  source 1..9: note = Seed: VVGARGVGK (KRAS G12R)
IVGMRDVGI

SEQ ID NO: 39522 - protein, 9 aa, synthetic construct
  source 1..9: note = Seed: VVGARGVGK (KRAS G12R)
IVGMRDVGL

SEQ ID NO: 39523 - protein, 9 aa, synthetic construct
  source 1..9: note = Seed: VVGARGVGK (KRAS G12R)
IVGMRDVGV

SEQ ID NO: 39524 - protein, 9 aa, synthetic construct
  source 1..9: note = Seed: VVGARGVGK (KRAS G12R)
IVGMREVGA

SEQ ID NO: 39525 - protein, 9 aa, synthetic construct
  source 1..9: note = Seed: VVGARGVGK (KRAS G12R)
IVGMREVGL

SEQ ID NO: 39526 - protein, 9 aa, synthetic construct
  source 1..9: note = Seed: VVGARGVGK (KRAS G12R)
IVGMREVGV

SEQ ID NO: 39527 - protein, 9 aa, synthetic construct
  source 1..9: note = Seed: VVGARGVGK (KRAS G12R)
IVGMRGVGA

SEQ ID NO: 39528 - protein, 9 aa, synthetic construct
  source 1..9: note = Seed: VVGARGVGK (KRAS G12R)
IVGMRGVGC

SEQ ID NO: 39529 - protein, 9 aa, synthetic construct
  source 1..9: note = Seed: VVGARGVGK (KRAS G12R)
IVGMRGVGD

SEQ ID NO: 39530 - protein, 9 aa, synthetic construct
  source 1..9: note = Seed: VVGARGVGK (KRAS G12R)
IVGMRGVGE

SEQ ID NO: 39531 - protein, 9 aa, synthetic construct
  source 1..9: note = Seed: VVGARGVGK (KRAS G12R)
IVGMRGVGF

SEQ ID NO: 39532 - protein, 9 aa, synthetic construct
  source 1..9: note = Seed: VVGARGVGK (KRAS G12R)
IVGMRGVGG

SEQ ID NO: 39533 - protein, 9 aa, synthetic construct
  source 1..9: note = Seed: VVGARGVGK (KRAS G12R)
IVGMRGVGH

SEQ ID NO: 39534 - protein, 9 aa, synthetic construct
  source 1..9: note = Seed: VVGARGVGK (KRAS G12R)
IVGMRGVGI

SEQ ID NO: 39535 - protein, 9 aa, synthetic construct
  source 1..9: note = Seed: VVGARGVGK (KRAS G12R)
IVGMRGVGK

SEQ ID NO: 39536 - protein, 9 aa, synthetic construct
  source 1..9: note = Seed: VVGARGVGK (KRAS G12R)
IVGMRGVGL

SEQ ID NO: 39537 - protein, 9 aa, synthetic construct
  source 1..9: note = Seed: VVGARGVGK (KRAS G12R)
IVGMRGVGM

SEQ ID NO: 39538 - protein, 9 aa, synthetic construct
  source 1..9: note = Seed: VVGARGVGK (KRAS G12R)
IVGMRGVGN

SEQ ID NO: 39539 - protein, 9 aa, synthetic construct
  source 1..9: note = Seed: VVGARGVGK (KRAS G12R)
IVGMRGVGP

SEQ ID NO: 39540 - protein, 9 aa, synthetic construct
  source 1..9: note = Seed: VVGARGVGK (KRAS G12R)
IVGMRGVGQ

SEQ ID NO: 39541 - protein, 9 aa, synthetic construct
  source 1..9: note = Seed: VVGARGVGK (KRAS G12R)
IVGMRGVGR

SEQ ID NO: 39542 - protein, 9 aa, synthetic construct
  source 1..9: note = Seed: VVGARGVGK (KRAS G12R)
IVGMRGVGS

SEQ ID NO: 39543 - protein, 9 aa, synthetic construct
  source 1..9: note = Seed: VVGARGVGK (KRAS G12R)
IVGMRGVGT

SEQ ID NO: 39544 - protein, 9 aa, synthetic construct
  source 1..9: note = Seed: VVGARGVGK (KRAS G12R)
IVGMRGVGV

SEQ ID NO: 39545 - protein, 9 aa, synthetic construct
  source 1..9: note = Seed: VVGARGVGK (KRAS G12R)
IVGMRGVGY

SEQ ID NO: 39546 - protein, 9 aa, synthetic construct
  source 1..9: note = Seed: VVGARGVGK (KRAS G12R)
IVGMRHVGA

SEQ ID NO: 39547 - protein, 9 aa, synthetic construct
  source 1..9: note = Seed: VVGARGVGK (KRAS G12R)
IVGMRHVGI

SEQ ID NO: 39548 - protein, 9 aa, synthetic construct
  source 1..9: note = Seed: VVGARGVGK (KRAS G12R)
IVGMRHVGK

SEQ ID NO: 39549 - protein, 9 aa, synthetic construct
  source 1..9: note = Seed: VVGARGVGK (KRAS G12R)
IVGMRHVGL

SEQ ID NO: 39550 - protein, 9 aa, synthetic construct
  source 1..9: note = Seed: VVGARGVGK (KRAS G12R)
IVGMRHVGM

SEQ ID NO: 39551 - protein, 9 aa, synthetic construct
  source 1..9: note = Seed: VVGARGVGK (KRAS G12R)
IVGMRHVGR

SEQ ID NO: 39552 - protein, 9 aa, synthetic construct
  source 1..9: note = Seed: VVGARGVGK (KRAS G12R)
IVGMRHVGT

SEQ ID NO: 39553 - protein, 9 aa, synthetic construct
  source 1..9: note = Seed: VVGARGVGK (KRAS G12R)
IVGMRHVGV

SEQ ID NO: 39554 - protein, 9 aa, synthetic construct
  source 1..9: note = Seed: VVGARGVGK (KRAS G12R)
IVGMRHVGY

SEQ ID NO: 39555 - protein, 9 aa, synthetic construct
  source 1..9: note = Seed: VVGARGVGK (KRAS G12R)
IVGMRIVGA

SEQ ID NO: 39556 - protein, 9 aa, synthetic construct
  source 1..9: note = Seed: VVGARGVGK (KRAS G12R)
IVGMRIVGH

SEQ ID NO: 39557 - protein, 9 aa, synthetic construct
  source 1..9: note = Seed: VVGARGVGK (KRAS G12R)
IVGMRIVGI

SEQ ID NO: 39558 - protein, 9 aa, synthetic construct
  source 1..9: note = Seed: VVGARGVGK (KRAS G12R)
IVGMRIVGL

SEQ ID NO: 39559 - protein, 9 aa, synthetic construct
  source 1..9: note = Seed: VVGARGVGK (KRAS G12R)
IVGMRIVGM

SEQ ID NO: 39560 - protein, 9 aa, synthetic construct
  source 1..9: note = Seed: VVGARGVGK (KRAS G12R)
IVGMRIVGN

SEQ ID NO: 39561 - protein, 9 aa, synthetic construct
  source 1..9: note = Seed: VVGARGVGK (KRAS G12R)
IVGMRIVGR

SEQ ID NO: 39562 - protein, 9 aa, synthetic construct
  source 1..9: note = Seed: VVGARGVGK (KRAS G12R)
IVGMRIVGS

SEQ ID NO: 39563 - protein, 9 aa, synthetic construct
  source 1..9: note = Seed: VVGARGVGK (KRAS G12R)
IVGMRIVGT

SEQ ID NO: 39564 - protein, 9 aa, synthetic construct
  source 1..9: note = Seed: VVGARGVGK (KRAS G12R)
IVGMRIVGV

SEQ ID NO: 39565 - protein, 9 aa, synthetic construct
  source 1..9: note = Seed: VVGARGVGK (KRAS G12R)
IVGMRIVGY

SEQ ID NO: 39566 - protein, 9 aa, synthetic construct
  source 1..9: note = Seed: VVGARGVGK (KRAS G12R)
IVGMRKVGA

SEQ ID NO: 39567 - protein, 9 aa, synthetic construct
  source 1..9: note = Seed: VVGARGVGK (KRAS G12R)
IVGMRKVGF

SEQ ID NO: 39568 - protein, 9 aa, synthetic construct
  source 1..9: note = Seed: VVGARGVGK (KRAS G12R)
IVGMRKVGG

SEQ ID NO: 39569 - protein, 9 aa, synthetic construct
  source 1..9: note = Seed: VVGARGVGK (KRAS G12R)
IVGMRKVGH

SEQ ID NO: 39570 - protein, 9 aa, synthetic construct
  source 1..9: note = Seed: VVGARGVGK (KRAS G12R)
IVGMRKVGI

SEQ ID NO: 39571 - protein, 9 aa, synthetic construct
  source 1..9: note = Seed: VVGARGVGK (KRAS G12R)
IVGMRKVGK

SEQ ID NO: 39572 - protein, 9 aa, synthetic construct
  source 1..9: note = Seed: VVGARGVGK (KRAS G12R)
IVGMRKVGL

SEQ ID NO: 39573 - protein, 9 aa, synthetic construct
  source 1..9: note = Seed: VVGARGVGK (KRAS G12R)
IVGMRKVGM

SEQ ID NO: 39574 - protein, 9 aa, synthetic construct
  source 1..9: note = Seed: VVGARGVGK (KRAS G12R)
IVGMRKVGN

SEQ ID NO: 39575 - protein, 9 aa, synthetic construct
  source 1..9: note = Seed: VVGARGVGK (KRAS G12R)
IVGMRKVGP

SEQ ID NO: 39576 - protein, 9 aa, synthetic construct
  source 1..9: note = Seed: VVGARGVGK (KRAS G12R)
IVGMRKVGQ

SEQ ID NO: 39577 - protein, 9 aa, synthetic construct
  source 1..9: note = Seed: VVGARGVGK (KRAS G12R)
IVGMRKVGR

SEQ ID NO: 39578 - protein, 9 aa, synthetic construct
  source 1..9: note = Seed: VVGARGVGK (KRAS G12R)
IVGMRKVGS

SEQ ID NO: 39579 - protein, 9 aa, synthetic construct
  source 1..9: note = Seed: VVGARGVGK (KRAS G12R)
IVGMRKVGT

SEQ ID NO: 39580 - protein, 9 aa, synthetic construct
  source 1..9: note = Seed: VVGARGVGK (KRAS G12R)
IVGMRKVGV

SEQ ID NO: 39581 - protein, 9 aa, synthetic construct
  source 1..9: note = Seed: VVGARGVGK (KRAS G12R)
IVGMRKVGY

SEQ ID NO: 39582 - protein, 9 aa, synthetic construct
  source 1..9: note = Seed: VVGARGVGK (KRAS G12R)
IVGMRLVGA

SEQ ID NO: 39583 - protein, 9 aa, synthetic construct
  source 1..9: note = Seed: VVGARGVGK (KRAS G12R)
IVGMRLVGH

SEQ ID NO: 39584 - protein, 9 aa, synthetic construct
  source 1..9: note = Seed: VVGARGVGK (KRAS G12R)
IVGMRLVGI

SEQ ID NO: 39585 - protein, 9 aa, synthetic construct
  source 1..9: note = Seed: VVGARGVGK (KRAS G12R)
IVGMRLVGL

SEQ ID NO: 39586 - protein, 9 aa, synthetic construct
  source 1..9: note = Seed: VVGARGVGK (KRAS G12R)
IVGMRLVGM

SEQ ID NO: 39587 - protein, 9 aa, synthetic construct
  source 1..9: note = Seed: VVGARGVGK (KRAS G12R)
IVGMRLVGN

SEQ ID NO: 39588 - protein, 9 aa, synthetic construct
  source 1..9: note = Seed: VVGARGVGK (KRAS G12R)
IVGMRLVGS

SEQ ID NO: 39589 - protein, 9 aa, synthetic construct
  source 1..9: note = Seed: VVGARGVGK (KRAS G12R)
IVGMRLVGV

SEQ ID NO: 39590 - protein, 9 aa, synthetic construct
  source 1..9: note = Seed: VVGARGVGK (KRAS G12R)
IVGMRMVGI

SEQ ID NO: 39591 - protein, 9 aa, synthetic construct
  source 1..9: note = Seed: VVGARGVGK (KRAS G12R)
IVGMRMVGL

SEQ ID NO: 39592 - protein, 9 aa, synthetic construct
  source 1..9: note = Seed: VVGARGVGK (KRAS G12R)
IVGMRMVGM

SEQ ID NO: 39593 - protein, 9 aa, synthetic construct
  source 1..9: note = Seed: VVGARGVGK (KRAS G12R)
IVGMRMVGN

SEQ ID NO: 39594 - protein, 9 aa, synthetic construct
  source 1..9: note = Seed: VVGARGVGK (KRAS G12R)
IVGMRMVGS

SEQ ID NO: 39595 - protein, 9 aa, synthetic construct
  source 1..9: note = Seed: VVGARGVGK (KRAS G12R)
IVGMRMVGV

SEQ ID NO: 39596 - protein, 9 aa, synthetic construct
  source 1..9: note = Seed: VVGARGVGK (KRAS G12R)
IVGMRNVGA

SEQ ID NO: 39597 - protein, 9 aa, synthetic construct
  source 1..9: note = Seed: VVGARGVGK (KRAS G12R)
IVGMRNVGC

SEQ ID NO: 39598 - protein, 9 aa, synthetic construct
  source 1..9: note = Seed: VVGARGVGK (KRAS G12R)
IVGMRNVGF

SEQ ID NO: 39599 - protein, 9 aa, synthetic construct
  source 1..9: note = Seed: VVGARGVGK (KRAS G12R)
IVGMRNVGG

SEQ ID NO: 39600 - protein, 9 aa, synthetic construct
  source 1..9: note = Seed: VVGARGVGK (KRAS G12R)
IVGMRNVGH

SEQ ID NO: 39601 - protein, 9 aa, synthetic construct
  source 1..9: note = Seed: VVGARGVGK (KRAS G12R)
IVGMRNVGI

SEQ ID NO: 39602 - protein, 9 aa, synthetic construct
  source 1..9: note = Seed: VVGARGVGK (KRAS G12R)
IVGMRNVGK

SEQ ID NO: 39603 - protein, 9 aa, synthetic construct
  source 1..9: note = Seed: VVGARGVGK (KRAS G12R)
IVGMRNVGL

SEQ ID NO: 39604 - protein, 9 aa, synthetic construct
  source 1..9: note = Seed: VVGARGVGK (KRAS G12R)
IVGMRNVGM

SEQ ID NO: 39605 - protein, 9 aa, synthetic construct
  source 1..9: note = Seed: VVGARGVGK (KRAS G12R)
IVGMRNVGN

SEQ ID NO: 39606 - protein, 9 aa, synthetic construct
  source 1..9: note = Seed: VVGARGVGK (KRAS G12R)
IVGMRNVGQ

SEQ ID NO: 39607 - protein, 9 aa, synthetic construct
  source 1..9: note = Seed: VVGARGVGK (KRAS G12R)
IVGMRNVGR

SEQ ID NO: 39608 - protein, 9 aa, synthetic construct
  source 1..9: note = Seed: VVGARGVGK (KRAS G12R)
IVGMRNVGS

SEQ ID NO: 39609 - protein, 9 aa, synthetic construct
  source 1..9: note = Seed: VVGARGVGK (KRAS G12R)
IVGMRNVGT

SEQ ID NO: 39610 - protein, 9 aa, synthetic construct
  source 1..9: note = Seed: VVGARGVGK (KRAS G12R)
IVGMRNVGV

SEQ ID NO: 39611 - protein, 9 aa, synthetic construct
  source 1..9: note = Seed: VVGARGVGK (KRAS G12R)
IVGMRNVGY

SEQ ID NO: 39612 - protein, 9 aa, synthetic construct
  source 1..9: note = Seed: VVGARGVGK (KRAS G12R)
IVGMRPVGA

SEQ ID NO: 39613 - protein, 9 aa, synthetic construct
  source 1..9: note = Seed: VVGARGVGK (KRAS G12R)
IVGMRPVGC

SEQ ID NO: 39614 - protein, 9 aa, synthetic construct
  source 1..9: note = Seed: VVGARGVGK (KRAS G12R)
IVGMRPVGD

SEQ ID NO: 39615 - protein, 9 aa, synthetic construct
  source 1..9: note = Seed: VVGARGVGK (KRAS G12R)
IVGMRPVGE

SEQ ID NO: 39616 - protein, 9 aa, synthetic construct
  source 1..9: note = Seed: VVGARGVGK (KRAS G12R)
IVGMRPVGF

SEQ ID NO: 39617 - protein, 9 aa, synthetic construct
  source 1..9: note = Seed: VVGARGVGK (KRAS G12R)
IVGMRPVGG

SEQ ID NO: 39618 - protein, 9 aa, synthetic construct
  source 1..9: note = Seed: VVGARGVGK (KRAS G12R)
IVGMRPVGH

SEQ ID NO: 39619 - protein, 9 aa, synthetic construct
  source 1..9: note = Seed: VVGARGVGK (KRAS G12R)
IVGMRPVGI

SEQ ID NO: 39620 - protein, 9 aa, synthetic construct
  source 1..9: note = Seed: VVGARGVGK (KRAS G12R)
IVGMRPVGK

SEQ ID NO: 39621 - protein, 9 aa, synthetic construct
  source 1..9: note = Seed: VVGARGVGK (KRAS G12R)
IVGMRPVGL

SEQ ID NO: 39622 - protein, 9 aa, synthetic construct
  source 1..9: note = Seed: VVGARGVGK (KRAS G12R)
IVGMRPVGM

SEQ ID NO: 39623 - protein, 9 aa, synthetic construct
  source 1..9: note = Seed: VVGARGVGK (KRAS G12R)
IVGMRPVGN

SEQ ID NO: 39624 - protein, 9 aa, synthetic construct
  source 1..9: note = Seed: VVGARGVGK (KRAS G12R)
IVGMRPVGP

SEQ ID NO: 39625 - protein, 9 aa, synthetic construct
  source 1..9: note = Seed: VVGARGVGK (KRAS G12R)
IVGMRPVGQ

SEQ ID NO: 39626 - protein, 9 aa, synthetic construct
  source 1..9: note = Seed: VVGARGVGK (KRAS G12R)
IVGMRPVGR

SEQ ID NO: 39627 - protein, 9 aa, synthetic construct
  source 1..9: note = Seed: VVGARGVGK (KRAS G12R)
IVGMRPVGS

SEQ ID NO: 39628 - protein, 9 aa, synthetic construct
  source 1..9: note = Seed: VVGARGVGK (KRAS G12R)
IVGMRPVGT

SEQ ID NO: 39629 - protein, 9 aa, synthetic construct
  source 1..9: note = Seed: VVGARGVGK (KRAS G12R)
IVGMRPVGV

SEQ ID NO: 39630 - protein, 9 aa, synthetic construct
  source 1..9: note = Seed: VVGARGVGK (KRAS G12R)
IVGMRPVGW

SEQ ID NO: 39631 - protein, 9 aa, synthetic construct
  source 1..9: note = Seed: VVGARGVGK (KRAS G12R)
IVGMRPVGY

SEQ ID NO: 39632 - protein, 9 aa, synthetic construct
  source 1..9: note = Seed: VVGARGVGK (KRAS G12R)
IVGMRQVGI

SEQ ID NO: 39633 - protein, 9 aa, synthetic construct
  source 1..9: note = Seed: VVGARGVGK (KRAS G12R)
IVGMRQVGL

SEQ ID NO: 39634 - protein, 9 aa, synthetic construct
  source 1..9: note = Seed: VVGARGVGK (KRAS G12R)
IVGMRQVGR

SEQ ID NO: 39635 - protein, 9 aa, synthetic construct
  source 1..9: note = Seed: VVGARGVGK (KRAS G12R)
IVGMRQVGV

SEQ ID NO: 39636 - protein, 9 aa, synthetic construct
  source 1..9: note = Seed: VVGARGVGK (KRAS G12R)
IVGMRRVGA

SEQ ID NO: 39637 - protein, 9 aa, synthetic construct
  source 1..9: note = Seed: VVGARGVGK (KRAS G12R)
IVGMRRVGE

SEQ ID NO: 39638 - protein, 9 aa, synthetic construct
  source 1..9: note = Seed: VVGARGVGK (KRAS G12R)
IVGMRRVGF

SEQ ID NO: 39639 - protein, 9 aa, synthetic construct
  source 1..9: note = Seed: VVGARGVGK (KRAS G12R)
IVGMRRVGG

SEQ ID NO: 39640 - protein, 9 aa, synthetic construct
  source 1..9: note = Seed: VVGARGVGK (KRAS G12R)
IVGMRRVGH

SEQ ID NO: 39641 - protein, 9 aa, synthetic construct
  source 1..9: note = Seed: VVGARGVGK (KRAS G12R)
IVGMRRVGI

SEQ ID NO: 39642 - protein, 9 aa, synthetic construct
  source 1..9: note = Seed: VVGARGVGK (KRAS G12R)
IVGMRRVGK

SEQ ID NO: 39643 - protein, 9 aa, synthetic construct
  source 1..9: note = Seed: VVGARGVGK (KRAS G12R)
IVGMRRVGL

SEQ ID NO: 39644 - protein, 9 aa, synthetic construct
  source 1..9: note = Seed: VVGARGVGK (KRAS G12R)
IVGMRRVGM

SEQ ID NO: 39645 - protein, 9 aa, synthetic construct
  source 1..9: note = Seed: VVGARGVGK (KRAS G12R)
IVGMRRVGN

SEQ ID NO: 39646 - protein, 9 aa, synthetic construct
  source 1..9: note = Seed: VVGARGVGK (KRAS G12R)
IVGMRRVGP

SEQ ID NO: 39647 - protein, 9 aa, synthetic construct
  source 1..9: note = Seed: VVGARGVGK (KRAS G12R)
IVGMRRVGQ

SEQ ID NO: 39648 - protein, 9 aa, synthetic construct
  source 1..9: note = Seed: VVGARGVGK (KRAS G12R)
IVGMRRVGR

SEQ ID NO: 39649 - protein, 9 aa, synthetic construct
  source 1..9: note = Seed: VVGARGVGK (KRAS G12R)
IVGMRRVGS

SEQ ID NO: 39650 - protein, 9 aa, synthetic construct
  source 1..9: note = Seed: VVGARGVGK (KRAS G12R)
IVGMRRVGT

SEQ ID NO: 39651 - protein, 9 aa, synthetic construct
  source 1..9: note = Seed: VVGARGVGK (KRAS G12R)
IVGMRRVGV

SEQ ID NO: 39652 - protein, 9 aa, synthetic construct
  source 1..9: note = Seed: VVGARGVGK (KRAS G12R)
IVGMRRVGW

SEQ ID NO: 39653 - protein, 9 aa, synthetic construct
  source 1..9: note = Seed: VVGARGVGK (KRAS G12R)
IVGMRRVGY

SEQ ID NO: 39654 - protein, 9 aa, synthetic construct
  source 1..9: note = Seed: VVGARGVGK (KRAS G12R)
IVGMRSVGA

SEQ ID NO: 39655 - protein, 9 aa, synthetic construct
  source 1..9: note = Seed: VVGARGVGK (KRAS G12R)
IVGMRSVGC

SEQ ID NO: 39656 - protein, 9 aa, synthetic construct
  source 1..9: note = Seed: VVGARGVGK (KRAS G12R)
IVGMRSVGF

SEQ ID NO: 39657 - protein, 9 aa, synthetic construct
  source 1..9: note = Seed: VVGARGVGK (KRAS G12R)
IVGMRSVGG

SEQ ID NO: 39658 - protein, 9 aa, synthetic construct
  source 1..9: note = Seed: VVGARGVGK (KRAS G12R)
IVGMRSVGH

SEQ ID NO: 39659 - protein, 9 aa, synthetic construct
  source 1..9: note = Seed: VVGARGVGK (KRAS G12R)
IVGMRSVGI

SEQ ID NO: 39660 - protein, 9 aa, synthetic construct
  source 1..9: note = Seed: VVGARGVGK (KRAS G12R)
IVGMRSVGK

SEQ ID NO: 39661 - protein, 9 aa, synthetic construct
  source 1..9: note = Seed: VVGARGVGK (KRAS G12R)
IVGMRSVGL

SEQ ID NO: 39662 - protein, 9 aa, synthetic construct
  source 1..9: note = Seed: VVGARGVGK (KRAS G12R)
IVGMRSVGM

SEQ ID NO: 39663 - protein, 9 aa, synthetic construct
  source 1..9: note = Seed: VVGARGVGK (KRAS G12R)
IVGMRSVGN

SEQ ID NO: 39664 - protein, 9 aa, synthetic construct
  source 1..9: note = Seed: VVGARGVGK (KRAS G12R)
IVGMRSVGQ

SEQ ID NO: 39665 - protein, 9 aa, synthetic construct
  source 1..9: note = Seed: VVGARGVGK (KRAS G12R)
IVGMRSVGR

SEQ ID NO: 39666 - protein, 9 aa, synthetic construct
  source 1..9: note = Seed: VVGARGVGK (KRAS G12R)
IVGMRSVGS

SEQ ID NO: 39667 - protein, 9 aa, synthetic construct
  source 1..9: note = Seed: VVGARGVGK (KRAS G12R)
IVGMRSVGT

SEQ ID NO: 39668 - protein, 9 aa, synthetic construct
  source 1..9: note = Seed: VVGARGVGK (KRAS G12R)
IVGMRSVGV

SEQ ID NO: 39669 - protein, 9 aa, synthetic construct
  source 1..9: note = Seed: VVGARGVGK (KRAS G12R)
IVGMRSVGY

SEQ ID NO: 39670 - protein, 9 aa, synthetic construct
  source 1..9: note = Seed: VVGARGVGK (KRAS G12R)
IVGMRTVGA

SEQ ID NO: 39671 - protein, 9 aa, synthetic construct
  source 1..9: note = Seed: VVGARGVGK (KRAS G12R)
IVGMRTVGC

SEQ ID NO: 39672 - protein, 9 aa, synthetic construct
  source 1..9: note = Seed: VVGARGVGK (KRAS G12R)
IVGMRTVGF

SEQ ID NO: 39673 - protein, 9 aa, synthetic construct
  source 1..9: note = Seed: VVGARGVGK (KRAS G12R)
IVGMRTVGG

SEQ ID NO: 39674 - protein, 9 aa, synthetic construct
  source 1..9: note = Seed: VVGARGVGK (KRAS G12R)
IVGMRTVGH

SEQ ID NO: 39675 - protein, 9 aa, synthetic construct
  source 1..9: note = Seed: VVGARGVGK (KRAS G12R)
IVGMRTVGI

SEQ ID NO: 39676 - protein, 9 aa, synthetic construct
  source 1..9: note = Seed: VVGARGVGK (KRAS G12R)
IVGMRTVGK

SEQ ID NO: 39677 - protein, 9 aa, synthetic construct
  source 1..9: note = Seed: VVGARGVGK (KRAS G12R)
IVGMRTVGL

SEQ ID NO: 39678 - protein, 9 aa, synthetic construct
  source 1..9: note = Seed: VVGARGVGK (KRAS G12R)
IVGMRTVGM

SEQ ID NO: 39679 - protein, 9 aa, synthetic construct
  source 1..9: note = Seed: VVGARGVGK (KRAS G12R)
IVGMRTVGN

SEQ ID NO: 39680 - protein, 9 aa, synthetic construct
  source 1..9: note = Seed: VVGARGVGK (KRAS G12R)
IVGMRTVGQ

SEQ ID NO: 39681 - protein, 9 aa, synthetic construct
  source 1..9: note = Seed: VVGARGVGK (KRAS G12R)
IVGMRTVGR

SEQ ID NO: 39682 - protein, 9 aa, synthetic construct
  source 1..9: note = Seed: VVGARGVGK (KRAS G12R)
IVGMRTVGS

SEQ ID NO: 39683 - protein, 9 aa, synthetic construct
  source 1..9: note = Seed: VVGARGVGK (KRAS G12R)
IVGMRTVGT

SEQ ID NO: 39684 - protein, 9 aa, synthetic construct
  source 1..9: note = Seed: VVGARGVGK (KRAS G12R)
IVGMRTVGV

SEQ ID NO: 39685 - protein, 9 aa, synthetic construct
  source 1..9: note = Seed: VVGARGVGK (KRAS G12R)
IVGMRTVGY

SEQ ID NO: 39686 - protein, 9 aa, synthetic construct
  source 1..9: note = Seed: VVGARGVGK (KRAS G12R)
IVGMRVVGA

SEQ ID NO: 39687 - protein, 9 aa, synthetic construct
  source 1..9: note = Seed: VVGARGVGK (KRAS G12R)
IVGMRVVGH

SEQ ID NO: 39688 - protein, 9 aa, synthetic construct
  source 1..9: note = Seed: VVGARGVGK (KRAS G12R)
IVGMRVVGI

SEQ ID NO: 39689 - protein, 9 aa, synthetic construct
  source 1..9: note = Seed: VVGARGVGK (KRAS G12R)
IVGMRVVGK

SEQ ID NO: 39690 - protein, 9 aa, synthetic construct
  source 1..9: note = Seed: VVGARGVGK (KRAS G12R)
IVGMRVVGL

SEQ ID NO: 39691 - protein, 9 aa, synthetic construct
  source 1..9: note = Seed: VVGARGVGK (KRAS G12R)
IVGMRVVGM

SEQ ID NO: 39692 - protein, 9 aa, synthetic construct
  source 1..9: note = Seed: VVGARGVGK (KRAS G12R)
IVGMRVVGN

SEQ ID NO: 39693 - protein, 9 aa, synthetic construct
  source 1..9: note = Seed: VVGARGVGK (KRAS G12R)
IVGMRVVGR

SEQ ID NO: 39694 - protein, 9 aa, synthetic construct
  source 1..9: note = Seed: VVGARGVGK (KRAS G12R)
IVGMRVVGS

SEQ ID NO: 39695 - protein, 9 aa, synthetic construct
  source 1..9: note = Seed: VVGARGVGK (KRAS G12R)
IVGMRVVGT

SEQ ID NO: 39696 - protein, 9 aa, synthetic construct
  source 1..9: note = Seed: VVGARGVGK (KRAS G12R)
IVGMRVVGV

SEQ ID NO: 39697 - protein, 9 aa, synthetic construct
  source 1..9: note = Seed: VVGARGVGK (KRAS G12R)
IVGMRVVGY

SEQ ID NO: 39698 - protein, 9 aa, synthetic construct
  source 1..9: note = Seed: VVGARGVGK (KRAS G12R)
IVGNRAVGA

SEQ ID NO: 39699 - protein, 9 aa, synthetic construct
  source 1..9: note = Seed: VVGARGVGK (KRAS G12R)
IVGNRAVGF

SEQ ID NO: 39700 - protein, 9 aa, synthetic construct
  source 1..9: note = Seed: VVGARGVGK (KRAS G12R)
IVGNRAVGI

SEQ ID NO: 39701 - protein, 9 aa, synthetic construct
  source 1..9: note = Seed: VVGARGVGK (KRAS G12R)
IVGNRAVGK

SEQ ID NO: 39702 - protein, 9 aa, synthetic construct
  source 1..9: note = Seed: VVGARGVGK (KRAS G12R)
IVGNRAVGL

SEQ ID NO: 39703 - protein, 9 aa, synthetic construct
  source 1..9: note = Seed: VVGARGVGK (KRAS G12R)
IVGNRAVGM

SEQ ID NO: 39704 - protein, 9 aa, synthetic construct
  source 1..9: note = Seed: VVGARGVGK (KRAS G12R)
IVGNRAVGR

SEQ ID NO: 39705 - protein, 9 aa, synthetic construct
  source 1..9: note = Seed: VVGARGVGK (KRAS G12R)
IVGNRAVGS

SEQ ID NO: 39706 - protein, 9 aa, synthetic construct
  source 1..9: note = Seed: VVGARGVGK (KRAS G12R)
IVGNRAVGT

SEQ ID NO: 39707 - protein, 9 aa, synthetic construct
  source 1..9: note = Seed: VVGARGVGK (KRAS G12R)
IVGNRAVGV

SEQ ID NO: 39708 - protein, 9 aa, synthetic construct
  source 1..9: note = Seed: VVGARGVGK (KRAS G12R)
IVGNRAVGY

SEQ ID NO: 39709 - protein, 9 aa, synthetic construct
  source 1..9: note = Seed: VVGARGVGK (KRAS G12R)
IVGNRGVGA

SEQ ID NO: 39710 - protein, 9 aa, synthetic construct
  source 1..9: note = Seed: VVGARGVGK (KRAS G12R)
IVGNRGVGF

SEQ ID NO: 39711 - protein, 9 aa, synthetic construct
  source 1..9: note = Seed: VVGARGVGK (KRAS G12R)
IVGNRGVGI

SEQ ID NO: 39712 - protein, 9 aa, synthetic construct
  source 1..9: note = Seed: VVGARGVGK (KRAS G12R)
IVGNRGVGL

SEQ ID NO: 39713 - protein, 9 aa, synthetic construct
  source 1..9: note = Seed: VVGARGVGK (KRAS G12R)
IVGNRGVGR

SEQ ID NO: 39714 - protein, 9 aa, synthetic construct
  source 1..9: note = Seed: VVGARGVGK (KRAS G12R)
IVGNRGVGV

SEQ ID NO: 39715 - protein, 9 aa, synthetic construct
  source 1..9: note = Seed: VVGARGVGK (KRAS G12R)
IVGNRGVGY

SEQ ID NO: 39716 - protein, 9 aa, synthetic construct
  source 1..9: note = Seed: VVGARGVGK (KRAS G12R)
IVGNRHVGF

SEQ ID NO: 39717 - protein, 9 aa, synthetic construct
  source 1..9: note = Seed: VVGARGVGK (KRAS G12R)
IVGNRHVGI

SEQ ID NO: 39718 - protein, 9 aa, synthetic construct
  source 1..9: note = Seed: VVGARGVGK (KRAS G12R)
IVGNRHVGL

SEQ ID NO: 39719 - protein, 9 aa, synthetic construct
  source 1..9: note = Seed: VVGARGVGK (KRAS G12R)
IVGNRHVGM

SEQ ID NO: 39720 - protein, 9 aa, synthetic construct
  source 1..9: note = Seed: VVGARGVGK (KRAS G12R)
IVGNRHVGR

SEQ ID NO: 39721 - protein, 9 aa, synthetic construct
  source 1..9: note = Seed: VVGARGVGK (KRAS G12R)
IVGNRHVGV

SEQ ID NO: 39722 - protein, 9 aa, synthetic construct
  source 1..9: note = Seed: VVGARGVGK (KRAS G12R)
IVGNRHVGY

SEQ ID NO: 39723 - protein, 9 aa, synthetic construct
  source 1..9: note = Seed: VVGARGVGK (KRAS G12R)
IVGNRIVGA

SEQ ID NO: 39724 - protein, 9 aa, synthetic construct
  source 1..9: note = Seed: VVGARGVGK (KRAS G12R)
IVGNRIVGI

SEQ ID NO: 39725 - protein, 9 aa, synthetic construct
  source 1..9: note = Seed: VVGARGVGK (KRAS G12R)
IVGNRIVGK

SEQ ID NO: 39726 - protein, 9 aa, synthetic construct
  source 1..9: note = Seed: VVGARGVGK (KRAS G12R)
IVGNRIVGR

SEQ ID NO: 39727 - protein, 9 aa, synthetic construct
  source 1..9: note = Seed: VVGARGVGK (KRAS G12R)
IVGNRIVGV

SEQ ID NO: 39728 - protein, 9 aa, synthetic construct
  source 1..9: note = Seed: VVGARGVGK (KRAS G12R)
IVGNRIVGY

SEQ ID NO: 39729 - protein, 9 aa, synthetic construct
  source 1..9: note = Seed: VVGARGVGK (KRAS G12R)
IVGNRKVGA

SEQ ID NO: 39730 - protein, 9 aa, synthetic construct
  source 1..9: note = Seed: VVGARGVGK (KRAS G12R)
IVGNRKVGF

SEQ ID NO: 39731 - protein, 9 aa, synthetic construct
  source 1..9: note = Seed: VVGARGVGK (KRAS G12R)
IVGNRKVGH

SEQ ID NO: 39732 - protein, 9 aa, synthetic construct
  source 1..9: note = Seed: VVGARGVGK (KRAS G12R)
IVGNRKVGI

SEQ ID NO: 39733 - protein, 9 aa, synthetic construct
  source 1..9: note = Seed: VVGARGVGK (KRAS G12R)
IVGNRKVGK

SEQ ID NO: 39734 - protein, 9 aa, synthetic construct
  source 1..9: note = Seed: VVGARGVGK (KRAS G12R)
IVGNRKVGL

SEQ ID NO: 39735 - protein, 9 aa, synthetic construct
  source 1..9: note = Seed: VVGARGVGK (KRAS G12R)
IVGNRKVGM

SEQ ID NO: 39736 - protein, 9 aa, synthetic construct
  source 1..9: note = Seed: VVGARGVGK (KRAS G12R)
IVGNRKVGQ

SEQ ID NO: 39737 - protein, 9 aa, synthetic construct
  source 1..9: note = Seed: VVGARGVGK (KRAS G12R)
IVGNRKVGR

SEQ ID NO: 39738 - protein, 9 aa, synthetic construct
  source 1..9: note = Seed: VVGARGVGK (KRAS G12R)
IVGNRKVGS

SEQ ID NO: 39739 - protein, 9 aa, synthetic construct
  source 1..9: note = Seed: VVGARGVGK (KRAS G12R)
IVGNRKVGT

SEQ ID NO: 39740 - protein, 9 aa, synthetic construct
  source 1..9: note = Seed: VVGARGVGK (KRAS G12R)
IVGNRKVGV

SEQ ID NO: 39741 - protein, 9 aa, synthetic construct
  source 1..9: note = Seed: VVGARGVGK (KRAS G12R)
IVGNRKVGW

SEQ ID NO: 39742 - protein, 9 aa, synthetic construct
  source 1..9: note = Seed: VVGARGVGK (KRAS G12R)
IVGNRKVGY

SEQ ID NO: 39743 - protein, 9 aa, synthetic construct
  source 1..9: note = Seed: VVGARGVGK (KRAS G12R)
IVGNRLVGK

SEQ ID NO: 39744 - protein, 9 aa, synthetic construct
  source 1..9: note = Seed: VVGARGVGK (KRAS G12R)
IVGNRLVGR

SEQ ID NO: 39745 - protein, 9 aa, synthetic construct
  source 1..9: note = Seed: VVGARGVGK (KRAS G12R)
IVGNRLVGY

SEQ ID NO: 39746 - protein, 9 aa, synthetic construct
  source 1..9: note = Seed: VVGARGVGK (KRAS G12R)
IVGNRMVGK

SEQ ID NO: 39747 - protein, 9 aa, synthetic construct
  source 1..9: note = Seed: VVGARGVGK (KRAS G12R)
IVGNRMVGR

SEQ ID NO: 39748 - protein, 9 aa, synthetic construct
  source 1..9: note = Seed: VVGARGVGK (KRAS G12R)
IVGNRMVGY

SEQ ID NO: 39749 - protein, 9 aa, synthetic construct
  source 1..9: note = Seed: VVGARGVGK (KRAS G12R)
IVGNRNVGF

SEQ ID NO: 39750 - protein, 9 aa, synthetic construct
  source 1..9: note = Seed: VVGARGVGK (KRAS G12R)
IVGNRNVGI

SEQ ID NO: 39751 - protein, 9 aa, synthetic construct
  source 1..9: note = Seed: VVGARGVGK (KRAS G12R)
IVGNRNVGL

SEQ ID NO: 39752 - protein, 9 aa, synthetic construct
  source 1..9: note = Seed: VVGARGVGK (KRAS G12R)
IVGNRNVGM

SEQ ID NO: 39753 - protein, 9 aa, synthetic construct
  source 1..9: note = Seed: VVGARGVGK (KRAS G12R)
IVGNRNVGR

SEQ ID NO: 39754 - protein, 9 aa, synthetic construct
  source 1..9: note = Seed: VVGARGVGK (KRAS G12R)
IVGNRNVGV

SEQ ID NO: 39755 - protein, 9 aa, synthetic construct
  source 1..9: note = Seed: VVGARGVGK (KRAS G12R)
IVGNRNVGY

SEQ ID NO: 39756 - protein, 9 aa, synthetic construct
  source 1..9: note = Seed: VVGARGVGK (KRAS G12R)
IVGNRPVGA

SEQ ID NO: 39757 - protein, 9 aa, synthetic construct
  source 1..9: note = Seed: VVGARGVGK (KRAS G12R)
IVGNRPVGF

SEQ ID NO: 39758 - protein, 9 aa, synthetic construct
  source 1..9: note = Seed: VVGARGVGK (KRAS G12R)
IVGNRPVGI

SEQ ID NO: 39759 - protein, 9 aa, synthetic construct
  source 1..9: note = Seed: VVGARGVGK (KRAS G12R)
IVGNRPVGK

SEQ ID NO: 39760 - protein, 9 aa, synthetic construct
  source 1..9: note = Seed: VVGARGVGK (KRAS G12R)
IVGNRPVGL

SEQ ID NO: 39761 - protein, 9 aa, synthetic construct
  source 1..9: note = Seed: VVGARGVGK (KRAS G12R)
IVGNRPVGM

SEQ ID NO: 39762 - protein, 9 aa, synthetic construct
  source 1..9: note = Seed: VVGARGVGK (KRAS G12R)
IVGNRPVGR

SEQ ID NO: 39763 - protein, 9 aa, synthetic construct
  source 1..9: note = Seed: VVGARGVGK (KRAS G12R)
IVGNRPVGV

SEQ ID NO: 39764 - protein, 9 aa, synthetic construct
  source 1..9: note = Seed: VVGARGVGK (KRAS G12R)
IVGNRPVGY

SEQ ID NO: 39765 - protein, 9 aa, synthetic construct
  source 1..9: note = Seed: VVGARGVGK (KRAS G12R)
IVGNRQVGR

SEQ ID NO: 39766 - protein, 9 aa, synthetic construct
  source 1..9: note = Seed: VVGARGVGK (KRAS G12R)
IVGNRQVGY

SEQ ID NO: 39767 - protein, 9 aa, synthetic construct
  source 1..9: note = Seed: VVGARGVGK (KRAS G12R)
IVGNRRVGA

SEQ ID NO: 39768 - protein, 9 aa, synthetic construct
  source 1..9: note = Seed: VVGARGVGK (KRAS G12R)
IVGNRRVGF

SEQ ID NO: 39769 - protein, 9 aa, synthetic construct
  source 1..9: note = Seed: VVGARGVGK (KRAS G12R)
IVGNRRVGG

SEQ ID NO: 39770 - protein, 9 aa, synthetic construct
  source 1..9: note = Seed: VVGARGVGK (KRAS G12R)
IVGNRRVGH

SEQ ID NO: 39771 - protein, 9 aa, synthetic construct
  source 1..9: note = Seed: VVGARGVGK (KRAS G12R)
IVGNRRVGI

SEQ ID NO: 39772 - protein, 9 aa, synthetic construct
  source 1..9: note = Seed: VVGARGVGK (KRAS G12R)
IVGNRRVGK

SEQ ID NO: 39773 - protein, 9 aa, synthetic construct
  source 1..9: note = Seed: VVGARGVGK (KRAS G12R)
IVGNRRVGL

SEQ ID NO: 39774 - protein, 9 aa, synthetic construct
  source 1..9: note = Seed: VVGARGVGK (KRAS G12R)
IVGNRRVGM

SEQ ID NO: 39775 - protein, 9 aa, synthetic construct
  source 1..9: note = Seed: VVGARGVGK (KRAS G12R)
IVGNRRVGN

SEQ ID NO: 39776 - protein, 9 aa, synthetic construct
  source 1..9: note = Seed: VVGARGVGK (KRAS G12R)
IVGNRRVGP

SEQ ID NO: 39777 - protein, 9 aa, synthetic construct
  source 1..9: note = Seed: VVGARGVGK (KRAS G12R)
IVGNRRVGQ

SEQ ID NO: 39778 - protein, 9 aa, synthetic construct
  source 1..9: note = Seed: VVGARGVGK (KRAS G12R)
IVGNRRVGR

SEQ ID NO: 39779 - protein, 9 aa, synthetic construct
  source 1..9: note = Seed: VVGARGVGK (KRAS G12R)
IVGNRRVGS

SEQ ID NO: 39780 - protein, 9 aa, synthetic construct
  source 1..9: note = Seed: VVGARGVGK (KRAS G12R)
IVGNRRVGT

SEQ ID NO: 39781 - protein, 9 aa, synthetic construct
  source 1..9: note = Seed: VVGARGVGK (KRAS G12R)
IVGNRRVGV

SEQ ID NO: 39782 - protein, 9 aa, synthetic construct
  source 1..9: note = Seed: VVGARGVGK (KRAS G12R)
IVGNRRVGW

SEQ ID NO: 39783 - protein, 9 aa, synthetic construct
  source 1..9: note = Seed: VVGARGVGK (KRAS G12R)
IVGNRRVGY

SEQ ID NO: 39784 - protein, 9 aa, synthetic construct
  source 1..9: note = Seed: VVGARGVGK (KRAS G12R)
IVGNRSVGA

SEQ ID NO: 39785 - protein, 9 aa, synthetic construct
  source 1..9: note = Seed: VVGARGVGK (KRAS G12R)
IVGNRSVGF

SEQ ID NO: 39786 - protein, 9 aa, synthetic construct
  source 1..9: note = Seed: VVGARGVGK (KRAS G12R)
IVGNRSVGI

SEQ ID NO: 39787 - protein, 9 aa, synthetic construct
  source 1..9: note = Seed: VVGARGVGK (KRAS G12R)
IVGNRSVGK

SEQ ID NO: 39788 - protein, 9 aa, synthetic construct
  source 1..9: note = Seed: VVGARGVGK (KRAS G12R)
IVGNRSVGL

SEQ ID NO: 39789 - protein, 9 aa, synthetic construct
  source 1..9: note = Seed: VVGARGVGK (KRAS G12R)
IVGNRSVGM

SEQ ID NO: 39790 - protein, 9 aa, synthetic construct
  source 1..9: note = Seed: VVGARGVGK (KRAS G12R)
IVGNRSVGR

SEQ ID NO: 39791 - protein, 9 aa, synthetic construct
  source 1..9: note = Seed: VVGARGVGK (KRAS G12R)
IVGNRSVGV

SEQ ID NO: 39792 - protein, 9 aa, synthetic construct
  source 1..9: note = Seed: VVGARGVGK (KRAS G12R)
IVGNRSVGY

SEQ ID NO: 39793 - protein, 9 aa, synthetic construct
  source 1..9: note = Seed: VVGARGVGK (KRAS G12R)
IVGNRTVGF

SEQ ID NO: 39794 - protein, 9 aa, synthetic construct
  source 1..9: note = Seed: VVGARGVGK (KRAS G12R)
IVGNRTVGI

SEQ ID NO: 39795 - protein, 9 aa, synthetic construct
  source 1..9: note = Seed: VVGARGVGK (KRAS G12R)
IVGNRTVGR

SEQ ID NO: 39796 - protein, 9 aa, synthetic construct
  source 1..9: note = Seed: VVGARGVGK (KRAS G12R)
IVGNRTVGY

SEQ ID NO: 39797 - protein, 9 aa, synthetic construct
  source 1..9: note = Seed: VVGARGVGK (KRAS G12R)
IVGNRVVGA

SEQ ID NO: 39798 - protein, 9 aa, synthetic construct
  source 1..9: note = Seed: VVGARGVGK (KRAS G12R)
IVGNRVVGF

SEQ ID NO: 39799 - protein, 9 aa, synthetic construct
  source 1..9: note = Seed: VVGARGVGK (KRAS G12R)
IVGNRVVGI

SEQ ID NO: 39800 - protein, 9 aa, synthetic construct
  source 1..9: note = Seed: VVGARGVGK (KRAS G12R)
IVGNRVVGK

SEQ ID NO: 39801 - protein, 9 aa, synthetic construct
  source 1..9: note = Seed: VVGARGVGK (KRAS G12R)
IVGNRVVGM

SEQ ID NO: 39802 - protein, 9 aa, synthetic construct
  source 1..9: note = Seed: VVGARGVGK (KRAS G12R)
IVGNRVVGR

SEQ ID NO: 39803 - protein, 9 aa, synthetic construct
  source 1..9: note = Seed: VVGARGVGK (KRAS G12R)
IVGNRVVGV

SEQ ID NO: 39804 - protein, 9 aa, synthetic construct
  source 1..9: note = Seed: VVGARGVGK (KRAS G12R)
IVGNRVVGY

SEQ ID NO: 39805 - protein, 9 aa, synthetic construct
  source 1..9: note = Seed: VVGARGVGK (KRAS G12R)
IVGPRAVGI

SEQ ID NO: 39806 - protein, 9 aa, synthetic construct
  source 1..9: note = Seed: VVGARGVGK (KRAS G12R)
IVGPRAVGL

SEQ ID NO: 39807 - protein, 9 aa, synthetic construct
  source 1..9: note = Seed: VVGARGVGK (KRAS G12R)
IVGPRAVGV

SEQ ID NO: 39808 - protein, 9 aa, synthetic construct
  source 1..9: note = Seed: VVGARGVGK (KRAS G12R)
IVGQRAVGA

SEQ ID NO: 39809 - protein, 9 aa, synthetic construct
  source 1..9: note = Seed: VVGARGVGK (KRAS G12R)
IVGQRAVGC

SEQ ID NO: 39810 - protein, 9 aa, synthetic construct
  source 1..9: note = Seed: VVGARGVGK (KRAS G12R)
IVGQRAVGF

SEQ ID NO: 39811 - protein, 9 aa, synthetic construct
  source 1..9: note = Seed: VVGARGVGK (KRAS G12R)
IVGQRAVGG

SEQ ID NO: 39812 - protein, 9 aa, synthetic construct
  source 1..9: note = Seed: VVGARGVGK (KRAS G12R)
IVGQRAVGH

SEQ ID NO: 39813 - protein, 9 aa, synthetic construct
  source 1..9: note = Seed: VVGARGVGK (KRAS G12R)
IVGQRAVGI

SEQ ID NO: 39814 - protein, 9 aa, synthetic construct
  source 1..9: note = Seed: VVGARGVGK (KRAS G12R)
IVGQRAVGK

SEQ ID NO: 39815 - protein, 9 aa, synthetic construct
  source 1..9: note = Seed: VVGARGVGK (KRAS G12R)
IVGQRAVGL

SEQ ID NO: 39816 - protein, 9 aa, synthetic construct
  source 1..9: note = Seed: VVGARGVGK (KRAS G12R)
IVGQRAVGM

SEQ ID NO: 39817 - protein, 9 aa, synthetic construct
  source 1..9: note = Seed: VVGARGVGK (KRAS G12R)
IVGQRAVGN

SEQ ID NO: 39818 - protein, 9 aa, synthetic construct
  source 1..9: note = Seed: VVGARGVGK (KRAS G12R)
IVGQRAVGQ

SEQ ID NO: 39819 - protein, 9 aa, synthetic construct
  source 1..9: note = Seed: VVGARGVGK (KRAS G12R)
IVGQRAVGR

SEQ ID NO: 39820 - protein, 9 aa, synthetic construct
  source 1..9: note = Seed: VVGARGVGK (KRAS G12R)
IVGQRAVGS

SEQ ID NO: 39821 - protein, 9 aa, synthetic construct
  source 1..9: note = Seed: VVGARGVGK (KRAS G12R)
IVGQRAVGT

SEQ ID NO: 39822 - protein, 9 aa, synthetic construct
  source 1..9: note = Seed: VVGARGVGK (KRAS G12R)
IVGQRAVGV

SEQ ID NO: 39823 - protein, 9 aa, synthetic construct
  source 1..9: note = Seed: VVGARGVGK (KRAS G12R)
IVGQRAVGY

SEQ ID NO: 39824 - protein, 9 aa, synthetic construct
  source 1..9: note = Seed: VVGARGVGK (KRAS G12R)
IVGQRGVGA

SEQ ID NO: 39825 - protein, 9 aa, synthetic construct
  source 1..9: note = Seed: VVGARGVGK (KRAS G12R)
IVGQRGVGC

SEQ ID NO: 39826 - protein, 9 aa, synthetic construct
  source 1..9: note = Seed: VVGARGVGK (KRAS G12R)
IVGQRGVGF

SEQ ID NO: 39827 - protein, 9 aa, synthetic construct
  source 1..9: note = Seed: VVGARGVGK (KRAS G12R)
IVGQRGVGG

SEQ ID NO: 39828 - protein, 9 aa, synthetic construct
  source 1..9: note = Seed: VVGARGVGK (KRAS G12R)
IVGQRGVGI

SEQ ID NO: 39829 - protein, 9 aa, synthetic construct
  source 1..9: note = Seed: VVGARGVGK (KRAS G12R)
IVGQRGVGL

SEQ ID NO: 39830 - protein, 9 aa, synthetic construct
  source 1..9: note = Seed: VVGARGVGK (KRAS G12R)
IVGQRGVGM

SEQ ID NO: 39831 - protein, 9 aa, synthetic construct
  source 1..9: note = Seed: VVGARGVGK (KRAS G12R)
IVGQRGVGN

SEQ ID NO: 39832 - protein, 9 aa, synthetic construct
  source 1..9: note = Seed: VVGARGVGK (KRAS G12R)
IVGQRGVGR

SEQ ID NO: 39833 - protein, 9 aa, synthetic construct
  source 1..9: note = Seed: VVGARGVGK (KRAS G12R)
IVGQRGVGS

SEQ ID NO: 39834 - protein, 9 aa, synthetic construct
  source 1..9: note = Seed: VVGARGVGK (KRAS G12R)
IVGQRGVGT

SEQ ID NO: 39835 - protein, 9 aa, synthetic construct
  source 1..9: note = Seed: VVGARGVGK (KRAS G12R)
IVGQRGVGV

SEQ ID NO: 39836 - protein, 9 aa, synthetic construct
  source 1..9: note = Seed: VVGARGVGK (KRAS G12R)
IVGQRGVGY

SEQ ID NO: 39837 - protein, 9 aa, synthetic construct
  source 1..9: note = Seed: VVGARGVGK (KRAS G12R)
IVGQRHVGF

SEQ ID NO: 39838 - protein, 9 aa, synthetic construct
  source 1..9: note = Seed: VVGARGVGK (KRAS G12R)
IVGQRHVGI

SEQ ID NO: 39839 - protein, 9 aa, synthetic construct
  source 1..9: note = Seed: VVGARGVGK (KRAS G12R)
IVGQRHVGL

SEQ ID NO: 39840 - protein, 9 aa, synthetic construct
  source 1..9: note = Seed: VVGARGVGK (KRAS G12R)
IVGQRHVGR

SEQ ID NO: 39841 - protein, 9 aa, synthetic construct
  source 1..9: note = Seed: VVGARGVGK (KRAS G12R)
IVGQRHVGV

SEQ ID NO: 39842 - protein, 9 aa, synthetic construct
  source 1..9: note = Seed: VVGARGVGK (KRAS G12R)
IVGQRHVGY

SEQ ID NO: 39843 - protein, 9 aa, synthetic construct
  source 1..9: note = Seed: VVGARGVGK (KRAS G12R)
IVGQRIVGA

SEQ ID NO: 39844 - protein, 9 aa, synthetic construct
  source 1..9: note = Seed: VVGARGVGK (KRAS G12R)
IVGQRIVGL

SEQ ID NO: 39845 - protein, 9 aa, synthetic construct
  source 1..9: note = Seed: VVGARGVGK (KRAS G12R)
IVGQRIVGR

SEQ ID NO: 39846 - protein, 9 aa, synthetic construct
  source 1..9: note = Seed: VVGARGVGK (KRAS G12R)
IVGQRIVGV

SEQ ID NO: 39847 - protein, 9 aa, synthetic construct
  source 1..9: note = Seed: VVGARGVGK (KRAS G12R)
IVGQRKVGA

SEQ ID NO: 39848 - protein, 9 aa, synthetic construct
  source 1..9: note = Seed: VVGARGVGK (KRAS G12R)
IVGQRKVGF

SEQ ID NO: 39849 - protein, 9 aa, synthetic construct
  source 1..9: note = Seed: VVGARGVGK (KRAS G12R)
IVGQRKVGH

SEQ ID NO: 39850 - protein, 9 aa, synthetic construct
  source 1..9: note = Seed: VVGARGVGK (KRAS G12R)
IVGQRKVGI

SEQ ID NO: 39851 - protein, 9 aa, synthetic construct
  source 1..9: note = Seed: VVGARGVGK (KRAS G12R)
IVGQRKVGK

SEQ ID NO: 39852 - protein, 9 aa, synthetic construct
  source 1..9: note = Seed: VVGARGVGK (KRAS G12R)
IVGQRKVGL

SEQ ID NO: 39853 - protein, 9 aa, synthetic construct
  source 1..9: note = Seed: VVGARGVGK (KRAS G12R)
IVGQRKVGM

SEQ ID NO: 39854 - protein, 9 aa, synthetic construct
  source 1..9: note = Seed: VVGARGVGK (KRAS G12R)
IVGQRKVGQ

SEQ ID NO: 39855 - protein, 9 aa, synthetic construct
  source 1..9: note = Seed: VVGARGVGK (KRAS G12R)
IVGQRKVGR

SEQ ID NO: 39856 - protein, 9 aa, synthetic construct
  source 1..9: note = Seed: VVGARGVGK (KRAS G12R)
IVGQRKVGS

SEQ ID NO: 39857 - protein, 9 aa, synthetic construct
  source 1..9: note = Seed: VVGARGVGK (KRAS G12R)
IVGQRKVGT

SEQ ID NO: 39858 - protein, 9 aa, synthetic construct
  source 1..9: note = Seed: VVGARGVGK (KRAS G12R)
IVGQRKVGV

SEQ ID NO: 39859 - protein, 9 aa, synthetic construct
  source 1..9: note = Seed: VVGARGVGK (KRAS G12R)
IVGQRKVGW

SEQ ID NO: 39860 - protein, 9 aa, synthetic construct
  source 1..9: note = Seed: VVGARGVGK (KRAS G12R)
IVGQRKVGY

SEQ ID NO: 39861 - protein, 9 aa, synthetic construct
  source 1..9: note = Seed: VVGARGVGK (KRAS G12R)
IVGQRLVGR

SEQ ID NO: 39862 - protein, 9 aa, synthetic construct
  source 1..9: note = Seed: VVGARGVGK (KRAS G12R)
IVGQRMVGR

SEQ ID NO: 39863 - protein, 9 aa, synthetic construct
  source 1..9: note = Seed: VVGARGVGK (KRAS G12R)
IVGQRNVGA

SEQ ID NO: 39864 - protein, 9 aa, synthetic construct
  source 1..9: note = Seed: VVGARGVGK (KRAS G12R)
IVGQRNVGF

SEQ ID NO: 39865 - protein, 9 aa, synthetic construct
  source 1..9: note = Seed: VVGARGVGK (KRAS G12R)
IVGQRNVGI

SEQ ID NO: 39866 - protein, 9 aa, synthetic construct
  source 1..9: note = Seed: VVGARGVGK (KRAS G12R)
IVGQRNVGL

SEQ ID NO: 39867 - protein, 9 aa, synthetic construct
  source 1..9: note = Seed: VVGARGVGK (KRAS G12R)
IVGQRNVGM

SEQ ID NO: 39868 - protein, 9 aa, synthetic construct
  source 1..9: note = Seed: VVGARGVGK (KRAS G12R)
IVGQRNVGR

SEQ ID NO: 39869 - protein, 9 aa, synthetic construct
  source 1..9: note = Seed: VVGARGVGK (KRAS G12R)
IVGQRNVGS

SEQ ID NO: 39870 - protein, 9 aa, synthetic construct
  source 1..9: note = Seed: VVGARGVGK (KRAS G12R)
IVGQRNVGT

SEQ ID NO: 39871 - protein, 9 aa, synthetic construct
  source 1..9: note = Seed: VVGARGVGK (KRAS G12R)
IVGQRNVGV

SEQ ID NO: 39872 - protein, 9 aa, synthetic construct
  source 1..9: note = Seed: VVGARGVGK (KRAS G12R)
IVGQRNVGY

SEQ ID NO: 39873 - protein, 9 aa, synthetic construct
  source 1..9: note = Seed: VVGARGVGK (KRAS G12R)
IVGQRPVGA

SEQ ID NO: 39874 - protein, 9 aa, synthetic construct
  source 1..9: note = Seed: VVGARGVGK (KRAS G12R)
IVGQRPVGI

SEQ ID NO: 39875 - protein, 9 aa, synthetic construct
  source 1..9: note = Seed: VVGARGVGK (KRAS G12R)
IVGQRPVGL

SEQ ID NO: 39876 - protein, 9 aa, synthetic construct
  source 1..9: note = Seed: VVGARGVGK (KRAS G12R)
IVGQRPVGM

SEQ ID NO: 39877 - protein, 9 aa, synthetic construct
  source 1..9: note = Seed: VVGARGVGK (KRAS G12R)
IVGQRPVGR

SEQ ID NO: 39878 - protein, 9 aa, synthetic construct
  source 1..9: note = Seed: VVGARGVGK (KRAS G12R)
IVGQRPVGS

SEQ ID NO: 39879 - protein, 9 aa, synthetic construct
  source 1..9: note = Seed: VVGARGVGK (KRAS G12R)
IVGQRPVGT

SEQ ID NO: 39880 - protein, 9 aa, synthetic construct
  source 1..9: note = Seed: VVGARGVGK (KRAS G12R)
IVGQRPVGV

SEQ ID NO: 39881 - protein, 9 aa, synthetic construct
  source 1..9: note = Seed: VVGARGVGK (KRAS G12R)
IVGQRPVGY

SEQ ID NO: 39882 - protein, 9 aa, synthetic construct
  source 1..9: note = Seed: VVGARGVGK (KRAS G12R)
IVGQRQVGR

SEQ ID NO: 39883 - protein, 9 aa, synthetic construct
  source 1..9: note = Seed: VVGARGVGK (KRAS G12R)
IVGQRRVGA

SEQ ID NO: 39884 - protein, 9 aa, synthetic construct
  source 1..9: note = Seed: VVGARGVGK (KRAS G12R)
IVGQRRVGF

SEQ ID NO: 39885 - protein, 9 aa, synthetic construct
  source 1..9: note = Seed: VVGARGVGK (KRAS G12R)
IVGQRRVGG

SEQ ID NO: 39886 - protein, 9 aa, synthetic construct
  source 1..9: note = Seed: VVGARGVGK (KRAS G12R)
IVGQRRVGH

SEQ ID NO: 39887 - protein, 9 aa, synthetic construct
  source 1..9: note = Seed: VVGARGVGK (KRAS G12R)
IVGQRRVGI

SEQ ID NO: 39888 - protein, 9 aa, synthetic construct
  source 1..9: note = Seed: VVGARGVGK (KRAS G12R)
IVGQRRVGK

SEQ ID NO: 39889 - protein, 9 aa, synthetic construct
  source 1..9: note = Seed: VVGARGVGK (KRAS G12R)
IVGQRRVGL

SEQ ID NO: 39890 - protein, 9 aa, synthetic construct
  source 1..9: note = Seed: VVGARGVGK (KRAS G12R)
IVGQRRVGM

SEQ ID NO: 39891 - protein, 9 aa, synthetic construct
  source 1..9: note = Seed: VVGARGVGK (KRAS G12R)
IVGQRRVGN

SEQ ID NO: 39892 - protein, 9 aa, synthetic construct
  source 1..9: note = Seed: VVGARGVGK (KRAS G12R)
IVGQRRVGP

SEQ ID NO: 39893 - protein, 9 aa, synthetic construct
  source 1..9: note = Seed: VVGARGVGK (KRAS G12R)
IVGQRRVGQ

SEQ ID NO: 39894 - protein, 9 aa, synthetic construct
  source 1..9: note = Seed: VVGARGVGK (KRAS G12R)
IVGQRRVGR

SEQ ID NO: 39895 - protein, 9 aa, synthetic construct
  source 1..9: note = Seed: VVGARGVGK (KRAS G12R)
IVGQRRVGS

SEQ ID NO: 39896 - protein, 9 aa, synthetic construct
  source 1..9: note = Seed: VVGARGVGK (KRAS G12R)
IVGQRRVGT

SEQ ID NO: 39897 - protein, 9 aa, synthetic construct
  source 1..9: note = Seed: VVGARGVGK (KRAS G12R)
IVGQRRVGV

SEQ ID NO: 39898 - protein, 9 aa, synthetic construct
  source 1..9: note = Seed: VVGARGVGK (KRAS G12R)
IVGQRRVGW

SEQ ID NO: 39899 - protein, 9 aa, synthetic construct
  source 1..9: note = Seed: VVGARGVGK (KRAS G12R)
IVGQRRVGY

SEQ ID NO: 39900 - protein, 9 aa, synthetic construct
  source 1..9: note = Seed: VVGARGVGK (KRAS G12R)
IVGQRSVGA

SEQ ID NO: 39901 - protein, 9 aa, synthetic construct
  source 1..9: note = Seed: VVGARGVGK (KRAS G12R)
IVGQRSVGC

SEQ ID NO: 39902 - protein, 9 aa, synthetic construct
  source 1..9: note = Seed: VVGARGVGK (KRAS G12R)
IVGQRSVGF

SEQ ID NO: 39903 - protein, 9 aa, synthetic construct
  source 1..9: note = Seed: VVGARGVGK (KRAS G12R)
IVGQRSVGG

SEQ ID NO: 39904 - protein, 9 aa, synthetic construct
  source 1..9: note = Seed: VVGARGVGK (KRAS G12R)
IVGQRSVGI

SEQ ID NO: 39905 - protein, 9 aa, synthetic construct
  source 1..9: note = Seed: VVGARGVGK (KRAS G12R)
IVGQRSVGK

SEQ ID NO: 39906 - protein, 9 aa, synthetic construct
  source 1..9: note = Seed: VVGARGVGK (KRAS G12R)
IVGQRSVGL

SEQ ID NO: 39907 - protein, 9 aa, synthetic construct
  source 1..9: note = Seed: VVGARGVGK (KRAS G12R)
IVGQRSVGM

SEQ ID NO: 39908 - protein, 9 aa, synthetic construct
  source 1..9: note = Seed: VVGARGVGK (KRAS G12R)
IVGQRSVGN

SEQ ID NO: 39909 - protein, 9 aa, synthetic construct
  source 1..9: note = Seed: VVGARGVGK (KRAS G12R)
IVGQRSVGR

SEQ ID NO: 39910 - protein, 9 aa, synthetic construct
  source 1..9: note = Seed: VVGARGVGK (KRAS G12R)
IVGQRSVGS

SEQ ID NO: 39911 - protein, 9 aa, synthetic construct
  source 1..9: note = Seed: VVGARGVGK (KRAS G12R)
IVGQRSVGT

SEQ ID NO: 39912 - protein, 9 aa, synthetic construct
  source 1..9: note = Seed: VVGARGVGK (KRAS G12R)
IVGQRSVGV

SEQ ID NO: 39913 - protein, 9 aa, synthetic construct
  source 1..9: note = Seed: VVGARGVGK (KRAS G12R)
IVGQRSVGY

SEQ ID NO: 39914 - protein, 9 aa, synthetic construct
  source 1..9: note = Seed: VVGARGVGK (KRAS G12R)
IVGQRTVGA

SEQ ID NO: 39915 - protein, 9 aa, synthetic construct
  source 1..9: note = Seed: VVGARGVGK (KRAS G12R)
IVGQRTVGI

SEQ ID NO: 39916 - protein, 9 aa, synthetic construct
  source 1..9: note = Seed: VVGARGVGK (KRAS G12R)
IVGQRTVGK

SEQ ID NO: 39917 - protein, 9 aa, synthetic construct
  source 1..9: note = Seed: VVGARGVGK (KRAS G12R)
IVGQRTVGL

SEQ ID NO: 39918 - protein, 9 aa, synthetic construct
  source 1..9: note = Seed: VVGARGVGK (KRAS G12R)
IVGQRTVGM

SEQ ID NO: 39919 - protein, 9 aa, synthetic construct
  source 1..9: note = Seed: VVGARGVGK (KRAS G12R)
IVGQRTVGR

SEQ ID NO: 39920 - protein, 9 aa, synthetic construct
  source 1..9: note = Seed: VVGARGVGK (KRAS G12R)
IVGQRTVGS

SEQ ID NO: 39921 - protein, 9 aa, synthetic construct
  source 1..9: note = Seed: VVGARGVGK (KRAS G12R)
IVGQRTVGT

SEQ ID NO: 39922 - protein, 9 aa, synthetic construct
  source 1..9: note = Seed: VVGARGVGK (KRAS G12R)
IVGQRTVGV

SEQ ID NO: 39923 - protein, 9 aa, synthetic construct
  source 1..9: note = Seed: VVGARGVGK (KRAS G12R)
IVGQRTVGY

SEQ ID NO: 39924 - protein, 9 aa, synthetic construct
  source 1..9: note = Seed: VVGARGVGK (KRAS G12R)
IVGQRVVGA

SEQ ID NO: 39925 - protein, 9 aa, synthetic construct
  source 1..9: note = Seed: VVGARGVGK (KRAS G12R)
IVGQRVVGI

SEQ ID NO: 39926 - protein, 9 aa, synthetic construct
  source 1..9: note = Seed: VVGARGVGK (KRAS G12R)
IVGQRVVGL

SEQ ID NO: 39927 - protein, 9 aa, synthetic construct
  source 1..9: note = Seed: VVGARGVGK (KRAS G12R)
IVGQRVVGM

SEQ ID NO: 39928 - protein, 9 aa, synthetic construct
  source 1..9: note = Seed: VVGARGVGK (KRAS G12R)
IVGQRVVGN

SEQ ID NO: 39929 - protein, 9 aa, synthetic construct
  source 1..9: note = Seed: VVGARGVGK (KRAS G12R)
IVGQRVVGR

SEQ ID NO: 39930 - protein, 9 aa, synthetic construct
  source 1..9: note = Seed: VVGARGVGK (KRAS G12R)
IVGQRVVGS

SEQ ID NO: 39931 - protein, 9 aa, synthetic construct
  source 1..9: note = Seed: VVGARGVGK (KRAS G12R)
IVGQRVVGT

SEQ ID NO: 39932 - protein, 9 aa, synthetic construct
  source 1..9: note = Seed: VVGARGVGK (KRAS G12R)
IVGQRVVGV

SEQ ID NO: 39933 - protein, 9 aa, synthetic construct
  source 1..9: note = Seed: VVGARGVGK (KRAS G12R)
IVGRRAVGA

SEQ ID NO: 39934 - protein, 9 aa, synthetic construct
  source 1..9: note = Seed: VVGARGVGK (KRAS G12R)
IVGRRAVGF

SEQ ID NO: 39935 - protein, 9 aa, synthetic construct
  source 1..9: note = Seed: VVGARGVGK (KRAS G12R)
IVGRRAVGH

SEQ ID NO: 39936 - protein, 9 aa, synthetic construct
  source 1..9: note = Seed: VVGARGVGK (KRAS G12R)
IVGRRAVGI

SEQ ID NO: 39937 - protein, 9 aa, synthetic construct
  source 1..9: note = Seed: VVGARGVGK (KRAS G12R)
IVGRRAVGK

SEQ ID NO: 39938 - protein, 9 aa, synthetic construct
  source 1..9: note = Seed: VVGARGVGK (KRAS G12R)
IVGRRAVGL

SEQ ID NO: 39939 - protein, 9 aa, synthetic construct
  source 1..9: note = Seed: VVGARGVGK (KRAS G12R)
IVGRRAVGM

SEQ ID NO: 39940 - protein, 9 aa, synthetic construct
  source 1..9: note = Seed: VVGARGVGK (KRAS G12R)
IVGRRAVGN

SEQ ID NO: 39941 - protein, 9 aa, synthetic construct
  source 1..9: note = Seed: VVGARGVGK (KRAS G12R)
IVGRRAVGQ

SEQ ID NO: 39942 - protein, 9 aa, synthetic construct
  source 1..9: note = Seed: VVGARGVGK (KRAS G12R)
IVGRRAVGR

SEQ ID NO: 39943 - protein, 9 aa, synthetic construct
  source 1..9: note = Seed: VVGARGVGK (KRAS G12R)
IVGRRAVGS

SEQ ID NO: 39944 - protein, 9 aa, synthetic construct
  source 1..9: note = Seed: VVGARGVGK (KRAS G12R)
IVGRRAVGT

SEQ ID NO: 39945 - protein, 9 aa, synthetic construct
  source 1..9: note = Seed: VVGARGVGK (KRAS G12R)
IVGRRAVGV

SEQ ID NO: 39946 - protein, 9 aa, synthetic construct
  source 1..9: note = Seed: VVGARGVGK (KRAS G12R)
IVGRRAVGY

SEQ ID NO: 39947 - protein, 9 aa, synthetic construct
  source 1..9: note = Seed: VVGARGVGK (KRAS G12R)
IVGRRCVGR

SEQ ID NO: 39948 - protein, 9 aa, synthetic construct
  source 1..9: note = Seed: VVGARGVGK (KRAS G12R)
IVGRREVGR

SEQ ID NO: 39949 - protein, 9 aa, synthetic construct
  source 1..9: note = Seed: VVGARGVGK (KRAS G12R)
IVGRRGVGF

SEQ ID NO: 39950 - protein, 9 aa, synthetic construct
  source 1..9: note = Seed: VVGARGVGK (KRAS G12R)
IVGRRGVGI

SEQ ID NO: 39951 - protein, 9 aa, synthetic construct
  source 1..9: note = Seed: VVGARGVGK (KRAS G12R)
IVGRRGVGK

SEQ ID NO: 39952 - protein, 9 aa, synthetic construct
  source 1..9: note = Seed: VVGARGVGK (KRAS G12R)
IVGRRGVGL

SEQ ID NO: 39953 - protein, 9 aa, synthetic construct
  source 1..9: note = Seed: VVGARGVGK (KRAS G12R)
IVGRRGVGM

SEQ ID NO: 39954 - protein, 9 aa, synthetic construct
  source 1..9: note = Seed: VVGARGVGK (KRAS G12R)
IVGRRGVGR

SEQ ID NO: 39955 - protein, 9 aa, synthetic construct
  source 1..9: note = Seed: VVGARGVGK (KRAS G12R)
IVGRRGVGV

SEQ ID NO: 39956 - protein, 9 aa, synthetic construct
  source 1..9: note = Seed: VVGARGVGK (KRAS G12R)
IVGRRGVGY

SEQ ID NO: 39957 - protein, 9 aa, synthetic construct
  source 1..9: note = Seed: VVGARGVGK (KRAS G12R)
IVGRRHVGA

SEQ ID NO: 39958 - protein, 9 aa, synthetic construct
  source 1..9: note = Seed: VVGARGVGK (KRAS G12R)
IVGRRHVGF

SEQ ID NO: 39959 - protein, 9 aa, synthetic construct
  source 1..9: note = Seed: VVGARGVGK (KRAS G12R)
IVGRRHVGH

SEQ ID NO: 39960 - protein, 9 aa, synthetic construct
  source 1..9: note = Seed: VVGARGVGK (KRAS G12R)
IVGRRHVGI

SEQ ID NO: 39961 - protein, 9 aa, synthetic construct
  source 1..9: note = Seed: VVGARGVGK (KRAS G12R)
IVGRRHVGK

SEQ ID NO: 39962 - protein, 9 aa, synthetic construct
  source 1..9: note = Seed: VVGARGVGK (KRAS G12R)
IVGRRHVGL

SEQ ID NO: 39963 - protein, 9 aa, synthetic construct
  source 1..9: note = Seed: VVGARGVGK (KRAS G12R)
IVGRRHVGM

SEQ ID NO: 39964 - protein, 9 aa, synthetic construct
  source 1..9: note = Seed: VVGARGVGK (KRAS G12R)
IVGRRHVGQ

SEQ ID NO: 39965 - protein, 9 aa, synthetic construct
  source 1..9: note = Seed: VVGARGVGK (KRAS G12R)
IVGRRHVGR

SEQ ID NO: 39966 - protein, 9 aa, synthetic construct
  source 1..9: note = Seed: VVGARGVGK (KRAS G12R)
IVGRRHVGS

SEQ ID NO: 39967 - protein, 9 aa, synthetic construct
  source 1..9: note = Seed: VVGARGVGK (KRAS G12R)
IVGRRHVGV

SEQ ID NO: 39968 - protein, 9 aa, synthetic construct
  source 1..9: note = Seed: VVGARGVGK (KRAS G12R)
IVGRRHVGY

SEQ ID NO: 39969 - protein, 9 aa, synthetic construct
  source 1..9: note = Seed: VVGARGVGK (KRAS G12R)
IVGRRIVGF

SEQ ID NO: 39970 - protein, 9 aa, synthetic construct
  source 1..9: note = Seed: VVGARGVGK (KRAS G12R)
IVGRRIVGK

SEQ ID NO: 39971 - protein, 9 aa, synthetic construct
  source 1..9: note = Seed: VVGARGVGK (KRAS G12R)
IVGRRIVGM

SEQ ID NO: 39972 - protein, 9 aa, synthetic construct
  source 1..9: note = Seed: VVGARGVGK (KRAS G12R)
IVGRRIVGR

SEQ ID NO: 39973 - protein, 9 aa, synthetic construct
  source 1..9: note = Seed: VVGARGVGK (KRAS G12R)
IVGRRIVGV

SEQ ID NO: 39974 - protein, 9 aa, synthetic construct
  source 1..9: note = Seed: VVGARGVGK (KRAS G12R)
IVGRRIVGY

SEQ ID NO: 39975 - protein, 9 aa, synthetic construct
  source 1..9: note = Seed: VVGARGVGK (KRAS G12R)
IVGRRKVGA

SEQ ID NO: 39976 - protein, 9 aa, synthetic construct
  source 1..9: note = Seed: VVGARGVGK (KRAS G12R)
IVGRRKVGC

SEQ ID NO: 39977 - protein, 9 aa, synthetic construct
  source 1..9: note = Seed: VVGARGVGK (KRAS G12R)
IVGRRKVGD

SEQ ID NO: 39978 - protein, 9 aa, synthetic construct
  source 1..9: note = Seed: VVGARGVGK (KRAS G12R)
IVGRRKVGE

SEQ ID NO: 39979 - protein, 9 aa, synthetic construct
  source 1..9: note = Seed: VVGARGVGK (KRAS G12R)
IVGRRKVGF

SEQ ID NO: 39980 - protein, 9 aa, synthetic construct
  source 1..9: note = Seed: VVGARGVGK (KRAS G12R)
IVGRRKVGG

SEQ ID NO: 39981 - protein, 9 aa, synthetic construct
  source 1..9: note = Seed: VVGARGVGK (KRAS G12R)
IVGRRKVGH

SEQ ID NO: 39982 - protein, 9 aa, synthetic construct
  source 1..9: note = Seed: VVGARGVGK (KRAS G12R)
IVGRRKVGI

SEQ ID NO: 39983 - protein, 9 aa, synthetic construct
  source 1..9: note = Seed: VVGARGVGK (KRAS G12R)
IVGRRKVGK

SEQ ID NO: 39984 - protein, 9 aa, synthetic construct
  source 1..9: note = Seed: VVGARGVGK (KRAS G12R)
IVGRRKVGL

SEQ ID NO: 39985 - protein, 9 aa, synthetic construct
  source 1..9: note = Seed: VVGARGVGK (KRAS G12R)
IVGRRKVGM

SEQ ID NO: 39986 - protein, 9 aa, synthetic construct
  source 1..9: note = Seed: VVGARGVGK (KRAS G12R)
IVGRRKVGN

SEQ ID NO: 39987 - protein, 9 aa, synthetic construct
  source 1..9: note = Seed: VVGARGVGK (KRAS G12R)
IVGRRKVGP

SEQ ID NO: 39988 - protein, 9 aa, synthetic construct
  source 1..9: note = Seed: VVGARGVGK (KRAS G12R)
IVGRRKVGQ

SEQ ID NO: 39989 - protein, 9 aa, synthetic construct
  source 1..9: note = Seed: VVGARGVGK (KRAS G12R)
IVGRRKVGR

SEQ ID NO: 39990 - protein, 9 aa, synthetic construct
  source 1..9: note = Seed: VVGARGVGK (KRAS G12R)
IVGRRKVGS

SEQ ID NO: 39991 - protein, 9 aa, synthetic construct
  source 1..9: note = Seed: VVGARGVGK (KRAS G12R)
IVGRRKVGT

SEQ ID NO: 39992 - protein, 9 aa, synthetic construct
  source 1..9: note = Seed: VVGARGVGK (KRAS G12R)
IVGRRKVGV

SEQ ID NO: 39993 - protein, 9 aa, synthetic construct
  source 1..9: note = Seed: VVGARGVGK (KRAS G12R)
IVGRRKVGW

SEQ ID NO: 39994 - protein, 9 aa, synthetic construct
  source 1..9: note = Seed: VVGARGVGK (KRAS G12R)
IVGRRKVGY

SEQ ID NO: 39995 - protein, 9 aa, synthetic construct
  source 1..9: note = Seed: VVGARGVGK (KRAS G12R)
IVGRRLVGR

SEQ ID NO: 39996 - protein, 9 aa, synthetic construct
  source 1..9: note = Seed: VVGARGVGK (KRAS G12R)
IVGRRLVGY

SEQ ID NO: 39997 - protein, 9 aa, synthetic construct
  source 1..9: note = Seed: VVGARGVGK (KRAS G12R)
IVGRRMVGF

SEQ ID NO: 39998 - protein, 9 aa, synthetic construct
  source 1..9: note = Seed: VVGARGVGK (KRAS G12R)
IVGRRMVGI

SEQ ID NO: 39999 - protein, 9 aa, synthetic construct
  source 1..9: note = Seed: VVGARGVGK (KRAS G12R)
IVGRRMVGK

SEQ ID NO: 40000 - protein, 9 aa, synthetic construct
  source 1..9: note = Seed: VVGARGVGK (KRAS G12R)
IVGRRMVGL

SEQ ID NO: 40001 - protein, 9 aa, synthetic construct
  source 1..9: note = Seed: VVGARGVGK (KRAS G12R)
IVGRRMVGM

SEQ ID NO: 40002 - protein, 9 aa, synthetic construct
  source 1..9: note = Seed: VVGARGVGK (KRAS G12R)
IVGRRMVGR

SEQ ID NO: 40003 - protein, 9 aa, synthetic construct
  source 1..9: note = Seed: VVGARGVGK (KRAS G12R)
IVGRRMVGV

SEQ ID NO: 40004 - protein, 9 aa, synthetic construct
  source 1..9: note = Seed: VVGARGVGK (KRAS G12R)
IVGRRMVGY

SEQ ID NO: 40005 - protein, 9 aa, synthetic construct
  source 1..9: note = Seed: VVGARGVGK (KRAS G12R)
IVGRRNVGA

SEQ ID NO: 40006 - protein, 9 aa, synthetic construct
  source 1..9: note = Seed: VVGARGVGK (KRAS G12R)
IVGRRNVGF

SEQ ID NO: 40007 - protein, 9 aa, synthetic construct
  source 1..9: note = Seed: VVGARGVGK (KRAS G12R)
IVGRRNVGH

SEQ ID NO: 40008 - protein, 9 aa, synthetic construct
  source 1..9: note = Seed: VVGARGVGK (KRAS G12R)
IVGRRNVGI

SEQ ID NO: 40009 - protein, 9 aa, synthetic construct
  source 1..9: note = Seed: VVGARGVGK (KRAS G12R)
IVGRRNVGK

SEQ ID NO: 40010 - protein, 9 aa, synthetic construct
  source 1..9: note = Seed: VVGARGVGK (KRAS G12R)
IVGRRNVGL

SEQ ID NO: 40011 - protein, 9 aa, synthetic construct
  source 1..9: note = Seed: VVGARGVGK (KRAS G12R)
IVGRRNVGM

SEQ ID NO: 40012 - protein, 9 aa, synthetic construct
  source 1..9: note = Seed: VVGARGVGK (KRAS G12R)
IVGRRNVGR

SEQ ID NO: 40013 - protein, 9 aa, synthetic construct
  source 1..9: note = Seed: VVGARGVGK (KRAS G12R)
IVGRRNVGS

SEQ ID NO: 40014 - protein, 9 aa, synthetic construct
  source 1..9: note = Seed: VVGARGVGK (KRAS G12R)
IVGRRNVGV

SEQ ID NO: 40015 - protein, 9 aa, synthetic construct
  source 1..9: note = Seed: VVGARGVGK (KRAS G12R)
IVGRRNVGW

SEQ ID NO: 40016 - protein, 9 aa, synthetic construct
  source 1..9: note = Seed: VVGARGVGK (KRAS G12R)
IVGRRNVGY

SEQ ID NO: 40017 - protein, 9 aa, synthetic construct
  source 1..9: note = Seed: VVGARGVGK (KRAS G12R)
IVGRRPVGA

SEQ ID NO: 40018 - protein, 9 aa, synthetic construct
  source 1..9: note = Seed: VVGARGVGK (KRAS G12R)
IVGRRPVGF

SEQ ID NO: 40019 - protein, 9 aa, synthetic construct
  source 1..9: note = Seed: VVGARGVGK (KRAS G12R)
IVGRRPVGH

SEQ ID NO: 40020 - protein, 9 aa, synthetic construct
  source 1..9: note = Seed: VVGARGVGK (KRAS G12R)
IVGRRPVGI

SEQ ID NO: 40021 - protein, 9 aa, synthetic construct
  source 1..9: note = Seed: VVGARGVGK (KRAS G12R)
IVGRRPVGK

SEQ ID NO: 40022 - protein, 9 aa, synthetic construct
  source 1..9: note = Seed: VVGARGVGK (KRAS G12R)
IVGRRPVGL

SEQ ID NO: 40023 - protein, 9 aa, synthetic construct
  source 1..9: note = Seed: VVGARGVGK (KRAS G12R)
IVGRRPVGM

SEQ ID NO: 40024 - protein, 9 aa, synthetic construct
  source 1..9: note = Seed: VVGARGVGK (KRAS G12R)
IVGRRPVGQ

SEQ ID NO: 40025 - protein, 9 aa, synthetic construct
  source 1..9: note = Seed: VVGARGVGK (KRAS G12R)
IVGRRPVGR

SEQ ID NO: 40026 - protein, 9 aa, synthetic construct
  source 1..9: note = Seed: VVGARGVGK (KRAS G12R)
IVGRRPVGS

SEQ ID NO: 40027 - protein, 9 aa, synthetic construct
  source 1..9: note = Seed: VVGARGVGK (KRAS G12R)
IVGRRPVGV

SEQ ID NO: 40028 - protein, 9 aa, synthetic construct
  source 1..9: note = Seed: VVGARGVGK (KRAS G12R)
IVGRRPVGY

SEQ ID NO: 40029 - protein, 9 aa, synthetic construct
  source 1..9: note = Seed: VVGARGVGK (KRAS G12R)
IVGRRQVGA

SEQ ID NO: 40030 - protein, 9 aa, synthetic construct
  source 1..9: note = Seed: VVGARGVGK (KRAS G12R)
IVGRRQVGF

SEQ ID NO: 40031 - protein, 9 aa, synthetic construct
  source 1..9: note = Seed: VVGARGVGK (KRAS G12R)
IVGRRQVGH

SEQ ID NO: 40032 - protein, 9 aa, synthetic construct
  source 1..9: note = Seed: VVGARGVGK (KRAS G12R)
IVGRRQVGI

SEQ ID NO: 40033 - protein, 9 aa, synthetic construct
  source 1..9: note = Seed: VVGARGVGK (KRAS G12R)
IVGRRQVGK

SEQ ID NO: 40034 - protein, 9 aa, synthetic construct
  source 1..9: note = Seed: VVGARGVGK (KRAS G12R)
IVGRRQVGL

SEQ ID NO: 40035 - protein, 9 aa, synthetic construct
  source 1..9: note = Seed: VVGARGVGK (KRAS G12R)
IVGRRQVGM

SEQ ID NO: 40036 - protein, 9 aa, synthetic construct
  source 1..9: note = Seed: VVGARGVGK (KRAS G12R)
IVGRRQVGR

SEQ ID NO: 40037 - protein, 9 aa, synthetic construct
  source 1..9: note = Seed: VVGARGVGK (KRAS G12R)
IVGRRQVGV

SEQ ID NO: 40038 - protein, 9 aa, synthetic construct
  source 1..9: note = Seed: VVGARGVGK (KRAS G12R)
IVGRRQVGY

SEQ ID NO: 40039 - protein, 9 aa, synthetic construct
  source 1..9: note = Seed: VVGARGVGK (KRAS G12R)
IVGRRRVGA

SEQ ID NO: 40040 - protein, 9 aa, synthetic construct
  source 1..9: note = Seed: VVGARGVGK (KRAS G12R)
IVGRRRVGC

SEQ ID NO: 40041 - protein, 9 aa, synthetic construct
  source 1..9: note = Seed: VVGARGVGK (KRAS G12R)
IVGRRRVGD

SEQ ID NO: 40042 - protein, 9 aa, synthetic construct
  source 1..9: note = Seed: VVGARGVGK (KRAS G12R)
IVGRRRVGE

SEQ ID NO: 40043 - protein, 9 aa, synthetic construct
  source 1..9: note = Seed: VVGARGVGK (KRAS G12R)
IVGRRRVGF

SEQ ID NO: 40044 - protein, 9 aa, synthetic construct
  source 1..9: note = Seed: VVGARGVGK (KRAS G12R)
IVGRRRVGG

SEQ ID NO: 40045 - protein, 9 aa, synthetic construct
  source 1..9: note = Seed: VVGARGVGK (KRAS G12R)
IVGRRRVGH

SEQ ID NO: 40046 - protein, 9 aa, synthetic construct
  source 1..9: note = Seed: VVGARGVGK (KRAS G12R)
IVGRRRVGI

SEQ ID NO: 40047 - protein, 9 aa, synthetic construct
  source 1..9: note = Seed: VVGARGVGK (KRAS G12R)
IVGRRRVGK

SEQ ID NO: 40048 - protein, 9 aa, synthetic construct
  source 1..9: note = Seed: VVGARGVGK (KRAS G12R)
IVGRRRVGL

SEQ ID NO: 40049 - protein, 9 aa, synthetic construct
  source 1..9: note = Seed: VVGARGVGK (KRAS G12R)
IVGRRRVGM

SEQ ID NO: 40050 - protein, 9 aa, synthetic construct
  source 1..9: note = Seed: VVGARGVGK (KRAS G12R)
IVGRRRVGN

SEQ ID NO: 40051 - protein, 9 aa, synthetic construct
  source 1..9: note = Seed: VVGARGVGK (KRAS G12R)
IVGRRRVGP

SEQ ID NO: 40052 - protein, 9 aa, synthetic construct
  source 1..9: note = Seed: VVGARGVGK (KRAS G12R)
IVGRRRVGQ

SEQ ID NO: 40053 - protein, 9 aa, synthetic construct
  source 1..9: note = Seed: VVGARGVGK (KRAS G12R)
IVGRRRVGR

SEQ ID NO: 40054 - protein, 9 aa, synthetic construct
  source 1..9: note = Seed: VVGARGVGK (KRAS G12R)
IVGRRRVGS

SEQ ID NO: 40055 - protein, 9 aa, synthetic construct
  source 1..9: note = Seed: VVGARGVGK (KRAS G12R)
IVGRRRVGT

SEQ ID NO: 40056 - protein, 9 aa, synthetic construct
  source 1..9: note = Seed: VVGARGVGK (KRAS G12R)
IVGRRRVGV

SEQ ID NO: 40057 - protein, 9 aa, synthetic construct
  source 1..9: note = Seed: VVGARGVGK (KRAS G12R)
IVGRRRVGW

SEQ ID NO: 40058 - protein, 9 aa, synthetic construct
  source 1..9: note = Seed: VVGARGVGK (KRAS G12R)
IVGRRRVGY

SEQ ID NO: 40059 - protein, 9 aa, synthetic construct
  source 1..9: note = Seed: VVGARGVGK (KRAS G12R)
IVGRRSVGA

SEQ ID NO: 40060 - protein, 9 aa, synthetic construct
  source 1..9: note = Seed: VVGARGVGK (KRAS G12R)
IVGRRSVGF

SEQ ID NO: 40061 - protein, 9 aa, synthetic construct
  source 1..9: note = Seed: VVGARGVGK (KRAS G12R)
IVGRRSVGH

SEQ ID NO: 40062 - protein, 9 aa, synthetic construct
  source 1..9: note = Seed: VVGARGVGK (KRAS G12R)
IVGRRSVGI

SEQ ID NO: 40063 - protein, 9 aa, synthetic construct
  source 1..9: note = Seed: VVGARGVGK (KRAS G12R)
IVGRRSVGK

SEQ ID NO: 40064 - protein, 9 aa, synthetic construct
  source 1..9: note = Seed: VVGARGVGK (KRAS G12R)
IVGRRSVGL

SEQ ID NO: 40065 - protein, 9 aa, synthetic construct
  source 1..9: note = Seed: VVGARGVGK (KRAS G12R)
IVGRRSVGM

SEQ ID NO: 40066 - protein, 9 aa, synthetic construct
  source 1..9: note = Seed: VVGARGVGK (KRAS G12R)
IVGRRSVGR

SEQ ID NO: 40067 - protein, 9 aa, synthetic construct
  source 1..9: note = Seed: VVGARGVGK (KRAS G12R)
IVGRRSVGS

SEQ ID NO: 40068 - protein, 9 aa, synthetic construct
  source 1..9: note = Seed: VVGARGVGK (KRAS G12R)
IVGRRSVGT

SEQ ID NO: 40069 - protein, 9 aa, synthetic construct
  source 1..9: note = Seed: VVGARGVGK (KRAS G12R)
IVGRRSVGV

SEQ ID NO: 40070 - protein, 9 aa, synthetic construct
  source 1..9: note = Seed: VVGARGVGK (KRAS G12R)
IVGRRSVGW

SEQ ID NO: 40071 - protein, 9 aa, synthetic construct
  source 1..9: note = Seed: VVGARGVGK (KRAS G12R)
IVGRRSVGY

SEQ ID NO: 40072 - protein, 9 aa, synthetic construct
  source 1..9: note = Seed: VVGARGVGK (KRAS G12R)
IVGRRTVGF

SEQ ID NO: 40073 - protein, 9 aa, synthetic construct
  source 1..9: note = Seed: VVGARGVGK (KRAS G12R)
IVGRRTVGH

SEQ ID NO: 40074 - protein, 9 aa, synthetic construct
  source 1..9: note = Seed: VVGARGVGK (KRAS G12R)
IVGRRTVGI

SEQ ID NO: 40075 - protein, 9 aa, synthetic construct
  source 1..9: note = Seed: VVGARGVGK (KRAS G12R)
IVGRRTVGK

SEQ ID NO: 40076 - protein, 9 aa, synthetic construct
  source 1..9: note = Seed: VVGARGVGK (KRAS G12R)
IVGRRTVGL

SEQ ID NO: 40077 - protein, 9 aa, synthetic construct
  source 1..9: note = Seed: VVGARGVGK (KRAS G12R)
IVGRRTVGM

SEQ ID NO: 40078 - protein, 9 aa, synthetic construct
  source 1..9: note = Seed: VVGARGVGK (KRAS G12R)
IVGRRTVGR

SEQ ID NO: 40079 - protein, 9 aa, synthetic construct
  source 1..9: note = Seed: VVGARGVGK (KRAS G12R)
IVGRRTVGV

SEQ ID NO: 40080 - protein, 9 aa, synthetic construct
  source 1..9: note = Seed: VVGARGVGK (KRAS G12R)
IVGRRTVGY

SEQ ID NO: 40081 - protein, 9 aa, synthetic construct
  source 1..9: note = Seed: VVGARGVGK (KRAS G12R)
IVGRRVVGA

SEQ ID NO: 40082 - protein, 9 aa, synthetic construct
  source 1..9: note = Seed: VVGARGVGK (KRAS G12R)
IVGRRVVGF

SEQ ID NO: 40083 - protein, 9 aa, synthetic construct
  source 1..9: note = Seed: VVGARGVGK (KRAS G12R)
IVGRRVVGH

SEQ ID NO: 40084 - protein, 9 aa, synthetic construct
  source 1..9: note = Seed: VVGARGVGK (KRAS G12R)
IVGRRVVGI

SEQ ID NO: 40085 - protein, 9 aa, synthetic construct
  source 1..9: note = Seed: VVGARGVGK (KRAS G12R)
IVGRRVVGK

SEQ ID NO: 40086 - protein, 9 aa, synthetic construct
  source 1..9: note = Seed: VVGARGVGK (KRAS G12R)
IVGRRVVGL

SEQ ID NO: 40087 - protein, 9 aa, synthetic construct
  source 1..9: note = Seed: VVGARGVGK (KRAS G12R)
IVGRRVVGM

SEQ ID NO: 40088 - protein, 9 aa, synthetic construct
  source 1..9: note = Seed: VVGARGVGK (KRAS G12R)
IVGRRVVGR

SEQ ID NO: 40089 - protein, 9 aa, synthetic construct
  source 1..9: note = Seed: VVGARGVGK (KRAS G12R)
IVGRRVVGS

SEQ ID NO: 40090 - protein, 9 aa, synthetic construct
  source 1..9: note = Seed: VVGARGVGK (KRAS G12R)
IVGRRVVGV

SEQ ID NO: 40091 - protein, 9 aa, synthetic construct
  source 1..9: note = Seed: VVGARGVGK (KRAS G12R)
IVGRRVVGY

SEQ ID NO: 40092 - protein, 9 aa, synthetic construct
  source 1..9: note = Seed: VVGARGVGK (KRAS G12R)
IVGSRAVGA

SEQ ID NO: 40093 - protein, 9 aa, synthetic construct
  source 1..9: note = Seed: VVGARGVGK (KRAS G12R)
IVGSRAVGC

SEQ ID NO: 40094 - protein, 9 aa, synthetic construct
  source 1..9: note = Seed: VVGARGVGK (KRAS G12R)
IVGSRAVGF

SEQ ID NO: 40095 - protein, 9 aa, synthetic construct
  source 1..9: note = Seed: VVGARGVGK (KRAS G12R)
IVGSRAVGG

SEQ ID NO: 40096 - protein, 9 aa, synthetic construct
  source 1..9: note = Seed: VVGARGVGK (KRAS G12R)
IVGSRAVGH

SEQ ID NO: 40097 - protein, 9 aa, synthetic construct
  source 1..9: note = Seed: VVGARGVGK (KRAS G12R)
IVGSRAVGI

SEQ ID NO: 40098 - protein, 9 aa, synthetic construct
  source 1..9: note = Seed: VVGARGVGK (KRAS G12R)
IVGSRAVGK

SEQ ID NO: 40099 - protein, 9 aa, synthetic construct
  source 1..9: note = Seed: VVGARGVGK (KRAS G12R)
IVGSRAVGL

SEQ ID NO: 40100 - protein, 9 aa, synthetic construct
  source 1..9: note = Seed: VVGARGVGK (KRAS G12R)
IVGSRAVGM

SEQ ID NO: 40101 - protein, 9 aa, synthetic construct
  source 1..9: note = Seed: VVGARGVGK (KRAS G12R)
IVGSRAVGN

SEQ ID NO: 40102 - protein, 9 aa, synthetic construct
  source 1..9: note = Seed: VVGARGVGK (KRAS G12R)
IVGSRAVGP

SEQ ID NO: 40103 - protein, 9 aa, synthetic construct
  source 1..9: note = Seed: VVGARGVGK (KRAS G12R)
IVGSRAVGQ

SEQ ID NO: 40104 - protein, 9 aa, synthetic construct
  source 1..9: note = Seed: VVGARGVGK (KRAS G12R)
IVGSRAVGR

SEQ ID NO: 40105 - protein, 9 aa, synthetic construct
  source 1..9: note = Seed: VVGARGVGK (KRAS G12R)
IVGSRAVGS

SEQ ID NO: 40106 - protein, 9 aa, synthetic construct
  source 1..9: note = Seed: VVGARGVGK (KRAS G12R)
IVGSRAVGT

SEQ ID NO: 40107 - protein, 9 aa, synthetic construct
  source 1..9: note = Seed: VVGARGVGK (KRAS G12R)
IVGSRAVGV

SEQ ID NO: 40108 - protein, 9 aa, synthetic construct
  source 1..9: note = Seed: VVGARGVGK (KRAS G12R)
IVGSRAVGW

SEQ ID NO: 40109 - protein, 9 aa, synthetic construct
  source 1..9: note = Seed: VVGARGVGK (KRAS G12R)
IVGSRAVGY

SEQ ID NO: 40110 - protein, 9 aa, synthetic construct
  source 1..9: note = Seed: VVGARGVGK (KRAS G12R)
IVGSRGVGA

SEQ ID NO: 40111 - protein, 9 aa, synthetic construct
  source 1..9: note = Seed: VVGARGVGK (KRAS G12R)
IVGSRGVGF

SEQ ID NO: 40112 - protein, 9 aa, synthetic construct
  source 1..9: note = Seed: VVGARGVGK (KRAS G12R)
IVGSRGVGG

SEQ ID NO: 40113 - protein, 9 aa, synthetic construct
  source 1..9: note = Seed: VVGARGVGK (KRAS G12R)
IVGSRGVGI

SEQ ID NO: 40114 - protein, 9 aa, synthetic construct
  source 1..9: note = Seed: VVGARGVGK (KRAS G12R)
IVGSRGVGK

SEQ ID NO: 40115 - protein, 9 aa, synthetic construct
  source 1..9: note = Seed: VVGARGVGK (KRAS G12R)
IVGSRGVGL

SEQ ID NO: 40116 - protein, 9 aa, synthetic construct
  source 1..9: note = Seed: VVGARGVGK (KRAS G12R)
IVGSRGVGM

SEQ ID NO: 40117 - protein, 9 aa, synthetic construct
  source 1..9: note = Seed: VVGARGVGK (KRAS G12R)
IVGSRGVGR

SEQ ID NO: 40118 - protein, 9 aa, synthetic construct
  source 1..9: note = Seed: VVGARGVGK (KRAS G12R)
IVGSRGVGS

SEQ ID NO: 40119 - protein, 9 aa, synthetic construct
  source 1..9: note = Seed: VVGARGVGK (KRAS G12R)
IVGSRGVGT

SEQ ID NO: 40120 - protein, 9 aa, synthetic construct
  source 1..9: note = Seed: VVGARGVGK (KRAS G12R)
IVGSRGVGV

SEQ ID NO: 40121 - protein, 9 aa, synthetic construct
  source 1..9: note = Seed: VVGARGVGK (KRAS G12R)
IVGSRGVGY

SEQ ID NO: 40122 - protein, 9 aa, synthetic construct
  source 1..9: note = Seed: VVGARGVGK (KRAS G12R)
IVGSRHVGA

SEQ ID NO: 40123 - protein, 9 aa, synthetic construct
  source 1..9: note = Seed: VVGARGVGK (KRAS G12R)
IVGSRHVGF

SEQ ID NO: 40124 - protein, 9 aa, synthetic construct
  source 1..9: note = Seed: VVGARGVGK (KRAS G12R)
IVGSRHVGI

SEQ ID NO: 40125 - protein, 9 aa, synthetic construct
  source 1..9: note = Seed: VVGARGVGK (KRAS G12R)
IVGSRHVGK

SEQ ID NO: 40126 - protein, 9 aa, synthetic construct
  source 1..9: note = Seed: VVGARGVGK (KRAS G12R)
IVGSRHVGL

SEQ ID NO: 40127 - protein, 9 aa, synthetic construct
  source 1..9: note = Seed: VVGARGVGK (KRAS G12R)
IVGSRHVGM

SEQ ID NO: 40128 - protein, 9 aa, synthetic construct
  source 1..9: note = Seed: VVGARGVGK (KRAS G12R)
IVGSRHVGR

SEQ ID NO: 40129 - protein, 9 aa, synthetic construct
  source 1..9: note = Seed: VVGARGVGK (KRAS G12R)
IVGSRHVGV

SEQ ID NO: 40130 - protein, 9 aa, synthetic construct
  source 1..9: note = Seed: VVGARGVGK (KRAS G12R)
IVGSRHVGY

SEQ ID NO: 40131 - protein, 9 aa, synthetic construct
  source 1..9: note = Seed: VVGARGVGK (KRAS G12R)
IVGSRIVGA

SEQ ID NO: 40132 - protein, 9 aa, synthetic construct
  source 1..9: note = Seed: VVGARGVGK (KRAS G12R)
IVGSRIVGG

SEQ ID NO: 40133 - protein, 9 aa, synthetic construct
  source 1..9: note = Seed: VVGARGVGK (KRAS G12R)
IVGSRIVGH

SEQ ID NO: 40134 - protein, 9 aa, synthetic construct
  source 1..9: note = Seed: VVGARGVGK (KRAS G12R)
IVGSRIVGI

SEQ ID NO: 40135 - protein, 9 aa, synthetic construct
  source 1..9: note = Seed: VVGARGVGK (KRAS G12R)
IVGSRIVGK

SEQ ID NO: 40136 - protein, 9 aa, synthetic construct
  source 1..9: note = Seed: VVGARGVGK (KRAS G12R)
IVGSRIVGM

SEQ ID NO: 40137 - protein, 9 aa, synthetic construct
  source 1..9: note = Seed: VVGARGVGK (KRAS G12R)
IVGSRIVGN

SEQ ID NO: 40138 - protein, 9 aa, synthetic construct
  source 1..9: note = Seed: VVGARGVGK (KRAS G12R)
IVGSRIVGR

SEQ ID NO: 40139 - protein, 9 aa, synthetic construct
  source 1..9: note = Seed: VVGARGVGK (KRAS G12R)
IVGSRIVGS

SEQ ID NO: 40140 - protein, 9 aa, synthetic construct
  source 1..9: note = Seed: VVGARGVGK (KRAS G12R)
IVGSRIVGT

SEQ ID NO: 40141 - protein, 9 aa, synthetic construct
  source 1..9: note = Seed: VVGARGVGK (KRAS G12R)
IVGSRIVGV

SEQ ID NO: 40142 - protein, 9 aa, synthetic construct
  source 1..9: note = Seed: VVGARGVGK (KRAS G12R)
IVGSRKVGA

SEQ ID NO: 40143 - protein, 9 aa, synthetic construct
  source 1..9: note = Seed: VVGARGVGK (KRAS G12R)
IVGSRKVGF

SEQ ID NO: 40144 - protein, 9 aa, synthetic construct
  source 1..9: note = Seed: VVGARGVGK (KRAS G12R)
IVGSRKVGG

SEQ ID NO: 40145 - protein, 9 aa, synthetic construct
  source 1..9: note = Seed: VVGARGVGK (KRAS G12R)
IVGSRKVGH

SEQ ID NO: 40146 - protein, 9 aa, synthetic construct
  source 1..9: note = Seed: VVGARGVGK (KRAS G12R)
IVGSRKVGI

SEQ ID NO: 40147 - protein, 9 aa, synthetic construct
  source 1..9: note = Seed: VVGARGVGK (KRAS G12R)
IVGSRKVGK

SEQ ID NO: 40148 - protein, 9 aa, synthetic construct
  source 1..9: note = Seed: VVGARGVGK (KRAS G12R)
IVGSRKVGL

SEQ ID NO: 40149 - protein, 9 aa, synthetic construct
  source 1..9: note = Seed: VVGARGVGK (KRAS G12R)
IVGSRKVGM

SEQ ID NO: 40150 - protein, 9 aa, synthetic construct
  source 1..9: note = Seed: VVGARGVGK (KRAS G12R)
IVGSRKVGN

SEQ ID NO: 40151 - protein, 9 aa, synthetic construct
  source 1..9: note = Seed: VVGARGVGK (KRAS G12R)
IVGSRKVGQ

SEQ ID NO: 40152 - protein, 9 aa, synthetic construct
  source 1..9: note = Seed: VVGARGVGK (KRAS G12R)
IVGSRKVGR

SEQ ID NO: 40153 - protein, 9 aa, synthetic construct
  source 1..9: note = Seed: VVGARGVGK (KRAS G12R)
IVGSRKVGS

SEQ ID NO: 40154 - protein, 9 aa, synthetic construct
  source 1..9: note = Seed: VVGARGVGK (KRAS G12R)
IVGSRKVGT

SEQ ID NO: 40155 - protein, 9 aa, synthetic construct
  source 1..9: note = Seed: VVGARGVGK (KRAS G12R)
IVGSRKVGV

SEQ ID NO: 40156 - protein, 9 aa, synthetic construct
  source 1..9: note = Seed: VVGARGVGK (KRAS G12R)
IVGSRKVGW

SEQ ID NO: 40157 - protein, 9 aa, synthetic construct
  source 1..9: note = Seed: VVGARGVGK (KRAS G12R)
IVGSRKVGY

SEQ ID NO: 40158 - protein, 9 aa, synthetic construct
  source 1..9: note = Seed: VVGARGVGK (KRAS G12R)
IVGSRLVGA

SEQ ID NO: 40159 - protein, 9 aa, synthetic construct
  source 1..9: note = Seed: VVGARGVGK (KRAS G12R)
IVGSRLVGK

SEQ ID NO: 40160 - protein, 9 aa, synthetic construct
  source 1..9: note = Seed: VVGARGVGK (KRAS G12R)
IVGSRLVGR

SEQ ID NO: 40161 - protein, 9 aa, synthetic construct
  source 1..9: note = Seed: VVGARGVGK (KRAS G12R)
IVGSRLVGS

SEQ ID NO: 40162 - protein, 9 aa, synthetic construct
  source 1..9: note = Seed: VVGARGVGK (KRAS G12R)
IVGSRMVGA

SEQ ID NO: 40163 - protein, 9 aa, synthetic construct
  source 1..9: note = Seed: VVGARGVGK (KRAS G12R)
IVGSRMVGI

SEQ ID NO: 40164 - protein, 9 aa, synthetic construct
  source 1..9: note = Seed: VVGARGVGK (KRAS G12R)
IVGSRMVGK

SEQ ID NO: 40165 - protein, 9 aa, synthetic construct
  source 1..9: note = Seed: VVGARGVGK (KRAS G12R)
IVGSRMVGR

SEQ ID NO: 40166 - protein, 9 aa, synthetic construct
  source 1..9: note = Seed: VVGARGVGK (KRAS G12R)
IVGSRMVGS

SEQ ID NO: 40167 - protein, 9 aa, synthetic construct
  source 1..9: note = Seed: VVGARGVGK (KRAS G12R)
IVGSRNVGA

SEQ ID NO: 40168 - protein, 9 aa, synthetic construct
  source 1..9: note = Seed: VVGARGVGK (KRAS G12R)
IVGSRNVGF

SEQ ID NO: 40169 - protein, 9 aa, synthetic construct
  source 1..9: note = Seed: VVGARGVGK (KRAS G12R)
IVGSRNVGI

SEQ ID NO: 40170 - protein, 9 aa, synthetic construct
  source 1..9: note = Seed: VVGARGVGK (KRAS G12R)
IVGSRNVGK

SEQ ID NO: 40171 - protein, 9 aa, synthetic construct
  source 1..9: note = Seed: VVGARGVGK (KRAS G12R)
IVGSRNVGL

SEQ ID NO: 40172 - protein, 9 aa, synthetic construct
  source 1..9: note = Seed: VVGARGVGK (KRAS G12R)
IVGSRNVGM

SEQ ID NO: 40173 - protein, 9 aa, synthetic construct
  source 1..9: note = Seed: VVGARGVGK (KRAS G12R)
IVGSRNVGR

SEQ ID NO: 40174 - protein, 9 aa, synthetic construct
  source 1..9: note = Seed: VVGARGVGK (KRAS G12R)
IVGSRNVGV

SEQ ID NO: 40175 - protein, 9 aa, synthetic construct
  source 1..9: note = Seed: VVGARGVGK (KRAS G12R)
IVGSRNVGY

SEQ ID NO: 40176 - protein, 9 aa, synthetic construct
  source 1..9: note = Seed: VVGARGVGK (KRAS G12R)
IVGSRPVGA

SEQ ID NO: 40177 - protein, 9 aa, synthetic construct
  source 1..9: note = Seed: VVGARGVGK (KRAS G12R)
IVGSRPVGC

SEQ ID NO: 40178 - protein, 9 aa, synthetic construct
  source 1..9: note = Seed: VVGARGVGK (KRAS G12R)
IVGSRPVGF

SEQ ID NO: 40179 - protein, 9 aa, synthetic construct
  source 1..9: note = Seed: VVGARGVGK (KRAS G12R)
IVGSRPVGG

SEQ ID NO: 40180 - protein, 9 aa, synthetic construct
  source 1..9: note = Seed: VVGARGVGK (KRAS G12R)
IVGSRPVGH

SEQ ID NO: 40181 - protein, 9 aa, synthetic construct
  source 1..9: note = Seed: VVGARGVGK (KRAS G12R)
IVGSRPVGI

SEQ ID NO: 40182 - protein, 9 aa, synthetic construct
  source 1..9: note = Seed: VVGARGVGK (KRAS G12R)
IVGSRPVGK

SEQ ID NO: 40183 - protein, 9 aa, synthetic construct
  source 1..9: note = Seed: VVGARGVGK (KRAS G12R)
IVGSRPVGL

SEQ ID NO: 40184 - protein, 9 aa, synthetic construct
  source 1..9: note = Seed: VVGARGVGK (KRAS G12R)
IVGSRPVGM

SEQ ID NO: 40185 - protein, 9 aa, synthetic construct
  source 1..9: note = Seed: VVGARGVGK (KRAS G12R)
IVGSRPVGN

SEQ ID NO: 40186 - protein, 9 aa, synthetic construct
  source 1..9: note = Seed: VVGARGVGK (KRAS G12R)
IVGSRPVGQ

SEQ ID NO: 40187 - protein, 9 aa, synthetic construct
  source 1..9: note = Seed: VVGARGVGK (KRAS G12R)
IVGSRPVGR

SEQ ID NO: 40188 - protein, 9 aa, synthetic construct
  source 1..9: note = Seed: VVGARGVGK (KRAS G12R)
IVGSRPVGS

SEQ ID NO: 40189 - protein, 9 aa, synthetic construct
  source 1..9: note = Seed: VVGARGVGK (KRAS G12R)
IVGSRPVGT

SEQ ID NO: 40190 - protein, 9 aa, synthetic construct
  source 1..9: note = Seed: VVGARGVGK (KRAS G12R)
IVGSRPVGV

SEQ ID NO: 40191 - protein, 9 aa, synthetic construct
  source 1..9: note = Seed: VVGARGVGK (KRAS G12R)
IVGSRPVGW

SEQ ID NO: 40192 - protein, 9 aa, synthetic construct
  source 1..9: note = Seed: VVGARGVGK (KRAS G12R)
IVGSRPVGY

SEQ ID NO: 40193 - protein, 9 aa, synthetic construct
  source 1..9: note = Seed: VVGARGVGK (KRAS G12R)
IVGSRQVGR

SEQ ID NO: 40194 - protein, 9 aa, synthetic construct
  source 1..9: note = Seed: VVGARGVGK (KRAS G12R)
IVGSRRVGA

SEQ ID NO: 40195 - protein, 9 aa, synthetic construct
  source 1..9: note = Seed: VVGARGVGK (KRAS G12R)
IVGSRRVGC

SEQ ID NO: 40196 - protein, 9 aa, synthetic construct
  source 1..9: note = Seed: VVGARGVGK (KRAS G12R)
IVGSRRVGE

SEQ ID NO: 40197 - protein, 9 aa, synthetic construct
  source 1..9: note = Seed: VVGARGVGK (KRAS G12R)
IVGSRRVGF

SEQ ID NO: 40198 - protein, 9 aa, synthetic construct
  source 1..9: note = Seed: VVGARGVGK (KRAS G12R)
IVGSRRVGG

SEQ ID NO: 40199 - protein, 9 aa, synthetic construct
  source 1..9: note = Seed: VVGARGVGK (KRAS G12R)
IVGSRRVGH

SEQ ID NO: 40200 - protein, 9 aa, synthetic construct
  source 1..9: note = Seed: VVGARGVGK (KRAS G12R)
IVGSRRVGI

SEQ ID NO: 40201 - protein, 9 aa, synthetic construct
  source 1..9: note = Seed: VVGARGVGK (KRAS G12R)
IVGSRRVGK

SEQ ID NO: 40202 - protein, 9 aa, synthetic construct
  source 1..9: note = Seed: VVGARGVGK (KRAS G12R)
IVGSRRVGL

SEQ ID NO: 40203 - protein, 9 aa, synthetic construct
  source 1..9: note = Seed: VVGARGVGK (KRAS G12R)
IVGSRRVGM

SEQ ID NO: 40204 - protein, 9 aa, synthetic construct
  source 1..9: note = Seed: VVGARGVGK (KRAS G12R)
IVGSRRVGN

SEQ ID NO: 40205 - protein, 9 aa, synthetic construct
  source 1..9: note = Seed: VVGARGVGK (KRAS G12R)
IVGSRRVGP

SEQ ID NO: 40206 - protein, 9 aa, synthetic construct
  source 1..9: note = Seed: VVGARGVGK (KRAS G12R)
IVGSRRVGQ

SEQ ID NO: 40207 - protein, 9 aa, synthetic construct
  source 1..9: note = Seed: VVGARGVGK (KRAS G12R)
IVGSRRVGR

SEQ ID NO: 40208 - protein, 9 aa, synthetic construct
  source 1..9: note = Seed: VVGARGVGK (KRAS G12R)
IVGSRRVGS

SEQ ID NO: 40209 - protein, 9 aa, synthetic construct
  source 1..9: note = Seed: VVGARGVGK (KRAS G12R)
IVGSRRVGT

SEQ ID NO: 40210 - protein, 9 aa, synthetic construct
  source 1..9: note = Seed: VVGARGVGK (KRAS G12R)
IVGSRRVGV

SEQ ID NO: 40211 - protein, 9 aa, synthetic construct
  source 1..9: note = Seed: VVGARGVGK (KRAS G12R)
IVGSRRVGW

SEQ ID NO: 40212 - protein, 9 aa, synthetic construct
  source 1..9: note = Seed: VVGARGVGK (KRAS G12R)
IVGSRRVGY

SEQ ID NO: 40213 - protein, 9 aa, synthetic construct
  source 1..9: note = Seed: VVGARGVGK (KRAS G12R)
IVGSRSVGA

SEQ ID NO: 40214 - protein, 9 aa, synthetic construct
  source 1..9: note = Seed: VVGARGVGK (KRAS G12R)
IVGSRSVGF

SEQ ID NO: 40215 - protein, 9 aa, synthetic construct
  source 1..9: note = Seed: VVGARGVGK (KRAS G12R)
IVGSRSVGG

SEQ ID NO: 40216 - protein, 9 aa, synthetic construct
  source 1..9: note = Seed: VVGARGVGK (KRAS G12R)
IVGSRSVGI

SEQ ID NO: 40217 - protein, 9 aa, synthetic construct
  source 1..9: note = Seed: VVGARGVGK (KRAS G12R)
IVGSRSVGK

SEQ ID NO: 40218 - protein, 9 aa, synthetic construct
  source 1..9: note = Seed: VVGARGVGK (KRAS G12R)
IVGSRSVGL

SEQ ID NO: 40219 - protein, 9 aa, synthetic construct
  source 1..9: note = Seed: VVGARGVGK (KRAS G12R)
IVGSRSVGM

SEQ ID NO: 40220 - protein, 9 aa, synthetic construct
  source 1..9: note = Seed: VVGARGVGK (KRAS G12R)
IVGSRSVGN

SEQ ID NO: 40221 - protein, 9 aa, synthetic construct
  source 1..9: note = Seed: VVGARGVGK (KRAS G12R)
IVGSRSVGR

SEQ ID NO: 40222 - protein, 9 aa, synthetic construct
  source 1..9: note = Seed: VVGARGVGK (KRAS G12R)
IVGSRSVGS

SEQ ID NO: 40223 - protein, 9 aa, synthetic construct
  source 1..9: note = Seed: VVGARGVGK (KRAS G12R)
IVGSRSVGT

SEQ ID NO: 40224 - protein, 9 aa, synthetic construct
  source 1..9: note = Seed: VVGARGVGK (KRAS G12R)
IVGSRSVGV

SEQ ID NO: 40225 - protein, 9 aa, synthetic construct
  source 1..9: note = Seed: VVGARGVGK (KRAS G12R)
IVGSRSVGY

SEQ ID NO: 40226 - protein, 9 aa, synthetic construct
  source 1..9: note = Seed: VVGARGVGK (KRAS G12R)
IVGSRTVGA

SEQ ID NO: 40227 - protein, 9 aa, synthetic construct
  source 1..9: note = Seed: VVGARGVGK (KRAS G12R)
IVGSRTVGF

SEQ ID NO: 40228 - protein, 9 aa, synthetic construct
  source 1..9: note = Seed: VVGARGVGK (KRAS G12R)
IVGSRTVGG

SEQ ID NO: 40229 - protein, 9 aa, synthetic construct
  source 1..9: note = Seed: VVGARGVGK (KRAS G12R)
IVGSRTVGI

SEQ ID NO: 40230 - protein, 9 aa, synthetic construct
  source 1..9: note = Seed: VVGARGVGK (KRAS G12R)
IVGSRTVGK

SEQ ID NO: 40231 - protein, 9 aa, synthetic construct
  source 1..9: note = Seed: VVGARGVGK (KRAS G12R)
IVGSRTVGL

SEQ ID NO: 40232 - protein, 9 aa, synthetic construct
  source 1..9: note = Seed: VVGARGVGK (KRAS G12R)
IVGSRTVGM

SEQ ID NO: 40233 - protein, 9 aa, synthetic construct
  source 1..9: note = Seed: VVGARGVGK (KRAS G12R)
IVGSRTVGR

SEQ ID NO: 40234 - protein, 9 aa, synthetic construct
  source 1..9: note = Seed: VVGARGVGK (KRAS G12R)
IVGSRTVGS

SEQ ID NO: 40235 - protein, 9 aa, synthetic construct
  source 1..9: note = Seed: VVGARGVGK (KRAS G12R)
IVGSRTVGT

SEQ ID NO: 40236 - protein, 9 aa, synthetic construct
  source 1..9: note = Seed: VVGARGVGK (KRAS G12R)
IVGSRTVGV

SEQ ID NO: 40237 - protein, 9 aa, synthetic construct
  source 1..9: note = Seed: VVGARGVGK (KRAS G12R)
IVGSRTVGY

SEQ ID NO: 40238 - protein, 9 aa, synthetic construct
  source 1..9: note = Seed: VVGARGVGK (KRAS G12R)
IVGSRVVGA

SEQ ID NO: 40239 - protein, 9 aa, synthetic construct
  source 1..9: note = Seed: VVGARGVGK (KRAS G12R)
IVGSRVVGF

SEQ ID NO: 40240 - protein, 9 aa, synthetic construct
  source 1..9: note = Seed: VVGARGVGK (KRAS G12R)
IVGSRVVGG

SEQ ID NO: 40241 - protein, 9 aa, synthetic construct
  source 1..9: note = Seed: VVGARGVGK (KRAS G12R)
IVGSRVVGH

SEQ ID NO: 40242 - protein, 9 aa, synthetic construct
  source 1..9: note = Seed: VVGARGVGK (KRAS G12R)
IVGSRVVGI

SEQ ID NO: 40243 - protein, 9 aa, synthetic construct
  source 1..9: note = Seed: VVGARGVGK (KRAS G12R)
IVGSRVVGK

SEQ ID NO: 40244 - protein, 9 aa, synthetic construct
  source 1..9: note = Seed: VVGARGVGK (KRAS G12R)
IVGSRVVGL

SEQ ID NO: 40245 - protein, 9 aa, synthetic construct
  source 1..9: note = Seed: VVGARGVGK (KRAS G12R)
IVGSRVVGM

SEQ ID NO: 40246 - protein, 9 aa, synthetic construct
  source 1..9: note = Seed: VVGARGVGK (KRAS G12R)
IVGSRVVGN

SEQ ID NO: 40247 - protein, 9 aa, synthetic construct
  source 1..9: note = Seed: VVGARGVGK (KRAS G12R)
IVGSRVVGR

SEQ ID NO: 40248 - protein, 9 aa, synthetic construct
  source 1..9: note = Seed: VVGARGVGK (KRAS G12R)
IVGSRVVGS

SEQ ID NO: 40249 - protein, 9 aa, synthetic construct
  source 1..9: note = Seed: VVGARGVGK (KRAS G12R)
IVGSRVVGT

SEQ ID NO: 40250 - protein, 9 aa, synthetic construct
  source 1..9: note = Seed: VVGARGVGK (KRAS G12R)
IVGSRVVGV

SEQ ID NO: 40251 - protein, 9 aa, synthetic construct
  source 1..9: note = Seed: VVGARGVGK (KRAS G12R)
IVGSRVVGY

SEQ ID NO: 40252 - protein, 9 aa, synthetic construct
  source 1..9: note = Seed: VVGARGVGK (KRAS G12R)
IVGSRWVGR

SEQ ID NO: 40253 - protein, 9 aa, synthetic construct
  source 1..9: note = Seed: VVGARGVGK (KRAS G12R)
IVGTRAVGA

SEQ ID NO: 40254 - protein, 9 aa, synthetic construct
  source 1..9: note = Seed: VVGARGVGK (KRAS G12R)
IVGTRAVGF

SEQ ID NO: 40255 - protein, 9 aa, synthetic construct
  source 1..9: note = Seed: VVGARGVGK (KRAS G12R)
IVGTRAVGG

SEQ ID NO: 40256 - protein, 9 aa, synthetic construct
  source 1..9: note = Seed: VVGARGVGK (KRAS G12R)
IVGTRAVGI

SEQ ID NO: 40257 - protein, 9 aa, synthetic construct
  source 1..9: note = Seed: VVGARGVGK (KRAS G12R)
IVGTRAVGK

SEQ ID NO: 40258 - protein, 9 aa, synthetic construct
  source 1..9: note = Seed: VVGARGVGK (KRAS G12R)
IVGTRAVGL

SEQ ID NO: 40259 - protein, 9 aa, synthetic construct
  source 1..9: note = Seed: VVGARGVGK (KRAS G12R)
IVGTRAVGM

SEQ ID NO: 40260 - protein, 9 aa, synthetic construct
  source 1..9: note = Seed: VVGARGVGK (KRAS G12R)
IVGTRAVGN

SEQ ID NO: 40261 - protein, 9 aa, synthetic construct
  source 1..9: note = Seed: VVGARGVGK (KRAS G12R)
IVGTRAVGR

SEQ ID NO: 40262 - protein, 9 aa, synthetic construct
  source 1..9: note = Seed: VVGARGVGK (KRAS G12R)
IVGTRAVGS

SEQ ID NO: 40263 - protein, 9 aa, synthetic construct
  source 1..9: note = Seed: VVGARGVGK (KRAS G12R)
IVGTRAVGT

SEQ ID NO: 40264 - protein, 9 aa, synthetic construct
  source 1..9: note = Seed: VVGARGVGK (KRAS G12R)
IVGTRAVGV

SEQ ID NO: 40265 - protein, 9 aa, synthetic construct
  source 1..9: note = Seed: VVGARGVGK (KRAS G12R)
IVGTRAVGY

SEQ ID NO: 40266 - protein, 9 aa, synthetic construct
  source 1..9: note = Seed: VVGARGVGK (KRAS G12R)
IVGTRGVGA

SEQ ID NO: 40267 - protein, 9 aa, synthetic construct
  source 1..9: note = Seed: VVGARGVGK (KRAS G12R)
IVGTRGVGF

SEQ ID NO: 40268 - protein, 9 aa, synthetic construct
  source 1..9: note = Seed: VVGARGVGK (KRAS G12R)
IVGTRGVGI

SEQ ID NO: 40269 - protein, 9 aa, synthetic construct
  source 1..9: note = Seed: VVGARGVGK (KRAS G12R)
IVGTRGVGL

SEQ ID NO: 40270 - protein, 9 aa, synthetic construct
  source 1..9: note = Seed: VVGARGVGK (KRAS G12R)
IVGTRGVGM

SEQ ID NO: 40271 - protein, 9 aa, synthetic construct
  source 1..9: note = Seed: VVGARGVGK (KRAS G12R)
IVGTRGVGR

SEQ ID NO: 40272 - protein, 9 aa, synthetic construct
  source 1..9: note = Seed: VVGARGVGK (KRAS G12R)
IVGTRGVGS

SEQ ID NO: 40273 - protein, 9 aa, synthetic construct
  source 1..9: note = Seed: VVGARGVGK (KRAS G12R)
IVGTRGVGT

SEQ ID NO: 40274 - protein, 9 aa, synthetic construct
  source 1..9: note = Seed: VVGARGVGK (KRAS G12R)
IVGTRGVGV

SEQ ID NO: 40275 - protein, 9 aa, synthetic construct
  source 1..9: note = Seed: VVGARGVGK (KRAS G12R)
IVGTRGVGY

SEQ ID NO: 40276 - protein, 9 aa, synthetic construct
  source 1..9: note = Seed: VVGARGVGK (KRAS G12R)
IVGTRHVGR

SEQ ID NO: 40277 - protein, 9 aa, synthetic construct
  source 1..9: note = Seed: VVGARGVGK (KRAS G12R)
IVGTRHVGY

SEQ ID NO: 40278 - protein, 9 aa, synthetic construct
  source 1..9: note = Seed: VVGARGVGK (KRAS G12R)
IVGTRIVGA

SEQ ID NO: 40279 - protein, 9 aa, synthetic construct
  source 1..9: note = Seed: VVGARGVGK (KRAS G12R)
IVGTRIVGI

SEQ ID NO: 40280 - protein, 9 aa, synthetic construct
  source 1..9: note = Seed: VVGARGVGK (KRAS G12R)
IVGTRIVGL

SEQ ID NO: 40281 - protein, 9 aa, synthetic construct
  source 1..9: note = Seed: VVGARGVGK (KRAS G12R)
IVGTRIVGR

SEQ ID NO: 40282 - protein, 9 aa, synthetic construct
  source 1..9: note = Seed: VVGARGVGK (KRAS G12R)
IVGTRIVGV

SEQ ID NO: 40283 - protein, 9 aa, synthetic construct
  source 1..9: note = Seed: VVGARGVGK (KRAS G12R)
IVGTRKVGA

SEQ ID NO: 40284 - protein, 9 aa, synthetic construct
  source 1..9: note = Seed: VVGARGVGK (KRAS G12R)
IVGTRKVGF

SEQ ID NO: 40285 - protein, 9 aa, synthetic construct
  source 1..9: note = Seed: VVGARGVGK (KRAS G12R)
IVGTRKVGG

SEQ ID NO: 40286 - protein, 9 aa, synthetic construct
  source 1..9: note = Seed: VVGARGVGK (KRAS G12R)
IVGTRKVGH

SEQ ID NO: 40287 - protein, 9 aa, synthetic construct
  source 1..9: note = Seed: VVGARGVGK (KRAS G12R)
IVGTRKVGI

SEQ ID NO: 40288 - protein, 9 aa, synthetic construct
  source 1..9: note = Seed: VVGARGVGK (KRAS G12R)
IVGTRKVGK

SEQ ID NO: 40289 - protein, 9 aa, synthetic construct
  source 1..9: note = Seed: VVGARGVGK (KRAS G12R)
IVGTRKVGL

SEQ ID NO: 40290 - protein, 9 aa, synthetic construct
  source 1..9: note = Seed: VVGARGVGK (KRAS G12R)
IVGTRKVGM

SEQ ID NO: 40291 - protein, 9 aa, synthetic construct
  source 1..9: note = Seed: VVGARGVGK (KRAS G12R)
IVGTRKVGQ

SEQ ID NO: 40292 - protein, 9 aa, synthetic construct
  source 1..9: note = Seed: VVGARGVGK (KRAS G12R)
IVGTRKVGR

SEQ ID NO: 40293 - protein, 9 aa, synthetic construct
  source 1..9: note = Seed: VVGARGVGK (KRAS G12R)
IVGTRKVGS

SEQ ID NO: 40294 - protein, 9 aa, synthetic construct
  source 1..9: note = Seed: VVGARGVGK (KRAS G12R)
IVGTRKVGT

SEQ ID NO: 40295 - protein, 9 aa, synthetic construct
  source 1..9: note = Seed: VVGARGVGK (KRAS G12R)
IVGTRKVGV

SEQ ID NO: 40296 - protein, 9 aa, synthetic construct
  source 1..9: note = Seed: VVGARGVGK (KRAS G12R)
IVGTRKVGW

SEQ ID NO: 40297 - protein, 9 aa, synthetic construct
  source 1..9: note = Seed: VVGARGVGK (KRAS G12R)
IVGTRKVGY

SEQ ID NO: 40298 - protein, 9 aa, synthetic construct
  source 1..9: note = Seed: VVGARGVGK (KRAS G12R)
IVGTRLVGR

SEQ ID NO: 40299 - protein, 9 aa, synthetic construct
  source 1..9: note = Seed: VVGARGVGK (KRAS G12R)
IVGTRMVGR

SEQ ID NO: 40300 - protein, 9 aa, synthetic construct
  source 1..9: note = Seed: VVGARGVGK (KRAS G12R)
IVGTRNVGF

SEQ ID NO: 40301 - protein, 9 aa, synthetic construct
  source 1..9: note = Seed: VVGARGVGK (KRAS G12R)
IVGTRNVGI

SEQ ID NO: 40302 - protein, 9 aa, synthetic construct
  source 1..9: note = Seed: VVGARGVGK (KRAS G12R)
IVGTRNVGL

SEQ ID NO: 40303 - protein, 9 aa, synthetic construct
  source 1..9: note = Seed: VVGARGVGK (KRAS G12R)
IVGTRNVGM

SEQ ID NO: 40304 - protein, 9 aa, synthetic construct
  source 1..9: note = Seed: VVGARGVGK (KRAS G12R)
IVGTRNVGR

SEQ ID NO: 40305 - protein, 9 aa, synthetic construct
  source 1..9: note = Seed: VVGARGVGK (KRAS G12R)
IVGTRNVGV

SEQ ID NO: 40306 - protein, 9 aa, synthetic construct
  source 1..9: note = Seed: VVGARGVGK (KRAS G12R)
IVGTRNVGY

SEQ ID NO: 40307 - protein, 9 aa, synthetic construct
  source 1..9: note = Seed: VVGARGVGK (KRAS G12R)
IVGTRPVGA

SEQ ID NO: 40308 - protein, 9 aa, synthetic construct
  source 1..9: note = Seed: VVGARGVGK (KRAS G12R)
IVGTRPVGF

SEQ ID NO: 40309 - protein, 9 aa, synthetic construct
  source 1..9: note = Seed: VVGARGVGK (KRAS G12R)
IVGTRPVGI

SEQ ID NO: 40310 - protein, 9 aa, synthetic construct
  source 1..9: note = Seed: VVGARGVGK (KRAS G12R)
IVGTRPVGK

SEQ ID NO: 40311 - protein, 9 aa, synthetic construct
  source 1..9: note = Seed: VVGARGVGK (KRAS G12R)
IVGTRPVGL

SEQ ID NO: 40312 - protein, 9 aa, synthetic construct
  source 1..9: note = Seed: VVGARGVGK (KRAS G12R)
IVGTRPVGM

SEQ ID NO: 40313 - protein, 9 aa, synthetic construct
  source 1..9: note = Seed: VVGARGVGK (KRAS G12R)
IVGTRPVGR

SEQ ID NO: 40314 - protein, 9 aa, synthetic construct
  source 1..9: note = Seed: VVGARGVGK (KRAS G12R)
IVGTRPVGS

SEQ ID NO: 40315 - protein, 9 aa, synthetic construct
  source 1..9: note = Seed: VVGARGVGK (KRAS G12R)
IVGTRPVGT

SEQ ID NO: 40316 - protein, 9 aa, synthetic construct
  source 1..9: note = Seed: VVGARGVGK (KRAS G12R)
IVGTRPVGV

SEQ ID NO: 40317 - protein, 9 aa, synthetic construct
  source 1..9: note = Seed: VVGARGVGK (KRAS G12R)
IVGTRPVGY

SEQ ID NO: 40318 - protein, 9 aa, synthetic construct
  source 1..9: note = Seed: VVGARGVGK (KRAS G12R)
IVGTRQVGI

SEQ ID NO: 40319 - protein, 9 aa, synthetic construct
  source 1..9: note = Seed: VVGARGVGK (KRAS G12R)
IVGTRQVGR

SEQ ID NO: 40320 - protein, 9 aa, synthetic construct
  source 1..9: note = Seed: VVGARGVGK (KRAS G12R)
IVGTRRVGA

SEQ ID NO: 40321 - protein, 9 aa, synthetic construct
  source 1..9: note = Seed: VVGARGVGK (KRAS G12R)
IVGTRRVGF

SEQ ID NO: 40322 - protein, 9 aa, synthetic construct
  source 1..9: note = Seed: VVGARGVGK (KRAS G12R)
IVGTRRVGG

SEQ ID NO: 40323 - protein, 9 aa, synthetic construct
  source 1..9: note = Seed: VVGARGVGK (KRAS G12R)
IVGTRRVGH

SEQ ID NO: 40324 - protein, 9 aa, synthetic construct
  source 1..9: note = Seed: VVGARGVGK (KRAS G12R)
IVGTRRVGI

SEQ ID NO: 40325 - protein, 9 aa, synthetic construct
  source 1..9: note = Seed: VVGARGVGK (KRAS G12R)
IVGTRRVGK

SEQ ID NO: 40326 - protein, 9 aa, synthetic construct
  source 1..9: note = Seed: VVGARGVGK (KRAS G12R)
IVGTRRVGL

SEQ ID NO: 40327 - protein, 9 aa, synthetic construct
  source 1..9: note = Seed: VVGARGVGK (KRAS G12R)
IVGTRRVGM

SEQ ID NO: 40328 - protein, 9 aa, synthetic construct
  source 1..9: note = Seed: VVGARGVGK (KRAS G12R)
IVGTRRVGN

SEQ ID NO: 40329 - protein, 9 aa, synthetic construct
  source 1..9: note = Seed: VVGARGVGK (KRAS G12R)
IVGTRRVGQ

SEQ ID NO: 40330 - protein, 9 aa, synthetic construct
  source 1..9: note = Seed: VVGARGVGK (KRAS G12R)
IVGTRRVGR

SEQ ID NO: 40331 - protein, 9 aa, synthetic construct
  source 1..9: note = Seed: VVGARGVGK (KRAS G12R)
IVGTRRVGS

SEQ ID NO: 40332 - protein, 9 aa, synthetic construct
  source 1..9: note = Seed: VVGARGVGK (KRAS G12R)
IVGTRRVGT

SEQ ID NO: 40333 - protein, 9 aa, synthetic construct
  source 1..9: note = Seed: VVGARGVGK (KRAS G12R)
IVGTRRVGV

SEQ ID NO: 40334 - protein, 9 aa, synthetic construct
  source 1..9: note = Seed: VVGARGVGK (KRAS G12R)
IVGTRRVGW

SEQ ID NO: 40335 - protein, 9 aa, synthetic construct
  source 1..9: note = Seed: VVGARGVGK (KRAS G12R)
IVGTRRVGY

SEQ ID NO: 40336 - protein, 9 aa, synthetic construct
  source 1..9: note = Seed: VVGARGVGK (KRAS G12R)
IVGTRSVGA

SEQ ID NO: 40337 - protein, 9 aa, synthetic construct
  source 1..9: note = Seed: VVGARGVGK (KRAS G12R)
IVGTRSVGF

SEQ ID NO: 40338 - protein, 9 aa, synthetic construct
  source 1..9: note = Seed: VVGARGVGK (KRAS G12R)
IVGTRSVGI

SEQ ID NO: 40339 - protein, 9 aa, synthetic construct
  source 1..9: note = Seed: VVGARGVGK (KRAS G12R)
IVGTRSVGL

SEQ ID NO: 40340 - protein, 9 aa, synthetic construct
  source 1..9: note = Seed: VVGARGVGK (KRAS G12R)
IVGTRSVGM

SEQ ID NO: 40341 - protein, 9 aa, synthetic construct
  source 1..9: note = Seed: VVGARGVGK (KRAS G12R)
IVGTRSVGR

SEQ ID NO: 40342 - protein, 9 aa, synthetic construct
  source 1..9: note = Seed: VVGARGVGK (KRAS G12R)
IVGTRSVGS

SEQ ID NO: 40343 - protein, 9 aa, synthetic construct
  source 1..9: note = Seed: VVGARGVGK (KRAS G12R)
IVGTRSVGT

SEQ ID NO: 40344 - protein, 9 aa, synthetic construct
  source 1..9: note = Seed: VVGARGVGK (KRAS G12R)
IVGTRSVGV

SEQ ID NO: 40345 - protein, 9 aa, synthetic construct
  source 1..9: note = Seed: VVGARGVGK (KRAS G12R)
IVGTRSVGY

SEQ ID NO: 40346 - protein, 9 aa, synthetic construct
  source 1..9: note = Seed: VVGARGVGK (KRAS G12R)
IVGTRTVGA

SEQ ID NO: 40347 - protein, 9 aa, synthetic construct
  source 1..9: note = Seed: VVGARGVGK (KRAS G12R)
IVGTRTVGF

SEQ ID NO: 40348 - protein, 9 aa, synthetic construct
  source 1..9: note = Seed: VVGARGVGK (KRAS G12R)
IVGTRTVGI

SEQ ID NO: 40349 - protein, 9 aa, synthetic construct
  source 1..9: note = Seed: VVGARGVGK (KRAS G12R)
IVGTRTVGL

SEQ ID NO: 40350 - protein, 9 aa, synthetic construct
  source 1..9: note = Seed: VVGARGVGK (KRAS G12R)
IVGTRTVGM

SEQ ID NO: 40351 - protein, 9 aa, synthetic construct
  source 1..9: note = Seed: VVGARGVGK (KRAS G12R)
IVGTRTVGR

SEQ ID NO: 40352 - protein, 9 aa, synthetic construct
  source 1..9: note = Seed: VVGARGVGK (KRAS G12R)
IVGTRTVGV

SEQ ID NO: 40353 - protein, 9 aa, synthetic construct
  source 1..9: note = Seed: VVGARGVGK (KRAS G12R)
IVGTRTVGY

SEQ ID NO: 40354 - protein, 9 aa, synthetic construct
  source 1..9: note = Seed: VVGARGVGK (KRAS G12R)
IVGTRVVGA

SEQ ID NO: 40355 - protein, 9 aa, synthetic construct
  source 1..9: note = Seed: VVGARGVGK (KRAS G12R)
IVGTRVVGI

SEQ ID NO: 40356 - protein, 9 aa, synthetic construct
  source 1..9: note = Seed: VVGARGVGK (KRAS G12R)
IVGTRVVGL

SEQ ID NO: 40357 - protein, 9 aa, synthetic construct
  source 1..9: note = Seed: VVGARGVGK (KRAS G12R)
IVGTRVVGM

SEQ ID NO: 40358 - protein, 9 aa, synthetic construct
  source 1..9: note = Seed: VVGARGVGK (KRAS G12R)
IVGTRVVGR

SEQ ID NO: 40359 - protein, 9 aa, synthetic construct
  source 1..9: note = Seed: VVGARGVGK (KRAS G12R)
IVGTRVVGS

SEQ ID NO: 40360 - protein, 9 aa, synthetic construct
  source 1..9: note = Seed: VVGARGVGK (KRAS G12R)
IVGTRVVGT

SEQ ID NO: 40361 - protein, 9 aa, synthetic construct
  source 1..9: note = Seed: VVGARGVGK (KRAS G12R)
IVGTRVVGV

SEQ ID NO: 40362 - protein, 9 aa, synthetic construct
  source 1..9: note = Seed: VVGARGVGK (KRAS G12R)
IVGVRAVGA

SEQ ID NO: 40363 - protein, 9 aa, synthetic construct
  source 1..9: note = Seed: VVGARGVGK (KRAS G12R)
IVGVRAVGC

SEQ ID NO: 40364 - protein, 9 aa, synthetic construct
  source 1..9: note = Seed: VVGARGVGK (KRAS G12R)
IVGVRAVGF

SEQ ID NO: 40365 - protein, 9 aa, synthetic construct
  source 1..9: note = Seed: VVGARGVGK (KRAS G12R)
IVGVRAVGG

SEQ ID NO: 40366 - protein, 9 aa, synthetic construct
  source 1..9: note = Seed: VVGARGVGK (KRAS G12R)
IVGVRAVGH

SEQ ID NO: 40367 - protein, 9 aa, synthetic construct
  source 1..9: note = Seed: VVGARGVGK (KRAS G12R)
IVGVRAVGI

SEQ ID NO: 40368 - protein, 9 aa, synthetic construct
  source 1..9: note = Seed: VVGARGVGK (KRAS G12R)
IVGVRAVGK

SEQ ID NO: 40369 - protein, 9 aa, synthetic construct
  source 1..9: note = Seed: VVGARGVGK (KRAS G12R)
IVGVRAVGL

SEQ ID NO: 40370 - protein, 9 aa, synthetic construct
  source 1..9: note = Seed: VVGARGVGK (KRAS G12R)
IVGVRAVGM

SEQ ID NO: 40371 - protein, 9 aa, synthetic construct
  source 1..9: note = Seed: VVGARGVGK (KRAS G12R)
IVGVRAVGN

SEQ ID NO: 40372 - protein, 9 aa, synthetic construct
  source 1..9: note = Seed: VVGARGVGK (KRAS G12R)
IVGVRAVGQ

SEQ ID NO: 40373 - protein, 9 aa, synthetic construct
  source 1..9: note = Seed: VVGARGVGK (KRAS G12R)
IVGVRAVGR

SEQ ID NO: 40374 - protein, 9 aa, synthetic construct
  source 1..9: note = Seed: VVGARGVGK (KRAS G12R)
IVGVRAVGS

SEQ ID NO: 40375 - protein, 9 aa, synthetic construct
  source 1..9: note = Seed: VVGARGVGK (KRAS G12R)
IVGVRAVGT

SEQ ID NO: 40376 - protein, 9 aa, synthetic construct
  source 1..9: note = Seed: VVGARGVGK (KRAS G12R)
IVGVRAVGV

SEQ ID NO: 40377 - protein, 9 aa, synthetic construct
  source 1..9: note = Seed: VVGARGVGK (KRAS G12R)
IVGVRAVGY

SEQ ID NO: 40378 - protein, 9 aa, synthetic construct
  source 1..9: note = Seed: VVGARGVGK (KRAS G12R)
IVGVREVGR

SEQ ID NO: 40379 - protein, 9 aa, synthetic construct
  source 1..9: note = Seed: VVGARGVGK (KRAS G12R)
IVGVRGVGA

SEQ ID NO: 40380 - protein, 9 aa, synthetic construct
  source 1..9: note = Seed: VVGARGVGK (KRAS G12R)
IVGVRGVGG

SEQ ID NO: 40381 - protein, 9 aa, synthetic construct
  source 1..9: note = Seed: VVGARGVGK (KRAS G12R)
IVGVRGVGI

SEQ ID NO: 40382 - protein, 9 aa, synthetic construct
  source 1..9: note = Seed: VVGARGVGK (KRAS G12R)
IVGVRGVGL

SEQ ID NO: 40383 - protein, 9 aa, synthetic construct
  source 1..9: note = Seed: VVGARGVGK (KRAS G12R)
IVGVRGVGM

SEQ ID NO: 40384 - protein, 9 aa, synthetic construct
  source 1..9: note = Seed: VVGARGVGK (KRAS G12R)
IVGVRGVGN

SEQ ID NO: 40385 - protein, 9 aa, synthetic construct
  source 1..9: note = Seed: VVGARGVGK (KRAS G12R)
IVGVRGVGS

SEQ ID NO: 40386 - protein, 9 aa, synthetic construct
  source 1..9: note = Seed: VVGARGVGK (KRAS G12R)
IVGVRGVGT

SEQ ID NO: 40387 - protein, 9 aa, synthetic construct
  source 1..9: note = Seed: VVGARGVGK (KRAS G12R)
IVGVRGVGV

SEQ ID NO: 40388 - protein, 9 aa, synthetic construct
  source 1..9: note = Seed: VVGARGVGK (KRAS G12R)
IVGVRHVGR

SEQ ID NO: 40389 - protein, 9 aa, synthetic construct
  source 1..9: note = Seed: VVGARGVGK (KRAS G12R)
IVGVRHVGY

SEQ ID NO: 40390 - protein, 9 aa, synthetic construct
  source 1..9: note = Seed: VVGARGVGK (KRAS G12R)
IVGVRKVGA

SEQ ID NO: 40391 - protein, 9 aa, synthetic construct
  source 1..9: note = Seed: VVGARGVGK (KRAS G12R)
IVGVRKVGF

SEQ ID NO: 40392 - protein, 9 aa, synthetic construct
  source 1..9: note = Seed: VVGARGVGK (KRAS G12R)
IVGVRKVGG

SEQ ID NO: 40393 - protein, 9 aa, synthetic construct
  source 1..9: note = Seed: VVGARGVGK (KRAS G12R)
IVGVRKVGH

SEQ ID NO: 40394 - protein, 9 aa, synthetic construct
  source 1..9: note = Seed: VVGARGVGK (KRAS G12R)
IVGVRKVGI

SEQ ID NO: 40395 - protein, 9 aa, synthetic construct
  source 1..9: note = Seed: VVGARGVGK (KRAS G12R)
IVGVRKVGK

SEQ ID NO: 40396 - protein, 9 aa, synthetic construct
  source 1..9: note = Seed: VVGARGVGK (KRAS G12R)
IVGVRKVGL

SEQ ID NO: 40397 - protein, 9 aa, synthetic construct
  source 1..9: note = Seed: VVGARGVGK (KRAS G12R)
IVGVRKVGM

SEQ ID NO: 40398 - protein, 9 aa, synthetic construct
  source 1..9: note = Seed: VVGARGVGK (KRAS G12R)
IVGVRKVGN

SEQ ID NO: 40399 - protein, 9 aa, synthetic construct
  source 1..9: note = Seed: VVGARGVGK (KRAS G12R)
IVGVRKVGP

SEQ ID NO: 40400 - protein, 9 aa, synthetic construct
  source 1..9: note = Seed: VVGARGVGK (KRAS G12R)
IVGVRKVGQ

SEQ ID NO: 40401 - protein, 9 aa, synthetic construct
  source 1..9: note = Seed: VVGARGVGK (KRAS G12R)
IVGVRKVGR

SEQ ID NO: 40402 - protein, 9 aa, synthetic construct
  source 1..9: note = Seed: VVGARGVGK (KRAS G12R)
IVGVRKVGS

SEQ ID NO: 40403 - protein, 9 aa, synthetic construct
  source 1..9: note = Seed: VVGARGVGK (KRAS G12R)
IVGVRKVGT

SEQ ID NO: 40404 - protein, 9 aa, synthetic construct
  source 1..9: note = Seed: VVGARGVGK (KRAS G12R)
IVGVRKVGV

SEQ ID NO: 40405 - protein, 9 aa, synthetic construct
  source 1..9: note = Seed: VVGARGVGK (KRAS G12R)
IVGVRKVGY

SEQ ID NO: 40406 - protein, 9 aa, synthetic construct
  source 1..9: note = Seed: VVGARGVGK (KRAS G12R)
IVGVRNVGA

SEQ ID NO: 40407 - protein, 9 aa, synthetic construct
  source 1..9: note = Seed: VVGARGVGK (KRAS G12R)
IVGVRNVGI

SEQ ID NO: 40408 - protein, 9 aa, synthetic construct
  source 1..9: note = Seed: VVGARGVGK (KRAS G12R)
IVGVRNVGL

SEQ ID NO: 40409 - protein, 9 aa, synthetic construct
  source 1..9: note = Seed: VVGARGVGK (KRAS G12R)
IVGVRNVGM

SEQ ID NO: 40410 - protein, 9 aa, synthetic construct
  source 1..9: note = Seed: VVGARGVGK (KRAS G12R)
IVGVRNVGR

SEQ ID NO: 40411 - protein, 9 aa, synthetic construct
  source 1..9: note = Seed: VVGARGVGK (KRAS G12R)
IVGVRNVGS

SEQ ID NO: 40412 - protein, 9 aa, synthetic construct
  source 1..9: note = Seed: VVGARGVGK (KRAS G12R)
IVGVRNVGT

SEQ ID NO: 40413 - protein, 9 aa, synthetic construct
  source 1..9: note = Seed: VVGARGVGK (KRAS G12R)
IVGVRNVGV

SEQ ID NO: 40414 - protein, 9 aa, synthetic construct
  source 1..9: note = Seed: VVGARGVGK (KRAS G12R)
IVGVRNVGY

SEQ ID NO: 40415 - protein, 9 aa, synthetic construct
  source 1..9: note = Seed: VVGARGVGK (KRAS G12R)
IVGVRPVGA

SEQ ID NO: 40416 - protein, 9 aa, synthetic construct
  source 1..9: note = Seed: VVGARGVGK (KRAS G12R)
IVGVRPVGF

SEQ ID NO: 40417 - protein, 9 aa, synthetic construct
  source 1..9: note = Seed: VVGARGVGK (KRAS G12R)
IVGVRPVGI

SEQ ID NO: 40418 - protein, 9 aa, synthetic construct
  source 1..9: note = Seed: VVGARGVGK (KRAS G12R)
IVGVRPVGL

SEQ ID NO: 40419 - protein, 9 aa, synthetic construct
  source 1..9: note = Seed: VVGARGVGK (KRAS G12R)
IVGVRPVGM

SEQ ID NO: 40420 - protein, 9 aa, synthetic construct
  source 1..9: note = Seed: VVGARGVGK (KRAS G12R)
IVGVRPVGN

SEQ ID NO: 40421 - protein, 9 aa, synthetic construct
  source 1..9: note = Seed: VVGARGVGK (KRAS G12R)
IVGVRPVGS

SEQ ID NO: 40422 - protein, 9 aa, synthetic construct
  source 1..9: note = Seed: VVGARGVGK (KRAS G12R)
IVGVRPVGT

SEQ ID NO: 40423 - protein, 9 aa, synthetic construct
  source 1..9: note = Seed: VVGARGVGK (KRAS G12R)
IVGVRPVGV

SEQ ID NO: 40424 - protein, 9 aa, synthetic construct
  source 1..9: note = Seed: VVGARGVGK (KRAS G12R)
IVGVRPVGY

SEQ ID NO: 40425 - protein, 9 aa, synthetic construct
  source 1..9: note = Seed: VVGARGVGK (KRAS G12R)
IVGVRQVGR

SEQ ID NO: 40426 - protein, 9 aa, synthetic construct
  source 1..9: note = Seed: VVGARGVGK (KRAS G12R)
IVGVRRVGA

SEQ ID NO: 40427 - protein, 9 aa, synthetic construct
  source 1..9: note = Seed: VVGARGVGK (KRAS G12R)
IVGVRRVGE

SEQ ID NO: 40428 - protein, 9 aa, synthetic construct
  source 1..9: note = Seed: VVGARGVGK (KRAS G12R)
IVGVRRVGF

SEQ ID NO: 40429 - protein, 9 aa, synthetic construct
  source 1..9: note = Seed: VVGARGVGK (KRAS G12R)
IVGVRRVGG

SEQ ID NO: 40430 - protein, 9 aa, synthetic construct
  source 1..9: note = Seed: VVGARGVGK (KRAS G12R)
IVGVRRVGH

SEQ ID NO: 40431 - protein, 9 aa, synthetic construct
  source 1..9: note = Seed: VVGARGVGK (KRAS G12R)
IVGVRRVGI

SEQ ID NO: 40432 - protein, 9 aa, synthetic construct
  source 1..9: note = Seed: VVGARGVGK (KRAS G12R)
IVGVRRVGK

SEQ ID NO: 40433 - protein, 9 aa, synthetic construct
  source 1..9: note = Seed: VVGARGVGK (KRAS G12R)
IVGVRRVGL

SEQ ID NO: 40434 - protein, 9 aa, synthetic construct
  source 1..9: note = Seed: VVGARGVGK (KRAS G12R)
IVGVRRVGM

SEQ ID NO: 40435 - protein, 9 aa, synthetic construct
  source 1..9: note = Seed: VVGARGVGK (KRAS G12R)
IVGVRRVGN

SEQ ID NO: 40436 - protein, 9 aa, synthetic construct
  source 1..9: note = Seed: VVGARGVGK (KRAS G12R)
IVGVRRVGP

SEQ ID NO: 40437 - protein, 9 aa, synthetic construct
  source 1..9: note = Seed: VVGARGVGK (KRAS G12R)
IVGVRRVGQ

SEQ ID NO: 40438 - protein, 9 aa, synthetic construct
  source 1..9: note = Seed: VVGARGVGK (KRAS G12R)
IVGVRRVGR

SEQ ID NO: 40439 - protein, 9 aa, synthetic construct
  source 1..9: note = Seed: VVGARGVGK (KRAS G12R)
IVGVRRVGS

SEQ ID NO: 40440 - protein, 9 aa, synthetic construct
  source 1..9: note = Seed: VVGARGVGK (KRAS G12R)
IVGVRRVGT

SEQ ID NO: 40441 - protein, 9 aa, synthetic construct
  source 1..9: note = Seed: VVGARGVGK (KRAS G12R)
IVGVRRVGV

SEQ ID NO: 40442 - protein, 9 aa, synthetic construct
  source 1..9: note = Seed: VVGARGVGK (KRAS G12R)
IVGVRRVGW

SEQ ID NO: 40443 - protein, 9 aa, synthetic construct
  source 1..9: note = Seed: VVGARGVGK (KRAS G12R)
IVGVRRVGY

SEQ ID NO: 40444 - protein, 9 aa, synthetic construct
  source 1..9: note = Seed: VVGARGVGK (KRAS G12R)
IVGVRSVGA

SEQ ID NO: 40445 - protein, 9 aa, synthetic construct
  source 1..9: note = Seed: VVGARGVGK (KRAS G12R)
IVGVRSVGF

SEQ ID NO: 40446 - protein, 9 aa, synthetic construct
  source 1..9: note = Seed: VVGARGVGK (KRAS G12R)
IVGVRSVGI

SEQ ID NO: 40447 - protein, 9 aa, synthetic construct
  source 1..9: note = Seed: VVGARGVGK (KRAS G12R)
IVGVRSVGL

SEQ ID NO: 40448 - protein, 9 aa, synthetic construct
  source 1..9: note = Seed: VVGARGVGK (KRAS G12R)
IVGVRSVGM

SEQ ID NO: 40449 - protein, 9 aa, synthetic construct
  source 1..9: note = Seed: VVGARGVGK (KRAS G12R)
IVGVRSVGN

SEQ ID NO: 40450 - protein, 9 aa, synthetic construct
  source 1..9: note = Seed: VVGARGVGK (KRAS G12R)
IVGVRSVGR

SEQ ID NO: 40451 - protein, 9 aa, synthetic construct
  source 1..9: note = Seed: VVGARGVGK (KRAS G12R)
IVGVRSVGS

SEQ ID NO: 40452 - protein, 9 aa, synthetic construct
  source 1..9: note = Seed: VVGARGVGK (KRAS G12R)
IVGVRSVGT

SEQ ID NO: 40453 - protein, 9 aa, synthetic construct
  source 1..9: note = Seed: VVGARGVGK (KRAS G12R)
IVGVRSVGV

SEQ ID NO: 40454 - protein, 9 aa, synthetic construct
  source 1..9: note = Seed: VVGARGVGK (KRAS G12R)
IVGVRSVGY

SEQ ID NO: 40455 - protein, 9 aa, synthetic construct
  source 1..9: note = Seed: VVGARGVGK (KRAS G12R)
IVGVRTVGA

SEQ ID NO: 40456 - protein, 9 aa, synthetic construct
  source 1..9: note = Seed: VVGARGVGK (KRAS G12R)
IVGVRTVGI

SEQ ID NO: 40457 - protein, 9 aa, synthetic construct
  source 1..9: note = Seed: VVGARGVGK (KRAS G12R)
IVGVRTVGL

SEQ ID NO: 40458 - protein, 9 aa, synthetic construct
  source 1..9: note = Seed: VVGARGVGK (KRAS G12R)
IVGVRTVGM

SEQ ID NO: 40459 - protein, 9 aa, synthetic construct
  source 1..9: note = Seed: VVGARGVGK (KRAS G12R)
IVGVRTVGN

SEQ ID NO: 40460 - protein, 9 aa, synthetic construct
  source 1..9: note = Seed: VVGARGVGK (KRAS G12R)
IVGVRTVGR

SEQ ID NO: 40461 - protein, 9 aa, synthetic construct
  source 1..9: note = Seed: VVGARGVGK (KRAS G12R)
IVGVRTVGS

SEQ ID NO: 40462 - protein, 9 aa, synthetic construct
  source 1..9: note = Seed: VVGARGVGK (KRAS G12R)
IVGVRTVGT

SEQ ID NO: 40463 - protein, 9 aa, synthetic construct
  source 1..9: note = Seed: VVGARGVGK (KRAS G12R)
IVGVRTVGV

SEQ ID NO: 40464 - protein, 9 aa, synthetic construct
  source 1..9: note = Seed: VVGARGVGK (KRAS G12R)
IVGVRTVGY

SEQ ID NO: 40465 - protein, 9 aa, synthetic construct
  source 1..9: note = Seed: VVGARGVGK (KRAS G12R)
IVGVRVVGN

SEQ ID NO: 40466 - protein, 9 aa, synthetic construct
  source 1..9: note = Seed: VVGARGVGK (KRAS G12R)
IVGWRAVGA

SEQ ID NO: 40467 - protein, 9 aa, synthetic construct
  source 1..9: note = Seed: VVGARGVGK (KRAS G12R)
IVGWRAVGF

SEQ ID NO: 40468 - protein, 9 aa, synthetic construct
  source 1..9: note = Seed: VVGARGVGK (KRAS G12R)
IVGWRAVGH

SEQ ID NO: 40469 - protein, 9 aa, synthetic construct
  source 1..9: note = Seed: VVGARGVGK (KRAS G12R)
IVGWRAVGI

SEQ ID NO: 40470 - protein, 9 aa, synthetic construct
  source 1..9: note = Seed: VVGARGVGK (KRAS G12R)
IVGWRAVGK

SEQ ID NO: 40471 - protein, 9 aa, synthetic construct
  source 1..9: note = Seed: VVGARGVGK (KRAS G12R)
IVGWRAVGL

SEQ ID NO: 40472 - protein, 9 aa, synthetic construct
  source 1..9: note = Seed: VVGARGVGK (KRAS G12R)
IVGWRAVGM

SEQ ID NO: 40473 - protein, 9 aa, synthetic construct
  source 1..9: note = Seed: VVGARGVGK (KRAS G12R)
IVGWRAVGR

SEQ ID NO: 40474 - protein, 9 aa, synthetic construct
  source 1..9: note = Seed: VVGARGVGK (KRAS G12R)
IVGWRAVGV

SEQ ID NO: 40475 - protein, 9 aa, synthetic construct
  source 1..9: note = Seed: VVGARGVGK (KRAS G12R)
IVGWRAVGY

SEQ ID NO: 40476 - protein, 9 aa, synthetic construct
  source 1..9: note = Seed: VVGARGVGK (KRAS G12R)
IVGWRGVGI

SEQ ID NO: 40477 - protein, 9 aa, synthetic construct
  source 1..9: note = Seed: VVGARGVGK (KRAS G12R)
IVGWRGVGL

SEQ ID NO: 40478 - protein, 9 aa, synthetic construct
  source 1..9: note = Seed: VVGARGVGK (KRAS G12R)
IVGWRGVGR

SEQ ID NO: 40479 - protein, 9 aa, synthetic construct
  source 1..9: note = Seed: VVGARGVGK (KRAS G12R)
IVGWRGVGV

SEQ ID NO: 40480 - protein, 9 aa, synthetic construct
  source 1..9: note = Seed: VVGARGVGK (KRAS G12R)
IVGWRHVGA

SEQ ID NO: 40481 - protein, 9 aa, synthetic construct
  source 1..9: note = Seed: VVGARGVGK (KRAS G12R)
IVGWRHVGF

SEQ ID NO: 40482 - protein, 9 aa, synthetic construct
  source 1..9: note = Seed: VVGARGVGK (KRAS G12R)
IVGWRHVGI

SEQ ID NO: 40483 - protein, 9 aa, synthetic construct
  source 1..9: note = Seed: VVGARGVGK (KRAS G12R)
IVGWRHVGK

SEQ ID NO: 40484 - protein, 9 aa, synthetic construct
  source 1..9: note = Seed: VVGARGVGK (KRAS G12R)
IVGWRHVGL

SEQ ID NO: 40485 - protein, 9 aa, synthetic construct
  source 1..9: note = Seed: VVGARGVGK (KRAS G12R)
IVGWRHVGM

SEQ ID NO: 40486 - protein, 9 aa, synthetic construct
  source 1..9: note = Seed: VVGARGVGK (KRAS G12R)
IVGWRHVGR

SEQ ID NO: 40487 - protein, 9 aa, synthetic construct
  source 1..9: note = Seed: VVGARGVGK (KRAS G12R)
IVGWRHVGV

SEQ ID NO: 40488 - protein, 9 aa, synthetic construct
  source 1..9: note = Seed: VVGARGVGK (KRAS G12R)
IVGWRHVGY

SEQ ID NO: 40489 - protein, 9 aa, synthetic construct
  source 1..9: note = Seed: VVGARGVGK (KRAS G12R)
IVGWRIVGR

SEQ ID NO: 40490 - protein, 9 aa, synthetic construct
  source 1..9: note = Seed: VVGARGVGK (KRAS G12R)
IVGWRKVGA

SEQ ID NO: 40491 - protein, 9 aa, synthetic construct
  source 1..9: note = Seed: VVGARGVGK (KRAS G12R)
IVGWRKVGF

SEQ ID NO: 40492 - protein, 9 aa, synthetic construct
  source 1..9: note = Seed: VVGARGVGK (KRAS G12R)
IVGWRKVGG

SEQ ID NO: 40493 - protein, 9 aa, synthetic construct
  source 1..9: note = Seed: VVGARGVGK (KRAS G12R)
IVGWRKVGH

SEQ ID NO: 40494 - protein, 9 aa, synthetic construct
  source 1..9: note = Seed: VVGARGVGK (KRAS G12R)
IVGWRKVGI

SEQ ID NO: 40495 - protein, 9 aa, synthetic construct
  source 1..9: note = Seed: VVGARGVGK (KRAS G12R)
IVGWRKVGK

SEQ ID NO: 40496 - protein, 9 aa, synthetic construct
  source 1..9: note = Seed: VVGARGVGK (KRAS G12R)
IVGWRKVGL

SEQ ID NO: 40497 - protein, 9 aa, synthetic construct
  source 1..9: note = Seed: VVGARGVGK (KRAS G12R)
IVGWRKVGM

SEQ ID NO: 40498 - protein, 9 aa, synthetic construct
  source 1..9: note = Seed: VVGARGVGK (KRAS G12R)
IVGWRKVGQ

SEQ ID NO: 40499 - protein, 9 aa, synthetic construct
  source 1..9: note = Seed: VVGARGVGK (KRAS G12R)
IVGWRKVGR

SEQ ID NO: 40500 - protein, 9 aa, synthetic construct
  source 1..9: note = Seed: VVGARGVGK (KRAS G12R)
IVGWRKVGS

SEQ ID NO: 40501 - protein, 9 aa, synthetic construct
  source 1..9: note = Seed: VVGARGVGK (KRAS G12R)
IVGWRKVGT

SEQ ID NO: 40502 - protein, 9 aa, synthetic construct
  source 1..9: note = Seed: VVGARGVGK (KRAS G12R)
IVGWRKVGV

SEQ ID NO: 40503 - protein, 9 aa, synthetic construct
  source 1..9: note = Seed: VVGARGVGK (KRAS G12R)
IVGWRKVGY

SEQ ID NO: 40504 - protein, 9 aa, synthetic construct
  source 1..9: note = Seed: VVGARGVGK (KRAS G12R)
IVGWRLVGR

SEQ ID NO: 40505 - protein, 9 aa, synthetic construct
  source 1..9: note = Seed: VVGARGVGK (KRAS G12R)
IVGWRMVGR

SEQ ID NO: 40506 - protein, 9 aa, synthetic construct
  source 1..9: note = Seed: VVGARGVGK (KRAS G12R)
IVGWRNVGI

SEQ ID NO: 40507 - protein, 9 aa, synthetic construct
  source 1..9: note = Seed: VVGARGVGK (KRAS G12R)
IVGWRNVGK

SEQ ID NO: 40508 - protein, 9 aa, synthetic construct
  source 1..9: note = Seed: VVGARGVGK (KRAS G12R)
IVGWRNVGL

SEQ ID NO: 40509 - protein, 9 aa, synthetic construct
  source 1..9: note = Seed: VVGARGVGK (KRAS G12R)
IVGWRNVGM

SEQ ID NO: 40510 - protein, 9 aa, synthetic construct
  source 1..9: note = Seed: VVGARGVGK (KRAS G12R)
IVGWRNVGR

SEQ ID NO: 40511 - protein, 9 aa, synthetic construct
  source 1..9: note = Seed: VVGARGVGK (KRAS G12R)
IVGWRNVGV

SEQ ID NO: 40512 - protein, 9 aa, synthetic construct
  source 1..9: note = Seed: VVGARGVGK (KRAS G12R)
IVGWRNVGY

SEQ ID NO: 40513 - protein, 9 aa, synthetic construct
  source 1..9: note = Seed: VVGARGVGK (KRAS G12R)
IVGWRPVGF

SEQ ID NO: 40514 - protein, 9 aa, synthetic construct
  source 1..9: note = Seed: VVGARGVGK (KRAS G12R)
IVGWRPVGI

SEQ ID NO: 40515 - protein, 9 aa, synthetic construct
  source 1..9: note = Seed: VVGARGVGK (KRAS G12R)
IVGWRPVGK

SEQ ID NO: 40516 - protein, 9 aa, synthetic construct
  source 1..9: note = Seed: VVGARGVGK (KRAS G12R)
IVGWRPVGL

SEQ ID NO: 40517 - protein, 9 aa, synthetic construct
  source 1..9: note = Seed: VVGARGVGK (KRAS G12R)
IVGWRPVGM

SEQ ID NO: 40518 - protein, 9 aa, synthetic construct
  source 1..9: note = Seed: VVGARGVGK (KRAS G12R)
IVGWRPVGR

SEQ ID NO: 40519 - protein, 9 aa, synthetic construct
  source 1..9: note = Seed: VVGARGVGK (KRAS G12R)
IVGWRPVGV

SEQ ID NO: 40520 - protein, 9 aa, synthetic construct
  source 1..9: note = Seed: VVGARGVGK (KRAS G12R)
IVGWRPVGY

SEQ ID NO: 40521 - protein, 9 aa, synthetic construct
  source 1..9: note = Seed: VVGARGVGK (KRAS G12R)
IVGWRQVGR

SEQ ID NO: 40522 - protein, 9 aa, synthetic construct
  source 1..9: note = Seed: VVGARGVGK (KRAS G12R)
IVGWRRVGA

SEQ ID NO: 40523 - protein, 9 aa, synthetic construct
  source 1..9: note = Seed: VVGARGVGK (KRAS G12R)
IVGWRRVGF

SEQ ID NO: 40524 - protein, 9 aa, synthetic construct
  source 1..9: note = Seed: VVGARGVGK (KRAS G12R)
IVGWRRVGG

SEQ ID NO: 40525 - protein, 9 aa, synthetic construct
  source 1..9: note = Seed: VVGARGVGK (KRAS G12R)
IVGWRRVGH

SEQ ID NO: 40526 - protein, 9 aa, synthetic construct
  source 1..9: note = Seed: VVGARGVGK (KRAS G12R)
IVGWRRVGI

SEQ ID NO: 40527 - protein, 9 aa, synthetic construct
  source 1..9: note = Seed: VVGARGVGK (KRAS G12R)
IVGWRRVGK

SEQ ID NO: 40528 - protein, 9 aa, synthetic construct
  source 1..9: note = Seed: VVGARGVGK (KRAS G12R)
IVGWRRVGL

SEQ ID NO: 40529 - protein, 9 aa, synthetic construct
  source 1..9: note = Seed: VVGARGVGK (KRAS G12R)
IVGWRRVGM

SEQ ID NO: 40530 - protein, 9 aa, synthetic construct
  source 1..9: note = Seed: VVGARGVGK (KRAS G12R)
IVGWRRVGN

SEQ ID NO: 40531 - protein, 9 aa, synthetic construct
  source 1..9: note = Seed: VVGARGVGK (KRAS G12R)
IVGWRRVGP

SEQ ID NO: 40532 - protein, 9 aa, synthetic construct
  source 1..9: note = Seed: VVGARGVGK (KRAS G12R)
IVGWRRVGQ

SEQ ID NO: 40533 - protein, 9 aa, synthetic construct
  source 1..9: note = Seed: VVGARGVGK (KRAS G12R)
IVGWRRVGR

SEQ ID NO: 40534 - protein, 9 aa, synthetic construct
  source 1..9: note = Seed: VVGARGVGK (KRAS G12R)
IVGWRRVGS

SEQ ID NO: 40535 - protein, 9 aa, synthetic construct
  source 1..9: note = Seed: VVGARGVGK (KRAS G12R)
IVGWRRVGT

SEQ ID NO: 40536 - protein, 9 aa, synthetic construct
  source 1..9: note = Seed: VVGARGVGK (KRAS G12R)
IVGWRRVGV

SEQ ID NO: 40537 - protein, 9 aa, synthetic construct
  source 1..9: note = Seed: VVGARGVGK (KRAS G12R)
IVGWRRVGW

SEQ ID NO: 40538 - protein, 9 aa, synthetic construct
  source 1..9: note = Seed: VVGARGVGK (KRAS G12R)
IVGWRRVGY

SEQ ID NO: 40539 - protein, 9 aa, synthetic construct
  source 1..9: note = Seed: VVGARGVGK (KRAS G12R)
IVGWRSVGF

SEQ ID NO: 40540 - protein, 9 aa, synthetic construct
  source 1..9: note = Seed: VVGARGVGK (KRAS G12R)
IVGWRSVGI

SEQ ID NO: 40541 - protein, 9 aa, synthetic construct
  source 1..9: note = Seed: VVGARGVGK (KRAS G12R)
IVGWRSVGK

SEQ ID NO: 40542 - protein, 9 aa, synthetic construct
  source 1..9: note = Seed: VVGARGVGK (KRAS G12R)
IVGWRSVGL

SEQ ID NO: 40543 - protein, 9 aa, synthetic construct
  source 1..9: note = Seed: VVGARGVGK (KRAS G12R)
IVGWRSVGM

SEQ ID NO: 40544 - protein, 9 aa, synthetic construct
  source 1..9: note = Seed: VVGARGVGK (KRAS G12R)
IVGWRSVGR

SEQ ID NO: 40545 - protein, 9 aa, synthetic construct
  source 1..9: note = Seed: VVGARGVGK (KRAS G12R)
IVGWRSVGV

SEQ ID NO: 40546 - protein, 9 aa, synthetic construct
  source 1..9: note = Seed: VVGARGVGK (KRAS G12R)
IVGWRSVGY

SEQ ID NO: 40547 - protein, 9 aa, synthetic construct
  source 1..9: note = Seed: VVGARGVGK (KRAS G12R)
IVGWRTVGK

SEQ ID NO: 40548 - protein, 9 aa, synthetic construct
  source 1..9: note = Seed: VVGARGVGK (KRAS G12R)
IVGWRTVGM

SEQ ID NO: 40549 - protein, 9 aa, synthetic construct
  source 1..9: note = Seed: VVGARGVGK (KRAS G12R)
IVGWRTVGR

SEQ ID NO: 40550 - protein, 9 aa, synthetic construct
  source 1..9: note = Seed: VVGARGVGK (KRAS G12R)
IVGWRTVGV

SEQ ID NO: 40551 - protein, 9 aa, synthetic construct
  source 1..9: note = Seed: VVGARGVGK (KRAS G12R)
IVGWRTVGY

SEQ ID NO: 40552 - protein, 9 aa, synthetic construct
  source 1..9: note = Seed: VVGARGVGK (KRAS G12R)
IVGWRVVGK

SEQ ID NO: 40553 - protein, 9 aa, synthetic construct
  source 1..9: note = Seed: VVGARGVGK (KRAS G12R)
IVGWRVVGR

SEQ ID NO: 40554 - protein, 9 aa, synthetic construct
  source 1..9: note = Seed: VVGARGVGK (KRAS G12R)
IVGYRAVGK

SEQ ID NO: 40555 - protein, 9 aa, synthetic construct
  source 1..9: note = Seed: VVGARGVGK (KRAS G12R)
IVGYRAVGL

SEQ ID NO: 40556 - protein, 9 aa, synthetic construct
  source 1..9: note = Seed: VVGARGVGK (KRAS G12R)
IVGYRAVGM

SEQ ID NO: 40557 - protein, 9 aa, synthetic construct
  source 1..9: note = Seed: VVGARGVGK (KRAS G12R)
IVGYRAVGR

SEQ ID NO: 40558 - protein, 9 aa, synthetic construct
  source 1..9: note = Seed: VVGARGVGK (KRAS G12R)
IVGYRAVGY

SEQ ID NO: 40559 - protein, 9 aa, synthetic construct
  source 1..9: note = Seed: VVGARGVGK (KRAS G12R)
IVGYRGVGI

SEQ ID NO: 40560 - protein, 9 aa, synthetic construct
  source 1..9: note = Seed: VVGARGVGK (KRAS G12R)
IVGYRGVGR

SEQ ID NO: 40561 - protein, 9 aa, synthetic construct
  source 1..9: note = Seed: VVGARGVGK (KRAS G12R)
IVGYRHVGK

SEQ ID NO: 40562 - protein, 9 aa, synthetic construct
  source 1..9: note = Seed: VVGARGVGK (KRAS G12R)
IVGYRHVGR

SEQ ID NO: 40563 - protein, 9 aa, synthetic construct
  source 1..9: note = Seed: VVGARGVGK (KRAS G12R)
IVGYRHVGY

SEQ ID NO: 40564 - protein, 9 aa, synthetic construct
  source 1..9: note = Seed: VVGARGVGK (KRAS G12R)
IVGYRIVGR

SEQ ID NO: 40565 - protein, 9 aa, synthetic construct
  source 1..9: note = Seed: VVGARGVGK (KRAS G12R)
IVGYRKVGA

SEQ ID NO: 40566 - protein, 9 aa, synthetic construct
  source 1..9: note = Seed: VVGARGVGK (KRAS G12R)
IVGYRKVGF

SEQ ID NO: 40567 - protein, 9 aa, synthetic construct
  source 1..9: note = Seed: VVGARGVGK (KRAS G12R)
IVGYRKVGH

SEQ ID NO: 40568 - protein, 9 aa, synthetic construct
  source 1..9: note = Seed: VVGARGVGK (KRAS G12R)
IVGYRKVGI

SEQ ID NO: 40569 - protein, 9 aa, synthetic construct
  source 1..9: note = Seed: VVGARGVGK (KRAS G12R)
IVGYRKVGK

SEQ ID NO: 40570 - protein, 9 aa, synthetic construct
  source 1..9: note = Seed: VVGARGVGK (KRAS G12R)
IVGYRKVGL

SEQ ID NO: 40571 - protein, 9 aa, synthetic construct
  source 1..9: note = Seed: VVGARGVGK (KRAS G12R)
IVGYRKVGM

SEQ ID NO: 40572 - protein, 9 aa, synthetic construct
  source 1..9: note = Seed: VVGARGVGK (KRAS G12R)
IVGYRKVGR

SEQ ID NO: 40573 - protein, 9 aa, synthetic construct
  source 1..9: note = Seed: VVGARGVGK (KRAS G12R)
IVGYRKVGS

SEQ ID NO: 40574 - protein, 9 aa, synthetic construct
  source 1..9: note = Seed: VVGARGVGK (KRAS G12R)
IVGYRKVGV

SEQ ID NO: 40575 - protein, 9 aa, synthetic construct
  source 1..9: note = Seed: VVGARGVGK (KRAS G12R)
IVGYRKVGY

SEQ ID NO: 40576 - protein, 9 aa, synthetic construct
  source 1..9: note = Seed: VVGARGVGK (KRAS G12R)
IVGYRLVGR

SEQ ID NO: 40577 - protein, 9 aa, synthetic construct
  source 1..9: note = Seed: VVGARGVGK (KRAS G12R)
IVGYRMVGR

SEQ ID NO: 40578 - protein, 9 aa, synthetic construct
  source 1..9: note = Seed: VVGARGVGK (KRAS G12R)
IVGYRNVGR

SEQ ID NO: 40579 - protein, 9 aa, synthetic construct
  source 1..9: note = Seed: VVGARGVGK (KRAS G12R)
IVGYRNVGY

SEQ ID NO: 40580 - protein, 9 aa, synthetic construct
  source 1..9: note = Seed: VVGARGVGK (KRAS G12R)
IVGYRPVGK

SEQ ID NO: 40581 - protein, 9 aa, synthetic construct
  source 1..9: note = Seed: VVGARGVGK (KRAS G12R)
IVGYRPVGL

SEQ ID NO: 40582 - protein, 9 aa, synthetic construct
  source 1..9: note = Seed: VVGARGVGK (KRAS G12R)
IVGYRPVGR

SEQ ID NO: 40583 - protein, 9 aa, synthetic construct
  source 1..9: note = Seed: VVGARGVGK (KRAS G12R)
IVGYRPVGY

SEQ ID NO: 40584 - protein, 9 aa, synthetic construct
  source 1..9: note = Seed: VVGARGVGK (KRAS G12R)
IVGYRQVGR

SEQ ID NO: 40585 - protein, 9 aa, synthetic construct
  source 1..9: note = Seed: VVGARGVGK (KRAS G12R)
IVGYRRVGA

SEQ ID NO: 40586 - protein, 9 aa, synthetic construct
  source 1..9: note = Seed: VVGARGVGK (KRAS G12R)
IVGYRRVGF

SEQ ID NO: 40587 - protein, 9 aa, synthetic construct
  source 1..9: note = Seed: VVGARGVGK (KRAS G12R)
IVGYRRVGG

SEQ ID NO: 40588 - protein, 9 aa, synthetic construct
  source 1..9: note = Seed: VVGARGVGK (KRAS G12R)
IVGYRRVGH

SEQ ID NO: 40589 - protein, 9 aa, synthetic construct
  source 1..9: note = Seed: VVGARGVGK (KRAS G12R)
IVGYRRVGI

SEQ ID NO: 40590 - protein, 9 aa, synthetic construct
  source 1..9: note = Seed: VVGARGVGK (KRAS G12R)
IVGYRRVGK

SEQ ID NO: 40591 - protein, 9 aa, synthetic construct
  source 1..9: note = Seed: VVGARGVGK (KRAS G12R)
IVGYRRVGL

SEQ ID NO: 40592 - protein, 9 aa, synthetic construct
  source 1..9: note = Seed: VVGARGVGK (KRAS G12R)
IVGYRRVGM

SEQ ID NO: 40593 - protein, 9 aa, synthetic construct
  source 1..9: note = Seed: VVGARGVGK (KRAS G12R)
IVGYRRVGQ

SEQ ID NO: 40594 - protein, 9 aa, synthetic construct
  source 1..9: note = Seed: VVGARGVGK (KRAS G12R)
IVGYRRVGR

SEQ ID NO: 40595 - protein, 9 aa, synthetic construct
  source 1..9: note = Seed: VVGARGVGK (KRAS G12R)
IVGYRRVGS

SEQ ID NO: 40596 - protein, 9 aa, synthetic construct
  source 1..9: note = Seed: VVGARGVGK (KRAS G12R)
IVGYRRVGT

SEQ ID NO: 40597 - protein, 9 aa, synthetic construct
  source 1..9: note = Seed: VVGARGVGK (KRAS G12R)
IVGYRRVGV

SEQ ID NO: 40598 - protein, 9 aa, synthetic construct
  source 1..9: note = Seed: VVGARGVGK (KRAS G12R)
IVGYRRVGY

SEQ ID NO: 40599 - protein, 9 aa, synthetic construct
  source 1..9: note = Seed: VVGARGVGK (KRAS G12R)
IVGYRSVGK

SEQ ID NO: 40600 - protein, 9 aa, synthetic construct
  source 1..9: note = Seed: VVGARGVGK (KRAS G12R)
IVGYRSVGL

SEQ ID NO: 40601 - protein, 9 aa, synthetic construct
  source 1..9: note = Seed: VVGARGVGK (KRAS G12R)
IVGYRSVGR

SEQ ID NO: 40602 - protein, 9 aa, synthetic construct
  source 1..9: note = Seed: VVGARGVGK (KRAS G12R)
IVGYRSVGY

SEQ ID NO: 40603 - protein, 9 aa, synthetic construct
  source 1..9: note = Seed: VVGARGVGK (KRAS G12R)
IVGYRTVGL

SEQ ID NO: 40604 - protein, 9 aa, synthetic construct
  source 1..9: note = Seed: VVGARGVGK (KRAS G12R)
IVGYRTVGR

SEQ ID NO: 40605 - protein, 9 aa, synthetic construct
  source 1..9: note = Seed: VVGARGVGK (KRAS G12R)
IVGYRVVGK

SEQ ID NO: 40606 - protein, 9 aa, synthetic construct
  source 1..9: note = Seed: VVGARGVGK (KRAS G12R)
IVGYRVVGR

SEQ ID NO: 40607 - protein, 9 aa, synthetic construct
  source 1..9: note = Seed: VVGARGVGK (KRAS G12R)
KVGARAVGA

SEQ ID NO: 40608 - protein, 9 aa, synthetic construct
  source 1..9: note = Seed: VVGARGVGK (KRAS G12R)
KVGARAVGI

SEQ ID NO: 40609 - protein, 9 aa, synthetic construct
  source 1..9: note = Seed: VVGARGVGK (KRAS G12R)
KVGARAVGL

SEQ ID NO: 40610 - protein, 9 aa, synthetic construct
  source 1..9: note = Seed: VVGARGVGK (KRAS G12R)
KVGARAVGM

SEQ ID NO: 40611 - protein, 9 aa, synthetic construct
  source 1..9: note = Seed: VVGARGVGK (KRAS G12R)
KVGARAVGS

SEQ ID NO: 40612 - protein, 9 aa, synthetic construct
  source 1..9: note = Seed: VVGARGVGK (KRAS G12R)
KVGARAVGT

SEQ ID NO: 40613 - protein, 9 aa, synthetic construct
  source 1..9: note = Seed: VVGARGVGK (KRAS G12R)
KVGARAVGV

SEQ ID NO: 40614 - protein, 9 aa, synthetic construct
  source 1..9: note = Seed: VVGARGVGK (KRAS G12R)
KVGARIVGA

SEQ ID NO: 40615 - protein, 9 aa, synthetic construct
  source 1..9: note = Seed: VVGARGVGK (KRAS G12R)
KVGARVVGA

SEQ ID NO: 40616 - protein, 9 aa, synthetic construct
  source 1..9: note = Seed: VVGARGVGK (KRAS G12R)
KVGGRAVGA

SEQ ID NO: 40617 - protein, 9 aa, synthetic construct
  source 1..9: note = Seed: VVGARGVGK (KRAS G12R)
KVGGRAVGV

SEQ ID NO: 40618 - protein, 9 aa, synthetic construct
  source 1..9: note = Seed: VVGARGVGK (KRAS G12R)
KVGGRVVGA

SEQ ID NO: 40619 - protein, 9 aa, synthetic construct
  source 1..9: note = Seed: VVGARGVGK (KRAS G12R)
KVGLRAVGI

SEQ ID NO: 40620 - protein, 9 aa, synthetic construct
  source 1..9: note = Seed: VVGARGVGK (KRAS G12R)
KVGLRAVGL

SEQ ID NO: 40621 - protein, 9 aa, synthetic construct
  source 1..9: note = Seed: VVGARGVGK (KRAS G12R)
KVGLRAVGM

SEQ ID NO: 40622 - protein, 9 aa, synthetic construct
  source 1..9: note = Seed: VVGARGVGK (KRAS G12R)
KVGLRGVGI

SEQ ID NO: 40623 - protein, 9 aa, synthetic construct
  source 1..9: note = Seed: VVGARGVGK (KRAS G12R)
KVGLRGVGL

SEQ ID NO: 40624 - protein, 9 aa, synthetic construct
  source 1..9: note = Seed: VVGARGVGK (KRAS G12R)
KVGLRGVGM

SEQ ID NO: 40625 - protein, 9 aa, synthetic construct
  source 1..9: note = Seed: VVGARGVGK (KRAS G12R)
KVGLRGVGV

SEQ ID NO: 40626 - protein, 9 aa, synthetic construct
  source 1..9: note = Seed: VVGARGVGK (KRAS G12R)
KVGLRPVGI

SEQ ID NO: 40627 - protein, 9 aa, synthetic construct
  source 1..9: note = Seed: VVGARGVGK (KRAS G12R)
KVGLRPVGL

SEQ ID NO: 40628 - protein, 9 aa, synthetic construct
  source 1..9: note = Seed: VVGARGVGK (KRAS G12R)
KVGLRSVGL

SEQ ID NO: 40629 - protein, 9 aa, synthetic construct
  source 1..9: note = Seed: VVGARGVGK (KRAS G12R)
KVGLRSVGM

SEQ ID NO: 40630 - protein, 9 aa, synthetic construct
  source 1..9: note = Seed: VVGARGVGK (KRAS G12R)
KVGMRAVGI

SEQ ID NO: 40631 - protein, 9 aa, synthetic construct
  source 1..9: note = Seed: VVGARGVGK (KRAS G12R)
KVGMRAVGL

SEQ ID NO: 40632 - protein, 9 aa, synthetic construct
  source 1..9: note = Seed: VVGARGVGK (KRAS G12R)
KVGMRAVGM

SEQ ID NO: 40633 - protein, 9 aa, synthetic construct
  source 1..9: note = Seed: VVGARGVGK (KRAS G12R)
KVGMRGVGI

SEQ ID NO: 40634 - protein, 9 aa, synthetic construct
  source 1..9: note = Seed: VVGARGVGK (KRAS G12R)
KVGMRGVGL

SEQ ID NO: 40635 - protein, 9 aa, synthetic construct
  source 1..9: note = Seed: VVGARGVGK (KRAS G12R)
KVGMRGVGV

SEQ ID NO: 40636 - protein, 9 aa, synthetic construct
  source 1..9: note = Seed: VVGARGVGK (KRAS G12R)
KVGMRPVGI

SEQ ID NO: 40637 - protein, 9 aa, synthetic construct
  source 1..9: note = Seed: VVGARGVGK (KRAS G12R)
KVGMRPVGL

SEQ ID NO: 40638 - protein, 9 aa, synthetic construct
  source 1..9: note = Seed: VVGARGVGK (KRAS G12R)
KVGMRSVGI

SEQ ID NO: 40639 - protein, 9 aa, synthetic construct
  source 1..9: note = Seed: VVGARGVGK (KRAS G12R)
KVGMRSVGL

SEQ ID NO: 40640 - protein, 9 aa, synthetic construct
  source 1..9: note = Seed: VVGARGVGK (KRAS G12R)
KVGMRSVGM

SEQ ID NO: 40641 - protein, 9 aa, synthetic construct
  source 1..9: note = Seed: VVGARGVGK (KRAS G12R)
KVGSRAVGA

SEQ ID NO: 40642 - protein, 9 aa, synthetic construct
  source 1..9: note = Seed: VVGARGVGK (KRAS G12R)
KVGSRAVGI

SEQ ID NO: 40643 - protein, 9 aa, synthetic construct
  source 1..9: note = Seed: VVGARGVGK (KRAS G12R)
KVGSRAVGL

SEQ ID NO: 40644 - protein, 9 aa, synthetic construct
  source 1..9: note = Seed: VVGARGVGK (KRAS G12R)
KVGSRAVGV

SEQ ID NO: 40645 - protein, 9 aa, synthetic construct
  source 1..9: note = Seed: VVGARGVGK (KRAS G12R)
KVGTRSVGI

SEQ ID NO: 40646 - protein, 9 aa, synthetic construct
  source 1..9: note = Seed: VVGARGVGK (KRAS G12R)
LVGARAVGA

SEQ ID NO: 40647 - protein, 9 aa, synthetic construct
  source 1..9: note = Seed: VVGARGVGK (KRAS G12R)
LVGARAVGC

SEQ ID NO: 40648 - protein, 9 aa, synthetic construct
  source 1..9: note = Seed: VVGARGVGK (KRAS G12R)
LVGARAVGD

SEQ ID NO: 40649 - protein, 9 aa, synthetic construct
  source 1..9: note = Seed: VVGARGVGK (KRAS G12R)
LVGARAVGE

SEQ ID NO: 40650 - protein, 9 aa, synthetic construct
  source 1..9: note = Seed: VVGARGVGK (KRAS G12R)
LVGARAVGF

SEQ ID NO: 40651 - protein, 9 aa, synthetic construct
  source 1..9: note = Seed: VVGARGVGK (KRAS G12R)
LVGARAVGG

SEQ ID NO: 40652 - protein, 9 aa, synthetic construct
  source 1..9: note = Seed: VVGARGVGK (KRAS G12R)
LVGARAVGH

SEQ ID NO: 40653 - protein, 9 aa, synthetic construct
  source 1..9: note = Seed: VVGARGVGK (KRAS G12R)
LVGARAVGI

SEQ ID NO: 40654 - protein, 9 aa, synthetic construct
  source 1..9: note = Seed: VVGARGVGK (KRAS G12R)
LVGARAVGK

SEQ ID NO: 40655 - protein, 9 aa, synthetic construct
  source 1..9: note = Seed: VVGARGVGK (KRAS G12R)
LVGARAVGL

SEQ ID NO: 40656 - protein, 9 aa, synthetic construct
  source 1..9: note = Seed: VVGARGVGK (KRAS G12R)
LVGARAVGM

SEQ ID NO: 40657 - protein, 9 aa, synthetic construct
  source 1..9: note = Seed: VVGARGVGK (KRAS G12R)
LVGARAVGN

SEQ ID NO: 40658 - protein, 9 aa, synthetic construct
  source 1..9: note = Seed: VVGARGVGK (KRAS G12R)
LVGARAVGP

SEQ ID NO: 40659 - protein, 9 aa, synthetic construct
  source 1..9: note = Seed: VVGARGVGK (KRAS G12R)
LVGARAVGQ

SEQ ID NO: 40660 - protein, 9 aa, synthetic construct
  source 1..9: note = Seed: VVGARGVGK (KRAS G12R)
LVGARAVGR

SEQ ID NO: 40661 - protein, 9 aa, synthetic construct
  source 1..9: note = Seed: VVGARGVGK (KRAS G12R)
LVGARAVGS

SEQ ID NO: 40662 - protein, 9 aa, synthetic construct
  source 1..9: note = Seed: VVGARGVGK (KRAS G12R)
LVGARAVGT

SEQ ID NO: 40663 - protein, 9 aa, synthetic construct
  source 1..9: note = Seed: VVGARGVGK (KRAS G12R)
LVGARAVGV

SEQ ID NO: 40664 - protein, 9 aa, synthetic construct
  source 1..9: note = Seed: VVGARGVGK (KRAS G12R)
LVGARAVGW

SEQ ID NO: 40665 - protein, 9 aa, synthetic construct
  source 1..9: note = Seed: VVGARGVGK (KRAS G12R)
LVGARAVGY

SEQ ID NO: 40666 - protein, 9 aa, synthetic construct
  source 1..9: note = Seed: VVGARGVGK (KRAS G12R)
LVGARCVGA

SEQ ID NO: 40667 - protein, 9 aa, synthetic construct
  source 1..9: note = Seed: VVGARGVGK (KRAS G12R)
LVGARCVGV

SEQ ID NO: 40668 - protein, 9 aa, synthetic construct
  source 1..9: note = Seed: VVGARGVGK (KRAS G12R)
LVGARGVGA

SEQ ID NO: 40669 - protein, 9 aa, synthetic construct
  source 1..9: note = Seed: VVGARGVGK (KRAS G12R)
LVGARGVGC

SEQ ID NO: 40670 - protein, 9 aa, synthetic construct
  source 1..9: note = Seed: VVGARGVGK (KRAS G12R)
LVGARGVGF

SEQ ID NO: 40671 - protein, 9 aa, synthetic construct
  source 1..9: note = Seed: VVGARGVGK (KRAS G12R)
LVGARGVGG

SEQ ID NO: 40672 - protein, 9 aa, synthetic construct
  source 1..9: note = Seed: VVGARGVGK (KRAS G12R)
LVGARGVGH

SEQ ID NO: 40673 - protein, 9 aa, synthetic construct
  source 1..9: note = Seed: VVGARGVGK (KRAS G12R)
LVGARGVGI

SEQ ID NO: 40674 - protein, 9 aa, synthetic construct
  source 1..9: note = Seed: VVGARGVGK (KRAS G12R)
LVGARGVGK

SEQ ID NO: 40675 - protein, 9 aa, synthetic construct
  source 1..9: note = Seed: VVGARGVGK (KRAS G12R)
LVGARGVGL

SEQ ID NO: 40676 - protein, 9 aa, synthetic construct
  source 1..9: note = Seed: VVGARGVGK (KRAS G12R)
LVGARGVGM

SEQ ID NO: 40677 - protein, 9 aa, synthetic construct
  source 1..9: note = Seed: VVGARGVGK (KRAS G12R)
LVGARGVGN

SEQ ID NO: 40678 - protein, 9 aa, synthetic construct
  source 1..9: note = Seed: VVGARGVGK (KRAS G12R)
LVGARGVGQ

SEQ ID NO: 40679 - protein, 9 aa, synthetic construct
  source 1..9: note = Seed: VVGARGVGK (KRAS G12R)
LVGARGVGR

SEQ ID NO: 40680 - protein, 9 aa, synthetic construct
  source 1..9: note = Seed: VVGARGVGK (KRAS G12R)
LVGARGVGS

SEQ ID NO: 40681 - protein, 9 aa, synthetic construct
  source 1..9: note = Seed: VVGARGVGK (KRAS G12R)
LVGARGVGT

SEQ ID NO: 40682 - protein, 9 aa, synthetic construct
  source 1..9: note = Seed: VVGARGVGK (KRAS G12R)
LVGARGVGV

SEQ ID NO: 40683 - protein, 9 aa, synthetic construct
  source 1..9: note = Seed: VVGARGVGK (KRAS G12R)
LVGARGVGY

SEQ ID NO: 40684 - protein, 9 aa, synthetic construct
  source 1..9: note = Seed: VVGARGVGK (KRAS G12R)
LVGARHVGA

SEQ ID NO: 40685 - protein, 9 aa, synthetic construct
  source 1..9: note = Seed: VVGARGVGK (KRAS G12R)
LVGARHVGG

SEQ ID NO: 40686 - protein, 9 aa, synthetic construct
  source 1..9: note = Seed: VVGARGVGK (KRAS G12R)
LVGARHVGI

SEQ ID NO: 40687 - protein, 9 aa, synthetic construct
  source 1..9: note = Seed: VVGARGVGK (KRAS G12R)
LVGARHVGL

SEQ ID NO: 40688 - protein, 9 aa, synthetic construct
  source 1..9: note = Seed: VVGARGVGK (KRAS G12R)
LVGARHVGM

SEQ ID NO: 40689 - protein, 9 aa, synthetic construct
  source 1..9: note = Seed: VVGARGVGK (KRAS G12R)
LVGARHVGN

SEQ ID NO: 40690 - protein, 9 aa, synthetic construct
  source 1..9: note = Seed: VVGARGVGK (KRAS G12R)
LVGARHVGR

SEQ ID NO: 40691 - protein, 9 aa, synthetic construct
  source 1..9: note = Seed: VVGARGVGK (KRAS G12R)
LVGARHVGS

SEQ ID NO: 40692 - protein, 9 aa, synthetic construct
  source 1..9: note = Seed: VVGARGVGK (KRAS G12R)
LVGARHVGT

SEQ ID NO: 40693 - protein, 9 aa, synthetic construct
  source 1..9: note = Seed: VVGARGVGK (KRAS G12R)
LVGARHVGV

SEQ ID NO: 40694 - protein, 9 aa, synthetic construct
  source 1..9: note = Seed: VVGARGVGK (KRAS G12R)
LVGARHVGY

SEQ ID NO: 40695 - protein, 9 aa, synthetic construct
  source 1..9: note = Seed: VVGARGVGK (KRAS G12R)
LVGARIVGA

SEQ ID NO: 40696 - protein, 9 aa, synthetic construct
  source 1..9: note = Seed: VVGARGVGK (KRAS G12R)
LVGARIVGG

SEQ ID NO: 40697 - protein, 9 aa, synthetic construct
  source 1..9: note = Seed: VVGARGVGK (KRAS G12R)
LVGARIVGH

SEQ ID NO: 40698 - protein, 9 aa, synthetic construct
  source 1..9: note = Seed: VVGARGVGK (KRAS G12R)
LVGARIVGI

SEQ ID NO: 40699 - protein, 9 aa, synthetic construct
  source 1..9: note = Seed: VVGARGVGK (KRAS G12R)
LVGARIVGL

SEQ ID NO: 40700 - protein, 9 aa, synthetic construct
  source 1..9: note = Seed: VVGARGVGK (KRAS G12R)
LVGARIVGM

SEQ ID NO: 40701 - protein, 9 aa, synthetic construct
  source 1..9: note = Seed: VVGARGVGK (KRAS G12R)
LVGARIVGN

SEQ ID NO: 40702 - protein, 9 aa, synthetic construct
  source 1..9: note = Seed: VVGARGVGK (KRAS G12R)
LVGARIVGQ

SEQ ID NO: 40703 - protein, 9 aa, synthetic construct
  source 1..9: note = Seed: VVGARGVGK (KRAS G12R)
LVGARIVGR

SEQ ID NO: 40704 - protein, 9 aa, synthetic construct
  source 1..9: note = Seed: VVGARGVGK (KRAS G12R)
LVGARIVGS

SEQ ID NO: 40705 - protein, 9 aa, synthetic construct
  source 1..9: note = Seed: VVGARGVGK (KRAS G12R)
LVGARIVGT

SEQ ID NO: 40706 - protein, 9 aa, synthetic construct
  source 1..9: note = Seed: VVGARGVGK (KRAS G12R)
LVGARIVGV

SEQ ID NO: 40707 - protein, 9 aa, synthetic construct
  source 1..9: note = Seed: VVGARGVGK (KRAS G12R)
LVGARKVGA

SEQ ID NO: 40708 - protein, 9 aa, synthetic construct
  source 1..9: note = Seed: VVGARGVGK (KRAS G12R)
LVGARKVGF

SEQ ID NO: 40709 - protein, 9 aa, synthetic construct
  source 1..9: note = Seed: VVGARGVGK (KRAS G12R)
LVGARKVGG

SEQ ID NO: 40710 - protein, 9 aa, synthetic construct
  source 1..9: note = Seed: VVGARGVGK (KRAS G12R)
LVGARKVGH

SEQ ID NO: 40711 - protein, 9 aa, synthetic construct
  source 1..9: note = Seed: VVGARGVGK (KRAS G12R)
LVGARKVGI

SEQ ID NO: 40712 - protein, 9 aa, synthetic construct
  source 1..9: note = Seed: VVGARGVGK (KRAS G12R)
LVGARKVGK

SEQ ID NO: 40713 - protein, 9 aa, synthetic construct
  source 1..9: note = Seed: VVGARGVGK (KRAS G12R)
LVGARKVGL

SEQ ID NO: 40714 - protein, 9 aa, synthetic construct
  source 1..9: note = Seed: VVGARGVGK (KRAS G12R)
LVGARKVGM

SEQ ID NO: 40715 - protein, 9 aa, synthetic construct
  source 1..9: note = Seed: VVGARGVGK (KRAS G12R)
LVGARKVGR

SEQ ID NO: 40716 - protein, 9 aa, synthetic construct
  source 1..9: note = Seed: VVGARGVGK (KRAS G12R)
LVGARKVGS

SEQ ID NO: 40717 - protein, 9 aa, synthetic construct
  source 1..9: note = Seed: VVGARGVGK (KRAS G12R)
LVGARKVGV

SEQ ID NO: 40718 - protein, 9 aa, synthetic construct
  source 1..9: note = Seed: VVGARGVGK (KRAS G12R)
LVGARKVGY

SEQ ID NO: 40719 - protein, 9 aa, synthetic construct
  source 1..9: note = Seed: VVGARGVGK (KRAS G12R)
LVGARLVGA

SEQ ID NO: 40720 - protein, 9 aa, synthetic construct
  source 1..9: note = Seed: VVGARGVGK (KRAS G12R)
LVGARLVGG

SEQ ID NO: 40721 - protein, 9 aa, synthetic construct
  source 1..9: note = Seed: VVGARGVGK (KRAS G12R)
LVGARLVGL

SEQ ID NO: 40722 - protein, 9 aa, synthetic construct
  source 1..9: note = Seed: VVGARGVGK (KRAS G12R)
LVGARLVGM

SEQ ID NO: 40723 - protein, 9 aa, synthetic construct
  source 1..9: note = Seed: VVGARGVGK (KRAS G12R)
LVGARLVGS

SEQ ID NO: 40724 - protein, 9 aa, synthetic construct
  source 1..9: note = Seed: VVGARGVGK (KRAS G12R)
LVGARMVGA

SEQ ID NO: 40725 - protein, 9 aa, synthetic construct
  source 1..9: note = Seed: VVGARGVGK (KRAS G12R)
LVGARMVGC

SEQ ID NO: 40726 - protein, 9 aa, synthetic construct
  source 1..9: note = Seed: VVGARGVGK (KRAS G12R)
LVGARMVGL

SEQ ID NO: 40727 - protein, 9 aa, synthetic construct
  source 1..9: note = Seed: VVGARGVGK (KRAS G12R)
LVGARMVGM

SEQ ID NO: 40728 - protein, 9 aa, synthetic construct
  source 1..9: note = Seed: VVGARGVGK (KRAS G12R)
LVGARMVGR

SEQ ID NO: 40729 - protein, 9 aa, synthetic construct
  source 1..9: note = Seed: VVGARGVGK (KRAS G12R)
LVGARMVGS

SEQ ID NO: 40730 - protein, 9 aa, synthetic construct
  source 1..9: note = Seed: VVGARGVGK (KRAS G12R)
LVGARMVGT

SEQ ID NO: 40731 - protein, 9 aa, synthetic construct
  source 1..9: note = Seed: VVGARGVGK (KRAS G12R)
LVGARMVGV

SEQ ID NO: 40732 - protein, 9 aa, synthetic construct
  source 1..9: note = Seed: VVGARGVGK (KRAS G12R)
LVGARNVGA

SEQ ID NO: 40733 - protein, 9 aa, synthetic construct
  source 1..9: note = Seed: VVGARGVGK (KRAS G12R)
LVGARNVGG

SEQ ID NO: 40734 - protein, 9 aa, synthetic construct
  source 1..9: note = Seed: VVGARGVGK (KRAS G12R)
LVGARNVGI

SEQ ID NO: 40735 - protein, 9 aa, synthetic construct
  source 1..9: note = Seed: VVGARGVGK (KRAS G12R)
LVGARNVGK

SEQ ID NO: 40736 - protein, 9 aa, synthetic construct
  source 1..9: note = Seed: VVGARGVGK (KRAS G12R)
LVGARNVGL

SEQ ID NO: 40737 - protein, 9 aa, synthetic construct
  source 1..9: note = Seed: VVGARGVGK (KRAS G12R)
LVGARNVGM

SEQ ID NO: 40738 - protein, 9 aa, synthetic construct
  source 1..9: note = Seed: VVGARGVGK (KRAS G12R)
LVGARNVGN

SEQ ID NO: 40739 - protein, 9 aa, synthetic construct
  source 1..9: note = Seed: VVGARGVGK (KRAS G12R)
LVGARNVGR

SEQ ID NO: 40740 - protein, 9 aa, synthetic construct
  source 1..9: note = Seed: VVGARGVGK (KRAS G12R)
LVGARNVGS

SEQ ID NO: 40741 - protein, 9 aa, synthetic construct
  source 1..9: note = Seed: VVGARGVGK (KRAS G12R)
LVGARNVGT

SEQ ID NO: 40742 - protein, 9 aa, synthetic construct
  source 1..9: note = Seed: VVGARGVGK (KRAS G12R)
LVGARNVGV

SEQ ID NO: 40743 - protein, 9 aa, synthetic construct
  source 1..9: note = Seed: VVGARGVGK (KRAS G12R)
LVGARNVGY

SEQ ID NO: 40744 - protein, 9 aa, synthetic construct
  source 1..9: note = Seed: VVGARGVGK (KRAS G12R)
LVGARPVGA

SEQ ID NO: 40745 - protein, 9 aa, synthetic construct
  source 1..9: note = Seed: VVGARGVGK (KRAS G12R)
LVGARPVGC

SEQ ID NO: 40746 - protein, 9 aa, synthetic construct
  source 1..9: note = Seed: VVGARGVGK (KRAS G12R)
LVGARPVGD

SEQ ID NO: 40747 - protein, 9 aa, synthetic construct
  source 1..9: note = Seed: VVGARGVGK (KRAS G12R)
LVGARPVGE

SEQ ID NO: 40748 - protein, 9 aa, synthetic construct
  source 1..9: note = Seed: VVGARGVGK (KRAS G12R)
LVGARPVGF

SEQ ID NO: 40749 - protein, 9 aa, synthetic construct
  source 1..9: note = Seed: VVGARGVGK (KRAS G12R)
LVGARPVGG

SEQ ID NO: 40750 - protein, 9 aa, synthetic construct
  source 1..9: note = Seed: VVGARGVGK (KRAS G12R)
LVGARPVGH

SEQ ID NO: 40751 - protein, 9 aa, synthetic construct
  source 1..9: note = Seed: VVGARGVGK (KRAS G12R)
LVGARPVGI

SEQ ID NO: 40752 - protein, 9 aa, synthetic construct
  source 1..9: note = Seed: VVGARGVGK (KRAS G12R)
LVGARPVGK

SEQ ID NO: 40753 - protein, 9 aa, synthetic construct
  source 1..9: note = Seed: VVGARGVGK (KRAS G12R)
LVGARPVGL

SEQ ID NO: 40754 - protein, 9 aa, synthetic construct
  source 1..9: note = Seed: VVGARGVGK (KRAS G12R)
LVGARPVGM

SEQ ID NO: 40755 - protein, 9 aa, synthetic construct
  source 1..9: note = Seed: VVGARGVGK (KRAS G12R)
LVGARPVGN

SEQ ID NO: 40756 - protein, 9 aa, synthetic construct
  source 1..9: note = Seed: VVGARGVGK (KRAS G12R)
LVGARPVGP

SEQ ID NO: 40757 - protein, 9 aa, synthetic construct
  source 1..9: note = Seed: VVGARGVGK (KRAS G12R)
LVGARPVGQ

SEQ ID NO: 40758 - protein, 9 aa, synthetic construct
  source 1..9: note = Seed: VVGARGVGK (KRAS G12R)
LVGARPVGR

SEQ ID NO: 40759 - protein, 9 aa, synthetic construct
  source 1..9: note = Seed: VVGARGVGK (KRAS G12R)
LVGARPVGS

SEQ ID NO: 40760 - protein, 9 aa, synthetic construct
  source 1..9: note = Seed: VVGARGVGK (KRAS G12R)
LVGARPVGT

SEQ ID NO: 40761 - protein, 9 aa, synthetic construct
  source 1..9: note = Seed: VVGARGVGK (KRAS G12R)
LVGARPVGV

SEQ ID NO: 40762 - protein, 9 aa, synthetic construct
  source 1..9: note = Seed: VVGARGVGK (KRAS G12R)
LVGARPVGW

SEQ ID NO: 40763 - protein, 9 aa, synthetic construct
  source 1..9: note = Seed: VVGARGVGK (KRAS G12R)
LVGARPVGY

SEQ ID NO: 40764 - protein, 9 aa, synthetic construct
  source 1..9: note = Seed: VVGARGVGK (KRAS G12R)
LVGARQVGA

SEQ ID NO: 40765 - protein, 9 aa, synthetic construct
  source 1..9: note = Seed: VVGARGVGK (KRAS G12R)
LVGARQVGI

SEQ ID NO: 40766 - protein, 9 aa, synthetic construct
  source 1..9: note = Seed: VVGARGVGK (KRAS G12R)
LVGARQVGL

SEQ ID NO: 40767 - protein, 9 aa, synthetic construct
  source 1..9: note = Seed: VVGARGVGK (KRAS G12R)
LVGARQVGM

SEQ ID NO: 40768 - protein, 9 aa, synthetic construct
  source 1..9: note = Seed: VVGARGVGK (KRAS G12R)
LVGARQVGV

SEQ ID NO: 40769 - protein, 9 aa, synthetic construct
  source 1..9: note = Seed: VVGARGVGK (KRAS G12R)
LVGARRVGA

SEQ ID NO: 40770 - protein, 9 aa, synthetic construct
  source 1..9: note = Seed: VVGARGVGK (KRAS G12R)
LVGARRVGC

SEQ ID NO: 40771 - protein, 9 aa, synthetic construct
  source 1..9: note = Seed: VVGARGVGK (KRAS G12R)
LVGARRVGF

SEQ ID NO: 40772 - protein, 9 aa, synthetic construct
  source 1..9: note = Seed: VVGARGVGK (KRAS G12R)
LVGARRVGG

SEQ ID NO: 40773 - protein, 9 aa, synthetic construct
  source 1..9: note = Seed: VVGARGVGK (KRAS G12R)
LVGARRVGH

SEQ ID NO: 40774 - protein, 9 aa, synthetic construct
  source 1..9: note = Seed: VVGARGVGK (KRAS G12R)
LVGARRVGI

SEQ ID NO: 40775 - protein, 9 aa, synthetic construct
  source 1..9: note = Seed: VVGARGVGK (KRAS G12R)
LVGARRVGK

SEQ ID NO: 40776 - protein, 9 aa, synthetic construct
  source 1..9: note = Seed: VVGARGVGK (KRAS G12R)
LVGARRVGL

SEQ ID NO: 40777 - protein, 9 aa, synthetic construct
  source 1..9: note = Seed: VVGARGVGK (KRAS G12R)
LVGARRVGM

SEQ ID NO: 40778 - protein, 9 aa, synthetic construct
  source 1..9: note = Seed: VVGARGVGK (KRAS G12R)
LVGARRVGN

SEQ ID NO: 40779 - protein, 9 aa, synthetic construct
  source 1..9: note = Seed: VVGARGVGK (KRAS G12R)
LVGARRVGP

SEQ ID NO: 40780 - protein, 9 aa, synthetic construct
  source 1..9: note = Seed: VVGARGVGK (KRAS G12R)
LVGARRVGQ

SEQ ID NO: 40781 - protein, 9 aa, synthetic construct
  source 1..9: note = Seed: VVGARGVGK (KRAS G12R)
LVGARRVGR

SEQ ID NO: 40782 - protein, 9 aa, synthetic construct
  source 1..9: note = Seed: VVGARGVGK (KRAS G12R)
LVGARRVGS

SEQ ID NO: 40783 - protein, 9 aa, synthetic construct
  source 1..9: note = Seed: VVGARGVGK (KRAS G12R)
LVGARRVGT

SEQ ID NO: 40784 - protein, 9 aa, synthetic construct
  source 1..9: note = Seed: VVGARGVGK (KRAS G12R)
LVGARRVGV

SEQ ID NO: 40785 - protein, 9 aa, synthetic construct
  source 1..9: note = Seed: VVGARGVGK (KRAS G12R)
LVGARRVGW

SEQ ID NO: 40786 - protein, 9 aa, synthetic construct
  source 1..9: note = Seed: VVGARGVGK (KRAS G12R)
LVGARRVGY

SEQ ID NO: 40787 - protein, 9 aa, synthetic construct
  source 1..9: note = Seed: VVGARGVGK (KRAS G12R)
LVGARSVGA

SEQ ID NO: 40788 - protein, 9 aa, synthetic construct
  source 1..9: note = Seed: VVGARGVGK (KRAS G12R)
LVGARSVGC

SEQ ID NO: 40789 - protein, 9 aa, synthetic construct
  source 1..9: note = Seed: VVGARGVGK (KRAS G12R)
LVGARSVGF

SEQ ID NO: 40790 - protein, 9 aa, synthetic construct
  source 1..9: note = Seed: VVGARGVGK (KRAS G12R)
LVGARSVGG

SEQ ID NO: 40791 - protein, 9 aa, synthetic construct
  source 1..9: note = Seed: VVGARGVGK (KRAS G12R)
LVGARSVGH

SEQ ID NO: 40792 - protein, 9 aa, synthetic construct
  source 1..9: note = Seed: VVGARGVGK (KRAS G12R)
LVGARSVGI

SEQ ID NO: 40793 - protein, 9 aa, synthetic construct
  source 1..9: note = Seed: VVGARGVGK (KRAS G12R)
LVGARSVGK

SEQ ID NO: 40794 - protein, 9 aa, synthetic construct
  source 1..9: note = Seed: VVGARGVGK (KRAS G12R)
LVGARSVGL

SEQ ID NO: 40795 - protein, 9 aa, synthetic construct
  source 1..9: note = Seed: VVGARGVGK (KRAS G12R)
LVGARSVGM

SEQ ID NO: 40796 - protein, 9 aa, synthetic construct
  source 1..9: note = Seed: VVGARGVGK (KRAS G12R)
LVGARSVGN

SEQ ID NO: 40797 - protein, 9 aa, synthetic construct
  source 1..9: note = Seed: VVGARGVGK (KRAS G12R)
LVGARSVGP

SEQ ID NO: 40798 - protein, 9 aa, synthetic construct
  source 1..9: note = Seed: VVGARGVGK (KRAS G12R)
LVGARSVGQ

SEQ ID NO: 40799 - protein, 9 aa, synthetic construct
  source 1..9: note = Seed: VVGARGVGK (KRAS G12R)
LVGARSVGR

SEQ ID NO: 40800 - protein, 9 aa, synthetic construct
  source 1..9: note = Seed: VVGARGVGK (KRAS G12R)
LVGARSVGS

SEQ ID NO: 40801 - protein, 9 aa, synthetic construct
  source 1..9: note = Seed: VVGARGVGK (KRAS G12R)
LVGARSVGT

SEQ ID NO: 40802 - protein, 9 aa, synthetic construct
  source 1..9: note = Seed: VVGARGVGK (KRAS G12R)
LVGARSVGV

SEQ ID NO: 40803 - protein, 9 aa, synthetic construct
  source 1..9: note = Seed: VVGARGVGK (KRAS G12R)
LVGARSVGW

SEQ ID NO: 40804 - protein, 9 aa, synthetic construct
  source 1..9: note = Seed: VVGARGVGK (KRAS G12R)
LVGARSVGY

SEQ ID NO: 40805 - protein, 9 aa, synthetic construct
  source 1..9: note = Seed: VVGARGVGK (KRAS G12R)
LVGARTVGA

SEQ ID NO: 40806 - protein, 9 aa, synthetic construct
  source 1..9: note = Seed: VVGARGVGK (KRAS G12R)
LVGARTVGF

SEQ ID NO: 40807 - protein, 9 aa, synthetic construct
  source 1..9: note = Seed: VVGARGVGK (KRAS G12R)
LVGARTVGG

SEQ ID NO: 40808 - protein, 9 aa, synthetic construct
  source 1..9: note = Seed: VVGARGVGK (KRAS G12R)
LVGARTVGH

SEQ ID NO: 40809 - protein, 9 aa, synthetic construct
  source 1..9: note = Seed: VVGARGVGK (KRAS G12R)
LVGARTVGI

SEQ ID NO: 40810 - protein, 9 aa, synthetic construct
  source 1..9: note = Seed: VVGARGVGK (KRAS G12R)
LVGARTVGK

SEQ ID NO: 40811 - protein, 9 aa, synthetic construct
  source 1..9: note = Seed: VVGARGVGK (KRAS G12R)
LVGARTVGL

SEQ ID NO: 40812 - protein, 9 aa, synthetic construct
  source 1..9: note = Seed: VVGARGVGK (KRAS G12R)
LVGARTVGM

SEQ ID NO: 40813 - protein, 9 aa, synthetic construct
  source 1..9: note = Seed: VVGARGVGK (KRAS G12R)
LVGARTVGN

SEQ ID NO: 40814 - protein, 9 aa, synthetic construct
  source 1..9: note = Seed: VVGARGVGK (KRAS G12R)
LVGARTVGQ

SEQ ID NO: 40815 - protein, 9 aa, synthetic construct
  source 1..9: note = Seed: VVGARGVGK (KRAS G12R)
LVGARTVGR

SEQ ID NO: 40816 - protein, 9 aa, synthetic construct
  source 1..9: note = Seed: VVGARGVGK (KRAS G12R)
LVGARTVGS

SEQ ID NO: 40817 - protein, 9 aa, synthetic construct
  source 1..9: note = Seed: VVGARGVGK (KRAS G12R)
LVGARTVGT

SEQ ID NO: 40818 - protein, 9 aa, synthetic construct
  source 1..9: note = Seed: VVGARGVGK (KRAS G12R)
LVGARTVGV

SEQ ID NO: 40819 - protein, 9 aa, synthetic construct
  source 1..9: note = Seed: VVGARGVGK (KRAS G12R)
LVGARTVGY

SEQ ID NO: 40820 - protein, 9 aa, synthetic construct
  source 1..9: note = Seed: VVGARGVGK (KRAS G12R)
LVGARVVGA

SEQ ID NO: 40821 - protein, 9 aa, synthetic construct
  source 1..9: note = Seed: VVGARGVGK (KRAS G12R)
LVGARVVGC

SEQ ID NO: 40822 - protein, 9 aa, synthetic construct
  source 1..9: note = Seed: VVGARGVGK (KRAS G12R)
LVGARVVGF

SEQ ID NO: 40823 - protein, 9 aa, synthetic construct
  source 1..9: note = Seed: VVGARGVGK (KRAS G12R)
LVGARVVGG

SEQ ID NO: 40824 - protein, 9 aa, synthetic construct
  source 1..9: note = Seed: VVGARGVGK (KRAS G12R)
LVGARVVGH

SEQ ID NO: 40825 - protein, 9 aa, synthetic construct
  source 1..9: note = Seed: VVGARGVGK (KRAS G12R)
LVGARVVGI

SEQ ID NO: 40826 - protein, 9 aa, synthetic construct
  source 1..9: note = Seed: VVGARGVGK (KRAS G12R)
LVGARVVGL

SEQ ID NO: 40827 - protein, 9 aa, synthetic construct
  source 1..9: note = Seed: VVGARGVGK (KRAS G12R)
LVGARVVGM

SEQ ID NO: 40828 - protein, 9 aa, synthetic construct
  source 1..9: note = Seed: VVGARGVGK (KRAS G12R)
LVGARVVGN

SEQ ID NO: 40829 - protein, 9 aa, synthetic construct
  source 1..9: note = Seed: VVGARGVGK (KRAS G12R)
LVGARVVGP

SEQ ID NO: 40830 - protein, 9 aa, synthetic construct
  source 1..9: note = Seed: VVGARGVGK (KRAS G12R)
LVGARVVGQ

SEQ ID NO: 40831 - protein, 9 aa, synthetic construct
  source 1..9: note = Seed: VVGARGVGK (KRAS G12R)
LVGARVVGR

SEQ ID NO: 40832 - protein, 9 aa, synthetic construct
  source 1..9: note = Seed: VVGARGVGK (KRAS G12R)
LVGARVVGS

SEQ ID NO: 40833 - protein, 9 aa, synthetic construct
  source 1..9: note = Seed: VVGARGVGK (KRAS G12R)
LVGARVVGT

SEQ ID NO: 40834 - protein, 9 aa, synthetic construct
  source 1..9: note = Seed: VVGARGVGK (KRAS G12R)
LVGARVVGV

SEQ ID NO: 40835 - protein, 9 aa, synthetic construct
  source 1..9: note = Seed: VVGARGVGK (KRAS G12R)
LVGARVVGY

SEQ ID NO: 40836 - protein, 9 aa, synthetic construct
  source 1..9: note = Seed: VVGARGVGK (KRAS G12R)
LVGARYVGI

SEQ ID NO: 40837 - protein, 9 aa, synthetic construct
  source 1..9: note = Seed: VVGARGVGK (KRAS G12R)
LVGARYVGV

SEQ ID NO: 40838 - protein, 9 aa, synthetic construct
  source 1..9: note = Seed: VVGARGVGK (KRAS G12R)
LVGCRAVGA

SEQ ID NO: 40839 - protein, 9 aa, synthetic construct
  source 1..9: note = Seed: VVGARGVGK (KRAS G12R)
LVGCRAVGI

SEQ ID NO: 40840 - protein, 9 aa, synthetic construct
  source 1..9: note = Seed: VVGARGVGK (KRAS G12R)
LVGCRAVGL

SEQ ID NO: 40841 - protein, 9 aa, synthetic construct
  source 1..9: note = Seed: VVGARGVGK (KRAS G12R)
LVGCRAVGM

SEQ ID NO: 40842 - protein, 9 aa, synthetic construct
  source 1..9: note = Seed: VVGARGVGK (KRAS G12R)
LVGCRAVGS

SEQ ID NO: 40843 - protein, 9 aa, synthetic construct
  source 1..9: note = Seed: VVGARGVGK (KRAS G12R)
LVGCRAVGT

SEQ ID NO: 40844 - protein, 9 aa, synthetic construct
  source 1..9: note = Seed: VVGARGVGK (KRAS G12R)
LVGCRAVGV

SEQ ID NO: 40845 - protein, 9 aa, synthetic construct
  source 1..9: note = Seed: VVGARGVGK (KRAS G12R)
LVGCRGVGA

SEQ ID NO: 40846 - protein, 9 aa, synthetic construct
  source 1..9: note = Seed: VVGARGVGK (KRAS G12R)
LVGCRGVGI

SEQ ID NO: 40847 - protein, 9 aa, synthetic construct
  source 1..9: note = Seed: VVGARGVGK (KRAS G12R)
LVGCRGVGL

SEQ ID NO: 40848 - protein, 9 aa, synthetic construct
  source 1..9: note = Seed: VVGARGVGK (KRAS G12R)
LVGCRGVGV

SEQ ID NO: 40849 - protein, 9 aa, synthetic construct
  source 1..9: note = Seed: VVGARGVGK (KRAS G12R)
LVGCRIVGS

SEQ ID NO: 40850 - protein, 9 aa, synthetic construct
  source 1..9: note = Seed: VVGARGVGK (KRAS G12R)
LVGCRKVGR

SEQ ID NO: 40851 - protein, 9 aa, synthetic construct
  source 1..9: note = Seed: VVGARGVGK (KRAS G12R)
LVGCRKVGY

SEQ ID NO: 40852 - protein, 9 aa, synthetic construct
  source 1..9: note = Seed: VVGARGVGK (KRAS G12R)
LVGCRPVGA

SEQ ID NO: 40853 - protein, 9 aa, synthetic construct
  source 1..9: note = Seed: VVGARGVGK (KRAS G12R)
LVGCRPVGI

SEQ ID NO: 40854 - protein, 9 aa, synthetic construct
  source 1..9: note = Seed: VVGARGVGK (KRAS G12R)
LVGCRPVGL

SEQ ID NO: 40855 - protein, 9 aa, synthetic construct
  source 1..9: note = Seed: VVGARGVGK (KRAS G12R)
LVGCRPVGV

SEQ ID NO: 40856 - protein, 9 aa, synthetic construct
  source 1..9: note = Seed: VVGARGVGK (KRAS G12R)
LVGCRRVGF

SEQ ID NO: 40857 - protein, 9 aa, synthetic construct
  source 1..9: note = Seed: VVGARGVGK (KRAS G12R)
LVGCRRVGK

SEQ ID NO: 40858 - protein, 9 aa, synthetic construct
  source 1..9: note = Seed: VVGARGVGK (KRAS G12R)
LVGCRRVGM

SEQ ID NO: 40859 - protein, 9 aa, synthetic construct
  source 1..9: note = Seed: VVGARGVGK (KRAS G12R)
LVGCRRVGR

SEQ ID NO: 40860 - protein, 9 aa, synthetic construct
  source 1..9: note = Seed: VVGARGVGK (KRAS G12R)
LVGCRRVGY

SEQ ID NO: 40861 - protein, 9 aa, synthetic construct
  source 1..9: note = Seed: VVGARGVGK (KRAS G12R)
LVGCRSVGA

SEQ ID NO: 40862 - protein, 9 aa, synthetic construct
  source 1..9: note = Seed: VVGARGVGK (KRAS G12R)
LVGCRSVGI

SEQ ID NO: 40863 - protein, 9 aa, synthetic construct
  source 1..9: note = Seed: VVGARGVGK (KRAS G12R)
LVGCRSVGL

SEQ ID NO: 40864 - protein, 9 aa, synthetic construct
  source 1..9: note = Seed: VVGARGVGK (KRAS G12R)
LVGCRSVGV

SEQ ID NO: 40865 - protein, 9 aa, synthetic construct
  source 1..9: note = Seed: VVGARGVGK (KRAS G12R)
LVGCRVVGA

SEQ ID NO: 40866 - protein, 9 aa, synthetic construct
  source 1..9: note = Seed: VVGARGVGK (KRAS G12R)
LVGERAVGA

SEQ ID NO: 40867 - protein, 9 aa, synthetic construct
  source 1..9: note = Seed: VVGARGVGK (KRAS G12R)
LVGERAVGG

SEQ ID NO: 40868 - protein, 9 aa, synthetic construct
  source 1..9: note = Seed: VVGARGVGK (KRAS G12R)
LVGERAVGI

SEQ ID NO: 40869 - protein, 9 aa, synthetic construct
  source 1..9: note = Seed: VVGARGVGK (KRAS G12R)
LVGERAVGL

SEQ ID NO: 40870 - protein, 9 aa, synthetic construct
  source 1..9: note = Seed: VVGARGVGK (KRAS G12R)
LVGERAVGM

SEQ ID NO: 40871 - protein, 9 aa, synthetic construct
  source 1..9: note = Seed: VVGARGVGK (KRAS G12R)
LVGERAVGS

SEQ ID NO: 40872 - protein, 9 aa, synthetic construct
  source 1..9: note = Seed: VVGARGVGK (KRAS G12R)
LVGERAVGT

SEQ ID NO: 40873 - protein, 9 aa, synthetic construct
  source 1..9: note = Seed: VVGARGVGK (KRAS G12R)
LVGERAVGV

SEQ ID NO: 40874 - protein, 9 aa, synthetic construct
  source 1..9: note = Seed: VVGARGVGK (KRAS G12R)
LVGERGVGA

SEQ ID NO: 40875 - protein, 9 aa, synthetic construct
  source 1..9: note = Seed: VVGARGVGK (KRAS G12R)
LVGERGVGI

SEQ ID NO: 40876 - protein, 9 aa, synthetic construct
  source 1..9: note = Seed: VVGARGVGK (KRAS G12R)
LVGERGVGL

SEQ ID NO: 40877 - protein, 9 aa, synthetic construct
  source 1..9: note = Seed: VVGARGVGK (KRAS G12R)
LVGERGVGM

SEQ ID NO: 40878 - protein, 9 aa, synthetic construct
  source 1..9: note = Seed: VVGARGVGK (KRAS G12R)
LVGERGVGS

SEQ ID NO: 40879 - protein, 9 aa, synthetic construct
  source 1..9: note = Seed: VVGARGVGK (KRAS G12R)
LVGERGVGT

SEQ ID NO: 40880 - protein, 9 aa, synthetic construct
  source 1..9: note = Seed: VVGARGVGK (KRAS G12R)
LVGERGVGV

SEQ ID NO: 40881 - protein, 9 aa, synthetic construct
  source 1..9: note = Seed: VVGARGVGK (KRAS G12R)
LVGERNVGL

SEQ ID NO: 40882 - protein, 9 aa, synthetic construct
  source 1..9: note = Seed: VVGARGVGK (KRAS G12R)
LVGERNVGV

SEQ ID NO: 40883 - protein, 9 aa, synthetic construct
  source 1..9: note = Seed: VVGARGVGK (KRAS G12R)
LVGERPVGA

SEQ ID NO: 40884 - protein, 9 aa, synthetic construct
  source 1..9: note = Seed: VVGARGVGK (KRAS G12R)
LVGERPVGI

SEQ ID NO: 40885 - protein, 9 aa, synthetic construct
  source 1..9: note = Seed: VVGARGVGK (KRAS G12R)
LVGERPVGL

SEQ ID NO: 40886 - protein, 9 aa, synthetic construct
  source 1..9: note = Seed: VVGARGVGK (KRAS G12R)
LVGERPVGM

SEQ ID NO: 40887 - protein, 9 aa, synthetic construct
  source 1..9: note = Seed: VVGARGVGK (KRAS G12R)
LVGERPVGV

SEQ ID NO: 40888 - protein, 9 aa, synthetic construct
  source 1..9: note = Seed: VVGARGVGK (KRAS G12R)
LVGERRVGR

SEQ ID NO: 40889 - protein, 9 aa, synthetic construct
  source 1..9: note = Seed: VVGARGVGK (KRAS G12R)
LVGERRVGY

SEQ ID NO: 40890 - protein, 9 aa, synthetic construct
  source 1..9: note = Seed: VVGARGVGK (KRAS G12R)
LVGERSVGA

SEQ ID NO: 40891 - protein, 9 aa, synthetic construct
  source 1..9: note = Seed: VVGARGVGK (KRAS G12R)
LVGERSVGI

SEQ ID NO: 40892 - protein, 9 aa, synthetic construct
  source 1..9: note = Seed: VVGARGVGK (KRAS G12R)
LVGERSVGL

SEQ ID NO: 40893 - protein, 9 aa, synthetic construct
  source 1..9: note = Seed: VVGARGVGK (KRAS G12R)
LVGERSVGM

SEQ ID NO: 40894 - protein, 9 aa, synthetic construct
  source 1..9: note = Seed: VVGARGVGK (KRAS G12R)
LVGERSVGS

SEQ ID NO: 40895 - protein, 9 aa, synthetic construct
  source 1..9: note = Seed: VVGARGVGK (KRAS G12R)
LVGERSVGT

SEQ ID NO: 40896 - protein, 9 aa, synthetic construct
  source 1..9: note = Seed: VVGARGVGK (KRAS G12R)
LVGERSVGV

SEQ ID NO: 40897 - protein, 9 aa, synthetic construct
  source 1..9: note = Seed: VVGARGVGK (KRAS G12R)
LVGERTVGL

SEQ ID NO: 40898 - protein, 9 aa, synthetic construct
  source 1..9: note = Seed: VVGARGVGK (KRAS G12R)
LVGERTVGV

SEQ ID NO: 40899 - protein, 9 aa, synthetic construct
  source 1..9: note = Seed: VVGARGVGK (KRAS G12R)
LVGFRAVGF

SEQ ID NO: 40900 - protein, 9 aa, synthetic construct
  source 1..9: note = Seed: VVGARGVGK (KRAS G12R)
LVGFRAVGI

SEQ ID NO: 40901 - protein, 9 aa, synthetic construct
  source 1..9: note = Seed: VVGARGVGK (KRAS G12R)
LVGFRAVGL

SEQ ID NO: 40902 - protein, 9 aa, synthetic construct
  source 1..9: note = Seed: VVGARGVGK (KRAS G12R)
LVGFRAVGM

SEQ ID NO: 40903 - protein, 9 aa, synthetic construct
  source 1..9: note = Seed: VVGARGVGK (KRAS G12R)
LVGFRAVGR

SEQ ID NO: 40904 - protein, 9 aa, synthetic construct
  source 1..9: note = Seed: VVGARGVGK (KRAS G12R)
LVGFRAVGV

SEQ ID NO: 40905 - protein, 9 aa, synthetic construct
  source 1..9: note = Seed: VVGARGVGK (KRAS G12R)
LVGFRAVGY

SEQ ID NO: 40906 - protein, 9 aa, synthetic construct
  source 1..9: note = Seed: VVGARGVGK (KRAS G12R)
LVGFRGVGI

SEQ ID NO: 40907 - protein, 9 aa, synthetic construct
  source 1..9: note = Seed: VVGARGVGK (KRAS G12R)
LVGFRGVGL

SEQ ID NO: 40908 - protein, 9 aa, synthetic construct
  source 1..9: note = Seed: VVGARGVGK (KRAS G12R)
LVGFRGVGM

SEQ ID NO: 40909 - protein, 9 aa, synthetic construct
  source 1..9: note = Seed: VVGARGVGK (KRAS G12R)
LVGFRGVGR

SEQ ID NO: 40910 - protein, 9 aa, synthetic construct
  source 1..9: note = Seed: VVGARGVGK (KRAS G12R)
LVGFRGVGV

SEQ ID NO: 40911 - protein, 9 aa, synthetic construct
  source 1..9: note = Seed: VVGARGVGK (KRAS G12R)
LVGFRHVGK

SEQ ID NO: 40912 - protein, 9 aa, synthetic construct
  source 1..9: note = Seed: VVGARGVGK (KRAS G12R)
LVGFRHVGR

SEQ ID NO: 40913 - protein, 9 aa, synthetic construct
  source 1..9: note = Seed: VVGARGVGK (KRAS G12R)
LVGFRHVGY

SEQ ID NO: 40914 - protein, 9 aa, synthetic construct
  source 1..9: note = Seed: VVGARGVGK (KRAS G12R)
LVGFRKVGA

SEQ ID NO: 40915 - protein, 9 aa, synthetic construct
  source 1..9: note = Seed: VVGARGVGK (KRAS G12R)
LVGFRKVGF

SEQ ID NO: 40916 - protein, 9 aa, synthetic construct
  source 1..9: note = Seed: VVGARGVGK (KRAS G12R)
LVGFRKVGG

SEQ ID NO: 40917 - protein, 9 aa, synthetic construct
  source 1..9: note = Seed: VVGARGVGK (KRAS G12R)
LVGFRKVGH

SEQ ID NO: 40918 - protein, 9 aa, synthetic construct
  source 1..9: note = Seed: VVGARGVGK (KRAS G12R)
LVGFRKVGI

SEQ ID NO: 40919 - protein, 9 aa, synthetic construct
  source 1..9: note = Seed: VVGARGVGK (KRAS G12R)
LVGFRKVGK

SEQ ID NO: 40920 - protein, 9 aa, synthetic construct
  source 1..9: note = Seed: VVGARGVGK (KRAS G12R)
LVGFRKVGL

SEQ ID NO: 40921 - protein, 9 aa, synthetic construct
  source 1..9: note = Seed: VVGARGVGK (KRAS G12R)
LVGFRKVGM

SEQ ID NO: 40922 - protein, 9 aa, synthetic construct
  source 1..9: note = Seed: VVGARGVGK (KRAS G12R)
LVGFRKVGR

SEQ ID NO: 40923 - protein, 9 aa, synthetic construct
  source 1..9: note = Seed: VVGARGVGK (KRAS G12R)
LVGFRKVGS

SEQ ID NO: 40924 - protein, 9 aa, synthetic construct
  source 1..9: note = Seed: VVGARGVGK (KRAS G12R)
LVGFRKVGT

SEQ ID NO: 40925 - protein, 9 aa, synthetic construct
  source 1..9: note = Seed: VVGARGVGK (KRAS G12R)
LVGFRKVGV

SEQ ID NO: 40926 - protein, 9 aa, synthetic construct
  source 1..9: note = Seed: VVGARGVGK (KRAS G12R)
LVGFRKVGY

SEQ ID NO: 40927 - protein, 9 aa, synthetic construct
  source 1..9: note = Seed: VVGARGVGK (KRAS G12R)
LVGFRNVGI

SEQ ID NO: 40928 - protein, 9 aa, synthetic construct
  source 1..9: note = Seed: VVGARGVGK (KRAS G12R)
LVGFRNVGK

SEQ ID NO: 40929 - protein, 9 aa, synthetic construct
  source 1..9: note = Seed: VVGARGVGK (KRAS G12R)
LVGFRNVGL

SEQ ID NO: 40930 - protein, 9 aa, synthetic construct
  source 1..9: note = Seed: VVGARGVGK (KRAS G12R)
LVGFRNVGM

SEQ ID NO: 40931 - protein, 9 aa, synthetic construct
  source 1..9: note = Seed: VVGARGVGK (KRAS G12R)
LVGFRNVGR

SEQ ID NO: 40932 - protein, 9 aa, synthetic construct
  source 1..9: note = Seed: VVGARGVGK (KRAS G12R)
LVGFRNVGV

SEQ ID NO: 40933 - protein, 9 aa, synthetic construct
  source 1..9: note = Seed: VVGARGVGK (KRAS G12R)
LVGFRPVGI

SEQ ID NO: 40934 - protein, 9 aa, synthetic construct
  source 1..9: note = Seed: VVGARGVGK (KRAS G12R)
LVGFRPVGL

SEQ ID NO: 40935 - protein, 9 aa, synthetic construct
  source 1..9: note = Seed: VVGARGVGK (KRAS G12R)
LVGFRPVGM

SEQ ID NO: 40936 - protein, 9 aa, synthetic construct
  source 1..9: note = Seed: VVGARGVGK (KRAS G12R)
LVGFRPVGR

SEQ ID NO: 40937 - protein, 9 aa, synthetic construct
  source 1..9: note = Seed: VVGARGVGK (KRAS G12R)
LVGFRPVGY

SEQ ID NO: 40938 - protein, 9 aa, synthetic construct
  source 1..9: note = Seed: VVGARGVGK (KRAS G12R)
LVGFRQVGR

SEQ ID NO: 40939 - protein, 9 aa, synthetic construct
  source 1..9: note = Seed: VVGARGVGK (KRAS G12R)
LVGFRRVGA

SEQ ID NO: 40940 - protein, 9 aa, synthetic construct
  source 1..9: note = Seed: VVGARGVGK (KRAS G12R)
LVGFRRVGF

SEQ ID NO: 40941 - protein, 9 aa, synthetic construct
  source 1..9: note = Seed: VVGARGVGK (KRAS G12R)
LVGFRRVGG

SEQ ID NO: 40942 - protein, 9 aa, synthetic construct
  source 1..9: note = Seed: VVGARGVGK (KRAS G12R)
LVGFRRVGH

SEQ ID NO: 40943 - protein, 9 aa, synthetic construct
  source 1..9: note = Seed: VVGARGVGK (KRAS G12R)
LVGFRRVGI

SEQ ID NO: 40944 - protein, 9 aa, synthetic construct
  source 1..9: note = Seed: VVGARGVGK (KRAS G12R)
LVGFRRVGK

SEQ ID NO: 40945 - protein, 9 aa, synthetic construct
  source 1..9: note = Seed: VVGARGVGK (KRAS G12R)
LVGFRRVGL

SEQ ID NO: 40946 - protein, 9 aa, synthetic construct
  source 1..9: note = Seed: VVGARGVGK (KRAS G12R)
LVGFRRVGM

SEQ ID NO: 40947 - protein, 9 aa, synthetic construct
  source 1..9: note = Seed: VVGARGVGK (KRAS G12R)
LVGFRRVGQ

SEQ ID NO: 40948 - protein, 9 aa, synthetic construct
  source 1..9: note = Seed: VVGARGVGK (KRAS G12R)
LVGFRRVGR

SEQ ID NO: 40949 - protein, 9 aa, synthetic construct
  source 1..9: note = Seed: VVGARGVGK (KRAS G12R)
LVGFRRVGS

SEQ ID NO: 40950 - protein, 9 aa, synthetic construct
  source 1..9: note = Seed: VVGARGVGK (KRAS G12R)
LVGFRRVGT

SEQ ID NO: 40951 - protein, 9 aa, synthetic construct
  source 1..9: note = Seed: VVGARGVGK (KRAS G12R)
LVGFRRVGV

SEQ ID NO: 40952 - protein, 9 aa, synthetic construct
  source 1..9: note = Seed: VVGARGVGK (KRAS G12R)
LVGFRRVGY

SEQ ID NO: 40953 - protein, 9 aa, synthetic construct
  source 1..9: note = Seed: VVGARGVGK (KRAS G12R)
LVGFRSVGL

SEQ ID NO: 40954 - protein, 9 aa, synthetic construct
  source 1..9: note = Seed: VVGARGVGK (KRAS G12R)
LVGFRSVGR

SEQ ID NO: 40955 - protein, 9 aa, synthetic construct
  source 1..9: note = Seed: VVGARGVGK (KRAS G12R)
LVGFRSVGY

SEQ ID NO: 40956 - protein, 9 aa, synthetic construct
  source 1..9: note = Seed: VVGARGVGK (KRAS G12R)
LVGFRTVGK

SEQ ID NO: 40957 - protein, 9 aa, synthetic construct
  source 1..9: note = Seed: VVGARGVGK (KRAS G12R)
LVGFRTVGL

SEQ ID NO: 40958 - protein, 9 aa, synthetic construct
  source 1..9: note = Seed: VVGARGVGK (KRAS G12R)
LVGFRTVGR

SEQ ID NO: 40959 - protein, 9 aa, synthetic construct
  source 1..9: note = Seed: VVGARGVGK (KRAS G12R)
LVGFRVVGR

SEQ ID NO: 40960 - protein, 9 aa, synthetic construct
  source 1..9: note = Seed: VVGARGVGK (KRAS G12R)
LVGGRAVGA

SEQ ID NO: 40961 - protein, 9 aa, synthetic construct
  source 1..9: note = Seed: VVGARGVGK (KRAS G12R)
LVGGRAVGC

SEQ ID NO: 40962 - protein, 9 aa, synthetic construct
  source 1..9: note = Seed: VVGARGVGK (KRAS G12R)
LVGGRAVGD

SEQ ID NO: 40963 - protein, 9 aa, synthetic construct
  source 1..9: note = Seed: VVGARGVGK (KRAS G12R)
LVGGRAVGE

SEQ ID NO: 40964 - protein, 9 aa, synthetic construct
  source 1..9: note = Seed: VVGARGVGK (KRAS G12R)
LVGGRAVGF

SEQ ID NO: 40965 - protein, 9 aa, synthetic construct
  source 1..9: note = Seed: VVGARGVGK (KRAS G12R)
LVGGRAVGG

SEQ ID NO: 40966 - protein, 9 aa, synthetic construct
  source 1..9: note = Seed: VVGARGVGK (KRAS G12R)
LVGGRAVGH

SEQ ID NO: 40967 - protein, 9 aa, synthetic construct
  source 1..9: note = Seed: VVGARGVGK (KRAS G12R)
LVGGRAVGI

SEQ ID NO: 40968 - protein, 9 aa, synthetic construct
  source 1..9: note = Seed: VVGARGVGK (KRAS G12R)
LVGGRAVGK

SEQ ID NO: 40969 - protein, 9 aa, synthetic construct
  source 1..9: note = Seed: VVGARGVGK (KRAS G12R)
LVGGRAVGL

SEQ ID NO: 40970 - protein, 9 aa, synthetic construct
  source 1..9: note = Seed: VVGARGVGK (KRAS G12R)
LVGGRAVGM

SEQ ID NO: 40971 - protein, 9 aa, synthetic construct
  source 1..9: note = Seed: VVGARGVGK (KRAS G12R)
LVGGRAVGN

SEQ ID NO: 40972 - protein, 9 aa, synthetic construct
  source 1..9: note = Seed: VVGARGVGK (KRAS G12R)
LVGGRAVGP

SEQ ID NO: 40973 - protein, 9 aa, synthetic construct
  source 1..9: note = Seed: VVGARGVGK (KRAS G12R)
LVGGRAVGQ

SEQ ID NO: 40974 - protein, 9 aa, synthetic construct
  source 1..9: note = Seed: VVGARGVGK (KRAS G12R)
LVGGRAVGR

SEQ ID NO: 40975 - protein, 9 aa, synthetic construct
  source 1..9: note = Seed: VVGARGVGK (KRAS G12R)
LVGGRAVGS

SEQ ID NO: 40976 - protein, 9 aa, synthetic construct
  source 1..9: note = Seed: VVGARGVGK (KRAS G12R)
LVGGRAVGT

SEQ ID NO: 40977 - protein, 9 aa, synthetic construct
  source 1..9: note = Seed: VVGARGVGK (KRAS G12R)
LVGGRAVGV

SEQ ID NO: 40978 - protein, 9 aa, synthetic construct
  source 1..9: note = Seed: VVGARGVGK (KRAS G12R)
LVGGRAVGY

SEQ ID NO: 40979 - protein, 9 aa, synthetic construct
  source 1..9: note = Seed: VVGARGVGK (KRAS G12R)
LVGGRGVGA

SEQ ID NO: 40980 - protein, 9 aa, synthetic construct
  source 1..9: note = Seed: VVGARGVGK (KRAS G12R)
LVGGRGVGI

SEQ ID NO: 40981 - protein, 9 aa, synthetic construct
  source 1..9: note = Seed: VVGARGVGK (KRAS G12R)
LVGGRGVGL

SEQ ID NO: 40982 - protein, 9 aa, synthetic construct
  source 1..9: note = Seed: VVGARGVGK (KRAS G12R)
LVGGRGVGM

SEQ ID NO: 40983 - protein, 9 aa, synthetic construct
  source 1..9: note = Seed: VVGARGVGK (KRAS G12R)
LVGGRGVGV

SEQ ID NO: 40984 - protein, 9 aa, synthetic construct
  source 1..9: note = Seed: VVGARGVGK (KRAS G12R)
LVGGRHVGA

SEQ ID NO: 40985 - protein, 9 aa, synthetic construct
  source 1..9: note = Seed: VVGARGVGK (KRAS G12R)
LVGGRHVGV

SEQ ID NO: 40986 - protein, 9 aa, synthetic construct
  source 1..9: note = Seed: VVGARGVGK (KRAS G12R)
LVGGRIVGA

SEQ ID NO: 40987 - protein, 9 aa, synthetic construct
  source 1..9: note = Seed: VVGARGVGK (KRAS G12R)
LVGGRIVGG

SEQ ID NO: 40988 - protein, 9 aa, synthetic construct
  source 1..9: note = Seed: VVGARGVGK (KRAS G12R)
LVGGRIVGI

SEQ ID NO: 40989 - protein, 9 aa, synthetic construct
  source 1..9: note = Seed: VVGARGVGK (KRAS G12R)
LVGGRIVGL

SEQ ID NO: 40990 - protein, 9 aa, synthetic construct
  source 1..9: note = Seed: VVGARGVGK (KRAS G12R)
LVGGRIVGM

SEQ ID NO: 40991 - protein, 9 aa, synthetic construct
  source 1..9: note = Seed: VVGARGVGK (KRAS G12R)
LVGGRIVGN

SEQ ID NO: 40992 - protein, 9 aa, synthetic construct
  source 1..9: note = Seed: VVGARGVGK (KRAS G12R)
LVGGRIVGS

SEQ ID NO: 40993 - protein, 9 aa, synthetic construct
  source 1..9: note = Seed: VVGARGVGK (KRAS G12R)
LVGGRIVGT

SEQ ID NO: 40994 - protein, 9 aa, synthetic construct
  source 1..9: note = Seed: VVGARGVGK (KRAS G12R)
LVGGRIVGV

SEQ ID NO: 40995 - protein, 9 aa, synthetic construct
  source 1..9: note = Seed: VVGARGVGK (KRAS G12R)
LVGGRKVGA

SEQ ID NO: 40996 - protein, 9 aa, synthetic construct
  source 1..9: note = Seed: VVGARGVGK (KRAS G12R)
LVGGRKVGI

SEQ ID NO: 40997 - protein, 9 aa, synthetic construct
  source 1..9: note = Seed: VVGARGVGK (KRAS G12R)
LVGGRKVGR

SEQ ID NO: 40998 - protein, 9 aa, synthetic construct
  source 1..9: note = Seed: VVGARGVGK (KRAS G12R)
LVGGRKVGV

SEQ ID NO: 40999 - protein, 9 aa, synthetic construct
  source 1..9: note = Seed: VVGARGVGK (KRAS G12R)
LVGGRLVGA

SEQ ID NO: 41000 - protein, 9 aa, synthetic construct
  source 1..9: note = Seed: VVGARGVGK (KRAS G12R)
LVGGRLVGG

SEQ ID NO: 41001 - protein, 9 aa, synthetic construct
  source 1..9: note = Seed: VVGARGVGK (KRAS G12R)
LVGGRLVGI

SEQ ID NO: 41002 - protein, 9 aa, synthetic construct
  source 1..9: note = Seed: VVGARGVGK (KRAS G12R)
LVGGRLVGL

SEQ ID NO: 41003 - protein, 9 aa, synthetic construct
  source 1..9: note = Seed: VVGARGVGK (KRAS G12R)
LVGGRLVGM

SEQ ID NO: 41004 - protein, 9 aa, synthetic construct
  source 1..9: note = Seed: VVGARGVGK (KRAS G12R)
LVGGRLVGN

SEQ ID NO: 41005 - protein, 9 aa, synthetic construct
  source 1..9: note = Seed: VVGARGVGK (KRAS G12R)
LVGGRLVGS

SEQ ID NO: 41006 - protein, 9 aa, synthetic construct
  source 1..9: note = Seed: VVGARGVGK (KRAS G12R)
LVGGRLVGT

SEQ ID NO: 41007 - protein, 9 aa, synthetic construct
  source 1..9: note = Seed: VVGARGVGK (KRAS G12R)
LVGGRLVGV

SEQ ID NO: 41008 - protein, 9 aa, synthetic construct
  source 1..9: note = Seed: VVGARGVGK (KRAS G12R)
LVGGRMVGA

SEQ ID NO: 41009 - protein, 9 aa, synthetic construct
  source 1..9: note = Seed: VVGARGVGK (KRAS G12R)
LVGGRMVGI

SEQ ID NO: 41010 - protein, 9 aa, synthetic construct
  source 1..9: note = Seed: VVGARGVGK (KRAS G12R)
LVGGRMVGL

SEQ ID NO: 41011 - protein, 9 aa, synthetic construct
  source 1..9: note = Seed: VVGARGVGK (KRAS G12R)
LVGGRMVGS

SEQ ID NO: 41012 - protein, 9 aa, synthetic construct
  source 1..9: note = Seed: VVGARGVGK (KRAS G12R)
LVGGRMVGV

SEQ ID NO: 41013 - protein, 9 aa, synthetic construct
  source 1..9: note = Seed: VVGARGVGK (KRAS G12R)
LVGGRNVGA

SEQ ID NO: 41014 - protein, 9 aa, synthetic construct
  source 1..9: note = Seed: VVGARGVGK (KRAS G12R)
LVGGRNVGI

SEQ ID NO: 41015 - protein, 9 aa, synthetic construct
  source 1..9: note = Seed: VVGARGVGK (KRAS G12R)
LVGGRNVGL

SEQ ID NO: 41016 - protein, 9 aa, synthetic construct
  source 1..9: note = Seed: VVGARGVGK (KRAS G12R)
LVGGRNVGV

SEQ ID NO: 41017 - protein, 9 aa, synthetic construct
  source 1..9: note = Seed: VVGARGVGK (KRAS G12R)
LVGGRPVGA

SEQ ID NO: 41018 - protein, 9 aa, synthetic construct
  source 1..9: note = Seed: VVGARGVGK (KRAS G12R)
LVGGRPVGC

SEQ ID NO: 41019 - protein, 9 aa, synthetic construct
  source 1..9: note = Seed: VVGARGVGK (KRAS G12R)
LVGGRPVGF

SEQ ID NO: 41020 - protein, 9 aa, synthetic construct
  source 1..9: note = Seed: VVGARGVGK (KRAS G12R)
LVGGRPVGG

SEQ ID NO: 41021 - protein, 9 aa, synthetic construct
  source 1..9: note = Seed: VVGARGVGK (KRAS G12R)
LVGGRPVGH

SEQ ID NO: 41022 - protein, 9 aa, synthetic construct
  source 1..9: note = Seed: VVGARGVGK (KRAS G12R)
LVGGRPVGI

SEQ ID NO: 41023 - protein, 9 aa, synthetic construct
  source 1..9: note = Seed: VVGARGVGK (KRAS G12R)
LVGGRPVGK

SEQ ID NO: 41024 - protein, 9 aa, synthetic construct
  source 1..9: note = Seed: VVGARGVGK (KRAS G12R)
LVGGRPVGL

SEQ ID NO: 41025 - protein, 9 aa, synthetic construct
  source 1..9: note = Seed: VVGARGVGK (KRAS G12R)
LVGGRPVGM

SEQ ID NO: 41026 - protein, 9 aa, synthetic construct
  source 1..9: note = Seed: VVGARGVGK (KRAS G12R)
LVGGRPVGN

SEQ ID NO: 41027 - protein, 9 aa, synthetic construct
  source 1..9: note = Seed: VVGARGVGK (KRAS G12R)
LVGGRPVGQ

SEQ ID NO: 41028 - protein, 9 aa, synthetic construct
  source 1..9: note = Seed: VVGARGVGK (KRAS G12R)
LVGGRPVGR

SEQ ID NO: 41029 - protein, 9 aa, synthetic construct
  source 1..9: note = Seed: VVGARGVGK (KRAS G12R)
LVGGRPVGS

SEQ ID NO: 41030 - protein, 9 aa, synthetic construct
  source 1..9: note = Seed: VVGARGVGK (KRAS G12R)
LVGGRPVGT

SEQ ID NO: 41031 - protein, 9 aa, synthetic construct
  source 1..9: note = Seed: VVGARGVGK (KRAS G12R)
LVGGRPVGV

SEQ ID NO: 41032 - protein, 9 aa, synthetic construct
  source 1..9: note = Seed: VVGARGVGK (KRAS G12R)
LVGGRPVGW

SEQ ID NO: 41033 - protein, 9 aa, synthetic construct
  source 1..9: note = Seed: VVGARGVGK (KRAS G12R)
LVGGRPVGY

SEQ ID NO: 41034 - protein, 9 aa, synthetic construct
  source 1..9: note = Seed: VVGARGVGK (KRAS G12R)
LVGGRRVGF

SEQ ID NO: 41035 - protein, 9 aa, synthetic construct
  source 1..9: note = Seed: VVGARGVGK (KRAS G12R)
LVGGRRVGI

SEQ ID NO: 41036 - protein, 9 aa, synthetic construct
  source 1..9: note = Seed: VVGARGVGK (KRAS G12R)
LVGGRRVGK

SEQ ID NO: 41037 - protein, 9 aa, synthetic construct
  source 1..9: note = Seed: VVGARGVGK (KRAS G12R)
LVGGRRVGL

SEQ ID NO: 41038 - protein, 9 aa, synthetic construct
  source 1..9: note = Seed: VVGARGVGK (KRAS G12R)
LVGGRRVGM

SEQ ID NO: 41039 - protein, 9 aa, synthetic construct
  source 1..9: note = Seed: VVGARGVGK (KRAS G12R)
LVGGRRVGR

SEQ ID NO: 41040 - protein, 9 aa, synthetic construct
  source 1..9: note = Seed: VVGARGVGK (KRAS G12R)
LVGGRRVGV

SEQ ID NO: 41041 - protein, 9 aa, synthetic construct
  source 1..9: note = Seed: VVGARGVGK (KRAS G12R)
LVGGRRVGY

SEQ ID NO: 41042 - protein, 9 aa, synthetic construct
  source 1..9: note = Seed: VVGARGVGK (KRAS G12R)
LVGGRSVGA

SEQ ID NO: 41043 - protein, 9 aa, synthetic construct
  source 1..9: note = Seed: VVGARGVGK (KRAS G12R)
LVGGRSVGI

SEQ ID NO: 41044 - protein, 9 aa, synthetic construct
  source 1..9: note = Seed: VVGARGVGK (KRAS G12R)
LVGGRSVGL

SEQ ID NO: 41045 - protein, 9 aa, synthetic construct
  source 1..9: note = Seed: VVGARGVGK (KRAS G12R)
LVGGRSVGM

SEQ ID NO: 41046 - protein, 9 aa, synthetic construct
  source 1..9: note = Seed: VVGARGVGK (KRAS G12R)
LVGGRSVGS

SEQ ID NO: 41047 - protein, 9 aa, synthetic construct
  source 1..9: note = Seed: VVGARGVGK (KRAS G12R)
LVGGRSVGT

SEQ ID NO: 41048 - protein, 9 aa, synthetic construct
  source 1..9: note = Seed: VVGARGVGK (KRAS G12R)
LVGGRSVGV

SEQ ID NO: 41049 - protein, 9 aa, synthetic construct
  source 1..9: note = Seed: VVGARGVGK (KRAS G12R)
LVGGRTVGA

SEQ ID NO: 41050 - protein, 9 aa, synthetic construct
  source 1..9: note = Seed: VVGARGVGK (KRAS G12R)
LVGGRTVGG

SEQ ID NO: 41051 - protein, 9 aa, synthetic construct
  source 1..9: note = Seed: VVGARGVGK (KRAS G12R)
LVGGRTVGI

SEQ ID NO: 41052 - protein, 9 aa, synthetic construct
  source 1..9: note = Seed: VVGARGVGK (KRAS G12R)
LVGGRTVGL

SEQ ID NO: 41053 - protein, 9 aa, synthetic construct
  source 1..9: note = Seed: VVGARGVGK (KRAS G12R)
LVGGRTVGM

SEQ ID NO: 41054 - protein, 9 aa, synthetic construct
  source 1..9: note = Seed: VVGARGVGK (KRAS G12R)
LVGGRTVGS

SEQ ID NO: 41055 - protein, 9 aa, synthetic construct
  source 1..9: note = Seed: VVGARGVGK (KRAS G12R)
LVGGRTVGT

SEQ ID NO: 41056 - protein, 9 aa, synthetic construct
  source 1..9: note = Seed: VVGARGVGK (KRAS G12R)
LVGGRTVGV

SEQ ID NO: 41057 - protein, 9 aa, synthetic construct
  source 1..9: note = Seed: VVGARGVGK (KRAS G12R)
LVGGRVVGA

SEQ ID NO: 41058 - protein, 9 aa, synthetic construct
  source 1..9: note = Seed: VVGARGVGK (KRAS G12R)
LVGGRVVGC

SEQ ID NO: 41059 - protein, 9 aa, synthetic construct
  source 1..9: note = Seed: VVGARGVGK (KRAS G12R)
LVGGRVVGF

SEQ ID NO: 41060 - protein, 9 aa, synthetic construct
  source 1..9: note = Seed: VVGARGVGK (KRAS G12R)
LVGGRVVGG

SEQ ID NO: 41061 - protein, 9 aa, synthetic construct
  source 1..9: note = Seed: VVGARGVGK (KRAS G12R)
LVGGRVVGH

SEQ ID NO: 41062 - protein, 9 aa, synthetic construct
  source 1..9: note = Seed: VVGARGVGK (KRAS G12R)
LVGGRVVGI

SEQ ID NO: 41063 - protein, 9 aa, synthetic construct
  source 1..9: note = Seed: VVGARGVGK (KRAS G12R)
LVGGRVVGL

SEQ ID NO: 41064 - protein, 9 aa, synthetic construct
  source 1..9: note = Seed: VVGARGVGK (KRAS G12R)
LVGGRVVGM

SEQ ID NO: 41065 - protein, 9 aa, synthetic construct
  source 1..9: note = Seed: VVGARGVGK (KRAS G12R)
LVGGRVVGN

SEQ ID NO: 41066 - protein, 9 aa, synthetic construct
  source 1..9: note = Seed: VVGARGVGK (KRAS G12R)
LVGGRVVGP

SEQ ID NO: 41067 - protein, 9 aa, synthetic construct
  source 1..9: note = Seed: VVGARGVGK (KRAS G12R)
LVGGRVVGS

SEQ ID NO: 41068 - protein, 9 aa, synthetic construct
  source 1..9: note = Seed: VVGARGVGK (KRAS G12R)
LVGGRVVGT

SEQ ID NO: 41069 - protein, 9 aa, synthetic construct
  source 1..9: note = Seed: VVGARGVGK (KRAS G12R)
LVGGRVVGV

SEQ ID NO: 41070 - protein, 9 aa, synthetic construct
  source 1..9: note = Seed: VVGARGVGK (KRAS G12R)
LVGHRAVGA

SEQ ID NO: 41071 - protein, 9 aa, synthetic construct
  source 1..9: note = Seed: VVGARGVGK (KRAS G12R)
LVGHRAVGF

SEQ ID NO: 41072 - protein, 9 aa, synthetic construct
  source 1..9: note = Seed: VVGARGVGK (KRAS G12R)
LVGHRAVGH

SEQ ID NO: 41073 - protein, 9 aa, synthetic construct
  source 1..9: note = Seed: VVGARGVGK (KRAS G12R)
LVGHRAVGI

SEQ ID NO: 41074 - protein, 9 aa, synthetic construct
  source 1..9: note = Seed: VVGARGVGK (KRAS G12R)
LVGHRAVGK

SEQ ID NO: 41075 - protein, 9 aa, synthetic construct
  source 1..9: note = Seed: VVGARGVGK (KRAS G12R)
LVGHRAVGL

SEQ ID NO: 41076 - protein, 9 aa, synthetic construct
  source 1..9: note = Seed: VVGARGVGK (KRAS G12R)
LVGHRAVGM

SEQ ID NO: 41077 - protein, 9 aa, synthetic construct
  source 1..9: note = Seed: VVGARGVGK (KRAS G12R)
LVGHRAVGR

SEQ ID NO: 41078 - protein, 9 aa, synthetic construct
  source 1..9: note = Seed: VVGARGVGK (KRAS G12R)
LVGHRAVGV

SEQ ID NO: 41079 - protein, 9 aa, synthetic construct
  source 1..9: note = Seed: VVGARGVGK (KRAS G12R)
LVGHRAVGY

SEQ ID NO: 41080 - protein, 9 aa, synthetic construct
  source 1..9: note = Seed: VVGARGVGK (KRAS G12R)
LVGHRGVGA

SEQ ID NO: 41081 - protein, 9 aa, synthetic construct
  source 1..9: note = Seed: VVGARGVGK (KRAS G12R)
LVGHRGVGI

SEQ ID NO: 41082 - protein, 9 aa, synthetic construct
  source 1..9: note = Seed: VVGARGVGK (KRAS G12R)
LVGHRGVGK

SEQ ID NO: 41083 - protein, 9 aa, synthetic construct
  source 1..9: note = Seed: VVGARGVGK (KRAS G12R)
LVGHRGVGL

SEQ ID NO: 41084 - protein, 9 aa, synthetic construct
  source 1..9: note = Seed: VVGARGVGK (KRAS G12R)
LVGHRGVGR

SEQ ID NO: 41085 - protein, 9 aa, synthetic construct
  source 1..9: note = Seed: VVGARGVGK (KRAS G12R)
LVGHRGVGV

SEQ ID NO: 41086 - protein, 9 aa, synthetic construct
  source 1..9: note = Seed: VVGARGVGK (KRAS G12R)
LVGHRGVGY

SEQ ID NO: 41087 - protein, 9 aa, synthetic construct
  source 1..9: note = Seed: VVGARGVGK (KRAS G12R)
LVGHRHVGF

SEQ ID NO: 41088 - protein, 9 aa, synthetic construct
  source 1..9: note = Seed: VVGARGVGK (KRAS G12R)
LVGHRHVGI

SEQ ID NO: 41089 - protein, 9 aa, synthetic construct
  source 1..9: note = Seed: VVGARGVGK (KRAS G12R)
LVGHRHVGK

SEQ ID NO: 41090 - protein, 9 aa, synthetic construct
  source 1..9: note = Seed: VVGARGVGK (KRAS G12R)
LVGHRHVGL

SEQ ID NO: 41091 - protein, 9 aa, synthetic construct
  source 1..9: note = Seed: VVGARGVGK (KRAS G12R)
LVGHRHVGM

SEQ ID NO: 41092 - protein, 9 aa, synthetic construct
  source 1..9: note = Seed: VVGARGVGK (KRAS G12R)
LVGHRHVGR

SEQ ID NO: 41093 - protein, 9 aa, synthetic construct
  source 1..9: note = Seed: VVGARGVGK (KRAS G12R)
LVGHRHVGV

SEQ ID NO: 41094 - protein, 9 aa, synthetic construct
  source 1..9: note = Seed: VVGARGVGK (KRAS G12R)
LVGHRHVGY

SEQ ID NO: 41095 - protein, 9 aa, synthetic construct
  source 1..9: note = Seed: VVGARGVGK (KRAS G12R)
LVGHRIVGK

SEQ ID NO: 41096 - protein, 9 aa, synthetic construct
  source 1..9: note = Seed: VVGARGVGK (KRAS G12R)
LVGHRIVGR

SEQ ID NO: 41097 - protein, 9 aa, synthetic construct
  source 1..9: note = Seed: VVGARGVGK (KRAS G12R)
LVGHRIVGY

SEQ ID NO: 41098 - protein, 9 aa, synthetic construct
  source 1..9: note = Seed: VVGARGVGK (KRAS G12R)
LVGHRKVGA

SEQ ID NO: 41099 - protein, 9 aa, synthetic construct
  source 1..9: note = Seed: VVGARGVGK (KRAS G12R)
LVGHRKVGF

SEQ ID NO: 41100 - protein, 9 aa, synthetic construct
  source 1..9: note = Seed: VVGARGVGK (KRAS G12R)
LVGHRKVGG

SEQ ID NO: 41101 - protein, 9 aa, synthetic construct
  source 1..9: note = Seed: VVGARGVGK (KRAS G12R)
LVGHRKVGH

SEQ ID NO: 41102 - protein, 9 aa, synthetic construct
  source 1..9: note = Seed: VVGARGVGK (KRAS G12R)
LVGHRKVGI

SEQ ID NO: 41103 - protein, 9 aa, synthetic construct
  source 1..9: note = Seed: VVGARGVGK (KRAS G12R)
LVGHRKVGK

SEQ ID NO: 41104 - protein, 9 aa, synthetic construct
  source 1..9: note = Seed: VVGARGVGK (KRAS G12R)
LVGHRKVGL

SEQ ID NO: 41105 - protein, 9 aa, synthetic construct
  source 1..9: note = Seed: VVGARGVGK (KRAS G12R)
LVGHRKVGM

SEQ ID NO: 41106 - protein, 9 aa, synthetic construct
  source 1..9: note = Seed: VVGARGVGK (KRAS G12R)
LVGHRKVGQ

SEQ ID NO: 41107 - protein, 9 aa, synthetic construct
  source 1..9: note = Seed: VVGARGVGK (KRAS G12R)
LVGHRKVGR

SEQ ID NO: 41108 - protein, 9 aa, synthetic construct
  source 1..9: note = Seed: VVGARGVGK (KRAS G12R)
LVGHRKVGS

SEQ ID NO: 41109 - protein, 9 aa, synthetic construct
  source 1..9: note = Seed: VVGARGVGK (KRAS G12R)
LVGHRKVGT

SEQ ID NO: 41110 - protein, 9 aa, synthetic construct
  source 1..9: note = Seed: VVGARGVGK (KRAS G12R)
LVGHRKVGV

SEQ ID NO: 41111 - protein, 9 aa, synthetic construct
  source 1..9: note = Seed: VVGARGVGK (KRAS G12R)
LVGHRKVGW

SEQ ID NO: 41112 - protein, 9 aa, synthetic construct
  source 1..9: note = Seed: VVGARGVGK (KRAS G12R)
LVGHRKVGY

SEQ ID NO: 41113 - protein, 9 aa, synthetic construct
  source 1..9: note = Seed: VVGARGVGK (KRAS G12R)
LVGHRLVGK

SEQ ID NO: 41114 - protein, 9 aa, synthetic construct
  source 1..9: note = Seed: VVGARGVGK (KRAS G12R)
LVGHRLVGR

SEQ ID NO: 41115 - protein, 9 aa, synthetic construct
  source 1..9: note = Seed: VVGARGVGK (KRAS G12R)
LVGHRLVGY

SEQ ID NO: 41116 - protein, 9 aa, synthetic construct
  source 1..9: note = Seed: VVGARGVGK (KRAS G12R)
LVGHRMVGK

SEQ ID NO: 41117 - protein, 9 aa, synthetic construct
  source 1..9: note = Seed: VVGARGVGK (KRAS G12R)
LVGHRMVGR

SEQ ID NO: 41118 - protein, 9 aa, synthetic construct
  source 1..9: note = Seed: VVGARGVGK (KRAS G12R)
LVGHRMVGY

SEQ ID NO: 41119 - protein, 9 aa, synthetic construct
  source 1..9: note = Seed: VVGARGVGK (KRAS G12R)
LVGHRNVGF

SEQ ID NO: 41120 - protein, 9 aa, synthetic construct
  source 1..9: note = Seed: VVGARGVGK (KRAS G12R)
LVGHRNVGI

SEQ ID NO: 41121 - protein, 9 aa, synthetic construct
  source 1..9: note = Seed: VVGARGVGK (KRAS G12R)
LVGHRNVGK

SEQ ID NO: 41122 - protein, 9 aa, synthetic construct
  source 1..9: note = Seed: VVGARGVGK (KRAS G12R)
LVGHRNVGL

SEQ ID NO: 41123 - protein, 9 aa, synthetic construct
  source 1..9: note = Seed: VVGARGVGK (KRAS G12R)
LVGHRNVGM

SEQ ID NO: 41124 - protein, 9 aa, synthetic construct
  source 1..9: note = Seed: VVGARGVGK (KRAS G12R)
LVGHRNVGR

SEQ ID NO: 41125 - protein, 9 aa, synthetic construct
  source 1..9: note = Seed: VVGARGVGK (KRAS G12R)
LVGHRNVGV

SEQ ID NO: 41126 - protein, 9 aa, synthetic construct
  source 1..9: note = Seed: VVGARGVGK (KRAS G12R)
LVGHRNVGY

SEQ ID NO: 41127 - protein, 9 aa, synthetic construct
  source 1..9: note = Seed: VVGARGVGK (KRAS G12R)
LVGHRPVGF

SEQ ID NO: 41128 - protein, 9 aa, synthetic construct
  source 1..9: note = Seed: VVGARGVGK (KRAS G12R)
LVGHRPVGI

SEQ ID NO: 41129 - protein, 9 aa, synthetic construct
  source 1..9: note = Seed: VVGARGVGK (KRAS G12R)
LVGHRPVGK

SEQ ID NO: 41130 - protein, 9 aa, synthetic construct
  source 1..9: note = Seed: VVGARGVGK (KRAS G12R)
LVGHRPVGL

SEQ ID NO: 41131 - protein, 9 aa, synthetic construct
  source 1..9: note = Seed: VVGARGVGK (KRAS G12R)
LVGHRPVGM

SEQ ID NO: 41132 - protein, 9 aa, synthetic construct
  source 1..9: note = Seed: VVGARGVGK (KRAS G12R)
LVGHRPVGR

SEQ ID NO: 41133 - protein, 9 aa, synthetic construct
  source 1..9: note = Seed: VVGARGVGK (KRAS G12R)
LVGHRPVGV

SEQ ID NO: 41134 - protein, 9 aa, synthetic construct
  source 1..9: note = Seed: VVGARGVGK (KRAS G12R)
LVGHRPVGY

SEQ ID NO: 41135 - protein, 9 aa, synthetic construct
  source 1..9: note = Seed: VVGARGVGK (KRAS G12R)
LVGHRQVGK

SEQ ID NO: 41136 - protein, 9 aa, synthetic construct
  source 1..9: note = Seed: VVGARGVGK (KRAS G12R)
LVGHRQVGR

SEQ ID NO: 41137 - protein, 9 aa, synthetic construct
  source 1..9: note = Seed: VVGARGVGK (KRAS G12R)
LVGHRQVGY

SEQ ID NO: 41138 - protein, 9 aa, synthetic construct
  source 1..9: note = Seed: VVGARGVGK (KRAS G12R)
LVGHRRVGA

SEQ ID NO: 41139 - protein, 9 aa, synthetic construct
  source 1..9: note = Seed: VVGARGVGK (KRAS G12R)
LVGHRRVGF

SEQ ID NO: 41140 - protein, 9 aa, synthetic construct
  source 1..9: note = Seed: VVGARGVGK (KRAS G12R)
LVGHRRVGG

SEQ ID NO: 41141 - protein, 9 aa, synthetic construct
  source 1..9: note = Seed: VVGARGVGK (KRAS G12R)
LVGHRRVGH

SEQ ID NO: 41142 - protein, 9 aa, synthetic construct
  source 1..9: note = Seed: VVGARGVGK (KRAS G12R)
LVGHRRVGI

SEQ ID NO: 41143 - protein, 9 aa, synthetic construct
  source 1..9: note = Seed: VVGARGVGK (KRAS G12R)
LVGHRRVGK

SEQ ID NO: 41144 - protein, 9 aa, synthetic construct
  source 1..9: note = Seed: VVGARGVGK (KRAS G12R)
LVGHRRVGL

SEQ ID NO: 41145 - protein, 9 aa, synthetic construct
  source 1..9: note = Seed: VVGARGVGK (KRAS G12R)
LVGHRRVGM

SEQ ID NO: 41146 - protein, 9 aa, synthetic construct
  source 1..9: note = Seed: VVGARGVGK (KRAS G12R)
LVGHRRVGN

SEQ ID NO: 41147 - protein, 9 aa, synthetic construct
  source 1..9: note = Seed: VVGARGVGK (KRAS G12R)
LVGHRRVGP

SEQ ID NO: 41148 - protein, 9 aa, synthetic construct
  source 1..9: note = Seed: VVGARGVGK (KRAS G12R)
LVGHRRVGQ

SEQ ID NO: 41149 - protein, 9 aa, synthetic construct
  source 1..9: note = Seed: VVGARGVGK (KRAS G12R)
LVGHRRVGR

SEQ ID NO: 41150 - protein, 9 aa, synthetic construct
  source 1..9: note = Seed: VVGARGVGK (KRAS G12R)
LVGHRRVGS

SEQ ID NO: 41151 - protein, 9 aa, synthetic construct
  source 1..9: note = Seed: VVGARGVGK (KRAS G12R)
LVGHRRVGT

SEQ ID NO: 41152 - protein, 9 aa, synthetic construct
  source 1..9: note = Seed: VVGARGVGK (KRAS G12R)
LVGHRRVGV

SEQ ID NO: 41153 - protein, 9 aa, synthetic construct
  source 1..9: note = Seed: VVGARGVGK (KRAS G12R)
LVGHRRVGW

SEQ ID NO: 41154 - protein, 9 aa, synthetic construct
  source 1..9: note = Seed: VVGARGVGK (KRAS G12R)
LVGHRRVGY

SEQ ID NO: 41155 - protein, 9 aa, synthetic construct
  source 1..9: note = Seed: VVGARGVGK (KRAS G12R)
LVGHRSVGA

SEQ ID NO: 41156 - protein, 9 aa, synthetic construct
  source 1..9: note = Seed: VVGARGVGK (KRAS G12R)
LVGHRSVGF

SEQ ID NO: 41157 - protein, 9 aa, synthetic construct
  source 1..9: note = Seed: VVGARGVGK (KRAS G12R)
LVGHRSVGI

SEQ ID NO: 41158 - protein, 9 aa, synthetic construct
  source 1..9: note = Seed: VVGARGVGK (KRAS G12R)
LVGHRSVGK

SEQ ID NO: 41159 - protein, 9 aa, synthetic construct
  source 1..9: note = Seed: VVGARGVGK (KRAS G12R)
LVGHRSVGL

SEQ ID NO: 41160 - protein, 9 aa, synthetic construct
  source 1..9: note = Seed: VVGARGVGK (KRAS G12R)
LVGHRSVGM

SEQ ID NO: 41161 - protein, 9 aa, synthetic construct
  source 1..9: note = Seed: VVGARGVGK (KRAS G12R)
LVGHRSVGR

SEQ ID NO: 41162 - protein, 9 aa, synthetic construct
  source 1..9: note = Seed: VVGARGVGK (KRAS G12R)
LVGHRSVGV

SEQ ID NO: 41163 - protein, 9 aa, synthetic construct
  source 1..9: note = Seed: VVGARGVGK (KRAS G12R)
LVGHRSVGY

SEQ ID NO: 41164 - protein, 9 aa, synthetic construct
  source 1..9: note = Seed: VVGARGVGK (KRAS G12R)
LVGHRTVGF

SEQ ID NO: 41165 - protein, 9 aa, synthetic construct
  source 1..9: note = Seed: VVGARGVGK (KRAS G12R)
LVGHRTVGK

SEQ ID NO: 41166 - protein, 9 aa, synthetic construct
  source 1..9: note = Seed: VVGARGVGK (KRAS G12R)
LVGHRTVGM

SEQ ID NO: 41167 - protein, 9 aa, synthetic construct
  source 1..9: note = Seed: VVGARGVGK (KRAS G12R)
LVGHRTVGR

SEQ ID NO: 41168 - protein, 9 aa, synthetic construct
  source 1..9: note = Seed: VVGARGVGK (KRAS G12R)
LVGHRTVGV

SEQ ID NO: 41169 - protein, 9 aa, synthetic construct
  source 1..9: note = Seed: VVGARGVGK (KRAS G12R)
LVGHRTVGY

SEQ ID NO: 41170 - protein, 9 aa, synthetic construct
  source 1..9: note = Seed: VVGARGVGK (KRAS G12R)
LVGHRVVGK

SEQ ID NO: 41171 - protein, 9 aa, synthetic construct
  source 1..9: note = Seed: VVGARGVGK (KRAS G12R)
LVGHRVVGR

SEQ ID NO: 41172 - protein, 9 aa, synthetic construct
  source 1..9: note = Seed: VVGARGVGK (KRAS G12R)
LVGHRVVGY

SEQ ID NO: 41173 - protein, 9 aa, synthetic construct
  source 1..9: note = Seed: VVGARGVGK (KRAS G12R)
LVGHRWVGR

SEQ ID NO: 41174 - protein, 9 aa, synthetic construct
  source 1..9: note = Seed: VVGARGVGK (KRAS G12R)
LVGIRAVGA

SEQ ID NO: 41175 - protein, 9 aa, synthetic construct
  source 1..9: note = Seed: VVGARGVGK (KRAS G12R)
LVGIRAVGC

SEQ ID NO: 41176 - protein, 9 aa, synthetic construct
  source 1..9: note = Seed: VVGARGVGK (KRAS G12R)
LVGIRAVGF

SEQ ID NO: 41177 - protein, 9 aa, synthetic construct
  source 1..9: note = Seed: VVGARGVGK (KRAS G12R)
LVGIRAVGG

SEQ ID NO: 41178 - protein, 9 aa, synthetic construct
  source 1..9: note = Seed: VVGARGVGK (KRAS G12R)
LVGIRAVGH

SEQ ID NO: 41179 - protein, 9 aa, synthetic construct
  source 1..9: note = Seed: VVGARGVGK (KRAS G12R)
LVGIRAVGI

SEQ ID NO: 41180 - protein, 9 aa, synthetic construct
  source 1..9: note = Seed: VVGARGVGK (KRAS G12R)
LVGIRAVGL

SEQ ID NO: 41181 - protein, 9 aa, synthetic construct
  source 1..9: note = Seed: VVGARGVGK (KRAS G12R)
LVGIRAVGM

SEQ ID NO: 41182 - protein, 9 aa, synthetic construct
  source 1..9: note = Seed: VVGARGVGK (KRAS G12R)
LVGIRAVGN

SEQ ID NO: 41183 - protein, 9 aa, synthetic construct
  source 1..9: note = Seed: VVGARGVGK (KRAS G12R)
LVGIRAVGQ

SEQ ID NO: 41184 - protein, 9 aa, synthetic construct
  source 1..9: note = Seed: VVGARGVGK (KRAS G12R)
LVGIRAVGR

SEQ ID NO: 41185 - protein, 9 aa, synthetic construct
  source 1..9: note = Seed: VVGARGVGK (KRAS G12R)
LVGIRAVGS

SEQ ID NO: 41186 - protein, 9 aa, synthetic construct
  source 1..9: note = Seed: VVGARGVGK (KRAS G12R)
LVGIRAVGT

SEQ ID NO: 41187 - protein, 9 aa, synthetic construct
  source 1..9: note = Seed: VVGARGVGK (KRAS G12R)
LVGIRAVGV

SEQ ID NO: 41188 - protein, 9 aa, synthetic construct
  source 1..9: note = Seed: VVGARGVGK (KRAS G12R)
LVGIRAVGY

SEQ ID NO: 41189 - protein, 9 aa, synthetic construct
  source 1..9: note = Seed: VVGARGVGK (KRAS G12R)
LVGIRGVGA

SEQ ID NO: 41190 - protein, 9 aa, synthetic construct
  source 1..9: note = Seed: VVGARGVGK (KRAS G12R)
LVGIRGVGC

SEQ ID NO: 41191 - protein, 9 aa, synthetic construct
  source 1..9: note = Seed: VVGARGVGK (KRAS G12R)
LVGIRGVGF

SEQ ID NO: 41192 - protein, 9 aa, synthetic construct
  source 1..9: note = Seed: VVGARGVGK (KRAS G12R)
LVGIRGVGG

SEQ ID NO: 41193 - protein, 9 aa, synthetic construct
  source 1..9: note = Seed: VVGARGVGK (KRAS G12R)
LVGIRGVGH

SEQ ID NO: 41194 - protein, 9 aa, synthetic construct
  source 1..9: note = Seed: VVGARGVGK (KRAS G12R)
LVGIRGVGI

SEQ ID NO: 41195 - protein, 9 aa, synthetic construct
  source 1..9: note = Seed: VVGARGVGK (KRAS G12R)
LVGIRGVGL

SEQ ID NO: 41196 - protein, 9 aa, synthetic construct
  source 1..9: note = Seed: VVGARGVGK (KRAS G12R)
LVGIRGVGM

SEQ ID NO: 41197 - protein, 9 aa, synthetic construct
  source 1..9: note = Seed: VVGARGVGK (KRAS G12R)
LVGIRGVGN

SEQ ID NO: 41198 - protein, 9 aa, synthetic construct
  source 1..9: note = Seed: VVGARGVGK (KRAS G12R)
LVGIRGVGS

SEQ ID NO: 41199 - protein, 9 aa, synthetic construct
  source 1..9: note = Seed: VVGARGVGK (KRAS G12R)
LVGIRGVGT

SEQ ID NO: 41200 - protein, 9 aa, synthetic construct
  source 1..9: note = Seed: VVGARGVGK (KRAS G12R)
LVGIRGVGV

SEQ ID NO: 41201 - protein, 9 aa, synthetic construct
  source 1..9: note = Seed: VVGARGVGK (KRAS G12R)
LVGIRGVGY

SEQ ID NO: 41202 - protein, 9 aa, synthetic construct
  source 1..9: note = Seed: VVGARGVGK (KRAS G12R)
LVGIRHVGA

SEQ ID NO: 41203 - protein, 9 aa, synthetic construct
  source 1..9: note = Seed: VVGARGVGK (KRAS G12R)
LVGIRHVGL

SEQ ID NO: 41204 - protein, 9 aa, synthetic construct
  source 1..9: note = Seed: VVGARGVGK (KRAS G12R)
LVGIRHVGM

SEQ ID NO: 41205 - protein, 9 aa, synthetic construct
  source 1..9: note = Seed: VVGARGVGK (KRAS G12R)
LVGIRHVGY

SEQ ID NO: 41206 - protein, 9 aa, synthetic construct
  source 1..9: note = Seed: VVGARGVGK (KRAS G12R)
LVGIRIVGN

SEQ ID NO: 41207 - protein, 9 aa, synthetic construct
  source 1..9: note = Seed: VVGARGVGK (KRAS G12R)
LVGIRIVGS

SEQ ID NO: 41208 - protein, 9 aa, synthetic construct
  source 1..9: note = Seed: VVGARGVGK (KRAS G12R)
LVGIRKVGA

SEQ ID NO: 41209 - protein, 9 aa, synthetic construct
  source 1..9: note = Seed: VVGARGVGK (KRAS G12R)
LVGIRKVGF

SEQ ID NO: 41210 - protein, 9 aa, synthetic construct
  source 1..9: note = Seed: VVGARGVGK (KRAS G12R)
LVGIRKVGG

SEQ ID NO: 41211 - protein, 9 aa, synthetic construct
  source 1..9: note = Seed: VVGARGVGK (KRAS G12R)
LVGIRKVGH

SEQ ID NO: 41212 - protein, 9 aa, synthetic construct
  source 1..9: note = Seed: VVGARGVGK (KRAS G12R)
LVGIRKVGI

SEQ ID NO: 41213 - protein, 9 aa, synthetic construct
  source 1..9: note = Seed: VVGARGVGK (KRAS G12R)
LVGIRKVGL

SEQ ID NO: 41214 - protein, 9 aa, synthetic construct
  source 1..9: note = Seed: VVGARGVGK (KRAS G12R)
LVGIRKVGM

SEQ ID NO: 41215 - protein, 9 aa, synthetic construct
  source 1..9: note = Seed: VVGARGVGK (KRAS G12R)
LVGIRKVGN

SEQ ID NO: 41216 - protein, 9 aa, synthetic construct
  source 1..9: note = Seed: VVGARGVGK (KRAS G12R)
LVGIRKVGP

SEQ ID NO: 41217 - protein, 9 aa, synthetic construct
  source 1..9: note = Seed: VVGARGVGK (KRAS G12R)
LVGIRKVGQ

SEQ ID NO: 41218 - protein, 9 aa, synthetic construct
  source 1..9: note = Seed: VVGARGVGK (KRAS G12R)
LVGIRKVGR

SEQ ID NO: 41219 - protein, 9 aa, synthetic construct
  source 1..9: note = Seed: VVGARGVGK (KRAS G12R)
LVGIRKVGS

SEQ ID NO: 41220 - protein, 9 aa, synthetic construct
  source 1..9: note = Seed: VVGARGVGK (KRAS G12R)
LVGIRKVGT

SEQ ID NO: 41221 - protein, 9 aa, synthetic construct
  source 1..9: note = Seed: VVGARGVGK (KRAS G12R)
LVGIRKVGV

SEQ ID NO: 41222 - protein, 9 aa, synthetic construct
  source 1..9: note = Seed: VVGARGVGK (KRAS G12R)
LVGIRKVGW

SEQ ID NO: 41223 - protein, 9 aa, synthetic construct
  source 1..9: note = Seed: VVGARGVGK (KRAS G12R)
LVGIRKVGY

SEQ ID NO: 41224 - protein, 9 aa, synthetic construct
  source 1..9: note = Seed: VVGARGVGK (KRAS G12R)
LVGIRNVGA

SEQ ID NO: 41225 - protein, 9 aa, synthetic construct
  source 1..9: note = Seed: VVGARGVGK (KRAS G12R)
LVGIRNVGI

SEQ ID NO: 41226 - protein, 9 aa, synthetic construct
  source 1..9: note = Seed: VVGARGVGK (KRAS G12R)
LVGIRNVGL

SEQ ID NO: 41227 - protein, 9 aa, synthetic construct
  source 1..9: note = Seed: VVGARGVGK (KRAS G12R)
LVGIRNVGM

SEQ ID NO: 41228 - protein, 9 aa, synthetic construct
  source 1..9: note = Seed: VVGARGVGK (KRAS G12R)
LVGIRNVGN

SEQ ID NO: 41229 - protein, 9 aa, synthetic construct
  source 1..9: note = Seed: VVGARGVGK (KRAS G12R)
LVGIRNVGS

SEQ ID NO: 41230 - protein, 9 aa, synthetic construct
  source 1..9: note = Seed: VVGARGVGK (KRAS G12R)
LVGIRNVGV

SEQ ID NO: 41231 - protein, 9 aa, synthetic construct
  source 1..9: note = Seed: VVGARGVGK (KRAS G12R)
LVGIRNVGY

SEQ ID NO: 41232 - protein, 9 aa, synthetic construct
  source 1..9: note = Seed: VVGARGVGK (KRAS G12R)
LVGIRPVGA

SEQ ID NO: 41233 - protein, 9 aa, synthetic construct
  source 1..9: note = Seed: VVGARGVGK (KRAS G12R)
LVGIRPVGC

SEQ ID NO: 41234 - protein, 9 aa, synthetic construct
  source 1..9: note = Seed: VVGARGVGK (KRAS G12R)
LVGIRPVGF

SEQ ID NO: 41235 - protein, 9 aa, synthetic construct
  source 1..9: note = Seed: VVGARGVGK (KRAS G12R)
LVGIRPVGG

SEQ ID NO: 41236 - protein, 9 aa, synthetic construct
  source 1..9: note = Seed: VVGARGVGK (KRAS G12R)
LVGIRPVGH

SEQ ID NO: 41237 - protein, 9 aa, synthetic construct
  source 1..9: note = Seed: VVGARGVGK (KRAS G12R)
LVGIRPVGI

SEQ ID NO: 41238 - protein, 9 aa, synthetic construct
  source 1..9: note = Seed: VVGARGVGK (KRAS G12R)
LVGIRPVGL

SEQ ID NO: 41239 - protein, 9 aa, synthetic construct
  source 1..9: note = Seed: VVGARGVGK (KRAS G12R)
LVGIRPVGM

SEQ ID NO: 41240 - protein, 9 aa, synthetic construct
  source 1..9: note = Seed: VVGARGVGK (KRAS G12R)
LVGIRPVGN

SEQ ID NO: 41241 - protein, 9 aa, synthetic construct
  source 1..9: note = Seed: VVGARGVGK (KRAS G12R)
LVGIRPVGQ

SEQ ID NO: 41242 - protein, 9 aa, synthetic construct
  source 1..9: note = Seed: VVGARGVGK (KRAS G12R)
LVGIRPVGR

SEQ ID NO: 41243 - protein, 9 aa, synthetic construct
  source 1..9: note = Seed: VVGARGVGK (KRAS G12R)
LVGIRPVGS

SEQ ID NO: 41244 - protein, 9 aa, synthetic construct
  source 1..9: note = Seed: VVGARGVGK (KRAS G12R)
LVGIRPVGT

SEQ ID NO: 41245 - protein, 9 aa, synthetic construct
  source 1..9: note = Seed: VVGARGVGK (KRAS G12R)
LVGIRPVGV

SEQ ID NO: 41246 - protein, 9 aa, synthetic construct
  source 1..9: note = Seed: VVGARGVGK (KRAS G12R)
LVGIRPVGY

SEQ ID NO: 41247 - protein, 9 aa, synthetic construct
  source 1..9: note = Seed: VVGARGVGK (KRAS G12R)
LVGIRRVGA

SEQ ID NO: 41248 - protein, 9 aa, synthetic construct
  source 1..9: note = Seed: VVGARGVGK (KRAS G12R)
LVGIRRVGF

SEQ ID NO: 41249 - protein, 9 aa, synthetic construct
  source 1..9: note = Seed: VVGARGVGK (KRAS G12R)
LVGIRRVGG

SEQ ID NO: 41250 - protein, 9 aa, synthetic construct
  source 1..9: note = Seed: VVGARGVGK (KRAS G12R)
LVGIRRVGI

SEQ ID NO: 41251 - protein, 9 aa, synthetic construct
  source 1..9: note = Seed: VVGARGVGK (KRAS G12R)
LVGIRRVGK

SEQ ID NO: 41252 - protein, 9 aa, synthetic construct
  source 1..9: note = Seed: VVGARGVGK (KRAS G12R)
LVGIRRVGL

SEQ ID NO: 41253 - protein, 9 aa, synthetic construct
  source 1..9: note = Seed: VVGARGVGK (KRAS G12R)
LVGIRRVGM

SEQ ID NO: 41254 - protein, 9 aa, synthetic construct
  source 1..9: note = Seed: VVGARGVGK (KRAS G12R)
LVGIRRVGP

SEQ ID NO: 41255 - protein, 9 aa, synthetic construct
  source 1..9: note = Seed: VVGARGVGK (KRAS G12R)
LVGIRRVGQ

SEQ ID NO: 41256 - protein, 9 aa, synthetic construct
  source 1..9: note = Seed: VVGARGVGK (KRAS G12R)
LVGIRRVGR

SEQ ID NO: 41257 - protein, 9 aa, synthetic construct
  source 1..9: note = Seed: VVGARGVGK (KRAS G12R)
LVGIRRVGS

SEQ ID NO: 41258 - protein, 9 aa, synthetic construct
  source 1..9: note = Seed: VVGARGVGK (KRAS G12R)
LVGIRRVGT

SEQ ID NO: 41259 - protein, 9 aa, synthetic construct
  source 1..9: note = Seed: VVGARGVGK (KRAS G12R)
LVGIRRVGV

SEQ ID NO: 41260 - protein, 9 aa, synthetic construct
  source 1..9: note = Seed: VVGARGVGK (KRAS G12R)
LVGIRRVGW

SEQ ID NO: 41261 - protein, 9 aa, synthetic construct
  source 1..9: note = Seed: VVGARGVGK (KRAS G12R)
LVGIRRVGY

SEQ ID NO: 41262 - protein, 9 aa, synthetic construct
  source 1..9: note = Seed: VVGARGVGK (KRAS G12R)
LVGIRSVGA

SEQ ID NO: 41263 - protein, 9 aa, synthetic construct
  source 1..9: note = Seed: VVGARGVGK (KRAS G12R)
LVGIRSVGC

SEQ ID NO: 41264 - protein, 9 aa, synthetic construct
  source 1..9: note = Seed: VVGARGVGK (KRAS G12R)
LVGIRSVGF

SEQ ID NO: 41265 - protein, 9 aa, synthetic construct
  source 1..9: note = Seed: VVGARGVGK (KRAS G12R)
LVGIRSVGG

SEQ ID NO: 41266 - protein, 9 aa, synthetic construct
  source 1..9: note = Seed: VVGARGVGK (KRAS G12R)
LVGIRSVGI

SEQ ID NO: 41267 - protein, 9 aa, synthetic construct
  source 1..9: note = Seed: VVGARGVGK (KRAS G12R)
LVGIRSVGL

SEQ ID NO: 41268 - protein, 9 aa, synthetic construct
  source 1..9: note = Seed: VVGARGVGK (KRAS G12R)
LVGIRSVGM

SEQ ID NO: 41269 - protein, 9 aa, synthetic construct
  source 1..9: note = Seed: VVGARGVGK (KRAS G12R)
LVGIRSVGN

SEQ ID NO: 41270 - protein, 9 aa, synthetic construct
  source 1..9: note = Seed: VVGARGVGK (KRAS G12R)
LVGIRSVGR

SEQ ID NO: 41271 - protein, 9 aa, synthetic construct
  source 1..9: note = Seed: VVGARGVGK (KRAS G12R)
LVGIRSVGS

SEQ ID NO: 41272 - protein, 9 aa, synthetic construct
  source 1..9: note = Seed: VVGARGVGK (KRAS G12R)
LVGIRSVGT

SEQ ID NO: 41273 - protein, 9 aa, synthetic construct
  source 1..9: note = Seed: VVGARGVGK (KRAS G12R)
LVGIRSVGV

SEQ ID NO: 41274 - protein, 9 aa, synthetic construct
  source 1..9: note = Seed: VVGARGVGK (KRAS G12R)
LVGIRSVGY

SEQ ID NO: 41275 - protein, 9 aa, synthetic construct
  source 1..9: note = Seed: VVGARGVGK (KRAS G12R)
LVGIRTVGA

SEQ ID NO: 41276 - protein, 9 aa, synthetic construct
  source 1..9: note = Seed: VVGARGVGK (KRAS G12R)
LVGIRTVGI

SEQ ID NO: 41277 - protein, 9 aa, synthetic construct
  source 1..9: note = Seed: VVGARGVGK (KRAS G12R)
LVGIRTVGL

SEQ ID NO: 41278 - protein, 9 aa, synthetic construct
  source 1..9: note = Seed: VVGARGVGK (KRAS G12R)
LVGIRTVGM

SEQ ID NO: 41279 - protein, 9 aa, synthetic construct
  source 1..9: note = Seed: VVGARGVGK (KRAS G12R)
LVGIRTVGN

SEQ ID NO: 41280 - protein, 9 aa, synthetic construct
  source 1..9: note = Seed: VVGARGVGK (KRAS G12R)
LVGIRTVGS

SEQ ID NO: 41281 - protein, 9 aa, synthetic construct
  source 1..9: note = Seed: VVGARGVGK (KRAS G12R)
LVGIRTVGT

SEQ ID NO: 41282 - protein, 9 aa, synthetic construct
  source 1..9: note = Seed: VVGARGVGK (KRAS G12R)
LVGIRTVGV

SEQ ID NO: 41283 - protein, 9 aa, synthetic construct
  source 1..9: note = Seed: VVGARGVGK (KRAS G12R)
LVGIRTVGY

SEQ ID NO: 41284 - protein, 9 aa, synthetic construct
  source 1..9: note = Seed: VVGARGVGK (KRAS G12R)
LVGIRVVGA

SEQ ID NO: 41285 - protein, 9 aa, synthetic construct
  source 1..9: note = Seed: VVGARGVGK (KRAS G12R)
LVGIRVVGH

SEQ ID NO: 41286 - protein, 9 aa, synthetic construct
  source 1..9: note = Seed: VVGARGVGK (KRAS G12R)
LVGIRVVGI

SEQ ID NO: 41287 - protein, 9 aa, synthetic construct
  source 1..9: note = Seed: VVGARGVGK (KRAS G12R)
LVGIRVVGM

SEQ ID NO: 41288 - protein, 9 aa, synthetic construct
  source 1..9: note = Seed: VVGARGVGK (KRAS G12R)
LVGIRVVGN

SEQ ID NO: 41289 - protein, 9 aa, synthetic construct
  source 1..9: note = Seed: VVGARGVGK (KRAS G12R)
LVGIRVVGS

SEQ ID NO: 41290 - protein, 9 aa, synthetic construct
  source 1..9: note = Seed: VVGARGVGK (KRAS G12R)
LVGIRVVGV

SEQ ID NO: 41291 - protein, 9 aa, synthetic construct
  source 1..9: note = Seed: VVGARGVGK (KRAS G12R)
LVGKRAVGF

SEQ ID NO: 41292 - protein, 9 aa, synthetic construct
  source 1..9: note = Seed: VVGARGVGK (KRAS G12R)
LVGKRAVGI

SEQ ID NO: 41293 - protein, 9 aa, synthetic construct
  source 1..9: note = Seed: VVGARGVGK (KRAS G12R)
LVGKRAVGK

SEQ ID NO: 41294 - protein, 9 aa, synthetic construct
  source 1..9: note = Seed: VVGARGVGK (KRAS G12R)
LVGKRAVGL

SEQ ID NO: 41295 - protein, 9 aa, synthetic construct
  source 1..9: note = Seed: VVGARGVGK (KRAS G12R)
LVGKRAVGM

SEQ ID NO: 41296 - protein, 9 aa, synthetic construct
  source 1..9: note = Seed: VVGARGVGK (KRAS G12R)
LVGKRAVGR

SEQ ID NO: 41297 - protein, 9 aa, synthetic construct
  source 1..9: note = Seed: VVGARGVGK (KRAS G12R)
LVGKRAVGV

SEQ ID NO: 41298 - protein, 9 aa, synthetic construct
  source 1..9: note = Seed: VVGARGVGK (KRAS G12R)
LVGKRAVGY

SEQ ID NO: 41299 - protein, 9 aa, synthetic construct
  source 1..9: note = Seed: VVGARGVGK (KRAS G12R)
LVGKRGVGR

SEQ ID NO: 41300 - protein, 9 aa, synthetic construct
  source 1..9: note = Seed: VVGARGVGK (KRAS G12R)
LVGKRGVGY

SEQ ID NO: 41301 - protein, 9 aa, synthetic construct
  source 1..9: note = Seed: VVGARGVGK (KRAS G12R)
LVGKRHVGF

SEQ ID NO: 41302 - protein, 9 aa, synthetic construct
  source 1..9: note = Seed: VVGARGVGK (KRAS G12R)
LVGKRHVGM

SEQ ID NO: 41303 - protein, 9 aa, synthetic construct
  source 1..9: note = Seed: VVGARGVGK (KRAS G12R)
LVGKRHVGR

SEQ ID NO: 41304 - protein, 9 aa, synthetic construct
  source 1..9: note = Seed: VVGARGVGK (KRAS G12R)
LVGKRHVGY

SEQ ID NO: 41305 - protein, 9 aa, synthetic construct
  source 1..9: note = Seed: VVGARGVGK (KRAS G12R)
LVGKRIVGK

SEQ ID NO: 41306 - protein, 9 aa, synthetic construct
  source 1..9: note = Seed: VVGARGVGK (KRAS G12R)
LVGKRIVGR

SEQ ID NO: 41307 - protein, 9 aa, synthetic construct
  source 1..9: note = Seed: VVGARGVGK (KRAS G12R)
LVGKRIVGY

SEQ ID NO: 41308 - protein, 9 aa, synthetic construct
  source 1..9: note = Seed: VVGARGVGK (KRAS G12R)
LVGKRKVGA

SEQ ID NO: 41309 - protein, 9 aa, synthetic construct
  source 1..9: note = Seed: VVGARGVGK (KRAS G12R)
LVGKRKVGF

SEQ ID NO: 41310 - protein, 9 aa, synthetic construct
  source 1..9: note = Seed: VVGARGVGK (KRAS G12R)
LVGKRKVGG

SEQ ID NO: 41311 - protein, 9 aa, synthetic construct
  source 1..9: note = Seed: VVGARGVGK (KRAS G12R)
LVGKRKVGH

SEQ ID NO: 41312 - protein, 9 aa, synthetic construct
  source 1..9: note = Seed: VVGARGVGK (KRAS G12R)
LVGKRKVGI

SEQ ID NO: 41313 - protein, 9 aa, synthetic construct
  source 1..9: note = Seed: VVGARGVGK (KRAS G12R)
LVGKRKVGK

SEQ ID NO: 41314 - protein, 9 aa, synthetic construct
  source 1..9: note = Seed: VVGARGVGK (KRAS G12R)
LVGKRKVGL

SEQ ID NO: 41315 - protein, 9 aa, synthetic construct
  source 1..9: note = Seed: VVGARGVGK (KRAS G12R)
LVGKRKVGM

SEQ ID NO: 41316 - protein, 9 aa, synthetic construct
  source 1..9: note = Seed: VVGARGVGK (KRAS G12R)
LVGKRKVGN

SEQ ID NO: 41317 - protein, 9 aa, synthetic construct
  source 1..9: note = Seed: VVGARGVGK (KRAS G12R)
LVGKRKVGQ

SEQ ID NO: 41318 - protein, 9 aa, synthetic construct
  source 1..9: note = Seed: VVGARGVGK (KRAS G12R)
LVGKRKVGR

SEQ ID NO: 41319 - protein, 9 aa, synthetic construct
  source 1..9: note = Seed: VVGARGVGK (KRAS G12R)
LVGKRKVGS

SEQ ID NO: 41320 - protein, 9 aa, synthetic construct
  source 1..9: note = Seed: VVGARGVGK (KRAS G12R)
LVGKRKVGT

SEQ ID NO: 41321 - protein, 9 aa, synthetic construct
  source 1..9: note = Seed: VVGARGVGK (KRAS G12R)
LVGKRKVGV

SEQ ID NO: 41322 - protein, 9 aa, synthetic construct
  source 1..9: note = Seed: VVGARGVGK (KRAS G12R)
LVGKRKVGW

SEQ ID NO: 41323 - protein, 9 aa, synthetic construct
  source 1..9: note = Seed: VVGARGVGK (KRAS G12R)
LVGKRKVGY

SEQ ID NO: 41324 - protein, 9 aa, synthetic construct
  source 1..9: note = Seed: VVGARGVGK (KRAS G12R)
LVGKRLVGR

SEQ ID NO: 41325 - protein, 9 aa, synthetic construct
  source 1..9: note = Seed: VVGARGVGK (KRAS G12R)
LVGKRLVGY

SEQ ID NO: 41326 - protein, 9 aa, synthetic construct
  source 1..9: note = Seed: VVGARGVGK (KRAS G12R)
LVGKRMVGR

SEQ ID NO: 41327 - protein, 9 aa, synthetic construct
  source 1..9: note = Seed: VVGARGVGK (KRAS G12R)
LVGKRMVGY

SEQ ID NO: 41328 - protein, 9 aa, synthetic construct
  source 1..9: note = Seed: VVGARGVGK (KRAS G12R)
LVGKRNVGF

SEQ ID NO: 41329 - protein, 9 aa, synthetic construct
  source 1..9: note = Seed: VVGARGVGK (KRAS G12R)
LVGKRNVGI

SEQ ID NO: 41330 - protein, 9 aa, synthetic construct
  source 1..9: note = Seed: VVGARGVGK (KRAS G12R)
LVGKRNVGK

SEQ ID NO: 41331 - protein, 9 aa, synthetic construct
  source 1..9: note = Seed: VVGARGVGK (KRAS G12R)
LVGKRNVGL

SEQ ID NO: 41332 - protein, 9 aa, synthetic construct
  source 1..9: note = Seed: VVGARGVGK (KRAS G12R)
LVGKRNVGM

SEQ ID NO: 41333 - protein, 9 aa, synthetic construct
  source 1..9: note = Seed: VVGARGVGK (KRAS G12R)
LVGKRNVGR

SEQ ID NO: 41334 - protein, 9 aa, synthetic construct
  source 1..9: note = Seed: VVGARGVGK (KRAS G12R)
LVGKRNVGV

SEQ ID NO: 41335 - protein, 9 aa, synthetic construct
  source 1..9: note = Seed: VVGARGVGK (KRAS G12R)
LVGKRNVGY

SEQ ID NO: 41336 - protein, 9 aa, synthetic construct
  source 1..9: note = Seed: VVGARGVGK (KRAS G12R)
LVGKRPVGF

SEQ ID NO: 41337 - protein, 9 aa, synthetic construct
  source 1..9: note = Seed: VVGARGVGK (KRAS G12R)
LVGKRPVGI

SEQ ID NO: 41338 - protein, 9 aa, synthetic construct
  source 1..9: note = Seed: VVGARGVGK (KRAS G12R)
LVGKRPVGK

SEQ ID NO: 41339 - protein, 9 aa, synthetic construct
  source 1..9: note = Seed: VVGARGVGK (KRAS G12R)
LVGKRPVGL

SEQ ID NO: 41340 - protein, 9 aa, synthetic construct
  source 1..9: note = Seed: VVGARGVGK (KRAS G12R)
LVGKRPVGM

SEQ ID NO: 41341 - protein, 9 aa, synthetic construct
  source 1..9: note = Seed: VVGARGVGK (KRAS G12R)
LVGKRPVGR

SEQ ID NO: 41342 - protein, 9 aa, synthetic construct
  source 1..9: note = Seed: VVGARGVGK (KRAS G12R)
LVGKRPVGV

SEQ ID NO: 41343 - protein, 9 aa, synthetic construct
  source 1..9: note = Seed: VVGARGVGK (KRAS G12R)
LVGKRPVGY

SEQ ID NO: 41344 - protein, 9 aa, synthetic construct
  source 1..9: note = Seed: VVGARGVGK (KRAS G12R)
LVGKRQVGK

SEQ ID NO: 41345 - protein, 9 aa, synthetic construct
  source 1..9: note = Seed: VVGARGVGK (KRAS G12R)
LVGKRQVGR

SEQ ID NO: 41346 - protein, 9 aa, synthetic construct
  source 1..9: note = Seed: VVGARGVGK (KRAS G12R)
LVGKRQVGY

SEQ ID NO: 41347 - protein, 9 aa, synthetic construct
  source 1..9: note = Seed: VVGARGVGK (KRAS G12R)
LVGKRRVGA

SEQ ID NO: 41348 - protein, 9 aa, synthetic construct
  source 1..9: note = Seed: VVGARGVGK (KRAS G12R)
LVGKRRVGC

SEQ ID NO: 41349 - protein, 9 aa, synthetic construct
  source 1..9: note = Seed: VVGARGVGK (KRAS G12R)
LVGKRRVGD

SEQ ID NO: 41350 - protein, 9 aa, synthetic construct
  source 1..9: note = Seed: VVGARGVGK (KRAS G12R)
LVGKRRVGE

SEQ ID NO: 41351 - protein, 9 aa, synthetic construct
  source 1..9: note = Seed: VVGARGVGK (KRAS G12R)
LVGKRRVGF

SEQ ID NO: 41352 - protein, 9 aa, synthetic construct
  source 1..9: note = Seed: VVGARGVGK (KRAS G12R)
LVGKRRVGG

SEQ ID NO: 41353 - protein, 9 aa, synthetic construct
  source 1..9: note = Seed: VVGARGVGK (KRAS G12R)
LVGKRRVGH

SEQ ID NO: 41354 - protein, 9 aa, synthetic construct
  source 1..9: note = Seed: VVGARGVGK (KRAS G12R)
LVGKRRVGI

SEQ ID NO: 41355 - protein, 9 aa, synthetic construct
  source 1..9: note = Seed: VVGARGVGK (KRAS G12R)
LVGKRRVGK

SEQ ID NO: 41356 - protein, 9 aa, synthetic construct
  source 1..9: note = Seed: VVGARGVGK (KRAS G12R)
LVGKRRVGL

SEQ ID NO: 41357 - protein, 9 aa, synthetic construct
  source 1..9: note = Seed: VVGARGVGK (KRAS G12R)
LVGKRRVGM

SEQ ID NO: 41358 - protein, 9 aa, synthetic construct
  source 1..9: note = Seed: VVGARGVGK (KRAS G12R)
LVGKRRVGN

SEQ ID NO: 41359 - protein, 9 aa, synthetic construct
  source 1..9: note = Seed: VVGARGVGK (KRAS G12R)
LVGKRRVGP

SEQ ID NO: 41360 - protein, 9 aa, synthetic construct
  source 1..9: note = Seed: VVGARGVGK (KRAS G12R)
LVGKRRVGQ

SEQ ID NO: 41361 - protein, 9 aa, synthetic construct
  source 1..9: note = Seed: VVGARGVGK (KRAS G12R)
LVGKRRVGR

SEQ ID NO: 41362 - protein, 9 aa, synthetic construct
  source 1..9: note = Seed: VVGARGVGK (KRAS G12R)
LVGKRRVGS

SEQ ID NO: 41363 - protein, 9 aa, synthetic construct
  source 1..9: note = Seed: VVGARGVGK (KRAS G12R)
LVGKRRVGT

SEQ ID NO: 41364 - protein, 9 aa, synthetic construct
  source 1..9: note = Seed: VVGARGVGK (KRAS G12R)
LVGKRRVGV

SEQ ID NO: 41365 - protein, 9 aa, synthetic construct
  source 1..9: note = Seed: VVGARGVGK (KRAS G12R)
LVGKRRVGW

SEQ ID NO: 41366 - protein, 9 aa, synthetic construct
  source 1..9: note = Seed: VVGARGVGK (KRAS G12R)
LVGKRRVGY

SEQ ID NO: 41367 - protein, 9 aa, synthetic construct
  source 1..9: note = Seed: VVGARGVGK (KRAS G12R)
LVGKRSVGF

SEQ ID NO: 41368 - protein, 9 aa, synthetic construct
  source 1..9: note = Seed: VVGARGVGK (KRAS G12R)
LVGKRSVGI

SEQ ID NO: 41369 - protein, 9 aa, synthetic construct
  source 1..9: note = Seed: VVGARGVGK (KRAS G12R)
LVGKRSVGK

SEQ ID NO: 41370 - protein, 9 aa, synthetic construct
  source 1..9: note = Seed: VVGARGVGK (KRAS G12R)
LVGKRSVGL

SEQ ID NO: 41371 - protein, 9 aa, synthetic construct
  source 1..9: note = Seed: VVGARGVGK (KRAS G12R)
LVGKRSVGM

SEQ ID NO: 41372 - protein, 9 aa, synthetic construct
  source 1..9: note = Seed: VVGARGVGK (KRAS G12R)
LVGKRSVGR

SEQ ID NO: 41373 - protein, 9 aa, synthetic construct
  source 1..9: note = Seed: VVGARGVGK (KRAS G12R)
LVGKRSVGV

SEQ ID NO: 41374 - protein, 9 aa, synthetic construct
  source 1..9: note = Seed: VVGARGVGK (KRAS G12R)
LVGKRSVGY

SEQ ID NO: 41375 - protein, 9 aa, synthetic construct
  source 1..9: note = Seed: VVGARGVGK (KRAS G12R)
LVGKRTVGF

SEQ ID NO: 41376 - protein, 9 aa, synthetic construct
  source 1..9: note = Seed: VVGARGVGK (KRAS G12R)
LVGKRTVGK

SEQ ID NO: 41377 - protein, 9 aa, synthetic construct
  source 1..9: note = Seed: VVGARGVGK (KRAS G12R)
LVGKRTVGR

SEQ ID NO: 41378 - protein, 9 aa, synthetic construct
  source 1..9: note = Seed: VVGARGVGK (KRAS G12R)
LVGKRTVGY

SEQ ID NO: 41379 - protein, 9 aa, synthetic construct
  source 1..9: note = Seed: VVGARGVGK (KRAS G12R)
LVGKRVVGK

SEQ ID NO: 41380 - protein, 9 aa, synthetic construct
  source 1..9: note = Seed: VVGARGVGK (KRAS G12R)
LVGKRVVGR

SEQ ID NO: 41381 - protein, 9 aa, synthetic construct
  source 1..9: note = Seed: VVGARGVGK (KRAS G12R)
LVGKRVVGY

SEQ ID NO: 41382 - protein, 9 aa, synthetic construct
  source 1..9: note = Seed: VVGARGVGK (KRAS G12R)
LVGLRAVGA

SEQ ID NO: 41383 - protein, 9 aa, synthetic construct
  source 1..9: note = Seed: VVGARGVGK (KRAS G12R)
LVGLRAVGC

SEQ ID NO: 41384 - protein, 9 aa, synthetic construct
  source 1..9: note = Seed: VVGARGVGK (KRAS G12R)
LVGLRAVGD

SEQ ID NO: 41385 - protein, 9 aa, synthetic construct
  source 1..9: note = Seed: VVGARGVGK (KRAS G12R)
LVGLRAVGE

SEQ ID NO: 41386 - protein, 9 aa, synthetic construct
  source 1..9: note = Seed: VVGARGVGK (KRAS G12R)
LVGLRAVGF

SEQ ID NO: 41387 - protein, 9 aa, synthetic construct
  source 1..9: note = Seed: VVGARGVGK (KRAS G12R)
LVGLRAVGG

SEQ ID NO: 41388 - protein, 9 aa, synthetic construct
  source 1..9: note = Seed: VVGARGVGK (KRAS G12R)
LVGLRAVGH

SEQ ID NO: 41389 - protein, 9 aa, synthetic construct
  source 1..9: note = Seed: VVGARGVGK (KRAS G12R)
LVGLRAVGI

SEQ ID NO: 41390 - protein, 9 aa, synthetic construct
  source 1..9: note = Seed: VVGARGVGK (KRAS G12R)
LVGLRAVGK

SEQ ID NO: 41391 - protein, 9 aa, synthetic construct
  source 1..9: note = Seed: VVGARGVGK (KRAS G12R)
LVGLRAVGL

SEQ ID NO: 41392 - protein, 9 aa, synthetic construct
  source 1..9: note = Seed: VVGARGVGK (KRAS G12R)
LVGLRAVGM

SEQ ID NO: 41393 - protein, 9 aa, synthetic construct
  source 1..9: note = Seed: VVGARGVGK (KRAS G12R)
LVGLRAVGN

SEQ ID NO: 41394 - protein, 9 aa, synthetic construct
  source 1..9: note = Seed: VVGARGVGK (KRAS G12R)
LVGLRAVGQ

SEQ ID NO: 41395 - protein, 9 aa, synthetic construct
  source 1..9: note = Seed: VVGARGVGK (KRAS G12R)
LVGLRAVGR

SEQ ID NO: 41396 - protein, 9 aa, synthetic construct
  source 1..9: note = Seed: VVGARGVGK (KRAS G12R)
LVGLRAVGS

SEQ ID NO: 41397 - protein, 9 aa, synthetic construct
  source 1..9: note = Seed: VVGARGVGK (KRAS G12R)
LVGLRAVGT

SEQ ID NO: 41398 - protein, 9 aa, synthetic construct
  source 1..9: note = Seed: VVGARGVGK (KRAS G12R)
LVGLRAVGV

SEQ ID NO: 41399 - protein, 9 aa, synthetic construct
  source 1..9: note = Seed: VVGARGVGK (KRAS G12R)
LVGLRAVGW

SEQ ID NO: 41400 - protein, 9 aa, synthetic construct
  source 1..9: note = Seed: VVGARGVGK (KRAS G12R)
LVGLRAVGY

SEQ ID NO: 41401 - protein, 9 aa, synthetic construct
  source 1..9: note = Seed: VVGARGVGK (KRAS G12R)
LVGLREVGA

SEQ ID NO: 41402 - protein, 9 aa, synthetic construct
  source 1..9: note = Seed: VVGARGVGK (KRAS G12R)
LVGLREVGV

SEQ ID NO: 41403 - protein, 9 aa, synthetic construct
  source 1..9: note = Seed: VVGARGVGK (KRAS G12R)
LVGLRGVGA

SEQ ID NO: 41404 - protein, 9 aa, synthetic construct
  source 1..9: note = Seed: VVGARGVGK (KRAS G12R)
LVGLRGVGC

SEQ ID NO: 41405 - protein, 9 aa, synthetic construct
  source 1..9: note = Seed: VVGARGVGK (KRAS G12R)
LVGLRGVGF

SEQ ID NO: 41406 - protein, 9 aa, synthetic construct
  source 1..9: note = Seed: VVGARGVGK (KRAS G12R)
LVGLRGVGG

SEQ ID NO: 41407 - protein, 9 aa, synthetic construct
  source 1..9: note = Seed: VVGARGVGK (KRAS G12R)
LVGLRGVGH

SEQ ID NO: 41408 - protein, 9 aa, synthetic construct
  source 1..9: note = Seed: VVGARGVGK (KRAS G12R)
LVGLRGVGI

SEQ ID NO: 41409 - protein, 9 aa, synthetic construct
  source 1..9: note = Seed: VVGARGVGK (KRAS G12R)
LVGLRGVGK

SEQ ID NO: 41410 - protein, 9 aa, synthetic construct
  source 1..9: note = Seed: VVGARGVGK (KRAS G12R)
LVGLRGVGL

SEQ ID NO: 41411 - protein, 9 aa, synthetic construct
  source 1..9: note = Seed: VVGARGVGK (KRAS G12R)
LVGLRGVGM

SEQ ID NO: 41412 - protein, 9 aa, synthetic construct
  source 1..9: note = Seed: VVGARGVGK (KRAS G12R)
LVGLRGVGN

SEQ ID NO: 41413 - protein, 9 aa, synthetic construct
  source 1..9: note = Seed: VVGARGVGK (KRAS G12R)
LVGLRGVGP

SEQ ID NO: 41414 - protein, 9 aa, synthetic construct
  source 1..9: note = Seed: VVGARGVGK (KRAS G12R)
LVGLRGVGQ

SEQ ID NO: 41415 - protein, 9 aa, synthetic construct
  source 1..9: note = Seed: VVGARGVGK (KRAS G12R)
LVGLRGVGR

SEQ ID NO: 41416 - protein, 9 aa, synthetic construct
  source 1..9: note = Seed: VVGARGVGK (KRAS G12R)
LVGLRGVGS

SEQ ID NO: 41417 - protein, 9 aa, synthetic construct
  source 1..9: note = Seed: VVGARGVGK (KRAS G12R)
LVGLRGVGT

SEQ ID NO: 41418 - protein, 9 aa, synthetic construct
  source 1..9: note = Seed: VVGARGVGK (KRAS G12R)
LVGLRGVGV

SEQ ID NO: 41419 - protein, 9 aa, synthetic construct
  source 1..9: note = Seed: VVGARGVGK (KRAS G12R)
LVGLRGVGY

SEQ ID NO: 41420 - protein, 9 aa, synthetic construct
  source 1..9: note = Seed: VVGARGVGK (KRAS G12R)
LVGLRHVGI

SEQ ID NO: 41421 - protein, 9 aa, synthetic construct
  source 1..9: note = Seed: VVGARGVGK (KRAS G12R)
LVGLRHVGL

SEQ ID NO: 41422 - protein, 9 aa, synthetic construct
  source 1..9: note = Seed: VVGARGVGK (KRAS G12R)
LVGLRHVGM

SEQ ID NO: 41423 - protein, 9 aa, synthetic construct
  source 1..9: note = Seed: VVGARGVGK (KRAS G12R)
LVGLRHVGR

SEQ ID NO: 41424 - protein, 9 aa, synthetic construct
  source 1..9: note = Seed: VVGARGVGK (KRAS G12R)
LVGLRHVGV

SEQ ID NO: 41425 - protein, 9 aa, synthetic construct
  source 1..9: note = Seed: VVGARGVGK (KRAS G12R)
LVGLRIVGA

SEQ ID NO: 41426 - protein, 9 aa, synthetic construct
  source 1..9: note = Seed: VVGARGVGK (KRAS G12R)
LVGLRIVGH

SEQ ID NO: 41427 - protein, 9 aa, synthetic construct
  source 1..9: note = Seed: VVGARGVGK (KRAS G12R)
LVGLRIVGI

SEQ ID NO: 41428 - protein, 9 aa, synthetic construct
  source 1..9: note = Seed: VVGARGVGK (KRAS G12R)
LVGLRIVGL

SEQ ID NO: 41429 - protein, 9 aa, synthetic construct
  source 1..9: note = Seed: VVGARGVGK (KRAS G12R)
LVGLRIVGM

SEQ ID NO: 41430 - protein, 9 aa, synthetic construct
  source 1..9: note = Seed: VVGARGVGK (KRAS G12R)
LVGLRIVGN

SEQ ID NO: 41431 - protein, 9 aa, synthetic construct
  source 1..9: note = Seed: VVGARGVGK (KRAS G12R)
LVGLRIVGS

SEQ ID NO: 41432 - protein, 9 aa, synthetic construct
  source 1..9: note = Seed: VVGARGVGK (KRAS G12R)
LVGLRIVGT

SEQ ID NO: 41433 - protein, 9 aa, synthetic construct
  source 1..9: note = Seed: VVGARGVGK (KRAS G12R)
LVGLRIVGV

SEQ ID NO: 41434 - protein, 9 aa, synthetic construct
  source 1..9: note = Seed: VVGARGVGK (KRAS G12R)
LVGLRKVGA

SEQ ID NO: 41435 - protein, 9 aa, synthetic construct
  source 1..9: note = Seed: VVGARGVGK (KRAS G12R)
LVGLRKVGF

SEQ ID NO: 41436 - protein, 9 aa, synthetic construct
  source 1..9: note = Seed: VVGARGVGK (KRAS G12R)
LVGLRKVGH

SEQ ID NO: 41437 - protein, 9 aa, synthetic construct
  source 1..9: note = Seed: VVGARGVGK (KRAS G12R)
LVGLRKVGI

SEQ ID NO: 41438 - protein, 9 aa, synthetic construct
  source 1..9: note = Seed: VVGARGVGK (KRAS G12R)
LVGLRKVGL

SEQ ID NO: 41439 - protein, 9 aa, synthetic construct
  source 1..9: note = Seed: VVGARGVGK (KRAS G12R)
LVGLRKVGM

SEQ ID NO: 41440 - protein, 9 aa, synthetic construct
  source 1..9: note = Seed: VVGARGVGK (KRAS G12R)
LVGLRKVGR

SEQ ID NO: 41441 - protein, 9 aa, synthetic construct
  source 1..9: note = Seed: VVGARGVGK (KRAS G12R)
LVGLRKVGS

SEQ ID NO: 41442 - protein, 9 aa, synthetic construct
  source 1..9: note = Seed: VVGARGVGK (KRAS G12R)
LVGLRKVGT

SEQ ID NO: 41443 - protein, 9 aa, synthetic construct
  source 1..9: note = Seed: VVGARGVGK (KRAS G12R)
LVGLRKVGV

SEQ ID NO: 41444 - protein, 9 aa, synthetic construct
  source 1..9: note = Seed: VVGARGVGK (KRAS G12R)
LVGLRKVGY

SEQ ID NO: 41445 - protein, 9 aa, synthetic construct
  source 1..9: note = Seed: VVGARGVGK (KRAS G12R)
LVGLRLVGN

SEQ ID NO: 41446 - protein, 9 aa, synthetic construct
  source 1..9: note = Seed: VVGARGVGK (KRAS G12R)
LVGLRLVGS

SEQ ID NO: 41447 - protein, 9 aa, synthetic construct
  source 1..9: note = Seed: VVGARGVGK (KRAS G12R)
LVGLRMVGI

SEQ ID NO: 41448 - protein, 9 aa, synthetic construct
  source 1..9: note = Seed: VVGARGVGK (KRAS G12R)
LVGLRMVGL

SEQ ID NO: 41449 - protein, 9 aa, synthetic construct
  source 1..9: note = Seed: VVGARGVGK (KRAS G12R)
LVGLRMVGM

SEQ ID NO: 41450 - protein, 9 aa, synthetic construct
  source 1..9: note = Seed: VVGARGVGK (KRAS G12R)
LVGLRNVGA

SEQ ID NO: 41451 - protein, 9 aa, synthetic construct
  source 1..9: note = Seed: VVGARGVGK (KRAS G12R)
LVGLRNVGC

SEQ ID NO: 41452 - protein, 9 aa, synthetic construct
  source 1..9: note = Seed: VVGARGVGK (KRAS G12R)
LVGLRNVGG

SEQ ID NO: 41453 - protein, 9 aa, synthetic construct
  source 1..9: note = Seed: VVGARGVGK (KRAS G12R)
LVGLRNVGI

SEQ ID NO: 41454 - protein, 9 aa, synthetic construct
  source 1..9: note = Seed: VVGARGVGK (KRAS G12R)
LVGLRNVGL

SEQ ID NO: 41455 - protein, 9 aa, synthetic construct
  source 1..9: note = Seed: VVGARGVGK (KRAS G12R)
LVGLRNVGM

SEQ ID NO: 41456 - protein, 9 aa, synthetic construct
  source 1..9: note = Seed: VVGARGVGK (KRAS G12R)
LVGLRNVGN

SEQ ID NO: 41457 - protein, 9 aa, synthetic construct
  source 1..9: note = Seed: VVGARGVGK (KRAS G12R)
LVGLRNVGR

SEQ ID NO: 41458 - protein, 9 aa, synthetic construct
  source 1..9: note = Seed: VVGARGVGK (KRAS G12R)
LVGLRNVGS

SEQ ID NO: 41459 - protein, 9 aa, synthetic construct
  source 1..9: note = Seed: VVGARGVGK (KRAS G12R)
LVGLRNVGT

SEQ ID NO: 41460 - protein, 9 aa, synthetic construct
  source 1..9: note = Seed: VVGARGVGK (KRAS G12R)
LVGLRNVGV

SEQ ID NO: 41461 - protein, 9 aa, synthetic construct
  source 1..9: note = Seed: VVGARGVGK (KRAS G12R)
LVGLRPVGA

SEQ ID NO: 41462 - protein, 9 aa, synthetic construct
  source 1..9: note = Seed: VVGARGVGK (KRAS G12R)
LVGLRPVGC

SEQ ID NO: 41463 - protein, 9 aa, synthetic construct
  source 1..9: note = Seed: VVGARGVGK (KRAS G12R)
LVGLRPVGD

SEQ ID NO: 41464 - protein, 9 aa, synthetic construct
  source 1..9: note = Seed: VVGARGVGK (KRAS G12R)
LVGLRPVGE

SEQ ID NO: 41465 - protein, 9 aa, synthetic construct
  source 1..9: note = Seed: VVGARGVGK (KRAS G12R)
LVGLRPVGF

SEQ ID NO: 41466 - protein, 9 aa, synthetic construct
  source 1..9: note = Seed: VVGARGVGK (KRAS G12R)
LVGLRPVGG

SEQ ID NO: 41467 - protein, 9 aa, synthetic construct
  source 1..9: note = Seed: VVGARGVGK (KRAS G12R)
LVGLRPVGH

SEQ ID NO: 41468 - protein, 9 aa, synthetic construct
  source 1..9: note = Seed: VVGARGVGK (KRAS G12R)
LVGLRPVGI

SEQ ID NO: 41469 - protein, 9 aa, synthetic construct
  source 1..9: note = Seed: VVGARGVGK (KRAS G12R)
LVGLRPVGK

SEQ ID NO: 41470 - protein, 9 aa, synthetic construct
  source 1..9: note = Seed: VVGARGVGK (KRAS G12R)
LVGLRPVGL

SEQ ID NO: 41471 - protein, 9 aa, synthetic construct
  source 1..9: note = Seed: VVGARGVGK (KRAS G12R)
LVGLRPVGM

SEQ ID NO: 41472 - protein, 9 aa, synthetic construct
  source 1..9: note = Seed: VVGARGVGK (KRAS G12R)
LVGLRPVGN

SEQ ID NO: 41473 - protein, 9 aa, synthetic construct
  source 1..9: note = Seed: VVGARGVGK (KRAS G12R)
LVGLRPVGP

SEQ ID NO: 41474 - protein, 9 aa, synthetic construct
  source 1..9: note = Seed: VVGARGVGK (KRAS G12R)
LVGLRPVGQ

SEQ ID NO: 41475 - protein, 9 aa, synthetic construct
  source 1..9: note = Seed: VVGARGVGK (KRAS G12R)
LVGLRPVGR

SEQ ID NO: 41476 - protein, 9 aa, synthetic construct
  source 1..9: note = Seed: VVGARGVGK (KRAS G12R)
LVGLRPVGS

SEQ ID NO: 41477 - protein, 9 aa, synthetic construct
  source 1..9: note = Seed: VVGARGVGK (KRAS G12R)
LVGLRPVGT

SEQ ID NO: 41478 - protein, 9 aa, synthetic construct
  source 1..9: note = Seed: VVGARGVGK (KRAS G12R)
LVGLRPVGV

SEQ ID NO: 41479 - protein, 9 aa, synthetic construct
  source 1..9: note = Seed: VVGARGVGK (KRAS G12R)
LVGLRPVGW

SEQ ID NO: 41480 - protein, 9 aa, synthetic construct
  source 1..9: note = Seed: VVGARGVGK (KRAS G12R)
LVGLRPVGY

SEQ ID NO: 41481 - protein, 9 aa, synthetic construct
  source 1..9: note = Seed: VVGARGVGK (KRAS G12R)
LVGLRQVGL

SEQ ID NO: 41482 - protein, 9 aa, synthetic construct
  source 1..9: note = Seed: VVGARGVGK (KRAS G12R)
LVGLRQVGV

SEQ ID NO: 41483 - protein, 9 aa, synthetic construct
  source 1..9: note = Seed: VVGARGVGK (KRAS G12R)
LVGLRRVGA

SEQ ID NO: 41484 - protein, 9 aa, synthetic construct
  source 1..9: note = Seed: VVGARGVGK (KRAS G12R)
LVGLRRVGF

SEQ ID NO: 41485 - protein, 9 aa, synthetic construct
  source 1..9: note = Seed: VVGARGVGK (KRAS G12R)
LVGLRRVGG

SEQ ID NO: 41486 - protein, 9 aa, synthetic construct
  source 1..9: note = Seed: VVGARGVGK (KRAS G12R)
LVGLRRVGH

SEQ ID NO: 41487 - protein, 9 aa, synthetic construct
  source 1..9: note = Seed: VVGARGVGK (KRAS G12R)
LVGLRRVGI

SEQ ID NO: 41488 - protein, 9 aa, synthetic construct
  source 1..9: note = Seed: VVGARGVGK (KRAS G12R)
LVGLRRVGL

SEQ ID NO: 41489 - protein, 9 aa, synthetic construct
  source 1..9: note = Seed: VVGARGVGK (KRAS G12R)
LVGLRRVGM

SEQ ID NO: 41490 - protein, 9 aa, synthetic construct
  source 1..9: note = Seed: VVGARGVGK (KRAS G12R)
LVGLRRVGN

SEQ ID NO: 41491 - protein, 9 aa, synthetic construct
  source 1..9: note = Seed: VVGARGVGK (KRAS G12R)
LVGLRRVGP

SEQ ID NO: 41492 - protein, 9 aa, synthetic construct
  source 1..9: note = Seed: VVGARGVGK (KRAS G12R)
LVGLRRVGQ

SEQ ID NO: 41493 - protein, 9 aa, synthetic construct
  source 1..9: note = Seed: VVGARGVGK (KRAS G12R)
LVGLRRVGR

SEQ ID NO: 41494 - protein, 9 aa, synthetic construct
  source 1..9: note = Seed: VVGARGVGK (KRAS G12R)
LVGLRRVGS

SEQ ID NO: 41495 - protein, 9 aa, synthetic construct
  source 1..9: note = Seed: VVGARGVGK (KRAS G12R)
LVGLRRVGT

SEQ ID NO: 41496 - protein, 9 aa, synthetic construct
  source 1..9: note = Seed: VVGARGVGK (KRAS G12R)
LVGLRRVGV

SEQ ID NO: 41497 - protein, 9 aa, synthetic construct
  source 1..9: note = Seed: VVGARGVGK (KRAS G12R)
LVGLRRVGY

SEQ ID NO: 41498 - protein, 9 aa, synthetic construct
  source 1..9: note = Seed: VVGARGVGK (KRAS G12R)
LVGLRSVGA

SEQ ID NO: 41499 - protein, 9 aa, synthetic construct
  source 1..9: note = Seed: VVGARGVGK (KRAS G12R)
LVGLRSVGC

SEQ ID NO: 41500 - protein, 9 aa, synthetic construct
  source 1..9: note = Seed: VVGARGVGK (KRAS G12R)
LVGLRSVGF

SEQ ID NO: 41501 - protein, 9 aa, synthetic construct
  source 1..9: note = Seed: VVGARGVGK (KRAS G12R)
LVGLRSVGG

SEQ ID NO: 41502 - protein, 9 aa, synthetic construct
  source 1..9: note = Seed: VVGARGVGK (KRAS G12R)
LVGLRSVGH

SEQ ID NO: 41503 - protein, 9 aa, synthetic construct
  source 1..9: note = Seed: VVGARGVGK (KRAS G12R)
LVGLRSVGI

SEQ ID NO: 41504 - protein, 9 aa, synthetic construct
  source 1..9: note = Seed: VVGARGVGK (KRAS G12R)
LVGLRSVGK

SEQ ID NO: 41505 - protein, 9 aa, synthetic construct
  source 1..9: note = Seed: VVGARGVGK (KRAS G12R)
LVGLRSVGL

SEQ ID NO: 41506 - protein, 9 aa, synthetic construct
  source 1..9: note = Seed: VVGARGVGK (KRAS G12R)
LVGLRSVGM

SEQ ID NO: 41507 - protein, 9 aa, synthetic construct
  source 1..9: note = Seed: VVGARGVGK (KRAS G12R)
LVGLRSVGN

SEQ ID NO: 41508 - protein, 9 aa, synthetic construct
  source 1..9: note = Seed: VVGARGVGK (KRAS G12R)
LVGLRSVGQ

SEQ ID NO: 41509 - protein, 9 aa, synthetic construct
  source 1..9: note = Seed: VVGARGVGK (KRAS G12R)
LVGLRSVGR

SEQ ID NO: 41510 - protein, 9 aa, synthetic construct
  source 1..9: note = Seed: VVGARGVGK (KRAS G12R)
LVGLRSVGS

SEQ ID NO: 41511 - protein, 9 aa, synthetic construct
  source 1..9: note = Seed: VVGARGVGK (KRAS G12R)
LVGLRSVGT

SEQ ID NO: 41512 - protein, 9 aa, synthetic construct
  source 1..9: note = Seed: VVGARGVGK (KRAS G12R)
LVGLRSVGV

SEQ ID NO: 41513 - protein, 9 aa, synthetic construct
  source 1..9: note = Seed: VVGARGVGK (KRAS G12R)
LVGLRSVGY

SEQ ID NO: 41514 - protein, 9 aa, synthetic construct
  source 1..9: note = Seed: VVGARGVGK (KRAS G12R)
LVGLRTVGA

SEQ ID NO: 41515 - protein, 9 aa, synthetic construct
  source 1..9: note = Seed: VVGARGVGK (KRAS G12R)
LVGLRTVGC

SEQ ID NO: 41516 - protein, 9 aa, synthetic construct
  source 1..9: note = Seed: VVGARGVGK (KRAS G12R)
LVGLRTVGF

SEQ ID NO: 41517 - protein, 9 aa, synthetic construct
  source 1..9: note = Seed: VVGARGVGK (KRAS G12R)
LVGLRTVGG

SEQ ID NO: 41518 - protein, 9 aa, synthetic construct
  source 1..9: note = Seed: VVGARGVGK (KRAS G12R)
LVGLRTVGH

SEQ ID NO: 41519 - protein, 9 aa, synthetic construct
  source 1..9: note = Seed: VVGARGVGK (KRAS G12R)
LVGLRTVGI

SEQ ID NO: 41520 - protein, 9 aa, synthetic construct
  source 1..9: note = Seed: VVGARGVGK (KRAS G12R)
LVGLRTVGL

SEQ ID NO: 41521 - protein, 9 aa, synthetic construct
  source 1..9: note = Seed: VVGARGVGK (KRAS G12R)
LVGLRTVGM

SEQ ID NO: 41522 - protein, 9 aa, synthetic construct
  source 1..9: note = Seed: VVGARGVGK (KRAS G12R)
LVGLRTVGN

SEQ ID NO: 41523 - protein, 9 aa, synthetic construct
  source 1..9: note = Seed: VVGARGVGK (KRAS G12R)
LVGLRTVGQ

SEQ ID NO: 41524 - protein, 9 aa, synthetic construct
  source 1..9: note = Seed: VVGARGVGK (KRAS G12R)
LVGLRTVGR

SEQ ID NO: 41525 - protein, 9 aa, synthetic construct
  source 1..9: note = Seed: VVGARGVGK (KRAS G12R)
LVGLRTVGS

SEQ ID NO: 41526 - protein, 9 aa, synthetic construct
  source 1..9: note = Seed: VVGARGVGK (KRAS G12R)
LVGLRTVGT

SEQ ID NO: 41527 - protein, 9 aa, synthetic construct
  source 1..9: note = Seed: VVGARGVGK (KRAS G12R)
LVGLRTVGV

SEQ ID NO: 41528 - protein, 9 aa, synthetic construct
  source 1..9: note = Seed: VVGARGVGK (KRAS G12R)
LVGLRTVGY

SEQ ID NO: 41529 - protein, 9 aa, synthetic construct
  source 1..9: note = Seed: VVGARGVGK (KRAS G12R)
LVGLRVVGA

SEQ ID NO: 41530 - protein, 9 aa, synthetic construct
  source 1..9: note = Seed: VVGARGVGK (KRAS G12R)
LVGLRVVGG

SEQ ID NO: 41531 - protein, 9 aa, synthetic construct
  source 1..9: note = Seed: VVGARGVGK (KRAS G12R)
LVGLRVVGH

SEQ ID NO: 41532 - protein, 9 aa, synthetic construct
  source 1..9: note = Seed: VVGARGVGK (KRAS G12R)
LVGLRVVGI

SEQ ID NO: 41533 - protein, 9 aa, synthetic construct
  source 1..9: note = Seed: VVGARGVGK (KRAS G12R)
LVGLRVVGL

SEQ ID NO: 41534 - protein, 9 aa, synthetic construct
  source 1..9: note = Seed: VVGARGVGK (KRAS G12R)
LVGLRVVGM

SEQ ID NO: 41535 - protein, 9 aa, synthetic construct
  source 1..9: note = Seed: VVGARGVGK (KRAS G12R)
LVGLRVVGN

SEQ ID NO: 41536 - protein, 9 aa, synthetic construct
  source 1..9: note = Seed: VVGARGVGK (KRAS G12R)
LVGLRVVGR

SEQ ID NO: 41537 - protein, 9 aa, synthetic construct
  source 1..9: note = Seed: VVGARGVGK (KRAS G12R)
LVGLRVVGS

SEQ ID NO: 41538 - protein, 9 aa, synthetic construct
  source 1..9: note = Seed: VVGARGVGK (KRAS G12R)
LVGLRVVGT

SEQ ID NO: 41539 - protein, 9 aa, synthetic construct
  source 1..9: note = Seed: VVGARGVGK (KRAS G12R)
LVGLRVVGV

SEQ ID NO: 41540 - protein, 9 aa, synthetic construct
  source 1..9: note = Seed: VVGARGVGK (KRAS G12R)
LVGMRAVGA

SEQ ID NO: 41541 - protein, 9 aa, synthetic construct
  source 1..9: note = Seed: VVGARGVGK (KRAS G12R)
LVGMRAVGC

SEQ ID NO: 41542 - protein, 9 aa, synthetic construct
  source 1..9: note = Seed: VVGARGVGK (KRAS G12R)
LVGMRAVGD

SEQ ID NO: 41543 - protein, 9 aa, synthetic construct
  source 1..9: note = Seed: VVGARGVGK (KRAS G12R)
LVGMRAVGE

SEQ ID NO: 41544 - protein, 9 aa, synthetic construct
  source 1..9: note = Seed: VVGARGVGK (KRAS G12R)
LVGMRAVGF

SEQ ID NO: 41545 - protein, 9 aa, synthetic construct
  source 1..9: note = Seed: VVGARGVGK (KRAS G12R)
LVGMRAVGG

SEQ ID NO: 41546 - protein, 9 aa, synthetic construct
  source 1..9: note = Seed: VVGARGVGK (KRAS G12R)
LVGMRAVGH

SEQ ID NO: 41547 - protein, 9 aa, synthetic construct
  source 1..9: note = Seed: VVGARGVGK (KRAS G12R)
LVGMRAVGI

SEQ ID NO: 41548 - protein, 9 aa, synthetic construct
  source 1..9: note = Seed: VVGARGVGK (KRAS G12R)
LVGMRAVGK

SEQ ID NO: 41549 - protein, 9 aa, synthetic construct
  source 1..9: note = Seed: VVGARGVGK (KRAS G12R)
LVGMRAVGL

SEQ ID NO: 41550 - protein, 9 aa, synthetic construct
  source 1..9: note = Seed: VVGARGVGK (KRAS G12R)
LVGMRAVGM

SEQ ID NO: 41551 - protein, 9 aa, synthetic construct
  source 1..9: note = Seed: VVGARGVGK (KRAS G12R)
LVGMRAVGN

SEQ ID NO: 41552 - protein, 9 aa, synthetic construct
  source 1..9: note = Seed: VVGARGVGK (KRAS G12R)
LVGMRAVGP

SEQ ID NO: 41553 - protein, 9 aa, synthetic construct
  source 1..9: note = Seed: VVGARGVGK (KRAS G12R)
LVGMRAVGQ

SEQ ID NO: 41554 - protein, 9 aa, synthetic construct
  source 1..9: note = Seed: VVGARGVGK (KRAS G12R)
LVGMRAVGR

SEQ ID NO: 41555 - protein, 9 aa, synthetic construct
  source 1..9: note = Seed: VVGARGVGK (KRAS G12R)
LVGMRAVGS

SEQ ID NO: 41556 - protein, 9 aa, synthetic construct
  source 1..9: note = Seed: VVGARGVGK (KRAS G12R)
LVGMRAVGT

SEQ ID NO: 41557 - protein, 9 aa, synthetic construct
  source 1..9: note = Seed: VVGARGVGK (KRAS G12R)
LVGMRAVGV

SEQ ID NO: 41558 - protein, 9 aa, synthetic construct
  source 1..9: note = Seed: VVGARGVGK (KRAS G12R)
LVGMRAVGW

SEQ ID NO: 41559 - protein, 9 aa, synthetic construct
  source 1..9: note = Seed: VVGARGVGK (KRAS G12R)
LVGMRAVGY

SEQ ID NO: 41560 - protein, 9 aa, synthetic construct
  source 1..9: note = Seed: VVGARGVGK (KRAS G12R)
LVGMREVGA

SEQ ID NO: 41561 - protein, 9 aa, synthetic construct
  source 1..9: note = Seed: VVGARGVGK (KRAS G12R)
LVGMREVGV

SEQ ID NO: 41562 - protein, 9 aa, synthetic construct
  source 1..9: note = Seed: VVGARGVGK (KRAS G12R)
LVGMRGVGA

SEQ ID NO: 41563 - protein, 9 aa, synthetic construct
  source 1..9: note = Seed: VVGARGVGK (KRAS G12R)
LVGMRGVGC

SEQ ID NO: 41564 - protein, 9 aa, synthetic construct
  source 1..9: note = Seed: VVGARGVGK (KRAS G12R)
LVGMRGVGF

SEQ ID NO: 41565 - protein, 9 aa, synthetic construct
  source 1..9: note = Seed: VVGARGVGK (KRAS G12R)
LVGMRGVGG

SEQ ID NO: 41566 - protein, 9 aa, synthetic construct
  source 1..9: note = Seed: VVGARGVGK (KRAS G12R)
LVGMRGVGH

SEQ ID NO: 41567 - protein, 9 aa, synthetic construct
  source 1..9: note = Seed: VVGARGVGK (KRAS G12R)
LVGMRGVGI

SEQ ID NO: 41568 - protein, 9 aa, synthetic construct
  source 1..9: note = Seed: VVGARGVGK (KRAS G12R)
LVGMRGVGK

SEQ ID NO: 41569 - protein, 9 aa, synthetic construct
  source 1..9: note = Seed: VVGARGVGK (KRAS G12R)
LVGMRGVGL

SEQ ID NO: 41570 - protein, 9 aa, synthetic construct
  source 1..9: note = Seed: VVGARGVGK (KRAS G12R)
LVGMRGVGM

SEQ ID NO: 41571 - protein, 9 aa, synthetic construct
  source 1..9: note = Seed: VVGARGVGK (KRAS G12R)
LVGMRGVGN

SEQ ID NO: 41572 - protein, 9 aa, synthetic construct
  source 1..9: note = Seed: VVGARGVGK (KRAS G12R)
LVGMRGVGP

SEQ ID NO: 41573 - protein, 9 aa, synthetic construct
  source 1..9: note = Seed: VVGARGVGK (KRAS G12R)
LVGMRGVGQ

SEQ ID NO: 41574 - protein, 9 aa, synthetic construct
  source 1..9: note = Seed: VVGARGVGK (KRAS G12R)
LVGMRGVGR

SEQ ID NO: 41575 - protein, 9 aa, synthetic construct
  source 1..9: note = Seed: VVGARGVGK (KRAS G12R)
LVGMRGVGS

SEQ ID NO: 41576 - protein, 9 aa, synthetic construct
  source 1..9: note = Seed: VVGARGVGK (KRAS G12R)
LVGMRGVGT

SEQ ID NO: 41577 - protein, 9 aa, synthetic construct
  source 1..9: note = Seed: VVGARGVGK (KRAS G12R)
LVGMRGVGV

SEQ ID NO: 41578 - protein, 9 aa, synthetic construct
  source 1..9: note = Seed: VVGARGVGK (KRAS G12R)
LVGMRGVGY

SEQ ID NO: 41579 - protein, 9 aa, synthetic construct
  source 1..9: note = Seed: VVGARGVGK (KRAS G12R)
LVGMRHVGI

SEQ ID NO: 41580 - protein, 9 aa, synthetic construct
  source 1..9: note = Seed: VVGARGVGK (KRAS G12R)
LVGMRHVGL

SEQ ID NO: 41581 - protein, 9 aa, synthetic construct
  source 1..9: note = Seed: VVGARGVGK (KRAS G12R)
LVGMRHVGM

SEQ ID NO: 41582 - protein, 9 aa, synthetic construct
  source 1..9: note = Seed: VVGARGVGK (KRAS G12R)
LVGMRHVGR

SEQ ID NO: 41583 - protein, 9 aa, synthetic construct
  source 1..9: note = Seed: VVGARGVGK (KRAS G12R)
LVGMRHVGV

SEQ ID NO: 41584 - protein, 9 aa, synthetic construct
  source 1..9: note = Seed: VVGARGVGK (KRAS G12R)
LVGMRHVGY

SEQ ID NO: 41585 - protein, 9 aa, synthetic construct
  source 1..9: note = Seed: VVGARGVGK (KRAS G12R)
LVGMRIVGA

SEQ ID NO: 41586 - protein, 9 aa, synthetic construct
  source 1..9: note = Seed: VVGARGVGK (KRAS G12R)
LVGMRIVGH

SEQ ID NO: 41587 - protein, 9 aa, synthetic construct
  source 1..9: note = Seed: VVGARGVGK (KRAS G12R)
LVGMRIVGI

SEQ ID NO: 41588 - protein, 9 aa, synthetic construct
  source 1..9: note = Seed: VVGARGVGK (KRAS G12R)
LVGMRIVGL

SEQ ID NO: 41589 - protein, 9 aa, synthetic construct
  source 1..9: note = Seed: VVGARGVGK (KRAS G12R)
LVGMRIVGM

SEQ ID NO: 41590 - protein, 9 aa, synthetic construct
  source 1..9: note = Seed: VVGARGVGK (KRAS G12R)
LVGMRIVGN

SEQ ID NO: 41591 - protein, 9 aa, synthetic construct
  source 1..9: note = Seed: VVGARGVGK (KRAS G12R)
LVGMRIVGR

SEQ ID NO: 41592 - protein, 9 aa, synthetic construct
  source 1..9: note = Seed: VVGARGVGK (KRAS G12R)
LVGMRIVGS

SEQ ID NO: 41593 - protein, 9 aa, synthetic construct
  source 1..9: note = Seed: VVGARGVGK (KRAS G12R)
LVGMRIVGT

SEQ ID NO: 41594 - protein, 9 aa, synthetic construct
  source 1..9: note = Seed: VVGARGVGK (KRAS G12R)
LVGMRIVGV

SEQ ID NO: 41595 - protein, 9 aa, synthetic construct
  source 1..9: note = Seed: VVGARGVGK (KRAS G12R)
LVGMRKVGA

SEQ ID NO: 41596 - protein, 9 aa, synthetic construct
  source 1..9: note = Seed: VVGARGVGK (KRAS G12R)
LVGMRKVGF

SEQ ID NO: 41597 - protein, 9 aa, synthetic construct
  source 1..9: note = Seed: VVGARGVGK (KRAS G12R)
LVGMRKVGH

SEQ ID NO: 41598 - protein, 9 aa, synthetic construct
  source 1..9: note = Seed: VVGARGVGK (KRAS G12R)
LVGMRKVGI

SEQ ID NO: 41599 - protein, 9 aa, synthetic construct
  source 1..9: note = Seed: VVGARGVGK (KRAS G12R)
LVGMRKVGK

SEQ ID NO: 41600 - protein, 9 aa, synthetic construct
  source 1..9: note = Seed: VVGARGVGK (KRAS G12R)
LVGMRKVGL

SEQ ID NO: 41601 - protein, 9 aa, synthetic construct
  source 1..9: note = Seed: VVGARGVGK (KRAS G12R)
LVGMRKVGM

SEQ ID NO: 41602 - protein, 9 aa, synthetic construct
  source 1..9: note = Seed: VVGARGVGK (KRAS G12R)
LVGMRKVGQ

SEQ ID NO: 41603 - protein, 9 aa, synthetic construct
  source 1..9: note = Seed: VVGARGVGK (KRAS G12R)
LVGMRKVGR

SEQ ID NO: 41604 - protein, 9 aa, synthetic construct
  source 1..9: note = Seed: VVGARGVGK (KRAS G12R)
LVGMRKVGS

SEQ ID NO: 41605 - protein, 9 aa, synthetic construct
  source 1..9: note = Seed: VVGARGVGK (KRAS G12R)
LVGMRKVGT

SEQ ID NO: 41606 - protein, 9 aa, synthetic construct
  source 1..9: note = Seed: VVGARGVGK (KRAS G12R)
LVGMRKVGV

SEQ ID NO: 41607 - protein, 9 aa, synthetic construct
  source 1..9: note = Seed: VVGARGVGK (KRAS G12R)
LVGMRKVGY

SEQ ID NO: 41608 - protein, 9 aa, synthetic construct
  source 1..9: note = Seed: VVGARGVGK (KRAS G12R)
LVGMRLVGA

SEQ ID NO: 41609 - protein, 9 aa, synthetic construct
  source 1..9: note = Seed: VVGARGVGK (KRAS G12R)
LVGMRLVGL

SEQ ID NO: 41610 - protein, 9 aa, synthetic construct
  source 1..9: note = Seed: VVGARGVGK (KRAS G12R)
LVGMRLVGM

SEQ ID NO: 41611 - protein, 9 aa, synthetic construct
  source 1..9: note = Seed: VVGARGVGK (KRAS G12R)
LVGMRLVGN

SEQ ID NO: 41612 - protein, 9 aa, synthetic construct
  source 1..9: note = Seed: VVGARGVGK (KRAS G12R)
LVGMRLVGS

SEQ ID NO: 41613 - protein, 9 aa, synthetic construct
  source 1..9: note = Seed: VVGARGVGK (KRAS G12R)
LVGMRMVGI

SEQ ID NO: 41614 - protein, 9 aa, synthetic construct
  source 1..9: note = Seed: VVGARGVGK (KRAS G12R)
LVGMRMVGL

SEQ ID NO: 41615 - protein, 9 aa, synthetic construct
  source 1..9: note = Seed: VVGARGVGK (KRAS G12R)
LVGMRMVGM

SEQ ID NO: 41616 - protein, 9 aa, synthetic construct
  source 1..9: note = Seed: VVGARGVGK (KRAS G12R)
LVGMRMVGN

SEQ ID NO: 41617 - protein, 9 aa, synthetic construct
  source 1..9: note = Seed: VVGARGVGK (KRAS G12R)
LVGMRMVGS

SEQ ID NO: 41618 - protein, 9 aa, synthetic construct
  source 1..9: note = Seed: VVGARGVGK (KRAS G12R)
LVGMRNVGA

SEQ ID NO: 41619 - protein, 9 aa, synthetic construct
  source 1..9: note = Seed: VVGARGVGK (KRAS G12R)
LVGMRNVGC

SEQ ID NO: 41620 - protein, 9 aa, synthetic construct
  source 1..9: note = Seed: VVGARGVGK (KRAS G12R)
LVGMRNVGF

SEQ ID NO: 41621 - protein, 9 aa, synthetic construct
  source 1..9: note = Seed: VVGARGVGK (KRAS G12R)
LVGMRNVGG

SEQ ID NO: 41622 - protein, 9 aa, synthetic construct
  source 1..9: note = Seed: VVGARGVGK (KRAS G12R)
LVGMRNVGH

SEQ ID NO: 41623 - protein, 9 aa, synthetic construct
  source 1..9: note = Seed: VVGARGVGK (KRAS G12R)
LVGMRNVGI

SEQ ID NO: 41624 - protein, 9 aa, synthetic construct
  source 1..9: note = Seed: VVGARGVGK (KRAS G12R)
LVGMRNVGL

SEQ ID NO: 41625 - protein, 9 aa, synthetic construct
  source 1..9: note = Seed: VVGARGVGK (KRAS G12R)
LVGMRNVGM

SEQ ID NO: 41626 - protein, 9 aa, synthetic construct
  source 1..9: note = Seed: VVGARGVGK (KRAS G12R)
LVGMRNVGN

SEQ ID NO: 41627 - protein, 9 aa, synthetic construct
  source 1..9: note = Seed: VVGARGVGK (KRAS G12R)
LVGMRNVGR

SEQ ID NO: 41628 - protein, 9 aa, synthetic construct
  source 1..9: note = Seed: VVGARGVGK (KRAS G12R)
LVGMRNVGS

SEQ ID NO: 41629 - protein, 9 aa, synthetic construct
  source 1..9: note = Seed: VVGARGVGK (KRAS G12R)
LVGMRNVGT

SEQ ID NO: 41630 - protein, 9 aa, synthetic construct
  source 1..9: note = Seed: VVGARGVGK (KRAS G12R)
LVGMRNVGV

SEQ ID NO: 41631 - protein, 9 aa, synthetic construct
  source 1..9: note = Seed: VVGARGVGK (KRAS G12R)
LVGMRPVGA

SEQ ID NO: 41632 - protein, 9 aa, synthetic construct
  source 1..9: note = Seed: VVGARGVGK (KRAS G12R)
LVGMRPVGC

SEQ ID NO: 41633 - protein, 9 aa, synthetic construct
  source 1..9: note = Seed: VVGARGVGK (KRAS G12R)
LVGMRPVGD

SEQ ID NO: 41634 - protein, 9 aa, synthetic construct
  source 1..9: note = Seed: VVGARGVGK (KRAS G12R)
LVGMRPVGE

SEQ ID NO: 41635 - protein, 9 aa, synthetic construct
  source 1..9: note = Seed: VVGARGVGK (KRAS G12R)
LVGMRPVGF

SEQ ID NO: 41636 - protein, 9 aa, synthetic construct
  source 1..9: note = Seed: VVGARGVGK (KRAS G12R)
LVGMRPVGG

SEQ ID NO: 41637 - protein, 9 aa, synthetic construct
  source 1..9: note = Seed: VVGARGVGK (KRAS G12R)
LVGMRPVGH

SEQ ID NO: 41638 - protein, 9 aa, synthetic construct
  source 1..9: note = Seed: VVGARGVGK (KRAS G12R)
LVGMRPVGI

SEQ ID NO: 41639 - protein, 9 aa, synthetic construct
  source 1..9: note = Seed: VVGARGVGK (KRAS G12R)
LVGMRPVGK

SEQ ID NO: 41640 - protein, 9 aa, synthetic construct
  source 1..9: note = Seed: VVGARGVGK (KRAS G12R)
LVGMRPVGL

SEQ ID NO: 41641 - protein, 9 aa, synthetic construct
  source 1..9: note = Seed: VVGARGVGK (KRAS G12R)
LVGMRPVGM

SEQ ID NO: 41642 - protein, 9 aa, synthetic construct
  source 1..9: note = Seed: VVGARGVGK (KRAS G12R)
LVGMRPVGN

SEQ ID NO: 41643 - protein, 9 aa, synthetic construct
  source 1..9: note = Seed: VVGARGVGK (KRAS G12R)
LVGMRPVGP

SEQ ID NO: 41644 - protein, 9 aa, synthetic construct
  source 1..9: note = Seed: VVGARGVGK (KRAS G12R)
LVGMRPVGQ

SEQ ID NO: 41645 - protein, 9 aa, synthetic construct
  source 1..9: note = Seed: VVGARGVGK (KRAS G12R)
LVGMRPVGR

SEQ ID NO: 41646 - protein, 9 aa, synthetic construct
  source 1..9: note = Seed: VVGARGVGK (KRAS G12R)
LVGMRPVGS

SEQ ID NO: 41647 - protein, 9 aa, synthetic construct
  source 1..9: note = Seed: VVGARGVGK (KRAS G12R)
LVGMRPVGT

SEQ ID NO: 41648 - protein, 9 aa, synthetic construct
  source 1..9: note = Seed: VVGARGVGK (KRAS G12R)
LVGMRPVGV

SEQ ID NO: 41649 - protein, 9 aa, synthetic construct
  source 1..9: note = Seed: VVGARGVGK (KRAS G12R)
LVGMRPVGW

SEQ ID NO: 41650 - protein, 9 aa, synthetic construct
  source 1..9: note = Seed: VVGARGVGK (KRAS G12R)
LVGMRPVGY

SEQ ID NO: 41651 - protein, 9 aa, synthetic construct
  source 1..9: note = Seed: VVGARGVGK (KRAS G12R)
LVGMRQVGI

SEQ ID NO: 41652 - protein, 9 aa, synthetic construct
  source 1..9: note = Seed: VVGARGVGK (KRAS G12R)
LVGMRQVGL

SEQ ID NO: 41653 - protein, 9 aa, synthetic construct
  source 1..9: note = Seed: VVGARGVGK (KRAS G12R)
LVGMRQVGR

SEQ ID NO: 41654 - protein, 9 aa, synthetic construct
  source 1..9: note = Seed: VVGARGVGK (KRAS G12R)
LVGMRQVGV

SEQ ID NO: 41655 - protein, 9 aa, synthetic construct
  source 1..9: note = Seed: VVGARGVGK (KRAS G12R)
LVGMRRVGA

SEQ ID NO: 41656 - protein, 9 aa, synthetic construct
  source 1..9: note = Seed: VVGARGVGK (KRAS G12R)
LVGMRRVGF

SEQ ID NO: 41657 - protein, 9 aa, synthetic construct
  source 1..9: note = Seed: VVGARGVGK (KRAS G12R)
LVGMRRVGG

SEQ ID NO: 41658 - protein, 9 aa, synthetic construct
  source 1..9: note = Seed: VVGARGVGK (KRAS G12R)
LVGMRRVGH

SEQ ID NO: 41659 - protein, 9 aa, synthetic construct
  source 1..9: note = Seed: VVGARGVGK (KRAS G12R)
LVGMRRVGI

SEQ ID NO: 41660 - protein, 9 aa, synthetic construct
  source 1..9: note = Seed: VVGARGVGK (KRAS G12R)
LVGMRRVGK

SEQ ID NO: 41661 - protein, 9 aa, synthetic construct
  source 1..9: note = Seed: VVGARGVGK (KRAS G12R)
LVGMRRVGL

SEQ ID NO: 41662 - protein, 9 aa, synthetic construct
  source 1..9: note = Seed: VVGARGVGK (KRAS G12R)
LVGMRRVGM

SEQ ID NO: 41663 - protein, 9 aa, synthetic construct
  source 1..9: note = Seed: VVGARGVGK (KRAS G12R)
LVGMRRVGN

SEQ ID NO: 41664 - protein, 9 aa, synthetic construct
  source 1..9: note = Seed: VVGARGVGK (KRAS G12R)
LVGMRRVGP

SEQ ID NO: 41665 - protein, 9 aa, synthetic construct
  source 1..9: note = Seed: VVGARGVGK (KRAS G12R)
LVGMRRVGQ

SEQ ID NO: 41666 - protein, 9 aa, synthetic construct
  source 1..9: note = Seed: VVGARGVGK (KRAS G12R)
LVGMRRVGR

SEQ ID NO: 41667 - protein, 9 aa, synthetic construct
  source 1..9: note = Seed: VVGARGVGK (KRAS G12R)
LVGMRRVGS

SEQ ID NO: 41668 - protein, 9 aa, synthetic construct
  source 1..9: note = Seed: VVGARGVGK (KRAS G12R)
LVGMRRVGT

SEQ ID NO: 41669 - protein, 9 aa, synthetic construct
  source 1..9: note = Seed: VVGARGVGK (KRAS G12R)
LVGMRRVGV

SEQ ID NO: 41670 - protein, 9 aa, synthetic construct
  source 1..9: note = Seed: VVGARGVGK (KRAS G12R)
LVGMRRVGW

SEQ ID NO: 41671 - protein, 9 aa, synthetic construct
  source 1..9: note = Seed: VVGARGVGK (KRAS G12R)
LVGMRRVGY

SEQ ID NO: 41672 - protein, 9 aa, synthetic construct
  source 1..9: note = Seed: VVGARGVGK (KRAS G12R)
LVGMRSVGA

SEQ ID NO: 41673 - protein, 9 aa, synthetic construct
  source 1..9: note = Seed: VVGARGVGK (KRAS G12R)
LVGMRSVGC

SEQ ID NO: 41674 - protein, 9 aa, synthetic construct
  source 1..9: note = Seed: VVGARGVGK (KRAS G12R)
LVGMRSVGF

SEQ ID NO: 41675 - protein, 9 aa, synthetic construct
  source 1..9: note = Seed: VVGARGVGK (KRAS G12R)
LVGMRSVGG

SEQ ID NO: 41676 - protein, 9 aa, synthetic construct
  source 1..9: note = Seed: VVGARGVGK (KRAS G12R)
LVGMRSVGH

SEQ ID NO: 41677 - protein, 9 aa, synthetic construct
  source 1..9: note = Seed: VVGARGVGK (KRAS G12R)
LVGMRSVGI

SEQ ID NO: 41678 - protein, 9 aa, synthetic construct
  source 1..9: note = Seed: VVGARGVGK (KRAS G12R)
LVGMRSVGK

SEQ ID NO: 41679 - protein, 9 aa, synthetic construct
  source 1..9: note = Seed: VVGARGVGK (KRAS G12R)
LVGMRSVGL

SEQ ID NO: 41680 - protein, 9 aa, synthetic construct
  source 1..9: note = Seed: VVGARGVGK (KRAS G12R)
LVGMRSVGM

SEQ ID NO: 41681 - protein, 9 aa, synthetic construct
  source 1..9: note = Seed: VVGARGVGK (KRAS G12R)
LVGMRSVGN

SEQ ID NO: 41682 - protein, 9 aa, synthetic construct
  source 1..9: note = Seed: VVGARGVGK (KRAS G12R)
LVGMRSVGQ

SEQ ID NO: 41683 - protein, 9 aa, synthetic construct
  source 1..9: note = Seed: VVGARGVGK (KRAS G12R)
LVGMRSVGR

SEQ ID NO: 41684 - protein, 9 aa, synthetic construct
  source 1..9: note = Seed: VVGARGVGK (KRAS G12R)
LVGMRSVGS

SEQ ID NO: 41685 - protein, 9 aa, synthetic construct
  source 1..9: note = Seed: VVGARGVGK (KRAS G12R)
LVGMRSVGT

SEQ ID NO: 41686 - protein, 9 aa, synthetic construct
  source 1..9: note = Seed: VVGARGVGK (KRAS G12R)
LVGMRSVGV

SEQ ID NO: 41687 - protein, 9 aa, synthetic construct
  source 1..9: note = Seed: VVGARGVGK (KRAS G12R)
LVGMRSVGY

SEQ ID NO: 41688 - protein, 9 aa, synthetic construct
  source 1..9: note = Seed: VVGARGVGK (KRAS G12R)
LVGMRTVGA

SEQ ID NO: 41689 - protein, 9 aa, synthetic construct
  source 1..9: note = Seed: VVGARGVGK (KRAS G12R)
LVGMRTVGC

SEQ ID NO: 41690 - protein, 9 aa, synthetic construct
  source 1..9: note = Seed: VVGARGVGK (KRAS G12R)
LVGMRTVGF

SEQ ID NO: 41691 - protein, 9 aa, synthetic construct
  source 1..9: note = Seed: VVGARGVGK (KRAS G12R)
LVGMRTVGG

SEQ ID NO: 41692 - protein, 9 aa, synthetic construct
  source 1..9: note = Seed: VVGARGVGK (KRAS G12R)
LVGMRTVGH

SEQ ID NO: 41693 - protein, 9 aa, synthetic construct
  source 1..9: note = Seed: VVGARGVGK (KRAS G12R)
LVGMRTVGI

SEQ ID NO: 41694 - protein, 9 aa, synthetic construct
  source 1..9: note = Seed: VVGARGVGK (KRAS G12R)
LVGMRTVGK

SEQ ID NO: 41695 - protein, 9 aa, synthetic construct
  source 1..9: note = Seed: VVGARGVGK (KRAS G12R)
LVGMRTVGL

SEQ ID NO: 41696 - protein, 9 aa, synthetic construct
  source 1..9: note = Seed: VVGARGVGK (KRAS G12R)
LVGMRTVGM

SEQ ID NO: 41697 - protein, 9 aa, synthetic construct
  source 1..9: note = Seed: VVGARGVGK (KRAS G12R)
LVGMRTVGN

SEQ ID NO: 41698 - protein, 9 aa, synthetic construct
  source 1..9: note = Seed: VVGARGVGK (KRAS G12R)
LVGMRTVGQ

SEQ ID NO: 41699 - protein, 9 aa, synthetic construct
  source 1..9: note = Seed: VVGARGVGK (KRAS G12R)
LVGMRTVGR

SEQ ID NO: 41700 - protein, 9 aa, synthetic construct
  source 1..9: note = Seed: VVGARGVGK (KRAS G12R)
LVGMRTVGS

SEQ ID NO: 41701 - protein, 9 aa, synthetic construct
  source 1..9: note = Seed: VVGARGVGK (KRAS G12R)
LVGMRTVGT

SEQ ID NO: 41702 - protein, 9 aa, synthetic construct
  source 1..9: note = Seed: VVGARGVGK (KRAS G12R)
LVGMRTVGV

SEQ ID NO: 41703 - protein, 9 aa, synthetic construct
  source 1..9: note = Seed: VVGARGVGK (KRAS G12R)
LVGMRTVGY

SEQ ID NO: 41704 - protein, 9 aa, synthetic construct
  source 1..9: note = Seed: VVGARGVGK (KRAS G12R)
LVGMRVVGA

SEQ ID NO: 41705 - protein, 9 aa, synthetic construct
  source 1..9: note = Seed: VVGARGVGK (KRAS G12R)
LVGMRVVGG

SEQ ID NO: 41706 - protein, 9 aa, synthetic construct
  source 1..9: note = Seed: VVGARGVGK (KRAS G12R)
LVGMRVVGH

SEQ ID NO: 41707 - protein, 9 aa, synthetic construct
  source 1..9: note = Seed: VVGARGVGK (KRAS G12R)
LVGMRVVGI

SEQ ID NO: 41708 - protein, 9 aa, synthetic construct
  source 1..9: note = Seed: VVGARGVGK (KRAS G12R)
LVGMRVVGL

SEQ ID NO: 41709 - protein, 9 aa, synthetic construct
  source 1..9: note = Seed: VVGARGVGK (KRAS G12R)
LVGMRVVGM

SEQ ID NO: 41710 - protein, 9 aa, synthetic construct
  source 1..9: note = Seed: VVGARGVGK (KRAS G12R)
LVGMRVVGN

SEQ ID NO: 41711 - protein, 9 aa, synthetic construct
  source 1..9: note = Seed: VVGARGVGK (KRAS G12R)
LVGMRVVGQ

SEQ ID NO: 41712 - protein, 9 aa, synthetic construct
  source 1..9: note = Seed: VVGARGVGK (KRAS G12R)
LVGMRVVGR

SEQ ID NO: 41713 - protein, 9 aa, synthetic construct
  source 1..9: note = Seed: VVGARGVGK (KRAS G12R)
LVGMRVVGS

SEQ ID NO: 41714 - protein, 9 aa, synthetic construct
  source 1..9: note = Seed: VVGARGVGK (KRAS G12R)
LVGMRVVGT

SEQ ID NO: 41715 - protein, 9 aa, synthetic construct
  source 1..9: note = Seed: VVGARGVGK (KRAS G12R)
LVGMRVVGV

SEQ ID NO: 41716 - protein, 9 aa, synthetic construct
  source 1..9: note = Seed: VVGARGVGK (KRAS G12R)
LVGNRAVGA

SEQ ID NO: 41717 - protein, 9 aa, synthetic construct
  source 1..9: note = Seed: VVGARGVGK (KRAS G12R)
LVGNRAVGF

SEQ ID NO: 41718 - protein, 9 aa, synthetic construct
  source 1..9: note = Seed: VVGARGVGK (KRAS G12R)
LVGNRAVGI

SEQ ID NO: 41719 - protein, 9 aa, synthetic construct
  source 1..9: note = Seed: VVGARGVGK (KRAS G12R)
LVGNRAVGK

SEQ ID NO: 41720 - protein, 9 aa, synthetic construct
  source 1..9: note = Seed: VVGARGVGK (KRAS G12R)
LVGNRAVGL

SEQ ID NO: 41721 - protein, 9 aa, synthetic construct
  source 1..9: note = Seed: VVGARGVGK (KRAS G12R)
LVGNRAVGM

SEQ ID NO: 41722 - protein, 9 aa, synthetic construct
  source 1..9: note = Seed: VVGARGVGK (KRAS G12R)
LVGNRAVGR

SEQ ID NO: 41723 - protein, 9 aa, synthetic construct
  source 1..9: note = Seed: VVGARGVGK (KRAS G12R)
LVGNRAVGS

SEQ ID NO: 41724 - protein, 9 aa, synthetic construct
  source 1..9: note = Seed: VVGARGVGK (KRAS G12R)
LVGNRAVGT

SEQ ID NO: 41725 - protein, 9 aa, synthetic construct
  source 1..9: note = Seed: VVGARGVGK (KRAS G12R)
LVGNRAVGV

SEQ ID NO: 41726 - protein, 9 aa, synthetic construct
  source 1..9: note = Seed: VVGARGVGK (KRAS G12R)
LVGNRAVGY

SEQ ID NO: 41727 - protein, 9 aa, synthetic construct
  source 1..9: note = Seed: VVGARGVGK (KRAS G12R)
LVGNRGVGI

SEQ ID NO: 41728 - protein, 9 aa, synthetic construct
  source 1..9: note = Seed: VVGARGVGK (KRAS G12R)
LVGNRGVGL

SEQ ID NO: 41729 - protein, 9 aa, synthetic construct
  source 1..9: note = Seed: VVGARGVGK (KRAS G12R)
LVGNRGVGV

SEQ ID NO: 41730 - protein, 9 aa, synthetic construct
  source 1..9: note = Seed: VVGARGVGK (KRAS G12R)
LVGNRHVGY

SEQ ID NO: 41731 - protein, 9 aa, synthetic construct
  source 1..9: note = Seed: VVGARGVGK (KRAS G12R)
LVGNRIVGA

SEQ ID NO: 41732 - protein, 9 aa, synthetic construct
  source 1..9: note = Seed: VVGARGVGK (KRAS G12R)
LVGNRIVGR

SEQ ID NO: 41733 - protein, 9 aa, synthetic construct
  source 1..9: note = Seed: VVGARGVGK (KRAS G12R)
LVGNRIVGY

SEQ ID NO: 41734 - protein, 9 aa, synthetic construct
  source 1..9: note = Seed: VVGARGVGK (KRAS G12R)
LVGNRKVGA

SEQ ID NO: 41735 - protein, 9 aa, synthetic construct
  source 1..9: note = Seed: VVGARGVGK (KRAS G12R)
LVGNRKVGF

SEQ ID NO: 41736 - protein, 9 aa, synthetic construct
  source 1..9: note = Seed: VVGARGVGK (KRAS G12R)
LVGNRKVGI

SEQ ID NO: 41737 - protein, 9 aa, synthetic construct
  source 1..9: note = Seed: VVGARGVGK (KRAS G12R)
LVGNRKVGK

SEQ ID NO: 41738 - protein, 9 aa, synthetic construct
  source 1..9: note = Seed: VVGARGVGK (KRAS G12R)
LVGNRKVGL

SEQ ID NO: 41739 - protein, 9 aa, synthetic construct
  source 1..9: note = Seed: VVGARGVGK (KRAS G12R)
LVGNRKVGM

SEQ ID NO: 41740 - protein, 9 aa, synthetic construct
  source 1..9: note = Seed: VVGARGVGK (KRAS G12R)
LVGNRKVGR

SEQ ID NO: 41741 - protein, 9 aa, synthetic construct
  source 1..9: note = Seed: VVGARGVGK (KRAS G12R)
LVGNRKVGV

SEQ ID NO: 41742 - protein, 9 aa, synthetic construct
  source 1..9: note = Seed: VVGARGVGK (KRAS G12R)
LVGNRKVGY

SEQ ID NO: 41743 - protein, 9 aa, synthetic construct
  source 1..9: note = Seed: VVGARGVGK (KRAS G12R)
LVGNRLVGR

SEQ ID NO: 41744 - protein, 9 aa, synthetic construct
  source 1..9: note = Seed: VVGARGVGK (KRAS G12R)
LVGNRMVGR

SEQ ID NO: 41745 - protein, 9 aa, synthetic construct
  source 1..9: note = Seed: VVGARGVGK (KRAS G12R)
LVGNRNVGY

SEQ ID NO: 41746 - protein, 9 aa, synthetic construct
  source 1..9: note = Seed: VVGARGVGK (KRAS G12R)
LVGNRPVGA

SEQ ID NO: 41747 - protein, 9 aa, synthetic construct
  source 1..9: note = Seed: VVGARGVGK (KRAS G12R)
LVGNRPVGI

SEQ ID NO: 41748 - protein, 9 aa, synthetic construct
  source 1..9: note = Seed: VVGARGVGK (KRAS G12R)
LVGNRPVGL

SEQ ID NO: 41749 - protein, 9 aa, synthetic construct
  source 1..9: note = Seed: VVGARGVGK (KRAS G12R)
LVGNRPVGR

SEQ ID NO: 41750 - protein, 9 aa, synthetic construct
  source 1..9: note = Seed: VVGARGVGK (KRAS G12R)
LVGNRPVGV

SEQ ID NO: 41751 - protein, 9 aa, synthetic construct
  source 1..9: note = Seed: VVGARGVGK (KRAS G12R)
LVGNRPVGY

SEQ ID NO: 41752 - protein, 9 aa, synthetic construct
  source 1..9: note = Seed: VVGARGVGK (KRAS G12R)
LVGNRRVGA

SEQ ID NO: 41753 - protein, 9 aa, synthetic construct
  source 1..9: note = Seed: VVGARGVGK (KRAS G12R)
LVGNRRVGF

SEQ ID NO: 41754 - protein, 9 aa, synthetic construct
  source 1..9: note = Seed: VVGARGVGK (KRAS G12R)
LVGNRRVGG

SEQ ID NO: 41755 - protein, 9 aa, synthetic construct
  source 1..9: note = Seed: VVGARGVGK (KRAS G12R)
LVGNRRVGH

SEQ ID NO: 41756 - protein, 9 aa, synthetic construct
  source 1..9: note = Seed: VVGARGVGK (KRAS G12R)
LVGNRRVGI

SEQ ID NO: 41757 - protein, 9 aa, synthetic construct
  source 1..9: note = Seed: VVGARGVGK (KRAS G12R)
LVGNRRVGK

SEQ ID NO: 41758 - protein, 9 aa, synthetic construct
  source 1..9: note = Seed: VVGARGVGK (KRAS G12R)
LVGNRRVGL

SEQ ID NO: 41759 - protein, 9 aa, synthetic construct
  source 1..9: note = Seed: VVGARGVGK (KRAS G12R)
LVGNRRVGM

SEQ ID NO: 41760 - protein, 9 aa, synthetic construct
  source 1..9: note = Seed: VVGARGVGK (KRAS G12R)
LVGNRRVGQ

SEQ ID NO: 41761 - protein, 9 aa, synthetic construct
  source 1..9: note = Seed: VVGARGVGK (KRAS G12R)
LVGNRRVGR

SEQ ID NO: 41762 - protein, 9 aa, synthetic construct
  source 1..9: note = Seed: VVGARGVGK (KRAS G12R)
LVGNRRVGS

SEQ ID NO: 41763 - protein, 9 aa, synthetic construct
  source 1..9: note = Seed: VVGARGVGK (KRAS G12R)
LVGNRRVGT

SEQ ID NO: 41764 - protein, 9 aa, synthetic construct
  source 1..9: note = Seed: VVGARGVGK (KRAS G12R)
LVGNRRVGV

SEQ ID NO: 41765 - protein, 9 aa, synthetic construct
  source 1..9: note = Seed: VVGARGVGK (KRAS G12R)
LVGNRRVGW

SEQ ID NO: 41766 - protein, 9 aa, synthetic construct
  source 1..9: note = Seed: VVGARGVGK (KRAS G12R)
LVGNRRVGY

SEQ ID NO: 41767 - protein, 9 aa, synthetic construct
  source 1..9: note = Seed: VVGARGVGK (KRAS G12R)
LVGNRSVGL

SEQ ID NO: 41768 - protein, 9 aa, synthetic construct
  source 1..9: note = Seed: VVGARGVGK (KRAS G12R)
LVGNRSVGR

SEQ ID NO: 41769 - protein, 9 aa, synthetic construct
  source 1..9: note = Seed: VVGARGVGK (KRAS G12R)
LVGNRSVGV

SEQ ID NO: 41770 - protein, 9 aa, synthetic construct
  source 1..9: note = Seed: VVGARGVGK (KRAS G12R)
LVGNRSVGY

SEQ ID NO: 41771 - protein, 9 aa, synthetic construct
  source 1..9: note = Seed: VVGARGVGK (KRAS G12R)
LVGNRTVGY

SEQ ID NO: 41772 - protein, 9 aa, synthetic construct
  source 1..9: note = Seed: VVGARGVGK (KRAS G12R)
LVGNRVVGR

SEQ ID NO: 41773 - protein, 9 aa, synthetic construct
  source 1..9: note = Seed: VVGARGVGK (KRAS G12R)
LVGNRVVGY

SEQ ID NO: 41774 - protein, 9 aa, synthetic construct
  source 1..9: note = Seed: VVGARGVGK (KRAS G12R)
LVGPRAVGI

SEQ ID NO: 41775 - protein, 9 aa, synthetic construct
  source 1..9: note = Seed: VVGARGVGK (KRAS G12R)
LVGPRAVGL

SEQ ID NO: 41776 - protein, 9 aa, synthetic construct
  source 1..9: note = Seed: VVGARGVGK (KRAS G12R)
LVGPRAVGV

SEQ ID NO: 41777 - protein, 9 aa, synthetic construct
  source 1..9: note = Seed: VVGARGVGK (KRAS G12R)
LVGQRAVGA

SEQ ID NO: 41778 - protein, 9 aa, synthetic construct
  source 1..9: note = Seed: VVGARGVGK (KRAS G12R)
LVGQRAVGC

SEQ ID NO: 41779 - protein, 9 aa, synthetic construct
  source 1..9: note = Seed: VVGARGVGK (KRAS G12R)
LVGQRAVGF

SEQ ID NO: 41780 - protein, 9 aa, synthetic construct
  source 1..9: note = Seed: VVGARGVGK (KRAS G12R)
LVGQRAVGG

SEQ ID NO: 41781 - protein, 9 aa, synthetic construct
  source 1..9: note = Seed: VVGARGVGK (KRAS G12R)
LVGQRAVGH

SEQ ID NO: 41782 - protein, 9 aa, synthetic construct
  source 1..9: note = Seed: VVGARGVGK (KRAS G12R)
LVGQRAVGI

SEQ ID NO: 41783 - protein, 9 aa, synthetic construct
  source 1..9: note = Seed: VVGARGVGK (KRAS G12R)
LVGQRAVGL

SEQ ID NO: 41784 - protein, 9 aa, synthetic construct
  source 1..9: note = Seed: VVGARGVGK (KRAS G12R)
LVGQRAVGM

SEQ ID NO: 41785 - protein, 9 aa, synthetic construct
  source 1..9: note = Seed: VVGARGVGK (KRAS G12R)
LVGQRAVGN

SEQ ID NO: 41786 - protein, 9 aa, synthetic construct
  source 1..9: note = Seed: VVGARGVGK (KRAS G12R)
LVGQRAVGQ

SEQ ID NO: 41787 - protein, 9 aa, synthetic construct
  source 1..9: note = Seed: VVGARGVGK (KRAS G12R)
LVGQRAVGR

SEQ ID NO: 41788 - protein, 9 aa, synthetic construct
  source 1..9: note = Seed: VVGARGVGK (KRAS G12R)
LVGQRAVGS

SEQ ID NO: 41789 - protein, 9 aa, synthetic construct
  source 1..9: note = Seed: VVGARGVGK (KRAS G12R)
LVGQRAVGT

SEQ ID NO: 41790 - protein, 9 aa, synthetic construct
  source 1..9: note = Seed: VVGARGVGK (KRAS G12R)
LVGQRAVGV

SEQ ID NO: 41791 - protein, 9 aa, synthetic construct
  source 1..9: note = Seed: VVGARGVGK (KRAS G12R)
LVGQRAVGY

SEQ ID NO: 41792 - protein, 9 aa, synthetic construct
  source 1..9: note = Seed: VVGARGVGK (KRAS G12R)
LVGQRGVGA

SEQ ID NO: 41793 - protein, 9 aa, synthetic construct
  source 1..9: note = Seed: VVGARGVGK (KRAS G12R)
LVGQRGVGG

SEQ ID NO: 41794 - protein, 9 aa, synthetic construct
  source 1..9: note = Seed: VVGARGVGK (KRAS G12R)
LVGQRGVGI

SEQ ID NO: 41795 - protein, 9 aa, synthetic construct
  source 1..9: note = Seed: VVGARGVGK (KRAS G12R)
LVGQRGVGL

SEQ ID NO: 41796 - protein, 9 aa, synthetic construct
  source 1..9: note = Seed: VVGARGVGK (KRAS G12R)
LVGQRGVGM

SEQ ID NO: 41797 - protein, 9 aa, synthetic construct
  source 1..9: note = Seed: VVGARGVGK (KRAS G12R)
LVGQRGVGN

SEQ ID NO: 41798 - protein, 9 aa, synthetic construct
  source 1..9: note = Seed: VVGARGVGK (KRAS G12R)
LVGQRGVGR

SEQ ID NO: 41799 - protein, 9 aa, synthetic construct
  source 1..9: note = Seed: VVGARGVGK (KRAS G12R)
LVGQRGVGS

SEQ ID NO: 41800 - protein, 9 aa, synthetic construct
  source 1..9: note = Seed: VVGARGVGK (KRAS G12R)
LVGQRGVGT

SEQ ID NO: 41801 - protein, 9 aa, synthetic construct
  source 1..9: note = Seed: VVGARGVGK (KRAS G12R)
LVGQRGVGV

SEQ ID NO: 41802 - protein, 9 aa, synthetic construct
  source 1..9: note = Seed: VVGARGVGK (KRAS G12R)
LVGQRIVGA

SEQ ID NO: 41803 - protein, 9 aa, synthetic construct
  source 1..9: note = Seed: VVGARGVGK (KRAS G12R)
LVGQRIVGR

SEQ ID NO: 41804 - protein, 9 aa, synthetic construct
  source 1..9: note = Seed: VVGARGVGK (KRAS G12R)
LVGQRKVGA

SEQ ID NO: 41805 - protein, 9 aa, synthetic construct
  source 1..9: note = Seed: VVGARGVGK (KRAS G12R)
LVGQRKVGF

SEQ ID NO: 41806 - protein, 9 aa, synthetic construct
  source 1..9: note = Seed: VVGARGVGK (KRAS G12R)
LVGQRKVGI

SEQ ID NO: 41807 - protein, 9 aa, synthetic construct
  source 1..9: note = Seed: VVGARGVGK (KRAS G12R)
LVGQRKVGK

SEQ ID NO: 41808 - protein, 9 aa, synthetic construct
  source 1..9: note = Seed: VVGARGVGK (KRAS G12R)
LVGQRKVGL

SEQ ID NO: 41809 - protein, 9 aa, synthetic construct
  source 1..9: note = Seed: VVGARGVGK (KRAS G12R)
LVGQRKVGM

SEQ ID NO: 41810 - protein, 9 aa, synthetic construct
  source 1..9: note = Seed: VVGARGVGK (KRAS G12R)
LVGQRKVGR

SEQ ID NO: 41811 - protein, 9 aa, synthetic construct
  source 1..9: note = Seed: VVGARGVGK (KRAS G12R)
LVGQRKVGV

SEQ ID NO: 41812 - protein, 9 aa, synthetic construct
  source 1..9: note = Seed: VVGARGVGK (KRAS G12R)
LVGQRKVGY

SEQ ID NO: 41813 - protein, 9 aa, synthetic construct
  source 1..9: note = Seed: VVGARGVGK (KRAS G12R)
LVGQRNVGA

SEQ ID NO: 41814 - protein, 9 aa, synthetic construct
  source 1..9: note = Seed: VVGARGVGK (KRAS G12R)
LVGQRNVGI

SEQ ID NO: 41815 - protein, 9 aa, synthetic construct
  source 1..9: note = Seed: VVGARGVGK (KRAS G12R)
LVGQRNVGL

SEQ ID NO: 41816 - protein, 9 aa, synthetic construct
  source 1..9: note = Seed: VVGARGVGK (KRAS G12R)
LVGQRNVGM

SEQ ID NO: 41817 - protein, 9 aa, synthetic construct
  source 1..9: note = Seed: VVGARGVGK (KRAS G12R)
LVGQRNVGR

SEQ ID NO: 41818 - protein, 9 aa, synthetic construct
  source 1..9: note = Seed: VVGARGVGK (KRAS G12R)
LVGQRNVGS

SEQ ID NO: 41819 - protein, 9 aa, synthetic construct
  source 1..9: note = Seed: VVGARGVGK (KRAS G12R)
LVGQRNVGT

SEQ ID NO: 41820 - protein, 9 aa, synthetic construct
  source 1..9: note = Seed: VVGARGVGK (KRAS G12R)
LVGQRNVGV

SEQ ID NO: 41821 - protein, 9 aa, synthetic construct
  source 1..9: note = Seed: VVGARGVGK (KRAS G12R)
LVGQRNVGY

SEQ ID NO: 41822 - protein, 9 aa, synthetic construct
  source 1..9: note = Seed: VVGARGVGK (KRAS G12R)
LVGQRPVGA

SEQ ID NO: 41823 - protein, 9 aa, synthetic construct
  source 1..9: note = Seed: VVGARGVGK (KRAS G12R)
LVGQRPVGI

SEQ ID NO: 41824 - protein, 9 aa, synthetic construct
  source 1..9: note = Seed: VVGARGVGK (KRAS G12R)
LVGQRPVGL

SEQ ID NO: 41825 - protein, 9 aa, synthetic construct
  source 1..9: note = Seed: VVGARGVGK (KRAS G12R)
LVGQRPVGM

SEQ ID NO: 41826 - protein, 9 aa, synthetic construct
  source 1..9: note = Seed: VVGARGVGK (KRAS G12R)
LVGQRPVGN

SEQ ID NO: 41827 - protein, 9 aa, synthetic construct
  source 1..9: note = Seed: VVGARGVGK (KRAS G12R)
LVGQRPVGR

SEQ ID NO: 41828 - protein, 9 aa, synthetic construct
  source 1..9: note = Seed: VVGARGVGK (KRAS G12R)
LVGQRPVGS

SEQ ID NO: 41829 - protein, 9 aa, synthetic construct
  source 1..9: note = Seed: VVGARGVGK (KRAS G12R)
LVGQRPVGT

SEQ ID NO: 41830 - protein, 9 aa, synthetic construct
  source 1..9: note = Seed: VVGARGVGK (KRAS G12R)
LVGQRPVGV

SEQ ID NO: 41831 - protein, 9 aa, synthetic construct
  source 1..9: note = Seed: VVGARGVGK (KRAS G12R)
LVGQRRVGA

SEQ ID NO: 41832 - protein, 9 aa, synthetic construct
  source 1..9: note = Seed: VVGARGVGK (KRAS G12R)
LVGQRRVGF

SEQ ID NO: 41833 - protein, 9 aa, synthetic construct
  source 1..9: note = Seed: VVGARGVGK (KRAS G12R)
LVGQRRVGH

SEQ ID NO: 41834 - protein, 9 aa, synthetic construct
  source 1..9: note = Seed: VVGARGVGK (KRAS G12R)
LVGQRRVGI

SEQ ID NO: 41835 - protein, 9 aa, synthetic construct
  source 1..9: note = Seed: VVGARGVGK (KRAS G12R)
LVGQRRVGK

SEQ ID NO: 41836 - protein, 9 aa, synthetic construct
  source 1..9: note = Seed: VVGARGVGK (KRAS G12R)
LVGQRRVGL

SEQ ID NO: 41837 - protein, 9 aa, synthetic construct
  source 1..9: note = Seed: VVGARGVGK (KRAS G12R)
LVGQRRVGM

SEQ ID NO: 41838 - protein, 9 aa, synthetic construct
  source 1..9: note = Seed: VVGARGVGK (KRAS G12R)
LVGQRRVGQ

SEQ ID NO: 41839 - protein, 9 aa, synthetic construct
  source 1..9: note = Seed: VVGARGVGK (KRAS G12R)
LVGQRRVGR

SEQ ID NO: 41840 - protein, 9 aa, synthetic construct
  source 1..9: note = Seed: VVGARGVGK (KRAS G12R)
LVGQRRVGS

SEQ ID NO: 41841 - protein, 9 aa, synthetic construct
  source 1..9: note = Seed: VVGARGVGK (KRAS G12R)
LVGQRRVGT

SEQ ID NO: 41842 - protein, 9 aa, synthetic construct
  source 1..9: note = Seed: VVGARGVGK (KRAS G12R)
LVGQRRVGV

SEQ ID NO: 41843 - protein, 9 aa, synthetic construct
  source 1..9: note = Seed: VVGARGVGK (KRAS G12R)
LVGQRRVGW

SEQ ID NO: 41844 - protein, 9 aa, synthetic construct
  source 1..9: note = Seed: VVGARGVGK (KRAS G12R)
LVGQRRVGY

SEQ ID NO: 41845 - protein, 9 aa, synthetic construct
  source 1..9: note = Seed: VVGARGVGK (KRAS G12R)
LVGQRSVGA

SEQ ID NO: 41846 - protein, 9 aa, synthetic construct
  source 1..9: note = Seed: VVGARGVGK (KRAS G12R)
LVGQRSVGG

SEQ ID NO: 41847 - protein, 9 aa, synthetic construct
  source 1..9: note = Seed: VVGARGVGK (KRAS G12R)
LVGQRSVGI

SEQ ID NO: 41848 - protein, 9 aa, synthetic construct
  source 1..9: note = Seed: VVGARGVGK (KRAS G12R)
LVGQRSVGL

SEQ ID NO: 41849 - protein, 9 aa, synthetic construct
  source 1..9: note = Seed: VVGARGVGK (KRAS G12R)
LVGQRSVGM

SEQ ID NO: 41850 - protein, 9 aa, synthetic construct
  source 1..9: note = Seed: VVGARGVGK (KRAS G12R)
LVGQRSVGR

SEQ ID NO: 41851 - protein, 9 aa, synthetic construct
  source 1..9: note = Seed: VVGARGVGK (KRAS G12R)
LVGQRSVGS

SEQ ID NO: 41852 - protein, 9 aa, synthetic construct
  source 1..9: note = Seed: VVGARGVGK (KRAS G12R)
LVGQRSVGT

SEQ ID NO: 41853 - protein, 9 aa, synthetic construct
  source 1..9: note = Seed: VVGARGVGK (KRAS G12R)
LVGQRSVGV

SEQ ID NO: 41854 - protein, 9 aa, synthetic construct
  source 1..9: note = Seed: VVGARGVGK (KRAS G12R)
LVGQRSVGY

SEQ ID NO: 41855 - protein, 9 aa, synthetic construct
  source 1..9: note = Seed: VVGARGVGK (KRAS G12R)
LVGQRTVGA

SEQ ID NO: 41856 - protein, 9 aa, synthetic construct
  source 1..9: note = Seed: VVGARGVGK (KRAS G12R)
LVGQRTVGI

SEQ ID NO: 41857 - protein, 9 aa, synthetic construct
  source 1..9: note = Seed: VVGARGVGK (KRAS G12R)
LVGQRTVGL

SEQ ID NO: 41858 - protein, 9 aa, synthetic construct
  source 1..9: note = Seed: VVGARGVGK (KRAS G12R)
LVGQRTVGM

SEQ ID NO: 41859 - protein, 9 aa, synthetic construct
  source 1..9: note = Seed: VVGARGVGK (KRAS G12R)
LVGQRTVGR

SEQ ID NO: 41860 - protein, 9 aa, synthetic construct
  source 1..9: note = Seed: VVGARGVGK (KRAS G12R)
LVGQRTVGS

SEQ ID NO: 41861 - protein, 9 aa, synthetic construct
  source 1..9: note = Seed: VVGARGVGK (KRAS G12R)
LVGQRTVGT

SEQ ID NO: 41862 - protein, 9 aa, synthetic construct
  source 1..9: note = Seed: VVGARGVGK (KRAS G12R)
LVGQRTVGV

SEQ ID NO: 41863 - protein, 9 aa, synthetic construct
  source 1..9: note = Seed: VVGARGVGK (KRAS G12R)
LVGQRVVGA

SEQ ID NO: 41864 - protein, 9 aa, synthetic construct
  source 1..9: note = Seed: VVGARGVGK (KRAS G12R)
LVGQRVVGI

SEQ ID NO: 41865 - protein, 9 aa, synthetic construct
  source 1..9: note = Seed: VVGARGVGK (KRAS G12R)
LVGQRVVGL

SEQ ID NO: 41866 - protein, 9 aa, synthetic construct
  source 1..9: note = Seed: VVGARGVGK (KRAS G12R)
LVGQRVVGN

SEQ ID NO: 41867 - protein, 9 aa, synthetic construct
  source 1..9: note = Seed: VVGARGVGK (KRAS G12R)
LVGQRVVGR

SEQ ID NO: 41868 - protein, 9 aa, synthetic construct
  source 1..9: note = Seed: VVGARGVGK (KRAS G12R)
LVGQRVVGS

SEQ ID NO: 41869 - protein, 9 aa, synthetic construct
  source 1..9: note = Seed: VVGARGVGK (KRAS G12R)
LVGQRVVGV

SEQ ID NO: 41870 - protein, 9 aa, synthetic construct
  source 1..9: note = Seed: VVGARGVGK (KRAS G12R)
LVGRRAVGA

SEQ ID NO: 41871 - protein, 9 aa, synthetic construct
  source 1..9: note = Seed: VVGARGVGK (KRAS G12R)
LVGRRAVGF

SEQ ID NO: 41872 - protein, 9 aa, synthetic construct
  source 1..9: note = Seed: VVGARGVGK (KRAS G12R)
LVGRRAVGH

SEQ ID NO: 41873 - protein, 9 aa, synthetic construct
  source 1..9: note = Seed: VVGARGVGK (KRAS G12R)
LVGRRAVGI

SEQ ID NO: 41874 - protein, 9 aa, synthetic construct
  source 1..9: note = Seed: VVGARGVGK (KRAS G12R)
LVGRRAVGK

SEQ ID NO: 41875 - protein, 9 aa, synthetic construct
  source 1..9: note = Seed: VVGARGVGK (KRAS G12R)
LVGRRAVGL

SEQ ID NO: 41876 - protein, 9 aa, synthetic construct
  source 1..9: note = Seed: VVGARGVGK (KRAS G12R)
LVGRRAVGM

SEQ ID NO: 41877 - protein, 9 aa, synthetic construct
  source 1..9: note = Seed: VVGARGVGK (KRAS G12R)
LVGRRAVGQ

SEQ ID NO: 41878 - protein, 9 aa, synthetic construct
  source 1..9: note = Seed: VVGARGVGK (KRAS G12R)
LVGRRAVGR

SEQ ID NO: 41879 - protein, 9 aa, synthetic construct
  source 1..9: note = Seed: VVGARGVGK (KRAS G12R)
LVGRRAVGS

SEQ ID NO: 41880 - protein, 9 aa, synthetic construct
  source 1..9: note = Seed: VVGARGVGK (KRAS G12R)
LVGRRAVGV

SEQ ID NO: 41881 - protein, 9 aa, synthetic construct
  source 1..9: note = Seed: VVGARGVGK (KRAS G12R)
LVGRRAVGY

SEQ ID NO: 41882 - protein, 9 aa, synthetic construct
  source 1..9: note = Seed: VVGARGVGK (KRAS G12R)
LVGRRGVGR

SEQ ID NO: 41883 - protein, 9 aa, synthetic construct
  source 1..9: note = Seed: VVGARGVGK (KRAS G12R)
LVGRRGVGY

SEQ ID NO: 41884 - protein, 9 aa, synthetic construct
  source 1..9: note = Seed: VVGARGVGK (KRAS G12R)
LVGRRHVGF

SEQ ID NO: 41885 - protein, 9 aa, synthetic construct
  source 1..9: note = Seed: VVGARGVGK (KRAS G12R)
LVGRRHVGL

SEQ ID NO: 41886 - protein, 9 aa, synthetic construct
  source 1..9: note = Seed: VVGARGVGK (KRAS G12R)
LVGRRHVGM

SEQ ID NO: 41887 - protein, 9 aa, synthetic construct
  source 1..9: note = Seed: VVGARGVGK (KRAS G12R)
LVGRRHVGR

SEQ ID NO: 41888 - protein, 9 aa, synthetic construct
  source 1..9: note = Seed: VVGARGVGK (KRAS G12R)
LVGRRHVGV

SEQ ID NO: 41889 - protein, 9 aa, synthetic construct
  source 1..9: note = Seed: VVGARGVGK (KRAS G12R)
LVGRRHVGY

SEQ ID NO: 41890 - protein, 9 aa, synthetic construct
  source 1..9: note = Seed: VVGARGVGK (KRAS G12R)
LVGRRIVGR

SEQ ID NO: 41891 - protein, 9 aa, synthetic construct
  source 1..9: note = Seed: VVGARGVGK (KRAS G12R)
LVGRRIVGY

SEQ ID NO: 41892 - protein, 9 aa, synthetic construct
  source 1..9: note = Seed: VVGARGVGK (KRAS G12R)
LVGRRKVGA

SEQ ID NO: 41893 - protein, 9 aa, synthetic construct
  source 1..9: note = Seed: VVGARGVGK (KRAS G12R)
LVGRRKVGE

SEQ ID NO: 41894 - protein, 9 aa, synthetic construct
  source 1..9: note = Seed: VVGARGVGK (KRAS G12R)
LVGRRKVGF

SEQ ID NO: 41895 - protein, 9 aa, synthetic construct
  source 1..9: note = Seed: VVGARGVGK (KRAS G12R)
LVGRRKVGG

SEQ ID NO: 41896 - protein, 9 aa, synthetic construct
  source 1..9: note = Seed: VVGARGVGK (KRAS G12R)
LVGRRKVGH

SEQ ID NO: 41897 - protein, 9 aa, synthetic construct
  source 1..9: note = Seed: VVGARGVGK (KRAS G12R)
LVGRRKVGI

SEQ ID NO: 41898 - protein, 9 aa, synthetic construct
  source 1..9: note = Seed: VVGARGVGK (KRAS G12R)
LVGRRKVGK

SEQ ID NO: 41899 - protein, 9 aa, synthetic construct
  source 1..9: note = Seed: VVGARGVGK (KRAS G12R)
LVGRRKVGL

SEQ ID NO: 41900 - protein, 9 aa, synthetic construct
  source 1..9: note = Seed: VVGARGVGK (KRAS G12R)
LVGRRKVGM

SEQ ID NO: 41901 - protein, 9 aa, synthetic construct
  source 1..9: note = Seed: VVGARGVGK (KRAS G12R)
LVGRRKVGN

SEQ ID NO: 41902 - protein, 9 aa, synthetic construct
  source 1..9: note = Seed: VVGARGVGK (KRAS G12R)
LVGRRKVGP

SEQ ID NO: 41903 - protein, 9 aa, synthetic construct
  source 1..9: note = Seed: VVGARGVGK (KRAS G12R)
LVGRRKVGQ

SEQ ID NO: 41904 - protein, 9 aa, synthetic construct
  source 1..9: note = Seed: VVGARGVGK (KRAS G12R)
LVGRRKVGR

SEQ ID NO: 41905 - protein, 9 aa, synthetic construct
  source 1..9: note = Seed: VVGARGVGK (KRAS G12R)
LVGRRKVGS

SEQ ID NO: 41906 - protein, 9 aa, synthetic construct
  source 1..9: note = Seed: VVGARGVGK (KRAS G12R)
LVGRRKVGT

SEQ ID NO: 41907 - protein, 9 aa, synthetic construct
  source 1..9: note = Seed: VVGARGVGK (KRAS G12R)
LVGRRKVGV

SEQ ID NO: 41908 - protein, 9 aa, synthetic construct
  source 1..9: note = Seed: VVGARGVGK (KRAS G12R)
LVGRRKVGW

SEQ ID NO: 41909 - protein, 9 aa, synthetic construct
  source 1..9: note = Seed: VVGARGVGK (KRAS G12R)
LVGRRKVGY

SEQ ID NO: 41910 - protein, 9 aa, synthetic construct
  source 1..9: note = Seed: VVGARGVGK (KRAS G12R)
LVGRRLVGR

SEQ ID NO: 41911 - protein, 9 aa, synthetic construct
  source 1..9: note = Seed: VVGARGVGK (KRAS G12R)
LVGRRLVGY

SEQ ID NO: 41912 - protein, 9 aa, synthetic construct
  source 1..9: note = Seed: VVGARGVGK (KRAS G12R)
LVGRRMVGR

SEQ ID NO: 41913 - protein, 9 aa, synthetic construct
  source 1..9: note = Seed: VVGARGVGK (KRAS G12R)
LVGRRMVGY

SEQ ID NO: 41914 - protein, 9 aa, synthetic construct
  source 1..9: note = Seed: VVGARGVGK (KRAS G12R)
LVGRRNVGA

SEQ ID NO: 41915 - protein, 9 aa, synthetic construct
  source 1..9: note = Seed: VVGARGVGK (KRAS G12R)
LVGRRNVGF

SEQ ID NO: 41916 - protein, 9 aa, synthetic construct
  source 1..9: note = Seed: VVGARGVGK (KRAS G12R)
LVGRRNVGI

SEQ ID NO: 41917 - protein, 9 aa, synthetic construct
  source 1..9: note = Seed: VVGARGVGK (KRAS G12R)
LVGRRNVGK

SEQ ID NO: 41918 - protein, 9 aa, synthetic construct
  source 1..9: note = Seed: VVGARGVGK (KRAS G12R)
LVGRRNVGL

SEQ ID NO: 41919 - protein, 9 aa, synthetic construct
  source 1..9: note = Seed: VVGARGVGK (KRAS G12R)
LVGRRNVGM

SEQ ID NO: 41920 - protein, 9 aa, synthetic construct
  source 1..9: note = Seed: VVGARGVGK (KRAS G12R)
LVGRRNVGR

SEQ ID NO: 41921 - protein, 9 aa, synthetic construct
  source 1..9: note = Seed: VVGARGVGK (KRAS G12R)
LVGRRNVGV

SEQ ID NO: 41922 - protein, 9 aa, synthetic construct
  source 1..9: note = Seed: VVGARGVGK (KRAS G12R)
LVGRRNVGY

SEQ ID NO: 41923 - protein, 9 aa, synthetic construct
  source 1..9: note = Seed: VVGARGVGK (KRAS G12R)
LVGRRPVGA

SEQ ID NO: 41924 - protein, 9 aa, synthetic construct
  source 1..9: note = Seed: VVGARGVGK (KRAS G12R)
LVGRRPVGF

SEQ ID NO: 41925 - protein, 9 aa, synthetic construct
  source 1..9: note = Seed: VVGARGVGK (KRAS G12R)
LVGRRPVGI

SEQ ID NO: 41926 - protein, 9 aa, synthetic construct
  source 1..9: note = Seed: VVGARGVGK (KRAS G12R)
LVGRRPVGK

SEQ ID NO: 41927 - protein, 9 aa, synthetic construct
  source 1..9: note = Seed: VVGARGVGK (KRAS G12R)
LVGRRPVGL

SEQ ID NO: 41928 - protein, 9 aa, synthetic construct
  source 1..9: note = Seed: VVGARGVGK (KRAS G12R)
LVGRRPVGM

SEQ ID NO: 41929 - protein, 9 aa, synthetic construct
  source 1..9: note = Seed: VVGARGVGK (KRAS G12R)
LVGRRPVGQ

SEQ ID NO: 41930 - protein, 9 aa, synthetic construct
  source 1..9: note = Seed: VVGARGVGK (KRAS G12R)
LVGRRPVGR

SEQ ID NO: 41931 - protein, 9 aa, synthetic construct
  source 1..9: note = Seed: VVGARGVGK (KRAS G12R)
LVGRRPVGS

SEQ ID NO: 41932 - protein, 9 aa, synthetic construct
  source 1..9: note = Seed: VVGARGVGK (KRAS G12R)
LVGRRPVGV

SEQ ID NO: 41933 - protein, 9 aa, synthetic construct
  source 1..9: note = Seed: VVGARGVGK (KRAS G12R)
LVGRRPVGY

SEQ ID NO: 41934 - protein, 9 aa, synthetic construct
  source 1..9: note = Seed: VVGARGVGK (KRAS G12R)
LVGRRQVGF

SEQ ID NO: 41935 - protein, 9 aa, synthetic construct
  source 1..9: note = Seed: VVGARGVGK (KRAS G12R)
LVGRRQVGK

SEQ ID NO: 41936 - protein, 9 aa, synthetic construct
  source 1..9: note = Seed: VVGARGVGK (KRAS G12R)
LVGRRQVGM

SEQ ID NO: 41937 - protein, 9 aa, synthetic construct
  source 1..9: note = Seed: VVGARGVGK (KRAS G12R)
LVGRRQVGR

SEQ ID NO: 41938 - protein, 9 aa, synthetic construct
  source 1..9: note = Seed: VVGARGVGK (KRAS G12R)
LVGRRQVGV

SEQ ID NO: 41939 - protein, 9 aa, synthetic construct
  source 1..9: note = Seed: VVGARGVGK (KRAS G12R)
LVGRRQVGY

SEQ ID NO: 41940 - protein, 9 aa, synthetic construct
  source 1..9: note = Seed: VVGARGVGK (KRAS G12R)
LVGRRRVGA

SEQ ID NO: 41941 - protein, 9 aa, synthetic construct
  source 1..9: note = Seed: VVGARGVGK (KRAS G12R)
LVGRRRVGC

SEQ ID NO: 41942 - protein, 9 aa, synthetic construct
  source 1..9: note = Seed: VVGARGVGK (KRAS G12R)
LVGRRRVGD

SEQ ID NO: 41943 - protein, 9 aa, synthetic construct
  source 1..9: note = Seed: VVGARGVGK (KRAS G12R)
LVGRRRVGE

SEQ ID NO: 41944 - protein, 9 aa, synthetic construct
  source 1..9: note = Seed: VVGARGVGK (KRAS G12R)
LVGRRRVGF

SEQ ID NO: 41945 - protein, 9 aa, synthetic construct
  source 1..9: note = Seed: VVGARGVGK (KRAS G12R)
LVGRRRVGG

SEQ ID NO: 41946 - protein, 9 aa, synthetic construct
  source 1..9: note = Seed: VVGARGVGK (KRAS G12R)
LVGRRRVGH

SEQ ID NO: 41947 - protein, 9 aa, synthetic construct
  source 1..9: note = Seed: VVGARGVGK (KRAS G12R)
LVGRRRVGI

SEQ ID NO: 41948 - protein, 9 aa, synthetic construct
  source 1..9: note = Seed: VVGARGVGK (KRAS G12R)
LVGRRRVGK

SEQ ID NO: 41949 - protein, 9 aa, synthetic construct
  source 1..9: note = Seed: VVGARGVGK (KRAS G12R)
LVGRRRVGL

SEQ ID NO: 41950 - protein, 9 aa, synthetic construct
  source 1..9: note = Seed: VVGARGVGK (KRAS G12R)
LVGRRRVGM

SEQ ID NO: 41951 - protein, 9 aa, synthetic construct
  source 1..9: note = Seed: VVGARGVGK (KRAS G12R)
LVGRRRVGN

SEQ ID NO: 41952 - protein, 9 aa, synthetic construct
  source 1..9: note = Seed: VVGARGVGK (KRAS G12R)
LVGRRRVGP

SEQ ID NO: 41953 - protein, 9 aa, synthetic construct
  source 1..9: note = Seed: VVGARGVGK (KRAS G12R)
LVGRRRVGQ

SEQ ID NO: 41954 - protein, 9 aa, synthetic construct
  source 1..9: note = Seed: VVGARGVGK (KRAS G12R)
LVGRRRVGR

SEQ ID NO: 41955 - protein, 9 aa, synthetic construct
  source 1..9: note = Seed: VVGARGVGK (KRAS G12R)
LVGRRRVGS

SEQ ID NO: 41956 - protein, 9 aa, synthetic construct
  source 1..9: note = Seed: VVGARGVGK (KRAS G12R)
LVGRRRVGT

SEQ ID NO: 41957 - protein, 9 aa, synthetic construct
  source 1..9: note = Seed: VVGARGVGK (KRAS G12R)
LVGRRRVGV

SEQ ID NO: 41958 - protein, 9 aa, synthetic construct
  source 1..9: note = Seed: VVGARGVGK (KRAS G12R)
LVGRRRVGW

SEQ ID NO: 41959 - protein, 9 aa, synthetic construct
  source 1..9: note = Seed: VVGARGVGK (KRAS G12R)
LVGRRRVGY

SEQ ID NO: 41960 - protein, 9 aa, synthetic construct
  source 1..9: note = Seed: VVGARGVGK (KRAS G12R)
LVGRRSVGF

SEQ ID NO: 41961 - protein, 9 aa, synthetic construct
  source 1..9: note = Seed: VVGARGVGK (KRAS G12R)
LVGRRSVGH

SEQ ID NO: 41962 - protein, 9 aa, synthetic construct
  source 1..9: note = Seed: VVGARGVGK (KRAS G12R)
LVGRRSVGI

SEQ ID NO: 41963 - protein, 9 aa, synthetic construct
  source 1..9: note = Seed: VVGARGVGK (KRAS G12R)
LVGRRSVGK

SEQ ID NO: 41964 - protein, 9 aa, synthetic construct
  source 1..9: note = Seed: VVGARGVGK (KRAS G12R)
LVGRRSVGL

SEQ ID NO: 41965 - protein, 9 aa, synthetic construct
  source 1..9: note = Seed: VVGARGVGK (KRAS G12R)
LVGRRSVGM

SEQ ID NO: 41966 - protein, 9 aa, synthetic construct
  source 1..9: note = Seed: VVGARGVGK (KRAS G12R)
LVGRRSVGR

SEQ ID NO: 41967 - protein, 9 aa, synthetic construct
  source 1..9: note = Seed: VVGARGVGK (KRAS G12R)
LVGRRSVGV

SEQ ID NO: 41968 - protein, 9 aa, synthetic construct
  source 1..9: note = Seed: VVGARGVGK (KRAS G12R)
LVGRRSVGY

SEQ ID NO: 41969 - protein, 9 aa, synthetic construct
  source 1..9: note = Seed: VVGARGVGK (KRAS G12R)
LVGRRTVGF

SEQ ID NO: 41970 - protein, 9 aa, synthetic construct
  source 1..9: note = Seed: VVGARGVGK (KRAS G12R)
LVGRRTVGI

SEQ ID NO: 41971 - protein, 9 aa, synthetic construct
  source 1..9: note = Seed: VVGARGVGK (KRAS G12R)
LVGRRTVGK

SEQ ID NO: 41972 - protein, 9 aa, synthetic construct
  source 1..9: note = Seed: VVGARGVGK (KRAS G12R)
LVGRRTVGL

SEQ ID NO: 41973 - protein, 9 aa, synthetic construct
  source 1..9: note = Seed: VVGARGVGK (KRAS G12R)
LVGRRTVGM

SEQ ID NO: 41974 - protein, 9 aa, synthetic construct
  source 1..9: note = Seed: VVGARGVGK (KRAS G12R)
LVGRRTVGR

SEQ ID NO: 41975 - protein, 9 aa, synthetic construct
  source 1..9: note = Seed: VVGARGVGK (KRAS G12R)
LVGRRTVGV

SEQ ID NO: 41976 - protein, 9 aa, synthetic construct
  source 1..9: note = Seed: VVGARGVGK (KRAS G12R)
LVGRRTVGY

SEQ ID NO: 41977 - protein, 9 aa, synthetic construct
  source 1..9: note = Seed: VVGARGVGK (KRAS G12R)
LVGRRVVGA

SEQ ID NO: 41978 - protein, 9 aa, synthetic construct
  source 1..9: note = Seed: VVGARGVGK (KRAS G12R)
LVGRRVVGF

SEQ ID NO: 41979 - protein, 9 aa, synthetic construct
  source 1..9: note = Seed: VVGARGVGK (KRAS G12R)
LVGRRVVGK

SEQ ID NO: 41980 - protein, 9 aa, synthetic construct
  source 1..9: note = Seed: VVGARGVGK (KRAS G12R)
LVGRRVVGM

SEQ ID NO: 41981 - protein, 9 aa, synthetic construct
  source 1..9: note = Seed: VVGARGVGK (KRAS G12R)
LVGRRVVGR

SEQ ID NO: 41982 - protein, 9 aa, synthetic construct
  source 1..9: note = Seed: VVGARGVGK (KRAS G12R)
LVGRRVVGV

SEQ ID NO: 41983 - protein, 9 aa, synthetic construct
  source 1..9: note = Seed: VVGARGVGK (KRAS G12R)
LVGRRVVGY

SEQ ID NO: 41984 - protein, 9 aa, synthetic construct
  source 1..9: note = Seed: VVGARGVGK (KRAS G12R)
LVGSRAVGA

SEQ ID NO: 41985 - protein, 9 aa, synthetic construct
  source 1..9: note = Seed: VVGARGVGK (KRAS G12R)
LVGSRAVGC

SEQ ID NO: 41986 - protein, 9 aa, synthetic construct
  source 1..9: note = Seed: VVGARGVGK (KRAS G12R)
LVGSRAVGF

SEQ ID NO: 41987 - protein, 9 aa, synthetic construct
  source 1..9: note = Seed: VVGARGVGK (KRAS G12R)
LVGSRAVGG

SEQ ID NO: 41988 - protein, 9 aa, synthetic construct
  source 1..9: note = Seed: VVGARGVGK (KRAS G12R)
LVGSRAVGH

SEQ ID NO: 41989 - protein, 9 aa, synthetic construct
  source 1..9: note = Seed: VVGARGVGK (KRAS G12R)
LVGSRAVGI

SEQ ID NO: 41990 - protein, 9 aa, synthetic construct
  source 1..9: note = Seed: VVGARGVGK (KRAS G12R)
LVGSRAVGK

SEQ ID NO: 41991 - protein, 9 aa, synthetic construct
  source 1..9: note = Seed: VVGARGVGK (KRAS G12R)
LVGSRAVGL

SEQ ID NO: 41992 - protein, 9 aa, synthetic construct
  source 1..9: note = Seed: VVGARGVGK (KRAS G12R)
LVGSRAVGM

SEQ ID NO: 41993 - protein, 9 aa, synthetic construct
  source 1..9: note = Seed: VVGARGVGK (KRAS G12R)
LVGSRAVGN

SEQ ID NO: 41994 - protein, 9 aa, synthetic construct
  source 1..9: note = Seed: VVGARGVGK (KRAS G12R)
LVGSRAVGP

SEQ ID NO: 41995 - protein, 9 aa, synthetic construct
  source 1..9: note = Seed: VVGARGVGK (KRAS G12R)
LVGSRAVGQ

SEQ ID NO: 41996 - protein, 9 aa, synthetic construct
  source 1..9: note = Seed: VVGARGVGK (KRAS G12R)
LVGSRAVGR

SEQ ID NO: 41997 - protein, 9 aa, synthetic construct
  source 1..9: note = Seed: VVGARGVGK (KRAS G12R)
LVGSRAVGS

SEQ ID NO: 41998 - protein, 9 aa, synthetic construct
  source 1..9: note = Seed: VVGARGVGK (KRAS G12R)
LVGSRAVGT

SEQ ID NO: 41999 - protein, 9 aa, synthetic construct
  source 1..9: note = Seed: VVGARGVGK (KRAS G12R)
LVGSRAVGV

SEQ ID NO: 42000 - protein, 9 aa, synthetic construct
  source 1..9: note = Seed: VVGARGVGK (KRAS G12R)
LVGSRAVGW

SEQ ID NO: 42001 - protein, 9 aa, synthetic construct
  source 1..9: note = Seed: VVGARGVGK (KRAS G12R)
LVGSRAVGY

SEQ ID NO: 42002 - protein, 9 aa, synthetic construct
  source 1..9: note = Seed: VVGARGVGK (KRAS G12R)
LVGSRGVGA

SEQ ID NO: 42003 - protein, 9 aa, synthetic construct
  source 1..9: note = Seed: VVGARGVGK (KRAS G12R)
LVGSRGVGF

SEQ ID NO: 42004 - protein, 9 aa, synthetic construct
  source 1..9: note = Seed: VVGARGVGK (KRAS G12R)
LVGSRGVGG

SEQ ID NO: 42005 - protein, 9 aa, synthetic construct
  source 1..9: note = Seed: VVGARGVGK (KRAS G12R)
LVGSRGVGI

SEQ ID NO: 42006 - protein, 9 aa, synthetic construct
  source 1..9: note = Seed: VVGARGVGK (KRAS G12R)
LVGSRGVGL

SEQ ID NO: 42007 - protein, 9 aa, synthetic construct
  source 1..9: note = Seed: VVGARGVGK (KRAS G12R)
LVGSRGVGM

SEQ ID NO: 42008 - protein, 9 aa, synthetic construct
  source 1..9: note = Seed: VVGARGVGK (KRAS G12R)
LVGSRGVGR

SEQ ID NO: 42009 - protein, 9 aa, synthetic construct
  source 1..9: note = Seed: VVGARGVGK (KRAS G12R)
LVGSRGVGS

SEQ ID NO: 42010 - protein, 9 aa, synthetic construct
  source 1..9: note = Seed: VVGARGVGK (KRAS G12R)
LVGSRGVGT

SEQ ID NO: 42011 - protein, 9 aa, synthetic construct
  source 1..9: note = Seed: VVGARGVGK (KRAS G12R)
LVGSRGVGV

SEQ ID NO: 42012 - protein, 9 aa, synthetic construct
  source 1..9: note = Seed: VVGARGVGK (KRAS G12R)
LVGSRHVGA

SEQ ID NO: 42013 - protein, 9 aa, synthetic construct
  source 1..9: note = Seed: VVGARGVGK (KRAS G12R)
LVGSRHVGR

SEQ ID NO: 42014 - protein, 9 aa, synthetic construct
  source 1..9: note = Seed: VVGARGVGK (KRAS G12R)
LVGSRHVGY

SEQ ID NO: 42015 - protein, 9 aa, synthetic construct
  source 1..9: note = Seed: VVGARGVGK (KRAS G12R)
LVGSRIVGA

SEQ ID NO: 42016 - protein, 9 aa, synthetic construct
  source 1..9: note = Seed: VVGARGVGK (KRAS G12R)
LVGSRIVGG

SEQ ID NO: 42017 - protein, 9 aa, synthetic construct
  source 1..9: note = Seed: VVGARGVGK (KRAS G12R)
LVGSRIVGI

SEQ ID NO: 42018 - protein, 9 aa, synthetic construct
  source 1..9: note = Seed: VVGARGVGK (KRAS G12R)
LVGSRIVGR

SEQ ID NO: 42019 - protein, 9 aa, synthetic construct
  source 1..9: note = Seed: VVGARGVGK (KRAS G12R)
LVGSRIVGS

SEQ ID NO: 42020 - protein, 9 aa, synthetic construct
  source 1..9: note = Seed: VVGARGVGK (KRAS G12R)
LVGSRIVGT

SEQ ID NO: 42021 - protein, 9 aa, synthetic construct
  source 1..9: note = Seed: VVGARGVGK (KRAS G12R)
LVGSRIVGV

SEQ ID NO: 42022 - protein, 9 aa, synthetic construct
  source 1..9: note = Seed: VVGARGVGK (KRAS G12R)
LVGSRKVGA

SEQ ID NO: 42023 - protein, 9 aa, synthetic construct
  source 1..9: note = Seed: VVGARGVGK (KRAS G12R)
LVGSRKVGF

SEQ ID NO: 42024 - protein, 9 aa, synthetic construct
  source 1..9: note = Seed: VVGARGVGK (KRAS G12R)
LVGSRKVGH

SEQ ID NO: 42025 - protein, 9 aa, synthetic construct
  source 1..9: note = Seed: VVGARGVGK (KRAS G12R)
LVGSRKVGI

SEQ ID NO: 42026 - protein, 9 aa, synthetic construct
  source 1..9: note = Seed: VVGARGVGK (KRAS G12R)
LVGSRKVGK

SEQ ID NO: 42027 - protein, 9 aa, synthetic construct
  source 1..9: note = Seed: VVGARGVGK (KRAS G12R)
LVGSRKVGL

SEQ ID NO: 42028 - protein, 9 aa, synthetic construct
  source 1..9: note = Seed: VVGARGVGK (KRAS G12R)
LVGSRKVGM

SEQ ID NO: 42029 - protein, 9 aa, synthetic construct
  source 1..9: note = Seed: VVGARGVGK (KRAS G12R)
LVGSRKVGQ

SEQ ID NO: 42030 - protein, 9 aa, synthetic construct
  source 1..9: note = Seed: VVGARGVGK (KRAS G12R)
LVGSRKVGR

SEQ ID NO: 42031 - protein, 9 aa, synthetic construct
  source 1..9: note = Seed: VVGARGVGK (KRAS G12R)
LVGSRKVGS

SEQ ID NO: 42032 - protein, 9 aa, synthetic construct
  source 1..9: note = Seed: VVGARGVGK (KRAS G12R)
LVGSRKVGT

SEQ ID NO: 42033 - protein, 9 aa, synthetic construct
  source 1..9: note = Seed: VVGARGVGK (KRAS G12R)
LVGSRKVGV

SEQ ID NO: 42034 - protein, 9 aa, synthetic construct
  source 1..9: note = Seed: VVGARGVGK (KRAS G12R)
LVGSRKVGW

SEQ ID NO: 42035 - protein, 9 aa, synthetic construct
  source 1..9: note = Seed: VVGARGVGK (KRAS G12R)
LVGSRKVGY

SEQ ID NO: 42036 - protein, 9 aa, synthetic construct
  source 1..9: note = Seed: VVGARGVGK (KRAS G12R)
LVGSRLVGA

SEQ ID NO: 42037 - protein, 9 aa, synthetic construct
  source 1..9: note = Seed: VVGARGVGK (KRAS G12R)
LVGSRLVGG

SEQ ID NO: 42038 - protein, 9 aa, synthetic construct
  source 1..9: note = Seed: VVGARGVGK (KRAS G12R)
LVGSRLVGR

SEQ ID NO: 42039 - protein, 9 aa, synthetic construct
  source 1..9: note = Seed: VVGARGVGK (KRAS G12R)
LVGSRLVGS

SEQ ID NO: 42040 - protein, 9 aa, synthetic construct
  source 1..9: note = Seed: VVGARGVGK (KRAS G12R)
LVGSRMVGA

SEQ ID NO: 42041 - protein, 9 aa, synthetic construct
  source 1..9: note = Seed: VVGARGVGK (KRAS G12R)
LVGSRMVGR

SEQ ID NO: 42042 - protein, 9 aa, synthetic construct
  source 1..9: note = Seed: VVGARGVGK (KRAS G12R)
LVGSRMVGS

SEQ ID NO: 42043 - protein, 9 aa, synthetic construct
  source 1..9: note = Seed: VVGARGVGK (KRAS G12R)
LVGSRNVGA

SEQ ID NO: 42044 - protein, 9 aa, synthetic construct
  source 1..9: note = Seed: VVGARGVGK (KRAS G12R)
LVGSRNVGI

SEQ ID NO: 42045 - protein, 9 aa, synthetic construct
  source 1..9: note = Seed: VVGARGVGK (KRAS G12R)
LVGSRNVGL

SEQ ID NO: 42046 - protein, 9 aa, synthetic construct
  source 1..9: note = Seed: VVGARGVGK (KRAS G12R)
LVGSRNVGR

SEQ ID NO: 42047 - protein, 9 aa, synthetic construct
  source 1..9: note = Seed: VVGARGVGK (KRAS G12R)
LVGSRNVGV

SEQ ID NO: 42048 - protein, 9 aa, synthetic construct
  source 1..9: note = Seed: VVGARGVGK (KRAS G12R)
LVGSRNVGY

SEQ ID NO: 42049 - protein, 9 aa, synthetic construct
  source 1..9: note = Seed: VVGARGVGK (KRAS G12R)
LVGSRPVGA

SEQ ID NO: 42050 - protein, 9 aa, synthetic construct
  source 1..9: note = Seed: VVGARGVGK (KRAS G12R)
LVGSRPVGF

SEQ ID NO: 42051 - protein, 9 aa, synthetic construct
  source 1..9: note = Seed: VVGARGVGK (KRAS G12R)
LVGSRPVGG

SEQ ID NO: 42052 - protein, 9 aa, synthetic construct
  source 1..9: note = Seed: VVGARGVGK (KRAS G12R)
LVGSRPVGH

SEQ ID NO: 42053 - protein, 9 aa, synthetic construct
  source 1..9: note = Seed: VVGARGVGK (KRAS G12R)
LVGSRPVGI

SEQ ID NO: 42054 - protein, 9 aa, synthetic construct
  source 1..9: note = Seed: VVGARGVGK (KRAS G12R)
LVGSRPVGK

SEQ ID NO: 42055 - protein, 9 aa, synthetic construct
  source 1..9: note = Seed: VVGARGVGK (KRAS G12R)
LVGSRPVGL

SEQ ID NO: 42056 - protein, 9 aa, synthetic construct
  source 1..9: note = Seed: VVGARGVGK (KRAS G12R)
LVGSRPVGM

SEQ ID NO: 42057 - protein, 9 aa, synthetic construct
  source 1..9: note = Seed: VVGARGVGK (KRAS G12R)
LVGSRPVGN

SEQ ID NO: 42058 - protein, 9 aa, synthetic construct
  source 1..9: note = Seed: VVGARGVGK (KRAS G12R)
LVGSRPVGP

SEQ ID NO: 42059 - protein, 9 aa, synthetic construct
  source 1..9: note = Seed: VVGARGVGK (KRAS G12R)
LVGSRPVGQ

SEQ ID NO: 42060 - protein, 9 aa, synthetic construct
  source 1..9: note = Seed: VVGARGVGK (KRAS G12R)
LVGSRPVGR

SEQ ID NO: 42061 - protein, 9 aa, synthetic construct
  source 1..9: note = Seed: VVGARGVGK (KRAS G12R)
LVGSRPVGS

SEQ ID NO: 42062 - protein, 9 aa, synthetic construct
  source 1..9: note = Seed: VVGARGVGK (KRAS G12R)
LVGSRPVGT

SEQ ID NO: 42063 - protein, 9 aa, synthetic construct
  source 1..9: note = Seed: VVGARGVGK (KRAS G12R)
LVGSRPVGV

SEQ ID NO: 42064 - protein, 9 aa, synthetic construct
  source 1..9: note = Seed: VVGARGVGK (KRAS G12R)
LVGSRPVGW

SEQ ID NO: 42065 - protein, 9 aa, synthetic construct
  source 1..9: note = Seed: VVGARGVGK (KRAS G12R)
LVGSRPVGY

SEQ ID NO: 42066 - protein, 9 aa, synthetic construct
  source 1..9: note = Seed: VVGARGVGK (KRAS G12R)
LVGSRQVGR

SEQ ID NO: 42067 - protein, 9 aa, synthetic construct
  source 1..9: note = Seed: VVGARGVGK (KRAS G12R)
LVGSRRVGA

SEQ ID NO: 42068 - protein, 9 aa, synthetic construct
  source 1..9: note = Seed: VVGARGVGK (KRAS G12R)
LVGSRRVGF

SEQ ID NO: 42069 - protein, 9 aa, synthetic construct
  source 1..9: note = Seed: VVGARGVGK (KRAS G12R)
LVGSRRVGG

SEQ ID NO: 42070 - protein, 9 aa, synthetic construct
  source 1..9: note = Seed: VVGARGVGK (KRAS G12R)
LVGSRRVGH

SEQ ID NO: 42071 - protein, 9 aa, synthetic construct
  source 1..9: note = Seed: VVGARGVGK (KRAS G12R)
LVGSRRVGI

SEQ ID NO: 42072 - protein, 9 aa, synthetic construct
  source 1..9: note = Seed: VVGARGVGK (KRAS G12R)
LVGSRRVGK

SEQ ID NO: 42073 - protein, 9 aa, synthetic construct
  source 1..9: note = Seed: VVGARGVGK (KRAS G12R)
LVGSRRVGL

SEQ ID NO: 42074 - protein, 9 aa, synthetic construct
  source 1..9: note = Seed: VVGARGVGK (KRAS G12R)
LVGSRRVGM

SEQ ID NO: 42075 - protein, 9 aa, synthetic construct
  source 1..9: note = Seed: VVGARGVGK (KRAS G12R)
LVGSRRVGN

SEQ ID NO: 42076 - protein, 9 aa, synthetic construct
  source 1..9: note = Seed: VVGARGVGK (KRAS G12R)
LVGSRRVGQ

SEQ ID NO: 42077 - protein, 9 aa, synthetic construct
  source 1..9: note = Seed: VVGARGVGK (KRAS G12R)
LVGSRRVGR

SEQ ID NO: 42078 - protein, 9 aa, synthetic construct
  source 1..9: note = Seed: VVGARGVGK (KRAS G12R)
LVGSRRVGS

SEQ ID NO: 42079 - protein, 9 aa, synthetic construct
  source 1..9: note = Seed: VVGARGVGK (KRAS G12R)
LVGSRRVGT

SEQ ID NO: 42080 - protein, 9 aa, synthetic construct
  source 1..9: note = Seed: VVGARGVGK (KRAS G12R)
LVGSRRVGV

SEQ ID NO: 42081 - protein, 9 aa, synthetic construct
  source 1..9: note = Seed: VVGARGVGK (KRAS G12R)
LVGSRRVGW

SEQ ID NO: 42082 - protein, 9 aa, synthetic construct
  source 1..9: note = Seed: VVGARGVGK (KRAS G12R)
LVGSRRVGY

SEQ ID NO: 42083 - protein, 9 aa, synthetic construct
  source 1..9: note = Seed: VVGARGVGK (KRAS G12R)
LVGSRSVGA

SEQ ID NO: 42084 - protein, 9 aa, synthetic construct
  source 1..9: note = Seed: VVGARGVGK (KRAS G12R)
LVGSRSVGF

SEQ ID NO: 42085 - protein, 9 aa, synthetic construct
  source 1..9: note = Seed: VVGARGVGK (KRAS G12R)
LVGSRSVGG

SEQ ID NO: 42086 - protein, 9 aa, synthetic construct
  source 1..9: note = Seed: VVGARGVGK (KRAS G12R)
LVGSRSVGI

SEQ ID NO: 42087 - protein, 9 aa, synthetic construct
  source 1..9: note = Seed: VVGARGVGK (KRAS G12R)
LVGSRSVGL

SEQ ID NO: 42088 - protein, 9 aa, synthetic construct
  source 1..9: note = Seed: VVGARGVGK (KRAS G12R)
LVGSRSVGM

SEQ ID NO: 42089 - protein, 9 aa, synthetic construct
  source 1..9: note = Seed: VVGARGVGK (KRAS G12R)
LVGSRSVGN

SEQ ID NO: 42090 - protein, 9 aa, synthetic construct
  source 1..9: note = Seed: VVGARGVGK (KRAS G12R)
LVGSRSVGR

SEQ ID NO: 42091 - protein, 9 aa, synthetic construct
  source 1..9: note = Seed: VVGARGVGK (KRAS G12R)
LVGSRSVGS

SEQ ID NO: 42092 - protein, 9 aa, synthetic construct
  source 1..9: note = Seed: VVGARGVGK (KRAS G12R)
LVGSRSVGT

SEQ ID NO: 42093 - protein, 9 aa, synthetic construct
  source 1..9: note = Seed: VVGARGVGK (KRAS G12R)
LVGSRSVGV

SEQ ID NO: 42094 - protein, 9 aa, synthetic construct
  source 1..9: note = Seed: VVGARGVGK (KRAS G12R)
LVGSRSVGY

SEQ ID NO: 42095 - protein, 9 aa, synthetic construct
  source 1..9: note = Seed: VVGARGVGK (KRAS G12R)
LVGSRTVGA

SEQ ID NO: 42096 - protein, 9 aa, synthetic construct
  source 1..9: note = Seed: VVGARGVGK (KRAS G12R)
LVGSRTVGF

SEQ ID NO: 42097 - protein, 9 aa, synthetic construct
  source 1..9: note = Seed: VVGARGVGK (KRAS G12R)
LVGSRTVGI

SEQ ID NO: 42098 - protein, 9 aa, synthetic construct
  source 1..9: note = Seed: VVGARGVGK (KRAS G12R)
LVGSRTVGL

SEQ ID NO: 42099 - protein, 9 aa, synthetic construct
  source 1..9: note = Seed: VVGARGVGK (KRAS G12R)
LVGSRTVGM

SEQ ID NO: 42100 - protein, 9 aa, synthetic construct
  source 1..9: note = Seed: VVGARGVGK (KRAS G12R)
LVGSRTVGR

SEQ ID NO: 42101 - protein, 9 aa, synthetic construct
  source 1..9: note = Seed: VVGARGVGK (KRAS G12R)
LVGSRTVGS

SEQ ID NO: 42102 - protein, 9 aa, synthetic construct
  source 1..9: note = Seed: VVGARGVGK (KRAS G12R)
LVGSRTVGT

SEQ ID NO: 42103 - protein, 9 aa, synthetic construct
  source 1..9: note = Seed: VVGARGVGK (KRAS G12R)
LVGSRTVGV

SEQ ID NO: 42104 - protein, 9 aa, synthetic construct
  source 1..9: note = Seed: VVGARGVGK (KRAS G12R)
LVGSRTVGY

SEQ ID NO: 42105 - protein, 9 aa, synthetic construct
  source 1..9: note = Seed: VVGARGVGK (KRAS G12R)
LVGSRVVGA

SEQ ID NO: 42106 - protein, 9 aa, synthetic construct
  source 1..9: note = Seed: VVGARGVGK (KRAS G12R)
LVGSRVVGG

SEQ ID NO: 42107 - protein, 9 aa, synthetic construct
  source 1..9: note = Seed: VVGARGVGK (KRAS G12R)
LVGSRVVGI

SEQ ID NO: 42108 - protein, 9 aa, synthetic construct
  source 1..9: note = Seed: VVGARGVGK (KRAS G12R)
LVGSRVVGL

SEQ ID NO: 42109 - protein, 9 aa, synthetic construct
  source 1..9: note = Seed: VVGARGVGK (KRAS G12R)
LVGSRVVGM

SEQ ID NO: 42110 - protein, 9 aa, synthetic construct
  source 1..9: note = Seed: VVGARGVGK (KRAS G12R)
LVGSRVVGN

SEQ ID NO: 42111 - protein, 9 aa, synthetic construct
  source 1..9: note = Seed: VVGARGVGK (KRAS G12R)
LVGSRVVGR

SEQ ID NO: 42112 - protein, 9 aa, synthetic construct
  source 1..9: note = Seed: VVGARGVGK (KRAS G12R)
LVGSRVVGS

SEQ ID NO: 42113 - protein, 9 aa, synthetic construct
  source 1..9: note = Seed: VVGARGVGK (KRAS G12R)
LVGSRVVGT

SEQ ID NO: 42114 - protein, 9 aa, synthetic construct
  source 1..9: note = Seed: VVGARGVGK (KRAS G12R)
LVGSRVVGV

SEQ ID NO: 42115 - protein, 9 aa, synthetic construct
  source 1..9: note = Seed: VVGARGVGK (KRAS G12R)
LVGTRAVGA

SEQ ID NO: 42116 - protein, 9 aa, synthetic construct
  source 1..9: note = Seed: VVGARGVGK (KRAS G12R)
LVGTRAVGF

SEQ ID NO: 42117 - protein, 9 aa, synthetic construct
  source 1..9: note = Seed: VVGARGVGK (KRAS G12R)
LVGTRAVGG

SEQ ID NO: 42118 - protein, 9 aa, synthetic construct
  source 1..9: note = Seed: VVGARGVGK (KRAS G12R)
LVGTRAVGI

SEQ ID NO: 42119 - protein, 9 aa, synthetic construct
  source 1..9: note = Seed: VVGARGVGK (KRAS G12R)
LVGTRAVGK

SEQ ID NO: 42120 - protein, 9 aa, synthetic construct
  source 1..9: note = Seed: VVGARGVGK (KRAS G12R)
LVGTRAVGL

SEQ ID NO: 42121 - protein, 9 aa, synthetic construct
  source 1..9: note = Seed: VVGARGVGK (KRAS G12R)
LVGTRAVGM

SEQ ID NO: 42122 - protein, 9 aa, synthetic construct
  source 1..9: note = Seed: VVGARGVGK (KRAS G12R)
LVGTRAVGN

SEQ ID NO: 42123 - protein, 9 aa, synthetic construct
  source 1..9: note = Seed: VVGARGVGK (KRAS G12R)
LVGTRAVGR

SEQ ID NO: 42124 - protein, 9 aa, synthetic construct
  source 1..9: note = Seed: VVGARGVGK (KRAS G12R)
LVGTRAVGS

SEQ ID NO: 42125 - protein, 9 aa, synthetic construct
  source 1..9: note = Seed: VVGARGVGK (KRAS G12R)
LVGTRAVGT

SEQ ID NO: 42126 - protein, 9 aa, synthetic construct
  source 1..9: note = Seed: VVGARGVGK (KRAS G12R)
LVGTRAVGV

SEQ ID NO: 42127 - protein, 9 aa, synthetic construct
  source 1..9: note = Seed: VVGARGVGK (KRAS G12R)
LVGTRAVGY

SEQ ID NO: 42128 - protein, 9 aa, synthetic construct
  source 1..9: note = Seed: VVGARGVGK (KRAS G12R)
LVGTRGVGA

SEQ ID NO: 42129 - protein, 9 aa, synthetic construct
  source 1..9: note = Seed: VVGARGVGK (KRAS G12R)
LVGTRGVGF

SEQ ID NO: 42130 - protein, 9 aa, synthetic construct
  source 1..9: note = Seed: VVGARGVGK (KRAS G12R)
LVGTRGVGI

SEQ ID NO: 42131 - protein, 9 aa, synthetic construct
  source 1..9: note = Seed: VVGARGVGK (KRAS G12R)
LVGTRGVGL

SEQ ID NO: 42132 - protein, 9 aa, synthetic construct
  source 1..9: note = Seed: VVGARGVGK (KRAS G12R)
LVGTRGVGM

SEQ ID NO: 42133 - protein, 9 aa, synthetic construct
  source 1..9: note = Seed: VVGARGVGK (KRAS G12R)
LVGTRGVGS

SEQ ID NO: 42134 - protein, 9 aa, synthetic construct
  source 1..9: note = Seed: VVGARGVGK (KRAS G12R)
LVGTRGVGT

SEQ ID NO: 42135 - protein, 9 aa, synthetic construct
  source 1..9: note = Seed: VVGARGVGK (KRAS G12R)
LVGTRGVGV

SEQ ID NO: 42136 - protein, 9 aa, synthetic construct
  source 1..9: note = Seed: VVGARGVGK (KRAS G12R)
LVGTRGVGY

SEQ ID NO: 42137 - protein, 9 aa, synthetic construct
  source 1..9: note = Seed: VVGARGVGK (KRAS G12R)
LVGTRHVGR

SEQ ID NO: 42138 - protein, 9 aa, synthetic construct
  source 1..9: note = Seed: VVGARGVGK (KRAS G12R)
LVGTRIVGA

SEQ ID NO: 42139 - protein, 9 aa, synthetic construct
  source 1..9: note = Seed: VVGARGVGK (KRAS G12R)
LVGTRIVGI

SEQ ID NO: 42140 - protein, 9 aa, synthetic construct
  source 1..9: note = Seed: VVGARGVGK (KRAS G12R)
LVGTRIVGR

SEQ ID NO: 42141 - protein, 9 aa, synthetic construct
  source 1..9: note = Seed: VVGARGVGK (KRAS G12R)
LVGTRIVGV

SEQ ID NO: 42142 - protein, 9 aa, synthetic construct
  source 1..9: note = Seed: VVGARGVGK (KRAS G12R)
LVGTRKVGA

SEQ ID NO: 42143 - protein, 9 aa, synthetic construct
  source 1..9: note = Seed: VVGARGVGK (KRAS G12R)
LVGTRKVGF

SEQ ID NO: 42144 - protein, 9 aa, synthetic construct
  source 1..9: note = Seed: VVGARGVGK (KRAS G12R)
LVGTRKVGH

SEQ ID NO: 42145 - protein, 9 aa, synthetic construct
  source 1..9: note = Seed: VVGARGVGK (KRAS G12R)
LVGTRKVGI

SEQ ID NO: 42146 - protein, 9 aa, synthetic construct
  source 1..9: note = Seed: VVGARGVGK (KRAS G12R)
LVGTRKVGK

SEQ ID NO: 42147 - protein, 9 aa, synthetic construct
  source 1..9: note = Seed: VVGARGVGK (KRAS G12R)
LVGTRKVGL

SEQ ID NO: 42148 - protein, 9 aa, synthetic construct
  source 1..9: note = Seed: VVGARGVGK (KRAS G12R)
LVGTRKVGM

SEQ ID NO: 42149 - protein, 9 aa, synthetic construct
  source 1..9: note = Seed: VVGARGVGK (KRAS G12R)
LVGTRKVGR

SEQ ID NO: 42150 - protein, 9 aa, synthetic construct
  source 1..9: note = Seed: VVGARGVGK (KRAS G12R)
LVGTRKVGS

SEQ ID NO: 42151 - protein, 9 aa, synthetic construct
  source 1..9: note = Seed: VVGARGVGK (KRAS G12R)
LVGTRKVGV

SEQ ID NO: 42152 - protein, 9 aa, synthetic construct
  source 1..9: note = Seed: VVGARGVGK (KRAS G12R)
LVGTRKVGY

SEQ ID NO: 42153 - protein, 9 aa, synthetic construct
  source 1..9: note = Seed: VVGARGVGK (KRAS G12R)
LVGTRMVGR

SEQ ID NO: 42154 - protein, 9 aa, synthetic construct
  source 1..9: note = Seed: VVGARGVGK (KRAS G12R)
LVGTRNVGF

SEQ ID NO: 42155 - protein, 9 aa, synthetic construct
  source 1..9: note = Seed: VVGARGVGK (KRAS G12R)
LVGTRNVGI

SEQ ID NO: 42156 - protein, 9 aa, synthetic construct
  source 1..9: note = Seed: VVGARGVGK (KRAS G12R)
LVGTRNVGL

SEQ ID NO: 42157 - protein, 9 aa, synthetic construct
  source 1..9: note = Seed: VVGARGVGK (KRAS G12R)
LVGTRNVGM

SEQ ID NO: 42158 - protein, 9 aa, synthetic construct
  source 1..9: note = Seed: VVGARGVGK (KRAS G12R)
LVGTRNVGR

SEQ ID NO: 42159 - protein, 9 aa, synthetic construct
  source 1..9: note = Seed: VVGARGVGK (KRAS G12R)
LVGTRNVGV

SEQ ID NO: 42160 - protein, 9 aa, synthetic construct
  source 1..9: note = Seed: VVGARGVGK (KRAS G12R)
LVGTRPVGA

SEQ ID NO: 42161 - protein, 9 aa, synthetic construct
  source 1..9: note = Seed: VVGARGVGK (KRAS G12R)
LVGTRPVGF

SEQ ID NO: 42162 - protein, 9 aa, synthetic construct
  source 1..9: note = Seed: VVGARGVGK (KRAS G12R)
LVGTRPVGI

SEQ ID NO: 42163 - protein, 9 aa, synthetic construct
  source 1..9: note = Seed: VVGARGVGK (KRAS G12R)
LVGTRPVGL

SEQ ID NO: 42164 - protein, 9 aa, synthetic construct
  source 1..9: note = Seed: VVGARGVGK (KRAS G12R)
LVGTRPVGM

SEQ ID NO: 42165 - protein, 9 aa, synthetic construct
  source 1..9: note = Seed: VVGARGVGK (KRAS G12R)
LVGTRPVGR

SEQ ID NO: 42166 - protein, 9 aa, synthetic construct
  source 1..9: note = Seed: VVGARGVGK (KRAS G12R)
LVGTRPVGS

SEQ ID NO: 42167 - protein, 9 aa, synthetic construct
  source 1..9: note = Seed: VVGARGVGK (KRAS G12R)
LVGTRPVGT

SEQ ID NO: 42168 - protein, 9 aa, synthetic construct
  source 1..9: note = Seed: VVGARGVGK (KRAS G12R)
LVGTRPVGV

SEQ ID NO: 42169 - protein, 9 aa, synthetic construct
  source 1..9: note = Seed: VVGARGVGK (KRAS G12R)
LVGTRPVGY

SEQ ID NO: 42170 - protein, 9 aa, synthetic construct
  source 1..9: note = Seed: VVGARGVGK (KRAS G12R)
LVGTRRVGA

SEQ ID NO: 42171 - protein, 9 aa, synthetic construct
  source 1..9: note = Seed: VVGARGVGK (KRAS G12R)
LVGTRRVGF

SEQ ID NO: 42172 - protein, 9 aa, synthetic construct
  source 1..9: note = Seed: VVGARGVGK (KRAS G12R)
LVGTRRVGG

SEQ ID NO: 42173 - protein, 9 aa, synthetic construct
  source 1..9: note = Seed: VVGARGVGK (KRAS G12R)
LVGTRRVGH

SEQ ID NO: 42174 - protein, 9 aa, synthetic construct
  source 1..9: note = Seed: VVGARGVGK (KRAS G12R)
LVGTRRVGI

SEQ ID NO: 42175 - protein, 9 aa, synthetic construct
  source 1..9: note = Seed: VVGARGVGK (KRAS G12R)
LVGTRRVGK

SEQ ID NO: 42176 - protein, 9 aa, synthetic construct
  source 1..9: note = Seed: VVGARGVGK (KRAS G12R)
LVGTRRVGL

SEQ ID NO: 42177 - protein, 9 aa, synthetic construct
  source 1..9: note = Seed: VVGARGVGK (KRAS G12R)
LVGTRRVGM

SEQ ID NO: 42178 - protein, 9 aa, synthetic construct
  source 1..9: note = Seed: VVGARGVGK (KRAS G12R)
LVGTRRVGQ

SEQ ID NO: 42179 - protein, 9 aa, synthetic construct
  source 1..9: note = Seed: VVGARGVGK (KRAS G12R)
LVGTRRVGR

SEQ ID NO: 42180 - protein, 9 aa, synthetic construct
  source 1..9: note = Seed: VVGARGVGK (KRAS G12R)
LVGTRRVGS

SEQ ID NO: 42181 - protein, 9 aa, synthetic construct
  source 1..9: note = Seed: VVGARGVGK (KRAS G12R)
LVGTRRVGT

SEQ ID NO: 42182 - protein, 9 aa, synthetic construct
  source 1..9: note = Seed: VVGARGVGK (KRAS G12R)
LVGTRRVGV

SEQ ID NO: 42183 - protein, 9 aa, synthetic construct
  source 1..9: note = Seed: VVGARGVGK (KRAS G12R)
LVGTRRVGW

SEQ ID NO: 42184 - protein, 9 aa, synthetic construct
  source 1..9: note = Seed: VVGARGVGK (KRAS G12R)
LVGTRRVGY

SEQ ID NO: 42185 - protein, 9 aa, synthetic construct
  source 1..9: note = Seed: VVGARGVGK (KRAS G12R)
LVGTRSVGA

SEQ ID NO: 42186 - protein, 9 aa, synthetic construct
  source 1..9: note = Seed: VVGARGVGK (KRAS G12R)
LVGTRSVGF

SEQ ID NO: 42187 - protein, 9 aa, synthetic construct
  source 1..9: note = Seed: VVGARGVGK (KRAS G12R)
LVGTRSVGI

SEQ ID NO: 42188 - protein, 9 aa, synthetic construct
  source 1..9: note = Seed: VVGARGVGK (KRAS G12R)
LVGTRSVGL

SEQ ID NO: 42189 - protein, 9 aa, synthetic construct
  source 1..9: note = Seed: VVGARGVGK (KRAS G12R)
LVGTRSVGM

SEQ ID NO: 42190 - protein, 9 aa, synthetic construct
  source 1..9: note = Seed: VVGARGVGK (KRAS G12R)
LVGTRSVGR

SEQ ID NO: 42191 - protein, 9 aa, synthetic construct
  source 1..9: note = Seed: VVGARGVGK (KRAS G12R)
LVGTRSVGS

SEQ ID NO: 42192 - protein, 9 aa, synthetic construct
  source 1..9: note = Seed: VVGARGVGK (KRAS G12R)
LVGTRSVGT

SEQ ID NO: 42193 - protein, 9 aa, synthetic construct
  source 1..9: note = Seed: VVGARGVGK (KRAS G12R)
LVGTRSVGV

SEQ ID NO: 42194 - protein, 9 aa, synthetic construct
  source 1..9: note = Seed: VVGARGVGK (KRAS G12R)
LVGTRSVGY

SEQ ID NO: 42195 - protein, 9 aa, synthetic construct
  source 1..9: note = Seed: VVGARGVGK (KRAS G12R)
LVGTRTVGF

SEQ ID NO: 42196 - protein, 9 aa, synthetic construct
  source 1..9: note = Seed: VVGARGVGK (KRAS G12R)
LVGTRTVGI

SEQ ID NO: 42197 - protein, 9 aa, synthetic construct
  source 1..9: note = Seed: VVGARGVGK (KRAS G12R)
LVGTRTVGL

SEQ ID NO: 42198 - protein, 9 aa, synthetic construct
  source 1..9: note = Seed: VVGARGVGK (KRAS G12R)
LVGTRTVGM

SEQ ID NO: 42199 - protein, 9 aa, synthetic construct
  source 1..9: note = Seed: VVGARGVGK (KRAS G12R)
LVGTRTVGR

SEQ ID NO: 42200 - protein, 9 aa, synthetic construct
  source 1..9: note = Seed: VVGARGVGK (KRAS G12R)
LVGTRTVGV

SEQ ID NO: 42201 - protein, 9 aa, synthetic construct
  source 1..9: note = Seed: VVGARGVGK (KRAS G12R)
LVGTRVVGA

SEQ ID NO: 42202 - protein, 9 aa, synthetic construct
  source 1..9: note = Seed: VVGARGVGK (KRAS G12R)
LVGTRVVGI

SEQ ID NO: 42203 - protein, 9 aa, synthetic construct
  source 1..9: note = Seed: VVGARGVGK (KRAS G12R)
LVGTRVVGL

SEQ ID NO: 42204 - protein, 9 aa, synthetic construct
  source 1..9: note = Seed: VVGARGVGK (KRAS G12R)
LVGTRVVGM

SEQ ID NO: 42205 - protein, 9 aa, synthetic construct
  source 1..9: note = Seed: VVGARGVGK (KRAS G12R)
LVGTRVVGR

SEQ ID NO: 42206 - protein, 9 aa, synthetic construct
  source 1..9: note = Seed: VVGARGVGK (KRAS G12R)
LVGTRVVGV

SEQ ID NO: 42207 - protein, 9 aa, synthetic construct
  source 1..9: note = Seed: VVGARGVGK (KRAS G12R)
LVGVRAVGA

SEQ ID NO: 42208 - protein, 9 aa, synthetic construct
  source 1..9: note = Seed: VVGARGVGK (KRAS G12R)
LVGVRAVGC

SEQ ID NO: 42209 - protein, 9 aa, synthetic construct
  source 1..9: note = Seed: VVGARGVGK (KRAS G12R)
LVGVRAVGF

SEQ ID NO: 42210 - protein, 9 aa, synthetic construct
  source 1..9: note = Seed: VVGARGVGK (KRAS G12R)
LVGVRAVGH

SEQ ID NO: 42211 - protein, 9 aa, synthetic construct
  source 1..9: note = Seed: VVGARGVGK (KRAS G12R)
LVGVRAVGI

SEQ ID NO: 42212 - protein, 9 aa, synthetic construct
  source 1..9: note = Seed: VVGARGVGK (KRAS G12R)
LVGVRAVGK

SEQ ID NO: 42213 - protein, 9 aa, synthetic construct
  source 1..9: note = Seed: VVGARGVGK (KRAS G12R)
LVGVRAVGL

SEQ ID NO: 42214 - protein, 9 aa, synthetic construct
  source 1..9: note = Seed: VVGARGVGK (KRAS G12R)
LVGVRAVGM

SEQ ID NO: 42215 - protein, 9 aa, synthetic construct
  source 1..9: note = Seed: VVGARGVGK (KRAS G12R)
LVGVRAVGN

SEQ ID NO: 42216 - protein, 9 aa, synthetic construct
  source 1..9: note = Seed: VVGARGVGK (KRAS G12R)
LVGVRAVGR

SEQ ID NO: 42217 - protein, 9 aa, synthetic construct
  source 1..9: note = Seed: VVGARGVGK (KRAS G12R)
LVGVRAVGS

SEQ ID NO: 42218 - protein, 9 aa, synthetic construct
  source 1..9: note = Seed: VVGARGVGK (KRAS G12R)
LVGVRAVGT

SEQ ID NO: 42219 - protein, 9 aa, synthetic construct
  source 1..9: note = Seed: VVGARGVGK (KRAS G12R)
LVGVRAVGV

SEQ ID NO: 42220 - protein, 9 aa, synthetic construct
  source 1..9: note = Seed: VVGARGVGK (KRAS G12R)
LVGVRAVGY

SEQ ID NO: 42221 - protein, 9 aa, synthetic construct
  source 1..9: note = Seed: VVGARGVGK (KRAS G12R)
LVGVRGVGA

SEQ ID NO: 42222 - protein, 9 aa, synthetic construct
  source 1..9: note = Seed: VVGARGVGK (KRAS G12R)
LVGVRGVGG

SEQ ID NO: 42223 - protein, 9 aa, synthetic construct
  source 1..9: note = Seed: VVGARGVGK (KRAS G12R)
LVGVRGVGI

SEQ ID NO: 42224 - protein, 9 aa, synthetic construct
  source 1..9: note = Seed: VVGARGVGK (KRAS G12R)
LVGVRGVGL

SEQ ID NO: 42225 - protein, 9 aa, synthetic construct
  source 1..9: note = Seed: VVGARGVGK (KRAS G12R)
LVGVRGVGM

SEQ ID NO: 42226 - protein, 9 aa, synthetic construct
  source 1..9: note = Seed: VVGARGVGK (KRAS G12R)
LVGVRGVGN

SEQ ID NO: 42227 - protein, 9 aa, synthetic construct
  source 1..9: note = Seed: VVGARGVGK (KRAS G12R)
LVGVRGVGS

SEQ ID NO: 42228 - protein, 9 aa, synthetic construct
  source 1..9: note = Seed: VVGARGVGK (KRAS G12R)
LVGVRGVGT

SEQ ID NO: 42229 - protein, 9 aa, synthetic construct
  source 1..9: note = Seed: VVGARGVGK (KRAS G12R)
LVGVRGVGV

SEQ ID NO: 42230 - protein, 9 aa, synthetic construct
  source 1..9: note = Seed: VVGARGVGK (KRAS G12R)
LVGVRHVGR

SEQ ID NO: 42231 - protein, 9 aa, synthetic construct
  source 1..9: note = Seed: VVGARGVGK (KRAS G12R)
LVGVRHVGY

SEQ ID NO: 42232 - protein, 9 aa, synthetic construct
  source 1..9: note = Seed: VVGARGVGK (KRAS G12R)
LVGVRKVGA

SEQ ID NO: 42233 - protein, 9 aa, synthetic construct
  source 1..9: note = Seed: VVGARGVGK (KRAS G12R)
LVGVRKVGF

SEQ ID NO: 42234 - protein, 9 aa, synthetic construct
  source 1..9: note = Seed: VVGARGVGK (KRAS G12R)
LVGVRKVGG

SEQ ID NO: 42235 - protein, 9 aa, synthetic construct
  source 1..9: note = Seed: VVGARGVGK (KRAS G12R)
LVGVRKVGH

SEQ ID NO: 42236 - protein, 9 aa, synthetic construct
  source 1..9: note = Seed: VVGARGVGK (KRAS G12R)
LVGVRKVGI

SEQ ID NO: 42237 - protein, 9 aa, synthetic construct
  source 1..9: note = Seed: VVGARGVGK (KRAS G12R)
LVGVRKVGK

SEQ ID NO: 42238 - protein, 9 aa, synthetic construct
  source 1..9: note = Seed: VVGARGVGK (KRAS G12R)
LVGVRKVGL

SEQ ID NO: 42239 - protein, 9 aa, synthetic construct
  source 1..9: note = Seed: VVGARGVGK (KRAS G12R)
LVGVRKVGM

SEQ ID NO: 42240 - protein, 9 aa, synthetic construct
  source 1..9: note = Seed: VVGARGVGK (KRAS G12R)
LVGVRKVGQ

SEQ ID NO: 42241 - protein, 9 aa, synthetic construct
  source 1..9: note = Seed: VVGARGVGK (KRAS G12R)
LVGVRKVGR

SEQ ID NO: 42242 - protein, 9 aa, synthetic construct
  source 1..9: note = Seed: VVGARGVGK (KRAS G12R)
LVGVRKVGS

SEQ ID NO: 42243 - protein, 9 aa, synthetic construct
  source 1..9: note = Seed: VVGARGVGK (KRAS G12R)
LVGVRKVGT

SEQ ID NO: 42244 - protein, 9 aa, synthetic construct
  source 1..9: note = Seed: VVGARGVGK (KRAS G12R)
LVGVRKVGV

SEQ ID NO: 42245 - protein, 9 aa, synthetic construct
  source 1..9: note = Seed: VVGARGVGK (KRAS G12R)
LVGVRKVGY

SEQ ID NO: 42246 - protein, 9 aa, synthetic construct
  source 1..9: note = Seed: VVGARGVGK (KRAS G12R)
LVGVRNVGI

SEQ ID NO: 42247 - protein, 9 aa, synthetic construct
  source 1..9: note = Seed: VVGARGVGK (KRAS G12R)
LVGVRNVGL

SEQ ID NO: 42248 - protein, 9 aa, synthetic construct
  source 1..9: note = Seed: VVGARGVGK (KRAS G12R)
LVGVRNVGV

SEQ ID NO: 42249 - protein, 9 aa, synthetic construct
  source 1..9: note = Seed: VVGARGVGK (KRAS G12R)
LVGVRPVGA

SEQ ID NO: 42250 - protein, 9 aa, synthetic construct
  source 1..9: note = Seed: VVGARGVGK (KRAS G12R)
LVGVRPVGF

SEQ ID NO: 42251 - protein, 9 aa, synthetic construct
  source 1..9: note = Seed: VVGARGVGK (KRAS G12R)
LVGVRPVGI

SEQ ID NO: 42252 - protein, 9 aa, synthetic construct
  source 1..9: note = Seed: VVGARGVGK (KRAS G12R)
LVGVRPVGL

SEQ ID NO: 42253 - protein, 9 aa, synthetic construct
  source 1..9: note = Seed: VVGARGVGK (KRAS G12R)
LVGVRPVGM

SEQ ID NO: 42254 - protein, 9 aa, synthetic construct
  source 1..9: note = Seed: VVGARGVGK (KRAS G12R)
LVGVRPVGN

SEQ ID NO: 42255 - protein, 9 aa, synthetic construct
  source 1..9: note = Seed: VVGARGVGK (KRAS G12R)
LVGVRPVGS

SEQ ID NO: 42256 - protein, 9 aa, synthetic construct
  source 1..9: note = Seed: VVGARGVGK (KRAS G12R)
LVGVRPVGT

SEQ ID NO: 42257 - protein, 9 aa, synthetic construct
  source 1..9: note = Seed: VVGARGVGK (KRAS G12R)
LVGVRPVGV

SEQ ID NO: 42258 - protein, 9 aa, synthetic construct
  source 1..9: note = Seed: VVGARGVGK (KRAS G12R)
LVGVRPVGY

SEQ ID NO: 42259 - protein, 9 aa, synthetic construct
  source 1..9: note = Seed: VVGARGVGK (KRAS G12R)
LVGVRRVGA

SEQ ID NO: 42260 - protein, 9 aa, synthetic construct
  source 1..9: note = Seed: VVGARGVGK (KRAS G12R)
LVGVRRVGF

SEQ ID NO: 42261 - protein, 9 aa, synthetic construct
  source 1..9: note = Seed: VVGARGVGK (KRAS G12R)
LVGVRRVGG

SEQ ID NO: 42262 - protein, 9 aa, synthetic construct
  source 1..9: note = Seed: VVGARGVGK (KRAS G12R)
LVGVRRVGH

SEQ ID NO: 42263 - protein, 9 aa, synthetic construct
  source 1..9: note = Seed: VVGARGVGK (KRAS G12R)
LVGVRRVGI

SEQ ID NO: 42264 - protein, 9 aa, synthetic construct
  source 1..9: note = Seed: VVGARGVGK (KRAS G12R)
LVGVRRVGK

SEQ ID NO: 42265 - protein, 9 aa, synthetic construct
  source 1..9: note = Seed: VVGARGVGK (KRAS G12R)
LVGVRRVGL

SEQ ID NO: 42266 - protein, 9 aa, synthetic construct
  source 1..9: note = Seed: VVGARGVGK (KRAS G12R)
LVGVRRVGM

SEQ ID NO: 42267 - protein, 9 aa, synthetic construct
  source 1..9: note = Seed: VVGARGVGK (KRAS G12R)
LVGVRRVGN

SEQ ID NO: 42268 - protein, 9 aa, synthetic construct
  source 1..9: note = Seed: VVGARGVGK (KRAS G12R)
LVGVRRVGP

SEQ ID NO: 42269 - protein, 9 aa, synthetic construct
  source 1..9: note = Seed: VVGARGVGK (KRAS G12R)
LVGVRRVGQ

SEQ ID NO: 42270 - protein, 9 aa, synthetic construct
  source 1..9: note = Seed: VVGARGVGK (KRAS G12R)
LVGVRRVGR

SEQ ID NO: 42271 - protein, 9 aa, synthetic construct
  source 1..9: note = Seed: VVGARGVGK (KRAS G12R)
LVGVRRVGS

SEQ ID NO: 42272 - protein, 9 aa, synthetic construct
  source 1..9: note = Seed: VVGARGVGK (KRAS G12R)
LVGVRRVGT

SEQ ID NO: 42273 - protein, 9 aa, synthetic construct
  source 1..9: note = Seed: VVGARGVGK (KRAS G12R)
LVGVRRVGV

SEQ ID NO: 42274 - protein, 9 aa, synthetic construct
  source 1..9: note = Seed: VVGARGVGK (KRAS G12R)
LVGVRRVGW

SEQ ID NO: 42275 - protein, 9 aa, synthetic construct
  source 1..9: note = Seed: VVGARGVGK (KRAS G12R)
LVGVRRVGY

SEQ ID NO: 42276 - protein, 9 aa, synthetic construct
  source 1..9: note = Seed: VVGARGVGK (KRAS G12R)
LVGVRSVGA

SEQ ID NO: 42277 - protein, 9 aa, synthetic construct
  source 1..9: note = Seed: VVGARGVGK (KRAS G12R)
LVGVRSVGF

SEQ ID NO: 42278 - protein, 9 aa, synthetic construct
  source 1..9: note = Seed: VVGARGVGK (KRAS G12R)
LVGVRSVGI

SEQ ID NO: 42279 - protein, 9 aa, synthetic construct
  source 1..9: note = Seed: VVGARGVGK (KRAS G12R)
LVGVRSVGL

SEQ ID NO: 42280 - protein, 9 aa, synthetic construct
  source 1..9: note = Seed: VVGARGVGK (KRAS G12R)
LVGVRSVGM

SEQ ID NO: 42281 - protein, 9 aa, synthetic construct
  source 1..9: note = Seed: VVGARGVGK (KRAS G12R)
LVGVRSVGN

SEQ ID NO: 42282 - protein, 9 aa, synthetic construct
  source 1..9: note = Seed: VVGARGVGK (KRAS G12R)
LVGVRSVGS

SEQ ID NO: 42283 - protein, 9 aa, synthetic construct
  source 1..9: note = Seed: VVGARGVGK (KRAS G12R)
LVGVRSVGT

SEQ ID NO: 42284 - protein, 9 aa, synthetic construct
  source 1..9: note = Seed: VVGARGVGK (KRAS G12R)
LVGVRSVGV

SEQ ID NO: 42285 - protein, 9 aa, synthetic construct
  source 1..9: note = Seed: VVGARGVGK (KRAS G12R)
LVGVRTVGA

SEQ ID NO: 42286 - protein, 9 aa, synthetic construct
  source 1..9: note = Seed: VVGARGVGK (KRAS G12R)
LVGVRTVGI

SEQ ID NO: 42287 - protein, 9 aa, synthetic construct
  source 1..9: note = Seed: VVGARGVGK (KRAS G12R)
LVGVRTVGL

SEQ ID NO: 42288 - protein, 9 aa, synthetic construct
  source 1..9: note = Seed: VVGARGVGK (KRAS G12R)
LVGVRTVGM

SEQ ID NO: 42289 - protein, 9 aa, synthetic construct
  source 1..9: note = Seed: VVGARGVGK (KRAS G12R)
LVGVRTVGN

SEQ ID NO: 42290 - protein, 9 aa, synthetic construct
  source 1..9: note = Seed: VVGARGVGK (KRAS G12R)
LVGVRTVGR

SEQ ID NO: 42291 - protein, 9 aa, synthetic construct
  source 1..9: note = Seed: VVGARGVGK (KRAS G12R)
LVGVRTVGS

SEQ ID NO: 42292 - protein, 9 aa, synthetic construct
  source 1..9: note = Seed: VVGARGVGK (KRAS G12R)
LVGVRTVGT

SEQ ID NO: 42293 - protein, 9 aa, synthetic construct
  source 1..9: note = Seed: VVGARGVGK (KRAS G12R)
LVGVRTVGV

SEQ ID NO: 42294 - protein, 9 aa, synthetic construct
  source 1..9: note = Seed: VVGARGVGK (KRAS G12R)
LVGVRVVGA

SEQ ID NO: 42295 - protein, 9 aa, synthetic construct
  source 1..9: note = Seed: VVGARGVGK (KRAS G12R)
LVGVRVVGN

SEQ ID NO: 42296 - protein, 9 aa, synthetic construct
  source 1..9: note = Seed: VVGARGVGK (KRAS G12R)
LVGWRAVGI

SEQ ID NO: 42297 - protein, 9 aa, synthetic construct
  source 1..9: note = Seed: VVGARGVGK (KRAS G12R)
LVGWRAVGK

SEQ ID NO: 42298 - protein, 9 aa, synthetic construct
  source 1..9: note = Seed: VVGARGVGK (KRAS G12R)
LVGWRAVGL

SEQ ID NO: 42299 - protein, 9 aa, synthetic construct
  source 1..9: note = Seed: VVGARGVGK (KRAS G12R)
LVGWRAVGM

SEQ ID NO: 42300 - protein, 9 aa, synthetic construct
  source 1..9: note = Seed: VVGARGVGK (KRAS G12R)
LVGWRAVGR

SEQ ID NO: 42301 - protein, 9 aa, synthetic construct
  source 1..9: note = Seed: VVGARGVGK (KRAS G12R)
LVGWRAVGV

SEQ ID NO: 42302 - protein, 9 aa, synthetic construct
  source 1..9: note = Seed: VVGARGVGK (KRAS G12R)
LVGWRAVGY

SEQ ID NO: 42303 - protein, 9 aa, synthetic construct
  source 1..9: note = Seed: VVGARGVGK (KRAS G12R)
LVGWRGVGR

SEQ ID NO: 42304 - protein, 9 aa, synthetic construct
  source 1..9: note = Seed: VVGARGVGK (KRAS G12R)
LVGWRGVGV

SEQ ID NO: 42305 - protein, 9 aa, synthetic construct
  source 1..9: note = Seed: VVGARGVGK (KRAS G12R)
LVGWRHVGK

SEQ ID NO: 42306 - protein, 9 aa, synthetic construct
  source 1..9: note = Seed: VVGARGVGK (KRAS G12R)
LVGWRHVGR

SEQ ID NO: 42307 - protein, 9 aa, synthetic construct
  source 1..9: note = Seed: VVGARGVGK (KRAS G12R)
LVGWRHVGY

SEQ ID NO: 42308 - protein, 9 aa, synthetic construct
  source 1..9: note = Seed: VVGARGVGK (KRAS G12R)
LVGWRIVGR

SEQ ID NO: 42309 - protein, 9 aa, synthetic construct
  source 1..9: note = Seed: VVGARGVGK (KRAS G12R)
LVGWRKVGA

SEQ ID NO: 42310 - protein, 9 aa, synthetic construct
  source 1..9: note = Seed: VVGARGVGK (KRAS G12R)
LVGWRKVGF

SEQ ID NO: 42311 - protein, 9 aa, synthetic construct
  source 1..9: note = Seed: VVGARGVGK (KRAS G12R)
LVGWRKVGH

SEQ ID NO: 42312 - protein, 9 aa, synthetic construct
  source 1..9: note = Seed: VVGARGVGK (KRAS G12R)
LVGWRKVGI

SEQ ID NO: 42313 - protein, 9 aa, synthetic construct
  source 1..9: note = Seed: VVGARGVGK (KRAS G12R)
LVGWRKVGK

SEQ ID NO: 42314 - protein, 9 aa, synthetic construct
  source 1..9: note = Seed: VVGARGVGK (KRAS G12R)
LVGWRKVGL

SEQ ID NO: 42315 - protein, 9 aa, synthetic construct
  source 1..9: note = Seed: VVGARGVGK (KRAS G12R)
LVGWRKVGM

SEQ ID NO: 42316 - protein, 9 aa, synthetic construct
  source 1..9: note = Seed: VVGARGVGK (KRAS G12R)
LVGWRKVGR

SEQ ID NO: 42317 - protein, 9 aa, synthetic construct
  source 1..9: note = Seed: VVGARGVGK (KRAS G12R)
LVGWRKVGS

SEQ ID NO: 42318 - protein, 9 aa, synthetic construct
  source 1..9: note = Seed: VVGARGVGK (KRAS G12R)
LVGWRKVGV

SEQ ID NO: 42319 - protein, 9 aa, synthetic construct
  source 1..9: note = Seed: VVGARGVGK (KRAS G12R)
LVGWRKVGY

SEQ ID NO: 42320 - protein, 9 aa, synthetic construct
  source 1..9: note = Seed: VVGARGVGK (KRAS G12R)
LVGWRLVGR

SEQ ID NO: 42321 - protein, 9 aa, synthetic construct
  source 1..9: note = Seed: VVGARGVGK (KRAS G12R)
LVGWRMVGR

SEQ ID NO: 42322 - protein, 9 aa, synthetic construct
  source 1..9: note = Seed: VVGARGVGK (KRAS G12R)
LVGWRNVGR

SEQ ID NO: 42323 - protein, 9 aa, synthetic construct
  source 1..9: note = Seed: VVGARGVGK (KRAS G12R)
LVGWRNVGY

SEQ ID NO: 42324 - protein, 9 aa, synthetic construct
  source 1..9: note = Seed: VVGARGVGK (KRAS G12R)
LVGWRPVGI

SEQ ID NO: 42325 - protein, 9 aa, synthetic construct
  source 1..9: note = Seed: VVGARGVGK (KRAS G12R)
LVGWRPVGK

SEQ ID NO: 42326 - protein, 9 aa, synthetic construct
  source 1..9: note = Seed: VVGARGVGK (KRAS G12R)
LVGWRPVGR

SEQ ID NO: 42327 - protein, 9 aa, synthetic construct
  source 1..9: note = Seed: VVGARGVGK (KRAS G12R)
LVGWRPVGV

SEQ ID NO: 42328 - protein, 9 aa, synthetic construct
  source 1..9: note = Seed: VVGARGVGK (KRAS G12R)
LVGWRPVGY

SEQ ID NO: 42329 - protein, 9 aa, synthetic construct
  source 1..9: note = Seed: VVGARGVGK (KRAS G12R)
LVGWRQVGR

SEQ ID NO: 42330 - protein, 9 aa, synthetic construct
  source 1..9: note = Seed: VVGARGVGK (KRAS G12R)
LVGWRRVGA

SEQ ID NO: 42331 - protein, 9 aa, synthetic construct
  source 1..9: note = Seed: VVGARGVGK (KRAS G12R)
LVGWRRVGF

SEQ ID NO: 42332 - protein, 9 aa, synthetic construct
  source 1..9: note = Seed: VVGARGVGK (KRAS G12R)
LVGWRRVGH

SEQ ID NO: 42333 - protein, 9 aa, synthetic construct
  source 1..9: note = Seed: VVGARGVGK (KRAS G12R)
LVGWRRVGI

SEQ ID NO: 42334 - protein, 9 aa, synthetic construct
  source 1..9: note = Seed: VVGARGVGK (KRAS G12R)
LVGWRRVGK

SEQ ID NO: 42335 - protein, 9 aa, synthetic construct
  source 1..9: note = Seed: VVGARGVGK (KRAS G12R)
LVGWRRVGL

SEQ ID NO: 42336 - protein, 9 aa, synthetic construct
  source 1..9: note = Seed: VVGARGVGK (KRAS G12R)
LVGWRRVGM

SEQ ID NO: 42337 - protein, 9 aa, synthetic construct
  source 1..9: note = Seed: VVGARGVGK (KRAS G12R)
LVGWRRVGQ

SEQ ID NO: 42338 - protein, 9 aa, synthetic construct
  source 1..9: note = Seed: VVGARGVGK (KRAS G12R)
LVGWRRVGR

SEQ ID NO: 42339 - protein, 9 aa, synthetic construct
  source 1..9: note = Seed: VVGARGVGK (KRAS G12R)
LVGWRRVGS

SEQ ID NO: 42340 - protein, 9 aa, synthetic construct
  source 1..9: note = Seed: VVGARGVGK (KRAS G12R)
LVGWRRVGT

SEQ ID NO: 42341 - protein, 9 aa, synthetic construct
  source 1..9: note = Seed: VVGARGVGK (KRAS G12R)
LVGWRRVGV

SEQ ID NO: 42342 - protein, 9 aa, synthetic construct
  source 1..9: note = Seed: VVGARGVGK (KRAS G12R)
LVGWRRVGY

SEQ ID NO: 42343 - protein, 9 aa, synthetic construct
  source 1..9: note = Seed: VVGARGVGK (KRAS G12R)
LVGWRSVGI

SEQ ID NO: 42344 - protein, 9 aa, synthetic construct
  source 1..9: note = Seed: VVGARGVGK (KRAS G12R)
LVGWRSVGK

SEQ ID NO: 42345 - protein, 9 aa, synthetic construct
  source 1..9: note = Seed: VVGARGVGK (KRAS G12R)
LVGWRSVGL

SEQ ID NO: 42346 - protein, 9 aa, synthetic construct
  source 1..9: note = Seed: VVGARGVGK (KRAS G12R)
LVGWRSVGM

SEQ ID NO: 42347 - protein, 9 aa, synthetic construct
  source 1..9: note = Seed: VVGARGVGK (KRAS G12R)
LVGWRSVGR

SEQ ID NO: 42348 - protein, 9 aa, synthetic construct
  source 1..9: note = Seed: VVGARGVGK (KRAS G12R)
LVGWRSVGY

SEQ ID NO: 42349 - protein, 9 aa, synthetic construct
  source 1..9: note = Seed: VVGARGVGK (KRAS G12R)
LVGWRTVGK

SEQ ID NO: 42350 - protein, 9 aa, synthetic construct
  source 1..9: note = Seed: VVGARGVGK (KRAS G12R)
LVGWRTVGR

SEQ ID NO: 42351 - protein, 9 aa, synthetic construct
  source 1..9: note = Seed: VVGARGVGK (KRAS G12R)
LVGWRVVGK

SEQ ID NO: 42352 - protein, 9 aa, synthetic construct
  source 1..9: note = Seed: VVGARGVGK (KRAS G12R)
LVGWRVVGR

SEQ ID NO: 42353 - protein, 9 aa, synthetic construct
  source 1..9: note = Seed: VVGARGVGK (KRAS G12R)
LVGYRAVGL

SEQ ID NO: 42354 - protein, 9 aa, synthetic construct
  source 1..9: note = Seed: VVGARGVGK (KRAS G12R)
LVGYRAVGR

SEQ ID NO: 42355 - protein, 9 aa, synthetic construct
  source 1..9: note = Seed: VVGARGVGK (KRAS G12R)
LVGYRGVGI

SEQ ID NO: 42356 - protein, 9 aa, synthetic construct
  source 1..9: note = Seed: VVGARGVGK (KRAS G12R)
LVGYRGVGR

SEQ ID NO: 42357 - protein, 9 aa, synthetic construct
  source 1..9: note = Seed: VVGARGVGK (KRAS G12R)
LVGYRHVGR

SEQ ID NO: 42358 - protein, 9 aa, synthetic construct
  source 1..9: note = Seed: VVGARGVGK (KRAS G12R)
LVGYRIVGR

SEQ ID NO: 42359 - protein, 9 aa, synthetic construct
  source 1..9: note = Seed: VVGARGVGK (KRAS G12R)
LVGYRKVGA

SEQ ID NO: 42360 - protein, 9 aa, synthetic construct
  source 1..9: note = Seed: VVGARGVGK (KRAS G12R)
LVGYRKVGF

SEQ ID NO: 42361 - protein, 9 aa, synthetic construct
  source 1..9: note = Seed: VVGARGVGK (KRAS G12R)
LVGYRKVGH

SEQ ID NO: 42362 - protein, 9 aa, synthetic construct
  source 1..9: note = Seed: VVGARGVGK (KRAS G12R)
LVGYRKVGI

SEQ ID NO: 42363 - protein, 9 aa, synthetic construct
  source 1..9: note = Seed: VVGARGVGK (KRAS G12R)
LVGYRKVGK

SEQ ID NO: 42364 - protein, 9 aa, synthetic construct
  source 1..9: note = Seed: VVGARGVGK (KRAS G12R)
LVGYRKVGL

SEQ ID NO: 42365 - protein, 9 aa, synthetic construct
  source 1..9: note = Seed: VVGARGVGK (KRAS G12R)
LVGYRKVGM

SEQ ID NO: 42366 - protein, 9 aa, synthetic construct
  source 1..9: note = Seed: VVGARGVGK (KRAS G12R)
LVGYRKVGR

SEQ ID NO: 42367 - protein, 9 aa, synthetic construct
  source 1..9: note = Seed: VVGARGVGK (KRAS G12R)
LVGYRKVGV

SEQ ID NO: 42368 - protein, 9 aa, synthetic construct
  source 1..9: note = Seed: VVGARGVGK (KRAS G12R)
LVGYRKVGY

SEQ ID NO: 42369 - protein, 9 aa, synthetic construct
  source 1..9: note = Seed: VVGARGVGK (KRAS G12R)
LVGYRLVGR

SEQ ID NO: 42370 - protein, 9 aa, synthetic construct
  source 1..9: note = Seed: VVGARGVGK (KRAS G12R)
LVGYRNVGR

SEQ ID NO: 42371 - protein, 9 aa, synthetic construct
  source 1..9: note = Seed: VVGARGVGK (KRAS G12R)
LVGYRPVGL

SEQ ID NO: 42372 - protein, 9 aa, synthetic construct
  source 1..9: note = Seed: VVGARGVGK (KRAS G12R)
LVGYRPVGR

SEQ ID NO: 42373 - protein, 9 aa, synthetic construct
  source 1..9: note = Seed: VVGARGVGK (KRAS G12R)
LVGYRQVGR

SEQ ID NO: 42374 - protein, 9 aa, synthetic construct
  source 1..9: note = Seed: VVGARGVGK (KRAS G12R)
LVGYRRVGA

SEQ ID NO: 42375 - protein, 9 aa, synthetic construct
  source 1..9: note = Seed: VVGARGVGK (KRAS G12R)
LVGYRRVGF

SEQ ID NO: 42376 - protein, 9 aa, synthetic construct
  source 1..9: note = Seed: VVGARGVGK (KRAS G12R)
LVGYRRVGH

SEQ ID NO: 42377 - protein, 9 aa, synthetic construct
  source 1..9: note = Seed: VVGARGVGK (KRAS G12R)
LVGYRRVGI

SEQ ID NO: 42378 - protein, 9 aa, synthetic construct
  source 1..9: note = Seed: VVGARGVGK (KRAS G12R)
LVGYRRVGK

SEQ ID NO: 42379 - protein, 9 aa, synthetic construct
  source 1..9: note = Seed: VVGARGVGK (KRAS G12R)
LVGYRRVGL

SEQ ID NO: 42380 - protein, 9 aa, synthetic construct
  source 1..9: note = Seed: VVGARGVGK (KRAS G12R)
LVGYRRVGM

SEQ ID NO: 42381 - protein, 9 aa, synthetic construct
  source 1..9: note = Seed: VVGARGVGK (KRAS G12R)
LVGYRRVGR

SEQ ID NO: 42382 - protein, 9 aa, synthetic construct
  source 1..9: note = Seed: VVGARGVGK (KRAS G12R)
LVGYRRVGS

SEQ ID NO: 42383 - protein, 9 aa, synthetic construct
  source 1..9: note = Seed: VVGARGVGK (KRAS G12R)
LVGYRRVGV

SEQ ID NO: 42384 - protein, 9 aa, synthetic construct
  source 1..9: note = Seed: VVGARGVGK (KRAS G12R)
LVGYRRVGY

SEQ ID NO: 42385 - protein, 9 aa, synthetic construct
  source 1..9: note = Seed: VVGARGVGK (KRAS G12R)
LVGYRSVGL

SEQ ID NO: 42386 - protein, 9 aa, synthetic construct
  source 1..9: note = Seed: VVGARGVGK (KRAS G12R)
LVGYRSVGR

SEQ ID NO: 42387 - protein, 9 aa, synthetic construct
  source 1..9: note = Seed: VVGARGVGK (KRAS G12R)
LVGYRTVGR

SEQ ID NO: 42388 - protein, 9 aa, synthetic construct
  source 1..9: note = Seed: VVGARGVGK (KRAS G12R)
LVGYRVVGR

SEQ ID NO: 42389 - protein, 9 aa, synthetic construct
  source 1..9: note = Seed: VVGARGVGK (KRAS G12R)
MVGARAVGA

SEQ ID NO: 42390 - protein, 9 aa, synthetic construct
  source 1..9: note = Seed: VVGARGVGK (KRAS G12R)
MVGARAVGC

SEQ ID NO: 42391 - protein, 9 aa, synthetic construct
  source 1..9: note = Seed: VVGARGVGK (KRAS G12R)
MVGARAVGD

SEQ ID NO: 42392 - protein, 9 aa, synthetic construct
  source 1..9: note = Seed: VVGARGVGK (KRAS G12R)
MVGARAVGE

SEQ ID NO: 42393 - protein, 9 aa, synthetic construct
  source 1..9: note = Seed: VVGARGVGK (KRAS G12R)
MVGARAVGF

SEQ ID NO: 42394 - protein, 9 aa, synthetic construct
  source 1..9: note = Seed: VVGARGVGK (KRAS G12R)
MVGARAVGG

SEQ ID NO: 42395 - protein, 9 aa, synthetic construct
  source 1..9: note = Seed: VVGARGVGK (KRAS G12R)
MVGARAVGH

SEQ ID NO: 42396 - protein, 9 aa, synthetic construct
  source 1..9: note = Seed: VVGARGVGK (KRAS G12R)
MVGARAVGI

SEQ ID NO: 42397 - protein, 9 aa, synthetic construct
  source 1..9: note = Seed: VVGARGVGK (KRAS G12R)
MVGARAVGK

SEQ ID NO: 42398 - protein, 9 aa, synthetic construct
  source 1..9: note = Seed: VVGARGVGK (KRAS G12R)
MVGARAVGL

SEQ ID NO: 42399 - protein, 9 aa, synthetic construct
  source 1..9: note = Seed: VVGARGVGK (KRAS G12R)
MVGARAVGM

SEQ ID NO: 42400 - protein, 9 aa, synthetic construct
  source 1..9: note = Seed: VVGARGVGK (KRAS G12R)
MVGARAVGN

SEQ ID NO: 42401 - protein, 9 aa, synthetic construct
  source 1..9: note = Seed: VVGARGVGK (KRAS G12R)
MVGARAVGP

SEQ ID NO: 42402 - protein, 9 aa, synthetic construct
  source 1..9: note = Seed: VVGARGVGK (KRAS G12R)
MVGARAVGQ

SEQ ID NO: 42403 - protein, 9 aa, synthetic construct
  source 1..9: note = Seed: VVGARGVGK (KRAS G12R)
MVGARAVGR

SEQ ID NO: 42404 - protein, 9 aa, synthetic construct
  source 1..9: note = Seed: VVGARGVGK (KRAS G12R)
MVGARAVGS

SEQ ID NO: 42405 - protein, 9 aa, synthetic construct
  source 1..9: note = Seed: VVGARGVGK (KRAS G12R)
MVGARAVGT

SEQ ID NO: 42406 - protein, 9 aa, synthetic construct
  source 1..9: note = Seed: VVGARGVGK (KRAS G12R)
MVGARAVGV

SEQ ID NO: 42407 - protein, 9 aa, synthetic construct
  source 1..9: note = Seed: VVGARGVGK (KRAS G12R)
MVGARAVGW

SEQ ID NO: 42408 - protein, 9 aa, synthetic construct
  source 1..9: note = Seed: VVGARGVGK (KRAS G12R)
MVGARAVGY

SEQ ID NO: 42409 - protein, 9 aa, synthetic construct
  source 1..9: note = Seed: VVGARGVGK (KRAS G12R)
MVGARCVGA

SEQ ID NO: 42410 - protein, 9 aa, synthetic construct
  source 1..9: note = Seed: VVGARGVGK (KRAS G12R)
MVGARCVGI

SEQ ID NO: 42411 - protein, 9 aa, synthetic construct
  source 1..9: note = Seed: VVGARGVGK (KRAS G12R)
MVGARCVGL

SEQ ID NO: 42412 - protein, 9 aa, synthetic construct
  source 1..9: note = Seed: VVGARGVGK (KRAS G12R)
MVGARCVGM

SEQ ID NO: 42413 - protein, 9 aa, synthetic construct
  source 1..9: note = Seed: VVGARGVGK (KRAS G12R)
MVGARCVGS

SEQ ID NO: 42414 - protein, 9 aa, synthetic construct
  source 1..9: note = Seed: VVGARGVGK (KRAS G12R)
MVGARCVGT

SEQ ID NO: 42415 - protein, 9 aa, synthetic construct
  source 1..9: note = Seed: VVGARGVGK (KRAS G12R)
MVGARCVGV

SEQ ID NO: 42416 - protein, 9 aa, synthetic construct
  source 1..9: note = Seed: VVGARGVGK (KRAS G12R)
MVGARGVGA

SEQ ID NO: 42417 - protein, 9 aa, synthetic construct
  source 1..9: note = Seed: VVGARGVGK (KRAS G12R)
MVGARGVGF

SEQ ID NO: 42418 - protein, 9 aa, synthetic construct
  source 1..9: note = Seed: VVGARGVGK (KRAS G12R)
MVGARGVGG

SEQ ID NO: 42419 - protein, 9 aa, synthetic construct
  source 1..9: note = Seed: VVGARGVGK (KRAS G12R)
MVGARGVGH

SEQ ID NO: 42420 - protein, 9 aa, synthetic construct
  source 1..9: note = Seed: VVGARGVGK (KRAS G12R)
MVGARGVGI

SEQ ID NO: 42421 - protein, 9 aa, synthetic construct
  source 1..9: note = Seed: VVGARGVGK (KRAS G12R)
MVGARGVGK

SEQ ID NO: 42422 - protein, 9 aa, synthetic construct
  source 1..9: note = Seed: VVGARGVGK (KRAS G12R)
MVGARGVGL

SEQ ID NO: 42423 - protein, 9 aa, synthetic construct
  source 1..9: note = Seed: VVGARGVGK (KRAS G12R)
MVGARGVGM

SEQ ID NO: 42424 - protein, 9 aa, synthetic construct
  source 1..9: note = Seed: VVGARGVGK (KRAS G12R)
MVGARGVGN

SEQ ID NO: 42425 - protein, 9 aa, synthetic construct
  source 1..9: note = Seed: VVGARGVGK (KRAS G12R)
MVGARGVGQ

SEQ ID NO: 42426 - protein, 9 aa, synthetic construct
  source 1..9: note = Seed: VVGARGVGK (KRAS G12R)
MVGARGVGR

SEQ ID NO: 42427 - protein, 9 aa, synthetic construct
  source 1..9: note = Seed: VVGARGVGK (KRAS G12R)
MVGARGVGS

SEQ ID NO: 42428 - protein, 9 aa, synthetic construct
  source 1..9: note = Seed: VVGARGVGK (KRAS G12R)
MVGARGVGT

SEQ ID NO: 42429 - protein, 9 aa, synthetic construct
  source 1..9: note = Seed: VVGARGVGK (KRAS G12R)
MVGARGVGV

SEQ ID NO: 42430 - protein, 9 aa, synthetic construct
  source 1..9: note = Seed: VVGARGVGK (KRAS G12R)
MVGARGVGW

SEQ ID NO: 42431 - protein, 9 aa, synthetic construct
  source 1..9: note = Seed: VVGARGVGK (KRAS G12R)
MVGARGVGY

SEQ ID NO: 42432 - protein, 9 aa, synthetic construct
  source 1..9: note = Seed: VVGARGVGK (KRAS G12R)
MVGARHVGA

SEQ ID NO: 42433 - protein, 9 aa, synthetic construct
  source 1..9: note = Seed: VVGARGVGK (KRAS G12R)
MVGARHVGI

SEQ ID NO: 42434 - protein, 9 aa, synthetic construct
  source 1..9: note = Seed: VVGARGVGK (KRAS G12R)
MVGARHVGL

SEQ ID NO: 42435 - protein, 9 aa, synthetic construct
  source 1..9: note = Seed: VVGARGVGK (KRAS G12R)
MVGARHVGM

SEQ ID NO: 42436 - protein, 9 aa, synthetic construct
  source 1..9: note = Seed: VVGARGVGK (KRAS G12R)
MVGARHVGV

SEQ ID NO: 42437 - protein, 9 aa, synthetic construct
  source 1..9: note = Seed: VVGARGVGK (KRAS G12R)
MVGARIVGA

SEQ ID NO: 42438 - protein, 9 aa, synthetic construct
  source 1..9: note = Seed: VVGARGVGK (KRAS G12R)
MVGARIVGC

SEQ ID NO: 42439 - protein, 9 aa, synthetic construct
  source 1..9: note = Seed: VVGARGVGK (KRAS G12R)
MVGARIVGG

SEQ ID NO: 42440 - protein, 9 aa, synthetic construct
  source 1..9: note = Seed: VVGARGVGK (KRAS G12R)
MVGARIVGH

SEQ ID NO: 42441 - protein, 9 aa, synthetic construct
  source 1..9: note = Seed: VVGARGVGK (KRAS G12R)
MVGARIVGI

SEQ ID NO: 42442 - protein, 9 aa, synthetic construct
  source 1..9: note = Seed: VVGARGVGK (KRAS G12R)
MVGARIVGL

SEQ ID NO: 42443 - protein, 9 aa, synthetic construct
  source 1..9: note = Seed: VVGARGVGK (KRAS G12R)
MVGARIVGM

SEQ ID NO: 42444 - protein, 9 aa, synthetic construct
  source 1..9: note = Seed: VVGARGVGK (KRAS G12R)
MVGARIVGN

SEQ ID NO: 42445 - protein, 9 aa, synthetic construct
  source 1..9: note = Seed: VVGARGVGK (KRAS G12R)
MVGARIVGP

SEQ ID NO: 42446 - protein, 9 aa, synthetic construct
  source 1..9: note = Seed: VVGARGVGK (KRAS G12R)
MVGARIVGQ

SEQ ID NO: 42447 - protein, 9 aa, synthetic construct
  source 1..9: note = Seed: VVGARGVGK (KRAS G12R)
MVGARIVGS

SEQ ID NO: 42448 - protein, 9 aa, synthetic construct
  source 1..9: note = Seed: VVGARGVGK (KRAS G12R)
MVGARIVGT

SEQ ID NO: 42449 - protein, 9 aa, synthetic construct
  source 1..9: note = Seed: VVGARGVGK (KRAS G12R)
MVGARIVGV

SEQ ID NO: 42450 - protein, 9 aa, synthetic construct
  source 1..9: note = Seed: VVGARGVGK (KRAS G12R)
MVGARKVGF

SEQ ID NO: 42451 - protein, 9 aa, synthetic construct
  source 1..9: note = Seed: VVGARGVGK (KRAS G12R)
MVGARKVGI

SEQ ID NO: 42452 - protein, 9 aa, synthetic construct
  source 1..9: note = Seed: VVGARGVGK (KRAS G12R)
MVGARKVGK

SEQ ID NO: 42453 - protein, 9 aa, synthetic construct
  source 1..9: note = Seed: VVGARGVGK (KRAS G12R)
MVGARKVGL

SEQ ID NO: 42454 - protein, 9 aa, synthetic construct
  source 1..9: note = Seed: VVGARGVGK (KRAS G12R)
MVGARKVGM

SEQ ID NO: 42455 - protein, 9 aa, synthetic construct
  source 1..9: note = Seed: VVGARGVGK (KRAS G12R)
MVGARKVGR

SEQ ID NO: 42456 - protein, 9 aa, synthetic construct
  source 1..9: note = Seed: VVGARGVGK (KRAS G12R)
MVGARKVGV

SEQ ID NO: 42457 - protein, 9 aa, synthetic construct
  source 1..9: note = Seed: VVGARGVGK (KRAS G12R)
MVGARKVGY

SEQ ID NO: 42458 - protein, 9 aa, synthetic construct
  source 1..9: note = Seed: VVGARGVGK (KRAS G12R)
MVGARLVGA

SEQ ID NO: 42459 - protein, 9 aa, synthetic construct
  source 1..9: note = Seed: VVGARGVGK (KRAS G12R)
MVGARLVGC

SEQ ID NO: 42460 - protein, 9 aa, synthetic construct
  source 1..9: note = Seed: VVGARGVGK (KRAS G12R)
MVGARLVGG

SEQ ID NO: 42461 - protein, 9 aa, synthetic construct
  source 1..9: note = Seed: VVGARGVGK (KRAS G12R)
MVGARLVGM

SEQ ID NO: 42462 - protein, 9 aa, synthetic construct
  source 1..9: note = Seed: VVGARGVGK (KRAS G12R)
MVGARLVGS

SEQ ID NO: 42463 - protein, 9 aa, synthetic construct
  source 1..9: note = Seed: VVGARGVGK (KRAS G12R)
MVGARLVGT

SEQ ID NO: 42464 - protein, 9 aa, synthetic construct
  source 1..9: note = Seed: VVGARGVGK (KRAS G12R)
MVGARLVGV

SEQ ID NO: 42465 - protein, 9 aa, synthetic construct
  source 1..9: note = Seed: VVGARGVGK (KRAS G12R)
MVGARMVGA

SEQ ID NO: 42466 - protein, 9 aa, synthetic construct
  source 1..9: note = Seed: VVGARGVGK (KRAS G12R)
MVGARMVGC

SEQ ID NO: 42467 - protein, 9 aa, synthetic construct
  source 1..9: note = Seed: VVGARGVGK (KRAS G12R)
MVGARMVGG

SEQ ID NO: 42468 - protein, 9 aa, synthetic construct
  source 1..9: note = Seed: VVGARGVGK (KRAS G12R)
MVGARMVGM

SEQ ID NO: 42469 - protein, 9 aa, synthetic construct
  source 1..9: note = Seed: VVGARGVGK (KRAS G12R)
MVGARMVGS

SEQ ID NO: 42470 - protein, 9 aa, synthetic construct
  source 1..9: note = Seed: VVGARGVGK (KRAS G12R)
MVGARMVGT

SEQ ID NO: 42471 - protein, 9 aa, synthetic construct
  source 1..9: note = Seed: VVGARGVGK (KRAS G12R)
MVGARMVGV

SEQ ID NO: 42472 - protein, 9 aa, synthetic construct
  source 1..9: note = Seed: VVGARGVGK (KRAS G12R)
MVGARNVGA

SEQ ID NO: 42473 - protein, 9 aa, synthetic construct
  source 1..9: note = Seed: VVGARGVGK (KRAS G12R)
MVGARNVGF

SEQ ID NO: 42474 - protein, 9 aa, synthetic construct
  source 1..9: note = Seed: VVGARGVGK (KRAS G12R)
MVGARNVGG

SEQ ID NO: 42475 - protein, 9 aa, synthetic construct
  source 1..9: note = Seed: VVGARGVGK (KRAS G12R)
MVGARNVGI

SEQ ID NO: 42476 - protein, 9 aa, synthetic construct
  source 1..9: note = Seed: VVGARGVGK (KRAS G12R)
MVGARNVGL

SEQ ID NO: 42477 - protein, 9 aa, synthetic construct
  source 1..9: note = Seed: VVGARGVGK (KRAS G12R)
MVGARNVGM

SEQ ID NO: 42478 - protein, 9 aa, synthetic construct
  source 1..9: note = Seed: VVGARGVGK (KRAS G12R)
MVGARNVGN

SEQ ID NO: 42479 - protein, 9 aa, synthetic construct
  source 1..9: note = Seed: VVGARGVGK (KRAS G12R)
MVGARNVGQ

SEQ ID NO: 42480 - protein, 9 aa, synthetic construct
  source 1..9: note = Seed: VVGARGVGK (KRAS G12R)
MVGARNVGR

SEQ ID NO: 42481 - protein, 9 aa, synthetic construct
  source 1..9: note = Seed: VVGARGVGK (KRAS G12R)
MVGARNVGS

SEQ ID NO: 42482 - protein, 9 aa, synthetic construct
  source 1..9: note = Seed: VVGARGVGK (KRAS G12R)
MVGARNVGT

SEQ ID NO: 42483 - protein, 9 aa, synthetic construct
  source 1..9: note = Seed: VVGARGVGK (KRAS G12R)
MVGARNVGV

SEQ ID NO: 42484 - protein, 9 aa, synthetic construct
  source 1..9: note = Seed: VVGARGVGK (KRAS G12R)
MVGARNVGY

SEQ ID NO: 42485 - protein, 9 aa, synthetic construct
  source 1..9: note = Seed: VVGARGVGK (KRAS G12R)
MVGARPVGA

SEQ ID NO: 42486 - protein, 9 aa, synthetic construct
  source 1..9: note = Seed: VVGARGVGK (KRAS G12R)
MVGARPVGC

SEQ ID NO: 42487 - protein, 9 aa, synthetic construct
  source 1..9: note = Seed: VVGARGVGK (KRAS G12R)
MVGARPVGD

SEQ ID NO: 42488 - protein, 9 aa, synthetic construct
  source 1..9: note = Seed: VVGARGVGK (KRAS G12R)
MVGARPVGE

SEQ ID NO: 42489 - protein, 9 aa, synthetic construct
  source 1..9: note = Seed: VVGARGVGK (KRAS G12R)
MVGARPVGF

SEQ ID NO: 42490 - protein, 9 aa, synthetic construct
  source 1..9: note = Seed: VVGARGVGK (KRAS G12R)
MVGARPVGG

SEQ ID NO: 42491 - protein, 9 aa, synthetic construct
  source 1..9: note = Seed: VVGARGVGK (KRAS G12R)
MVGARPVGH

SEQ ID NO: 42492 - protein, 9 aa, synthetic construct
  source 1..9: note = Seed: VVGARGVGK (KRAS G12R)
MVGARPVGI

SEQ ID NO: 42493 - protein, 9 aa, synthetic construct
  source 1..9: note = Seed: VVGARGVGK (KRAS G12R)
MVGARPVGK

SEQ ID NO: 42494 - protein, 9 aa, synthetic construct
  source 1..9: note = Seed: VVGARGVGK (KRAS G12R)
MVGARPVGL

SEQ ID NO: 42495 - protein, 9 aa, synthetic construct
  source 1..9: note = Seed: VVGARGVGK (KRAS G12R)
MVGARPVGM

SEQ ID NO: 42496 - protein, 9 aa, synthetic construct
  source 1..9: note = Seed: VVGARGVGK (KRAS G12R)
MVGARPVGN

SEQ ID NO: 42497 - protein, 9 aa, synthetic construct
  source 1..9: note = Seed: VVGARGVGK (KRAS G12R)
MVGARPVGP

SEQ ID NO: 42498 - protein, 9 aa, synthetic construct
  source 1..9: note = Seed: VVGARGVGK (KRAS G12R)
MVGARPVGQ

SEQ ID NO: 42499 - protein, 9 aa, synthetic construct
  source 1..9: note = Seed: VVGARGVGK (KRAS G12R)
MVGARPVGR

SEQ ID NO: 42500 - protein, 9 aa, synthetic construct
  source 1..9: note = Seed: VVGARGVGK (KRAS G12R)
MVGARPVGS

SEQ ID NO: 42501 - protein, 9 aa, synthetic construct
  source 1..9: note = Seed: VVGARGVGK (KRAS G12R)
MVGARPVGT

SEQ ID NO: 42502 - protein, 9 aa, synthetic construct
  source 1..9: note = Seed: VVGARGVGK (KRAS G12R)
MVGARPVGV

SEQ ID NO: 42503 - protein, 9 aa, synthetic construct
  source 1..9: note = Seed: VVGARGVGK (KRAS G12R)
MVGARPVGW

SEQ ID NO: 42504 - protein, 9 aa, synthetic construct
  source 1..9: note = Seed: VVGARGVGK (KRAS G12R)
MVGARPVGY

SEQ ID NO: 42505 - protein, 9 aa, synthetic construct
  source 1..9: note = Seed: VVGARGVGK (KRAS G12R)
MVGARQVGI

SEQ ID NO: 42506 - protein, 9 aa, synthetic construct
  source 1..9: note = Seed: VVGARGVGK (KRAS G12R)
MVGARQVGL

SEQ ID NO: 42507 - protein, 9 aa, synthetic construct
  source 1..9: note = Seed: VVGARGVGK (KRAS G12R)
MVGARQVGM

SEQ ID NO: 42508 - protein, 9 aa, synthetic construct
  source 1..9: note = Seed: VVGARGVGK (KRAS G12R)
MVGARQVGV

SEQ ID NO: 42509 - protein, 9 aa, synthetic construct
  source 1..9: note = Seed: VVGARGVGK (KRAS G12R)
MVGARRVGA

SEQ ID NO: 42510 - protein, 9 aa, synthetic construct
  source 1..9: note = Seed: VVGARGVGK (KRAS G12R)
MVGARRVGF

SEQ ID NO: 42511 - protein, 9 aa, synthetic construct
  source 1..9: note = Seed: VVGARGVGK (KRAS G12R)
MVGARRVGH

SEQ ID NO: 42512 - protein, 9 aa, synthetic construct
  source 1..9: note = Seed: VVGARGVGK (KRAS G12R)
MVGARRVGI

SEQ ID NO: 42513 - protein, 9 aa, synthetic construct
  source 1..9: note = Seed: VVGARGVGK (KRAS G12R)
MVGARRVGK

SEQ ID NO: 42514 - protein, 9 aa, synthetic construct
  source 1..9: note = Seed: VVGARGVGK (KRAS G12R)
MVGARRVGL

SEQ ID NO: 42515 - protein, 9 aa, synthetic construct
  source 1..9: note = Seed: VVGARGVGK (KRAS G12R)
MVGARRVGM

SEQ ID NO: 42516 - protein, 9 aa, synthetic construct
  source 1..9: note = Seed: VVGARGVGK (KRAS G12R)
MVGARRVGQ

SEQ ID NO: 42517 - protein, 9 aa, synthetic construct
  source 1..9: note = Seed: VVGARGVGK (KRAS G12R)
MVGARRVGR

SEQ ID NO: 42518 - protein, 9 aa, synthetic construct
  source 1..9: note = Seed: VVGARGVGK (KRAS G12R)
MVGARRVGS

SEQ ID NO: 42519 - protein, 9 aa, synthetic construct
  source 1..9: note = Seed: VVGARGVGK (KRAS G12R)
MVGARRVGT

SEQ ID NO: 42520 - protein, 9 aa, synthetic construct
  source 1..9: note = Seed: VVGARGVGK (KRAS G12R)
MVGARRVGV

SEQ ID NO: 42521 - protein, 9 aa, synthetic construct
  source 1..9: note = Seed: VVGARGVGK (KRAS G12R)
MVGARRVGW

SEQ ID NO: 42522 - protein, 9 aa, synthetic construct
  source 1..9: note = Seed: VVGARGVGK (KRAS G12R)
MVGARRVGY

SEQ ID NO: 42523 - protein, 9 aa, synthetic construct
  source 1..9: note = Seed: VVGARGVGK (KRAS G12R)
MVGARSVGA

SEQ ID NO: 42524 - protein, 9 aa, synthetic construct
  source 1..9: note = Seed: VVGARGVGK (KRAS G12R)
MVGARSVGC

SEQ ID NO: 42525 - protein, 9 aa, synthetic construct
  source 1..9: note = Seed: VVGARGVGK (KRAS G12R)
MVGARSVGF

SEQ ID NO: 42526 - protein, 9 aa, synthetic construct
  source 1..9: note = Seed: VVGARGVGK (KRAS G12R)
MVGARSVGG

SEQ ID NO: 42527 - protein, 9 aa, synthetic construct
  source 1..9: note = Seed: VVGARGVGK (KRAS G12R)
MVGARSVGH

SEQ ID NO: 42528 - protein, 9 aa, synthetic construct
  source 1..9: note = Seed: VVGARGVGK (KRAS G12R)
MVGARSVGI

SEQ ID NO: 42529 - protein, 9 aa, synthetic construct
  source 1..9: note = Seed: VVGARGVGK (KRAS G12R)
MVGARSVGK

SEQ ID NO: 42530 - protein, 9 aa, synthetic construct
  source 1..9: note = Seed: VVGARGVGK (KRAS G12R)
MVGARSVGL

SEQ ID NO: 42531 - protein, 9 aa, synthetic construct
  source 1..9: note = Seed: VVGARGVGK (KRAS G12R)
MVGARSVGM

SEQ ID NO: 42532 - protein, 9 aa, synthetic construct
  source 1..9: note = Seed: VVGARGVGK (KRAS G12R)
MVGARSVGN

SEQ ID NO: 42533 - protein, 9 aa, synthetic construct
  source 1..9: note = Seed: VVGARGVGK (KRAS G12R)
MVGARSVGQ

SEQ ID NO: 42534 - protein, 9 aa, synthetic construct
  source 1..9: note = Seed: VVGARGVGK (KRAS G12R)
MVGARSVGR

SEQ ID NO: 42535 - protein, 9 aa, synthetic construct
  source 1..9: note = Seed: VVGARGVGK (KRAS G12R)
MVGARSVGS

SEQ ID NO: 42536 - protein, 9 aa, synthetic construct
  source 1..9: note = Seed: VVGARGVGK (KRAS G12R)
MVGARSVGT

SEQ ID NO: 42537 - protein, 9 aa, synthetic construct
  source 1..9: note = Seed: VVGARGVGK (KRAS G12R)
MVGARSVGV

SEQ ID NO: 42538 - protein, 9 aa, synthetic construct
  source 1..9: note = Seed: VVGARGVGK (KRAS G12R)
MVGARSVGW

SEQ ID NO: 42539 - protein, 9 aa, synthetic construct
  source 1..9: note = Seed: VVGARGVGK (KRAS G12R)
MVGARSVGY

SEQ ID NO: 42540 - protein, 9 aa, synthetic construct
  source 1..9: note = Seed: VVGARGVGK (KRAS G12R)
MVGARTVGA

SEQ ID NO: 42541 - protein, 9 aa, synthetic construct
  source 1..9: note = Seed: VVGARGVGK (KRAS G12R)
MVGARTVGF

SEQ ID NO: 42542 - protein, 9 aa, synthetic construct
  source 1..9: note = Seed: VVGARGVGK (KRAS G12R)
MVGARTVGG

SEQ ID NO: 42543 - protein, 9 aa, synthetic construct
  source 1..9: note = Seed: VVGARGVGK (KRAS G12R)
MVGARTVGI

SEQ ID NO: 42544 - protein, 9 aa, synthetic construct
  source 1..9: note = Seed: VVGARGVGK (KRAS G12R)
MVGARTVGL

SEQ ID NO: 42545 - protein, 9 aa, synthetic construct
  source 1..9: note = Seed: VVGARGVGK (KRAS G12R)
MVGARTVGM

SEQ ID NO: 42546 - protein, 9 aa, synthetic construct
  source 1..9: note = Seed: VVGARGVGK (KRAS G12R)
MVGARTVGN

SEQ ID NO: 42547 - protein, 9 aa, synthetic construct
  source 1..9: note = Seed: VVGARGVGK (KRAS G12R)
MVGARTVGQ

SEQ ID NO: 42548 - protein, 9 aa, synthetic construct
  source 1..9: note = Seed: VVGARGVGK (KRAS G12R)
MVGARTVGR

SEQ ID NO: 42549 - protein, 9 aa, synthetic construct
  source 1..9: note = Seed: VVGARGVGK (KRAS G12R)
MVGARTVGS

SEQ ID NO: 42550 - protein, 9 aa, synthetic construct
  source 1..9: note = Seed: VVGARGVGK (KRAS G12R)
MVGARTVGT

SEQ ID NO: 42551 - protein, 9 aa, synthetic construct
  source 1..9: note = Seed: VVGARGVGK (KRAS G12R)
MVGARTVGV

SEQ ID NO: 42552 - protein, 9 aa, synthetic construct
  source 1..9: note = Seed: VVGARGVGK (KRAS G12R)
MVGARTVGY

SEQ ID NO: 42553 - protein, 9 aa, synthetic construct
  source 1..9: note = Seed: VVGARGVGK (KRAS G12R)
MVGARVVGA

SEQ ID NO: 42554 - protein, 9 aa, synthetic construct
  source 1..9: note = Seed: VVGARGVGK (KRAS G12R)
MVGARVVGC

SEQ ID NO: 42555 - protein, 9 aa, synthetic construct
  source 1..9: note = Seed: VVGARGVGK (KRAS G12R)
MVGARVVGD

SEQ ID NO: 42556 - protein, 9 aa, synthetic construct
  source 1..9: note = Seed: VVGARGVGK (KRAS G12R)
MVGARVVGE

SEQ ID NO: 42557 - protein, 9 aa, synthetic construct
  source 1..9: note = Seed: VVGARGVGK (KRAS G12R)
MVGARVVGF

SEQ ID NO: 42558 - protein, 9 aa, synthetic construct
  source 1..9: note = Seed: VVGARGVGK (KRAS G12R)
MVGARVVGG

SEQ ID NO: 42559 - protein, 9 aa, synthetic construct
  source 1..9: note = Seed: VVGARGVGK (KRAS G12R)
MVGARVVGH

SEQ ID NO: 42560 - protein, 9 aa, synthetic construct
  source 1..9: note = Seed: VVGARGVGK (KRAS G12R)
MVGARVVGI

SEQ ID NO: 42561 - protein, 9 aa, synthetic construct
  source 1..9: note = Seed: VVGARGVGK (KRAS G12R)
MVGARVVGL

SEQ ID NO: 42562 - protein, 9 aa, synthetic construct
  source 1..9: note = Seed: VVGARGVGK (KRAS G12R)
MVGARVVGM

SEQ ID NO: 42563 - protein, 9 aa, synthetic construct
  source 1..9: note = Seed: VVGARGVGK (KRAS G12R)
MVGARVVGN

SEQ ID NO: 42564 - protein, 9 aa, synthetic construct
  source 1..9: note = Seed: VVGARGVGK (KRAS G12R)
MVGARVVGP

SEQ ID NO: 42565 - protein, 9 aa, synthetic construct
  source 1..9: note = Seed: VVGARGVGK (KRAS G12R)
MVGARVVGQ

SEQ ID NO: 42566 - protein, 9 aa, synthetic construct
  source 1..9: note = Seed: VVGARGVGK (KRAS G12R)
MVGARVVGR

SEQ ID NO: 42567 - protein, 9 aa, synthetic construct
  source 1..9: note = Seed: VVGARGVGK (KRAS G12R)
MVGARVVGS

SEQ ID NO: 42568 - protein, 9 aa, synthetic construct
  source 1..9: note = Seed: VVGARGVGK (KRAS G12R)
MVGARVVGT

SEQ ID NO: 42569 - protein, 9 aa, synthetic construct
  source 1..9: note = Seed: VVGARGVGK (KRAS G12R)
MVGARVVGV

SEQ ID NO: 42570 - protein, 9 aa, synthetic construct
  source 1..9: note = Seed: VVGARGVGK (KRAS G12R)
MVGARVVGY

SEQ ID NO: 42571 - protein, 9 aa, synthetic construct
  source 1..9: note = Seed: VVGARGVGK (KRAS G12R)
MVGCRAVGA

SEQ ID NO: 42572 - protein, 9 aa, synthetic construct
  source 1..9: note = Seed: VVGARGVGK (KRAS G12R)
MVGCRAVGI

SEQ ID NO: 42573 - protein, 9 aa, synthetic construct
  source 1..9: note = Seed: VVGARGVGK (KRAS G12R)
MVGCRAVGL

SEQ ID NO: 42574 - protein, 9 aa, synthetic construct
  source 1..9: note = Seed: VVGARGVGK (KRAS G12R)
MVGCRAVGS

SEQ ID NO: 42575 - protein, 9 aa, synthetic construct
  source 1..9: note = Seed: VVGARGVGK (KRAS G12R)
MVGCRAVGV

SEQ ID NO: 42576 - protein, 9 aa, synthetic construct
  source 1..9: note = Seed: VVGARGVGK (KRAS G12R)
MVGCRKVGR

SEQ ID NO: 42577 - protein, 9 aa, synthetic construct
  source 1..9: note = Seed: VVGARGVGK (KRAS G12R)
MVGCRRVGR

SEQ ID NO: 42578 - protein, 9 aa, synthetic construct
  source 1..9: note = Seed: VVGARGVGK (KRAS G12R)
MVGCRSVGA

SEQ ID NO: 42579 - protein, 9 aa, synthetic construct
  source 1..9: note = Seed: VVGARGVGK (KRAS G12R)
MVGCRVVGA

SEQ ID NO: 42580 - protein, 9 aa, synthetic construct
  source 1..9: note = Seed: VVGARGVGK (KRAS G12R)
MVGERAVGA

SEQ ID NO: 42581 - protein, 9 aa, synthetic construct
  source 1..9: note = Seed: VVGARGVGK (KRAS G12R)
MVGERAVGI

SEQ ID NO: 42582 - protein, 9 aa, synthetic construct
  source 1..9: note = Seed: VVGARGVGK (KRAS G12R)
MVGERAVGL

SEQ ID NO: 42583 - protein, 9 aa, synthetic construct
  source 1..9: note = Seed: VVGARGVGK (KRAS G12R)
MVGERAVGM

SEQ ID NO: 42584 - protein, 9 aa, synthetic construct
  source 1..9: note = Seed: VVGARGVGK (KRAS G12R)
MVGERAVGS

SEQ ID NO: 42585 - protein, 9 aa, synthetic construct
  source 1..9: note = Seed: VVGARGVGK (KRAS G12R)
MVGERAVGT

SEQ ID NO: 42586 - protein, 9 aa, synthetic construct
  source 1..9: note = Seed: VVGARGVGK (KRAS G12R)
MVGERAVGV

SEQ ID NO: 42587 - protein, 9 aa, synthetic construct
  source 1..9: note = Seed: VVGARGVGK (KRAS G12R)
MVGERGVGA

SEQ ID NO: 42588 - protein, 9 aa, synthetic construct
  source 1..9: note = Seed: VVGARGVGK (KRAS G12R)
MVGERGVGI

SEQ ID NO: 42589 - protein, 9 aa, synthetic construct
  source 1..9: note = Seed: VVGARGVGK (KRAS G12R)
MVGERGVGL

SEQ ID NO: 42590 - protein, 9 aa, synthetic construct
  source 1..9: note = Seed: VVGARGVGK (KRAS G12R)
MVGERGVGV

SEQ ID NO: 42591 - protein, 9 aa, synthetic construct
  source 1..9: note = Seed: VVGARGVGK (KRAS G12R)
MVGERPVGI

SEQ ID NO: 42592 - protein, 9 aa, synthetic construct
  source 1..9: note = Seed: VVGARGVGK (KRAS G12R)
MVGERPVGV

SEQ ID NO: 42593 - protein, 9 aa, synthetic construct
  source 1..9: note = Seed: VVGARGVGK (KRAS G12R)
MVGERSVGA

SEQ ID NO: 42594 - protein, 9 aa, synthetic construct
  source 1..9: note = Seed: VVGARGVGK (KRAS G12R)
MVGERSVGI

SEQ ID NO: 42595 - protein, 9 aa, synthetic construct
  source 1..9: note = Seed: VVGARGVGK (KRAS G12R)
MVGERSVGL

SEQ ID NO: 42596 - protein, 9 aa, synthetic construct
  source 1..9: note = Seed: VVGARGVGK (KRAS G12R)
MVGERSVGV

SEQ ID NO: 42597 - protein, 9 aa, synthetic construct
  source 1..9: note = Seed: VVGARGVGK (KRAS G12R)
MVGFRAVGL

SEQ ID NO: 42598 - protein, 9 aa, synthetic construct
  source 1..9: note = Seed: VVGARGVGK (KRAS G12R)
MVGFRAVGM

SEQ ID NO: 42599 - protein, 9 aa, synthetic construct
  source 1..9: note = Seed: VVGARGVGK (KRAS G12R)
MVGFRAVGR

SEQ ID NO: 42600 - protein, 9 aa, synthetic construct
  source 1..9: note = Seed: VVGARGVGK (KRAS G12R)
MVGFRGVGI

SEQ ID NO: 42601 - protein, 9 aa, synthetic construct
  source 1..9: note = Seed: VVGARGVGK (KRAS G12R)
MVGFRGVGL

SEQ ID NO: 42602 - protein, 9 aa, synthetic construct
  source 1..9: note = Seed: VVGARGVGK (KRAS G12R)
MVGFRGVGM

SEQ ID NO: 42603 - protein, 9 aa, synthetic construct
  source 1..9: note = Seed: VVGARGVGK (KRAS G12R)
MVGFRGVGR

SEQ ID NO: 42604 - protein, 9 aa, synthetic construct
  source 1..9: note = Seed: VVGARGVGK (KRAS G12R)
MVGFRGVGV

SEQ ID NO: 42605 - protein, 9 aa, synthetic construct
  source 1..9: note = Seed: VVGARGVGK (KRAS G12R)
MVGFRHVGR

SEQ ID NO: 42606 - protein, 9 aa, synthetic construct
  source 1..9: note = Seed: VVGARGVGK (KRAS G12R)
MVGFRKVGA

SEQ ID NO: 42607 - protein, 9 aa, synthetic construct
  source 1..9: note = Seed: VVGARGVGK (KRAS G12R)
MVGFRKVGF

SEQ ID NO: 42608 - protein, 9 aa, synthetic construct
  source 1..9: note = Seed: VVGARGVGK (KRAS G12R)
MVGFRKVGH

SEQ ID NO: 42609 - protein, 9 aa, synthetic construct
  source 1..9: note = Seed: VVGARGVGK (KRAS G12R)
MVGFRKVGI

SEQ ID NO: 42610 - protein, 9 aa, synthetic construct
  source 1..9: note = Seed: VVGARGVGK (KRAS G12R)
MVGFRKVGK

SEQ ID NO: 42611 - protein, 9 aa, synthetic construct
  source 1..9: note = Seed: VVGARGVGK (KRAS G12R)
MVGFRKVGL

SEQ ID NO: 42612 - protein, 9 aa, synthetic construct
  source 1..9: note = Seed: VVGARGVGK (KRAS G12R)
MVGFRKVGM

SEQ ID NO: 42613 - protein, 9 aa, synthetic construct
  source 1..9: note = Seed: VVGARGVGK (KRAS G12R)
MVGFRKVGR

SEQ ID NO: 42614 - protein, 9 aa, synthetic construct
  source 1..9: note = Seed: VVGARGVGK (KRAS G12R)
MVGFRKVGS

SEQ ID NO: 42615 - protein, 9 aa, synthetic construct
  source 1..9: note = Seed: VVGARGVGK (KRAS G12R)
MVGFRKVGV

SEQ ID NO: 42616 - protein, 9 aa, synthetic construct
  source 1..9: note = Seed: VVGARGVGK (KRAS G12R)
MVGFRKVGY

SEQ ID NO: 42617 - protein, 9 aa, synthetic construct
  source 1..9: note = Seed: VVGARGVGK (KRAS G12R)
MVGFRNVGR

SEQ ID NO: 42618 - protein, 9 aa, synthetic construct
  source 1..9: note = Seed: VVGARGVGK (KRAS G12R)
MVGFRPVGL

SEQ ID NO: 42619 - protein, 9 aa, synthetic construct
  source 1..9: note = Seed: VVGARGVGK (KRAS G12R)
MVGFRPVGM

SEQ ID NO: 42620 - protein, 9 aa, synthetic construct
  source 1..9: note = Seed: VVGARGVGK (KRAS G12R)
MVGFRQVGR

SEQ ID NO: 42621 - protein, 9 aa, synthetic construct
  source 1..9: note = Seed: VVGARGVGK (KRAS G12R)
MVGFRRVGA

SEQ ID NO: 42622 - protein, 9 aa, synthetic construct
  source 1..9: note = Seed: VVGARGVGK (KRAS G12R)
MVGFRRVGF

SEQ ID NO: 42623 - protein, 9 aa, synthetic construct
  source 1..9: note = Seed: VVGARGVGK (KRAS G12R)
MVGFRRVGH

SEQ ID NO: 42624 - protein, 9 aa, synthetic construct
  source 1..9: note = Seed: VVGARGVGK (KRAS G12R)
MVGFRRVGI

SEQ ID NO: 42625 - protein, 9 aa, synthetic construct
  source 1..9: note = Seed: VVGARGVGK (KRAS G12R)
MVGFRRVGK

SEQ ID NO: 42626 - protein, 9 aa, synthetic construct
  source 1..9: note = Seed: VVGARGVGK (KRAS G12R)
MVGFRRVGL

SEQ ID NO: 42627 - protein, 9 aa, synthetic construct
  source 1..9: note = Seed: VVGARGVGK (KRAS G12R)
MVGFRRVGM

SEQ ID NO: 42628 - protein, 9 aa, synthetic construct
  source 1..9: note = Seed: VVGARGVGK (KRAS G12R)
MVGFRRVGQ

SEQ ID NO: 42629 - protein, 9 aa, synthetic construct
  source 1..9: note = Seed: VVGARGVGK (KRAS G12R)
MVGFRRVGR

SEQ ID NO: 42630 - protein, 9 aa, synthetic construct
  source 1..9: note = Seed: VVGARGVGK (KRAS G12R)
MVGFRRVGS

SEQ ID NO: 42631 - protein, 9 aa, synthetic construct
  source 1..9: note = Seed: VVGARGVGK (KRAS G12R)
MVGFRRVGT

SEQ ID NO: 42632 - protein, 9 aa, synthetic construct
  source 1..9: note = Seed: VVGARGVGK (KRAS G12R)
MVGFRRVGV

SEQ ID NO: 42633 - protein, 9 aa, synthetic construct
  source 1..9: note = Seed: VVGARGVGK (KRAS G12R)
MVGFRRVGY

SEQ ID NO: 42634 - protein, 9 aa, synthetic construct
  source 1..9: note = Seed: VVGARGVGK (KRAS G12R)
MVGFRSVGL

SEQ ID NO: 42635 - protein, 9 aa, synthetic construct
  source 1..9: note = Seed: VVGARGVGK (KRAS G12R)
MVGFRSVGR

SEQ ID NO: 42636 - protein, 9 aa, synthetic construct
  source 1..9: note = Seed: VVGARGVGK (KRAS G12R)
MVGFRTVGR

SEQ ID NO: 42637 - protein, 9 aa, synthetic construct
  source 1..9: note = Seed: VVGARGVGK (KRAS G12R)
MVGGRAVGA

SEQ ID NO: 42638 - protein, 9 aa, synthetic construct
  source 1..9: note = Seed: VVGARGVGK (KRAS G12R)
MVGGRAVGC

SEQ ID NO: 42639 - protein, 9 aa, synthetic construct
  source 1..9: note = Seed: VVGARGVGK (KRAS G12R)
MVGGRAVGD

SEQ ID NO: 42640 - protein, 9 aa, synthetic construct
  source 1..9: note = Seed: VVGARGVGK (KRAS G12R)
MVGGRAVGE

SEQ ID NO: 42641 - protein, 9 aa, synthetic construct
  source 1..9: note = Seed: VVGARGVGK (KRAS G12R)
MVGGRAVGF

SEQ ID NO: 42642 - protein, 9 aa, synthetic construct
  source 1..9: note = Seed: VVGARGVGK (KRAS G12R)
MVGGRAVGG

SEQ ID NO: 42643 - protein, 9 aa, synthetic construct
  source 1..9: note = Seed: VVGARGVGK (KRAS G12R)
MVGGRAVGH

SEQ ID NO: 42644 - protein, 9 aa, synthetic construct
  source 1..9: note = Seed: VVGARGVGK (KRAS G12R)
MVGGRAVGI

SEQ ID NO: 42645 - protein, 9 aa, synthetic construct
  source 1..9: note = Seed: VVGARGVGK (KRAS G12R)
MVGGRAVGK

SEQ ID NO: 42646 - protein, 9 aa, synthetic construct
  source 1..9: note = Seed: VVGARGVGK (KRAS G12R)
MVGGRAVGL

SEQ ID NO: 42647 - protein, 9 aa, synthetic construct
  source 1..9: note = Seed: VVGARGVGK (KRAS G12R)
MVGGRAVGM

SEQ ID NO: 42648 - protein, 9 aa, synthetic construct
  source 1..9: note = Seed: VVGARGVGK (KRAS G12R)
MVGGRAVGN

SEQ ID NO: 42649 - protein, 9 aa, synthetic construct
  source 1..9: note = Seed: VVGARGVGK (KRAS G12R)
MVGGRAVGP

SEQ ID NO: 42650 - protein, 9 aa, synthetic construct
  source 1..9: note = Seed: VVGARGVGK (KRAS G12R)
MVGGRAVGQ

SEQ ID NO: 42651 - protein, 9 aa, synthetic construct
  source 1..9: note = Seed: VVGARGVGK (KRAS G12R)
MVGGRAVGR

SEQ ID NO: 42652 - protein, 9 aa, synthetic construct
  source 1..9: note = Seed: VVGARGVGK (KRAS G12R)
MVGGRAVGS

SEQ ID NO: 42653 - protein, 9 aa, synthetic construct
  source 1..9: note = Seed: VVGARGVGK (KRAS G12R)
MVGGRAVGT

SEQ ID NO: 42654 - protein, 9 aa, synthetic construct
  source 1..9: note = Seed: VVGARGVGK (KRAS G12R)
MVGGRAVGV

SEQ ID NO: 42655 - protein, 9 aa, synthetic construct
  source 1..9: note = Seed: VVGARGVGK (KRAS G12R)
MVGGRAVGW

SEQ ID NO: 42656 - protein, 9 aa, synthetic construct
  source 1..9: note = Seed: VVGARGVGK (KRAS G12R)
MVGGRAVGY

SEQ ID NO: 42657 - protein, 9 aa, synthetic construct
  source 1..9: note = Seed: VVGARGVGK (KRAS G12R)
MVGGRCVGA

SEQ ID NO: 42658 - protein, 9 aa, synthetic construct
  source 1..9: note = Seed: VVGARGVGK (KRAS G12R)
MVGGRGVGA

SEQ ID NO: 42659 - protein, 9 aa, synthetic construct
  source 1..9: note = Seed: VVGARGVGK (KRAS G12R)
MVGGRGVGI

SEQ ID NO: 42660 - protein, 9 aa, synthetic construct
  source 1..9: note = Seed: VVGARGVGK (KRAS G12R)
MVGGRGVGL

SEQ ID NO: 42661 - protein, 9 aa, synthetic construct
  source 1..9: note = Seed: VVGARGVGK (KRAS G12R)
MVGGRGVGM

SEQ ID NO: 42662 - protein, 9 aa, synthetic construct
  source 1..9: note = Seed: VVGARGVGK (KRAS G12R)
MVGGRGVGS

SEQ ID NO: 42663 - protein, 9 aa, synthetic construct
  source 1..9: note = Seed: VVGARGVGK (KRAS G12R)
MVGGRGVGV

SEQ ID NO: 42664 - protein, 9 aa, synthetic construct
  source 1..9: note = Seed: VVGARGVGK (KRAS G12R)
MVGGRIVGA

SEQ ID NO: 42665 - protein, 9 aa, synthetic construct
  source 1..9: note = Seed: VVGARGVGK (KRAS G12R)
MVGGRIVGC

SEQ ID NO: 42666 - protein, 9 aa, synthetic construct
  source 1..9: note = Seed: VVGARGVGK (KRAS G12R)
MVGGRIVGG

SEQ ID NO: 42667 - protein, 9 aa, synthetic construct
  source 1..9: note = Seed: VVGARGVGK (KRAS G12R)
MVGGRIVGI

SEQ ID NO: 42668 - protein, 9 aa, synthetic construct
  source 1..9: note = Seed: VVGARGVGK (KRAS G12R)
MVGGRIVGL

SEQ ID NO: 42669 - protein, 9 aa, synthetic construct
  source 1..9: note = Seed: VVGARGVGK (KRAS G12R)
MVGGRIVGM

SEQ ID NO: 42670 - protein, 9 aa, synthetic construct
  source 1..9: note = Seed: VVGARGVGK (KRAS G12R)
MVGGRIVGN

SEQ ID NO: 42671 - protein, 9 aa, synthetic construct
  source 1..9: note = Seed: VVGARGVGK (KRAS G12R)
MVGGRIVGS

SEQ ID NO: 42672 - protein, 9 aa, synthetic construct
  source 1..9: note = Seed: VVGARGVGK (KRAS G12R)
MVGGRIVGT

SEQ ID NO: 42673 - protein, 9 aa, synthetic construct
  source 1..9: note = Seed: VVGARGVGK (KRAS G12R)
MVGGRIVGV

SEQ ID NO: 42674 - protein, 9 aa, synthetic construct
  source 1..9: note = Seed: VVGARGVGK (KRAS G12R)
MVGGRKVGV

SEQ ID NO: 42675 - protein, 9 aa, synthetic construct
  source 1..9: note = Seed: VVGARGVGK (KRAS G12R)
MVGGRLVGA

SEQ ID NO: 42676 - protein, 9 aa, synthetic construct
  source 1..9: note = Seed: VVGARGVGK (KRAS G12R)
MVGGRLVGM

SEQ ID NO: 42677 - protein, 9 aa, synthetic construct
  source 1..9: note = Seed: VVGARGVGK (KRAS G12R)
MVGGRLVGS

SEQ ID NO: 42678 - protein, 9 aa, synthetic construct
  source 1..9: note = Seed: VVGARGVGK (KRAS G12R)
MVGGRLVGT

SEQ ID NO: 42679 - protein, 9 aa, synthetic construct
  source 1..9: note = Seed: VVGARGVGK (KRAS G12R)
MVGGRLVGV

SEQ ID NO: 42680 - protein, 9 aa, synthetic construct
  source 1..9: note = Seed: VVGARGVGK (KRAS G12R)
MVGGRMVGA

SEQ ID NO: 42681 - protein, 9 aa, synthetic construct
  source 1..9: note = Seed: VVGARGVGK (KRAS G12R)
MVGGRMVGM

SEQ ID NO: 42682 - protein, 9 aa, synthetic construct
  source 1..9: note = Seed: VVGARGVGK (KRAS G12R)
MVGGRMVGS

SEQ ID NO: 42683 - protein, 9 aa, synthetic construct
  source 1..9: note = Seed: VVGARGVGK (KRAS G12R)
MVGGRMVGT

SEQ ID NO: 42684 - protein, 9 aa, synthetic construct
  source 1..9: note = Seed: VVGARGVGK (KRAS G12R)
MVGGRMVGV

SEQ ID NO: 42685 - protein, 9 aa, synthetic construct
  source 1..9: note = Seed: VVGARGVGK (KRAS G12R)
MVGGRNVGL

SEQ ID NO: 42686 - protein, 9 aa, synthetic construct
  source 1..9: note = Seed: VVGARGVGK (KRAS G12R)
MVGGRNVGV

SEQ ID NO: 42687 - protein, 9 aa, synthetic construct
  source 1..9: note = Seed: VVGARGVGK (KRAS G12R)
MVGGRPVGA

SEQ ID NO: 42688 - protein, 9 aa, synthetic construct
  source 1..9: note = Seed: VVGARGVGK (KRAS G12R)
MVGGRPVGC

SEQ ID NO: 42689 - protein, 9 aa, synthetic construct
  source 1..9: note = Seed: VVGARGVGK (KRAS G12R)
MVGGRPVGF

SEQ ID NO: 42690 - protein, 9 aa, synthetic construct
  source 1..9: note = Seed: VVGARGVGK (KRAS G12R)
MVGGRPVGG

SEQ ID NO: 42691 - protein, 9 aa, synthetic construct
  source 1..9: note = Seed: VVGARGVGK (KRAS G12R)
MVGGRPVGH

SEQ ID NO: 42692 - protein, 9 aa, synthetic construct
  source 1..9: note = Seed: VVGARGVGK (KRAS G12R)
MVGGRPVGI

SEQ ID NO: 42693 - protein, 9 aa, synthetic construct
  source 1..9: note = Seed: VVGARGVGK (KRAS G12R)
MVGGRPVGL

SEQ ID NO: 42694 - protein, 9 aa, synthetic construct
  source 1..9: note = Seed: VVGARGVGK (KRAS G12R)
MVGGRPVGM

SEQ ID NO: 42695 - protein, 9 aa, synthetic construct
  source 1..9: note = Seed: VVGARGVGK (KRAS G12R)
MVGGRPVGN

SEQ ID NO: 42696 - protein, 9 aa, synthetic construct
  source 1..9: note = Seed: VVGARGVGK (KRAS G12R)
MVGGRPVGP

SEQ ID NO: 42697 - protein, 9 aa, synthetic construct
  source 1..9: note = Seed: VVGARGVGK (KRAS G12R)
MVGGRPVGQ

SEQ ID NO: 42698 - protein, 9 aa, synthetic construct
  source 1..9: note = Seed: VVGARGVGK (KRAS G12R)
MVGGRPVGS

SEQ ID NO: 42699 - protein, 9 aa, synthetic construct
  source 1..9: note = Seed: VVGARGVGK (KRAS G12R)
MVGGRPVGT

SEQ ID NO: 42700 - protein, 9 aa, synthetic construct
  source 1..9: note = Seed: VVGARGVGK (KRAS G12R)
MVGGRPVGV

SEQ ID NO: 42701 - protein, 9 aa, synthetic construct
  source 1..9: note = Seed: VVGARGVGK (KRAS G12R)
MVGGRPVGW

SEQ ID NO: 42702 - protein, 9 aa, synthetic construct
  source 1..9: note = Seed: VVGARGVGK (KRAS G12R)
MVGGRPVGY

SEQ ID NO: 42703 - protein, 9 aa, synthetic construct
  source 1..9: note = Seed: VVGARGVGK (KRAS G12R)
MVGGRRVGR

SEQ ID NO: 42704 - protein, 9 aa, synthetic construct
  source 1..9: note = Seed: VVGARGVGK (KRAS G12R)
MVGGRSVGA

SEQ ID NO: 42705 - protein, 9 aa, synthetic construct
  source 1..9: note = Seed: VVGARGVGK (KRAS G12R)
MVGGRSVGF

SEQ ID NO: 42706 - protein, 9 aa, synthetic construct
  source 1..9: note = Seed: VVGARGVGK (KRAS G12R)
MVGGRSVGG

SEQ ID NO: 42707 - protein, 9 aa, synthetic construct
  source 1..9: note = Seed: VVGARGVGK (KRAS G12R)
MVGGRSVGI

SEQ ID NO: 42708 - protein, 9 aa, synthetic construct
  source 1..9: note = Seed: VVGARGVGK (KRAS G12R)
MVGGRSVGL

SEQ ID NO: 42709 - protein, 9 aa, synthetic construct
  source 1..9: note = Seed: VVGARGVGK (KRAS G12R)
MVGGRSVGM

SEQ ID NO: 42710 - protein, 9 aa, synthetic construct
  source 1..9: note = Seed: VVGARGVGK (KRAS G12R)
MVGGRSVGS

SEQ ID NO: 42711 - protein, 9 aa, synthetic construct
  source 1..9: note = Seed: VVGARGVGK (KRAS G12R)
MVGGRSVGT

SEQ ID NO: 42712 - protein, 9 aa, synthetic construct
  source 1..9: note = Seed: VVGARGVGK (KRAS G12R)
MVGGRSVGV

SEQ ID NO: 42713 - protein, 9 aa, synthetic construct
  source 1..9: note = Seed: VVGARGVGK (KRAS G12R)
MVGGRSVGY

SEQ ID NO: 42714 - protein, 9 aa, synthetic construct
  source 1..9: note = Seed: VVGARGVGK (KRAS G12R)
MVGGRTVGA

SEQ ID NO: 42715 - protein, 9 aa, synthetic construct
  source 1..9: note = Seed: VVGARGVGK (KRAS G12R)
MVGGRTVGG

SEQ ID NO: 42716 - protein, 9 aa, synthetic construct
  source 1..9: note = Seed: VVGARGVGK (KRAS G12R)
MVGGRTVGI

SEQ ID NO: 42717 - protein, 9 aa, synthetic construct
  source 1..9: note = Seed: VVGARGVGK (KRAS G12R)
MVGGRTVGL

SEQ ID NO: 42718 - protein, 9 aa, synthetic construct
  source 1..9: note = Seed: VVGARGVGK (KRAS G12R)
MVGGRTVGM

SEQ ID NO: 42719 - protein, 9 aa, synthetic construct
  source 1..9: note = Seed: VVGARGVGK (KRAS G12R)
MVGGRTVGS

SEQ ID NO: 42720 - protein, 9 aa, synthetic construct
  source 1..9: note = Seed: VVGARGVGK (KRAS G12R)
MVGGRTVGT

SEQ ID NO: 42721 - protein, 9 aa, synthetic construct
  source 1..9: note = Seed: VVGARGVGK (KRAS G12R)
MVGGRTVGV

SEQ ID NO: 42722 - protein, 9 aa, synthetic construct
  source 1..9: note = Seed: VVGARGVGK (KRAS G12R)
MVGGRVVGA

SEQ ID NO: 42723 - protein, 9 aa, synthetic construct
  source 1..9: note = Seed: VVGARGVGK (KRAS G12R)
MVGGRVVGC

SEQ ID NO: 42724 - protein, 9 aa, synthetic construct
  source 1..9: note = Seed: VVGARGVGK (KRAS G12R)
MVGGRVVGD

SEQ ID NO: 42725 - protein, 9 aa, synthetic construct
  source 1..9: note = Seed: VVGARGVGK (KRAS G12R)
MVGGRVVGE

SEQ ID NO: 42726 - protein, 9 aa, synthetic construct
  source 1..9: note = Seed: VVGARGVGK (KRAS G12R)
MVGGRVVGF

SEQ ID NO: 42727 - protein, 9 aa, synthetic construct
  source 1..9: note = Seed: VVGARGVGK (KRAS G12R)
MVGGRVVGG

SEQ ID NO: 42728 - protein, 9 aa, synthetic construct
  source 1..9: note = Seed: VVGARGVGK (KRAS G12R)
MVGGRVVGH

SEQ ID NO: 42729 - protein, 9 aa, synthetic construct
  source 1..9: note = Seed: VVGARGVGK (KRAS G12R)
MVGGRVVGI

SEQ ID NO: 42730 - protein, 9 aa, synthetic construct
  source 1..9: note = Seed: VVGARGVGK (KRAS G12R)
MVGGRVVGL

SEQ ID NO: 42731 - protein, 9 aa, synthetic construct
  source 1..9: note = Seed: VVGARGVGK (KRAS G12R)
MVGGRVVGM

SEQ ID NO: 42732 - protein, 9 aa, synthetic construct
  source 1..9: note = Seed: VVGARGVGK (KRAS G12R)
MVGGRVVGN

SEQ ID NO: 42733 - protein, 9 aa, synthetic construct
  source 1..9: note = Seed: VVGARGVGK (KRAS G12R)
MVGGRVVGP

SEQ ID NO: 42734 - protein, 9 aa, synthetic construct
  source 1..9: note = Seed: VVGARGVGK (KRAS G12R)
MVGGRVVGS

SEQ ID NO: 42735 - protein, 9 aa, synthetic construct
  source 1..9: note = Seed: VVGARGVGK (KRAS G12R)
MVGGRVVGT

SEQ ID NO: 42736 - protein, 9 aa, synthetic construct
  source 1..9: note = Seed: VVGARGVGK (KRAS G12R)
MVGGRVVGV

SEQ ID NO: 42737 - protein, 9 aa, synthetic construct
  source 1..9: note = Seed: VVGARGVGK (KRAS G12R)
MVGHRAVGA

SEQ ID NO: 42738 - protein, 9 aa, synthetic construct
  source 1..9: note = Seed: VVGARGVGK (KRAS G12R)
MVGHRAVGF

SEQ ID NO: 42739 - protein, 9 aa, synthetic construct
  source 1..9: note = Seed: VVGARGVGK (KRAS G12R)
MVGHRAVGI

SEQ ID NO: 42740 - protein, 9 aa, synthetic construct
  source 1..9: note = Seed: VVGARGVGK (KRAS G12R)
MVGHRAVGK

SEQ ID NO: 42741 - protein, 9 aa, synthetic construct
  source 1..9: note = Seed: VVGARGVGK (KRAS G12R)
MVGHRAVGL

SEQ ID NO: 42742 - protein, 9 aa, synthetic construct
  source 1..9: note = Seed: VVGARGVGK (KRAS G12R)
MVGHRAVGR

SEQ ID NO: 42743 - protein, 9 aa, synthetic construct
  source 1..9: note = Seed: VVGARGVGK (KRAS G12R)
MVGHRAVGV

SEQ ID NO: 42744 - protein, 9 aa, synthetic construct
  source 1..9: note = Seed: VVGARGVGK (KRAS G12R)
MVGHRAVGY

SEQ ID NO: 42745 - protein, 9 aa, synthetic construct
  source 1..9: note = Seed: VVGARGVGK (KRAS G12R)
MVGHRGVGR

SEQ ID NO: 42746 - protein, 9 aa, synthetic construct
  source 1..9: note = Seed: VVGARGVGK (KRAS G12R)
MVGHRHVGR

SEQ ID NO: 42747 - protein, 9 aa, synthetic construct
  source 1..9: note = Seed: VVGARGVGK (KRAS G12R)
MVGHRHVGY

SEQ ID NO: 42748 - protein, 9 aa, synthetic construct
  source 1..9: note = Seed: VVGARGVGK (KRAS G12R)
MVGHRIVGK

SEQ ID NO: 42749 - protein, 9 aa, synthetic construct
  source 1..9: note = Seed: VVGARGVGK (KRAS G12R)
MVGHRIVGR

SEQ ID NO: 42750 - protein, 9 aa, synthetic construct
  source 1..9: note = Seed: VVGARGVGK (KRAS G12R)
MVGHRIVGY

SEQ ID NO: 42751 - protein, 9 aa, synthetic construct
  source 1..9: note = Seed: VVGARGVGK (KRAS G12R)
MVGHRKVGA

SEQ ID NO: 42752 - protein, 9 aa, synthetic construct
  source 1..9: note = Seed: VVGARGVGK (KRAS G12R)
MVGHRKVGF

SEQ ID NO: 42753 - protein, 9 aa, synthetic construct
  source 1..9: note = Seed: VVGARGVGK (KRAS G12R)
MVGHRKVGH

SEQ ID NO: 42754 - protein, 9 aa, synthetic construct
  source 1..9: note = Seed: VVGARGVGK (KRAS G12R)
MVGHRKVGI

SEQ ID NO: 42755 - protein, 9 aa, synthetic construct
  source 1..9: note = Seed: VVGARGVGK (KRAS G12R)
MVGHRKVGK

SEQ ID NO: 42756 - protein, 9 aa, synthetic construct
  source 1..9: note = Seed: VVGARGVGK (KRAS G12R)
MVGHRKVGL

SEQ ID NO: 42757 - protein, 9 aa, synthetic construct
  source 1..9: note = Seed: VVGARGVGK (KRAS G12R)
MVGHRKVGM

SEQ ID NO: 42758 - protein, 9 aa, synthetic construct
  source 1..9: note = Seed: VVGARGVGK (KRAS G12R)
MVGHRKVGR

SEQ ID NO: 42759 - protein, 9 aa, synthetic construct
  source 1..9: note = Seed: VVGARGVGK (KRAS G12R)
MVGHRKVGS

SEQ ID NO: 42760 - protein, 9 aa, synthetic construct
  source 1..9: note = Seed: VVGARGVGK (KRAS G12R)
MVGHRKVGV

SEQ ID NO: 42761 - protein, 9 aa, synthetic construct
  source 1..9: note = Seed: VVGARGVGK (KRAS G12R)
MVGHRKVGW

SEQ ID NO: 42762 - protein, 9 aa, synthetic construct
  source 1..9: note = Seed: VVGARGVGK (KRAS G12R)
MVGHRKVGY

SEQ ID NO: 42763 - protein, 9 aa, synthetic construct
  source 1..9: note = Seed: VVGARGVGK (KRAS G12R)
MVGHRLVGK

SEQ ID NO: 42764 - protein, 9 aa, synthetic construct
  source 1..9: note = Seed: VVGARGVGK (KRAS G12R)
MVGHRLVGR

SEQ ID NO: 42765 - protein, 9 aa, synthetic construct
  source 1..9: note = Seed: VVGARGVGK (KRAS G12R)
MVGHRMVGR

SEQ ID NO: 42766 - protein, 9 aa, synthetic construct
  source 1..9: note = Seed: VVGARGVGK (KRAS G12R)
MVGHRNVGR

SEQ ID NO: 42767 - protein, 9 aa, synthetic construct
  source 1..9: note = Seed: VVGARGVGK (KRAS G12R)
MVGHRNVGY

SEQ ID NO: 42768 - protein, 9 aa, synthetic construct
  source 1..9: note = Seed: VVGARGVGK (KRAS G12R)
MVGHRPVGK

SEQ ID NO: 42769 - protein, 9 aa, synthetic construct
  source 1..9: note = Seed: VVGARGVGK (KRAS G12R)
MVGHRPVGR

SEQ ID NO: 42770 - protein, 9 aa, synthetic construct
  source 1..9: note = Seed: VVGARGVGK (KRAS G12R)
MVGHRPVGY

SEQ ID NO: 42771 - protein, 9 aa, synthetic construct
  source 1..9: note = Seed: VVGARGVGK (KRAS G12R)
MVGHRQVGR

SEQ ID NO: 42772 - protein, 9 aa, synthetic construct
  source 1..9: note = Seed: VVGARGVGK (KRAS G12R)
MVGHRRVGA

SEQ ID NO: 42773 - protein, 9 aa, synthetic construct
  source 1..9: note = Seed: VVGARGVGK (KRAS G12R)
MVGHRRVGF

SEQ ID NO: 42774 - protein, 9 aa, synthetic construct
  source 1..9: note = Seed: VVGARGVGK (KRAS G12R)
MVGHRRVGH

SEQ ID NO: 42775 - protein, 9 aa, synthetic construct
  source 1..9: note = Seed: VVGARGVGK (KRAS G12R)
MVGHRRVGI

SEQ ID NO: 42776 - protein, 9 aa, synthetic construct
  source 1..9: note = Seed: VVGARGVGK (KRAS G12R)
MVGHRRVGK

SEQ ID NO: 42777 - protein, 9 aa, synthetic construct
  source 1..9: note = Seed: VVGARGVGK (KRAS G12R)
MVGHRRVGL

SEQ ID NO: 42778 - protein, 9 aa, synthetic construct
  source 1..9: note = Seed: VVGARGVGK (KRAS G12R)
MVGHRRVGM

SEQ ID NO: 42779 - protein, 9 aa, synthetic construct
  source 1..9: note = Seed: VVGARGVGK (KRAS G12R)
MVGHRRVGQ

SEQ ID NO: 42780 - protein, 9 aa, synthetic construct
  source 1..9: note = Seed: VVGARGVGK (KRAS G12R)
MVGHRRVGR

SEQ ID NO: 42781 - protein, 9 aa, synthetic construct
  source 1..9: note = Seed: VVGARGVGK (KRAS G12R)
MVGHRRVGS

SEQ ID NO: 42782 - protein, 9 aa, synthetic construct
  source 1..9: note = Seed: VVGARGVGK (KRAS G12R)
MVGHRRVGT

SEQ ID NO: 42783 - protein, 9 aa, synthetic construct
  source 1..9: note = Seed: VVGARGVGK (KRAS G12R)
MVGHRRVGV

SEQ ID NO: 42784 - protein, 9 aa, synthetic construct
  source 1..9: note = Seed: VVGARGVGK (KRAS G12R)
MVGHRRVGW

SEQ ID NO: 42785 - protein, 9 aa, synthetic construct
  source 1..9: note = Seed: VVGARGVGK (KRAS G12R)
MVGHRRVGY

SEQ ID NO: 42786 - protein, 9 aa, synthetic construct
  source 1..9: note = Seed: VVGARGVGK (KRAS G12R)
MVGHRSVGI

SEQ ID NO: 42787 - protein, 9 aa, synthetic construct
  source 1..9: note = Seed: VVGARGVGK (KRAS G12R)
MVGHRSVGK

SEQ ID NO: 42788 - protein, 9 aa, synthetic construct
  source 1..9: note = Seed: VVGARGVGK (KRAS G12R)
MVGHRSVGL

SEQ ID NO: 42789 - protein, 9 aa, synthetic construct
  source 1..9: note = Seed: VVGARGVGK (KRAS G12R)
MVGHRSVGR

SEQ ID NO: 42790 - protein, 9 aa, synthetic construct
  source 1..9: note = Seed: VVGARGVGK (KRAS G12R)
MVGHRSVGV

SEQ ID NO: 42791 - protein, 9 aa, synthetic construct
  source 1..9: note = Seed: VVGARGVGK (KRAS G12R)
MVGHRSVGY

SEQ ID NO: 42792 - protein, 9 aa, synthetic construct
  source 1..9: note = Seed: VVGARGVGK (KRAS G12R)
MVGHRTVGK

SEQ ID NO: 42793 - protein, 9 aa, synthetic construct
  source 1..9: note = Seed: VVGARGVGK (KRAS G12R)
MVGHRTVGR

SEQ ID NO: 42794 - protein, 9 aa, synthetic construct
  source 1..9: note = Seed: VVGARGVGK (KRAS G12R)
MVGHRTVGY

SEQ ID NO: 42795 - protein, 9 aa, synthetic construct
  source 1..9: note = Seed: VVGARGVGK (KRAS G12R)
MVGHRVVGK

SEQ ID NO: 42796 - protein, 9 aa, synthetic construct
  source 1..9: note = Seed: VVGARGVGK (KRAS G12R)
MVGHRVVGR

SEQ ID NO: 42797 - protein, 9 aa, synthetic construct
  source 1..9: note = Seed: VVGARGVGK (KRAS G12R)
MVGHRVVGY

SEQ ID NO: 42798 - protein, 9 aa, synthetic construct
  source 1..9: note = Seed: VVGARGVGK (KRAS G12R)
MVGIRAVGA

SEQ ID NO: 42799 - protein, 9 aa, synthetic construct
  source 1..9: note = Seed: VVGARGVGK (KRAS G12R)
MVGIRAVGC

SEQ ID NO: 42800 - protein, 9 aa, synthetic construct
  source 1..9: note = Seed: VVGARGVGK (KRAS G12R)
MVGIRAVGF

SEQ ID NO: 42801 - protein, 9 aa, synthetic construct
  source 1..9: note = Seed: VVGARGVGK (KRAS G12R)
MVGIRAVGH

SEQ ID NO: 42802 - protein, 9 aa, synthetic construct
  source 1..9: note = Seed: VVGARGVGK (KRAS G12R)
MVGIRAVGI

SEQ ID NO: 42803 - protein, 9 aa, synthetic construct
  source 1..9: note = Seed: VVGARGVGK (KRAS G12R)
MVGIRAVGL

SEQ ID NO: 42804 - protein, 9 aa, synthetic construct
  source 1..9: note = Seed: VVGARGVGK (KRAS G12R)
MVGIRAVGM

SEQ ID NO: 42805 - protein, 9 aa, synthetic construct
  source 1..9: note = Seed: VVGARGVGK (KRAS G12R)
MVGIRAVGN

SEQ ID NO: 42806 - protein, 9 aa, synthetic construct
  source 1..9: note = Seed: VVGARGVGK (KRAS G12R)
MVGIRAVGR

SEQ ID NO: 42807 - protein, 9 aa, synthetic construct
  source 1..9: note = Seed: VVGARGVGK (KRAS G12R)
MVGIRAVGS

SEQ ID NO: 42808 - protein, 9 aa, synthetic construct
  source 1..9: note = Seed: VVGARGVGK (KRAS G12R)
MVGIRAVGT

SEQ ID NO: 42809 - protein, 9 aa, synthetic construct
  source 1..9: note = Seed: VVGARGVGK (KRAS G12R)
MVGIRAVGV

SEQ ID NO: 42810 - protein, 9 aa, synthetic construct
  source 1..9: note = Seed: VVGARGVGK (KRAS G12R)
MVGIRAVGY

SEQ ID NO: 42811 - protein, 9 aa, synthetic construct
  source 1..9: note = Seed: VVGARGVGK (KRAS G12R)
MVGIRGVGA

SEQ ID NO: 42812 - protein, 9 aa, synthetic construct
  source 1..9: note = Seed: VVGARGVGK (KRAS G12R)
MVGIRGVGI

SEQ ID NO: 42813 - protein, 9 aa, synthetic construct
  source 1..9: note = Seed: VVGARGVGK (KRAS G12R)
MVGIRGVGL

SEQ ID NO: 42814 - protein, 9 aa, synthetic construct
  source 1..9: note = Seed: VVGARGVGK (KRAS G12R)
MVGIRGVGM

SEQ ID NO: 42815 - protein, 9 aa, synthetic construct
  source 1..9: note = Seed: VVGARGVGK (KRAS G12R)
MVGIRGVGN

SEQ ID NO: 42816 - protein, 9 aa, synthetic construct
  source 1..9: note = Seed: VVGARGVGK (KRAS G12R)
MVGIRGVGS

SEQ ID NO: 42817 - protein, 9 aa, synthetic construct
  source 1..9: note = Seed: VVGARGVGK (KRAS G12R)
MVGIRGVGT

SEQ ID NO: 42818 - protein, 9 aa, synthetic construct
  source 1..9: note = Seed: VVGARGVGK (KRAS G12R)
MVGIRGVGV

SEQ ID NO: 42819 - protein, 9 aa, synthetic construct
  source 1..9: note = Seed: VVGARGVGK (KRAS G12R)
MVGIRHVGY

SEQ ID NO: 42820 - protein, 9 aa, synthetic construct
  source 1..9: note = Seed: VVGARGVGK (KRAS G12R)
MVGIRKVGA

SEQ ID NO: 42821 - protein, 9 aa, synthetic construct
  source 1..9: note = Seed: VVGARGVGK (KRAS G12R)
MVGIRKVGF

SEQ ID NO: 42822 - protein, 9 aa, synthetic construct
  source 1..9: note = Seed: VVGARGVGK (KRAS G12R)
MVGIRKVGG

SEQ ID NO: 42823 - protein, 9 aa, synthetic construct
  source 1..9: note = Seed: VVGARGVGK (KRAS G12R)
MVGIRKVGI

SEQ ID NO: 42824 - protein, 9 aa, synthetic construct
  source 1..9: note = Seed: VVGARGVGK (KRAS G12R)
MVGIRKVGL

SEQ ID NO: 42825 - protein, 9 aa, synthetic construct
  source 1..9: note = Seed: VVGARGVGK (KRAS G12R)
MVGIRKVGM

SEQ ID NO: 42826 - protein, 9 aa, synthetic construct
  source 1..9: note = Seed: VVGARGVGK (KRAS G12R)
MVGIRKVGQ

SEQ ID NO: 42827 - protein, 9 aa, synthetic construct
  source 1..9: note = Seed: VVGARGVGK (KRAS G12R)
MVGIRKVGR

SEQ ID NO: 42828 - protein, 9 aa, synthetic construct
  source 1..9: note = Seed: VVGARGVGK (KRAS G12R)
MVGIRKVGS

SEQ ID NO: 42829 - protein, 9 aa, synthetic construct
  source 1..9: note = Seed: VVGARGVGK (KRAS G12R)
MVGIRKVGV

SEQ ID NO: 42830 - protein, 9 aa, synthetic construct
  source 1..9: note = Seed: VVGARGVGK (KRAS G12R)
MVGIRKVGW

SEQ ID NO: 42831 - protein, 9 aa, synthetic construct
  source 1..9: note = Seed: VVGARGVGK (KRAS G12R)
MVGIRKVGY

SEQ ID NO: 42832 - protein, 9 aa, synthetic construct
  source 1..9: note = Seed: VVGARGVGK (KRAS G12R)
MVGIRNVGI

SEQ ID NO: 42833 - protein, 9 aa, synthetic construct
  source 1..9: note = Seed: VVGARGVGK (KRAS G12R)
MVGIRNVGL

SEQ ID NO: 42834 - protein, 9 aa, synthetic construct
  source 1..9: note = Seed: VVGARGVGK (KRAS G12R)
MVGIRNVGM

SEQ ID NO: 42835 - protein, 9 aa, synthetic construct
  source 1..9: note = Seed: VVGARGVGK (KRAS G12R)
MVGIRNVGV

SEQ ID NO: 42836 - protein, 9 aa, synthetic construct
  source 1..9: note = Seed: VVGARGVGK (KRAS G12R)
MVGIRPVGA

SEQ ID NO: 42837 - protein, 9 aa, synthetic construct
  source 1..9: note = Seed: VVGARGVGK (KRAS G12R)
MVGIRPVGF

SEQ ID NO: 42838 - protein, 9 aa, synthetic construct
  source 1..9: note = Seed: VVGARGVGK (KRAS G12R)
MVGIRPVGI

SEQ ID NO: 42839 - protein, 9 aa, synthetic construct
  source 1..9: note = Seed: VVGARGVGK (KRAS G12R)
MVGIRPVGL

SEQ ID NO: 42840 - protein, 9 aa, synthetic construct
  source 1..9: note = Seed: VVGARGVGK (KRAS G12R)
MVGIRPVGM

SEQ ID NO: 42841 - protein, 9 aa, synthetic construct
  source 1..9: note = Seed: VVGARGVGK (KRAS G12R)
MVGIRPVGN

SEQ ID NO: 42842 - protein, 9 aa, synthetic construct
  source 1..9: note = Seed: VVGARGVGK (KRAS G12R)
MVGIRPVGS

SEQ ID NO: 42843 - protein, 9 aa, synthetic construct
  source 1..9: note = Seed: VVGARGVGK (KRAS G12R)
MVGIRPVGT

SEQ ID NO: 42844 - protein, 9 aa, synthetic construct
  source 1..9: note = Seed: VVGARGVGK (KRAS G12R)
MVGIRPVGV

SEQ ID NO: 42845 - protein, 9 aa, synthetic construct
  source 1..9: note = Seed: VVGARGVGK (KRAS G12R)
MVGIRPVGY

SEQ ID NO: 42846 - protein, 9 aa, synthetic construct
  source 1..9: note = Seed: VVGARGVGK (KRAS G12R)
MVGIRRVGA

SEQ ID NO: 42847 - protein, 9 aa, synthetic construct
  source 1..9: note = Seed: VVGARGVGK (KRAS G12R)
MVGIRRVGF

SEQ ID NO: 42848 - protein, 9 aa, synthetic construct
  source 1..9: note = Seed: VVGARGVGK (KRAS G12R)
MVGIRRVGG

SEQ ID NO: 42849 - protein, 9 aa, synthetic construct
  source 1..9: note = Seed: VVGARGVGK (KRAS G12R)
MVGIRRVGI

SEQ ID NO: 42850 - protein, 9 aa, synthetic construct
  source 1..9: note = Seed: VVGARGVGK (KRAS G12R)
MVGIRRVGK

SEQ ID NO: 42851 - protein, 9 aa, synthetic construct
  source 1..9: note = Seed: VVGARGVGK (KRAS G12R)
MVGIRRVGL

SEQ ID NO: 42852 - protein, 9 aa, synthetic construct
  source 1..9: note = Seed: VVGARGVGK (KRAS G12R)
MVGIRRVGM

SEQ ID NO: 42853 - protein, 9 aa, synthetic construct
  source 1..9: note = Seed: VVGARGVGK (KRAS G12R)
MVGIRRVGQ

SEQ ID NO: 42854 - protein, 9 aa, synthetic construct
  source 1..9: note = Seed: VVGARGVGK (KRAS G12R)
MVGIRRVGR

SEQ ID NO: 42855 - protein, 9 aa, synthetic construct
  source 1..9: note = Seed: VVGARGVGK (KRAS G12R)
MVGIRRVGS

SEQ ID NO: 42856 - protein, 9 aa, synthetic construct
  source 1..9: note = Seed: VVGARGVGK (KRAS G12R)
MVGIRRVGV

SEQ ID NO: 42857 - protein, 9 aa, synthetic construct
  source 1..9: note = Seed: VVGARGVGK (KRAS G12R)
MVGIRRVGW

SEQ ID NO: 42858 - protein, 9 aa, synthetic construct
  source 1..9: note = Seed: VVGARGVGK (KRAS G12R)
MVGIRRVGY

SEQ ID NO: 42859 - protein, 9 aa, synthetic construct
  source 1..9: note = Seed: VVGARGVGK (KRAS G12R)
MVGIRSVGA

SEQ ID NO: 42860 - protein, 9 aa, synthetic construct
  source 1..9: note = Seed: VVGARGVGK (KRAS G12R)
MVGIRSVGF

SEQ ID NO: 42861 - protein, 9 aa, synthetic construct
  source 1..9: note = Seed: VVGARGVGK (KRAS G12R)
MVGIRSVGI

SEQ ID NO: 42862 - protein, 9 aa, synthetic construct
  source 1..9: note = Seed: VVGARGVGK (KRAS G12R)
MVGIRSVGL

SEQ ID NO: 42863 - protein, 9 aa, synthetic construct
  source 1..9: note = Seed: VVGARGVGK (KRAS G12R)
MVGIRSVGM

SEQ ID NO: 42864 - protein, 9 aa, synthetic construct
  source 1..9: note = Seed: VVGARGVGK (KRAS G12R)
MVGIRSVGN

SEQ ID NO: 42865 - protein, 9 aa, synthetic construct
  source 1..9: note = Seed: VVGARGVGK (KRAS G12R)
MVGIRSVGS

SEQ ID NO: 42866 - protein, 9 aa, synthetic construct
  source 1..9: note = Seed: VVGARGVGK (KRAS G12R)
MVGIRSVGV

SEQ ID NO: 42867 - protein, 9 aa, synthetic construct
  source 1..9: note = Seed: VVGARGVGK (KRAS G12R)
MVGIRTVGA

SEQ ID NO: 42868 - protein, 9 aa, synthetic construct
  source 1..9: note = Seed: VVGARGVGK (KRAS G12R)
MVGIRTVGI

SEQ ID NO: 42869 - protein, 9 aa, synthetic construct
  source 1..9: note = Seed: VVGARGVGK (KRAS G12R)
MVGIRTVGL

SEQ ID NO: 42870 - protein, 9 aa, synthetic construct
  source 1..9: note = Seed: VVGARGVGK (KRAS G12R)
MVGIRTVGM

SEQ ID NO: 42871 - protein, 9 aa, synthetic construct
  source 1..9: note = Seed: VVGARGVGK (KRAS G12R)
MVGIRTVGN

SEQ ID NO: 42872 - protein, 9 aa, synthetic construct
  source 1..9: note = Seed: VVGARGVGK (KRAS G12R)
MVGIRTVGS

SEQ ID NO: 42873 - protein, 9 aa, synthetic construct
  source 1..9: note = Seed: VVGARGVGK (KRAS G12R)
MVGIRTVGT

SEQ ID NO: 42874 - protein, 9 aa, synthetic construct
  source 1..9: note = Seed: VVGARGVGK (KRAS G12R)
MVGIRTVGV

SEQ ID NO: 42875 - protein, 9 aa, synthetic construct
  source 1..9: note = Seed: VVGARGVGK (KRAS G12R)
MVGIRVVGA

SEQ ID NO: 42876 - protein, 9 aa, synthetic construct
  source 1..9: note = Seed: VVGARGVGK (KRAS G12R)
MVGIRVVGI

SEQ ID NO: 42877 - protein, 9 aa, synthetic construct
  source 1..9: note = Seed: VVGARGVGK (KRAS G12R)
MVGIRVVGM

SEQ ID NO: 42878 - protein, 9 aa, synthetic construct
  source 1..9: note = Seed: VVGARGVGK (KRAS G12R)
MVGIRVVGN

SEQ ID NO: 42879 - protein, 9 aa, synthetic construct
  source 1..9: note = Seed: VVGARGVGK (KRAS G12R)
MVGIRVVGS

SEQ ID NO: 42880 - protein, 9 aa, synthetic construct
  source 1..9: note = Seed: VVGARGVGK (KRAS G12R)
MVGKRAVGF

SEQ ID NO: 42881 - protein, 9 aa, synthetic construct
  source 1..9: note = Seed: VVGARGVGK (KRAS G12R)
MVGKRAVGI

SEQ ID NO: 42882 - protein, 9 aa, synthetic construct
  source 1..9: note = Seed: VVGARGVGK (KRAS G12R)
MVGKRAVGK

SEQ ID NO: 42883 - protein, 9 aa, synthetic construct
  source 1..9: note = Seed: VVGARGVGK (KRAS G12R)
MVGKRAVGL

SEQ ID NO: 42884 - protein, 9 aa, synthetic construct
  source 1..9: note = Seed: VVGARGVGK (KRAS G12R)
MVGKRAVGM

SEQ ID NO: 42885 - protein, 9 aa, synthetic construct
  source 1..9: note = Seed: VVGARGVGK (KRAS G12R)
MVGKRAVGR

SEQ ID NO: 42886 - protein, 9 aa, synthetic construct
  source 1..9: note = Seed: VVGARGVGK (KRAS G12R)
MVGKRAVGV

SEQ ID NO: 42887 - protein, 9 aa, synthetic construct
  source 1..9: note = Seed: VVGARGVGK (KRAS G12R)
MVGKRAVGY

SEQ ID NO: 42888 - protein, 9 aa, synthetic construct
  source 1..9: note = Seed: VVGARGVGK (KRAS G12R)
MVGKRGVGR

SEQ ID NO: 42889 - protein, 9 aa, synthetic construct
  source 1..9: note = Seed: VVGARGVGK (KRAS G12R)
MVGKRHVGF

SEQ ID NO: 42890 - protein, 9 aa, synthetic construct
  source 1..9: note = Seed: VVGARGVGK (KRAS G12R)
MVGKRHVGM

SEQ ID NO: 42891 - protein, 9 aa, synthetic construct
  source 1..9: note = Seed: VVGARGVGK (KRAS G12R)
MVGKRHVGR

SEQ ID NO: 42892 - protein, 9 aa, synthetic construct
  source 1..9: note = Seed: VVGARGVGK (KRAS G12R)
MVGKRHVGV

SEQ ID NO: 42893 - protein, 9 aa, synthetic construct
  source 1..9: note = Seed: VVGARGVGK (KRAS G12R)
MVGKRHVGY

SEQ ID NO: 42894 - protein, 9 aa, synthetic construct
  source 1..9: note = Seed: VVGARGVGK (KRAS G12R)
MVGKRIVGR

SEQ ID NO: 42895 - protein, 9 aa, synthetic construct
  source 1..9: note = Seed: VVGARGVGK (KRAS G12R)
MVGKRIVGY

SEQ ID NO: 42896 - protein, 9 aa, synthetic construct
  source 1..9: note = Seed: VVGARGVGK (KRAS G12R)
MVGKRKVGA

SEQ ID NO: 42897 - protein, 9 aa, synthetic construct
  source 1..9: note = Seed: VVGARGVGK (KRAS G12R)
MVGKRKVGF

SEQ ID NO: 42898 - protein, 9 aa, synthetic construct
  source 1..9: note = Seed: VVGARGVGK (KRAS G12R)
MVGKRKVGH

SEQ ID NO: 42899 - protein, 9 aa, synthetic construct
  source 1..9: note = Seed: VVGARGVGK (KRAS G12R)
MVGKRKVGI

SEQ ID NO: 42900 - protein, 9 aa, synthetic construct
  source 1..9: note = Seed: VVGARGVGK (KRAS G12R)
MVGKRKVGK

SEQ ID NO: 42901 - protein, 9 aa, synthetic construct
  source 1..9: note = Seed: VVGARGVGK (KRAS G12R)
MVGKRKVGL

SEQ ID NO: 42902 - protein, 9 aa, synthetic construct
  source 1..9: note = Seed: VVGARGVGK (KRAS G12R)
MVGKRKVGM

SEQ ID NO: 42903 - protein, 9 aa, synthetic construct
  source 1..9: note = Seed: VVGARGVGK (KRAS G12R)
MVGKRKVGN

SEQ ID NO: 42904 - protein, 9 aa, synthetic construct
  source 1..9: note = Seed: VVGARGVGK (KRAS G12R)
MVGKRKVGQ

SEQ ID NO: 42905 - protein, 9 aa, synthetic construct
  source 1..9: note = Seed: VVGARGVGK (KRAS G12R)
MVGKRKVGR

SEQ ID NO: 42906 - protein, 9 aa, synthetic construct
  source 1..9: note = Seed: VVGARGVGK (KRAS G12R)
MVGKRKVGS

SEQ ID NO: 42907 - protein, 9 aa, synthetic construct
  source 1..9: note = Seed: VVGARGVGK (KRAS G12R)
MVGKRKVGT

SEQ ID NO: 42908 - protein, 9 aa, synthetic construct
  source 1..9: note = Seed: VVGARGVGK (KRAS G12R)
MVGKRKVGV

SEQ ID NO: 42909 - protein, 9 aa, synthetic construct
  source 1..9: note = Seed: VVGARGVGK (KRAS G12R)
MVGKRKVGW

SEQ ID NO: 42910 - protein, 9 aa, synthetic construct
  source 1..9: note = Seed: VVGARGVGK (KRAS G12R)
MVGKRKVGY

SEQ ID NO: 42911 - protein, 9 aa, synthetic construct
  source 1..9: note = Seed: VVGARGVGK (KRAS G12R)
MVGKRLVGR

SEQ ID NO: 42912 - protein, 9 aa, synthetic construct
  source 1..9: note = Seed: VVGARGVGK (KRAS G12R)
MVGKRLVGY

SEQ ID NO: 42913 - protein, 9 aa, synthetic construct
  source 1..9: note = Seed: VVGARGVGK (KRAS G12R)
MVGKRMVGF

SEQ ID NO: 42914 - protein, 9 aa, synthetic construct
  source 1..9: note = Seed: VVGARGVGK (KRAS G12R)
MVGKRMVGI

SEQ ID NO: 42915 - protein, 9 aa, synthetic construct
  source 1..9: note = Seed: VVGARGVGK (KRAS G12R)
MVGKRMVGL

SEQ ID NO: 42916 - protein, 9 aa, synthetic construct
  source 1..9: note = Seed: VVGARGVGK (KRAS G12R)
MVGKRMVGM

SEQ ID NO: 42917 - protein, 9 aa, synthetic construct
  source 1..9: note = Seed: VVGARGVGK (KRAS G12R)
MVGKRMVGR

SEQ ID NO: 42918 - protein, 9 aa, synthetic construct
  source 1..9: note = Seed: VVGARGVGK (KRAS G12R)
MVGKRMVGV

SEQ ID NO: 42919 - protein, 9 aa, synthetic construct
  source 1..9: note = Seed: VVGARGVGK (KRAS G12R)
MVGKRMVGY

SEQ ID NO: 42920 - protein, 9 aa, synthetic construct
  source 1..9: note = Seed: VVGARGVGK (KRAS G12R)
MVGKRNVGF

SEQ ID NO: 42921 - protein, 9 aa, synthetic construct
  source 1..9: note = Seed: VVGARGVGK (KRAS G12R)
MVGKRNVGR

SEQ ID NO: 42922 - protein, 9 aa, synthetic construct
  source 1..9: note = Seed: VVGARGVGK (KRAS G12R)
MVGKRNVGY

SEQ ID NO: 42923 - protein, 9 aa, synthetic construct
  source 1..9: note = Seed: VVGARGVGK (KRAS G12R)
MVGKRPVGF

SEQ ID NO: 42924 - protein, 9 aa, synthetic construct
  source 1..9: note = Seed: VVGARGVGK (KRAS G12R)
MVGKRPVGI

SEQ ID NO: 42925 - protein, 9 aa, synthetic construct
  source 1..9: note = Seed: VVGARGVGK (KRAS G12R)
MVGKRPVGK

SEQ ID NO: 42926 - protein, 9 aa, synthetic construct
  source 1..9: note = Seed: VVGARGVGK (KRAS G12R)
MVGKRPVGL

SEQ ID NO: 42927 - protein, 9 aa, synthetic construct
  source 1..9: note = Seed: VVGARGVGK (KRAS G12R)
MVGKRPVGM

SEQ ID NO: 42928 - protein, 9 aa, synthetic construct
  source 1..9: note = Seed: VVGARGVGK (KRAS G12R)
MVGKRPVGR

SEQ ID NO: 42929 - protein, 9 aa, synthetic construct
  source 1..9: note = Seed: VVGARGVGK (KRAS G12R)
MVGKRPVGV

SEQ ID NO: 42930 - protein, 9 aa, synthetic construct
  source 1..9: note = Seed: VVGARGVGK (KRAS G12R)
MVGKRPVGY

SEQ ID NO: 42931 - protein, 9 aa, synthetic construct
  source 1..9: note = Seed: VVGARGVGK (KRAS G12R)
MVGKRQVGK

SEQ ID NO: 42932 - protein, 9 aa, synthetic construct
  source 1..9: note = Seed: VVGARGVGK (KRAS G12R)
MVGKRQVGR

SEQ ID NO: 42933 - protein, 9 aa, synthetic construct
  source 1..9: note = Seed: VVGARGVGK (KRAS G12R)
MVGKRQVGY

SEQ ID NO: 42934 - protein, 9 aa, synthetic construct
  source 1..9: note = Seed: VVGARGVGK (KRAS G12R)
MVGKRRVGA

SEQ ID NO: 42935 - protein, 9 aa, synthetic construct
  source 1..9: note = Seed: VVGARGVGK (KRAS G12R)
MVGKRRVGC

SEQ ID NO: 42936 - protein, 9 aa, synthetic construct
  source 1..9: note = Seed: VVGARGVGK (KRAS G12R)
MVGKRRVGD

SEQ ID NO: 42937 - protein, 9 aa, synthetic construct
  source 1..9: note = Seed: VVGARGVGK (KRAS G12R)
MVGKRRVGE

SEQ ID NO: 42938 - protein, 9 aa, synthetic construct
  source 1..9: note = Seed: VVGARGVGK (KRAS G12R)
MVGKRRVGF

SEQ ID NO: 42939 - protein, 9 aa, synthetic construct
  source 1..9: note = Seed: VVGARGVGK (KRAS G12R)
MVGKRRVGG

SEQ ID NO: 42940 - protein, 9 aa, synthetic construct
  source 1..9: note = Seed: VVGARGVGK (KRAS G12R)
MVGKRRVGH

SEQ ID NO: 42941 - protein, 9 aa, synthetic construct
  source 1..9: note = Seed: VVGARGVGK (KRAS G12R)
MVGKRRVGI

SEQ ID NO: 42942 - protein, 9 aa, synthetic construct
  source 1..9: note = Seed: VVGARGVGK (KRAS G12R)
MVGKRRVGK

SEQ ID NO: 42943 - protein, 9 aa, synthetic construct
  source 1..9: note = Seed: VVGARGVGK (KRAS G12R)
MVGKRRVGL

SEQ ID NO: 42944 - protein, 9 aa, synthetic construct
  source 1..9: note = Seed: VVGARGVGK (KRAS G12R)
MVGKRRVGM

SEQ ID NO: 42945 - protein, 9 aa, synthetic construct
  source 1..9: note = Seed: VVGARGVGK (KRAS G12R)
MVGKRRVGN

SEQ ID NO: 42946 - protein, 9 aa, synthetic construct
  source 1..9: note = Seed: VVGARGVGK (KRAS G12R)
MVGKRRVGP

SEQ ID NO: 42947 - protein, 9 aa, synthetic construct
  source 1..9: note = Seed: VVGARGVGK (KRAS G12R)
MVGKRRVGQ

SEQ ID NO: 42948 - protein, 9 aa, synthetic construct
  source 1..9: note = Seed: VVGARGVGK (KRAS G12R)
MVGKRRVGR

SEQ ID NO: 42949 - protein, 9 aa, synthetic construct
  source 1..9: note = Seed: VVGARGVGK (KRAS G12R)
MVGKRRVGS

SEQ ID NO: 42950 - protein, 9 aa, synthetic construct
  source 1..9: note = Seed: VVGARGVGK (KRAS G12R)
MVGKRRVGT

SEQ ID NO: 42951 - protein, 9 aa, synthetic construct
  source 1..9: note = Seed: VVGARGVGK (KRAS G12R)
MVGKRRVGV

SEQ ID NO: 42952 - protein, 9 aa, synthetic construct
  source 1..9: note = Seed: VVGARGVGK (KRAS G12R)
MVGKRRVGW

SEQ ID NO: 42953 - protein, 9 aa, synthetic construct
  source 1..9: note = Seed: VVGARGVGK (KRAS G12R)
MVGKRRVGY

SEQ ID NO: 42954 - protein, 9 aa, synthetic construct
  source 1..9: note = Seed: VVGARGVGK (KRAS G12R)
MVGKRSVGF

SEQ ID NO: 42955 - protein, 9 aa, synthetic construct
  source 1..9: note = Seed: VVGARGVGK (KRAS G12R)
MVGKRSVGR

SEQ ID NO: 42956 - protein, 9 aa, synthetic construct
  source 1..9: note = Seed: VVGARGVGK (KRAS G12R)
MVGKRSVGY

SEQ ID NO: 42957 - protein, 9 aa, synthetic construct
  source 1..9: note = Seed: VVGARGVGK (KRAS G12R)
MVGKRTVGF

SEQ ID NO: 42958 - protein, 9 aa, synthetic construct
  source 1..9: note = Seed: VVGARGVGK (KRAS G12R)
MVGKRTVGR

SEQ ID NO: 42959 - protein, 9 aa, synthetic construct
  source 1..9: note = Seed: VVGARGVGK (KRAS G12R)
MVGKRTVGY

SEQ ID NO: 42960 - protein, 9 aa, synthetic construct
  source 1..9: note = Seed: VVGARGVGK (KRAS G12R)
MVGKRVVGF

SEQ ID NO: 42961 - protein, 9 aa, synthetic construct
  source 1..9: note = Seed: VVGARGVGK (KRAS G12R)
MVGKRVVGK

SEQ ID NO: 42962 - protein, 9 aa, synthetic construct
  source 1..9: note = Seed: VVGARGVGK (KRAS G12R)
MVGKRVVGR

SEQ ID NO: 42963 - protein, 9 aa, synthetic construct
  source 1..9: note = Seed: VVGARGVGK (KRAS G12R)
MVGKRVVGY

SEQ ID NO: 42964 - protein, 9 aa, synthetic construct
  source 1..9: note = Seed: VVGARGVGK (KRAS G12R)
MVGLRAVGA

SEQ ID NO: 42965 - protein, 9 aa, synthetic construct
  source 1..9: note = Seed: VVGARGVGK (KRAS G12R)
MVGLRAVGC

SEQ ID NO: 42966 - protein, 9 aa, synthetic construct
  source 1..9: note = Seed: VVGARGVGK (KRAS G12R)
MVGLRAVGF

SEQ ID NO: 42967 - protein, 9 aa, synthetic construct
  source 1..9: note = Seed: VVGARGVGK (KRAS G12R)
MVGLRAVGG

SEQ ID NO: 42968 - protein, 9 aa, synthetic construct
  source 1..9: note = Seed: VVGARGVGK (KRAS G12R)
MVGLRAVGH

SEQ ID NO: 42969 - protein, 9 aa, synthetic construct
  source 1..9: note = Seed: VVGARGVGK (KRAS G12R)
MVGLRAVGI

SEQ ID NO: 42970 - protein, 9 aa, synthetic construct
  source 1..9: note = Seed: VVGARGVGK (KRAS G12R)
MVGLRAVGK

SEQ ID NO: 42971 - protein, 9 aa, synthetic construct
  source 1..9: note = Seed: VVGARGVGK (KRAS G12R)
MVGLRAVGL

SEQ ID NO: 42972 - protein, 9 aa, synthetic construct
  source 1..9: note = Seed: VVGARGVGK (KRAS G12R)
MVGLRAVGM

SEQ ID NO: 42973 - protein, 9 aa, synthetic construct
  source 1..9: note = Seed: VVGARGVGK (KRAS G12R)
MVGLRAVGN

SEQ ID NO: 42974 - protein, 9 aa, synthetic construct
  source 1..9: note = Seed: VVGARGVGK (KRAS G12R)
MVGLRAVGQ

SEQ ID NO: 42975 - protein, 9 aa, synthetic construct
  source 1..9: note = Seed: VVGARGVGK (KRAS G12R)
MVGLRAVGR

SEQ ID NO: 42976 - protein, 9 aa, synthetic construct
  source 1..9: note = Seed: VVGARGVGK (KRAS G12R)
MVGLRAVGS

SEQ ID NO: 42977 - protein, 9 aa, synthetic construct
  source 1..9: note = Seed: VVGARGVGK (KRAS G12R)
MVGLRAVGT

SEQ ID NO: 42978 - protein, 9 aa, synthetic construct
  source 1..9: note = Seed: VVGARGVGK (KRAS G12R)
MVGLRAVGV

SEQ ID NO: 42979 - protein, 9 aa, synthetic construct
  source 1..9: note = Seed: VVGARGVGK (KRAS G12R)
MVGLRAVGW

SEQ ID NO: 42980 - protein, 9 aa, synthetic construct
  source 1..9: note = Seed: VVGARGVGK (KRAS G12R)
MVGLRAVGY

SEQ ID NO: 42981 - protein, 9 aa, synthetic construct
  source 1..9: note = Seed: VVGARGVGK (KRAS G12R)
MVGLRGVGA

SEQ ID NO: 42982 - protein, 9 aa, synthetic construct
  source 1..9: note = Seed: VVGARGVGK (KRAS G12R)
MVGLRGVGC

SEQ ID NO: 42983 - protein, 9 aa, synthetic construct
  source 1..9: note = Seed: VVGARGVGK (KRAS G12R)
MVGLRGVGF

SEQ ID NO: 42984 - protein, 9 aa, synthetic construct
  source 1..9: note = Seed: VVGARGVGK (KRAS G12R)
MVGLRGVGG

SEQ ID NO: 42985 - protein, 9 aa, synthetic construct
  source 1..9: note = Seed: VVGARGVGK (KRAS G12R)
MVGLRGVGH

SEQ ID NO: 42986 - protein, 9 aa, synthetic construct
  source 1..9: note = Seed: VVGARGVGK (KRAS G12R)
MVGLRGVGI

SEQ ID NO: 42987 - protein, 9 aa, synthetic construct
  source 1..9: note = Seed: VVGARGVGK (KRAS G12R)
MVGLRGVGL

SEQ ID NO: 42988 - protein, 9 aa, synthetic construct
  source 1..9: note = Seed: VVGARGVGK (KRAS G12R)
MVGLRGVGM

SEQ ID NO: 42989 - protein, 9 aa, synthetic construct
  source 1..9: note = Seed: VVGARGVGK (KRAS G12R)
MVGLRGVGN

SEQ ID NO: 42990 - protein, 9 aa, synthetic construct
  source 1..9: note = Seed: VVGARGVGK (KRAS G12R)
MVGLRGVGQ

SEQ ID NO: 42991 - protein, 9 aa, synthetic construct
  source 1..9: note = Seed: VVGARGVGK (KRAS G12R)
MVGLRGVGR

SEQ ID NO: 42992 - protein, 9 aa, synthetic construct
  source 1..9: note = Seed: VVGARGVGK (KRAS G12R)
MVGLRGVGS

SEQ ID NO: 42993 - protein, 9 aa, synthetic construct
  source 1..9: note = Seed: VVGARGVGK (KRAS G12R)
MVGLRGVGT

SEQ ID NO: 42994 - protein, 9 aa, synthetic construct
  source 1..9: note = Seed: VVGARGVGK (KRAS G12R)
MVGLRGVGV

SEQ ID NO: 42995 - protein, 9 aa, synthetic construct
  source 1..9: note = Seed: VVGARGVGK (KRAS G12R)
MVGLRGVGY

SEQ ID NO: 42996 - protein, 9 aa, synthetic construct
  source 1..9: note = Seed: VVGARGVGK (KRAS G12R)
MVGLRHVGI

SEQ ID NO: 42997 - protein, 9 aa, synthetic construct
  source 1..9: note = Seed: VVGARGVGK (KRAS G12R)
MVGLRHVGL

SEQ ID NO: 42998 - protein, 9 aa, synthetic construct
  source 1..9: note = Seed: VVGARGVGK (KRAS G12R)
MVGLRHVGM

SEQ ID NO: 42999 - protein, 9 aa, synthetic construct
  source 1..9: note = Seed: VVGARGVGK (KRAS G12R)
MVGLRHVGV

SEQ ID NO: 43000 - protein, 9 aa, synthetic construct
  source 1..9: note = Seed: VVGARGVGK (KRAS G12R)
MVGLRIVGA

SEQ ID NO: 43001 - protein, 9 aa, synthetic construct
  source 1..9: note = Seed: VVGARGVGK (KRAS G12R)
MVGLRIVGI

SEQ ID NO: 43002 - protein, 9 aa, synthetic construct
  source 1..9: note = Seed: VVGARGVGK (KRAS G12R)
MVGLRIVGL

SEQ ID NO: 43003 - protein, 9 aa, synthetic construct
  source 1..9: note = Seed: VVGARGVGK (KRAS G12R)
MVGLRIVGM

SEQ ID NO: 43004 - protein, 9 aa, synthetic construct
  source 1..9: note = Seed: VVGARGVGK (KRAS G12R)
MVGLRIVGN

SEQ ID NO: 43005 - protein, 9 aa, synthetic construct
  source 1..9: note = Seed: VVGARGVGK (KRAS G12R)
MVGLRIVGS

SEQ ID NO: 43006 - protein, 9 aa, synthetic construct
  source 1..9: note = Seed: VVGARGVGK (KRAS G12R)
MVGLRKVGA

SEQ ID NO: 43007 - protein, 9 aa, synthetic construct
  source 1..9: note = Seed: VVGARGVGK (KRAS G12R)
MVGLRKVGF

SEQ ID NO: 43008 - protein, 9 aa, synthetic construct
  source 1..9: note = Seed: VVGARGVGK (KRAS G12R)
MVGLRKVGI

SEQ ID NO: 43009 - protein, 9 aa, synthetic construct
  source 1..9: note = Seed: VVGARGVGK (KRAS G12R)
MVGLRKVGL

SEQ ID NO: 43010 - protein, 9 aa, synthetic construct
  source 1..9: note = Seed: VVGARGVGK (KRAS G12R)
MVGLRKVGM

SEQ ID NO: 43011 - protein, 9 aa, synthetic construct
  source 1..9: note = Seed: VVGARGVGK (KRAS G12R)
MVGLRKVGR

SEQ ID NO: 43012 - protein, 9 aa, synthetic construct
  source 1..9: note = Seed: VVGARGVGK (KRAS G12R)
MVGLRKVGS

SEQ ID NO: 43013 - protein, 9 aa, synthetic construct
  source 1..9: note = Seed: VVGARGVGK (KRAS G12R)
MVGLRKVGT

SEQ ID NO: 43014 - protein, 9 aa, synthetic construct
  source 1..9: note = Seed: VVGARGVGK (KRAS G12R)
MVGLRKVGV

SEQ ID NO: 43015 - protein, 9 aa, synthetic construct
  source 1..9: note = Seed: VVGARGVGK (KRAS G12R)
MVGLRKVGY

SEQ ID NO: 43016 - protein, 9 aa, synthetic construct
  source 1..9: note = Seed: VVGARGVGK (KRAS G12R)
MVGLRLVGM

SEQ ID NO: 43017 - protein, 9 aa, synthetic construct
  source 1..9: note = Seed: VVGARGVGK (KRAS G12R)
MVGLRLVGN

SEQ ID NO: 43018 - protein, 9 aa, synthetic construct
  source 1..9: note = Seed: VVGARGVGK (KRAS G12R)
MVGLRLVGS

SEQ ID NO: 43019 - protein, 9 aa, synthetic construct
  source 1..9: note = Seed: VVGARGVGK (KRAS G12R)
MVGLRMVGL

SEQ ID NO: 43020 - protein, 9 aa, synthetic construct
  source 1..9: note = Seed: VVGARGVGK (KRAS G12R)
MVGLRMVGM

SEQ ID NO: 43021 - protein, 9 aa, synthetic construct
  source 1..9: note = Seed: VVGARGVGK (KRAS G12R)
MVGLRNVGA

SEQ ID NO: 43022 - protein, 9 aa, synthetic construct
  source 1..9: note = Seed: VVGARGVGK (KRAS G12R)
MVGLRNVGI

SEQ ID NO: 43023 - protein, 9 aa, synthetic construct
  source 1..9: note = Seed: VVGARGVGK (KRAS G12R)
MVGLRNVGL

SEQ ID NO: 43024 - protein, 9 aa, synthetic construct
  source 1..9: note = Seed: VVGARGVGK (KRAS G12R)
MVGLRNVGM

SEQ ID NO: 43025 - protein, 9 aa, synthetic construct
  source 1..9: note = Seed: VVGARGVGK (KRAS G12R)
MVGLRNVGN

SEQ ID NO: 43026 - protein, 9 aa, synthetic construct
  source 1..9: note = Seed: VVGARGVGK (KRAS G12R)
MVGLRNVGS

SEQ ID NO: 43027 - protein, 9 aa, synthetic construct
  source 1..9: note = Seed: VVGARGVGK (KRAS G12R)
MVGLRNVGT

SEQ ID NO: 43028 - protein, 9 aa, synthetic construct
  source 1..9: note = Seed: VVGARGVGK (KRAS G12R)
MVGLRNVGV

SEQ ID NO: 43029 - protein, 9 aa, synthetic construct
  source 1..9: note = Seed: VVGARGVGK (KRAS G12R)
MVGLRPVGA

SEQ ID NO: 43030 - protein, 9 aa, synthetic construct
  source 1..9: note = Seed: VVGARGVGK (KRAS G12R)
MVGLRPVGC

SEQ ID NO: 43031 - protein, 9 aa, synthetic construct
  source 1..9: note = Seed: VVGARGVGK (KRAS G12R)
MVGLRPVGF

SEQ ID NO: 43032 - protein, 9 aa, synthetic construct
  source 1..9: note = Seed: VVGARGVGK (KRAS G12R)
MVGLRPVGG

SEQ ID NO: 43033 - protein, 9 aa, synthetic construct
  source 1..9: note = Seed: VVGARGVGK (KRAS G12R)
MVGLRPVGH

SEQ ID NO: 43034 - protein, 9 aa, synthetic construct
  source 1..9: note = Seed: VVGARGVGK (KRAS G12R)
MVGLRPVGI

SEQ ID NO: 43035 - protein, 9 aa, synthetic construct
  source 1..9: note = Seed: VVGARGVGK (KRAS G12R)
MVGLRPVGK

SEQ ID NO: 43036 - protein, 9 aa, synthetic construct
  source 1..9: note = Seed: VVGARGVGK (KRAS G12R)
MVGLRPVGL

SEQ ID NO: 43037 - protein, 9 aa, synthetic construct
  source 1..9: note = Seed: VVGARGVGK (KRAS G12R)
MVGLRPVGM

SEQ ID NO: 43038 - protein, 9 aa, synthetic construct
  source 1..9: note = Seed: VVGARGVGK (KRAS G12R)
MVGLRPVGN

SEQ ID NO: 43039 - protein, 9 aa, synthetic construct
  source 1..9: note = Seed: VVGARGVGK (KRAS G12R)
MVGLRPVGQ

SEQ ID NO: 43040 - protein, 9 aa, synthetic construct
  source 1..9: note = Seed: VVGARGVGK (KRAS G12R)
MVGLRPVGR

SEQ ID NO: 43041 - protein, 9 aa, synthetic construct
  source 1..9: note = Seed: VVGARGVGK (KRAS G12R)
MVGLRPVGS

SEQ ID NO: 43042 - protein, 9 aa, synthetic construct
  source 1..9: note = Seed: VVGARGVGK (KRAS G12R)
MVGLRPVGT

SEQ ID NO: 43043 - protein, 9 aa, synthetic construct
  source 1..9: note = Seed: VVGARGVGK (KRAS G12R)
MVGLRPVGV

SEQ ID NO: 43044 - protein, 9 aa, synthetic construct
  source 1..9: note = Seed: VVGARGVGK (KRAS G12R)
MVGLRPVGW

SEQ ID NO: 43045 - protein, 9 aa, synthetic construct
  source 1..9: note = Seed: VVGARGVGK (KRAS G12R)
MVGLRPVGY

SEQ ID NO: 43046 - protein, 9 aa, synthetic construct
  source 1..9: note = Seed: VVGARGVGK (KRAS G12R)
MVGLRQVGV

SEQ ID NO: 43047 - protein, 9 aa, synthetic construct
  source 1..9: note = Seed: VVGARGVGK (KRAS G12R)
MVGLRRVGA

SEQ ID NO: 43048 - protein, 9 aa, synthetic construct
  source 1..9: note = Seed: VVGARGVGK (KRAS G12R)
MVGLRRVGF

SEQ ID NO: 43049 - protein, 9 aa, synthetic construct
  source 1..9: note = Seed: VVGARGVGK (KRAS G12R)
MVGLRRVGG

SEQ ID NO: 43050 - protein, 9 aa, synthetic construct
  source 1..9: note = Seed: VVGARGVGK (KRAS G12R)
MVGLRRVGH

SEQ ID NO: 43051 - protein, 9 aa, synthetic construct
  source 1..9: note = Seed: VVGARGVGK (KRAS G12R)
MVGLRRVGI

SEQ ID NO: 43052 - protein, 9 aa, synthetic construct
  source 1..9: note = Seed: VVGARGVGK (KRAS G12R)
MVGLRRVGL

SEQ ID NO: 43053 - protein, 9 aa, synthetic construct
  source 1..9: note = Seed: VVGARGVGK (KRAS G12R)
MVGLRRVGM

SEQ ID NO: 43054 - protein, 9 aa, synthetic construct
  source 1..9: note = Seed: VVGARGVGK (KRAS G12R)
MVGLRRVGQ

SEQ ID NO: 43055 - protein, 9 aa, synthetic construct
  source 1..9: note = Seed: VVGARGVGK (KRAS G12R)
MVGLRRVGR

SEQ ID NO: 43056 - protein, 9 aa, synthetic construct
  source 1..9: note = Seed: VVGARGVGK (KRAS G12R)
MVGLRRVGS

SEQ ID NO: 43057 - protein, 9 aa, synthetic construct
  source 1..9: note = Seed: VVGARGVGK (KRAS G12R)
MVGLRRVGT

SEQ ID NO: 43058 - protein, 9 aa, synthetic construct
  source 1..9: note = Seed: VVGARGVGK (KRAS G12R)
MVGLRRVGV

SEQ ID NO: 43059 - protein, 9 aa, synthetic construct
  source 1..9: note = Seed: VVGARGVGK (KRAS G12R)
MVGLRRVGW

SEQ ID NO: 43060 - protein, 9 aa, synthetic construct
  source 1..9: note = Seed: VVGARGVGK (KRAS G12R)
MVGLRRVGY

SEQ ID NO: 43061 - protein, 9 aa, synthetic construct
  source 1..9: note = Seed: VVGARGVGK (KRAS G12R)
MVGLRSVGA

SEQ ID NO: 43062 - protein, 9 aa, synthetic construct
  source 1..9: note = Seed: VVGARGVGK (KRAS G12R)
MVGLRSVGC

SEQ ID NO: 43063 - protein, 9 aa, synthetic construct
  source 1..9: note = Seed: VVGARGVGK (KRAS G12R)
MVGLRSVGF

SEQ ID NO: 43064 - protein, 9 aa, synthetic construct
  source 1..9: note = Seed: VVGARGVGK (KRAS G12R)
MVGLRSVGG

SEQ ID NO: 43065 - protein, 9 aa, synthetic construct
  source 1..9: note = Seed: VVGARGVGK (KRAS G12R)
MVGLRSVGH

SEQ ID NO: 43066 - protein, 9 aa, synthetic construct
  source 1..9: note = Seed: VVGARGVGK (KRAS G12R)
MVGLRSVGI

SEQ ID NO: 43067 - protein, 9 aa, synthetic construct
  source 1..9: note = Seed: VVGARGVGK (KRAS G12R)
MVGLRSVGL

SEQ ID NO: 43068 - protein, 9 aa, synthetic construct
  source 1..9: note = Seed: VVGARGVGK (KRAS G12R)
MVGLRSVGM

SEQ ID NO: 43069 - protein, 9 aa, synthetic construct
  source 1..9: note = Seed: VVGARGVGK (KRAS G12R)
MVGLRSVGN

SEQ ID NO: 43070 - protein, 9 aa, synthetic construct
  source 1..9: note = Seed: VVGARGVGK (KRAS G12R)
MVGLRSVGQ

SEQ ID NO: 43071 - protein, 9 aa, synthetic construct
  source 1..9: note = Seed: VVGARGVGK (KRAS G12R)
MVGLRSVGR

SEQ ID NO: 43072 - protein, 9 aa, synthetic construct
  source 1..9: note = Seed: VVGARGVGK (KRAS G12R)
MVGLRSVGS

SEQ ID NO: 43073 - protein, 9 aa, synthetic construct
  source 1..9: note = Seed: VVGARGVGK (KRAS G12R)
MVGLRSVGT

SEQ ID NO: 43074 - protein, 9 aa, synthetic construct
  source 1..9: note = Seed: VVGARGVGK (KRAS G12R)
MVGLRSVGV

SEQ ID NO: 43075 - protein, 9 aa, synthetic construct
  source 1..9: note = Seed: VVGARGVGK (KRAS G12R)
MVGLRSVGY

SEQ ID NO: 43076 - protein, 9 aa, synthetic construct
  source 1..9: note = Seed: VVGARGVGK (KRAS G12R)
MVGLRTVGA

SEQ ID NO: 43077 - protein, 9 aa, synthetic construct
  source 1..9: note = Seed: VVGARGVGK (KRAS G12R)
MVGLRTVGH

SEQ ID NO: 43078 - protein, 9 aa, synthetic construct
  source 1..9: note = Seed: VVGARGVGK (KRAS G12R)
MVGLRTVGI

SEQ ID NO: 43079 - protein, 9 aa, synthetic construct
  source 1..9: note = Seed: VVGARGVGK (KRAS G12R)
MVGLRTVGL

SEQ ID NO: 43080 - protein, 9 aa, synthetic construct
  source 1..9: note = Seed: VVGARGVGK (KRAS G12R)
MVGLRTVGM

SEQ ID NO: 43081 - protein, 9 aa, synthetic construct
  source 1..9: note = Seed: VVGARGVGK (KRAS G12R)
MVGLRTVGN

SEQ ID NO: 43082 - protein, 9 aa, synthetic construct
  source 1..9: note = Seed: VVGARGVGK (KRAS G12R)
MVGLRTVGS

SEQ ID NO: 43083 - protein, 9 aa, synthetic construct
  source 1..9: note = Seed: VVGARGVGK (KRAS G12R)
MVGLRTVGT

SEQ ID NO: 43084 - protein, 9 aa, synthetic construct
  source 1..9: note = Seed: VVGARGVGK (KRAS G12R)
MVGLRTVGV

SEQ ID NO: 43085 - protein, 9 aa, synthetic construct
  source 1..9: note = Seed: VVGARGVGK (KRAS G12R)
MVGLRVVGA

SEQ ID NO: 43086 - protein, 9 aa, synthetic construct
  source 1..9: note = Seed: VVGARGVGK (KRAS G12R)
MVGLRVVGH

SEQ ID NO: 43087 - protein, 9 aa, synthetic construct
  source 1..9: note = Seed: VVGARGVGK (KRAS G12R)
MVGLRVVGI

SEQ ID NO: 43088 - protein, 9 aa, synthetic construct
  source 1..9: note = Seed: VVGARGVGK (KRAS G12R)
MVGLRVVGL

SEQ ID NO: 43089 - protein, 9 aa, synthetic construct
  source 1..9: note = Seed: VVGARGVGK (KRAS G12R)
MVGLRVVGM

SEQ ID NO: 43090 - protein, 9 aa, synthetic construct
  source 1..9: note = Seed: VVGARGVGK (KRAS G12R)
MVGLRVVGN

SEQ ID NO: 43091 - protein, 9 aa, synthetic construct
  source 1..9: note = Seed: VVGARGVGK (KRAS G12R)
MVGLRVVGR

SEQ ID NO: 43092 - protein, 9 aa, synthetic construct
  source 1..9: note = Seed: VVGARGVGK (KRAS G12R)
MVGLRVVGS

SEQ ID NO: 43093 - protein, 9 aa, synthetic construct
  source 1..9: note = Seed: VVGARGVGK (KRAS G12R)
MVGLRVVGT

SEQ ID NO: 43094 - protein, 9 aa, synthetic construct
  source 1..9: note = Seed: VVGARGVGK (KRAS G12R)
MVGLRVVGV

SEQ ID NO: 43095 - protein, 9 aa, synthetic construct
  source 1..9: note = Seed: VVGARGVGK (KRAS G12R)
MVGMRAVGA

SEQ ID NO: 43096 - protein, 9 aa, synthetic construct
  source 1..9: note = Seed: VVGARGVGK (KRAS G12R)
MVGMRAVGC

SEQ ID NO: 43097 - protein, 9 aa, synthetic construct
  source 1..9: note = Seed: VVGARGVGK (KRAS G12R)
MVGMRAVGF

SEQ ID NO: 43098 - protein, 9 aa, synthetic construct
  source 1..9: note = Seed: VVGARGVGK (KRAS G12R)
MVGMRAVGG

SEQ ID NO: 43099 - protein, 9 aa, synthetic construct
  source 1..9: note = Seed: VVGARGVGK (KRAS G12R)
MVGMRAVGH

SEQ ID NO: 43100 - protein, 9 aa, synthetic construct
  source 1..9: note = Seed: VVGARGVGK (KRAS G12R)
MVGMRAVGI

SEQ ID NO: 43101 - protein, 9 aa, synthetic construct
  source 1..9: note = Seed: VVGARGVGK (KRAS G12R)
MVGMRAVGK

SEQ ID NO: 43102 - protein, 9 aa, synthetic construct
  source 1..9: note = Seed: VVGARGVGK (KRAS G12R)
MVGMRAVGL

SEQ ID NO: 43103 - protein, 9 aa, synthetic construct
  source 1..9: note = Seed: VVGARGVGK (KRAS G12R)
MVGMRAVGM

SEQ ID NO: 43104 - protein, 9 aa, synthetic construct
  source 1..9: note = Seed: VVGARGVGK (KRAS G12R)
MVGMRAVGN

SEQ ID NO: 43105 - protein, 9 aa, synthetic construct
  source 1..9: note = Seed: VVGARGVGK (KRAS G12R)
MVGMRAVGQ

SEQ ID NO: 43106 - protein, 9 aa, synthetic construct
  source 1..9: note = Seed: VVGARGVGK (KRAS G12R)
MVGMRAVGR

SEQ ID NO: 43107 - protein, 9 aa, synthetic construct
  source 1..9: note = Seed: VVGARGVGK (KRAS G12R)
MVGMRAVGS

SEQ ID NO: 43108 - protein, 9 aa, synthetic construct
  source 1..9: note = Seed: VVGARGVGK (KRAS G12R)
MVGMRAVGT

SEQ ID NO: 43109 - protein, 9 aa, synthetic construct
  source 1..9: note = Seed: VVGARGVGK (KRAS G12R)
MVGMRAVGV

SEQ ID NO: 43110 - protein, 9 aa, synthetic construct
  source 1..9: note = Seed: VVGARGVGK (KRAS G12R)
MVGMRAVGW

SEQ ID NO: 43111 - protein, 9 aa, synthetic construct
  source 1..9: note = Seed: VVGARGVGK (KRAS G12R)
MVGMRAVGY

SEQ ID NO: 43112 - protein, 9 aa, synthetic construct
  source 1..9: note = Seed: VVGARGVGK (KRAS G12R)
MVGMRGVGA

SEQ ID NO: 43113 - protein, 9 aa, synthetic construct
  source 1..9: note = Seed: VVGARGVGK (KRAS G12R)
MVGMRGVGC

SEQ ID NO: 43114 - protein, 9 aa, synthetic construct
  source 1..9: note = Seed: VVGARGVGK (KRAS G12R)
MVGMRGVGF

SEQ ID NO: 43115 - protein, 9 aa, synthetic construct
  source 1..9: note = Seed: VVGARGVGK (KRAS G12R)
MVGMRGVGG

SEQ ID NO: 43116 - protein, 9 aa, synthetic construct
  source 1..9: note = Seed: VVGARGVGK (KRAS G12R)
MVGMRGVGH

SEQ ID NO: 43117 - protein, 9 aa, synthetic construct
  source 1..9: note = Seed: VVGARGVGK (KRAS G12R)
MVGMRGVGI

SEQ ID NO: 43118 - protein, 9 aa, synthetic construct
  source 1..9: note = Seed: VVGARGVGK (KRAS G12R)
MVGMRGVGL

SEQ ID NO: 43119 - protein, 9 aa, synthetic construct
  source 1..9: note = Seed: VVGARGVGK (KRAS G12R)
MVGMRGVGM

SEQ ID NO: 43120 - protein, 9 aa, synthetic construct
  source 1..9: note = Seed: VVGARGVGK (KRAS G12R)
MVGMRGVGN

SEQ ID NO: 43121 - protein, 9 aa, synthetic construct
  source 1..9: note = Seed: VVGARGVGK (KRAS G12R)
MVGMRGVGQ

SEQ ID NO: 43122 - protein, 9 aa, synthetic construct
  source 1..9: note = Seed: VVGARGVGK (KRAS G12R)
MVGMRGVGR

SEQ ID NO: 43123 - protein, 9 aa, synthetic construct
  source 1..9: note = Seed: VVGARGVGK (KRAS G12R)
MVGMRGVGS

SEQ ID NO: 43124 - protein, 9 aa, synthetic construct
  source 1..9: note = Seed: VVGARGVGK (KRAS G12R)
MVGMRGVGT

SEQ ID NO: 43125 - protein, 9 aa, synthetic construct
  source 1..9: note = Seed: VVGARGVGK (KRAS G12R)
MVGMRGVGV

SEQ ID NO: 43126 - protein, 9 aa, synthetic construct
  source 1..9: note = Seed: VVGARGVGK (KRAS G12R)
MVGMRGVGY

SEQ ID NO: 43127 - protein, 9 aa, synthetic construct
  source 1..9: note = Seed: VVGARGVGK (KRAS G12R)
MVGMRHVGI

SEQ ID NO: 43128 - protein, 9 aa, synthetic construct
  source 1..9: note = Seed: VVGARGVGK (KRAS G12R)
MVGMRHVGL

SEQ ID NO: 43129 - protein, 9 aa, synthetic construct
  source 1..9: note = Seed: VVGARGVGK (KRAS G12R)
MVGMRHVGM

SEQ ID NO: 43130 - protein, 9 aa, synthetic construct
  source 1..9: note = Seed: VVGARGVGK (KRAS G12R)
MVGMRHVGR

SEQ ID NO: 43131 - protein, 9 aa, synthetic construct
  source 1..9: note = Seed: VVGARGVGK (KRAS G12R)
MVGMRHVGV

SEQ ID NO: 43132 - protein, 9 aa, synthetic construct
  source 1..9: note = Seed: VVGARGVGK (KRAS G12R)
MVGMRIVGA

SEQ ID NO: 43133 - protein, 9 aa, synthetic construct
  source 1..9: note = Seed: VVGARGVGK (KRAS G12R)
MVGMRIVGH

SEQ ID NO: 43134 - protein, 9 aa, synthetic construct
  source 1..9: note = Seed: VVGARGVGK (KRAS G12R)
MVGMRIVGI

SEQ ID NO: 43135 - protein, 9 aa, synthetic construct
  source 1..9: note = Seed: VVGARGVGK (KRAS G12R)
MVGMRIVGL

SEQ ID NO: 43136 - protein, 9 aa, synthetic construct
  source 1..9: note = Seed: VVGARGVGK (KRAS G12R)
MVGMRIVGM

SEQ ID NO: 43137 - protein, 9 aa, synthetic construct
  source 1..9: note = Seed: VVGARGVGK (KRAS G12R)
MVGMRIVGN

SEQ ID NO: 43138 - protein, 9 aa, synthetic construct
  source 1..9: note = Seed: VVGARGVGK (KRAS G12R)
MVGMRIVGS

SEQ ID NO: 43139 - protein, 9 aa, synthetic construct
  source 1..9: note = Seed: VVGARGVGK (KRAS G12R)
MVGMRIVGT

SEQ ID NO: 43140 - protein, 9 aa, synthetic construct
  source 1..9: note = Seed: VVGARGVGK (KRAS G12R)
MVGMRIVGV

SEQ ID NO: 43141 - protein, 9 aa, synthetic construct
  source 1..9: note = Seed: VVGARGVGK (KRAS G12R)
MVGMRKVGA

SEQ ID NO: 43142 - protein, 9 aa, synthetic construct
  source 1..9: note = Seed: VVGARGVGK (KRAS G12R)
MVGMRKVGF

SEQ ID NO: 43143 - protein, 9 aa, synthetic construct
  source 1..9: note = Seed: VVGARGVGK (KRAS G12R)
MVGMRKVGH

SEQ ID NO: 43144 - protein, 9 aa, synthetic construct
  source 1..9: note = Seed: VVGARGVGK (KRAS G12R)
MVGMRKVGI

SEQ ID NO: 43145 - protein, 9 aa, synthetic construct
  source 1..9: note = Seed: VVGARGVGK (KRAS G12R)
MVGMRKVGK

SEQ ID NO: 43146 - protein, 9 aa, synthetic construct
  source 1..9: note = Seed: VVGARGVGK (KRAS G12R)
MVGMRKVGL

SEQ ID NO: 43147 - protein, 9 aa, synthetic construct
  source 1..9: note = Seed: VVGARGVGK (KRAS G12R)
MVGMRKVGM

SEQ ID NO: 43148 - protein, 9 aa, synthetic construct
  source 1..9: note = Seed: VVGARGVGK (KRAS G12R)
MVGMRKVGR

SEQ ID NO: 43149 - protein, 9 aa, synthetic construct
  source 1..9: note = Seed: VVGARGVGK (KRAS G12R)
MVGMRKVGS

SEQ ID NO: 43150 - protein, 9 aa, synthetic construct
  source 1..9: note = Seed: VVGARGVGK (KRAS G12R)
MVGMRKVGT

SEQ ID NO: 43151 - protein, 9 aa, synthetic construct
  source 1..9: note = Seed: VVGARGVGK (KRAS G12R)
MVGMRKVGV

SEQ ID NO: 43152 - protein, 9 aa, synthetic construct
  source 1..9: note = Seed: VVGARGVGK (KRAS G12R)
MVGMRKVGY

SEQ ID NO: 43153 - protein, 9 aa, synthetic construct
  source 1..9: note = Seed: VVGARGVGK (KRAS G12R)
MVGMRLVGA

SEQ ID NO: 43154 - protein, 9 aa, synthetic construct
  source 1..9: note = Seed: VVGARGVGK (KRAS G12R)
MVGMRLVGM

SEQ ID NO: 43155 - protein, 9 aa, synthetic construct
  source 1..9: note = Seed: VVGARGVGK (KRAS G12R)
MVGMRLVGN

SEQ ID NO: 43156 - protein, 9 aa, synthetic construct
  source 1..9: note = Seed: VVGARGVGK (KRAS G12R)
MVGMRLVGS

SEQ ID NO: 43157 - protein, 9 aa, synthetic construct
  source 1..9: note = Seed: VVGARGVGK (KRAS G12R)
MVGMRMVGL

SEQ ID NO: 43158 - protein, 9 aa, synthetic construct
  source 1..9: note = Seed: VVGARGVGK (KRAS G12R)
MVGMRMVGM

SEQ ID NO: 43159 - protein, 9 aa, synthetic construct
  source 1..9: note = Seed: VVGARGVGK (KRAS G12R)
MVGMRNVGA

SEQ ID NO: 43160 - protein, 9 aa, synthetic construct
  source 1..9: note = Seed: VVGARGVGK (KRAS G12R)
MVGMRNVGG

SEQ ID NO: 43161 - protein, 9 aa, synthetic construct
  source 1..9: note = Seed: VVGARGVGK (KRAS G12R)
MVGMRNVGI

SEQ ID NO: 43162 - protein, 9 aa, synthetic construct
  source 1..9: note = Seed: VVGARGVGK (KRAS G12R)
MVGMRNVGL

SEQ ID NO: 43163 - protein, 9 aa, synthetic construct
  source 1..9: note = Seed: VVGARGVGK (KRAS G12R)
MVGMRNVGM

SEQ ID NO: 43164 - protein, 9 aa, synthetic construct
  source 1..9: note = Seed: VVGARGVGK (KRAS G12R)
MVGMRNVGN

SEQ ID NO: 43165 - protein, 9 aa, synthetic construct
  source 1..9: note = Seed: VVGARGVGK (KRAS G12R)
MVGMRNVGR

SEQ ID NO: 43166 - protein, 9 aa, synthetic construct
  source 1..9: note = Seed: VVGARGVGK (KRAS G12R)
MVGMRNVGS

SEQ ID NO: 43167 - protein, 9 aa, synthetic construct
  source 1..9: note = Seed: VVGARGVGK (KRAS G12R)
MVGMRNVGT

SEQ ID NO: 43168 - protein, 9 aa, synthetic construct
  source 1..9: note = Seed: VVGARGVGK (KRAS G12R)
MVGMRNVGV

SEQ ID NO: 43169 - protein, 9 aa, synthetic construct
  source 1..9: note = Seed: VVGARGVGK (KRAS G12R)
MVGMRPVGA

SEQ ID NO: 43170 - protein, 9 aa, synthetic construct
  source 1..9: note = Seed: VVGARGVGK (KRAS G12R)
MVGMRPVGC

SEQ ID NO: 43171 - protein, 9 aa, synthetic construct
  source 1..9: note = Seed: VVGARGVGK (KRAS G12R)
MVGMRPVGF

SEQ ID NO: 43172 - protein, 9 aa, synthetic construct
  source 1..9: note = Seed: VVGARGVGK (KRAS G12R)
MVGMRPVGG

SEQ ID NO: 43173 - protein, 9 aa, synthetic construct
  source 1..9: note = Seed: VVGARGVGK (KRAS G12R)
MVGMRPVGH

SEQ ID NO: 43174 - protein, 9 aa, synthetic construct
  source 1..9: note = Seed: VVGARGVGK (KRAS G12R)
MVGMRPVGI

SEQ ID NO: 43175 - protein, 9 aa, synthetic construct
  source 1..9: note = Seed: VVGARGVGK (KRAS G12R)
MVGMRPVGK

SEQ ID NO: 43176 - protein, 9 aa, synthetic construct
  source 1..9: note = Seed: VVGARGVGK (KRAS G12R)
MVGMRPVGL

SEQ ID NO: 43177 - protein, 9 aa, synthetic construct
  source 1..9: note = Seed: VVGARGVGK (KRAS G12R)
MVGMRPVGM

SEQ ID NO: 43178 - protein, 9 aa, synthetic construct
  source 1..9: note = Seed: VVGARGVGK (KRAS G12R)
MVGMRPVGN

SEQ ID NO: 43179 - protein, 9 aa, synthetic construct
  source 1..9: note = Seed: VVGARGVGK (KRAS G12R)
MVGMRPVGQ

SEQ ID NO: 43180 - protein, 9 aa, synthetic construct
  source 1..9: note = Seed: VVGARGVGK (KRAS G12R)
MVGMRPVGR

SEQ ID NO: 43181 - protein, 9 aa, synthetic construct
  source 1..9: note = Seed: VVGARGVGK (KRAS G12R)
MVGMRPVGS

SEQ ID NO: 43182 - protein, 9 aa, synthetic construct
  source 1..9: note = Seed: VVGARGVGK (KRAS G12R)
MVGMRPVGT

SEQ ID NO: 43183 - protein, 9 aa, synthetic construct
  source 1..9: note = Seed: VVGARGVGK (KRAS G12R)
MVGMRPVGV

SEQ ID NO: 43184 - protein, 9 aa, synthetic construct
  source 1..9: note = Seed: VVGARGVGK (KRAS G12R)
MVGMRPVGW

SEQ ID NO: 43185 - protein, 9 aa, synthetic construct
  source 1..9: note = Seed: VVGARGVGK (KRAS G12R)
MVGMRPVGY

SEQ ID NO: 43186 - protein, 9 aa, synthetic construct
  source 1..9: note = Seed: VVGARGVGK (KRAS G12R)
MVGMRQVGV

SEQ ID NO: 43187 - protein, 9 aa, synthetic construct
  source 1..9: note = Seed: VVGARGVGK (KRAS G12R)
MVGMRRVGA

SEQ ID NO: 43188 - protein, 9 aa, synthetic construct
  source 1..9: note = Seed: VVGARGVGK (KRAS G12R)
MVGMRRVGF

SEQ ID NO: 43189 - protein, 9 aa, synthetic construct
  source 1..9: note = Seed: VVGARGVGK (KRAS G12R)
MVGMRRVGH

SEQ ID NO: 43190 - protein, 9 aa, synthetic construct
  source 1..9: note = Seed: VVGARGVGK (KRAS G12R)
MVGMRRVGI

SEQ ID NO: 43191 - protein, 9 aa, synthetic construct
  source 1..9: note = Seed: VVGARGVGK (KRAS G12R)
MVGMRRVGK

SEQ ID NO: 43192 - protein, 9 aa, synthetic construct
  source 1..9: note = Seed: VVGARGVGK (KRAS G12R)
MVGMRRVGL

SEQ ID NO: 43193 - protein, 9 aa, synthetic construct
  source 1..9: note = Seed: VVGARGVGK (KRAS G12R)
MVGMRRVGM

SEQ ID NO: 43194 - protein, 9 aa, synthetic construct
  source 1..9: note = Seed: VVGARGVGK (KRAS G12R)
MVGMRRVGQ

SEQ ID NO: 43195 - protein, 9 aa, synthetic construct
  source 1..9: note = Seed: VVGARGVGK (KRAS G12R)
MVGMRRVGR

SEQ ID NO: 43196 - protein, 9 aa, synthetic construct
  source 1..9: note = Seed: VVGARGVGK (KRAS G12R)
MVGMRRVGS

SEQ ID NO: 43197 - protein, 9 aa, synthetic construct
  source 1..9: note = Seed: VVGARGVGK (KRAS G12R)
MVGMRRVGT

SEQ ID NO: 43198 - protein, 9 aa, synthetic construct
  source 1..9: note = Seed: VVGARGVGK (KRAS G12R)
MVGMRRVGV

SEQ ID NO: 43199 - protein, 9 aa, synthetic construct
  source 1..9: note = Seed: VVGARGVGK (KRAS G12R)
MVGMRRVGW

SEQ ID NO: 43200 - protein, 9 aa, synthetic construct
  source 1..9: note = Seed: VVGARGVGK (KRAS G12R)
MVGMRRVGY

SEQ ID NO: 43201 - protein, 9 aa, synthetic construct
  source 1..9: note = Seed: VVGARGVGK (KRAS G12R)
MVGMRSVGA

SEQ ID NO: 43202 - protein, 9 aa, synthetic construct
  source 1..9: note = Seed: VVGARGVGK (KRAS G12R)
MVGMRSVGC

SEQ ID NO: 43203 - protein, 9 aa, synthetic construct
  source 1..9: note = Seed: VVGARGVGK (KRAS G12R)
MVGMRSVGF

SEQ ID NO: 43204 - protein, 9 aa, synthetic construct
  source 1..9: note = Seed: VVGARGVGK (KRAS G12R)
MVGMRSVGG

SEQ ID NO: 43205 - protein, 9 aa, synthetic construct
  source 1..9: note = Seed: VVGARGVGK (KRAS G12R)
MVGMRSVGH

SEQ ID NO: 43206 - protein, 9 aa, synthetic construct
  source 1..9: note = Seed: VVGARGVGK (KRAS G12R)
MVGMRSVGI

SEQ ID NO: 43207 - protein, 9 aa, synthetic construct
  source 1..9: note = Seed: VVGARGVGK (KRAS G12R)
MVGMRSVGK

SEQ ID NO: 43208 - protein, 9 aa, synthetic construct
  source 1..9: note = Seed: VVGARGVGK (KRAS G12R)
MVGMRSVGL

SEQ ID NO: 43209 - protein, 9 aa, synthetic construct
  source 1..9: note = Seed: VVGARGVGK (KRAS G12R)
MVGMRSVGM

SEQ ID NO: 43210 - protein, 9 aa, synthetic construct
  source 1..9: note = Seed: VVGARGVGK (KRAS G12R)
MVGMRSVGN

SEQ ID NO: 43211 - protein, 9 aa, synthetic construct
  source 1..9: note = Seed: VVGARGVGK (KRAS G12R)
MVGMRSVGQ

SEQ ID NO: 43212 - protein, 9 aa, synthetic construct
  source 1..9: note = Seed: VVGARGVGK (KRAS G12R)
MVGMRSVGR

SEQ ID NO: 43213 - protein, 9 aa, synthetic construct
  source 1..9: note = Seed: VVGARGVGK (KRAS G12R)
MVGMRSVGS

SEQ ID NO: 43214 - protein, 9 aa, synthetic construct
  source 1..9: note = Seed: VVGARGVGK (KRAS G12R)
MVGMRSVGT

SEQ ID NO: 43215 - protein, 9 aa, synthetic construct
  source 1..9: note = Seed: VVGARGVGK (KRAS G12R)
MVGMRSVGV

SEQ ID NO: 43216 - protein, 9 aa, synthetic construct
  source 1..9: note = Seed: VVGARGVGK (KRAS G12R)
MVGMRSVGY

SEQ ID NO: 43217 - protein, 9 aa, synthetic construct
  source 1..9: note = Seed: VVGARGVGK (KRAS G12R)
MVGMRTVGA

SEQ ID NO: 43218 - protein, 9 aa, synthetic construct
  source 1..9: note = Seed: VVGARGVGK (KRAS G12R)
MVGMRTVGH

SEQ ID NO: 43219 - protein, 9 aa, synthetic construct
  source 1..9: note = Seed: VVGARGVGK (KRAS G12R)
MVGMRTVGI

SEQ ID NO: 43220 - protein, 9 aa, synthetic construct
  source 1..9: note = Seed: VVGARGVGK (KRAS G12R)
MVGMRTVGL

SEQ ID NO: 43221 - protein, 9 aa, synthetic construct
  source 1..9: note = Seed: VVGARGVGK (KRAS G12R)
MVGMRTVGM

SEQ ID NO: 43222 - protein, 9 aa, synthetic construct
  source 1..9: note = Seed: VVGARGVGK (KRAS G12R)
MVGMRTVGN

SEQ ID NO: 43223 - protein, 9 aa, synthetic construct
  source 1..9: note = Seed: VVGARGVGK (KRAS G12R)
MVGMRTVGR

SEQ ID NO: 43224 - protein, 9 aa, synthetic construct
  source 1..9: note = Seed: VVGARGVGK (KRAS G12R)
MVGMRTVGS

SEQ ID NO: 43225 - protein, 9 aa, synthetic construct
  source 1..9: note = Seed: VVGARGVGK (KRAS G12R)
MVGMRTVGT

SEQ ID NO: 43226 - protein, 9 aa, synthetic construct
  source 1..9: note = Seed: VVGARGVGK (KRAS G12R)
MVGMRTVGV

SEQ ID NO: 43227 - protein, 9 aa, synthetic construct
  source 1..9: note = Seed: VVGARGVGK (KRAS G12R)
MVGMRVVGA

SEQ ID NO: 43228 - protein, 9 aa, synthetic construct
  source 1..9: note = Seed: VVGARGVGK (KRAS G12R)
MVGMRVVGH

SEQ ID NO: 43229 - protein, 9 aa, synthetic construct
  source 1..9: note = Seed: VVGARGVGK (KRAS G12R)
MVGMRVVGI

SEQ ID NO: 43230 - protein, 9 aa, synthetic construct
  source 1..9: note = Seed: VVGARGVGK (KRAS G12R)
MVGMRVVGL

SEQ ID NO: 43231 - protein, 9 aa, synthetic construct
  source 1..9: note = Seed: VVGARGVGK (KRAS G12R)
MVGMRVVGM

SEQ ID NO: 43232 - protein, 9 aa, synthetic construct
  source 1..9: note = Seed: VVGARGVGK (KRAS G12R)
MVGMRVVGN

SEQ ID NO: 43233 - protein, 9 aa, synthetic construct
  source 1..9: note = Seed: VVGARGVGK (KRAS G12R)
MVGMRVVGR

SEQ ID NO: 43234 - protein, 9 aa, synthetic construct
  source 1..9: note = Seed: VVGARGVGK (KRAS G12R)
MVGMRVVGS

SEQ ID NO: 43235 - protein, 9 aa, synthetic construct
  source 1..9: note = Seed: VVGARGVGK (KRAS G12R)
MVGMRVVGT

SEQ ID NO: 43236 - protein, 9 aa, synthetic construct
  source 1..9: note = Seed: VVGARGVGK (KRAS G12R)
MVGMRVVGV

SEQ ID NO: 43237 - protein, 9 aa, synthetic construct
  source 1..9: note = Seed: VVGARGVGK (KRAS G12R)
MVGNRAVGA

SEQ ID NO: 43238 - protein, 9 aa, synthetic construct
  source 1..9: note = Seed: VVGARGVGK (KRAS G12R)
MVGNRAVGI

SEQ ID NO: 43239 - protein, 9 aa, synthetic construct
  source 1..9: note = Seed: VVGARGVGK (KRAS G12R)
MVGNRAVGL

SEQ ID NO: 43240 - protein, 9 aa, synthetic construct
  source 1..9: note = Seed: VVGARGVGK (KRAS G12R)
MVGNRAVGM

SEQ ID NO: 43241 - protein, 9 aa, synthetic construct
  source 1..9: note = Seed: VVGARGVGK (KRAS G12R)
MVGNRAVGR

SEQ ID NO: 43242 - protein, 9 aa, synthetic construct
  source 1..9: note = Seed: VVGARGVGK (KRAS G12R)
MVGNRAVGV

SEQ ID NO: 43243 - protein, 9 aa, synthetic construct
  source 1..9: note = Seed: VVGARGVGK (KRAS G12R)
MVGNRAVGY

SEQ ID NO: 43244 - protein, 9 aa, synthetic construct
  source 1..9: note = Seed: VVGARGVGK (KRAS G12R)
MVGNRIVGR

SEQ ID NO: 43245 - protein, 9 aa, synthetic construct
  source 1..9: note = Seed: VVGARGVGK (KRAS G12R)
MVGNRKVGR

SEQ ID NO: 43246 - protein, 9 aa, synthetic construct
  source 1..9: note = Seed: VVGARGVGK (KRAS G12R)
MVGNRKVGY

SEQ ID NO: 43247 - protein, 9 aa, synthetic construct
  source 1..9: note = Seed: VVGARGVGK (KRAS G12R)
MVGNRLVGR

SEQ ID NO: 43248 - protein, 9 aa, synthetic construct
  source 1..9: note = Seed: VVGARGVGK (KRAS G12R)
MVGNRRVGA

SEQ ID NO: 43249 - protein, 9 aa, synthetic construct
  source 1..9: note = Seed: VVGARGVGK (KRAS G12R)
MVGNRRVGF

SEQ ID NO: 43250 - protein, 9 aa, synthetic construct
  source 1..9: note = Seed: VVGARGVGK (KRAS G12R)
MVGNRRVGH

SEQ ID NO: 43251 - protein, 9 aa, synthetic construct
  source 1..9: note = Seed: VVGARGVGK (KRAS G12R)
MVGNRRVGI

SEQ ID NO: 43252 - protein, 9 aa, synthetic construct
  source 1..9: note = Seed: VVGARGVGK (KRAS G12R)
MVGNRRVGK

SEQ ID NO: 43253 - protein, 9 aa, synthetic construct
  source 1..9: note = Seed: VVGARGVGK (KRAS G12R)
MVGNRRVGL

SEQ ID NO: 43254 - protein, 9 aa, synthetic construct
  source 1..9: note = Seed: VVGARGVGK (KRAS G12R)
MVGNRRVGM

SEQ ID NO: 43255 - protein, 9 aa, synthetic construct
  source 1..9: note = Seed: VVGARGVGK (KRAS G12R)
MVGNRRVGR

SEQ ID NO: 43256 - protein, 9 aa, synthetic construct
  source 1..9: note = Seed: VVGARGVGK (KRAS G12R)
MVGNRRVGS

SEQ ID NO: 43257 - protein, 9 aa, synthetic construct
  source 1..9: note = Seed: VVGARGVGK (KRAS G12R)
MVGNRRVGV

SEQ ID NO: 43258 - protein, 9 aa, synthetic construct
  source 1..9: note = Seed: VVGARGVGK (KRAS G12R)
MVGNRRVGW

SEQ ID NO: 43259 - protein, 9 aa, synthetic construct
  source 1..9: note = Seed: VVGARGVGK (KRAS G12R)
MVGNRRVGY

SEQ ID NO: 43260 - protein, 9 aa, synthetic construct
  source 1..9: note = Seed: VVGARGVGK (KRAS G12R)
MVGNRVVGR

SEQ ID NO: 43261 - protein, 9 aa, synthetic construct
  source 1..9: note = Seed: VVGARGVGK (KRAS G12R)
MVGPRLVGI

SEQ ID NO: 43262 - protein, 9 aa, synthetic construct
  source 1..9: note = Seed: VVGARGVGK (KRAS G12R)
MVGQRAVGA

SEQ ID NO: 43263 - protein, 9 aa, synthetic construct
  source 1..9: note = Seed: VVGARGVGK (KRAS G12R)
MVGQRAVGF

SEQ ID NO: 43264 - protein, 9 aa, synthetic construct
  source 1..9: note = Seed: VVGARGVGK (KRAS G12R)
MVGQRAVGG

SEQ ID NO: 43265 - protein, 9 aa, synthetic construct
  source 1..9: note = Seed: VVGARGVGK (KRAS G12R)
MVGQRAVGI

SEQ ID NO: 43266 - protein, 9 aa, synthetic construct
  source 1..9: note = Seed: VVGARGVGK (KRAS G12R)
MVGQRAVGL

SEQ ID NO: 43267 - protein, 9 aa, synthetic construct
  source 1..9: note = Seed: VVGARGVGK (KRAS G12R)
MVGQRAVGM

SEQ ID NO: 43268 - protein, 9 aa, synthetic construct
  source 1..9: note = Seed: VVGARGVGK (KRAS G12R)
MVGQRAVGN

SEQ ID NO: 43269 - protein, 9 aa, synthetic construct
  source 1..9: note = Seed: VVGARGVGK (KRAS G12R)
MVGQRAVGR

SEQ ID NO: 43270 - protein, 9 aa, synthetic construct
  source 1..9: note = Seed: VVGARGVGK (KRAS G12R)
MVGQRAVGS

SEQ ID NO: 43271 - protein, 9 aa, synthetic construct
  source 1..9: note = Seed: VVGARGVGK (KRAS G12R)
MVGQRAVGT

SEQ ID NO: 43272 - protein, 9 aa, synthetic construct
  source 1..9: note = Seed: VVGARGVGK (KRAS G12R)
MVGQRAVGV

SEQ ID NO: 43273 - protein, 9 aa, synthetic construct
  source 1..9: note = Seed: VVGARGVGK (KRAS G12R)
MVGQRAVGY

SEQ ID NO: 43274 - protein, 9 aa, synthetic construct
  source 1..9: note = Seed: VVGARGVGK (KRAS G12R)
MVGQRGVGA

SEQ ID NO: 43275 - protein, 9 aa, synthetic construct
  source 1..9: note = Seed: VVGARGVGK (KRAS G12R)
MVGQRGVGI

SEQ ID NO: 43276 - protein, 9 aa, synthetic construct
  source 1..9: note = Seed: VVGARGVGK (KRAS G12R)
MVGQRGVGL

SEQ ID NO: 43277 - protein, 9 aa, synthetic construct
  source 1..9: note = Seed: VVGARGVGK (KRAS G12R)
MVGQRGVGM

SEQ ID NO: 43278 - protein, 9 aa, synthetic construct
  source 1..9: note = Seed: VVGARGVGK (KRAS G12R)
MVGQRGVGS

SEQ ID NO: 43279 - protein, 9 aa, synthetic construct
  source 1..9: note = Seed: VVGARGVGK (KRAS G12R)
MVGQRGVGT

SEQ ID NO: 43280 - protein, 9 aa, synthetic construct
  source 1..9: note = Seed: VVGARGVGK (KRAS G12R)
MVGQRGVGV

SEQ ID NO: 43281 - protein, 9 aa, synthetic construct
  source 1..9: note = Seed: VVGARGVGK (KRAS G12R)
MVGQRKVGF

SEQ ID NO: 43282 - protein, 9 aa, synthetic construct
  source 1..9: note = Seed: VVGARGVGK (KRAS G12R)
MVGQRKVGI

SEQ ID NO: 43283 - protein, 9 aa, synthetic construct
  source 1..9: note = Seed: VVGARGVGK (KRAS G12R)
MVGQRKVGL

SEQ ID NO: 43284 - protein, 9 aa, synthetic construct
  source 1..9: note = Seed: VVGARGVGK (KRAS G12R)
MVGQRKVGM

SEQ ID NO: 43285 - protein, 9 aa, synthetic construct
  source 1..9: note = Seed: VVGARGVGK (KRAS G12R)
MVGQRKVGR

SEQ ID NO: 43286 - protein, 9 aa, synthetic construct
  source 1..9: note = Seed: VVGARGVGK (KRAS G12R)
MVGQRKVGV

SEQ ID NO: 43287 - protein, 9 aa, synthetic construct
  source 1..9: note = Seed: VVGARGVGK (KRAS G12R)
MVGQRKVGY

SEQ ID NO: 43288 - protein, 9 aa, synthetic construct
  source 1..9: note = Seed: VVGARGVGK (KRAS G12R)
MVGQRNVGI

SEQ ID NO: 43289 - protein, 9 aa, synthetic construct
  source 1..9: note = Seed: VVGARGVGK (KRAS G12R)
MVGQRNVGL

SEQ ID NO: 43290 - protein, 9 aa, synthetic construct
  source 1..9: note = Seed: VVGARGVGK (KRAS G12R)
MVGQRNVGV

SEQ ID NO: 43291 - protein, 9 aa, synthetic construct
  source 1..9: note = Seed: VVGARGVGK (KRAS G12R)
MVGQRPVGA

SEQ ID NO: 43292 - protein, 9 aa, synthetic construct
  source 1..9: note = Seed: VVGARGVGK (KRAS G12R)
MVGQRPVGI

SEQ ID NO: 43293 - protein, 9 aa, synthetic construct
  source 1..9: note = Seed: VVGARGVGK (KRAS G12R)
MVGQRPVGL

SEQ ID NO: 43294 - protein, 9 aa, synthetic construct
  source 1..9: note = Seed: VVGARGVGK (KRAS G12R)
MVGQRPVGM

SEQ ID NO: 43295 - protein, 9 aa, synthetic construct
  source 1..9: note = Seed: VVGARGVGK (KRAS G12R)
MVGQRPVGV

SEQ ID NO: 43296 - protein, 9 aa, synthetic construct
  source 1..9: note = Seed: VVGARGVGK (KRAS G12R)
MVGQRRVGA

SEQ ID NO: 43297 - protein, 9 aa, synthetic construct
  source 1..9: note = Seed: VVGARGVGK (KRAS G12R)
MVGQRRVGF

SEQ ID NO: 43298 - protein, 9 aa, synthetic construct
  source 1..9: note = Seed: VVGARGVGK (KRAS G12R)
MVGQRRVGI

SEQ ID NO: 43299 - protein, 9 aa, synthetic construct
  source 1..9: note = Seed: VVGARGVGK (KRAS G12R)
MVGQRRVGK

SEQ ID NO: 43300 - protein, 9 aa, synthetic construct
  source 1..9: note = Seed: VVGARGVGK (KRAS G12R)
MVGQRRVGL

SEQ ID NO: 43301 - protein, 9 aa, synthetic construct
  source 1..9: note = Seed: VVGARGVGK (KRAS G12R)
MVGQRRVGM

SEQ ID NO: 43302 - protein, 9 aa, synthetic construct
  source 1..9: note = Seed: VVGARGVGK (KRAS G12R)
MVGQRRVGR

SEQ ID NO: 43303 - protein, 9 aa, synthetic construct
  source 1..9: note = Seed: VVGARGVGK (KRAS G12R)
MVGQRRVGV

SEQ ID NO: 43304 - protein, 9 aa, synthetic construct
  source 1..9: note = Seed: VVGARGVGK (KRAS G12R)
MVGQRRVGY

SEQ ID NO: 43305 - protein, 9 aa, synthetic construct
  source 1..9: note = Seed: VVGARGVGK (KRAS G12R)
MVGQRSVGA

SEQ ID NO: 43306 - protein, 9 aa, synthetic construct
  source 1..9: note = Seed: VVGARGVGK (KRAS G12R)
MVGQRSVGI

SEQ ID NO: 43307 - protein, 9 aa, synthetic construct
  source 1..9: note = Seed: VVGARGVGK (KRAS G12R)
MVGQRSVGL

SEQ ID NO: 43308 - protein, 9 aa, synthetic construct
  source 1..9: note = Seed: VVGARGVGK (KRAS G12R)
MVGQRSVGM

SEQ ID NO: 43309 - protein, 9 aa, synthetic construct
  source 1..9: note = Seed: VVGARGVGK (KRAS G12R)
MVGQRSVGS

SEQ ID NO: 43310 - protein, 9 aa, synthetic construct
  source 1..9: note = Seed: VVGARGVGK (KRAS G12R)
MVGQRSVGT

SEQ ID NO: 43311 - protein, 9 aa, synthetic construct
  source 1..9: note = Seed: VVGARGVGK (KRAS G12R)
MVGQRSVGV

SEQ ID NO: 43312 - protein, 9 aa, synthetic construct
  source 1..9: note = Seed: VVGARGVGK (KRAS G12R)
MVGQRTVGA

SEQ ID NO: 43313 - protein, 9 aa, synthetic construct
  source 1..9: note = Seed: VVGARGVGK (KRAS G12R)
MVGQRTVGI

SEQ ID NO: 43314 - protein, 9 aa, synthetic construct
  source 1..9: note = Seed: VVGARGVGK (KRAS G12R)
MVGQRTVGL

SEQ ID NO: 43315 - protein, 9 aa, synthetic construct
  source 1..9: note = Seed: VVGARGVGK (KRAS G12R)
MVGQRTVGV

SEQ ID NO: 43316 - protein, 9 aa, synthetic construct
  source 1..9: note = Seed: VVGARGVGK (KRAS G12R)
MVGQRVVGA

SEQ ID NO: 43317 - protein, 9 aa, synthetic construct
  source 1..9: note = Seed: VVGARGVGK (KRAS G12R)
MVGQRVVGV

SEQ ID NO: 43318 - protein, 9 aa, synthetic construct
  source 1..9: note = Seed: VVGARGVGK (KRAS G12R)
MVGRRAVGA

SEQ ID NO: 43319 - protein, 9 aa, synthetic construct
  source 1..9: note = Seed: VVGARGVGK (KRAS G12R)
MVGRRAVGF

SEQ ID NO: 43320 - protein, 9 aa, synthetic construct
  source 1..9: note = Seed: VVGARGVGK (KRAS G12R)
MVGRRAVGH

SEQ ID NO: 43321 - protein, 9 aa, synthetic construct
  source 1..9: note = Seed: VVGARGVGK (KRAS G12R)
MVGRRAVGI

SEQ ID NO: 43322 - protein, 9 aa, synthetic construct
  source 1..9: note = Seed: VVGARGVGK (KRAS G12R)
MVGRRAVGK

SEQ ID NO: 43323 - protein, 9 aa, synthetic construct
  source 1..9: note = Seed: VVGARGVGK (KRAS G12R)
MVGRRAVGL

SEQ ID NO: 43324 - protein, 9 aa, synthetic construct
  source 1..9: note = Seed: VVGARGVGK (KRAS G12R)
MVGRRAVGM

SEQ ID NO: 43325 - protein, 9 aa, synthetic construct
  source 1..9: note = Seed: VVGARGVGK (KRAS G12R)
MVGRRAVGQ

SEQ ID NO: 43326 - protein, 9 aa, synthetic construct
  source 1..9: note = Seed: VVGARGVGK (KRAS G12R)
MVGRRAVGR

SEQ ID NO: 43327 - protein, 9 aa, synthetic construct
  source 1..9: note = Seed: VVGARGVGK (KRAS G12R)
MVGRRAVGV

SEQ ID NO: 43328 - protein, 9 aa, synthetic construct
  source 1..9: note = Seed: VVGARGVGK (KRAS G12R)
MVGRRAVGY

SEQ ID NO: 43329 - protein, 9 aa, synthetic construct
  source 1..9: note = Seed: VVGARGVGK (KRAS G12R)
MVGRRGVGR

SEQ ID NO: 43330 - protein, 9 aa, synthetic construct
  source 1..9: note = Seed: VVGARGVGK (KRAS G12R)
MVGRRHVGF

SEQ ID NO: 43331 - protein, 9 aa, synthetic construct
  source 1..9: note = Seed: VVGARGVGK (KRAS G12R)
MVGRRHVGL

SEQ ID NO: 43332 - protein, 9 aa, synthetic construct
  source 1..9: note = Seed: VVGARGVGK (KRAS G12R)
MVGRRHVGM

SEQ ID NO: 43333 - protein, 9 aa, synthetic construct
  source 1..9: note = Seed: VVGARGVGK (KRAS G12R)
MVGRRHVGR

SEQ ID NO: 43334 - protein, 9 aa, synthetic construct
  source 1..9: note = Seed: VVGARGVGK (KRAS G12R)
MVGRRHVGV

SEQ ID NO: 43335 - protein, 9 aa, synthetic construct
  source 1..9: note = Seed: VVGARGVGK (KRAS G12R)
MVGRRHVGY

SEQ ID NO: 43336 - protein, 9 aa, synthetic construct
  source 1..9: note = Seed: VVGARGVGK (KRAS G12R)
MVGRRIVGF

SEQ ID NO: 43337 - protein, 9 aa, synthetic construct
  source 1..9: note = Seed: VVGARGVGK (KRAS G12R)
MVGRRIVGI

SEQ ID NO: 43338 - protein, 9 aa, synthetic construct
  source 1..9: note = Seed: VVGARGVGK (KRAS G12R)
MVGRRIVGM

SEQ ID NO: 43339 - protein, 9 aa, synthetic construct
  source 1..9: note = Seed: VVGARGVGK (KRAS G12R)
MVGRRIVGR

SEQ ID NO: 43340 - protein, 9 aa, synthetic construct
  source 1..9: note = Seed: VVGARGVGK (KRAS G12R)
MVGRRIVGV

SEQ ID NO: 43341 - protein, 9 aa, synthetic construct
  source 1..9: note = Seed: VVGARGVGK (KRAS G12R)
MVGRRIVGY

SEQ ID NO: 43342 - protein, 9 aa, synthetic construct
  source 1..9: note = Seed: VVGARGVGK (KRAS G12R)
MVGRRKVGA

SEQ ID NO: 43343 - protein, 9 aa, synthetic construct
  source 1..9: note = Seed: VVGARGVGK (KRAS G12R)
MVGRRKVGE

SEQ ID NO: 43344 - protein, 9 aa, synthetic construct
  source 1..9: note = Seed: VVGARGVGK (KRAS G12R)
MVGRRKVGF

SEQ ID NO: 43345 - protein, 9 aa, synthetic construct
  source 1..9: note = Seed: VVGARGVGK (KRAS G12R)
MVGRRKVGG

SEQ ID NO: 43346 - protein, 9 aa, synthetic construct
  source 1..9: note = Seed: VVGARGVGK (KRAS G12R)
MVGRRKVGH

SEQ ID NO: 43347 - protein, 9 aa, synthetic construct
  source 1..9: note = Seed: VVGARGVGK (KRAS G12R)
MVGRRKVGI

SEQ ID NO: 43348 - protein, 9 aa, synthetic construct
  source 1..9: note = Seed: VVGARGVGK (KRAS G12R)
MVGRRKVGK

SEQ ID NO: 43349 - protein, 9 aa, synthetic construct
  source 1..9: note = Seed: VVGARGVGK (KRAS G12R)
MVGRRKVGL

SEQ ID NO: 43350 - protein, 9 aa, synthetic construct
  source 1..9: note = Seed: VVGARGVGK (KRAS G12R)
MVGRRKVGM

SEQ ID NO: 43351 - protein, 9 aa, synthetic construct
  source 1..9: note = Seed: VVGARGVGK (KRAS G12R)
MVGRRKVGN

SEQ ID NO: 43352 - protein, 9 aa, synthetic construct
  source 1..9: note = Seed: VVGARGVGK (KRAS G12R)
MVGRRKVGP

SEQ ID NO: 43353 - protein, 9 aa, synthetic construct
  source 1..9: note = Seed: VVGARGVGK (KRAS G12R)
MVGRRKVGQ

SEQ ID NO: 43354 - protein, 9 aa, synthetic construct
  source 1..9: note = Seed: VVGARGVGK (KRAS G12R)
MVGRRKVGR

SEQ ID NO: 43355 - protein, 9 aa, synthetic construct
  source 1..9: note = Seed: VVGARGVGK (KRAS G12R)
MVGRRKVGS

SEQ ID NO: 43356 - protein, 9 aa, synthetic construct
  source 1..9: note = Seed: VVGARGVGK (KRAS G12R)
MVGRRKVGT

SEQ ID NO: 43357 - protein, 9 aa, synthetic construct
  source 1..9: note = Seed: VVGARGVGK (KRAS G12R)
MVGRRKVGV

SEQ ID NO: 43358 - protein, 9 aa, synthetic construct
  source 1..9: note = Seed: VVGARGVGK (KRAS G12R)
MVGRRKVGW

SEQ ID NO: 43359 - protein, 9 aa, synthetic construct
  source 1..9: note = Seed: VVGARGVGK (KRAS G12R)
MVGRRKVGY

SEQ ID NO: 43360 - protein, 9 aa, synthetic construct
  source 1..9: note = Seed: VVGARGVGK (KRAS G12R)
MVGRRLVGR

SEQ ID NO: 43361 - protein, 9 aa, synthetic construct
  source 1..9: note = Seed: VVGARGVGK (KRAS G12R)
MVGRRLVGY

SEQ ID NO: 43362 - protein, 9 aa, synthetic construct
  source 1..9: note = Seed: VVGARGVGK (KRAS G12R)
MVGRRMVGF

SEQ ID NO: 43363 - protein, 9 aa, synthetic construct
  source 1..9: note = Seed: VVGARGVGK (KRAS G12R)
MVGRRMVGI

SEQ ID NO: 43364 - protein, 9 aa, synthetic construct
  source 1..9: note = Seed: VVGARGVGK (KRAS G12R)
MVGRRMVGL

SEQ ID NO: 43365 - protein, 9 aa, synthetic construct
  source 1..9: note = Seed: VVGARGVGK (KRAS G12R)
MVGRRMVGM

SEQ ID NO: 43366 - protein, 9 aa, synthetic construct
  source 1..9: note = Seed: VVGARGVGK (KRAS G12R)
MVGRRMVGR

SEQ ID NO: 43367 - protein, 9 aa, synthetic construct
  source 1..9: note = Seed: VVGARGVGK (KRAS G12R)
MVGRRMVGV

SEQ ID NO: 43368 - protein, 9 aa, synthetic construct
  source 1..9: note = Seed: VVGARGVGK (KRAS G12R)
MVGRRMVGY

SEQ ID NO: 43369 - protein, 9 aa, synthetic construct
  source 1..9: note = Seed: VVGARGVGK (KRAS G12R)
MVGRRNVGF

SEQ ID NO: 43370 - protein, 9 aa, synthetic construct
  source 1..9: note = Seed: VVGARGVGK (KRAS G12R)
MVGRRNVGI

SEQ ID NO: 43371 - protein, 9 aa, synthetic construct
  source 1..9: note = Seed: VVGARGVGK (KRAS G12R)
MVGRRNVGK

SEQ ID NO: 43372 - protein, 9 aa, synthetic construct
  source 1..9: note = Seed: VVGARGVGK (KRAS G12R)
MVGRRNVGL

SEQ ID NO: 43373 - protein, 9 aa, synthetic construct
  source 1..9: note = Seed: VVGARGVGK (KRAS G12R)
MVGRRNVGM

SEQ ID NO: 43374 - protein, 9 aa, synthetic construct
  source 1..9: note = Seed: VVGARGVGK (KRAS G12R)
MVGRRNVGR

SEQ ID NO: 43375 - protein, 9 aa, synthetic construct
  source 1..9: note = Seed: VVGARGVGK (KRAS G12R)
MVGRRNVGV

SEQ ID NO: 43376 - protein, 9 aa, synthetic construct
  source 1..9: note = Seed: VVGARGVGK (KRAS G12R)
MVGRRNVGY

SEQ ID NO: 43377 - protein, 9 aa, synthetic construct
  source 1..9: note = Seed: VVGARGVGK (KRAS G12R)
MVGRRPVGA

SEQ ID NO: 43378 - protein, 9 aa, synthetic construct
  source 1..9: note = Seed: VVGARGVGK (KRAS G12R)
MVGRRPVGF

SEQ ID NO: 43379 - protein, 9 aa, synthetic construct
  source 1..9: note = Seed: VVGARGVGK (KRAS G12R)
MVGRRPVGI

SEQ ID NO: 43380 - protein, 9 aa, synthetic construct
  source 1..9: note = Seed: VVGARGVGK (KRAS G12R)
MVGRRPVGK

SEQ ID NO: 43381 - protein, 9 aa, synthetic construct
  source 1..9: note = Seed: VVGARGVGK (KRAS G12R)
MVGRRPVGL

SEQ ID NO: 43382 - protein, 9 aa, synthetic construct
  source 1..9: note = Seed: VVGARGVGK (KRAS G12R)
MVGRRPVGM

SEQ ID NO: 43383 - protein, 9 aa, synthetic construct
  source 1..9: note = Seed: VVGARGVGK (KRAS G12R)
MVGRRPVGR

SEQ ID NO: 43384 - protein, 9 aa, synthetic construct
  source 1..9: note = Seed: VVGARGVGK (KRAS G12R)
MVGRRPVGS

SEQ ID NO: 43385 - protein, 9 aa, synthetic construct
  source 1..9: note = Seed: VVGARGVGK (KRAS G12R)
MVGRRPVGV

SEQ ID NO: 43386 - protein, 9 aa, synthetic construct
  source 1..9: note = Seed: VVGARGVGK (KRAS G12R)
MVGRRPVGY

SEQ ID NO: 43387 - protein, 9 aa, synthetic construct
  source 1..9: note = Seed: VVGARGVGK (KRAS G12R)
MVGRRQVGF

SEQ ID NO: 43388 - protein, 9 aa, synthetic construct
  source 1..9: note = Seed: VVGARGVGK (KRAS G12R)
MVGRRQVGI

SEQ ID NO: 43389 - protein, 9 aa, synthetic construct
  source 1..9: note = Seed: VVGARGVGK (KRAS G12R)
MVGRRQVGL

SEQ ID NO: 43390 - protein, 9 aa, synthetic construct
  source 1..9: note = Seed: VVGARGVGK (KRAS G12R)
MVGRRQVGM

SEQ ID NO: 43391 - protein, 9 aa, synthetic construct
  source 1..9: note = Seed: VVGARGVGK (KRAS G12R)
MVGRRQVGR

SEQ ID NO: 43392 - protein, 9 aa, synthetic construct
  source 1..9: note = Seed: VVGARGVGK (KRAS G12R)
MVGRRQVGV

SEQ ID NO: 43393 - protein, 9 aa, synthetic construct
  source 1..9: note = Seed: VVGARGVGK (KRAS G12R)
MVGRRQVGY

SEQ ID NO: 43394 - protein, 9 aa, synthetic construct
  source 1..9: note = Seed: VVGARGVGK (KRAS G12R)
MVGRRRVGA

SEQ ID NO: 43395 - protein, 9 aa, synthetic construct
  source 1..9: note = Seed: VVGARGVGK (KRAS G12R)
MVGRRRVGC

SEQ ID NO: 43396 - protein, 9 aa, synthetic construct
  source 1..9: note = Seed: VVGARGVGK (KRAS G12R)
MVGRRRVGD

SEQ ID NO: 43397 - protein, 9 aa, synthetic construct
  source 1..9: note = Seed: VVGARGVGK (KRAS G12R)
MVGRRRVGE

SEQ ID NO: 43398 - protein, 9 aa, synthetic construct
  source 1..9: note = Seed: VVGARGVGK (KRAS G12R)
MVGRRRVGF

SEQ ID NO: 43399 - protein, 9 aa, synthetic construct
  source 1..9: note = Seed: VVGARGVGK (KRAS G12R)
MVGRRRVGG

SEQ ID NO: 43400 - protein, 9 aa, synthetic construct
  source 1..9: note = Seed: VVGARGVGK (KRAS G12R)
MVGRRRVGH

SEQ ID NO: 43401 - protein, 9 aa, synthetic construct
  source 1..9: note = Seed: VVGARGVGK (KRAS G12R)
MVGRRRVGI

SEQ ID NO: 43402 - protein, 9 aa, synthetic construct
  source 1..9: note = Seed: VVGARGVGK (KRAS G12R)
MVGRRRVGK

SEQ ID NO: 43403 - protein, 9 aa, synthetic construct
  source 1..9: note = Seed: VVGARGVGK (KRAS G12R)
MVGRRRVGL

SEQ ID NO: 43404 - protein, 9 aa, synthetic construct
  source 1..9: note = Seed: VVGARGVGK (KRAS G12R)
MVGRRRVGM

SEQ ID NO: 43405 - protein, 9 aa, synthetic construct
  source 1..9: note = Seed: VVGARGVGK (KRAS G12R)
MVGRRRVGN

SEQ ID NO: 43406 - protein, 9 aa, synthetic construct
  source 1..9: note = Seed: VVGARGVGK (KRAS G12R)
MVGRRRVGP

SEQ ID NO: 43407 - protein, 9 aa, synthetic construct
  source 1..9: note = Seed: VVGARGVGK (KRAS G12R)
MVGRRRVGQ

SEQ ID NO: 43408 - protein, 9 aa, synthetic construct
  source 1..9: note = Seed: VVGARGVGK (KRAS G12R)
MVGRRRVGR

SEQ ID NO: 43409 - protein, 9 aa, synthetic construct
  source 1..9: note = Seed: VVGARGVGK (KRAS G12R)
MVGRRRVGS

SEQ ID NO: 43410 - protein, 9 aa, synthetic construct
  source 1..9: note = Seed: VVGARGVGK (KRAS G12R)
MVGRRRVGT

SEQ ID NO: 43411 - protein, 9 aa, synthetic construct
  source 1..9: note = Seed: VVGARGVGK (KRAS G12R)
MVGRRRVGV

SEQ ID NO: 43412 - protein, 9 aa, synthetic construct
  source 1..9: note = Seed: VVGARGVGK (KRAS G12R)
MVGRRRVGW

SEQ ID NO: 43413 - protein, 9 aa, synthetic construct
  source 1..9: note = Seed: VVGARGVGK (KRAS G12R)
MVGRRRVGY

SEQ ID NO: 43414 - protein, 9 aa, synthetic construct
  source 1..9: note = Seed: VVGARGVGK (KRAS G12R)
MVGRRSVGF

SEQ ID NO: 43415 - protein, 9 aa, synthetic construct
  source 1..9: note = Seed: VVGARGVGK (KRAS G12R)
MVGRRSVGI

SEQ ID NO: 43416 - protein, 9 aa, synthetic construct
  source 1..9: note = Seed: VVGARGVGK (KRAS G12R)
MVGRRSVGK

SEQ ID NO: 43417 - protein, 9 aa, synthetic construct
  source 1..9: note = Seed: VVGARGVGK (KRAS G12R)
MVGRRSVGL

SEQ ID NO: 43418 - protein, 9 aa, synthetic construct
  source 1..9: note = Seed: VVGARGVGK (KRAS G12R)
MVGRRSVGM

SEQ ID NO: 43419 - protein, 9 aa, synthetic construct
  source 1..9: note = Seed: VVGARGVGK (KRAS G12R)
MVGRRSVGR

SEQ ID NO: 43420 - protein, 9 aa, synthetic construct
  source 1..9: note = Seed: VVGARGVGK (KRAS G12R)
MVGRRSVGV

SEQ ID NO: 43421 - protein, 9 aa, synthetic construct
  source 1..9: note = Seed: VVGARGVGK (KRAS G12R)
MVGRRSVGY

SEQ ID NO: 43422 - protein, 9 aa, synthetic construct
  source 1..9: note = Seed: VVGARGVGK (KRAS G12R)
MVGRRTVGF

SEQ ID NO: 43423 - protein, 9 aa, synthetic construct
  source 1..9: note = Seed: VVGARGVGK (KRAS G12R)
MVGRRTVGK

SEQ ID NO: 43424 - protein, 9 aa, synthetic construct
  source 1..9: note = Seed: VVGARGVGK (KRAS G12R)
MVGRRTVGL

SEQ ID NO: 43425 - protein, 9 aa, synthetic construct
  source 1..9: note = Seed: VVGARGVGK (KRAS G12R)
MVGRRTVGM

SEQ ID NO: 43426 - protein, 9 aa, synthetic construct
  source 1..9: note = Seed: VVGARGVGK (KRAS G12R)
MVGRRTVGR

SEQ ID NO: 43427 - protein, 9 aa, synthetic construct
  source 1..9: note = Seed: VVGARGVGK (KRAS G12R)
MVGRRTVGY

SEQ ID NO: 43428 - protein, 9 aa, synthetic construct
  source 1..9: note = Seed: VVGARGVGK (KRAS G12R)
MVGRRVVGA

SEQ ID NO: 43429 - protein, 9 aa, synthetic construct
  source 1..9: note = Seed: VVGARGVGK (KRAS G12R)
MVGRRVVGF

SEQ ID NO: 43430 - protein, 9 aa, synthetic construct
  source 1..9: note = Seed: VVGARGVGK (KRAS G12R)
MVGRRVVGI

SEQ ID NO: 43431 - protein, 9 aa, synthetic construct
  source 1..9: note = Seed: VVGARGVGK (KRAS G12R)
MVGRRVVGK

SEQ ID NO: 43432 - protein, 9 aa, synthetic construct
  source 1..9: note = Seed: VVGARGVGK (KRAS G12R)
MVGRRVVGL

SEQ ID NO: 43433 - protein, 9 aa, synthetic construct
  source 1..9: note = Seed: VVGARGVGK (KRAS G12R)
MVGRRVVGM

SEQ ID NO: 43434 - protein, 9 aa, synthetic construct
  source 1..9: note = Seed: VVGARGVGK (KRAS G12R)
MVGRRVVGR

SEQ ID NO: 43435 - protein, 9 aa, synthetic construct
  source 1..9: note = Seed: VVGARGVGK (KRAS G12R)
MVGRRVVGV

SEQ ID NO: 43436 - protein, 9 aa, synthetic construct
  source 1..9: note = Seed: VVGARGVGK (KRAS G12R)
MVGRRVVGY

SEQ ID NO: 43437 - protein, 9 aa, synthetic construct
  source 1..9: note = Seed: VVGARGVGK (KRAS G12R)
MVGSRAVGA

SEQ ID NO: 43438 - protein, 9 aa, synthetic construct
  source 1..9: note = Seed: VVGARGVGK (KRAS G12R)
MVGSRAVGC

SEQ ID NO: 43439 - protein, 9 aa, synthetic construct
  source 1..9: note = Seed: VVGARGVGK (KRAS G12R)
MVGSRAVGF

SEQ ID NO: 43440 - protein, 9 aa, synthetic construct
  source 1..9: note = Seed: VVGARGVGK (KRAS G12R)
MVGSRAVGG

SEQ ID NO: 43441 - protein, 9 aa, synthetic construct
  source 1..9: note = Seed: VVGARGVGK (KRAS G12R)
MVGSRAVGH

SEQ ID NO: 43442 - protein, 9 aa, synthetic construct
  source 1..9: note = Seed: VVGARGVGK (KRAS G12R)
MVGSRAVGI

SEQ ID NO: 43443 - protein, 9 aa, synthetic construct
  source 1..9: note = Seed: VVGARGVGK (KRAS G12R)
MVGSRAVGK

SEQ ID NO: 43444 - protein, 9 aa, synthetic construct
  source 1..9: note = Seed: VVGARGVGK (KRAS G12R)
MVGSRAVGL

SEQ ID NO: 43445 - protein, 9 aa, synthetic construct
  source 1..9: note = Seed: VVGARGVGK (KRAS G12R)
MVGSRAVGM

SEQ ID NO: 43446 - protein, 9 aa, synthetic construct
  source 1..9: note = Seed: VVGARGVGK (KRAS G12R)
MVGSRAVGN

SEQ ID NO: 43447 - protein, 9 aa, synthetic construct
  source 1..9: note = Seed: VVGARGVGK (KRAS G12R)
MVGSRAVGQ

SEQ ID NO: 43448 - protein, 9 aa, synthetic construct
  source 1..9: note = Seed: VVGARGVGK (KRAS G12R)
MVGSRAVGR

SEQ ID NO: 43449 - protein, 9 aa, synthetic construct
  source 1..9: note = Seed: VVGARGVGK (KRAS G12R)
MVGSRAVGS

SEQ ID NO: 43450 - protein, 9 aa, synthetic construct
  source 1..9: note = Seed: VVGARGVGK (KRAS G12R)
MVGSRAVGT

SEQ ID NO: 43451 - protein, 9 aa, synthetic construct
  source 1..9: note = Seed: VVGARGVGK (KRAS G12R)
MVGSRAVGV

SEQ ID NO: 43452 - protein, 9 aa, synthetic construct
  source 1..9: note = Seed: VVGARGVGK (KRAS G12R)
MVGSRAVGW

SEQ ID NO: 43453 - protein, 9 aa, synthetic construct
  source 1..9: note = Seed: VVGARGVGK (KRAS G12R)
MVGSRAVGY

SEQ ID NO: 43454 - protein, 9 aa, synthetic construct
  source 1..9: note = Seed: VVGARGVGK (KRAS G12R)
MVGSRGVGA

SEQ ID NO: 43455 - protein, 9 aa, synthetic construct
  source 1..9: note = Seed: VVGARGVGK (KRAS G12R)
MVGSRGVGF

SEQ ID NO: 43456 - protein, 9 aa, synthetic construct
  source 1..9: note = Seed: VVGARGVGK (KRAS G12R)
MVGSRGVGI

SEQ ID NO: 43457 - protein, 9 aa, synthetic construct
  source 1..9: note = Seed: VVGARGVGK (KRAS G12R)
MVGSRGVGL

SEQ ID NO: 43458 - protein, 9 aa, synthetic construct
  source 1..9: note = Seed: VVGARGVGK (KRAS G12R)
MVGSRGVGM

SEQ ID NO: 43459 - protein, 9 aa, synthetic construct
  source 1..9: note = Seed: VVGARGVGK (KRAS G12R)
MVGSRGVGS

SEQ ID NO: 43460 - protein, 9 aa, synthetic construct
  source 1..9: note = Seed: VVGARGVGK (KRAS G12R)
MVGSRGVGT

SEQ ID NO: 43461 - protein, 9 aa, synthetic construct
  source 1..9: note = Seed: VVGARGVGK (KRAS G12R)
MVGSRGVGV

SEQ ID NO: 43462 - protein, 9 aa, synthetic construct
  source 1..9: note = Seed: VVGARGVGK (KRAS G12R)
MVGSRIVGA

SEQ ID NO: 43463 - protein, 9 aa, synthetic construct
  source 1..9: note = Seed: VVGARGVGK (KRAS G12R)
MVGSRIVGG

SEQ ID NO: 43464 - protein, 9 aa, synthetic construct
  source 1..9: note = Seed: VVGARGVGK (KRAS G12R)
MVGSRIVGH

SEQ ID NO: 43465 - protein, 9 aa, synthetic construct
  source 1..9: note = Seed: VVGARGVGK (KRAS G12R)
MVGSRIVGI

SEQ ID NO: 43466 - protein, 9 aa, synthetic construct
  source 1..9: note = Seed: VVGARGVGK (KRAS G12R)
MVGSRIVGL

SEQ ID NO: 43467 - protein, 9 aa, synthetic construct
  source 1..9: note = Seed: VVGARGVGK (KRAS G12R)
MVGSRIVGM

SEQ ID NO: 43468 - protein, 9 aa, synthetic construct
  source 1..9: note = Seed: VVGARGVGK (KRAS G12R)
MVGSRIVGQ

SEQ ID NO: 43469 - protein, 9 aa, synthetic construct
  source 1..9: note = Seed: VVGARGVGK (KRAS G12R)
MVGSRIVGR

SEQ ID NO: 43470 - protein, 9 aa, synthetic construct
  source 1..9: note = Seed: VVGARGVGK (KRAS G12R)
MVGSRIVGS

SEQ ID NO: 43471 - protein, 9 aa, synthetic construct
  source 1..9: note = Seed: VVGARGVGK (KRAS G12R)
MVGSRIVGT

SEQ ID NO: 43472 - protein, 9 aa, synthetic construct
  source 1..9: note = Seed: VVGARGVGK (KRAS G12R)
MVGSRIVGV

SEQ ID NO: 43473 - protein, 9 aa, synthetic construct
  source 1..9: note = Seed: VVGARGVGK (KRAS G12R)
MVGSRKVGA

SEQ ID NO: 43474 - protein, 9 aa, synthetic construct
  source 1..9: note = Seed: VVGARGVGK (KRAS G12R)
MVGSRKVGF

SEQ ID NO: 43475 - protein, 9 aa, synthetic construct
  source 1..9: note = Seed: VVGARGVGK (KRAS G12R)
MVGSRKVGI

SEQ ID NO: 43476 - protein, 9 aa, synthetic construct
  source 1..9: note = Seed: VVGARGVGK (KRAS G12R)
MVGSRKVGK

SEQ ID NO: 43477 - protein, 9 aa, synthetic construct
  source 1..9: note = Seed: VVGARGVGK (KRAS G12R)
MVGSRKVGL

SEQ ID NO: 43478 - protein, 9 aa, synthetic construct
  source 1..9: note = Seed: VVGARGVGK (KRAS G12R)
MVGSRKVGM

SEQ ID NO: 43479 - protein, 9 aa, synthetic construct
  source 1..9: note = Seed: VVGARGVGK (KRAS G12R)
MVGSRKVGR

SEQ ID NO: 43480 - protein, 9 aa, synthetic construct
  source 1..9: note = Seed: VVGARGVGK (KRAS G12R)
MVGSRKVGV

SEQ ID NO: 43481 - protein, 9 aa, synthetic construct
  source 1..9: note = Seed: VVGARGVGK (KRAS G12R)
MVGSRKVGY

SEQ ID NO: 43482 - protein, 9 aa, synthetic construct
  source 1..9: note = Seed: VVGARGVGK (KRAS G12R)
MVGSRLVGA

SEQ ID NO: 43483 - protein, 9 aa, synthetic construct
  source 1..9: note = Seed: VVGARGVGK (KRAS G12R)
MVGSRLVGR

SEQ ID NO: 43484 - protein, 9 aa, synthetic construct
  source 1..9: note = Seed: VVGARGVGK (KRAS G12R)
MVGSRLVGS

SEQ ID NO: 43485 - protein, 9 aa, synthetic construct
  source 1..9: note = Seed: VVGARGVGK (KRAS G12R)
MVGSRMVGA

SEQ ID NO: 43486 - protein, 9 aa, synthetic construct
  source 1..9: note = Seed: VVGARGVGK (KRAS G12R)
MVGSRMVGI

SEQ ID NO: 43487 - protein, 9 aa, synthetic construct
  source 1..9: note = Seed: VVGARGVGK (KRAS G12R)
MVGSRMVGR

SEQ ID NO: 43488 - protein, 9 aa, synthetic construct
  source 1..9: note = Seed: VVGARGVGK (KRAS G12R)
MVGSRMVGS

SEQ ID NO: 43489 - protein, 9 aa, synthetic construct
  source 1..9: note = Seed: VVGARGVGK (KRAS G12R)
MVGSRMVGV

SEQ ID NO: 43490 - protein, 9 aa, synthetic construct
  source 1..9: note = Seed: VVGARGVGK (KRAS G12R)
MVGSRNVGA

SEQ ID NO: 43491 - protein, 9 aa, synthetic construct
  source 1..9: note = Seed: VVGARGVGK (KRAS G12R)
MVGSRNVGI

SEQ ID NO: 43492 - protein, 9 aa, synthetic construct
  source 1..9: note = Seed: VVGARGVGK (KRAS G12R)
MVGSRNVGL

SEQ ID NO: 43493 - protein, 9 aa, synthetic construct
  source 1..9: note = Seed: VVGARGVGK (KRAS G12R)
MVGSRNVGV

SEQ ID NO: 43494 - protein, 9 aa, synthetic construct
  source 1..9: note = Seed: VVGARGVGK (KRAS G12R)
MVGSRPVGA

SEQ ID NO: 43495 - protein, 9 aa, synthetic construct
  source 1..9: note = Seed: VVGARGVGK (KRAS G12R)
MVGSRPVGF

SEQ ID NO: 43496 - protein, 9 aa, synthetic construct
  source 1..9: note = Seed: VVGARGVGK (KRAS G12R)
MVGSRPVGG

SEQ ID NO: 43497 - protein, 9 aa, synthetic construct
  source 1..9: note = Seed: VVGARGVGK (KRAS G12R)
MVGSRPVGH

SEQ ID NO: 43498 - protein, 9 aa, synthetic construct
  source 1..9: note = Seed: VVGARGVGK (KRAS G12R)
MVGSRPVGI

SEQ ID NO: 43499 - protein, 9 aa, synthetic construct
  source 1..9: note = Seed: VVGARGVGK (KRAS G12R)
MVGSRPVGL

SEQ ID NO: 43500 - protein, 9 aa, synthetic construct
  source 1..9: note = Seed: VVGARGVGK (KRAS G12R)
MVGSRPVGM

SEQ ID NO: 43501 - protein, 9 aa, synthetic construct
  source 1..9: note = Seed: VVGARGVGK (KRAS G12R)
MVGSRPVGN

SEQ ID NO: 43502 - protein, 9 aa, synthetic construct
  source 1..9: note = Seed: VVGARGVGK (KRAS G12R)
MVGSRPVGQ

SEQ ID NO: 43503 - protein, 9 aa, synthetic construct
  source 1..9: note = Seed: VVGARGVGK (KRAS G12R)
MVGSRPVGR

SEQ ID NO: 43504 - protein, 9 aa, synthetic construct
  source 1..9: note = Seed: VVGARGVGK (KRAS G12R)
MVGSRPVGS

SEQ ID NO: 43505 - protein, 9 aa, synthetic construct
  source 1..9: note = Seed: VVGARGVGK (KRAS G12R)
MVGSRPVGT

SEQ ID NO: 43506 - protein, 9 aa, synthetic construct
  source 1..9: note = Seed: VVGARGVGK (KRAS G12R)
MVGSRPVGV

SEQ ID NO: 43507 - protein, 9 aa, synthetic construct
  source 1..9: note = Seed: VVGARGVGK (KRAS G12R)
MVGSRPVGW

SEQ ID NO: 43508 - protein, 9 aa, synthetic construct
  source 1..9: note = Seed: VVGARGVGK (KRAS G12R)
MVGSRPVGY

SEQ ID NO: 43509 - protein, 9 aa, synthetic construct
  source 1..9: note = Seed: VVGARGVGK (KRAS G12R)
MVGSRRVGA

SEQ ID NO: 43510 - protein, 9 aa, synthetic construct
  source 1..9: note = Seed: VVGARGVGK (KRAS G12R)
MVGSRRVGF

SEQ ID NO: 43511 - protein, 9 aa, synthetic construct
  source 1..9: note = Seed: VVGARGVGK (KRAS G12R)
MVGSRRVGH

SEQ ID NO: 43512 - protein, 9 aa, synthetic construct
  source 1..9: note = Seed: VVGARGVGK (KRAS G12R)
MVGSRRVGI

SEQ ID NO: 43513 - protein, 9 aa, synthetic construct
  source 1..9: note = Seed: VVGARGVGK (KRAS G12R)
MVGSRRVGK

SEQ ID NO: 43514 - protein, 9 aa, synthetic construct
  source 1..9: note = Seed: VVGARGVGK (KRAS G12R)
MVGSRRVGL

SEQ ID NO: 43515 - protein, 9 aa, synthetic construct
  source 1..9: note = Seed: VVGARGVGK (KRAS G12R)
MVGSRRVGM

SEQ ID NO: 43516 - protein, 9 aa, synthetic construct
  source 1..9: note = Seed: VVGARGVGK (KRAS G12R)
MVGSRRVGN

SEQ ID NO: 43517 - protein, 9 aa, synthetic construct
  source 1..9: note = Seed: VVGARGVGK (KRAS G12R)
MVGSRRVGQ

SEQ ID NO: 43518 - protein, 9 aa, synthetic construct
  source 1..9: note = Seed: VVGARGVGK (KRAS G12R)
MVGSRRVGR

SEQ ID NO: 43519 - protein, 9 aa, synthetic construct
  source 1..9: note = Seed: VVGARGVGK (KRAS G12R)
MVGSRRVGS

SEQ ID NO: 43520 - protein, 9 aa, synthetic construct
  source 1..9: note = Seed: VVGARGVGK (KRAS G12R)
MVGSRRVGT

SEQ ID NO: 43521 - protein, 9 aa, synthetic construct
  source 1..9: note = Seed: VVGARGVGK (KRAS G12R)
MVGSRRVGV

SEQ ID NO: 43522 - protein, 9 aa, synthetic construct
  source 1..9: note = Seed: VVGARGVGK (KRAS G12R)
MVGSRRVGW

SEQ ID NO: 43523 - protein, 9 aa, synthetic construct
  source 1..9: note = Seed: VVGARGVGK (KRAS G12R)
MVGSRRVGY

SEQ ID NO: 43524 - protein, 9 aa, synthetic construct
  source 1..9: note = Seed: VVGARGVGK (KRAS G12R)
MVGSRSVGA

SEQ ID NO: 43525 - protein, 9 aa, synthetic construct
  source 1..9: note = Seed: VVGARGVGK (KRAS G12R)
MVGSRSVGF

SEQ ID NO: 43526 - protein, 9 aa, synthetic construct
  source 1..9: note = Seed: VVGARGVGK (KRAS G12R)
MVGSRSVGI

SEQ ID NO: 43527 - protein, 9 aa, synthetic construct
  source 1..9: note = Seed: VVGARGVGK (KRAS G12R)
MVGSRSVGL

SEQ ID NO: 43528 - protein, 9 aa, synthetic construct
  source 1..9: note = Seed: VVGARGVGK (KRAS G12R)
MVGSRSVGM

SEQ ID NO: 43529 - protein, 9 aa, synthetic construct
  source 1..9: note = Seed: VVGARGVGK (KRAS G12R)
MVGSRSVGN

SEQ ID NO: 43530 - protein, 9 aa, synthetic construct
  source 1..9: note = Seed: VVGARGVGK (KRAS G12R)
MVGSRSVGR

SEQ ID NO: 43531 - protein, 9 aa, synthetic construct
  source 1..9: note = Seed: VVGARGVGK (KRAS G12R)
MVGSRSVGS

SEQ ID NO: 43532 - protein, 9 aa, synthetic construct
  source 1..9: note = Seed: VVGARGVGK (KRAS G12R)
MVGSRSVGT

SEQ ID NO: 43533 - protein, 9 aa, synthetic construct
  source 1..9: note = Seed: VVGARGVGK (KRAS G12R)
MVGSRSVGV

SEQ ID NO: 43534 - protein, 9 aa, synthetic construct
  source 1..9: note = Seed: VVGARGVGK (KRAS G12R)
MVGSRSVGY

SEQ ID NO: 43535 - protein, 9 aa, synthetic construct
  source 1..9: note = Seed: VVGARGVGK (KRAS G12R)
MVGSRTVGA

SEQ ID NO: 43536 - protein, 9 aa, synthetic construct
  source 1..9: note = Seed: VVGARGVGK (KRAS G12R)
MVGSRTVGF

SEQ ID NO: 43537 - protein, 9 aa, synthetic construct
  source 1..9: note = Seed: VVGARGVGK (KRAS G12R)
MVGSRTVGI

SEQ ID NO: 43538 - protein, 9 aa, synthetic construct
  source 1..9: note = Seed: VVGARGVGK (KRAS G12R)
MVGSRTVGL

SEQ ID NO: 43539 - protein, 9 aa, synthetic construct
  source 1..9: note = Seed: VVGARGVGK (KRAS G12R)
MVGSRTVGM

SEQ ID NO: 43540 - protein, 9 aa, synthetic construct
  source 1..9: note = Seed: VVGARGVGK (KRAS G12R)
MVGSRTVGR

SEQ ID NO: 43541 - protein, 9 aa, synthetic construct
  source 1..9: note = Seed: VVGARGVGK (KRAS G12R)
MVGSRTVGS

SEQ ID NO: 43542 - protein, 9 aa, synthetic construct
  source 1..9: note = Seed: VVGARGVGK (KRAS G12R)
MVGSRTVGT

SEQ ID NO: 43543 - protein, 9 aa, synthetic construct
  source 1..9: note = Seed: VVGARGVGK (KRAS G12R)
MVGSRTVGV

SEQ ID NO: 43544 - protein, 9 aa, synthetic construct
  source 1..9: note = Seed: VVGARGVGK (KRAS G12R)
MVGSRVVGA

SEQ ID NO: 43545 - protein, 9 aa, synthetic construct
  source 1..9: note = Seed: VVGARGVGK (KRAS G12R)
MVGSRVVGF

SEQ ID NO: 43546 - protein, 9 aa, synthetic construct
  source 1..9: note = Seed: VVGARGVGK (KRAS G12R)
MVGSRVVGG

SEQ ID NO: 43547 - protein, 9 aa, synthetic construct
  source 1..9: note = Seed: VVGARGVGK (KRAS G12R)
MVGSRVVGH

SEQ ID NO: 43548 - protein, 9 aa, synthetic construct
  source 1..9: note = Seed: VVGARGVGK (KRAS G12R)
MVGSRVVGI

SEQ ID NO: 43549 - protein, 9 aa, synthetic construct
  source 1..9: note = Seed: VVGARGVGK (KRAS G12R)
MVGSRVVGL

SEQ ID NO: 43550 - protein, 9 aa, synthetic construct
  source 1..9: note = Seed: VVGARGVGK (KRAS G12R)
MVGSRVVGM

SEQ ID NO: 43551 - protein, 9 aa, synthetic construct
  source 1..9: note = Seed: VVGARGVGK (KRAS G12R)
MVGSRVVGN

SEQ ID NO: 43552 - protein, 9 aa, synthetic construct
  source 1..9: note = Seed: VVGARGVGK (KRAS G12R)
MVGSRVVGR

SEQ ID NO: 43553 - protein, 9 aa, synthetic construct
  source 1..9: note = Seed: VVGARGVGK (KRAS G12R)
MVGSRVVGS

SEQ ID NO: 43554 - protein, 9 aa, synthetic construct
  source 1..9: note = Seed: VVGARGVGK (KRAS G12R)
MVGSRVVGT

SEQ ID NO: 43555 - protein, 9 aa, synthetic construct
  source 1..9: note = Seed: VVGARGVGK (KRAS G12R)
MVGSRVVGV

SEQ ID NO: 43556 - protein, 9 aa, synthetic construct
  source 1..9: note = Seed: VVGARGVGK (KRAS G12R)
MVGTRAVGA

SEQ ID NO: 43557 - protein, 9 aa, synthetic construct
  source 1..9: note = Seed: VVGARGVGK (KRAS G12R)
MVGTRAVGF

SEQ ID NO: 43558 - protein, 9 aa, synthetic construct
  source 1..9: note = Seed: VVGARGVGK (KRAS G12R)
MVGTRAVGI

SEQ ID NO: 43559 - protein, 9 aa, synthetic construct
  source 1..9: note = Seed: VVGARGVGK (KRAS G12R)
MVGTRAVGL

SEQ ID NO: 43560 - protein, 9 aa, synthetic construct
  source 1..9: note = Seed: VVGARGVGK (KRAS G12R)
MVGTRAVGM

SEQ ID NO: 43561 - protein, 9 aa, synthetic construct
  source 1..9: note = Seed: VVGARGVGK (KRAS G12R)
MVGTRAVGR

SEQ ID NO: 43562 - protein, 9 aa, synthetic construct
  source 1..9: note = Seed: VVGARGVGK (KRAS G12R)
MVGTRAVGS

SEQ ID NO: 43563 - protein, 9 aa, synthetic construct
  source 1..9: note = Seed: VVGARGVGK (KRAS G12R)
MVGTRAVGT

SEQ ID NO: 43564 - protein, 9 aa, synthetic construct
  source 1..9: note = Seed: VVGARGVGK (KRAS G12R)
MVGTRAVGV

SEQ ID NO: 43565 - protein, 9 aa, synthetic construct
  source 1..9: note = Seed: VVGARGVGK (KRAS G12R)
MVGTRAVGY

SEQ ID NO: 43566 - protein, 9 aa, synthetic construct
  source 1..9: note = Seed: VVGARGVGK (KRAS G12R)
MVGTRGVGA

SEQ ID NO: 43567 - protein, 9 aa, synthetic construct
  source 1..9: note = Seed: VVGARGVGK (KRAS G12R)
MVGTRGVGF

SEQ ID NO: 43568 - protein, 9 aa, synthetic construct
  source 1..9: note = Seed: VVGARGVGK (KRAS G12R)
MVGTRGVGI

SEQ ID NO: 43569 - protein, 9 aa, synthetic construct
  source 1..9: note = Seed: VVGARGVGK (KRAS G12R)
MVGTRGVGL

SEQ ID NO: 43570 - protein, 9 aa, synthetic construct
  source 1..9: note = Seed: VVGARGVGK (KRAS G12R)
MVGTRGVGM

SEQ ID NO: 43571 - protein, 9 aa, synthetic construct
  source 1..9: note = Seed: VVGARGVGK (KRAS G12R)
MVGTRGVGV

SEQ ID NO: 43572 - protein, 9 aa, synthetic construct
  source 1..9: note = Seed: VVGARGVGK (KRAS G12R)
MVGTRIVGA

SEQ ID NO: 43573 - protein, 9 aa, synthetic construct
  source 1..9: note = Seed: VVGARGVGK (KRAS G12R)
MVGTRIVGI

SEQ ID NO: 43574 - protein, 9 aa, synthetic construct
  source 1..9: note = Seed: VVGARGVGK (KRAS G12R)
MVGTRIVGS

SEQ ID NO: 43575 - protein, 9 aa, synthetic construct
  source 1..9: note = Seed: VVGARGVGK (KRAS G12R)
MVGTRKVGF

SEQ ID NO: 43576 - protein, 9 aa, synthetic construct
  source 1..9: note = Seed: VVGARGVGK (KRAS G12R)
MVGTRKVGI

SEQ ID NO: 43577 - protein, 9 aa, synthetic construct
  source 1..9: note = Seed: VVGARGVGK (KRAS G12R)
MVGTRKVGK

SEQ ID NO: 43578 - protein, 9 aa, synthetic construct
  source 1..9: note = Seed: VVGARGVGK (KRAS G12R)
MVGTRKVGL

SEQ ID NO: 43579 - protein, 9 aa, synthetic construct
  source 1..9: note = Seed: VVGARGVGK (KRAS G12R)
MVGTRKVGM

SEQ ID NO: 43580 - protein, 9 aa, synthetic construct
  source 1..9: note = Seed: VVGARGVGK (KRAS G12R)
MVGTRKVGR

SEQ ID NO: 43581 - protein, 9 aa, synthetic construct
  source 1..9: note = Seed: VVGARGVGK (KRAS G12R)
MVGTRKVGV

SEQ ID NO: 43582 - protein, 9 aa, synthetic construct
  source 1..9: note = Seed: VVGARGVGK (KRAS G12R)
MVGTRKVGY

SEQ ID NO: 43583 - protein, 9 aa, synthetic construct
  source 1..9: note = Seed: VVGARGVGK (KRAS G12R)
MVGTRNVGI

SEQ ID NO: 43584 - protein, 9 aa, synthetic construct
  source 1..9: note = Seed: VVGARGVGK (KRAS G12R)
MVGTRNVGL

SEQ ID NO: 43585 - protein, 9 aa, synthetic construct
  source 1..9: note = Seed: VVGARGVGK (KRAS G12R)
MVGTRNVGV

SEQ ID NO: 43586 - protein, 9 aa, synthetic construct
  source 1..9: note = Seed: VVGARGVGK (KRAS G12R)
MVGTRPVGA

SEQ ID NO: 43587 - protein, 9 aa, synthetic construct
  source 1..9: note = Seed: VVGARGVGK (KRAS G12R)
MVGTRPVGF

SEQ ID NO: 43588 - protein, 9 aa, synthetic construct
  source 1..9: note = Seed: VVGARGVGK (KRAS G12R)
MVGTRPVGI

SEQ ID NO: 43589 - protein, 9 aa, synthetic construct
  source 1..9: note = Seed: VVGARGVGK (KRAS G12R)
MVGTRPVGL

SEQ ID NO: 43590 - protein, 9 aa, synthetic construct
  source 1..9: note = Seed: VVGARGVGK (KRAS G12R)
MVGTRPVGM

SEQ ID NO: 43591 - protein, 9 aa, synthetic construct
  source 1..9: note = Seed: VVGARGVGK (KRAS G12R)
MVGTRPVGS

SEQ ID NO: 43592 - protein, 9 aa, synthetic construct
  source 1..9: note = Seed: VVGARGVGK (KRAS G12R)
MVGTRPVGV

SEQ ID NO: 43593 - protein, 9 aa, synthetic construct
  source 1..9: note = Seed: VVGARGVGK (KRAS G12R)
MVGTRRVGA

SEQ ID NO: 43594 - protein, 9 aa, synthetic construct
  source 1..9: note = Seed: VVGARGVGK (KRAS G12R)
MVGTRRVGF

SEQ ID NO: 43595 - protein, 9 aa, synthetic construct
  source 1..9: note = Seed: VVGARGVGK (KRAS G12R)
MVGTRRVGH

SEQ ID NO: 43596 - protein, 9 aa, synthetic construct
  source 1..9: note = Seed: VVGARGVGK (KRAS G12R)
MVGTRRVGI

SEQ ID NO: 43597 - protein, 9 aa, synthetic construct
  source 1..9: note = Seed: VVGARGVGK (KRAS G12R)
MVGTRRVGK

SEQ ID NO: 43598 - protein, 9 aa, synthetic construct
  source 1..9: note = Seed: VVGARGVGK (KRAS G12R)
MVGTRRVGL

SEQ ID NO: 43599 - protein, 9 aa, synthetic construct
  source 1..9: note = Seed: VVGARGVGK (KRAS G12R)
MVGTRRVGM

SEQ ID NO: 43600 - protein, 9 aa, synthetic construct
  source 1..9: note = Seed: VVGARGVGK (KRAS G12R)
MVGTRRVGR

SEQ ID NO: 43601 - protein, 9 aa, synthetic construct
  source 1..9: note = Seed: VVGARGVGK (KRAS G12R)
MVGTRRVGS

SEQ ID NO: 43602 - protein, 9 aa, synthetic construct
  source 1..9: note = Seed: VVGARGVGK (KRAS G12R)
MVGTRRVGT

SEQ ID NO: 43603 - protein, 9 aa, synthetic construct
  source 1..9: note = Seed: VVGARGVGK (KRAS G12R)
MVGTRRVGV

SEQ ID NO: 43604 - protein, 9 aa, synthetic construct
  source 1..9: note = Seed: VVGARGVGK (KRAS G12R)
MVGTRRVGW

SEQ ID NO: 43605 - protein, 9 aa, synthetic construct
  source 1..9: note = Seed: VVGARGVGK (KRAS G12R)
MVGTRRVGY

SEQ ID NO: 43606 - protein, 9 aa, synthetic construct
  source 1..9: note = Seed: VVGARGVGK (KRAS G12R)
MVGTRSVGA

SEQ ID NO: 43607 - protein, 9 aa, synthetic construct
  source 1..9: note = Seed: VVGARGVGK (KRAS G12R)
MVGTRSVGF

SEQ ID NO: 43608 - protein, 9 aa, synthetic construct
  source 1..9: note = Seed: VVGARGVGK (KRAS G12R)
MVGTRSVGI

SEQ ID NO: 43609 - protein, 9 aa, synthetic construct
  source 1..9: note = Seed: VVGARGVGK (KRAS G12R)
MVGTRSVGL

SEQ ID NO: 43610 - protein, 9 aa, synthetic construct
  source 1..9: note = Seed: VVGARGVGK (KRAS G12R)
MVGTRSVGM

SEQ ID NO: 43611 - protein, 9 aa, synthetic construct
  source 1..9: note = Seed: VVGARGVGK (KRAS G12R)
MVGTRSVGT

SEQ ID NO: 43612 - protein, 9 aa, synthetic construct
  source 1..9: note = Seed: VVGARGVGK (KRAS G12R)
MVGTRSVGV

SEQ ID NO: 43613 - protein, 9 aa, synthetic construct
  source 1..9: note = Seed: VVGARGVGK (KRAS G12R)
MVGTRSVGY

SEQ ID NO: 43614 - protein, 9 aa, synthetic construct
  source 1..9: note = Seed: VVGARGVGK (KRAS G12R)
MVGTRTVGF

SEQ ID NO: 43615 - protein, 9 aa, synthetic construct
  source 1..9: note = Seed: VVGARGVGK (KRAS G12R)
MVGTRTVGI

SEQ ID NO: 43616 - protein, 9 aa, synthetic construct
  source 1..9: note = Seed: VVGARGVGK (KRAS G12R)
MVGTRTVGL

SEQ ID NO: 43617 - protein, 9 aa, synthetic construct
  source 1..9: note = Seed: VVGARGVGK (KRAS G12R)
MVGTRTVGM

SEQ ID NO: 43618 - protein, 9 aa, synthetic construct
  source 1..9: note = Seed: VVGARGVGK (KRAS G12R)
MVGTRTVGV

SEQ ID NO: 43619 - protein, 9 aa, synthetic construct
  source 1..9: note = Seed: VVGARGVGK (KRAS G12R)
MVGTRVVGA

SEQ ID NO: 43620 - protein, 9 aa, synthetic construct
  source 1..9: note = Seed: VVGARGVGK (KRAS G12R)
MVGTRVVGI

SEQ ID NO: 43621 - protein, 9 aa, synthetic construct
  source 1..9: note = Seed: VVGARGVGK (KRAS G12R)
MVGTRVVGL

SEQ ID NO: 43622 - protein, 9 aa, synthetic construct
  source 1..9: note = Seed: VVGARGVGK (KRAS G12R)
MVGTRVVGS

SEQ ID NO: 43623 - protein, 9 aa, synthetic construct
  source 1..9: note = Seed: VVGARGVGK (KRAS G12R)
MVGTRVVGV

SEQ ID NO: 43624 - protein, 9 aa, synthetic construct
  source 1..9: note = Seed: VVGARGVGK (KRAS G12R)
MVGVRAVGA

SEQ ID NO: 43625 - protein, 9 aa, synthetic construct
  source 1..9: note = Seed: VVGARGVGK (KRAS G12R)
MVGVRAVGF

SEQ ID NO: 43626 - protein, 9 aa, synthetic construct
  source 1..9: note = Seed: VVGARGVGK (KRAS G12R)
MVGVRAVGI

SEQ ID NO: 43627 - protein, 9 aa, synthetic construct
  source 1..9: note = Seed: VVGARGVGK (KRAS G12R)
MVGVRAVGL

SEQ ID NO: 43628 - protein, 9 aa, synthetic construct
  source 1..9: note = Seed: VVGARGVGK (KRAS G12R)
MVGVRAVGM

SEQ ID NO: 43629 - protein, 9 aa, synthetic construct
  source 1..9: note = Seed: VVGARGVGK (KRAS G12R)
MVGVRAVGN

SEQ ID NO: 43630 - protein, 9 aa, synthetic construct
  source 1..9: note = Seed: VVGARGVGK (KRAS G12R)
MVGVRAVGR

SEQ ID NO: 43631 - protein, 9 aa, synthetic construct
  source 1..9: note = Seed: VVGARGVGK (KRAS G12R)
MVGVRAVGS

SEQ ID NO: 43632 - protein, 9 aa, synthetic construct
  source 1..9: note = Seed: VVGARGVGK (KRAS G12R)
MVGVRAVGT

SEQ ID NO: 43633 - protein, 9 aa, synthetic construct
  source 1..9: note = Seed: VVGARGVGK (KRAS G12R)
MVGVRAVGV

SEQ ID NO: 43634 - protein, 9 aa, synthetic construct
  source 1..9: note = Seed: VVGARGVGK (KRAS G12R)
MVGVRAVGY

SEQ ID NO: 43635 - protein, 9 aa, synthetic construct
  source 1..9: note = Seed: VVGARGVGK (KRAS G12R)
MVGVRGVGA

SEQ ID NO: 43636 - protein, 9 aa, synthetic construct
  source 1..9: note = Seed: VVGARGVGK (KRAS G12R)
MVGVRGVGI

SEQ ID NO: 43637 - protein, 9 aa, synthetic construct
  source 1..9: note = Seed: VVGARGVGK (KRAS G12R)
MVGVRGVGL

SEQ ID NO: 43638 - protein, 9 aa, synthetic construct
  source 1..9: note = Seed: VVGARGVGK (KRAS G12R)
MVGVRGVGM

SEQ ID NO: 43639 - protein, 9 aa, synthetic construct
  source 1..9: note = Seed: VVGARGVGK (KRAS G12R)
MVGVRGVGS

SEQ ID NO: 43640 - protein, 9 aa, synthetic construct
  source 1..9: note = Seed: VVGARGVGK (KRAS G12R)
MVGVRGVGT

SEQ ID NO: 43641 - protein, 9 aa, synthetic construct
  source 1..9: note = Seed: VVGARGVGK (KRAS G12R)
MVGVRGVGV

SEQ ID NO: 43642 - protein, 9 aa, synthetic construct
  source 1..9: note = Seed: VVGARGVGK (KRAS G12R)
MVGVRKVGA

SEQ ID NO: 43643 - protein, 9 aa, synthetic construct
  source 1..9: note = Seed: VVGARGVGK (KRAS G12R)
MVGVRKVGF

SEQ ID NO: 43644 - protein, 9 aa, synthetic construct
  source 1..9: note = Seed: VVGARGVGK (KRAS G12R)
MVGVRKVGI

SEQ ID NO: 43645 - protein, 9 aa, synthetic construct
  source 1..9: note = Seed: VVGARGVGK (KRAS G12R)
MVGVRKVGL

SEQ ID NO: 43646 - protein, 9 aa, synthetic construct
  source 1..9: note = Seed: VVGARGVGK (KRAS G12R)
MVGVRKVGM

SEQ ID NO: 43647 - protein, 9 aa, synthetic construct
  source 1..9: note = Seed: VVGARGVGK (KRAS G12R)
MVGVRKVGR

SEQ ID NO: 43648 - protein, 9 aa, synthetic construct
  source 1..9: note = Seed: VVGARGVGK (KRAS G12R)
MVGVRKVGS

SEQ ID NO: 43649 - protein, 9 aa, synthetic construct
  source 1..9: note = Seed: VVGARGVGK (KRAS G12R)
MVGVRKVGT

SEQ ID NO: 43650 - protein, 9 aa, synthetic construct
  source 1..9: note = Seed: VVGARGVGK (KRAS G12R)
MVGVRKVGV

SEQ ID NO: 43651 - protein, 9 aa, synthetic construct
  source 1..9: note = Seed: VVGARGVGK (KRAS G12R)
MVGVRKVGY

SEQ ID NO: 43652 - protein, 9 aa, synthetic construct
  source 1..9: note = Seed: VVGARGVGK (KRAS G12R)
MVGVRNVGV

SEQ ID NO: 43653 - protein, 9 aa, synthetic construct
  source 1..9: note = Seed: VVGARGVGK (KRAS G12R)
MVGVRPVGA

SEQ ID NO: 43654 - protein, 9 aa, synthetic construct
  source 1..9: note = Seed: VVGARGVGK (KRAS G12R)
MVGVRPVGI

SEQ ID NO: 43655 - protein, 9 aa, synthetic construct
  source 1..9: note = Seed: VVGARGVGK (KRAS G12R)
MVGVRPVGL

SEQ ID NO: 43656 - protein, 9 aa, synthetic construct
  source 1..9: note = Seed: VVGARGVGK (KRAS G12R)
MVGVRPVGM

SEQ ID NO: 43657 - protein, 9 aa, synthetic construct
  source 1..9: note = Seed: VVGARGVGK (KRAS G12R)
MVGVRPVGN

SEQ ID NO: 43658 - protein, 9 aa, synthetic construct
  source 1..9: note = Seed: VVGARGVGK (KRAS G12R)
MVGVRPVGS

SEQ ID NO: 43659 - protein, 9 aa, synthetic construct
  source 1..9: note = Seed: VVGARGVGK (KRAS G12R)
MVGVRPVGT

SEQ ID NO: 43660 - protein, 9 aa, synthetic construct
  source 1..9: note = Seed: VVGARGVGK (KRAS G12R)
MVGVRPVGV

SEQ ID NO: 43661 - protein, 9 aa, synthetic construct
  source 1..9: note = Seed: VVGARGVGK (KRAS G12R)
MVGVRRVGA

SEQ ID NO: 43662 - protein, 9 aa, synthetic construct
  source 1..9: note = Seed: VVGARGVGK (KRAS G12R)
MVGVRRVGF

SEQ ID NO: 43663 - protein, 9 aa, synthetic construct
  source 1..9: note = Seed: VVGARGVGK (KRAS G12R)
MVGVRRVGG

SEQ ID NO: 43664 - protein, 9 aa, synthetic construct
  source 1..9: note = Seed: VVGARGVGK (KRAS G12R)
MVGVRRVGI

SEQ ID NO: 43665 - protein, 9 aa, synthetic construct
  source 1..9: note = Seed: VVGARGVGK (KRAS G12R)
MVGVRRVGL

SEQ ID NO: 43666 - protein, 9 aa, synthetic construct
  source 1..9: note = Seed: VVGARGVGK (KRAS G12R)
MVGVRRVGM

SEQ ID NO: 43667 - protein, 9 aa, synthetic construct
  source 1..9: note = Seed: VVGARGVGK (KRAS G12R)
MVGVRRVGN

SEQ ID NO: 43668 - protein, 9 aa, synthetic construct
  source 1..9: note = Seed: VVGARGVGK (KRAS G12R)
MVGVRRVGQ

SEQ ID NO: 43669 - protein, 9 aa, synthetic construct
  source 1..9: note = Seed: VVGARGVGK (KRAS G12R)
MVGVRRVGR

SEQ ID NO: 43670 - protein, 9 aa, synthetic construct
  source 1..9: note = Seed: VVGARGVGK (KRAS G12R)
MVGVRRVGS

SEQ ID NO: 43671 - protein, 9 aa, synthetic construct
  source 1..9: note = Seed: VVGARGVGK (KRAS G12R)
MVGVRRVGT

SEQ ID NO: 43672 - protein, 9 aa, synthetic construct
  source 1..9: note = Seed: VVGARGVGK (KRAS G12R)
MVGVRRVGV

SEQ ID NO: 43673 - protein, 9 aa, synthetic construct
  source 1..9: note = Seed: VVGARGVGK (KRAS G12R)
MVGVRRVGW

SEQ ID NO: 43674 - protein, 9 aa, synthetic construct
  source 1..9: note = Seed: VVGARGVGK (KRAS G12R)
MVGVRRVGY

SEQ ID NO: 43675 - protein, 9 aa, synthetic construct
  source 1..9: note = Seed: VVGARGVGK (KRAS G12R)
MVGVRSVGF

SEQ ID NO: 43676 - protein, 9 aa, synthetic construct
  source 1..9: note = Seed: VVGARGVGK (KRAS G12R)
MVGVRSVGI

SEQ ID NO: 43677 - protein, 9 aa, synthetic construct
  source 1..9: note = Seed: VVGARGVGK (KRAS G12R)
MVGVRSVGL

SEQ ID NO: 43678 - protein, 9 aa, synthetic construct
  source 1..9: note = Seed: VVGARGVGK (KRAS G12R)
MVGVRSVGM

SEQ ID NO: 43679 - protein, 9 aa, synthetic construct
  source 1..9: note = Seed: VVGARGVGK (KRAS G12R)
MVGVRSVGV

SEQ ID NO: 43680 - protein, 9 aa, synthetic construct
  source 1..9: note = Seed: VVGARGVGK (KRAS G12R)
MVGVRTVGI

SEQ ID NO: 43681 - protein, 9 aa, synthetic construct
  source 1..9: note = Seed: VVGARGVGK (KRAS G12R)
MVGVRTVGL

SEQ ID NO: 43682 - protein, 9 aa, synthetic construct
  source 1..9: note = Seed: VVGARGVGK (KRAS G12R)
MVGVRTVGV

SEQ ID NO: 43683 - protein, 9 aa, synthetic construct
  source 1..9: note = Seed: VVGARGVGK (KRAS G12R)
MVGWRAVGI

SEQ ID NO: 43684 - protein, 9 aa, synthetic construct
  source 1..9: note = Seed: VVGARGVGK (KRAS G12R)
MVGWRAVGL

SEQ ID NO: 43685 - protein, 9 aa, synthetic construct
  source 1..9: note = Seed: VVGARGVGK (KRAS G12R)
MVGWRAVGM

SEQ ID NO: 43686 - protein, 9 aa, synthetic construct
  source 1..9: note = Seed: VVGARGVGK (KRAS G12R)
MVGWRAVGR

SEQ ID NO: 43687 - protein, 9 aa, synthetic construct
  source 1..9: note = Seed: VVGARGVGK (KRAS G12R)
MVGWRGVGR

SEQ ID NO: 43688 - protein, 9 aa, synthetic construct
  source 1..9: note = Seed: VVGARGVGK (KRAS G12R)
MVGWRHVGR

SEQ ID NO: 43689 - protein, 9 aa, synthetic construct
  source 1..9: note = Seed: VVGARGVGK (KRAS G12R)
MVGWRKVGA

SEQ ID NO: 43690 - protein, 9 aa, synthetic construct
  source 1..9: note = Seed: VVGARGVGK (KRAS G12R)
MVGWRKVGF

SEQ ID NO: 43691 - protein, 9 aa, synthetic construct
  source 1..9: note = Seed: VVGARGVGK (KRAS G12R)
MVGWRKVGH

SEQ ID NO: 43692 - protein, 9 aa, synthetic construct
  source 1..9: note = Seed: VVGARGVGK (KRAS G12R)
MVGWRKVGI

SEQ ID NO: 43693 - protein, 9 aa, synthetic construct
  source 1..9: note = Seed: VVGARGVGK (KRAS G12R)
MVGWRKVGK

SEQ ID NO: 43694 - protein, 9 aa, synthetic construct
  source 1..9: note = Seed: VVGARGVGK (KRAS G12R)
MVGWRKVGL

SEQ ID NO: 43695 - protein, 9 aa, synthetic construct
  source 1..9: note = Seed: VVGARGVGK (KRAS G12R)
MVGWRKVGM

SEQ ID NO: 43696 - protein, 9 aa, synthetic construct
  source 1..9: note = Seed: VVGARGVGK (KRAS G12R)
MVGWRKVGR

SEQ ID NO: 43697 - protein, 9 aa, synthetic construct
  source 1..9: note = Seed: VVGARGVGK (KRAS G12R)
MVGWRKVGV

SEQ ID NO: 43698 - protein, 9 aa, synthetic construct
  source 1..9: note = Seed: VVGARGVGK (KRAS G12R)
MVGWRKVGY

SEQ ID NO: 43699 - protein, 9 aa, synthetic construct
  source 1..9: note = Seed: VVGARGVGK (KRAS G12R)
MVGWRNVGR

SEQ ID NO: 43700 - protein, 9 aa, synthetic construct
  source 1..9: note = Seed: VVGARGVGK (KRAS G12R)
MVGWRPVGI

SEQ ID NO: 43701 - protein, 9 aa, synthetic construct
  source 1..9: note = Seed: VVGARGVGK (KRAS G12R)
MVGWRPVGR

SEQ ID NO: 43702 - protein, 9 aa, synthetic construct
  source 1..9: note = Seed: VVGARGVGK (KRAS G12R)
MVGWRQVGR

SEQ ID NO: 43703 - protein, 9 aa, synthetic construct
  source 1..9: note = Seed: VVGARGVGK (KRAS G12R)
MVGWRRVGA

SEQ ID NO: 43704 - protein, 9 aa, synthetic construct
  source 1..9: note = Seed: VVGARGVGK (KRAS G12R)
MVGWRRVGF

SEQ ID NO: 43705 - protein, 9 aa, synthetic construct
  source 1..9: note = Seed: VVGARGVGK (KRAS G12R)
MVGWRRVGH

SEQ ID NO: 43706 - protein, 9 aa, synthetic construct
  source 1..9: note = Seed: VVGARGVGK (KRAS G12R)
MVGWRRVGI

SEQ ID NO: 43707 - protein, 9 aa, synthetic construct
  source 1..9: note = Seed: VVGARGVGK (KRAS G12R)
MVGWRRVGK

SEQ ID NO: 43708 - protein, 9 aa, synthetic construct
  source 1..9: note = Seed: VVGARGVGK (KRAS G12R)
MVGWRRVGL

SEQ ID NO: 43709 - protein, 9 aa, synthetic construct
  source 1..9: note = Seed: VVGARGVGK (KRAS G12R)
MVGWRRVGM

SEQ ID NO: 43710 - protein, 9 aa, synthetic construct
  source 1..9: note = Seed: VVGARGVGK (KRAS G12R)
MVGWRRVGR

SEQ ID NO: 43711 - protein, 9 aa, synthetic construct
  source 1..9: note = Seed: VVGARGVGK (KRAS G12R)
MVGWRRVGS

SEQ ID NO: 43712 - protein, 9 aa, synthetic construct
  source 1..9: note = Seed: VVGARGVGK (KRAS G12R)
MVGWRRVGV

SEQ ID NO: 43713 - protein, 9 aa, synthetic construct
  source 1..9: note = Seed: VVGARGVGK (KRAS G12R)
MVGWRRVGY

SEQ ID NO: 43714 - protein, 9 aa, synthetic construct
  source 1..9: note = Seed: VVGARGVGK (KRAS G12R)
MVGWRSVGL

SEQ ID NO: 43715 - protein, 9 aa, synthetic construct
  source 1..9: note = Seed: VVGARGVGK (KRAS G12R)
MVGWRSVGR

SEQ ID NO: 43716 - protein, 9 aa, synthetic construct
  source 1..9: note = Seed: VVGARGVGK (KRAS G12R)
MVGWRTVGR

SEQ ID NO: 43717 - protein, 9 aa, synthetic construct
  source 1..9: note = Seed: VVGARGVGK (KRAS G12R)
MVGWRVVGR

SEQ ID NO: 43718 - protein, 9 aa, synthetic construct
  source 1..9: note = Seed: VVGARGVGK (KRAS G12R)
MVGYRAVGR

SEQ ID NO: 43719 - protein, 9 aa, synthetic construct
  source 1..9: note = Seed: VVGARGVGK (KRAS G12R)
MVGYRHVGR

SEQ ID NO: 43720 - protein, 9 aa, synthetic construct
  source 1..9: note = Seed: VVGARGVGK (KRAS G12R)
MVGYRKVGK

SEQ ID NO: 43721 - protein, 9 aa, synthetic construct
  source 1..9: note = Seed: VVGARGVGK (KRAS G12R)
MVGYRKVGL

SEQ ID NO: 43722 - protein, 9 aa, synthetic construct
  source 1..9: note = Seed: VVGARGVGK (KRAS G12R)
MVGYRKVGM

SEQ ID NO: 43723 - protein, 9 aa, synthetic construct
  source 1..9: note = Seed: VVGARGVGK (KRAS G12R)
MVGYRKVGR

SEQ ID NO: 43724 - protein, 9 aa, synthetic construct
  source 1..9: note = Seed: VVGARGVGK (KRAS G12R)
MVGYRKVGV

SEQ ID NO: 43725 - protein, 9 aa, synthetic construct
  source 1..9: note = Seed: VVGARGVGK (KRAS G12R)
MVGYRKVGY

SEQ ID NO: 43726 - protein, 9 aa, synthetic construct
  source 1..9: note = Seed: VVGARGVGK (KRAS G12R)
MVGYRNVGR

SEQ ID NO: 43727 - protein, 9 aa, synthetic construct
  source 1..9: note = Seed: VVGARGVGK (KRAS G12R)
MVGYRPVGR

SEQ ID NO: 43728 - protein, 9 aa, synthetic construct
  source 1..9: note = Seed: VVGARGVGK (KRAS G12R)
MVGYRRVGA

SEQ ID NO: 43729 - protein, 9 aa, synthetic construct
  source 1..9: note = Seed: VVGARGVGK (KRAS G12R)
MVGYRRVGF

SEQ ID NO: 43730 - protein, 9 aa, synthetic construct
  source 1..9: note = Seed: VVGARGVGK (KRAS G12R)
MVGYRRVGH

SEQ ID NO: 43731 - protein, 9 aa, synthetic construct
  source 1..9: note = Seed: VVGARGVGK (KRAS G12R)
MVGYRRVGI

SEQ ID NO: 43732 - protein, 9 aa, synthetic construct
  source 1..9: note = Seed: VVGARGVGK (KRAS G12R)
MVGYRRVGK

SEQ ID NO: 43733 - protein, 9 aa, synthetic construct
  source 1..9: note = Seed: VVGARGVGK (KRAS G12R)
MVGYRRVGL

SEQ ID NO: 43734 - protein, 9 aa, synthetic construct
  source 1..9: note = Seed: VVGARGVGK (KRAS G12R)
MVGYRRVGM

SEQ ID NO: 43735 - protein, 9 aa, synthetic construct
  source 1..9: note = Seed: VVGARGVGK (KRAS G12R)
MVGYRRVGR

SEQ ID NO: 43736 - protein, 9 aa, synthetic construct
  source 1..9: note = Seed: VVGARGVGK (KRAS G12R)
MVGYRRVGV

SEQ ID NO: 43737 - protein, 9 aa, synthetic construct
  source 1..9: note = Seed: VVGARGVGK (KRAS G12R)
MVGYRRVGY

SEQ ID NO: 43738 - protein, 9 aa, synthetic construct
  source 1..9: note = Seed: VVGARGVGK (KRAS G12R)
MVGYRSVGR

SEQ ID NO: 43739 - protein, 9 aa, synthetic construct
  source 1..9: note = Seed: VVGARGVGK (KRAS G12R)
MVGYRTVGR

SEQ ID NO: 43740 - protein, 9 aa, synthetic construct
  source 1..9: note = Seed: VVGARGVGK (KRAS G12R)
MVGYRVVGR

SEQ ID NO: 43741 - protein, 9 aa, synthetic construct
  source 1..9: note = Seed: VVGARGVGK (KRAS G12R)
NVGARAVGA

SEQ ID NO: 43742 - protein, 9 aa, synthetic construct
  source 1..9: note = Seed: VVGARGVGK (KRAS G12R)
NVGARAVGC

SEQ ID NO: 43743 - protein, 9 aa, synthetic construct
  source 1..9: note = Seed: VVGARGVGK (KRAS G12R)
NVGARAVGG

SEQ ID NO: 43744 - protein, 9 aa, synthetic construct
  source 1..9: note = Seed: VVGARGVGK (KRAS G12R)
NVGARAVGI

SEQ ID NO: 43745 - protein, 9 aa, synthetic construct
  source 1..9: note = Seed: VVGARGVGK (KRAS G12R)
NVGARAVGL

SEQ ID NO: 43746 - protein, 9 aa, synthetic construct
  source 1..9: note = Seed: VVGARGVGK (KRAS G12R)
NVGARAVGM

SEQ ID NO: 43747 - protein, 9 aa, synthetic construct
  source 1..9: note = Seed: VVGARGVGK (KRAS G12R)
NVGARAVGN

SEQ ID NO: 43748 - protein, 9 aa, synthetic construct
  source 1..9: note = Seed: VVGARGVGK (KRAS G12R)
NVGARAVGQ

SEQ ID NO: 43749 - protein, 9 aa, synthetic construct
  source 1..9: note = Seed: VVGARGVGK (KRAS G12R)
NVGARAVGS

SEQ ID NO: 43750 - protein, 9 aa, synthetic construct
  source 1..9: note = Seed: VVGARGVGK (KRAS G12R)
NVGARAVGT

SEQ ID NO: 43751 - protein, 9 aa, synthetic construct
  source 1..9: note = Seed: VVGARGVGK (KRAS G12R)
NVGARAVGV

SEQ ID NO: 43752 - protein, 9 aa, synthetic construct
  source 1..9: note = Seed: VVGARGVGK (KRAS G12R)
NVGARGVGA

SEQ ID NO: 43753 - protein, 9 aa, synthetic construct
  source 1..9: note = Seed: VVGARGVGK (KRAS G12R)
NVGARIVGA

SEQ ID NO: 43754 - protein, 9 aa, synthetic construct
  source 1..9: note = Seed: VVGARGVGK (KRAS G12R)
NVGARIVGG

SEQ ID NO: 43755 - protein, 9 aa, synthetic construct
  source 1..9: note = Seed: VVGARGVGK (KRAS G12R)
NVGARIVGH

SEQ ID NO: 43756 - protein, 9 aa, synthetic construct
  source 1..9: note = Seed: VVGARGVGK (KRAS G12R)
NVGARIVGI

SEQ ID NO: 43757 - protein, 9 aa, synthetic construct
  source 1..9: note = Seed: VVGARGVGK (KRAS G12R)
NVGARIVGL

SEQ ID NO: 43758 - protein, 9 aa, synthetic construct
  source 1..9: note = Seed: VVGARGVGK (KRAS G12R)
NVGARIVGM

SEQ ID NO: 43759 - protein, 9 aa, synthetic construct
  source 1..9: note = Seed: VVGARGVGK (KRAS G12R)
NVGARIVGN

SEQ ID NO: 43760 - protein, 9 aa, synthetic construct
  source 1..9: note = Seed: VVGARGVGK (KRAS G12R)
NVGARIVGP

SEQ ID NO: 43761 - protein, 9 aa, synthetic construct
  source 1..9: note = Seed: VVGARGVGK (KRAS G12R)
NVGARIVGQ

SEQ ID NO: 43762 - protein, 9 aa, synthetic construct
  source 1..9: note = Seed: VVGARGVGK (KRAS G12R)
NVGARIVGS

SEQ ID NO: 43763 - protein, 9 aa, synthetic construct
  source 1..9: note = Seed: VVGARGVGK (KRAS G12R)
NVGARIVGT

SEQ ID NO: 43764 - protein, 9 aa, synthetic construct
  source 1..9: note = Seed: VVGARGVGK (KRAS G12R)
NVGARIVGV

SEQ ID NO: 43765 - protein, 9 aa, synthetic construct
  source 1..9: note = Seed: VVGARGVGK (KRAS G12R)
NVGARIVGY

SEQ ID NO: 43766 - protein, 9 aa, synthetic construct
  source 1..9: note = Seed: VVGARGVGK (KRAS G12R)
NVGARLVGA

SEQ ID NO: 43767 - protein, 9 aa, synthetic construct
  source 1..9: note = Seed: VVGARGVGK (KRAS G12R)
NVGARLVGG

SEQ ID NO: 43768 - protein, 9 aa, synthetic construct
  source 1..9: note = Seed: VVGARGVGK (KRAS G12R)
NVGARLVGI

SEQ ID NO: 43769 - protein, 9 aa, synthetic construct
  source 1..9: note = Seed: VVGARGVGK (KRAS G12R)
NVGARLVGM

SEQ ID NO: 43770 - protein, 9 aa, synthetic construct
  source 1..9: note = Seed: VVGARGVGK (KRAS G12R)
NVGARLVGQ

SEQ ID NO: 43771 - protein, 9 aa, synthetic construct
  source 1..9: note = Seed: VVGARGVGK (KRAS G12R)
NVGARLVGS

SEQ ID NO: 43772 - protein, 9 aa, synthetic construct
  source 1..9: note = Seed: VVGARGVGK (KRAS G12R)
NVGARLVGT

SEQ ID NO: 43773 - protein, 9 aa, synthetic construct
  source 1..9: note = Seed: VVGARGVGK (KRAS G12R)
NVGARLVGV

SEQ ID NO: 43774 - protein, 9 aa, synthetic construct
  source 1..9: note = Seed: VVGARGVGK (KRAS G12R)
NVGARMVGA

SEQ ID NO: 43775 - protein, 9 aa, synthetic construct
  source 1..9: note = Seed: VVGARGVGK (KRAS G12R)
NVGARMVGG

SEQ ID NO: 43776 - protein, 9 aa, synthetic construct
  source 1..9: note = Seed: VVGARGVGK (KRAS G12R)
NVGARMVGI

SEQ ID NO: 43777 - protein, 9 aa, synthetic construct
  source 1..9: note = Seed: VVGARGVGK (KRAS G12R)
NVGARMVGM

SEQ ID NO: 43778 - protein, 9 aa, synthetic construct
  source 1..9: note = Seed: VVGARGVGK (KRAS G12R)
NVGARMVGQ

SEQ ID NO: 43779 - protein, 9 aa, synthetic construct
  source 1..9: note = Seed: VVGARGVGK (KRAS G12R)
NVGARMVGS

SEQ ID NO: 43780 - protein, 9 aa, synthetic construct
  source 1..9: note = Seed: VVGARGVGK (KRAS G12R)
NVGARMVGT

SEQ ID NO: 43781 - protein, 9 aa, synthetic construct
  source 1..9: note = Seed: VVGARGVGK (KRAS G12R)
NVGARMVGV

SEQ ID NO: 43782 - protein, 9 aa, synthetic construct
  source 1..9: note = Seed: VVGARGVGK (KRAS G12R)
NVGARPVGA

SEQ ID NO: 43783 - protein, 9 aa, synthetic construct
  source 1..9: note = Seed: VVGARGVGK (KRAS G12R)
NVGARPVGI

SEQ ID NO: 43784 - protein, 9 aa, synthetic construct
  source 1..9: note = Seed: VVGARGVGK (KRAS G12R)
NVGARPVGM

SEQ ID NO: 43785 - protein, 9 aa, synthetic construct
  source 1..9: note = Seed: VVGARGVGK (KRAS G12R)
NVGARPVGS

SEQ ID NO: 43786 - protein, 9 aa, synthetic construct
  source 1..9: note = Seed: VVGARGVGK (KRAS G12R)
NVGARPVGT

SEQ ID NO: 43787 - protein, 9 aa, synthetic construct
  source 1..9: note = Seed: VVGARGVGK (KRAS G12R)
NVGARPVGV

SEQ ID NO: 43788 - protein, 9 aa, synthetic construct
  source 1..9: note = Seed: VVGARGVGK (KRAS G12R)
NVGARSVGA

SEQ ID NO: 43789 - protein, 9 aa, synthetic construct
  source 1..9: note = Seed: VVGARGVGK (KRAS G12R)
NVGARSVGS

SEQ ID NO: 43790 - protein, 9 aa, synthetic construct
  source 1..9: note = Seed: VVGARGVGK (KRAS G12R)
NVGARSVGV

SEQ ID NO: 43791 - protein, 9 aa, synthetic construct
  source 1..9: note = Seed: VVGARGVGK (KRAS G12R)
NVGARTVGA

SEQ ID NO: 43792 - protein, 9 aa, synthetic construct
  source 1..9: note = Seed: VVGARGVGK (KRAS G12R)
NVGARTVGI

SEQ ID NO: 43793 - protein, 9 aa, synthetic construct
  source 1..9: note = Seed: VVGARGVGK (KRAS G12R)
NVGARTVGM

SEQ ID NO: 43794 - protein, 9 aa, synthetic construct
  source 1..9: note = Seed: VVGARGVGK (KRAS G12R)
NVGARTVGS

SEQ ID NO: 43795 - protein, 9 aa, synthetic construct
  source 1..9: note = Seed: VVGARGVGK (KRAS G12R)
NVGARTVGT

SEQ ID NO: 43796 - protein, 9 aa, synthetic construct
  source 1..9: note = Seed: VVGARGVGK (KRAS G12R)
NVGARTVGV

SEQ ID NO: 43797 - protein, 9 aa, synthetic construct
  source 1..9: note = Seed: VVGARGVGK (KRAS G12R)
NVGARVVGA

SEQ ID NO: 43798 - protein, 9 aa, synthetic construct
  source 1..9: note = Seed: VVGARGVGK (KRAS G12R)
NVGARVVGG

SEQ ID NO: 43799 - protein, 9 aa, synthetic construct
  source 1..9: note = Seed: VVGARGVGK (KRAS G12R)
NVGARVVGH

SEQ ID NO: 43800 - protein, 9 aa, synthetic construct
  source 1..9: note = Seed: VVGARGVGK (KRAS G12R)
NVGARVVGI

SEQ ID NO: 43801 - protein, 9 aa, synthetic construct
  source 1..9: note = Seed: VVGARGVGK (KRAS G12R)
NVGARVVGL

SEQ ID NO: 43802 - protein, 9 aa, synthetic construct
  source 1..9: note = Seed: VVGARGVGK (KRAS G12R)
NVGARVVGM

SEQ ID NO: 43803 - protein, 9 aa, synthetic construct
  source 1..9: note = Seed: VVGARGVGK (KRAS G12R)
NVGARVVGN

SEQ ID NO: 43804 - protein, 9 aa, synthetic construct
  source 1..9: note = Seed: VVGARGVGK (KRAS G12R)
NVGARVVGQ

SEQ ID NO: 43805 - protein, 9 aa, synthetic construct
  source 1..9: note = Seed: VVGARGVGK (KRAS G12R)
NVGARVVGS

SEQ ID NO: 43806 - protein, 9 aa, synthetic construct
  source 1..9: note = Seed: VVGARGVGK (KRAS G12R)
NVGARVVGT

SEQ ID NO: 43807 - protein, 9 aa, synthetic construct
  source 1..9: note = Seed: VVGARGVGK (KRAS G12R)
NVGARVVGV

SEQ ID NO: 43808 - protein, 9 aa, synthetic construct
  source 1..9: note = Seed: VVGARGVGK (KRAS G12R)
NVGARVVGY

SEQ ID NO: 43809 - protein, 9 aa, synthetic construct
  source 1..9: note = Seed: VVGARGVGK (KRAS G12R)
NVGGRAVGA

SEQ ID NO: 43810 - protein, 9 aa, synthetic construct
  source 1..9: note = Seed: VVGARGVGK (KRAS G12R)
NVGGRAVGG

SEQ ID NO: 43811 - protein, 9 aa, synthetic construct
  source 1..9: note = Seed: VVGARGVGK (KRAS G12R)
NVGGRAVGI

SEQ ID NO: 43812 - protein, 9 aa, synthetic construct
  source 1..9: note = Seed: VVGARGVGK (KRAS G12R)
NVGGRAVGL

SEQ ID NO: 43813 - protein, 9 aa, synthetic construct
  source 1..9: note = Seed: VVGARGVGK (KRAS G12R)
NVGGRAVGM

SEQ ID NO: 43814 - protein, 9 aa, synthetic construct
  source 1..9: note = Seed: VVGARGVGK (KRAS G12R)
NVGGRAVGS

SEQ ID NO: 43815 - protein, 9 aa, synthetic construct
  source 1..9: note = Seed: VVGARGVGK (KRAS G12R)
NVGGRAVGT

SEQ ID NO: 43816 - protein, 9 aa, synthetic construct
  source 1..9: note = Seed: VVGARGVGK (KRAS G12R)
NVGGRAVGV

SEQ ID NO: 43817 - protein, 9 aa, synthetic construct
  source 1..9: note = Seed: VVGARGVGK (KRAS G12R)
NVGGRIVGA

SEQ ID NO: 43818 - protein, 9 aa, synthetic construct
  source 1..9: note = Seed: VVGARGVGK (KRAS G12R)
NVGGRIVGI

SEQ ID NO: 43819 - protein, 9 aa, synthetic construct
  source 1..9: note = Seed: VVGARGVGK (KRAS G12R)
NVGGRIVGM

SEQ ID NO: 43820 - protein, 9 aa, synthetic construct
  source 1..9: note = Seed: VVGARGVGK (KRAS G12R)
NVGGRIVGS

SEQ ID NO: 43821 - protein, 9 aa, synthetic construct
  source 1..9: note = Seed: VVGARGVGK (KRAS G12R)
NVGGRIVGT

SEQ ID NO: 43822 - protein, 9 aa, synthetic construct
  source 1..9: note = Seed: VVGARGVGK (KRAS G12R)
NVGGRIVGV

SEQ ID NO: 43823 - protein, 9 aa, synthetic construct
  source 1..9: note = Seed: VVGARGVGK (KRAS G12R)
NVGGRLVGA

SEQ ID NO: 43824 - protein, 9 aa, synthetic construct
  source 1..9: note = Seed: VVGARGVGK (KRAS G12R)
NVGGRMVGA

SEQ ID NO: 43825 - protein, 9 aa, synthetic construct
  source 1..9: note = Seed: VVGARGVGK (KRAS G12R)
NVGGRPVGA

SEQ ID NO: 43826 - protein, 9 aa, synthetic construct
  source 1..9: note = Seed: VVGARGVGK (KRAS G12R)
NVGGRPVGI

SEQ ID NO: 43827 - protein, 9 aa, synthetic construct
  source 1..9: note = Seed: VVGARGVGK (KRAS G12R)
NVGGRPVGS

SEQ ID NO: 43828 - protein, 9 aa, synthetic construct
  source 1..9: note = Seed: VVGARGVGK (KRAS G12R)
NVGGRPVGT

SEQ ID NO: 43829 - protein, 9 aa, synthetic construct
  source 1..9: note = Seed: VVGARGVGK (KRAS G12R)
NVGGRPVGV

SEQ ID NO: 43830 - protein, 9 aa, synthetic construct
  source 1..9: note = Seed: VVGARGVGK (KRAS G12R)
NVGGRSVGA

SEQ ID NO: 43831 - protein, 9 aa, synthetic construct
  source 1..9: note = Seed: VVGARGVGK (KRAS G12R)
NVGGRTVGA

SEQ ID NO: 43832 - protein, 9 aa, synthetic construct
  source 1..9: note = Seed: VVGARGVGK (KRAS G12R)
NVGGRVVGA

SEQ ID NO: 43833 - protein, 9 aa, synthetic construct
  source 1..9: note = Seed: VVGARGVGK (KRAS G12R)
NVGGRVVGI

SEQ ID NO: 43834 - protein, 9 aa, synthetic construct
  source 1..9: note = Seed: VVGARGVGK (KRAS G12R)
NVGGRVVGL

SEQ ID NO: 43835 - protein, 9 aa, synthetic construct
  source 1..9: note = Seed: VVGARGVGK (KRAS G12R)
NVGGRVVGM

SEQ ID NO: 43836 - protein, 9 aa, synthetic construct
  source 1..9: note = Seed: VVGARGVGK (KRAS G12R)
NVGGRVVGS

SEQ ID NO: 43837 - protein, 9 aa, synthetic construct
  source 1..9: note = Seed: VVGARGVGK (KRAS G12R)
NVGGRVVGT

SEQ ID NO: 43838 - protein, 9 aa, synthetic construct
  source 1..9: note = Seed: VVGARGVGK (KRAS G12R)
NVGGRVVGV

SEQ ID NO: 43839 - protein, 9 aa, synthetic construct
  source 1..9: note = Seed: VVGARGVGK (KRAS G12R)
NVGIRAVGA

SEQ ID NO: 43840 - protein, 9 aa, synthetic construct
  source 1..9: note = Seed: VVGARGVGK (KRAS G12R)
NVGIRIVGA

SEQ ID NO: 43841 - protein, 9 aa, synthetic construct
  source 1..9: note = Seed: VVGARGVGK (KRAS G12R)
NVGIRVVGA

SEQ ID NO: 43842 - protein, 9 aa, synthetic construct
  source 1..9: note = Seed: VVGARGVGK (KRAS G12R)
NVGLRAVGI

SEQ ID NO: 43843 - protein, 9 aa, synthetic construct
  source 1..9: note = Seed: VVGARGVGK (KRAS G12R)
NVGLRAVGL

SEQ ID NO: 43844 - protein, 9 aa, synthetic construct
  source 1..9: note = Seed: VVGARGVGK (KRAS G12R)
NVGLRAVGM

SEQ ID NO: 43845 - protein, 9 aa, synthetic construct
  source 1..9: note = Seed: VVGARGVGK (KRAS G12R)
NVGLRGVGI

SEQ ID NO: 43846 - protein, 9 aa, synthetic construct
  source 1..9: note = Seed: VVGARGVGK (KRAS G12R)
NVGLRGVGL

SEQ ID NO: 43847 - protein, 9 aa, synthetic construct
  source 1..9: note = Seed: VVGARGVGK (KRAS G12R)
NVGLRGVGV

SEQ ID NO: 43848 - protein, 9 aa, synthetic construct
  source 1..9: note = Seed: VVGARGVGK (KRAS G12R)
NVGLRPVGI

SEQ ID NO: 43849 - protein, 9 aa, synthetic construct
  source 1..9: note = Seed: VVGARGVGK (KRAS G12R)
NVGLRSVGI

SEQ ID NO: 43850 - protein, 9 aa, synthetic construct
  source 1..9: note = Seed: VVGARGVGK (KRAS G12R)
NVGLRSVGL

SEQ ID NO: 43851 - protein, 9 aa, synthetic construct
  source 1..9: note = Seed: VVGARGVGK (KRAS G12R)
NVGMRAVGI

SEQ ID NO: 43852 - protein, 9 aa, synthetic construct
  source 1..9: note = Seed: VVGARGVGK (KRAS G12R)
NVGMRAVGL

SEQ ID NO: 43853 - protein, 9 aa, synthetic construct
  source 1..9: note = Seed: VVGARGVGK (KRAS G12R)
NVGMRAVGM

SEQ ID NO: 43854 - protein, 9 aa, synthetic construct
  source 1..9: note = Seed: VVGARGVGK (KRAS G12R)
NVGMRAVGV

SEQ ID NO: 43855 - protein, 9 aa, synthetic construct
  source 1..9: note = Seed: VVGARGVGK (KRAS G12R)
NVGMRGVGI

SEQ ID NO: 43856 - protein, 9 aa, synthetic construct
  source 1..9: note = Seed: VVGARGVGK (KRAS G12R)
NVGMRGVGL

SEQ ID NO: 43857 - protein, 9 aa, synthetic construct
  source 1..9: note = Seed: VVGARGVGK (KRAS G12R)
NVGMRGVGV

SEQ ID NO: 43858 - protein, 9 aa, synthetic construct
  source 1..9: note = Seed: VVGARGVGK (KRAS G12R)
NVGMRSVGI

SEQ ID NO: 43859 - protein, 9 aa, synthetic construct
  source 1..9: note = Seed: VVGARGVGK (KRAS G12R)
NVGMRSVGL

SEQ ID NO: 43860 - protein, 9 aa, synthetic construct
  source 1..9: note = Seed: VVGARGVGK (KRAS G12R)
NVGSRAVGA

SEQ ID NO: 43861 - protein, 9 aa, synthetic construct
  source 1..9: note = Seed: VVGARGVGK (KRAS G12R)
NVGSRAVGI

SEQ ID NO: 43862 - protein, 9 aa, synthetic construct
  source 1..9: note = Seed: VVGARGVGK (KRAS G12R)
NVGSRAVGM

SEQ ID NO: 43863 - protein, 9 aa, synthetic construct
  source 1..9: note = Seed: VVGARGVGK (KRAS G12R)
NVGSRAVGS

SEQ ID NO: 43864 - protein, 9 aa, synthetic construct
  source 1..9: note = Seed: VVGARGVGK (KRAS G12R)
NVGSRAVGT

SEQ ID NO: 43865 - protein, 9 aa, synthetic construct
  source 1..9: note = Seed: VVGARGVGK (KRAS G12R)
NVGSRAVGV

SEQ ID NO: 43866 - protein, 9 aa, synthetic construct
  source 1..9: note = Seed: VVGARGVGK (KRAS G12R)
NVGSRIVGA

SEQ ID NO: 43867 - protein, 9 aa, synthetic construct
  source 1..9: note = Seed: VVGARGVGK (KRAS G12R)
NVGSRIVGG

SEQ ID NO: 43868 - protein, 9 aa, synthetic construct
  source 1..9: note = Seed: VVGARGVGK (KRAS G12R)
NVGSRIVGI

SEQ ID NO: 43869 - protein, 9 aa, synthetic construct
  source 1..9: note = Seed: VVGARGVGK (KRAS G12R)
NVGSRIVGL

SEQ ID NO: 43870 - protein, 9 aa, synthetic construct
  source 1..9: note = Seed: VVGARGVGK (KRAS G12R)
NVGSRIVGM

SEQ ID NO: 43871 - protein, 9 aa, synthetic construct
  source 1..9: note = Seed: VVGARGVGK (KRAS G12R)
NVGSRIVGN

SEQ ID NO: 43872 - protein, 9 aa, synthetic construct
  source 1..9: note = Seed: VVGARGVGK (KRAS G12R)
NVGSRIVGQ

SEQ ID NO: 43873 - protein, 9 aa, synthetic construct
  source 1..9: note = Seed: VVGARGVGK (KRAS G12R)
NVGSRIVGS

SEQ ID NO: 43874 - protein, 9 aa, synthetic construct
  source 1..9: note = Seed: VVGARGVGK (KRAS G12R)
NVGSRIVGT

SEQ ID NO: 43875 - protein, 9 aa, synthetic construct
  source 1..9: note = Seed: VVGARGVGK (KRAS G12R)
NVGSRIVGV

SEQ ID NO: 43876 - protein, 9 aa, synthetic construct
  source 1..9: note = Seed: VVGARGVGK (KRAS G12R)
NVGSRLVGA

SEQ ID NO: 43877 - protein, 9 aa, synthetic construct
  source 1..9: note = Seed: VVGARGVGK (KRAS G12R)
NVGSRLVGS

SEQ ID NO: 43878 - protein, 9 aa, synthetic construct
  source 1..9: note = Seed: VVGARGVGK (KRAS G12R)
NVGSRLVGV

SEQ ID NO: 43879 - protein, 9 aa, synthetic construct
  source 1..9: note = Seed: VVGARGVGK (KRAS G12R)
NVGSRMVGA

SEQ ID NO: 43880 - protein, 9 aa, synthetic construct
  source 1..9: note = Seed: VVGARGVGK (KRAS G12R)
NVGSRMVGS

SEQ ID NO: 43881 - protein, 9 aa, synthetic construct
  source 1..9: note = Seed: VVGARGVGK (KRAS G12R)
NVGSRMVGV

SEQ ID NO: 43882 - protein, 9 aa, synthetic construct
  source 1..9: note = Seed: VVGARGVGK (KRAS G12R)
NVGSRPVGA

SEQ ID NO: 43883 - protein, 9 aa, synthetic construct
  source 1..9: note = Seed: VVGARGVGK (KRAS G12R)
NVGSRPVGS

SEQ ID NO: 43884 - protein, 9 aa, synthetic construct
  source 1..9: note = Seed: VVGARGVGK (KRAS G12R)
NVGSRSVGA

SEQ ID NO: 43885 - protein, 9 aa, synthetic construct
  source 1..9: note = Seed: VVGARGVGK (KRAS G12R)
NVGSRTVGA

SEQ ID NO: 43886 - protein, 9 aa, synthetic construct
  source 1..9: note = Seed: VVGARGVGK (KRAS G12R)
NVGSRTVGS

SEQ ID NO: 43887 - protein, 9 aa, synthetic construct
  source 1..9: note = Seed: VVGARGVGK (KRAS G12R)
NVGSRVVGA

SEQ ID NO: 43888 - protein, 9 aa, synthetic construct
  source 1..9: note = Seed: VVGARGVGK (KRAS G12R)
NVGSRVVGG

SEQ ID NO: 43889 - protein, 9 aa, synthetic construct
  source 1..9: note = Seed: VVGARGVGK (KRAS G12R)
NVGSRVVGI

SEQ ID NO: 43890 - protein, 9 aa, synthetic construct
  source 1..9: note = Seed: VVGARGVGK (KRAS G12R)
NVGSRVVGL

SEQ ID NO: 43891 - protein, 9 aa, synthetic construct
  source 1..9: note = Seed: VVGARGVGK (KRAS G12R)
NVGSRVVGM

SEQ ID NO: 43892 - protein, 9 aa, synthetic construct
  source 1..9: note = Seed: VVGARGVGK (KRAS G12R)
NVGSRVVGQ

SEQ ID NO: 43893 - protein, 9 aa, synthetic construct
  source 1..9: note = Seed: VVGARGVGK (KRAS G12R)
NVGSRVVGS

SEQ ID NO: 43894 - protein, 9 aa, synthetic construct
  source 1..9: note = Seed: VVGARGVGK (KRAS G12R)
NVGSRVVGT

SEQ ID NO: 43895 - protein, 9 aa, synthetic construct
  source 1..9: note = Seed: VVGARGVGK (KRAS G12R)
NVGSRVVGV

SEQ ID NO: 43896 - protein, 9 aa, synthetic construct
  source 1..9: note = Seed: VVGARGVGK (KRAS G12R)
NVGTRAVGA

SEQ ID NO: 43897 - protein, 9 aa, synthetic construct
  source 1..9: note = Seed: VVGARGVGK (KRAS G12R)
NVGTRAVGS

SEQ ID NO: 43898 - protein, 9 aa, synthetic construct
  source 1..9: note = Seed: VVGARGVGK (KRAS G12R)
NVGTRIVGA

SEQ ID NO: 43899 - protein, 9 aa, synthetic construct
  source 1..9: note = Seed: VVGARGVGK (KRAS G12R)
NVGTRIVGS

SEQ ID NO: 43900 - protein, 9 aa, synthetic construct
  source 1..9: note = Seed: VVGARGVGK (KRAS G12R)
NVGTRLVGA

SEQ ID NO: 43901 - protein, 9 aa, synthetic construct
  source 1..9: note = Seed: VVGARGVGK (KRAS G12R)
NVGTRMVGA

SEQ ID NO: 43902 - protein, 9 aa, synthetic construct
  source 1..9: note = Seed: VVGARGVGK (KRAS G12R)
NVGTRVVGA

SEQ ID NO: 43903 - protein, 9 aa, synthetic construct
  source 1..9: note = Seed: VVGARGVGK (KRAS G12R)
NVGTRVVGS

SEQ ID NO: 43904 - protein, 9 aa, synthetic construct
  source 1..9: note = Seed: VVGARGVGK (KRAS G12R)
NVGVRAVGA

SEQ ID NO: 43905 - protein, 9 aa, synthetic construct
  source 1..9: note = Seed: VVGARGVGK (KRAS G12R)
NVGVRIVGA

SEQ ID NO: 43906 - protein, 9 aa, synthetic construct
  source 1..9: note = Seed: VVGARGVGK (KRAS G12R)
NVGVRIVGS

SEQ ID NO: 43907 - protein, 9 aa, synthetic construct
  source 1..9: note = Seed: VVGARGVGK (KRAS G12R)
NVGVRVVGA

SEQ ID NO: 43908 - protein, 9 aa, synthetic construct
  source 1..9: note = Seed: VVGARGVGK (KRAS G12R)
NVGVRVVGS

SEQ ID NO: 43909 - protein, 9 aa, synthetic construct
  source 1..9: note = Seed: VVGARGVGK (KRAS G12R)
PVGARAVGA

SEQ ID NO: 43910 - protein, 9 aa, synthetic construct
  source 1..9: note = Seed: VVGARGVGK (KRAS G12R)
PVGARAVGC

SEQ ID NO: 43911 - protein, 9 aa, synthetic construct
  source 1..9: note = Seed: VVGARGVGK (KRAS G12R)
PVGARAVGD

SEQ ID NO: 43912 - protein, 9 aa, synthetic construct
  source 1..9: note = Seed: VVGARGVGK (KRAS G12R)
PVGARAVGE

SEQ ID NO: 43913 - protein, 9 aa, synthetic construct
  source 1..9: note = Seed: VVGARGVGK (KRAS G12R)
PVGARAVGF

SEQ ID NO: 43914 - protein, 9 aa, synthetic construct
  source 1..9: note = Seed: VVGARGVGK (KRAS G12R)
PVGARAVGG

SEQ ID NO: 43915 - protein, 9 aa, synthetic construct
  source 1..9: note = Seed: VVGARGVGK (KRAS G12R)
PVGARAVGH

SEQ ID NO: 43916 - protein, 9 aa, synthetic construct
  source 1..9: note = Seed: VVGARGVGK (KRAS G12R)
PVGARAVGI

SEQ ID NO: 43917 - protein, 9 aa, synthetic construct
  source 1..9: note = Seed: VVGARGVGK (KRAS G12R)
PVGARAVGL

SEQ ID NO: 43918 - protein, 9 aa, synthetic construct
  source 1..9: note = Seed: VVGARGVGK (KRAS G12R)
PVGARAVGM

SEQ ID NO: 43919 - protein, 9 aa, synthetic construct
  source 1..9: note = Seed: VVGARGVGK (KRAS G12R)
PVGARAVGN

SEQ ID NO: 43920 - protein, 9 aa, synthetic construct
  source 1..9: note = Seed: VVGARGVGK (KRAS G12R)
PVGARAVGP

SEQ ID NO: 43921 - protein, 9 aa, synthetic construct
  source 1..9: note = Seed: VVGARGVGK (KRAS G12R)
PVGARAVGQ

SEQ ID NO: 43922 - protein, 9 aa, synthetic construct
  source 1..9: note = Seed: VVGARGVGK (KRAS G12R)
PVGARAVGS

SEQ ID NO: 43923 - protein, 9 aa, synthetic construct
  source 1..9: note = Seed: VVGARGVGK (KRAS G12R)
PVGARAVGT

SEQ ID NO: 43924 - protein, 9 aa, synthetic construct
  source 1..9: note = Seed: VVGARGVGK (KRAS G12R)
PVGARAVGV

SEQ ID NO: 43925 - protein, 9 aa, synthetic construct
  source 1..9: note = Seed: VVGARGVGK (KRAS G12R)
PVGARAVGW

SEQ ID NO: 43926 - protein, 9 aa, synthetic construct
  source 1..9: note = Seed: VVGARGVGK (KRAS G12R)
PVGARAVGY

SEQ ID NO: 43927 - protein, 9 aa, synthetic construct
  source 1..9: note = Seed: VVGARGVGK (KRAS G12R)
PVGARCVGA

SEQ ID NO: 43928 - protein, 9 aa, synthetic construct
  source 1..9: note = Seed: VVGARGVGK (KRAS G12R)
PVGARCVGS

SEQ ID NO: 43929 - protein, 9 aa, synthetic construct
  source 1..9: note = Seed: VVGARGVGK (KRAS G12R)
PVGARCVGT

SEQ ID NO: 43930 - protein, 9 aa, synthetic construct
  source 1..9: note = Seed: VVGARGVGK (KRAS G12R)
PVGARCVGV

SEQ ID NO: 43931 - protein, 9 aa, synthetic construct
  source 1..9: note = Seed: VVGARGVGK (KRAS G12R)
PVGARGVGA

SEQ ID NO: 43932 - protein, 9 aa, synthetic construct
  source 1..9: note = Seed: VVGARGVGK (KRAS G12R)
PVGARGVGI

SEQ ID NO: 43933 - protein, 9 aa, synthetic construct
  source 1..9: note = Seed: VVGARGVGK (KRAS G12R)
PVGARGVGS

SEQ ID NO: 43934 - protein, 9 aa, synthetic construct
  source 1..9: note = Seed: VVGARGVGK (KRAS G12R)
PVGARGVGT

SEQ ID NO: 43935 - protein, 9 aa, synthetic construct
  source 1..9: note = Seed: VVGARGVGK (KRAS G12R)
PVGARGVGV

SEQ ID NO: 43936 - protein, 9 aa, synthetic construct
  source 1..9: note = Seed: VVGARGVGK (KRAS G12R)
PVGARIVGA

SEQ ID NO: 43937 - protein, 9 aa, synthetic construct
  source 1..9: note = Seed: VVGARGVGK (KRAS G12R)
PVGARIVGC

SEQ ID NO: 43938 - protein, 9 aa, synthetic construct
  source 1..9: note = Seed: VVGARGVGK (KRAS G12R)
PVGARIVGG

SEQ ID NO: 43939 - protein, 9 aa, synthetic construct
  source 1..9: note = Seed: VVGARGVGK (KRAS G12R)
PVGARIVGH

SEQ ID NO: 43940 - protein, 9 aa, synthetic construct
  source 1..9: note = Seed: VVGARGVGK (KRAS G12R)
PVGARIVGI

SEQ ID NO: 43941 - protein, 9 aa, synthetic construct
  source 1..9: note = Seed: VVGARGVGK (KRAS G12R)
PVGARIVGL

SEQ ID NO: 43942 - protein, 9 aa, synthetic construct
  source 1..9: note = Seed: VVGARGVGK (KRAS G12R)
PVGARIVGM

SEQ ID NO: 43943 - protein, 9 aa, synthetic construct
  source 1..9: note = Seed: VVGARGVGK (KRAS G12R)
PVGARIVGN

SEQ ID NO: 43944 - protein, 9 aa, synthetic construct
  source 1..9: note = Seed: VVGARGVGK (KRAS G12R)
PVGARIVGP

SEQ ID NO: 43945 - protein, 9 aa, synthetic construct
  source 1..9: note = Seed: VVGARGVGK (KRAS G12R)
PVGARIVGQ

SEQ ID NO: 43946 - protein, 9 aa, synthetic construct
  source 1..9: note = Seed: VVGARGVGK (KRAS G12R)
PVGARIVGS

SEQ ID NO: 43947 - protein, 9 aa, synthetic construct
  source 1..9: note = Seed: VVGARGVGK (KRAS G12R)
PVGARIVGT

SEQ ID NO: 43948 - protein, 9 aa, synthetic construct
  source 1..9: note = Seed: VVGARGVGK (KRAS G12R)
PVGARIVGV

SEQ ID NO: 43949 - protein, 9 aa, synthetic construct
  source 1..9: note = Seed: VVGARGVGK (KRAS G12R)
PVGARLVGA

SEQ ID NO: 43950 - protein, 9 aa, synthetic construct
  source 1..9: note = Seed: VVGARGVGK (KRAS G12R)
PVGARLVGG

SEQ ID NO: 43951 - protein, 9 aa, synthetic construct
  source 1..9: note = Seed: VVGARGVGK (KRAS G12R)
PVGARLVGI

SEQ ID NO: 43952 - protein, 9 aa, synthetic construct
  source 1..9: note = Seed: VVGARGVGK (KRAS G12R)
PVGARLVGS

SEQ ID NO: 43953 - protein, 9 aa, synthetic construct
  source 1..9: note = Seed: VVGARGVGK (KRAS G12R)
PVGARLVGT

SEQ ID NO: 43954 - protein, 9 aa, synthetic construct
  source 1..9: note = Seed: VVGARGVGK (KRAS G12R)
PVGARLVGV

SEQ ID NO: 43955 - protein, 9 aa, synthetic construct
  source 1..9: note = Seed: VVGARGVGK (KRAS G12R)
PVGARMVGA

SEQ ID NO: 43956 - protein, 9 aa, synthetic construct
  source 1..9: note = Seed: VVGARGVGK (KRAS G12R)
PVGARMVGI

SEQ ID NO: 43957 - protein, 9 aa, synthetic construct
  source 1..9: note = Seed: VVGARGVGK (KRAS G12R)
PVGARMVGS

SEQ ID NO: 43958 - protein, 9 aa, synthetic construct
  source 1..9: note = Seed: VVGARGVGK (KRAS G12R)
PVGARMVGT

SEQ ID NO: 43959 - protein, 9 aa, synthetic construct
  source 1..9: note = Seed: VVGARGVGK (KRAS G12R)
PVGARMVGV

SEQ ID NO: 43960 - protein, 9 aa, synthetic construct
  source 1..9: note = Seed: VVGARGVGK (KRAS G12R)
PVGARPVGA

SEQ ID NO: 43961 - protein, 9 aa, synthetic construct
  source 1..9: note = Seed: VVGARGVGK (KRAS G12R)
PVGARPVGC

SEQ ID NO: 43962 - protein, 9 aa, synthetic construct
  source 1..9: note = Seed: VVGARGVGK (KRAS G12R)
PVGARPVGF

SEQ ID NO: 43963 - protein, 9 aa, synthetic construct
  source 1..9: note = Seed: VVGARGVGK (KRAS G12R)
PVGARPVGG

SEQ ID NO: 43964 - protein, 9 aa, synthetic construct
  source 1..9: note = Seed: VVGARGVGK (KRAS G12R)
PVGARPVGI

SEQ ID NO: 43965 - protein, 9 aa, synthetic construct
  source 1..9: note = Seed: VVGARGVGK (KRAS G12R)
PVGARPVGL

SEQ ID NO: 43966 - protein, 9 aa, synthetic construct
  source 1..9: note = Seed: VVGARGVGK (KRAS G12R)
PVGARPVGM

SEQ ID NO: 43967 - protein, 9 aa, synthetic construct
  source 1..9: note = Seed: VVGARGVGK (KRAS G12R)
PVGARPVGN

SEQ ID NO: 43968 - protein, 9 aa, synthetic construct
  source 1..9: note = Seed: VVGARGVGK (KRAS G12R)
PVGARPVGP

SEQ ID NO: 43969 - protein, 9 aa, synthetic construct
  source 1..9: note = Seed: VVGARGVGK (KRAS G12R)
PVGARPVGQ

SEQ ID NO: 43970 - protein, 9 aa, synthetic construct
  source 1..9: note = Seed: VVGARGVGK (KRAS G12R)
PVGARPVGS

SEQ ID NO: 43971 - protein, 9 aa, synthetic construct
  source 1..9: note = Seed: VVGARGVGK (KRAS G12R)
PVGARPVGT

SEQ ID NO: 43972 - protein, 9 aa, synthetic construct
  source 1..9: note = Seed: VVGARGVGK (KRAS G12R)
PVGARPVGV

SEQ ID NO: 43973 - protein, 9 aa, synthetic construct
  source 1..9: note = Seed: VVGARGVGK (KRAS G12R)
PVGARPVGW

SEQ ID NO: 43974 - protein, 9 aa, synthetic construct
  source 1..9: note = Seed: VVGARGVGK (KRAS G12R)
PVGARSVGA

SEQ ID NO: 43975 - protein, 9 aa, synthetic construct
  source 1..9: note = Seed: VVGARGVGK (KRAS G12R)
PVGARSVGG

SEQ ID NO: 43976 - protein, 9 aa, synthetic construct
  source 1..9: note = Seed: VVGARGVGK (KRAS G12R)
PVGARSVGI

SEQ ID NO: 43977 - protein, 9 aa, synthetic construct
  source 1..9: note = Seed: VVGARGVGK (KRAS G12R)
PVGARSVGL

SEQ ID NO: 43978 - protein, 9 aa, synthetic construct
  source 1..9: note = Seed: VVGARGVGK (KRAS G12R)
PVGARSVGM

SEQ ID NO: 43979 - protein, 9 aa, synthetic construct
  source 1..9: note = Seed: VVGARGVGK (KRAS G12R)
PVGARSVGS

SEQ ID NO: 43980 - protein, 9 aa, synthetic construct
  source 1..9: note = Seed: VVGARGVGK (KRAS G12R)
PVGARSVGT

SEQ ID NO: 43981 - protein, 9 aa, synthetic construct
  source 1..9: note = Seed: VVGARGVGK (KRAS G12R)
PVGARSVGV

SEQ ID NO: 43982 - protein, 9 aa, synthetic construct
  source 1..9: note = Seed: VVGARGVGK (KRAS G12R)
PVGARTVGA

SEQ ID NO: 43983 - protein, 9 aa, synthetic construct
  source 1..9: note = Seed: VVGARGVGK (KRAS G12R)
PVGARTVGG

SEQ ID NO: 43984 - protein, 9 aa, synthetic construct
  source 1..9: note = Seed: VVGARGVGK (KRAS G12R)
PVGARTVGI

SEQ ID NO: 43985 - protein, 9 aa, synthetic construct
  source 1..9: note = Seed: VVGARGVGK (KRAS G12R)
PVGARTVGL

SEQ ID NO: 43986 - protein, 9 aa, synthetic construct
  source 1..9: note = Seed: VVGARGVGK (KRAS G12R)
PVGARTVGM

SEQ ID NO: 43987 - protein, 9 aa, synthetic construct
  source 1..9: note = Seed: VVGARGVGK (KRAS G12R)
PVGARTVGN

SEQ ID NO: 43988 - protein, 9 aa, synthetic construct
  source 1..9: note = Seed: VVGARGVGK (KRAS G12R)
PVGARTVGS

SEQ ID NO: 43989 - protein, 9 aa, synthetic construct
  source 1..9: note = Seed: VVGARGVGK (KRAS G12R)
PVGARTVGT

SEQ ID NO: 43990 - protein, 9 aa, synthetic construct
  source 1..9: note = Seed: VVGARGVGK (KRAS G12R)
PVGARTVGV

SEQ ID NO: 43991 - protein, 9 aa, synthetic construct
  source 1..9: note = Seed: VVGARGVGK (KRAS G12R)
PVGARVVGA

SEQ ID NO: 43992 - protein, 9 aa, synthetic construct
  source 1..9: note = Seed: VVGARGVGK (KRAS G12R)
PVGARVVGC

SEQ ID NO: 43993 - protein, 9 aa, synthetic construct
  source 1..9: note = Seed: VVGARGVGK (KRAS G12R)
PVGARVVGD

SEQ ID NO: 43994 - protein, 9 aa, synthetic construct
  source 1..9: note = Seed: VVGARGVGK (KRAS G12R)
PVGARVVGE

SEQ ID NO: 43995 - protein, 9 aa, synthetic construct
  source 1..9: note = Seed: VVGARGVGK (KRAS G12R)
PVGARVVGF

SEQ ID NO: 43996 - protein, 9 aa, synthetic construct
  source 1..9: note = Seed: VVGARGVGK (KRAS G12R)
PVGARVVGG

SEQ ID NO: 43997 - protein, 9 aa, synthetic construct
  source 1..9: note = Seed: VVGARGVGK (KRAS G12R)
PVGARVVGH

SEQ ID NO: 43998 - protein, 9 aa, synthetic construct
  source 1..9: note = Seed: VVGARGVGK (KRAS G12R)
PVGARVVGI

SEQ ID NO: 43999 - protein, 9 aa, synthetic construct
  source 1..9: note = Seed: VVGARGVGK (KRAS G12R)
PVGARVVGL

SEQ ID NO: 44000 - protein, 9 aa, synthetic construct
  source 1..9: note = Seed: VVGARGVGK (KRAS G12R)
PVGARVVGM

SEQ ID NO: 44001 - protein, 9 aa, synthetic construct
  source 1..9: note = Seed: VVGARGVGK (KRAS G12R)
PVGARVVGN

SEQ ID NO: 44002 - protein, 9 aa, synthetic construct
  source 1..9: note = Seed: VVGARGVGK (KRAS G12R)
PVGARVVGP

SEQ ID NO: 44003 - protein, 9 aa, synthetic construct
  source 1..9: note = Seed: VVGARGVGK (KRAS G12R)
PVGARVVGQ

SEQ ID NO: 44004 - protein, 9 aa, synthetic construct
  source 1..9: note = Seed: VVGARGVGK (KRAS G12R)
PVGARVVGS

SEQ ID NO: 44005 - protein, 9 aa, synthetic construct
  source 1..9: note = Seed: VVGARGVGK (KRAS G12R)
PVGARVVGT

SEQ ID NO: 44006 - protein, 9 aa, synthetic construct
  source 1..9: note = Seed: VVGARGVGK (KRAS G12R)
PVGARVVGV

SEQ ID NO: 44007 - protein, 9 aa, synthetic construct
  source 1..9: note = Seed: VVGARGVGK (KRAS G12R)
PVGARVVGW

SEQ ID NO: 44008 - protein, 9 aa, synthetic construct
  source 1..9: note = Seed: VVGARGVGK (KRAS G12R)
PVGARVVGY

SEQ ID NO: 44009 - protein, 9 aa, synthetic construct
  source 1..9: note = Seed: VVGARGVGK (KRAS G12R)
PVGGRAVGA

SEQ ID NO: 44010 - protein, 9 aa, synthetic construct
  source 1..9: note = Seed: VVGARGVGK (KRAS G12R)
PVGGRAVGC

SEQ ID NO: 44011 - protein, 9 aa, synthetic construct
  source 1..9: note = Seed: VVGARGVGK (KRAS G12R)
PVGGRAVGD

SEQ ID NO: 44012 - protein, 9 aa, synthetic construct
  source 1..9: note = Seed: VVGARGVGK (KRAS G12R)
PVGGRAVGE

SEQ ID NO: 44013 - protein, 9 aa, synthetic construct
  source 1..9: note = Seed: VVGARGVGK (KRAS G12R)
PVGGRAVGF

SEQ ID NO: 44014 - protein, 9 aa, synthetic construct
  source 1..9: note = Seed: VVGARGVGK (KRAS G12R)
PVGGRAVGG

SEQ ID NO: 44015 - protein, 9 aa, synthetic construct
  source 1..9: note = Seed: VVGARGVGK (KRAS G12R)
PVGGRAVGH

SEQ ID NO: 44016 - protein, 9 aa, synthetic construct
  source 1..9: note = Seed: VVGARGVGK (KRAS G12R)
PVGGRAVGI

SEQ ID NO: 44017 - protein, 9 aa, synthetic construct
  source 1..9: note = Seed: VVGARGVGK (KRAS G12R)
PVGGRAVGL

SEQ ID NO: 44018 - protein, 9 aa, synthetic construct
  source 1..9: note = Seed: VVGARGVGK (KRAS G12R)
PVGGRAVGM

SEQ ID NO: 44019 - protein, 9 aa, synthetic construct
  source 1..9: note = Seed: VVGARGVGK (KRAS G12R)
PVGGRAVGN

SEQ ID NO: 44020 - protein, 9 aa, synthetic construct
  source 1..9: note = Seed: VVGARGVGK (KRAS G12R)
PVGGRAVGP

SEQ ID NO: 44021 - protein, 9 aa, synthetic construct
  source 1..9: note = Seed: VVGARGVGK (KRAS G12R)
PVGGRAVGQ

SEQ ID NO: 44022 - protein, 9 aa, synthetic construct
  source 1..9: note = Seed: VVGARGVGK (KRAS G12R)
PVGGRAVGS

SEQ ID NO: 44023 - protein, 9 aa, synthetic construct
  source 1..9: note = Seed: VVGARGVGK (KRAS G12R)
PVGGRAVGT

SEQ ID NO: 44024 - protein, 9 aa, synthetic construct
  source 1..9: note = Seed: VVGARGVGK (KRAS G12R)
PVGGRAVGV

SEQ ID NO: 44025 - protein, 9 aa, synthetic construct
  source 1..9: note = Seed: VVGARGVGK (KRAS G12R)
PVGGRAVGW

SEQ ID NO: 44026 - protein, 9 aa, synthetic construct
  source 1..9: note = Seed: VVGARGVGK (KRAS G12R)
PVGGRAVGY

SEQ ID NO: 44027 - protein, 9 aa, synthetic construct
  source 1..9: note = Seed: VVGARGVGK (KRAS G12R)
PVGGRCVGA

SEQ ID NO: 44028 - protein, 9 aa, synthetic construct
  source 1..9: note = Seed: VVGARGVGK (KRAS G12R)
PVGGRCVGS

SEQ ID NO: 44029 - protein, 9 aa, synthetic construct
  source 1..9: note = Seed: VVGARGVGK (KRAS G12R)
PVGGRCVGT

SEQ ID NO: 44030 - protein, 9 aa, synthetic construct
  source 1..9: note = Seed: VVGARGVGK (KRAS G12R)
PVGGRCVGV

SEQ ID NO: 44031 - protein, 9 aa, synthetic construct
  source 1..9: note = Seed: VVGARGVGK (KRAS G12R)
PVGGRGVGA

SEQ ID NO: 44032 - protein, 9 aa, synthetic construct
  source 1..9: note = Seed: VVGARGVGK (KRAS G12R)
PVGGRGVGS

SEQ ID NO: 44033 - protein, 9 aa, synthetic construct
  source 1..9: note = Seed: VVGARGVGK (KRAS G12R)
PVGGRGVGT

SEQ ID NO: 44034 - protein, 9 aa, synthetic construct
  source 1..9: note = Seed: VVGARGVGK (KRAS G12R)
PVGGRGVGV

SEQ ID NO: 44035 - protein, 9 aa, synthetic construct
  source 1..9: note = Seed: VVGARGVGK (KRAS G12R)
PVGGRIVGA

SEQ ID NO: 44036 - protein, 9 aa, synthetic construct
  source 1..9: note = Seed: VVGARGVGK (KRAS G12R)
PVGGRIVGC

SEQ ID NO: 44037 - protein, 9 aa, synthetic construct
  source 1..9: note = Seed: VVGARGVGK (KRAS G12R)
PVGGRIVGD

SEQ ID NO: 44038 - protein, 9 aa, synthetic construct
  source 1..9: note = Seed: VVGARGVGK (KRAS G12R)
PVGGRIVGF

SEQ ID NO: 44039 - protein, 9 aa, synthetic construct
  source 1..9: note = Seed: VVGARGVGK (KRAS G12R)
PVGGRIVGG

SEQ ID NO: 44040 - protein, 9 aa, synthetic construct
  source 1..9: note = Seed: VVGARGVGK (KRAS G12R)
PVGGRIVGH

SEQ ID NO: 44041 - protein, 9 aa, synthetic construct
  source 1..9: note = Seed: VVGARGVGK (KRAS G12R)
PVGGRIVGI

SEQ ID NO: 44042 - protein, 9 aa, synthetic construct
  source 1..9: note = Seed: VVGARGVGK (KRAS G12R)
PVGGRIVGL

SEQ ID NO: 44043 - protein, 9 aa, synthetic construct
  source 1..9: note = Seed: VVGARGVGK (KRAS G12R)
PVGGRIVGM

SEQ ID NO: 44044 - protein, 9 aa, synthetic construct
  source 1..9: note = Seed: VVGARGVGK (KRAS G12R)
PVGGRIVGN

SEQ ID NO: 44045 - protein, 9 aa, synthetic construct
  source 1..9: note = Seed: VVGARGVGK (KRAS G12R)
PVGGRIVGP

SEQ ID NO: 44046 - protein, 9 aa, synthetic construct
  source 1..9: note = Seed: VVGARGVGK (KRAS G12R)
PVGGRIVGQ

SEQ ID NO: 44047 - protein, 9 aa, synthetic construct
  source 1..9: note = Seed: VVGARGVGK (KRAS G12R)
PVGGRIVGS

SEQ ID NO: 44048 - protein, 9 aa, synthetic construct
  source 1..9: note = Seed: VVGARGVGK (KRAS G12R)
PVGGRIVGT

SEQ ID NO: 44049 - protein, 9 aa, synthetic construct
  source 1..9: note = Seed: VVGARGVGK (KRAS G12R)
PVGGRIVGV

SEQ ID NO: 44050 - protein, 9 aa, synthetic construct
  source 1..9: note = Seed: VVGARGVGK (KRAS G12R)
PVGGRLVGA

SEQ ID NO: 44051 - protein, 9 aa, synthetic construct
  source 1..9: note = Seed: VVGARGVGK (KRAS G12R)
PVGGRLVGG

SEQ ID NO: 44052 - protein, 9 aa, synthetic construct
  source 1..9: note = Seed: VVGARGVGK (KRAS G12R)
PVGGRLVGI

SEQ ID NO: 44053 - protein, 9 aa, synthetic construct
  source 1..9: note = Seed: VVGARGVGK (KRAS G12R)
PVGGRLVGS

SEQ ID NO: 44054 - protein, 9 aa, synthetic construct
  source 1..9: note = Seed: VVGARGVGK (KRAS G12R)
PVGGRLVGT

SEQ ID NO: 44055 - protein, 9 aa, synthetic construct
  source 1..9: note = Seed: VVGARGVGK (KRAS G12R)
PVGGRLVGV

SEQ ID NO: 44056 - protein, 9 aa, synthetic construct
  source 1..9: note = Seed: VVGARGVGK (KRAS G12R)
PVGGRMVGA

SEQ ID NO: 44057 - protein, 9 aa, synthetic construct
  source 1..9: note = Seed: VVGARGVGK (KRAS G12R)
PVGGRMVGI

SEQ ID NO: 44058 - protein, 9 aa, synthetic construct
  source 1..9: note = Seed: VVGARGVGK (KRAS G12R)
PVGGRMVGS

SEQ ID NO: 44059 - protein, 9 aa, synthetic construct
  source 1..9: note = Seed: VVGARGVGK (KRAS G12R)
PVGGRMVGT

SEQ ID NO: 44060 - protein, 9 aa, synthetic construct
  source 1..9: note = Seed: VVGARGVGK (KRAS G12R)
PVGGRMVGV

SEQ ID NO: 44061 - protein, 9 aa, synthetic construct
  source 1..9: note = Seed: VVGARGVGK (KRAS G12R)
PVGGRPVGA

SEQ ID NO: 44062 - protein, 9 aa, synthetic construct
  source 1..9: note = Seed: VVGARGVGK (KRAS G12R)
PVGGRPVGC

SEQ ID NO: 44063 - protein, 9 aa, synthetic construct
  source 1..9: note = Seed: VVGARGVGK (KRAS G12R)
PVGGRPVGF

SEQ ID NO: 44064 - protein, 9 aa, synthetic construct
  source 1..9: note = Seed: VVGARGVGK (KRAS G12R)
PVGGRPVGG

SEQ ID NO: 44065 - protein, 9 aa, synthetic construct
  source 1..9: note = Seed: VVGARGVGK (KRAS G12R)
PVGGRPVGI

SEQ ID NO: 44066 - protein, 9 aa, synthetic construct
  source 1..9: note = Seed: VVGARGVGK (KRAS G12R)
PVGGRPVGL

SEQ ID NO: 44067 - protein, 9 aa, synthetic construct
  source 1..9: note = Seed: VVGARGVGK (KRAS G12R)
PVGGRPVGM

SEQ ID NO: 44068 - protein, 9 aa, synthetic construct
  source 1..9: note = Seed: VVGARGVGK (KRAS G12R)
PVGGRPVGN

SEQ ID NO: 44069 - protein, 9 aa, synthetic construct
  source 1..9: note = Seed: VVGARGVGK (KRAS G12R)
PVGGRPVGP

SEQ ID NO: 44070 - protein, 9 aa, synthetic construct
  source 1..9: note = Seed: VVGARGVGK (KRAS G12R)
PVGGRPVGS

SEQ ID NO: 44071 - protein, 9 aa, synthetic construct
  source 1..9: note = Seed: VVGARGVGK (KRAS G12R)
PVGGRPVGT

SEQ ID NO: 44072 - protein, 9 aa, synthetic construct
  source 1..9: note = Seed: VVGARGVGK (KRAS G12R)
PVGGRPVGV

SEQ ID NO: 44073 - protein, 9 aa, synthetic construct
  source 1..9: note = Seed: VVGARGVGK (KRAS G12R)
PVGGRSVGA

SEQ ID NO: 44074 - protein, 9 aa, synthetic construct
  source 1..9: note = Seed: VVGARGVGK (KRAS G12R)
PVGGRSVGG

SEQ ID NO: 44075 - protein, 9 aa, synthetic construct
  source 1..9: note = Seed: VVGARGVGK (KRAS G12R)
PVGGRSVGI

SEQ ID NO: 44076 - protein, 9 aa, synthetic construct
  source 1..9: note = Seed: VVGARGVGK (KRAS G12R)
PVGGRSVGL

SEQ ID NO: 44077 - protein, 9 aa, synthetic construct
  source 1..9: note = Seed: VVGARGVGK (KRAS G12R)
PVGGRSVGM

SEQ ID NO: 44078 - protein, 9 aa, synthetic construct
  source 1..9: note = Seed: VVGARGVGK (KRAS G12R)
PVGGRSVGS

SEQ ID NO: 44079 - protein, 9 aa, synthetic construct
  source 1..9: note = Seed: VVGARGVGK (KRAS G12R)
PVGGRSVGT

SEQ ID NO: 44080 - protein, 9 aa, synthetic construct
  source 1..9: note = Seed: VVGARGVGK (KRAS G12R)
PVGGRSVGV

SEQ ID NO: 44081 - protein, 9 aa, synthetic construct
  source 1..9: note = Seed: VVGARGVGK (KRAS G12R)
PVGGRTVGA

SEQ ID NO: 44082 - protein, 9 aa, synthetic construct
  source 1..9: note = Seed: VVGARGVGK (KRAS G12R)
PVGGRTVGG

SEQ ID NO: 44083 - protein, 9 aa, synthetic construct
  source 1..9: note = Seed: VVGARGVGK (KRAS G12R)
PVGGRTVGI

SEQ ID NO: 44084 - protein, 9 aa, synthetic construct
  source 1..9: note = Seed: VVGARGVGK (KRAS G12R)
PVGGRTVGL

SEQ ID NO: 44085 - protein, 9 aa, synthetic construct
  source 1..9: note = Seed: VVGARGVGK (KRAS G12R)
PVGGRTVGM

SEQ ID NO: 44086 - protein, 9 aa, synthetic construct
  source 1..9: note = Seed: VVGARGVGK (KRAS G12R)
PVGGRTVGS

SEQ ID NO: 44087 - protein, 9 aa, synthetic construct
  source 1..9: note = Seed: VVGARGVGK (KRAS G12R)
PVGGRTVGT

SEQ ID NO: 44088 - protein, 9 aa, synthetic construct
  source 1..9: note = Seed: VVGARGVGK (KRAS G12R)
PVGGRTVGV

SEQ ID NO: 44089 - protein, 9 aa, synthetic construct
  source 1..9: note = Seed: VVGARGVGK (KRAS G12R)
PVGGRVVGA

SEQ ID NO: 44090 - protein, 9 aa, synthetic construct
  source 1..9: note = Seed: VVGARGVGK (KRAS G12R)
PVGGRVVGC

SEQ ID NO: 44091 - protein, 9 aa, synthetic construct
  source 1..9: note = Seed: VVGARGVGK (KRAS G12R)
PVGGRVVGD

SEQ ID NO: 44092 - protein, 9 aa, synthetic construct
  source 1..9: note = Seed: VVGARGVGK (KRAS G12R)
PVGGRVVGE

SEQ ID NO: 44093 - protein, 9 aa, synthetic construct
  source 1..9: note = Seed: VVGARGVGK (KRAS G12R)
PVGGRVVGF

SEQ ID NO: 44094 - protein, 9 aa, synthetic construct
  source 1..9: note = Seed: VVGARGVGK (KRAS G12R)
PVGGRVVGG

SEQ ID NO: 44095 - protein, 9 aa, synthetic construct
  source 1..9: note = Seed: VVGARGVGK (KRAS G12R)
PVGGRVVGH

SEQ ID NO: 44096 - protein, 9 aa, synthetic construct
  source 1..9: note = Seed: VVGARGVGK (KRAS G12R)
PVGGRVVGI

SEQ ID NO: 44097 - protein, 9 aa, synthetic construct
  source 1..9: note = Seed: VVGARGVGK (KRAS G12R)
PVGGRVVGL

SEQ ID NO: 44098 - protein, 9 aa, synthetic construct
  source 1..9: note = Seed: VVGARGVGK (KRAS G12R)
PVGGRVVGM

SEQ ID NO: 44099 - protein, 9 aa, synthetic construct
  source 1..9: note = Seed: VVGARGVGK (KRAS G12R)
PVGGRVVGN

SEQ ID NO: 44100 - protein, 9 aa, synthetic construct
  source 1..9: note = Seed: VVGARGVGK (KRAS G12R)
PVGGRVVGP

SEQ ID NO: 44101 - protein, 9 aa, synthetic construct
  source 1..9: note = Seed: VVGARGVGK (KRAS G12R)
PVGGRVVGQ

SEQ ID NO: 44102 - protein, 9 aa, synthetic construct
  source 1..9: note = Seed: VVGARGVGK (KRAS G12R)
PVGGRVVGS

SEQ ID NO: 44103 - protein, 9 aa, synthetic construct
  source 1..9: note = Seed: VVGARGVGK (KRAS G12R)
PVGGRVVGT

SEQ ID NO: 44104 - protein, 9 aa, synthetic construct
  source 1..9: note = Seed: VVGARGVGK (KRAS G12R)
PVGGRVVGV

SEQ ID NO: 44105 - protein, 9 aa, synthetic construct
  source 1..9: note = Seed: VVGARGVGK (KRAS G12R)
PVGGRVVGW

SEQ ID NO: 44106 - protein, 9 aa, synthetic construct
  source 1..9: note = Seed: VVGARGVGK (KRAS G12R)
PVGGRVVGY

SEQ ID NO: 44107 - protein, 9 aa, synthetic construct
  source 1..9: note = Seed: VVGARGVGK (KRAS G12R)
PVGIRAVGA

SEQ ID NO: 44108 - protein, 9 aa, synthetic construct
  source 1..9: note = Seed: VVGARGVGK (KRAS G12R)
PVGIRAVGL

SEQ ID NO: 44109 - protein, 9 aa, synthetic construct
  source 1..9: note = Seed: VVGARGVGK (KRAS G12R)
PVGLRAVGI

SEQ ID NO: 44110 - protein, 9 aa, synthetic construct
  source 1..9: note = Seed: VVGARGVGK (KRAS G12R)
PVGLRAVGL

SEQ ID NO: 44111 - protein, 9 aa, synthetic construct
  source 1..9: note = Seed: VVGARGVGK (KRAS G12R)
PVGLRAVGM

SEQ ID NO: 44112 - protein, 9 aa, synthetic construct
  source 1..9: note = Seed: VVGARGVGK (KRAS G12R)
PVGLRAVGV

SEQ ID NO: 44113 - protein, 9 aa, synthetic construct
  source 1..9: note = Seed: VVGARGVGK (KRAS G12R)
PVGLRGVGI

SEQ ID NO: 44114 - protein, 9 aa, synthetic construct
  source 1..9: note = Seed: VVGARGVGK (KRAS G12R)
PVGLRGVGL

SEQ ID NO: 44115 - protein, 9 aa, synthetic construct
  source 1..9: note = Seed: VVGARGVGK (KRAS G12R)
PVGLRGVGV

SEQ ID NO: 44116 - protein, 9 aa, synthetic construct
  source 1..9: note = Seed: VVGARGVGK (KRAS G12R)
PVGLRSVGI

SEQ ID NO: 44117 - protein, 9 aa, synthetic construct
  source 1..9: note = Seed: VVGARGVGK (KRAS G12R)
PVGLRSVGL

SEQ ID NO: 44118 - protein, 9 aa, synthetic construct
  source 1..9: note = Seed: VVGARGVGK (KRAS G12R)
PVGMRAVGI

SEQ ID NO: 44119 - protein, 9 aa, synthetic construct
  source 1..9: note = Seed: VVGARGVGK (KRAS G12R)
PVGMRAVGL

SEQ ID NO: 44120 - protein, 9 aa, synthetic construct
  source 1..9: note = Seed: VVGARGVGK (KRAS G12R)
PVGMRAVGM

SEQ ID NO: 44121 - protein, 9 aa, synthetic construct
  source 1..9: note = Seed: VVGARGVGK (KRAS G12R)
PVGMRAVGV

SEQ ID NO: 44122 - protein, 9 aa, synthetic construct
  source 1..9: note = Seed: VVGARGVGK (KRAS G12R)
PVGMRGVGI

SEQ ID NO: 44123 - protein, 9 aa, synthetic construct
  source 1..9: note = Seed: VVGARGVGK (KRAS G12R)
PVGMRGVGL

SEQ ID NO: 44124 - protein, 9 aa, synthetic construct
  source 1..9: note = Seed: VVGARGVGK (KRAS G12R)
PVGMRGVGV

SEQ ID NO: 44125 - protein, 9 aa, synthetic construct
  source 1..9: note = Seed: VVGARGVGK (KRAS G12R)
PVGMRSVGI

SEQ ID NO: 44126 - protein, 9 aa, synthetic construct
  source 1..9: note = Seed: VVGARGVGK (KRAS G12R)
PVGMRSVGL

SEQ ID NO: 44127 - protein, 9 aa, synthetic construct
  source 1..9: note = Seed: VVGARGVGK (KRAS G12R)
PVGMRSVGV

SEQ ID NO: 44128 - protein, 9 aa, synthetic construct
  source 1..9: note = Seed: VVGARGVGK (KRAS G12R)
PVGRRRVGR

SEQ ID NO: 44129 - protein, 9 aa, synthetic construct
  source 1..9: note = Seed: VVGARGVGK (KRAS G12R)
PVGSRAVGA

SEQ ID NO: 44130 - protein, 9 aa, synthetic construct
  source 1..9: note = Seed: VVGARGVGK (KRAS G12R)
PVGSRAVGC

SEQ ID NO: 44131 - protein, 9 aa, synthetic construct
  source 1..9: note = Seed: VVGARGVGK (KRAS G12R)
PVGSRAVGG

SEQ ID NO: 44132 - protein, 9 aa, synthetic construct
  source 1..9: note = Seed: VVGARGVGK (KRAS G12R)
PVGSRAVGI

SEQ ID NO: 44133 - protein, 9 aa, synthetic construct
  source 1..9: note = Seed: VVGARGVGK (KRAS G12R)
PVGSRAVGL

SEQ ID NO: 44134 - protein, 9 aa, synthetic construct
  source 1..9: note = Seed: VVGARGVGK (KRAS G12R)
PVGSRAVGM

SEQ ID NO: 44135 - protein, 9 aa, synthetic construct
  source 1..9: note = Seed: VVGARGVGK (KRAS G12R)
PVGSRAVGN

SEQ ID NO: 44136 - protein, 9 aa, synthetic construct
  source 1..9: note = Seed: VVGARGVGK (KRAS G12R)
PVGSRAVGS

SEQ ID NO: 44137 - protein, 9 aa, synthetic construct
  source 1..9: note = Seed: VVGARGVGK (KRAS G12R)
PVGSRAVGT

SEQ ID NO: 44138 - protein, 9 aa, synthetic construct
  source 1..9: note = Seed: VVGARGVGK (KRAS G12R)
PVGSRAVGV

SEQ ID NO: 44139 - protein, 9 aa, synthetic construct
  source 1..9: note = Seed: VVGARGVGK (KRAS G12R)
PVGSRGVGA

SEQ ID NO: 44140 - protein, 9 aa, synthetic construct
  source 1..9: note = Seed: VVGARGVGK (KRAS G12R)
PVGSRIVGA

SEQ ID NO: 44141 - protein, 9 aa, synthetic construct
  source 1..9: note = Seed: VVGARGVGK (KRAS G12R)
PVGSRIVGG

SEQ ID NO: 44142 - protein, 9 aa, synthetic construct
  source 1..9: note = Seed: VVGARGVGK (KRAS G12R)
PVGSRIVGI

SEQ ID NO: 44143 - protein, 9 aa, synthetic construct
  source 1..9: note = Seed: VVGARGVGK (KRAS G12R)
PVGSRIVGS

SEQ ID NO: 44144 - protein, 9 aa, synthetic construct
  source 1..9: note = Seed: VVGARGVGK (KRAS G12R)
PVGSRIVGT

SEQ ID NO: 44145 - protein, 9 aa, synthetic construct
  source 1..9: note = Seed: VVGARGVGK (KRAS G12R)
PVGSRIVGV

SEQ ID NO: 44146 - protein, 9 aa, synthetic construct
  source 1..9: note = Seed: VVGARGVGK (KRAS G12R)
PVGSRLVGA

SEQ ID NO: 44147 - protein, 9 aa, synthetic construct
  source 1..9: note = Seed: VVGARGVGK (KRAS G12R)
PVGSRMVGA

SEQ ID NO: 44148 - protein, 9 aa, synthetic construct
  source 1..9: note = Seed: VVGARGVGK (KRAS G12R)
PVGSRPVGA

SEQ ID NO: 44149 - protein, 9 aa, synthetic construct
  source 1..9: note = Seed: VVGARGVGK (KRAS G12R)
PVGSRPVGG

SEQ ID NO: 44150 - protein, 9 aa, synthetic construct
  source 1..9: note = Seed: VVGARGVGK (KRAS G12R)
PVGSRPVGI

SEQ ID NO: 44151 - protein, 9 aa, synthetic construct
  source 1..9: note = Seed: VVGARGVGK (KRAS G12R)
PVGSRPVGS

SEQ ID NO: 44152 - protein, 9 aa, synthetic construct
  source 1..9: note = Seed: VVGARGVGK (KRAS G12R)
PVGSRPVGT

SEQ ID NO: 44153 - protein, 9 aa, synthetic construct
  source 1..9: note = Seed: VVGARGVGK (KRAS G12R)
PVGSRPVGV

SEQ ID NO: 44154 - protein, 9 aa, synthetic construct
  source 1..9: note = Seed: VVGARGVGK (KRAS G12R)
PVGSRSVGA

SEQ ID NO: 44155 - protein, 9 aa, synthetic construct
  source 1..9: note = Seed: VVGARGVGK (KRAS G12R)
PVGSRSVGS

SEQ ID NO: 44156 - protein, 9 aa, synthetic construct
  source 1..9: note = Seed: VVGARGVGK (KRAS G12R)
PVGSRSVGT

SEQ ID NO: 44157 - protein, 9 aa, synthetic construct
  source 1..9: note = Seed: VVGARGVGK (KRAS G12R)
PVGSRSVGV

SEQ ID NO: 44158 - protein, 9 aa, synthetic construct
  source 1..9: note = Seed: VVGARGVGK (KRAS G12R)
PVGSRTVGA

SEQ ID NO: 44159 - protein, 9 aa, synthetic construct
  source 1..9: note = Seed: VVGARGVGK (KRAS G12R)
PVGSRTVGG

SEQ ID NO: 44160 - protein, 9 aa, synthetic construct
  source 1..9: note = Seed: VVGARGVGK (KRAS G12R)
PVGSRTVGS

SEQ ID NO: 44161 - protein, 9 aa, synthetic construct
  source 1..9: note = Seed: VVGARGVGK (KRAS G12R)
PVGSRTVGT

SEQ ID NO: 44162 - protein, 9 aa, synthetic construct
  source 1..9: note = Seed: VVGARGVGK (KRAS G12R)
PVGSRTVGV

SEQ ID NO: 44163 - protein, 9 aa, synthetic construct
  source 1..9: note = Seed: VVGARGVGK (KRAS G12R)
PVGSRVVGA

SEQ ID NO: 44164 - protein, 9 aa, synthetic construct
  source 1..9: note = Seed: VVGARGVGK (KRAS G12R)
PVGSRVVGC

SEQ ID NO: 44165 - protein, 9 aa, synthetic construct
  source 1..9: note = Seed: VVGARGVGK (KRAS G12R)
PVGSRVVGG

SEQ ID NO: 44166 - protein, 9 aa, synthetic construct
  source 1..9: note = Seed: VVGARGVGK (KRAS G12R)
PVGSRVVGI

SEQ ID NO: 44167 - protein, 9 aa, synthetic construct
  source 1..9: note = Seed: VVGARGVGK (KRAS G12R)
PVGSRVVGM

SEQ ID NO: 44168 - protein, 9 aa, synthetic construct
  source 1..9: note = Seed: VVGARGVGK (KRAS G12R)
PVGSRVVGN

SEQ ID NO: 44169 - protein, 9 aa, synthetic construct
  source 1..9: note = Seed: VVGARGVGK (KRAS G12R)
PVGSRVVGS

SEQ ID NO: 44170 - protein, 9 aa, synthetic construct
  source 1..9: note = Seed: VVGARGVGK (KRAS G12R)
PVGSRVVGT

SEQ ID NO: 44171 - protein, 9 aa, synthetic construct
  source 1..9: note = Seed: VVGARGVGK (KRAS G12R)
PVGSRVVGV

SEQ ID NO: 44172 - protein, 9 aa, synthetic construct
  source 1..9: note = Seed: VVGARGVGK (KRAS G12R)
PVGTRAVGA

SEQ ID NO: 44173 - protein, 9 aa, synthetic construct
  source 1..9: note = Seed: VVGARGVGK (KRAS G12R)
PVGTRAVGS

SEQ ID NO: 44174 - protein, 9 aa, synthetic construct
  source 1..9: note = Seed: VVGARGVGK (KRAS G12R)
PVGTRAVGT

SEQ ID NO: 44175 - protein, 9 aa, synthetic construct
  source 1..9: note = Seed: VVGARGVGK (KRAS G12R)
PVGTRAVGV

SEQ ID NO: 44176 - protein, 9 aa, synthetic construct
  source 1..9: note = Seed: VVGARGVGK (KRAS G12R)
PVGTRIVGA

SEQ ID NO: 44177 - protein, 9 aa, synthetic construct
  source 1..9: note = Seed: VVGARGVGK (KRAS G12R)
PVGTRPVGA

SEQ ID NO: 44178 - protein, 9 aa, synthetic construct
  source 1..9: note = Seed: VVGARGVGK (KRAS G12R)
PVGTRVVGA

SEQ ID NO: 44179 - protein, 9 aa, synthetic construct
  source 1..9: note = Seed: VVGARGVGK (KRAS G12R)
PVGTRVVGS

SEQ ID NO: 44180 - protein, 9 aa, synthetic construct
  source 1..9: note = Seed: VVGARGVGK (KRAS G12R)
PVGTRVVGT

SEQ ID NO: 44181 - protein, 9 aa, synthetic construct
  source 1..9: note = Seed: VVGARGVGK (KRAS G12R)
PVGVRAVGA

SEQ ID NO: 44182 - protein, 9 aa, synthetic construct
  source 1..9: note = Seed: VVGARGVGK (KRAS G12R)
QVGARAVGA

SEQ ID NO: 44183 - protein, 9 aa, synthetic construct
  source 1..9: note = Seed: VVGARGVGK (KRAS G12R)
QVGARAVGC

SEQ ID NO: 44184 - protein, 9 aa, synthetic construct
  source 1..9: note = Seed: VVGARGVGK (KRAS G12R)
QVGARAVGG

SEQ ID NO: 44185 - protein, 9 aa, synthetic construct
  source 1..9: note = Seed: VVGARGVGK (KRAS G12R)
QVGARAVGI

SEQ ID NO: 44186 - protein, 9 aa, synthetic construct
  source 1..9: note = Seed: VVGARGVGK (KRAS G12R)
QVGARAVGL

SEQ ID NO: 44187 - protein, 9 aa, synthetic construct
  source 1..9: note = Seed: VVGARGVGK (KRAS G12R)
QVGARAVGM

SEQ ID NO: 44188 - protein, 9 aa, synthetic construct
  source 1..9: note = Seed: VVGARGVGK (KRAS G12R)
QVGARAVGS

SEQ ID NO: 44189 - protein, 9 aa, synthetic construct
  source 1..9: note = Seed: VVGARGVGK (KRAS G12R)
QVGARAVGT

SEQ ID NO: 44190 - protein, 9 aa, synthetic construct
  source 1..9: note = Seed: VVGARGVGK (KRAS G12R)
QVGARAVGV

SEQ ID NO: 44191 - protein, 9 aa, synthetic construct
  source 1..9: note = Seed: VVGARGVGK (KRAS G12R)
QVGARGVGA

SEQ ID NO: 44192 - protein, 9 aa, synthetic construct
  source 1..9: note = Seed: VVGARGVGK (KRAS G12R)
QVGARIVGA

SEQ ID NO: 44193 - protein, 9 aa, synthetic construct
  source 1..9: note = Seed: VVGARGVGK (KRAS G12R)
QVGARIVGS

SEQ ID NO: 44194 - protein, 9 aa, synthetic construct
  source 1..9: note = Seed: VVGARGVGK (KRAS G12R)
QVGARIVGT

SEQ ID NO: 44195 - protein, 9 aa, synthetic construct
  source 1..9: note = Seed: VVGARGVGK (KRAS G12R)
QVGARIVGV

SEQ ID NO: 44196 - protein, 9 aa, synthetic construct
  source 1..9: note = Seed: VVGARGVGK (KRAS G12R)
QVGARMVGA

SEQ ID NO: 44197 - protein, 9 aa, synthetic construct
  source 1..9: note = Seed: VVGARGVGK (KRAS G12R)
QVGARPVGA

SEQ ID NO: 44198 - protein, 9 aa, synthetic construct
  source 1..9: note = Seed: VVGARGVGK (KRAS G12R)
QVGARPVGI

SEQ ID NO: 44199 - protein, 9 aa, synthetic construct
  source 1..9: note = Seed: VVGARGVGK (KRAS G12R)
QVGARPVGS

SEQ ID NO: 44200 - protein, 9 aa, synthetic construct
  source 1..9: note = Seed: VVGARGVGK (KRAS G12R)
QVGARPVGT

SEQ ID NO: 44201 - protein, 9 aa, synthetic construct
  source 1..9: note = Seed: VVGARGVGK (KRAS G12R)
QVGARPVGV

SEQ ID NO: 44202 - protein, 9 aa, synthetic construct
  source 1..9: note = Seed: VVGARGVGK (KRAS G12R)
QVGARSVGA

SEQ ID NO: 44203 - protein, 9 aa, synthetic construct
  source 1..9: note = Seed: VVGARGVGK (KRAS G12R)
QVGARSVGS

SEQ ID NO: 44204 - protein, 9 aa, synthetic construct
  source 1..9: note = Seed: VVGARGVGK (KRAS G12R)
QVGARSVGV

SEQ ID NO: 44205 - protein, 9 aa, synthetic construct
  source 1..9: note = Seed: VVGARGVGK (KRAS G12R)
QVGARTVGA

SEQ ID NO: 44206 - protein, 9 aa, synthetic construct
  source 1..9: note = Seed: VVGARGVGK (KRAS G12R)
QVGARTVGV

SEQ ID NO: 44207 - protein, 9 aa, synthetic construct
  source 1..9: note = Seed: VVGARGVGK (KRAS G12R)
QVGARVVGA

SEQ ID NO: 44208 - protein, 9 aa, synthetic construct
  source 1..9: note = Seed: VVGARGVGK (KRAS G12R)
QVGARVVGG

SEQ ID NO: 44209 - protein, 9 aa, synthetic construct
  source 1..9: note = Seed: VVGARGVGK (KRAS G12R)
QVGARVVGI

SEQ ID NO: 44210 - protein, 9 aa, synthetic construct
  source 1..9: note = Seed: VVGARGVGK (KRAS G12R)
QVGARVVGS

SEQ ID NO: 44211 - protein, 9 aa, synthetic construct
  source 1..9: note = Seed: VVGARGVGK (KRAS G12R)
QVGARVVGT

SEQ ID NO: 44212 - protein, 9 aa, synthetic construct
  source 1..9: note = Seed: VVGARGVGK (KRAS G12R)
QVGARVVGV

SEQ ID NO: 44213 - protein, 9 aa, synthetic construct
  source 1..9: note = Seed: VVGARGVGK (KRAS G12R)
QVGGRAVGA

SEQ ID NO: 44214 - protein, 9 aa, synthetic construct
  source 1..9: note = Seed: VVGARGVGK (KRAS G12R)
QVGGRAVGG

SEQ ID NO: 44215 - protein, 9 aa, synthetic construct
  source 1..9: note = Seed: VVGARGVGK (KRAS G12R)
QVGGRAVGI

SEQ ID NO: 44216 - protein, 9 aa, synthetic construct
  source 1..9: note = Seed: VVGARGVGK (KRAS G12R)
QVGGRAVGL

SEQ ID NO: 44217 - protein, 9 aa, synthetic construct
  source 1..9: note = Seed: VVGARGVGK (KRAS G12R)
QVGGRAVGM

SEQ ID NO: 44218 - protein, 9 aa, synthetic construct
  source 1..9: note = Seed: VVGARGVGK (KRAS G12R)
QVGGRAVGS

SEQ ID NO: 44219 - protein, 9 aa, synthetic construct
  source 1..9: note = Seed: VVGARGVGK (KRAS G12R)
QVGGRAVGT

SEQ ID NO: 44220 - protein, 9 aa, synthetic construct
  source 1..9: note = Seed: VVGARGVGK (KRAS G12R)
QVGGRAVGV

SEQ ID NO: 44221 - protein, 9 aa, synthetic construct
  source 1..9: note = Seed: VVGARGVGK (KRAS G12R)
QVGGRIVGA

SEQ ID NO: 44222 - protein, 9 aa, synthetic construct
  source 1..9: note = Seed: VVGARGVGK (KRAS G12R)
QVGGRIVGS

SEQ ID NO: 44223 - protein, 9 aa, synthetic construct
  source 1..9: note = Seed: VVGARGVGK (KRAS G12R)
QVGGRIVGT

SEQ ID NO: 44224 - protein, 9 aa, synthetic construct
  source 1..9: note = Seed: VVGARGVGK (KRAS G12R)
QVGGRIVGV

SEQ ID NO: 44225 - protein, 9 aa, synthetic construct
  source 1..9: note = Seed: VVGARGVGK (KRAS G12R)
QVGGRPVGA

SEQ ID NO: 44226 - protein, 9 aa, synthetic construct
  source 1..9: note = Seed: VVGARGVGK (KRAS G12R)
QVGGRPVGI

SEQ ID NO: 44227 - protein, 9 aa, synthetic construct
  source 1..9: note = Seed: VVGARGVGK (KRAS G12R)
QVGGRPVGS

SEQ ID NO: 44228 - protein, 9 aa, synthetic construct
  source 1..9: note = Seed: VVGARGVGK (KRAS G12R)
QVGGRPVGT

SEQ ID NO: 44229 - protein, 9 aa, synthetic construct
  source 1..9: note = Seed: VVGARGVGK (KRAS G12R)
QVGGRPVGV

SEQ ID NO: 44230 - protein, 9 aa, synthetic construct
  source 1..9: note = Seed: VVGARGVGK (KRAS G12R)
QVGGRSVGA

SEQ ID NO: 44231 - protein, 9 aa, synthetic construct
  source 1..9: note = Seed: VVGARGVGK (KRAS G12R)
QVGGRTVGA

SEQ ID NO: 44232 - protein, 9 aa, synthetic construct
  source 1..9: note = Seed: VVGARGVGK (KRAS G12R)
QVGGRVVGA

SEQ ID NO: 44233 - protein, 9 aa, synthetic construct
  source 1..9: note = Seed: VVGARGVGK (KRAS G12R)
QVGGRVVGI

SEQ ID NO: 44234 - protein, 9 aa, synthetic construct
  source 1..9: note = Seed: VVGARGVGK (KRAS G12R)
QVGGRVVGS

SEQ ID NO: 44235 - protein, 9 aa, synthetic construct
  source 1..9: note = Seed: VVGARGVGK (KRAS G12R)
QVGGRVVGT

SEQ ID NO: 44236 - protein, 9 aa, synthetic construct
  source 1..9: note = Seed: VVGARGVGK (KRAS G12R)
QVGGRVVGV

SEQ ID NO: 44237 - protein, 9 aa, synthetic construct
  source 1..9: note = Seed: VVGARGVGK (KRAS G12R)
QVGIRAVGL

SEQ ID NO: 44238 - protein, 9 aa, synthetic construct
  source 1..9: note = Seed: VVGARGVGK (KRAS G12R)
QVGLRAVGI

SEQ ID NO: 44239 - protein, 9 aa, synthetic construct
  source 1..9: note = Seed: VVGARGVGK (KRAS G12R)
QVGLRAVGL

SEQ ID NO: 44240 - protein, 9 aa, synthetic construct
  source 1..9: note = Seed: VVGARGVGK (KRAS G12R)
QVGLRAVGM

SEQ ID NO: 44241 - protein, 9 aa, synthetic construct
  source 1..9: note = Seed: VVGARGVGK (KRAS G12R)
QVGLRAVGV

SEQ ID NO: 44242 - protein, 9 aa, synthetic construct
  source 1..9: note = Seed: VVGARGVGK (KRAS G12R)
QVGLRGVGI

SEQ ID NO: 44243 - protein, 9 aa, synthetic construct
  source 1..9: note = Seed: VVGARGVGK (KRAS G12R)
QVGLRGVGL

SEQ ID NO: 44244 - protein, 9 aa, synthetic construct
  source 1..9: note = Seed: VVGARGVGK (KRAS G12R)
QVGLRGVGM

SEQ ID NO: 44245 - protein, 9 aa, synthetic construct
  source 1..9: note = Seed: VVGARGVGK (KRAS G12R)
QVGLRGVGV

SEQ ID NO: 44246 - protein, 9 aa, synthetic construct
  source 1..9: note = Seed: VVGARGVGK (KRAS G12R)
QVGLRPVGI

SEQ ID NO: 44247 - protein, 9 aa, synthetic construct
  source 1..9: note = Seed: VVGARGVGK (KRAS G12R)
QVGLRPVGL

SEQ ID NO: 44248 - protein, 9 aa, synthetic construct
  source 1..9: note = Seed: VVGARGVGK (KRAS G12R)
QVGLRPVGV

SEQ ID NO: 44249 - protein, 9 aa, synthetic construct
  source 1..9: note = Seed: VVGARGVGK (KRAS G12R)
QVGLRSVGI

SEQ ID NO: 44250 - protein, 9 aa, synthetic construct
  source 1..9: note = Seed: VVGARGVGK (KRAS G12R)
QVGLRSVGL

SEQ ID NO: 44251 - protein, 9 aa, synthetic construct
  source 1..9: note = Seed: VVGARGVGK (KRAS G12R)
QVGLRSVGM

SEQ ID NO: 44252 - protein, 9 aa, synthetic construct
  source 1..9: note = Seed: VVGARGVGK (KRAS G12R)
QVGLRSVGV

SEQ ID NO: 44253 - protein, 9 aa, synthetic construct
  source 1..9: note = Seed: VVGARGVGK (KRAS G12R)
QVGMRAVGI

SEQ ID NO: 44254 - protein, 9 aa, synthetic construct
  source 1..9: note = Seed: VVGARGVGK (KRAS G12R)
QVGMRAVGL

SEQ ID NO: 44255 - protein, 9 aa, synthetic construct
  source 1..9: note = Seed: VVGARGVGK (KRAS G12R)
QVGMRAVGM

SEQ ID NO: 44256 - protein, 9 aa, synthetic construct
  source 1..9: note = Seed: VVGARGVGK (KRAS G12R)
QVGMRAVGV

SEQ ID NO: 44257 - protein, 9 aa, synthetic construct
  source 1..9: note = Seed: VVGARGVGK (KRAS G12R)
QVGMRGVGI

SEQ ID NO: 44258 - protein, 9 aa, synthetic construct
  source 1..9: note = Seed: VVGARGVGK (KRAS G12R)
QVGMRGVGL

SEQ ID NO: 44259 - protein, 9 aa, synthetic construct
  source 1..9: note = Seed: VVGARGVGK (KRAS G12R)
QVGMRGVGM

SEQ ID NO: 44260 - protein, 9 aa, synthetic construct
  source 1..9: note = Seed: VVGARGVGK (KRAS G12R)
QVGMRGVGV

SEQ ID NO: 44261 - protein, 9 aa, synthetic construct
  source 1..9: note = Seed: VVGARGVGK (KRAS G12R)
QVGMRPVGI

SEQ ID NO: 44262 - protein, 9 aa, synthetic construct
  source 1..9: note = Seed: VVGARGVGK (KRAS G12R)
QVGMRPVGL

SEQ ID NO: 44263 - protein, 9 aa, synthetic construct
  source 1..9: note = Seed: VVGARGVGK (KRAS G12R)
QVGMRPVGV

SEQ ID NO: 44264 - protein, 9 aa, synthetic construct
  source 1..9: note = Seed: VVGARGVGK (KRAS G12R)
QVGMRSVGI

SEQ ID NO: 44265 - protein, 9 aa, synthetic construct
  source 1..9: note = Seed: VVGARGVGK (KRAS G12R)
QVGMRSVGL

SEQ ID NO: 44266 - protein, 9 aa, synthetic construct
  source 1..9: note = Seed: VVGARGVGK (KRAS G12R)
QVGMRSVGM

SEQ ID NO: 44267 - protein, 9 aa, synthetic construct
  source 1..9: note = Seed: VVGARGVGK (KRAS G12R)
QVGMRSVGV

SEQ ID NO: 44268 - protein, 9 aa, synthetic construct
  source 1..9: note = Seed: VVGARGVGK (KRAS G12R)
QVGSRAVGA

SEQ ID NO: 44269 - protein, 9 aa, synthetic construct
  source 1..9: note = Seed: VVGARGVGK (KRAS G12R)
QVGSRAVGI

SEQ ID NO: 44270 - protein, 9 aa, synthetic construct
  source 1..9: note = Seed: VVGARGVGK (KRAS G12R)
QVGSRAVGS

SEQ ID NO: 44271 - protein, 9 aa, synthetic construct
  source 1..9: note = Seed: VVGARGVGK (KRAS G12R)
QVGSRAVGT

SEQ ID NO: 44272 - protein, 9 aa, synthetic construct
  source 1..9: note = Seed: VVGARGVGK (KRAS G12R)
QVGSRAVGV

SEQ ID NO: 44273 - protein, 9 aa, synthetic construct
  source 1..9: note = Seed: VVGARGVGK (KRAS G12R)
QVGSRIVGA

SEQ ID NO: 44274 - protein, 9 aa, synthetic construct
  source 1..9: note = Seed: VVGARGVGK (KRAS G12R)
QVGSRIVGS

SEQ ID NO: 44275 - protein, 9 aa, synthetic construct
  source 1..9: note = Seed: VVGARGVGK (KRAS G12R)
QVGSRPVGA

SEQ ID NO: 44276 - protein, 9 aa, synthetic construct
  source 1..9: note = Seed: VVGARGVGK (KRAS G12R)
QVGSRVVGA

SEQ ID NO: 44277 - protein, 9 aa, synthetic construct
  source 1..9: note = Seed: VVGARGVGK (KRAS G12R)
QVGTRSVGI

SEQ ID NO: 44278 - protein, 9 aa, synthetic construct
  source 1..9: note = Seed: VVGARGVGK (KRAS G12R)
RVGARAVGA

SEQ ID NO: 44279 - protein, 9 aa, synthetic construct
  source 1..9: note = Seed: VVGARGVGK (KRAS G12R)
RVGARAVGI

SEQ ID NO: 44280 - protein, 9 aa, synthetic construct
  source 1..9: note = Seed: VVGARGVGK (KRAS G12R)
RVGARAVGL

SEQ ID NO: 44281 - protein, 9 aa, synthetic construct
  source 1..9: note = Seed: VVGARGVGK (KRAS G12R)
RVGARAVGV

SEQ ID NO: 44282 - protein, 9 aa, synthetic construct
  source 1..9: note = Seed: VVGARGVGK (KRAS G12R)
RVGARVVGA

SEQ ID NO: 44283 - protein, 9 aa, synthetic construct
  source 1..9: note = Seed: VVGARGVGK (KRAS G12R)
RVGLRAVGI

SEQ ID NO: 44284 - protein, 9 aa, synthetic construct
  source 1..9: note = Seed: VVGARGVGK (KRAS G12R)
RVGLRAVGL

SEQ ID NO: 44285 - protein, 9 aa, synthetic construct
  source 1..9: note = Seed: VVGARGVGK (KRAS G12R)
RVGLRAVGM

SEQ ID NO: 44286 - protein, 9 aa, synthetic construct
  source 1..9: note = Seed: VVGARGVGK (KRAS G12R)
RVGLRGVGI

SEQ ID NO: 44287 - protein, 9 aa, synthetic construct
  source 1..9: note = Seed: VVGARGVGK (KRAS G12R)
RVGLRGVGL

SEQ ID NO: 44288 - protein, 9 aa, synthetic construct
  source 1..9: note = Seed: VVGARGVGK (KRAS G12R)
RVGLRGVGV

SEQ ID NO: 44289 - protein, 9 aa, synthetic construct
  source 1..9: note = Seed: VVGARGVGK (KRAS G12R)
RVGLRSVGL

SEQ ID NO: 44290 - protein, 9 aa, synthetic construct
  source 1..9: note = Seed: VVGARGVGK (KRAS G12R)
RVGMRAVGI

SEQ ID NO: 44291 - protein, 9 aa, synthetic construct
  source 1..9: note = Seed: VVGARGVGK (KRAS G12R)
RVGMRAVGL

SEQ ID NO: 44292 - protein, 9 aa, synthetic construct
  source 1..9: note = Seed: VVGARGVGK (KRAS G12R)
RVGMRAVGM

SEQ ID NO: 44293 - protein, 9 aa, synthetic construct
  source 1..9: note = Seed: VVGARGVGK (KRAS G12R)
RVGMRGVGI

SEQ ID NO: 44294 - protein, 9 aa, synthetic construct
  source 1..9: note = Seed: VVGARGVGK (KRAS G12R)
RVGMRGVGL

SEQ ID NO: 44295 - protein, 9 aa, synthetic construct
  source 1..9: note = Seed: VVGARGVGK (KRAS G12R)
RVGMRGVGV

SEQ ID NO: 44296 - protein, 9 aa, synthetic construct
  source 1..9: note = Seed: VVGARGVGK (KRAS G12R)
RVGMRSVGL

SEQ ID NO: 44297 - protein, 9 aa, synthetic construct
  source 1..9: note = Seed: VVGARGVGK (KRAS G12R)
SVGARAVGA

SEQ ID NO: 44298 - protein, 9 aa, synthetic construct
  source 1..9: note = Seed: VVGARGVGK (KRAS G12R)
SVGARAVGC

SEQ ID NO: 44299 - protein, 9 aa, synthetic construct
  source 1..9: note = Seed: VVGARGVGK (KRAS G12R)
SVGARAVGG

SEQ ID NO: 44300 - protein, 9 aa, synthetic construct
  source 1..9: note = Seed: VVGARGVGK (KRAS G12R)
SVGARAVGI

SEQ ID NO: 44301 - protein, 9 aa, synthetic construct
  source 1..9: note = Seed: VVGARGVGK (KRAS G12R)
SVGARAVGL

SEQ ID NO: 44302 - protein, 9 aa, synthetic construct
  source 1..9: note = Seed: VVGARGVGK (KRAS G12R)
SVGARAVGM

SEQ ID NO: 44303 - protein, 9 aa, synthetic construct
  source 1..9: note = Seed: VVGARGVGK (KRAS G12R)
SVGARAVGN

SEQ ID NO: 44304 - protein, 9 aa, synthetic construct
  source 1..9: note = Seed: VVGARGVGK (KRAS G12R)
SVGARAVGP

SEQ ID NO: 44305 - protein, 9 aa, synthetic construct
  source 1..9: note = Seed: VVGARGVGK (KRAS G12R)
SVGARAVGS

SEQ ID NO: 44306 - protein, 9 aa, synthetic construct
  source 1..9: note = Seed: VVGARGVGK (KRAS G12R)
SVGARAVGT

SEQ ID NO: 44307 - protein, 9 aa, synthetic construct
  source 1..9: note = Seed: VVGARGVGK (KRAS G12R)
SVGARAVGV

SEQ ID NO: 44308 - protein, 9 aa, synthetic construct
  source 1..9: note = Seed: VVGARGVGK (KRAS G12R)
SVGARGVGA

SEQ ID NO: 44309 - protein, 9 aa, synthetic construct
  source 1..9: note = Seed: VVGARGVGK (KRAS G12R)
SVGARIVGA

SEQ ID NO: 44310 - protein, 9 aa, synthetic construct
  source 1..9: note = Seed: VVGARGVGK (KRAS G12R)
SVGARIVGG

SEQ ID NO: 44311 - protein, 9 aa, synthetic construct
  source 1..9: note = Seed: VVGARGVGK (KRAS G12R)
SVGARIVGI

SEQ ID NO: 44312 - protein, 9 aa, synthetic construct
  source 1..9: note = Seed: VVGARGVGK (KRAS G12R)
SVGARIVGM

SEQ ID NO: 44313 - protein, 9 aa, synthetic construct
  source 1..9: note = Seed: VVGARGVGK (KRAS G12R)
SVGARIVGN

SEQ ID NO: 44314 - protein, 9 aa, synthetic construct
  source 1..9: note = Seed: VVGARGVGK (KRAS G12R)
SVGARIVGS

SEQ ID NO: 44315 - protein, 9 aa, synthetic construct
  source 1..9: note = Seed: VVGARGVGK (KRAS G12R)
SVGARIVGT

SEQ ID NO: 44316 - protein, 9 aa, synthetic construct
  source 1..9: note = Seed: VVGARGVGK (KRAS G12R)
SVGARIVGV

SEQ ID NO: 44317 - protein, 9 aa, synthetic construct
  source 1..9: note = Seed: VVGARGVGK (KRAS G12R)
SVGARLVGA

SEQ ID NO: 44318 - protein, 9 aa, synthetic construct
  source 1..9: note = Seed: VVGARGVGK (KRAS G12R)
SVGARLVGS

SEQ ID NO: 44319 - protein, 9 aa, synthetic construct
  source 1..9: note = Seed: VVGARGVGK (KRAS G12R)
SVGARMVGA

SEQ ID NO: 44320 - protein, 9 aa, synthetic construct
  source 1..9: note = Seed: VVGARGVGK (KRAS G12R)
SVGARMVGS

SEQ ID NO: 44321 - protein, 9 aa, synthetic construct
  source 1..9: note = Seed: VVGARGVGK (KRAS G12R)
SVGARPVGA

SEQ ID NO: 44322 - protein, 9 aa, synthetic construct
  source 1..9: note = Seed: VVGARGVGK (KRAS G12R)
SVGARPVGC

SEQ ID NO: 44323 - protein, 9 aa, synthetic construct
  source 1..9: note = Seed: VVGARGVGK (KRAS G12R)
SVGARPVGG

SEQ ID NO: 44324 - protein, 9 aa, synthetic construct
  source 1..9: note = Seed: VVGARGVGK (KRAS G12R)
SVGARPVGI

SEQ ID NO: 44325 - protein, 9 aa, synthetic construct
  source 1..9: note = Seed: VVGARGVGK (KRAS G12R)
SVGARPVGM

SEQ ID NO: 44326 - protein, 9 aa, synthetic construct
  source 1..9: note = Seed: VVGARGVGK (KRAS G12R)
SVGARPVGN

SEQ ID NO: 44327 - protein, 9 aa, synthetic construct
  source 1..9: note = Seed: VVGARGVGK (KRAS G12R)
SVGARPVGS

SEQ ID NO: 44328 - protein, 9 aa, synthetic construct
  source 1..9: note = Seed: VVGARGVGK (KRAS G12R)
SVGARPVGT

SEQ ID NO: 44329 - protein, 9 aa, synthetic construct
  source 1..9: note = Seed: VVGARGVGK (KRAS G12R)
SVGARPVGV

SEQ ID NO: 44330 - protein, 9 aa, synthetic construct
  source 1..9: note = Seed: VVGARGVGK (KRAS G12R)
SVGARSVGA

SEQ ID NO: 44331 - protein, 9 aa, synthetic construct
  source 1..9: note = Seed: VVGARGVGK (KRAS G12R)
SVGARSVGS

SEQ ID NO: 44332 - protein, 9 aa, synthetic construct
  source 1..9: note = Seed: VVGARGVGK (KRAS G12R)
SVGARSVGT

SEQ ID NO: 44333 - protein, 9 aa, synthetic construct
  source 1..9: note = Seed: VVGARGVGK (KRAS G12R)
SVGARTVGA

SEQ ID NO: 44334 - protein, 9 aa, synthetic construct
  source 1..9: note = Seed: VVGARGVGK (KRAS G12R)
SVGARTVGS

SEQ ID NO: 44335 - protein, 9 aa, synthetic construct
  source 1..9: note = Seed: VVGARGVGK (KRAS G12R)
SVGARTVGT

SEQ ID NO: 44336 - protein, 9 aa, synthetic construct
  source 1..9: note = Seed: VVGARGVGK (KRAS G12R)
SVGARVVGA

SEQ ID NO: 44337 - protein, 9 aa, synthetic construct
  source 1..9: note = Seed: VVGARGVGK (KRAS G12R)
SVGARVVGC

SEQ ID NO: 44338 - protein, 9 aa, synthetic construct
  source 1..9: note = Seed: VVGARGVGK (KRAS G12R)
SVGARVVGG

SEQ ID NO: 44339 - protein, 9 aa, synthetic construct
  source 1..9: note = Seed: VVGARGVGK (KRAS G12R)
SVGARVVGI

SEQ ID NO: 44340 - protein, 9 aa, synthetic construct
  source 1..9: note = Seed: VVGARGVGK (KRAS G12R)
SVGARVVGL

SEQ ID NO: 44341 - protein, 9 aa, synthetic construct
  source 1..9: note = Seed: VVGARGVGK (KRAS G12R)
SVGARVVGM

SEQ ID NO: 44342 - protein, 9 aa, synthetic construct
  source 1..9: note = Seed: VVGARGVGK (KRAS G12R)
SVGARVVGN

SEQ ID NO: 44343 - protein, 9 aa, synthetic construct
  source 1..9: note = Seed: VVGARGVGK (KRAS G12R)
SVGARVVGS

SEQ ID NO: 44344 - protein, 9 aa, synthetic construct
  source 1..9: note = Seed: VVGARGVGK (KRAS G12R)
SVGARVVGT

SEQ ID NO: 44345 - protein, 9 aa, synthetic construct
  source 1..9: note = Seed: VVGARGVGK (KRAS G12R)
SVGARVVGV

SEQ ID NO: 44346 - protein, 9 aa, synthetic construct
  source 1..9: note = Seed: VVGARGVGK (KRAS G12R)
SVGGRAVGA

SEQ ID NO: 44347 - protein, 9 aa, synthetic construct
  source 1..9: note = Seed: VVGARGVGK (KRAS G12R)
SVGGRAVGC

SEQ ID NO: 44348 - protein, 9 aa, synthetic construct
  source 1..9: note = Seed: VVGARGVGK (KRAS G12R)
SVGGRAVGG

SEQ ID NO: 44349 - protein, 9 aa, synthetic construct
  source 1..9: note = Seed: VVGARGVGK (KRAS G12R)
SVGGRAVGI

SEQ ID NO: 44350 - protein, 9 aa, synthetic construct
  source 1..9: note = Seed: VVGARGVGK (KRAS G12R)
SVGGRAVGL

SEQ ID NO: 44351 - protein, 9 aa, synthetic construct
  source 1..9: note = Seed: VVGARGVGK (KRAS G12R)
SVGGRAVGM

SEQ ID NO: 44352 - protein, 9 aa, synthetic construct
  source 1..9: note = Seed: VVGARGVGK (KRAS G12R)
SVGGRAVGN

SEQ ID NO: 44353 - protein, 9 aa, synthetic construct
  source 1..9: note = Seed: VVGARGVGK (KRAS G12R)
SVGGRAVGS

SEQ ID NO: 44354 - protein, 9 aa, synthetic construct
  source 1..9: note = Seed: VVGARGVGK (KRAS G12R)
SVGGRAVGT

SEQ ID NO: 44355 - protein, 9 aa, synthetic construct
  source 1..9: note = Seed: VVGARGVGK (KRAS G12R)
SVGGRAVGV

SEQ ID NO: 44356 - protein, 9 aa, synthetic construct
  source 1..9: note = Seed: VVGARGVGK (KRAS G12R)
SVGGRIVGA

SEQ ID NO: 44357 - protein, 9 aa, synthetic construct
  source 1..9: note = Seed: VVGARGVGK (KRAS G12R)
SVGGRIVGG

SEQ ID NO: 44358 - protein, 9 aa, synthetic construct
  source 1..9: note = Seed: VVGARGVGK (KRAS G12R)
SVGGRIVGI

SEQ ID NO: 44359 - protein, 9 aa, synthetic construct
  source 1..9: note = Seed: VVGARGVGK (KRAS G12R)
SVGGRIVGN

SEQ ID NO: 44360 - protein, 9 aa, synthetic construct
  source 1..9: note = Seed: VVGARGVGK (KRAS G12R)
SVGGRIVGS

SEQ ID NO: 44361 - protein, 9 aa, synthetic construct
  source 1..9: note = Seed: VVGARGVGK (KRAS G12R)
SVGGRIVGT

SEQ ID NO: 44362 - protein, 9 aa, synthetic construct
  source 1..9: note = Seed: VVGARGVGK (KRAS G12R)
SVGGRIVGV

SEQ ID NO: 44363 - protein, 9 aa, synthetic construct
  source 1..9: note = Seed: VVGARGVGK (KRAS G12R)
SVGGRLVGA

SEQ ID NO: 44364 - protein, 9 aa, synthetic construct
  source 1..9: note = Seed: VVGARGVGK (KRAS G12R)
SVGGRMVGA

SEQ ID NO: 44365 - protein, 9 aa, synthetic construct
  source 1..9: note = Seed: VVGARGVGK (KRAS G12R)
SVGGRPVGA

SEQ ID NO: 44366 - protein, 9 aa, synthetic construct
  source 1..9: note = Seed: VVGARGVGK (KRAS G12R)
SVGGRPVGI

SEQ ID NO: 44367 - protein, 9 aa, synthetic construct
  source 1..9: note = Seed: VVGARGVGK (KRAS G12R)
SVGGRPVGS

SEQ ID NO: 44368 - protein, 9 aa, synthetic construct
  source 1..9: note = Seed: VVGARGVGK (KRAS G12R)
SVGGRPVGT

SEQ ID NO: 44369 - protein, 9 aa, synthetic construct
  source 1..9: note = Seed: VVGARGVGK (KRAS G12R)
SVGGRPVGV

SEQ ID NO: 44370 - protein, 9 aa, synthetic construct
  source 1..9: note = Seed: VVGARGVGK (KRAS G12R)
SVGGRSVGA

SEQ ID NO: 44371 - protein, 9 aa, synthetic construct
  source 1..9: note = Seed: VVGARGVGK (KRAS G12R)
SVGGRSVGV

SEQ ID NO: 44372 - protein, 9 aa, synthetic construct
  source 1..9: note = Seed: VVGARGVGK (KRAS G12R)
SVGGRTVGA

SEQ ID NO: 44373 - protein, 9 aa, synthetic construct
  source 1..9: note = Seed: VVGARGVGK (KRAS G12R)
SVGGRTVGT

SEQ ID NO: 44374 - protein, 9 aa, synthetic construct
  source 1..9: note = Seed: VVGARGVGK (KRAS G12R)
SVGGRTVGV

SEQ ID NO: 44375 - protein, 9 aa, synthetic construct
  source 1..9: note = Seed: VVGARGVGK (KRAS G12R)
SVGGRVVGA

SEQ ID NO: 44376 - protein, 9 aa, synthetic construct
  source 1..9: note = Seed: VVGARGVGK (KRAS G12R)
SVGGRVVGC

SEQ ID NO: 44377 - protein, 9 aa, synthetic construct
  source 1..9: note = Seed: VVGARGVGK (KRAS G12R)
SVGGRVVGG

SEQ ID NO: 44378 - protein, 9 aa, synthetic construct
  source 1..9: note = Seed: VVGARGVGK (KRAS G12R)
SVGGRVVGI

SEQ ID NO: 44379 - protein, 9 aa, synthetic construct
  source 1..9: note = Seed: VVGARGVGK (KRAS G12R)
SVGGRVVGL

SEQ ID NO: 44380 - protein, 9 aa, synthetic construct
  source 1..9: note = Seed: VVGARGVGK (KRAS G12R)
SVGGRVVGM

SEQ ID NO: 44381 - protein, 9 aa, synthetic construct
  source 1..9: note = Seed: VVGARGVGK (KRAS G12R)
SVGGRVVGN

SEQ ID NO: 44382 - protein, 9 aa, synthetic construct
  source 1..9: note = Seed: VVGARGVGK (KRAS G12R)
SVGGRVVGS

SEQ ID NO: 44383 - protein, 9 aa, synthetic construct
  source 1..9: note = Seed: VVGARGVGK (KRAS G12R)
SVGGRVVGT

SEQ ID NO: 44384 - protein, 9 aa, synthetic construct
  source 1..9: note = Seed: VVGARGVGK (KRAS G12R)
SVGGRVVGV

SEQ ID NO: 44385 - protein, 9 aa, synthetic construct
  source 1..9: note = Seed: VVGARGVGK (KRAS G12R)
SVGLRAVGI

SEQ ID NO: 44386 - protein, 9 aa, synthetic construct
  source 1..9: note = Seed: VVGARGVGK (KRAS G12R)
SVGLRAVGL

SEQ ID NO: 44387 - protein, 9 aa, synthetic construct
  source 1..9: note = Seed: VVGARGVGK (KRAS G12R)
SVGLRAVGM

SEQ ID NO: 44388 - protein, 9 aa, synthetic construct
  source 1..9: note = Seed: VVGARGVGK (KRAS G12R)
SVGLRGVGI

SEQ ID NO: 44389 - protein, 9 aa, synthetic construct
  source 1..9: note = Seed: VVGARGVGK (KRAS G12R)
SVGLRGVGL

SEQ ID NO: 44390 - protein, 9 aa, synthetic construct
  source 1..9: note = Seed: VVGARGVGK (KRAS G12R)
SVGLRGVGM

SEQ ID NO: 44391 - protein, 9 aa, synthetic construct
  source 1..9: note = Seed: VVGARGVGK (KRAS G12R)
SVGLRGVGV

SEQ ID NO: 44392 - protein, 9 aa, synthetic construct
  source 1..9: note = Seed: VVGARGVGK (KRAS G12R)
SVGLRPVGI

SEQ ID NO: 44393 - protein, 9 aa, synthetic construct
  source 1..9: note = Seed: VVGARGVGK (KRAS G12R)
SVGLRSVGI

SEQ ID NO: 44394 - protein, 9 aa, synthetic construct
  source 1..9: note = Seed: VVGARGVGK (KRAS G12R)
SVGLRSVGL

SEQ ID NO: 44395 - protein, 9 aa, synthetic construct
  source 1..9: note = Seed: VVGARGVGK (KRAS G12R)
SVGMRAVGI

SEQ ID NO: 44396 - protein, 9 aa, synthetic construct
  source 1..9: note = Seed: VVGARGVGK (KRAS G12R)
SVGMRAVGL

SEQ ID NO: 44397 - protein, 9 aa, synthetic construct
  source 1..9: note = Seed: VVGARGVGK (KRAS G12R)
SVGMRAVGM

SEQ ID NO: 44398 - protein, 9 aa, synthetic construct
  source 1..9: note = Seed: VVGARGVGK (KRAS G12R)
SVGMRAVGV

SEQ ID NO: 44399 - protein, 9 aa, synthetic construct
  source 1..9: note = Seed: VVGARGVGK (KRAS G12R)
SVGMRGVGI

SEQ ID NO: 44400 - protein, 9 aa, synthetic construct
  source 1..9: note = Seed: VVGARGVGK (KRAS G12R)
SVGMRGVGL

SEQ ID NO: 44401 - protein, 9 aa, synthetic construct
  source 1..9: note = Seed: VVGARGVGK (KRAS G12R)
SVGMRGVGV

SEQ ID NO: 44402 - protein, 9 aa, synthetic construct
  source 1..9: note = Seed: VVGARGVGK (KRAS G12R)
SVGMRSVGI

SEQ ID NO: 44403 - protein, 9 aa, synthetic construct
  source 1..9: note = Seed: VVGARGVGK (KRAS G12R)
SVGMRSVGL

SEQ ID NO: 44404 - protein, 9 aa, synthetic construct
  source 1..9: note = Seed: VVGARGVGK (KRAS G12R)
SVGSRAVGA

SEQ ID NO: 44405 - protein, 9 aa, synthetic construct
  source 1..9: note = Seed: VVGARGVGK (KRAS G12R)
SVGSRAVGI

SEQ ID NO: 44406 - protein, 9 aa, synthetic construct
  source 1..9: note = Seed: VVGARGVGK (KRAS G12R)
SVGSRAVGS

SEQ ID NO: 44407 - protein, 9 aa, synthetic construct
  source 1..9: note = Seed: VVGARGVGK (KRAS G12R)
SVGSRAVGT

SEQ ID NO: 44408 - protein, 9 aa, synthetic construct
  source 1..9: note = Seed: VVGARGVGK (KRAS G12R)
SVGSRAVGV

SEQ ID NO: 44409 - protein, 9 aa, synthetic construct
  source 1..9: note = Seed: VVGARGVGK (KRAS G12R)
SVGSRIVGA

SEQ ID NO: 44410 - protein, 9 aa, synthetic construct
  source 1..9: note = Seed: VVGARGVGK (KRAS G12R)
SVGSRIVGS

SEQ ID NO: 44411 - protein, 9 aa, synthetic construct
  source 1..9: note = Seed: VVGARGVGK (KRAS G12R)
SVGSRMVGA

SEQ ID NO: 44412 - protein, 9 aa, synthetic construct
  source 1..9: note = Seed: VVGARGVGK (KRAS G12R)
SVGSRPVGA

SEQ ID NO: 44413 - protein, 9 aa, synthetic construct
  source 1..9: note = Seed: VVGARGVGK (KRAS G12R)
SVGSRVVGA

SEQ ID NO: 44414 - protein, 9 aa, synthetic construct
  source 1..9: note = Seed: VVGARGVGK (KRAS G12R)
SVGSRVVGS

SEQ ID NO: 44415 - protein, 9 aa, synthetic construct
  source 1..9: note = Seed: VVGARGVGK (KRAS G12R)
SVGSRVVGT

SEQ ID NO: 44416 - protein, 9 aa, synthetic construct
  source 1..9: note = Seed: VVGARGVGK (KRAS G12R)
SVGSRVVGV

SEQ ID NO: 44417 - protein, 9 aa, synthetic construct
  source 1..9: note = Seed: VVGARGVGK (KRAS G12R)
SVGTRAVGA

SEQ ID NO: 44418 - protein, 9 aa, synthetic construct
  source 1..9: note = Seed: VVGARGVGK (KRAS G12R)
SVGTRSVGI

SEQ ID NO: 44419 - protein, 9 aa, synthetic construct
  source 1..9: note = Seed: VVGARGVGK (KRAS G12R)
TVGARAVGA

SEQ ID NO: 44420 - protein, 9 aa, synthetic construct
  source 1..9: note = Seed: VVGARGVGK (KRAS G12R)
TVGARAVGC

SEQ ID NO: 44421 - protein, 9 aa, synthetic construct
  source 1..9: note = Seed: VVGARGVGK (KRAS G12R)
TVGARAVGD

SEQ ID NO: 44422 - protein, 9 aa, synthetic construct
  source 1..9: note = Seed: VVGARGVGK (KRAS G12R)
TVGARAVGE

SEQ ID NO: 44423 - protein, 9 aa, synthetic construct
  source 1..9: note = Seed: VVGARGVGK (KRAS G12R)
TVGARAVGF

SEQ ID NO: 44424 - protein, 9 aa, synthetic construct
  source 1..9: note = Seed: VVGARGVGK (KRAS G12R)
TVGARAVGG

SEQ ID NO: 44425 - protein, 9 aa, synthetic construct
  source 1..9: note = Seed: VVGARGVGK (KRAS G12R)
TVGARAVGH

SEQ ID NO: 44426 - protein, 9 aa, synthetic construct
  source 1..9: note = Seed: VVGARGVGK (KRAS G12R)
TVGARAVGI

SEQ ID NO: 44427 - protein, 9 aa, synthetic construct
  source 1..9: note = Seed: VVGARGVGK (KRAS G12R)
TVGARAVGL

SEQ ID NO: 44428 - protein, 9 aa, synthetic construct
  source 1..9: note = Seed: VVGARGVGK (KRAS G12R)
TVGARAVGM

SEQ ID NO: 44429 - protein, 9 aa, synthetic construct
  source 1..9: note = Seed: VVGARGVGK (KRAS G12R)
TVGARAVGN

SEQ ID NO: 44430 - protein, 9 aa, synthetic construct
  source 1..9: note = Seed: VVGARGVGK (KRAS G12R)
TVGARAVGP

SEQ ID NO: 44431 - protein, 9 aa, synthetic construct
  source 1..9: note = Seed: VVGARGVGK (KRAS G12R)
TVGARAVGQ

SEQ ID NO: 44432 - protein, 9 aa, synthetic construct
  source 1..9: note = Seed: VVGARGVGK (KRAS G12R)
TVGARAVGS

SEQ ID NO: 44433 - protein, 9 aa, synthetic construct
  source 1..9: note = Seed: VVGARGVGK (KRAS G12R)
TVGARAVGT

SEQ ID NO: 44434 - protein, 9 aa, synthetic construct
  source 1..9: note = Seed: VVGARGVGK (KRAS G12R)
TVGARAVGV

SEQ ID NO: 44435 - protein, 9 aa, synthetic construct
  source 1..9: note = Seed: VVGARGVGK (KRAS G12R)
TVGARAVGW

SEQ ID NO: 44436 - protein, 9 aa, synthetic construct
  source 1..9: note = Seed: VVGARGVGK (KRAS G12R)
TVGARAVGY

SEQ ID NO: 44437 - protein, 9 aa, synthetic construct
  source 1..9: note = Seed: VVGARGVGK (KRAS G12R)
TVGARCVGA

SEQ ID NO: 44438 - protein, 9 aa, synthetic construct
  source 1..9: note = Seed: VVGARGVGK (KRAS G12R)
TVGARGVGA

SEQ ID NO: 44439 - protein, 9 aa, synthetic construct
  source 1..9: note = Seed: VVGARGVGK (KRAS G12R)
TVGARGVGS

SEQ ID NO: 44440 - protein, 9 aa, synthetic construct
  source 1..9: note = Seed: VVGARGVGK (KRAS G12R)
TVGARGVGV

SEQ ID NO: 44441 - protein, 9 aa, synthetic construct
  source 1..9: note = Seed: VVGARGVGK (KRAS G12R)
TVGARIVGA

SEQ ID NO: 44442 - protein, 9 aa, synthetic construct
  source 1..9: note = Seed: VVGARGVGK (KRAS G12R)
TVGARIVGC

SEQ ID NO: 44443 - protein, 9 aa, synthetic construct
  source 1..9: note = Seed: VVGARGVGK (KRAS G12R)
TVGARIVGG

SEQ ID NO: 44444 - protein, 9 aa, synthetic construct
  source 1..9: note = Seed: VVGARGVGK (KRAS G12R)
TVGARIVGI

SEQ ID NO: 44445 - protein, 9 aa, synthetic construct
  source 1..9: note = Seed: VVGARGVGK (KRAS G12R)
TVGARIVGL

SEQ ID NO: 44446 - protein, 9 aa, synthetic construct
  source 1..9: note = Seed: VVGARGVGK (KRAS G12R)
TVGARIVGM

SEQ ID NO: 44447 - protein, 9 aa, synthetic construct
  source 1..9: note = Seed: VVGARGVGK (KRAS G12R)
TVGARIVGN

SEQ ID NO: 44448 - protein, 9 aa, synthetic construct
  source 1..9: note = Seed: VVGARGVGK (KRAS G12R)
TVGARIVGS

SEQ ID NO: 44449 - protein, 9 aa, synthetic construct
  source 1..9: note = Seed: VVGARGVGK (KRAS G12R)
TVGARIVGT

SEQ ID NO: 44450 - protein, 9 aa, synthetic construct
  source 1..9: note = Seed: VVGARGVGK (KRAS G12R)
TVGARIVGV

SEQ ID NO: 44451 - protein, 9 aa, synthetic construct
  source 1..9: note = Seed: VVGARGVGK (KRAS G12R)
TVGARLVGA

SEQ ID NO: 44452 - protein, 9 aa, synthetic construct
  source 1..9: note = Seed: VVGARGVGK (KRAS G12R)
TVGARLVGS

SEQ ID NO: 44453 - protein, 9 aa, synthetic construct
  source 1..9: note = Seed: VVGARGVGK (KRAS G12R)
TVGARLVGT

SEQ ID NO: 44454 - protein, 9 aa, synthetic construct
  source 1..9: note = Seed: VVGARGVGK (KRAS G12R)
TVGARLVGV

SEQ ID NO: 44455 - protein, 9 aa, synthetic construct
  source 1..9: note = Seed: VVGARGVGK (KRAS G12R)
TVGARMVGA

SEQ ID NO: 44456 - protein, 9 aa, synthetic construct
  source 1..9: note = Seed: VVGARGVGK (KRAS G12R)
TVGARMVGS

SEQ ID NO: 44457 - protein, 9 aa, synthetic construct
  source 1..9: note = Seed: VVGARGVGK (KRAS G12R)
TVGARMVGT

SEQ ID NO: 44458 - protein, 9 aa, synthetic construct
  source 1..9: note = Seed: VVGARGVGK (KRAS G12R)
TVGARMVGV

SEQ ID NO: 44459 - protein, 9 aa, synthetic construct
  source 1..9: note = Seed: VVGARGVGK (KRAS G12R)
TVGARPVGA

SEQ ID NO: 44460 - protein, 9 aa, synthetic construct
  source 1..9: note = Seed: VVGARGVGK (KRAS G12R)
TVGARPVGC

SEQ ID NO: 44461 - protein, 9 aa, synthetic construct
  source 1..9: note = Seed: VVGARGVGK (KRAS G12R)
TVGARPVGG

SEQ ID NO: 44462 - protein, 9 aa, synthetic construct
  source 1..9: note = Seed: VVGARGVGK (KRAS G12R)
TVGARPVGI

SEQ ID NO: 44463 - protein, 9 aa, synthetic construct
  source 1..9: note = Seed: VVGARGVGK (KRAS G12R)
TVGARPVGL

SEQ ID NO: 44464 - protein, 9 aa, synthetic construct
  source 1..9: note = Seed: VVGARGVGK (KRAS G12R)
TVGARPVGM

SEQ ID NO: 44465 - protein, 9 aa, synthetic construct
  source 1..9: note = Seed: VVGARGVGK (KRAS G12R)
TVGARPVGN

SEQ ID NO: 44466 - protein, 9 aa, synthetic construct
  source 1..9: note = Seed: VVGARGVGK (KRAS G12R)
TVGARPVGS

SEQ ID NO: 44467 - protein, 9 aa, synthetic construct
  source 1..9: note = Seed: VVGARGVGK (KRAS G12R)
TVGARPVGT

SEQ ID NO: 44468 - protein, 9 aa, synthetic construct
  source 1..9: note = Seed: VVGARGVGK (KRAS G12R)
TVGARPVGV

SEQ ID NO: 44469 - protein, 9 aa, synthetic construct
  source 1..9: note = Seed: VVGARGVGK (KRAS G12R)
TVGARSVGA

SEQ ID NO: 44470 - protein, 9 aa, synthetic construct
  source 1..9: note = Seed: VVGARGVGK (KRAS G12R)
TVGARSVGI

SEQ ID NO: 44471 - protein, 9 aa, synthetic construct
  source 1..9: note = Seed: VVGARGVGK (KRAS G12R)
TVGARSVGS

SEQ ID NO: 44472 - protein, 9 aa, synthetic construct
  source 1..9: note = Seed: VVGARGVGK (KRAS G12R)
TVGARSVGT

SEQ ID NO: 44473 - protein, 9 aa, synthetic construct
  source 1..9: note = Seed: VVGARGVGK (KRAS G12R)
TVGARSVGV

SEQ ID NO: 44474 - protein, 9 aa, synthetic construct
  source 1..9: note = Seed: VVGARGVGK (KRAS G12R)
TVGARTVGA

SEQ ID NO: 44475 - protein, 9 aa, synthetic construct
  source 1..9: note = Seed: VVGARGVGK (KRAS G12R)
TVGARTVGI

SEQ ID NO: 44476 - protein, 9 aa, synthetic construct
  source 1..9: note = Seed: VVGARGVGK (KRAS G12R)
TVGARTVGS

SEQ ID NO: 44477 - protein, 9 aa, synthetic construct
  source 1..9: note = Seed: VVGARGVGK (KRAS G12R)
TVGARTVGT

SEQ ID NO: 44478 - protein, 9 aa, synthetic construct
  source 1..9: note = Seed: VVGARGVGK (KRAS G12R)
TVGARTVGV

SEQ ID NO: 44479 - protein, 9 aa, synthetic construct
  source 1..9: note = Seed: VVGARGVGK (KRAS G12R)
TVGARVVGA

SEQ ID NO: 44480 - protein, 9 aa, synthetic construct
  source 1..9: note = Seed: VVGARGVGK (KRAS G12R)
TVGARVVGC

SEQ ID NO: 44481 - protein, 9 aa, synthetic construct
  source 1..9: note = Seed: VVGARGVGK (KRAS G12R)
TVGARVVGG

SEQ ID NO: 44482 - protein, 9 aa, synthetic construct
  source 1..9: note = Seed: VVGARGVGK (KRAS G12R)
TVGARVVGH

SEQ ID NO: 44483 - protein, 9 aa, synthetic construct
  source 1..9: note = Seed: VVGARGVGK (KRAS G12R)
TVGARVVGI

SEQ ID NO: 44484 - protein, 9 aa, synthetic construct
  source 1..9: note = Seed: VVGARGVGK (KRAS G12R)
TVGARVVGL

SEQ ID NO: 44485 - protein, 9 aa, synthetic construct
  source 1..9: note = Seed: VVGARGVGK (KRAS G12R)
TVGARVVGM

SEQ ID NO: 44486 - protein, 9 aa, synthetic construct
  source 1..9: note = Seed: VVGARGVGK (KRAS G12R)
TVGARVVGN

SEQ ID NO: 44487 - protein, 9 aa, synthetic construct
  source 1..9: note = Seed: VVGARGVGK (KRAS G12R)
TVGARVVGQ

SEQ ID NO: 44488 - protein, 9 aa, synthetic construct
  source 1..9: note = Seed: VVGARGVGK (KRAS G12R)
TVGARVVGS

SEQ ID NO: 44489 - protein, 9 aa, synthetic construct
  source 1..9: note = Seed: VVGARGVGK (KRAS G12R)
TVGARVVGT

SEQ ID NO: 44490 - protein, 9 aa, synthetic construct
  source 1..9: note = Seed: VVGARGVGK (KRAS G12R)
TVGARVVGV

SEQ ID NO: 44491 - protein, 9 aa, synthetic construct
  source 1..9: note = Seed: VVGARGVGK (KRAS G12R)
TVGGRAVGA

SEQ ID NO: 44492 - protein, 9 aa, synthetic construct
  source 1..9: note = Seed: VVGARGVGK (KRAS G12R)
TVGGRAVGC

SEQ ID NO: 44493 - protein, 9 aa, synthetic construct
  source 1..9: note = Seed: VVGARGVGK (KRAS G12R)
TVGGRAVGF

SEQ ID NO: 44494 - protein, 9 aa, synthetic construct
  source 1..9: note = Seed: VVGARGVGK (KRAS G12R)
TVGGRAVGG

SEQ ID NO: 44495 - protein, 9 aa, synthetic construct
  source 1..9: note = Seed: VVGARGVGK (KRAS G12R)
TVGGRAVGI

SEQ ID NO: 44496 - protein, 9 aa, synthetic construct
  source 1..9: note = Seed: VVGARGVGK (KRAS G12R)
TVGGRAVGL

SEQ ID NO: 44497 - protein, 9 aa, synthetic construct
  source 1..9: note = Seed: VVGARGVGK (KRAS G12R)
TVGGRAVGM

SEQ ID NO: 44498 - protein, 9 aa, synthetic construct
  source 1..9: note = Seed: VVGARGVGK (KRAS G12R)
TVGGRAVGN

SEQ ID NO: 44499 - protein, 9 aa, synthetic construct
  source 1..9: note = Seed: VVGARGVGK (KRAS G12R)
TVGGRAVGP

SEQ ID NO: 44500 - protein, 9 aa, synthetic construct
  source 1..9: note = Seed: VVGARGVGK (KRAS G12R)
TVGGRAVGS

SEQ ID NO: 44501 - protein, 9 aa, synthetic construct
  source 1..9: note = Seed: VVGARGVGK (KRAS G12R)
TVGGRAVGT

SEQ ID NO: 44502 - protein, 9 aa, synthetic construct
  source 1..9: note = Seed: VVGARGVGK (KRAS G12R)
TVGGRAVGV

SEQ ID NO: 44503 - protein, 9 aa, synthetic construct
  source 1..9: note = Seed: VVGARGVGK (KRAS G12R)
TVGGRAVGW

SEQ ID NO: 44504 - protein, 9 aa, synthetic construct
  source 1..9: note = Seed: VVGARGVGK (KRAS G12R)
TVGGRCVGA

SEQ ID NO: 44505 - protein, 9 aa, synthetic construct
  source 1..9: note = Seed: VVGARGVGK (KRAS G12R)
TVGGRGVGA

SEQ ID NO: 44506 - protein, 9 aa, synthetic construct
  source 1..9: note = Seed: VVGARGVGK (KRAS G12R)
TVGGRIVGA

SEQ ID NO: 44507 - protein, 9 aa, synthetic construct
  source 1..9: note = Seed: VVGARGVGK (KRAS G12R)
TVGGRIVGC

SEQ ID NO: 44508 - protein, 9 aa, synthetic construct
  source 1..9: note = Seed: VVGARGVGK (KRAS G12R)
TVGGRIVGG

SEQ ID NO: 44509 - protein, 9 aa, synthetic construct
  source 1..9: note = Seed: VVGARGVGK (KRAS G12R)
TVGGRIVGI

SEQ ID NO: 44510 - protein, 9 aa, synthetic construct
  source 1..9: note = Seed: VVGARGVGK (KRAS G12R)
TVGGRIVGL

SEQ ID NO: 44511 - protein, 9 aa, synthetic construct
  source 1..9: note = Seed: VVGARGVGK (KRAS G12R)
TVGGRIVGM

SEQ ID NO: 44512 - protein, 9 aa, synthetic construct
  source 1..9: note = Seed: VVGARGVGK (KRAS G12R)
TVGGRIVGN

SEQ ID NO: 44513 - protein, 9 aa, synthetic construct
  source 1..9: note = Seed: VVGARGVGK (KRAS G12R)
TVGGRIVGS

SEQ ID NO: 44514 - protein, 9 aa, synthetic construct
  source 1..9: note = Seed: VVGARGVGK (KRAS G12R)
TVGGRIVGT

SEQ ID NO: 44515 - protein, 9 aa, synthetic construct
  source 1..9: note = Seed: VVGARGVGK (KRAS G12R)
TVGGRIVGV

SEQ ID NO: 44516 - protein, 9 aa, synthetic construct
  source 1..9: note = Seed: VVGARGVGK (KRAS G12R)
TVGGRLVGA

SEQ ID NO: 44517 - protein, 9 aa, synthetic construct
  source 1..9: note = Seed: VVGARGVGK (KRAS G12R)
TVGGRLVGS

SEQ ID NO: 44518 - protein, 9 aa, synthetic construct
  source 1..9: note = Seed: VVGARGVGK (KRAS G12R)
TVGGRLVGT

SEQ ID NO: 44519 - protein, 9 aa, synthetic construct
  source 1..9: note = Seed: VVGARGVGK (KRAS G12R)
TVGGRLVGV

SEQ ID NO: 44520 - protein, 9 aa, synthetic construct
  source 1..9: note = Seed: VVGARGVGK (KRAS G12R)
TVGGRMVGA

SEQ ID NO: 44521 - protein, 9 aa, synthetic construct
  source 1..9: note = Seed: VVGARGVGK (KRAS G12R)
TVGGRMVGS

SEQ ID NO: 44522 - protein, 9 aa, synthetic construct
  source 1..9: note = Seed: VVGARGVGK (KRAS G12R)
TVGGRMVGT

SEQ ID NO: 44523 - protein, 9 aa, synthetic construct
  source 1..9: note = Seed: VVGARGVGK (KRAS G12R)
TVGGRMVGV

SEQ ID NO: 44524 - protein, 9 aa, synthetic construct
  source 1..9: note = Seed: VVGARGVGK (KRAS G12R)
TVGGRPVGA

SEQ ID NO: 44525 - protein, 9 aa, synthetic construct
  source 1..9: note = Seed: VVGARGVGK (KRAS G12R)
TVGGRPVGG

SEQ ID NO: 44526 - protein, 9 aa, synthetic construct
  source 1..9: note = Seed: VVGARGVGK (KRAS G12R)
TVGGRPVGI

SEQ ID NO: 44527 - protein, 9 aa, synthetic construct
  source 1..9: note = Seed: VVGARGVGK (KRAS G12R)
TVGGRPVGL

SEQ ID NO: 44528 - protein, 9 aa, synthetic construct
  source 1..9: note = Seed: VVGARGVGK (KRAS G12R)
TVGGRPVGM

SEQ ID NO: 44529 - protein, 9 aa, synthetic construct
  source 1..9: note = Seed: VVGARGVGK (KRAS G12R)
TVGGRPVGN

SEQ ID NO: 44530 - protein, 9 aa, synthetic construct
  source 1..9: note = Seed: VVGARGVGK (KRAS G12R)
TVGGRPVGS

SEQ ID NO: 44531 - protein, 9 aa, synthetic construct
  source 1..9: note = Seed: VVGARGVGK (KRAS G12R)
TVGGRPVGT

SEQ ID NO: 44532 - protein, 9 aa, synthetic construct
  source 1..9: note = Seed: VVGARGVGK (KRAS G12R)
TVGGRPVGV

SEQ ID NO: 44533 - protein, 9 aa, synthetic construct
  source 1..9: note = Seed: VVGARGVGK (KRAS G12R)
TVGGRSVGA

SEQ ID NO: 44534 - protein, 9 aa, synthetic construct
  source 1..9: note = Seed: VVGARGVGK (KRAS G12R)
TVGGRSVGI

SEQ ID NO: 44535 - protein, 9 aa, synthetic construct
  source 1..9: note = Seed: VVGARGVGK (KRAS G12R)
TVGGRSVGS

SEQ ID NO: 44536 - protein, 9 aa, synthetic construct
  source 1..9: note = Seed: VVGARGVGK (KRAS G12R)
TVGGRSVGT

SEQ ID NO: 44537 - protein, 9 aa, synthetic construct
  source 1..9: note = Seed: VVGARGVGK (KRAS G12R)
TVGGRSVGV

SEQ ID NO: 44538 - protein, 9 aa, synthetic construct
  source 1..9: note = Seed: VVGARGVGK (KRAS G12R)
TVGGRTVGA

SEQ ID NO: 44539 - protein, 9 aa, synthetic construct
  source 1..9: note = Seed: VVGARGVGK (KRAS G12R)
TVGGRTVGI

SEQ ID NO: 44540 - protein, 9 aa, synthetic construct
  source 1..9: note = Seed: VVGARGVGK (KRAS G12R)
TVGGRTVGS

SEQ ID NO: 44541 - protein, 9 aa, synthetic construct
  source 1..9: note = Seed: VVGARGVGK (KRAS G12R)
TVGGRTVGT

SEQ ID NO: 44542 - protein, 9 aa, synthetic construct
  source 1..9: note = Seed: VVGARGVGK (KRAS G12R)
TVGGRTVGV

SEQ ID NO: 44543 - protein, 9 aa, synthetic construct
  source 1..9: note = Seed: VVGARGVGK (KRAS G12R)
TVGGRVVGA

SEQ ID NO: 44544 - protein, 9 aa, synthetic construct
  source 1..9: note = Seed: VVGARGVGK (KRAS G12R)
TVGGRVVGC

SEQ ID NO: 44545 - protein, 9 aa, synthetic construct
  source 1..9: note = Seed: VVGARGVGK (KRAS G12R)
TVGGRVVGG

SEQ ID NO: 44546 - protein, 9 aa, synthetic construct
  source 1..9: note = Seed: VVGARGVGK (KRAS G12R)
TVGGRVVGI

SEQ ID NO: 44547 - protein, 9 aa, synthetic construct
  source 1..9: note = Seed: VVGARGVGK (KRAS G12R)
TVGGRVVGL

SEQ ID NO: 44548 - protein, 9 aa, synthetic construct
  source 1..9: note = Seed: VVGARGVGK (KRAS G12R)
TVGGRVVGM

SEQ ID NO: 44549 - protein, 9 aa, synthetic construct
  source 1..9: note = Seed: VVGARGVGK (KRAS G12R)
TVGGRVVGN

SEQ ID NO: 44550 - protein, 9 aa, synthetic construct
  source 1..9: note = Seed: VVGARGVGK (KRAS G12R)
TVGGRVVGP

SEQ ID NO: 44551 - protein, 9 aa, synthetic construct
  source 1..9: note = Seed: VVGARGVGK (KRAS G12R)
TVGGRVVGS

SEQ ID NO: 44552 - protein, 9 aa, synthetic construct
  source 1..9: note = Seed: VVGARGVGK (KRAS G12R)
TVGGRVVGT

SEQ ID NO: 44553 - protein, 9 aa, synthetic construct
  source 1..9: note = Seed: VVGARGVGK (KRAS G12R)
TVGGRVVGV

SEQ ID NO: 44554 - protein, 9 aa, synthetic construct
  source 1..9: note = Seed: VVGARGVGK (KRAS G12R)
TVGIRAVGL

SEQ ID NO: 44555 - protein, 9 aa, synthetic construct
  source 1..9: note = Seed: VVGARGVGK (KRAS G12R)
TVGLRAVGI

SEQ ID NO: 44556 - protein, 9 aa, synthetic construct
  source 1..9: note = Seed: VVGARGVGK (KRAS G12R)
TVGLRAVGL

SEQ ID NO: 44557 - protein, 9 aa, synthetic construct
  source 1..9: note = Seed: VVGARGVGK (KRAS G12R)
TVGLRAVGM

SEQ ID NO: 44558 - protein, 9 aa, synthetic construct
  source 1..9: note = Seed: VVGARGVGK (KRAS G12R)
TVGLRAVGV

SEQ ID NO: 44559 - protein, 9 aa, synthetic construct
  source 1..9: note = Seed: VVGARGVGK (KRAS G12R)
TVGLRGVGI

SEQ ID NO: 44560 - protein, 9 aa, synthetic construct
  source 1..9: note = Seed: VVGARGVGK (KRAS G12R)
TVGLRGVGL

SEQ ID NO: 44561 - protein, 9 aa, synthetic construct
  source 1..9: note = Seed: VVGARGVGK (KRAS G12R)
TVGLRGVGM

SEQ ID NO: 44562 - protein, 9 aa, synthetic construct
  source 1..9: note = Seed: VVGARGVGK (KRAS G12R)
TVGLRGVGV

SEQ ID NO: 44563 - protein, 9 aa, synthetic construct
  source 1..9: note = Seed: VVGARGVGK (KRAS G12R)
TVGLRPVGI

SEQ ID NO: 44564 - protein, 9 aa, synthetic construct
  source 1..9: note = Seed: VVGARGVGK (KRAS G12R)
TVGLRPVGL

SEQ ID NO: 44565 - protein, 9 aa, synthetic construct
  source 1..9: note = Seed: VVGARGVGK (KRAS G12R)
TVGLRPVGV

SEQ ID NO: 44566 - protein, 9 aa, synthetic construct
  source 1..9: note = Seed: VVGARGVGK (KRAS G12R)
TVGLRSVGI

SEQ ID NO: 44567 - protein, 9 aa, synthetic construct
  source 1..9: note = Seed: VVGARGVGK (KRAS G12R)
TVGLRSVGL

SEQ ID NO: 44568 - protein, 9 aa, synthetic construct
  source 1..9: note = Seed: VVGARGVGK (KRAS G12R)
TVGLRSVGM

SEQ ID NO: 44569 - protein, 9 aa, synthetic construct
  source 1..9: note = Seed: VVGARGVGK (KRAS G12R)
TVGLRSVGV

SEQ ID NO: 44570 - protein, 9 aa, synthetic construct
  source 1..9: note = Seed: VVGARGVGK (KRAS G12R)
TVGMRAVGI

SEQ ID NO: 44571 - protein, 9 aa, synthetic construct
  source 1..9: note = Seed: VVGARGVGK (KRAS G12R)
TVGMRAVGL

SEQ ID NO: 44572 - protein, 9 aa, synthetic construct
  source 1..9: note = Seed: VVGARGVGK (KRAS G12R)
TVGMRAVGM

SEQ ID NO: 44573 - protein, 9 aa, synthetic construct
  source 1..9: note = Seed: VVGARGVGK (KRAS G12R)
TVGMRAVGV

SEQ ID NO: 44574 - protein, 9 aa, synthetic construct
  source 1..9: note = Seed: VVGARGVGK (KRAS G12R)
TVGMRGVGI

SEQ ID NO: 44575 - protein, 9 aa, synthetic construct
  source 1..9: note = Seed: VVGARGVGK (KRAS G12R)
TVGMRGVGL

SEQ ID NO: 44576 - protein, 9 aa, synthetic construct
  source 1..9: note = Seed: VVGARGVGK (KRAS G12R)
TVGMRGVGM

SEQ ID NO: 44577 - protein, 9 aa, synthetic construct
  source 1..9: note = Seed: VVGARGVGK (KRAS G12R)
TVGMRGVGV

SEQ ID NO: 44578 - protein, 9 aa, synthetic construct
  source 1..9: note = Seed: VVGARGVGK (KRAS G12R)
TVGMRPVGI

SEQ ID NO: 44579 - protein, 9 aa, synthetic construct
  source 1..9: note = Seed: VVGARGVGK (KRAS G12R)
TVGMRPVGL

SEQ ID NO: 44580 - protein, 9 aa, synthetic construct
  source 1..9: note = Seed: VVGARGVGK (KRAS G12R)
TVGMRPVGV

SEQ ID NO: 44581 - protein, 9 aa, synthetic construct
  source 1..9: note = Seed: VVGARGVGK (KRAS G12R)
TVGMRSVGI

SEQ ID NO: 44582 - protein, 9 aa, synthetic construct
  source 1..9: note = Seed: VVGARGVGK (KRAS G12R)
TVGMRSVGL

SEQ ID NO: 44583 - protein, 9 aa, synthetic construct
  source 1..9: note = Seed: VVGARGVGK (KRAS G12R)
TVGMRSVGV

SEQ ID NO: 44584 - protein, 9 aa, synthetic construct
  source 1..9: note = Seed: VVGARGVGK (KRAS G12R)
TVGSRAVGA

SEQ ID NO: 44585 - protein, 9 aa, synthetic construct
  source 1..9: note = Seed: VVGARGVGK (KRAS G12R)
TVGSRAVGC

SEQ ID NO: 44586 - protein, 9 aa, synthetic construct
  source 1..9: note = Seed: VVGARGVGK (KRAS G12R)
TVGSRAVGG

SEQ ID NO: 44587 - protein, 9 aa, synthetic construct
  source 1..9: note = Seed: VVGARGVGK (KRAS G12R)
TVGSRAVGI

SEQ ID NO: 44588 - protein, 9 aa, synthetic construct
  source 1..9: note = Seed: VVGARGVGK (KRAS G12R)
TVGSRAVGL

SEQ ID NO: 44589 - protein, 9 aa, synthetic construct
  source 1..9: note = Seed: VVGARGVGK (KRAS G12R)
TVGSRAVGM

SEQ ID NO: 44590 - protein, 9 aa, synthetic construct
  source 1..9: note = Seed: VVGARGVGK (KRAS G12R)
TVGSRAVGN

SEQ ID NO: 44591 - protein, 9 aa, synthetic construct
  source 1..9: note = Seed: VVGARGVGK (KRAS G12R)
TVGSRAVGS

SEQ ID NO: 44592 - protein, 9 aa, synthetic construct
  source 1..9: note = Seed: VVGARGVGK (KRAS G12R)
TVGSRAVGT

SEQ ID NO: 44593 - protein, 9 aa, synthetic construct
  source 1..9: note = Seed: VVGARGVGK (KRAS G12R)
TVGSRAVGV

SEQ ID NO: 44594 - protein, 9 aa, synthetic construct
  source 1..9: note = Seed: VVGARGVGK (KRAS G12R)
TVGSRIVGA

SEQ ID NO: 44595 - protein, 9 aa, synthetic construct
  source 1..9: note = Seed: VVGARGVGK (KRAS G12R)
TVGSRIVGS

SEQ ID NO: 44596 - protein, 9 aa, synthetic construct
  source 1..9: note = Seed: VVGARGVGK (KRAS G12R)
TVGSRIVGT

SEQ ID NO: 44597 - protein, 9 aa, synthetic construct
  source 1..9: note = Seed: VVGARGVGK (KRAS G12R)
TVGSRIVGV

SEQ ID NO: 44598 - protein, 9 aa, synthetic construct
  source 1..9: note = Seed: VVGARGVGK (KRAS G12R)
TVGSRPVGA

SEQ ID NO: 44599 - protein, 9 aa, synthetic construct
  source 1..9: note = Seed: VVGARGVGK (KRAS G12R)
TVGSRPVGI

SEQ ID NO: 44600 - protein, 9 aa, synthetic construct
  source 1..9: note = Seed: VVGARGVGK (KRAS G12R)
TVGSRPVGS

SEQ ID NO: 44601 - protein, 9 aa, synthetic construct
  source 1..9: note = Seed: VVGARGVGK (KRAS G12R)
TVGSRPVGT

SEQ ID NO: 44602 - protein, 9 aa, synthetic construct
  source 1..9: note = Seed: VVGARGVGK (KRAS G12R)
TVGSRPVGV

SEQ ID NO: 44603 - protein, 9 aa, synthetic construct
  source 1..9: note = Seed: VVGARGVGK (KRAS G12R)
TVGSRSVGA

SEQ ID NO: 44604 - protein, 9 aa, synthetic construct
  source 1..9: note = Seed: VVGARGVGK (KRAS G12R)
TVGSRSVGI

SEQ ID NO: 44605 - protein, 9 aa, synthetic construct
  source 1..9: note = Seed: VVGARGVGK (KRAS G12R)
TVGSRTVGA

SEQ ID NO: 44606 - protein, 9 aa, synthetic construct
  source 1..9: note = Seed: VVGARGVGK (KRAS G12R)
TVGSRVVGA

SEQ ID NO: 44607 - protein, 9 aa, synthetic construct
  source 1..9: note = Seed: VVGARGVGK (KRAS G12R)
TVGSRVVGG

SEQ ID NO: 44608 - protein, 9 aa, synthetic construct
  source 1..9: note = Seed: VVGARGVGK (KRAS G12R)
TVGSRVVGI

SEQ ID NO: 44609 - protein, 9 aa, synthetic construct
  source 1..9: note = Seed: VVGARGVGK (KRAS G12R)
TVGSRVVGS

SEQ ID NO: 44610 - protein, 9 aa, synthetic construct
  source 1..9: note = Seed: VVGARGVGK (KRAS G12R)
TVGSRVVGT

SEQ ID NO: 44611 - protein, 9 aa, synthetic construct
  source 1..9: note = Seed: VVGARGVGK (KRAS G12R)
TVGSRVVGV

SEQ ID NO: 44612 - protein, 9 aa, synthetic construct
  source 1..9: note = Seed: VVGARGVGK (KRAS G12R)
TVGTRAVGA

SEQ ID NO: 44613 - protein, 9 aa, synthetic construct
  source 1..9: note = Seed: VVGARGVGK (KRAS G12R)
TVGTRAVGI

SEQ ID NO: 44614 - protein, 9 aa, synthetic construct
  source 1..9: note = Seed: VVGARGVGK (KRAS G12R)
TVGTRAVGS

SEQ ID NO: 44615 - protein, 9 aa, synthetic construct
  source 1..9: note = Seed: VVGARGVGK (KRAS G12R)
TVGTRAVGV

SEQ ID NO: 44616 - protein, 9 aa, synthetic construct
  source 1..9: note = Seed: VVGARGVGK (KRAS G12R)
TVGTRSVGI

SEQ ID NO: 44617 - protein, 9 aa, synthetic construct
  source 1..9: note = Seed: VVGARGVGK (KRAS G12R)
TVGTRSVGL

SEQ ID NO: 44618 - protein, 9 aa, synthetic construct
  source 1..9: note = Seed: VVGARGVGK (KRAS G12R)
TVGTRSVGV

SEQ ID NO: 44619 - protein, 9 aa, synthetic construct
  source 1..9: note = Seed: VVGARGVGK (KRAS G12R)
TVGTRVVGA

SEQ ID NO: 44620 - protein, 9 aa, synthetic construct
  source 1..9: note = Seed: VVGARGVGK (KRAS G12R)
TVGWRRVGR

SEQ ID NO: 44621 - protein, 9 aa, synthetic construct
  source 1..9: note = Seed: VVGARGVGK (KRAS G12R)
TVGYRRVGR

SEQ ID NO: 44622 - protein, 9 aa, synthetic construct
  source 1..9: note = Seed: VVGARGVGK (KRAS G12R)
VVGARAVGA

SEQ ID NO: 44623 - protein, 9 aa, synthetic construct
  source 1..9: note = Seed: VVGARGVGK (KRAS G12R)
VVGARAVGC

SEQ ID NO: 44624 - protein, 9 aa, synthetic construct
  source 1..9: note = Seed: VVGARGVGK (KRAS G12R)
VVGARAVGD

SEQ ID NO: 44625 - protein, 9 aa, synthetic construct
  source 1..9: note = Seed: VVGARGVGK (KRAS G12R)
VVGARAVGE

SEQ ID NO: 44626 - protein, 9 aa, synthetic construct
  source 1..9: note = Seed: VVGARGVGK (KRAS G12R)
VVGARAVGF

SEQ ID NO: 44627 - protein, 9 aa, synthetic construct
  source 1..9: note = Seed: VVGARGVGK (KRAS G12R)
VVGARAVGG

SEQ ID NO: 44628 - protein, 9 aa, synthetic construct
  source 1..9: note = Seed: VVGARGVGK (KRAS G12R)
VVGARAVGH

SEQ ID NO: 44629 - protein, 9 aa, synthetic construct
  source 1..9: note = Seed: VVGARGVGK (KRAS G12R)
VVGARAVGI

SEQ ID NO: 44630 - protein, 9 aa, synthetic construct
  source 1..9: note = Seed: VVGARGVGK (KRAS G12R)
VVGARAVGK

SEQ ID NO: 44631 - protein, 9 aa, synthetic construct
  source 1..9: note = Seed: VVGARGVGK (KRAS G12R)
VVGARAVGL

SEQ ID NO: 44632 - protein, 9 aa, synthetic construct
  source 1..9: note = Seed: VVGARGVGK (KRAS G12R)
VVGARAVGM

SEQ ID NO: 44633 - protein, 9 aa, synthetic construct
  source 1..9: note = Seed: VVGARGVGK (KRAS G12R)
VVGARAVGN

SEQ ID NO: 44634 - protein, 9 aa, synthetic construct
  source 1..9: note = Seed: VVGARGVGK (KRAS G12R)
VVGARAVGP

SEQ ID NO: 44635 - protein, 9 aa, synthetic construct
  source 1..9: note = Seed: VVGARGVGK (KRAS G12R)
VVGARAVGQ

SEQ ID NO: 44636 - protein, 9 aa, synthetic construct
  source 1..9: note = Seed: VVGARGVGK (KRAS G12R)
VVGARAVGR

SEQ ID NO: 44637 - protein, 9 aa, synthetic construct
  source 1..9: note = Seed: VVGARGVGK (KRAS G12R)
VVGARAVGS

SEQ ID NO: 44638 - protein, 9 aa, synthetic construct
  source 1..9: note = Seed: VVGARGVGK (KRAS G12R)
VVGARAVGT

SEQ ID NO: 44639 - protein, 9 aa, synthetic construct
  source 1..9: note = Seed: VVGARGVGK (KRAS G12R)
VVGARAVGV

SEQ ID NO: 44640 - protein, 9 aa, synthetic construct
  source 1..9: note = Seed: VVGARGVGK (KRAS G12R)
VVGARAVGW

SEQ ID NO: 44641 - protein, 9 aa, synthetic construct
  source 1..9: note = Seed: VVGARGVGK (KRAS G12R)
VVGARAVGY

SEQ ID NO: 44642 - protein, 9 aa, synthetic construct
  source 1..9: note = Seed: VVGARGVGK (KRAS G12R)
VVGARCVGA

SEQ ID NO: 44643 - protein, 9 aa, synthetic construct
  source 1..9: note = Seed: VVGARGVGK (KRAS G12R)
VVGARCVGS

SEQ ID NO: 44644 - protein, 9 aa, synthetic construct
  source 1..9: note = Seed: VVGARGVGK (KRAS G12R)
VVGARGVGA

SEQ ID NO: 44645 - protein, 9 aa, synthetic construct
  source 1..9: note = Seed: VVGARGVGK (KRAS G12R)
VVGARGVGG

SEQ ID NO: 44646 - protein, 9 aa, synthetic construct
  source 1..9: note = Seed: VVGARGVGK (KRAS G12R)
VVGARGVGI

SEQ ID NO: 44647 - protein, 9 aa, synthetic construct
  source 1..9: note = Seed: VVGARGVGK (KRAS G12R)
VVGARGVGL

SEQ ID NO: 44648 - protein, 9 aa, synthetic construct
  source 1..9: note = Seed: VVGARGVGK (KRAS G12R)
VVGARGVGM

SEQ ID NO: 44649 - protein, 9 aa, synthetic construct
  source 1..9: note = Seed: VVGARGVGK (KRAS G12R)
VVGARGVGS

SEQ ID NO: 44650 - protein, 9 aa, synthetic construct
  source 1..9: note = Seed: VVGARGVGK (KRAS G12R)
VVGARGVGT

SEQ ID NO: 44651 - protein, 9 aa, synthetic construct
  source 1..9: note = Seed: VVGARGVGK (KRAS G12R)
VVGARGVGV

SEQ ID NO: 44652 - protein, 9 aa, synthetic construct
  source 1..9: note = Seed: VVGARGVGK (KRAS G12R)
VVGARHVGA

SEQ ID NO: 44653 - protein, 9 aa, synthetic construct
  source 1..9: note = Seed: VVGARGVGK (KRAS G12R)
VVGARHVGI

SEQ ID NO: 44654 - protein, 9 aa, synthetic construct
  source 1..9: note = Seed: VVGARGVGK (KRAS G12R)
VVGARHVGL

SEQ ID NO: 44655 - protein, 9 aa, synthetic construct
  source 1..9: note = Seed: VVGARGVGK (KRAS G12R)
VVGARHVGR

SEQ ID NO: 44656 - protein, 9 aa, synthetic construct
  source 1..9: note = Seed: VVGARGVGK (KRAS G12R)
VVGARHVGS

SEQ ID NO: 44657 - protein, 9 aa, synthetic construct
  source 1..9: note = Seed: VVGARGVGK (KRAS G12R)
VVGARHVGV

SEQ ID NO: 44658 - protein, 9 aa, synthetic construct
  source 1..9: note = Seed: VVGARGVGK (KRAS G12R)
VVGARIVGA

SEQ ID NO: 44659 - protein, 9 aa, synthetic construct
  source 1..9: note = Seed: VVGARGVGK (KRAS G12R)
VVGARIVGC

SEQ ID NO: 44660 - protein, 9 aa, synthetic construct
  source 1..9: note = Seed: VVGARGVGK (KRAS G12R)
VVGARIVGD

SEQ ID NO: 44661 - protein, 9 aa, synthetic construct
  source 1..9: note = Seed: VVGARGVGK (KRAS G12R)
VVGARIVGG

SEQ ID NO: 44662 - protein, 9 aa, synthetic construct
  source 1..9: note = Seed: VVGARGVGK (KRAS G12R)
VVGARIVGH

SEQ ID NO: 44663 - protein, 9 aa, synthetic construct
  source 1..9: note = Seed: VVGARGVGK (KRAS G12R)
VVGARIVGI

SEQ ID NO: 44664 - protein, 9 aa, synthetic construct
  source 1..9: note = Seed: VVGARGVGK (KRAS G12R)
VVGARIVGL

SEQ ID NO: 44665 - protein, 9 aa, synthetic construct
  source 1..9: note = Seed: VVGARGVGK (KRAS G12R)
VVGARIVGM

SEQ ID NO: 44666 - protein, 9 aa, synthetic construct
  source 1..9: note = Seed: VVGARGVGK (KRAS G12R)
VVGARIVGN

SEQ ID NO: 44667 - protein, 9 aa, synthetic construct
  source 1..9: note = Seed: VVGARGVGK (KRAS G12R)
VVGARIVGP

SEQ ID NO: 44668 - protein, 9 aa, synthetic construct
  source 1..9: note = Seed: VVGARGVGK (KRAS G12R)
VVGARIVGQ

SEQ ID NO: 44669 - protein, 9 aa, synthetic construct
  source 1..9: note = Seed: VVGARGVGK (KRAS G12R)
VVGARIVGS

SEQ ID NO: 44670 - protein, 9 aa, synthetic construct
  source 1..9: note = Seed: VVGARGVGK (KRAS G12R)
VVGARIVGT

SEQ ID NO: 44671 - protein, 9 aa, synthetic construct
  source 1..9: note = Seed: VVGARGVGK (KRAS G12R)
VVGARIVGV

SEQ ID NO: 44672 - protein, 9 aa, synthetic construct
  source 1..9: note = Seed: VVGARGVGK (KRAS G12R)
VVGARKVGF

SEQ ID NO: 44673 - protein, 9 aa, synthetic construct
  source 1..9: note = Seed: VVGARGVGK (KRAS G12R)
VVGARKVGI

SEQ ID NO: 44674 - protein, 9 aa, synthetic construct
  source 1..9: note = Seed: VVGARGVGK (KRAS G12R)
VVGARKVGK

SEQ ID NO: 44675 - protein, 9 aa, synthetic construct
  source 1..9: note = Seed: VVGARGVGK (KRAS G12R)
VVGARKVGL

SEQ ID NO: 44676 - protein, 9 aa, synthetic construct
  source 1..9: note = Seed: VVGARGVGK (KRAS G12R)
VVGARKVGM

SEQ ID NO: 44677 - protein, 9 aa, synthetic construct
  source 1..9: note = Seed: VVGARGVGK (KRAS G12R)
VVGARKVGR

SEQ ID NO: 44678 - protein, 9 aa, synthetic construct
  source 1..9: note = Seed: VVGARGVGK (KRAS G12R)
VVGARKVGV

SEQ ID NO: 44679 - protein, 9 aa, synthetic construct
  source 1..9: note = Seed: VVGARGVGK (KRAS G12R)
VVGARKVGY

SEQ ID NO: 44680 - protein, 9 aa, synthetic construct
  source 1..9: note = Seed: VVGARGVGK (KRAS G12R)
VVGARLVGA

SEQ ID NO: 44681 - protein, 9 aa, synthetic construct
  source 1..9: note = Seed: VVGARGVGK (KRAS G12R)
VVGARLVGG

SEQ ID NO: 44682 - protein, 9 aa, synthetic construct
  source 1..9: note = Seed: VVGARGVGK (KRAS G12R)
VVGARLVGS

SEQ ID NO: 44683 - protein, 9 aa, synthetic construct
  source 1..9: note = Seed: VVGARGVGK (KRAS G12R)
VVGARLVGT

SEQ ID NO: 44684 - protein, 9 aa, synthetic construct
  source 1..9: note = Seed: VVGARGVGK (KRAS G12R)
VVGARLVGV

SEQ ID NO: 44685 - protein, 9 aa, synthetic construct
  source 1..9: note = Seed: VVGARGVGK (KRAS G12R)
VVGARMVGA

SEQ ID NO: 44686 - protein, 9 aa, synthetic construct
  source 1..9: note = Seed: VVGARGVGK (KRAS G12R)
VVGARMVGS

SEQ ID NO: 44687 - protein, 9 aa, synthetic construct
  source 1..9: note = Seed: VVGARGVGK (KRAS G12R)
VVGARMVGT

SEQ ID NO: 44688 - protein, 9 aa, synthetic construct
  source 1..9: note = Seed: VVGARGVGK (KRAS G12R)
VVGARMVGV

SEQ ID NO: 44689 - protein, 9 aa, synthetic construct
  source 1..9: note = Seed: VVGARGVGK (KRAS G12R)
VVGARNVGA

SEQ ID NO: 44690 - protein, 9 aa, synthetic construct
  source 1..9: note = Seed: VVGARGVGK (KRAS G12R)
VVGARNVGI

SEQ ID NO: 44691 - protein, 9 aa, synthetic construct
  source 1..9: note = Seed: VVGARGVGK (KRAS G12R)
VVGARNVGL

SEQ ID NO: 44692 - protein, 9 aa, synthetic construct
  source 1..9: note = Seed: VVGARGVGK (KRAS G12R)
VVGARNVGM

SEQ ID NO: 44693 - protein, 9 aa, synthetic construct
  source 1..9: note = Seed: VVGARGVGK (KRAS G12R)
VVGARNVGS

SEQ ID NO: 44694 - protein, 9 aa, synthetic construct
  source 1..9: note = Seed: VVGARGVGK (KRAS G12R)
VVGARNVGV

SEQ ID NO: 44695 - protein, 9 aa, synthetic construct
  source 1..9: note = Seed: VVGARGVGK (KRAS G12R)
VVGARPVGA

SEQ ID NO: 44696 - protein, 9 aa, synthetic construct
  source 1..9: note = Seed: VVGARGVGK (KRAS G12R)
VVGARPVGC

SEQ ID NO: 44697 - protein, 9 aa, synthetic construct
  source 1..9: note = Seed: VVGARGVGK (KRAS G12R)
VVGARPVGD

SEQ ID NO: 44698 - protein, 9 aa, synthetic construct
  source 1..9: note = Seed: VVGARGVGK (KRAS G12R)
VVGARPVGE

SEQ ID NO: 44699 - protein, 9 aa, synthetic construct
  source 1..9: note = Seed: VVGARGVGK (KRAS G12R)
VVGARPVGF

SEQ ID NO: 44700 - protein, 9 aa, synthetic construct
  source 1..9: note = Seed: VVGARGVGK (KRAS G12R)
VVGARPVGG

SEQ ID NO: 44701 - protein, 9 aa, synthetic construct
  source 1..9: note = Seed: VVGARGVGK (KRAS G12R)
VVGARPVGH

SEQ ID NO: 44702 - protein, 9 aa, synthetic construct
  source 1..9: note = Seed: VVGARGVGK (KRAS G12R)
VVGARPVGI

SEQ ID NO: 44703 - protein, 9 aa, synthetic construct
  source 1..9: note = Seed: VVGARGVGK (KRAS G12R)
VVGARPVGK

SEQ ID NO: 44704 - protein, 9 aa, synthetic construct
  source 1..9: note = Seed: VVGARGVGK (KRAS G12R)
VVGARPVGL

SEQ ID NO: 44705 - protein, 9 aa, synthetic construct
  source 1..9: note = Seed: VVGARGVGK (KRAS G12R)
VVGARPVGM

SEQ ID NO: 44706 - protein, 9 aa, synthetic construct
  source 1..9: note = Seed: VVGARGVGK (KRAS G12R)
VVGARPVGN

SEQ ID NO: 44707 - protein, 9 aa, synthetic construct
  source 1..9: note = Seed: VVGARGVGK (KRAS G12R)
VVGARPVGP

SEQ ID NO: 44708 - protein, 9 aa, synthetic construct
  source 1..9: note = Seed: VVGARGVGK (KRAS G12R)
VVGARPVGQ

SEQ ID NO: 44709 - protein, 9 aa, synthetic construct
  source 1..9: note = Seed: VVGARGVGK (KRAS G12R)
VVGARPVGR

SEQ ID NO: 44710 - protein, 9 aa, synthetic construct
  source 1..9: note = Seed: VVGARGVGK (KRAS G12R)
VVGARPVGS

SEQ ID NO: 44711 - protein, 9 aa, synthetic construct
  source 1..9: note = Seed: VVGARGVGK (KRAS G12R)
VVGARPVGT

SEQ ID NO: 44712 - protein, 9 aa, synthetic construct
  source 1..9: note = Seed: VVGARGVGK (KRAS G12R)
VVGARPVGV

SEQ ID NO: 44713 - protein, 9 aa, synthetic construct
  source 1..9: note = Seed: VVGARGVGK (KRAS G12R)
VVGARPVGW

SEQ ID NO: 44714 - protein, 9 aa, synthetic construct
  source 1..9: note = Seed: VVGARGVGK (KRAS G12R)
VVGARPVGY

SEQ ID NO: 44715 - protein, 9 aa, synthetic construct
  source 1..9: note = Seed: VVGARGVGK (KRAS G12R)
VVGARRVGA

SEQ ID NO: 44716 - protein, 9 aa, synthetic construct
  source 1..9: note = Seed: VVGARGVGK (KRAS G12R)
VVGARRVGF

SEQ ID NO: 44717 - protein, 9 aa, synthetic construct
  source 1..9: note = Seed: VVGARGVGK (KRAS G12R)
VVGARRVGH

SEQ ID NO: 44718 - protein, 9 aa, synthetic construct
  source 1..9: note = Seed: VVGARGVGK (KRAS G12R)
VVGARRVGI

SEQ ID NO: 44719 - protein, 9 aa, synthetic construct
  source 1..9: note = Seed: VVGARGVGK (KRAS G12R)
VVGARRVGK

SEQ ID NO: 44720 - protein, 9 aa, synthetic construct
  source 1..9: note = Seed: VVGARGVGK (KRAS G12R)
VVGARRVGL

SEQ ID NO: 44721 - protein, 9 aa, synthetic construct
  source 1..9: note = Seed: VVGARGVGK (KRAS G12R)
VVGARRVGM

SEQ ID NO: 44722 - protein, 9 aa, synthetic construct
  source 1..9: note = Seed: VVGARGVGK (KRAS G12R)
VVGARRVGQ

SEQ ID NO: 44723 - protein, 9 aa, synthetic construct
  source 1..9: note = Seed: VVGARGVGK (KRAS G12R)
VVGARRVGR

SEQ ID NO: 44724 - protein, 9 aa, synthetic construct
  source 1..9: note = Seed: VVGARGVGK (KRAS G12R)
VVGARRVGS

SEQ ID NO: 44725 - protein, 9 aa, synthetic construct
  source 1..9: note = Seed: VVGARGVGK (KRAS G12R)
VVGARRVGT

SEQ ID NO: 44726 - protein, 9 aa, synthetic construct
  source 1..9: note = Seed: VVGARGVGK (KRAS G12R)
VVGARRVGV

SEQ ID NO: 44727 - protein, 9 aa, synthetic construct
  source 1..9: note = Seed: VVGARGVGK (KRAS G12R)
VVGARRVGW

SEQ ID NO: 44728 - protein, 9 aa, synthetic construct
  source 1..9: note = Seed: VVGARGVGK (KRAS G12R)
VVGARRVGY

SEQ ID NO: 44729 - protein, 9 aa, synthetic construct
  source 1..9: note = Seed: VVGARGVGK (KRAS G12R)
VVGARSVGA

SEQ ID NO: 44730 - protein, 9 aa, synthetic construct
  source 1..9: note = Seed: VVGARGVGK (KRAS G12R)
VVGARSVGC

SEQ ID NO: 44731 - protein, 9 aa, synthetic construct
  source 1..9: note = Seed: VVGARGVGK (KRAS G12R)
VVGARSVGF

SEQ ID NO: 44732 - protein, 9 aa, synthetic construct
  source 1..9: note = Seed: VVGARGVGK (KRAS G12R)
VVGARSVGG

SEQ ID NO: 44733 - protein, 9 aa, synthetic construct
  source 1..9: note = Seed: VVGARGVGK (KRAS G12R)
VVGARSVGI

SEQ ID NO: 44734 - protein, 9 aa, synthetic construct
  source 1..9: note = Seed: VVGARGVGK (KRAS G12R)
VVGARSVGL

SEQ ID NO: 44735 - protein, 9 aa, synthetic construct
  source 1..9: note = Seed: VVGARGVGK (KRAS G12R)
VVGARSVGM

SEQ ID NO: 44736 - protein, 9 aa, synthetic construct
  source 1..9: note = Seed: VVGARGVGK (KRAS G12R)
VVGARSVGN

SEQ ID NO: 44737 - protein, 9 aa, synthetic construct
  source 1..9: note = Seed: VVGARGVGK (KRAS G12R)
VVGARSVGR

SEQ ID NO: 44738 - protein, 9 aa, synthetic construct
  source 1..9: note = Seed: VVGARGVGK (KRAS G12R)
VVGARSVGS

SEQ ID NO: 44739 - protein, 9 aa, synthetic construct
  source 1..9: note = Seed: VVGARGVGK (KRAS G12R)
VVGARSVGT

SEQ ID NO: 44740 - protein, 9 aa, synthetic construct
  source 1..9: note = Seed: VVGARGVGK (KRAS G12R)
VVGARSVGV

SEQ ID NO: 44741 - protein, 9 aa, synthetic construct
  source 1..9: note = Seed: VVGARGVGK (KRAS G12R)
VVGARSVGY

SEQ ID NO: 44742 - protein, 9 aa, synthetic construct
  source 1..9: note = Seed: VVGARGVGK (KRAS G12R)
VVGARTVGA

SEQ ID NO: 44743 - protein, 9 aa, synthetic construct
  source 1..9: note = Seed: VVGARGVGK (KRAS G12R)
VVGARTVGC

SEQ ID NO: 44744 - protein, 9 aa, synthetic construct
  source 1..9: note = Seed: VVGARGVGK (KRAS G12R)
VVGARTVGG

SEQ ID NO: 44745 - protein, 9 aa, synthetic construct
  source 1..9: note = Seed: VVGARGVGK (KRAS G12R)
VVGARTVGI

SEQ ID NO: 44746 - protein, 9 aa, synthetic construct
  source 1..9: note = Seed: VVGARGVGK (KRAS G12R)
VVGARTVGL

SEQ ID NO: 44747 - protein, 9 aa, synthetic construct
  source 1..9: note = Seed: VVGARGVGK (KRAS G12R)
VVGARTVGM

SEQ ID NO: 44748 - protein, 9 aa, synthetic construct
  source 1..9: note = Seed: VVGARGVGK (KRAS G12R)
VVGARTVGN

SEQ ID NO: 44749 - protein, 9 aa, synthetic construct
  source 1..9: note = Seed: VVGARGVGK (KRAS G12R)
VVGARTVGS

SEQ ID NO: 44750 - protein, 9 aa, synthetic construct
  source 1..9: note = Seed: VVGARGVGK (KRAS G12R)
VVGARTVGT

SEQ ID NO: 44751 - protein, 9 aa, synthetic construct
  source 1..9: note = Seed: VVGARGVGK (KRAS G12R)
VVGARTVGV

SEQ ID NO: 44752 - protein, 9 aa, synthetic construct
  source 1..9: note = Seed: VVGARGVGK (KRAS G12R)
VVGARVVGA

SEQ ID NO: 44753 - protein, 9 aa, synthetic construct
  source 1..9: note = Seed: VVGARGVGK (KRAS G12R)
VVGARVVGC

SEQ ID NO: 44754 - protein, 9 aa, synthetic construct
  source 1..9: note = Seed: VVGARGVGK (KRAS G12R)
VVGARVVGD

SEQ ID NO: 44755 - protein, 9 aa, synthetic construct
  source 1..9: note = Seed: VVGARGVGK (KRAS G12R)
VVGARVVGE

SEQ ID NO: 44756 - protein, 9 aa, synthetic construct
  source 1..9: note = Seed: VVGARGVGK (KRAS G12R)
VVGARVVGF

SEQ ID NO: 44757 - protein, 9 aa, synthetic construct
  source 1..9: note = Seed: VVGARGVGK (KRAS G12R)
VVGARVVGG

SEQ ID NO: 44758 - protein, 9 aa, synthetic construct
  source 1..9: note = Seed: VVGARGVGK (KRAS G12R)
VVGARVVGH

SEQ ID NO: 44759 - protein, 9 aa, synthetic construct
  source 1..9: note = Seed: VVGARGVGK (KRAS G12R)
VVGARVVGI

SEQ ID NO: 44760 - protein, 9 aa, synthetic construct
  source 1..9: note = Seed: VVGARGVGK (KRAS G12R)
VVGARVVGL

SEQ ID NO: 44761 - protein, 9 aa, synthetic construct
  source 1..9: note = Seed: VVGARGVGK (KRAS G12R)
VVGARVVGM

SEQ ID NO: 44762 - protein, 9 aa, synthetic construct
  source 1..9: note = Seed: VVGARGVGK (KRAS G12R)
VVGARVVGN

SEQ ID NO: 44763 - protein, 9 aa, synthetic construct
  source 1..9: note = Seed: VVGARGVGK (KRAS G12R)
VVGARVVGP

SEQ ID NO: 44764 - protein, 9 aa, synthetic construct
  source 1..9: note = Seed: VVGARGVGK (KRAS G12R)
VVGARVVGQ

SEQ ID NO: 44765 - protein, 9 aa, synthetic construct
  source 1..9: note = Seed: VVGARGVGK (KRAS G12R)
VVGARVVGS

SEQ ID NO: 44766 - protein, 9 aa, synthetic construct
  source 1..9: note = Seed: VVGARGVGK (KRAS G12R)
VVGARVVGT

SEQ ID NO: 44767 - protein, 9 aa, synthetic construct
  source 1..9: note = Seed: VVGARGVGK (KRAS G12R)
VVGARVVGV

SEQ ID NO: 44768 - protein, 9 aa, synthetic construct
  source 1..9: note = Seed: VVGARGVGK (KRAS G12R)
VVGARVVGY

SEQ ID NO: 44769 - protein, 9 aa, synthetic construct
  source 1..9: note = Seed: VVGARGVGK (KRAS G12R)
VVGCRAVGA

SEQ ID NO: 44770 - protein, 9 aa, synthetic construct
  source 1..9: note = Seed: VVGARGVGK (KRAS G12R)
VVGCRAVGI

SEQ ID NO: 44771 - protein, 9 aa, synthetic construct
  source 1..9: note = Seed: VVGARGVGK (KRAS G12R)
VVGCRAVGL

SEQ ID NO: 44772 - protein, 9 aa, synthetic construct
  source 1..9: note = Seed: VVGARGVGK (KRAS G12R)
VVGCRAVGM

SEQ ID NO: 44773 - protein, 9 aa, synthetic construct
  source 1..9: note = Seed: VVGARGVGK (KRAS G12R)
VVGCRAVGS

SEQ ID NO: 44774 - protein, 9 aa, synthetic construct
  source 1..9: note = Seed: VVGARGVGK (KRAS G12R)
VVGCRAVGV

SEQ ID NO: 44775 - protein, 9 aa, synthetic construct
  source 1..9: note = Seed: VVGARGVGK (KRAS G12R)
VVGCRKVGR

SEQ ID NO: 44776 - protein, 9 aa, synthetic construct
  source 1..9: note = Seed: VVGARGVGK (KRAS G12R)
VVGCRRVGR

SEQ ID NO: 44777 - protein, 9 aa, synthetic construct
  source 1..9: note = Seed: VVGARGVGK (KRAS G12R)
VVGCRRVGY

SEQ ID NO: 44778 - protein, 9 aa, synthetic construct
  source 1..9: note = Seed: VVGARGVGK (KRAS G12R)
VVGCRSVGA

SEQ ID NO: 44779 - protein, 9 aa, synthetic construct
  source 1..9: note = Seed: VVGARGVGK (KRAS G12R)
VVGCRVVGA

SEQ ID NO: 44780 - protein, 9 aa, synthetic construct
  source 1..9: note = Seed: VVGARGVGK (KRAS G12R)
VVGERAVGA

SEQ ID NO: 44781 - protein, 9 aa, synthetic construct
  source 1..9: note = Seed: VVGARGVGK (KRAS G12R)
VVGERAVGI

SEQ ID NO: 44782 - protein, 9 aa, synthetic construct
  source 1..9: note = Seed: VVGARGVGK (KRAS G12R)
VVGERAVGL

SEQ ID NO: 44783 - protein, 9 aa, synthetic construct
  source 1..9: note = Seed: VVGARGVGK (KRAS G12R)
VVGERAVGM

SEQ ID NO: 44784 - protein, 9 aa, synthetic construct
  source 1..9: note = Seed: VVGARGVGK (KRAS G12R)
VVGERAVGS

SEQ ID NO: 44785 - protein, 9 aa, synthetic construct
  source 1..9: note = Seed: VVGARGVGK (KRAS G12R)
VVGERAVGT

SEQ ID NO: 44786 - protein, 9 aa, synthetic construct
  source 1..9: note = Seed: VVGARGVGK (KRAS G12R)
VVGERAVGV

SEQ ID NO: 44787 - protein, 9 aa, synthetic construct
  source 1..9: note = Seed: VVGARGVGK (KRAS G12R)
VVGERGVGA

SEQ ID NO: 44788 - protein, 9 aa, synthetic construct
  source 1..9: note = Seed: VVGARGVGK (KRAS G12R)
VVGERGVGI

SEQ ID NO: 44789 - protein, 9 aa, synthetic construct
  source 1..9: note = Seed: VVGARGVGK (KRAS G12R)
VVGERGVGL

SEQ ID NO: 44790 - protein, 9 aa, synthetic construct
  source 1..9: note = Seed: VVGARGVGK (KRAS G12R)
VVGERGVGM

SEQ ID NO: 44791 - protein, 9 aa, synthetic construct
  source 1..9: note = Seed: VVGARGVGK (KRAS G12R)
VVGERGVGV

SEQ ID NO: 44792 - protein, 9 aa, synthetic construct
  source 1..9: note = Seed: VVGARGVGK (KRAS G12R)
VVGERRVGR

SEQ ID NO: 44793 - protein, 9 aa, synthetic construct
  source 1..9: note = Seed: VVGARGVGK (KRAS G12R)
VVGERSVGA

SEQ ID NO: 44794 - protein, 9 aa, synthetic construct
  source 1..9: note = Seed: VVGARGVGK (KRAS G12R)
VVGERSVGI

SEQ ID NO: 44795 - protein, 9 aa, synthetic construct
  source 1..9: note = Seed: VVGARGVGK (KRAS G12R)
VVGERSVGL

SEQ ID NO: 44796 - protein, 9 aa, synthetic construct
  source 1..9: note = Seed: VVGARGVGK (KRAS G12R)
VVGERSVGV

SEQ ID NO: 44797 - protein, 9 aa, synthetic construct
  source 1..9: note = Seed: VVGARGVGK (KRAS G12R)
VVGFRAVGA

SEQ ID NO: 44798 - protein, 9 aa, synthetic construct
  source 1..9: note = Seed: VVGARGVGK (KRAS G12R)
VVGFRAVGI

SEQ ID NO: 44799 - protein, 9 aa, synthetic construct
  source 1..9: note = Seed: VVGARGVGK (KRAS G12R)
VVGFRAVGL

SEQ ID NO: 44800 - protein, 9 aa, synthetic construct
  source 1..9: note = Seed: VVGARGVGK (KRAS G12R)
VVGFRAVGM

SEQ ID NO: 44801 - protein, 9 aa, synthetic construct
  source 1..9: note = Seed: VVGARGVGK (KRAS G12R)
VVGFRAVGR

SEQ ID NO: 44802 - protein, 9 aa, synthetic construct
  source 1..9: note = Seed: VVGARGVGK (KRAS G12R)
VVGFRGVGI

SEQ ID NO: 44803 - protein, 9 aa, synthetic construct
  source 1..9: note = Seed: VVGARGVGK (KRAS G12R)
VVGFRGVGL

SEQ ID NO: 44804 - protein, 9 aa, synthetic construct
  source 1..9: note = Seed: VVGARGVGK (KRAS G12R)
VVGFRGVGM

SEQ ID NO: 44805 - protein, 9 aa, synthetic construct
  source 1..9: note = Seed: VVGARGVGK (KRAS G12R)
VVGFRGVGR

SEQ ID NO: 44806 - protein, 9 aa, synthetic construct
  source 1..9: note = Seed: VVGARGVGK (KRAS G12R)
VVGFRGVGV

SEQ ID NO: 44807 - protein, 9 aa, synthetic construct
  source 1..9: note = Seed: VVGARGVGK (KRAS G12R)
VVGFRHVGK

SEQ ID NO: 44808 - protein, 9 aa, synthetic construct
  source 1..9: note = Seed: VVGARGVGK (KRAS G12R)
VVGFRHVGR

SEQ ID NO: 44809 - protein, 9 aa, synthetic construct
  source 1..9: note = Seed: VVGARGVGK (KRAS G12R)
VVGFRHVGY

SEQ ID NO: 44810 - protein, 9 aa, synthetic construct
  source 1..9: note = Seed: VVGARGVGK (KRAS G12R)
VVGFRKVGA

SEQ ID NO: 44811 - protein, 9 aa, synthetic construct
  source 1..9: note = Seed: VVGARGVGK (KRAS G12R)
VVGFRKVGF

SEQ ID NO: 44812 - protein, 9 aa, synthetic construct
  source 1..9: note = Seed: VVGARGVGK (KRAS G12R)
VVGFRKVGH

SEQ ID NO: 44813 - protein, 9 aa, synthetic construct
  source 1..9: note = Seed: VVGARGVGK (KRAS G12R)
VVGFRKVGI

SEQ ID NO: 44814 - protein, 9 aa, synthetic construct
  source 1..9: note = Seed: VVGARGVGK (KRAS G12R)
VVGFRKVGK

SEQ ID NO: 44815 - protein, 9 aa, synthetic construct
  source 1..9: note = Seed: VVGARGVGK (KRAS G12R)
VVGFRKVGL

SEQ ID NO: 44816 - protein, 9 aa, synthetic construct
  source 1..9: note = Seed: VVGARGVGK (KRAS G12R)
VVGFRKVGM

SEQ ID NO: 44817 - protein, 9 aa, synthetic construct
  source 1..9: note = Seed: VVGARGVGK (KRAS G12R)
VVGFRKVGR

SEQ ID NO: 44818 - protein, 9 aa, synthetic construct
  source 1..9: note = Seed: VVGARGVGK (KRAS G12R)
VVGFRKVGS

SEQ ID NO: 44819 - protein, 9 aa, synthetic construct
  source 1..9: note = Seed: VVGARGVGK (KRAS G12R)
VVGFRKVGT

SEQ ID NO: 44820 - protein, 9 aa, synthetic construct
  source 1..9: note = Seed: VVGARGVGK (KRAS G12R)
VVGFRKVGV

SEQ ID NO: 44821 - protein, 9 aa, synthetic construct
  source 1..9: note = Seed: VVGARGVGK (KRAS G12R)
VVGFRKVGY

SEQ ID NO: 44822 - protein, 9 aa, synthetic construct
  source 1..9: note = Seed: VVGARGVGK (KRAS G12R)
VVGFRNVGI

SEQ ID NO: 44823 - protein, 9 aa, synthetic construct
  source 1..9: note = Seed: VVGARGVGK (KRAS G12R)
VVGFRNVGL

SEQ ID NO: 44824 - protein, 9 aa, synthetic construct
  source 1..9: note = Seed: VVGARGVGK (KRAS G12R)
VVGFRNVGR

SEQ ID NO: 44825 - protein, 9 aa, synthetic construct
  source 1..9: note = Seed: VVGARGVGK (KRAS G12R)
VVGFRPVGI

SEQ ID NO: 44826 - protein, 9 aa, synthetic construct
  source 1..9: note = Seed: VVGARGVGK (KRAS G12R)
VVGFRPVGL

SEQ ID NO: 44827 - protein, 9 aa, synthetic construct
  source 1..9: note = Seed: VVGARGVGK (KRAS G12R)
VVGFRPVGM

SEQ ID NO: 44828 - protein, 9 aa, synthetic construct
  source 1..9: note = Seed: VVGARGVGK (KRAS G12R)
VVGFRPVGR

SEQ ID NO: 44829 - protein, 9 aa, synthetic construct
  source 1..9: note = Seed: VVGARGVGK (KRAS G12R)
VVGFRQVGR

SEQ ID NO: 44830 - protein, 9 aa, synthetic construct
  source 1..9: note = Seed: VVGARGVGK (KRAS G12R)
VVGFRRVGA

SEQ ID NO: 44831 - protein, 9 aa, synthetic construct
  source 1..9: note = Seed: VVGARGVGK (KRAS G12R)
VVGFRRVGF

SEQ ID NO: 44832 - protein, 9 aa, synthetic construct
  source 1..9: note = Seed: VVGARGVGK (KRAS G12R)
VVGFRRVGG

SEQ ID NO: 44833 - protein, 9 aa, synthetic construct
  source 1..9: note = Seed: VVGARGVGK (KRAS G12R)
VVGFRRVGH

SEQ ID NO: 44834 - protein, 9 aa, synthetic construct
  source 1..9: note = Seed: VVGARGVGK (KRAS G12R)
VVGFRRVGI

SEQ ID NO: 44835 - protein, 9 aa, synthetic construct
  source 1..9: note = Seed: VVGARGVGK (KRAS G12R)
VVGFRRVGK

SEQ ID NO: 44836 - protein, 9 aa, synthetic construct
  source 1..9: note = Seed: VVGARGVGK (KRAS G12R)
VVGFRRVGL

SEQ ID NO: 44837 - protein, 9 aa, synthetic construct
  source 1..9: note = Seed: VVGARGVGK (KRAS G12R)
VVGFRRVGM

SEQ ID NO: 44838 - protein, 9 aa, synthetic construct
  source 1..9: note = Seed: VVGARGVGK (KRAS G12R)
VVGFRRVGQ

SEQ ID NO: 44839 - protein, 9 aa, synthetic construct
  source 1..9: note = Seed: VVGARGVGK (KRAS G12R)
VVGFRRVGR

SEQ ID NO: 44840 - protein, 9 aa, synthetic construct
  source 1..9: note = Seed: VVGARGVGK (KRAS G12R)
VVGFRRVGS

SEQ ID NO: 44841 - protein, 9 aa, synthetic construct
  source 1..9: note = Seed: VVGARGVGK (KRAS G12R)
VVGFRRVGT

SEQ ID NO: 44842 - protein, 9 aa, synthetic construct
  source 1..9: note = Seed: VVGARGVGK (KRAS G12R)
VVGFRRVGV

SEQ ID NO: 44843 - protein, 9 aa, synthetic construct
  source 1..9: note = Seed: VVGARGVGK (KRAS G12R)
VVGFRRVGY

SEQ ID NO: 44844 - protein, 9 aa, synthetic construct
  source 1..9: note = Seed: VVGARGVGK (KRAS G12R)
VVGFRSVGL

SEQ ID NO: 44845 - protein, 9 aa, synthetic construct
  source 1..9: note = Seed: VVGARGVGK (KRAS G12R)
VVGFRSVGR

SEQ ID NO: 44846 - protein, 9 aa, synthetic construct
  source 1..9: note = Seed: VVGARGVGK (KRAS G12R)
VVGFRTVGR

SEQ ID NO: 44847 - protein, 9 aa, synthetic construct
  source 1..9: note = Seed: VVGARGVGK (KRAS G12R)
VVGFRVVGR

SEQ ID NO: 44848 - protein, 9 aa, synthetic construct
  source 1..9: note = Seed: VVGARGVGK (KRAS G12R)
VVGGRAVGA

SEQ ID NO: 44849 - protein, 9 aa, synthetic construct
  source 1..9: note = Seed: VVGARGVGK (KRAS G12R)
VVGGRAVGC

SEQ ID NO: 44850 - protein, 9 aa, synthetic construct
  source 1..9: note = Seed: VVGARGVGK (KRAS G12R)
VVGGRAVGD

SEQ ID NO: 44851 - protein, 9 aa, synthetic construct
  source 1..9: note = Seed: VVGARGVGK (KRAS G12R)
VVGGRAVGE

SEQ ID NO: 44852 - protein, 9 aa, synthetic construct
  source 1..9: note = Seed: VVGARGVGK (KRAS G12R)
VVGGRAVGF

SEQ ID NO: 44853 - protein, 9 aa, synthetic construct
  source 1..9: note = Seed: VVGARGVGK (KRAS G12R)
VVGGRAVGG

SEQ ID NO: 44854 - protein, 9 aa, synthetic construct
  source 1..9: note = Seed: VVGARGVGK (KRAS G12R)
VVGGRAVGH

SEQ ID NO: 44855 - protein, 9 aa, synthetic construct
  source 1..9: note = Seed: VVGARGVGK (KRAS G12R)
VVGGRAVGI

SEQ ID NO: 44856 - protein, 9 aa, synthetic construct
  source 1..9: note = Seed: VVGARGVGK (KRAS G12R)
VVGGRAVGL

SEQ ID NO: 44857 - protein, 9 aa, synthetic construct
  source 1..9: note = Seed: VVGARGVGK (KRAS G12R)
VVGGRAVGM

SEQ ID NO: 44858 - protein, 9 aa, synthetic construct
  source 1..9: note = Seed: VVGARGVGK (KRAS G12R)
VVGGRAVGN

SEQ ID NO: 44859 - protein, 9 aa, synthetic construct
  source 1..9: note = Seed: VVGARGVGK (KRAS G12R)
VVGGRAVGP

SEQ ID NO: 44860 - protein, 9 aa, synthetic construct
  source 1..9: note = Seed: VVGARGVGK (KRAS G12R)
VVGGRAVGQ

SEQ ID NO: 44861 - protein, 9 aa, synthetic construct
  source 1..9: note = Seed: VVGARGVGK (KRAS G12R)
VVGGRAVGS

SEQ ID NO: 44862 - protein, 9 aa, synthetic construct
  source 1..9: note = Seed: VVGARGVGK (KRAS G12R)
VVGGRAVGT

SEQ ID NO: 44863 - protein, 9 aa, synthetic construct
  source 1..9: note = Seed: VVGARGVGK (KRAS G12R)
VVGGRAVGV

SEQ ID NO: 44864 - protein, 9 aa, synthetic construct
  source 1..9: note = Seed: VVGARGVGK (KRAS G12R)
VVGGRAVGW

SEQ ID NO: 44865 - protein, 9 aa, synthetic construct
  source 1..9: note = Seed: VVGARGVGK (KRAS G12R)
VVGGRAVGY

SEQ ID NO: 44866 - protein, 9 aa, synthetic construct
  source 1..9: note = Seed: VVGARGVGK (KRAS G12R)
VVGGRCVGA

SEQ ID NO: 44867 - protein, 9 aa, synthetic construct
  source 1..9: note = Seed: VVGARGVGK (KRAS G12R)
VVGGRCVGS

SEQ ID NO: 44868 - protein, 9 aa, synthetic construct
  source 1..9: note = Seed: VVGARGVGK (KRAS G12R)
VVGGRCVGT

SEQ ID NO: 44869 - protein, 9 aa, synthetic construct
  source 1..9: note = Seed: VVGARGVGK (KRAS G12R)
VVGGRCVGV

SEQ ID NO: 44870 - protein, 9 aa, synthetic construct
  source 1..9: note = Seed: VVGARGVGK (KRAS G12R)
VVGGRGVGA

SEQ ID NO: 44871 - protein, 9 aa, synthetic construct
  source 1..9: note = Seed: VVGARGVGK (KRAS G12R)
VVGGRGVGI

SEQ ID NO: 44872 - protein, 9 aa, synthetic construct
  source 1..9: note = Seed: VVGARGVGK (KRAS G12R)
VVGGRGVGL

SEQ ID NO: 44873 - protein, 9 aa, synthetic construct
  source 1..9: note = Seed: VVGARGVGK (KRAS G12R)
VVGGRGVGS

SEQ ID NO: 44874 - protein, 9 aa, synthetic construct
  source 1..9: note = Seed: VVGARGVGK (KRAS G12R)
VVGGRGVGT

SEQ ID NO: 44875 - protein, 9 aa, synthetic construct
  source 1..9: note = Seed: VVGARGVGK (KRAS G12R)
VVGGRGVGV

SEQ ID NO: 44876 - protein, 9 aa, synthetic construct
  source 1..9: note = Seed: VVGARGVGK (KRAS G12R)
VVGGRIVGA

SEQ ID NO: 44877 - protein, 9 aa, synthetic construct
  source 1..9: note = Seed: VVGARGVGK (KRAS G12R)
VVGGRIVGC

SEQ ID NO: 44878 - protein, 9 aa, synthetic construct
  source 1..9: note = Seed: VVGARGVGK (KRAS G12R)
VVGGRIVGD

SEQ ID NO: 44879 - protein, 9 aa, synthetic construct
  source 1..9: note = Seed: VVGARGVGK (KRAS G12R)
VVGGRIVGE

SEQ ID NO: 44880 - protein, 9 aa, synthetic construct
  source 1..9: note = Seed: VVGARGVGK (KRAS G12R)
VVGGRIVGF

SEQ ID NO: 44881 - protein, 9 aa, synthetic construct
  source 1..9: note = Seed: VVGARGVGK (KRAS G12R)
VVGGRIVGG

SEQ ID NO: 44882 - protein, 9 aa, synthetic construct
  source 1..9: note = Seed: VVGARGVGK (KRAS G12R)
VVGGRIVGH

SEQ ID NO: 44883 - protein, 9 aa, synthetic construct
  source 1..9: note = Seed: VVGARGVGK (KRAS G12R)
VVGGRIVGI

SEQ ID NO: 44884 - protein, 9 aa, synthetic construct
  source 1..9: note = Seed: VVGARGVGK (KRAS G12R)
VVGGRIVGL

SEQ ID NO: 44885 - protein, 9 aa, synthetic construct
  source 1..9: note = Seed: VVGARGVGK (KRAS G12R)
VVGGRIVGM

SEQ ID NO: 44886 - protein, 9 aa, synthetic construct
  source 1..9: note = Seed: VVGARGVGK (KRAS G12R)
VVGGRIVGN

SEQ ID NO: 44887 - protein, 9 aa, synthetic construct
  source 1..9: note = Seed: VVGARGVGK (KRAS G12R)
VVGGRIVGP

SEQ ID NO: 44888 - protein, 9 aa, synthetic construct
  source 1..9: note = Seed: VVGARGVGK (KRAS G12R)
VVGGRIVGQ

SEQ ID NO: 44889 - protein, 9 aa, synthetic construct
  source 1..9: note = Seed: VVGARGVGK (KRAS G12R)
VVGGRIVGS

SEQ ID NO: 44890 - protein, 9 aa, synthetic construct
  source 1..9: note = Seed: VVGARGVGK (KRAS G12R)
VVGGRIVGT

SEQ ID NO: 44891 - protein, 9 aa, synthetic construct
  source 1..9: note = Seed: VVGARGVGK (KRAS G12R)
VVGGRIVGV

SEQ ID NO: 44892 - protein, 9 aa, synthetic construct
  source 1..9: note = Seed: VVGARGVGK (KRAS G12R)
VVGGRLVGA

SEQ ID NO: 44893 - protein, 9 aa, synthetic construct
  source 1..9: note = Seed: VVGARGVGK (KRAS G12R)
VVGGRLVGG

SEQ ID NO: 44894 - protein, 9 aa, synthetic construct
  source 1..9: note = Seed: VVGARGVGK (KRAS G12R)
VVGGRLVGI

SEQ ID NO: 44895 - protein, 9 aa, synthetic construct
  source 1..9: note = Seed: VVGARGVGK (KRAS G12R)
VVGGRLVGS

SEQ ID NO: 44896 - protein, 9 aa, synthetic construct
  source 1..9: note = Seed: VVGARGVGK (KRAS G12R)
VVGGRLVGT

SEQ ID NO: 44897 - protein, 9 aa, synthetic construct
  source 1..9: note = Seed: VVGARGVGK (KRAS G12R)
VVGGRLVGV

SEQ ID NO: 44898 - protein, 9 aa, synthetic construct
  source 1..9: note = Seed: VVGARGVGK (KRAS G12R)
VVGGRMVGA

SEQ ID NO: 44899 - protein, 9 aa, synthetic construct
  source 1..9: note = Seed: VVGARGVGK (KRAS G12R)
VVGGRMVGI

SEQ ID NO: 44900 - protein, 9 aa, synthetic construct
  source 1..9: note = Seed: VVGARGVGK (KRAS G12R)
VVGGRMVGS

SEQ ID NO: 44901 - protein, 9 aa, synthetic construct
  source 1..9: note = Seed: VVGARGVGK (KRAS G12R)
VVGGRMVGT

SEQ ID NO: 44902 - protein, 9 aa, synthetic construct
  source 1..9: note = Seed: VVGARGVGK (KRAS G12R)
VVGGRMVGV

SEQ ID NO: 44903 - protein, 9 aa, synthetic construct
  source 1..9: note = Seed: VVGARGVGK (KRAS G12R)
VVGGRPVGA

SEQ ID NO: 44904 - protein, 9 aa, synthetic construct
  source 1..9: note = Seed: VVGARGVGK (KRAS G12R)
VVGGRPVGC

SEQ ID NO: 44905 - protein, 9 aa, synthetic construct
  source 1..9: note = Seed: VVGARGVGK (KRAS G12R)
VVGGRPVGD

SEQ ID NO: 44906 - protein, 9 aa, synthetic construct
  source 1..9: note = Seed: VVGARGVGK (KRAS G12R)
VVGGRPVGE

SEQ ID NO: 44907 - protein, 9 aa, synthetic construct
  source 1..9: note = Seed: VVGARGVGK (KRAS G12R)
VVGGRPVGF

SEQ ID NO: 44908 - protein, 9 aa, synthetic construct
  source 1..9: note = Seed: VVGARGVGK (KRAS G12R)
VVGGRPVGG

SEQ ID NO: 44909 - protein, 9 aa, synthetic construct
  source 1..9: note = Seed: VVGARGVGK (KRAS G12R)
VVGGRPVGH

SEQ ID NO: 44910 - protein, 9 aa, synthetic construct
  source 1..9: note = Seed: VVGARGVGK (KRAS G12R)
VVGGRPVGI

SEQ ID NO: 44911 - protein, 9 aa, synthetic construct
  source 1..9: note = Seed: VVGARGVGK (KRAS G12R)
VVGGRPVGL

SEQ ID NO: 44912 - protein, 9 aa, synthetic construct
  source 1..9: note = Seed: VVGARGVGK (KRAS G12R)
VVGGRPVGM

SEQ ID NO: 44913 - protein, 9 aa, synthetic construct
  source 1..9: note = Seed: VVGARGVGK (KRAS G12R)
VVGGRPVGN

SEQ ID NO: 44914 - protein, 9 aa, synthetic construct
  source 1..9: note = Seed: VVGARGVGK (KRAS G12R)
VVGGRPVGP

SEQ ID NO: 44915 - protein, 9 aa, synthetic construct
  source 1..9: note = Seed: VVGARGVGK (KRAS G12R)
VVGGRPVGQ

SEQ ID NO: 44916 - protein, 9 aa, synthetic construct
  source 1..9: note = Seed: VVGARGVGK (KRAS G12R)
VVGGRPVGS

SEQ ID NO: 44917 - protein, 9 aa, synthetic construct
  source 1..9: note = Seed: VVGARGVGK (KRAS G12R)
VVGGRPVGT

SEQ ID NO: 44918 - protein, 9 aa, synthetic construct
  source 1..9: note = Seed: VVGARGVGK (KRAS G12R)
VVGGRPVGV

SEQ ID NO: 44919 - protein, 9 aa, synthetic construct
  source 1..9: note = Seed: VVGARGVGK (KRAS G12R)
VVGGRPVGW

SEQ ID NO: 44920 - protein, 9 aa, synthetic construct
  source 1..9: note = Seed: VVGARGVGK (KRAS G12R)
VVGGRPVGY

SEQ ID NO: 44921 - protein, 9 aa, synthetic construct
  source 1..9: note = Seed: VVGARGVGK (KRAS G12R)
VVGGRRVGR

SEQ ID NO: 44922 - protein, 9 aa, synthetic construct
  source 1..9: note = Seed: VVGARGVGK (KRAS G12R)
VVGGRSVGA

SEQ ID NO: 44923 - protein, 9 aa, synthetic construct
  source 1..9: note = Seed: VVGARGVGK (KRAS G12R)
VVGGRSVGG

SEQ ID NO: 44924 - protein, 9 aa, synthetic construct
  source 1..9: note = Seed: VVGARGVGK (KRAS G12R)
VVGGRSVGI

SEQ ID NO: 44925 - protein, 9 aa, synthetic construct
  source 1..9: note = Seed: VVGARGVGK (KRAS G12R)
VVGGRSVGL

SEQ ID NO: 44926 - protein, 9 aa, synthetic construct
  source 1..9: note = Seed: VVGARGVGK (KRAS G12R)
VVGGRSVGM

SEQ ID NO: 44927 - protein, 9 aa, synthetic construct
  source 1..9: note = Seed: VVGARGVGK (KRAS G12R)
VVGGRSVGN

SEQ ID NO: 44928 - protein, 9 aa, synthetic construct
  source 1..9: note = Seed: VVGARGVGK (KRAS G12R)
VVGGRSVGS

SEQ ID NO: 44929 - protein, 9 aa, synthetic construct
  source 1..9: note = Seed: VVGARGVGK (KRAS G12R)
VVGGRSVGT

SEQ ID NO: 44930 - protein, 9 aa, synthetic construct
  source 1..9: note = Seed: VVGARGVGK (KRAS G12R)
VVGGRSVGV

SEQ ID NO: 44931 - protein, 9 aa, synthetic construct
  source 1..9: note = Seed: VVGARGVGK (KRAS G12R)
VVGGRTVGA

SEQ ID NO: 44932 - protein, 9 aa, synthetic construct
  source 1..9: note = Seed: VVGARGVGK (KRAS G12R)
VVGGRTVGG

SEQ ID NO: 44933 - protein, 9 aa, synthetic construct
  source 1..9: note = Seed: VVGARGVGK (KRAS G12R)
VVGGRTVGI

SEQ ID NO: 44934 - protein, 9 aa, synthetic construct
  source 1..9: note = Seed: VVGARGVGK (KRAS G12R)
VVGGRTVGL

SEQ ID NO: 44935 - protein, 9 aa, synthetic construct
  source 1..9: note = Seed: VVGARGVGK (KRAS G12R)
VVGGRTVGM

SEQ ID NO: 44936 - protein, 9 aa, synthetic construct
  source 1..9: note = Seed: VVGARGVGK (KRAS G12R)
VVGGRTVGN

SEQ ID NO: 44937 - protein, 9 aa, synthetic construct
  source 1..9: note = Seed: VVGARGVGK (KRAS G12R)
VVGGRTVGS

SEQ ID NO: 44938 - protein, 9 aa, synthetic construct
  source 1..9: note = Seed: VVGARGVGK (KRAS G12R)
VVGGRTVGT

SEQ ID NO: 44939 - protein, 9 aa, synthetic construct
  source 1..9: note = Seed: VVGARGVGK (KRAS G12R)
VVGGRTVGV

SEQ ID NO: 44940 - protein, 9 aa, synthetic construct
  source 1..9: note = Seed: VVGARGVGK (KRAS G12R)
VVGGRVVGA

SEQ ID NO: 44941 - protein, 9 aa, synthetic construct
  source 1..9: note = Seed: VVGARGVGK (KRAS G12R)
VVGGRVVGC

SEQ ID NO: 44942 - protein, 9 aa, synthetic construct
  source 1..9: note = Seed: VVGARGVGK (KRAS G12R)
VVGGRVVGD

SEQ ID NO: 44943 - protein, 9 aa, synthetic construct
  source 1..9: note = Seed: VVGARGVGK (KRAS G12R)
VVGGRVVGE

SEQ ID NO: 44944 - protein, 9 aa, synthetic construct
  source 1..9: note = Seed: VVGARGVGK (KRAS G12R)
VVGGRVVGF

SEQ ID NO: 44945 - protein, 9 aa, synthetic construct
  source 1..9: note = Seed: VVGARGVGK (KRAS G12R)
VVGGRVVGG

SEQ ID NO: 44946 - protein, 9 aa, synthetic construct
  source 1..9: note = Seed: VVGARGVGK (KRAS G12R)
VVGGRVVGH

SEQ ID NO: 44947 - protein, 9 aa, synthetic construct
  source 1..9: note = Seed: VVGARGVGK (KRAS G12R)
VVGGRVVGI

SEQ ID NO: 44948 - protein, 9 aa, synthetic construct
  source 1..9: note = Seed: VVGARGVGK (KRAS G12R)
VVGGRVVGL

SEQ ID NO: 44949 - protein, 9 aa, synthetic construct
  source 1..9: note = Seed: VVGARGVGK (KRAS G12R)
VVGGRVVGM

SEQ ID NO: 44950 - protein, 9 aa, synthetic construct
  source 1..9: note = Seed: VVGARGVGK (KRAS G12R)
VVGGRVVGN

SEQ ID NO: 44951 - protein, 9 aa, synthetic construct
  source 1..9: note = Seed: VVGARGVGK (KRAS G12R)
VVGGRVVGP

SEQ ID NO: 44952 - protein, 9 aa, synthetic construct
  source 1..9: note = Seed: VVGARGVGK (KRAS G12R)
VVGGRVVGQ

SEQ ID NO: 44953 - protein, 9 aa, synthetic construct
  source 1..9: note = Seed: VVGARGVGK (KRAS G12R)
VVGGRVVGS

SEQ ID NO: 44954 - protein, 9 aa, synthetic construct
  source 1..9: note = Seed: VVGARGVGK (KRAS G12R)
VVGGRVVGT

SEQ ID NO: 44955 - protein, 9 aa, synthetic construct
  source 1..9: note = Seed: VVGARGVGK (KRAS G12R)
VVGGRVVGV

SEQ ID NO: 44956 - protein, 9 aa, synthetic construct
  source 1..9: note = Seed: VVGARGVGK (KRAS G12R)
VVGGRVVGY

SEQ ID NO: 44957 - protein, 9 aa, synthetic construct
  source 1..9: note = Seed: VVGARGVGK (KRAS G12R)
VVGHRAVGA

SEQ ID NO: 44958 - protein, 9 aa, synthetic construct
  source 1..9: note = Seed: VVGARGVGK (KRAS G12R)
VVGHRAVGF

SEQ ID NO: 44959 - protein, 9 aa, synthetic construct
  source 1..9: note = Seed: VVGARGVGK (KRAS G12R)
VVGHRAVGI

SEQ ID NO: 44960 - protein, 9 aa, synthetic construct
  source 1..9: note = Seed: VVGARGVGK (KRAS G12R)
VVGHRAVGK

SEQ ID NO: 44961 - protein, 9 aa, synthetic construct
  source 1..9: note = Seed: VVGARGVGK (KRAS G12R)
VVGHRAVGL

SEQ ID NO: 44962 - protein, 9 aa, synthetic construct
  source 1..9: note = Seed: VVGARGVGK (KRAS G12R)
VVGHRAVGM

SEQ ID NO: 44963 - protein, 9 aa, synthetic construct
  source 1..9: note = Seed: VVGARGVGK (KRAS G12R)
VVGHRAVGR

SEQ ID NO: 44964 - protein, 9 aa, synthetic construct
  source 1..9: note = Seed: VVGARGVGK (KRAS G12R)
VVGHRAVGV

SEQ ID NO: 44965 - protein, 9 aa, synthetic construct
  source 1..9: note = Seed: VVGARGVGK (KRAS G12R)
VVGHRAVGY

SEQ ID NO: 44966 - protein, 9 aa, synthetic construct
  source 1..9: note = Seed: VVGARGVGK (KRAS G12R)
VVGHRGVGR

SEQ ID NO: 44967 - protein, 9 aa, synthetic construct
  source 1..9: note = Seed: VVGARGVGK (KRAS G12R)
VVGHRHVGF

SEQ ID NO: 44968 - protein, 9 aa, synthetic construct
  source 1..9: note = Seed: VVGARGVGK (KRAS G12R)
VVGHRHVGR

SEQ ID NO: 44969 - protein, 9 aa, synthetic construct
  source 1..9: note = Seed: VVGARGVGK (KRAS G12R)
VVGHRHVGY

SEQ ID NO: 44970 - protein, 9 aa, synthetic construct
  source 1..9: note = Seed: VVGARGVGK (KRAS G12R)
VVGHRIVGK

SEQ ID NO: 44971 - protein, 9 aa, synthetic construct
  source 1..9: note = Seed: VVGARGVGK (KRAS G12R)
VVGHRIVGR

SEQ ID NO: 44972 - protein, 9 aa, synthetic construct
  source 1..9: note = Seed: VVGARGVGK (KRAS G12R)
VVGHRIVGY

SEQ ID NO: 44973 - protein, 9 aa, synthetic construct
  source 1..9: note = Seed: VVGARGVGK (KRAS G12R)
VVGHRKVGA

SEQ ID NO: 44974 - protein, 9 aa, synthetic construct
  source 1..9: note = Seed: VVGARGVGK (KRAS G12R)
VVGHRKVGF

SEQ ID NO: 44975 - protein, 9 aa, synthetic construct
  source 1..9: note = Seed: VVGARGVGK (KRAS G12R)
VVGHRKVGH

SEQ ID NO: 44976 - protein, 9 aa, synthetic construct
  source 1..9: note = Seed: VVGARGVGK (KRAS G12R)
VVGHRKVGI

SEQ ID NO: 44977 - protein, 9 aa, synthetic construct
  source 1..9: note = Seed: VVGARGVGK (KRAS G12R)
VVGHRKVGK

SEQ ID NO: 44978 - protein, 9 aa, synthetic construct
  source 1..9: note = Seed: VVGARGVGK (KRAS G12R)
VVGHRKVGL

SEQ ID NO: 44979 - protein, 9 aa, synthetic construct
  source 1..9: note = Seed: VVGARGVGK (KRAS G12R)
VVGHRKVGM

SEQ ID NO: 44980 - protein, 9 aa, synthetic construct
  source 1..9: note = Seed: VVGARGVGK (KRAS G12R)
VVGHRKVGQ

SEQ ID NO: 44981 - protein, 9 aa, synthetic construct
  source 1..9: note = Seed: VVGARGVGK (KRAS G12R)
VVGHRKVGR

SEQ ID NO: 44982 - protein, 9 aa, synthetic construct
  source 1..9: note = Seed: VVGARGVGK (KRAS G12R)
VVGHRKVGS

SEQ ID NO: 44983 - protein, 9 aa, synthetic construct
  source 1..9: note = Seed: VVGARGVGK (KRAS G12R)
VVGHRKVGV

SEQ ID NO: 44984 - protein, 9 aa, synthetic construct
  source 1..9: note = Seed: VVGARGVGK (KRAS G12R)
VVGHRKVGW

SEQ ID NO: 44985 - protein, 9 aa, synthetic construct
  source 1..9: note = Seed: VVGARGVGK (KRAS G12R)
VVGHRKVGY

SEQ ID NO: 44986 - protein, 9 aa, synthetic construct
  source 1..9: note = Seed: VVGARGVGK (KRAS G12R)
VVGHRLVGK

SEQ ID NO: 44987 - protein, 9 aa, synthetic construct
  source 1..9: note = Seed: VVGARGVGK (KRAS G12R)
VVGHRLVGR

SEQ ID NO: 44988 - protein, 9 aa, synthetic construct
  source 1..9: note = Seed: VVGARGVGK (KRAS G12R)
VVGHRMVGK

SEQ ID NO: 44989 - protein, 9 aa, synthetic construct
  source 1..9: note = Seed: VVGARGVGK (KRAS G12R)
VVGHRMVGR

SEQ ID NO: 44990 - protein, 9 aa, synthetic construct
  source 1..9: note = Seed: VVGARGVGK (KRAS G12R)
VVGHRNVGK

SEQ ID NO: 44991 - protein, 9 aa, synthetic construct
  source 1..9: note = Seed: VVGARGVGK (KRAS G12R)
VVGHRNVGR

SEQ ID NO: 44992 - protein, 9 aa, synthetic construct
  source 1..9: note = Seed: VVGARGVGK (KRAS G12R)
VVGHRNVGY

SEQ ID NO: 44993 - protein, 9 aa, synthetic construct
  source 1..9: note = Seed: VVGARGVGK (KRAS G12R)
VVGHRPVGK

SEQ ID NO: 44994 - protein, 9 aa, synthetic construct
  source 1..9: note = Seed: VVGARGVGK (KRAS G12R)
VVGHRPVGR

SEQ ID NO: 44995 - protein, 9 aa, synthetic construct
  source 1..9: note = Seed: VVGARGVGK (KRAS G12R)
VVGHRPVGY

SEQ ID NO: 44996 - protein, 9 aa, synthetic construct
  source 1..9: note = Seed: VVGARGVGK (KRAS G12R)
VVGHRQVGR

SEQ ID NO: 44997 - protein, 9 aa, synthetic construct
  source 1..9: note = Seed: VVGARGVGK (KRAS G12R)
VVGHRRVGA

SEQ ID NO: 44998 - protein, 9 aa, synthetic construct
  source 1..9: note = Seed: VVGARGVGK (KRAS G12R)
VVGHRRVGF

SEQ ID NO: 44999 - protein, 9 aa, synthetic construct
  source 1..9: note = Seed: VVGARGVGK (KRAS G12R)
VVGHRRVGG

SEQ ID NO: 45000 - protein, 9 aa, synthetic construct
  source 1..9: note = Seed: VVGARGVGK (KRAS G12R)
VVGHRRVGH

SEQ ID NO: 45001 - protein, 9 aa, synthetic construct
  source 1..9: note = Seed: VVGARGVGK (KRAS G12R)
VVGHRRVGI

SEQ ID NO: 45002 - protein, 9 aa, synthetic construct
  source 1..9: note = Seed: VVGARGVGK (KRAS G12R)
VVGHRRVGK

SEQ ID NO: 45003 - protein, 9 aa, synthetic construct
  source 1..9: note = Seed: VVGARGVGK (KRAS G12R)
VVGHRRVGL

SEQ ID NO: 45004 - protein, 9 aa, synthetic construct
  source 1..9: note = Seed: VVGARGVGK (KRAS G12R)
VVGHRRVGM

SEQ ID NO: 45005 - protein, 9 aa, synthetic construct
  source 1..9: note = Seed: VVGARGVGK (KRAS G12R)
VVGHRRVGQ

SEQ ID NO: 45006 - protein, 9 aa, synthetic construct
  source 1..9: note = Seed: VVGARGVGK (KRAS G12R)
VVGHRRVGR

SEQ ID NO: 45007 - protein, 9 aa, synthetic construct
  source 1..9: note = Seed: VVGARGVGK (KRAS G12R)
VVGHRRVGS

SEQ ID NO: 45008 - protein, 9 aa, synthetic construct
  source 1..9: note = Seed: VVGARGVGK (KRAS G12R)
VVGHRRVGT

SEQ ID NO: 45009 - protein, 9 aa, synthetic construct
  source 1..9: note = Seed: VVGARGVGK (KRAS G12R)
VVGHRRVGV

SEQ ID NO: 45010 - protein, 9 aa, synthetic construct
  source 1..9: note = Seed: VVGARGVGK (KRAS G12R)
VVGHRRVGW

SEQ ID NO: 45011 - protein, 9 aa, synthetic construct
  source 1..9: note = Seed: VVGARGVGK (KRAS G12R)
VVGHRRVGY

SEQ ID NO: 45012 - protein, 9 aa, synthetic construct
  source 1..9: note = Seed: VVGARGVGK (KRAS G12R)
VVGHRSVGI

SEQ ID NO: 45013 - protein, 9 aa, synthetic construct
  source 1..9: note = Seed: VVGARGVGK (KRAS G12R)
VVGHRSVGK

SEQ ID NO: 45014 - protein, 9 aa, synthetic construct
  source 1..9: note = Seed: VVGARGVGK (KRAS G12R)
VVGHRSVGL

SEQ ID NO: 45015 - protein, 9 aa, synthetic construct
  source 1..9: note = Seed: VVGARGVGK (KRAS G12R)
VVGHRSVGR

SEQ ID NO: 45016 - protein, 9 aa, synthetic construct
  source 1..9: note = Seed: VVGARGVGK (KRAS G12R)
VVGHRSVGV

SEQ ID NO: 45017 - protein, 9 aa, synthetic construct
  source 1..9: note = Seed: VVGARGVGK (KRAS G12R)
VVGHRSVGY

SEQ ID NO: 45018 - protein, 9 aa, synthetic construct
  source 1..9: note = Seed: VVGARGVGK (KRAS G12R)
VVGHRTVGK

SEQ ID NO: 45019 - protein, 9 aa, synthetic construct
  source 1..9: note = Seed: VVGARGVGK (KRAS G12R)
VVGHRTVGR

SEQ ID NO: 45020 - protein, 9 aa, synthetic construct
  source 1..9: note = Seed: VVGARGVGK (KRAS G12R)
VVGHRTVGY

SEQ ID NO: 45021 - protein, 9 aa, synthetic construct
  source 1..9: note = Seed: VVGARGVGK (KRAS G12R)
VVGHRVVGK

SEQ ID NO: 45022 - protein, 9 aa, synthetic construct
  source 1..9: note = Seed: VVGARGVGK (KRAS G12R)
VVGHRVVGR

SEQ ID NO: 45023 - protein, 9 aa, synthetic construct
  source 1..9: note = Seed: VVGARGVGK (KRAS G12R)
VVGHRVVGY

SEQ ID NO: 45024 - protein, 9 aa, synthetic construct
  source 1..9: note = Seed: VVGARGVGK (KRAS G12R)
VVGIRAVGA

SEQ ID NO: 45025 - protein, 9 aa, synthetic construct
  source 1..9: note = Seed: VVGARGVGK (KRAS G12R)
VVGIRAVGC

SEQ ID NO: 45026 - protein, 9 aa, synthetic construct
  source 1..9: note = Seed: VVGARGVGK (KRAS G12R)
VVGIRAVGF

SEQ ID NO: 45027 - protein, 9 aa, synthetic construct
  source 1..9: note = Seed: VVGARGVGK (KRAS G12R)
VVGIRAVGI

SEQ ID NO: 45028 - protein, 9 aa, synthetic construct
  source 1..9: note = Seed: VVGARGVGK (KRAS G12R)
VVGIRAVGL

SEQ ID NO: 45029 - protein, 9 aa, synthetic construct
  source 1..9: note = Seed: VVGARGVGK (KRAS G12R)
VVGIRAVGM

SEQ ID NO: 45030 - protein, 9 aa, synthetic construct
  source 1..9: note = Seed: VVGARGVGK (KRAS G12R)
VVGIRAVGN

SEQ ID NO: 45031 - protein, 9 aa, synthetic construct
  source 1..9: note = Seed: VVGARGVGK (KRAS G12R)
VVGIRAVGR

SEQ ID NO: 45032 - protein, 9 aa, synthetic construct
  source 1..9: note = Seed: VVGARGVGK (KRAS G12R)
VVGIRAVGS

SEQ ID NO: 45033 - protein, 9 aa, synthetic construct
  source 1..9: note = Seed: VVGARGVGK (KRAS G12R)
VVGIRAVGT

SEQ ID NO: 45034 - protein, 9 aa, synthetic construct
  source 1..9: note = Seed: VVGARGVGK (KRAS G12R)
VVGIRAVGV

SEQ ID NO: 45035 - protein, 9 aa, synthetic construct
  source 1..9: note = Seed: VVGARGVGK (KRAS G12R)
VVGIRAVGY

SEQ ID NO: 45036 - protein, 9 aa, synthetic construct
  source 1..9: note = Seed: VVGARGVGK (KRAS G12R)
VVGIRGVGA

SEQ ID NO: 45037 - protein, 9 aa, synthetic construct
  source 1..9: note = Seed: VVGARGVGK (KRAS G12R)
VVGIRGVGI

SEQ ID NO: 45038 - protein, 9 aa, synthetic construct
  source 1..9: note = Seed: VVGARGVGK (KRAS G12R)
VVGIRGVGL

SEQ ID NO: 45039 - protein, 9 aa, synthetic construct
  source 1..9: note = Seed: VVGARGVGK (KRAS G12R)
VVGIRGVGM

SEQ ID NO: 45040 - protein, 9 aa, synthetic construct
  source 1..9: note = Seed: VVGARGVGK (KRAS G12R)
VVGIRGVGS

SEQ ID NO: 45041 - protein, 9 aa, synthetic construct
  source 1..9: note = Seed: VVGARGVGK (KRAS G12R)
VVGIRGVGT

SEQ ID NO: 45042 - protein, 9 aa, synthetic construct
  source 1..9: note = Seed: VVGARGVGK (KRAS G12R)
VVGIRGVGV

SEQ ID NO: 45043 - protein, 9 aa, synthetic construct
  source 1..9: note = Seed: VVGARGVGK (KRAS G12R)
VVGIRHVGY

SEQ ID NO: 45044 - protein, 9 aa, synthetic construct
  source 1..9: note = Seed: VVGARGVGK (KRAS G12R)
VVGIRKVGA

SEQ ID NO: 45045 - protein, 9 aa, synthetic construct
  source 1..9: note = Seed: VVGARGVGK (KRAS G12R)
VVGIRKVGF

SEQ ID NO: 45046 - protein, 9 aa, synthetic construct
  source 1..9: note = Seed: VVGARGVGK (KRAS G12R)
VVGIRKVGG

SEQ ID NO: 45047 - protein, 9 aa, synthetic construct
  source 1..9: note = Seed: VVGARGVGK (KRAS G12R)
VVGIRKVGH

SEQ ID NO: 45048 - protein, 9 aa, synthetic construct
  source 1..9: note = Seed: VVGARGVGK (KRAS G12R)
VVGIRKVGI

SEQ ID NO: 45049 - protein, 9 aa, synthetic construct
  source 1..9: note = Seed: VVGARGVGK (KRAS G12R)
VVGIRKVGL

SEQ ID NO: 45050 - protein, 9 aa, synthetic construct
  source 1..9: note = Seed: VVGARGVGK (KRAS G12R)
VVGIRKVGM

SEQ ID NO: 45051 - protein, 9 aa, synthetic construct
  source 1..9: note = Seed: VVGARGVGK (KRAS G12R)
VVGIRKVGP

SEQ ID NO: 45052 - protein, 9 aa, synthetic construct
  source 1..9: note = Seed: VVGARGVGK (KRAS G12R)
VVGIRKVGQ

SEQ ID NO: 45053 - protein, 9 aa, synthetic construct
  source 1..9: note = Seed: VVGARGVGK (KRAS G12R)
VVGIRKVGR

SEQ ID NO: 45054 - protein, 9 aa, synthetic construct
  source 1..9: note = Seed: VVGARGVGK (KRAS G12R)
VVGIRKVGS

SEQ ID NO: 45055 - protein, 9 aa, synthetic construct
  source 1..9: note = Seed: VVGARGVGK (KRAS G12R)
VVGIRKVGT

SEQ ID NO: 45056 - protein, 9 aa, synthetic construct
  source 1..9: note = Seed: VVGARGVGK (KRAS G12R)
VVGIRKVGV

SEQ ID NO: 45057 - protein, 9 aa, synthetic construct
  source 1..9: note = Seed: VVGARGVGK (KRAS G12R)
VVGIRKVGW

SEQ ID NO: 45058 - protein, 9 aa, synthetic construct
  source 1..9: note = Seed: VVGARGVGK (KRAS G12R)
VVGIRKVGY

SEQ ID NO: 45059 - protein, 9 aa, synthetic construct
  source 1..9: note = Seed: VVGARGVGK (KRAS G12R)
VVGIRNVGI

SEQ ID NO: 45060 - protein, 9 aa, synthetic construct
  source 1..9: note = Seed: VVGARGVGK (KRAS G12R)
VVGIRNVGL

SEQ ID NO: 45061 - protein, 9 aa, synthetic construct
  source 1..9: note = Seed: VVGARGVGK (KRAS G12R)
VVGIRNVGM

SEQ ID NO: 45062 - protein, 9 aa, synthetic construct
  source 1..9: note = Seed: VVGARGVGK (KRAS G12R)
VVGIRNVGV

SEQ ID NO: 45063 - protein, 9 aa, synthetic construct
  source 1..9: note = Seed: VVGARGVGK (KRAS G12R)
VVGIRPVGA

SEQ ID NO: 45064 - protein, 9 aa, synthetic construct
  source 1..9: note = Seed: VVGARGVGK (KRAS G12R)
VVGIRPVGI

SEQ ID NO: 45065 - protein, 9 aa, synthetic construct
  source 1..9: note = Seed: VVGARGVGK (KRAS G12R)
VVGIRPVGL

SEQ ID NO: 45066 - protein, 9 aa, synthetic construct
  source 1..9: note = Seed: VVGARGVGK (KRAS G12R)
VVGIRPVGM

SEQ ID NO: 45067 - protein, 9 aa, synthetic construct
  source 1..9: note = Seed: VVGARGVGK (KRAS G12R)
VVGIRPVGN

SEQ ID NO: 45068 - protein, 9 aa, synthetic construct
  source 1..9: note = Seed: VVGARGVGK (KRAS G12R)
VVGIRPVGS

SEQ ID NO: 45069 - protein, 9 aa, synthetic construct
  source 1..9: note = Seed: VVGARGVGK (KRAS G12R)
VVGIRPVGT

SEQ ID NO: 45070 - protein, 9 aa, synthetic construct
  source 1..9: note = Seed: VVGARGVGK (KRAS G12R)
VVGIRPVGV

SEQ ID NO: 45071 - protein, 9 aa, synthetic construct
  source 1..9: note = Seed: VVGARGVGK (KRAS G12R)
VVGIRPVGY

SEQ ID NO: 45072 - protein, 9 aa, synthetic construct
  source 1..9: note = Seed: VVGARGVGK (KRAS G12R)
VVGIRRVGA

SEQ ID NO: 45073 - protein, 9 aa, synthetic construct
  source 1..9: note = Seed: VVGARGVGK (KRAS G12R)
VVGIRRVGF

SEQ ID NO: 45074 - protein, 9 aa, synthetic construct
  source 1..9: note = Seed: VVGARGVGK (KRAS G12R)
VVGIRRVGG

SEQ ID NO: 45075 - protein, 9 aa, synthetic construct
  source 1..9: note = Seed: VVGARGVGK (KRAS G12R)
VVGIRRVGI

SEQ ID NO: 45076 - protein, 9 aa, synthetic construct
  source 1..9: note = Seed: VVGARGVGK (KRAS G12R)
VVGIRRVGK

SEQ ID NO: 45077 - protein, 9 aa, synthetic construct
  source 1..9: note = Seed: VVGARGVGK (KRAS G12R)
VVGIRRVGL

SEQ ID NO: 45078 - protein, 9 aa, synthetic construct
  source 1..9: note = Seed: VVGARGVGK (KRAS G12R)
VVGIRRVGM

SEQ ID NO: 45079 - protein, 9 aa, synthetic construct
  source 1..9: note = Seed: VVGARGVGK (KRAS G12R)
VVGIRRVGP

SEQ ID NO: 45080 - protein, 9 aa, synthetic construct
  source 1..9: note = Seed: VVGARGVGK (KRAS G12R)
VVGIRRVGQ

SEQ ID NO: 45081 - protein, 9 aa, synthetic construct
  source 1..9: note = Seed: VVGARGVGK (KRAS G12R)
VVGIRRVGR

SEQ ID NO: 45082 - protein, 9 aa, synthetic construct
  source 1..9: note = Seed: VVGARGVGK (KRAS G12R)
VVGIRRVGS

SEQ ID NO: 45083 - protein, 9 aa, synthetic construct
  source 1..9: note = Seed: VVGARGVGK (KRAS G12R)
VVGIRRVGT

SEQ ID NO: 45084 - protein, 9 aa, synthetic construct
  source 1..9: note = Seed: VVGARGVGK (KRAS G12R)
VVGIRRVGV

SEQ ID NO: 45085 - protein, 9 aa, synthetic construct
  source 1..9: note = Seed: VVGARGVGK (KRAS G12R)
VVGIRRVGW

SEQ ID NO: 45086 - protein, 9 aa, synthetic construct
  source 1..9: note = Seed: VVGARGVGK (KRAS G12R)
VVGIRRVGY

SEQ ID NO: 45087 - protein, 9 aa, synthetic construct
  source 1..9: note = Seed: VVGARGVGK (KRAS G12R)
VVGIRSVGA

SEQ ID NO: 45088 - protein, 9 aa, synthetic construct
  source 1..9: note = Seed: VVGARGVGK (KRAS G12R)
VVGIRSVGI

SEQ ID NO: 45089 - protein, 9 aa, synthetic construct
  source 1..9: note = Seed: VVGARGVGK (KRAS G12R)
VVGIRSVGL

SEQ ID NO: 45090 - protein, 9 aa, synthetic construct
  source 1..9: note = Seed: VVGARGVGK (KRAS G12R)
VVGIRSVGM

SEQ ID NO: 45091 - protein, 9 aa, synthetic construct
  source 1..9: note = Seed: VVGARGVGK (KRAS G12R)
VVGIRSVGN

SEQ ID NO: 45092 - protein, 9 aa, synthetic construct
  source 1..9: note = Seed: VVGARGVGK (KRAS G12R)
VVGIRSVGS

SEQ ID NO: 45093 - protein, 9 aa, synthetic construct
  source 1..9: note = Seed: VVGARGVGK (KRAS G12R)
VVGIRSVGV

SEQ ID NO: 45094 - protein, 9 aa, synthetic construct
  source 1..9: note = Seed: VVGARGVGK (KRAS G12R)
VVGIRSVGY

SEQ ID NO: 45095 - protein, 9 aa, synthetic construct
  source 1..9: note = Seed: VVGARGVGK (KRAS G12R)
VVGIRTVGA

SEQ ID NO: 45096 - protein, 9 aa, synthetic construct
  source 1..9: note = Seed: VVGARGVGK (KRAS G12R)
VVGIRTVGI

SEQ ID NO: 45097 - protein, 9 aa, synthetic construct
  source 1..9: note = Seed: VVGARGVGK (KRAS G12R)
VVGIRTVGL

SEQ ID NO: 45098 - protein, 9 aa, synthetic construct
  source 1..9: note = Seed: VVGARGVGK (KRAS G12R)
VVGIRTVGM

SEQ ID NO: 45099 - protein, 9 aa, synthetic construct
  source 1..9: note = Seed: VVGARGVGK (KRAS G12R)
VVGIRTVGN

SEQ ID NO: 45100 - protein, 9 aa, synthetic construct
  source 1..9: note = Seed: VVGARGVGK (KRAS G12R)
VVGIRTVGS

SEQ ID NO: 45101 - protein, 9 aa, synthetic construct
  source 1..9: note = Seed: VVGARGVGK (KRAS G12R)
VVGIRTVGV

SEQ ID NO: 45102 - protein, 9 aa, synthetic construct
  source 1..9: note = Seed: VVGARGVGK (KRAS G12R)
VVGIRVVGN

SEQ ID NO: 45103 - protein, 9 aa, synthetic construct
  source 1..9: note = Seed: VVGARGVGK (KRAS G12R)
VVGIRVVGS

SEQ ID NO: 45104 - protein, 9 aa, synthetic construct
  source 1..9: note = Seed: VVGARGVGK (KRAS G12R)
VVGKRAVGF

SEQ ID NO: 45105 - protein, 9 aa, synthetic construct
  source 1..9: note = Seed: VVGARGVGK (KRAS G12R)
VVGKRAVGR

SEQ ID NO: 45106 - protein, 9 aa, synthetic construct
  source 1..9: note = Seed: VVGARGVGK (KRAS G12R)
VVGKRAVGY

SEQ ID NO: 45107 - protein, 9 aa, synthetic construct
  source 1..9: note = Seed: VVGARGVGK (KRAS G12R)
VVGKRHVGR

SEQ ID NO: 45108 - protein, 9 aa, synthetic construct
  source 1..9: note = Seed: VVGARGVGK (KRAS G12R)
VVGKRHVGY

SEQ ID NO: 45109 - protein, 9 aa, synthetic construct
  source 1..9: note = Seed: VVGARGVGK (KRAS G12R)
VVGKRIVGR

SEQ ID NO: 45110 - protein, 9 aa, synthetic construct
  source 1..9: note = Seed: VVGARGVGK (KRAS G12R)
VVGKRKVGA

SEQ ID NO: 45111 - protein, 9 aa, synthetic construct
  source 1..9: note = Seed: VVGARGVGK (KRAS G12R)
VVGKRKVGF

SEQ ID NO: 45112 - protein, 9 aa, synthetic construct
  source 1..9: note = Seed: VVGARGVGK (KRAS G12R)
VVGKRKVGH

SEQ ID NO: 45113 - protein, 9 aa, synthetic construct
  source 1..9: note = Seed: VVGARGVGK (KRAS G12R)
VVGKRKVGI

SEQ ID NO: 45114 - protein, 9 aa, synthetic construct
  source 1..9: note = Seed: VVGARGVGK (KRAS G12R)
VVGKRKVGK

SEQ ID NO: 45115 - protein, 9 aa, synthetic construct
  source 1..9: note = Seed: VVGARGVGK (KRAS G12R)
VVGKRKVGL

SEQ ID NO: 45116 - protein, 9 aa, synthetic construct
  source 1..9: note = Seed: VVGARGVGK (KRAS G12R)
VVGKRKVGM

SEQ ID NO: 45117 - protein, 9 aa, synthetic construct
  source 1..9: note = Seed: VVGARGVGK (KRAS G12R)
VVGKRKVGQ

SEQ ID NO: 45118 - protein, 9 aa, synthetic construct
  source 1..9: note = Seed: VVGARGVGK (KRAS G12R)
VVGKRKVGR

SEQ ID NO: 45119 - protein, 9 aa, synthetic construct
  source 1..9: note = Seed: VVGARGVGK (KRAS G12R)
VVGKRKVGS

SEQ ID NO: 45120 - protein, 9 aa, synthetic construct
  source 1..9: note = Seed: VVGARGVGK (KRAS G12R)
VVGKRKVGT

SEQ ID NO: 45121 - protein, 9 aa, synthetic construct
  source 1..9: note = Seed: VVGARGVGK (KRAS G12R)
VVGKRKVGV

SEQ ID NO: 45122 - protein, 9 aa, synthetic construct
  source 1..9: note = Seed: VVGARGVGK (KRAS G12R)
VVGKRKVGW

SEQ ID NO: 45123 - protein, 9 aa, synthetic construct
  source 1..9: note = Seed: VVGARGVGK (KRAS G12R)
VVGKRKVGY

SEQ ID NO: 45124 - protein, 9 aa, synthetic construct
  source 1..9: note = Seed: VVGARGVGK (KRAS G12R)
VVGKRMVGR

SEQ ID NO: 45125 - protein, 9 aa, synthetic construct
  source 1..9: note = Seed: VVGARGVGK (KRAS G12R)
VVGKRNVGF

SEQ ID NO: 45126 - protein, 9 aa, synthetic construct
  source 1..9: note = Seed: VVGARGVGK (KRAS G12R)
VVGKRNVGR

SEQ ID NO: 45127 - protein, 9 aa, synthetic construct
  source 1..9: note = Seed: VVGARGVGK (KRAS G12R)
VVGKRNVGY

SEQ ID NO: 45128 - protein, 9 aa, synthetic construct
  source 1..9: note = Seed: VVGARGVGK (KRAS G12R)
VVGKRPVGF

SEQ ID NO: 45129 - protein, 9 aa, synthetic construct
  source 1..9: note = Seed: VVGARGVGK (KRAS G12R)
VVGKRPVGR

SEQ ID NO: 45130 - protein, 9 aa, synthetic construct
  source 1..9: note = Seed: VVGARGVGK (KRAS G12R)
VVGKRPVGY

SEQ ID NO: 45131 - protein, 9 aa, synthetic construct
  source 1..9: note = Seed: VVGARGVGK (KRAS G12R)
VVGKRQVGR

SEQ ID NO: 45132 - protein, 9 aa, synthetic construct
  source 1..9: note = Seed: VVGARGVGK (KRAS G12R)
VVGKRRVGA

SEQ ID NO: 45133 - protein, 9 aa, synthetic construct
  source 1..9: note = Seed: VVGARGVGK (KRAS G12R)
VVGKRRVGD

SEQ ID NO: 45134 - protein, 9 aa, synthetic construct
  source 1..9: note = Seed: VVGARGVGK (KRAS G12R)
VVGKRRVGE

SEQ ID NO: 45135 - protein, 9 aa, synthetic construct
  source 1..9: note = Seed: VVGARGVGK (KRAS G12R)
VVGKRRVGF

SEQ ID NO: 45136 - protein, 9 aa, synthetic construct
  source 1..9: note = Seed: VVGARGVGK (KRAS G12R)
VVGKRRVGG

SEQ ID NO: 45137 - protein, 9 aa, synthetic construct
  source 1..9: note = Seed: VVGARGVGK (KRAS G12R)
VVGKRRVGH

SEQ ID NO: 45138 - protein, 9 aa, synthetic construct
  source 1..9: note = Seed: VVGARGVGK (KRAS G12R)
VVGKRRVGI

SEQ ID NO: 45139 - protein, 9 aa, synthetic construct
  source 1..9: note = Seed: VVGARGVGK (KRAS G12R)
VVGKRRVGK

SEQ ID NO: 45140 - protein, 9 aa, synthetic construct
  source 1..9: note = Seed: VVGARGVGK (KRAS G12R)
VVGKRRVGL

SEQ ID NO: 45141 - protein, 9 aa, synthetic construct
  source 1..9: note = Seed: VVGARGVGK (KRAS G12R)
VVGKRRVGM

SEQ ID NO: 45142 - protein, 9 aa, synthetic construct
  source 1..9: note = Seed: VVGARGVGK (KRAS G12R)
VVGKRRVGN

SEQ ID NO: 45143 - protein, 9 aa, synthetic construct
  source 1..9: note = Seed: VVGARGVGK (KRAS G12R)
VVGKRRVGQ

SEQ ID NO: 45144 - protein, 9 aa, synthetic construct
  source 1..9: note = Seed: VVGARGVGK (KRAS G12R)
VVGKRRVGR

SEQ ID NO: 45145 - protein, 9 aa, synthetic construct
  source 1..9: note = Seed: VVGARGVGK (KRAS G12R)
VVGKRRVGS

SEQ ID NO: 45146 - protein, 9 aa, synthetic construct
  source 1..9: note = Seed: VVGARGVGK (KRAS G12R)
VVGKRRVGT

SEQ ID NO: 45147 - protein, 9 aa, synthetic construct
  source 1..9: note = Seed: VVGARGVGK (KRAS G12R)
VVGKRRVGV

SEQ ID NO: 45148 - protein, 9 aa, synthetic construct
  source 1..9: note = Seed: VVGARGVGK (KRAS G12R)
VVGKRRVGW

SEQ ID NO: 45149 - protein, 9 aa, synthetic construct
  source 1..9: note = Seed: VVGARGVGK (KRAS G12R)
VVGKRRVGY

SEQ ID NO: 45150 - protein, 9 aa, synthetic construct
  source 1..9: note = Seed: VVGARGVGK (KRAS G12R)
VVGKRSVGF

SEQ ID NO: 45151 - protein, 9 aa, synthetic construct
  source 1..9: note = Seed: VVGARGVGK (KRAS G12R)
VVGKRSVGR

SEQ ID NO: 45152 - protein, 9 aa, synthetic construct
  source 1..9: note = Seed: VVGARGVGK (KRAS G12R)
VVGKRSVGY

SEQ ID NO: 45153 - protein, 9 aa, synthetic construct
  source 1..9: note = Seed: VVGARGVGK (KRAS G12R)
VVGKRTVGR

SEQ ID NO: 45154 - protein, 9 aa, synthetic construct
  source 1..9: note = Seed: VVGARGVGK (KRAS G12R)
VVGKRTVGY

SEQ ID NO: 45155 - protein, 9 aa, synthetic construct
  source 1..9: note = Seed: VVGARGVGK (KRAS G12R)
VVGKRVVGK

SEQ ID NO: 45156 - protein, 9 aa, synthetic construct
  source 1..9: note = Seed: VVGARGVGK (KRAS G12R)
VVGKRVVGR

SEQ ID NO: 45157 - protein, 9 aa, synthetic construct
  source 1..9: note = Seed: VVGARGVGK (KRAS G12R)
VVGKRVVGY

SEQ ID NO: 45158 - protein, 9 aa, synthetic construct
  source 1..9: note = Seed: VVGARGVGK (KRAS G12R)
VVGLRAVGA

SEQ ID NO: 45159 - protein, 9 aa, synthetic construct
  source 1..9: note = Seed: VVGARGVGK (KRAS G12R)
VVGLRAVGC

SEQ ID NO: 45160 - protein, 9 aa, synthetic construct
  source 1..9: note = Seed: VVGARGVGK (KRAS G12R)
VVGLRAVGF

SEQ ID NO: 45161 - protein, 9 aa, synthetic construct
  source 1..9: note = Seed: VVGARGVGK (KRAS G12R)
VVGLRAVGG

SEQ ID NO: 45162 - protein, 9 aa, synthetic construct
  source 1..9: note = Seed: VVGARGVGK (KRAS G12R)
VVGLRAVGH

SEQ ID NO: 45163 - protein, 9 aa, synthetic construct
  source 1..9: note = Seed: VVGARGVGK (KRAS G12R)
VVGLRAVGI

SEQ ID NO: 45164 - protein, 9 aa, synthetic construct
  source 1..9: note = Seed: VVGARGVGK (KRAS G12R)
VVGLRAVGK

SEQ ID NO: 45165 - protein, 9 aa, synthetic construct
  source 1..9: note = Seed: VVGARGVGK (KRAS G12R)
VVGLRAVGL

SEQ ID NO: 45166 - protein, 9 aa, synthetic construct
  source 1..9: note = Seed: VVGARGVGK (KRAS G12R)
VVGLRAVGM

SEQ ID NO: 45167 - protein, 9 aa, synthetic construct
  source 1..9: note = Seed: VVGARGVGK (KRAS G12R)
VVGLRAVGN

SEQ ID NO: 45168 - protein, 9 aa, synthetic construct
  source 1..9: note = Seed: VVGARGVGK (KRAS G12R)
VVGLRAVGQ

SEQ ID NO: 45169 - protein, 9 aa, synthetic construct
  source 1..9: note = Seed: VVGARGVGK (KRAS G12R)
VVGLRAVGR

SEQ ID NO: 45170 - protein, 9 aa, synthetic construct
  source 1..9: note = Seed: VVGARGVGK (KRAS G12R)
VVGLRAVGS

SEQ ID NO: 45171 - protein, 9 aa, synthetic construct
  source 1..9: note = Seed: VVGARGVGK (KRAS G12R)
VVGLRAVGT

SEQ ID NO: 45172 - protein, 9 aa, synthetic construct
  source 1..9: note = Seed: VVGARGVGK (KRAS G12R)
VVGLRAVGV

SEQ ID NO: 45173 - protein, 9 aa, synthetic construct
  source 1..9: note = Seed: VVGARGVGK (KRAS G12R)
VVGLRAVGY

SEQ ID NO: 45174 - protein, 9 aa, synthetic construct
  source 1..9: note = Seed: VVGARGVGK (KRAS G12R)
VVGLRGVGA

SEQ ID NO: 45175 - protein, 9 aa, synthetic construct
  source 1..9: note = Seed: VVGARGVGK (KRAS G12R)
VVGLRGVGC

SEQ ID NO: 45176 - protein, 9 aa, synthetic construct
  source 1..9: note = Seed: VVGARGVGK (KRAS G12R)
VVGLRGVGF

SEQ ID NO: 45177 - protein, 9 aa, synthetic construct
  source 1..9: note = Seed: VVGARGVGK (KRAS G12R)
VVGLRGVGG

SEQ ID NO: 45178 - protein, 9 aa, synthetic construct
  source 1..9: note = Seed: VVGARGVGK (KRAS G12R)
VVGLRGVGH

SEQ ID NO: 45179 - protein, 9 aa, synthetic construct
  source 1..9: note = Seed: VVGARGVGK (KRAS G12R)
VVGLRGVGI

SEQ ID NO: 45180 - protein, 9 aa, synthetic construct
  source 1..9: note = Seed: VVGARGVGK (KRAS G12R)
VVGLRGVGL

SEQ ID NO: 45181 - protein, 9 aa, synthetic construct
  source 1..9: note = Seed: VVGARGVGK (KRAS G12R)
VVGLRGVGM

SEQ ID NO: 45182 - protein, 9 aa, synthetic construct
  source 1..9: note = Seed: VVGARGVGK (KRAS G12R)
VVGLRGVGN

SEQ ID NO: 45183 - protein, 9 aa, synthetic construct
  source 1..9: note = Seed: VVGARGVGK (KRAS G12R)
VVGLRGVGP

SEQ ID NO: 45184 - protein, 9 aa, synthetic construct
  source 1..9: note = Seed: VVGARGVGK (KRAS G12R)
VVGLRGVGR

SEQ ID NO: 45185 - protein, 9 aa, synthetic construct
  source 1..9: note = Seed: VVGARGVGK (KRAS G12R)
VVGLRGVGS

SEQ ID NO: 45186 - protein, 9 aa, synthetic construct
  source 1..9: note = Seed: VVGARGVGK (KRAS G12R)
VVGLRGVGT

SEQ ID NO: 45187 - protein, 9 aa, synthetic construct
  source 1..9: note = Seed: VVGARGVGK (KRAS G12R)
VVGLRGVGV

SEQ ID NO: 45188 - protein, 9 aa, synthetic construct
  source 1..9: note = Seed: VVGARGVGK (KRAS G12R)
VVGLRGVGY

SEQ ID NO: 45189 - protein, 9 aa, synthetic construct
  source 1..9: note = Seed: VVGARGVGK (KRAS G12R)
VVGLRHVGI

SEQ ID NO: 45190 - protein, 9 aa, synthetic construct
  source 1..9: note = Seed: VVGARGVGK (KRAS G12R)
VVGLRHVGL

SEQ ID NO: 45191 - protein, 9 aa, synthetic construct
  source 1..9: note = Seed: VVGARGVGK (KRAS G12R)
VVGLRIVGI

SEQ ID NO: 45192 - protein, 9 aa, synthetic construct
  source 1..9: note = Seed: VVGARGVGK (KRAS G12R)
VVGLRIVGM

SEQ ID NO: 45193 - protein, 9 aa, synthetic construct
  source 1..9: note = Seed: VVGARGVGK (KRAS G12R)
VVGLRIVGN

SEQ ID NO: 45194 - protein, 9 aa, synthetic construct
  source 1..9: note = Seed: VVGARGVGK (KRAS G12R)
VVGLRIVGS

SEQ ID NO: 45195 - protein, 9 aa, synthetic construct
  source 1..9: note = Seed: VVGARGVGK (KRAS G12R)
VVGLRKVGA

SEQ ID NO: 45196 - protein, 9 aa, synthetic construct
  source 1..9: note = Seed: VVGARGVGK (KRAS G12R)
VVGLRKVGF

SEQ ID NO: 45197 - protein, 9 aa, synthetic construct
  source 1..9: note = Seed: VVGARGVGK (KRAS G12R)
VVGLRKVGH

SEQ ID NO: 45198 - protein, 9 aa, synthetic construct
  source 1..9: note = Seed: VVGARGVGK (KRAS G12R)
VVGLRKVGI

SEQ ID NO: 45199 - protein, 9 aa, synthetic construct
  source 1..9: note = Seed: VVGARGVGK (KRAS G12R)
VVGLRKVGL

SEQ ID NO: 45200 - protein, 9 aa, synthetic construct
  source 1..9: note = Seed: VVGARGVGK (KRAS G12R)
VVGLRKVGM

SEQ ID NO: 45201 - protein, 9 aa, synthetic construct
  source 1..9: note = Seed: VVGARGVGK (KRAS G12R)
VVGLRKVGR

SEQ ID NO: 45202 - protein, 9 aa, synthetic construct
  source 1..9: note = Seed: VVGARGVGK (KRAS G12R)
VVGLRKVGS

SEQ ID NO: 45203 - protein, 9 aa, synthetic construct
  source 1..9: note = Seed: VVGARGVGK (KRAS G12R)
VVGLRKVGT

SEQ ID NO: 45204 - protein, 9 aa, synthetic construct
  source 1..9: note = Seed: VVGARGVGK (KRAS G12R)
VVGLRKVGV

SEQ ID NO: 45205 - protein, 9 aa, synthetic construct
  source 1..9: note = Seed: VVGARGVGK (KRAS G12R)
VVGLRKVGY

SEQ ID NO: 45206 - protein, 9 aa, synthetic construct
  source 1..9: note = Seed: VVGARGVGK (KRAS G12R)
VVGLRLVGM

SEQ ID NO: 45207 - protein, 9 aa, synthetic construct
  source 1..9: note = Seed: VVGARGVGK (KRAS G12R)
VVGLRMVGL

SEQ ID NO: 45208 - protein, 9 aa, synthetic construct
  source 1..9: note = Seed: VVGARGVGK (KRAS G12R)
VVGLRNVGA

SEQ ID NO: 45209 - protein, 9 aa, synthetic construct
  source 1..9: note = Seed: VVGARGVGK (KRAS G12R)
VVGLRNVGI

SEQ ID NO: 45210 - protein, 9 aa, synthetic construct
  source 1..9: note = Seed: VVGARGVGK (KRAS G12R)
VVGLRNVGL

SEQ ID NO: 45211 - protein, 9 aa, synthetic construct
  source 1..9: note = Seed: VVGARGVGK (KRAS G12R)
VVGLRNVGM

SEQ ID NO: 45212 - protein, 9 aa, synthetic construct
  source 1..9: note = Seed: VVGARGVGK (KRAS G12R)
VVGLRNVGN

SEQ ID NO: 45213 - protein, 9 aa, synthetic construct
  source 1..9: note = Seed: VVGARGVGK (KRAS G12R)
VVGLRNVGS

SEQ ID NO: 45214 - protein, 9 aa, synthetic construct
  source 1..9: note = Seed: VVGARGVGK (KRAS G12R)
VVGLRNVGT

SEQ ID NO: 45215 - protein, 9 aa, synthetic construct
  source 1..9: note = Seed: VVGARGVGK (KRAS G12R)
VVGLRNVGV

SEQ ID NO: 45216 - protein, 9 aa, synthetic construct
  source 1..9: note = Seed: VVGARGVGK (KRAS G12R)
VVGLRPVGA

SEQ ID NO: 45217 - protein, 9 aa, synthetic construct
  source 1..9: note = Seed: VVGARGVGK (KRAS G12R)
VVGLRPVGC

SEQ ID NO: 45218 - protein, 9 aa, synthetic construct
  source 1..9: note = Seed: VVGARGVGK (KRAS G12R)
VVGLRPVGF

SEQ ID NO: 45219 - protein, 9 aa, synthetic construct
  source 1..9: note = Seed: VVGARGVGK (KRAS G12R)
VVGLRPVGH

SEQ ID NO: 45220 - protein, 9 aa, synthetic construct
  source 1..9: note = Seed: VVGARGVGK (KRAS G12R)
VVGLRPVGI

SEQ ID NO: 45221 - protein, 9 aa, synthetic construct
  source 1..9: note = Seed: VVGARGVGK (KRAS G12R)
VVGLRPVGL

SEQ ID NO: 45222 - protein, 9 aa, synthetic construct
  source 1..9: note = Seed: VVGARGVGK (KRAS G12R)
VVGLRPVGM

SEQ ID NO: 45223 - protein, 9 aa, synthetic construct
  source 1..9: note = Seed: VVGARGVGK (KRAS G12R)
VVGLRPVGN

SEQ ID NO: 45224 - protein, 9 aa, synthetic construct
  source 1..9: note = Seed: VVGARGVGK (KRAS G12R)
VVGLRPVGR

SEQ ID NO: 45225 - protein, 9 aa, synthetic construct
  source 1..9: note = Seed: VVGARGVGK (KRAS G12R)
VVGLRPVGS

SEQ ID NO: 45226 - protein, 9 aa, synthetic construct
  source 1..9: note = Seed: VVGARGVGK (KRAS G12R)
VVGLRPVGT

SEQ ID NO: 45227 - protein, 9 aa, synthetic construct
  source 1..9: note = Seed: VVGARGVGK (KRAS G12R)
VVGLRPVGV

SEQ ID NO: 45228 - protein, 9 aa, synthetic construct
  source 1..9: note = Seed: VVGARGVGK (KRAS G12R)
VVGLRPVGY

SEQ ID NO: 45229 - protein, 9 aa, synthetic construct
  source 1..9: note = Seed: VVGARGVGK (KRAS G12R)
VVGLRRVGA

SEQ ID NO: 45230 - protein, 9 aa, synthetic construct
  source 1..9: note = Seed: VVGARGVGK (KRAS G12R)
VVGLRRVGF

SEQ ID NO: 45231 - protein, 9 aa, synthetic construct
  source 1..9: note = Seed: VVGARGVGK (KRAS G12R)
VVGLRRVGG

SEQ ID NO: 45232 - protein, 9 aa, synthetic construct
  source 1..9: note = Seed: VVGARGVGK (KRAS G12R)
VVGLRRVGH

SEQ ID NO: 45233 - protein, 9 aa, synthetic construct
  source 1..9: note = Seed: VVGARGVGK (KRAS G12R)
VVGLRRVGI

SEQ ID NO: 45234 - protein, 9 aa, synthetic construct
  source 1..9: note = Seed: VVGARGVGK (KRAS G12R)
VVGLRRVGL

SEQ ID NO: 45235 - protein, 9 aa, synthetic construct
  source 1..9: note = Seed: VVGARGVGK (KRAS G12R)
VVGLRRVGM

SEQ ID NO: 45236 - protein, 9 aa, synthetic construct
  source 1..9: note = Seed: VVGARGVGK (KRAS G12R)
VVGLRRVGP

SEQ ID NO: 45237 - protein, 9 aa, synthetic construct
  source 1..9: note = Seed: VVGARGVGK (KRAS G12R)
VVGLRRVGQ

SEQ ID NO: 45238 - protein, 9 aa, synthetic construct
  source 1..9: note = Seed: VVGARGVGK (KRAS G12R)
VVGLRRVGR

SEQ ID NO: 45239 - protein, 9 aa, synthetic construct
  source 1..9: note = Seed: VVGARGVGK (KRAS G12R)
VVGLRRVGS

SEQ ID NO: 45240 - protein, 9 aa, synthetic construct
  source 1..9: note = Seed: VVGARGVGK (KRAS G12R)
VVGLRRVGT

SEQ ID NO: 45241 - protein, 9 aa, synthetic construct
  source 1..9: note = Seed: VVGARGVGK (KRAS G12R)
VVGLRRVGV

SEQ ID NO: 45242 - protein, 9 aa, synthetic construct
  source 1..9: note = Seed: VVGARGVGK (KRAS G12R)
VVGLRRVGY

SEQ ID NO: 45243 - protein, 9 aa, synthetic construct
  source 1..9: note = Seed: VVGARGVGK (KRAS G12R)
VVGLRSVGA

SEQ ID NO: 45244 - protein, 9 aa, synthetic construct
  source 1..9: note = Seed: VVGARGVGK (KRAS G12R)
VVGLRSVGC

SEQ ID NO: 45245 - protein, 9 aa, synthetic construct
  source 1..9: note = Seed: VVGARGVGK (KRAS G12R)
VVGLRSVGF

SEQ ID NO: 45246 - protein, 9 aa, synthetic construct
  source 1..9: note = Seed: VVGARGVGK (KRAS G12R)
VVGLRSVGG

SEQ ID NO: 45247 - protein, 9 aa, synthetic construct
  source 1..9: note = Seed: VVGARGVGK (KRAS G12R)
VVGLRSVGH

SEQ ID NO: 45248 - protein, 9 aa, synthetic construct
  source 1..9: note = Seed: VVGARGVGK (KRAS G12R)
VVGLRSVGI

SEQ ID NO: 45249 - protein, 9 aa, synthetic construct
  source 1..9: note = Seed: VVGARGVGK (KRAS G12R)
VVGLRSVGL

SEQ ID NO: 45250 - protein, 9 aa, synthetic construct
  source 1..9: note = Seed: VVGARGVGK (KRAS G12R)
VVGLRSVGM

SEQ ID NO: 45251 - protein, 9 aa, synthetic construct
  source 1..9: note = Seed: VVGARGVGK (KRAS G12R)
VVGLRSVGN

SEQ ID NO: 45252 - protein, 9 aa, synthetic construct
  source 1..9: note = Seed: VVGARGVGK (KRAS G12R)
VVGLRSVGR

SEQ ID NO: 45253 - protein, 9 aa, synthetic construct
  source 1..9: note = Seed: VVGARGVGK (KRAS G12R)
VVGLRSVGS

SEQ ID NO: 45254 - protein, 9 aa, synthetic construct
  source 1..9: note = Seed: VVGARGVGK (KRAS G12R)
VVGLRSVGT

SEQ ID NO: 45255 - protein, 9 aa, synthetic construct
  source 1..9: note = Seed: VVGARGVGK (KRAS G12R)
VVGLRSVGV

SEQ ID NO: 45256 - protein, 9 aa, synthetic construct
  source 1..9: note = Seed: VVGARGVGK (KRAS G12R)
VVGLRSVGY

SEQ ID NO: 45257 - protein, 9 aa, synthetic construct
  source 1..9: note = Seed: VVGARGVGK (KRAS G12R)
VVGLRTVGA

SEQ ID NO: 45258 - protein, 9 aa, synthetic construct
  source 1..9: note = Seed: VVGARGVGK (KRAS G12R)
VVGLRTVGI

SEQ ID NO: 45259 - protein, 9 aa, synthetic construct
  source 1..9: note = Seed: VVGARGVGK (KRAS G12R)
VVGLRTVGL

SEQ ID NO: 45260 - protein, 9 aa, synthetic construct
  source 1..9: note = Seed: VVGARGVGK (KRAS G12R)
VVGLRTVGM

SEQ ID NO: 45261 - protein, 9 aa, synthetic construct
  source 1..9: note = Seed: VVGARGVGK (KRAS G12R)
VVGLRTVGN

SEQ ID NO: 45262 - protein, 9 aa, synthetic construct
  source 1..9: note = Seed: VVGARGVGK (KRAS G12R)
VVGLRTVGR

SEQ ID NO: 45263 - protein, 9 aa, synthetic construct
  source 1..9: note = Seed: VVGARGVGK (KRAS G12R)
VVGLRTVGS

SEQ ID NO: 45264 - protein, 9 aa, synthetic construct
  source 1..9: note = Seed: VVGARGVGK (KRAS G12R)
VVGLRTVGT

SEQ ID NO: 45265 - protein, 9 aa, synthetic construct
  source 1..9: note = Seed: VVGARGVGK (KRAS G12R)
VVGLRTVGV

SEQ ID NO: 45266 - protein, 9 aa, synthetic construct
  source 1..9: note = Seed: VVGARGVGK (KRAS G12R)
VVGLRVVGA

SEQ ID NO: 45267 - protein, 9 aa, synthetic construct
  source 1..9: note = Seed: VVGARGVGK (KRAS G12R)
VVGLRVVGI

SEQ ID NO: 45268 - protein, 9 aa, synthetic construct
  source 1..9: note = Seed: VVGARGVGK (KRAS G12R)
VVGLRVVGL

SEQ ID NO: 45269 - protein, 9 aa, synthetic construct
  source 1..9: note = Seed: VVGARGVGK (KRAS G12R)
VVGLRVVGM

SEQ ID NO: 45270 - protein, 9 aa, synthetic construct
  source 1..9: note = Seed: VVGARGVGK (KRAS G12R)
VVGLRVVGN

SEQ ID NO: 45271 - protein, 9 aa, synthetic construct
  source 1..9: note = Seed: VVGARGVGK (KRAS G12R)
VVGLRVVGS

SEQ ID NO: 45272 - protein, 9 aa, synthetic construct
  source 1..9: note = Seed: VVGARGVGK (KRAS G12R)
VVGLRVVGT

SEQ ID NO: 45273 - protein, 9 aa, synthetic construct
  source 1..9: note = Seed: VVGARGVGK (KRAS G12R)
VVGLRVVGV

SEQ ID NO: 45274 - protein, 9 aa, synthetic construct
  source 1..9: note = Seed: VVGARGVGK (KRAS G12R)
VVGMRAVGA

SEQ ID NO: 45275 - protein, 9 aa, synthetic construct
  source 1..9: note = Seed: VVGARGVGK (KRAS G12R)
VVGMRAVGC

SEQ ID NO: 45276 - protein, 9 aa, synthetic construct
  source 1..9: note = Seed: VVGARGVGK (KRAS G12R)
VVGMRAVGF

SEQ ID NO: 45277 - protein, 9 aa, synthetic construct
  source 1..9: note = Seed: VVGARGVGK (KRAS G12R)
VVGMRAVGG

SEQ ID NO: 45278 - protein, 9 aa, synthetic construct
  source 1..9: note = Seed: VVGARGVGK (KRAS G12R)
VVGMRAVGH

SEQ ID NO: 45279 - protein, 9 aa, synthetic construct
  source 1..9: note = Seed: VVGARGVGK (KRAS G12R)
VVGMRAVGI

SEQ ID NO: 45280 - protein, 9 aa, synthetic construct
  source 1..9: note = Seed: VVGARGVGK (KRAS G12R)
VVGMRAVGK

SEQ ID NO: 45281 - protein, 9 aa, synthetic construct
  source 1..9: note = Seed: VVGARGVGK (KRAS G12R)
VVGMRAVGL

SEQ ID NO: 45282 - protein, 9 aa, synthetic construct
  source 1..9: note = Seed: VVGARGVGK (KRAS G12R)
VVGMRAVGM

SEQ ID NO: 45283 - protein, 9 aa, synthetic construct
  source 1..9: note = Seed: VVGARGVGK (KRAS G12R)
VVGMRAVGN

SEQ ID NO: 45284 - protein, 9 aa, synthetic construct
  source 1..9: note = Seed: VVGARGVGK (KRAS G12R)
VVGMRAVGQ

SEQ ID NO: 45285 - protein, 9 aa, synthetic construct
  source 1..9: note = Seed: VVGARGVGK (KRAS G12R)
VVGMRAVGR

SEQ ID NO: 45286 - protein, 9 aa, synthetic construct
  source 1..9: note = Seed: VVGARGVGK (KRAS G12R)
VVGMRAVGS

SEQ ID NO: 45287 - protein, 9 aa, synthetic construct
  source 1..9: note = Seed: VVGARGVGK (KRAS G12R)
VVGMRAVGT

SEQ ID NO: 45288 - protein, 9 aa, synthetic construct
  source 1..9: note = Seed: VVGARGVGK (KRAS G12R)
VVGMRAVGV

SEQ ID NO: 45289 - protein, 9 aa, synthetic construct
  source 1..9: note = Seed: VVGARGVGK (KRAS G12R)
VVGMRAVGY

SEQ ID NO: 45290 - protein, 9 aa, synthetic construct
  source 1..9: note = Seed: VVGARGVGK (KRAS G12R)
VVGMRGVGA

SEQ ID NO: 45291 - protein, 9 aa, synthetic construct
  source 1..9: note = Seed: VVGARGVGK (KRAS G12R)
VVGMRGVGC

SEQ ID NO: 45292 - protein, 9 aa, synthetic construct
  source 1..9: note = Seed: VVGARGVGK (KRAS G12R)
VVGMRGVGF

SEQ ID NO: 45293 - protein, 9 aa, synthetic construct
  source 1..9: note = Seed: VVGARGVGK (KRAS G12R)
VVGMRGVGG

SEQ ID NO: 45294 - protein, 9 aa, synthetic construct
  source 1..9: note = Seed: VVGARGVGK (KRAS G12R)
VVGMRGVGH

SEQ ID NO: 45295 - protein, 9 aa, synthetic construct
  source 1..9: note = Seed: VVGARGVGK (KRAS G12R)
VVGMRGVGI

SEQ ID NO: 45296 - protein, 9 aa, synthetic construct
  source 1..9: note = Seed: VVGARGVGK (KRAS G12R)
VVGMRGVGL

SEQ ID NO: 45297 - protein, 9 aa, synthetic construct
  source 1..9: note = Seed: VVGARGVGK (KRAS G12R)
VVGMRGVGM

SEQ ID NO: 45298 - protein, 9 aa, synthetic construct
  source 1..9: note = Seed: VVGARGVGK (KRAS G12R)
VVGMRGVGN

SEQ ID NO: 45299 - protein, 9 aa, synthetic construct
  source 1..9: note = Seed: VVGARGVGK (KRAS G12R)
VVGMRGVGP

SEQ ID NO: 45300 - protein, 9 aa, synthetic construct
  source 1..9: note = Seed: VVGARGVGK (KRAS G12R)
VVGMRGVGQ

SEQ ID NO: 45301 - protein, 9 aa, synthetic construct
  source 1..9: note = Seed: VVGARGVGK (KRAS G12R)
VVGMRGVGR

SEQ ID NO: 45302 - protein, 9 aa, synthetic construct
  source 1..9: note = Seed: VVGARGVGK (KRAS G12R)
VVGMRGVGS

SEQ ID NO: 45303 - protein, 9 aa, synthetic construct
  source 1..9: note = Seed: VVGARGVGK (KRAS G12R)
VVGMRGVGT

SEQ ID NO: 45304 - protein, 9 aa, synthetic construct
  source 1..9: note = Seed: VVGARGVGK (KRAS G12R)
VVGMRGVGV

SEQ ID NO: 45305 - protein, 9 aa, synthetic construct
  source 1..9: note = Seed: VVGARGVGK (KRAS G12R)
VVGMRGVGY

SEQ ID NO: 45306 - protein, 9 aa, synthetic construct
  source 1..9: note = Seed: VVGARGVGK (KRAS G12R)
VVGMRHVGL

SEQ ID NO: 45307 - protein, 9 aa, synthetic construct
  source 1..9: note = Seed: VVGARGVGK (KRAS G12R)
VVGMRHVGR

SEQ ID NO: 45308 - protein, 9 aa, synthetic construct
  source 1..9: note = Seed: VVGARGVGK (KRAS G12R)
VVGMRHVGV

SEQ ID NO: 45309 - protein, 9 aa, synthetic construct
  source 1..9: note = Seed: VVGARGVGK (KRAS G12R)
VVGMRIVGA

SEQ ID NO: 45310 - protein, 9 aa, synthetic construct
  source 1..9: note = Seed: VVGARGVGK (KRAS G12R)
VVGMRIVGI

SEQ ID NO: 45311 - protein, 9 aa, synthetic construct
  source 1..9: note = Seed: VVGARGVGK (KRAS G12R)
VVGMRIVGM

SEQ ID NO: 45312 - protein, 9 aa, synthetic construct
  source 1..9: note = Seed: VVGARGVGK (KRAS G12R)
VVGMRIVGN

SEQ ID NO: 45313 - protein, 9 aa, synthetic construct
  source 1..9: note = Seed: VVGARGVGK (KRAS G12R)
VVGMRIVGS

SEQ ID NO: 45314 - protein, 9 aa, synthetic construct
  source 1..9: note = Seed: VVGARGVGK (KRAS G12R)
VVGMRKVGA

SEQ ID NO: 45315 - protein, 9 aa, synthetic construct
  source 1..9: note = Seed: VVGARGVGK (KRAS G12R)
VVGMRKVGF

SEQ ID NO: 45316 - protein, 9 aa, synthetic construct
  source 1..9: note = Seed: VVGARGVGK (KRAS G12R)
VVGMRKVGH

SEQ ID NO: 45317 - protein, 9 aa, synthetic construct
  source 1..9: note = Seed: VVGARGVGK (KRAS G12R)
VVGMRKVGI

SEQ ID NO: 45318 - protein, 9 aa, synthetic construct
  source 1..9: note = Seed: VVGARGVGK (KRAS G12R)
VVGMRKVGK

SEQ ID NO: 45319 - protein, 9 aa, synthetic construct
  source 1..9: note = Seed: VVGARGVGK (KRAS G12R)
VVGMRKVGL

SEQ ID NO: 45320 - protein, 9 aa, synthetic construct
  source 1..9: note = Seed: VVGARGVGK (KRAS G12R)
VVGMRKVGM

SEQ ID NO: 45321 - protein, 9 aa, synthetic construct
  source 1..9: note = Seed: VVGARGVGK (KRAS G12R)
VVGMRKVGR

SEQ ID NO: 45322 - protein, 9 aa, synthetic construct
  source 1..9: note = Seed: VVGARGVGK (KRAS G12R)
VVGMRKVGS

SEQ ID NO: 45323 - protein, 9 aa, synthetic construct
  source 1..9: note = Seed: VVGARGVGK (KRAS G12R)
VVGMRKVGT

SEQ ID NO: 45324 - protein, 9 aa, synthetic construct
  source 1..9: note = Seed: VVGARGVGK (KRAS G12R)
VVGMRKVGV

SEQ ID NO: 45325 - protein, 9 aa, synthetic construct
  source 1..9: note = Seed: VVGARGVGK (KRAS G12R)
VVGMRKVGY

SEQ ID NO: 45326 - protein, 9 aa, synthetic construct
  source 1..9: note = Seed: VVGARGVGK (KRAS G12R)
VVGMRLVGM

SEQ ID NO: 45327 - protein, 9 aa, synthetic construct
  source 1..9: note = Seed: VVGARGVGK (KRAS G12R)
VVGMRLVGS

SEQ ID NO: 45328 - protein, 9 aa, synthetic construct
  source 1..9: note = Seed: VVGARGVGK (KRAS G12R)
VVGMRMVGM

SEQ ID NO: 45329 - protein, 9 aa, synthetic construct
  source 1..9: note = Seed: VVGARGVGK (KRAS G12R)
VVGMRNVGA

SEQ ID NO: 45330 - protein, 9 aa, synthetic construct
  source 1..9: note = Seed: VVGARGVGK (KRAS G12R)
VVGMRNVGG

SEQ ID NO: 45331 - protein, 9 aa, synthetic construct
  source 1..9: note = Seed: VVGARGVGK (KRAS G12R)
VVGMRNVGI

SEQ ID NO: 45332 - protein, 9 aa, synthetic construct
  source 1..9: note = Seed: VVGARGVGK (KRAS G12R)
VVGMRNVGL

SEQ ID NO: 45333 - protein, 9 aa, synthetic construct
  source 1..9: note = Seed: VVGARGVGK (KRAS G12R)
VVGMRNVGM

SEQ ID NO: 45334 - protein, 9 aa, synthetic construct
  source 1..9: note = Seed: VVGARGVGK (KRAS G12R)
VVGMRNVGR

SEQ ID NO: 45335 - protein, 9 aa, synthetic construct
  source 1..9: note = Seed: VVGARGVGK (KRAS G12R)
VVGMRNVGS

SEQ ID NO: 45336 - protein, 9 aa, synthetic construct
  source 1..9: note = Seed: VVGARGVGK (KRAS G12R)
VVGMRNVGT

SEQ ID NO: 45337 - protein, 9 aa, synthetic construct
  source 1..9: note = Seed: VVGARGVGK (KRAS G12R)
VVGMRNVGV

SEQ ID NO: 45338 - protein, 9 aa, synthetic construct
  source 1..9: note = Seed: VVGARGVGK (KRAS G12R)
VVGMRPVGA

SEQ ID NO: 45339 - protein, 9 aa, synthetic construct
  source 1..9: note = Seed: VVGARGVGK (KRAS G12R)
VVGMRPVGC

SEQ ID NO: 45340 - protein, 9 aa, synthetic construct
  source 1..9: note = Seed: VVGARGVGK (KRAS G12R)
VVGMRPVGF

SEQ ID NO: 45341 - protein, 9 aa, synthetic construct
  source 1..9: note = Seed: VVGARGVGK (KRAS G12R)
VVGMRPVGG

SEQ ID NO: 45342 - protein, 9 aa, synthetic construct
  source 1..9: note = Seed: VVGARGVGK (KRAS G12R)
VVGMRPVGH

SEQ ID NO: 45343 - protein, 9 aa, synthetic construct
  source 1..9: note = Seed: VVGARGVGK (KRAS G12R)
VVGMRPVGI

SEQ ID NO: 45344 - protein, 9 aa, synthetic construct
  source 1..9: note = Seed: VVGARGVGK (KRAS G12R)
VVGMRPVGL

SEQ ID NO: 45345 - protein, 9 aa, synthetic construct
  source 1..9: note = Seed: VVGARGVGK (KRAS G12R)
VVGMRPVGM

SEQ ID NO: 45346 - protein, 9 aa, synthetic construct
  source 1..9: note = Seed: VVGARGVGK (KRAS G12R)
VVGMRPVGN

SEQ ID NO: 45347 - protein, 9 aa, synthetic construct
  source 1..9: note = Seed: VVGARGVGK (KRAS G12R)
VVGMRPVGS

SEQ ID NO: 45348 - protein, 9 aa, synthetic construct
  source 1..9: note = Seed: VVGARGVGK (KRAS G12R)
VVGMRPVGT

SEQ ID NO: 45349 - protein, 9 aa, synthetic construct
  source 1..9: note = Seed: VVGARGVGK (KRAS G12R)
VVGMRPVGV

SEQ ID NO: 45350 - protein, 9 aa, synthetic construct
  source 1..9: note = Seed: VVGARGVGK (KRAS G12R)
VVGMRPVGY

SEQ ID NO: 45351 - protein, 9 aa, synthetic construct
  source 1..9: note = Seed: VVGARGVGK (KRAS G12R)
VVGMRQVGR

SEQ ID NO: 45352 - protein, 9 aa, synthetic construct
  source 1..9: note = Seed: VVGARGVGK (KRAS G12R)
VVGMRRVGA

SEQ ID NO: 45353 - protein, 9 aa, synthetic construct
  source 1..9: note = Seed: VVGARGVGK (KRAS G12R)
VVGMRRVGF

SEQ ID NO: 45354 - protein, 9 aa, synthetic construct
  source 1..9: note = Seed: VVGARGVGK (KRAS G12R)
VVGMRRVGG

SEQ ID NO: 45355 - protein, 9 aa, synthetic construct
  source 1..9: note = Seed: VVGARGVGK (KRAS G12R)
VVGMRRVGH

SEQ ID NO: 45356 - protein, 9 aa, synthetic construct
  source 1..9: note = Seed: VVGARGVGK (KRAS G12R)
VVGMRRVGI

SEQ ID NO: 45357 - protein, 9 aa, synthetic construct
  source 1..9: note = Seed: VVGARGVGK (KRAS G12R)
VVGMRRVGK

SEQ ID NO: 45358 - protein, 9 aa, synthetic construct
  source 1..9: note = Seed: VVGARGVGK (KRAS G12R)
VVGMRRVGL

SEQ ID NO: 45359 - protein, 9 aa, synthetic construct
  source 1..9: note = Seed: VVGARGVGK (KRAS G12R)
VVGMRRVGM

SEQ ID NO: 45360 - protein, 9 aa, synthetic construct
  source 1..9: note = Seed: VVGARGVGK (KRAS G12R)
VVGMRRVGQ

SEQ ID NO: 45361 - protein, 9 aa, synthetic construct
  source 1..9: note = Seed: VVGARGVGK (KRAS G12R)
VVGMRRVGR

SEQ ID NO: 45362 - protein, 9 aa, synthetic construct
  source 1..9: note = Seed: VVGARGVGK (KRAS G12R)
VVGMRRVGS

SEQ ID NO: 45363 - protein, 9 aa, synthetic construct
  source 1..9: note = Seed: VVGARGVGK (KRAS G12R)
VVGMRRVGT

SEQ ID NO: 45364 - protein, 9 aa, synthetic construct
  source 1..9: note = Seed: VVGARGVGK (KRAS G12R)
VVGMRRVGV

SEQ ID NO: 45365 - protein, 9 aa, synthetic construct
  source 1..9: note = Seed: VVGARGVGK (KRAS G12R)
VVGMRRVGW

SEQ ID NO: 45366 - protein, 9 aa, synthetic construct
  source 1..9: note = Seed: VVGARGVGK (KRAS G12R)
VVGMRRVGY

SEQ ID NO: 45367 - protein, 9 aa, synthetic construct
  source 1..9: note = Seed: VVGARGVGK (KRAS G12R)
VVGMRSVGA

SEQ ID NO: 45368 - protein, 9 aa, synthetic construct
  source 1..9: note = Seed: VVGARGVGK (KRAS G12R)
VVGMRSVGC

SEQ ID NO: 45369 - protein, 9 aa, synthetic construct
  source 1..9: note = Seed: VVGARGVGK (KRAS G12R)
VVGMRSVGF

SEQ ID NO: 45370 - protein, 9 aa, synthetic construct
  source 1..9: note = Seed: VVGARGVGK (KRAS G12R)
VVGMRSVGG

SEQ ID NO: 45371 - protein, 9 aa, synthetic construct
  source 1..9: note = Seed: VVGARGVGK (KRAS G12R)
VVGMRSVGH

SEQ ID NO: 45372 - protein, 9 aa, synthetic construct
  source 1..9: note = Seed: VVGARGVGK (KRAS G12R)
VVGMRSVGI

SEQ ID NO: 45373 - protein, 9 aa, synthetic construct
  source 1..9: note = Seed: VVGARGVGK (KRAS G12R)
VVGMRSVGL

SEQ ID NO: 45374 - protein, 9 aa, synthetic construct
  source 1..9: note = Seed: VVGARGVGK (KRAS G12R)
VVGMRSVGM

SEQ ID NO: 45375 - protein, 9 aa, synthetic construct
  source 1..9: note = Seed: VVGARGVGK (KRAS G12R)
VVGMRSVGN

SEQ ID NO: 45376 - protein, 9 aa, synthetic construct
  source 1..9: note = Seed: VVGARGVGK (KRAS G12R)
VVGMRSVGR

SEQ ID NO: 45377 - protein, 9 aa, synthetic construct
  source 1..9: note = Seed: VVGARGVGK (KRAS G12R)
VVGMRSVGS

SEQ ID NO: 45378 - protein, 9 aa, synthetic construct
  source 1..9: note = Seed: VVGARGVGK (KRAS G12R)
VVGMRSVGT

SEQ ID NO: 45379 - protein, 9 aa, synthetic construct
  source 1..9: note = Seed: VVGARGVGK (KRAS G12R)
VVGMRSVGV

SEQ ID NO: 45380 - protein, 9 aa, synthetic construct
  source 1..9: note = Seed: VVGARGVGK (KRAS G12R)
VVGMRSVGY

SEQ ID NO: 45381 - protein, 9 aa, synthetic construct
  source 1..9: note = Seed: VVGARGVGK (KRAS G12R)
VVGMRTVGA

SEQ ID NO: 45382 - protein, 9 aa, synthetic construct
  source 1..9: note = Seed: VVGARGVGK (KRAS G12R)
VVGMRTVGI

SEQ ID NO: 45383 - protein, 9 aa, synthetic construct
  source 1..9: note = Seed: VVGARGVGK (KRAS G12R)
VVGMRTVGL

SEQ ID NO: 45384 - protein, 9 aa, synthetic construct
  source 1..9: note = Seed: VVGARGVGK (KRAS G12R)
VVGMRTVGM

SEQ ID NO: 45385 - protein, 9 aa, synthetic construct
  source 1..9: note = Seed: VVGARGVGK (KRAS G12R)
VVGMRTVGN

SEQ ID NO: 45386 - protein, 9 aa, synthetic construct
  source 1..9: note = Seed: VVGARGVGK (KRAS G12R)
VVGMRTVGR

SEQ ID NO: 45387 - protein, 9 aa, synthetic construct
  source 1..9: note = Seed: VVGARGVGK (KRAS G12R)
VVGMRTVGS

SEQ ID NO: 45388 - protein, 9 aa, synthetic construct
  source 1..9: note = Seed: VVGARGVGK (KRAS G12R)
VVGMRTVGT

SEQ ID NO: 45389 - protein, 9 aa, synthetic construct
  source 1..9: note = Seed: VVGARGVGK (KRAS G12R)
VVGMRTVGV

SEQ ID NO: 45390 - protein, 9 aa, synthetic construct
  source 1..9: note = Seed: VVGARGVGK (KRAS G12R)
VVGMRVVGA

SEQ ID NO: 45391 - protein, 9 aa, synthetic construct
  source 1..9: note = Seed: VVGARGVGK (KRAS G12R)
VVGMRVVGH

SEQ ID NO: 45392 - protein, 9 aa, synthetic construct
  source 1..9: note = Seed: VVGARGVGK (KRAS G12R)
VVGMRVVGI

SEQ ID NO: 45393 - protein, 9 aa, synthetic construct
  source 1..9: note = Seed: VVGARGVGK (KRAS G12R)
VVGMRVVGL

SEQ ID NO: 45394 - protein, 9 aa, synthetic construct
  source 1..9: note = Seed: VVGARGVGK (KRAS G12R)
VVGMRVVGM

SEQ ID NO: 45395 - protein, 9 aa, synthetic construct
  source 1..9: note = Seed: VVGARGVGK (KRAS G12R)
VVGMRVVGN

SEQ ID NO: 45396 - protein, 9 aa, synthetic construct
  source 1..9: note = Seed: VVGARGVGK (KRAS G12R)
VVGMRVVGS

SEQ ID NO: 45397 - protein, 9 aa, synthetic construct
  source 1..9: note = Seed: VVGARGVGK (KRAS G12R)
VVGMRVVGT

SEQ ID NO: 45398 - protein, 9 aa, synthetic construct
  source 1..9: note = Seed: VVGARGVGK (KRAS G12R)
VVGMRVVGV

SEQ ID NO: 45399 - protein, 9 aa, synthetic construct
  source 1..9: note = Seed: VVGARGVGK (KRAS G12R)
VVGNRAVGA

SEQ ID NO: 45400 - protein, 9 aa, synthetic construct
  source 1..9: note = Seed: VVGARGVGK (KRAS G12R)
VVGNRAVGI

SEQ ID NO: 45401 - protein, 9 aa, synthetic construct
  source 1..9: note = Seed: VVGARGVGK (KRAS G12R)
VVGNRAVGL

SEQ ID NO: 45402 - protein, 9 aa, synthetic construct
  source 1..9: note = Seed: VVGARGVGK (KRAS G12R)
VVGNRAVGR

SEQ ID NO: 45403 - protein, 9 aa, synthetic construct
  source 1..9: note = Seed: VVGARGVGK (KRAS G12R)
VVGNRAVGV

SEQ ID NO: 45404 - protein, 9 aa, synthetic construct
  source 1..9: note = Seed: VVGARGVGK (KRAS G12R)
VVGNRAVGY

SEQ ID NO: 45405 - protein, 9 aa, synthetic construct
  source 1..9: note = Seed: VVGARGVGK (KRAS G12R)
VVGNRIVGR

SEQ ID NO: 45406 - protein, 9 aa, synthetic construct
  source 1..9: note = Seed: VVGARGVGK (KRAS G12R)
VVGNRKVGF

SEQ ID NO: 45407 - protein, 9 aa, synthetic construct
  source 1..9: note = Seed: VVGARGVGK (KRAS G12R)
VVGNRKVGI

SEQ ID NO: 45408 - protein, 9 aa, synthetic construct
  source 1..9: note = Seed: VVGARGVGK (KRAS G12R)
VVGNRKVGK

SEQ ID NO: 45409 - protein, 9 aa, synthetic construct
  source 1..9: note = Seed: VVGARGVGK (KRAS G12R)
VVGNRKVGL

SEQ ID NO: 45410 - protein, 9 aa, synthetic construct
  source 1..9: note = Seed: VVGARGVGK (KRAS G12R)
VVGNRKVGM

SEQ ID NO: 45411 - protein, 9 aa, synthetic construct
  source 1..9: note = Seed: VVGARGVGK (KRAS G12R)
VVGNRKVGR

SEQ ID NO: 45412 - protein, 9 aa, synthetic construct
  source 1..9: note = Seed: VVGARGVGK (KRAS G12R)
VVGNRKVGV

SEQ ID NO: 45413 - protein, 9 aa, synthetic construct
  source 1..9: note = Seed: VVGARGVGK (KRAS G12R)
VVGNRKVGY

SEQ ID NO: 45414 - protein, 9 aa, synthetic construct
  source 1..9: note = Seed: VVGARGVGK (KRAS G12R)
VVGNRMVGR

SEQ ID NO: 45415 - protein, 9 aa, synthetic construct
  source 1..9: note = Seed: VVGARGVGK (KRAS G12R)
VVGNRRVGA

SEQ ID NO: 45416 - protein, 9 aa, synthetic construct
  source 1..9: note = Seed: VVGARGVGK (KRAS G12R)
VVGNRRVGF

SEQ ID NO: 45417 - protein, 9 aa, synthetic construct
  source 1..9: note = Seed: VVGARGVGK (KRAS G12R)
VVGNRRVGH

SEQ ID NO: 45418 - protein, 9 aa, synthetic construct
  source 1..9: note = Seed: VVGARGVGK (KRAS G12R)
VVGNRRVGI

SEQ ID NO: 45419 - protein, 9 aa, synthetic construct
  source 1..9: note = Seed: VVGARGVGK (KRAS G12R)
VVGNRRVGK

SEQ ID NO: 45420 - protein, 9 aa, synthetic construct
  source 1..9: note = Seed: VVGARGVGK (KRAS G12R)
VVGNRRVGL

SEQ ID NO: 45421 - protein, 9 aa, synthetic construct
  source 1..9: note = Seed: VVGARGVGK (KRAS G12R)
VVGNRRVGM

SEQ ID NO: 45422 - protein, 9 aa, synthetic construct
  source 1..9: note = Seed: VVGARGVGK (KRAS G12R)
VVGNRRVGR

SEQ ID NO: 45423 - protein, 9 aa, synthetic construct
  source 1..9: note = Seed: VVGARGVGK (KRAS G12R)
VVGNRRVGS

SEQ ID NO: 45424 - protein, 9 aa, synthetic construct
  source 1..9: note = Seed: VVGARGVGK (KRAS G12R)
VVGNRRVGV

SEQ ID NO: 45425 - protein, 9 aa, synthetic construct
  source 1..9: note = Seed: VVGARGVGK (KRAS G12R)
VVGNRRVGY

SEQ ID NO: 45426 - protein, 9 aa, synthetic construct
  source 1..9: note = Seed: VVGARGVGK (KRAS G12R)
VVGQRAVGA

SEQ ID NO: 45427 - protein, 9 aa, synthetic construct
  source 1..9: note = Seed: VVGARGVGK (KRAS G12R)
VVGQRAVGI

SEQ ID NO: 45428 - protein, 9 aa, synthetic construct
  source 1..9: note = Seed: VVGARGVGK (KRAS G12R)
VVGQRAVGL

SEQ ID NO: 45429 - protein, 9 aa, synthetic construct
  source 1..9: note = Seed: VVGARGVGK (KRAS G12R)
VVGQRAVGM

SEQ ID NO: 45430 - protein, 9 aa, synthetic construct
  source 1..9: note = Seed: VVGARGVGK (KRAS G12R)
VVGQRAVGR

SEQ ID NO: 45431 - protein, 9 aa, synthetic construct
  source 1..9: note = Seed: VVGARGVGK (KRAS G12R)
VVGQRAVGS

SEQ ID NO: 45432 - protein, 9 aa, synthetic construct
  source 1..9: note = Seed: VVGARGVGK (KRAS G12R)
VVGQRAVGT

SEQ ID NO: 45433 - protein, 9 aa, synthetic construct
  source 1..9: note = Seed: VVGARGVGK (KRAS G12R)
VVGQRAVGV

SEQ ID NO: 45434 - protein, 9 aa, synthetic construct
  source 1..9: note = Seed: VVGARGVGK (KRAS G12R)
VVGQRGVGA

SEQ ID NO: 45435 - protein, 9 aa, synthetic construct
  source 1..9: note = Seed: VVGARGVGK (KRAS G12R)
VVGQRGVGI

SEQ ID NO: 45436 - protein, 9 aa, synthetic construct
  source 1..9: note = Seed: VVGARGVGK (KRAS G12R)
VVGQRGVGL

SEQ ID NO: 45437 - protein, 9 aa, synthetic construct
  source 1..9: note = Seed: VVGARGVGK (KRAS G12R)
VVGQRGVGM

SEQ ID NO: 45438 - protein, 9 aa, synthetic construct
  source 1..9: note = Seed: VVGARGVGK (KRAS G12R)
VVGQRGVGS

SEQ ID NO: 45439 - protein, 9 aa, synthetic construct
  source 1..9: note = Seed: VVGARGVGK (KRAS G12R)
VVGQRGVGT

SEQ ID NO: 45440 - protein, 9 aa, synthetic construct
  source 1..9: note = Seed: VVGARGVGK (KRAS G12R)
VVGQRGVGV

SEQ ID NO: 45441 - protein, 9 aa, synthetic construct
  source 1..9: note = Seed: VVGARGVGK (KRAS G12R)
VVGQRKVGF

SEQ ID NO: 45442 - protein, 9 aa, synthetic construct
  source 1..9: note = Seed: VVGARGVGK (KRAS G12R)
VVGQRKVGI

SEQ ID NO: 45443 - protein, 9 aa, synthetic construct
  source 1..9: note = Seed: VVGARGVGK (KRAS G12R)
VVGQRKVGK

SEQ ID NO: 45444 - protein, 9 aa, synthetic construct
  source 1..9: note = Seed: VVGARGVGK (KRAS G12R)
VVGQRKVGL

SEQ ID NO: 45445 - protein, 9 aa, synthetic construct
  source 1..9: note = Seed: VVGARGVGK (KRAS G12R)
VVGQRKVGM

SEQ ID NO: 45446 - protein, 9 aa, synthetic construct
  source 1..9: note = Seed: VVGARGVGK (KRAS G12R)
VVGQRKVGR

SEQ ID NO: 45447 - protein, 9 aa, synthetic construct
  source 1..9: note = Seed: VVGARGVGK (KRAS G12R)
VVGQRKVGV

SEQ ID NO: 45448 - protein, 9 aa, synthetic construct
  source 1..9: note = Seed: VVGARGVGK (KRAS G12R)
VVGQRKVGY

SEQ ID NO: 45449 - protein, 9 aa, synthetic construct
  source 1..9: note = Seed: VVGARGVGK (KRAS G12R)
VVGQRNVGA

SEQ ID NO: 45450 - protein, 9 aa, synthetic construct
  source 1..9: note = Seed: VVGARGVGK (KRAS G12R)
VVGQRNVGI

SEQ ID NO: 45451 - protein, 9 aa, synthetic construct
  source 1..9: note = Seed: VVGARGVGK (KRAS G12R)
VVGQRNVGL

SEQ ID NO: 45452 - protein, 9 aa, synthetic construct
  source 1..9: note = Seed: VVGARGVGK (KRAS G12R)
VVGQRNVGV

SEQ ID NO: 45453 - protein, 9 aa, synthetic construct
  source 1..9: note = Seed: VVGARGVGK (KRAS G12R)
VVGQRPVGA

SEQ ID NO: 45454 - protein, 9 aa, synthetic construct
  source 1..9: note = Seed: VVGARGVGK (KRAS G12R)
VVGQRPVGI

SEQ ID NO: 45455 - protein, 9 aa, synthetic construct
  source 1..9: note = Seed: VVGARGVGK (KRAS G12R)
VVGQRPVGL

SEQ ID NO: 45456 - protein, 9 aa, synthetic construct
  source 1..9: note = Seed: VVGARGVGK (KRAS G12R)
VVGQRPVGM

SEQ ID NO: 45457 - protein, 9 aa, synthetic construct
  source 1..9: note = Seed: VVGARGVGK (KRAS G12R)
VVGQRPVGV

SEQ ID NO: 45458 - protein, 9 aa, synthetic construct
  source 1..9: note = Seed: VVGARGVGK (KRAS G12R)
VVGQRRVGA

SEQ ID NO: 45459 - protein, 9 aa, synthetic construct
  source 1..9: note = Seed: VVGARGVGK (KRAS G12R)
VVGQRRVGF

SEQ ID NO: 45460 - protein, 9 aa, synthetic construct
  source 1..9: note = Seed: VVGARGVGK (KRAS G12R)
VVGQRRVGH

SEQ ID NO: 45461 - protein, 9 aa, synthetic construct
  source 1..9: note = Seed: VVGARGVGK (KRAS G12R)
VVGQRRVGI

SEQ ID NO: 45462 - protein, 9 aa, synthetic construct
  source 1..9: note = Seed: VVGARGVGK (KRAS G12R)
VVGQRRVGK

SEQ ID NO: 45463 - protein, 9 aa, synthetic construct
  source 1..9: note = Seed: VVGARGVGK (KRAS G12R)
VVGQRRVGL

SEQ ID NO: 45464 - protein, 9 aa, synthetic construct
  source 1..9: note = Seed: VVGARGVGK (KRAS G12R)
VVGQRRVGM

SEQ ID NO: 45465 - protein, 9 aa, synthetic construct
  source 1..9: note = Seed: VVGARGVGK (KRAS G12R)
VVGQRRVGR

SEQ ID NO: 45466 - protein, 9 aa, synthetic construct
  source 1..9: note = Seed: VVGARGVGK (KRAS G12R)
VVGQRRVGS

SEQ ID NO: 45467 - protein, 9 aa, synthetic construct
  source 1..9: note = Seed: VVGARGVGK (KRAS G12R)
VVGQRRVGV

SEQ ID NO: 45468 - protein, 9 aa, synthetic construct
  source 1..9: note = Seed: VVGARGVGK (KRAS G12R)
VVGQRRVGW

SEQ ID NO: 45469 - protein, 9 aa, synthetic construct
  source 1..9: note = Seed: VVGARGVGK (KRAS G12R)
VVGQRRVGY

SEQ ID NO: 45470 - protein, 9 aa, synthetic construct
  source 1..9: note = Seed: VVGARGVGK (KRAS G12R)
VVGQRSVGA

SEQ ID NO: 45471 - protein, 9 aa, synthetic construct
  source 1..9: note = Seed: VVGARGVGK (KRAS G12R)
VVGQRSVGI

SEQ ID NO: 45472 - protein, 9 aa, synthetic construct
  source 1..9: note = Seed: VVGARGVGK (KRAS G12R)
VVGQRSVGL

SEQ ID NO: 45473 - protein, 9 aa, synthetic construct
  source 1..9: note = Seed: VVGARGVGK (KRAS G12R)
VVGQRSVGM

SEQ ID NO: 45474 - protein, 9 aa, synthetic construct
  source 1..9: note = Seed: VVGARGVGK (KRAS G12R)
VVGQRSVGR

SEQ ID NO: 45475 - protein, 9 aa, synthetic construct
  source 1..9: note = Seed: VVGARGVGK (KRAS G12R)
VVGQRSVGS

SEQ ID NO: 45476 - protein, 9 aa, synthetic construct
  source 1..9: note = Seed: VVGARGVGK (KRAS G12R)
VVGQRSVGT

SEQ ID NO: 45477 - protein, 9 aa, synthetic construct
  source 1..9: note = Seed: VVGARGVGK (KRAS G12R)
VVGQRSVGV

SEQ ID NO: 45478 - protein, 9 aa, synthetic construct
  source 1..9: note = Seed: VVGARGVGK (KRAS G12R)
VVGQRTVGA

SEQ ID NO: 45479 - protein, 9 aa, synthetic construct
  source 1..9: note = Seed: VVGARGVGK (KRAS G12R)
VVGQRTVGI

SEQ ID NO: 45480 - protein, 9 aa, synthetic construct
  source 1..9: note = Seed: VVGARGVGK (KRAS G12R)
VVGQRTVGL

SEQ ID NO: 45481 - protein, 9 aa, synthetic construct
  source 1..9: note = Seed: VVGARGVGK (KRAS G12R)
VVGQRTVGV

SEQ ID NO: 45482 - protein, 9 aa, synthetic construct
  source 1..9: note = Seed: VVGARGVGK (KRAS G12R)
VVGRRAVGF

SEQ ID NO: 45483 - protein, 9 aa, synthetic construct
  source 1..9: note = Seed: VVGARGVGK (KRAS G12R)
VVGRRAVGI

SEQ ID NO: 45484 - protein, 9 aa, synthetic construct
  source 1..9: note = Seed: VVGARGVGK (KRAS G12R)
VVGRRAVGK

SEQ ID NO: 45485 - protein, 9 aa, synthetic construct
  source 1..9: note = Seed: VVGARGVGK (KRAS G12R)
VVGRRAVGL

SEQ ID NO: 45486 - protein, 9 aa, synthetic construct
  source 1..9: note = Seed: VVGARGVGK (KRAS G12R)
VVGRRAVGM

SEQ ID NO: 45487 - protein, 9 aa, synthetic construct
  source 1..9: note = Seed: VVGARGVGK (KRAS G12R)
VVGRRAVGR

SEQ ID NO: 45488 - protein, 9 aa, synthetic construct
  source 1..9: note = Seed: VVGARGVGK (KRAS G12R)
VVGRRAVGV

SEQ ID NO: 45489 - protein, 9 aa, synthetic construct
  source 1..9: note = Seed: VVGARGVGK (KRAS G12R)
VVGRRAVGY

SEQ ID NO: 45490 - protein, 9 aa, synthetic construct
  source 1..9: note = Seed: VVGARGVGK (KRAS G12R)
VVGRRGVGR

SEQ ID NO: 45491 - protein, 9 aa, synthetic construct
  source 1..9: note = Seed: VVGARGVGK (KRAS G12R)
VVGRRHVGR

SEQ ID NO: 45492 - protein, 9 aa, synthetic construct
  source 1..9: note = Seed: VVGARGVGK (KRAS G12R)
VVGRRHVGY

SEQ ID NO: 45493 - protein, 9 aa, synthetic construct
  source 1..9: note = Seed: VVGARGVGK (KRAS G12R)
VVGRRIVGR

SEQ ID NO: 45494 - protein, 9 aa, synthetic construct
  source 1..9: note = Seed: VVGARGVGK (KRAS G12R)
VVGRRIVGY

SEQ ID NO: 45495 - protein, 9 aa, synthetic construct
  source 1..9: note = Seed: VVGARGVGK (KRAS G12R)
VVGRRKVGA

SEQ ID NO: 45496 - protein, 9 aa, synthetic construct
  source 1..9: note = Seed: VVGARGVGK (KRAS G12R)
VVGRRKVGF

SEQ ID NO: 45497 - protein, 9 aa, synthetic construct
  source 1..9: note = Seed: VVGARGVGK (KRAS G12R)
VVGRRKVGH

SEQ ID NO: 45498 - protein, 9 aa, synthetic construct
  source 1..9: note = Seed: VVGARGVGK (KRAS G12R)
VVGRRKVGI

SEQ ID NO: 45499 - protein, 9 aa, synthetic construct
  source 1..9: note = Seed: VVGARGVGK (KRAS G12R)
VVGRRKVGK

SEQ ID NO: 45500 - protein, 9 aa, synthetic construct
  source 1..9: note = Seed: VVGARGVGK (KRAS G12R)
VVGRRKVGL

SEQ ID NO: 45501 - protein, 9 aa, synthetic construct
  source 1..9: note = Seed: VVGARGVGK (KRAS G12R)
VVGRRKVGM

SEQ ID NO: 45502 - protein, 9 aa, synthetic construct
  source 1..9: note = Seed: VVGARGVGK (KRAS G12R)
VVGRRKVGQ

SEQ ID NO: 45503 - protein, 9 aa, synthetic construct
  source 1..9: note = Seed: VVGARGVGK (KRAS G12R)
VVGRRKVGR

SEQ ID NO: 45504 - protein, 9 aa, synthetic construct
  source 1..9: note = Seed: VVGARGVGK (KRAS G12R)
VVGRRKVGS

SEQ ID NO: 45505 - protein, 9 aa, synthetic construct
  source 1..9: note = Seed: VVGARGVGK (KRAS G12R)
VVGRRKVGT

SEQ ID NO: 45506 - protein, 9 aa, synthetic construct
  source 1..9: note = Seed: VVGARGVGK (KRAS G12R)
VVGRRKVGV

SEQ ID NO: 45507 - protein, 9 aa, synthetic construct
  source 1..9: note = Seed: VVGARGVGK (KRAS G12R)
VVGRRKVGW

SEQ ID NO: 45508 - protein, 9 aa, synthetic construct
  source 1..9: note = Seed: VVGARGVGK (KRAS G12R)
VVGRRKVGY

SEQ ID NO: 45509 - protein, 9 aa, synthetic construct
  source 1..9: note = Seed: VVGARGVGK (KRAS G12R)
VVGRRMVGR

SEQ ID NO: 45510 - protein, 9 aa, synthetic construct
  source 1..9: note = Seed: VVGARGVGK (KRAS G12R)
VVGRRNVGF

SEQ ID NO: 45511 - protein, 9 aa, synthetic construct
  source 1..9: note = Seed: VVGARGVGK (KRAS G12R)
VVGRRNVGI

SEQ ID NO: 45512 - protein, 9 aa, synthetic construct
  source 1..9: note = Seed: VVGARGVGK (KRAS G12R)
VVGRRNVGK

SEQ ID NO: 45513 - protein, 9 aa, synthetic construct
  source 1..9: note = Seed: VVGARGVGK (KRAS G12R)
VVGRRNVGL

SEQ ID NO: 45514 - protein, 9 aa, synthetic construct
  source 1..9: note = Seed: VVGARGVGK (KRAS G12R)
VVGRRNVGM

SEQ ID NO: 45515 - protein, 9 aa, synthetic construct
  source 1..9: note = Seed: VVGARGVGK (KRAS G12R)
VVGRRNVGR

SEQ ID NO: 45516 - protein, 9 aa, synthetic construct
  source 1..9: note = Seed: VVGARGVGK (KRAS G12R)
VVGRRNVGV

SEQ ID NO: 45517 - protein, 9 aa, synthetic construct
  source 1..9: note = Seed: VVGARGVGK (KRAS G12R)
VVGRRNVGY

SEQ ID NO: 45518 - protein, 9 aa, synthetic construct
  source 1..9: note = Seed: VVGARGVGK (KRAS G12R)
VVGRRPVGF

SEQ ID NO: 45519 - protein, 9 aa, synthetic construct
  source 1..9: note = Seed: VVGARGVGK (KRAS G12R)
VVGRRPVGR

SEQ ID NO: 45520 - protein, 9 aa, synthetic construct
  source 1..9: note = Seed: VVGARGVGK (KRAS G12R)
VVGRRPVGV

SEQ ID NO: 45521 - protein, 9 aa, synthetic construct
  source 1..9: note = Seed: VVGARGVGK (KRAS G12R)
VVGRRPVGY

SEQ ID NO: 45522 - protein, 9 aa, synthetic construct
  source 1..9: note = Seed: VVGARGVGK (KRAS G12R)
VVGRRQVGR

SEQ ID NO: 45523 - protein, 9 aa, synthetic construct
  source 1..9: note = Seed: VVGARGVGK (KRAS G12R)
VVGRRRVGA

SEQ ID NO: 45524 - protein, 9 aa, synthetic construct
  source 1..9: note = Seed: VVGARGVGK (KRAS G12R)
VVGRRRVGC

SEQ ID NO: 45525 - protein, 9 aa, synthetic construct
  source 1..9: note = Seed: VVGARGVGK (KRAS G12R)
VVGRRRVGD

SEQ ID NO: 45526 - protein, 9 aa, synthetic construct
  source 1..9: note = Seed: VVGARGVGK (KRAS G12R)
VVGRRRVGE

SEQ ID NO: 45527 - protein, 9 aa, synthetic construct
  source 1..9: note = Seed: VVGARGVGK (KRAS G12R)
VVGRRRVGF

SEQ ID NO: 45528 - protein, 9 aa, synthetic construct
  source 1..9: note = Seed: VVGARGVGK (KRAS G12R)
VVGRRRVGG

SEQ ID NO: 45529 - protein, 9 aa, synthetic construct
  source 1..9: note = Seed: VVGARGVGK (KRAS G12R)
VVGRRRVGH

SEQ ID NO: 45530 - protein, 9 aa, synthetic construct
  source 1..9: note = Seed: VVGARGVGK (KRAS G12R)
VVGRRRVGI

SEQ ID NO: 45531 - protein, 9 aa, synthetic construct
  source 1..9: note = Seed: VVGARGVGK (KRAS G12R)
VVGRRRVGK

SEQ ID NO: 45532 - protein, 9 aa, synthetic construct
  source 1..9: note = Seed: VVGARGVGK (KRAS G12R)
VVGRRRVGL

SEQ ID NO: 45533 - protein, 9 aa, synthetic construct
  source 1..9: note = Seed: VVGARGVGK (KRAS G12R)
VVGRRRVGM

SEQ ID NO: 45534 - protein, 9 aa, synthetic construct
  source 1..9: note = Seed: VVGARGVGK (KRAS G12R)
VVGRRRVGN

SEQ ID NO: 45535 - protein, 9 aa, synthetic construct
  source 1..9: note = Seed: VVGARGVGK (KRAS G12R)
VVGRRRVGP

SEQ ID NO: 45536 - protein, 9 aa, synthetic construct
  source 1..9: note = Seed: VVGARGVGK (KRAS G12R)
VVGRRRVGQ

SEQ ID NO: 45537 - protein, 9 aa, synthetic construct
  source 1..9: note = Seed: VVGARGVGK (KRAS G12R)
VVGRRRVGR

SEQ ID NO: 45538 - protein, 9 aa, synthetic construct
  source 1..9: note = Seed: VVGARGVGK (KRAS G12R)
VVGRRRVGS

SEQ ID NO: 45539 - protein, 9 aa, synthetic construct
  source 1..9: note = Seed: VVGARGVGK (KRAS G12R)
VVGRRRVGT

SEQ ID NO: 45540 - protein, 9 aa, synthetic construct
  source 1..9: note = Seed: VVGARGVGK (KRAS G12R)
VVGRRRVGV

SEQ ID NO: 45541 - protein, 9 aa, synthetic construct
  source 1..9: note = Seed: VVGARGVGK (KRAS G12R)
VVGRRRVGW

SEQ ID NO: 45542 - protein, 9 aa, synthetic construct
  source 1..9: note = Seed: VVGARGVGK (KRAS G12R)
VVGRRRVGY

SEQ ID NO: 45543 - protein, 9 aa, synthetic construct
  source 1..9: note = Seed: VVGARGVGK (KRAS G12R)
VVGRRSVGF

SEQ ID NO: 45544 - protein, 9 aa, synthetic construct
  source 1..9: note = Seed: VVGARGVGK (KRAS G12R)
VVGRRSVGI

SEQ ID NO: 45545 - protein, 9 aa, synthetic construct
  source 1..9: note = Seed: VVGARGVGK (KRAS G12R)
VVGRRSVGK

SEQ ID NO: 45546 - protein, 9 aa, synthetic construct
  source 1..9: note = Seed: VVGARGVGK (KRAS G12R)
VVGRRSVGL

SEQ ID NO: 45547 - protein, 9 aa, synthetic construct
  source 1..9: note = Seed: VVGARGVGK (KRAS G12R)
VVGRRSVGM

SEQ ID NO: 45548 - protein, 9 aa, synthetic construct
  source 1..9: note = Seed: VVGARGVGK (KRAS G12R)
VVGRRSVGR

SEQ ID NO: 45549 - protein, 9 aa, synthetic construct
  source 1..9: note = Seed: VVGARGVGK (KRAS G12R)
VVGRRSVGV

SEQ ID NO: 45550 - protein, 9 aa, synthetic construct
  source 1..9: note = Seed: VVGARGVGK (KRAS G12R)
VVGRRSVGY

SEQ ID NO: 45551 - protein, 9 aa, synthetic construct
  source 1..9: note = Seed: VVGARGVGK (KRAS G12R)
VVGRRTVGK

SEQ ID NO: 45552 - protein, 9 aa, synthetic construct
  source 1..9: note = Seed: VVGARGVGK (KRAS G12R)
VVGRRTVGR

SEQ ID NO: 45553 - protein, 9 aa, synthetic construct
  source 1..9: note = Seed: VVGARGVGK (KRAS G12R)
VVGRRTVGY

SEQ ID NO: 45554 - protein, 9 aa, synthetic construct
  source 1..9: note = Seed: VVGARGVGK (KRAS G12R)
VVGRRVVGK

SEQ ID NO: 45555 - protein, 9 aa, synthetic construct
  source 1..9: note = Seed: VVGARGVGK (KRAS G12R)
VVGRRVVGR

SEQ ID NO: 45556 - protein, 9 aa, synthetic construct
  source 1..9: note = Seed: VVGARGVGK (KRAS G12R)
VVGRRVVGY

SEQ ID NO: 45557 - protein, 9 aa, synthetic construct
  source 1..9: note = Seed: VVGARGVGK (KRAS G12R)
VVGSRAVGA

SEQ ID NO: 45558 - protein, 9 aa, synthetic construct
  source 1..9: note = Seed: VVGARGVGK (KRAS G12R)
VVGSRAVGC

SEQ ID NO: 45559 - protein, 9 aa, synthetic construct
  source 1..9: note = Seed: VVGARGVGK (KRAS G12R)
VVGSRAVGF

SEQ ID NO: 45560 - protein, 9 aa, synthetic construct
  source 1..9: note = Seed: VVGARGVGK (KRAS G12R)
VVGSRAVGG

SEQ ID NO: 45561 - protein, 9 aa, synthetic construct
  source 1..9: note = Seed: VVGARGVGK (KRAS G12R)
VVGSRAVGH

SEQ ID NO: 45562 - protein, 9 aa, synthetic construct
  source 1..9: note = Seed: VVGARGVGK (KRAS G12R)
VVGSRAVGI

SEQ ID NO: 45563 - protein, 9 aa, synthetic construct
  source 1..9: note = Seed: VVGARGVGK (KRAS G12R)
VVGSRAVGL

SEQ ID NO: 45564 - protein, 9 aa, synthetic construct
  source 1..9: note = Seed: VVGARGVGK (KRAS G12R)
VVGSRAVGM

SEQ ID NO: 45565 - protein, 9 aa, synthetic construct
  source 1..9: note = Seed: VVGARGVGK (KRAS G12R)
VVGSRAVGN

SEQ ID NO: 45566 - protein, 9 aa, synthetic construct
  source 1..9: note = Seed: VVGARGVGK (KRAS G12R)
VVGSRAVGP

SEQ ID NO: 45567 - protein, 9 aa, synthetic construct
  source 1..9: note = Seed: VVGARGVGK (KRAS G12R)
VVGSRAVGR

SEQ ID NO: 45568 - protein, 9 aa, synthetic construct
  source 1..9: note = Seed: VVGARGVGK (KRAS G12R)
VVGSRAVGS

SEQ ID NO: 45569 - protein, 9 aa, synthetic construct
  source 1..9: note = Seed: VVGARGVGK (KRAS G12R)
VVGSRAVGT

SEQ ID NO: 45570 - protein, 9 aa, synthetic construct
  source 1..9: note = Seed: VVGARGVGK (KRAS G12R)
VVGSRAVGV

SEQ ID NO: 45571 - protein, 9 aa, synthetic construct
  source 1..9: note = Seed: VVGARGVGK (KRAS G12R)
VVGSRAVGY

SEQ ID NO: 45572 - protein, 9 aa, synthetic construct
  source 1..9: note = Seed: VVGARGVGK (KRAS G12R)
VVGSRGVGA

SEQ ID NO: 45573 - protein, 9 aa, synthetic construct
  source 1..9: note = Seed: VVGARGVGK (KRAS G12R)
VVGSRGVGI

SEQ ID NO: 45574 - protein, 9 aa, synthetic construct
  source 1..9: note = Seed: VVGARGVGK (KRAS G12R)
VVGSRGVGL

SEQ ID NO: 45575 - protein, 9 aa, synthetic construct
  source 1..9: note = Seed: VVGARGVGK (KRAS G12R)
VVGSRGVGM

SEQ ID NO: 45576 - protein, 9 aa, synthetic construct
  source 1..9: note = Seed: VVGARGVGK (KRAS G12R)
VVGSRGVGV

SEQ ID NO: 45577 - protein, 9 aa, synthetic construct
  source 1..9: note = Seed: VVGARGVGK (KRAS G12R)
VVGSRHVGR

SEQ ID NO: 45578 - protein, 9 aa, synthetic construct
  source 1..9: note = Seed: VVGARGVGK (KRAS G12R)
VVGSRIVGA

SEQ ID NO: 45579 - protein, 9 aa, synthetic construct
  source 1..9: note = Seed: VVGARGVGK (KRAS G12R)
VVGSRIVGG

SEQ ID NO: 45580 - protein, 9 aa, synthetic construct
  source 1..9: note = Seed: VVGARGVGK (KRAS G12R)
VVGSRIVGI

SEQ ID NO: 45581 - protein, 9 aa, synthetic construct
  source 1..9: note = Seed: VVGARGVGK (KRAS G12R)
VVGSRIVGN

SEQ ID NO: 45582 - protein, 9 aa, synthetic construct
  source 1..9: note = Seed: VVGARGVGK (KRAS G12R)
VVGSRIVGR

SEQ ID NO: 45583 - protein, 9 aa, synthetic construct
  source 1..9: note = Seed: VVGARGVGK (KRAS G12R)
VVGSRIVGS

SEQ ID NO: 45584 - protein, 9 aa, synthetic construct
  source 1..9: note = Seed: VVGARGVGK (KRAS G12R)
VVGSRIVGT

SEQ ID NO: 45585 - protein, 9 aa, synthetic construct
  source 1..9: note = Seed: VVGARGVGK (KRAS G12R)
VVGSRIVGV

SEQ ID NO: 45586 - protein, 9 aa, synthetic construct
  source 1..9: note = Seed: VVGARGVGK (KRAS G12R)
VVGSRKVGA

SEQ ID NO: 45587 - protein, 9 aa, synthetic construct
  source 1..9: note = Seed: VVGARGVGK (KRAS G12R)
VVGSRKVGF

SEQ ID NO: 45588 - protein, 9 aa, synthetic construct
  source 1..9: note = Seed: VVGARGVGK (KRAS G12R)
VVGSRKVGI

SEQ ID NO: 45589 - protein, 9 aa, synthetic construct
  source 1..9: note = Seed: VVGARGVGK (KRAS G12R)
VVGSRKVGK

SEQ ID NO: 45590 - protein, 9 aa, synthetic construct
  source 1..9: note = Seed: VVGARGVGK (KRAS G12R)
VVGSRKVGL

SEQ ID NO: 45591 - protein, 9 aa, synthetic construct
  source 1..9: note = Seed: VVGARGVGK (KRAS G12R)
VVGSRKVGM

SEQ ID NO: 45592 - protein, 9 aa, synthetic construct
  source 1..9: note = Seed: VVGARGVGK (KRAS G12R)
VVGSRKVGR

SEQ ID NO: 45593 - protein, 9 aa, synthetic construct
  source 1..9: note = Seed: VVGARGVGK (KRAS G12R)
VVGSRKVGS

SEQ ID NO: 45594 - protein, 9 aa, synthetic construct
  source 1..9: note = Seed: VVGARGVGK (KRAS G12R)
VVGSRKVGV

SEQ ID NO: 45595 - protein, 9 aa, synthetic construct
  source 1..9: note = Seed: VVGARGVGK (KRAS G12R)
VVGSRKVGY

SEQ ID NO: 45596 - protein, 9 aa, synthetic construct
  source 1..9: note = Seed: VVGARGVGK (KRAS G12R)
VVGSRLVGA

SEQ ID NO: 45597 - protein, 9 aa, synthetic construct
  source 1..9: note = Seed: VVGARGVGK (KRAS G12R)
VVGSRMVGA

SEQ ID NO: 45598 - protein, 9 aa, synthetic construct
  source 1..9: note = Seed: VVGARGVGK (KRAS G12R)
VVGSRMVGR

SEQ ID NO: 45599 - protein, 9 aa, synthetic construct
  source 1..9: note = Seed: VVGARGVGK (KRAS G12R)
VVGSRMVGS

SEQ ID NO: 45600 - protein, 9 aa, synthetic construct
  source 1..9: note = Seed: VVGARGVGK (KRAS G12R)
VVGSRNVGI

SEQ ID NO: 45601 - protein, 9 aa, synthetic construct
  source 1..9: note = Seed: VVGARGVGK (KRAS G12R)
VVGSRPVGA

SEQ ID NO: 45602 - protein, 9 aa, synthetic construct
  source 1..9: note = Seed: VVGARGVGK (KRAS G12R)
VVGSRPVGC

SEQ ID NO: 45603 - protein, 9 aa, synthetic construct
  source 1..9: note = Seed: VVGARGVGK (KRAS G12R)
VVGSRPVGF

SEQ ID NO: 45604 - protein, 9 aa, synthetic construct
  source 1..9: note = Seed: VVGARGVGK (KRAS G12R)
VVGSRPVGG

SEQ ID NO: 45605 - protein, 9 aa, synthetic construct
  source 1..9: note = Seed: VVGARGVGK (KRAS G12R)
VVGSRPVGI

SEQ ID NO: 45606 - protein, 9 aa, synthetic construct
  source 1..9: note = Seed: VVGARGVGK (KRAS G12R)
VVGSRPVGL

SEQ ID NO: 45607 - protein, 9 aa, synthetic construct
  source 1..9: note = Seed: VVGARGVGK (KRAS G12R)
VVGSRPVGM

SEQ ID NO: 45608 - protein, 9 aa, synthetic construct
  source 1..9: note = Seed: VVGARGVGK (KRAS G12R)
VVGSRPVGN

SEQ ID NO: 45609 - protein, 9 aa, synthetic construct
  source 1..9: note = Seed: VVGARGVGK (KRAS G12R)
VVGSRPVGR

SEQ ID NO: 45610 - protein, 9 aa, synthetic construct
  source 1..9: note = Seed: VVGARGVGK (KRAS G12R)
VVGSRPVGS

SEQ ID NO: 45611 - protein, 9 aa, synthetic construct
  source 1..9: note = Seed: VVGARGVGK (KRAS G12R)
VVGSRPVGT

SEQ ID NO: 45612 - protein, 9 aa, synthetic construct
  source 1..9: note = Seed: VVGARGVGK (KRAS G12R)
VVGSRPVGV

SEQ ID NO: 45613 - protein, 9 aa, synthetic construct
  source 1..9: note = Seed: VVGARGVGK (KRAS G12R)
VVGSRRVGA

SEQ ID NO: 45614 - protein, 9 aa, synthetic construct
  source 1..9: note = Seed: VVGARGVGK (KRAS G12R)
VVGSRRVGF

SEQ ID NO: 45615 - protein, 9 aa, synthetic construct
  source 1..9: note = Seed: VVGARGVGK (KRAS G12R)
VVGSRRVGH

SEQ ID NO: 45616 - protein, 9 aa, synthetic construct
  source 1..9: note = Seed: VVGARGVGK (KRAS G12R)
VVGSRRVGI

SEQ ID NO: 45617 - protein, 9 aa, synthetic construct
  source 1..9: note = Seed: VVGARGVGK (KRAS G12R)
VVGSRRVGK

SEQ ID NO: 45618 - protein, 9 aa, synthetic construct
  source 1..9: note = Seed: VVGARGVGK (KRAS G12R)
VVGSRRVGL

SEQ ID NO: 45619 - protein, 9 aa, synthetic construct
  source 1..9: note = Seed: VVGARGVGK (KRAS G12R)
VVGSRRVGM

SEQ ID NO: 45620 - protein, 9 aa, synthetic construct
  source 1..9: note = Seed: VVGARGVGK (KRAS G12R)
VVGSRRVGQ

SEQ ID NO: 45621 - protein, 9 aa, synthetic construct
  source 1..9: note = Seed: VVGARGVGK (KRAS G12R)
VVGSRRVGR

SEQ ID NO: 45622 - protein, 9 aa, synthetic construct
  source 1..9: note = Seed: VVGARGVGK (KRAS G12R)
VVGSRRVGS

SEQ ID NO: 45623 - protein, 9 aa, synthetic construct
  source 1..9: note = Seed: VVGARGVGK (KRAS G12R)
VVGSRRVGT

SEQ ID NO: 45624 - protein, 9 aa, synthetic construct
  source 1..9: note = Seed: VVGARGVGK (KRAS G12R)
VVGSRRVGV

SEQ ID NO: 45625 - protein, 9 aa, synthetic construct
  source 1..9: note = Seed: VVGARGVGK (KRAS G12R)
VVGSRRVGW

SEQ ID NO: 45626 - protein, 9 aa, synthetic construct
  source 1..9: note = Seed: VVGARGVGK (KRAS G12R)
VVGSRRVGY

SEQ ID NO: 45627 - protein, 9 aa, synthetic construct
  source 1..9: note = Seed: VVGARGVGK (KRAS G12R)
VVGSRSVGA

SEQ ID NO: 45628 - protein, 9 aa, synthetic construct
  source 1..9: note = Seed: VVGARGVGK (KRAS G12R)
VVGSRSVGF

SEQ ID NO: 45629 - protein, 9 aa, synthetic construct
  source 1..9: note = Seed: VVGARGVGK (KRAS G12R)
VVGSRSVGI

SEQ ID NO: 45630 - protein, 9 aa, synthetic construct
  source 1..9: note = Seed: VVGARGVGK (KRAS G12R)
VVGSRSVGL

SEQ ID NO: 45631 - protein, 9 aa, synthetic construct
  source 1..9: note = Seed: VVGARGVGK (KRAS G12R)
VVGSRSVGM

SEQ ID NO: 45632 - protein, 9 aa, synthetic construct
  source 1..9: note = Seed: VVGARGVGK (KRAS G12R)
VVGSRSVGR

SEQ ID NO: 45633 - protein, 9 aa, synthetic construct
  source 1..9: note = Seed: VVGARGVGK (KRAS G12R)
VVGSRSVGS

SEQ ID NO: 45634 - protein, 9 aa, synthetic construct
  source 1..9: note = Seed: VVGARGVGK (KRAS G12R)
VVGSRSVGT

SEQ ID NO: 45635 - protein, 9 aa, synthetic construct
  source 1..9: note = Seed: VVGARGVGK (KRAS G12R)
VVGSRSVGV

SEQ ID NO: 45636 - protein, 9 aa, synthetic construct
  source 1..9: note = Seed: VVGARGVGK (KRAS G12R)
VVGSRSVGY

SEQ ID NO: 45637 - protein, 9 aa, synthetic construct
  source 1..9: note = Seed: VVGARGVGK (KRAS G12R)
VVGSRTVGA

SEQ ID NO: 45638 - protein, 9 aa, synthetic construct
  source 1..9: note = Seed: VVGARGVGK (KRAS G12R)
VVGSRTVGG

SEQ ID NO: 45639 - protein, 9 aa, synthetic construct
  source 1..9: note = Seed: VVGARGVGK (KRAS G12R)
VVGSRTVGI

SEQ ID NO: 45640 - protein, 9 aa, synthetic construct
  source 1..9: note = Seed: VVGARGVGK (KRAS G12R)
VVGSRTVGL

SEQ ID NO: 45641 - protein, 9 aa, synthetic construct
  source 1..9: note = Seed: VVGARGVGK (KRAS G12R)
VVGSRTVGR

SEQ ID NO: 45642 - protein, 9 aa, synthetic construct
  source 1..9: note = Seed: VVGARGVGK (KRAS G12R)
VVGSRTVGS

SEQ ID NO: 45643 - protein, 9 aa, synthetic construct
  source 1..9: note = Seed: VVGARGVGK (KRAS G12R)
VVGSRTVGT

SEQ ID NO: 45644 - protein, 9 aa, synthetic construct
  source 1..9: note = Seed: VVGARGVGK (KRAS G12R)
VVGSRTVGV

SEQ ID NO: 45645 - protein, 9 aa, synthetic construct
  source 1..9: note = Seed: VVGARGVGK (KRAS G12R)
VVGSRVVGA

SEQ ID NO: 45646 - protein, 9 aa, synthetic construct
  source 1..9: note = Seed: VVGARGVGK (KRAS G12R)
VVGSRVVGG

SEQ ID NO: 45647 - protein, 9 aa, synthetic construct
  source 1..9: note = Seed: VVGARGVGK (KRAS G12R)
VVGSRVVGI

SEQ ID NO: 45648 - protein, 9 aa, synthetic construct
  source 1..9: note = Seed: VVGARGVGK (KRAS G12R)
VVGSRVVGL

SEQ ID NO: 45649 - protein, 9 aa, synthetic construct
  source 1..9: note = Seed: VVGARGVGK (KRAS G12R)
VVGSRVVGM

SEQ ID NO: 45650 - protein, 9 aa, synthetic construct
  source 1..9: note = Seed: VVGARGVGK (KRAS G12R)
VVGSRVVGN

SEQ ID NO: 45651 - protein, 9 aa, synthetic construct
  source 1..9: note = Seed: VVGARGVGK (KRAS G12R)
VVGSRVVGR

SEQ ID NO: 45652 - protein, 9 aa, synthetic construct
  source 1..9: note = Seed: VVGARGVGK (KRAS G12R)
VVGSRVVGS

SEQ ID NO: 45653 - protein, 9 aa, synthetic construct
  source 1..9: note = Seed: VVGARGVGK (KRAS G12R)
VVGSRVVGT

SEQ ID NO: 45654 - protein, 9 aa, synthetic construct
  source 1..9: note = Seed: VVGARGVGK (KRAS G12R)
VVGSRVVGV

SEQ ID NO: 45655 - protein, 9 aa, synthetic construct
  source 1..9: note = Seed: VVGARGVGK (KRAS G12R)
VVGTRAVGA

SEQ ID NO: 45656 - protein, 9 aa, synthetic construct
  source 1..9: note = Seed: VVGARGVGK (KRAS G12R)
VVGTRAVGF

SEQ ID NO: 45657 - protein, 9 aa, synthetic construct
  source 1..9: note = Seed: VVGARGVGK (KRAS G12R)
VVGTRAVGI

SEQ ID NO: 45658 - protein, 9 aa, synthetic construct
  source 1..9: note = Seed: VVGARGVGK (KRAS G12R)
VVGTRAVGL

SEQ ID NO: 45659 - protein, 9 aa, synthetic construct
  source 1..9: note = Seed: VVGARGVGK (KRAS G12R)
VVGTRAVGM

SEQ ID NO: 45660 - protein, 9 aa, synthetic construct
  source 1..9: note = Seed: VVGARGVGK (KRAS G12R)
VVGTRAVGR

SEQ ID NO: 45661 - protein, 9 aa, synthetic construct
  source 1..9: note = Seed: VVGARGVGK (KRAS G12R)
VVGTRAVGS

SEQ ID NO: 45662 - protein, 9 aa, synthetic construct
  source 1..9: note = Seed: VVGARGVGK (KRAS G12R)
VVGTRAVGT

SEQ ID NO: 45663 - protein, 9 aa, synthetic construct
  source 1..9: note = Seed: VVGARGVGK (KRAS G12R)
VVGTRAVGV

SEQ ID NO: 45664 - protein, 9 aa, synthetic construct
  source 1..9: note = Seed: VVGARGVGK (KRAS G12R)
VVGTRAVGY

SEQ ID NO: 45665 - protein, 9 aa, synthetic construct
  source 1..9: note = Seed: VVGARGVGK (KRAS G12R)
VVGTRGVGA

SEQ ID NO: 45666 - protein, 9 aa, synthetic construct
  source 1..9: note = Seed: VVGARGVGK (KRAS G12R)
VVGTRGVGF

SEQ ID NO: 45667 - protein, 9 aa, synthetic construct
  source 1..9: note = Seed: VVGARGVGK (KRAS G12R)
VVGTRGVGI

SEQ ID NO: 45668 - protein, 9 aa, synthetic construct
  source 1..9: note = Seed: VVGARGVGK (KRAS G12R)
VVGTRGVGL

SEQ ID NO: 45669 - protein, 9 aa, synthetic construct
  source 1..9: note = Seed: VVGARGVGK (KRAS G12R)
VVGTRGVGM

SEQ ID NO: 45670 - protein, 9 aa, synthetic construct
  source 1..9: note = Seed: VVGARGVGK (KRAS G12R)
VVGTRGVGV

SEQ ID NO: 45671 - protein, 9 aa, synthetic construct
  source 1..9: note = Seed: VVGARGVGK (KRAS G12R)
VVGTRIVGA

SEQ ID NO: 45672 - protein, 9 aa, synthetic construct
  source 1..9: note = Seed: VVGARGVGK (KRAS G12R)
VVGTRKVGF

SEQ ID NO: 45673 - protein, 9 aa, synthetic construct
  source 1..9: note = Seed: VVGARGVGK (KRAS G12R)
VVGTRKVGI

SEQ ID NO: 45674 - protein, 9 aa, synthetic construct
  source 1..9: note = Seed: VVGARGVGK (KRAS G12R)
VVGTRKVGK

SEQ ID NO: 45675 - protein, 9 aa, synthetic construct
  source 1..9: note = Seed: VVGARGVGK (KRAS G12R)
VVGTRKVGL

SEQ ID NO: 45676 - protein, 9 aa, synthetic construct
  source 1..9: note = Seed: VVGARGVGK (KRAS G12R)
VVGTRKVGM

SEQ ID NO: 45677 - protein, 9 aa, synthetic construct
  source 1..9: note = Seed: VVGARGVGK (KRAS G12R)
VVGTRKVGR

SEQ ID NO: 45678 - protein, 9 aa, synthetic construct
  source 1..9: note = Seed: VVGARGVGK (KRAS G12R)
VVGTRKVGV

SEQ ID NO: 45679 - protein, 9 aa, synthetic construct
  source 1..9: note = Seed: VVGARGVGK (KRAS G12R)
VVGTRKVGY

SEQ ID NO: 45680 - protein, 9 aa, synthetic construct
  source 1..9: note = Seed: VVGARGVGK (KRAS G12R)
VVGTRNVGI

SEQ ID NO: 45681 - protein, 9 aa, synthetic construct
  source 1..9: note = Seed: VVGARGVGK (KRAS G12R)
VVGTRNVGL

SEQ ID NO: 45682 - protein, 9 aa, synthetic construct
  source 1..9: note = Seed: VVGARGVGK (KRAS G12R)
VVGTRNVGV

SEQ ID NO: 45683 - protein, 9 aa, synthetic construct
  source 1..9: note = Seed: VVGARGVGK (KRAS G12R)
VVGTRPVGA

SEQ ID NO: 45684 - protein, 9 aa, synthetic construct
  source 1..9: note = Seed: VVGARGVGK (KRAS G12R)
VVGTRPVGF

SEQ ID NO: 45685 - protein, 9 aa, synthetic construct
  source 1..9: note = Seed: VVGARGVGK (KRAS G12R)
VVGTRPVGI

SEQ ID NO: 45686 - protein, 9 aa, synthetic construct
  source 1..9: note = Seed: VVGARGVGK (KRAS G12R)
VVGTRPVGL

SEQ ID NO: 45687 - protein, 9 aa, synthetic construct
  source 1..9: note = Seed: VVGARGVGK (KRAS G12R)
VVGTRPVGM

SEQ ID NO: 45688 - protein, 9 aa, synthetic construct
  source 1..9: note = Seed: VVGARGVGK (KRAS G12R)
VVGTRPVGS

SEQ ID NO: 45689 - protein, 9 aa, synthetic construct
  source 1..9: note = Seed: VVGARGVGK (KRAS G12R)
VVGTRPVGV

SEQ ID NO: 45690 - protein, 9 aa, synthetic construct
  source 1..9: note = Seed: VVGARGVGK (KRAS G12R)
VVGTRRVGA

SEQ ID NO: 45691 - protein, 9 aa, synthetic construct
  source 1..9: note = Seed: VVGARGVGK (KRAS G12R)
VVGTRRVGF

SEQ ID NO: 45692 - protein, 9 aa, synthetic construct
  source 1..9: note = Seed: VVGARGVGK (KRAS G12R)
VVGTRRVGI

SEQ ID NO: 45693 - protein, 9 aa, synthetic construct
  source 1..9: note = Seed: VVGARGVGK (KRAS G12R)
VVGTRRVGK

SEQ ID NO: 45694 - protein, 9 aa, synthetic construct
  source 1..9: note = Seed: VVGARGVGK (KRAS G12R)
VVGTRRVGL

SEQ ID NO: 45695 - protein, 9 aa, synthetic construct
  source 1..9: note = Seed: VVGARGVGK (KRAS G12R)
VVGTRRVGM

SEQ ID NO: 45696 - protein, 9 aa, synthetic construct
  source 1..9: note = Seed: VVGARGVGK (KRAS G12R)
VVGTRRVGR

SEQ ID NO: 45697 - protein, 9 aa, synthetic construct
  source 1..9: note = Seed: VVGARGVGK (KRAS G12R)
VVGTRRVGS

SEQ ID NO: 45698 - protein, 9 aa, synthetic construct
  source 1..9: note = Seed: VVGARGVGK (KRAS G12R)
VVGTRRVGT

SEQ ID NO: 45699 - protein, 9 aa, synthetic construct
  source 1..9: note = Seed: VVGARGVGK (KRAS G12R)
VVGTRRVGV

SEQ ID NO: 45700 - protein, 9 aa, synthetic construct
  source 1..9: note = Seed: VVGARGVGK (KRAS G12R)
VVGTRRVGY

SEQ ID NO: 45701 - protein, 9 aa, synthetic construct
  source 1..9: note = Seed: VVGARGVGK (KRAS G12R)
VVGTRSVGA

SEQ ID NO: 45702 - protein, 9 aa, synthetic construct
  source 1..9: note = Seed: VVGARGVGK (KRAS G12R)
VVGTRSVGF

SEQ ID NO: 45703 - protein, 9 aa, synthetic construct
  source 1..9: note = Seed: VVGARGVGK (KRAS G12R)
VVGTRSVGI

SEQ ID NO: 45704 - protein, 9 aa, synthetic construct
  source 1..9: note = Seed: VVGARGVGK (KRAS G12R)
VVGTRSVGL

SEQ ID NO: 45705 - protein, 9 aa, synthetic construct
  source 1..9: note = Seed: VVGARGVGK (KRAS G12R)
VVGTRSVGM

SEQ ID NO: 45706 - protein, 9 aa, synthetic construct
  source 1..9: note = Seed: VVGARGVGK (KRAS G12R)
VVGTRSVGV

SEQ ID NO: 45707 - protein, 9 aa, synthetic construct
  source 1..9: note = Seed: VVGARGVGK (KRAS G12R)
VVGTRSVGY

SEQ ID NO: 45708 - protein, 9 aa, synthetic construct
  source 1..9: note = Seed: VVGARGVGK (KRAS G12R)
VVGTRTVGA

SEQ ID NO: 45709 - protein, 9 aa, synthetic construct
  source 1..9: note = Seed: VVGARGVGK (KRAS G12R)
VVGTRTVGF

SEQ ID NO: 45710 - protein, 9 aa, synthetic construct
  source 1..9: note = Seed: VVGARGVGK (KRAS G12R)
VVGTRTVGI

SEQ ID NO: 45711 - protein, 9 aa, synthetic construct
  source 1..9: note = Seed: VVGARGVGK (KRAS G12R)
VVGTRTVGL

SEQ ID NO: 45712 - protein, 9 aa, synthetic construct
  source 1..9: note = Seed: VVGARGVGK (KRAS G12R)
VVGTRTVGM

SEQ ID NO: 45713 - protein, 9 aa, synthetic construct
  source 1..9: note = Seed: VVGARGVGK (KRAS G12R)
VVGTRTVGV

SEQ ID NO: 45714 - protein, 9 aa, synthetic construct
  source 1..9: note = Seed: VVGARGVGK (KRAS G12R)
VVGTRVVGA

SEQ ID NO: 45715 - protein, 9 aa, synthetic construct
  source 1..9: note = Seed: VVGARGVGK (KRAS G12R)
VVGTRVVGI

SEQ ID NO: 45716 - protein, 9 aa, synthetic construct
  source 1..9: note = Seed: VVGARGVGK (KRAS G12R)
VVGTRVVGL

SEQ ID NO: 45717 - protein, 9 aa, synthetic construct
  source 1..9: note = Seed: VVGARGVGK (KRAS G12R)
VVGTRVVGS

SEQ ID NO: 45718 - protein, 9 aa, synthetic construct
  source 1..9: note = Seed: VVGARGVGK (KRAS G12R)
VVGTRVVGT

SEQ ID NO: 45719 - protein, 9 aa, synthetic construct
  source 1..9: note = Seed: VVGARGVGK (KRAS G12R)
VVGTRVVGV

SEQ ID NO: 45720 - protein, 9 aa, synthetic construct
  source 1..9: note = Seed: VVGARGVGK (KRAS G12R)
VVGVRAVGA

SEQ ID NO: 45721 - protein, 9 aa, synthetic construct
  source 1..9: note = Seed: VVGARGVGK (KRAS G12R)
VVGVRAVGI

SEQ ID NO: 45722 - protein, 9 aa, synthetic construct
  source 1..9: note = Seed: VVGARGVGK (KRAS G12R)
VVGVRAVGL

SEQ ID NO: 45723 - protein, 9 aa, synthetic construct
  source 1..9: note = Seed: VVGARGVGK (KRAS G12R)
VVGVRAVGM

SEQ ID NO: 45724 - protein, 9 aa, synthetic construct
  source 1..9: note = Seed: VVGARGVGK (KRAS G12R)
VVGVRAVGR

SEQ ID NO: 45725 - protein, 9 aa, synthetic construct
  source 1..9: note = Seed: VVGARGVGK (KRAS G12R)
VVGVRAVGS

SEQ ID NO: 45726 - protein, 9 aa, synthetic construct
  source 1..9: note = Seed: VVGARGVGK (KRAS G12R)
VVGVRAVGT

SEQ ID NO: 45727 - protein, 9 aa, synthetic construct
  source 1..9: note = Seed: VVGARGVGK (KRAS G12R)
VVGVRAVGV

SEQ ID NO: 45728 - protein, 9 aa, synthetic construct
  source 1..9: note = Seed: VVGARGVGK (KRAS G12R)
VVGVRAVGY

SEQ ID NO: 45729 - protein, 9 aa, synthetic construct
  source 1..9: note = Seed: VVGARGVGK (KRAS G12R)
VVGVRGVGA

SEQ ID NO: 45730 - protein, 9 aa, synthetic construct
  source 1..9: note = Seed: VVGARGVGK (KRAS G12R)
VVGVRGVGI

SEQ ID NO: 45731 - protein, 9 aa, synthetic construct
  source 1..9: note = Seed: VVGARGVGK (KRAS G12R)
VVGVRGVGL

SEQ ID NO: 45732 - protein, 9 aa, synthetic construct
  source 1..9: note = Seed: VVGARGVGK (KRAS G12R)
VVGVRGVGM

SEQ ID NO: 45733 - protein, 9 aa, synthetic construct
  source 1..9: note = Seed: VVGARGVGK (KRAS G12R)
VVGVRGVGS

SEQ ID NO: 45734 - protein, 9 aa, synthetic construct
  source 1..9: note = Seed: VVGARGVGK (KRAS G12R)
VVGVRGVGT

SEQ ID NO: 45735 - protein, 9 aa, synthetic construct
  source 1..9: note = Seed: VVGARGVGK (KRAS G12R)
VVGVRGVGV

SEQ ID NO: 45736 - protein, 9 aa, synthetic construct
  source 1..9: note = Seed: VVGARGVGK (KRAS G12R)
VVGVRHVGR

SEQ ID NO: 45737 - protein, 9 aa, synthetic construct
  source 1..9: note = Seed: VVGARGVGK (KRAS G12R)
VVGVRKVGA

SEQ ID NO: 45738 - protein, 9 aa, synthetic construct
  source 1..9: note = Seed: VVGARGVGK (KRAS G12R)
VVGVRKVGF

SEQ ID NO: 45739 - protein, 9 aa, synthetic construct
  source 1..9: note = Seed: VVGARGVGK (KRAS G12R)
VVGVRKVGH

SEQ ID NO: 45740 - protein, 9 aa, synthetic construct
  source 1..9: note = Seed: VVGARGVGK (KRAS G12R)
VVGVRKVGI

SEQ ID NO: 45741 - protein, 9 aa, synthetic construct
  source 1..9: note = Seed: VVGARGVGK (KRAS G12R)
VVGVRKVGL

SEQ ID NO: 45742 - protein, 9 aa, synthetic construct
  source 1..9: note = Seed: VVGARGVGK (KRAS G12R)
VVGVRKVGM

SEQ ID NO: 45743 - protein, 9 aa, synthetic construct
  source 1..9: note = Seed: VVGARGVGK (KRAS G12R)
VVGVRKVGR

SEQ ID NO: 45744 - protein, 9 aa, synthetic construct
  source 1..9: note = Seed: VVGARGVGK (KRAS G12R)
VVGVRKVGS

SEQ ID NO: 45745 - protein, 9 aa, synthetic construct
  source 1..9: note = Seed: VVGARGVGK (KRAS G12R)
VVGVRKVGT

SEQ ID NO: 45746 - protein, 9 aa, synthetic construct
  source 1..9: note = Seed: VVGARGVGK (KRAS G12R)
VVGVRKVGV

SEQ ID NO: 45747 - protein, 9 aa, synthetic construct
  source 1..9: note = Seed: VVGARGVGK (KRAS G12R)
VVGVRKVGY

SEQ ID NO: 45748 - protein, 9 aa, synthetic construct
  source 1..9: note = Seed: VVGARGVGK (KRAS G12R)
VVGVRNVGL

SEQ ID NO: 45749 - protein, 9 aa, synthetic construct
  source 1..9: note = Seed: VVGARGVGK (KRAS G12R)
VVGVRNVGV

SEQ ID NO: 45750 - protein, 9 aa, synthetic construct
  source 1..9: note = Seed: VVGARGVGK (KRAS G12R)
VVGVRPVGA

SEQ ID NO: 45751 - protein, 9 aa, synthetic construct
  source 1..9: note = Seed: VVGARGVGK (KRAS G12R)
VVGVRPVGI

SEQ ID NO: 45752 - protein, 9 aa, synthetic construct
  source 1..9: note = Seed: VVGARGVGK (KRAS G12R)
VVGVRPVGL

SEQ ID NO: 45753 - protein, 9 aa, synthetic construct
  source 1..9: note = Seed: VVGARGVGK (KRAS G12R)
VVGVRPVGM

SEQ ID NO: 45754 - protein, 9 aa, synthetic construct
  source 1..9: note = Seed: VVGARGVGK (KRAS G12R)
VVGVRPVGT

SEQ ID NO: 45755 - protein, 9 aa, synthetic construct
  source 1..9: note = Seed: VVGARGVGK (KRAS G12R)
VVGVRPVGV

SEQ ID NO: 45756 - protein, 9 aa, synthetic construct
  source 1..9: note = Seed: VVGARGVGK (KRAS G12R)
VVGVRRVGA

SEQ ID NO: 45757 - protein, 9 aa, synthetic construct
  source 1..9: note = Seed: VVGARGVGK (KRAS G12R)
VVGVRRVGF

SEQ ID NO: 45758 - protein, 9 aa, synthetic construct
  source 1..9: note = Seed: VVGARGVGK (KRAS G12R)
VVGVRRVGG

SEQ ID NO: 45759 - protein, 9 aa, synthetic construct
  source 1..9: note = Seed: VVGARGVGK (KRAS G12R)
VVGVRRVGH

SEQ ID NO: 45760 - protein, 9 aa, synthetic construct
  source 1..9: note = Seed: VVGARGVGK (KRAS G12R)
VVGVRRVGI

SEQ ID NO: 45761 - protein, 9 aa, synthetic construct
  source 1..9: note = Seed: VVGARGVGK (KRAS G12R)
VVGVRRVGL

SEQ ID NO: 45762 - protein, 9 aa, synthetic construct
  source 1..9: note = Seed: VVGARGVGK (KRAS G12R)
VVGVRRVGM

SEQ ID NO: 45763 - protein, 9 aa, synthetic construct
  source 1..9: note = Seed: VVGARGVGK (KRAS G12R)
VVGVRRVGQ

SEQ ID NO: 45764 - protein, 9 aa, synthetic construct
  source 1..9: note = Seed: VVGARGVGK (KRAS G12R)
VVGVRRVGR

SEQ ID NO: 45765 - protein, 9 aa, synthetic construct
  source 1..9: note = Seed: VVGARGVGK (KRAS G12R)
VVGVRRVGS

SEQ ID NO: 45766 - protein, 9 aa, synthetic construct
  source 1..9: note = Seed: VVGARGVGK (KRAS G12R)
VVGVRRVGT

SEQ ID NO: 45767 - protein, 9 aa, synthetic construct
  source 1..9: note = Seed: VVGARGVGK (KRAS G12R)
VVGVRRVGV

SEQ ID NO: 45768 - protein, 9 aa, synthetic construct
  source 1..9: note = Seed: VVGARGVGK (KRAS G12R)
VVGVRRVGY

SEQ ID NO: 45769 - protein, 9 aa, synthetic construct
  source 1..9: note = Seed: VVGARGVGK (KRAS G12R)
VVGVRSVGF

SEQ ID NO: 45770 - protein, 9 aa, synthetic construct
  source 1..9: note = Seed: VVGARGVGK (KRAS G12R)
VVGVRSVGI

SEQ ID NO: 45771 - protein, 9 aa, synthetic construct
  source 1..9: note = Seed: VVGARGVGK (KRAS G12R)
VVGVRSVGL

SEQ ID NO: 45772 - protein, 9 aa, synthetic construct
  source 1..9: note = Seed: VVGARGVGK (KRAS G12R)
VVGVRSVGM

SEQ ID NO: 45773 - protein, 9 aa, synthetic construct
  source 1..9: note = Seed: VVGARGVGK (KRAS G12R)
VVGVRSVGV

SEQ ID NO: 45774 - protein, 9 aa, synthetic construct
  source 1..9: note = Seed: VVGARGVGK (KRAS G12R)
VVGVRTVGI

SEQ ID NO: 45775 - protein, 9 aa, synthetic construct
  source 1..9: note = Seed: VVGARGVGK (KRAS G12R)
VVGVRTVGV

SEQ ID NO: 45776 - protein, 9 aa, synthetic construct
  source 1..9: note = Seed: VVGARGVGK (KRAS G12R)
VVGWRAVGA

SEQ ID NO: 45777 - protein, 9 aa, synthetic construct
  source 1..9: note = Seed: VVGARGVGK (KRAS G12R)
VVGWRAVGI

SEQ ID NO: 45778 - protein, 9 aa, synthetic construct
  source 1..9: note = Seed: VVGARGVGK (KRAS G12R)
VVGWRAVGK

SEQ ID NO: 45779 - protein, 9 aa, synthetic construct
  source 1..9: note = Seed: VVGARGVGK (KRAS G12R)
VVGWRAVGL

SEQ ID NO: 45780 - protein, 9 aa, synthetic construct
  source 1..9: note = Seed: VVGARGVGK (KRAS G12R)
VVGWRAVGM

SEQ ID NO: 45781 - protein, 9 aa, synthetic construct
  source 1..9: note = Seed: VVGARGVGK (KRAS G12R)
VVGWRAVGR

SEQ ID NO: 45782 - protein, 9 aa, synthetic construct
  source 1..9: note = Seed: VVGARGVGK (KRAS G12R)
VVGWRHVGR

SEQ ID NO: 45783 - protein, 9 aa, synthetic construct
  source 1..9: note = Seed: VVGARGVGK (KRAS G12R)
VVGWRHVGY

SEQ ID NO: 45784 - protein, 9 aa, synthetic construct
  source 1..9: note = Seed: VVGARGVGK (KRAS G12R)
VVGWRIVGR

SEQ ID NO: 45785 - protein, 9 aa, synthetic construct
  source 1..9: note = Seed: VVGARGVGK (KRAS G12R)
VVGWRKVGA

SEQ ID NO: 45786 - protein, 9 aa, synthetic construct
  source 1..9: note = Seed: VVGARGVGK (KRAS G12R)
VVGWRKVGF

SEQ ID NO: 45787 - protein, 9 aa, synthetic construct
  source 1..9: note = Seed: VVGARGVGK (KRAS G12R)
VVGWRKVGH

SEQ ID NO: 45788 - protein, 9 aa, synthetic construct
  source 1..9: note = Seed: VVGARGVGK (KRAS G12R)
VVGWRKVGI

SEQ ID NO: 45789 - protein, 9 aa, synthetic construct
  source 1..9: note = Seed: VVGARGVGK (KRAS G12R)
VVGWRKVGK

SEQ ID NO: 45790 - protein, 9 aa, synthetic construct
  source 1..9: note = Seed: VVGARGVGK (KRAS G12R)
VVGWRKVGL

SEQ ID NO: 45791 - protein, 9 aa, synthetic construct
  source 1..9: note = Seed: VVGARGVGK (KRAS G12R)
VVGWRKVGM

SEQ ID NO: 45792 - protein, 9 aa, synthetic construct
  source 1..9: note = Seed: VVGARGVGK (KRAS G12R)
VVGWRKVGR

SEQ ID NO: 45793 - protein, 9 aa, synthetic construct
  source 1..9: note = Seed: VVGARGVGK (KRAS G12R)
VVGWRKVGS

SEQ ID NO: 45794 - protein, 9 aa, synthetic construct
  source 1..9: note = Seed: VVGARGVGK (KRAS G12R)
VVGWRKVGV

SEQ ID NO: 45795 - protein, 9 aa, synthetic construct
  source 1..9: note = Seed: VVGARGVGK (KRAS G12R)
VVGWRKVGY

SEQ ID NO: 45796 - protein, 9 aa, synthetic construct
  source 1..9: note = Seed: VVGARGVGK (KRAS G12R)
VVGWRLVGR

SEQ ID NO: 45797 - protein, 9 aa, synthetic construct
  source 1..9: note = Seed: VVGARGVGK (KRAS G12R)
VVGWRNVGR

SEQ ID NO: 45798 - protein, 9 aa, synthetic construct
  source 1..9: note = Seed: VVGARGVGK (KRAS G12R)
VVGWRPVGR

SEQ ID NO: 45799 - protein, 9 aa, synthetic construct
  source 1..9: note = Seed: VVGARGVGK (KRAS G12R)
VVGWRQVGR

SEQ ID NO: 45800 - protein, 9 aa, synthetic construct
  source 1..9: note = Seed: VVGARGVGK (KRAS G12R)
VVGWRRVGA

SEQ ID NO: 45801 - protein, 9 aa, synthetic construct
  source 1..9: note = Seed: VVGARGVGK (KRAS G12R)
VVGWRRVGF

SEQ ID NO: 45802 - protein, 9 aa, synthetic construct
  source 1..9: note = Seed: VVGARGVGK (KRAS G12R)
VVGWRRVGH

SEQ ID NO: 45803 - protein, 9 aa, synthetic construct
  source 1..9: note = Seed: VVGARGVGK (KRAS G12R)
VVGWRRVGI

SEQ ID NO: 45804 - protein, 9 aa, synthetic construct
  source 1..9: note = Seed: VVGARGVGK (KRAS G12R)
VVGWRRVGK

SEQ ID NO: 45805 - protein, 9 aa, synthetic construct
  source 1..9: note = Seed: VVGARGVGK (KRAS G12R)
VVGWRRVGL

SEQ ID NO: 45806 - protein, 9 aa, synthetic construct
  source 1..9: note = Seed: VVGARGVGK (KRAS G12R)
VVGWRRVGM

SEQ ID NO: 45807 - protein, 9 aa, synthetic construct
  source 1..9: note = Seed: VVGARGVGK (KRAS G12R)
VVGWRRVGQ

SEQ ID NO: 45808 - protein, 9 aa, synthetic construct
  source 1..9: note = Seed: VVGARGVGK (KRAS G12R)
VVGWRRVGR

SEQ ID NO: 45809 - protein, 9 aa, synthetic construct
  source 1..9: note = Seed: VVGARGVGK (KRAS G12R)
VVGWRRVGS

SEQ ID NO: 45810 - protein, 9 aa, synthetic construct
  source 1..9: note = Seed: VVGARGVGK (KRAS G12R)
VVGWRRVGT

SEQ ID NO: 45811 - protein, 9 aa, synthetic construct
  source 1..9: note = Seed: VVGARGVGK (KRAS G12R)
VVGWRRVGV

SEQ ID NO: 45812 - protein, 9 aa, synthetic construct
  source 1..9: note = Seed: VVGARGVGK (KRAS G12R)
VVGWRRVGY

SEQ ID NO: 45813 - protein, 9 aa, synthetic construct
  source 1..9: note = Seed: VVGARGVGK (KRAS G12R)
VVGWRSVGR

SEQ ID NO: 45814 - protein, 9 aa, synthetic construct
  source 1..9: note = Seed: VVGARGVGK (KRAS G12R)
VVGWRTVGR

SEQ ID NO: 45815 - protein, 9 aa, synthetic construct
  source 1..9: note = Seed: VVGARGVGK (KRAS G12R)
VVGWRVVGR

SEQ ID NO: 45816 - protein, 9 aa, synthetic construct
  source 1..9: note = Seed: VVGARGVGK (KRAS G12R)
VVGYRAVGR

SEQ ID NO: 45817 - protein, 9 aa, synthetic construct
  source 1..9: note = Seed: VVGARGVGK (KRAS G12R)
VVGYRHVGR

SEQ ID NO: 45818 - protein, 9 aa, synthetic construct
  source 1..9: note = Seed: VVGARGVGK (KRAS G12R)
VVGYRKVGH

SEQ ID NO: 45819 - protein, 9 aa, synthetic construct
  source 1..9: note = Seed: VVGARGVGK (KRAS G12R)
VVGYRKVGK

SEQ ID NO: 45820 - protein, 9 aa, synthetic construct
  source 1..9: note = Seed: VVGARGVGK (KRAS G12R)
VVGYRKVGL

SEQ ID NO: 45821 - protein, 9 aa, synthetic construct
  source 1..9: note = Seed: VVGARGVGK (KRAS G12R)
VVGYRKVGM

SEQ ID NO: 45822 - protein, 9 aa, synthetic construct
  source 1..9: note = Seed: VVGARGVGK (KRAS G12R)
VVGYRKVGR

SEQ ID NO: 45823 - protein, 9 aa, synthetic construct
  source 1..9: note = Seed: VVGARGVGK (KRAS G12R)
VVGYRKVGY

SEQ ID NO: 45824 - protein, 9 aa, synthetic construct
  source 1..9: note = Seed: VVGARGVGK (KRAS G12R)
VVGYRNVGR

SEQ ID NO: 45825 - protein, 9 aa, synthetic construct
  source 1..9: note = Seed: VVGARGVGK (KRAS G12R)
VVGYRPVGR

SEQ ID NO: 45826 - protein, 9 aa, synthetic construct
  source 1..9: note = Seed: VVGARGVGK (KRAS G12R)
VVGYRRVGA

SEQ ID NO: 45827 - protein, 9 aa, synthetic construct
  source 1..9: note = Seed: VVGARGVGK (KRAS G12R)
VVGYRRVGF

SEQ ID NO: 45828 - protein, 9 aa, synthetic construct
  source 1..9: note = Seed: VVGARGVGK (KRAS G12R)
VVGYRRVGH

SEQ ID NO: 45829 - protein, 9 aa, synthetic construct
  source 1..9: note = Seed: VVGARGVGK (KRAS G12R)
VVGYRRVGI

SEQ ID NO: 45830 - protein, 9 aa, synthetic construct
  source 1..9: note = Seed: VVGARGVGK (KRAS G12R)
VVGYRRVGK

SEQ ID NO: 45831 - protein, 9 aa, synthetic construct
  source 1..9: note = Seed: VVGARGVGK (KRAS G12R)
VVGYRRVGL

SEQ ID NO: 45832 - protein, 9 aa, synthetic construct
  source 1..9: note = Seed: VVGARGVGK (KRAS G12R)
VVGYRRVGM

SEQ ID NO: 45833 - protein, 9 aa, synthetic construct
  source 1..9: note = Seed: VVGARGVGK (KRAS G12R)
VVGYRRVGR

SEQ ID NO: 45834 - protein, 9 aa, synthetic construct
  source 1..9: note = Seed: VVGARGVGK (KRAS G12R)
VVGYRRVGS

SEQ ID NO: 45835 - protein, 9 aa, synthetic construct
  source 1..9: note = Seed: VVGARGVGK (KRAS G12R)
VVGYRRVGV

SEQ ID NO: 45836 - protein, 9 aa, synthetic construct
  source 1..9: note = Seed: VVGARGVGK (KRAS G12R)
VVGYRRVGY

SEQ ID NO: 45837 - protein, 9 aa, synthetic construct
  source 1..9: note = Seed: VVGARGVGK (KRAS G12R)
VVGYRSVGR

SEQ ID NO: 45838 - protein, 9 aa, synthetic construct
  source 1..9: note = Seed: VVGARGVGK (KRAS G12R)
VVGYRTVGR

SEQ ID NO: 45839 - protein, 9 aa, synthetic construct
  source 1..9: note = Seed: VVGARGVGK (KRAS G12R)
VVGYRVVGR

SEQ ID NO: 45840 - protein, 9 aa, synthetic construct
  source 1..9: note = Seed: VVGARGVGK (KRAS G12R)
WVGARAVGA

SEQ ID NO: 45841 - protein, 9 aa, synthetic construct
  source 1..9: note = Seed: VVGARGVGK (KRAS G12R)
WVGARAVGC

SEQ ID NO: 45842 - protein, 9 aa, synthetic construct
  source 1..9: note = Seed: VVGARGVGK (KRAS G12R)
WVGARAVGD

SEQ ID NO: 45843 - protein, 9 aa, synthetic construct
  source 1..9: note = Seed: VVGARGVGK (KRAS G12R)
WVGARAVGE

SEQ ID NO: 45844 - protein, 9 aa, synthetic construct
  source 1..9: note = Seed: VVGARGVGK (KRAS G12R)
WVGARAVGF

SEQ ID NO: 45845 - protein, 9 aa, synthetic construct
  source 1..9: note = Seed: VVGARGVGK (KRAS G12R)
WVGARAVGG

SEQ ID NO: 45846 - protein, 9 aa, synthetic construct
  source 1..9: note = Seed: VVGARGVGK (KRAS G12R)
WVGARAVGH

SEQ ID NO: 45847 - protein, 9 aa, synthetic construct
  source 1..9: note = Seed: VVGARGVGK (KRAS G12R)
WVGARAVGI

SEQ ID NO: 45848 - protein, 9 aa, synthetic construct
  source 1..9: note = Seed: VVGARGVGK (KRAS G12R)
WVGARAVGK

SEQ ID NO: 45849 - protein, 9 aa, synthetic construct
  source 1..9: note = Seed: VVGARGVGK (KRAS G12R)
WVGARAVGL

SEQ ID NO: 45850 - protein, 9 aa, synthetic construct
  source 1..9: note = Seed: VVGARGVGK (KRAS G12R)
WVGARAVGM

SEQ ID NO: 45851 - protein, 9 aa, synthetic construct
  source 1..9: note = Seed: VVGARGVGK (KRAS G12R)
WVGARAVGN

SEQ ID NO: 45852 - protein, 9 aa, synthetic construct
  source 1..9: note = Seed: VVGARGVGK (KRAS G12R)
WVGARAVGP

SEQ ID NO: 45853 - protein, 9 aa, synthetic construct
  source 1..9: note = Seed: VVGARGVGK (KRAS G12R)
WVGARAVGQ

SEQ ID NO: 45854 - protein, 9 aa, synthetic construct
  source 1..9: note = Seed: VVGARGVGK (KRAS G12R)
WVGARAVGR

SEQ ID NO: 45855 - protein, 9 aa, synthetic construct
  source 1..9: note = Seed: VVGARGVGK (KRAS G12R)
WVGARAVGS

SEQ ID NO: 45856 - protein, 9 aa, synthetic construct
  source 1..9: note = Seed: VVGARGVGK (KRAS G12R)
WVGARAVGT

SEQ ID NO: 45857 - protein, 9 aa, synthetic construct
  source 1..9: note = Seed: VVGARGVGK (KRAS G12R)
WVGARAVGV

SEQ ID NO: 45858 - protein, 9 aa, synthetic construct
  source 1..9: note = Seed: VVGARGVGK (KRAS G12R)
WVGARAVGW

SEQ ID NO: 45859 - protein, 9 aa, synthetic construct
  source 1..9: note = Seed: VVGARGVGK (KRAS G12R)
WVGARAVGY

SEQ ID NO: 45860 - protein, 9 aa, synthetic construct
  source 1..9: note = Seed: VVGARGVGK (KRAS G12R)
WVGARGVGA

SEQ ID NO: 45861 - protein, 9 aa, synthetic construct
  source 1..9: note = Seed: VVGARGVGK (KRAS G12R)
WVGARGVGC

SEQ ID NO: 45862 - protein, 9 aa, synthetic construct
  source 1..9: note = Seed: VVGARGVGK (KRAS G12R)
WVGARGVGF

SEQ ID NO: 45863 - protein, 9 aa, synthetic construct
  source 1..9: note = Seed: VVGARGVGK (KRAS G12R)
WVGARGVGG

SEQ ID NO: 45864 - protein, 9 aa, synthetic construct
  source 1..9: note = Seed: VVGARGVGK (KRAS G12R)
WVGARGVGH

SEQ ID NO: 45865 - protein, 9 aa, synthetic construct
  source 1..9: note = Seed: VVGARGVGK (KRAS G12R)
WVGARGVGI

SEQ ID NO: 45866 - protein, 9 aa, synthetic construct
  source 1..9: note = Seed: VVGARGVGK (KRAS G12R)
WVGARGVGL

SEQ ID NO: 45867 - protein, 9 aa, synthetic construct
  source 1..9: note = Seed: VVGARGVGK (KRAS G12R)
WVGARGVGM

SEQ ID NO: 45868 - protein, 9 aa, synthetic construct
  source 1..9: note = Seed: VVGARGVGK (KRAS G12R)
WVGARGVGN

SEQ ID NO: 45869 - protein, 9 aa, synthetic construct
  source 1..9: note = Seed: VVGARGVGK (KRAS G12R)
WVGARGVGQ

SEQ ID NO: 45870 - protein, 9 aa, synthetic construct
  source 1..9: note = Seed: VVGARGVGK (KRAS G12R)
WVGARGVGR

SEQ ID NO: 45871 - protein, 9 aa, synthetic construct
  source 1..9: note = Seed: VVGARGVGK (KRAS G12R)
WVGARGVGS

SEQ ID NO: 45872 - protein, 9 aa, synthetic construct
  source 1..9: note = Seed: VVGARGVGK (KRAS G12R)
WVGARGVGT

SEQ ID NO: 45873 - protein, 9 aa, synthetic construct
  source 1..9: note = Seed: VVGARGVGK (KRAS G12R)
WVGARGVGV

SEQ ID NO: 45874 - protein, 9 aa, synthetic construct
  source 1..9: note = Seed: VVGARGVGK (KRAS G12R)
WVGARGVGY

SEQ ID NO: 45875 - protein, 9 aa, synthetic construct
  source 1..9: note = Seed: VVGARGVGK (KRAS G12R)
WVGARHVGA

SEQ ID NO: 45876 - protein, 9 aa, synthetic construct
  source 1..9: note = Seed: VVGARGVGK (KRAS G12R)
WVGARHVGI

SEQ ID NO: 45877 - protein, 9 aa, synthetic construct
  source 1..9: note = Seed: VVGARGVGK (KRAS G12R)
WVGARHVGL

SEQ ID NO: 45878 - protein, 9 aa, synthetic construct
  source 1..9: note = Seed: VVGARGVGK (KRAS G12R)
WVGARHVGM

SEQ ID NO: 45879 - protein, 9 aa, synthetic construct
  source 1..9: note = Seed: VVGARGVGK (KRAS G12R)
WVGARHVGS

SEQ ID NO: 45880 - protein, 9 aa, synthetic construct
  source 1..9: note = Seed: VVGARGVGK (KRAS G12R)
WVGARHVGV

SEQ ID NO: 45881 - protein, 9 aa, synthetic construct
  source 1..9: note = Seed: VVGARGVGK (KRAS G12R)
WVGARIVGA

SEQ ID NO: 45882 - protein, 9 aa, synthetic construct
  source 1..9: note = Seed: VVGARGVGK (KRAS G12R)
WVGARIVGG

SEQ ID NO: 45883 - protein, 9 aa, synthetic construct
  source 1..9: note = Seed: VVGARGVGK (KRAS G12R)
WVGARIVGH

SEQ ID NO: 45884 - protein, 9 aa, synthetic construct
  source 1..9: note = Seed: VVGARGVGK (KRAS G12R)
WVGARIVGI

SEQ ID NO: 45885 - protein, 9 aa, synthetic construct
  source 1..9: note = Seed: VVGARGVGK (KRAS G12R)
WVGARIVGK

SEQ ID NO: 45886 - protein, 9 aa, synthetic construct
  source 1..9: note = Seed: VVGARGVGK (KRAS G12R)
WVGARIVGL

SEQ ID NO: 45887 - protein, 9 aa, synthetic construct
  source 1..9: note = Seed: VVGARGVGK (KRAS G12R)
WVGARIVGM

SEQ ID NO: 45888 - protein, 9 aa, synthetic construct
  source 1..9: note = Seed: VVGARGVGK (KRAS G12R)
WVGARIVGN

SEQ ID NO: 45889 - protein, 9 aa, synthetic construct
  source 1..9: note = Seed: VVGARGVGK (KRAS G12R)
WVGARIVGQ

SEQ ID NO: 45890 - protein, 9 aa, synthetic construct
  source 1..9: note = Seed: VVGARGVGK (KRAS G12R)
WVGARIVGR

SEQ ID NO: 45891 - protein, 9 aa, synthetic construct
  source 1..9: note = Seed: VVGARGVGK (KRAS G12R)
WVGARIVGS

SEQ ID NO: 45892 - protein, 9 aa, synthetic construct
  source 1..9: note = Seed: VVGARGVGK (KRAS G12R)
WVGARIVGT

SEQ ID NO: 45893 - protein, 9 aa, synthetic construct
  source 1..9: note = Seed: VVGARGVGK (KRAS G12R)
WVGARIVGV

SEQ ID NO: 45894 - protein, 9 aa, synthetic construct
  source 1..9: note = Seed: VVGARGVGK (KRAS G12R)
WVGARKVGA

SEQ ID NO: 45895 - protein, 9 aa, synthetic construct
  source 1..9: note = Seed: VVGARGVGK (KRAS G12R)
WVGARKVGI

SEQ ID NO: 45896 - protein, 9 aa, synthetic construct
  source 1..9: note = Seed: VVGARGVGK (KRAS G12R)
WVGARKVGL

SEQ ID NO: 45897 - protein, 9 aa, synthetic construct
  source 1..9: note = Seed: VVGARGVGK (KRAS G12R)
WVGARKVGM

SEQ ID NO: 45898 - protein, 9 aa, synthetic construct
  source 1..9: note = Seed: VVGARGVGK (KRAS G12R)
WVGARKVGS

SEQ ID NO: 45899 - protein, 9 aa, synthetic construct
  source 1..9: note = Seed: VVGARGVGK (KRAS G12R)
WVGARKVGV

SEQ ID NO: 45900 - protein, 9 aa, synthetic construct
  source 1..9: note = Seed: VVGARGVGK (KRAS G12R)
WVGARLVGA

SEQ ID NO: 45901 - protein, 9 aa, synthetic construct
  source 1..9: note = Seed: VVGARGVGK (KRAS G12R)
WVGARLVGG

SEQ ID NO: 45902 - protein, 9 aa, synthetic construct
  source 1..9: note = Seed: VVGARGVGK (KRAS G12R)
WVGARLVGI

SEQ ID NO: 45903 - protein, 9 aa, synthetic construct
  source 1..9: note = Seed: VVGARGVGK (KRAS G12R)
WVGARLVGL

SEQ ID NO: 45904 - protein, 9 aa, synthetic construct
  source 1..9: note = Seed: VVGARGVGK (KRAS G12R)
WVGARLVGM

SEQ ID NO: 45905 - protein, 9 aa, synthetic construct
  source 1..9: note = Seed: VVGARGVGK (KRAS G12R)
WVGARLVGN

SEQ ID NO: 45906 - protein, 9 aa, synthetic construct
  source 1..9: note = Seed: VVGARGVGK (KRAS G12R)
WVGARLVGS

SEQ ID NO: 45907 - protein, 9 aa, synthetic construct
  source 1..9: note = Seed: VVGARGVGK (KRAS G12R)
WVGARLVGT

SEQ ID NO: 45908 - protein, 9 aa, synthetic construct
  source 1..9: note = Seed: VVGARGVGK (KRAS G12R)
WVGARLVGV

SEQ ID NO: 45909 - protein, 9 aa, synthetic construct
  source 1..9: note = Seed: VVGARGVGK (KRAS G12R)
WVGARMVGA

SEQ ID NO: 45910 - protein, 9 aa, synthetic construct
  source 1..9: note = Seed: VVGARGVGK (KRAS G12R)
WVGARMVGG

SEQ ID NO: 45911 - protein, 9 aa, synthetic construct
  source 1..9: note = Seed: VVGARGVGK (KRAS G12R)
WVGARMVGI

SEQ ID NO: 45912 - protein, 9 aa, synthetic construct
  source 1..9: note = Seed: VVGARGVGK (KRAS G12R)
WVGARMVGL

SEQ ID NO: 45913 - protein, 9 aa, synthetic construct
  source 1..9: note = Seed: VVGARGVGK (KRAS G12R)
WVGARMVGM

SEQ ID NO: 45914 - protein, 9 aa, synthetic construct
  source 1..9: note = Seed: VVGARGVGK (KRAS G12R)
WVGARMVGN

SEQ ID NO: 45915 - protein, 9 aa, synthetic construct
  source 1..9: note = Seed: VVGARGVGK (KRAS G12R)
WVGARMVGS

SEQ ID NO: 45916 - protein, 9 aa, synthetic construct
  source 1..9: note = Seed: VVGARGVGK (KRAS G12R)
WVGARMVGT

SEQ ID NO: 45917 - protein, 9 aa, synthetic construct
  source 1..9: note = Seed: VVGARGVGK (KRAS G12R)
WVGARMVGV

SEQ ID NO: 45918 - protein, 9 aa, synthetic construct
  source 1..9: note = Seed: VVGARGVGK (KRAS G12R)
WVGARNVGA

SEQ ID NO: 45919 - protein, 9 aa, synthetic construct
  source 1..9: note = Seed: VVGARGVGK (KRAS G12R)
WVGARNVGG

SEQ ID NO: 45920 - protein, 9 aa, synthetic construct
  source 1..9: note = Seed: VVGARGVGK (KRAS G12R)
WVGARNVGI

SEQ ID NO: 45921 - protein, 9 aa, synthetic construct
  source 1..9: note = Seed: VVGARGVGK (KRAS G12R)
WVGARNVGL

SEQ ID NO: 45922 - protein, 9 aa, synthetic construct
  source 1..9: note = Seed: VVGARGVGK (KRAS G12R)
WVGARNVGM

SEQ ID NO: 45923 - protein, 9 aa, synthetic construct
  source 1..9: note = Seed: VVGARGVGK (KRAS G12R)
WVGARNVGN

SEQ ID NO: 45924 - protein, 9 aa, synthetic construct
  source 1..9: note = Seed: VVGARGVGK (KRAS G12R)
WVGARNVGS

SEQ ID NO: 45925 - protein, 9 aa, synthetic construct
  source 1..9: note = Seed: VVGARGVGK (KRAS G12R)
WVGARNVGT

SEQ ID NO: 45926 - protein, 9 aa, synthetic construct
  source 1..9: note = Seed: VVGARGVGK (KRAS G12R)
WVGARNVGV

SEQ ID NO: 45927 - protein, 9 aa, synthetic construct
  source 1..9: note = Seed: VVGARGVGK (KRAS G12R)
WVGARPVGA

SEQ ID NO: 45928 - protein, 9 aa, synthetic construct
  source 1..9: note = Seed: VVGARGVGK (KRAS G12R)
WVGARPVGC

SEQ ID NO: 45929 - protein, 9 aa, synthetic construct
  source 1..9: note = Seed: VVGARGVGK (KRAS G12R)
WVGARPVGF

SEQ ID NO: 45930 - protein, 9 aa, synthetic construct
  source 1..9: note = Seed: VVGARGVGK (KRAS G12R)
WVGARPVGG

SEQ ID NO: 45931 - protein, 9 aa, synthetic construct
  source 1..9: note = Seed: VVGARGVGK (KRAS G12R)
WVGARPVGH

SEQ ID NO: 45932 - protein, 9 aa, synthetic construct
  source 1..9: note = Seed: VVGARGVGK (KRAS G12R)
WVGARPVGI

SEQ ID NO: 45933 - protein, 9 aa, synthetic construct
  source 1..9: note = Seed: VVGARGVGK (KRAS G12R)
WVGARPVGK

SEQ ID NO: 45934 - protein, 9 aa, synthetic construct
  source 1..9: note = Seed: VVGARGVGK (KRAS G12R)
WVGARPVGL

SEQ ID NO: 45935 - protein, 9 aa, synthetic construct
  source 1..9: note = Seed: VVGARGVGK (KRAS G12R)
WVGARPVGM

SEQ ID NO: 45936 - protein, 9 aa, synthetic construct
  source 1..9: note = Seed: VVGARGVGK (KRAS G12R)
WVGARPVGN

SEQ ID NO: 45937 - protein, 9 aa, synthetic construct
  source 1..9: note = Seed: VVGARGVGK (KRAS G12R)
WVGARPVGP

SEQ ID NO: 45938 - protein, 9 aa, synthetic construct
  source 1..9: note = Seed: VVGARGVGK (KRAS G12R)
WVGARPVGQ

SEQ ID NO: 45939 - protein, 9 aa, synthetic construct
  source 1..9: note = Seed: VVGARGVGK (KRAS G12R)
WVGARPVGR

SEQ ID NO: 45940 - protein, 9 aa, synthetic construct
  source 1..9: note = Seed: VVGARGVGK (KRAS G12R)
WVGARPVGS

SEQ ID NO: 45941 - protein, 9 aa, synthetic construct
  source 1..9: note = Seed: VVGARGVGK (KRAS G12R)
WVGARPVGT

SEQ ID NO: 45942 - protein, 9 aa, synthetic construct
  source 1..9: note = Seed: VVGARGVGK (KRAS G12R)
WVGARPVGV

SEQ ID NO: 45943 - protein, 9 aa, synthetic construct
  source 1..9: note = Seed: VVGARGVGK (KRAS G12R)
WVGARPVGW

SEQ ID NO: 45944 - protein, 9 aa, synthetic construct
  source 1..9: note = Seed: VVGARGVGK (KRAS G12R)
WVGARPVGY

SEQ ID NO: 45945 - protein, 9 aa, synthetic construct
  source 1..9: note = Seed: VVGARGVGK (KRAS G12R)
WVGARQVGA

SEQ ID NO: 45946 - protein, 9 aa, synthetic construct
  source 1..9: note = Seed: VVGARGVGK (KRAS G12R)
WVGARQVGI

SEQ ID NO: 45947 - protein, 9 aa, synthetic construct
  source 1..9: note = Seed: VVGARGVGK (KRAS G12R)
WVGARQVGL

SEQ ID NO: 45948 - protein, 9 aa, synthetic construct
  source 1..9: note = Seed: VVGARGVGK (KRAS G12R)
WVGARQVGM

SEQ ID NO: 45949 - protein, 9 aa, synthetic construct
  source 1..9: note = Seed: VVGARGVGK (KRAS G12R)
WVGARQVGV

SEQ ID NO: 45950 - protein, 9 aa, synthetic construct
  source 1..9: note = Seed: VVGARGVGK (KRAS G12R)
WVGARRVGA

SEQ ID NO: 45951 - protein, 9 aa, synthetic construct
  source 1..9: note = Seed: VVGARGVGK (KRAS G12R)
WVGARRVGI

SEQ ID NO: 45952 - protein, 9 aa, synthetic construct
  source 1..9: note = Seed: VVGARGVGK (KRAS G12R)
WVGARRVGK

SEQ ID NO: 45953 - protein, 9 aa, synthetic construct
  source 1..9: note = Seed: VVGARGVGK (KRAS G12R)
WVGARRVGL

SEQ ID NO: 45954 - protein, 9 aa, synthetic construct
  source 1..9: note = Seed: VVGARGVGK (KRAS G12R)
WVGARRVGM

SEQ ID NO: 45955 - protein, 9 aa, synthetic construct
  source 1..9: note = Seed: VVGARGVGK (KRAS G12R)
WVGARRVGR

SEQ ID NO: 45956 - protein, 9 aa, synthetic construct
  source 1..9: note = Seed: VVGARGVGK (KRAS G12R)
WVGARRVGS

SEQ ID NO: 45957 - protein, 9 aa, synthetic construct
  source 1..9: note = Seed: VVGARGVGK (KRAS G12R)
WVGARRVGT

SEQ ID NO: 45958 - protein, 9 aa, synthetic construct
  source 1..9: note = Seed: VVGARGVGK (KRAS G12R)
WVGARRVGV

SEQ ID NO: 45959 - protein, 9 aa, synthetic construct
  source 1..9: note = Seed: VVGARGVGK (KRAS G12R)
WVGARRVGY

SEQ ID NO: 45960 - protein, 9 aa, synthetic construct
  source 1..9: note = Seed: VVGARGVGK (KRAS G12R)
WVGARSVGA

SEQ ID NO: 45961 - protein, 9 aa, synthetic construct
  source 1..9: note = Seed: VVGARGVGK (KRAS G12R)
WVGARSVGC

SEQ ID NO: 45962 - protein, 9 aa, synthetic construct
  source 1..9: note = Seed: VVGARGVGK (KRAS G12R)
WVGARSVGF

SEQ ID NO: 45963 - protein, 9 aa, synthetic construct
  source 1..9: note = Seed: VVGARGVGK (KRAS G12R)
WVGARSVGG

SEQ ID NO: 45964 - protein, 9 aa, synthetic construct
  source 1..9: note = Seed: VVGARGVGK (KRAS G12R)
WVGARSVGH

SEQ ID NO: 45965 - protein, 9 aa, synthetic construct
  source 1..9: note = Seed: VVGARGVGK (KRAS G12R)
WVGARSVGI

SEQ ID NO: 45966 - protein, 9 aa, synthetic construct
  source 1..9: note = Seed: VVGARGVGK (KRAS G12R)
WVGARSVGK

SEQ ID NO: 45967 - protein, 9 aa, synthetic construct
  source 1..9: note = Seed: VVGARGVGK (KRAS G12R)
WVGARSVGL

SEQ ID NO: 45968 - protein, 9 aa, synthetic construct
  source 1..9: note = Seed: VVGARGVGK (KRAS G12R)
WVGARSVGM

SEQ ID NO: 45969 - protein, 9 aa, synthetic construct
  source 1..9: note = Seed: VVGARGVGK (KRAS G12R)
WVGARSVGN

SEQ ID NO: 45970 - protein, 9 aa, synthetic construct
  source 1..9: note = Seed: VVGARGVGK (KRAS G12R)
WVGARSVGQ

SEQ ID NO: 45971 - protein, 9 aa, synthetic construct
  source 1..9: note = Seed: VVGARGVGK (KRAS G12R)
WVGARSVGR

SEQ ID NO: 45972 - protein, 9 aa, synthetic construct
  source 1..9: note = Seed: VVGARGVGK (KRAS G12R)
WVGARSVGS

SEQ ID NO: 45973 - protein, 9 aa, synthetic construct
  source 1..9: note = Seed: VVGARGVGK (KRAS G12R)
WVGARSVGT

SEQ ID NO: 45974 - protein, 9 aa, synthetic construct
  source 1..9: note = Seed: VVGARGVGK (KRAS G12R)
WVGARSVGV

SEQ ID NO: 45975 - protein, 9 aa, synthetic construct
  source 1..9: note = Seed: VVGARGVGK (KRAS G12R)
WVGARSVGY

SEQ ID NO: 45976 - protein, 9 aa, synthetic construct
  source 1..9: note = Seed: VVGARGVGK (KRAS G12R)
WVGARTVGA

SEQ ID NO: 45977 - protein, 9 aa, synthetic construct
  source 1..9: note = Seed: VVGARGVGK (KRAS G12R)
WVGARTVGF

SEQ ID NO: 45978 - protein, 9 aa, synthetic construct
  source 1..9: note = Seed: VVGARGVGK (KRAS G12R)
WVGARTVGG

SEQ ID NO: 45979 - protein, 9 aa, synthetic construct
  source 1..9: note = Seed: VVGARGVGK (KRAS G12R)
WVGARTVGH

SEQ ID NO: 45980 - protein, 9 aa, synthetic construct
  source 1..9: note = Seed: VVGARGVGK (KRAS G12R)
WVGARTVGI

SEQ ID NO: 45981 - protein, 9 aa, synthetic construct
  source 1..9: note = Seed: VVGARGVGK (KRAS G12R)
WVGARTVGK

SEQ ID NO: 45982 - protein, 9 aa, synthetic construct
  source 1..9: note = Seed: VVGARGVGK (KRAS G12R)
WVGARTVGL

SEQ ID NO: 45983 - protein, 9 aa, synthetic construct
  source 1..9: note = Seed: VVGARGVGK (KRAS G12R)
WVGARTVGM

SEQ ID NO: 45984 - protein, 9 aa, synthetic construct
  source 1..9: note = Seed: VVGARGVGK (KRAS G12R)
WVGARTVGN

SEQ ID NO: 45985 - protein, 9 aa, synthetic construct
  source 1..9: note = Seed: VVGARGVGK (KRAS G12R)
WVGARTVGQ

SEQ ID NO: 45986 - protein, 9 aa, synthetic construct
  source 1..9: note = Seed: VVGARGVGK (KRAS G12R)
WVGARTVGR

SEQ ID NO: 45987 - protein, 9 aa, synthetic construct
  source 1..9: note = Seed: VVGARGVGK (KRAS G12R)
WVGARTVGS

SEQ ID NO: 45988 - protein, 9 aa, synthetic construct
  source 1..9: note = Seed: VVGARGVGK (KRAS G12R)
WVGARTVGT

SEQ ID NO: 45989 - protein, 9 aa, synthetic construct
  source 1..9: note = Seed: VVGARGVGK (KRAS G12R)
WVGARTVGV

SEQ ID NO: 45990 - protein, 9 aa, synthetic construct
  source 1..9: note = Seed: VVGARGVGK (KRAS G12R)
WVGARTVGY

SEQ ID NO: 45991 - protein, 9 aa, synthetic construct
  source 1..9: note = Seed: VVGARGVGK (KRAS G12R)
WVGARVVGA

SEQ ID NO: 45992 - protein, 9 aa, synthetic construct
  source 1..9: note = Seed: VVGARGVGK (KRAS G12R)
WVGARVVGC

SEQ ID NO: 45993 - protein, 9 aa, synthetic construct
  source 1..9: note = Seed: VVGARGVGK (KRAS G12R)
WVGARVVGD

SEQ ID NO: 45994 - protein, 9 aa, synthetic construct
  source 1..9: note = Seed: VVGARGVGK (KRAS G12R)
WVGARVVGE

SEQ ID NO: 45995 - protein, 9 aa, synthetic construct
  source 1..9: note = Seed: VVGARGVGK (KRAS G12R)
WVGARVVGG

SEQ ID NO: 45996 - protein, 9 aa, synthetic construct
  source 1..9: note = Seed: VVGARGVGK (KRAS G12R)
WVGARVVGH

SEQ ID NO: 45997 - protein, 9 aa, synthetic construct
  source 1..9: note = Seed: VVGARGVGK (KRAS G12R)
WVGARVVGI

SEQ ID NO: 45998 - protein, 9 aa, synthetic construct
  source 1..9: note = Seed: VVGARGVGK (KRAS G12R)
WVGARVVGK

SEQ ID NO: 45999 - protein, 9 aa, synthetic construct
  source 1..9: note = Seed: VVGARGVGK (KRAS G12R)
WVGARVVGL

SEQ ID NO: 46000 - protein, 9 aa, synthetic construct
  source 1..9: note = Seed: VVGARGVGK (KRAS G12R)
WVGARVVGM

SEQ ID NO: 46001 - protein, 9 aa, synthetic construct
  source 1..9: note = Seed: VVGARGVGK (KRAS G12R)
WVGARVVGN

SEQ ID NO: 46002 - protein, 9 aa, synthetic construct
  source 1..9: note = Seed: VVGARGVGK (KRAS G12R)
WVGARVVGP

SEQ ID NO: 46003 - protein, 9 aa, synthetic construct
  source 1..9: note = Seed: VVGARGVGK (KRAS G12R)
WVGARVVGQ

SEQ ID NO: 46004 - protein, 9 aa, synthetic construct
  source 1..9: note = Seed: VVGARGVGK (KRAS G12R)
WVGARVVGR

SEQ ID NO: 46005 - protein, 9 aa, synthetic construct
  source 1..9: note = Seed: VVGARGVGK (KRAS G12R)
WVGARVVGS

SEQ ID NO: 46006 - protein, 9 aa, synthetic construct
  source 1..9: note = Seed: VVGARGVGK (KRAS G12R)
WVGARVVGT

SEQ ID NO: 46007 - protein, 9 aa, synthetic construct
  source 1..9: note = Seed: VVGARGVGK (KRAS G12R)
WVGARVVGV

SEQ ID NO: 46008 - protein, 9 aa, synthetic construct
  source 1..9: note = Seed: VVGARGVGK (KRAS G12R)
WVGARVVGY

SEQ ID NO: 46009 - protein, 9 aa, synthetic construct
  source 1..9: note = Seed: VVGARGVGK (KRAS G12R)
WVGCRAVGA

SEQ ID NO: 46010 - protein, 9 aa, synthetic construct
  source 1..9: note = Seed: VVGARGVGK (KRAS G12R)
WVGCRAVGI

SEQ ID NO: 46011 - protein, 9 aa, synthetic construct
  source 1..9: note = Seed: VVGARGVGK (KRAS G12R)
WVGCRAVGL

SEQ ID NO: 46012 - protein, 9 aa, synthetic construct
  source 1..9: note = Seed: VVGARGVGK (KRAS G12R)
WVGCRAVGM

SEQ ID NO: 46013 - protein, 9 aa, synthetic construct
  source 1..9: note = Seed: VVGARGVGK (KRAS G12R)
WVGCRAVGS

SEQ ID NO: 46014 - protein, 9 aa, synthetic construct
  source 1..9: note = Seed: VVGARGVGK (KRAS G12R)
WVGCRAVGT

SEQ ID NO: 46015 - protein, 9 aa, synthetic construct
  source 1..9: note = Seed: VVGARGVGK (KRAS G12R)
WVGCRAVGV

SEQ ID NO: 46016 - protein, 9 aa, synthetic construct
  source 1..9: note = Seed: VVGARGVGK (KRAS G12R)
WVGCRGVGA

SEQ ID NO: 46017 - protein, 9 aa, synthetic construct
  source 1..9: note = Seed: VVGARGVGK (KRAS G12R)
WVGCRGVGI

SEQ ID NO: 46018 - protein, 9 aa, synthetic construct
  source 1..9: note = Seed: VVGARGVGK (KRAS G12R)
WVGCRGVGL

SEQ ID NO: 46019 - protein, 9 aa, synthetic construct
  source 1..9: note = Seed: VVGARGVGK (KRAS G12R)
WVGCRGVGV

SEQ ID NO: 46020 - protein, 9 aa, synthetic construct
  source 1..9: note = Seed: VVGARGVGK (KRAS G12R)
WVGCRIVGA

SEQ ID NO: 46021 - protein, 9 aa, synthetic construct
  source 1..9: note = Seed: VVGARGVGK (KRAS G12R)
WVGCRIVGS

SEQ ID NO: 46022 - protein, 9 aa, synthetic construct
  source 1..9: note = Seed: VVGARGVGK (KRAS G12R)
WVGCRLVGA

SEQ ID NO: 46023 - protein, 9 aa, synthetic construct
  source 1..9: note = Seed: VVGARGVGK (KRAS G12R)
WVGCRLVGS

SEQ ID NO: 46024 - protein, 9 aa, synthetic construct
  source 1..9: note = Seed: VVGARGVGK (KRAS G12R)
WVGCRMVGS

SEQ ID NO: 46025 - protein, 9 aa, synthetic construct
  source 1..9: note = Seed: VVGARGVGK (KRAS G12R)
WVGCRPVGA

SEQ ID NO: 46026 - protein, 9 aa, synthetic construct
  source 1..9: note = Seed: VVGARGVGK (KRAS G12R)
WVGCRPVGI

SEQ ID NO: 46027 - protein, 9 aa, synthetic construct
  source 1..9: note = Seed: VVGARGVGK (KRAS G12R)
WVGCRPVGL

SEQ ID NO: 46028 - protein, 9 aa, synthetic construct
  source 1..9: note = Seed: VVGARGVGK (KRAS G12R)
WVGCRPVGV

SEQ ID NO: 46029 - protein, 9 aa, synthetic construct
  source 1..9: note = Seed: VVGARGVGK (KRAS G12R)
WVGCRSVGA

SEQ ID NO: 46030 - protein, 9 aa, synthetic construct
  source 1..9: note = Seed: VVGARGVGK (KRAS G12R)
WVGCRSVGI

SEQ ID NO: 46031 - protein, 9 aa, synthetic construct
  source 1..9: note = Seed: VVGARGVGK (KRAS G12R)
WVGCRSVGL

SEQ ID NO: 46032 - protein, 9 aa, synthetic construct
  source 1..9: note = Seed: VVGARGVGK (KRAS G12R)
WVGCRSVGV

SEQ ID NO: 46033 - protein, 9 aa, synthetic construct
  source 1..9: note = Seed: VVGARGVGK (KRAS G12R)
WVGCRVVGA

SEQ ID NO: 46034 - protein, 9 aa, synthetic construct
  source 1..9: note = Seed: VVGARGVGK (KRAS G12R)
WVGDRAVGI

SEQ ID NO: 46035 - protein, 9 aa, synthetic construct
  source 1..9: note = Seed: VVGARGVGK (KRAS G12R)
WVGDRAVGL

SEQ ID NO: 46036 - protein, 9 aa, synthetic construct
  source 1..9: note = Seed: VVGARGVGK (KRAS G12R)
WVGDRAVGV

SEQ ID NO: 46037 - protein, 9 aa, synthetic construct
  source 1..9: note = Seed: VVGARGVGK (KRAS G12R)
WVGERAVGA

SEQ ID NO: 46038 - protein, 9 aa, synthetic construct
  source 1..9: note = Seed: VVGARGVGK (KRAS G12R)
WVGERAVGG

SEQ ID NO: 46039 - protein, 9 aa, synthetic construct
  source 1..9: note = Seed: VVGARGVGK (KRAS G12R)
WVGERAVGI

SEQ ID NO: 46040 - protein, 9 aa, synthetic construct
  source 1..9: note = Seed: VVGARGVGK (KRAS G12R)
WVGERAVGL

SEQ ID NO: 46041 - protein, 9 aa, synthetic construct
  source 1..9: note = Seed: VVGARGVGK (KRAS G12R)
WVGERAVGM

SEQ ID NO: 46042 - protein, 9 aa, synthetic construct
  source 1..9: note = Seed: VVGARGVGK (KRAS G12R)
WVGERAVGN

SEQ ID NO: 46043 - protein, 9 aa, synthetic construct
  source 1..9: note = Seed: VVGARGVGK (KRAS G12R)
WVGERAVGS

SEQ ID NO: 46044 - protein, 9 aa, synthetic construct
  source 1..9: note = Seed: VVGARGVGK (KRAS G12R)
WVGERAVGT

SEQ ID NO: 46045 - protein, 9 aa, synthetic construct
  source 1..9: note = Seed: VVGARGVGK (KRAS G12R)
WVGERAVGV

SEQ ID NO: 46046 - protein, 9 aa, synthetic construct
  source 1..9: note = Seed: VVGARGVGK (KRAS G12R)
WVGERGVGA

SEQ ID NO: 46047 - protein, 9 aa, synthetic construct
  source 1..9: note = Seed: VVGARGVGK (KRAS G12R)
WVGERGVGG

SEQ ID NO: 46048 - protein, 9 aa, synthetic construct
  source 1..9: note = Seed: VVGARGVGK (KRAS G12R)
WVGERGVGI

SEQ ID NO: 46049 - protein, 9 aa, synthetic construct
  source 1..9: note = Seed: VVGARGVGK (KRAS G12R)
WVGERGVGL

SEQ ID NO: 46050 - protein, 9 aa, synthetic construct
  source 1..9: note = Seed: VVGARGVGK (KRAS G12R)
WVGERGVGM

SEQ ID NO: 46051 - protein, 9 aa, synthetic construct
  source 1..9: note = Seed: VVGARGVGK (KRAS G12R)
WVGERGVGS

SEQ ID NO: 46052 - protein, 9 aa, synthetic construct
  source 1..9: note = Seed: VVGARGVGK (KRAS G12R)
WVGERGVGT

SEQ ID NO: 46053 - protein, 9 aa, synthetic construct
  source 1..9: note = Seed: VVGARGVGK (KRAS G12R)
WVGERGVGV

SEQ ID NO: 46054 - protein, 9 aa, synthetic construct
  source 1..9: note = Seed: VVGARGVGK (KRAS G12R)
WVGERNVGA

SEQ ID NO: 46055 - protein, 9 aa, synthetic construct
  source 1..9: note = Seed: VVGARGVGK (KRAS G12R)
WVGERNVGI

SEQ ID NO: 46056 - protein, 9 aa, synthetic construct
  source 1..9: note = Seed: VVGARGVGK (KRAS G12R)
WVGERNVGL

SEQ ID NO: 46057 - protein, 9 aa, synthetic construct
  source 1..9: note = Seed: VVGARGVGK (KRAS G12R)
WVGERNVGV

SEQ ID NO: 46058 - protein, 9 aa, synthetic construct
  source 1..9: note = Seed: VVGARGVGK (KRAS G12R)
WVGERPVGA

SEQ ID NO: 46059 - protein, 9 aa, synthetic construct
  source 1..9: note = Seed: VVGARGVGK (KRAS G12R)
WVGERPVGI

SEQ ID NO: 46060 - protein, 9 aa, synthetic construct
  source 1..9: note = Seed: VVGARGVGK (KRAS G12R)
WVGERPVGL

SEQ ID NO: 46061 - protein, 9 aa, synthetic construct
  source 1..9: note = Seed: VVGARGVGK (KRAS G12R)
WVGERPVGM

SEQ ID NO: 46062 - protein, 9 aa, synthetic construct
  source 1..9: note = Seed: VVGARGVGK (KRAS G12R)
WVGERPVGV

SEQ ID NO: 46063 - protein, 9 aa, synthetic construct
  source 1..9: note = Seed: VVGARGVGK (KRAS G12R)
WVGERSVGA

SEQ ID NO: 46064 - protein, 9 aa, synthetic construct
  source 1..9: note = Seed: VVGARGVGK (KRAS G12R)
WVGERSVGI

SEQ ID NO: 46065 - protein, 9 aa, synthetic construct
  source 1..9: note = Seed: VVGARGVGK (KRAS G12R)
WVGERSVGL

SEQ ID NO: 46066 - protein, 9 aa, synthetic construct
  source 1..9: note = Seed: VVGARGVGK (KRAS G12R)
WVGERSVGM

SEQ ID NO: 46067 - protein, 9 aa, synthetic construct
  source 1..9: note = Seed: VVGARGVGK (KRAS G12R)
WVGERSVGS

SEQ ID NO: 46068 - protein, 9 aa, synthetic construct
  source 1..9: note = Seed: VVGARGVGK (KRAS G12R)
WVGERSVGT

SEQ ID NO: 46069 - protein, 9 aa, synthetic construct
  source 1..9: note = Seed: VVGARGVGK (KRAS G12R)
WVGERSVGV

SEQ ID NO: 46070 - protein, 9 aa, synthetic construct
  source 1..9: note = Seed: VVGARGVGK (KRAS G12R)
WVGERTVGA

SEQ ID NO: 46071 - protein, 9 aa, synthetic construct
  source 1..9: note = Seed: VVGARGVGK (KRAS G12R)
WVGERTVGI

SEQ ID NO: 46072 - protein, 9 aa, synthetic construct
  source 1..9: note = Seed: VVGARGVGK (KRAS G12R)
WVGERTVGL

SEQ ID NO: 46073 - protein, 9 aa, synthetic construct
  source 1..9: note = Seed: VVGARGVGK (KRAS G12R)
WVGERTVGN

SEQ ID NO: 46074 - protein, 9 aa, synthetic construct
  source 1..9: note = Seed: VVGARGVGK (KRAS G12R)
WVGERTVGV

SEQ ID NO: 46075 - protein, 9 aa, synthetic construct
  source 1..9: note = Seed: VVGARGVGK (KRAS G12R)
WVGFRAVGA

SEQ ID NO: 46076 - protein, 9 aa, synthetic construct
  source 1..9: note = Seed: VVGARGVGK (KRAS G12R)
WVGFRAVGC

SEQ ID NO: 46077 - protein, 9 aa, synthetic construct
  source 1..9: note = Seed: VVGARGVGK (KRAS G12R)
WVGFRAVGF

SEQ ID NO: 46078 - protein, 9 aa, synthetic construct
  source 1..9: note = Seed: VVGARGVGK (KRAS G12R)
WVGFRAVGG

SEQ ID NO: 46079 - protein, 9 aa, synthetic construct
  source 1..9: note = Seed: VVGARGVGK (KRAS G12R)
WVGFRAVGH

SEQ ID NO: 46080 - protein, 9 aa, synthetic construct
  source 1..9: note = Seed: VVGARGVGK (KRAS G12R)
WVGFRAVGI

SEQ ID NO: 46081 - protein, 9 aa, synthetic construct
  source 1..9: note = Seed: VVGARGVGK (KRAS G12R)
WVGFRAVGL

SEQ ID NO: 46082 - protein, 9 aa, synthetic construct
  source 1..9: note = Seed: VVGARGVGK (KRAS G12R)
WVGFRAVGM

SEQ ID NO: 46083 - protein, 9 aa, synthetic construct
  source 1..9: note = Seed: VVGARGVGK (KRAS G12R)
WVGFRAVGN

SEQ ID NO: 46084 - protein, 9 aa, synthetic construct
  source 1..9: note = Seed: VVGARGVGK (KRAS G12R)
WVGFRAVGQ

SEQ ID NO: 46085 - protein, 9 aa, synthetic construct
  source 1..9: note = Seed: VVGARGVGK (KRAS G12R)
WVGFRAVGR

SEQ ID NO: 46086 - protein, 9 aa, synthetic construct
  source 1..9: note = Seed: VVGARGVGK (KRAS G12R)
WVGFRAVGS

SEQ ID NO: 46087 - protein, 9 aa, synthetic construct
  source 1..9: note = Seed: VVGARGVGK (KRAS G12R)
WVGFRAVGV

SEQ ID NO: 46088 - protein, 9 aa, synthetic construct
  source 1..9: note = Seed: VVGARGVGK (KRAS G12R)
WVGFRAVGY

SEQ ID NO: 46089 - protein, 9 aa, synthetic construct
  source 1..9: note = Seed: VVGARGVGK (KRAS G12R)
WVGFRGVGI

SEQ ID NO: 46090 - protein, 9 aa, synthetic construct
  source 1..9: note = Seed: VVGARGVGK (KRAS G12R)
WVGFRGVGL

SEQ ID NO: 46091 - protein, 9 aa, synthetic construct
  source 1..9: note = Seed: VVGARGVGK (KRAS G12R)
WVGFRGVGM

SEQ ID NO: 46092 - protein, 9 aa, synthetic construct
  source 1..9: note = Seed: VVGARGVGK (KRAS G12R)
WVGFRGVGN

SEQ ID NO: 46093 - protein, 9 aa, synthetic construct
  source 1..9: note = Seed: VVGARGVGK (KRAS G12R)
WVGFRGVGS

SEQ ID NO: 46094 - protein, 9 aa, synthetic construct
  source 1..9: note = Seed: VVGARGVGK (KRAS G12R)
WVGFRGVGT

SEQ ID NO: 46095 - protein, 9 aa, synthetic construct
  source 1..9: note = Seed: VVGARGVGK (KRAS G12R)
WVGFRGVGV

SEQ ID NO: 46096 - protein, 9 aa, synthetic construct
  source 1..9: note = Seed: VVGARGVGK (KRAS G12R)
WVGFRHVGL

SEQ ID NO: 46097 - protein, 9 aa, synthetic construct
  source 1..9: note = Seed: VVGARGVGK (KRAS G12R)
WVGFRKVGL

SEQ ID NO: 46098 - protein, 9 aa, synthetic construct
  source 1..9: note = Seed: VVGARGVGK (KRAS G12R)
WVGFRKVGR

SEQ ID NO: 46099 - protein, 9 aa, synthetic construct
  source 1..9: note = Seed: VVGARGVGK (KRAS G12R)
WVGFRNVGI

SEQ ID NO: 46100 - protein, 9 aa, synthetic construct
  source 1..9: note = Seed: VVGARGVGK (KRAS G12R)
WVGFRNVGL

SEQ ID NO: 46101 - protein, 9 aa, synthetic construct
  source 1..9: note = Seed: VVGARGVGK (KRAS G12R)
WVGFRNVGM

SEQ ID NO: 46102 - protein, 9 aa, synthetic construct
  source 1..9: note = Seed: VVGARGVGK (KRAS G12R)
WVGFRNVGV

SEQ ID NO: 46103 - protein, 9 aa, synthetic construct
  source 1..9: note = Seed: VVGARGVGK (KRAS G12R)
WVGFRPVGA

SEQ ID NO: 46104 - protein, 9 aa, synthetic construct
  source 1..9: note = Seed: VVGARGVGK (KRAS G12R)
WVGFRPVGG

SEQ ID NO: 46105 - protein, 9 aa, synthetic construct
  source 1..9: note = Seed: VVGARGVGK (KRAS G12R)
WVGFRPVGH

SEQ ID NO: 46106 - protein, 9 aa, synthetic construct
  source 1..9: note = Seed: VVGARGVGK (KRAS G12R)
WVGFRPVGI

SEQ ID NO: 46107 - protein, 9 aa, synthetic construct
  source 1..9: note = Seed: VVGARGVGK (KRAS G12R)
WVGFRPVGL

SEQ ID NO: 46108 - protein, 9 aa, synthetic construct
  source 1..9: note = Seed: VVGARGVGK (KRAS G12R)
WVGFRPVGM

SEQ ID NO: 46109 - protein, 9 aa, synthetic construct
  source 1..9: note = Seed: VVGARGVGK (KRAS G12R)
WVGFRPVGN

SEQ ID NO: 46110 - protein, 9 aa, synthetic construct
  source 1..9: note = Seed: VVGARGVGK (KRAS G12R)
WVGFRPVGR

SEQ ID NO: 46111 - protein, 9 aa, synthetic construct
  source 1..9: note = Seed: VVGARGVGK (KRAS G12R)
WVGFRPVGS

SEQ ID NO: 46112 - protein, 9 aa, synthetic construct
  source 1..9: note = Seed: VVGARGVGK (KRAS G12R)
WVGFRPVGV

SEQ ID NO: 46113 - protein, 9 aa, synthetic construct
  source 1..9: note = Seed: VVGARGVGK (KRAS G12R)
WVGFRRVGK

SEQ ID NO: 46114 - protein, 9 aa, synthetic construct
  source 1..9: note = Seed: VVGARGVGK (KRAS G12R)
WVGFRRVGR

SEQ ID NO: 46115 - protein, 9 aa, synthetic construct
  source 1..9: note = Seed: VVGARGVGK (KRAS G12R)
WVGFRSVGA

SEQ ID NO: 46116 - protein, 9 aa, synthetic construct
  source 1..9: note = Seed: VVGARGVGK (KRAS G12R)
WVGFRSVGF

SEQ ID NO: 46117 - protein, 9 aa, synthetic construct
  source 1..9: note = Seed: VVGARGVGK (KRAS G12R)
WVGFRSVGI

SEQ ID NO: 46118 - protein, 9 aa, synthetic construct
  source 1..9: note = Seed: VVGARGVGK (KRAS G12R)
WVGFRSVGL

SEQ ID NO: 46119 - protein, 9 aa, synthetic construct
  source 1..9: note = Seed: VVGARGVGK (KRAS G12R)
WVGFRSVGM

SEQ ID NO: 46120 - protein, 9 aa, synthetic construct
  source 1..9: note = Seed: VVGARGVGK (KRAS G12R)
WVGFRSVGR

SEQ ID NO: 46121 - protein, 9 aa, synthetic construct
  source 1..9: note = Seed: VVGARGVGK (KRAS G12R)
WVGFRSVGV

SEQ ID NO: 46122 - protein, 9 aa, synthetic construct
  source 1..9: note = Seed: VVGARGVGK (KRAS G12R)
WVGFRSVGY

SEQ ID NO: 46123 - protein, 9 aa, synthetic construct
  source 1..9: note = Seed: VVGARGVGK (KRAS G12R)
WVGFRTVGG

SEQ ID NO: 46124 - protein, 9 aa, synthetic construct
  source 1..9: note = Seed: VVGARGVGK (KRAS G12R)
WVGFRTVGI

SEQ ID NO: 46125 - protein, 9 aa, synthetic construct
  source 1..9: note = Seed: VVGARGVGK (KRAS G12R)
WVGFRTVGL

SEQ ID NO: 46126 - protein, 9 aa, synthetic construct
  source 1..9: note = Seed: VVGARGVGK (KRAS G12R)
WVGFRTVGM

SEQ ID NO: 46127 - protein, 9 aa, synthetic construct
  source 1..9: note = Seed: VVGARGVGK (KRAS G12R)
WVGFRTVGN

SEQ ID NO: 46128 - protein, 9 aa, synthetic construct
  source 1..9: note = Seed: VVGARGVGK (KRAS G12R)
WVGFRTVGS

SEQ ID NO: 46129 - protein, 9 aa, synthetic construct
  source 1..9: note = Seed: VVGARGVGK (KRAS G12R)
WVGFRTVGV

SEQ ID NO: 46130 - protein, 9 aa, synthetic construct
  source 1..9: note = Seed: VVGARGVGK (KRAS G12R)
WVGFRVVGL

SEQ ID NO: 46131 - protein, 9 aa, synthetic construct
  source 1..9: note = Seed: VVGARGVGK (KRAS G12R)
WVGGRAVGA

SEQ ID NO: 46132 - protein, 9 aa, synthetic construct
  source 1..9: note = Seed: VVGARGVGK (KRAS G12R)
WVGGRAVGC

SEQ ID NO: 46133 - protein, 9 aa, synthetic construct
  source 1..9: note = Seed: VVGARGVGK (KRAS G12R)
WVGGRAVGE

SEQ ID NO: 46134 - protein, 9 aa, synthetic construct
  source 1..9: note = Seed: VVGARGVGK (KRAS G12R)
WVGGRAVGF

SEQ ID NO: 46135 - protein, 9 aa, synthetic construct
  source 1..9: note = Seed: VVGARGVGK (KRAS G12R)
WVGGRAVGG

SEQ ID NO: 46136 - protein, 9 aa, synthetic construct
  source 1..9: note = Seed: VVGARGVGK (KRAS G12R)
WVGGRAVGH

SEQ ID NO: 46137 - protein, 9 aa, synthetic construct
  source 1..9: note = Seed: VVGARGVGK (KRAS G12R)
WVGGRAVGI

SEQ ID NO: 46138 - protein, 9 aa, synthetic construct
  source 1..9: note = Seed: VVGARGVGK (KRAS G12R)
WVGGRAVGL

SEQ ID NO: 46139 - protein, 9 aa, synthetic construct
  source 1..9: note = Seed: VVGARGVGK (KRAS G12R)
WVGGRAVGM

SEQ ID NO: 46140 - protein, 9 aa, synthetic construct
  source 1..9: note = Seed: VVGARGVGK (KRAS G12R)
WVGGRAVGN

SEQ ID NO: 46141 - protein, 9 aa, synthetic construct
  source 1..9: note = Seed: VVGARGVGK (KRAS G12R)
WVGGRAVGP

SEQ ID NO: 46142 - protein, 9 aa, synthetic construct
  source 1..9: note = Seed: VVGARGVGK (KRAS G12R)
WVGGRAVGQ

SEQ ID NO: 46143 - protein, 9 aa, synthetic construct
  source 1..9: note = Seed: VVGARGVGK (KRAS G12R)
WVGGRAVGR

SEQ ID NO: 46144 - protein, 9 aa, synthetic construct
  source 1..9: note = Seed: VVGARGVGK (KRAS G12R)
WVGGRAVGS

SEQ ID NO: 46145 - protein, 9 aa, synthetic construct
  source 1..9: note = Seed: VVGARGVGK (KRAS G12R)
WVGGRAVGT

SEQ ID NO: 46146 - protein, 9 aa, synthetic construct
  source 1..9: note = Seed: VVGARGVGK (KRAS G12R)
WVGGRAVGV

SEQ ID NO: 46147 - protein, 9 aa, synthetic construct
  source 1..9: note = Seed: VVGARGVGK (KRAS G12R)
WVGGRAVGY

SEQ ID NO: 46148 - protein, 9 aa, synthetic construct
  source 1..9: note = Seed: VVGARGVGK (KRAS G12R)
WVGGRGVGA

SEQ ID NO: 46149 - protein, 9 aa, synthetic construct
  source 1..9: note = Seed: VVGARGVGK (KRAS G12R)
WVGGRGVGI

SEQ ID NO: 46150 - protein, 9 aa, synthetic construct
  source 1..9: note = Seed: VVGARGVGK (KRAS G12R)
WVGGRGVGL

SEQ ID NO: 46151 - protein, 9 aa, synthetic construct
  source 1..9: note = Seed: VVGARGVGK (KRAS G12R)
WVGGRGVGM

SEQ ID NO: 46152 - protein, 9 aa, synthetic construct
  source 1..9: note = Seed: VVGARGVGK (KRAS G12R)
WVGGRGVGS

SEQ ID NO: 46153 - protein, 9 aa, synthetic construct
  source 1..9: note = Seed: VVGARGVGK (KRAS G12R)
WVGGRGVGV

SEQ ID NO: 46154 - protein, 9 aa, synthetic construct
  source 1..9: note = Seed: VVGARGVGK (KRAS G12R)
WVGGRIVGA

SEQ ID NO: 46155 - protein, 9 aa, synthetic construct
  source 1..9: note = Seed: VVGARGVGK (KRAS G12R)
WVGGRIVGG

SEQ ID NO: 46156 - protein, 9 aa, synthetic construct
  source 1..9: note = Seed: VVGARGVGK (KRAS G12R)
WVGGRIVGH

SEQ ID NO: 46157 - protein, 9 aa, synthetic construct
  source 1..9: note = Seed: VVGARGVGK (KRAS G12R)
WVGGRIVGI

SEQ ID NO: 46158 - protein, 9 aa, synthetic construct
  source 1..9: note = Seed: VVGARGVGK (KRAS G12R)
WVGGRIVGL

SEQ ID NO: 46159 - protein, 9 aa, synthetic construct
  source 1..9: note = Seed: VVGARGVGK (KRAS G12R)
WVGGRIVGM

SEQ ID NO: 46160 - protein, 9 aa, synthetic construct
  source 1..9: note = Seed: VVGARGVGK (KRAS G12R)
WVGGRIVGN

SEQ ID NO: 46161 - protein, 9 aa, synthetic construct
  source 1..9: note = Seed: VVGARGVGK (KRAS G12R)
WVGGRIVGS

SEQ ID NO: 46162 - protein, 9 aa, synthetic construct
  source 1..9: note = Seed: VVGARGVGK (KRAS G12R)
WVGGRIVGT

SEQ ID NO: 46163 - protein, 9 aa, synthetic construct
  source 1..9: note = Seed: VVGARGVGK (KRAS G12R)
WVGGRIVGV

SEQ ID NO: 46164 - protein, 9 aa, synthetic construct
  source 1..9: note = Seed: VVGARGVGK (KRAS G12R)
WVGGRLVGA

SEQ ID NO: 46165 - protein, 9 aa, synthetic construct
  source 1..9: note = Seed: VVGARGVGK (KRAS G12R)
WVGGRLVGG

SEQ ID NO: 46166 - protein, 9 aa, synthetic construct
  source 1..9: note = Seed: VVGARGVGK (KRAS G12R)
WVGGRLVGI

SEQ ID NO: 46167 - protein, 9 aa, synthetic construct
  source 1..9: note = Seed: VVGARGVGK (KRAS G12R)
WVGGRLVGS

SEQ ID NO: 46168 - protein, 9 aa, synthetic construct
  source 1..9: note = Seed: VVGARGVGK (KRAS G12R)
WVGGRLVGT

SEQ ID NO: 46169 - protein, 9 aa, synthetic construct
  source 1..9: note = Seed: VVGARGVGK (KRAS G12R)
WVGGRLVGV

SEQ ID NO: 46170 - protein, 9 aa, synthetic construct
  source 1..9: note = Seed: VVGARGVGK (KRAS G12R)
WVGGRMVGA

SEQ ID NO: 46171 - protein, 9 aa, synthetic construct
  source 1..9: note = Seed: VVGARGVGK (KRAS G12R)
WVGGRMVGS

SEQ ID NO: 46172 - protein, 9 aa, synthetic construct
  source 1..9: note = Seed: VVGARGVGK (KRAS G12R)
WVGGRMVGT

SEQ ID NO: 46173 - protein, 9 aa, synthetic construct
  source 1..9: note = Seed: VVGARGVGK (KRAS G12R)
WVGGRMVGV

SEQ ID NO: 46174 - protein, 9 aa, synthetic construct
  source 1..9: note = Seed: VVGARGVGK (KRAS G12R)
WVGGRNVGA

SEQ ID NO: 46175 - protein, 9 aa, synthetic construct
  source 1..9: note = Seed: VVGARGVGK (KRAS G12R)
WVGGRNVGI

SEQ ID NO: 46176 - protein, 9 aa, synthetic construct
  source 1..9: note = Seed: VVGARGVGK (KRAS G12R)
WVGGRNVGL

SEQ ID NO: 46177 - protein, 9 aa, synthetic construct
  source 1..9: note = Seed: VVGARGVGK (KRAS G12R)
WVGGRNVGV

SEQ ID NO: 46178 - protein, 9 aa, synthetic construct
  source 1..9: note = Seed: VVGARGVGK (KRAS G12R)
WVGGRPVGA

SEQ ID NO: 46179 - protein, 9 aa, synthetic construct
  source 1..9: note = Seed: VVGARGVGK (KRAS G12R)
WVGGRPVGC

SEQ ID NO: 46180 - protein, 9 aa, synthetic construct
  source 1..9: note = Seed: VVGARGVGK (KRAS G12R)
WVGGRPVGG

SEQ ID NO: 46181 - protein, 9 aa, synthetic construct
  source 1..9: note = Seed: VVGARGVGK (KRAS G12R)
WVGGRPVGI

SEQ ID NO: 46182 - protein, 9 aa, synthetic construct
  source 1..9: note = Seed: VVGARGVGK (KRAS G12R)
WVGGRPVGL

SEQ ID NO: 46183 - protein, 9 aa, synthetic construct
  source 1..9: note = Seed: VVGARGVGK (KRAS G12R)
WVGGRPVGM

SEQ ID NO: 46184 - protein, 9 aa, synthetic construct
  source 1..9: note = Seed: VVGARGVGK (KRAS G12R)
WVGGRPVGN

SEQ ID NO: 46185 - protein, 9 aa, synthetic construct
  source 1..9: note = Seed: VVGARGVGK (KRAS G12R)
WVGGRPVGS

SEQ ID NO: 46186 - protein, 9 aa, synthetic construct
  source 1..9: note = Seed: VVGARGVGK (KRAS G12R)
WVGGRPVGT

SEQ ID NO: 46187 - protein, 9 aa, synthetic construct
  source 1..9: note = Seed: VVGARGVGK (KRAS G12R)
WVGGRPVGV

SEQ ID NO: 46188 - protein, 9 aa, synthetic construct
  source 1..9: note = Seed: VVGARGVGK (KRAS G12R)
WVGGRSVGA

SEQ ID NO: 46189 - protein, 9 aa, synthetic construct
  source 1..9: note = Seed: VVGARGVGK (KRAS G12R)
WVGGRSVGI

SEQ ID NO: 46190 - protein, 9 aa, synthetic construct
  source 1..9: note = Seed: VVGARGVGK (KRAS G12R)
WVGGRSVGL

SEQ ID NO: 46191 - protein, 9 aa, synthetic construct
  source 1..9: note = Seed: VVGARGVGK (KRAS G12R)
WVGGRSVGM

SEQ ID NO: 46192 - protein, 9 aa, synthetic construct
  source 1..9: note = Seed: VVGARGVGK (KRAS G12R)
WVGGRSVGS

SEQ ID NO: 46193 - protein, 9 aa, synthetic construct
  source 1..9: note = Seed: VVGARGVGK (KRAS G12R)
WVGGRSVGT

SEQ ID NO: 46194 - protein, 9 aa, synthetic construct
  source 1..9: note = Seed: VVGARGVGK (KRAS G12R)
WVGGRSVGV

SEQ ID NO: 46195 - protein, 9 aa, synthetic construct
  source 1..9: note = Seed: VVGARGVGK (KRAS G12R)
WVGGRTVGA

SEQ ID NO: 46196 - protein, 9 aa, synthetic construct
  source 1..9: note = Seed: VVGARGVGK (KRAS G12R)
WVGGRTVGG

SEQ ID NO: 46197 - protein, 9 aa, synthetic construct
  source 1..9: note = Seed: VVGARGVGK (KRAS G12R)
WVGGRTVGI

SEQ ID NO: 46198 - protein, 9 aa, synthetic construct
  source 1..9: note = Seed: VVGARGVGK (KRAS G12R)
WVGGRTVGL

SEQ ID NO: 46199 - protein, 9 aa, synthetic construct
  source 1..9: note = Seed: VVGARGVGK (KRAS G12R)
WVGGRTVGM

SEQ ID NO: 46200 - protein, 9 aa, synthetic construct
  source 1..9: note = Seed: VVGARGVGK (KRAS G12R)
WVGGRTVGS

SEQ ID NO: 46201 - protein, 9 aa, synthetic construct
  source 1..9: note = Seed: VVGARGVGK (KRAS G12R)
WVGGRTVGT

SEQ ID NO: 46202 - protein, 9 aa, synthetic construct
  source 1..9: note = Seed: VVGARGVGK (KRAS G12R)
WVGGRTVGV

SEQ ID NO: 46203 - protein, 9 aa, synthetic construct
  source 1..9: note = Seed: VVGARGVGK (KRAS G12R)
WVGGRVVGA

SEQ ID NO: 46204 - protein, 9 aa, synthetic construct
  source 1..9: note = Seed: VVGARGVGK (KRAS G12R)
WVGGRVVGC

SEQ ID NO: 46205 - protein, 9 aa, synthetic construct
  source 1..9: note = Seed: VVGARGVGK (KRAS G12R)
WVGGRVVGD

SEQ ID NO: 46206 - protein, 9 aa, synthetic construct
  source 1..9: note = Seed: VVGARGVGK (KRAS G12R)
WVGGRVVGE

SEQ ID NO: 46207 - protein, 9 aa, synthetic construct
  source 1..9: note = Seed: VVGARGVGK (KRAS G12R)
WVGGRVVGF

SEQ ID NO: 46208 - protein, 9 aa, synthetic construct
  source 1..9: note = Seed: VVGARGVGK (KRAS G12R)
WVGGRVVGG

SEQ ID NO: 46209 - protein, 9 aa, synthetic construct
  source 1..9: note = Seed: VVGARGVGK (KRAS G12R)
WVGGRVVGH

SEQ ID NO: 46210 - protein, 9 aa, synthetic construct
  source 1..9: note = Seed: VVGARGVGK (KRAS G12R)
WVGGRVVGI

SEQ ID NO: 46211 - protein, 9 aa, synthetic construct
  source 1..9: note = Seed: VVGARGVGK (KRAS G12R)
WVGGRVVGL

SEQ ID NO: 46212 - protein, 9 aa, synthetic construct
  source 1..9: note = Seed: VVGARGVGK (KRAS G12R)
WVGGRVVGM

SEQ ID NO: 46213 - protein, 9 aa, synthetic construct
  source 1..9: note = Seed: VVGARGVGK (KRAS G12R)
WVGGRVVGN

SEQ ID NO: 46214 - protein, 9 aa, synthetic construct
  source 1..9: note = Seed: VVGARGVGK (KRAS G12R)
WVGGRVVGP

SEQ ID NO: 46215 - protein, 9 aa, synthetic construct
  source 1..9: note = Seed: VVGARGVGK (KRAS G12R)
WVGGRVVGQ

SEQ ID NO: 46216 - protein, 9 aa, synthetic construct
  source 1..9: note = Seed: VVGARGVGK (KRAS G12R)
WVGGRVVGS

SEQ ID NO: 46217 - protein, 9 aa, synthetic construct
  source 1..9: note = Seed: VVGARGVGK (KRAS G12R)
WVGGRVVGT

SEQ ID NO: 46218 - protein, 9 aa, synthetic construct
  source 1..9: note = Seed: VVGARGVGK (KRAS G12R)
WVGGRVVGV

SEQ ID NO: 46219 - protein, 9 aa, synthetic construct
  source 1..9: note = Seed: VVGARGVGK (KRAS G12R)
WVGGRVVGY

SEQ ID NO: 46220 - protein, 9 aa, synthetic construct
  source 1..9: note = Seed: VVGARGVGK (KRAS G12R)
WVGHRAVGA

SEQ ID NO: 46221 - protein, 9 aa, synthetic construct
  source 1..9: note = Seed: VVGARGVGK (KRAS G12R)
WVGHRAVGF

SEQ ID NO: 46222 - protein, 9 aa, synthetic construct
  source 1..9: note = Seed: VVGARGVGK (KRAS G12R)
WVGHRAVGI

SEQ ID NO: 46223 - protein, 9 aa, synthetic construct
  source 1..9: note = Seed: VVGARGVGK (KRAS G12R)
WVGHRAVGL

SEQ ID NO: 46224 - protein, 9 aa, synthetic construct
  source 1..9: note = Seed: VVGARGVGK (KRAS G12R)
WVGHRAVGM

SEQ ID NO: 46225 - protein, 9 aa, synthetic construct
  source 1..9: note = Seed: VVGARGVGK (KRAS G12R)
WVGHRAVGV

SEQ ID NO: 46226 - protein, 9 aa, synthetic construct
  source 1..9: note = Seed: VVGARGVGK (KRAS G12R)
WVGHRGVGA

SEQ ID NO: 46227 - protein, 9 aa, synthetic construct
  source 1..9: note = Seed: VVGARGVGK (KRAS G12R)
WVGHRGVGI

SEQ ID NO: 46228 - protein, 9 aa, synthetic construct
  source 1..9: note = Seed: VVGARGVGK (KRAS G12R)
WVGHRGVGL

SEQ ID NO: 46229 - protein, 9 aa, synthetic construct
  source 1..9: note = Seed: VVGARGVGK (KRAS G12R)
WVGHRGVGM

SEQ ID NO: 46230 - protein, 9 aa, synthetic construct
  source 1..9: note = Seed: VVGARGVGK (KRAS G12R)
WVGHRGVGV

SEQ ID NO: 46231 - protein, 9 aa, synthetic construct
  source 1..9: note = Seed: VVGARGVGK (KRAS G12R)
WVGHRIVGA

SEQ ID NO: 46232 - protein, 9 aa, synthetic construct
  source 1..9: note = Seed: VVGARGVGK (KRAS G12R)
WVGHRPVGI

SEQ ID NO: 46233 - protein, 9 aa, synthetic construct
  source 1..9: note = Seed: VVGARGVGK (KRAS G12R)
WVGHRPVGL

SEQ ID NO: 46234 - protein, 9 aa, synthetic construct
  source 1..9: note = Seed: VVGARGVGK (KRAS G12R)
WVGHRPVGV

SEQ ID NO: 46235 - protein, 9 aa, synthetic construct
  source 1..9: note = Seed: VVGARGVGK (KRAS G12R)
WVGHRRVGR

SEQ ID NO: 46236 - protein, 9 aa, synthetic construct
  source 1..9: note = Seed: VVGARGVGK (KRAS G12R)
WVGHRSVGA

SEQ ID NO: 46237 - protein, 9 aa, synthetic construct
  source 1..9: note = Seed: VVGARGVGK (KRAS G12R)
WVGHRSVGF

SEQ ID NO: 46238 - protein, 9 aa, synthetic construct
  source 1..9: note = Seed: VVGARGVGK (KRAS G12R)
WVGHRSVGI

SEQ ID NO: 46239 - protein, 9 aa, synthetic construct
  source 1..9: note = Seed: VVGARGVGK (KRAS G12R)
WVGHRSVGL

SEQ ID NO: 46240 - protein, 9 aa, synthetic construct
  source 1..9: note = Seed: VVGARGVGK (KRAS G12R)
WVGHRSVGM

SEQ ID NO: 46241 - protein, 9 aa, synthetic construct
  source 1..9: note = Seed: VVGARGVGK (KRAS G12R)
WVGHRSVGV

SEQ ID NO: 46242 - protein, 9 aa, synthetic construct
  source 1..9: note = Seed: VVGARGVGK (KRAS G12R)
WVGHRTVGI

SEQ ID NO: 46243 - protein, 9 aa, synthetic construct
  source 1..9: note = Seed: VVGARGVGK (KRAS G12R)
WVGIRAVGA

SEQ ID NO: 46244 - protein, 9 aa, synthetic construct
  source 1..9: note = Seed: VVGARGVGK (KRAS G12R)
WVGIRAVGC

SEQ ID NO: 46245 - protein, 9 aa, synthetic construct
  source 1..9: note = Seed: VVGARGVGK (KRAS G12R)
WVGIRAVGD

SEQ ID NO: 46246 - protein, 9 aa, synthetic construct
  source 1..9: note = Seed: VVGARGVGK (KRAS G12R)
WVGIRAVGE

SEQ ID NO: 46247 - protein, 9 aa, synthetic construct
  source 1..9: note = Seed: VVGARGVGK (KRAS G12R)
WVGIRAVGF

SEQ ID NO: 46248 - protein, 9 aa, synthetic construct
  source 1..9: note = Seed: VVGARGVGK (KRAS G12R)
WVGIRAVGG

SEQ ID NO: 46249 - protein, 9 aa, synthetic construct
  source 1..9: note = Seed: VVGARGVGK (KRAS G12R)
WVGIRAVGH

SEQ ID NO: 46250 - protein, 9 aa, synthetic construct
  source 1..9: note = Seed: VVGARGVGK (KRAS G12R)
WVGIRAVGI

SEQ ID NO: 46251 - protein, 9 aa, synthetic construct
  source 1..9: note = Seed: VVGARGVGK (KRAS G12R)
WVGIRAVGK

SEQ ID NO: 46252 - protein, 9 aa, synthetic construct
  source 1..9: note = Seed: VVGARGVGK (KRAS G12R)
WVGIRAVGL

SEQ ID NO: 46253 - protein, 9 aa, synthetic construct
  source 1..9: note = Seed: VVGARGVGK (KRAS G12R)
WVGIRAVGM

SEQ ID NO: 46254 - protein, 9 aa, synthetic construct
  source 1..9: note = Seed: VVGARGVGK (KRAS G12R)
WVGIRAVGN

SEQ ID NO: 46255 - protein, 9 aa, synthetic construct
  source 1..9: note = Seed: VVGARGVGK (KRAS G12R)
WVGIRAVGP

SEQ ID NO: 46256 - protein, 9 aa, synthetic construct
  source 1..9: note = Seed: VVGARGVGK (KRAS G12R)
WVGIRAVGQ

SEQ ID NO: 46257 - protein, 9 aa, synthetic construct
  source 1..9: note = Seed: VVGARGVGK (KRAS G12R)
WVGIRAVGR

SEQ ID NO: 46258 - protein, 9 aa, synthetic construct
  source 1..9: note = Seed: VVGARGVGK (KRAS G12R)
WVGIRAVGS

SEQ ID NO: 46259 - protein, 9 aa, synthetic construct
  source 1..9: note = Seed: VVGARGVGK (KRAS G12R)
WVGIRAVGT

SEQ ID NO: 46260 - protein, 9 aa, synthetic construct
  source 1..9: note = Seed: VVGARGVGK (KRAS G12R)
WVGIRAVGV

SEQ ID NO: 46261 - protein, 9 aa, synthetic construct
  source 1..9: note = Seed: VVGARGVGK (KRAS G12R)
WVGIRAVGW

SEQ ID NO: 46262 - protein, 9 aa, synthetic construct
  source 1..9: note = Seed: VVGARGVGK (KRAS G12R)
WVGIRAVGY

SEQ ID NO: 46263 - protein, 9 aa, synthetic construct
  source 1..9: note = Seed: VVGARGVGK (KRAS G12R)
WVGIRGVGA

SEQ ID NO: 46264 - protein, 9 aa, synthetic construct
  source 1..9: note = Seed: VVGARGVGK (KRAS G12R)
WVGIRGVGC

SEQ ID NO: 46265 - protein, 9 aa, synthetic construct
  source 1..9: note = Seed: VVGARGVGK (KRAS G12R)
WVGIRGVGF

SEQ ID NO: 46266 - protein, 9 aa, synthetic construct
  source 1..9: note = Seed: VVGARGVGK (KRAS G12R)
WVGIRGVGG

SEQ ID NO: 46267 - protein, 9 aa, synthetic construct
  source 1..9: note = Seed: VVGARGVGK (KRAS G12R)
WVGIRGVGH

SEQ ID NO: 46268 - protein, 9 aa, synthetic construct
  source 1..9: note = Seed: VVGARGVGK (KRAS G12R)
WVGIRGVGI

SEQ ID NO: 46269 - protein, 9 aa, synthetic construct
  source 1..9: note = Seed: VVGARGVGK (KRAS G12R)
WVGIRGVGL

SEQ ID NO: 46270 - protein, 9 aa, synthetic construct
  source 1..9: note = Seed: VVGARGVGK (KRAS G12R)
WVGIRGVGM

SEQ ID NO: 46271 - protein, 9 aa, synthetic construct
  source 1..9: note = Seed: VVGARGVGK (KRAS G12R)
WVGIRGVGN

SEQ ID NO: 46272 - protein, 9 aa, synthetic construct
  source 1..9: note = Seed: VVGARGVGK (KRAS G12R)
WVGIRGVGP

SEQ ID NO: 46273 - protein, 9 aa, synthetic construct
  source 1..9: note = Seed: VVGARGVGK (KRAS G12R)
WVGIRGVGQ

SEQ ID NO: 46274 - protein, 9 aa, synthetic construct
  source 1..9: note = Seed: VVGARGVGK (KRAS G12R)
WVGIRGVGR

SEQ ID NO: 46275 - protein, 9 aa, synthetic construct
  source 1..9: note = Seed: VVGARGVGK (KRAS G12R)
WVGIRGVGS

SEQ ID NO: 46276 - protein, 9 aa, synthetic construct
  source 1..9: note = Seed: VVGARGVGK (KRAS G12R)
WVGIRGVGT

SEQ ID NO: 46277 - protein, 9 aa, synthetic construct
  source 1..9: note = Seed: VVGARGVGK (KRAS G12R)
WVGIRGVGV

SEQ ID NO: 46278 - protein, 9 aa, synthetic construct
  source 1..9: note = Seed: VVGARGVGK (KRAS G12R)
WVGIRGVGY

SEQ ID NO: 46279 - protein, 9 aa, synthetic construct
  source 1..9: note = Seed: VVGARGVGK (KRAS G12R)
WVGIRHVGI

SEQ ID NO: 46280 - protein, 9 aa, synthetic construct
  source 1..9: note = Seed: VVGARGVGK (KRAS G12R)
WVGIRHVGL

SEQ ID NO: 46281 - protein, 9 aa, synthetic construct
  source 1..9: note = Seed: VVGARGVGK (KRAS G12R)
WVGIRHVGM

SEQ ID NO: 46282 - protein, 9 aa, synthetic construct
  source 1..9: note = Seed: VVGARGVGK (KRAS G12R)
WVGIRHVGV

SEQ ID NO: 46283 - protein, 9 aa, synthetic construct
  source 1..9: note = Seed: VVGARGVGK (KRAS G12R)
WVGIRIVGA

SEQ ID NO: 46284 - protein, 9 aa, synthetic construct
  source 1..9: note = Seed: VVGARGVGK (KRAS G12R)
WVGIRIVGH

SEQ ID NO: 46285 - protein, 9 aa, synthetic construct
  source 1..9: note = Seed: VVGARGVGK (KRAS G12R)
WVGIRIVGI

SEQ ID NO: 46286 - protein, 9 aa, synthetic construct
  source 1..9: note = Seed: VVGARGVGK (KRAS G12R)
WVGIRIVGM

SEQ ID NO: 46287 - protein, 9 aa, synthetic construct
  source 1..9: note = Seed: VVGARGVGK (KRAS G12R)
WVGIRIVGN

SEQ ID NO: 46288 - protein, 9 aa, synthetic construct
  source 1..9: note = Seed: VVGARGVGK (KRAS G12R)
WVGIRIVGS

SEQ ID NO: 46289 - protein, 9 aa, synthetic construct
  source 1..9: note = Seed: VVGARGVGK (KRAS G12R)
WVGIRIVGV

SEQ ID NO: 46290 - protein, 9 aa, synthetic construct
  source 1..9: note = Seed: VVGARGVGK (KRAS G12R)
WVGIRLVGN

SEQ ID NO: 46291 - protein, 9 aa, synthetic construct
  source 1..9: note = Seed: VVGARGVGK (KRAS G12R)
WVGIRLVGS

SEQ ID NO: 46292 - protein, 9 aa, synthetic construct
  source 1..9: note = Seed: VVGARGVGK (KRAS G12R)
WVGIRMVGL

SEQ ID NO: 46293 - protein, 9 aa, synthetic construct
  source 1..9: note = Seed: VVGARGVGK (KRAS G12R)
WVGIRMVGM

SEQ ID NO: 46294 - protein, 9 aa, synthetic construct
  source 1..9: note = Seed: VVGARGVGK (KRAS G12R)
WVGIRNVGA

SEQ ID NO: 46295 - protein, 9 aa, synthetic construct
  source 1..9: note = Seed: VVGARGVGK (KRAS G12R)
WVGIRNVGG

SEQ ID NO: 46296 - protein, 9 aa, synthetic construct
  source 1..9: note = Seed: VVGARGVGK (KRAS G12R)
WVGIRNVGI

SEQ ID NO: 46297 - protein, 9 aa, synthetic construct
  source 1..9: note = Seed: VVGARGVGK (KRAS G12R)
WVGIRNVGL

SEQ ID NO: 46298 - protein, 9 aa, synthetic construct
  source 1..9: note = Seed: VVGARGVGK (KRAS G12R)
WVGIRNVGM

SEQ ID NO: 46299 - protein, 9 aa, synthetic construct
  source 1..9: note = Seed: VVGARGVGK (KRAS G12R)
WVGIRNVGN

SEQ ID NO: 46300 - protein, 9 aa, synthetic construct
  source 1..9: note = Seed: VVGARGVGK (KRAS G12R)
WVGIRNVGS

SEQ ID NO: 46301 - protein, 9 aa, synthetic construct
  source 1..9: note = Seed: VVGARGVGK (KRAS G12R)
WVGIRNVGT

SEQ ID NO: 46302 - protein, 9 aa, synthetic construct
  source 1..9: note = Seed: VVGARGVGK (KRAS G12R)
WVGIRNVGV

SEQ ID NO: 46303 - protein, 9 aa, synthetic construct
  source 1..9: note = Seed: VVGARGVGK (KRAS G12R)
WVGIRPVGA

SEQ ID NO: 46304 - protein, 9 aa, synthetic construct
  source 1..9: note = Seed: VVGARGVGK (KRAS G12R)
WVGIRPVGC

SEQ ID NO: 46305 - protein, 9 aa, synthetic construct
  source 1..9: note = Seed: VVGARGVGK (KRAS G12R)
WVGIRPVGD

SEQ ID NO: 46306 - protein, 9 aa, synthetic construct
  source 1..9: note = Seed: VVGARGVGK (KRAS G12R)
WVGIRPVGE

SEQ ID NO: 46307 - protein, 9 aa, synthetic construct
  source 1..9: note = Seed: VVGARGVGK (KRAS G12R)
WVGIRPVGF

SEQ ID NO: 46308 - protein, 9 aa, synthetic construct
  source 1..9: note = Seed: VVGARGVGK (KRAS G12R)
WVGIRPVGG

SEQ ID NO: 46309 - protein, 9 aa, synthetic construct
  source 1..9: note = Seed: VVGARGVGK (KRAS G12R)
WVGIRPVGH

SEQ ID NO: 46310 - protein, 9 aa, synthetic construct
  source 1..9: note = Seed: VVGARGVGK (KRAS G12R)
WVGIRPVGI

SEQ ID NO: 46311 - protein, 9 aa, synthetic construct
  source 1..9: note = Seed: VVGARGVGK (KRAS G12R)
WVGIRPVGK

SEQ ID NO: 46312 - protein, 9 aa, synthetic construct
  source 1..9: note = Seed: VVGARGVGK (KRAS G12R)
WVGIRPVGL

SEQ ID NO: 46313 - protein, 9 aa, synthetic construct
  source 1..9: note = Seed: VVGARGVGK (KRAS G12R)
WVGIRPVGM

SEQ ID NO: 46314 - protein, 9 aa, synthetic construct
  source 1..9: note = Seed: VVGARGVGK (KRAS G12R)
WVGIRPVGN

SEQ ID NO: 46315 - protein, 9 aa, synthetic construct
  source 1..9: note = Seed: VVGARGVGK (KRAS G12R)
WVGIRPVGP

SEQ ID NO: 46316 - protein, 9 aa, synthetic construct
  source 1..9: note = Seed: VVGARGVGK (KRAS G12R)
WVGIRPVGQ

SEQ ID NO: 46317 - protein, 9 aa, synthetic construct
  source 1..9: note = Seed: VVGARGVGK (KRAS G12R)
WVGIRPVGR

SEQ ID NO: 46318 - protein, 9 aa, synthetic construct
  source 1..9: note = Seed: VVGARGVGK (KRAS G12R)
WVGIRPVGS

SEQ ID NO: 46319 - protein, 9 aa, synthetic construct
  source 1..9: note = Seed: VVGARGVGK (KRAS G12R)
WVGIRPVGT

SEQ ID NO: 46320 - protein, 9 aa, synthetic construct
  source 1..9: note = Seed: VVGARGVGK (KRAS G12R)
WVGIRPVGV

SEQ ID NO: 46321 - protein, 9 aa, synthetic construct
  source 1..9: note = Seed: VVGARGVGK (KRAS G12R)
WVGIRPVGY

SEQ ID NO: 46322 - protein, 9 aa, synthetic construct
  source 1..9: note = Seed: VVGARGVGK (KRAS G12R)
WVGIRQVGL

SEQ ID NO: 46323 - protein, 9 aa, synthetic construct
  source 1..9: note = Seed: VVGARGVGK (KRAS G12R)
WVGIRQVGV

SEQ ID NO: 46324 - protein, 9 aa, synthetic construct
  source 1..9: note = Seed: VVGARGVGK (KRAS G12R)
WVGIRRVGA

SEQ ID NO: 46325 - protein, 9 aa, synthetic construct
  source 1..9: note = Seed: VVGARGVGK (KRAS G12R)
WVGIRRVGS

SEQ ID NO: 46326 - protein, 9 aa, synthetic construct
  source 1..9: note = Seed: VVGARGVGK (KRAS G12R)
WVGIRRVGY

SEQ ID NO: 46327 - protein, 9 aa, synthetic construct
  source 1..9: note = Seed: VVGARGVGK (KRAS G12R)
WVGIRSVGA

SEQ ID NO: 46328 - protein, 9 aa, synthetic construct
  source 1..9: note = Seed: VVGARGVGK (KRAS G12R)
WVGIRSVGC

SEQ ID NO: 46329 - protein, 9 aa, synthetic construct
  source 1..9: note = Seed: VVGARGVGK (KRAS G12R)
WVGIRSVGF

SEQ ID NO: 46330 - protein, 9 aa, synthetic construct
  source 1..9: note = Seed: VVGARGVGK (KRAS G12R)
WVGIRSVGG

SEQ ID NO: 46331 - protein, 9 aa, synthetic construct
  source 1..9: note = Seed: VVGARGVGK (KRAS G12R)
WVGIRSVGH

SEQ ID NO: 46332 - protein, 9 aa, synthetic construct
  source 1..9: note = Seed: VVGARGVGK (KRAS G12R)
WVGIRSVGI

SEQ ID NO: 46333 - protein, 9 aa, synthetic construct
  source 1..9: note = Seed: VVGARGVGK (KRAS G12R)
WVGIRSVGK

SEQ ID NO: 46334 - protein, 9 aa, synthetic construct
  source 1..9: note = Seed: VVGARGVGK (KRAS G12R)
WVGIRSVGL

SEQ ID NO: 46335 - protein, 9 aa, synthetic construct
  source 1..9: note = Seed: VVGARGVGK (KRAS G12R)
WVGIRSVGM

SEQ ID NO: 46336 - protein, 9 aa, synthetic construct
  source 1..9: note = Seed: VVGARGVGK (KRAS G12R)
WVGIRSVGN

SEQ ID NO: 46337 - protein, 9 aa, synthetic construct
  source 1..9: note = Seed: VVGARGVGK (KRAS G12R)
WVGIRSVGQ

SEQ ID NO: 46338 - protein, 9 aa, synthetic construct
  source 1..9: note = Seed: VVGARGVGK (KRAS G12R)
WVGIRSVGR

SEQ ID NO: 46339 - protein, 9 aa, synthetic construct
  source 1..9: note = Seed: VVGARGVGK (KRAS G12R)
WVGIRSVGS

SEQ ID NO: 46340 - protein, 9 aa, synthetic construct
  source 1..9: note = Seed: VVGARGVGK (KRAS G12R)
WVGIRSVGT

SEQ ID NO: 46341 - protein, 9 aa, synthetic construct
  source 1..9: note = Seed: VVGARGVGK (KRAS G12R)
WVGIRSVGV

SEQ ID NO: 46342 - protein, 9 aa, synthetic construct
  source 1..9: note = Seed: VVGARGVGK (KRAS G12R)
WVGIRSVGY

SEQ ID NO: 46343 - protein, 9 aa, synthetic construct
  source 1..9: note = Seed: VVGARGVGK (KRAS G12R)
WVGIRTVGA

SEQ ID NO: 46344 - protein, 9 aa, synthetic construct
  source 1..9: note = Seed: VVGARGVGK (KRAS G12R)
WVGIRTVGG

SEQ ID NO: 46345 - protein, 9 aa, synthetic construct
  source 1..9: note = Seed: VVGARGVGK (KRAS G12R)
WVGIRTVGH

SEQ ID NO: 46346 - protein, 9 aa, synthetic construct
  source 1..9: note = Seed: VVGARGVGK (KRAS G12R)
WVGIRTVGI

SEQ ID NO: 46347 - protein, 9 aa, synthetic construct
  source 1..9: note = Seed: VVGARGVGK (KRAS G12R)
WVGIRTVGL

SEQ ID NO: 46348 - protein, 9 aa, synthetic construct
  source 1..9: note = Seed: VVGARGVGK (KRAS G12R)
WVGIRTVGM

SEQ ID NO: 46349 - protein, 9 aa, synthetic construct
  source 1..9: note = Seed: VVGARGVGK (KRAS G12R)
WVGIRTVGN

SEQ ID NO: 46350 - protein, 9 aa, synthetic construct
  source 1..9: note = Seed: VVGARGVGK (KRAS G12R)
WVGIRTVGQ

SEQ ID NO: 46351 - protein, 9 aa, synthetic construct
  source 1..9: note = Seed: VVGARGVGK (KRAS G12R)
WVGIRTVGR

SEQ ID NO: 46352 - protein, 9 aa, synthetic construct
  source 1..9: note = Seed: VVGARGVGK (KRAS G12R)
WVGIRTVGS

SEQ ID NO: 46353 - protein, 9 aa, synthetic construct
  source 1..9: note = Seed: VVGARGVGK (KRAS G12R)
WVGIRTVGT

SEQ ID NO: 46354 - protein, 9 aa, synthetic construct
  source 1..9: note = Seed: VVGARGVGK (KRAS G12R)
WVGIRTVGV

SEQ ID NO: 46355 - protein, 9 aa, synthetic construct
  source 1..9: note = Seed: VVGARGVGK (KRAS G12R)
WVGIRVVGA

SEQ ID NO: 46356 - protein, 9 aa, synthetic construct
  source 1..9: note = Seed: VVGARGVGK (KRAS G12R)
WVGIRVVGG

SEQ ID NO: 46357 - protein, 9 aa, synthetic construct
  source 1..9: note = Seed: VVGARGVGK (KRAS G12R)
WVGIRVVGH

SEQ ID NO: 46358 - protein, 9 aa, synthetic construct
  source 1..9: note = Seed: VVGARGVGK (KRAS G12R)
WVGIRVVGI

SEQ ID NO: 46359 - protein, 9 aa, synthetic construct
  source 1..9: note = Seed: VVGARGVGK (KRAS G12R)
WVGIRVVGL

SEQ ID NO: 46360 - protein, 9 aa, synthetic construct
  source 1..9: note = Seed: VVGARGVGK (KRAS G12R)
WVGIRVVGM

SEQ ID NO: 46361 - protein, 9 aa, synthetic construct
  source 1..9: note = Seed: VVGARGVGK (KRAS G12R)
WVGIRVVGN

SEQ ID NO: 46362 - protein, 9 aa, synthetic construct
  source 1..9: note = Seed: VVGARGVGK (KRAS G12R)
WVGIRVVGS

SEQ ID NO: 46363 - protein, 9 aa, synthetic construct
  source 1..9: note = Seed: VVGARGVGK (KRAS G12R)
WVGIRVVGT

SEQ ID NO: 46364 - protein, 9 aa, synthetic construct
  source 1..9: note = Seed: VVGARGVGK (KRAS G12R)
WVGIRVVGV

SEQ ID NO: 46365 - protein, 9 aa, synthetic construct
  source 1..9: note = Seed: VVGARGVGK (KRAS G12R)
WVGKRAVGA

SEQ ID NO: 46366 - protein, 9 aa, synthetic construct
  source 1..9: note = Seed: VVGARGVGK (KRAS G12R)
WVGKRAVGI

SEQ ID NO: 46367 - protein, 9 aa, synthetic construct
  source 1..9: note = Seed: VVGARGVGK (KRAS G12R)
WVGKRAVGL

SEQ ID NO: 46368 - protein, 9 aa, synthetic construct
  source 1..9: note = Seed: VVGARGVGK (KRAS G12R)
WVGKRAVGM

SEQ ID NO: 46369 - protein, 9 aa, synthetic construct
  source 1..9: note = Seed: VVGARGVGK (KRAS G12R)
WVGKRAVGV

SEQ ID NO: 46370 - protein, 9 aa, synthetic construct
  source 1..9: note = Seed: VVGARGVGK (KRAS G12R)
WVGKRGVGL

SEQ ID NO: 46371 - protein, 9 aa, synthetic construct
  source 1..9: note = Seed: VVGARGVGK (KRAS G12R)
WVGKRKVGR

SEQ ID NO: 46372 - protein, 9 aa, synthetic construct
  source 1..9: note = Seed: VVGARGVGK (KRAS G12R)
WVGKRRVGF

SEQ ID NO: 46373 - protein, 9 aa, synthetic construct
  source 1..9: note = Seed: VVGARGVGK (KRAS G12R)
WVGKRRVGI

SEQ ID NO: 46374 - protein, 9 aa, synthetic construct
  source 1..9: note = Seed: VVGARGVGK (KRAS G12R)
WVGKRRVGK

SEQ ID NO: 46375 - protein, 9 aa, synthetic construct
  source 1..9: note = Seed: VVGARGVGK (KRAS G12R)
WVGKRRVGL

SEQ ID NO: 46376 - protein, 9 aa, synthetic construct
  source 1..9: note = Seed: VVGARGVGK (KRAS G12R)
WVGKRRVGM

SEQ ID NO: 46377 - protein, 9 aa, synthetic construct
  source 1..9: note = Seed: VVGARGVGK (KRAS G12R)
WVGKRRVGR

SEQ ID NO: 46378 - protein, 9 aa, synthetic construct
  source 1..9: note = Seed: VVGARGVGK (KRAS G12R)
WVGKRRVGV

SEQ ID NO: 46379 - protein, 9 aa, synthetic construct
  source 1..9: note = Seed: VVGARGVGK (KRAS G12R)
WVGKRRVGY

SEQ ID NO: 46380 - protein, 9 aa, synthetic construct
  source 1..9: note = Seed: VVGARGVGK (KRAS G12R)
WVGKRSVGI

SEQ ID NO: 46381 - protein, 9 aa, synthetic construct
  source 1..9: note = Seed: VVGARGVGK (KRAS G12R)
WVGKRSVGL

SEQ ID NO: 46382 - protein, 9 aa, synthetic construct
  source 1..9: note = Seed: VVGARGVGK (KRAS G12R)
WVGKRSVGV

SEQ ID NO: 46383 - protein, 9 aa, synthetic construct
  source 1..9: note = Seed: VVGARGVGK (KRAS G12R)
WVGLRAVGA

SEQ ID NO: 46384 - protein, 9 aa, synthetic construct
  source 1..9: note = Seed: VVGARGVGK (KRAS G12R)
WVGLRAVGC

SEQ ID NO: 46385 - protein, 9 aa, synthetic construct
  source 1..9: note = Seed: VVGARGVGK (KRAS G12R)
WVGLRAVGD

SEQ ID NO: 46386 - protein, 9 aa, synthetic construct
  source 1..9: note = Seed: VVGARGVGK (KRAS G12R)
WVGLRAVGE

SEQ ID NO: 46387 - protein, 9 aa, synthetic construct
  source 1..9: note = Seed: VVGARGVGK (KRAS G12R)
WVGLRAVGF

SEQ ID NO: 46388 - protein, 9 aa, synthetic construct
  source 1..9: note = Seed: VVGARGVGK (KRAS G12R)
WVGLRAVGG

SEQ ID NO: 46389 - protein, 9 aa, synthetic construct
  source 1..9: note = Seed: VVGARGVGK (KRAS G12R)
WVGLRAVGH

SEQ ID NO: 46390 - protein, 9 aa, synthetic construct
  source 1..9: note = Seed: VVGARGVGK (KRAS G12R)
WVGLRAVGI

SEQ ID NO: 46391 - protein, 9 aa, synthetic construct
  source 1..9: note = Seed: VVGARGVGK (KRAS G12R)
WVGLRAVGK

SEQ ID NO: 46392 - protein, 9 aa, synthetic construct
  source 1..9: note = Seed: VVGARGVGK (KRAS G12R)
WVGLRAVGL

SEQ ID NO: 46393 - protein, 9 aa, synthetic construct
  source 1..9: note = Seed: VVGARGVGK (KRAS G12R)
WVGLRAVGM

SEQ ID NO: 46394 - protein, 9 aa, synthetic construct
  source 1..9: note = Seed: VVGARGVGK (KRAS G12R)
WVGLRAVGN

SEQ ID NO: 46395 - protein, 9 aa, synthetic construct
  source 1..9: note = Seed: VVGARGVGK (KRAS G12R)
WVGLRAVGP

SEQ ID NO: 46396 - protein, 9 aa, synthetic construct
  source 1..9: note = Seed: VVGARGVGK (KRAS G12R)
WVGLRAVGQ

SEQ ID NO: 46397 - protein, 9 aa, synthetic construct
  source 1..9: note = Seed: VVGARGVGK (KRAS G12R)
WVGLRAVGR

SEQ ID NO: 46398 - protein, 9 aa, synthetic construct
  source 1..9: note = Seed: VVGARGVGK (KRAS G12R)
WVGLRAVGS

SEQ ID NO: 46399 - protein, 9 aa, synthetic construct
  source 1..9: note = Seed: VVGARGVGK (KRAS G12R)
WVGLRAVGT

SEQ ID NO: 46400 - protein, 9 aa, synthetic construct
  source 1..9: note = Seed: VVGARGVGK (KRAS G12R)
WVGLRAVGV

SEQ ID NO: 46401 - protein, 9 aa, synthetic construct
  source 1..9: note = Seed: VVGARGVGK (KRAS G12R)
WVGLRAVGW

SEQ ID NO: 46402 - protein, 9 aa, synthetic construct
  source 1..9: note = Seed: VVGARGVGK (KRAS G12R)
WVGLRAVGY

SEQ ID NO: 46403 - protein, 9 aa, synthetic construct
  source 1..9: note = Seed: VVGARGVGK (KRAS G12R)
WVGLRCVGA

SEQ ID NO: 46404 - protein, 9 aa, synthetic construct
  source 1..9: note = Seed: VVGARGVGK (KRAS G12R)
WVGLRCVGS

SEQ ID NO: 46405 - protein, 9 aa, synthetic construct
  source 1..9: note = Seed: VVGARGVGK (KRAS G12R)
WVGLRDVGA

SEQ ID NO: 46406 - protein, 9 aa, synthetic construct
  source 1..9: note = Seed: VVGARGVGK (KRAS G12R)
WVGLRDVGI

SEQ ID NO: 46407 - protein, 9 aa, synthetic construct
  source 1..9: note = Seed: VVGARGVGK (KRAS G12R)
WVGLRDVGL

SEQ ID NO: 46408 - protein, 9 aa, synthetic construct
  source 1..9: note = Seed: VVGARGVGK (KRAS G12R)
WVGLRDVGV

SEQ ID NO: 46409 - protein, 9 aa, synthetic construct
  source 1..9: note = Seed: VVGARGVGK (KRAS G12R)
WVGLREVGA

SEQ ID NO: 46410 - protein, 9 aa, synthetic construct
  source 1..9: note = Seed: VVGARGVGK (KRAS G12R)
WVGLREVGI

SEQ ID NO: 46411 - protein, 9 aa, synthetic construct
  source 1..9: note = Seed: VVGARGVGK (KRAS G12R)
WVGLREVGL

SEQ ID NO: 46412 - protein, 9 aa, synthetic construct
  source 1..9: note = Seed: VVGARGVGK (KRAS G12R)
WVGLREVGV

SEQ ID NO: 46413 - protein, 9 aa, synthetic construct
  source 1..9: note = Seed: VVGARGVGK (KRAS G12R)
WVGLRGVGA

SEQ ID NO: 46414 - protein, 9 aa, synthetic construct
  source 1..9: note = Seed: VVGARGVGK (KRAS G12R)
WVGLRGVGC

SEQ ID NO: 46415 - protein, 9 aa, synthetic construct
  source 1..9: note = Seed: VVGARGVGK (KRAS G12R)
WVGLRGVGD

SEQ ID NO: 46416 - protein, 9 aa, synthetic construct
  source 1..9: note = Seed: VVGARGVGK (KRAS G12R)
WVGLRGVGE

SEQ ID NO: 46417 - protein, 9 aa, synthetic construct
  source 1..9: note = Seed: VVGARGVGK (KRAS G12R)
WVGLRGVGF

SEQ ID NO: 46418 - protein, 9 aa, synthetic construct
  source 1..9: note = Seed: VVGARGVGK (KRAS G12R)
WVGLRGVGG

SEQ ID NO: 46419 - protein, 9 aa, synthetic construct
  source 1..9: note = Seed: VVGARGVGK (KRAS G12R)
WVGLRGVGH

SEQ ID NO: 46420 - protein, 9 aa, synthetic construct
  source 1..9: note = Seed: VVGARGVGK (KRAS G12R)
WVGLRGVGI

SEQ ID NO: 46421 - protein, 9 aa, synthetic construct
  source 1..9: note = Seed: VVGARGVGK (KRAS G12R)
WVGLRGVGK

SEQ ID NO: 46422 - protein, 9 aa, synthetic construct
  source 1..9: note = Seed: VVGARGVGK (KRAS G12R)
WVGLRGVGL

SEQ ID NO: 46423 - protein, 9 aa, synthetic construct
  source 1..9: note = Seed: VVGARGVGK (KRAS G12R)
WVGLRGVGM

SEQ ID NO: 46424 - protein, 9 aa, synthetic construct
  source 1..9: note = Seed: VVGARGVGK (KRAS G12R)
WVGLRGVGN

SEQ ID NO: 46425 - protein, 9 aa, synthetic construct
  source 1..9: note = Seed: VVGARGVGK (KRAS G12R)
WVGLRGVGP

SEQ ID NO: 46426 - protein, 9 aa, synthetic construct
  source 1..9: note = Seed: VVGARGVGK (KRAS G12R)
WVGLRGVGQ

SEQ ID NO: 46427 - protein, 9 aa, synthetic construct
  source 1..9: note = Seed: VVGARGVGK (KRAS G12R)
WVGLRGVGR

SEQ ID NO: 46428 - protein, 9 aa, synthetic construct
  source 1..9: note = Seed: VVGARGVGK (KRAS G12R)
WVGLRGVGS

SEQ ID NO: 46429 - protein, 9 aa, synthetic construct
  source 1..9: note = Seed: VVGARGVGK (KRAS G12R)
WVGLRGVGT

SEQ ID NO: 46430 - protein, 9 aa, synthetic construct
  source 1..9: note = Seed: VVGARGVGK (KRAS G12R)
WVGLRGVGV

SEQ ID NO: 46431 - protein, 9 aa, synthetic construct
  source 1..9: note = Seed: VVGARGVGK (KRAS G12R)
WVGLRGVGY

SEQ ID NO: 46432 - protein, 9 aa, synthetic construct
  source 1..9: note = Seed: VVGARGVGK (KRAS G12R)
WVGLRHVGI

SEQ ID NO: 46433 - protein, 9 aa, synthetic construct
  source 1..9: note = Seed: VVGARGVGK (KRAS G12R)
WVGLRHVGL

SEQ ID NO: 46434 - protein, 9 aa, synthetic construct
  source 1..9: note = Seed: VVGARGVGK (KRAS G12R)
WVGLRHVGM

SEQ ID NO: 46435 - protein, 9 aa, synthetic construct
  source 1..9: note = Seed: VVGARGVGK (KRAS G12R)
WVGLRHVGN

SEQ ID NO: 46436 - protein, 9 aa, synthetic construct
  source 1..9: note = Seed: VVGARGVGK (KRAS G12R)
WVGLRHVGT

SEQ ID NO: 46437 - protein, 9 aa, synthetic construct
  source 1..9: note = Seed: VVGARGVGK (KRAS G12R)
WVGLRHVGV

SEQ ID NO: 46438 - protein, 9 aa, synthetic construct
  source 1..9: note = Seed: VVGARGVGK (KRAS G12R)
WVGLRIVGA

SEQ ID NO: 46439 - protein, 9 aa, synthetic construct
  source 1..9: note = Seed: VVGARGVGK (KRAS G12R)
WVGLRIVGG

SEQ ID NO: 46440 - protein, 9 aa, synthetic construct
  source 1..9: note = Seed: VVGARGVGK (KRAS G12R)
WVGLRIVGH

SEQ ID NO: 46441 - protein, 9 aa, synthetic construct
  source 1..9: note = Seed: VVGARGVGK (KRAS G12R)
WVGLRIVGI

SEQ ID NO: 46442 - protein, 9 aa, synthetic construct
  source 1..9: note = Seed: VVGARGVGK (KRAS G12R)
WVGLRIVGL

SEQ ID NO: 46443 - protein, 9 aa, synthetic construct
  source 1..9: note = Seed: VVGARGVGK (KRAS G12R)
WVGLRIVGM

SEQ ID NO: 46444 - protein, 9 aa, synthetic construct
  source 1..9: note = Seed: VVGARGVGK (KRAS G12R)
WVGLRIVGN

SEQ ID NO: 46445 - protein, 9 aa, synthetic construct
  source 1..9: note = Seed: VVGARGVGK (KRAS G12R)
WVGLRIVGR

SEQ ID NO: 46446 - protein, 9 aa, synthetic construct
  source 1..9: note = Seed: VVGARGVGK (KRAS G12R)
WVGLRIVGS

SEQ ID NO: 46447 - protein, 9 aa, synthetic construct
  source 1..9: note = Seed: VVGARGVGK (KRAS G12R)
WVGLRIVGT

SEQ ID NO: 46448 - protein, 9 aa, synthetic construct
  source 1..9: note = Seed: VVGARGVGK (KRAS G12R)
WVGLRIVGV

SEQ ID NO: 46449 - protein, 9 aa, synthetic construct
  source 1..9: note = Seed: VVGARGVGK (KRAS G12R)
WVGLRKVGL

SEQ ID NO: 46450 - protein, 9 aa, synthetic construct
  source 1..9: note = Seed: VVGARGVGK (KRAS G12R)
WVGLRKVGT

SEQ ID NO: 46451 - protein, 9 aa, synthetic construct
  source 1..9: note = Seed: VVGARGVGK (KRAS G12R)
WVGLRKVGV

SEQ ID NO: 46452 - protein, 9 aa, synthetic construct
  source 1..9: note = Seed: VVGARGVGK (KRAS G12R)
WVGLRLVGA

SEQ ID NO: 46453 - protein, 9 aa, synthetic construct
  source 1..9: note = Seed: VVGARGVGK (KRAS G12R)
WVGLRLVGI

SEQ ID NO: 46454 - protein, 9 aa, synthetic construct
  source 1..9: note = Seed: VVGARGVGK (KRAS G12R)
WVGLRLVGM

SEQ ID NO: 46455 - protein, 9 aa, synthetic construct
  source 1..9: note = Seed: VVGARGVGK (KRAS G12R)
WVGLRLVGN

SEQ ID NO: 46456 - protein, 9 aa, synthetic construct
  source 1..9: note = Seed: VVGARGVGK (KRAS G12R)
WVGLRLVGS

SEQ ID NO: 46457 - protein, 9 aa, synthetic construct
  source 1..9: note = Seed: VVGARGVGK (KRAS G12R)
WVGLRLVGT

SEQ ID NO: 46458 - protein, 9 aa, synthetic construct
  source 1..9: note = Seed: VVGARGVGK (KRAS G12R)
WVGLRLVGV

SEQ ID NO: 46459 - protein, 9 aa, synthetic construct
  source 1..9: note = Seed: VVGARGVGK (KRAS G12R)
WVGLRMVGI

SEQ ID NO: 46460 - protein, 9 aa, synthetic construct
  source 1..9: note = Seed: VVGARGVGK (KRAS G12R)
WVGLRMVGL

SEQ ID NO: 46461 - protein, 9 aa, synthetic construct
  source 1..9: note = Seed: VVGARGVGK (KRAS G12R)
WVGLRMVGM

SEQ ID NO: 46462 - protein, 9 aa, synthetic construct
  source 1..9: note = Seed: VVGARGVGK (KRAS G12R)
WVGLRMVGN

SEQ ID NO: 46463 - protein, 9 aa, synthetic construct
  source 1..9: note = Seed: VVGARGVGK (KRAS G12R)
WVGLRMVGS

SEQ ID NO: 46464 - protein, 9 aa, synthetic construct
  source 1..9: note = Seed: VVGARGVGK (KRAS G12R)
WVGLRMVGV

SEQ ID NO: 46465 - protein, 9 aa, synthetic construct
  source 1..9: note = Seed: VVGARGVGK (KRAS G12R)
WVGLRNVGA

SEQ ID NO: 46466 - protein, 9 aa, synthetic construct
  source 1..9: note = Seed: VVGARGVGK (KRAS G12R)
WVGLRNVGC

SEQ ID NO: 46467 - protein, 9 aa, synthetic construct
  source 1..9: note = Seed: VVGARGVGK (KRAS G12R)
WVGLRNVGF

SEQ ID NO: 46468 - protein, 9 aa, synthetic construct
  source 1..9: note = Seed: VVGARGVGK (KRAS G12R)
WVGLRNVGG

SEQ ID NO: 46469 - protein, 9 aa, synthetic construct
  source 1..9: note = Seed: VVGARGVGK (KRAS G12R)
WVGLRNVGH

SEQ ID NO: 46470 - protein, 9 aa, synthetic construct
  source 1..9: note = Seed: VVGARGVGK (KRAS G12R)
WVGLRNVGI

SEQ ID NO: 46471 - protein, 9 aa, synthetic construct
  source 1..9: note = Seed: VVGARGVGK (KRAS G12R)
WVGLRNVGL

SEQ ID NO: 46472 - protein, 9 aa, synthetic construct
  source 1..9: note = Seed: VVGARGVGK (KRAS G12R)
WVGLRNVGM

SEQ ID NO: 46473 - protein, 9 aa, synthetic construct
  source 1..9: note = Seed: VVGARGVGK (KRAS G12R)
WVGLRNVGN

SEQ ID NO: 46474 - protein, 9 aa, synthetic construct
  source 1..9: note = Seed: VVGARGVGK (KRAS G12R)
WVGLRNVGP

SEQ ID NO: 46475 - protein, 9 aa, synthetic construct
  source 1..9: note = Seed: VVGARGVGK (KRAS G12R)
WVGLRNVGQ

SEQ ID NO: 46476 - protein, 9 aa, synthetic construct
  source 1..9: note = Seed: VVGARGVGK (KRAS G12R)
WVGLRNVGR

SEQ ID NO: 46477 - protein, 9 aa, synthetic construct
  source 1..9: note = Seed: VVGARGVGK (KRAS G12R)
WVGLRNVGS

SEQ ID NO: 46478 - protein, 9 aa, synthetic construct
  source 1..9: note = Seed: VVGARGVGK (KRAS G12R)
WVGLRNVGT

SEQ ID NO: 46479 - protein, 9 aa, synthetic construct
  source 1..9: note = Seed: VVGARGVGK (KRAS G12R)
WVGLRNVGV

SEQ ID NO: 46480 - protein, 9 aa, synthetic construct
  source 1..9: note = Seed: VVGARGVGK (KRAS G12R)
WVGLRNVGY

SEQ ID NO: 46481 - protein, 9 aa, synthetic construct
  source 1..9: note = Seed: VVGARGVGK (KRAS G12R)
WVGLRPVGA

SEQ ID NO: 46482 - protein, 9 aa, synthetic construct
  source 1..9: note = Seed: VVGARGVGK (KRAS G12R)
WVGLRPVGC

SEQ ID NO: 46483 - protein, 9 aa, synthetic construct
  source 1..9: note = Seed: VVGARGVGK (KRAS G12R)
WVGLRPVGD

SEQ ID NO: 46484 - protein, 9 aa, synthetic construct
  source 1..9: note = Seed: VVGARGVGK (KRAS G12R)
WVGLRPVGE

SEQ ID NO: 46485 - protein, 9 aa, synthetic construct
  source 1..9: note = Seed: VVGARGVGK (KRAS G12R)
WVGLRPVGF

SEQ ID NO: 46486 - protein, 9 aa, synthetic construct
  source 1..9: note = Seed: VVGARGVGK (KRAS G12R)
WVGLRPVGG

SEQ ID NO: 46487 - protein, 9 aa, synthetic construct
  source 1..9: note = Seed: VVGARGVGK (KRAS G12R)
WVGLRPVGH

SEQ ID NO: 46488 - protein, 9 aa, synthetic construct
  source 1..9: note = Seed: VVGARGVGK (KRAS G12R)
WVGLRPVGI

SEQ ID NO: 46489 - protein, 9 aa, synthetic construct
  source 1..9: note = Seed: VVGARGVGK (KRAS G12R)
WVGLRPVGK

SEQ ID NO: 46490 - protein, 9 aa, synthetic construct
  source 1..9: note = Seed: VVGARGVGK (KRAS G12R)
WVGLRPVGL

SEQ ID NO: 46491 - protein, 9 aa, synthetic construct
  source 1..9: note = Seed: VVGARGVGK (KRAS G12R)
WVGLRPVGM

SEQ ID NO: 46492 - protein, 9 aa, synthetic construct
  source 1..9: note = Seed: VVGARGVGK (KRAS G12R)
WVGLRPVGN

SEQ ID NO: 46493 - protein, 9 aa, synthetic construct
  source 1..9: note = Seed: VVGARGVGK (KRAS G12R)
WVGLRPVGP

SEQ ID NO: 46494 - protein, 9 aa, synthetic construct
  source 1..9: note = Seed: VVGARGVGK (KRAS G12R)
WVGLRPVGQ

SEQ ID NO: 46495 - protein, 9 aa, synthetic construct
  source 1..9: note = Seed: VVGARGVGK (KRAS G12R)
WVGLRPVGR

SEQ ID NO: 46496 - protein, 9 aa, synthetic construct
  source 1..9: note = Seed: VVGARGVGK (KRAS G12R)
WVGLRPVGS

SEQ ID NO: 46497 - protein, 9 aa, synthetic construct
  source 1..9: note = Seed: VVGARGVGK (KRAS G12R)
WVGLRPVGT

SEQ ID NO: 46498 - protein, 9 aa, synthetic construct
  source 1..9: note = Seed: VVGARGVGK (KRAS G12R)
WVGLRPVGV

SEQ ID NO: 46499 - protein, 9 aa, synthetic construct
  source 1..9: note = Seed: VVGARGVGK (KRAS G12R)
WVGLRPVGW

SEQ ID NO: 46500 - protein, 9 aa, synthetic construct
  source 1..9: note = Seed: VVGARGVGK (KRAS G12R)
WVGLRPVGY

SEQ ID NO: 46501 - protein, 9 aa, synthetic construct
  source 1..9: note = Seed: VVGARGVGK (KRAS G12R)
WVGLRQVGI

SEQ ID NO: 46502 - protein, 9 aa, synthetic construct
  source 1..9: note = Seed: VVGARGVGK (KRAS G12R)
WVGLRQVGL

SEQ ID NO: 46503 - protein, 9 aa, synthetic construct
  source 1..9: note = Seed: VVGARGVGK (KRAS G12R)
WVGLRQVGM

SEQ ID NO: 46504 - protein, 9 aa, synthetic construct
  source 1..9: note = Seed: VVGARGVGK (KRAS G12R)
WVGLRQVGS

SEQ ID NO: 46505 - protein, 9 aa, synthetic construct
  source 1..9: note = Seed: VVGARGVGK (KRAS G12R)
WVGLRQVGV

SEQ ID NO: 46506 - protein, 9 aa, synthetic construct
  source 1..9: note = Seed: VVGARGVGK (KRAS G12R)
WVGLRRVGV

SEQ ID NO: 46507 - protein, 9 aa, synthetic construct
  source 1..9: note = Seed: VVGARGVGK (KRAS G12R)
WVGLRSVGA

SEQ ID NO: 46508 - protein, 9 aa, synthetic construct
  source 1..9: note = Seed: VVGARGVGK (KRAS G12R)
WVGLRSVGC

SEQ ID NO: 46509 - protein, 9 aa, synthetic construct
  source 1..9: note = Seed: VVGARGVGK (KRAS G12R)
WVGLRSVGD

SEQ ID NO: 46510 - protein, 9 aa, synthetic construct
  source 1..9: note = Seed: VVGARGVGK (KRAS G12R)
WVGLRSVGE

SEQ ID NO: 46511 - protein, 9 aa, synthetic construct
  source 1..9: note = Seed: VVGARGVGK (KRAS G12R)
WVGLRSVGF

SEQ ID NO: 46512 - protein, 9 aa, synthetic construct
  source 1..9: note = Seed: VVGARGVGK (KRAS G12R)
WVGLRSVGG

SEQ ID NO: 46513 - protein, 9 aa, synthetic construct
  source 1..9: note = Seed: VVGARGVGK (KRAS G12R)
WVGLRSVGH

SEQ ID NO: 46514 - protein, 9 aa, synthetic construct
  source 1..9: note = Seed: VVGARGVGK (KRAS G12R)
WVGLRSVGI

SEQ ID NO: 46515 - protein, 9 aa, synthetic construct
  source 1..9: note = Seed: VVGARGVGK (KRAS G12R)
WVGLRSVGK

SEQ ID NO: 46516 - protein, 9 aa, synthetic construct
  source 1..9: note = Seed: VVGARGVGK (KRAS G12R)
WVGLRSVGL

SEQ ID NO: 46517 - protein, 9 aa, synthetic construct
  source 1..9: note = Seed: VVGARGVGK (KRAS G12R)
WVGLRSVGM

SEQ ID NO: 46518 - protein, 9 aa, synthetic construct
  source 1..9: note = Seed: VVGARGVGK (KRAS G12R)
WVGLRSVGN

SEQ ID NO: 46519 - protein, 9 aa, synthetic construct
  source 1..9: note = Seed: VVGARGVGK (KRAS G12R)
WVGLRSVGP

SEQ ID NO: 46520 - protein, 9 aa, synthetic construct
  source 1..9: note = Seed: VVGARGVGK (KRAS G12R)
WVGLRSVGQ

SEQ ID NO: 46521 - protein, 9 aa, synthetic construct
  source 1..9: note = Seed: VVGARGVGK (KRAS G12R)
WVGLRSVGR

SEQ ID NO: 46522 - protein, 9 aa, synthetic construct
  source 1..9: note = Seed: VVGARGVGK (KRAS G12R)
WVGLRSVGS

SEQ ID NO: 46523 - protein, 9 aa, synthetic construct
  source 1..9: note = Seed: VVGARGVGK (KRAS G12R)
WVGLRSVGT

SEQ ID NO: 46524 - protein, 9 aa, synthetic construct
  source 1..9: note = Seed: VVGARGVGK (KRAS G12R)
WVGLRSVGV

SEQ ID NO: 46525 - protein, 9 aa, synthetic construct
  source 1..9: note = Seed: VVGARGVGK (KRAS G12R)
WVGLRSVGY

SEQ ID NO: 46526 - protein, 9 aa, synthetic construct
  source 1..9: note = Seed: VVGARGVGK (KRAS G12R)
WVGLRTVGA

SEQ ID NO: 46527 - protein, 9 aa, synthetic construct
  source 1..9: note = Seed: VVGARGVGK (KRAS G12R)
WVGLRTVGC

SEQ ID NO: 46528 - protein, 9 aa, synthetic construct
  source 1..9: note = Seed: VVGARGVGK (KRAS G12R)
WVGLRTVGD

SEQ ID NO: 46529 - protein, 9 aa, synthetic construct
  source 1..9: note = Seed: VVGARGVGK (KRAS G12R)
WVGLRTVGE

SEQ ID NO: 46530 - protein, 9 aa, synthetic construct
  source 1..9: note = Seed: VVGARGVGK (KRAS G12R)
WVGLRTVGF

SEQ ID NO: 46531 - protein, 9 aa, synthetic construct
  source 1..9: note = Seed: VVGARGVGK (KRAS G12R)
WVGLRTVGG

SEQ ID NO: 46532 - protein, 9 aa, synthetic construct
  source 1..9: note = Seed: VVGARGVGK (KRAS G12R)
WVGLRTVGH

SEQ ID NO: 46533 - protein, 9 aa, synthetic construct
  source 1..9: note = Seed: VVGARGVGK (KRAS G12R)
WVGLRTVGI

SEQ ID NO: 46534 - protein, 9 aa, synthetic construct
  source 1..9: note = Seed: VVGARGVGK (KRAS G12R)
WVGLRTVGK

SEQ ID NO: 46535 - protein, 9 aa, synthetic construct
  source 1..9: note = Seed: VVGARGVGK (KRAS G12R)
WVGLRTVGL

SEQ ID NO: 46536 - protein, 9 aa, synthetic construct
  source 1..9: note = Seed: VVGARGVGK (KRAS G12R)
WVGLRTVGM

SEQ ID NO: 46537 - protein, 9 aa, synthetic construct
  source 1..9: note = Seed: VVGARGVGK (KRAS G12R)
WVGLRTVGN

SEQ ID NO: 46538 - protein, 9 aa, synthetic construct
  source 1..9: note = Seed: VVGARGVGK (KRAS G12R)
WVGLRTVGP

SEQ ID NO: 46539 - protein, 9 aa, synthetic construct
  source 1..9: note = Seed: VVGARGVGK (KRAS G12R)
WVGLRTVGQ

SEQ ID NO: 46540 - protein, 9 aa, synthetic construct
  source 1..9: note = Seed: VVGARGVGK (KRAS G12R)
WVGLRTVGR

SEQ ID NO: 46541 - protein, 9 aa, synthetic construct
  source 1..9: note = Seed: VVGARGVGK (KRAS G12R)
WVGLRTVGS

SEQ ID NO: 46542 - protein, 9 aa, synthetic construct
  source 1..9: note = Seed: VVGARGVGK (KRAS G12R)
WVGLRTVGT

SEQ ID NO: 46543 - protein, 9 aa, synthetic construct
  source 1..9: note = Seed: VVGARGVGK (KRAS G12R)
WVGLRTVGV

SEQ ID NO: 46544 - protein, 9 aa, synthetic construct
  source 1..9: note = Seed: VVGARGVGK (KRAS G12R)
WVGLRTVGY

SEQ ID NO: 46545 - protein, 9 aa, synthetic construct
  source 1..9: note = Seed: VVGARGVGK (KRAS G12R)
WVGLRVVGA

SEQ ID NO: 46546 - protein, 9 aa, synthetic construct
  source 1..9: note = Seed: VVGARGVGK (KRAS G12R)
WVGLRVVGD

SEQ ID NO: 46547 - protein, 9 aa, synthetic construct
  source 1..9: note = Seed: VVGARGVGK (KRAS G12R)
WVGLRVVGG

SEQ ID NO: 46548 - protein, 9 aa, synthetic construct
  source 1..9: note = Seed: VVGARGVGK (KRAS G12R)
WVGLRVVGH

SEQ ID NO: 46549 - protein, 9 aa, synthetic construct
  source 1..9: note = Seed: VVGARGVGK (KRAS G12R)
WVGLRVVGI

SEQ ID NO: 46550 - protein, 9 aa, synthetic construct
  source 1..9: note = Seed: VVGARGVGK (KRAS G12R)
WVGLRVVGL

SEQ ID NO: 46551 - protein, 9 aa, synthetic construct
  source 1..9: note = Seed: VVGARGVGK (KRAS G12R)
WVGLRVVGM

SEQ ID NO: 46552 - protein, 9 aa, synthetic construct
  source 1..9: note = Seed: VVGARGVGK (KRAS G12R)
WVGLRVVGN

SEQ ID NO: 46553 - protein, 9 aa, synthetic construct
  source 1..9: note = Seed: VVGARGVGK (KRAS G12R)
WVGLRVVGP

SEQ ID NO: 46554 - protein, 9 aa, synthetic construct
  source 1..9: note = Seed: VVGARGVGK (KRAS G12R)
WVGLRVVGQ

SEQ ID NO: 46555 - protein, 9 aa, synthetic construct
  source 1..9: note = Seed: VVGARGVGK (KRAS G12R)
WVGLRVVGR

SEQ ID NO: 46556 - protein, 9 aa, synthetic construct
  source 1..9: note = Seed: VVGARGVGK (KRAS G12R)
WVGLRVVGS

SEQ ID NO: 46557 - protein, 9 aa, synthetic construct
  source 1..9: note = Seed: VVGARGVGK (KRAS G12R)
WVGLRVVGT

SEQ ID NO: 46558 - protein, 9 aa, synthetic construct
  source 1..9: note = Seed: VVGARGVGK (KRAS G12R)
WVGLRVVGV

SEQ ID NO: 46559 - protein, 9 aa, synthetic construct
  source 1..9: note = Seed: VVGARGVGK (KRAS G12R)
WVGLRYVGV

SEQ ID NO: 46560 - protein, 9 aa, synthetic construct
  source 1..9: note = Seed: VVGARGVGK (KRAS G12R)
WVGMRAVGA

SEQ ID NO: 46561 - protein, 9 aa, synthetic construct
  source 1..9: note = Seed: VVGARGVGK (KRAS G12R)
WVGMRAVGC

SEQ ID NO: 46562 - protein, 9 aa, synthetic construct
  source 1..9: note = Seed: VVGARGVGK (KRAS G12R)
WVGMRAVGD

SEQ ID NO: 46563 - protein, 9 aa, synthetic construct
  source 1..9: note = Seed: VVGARGVGK (KRAS G12R)
WVGMRAVGE

SEQ ID NO: 46564 - protein, 9 aa, synthetic construct
  source 1..9: note = Seed: VVGARGVGK (KRAS G12R)
WVGMRAVGF

SEQ ID NO: 46565 - protein, 9 aa, synthetic construct
  source 1..9: note = Seed: VVGARGVGK (KRAS G12R)
WVGMRAVGG

SEQ ID NO: 46566 - protein, 9 aa, synthetic construct
  source 1..9: note = Seed: VVGARGVGK (KRAS G12R)
WVGMRAVGH

SEQ ID NO: 46567 - protein, 9 aa, synthetic construct
  source 1..9: note = Seed: VVGARGVGK (KRAS G12R)
WVGMRAVGI

SEQ ID NO: 46568 - protein, 9 aa, synthetic construct
  source 1..9: note = Seed: VVGARGVGK (KRAS G12R)
WVGMRAVGK

SEQ ID NO: 46569 - protein, 9 aa, synthetic construct
  source 1..9: note = Seed: VVGARGVGK (KRAS G12R)
WVGMRAVGL

SEQ ID NO: 46570 - protein, 9 aa, synthetic construct
  source 1..9: note = Seed: VVGARGVGK (KRAS G12R)
WVGMRAVGM

SEQ ID NO: 46571 - protein, 9 aa, synthetic construct
  source 1..9: note = Seed: VVGARGVGK (KRAS G12R)
WVGMRAVGN

SEQ ID NO: 46572 - protein, 9 aa, synthetic construct
  source 1..9: note = Seed: VVGARGVGK (KRAS G12R)
WVGMRAVGP

SEQ ID NO: 46573 - protein, 9 aa, synthetic construct
  source 1..9: note = Seed: VVGARGVGK (KRAS G12R)
WVGMRAVGQ

SEQ ID NO: 46574 - protein, 9 aa, synthetic construct
  source 1..9: note = Seed: VVGARGVGK (KRAS G12R)
WVGMRAVGR

SEQ ID NO: 46575 - protein, 9 aa, synthetic construct
  source 1..9: note = Seed: VVGARGVGK (KRAS G12R)
WVGMRAVGS

SEQ ID NO: 46576 - protein, 9 aa, synthetic construct
  source 1..9: note = Seed: VVGARGVGK (KRAS G12R)
WVGMRAVGT

SEQ ID NO: 46577 - protein, 9 aa, synthetic construct
  source 1..9: note = Seed: VVGARGVGK (KRAS G12R)
WVGMRAVGV

SEQ ID NO: 46578 - protein, 9 aa, synthetic construct
  source 1..9: note = Seed: VVGARGVGK (KRAS G12R)
WVGMRAVGW

SEQ ID NO: 46579 - protein, 9 aa, synthetic construct
  source 1..9: note = Seed: VVGARGVGK (KRAS G12R)
WVGMRAVGY

SEQ ID NO: 46580 - protein, 9 aa, synthetic construct
  source 1..9: note = Seed: VVGARGVGK (KRAS G12R)
WVGMRCVGA

SEQ ID NO: 46581 - protein, 9 aa, synthetic construct
  source 1..9: note = Seed: VVGARGVGK (KRAS G12R)
WVGMRDVGI

SEQ ID NO: 46582 - protein, 9 aa, synthetic construct
  source 1..9: note = Seed: VVGARGVGK (KRAS G12R)
WVGMRDVGL

SEQ ID NO: 46583 - protein, 9 aa, synthetic construct
  source 1..9: note = Seed: VVGARGVGK (KRAS G12R)
WVGMRDVGV

SEQ ID NO: 46584 - protein, 9 aa, synthetic construct
  source 1..9: note = Seed: VVGARGVGK (KRAS G12R)
WVGMREVGA

SEQ ID NO: 46585 - protein, 9 aa, synthetic construct
  source 1..9: note = Seed: VVGARGVGK (KRAS G12R)
WVGMREVGI

SEQ ID NO: 46586 - protein, 9 aa, synthetic construct
  source 1..9: note = Seed: VVGARGVGK (KRAS G12R)
WVGMREVGL

SEQ ID NO: 46587 - protein, 9 aa, synthetic construct
  source 1..9: note = Seed: VVGARGVGK (KRAS G12R)
WVGMREVGV

SEQ ID NO: 46588 - protein, 9 aa, synthetic construct
  source 1..9: note = Seed: VVGARGVGK (KRAS G12R)
WVGMRGVGA

SEQ ID NO: 46589 - protein, 9 aa, synthetic construct
  source 1..9: note = Seed: VVGARGVGK (KRAS G12R)
WVGMRGVGC

SEQ ID NO: 46590 - protein, 9 aa, synthetic construct
  source 1..9: note = Seed: VVGARGVGK (KRAS G12R)
WVGMRGVGE

SEQ ID NO: 46591 - protein, 9 aa, synthetic construct
  source 1..9: note = Seed: VVGARGVGK (KRAS G12R)
WVGMRGVGF

SEQ ID NO: 46592 - protein, 9 aa, synthetic construct
  source 1..9: note = Seed: VVGARGVGK (KRAS G12R)
WVGMRGVGG

SEQ ID NO: 46593 - protein, 9 aa, synthetic construct
  source 1..9: note = Seed: VVGARGVGK (KRAS G12R)
WVGMRGVGH

SEQ ID NO: 46594 - protein, 9 aa, synthetic construct
  source 1..9: note = Seed: VVGARGVGK (KRAS G12R)
WVGMRGVGI

SEQ ID NO: 46595 - protein, 9 aa, synthetic construct
  source 1..9: note = Seed: VVGARGVGK (KRAS G12R)
WVGMRGVGK

SEQ ID NO: 46596 - protein, 9 aa, synthetic construct
  source 1..9: note = Seed: VVGARGVGK (KRAS G12R)
WVGMRGVGL

SEQ ID NO: 46597 - protein, 9 aa, synthetic construct
  source 1..9: note = Seed: VVGARGVGK (KRAS G12R)
WVGMRGVGM

SEQ ID NO: 46598 - protein, 9 aa, synthetic construct
  source 1..9: note = Seed: VVGARGVGK (KRAS G12R)
WVGMRGVGN

SEQ ID NO: 46599 - protein, 9 aa, synthetic construct
  source 1..9: note = Seed: VVGARGVGK (KRAS G12R)
WVGMRGVGP

SEQ ID NO: 46600 - protein, 9 aa, synthetic construct
  source 1..9: note = Seed: VVGARGVGK (KRAS G12R)
WVGMRGVGQ

SEQ ID NO: 46601 - protein, 9 aa, synthetic construct
  source 1..9: note = Seed: VVGARGVGK (KRAS G12R)
WVGMRGVGR

SEQ ID NO: 46602 - protein, 9 aa, synthetic construct
  source 1..9: note = Seed: VVGARGVGK (KRAS G12R)
WVGMRGVGS

SEQ ID NO: 46603 - protein, 9 aa, synthetic construct
  source 1..9: note = Seed: VVGARGVGK (KRAS G12R)
WVGMRGVGT

SEQ ID NO: 46604 - protein, 9 aa, synthetic construct
  source 1..9: note = Seed: VVGARGVGK (KRAS G12R)
WVGMRGVGV

SEQ ID NO: 46605 - protein, 9 aa, synthetic construct
  source 1..9: note = Seed: VVGARGVGK (KRAS G12R)
WVGMRGVGY

SEQ ID NO: 46606 - protein, 9 aa, synthetic construct
  source 1..9: note = Seed: VVGARGVGK (KRAS G12R)
WVGMRHVGA

SEQ ID NO: 46607 - protein, 9 aa, synthetic construct
  source 1..9: note = Seed: VVGARGVGK (KRAS G12R)
WVGMRHVGI

SEQ ID NO: 46608 - protein, 9 aa, synthetic construct
  source 1..9: note = Seed: VVGARGVGK (KRAS G12R)
WVGMRHVGL

SEQ ID NO: 46609 - protein, 9 aa, synthetic construct
  source 1..9: note = Seed: VVGARGVGK (KRAS G12R)
WVGMRHVGM

SEQ ID NO: 46610 - protein, 9 aa, synthetic construct
  source 1..9: note = Seed: VVGARGVGK (KRAS G12R)
WVGMRHVGS

SEQ ID NO: 46611 - protein, 9 aa, synthetic construct
  source 1..9: note = Seed: VVGARGVGK (KRAS G12R)
WVGMRHVGT

SEQ ID NO: 46612 - protein, 9 aa, synthetic construct
  source 1..9: note = Seed: VVGARGVGK (KRAS G12R)
WVGMRHVGV

SEQ ID NO: 46613 - protein, 9 aa, synthetic construct
  source 1..9: note = Seed: VVGARGVGK (KRAS G12R)
WVGMRIVGA

SEQ ID NO: 46614 - protein, 9 aa, synthetic construct
  source 1..9: note = Seed: VVGARGVGK (KRAS G12R)
WVGMRIVGG

SEQ ID NO: 46615 - protein, 9 aa, synthetic construct
  source 1..9: note = Seed: VVGARGVGK (KRAS G12R)
WVGMRIVGH

SEQ ID NO: 46616 - protein, 9 aa, synthetic construct
  source 1..9: note = Seed: VVGARGVGK (KRAS G12R)
WVGMRIVGI

SEQ ID NO: 46617 - protein, 9 aa, synthetic construct
  source 1..9: note = Seed: VVGARGVGK (KRAS G12R)
WVGMRIVGL

SEQ ID NO: 46618 - protein, 9 aa, synthetic construct
  source 1..9: note = Seed: VVGARGVGK (KRAS G12R)
WVGMRIVGM

SEQ ID NO: 46619 - protein, 9 aa, synthetic construct
  source 1..9: note = Seed: VVGARGVGK (KRAS G12R)
WVGMRIVGN

SEQ ID NO: 46620 - protein, 9 aa, synthetic construct
  source 1..9: note = Seed: VVGARGVGK (KRAS G12R)
WVGMRIVGR

SEQ ID NO: 46621 - protein, 9 aa, synthetic construct
  source 1..9: note = Seed: VVGARGVGK (KRAS G12R)
WVGMRIVGS

SEQ ID NO: 46622 - protein, 9 aa, synthetic construct
  source 1..9: note = Seed: VVGARGVGK (KRAS G12R)
WVGMRIVGT

SEQ ID NO: 46623 - protein, 9 aa, synthetic construct
  source 1..9: note = Seed: VVGARGVGK (KRAS G12R)
WVGMRIVGV

SEQ ID NO: 46624 - protein, 9 aa, synthetic construct
  source 1..9: note = Seed: VVGARGVGK (KRAS G12R)
WVGMRKVGR

SEQ ID NO: 46625 - protein, 9 aa, synthetic construct
  source 1..9: note = Seed: VVGARGVGK (KRAS G12R)
WVGMRKVGS

SEQ ID NO: 46626 - protein, 9 aa, synthetic construct
  source 1..9: note = Seed: VVGARGVGK (KRAS G12R)
WVGMRKVGV

SEQ ID NO: 46627 - protein, 9 aa, synthetic construct
  source 1..9: note = Seed: VVGARGVGK (KRAS G12R)
WVGMRLVGA

SEQ ID NO: 46628 - protein, 9 aa, synthetic construct
  source 1..9: note = Seed: VVGARGVGK (KRAS G12R)
WVGMRLVGI

SEQ ID NO: 46629 - protein, 9 aa, synthetic construct
  source 1..9: note = Seed: VVGARGVGK (KRAS G12R)
WVGMRLVGL

SEQ ID NO: 46630 - protein, 9 aa, synthetic construct
  source 1..9: note = Seed: VVGARGVGK (KRAS G12R)
WVGMRLVGM

SEQ ID NO: 46631 - protein, 9 aa, synthetic construct
  source 1..9: note = Seed: VVGARGVGK (KRAS G12R)
WVGMRLVGN

SEQ ID NO: 46632 - protein, 9 aa, synthetic construct
  source 1..9: note = Seed: VVGARGVGK (KRAS G12R)
WVGMRLVGS

SEQ ID NO: 46633 - protein, 9 aa, synthetic construct
  source 1..9: note = Seed: VVGARGVGK (KRAS G12R)
WVGMRLVGT

SEQ ID NO: 46634 - protein, 9 aa, synthetic construct
  source 1..9: note = Seed: VVGARGVGK (KRAS G12R)
WVGMRLVGV

SEQ ID NO: 46635 - protein, 9 aa, synthetic construct
  source 1..9: note = Seed: VVGARGVGK (KRAS G12R)
WVGMRMVGA

SEQ ID NO: 46636 - protein, 9 aa, synthetic construct
  source 1..9: note = Seed: VVGARGVGK (KRAS G12R)
WVGMRMVGI

SEQ ID NO: 46637 - protein, 9 aa, synthetic construct
  source 1..9: note = Seed: VVGARGVGK (KRAS G12R)
WVGMRMVGL

SEQ ID NO: 46638 - protein, 9 aa, synthetic construct
  source 1..9: note = Seed: VVGARGVGK (KRAS G12R)
WVGMRMVGM

SEQ ID NO: 46639 - protein, 9 aa, synthetic construct
  source 1..9: note = Seed: VVGARGVGK (KRAS G12R)
WVGMRMVGN

SEQ ID NO: 46640 - protein, 9 aa, synthetic construct
  source 1..9: note = Seed: VVGARGVGK (KRAS G12R)
WVGMRMVGS

SEQ ID NO: 46641 - protein, 9 aa, synthetic construct
  source 1..9: note = Seed: VVGARGVGK (KRAS G12R)
WVGMRMVGT

SEQ ID NO: 46642 - protein, 9 aa, synthetic construct
  source 1..9: note = Seed: VVGARGVGK (KRAS G12R)
WVGMRMVGV

SEQ ID NO: 46643 - protein, 9 aa, synthetic construct
  source 1..9: note = Seed: VVGARGVGK (KRAS G12R)
WVGMRNVGA

SEQ ID NO: 46644 - protein, 9 aa, synthetic construct
  source 1..9: note = Seed: VVGARGVGK (KRAS G12R)
WVGMRNVGF

SEQ ID NO: 46645 - protein, 9 aa, synthetic construct
  source 1..9: note = Seed: VVGARGVGK (KRAS G12R)
WVGMRNVGG

SEQ ID NO: 46646 - protein, 9 aa, synthetic construct
  source 1..9: note = Seed: VVGARGVGK (KRAS G12R)
WVGMRNVGH

SEQ ID NO: 46647 - protein, 9 aa, synthetic construct
  source 1..9: note = Seed: VVGARGVGK (KRAS G12R)
WVGMRNVGI

SEQ ID NO: 46648 - protein, 9 aa, synthetic construct
  source 1..9: note = Seed: VVGARGVGK (KRAS G12R)
WVGMRNVGL

SEQ ID NO: 46649 - protein, 9 aa, synthetic construct
  source 1..9: note = Seed: VVGARGVGK (KRAS G12R)
WVGMRNVGM

SEQ ID NO: 46650 - protein, 9 aa, synthetic construct
  source 1..9: note = Seed: VVGARGVGK (KRAS G12R)
WVGMRNVGN

SEQ ID NO: 46651 - protein, 9 aa, synthetic construct
  source 1..9: note = Seed: VVGARGVGK (KRAS G12R)
WVGMRNVGQ

SEQ ID NO: 46652 - protein, 9 aa, synthetic construct
  source 1..9: note = Seed: VVGARGVGK (KRAS G12R)
WVGMRNVGR

SEQ ID NO: 46653 - protein, 9 aa, synthetic construct
  source 1..9: note = Seed: VVGARGVGK (KRAS G12R)
WVGMRNVGS

SEQ ID NO: 46654 - protein, 9 aa, synthetic construct
  source 1..9: note = Seed: VVGARGVGK (KRAS G12R)
WVGMRNVGT

SEQ ID NO: 46655 - protein, 9 aa, synthetic construct
  source 1..9: note = Seed: VVGARGVGK (KRAS G12R)
WVGMRNVGV

SEQ ID NO: 46656 - protein, 9 aa, synthetic construct
  source 1..9: note = Seed: VVGARGVGK (KRAS G12R)
WVGMRNVGY

SEQ ID NO: 46657 - protein, 9 aa, synthetic construct
  source 1..9: note = Seed: VVGARGVGK (KRAS G12R)
WVGMRPVGA

SEQ ID NO: 46658 - protein, 9 aa, synthetic construct
  source 1..9: note = Seed: VVGARGVGK (KRAS G12R)
WVGMRPVGC

SEQ ID NO: 46659 - protein, 9 aa, synthetic construct
  source 1..9: note = Seed: VVGARGVGK (KRAS G12R)
WVGMRPVGD

SEQ ID NO: 46660 - protein, 9 aa, synthetic construct
  source 1..9: note = Seed: VVGARGVGK (KRAS G12R)
WVGMRPVGE

SEQ ID NO: 46661 - protein, 9 aa, synthetic construct
  source 1..9: note = Seed: VVGARGVGK (KRAS G12R)
WVGMRPVGF

SEQ ID NO: 46662 - protein, 9 aa, synthetic construct
  source 1..9: note = Seed: VVGARGVGK (KRAS G12R)
WVGMRPVGG

SEQ ID NO: 46663 - protein, 9 aa, synthetic construct
  source 1..9: note = Seed: VVGARGVGK (KRAS G12R)
WVGMRPVGH

SEQ ID NO: 46664 - protein, 9 aa, synthetic construct
  source 1..9: note = Seed: VVGARGVGK (KRAS G12R)
WVGMRPVGI

SEQ ID NO: 46665 - protein, 9 aa, synthetic construct
  source 1..9: note = Seed: VVGARGVGK (KRAS G12R)
WVGMRPVGK

SEQ ID NO: 46666 - protein, 9 aa, synthetic construct
  source 1..9: note = Seed: VVGARGVGK (KRAS G12R)
WVGMRPVGL

SEQ ID NO: 46667 - protein, 9 aa, synthetic construct
  source 1..9: note = Seed: VVGARGVGK (KRAS G12R)
WVGMRPVGM

SEQ ID NO: 46668 - protein, 9 aa, synthetic construct
  source 1..9: note = Seed: VVGARGVGK (KRAS G12R)
WVGMRPVGN

SEQ ID NO: 46669 - protein, 9 aa, synthetic construct
  source 1..9: note = Seed: VVGARGVGK (KRAS G12R)
WVGMRPVGP

SEQ ID NO: 46670 - protein, 9 aa, synthetic construct
  source 1..9: note = Seed: VVGARGVGK (KRAS G12R)
WVGMRPVGQ

SEQ ID NO: 46671 - protein, 9 aa, synthetic construct
  source 1..9: note = Seed: VVGARGVGK (KRAS G12R)
WVGMRPVGR

SEQ ID NO: 46672 - protein, 9 aa, synthetic construct
  source 1..9: note = Seed: VVGARGVGK (KRAS G12R)
WVGMRPVGS

SEQ ID NO: 46673 - protein, 9 aa, synthetic construct
  source 1..9: note = Seed: VVGARGVGK (KRAS G12R)
WVGMRPVGT

SEQ ID NO: 46674 - protein, 9 aa, synthetic construct
  source 1..9: note = Seed: VVGARGVGK (KRAS G12R)
WVGMRPVGV

SEQ ID NO: 46675 - protein, 9 aa, synthetic construct
  source 1..9: note = Seed: VVGARGVGK (KRAS G12R)
WVGMRPVGW

SEQ ID NO: 46676 - protein, 9 aa, synthetic construct
  source 1..9: note = Seed: VVGARGVGK (KRAS G12R)
WVGMRPVGY

SEQ ID NO: 46677 - protein, 9 aa, synthetic construct
  source 1..9: note = Seed: VVGARGVGK (KRAS G12R)
WVGMRQVGA

SEQ ID NO: 46678 - protein, 9 aa, synthetic construct
  source 1..9: note = Seed: VVGARGVGK (KRAS G12R)
WVGMRQVGI

SEQ ID NO: 46679 - protein, 9 aa, synthetic construct
  source 1..9: note = Seed: VVGARGVGK (KRAS G12R)
WVGMRQVGL

SEQ ID NO: 46680 - protein, 9 aa, synthetic construct
  source 1..9: note = Seed: VVGARGVGK (KRAS G12R)
WVGMRQVGM

SEQ ID NO: 46681 - protein, 9 aa, synthetic construct
  source 1..9: note = Seed: VVGARGVGK (KRAS G12R)
WVGMRQVGS

SEQ ID NO: 46682 - protein, 9 aa, synthetic construct
  source 1..9: note = Seed: VVGARGVGK (KRAS G12R)
WVGMRQVGV

SEQ ID NO: 46683 - protein, 9 aa, synthetic construct
  source 1..9: note = Seed: VVGARGVGK (KRAS G12R)
WVGMRRVGR

SEQ ID NO: 46684 - protein, 9 aa, synthetic construct
  source 1..9: note = Seed: VVGARGVGK (KRAS G12R)
WVGMRRVGS

SEQ ID NO: 46685 - protein, 9 aa, synthetic construct
  source 1..9: note = Seed: VVGARGVGK (KRAS G12R)
WVGMRRVGT

SEQ ID NO: 46686 - protein, 9 aa, synthetic construct
  source 1..9: note = Seed: VVGARGVGK (KRAS G12R)
WVGMRSVGA

SEQ ID NO: 46687 - protein, 9 aa, synthetic construct
  source 1..9: note = Seed: VVGARGVGK (KRAS G12R)
WVGMRSVGC

SEQ ID NO: 46688 - protein, 9 aa, synthetic construct
  source 1..9: note = Seed: VVGARGVGK (KRAS G12R)
WVGMRSVGD

SEQ ID NO: 46689 - protein, 9 aa, synthetic construct
  source 1..9: note = Seed: VVGARGVGK (KRAS G12R)
WVGMRSVGE

SEQ ID NO: 46690 - protein, 9 aa, synthetic construct
  source 1..9: note = Seed: VVGARGVGK (KRAS G12R)
WVGMRSVGF

SEQ ID NO: 46691 - protein, 9 aa, synthetic construct
  source 1..9: note = Seed: VVGARGVGK (KRAS G12R)
WVGMRSVGG

SEQ ID NO: 46692 - protein, 9 aa, synthetic construct
  source 1..9: note = Seed: VVGARGVGK (KRAS G12R)
WVGMRSVGH

SEQ ID NO: 46693 - protein, 9 aa, synthetic construct
  source 1..9: note = Seed: VVGARGVGK (KRAS G12R)
WVGMRSVGI

SEQ ID NO: 46694 - protein, 9 aa, synthetic construct
  source 1..9: note = Seed: VVGARGVGK (KRAS G12R)
WVGMRSVGK

SEQ ID NO: 46695 - protein, 9 aa, synthetic construct
  source 1..9: note = Seed: VVGARGVGK (KRAS G12R)
WVGMRSVGL

SEQ ID NO: 46696 - protein, 9 aa, synthetic construct
  source 1..9: note = Seed: VVGARGVGK (KRAS G12R)
WVGMRSVGM

SEQ ID NO: 46697 - protein, 9 aa, synthetic construct
  source 1..9: note = Seed: VVGARGVGK (KRAS G12R)
WVGMRSVGN

SEQ ID NO: 46698 - protein, 9 aa, synthetic construct
  source 1..9: note = Seed: VVGARGVGK (KRAS G12R)
WVGMRSVGP

SEQ ID NO: 46699 - protein, 9 aa, synthetic construct
  source 1..9: note = Seed: VVGARGVGK (KRAS G12R)
WVGMRSVGQ

SEQ ID NO: 46700 - protein, 9 aa, synthetic construct
  source 1..9: note = Seed: VVGARGVGK (KRAS G12R)
WVGMRSVGR

SEQ ID NO: 46701 - protein, 9 aa, synthetic construct
  source 1..9: note = Seed: VVGARGVGK (KRAS G12R)
WVGMRSVGS

SEQ ID NO: 46702 - protein, 9 aa, synthetic construct
  source 1..9: note = Seed: VVGARGVGK (KRAS G12R)
WVGMRSVGT

SEQ ID NO: 46703 - protein, 9 aa, synthetic construct
  source 1..9: note = Seed: VVGARGVGK (KRAS G12R)
WVGMRSVGV

SEQ ID NO: 46704 - protein, 9 aa, synthetic construct
  source 1..9: note = Seed: VVGARGVGK (KRAS G12R)
WVGMRSVGY

SEQ ID NO: 46705 - protein, 9 aa, synthetic construct
  source 1..9: note = Seed: VVGARGVGK (KRAS G12R)
WVGMRTVGA

SEQ ID NO: 46706 - protein, 9 aa, synthetic construct
  source 1..9: note = Seed: VVGARGVGK (KRAS G12R)
WVGMRTVGD

SEQ ID NO: 46707 - protein, 9 aa, synthetic construct
  source 1..9: note = Seed: VVGARGVGK (KRAS G12R)
WVGMRTVGE

SEQ ID NO: 46708 - protein, 9 aa, synthetic construct
  source 1..9: note = Seed: VVGARGVGK (KRAS G12R)
WVGMRTVGF

SEQ ID NO: 46709 - protein, 9 aa, synthetic construct
  source 1..9: note = Seed: VVGARGVGK (KRAS G12R)
WVGMRTVGG

SEQ ID NO: 46710 - protein, 9 aa, synthetic construct
  source 1..9: note = Seed: VVGARGVGK (KRAS G12R)
WVGMRTVGH

SEQ ID NO: 46711 - protein, 9 aa, synthetic construct
  source 1..9: note = Seed: VVGARGVGK (KRAS G12R)
WVGMRTVGI

SEQ ID NO: 46712 - protein, 9 aa, synthetic construct
  source 1..9: note = Seed: VVGARGVGK (KRAS G12R)
WVGMRTVGK

SEQ ID NO: 46713 - protein, 9 aa, synthetic construct
  source 1..9: note = Seed: VVGARGVGK (KRAS G12R)
WVGMRTVGL

SEQ ID NO: 46714 - protein, 9 aa, synthetic construct
  source 1..9: note = Seed: VVGARGVGK (KRAS G12R)
WVGMRTVGM

SEQ ID NO: 46715 - protein, 9 aa, synthetic construct
  source 1..9: note = Seed: VVGARGVGK (KRAS G12R)
WVGMRTVGN

SEQ ID NO: 46716 - protein, 9 aa, synthetic construct
  source 1..9: note = Seed: VVGARGVGK (KRAS G12R)
WVGMRTVGP

SEQ ID NO: 46717 - protein, 9 aa, synthetic construct
  source 1..9: note = Seed: VVGARGVGK (KRAS G12R)
WVGMRTVGQ

SEQ ID NO: 46718 - protein, 9 aa, synthetic construct
  source 1..9: note = Seed: VVGARGVGK (KRAS G12R)
WVGMRTVGR

SEQ ID NO: 46719 - protein, 9 aa, synthetic construct
  source 1..9: note = Seed: VVGARGVGK (KRAS G12R)
WVGMRTVGS

SEQ ID NO: 46720 - protein, 9 aa, synthetic construct
  source 1..9: note = Seed: VVGARGVGK (KRAS G12R)
WVGMRTVGT

SEQ ID NO: 46721 - protein, 9 aa, synthetic construct
  source 1..9: note = Seed: VVGARGVGK (KRAS G12R)
WVGMRTVGV

SEQ ID NO: 46722 - protein, 9 aa, synthetic construct
  source 1..9: note = Seed: VVGARGVGK (KRAS G12R)
WVGMRTVGY

SEQ ID NO: 46723 - protein, 9 aa, synthetic construct
  source 1..9: note = Seed: VVGARGVGK (KRAS G12R)
WVGMRVVGA

SEQ ID NO: 46724 - protein, 9 aa, synthetic construct
  source 1..9: note = Seed: VVGARGVGK (KRAS G12R)
WVGMRVVGD

SEQ ID NO: 46725 - protein, 9 aa, synthetic construct
  source 1..9: note = Seed: VVGARGVGK (KRAS G12R)
WVGMRVVGE

SEQ ID NO: 46726 - protein, 9 aa, synthetic construct
  source 1..9: note = Seed: VVGARGVGK (KRAS G12R)
WVGMRVVGG

SEQ ID NO: 46727 - protein, 9 aa, synthetic construct
  source 1..9: note = Seed: VVGARGVGK (KRAS G12R)
WVGMRVVGH

SEQ ID NO: 46728 - protein, 9 aa, synthetic construct
  source 1..9: note = Seed: VVGARGVGK (KRAS G12R)
WVGMRVVGI

SEQ ID NO: 46729 - protein, 9 aa, synthetic construct
  source 1..9: note = Seed: VVGARGVGK (KRAS G12R)
WVGMRVVGK

SEQ ID NO: 46730 - protein, 9 aa, synthetic construct
  source 1..9: note = Seed: VVGARGVGK (KRAS G12R)
WVGMRVVGL

SEQ ID NO: 46731 - protein, 9 aa, synthetic construct
  source 1..9: note = Seed: VVGARGVGK (KRAS G12R)
WVGMRVVGM

SEQ ID NO: 46732 - protein, 9 aa, synthetic construct
  source 1..9: note = Seed: VVGARGVGK (KRAS G12R)
WVGMRVVGN

SEQ ID NO: 46733 - protein, 9 aa, synthetic construct
  source 1..9: note = Seed: VVGARGVGK (KRAS G12R)
WVGMRVVGQ

SEQ ID NO: 46734 - protein, 9 aa, synthetic construct
  source 1..9: note = Seed: VVGARGVGK (KRAS G12R)
WVGMRVVGR

SEQ ID NO: 46735 - protein, 9 aa, synthetic construct
  source 1..9: note = Seed: VVGARGVGK (KRAS G12R)
WVGMRVVGS

SEQ ID NO: 46736 - protein, 9 aa, synthetic construct
  source 1..9: note = Seed: VVGARGVGK (KRAS G12R)
WVGMRVVGT

SEQ ID NO: 46737 - protein, 9 aa, synthetic construct
  source 1..9: note = Seed: VVGARGVGK (KRAS G12R)
WVGMRVVGV

SEQ ID NO: 46738 - protein, 9 aa, synthetic construct
  source 1..9: note = Seed: VVGARGVGK (KRAS G12R)
WVGNRAVGA

SEQ ID NO: 46739 - protein, 9 aa, synthetic construct
  source 1..9: note = Seed: VVGARGVGK (KRAS G12R)
WVGNRAVGF

SEQ ID NO: 46740 - protein, 9 aa, synthetic construct
  source 1..9: note = Seed: VVGARGVGK (KRAS G12R)
WVGNRAVGI

SEQ ID NO: 46741 - protein, 9 aa, synthetic construct
  source 1..9: note = Seed: VVGARGVGK (KRAS G12R)
WVGNRAVGL

SEQ ID NO: 46742 - protein, 9 aa, synthetic construct
  source 1..9: note = Seed: VVGARGVGK (KRAS G12R)
WVGNRAVGM

SEQ ID NO: 46743 - protein, 9 aa, synthetic construct
  source 1..9: note = Seed: VVGARGVGK (KRAS G12R)
WVGNRAVGS

SEQ ID NO: 46744 - protein, 9 aa, synthetic construct
  source 1..9: note = Seed: VVGARGVGK (KRAS G12R)
WVGNRAVGT

SEQ ID NO: 46745 - protein, 9 aa, synthetic construct
  source 1..9: note = Seed: VVGARGVGK (KRAS G12R)
WVGNRAVGV

SEQ ID NO: 46746 - protein, 9 aa, synthetic construct
  source 1..9: note = Seed: VVGARGVGK (KRAS G12R)
WVGNRGVGA

SEQ ID NO: 46747 - protein, 9 aa, synthetic construct
  source 1..9: note = Seed: VVGARGVGK (KRAS G12R)
WVGNRGVGI

SEQ ID NO: 46748 - protein, 9 aa, synthetic construct
  source 1..9: note = Seed: VVGARGVGK (KRAS G12R)
WVGNRGVGL

SEQ ID NO: 46749 - protein, 9 aa, synthetic construct
  source 1..9: note = Seed: VVGARGVGK (KRAS G12R)
WVGNRGVGM

SEQ ID NO: 46750 - protein, 9 aa, synthetic construct
  source 1..9: note = Seed: VVGARGVGK (KRAS G12R)
WVGNRGVGV

SEQ ID NO: 46751 - protein, 9 aa, synthetic construct
  source 1..9: note = Seed: VVGARGVGK (KRAS G12R)
WVGNRIVGA

SEQ ID NO: 46752 - protein, 9 aa, synthetic construct
  source 1..9: note = Seed: VVGARGVGK (KRAS G12R)
WVGNRLVGA

SEQ ID NO: 46753 - protein, 9 aa, synthetic construct
  source 1..9: note = Seed: VVGARGVGK (KRAS G12R)
WVGNRLVGV

SEQ ID NO: 46754 - protein, 9 aa, synthetic construct
  source 1..9: note = Seed: VVGARGVGK (KRAS G12R)
WVGNRMVGA

SEQ ID NO: 46755 - protein, 9 aa, synthetic construct
  source 1..9: note = Seed: VVGARGVGK (KRAS G12R)
WVGNRPVGA

SEQ ID NO: 46756 - protein, 9 aa, synthetic construct
  source 1..9: note = Seed: VVGARGVGK (KRAS G12R)
WVGNRPVGI

SEQ ID NO: 46757 - protein, 9 aa, synthetic construct
  source 1..9: note = Seed: VVGARGVGK (KRAS G12R)
WVGNRPVGL

SEQ ID NO: 46758 - protein, 9 aa, synthetic construct
  source 1..9: note = Seed: VVGARGVGK (KRAS G12R)
WVGNRPVGM

SEQ ID NO: 46759 - protein, 9 aa, synthetic construct
  source 1..9: note = Seed: VVGARGVGK (KRAS G12R)
WVGNRPVGV

SEQ ID NO: 46760 - protein, 9 aa, synthetic construct
  source 1..9: note = Seed: VVGARGVGK (KRAS G12R)
WVGNRSVGA

SEQ ID NO: 46761 - protein, 9 aa, synthetic construct
  source 1..9: note = Seed: VVGARGVGK (KRAS G12R)
WVGNRSVGI

SEQ ID NO: 46762 - protein, 9 aa, synthetic construct
  source 1..9: note = Seed: VVGARGVGK (KRAS G12R)
WVGNRSVGL

SEQ ID NO: 46763 - protein, 9 aa, synthetic construct
  source 1..9: note = Seed: VVGARGVGK (KRAS G12R)
WVGNRSVGM

SEQ ID NO: 46764 - protein, 9 aa, synthetic construct
  source 1..9: note = Seed: VVGARGVGK (KRAS G12R)
WVGNRSVGV

SEQ ID NO: 46765 - protein, 9 aa, synthetic construct
  source 1..9: note = Seed: VVGARGVGK (KRAS G12R)
WVGNRVVGA

SEQ ID NO: 46766 - protein, 9 aa, synthetic construct
  source 1..9: note = Seed: VVGARGVGK (KRAS G12R)
WVGNRVVGL

SEQ ID NO: 46767 - protein, 9 aa, synthetic construct
  source 1..9: note = Seed: VVGARGVGK (KRAS G12R)
WVGQRAVGA

SEQ ID NO: 46768 - protein, 9 aa, synthetic construct
  source 1..9: note = Seed: VVGARGVGK (KRAS G12R)
WVGQRAVGC

SEQ ID NO: 46769 - protein, 9 aa, synthetic construct
  source 1..9: note = Seed: VVGARGVGK (KRAS G12R)
WVGQRAVGF

SEQ ID NO: 46770 - protein, 9 aa, synthetic construct
  source 1..9: note = Seed: VVGARGVGK (KRAS G12R)
WVGQRAVGG

SEQ ID NO: 46771 - protein, 9 aa, synthetic construct
  source 1..9: note = Seed: VVGARGVGK (KRAS G12R)
WVGQRAVGH

SEQ ID NO: 46772 - protein, 9 aa, synthetic construct
  source 1..9: note = Seed: VVGARGVGK (KRAS G12R)
WVGQRAVGI

SEQ ID NO: 46773 - protein, 9 aa, synthetic construct
  source 1..9: note = Seed: VVGARGVGK (KRAS G12R)
WVGQRAVGL

SEQ ID NO: 46774 - protein, 9 aa, synthetic construct
  source 1..9: note = Seed: VVGARGVGK (KRAS G12R)
WVGQRAVGM

SEQ ID NO: 46775 - protein, 9 aa, synthetic construct
  source 1..9: note = Seed: VVGARGVGK (KRAS G12R)
WVGQRAVGN

SEQ ID NO: 46776 - protein, 9 aa, synthetic construct
  source 1..9: note = Seed: VVGARGVGK (KRAS G12R)
WVGQRAVGQ

SEQ ID NO: 46777 - protein, 9 aa, synthetic construct
  source 1..9: note = Seed: VVGARGVGK (KRAS G12R)
WVGQRAVGR

SEQ ID NO: 46778 - protein, 9 aa, synthetic construct
  source 1..9: note = Seed: VVGARGVGK (KRAS G12R)
WVGQRAVGS

SEQ ID NO: 46779 - protein, 9 aa, synthetic construct
  source 1..9: note = Seed: VVGARGVGK (KRAS G12R)
WVGQRAVGT

SEQ ID NO: 46780 - protein, 9 aa, synthetic construct
  source 1..9: note = Seed: VVGARGVGK (KRAS G12R)
WVGQRAVGV

SEQ ID NO: 46781 - protein, 9 aa, synthetic construct
  source 1..9: note = Seed: VVGARGVGK (KRAS G12R)
WVGQRAVGY

SEQ ID NO: 46782 - protein, 9 aa, synthetic construct
  source 1..9: note = Seed: VVGARGVGK (KRAS G12R)
WVGQRGVGA

SEQ ID NO: 46783 - protein, 9 aa, synthetic construct
  source 1..9: note = Seed: VVGARGVGK (KRAS G12R)
WVGQRGVGF

SEQ ID NO: 46784 - protein, 9 aa, synthetic construct
  source 1..9: note = Seed: VVGARGVGK (KRAS G12R)
WVGQRGVGG

SEQ ID NO: 46785 - protein, 9 aa, synthetic construct
  source 1..9: note = Seed: VVGARGVGK (KRAS G12R)
WVGQRGVGI

SEQ ID NO: 46786 - protein, 9 aa, synthetic construct
  source 1..9: note = Seed: VVGARGVGK (KRAS G12R)
WVGQRGVGL

SEQ ID NO: 46787 - protein, 9 aa, synthetic construct
  source 1..9: note = Seed: VVGARGVGK (KRAS G12R)
WVGQRGVGM

SEQ ID NO: 46788 - protein, 9 aa, synthetic construct
  source 1..9: note = Seed: VVGARGVGK (KRAS G12R)
WVGQRGVGN

SEQ ID NO: 46789 - protein, 9 aa, synthetic construct
  source 1..9: note = Seed: VVGARGVGK (KRAS G12R)
WVGQRGVGS

SEQ ID NO: 46790 - protein, 9 aa, synthetic construct
  source 1..9: note = Seed: VVGARGVGK (KRAS G12R)
WVGQRGVGT

SEQ ID NO: 46791 - protein, 9 aa, synthetic construct
  source 1..9: note = Seed: VVGARGVGK (KRAS G12R)
WVGQRGVGV

SEQ ID NO: 46792 - protein, 9 aa, synthetic construct
  source 1..9: note = Seed: VVGARGVGK (KRAS G12R)
WVGQRIVGA

SEQ ID NO: 46793 - protein, 9 aa, synthetic construct
  source 1..9: note = Seed: VVGARGVGK (KRAS G12R)
WVGQRIVGN

SEQ ID NO: 46794 - protein, 9 aa, synthetic construct
  source 1..9: note = Seed: VVGARGVGK (KRAS G12R)
WVGQRNVGA

SEQ ID NO: 46795 - protein, 9 aa, synthetic construct
  source 1..9: note = Seed: VVGARGVGK (KRAS G12R)
WVGQRNVGI

SEQ ID NO: 46796 - protein, 9 aa, synthetic construct
  source 1..9: note = Seed: VVGARGVGK (KRAS G12R)
WVGQRNVGL

SEQ ID NO: 46797 - protein, 9 aa, synthetic construct
  source 1..9: note = Seed: VVGARGVGK (KRAS G12R)
WVGQRNVGM

SEQ ID NO: 46798 - protein, 9 aa, synthetic construct
  source 1..9: note = Seed: VVGARGVGK (KRAS G12R)
WVGQRNVGS

SEQ ID NO: 46799 - protein, 9 aa, synthetic construct
  source 1..9: note = Seed: VVGARGVGK (KRAS G12R)
WVGQRNVGT

SEQ ID NO: 46800 - protein, 9 aa, synthetic construct
  source 1..9: note = Seed: VVGARGVGK (KRAS G12R)
WVGQRNVGV

SEQ ID NO: 46801 - protein, 9 aa, synthetic construct
  source 1..9: note = Seed: VVGARGVGK (KRAS G12R)
WVGQRPVGA

SEQ ID NO: 46802 - protein, 9 aa, synthetic construct
  source 1..9: note = Seed: VVGARGVGK (KRAS G12R)
WVGQRPVGI

SEQ ID NO: 46803 - protein, 9 aa, synthetic construct
  source 1..9: note = Seed: VVGARGVGK (KRAS G12R)
WVGQRPVGL

SEQ ID NO: 46804 - protein, 9 aa, synthetic construct
  source 1..9: note = Seed: VVGARGVGK (KRAS G12R)
WVGQRPVGM

SEQ ID NO: 46805 - protein, 9 aa, synthetic construct
  source 1..9: note = Seed: VVGARGVGK (KRAS G12R)
WVGQRPVGN

SEQ ID NO: 46806 - protein, 9 aa, synthetic construct
  source 1..9: note = Seed: VVGARGVGK (KRAS G12R)
WVGQRPVGS

SEQ ID NO: 46807 - protein, 9 aa, synthetic construct
  source 1..9: note = Seed: VVGARGVGK (KRAS G12R)
WVGQRPVGT

SEQ ID NO: 46808 - protein, 9 aa, synthetic construct
  source 1..9: note = Seed: VVGARGVGK (KRAS G12R)
WVGQRPVGV

SEQ ID NO: 46809 - protein, 9 aa, synthetic construct
  source 1..9: note = Seed: VVGARGVGK (KRAS G12R)
WVGQRSVGA

SEQ ID NO: 46810 - protein, 9 aa, synthetic construct
  source 1..9: note = Seed: VVGARGVGK (KRAS G12R)
WVGQRSVGF

SEQ ID NO: 46811 - protein, 9 aa, synthetic construct
  source 1..9: note = Seed: VVGARGVGK (KRAS G12R)
WVGQRSVGG

SEQ ID NO: 46812 - protein, 9 aa, synthetic construct
  source 1..9: note = Seed: VVGARGVGK (KRAS G12R)
WVGQRSVGI

SEQ ID NO: 46813 - protein, 9 aa, synthetic construct
  source 1..9: note = Seed: VVGARGVGK (KRAS G12R)
WVGQRSVGL

SEQ ID NO: 46814 - protein, 9 aa, synthetic construct
  source 1..9: note = Seed: VVGARGVGK (KRAS G12R)
WVGQRSVGM

SEQ ID NO: 46815 - protein, 9 aa, synthetic construct
  source 1..9: note = Seed: VVGARGVGK (KRAS G12R)
WVGQRSVGN

SEQ ID NO: 46816 - protein, 9 aa, synthetic construct
  source 1..9: note = Seed: VVGARGVGK (KRAS G12R)
WVGQRSVGS

SEQ ID NO: 46817 - protein, 9 aa, synthetic construct
  source 1..9: note = Seed: VVGARGVGK (KRAS G12R)
WVGQRSVGT

SEQ ID NO: 46818 - protein, 9 aa, synthetic construct
  source 1..9: note = Seed: VVGARGVGK (KRAS G12R)
WVGQRSVGV

SEQ ID NO: 46819 - protein, 9 aa, synthetic construct
  source 1..9: note = Seed: VVGARGVGK (KRAS G12R)
WVGQRTVGA

SEQ ID NO: 46820 - protein, 9 aa, synthetic construct
  source 1..9: note = Seed: VVGARGVGK (KRAS G12R)
WVGQRTVGI

SEQ ID NO: 46821 - protein, 9 aa, synthetic construct
  source 1..9: note = Seed: VVGARGVGK (KRAS G12R)
WVGQRTVGL

SEQ ID NO: 46822 - protein, 9 aa, synthetic construct
  source 1..9: note = Seed: VVGARGVGK (KRAS G12R)
WVGQRTVGM

SEQ ID NO: 46823 - protein, 9 aa, synthetic construct
  source 1..9: note = Seed: VVGARGVGK (KRAS G12R)
WVGQRTVGN

SEQ ID NO: 46824 - protein, 9 aa, synthetic construct
  source 1..9: note = Seed: VVGARGVGK (KRAS G12R)
WVGQRTVGS

SEQ ID NO: 46825 - protein, 9 aa, synthetic construct
  source 1..9: note = Seed: VVGARGVGK (KRAS G12R)
WVGQRTVGT

SEQ ID NO: 46826 - protein, 9 aa, synthetic construct
  source 1..9: note = Seed: VVGARGVGK (KRAS G12R)
WVGQRTVGV

SEQ ID NO: 46827 - protein, 9 aa, synthetic construct
  source 1..9: note = Seed: VVGARGVGK (KRAS G12R)
WVGQRVVGA

SEQ ID NO: 46828 - protein, 9 aa, synthetic construct
  source 1..9: note = Seed: VVGARGVGK (KRAS G12R)
WVGQRVVGI

SEQ ID NO: 46829 - protein, 9 aa, synthetic construct
  source 1..9: note = Seed: VVGARGVGK (KRAS G12R)
WVGQRVVGL

SEQ ID NO: 46830 - protein, 9 aa, synthetic construct
  source 1..9: note = Seed: VVGARGVGK (KRAS G12R)
WVGQRVVGM

SEQ ID NO: 46831 - protein, 9 aa, synthetic construct
  source 1..9: note = Seed: VVGARGVGK (KRAS G12R)
WVGQRVVGN

SEQ ID NO: 46832 - protein, 9 aa, synthetic construct
  source 1..9: note = Seed: VVGARGVGK (KRAS G12R)
WVGQRVVGS

SEQ ID NO: 46833 - protein, 9 aa, synthetic construct
  source 1..9: note = Seed: VVGARGVGK (KRAS G12R)
WVGQRVVGT

SEQ ID NO: 46834 - protein, 9 aa, synthetic construct
  source 1..9: note = Seed: VVGARGVGK (KRAS G12R)
WVGQRVVGV

SEQ ID NO: 46835 - protein, 9 aa, synthetic construct
  source 1..9: note = Seed: VVGARGVGK (KRAS G12R)
WVGRRAVGI

SEQ ID NO: 46836 - protein, 9 aa, synthetic construct
  source 1..9: note = Seed: VVGARGVGK (KRAS G12R)
WVGRRAVGL

SEQ ID NO: 46837 - protein, 9 aa, synthetic construct
  source 1..9: note = Seed: VVGARGVGK (KRAS G12R)
WVGRRAVGR

SEQ ID NO: 46838 - protein, 9 aa, synthetic construct
  source 1..9: note = Seed: VVGARGVGK (KRAS G12R)
WVGRRAVGV

SEQ ID NO: 46839 - protein, 9 aa, synthetic construct
  source 1..9: note = Seed: VVGARGVGK (KRAS G12R)
WVGRRIVGR

SEQ ID NO: 46840 - protein, 9 aa, synthetic construct
  source 1..9: note = Seed: VVGARGVGK (KRAS G12R)
WVGRRKVGR

SEQ ID NO: 46841 - protein, 9 aa, synthetic construct
  source 1..9: note = Seed: VVGARGVGK (KRAS G12R)
WVGRRMVGR

SEQ ID NO: 46842 - protein, 9 aa, synthetic construct
  source 1..9: note = Seed: VVGARGVGK (KRAS G12R)
WVGRRRVGA

SEQ ID NO: 46843 - protein, 9 aa, synthetic construct
  source 1..9: note = Seed: VVGARGVGK (KRAS G12R)
WVGRRRVGF

SEQ ID NO: 46844 - protein, 9 aa, synthetic construct
  source 1..9: note = Seed: VVGARGVGK (KRAS G12R)
WVGRRRVGH

SEQ ID NO: 46845 - protein, 9 aa, synthetic construct
  source 1..9: note = Seed: VVGARGVGK (KRAS G12R)
WVGRRRVGI

SEQ ID NO: 46846 - protein, 9 aa, synthetic construct
  source 1..9: note = Seed: VVGARGVGK (KRAS G12R)
WVGRRRVGK

SEQ ID NO: 46847 - protein, 9 aa, synthetic construct
  source 1..9: note = Seed: VVGARGVGK (KRAS G12R)
WVGRRRVGL

SEQ ID NO: 46848 - protein, 9 aa, synthetic construct
  source 1..9: note = Seed: VVGARGVGK (KRAS G12R)
WVGRRRVGM

SEQ ID NO: 46849 - protein, 9 aa, synthetic construct
  source 1..9: note = Seed: VVGARGVGK (KRAS G12R)
WVGRRRVGR

SEQ ID NO: 46850 - protein, 9 aa, synthetic construct
  source 1..9: note = Seed: VVGARGVGK (KRAS G12R)
WVGRRRVGS

SEQ ID NO: 46851 - protein, 9 aa, synthetic construct
  source 1..9: note = Seed: VVGARGVGK (KRAS G12R)
WVGRRRVGV

SEQ ID NO: 46852 - protein, 9 aa, synthetic construct
  source 1..9: note = Seed: VVGARGVGK (KRAS G12R)
WVGRRRVGW

SEQ ID NO: 46853 - protein, 9 aa, synthetic construct
  source 1..9: note = Seed: VVGARGVGK (KRAS G12R)
WVGRRRVGY

SEQ ID NO: 46854 - protein, 9 aa, synthetic construct
  source 1..9: note = Seed: VVGARGVGK (KRAS G12R)
WVGRRSVGL

SEQ ID NO: 46855 - protein, 9 aa, synthetic construct
  source 1..9: note = Seed: VVGARGVGK (KRAS G12R)
WVGRRVVGR

SEQ ID NO: 46856 - protein, 9 aa, synthetic construct
  source 1..9: note = Seed: VVGARGVGK (KRAS G12R)
WVGSRAVGA

SEQ ID NO: 46857 - protein, 9 aa, synthetic construct
  source 1..9: note = Seed: VVGARGVGK (KRAS G12R)
WVGSRAVGC

SEQ ID NO: 46858 - protein, 9 aa, synthetic construct
  source 1..9: note = Seed: VVGARGVGK (KRAS G12R)
WVGSRAVGF

SEQ ID NO: 46859 - protein, 9 aa, synthetic construct
  source 1..9: note = Seed: VVGARGVGK (KRAS G12R)
WVGSRAVGG

SEQ ID NO: 46860 - protein, 9 aa, synthetic construct
  source 1..9: note = Seed: VVGARGVGK (KRAS G12R)
WVGSRAVGH

SEQ ID NO: 46861 - protein, 9 aa, synthetic construct
  source 1..9: note = Seed: VVGARGVGK (KRAS G12R)
WVGSRAVGI

SEQ ID NO: 46862 - protein, 9 aa, synthetic construct
  source 1..9: note = Seed: VVGARGVGK (KRAS G12R)
WVGSRAVGK

SEQ ID NO: 46863 - protein, 9 aa, synthetic construct
  source 1..9: note = Seed: VVGARGVGK (KRAS G12R)
WVGSRAVGL

SEQ ID NO: 46864 - protein, 9 aa, synthetic construct
  source 1..9: note = Seed: VVGARGVGK (KRAS G12R)
WVGSRAVGM

SEQ ID NO: 46865 - protein, 9 aa, synthetic construct
  source 1..9: note = Seed: VVGARGVGK (KRAS G12R)
WVGSRAVGN

SEQ ID NO: 46866 - protein, 9 aa, synthetic construct
  source 1..9: note = Seed: VVGARGVGK (KRAS G12R)
WVGSRAVGQ

SEQ ID NO: 46867 - protein, 9 aa, synthetic construct
  source 1..9: note = Seed: VVGARGVGK (KRAS G12R)
WVGSRAVGR

SEQ ID NO: 46868 - protein, 9 aa, synthetic construct
  source 1..9: note = Seed: VVGARGVGK (KRAS G12R)
WVGSRAVGS

SEQ ID NO: 46869 - protein, 9 aa, synthetic construct
  source 1..9: note = Seed: VVGARGVGK (KRAS G12R)
WVGSRAVGT

SEQ ID NO: 46870 - protein, 9 aa, synthetic construct
  source 1..9: note = Seed: VVGARGVGK (KRAS G12R)
WVGSRAVGV

SEQ ID NO: 46871 - protein, 9 aa, synthetic construct
  source 1..9: note = Seed: VVGARGVGK (KRAS G12R)
WVGSRAVGY

SEQ ID NO: 46872 - protein, 9 aa, synthetic construct
  source 1..9: note = Seed: VVGARGVGK (KRAS G12R)
WVGSRGVGA

SEQ ID NO: 46873 - protein, 9 aa, synthetic construct
  source 1..9: note = Seed: VVGARGVGK (KRAS G12R)
WVGSRGVGF

SEQ ID NO: 46874 - protein, 9 aa, synthetic construct
  source 1..9: note = Seed: VVGARGVGK (KRAS G12R)
WVGSRGVGG

SEQ ID NO: 46875 - protein, 9 aa, synthetic construct
  source 1..9: note = Seed: VVGARGVGK (KRAS G12R)
WVGSRGVGI

SEQ ID NO: 46876 - protein, 9 aa, synthetic construct
  source 1..9: note = Seed: VVGARGVGK (KRAS G12R)
WVGSRGVGL

SEQ ID NO: 46877 - protein, 9 aa, synthetic construct
  source 1..9: note = Seed: VVGARGVGK (KRAS G12R)
WVGSRGVGM

SEQ ID NO: 46878 - protein, 9 aa, synthetic construct
  source 1..9: note = Seed: VVGARGVGK (KRAS G12R)
WVGSRGVGS

SEQ ID NO: 46879 - protein, 9 aa, synthetic construct
  source 1..9: note = Seed: VVGARGVGK (KRAS G12R)
WVGSRGVGT

SEQ ID NO: 46880 - protein, 9 aa, synthetic construct
  source 1..9: note = Seed: VVGARGVGK (KRAS G12R)
WVGSRGVGV

SEQ ID NO: 46881 - protein, 9 aa, synthetic construct
  source 1..9: note = Seed: VVGARGVGK (KRAS G12R)
WVGSRIVGA

SEQ ID NO: 46882 - protein, 9 aa, synthetic construct
  source 1..9: note = Seed: VVGARGVGK (KRAS G12R)
WVGSRIVGI

SEQ ID NO: 46883 - protein, 9 aa, synthetic construct
  source 1..9: note = Seed: VVGARGVGK (KRAS G12R)
WVGSRIVGS

SEQ ID NO: 46884 - protein, 9 aa, synthetic construct
  source 1..9: note = Seed: VVGARGVGK (KRAS G12R)
WVGSRIVGT

SEQ ID NO: 46885 - protein, 9 aa, synthetic construct
  source 1..9: note = Seed: VVGARGVGK (KRAS G12R)
WVGSRIVGV

SEQ ID NO: 46886 - protein, 9 aa, synthetic construct
  source 1..9: note = Seed: VVGARGVGK (KRAS G12R)
WVGSRLVGA

SEQ ID NO: 46887 - protein, 9 aa, synthetic construct
  source 1..9: note = Seed: VVGARGVGK (KRAS G12R)
WVGSRLVGI

SEQ ID NO: 46888 - protein, 9 aa, synthetic construct
  source 1..9: note = Seed: VVGARGVGK (KRAS G12R)
WVGSRLVGL

SEQ ID NO: 46889 - protein, 9 aa, synthetic construct
  source 1..9: note = Seed: VVGARGVGK (KRAS G12R)
WVGSRLVGS

SEQ ID NO: 46890 - protein, 9 aa, synthetic construct
  source 1..9: note = Seed: VVGARGVGK (KRAS G12R)
WVGSRLVGV

SEQ ID NO: 46891 - protein, 9 aa, synthetic construct
  source 1..9: note = Seed: VVGARGVGK (KRAS G12R)
WVGSRMVGA

SEQ ID NO: 46892 - protein, 9 aa, synthetic construct
  source 1..9: note = Seed: VVGARGVGK (KRAS G12R)
WVGSRMVGI

SEQ ID NO: 46893 - protein, 9 aa, synthetic construct
  source 1..9: note = Seed: VVGARGVGK (KRAS G12R)
WVGSRMVGL

SEQ ID NO: 46894 - protein, 9 aa, synthetic construct
  source 1..9: note = Seed: VVGARGVGK (KRAS G12R)
WVGSRMVGS

SEQ ID NO: 46895 - protein, 9 aa, synthetic construct
  source 1..9: note = Seed: VVGARGVGK (KRAS G12R)
WVGSRMVGV

SEQ ID NO: 46896 - protein, 9 aa, synthetic construct
  source 1..9: note = Seed: VVGARGVGK (KRAS G12R)
WVGSRNVGA

SEQ ID NO: 46897 - protein, 9 aa, synthetic construct
  source 1..9: note = Seed: VVGARGVGK (KRAS G12R)
WVGSRNVGI

SEQ ID NO: 46898 - protein, 9 aa, synthetic construct
  source 1..9: note = Seed: VVGARGVGK (KRAS G12R)
WVGSRNVGL

SEQ ID NO: 46899 - protein, 9 aa, synthetic construct
  source 1..9: note = Seed: VVGARGVGK (KRAS G12R)
WVGSRNVGV

SEQ ID NO: 46900 - protein, 9 aa, synthetic construct
  source 1..9: note = Seed: VVGARGVGK (KRAS G12R)
WVGSRPVGA

SEQ ID NO: 46901 - protein, 9 aa, synthetic construct
  source 1..9: note = Seed: VVGARGVGK (KRAS G12R)
WVGSRPVGF

SEQ ID NO: 46902 - protein, 9 aa, synthetic construct
  source 1..9: note = Seed: VVGARGVGK (KRAS G12R)
WVGSRPVGG

SEQ ID NO: 46903 - protein, 9 aa, synthetic construct
  source 1..9: note = Seed: VVGARGVGK (KRAS G12R)
WVGSRPVGI

SEQ ID NO: 46904 - protein, 9 aa, synthetic construct
  source 1..9: note = Seed: VVGARGVGK (KRAS G12R)
WVGSRPVGL

SEQ ID NO: 46905 - protein, 9 aa, synthetic construct
  source 1..9: note = Seed: VVGARGVGK (KRAS G12R)
WVGSRPVGM

SEQ ID NO: 46906 - protein, 9 aa, synthetic construct
  source 1..9: note = Seed: VVGARGVGK (KRAS G12R)
WVGSRPVGN

SEQ ID NO: 46907 - protein, 9 aa, synthetic construct
  source 1..9: note = Seed: VVGARGVGK (KRAS G12R)
WVGSRPVGS

SEQ ID NO: 46908 - protein, 9 aa, synthetic construct
  source 1..9: note = Seed: VVGARGVGK (KRAS G12R)
WVGSRPVGT

SEQ ID NO: 46909 - protein, 9 aa, synthetic construct
  source 1..9: note = Seed: VVGARGVGK (KRAS G12R)
WVGSRPVGV

SEQ ID NO: 46910 - protein, 9 aa, synthetic construct
  source 1..9: note = Seed: VVGARGVGK (KRAS G12R)
WVGSRPVGY

SEQ ID NO: 46911 - protein, 9 aa, synthetic construct
  source 1..9: note = Seed: VVGARGVGK (KRAS G12R)
WVGSRQVGI

SEQ ID NO: 46912 - protein, 9 aa, synthetic construct
  source 1..9: note = Seed: VVGARGVGK (KRAS G12R)
WVGSRRVGR

SEQ ID NO: 46913 - protein, 9 aa, synthetic construct
  source 1..9: note = Seed: VVGARGVGK (KRAS G12R)
WVGSRSVGA

SEQ ID NO: 46914 - protein, 9 aa, synthetic construct
  source 1..9: note = Seed: VVGARGVGK (KRAS G12R)
WVGSRSVGF

SEQ ID NO: 46915 - protein, 9 aa, synthetic construct
  source 1..9: note = Seed: VVGARGVGK (KRAS G12R)
WVGSRSVGG

SEQ ID NO: 46916 - protein, 9 aa, synthetic construct
  source 1..9: note = Seed: VVGARGVGK (KRAS G12R)
WVGSRSVGI

SEQ ID NO: 46917 - protein, 9 aa, synthetic construct
  source 1..9: note = Seed: VVGARGVGK (KRAS G12R)
WVGSRSVGL

SEQ ID NO: 46918 - protein, 9 aa, synthetic construct
  source 1..9: note = Seed: VVGARGVGK (KRAS G12R)
WVGSRSVGM

SEQ ID NO: 46919 - protein, 9 aa, synthetic construct
  source 1..9: note = Seed: VVGARGVGK (KRAS G12R)
WVGSRSVGN

SEQ ID NO: 46920 - protein, 9 aa, synthetic construct
  source 1..9: note = Seed: VVGARGVGK (KRAS G12R)
WVGSRSVGS

SEQ ID NO: 46921 - protein, 9 aa, synthetic construct
  source 1..9: note = Seed: VVGARGVGK (KRAS G12R)
WVGSRSVGT

SEQ ID NO: 46922 - protein, 9 aa, synthetic construct
  source 1..9: note = Seed: VVGARGVGK (KRAS G12R)
WVGSRSVGV

SEQ ID NO: 46923 - protein, 9 aa, synthetic construct
  source 1..9: note = Seed: VVGARGVGK (KRAS G12R)
WVGSRSVGY

SEQ ID NO: 46924 - protein, 9 aa, synthetic construct
  source 1..9: note = Seed: VVGARGVGK (KRAS G12R)
WVGSRTVGA

SEQ ID NO: 46925 - protein, 9 aa, synthetic construct
  source 1..9: note = Seed: VVGARGVGK (KRAS G12R)
WVGSRTVGF

SEQ ID NO: 46926 - protein, 9 aa, synthetic construct
  source 1..9: note = Seed: VVGARGVGK (KRAS G12R)
WVGSRTVGG

SEQ ID NO: 46927 - protein, 9 aa, synthetic construct
  source 1..9: note = Seed: VVGARGVGK (KRAS G12R)
WVGSRTVGI

SEQ ID NO: 46928 - protein, 9 aa, synthetic construct
  source 1..9: note = Seed: VVGARGVGK (KRAS G12R)
WVGSRTVGL

SEQ ID NO: 46929 - protein, 9 aa, synthetic construct
  source 1..9: note = Seed: VVGARGVGK (KRAS G12R)
WVGSRTVGM

SEQ ID NO: 46930 - protein, 9 aa, synthetic construct
  source 1..9: note = Seed: VVGARGVGK (KRAS G12R)
WVGSRTVGS

SEQ ID NO: 46931 - protein, 9 aa, synthetic construct
  source 1..9: note = Seed: VVGARGVGK (KRAS G12R)
WVGSRTVGT

SEQ ID NO: 46932 - protein, 9 aa, synthetic construct
  source 1..9: note = Seed: VVGARGVGK (KRAS G12R)
WVGSRTVGV

SEQ ID NO: 46933 - protein, 9 aa, synthetic construct
  source 1..9: note = Seed: VVGARGVGK (KRAS G12R)
WVGSRVVGA

SEQ ID NO: 46934 - protein, 9 aa, synthetic construct
  source 1..9: note = Seed: VVGARGVGK (KRAS G12R)
WVGSRVVGG

SEQ ID NO: 46935 - protein, 9 aa, synthetic construct
  source 1..9: note = Seed: VVGARGVGK (KRAS G12R)
WVGSRVVGI

SEQ ID NO: 46936 - protein, 9 aa, synthetic construct
  source 1..9: note = Seed: VVGARGVGK (KRAS G12R)
WVGSRVVGL

SEQ ID NO: 46937 - protein, 9 aa, synthetic construct
  source 1..9: note = Seed: VVGARGVGK (KRAS G12R)
WVGSRVVGM

SEQ ID NO: 46938 - protein, 9 aa, synthetic construct
  source 1..9: note = Seed: VVGARGVGK (KRAS G12R)
WVGSRVVGS

SEQ ID NO: 46939 - protein, 9 aa, synthetic construct
  source 1..9: note = Seed: VVGARGVGK (KRAS G12R)
WVGSRVVGT

SEQ ID NO: 46940 - protein, 9 aa, synthetic construct
  source 1..9: note = Seed: VVGARGVGK (KRAS G12R)
WVGSRVVGV

SEQ ID NO: 46941 - protein, 9 aa, synthetic construct
  source 1..9: note = Seed: VVGARGVGK (KRAS G12R)
WVGTRAVGA

SEQ ID NO: 46942 - protein, 9 aa, synthetic construct
  source 1..9: note = Seed: VVGARGVGK (KRAS G12R)
WVGTRAVGF

SEQ ID NO: 46943 - protein, 9 aa, synthetic construct
  source 1..9: note = Seed: VVGARGVGK (KRAS G12R)
WVGTRAVGG

SEQ ID NO: 46944 - protein, 9 aa, synthetic construct
  source 1..9: note = Seed: VVGARGVGK (KRAS G12R)
WVGTRAVGI

SEQ ID NO: 46945 - protein, 9 aa, synthetic construct
  source 1..9: note = Seed: VVGARGVGK (KRAS G12R)
WVGTRAVGL

SEQ ID NO: 46946 - protein, 9 aa, synthetic construct
  source 1..9: note = Seed: VVGARGVGK (KRAS G12R)
WVGTRAVGM

SEQ ID NO: 46947 - protein, 9 aa, synthetic construct
  source 1..9: note = Seed: VVGARGVGK (KRAS G12R)
WVGTRAVGN

SEQ ID NO: 46948 - protein, 9 aa, synthetic construct
  source 1..9: note = Seed: VVGARGVGK (KRAS G12R)
WVGTRAVGR

SEQ ID NO: 46949 - protein, 9 aa, synthetic construct
  source 1..9: note = Seed: VVGARGVGK (KRAS G12R)
WVGTRAVGS

SEQ ID NO: 46950 - protein, 9 aa, synthetic construct
  source 1..9: note = Seed: VVGARGVGK (KRAS G12R)
WVGTRAVGT

SEQ ID NO: 46951 - protein, 9 aa, synthetic construct
  source 1..9: note = Seed: VVGARGVGK (KRAS G12R)
WVGTRAVGV

SEQ ID NO: 46952 - protein, 9 aa, synthetic construct
  source 1..9: note = Seed: VVGARGVGK (KRAS G12R)
WVGTRAVGY

SEQ ID NO: 46953 - protein, 9 aa, synthetic construct
  source 1..9: note = Seed: VVGARGVGK (KRAS G12R)
WVGTRGVGA

SEQ ID NO: 46954 - protein, 9 aa, synthetic construct
  source 1..9: note = Seed: VVGARGVGK (KRAS G12R)
WVGTRGVGF

SEQ ID NO: 46955 - protein, 9 aa, synthetic construct
  source 1..9: note = Seed: VVGARGVGK (KRAS G12R)
WVGTRGVGI

SEQ ID NO: 46956 - protein, 9 aa, synthetic construct
  source 1..9: note = Seed: VVGARGVGK (KRAS G12R)
WVGTRGVGL

SEQ ID NO: 46957 - protein, 9 aa, synthetic construct
  source 1..9: note = Seed: VVGARGVGK (KRAS G12R)
WVGTRGVGM

SEQ ID NO: 46958 - protein, 9 aa, synthetic construct
  source 1..9: note = Seed: VVGARGVGK (KRAS G12R)
WVGTRGVGS

SEQ ID NO: 46959 - protein, 9 aa, synthetic construct
  source 1..9: note = Seed: VVGARGVGK (KRAS G12R)
WVGTRGVGT

SEQ ID NO: 46960 - protein, 9 aa, synthetic construct
  source 1..9: note = Seed: VVGARGVGK (KRAS G12R)
WVGTRGVGV

SEQ ID NO: 46961 - protein, 9 aa, synthetic construct
  source 1..9: note = Seed: VVGARGVGK (KRAS G12R)
WVGTRGVGY

SEQ ID NO: 46962 - protein, 9 aa, synthetic construct
  source 1..9: note = Seed: VVGARGVGK (KRAS G12R)
WVGTRIVGI

SEQ ID NO: 46963 - protein, 9 aa, synthetic construct
  source 1..9: note = Seed: VVGARGVGK (KRAS G12R)
WVGTRMVGA

SEQ ID NO: 46964 - protein, 9 aa, synthetic construct
  source 1..9: note = Seed: VVGARGVGK (KRAS G12R)
WVGTRNVGF

SEQ ID NO: 46965 - protein, 9 aa, synthetic construct
  source 1..9: note = Seed: VVGARGVGK (KRAS G12R)
WVGTRNVGI

SEQ ID NO: 46966 - protein, 9 aa, synthetic construct
  source 1..9: note = Seed: VVGARGVGK (KRAS G12R)
WVGTRNVGL

SEQ ID NO: 46967 - protein, 9 aa, synthetic construct
  source 1..9: note = Seed: VVGARGVGK (KRAS G12R)
WVGTRNVGM

SEQ ID NO: 46968 - protein, 9 aa, synthetic construct
  source 1..9: note = Seed: VVGARGVGK (KRAS G12R)
WVGTRNVGV

SEQ ID NO: 46969 - protein, 9 aa, synthetic construct
  source 1..9: note = Seed: VVGARGVGK (KRAS G12R)
WVGTRPVGA

SEQ ID NO: 46970 - protein, 9 aa, synthetic construct
  source 1..9: note = Seed: VVGARGVGK (KRAS G12R)
WVGTRPVGF

SEQ ID NO: 46971 - protein, 9 aa, synthetic construct
  source 1..9: note = Seed: VVGARGVGK (KRAS G12R)
WVGTRPVGI

SEQ ID NO: 46972 - protein, 9 aa, synthetic construct
  source 1..9: note = Seed: VVGARGVGK (KRAS G12R)
WVGTRPVGL

SEQ ID NO: 46973 - protein, 9 aa, synthetic construct
  source 1..9: note = Seed: VVGARGVGK (KRAS G12R)
WVGTRPVGM

SEQ ID NO: 46974 - protein, 9 aa, synthetic construct
  source 1..9: note = Seed: VVGARGVGK (KRAS G12R)
WVGTRPVGS

SEQ ID NO: 46975 - protein, 9 aa, synthetic construct
  source 1..9: note = Seed: VVGARGVGK (KRAS G12R)
WVGTRPVGT

SEQ ID NO: 46976 - protein, 9 aa, synthetic construct
  source 1..9: note = Seed: VVGARGVGK (KRAS G12R)
WVGTRPVGV

SEQ ID NO: 46977 - protein, 9 aa, synthetic construct
  source 1..9: note = Seed: VVGARGVGK (KRAS G12R)
WVGTRPVGY

SEQ ID NO: 46978 - protein, 9 aa, synthetic construct
  source 1..9: note = Seed: VVGARGVGK (KRAS G12R)
WVGTRQVGI

SEQ ID NO: 46979 - protein, 9 aa, synthetic construct
  source 1..9: note = Seed: VVGARGVGK (KRAS G12R)
WVGTRRVGR

SEQ ID NO: 46980 - protein, 9 aa, synthetic construct
  source 1..9: note = Seed: VVGARGVGK (KRAS G12R)
WVGTRSVGA

SEQ ID NO: 46981 - protein, 9 aa, synthetic construct
  source 1..9: note = Seed: VVGARGVGK (KRAS G12R)
WVGTRSVGF

SEQ ID NO: 46982 - protein, 9 aa, synthetic construct
  source 1..9: note = Seed: VVGARGVGK (KRAS G12R)
WVGTRSVGI

SEQ ID NO: 46983 - protein, 9 aa, synthetic construct
  source 1..9: note = Seed: VVGARGVGK (KRAS G12R)
WVGTRSVGL

SEQ ID NO: 46984 - protein, 9 aa, synthetic construct
  source 1..9: note = Seed: VVGARGVGK (KRAS G12R)
WVGTRSVGM

SEQ ID NO: 46985 - protein, 9 aa, synthetic construct
  source 1..9: note = Seed: VVGARGVGK (KRAS G12R)
WVGTRSVGS

SEQ ID NO: 46986 - protein, 9 aa, synthetic construct
  source 1..9: note = Seed: VVGARGVGK (KRAS G12R)
WVGTRSVGT

SEQ ID NO: 46987 - protein, 9 aa, synthetic construct
  source 1..9: note = Seed: VVGARGVGK (KRAS G12R)
WVGTRSVGV

SEQ ID NO: 46988 - protein, 9 aa, synthetic construct
  source 1..9: note = Seed: VVGARGVGK (KRAS G12R)
WVGTRSVGY

SEQ ID NO: 46989 - protein, 9 aa, synthetic construct
  source 1..9: note = Seed: VVGARGVGK (KRAS G12R)
WVGTRTVGA

SEQ ID NO: 46990 - protein, 9 aa, synthetic construct
  source 1..9: note = Seed: VVGARGVGK (KRAS G12R)
WVGTRTVGF

SEQ ID NO: 46991 - protein, 9 aa, synthetic construct
  source 1..9: note = Seed: VVGARGVGK (KRAS G12R)
WVGTRTVGI

SEQ ID NO: 46992 - protein, 9 aa, synthetic construct
  source 1..9: note = Seed: VVGARGVGK (KRAS G12R)
WVGTRTVGL

SEQ ID NO: 46993 - protein, 9 aa, synthetic construct
  source 1..9: note = Seed: VVGARGVGK (KRAS G12R)
WVGTRTVGM

SEQ ID NO: 46994 - protein, 9 aa, synthetic construct
  source 1..9: note = Seed: VVGARGVGK (KRAS G12R)
WVGTRTVGV

SEQ ID NO: 46995 - protein, 9 aa, synthetic construct
  source 1..9: note = Seed: VVGARGVGK (KRAS G12R)
WVGTRTVGY

SEQ ID NO: 46996 - protein, 9 aa, synthetic construct
  source 1..9: note = Seed: VVGARGVGK (KRAS G12R)
WVGTRVVGA

SEQ ID NO: 46997 - protein, 9 aa, synthetic construct
  source 1..9: note = Seed: VVGARGVGK (KRAS G12R)
WVGTRVVGI

SEQ ID NO: 46998 - protein, 9 aa, synthetic construct
  source 1..9: note = Seed: VVGARGVGK (KRAS G12R)
WVGTRVVGL

SEQ ID NO: 46999 - protein, 9 aa, synthetic construct
  source 1..9: note = Seed: VVGARGVGK (KRAS G12R)
WVGTRVVGM

SEQ ID NO: 47000 - protein, 9 aa, synthetic construct
  source 1..9: note = Seed: VVGARGVGK (KRAS G12R)
WVGTRVVGV

SEQ ID NO: 47001 - protein, 9 aa, synthetic construct
  source 1..9: note = Seed: VVGARGVGK (KRAS G12R)
WVGVRAVGA

SEQ ID NO: 47002 - protein, 9 aa, synthetic construct
  source 1..9: note = Seed: VVGARGVGK (KRAS G12R)
WVGVRAVGF

SEQ ID NO: 47003 - protein, 9 aa, synthetic construct
  source 1..9: note = Seed: VVGARGVGK (KRAS G12R)
WVGVRAVGG

SEQ ID NO: 47004 - protein, 9 aa, synthetic construct
  source 1..9: note = Seed: VVGARGVGK (KRAS G12R)
WVGVRAVGH

SEQ ID NO: 47005 - protein, 9 aa, synthetic construct
  source 1..9: note = Seed: VVGARGVGK (KRAS G12R)
WVGVRAVGI

SEQ ID NO: 47006 - protein, 9 aa, synthetic construct
  source 1..9: note = Seed: VVGARGVGK (KRAS G12R)
WVGVRAVGK

SEQ ID NO: 47007 - protein, 9 aa, synthetic construct
  source 1..9: note = Seed: VVGARGVGK (KRAS G12R)
WVGVRAVGL

SEQ ID NO: 47008 - protein, 9 aa, synthetic construct
  source 1..9: note = Seed: VVGARGVGK (KRAS G12R)
WVGVRAVGM

SEQ ID NO: 47009 - protein, 9 aa, synthetic construct
  source 1..9: note = Seed: VVGARGVGK (KRAS G12R)
WVGVRAVGN

SEQ ID NO: 47010 - protein, 9 aa, synthetic construct
  source 1..9: note = Seed: VVGARGVGK (KRAS G12R)
WVGVRAVGQ

SEQ ID NO: 47011 - protein, 9 aa, synthetic construct
  source 1..9: note = Seed: VVGARGVGK (KRAS G12R)
WVGVRAVGR

SEQ ID NO: 47012 - protein, 9 aa, synthetic construct
  source 1..9: note = Seed: VVGARGVGK (KRAS G12R)
WVGVRAVGS

SEQ ID NO: 47013 - protein, 9 aa, synthetic construct
  source 1..9: note = Seed: VVGARGVGK (KRAS G12R)
WVGVRAVGT

SEQ ID NO: 47014 - protein, 9 aa, synthetic construct
  source 1..9: note = Seed: VVGARGVGK (KRAS G12R)
WVGVRAVGV

SEQ ID NO: 47015 - protein, 9 aa, synthetic construct
  source 1..9: note = Seed: VVGARGVGK (KRAS G12R)
WVGVRAVGY

SEQ ID NO: 47016 - protein, 9 aa, synthetic construct
  source 1..9: note = Seed: VVGARGVGK (KRAS G12R)
WVGVRGVGA

SEQ ID NO: 47017 - protein, 9 aa, synthetic construct
  source 1..9: note = Seed: VVGARGVGK (KRAS G12R)
WVGVRGVGG

SEQ ID NO: 47018 - protein, 9 aa, synthetic construct
  source 1..9: note = Seed: VVGARGVGK (KRAS G12R)
WVGVRGVGI

SEQ ID NO: 47019 - protein, 9 aa, synthetic construct
  source 1..9: note = Seed: VVGARGVGK (KRAS G12R)
WVGVRGVGL

SEQ ID NO: 47020 - protein, 9 aa, synthetic construct
  source 1..9: note = Seed: VVGARGVGK (KRAS G12R)
WVGVRGVGM

SEQ ID NO: 47021 - protein, 9 aa, synthetic construct
  source 1..9: note = Seed: VVGARGVGK (KRAS G12R)
WVGVRGVGN

SEQ ID NO: 47022 - protein, 9 aa, synthetic construct
  source 1..9: note = Seed: VVGARGVGK (KRAS G12R)
WVGVRGVGS

SEQ ID NO: 47023 - protein, 9 aa, synthetic construct
  source 1..9: note = Seed: VVGARGVGK (KRAS G12R)
WVGVRGVGT

SEQ ID NO: 47024 - protein, 9 aa, synthetic construct
  source 1..9: note = Seed: VVGARGVGK (KRAS G12R)
WVGVRGVGV

SEQ ID NO: 47025 - protein, 9 aa, synthetic construct
  source 1..9: note = Seed: VVGARGVGK (KRAS G12R)
WVGVRIVGN

SEQ ID NO: 47026 - protein, 9 aa, synthetic construct
  source 1..9: note = Seed: VVGARGVGK (KRAS G12R)
WVGVRNVGA

SEQ ID NO: 47027 - protein, 9 aa, synthetic construct
  source 1..9: note = Seed: VVGARGVGK (KRAS G12R)
WVGVRNVGI

SEQ ID NO: 47028 - protein, 9 aa, synthetic construct
  source 1..9: note = Seed: VVGARGVGK (KRAS G12R)
WVGVRNVGL

SEQ ID NO: 47029 - protein, 9 aa, synthetic construct
  source 1..9: note = Seed: VVGARGVGK (KRAS G12R)
WVGVRNVGM

SEQ ID NO: 47030 - protein, 9 aa, synthetic construct
  source 1..9: note = Seed: VVGARGVGK (KRAS G12R)
WVGVRNVGN

SEQ ID NO: 47031 - protein, 9 aa, synthetic construct
  source 1..9: note = Seed: VVGARGVGK (KRAS G12R)
WVGVRNVGS

SEQ ID NO: 47032 - protein, 9 aa, synthetic construct
  source 1..9: note = Seed: VVGARGVGK (KRAS G12R)
WVGVRNVGT

SEQ ID NO: 47033 - protein, 9 aa, synthetic construct
  source 1..9: note = Seed: VVGARGVGK (KRAS G12R)
WVGVRNVGV

SEQ ID NO: 47034 - protein, 9 aa, synthetic construct
  source 1..9: note = Seed: VVGARGVGK (KRAS G12R)
WVGVRPVGA

SEQ ID NO: 47035 - protein, 9 aa, synthetic construct
  source 1..9: note = Seed: VVGARGVGK (KRAS G12R)
WVGVRPVGF

SEQ ID NO: 47036 - protein, 9 aa, synthetic construct
  source 1..9: note = Seed: VVGARGVGK (KRAS G12R)
WVGVRPVGG

SEQ ID NO: 47037 - protein, 9 aa, synthetic construct
  source 1..9: note = Seed: VVGARGVGK (KRAS G12R)
WVGVRPVGI

SEQ ID NO: 47038 - protein, 9 aa, synthetic construct
  source 1..9: note = Seed: VVGARGVGK (KRAS G12R)
WVGVRPVGL

SEQ ID NO: 47039 - protein, 9 aa, synthetic construct
  source 1..9: note = Seed: VVGARGVGK (KRAS G12R)
WVGVRPVGM

SEQ ID NO: 47040 - protein, 9 aa, synthetic construct
  source 1..9: note = Seed: VVGARGVGK (KRAS G12R)
WVGVRPVGN

SEQ ID NO: 47041 - protein, 9 aa, synthetic construct
  source 1..9: note = Seed: VVGARGVGK (KRAS G12R)
WVGVRPVGS

SEQ ID NO: 47042 - protein, 9 aa, synthetic construct
  source 1..9: note = Seed: VVGARGVGK (KRAS G12R)
WVGVRPVGT

SEQ ID NO: 47043 - protein, 9 aa, synthetic construct
  source 1..9: note = Seed: VVGARGVGK (KRAS G12R)
WVGVRPVGV

SEQ ID NO: 47044 - protein, 9 aa, synthetic construct
  source 1..9: note = Seed: VVGARGVGK (KRAS G12R)
WVGVRSVGA

SEQ ID NO: 47045 - protein, 9 aa, synthetic construct
  source 1..9: note = Seed: VVGARGVGK (KRAS G12R)
WVGVRSVGF

SEQ ID NO: 47046 - protein, 9 aa, synthetic construct
  source 1..9: note = Seed: VVGARGVGK (KRAS G12R)
WVGVRSVGG

SEQ ID NO: 47047 - protein, 9 aa, synthetic construct
  source 1..9: note = Seed: VVGARGVGK (KRAS G12R)
WVGVRSVGI

SEQ ID NO: 47048 - protein, 9 aa, synthetic construct
  source 1..9: note = Seed: VVGARGVGK (KRAS G12R)
WVGVRSVGL

SEQ ID NO: 47049 - protein, 9 aa, synthetic construct
  source 1..9: note = Seed: VVGARGVGK (KRAS G12R)
WVGVRSVGM

SEQ ID NO: 47050 - protein, 9 aa, synthetic construct
  source 1..9: note = Seed: VVGARGVGK (KRAS G12R)
WVGVRSVGN

SEQ ID NO: 47051 - protein, 9 aa, synthetic construct
  source 1..9: note = Seed: VVGARGVGK (KRAS G12R)
WVGVRSVGS

SEQ ID NO: 47052 - protein, 9 aa, synthetic construct
  source 1..9: note = Seed: VVGARGVGK (KRAS G12R)
WVGVRSVGT

SEQ ID NO: 47053 - protein, 9 aa, synthetic construct
  source 1..9: note = Seed: VVGARGVGK (KRAS G12R)
WVGVRSVGV

SEQ ID NO: 47054 - protein, 9 aa, synthetic construct
  source 1..9: note = Seed: VVGARGVGK (KRAS G12R)
WVGVRSVGY

SEQ ID NO: 47055 - protein, 9 aa, synthetic construct
  source 1..9: note = Seed: VVGARGVGK (KRAS G12R)
WVGVRTVGA

SEQ ID NO: 47056 - protein, 9 aa, synthetic construct
  source 1..9: note = Seed: VVGARGVGK (KRAS G12R)
WVGVRTVGG

SEQ ID NO: 47057 - protein, 9 aa, synthetic construct
  source 1..9: note = Seed: VVGARGVGK (KRAS G12R)
WVGVRTVGI

SEQ ID NO: 47058 - protein, 9 aa, synthetic construct
  source 1..9: note = Seed: VVGARGVGK (KRAS G12R)
WVGVRTVGL

SEQ ID NO: 47059 - protein, 9 aa, synthetic construct
  source 1..9: note = Seed: VVGARGVGK (KRAS G12R)
WVGVRTVGM

SEQ ID NO: 47060 - protein, 9 aa, synthetic construct
  source 1..9: note = Seed: VVGARGVGK (KRAS G12R)
WVGVRTVGN

SEQ ID NO: 47061 - protein, 9 aa, synthetic construct
  source 1..9: note = Seed: VVGARGVGK (KRAS G12R)
WVGVRTVGS

SEQ ID NO: 47062 - protein, 9 aa, synthetic construct
  source 1..9: note = Seed: VVGARGVGK (KRAS G12R)
WVGVRTVGT

SEQ ID NO: 47063 - protein, 9 aa, synthetic construct
  source 1..9: note = Seed: VVGARGVGK (KRAS G12R)
WVGVRTVGV

SEQ ID NO: 47064 - protein, 9 aa, synthetic construct
  source 1..9: note = Seed: VVGARGVGK (KRAS G12R)
WVGVRVVGA

SEQ ID NO: 47065 - protein, 9 aa, synthetic construct
  source 1..9: note = Seed: VVGARGVGK (KRAS G12R)
WVGVRVVGN

SEQ ID NO: 47066 - protein, 9 aa, synthetic construct
  source 1..9: note = Seed: VVGARGVGK (KRAS G12R)
WVGVRVVGS

SEQ ID NO: 47067 - protein, 9 aa, synthetic construct
  source 1..9: note = Seed: VVGARGVGK (KRAS G12R)
WVGVRVVGV

SEQ ID NO: 47068 - protein, 9 aa, synthetic construct
  source 1..9: note = Seed: VVGARGVGK (KRAS G12R)
WVGWRAVGG

SEQ ID NO: 47069 - protein, 9 aa, synthetic construct
  source 1..9: note = Seed: VVGARGVGK (KRAS G12R)
WVGWRAVGI

SEQ ID NO: 47070 - protein, 9 aa, synthetic construct
  source 1..9: note = Seed: VVGARGVGK (KRAS G12R)
WVGWRAVGL

SEQ ID NO: 47071 - protein, 9 aa, synthetic construct
  source 1..9: note = Seed: VVGARGVGK (KRAS G12R)
WVGWRAVGM

SEQ ID NO: 47072 - protein, 9 aa, synthetic construct
  source 1..9: note = Seed: VVGARGVGK (KRAS G12R)
WVGWRAVGV

SEQ ID NO: 47073 - protein, 9 aa, synthetic construct
  source 1..9: note = Seed: VVGARGVGK (KRAS G12R)
WVGWRGVGV

SEQ ID NO: 47074 - protein, 9 aa, synthetic construct
  source 1..9: note = Seed: VVGARGVGK (KRAS G12R)
WVGWRKVGR

SEQ ID NO: 47075 - protein, 9 aa, synthetic construct
  source 1..9: note = Seed: VVGARGVGK (KRAS G12R)
WVGWRPVGI

SEQ ID NO: 47076 - protein, 9 aa, synthetic construct
  source 1..9: note = Seed: VVGARGVGK (KRAS G12R)
WVGWRPVGV

SEQ ID NO: 47077 - protein, 9 aa, synthetic construct
  source 1..9: note = Seed: VVGARGVGK (KRAS G12R)
WVGWRRVGR

SEQ ID NO: 47078 - protein, 9 aa, synthetic construct
  source 1..9: note = Seed: VVGARGVGK (KRAS G12R)
WVGWRSVGI

SEQ ID NO: 47079 - protein, 9 aa, synthetic construct
  source 1..9: note = Seed: VVGARGVGK (KRAS G12R)
WVGWRSVGL

SEQ ID NO: 47080 - protein, 9 aa, synthetic construct
  source 1..9: note = Seed: VVGARGVGK (KRAS G12R)
WVGWRSVGV

SEQ ID NO: 47081 - protein, 9 aa, synthetic construct
  source 1..9: note = Seed: VVGARGVGK (KRAS G12R)
WVGYRAVGI

SEQ ID NO: 47082 - protein, 9 aa, synthetic construct
  source 1..9: note = Seed: VVGARGVGK (KRAS G12R)
WVGYRAVGL

SEQ ID NO: 47083 - protein, 9 aa, synthetic construct
  source 1..9: note = Seed: VVGARGVGK (KRAS G12R)
WVGYRAVGM

SEQ ID NO: 47084 - protein, 9 aa, synthetic construct
  source 1..9: note = Seed: VVGARGVGK (KRAS G12R)
WVGYRGVGV

SEQ ID NO: 47085 - protein, 9 aa, synthetic construct
  source 1..9: note = Seed: VVGARGVGK (KRAS G12R)
WVGYRRVGR

SEQ ID NO: 47086 - protein, 9 aa, synthetic construct
  source 1..9: note = Seed: VVGARGVGK (KRAS G12R)
WVGYRSVGL

SEQ ID NO: 47087 - protein, 9 aa, synthetic construct
  source 1..9: note = Seed: VVGARGVGK (KRAS G12R)
YVGARAVGA

SEQ ID NO: 47088 - protein, 9 aa, synthetic construct
  source 1..9: note = Seed: VVGARGVGK (KRAS G12R)
YVGARAVGC

SEQ ID NO: 47089 - protein, 9 aa, synthetic construct
  source 1..9: note = Seed: VVGARGVGK (KRAS G12R)
YVGARAVGD

SEQ ID NO: 47090 - protein, 9 aa, synthetic construct
  source 1..9: note = Seed: VVGARGVGK (KRAS G12R)
YVGARAVGE

SEQ ID NO: 47091 - protein, 9 aa, synthetic construct
  source 1..9: note = Seed: VVGARGVGK (KRAS G12R)
YVGARAVGF

SEQ ID NO: 47092 - protein, 9 aa, synthetic construct
  source 1..9: note = Seed: VVGARGVGK (KRAS G12R)
YVGARAVGG

SEQ ID NO: 47093 - protein, 9 aa, synthetic construct
  source 1..9: note = Seed: VVGARGVGK (KRAS G12R)
YVGARAVGH

SEQ ID NO: 47094 - protein, 9 aa, synthetic construct
  source 1..9: note = Seed: VVGARGVGK (KRAS G12R)
YVGARAVGI

SEQ ID NO: 47095 - protein, 9 aa, synthetic construct
  source 1..9: note = Seed: VVGARGVGK (KRAS G12R)
YVGARAVGK

SEQ ID NO: 47096 - protein, 9 aa, synthetic construct
  source 1..9: note = Seed: VVGARGVGK (KRAS G12R)
YVGARAVGL

SEQ ID NO: 47097 - protein, 9 aa, synthetic construct
  source 1..9: note = Seed: VVGARGVGK (KRAS G12R)
YVGARAVGM

SEQ ID NO: 47098 - protein, 9 aa, synthetic construct
  source 1..9: note = Seed: VVGARGVGK (KRAS G12R)
YVGARAVGN

SEQ ID NO: 47099 - protein, 9 aa, synthetic construct
  source 1..9: note = Seed: VVGARGVGK (KRAS G12R)
YVGARAVGP

SEQ ID NO: 47100 - protein, 9 aa, synthetic construct
  source 1..9: note = Seed: VVGARGVGK (KRAS G12R)
YVGARAVGQ

SEQ ID NO: 47101 - protein, 9 aa, synthetic construct
  source 1..9: note = Seed: VVGARGVGK (KRAS G12R)
YVGARAVGR

SEQ ID NO: 47102 - protein, 9 aa, synthetic construct
  source 1..9: note = Seed: VVGARGVGK (KRAS G12R)
YVGARAVGS

SEQ ID NO: 47103 - protein, 9 aa, synthetic construct
  source 1..9: note = Seed: VVGARGVGK (KRAS G12R)
YVGARAVGT

SEQ ID NO: 47104 - protein, 9 aa, synthetic construct
  source 1..9: note = Seed: VVGARGVGK (KRAS G12R)
YVGARAVGV

SEQ ID NO: 47105 - protein, 9 aa, synthetic construct
  source 1..9: note = Seed: VVGARGVGK (KRAS G12R)
YVGARAVGW

SEQ ID NO: 47106 - protein, 9 aa, synthetic construct
  source 1..9: note = Seed: VVGARGVGK (KRAS G12R)
YVGARAVGY

SEQ ID NO: 47107 - protein, 9 aa, synthetic construct
  source 1..9: note = Seed: VVGARGVGK (KRAS G12R)
YVGARCVGA

SEQ ID NO: 47108 - protein, 9 aa, synthetic construct
  source 1..9: note = Seed: VVGARGVGK (KRAS G12R)
YVGARCVGF

SEQ ID NO: 47109 - protein, 9 aa, synthetic construct
  source 1..9: note = Seed: VVGARGVGK (KRAS G12R)
YVGARCVGG

SEQ ID NO: 47110 - protein, 9 aa, synthetic construct
  source 1..9: note = Seed: VVGARGVGK (KRAS G12R)
YVGARCVGI

SEQ ID NO: 47111 - protein, 9 aa, synthetic construct
  source 1..9: note = Seed: VVGARGVGK (KRAS G12R)
YVGARCVGK

SEQ ID NO: 47112 - protein, 9 aa, synthetic construct
  source 1..9: note = Seed: VVGARGVGK (KRAS G12R)
YVGARCVGL

SEQ ID NO: 47113 - protein, 9 aa, synthetic construct
  source 1..9: note = Seed: VVGARGVGK (KRAS G12R)
YVGARCVGM

SEQ ID NO: 47114 - protein, 9 aa, synthetic construct
  source 1..9: note = Seed: VVGARGVGK (KRAS G12R)
YVGARCVGN

SEQ ID NO: 47115 - protein, 9 aa, synthetic construct
  source 1..9: note = Seed: VVGARGVGK (KRAS G12R)
YVGARCVGR

SEQ ID NO: 47116 - protein, 9 aa, synthetic construct
  source 1..9: note = Seed: VVGARGVGK (KRAS G12R)
YVGARCVGS

SEQ ID NO: 47117 - protein, 9 aa, synthetic construct
  source 1..9: note = Seed: VVGARGVGK (KRAS G12R)
YVGARCVGT

SEQ ID NO: 47118 - protein, 9 aa, synthetic construct
  source 1..9: note = Seed: VVGARGVGK (KRAS G12R)
YVGARCVGV

SEQ ID NO: 47119 - protein, 9 aa, synthetic construct
  source 1..9: note = Seed: VVGARGVGK (KRAS G12R)
YVGARCVGY

SEQ ID NO: 47120 - protein, 9 aa, synthetic construct
  source 1..9: note = Seed: VVGARGVGK (KRAS G12R)
YVGARDVGA

SEQ ID NO: 47121 - protein, 9 aa, synthetic construct
  source 1..9: note = Seed: VVGARGVGK (KRAS G12R)
YVGARDVGI

SEQ ID NO: 47122 - protein, 9 aa, synthetic construct
  source 1..9: note = Seed: VVGARGVGK (KRAS G12R)
YVGARDVGL

SEQ ID NO: 47123 - protein, 9 aa, synthetic construct
  source 1..9: note = Seed: VVGARGVGK (KRAS G12R)
YVGARDVGV

SEQ ID NO: 47124 - protein, 9 aa, synthetic construct
  source 1..9: note = Seed: VVGARGVGK (KRAS G12R)
YVGAREVGA

SEQ ID NO: 47125 - protein, 9 aa, synthetic construct
  source 1..9: note = Seed: VVGARGVGK (KRAS G12R)
YVGAREVGI

SEQ ID NO: 47126 - protein, 9 aa, synthetic construct
  source 1..9: note = Seed: VVGARGVGK (KRAS G12R)
YVGAREVGL

SEQ ID NO: 47127 - protein, 9 aa, synthetic construct
  source 1..9: note = Seed: VVGARGVGK (KRAS G12R)
YVGAREVGM

SEQ ID NO: 47128 - protein, 9 aa, synthetic construct
  source 1..9: note = Seed: VVGARGVGK (KRAS G12R)
YVGAREVGN

SEQ ID NO: 47129 - protein, 9 aa, synthetic construct
  source 1..9: note = Seed: VVGARGVGK (KRAS G12R)
YVGAREVGS

SEQ ID NO: 47130 - protein, 9 aa, synthetic construct
  source 1..9: note = Seed: VVGARGVGK (KRAS G12R)
YVGAREVGT

SEQ ID NO: 47131 - protein, 9 aa, synthetic construct
  source 1..9: note = Seed: VVGARGVGK (KRAS G12R)
YVGAREVGV

SEQ ID NO: 47132 - protein, 9 aa, synthetic construct
  source 1..9: note = Seed: VVGARGVGK (KRAS G12R)
YVGARFVGA

SEQ ID NO: 47133 - protein, 9 aa, synthetic construct
  source 1..9: note = Seed: VVGARGVGK (KRAS G12R)
YVGARFVGI

SEQ ID NO: 47134 - protein, 9 aa, synthetic construct
  source 1..9: note = Seed: VVGARGVGK (KRAS G12R)
YVGARFVGL

SEQ ID NO: 47135 - protein, 9 aa, synthetic construct
  source 1..9: note = Seed: VVGARGVGK (KRAS G12R)
YVGARFVGM

SEQ ID NO: 47136 - protein, 9 aa, synthetic construct
  source 1..9: note = Seed: VVGARGVGK (KRAS G12R)
YVGARFVGR

SEQ ID NO: 47137 - protein, 9 aa, synthetic construct
  source 1..9: note = Seed: VVGARGVGK (KRAS G12R)
YVGARFVGS

SEQ ID NO: 47138 - protein, 9 aa, synthetic construct
  source 1..9: note = Seed: VVGARGVGK (KRAS G12R)
YVGARFVGT

SEQ ID NO: 47139 - protein, 9 aa, synthetic construct
  source 1..9: note = Seed: VVGARGVGK (KRAS G12R)
YVGARFVGV

SEQ ID NO: 47140 - protein, 9 aa, synthetic construct
  source 1..9: note = Seed: VVGARGVGK (KRAS G12R)
YVGARGVGA

SEQ ID NO: 47141 - protein, 9 aa, synthetic construct
  source 1..9: note = Seed: VVGARGVGK (KRAS G12R)
YVGARGVGC

SEQ ID NO: 47142 - protein, 9 aa, synthetic construct
  source 1..9: note = Seed: VVGARGVGK (KRAS G12R)
YVGARGVGD

SEQ ID NO: 47143 - protein, 9 aa, synthetic construct
  source 1..9: note = Seed: VVGARGVGK (KRAS G12R)
YVGARGVGE

SEQ ID NO: 47144 - protein, 9 aa, synthetic construct
  source 1..9: note = Seed: VVGARGVGK (KRAS G12R)
YVGARGVGF

SEQ ID NO: 47145 - protein, 9 aa, synthetic construct
  source 1..9: note = Seed: VVGARGVGK (KRAS G12R)
YVGARGVGG

SEQ ID NO: 47146 - protein, 9 aa, synthetic construct
  source 1..9: note = Seed: VVGARGVGK (KRAS G12R)
YVGARGVGH

SEQ ID NO: 47147 - protein, 9 aa, synthetic construct
  source 1..9: note = Seed: VVGARGVGK (KRAS G12R)
YVGARGVGI

SEQ ID NO: 47148 - protein, 9 aa, synthetic construct
  source 1..9: note = Seed: VVGARGVGK (KRAS G12R)
YVGARGVGK

SEQ ID NO: 47149 - protein, 9 aa, synthetic construct
  source 1..9: note = Seed: VVGARGVGK (KRAS G12R)
YVGARGVGL

SEQ ID NO: 47150 - protein, 9 aa, synthetic construct
  source 1..9: note = Seed: VVGARGVGK (KRAS G12R)
YVGARGVGM

SEQ ID NO: 47151 - protein, 9 aa, synthetic construct
  source 1..9: note = Seed: VVGARGVGK (KRAS G12R)
YVGARGVGN

SEQ ID NO: 47152 - protein, 9 aa, synthetic construct
  source 1..9: note = Seed: VVGARGVGK (KRAS G12R)
YVGARGVGP

SEQ ID NO: 47153 - protein, 9 aa, synthetic construct
  source 1..9: note = Seed: VVGARGVGK (KRAS G12R)
YVGARGVGQ

SEQ ID NO: 47154 - protein, 9 aa, synthetic construct
  source 1..9: note = Seed: VVGARGVGK (KRAS G12R)
YVGARGVGR

SEQ ID NO: 47155 - protein, 9 aa, synthetic construct
  source 1..9: note = Seed: VVGARGVGK (KRAS G12R)
YVGARGVGS

SEQ ID NO: 47156 - protein, 9 aa, synthetic construct
  source 1..9: note = Seed: VVGARGVGK (KRAS G12R)
YVGARGVGT

SEQ ID NO: 47157 - protein, 9 aa, synthetic construct
  source 1..9: note = Seed: VVGARGVGK (KRAS G12R)
YVGARGVGV

SEQ ID NO: 47158 - protein, 9 aa, synthetic construct
  source 1..9: note = Seed: VVGARGVGK (KRAS G12R)
YVGARGVGW

SEQ ID NO: 47159 - protein, 9 aa, synthetic construct
  source 1..9: note = Seed: VVGARGVGK (KRAS G12R)
YVGARGVGY

SEQ ID NO: 47160 - protein, 9 aa, synthetic construct
  source 1..9: note = Seed: VVGARGVGK (KRAS G12R)
YVGARHVGA

SEQ ID NO: 47161 - protein, 9 aa, synthetic construct
  source 1..9: note = Seed: VVGARGVGK (KRAS G12R)
YVGARHVGC

SEQ ID NO: 47162 - protein, 9 aa, synthetic construct
  source 1..9: note = Seed: VVGARGVGK (KRAS G12R)
YVGARHVGF

SEQ ID NO: 47163 - protein, 9 aa, synthetic construct
  source 1..9: note = Seed: VVGARGVGK (KRAS G12R)
YVGARHVGG

SEQ ID NO: 47164 - protein, 9 aa, synthetic construct
  source 1..9: note = Seed: VVGARGVGK (KRAS G12R)
YVGARHVGH

SEQ ID NO: 47165 - protein, 9 aa, synthetic construct
  source 1..9: note = Seed: VVGARGVGK (KRAS G12R)
YVGARHVGI

SEQ ID NO: 47166 - protein, 9 aa, synthetic construct
  source 1..9: note = Seed: VVGARGVGK (KRAS G12R)
YVGARHVGL

SEQ ID NO: 47167 - protein, 9 aa, synthetic construct
  source 1..9: note = Seed: VVGARGVGK (KRAS G12R)
YVGARHVGM

SEQ ID NO: 47168 - protein, 9 aa, synthetic construct
  source 1..9: note = Seed: VVGARGVGK (KRAS G12R)
YVGARHVGN

SEQ ID NO: 47169 - protein, 9 aa, synthetic construct
  source 1..9: note = Seed: VVGARGVGK (KRAS G12R)
YVGARHVGP

SEQ ID NO: 47170 - protein, 9 aa, synthetic construct
  source 1..9: note = Seed: VVGARGVGK (KRAS G12R)
YVGARHVGQ

SEQ ID NO: 47171 - protein, 9 aa, synthetic construct
  source 1..9: note = Seed: VVGARGVGK (KRAS G12R)
YVGARHVGR

SEQ ID NO: 47172 - protein, 9 aa, synthetic construct
  source 1..9: note = Seed: VVGARGVGK (KRAS G12R)
YVGARHVGS

SEQ ID NO: 47173 - protein, 9 aa, synthetic construct
  source 1..9: note = Seed: VVGARGVGK (KRAS G12R)
YVGARHVGT

SEQ ID NO: 47174 - protein, 9 aa, synthetic construct
  source 1..9: note = Seed: VVGARGVGK (KRAS G12R)
YVGARHVGV

SEQ ID NO: 47175 - protein, 9 aa, synthetic construct
  source 1..9: note = Seed: VVGARGVGK (KRAS G12R)
YVGARHVGW

SEQ ID NO: 47176 - protein, 9 aa, synthetic construct
  source 1..9: note = Seed: VVGARGVGK (KRAS G12R)
YVGARHVGY

SEQ ID NO: 47177 - protein, 9 aa, synthetic construct
  source 1..9: note = Seed: VVGARGVGK (KRAS G12R)
YVGARIVGA

SEQ ID NO: 47178 - protein, 9 aa, synthetic construct
  source 1..9: note = Seed: VVGARGVGK (KRAS G12R)
YVGARIVGC

SEQ ID NO: 47179 - protein, 9 aa, synthetic construct
  source 1..9: note = Seed: VVGARGVGK (KRAS G12R)
YVGARIVGD

SEQ ID NO: 47180 - protein, 9 aa, synthetic construct
  source 1..9: note = Seed: VVGARGVGK (KRAS G12R)
YVGARIVGE

SEQ ID NO: 47181 - protein, 9 aa, synthetic construct
  source 1..9: note = Seed: VVGARGVGK (KRAS G12R)
YVGARIVGF

SEQ ID NO: 47182 - protein, 9 aa, synthetic construct
  source 1..9: note = Seed: VVGARGVGK (KRAS G12R)
YVGARIVGG

SEQ ID NO: 47183 - protein, 9 aa, synthetic construct
  source 1..9: note = Seed: VVGARGVGK (KRAS G12R)
YVGARIVGH

SEQ ID NO: 47184 - protein, 9 aa, synthetic construct
  source 1..9: note = Seed: VVGARGVGK (KRAS G12R)
YVGARIVGI

SEQ ID NO: 47185 - protein, 9 aa, synthetic construct
  source 1..9: note = Seed: VVGARGVGK (KRAS G12R)
YVGARIVGK

SEQ ID NO: 47186 - protein, 9 aa, synthetic construct
  source 1..9: note = Seed: VVGARGVGK (KRAS G12R)
YVGARIVGL

SEQ ID NO: 47187 - protein, 9 aa, synthetic construct
  source 1..9: note = Seed: VVGARGVGK (KRAS G12R)
YVGARIVGM

SEQ ID NO: 47188 - protein, 9 aa, synthetic construct
  source 1..9: note = Seed: VVGARGVGK (KRAS G12R)
YVGARIVGN

SEQ ID NO: 47189 - protein, 9 aa, synthetic construct
  source 1..9: note = Seed: VVGARGVGK (KRAS G12R)
YVGARIVGP

SEQ ID NO: 47190 - protein, 9 aa, synthetic construct
  source 1..9: note = Seed: VVGARGVGK (KRAS G12R)
YVGARIVGQ

SEQ ID NO: 47191 - protein, 9 aa, synthetic construct
  source 1..9: note = Seed: VVGARGVGK (KRAS G12R)
YVGARIVGR

SEQ ID NO: 47192 - protein, 9 aa, synthetic construct
  source 1..9: note = Seed: VVGARGVGK (KRAS G12R)
YVGARIVGS

SEQ ID NO: 47193 - protein, 9 aa, synthetic construct
  source 1..9: note = Seed: VVGARGVGK (KRAS G12R)
YVGARIVGT

SEQ ID NO: 47194 - protein, 9 aa, synthetic construct
  source 1..9: note = Seed: VVGARGVGK (KRAS G12R)
YVGARIVGV

SEQ ID NO: 47195 - protein, 9 aa, synthetic construct
  source 1..9: note = Seed: VVGARGVGK (KRAS G12R)
YVGARIVGW

SEQ ID NO: 47196 - protein, 9 aa, synthetic construct
  source 1..9: note = Seed: VVGARGVGK (KRAS G12R)
YVGARIVGY

SEQ ID NO: 47197 - protein, 9 aa, synthetic construct
  source 1..9: note = Seed: VVGARGVGK (KRAS G12R)
YVGARKVGA

SEQ ID NO: 47198 - protein, 9 aa, synthetic construct
  source 1..9: note = Seed: VVGARGVGK (KRAS G12R)
YVGARKVGC

SEQ ID NO: 47199 - protein, 9 aa, synthetic construct
  source 1..9: note = Seed: VVGARGVGK (KRAS G12R)
YVGARKVGE

SEQ ID NO: 47200 - protein, 9 aa, synthetic construct
  source 1..9: note = Seed: VVGARGVGK (KRAS G12R)
YVGARKVGF

SEQ ID NO: 47201 - protein, 9 aa, synthetic construct
  source 1..9: note = Seed: VVGARGVGK (KRAS G12R)
YVGARKVGG

SEQ ID NO: 47202 - protein, 9 aa, synthetic construct
  source 1..9: note = Seed: VVGARGVGK (KRAS G12R)
YVGARKVGH

SEQ ID NO: 47203 - protein, 9 aa, synthetic construct
  source 1..9: note = Seed: VVGARGVGK (KRAS G12R)
YVGARKVGI

SEQ ID NO: 47204 - protein, 9 aa, synthetic construct
  source 1..9: note = Seed: VVGARGVGK (KRAS G12R)
YVGARKVGL

SEQ ID NO: 47205 - protein, 9 aa, synthetic construct
  source 1..9: note = Seed: VVGARGVGK (KRAS G12R)
YVGARKVGM

SEQ ID NO: 47206 - protein, 9 aa, synthetic construct
  source 1..9: note = Seed: VVGARGVGK (KRAS G12R)
YVGARKVGN

SEQ ID NO: 47207 - protein, 9 aa, synthetic construct
  source 1..9: note = Seed: VVGARGVGK (KRAS G12R)
YVGARKVGP

SEQ ID NO: 47208 - protein, 9 aa, synthetic construct
  source 1..9: note = Seed: VVGARGVGK (KRAS G12R)
YVGARKVGQ

SEQ ID NO: 47209 - protein, 9 aa, synthetic construct
  source 1..9: note = Seed: VVGARGVGK (KRAS G12R)
YVGARKVGR

SEQ ID NO: 47210 - protein, 9 aa, synthetic construct
  source 1..9: note = Seed: VVGARGVGK (KRAS G12R)
YVGARKVGS

SEQ ID NO: 47211 - protein, 9 aa, synthetic construct
  source 1..9: note = Seed: VVGARGVGK (KRAS G12R)
YVGARKVGT

SEQ ID NO: 47212 - protein, 9 aa, synthetic construct
  source 1..9: note = Seed: VVGARGVGK (KRAS G12R)
YVGARKVGV

SEQ ID NO: 47213 - protein, 9 aa, synthetic construct
  source 1..9: note = Seed: VVGARGVGK (KRAS G12R)
YVGARKVGW

SEQ ID NO: 47214 - protein, 9 aa, synthetic construct
  source 1..9: note = Seed: VVGARGVGK (KRAS G12R)
YVGARKVGY

SEQ ID NO: 47215 - protein, 9 aa, synthetic construct
  source 1..9: note = Seed: VVGARGVGK (KRAS G12R)
YVGARLVGA

SEQ ID NO: 47216 - protein, 9 aa, synthetic construct
  source 1..9: note = Seed: VVGARGVGK (KRAS G12R)
YVGARLVGC

SEQ ID NO: 47217 - protein, 9 aa, synthetic construct
  source 1..9: note = Seed: VVGARGVGK (KRAS G12R)
YVGARLVGD

SEQ ID NO: 47218 - protein, 9 aa, synthetic construct
  source 1..9: note = Seed: VVGARGVGK (KRAS G12R)
YVGARLVGG

SEQ ID NO: 47219 - protein, 9 aa, synthetic construct
  source 1..9: note = Seed: VVGARGVGK (KRAS G12R)
YVGARLVGH

SEQ ID NO: 47220 - protein, 9 aa, synthetic construct
  source 1..9: note = Seed: VVGARGVGK (KRAS G12R)
YVGARLVGI

SEQ ID NO: 47221 - protein, 9 aa, synthetic construct
  source 1..9: note = Seed: VVGARGVGK (KRAS G12R)
YVGARLVGL

SEQ ID NO: 47222 - protein, 9 aa, synthetic construct
  source 1..9: note = Seed: VVGARGVGK (KRAS G12R)
YVGARLVGM

SEQ ID NO: 47223 - protein, 9 aa, synthetic construct
  source 1..9: note = Seed: VVGARGVGK (KRAS G12R)
YVGARLVGN

SEQ ID NO: 47224 - protein, 9 aa, synthetic construct
  source 1..9: note = Seed: VVGARGVGK (KRAS G12R)
YVGARLVGS

SEQ ID NO: 47225 - protein, 9 aa, synthetic construct
  source 1..9: note = Seed: VVGARGVGK (KRAS G12R)
YVGARLVGT

SEQ ID NO: 47226 - protein, 9 aa, synthetic construct
  source 1..9: note = Seed: VVGARGVGK (KRAS G12R)
YVGARLVGV

SEQ ID NO: 47227 - protein, 9 aa, synthetic construct
  source 1..9: note = Seed: VVGARGVGK (KRAS G12R)
YVGARMVGA

SEQ ID NO: 47228 - protein, 9 aa, synthetic construct
  source 1..9: note = Seed: VVGARGVGK (KRAS G12R)
YVGARMVGC

SEQ ID NO: 47229 - protein, 9 aa, synthetic construct
  source 1..9: note = Seed: VVGARGVGK (KRAS G12R)
YVGARMVGD

SEQ ID NO: 47230 - protein, 9 aa, synthetic construct
  source 1..9: note = Seed: VVGARGVGK (KRAS G12R)
YVGARMVGG

SEQ ID NO: 47231 - protein, 9 aa, synthetic construct
  source 1..9: note = Seed: VVGARGVGK (KRAS G12R)
YVGARMVGH

SEQ ID NO: 47232 - protein, 9 aa, synthetic construct
  source 1..9: note = Seed: VVGARGVGK (KRAS G12R)
YVGARMVGI

SEQ ID NO: 47233 - protein, 9 aa, synthetic construct
  source 1..9: note = Seed: VVGARGVGK (KRAS G12R)
YVGARMVGL

SEQ ID NO: 47234 - protein, 9 aa, synthetic construct
  source 1..9: note = Seed: VVGARGVGK (KRAS G12R)
YVGARMVGM

SEQ ID NO: 47235 - protein, 9 aa, synthetic construct
  source 1..9: note = Seed: VVGARGVGK (KRAS G12R)
YVGARMVGN

SEQ ID NO: 47236 - protein, 9 aa, synthetic construct
  source 1..9: note = Seed: VVGARGVGK (KRAS G12R)
YVGARMVGP

SEQ ID NO: 47237 - protein, 9 aa, synthetic construct
  source 1..9: note = Seed: VVGARGVGK (KRAS G12R)
YVGARMVGQ

SEQ ID NO: 47238 - protein, 9 aa, synthetic construct
  source 1..9: note = Seed: VVGARGVGK (KRAS G12R)
YVGARMVGS

SEQ ID NO: 47239 - protein, 9 aa, synthetic construct
  source 1..9: note = Seed: VVGARGVGK (KRAS G12R)
YVGARMVGT

SEQ ID NO: 47240 - protein, 9 aa, synthetic construct
  source 1..9: note = Seed: VVGARGVGK (KRAS G12R)
YVGARMVGV

SEQ ID NO: 47241 - protein, 9 aa, synthetic construct
  source 1..9: note = Seed: VVGARGVGK (KRAS G12R)
YVGARNVGA

SEQ ID NO: 47242 - protein, 9 aa, synthetic construct
  source 1..9: note = Seed: VVGARGVGK (KRAS G12R)
YVGARNVGC

SEQ ID NO: 47243 - protein, 9 aa, synthetic construct
  source 1..9: note = Seed: VVGARGVGK (KRAS G12R)
YVGARNVGF

SEQ ID NO: 47244 - protein, 9 aa, synthetic construct
  source 1..9: note = Seed: VVGARGVGK (KRAS G12R)
YVGARNVGG

SEQ ID NO: 47245 - protein, 9 aa, synthetic construct
  source 1..9: note = Seed: VVGARGVGK (KRAS G12R)
YVGARNVGH

SEQ ID NO: 47246 - protein, 9 aa, synthetic construct
  source 1..9: note = Seed: VVGARGVGK (KRAS G12R)
YVGARNVGI

SEQ ID NO: 47247 - protein, 9 aa, synthetic construct
  source 1..9: note = Seed: VVGARGVGK (KRAS G12R)
YVGARNVGK

SEQ ID NO: 47248 - protein, 9 aa, synthetic construct
  source 1..9: note = Seed: VVGARGVGK (KRAS G12R)
YVGARNVGL

SEQ ID NO: 47249 - protein, 9 aa, synthetic construct
  source 1..9: note = Seed: VVGARGVGK (KRAS G12R)
YVGARNVGM

SEQ ID NO: 47250 - protein, 9 aa, synthetic construct
  source 1..9: note = Seed: VVGARGVGK (KRAS G12R)
YVGARNVGN

SEQ ID NO: 47251 - protein, 9 aa, synthetic construct
  source 1..9: note = Seed: VVGARGVGK (KRAS G12R)
YVGARNVGP

SEQ ID NO: 47252 - protein, 9 aa, synthetic construct
  source 1..9: note = Seed: VVGARGVGK (KRAS G12R)
YVGARNVGQ

SEQ ID NO: 47253 - protein, 9 aa, synthetic construct
  source 1..9: note = Seed: VVGARGVGK (KRAS G12R)
YVGARNVGR

SEQ ID NO: 47254 - protein, 9 aa, synthetic construct
  source 1..9: note = Seed: VVGARGVGK (KRAS G12R)
YVGARNVGS

SEQ ID NO: 47255 - protein, 9 aa, synthetic construct
  source 1..9: note = Seed: VVGARGVGK (KRAS G12R)
YVGARNVGT

SEQ ID NO: 47256 - protein, 9 aa, synthetic construct
  source 1..9: note = Seed: VVGARGVGK (KRAS G12R)
YVGARNVGV

SEQ ID NO: 47257 - protein, 9 aa, synthetic construct
  source 1..9: note = Seed: VVGARGVGK (KRAS G12R)
YVGARNVGW

SEQ ID NO: 47258 - protein, 9 aa, synthetic construct
  source 1..9: note = Seed: VVGARGVGK (KRAS G12R)
YVGARNVGY

SEQ ID NO: 47259 - protein, 9 aa, synthetic construct
  source 1..9: note = Seed: VVGARGVGK (KRAS G12R)
YVGARPVGA

SEQ ID NO: 47260 - protein, 9 aa, synthetic construct
  source 1..9: note = Seed: VVGARGVGK (KRAS G12R)
YVGARPVGC

SEQ ID NO: 47261 - protein, 9 aa, synthetic construct
  source 1..9: note = Seed: VVGARGVGK (KRAS G12R)
YVGARPVGD

SEQ ID NO: 47262 - protein, 9 aa, synthetic construct
  source 1..9: note = Seed: VVGARGVGK (KRAS G12R)
YVGARPVGE

SEQ ID NO: 47263 - protein, 9 aa, synthetic construct
  source 1..9: note = Seed: VVGARGVGK (KRAS G12R)
YVGARPVGF

SEQ ID NO: 47264 - protein, 9 aa, synthetic construct
  source 1..9: note = Seed: VVGARGVGK (KRAS G12R)
YVGARPVGG

SEQ ID NO: 47265 - protein, 9 aa, synthetic construct
  source 1..9: note = Seed: VVGARGVGK (KRAS G12R)
YVGARPVGH

SEQ ID NO: 47266 - protein, 9 aa, synthetic construct
  source 1..9: note = Seed: VVGARGVGK (KRAS G12R)
YVGARPVGI

SEQ ID NO: 47267 - protein, 9 aa, synthetic construct
  source 1..9: note = Seed: VVGARGVGK (KRAS G12R)
YVGARPVGK

SEQ ID NO: 47268 - protein, 9 aa, synthetic construct
  source 1..9: note = Seed: VVGARGVGK (KRAS G12R)
YVGARPVGL

SEQ ID NO: 47269 - protein, 9 aa, synthetic construct
  source 1..9: note = Seed: VVGARGVGK (KRAS G12R)
YVGARPVGM

SEQ ID NO: 47270 - protein, 9 aa, synthetic construct
  source 1..9: note = Seed: VVGARGVGK (KRAS G12R)
YVGARPVGN

SEQ ID NO: 47271 - protein, 9 aa, synthetic construct
  source 1..9: note = Seed: VVGARGVGK (KRAS G12R)
YVGARPVGP

SEQ ID NO: 47272 - protein, 9 aa, synthetic construct
  source 1..9: note = Seed: VVGARGVGK (KRAS G12R)
YVGARPVGQ

SEQ ID NO: 47273 - protein, 9 aa, synthetic construct
  source 1..9: note = Seed: VVGARGVGK (KRAS G12R)
YVGARPVGR

SEQ ID NO: 47274 - protein, 9 aa, synthetic construct
  source 1..9: note = Seed: VVGARGVGK (KRAS G12R)
YVGARPVGS

SEQ ID NO: 47275 - protein, 9 aa, synthetic construct
  source 1..9: note = Seed: VVGARGVGK (KRAS G12R)
YVGARPVGT

SEQ ID NO: 47276 - protein, 9 aa, synthetic construct
  source 1..9: note = Seed: VVGARGVGK (KRAS G12R)
YVGARPVGV

SEQ ID NO: 47277 - protein, 9 aa, synthetic construct
  source 1..9: note = Seed: VVGARGVGK (KRAS G12R)
YVGARPVGW

SEQ ID NO: 47278 - protein, 9 aa, synthetic construct
  source 1..9: note = Seed: VVGARGVGK (KRAS G12R)
YVGARPVGY

SEQ ID NO: 47279 - protein, 9 aa, synthetic construct
  source 1..9: note = Seed: VVGARGVGK (KRAS G12R)
YVGARQVGA

SEQ ID NO: 47280 - protein, 9 aa, synthetic construct
  source 1..9: note = Seed: VVGARGVGK (KRAS G12R)
YVGARQVGF

SEQ ID NO: 47281 - protein, 9 aa, synthetic construct
  source 1..9: note = Seed: VVGARGVGK (KRAS G12R)
YVGARQVGG

SEQ ID NO: 47282 - protein, 9 aa, synthetic construct
  source 1..9: note = Seed: VVGARGVGK (KRAS G12R)
YVGARQVGH

SEQ ID NO: 47283 - protein, 9 aa, synthetic construct
  source 1..9: note = Seed: VVGARGVGK (KRAS G12R)
YVGARQVGI

SEQ ID NO: 47284 - protein, 9 aa, synthetic construct
  source 1..9: note = Seed: VVGARGVGK (KRAS G12R)
YVGARQVGK

SEQ ID NO: 47285 - protein, 9 aa, synthetic construct
  source 1..9: note = Seed: VVGARGVGK (KRAS G12R)
YVGARQVGL

SEQ ID NO: 47286 - protein, 9 aa, synthetic construct
  source 1..9: note = Seed: VVGARGVGK (KRAS G12R)
YVGARQVGM

SEQ ID NO: 47287 - protein, 9 aa, synthetic construct
  source 1..9: note = Seed: VVGARGVGK (KRAS G12R)
YVGARQVGN

SEQ ID NO: 47288 - protein, 9 aa, synthetic construct
  source 1..9: note = Seed: VVGARGVGK (KRAS G12R)
YVGARQVGQ

SEQ ID NO: 47289 - protein, 9 aa, synthetic construct
  source 1..9: note = Seed: VVGARGVGK (KRAS G12R)
YVGARQVGR

SEQ ID NO: 47290 - protein, 9 aa, synthetic construct
  source 1..9: note = Seed: VVGARGVGK (KRAS G12R)
YVGARQVGS

SEQ ID NO: 47291 - protein, 9 aa, synthetic construct
  source 1..9: note = Seed: VVGARGVGK (KRAS G12R)
YVGARQVGT

SEQ ID NO: 47292 - protein, 9 aa, synthetic construct
  source 1..9: note = Seed: VVGARGVGK (KRAS G12R)
YVGARQVGV

SEQ ID NO: 47293 - protein, 9 aa, synthetic construct
  source 1..9: note = Seed: VVGARGVGK (KRAS G12R)
YVGARQVGW

SEQ ID NO: 47294 - protein, 9 aa, synthetic construct
  source 1..9: note = Seed: VVGARGVGK (KRAS G12R)
YVGARQVGY

SEQ ID NO: 47295 - protein, 9 aa, synthetic construct
  source 1..9: note = Seed: VVGARGVGK (KRAS G12R)
YVGARRVGA

SEQ ID NO: 47296 - protein, 9 aa, synthetic construct
  source 1..9: note = Seed: VVGARGVGK (KRAS G12R)
YVGARRVGC

SEQ ID NO: 47297 - protein, 9 aa, synthetic construct
  source 1..9: note = Seed: VVGARGVGK (KRAS G12R)
YVGARRVGD

SEQ ID NO: 47298 - protein, 9 aa, synthetic construct
  source 1..9: note = Seed: VVGARGVGK (KRAS G12R)
YVGARRVGE

SEQ ID NO: 47299 - protein, 9 aa, synthetic construct
  source 1..9: note = Seed: VVGARGVGK (KRAS G12R)
YVGARRVGF

SEQ ID NO: 47300 - protein, 9 aa, synthetic construct
  source 1..9: note = Seed: VVGARGVGK (KRAS G12R)
YVGARRVGG

SEQ ID NO: 47301 - protein, 9 aa, synthetic construct
  source 1..9: note = Seed: VVGARGVGK (KRAS G12R)
YVGARRVGH

SEQ ID NO: 47302 - protein, 9 aa, synthetic construct
  source 1..9: note = Seed: VVGARGVGK (KRAS G12R)
YVGARRVGI

SEQ ID NO: 47303 - protein, 9 aa, synthetic construct
  source 1..9: note = Seed: VVGARGVGK (KRAS G12R)
YVGARRVGK

SEQ ID NO: 47304 - protein, 9 aa, synthetic construct
  source 1..9: note = Seed: VVGARGVGK (KRAS G12R)
YVGARRVGL

SEQ ID NO: 47305 - protein, 9 aa, synthetic construct
  source 1..9: note = Seed: VVGARGVGK (KRAS G12R)
YVGARRVGM

SEQ ID NO: 47306 - protein, 9 aa, synthetic construct
  source 1..9: note = Seed: VVGARGVGK (KRAS G12R)
YVGARRVGN

SEQ ID NO: 47307 - protein, 9 aa, synthetic construct
  source 1..9: note = Seed: VVGARGVGK (KRAS G12R)
YVGARRVGP

SEQ ID NO: 47308 - protein, 9 aa, synthetic construct
  source 1..9: note = Seed: VVGARGVGK (KRAS G12R)
YVGARRVGQ

SEQ ID NO: 47309 - protein, 9 aa, synthetic construct
  source 1..9: note = Seed: VVGARGVGK (KRAS G12R)
YVGARRVGR

SEQ ID NO: 47310 - protein, 9 aa, synthetic construct
  source 1..9: note = Seed: VVGARGVGK (KRAS G12R)
YVGARRVGS

SEQ ID NO: 47311 - protein, 9 aa, synthetic construct
  source 1..9: note = Seed: VVGARGVGK (KRAS G12R)
YVGARRVGT

SEQ ID NO: 47312 - protein, 9 aa, synthetic construct
  source 1..9: note = Seed: VVGARGVGK (KRAS G12R)
YVGARRVGV

SEQ ID NO: 47313 - protein, 9 aa, synthetic construct
  source 1..9: note = Seed: VVGARGVGK (KRAS G12R)
YVGARRVGW

SEQ ID NO: 47314 - protein, 9 aa, synthetic construct
  source 1..9: note = Seed: VVGARGVGK (KRAS G12R)
YVGARRVGY

SEQ ID NO: 47315 - protein, 9 aa, synthetic construct
  source 1..9: note = Seed: VVGARGVGK (KRAS G12R)
YVGARSVGA

SEQ ID NO: 47316 - protein, 9 aa, synthetic construct
  source 1..9: note = Seed: VVGARGVGK (KRAS G12R)
YVGARSVGC

SEQ ID NO: 47317 - protein, 9 aa, synthetic construct
  source 1..9: note = Seed: VVGARGVGK (KRAS G12R)
YVGARSVGD

SEQ ID NO: 47318 - protein, 9 aa, synthetic construct
  source 1..9: note = Seed: VVGARGVGK (KRAS G12R)
YVGARSVGE

SEQ ID NO: 47319 - protein, 9 aa, synthetic construct
  source 1..9: note = Seed: VVGARGVGK (KRAS G12R)
YVGARSVGF

SEQ ID NO: 47320 - protein, 9 aa, synthetic construct
  source 1..9: note = Seed: VVGARGVGK (KRAS G12R)
YVGARSVGG

SEQ ID NO: 47321 - protein, 9 aa, synthetic construct
  source 1..9: note = Seed: VVGARGVGK (KRAS G12R)
YVGARSVGH

SEQ ID NO: 47322 - protein, 9 aa, synthetic construct
  source 1..9: note = Seed: VVGARGVGK (KRAS G12R)
YVGARSVGI

SEQ ID NO: 47323 - protein, 9 aa, synthetic construct
  source 1..9: note = Seed: VVGARGVGK (KRAS G12R)
YVGARSVGK

SEQ ID NO: 47324 - protein, 9 aa, synthetic construct
  source 1..9: note = Seed: VVGARGVGK (KRAS G12R)
YVGARSVGL

SEQ ID NO: 47325 - protein, 9 aa, synthetic construct
  source 1..9: note = Seed: VVGARGVGK (KRAS G12R)
YVGARSVGM

SEQ ID NO: 47326 - protein, 9 aa, synthetic construct
  source 1..9: note = Seed: VVGARGVGK (KRAS G12R)
YVGARSVGN

SEQ ID NO: 47327 - protein, 9 aa, synthetic construct
  source 1..9: note = Seed: VVGARGVGK (KRAS G12R)
YVGARSVGP

SEQ ID NO: 47328 - protein, 9 aa, synthetic construct
  source 1..9: note = Seed: VVGARGVGK (KRAS G12R)
YVGARSVGQ

SEQ ID NO: 47329 - protein, 9 aa, synthetic construct
  source 1..9: note = Seed: VVGARGVGK (KRAS G12R)
YVGARSVGR

SEQ ID NO: 47330 - protein, 9 aa, synthetic construct
  source 1..9: note = Seed: VVGARGVGK (KRAS G12R)
YVGARSVGS

SEQ ID NO: 47331 - protein, 9 aa, synthetic construct
  source 1..9: note = Seed: VVGARGVGK (KRAS G12R)
YVGARSVGT

SEQ ID NO: 47332 - protein, 9 aa, synthetic construct
  source 1..9: note = Seed: VVGARGVGK (KRAS G12R)
YVGARSVGV

SEQ ID NO: 47333 - protein, 9 aa, synthetic construct
  source 1..9: note = Seed: VVGARGVGK (KRAS G12R)
YVGARSVGW

SEQ ID NO: 47334 - protein, 9 aa, synthetic construct
  source 1..9: note = Seed: VVGARGVGK (KRAS G12R)
YVGARSVGY

SEQ ID NO: 47335 - protein, 9 aa, synthetic construct
  source 1..9: note = Seed: VVGARGVGK (KRAS G12R)
YVGARTVGA

SEQ ID NO: 47336 - protein, 9 aa, synthetic construct
  source 1..9: note = Seed: VVGARGVGK (KRAS G12R)
YVGARTVGC

SEQ ID NO: 47337 - protein, 9 aa, synthetic construct
  source 1..9: note = Seed: VVGARGVGK (KRAS G12R)
YVGARTVGD

SEQ ID NO: 47338 - protein, 9 aa, synthetic construct
  source 1..9: note = Seed: VVGARGVGK (KRAS G12R)
YVGARTVGE

SEQ ID NO: 47339 - protein, 9 aa, synthetic construct
  source 1..9: note = Seed: VVGARGVGK (KRAS G12R)
YVGARTVGF

SEQ ID NO: 47340 - protein, 9 aa, synthetic construct
  source 1..9: note = Seed: VVGARGVGK (KRAS G12R)
YVGARTVGG

SEQ ID NO: 47341 - protein, 9 aa, synthetic construct
  source 1..9: note = Seed: VVGARGVGK (KRAS G12R)
YVGARTVGH

SEQ ID NO: 47342 - protein, 9 aa, synthetic construct
  source 1..9: note = Seed: VVGARGVGK (KRAS G12R)
YVGARTVGI

SEQ ID NO: 47343 - protein, 9 aa, synthetic construct
  source 1..9: note = Seed: VVGARGVGK (KRAS G12R)
YVGARTVGK

SEQ ID NO: 47344 - protein, 9 aa, synthetic construct
  source 1..9: note = Seed: VVGARGVGK (KRAS G12R)
YVGARTVGL

SEQ ID NO: 47345 - protein, 9 aa, synthetic construct
  source 1..9: note = Seed: VVGARGVGK (KRAS G12R)
YVGARTVGM

SEQ ID NO: 47346 - protein, 9 aa, synthetic construct
  source 1..9: note = Seed: VVGARGVGK (KRAS G12R)
YVGARTVGN

SEQ ID NO: 47347 - protein, 9 aa, synthetic construct
  source 1..9: note = Seed: VVGARGVGK (KRAS G12R)
YVGARTVGP

SEQ ID NO: 47348 - protein, 9 aa, synthetic construct
  source 1..9: note = Seed: VVGARGVGK (KRAS G12R)
YVGARTVGQ

SEQ ID NO: 47349 - protein, 9 aa, synthetic construct
  source 1..9: note = Seed: VVGARGVGK (KRAS G12R)
YVGARTVGR

SEQ ID NO: 47350 - protein, 9 aa, synthetic construct
  source 1..9: note = Seed: VVGARGVGK (KRAS G12R)
YVGARTVGS

SEQ ID NO: 47351 - protein, 9 aa, synthetic construct
  source 1..9: note = Seed: VVGARGVGK (KRAS G12R)
YVGARTVGT

SEQ ID NO: 47352 - protein, 9 aa, synthetic construct
  source 1..9: note = Seed: VVGARGVGK (KRAS G12R)
YVGARTVGV

SEQ ID NO: 47353 - protein, 9 aa, synthetic construct
  source 1..9: note = Seed: VVGARGVGK (KRAS G12R)
YVGARTVGW

SEQ ID NO: 47354 - protein, 9 aa, synthetic construct
  source 1..9: note = Seed: VVGARGVGK (KRAS G12R)
YVGARTVGY

SEQ ID NO: 47355 - protein, 9 aa, synthetic construct
  source 1..9: note = Seed: VVGARGVGK (KRAS G12R)
YVGARVVGA

SEQ ID NO: 47356 - protein, 9 aa, synthetic construct
  source 1..9: note = Seed: VVGARGVGK (KRAS G12R)
YVGARVVGC

SEQ ID NO: 47357 - protein, 9 aa, synthetic construct
  source 1..9: note = Seed: VVGARGVGK (KRAS G12R)
YVGARVVGD

SEQ ID NO: 47358 - protein, 9 aa, synthetic construct
  source 1..9: note = Seed: VVGARGVGK (KRAS G12R)
YVGARVVGE

SEQ ID NO: 47359 - protein, 9 aa, synthetic construct
  source 1..9: note = Seed: VVGARGVGK (KRAS G12R)
YVGARVVGF

SEQ ID NO: 47360 - protein, 9 aa, synthetic construct
  source 1..9: note = Seed: VVGARGVGK (KRAS G12R)
YVGARVVGG

SEQ ID NO: 47361 - protein, 9 aa, synthetic construct
  source 1..9: note = Seed: VVGARGVGK (KRAS G12R)
YVGARVVGH

SEQ ID NO: 47362 - protein, 9 aa, synthetic construct
  source 1..9: note = Seed: VVGARGVGK (KRAS G12R)
YVGARVVGI

SEQ ID NO: 47363 - protein, 9 aa, synthetic construct
  source 1..9: note = Seed: VVGARGVGK (KRAS G12R)
YVGARVVGK

SEQ ID NO: 47364 - protein, 9 aa, synthetic construct
  source 1..9: note = Seed: VVGARGVGK (KRAS G12R)
YVGARVVGL

SEQ ID NO: 47365 - protein, 9 aa, synthetic construct
  source 1..9: note = Seed: VVGARGVGK (KRAS G12R)
YVGARVVGM

SEQ ID NO: 47366 - protein, 9 aa, synthetic construct
  source 1..9: note = Seed: VVGARGVGK (KRAS G12R)
YVGARVVGN

SEQ ID NO: 47367 - protein, 9 aa, synthetic construct
  source 1..9: note = Seed: VVGARGVGK (KRAS G12R)
YVGARVVGP

SEQ ID NO: 47368 - protein, 9 aa, synthetic construct
  source 1..9: note = Seed: VVGARGVGK (KRAS G12R)
YVGARVVGQ

SEQ ID NO: 47369 - protein, 9 aa, synthetic construct
  source 1..9: note = Seed: VVGARGVGK (KRAS G12R)
YVGARVVGR

SEQ ID NO: 47370 - protein, 9 aa, synthetic construct
  source 1..9: note = Seed: VVGARGVGK (KRAS G12R)
YVGARVVGS

SEQ ID NO: 47371 - protein, 9 aa, synthetic construct
  source 1..9: note = Seed: VVGARGVGK (KRAS G12R)
YVGARVVGT

SEQ ID NO: 47372 - protein, 9 aa, synthetic construct
  source 1..9: note = Seed: VVGARGVGK (KRAS G12R)
YVGARVVGV

SEQ ID NO: 47373 - protein, 9 aa, synthetic construct
  source 1..9: note = Seed: VVGARGVGK (KRAS G12R)
YVGARVVGW

SEQ ID NO: 47374 - protein, 9 aa, synthetic construct
  source 1..9: note = Seed: VVGARGVGK (KRAS G12R)
YVGARVVGY

SEQ ID NO: 47375 - protein, 9 aa, synthetic construct
  source 1..9: note = Seed: VVGARGVGK (KRAS G12R)
YVGARWVGA

SEQ ID NO: 47376 - protein, 9 aa, synthetic construct
  source 1..9: note = Seed: VVGARGVGK (KRAS G12R)
YVGARWVGI

SEQ ID NO: 47377 - protein, 9 aa, synthetic construct
  source 1..9: note = Seed: VVGARGVGK (KRAS G12R)
YVGARWVGL

SEQ ID NO: 47378 - protein, 9 aa, synthetic construct
  source 1..9: note = Seed: VVGARGVGK (KRAS G12R)
YVGARWVGM

SEQ ID NO: 47379 - protein, 9 aa, synthetic construct
  source 1..9: note = Seed: VVGARGVGK (KRAS G12R)
YVGARWVGS

SEQ ID NO: 47380 - protein, 9 aa, synthetic construct
  source 1..9: note = Seed: VVGARGVGK (KRAS G12R)
YVGARWVGV

SEQ ID NO: 47381 - protein, 9 aa, synthetic construct
  source 1..9: note = Seed: VVGARGVGK (KRAS G12R)
YVGARYVGA

SEQ ID NO: 47382 - protein, 9 aa, synthetic construct
  source 1..9: note = Seed: VVGARGVGK (KRAS G12R)
YVGARYVGF

SEQ ID NO: 47383 - protein, 9 aa, synthetic construct
  source 1..9: note = Seed: VVGARGVGK (KRAS G12R)
YVGARYVGG

SEQ ID NO: 47384 - protein, 9 aa, synthetic construct
  source 1..9: note = Seed: VVGARGVGK (KRAS G12R)
YVGARYVGH

SEQ ID NO: 47385 - protein, 9 aa, synthetic construct
  source 1..9: note = Seed: VVGARGVGK (KRAS G12R)
YVGARYVGI

SEQ ID NO: 47386 - protein, 9 aa, synthetic construct
  source 1..9: note = Seed: VVGARGVGK (KRAS G12R)
YVGARYVGL

SEQ ID NO: 47387 - protein, 9 aa, synthetic construct
  source 1..9: note = Seed: VVGARGVGK (KRAS G12R)
YVGARYVGM

SEQ ID NO: 47388 - protein, 9 aa, synthetic construct
  source 1..9: note = Seed: VVGARGVGK (KRAS G12R)
YVGARYVGN

SEQ ID NO: 47389 - protein, 9 aa, synthetic construct
  source 1..9: note = Seed: VVGARGVGK (KRAS G12R)
YVGARYVGQ

SEQ ID NO: 47390 - protein, 9 aa, synthetic construct
  source 1..9: note = Seed: VVGARGVGK (KRAS G12R)
YVGARYVGS

SEQ ID NO: 47391 - protein, 9 aa, synthetic construct
  source 1..9: note = Seed: VVGARGVGK (KRAS G12R)
YVGARYVGT

SEQ ID NO: 47392 - protein, 9 aa, synthetic construct
  source 1..9: note = Seed: VVGARGVGK (KRAS G12R)
YVGARYVGV

SEQ ID NO: 47393 - protein, 9 aa, synthetic construct
  source 1..9: note = Seed: VVGARGVGK (KRAS G12R)
YVGARYVGW

SEQ ID NO: 47394 - protein, 9 aa, synthetic construct
  source 1..9: note = Seed: VVGARGVGK (KRAS G12R)
YVGARYVGY

SEQ ID NO: 47395 - protein, 9 aa, synthetic construct
  source 1..9: note = Seed: VVGARGVGK (KRAS G12R)
YVGCRAVGA

SEQ ID NO: 47396 - protein, 9 aa, synthetic construct
  source 1..9: note = Seed: VVGARGVGK (KRAS G12R)
YVGCRAVGF

SEQ ID NO: 47397 - protein, 9 aa, synthetic construct
  source 1..9: note = Seed: VVGARGVGK (KRAS G12R)
YVGCRAVGG

SEQ ID NO: 47398 - protein, 9 aa, synthetic construct
  source 1..9: note = Seed: VVGARGVGK (KRAS G12R)
YVGCRAVGI

SEQ ID NO: 47399 - protein, 9 aa, synthetic construct
  source 1..9: note = Seed: VVGARGVGK (KRAS G12R)
YVGCRAVGL

SEQ ID NO: 47400 - protein, 9 aa, synthetic construct
  source 1..9: note = Seed: VVGARGVGK (KRAS G12R)
YVGCRAVGM

SEQ ID NO: 47401 - protein, 9 aa, synthetic construct
  source 1..9: note = Seed: VVGARGVGK (KRAS G12R)
YVGCRAVGN

SEQ ID NO: 47402 - protein, 9 aa, synthetic construct
  source 1..9: note = Seed: VVGARGVGK (KRAS G12R)
YVGCRAVGS

SEQ ID NO: 47403 - protein, 9 aa, synthetic construct
  source 1..9: note = Seed: VVGARGVGK (KRAS G12R)
YVGCRAVGT

SEQ ID NO: 47404 - protein, 9 aa, synthetic construct
  source 1..9: note = Seed: VVGARGVGK (KRAS G12R)
YVGCRAVGV

SEQ ID NO: 47405 - protein, 9 aa, synthetic construct
  source 1..9: note = Seed: VVGARGVGK (KRAS G12R)
YVGCRAVGY

SEQ ID NO: 47406 - protein, 9 aa, synthetic construct
  source 1..9: note = Seed: VVGARGVGK (KRAS G12R)
YVGCRGVGA

SEQ ID NO: 47407 - protein, 9 aa, synthetic construct
  source 1..9: note = Seed: VVGARGVGK (KRAS G12R)
YVGCRGVGI

SEQ ID NO: 47408 - protein, 9 aa, synthetic construct
  source 1..9: note = Seed: VVGARGVGK (KRAS G12R)
YVGCRGVGL

SEQ ID NO: 47409 - protein, 9 aa, synthetic construct
  source 1..9: note = Seed: VVGARGVGK (KRAS G12R)
YVGCRGVGM

SEQ ID NO: 47410 - protein, 9 aa, synthetic construct
  source 1..9: note = Seed: VVGARGVGK (KRAS G12R)
YVGCRGVGS

SEQ ID NO: 47411 - protein, 9 aa, synthetic construct
  source 1..9: note = Seed: VVGARGVGK (KRAS G12R)
YVGCRGVGT

SEQ ID NO: 47412 - protein, 9 aa, synthetic construct
  source 1..9: note = Seed: VVGARGVGK (KRAS G12R)
YVGCRGVGV

SEQ ID NO: 47413 - protein, 9 aa, synthetic construct
  source 1..9: note = Seed: VVGARGVGK (KRAS G12R)
YVGCRHVGA

SEQ ID NO: 47414 - protein, 9 aa, synthetic construct
  source 1..9: note = Seed: VVGARGVGK (KRAS G12R)
YVGCRIVGA

SEQ ID NO: 47415 - protein, 9 aa, synthetic construct
  source 1..9: note = Seed: VVGARGVGK (KRAS G12R)
YVGCRIVGG

SEQ ID NO: 47416 - protein, 9 aa, synthetic construct
  source 1..9: note = Seed: VVGARGVGK (KRAS G12R)
YVGCRIVGI

SEQ ID NO: 47417 - protein, 9 aa, synthetic construct
  source 1..9: note = Seed: VVGARGVGK (KRAS G12R)
YVGCRIVGL

SEQ ID NO: 47418 - protein, 9 aa, synthetic construct
  source 1..9: note = Seed: VVGARGVGK (KRAS G12R)
YVGCRIVGS

SEQ ID NO: 47419 - protein, 9 aa, synthetic construct
  source 1..9: note = Seed: VVGARGVGK (KRAS G12R)
YVGCRIVGV

SEQ ID NO: 47420 - protein, 9 aa, synthetic construct
  source 1..9: note = Seed: VVGARGVGK (KRAS G12R)
YVGCRKVGA

SEQ ID NO: 47421 - protein, 9 aa, synthetic construct
  source 1..9: note = Seed: VVGARGVGK (KRAS G12R)
YVGCRLVGA

SEQ ID NO: 47422 - protein, 9 aa, synthetic construct
  source 1..9: note = Seed: VVGARGVGK (KRAS G12R)
YVGCRLVGG

SEQ ID NO: 47423 - protein, 9 aa, synthetic construct
  source 1..9: note = Seed: VVGARGVGK (KRAS G12R)
YVGCRLVGN

SEQ ID NO: 47424 - protein, 9 aa, synthetic construct
  source 1..9: note = Seed: VVGARGVGK (KRAS G12R)
YVGCRLVGS

SEQ ID NO: 47425 - protein, 9 aa, synthetic construct
  source 1..9: note = Seed: VVGARGVGK (KRAS G12R)
YVGCRLVGV

SEQ ID NO: 47426 - protein, 9 aa, synthetic construct
  source 1..9: note = Seed: VVGARGVGK (KRAS G12R)
YVGCRMVGA

SEQ ID NO: 47427 - protein, 9 aa, synthetic construct
  source 1..9: note = Seed: VVGARGVGK (KRAS G12R)
YVGCRMVGG

SEQ ID NO: 47428 - protein, 9 aa, synthetic construct
  source 1..9: note = Seed: VVGARGVGK (KRAS G12R)
YVGCRMVGI

SEQ ID NO: 47429 - protein, 9 aa, synthetic construct
  source 1..9: note = Seed: VVGARGVGK (KRAS G12R)
YVGCRMVGL

SEQ ID NO: 47430 - protein, 9 aa, synthetic construct
  source 1..9: note = Seed: VVGARGVGK (KRAS G12R)
YVGCRMVGS

SEQ ID NO: 47431 - protein, 9 aa, synthetic construct
  source 1..9: note = Seed: VVGARGVGK (KRAS G12R)
YVGCRMVGV

SEQ ID NO: 47432 - protein, 9 aa, synthetic construct
  source 1..9: note = Seed: VVGARGVGK (KRAS G12R)
YVGCRNVGA

SEQ ID NO: 47433 - protein, 9 aa, synthetic construct
  source 1..9: note = Seed: VVGARGVGK (KRAS G12R)
YVGCRNVGI

SEQ ID NO: 47434 - protein, 9 aa, synthetic construct
  source 1..9: note = Seed: VVGARGVGK (KRAS G12R)
YVGCRNVGL

SEQ ID NO: 47435 - protein, 9 aa, synthetic construct
  source 1..9: note = Seed: VVGARGVGK (KRAS G12R)
YVGCRNVGV

SEQ ID NO: 47436 - protein, 9 aa, synthetic construct
  source 1..9: note = Seed: VVGARGVGK (KRAS G12R)
YVGCRPVGA

SEQ ID NO: 47437 - protein, 9 aa, synthetic construct
  source 1..9: note = Seed: VVGARGVGK (KRAS G12R)
YVGCRPVGI

SEQ ID NO: 47438 - protein, 9 aa, synthetic construct
  source 1..9: note = Seed: VVGARGVGK (KRAS G12R)
YVGCRPVGL

SEQ ID NO: 47439 - protein, 9 aa, synthetic construct
  source 1..9: note = Seed: VVGARGVGK (KRAS G12R)
YVGCRPVGM

SEQ ID NO: 47440 - protein, 9 aa, synthetic construct
  source 1..9: note = Seed: VVGARGVGK (KRAS G12R)
YVGCRPVGS

SEQ ID NO: 47441 - protein, 9 aa, synthetic construct
  source 1..9: note = Seed: VVGARGVGK (KRAS G12R)
YVGCRPVGT

SEQ ID NO: 47442 - protein, 9 aa, synthetic construct
  source 1..9: note = Seed: VVGARGVGK (KRAS G12R)
YVGCRPVGV

SEQ ID NO: 47443 - protein, 9 aa, synthetic construct
  source 1..9: note = Seed: VVGARGVGK (KRAS G12R)
YVGCRRVGA

SEQ ID NO: 47444 - protein, 9 aa, synthetic construct
  source 1..9: note = Seed: VVGARGVGK (KRAS G12R)
YVGCRSVGA

SEQ ID NO: 47445 - protein, 9 aa, synthetic construct
  source 1..9: note = Seed: VVGARGVGK (KRAS G12R)
YVGCRSVGG

SEQ ID NO: 47446 - protein, 9 aa, synthetic construct
  source 1..9: note = Seed: VVGARGVGK (KRAS G12R)
YVGCRSVGI

SEQ ID NO: 47447 - protein, 9 aa, synthetic construct
  source 1..9: note = Seed: VVGARGVGK (KRAS G12R)
YVGCRSVGL

SEQ ID NO: 47448 - protein, 9 aa, synthetic construct
  source 1..9: note = Seed: VVGARGVGK (KRAS G12R)
YVGCRSVGM

SEQ ID NO: 47449 - protein, 9 aa, synthetic construct
  source 1..9: note = Seed: VVGARGVGK (KRAS G12R)
YVGCRSVGS

SEQ ID NO: 47450 - protein, 9 aa, synthetic construct
  source 1..9: note = Seed: VVGARGVGK (KRAS G12R)
YVGCRSVGT

SEQ ID NO: 47451 - protein, 9 aa, synthetic construct
  source 1..9: note = Seed: VVGARGVGK (KRAS G12R)
YVGCRSVGV

SEQ ID NO: 47452 - protein, 9 aa, synthetic construct
  source 1..9: note = Seed: VVGARGVGK (KRAS G12R)
YVGCRTVGA

SEQ ID NO: 47453 - protein, 9 aa, synthetic construct
  source 1..9: note = Seed: VVGARGVGK (KRAS G12R)
YVGCRTVGI

SEQ ID NO: 47454 - protein, 9 aa, synthetic construct
  source 1..9: note = Seed: VVGARGVGK (KRAS G12R)
YVGCRTVGL

SEQ ID NO: 47455 - protein, 9 aa, synthetic construct
  source 1..9: note = Seed: VVGARGVGK (KRAS G12R)
YVGCRTVGM

SEQ ID NO: 47456 - protein, 9 aa, synthetic construct
  source 1..9: note = Seed: VVGARGVGK (KRAS G12R)
YVGCRTVGS

SEQ ID NO: 47457 - protein, 9 aa, synthetic construct
  source 1..9: note = Seed: VVGARGVGK (KRAS G12R)
YVGCRTVGV

SEQ ID NO: 47458 - protein, 9 aa, synthetic construct
  source 1..9: note = Seed: VVGARGVGK (KRAS G12R)
YVGCRVVGA

SEQ ID NO: 47459 - protein, 9 aa, synthetic construct
  source 1..9: note = Seed: VVGARGVGK (KRAS G12R)
YVGCRVVGG

SEQ ID NO: 47460 - protein, 9 aa, synthetic construct
  source 1..9: note = Seed: VVGARGVGK (KRAS G12R)
YVGCRVVGI

SEQ ID NO: 47461 - protein, 9 aa, synthetic construct
  source 1..9: note = Seed: VVGARGVGK (KRAS G12R)
YVGCRVVGL

SEQ ID NO: 47462 - protein, 9 aa, synthetic construct
  source 1..9: note = Seed: VVGARGVGK (KRAS G12R)
YVGCRVVGM

SEQ ID NO: 47463 - protein, 9 aa, synthetic construct
  source 1..9: note = Seed: VVGARGVGK (KRAS G12R)
YVGCRVVGN

SEQ ID NO: 47464 - protein, 9 aa, synthetic construct
  source 1..9: note = Seed: VVGARGVGK (KRAS G12R)
YVGCRVVGS

SEQ ID NO: 47465 - protein, 9 aa, synthetic construct
  source 1..9: note = Seed: VVGARGVGK (KRAS G12R)
YVGCRVVGT

SEQ ID NO: 47466 - protein, 9 aa, synthetic construct
  source 1..9: note = Seed: VVGARGVGK (KRAS G12R)
YVGCRVVGV

SEQ ID NO: 47467 - protein, 9 aa, synthetic construct
  source 1..9: note = Seed: VVGARGVGK (KRAS G12R)
YVGDRAVGA

SEQ ID NO: 47468 - protein, 9 aa, synthetic construct
  source 1..9: note = Seed: VVGARGVGK (KRAS G12R)
YVGDRAVGI

SEQ ID NO: 47469 - protein, 9 aa, synthetic construct
  source 1..9: note = Seed: VVGARGVGK (KRAS G12R)
YVGDRAVGL

SEQ ID NO: 47470 - protein, 9 aa, synthetic construct
  source 1..9: note = Seed: VVGARGVGK (KRAS G12R)
YVGDRAVGM

SEQ ID NO: 47471 - protein, 9 aa, synthetic construct
  source 1..9: note = Seed: VVGARGVGK (KRAS G12R)
YVGDRAVGS

SEQ ID NO: 47472 - protein, 9 aa, synthetic construct
  source 1..9: note = Seed: VVGARGVGK (KRAS G12R)
YVGDRAVGT

SEQ ID NO: 47473 - protein, 9 aa, synthetic construct
  source 1..9: note = Seed: VVGARGVGK (KRAS G12R)
YVGDRAVGV

SEQ ID NO: 47474 - protein, 9 aa, synthetic construct
  source 1..9: note = Seed: VVGARGVGK (KRAS G12R)
YVGDRGVGA

SEQ ID NO: 47475 - protein, 9 aa, synthetic construct
  source 1..9: note = Seed: VVGARGVGK (KRAS G12R)
YVGDRGVGI

SEQ ID NO: 47476 - protein, 9 aa, synthetic construct
  source 1..9: note = Seed: VVGARGVGK (KRAS G12R)
YVGDRGVGL

SEQ ID NO: 47477 - protein, 9 aa, synthetic construct
  source 1..9: note = Seed: VVGARGVGK (KRAS G12R)
YVGDRGVGV

SEQ ID NO: 47478 - protein, 9 aa, synthetic construct
  source 1..9: note = Seed: VVGARGVGK (KRAS G12R)
YVGDRPVGI

SEQ ID NO: 47479 - protein, 9 aa, synthetic construct
  source 1..9: note = Seed: VVGARGVGK (KRAS G12R)
YVGDRPVGL

SEQ ID NO: 47480 - protein, 9 aa, synthetic construct
  source 1..9: note = Seed: VVGARGVGK (KRAS G12R)
YVGDRPVGV

SEQ ID NO: 47481 - protein, 9 aa, synthetic construct
  source 1..9: note = Seed: VVGARGVGK (KRAS G12R)
YVGDRSVGA

SEQ ID NO: 47482 - protein, 9 aa, synthetic construct
  source 1..9: note = Seed: VVGARGVGK (KRAS G12R)
YVGDRSVGI

SEQ ID NO: 47483 - protein, 9 aa, synthetic construct
  source 1..9: note = Seed: VVGARGVGK (KRAS G12R)
YVGDRSVGL

SEQ ID NO: 47484 - protein, 9 aa, synthetic construct
  source 1..9: note = Seed: VVGARGVGK (KRAS G12R)
YVGDRSVGV

SEQ ID NO: 47485 - protein, 9 aa, synthetic construct
  source 1..9: note = Seed: VVGARGVGK (KRAS G12R)
YVGERAVGA

SEQ ID NO: 47486 - protein, 9 aa, synthetic construct
  source 1..9: note = Seed: VVGARGVGK (KRAS G12R)
YVGERAVGC

SEQ ID NO: 47487 - protein, 9 aa, synthetic construct
  source 1..9: note = Seed: VVGARGVGK (KRAS G12R)
YVGERAVGE

SEQ ID NO: 47488 - protein, 9 aa, synthetic construct
  source 1..9: note = Seed: VVGARGVGK (KRAS G12R)
YVGERAVGF

SEQ ID NO: 47489 - protein, 9 aa, synthetic construct
  source 1..9: note = Seed: VVGARGVGK (KRAS G12R)
YVGERAVGG

SEQ ID NO: 47490 - protein, 9 aa, synthetic construct
  source 1..9: note = Seed: VVGARGVGK (KRAS G12R)
YVGERAVGH

SEQ ID NO: 47491 - protein, 9 aa, synthetic construct
  source 1..9: note = Seed: VVGARGVGK (KRAS G12R)
YVGERAVGI

SEQ ID NO: 47492 - protein, 9 aa, synthetic construct
  source 1..9: note = Seed: VVGARGVGK (KRAS G12R)
YVGERAVGL

SEQ ID NO: 47493 - protein, 9 aa, synthetic construct
  source 1..9: note = Seed: VVGARGVGK (KRAS G12R)
YVGERAVGM

SEQ ID NO: 47494 - protein, 9 aa, synthetic construct
  source 1..9: note = Seed: VVGARGVGK (KRAS G12R)
YVGERAVGN

SEQ ID NO: 47495 - protein, 9 aa, synthetic construct
  source 1..9: note = Seed: VVGARGVGK (KRAS G12R)
YVGERAVGP

SEQ ID NO: 47496 - protein, 9 aa, synthetic construct
  source 1..9: note = Seed: VVGARGVGK (KRAS G12R)
YVGERAVGQ

SEQ ID NO: 47497 - protein, 9 aa, synthetic construct
  source 1..9: note = Seed: VVGARGVGK (KRAS G12R)
YVGERAVGR

SEQ ID NO: 47498 - protein, 9 aa, synthetic construct
  source 1..9: note = Seed: VVGARGVGK (KRAS G12R)
YVGERAVGS

SEQ ID NO: 47499 - protein, 9 aa, synthetic construct
  source 1..9: note = Seed: VVGARGVGK (KRAS G12R)
YVGERAVGT

SEQ ID NO: 47500 - protein, 9 aa, synthetic construct
  source 1..9: note = Seed: VVGARGVGK (KRAS G12R)
YVGERAVGV

SEQ ID NO: 47501 - protein, 9 aa, synthetic construct
  source 1..9: note = Seed: VVGARGVGK (KRAS G12R)
YVGERAVGW

SEQ ID NO: 47502 - protein, 9 aa, synthetic construct
  source 1..9: note = Seed: VVGARGVGK (KRAS G12R)
YVGERAVGY

SEQ ID NO: 47503 - protein, 9 aa, synthetic construct
  source 1..9: note = Seed: VVGARGVGK (KRAS G12R)
YVGERGVGA

SEQ ID NO: 47504 - protein, 9 aa, synthetic construct
  source 1..9: note = Seed: VVGARGVGK (KRAS G12R)
YVGERGVGC

SEQ ID NO: 47505 - protein, 9 aa, synthetic construct
  source 1..9: note = Seed: VVGARGVGK (KRAS G12R)
YVGERGVGF

SEQ ID NO: 47506 - protein, 9 aa, synthetic construct
  source 1..9: note = Seed: VVGARGVGK (KRAS G12R)
YVGERGVGG

SEQ ID NO: 47507 - protein, 9 aa, synthetic construct
  source 1..9: note = Seed: VVGARGVGK (KRAS G12R)
YVGERGVGI

SEQ ID NO: 47508 - protein, 9 aa, synthetic construct
  source 1..9: note = Seed: VVGARGVGK (KRAS G12R)
YVGERGVGL

SEQ ID NO: 47509 - protein, 9 aa, synthetic construct
  source 1..9: note = Seed: VVGARGVGK (KRAS G12R)
YVGERGVGM

SEQ ID NO: 47510 - protein, 9 aa, synthetic construct
  source 1..9: note = Seed: VVGARGVGK (KRAS G12R)
YVGERGVGN

SEQ ID NO: 47511 - protein, 9 aa, synthetic construct
  source 1..9: note = Seed: VVGARGVGK (KRAS G12R)
YVGERGVGQ

SEQ ID NO: 47512 - protein, 9 aa, synthetic construct
  source 1..9: note = Seed: VVGARGVGK (KRAS G12R)
YVGERGVGS

SEQ ID NO: 47513 - protein, 9 aa, synthetic construct
  source 1..9: note = Seed: VVGARGVGK (KRAS G12R)
YVGERGVGT

SEQ ID NO: 47514 - protein, 9 aa, synthetic construct
  source 1..9: note = Seed: VVGARGVGK (KRAS G12R)
YVGERGVGV

SEQ ID NO: 47515 - protein, 9 aa, synthetic construct
  source 1..9: note = Seed: VVGARGVGK (KRAS G12R)
YVGERGVGY

SEQ ID NO: 47516 - protein, 9 aa, synthetic construct
  source 1..9: note = Seed: VVGARGVGK (KRAS G12R)
YVGERIVGA

SEQ ID NO: 47517 - protein, 9 aa, synthetic construct
  source 1..9: note = Seed: VVGARGVGK (KRAS G12R)
YVGERIVGI

SEQ ID NO: 47518 - protein, 9 aa, synthetic construct
  source 1..9: note = Seed: VVGARGVGK (KRAS G12R)
YVGERIVGL

SEQ ID NO: 47519 - protein, 9 aa, synthetic construct
  source 1..9: note = Seed: VVGARGVGK (KRAS G12R)
YVGERIVGM

SEQ ID NO: 47520 - protein, 9 aa, synthetic construct
  source 1..9: note = Seed: VVGARGVGK (KRAS G12R)
YVGERIVGN

SEQ ID NO: 47521 - protein, 9 aa, synthetic construct
  source 1..9: note = Seed: VVGARGVGK (KRAS G12R)
YVGERIVGS

SEQ ID NO: 47522 - protein, 9 aa, synthetic construct
  source 1..9: note = Seed: VVGARGVGK (KRAS G12R)
YVGERIVGT

SEQ ID NO: 47523 - protein, 9 aa, synthetic construct
  source 1..9: note = Seed: VVGARGVGK (KRAS G12R)
YVGERIVGV

SEQ ID NO: 47524 - protein, 9 aa, synthetic construct
  source 1..9: note = Seed: VVGARGVGK (KRAS G12R)
YVGERLVGA

SEQ ID NO: 47525 - protein, 9 aa, synthetic construct
  source 1..9: note = Seed: VVGARGVGK (KRAS G12R)
YVGERMVGA

SEQ ID NO: 47526 - protein, 9 aa, synthetic construct
  source 1..9: note = Seed: VVGARGVGK (KRAS G12R)
YVGERMVGI

SEQ ID NO: 47527 - protein, 9 aa, synthetic construct
  source 1..9: note = Seed: VVGARGVGK (KRAS G12R)
YVGERMVGL

SEQ ID NO: 47528 - protein, 9 aa, synthetic construct
  source 1..9: note = Seed: VVGARGVGK (KRAS G12R)
YVGERMVGV

SEQ ID NO: 47529 - protein, 9 aa, synthetic construct
  source 1..9: note = Seed: VVGARGVGK (KRAS G12R)
YVGERNVGA

SEQ ID NO: 47530 - protein, 9 aa, synthetic construct
  source 1..9: note = Seed: VVGARGVGK (KRAS G12R)
YVGERNVGG

SEQ ID NO: 47531 - protein, 9 aa, synthetic construct
  source 1..9: note = Seed: VVGARGVGK (KRAS G12R)
YVGERNVGI

SEQ ID NO: 47532 - protein, 9 aa, synthetic construct
  source 1..9: note = Seed: VVGARGVGK (KRAS G12R)
YVGERNVGL

SEQ ID NO: 47533 - protein, 9 aa, synthetic construct
  source 1..9: note = Seed: VVGARGVGK (KRAS G12R)
YVGERNVGM

SEQ ID NO: 47534 - protein, 9 aa, synthetic construct
  source 1..9: note = Seed: VVGARGVGK (KRAS G12R)
YVGERNVGN

SEQ ID NO: 47535 - protein, 9 aa, synthetic construct
  source 1..9: note = Seed: VVGARGVGK (KRAS G12R)
YVGERNVGS

SEQ ID NO: 47536 - protein, 9 aa, synthetic construct
  source 1..9: note = Seed: VVGARGVGK (KRAS G12R)
YVGERNVGT

SEQ ID NO: 47537 - protein, 9 aa, synthetic construct
  source 1..9: note = Seed: VVGARGVGK (KRAS G12R)
YVGERNVGV

SEQ ID NO: 47538 - protein, 9 aa, synthetic construct
  source 1..9: note = Seed: VVGARGVGK (KRAS G12R)
YVGERPVGA

SEQ ID NO: 47539 - protein, 9 aa, synthetic construct
  source 1..9: note = Seed: VVGARGVGK (KRAS G12R)
YVGERPVGF

SEQ ID NO: 47540 - protein, 9 aa, synthetic construct
  source 1..9: note = Seed: VVGARGVGK (KRAS G12R)
YVGERPVGG

SEQ ID NO: 47541 - protein, 9 aa, synthetic construct
  source 1..9: note = Seed: VVGARGVGK (KRAS G12R)
YVGERPVGI

SEQ ID NO: 47542 - protein, 9 aa, synthetic construct
  source 1..9: note = Seed: VVGARGVGK (KRAS G12R)
YVGERPVGL

SEQ ID NO: 47543 - protein, 9 aa, synthetic construct
  source 1..9: note = Seed: VVGARGVGK (KRAS G12R)
YVGERPVGM

SEQ ID NO: 47544 - protein, 9 aa, synthetic construct
  source 1..9: note = Seed: VVGARGVGK (KRAS G12R)
YVGERPVGN

SEQ ID NO: 47545 - protein, 9 aa, synthetic construct
  source 1..9: note = Seed: VVGARGVGK (KRAS G12R)
YVGERPVGQ

SEQ ID NO: 47546 - protein, 9 aa, synthetic construct
  source 1..9: note = Seed: VVGARGVGK (KRAS G12R)
YVGERPVGS

SEQ ID NO: 47547 - protein, 9 aa, synthetic construct
  source 1..9: note = Seed: VVGARGVGK (KRAS G12R)
YVGERPVGT

SEQ ID NO: 47548 - protein, 9 aa, synthetic construct
  source 1..9: note = Seed: VVGARGVGK (KRAS G12R)
YVGERPVGV

SEQ ID NO: 47549 - protein, 9 aa, synthetic construct
  source 1..9: note = Seed: VVGARGVGK (KRAS G12R)
YVGERSVGA

SEQ ID NO: 47550 - protein, 9 aa, synthetic construct
  source 1..9: note = Seed: VVGARGVGK (KRAS G12R)
YVGERSVGC

SEQ ID NO: 47551 - protein, 9 aa, synthetic construct
  source 1..9: note = Seed: VVGARGVGK (KRAS G12R)
YVGERSVGF

SEQ ID NO: 47552 - protein, 9 aa, synthetic construct
  source 1..9: note = Seed: VVGARGVGK (KRAS G12R)
YVGERSVGG

SEQ ID NO: 47553 - protein, 9 aa, synthetic construct
  source 1..9: note = Seed: VVGARGVGK (KRAS G12R)
YVGERSVGI

SEQ ID NO: 47554 - protein, 9 aa, synthetic construct
  source 1..9: note = Seed: VVGARGVGK (KRAS G12R)
YVGERSVGL

SEQ ID NO: 47555 - protein, 9 aa, synthetic construct
  source 1..9: note = Seed: VVGARGVGK (KRAS G12R)
YVGERSVGM

SEQ ID NO: 47556 - protein, 9 aa, synthetic construct
  source 1..9: note = Seed: VVGARGVGK (KRAS G12R)
YVGERSVGN

SEQ ID NO: 47557 - protein, 9 aa, synthetic construct
  source 1..9: note = Seed: VVGARGVGK (KRAS G12R)
YVGERSVGQ

SEQ ID NO: 47558 - protein, 9 aa, synthetic construct
  source 1..9: note = Seed: VVGARGVGK (KRAS G12R)
YVGERSVGS

SEQ ID NO: 47559 - protein, 9 aa, synthetic construct
  source 1..9: note = Seed: VVGARGVGK (KRAS G12R)
YVGERSVGT

SEQ ID NO: 47560 - protein, 9 aa, synthetic construct
  source 1..9: note = Seed: VVGARGVGK (KRAS G12R)
YVGERSVGV

SEQ ID NO: 47561 - protein, 9 aa, synthetic construct
  source 1..9: note = Seed: VVGARGVGK (KRAS G12R)
YVGERSVGY

SEQ ID NO: 47562 - protein, 9 aa, synthetic construct
  source 1..9: note = Seed: VVGARGVGK (KRAS G12R)
YVGERTVGA

SEQ ID NO: 47563 - protein, 9 aa, synthetic construct
  source 1..9: note = Seed: VVGARGVGK (KRAS G12R)
YVGERTVGG

SEQ ID NO: 47564 - protein, 9 aa, synthetic construct
  source 1..9: note = Seed: VVGARGVGK (KRAS G12R)
YVGERTVGI

SEQ ID NO: 47565 - protein, 9 aa, synthetic construct
  source 1..9: note = Seed: VVGARGVGK (KRAS G12R)
YVGERTVGL

SEQ ID NO: 47566 - protein, 9 aa, synthetic construct
  source 1..9: note = Seed: VVGARGVGK (KRAS G12R)
YVGERTVGM

SEQ ID NO: 47567 - protein, 9 aa, synthetic construct
  source 1..9: note = Seed: VVGARGVGK (KRAS G12R)
YVGERTVGN

SEQ ID NO: 47568 - protein, 9 aa, synthetic construct
  source 1..9: note = Seed: VVGARGVGK (KRAS G12R)
YVGERTVGQ

SEQ ID NO: 47569 - protein, 9 aa, synthetic construct
  source 1..9: note = Seed: VVGARGVGK (KRAS G12R)
YVGERTVGS

SEQ ID NO: 47570 - protein, 9 aa, synthetic construct
  source 1..9: note = Seed: VVGARGVGK (KRAS G12R)
YVGERTVGT

SEQ ID NO: 47571 - protein, 9 aa, synthetic construct
  source 1..9: note = Seed: VVGARGVGK (KRAS G12R)
YVGERTVGV

SEQ ID NO: 47572 - protein, 9 aa, synthetic construct
  source 1..9: note = Seed: VVGARGVGK (KRAS G12R)
YVGERVVGA

SEQ ID NO: 47573 - protein, 9 aa, synthetic construct
  source 1..9: note = Seed: VVGARGVGK (KRAS G12R)
YVGERVVGG

SEQ ID NO: 47574 - protein, 9 aa, synthetic construct
  source 1..9: note = Seed: VVGARGVGK (KRAS G12R)
YVGERVVGH

SEQ ID NO: 47575 - protein, 9 aa, synthetic construct
  source 1..9: note = Seed: VVGARGVGK (KRAS G12R)
YVGERVVGI

SEQ ID NO: 47576 - protein, 9 aa, synthetic construct
  source 1..9: note = Seed: VVGARGVGK (KRAS G12R)
YVGERVVGL

SEQ ID NO: 47577 - protein, 9 aa, synthetic construct
  source 1..9: note = Seed: VVGARGVGK (KRAS G12R)
YVGERVVGM

SEQ ID NO: 47578 - protein, 9 aa, synthetic construct
  source 1..9: note = Seed: VVGARGVGK (KRAS G12R)
YVGERVVGN

SEQ ID NO: 47579 - protein, 9 aa, synthetic construct
  source 1..9: note = Seed: VVGARGVGK (KRAS G12R)
YVGERVVGQ

SEQ ID NO: 47580 - protein, 9 aa, synthetic construct
  source 1..9: note = Seed: VVGARGVGK (KRAS G12R)
YVGERVVGS

SEQ ID NO: 47581 - protein, 9 aa, synthetic construct
  source 1..9: note = Seed: VVGARGVGK (KRAS G12R)
YVGERVVGT

SEQ ID NO: 47582 - protein, 9 aa, synthetic construct
  source 1..9: note = Seed: VVGARGVGK (KRAS G12R)
YVGERVVGV

SEQ ID NO: 47583 - protein, 9 aa, synthetic construct
  source 1..9: note = Seed: VVGARGVGK (KRAS G12R)
YVGFRAVGA

SEQ ID NO: 47584 - protein, 9 aa, synthetic construct
  source 1..9: note = Seed: VVGARGVGK (KRAS G12R)
YVGFRAVGC

SEQ ID NO: 47585 - protein, 9 aa, synthetic construct
  source 1..9: note = Seed: VVGARGVGK (KRAS G12R)
YVGFRAVGD

SEQ ID NO: 47586 - protein, 9 aa, synthetic construct
  source 1..9: note = Seed: VVGARGVGK (KRAS G12R)
YVGFRAVGE

SEQ ID NO: 47587 - protein, 9 aa, synthetic construct
  source 1..9: note = Seed: VVGARGVGK (KRAS G12R)
YVGFRAVGF

SEQ ID NO: 47588 - protein, 9 aa, synthetic construct
  source 1..9: note = Seed: VVGARGVGK (KRAS G12R)
YVGFRAVGG

SEQ ID NO: 47589 - protein, 9 aa, synthetic construct
  source 1..9: note = Seed: VVGARGVGK (KRAS G12R)
YVGFRAVGH

SEQ ID NO: 47590 - protein, 9 aa, synthetic construct
  source 1..9: note = Seed: VVGARGVGK (KRAS G12R)
YVGFRAVGI

SEQ ID NO: 47591 - protein, 9 aa, synthetic construct
  source 1..9: note = Seed: VVGARGVGK (KRAS G12R)
YVGFRAVGK

SEQ ID NO: 47592 - protein, 9 aa, synthetic construct
  source 1..9: note = Seed: VVGARGVGK (KRAS G12R)
YVGFRAVGL

SEQ ID NO: 47593 - protein, 9 aa, synthetic construct
  source 1..9: note = Seed: VVGARGVGK (KRAS G12R)
YVGFRAVGM

SEQ ID NO: 47594 - protein, 9 aa, synthetic construct
  source 1..9: note = Seed: VVGARGVGK (KRAS G12R)
YVGFRAVGN

SEQ ID NO: 47595 - protein, 9 aa, synthetic construct
  source 1..9: note = Seed: VVGARGVGK (KRAS G12R)
YVGFRAVGQ

SEQ ID NO: 47596 - protein, 9 aa, synthetic construct
  source 1..9: note = Seed: VVGARGVGK (KRAS G12R)
YVGFRAVGR

SEQ ID NO: 47597 - protein, 9 aa, synthetic construct
  source 1..9: note = Seed: VVGARGVGK (KRAS G12R)
YVGFRAVGS

SEQ ID NO: 47598 - protein, 9 aa, synthetic construct
  source 1..9: note = Seed: VVGARGVGK (KRAS G12R)
YVGFRAVGT

SEQ ID NO: 47599 - protein, 9 aa, synthetic construct
  source 1..9: note = Seed: VVGARGVGK (KRAS G12R)
YVGFRAVGV

SEQ ID NO: 47600 - protein, 9 aa, synthetic construct
  source 1..9: note = Seed: VVGARGVGK (KRAS G12R)
YVGFRAVGW

SEQ ID NO: 47601 - protein, 9 aa, synthetic construct
  source 1..9: note = Seed: VVGARGVGK (KRAS G12R)
YVGFRAVGY

SEQ ID NO: 47602 - protein, 9 aa, synthetic construct
  source 1..9: note = Seed: VVGARGVGK (KRAS G12R)
YVGFRCVGL

SEQ ID NO: 47603 - protein, 9 aa, synthetic construct
  source 1..9: note = Seed: VVGARGVGK (KRAS G12R)
YVGFREVGV

SEQ ID NO: 47604 - protein, 9 aa, synthetic construct
  source 1..9: note = Seed: VVGARGVGK (KRAS G12R)
YVGFRGVGA

SEQ ID NO: 47605 - protein, 9 aa, synthetic construct
  source 1..9: note = Seed: VVGARGVGK (KRAS G12R)
YVGFRGVGC

SEQ ID NO: 47606 - protein, 9 aa, synthetic construct
  source 1..9: note = Seed: VVGARGVGK (KRAS G12R)
YVGFRGVGF

SEQ ID NO: 47607 - protein, 9 aa, synthetic construct
  source 1..9: note = Seed: VVGARGVGK (KRAS G12R)
YVGFRGVGG

SEQ ID NO: 47608 - protein, 9 aa, synthetic construct
  source 1..9: note = Seed: VVGARGVGK (KRAS G12R)
YVGFRGVGH

SEQ ID NO: 47609 - protein, 9 aa, synthetic construct
  source 1..9: note = Seed: VVGARGVGK (KRAS G12R)
YVGFRGVGI

SEQ ID NO: 47610 - protein, 9 aa, synthetic construct
  source 1..9: note = Seed: VVGARGVGK (KRAS G12R)
YVGFRGVGK

SEQ ID NO: 47611 - protein, 9 aa, synthetic construct
  source 1..9: note = Seed: VVGARGVGK (KRAS G12R)
YVGFRGVGL

SEQ ID NO: 47612 - protein, 9 aa, synthetic construct
  source 1..9: note = Seed: VVGARGVGK (KRAS G12R)
YVGFRGVGM

SEQ ID NO: 47613 - protein, 9 aa, synthetic construct
  source 1..9: note = Seed: VVGARGVGK (KRAS G12R)
YVGFRGVGN

SEQ ID NO: 47614 - protein, 9 aa, synthetic construct
  source 1..9: note = Seed: VVGARGVGK (KRAS G12R)
YVGFRGVGQ

SEQ ID NO: 47615 - protein, 9 aa, synthetic construct
  source 1..9: note = Seed: VVGARGVGK (KRAS G12R)
YVGFRGVGR

SEQ ID NO: 47616 - protein, 9 aa, synthetic construct
  source 1..9: note = Seed: VVGARGVGK (KRAS G12R)
YVGFRGVGS

SEQ ID NO: 47617 - protein, 9 aa, synthetic construct
  source 1..9: note = Seed: VVGARGVGK (KRAS G12R)
YVGFRGVGT

SEQ ID NO: 47618 - protein, 9 aa, synthetic construct
  source 1..9: note = Seed: VVGARGVGK (KRAS G12R)
YVGFRGVGV

SEQ ID NO: 47619 - protein, 9 aa, synthetic construct
  source 1..9: note = Seed: VVGARGVGK (KRAS G12R)
YVGFRGVGY

SEQ ID NO: 47620 - protein, 9 aa, synthetic construct
  source 1..9: note = Seed: VVGARGVGK (KRAS G12R)
YVGFRHVGL

SEQ ID NO: 47621 - protein, 9 aa, synthetic construct
  source 1..9: note = Seed: VVGARGVGK (KRAS G12R)
YVGFRHVGM

SEQ ID NO: 47622 - protein, 9 aa, synthetic construct
  source 1..9: note = Seed: VVGARGVGK (KRAS G12R)
YVGFRHVGR

SEQ ID NO: 47623 - protein, 9 aa, synthetic construct
  source 1..9: note = Seed: VVGARGVGK (KRAS G12R)
YVGFRKVGK

SEQ ID NO: 47624 - protein, 9 aa, synthetic construct
  source 1..9: note = Seed: VVGARGVGK (KRAS G12R)
YVGFRKVGL

SEQ ID NO: 47625 - protein, 9 aa, synthetic construct
  source 1..9: note = Seed: VVGARGVGK (KRAS G12R)
YVGFRKVGR

SEQ ID NO: 47626 - protein, 9 aa, synthetic construct
  source 1..9: note = Seed: VVGARGVGK (KRAS G12R)
YVGFRNVGA

SEQ ID NO: 47627 - protein, 9 aa, synthetic construct
  source 1..9: note = Seed: VVGARGVGK (KRAS G12R)
YVGFRNVGG

SEQ ID NO: 47628 - protein, 9 aa, synthetic construct
  source 1..9: note = Seed: VVGARGVGK (KRAS G12R)
YVGFRNVGH

SEQ ID NO: 47629 - protein, 9 aa, synthetic construct
  source 1..9: note = Seed: VVGARGVGK (KRAS G12R)
YVGFRNVGI

SEQ ID NO: 47630 - protein, 9 aa, synthetic construct
  source 1..9: note = Seed: VVGARGVGK (KRAS G12R)
YVGFRNVGL

SEQ ID NO: 47631 - protein, 9 aa, synthetic construct
  source 1..9: note = Seed: VVGARGVGK (KRAS G12R)
YVGFRNVGM

SEQ ID NO: 47632 - protein, 9 aa, synthetic construct
  source 1..9: note = Seed: VVGARGVGK (KRAS G12R)
YVGFRNVGN

SEQ ID NO: 47633 - protein, 9 aa, synthetic construct
  source 1..9: note = Seed: VVGARGVGK (KRAS G12R)
YVGFRNVGR

SEQ ID NO: 47634 - protein, 9 aa, synthetic construct
  source 1..9: note = Seed: VVGARGVGK (KRAS G12R)
YVGFRNVGS

SEQ ID NO: 47635 - protein, 9 aa, synthetic construct
  source 1..9: note = Seed: VVGARGVGK (KRAS G12R)
YVGFRNVGV

SEQ ID NO: 47636 - protein, 9 aa, synthetic construct
  source 1..9: note = Seed: VVGARGVGK (KRAS G12R)
YVGFRPVGA

SEQ ID NO: 47637 - protein, 9 aa, synthetic construct
  source 1..9: note = Seed: VVGARGVGK (KRAS G12R)
YVGFRPVGC

SEQ ID NO: 47638 - protein, 9 aa, synthetic construct
  source 1..9: note = Seed: VVGARGVGK (KRAS G12R)
YVGFRPVGD

SEQ ID NO: 47639 - protein, 9 aa, synthetic construct
  source 1..9: note = Seed: VVGARGVGK (KRAS G12R)
YVGFRPVGE

SEQ ID NO: 47640 - protein, 9 aa, synthetic construct
  source 1..9: note = Seed: VVGARGVGK (KRAS G12R)
YVGFRPVGF

SEQ ID NO: 47641 - protein, 9 aa, synthetic construct
  source 1..9: note = Seed: VVGARGVGK (KRAS G12R)
YVGFRPVGG

SEQ ID NO: 47642 - protein, 9 aa, synthetic construct
  source 1..9: note = Seed: VVGARGVGK (KRAS G12R)
YVGFRPVGH

SEQ ID NO: 47643 - protein, 9 aa, synthetic construct
  source 1..9: note = Seed: VVGARGVGK (KRAS G12R)
YVGFRPVGI

SEQ ID NO: 47644 - protein, 9 aa, synthetic construct
  source 1..9: note = Seed: VVGARGVGK (KRAS G12R)
YVGFRPVGK

SEQ ID NO: 47645 - protein, 9 aa, synthetic construct
  source 1..9: note = Seed: VVGARGVGK (KRAS G12R)
YVGFRPVGL

SEQ ID NO: 47646 - protein, 9 aa, synthetic construct
  source 1..9: note = Seed: VVGARGVGK (KRAS G12R)
YVGFRPVGM

SEQ ID NO: 47647 - protein, 9 aa, synthetic construct
  source 1..9: note = Seed: VVGARGVGK (KRAS G12R)
YVGFRPVGN

SEQ ID NO: 47648 - protein, 9 aa, synthetic construct
  source 1..9: note = Seed: VVGARGVGK (KRAS G12R)
YVGFRPVGQ

SEQ ID NO: 47649 - protein, 9 aa, synthetic construct
  source 1..9: note = Seed: VVGARGVGK (KRAS G12R)
YVGFRPVGR

SEQ ID NO: 47650 - protein, 9 aa, synthetic construct
  source 1..9: note = Seed: VVGARGVGK (KRAS G12R)
YVGFRPVGS

SEQ ID NO: 47651 - protein, 9 aa, synthetic construct
  source 1..9: note = Seed: VVGARGVGK (KRAS G12R)
YVGFRPVGV

SEQ ID NO: 47652 - protein, 9 aa, synthetic construct
  source 1..9: note = Seed: VVGARGVGK (KRAS G12R)
YVGFRPVGW

SEQ ID NO: 47653 - protein, 9 aa, synthetic construct
  source 1..9: note = Seed: VVGARGVGK (KRAS G12R)
YVGFRPVGY

SEQ ID NO: 47654 - protein, 9 aa, synthetic construct
  source 1..9: note = Seed: VVGARGVGK (KRAS G12R)
YVGFRQVGL

SEQ ID NO: 47655 - protein, 9 aa, synthetic construct
  source 1..9: note = Seed: VVGARGVGK (KRAS G12R)
YVGFRQVGM

SEQ ID NO: 47656 - protein, 9 aa, synthetic construct
  source 1..9: note = Seed: VVGARGVGK (KRAS G12R)
YVGFRRVGK

SEQ ID NO: 47657 - protein, 9 aa, synthetic construct
  source 1..9: note = Seed: VVGARGVGK (KRAS G12R)
YVGFRRVGL

SEQ ID NO: 47658 - protein, 9 aa, synthetic construct
  source 1..9: note = Seed: VVGARGVGK (KRAS G12R)
YVGFRRVGR

SEQ ID NO: 47659 - protein, 9 aa, synthetic construct
  source 1..9: note = Seed: VVGARGVGK (KRAS G12R)
YVGFRSVGA

SEQ ID NO: 47660 - protein, 9 aa, synthetic construct
  source 1..9: note = Seed: VVGARGVGK (KRAS G12R)
YVGFRSVGC

SEQ ID NO: 47661 - protein, 9 aa, synthetic construct
  source 1..9: note = Seed: VVGARGVGK (KRAS G12R)
YVGFRSVGD

SEQ ID NO: 47662 - protein, 9 aa, synthetic construct
  source 1..9: note = Seed: VVGARGVGK (KRAS G12R)
YVGFRSVGF

SEQ ID NO: 47663 - protein, 9 aa, synthetic construct
  source 1..9: note = Seed: VVGARGVGK (KRAS G12R)
YVGFRSVGG

SEQ ID NO: 47664 - protein, 9 aa, synthetic construct
  source 1..9: note = Seed: VVGARGVGK (KRAS G12R)
YVGFRSVGH

SEQ ID NO: 47665 - protein, 9 aa, synthetic construct
  source 1..9: note = Seed: VVGARGVGK (KRAS G12R)
YVGFRSVGI

SEQ ID NO: 47666 - protein, 9 aa, synthetic construct
  source 1..9: note = Seed: VVGARGVGK (KRAS G12R)
YVGFRSVGL

SEQ ID NO: 47667 - protein, 9 aa, synthetic construct
  source 1..9: note = Seed: VVGARGVGK (KRAS G12R)
YVGFRSVGM

SEQ ID NO: 47668 - protein, 9 aa, synthetic construct
  source 1..9: note = Seed: VVGARGVGK (KRAS G12R)
YVGFRSVGN

SEQ ID NO: 47669 - protein, 9 aa, synthetic construct
  source 1..9: note = Seed: VVGARGVGK (KRAS G12R)
YVGFRSVGQ

SEQ ID NO: 47670 - protein, 9 aa, synthetic construct
  source 1..9: note = Seed: VVGARGVGK (KRAS G12R)
YVGFRSVGR

SEQ ID NO: 47671 - protein, 9 aa, synthetic construct
  source 1..9: note = Seed: VVGARGVGK (KRAS G12R)
YVGFRSVGS

SEQ ID NO: 47672 - protein, 9 aa, synthetic construct
  source 1..9: note = Seed: VVGARGVGK (KRAS G12R)
YVGFRSVGT

SEQ ID NO: 47673 - protein, 9 aa, synthetic construct
  source 1..9: note = Seed: VVGARGVGK (KRAS G12R)
YVGFRSVGV

SEQ ID NO: 47674 - protein, 9 aa, synthetic construct
  source 1..9: note = Seed: VVGARGVGK (KRAS G12R)
YVGFRSVGY

SEQ ID NO: 47675 - protein, 9 aa, synthetic construct
  source 1..9: note = Seed: VVGARGVGK (KRAS G12R)
YVGFRTVGA

SEQ ID NO: 47676 - protein, 9 aa, synthetic construct
  source 1..9: note = Seed: VVGARGVGK (KRAS G12R)
YVGFRTVGE

SEQ ID NO: 47677 - protein, 9 aa, synthetic construct
  source 1..9: note = Seed: VVGARGVGK (KRAS G12R)
YVGFRTVGF

SEQ ID NO: 47678 - protein, 9 aa, synthetic construct
  source 1..9: note = Seed: VVGARGVGK (KRAS G12R)
YVGFRTVGG

SEQ ID NO: 47679 - protein, 9 aa, synthetic construct
  source 1..9: note = Seed: VVGARGVGK (KRAS G12R)
YVGFRTVGH

SEQ ID NO: 47680 - protein, 9 aa, synthetic construct
  source 1..9: note = Seed: VVGARGVGK (KRAS G12R)
YVGFRTVGI

SEQ ID NO: 47681 - protein, 9 aa, synthetic construct
  source 1..9: note = Seed: VVGARGVGK (KRAS G12R)
YVGFRTVGL

SEQ ID NO: 47682 - protein, 9 aa, synthetic construct
  source 1..9: note = Seed: VVGARGVGK (KRAS G12R)
YVGFRTVGM

SEQ ID NO: 47683 - protein, 9 aa, synthetic construct
  source 1..9: note = Seed: VVGARGVGK (KRAS G12R)
YVGFRTVGN

SEQ ID NO: 47684 - protein, 9 aa, synthetic construct
  source 1..9: note = Seed: VVGARGVGK (KRAS G12R)
YVGFRTVGQ

SEQ ID NO: 47685 - protein, 9 aa, synthetic construct
  source 1..9: note = Seed: VVGARGVGK (KRAS G12R)
YVGFRTVGR

SEQ ID NO: 47686 - protein, 9 aa, synthetic construct
  source 1..9: note = Seed: VVGARGVGK (KRAS G12R)
YVGFRTVGS

SEQ ID NO: 47687 - protein, 9 aa, synthetic construct
  source 1..9: note = Seed: VVGARGVGK (KRAS G12R)
YVGFRTVGV

SEQ ID NO: 47688 - protein, 9 aa, synthetic construct
  source 1..9: note = Seed: VVGARGVGK (KRAS G12R)
YVGFRTVGW

SEQ ID NO: 47689 - protein, 9 aa, synthetic construct
  source 1..9: note = Seed: VVGARGVGK (KRAS G12R)
YVGFRTVGY

SEQ ID NO: 47690 - protein, 9 aa, synthetic construct
  source 1..9: note = Seed: VVGARGVGK (KRAS G12R)
YVGFRVVGD

SEQ ID NO: 47691 - protein, 9 aa, synthetic construct
  source 1..9: note = Seed: VVGARGVGK (KRAS G12R)
YVGFRVVGH

SEQ ID NO: 47692 - protein, 9 aa, synthetic construct
  source 1..9: note = Seed: VVGARGVGK (KRAS G12R)
YVGFRVVGL

SEQ ID NO: 47693 - protein, 9 aa, synthetic construct
  source 1..9: note = Seed: VVGARGVGK (KRAS G12R)
YVGFRVVGM

SEQ ID NO: 47694 - protein, 9 aa, synthetic construct
  source 1..9: note = Seed: VVGARGVGK (KRAS G12R)
YVGFRVVGN

SEQ ID NO: 47695 - protein, 9 aa, synthetic construct
  source 1..9: note = Seed: VVGARGVGK (KRAS G12R)
YVGFRVVGQ

SEQ ID NO: 47696 - protein, 9 aa, synthetic construct
  source 1..9: note = Seed: VVGARGVGK (KRAS G12R)
YVGGRAVGA

SEQ ID NO: 47697 - protein, 9 aa, synthetic construct
  source 1..9: note = Seed: VVGARGVGK (KRAS G12R)
YVGGRAVGC

SEQ ID NO: 47698 - protein, 9 aa, synthetic construct
  source 1..9: note = Seed: VVGARGVGK (KRAS G12R)
YVGGRAVGD

SEQ ID NO: 47699 - protein, 9 aa, synthetic construct
  source 1..9: note = Seed: VVGARGVGK (KRAS G12R)
YVGGRAVGE

SEQ ID NO: 47700 - protein, 9 aa, synthetic construct
  source 1..9: note = Seed: VVGARGVGK (KRAS G12R)
YVGGRAVGF

SEQ ID NO: 47701 - protein, 9 aa, synthetic construct
  source 1..9: note = Seed: VVGARGVGK (KRAS G12R)
YVGGRAVGG

SEQ ID NO: 47702 - protein, 9 aa, synthetic construct
  source 1..9: note = Seed: VVGARGVGK (KRAS G12R)
YVGGRAVGH

SEQ ID NO: 47703 - protein, 9 aa, synthetic construct
  source 1..9: note = Seed: VVGARGVGK (KRAS G12R)
YVGGRAVGI

SEQ ID NO: 47704 - protein, 9 aa, synthetic construct
  source 1..9: note = Seed: VVGARGVGK (KRAS G12R)
YVGGRAVGK

SEQ ID NO: 47705 - protein, 9 aa, synthetic construct
  source 1..9: note = Seed: VVGARGVGK (KRAS G12R)
YVGGRAVGL

SEQ ID NO: 47706 - protein, 9 aa, synthetic construct
  source 1..9: note = Seed: VVGARGVGK (KRAS G12R)
YVGGRAVGM

SEQ ID NO: 47707 - protein, 9 aa, synthetic construct
  source 1..9: note = Seed: VVGARGVGK (KRAS G12R)
YVGGRAVGN

SEQ ID NO: 47708 - protein, 9 aa, synthetic construct
  source 1..9: note = Seed: VVGARGVGK (KRAS G12R)
YVGGRAVGP

SEQ ID NO: 47709 - protein, 9 aa, synthetic construct
  source 1..9: note = Seed: VVGARGVGK (KRAS G12R)
YVGGRAVGQ

SEQ ID NO: 47710 - protein, 9 aa, synthetic construct
  source 1..9: note = Seed: VVGARGVGK (KRAS G12R)
YVGGRAVGR

SEQ ID NO: 47711 - protein, 9 aa, synthetic construct
  source 1..9: note = Seed: VVGARGVGK (KRAS G12R)
YVGGRAVGS

SEQ ID NO: 47712 - protein, 9 aa, synthetic construct
  source 1..9: note = Seed: VVGARGVGK (KRAS G12R)
YVGGRAVGT

SEQ ID NO: 47713 - protein, 9 aa, synthetic construct
  source 1..9: note = Seed: VVGARGVGK (KRAS G12R)
YVGGRAVGV

SEQ ID NO: 47714 - protein, 9 aa, synthetic construct
  source 1..9: note = Seed: VVGARGVGK (KRAS G12R)
YVGGRAVGW

SEQ ID NO: 47715 - protein, 9 aa, synthetic construct
  source 1..9: note = Seed: VVGARGVGK (KRAS G12R)
YVGGRAVGY

SEQ ID NO: 47716 - protein, 9 aa, synthetic construct
  source 1..9: note = Seed: VVGARGVGK (KRAS G12R)
YVGGRCVGI

SEQ ID NO: 47717 - protein, 9 aa, synthetic construct
  source 1..9: note = Seed: VVGARGVGK (KRAS G12R)
YVGGRCVGL

SEQ ID NO: 47718 - protein, 9 aa, synthetic construct
  source 1..9: note = Seed: VVGARGVGK (KRAS G12R)
YVGGRCVGV

SEQ ID NO: 47719 - protein, 9 aa, synthetic construct
  source 1..9: note = Seed: VVGARGVGK (KRAS G12R)
YVGGRGVGA

SEQ ID NO: 47720 - protein, 9 aa, synthetic construct
  source 1..9: note = Seed: VVGARGVGK (KRAS G12R)
YVGGRGVGF

SEQ ID NO: 47721 - protein, 9 aa, synthetic construct
  source 1..9: note = Seed: VVGARGVGK (KRAS G12R)
YVGGRGVGG

SEQ ID NO: 47722 - protein, 9 aa, synthetic construct
  source 1..9: note = Seed: VVGARGVGK (KRAS G12R)
YVGGRGVGI

SEQ ID NO: 47723 - protein, 9 aa, synthetic construct
  source 1..9: note = Seed: VVGARGVGK (KRAS G12R)
YVGGRGVGL

SEQ ID NO: 47724 - protein, 9 aa, synthetic construct
  source 1..9: note = Seed: VVGARGVGK (KRAS G12R)
YVGGRGVGM

SEQ ID NO: 47725 - protein, 9 aa, synthetic construct
  source 1..9: note = Seed: VVGARGVGK (KRAS G12R)
YVGGRGVGN

SEQ ID NO: 47726 - protein, 9 aa, synthetic construct
  source 1..9: note = Seed: VVGARGVGK (KRAS G12R)
YVGGRGVGS

SEQ ID NO: 47727 - protein, 9 aa, synthetic construct
  source 1..9: note = Seed: VVGARGVGK (KRAS G12R)
YVGGRGVGT

SEQ ID NO: 47728 - protein, 9 aa, synthetic construct
  source 1..9: note = Seed: VVGARGVGK (KRAS G12R)
YVGGRGVGV

SEQ ID NO: 47729 - protein, 9 aa, synthetic construct
  source 1..9: note = Seed: VVGARGVGK (KRAS G12R)
YVGGRGVGY

SEQ ID NO: 47730 - protein, 9 aa, synthetic construct
  source 1..9: note = Seed: VVGARGVGK (KRAS G12R)
YVGGRHVGA

SEQ ID NO: 47731 - protein, 9 aa, synthetic construct
  source 1..9: note = Seed: VVGARGVGK (KRAS G12R)
YVGGRHVGI

SEQ ID NO: 47732 - protein, 9 aa, synthetic construct
  source 1..9: note = Seed: VVGARGVGK (KRAS G12R)
YVGGRHVGL

SEQ ID NO: 47733 - protein, 9 aa, synthetic construct
  source 1..9: note = Seed: VVGARGVGK (KRAS G12R)
YVGGRHVGM

SEQ ID NO: 47734 - protein, 9 aa, synthetic construct
  source 1..9: note = Seed: VVGARGVGK (KRAS G12R)
YVGGRHVGS

SEQ ID NO: 47735 - protein, 9 aa, synthetic construct
  source 1..9: note = Seed: VVGARGVGK (KRAS G12R)
YVGGRHVGV

SEQ ID NO: 47736 - protein, 9 aa, synthetic construct
  source 1..9: note = Seed: VVGARGVGK (KRAS G12R)
YVGGRIVGA

SEQ ID NO: 47737 - protein, 9 aa, synthetic construct
  source 1..9: note = Seed: VVGARGVGK (KRAS G12R)
YVGGRIVGC

SEQ ID NO: 47738 - protein, 9 aa, synthetic construct
  source 1..9: note = Seed: VVGARGVGK (KRAS G12R)
YVGGRIVGE

SEQ ID NO: 47739 - protein, 9 aa, synthetic construct
  source 1..9: note = Seed: VVGARGVGK (KRAS G12R)
YVGGRIVGF

SEQ ID NO: 47740 - protein, 9 aa, synthetic construct
  source 1..9: note = Seed: VVGARGVGK (KRAS G12R)
YVGGRIVGG

SEQ ID NO: 47741 - protein, 9 aa, synthetic construct
  source 1..9: note = Seed: VVGARGVGK (KRAS G12R)
YVGGRIVGH

SEQ ID NO: 47742 - protein, 9 aa, synthetic construct
  source 1..9: note = Seed: VVGARGVGK (KRAS G12R)
YVGGRIVGI

SEQ ID NO: 47743 - protein, 9 aa, synthetic construct
  source 1..9: note = Seed: VVGARGVGK (KRAS G12R)
YVGGRIVGL

SEQ ID NO: 47744 - protein, 9 aa, synthetic construct
  source 1..9: note = Seed: VVGARGVGK (KRAS G12R)
YVGGRIVGM

SEQ ID NO: 47745 - protein, 9 aa, synthetic construct
  source 1..9: note = Seed: VVGARGVGK (KRAS G12R)
YVGGRIVGN

SEQ ID NO: 47746 - protein, 9 aa, synthetic construct
  source 1..9: note = Seed: VVGARGVGK (KRAS G12R)
YVGGRIVGP

SEQ ID NO: 47747 - protein, 9 aa, synthetic construct
  source 1..9: note = Seed: VVGARGVGK (KRAS G12R)
YVGGRIVGQ

SEQ ID NO: 47748 - protein, 9 aa, synthetic construct
  source 1..9: note = Seed: VVGARGVGK (KRAS G12R)
YVGGRIVGR

SEQ ID NO: 47749 - protein, 9 aa, synthetic construct
  source 1..9: note = Seed: VVGARGVGK (KRAS G12R)
YVGGRIVGS

SEQ ID NO: 47750 - protein, 9 aa, synthetic construct
  source 1..9: note = Seed: VVGARGVGK (KRAS G12R)
YVGGRIVGT

SEQ ID NO: 47751 - protein, 9 aa, synthetic construct
  source 1..9: note = Seed: VVGARGVGK (KRAS G12R)
YVGGRIVGV

SEQ ID NO: 47752 - protein, 9 aa, synthetic construct
  source 1..9: note = Seed: VVGARGVGK (KRAS G12R)
YVGGRIVGY

SEQ ID NO: 47753 - protein, 9 aa, synthetic construct
  source 1..9: note = Seed: VVGARGVGK (KRAS G12R)
YVGGRKVGA

SEQ ID NO: 47754 - protein, 9 aa, synthetic construct
  source 1..9: note = Seed: VVGARGVGK (KRAS G12R)
YVGGRKVGF

SEQ ID NO: 47755 - protein, 9 aa, synthetic construct
  source 1..9: note = Seed: VVGARGVGK (KRAS G12R)
YVGGRKVGI

SEQ ID NO: 47756 - protein, 9 aa, synthetic construct
  source 1..9: note = Seed: VVGARGVGK (KRAS G12R)
YVGGRKVGL

SEQ ID NO: 47757 - protein, 9 aa, synthetic construct
  source 1..9: note = Seed: VVGARGVGK (KRAS G12R)
YVGGRKVGM

SEQ ID NO: 47758 - protein, 9 aa, synthetic construct
  source 1..9: note = Seed: VVGARGVGK (KRAS G12R)
YVGGRKVGS

SEQ ID NO: 47759 - protein, 9 aa, synthetic construct
  source 1..9: note = Seed: VVGARGVGK (KRAS G12R)
YVGGRKVGT

SEQ ID NO: 47760 - protein, 9 aa, synthetic construct
  source 1..9: note = Seed: VVGARGVGK (KRAS G12R)
YVGGRKVGV

SEQ ID NO: 47761 - protein, 9 aa, synthetic construct
  source 1..9: note = Seed: VVGARGVGK (KRAS G12R)
YVGGRKVGY

SEQ ID NO: 47762 - protein, 9 aa, synthetic construct
  source 1..9: note = Seed: VVGARGVGK (KRAS G12R)
YVGGRLVGA

SEQ ID NO: 47763 - protein, 9 aa, synthetic construct
  source 1..9: note = Seed: VVGARGVGK (KRAS G12R)
YVGGRLVGG

SEQ ID NO: 47764 - protein, 9 aa, synthetic construct
  source 1..9: note = Seed: VVGARGVGK (KRAS G12R)
YVGGRLVGH

SEQ ID NO: 47765 - protein, 9 aa, synthetic construct
  source 1..9: note = Seed: VVGARGVGK (KRAS G12R)
YVGGRLVGI

SEQ ID NO: 47766 - protein, 9 aa, synthetic construct
  source 1..9: note = Seed: VVGARGVGK (KRAS G12R)
YVGGRLVGL

SEQ ID NO: 47767 - protein, 9 aa, synthetic construct
  source 1..9: note = Seed: VVGARGVGK (KRAS G12R)
YVGGRLVGM

SEQ ID NO: 47768 - protein, 9 aa, synthetic construct
  source 1..9: note = Seed: VVGARGVGK (KRAS G12R)
YVGGRLVGN

SEQ ID NO: 47769 - protein, 9 aa, synthetic construct
  source 1..9: note = Seed: VVGARGVGK (KRAS G12R)
YVGGRLVGP

SEQ ID NO: 47770 - protein, 9 aa, synthetic construct
  source 1..9: note = Seed: VVGARGVGK (KRAS G12R)
YVGGRLVGS

SEQ ID NO: 47771 - protein, 9 aa, synthetic construct
  source 1..9: note = Seed: VVGARGVGK (KRAS G12R)
YVGGRLVGT

SEQ ID NO: 47772 - protein, 9 aa, synthetic construct
  source 1..9: note = Seed: VVGARGVGK (KRAS G12R)
YVGGRLVGV

SEQ ID NO: 47773 - protein, 9 aa, synthetic construct
  source 1..9: note = Seed: VVGARGVGK (KRAS G12R)
YVGGRMVGA

SEQ ID NO: 47774 - protein, 9 aa, synthetic construct
  source 1..9: note = Seed: VVGARGVGK (KRAS G12R)
YVGGRMVGG

SEQ ID NO: 47775 - protein, 9 aa, synthetic construct
  source 1..9: note = Seed: VVGARGVGK (KRAS G12R)
YVGGRMVGI

SEQ ID NO: 47776 - protein, 9 aa, synthetic construct
  source 1..9: note = Seed: VVGARGVGK (KRAS G12R)
YVGGRMVGL

SEQ ID NO: 47777 - protein, 9 aa, synthetic construct
  source 1..9: note = Seed: VVGARGVGK (KRAS G12R)
YVGGRMVGM

SEQ ID NO: 47778 - protein, 9 aa, synthetic construct
  source 1..9: note = Seed: VVGARGVGK (KRAS G12R)
YVGGRMVGN

SEQ ID NO: 47779 - protein, 9 aa, synthetic construct
  source 1..9: note = Seed: VVGARGVGK (KRAS G12R)
YVGGRMVGS

SEQ ID NO: 47780 - protein, 9 aa, synthetic construct
  source 1..9: note = Seed: VVGARGVGK (KRAS G12R)
YVGGRMVGT

SEQ ID NO: 47781 - protein, 9 aa, synthetic construct
  source 1..9: note = Seed: VVGARGVGK (KRAS G12R)
YVGGRMVGV

SEQ ID NO: 47782 - protein, 9 aa, synthetic construct
  source 1..9: note = Seed: VVGARGVGK (KRAS G12R)
YVGGRNVGA

SEQ ID NO: 47783 - protein, 9 aa, synthetic construct
  source 1..9: note = Seed: VVGARGVGK (KRAS G12R)
YVGGRNVGF

SEQ ID NO: 47784 - protein, 9 aa, synthetic construct
  source 1..9: note = Seed: VVGARGVGK (KRAS G12R)
YVGGRNVGI

SEQ ID NO: 47785 - protein, 9 aa, synthetic construct
  source 1..9: note = Seed: VVGARGVGK (KRAS G12R)
YVGGRNVGL

SEQ ID NO: 47786 - protein, 9 aa, synthetic construct
  source 1..9: note = Seed: VVGARGVGK (KRAS G12R)
YVGGRNVGM

SEQ ID NO: 47787 - protein, 9 aa, synthetic construct
  source 1..9: note = Seed: VVGARGVGK (KRAS G12R)
YVGGRNVGS

SEQ ID NO: 47788 - protein, 9 aa, synthetic construct
  source 1..9: note = Seed: VVGARGVGK (KRAS G12R)
YVGGRNVGT

SEQ ID NO: 47789 - protein, 9 aa, synthetic construct
  source 1..9: note = Seed: VVGARGVGK (KRAS G12R)
YVGGRNVGV

SEQ ID NO: 47790 - protein, 9 aa, synthetic construct
  source 1..9: note = Seed: VVGARGVGK (KRAS G12R)
YVGGRPVGA

SEQ ID NO: 47791 - protein, 9 aa, synthetic construct
  source 1..9: note = Seed: VVGARGVGK (KRAS G12R)
YVGGRPVGC

SEQ ID NO: 47792 - protein, 9 aa, synthetic construct
  source 1..9: note = Seed: VVGARGVGK (KRAS G12R)
YVGGRPVGF

SEQ ID NO: 47793 - protein, 9 aa, synthetic construct
  source 1..9: note = Seed: VVGARGVGK (KRAS G12R)
YVGGRPVGG

SEQ ID NO: 47794 - protein, 9 aa, synthetic construct
  source 1..9: note = Seed: VVGARGVGK (KRAS G12R)
YVGGRPVGH

SEQ ID NO: 47795 - protein, 9 aa, synthetic construct
  source 1..9: note = Seed: VVGARGVGK (KRAS G12R)
YVGGRPVGI

SEQ ID NO: 47796 - protein, 9 aa, synthetic construct
  source 1..9: note = Seed: VVGARGVGK (KRAS G12R)
YVGGRPVGK

SEQ ID NO: 47797 - protein, 9 aa, synthetic construct
  source 1..9: note = Seed: VVGARGVGK (KRAS G12R)
YVGGRPVGL

SEQ ID NO: 47798 - protein, 9 aa, synthetic construct
  source 1..9: note = Seed: VVGARGVGK (KRAS G12R)
YVGGRPVGM

SEQ ID NO: 47799 - protein, 9 aa, synthetic construct
  source 1..9: note = Seed: VVGARGVGK (KRAS G12R)
YVGGRPVGN

SEQ ID NO: 47800 - protein, 9 aa, synthetic construct
  source 1..9: note = Seed: VVGARGVGK (KRAS G12R)
YVGGRPVGP

SEQ ID NO: 47801 - protein, 9 aa, synthetic construct
  source 1..9: note = Seed: VVGARGVGK (KRAS G12R)
YVGGRPVGQ

SEQ ID NO: 47802 - protein, 9 aa, synthetic construct
  source 1..9: note = Seed: VVGARGVGK (KRAS G12R)
YVGGRPVGR

SEQ ID NO: 47803 - protein, 9 aa, synthetic construct
  source 1..9: note = Seed: VVGARGVGK (KRAS G12R)
YVGGRPVGS

SEQ ID NO: 47804 - protein, 9 aa, synthetic construct
  source 1..9: note = Seed: VVGARGVGK (KRAS G12R)
YVGGRPVGT

SEQ ID NO: 47805 - protein, 9 aa, synthetic construct
  source 1..9: note = Seed: VVGARGVGK (KRAS G12R)
YVGGRPVGV

SEQ ID NO: 47806 - protein, 9 aa, synthetic construct
  source 1..9: note = Seed: VVGARGVGK (KRAS G12R)
YVGGRPVGW

SEQ ID NO: 47807 - protein, 9 aa, synthetic construct
  source 1..9: note = Seed: VVGARGVGK (KRAS G12R)
YVGGRPVGY

SEQ ID NO: 47808 - protein, 9 aa, synthetic construct
  source 1..9: note = Seed: VVGARGVGK (KRAS G12R)
YVGGRQVGA

SEQ ID NO: 47809 - protein, 9 aa, synthetic construct
  source 1..9: note = Seed: VVGARGVGK (KRAS G12R)
YVGGRQVGI

SEQ ID NO: 47810 - protein, 9 aa, synthetic construct
  source 1..9: note = Seed: VVGARGVGK (KRAS G12R)
YVGGRQVGL

SEQ ID NO: 47811 - protein, 9 aa, synthetic construct
  source 1..9: note = Seed: VVGARGVGK (KRAS G12R)
YVGGRQVGM

SEQ ID NO: 47812 - protein, 9 aa, synthetic construct
  source 1..9: note = Seed: VVGARGVGK (KRAS G12R)
YVGGRQVGV

SEQ ID NO: 47813 - protein, 9 aa, synthetic construct
  source 1..9: note = Seed: VVGARGVGK (KRAS G12R)
YVGGRRVGA

SEQ ID NO: 47814 - protein, 9 aa, synthetic construct
  source 1..9: note = Seed: VVGARGVGK (KRAS G12R)
YVGGRRVGF

SEQ ID NO: 47815 - protein, 9 aa, synthetic construct
  source 1..9: note = Seed: VVGARGVGK (KRAS G12R)
YVGGRRVGG

SEQ ID NO: 47816 - protein, 9 aa, synthetic construct
  source 1..9: note = Seed: VVGARGVGK (KRAS G12R)
YVGGRRVGI

SEQ ID NO: 47817 - protein, 9 aa, synthetic construct
  source 1..9: note = Seed: VVGARGVGK (KRAS G12R)
YVGGRRVGL

SEQ ID NO: 47818 - protein, 9 aa, synthetic construct
  source 1..9: note = Seed: VVGARGVGK (KRAS G12R)
YVGGRRVGM

SEQ ID NO: 47819 - protein, 9 aa, synthetic construct
  source 1..9: note = Seed: VVGARGVGK (KRAS G12R)
YVGGRRVGN

SEQ ID NO: 47820 - protein, 9 aa, synthetic construct
  source 1..9: note = Seed: VVGARGVGK (KRAS G12R)
YVGGRRVGQ

SEQ ID NO: 47821 - protein, 9 aa, synthetic construct
  source 1..9: note = Seed: VVGARGVGK (KRAS G12R)
YVGGRRVGS

SEQ ID NO: 47822 - protein, 9 aa, synthetic construct
  source 1..9: note = Seed: VVGARGVGK (KRAS G12R)
YVGGRRVGT

SEQ ID NO: 47823 - protein, 9 aa, synthetic construct
  source 1..9: note = Seed: VVGARGVGK (KRAS G12R)
YVGGRRVGV

SEQ ID NO: 47824 - protein, 9 aa, synthetic construct
  source 1..9: note = Seed: VVGARGVGK (KRAS G12R)
YVGGRRVGY

SEQ ID NO: 47825 - protein, 9 aa, synthetic construct
  source 1..9: note = Seed: VVGARGVGK (KRAS G12R)
YVGGRSVGA

SEQ ID NO: 47826 - protein, 9 aa, synthetic construct
  source 1..9: note = Seed: VVGARGVGK (KRAS G12R)
YVGGRSVGC

SEQ ID NO: 47827 - protein, 9 aa, synthetic construct
  source 1..9: note = Seed: VVGARGVGK (KRAS G12R)
YVGGRSVGF

SEQ ID NO: 47828 - protein, 9 aa, synthetic construct
  source 1..9: note = Seed: VVGARGVGK (KRAS G12R)
YVGGRSVGG

SEQ ID NO: 47829 - protein, 9 aa, synthetic construct
  source 1..9: note = Seed: VVGARGVGK (KRAS G12R)
YVGGRSVGH

SEQ ID NO: 47830 - protein, 9 aa, synthetic construct
  source 1..9: note = Seed: VVGARGVGK (KRAS G12R)
YVGGRSVGI

SEQ ID NO: 47831 - protein, 9 aa, synthetic construct
  source 1..9: note = Seed: VVGARGVGK (KRAS G12R)
YVGGRSVGK

SEQ ID NO: 47832 - protein, 9 aa, synthetic construct
  source 1..9: note = Seed: VVGARGVGK (KRAS G12R)
YVGGRSVGL

SEQ ID NO: 47833 - protein, 9 aa, synthetic construct
  source 1..9: note = Seed: VVGARGVGK (KRAS G12R)
YVGGRSVGM

SEQ ID NO: 47834 - protein, 9 aa, synthetic construct
  source 1..9: note = Seed: VVGARGVGK (KRAS G12R)
YVGGRSVGN

SEQ ID NO: 47835 - protein, 9 aa, synthetic construct
  source 1..9: note = Seed: VVGARGVGK (KRAS G12R)
YVGGRSVGQ

SEQ ID NO: 47836 - protein, 9 aa, synthetic construct
  source 1..9: note = Seed: VVGARGVGK (KRAS G12R)
YVGGRSVGR

SEQ ID NO: 47837 - protein, 9 aa, synthetic construct
  source 1..9: note = Seed: VVGARGVGK (KRAS G12R)
YVGGRSVGS

SEQ ID NO: 47838 - protein, 9 aa, synthetic construct
  source 1..9: note = Seed: VVGARGVGK (KRAS G12R)
YVGGRSVGT

SEQ ID NO: 47839 - protein, 9 aa, synthetic construct
  source 1..9: note = Seed: VVGARGVGK (KRAS G12R)
YVGGRSVGV

SEQ ID NO: 47840 - protein, 9 aa, synthetic construct
  source 1..9: note = Seed: VVGARGVGK (KRAS G12R)
YVGGRSVGY

SEQ ID NO: 47841 - protein, 9 aa, synthetic construct
  source 1..9: note = Seed: VVGARGVGK (KRAS G12R)
YVGGRTVGA

SEQ ID NO: 47842 - protein, 9 aa, synthetic construct
  source 1..9: note = Seed: VVGARGVGK (KRAS G12R)
YVGGRTVGF

SEQ ID NO: 47843 - protein, 9 aa, synthetic construct
  source 1..9: note = Seed: VVGARGVGK (KRAS G12R)
YVGGRTVGG

SEQ ID NO: 47844 - protein, 9 aa, synthetic construct
  source 1..9: note = Seed: VVGARGVGK (KRAS G12R)
YVGGRTVGI

SEQ ID NO: 47845 - protein, 9 aa, synthetic construct
  source 1..9: note = Seed: VVGARGVGK (KRAS G12R)
YVGGRTVGL

SEQ ID NO: 47846 - protein, 9 aa, synthetic construct
  source 1..9: note = Seed: VVGARGVGK (KRAS G12R)
YVGGRTVGM

SEQ ID NO: 47847 - protein, 9 aa, synthetic construct
  source 1..9: note = Seed: VVGARGVGK (KRAS G12R)
YVGGRTVGN

SEQ ID NO: 47848 - protein, 9 aa, synthetic construct
  source 1..9: note = Seed: VVGARGVGK (KRAS G12R)
YVGGRTVGR

SEQ ID NO: 47849 - protein, 9 aa, synthetic construct
  source 1..9: note = Seed: VVGARGVGK (KRAS G12R)
YVGGRTVGS

SEQ ID NO: 47850 - protein, 9 aa, synthetic construct
  source 1..9: note = Seed: VVGARGVGK (KRAS G12R)
YVGGRTVGT

SEQ ID NO: 47851 - protein, 9 aa, synthetic construct
  source 1..9: note = Seed: VVGARGVGK (KRAS G12R)
YVGGRTVGV

SEQ ID NO: 47852 - protein, 9 aa, synthetic construct
  source 1..9: note = Seed: VVGARGVGK (KRAS G12R)
YVGGRTVGY

SEQ ID NO: 47853 - protein, 9 aa, synthetic construct
  source 1..9: note = Seed: VVGARGVGK (KRAS G12R)
YVGGRVVGA

SEQ ID NO: 47854 - protein, 9 aa, synthetic construct
  source 1..9: note = Seed: VVGARGVGK (KRAS G12R)
YVGGRVVGC

SEQ ID NO: 47855 - protein, 9 aa, synthetic construct
  source 1..9: note = Seed: VVGARGVGK (KRAS G12R)
YVGGRVVGD

SEQ ID NO: 47856 - protein, 9 aa, synthetic construct
  source 1..9: note = Seed: VVGARGVGK (KRAS G12R)
YVGGRVVGE

SEQ ID NO: 47857 - protein, 9 aa, synthetic construct
  source 1..9: note = Seed: VVGARGVGK (KRAS G12R)
YVGGRVVGF

SEQ ID NO: 47858 - protein, 9 aa, synthetic construct
  source 1..9: note = Seed: VVGARGVGK (KRAS G12R)
YVGGRVVGG

SEQ ID NO: 47859 - protein, 9 aa, synthetic construct
  source 1..9: note = Seed: VVGARGVGK (KRAS G12R)
YVGGRVVGH

SEQ ID NO: 47860 - protein, 9 aa, synthetic construct
  source 1..9: note = Seed: VVGARGVGK (KRAS G12R)
YVGGRVVGI

SEQ ID NO: 47861 - protein, 9 aa, synthetic construct
  source 1..9: note = Seed: VVGARGVGK (KRAS G12R)
YVGGRVVGK

SEQ ID NO: 47862 - protein, 9 aa, synthetic construct
  source 1..9: note = Seed: VVGARGVGK (KRAS G12R)
YVGGRVVGL

SEQ ID NO: 47863 - protein, 9 aa, synthetic construct
  source 1..9: note = Seed: VVGARGVGK (KRAS G12R)
YVGGRVVGM

SEQ ID NO: 47864 - protein, 9 aa, synthetic construct
  source 1..9: note = Seed: VVGARGVGK (KRAS G12R)
YVGGRVVGN

SEQ ID NO: 47865 - protein, 9 aa, synthetic construct
  source 1..9: note = Seed: VVGARGVGK (KRAS G12R)
YVGGRVVGP

SEQ ID NO: 47866 - protein, 9 aa, synthetic construct
  source 1..9: note = Seed: VVGARGVGK (KRAS G12R)
YVGGRVVGQ

SEQ ID NO: 47867 - protein, 9 aa, synthetic construct
  source 1..9: note = Seed: VVGARGVGK (KRAS G12R)
YVGGRVVGR

SEQ ID NO: 47868 - protein, 9 aa, synthetic construct
  source 1..9: note = Seed: VVGARGVGK (KRAS G12R)
YVGGRVVGS

SEQ ID NO: 47869 - protein, 9 aa, synthetic construct
  source 1..9: note = Seed: VVGARGVGK (KRAS G12R)
YVGGRVVGT

SEQ ID NO: 47870 - protein, 9 aa, synthetic construct
  source 1..9: note = Seed: VVGARGVGK (KRAS G12R)
YVGGRVVGV

SEQ ID NO: 47871 - protein, 9 aa, synthetic construct
  source 1..9: note = Seed: VVGARGVGK (KRAS G12R)
YVGGRVVGY

SEQ ID NO: 47872 - protein, 9 aa, synthetic construct
  source 1..9: note = Seed: VVGARGVGK (KRAS G12R)
YVGGRYVGA

SEQ ID NO: 47873 - protein, 9 aa, synthetic construct
  source 1..9: note = Seed: VVGARGVGK (KRAS G12R)
YVGGRYVGI

SEQ ID NO: 47874 - protein, 9 aa, synthetic construct
  source 1..9: note = Seed: VVGARGVGK (KRAS G12R)
YVGGRYVGL

SEQ ID NO: 47875 - protein, 9 aa, synthetic construct
  source 1..9: note = Seed: VVGARGVGK (KRAS G12R)
YVGGRYVGV

SEQ ID NO: 47876 - protein, 9 aa, synthetic construct
  source 1..9: note = Seed: VVGARGVGK (KRAS G12R)
YVGHRAVGA

SEQ ID NO: 47877 - protein, 9 aa, synthetic construct
  source 1..9: note = Seed: VVGARGVGK (KRAS G12R)
YVGHRAVGC

SEQ ID NO: 47878 - protein, 9 aa, synthetic construct
  source 1..9: note = Seed: VVGARGVGK (KRAS G12R)
YVGHRAVGF

SEQ ID NO: 47879 - protein, 9 aa, synthetic construct
  source 1..9: note = Seed: VVGARGVGK (KRAS G12R)
YVGHRAVGG

SEQ ID NO: 47880 - protein, 9 aa, synthetic construct
  source 1..9: note = Seed: VVGARGVGK (KRAS G12R)
YVGHRAVGI

SEQ ID NO: 47881 - protein, 9 aa, synthetic construct
  source 1..9: note = Seed: VVGARGVGK (KRAS G12R)
YVGHRAVGL

SEQ ID NO: 47882 - protein, 9 aa, synthetic construct
  source 1..9: note = Seed: VVGARGVGK (KRAS G12R)
YVGHRAVGM

SEQ ID NO: 47883 - protein, 9 aa, synthetic construct
  source 1..9: note = Seed: VVGARGVGK (KRAS G12R)
YVGHRAVGN

SEQ ID NO: 47884 - protein, 9 aa, synthetic construct
  source 1..9: note = Seed: VVGARGVGK (KRAS G12R)
YVGHRAVGR

SEQ ID NO: 47885 - protein, 9 aa, synthetic construct
  source 1..9: note = Seed: VVGARGVGK (KRAS G12R)
YVGHRAVGS

SEQ ID NO: 47886 - protein, 9 aa, synthetic construct
  source 1..9: note = Seed: VVGARGVGK (KRAS G12R)
YVGHRAVGT

SEQ ID NO: 47887 - protein, 9 aa, synthetic construct
  source 1..9: note = Seed: VVGARGVGK (KRAS G12R)
YVGHRAVGV

SEQ ID NO: 47888 - protein, 9 aa, synthetic construct
  source 1..9: note = Seed: VVGARGVGK (KRAS G12R)
YVGHRAVGW

SEQ ID NO: 47889 - protein, 9 aa, synthetic construct
  source 1..9: note = Seed: VVGARGVGK (KRAS G12R)
YVGHRAVGY

SEQ ID NO: 47890 - protein, 9 aa, synthetic construct
  source 1..9: note = Seed: VVGARGVGK (KRAS G12R)
YVGHRGVGA

SEQ ID NO: 47891 - protein, 9 aa, synthetic construct
  source 1..9: note = Seed: VVGARGVGK (KRAS G12R)
YVGHRGVGF

SEQ ID NO: 47892 - protein, 9 aa, synthetic construct
  source 1..9: note = Seed: VVGARGVGK (KRAS G12R)
YVGHRGVGI

SEQ ID NO: 47893 - protein, 9 aa, synthetic construct
  source 1..9: note = Seed: VVGARGVGK (KRAS G12R)
YVGHRGVGL

SEQ ID NO: 47894 - protein, 9 aa, synthetic construct
  source 1..9: note = Seed: VVGARGVGK (KRAS G12R)
YVGHRGVGM

SEQ ID NO: 47895 - protein, 9 aa, synthetic construct
  source 1..9: note = Seed: VVGARGVGK (KRAS G12R)
YVGHRGVGS

SEQ ID NO: 47896 - protein, 9 aa, synthetic construct
  source 1..9: note = Seed: VVGARGVGK (KRAS G12R)
YVGHRGVGT

SEQ ID NO: 47897 - protein, 9 aa, synthetic construct
  source 1..9: note = Seed: VVGARGVGK (KRAS G12R)
YVGHRGVGV

SEQ ID NO: 47898 - protein, 9 aa, synthetic construct
  source 1..9: note = Seed: VVGARGVGK (KRAS G12R)
YVGHRIVGA

SEQ ID NO: 47899 - protein, 9 aa, synthetic construct
  source 1..9: note = Seed: VVGARGVGK (KRAS G12R)
YVGHRIVGI

SEQ ID NO: 47900 - protein, 9 aa, synthetic construct
  source 1..9: note = Seed: VVGARGVGK (KRAS G12R)
YVGHRIVGL

SEQ ID NO: 47901 - protein, 9 aa, synthetic construct
  source 1..9: note = Seed: VVGARGVGK (KRAS G12R)
YVGHRIVGM

SEQ ID NO: 47902 - protein, 9 aa, synthetic construct
  source 1..9: note = Seed: VVGARGVGK (KRAS G12R)
YVGHRIVGS

SEQ ID NO: 47903 - protein, 9 aa, synthetic construct
  source 1..9: note = Seed: VVGARGVGK (KRAS G12R)
YVGHRIVGV

SEQ ID NO: 47904 - protein, 9 aa, synthetic construct
  source 1..9: note = Seed: VVGARGVGK (KRAS G12R)
YVGHRKVGR

SEQ ID NO: 47905 - protein, 9 aa, synthetic construct
  source 1..9: note = Seed: VVGARGVGK (KRAS G12R)
YVGHRNVGA

SEQ ID NO: 47906 - protein, 9 aa, synthetic construct
  source 1..9: note = Seed: VVGARGVGK (KRAS G12R)
YVGHRNVGI

SEQ ID NO: 47907 - protein, 9 aa, synthetic construct
  source 1..9: note = Seed: VVGARGVGK (KRAS G12R)
YVGHRNVGL

SEQ ID NO: 47908 - protein, 9 aa, synthetic construct
  source 1..9: note = Seed: VVGARGVGK (KRAS G12R)
YVGHRNVGV

SEQ ID NO: 47909 - protein, 9 aa, synthetic construct
  source 1..9: note = Seed: VVGARGVGK (KRAS G12R)
YVGHRPVGA

SEQ ID NO: 47910 - protein, 9 aa, synthetic construct
  source 1..9: note = Seed: VVGARGVGK (KRAS G12R)
YVGHRPVGI

SEQ ID NO: 47911 - protein, 9 aa, synthetic construct
  source 1..9: note = Seed: VVGARGVGK (KRAS G12R)
YVGHRPVGL

SEQ ID NO: 47912 - protein, 9 aa, synthetic construct
  source 1..9: note = Seed: VVGARGVGK (KRAS G12R)
YVGHRPVGM

SEQ ID NO: 47913 - protein, 9 aa, synthetic construct
  source 1..9: note = Seed: VVGARGVGK (KRAS G12R)
YVGHRPVGS

SEQ ID NO: 47914 - protein, 9 aa, synthetic construct
  source 1..9: note = Seed: VVGARGVGK (KRAS G12R)
YVGHRPVGT

SEQ ID NO: 47915 - protein, 9 aa, synthetic construct
  source 1..9: note = Seed: VVGARGVGK (KRAS G12R)
YVGHRPVGV

SEQ ID NO: 47916 - protein, 9 aa, synthetic construct
  source 1..9: note = Seed: VVGARGVGK (KRAS G12R)
YVGHRRVGR

SEQ ID NO: 47917 - protein, 9 aa, synthetic construct
  source 1..9: note = Seed: VVGARGVGK (KRAS G12R)
YVGHRSVGA

SEQ ID NO: 47918 - protein, 9 aa, synthetic construct
  source 1..9: note = Seed: VVGARGVGK (KRAS G12R)
YVGHRSVGF

SEQ ID NO: 47919 - protein, 9 aa, synthetic construct
  source 1..9: note = Seed: VVGARGVGK (KRAS G12R)
YVGHRSVGI

SEQ ID NO: 47920 - protein, 9 aa, synthetic construct
  source 1..9: note = Seed: VVGARGVGK (KRAS G12R)
YVGHRSVGL

SEQ ID NO: 47921 - protein, 9 aa, synthetic construct
  source 1..9: note = Seed: VVGARGVGK (KRAS G12R)
YVGHRSVGM

SEQ ID NO: 47922 - protein, 9 aa, synthetic construct
  source 1..9: note = Seed: VVGARGVGK (KRAS G12R)
YVGHRSVGS

SEQ ID NO: 47923 - protein, 9 aa, synthetic construct
  source 1..9: note = Seed: VVGARGVGK (KRAS G12R)
YVGHRSVGT

SEQ ID NO: 47924 - protein, 9 aa, synthetic construct
  source 1..9: note = Seed: VVGARGVGK (KRAS G12R)
YVGHRSVGV

SEQ ID NO: 47925 - protein, 9 aa, synthetic construct
  source 1..9: note = Seed: VVGARGVGK (KRAS G12R)
YVGHRSVGY

SEQ ID NO: 47926 - protein, 9 aa, synthetic construct
  source 1..9: note = Seed: VVGARGVGK (KRAS G12R)
YVGHRTVGA

SEQ ID NO: 47927 - protein, 9 aa, synthetic construct
  source 1..9: note = Seed: VVGARGVGK (KRAS G12R)
YVGHRTVGF

SEQ ID NO: 47928 - protein, 9 aa, synthetic construct
  source 1..9: note = Seed: VVGARGVGK (KRAS G12R)
YVGHRTVGI

SEQ ID NO: 47929 - protein, 9 aa, synthetic construct
  source 1..9: note = Seed: VVGARGVGK (KRAS G12R)
YVGHRTVGL

SEQ ID NO: 47930 - protein, 9 aa, synthetic construct
  source 1..9: note = Seed: VVGARGVGK (KRAS G12R)
YVGHRTVGM

SEQ ID NO: 47931 - protein, 9 aa, synthetic construct
  source 1..9: note = Seed: VVGARGVGK (KRAS G12R)
YVGHRTVGV

SEQ ID NO: 47932 - protein, 9 aa, synthetic construct
  source 1..9: note = Seed: VVGARGVGK (KRAS G12R)
YVGHRVVGA

SEQ ID NO: 47933 - protein, 9 aa, synthetic construct
  source 1..9: note = Seed: VVGARGVGK (KRAS G12R)
YVGHRVVGI

SEQ ID NO: 47934 - protein, 9 aa, synthetic construct
  source 1..9: note = Seed: VVGARGVGK (KRAS G12R)
YVGHRVVGL

SEQ ID NO: 47935 - protein, 9 aa, synthetic construct
  source 1..9: note = Seed: VVGARGVGK (KRAS G12R)
YVGHRVVGM

SEQ ID NO: 47936 - protein, 9 aa, synthetic construct
  source 1..9: note = Seed: VVGARGVGK (KRAS G12R)
YVGHRVVGN

SEQ ID NO: 47937 - protein, 9 aa, synthetic construct
  source 1..9: note = Seed: VVGARGVGK (KRAS G12R)
YVGHRVVGS

SEQ ID NO: 47938 - protein, 9 aa, synthetic construct
  source 1..9: note = Seed: VVGARGVGK (KRAS G12R)
YVGHRVVGV

SEQ ID NO: 47939 - protein, 9 aa, synthetic construct
  source 1..9: note = Seed: VVGARGVGK (KRAS G12R)
YVGIRAVGA

SEQ ID NO: 47940 - protein, 9 aa, synthetic construct
  source 1..9: note = Seed: VVGARGVGK (KRAS G12R)
YVGIRAVGC

SEQ ID NO: 47941 - protein, 9 aa, synthetic construct
  source 1..9: note = Seed: VVGARGVGK (KRAS G12R)
YVGIRAVGD

SEQ ID NO: 47942 - protein, 9 aa, synthetic construct
  source 1..9: note = Seed: VVGARGVGK (KRAS G12R)
YVGIRAVGE

SEQ ID NO: 47943 - protein, 9 aa, synthetic construct
  source 1..9: note = Seed: VVGARGVGK (KRAS G12R)
YVGIRAVGF

SEQ ID NO: 47944 - protein, 9 aa, synthetic construct
  source 1..9: note = Seed: VVGARGVGK (KRAS G12R)
YVGIRAVGG

SEQ ID NO: 47945 - protein, 9 aa, synthetic construct
  source 1..9: note = Seed: VVGARGVGK (KRAS G12R)
YVGIRAVGH

SEQ ID NO: 47946 - protein, 9 aa, synthetic construct
  source 1..9: note = Seed: VVGARGVGK (KRAS G12R)
YVGIRAVGI

SEQ ID NO: 47947 - protein, 9 aa, synthetic construct
  source 1..9: note = Seed: VVGARGVGK (KRAS G12R)
YVGIRAVGK

SEQ ID NO: 47948 - protein, 9 aa, synthetic construct
  source 1..9: note = Seed: VVGARGVGK (KRAS G12R)
YVGIRAVGL

SEQ ID NO: 47949 - protein, 9 aa, synthetic construct
  source 1..9: note = Seed: VVGARGVGK (KRAS G12R)
YVGIRAVGM

SEQ ID NO: 47950 - protein, 9 aa, synthetic construct
  source 1..9: note = Seed: VVGARGVGK (KRAS G12R)
YVGIRAVGN

SEQ ID NO: 47951 - protein, 9 aa, synthetic construct
  source 1..9: note = Seed: VVGARGVGK (KRAS G12R)
YVGIRAVGP

SEQ ID NO: 47952 - protein, 9 aa, synthetic construct
  source 1..9: note = Seed: VVGARGVGK (KRAS G12R)
YVGIRAVGQ

SEQ ID NO: 47953 - protein, 9 aa, synthetic construct
  source 1..9: note = Seed: VVGARGVGK (KRAS G12R)
YVGIRAVGR

SEQ ID NO: 47954 - protein, 9 aa, synthetic construct
  source 1..9: note = Seed: VVGARGVGK (KRAS G12R)
YVGIRAVGS

SEQ ID NO: 47955 - protein, 9 aa, synthetic construct
  source 1..9: note = Seed: VVGARGVGK (KRAS G12R)
YVGIRAVGT

SEQ ID NO: 47956 - protein, 9 aa, synthetic construct
  source 1..9: note = Seed: VVGARGVGK (KRAS G12R)
YVGIRAVGV

SEQ ID NO: 47957 - protein, 9 aa, synthetic construct
  source 1..9: note = Seed: VVGARGVGK (KRAS G12R)
YVGIRAVGW

SEQ ID NO: 47958 - protein, 9 aa, synthetic construct
  source 1..9: note = Seed: VVGARGVGK (KRAS G12R)
YVGIRAVGY

SEQ ID NO: 47959 - protein, 9 aa, synthetic construct
  source 1..9: note = Seed: VVGARGVGK (KRAS G12R)
YVGIRCVGA

SEQ ID NO: 47960 - protein, 9 aa, synthetic construct
  source 1..9: note = Seed: VVGARGVGK (KRAS G12R)
YVGIRCVGI

SEQ ID NO: 47961 - protein, 9 aa, synthetic construct
  source 1..9: note = Seed: VVGARGVGK (KRAS G12R)
YVGIRCVGL

SEQ ID NO: 47962 - protein, 9 aa, synthetic construct
  source 1..9: note = Seed: VVGARGVGK (KRAS G12R)
YVGIRCVGN

SEQ ID NO: 47963 - protein, 9 aa, synthetic construct
  source 1..9: note = Seed: VVGARGVGK (KRAS G12R)
YVGIRCVGS

SEQ ID NO: 47964 - protein, 9 aa, synthetic construct
  source 1..9: note = Seed: VVGARGVGK (KRAS G12R)
YVGIRCVGT

SEQ ID NO: 47965 - protein, 9 aa, synthetic construct
  source 1..9: note = Seed: VVGARGVGK (KRAS G12R)
YVGIRCVGV

SEQ ID NO: 47966 - protein, 9 aa, synthetic construct
  source 1..9: note = Seed: VVGARGVGK (KRAS G12R)
YVGIRDVGA

SEQ ID NO: 47967 - protein, 9 aa, synthetic construct
  source 1..9: note = Seed: VVGARGVGK (KRAS G12R)
YVGIRDVGI

SEQ ID NO: 47968 - protein, 9 aa, synthetic construct
  source 1..9: note = Seed: VVGARGVGK (KRAS G12R)
YVGIRDVGL

SEQ ID NO: 47969 - protein, 9 aa, synthetic construct
  source 1..9: note = Seed: VVGARGVGK (KRAS G12R)
YVGIRDVGN

SEQ ID NO: 47970 - protein, 9 aa, synthetic construct
  source 1..9: note = Seed: VVGARGVGK (KRAS G12R)
YVGIRDVGV

SEQ ID NO: 47971 - protein, 9 aa, synthetic construct
  source 1..9: note = Seed: VVGARGVGK (KRAS G12R)
YVGIREVGA

SEQ ID NO: 47972 - protein, 9 aa, synthetic construct
  source 1..9: note = Seed: VVGARGVGK (KRAS G12R)
YVGIREVGG

SEQ ID NO: 47973 - protein, 9 aa, synthetic construct
  source 1..9: note = Seed: VVGARGVGK (KRAS G12R)
YVGIREVGI

SEQ ID NO: 47974 - protein, 9 aa, synthetic construct
  source 1..9: note = Seed: VVGARGVGK (KRAS G12R)
YVGIREVGL

SEQ ID NO: 47975 - protein, 9 aa, synthetic construct
  source 1..9: note = Seed: VVGARGVGK (KRAS G12R)
YVGIREVGM

SEQ ID NO: 47976 - protein, 9 aa, synthetic construct
  source 1..9: note = Seed: VVGARGVGK (KRAS G12R)
YVGIREVGN

SEQ ID NO: 47977 - protein, 9 aa, synthetic construct
  source 1..9: note = Seed: VVGARGVGK (KRAS G12R)
YVGIREVGS

SEQ ID NO: 47978 - protein, 9 aa, synthetic construct
  source 1..9: note = Seed: VVGARGVGK (KRAS G12R)
YVGIREVGT

SEQ ID NO: 47979 - protein, 9 aa, synthetic construct
  source 1..9: note = Seed: VVGARGVGK (KRAS G12R)
YVGIREVGV

SEQ ID NO: 47980 - protein, 9 aa, synthetic construct
  source 1..9: note = Seed: VVGARGVGK (KRAS G12R)
YVGIRGVGA

SEQ ID NO: 47981 - protein, 9 aa, synthetic construct
  source 1..9: note = Seed: VVGARGVGK (KRAS G12R)
YVGIRGVGC

SEQ ID NO: 47982 - protein, 9 aa, synthetic construct
  source 1..9: note = Seed: VVGARGVGK (KRAS G12R)
YVGIRGVGD

SEQ ID NO: 47983 - protein, 9 aa, synthetic construct
  source 1..9: note = Seed: VVGARGVGK (KRAS G12R)
YVGIRGVGE

SEQ ID NO: 47984 - protein, 9 aa, synthetic construct
  source 1..9: note = Seed: VVGARGVGK (KRAS G12R)
YVGIRGVGF

SEQ ID NO: 47985 - protein, 9 aa, synthetic construct
  source 1..9: note = Seed: VVGARGVGK (KRAS G12R)
YVGIRGVGG

SEQ ID NO: 47986 - protein, 9 aa, synthetic construct
  source 1..9: note = Seed: VVGARGVGK (KRAS G12R)
YVGIRGVGH

SEQ ID NO: 47987 - protein, 9 aa, synthetic construct
  source 1..9: note = Seed: VVGARGVGK (KRAS G12R)
YVGIRGVGI

SEQ ID NO: 47988 - protein, 9 aa, synthetic construct
  source 1..9: note = Seed: VVGARGVGK (KRAS G12R)
YVGIRGVGK

SEQ ID NO: 47989 - protein, 9 aa, synthetic construct
  source 1..9: note = Seed: VVGARGVGK (KRAS G12R)
YVGIRGVGL

SEQ ID NO: 47990 - protein, 9 aa, synthetic construct
  source 1..9: note = Seed: VVGARGVGK (KRAS G12R)
YVGIRGVGM

SEQ ID NO: 47991 - protein, 9 aa, synthetic construct
  source 1..9: note = Seed: VVGARGVGK (KRAS G12R)
YVGIRGVGN

SEQ ID NO: 47992 - protein, 9 aa, synthetic construct
  source 1..9: note = Seed: VVGARGVGK (KRAS G12R)
YVGIRGVGP

SEQ ID NO: 47993 - protein, 9 aa, synthetic construct
  source 1..9: note = Seed: VVGARGVGK (KRAS G12R)
YVGIRGVGQ

SEQ ID NO: 47994 - protein, 9 aa, synthetic construct
  source 1..9: note = Seed: VVGARGVGK (KRAS G12R)
YVGIRGVGR

SEQ ID NO: 47995 - protein, 9 aa, synthetic construct
  source 1..9: note = Seed: VVGARGVGK (KRAS G12R)
YVGIRGVGS

SEQ ID NO: 47996 - protein, 9 aa, synthetic construct
  source 1..9: note = Seed: VVGARGVGK (KRAS G12R)
YVGIRGVGT

SEQ ID NO: 47997 - protein, 9 aa, synthetic construct
  source 1..9: note = Seed: VVGARGVGK (KRAS G12R)
YVGIRGVGV

SEQ ID NO: 47998 - protein, 9 aa, synthetic construct
  source 1..9: note = Seed: VVGARGVGK (KRAS G12R)
YVGIRGVGW

SEQ ID NO: 47999 - protein, 9 aa, synthetic construct
  source 1..9: note = Seed: VVGARGVGK (KRAS G12R)
YVGIRGVGY

SEQ ID NO: 48000 - protein, 9 aa, synthetic construct
  source 1..9: note = Seed: VVGARGVGK (KRAS G12R)
YVGIRHVGA

SEQ ID NO: 48001 - protein, 9 aa, synthetic construct
  source 1..9: note = Seed: VVGARGVGK (KRAS G12R)
YVGIRHVGF

SEQ ID NO: 48002 - protein, 9 aa, synthetic construct
  source 1..9: note = Seed: VVGARGVGK (KRAS G12R)
YVGIRHVGI

SEQ ID NO: 48003 - protein, 9 aa, synthetic construct
  source 1..9: note = Seed: VVGARGVGK (KRAS G12R)
YVGIRHVGL

SEQ ID NO: 48004 - protein, 9 aa, synthetic construct
  source 1..9: note = Seed: VVGARGVGK (KRAS G12R)
YVGIRHVGM

SEQ ID NO: 48005 - protein, 9 aa, synthetic construct
  source 1..9: note = Seed: VVGARGVGK (KRAS G12R)
YVGIRHVGN

SEQ ID NO: 48006 - protein, 9 aa, synthetic construct
  source 1..9: note = Seed: VVGARGVGK (KRAS G12R)
YVGIRHVGQ

SEQ ID NO: 48007 - protein, 9 aa, synthetic construct
  source 1..9: note = Seed: VVGARGVGK (KRAS G12R)
YVGIRHVGS

SEQ ID NO: 48008 - protein, 9 aa, synthetic construct
  source 1..9: note = Seed: VVGARGVGK (KRAS G12R)
YVGIRHVGT

SEQ ID NO: 48009 - protein, 9 aa, synthetic construct
  source 1..9: note = Seed: VVGARGVGK (KRAS G12R)
YVGIRHVGV

SEQ ID NO: 48010 - protein, 9 aa, synthetic construct
  source 1..9: note = Seed: VVGARGVGK (KRAS G12R)
YVGIRHVGW

SEQ ID NO: 48011 - protein, 9 aa, synthetic construct
  source 1..9: note = Seed: VVGARGVGK (KRAS G12R)
YVGIRHVGY

SEQ ID NO: 48012 - protein, 9 aa, synthetic construct
  source 1..9: note = Seed: VVGARGVGK (KRAS G12R)
YVGIRIVGA

SEQ ID NO: 48013 - protein, 9 aa, synthetic construct
  source 1..9: note = Seed: VVGARGVGK (KRAS G12R)
YVGIRIVGD

SEQ ID NO: 48014 - protein, 9 aa, synthetic construct
  source 1..9: note = Seed: VVGARGVGK (KRAS G12R)
YVGIRIVGE

SEQ ID NO: 48015 - protein, 9 aa, synthetic construct
  source 1..9: note = Seed: VVGARGVGK (KRAS G12R)
YVGIRIVGG

SEQ ID NO: 48016 - protein, 9 aa, synthetic construct
  source 1..9: note = Seed: VVGARGVGK (KRAS G12R)
YVGIRIVGH

SEQ ID NO: 48017 - protein, 9 aa, synthetic construct
  source 1..9: note = Seed: VVGARGVGK (KRAS G12R)
YVGIRIVGI

SEQ ID NO: 48018 - protein, 9 aa, synthetic construct
  source 1..9: note = Seed: VVGARGVGK (KRAS G12R)
YVGIRIVGK

SEQ ID NO: 48019 - protein, 9 aa, synthetic construct
  source 1..9: note = Seed: VVGARGVGK (KRAS G12R)
YVGIRIVGL

SEQ ID NO: 48020 - protein, 9 aa, synthetic construct
  source 1..9: note = Seed: VVGARGVGK (KRAS G12R)
YVGIRIVGM

SEQ ID NO: 48021 - protein, 9 aa, synthetic construct
  source 1..9: note = Seed: VVGARGVGK (KRAS G12R)
YVGIRIVGN

SEQ ID NO: 48022 - protein, 9 aa, synthetic construct
  source 1..9: note = Seed: VVGARGVGK (KRAS G12R)
YVGIRIVGQ

SEQ ID NO: 48023 - protein, 9 aa, synthetic construct
  source 1..9: note = Seed: VVGARGVGK (KRAS G12R)
YVGIRIVGR

SEQ ID NO: 48024 - protein, 9 aa, synthetic construct
  source 1..9: note = Seed: VVGARGVGK (KRAS G12R)
YVGIRIVGS

SEQ ID NO: 48025 - protein, 9 aa, synthetic construct
  source 1..9: note = Seed: VVGARGVGK (KRAS G12R)
YVGIRIVGT

SEQ ID NO: 48026 - protein, 9 aa, synthetic construct
  source 1..9: note = Seed: VVGARGVGK (KRAS G12R)
YVGIRIVGV

SEQ ID NO: 48027 - protein, 9 aa, synthetic construct
  source 1..9: note = Seed: VVGARGVGK (KRAS G12R)
YVGIRKVGA

SEQ ID NO: 48028 - protein, 9 aa, synthetic construct
  source 1..9: note = Seed: VVGARGVGK (KRAS G12R)
YVGIRKVGI

SEQ ID NO: 48029 - protein, 9 aa, synthetic construct
  source 1..9: note = Seed: VVGARGVGK (KRAS G12R)
YVGIRKVGL

SEQ ID NO: 48030 - protein, 9 aa, synthetic construct
  source 1..9: note = Seed: VVGARGVGK (KRAS G12R)
YVGIRKVGM

SEQ ID NO: 48031 - protein, 9 aa, synthetic construct
  source 1..9: note = Seed: VVGARGVGK (KRAS G12R)
YVGIRKVGS

SEQ ID NO: 48032 - protein, 9 aa, synthetic construct
  source 1..9: note = Seed: VVGARGVGK (KRAS G12R)
YVGIRKVGT

SEQ ID NO: 48033 - protein, 9 aa, synthetic construct
  source 1..9: note = Seed: VVGARGVGK (KRAS G12R)
YVGIRKVGV

SEQ ID NO: 48034 - protein, 9 aa, synthetic construct
  source 1..9: note = Seed: VVGARGVGK (KRAS G12R)
YVGIRKVGW

SEQ ID NO: 48035 - protein, 9 aa, synthetic construct
  source 1..9: note = Seed: VVGARGVGK (KRAS G12R)
YVGIRKVGY

SEQ ID NO: 48036 - protein, 9 aa, synthetic construct
  source 1..9: note = Seed: VVGARGVGK (KRAS G12R)
YVGIRLVGA

SEQ ID NO: 48037 - protein, 9 aa, synthetic construct
  source 1..9: note = Seed: VVGARGVGK (KRAS G12R)
YVGIRLVGG

SEQ ID NO: 48038 - protein, 9 aa, synthetic construct
  source 1..9: note = Seed: VVGARGVGK (KRAS G12R)
YVGIRLVGH

SEQ ID NO: 48039 - protein, 9 aa, synthetic construct
  source 1..9: note = Seed: VVGARGVGK (KRAS G12R)
YVGIRLVGI

SEQ ID NO: 48040 - protein, 9 aa, synthetic construct
  source 1..9: note = Seed: VVGARGVGK (KRAS G12R)
YVGIRLVGL

SEQ ID NO: 48041 - protein, 9 aa, synthetic construct
  source 1..9: note = Seed: VVGARGVGK (KRAS G12R)
YVGIRLVGM

SEQ ID NO: 48042 - protein, 9 aa, synthetic construct
  source 1..9: note = Seed: VVGARGVGK (KRAS G12R)
YVGIRLVGN

SEQ ID NO: 48043 - protein, 9 aa, synthetic construct
  source 1..9: note = Seed: VVGARGVGK (KRAS G12R)
YVGIRLVGQ

SEQ ID NO: 48044 - protein, 9 aa, synthetic construct
  source 1..9: note = Seed: VVGARGVGK (KRAS G12R)
YVGIRLVGS

SEQ ID NO: 48045 - protein, 9 aa, synthetic construct
  source 1..9: note = Seed: VVGARGVGK (KRAS G12R)
YVGIRLVGV

SEQ ID NO: 48046 - protein, 9 aa, synthetic construct
  source 1..9: note = Seed: VVGARGVGK (KRAS G12R)
YVGIRMVGG

SEQ ID NO: 48047 - protein, 9 aa, synthetic construct
  source 1..9: note = Seed: VVGARGVGK (KRAS G12R)
YVGIRMVGH

SEQ ID NO: 48048 - protein, 9 aa, synthetic construct
  source 1..9: note = Seed: VVGARGVGK (KRAS G12R)
YVGIRMVGI

SEQ ID NO: 48049 - protein, 9 aa, synthetic construct
  source 1..9: note = Seed: VVGARGVGK (KRAS G12R)
YVGIRMVGL

SEQ ID NO: 48050 - protein, 9 aa, synthetic construct
  source 1..9: note = Seed: VVGARGVGK (KRAS G12R)
YVGIRMVGM

SEQ ID NO: 48051 - protein, 9 aa, synthetic construct
  source 1..9: note = Seed: VVGARGVGK (KRAS G12R)
YVGIRMVGN

SEQ ID NO: 48052 - protein, 9 aa, synthetic construct
  source 1..9: note = Seed: VVGARGVGK (KRAS G12R)
YVGIRMVGQ

SEQ ID NO: 48053 - protein, 9 aa, synthetic construct
  source 1..9: note = Seed: VVGARGVGK (KRAS G12R)
YVGIRMVGR

SEQ ID NO: 48054 - protein, 9 aa, synthetic construct
  source 1..9: note = Seed: VVGARGVGK (KRAS G12R)
YVGIRMVGS

SEQ ID NO: 48055 - protein, 9 aa, synthetic construct
  source 1..9: note = Seed: VVGARGVGK (KRAS G12R)
YVGIRNVGA

SEQ ID NO: 48056 - protein, 9 aa, synthetic construct
  source 1..9: note = Seed: VVGARGVGK (KRAS G12R)
YVGIRNVGC

SEQ ID NO: 48057 - protein, 9 aa, synthetic construct
  source 1..9: note = Seed: VVGARGVGK (KRAS G12R)
YVGIRNVGD

SEQ ID NO: 48058 - protein, 9 aa, synthetic construct
  source 1..9: note = Seed: VVGARGVGK (KRAS G12R)
YVGIRNVGE

SEQ ID NO: 48059 - protein, 9 aa, synthetic construct
  source 1..9: note = Seed: VVGARGVGK (KRAS G12R)
YVGIRNVGF

SEQ ID NO: 48060 - protein, 9 aa, synthetic construct
  source 1..9: note = Seed: VVGARGVGK (KRAS G12R)
YVGIRNVGG

SEQ ID NO: 48061 - protein, 9 aa, synthetic construct
  source 1..9: note = Seed: VVGARGVGK (KRAS G12R)
YVGIRNVGH

SEQ ID NO: 48062 - protein, 9 aa, synthetic construct
  source 1..9: note = Seed: VVGARGVGK (KRAS G12R)
YVGIRNVGI

SEQ ID NO: 48063 - protein, 9 aa, synthetic construct
  source 1..9: note = Seed: VVGARGVGK (KRAS G12R)
YVGIRNVGK

SEQ ID NO: 48064 - protein, 9 aa, synthetic construct
  source 1..9: note = Seed: VVGARGVGK (KRAS G12R)
YVGIRNVGL

SEQ ID NO: 48065 - protein, 9 aa, synthetic construct
  source 1..9: note = Seed: VVGARGVGK (KRAS G12R)
YVGIRNVGM

SEQ ID NO: 48066 - protein, 9 aa, synthetic construct
  source 1..9: note = Seed: VVGARGVGK (KRAS G12R)
YVGIRNVGN

SEQ ID NO: 48067 - protein, 9 aa, synthetic construct
  source 1..9: note = Seed: VVGARGVGK (KRAS G12R)
YVGIRNVGP

SEQ ID NO: 48068 - protein, 9 aa, synthetic construct
  source 1..9: note = Seed: VVGARGVGK (KRAS G12R)
YVGIRNVGQ

SEQ ID NO: 48069 - protein, 9 aa, synthetic construct
  source 1..9: note = Seed: VVGARGVGK (KRAS G12R)
YVGIRNVGR

SEQ ID NO: 48070 - protein, 9 aa, synthetic construct
  source 1..9: note = Seed: VVGARGVGK (KRAS G12R)
YVGIRNVGS

SEQ ID NO: 48071 - protein, 9 aa, synthetic construct
  source 1..9: note = Seed: VVGARGVGK (KRAS G12R)
YVGIRNVGT

SEQ ID NO: 48072 - protein, 9 aa, synthetic construct
  source 1..9: note = Seed: VVGARGVGK (KRAS G12R)
YVGIRNVGV

SEQ ID NO: 48073 - protein, 9 aa, synthetic construct
  source 1..9: note = Seed: VVGARGVGK (KRAS G12R)
YVGIRNVGY

SEQ ID NO: 48074 - protein, 9 aa, synthetic construct
  source 1..9: note = Seed: VVGARGVGK (KRAS G12R)
YVGIRPVGA

SEQ ID NO: 48075 - protein, 9 aa, synthetic construct
  source 1..9: note = Seed: VVGARGVGK (KRAS G12R)
YVGIRPVGC

SEQ ID NO: 48076 - protein, 9 aa, synthetic construct
  source 1..9: note = Seed: VVGARGVGK (KRAS G12R)
YVGIRPVGD

SEQ ID NO: 48077 - protein, 9 aa, synthetic construct
  source 1..9: note = Seed: VVGARGVGK (KRAS G12R)
YVGIRPVGE

SEQ ID NO: 48078 - protein, 9 aa, synthetic construct
  source 1..9: note = Seed: VVGARGVGK (KRAS G12R)
YVGIRPVGF

SEQ ID NO: 48079 - protein, 9 aa, synthetic construct
  source 1..9: note = Seed: VVGARGVGK (KRAS G12R)
YVGIRPVGG

SEQ ID NO: 48080 - protein, 9 aa, synthetic construct
  source 1..9: note = Seed: VVGARGVGK (KRAS G12R)
YVGIRPVGH

SEQ ID NO: 48081 - protein, 9 aa, synthetic construct
  source 1..9: note = Seed: VVGARGVGK (KRAS G12R)
YVGIRPVGI

SEQ ID NO: 48082 - protein, 9 aa, synthetic construct
  source 1..9: note = Seed: VVGARGVGK (KRAS G12R)
YVGIRPVGK

SEQ ID NO: 48083 - protein, 9 aa, synthetic construct
  source 1..9: note = Seed: VVGARGVGK (KRAS G12R)
YVGIRPVGL

SEQ ID NO: 48084 - protein, 9 aa, synthetic construct
  source 1..9: note = Seed: VVGARGVGK (KRAS G12R)
YVGIRPVGM

SEQ ID NO: 48085 - protein, 9 aa, synthetic construct
  source 1..9: note = Seed: VVGARGVGK (KRAS G12R)
YVGIRPVGN

SEQ ID NO: 48086 - protein, 9 aa, synthetic construct
  source 1..9: note = Seed: VVGARGVGK (KRAS G12R)
YVGIRPVGP

SEQ ID NO: 48087 - protein, 9 aa, synthetic construct
  source 1..9: note = Seed: VVGARGVGK (KRAS G12R)
YVGIRPVGQ

SEQ ID NO: 48088 - protein, 9 aa, synthetic construct
  source 1..9: note = Seed: VVGARGVGK (KRAS G12R)
YVGIRPVGR

SEQ ID NO: 48089 - protein, 9 aa, synthetic construct
  source 1..9: note = Seed: VVGARGVGK (KRAS G12R)
YVGIRPVGS

SEQ ID NO: 48090 - protein, 9 aa, synthetic construct
  source 1..9: note = Seed: VVGARGVGK (KRAS G12R)
YVGIRPVGT

SEQ ID NO: 48091 - protein, 9 aa, synthetic construct
  source 1..9: note = Seed: VVGARGVGK (KRAS G12R)
YVGIRPVGV

SEQ ID NO: 48092 - protein, 9 aa, synthetic construct
  source 1..9: note = Seed: VVGARGVGK (KRAS G12R)
YVGIRPVGW

SEQ ID NO: 48093 - protein, 9 aa, synthetic construct
  source 1..9: note = Seed: VVGARGVGK (KRAS G12R)
YVGIRPVGY

SEQ ID NO: 48094 - protein, 9 aa, synthetic construct
  source 1..9: note = Seed: VVGARGVGK (KRAS G12R)
YVGIRQVGA

SEQ ID NO: 48095 - protein, 9 aa, synthetic construct
  source 1..9: note = Seed: VVGARGVGK (KRAS G12R)
YVGIRQVGF

SEQ ID NO: 48096 - protein, 9 aa, synthetic construct
  source 1..9: note = Seed: VVGARGVGK (KRAS G12R)
YVGIRQVGI

SEQ ID NO: 48097 - protein, 9 aa, synthetic construct
  source 1..9: note = Seed: VVGARGVGK (KRAS G12R)
YVGIRQVGL

SEQ ID NO: 48098 - protein, 9 aa, synthetic construct
  source 1..9: note = Seed: VVGARGVGK (KRAS G12R)
YVGIRQVGM

SEQ ID NO: 48099 - protein, 9 aa, synthetic construct
  source 1..9: note = Seed: VVGARGVGK (KRAS G12R)
YVGIRQVGN

SEQ ID NO: 48100 - protein, 9 aa, synthetic construct
  source 1..9: note = Seed: VVGARGVGK (KRAS G12R)
YVGIRQVGS

SEQ ID NO: 48101 - protein, 9 aa, synthetic construct
  source 1..9: note = Seed: VVGARGVGK (KRAS G12R)
YVGIRQVGT

SEQ ID NO: 48102 - protein, 9 aa, synthetic construct
  source 1..9: note = Seed: VVGARGVGK (KRAS G12R)
YVGIRQVGV

SEQ ID NO: 48103 - protein, 9 aa, synthetic construct
  source 1..9: note = Seed: VVGARGVGK (KRAS G12R)
YVGIRQVGY

SEQ ID NO: 48104 - protein, 9 aa, synthetic construct
  source 1..9: note = Seed: VVGARGVGK (KRAS G12R)
YVGIRRVGA

SEQ ID NO: 48105 - protein, 9 aa, synthetic construct
  source 1..9: note = Seed: VVGARGVGK (KRAS G12R)
YVGIRRVGF

SEQ ID NO: 48106 - protein, 9 aa, synthetic construct
  source 1..9: note = Seed: VVGARGVGK (KRAS G12R)
YVGIRRVGG

SEQ ID NO: 48107 - protein, 9 aa, synthetic construct
  source 1..9: note = Seed: VVGARGVGK (KRAS G12R)
YVGIRRVGI

SEQ ID NO: 48108 - protein, 9 aa, synthetic construct
  source 1..9: note = Seed: VVGARGVGK (KRAS G12R)
YVGIRRVGL

SEQ ID NO: 48109 - protein, 9 aa, synthetic construct
  source 1..9: note = Seed: VVGARGVGK (KRAS G12R)
YVGIRRVGM

SEQ ID NO: 48110 - protein, 9 aa, synthetic construct
  source 1..9: note = Seed: VVGARGVGK (KRAS G12R)
YVGIRRVGR

SEQ ID NO: 48111 - protein, 9 aa, synthetic construct
  source 1..9: note = Seed: VVGARGVGK (KRAS G12R)
YVGIRRVGS

SEQ ID NO: 48112 - protein, 9 aa, synthetic construct
  source 1..9: note = Seed: VVGARGVGK (KRAS G12R)
YVGIRRVGT

SEQ ID NO: 48113 - protein, 9 aa, synthetic construct
  source 1..9: note = Seed: VVGARGVGK (KRAS G12R)
YVGIRRVGV

SEQ ID NO: 48114 - protein, 9 aa, synthetic construct
  source 1..9: note = Seed: VVGARGVGK (KRAS G12R)
YVGIRRVGW

SEQ ID NO: 48115 - protein, 9 aa, synthetic construct
  source 1..9: note = Seed: VVGARGVGK (KRAS G12R)
YVGIRRVGY

SEQ ID NO: 48116 - protein, 9 aa, synthetic construct
  source 1..9: note = Seed: VVGARGVGK (KRAS G12R)
YVGIRSVGA

SEQ ID NO: 48117 - protein, 9 aa, synthetic construct
  source 1..9: note = Seed: VVGARGVGK (KRAS G12R)
YVGIRSVGC

SEQ ID NO: 48118 - protein, 9 aa, synthetic construct
  source 1..9: note = Seed: VVGARGVGK (KRAS G12R)
YVGIRSVGD

SEQ ID NO: 48119 - protein, 9 aa, synthetic construct
  source 1..9: note = Seed: VVGARGVGK (KRAS G12R)
YVGIRSVGE

SEQ ID NO: 48120 - protein, 9 aa, synthetic construct
  source 1..9: note = Seed: VVGARGVGK (KRAS G12R)
YVGIRSVGF

SEQ ID NO: 48121 - protein, 9 aa, synthetic construct
  source 1..9: note = Seed: VVGARGVGK (KRAS G12R)
YVGIRSVGG

SEQ ID NO: 48122 - protein, 9 aa, synthetic construct
  source 1..9: note = Seed: VVGARGVGK (KRAS G12R)
YVGIRSVGH

SEQ ID NO: 48123 - protein, 9 aa, synthetic construct
  source 1..9: note = Seed: VVGARGVGK (KRAS G12R)
YVGIRSVGI

SEQ ID NO: 48124 - protein, 9 aa, synthetic construct
  source 1..9: note = Seed: VVGARGVGK (KRAS G12R)
YVGIRSVGK

SEQ ID NO: 48125 - protein, 9 aa, synthetic construct
  source 1..9: note = Seed: VVGARGVGK (KRAS G12R)
YVGIRSVGL

SEQ ID NO: 48126 - protein, 9 aa, synthetic construct
  source 1..9: note = Seed: VVGARGVGK (KRAS G12R)
YVGIRSVGM

SEQ ID NO: 48127 - protein, 9 aa, synthetic construct
  source 1..9: note = Seed: VVGARGVGK (KRAS G12R)
YVGIRSVGN

SEQ ID NO: 48128 - protein, 9 aa, synthetic construct
  source 1..9: note = Seed: VVGARGVGK (KRAS G12R)
YVGIRSVGP

SEQ ID NO: 48129 - protein, 9 aa, synthetic construct
  source 1..9: note = Seed: VVGARGVGK (KRAS G12R)
YVGIRSVGQ

SEQ ID NO: 48130 - protein, 9 aa, synthetic construct
  source 1..9: note = Seed: VVGARGVGK (KRAS G12R)
YVGIRSVGR

SEQ ID NO: 48131 - protein, 9 aa, synthetic construct
  source 1..9: note = Seed: VVGARGVGK (KRAS G12R)
YVGIRSVGS

SEQ ID NO: 48132 - protein, 9 aa, synthetic construct
  source 1..9: note = Seed: VVGARGVGK (KRAS G12R)
YVGIRSVGT

SEQ ID NO: 48133 - protein, 9 aa, synthetic construct
  source 1..9: note = Seed: VVGARGVGK (KRAS G12R)
YVGIRSVGV

SEQ ID NO: 48134 - protein, 9 aa, synthetic construct
  source 1..9: note = Seed: VVGARGVGK (KRAS G12R)
YVGIRSVGW

SEQ ID NO: 48135 - protein, 9 aa, synthetic construct
  source 1..9: note = Seed: VVGARGVGK (KRAS G12R)
YVGIRSVGY

SEQ ID NO: 48136 - protein, 9 aa, synthetic construct
  source 1..9: note = Seed: VVGARGVGK (KRAS G12R)
YVGIRTVGA

SEQ ID NO: 48137 - protein, 9 aa, synthetic construct
  source 1..9: note = Seed: VVGARGVGK (KRAS G12R)
YVGIRTVGC

SEQ ID NO: 48138 - protein, 9 aa, synthetic construct
  source 1..9: note = Seed: VVGARGVGK (KRAS G12R)
YVGIRTVGD

SEQ ID NO: 48139 - protein, 9 aa, synthetic construct
  source 1..9: note = Seed: VVGARGVGK (KRAS G12R)
YVGIRTVGE

SEQ ID NO: 48140 - protein, 9 aa, synthetic construct
  source 1..9: note = Seed: VVGARGVGK (KRAS G12R)
YVGIRTVGF

SEQ ID NO: 48141 - protein, 9 aa, synthetic construct
  source 1..9: note = Seed: VVGARGVGK (KRAS G12R)
YVGIRTVGG

SEQ ID NO: 48142 - protein, 9 aa, synthetic construct
  source 1..9: note = Seed: VVGARGVGK (KRAS G12R)
YVGIRTVGH

SEQ ID NO: 48143 - protein, 9 aa, synthetic construct
  source 1..9: note = Seed: VVGARGVGK (KRAS G12R)
YVGIRTVGI

SEQ ID NO: 48144 - protein, 9 aa, synthetic construct
  source 1..9: note = Seed: VVGARGVGK (KRAS G12R)
YVGIRTVGK

SEQ ID NO: 48145 - protein, 9 aa, synthetic construct
  source 1..9: note = Seed: VVGARGVGK (KRAS G12R)
YVGIRTVGL

SEQ ID NO: 48146 - protein, 9 aa, synthetic construct
  source 1..9: note = Seed: VVGARGVGK (KRAS G12R)
YVGIRTVGM

SEQ ID NO: 48147 - protein, 9 aa, synthetic construct
  source 1..9: note = Seed: VVGARGVGK (KRAS G12R)
YVGIRTVGN

SEQ ID NO: 48148 - protein, 9 aa, synthetic construct
  source 1..9: note = Seed: VVGARGVGK (KRAS G12R)
YVGIRTVGP

SEQ ID NO: 48149 - protein, 9 aa, synthetic construct
  source 1..9: note = Seed: VVGARGVGK (KRAS G12R)
YVGIRTVGQ

SEQ ID NO: 48150 - protein, 9 aa, synthetic construct
  source 1..9: note = Seed: VVGARGVGK (KRAS G12R)
YVGIRTVGR

SEQ ID NO: 48151 - protein, 9 aa, synthetic construct
  source 1..9: note = Seed: VVGARGVGK (KRAS G12R)
YVGIRTVGS

SEQ ID NO: 48152 - protein, 9 aa, synthetic construct
  source 1..9: note = Seed: VVGARGVGK (KRAS G12R)
YVGIRTVGT

SEQ ID NO: 48153 - protein, 9 aa, synthetic construct
  source 1..9: note = Seed: VVGARGVGK (KRAS G12R)
YVGIRTVGV

SEQ ID NO: 48154 - protein, 9 aa, synthetic construct
  source 1..9: note = Seed: VVGARGVGK (KRAS G12R)
YVGIRTVGW

SEQ ID NO: 48155 - protein, 9 aa, synthetic construct
  source 1..9: note = Seed: VVGARGVGK (KRAS G12R)
YVGIRTVGY

SEQ ID NO: 48156 - protein, 9 aa, synthetic construct
  source 1..9: note = Seed: VVGARGVGK (KRAS G12R)
YVGIRVVGA

SEQ ID NO: 48157 - protein, 9 aa, synthetic construct
  source 1..9: note = Seed: VVGARGVGK (KRAS G12R)
YVGIRVVGD

SEQ ID NO: 48158 - protein, 9 aa, synthetic construct
  source 1..9: note = Seed: VVGARGVGK (KRAS G12R)
YVGIRVVGE

SEQ ID NO: 48159 - protein, 9 aa, synthetic construct
  source 1..9: note = Seed: VVGARGVGK (KRAS G12R)
YVGIRVVGF

SEQ ID NO: 48160 - protein, 9 aa, synthetic construct
  source 1..9: note = Seed: VVGARGVGK (KRAS G12R)
YVGIRVVGG

SEQ ID NO: 48161 - protein, 9 aa, synthetic construct
  source 1..9: note = Seed: VVGARGVGK (KRAS G12R)
YVGIRVVGH

SEQ ID NO: 48162 - protein, 9 aa, synthetic construct
  source 1..9: note = Seed: VVGARGVGK (KRAS G12R)
YVGIRVVGI

SEQ ID NO: 48163 - protein, 9 aa, synthetic construct
  source 1..9: note = Seed: VVGARGVGK (KRAS G12R)
YVGIRVVGK

SEQ ID NO: 48164 - protein, 9 aa, synthetic construct
  source 1..9: note = Seed: VVGARGVGK (KRAS G12R)
YVGIRVVGL

SEQ ID NO: 48165 - protein, 9 aa, synthetic construct
  source 1..9: note = Seed: VVGARGVGK (KRAS G12R)
YVGIRVVGM

SEQ ID NO: 48166 - protein, 9 aa, synthetic construct
  source 1..9: note = Seed: VVGARGVGK (KRAS G12R)
YVGIRVVGN

SEQ ID NO: 48167 - protein, 9 aa, synthetic construct
  source 1..9: note = Seed: VVGARGVGK (KRAS G12R)
YVGIRVVGP

SEQ ID NO: 48168 - protein, 9 aa, synthetic construct
  source 1..9: note = Seed: VVGARGVGK (KRAS G12R)
YVGIRVVGQ

SEQ ID NO: 48169 - protein, 9 aa, synthetic construct
  source 1..9: note = Seed: VVGARGVGK (KRAS G12R)
YVGIRVVGR

SEQ ID NO: 48170 - protein, 9 aa, synthetic construct
  source 1..9: note = Seed: VVGARGVGK (KRAS G12R)
YVGIRVVGS

SEQ ID NO: 48171 - protein, 9 aa, synthetic construct
  source 1..9: note = Seed: VVGARGVGK (KRAS G12R)
YVGIRVVGT

SEQ ID NO: 48172 - protein, 9 aa, synthetic construct
  source 1..9: note = Seed: VVGARGVGK (KRAS G12R)
YVGIRVVGV

SEQ ID NO: 48173 - protein, 9 aa, synthetic construct
  source 1..9: note = Seed: VVGARGVGK (KRAS G12R)
YVGIRVVGY

SEQ ID NO: 48174 - protein, 9 aa, synthetic construct
  source 1..9: note = Seed: VVGARGVGK (KRAS G12R)
YVGIRWVGL

SEQ ID NO: 48175 - protein, 9 aa, synthetic construct
  source 1..9: note = Seed: VVGARGVGK (KRAS G12R)
YVGIRYVGL

SEQ ID NO: 48176 - protein, 9 aa, synthetic construct
  source 1..9: note = Seed: VVGARGVGK (KRAS G12R)
YVGIRYVGM

SEQ ID NO: 48177 - protein, 9 aa, synthetic construct
  source 1..9: note = Seed: VVGARGVGK (KRAS G12R)
YVGKRAVGA

SEQ ID NO: 48178 - protein, 9 aa, synthetic construct
  source 1..9: note = Seed: VVGARGVGK (KRAS G12R)
YVGKRAVGF

SEQ ID NO: 48179 - protein, 9 aa, synthetic construct
  source 1..9: note = Seed: VVGARGVGK (KRAS G12R)
YVGKRAVGI

SEQ ID NO: 48180 - protein, 9 aa, synthetic construct
  source 1..9: note = Seed: VVGARGVGK (KRAS G12R)
YVGKRAVGL

SEQ ID NO: 48181 - protein, 9 aa, synthetic construct
  source 1..9: note = Seed: VVGARGVGK (KRAS G12R)
YVGKRAVGM

SEQ ID NO: 48182 - protein, 9 aa, synthetic construct
  source 1..9: note = Seed: VVGARGVGK (KRAS G12R)
YVGKRAVGR

SEQ ID NO: 48183 - protein, 9 aa, synthetic construct
  source 1..9: note = Seed: VVGARGVGK (KRAS G12R)
YVGKRAVGS

SEQ ID NO: 48184 - protein, 9 aa, synthetic construct
  source 1..9: note = Seed: VVGARGVGK (KRAS G12R)
YVGKRAVGT

SEQ ID NO: 48185 - protein, 9 aa, synthetic construct
  source 1..9: note = Seed: VVGARGVGK (KRAS G12R)
YVGKRAVGV

SEQ ID NO: 48186 - protein, 9 aa, synthetic construct
  source 1..9: note = Seed: VVGARGVGK (KRAS G12R)
YVGKRGVGA

SEQ ID NO: 48187 - protein, 9 aa, synthetic construct
  source 1..9: note = Seed: VVGARGVGK (KRAS G12R)
YVGKRGVGI

SEQ ID NO: 48188 - protein, 9 aa, synthetic construct
  source 1..9: note = Seed: VVGARGVGK (KRAS G12R)
YVGKRGVGL

SEQ ID NO: 48189 - protein, 9 aa, synthetic construct
  source 1..9: note = Seed: VVGARGVGK (KRAS G12R)
YVGKRGVGM

SEQ ID NO: 48190 - protein, 9 aa, synthetic construct
  source 1..9: note = Seed: VVGARGVGK (KRAS G12R)
YVGKRGVGV

SEQ ID NO: 48191 - protein, 9 aa, synthetic construct
  source 1..9: note = Seed: VVGARGVGK (KRAS G12R)
YVGKRIVGR

SEQ ID NO: 48192 - protein, 9 aa, synthetic construct
  source 1..9: note = Seed: VVGARGVGK (KRAS G12R)
YVGKRKVGR

SEQ ID NO: 48193 - protein, 9 aa, synthetic construct
  source 1..9: note = Seed: VVGARGVGK (KRAS G12R)
YVGKRMVGR

SEQ ID NO: 48194 - protein, 9 aa, synthetic construct
  source 1..9: note = Seed: VVGARGVGK (KRAS G12R)
YVGKRNVGL

SEQ ID NO: 48195 - protein, 9 aa, synthetic construct
  source 1..9: note = Seed: VVGARGVGK (KRAS G12R)
YVGKRNVGV

SEQ ID NO: 48196 - protein, 9 aa, synthetic construct
  source 1..9: note = Seed: VVGARGVGK (KRAS G12R)
YVGKRPVGI

SEQ ID NO: 48197 - protein, 9 aa, synthetic construct
  source 1..9: note = Seed: VVGARGVGK (KRAS G12R)
YVGKRPVGL

SEQ ID NO: 48198 - protein, 9 aa, synthetic construct
  source 1..9: note = Seed: VVGARGVGK (KRAS G12R)
YVGKRPVGV

SEQ ID NO: 48199 - protein, 9 aa, synthetic construct
  source 1..9: note = Seed: VVGARGVGK (KRAS G12R)
YVGKRRVGA

SEQ ID NO: 48200 - protein, 9 aa, synthetic construct
  source 1..9: note = Seed: VVGARGVGK (KRAS G12R)
YVGKRRVGF

SEQ ID NO: 48201 - protein, 9 aa, synthetic construct
  source 1..9: note = Seed: VVGARGVGK (KRAS G12R)
YVGKRRVGI

SEQ ID NO: 48202 - protein, 9 aa, synthetic construct
  source 1..9: note = Seed: VVGARGVGK (KRAS G12R)
YVGKRRVGK

SEQ ID NO: 48203 - protein, 9 aa, synthetic construct
  source 1..9: note = Seed: VVGARGVGK (KRAS G12R)
YVGKRRVGL

SEQ ID NO: 48204 - protein, 9 aa, synthetic construct
  source 1..9: note = Seed: VVGARGVGK (KRAS G12R)
YVGKRRVGM

SEQ ID NO: 48205 - protein, 9 aa, synthetic construct
  source 1..9: note = Seed: VVGARGVGK (KRAS G12R)
YVGKRRVGR

SEQ ID NO: 48206 - protein, 9 aa, synthetic construct
  source 1..9: note = Seed: VVGARGVGK (KRAS G12R)
YVGKRRVGS

SEQ ID NO: 48207 - protein, 9 aa, synthetic construct
  source 1..9: note = Seed: VVGARGVGK (KRAS G12R)
YVGKRRVGV

SEQ ID NO: 48208 - protein, 9 aa, synthetic construct
  source 1..9: note = Seed: VVGARGVGK (KRAS G12R)
YVGKRRVGY

SEQ ID NO: 48209 - protein, 9 aa, synthetic construct
  source 1..9: note = Seed: VVGARGVGK (KRAS G12R)
YVGKRSVGA

SEQ ID NO: 48210 - protein, 9 aa, synthetic construct
  source 1..9: note = Seed: VVGARGVGK (KRAS G12R)
YVGKRSVGI

SEQ ID NO: 48211 - protein, 9 aa, synthetic construct
  source 1..9: note = Seed: VVGARGVGK (KRAS G12R)
YVGKRSVGL

SEQ ID NO: 48212 - protein, 9 aa, synthetic construct
  source 1..9: note = Seed: VVGARGVGK (KRAS G12R)
YVGKRSVGM

SEQ ID NO: 48213 - protein, 9 aa, synthetic construct
  source 1..9: note = Seed: VVGARGVGK (KRAS G12R)
YVGKRSVGV

SEQ ID NO: 48214 - protein, 9 aa, synthetic construct
  source 1..9: note = Seed: VVGARGVGK (KRAS G12R)
YVGKRTVGI

SEQ ID NO: 48215 - protein, 9 aa, synthetic construct
  source 1..9: note = Seed: VVGARGVGK (KRAS G12R)
YVGKRTVGL

SEQ ID NO: 48216 - protein, 9 aa, synthetic construct
  source 1..9: note = Seed: VVGARGVGK (KRAS G12R)
YVGKRTVGV

SEQ ID NO: 48217 - protein, 9 aa, synthetic construct
  source 1..9: note = Seed: VVGARGVGK (KRAS G12R)
YVGKRVVGA

SEQ ID NO: 48218 - protein, 9 aa, synthetic construct
  source 1..9: note = Seed: VVGARGVGK (KRAS G12R)
YVGKRVVGL

SEQ ID NO: 48219 - protein, 9 aa, synthetic construct
  source 1..9: note = Seed: VVGARGVGK (KRAS G12R)
YVGKRVVGR

SEQ ID NO: 48220 - protein, 9 aa, synthetic construct
  source 1..9: note = Seed: VVGARGVGK (KRAS G12R)
YVGKRVVGV

SEQ ID NO: 48221 - protein, 9 aa, synthetic construct
  source 1..9: note = Seed: VVGARGVGK (KRAS G12R)
YVGLRAVGA

SEQ ID NO: 48222 - protein, 9 aa, synthetic construct
  source 1..9: note = Seed: VVGARGVGK (KRAS G12R)
YVGLRAVGC

SEQ ID NO: 48223 - protein, 9 aa, synthetic construct
  source 1..9: note = Seed: VVGARGVGK (KRAS G12R)
YVGLRAVGD

SEQ ID NO: 48224 - protein, 9 aa, synthetic construct
  source 1..9: note = Seed: VVGARGVGK (KRAS G12R)
YVGLRAVGE

SEQ ID NO: 48225 - protein, 9 aa, synthetic construct
  source 1..9: note = Seed: VVGARGVGK (KRAS G12R)
YVGLRAVGF

SEQ ID NO: 48226 - protein, 9 aa, synthetic construct
  source 1..9: note = Seed: VVGARGVGK (KRAS G12R)
YVGLRAVGG

SEQ ID NO: 48227 - protein, 9 aa, synthetic construct
  source 1..9: note = Seed: VVGARGVGK (KRAS G12R)
YVGLRAVGH

SEQ ID NO: 48228 - protein, 9 aa, synthetic construct
  source 1..9: note = Seed: VVGARGVGK (KRAS G12R)
YVGLRAVGI

SEQ ID NO: 48229 - protein, 9 aa, synthetic construct
  source 1..9: note = Seed: VVGARGVGK (KRAS G12R)
YVGLRAVGK

SEQ ID NO: 48230 - protein, 9 aa, synthetic construct
  source 1..9: note = Seed: VVGARGVGK (KRAS G12R)
YVGLRAVGL

SEQ ID NO: 48231 - protein, 9 aa, synthetic construct
  source 1..9: note = Seed: VVGARGVGK (KRAS G12R)
YVGLRAVGM

SEQ ID NO: 48232 - protein, 9 aa, synthetic construct
  source 1..9: note = Seed: VVGARGVGK (KRAS G12R)
YVGLRAVGN

SEQ ID NO: 48233 - protein, 9 aa, synthetic construct
  source 1..9: note = Seed: VVGARGVGK (KRAS G12R)
YVGLRAVGP

SEQ ID NO: 48234 - protein, 9 aa, synthetic construct
  source 1..9: note = Seed: VVGARGVGK (KRAS G12R)
YVGLRAVGQ

SEQ ID NO: 48235 - protein, 9 aa, synthetic construct
  source 1..9: note = Seed: VVGARGVGK (KRAS G12R)
YVGLRAVGR

SEQ ID NO: 48236 - protein, 9 aa, synthetic construct
  source 1..9: note = Seed: VVGARGVGK (KRAS G12R)
YVGLRAVGS

SEQ ID NO: 48237 - protein, 9 aa, synthetic construct
  source 1..9: note = Seed: VVGARGVGK (KRAS G12R)
YVGLRAVGT

SEQ ID NO: 48238 - protein, 9 aa, synthetic construct
  source 1..9: note = Seed: VVGARGVGK (KRAS G12R)
YVGLRAVGV

SEQ ID NO: 48239 - protein, 9 aa, synthetic construct
  source 1..9: note = Seed: VVGARGVGK (KRAS G12R)
YVGLRAVGW

SEQ ID NO: 48240 - protein, 9 aa, synthetic construct
  source 1..9: note = Seed: VVGARGVGK (KRAS G12R)
YVGLRAVGY

SEQ ID NO: 48241 - protein, 9 aa, synthetic construct
  source 1..9: note = Seed: VVGARGVGK (KRAS G12R)
YVGLRCVGA

SEQ ID NO: 48242 - protein, 9 aa, synthetic construct
  source 1..9: note = Seed: VVGARGVGK (KRAS G12R)
YVGLRCVGG

SEQ ID NO: 48243 - protein, 9 aa, synthetic construct
  source 1..9: note = Seed: VVGARGVGK (KRAS G12R)
YVGLRCVGI

SEQ ID NO: 48244 - protein, 9 aa, synthetic construct
  source 1..9: note = Seed: VVGARGVGK (KRAS G12R)
YVGLRCVGL

SEQ ID NO: 48245 - protein, 9 aa, synthetic construct
  source 1..9: note = Seed: VVGARGVGK (KRAS G12R)
YVGLRCVGM

SEQ ID NO: 48246 - protein, 9 aa, synthetic construct
  source 1..9: note = Seed: VVGARGVGK (KRAS G12R)
YVGLRCVGN

SEQ ID NO: 48247 - protein, 9 aa, synthetic construct
  source 1..9: note = Seed: VVGARGVGK (KRAS G12R)
YVGLRCVGS

SEQ ID NO: 48248 - protein, 9 aa, synthetic construct
  source 1..9: note = Seed: VVGARGVGK (KRAS G12R)
YVGLRCVGT

SEQ ID NO: 48249 - protein, 9 aa, synthetic construct
  source 1..9: note = Seed: VVGARGVGK (KRAS G12R)
YVGLRCVGV

SEQ ID NO: 48250 - protein, 9 aa, synthetic construct
  source 1..9: note = Seed: VVGARGVGK (KRAS G12R)
YVGLRDVGA

SEQ ID NO: 48251 - protein, 9 aa, synthetic construct
  source 1..9: note = Seed: VVGARGVGK (KRAS G12R)
YVGLRDVGI

SEQ ID NO: 48252 - protein, 9 aa, synthetic construct
  source 1..9: note = Seed: VVGARGVGK (KRAS G12R)
YVGLRDVGL

SEQ ID NO: 48253 - protein, 9 aa, synthetic construct
  source 1..9: note = Seed: VVGARGVGK (KRAS G12R)
YVGLRDVGM

SEQ ID NO: 48254 - protein, 9 aa, synthetic construct
  source 1..9: note = Seed: VVGARGVGK (KRAS G12R)
YVGLRDVGN

SEQ ID NO: 48255 - protein, 9 aa, synthetic construct
  source 1..9: note = Seed: VVGARGVGK (KRAS G12R)
YVGLRDVGS

SEQ ID NO: 48256 - protein, 9 aa, synthetic construct
  source 1..9: note = Seed: VVGARGVGK (KRAS G12R)
YVGLRDVGT

SEQ ID NO: 48257 - protein, 9 aa, synthetic construct
  source 1..9: note = Seed: VVGARGVGK (KRAS G12R)
YVGLRDVGV

SEQ ID NO: 48258 - protein, 9 aa, synthetic construct
  source 1..9: note = Seed: VVGARGVGK (KRAS G12R)
YVGLREVGA

SEQ ID NO: 48259 - protein, 9 aa, synthetic construct
  source 1..9: note = Seed: VVGARGVGK (KRAS G12R)
YVGLREVGG

SEQ ID NO: 48260 - protein, 9 aa, synthetic construct
  source 1..9: note = Seed: VVGARGVGK (KRAS G12R)
YVGLREVGI

SEQ ID NO: 48261 - protein, 9 aa, synthetic construct
  source 1..9: note = Seed: VVGARGVGK (KRAS G12R)
YVGLREVGL

SEQ ID NO: 48262 - protein, 9 aa, synthetic construct
  source 1..9: note = Seed: VVGARGVGK (KRAS G12R)
YVGLREVGM

SEQ ID NO: 48263 - protein, 9 aa, synthetic construct
  source 1..9: note = Seed: VVGARGVGK (KRAS G12R)
YVGLREVGN

SEQ ID NO: 48264 - protein, 9 aa, synthetic construct
  source 1..9: note = Seed: VVGARGVGK (KRAS G12R)
YVGLREVGS

SEQ ID NO: 48265 - protein, 9 aa, synthetic construct
  source 1..9: note = Seed: VVGARGVGK (KRAS G12R)
YVGLREVGT

SEQ ID NO: 48266 - protein, 9 aa, synthetic construct
  source 1..9: note = Seed: VVGARGVGK (KRAS G12R)
YVGLREVGV

SEQ ID NO: 48267 - protein, 9 aa, synthetic construct
  source 1..9: note = Seed: VVGARGVGK (KRAS G12R)
YVGLRFVGI

SEQ ID NO: 48268 - protein, 9 aa, synthetic construct
  source 1..9: note = Seed: VVGARGVGK (KRAS G12R)
YVGLRFVGL

SEQ ID NO: 48269 - protein, 9 aa, synthetic construct
  source 1..9: note = Seed: VVGARGVGK (KRAS G12R)
YVGLRFVGM

SEQ ID NO: 48270 - protein, 9 aa, synthetic construct
  source 1..9: note = Seed: VVGARGVGK (KRAS G12R)
YVGLRGVGA

SEQ ID NO: 48271 - protein, 9 aa, synthetic construct
  source 1..9: note = Seed: VVGARGVGK (KRAS G12R)
YVGLRGVGC

SEQ ID NO: 48272 - protein, 9 aa, synthetic construct
  source 1..9: note = Seed: VVGARGVGK (KRAS G12R)
YVGLRGVGD

SEQ ID NO: 48273 - protein, 9 aa, synthetic construct
  source 1..9: note = Seed: VVGARGVGK (KRAS G12R)
YVGLRGVGE

SEQ ID NO: 48274 - protein, 9 aa, synthetic construct
  source 1..9: note = Seed: VVGARGVGK (KRAS G12R)
YVGLRGVGF

SEQ ID NO: 48275 - protein, 9 aa, synthetic construct
  source 1..9: note = Seed: VVGARGVGK (KRAS G12R)
YVGLRGVGG

SEQ ID NO: 48276 - protein, 9 aa, synthetic construct
  source 1..9: note = Seed: VVGARGVGK (KRAS G12R)
YVGLRGVGH

SEQ ID NO: 48277 - protein, 9 aa, synthetic construct
  source 1..9: note = Seed: VVGARGVGK (KRAS G12R)
YVGLRGVGI

SEQ ID NO: 48278 - protein, 9 aa, synthetic construct
  source 1..9: note = Seed: VVGARGVGK (KRAS G12R)
YVGLRGVGK

SEQ ID NO: 48279 - protein, 9 aa, synthetic construct
  source 1..9: note = Seed: VVGARGVGK (KRAS G12R)
YVGLRGVGL

SEQ ID NO: 48280 - protein, 9 aa, synthetic construct
  source 1..9: note = Seed: VVGARGVGK (KRAS G12R)
YVGLRGVGM

SEQ ID NO: 48281 - protein, 9 aa, synthetic construct
  source 1..9: note = Seed: VVGARGVGK (KRAS G12R)
YVGLRGVGN

SEQ ID NO: 48282 - protein, 9 aa, synthetic construct
  source 1..9: note = Seed: VVGARGVGK (KRAS G12R)
YVGLRGVGP

SEQ ID NO: 48283 - protein, 9 aa, synthetic construct
  source 1..9: note = Seed: VVGARGVGK (KRAS G12R)
YVGLRGVGQ

SEQ ID NO: 48284 - protein, 9 aa, synthetic construct
  source 1..9: note = Seed: VVGARGVGK (KRAS G12R)
YVGLRGVGR

SEQ ID NO: 48285 - protein, 9 aa, synthetic construct
  source 1..9: note = Seed: VVGARGVGK (KRAS G12R)
YVGLRGVGS

SEQ ID NO: 48286 - protein, 9 aa, synthetic construct
  source 1..9: note = Seed: VVGARGVGK (KRAS G12R)
YVGLRGVGT

SEQ ID NO: 48287 - protein, 9 aa, synthetic construct
  source 1..9: note = Seed: VVGARGVGK (KRAS G12R)
YVGLRGVGV

SEQ ID NO: 48288 - protein, 9 aa, synthetic construct
  source 1..9: note = Seed: VVGARGVGK (KRAS G12R)
YVGLRGVGW

SEQ ID NO: 48289 - protein, 9 aa, synthetic construct
  source 1..9: note = Seed: VVGARGVGK (KRAS G12R)
YVGLRGVGY

SEQ ID NO: 48290 - protein, 9 aa, synthetic construct
  source 1..9: note = Seed: VVGARGVGK (KRAS G12R)
YVGLRHVGA

SEQ ID NO: 48291 - protein, 9 aa, synthetic construct
  source 1..9: note = Seed: VVGARGVGK (KRAS G12R)
YVGLRHVGF

SEQ ID NO: 48292 - protein, 9 aa, synthetic construct
  source 1..9: note = Seed: VVGARGVGK (KRAS G12R)
YVGLRHVGH

SEQ ID NO: 48293 - protein, 9 aa, synthetic construct
  source 1..9: note = Seed: VVGARGVGK (KRAS G12R)
YVGLRHVGI

SEQ ID NO: 48294 - protein, 9 aa, synthetic construct
  source 1..9: note = Seed: VVGARGVGK (KRAS G12R)
YVGLRHVGL

SEQ ID NO: 48295 - protein, 9 aa, synthetic construct
  source 1..9: note = Seed: VVGARGVGK (KRAS G12R)
YVGLRHVGM

SEQ ID NO: 48296 - protein, 9 aa, synthetic construct
  source 1..9: note = Seed: VVGARGVGK (KRAS G12R)
YVGLRHVGN

SEQ ID NO: 48297 - protein, 9 aa, synthetic construct
  source 1..9: note = Seed: VVGARGVGK (KRAS G12R)
YVGLRHVGQ

SEQ ID NO: 48298 - protein, 9 aa, synthetic construct
  source 1..9: note = Seed: VVGARGVGK (KRAS G12R)
YVGLRHVGS

SEQ ID NO: 48299 - protein, 9 aa, synthetic construct
  source 1..9: note = Seed: VVGARGVGK (KRAS G12R)
YVGLRHVGT

SEQ ID NO: 48300 - protein, 9 aa, synthetic construct
  source 1..9: note = Seed: VVGARGVGK (KRAS G12R)
YVGLRHVGV

SEQ ID NO: 48301 - protein, 9 aa, synthetic construct
  source 1..9: note = Seed: VVGARGVGK (KRAS G12R)
YVGLRHVGW

SEQ ID NO: 48302 - protein, 9 aa, synthetic construct
  source 1..9: note = Seed: VVGARGVGK (KRAS G12R)
YVGLRHVGY

SEQ ID NO: 48303 - protein, 9 aa, synthetic construct
  source 1..9: note = Seed: VVGARGVGK (KRAS G12R)
YVGLRIVGA

SEQ ID NO: 48304 - protein, 9 aa, synthetic construct
  source 1..9: note = Seed: VVGARGVGK (KRAS G12R)
YVGLRIVGD

SEQ ID NO: 48305 - protein, 9 aa, synthetic construct
  source 1..9: note = Seed: VVGARGVGK (KRAS G12R)
YVGLRIVGE

SEQ ID NO: 48306 - protein, 9 aa, synthetic construct
  source 1..9: note = Seed: VVGARGVGK (KRAS G12R)
YVGLRIVGF

SEQ ID NO: 48307 - protein, 9 aa, synthetic construct
  source 1..9: note = Seed: VVGARGVGK (KRAS G12R)
YVGLRIVGG

SEQ ID NO: 48308 - protein, 9 aa, synthetic construct
  source 1..9: note = Seed: VVGARGVGK (KRAS G12R)
YVGLRIVGH

SEQ ID NO: 48309 - protein, 9 aa, synthetic construct
  source 1..9: note = Seed: VVGARGVGK (KRAS G12R)
YVGLRIVGI

SEQ ID NO: 48310 - protein, 9 aa, synthetic construct
  source 1..9: note = Seed: VVGARGVGK (KRAS G12R)
YVGLRIVGK

SEQ ID NO: 48311 - protein, 9 aa, synthetic construct
  source 1..9: note = Seed: VVGARGVGK (KRAS G12R)
YVGLRIVGL

SEQ ID NO: 48312 - protein, 9 aa, synthetic construct
  source 1..9: note = Seed: VVGARGVGK (KRAS G12R)
YVGLRIVGM

SEQ ID NO: 48313 - protein, 9 aa, synthetic construct
  source 1..9: note = Seed: VVGARGVGK (KRAS G12R)
YVGLRIVGN

SEQ ID NO: 48314 - protein, 9 aa, synthetic construct
  source 1..9: note = Seed: VVGARGVGK (KRAS G12R)
YVGLRIVGP

SEQ ID NO: 48315 - protein, 9 aa, synthetic construct
  source 1..9: note = Seed: VVGARGVGK (KRAS G12R)
YVGLRIVGQ

SEQ ID NO: 48316 - protein, 9 aa, synthetic construct
  source 1..9: note = Seed: VVGARGVGK (KRAS G12R)
YVGLRIVGR

SEQ ID NO: 48317 - protein, 9 aa, synthetic construct
  source 1..9: note = Seed: VVGARGVGK (KRAS G12R)
YVGLRIVGS

SEQ ID NO: 48318 - protein, 9 aa, synthetic construct
  source 1..9: note = Seed: VVGARGVGK (KRAS G12R)
YVGLRIVGT

SEQ ID NO: 48319 - protein, 9 aa, synthetic construct
  source 1..9: note = Seed: VVGARGVGK (KRAS G12R)
YVGLRIVGV

SEQ ID NO: 48320 - protein, 9 aa, synthetic construct
  source 1..9: note = Seed: VVGARGVGK (KRAS G12R)
YVGLRIVGY

SEQ ID NO: 48321 - protein, 9 aa, synthetic construct
  source 1..9: note = Seed: VVGARGVGK (KRAS G12R)
YVGLRKVGA

SEQ ID NO: 48322 - protein, 9 aa, synthetic construct
  source 1..9: note = Seed: VVGARGVGK (KRAS G12R)
YVGLRKVGI

SEQ ID NO: 48323 - protein, 9 aa, synthetic construct
  source 1..9: note = Seed: VVGARGVGK (KRAS G12R)
YVGLRKVGL

SEQ ID NO: 48324 - protein, 9 aa, synthetic construct
  source 1..9: note = Seed: VVGARGVGK (KRAS G12R)
YVGLRKVGM

SEQ ID NO: 48325 - protein, 9 aa, synthetic construct
  source 1..9: note = Seed: VVGARGVGK (KRAS G12R)
YVGLRKVGT

SEQ ID NO: 48326 - protein, 9 aa, synthetic construct
  source 1..9: note = Seed: VVGARGVGK (KRAS G12R)
YVGLRKVGV

SEQ ID NO: 48327 - protein, 9 aa, synthetic construct
  source 1..9: note = Seed: VVGARGVGK (KRAS G12R)
YVGLRLVGA

SEQ ID NO: 48328 - protein, 9 aa, synthetic construct
  source 1..9: note = Seed: VVGARGVGK (KRAS G12R)
YVGLRLVGD

SEQ ID NO: 48329 - protein, 9 aa, synthetic construct
  source 1..9: note = Seed: VVGARGVGK (KRAS G12R)
YVGLRLVGE

SEQ ID NO: 48330 - protein, 9 aa, synthetic construct
  source 1..9: note = Seed: VVGARGVGK (KRAS G12R)
YVGLRLVGG

SEQ ID NO: 48331 - protein, 9 aa, synthetic construct
  source 1..9: note = Seed: VVGARGVGK (KRAS G12R)
YVGLRLVGH

SEQ ID NO: 48332 - protein, 9 aa, synthetic construct
  source 1..9: note = Seed: VVGARGVGK (KRAS G12R)
YVGLRLVGI

SEQ ID NO: 48333 - protein, 9 aa, synthetic construct
  source 1..9: note = Seed: VVGARGVGK (KRAS G12R)
YVGLRLVGL

SEQ ID NO: 48334 - protein, 9 aa, synthetic construct
  source 1..9: note = Seed: VVGARGVGK (KRAS G12R)
YVGLRLVGM

SEQ ID NO: 48335 - protein, 9 aa, synthetic construct
  source 1..9: note = Seed: VVGARGVGK (KRAS G12R)
YVGLRLVGN

SEQ ID NO: 48336 - protein, 9 aa, synthetic construct
  source 1..9: note = Seed: VVGARGVGK (KRAS G12R)
YVGLRLVGQ

SEQ ID NO: 48337 - protein, 9 aa, synthetic construct
  source 1..9: note = Seed: VVGARGVGK (KRAS G12R)
YVGLRLVGR

SEQ ID NO: 48338 - protein, 9 aa, synthetic construct
  source 1..9: note = Seed: VVGARGVGK (KRAS G12R)
YVGLRLVGS

SEQ ID NO: 48339 - protein, 9 aa, synthetic construct
  source 1..9: note = Seed: VVGARGVGK (KRAS G12R)
YVGLRLVGT

SEQ ID NO: 48340 - protein, 9 aa, synthetic construct
  source 1..9: note = Seed: VVGARGVGK (KRAS G12R)
YVGLRLVGV

SEQ ID NO: 48341 - protein, 9 aa, synthetic construct
  source 1..9: note = Seed: VVGARGVGK (KRAS G12R)
YVGLRMVGA

SEQ ID NO: 48342 - protein, 9 aa, synthetic construct
  source 1..9: note = Seed: VVGARGVGK (KRAS G12R)
YVGLRMVGD

SEQ ID NO: 48343 - protein, 9 aa, synthetic construct
  source 1..9: note = Seed: VVGARGVGK (KRAS G12R)
YVGLRMVGE

SEQ ID NO: 48344 - protein, 9 aa, synthetic construct
  source 1..9: note = Seed: VVGARGVGK (KRAS G12R)
YVGLRMVGF

SEQ ID NO: 48345 - protein, 9 aa, synthetic construct
  source 1..9: note = Seed: VVGARGVGK (KRAS G12R)
YVGLRMVGG

SEQ ID NO: 48346 - protein, 9 aa, synthetic construct
  source 1..9: note = Seed: VVGARGVGK (KRAS G12R)
YVGLRMVGH

SEQ ID NO: 48347 - protein, 9 aa, synthetic construct
  source 1..9: note = Seed: VVGARGVGK (KRAS G12R)
YVGLRMVGI

SEQ ID NO: 48348 - protein, 9 aa, synthetic construct
  source 1..9: note = Seed: VVGARGVGK (KRAS G12R)
YVGLRMVGK

SEQ ID NO: 48349 - protein, 9 aa, synthetic construct
  source 1..9: note = Seed: VVGARGVGK (KRAS G12R)
YVGLRMVGL

SEQ ID NO: 48350 - protein, 9 aa, synthetic construct
  source 1..9: note = Seed: VVGARGVGK (KRAS G12R)
YVGLRMVGM

SEQ ID NO: 48351 - protein, 9 aa, synthetic construct
  source 1..9: note = Seed: VVGARGVGK (KRAS G12R)
YVGLRMVGN

SEQ ID NO: 48352 - protein, 9 aa, synthetic construct
  source 1..9: note = Seed: VVGARGVGK (KRAS G12R)
YVGLRMVGQ

SEQ ID NO: 48353 - protein, 9 aa, synthetic construct
  source 1..9: note = Seed: VVGARGVGK (KRAS G12R)
YVGLRMVGR

SEQ ID NO: 48354 - protein, 9 aa, synthetic construct
  source 1..9: note = Seed: VVGARGVGK (KRAS G12R)
YVGLRMVGS

SEQ ID NO: 48355 - protein, 9 aa, synthetic construct
  source 1..9: note = Seed: VVGARGVGK (KRAS G12R)
YVGLRMVGT

SEQ ID NO: 48356 - protein, 9 aa, synthetic construct
  source 1..9: note = Seed: VVGARGVGK (KRAS G12R)
YVGLRMVGV

SEQ ID NO: 48357 - protein, 9 aa, synthetic construct
  source 1..9: note = Seed: VVGARGVGK (KRAS G12R)
YVGLRNVGA

SEQ ID NO: 48358 - protein, 9 aa, synthetic construct
  source 1..9: note = Seed: VVGARGVGK (KRAS G12R)
YVGLRNVGC

SEQ ID NO: 48359 - protein, 9 aa, synthetic construct
  source 1..9: note = Seed: VVGARGVGK (KRAS G12R)
YVGLRNVGD

SEQ ID NO: 48360 - protein, 9 aa, synthetic construct
  source 1..9: note = Seed: VVGARGVGK (KRAS G12R)
YVGLRNVGE

SEQ ID NO: 48361 - protein, 9 aa, synthetic construct
  source 1..9: note = Seed: VVGARGVGK (KRAS G12R)
YVGLRNVGF

SEQ ID NO: 48362 - protein, 9 aa, synthetic construct
  source 1..9: note = Seed: VVGARGVGK (KRAS G12R)
YVGLRNVGG

SEQ ID NO: 48363 - protein, 9 aa, synthetic construct
  source 1..9: note = Seed: VVGARGVGK (KRAS G12R)
YVGLRNVGH

SEQ ID NO: 48364 - protein, 9 aa, synthetic construct
  source 1..9: note = Seed: VVGARGVGK (KRAS G12R)
YVGLRNVGI

SEQ ID NO: 48365 - protein, 9 aa, synthetic construct
  source 1..9: note = Seed: VVGARGVGK (KRAS G12R)
YVGLRNVGK

SEQ ID NO: 48366 - protein, 9 aa, synthetic construct
  source 1..9: note = Seed: VVGARGVGK (KRAS G12R)
YVGLRNVGL

SEQ ID NO: 48367 - protein, 9 aa, synthetic construct
  source 1..9: note = Seed: VVGARGVGK (KRAS G12R)
YVGLRNVGM

SEQ ID NO: 48368 - protein, 9 aa, synthetic construct
  source 1..9: note = Seed: VVGARGVGK (KRAS G12R)
YVGLRNVGN

SEQ ID NO: 48369 - protein, 9 aa, synthetic construct
  source 1..9: note = Seed: VVGARGVGK (KRAS G12R)
YVGLRNVGP

SEQ ID NO: 48370 - protein, 9 aa, synthetic construct
  source 1..9: note = Seed: VVGARGVGK (KRAS G12R)
YVGLRNVGQ

SEQ ID NO: 48371 - protein, 9 aa, synthetic construct
  source 1..9: note = Seed: VVGARGVGK (KRAS G12R)
YVGLRNVGR

SEQ ID NO: 48372 - protein, 9 aa, synthetic construct
  source 1..9: note = Seed: VVGARGVGK (KRAS G12R)
YVGLRNVGS

SEQ ID NO: 48373 - protein, 9 aa, synthetic construct
  source 1..9: note = Seed: VVGARGVGK (KRAS G12R)
YVGLRNVGT

SEQ ID NO: 48374 - protein, 9 aa, synthetic construct
  source 1..9: note = Seed: VVGARGVGK (KRAS G12R)
YVGLRNVGV

SEQ ID NO: 48375 - protein, 9 aa, synthetic construct
  source 1..9: note = Seed: VVGARGVGK (KRAS G12R)
YVGLRNVGW

SEQ ID NO: 48376 - protein, 9 aa, synthetic construct
  source 1..9: note = Seed: VVGARGVGK (KRAS G12R)
YVGLRNVGY

SEQ ID NO: 48377 - protein, 9 aa, synthetic construct
  source 1..9: note = Seed: VVGARGVGK (KRAS G12R)
YVGLRPVGA

SEQ ID NO: 48378 - protein, 9 aa, synthetic construct
  source 1..9: note = Seed: VVGARGVGK (KRAS G12R)
YVGLRPVGC

SEQ ID NO: 48379 - protein, 9 aa, synthetic construct
  source 1..9: note = Seed: VVGARGVGK (KRAS G12R)
YVGLRPVGD

SEQ ID NO: 48380 - protein, 9 aa, synthetic construct
  source 1..9: note = Seed: VVGARGVGK (KRAS G12R)
YVGLRPVGE

SEQ ID NO: 48381 - protein, 9 aa, synthetic construct
  source 1..9: note = Seed: VVGARGVGK (KRAS G12R)
YVGLRPVGF

SEQ ID NO: 48382 - protein, 9 aa, synthetic construct
  source 1..9: note = Seed: VVGARGVGK (KRAS G12R)
YVGLRPVGG

SEQ ID NO: 48383 - protein, 9 aa, synthetic construct
  source 1..9: note = Seed: VVGARGVGK (KRAS G12R)
YVGLRPVGH

SEQ ID NO: 48384 - protein, 9 aa, synthetic construct
  source 1..9: note = Seed: VVGARGVGK (KRAS G12R)
YVGLRPVGI

SEQ ID NO: 48385 - protein, 9 aa, synthetic construct
  source 1..9: note = Seed: VVGARGVGK (KRAS G12R)
YVGLRPVGK

SEQ ID NO: 48386 - protein, 9 aa, synthetic construct
  source 1..9: note = Seed: VVGARGVGK (KRAS G12R)
YVGLRPVGL

SEQ ID NO: 48387 - protein, 9 aa, synthetic construct
  source 1..9: note = Seed: VVGARGVGK (KRAS G12R)
YVGLRPVGM

SEQ ID NO: 48388 - protein, 9 aa, synthetic construct
  source 1..9: note = Seed: VVGARGVGK (KRAS G12R)
YVGLRPVGN

SEQ ID NO: 48389 - protein, 9 aa, synthetic construct
  source 1..9: note = Seed: VVGARGVGK (KRAS G12R)
YVGLRPVGP

SEQ ID NO: 48390 - protein, 9 aa, synthetic construct
  source 1..9: note = Seed: VVGARGVGK (KRAS G12R)
YVGLRPVGQ

SEQ ID NO: 48391 - protein, 9 aa, synthetic construct
  source 1..9: note = Seed: VVGARGVGK (KRAS G12R)
YVGLRPVGR

SEQ ID NO: 48392 - protein, 9 aa, synthetic construct
  source 1..9: note = Seed: VVGARGVGK (KRAS G12R)
YVGLRPVGS

SEQ ID NO: 48393 - protein, 9 aa, synthetic construct
  source 1..9: note = Seed: VVGARGVGK (KRAS G12R)
YVGLRPVGT

SEQ ID NO: 48394 - protein, 9 aa, synthetic construct
  source 1..9: note = Seed: VVGARGVGK (KRAS G12R)
YVGLRPVGV

SEQ ID NO: 48395 - protein, 9 aa, synthetic construct
  source 1..9: note = Seed: VVGARGVGK (KRAS G12R)
YVGLRPVGW

SEQ ID NO: 48396 - protein, 9 aa, synthetic construct
  source 1..9: note = Seed: VVGARGVGK (KRAS G12R)
YVGLRPVGY

SEQ ID NO: 48397 - protein, 9 aa, synthetic construct
  source 1..9: note = Seed: VVGARGVGK (KRAS G12R)
YVGLRQVGA

SEQ ID NO: 48398 - protein, 9 aa, synthetic construct
  source 1..9: note = Seed: VVGARGVGK (KRAS G12R)
YVGLRQVGF

SEQ ID NO: 48399 - protein, 9 aa, synthetic construct
  source 1..9: note = Seed: VVGARGVGK (KRAS G12R)
YVGLRQVGH

SEQ ID NO: 48400 - protein, 9 aa, synthetic construct
  source 1..9: note = Seed: VVGARGVGK (KRAS G12R)
YVGLRQVGI

SEQ ID NO: 48401 - protein, 9 aa, synthetic construct
  source 1..9: note = Seed: VVGARGVGK (KRAS G12R)
YVGLRQVGL

SEQ ID NO: 48402 - protein, 9 aa, synthetic construct
  source 1..9: note = Seed: VVGARGVGK (KRAS G12R)
YVGLRQVGM

SEQ ID NO: 48403 - protein, 9 aa, synthetic construct
  source 1..9: note = Seed: VVGARGVGK (KRAS G12R)
YVGLRQVGN

SEQ ID NO: 48404 - protein, 9 aa, synthetic construct
  source 1..9: note = Seed: VVGARGVGK (KRAS G12R)
YVGLRQVGR

SEQ ID NO: 48405 - protein, 9 aa, synthetic construct
  source 1..9: note = Seed: VVGARGVGK (KRAS G12R)
YVGLRQVGS

SEQ ID NO: 48406 - protein, 9 aa, synthetic construct
  source 1..9: note = Seed: VVGARGVGK (KRAS G12R)
YVGLRQVGT

SEQ ID NO: 48407 - protein, 9 aa, synthetic construct
  source 1..9: note = Seed: VVGARGVGK (KRAS G12R)
YVGLRQVGV

SEQ ID NO: 48408 - protein, 9 aa, synthetic construct
  source 1..9: note = Seed: VVGARGVGK (KRAS G12R)
YVGLRQVGY

SEQ ID NO: 48409 - protein, 9 aa, synthetic construct
  source 1..9: note = Seed: VVGARGVGK (KRAS G12R)
YVGLRRVGA

SEQ ID NO: 48410 - protein, 9 aa, synthetic construct
  source 1..9: note = Seed: VVGARGVGK (KRAS G12R)
YVGLRRVGI

SEQ ID NO: 48411 - protein, 9 aa, synthetic construct
  source 1..9: note = Seed: VVGARGVGK (KRAS G12R)
YVGLRRVGL

SEQ ID NO: 48412 - protein, 9 aa, synthetic construct
  source 1..9: note = Seed: VVGARGVGK (KRAS G12R)
YVGLRRVGM

SEQ ID NO: 48413 - protein, 9 aa, synthetic construct
  source 1..9: note = Seed: VVGARGVGK (KRAS G12R)
YVGLRRVGS

SEQ ID NO: 48414 - protein, 9 aa, synthetic construct
  source 1..9: note = Seed: VVGARGVGK (KRAS G12R)
YVGLRRVGT

SEQ ID NO: 48415 - protein, 9 aa, synthetic construct
  source 1..9: note = Seed: VVGARGVGK (KRAS G12R)
YVGLRRVGV

SEQ ID NO: 48416 - protein, 9 aa, synthetic construct
  source 1..9: note = Seed: VVGARGVGK (KRAS G12R)
YVGLRRVGY

SEQ ID NO: 48417 - protein, 9 aa, synthetic construct
  source 1..9: note = Seed: VVGARGVGK (KRAS G12R)
YVGLRSVGA

SEQ ID NO: 48418 - protein, 9 aa, synthetic construct
  source 1..9: note = Seed: VVGARGVGK (KRAS G12R)
YVGLRSVGC

SEQ ID NO: 48419 - protein, 9 aa, synthetic construct
  source 1..9: note = Seed: VVGARGVGK (KRAS G12R)
YVGLRSVGD

SEQ ID NO: 48420 - protein, 9 aa, synthetic construct
  source 1..9: note = Seed: VVGARGVGK (KRAS G12R)
YVGLRSVGE

SEQ ID NO: 48421 - protein, 9 aa, synthetic construct
  source 1..9: note = Seed: VVGARGVGK (KRAS G12R)
YVGLRSVGF

SEQ ID NO: 48422 - protein, 9 aa, synthetic construct
  source 1..9: note = Seed: VVGARGVGK (KRAS G12R)
YVGLRSVGG

SEQ ID NO: 48423 - protein, 9 aa, synthetic construct
  source 1..9: note = Seed: VVGARGVGK (KRAS G12R)
YVGLRSVGH

SEQ ID NO: 48424 - protein, 9 aa, synthetic construct
  source 1..9: note = Seed: VVGARGVGK (KRAS G12R)
YVGLRSVGI

SEQ ID NO: 48425 - protein, 9 aa, synthetic construct
  source 1..9: note = Seed: VVGARGVGK (KRAS G12R)
YVGLRSVGK

SEQ ID NO: 48426 - protein, 9 aa, synthetic construct
  source 1..9: note = Seed: VVGARGVGK (KRAS G12R)
YVGLRSVGL

SEQ ID NO: 48427 - protein, 9 aa, synthetic construct
  source 1..9: note = Seed: VVGARGVGK (KRAS G12R)
YVGLRSVGM

SEQ ID NO: 48428 - protein, 9 aa, synthetic construct
  source 1..9: note = Seed: VVGARGVGK (KRAS G12R)
YVGLRSVGN

SEQ ID NO: 48429 - protein, 9 aa, synthetic construct
  source 1..9: note = Seed: VVGARGVGK (KRAS G12R)
YVGLRSVGP

SEQ ID NO: 48430 - protein, 9 aa, synthetic construct
  source 1..9: note = Seed: VVGARGVGK (KRAS G12R)
YVGLRSVGQ

SEQ ID NO: 48431 - protein, 9 aa, synthetic construct
  source 1..9: note = Seed: VVGARGVGK (KRAS G12R)
YVGLRSVGR

SEQ ID NO: 48432 - protein, 9 aa, synthetic construct
  source 1..9: note = Seed: VVGARGVGK (KRAS G12R)
YVGLRSVGS

SEQ ID NO: 48433 - protein, 9 aa, synthetic construct
  source 1..9: note = Seed: VVGARGVGK (KRAS G12R)
YVGLRSVGT

SEQ ID NO: 48434 - protein, 9 aa, synthetic construct
  source 1..9: note = Seed: VVGARGVGK (KRAS G12R)
YVGLRSVGV

SEQ ID NO: 48435 - protein, 9 aa, synthetic construct
  source 1..9: note = Seed: VVGARGVGK (KRAS G12R)
YVGLRSVGW

SEQ ID NO: 48436 - protein, 9 aa, synthetic construct
  source 1..9: note = Seed: VVGARGVGK (KRAS G12R)
YVGLRSVGY

SEQ ID NO: 48437 - protein, 9 aa, synthetic construct
  source 1..9: note = Seed: VVGARGVGK (KRAS G12R)
YVGLRTVGA

SEQ ID NO: 48438 - protein, 9 aa, synthetic construct
  source 1..9: note = Seed: VVGARGVGK (KRAS G12R)
YVGLRTVGC

SEQ ID NO: 48439 - protein, 9 aa, synthetic construct
  source 1..9: note = Seed: VVGARGVGK (KRAS G12R)
YVGLRTVGD

SEQ ID NO: 48440 - protein, 9 aa, synthetic construct
  source 1..9: note = Seed: VVGARGVGK (KRAS G12R)
YVGLRTVGE

SEQ ID NO: 48441 - protein, 9 aa, synthetic construct
  source 1..9: note = Seed: VVGARGVGK (KRAS G12R)
YVGLRTVGF

SEQ ID NO: 48442 - protein, 9 aa, synthetic construct
  source 1..9: note = Seed: VVGARGVGK (KRAS G12R)
YVGLRTVGG

SEQ ID NO: 48443 - protein, 9 aa, synthetic construct
  source 1..9: note = Seed: VVGARGVGK (KRAS G12R)
YVGLRTVGH

SEQ ID NO: 48444 - protein, 9 aa, synthetic construct
  source 1..9: note = Seed: VVGARGVGK (KRAS G12R)
YVGLRTVGI

SEQ ID NO: 48445 - protein, 9 aa, synthetic construct
  source 1..9: note = Seed: VVGARGVGK (KRAS G12R)
YVGLRTVGK

SEQ ID NO: 48446 - protein, 9 aa, synthetic construct
  source 1..9: note = Seed: VVGARGVGK (KRAS G12R)
YVGLRTVGL

SEQ ID NO: 48447 - protein, 9 aa, synthetic construct
  source 1..9: note = Seed: VVGARGVGK (KRAS G12R)
YVGLRTVGM

SEQ ID NO: 48448 - protein, 9 aa, synthetic construct
  source 1..9: note = Seed: VVGARGVGK (KRAS G12R)
YVGLRTVGN

SEQ ID NO: 48449 - protein, 9 aa, synthetic construct
  source 1..9: note = Seed: VVGARGVGK (KRAS G12R)
YVGLRTVGP

SEQ ID NO: 48450 - protein, 9 aa, synthetic construct
  source 1..9: note = Seed: VVGARGVGK (KRAS G12R)
YVGLRTVGQ

SEQ ID NO: 48451 - protein, 9 aa, synthetic construct
  source 1..9: note = Seed: VVGARGVGK (KRAS G12R)
YVGLRTVGR

SEQ ID NO: 48452 - protein, 9 aa, synthetic construct
  source 1..9: note = Seed: VVGARGVGK (KRAS G12R)
YVGLRTVGS

SEQ ID NO: 48453 - protein, 9 aa, synthetic construct
  source 1..9: note = Seed: VVGARGVGK (KRAS G12R)
YVGLRTVGT

SEQ ID NO: 48454 - protein, 9 aa, synthetic construct
  source 1..9: note = Seed: VVGARGVGK (KRAS G12R)
YVGLRTVGV

SEQ ID NO: 48455 - protein, 9 aa, synthetic construct
  source 1..9: note = Seed: VVGARGVGK (KRAS G12R)
YVGLRTVGW

SEQ ID NO: 48456 - protein, 9 aa, synthetic construct
  source 1..9: note = Seed: VVGARGVGK (KRAS G12R)
YVGLRTVGY

SEQ ID NO: 48457 - protein, 9 aa, synthetic construct
  source 1..9: note = Seed: VVGARGVGK (KRAS G12R)
YVGLRVVGA

SEQ ID NO: 48458 - protein, 9 aa, synthetic construct
  source 1..9: note = Seed: VVGARGVGK (KRAS G12R)
YVGLRVVGC

SEQ ID NO: 48459 - protein, 9 aa, synthetic construct
  source 1..9: note = Seed: VVGARGVGK (KRAS G12R)
YVGLRVVGD

SEQ ID NO: 48460 - protein, 9 aa, synthetic construct
  source 1..9: note = Seed: VVGARGVGK (KRAS G12R)
YVGLRVVGE

SEQ ID NO: 48461 - protein, 9 aa, synthetic construct
  source 1..9: note = Seed: VVGARGVGK (KRAS G12R)
YVGLRVVGF

SEQ ID NO: 48462 - protein, 9 aa, synthetic construct
  source 1..9: note = Seed: VVGARGVGK (KRAS G12R)
YVGLRVVGG

SEQ ID NO: 48463 - protein, 9 aa, synthetic construct
  source 1..9: note = Seed: VVGARGVGK (KRAS G12R)
YVGLRVVGH

SEQ ID NO: 48464 - protein, 9 aa, synthetic construct
  source 1..9: note = Seed: VVGARGVGK (KRAS G12R)
YVGLRVVGI

SEQ ID NO: 48465 - protein, 9 aa, synthetic construct
  source 1..9: note = Seed: VVGARGVGK (KRAS G12R)
YVGLRVVGK

SEQ ID NO: 48466 - protein, 9 aa, synthetic construct
  source 1..9: note = Seed: VVGARGVGK (KRAS G12R)
YVGLRVVGL

SEQ ID NO: 48467 - protein, 9 aa, synthetic construct
  source 1..9: note = Seed: VVGARGVGK (KRAS G12R)
YVGLRVVGM

SEQ ID NO: 48468 - protein, 9 aa, synthetic construct
  source 1..9: note = Seed: VVGARGVGK (KRAS G12R)
YVGLRVVGN

SEQ ID NO: 48469 - protein, 9 aa, synthetic construct
  source 1..9: note = Seed: VVGARGVGK (KRAS G12R)
YVGLRVVGP

SEQ ID NO: 48470 - protein, 9 aa, synthetic construct
  source 1..9: note = Seed: VVGARGVGK (KRAS G12R)
YVGLRVVGQ

SEQ ID NO: 48471 - protein, 9 aa, synthetic construct
  source 1..9: note = Seed: VVGARGVGK (KRAS G12R)
YVGLRVVGR

SEQ ID NO: 48472 - protein, 9 aa, synthetic construct
  source 1..9: note = Seed: VVGARGVGK (KRAS G12R)
YVGLRVVGS

SEQ ID NO: 48473 - protein, 9 aa, synthetic construct
  source 1..9: note = Seed: VVGARGVGK (KRAS G12R)
YVGLRVVGT

SEQ ID NO: 48474 - protein, 9 aa, synthetic construct
  source 1..9: note = Seed: VVGARGVGK (KRAS G12R)
YVGLRVVGV

SEQ ID NO: 48475 - protein, 9 aa, synthetic construct
  source 1..9: note = Seed: VVGARGVGK (KRAS G12R)
YVGLRVVGY

SEQ ID NO: 48476 - protein, 9 aa, synthetic construct
  source 1..9: note = Seed: VVGARGVGK (KRAS G12R)
YVGLRWVGI

SEQ ID NO: 48477 - protein, 9 aa, synthetic construct
  source 1..9: note = Seed: VVGARGVGK (KRAS G12R)
YVGLRWVGL

SEQ ID NO: 48478 - protein, 9 aa, synthetic construct
  source 1..9: note = Seed: VVGARGVGK (KRAS G12R)
YVGLRWVGM

SEQ ID NO: 48479 - protein, 9 aa, synthetic construct
  source 1..9: note = Seed: VVGARGVGK (KRAS G12R)
YVGLRWVGN

SEQ ID NO: 48480 - protein, 9 aa, synthetic construct
  source 1..9: note = Seed: VVGARGVGK (KRAS G12R)
YVGLRWVGS

SEQ ID NO: 48481 - protein, 9 aa, synthetic construct
  source 1..9: note = Seed: VVGARGVGK (KRAS G12R)
YVGLRWVGV

SEQ ID NO: 48482 - protein, 9 aa, synthetic construct
  source 1..9: note = Seed: VVGARGVGK (KRAS G12R)
YVGLRYVGI

SEQ ID NO: 48483 - protein, 9 aa, synthetic construct
  source 1..9: note = Seed: VVGARGVGK (KRAS G12R)
YVGLRYVGL

SEQ ID NO: 48484 - protein, 9 aa, synthetic construct
  source 1..9: note = Seed: VVGARGVGK (KRAS G12R)
YVGLRYVGM

SEQ ID NO: 48485 - protein, 9 aa, synthetic construct
  source 1..9: note = Seed: VVGARGVGK (KRAS G12R)
YVGLRYVGN

SEQ ID NO: 48486 - protein, 9 aa, synthetic construct
  source 1..9: note = Seed: VVGARGVGK (KRAS G12R)
YVGLRYVGS

SEQ ID NO: 48487 - protein, 9 aa, synthetic construct
  source 1..9: note = Seed: VVGARGVGK (KRAS G12R)
YVGLRYVGV

SEQ ID NO: 48488 - protein, 9 aa, synthetic construct
  source 1..9: note = Seed: VVGARGVGK (KRAS G12R)
YVGMRAVGA

SEQ ID NO: 48489 - protein, 9 aa, synthetic construct
  source 1..9: note = Seed: VVGARGVGK (KRAS G12R)
YVGMRAVGC

SEQ ID NO: 48490 - protein, 9 aa, synthetic construct
  source 1..9: note = Seed: VVGARGVGK (KRAS G12R)
YVGMRAVGD

SEQ ID NO: 48491 - protein, 9 aa, synthetic construct
  source 1..9: note = Seed: VVGARGVGK (KRAS G12R)
YVGMRAVGE

SEQ ID NO: 48492 - protein, 9 aa, synthetic construct
  source 1..9: note = Seed: VVGARGVGK (KRAS G12R)
YVGMRAVGF

SEQ ID NO: 48493 - protein, 9 aa, synthetic construct
  source 1..9: note = Seed: VVGARGVGK (KRAS G12R)
YVGMRAVGG

SEQ ID NO: 48494 - protein, 9 aa, synthetic construct
  source 1..9: note = Seed: VVGARGVGK (KRAS G12R)
YVGMRAVGH

SEQ ID NO: 48495 - protein, 9 aa, synthetic construct
  source 1..9: note = Seed: VVGARGVGK (KRAS G12R)
YVGMRAVGI

SEQ ID NO: 48496 - protein, 9 aa, synthetic construct
  source 1..9: note = Seed: VVGARGVGK (KRAS G12R)
YVGMRAVGK

SEQ ID NO: 48497 - protein, 9 aa, synthetic construct
  source 1..9: note = Seed: VVGARGVGK (KRAS G12R)
YVGMRAVGL

SEQ ID NO: 48498 - protein, 9 aa, synthetic construct
  source 1..9: note = Seed: VVGARGVGK (KRAS G12R)
YVGMRAVGM

SEQ ID NO: 48499 - protein, 9 aa, synthetic construct
  source 1..9: note = Seed: VVGARGVGK (KRAS G12R)
YVGMRAVGN

SEQ ID NO: 48500 - protein, 9 aa, synthetic construct
  source 1..9: note = Seed: VVGARGVGK (KRAS G12R)
YVGMRAVGP

SEQ ID NO: 48501 - protein, 9 aa, synthetic construct
  source 1..9: note = Seed: VVGARGVGK (KRAS G12R)
YVGMRAVGQ

SEQ ID NO: 48502 - protein, 9 aa, synthetic construct
  source 1..9: note = Seed: VVGARGVGK (KRAS G12R)
YVGMRAVGR

SEQ ID NO: 48503 - protein, 9 aa, synthetic construct
  source 1..9: note = Seed: VVGARGVGK (KRAS G12R)
YVGMRAVGS

SEQ ID NO: 48504 - protein, 9 aa, synthetic construct
  source 1..9: note = Seed: VVGARGVGK (KRAS G12R)
YVGMRAVGT

SEQ ID NO: 48505 - protein, 9 aa, synthetic construct
  source 1..9: note = Seed: VVGARGVGK (KRAS G12R)
YVGMRAVGV

SEQ ID NO: 48506 - protein, 9 aa, synthetic construct
  source 1..9: note = Seed: VVGARGVGK (KRAS G12R)
YVGMRAVGW

SEQ ID NO: 48507 - protein, 9 aa, synthetic construct
  source 1..9: note = Seed: VVGARGVGK (KRAS G12R)
YVGMRAVGY

SEQ ID NO: 48508 - protein, 9 aa, synthetic construct
  source 1..9: note = Seed: VVGARGVGK (KRAS G12R)
YVGMRCVGA

SEQ ID NO: 48509 - protein, 9 aa, synthetic construct
  source 1..9: note = Seed: VVGARGVGK (KRAS G12R)
YVGMRCVGG

SEQ ID NO: 48510 - protein, 9 aa, synthetic construct
  source 1..9: note = Seed: VVGARGVGK (KRAS G12R)
YVGMRCVGI

SEQ ID NO: 48511 - protein, 9 aa, synthetic construct
  source 1..9: note = Seed: VVGARGVGK (KRAS G12R)
YVGMRCVGL

SEQ ID NO: 48512 - protein, 9 aa, synthetic construct
  source 1..9: note = Seed: VVGARGVGK (KRAS G12R)
YVGMRCVGM

SEQ ID NO: 48513 - protein, 9 aa, synthetic construct
  source 1..9: note = Seed: VVGARGVGK (KRAS G12R)
YVGMRCVGN

SEQ ID NO: 48514 - protein, 9 aa, synthetic construct
  source 1..9: note = Seed: VVGARGVGK (KRAS G12R)
YVGMRCVGS

SEQ ID NO: 48515 - protein, 9 aa, synthetic construct
  source 1..9: note = Seed: VVGARGVGK (KRAS G12R)
YVGMRCVGT

SEQ ID NO: 48516 - protein, 9 aa, synthetic construct
  source 1..9: note = Seed: VVGARGVGK (KRAS G12R)
YVGMRCVGV

SEQ ID NO: 48517 - protein, 9 aa, synthetic construct
  source 1..9: note = Seed: VVGARGVGK (KRAS G12R)
YVGMRDVGA

SEQ ID NO: 48518 - protein, 9 aa, synthetic construct
  source 1..9: note = Seed: VVGARGVGK (KRAS G12R)
YVGMRDVGI

SEQ ID NO: 48519 - protein, 9 aa, synthetic construct
  source 1..9: note = Seed: VVGARGVGK (KRAS G12R)
YVGMRDVGL

SEQ ID NO: 48520 - protein, 9 aa, synthetic construct
  source 1..9: note = Seed: VVGARGVGK (KRAS G12R)
YVGMRDVGM

SEQ ID NO: 48521 - protein, 9 aa, synthetic construct
  source 1..9: note = Seed: VVGARGVGK (KRAS G12R)
YVGMRDVGN

SEQ ID NO: 48522 - protein, 9 aa, synthetic construct
  source 1..9: note = Seed: VVGARGVGK (KRAS G12R)
YVGMRDVGS

SEQ ID NO: 48523 - protein, 9 aa, synthetic construct
  source 1..9: note = Seed: VVGARGVGK (KRAS G12R)
YVGMRDVGT

SEQ ID NO: 48524 - protein, 9 aa, synthetic construct
  source 1..9: note = Seed: VVGARGVGK (KRAS G12R)
YVGMRDVGV

SEQ ID NO: 48525 - protein, 9 aa, synthetic construct
  source 1..9: note = Seed: VVGARGVGK (KRAS G12R)
YVGMREVGA

SEQ ID NO: 48526 - protein, 9 aa, synthetic construct
  source 1..9: note = Seed: VVGARGVGK (KRAS G12R)
YVGMREVGG

SEQ ID NO: 48527 - protein, 9 aa, synthetic construct
  source 1..9: note = Seed: VVGARGVGK (KRAS G12R)
YVGMREVGI

SEQ ID NO: 48528 - protein, 9 aa, synthetic construct
  source 1..9: note = Seed: VVGARGVGK (KRAS G12R)
YVGMREVGL

SEQ ID NO: 48529 - protein, 9 aa, synthetic construct
  source 1..9: note = Seed: VVGARGVGK (KRAS G12R)
YVGMREVGM

SEQ ID NO: 48530 - protein, 9 aa, synthetic construct
  source 1..9: note = Seed: VVGARGVGK (KRAS G12R)
YVGMREVGN

SEQ ID NO: 48531 - protein, 9 aa, synthetic construct
  source 1..9: note = Seed: VVGARGVGK (KRAS G12R)
YVGMREVGS

SEQ ID NO: 48532 - protein, 9 aa, synthetic construct
  source 1..9: note = Seed: VVGARGVGK (KRAS G12R)
YVGMREVGT

SEQ ID NO: 48533 - protein, 9 aa, synthetic construct
  source 1..9: note = Seed: VVGARGVGK (KRAS G12R)
YVGMREVGV

SEQ ID NO: 48534 - protein, 9 aa, synthetic construct
  source 1..9: note = Seed: VVGARGVGK (KRAS G12R)
YVGMRFVGI

SEQ ID NO: 48535 - protein, 9 aa, synthetic construct
  source 1..9: note = Seed: VVGARGVGK (KRAS G12R)
YVGMRFVGL

SEQ ID NO: 48536 - protein, 9 aa, synthetic construct
  source 1..9: note = Seed: VVGARGVGK (KRAS G12R)
YVGMRFVGM

SEQ ID NO: 48537 - protein, 9 aa, synthetic construct
  source 1..9: note = Seed: VVGARGVGK (KRAS G12R)
YVGMRFVGN

SEQ ID NO: 48538 - protein, 9 aa, synthetic construct
  source 1..9: note = Seed: VVGARGVGK (KRAS G12R)
YVGMRFVGR

SEQ ID NO: 48539 - protein, 9 aa, synthetic construct
  source 1..9: note = Seed: VVGARGVGK (KRAS G12R)
YVGMRFVGS

SEQ ID NO: 48540 - protein, 9 aa, synthetic construct
  source 1..9: note = Seed: VVGARGVGK (KRAS G12R)
YVGMRGVGA

SEQ ID NO: 48541 - protein, 9 aa, synthetic construct
  source 1..9: note = Seed: VVGARGVGK (KRAS G12R)
YVGMRGVGC

SEQ ID NO: 48542 - protein, 9 aa, synthetic construct
  source 1..9: note = Seed: VVGARGVGK (KRAS G12R)
YVGMRGVGD

SEQ ID NO: 48543 - protein, 9 aa, synthetic construct
  source 1..9: note = Seed: VVGARGVGK (KRAS G12R)
YVGMRGVGE

SEQ ID NO: 48544 - protein, 9 aa, synthetic construct
  source 1..9: note = Seed: VVGARGVGK (KRAS G12R)
YVGMRGVGF

SEQ ID NO: 48545 - protein, 9 aa, synthetic construct
  source 1..9: note = Seed: VVGARGVGK (KRAS G12R)
YVGMRGVGG

SEQ ID NO: 48546 - protein, 9 aa, synthetic construct
  source 1..9: note = Seed: VVGARGVGK (KRAS G12R)
YVGMRGVGH

SEQ ID NO: 48547 - protein, 9 aa, synthetic construct
  source 1..9: note = Seed: VVGARGVGK (KRAS G12R)
YVGMRGVGI

SEQ ID NO: 48548 - protein, 9 aa, synthetic construct
  source 1..9: note = Seed: VVGARGVGK (KRAS G12R)
YVGMRGVGK

SEQ ID NO: 48549 - protein, 9 aa, synthetic construct
  source 1..9: note = Seed: VVGARGVGK (KRAS G12R)
YVGMRGVGL

SEQ ID NO: 48550 - protein, 9 aa, synthetic construct
  source 1..9: note = Seed: VVGARGVGK (KRAS G12R)
YVGMRGVGM

SEQ ID NO: 48551 - protein, 9 aa, synthetic construct
  source 1..9: note = Seed: VVGARGVGK (KRAS G12R)
YVGMRGVGN

SEQ ID NO: 48552 - protein, 9 aa, synthetic construct
  source 1..9: note = Seed: VVGARGVGK (KRAS G12R)
YVGMRGVGP

SEQ ID NO: 48553 - protein, 9 aa, synthetic construct
  source 1..9: note = Seed: VVGARGVGK (KRAS G12R)
YVGMRGVGQ

SEQ ID NO: 48554 - protein, 9 aa, synthetic construct
  source 1..9: note = Seed: VVGARGVGK (KRAS G12R)
YVGMRGVGR

SEQ ID NO: 48555 - protein, 9 aa, synthetic construct
  source 1..9: note = Seed: VVGARGVGK (KRAS G12R)
YVGMRGVGS

SEQ ID NO: 48556 - protein, 9 aa, synthetic construct
  source 1..9: note = Seed: VVGARGVGK (KRAS G12R)
YVGMRGVGT

SEQ ID NO: 48557 - protein, 9 aa, synthetic construct
  source 1..9: note = Seed: VVGARGVGK (KRAS G12R)
YVGMRGVGV

SEQ ID NO: 48558 - protein, 9 aa, synthetic construct
  source 1..9: note = Seed: VVGARGVGK (KRAS G12R)
YVGMRGVGW

SEQ ID NO: 48559 - protein, 9 aa, synthetic construct
  source 1..9: note = Seed: VVGARGVGK (KRAS G12R)
YVGMRGVGY

SEQ ID NO: 48560 - protein, 9 aa, synthetic construct
  source 1..9: note = Seed: VVGARGVGK (KRAS G12R)
YVGMRHVGA

SEQ ID NO: 48561 - protein, 9 aa, synthetic construct
  source 1..9: note = Seed: VVGARGVGK (KRAS G12R)
YVGMRHVGF

SEQ ID NO: 48562 - protein, 9 aa, synthetic construct
  source 1..9: note = Seed: VVGARGVGK (KRAS G12R)
YVGMRHVGG

SEQ ID NO: 48563 - protein, 9 aa, synthetic construct
  source 1..9: note = Seed: VVGARGVGK (KRAS G12R)
YVGMRHVGH

SEQ ID NO: 48564 - protein, 9 aa, synthetic construct
  source 1..9: note = Seed: VVGARGVGK (KRAS G12R)
YVGMRHVGI

SEQ ID NO: 48565 - protein, 9 aa, synthetic construct
  source 1..9: note = Seed: VVGARGVGK (KRAS G12R)
YVGMRHVGL

SEQ ID NO: 48566 - protein, 9 aa, synthetic construct
  source 1..9: note = Seed: VVGARGVGK (KRAS G12R)
YVGMRHVGM

SEQ ID NO: 48567 - protein, 9 aa, synthetic construct
  source 1..9: note = Seed: VVGARGVGK (KRAS G12R)
YVGMRHVGN

SEQ ID NO: 48568 - protein, 9 aa, synthetic construct
  source 1..9: note = Seed: VVGARGVGK (KRAS G12R)
YVGMRHVGQ

SEQ ID NO: 48569 - protein, 9 aa, synthetic construct
  source 1..9: note = Seed: VVGARGVGK (KRAS G12R)
YVGMRHVGR

SEQ ID NO: 48570 - protein, 9 aa, synthetic construct
  source 1..9: note = Seed: VVGARGVGK (KRAS G12R)
YVGMRHVGS

SEQ ID NO: 48571 - protein, 9 aa, synthetic construct
  source 1..9: note = Seed: VVGARGVGK (KRAS G12R)
YVGMRHVGT

SEQ ID NO: 48572 - protein, 9 aa, synthetic construct
  source 1..9: note = Seed: VVGARGVGK (KRAS G12R)
YVGMRHVGV

SEQ ID NO: 48573 - protein, 9 aa, synthetic construct
  source 1..9: note = Seed: VVGARGVGK (KRAS G12R)
YVGMRHVGY

SEQ ID NO: 48574 - protein, 9 aa, synthetic construct
  source 1..9: note = Seed: VVGARGVGK (KRAS G12R)
YVGMRIVGA

SEQ ID NO: 48575 - protein, 9 aa, synthetic construct
  source 1..9: note = Seed: VVGARGVGK (KRAS G12R)
YVGMRIVGD

SEQ ID NO: 48576 - protein, 9 aa, synthetic construct
  source 1..9: note = Seed: VVGARGVGK (KRAS G12R)
YVGMRIVGE

SEQ ID NO: 48577 - protein, 9 aa, synthetic construct
  source 1..9: note = Seed: VVGARGVGK (KRAS G12R)
YVGMRIVGF

SEQ ID NO: 48578 - protein, 9 aa, synthetic construct
  source 1..9: note = Seed: VVGARGVGK (KRAS G12R)
YVGMRIVGG

SEQ ID NO: 48579 - protein, 9 aa, synthetic construct
  source 1..9: note = Seed: VVGARGVGK (KRAS G12R)
YVGMRIVGH

SEQ ID NO: 48580 - protein, 9 aa, synthetic construct
  source 1..9: note = Seed: VVGARGVGK (KRAS G12R)
YVGMRIVGI

SEQ ID NO: 48581 - protein, 9 aa, synthetic construct
  source 1..9: note = Seed: VVGARGVGK (KRAS G12R)
YVGMRIVGK

SEQ ID NO: 48582 - protein, 9 aa, synthetic construct
  source 1..9: note = Seed: VVGARGVGK (KRAS G12R)
YVGMRIVGL

SEQ ID NO: 48583 - protein, 9 aa, synthetic construct
  source 1..9: note = Seed: VVGARGVGK (KRAS G12R)
YVGMRIVGM

SEQ ID NO: 48584 - protein, 9 aa, synthetic construct
  source 1..9: note = Seed: VVGARGVGK (KRAS G12R)
YVGMRIVGN

SEQ ID NO: 48585 - protein, 9 aa, synthetic construct
  source 1..9: note = Seed: VVGARGVGK (KRAS G12R)
YVGMRIVGP

SEQ ID NO: 48586 - protein, 9 aa, synthetic construct
  source 1..9: note = Seed: VVGARGVGK (KRAS G12R)
YVGMRIVGQ

SEQ ID NO: 48587 - protein, 9 aa, synthetic construct
  source 1..9: note = Seed: VVGARGVGK (KRAS G12R)
YVGMRIVGR

SEQ ID NO: 48588 - protein, 9 aa, synthetic construct
  source 1..9: note = Seed: VVGARGVGK (KRAS G12R)
YVGMRIVGS

SEQ ID NO: 48589 - protein, 9 aa, synthetic construct
  source 1..9: note = Seed: VVGARGVGK (KRAS G12R)
YVGMRIVGT

SEQ ID NO: 48590 - protein, 9 aa, synthetic construct
  source 1..9: note = Seed: VVGARGVGK (KRAS G12R)
YVGMRIVGV

SEQ ID NO: 48591 - protein, 9 aa, synthetic construct
  source 1..9: note = Seed: VVGARGVGK (KRAS G12R)
YVGMRIVGY

SEQ ID NO: 48592 - protein, 9 aa, synthetic construct
  source 1..9: note = Seed: VVGARGVGK (KRAS G12R)
YVGMRKVGA

SEQ ID NO: 48593 - protein, 9 aa, synthetic construct
  source 1..9: note = Seed: VVGARGVGK (KRAS G12R)
YVGMRKVGI

SEQ ID NO: 48594 - protein, 9 aa, synthetic construct
  source 1..9: note = Seed: VVGARGVGK (KRAS G12R)
YVGMRKVGL

SEQ ID NO: 48595 - protein, 9 aa, synthetic construct
  source 1..9: note = Seed: VVGARGVGK (KRAS G12R)
YVGMRKVGM

SEQ ID NO: 48596 - protein, 9 aa, synthetic construct
  source 1..9: note = Seed: VVGARGVGK (KRAS G12R)
YVGMRKVGN

SEQ ID NO: 48597 - protein, 9 aa, synthetic construct
  source 1..9: note = Seed: VVGARGVGK (KRAS G12R)
YVGMRKVGR

SEQ ID NO: 48598 - protein, 9 aa, synthetic construct
  source 1..9: note = Seed: VVGARGVGK (KRAS G12R)
YVGMRKVGS

SEQ ID NO: 48599 - protein, 9 aa, synthetic construct
  source 1..9: note = Seed: VVGARGVGK (KRAS G12R)
YVGMRKVGT

SEQ ID NO: 48600 - protein, 9 aa, synthetic construct
  source 1..9: note = Seed: VVGARGVGK (KRAS G12R)
YVGMRKVGV

SEQ ID NO: 48601 - protein, 9 aa, synthetic construct
  source 1..9: note = Seed: VVGARGVGK (KRAS G12R)
YVGMRLVGA

SEQ ID NO: 48602 - protein, 9 aa, synthetic construct
  source 1..9: note = Seed: VVGARGVGK (KRAS G12R)
YVGMRLVGD

SEQ ID NO: 48603 - protein, 9 aa, synthetic construct
  source 1..9: note = Seed: VVGARGVGK (KRAS G12R)
YVGMRLVGE

SEQ ID NO: 48604 - protein, 9 aa, synthetic construct
  source 1..9: note = Seed: VVGARGVGK (KRAS G12R)
YVGMRLVGG

SEQ ID NO: 48605 - protein, 9 aa, synthetic construct
  source 1..9: note = Seed: VVGARGVGK (KRAS G12R)
YVGMRLVGH

SEQ ID NO: 48606 - protein, 9 aa, synthetic construct
  source 1..9: note = Seed: VVGARGVGK (KRAS G12R)
YVGMRLVGI

SEQ ID NO: 48607 - protein, 9 aa, synthetic construct
  source 1..9: note = Seed: VVGARGVGK (KRAS G12R)
YVGMRLVGK

SEQ ID NO: 48608 - protein, 9 aa, synthetic construct
  source 1..9: note = Seed: VVGARGVGK (KRAS G12R)
YVGMRLVGL

SEQ ID NO: 48609 - protein, 9 aa, synthetic construct
  source 1..9: note = Seed: VVGARGVGK (KRAS G12R)
YVGMRLVGM

SEQ ID NO: 48610 - protein, 9 aa, synthetic construct
  source 1..9: note = Seed: VVGARGVGK (KRAS G12R)
YVGMRLVGN

SEQ ID NO: 48611 - protein, 9 aa, synthetic construct
  source 1..9: note = Seed: VVGARGVGK (KRAS G12R)
YVGMRLVGQ

SEQ ID NO: 48612 - protein, 9 aa, synthetic construct
  source 1..9: note = Seed: VVGARGVGK (KRAS G12R)
YVGMRLVGR

SEQ ID NO: 48613 - protein, 9 aa, synthetic construct
  source 1..9: note = Seed: VVGARGVGK (KRAS G12R)
YVGMRLVGS

SEQ ID NO: 48614 - protein, 9 aa, synthetic construct
  source 1..9: note = Seed: VVGARGVGK (KRAS G12R)
YVGMRLVGT

SEQ ID NO: 48615 - protein, 9 aa, synthetic construct
  source 1..9: note = Seed: VVGARGVGK (KRAS G12R)
YVGMRLVGV

SEQ ID NO: 48616 - protein, 9 aa, synthetic construct
  source 1..9: note = Seed: VVGARGVGK (KRAS G12R)
YVGMRMVGA

SEQ ID NO: 48617 - protein, 9 aa, synthetic construct
  source 1..9: note = Seed: VVGARGVGK (KRAS G12R)
YVGMRMVGD

SEQ ID NO: 48618 - protein, 9 aa, synthetic construct
  source 1..9: note = Seed: VVGARGVGK (KRAS G12R)
YVGMRMVGE

SEQ ID NO: 48619 - protein, 9 aa, synthetic construct
  source 1..9: note = Seed: VVGARGVGK (KRAS G12R)
YVGMRMVGG

SEQ ID NO: 48620 - protein, 9 aa, synthetic construct
  source 1..9: note = Seed: VVGARGVGK (KRAS G12R)
YVGMRMVGH

SEQ ID NO: 48621 - protein, 9 aa, synthetic construct
  source 1..9: note = Seed: VVGARGVGK (KRAS G12R)
YVGMRMVGI

SEQ ID NO: 48622 - protein, 9 aa, synthetic construct
  source 1..9: note = Seed: VVGARGVGK (KRAS G12R)
YVGMRMVGK

SEQ ID NO: 48623 - protein, 9 aa, synthetic construct
  source 1..9: note = Seed: VVGARGVGK (KRAS G12R)
YVGMRMVGL

SEQ ID NO: 48624 - protein, 9 aa, synthetic construct
  source 1..9: note = Seed: VVGARGVGK (KRAS G12R)
YVGMRMVGM

SEQ ID NO: 48625 - protein, 9 aa, synthetic construct
  source 1..9: note = Seed: VVGARGVGK (KRAS G12R)
YVGMRMVGN

SEQ ID NO: 48626 - protein, 9 aa, synthetic construct
  source 1..9: note = Seed: VVGARGVGK (KRAS G12R)
YVGMRMVGQ

SEQ ID NO: 48627 - protein, 9 aa, synthetic construct
  source 1..9: note = Seed: VVGARGVGK (KRAS G12R)
YVGMRMVGR

SEQ ID NO: 48628 - protein, 9 aa, synthetic construct
  source 1..9: note = Seed: VVGARGVGK (KRAS G12R)
YVGMRMVGS

SEQ ID NO: 48629 - protein, 9 aa, synthetic construct
  source 1..9: note = Seed: VVGARGVGK (KRAS G12R)
YVGMRMVGT

SEQ ID NO: 48630 - protein, 9 aa, synthetic construct
  source 1..9: note = Seed: VVGARGVGK (KRAS G12R)
YVGMRMVGV

SEQ ID NO: 48631 - protein, 9 aa, synthetic construct
  source 1..9: note = Seed: VVGARGVGK (KRAS G12R)
YVGMRNVGA

SEQ ID NO: 48632 - protein, 9 aa, synthetic construct
  source 1..9: note = Seed: VVGARGVGK (KRAS G12R)
YVGMRNVGC

SEQ ID NO: 48633 - protein, 9 aa, synthetic construct
  source 1..9: note = Seed: VVGARGVGK (KRAS G12R)
YVGMRNVGD

SEQ ID NO: 48634 - protein, 9 aa, synthetic construct
  source 1..9: note = Seed: VVGARGVGK (KRAS G12R)
YVGMRNVGE

SEQ ID NO: 48635 - protein, 9 aa, synthetic construct
  source 1..9: note = Seed: VVGARGVGK (KRAS G12R)
YVGMRNVGF

SEQ ID NO: 48636 - protein, 9 aa, synthetic construct
  source 1..9: note = Seed: VVGARGVGK (KRAS G12R)
YVGMRNVGG

SEQ ID NO: 48637 - protein, 9 aa, synthetic construct
  source 1..9: note = Seed: VVGARGVGK (KRAS G12R)
YVGMRNVGH

SEQ ID NO: 48638 - protein, 9 aa, synthetic construct
  source 1..9: note = Seed: VVGARGVGK (KRAS G12R)
YVGMRNVGI

SEQ ID NO: 48639 - protein, 9 aa, synthetic construct
  source 1..9: note = Seed: VVGARGVGK (KRAS G12R)
YVGMRNVGK

SEQ ID NO: 48640 - protein, 9 aa, synthetic construct
  source 1..9: note = Seed: VVGARGVGK (KRAS G12R)
YVGMRNVGL

SEQ ID NO: 48641 - protein, 9 aa, synthetic construct
  source 1..9: note = Seed: VVGARGVGK (KRAS G12R)
YVGMRNVGM

SEQ ID NO: 48642 - protein, 9 aa, synthetic construct
  source 1..9: note = Seed: VVGARGVGK (KRAS G12R)
YVGMRNVGN

SEQ ID NO: 48643 - protein, 9 aa, synthetic construct
  source 1..9: note = Seed: VVGARGVGK (KRAS G12R)
YVGMRNVGP

SEQ ID NO: 48644 - protein, 9 aa, synthetic construct
  source 1..9: note = Seed: VVGARGVGK (KRAS G12R)
YVGMRNVGQ

SEQ ID NO: 48645 - protein, 9 aa, synthetic construct
  source 1..9: note = Seed: VVGARGVGK (KRAS G12R)
YVGMRNVGR

SEQ ID NO: 48646 - protein, 9 aa, synthetic construct
  source 1..9: note = Seed: VVGARGVGK (KRAS G12R)
YVGMRNVGS

SEQ ID NO: 48647 - protein, 9 aa, synthetic construct
  source 1..9: note = Seed: VVGARGVGK (KRAS G12R)
YVGMRNVGT

SEQ ID NO: 48648 - protein, 9 aa, synthetic construct
  source 1..9: note = Seed: VVGARGVGK (KRAS G12R)
YVGMRNVGV

SEQ ID NO: 48649 - protein, 9 aa, synthetic construct
  source 1..9: note = Seed: VVGARGVGK (KRAS G12R)
YVGMRNVGW

SEQ ID NO: 48650 - protein, 9 aa, synthetic construct
  source 1..9: note = Seed: VVGARGVGK (KRAS G12R)
YVGMRNVGY

SEQ ID NO: 48651 - protein, 9 aa, synthetic construct
  source 1..9: note = Seed: VVGARGVGK (KRAS G12R)
YVGMRPVGA

SEQ ID NO: 48652 - protein, 9 aa, synthetic construct
  source 1..9: note = Seed: VVGARGVGK (KRAS G12R)
YVGMRPVGC

SEQ ID NO: 48653 - protein, 9 aa, synthetic construct
  source 1..9: note = Seed: VVGARGVGK (KRAS G12R)
YVGMRPVGD

SEQ ID NO: 48654 - protein, 9 aa, synthetic construct
  source 1..9: note = Seed: VVGARGVGK (KRAS G12R)
YVGMRPVGE

SEQ ID NO: 48655 - protein, 9 aa, synthetic construct
  source 1..9: note = Seed: VVGARGVGK (KRAS G12R)
YVGMRPVGF

SEQ ID NO: 48656 - protein, 9 aa, synthetic construct
  source 1..9: note = Seed: VVGARGVGK (KRAS G12R)
YVGMRPVGG

SEQ ID NO: 48657 - protein, 9 aa, synthetic construct
  source 1..9: note = Seed: VVGARGVGK (KRAS G12R)
YVGMRPVGH

SEQ ID NO: 48658 - protein, 9 aa, synthetic construct
  source 1..9: note = Seed: VVGARGVGK (KRAS G12R)
YVGMRPVGI

SEQ ID NO: 48659 - protein, 9 aa, synthetic construct
  source 1..9: note = Seed: VVGARGVGK (KRAS G12R)
YVGMRPVGK

SEQ ID NO: 48660 - protein, 9 aa, synthetic construct
  source 1..9: note = Seed: VVGARGVGK (KRAS G12R)
YVGMRPVGL

SEQ ID NO: 48661 - protein, 9 aa, synthetic construct
  source 1..9: note = Seed: VVGARGVGK (KRAS G12R)
YVGMRPVGM

SEQ ID NO: 48662 - protein, 9 aa, synthetic construct
  source 1..9: note = Seed: VVGARGVGK (KRAS G12R)
YVGMRPVGN

SEQ ID NO: 48663 - protein, 9 aa, synthetic construct
  source 1..9: note = Seed: VVGARGVGK (KRAS G12R)
YVGMRPVGP

SEQ ID NO: 48664 - protein, 9 aa, synthetic construct
  source 1..9: note = Seed: VVGARGVGK (KRAS G12R)
YVGMRPVGQ

SEQ ID NO: 48665 - protein, 9 aa, synthetic construct
  source 1..9: note = Seed: VVGARGVGK (KRAS G12R)
YVGMRPVGR

SEQ ID NO: 48666 - protein, 9 aa, synthetic construct
  source 1..9: note = Seed: VVGARGVGK (KRAS G12R)
YVGMRPVGS

SEQ ID NO: 48667 - protein, 9 aa, synthetic construct
  source 1..9: note = Seed: VVGARGVGK (KRAS G12R)
YVGMRPVGT

SEQ ID NO: 48668 - protein, 9 aa, synthetic construct
  source 1..9: note = Seed: VVGARGVGK (KRAS G12R)
YVGMRPVGV

SEQ ID NO: 48669 - protein, 9 aa, synthetic construct
  source 1..9: note = Seed: VVGARGVGK (KRAS G12R)
YVGMRPVGW

SEQ ID NO: 48670 - protein, 9 aa, synthetic construct
  source 1..9: note = Seed: VVGARGVGK (KRAS G12R)
YVGMRPVGY

SEQ ID NO: 48671 - protein, 9 aa, synthetic construct
  source 1..9: note = Seed: VVGARGVGK (KRAS G12R)
YVGMRQVGA

SEQ ID NO: 48672 - protein, 9 aa, synthetic construct
  source 1..9: note = Seed: VVGARGVGK (KRAS G12R)
YVGMRQVGF

SEQ ID NO: 48673 - protein, 9 aa, synthetic construct
  source 1..9: note = Seed: VVGARGVGK (KRAS G12R)
YVGMRQVGG

SEQ ID NO: 48674 - protein, 9 aa, synthetic construct
  source 1..9: note = Seed: VVGARGVGK (KRAS G12R)
YVGMRQVGH

SEQ ID NO: 48675 - protein, 9 aa, synthetic construct
  source 1..9: note = Seed: VVGARGVGK (KRAS G12R)
YVGMRQVGI

SEQ ID NO: 48676 - protein, 9 aa, synthetic construct
  source 1..9: note = Seed: VVGARGVGK (KRAS G12R)
YVGMRQVGL

SEQ ID NO: 48677 - protein, 9 aa, synthetic construct
  source 1..9: note = Seed: VVGARGVGK (KRAS G12R)
YVGMRQVGM

SEQ ID NO: 48678 - protein, 9 aa, synthetic construct
  source 1..9: note = Seed: VVGARGVGK (KRAS G12R)
YVGMRQVGN

SEQ ID NO: 48679 - protein, 9 aa, synthetic construct
  source 1..9: note = Seed: VVGARGVGK (KRAS G12R)
YVGMRQVGR

SEQ ID NO: 48680 - protein, 9 aa, synthetic construct
  source 1..9: note = Seed: VVGARGVGK (KRAS G12R)
YVGMRQVGS

SEQ ID NO: 48681 - protein, 9 aa, synthetic construct
  source 1..9: note = Seed: VVGARGVGK (KRAS G12R)
YVGMRQVGT

SEQ ID NO: 48682 - protein, 9 aa, synthetic construct
  source 1..9: note = Seed: VVGARGVGK (KRAS G12R)
YVGMRQVGV

SEQ ID NO: 48683 - protein, 9 aa, synthetic construct
  source 1..9: note = Seed: VVGARGVGK (KRAS G12R)
YVGMRQVGY

SEQ ID NO: 48684 - protein, 9 aa, synthetic construct
  source 1..9: note = Seed: VVGARGVGK (KRAS G12R)
YVGMRRVGA

SEQ ID NO: 48685 - protein, 9 aa, synthetic construct
  source 1..9: note = Seed: VVGARGVGK (KRAS G12R)
YVGMRRVGF

SEQ ID NO: 48686 - protein, 9 aa, synthetic construct
  source 1..9: note = Seed: VVGARGVGK (KRAS G12R)
YVGMRRVGH

SEQ ID NO: 48687 - protein, 9 aa, synthetic construct
  source 1..9: note = Seed: VVGARGVGK (KRAS G12R)
YVGMRRVGI

SEQ ID NO: 48688 - protein, 9 aa, synthetic construct
  source 1..9: note = Seed: VVGARGVGK (KRAS G12R)
YVGMRRVGL

SEQ ID NO: 48689 - protein, 9 aa, synthetic construct
  source 1..9: note = Seed: VVGARGVGK (KRAS G12R)
YVGMRRVGM

SEQ ID NO: 48690 - protein, 9 aa, synthetic construct
  source 1..9: note = Seed: VVGARGVGK (KRAS G12R)
YVGMRRVGR

SEQ ID NO: 48691 - protein, 9 aa, synthetic construct
  source 1..9: note = Seed: VVGARGVGK (KRAS G12R)
YVGMRRVGS

SEQ ID NO: 48692 - protein, 9 aa, synthetic construct
  source 1..9: note = Seed: VVGARGVGK (KRAS G12R)
YVGMRRVGT

SEQ ID NO: 48693 - protein, 9 aa, synthetic construct
  source 1..9: note = Seed: VVGARGVGK (KRAS G12R)
YVGMRRVGV

SEQ ID NO: 48694 - protein, 9 aa, synthetic construct
  source 1..9: note = Seed: VVGARGVGK (KRAS G12R)
YVGMRRVGY

SEQ ID NO: 48695 - protein, 9 aa, synthetic construct
  source 1..9: note = Seed: VVGARGVGK (KRAS G12R)
YVGMRSVGA

SEQ ID NO: 48696 - protein, 9 aa, synthetic construct
  source 1..9: note = Seed: VVGARGVGK (KRAS G12R)
YVGMRSVGC

SEQ ID NO: 48697 - protein, 9 aa, synthetic construct
  source 1..9: note = Seed: VVGARGVGK (KRAS G12R)
YVGMRSVGD

SEQ ID NO: 48698 - protein, 9 aa, synthetic construct
  source 1..9: note = Seed: VVGARGVGK (KRAS G12R)
YVGMRSVGE

SEQ ID NO: 48699 - protein, 9 aa, synthetic construct
  source 1..9: note = Seed: VVGARGVGK (KRAS G12R)
YVGMRSVGF

SEQ ID NO: 48700 - protein, 9 aa, synthetic construct
  source 1..9: note = Seed: VVGARGVGK (KRAS G12R)
YVGMRSVGG

SEQ ID NO: 48701 - protein, 9 aa, synthetic construct
  source 1..9: note = Seed: VVGARGVGK (KRAS G12R)
YVGMRSVGH

SEQ ID NO: 48702 - protein, 9 aa, synthetic construct
  source 1..9: note = Seed: VVGARGVGK (KRAS G12R)
YVGMRSVGI

SEQ ID NO: 48703 - protein, 9 aa, synthetic construct
  source 1..9: note = Seed: VVGARGVGK (KRAS G12R)
YVGMRSVGK

SEQ ID NO: 48704 - protein, 9 aa, synthetic construct
  source 1..9: note = Seed: VVGARGVGK (KRAS G12R)
YVGMRSVGL

SEQ ID NO: 48705 - protein, 9 aa, synthetic construct
  source 1..9: note = Seed: VVGARGVGK (KRAS G12R)
YVGMRSVGM

SEQ ID NO: 48706 - protein, 9 aa, synthetic construct
  source 1..9: note = Seed: VVGARGVGK (KRAS G12R)
YVGMRSVGN

SEQ ID NO: 48707 - protein, 9 aa, synthetic construct
  source 1..9: note = Seed: VVGARGVGK (KRAS G12R)
YVGMRSVGP

SEQ ID NO: 48708 - protein, 9 aa, synthetic construct
  source 1..9: note = Seed: VVGARGVGK (KRAS G12R)
YVGMRSVGQ

SEQ ID NO: 48709 - protein, 9 aa, synthetic construct
  source 1..9: note = Seed: VVGARGVGK (KRAS G12R)
YVGMRSVGR

SEQ ID NO: 48710 - protein, 9 aa, synthetic construct
  source 1..9: note = Seed: VVGARGVGK (KRAS G12R)
YVGMRSVGS

SEQ ID NO: 48711 - protein, 9 aa, synthetic construct
  source 1..9: note = Seed: VVGARGVGK (KRAS G12R)
YVGMRSVGT

SEQ ID NO: 48712 - protein, 9 aa, synthetic construct
  source 1..9: note = Seed: VVGARGVGK (KRAS G12R)
YVGMRSVGV

SEQ ID NO: 48713 - protein, 9 aa, synthetic construct
  source 1..9: note = Seed: VVGARGVGK (KRAS G12R)
YVGMRSVGW

SEQ ID NO: 48714 - protein, 9 aa, synthetic construct
  source 1..9: note = Seed: VVGARGVGK (KRAS G12R)
YVGMRSVGY

SEQ ID NO: 48715 - protein, 9 aa, synthetic construct
  source 1..9: note = Seed: VVGARGVGK (KRAS G12R)
YVGMRTVGA

SEQ ID NO: 48716 - protein, 9 aa, synthetic construct
  source 1..9: note = Seed: VVGARGVGK (KRAS G12R)
YVGMRTVGC

SEQ ID NO: 48717 - protein, 9 aa, synthetic construct
  source 1..9: note = Seed: VVGARGVGK (KRAS G12R)
YVGMRTVGD

SEQ ID NO: 48718 - protein, 9 aa, synthetic construct
  source 1..9: note = Seed: VVGARGVGK (KRAS G12R)
YVGMRTVGE

SEQ ID NO: 48719 - protein, 9 aa, synthetic construct
  source 1..9: note = Seed: VVGARGVGK (KRAS G12R)
YVGMRTVGF

SEQ ID NO: 48720 - protein, 9 aa, synthetic construct
  source 1..9: note = Seed: VVGARGVGK (KRAS G12R)
YVGMRTVGG

SEQ ID NO: 48721 - protein, 9 aa, synthetic construct
  source 1..9: note = Seed: VVGARGVGK (KRAS G12R)
YVGMRTVGH

SEQ ID NO: 48722 - protein, 9 aa, synthetic construct
  source 1..9: note = Seed: VVGARGVGK (KRAS G12R)
YVGMRTVGI

SEQ ID NO: 48723 - protein, 9 aa, synthetic construct
  source 1..9: note = Seed: VVGARGVGK (KRAS G12R)
YVGMRTVGK

SEQ ID NO: 48724 - protein, 9 aa, synthetic construct
  source 1..9: note = Seed: VVGARGVGK (KRAS G12R)
YVGMRTVGL

SEQ ID NO: 48725 - protein, 9 aa, synthetic construct
  source 1..9: note = Seed: VVGARGVGK (KRAS G12R)
YVGMRTVGM

SEQ ID NO: 48726 - protein, 9 aa, synthetic construct
  source 1..9: note = Seed: VVGARGVGK (KRAS G12R)
YVGMRTVGN

SEQ ID NO: 48727 - protein, 9 aa, synthetic construct
  source 1..9: note = Seed: VVGARGVGK (KRAS G12R)
YVGMRTVGP

SEQ ID NO: 48728 - protein, 9 aa, synthetic construct
  source 1..9: note = Seed: VVGARGVGK (KRAS G12R)
YVGMRTVGQ

SEQ ID NO: 48729 - protein, 9 aa, synthetic construct
  source 1..9: note = Seed: VVGARGVGK (KRAS G12R)
YVGMRTVGR

SEQ ID NO: 48730 - protein, 9 aa, synthetic construct
  source 1..9: note = Seed: VVGARGVGK (KRAS G12R)
YVGMRTVGS

SEQ ID NO: 48731 - protein, 9 aa, synthetic construct
  source 1..9: note = Seed: VVGARGVGK (KRAS G12R)
YVGMRTVGT

SEQ ID NO: 48732 - protein, 9 aa, synthetic construct
  source 1..9: note = Seed: VVGARGVGK (KRAS G12R)
YVGMRTVGV

SEQ ID NO: 48733 - protein, 9 aa, synthetic construct
  source 1..9: note = Seed: VVGARGVGK (KRAS G12R)
YVGMRTVGW

SEQ ID NO: 48734 - protein, 9 aa, synthetic construct
  source 1..9: note = Seed: VVGARGVGK (KRAS G12R)
YVGMRTVGY

SEQ ID NO: 48735 - protein, 9 aa, synthetic construct
  source 1..9: note = Seed: VVGARGVGK (KRAS G12R)
YVGMRVVGA

SEQ ID NO: 48736 - protein, 9 aa, synthetic construct
  source 1..9: note = Seed: VVGARGVGK (KRAS G12R)
YVGMRVVGC

SEQ ID NO: 48737 - protein, 9 aa, synthetic construct
  source 1..9: note = Seed: VVGARGVGK (KRAS G12R)
YVGMRVVGD

SEQ ID NO: 48738 - protein, 9 aa, synthetic construct
  source 1..9: note = Seed: VVGARGVGK (KRAS G12R)
YVGMRVVGE

SEQ ID NO: 48739 - protein, 9 aa, synthetic construct
  source 1..9: note = Seed: VVGARGVGK (KRAS G12R)
YVGMRVVGF

SEQ ID NO: 48740 - protein, 9 aa, synthetic construct
  source 1..9: note = Seed: VVGARGVGK (KRAS G12R)
YVGMRVVGG

SEQ ID NO: 48741 - protein, 9 aa, synthetic construct
  source 1..9: note = Seed: VVGARGVGK (KRAS G12R)
YVGMRVVGH

SEQ ID NO: 48742 - protein, 9 aa, synthetic construct
  source 1..9: note = Seed: VVGARGVGK (KRAS G12R)
YVGMRVVGI

SEQ ID NO: 48743 - protein, 9 aa, synthetic construct
  source 1..9: note = Seed: VVGARGVGK (KRAS G12R)
YVGMRVVGK

SEQ ID NO: 48744 - protein, 9 aa, synthetic construct
  source 1..9: note = Seed: VVGARGVGK (KRAS G12R)
YVGMRVVGL

SEQ ID NO: 48745 - protein, 9 aa, synthetic construct
  source 1..9: note = Seed: VVGARGVGK (KRAS G12R)
YVGMRVVGM

SEQ ID NO: 48746 - protein, 9 aa, synthetic construct
  source 1..9: note = Seed: VVGARGVGK (KRAS G12R)
YVGMRVVGN

SEQ ID NO: 48747 - protein, 9 aa, synthetic construct
  source 1..9: note = Seed: VVGARGVGK (KRAS G12R)
YVGMRVVGP

SEQ ID NO: 48748 - protein, 9 aa, synthetic construct
  source 1..9: note = Seed: VVGARGVGK (KRAS G12R)
YVGMRVVGQ

SEQ ID NO: 48749 - protein, 9 aa, synthetic construct
  source 1..9: note = Seed: VVGARGVGK (KRAS G12R)
YVGMRVVGR

SEQ ID NO: 48750 - protein, 9 aa, synthetic construct
  source 1..9: note = Seed: VVGARGVGK (KRAS G12R)
YVGMRVVGS

SEQ ID NO: 48751 - protein, 9 aa, synthetic construct
  source 1..9: note = Seed: VVGARGVGK (KRAS G12R)
YVGMRVVGT

SEQ ID NO: 48752 - protein, 9 aa, synthetic construct
  source 1..9: note = Seed: VVGARGVGK (KRAS G12R)
YVGMRVVGV

SEQ ID NO: 48753 - protein, 9 aa, synthetic construct
  source 1..9: note = Seed: VVGARGVGK (KRAS G12R)
YVGMRVVGY

SEQ ID NO: 48754 - protein, 9 aa, synthetic construct
  source 1..9: note = Seed: VVGARGVGK (KRAS G12R)
YVGMRWVGI

SEQ ID NO: 48755 - protein, 9 aa, synthetic construct
  source 1..9: note = Seed: VVGARGVGK (KRAS G12R)
YVGMRWVGL

SEQ ID NO: 48756 - protein, 9 aa, synthetic construct
  source 1..9: note = Seed: VVGARGVGK (KRAS G12R)
YVGMRWVGM

SEQ ID NO: 48757 - protein, 9 aa, synthetic construct
  source 1..9: note = Seed: VVGARGVGK (KRAS G12R)
YVGMRWVGN

SEQ ID NO: 48758 - protein, 9 aa, synthetic construct
  source 1..9: note = Seed: VVGARGVGK (KRAS G12R)
YVGMRWVGS

SEQ ID NO: 48759 - protein, 9 aa, synthetic construct
  source 1..9: note = Seed: VVGARGVGK (KRAS G12R)
YVGMRWVGV

SEQ ID NO: 48760 - protein, 9 aa, synthetic construct
  source 1..9: note = Seed: VVGARGVGK (KRAS G12R)
YVGMRYVGI

SEQ ID NO: 48761 - protein, 9 aa, synthetic construct
  source 1..9: note = Seed: VVGARGVGK (KRAS G12R)
YVGMRYVGL

SEQ ID NO: 48762 - protein, 9 aa, synthetic construct
  source 1..9: note = Seed: VVGARGVGK (KRAS G12R)
YVGMRYVGM

SEQ ID NO: 48763 - protein, 9 aa, synthetic construct
  source 1..9: note = Seed: VVGARGVGK (KRAS G12R)
YVGMRYVGN

SEQ ID NO: 48764 - protein, 9 aa, synthetic construct
  source 1..9: note = Seed: VVGARGVGK (KRAS G12R)
YVGMRYVGS

SEQ ID NO: 48765 - protein, 9 aa, synthetic construct
  source 1..9: note = Seed: VVGARGVGK (KRAS G12R)
YVGMRYVGV

SEQ ID NO: 48766 - protein, 9 aa, synthetic construct
  source 1..9: note = Seed: VVGARGVGK (KRAS G12R)
YVGNRAVGA

SEQ ID NO: 48767 - protein, 9 aa, synthetic construct
  source 1..9: note = Seed: VVGARGVGK (KRAS G12R)
YVGNRAVGC

SEQ ID NO: 48768 - protein, 9 aa, synthetic construct
  source 1..9: note = Seed: VVGARGVGK (KRAS G12R)
YVGNRAVGF

SEQ ID NO: 48769 - protein, 9 aa, synthetic construct
  source 1..9: note = Seed: VVGARGVGK (KRAS G12R)
YVGNRAVGG

SEQ ID NO: 48770 - protein, 9 aa, synthetic construct
  source 1..9: note = Seed: VVGARGVGK (KRAS G12R)
YVGNRAVGH

SEQ ID NO: 48771 - protein, 9 aa, synthetic construct
  source 1..9: note = Seed: VVGARGVGK (KRAS G12R)
YVGNRAVGI

SEQ ID NO: 48772 - protein, 9 aa, synthetic construct
  source 1..9: note = Seed: VVGARGVGK (KRAS G12R)
YVGNRAVGK

SEQ ID NO: 48773 - protein, 9 aa, synthetic construct
  source 1..9: note = Seed: VVGARGVGK (KRAS G12R)
YVGNRAVGL

SEQ ID NO: 48774 - protein, 9 aa, synthetic construct
  source 1..9: note = Seed: VVGARGVGK (KRAS G12R)
YVGNRAVGM

SEQ ID NO: 48775 - protein, 9 aa, synthetic construct
  source 1..9: note = Seed: VVGARGVGK (KRAS G12R)
YVGNRAVGN

SEQ ID NO: 48776 - protein, 9 aa, synthetic construct
  source 1..9: note = Seed: VVGARGVGK (KRAS G12R)
YVGNRAVGP

SEQ ID NO: 48777 - protein, 9 aa, synthetic construct
  source 1..9: note = Seed: VVGARGVGK (KRAS G12R)
YVGNRAVGQ

SEQ ID NO: 48778 - protein, 9 aa, synthetic construct
  source 1..9: note = Seed: VVGARGVGK (KRAS G12R)
YVGNRAVGR

SEQ ID NO: 48779 - protein, 9 aa, synthetic construct
  source 1..9: note = Seed: VVGARGVGK (KRAS G12R)
YVGNRAVGS

SEQ ID NO: 48780 - protein, 9 aa, synthetic construct
  source 1..9: note = Seed: VVGARGVGK (KRAS G12R)
YVGNRAVGT

SEQ ID NO: 48781 - protein, 9 aa, synthetic construct
  source 1..9: note = Seed: VVGARGVGK (KRAS G12R)
YVGNRAVGV

SEQ ID NO: 48782 - protein, 9 aa, synthetic construct
  source 1..9: note = Seed: VVGARGVGK (KRAS G12R)
YVGNRAVGW

SEQ ID NO: 48783 - protein, 9 aa, synthetic construct
  source 1..9: note = Seed: VVGARGVGK (KRAS G12R)
YVGNRAVGY

SEQ ID NO: 48784 - protein, 9 aa, synthetic construct
  source 1..9: note = Seed: VVGARGVGK (KRAS G12R)
YVGNRFVGA

SEQ ID NO: 48785 - protein, 9 aa, synthetic construct
  source 1..9: note = Seed: VVGARGVGK (KRAS G12R)
YVGNRGVGA

SEQ ID NO: 48786 - protein, 9 aa, synthetic construct
  source 1..9: note = Seed: VVGARGVGK (KRAS G12R)
YVGNRGVGF

SEQ ID NO: 48787 - protein, 9 aa, synthetic construct
  source 1..9: note = Seed: VVGARGVGK (KRAS G12R)
YVGNRGVGI

SEQ ID NO: 48788 - protein, 9 aa, synthetic construct
  source 1..9: note = Seed: VVGARGVGK (KRAS G12R)
YVGNRGVGL

SEQ ID NO: 48789 - protein, 9 aa, synthetic construct
  source 1..9: note = Seed: VVGARGVGK (KRAS G12R)
YVGNRGVGM

SEQ ID NO: 48790 - protein, 9 aa, synthetic construct
  source 1..9: note = Seed: VVGARGVGK (KRAS G12R)
YVGNRGVGN

SEQ ID NO: 48791 - protein, 9 aa, synthetic construct
  source 1..9: note = Seed: VVGARGVGK (KRAS G12R)
YVGNRGVGS

SEQ ID NO: 48792 - protein, 9 aa, synthetic construct
  source 1..9: note = Seed: VVGARGVGK (KRAS G12R)
YVGNRGVGT

SEQ ID NO: 48793 - protein, 9 aa, synthetic construct
  source 1..9: note = Seed: VVGARGVGK (KRAS G12R)
YVGNRGVGV

SEQ ID NO: 48794 - protein, 9 aa, synthetic construct
  source 1..9: note = Seed: VVGARGVGK (KRAS G12R)
YVGNRHVGL

SEQ ID NO: 48795 - protein, 9 aa, synthetic construct
  source 1..9: note = Seed: VVGARGVGK (KRAS G12R)
YVGNRIVGA

SEQ ID NO: 48796 - protein, 9 aa, synthetic construct
  source 1..9: note = Seed: VVGARGVGK (KRAS G12R)
YVGNRIVGI

SEQ ID NO: 48797 - protein, 9 aa, synthetic construct
  source 1..9: note = Seed: VVGARGVGK (KRAS G12R)
YVGNRIVGL

SEQ ID NO: 48798 - protein, 9 aa, synthetic construct
  source 1..9: note = Seed: VVGARGVGK (KRAS G12R)
YVGNRIVGM

SEQ ID NO: 48799 - protein, 9 aa, synthetic construct
  source 1..9: note = Seed: VVGARGVGK (KRAS G12R)
YVGNRIVGN

SEQ ID NO: 48800 - protein, 9 aa, synthetic construct
  source 1..9: note = Seed: VVGARGVGK (KRAS G12R)
YVGNRIVGS

SEQ ID NO: 48801 - protein, 9 aa, synthetic construct
  source 1..9: note = Seed: VVGARGVGK (KRAS G12R)
YVGNRIVGT

SEQ ID NO: 48802 - protein, 9 aa, synthetic construct
  source 1..9: note = Seed: VVGARGVGK (KRAS G12R)
YVGNRIVGV

SEQ ID NO: 48803 - protein, 9 aa, synthetic construct
  source 1..9: note = Seed: VVGARGVGK (KRAS G12R)
YVGNRLVGA

SEQ ID NO: 48804 - protein, 9 aa, synthetic construct
  source 1..9: note = Seed: VVGARGVGK (KRAS G12R)
YVGNRLVGG

SEQ ID NO: 48805 - protein, 9 aa, synthetic construct
  source 1..9: note = Seed: VVGARGVGK (KRAS G12R)
YVGNRLVGI

SEQ ID NO: 48806 - protein, 9 aa, synthetic construct
  source 1..9: note = Seed: VVGARGVGK (KRAS G12R)
YVGNRLVGL

SEQ ID NO: 48807 - protein, 9 aa, synthetic construct
  source 1..9: note = Seed: VVGARGVGK (KRAS G12R)
YVGNRLVGM

SEQ ID NO: 48808 - protein, 9 aa, synthetic construct
  source 1..9: note = Seed: VVGARGVGK (KRAS G12R)
YVGNRLVGN

SEQ ID NO: 48809 - protein, 9 aa, synthetic construct
  source 1..9: note = Seed: VVGARGVGK (KRAS G12R)
YVGNRLVGS

SEQ ID NO: 48810 - protein, 9 aa, synthetic construct
  source 1..9: note = Seed: VVGARGVGK (KRAS G12R)
YVGNRLVGT

SEQ ID NO: 48811 - protein, 9 aa, synthetic construct
  source 1..9: note = Seed: VVGARGVGK (KRAS G12R)
YVGNRLVGV

SEQ ID NO: 48812 - protein, 9 aa, synthetic construct
  source 1..9: note = Seed: VVGARGVGK (KRAS G12R)
YVGNRMVGA

SEQ ID NO: 48813 - protein, 9 aa, synthetic construct
  source 1..9: note = Seed: VVGARGVGK (KRAS G12R)
YVGNRMVGG

SEQ ID NO: 48814 - protein, 9 aa, synthetic construct
  source 1..9: note = Seed: VVGARGVGK (KRAS G12R)
YVGNRMVGI

SEQ ID NO: 48815 - protein, 9 aa, synthetic construct
  source 1..9: note = Seed: VVGARGVGK (KRAS G12R)
YVGNRMVGL

SEQ ID NO: 48816 - protein, 9 aa, synthetic construct
  source 1..9: note = Seed: VVGARGVGK (KRAS G12R)
YVGNRMVGM

SEQ ID NO: 48817 - protein, 9 aa, synthetic construct
  source 1..9: note = Seed: VVGARGVGK (KRAS G12R)
YVGNRMVGN

SEQ ID NO: 48818 - protein, 9 aa, synthetic construct
  source 1..9: note = Seed: VVGARGVGK (KRAS G12R)
YVGNRMVGS

SEQ ID NO: 48819 - protein, 9 aa, synthetic construct
  source 1..9: note = Seed: VVGARGVGK (KRAS G12R)
YVGNRMVGT

SEQ ID NO: 48820 - protein, 9 aa, synthetic construct
  source 1..9: note = Seed: VVGARGVGK (KRAS G12R)
YVGNRMVGV

SEQ ID NO: 48821 - protein, 9 aa, synthetic construct
  source 1..9: note = Seed: VVGARGVGK (KRAS G12R)
YVGNRNVGA

SEQ ID NO: 48822 - protein, 9 aa, synthetic construct
  source 1..9: note = Seed: VVGARGVGK (KRAS G12R)
YVGNRNVGI

SEQ ID NO: 48823 - protein, 9 aa, synthetic construct
  source 1..9: note = Seed: VVGARGVGK (KRAS G12R)
YVGNRNVGL

SEQ ID NO: 48824 - protein, 9 aa, synthetic construct
  source 1..9: note = Seed: VVGARGVGK (KRAS G12R)
YVGNRNVGM

SEQ ID NO: 48825 - protein, 9 aa, synthetic construct
  source 1..9: note = Seed: VVGARGVGK (KRAS G12R)
YVGNRNVGV

SEQ ID NO: 48826 - protein, 9 aa, synthetic construct
  source 1..9: note = Seed: VVGARGVGK (KRAS G12R)
YVGNRPVGA

SEQ ID NO: 48827 - protein, 9 aa, synthetic construct
  source 1..9: note = Seed: VVGARGVGK (KRAS G12R)
YVGNRPVGF

SEQ ID NO: 48828 - protein, 9 aa, synthetic construct
  source 1..9: note = Seed: VVGARGVGK (KRAS G12R)
YVGNRPVGG

SEQ ID NO: 48829 - protein, 9 aa, synthetic construct
  source 1..9: note = Seed: VVGARGVGK (KRAS G12R)
YVGNRPVGI

SEQ ID NO: 48830 - protein, 9 aa, synthetic construct
  source 1..9: note = Seed: VVGARGVGK (KRAS G12R)
YVGNRPVGL

SEQ ID NO: 48831 - protein, 9 aa, synthetic construct
  source 1..9: note = Seed: VVGARGVGK (KRAS G12R)
YVGNRPVGM

SEQ ID NO: 48832 - protein, 9 aa, synthetic construct
  source 1..9: note = Seed: VVGARGVGK (KRAS G12R)
YVGNRPVGN

SEQ ID NO: 48833 - protein, 9 aa, synthetic construct
  source 1..9: note = Seed: VVGARGVGK (KRAS G12R)
YVGNRPVGS

SEQ ID NO: 48834 - protein, 9 aa, synthetic construct
  source 1..9: note = Seed: VVGARGVGK (KRAS G12R)
YVGNRPVGT

SEQ ID NO: 48835 - protein, 9 aa, synthetic construct
  source 1..9: note = Seed: VVGARGVGK (KRAS G12R)
YVGNRPVGV

SEQ ID NO: 48836 - protein, 9 aa, synthetic construct
  source 1..9: note = Seed: VVGARGVGK (KRAS G12R)
YVGNRPVGY

SEQ ID NO: 48837 - protein, 9 aa, synthetic construct
  source 1..9: note = Seed: VVGARGVGK (KRAS G12R)
YVGNRQVGL

SEQ ID NO: 48838 - protein, 9 aa, synthetic construct
  source 1..9: note = Seed: VVGARGVGK (KRAS G12R)
YVGNRRVGR

SEQ ID NO: 48839 - protein, 9 aa, synthetic construct
  source 1..9: note = Seed: VVGARGVGK (KRAS G12R)
YVGNRSVGA

SEQ ID NO: 48840 - protein, 9 aa, synthetic construct
  source 1..9: note = Seed: VVGARGVGK (KRAS G12R)
YVGNRSVGF

SEQ ID NO: 48841 - protein, 9 aa, synthetic construct
  source 1..9: note = Seed: VVGARGVGK (KRAS G12R)
YVGNRSVGG

SEQ ID NO: 48842 - protein, 9 aa, synthetic construct
  source 1..9: note = Seed: VVGARGVGK (KRAS G12R)
YVGNRSVGI

SEQ ID NO: 48843 - protein, 9 aa, synthetic construct
  source 1..9: note = Seed: VVGARGVGK (KRAS G12R)
YVGNRSVGL

SEQ ID NO: 48844 - protein, 9 aa, synthetic construct
  source 1..9: note = Seed: VVGARGVGK (KRAS G12R)
YVGNRSVGM

SEQ ID NO: 48845 - protein, 9 aa, synthetic construct
  source 1..9: note = Seed: VVGARGVGK (KRAS G12R)
YVGNRSVGN

SEQ ID NO: 48846 - protein, 9 aa, synthetic construct
  source 1..9: note = Seed: VVGARGVGK (KRAS G12R)
YVGNRSVGS

SEQ ID NO: 48847 - protein, 9 aa, synthetic construct
  source 1..9: note = Seed: VVGARGVGK (KRAS G12R)
YVGNRSVGT

SEQ ID NO: 48848 - protein, 9 aa, synthetic construct
  source 1..9: note = Seed: VVGARGVGK (KRAS G12R)
YVGNRSVGV

SEQ ID NO: 48849 - protein, 9 aa, synthetic construct
  source 1..9: note = Seed: VVGARGVGK (KRAS G12R)
YVGNRSVGY

SEQ ID NO: 48850 - protein, 9 aa, synthetic construct
  source 1..9: note = Seed: VVGARGVGK (KRAS G12R)
YVGNRTVGA

SEQ ID NO: 48851 - protein, 9 aa, synthetic construct
  source 1..9: note = Seed: VVGARGVGK (KRAS G12R)
YVGNRTVGI

SEQ ID NO: 48852 - protein, 9 aa, synthetic construct
  source 1..9: note = Seed: VVGARGVGK (KRAS G12R)
YVGNRTVGL

SEQ ID NO: 48853 - protein, 9 aa, synthetic construct
  source 1..9: note = Seed: VVGARGVGK (KRAS G12R)
YVGNRTVGM

SEQ ID NO: 48854 - protein, 9 aa, synthetic construct
  source 1..9: note = Seed: VVGARGVGK (KRAS G12R)
YVGNRTVGS

SEQ ID NO: 48855 - protein, 9 aa, synthetic construct
  source 1..9: note = Seed: VVGARGVGK (KRAS G12R)
YVGNRTVGT

SEQ ID NO: 48856 - protein, 9 aa, synthetic construct
  source 1..9: note = Seed: VVGARGVGK (KRAS G12R)
YVGNRTVGV

SEQ ID NO: 48857 - protein, 9 aa, synthetic construct
  source 1..9: note = Seed: VVGARGVGK (KRAS G12R)
YVGNRVVGA

SEQ ID NO: 48858 - protein, 9 aa, synthetic construct
  source 1..9: note = Seed: VVGARGVGK (KRAS G12R)
YVGNRVVGF

SEQ ID NO: 48859 - protein, 9 aa, synthetic construct
  source 1..9: note = Seed: VVGARGVGK (KRAS G12R)
YVGNRVVGG

SEQ ID NO: 48860 - protein, 9 aa, synthetic construct
  source 1..9: note = Seed: VVGARGVGK (KRAS G12R)
YVGNRVVGI

SEQ ID NO: 48861 - protein, 9 aa, synthetic construct
  source 1..9: note = Seed: VVGARGVGK (KRAS G12R)
YVGNRVVGL

SEQ ID NO: 48862 - protein, 9 aa, synthetic construct
  source 1..9: note = Seed: VVGARGVGK (KRAS G12R)
YVGNRVVGM

SEQ ID NO: 48863 - protein, 9 aa, synthetic construct
  source 1..9: note = Seed: VVGARGVGK (KRAS G12R)
YVGNRVVGN

SEQ ID NO: 48864 - protein, 9 aa, synthetic construct
  source 1..9: note = Seed: VVGARGVGK (KRAS G12R)
YVGNRVVGR

SEQ ID NO: 48865 - protein, 9 aa, synthetic construct
  source 1..9: note = Seed: VVGARGVGK (KRAS G12R)
YVGNRVVGS

SEQ ID NO: 48866 - protein, 9 aa, synthetic construct
  source 1..9: note = Seed: VVGARGVGK (KRAS G12R)
YVGNRVVGT

SEQ ID NO: 48867 - protein, 9 aa, synthetic construct
  source 1..9: note = Seed: VVGARGVGK (KRAS G12R)
YVGNRVVGV

SEQ ID NO: 48868 - protein, 9 aa, synthetic construct
  source 1..9: note = Seed: VVGARGVGK (KRAS G12R)
YVGNRVVGY

SEQ ID NO: 48869 - protein, 9 aa, synthetic construct
  source 1..9: note = Seed: VVGARGVGK (KRAS G12R)
YVGPRAVGA

SEQ ID NO: 48870 - protein, 9 aa, synthetic construct
  source 1..9: note = Seed: VVGARGVGK (KRAS G12R)
YVGPRAVGI

SEQ ID NO: 48871 - protein, 9 aa, synthetic construct
  source 1..9: note = Seed: VVGARGVGK (KRAS G12R)
YVGPRAVGL

SEQ ID NO: 48872 - protein, 9 aa, synthetic construct
  source 1..9: note = Seed: VVGARGVGK (KRAS G12R)
YVGPRAVGM

SEQ ID NO: 48873 - protein, 9 aa, synthetic construct
  source 1..9: note = Seed: VVGARGVGK (KRAS G12R)
YVGPRAVGV

SEQ ID NO: 48874 - protein, 9 aa, synthetic construct
  source 1..9: note = Seed: VVGARGVGK (KRAS G12R)
YVGPRPVGI

SEQ ID NO: 48875 - protein, 9 aa, synthetic construct
  source 1..9: note = Seed: VVGARGVGK (KRAS G12R)
YVGPRSVGI

SEQ ID NO: 48876 - protein, 9 aa, synthetic construct
  source 1..9: note = Seed: VVGARGVGK (KRAS G12R)
YVGPRSVGL

SEQ ID NO: 48877 - protein, 9 aa, synthetic construct
  source 1..9: note = Seed: VVGARGVGK (KRAS G12R)
YVGPRSVGV

SEQ ID NO: 48878 - protein, 9 aa, synthetic construct
  source 1..9: note = Seed: VVGARGVGK (KRAS G12R)
YVGPRTVGI

SEQ ID NO: 48879 - protein, 9 aa, synthetic construct
  source 1..9: note = Seed: VVGARGVGK (KRAS G12R)
YVGPRTVGL

SEQ ID NO: 48880 - protein, 9 aa, synthetic construct
  source 1..9: note = Seed: VVGARGVGK (KRAS G12R)
YVGPRVVGI

SEQ ID NO: 48881 - protein, 9 aa, synthetic construct
  source 1..9: note = Seed: VVGARGVGK (KRAS G12R)
YVGPRVVGL

SEQ ID NO: 48882 - protein, 9 aa, synthetic construct
  source 1..9: note = Seed: VVGARGVGK (KRAS G12R)
YVGPRVVGV

SEQ ID NO: 48883 - protein, 9 aa, synthetic construct
  source 1..9: note = Seed: VVGARGVGK (KRAS G12R)
YVGQRAVGA

SEQ ID NO: 48884 - protein, 9 aa, synthetic construct
  source 1..9: note = Seed: VVGARGVGK (KRAS G12R)
YVGQRAVGC

SEQ ID NO: 48885 - protein, 9 aa, synthetic construct
  source 1..9: note = Seed: VVGARGVGK (KRAS G12R)
YVGQRAVGD

SEQ ID NO: 48886 - protein, 9 aa, synthetic construct
  source 1..9: note = Seed: VVGARGVGK (KRAS G12R)
YVGQRAVGE

SEQ ID NO: 48887 - protein, 9 aa, synthetic construct
  source 1..9: note = Seed: VVGARGVGK (KRAS G12R)
YVGQRAVGF

SEQ ID NO: 48888 - protein, 9 aa, synthetic construct
  source 1..9: note = Seed: VVGARGVGK (KRAS G12R)
YVGQRAVGG

SEQ ID NO: 48889 - protein, 9 aa, synthetic construct
  source 1..9: note = Seed: VVGARGVGK (KRAS G12R)
YVGQRAVGH

SEQ ID NO: 48890 - protein, 9 aa, synthetic construct
  source 1..9: note = Seed: VVGARGVGK (KRAS G12R)
YVGQRAVGI

SEQ ID NO: 48891 - protein, 9 aa, synthetic construct
  source 1..9: note = Seed: VVGARGVGK (KRAS G12R)
YVGQRAVGK

SEQ ID NO: 48892 - protein, 9 aa, synthetic construct
  source 1..9: note = Seed: VVGARGVGK (KRAS G12R)
YVGQRAVGL

SEQ ID NO: 48893 - protein, 9 aa, synthetic construct
  source 1..9: note = Seed: VVGARGVGK (KRAS G12R)
YVGQRAVGM

SEQ ID NO: 48894 - protein, 9 aa, synthetic construct
  source 1..9: note = Seed: VVGARGVGK (KRAS G12R)
YVGQRAVGN

SEQ ID NO: 48895 - protein, 9 aa, synthetic construct
  source 1..9: note = Seed: VVGARGVGK (KRAS G12R)
YVGQRAVGP

SEQ ID NO: 48896 - protein, 9 aa, synthetic construct
  source 1..9: note = Seed: VVGARGVGK (KRAS G12R)
YVGQRAVGQ

SEQ ID NO: 48897 - protein, 9 aa, synthetic construct
  source 1..9: note = Seed: VVGARGVGK (KRAS G12R)
YVGQRAVGR

SEQ ID NO: 48898 - protein, 9 aa, synthetic construct
  source 1..9: note = Seed: VVGARGVGK (KRAS G12R)
YVGQRAVGS

SEQ ID NO: 48899 - protein, 9 aa, synthetic construct
  source 1..9: note = Seed: VVGARGVGK (KRAS G12R)
YVGQRAVGT

SEQ ID NO: 48900 - protein, 9 aa, synthetic construct
  source 1..9: note = Seed: VVGARGVGK (KRAS G12R)
YVGQRAVGV

SEQ ID NO: 48901 - protein, 9 aa, synthetic construct
  source 1..9: note = Seed: VVGARGVGK (KRAS G12R)
YVGQRAVGW

SEQ ID NO: 48902 - protein, 9 aa, synthetic construct
  source 1..9: note = Seed: VVGARGVGK (KRAS G12R)
YVGQRAVGY

SEQ ID NO: 48903 - protein, 9 aa, synthetic construct
  source 1..9: note = Seed: VVGARGVGK (KRAS G12R)
YVGQRCVGI

SEQ ID NO: 48904 - protein, 9 aa, synthetic construct
  source 1..9: note = Seed: VVGARGVGK (KRAS G12R)
YVGQRCVGL

SEQ ID NO: 48905 - protein, 9 aa, synthetic construct
  source 1..9: note = Seed: VVGARGVGK (KRAS G12R)
YVGQRCVGV

SEQ ID NO: 48906 - protein, 9 aa, synthetic construct
  source 1..9: note = Seed: VVGARGVGK (KRAS G12R)
YVGQRDVGL

SEQ ID NO: 48907 - protein, 9 aa, synthetic construct
  source 1..9: note = Seed: VVGARGVGK (KRAS G12R)
YVGQREVGI

SEQ ID NO: 48908 - protein, 9 aa, synthetic construct
  source 1..9: note = Seed: VVGARGVGK (KRAS G12R)
YVGQREVGL

SEQ ID NO: 48909 - protein, 9 aa, synthetic construct
  source 1..9: note = Seed: VVGARGVGK (KRAS G12R)
YVGQREVGV

SEQ ID NO: 48910 - protein, 9 aa, synthetic construct
  source 1..9: note = Seed: VVGARGVGK (KRAS G12R)
YVGQRGVGA

SEQ ID NO: 48911 - protein, 9 aa, synthetic construct
  source 1..9: note = Seed: VVGARGVGK (KRAS G12R)
YVGQRGVGC

SEQ ID NO: 48912 - protein, 9 aa, synthetic construct
  source 1..9: note = Seed: VVGARGVGK (KRAS G12R)
YVGQRGVGF

SEQ ID NO: 48913 - protein, 9 aa, synthetic construct
  source 1..9: note = Seed: VVGARGVGK (KRAS G12R)
YVGQRGVGG

SEQ ID NO: 48914 - protein, 9 aa, synthetic construct
  source 1..9: note = Seed: VVGARGVGK (KRAS G12R)
YVGQRGVGH

SEQ ID NO: 48915 - protein, 9 aa, synthetic construct
  source 1..9: note = Seed: VVGARGVGK (KRAS G12R)
YVGQRGVGI

SEQ ID NO: 48916 - protein, 9 aa, synthetic construct
  source 1..9: note = Seed: VVGARGVGK (KRAS G12R)
YVGQRGVGL

SEQ ID NO: 48917 - protein, 9 aa, synthetic construct
  source 1..9: note = Seed: VVGARGVGK (KRAS G12R)
YVGQRGVGM

SEQ ID NO: 48918 - protein, 9 aa, synthetic construct
  source 1..9: note = Seed: VVGARGVGK (KRAS G12R)
YVGQRGVGN

SEQ ID NO: 48919 - protein, 9 aa, synthetic construct
  source 1..9: note = Seed: VVGARGVGK (KRAS G12R)
YVGQRGVGP

SEQ ID NO: 48920 - protein, 9 aa, synthetic construct
  source 1..9: note = Seed: VVGARGVGK (KRAS G12R)
YVGQRGVGQ

SEQ ID NO: 48921 - protein, 9 aa, synthetic construct
  source 1..9: note = Seed: VVGARGVGK (KRAS G12R)
YVGQRGVGR

SEQ ID NO: 48922 - protein, 9 aa, synthetic construct
  source 1..9: note = Seed: VVGARGVGK (KRAS G12R)
YVGQRGVGS

SEQ ID NO: 48923 - protein, 9 aa, synthetic construct
  source 1..9: note = Seed: VVGARGVGK (KRAS G12R)
YVGQRGVGT

SEQ ID NO: 48924 - protein, 9 aa, synthetic construct
  source 1..9: note = Seed: VVGARGVGK (KRAS G12R)
YVGQRGVGV

SEQ ID NO: 48925 - protein, 9 aa, synthetic construct
  source 1..9: note = Seed: VVGARGVGK (KRAS G12R)
YVGQRGVGW

SEQ ID NO: 48926 - protein, 9 aa, synthetic construct
  source 1..9: note = Seed: VVGARGVGK (KRAS G12R)
YVGQRGVGY

SEQ ID NO: 48927 - protein, 9 aa, synthetic construct
  source 1..9: note = Seed: VVGARGVGK (KRAS G12R)
YVGQRHVGA

SEQ ID NO: 48928 - protein, 9 aa, synthetic construct
  source 1..9: note = Seed: VVGARGVGK (KRAS G12R)
YVGQRHVGI

SEQ ID NO: 48929 - protein, 9 aa, synthetic construct
  source 1..9: note = Seed: VVGARGVGK (KRAS G12R)
YVGQRHVGL

SEQ ID NO: 48930 - protein, 9 aa, synthetic construct
  source 1..9: note = Seed: VVGARGVGK (KRAS G12R)
YVGQRHVGV

SEQ ID NO: 48931 - protein, 9 aa, synthetic construct
  source 1..9: note = Seed: VVGARGVGK (KRAS G12R)
YVGQRIVGA

SEQ ID NO: 48932 - protein, 9 aa, synthetic construct
  source 1..9: note = Seed: VVGARGVGK (KRAS G12R)
YVGQRIVGG

SEQ ID NO: 48933 - protein, 9 aa, synthetic construct
  source 1..9: note = Seed: VVGARGVGK (KRAS G12R)
YVGQRIVGH

SEQ ID NO: 48934 - protein, 9 aa, synthetic construct
  source 1..9: note = Seed: VVGARGVGK (KRAS G12R)
YVGQRIVGI

SEQ ID NO: 48935 - protein, 9 aa, synthetic construct
  source 1..9: note = Seed: VVGARGVGK (KRAS G12R)
YVGQRIVGL

SEQ ID NO: 48936 - protein, 9 aa, synthetic construct
  source 1..9: note = Seed: VVGARGVGK (KRAS G12R)
YVGQRIVGM

SEQ ID NO: 48937 - protein, 9 aa, synthetic construct
  source 1..9: note = Seed: VVGARGVGK (KRAS G12R)
YVGQRIVGN

SEQ ID NO: 48938 - protein, 9 aa, synthetic construct
  source 1..9: note = Seed: VVGARGVGK (KRAS G12R)
YVGQRIVGQ

SEQ ID NO: 48939 - protein, 9 aa, synthetic construct
  source 1..9: note = Seed: VVGARGVGK (KRAS G12R)
YVGQRIVGS

SEQ ID NO: 48940 - protein, 9 aa, synthetic construct
  source 1..9: note = Seed: VVGARGVGK (KRAS G12R)
YVGQRIVGT

SEQ ID NO: 48941 - protein, 9 aa, synthetic construct
  source 1..9: note = Seed: VVGARGVGK (KRAS G12R)
YVGQRIVGV

SEQ ID NO: 48942 - protein, 9 aa, synthetic construct
  source 1..9: note = Seed: VVGARGVGK (KRAS G12R)
YVGQRLVGA

SEQ ID NO: 48943 - protein, 9 aa, synthetic construct
  source 1..9: note = Seed: VVGARGVGK (KRAS G12R)
YVGQRLVGI

SEQ ID NO: 48944 - protein, 9 aa, synthetic construct
  source 1..9: note = Seed: VVGARGVGK (KRAS G12R)
YVGQRLVGL

SEQ ID NO: 48945 - protein, 9 aa, synthetic construct
  source 1..9: note = Seed: VVGARGVGK (KRAS G12R)
YVGQRLVGM

SEQ ID NO: 48946 - protein, 9 aa, synthetic construct
  source 1..9: note = Seed: VVGARGVGK (KRAS G12R)
YVGQRLVGN

SEQ ID NO: 48947 - protein, 9 aa, synthetic construct
  source 1..9: note = Seed: VVGARGVGK (KRAS G12R)
YVGQRLVGS

SEQ ID NO: 48948 - protein, 9 aa, synthetic construct
  source 1..9: note = Seed: VVGARGVGK (KRAS G12R)
YVGQRLVGT

SEQ ID NO: 48949 - protein, 9 aa, synthetic construct
  source 1..9: note = Seed: VVGARGVGK (KRAS G12R)
YVGQRLVGV

SEQ ID NO: 48950 - protein, 9 aa, synthetic construct
  source 1..9: note = Seed: VVGARGVGK (KRAS G12R)
YVGQRMVGA

SEQ ID NO: 48951 - protein, 9 aa, synthetic construct
  source 1..9: note = Seed: VVGARGVGK (KRAS G12R)
YVGQRMVGI

SEQ ID NO: 48952 - protein, 9 aa, synthetic construct
  source 1..9: note = Seed: VVGARGVGK (KRAS G12R)
YVGQRMVGL

SEQ ID NO: 48953 - protein, 9 aa, synthetic construct
  source 1..9: note = Seed: VVGARGVGK (KRAS G12R)
YVGQRMVGM

SEQ ID NO: 48954 - protein, 9 aa, synthetic construct
  source 1..9: note = Seed: VVGARGVGK (KRAS G12R)
YVGQRMVGN

SEQ ID NO: 48955 - protein, 9 aa, synthetic construct
  source 1..9: note = Seed: VVGARGVGK (KRAS G12R)
YVGQRMVGS

SEQ ID NO: 48956 - protein, 9 aa, synthetic construct
  source 1..9: note = Seed: VVGARGVGK (KRAS G12R)
YVGQRMVGT

SEQ ID NO: 48957 - protein, 9 aa, synthetic construct
  source 1..9: note = Seed: VVGARGVGK (KRAS G12R)
YVGQRMVGV

SEQ ID NO: 48958 - protein, 9 aa, synthetic construct
  source 1..9: note = Seed: VVGARGVGK (KRAS G12R)
YVGQRNVGA

SEQ ID NO: 48959 - protein, 9 aa, synthetic construct
  source 1..9: note = Seed: VVGARGVGK (KRAS G12R)
YVGQRNVGC

SEQ ID NO: 48960 - protein, 9 aa, synthetic construct
  source 1..9: note = Seed: VVGARGVGK (KRAS G12R)
YVGQRNVGF

SEQ ID NO: 48961 - protein, 9 aa, synthetic construct
  source 1..9: note = Seed: VVGARGVGK (KRAS G12R)
YVGQRNVGG

SEQ ID NO: 48962 - protein, 9 aa, synthetic construct
  source 1..9: note = Seed: VVGARGVGK (KRAS G12R)
YVGQRNVGI

SEQ ID NO: 48963 - protein, 9 aa, synthetic construct
  source 1..9: note = Seed: VVGARGVGK (KRAS G12R)
YVGQRNVGL

SEQ ID NO: 48964 - protein, 9 aa, synthetic construct
  source 1..9: note = Seed: VVGARGVGK (KRAS G12R)
YVGQRNVGM

SEQ ID NO: 48965 - protein, 9 aa, synthetic construct
  source 1..9: note = Seed: VVGARGVGK (KRAS G12R)
YVGQRNVGN

SEQ ID NO: 48966 - protein, 9 aa, synthetic construct
  source 1..9: note = Seed: VVGARGVGK (KRAS G12R)
YVGQRNVGS

SEQ ID NO: 48967 - protein, 9 aa, synthetic construct
  source 1..9: note = Seed: VVGARGVGK (KRAS G12R)
YVGQRNVGT

SEQ ID NO: 48968 - protein, 9 aa, synthetic construct
  source 1..9: note = Seed: VVGARGVGK (KRAS G12R)
YVGQRNVGV

SEQ ID NO: 48969 - protein, 9 aa, synthetic construct
  source 1..9: note = Seed: VVGARGVGK (KRAS G12R)
YVGQRPVGA

SEQ ID NO: 48970 - protein, 9 aa, synthetic construct
  source 1..9: note = Seed: VVGARGVGK (KRAS G12R)
YVGQRPVGC

SEQ ID NO: 48971 - protein, 9 aa, synthetic construct
  source 1..9: note = Seed: VVGARGVGK (KRAS G12R)
YVGQRPVGD

SEQ ID NO: 48972 - protein, 9 aa, synthetic construct
  source 1..9: note = Seed: VVGARGVGK (KRAS G12R)
YVGQRPVGE

SEQ ID NO: 48973 - protein, 9 aa, synthetic construct
  source 1..9: note = Seed: VVGARGVGK (KRAS G12R)
YVGQRPVGF

SEQ ID NO: 48974 - protein, 9 aa, synthetic construct
  source 1..9: note = Seed: VVGARGVGK (KRAS G12R)
YVGQRPVGG

SEQ ID NO: 48975 - protein, 9 aa, synthetic construct
  source 1..9: note = Seed: VVGARGVGK (KRAS G12R)
YVGQRPVGH

SEQ ID NO: 48976 - protein, 9 aa, synthetic construct
  source 1..9: note = Seed: VVGARGVGK (KRAS G12R)
YVGQRPVGI

SEQ ID NO: 48977 - protein, 9 aa, synthetic construct
  source 1..9: note = Seed: VVGARGVGK (KRAS G12R)
YVGQRPVGL

SEQ ID NO: 48978 - protein, 9 aa, synthetic construct
  source 1..9: note = Seed: VVGARGVGK (KRAS G12R)
YVGQRPVGM

SEQ ID NO: 48979 - protein, 9 aa, synthetic construct
  source 1..9: note = Seed: VVGARGVGK (KRAS G12R)
YVGQRPVGN

SEQ ID NO: 48980 - protein, 9 aa, synthetic construct
  source 1..9: note = Seed: VVGARGVGK (KRAS G12R)
YVGQRPVGP

SEQ ID NO: 48981 - protein, 9 aa, synthetic construct
  source 1..9: note = Seed: VVGARGVGK (KRAS G12R)
YVGQRPVGQ

SEQ ID NO: 48982 - protein, 9 aa, synthetic construct
  source 1..9: note = Seed: VVGARGVGK (KRAS G12R)
YVGQRPVGS

SEQ ID NO: 48983 - protein, 9 aa, synthetic construct
  source 1..9: note = Seed: VVGARGVGK (KRAS G12R)
YVGQRPVGT

SEQ ID NO: 48984 - protein, 9 aa, synthetic construct
  source 1..9: note = Seed: VVGARGVGK (KRAS G12R)
YVGQRPVGV

SEQ ID NO: 48985 - protein, 9 aa, synthetic construct
  source 1..9: note = Seed: VVGARGVGK (KRAS G12R)
YVGQRPVGW

SEQ ID NO: 48986 - protein, 9 aa, synthetic construct
  source 1..9: note = Seed: VVGARGVGK (KRAS G12R)
YVGQRPVGY

SEQ ID NO: 48987 - protein, 9 aa, synthetic construct
  source 1..9: note = Seed: VVGARGVGK (KRAS G12R)
YVGQRQVGA

SEQ ID NO: 48988 - protein, 9 aa, synthetic construct
  source 1..9: note = Seed: VVGARGVGK (KRAS G12R)
YVGQRQVGI

SEQ ID NO: 48989 - protein, 9 aa, synthetic construct
  source 1..9: note = Seed: VVGARGVGK (KRAS G12R)
YVGQRQVGL

SEQ ID NO: 48990 - protein, 9 aa, synthetic construct
  source 1..9: note = Seed: VVGARGVGK (KRAS G12R)
YVGQRQVGM

SEQ ID NO: 48991 - protein, 9 aa, synthetic construct
  source 1..9: note = Seed: VVGARGVGK (KRAS G12R)
YVGQRQVGV

SEQ ID NO: 48992 - protein, 9 aa, synthetic construct
  source 1..9: note = Seed: VVGARGVGK (KRAS G12R)
YVGQRRVGR

SEQ ID NO: 48993 - protein, 9 aa, synthetic construct
  source 1..9: note = Seed: VVGARGVGK (KRAS G12R)
YVGQRSVGA

SEQ ID NO: 48994 - protein, 9 aa, synthetic construct
  source 1..9: note = Seed: VVGARGVGK (KRAS G12R)
YVGQRSVGC

SEQ ID NO: 48995 - protein, 9 aa, synthetic construct
  source 1..9: note = Seed: VVGARGVGK (KRAS G12R)
YVGQRSVGD

SEQ ID NO: 48996 - protein, 9 aa, synthetic construct
  source 1..9: note = Seed: VVGARGVGK (KRAS G12R)
YVGQRSVGE

SEQ ID NO: 48997 - protein, 9 aa, synthetic construct
  source 1..9: note = Seed: VVGARGVGK (KRAS G12R)
YVGQRSVGF

SEQ ID NO: 48998 - protein, 9 aa, synthetic construct
  source 1..9: note = Seed: VVGARGVGK (KRAS G12R)
YVGQRSVGG

SEQ ID NO: 48999 - protein, 9 aa, synthetic construct
  source 1..9: note = Seed: VVGARGVGK (KRAS G12R)
YVGQRSVGH

SEQ ID NO: 49000 - protein, 9 aa, synthetic construct
  source 1..9: note = Seed: VVGARGVGK (KRAS G12R)
YVGQRSVGI

SEQ ID NO: 49001 - protein, 9 aa, synthetic construct
  source 1..9: note = Seed: VVGARGVGK (KRAS G12R)
YVGQRSVGL

SEQ ID NO: 49002 - protein, 9 aa, synthetic construct
  source 1..9: note = Seed: VVGARGVGK (KRAS G12R)
YVGQRSVGM

SEQ ID NO: 49003 - protein, 9 aa, synthetic construct
  source 1..9: note = Seed: VVGARGVGK (KRAS G12R)
YVGQRSVGN

SEQ ID NO: 49004 - protein, 9 aa, synthetic construct
  source 1..9: note = Seed: VVGARGVGK (KRAS G12R)
YVGQRSVGP

SEQ ID NO: 49005 - protein, 9 aa, synthetic construct
  source 1..9: note = Seed: VVGARGVGK (KRAS G12R)
YVGQRSVGQ

SEQ ID NO: 49006 - protein, 9 aa, synthetic construct
  source 1..9: note = Seed: VVGARGVGK (KRAS G12R)
YVGQRSVGR

SEQ ID NO: 49007 - protein, 9 aa, synthetic construct
  source 1..9: note = Seed: VVGARGVGK (KRAS G12R)
YVGQRSVGS

SEQ ID NO: 49008 - protein, 9 aa, synthetic construct
  source 1..9: note = Seed: VVGARGVGK (KRAS G12R)
YVGQRSVGT

SEQ ID NO: 49009 - protein, 9 aa, synthetic construct
  source 1..9: note = Seed: VVGARGVGK (KRAS G12R)
YVGQRSVGV

SEQ ID NO: 49010 - protein, 9 aa, synthetic construct
  source 1..9: note = Seed: VVGARGVGK (KRAS G12R)
YVGQRSVGW

SEQ ID NO: 49011 - protein, 9 aa, synthetic construct
  source 1..9: note = Seed: VVGARGVGK (KRAS G12R)
YVGQRSVGY

SEQ ID NO: 49012 - protein, 9 aa, synthetic construct
  source 1..9: note = Seed: VVGARGVGK (KRAS G12R)
YVGQRTVGA

SEQ ID NO: 49013 - protein, 9 aa, synthetic construct
  source 1..9: note = Seed: VVGARGVGK (KRAS G12R)
YVGQRTVGC

SEQ ID NO: 49014 - protein, 9 aa, synthetic construct
  source 1..9: note = Seed: VVGARGVGK (KRAS G12R)
YVGQRTVGD

SEQ ID NO: 49015 - protein, 9 aa, synthetic construct
  source 1..9: note = Seed: VVGARGVGK (KRAS G12R)
YVGQRTVGE

SEQ ID NO: 49016 - protein, 9 aa, synthetic construct
  source 1..9: note = Seed: VVGARGVGK (KRAS G12R)
YVGQRTVGF

SEQ ID NO: 49017 - protein, 9 aa, synthetic construct
  source 1..9: note = Seed: VVGARGVGK (KRAS G12R)
YVGQRTVGG

SEQ ID NO: 49018 - protein, 9 aa, synthetic construct
  source 1..9: note = Seed: VVGARGVGK (KRAS G12R)
YVGQRTVGH

SEQ ID NO: 49019 - protein, 9 aa, synthetic construct
  source 1..9: note = Seed: VVGARGVGK (KRAS G12R)
YVGQRTVGI

SEQ ID NO: 49020 - protein, 9 aa, synthetic construct
  source 1..9: note = Seed: VVGARGVGK (KRAS G12R)
YVGQRTVGL

SEQ ID NO: 49021 - protein, 9 aa, synthetic construct
  source 1..9: note = Seed: VVGARGVGK (KRAS G12R)
YVGQRTVGM

SEQ ID NO: 49022 - protein, 9 aa, synthetic construct
  source 1..9: note = Seed: VVGARGVGK (KRAS G12R)
YVGQRTVGN

SEQ ID NO: 49023 - protein, 9 aa, synthetic construct
  source 1..9: note = Seed: VVGARGVGK (KRAS G12R)
YVGQRTVGQ

SEQ ID NO: 49024 - protein, 9 aa, synthetic construct
  source 1..9: note = Seed: VVGARGVGK (KRAS G12R)
YVGQRTVGR

SEQ ID NO: 49025 - protein, 9 aa, synthetic construct
  source 1..9: note = Seed: VVGARGVGK (KRAS G12R)
YVGQRTVGS

SEQ ID NO: 49026 - protein, 9 aa, synthetic construct
  source 1..9: note = Seed: VVGARGVGK (KRAS G12R)
YVGQRTVGT

SEQ ID NO: 49027 - protein, 9 aa, synthetic construct
  source 1..9: note = Seed: VVGARGVGK (KRAS G12R)
YVGQRTVGV

SEQ ID NO: 49028 - protein, 9 aa, synthetic construct
  source 1..9: note = Seed: VVGARGVGK (KRAS G12R)
YVGQRTVGY

SEQ ID NO: 49029 - protein, 9 aa, synthetic construct
  source 1..9: note = Seed: VVGARGVGK (KRAS G12R)
YVGQRVVGA

SEQ ID NO: 49030 - protein, 9 aa, synthetic construct
  source 1..9: note = Seed: VVGARGVGK (KRAS G12R)
YVGQRVVGD

SEQ ID NO: 49031 - protein, 9 aa, synthetic construct
  source 1..9: note = Seed: VVGARGVGK (KRAS G12R)
YVGQRVVGE

SEQ ID NO: 49032 - protein, 9 aa, synthetic construct
  source 1..9: note = Seed: VVGARGVGK (KRAS G12R)
YVGQRVVGF

SEQ ID NO: 49033 - protein, 9 aa, synthetic construct
  source 1..9: note = Seed: VVGARGVGK (KRAS G12R)
YVGQRVVGG

SEQ ID NO: 49034 - protein, 9 aa, synthetic construct
  source 1..9: note = Seed: VVGARGVGK (KRAS G12R)
YVGQRVVGH

SEQ ID NO: 49035 - protein, 9 aa, synthetic construct
  source 1..9: note = Seed: VVGARGVGK (KRAS G12R)
YVGQRVVGI

SEQ ID NO: 49036 - protein, 9 aa, synthetic construct
  source 1..9: note = Seed: VVGARGVGK (KRAS G12R)
YVGQRVVGL

SEQ ID NO: 49037 - protein, 9 aa, synthetic construct
  source 1..9: note = Seed: VVGARGVGK (KRAS G12R)
YVGQRVVGM

SEQ ID NO: 49038 - protein, 9 aa, synthetic construct
  source 1..9: note = Seed: VVGARGVGK (KRAS G12R)
YVGQRVVGN

SEQ ID NO: 49039 - protein, 9 aa, synthetic construct
  source 1..9: note = Seed: VVGARGVGK (KRAS G12R)
YVGQRVVGP

SEQ ID NO: 49040 - protein, 9 aa, synthetic construct
  source 1..9: note = Seed: VVGARGVGK (KRAS G12R)
YVGQRVVGQ

SEQ ID NO: 49041 - protein, 9 aa, synthetic construct
  source 1..9: note = Seed: VVGARGVGK (KRAS G12R)
YVGQRVVGR

SEQ ID NO: 49042 - protein, 9 aa, synthetic construct
  source 1..9: note = Seed: VVGARGVGK (KRAS G12R)
YVGQRVVGS

SEQ ID NO: 49043 - protein, 9 aa, synthetic construct
  source 1..9: note = Seed: VVGARGVGK (KRAS G12R)
YVGQRVVGT

SEQ ID NO: 49044 - protein, 9 aa, synthetic construct
  source 1..9: note = Seed: VVGARGVGK (KRAS G12R)
YVGQRVVGV

SEQ ID NO: 49045 - protein, 9 aa, synthetic construct
  source 1..9: note = Seed: VVGARGVGK (KRAS G12R)
YVGQRVVGY

SEQ ID NO: 49046 - protein, 9 aa, synthetic construct
  source 1..9: note = Seed: VVGARGVGK (KRAS G12R)
YVGRRAVGA

SEQ ID NO: 49047 - protein, 9 aa, synthetic construct
  source 1..9: note = Seed: VVGARGVGK (KRAS G12R)
YVGRRAVGF

SEQ ID NO: 49048 - protein, 9 aa, synthetic construct
  source 1..9: note = Seed: VVGARGVGK (KRAS G12R)
YVGRRAVGI

SEQ ID NO: 49049 - protein, 9 aa, synthetic construct
  source 1..9: note = Seed: VVGARGVGK (KRAS G12R)
YVGRRAVGL

SEQ ID NO: 49050 - protein, 9 aa, synthetic construct
  source 1..9: note = Seed: VVGARGVGK (KRAS G12R)
YVGRRAVGM

SEQ ID NO: 49051 - protein, 9 aa, synthetic construct
  source 1..9: note = Seed: VVGARGVGK (KRAS G12R)
YVGRRAVGR

SEQ ID NO: 49052 - protein, 9 aa, synthetic construct
  source 1..9: note = Seed: VVGARGVGK (KRAS G12R)
YVGRRAVGV

SEQ ID NO: 49053 - protein, 9 aa, synthetic construct
  source 1..9: note = Seed: VVGARGVGK (KRAS G12R)
YVGRRGVGI

SEQ ID NO: 49054 - protein, 9 aa, synthetic construct
  source 1..9: note = Seed: VVGARGVGK (KRAS G12R)
YVGRRGVGL

SEQ ID NO: 49055 - protein, 9 aa, synthetic construct
  source 1..9: note = Seed: VVGARGVGK (KRAS G12R)
YVGRRGVGV

SEQ ID NO: 49056 - protein, 9 aa, synthetic construct
  source 1..9: note = Seed: VVGARGVGK (KRAS G12R)
YVGRRIVGR

SEQ ID NO: 49057 - protein, 9 aa, synthetic construct
  source 1..9: note = Seed: VVGARGVGK (KRAS G12R)
YVGRRKVGF

SEQ ID NO: 49058 - protein, 9 aa, synthetic construct
  source 1..9: note = Seed: VVGARGVGK (KRAS G12R)
YVGRRKVGI

SEQ ID NO: 49059 - protein, 9 aa, synthetic construct
  source 1..9: note = Seed: VVGARGVGK (KRAS G12R)
YVGRRKVGK

SEQ ID NO: 49060 - protein, 9 aa, synthetic construct
  source 1..9: note = Seed: VVGARGVGK (KRAS G12R)
YVGRRKVGL

SEQ ID NO: 49061 - protein, 9 aa, synthetic construct
  source 1..9: note = Seed: VVGARGVGK (KRAS G12R)
YVGRRKVGM

SEQ ID NO: 49062 - protein, 9 aa, synthetic construct
  source 1..9: note = Seed: VVGARGVGK (KRAS G12R)
YVGRRKVGR

SEQ ID NO: 49063 - protein, 9 aa, synthetic construct
  source 1..9: note = Seed: VVGARGVGK (KRAS G12R)
YVGRRKVGV

SEQ ID NO: 49064 - protein, 9 aa, synthetic construct
  source 1..9: note = Seed: VVGARGVGK (KRAS G12R)
YVGRRKVGY

SEQ ID NO: 49065 - protein, 9 aa, synthetic construct
  source 1..9: note = Seed: VVGARGVGK (KRAS G12R)
YVGRRPVGR

SEQ ID NO: 49066 - protein, 9 aa, synthetic construct
  source 1..9: note = Seed: VVGARGVGK (KRAS G12R)
YVGRRRVGA

SEQ ID NO: 49067 - protein, 9 aa, synthetic construct
  source 1..9: note = Seed: VVGARGVGK (KRAS G12R)
YVGRRRVGF

SEQ ID NO: 49068 - protein, 9 aa, synthetic construct
  source 1..9: note = Seed: VVGARGVGK (KRAS G12R)
YVGRRRVGG

SEQ ID NO: 49069 - protein, 9 aa, synthetic construct
  source 1..9: note = Seed: VVGARGVGK (KRAS G12R)
YVGRRRVGI

SEQ ID NO: 49070 - protein, 9 aa, synthetic construct
  source 1..9: note = Seed: VVGARGVGK (KRAS G12R)
YVGRRRVGK

SEQ ID NO: 49071 - protein, 9 aa, synthetic construct
  source 1..9: note = Seed: VVGARGVGK (KRAS G12R)
YVGRRRVGL

SEQ ID NO: 49072 - protein, 9 aa, synthetic construct
  source 1..9: note = Seed: VVGARGVGK (KRAS G12R)
YVGRRRVGM

SEQ ID NO: 49073 - protein, 9 aa, synthetic construct
  source 1..9: note = Seed: VVGARGVGK (KRAS G12R)
YVGRRRVGQ

SEQ ID NO: 49074 - protein, 9 aa, synthetic construct
  source 1..9: note = Seed: VVGARGVGK (KRAS G12R)
YVGRRRVGR

SEQ ID NO: 49075 - protein, 9 aa, synthetic construct
  source 1..9: note = Seed: VVGARGVGK (KRAS G12R)
YVGRRRVGS

SEQ ID NO: 49076 - protein, 9 aa, synthetic construct
  source 1..9: note = Seed: VVGARGVGK (KRAS G12R)
YVGRRRVGV

SEQ ID NO: 49077 - protein, 9 aa, synthetic construct
  source 1..9: note = Seed: VVGARGVGK (KRAS G12R)
YVGRRRVGY

SEQ ID NO: 49078 - protein, 9 aa, synthetic construct
  source 1..9: note = Seed: VVGARGVGK (KRAS G12R)
YVGRRSVGA

SEQ ID NO: 49079 - protein, 9 aa, synthetic construct
  source 1..9: note = Seed: VVGARGVGK (KRAS G12R)
YVGRRSVGI

SEQ ID NO: 49080 - protein, 9 aa, synthetic construct
  source 1..9: note = Seed: VVGARGVGK (KRAS G12R)
YVGRRSVGL

SEQ ID NO: 49081 - protein, 9 aa, synthetic construct
  source 1..9: note = Seed: VVGARGVGK (KRAS G12R)
YVGRRSVGM

SEQ ID NO: 49082 - protein, 9 aa, synthetic construct
  source 1..9: note = Seed: VVGARGVGK (KRAS G12R)
YVGRRSVGR

SEQ ID NO: 49083 - protein, 9 aa, synthetic construct
  source 1..9: note = Seed: VVGARGVGK (KRAS G12R)
YVGRRSVGV

SEQ ID NO: 49084 - protein, 9 aa, synthetic construct
  source 1..9: note = Seed: VVGARGVGK (KRAS G12R)
YVGRRTVGL

SEQ ID NO: 49085 - protein, 9 aa, synthetic construct
  source 1..9: note = Seed: VVGARGVGK (KRAS G12R)
YVGRRVVGR

SEQ ID NO: 49086 - protein, 9 aa, synthetic construct
  source 1..9: note = Seed: VVGARGVGK (KRAS G12R)
YVGSRAVGA

SEQ ID NO: 49087 - protein, 9 aa, synthetic construct
  source 1..9: note = Seed: VVGARGVGK (KRAS G12R)
YVGSRAVGC

SEQ ID NO: 49088 - protein, 9 aa, synthetic construct
  source 1..9: note = Seed: VVGARGVGK (KRAS G12R)
YVGSRAVGD

SEQ ID NO: 49089 - protein, 9 aa, synthetic construct
  source 1..9: note = Seed: VVGARGVGK (KRAS G12R)
YVGSRAVGE

SEQ ID NO: 49090 - protein, 9 aa, synthetic construct
  source 1..9: note = Seed: VVGARGVGK (KRAS G12R)
YVGSRAVGF

SEQ ID NO: 49091 - protein, 9 aa, synthetic construct
  source 1..9: note = Seed: VVGARGVGK (KRAS G12R)
YVGSRAVGG

SEQ ID NO: 49092 - protein, 9 aa, synthetic construct
  source 1..9: note = Seed: VVGARGVGK (KRAS G12R)
YVGSRAVGH

SEQ ID NO: 49093 - protein, 9 aa, synthetic construct
  source 1..9: note = Seed: VVGARGVGK (KRAS G12R)
YVGSRAVGI

SEQ ID NO: 49094 - protein, 9 aa, synthetic construct
  source 1..9: note = Seed: VVGARGVGK (KRAS G12R)
YVGSRAVGK

SEQ ID NO: 49095 - protein, 9 aa, synthetic construct
  source 1..9: note = Seed: VVGARGVGK (KRAS G12R)
YVGSRAVGL

SEQ ID NO: 49096 - protein, 9 aa, synthetic construct
  source 1..9: note = Seed: VVGARGVGK (KRAS G12R)
YVGSRAVGM

SEQ ID NO: 49097 - protein, 9 aa, synthetic construct
  source 1..9: note = Seed: VVGARGVGK (KRAS G12R)
YVGSRAVGN

SEQ ID NO: 49098 - protein, 9 aa, synthetic construct
  source 1..9: note = Seed: VVGARGVGK (KRAS G12R)
YVGSRAVGP

SEQ ID NO: 49099 - protein, 9 aa, synthetic construct
  source 1..9: note = Seed: VVGARGVGK (KRAS G12R)
YVGSRAVGQ

SEQ ID NO: 49100 - protein, 9 aa, synthetic construct
  source 1..9: note = Seed: VVGARGVGK (KRAS G12R)
YVGSRAVGR

SEQ ID NO: 49101 - protein, 9 aa, synthetic construct
  source 1..9: note = Seed: VVGARGVGK (KRAS G12R)
YVGSRAVGS

SEQ ID NO: 49102 - protein, 9 aa, synthetic construct
  source 1..9: note = Seed: VVGARGVGK (KRAS G12R)
YVGSRAVGT

SEQ ID NO: 49103 - protein, 9 aa, synthetic construct
  source 1..9: note = Seed: VVGARGVGK (KRAS G12R)
YVGSRAVGV

SEQ ID NO: 49104 - protein, 9 aa, synthetic construct
  source 1..9: note = Seed: VVGARGVGK (KRAS G12R)
YVGSRAVGW

SEQ ID NO: 49105 - protein, 9 aa, synthetic construct
  source 1..9: note = Seed: VVGARGVGK (KRAS G12R)
YVGSRAVGY

SEQ ID NO: 49106 - protein, 9 aa, synthetic construct
  source 1..9: note = Seed: VVGARGVGK (KRAS G12R)
YVGSRCVGA

SEQ ID NO: 49107 - protein, 9 aa, synthetic construct
  source 1..9: note = Seed: VVGARGVGK (KRAS G12R)
YVGSRCVGI

SEQ ID NO: 49108 - protein, 9 aa, synthetic construct
  source 1..9: note = Seed: VVGARGVGK (KRAS G12R)
YVGSRCVGL

SEQ ID NO: 49109 - protein, 9 aa, synthetic construct
  source 1..9: note = Seed: VVGARGVGK (KRAS G12R)
YVGSRCVGM

SEQ ID NO: 49110 - protein, 9 aa, synthetic construct
  source 1..9: note = Seed: VVGARGVGK (KRAS G12R)
YVGSRCVGV

SEQ ID NO: 49111 - protein, 9 aa, synthetic construct
  source 1..9: note = Seed: VVGARGVGK (KRAS G12R)
YVGSRDVGI

SEQ ID NO: 49112 - protein, 9 aa, synthetic construct
  source 1..9: note = Seed: VVGARGVGK (KRAS G12R)
YVGSREVGI

SEQ ID NO: 49113 - protein, 9 aa, synthetic construct
  source 1..9: note = Seed: VVGARGVGK (KRAS G12R)
YVGSREVGL

SEQ ID NO: 49114 - protein, 9 aa, synthetic construct
  source 1..9: note = Seed: VVGARGVGK (KRAS G12R)
YVGSRGVGA

SEQ ID NO: 49115 - protein, 9 aa, synthetic construct
  source 1..9: note = Seed: VVGARGVGK (KRAS G12R)
YVGSRGVGC

SEQ ID NO: 49116 - protein, 9 aa, synthetic construct
  source 1..9: note = Seed: VVGARGVGK (KRAS G12R)
YVGSRGVGF

SEQ ID NO: 49117 - protein, 9 aa, synthetic construct
  source 1..9: note = Seed: VVGARGVGK (KRAS G12R)
YVGSRGVGG

SEQ ID NO: 49118 - protein, 9 aa, synthetic construct
  source 1..9: note = Seed: VVGARGVGK (KRAS G12R)
YVGSRGVGH

SEQ ID NO: 49119 - protein, 9 aa, synthetic construct
  source 1..9: note = Seed: VVGARGVGK (KRAS G12R)
YVGSRGVGI

SEQ ID NO: 49120 - protein, 9 aa, synthetic construct
  source 1..9: note = Seed: VVGARGVGK (KRAS G12R)
YVGSRGVGK

SEQ ID NO: 49121 - protein, 9 aa, synthetic construct
  source 1..9: note = Seed: VVGARGVGK (KRAS G12R)
YVGSRGVGL

SEQ ID NO: 49122 - protein, 9 aa, synthetic construct
  source 1..9: note = Seed: VVGARGVGK (KRAS G12R)
YVGSRGVGM

SEQ ID NO: 49123 - protein, 9 aa, synthetic construct
  source 1..9: note = Seed: VVGARGVGK (KRAS G12R)
YVGSRGVGN

SEQ ID NO: 49124 - protein, 9 aa, synthetic construct
  source 1..9: note = Seed: VVGARGVGK (KRAS G12R)
YVGSRGVGP

SEQ ID NO: 49125 - protein, 9 aa, synthetic construct
  source 1..9: note = Seed: VVGARGVGK (KRAS G12R)
YVGSRGVGQ

SEQ ID NO: 49126 - protein, 9 aa, synthetic construct
  source 1..9: note = Seed: VVGARGVGK (KRAS G12R)
YVGSRGVGR

SEQ ID NO: 49127 - protein, 9 aa, synthetic construct
  source 1..9: note = Seed: VVGARGVGK (KRAS G12R)
YVGSRGVGS

SEQ ID NO: 49128 - protein, 9 aa, synthetic construct
  source 1..9: note = Seed: VVGARGVGK (KRAS G12R)
YVGSRGVGT

SEQ ID NO: 49129 - protein, 9 aa, synthetic construct
  source 1..9: note = Seed: VVGARGVGK (KRAS G12R)
YVGSRGVGV

SEQ ID NO: 49130 - protein, 9 aa, synthetic construct
  source 1..9: note = Seed: VVGARGVGK (KRAS G12R)
YVGSRGVGW

SEQ ID NO: 49131 - protein, 9 aa, synthetic construct
  source 1..9: note = Seed: VVGARGVGK (KRAS G12R)
YVGSRGVGY

SEQ ID NO: 49132 - protein, 9 aa, synthetic construct
  source 1..9: note = Seed: VVGARGVGK (KRAS G12R)
YVGSRHVGA

SEQ ID NO: 49133 - protein, 9 aa, synthetic construct
  source 1..9: note = Seed: VVGARGVGK (KRAS G12R)
YVGSRHVGF

SEQ ID NO: 49134 - protein, 9 aa, synthetic construct
  source 1..9: note = Seed: VVGARGVGK (KRAS G12R)
YVGSRHVGG

SEQ ID NO: 49135 - protein, 9 aa, synthetic construct
  source 1..9: note = Seed: VVGARGVGK (KRAS G12R)
YVGSRHVGI

SEQ ID NO: 49136 - protein, 9 aa, synthetic construct
  source 1..9: note = Seed: VVGARGVGK (KRAS G12R)
YVGSRHVGL

SEQ ID NO: 49137 - protein, 9 aa, synthetic construct
  source 1..9: note = Seed: VVGARGVGK (KRAS G12R)
YVGSRHVGM

SEQ ID NO: 49138 - protein, 9 aa, synthetic construct
  source 1..9: note = Seed: VVGARGVGK (KRAS G12R)
YVGSRHVGN

SEQ ID NO: 49139 - protein, 9 aa, synthetic construct
  source 1..9: note = Seed: VVGARGVGK (KRAS G12R)
YVGSRHVGR

SEQ ID NO: 49140 - protein, 9 aa, synthetic construct
  source 1..9: note = Seed: VVGARGVGK (KRAS G12R)
YVGSRHVGS

SEQ ID NO: 49141 - protein, 9 aa, synthetic construct
  source 1..9: note = Seed: VVGARGVGK (KRAS G12R)
YVGSRHVGT

SEQ ID NO: 49142 - protein, 9 aa, synthetic construct
  source 1..9: note = Seed: VVGARGVGK (KRAS G12R)
YVGSRHVGV

SEQ ID NO: 49143 - protein, 9 aa, synthetic construct
  source 1..9: note = Seed: VVGARGVGK (KRAS G12R)
YVGSRHVGY

SEQ ID NO: 49144 - protein, 9 aa, synthetic construct
  source 1..9: note = Seed: VVGARGVGK (KRAS G12R)
YVGSRIVGA

SEQ ID NO: 49145 - protein, 9 aa, synthetic construct
  source 1..9: note = Seed: VVGARGVGK (KRAS G12R)
YVGSRIVGF

SEQ ID NO: 49146 - protein, 9 aa, synthetic construct
  source 1..9: note = Seed: VVGARGVGK (KRAS G12R)
YVGSRIVGG

SEQ ID NO: 49147 - protein, 9 aa, synthetic construct
  source 1..9: note = Seed: VVGARGVGK (KRAS G12R)
YVGSRIVGH

SEQ ID NO: 49148 - protein, 9 aa, synthetic construct
  source 1..9: note = Seed: VVGARGVGK (KRAS G12R)
YVGSRIVGI

SEQ ID NO: 49149 - protein, 9 aa, synthetic construct
  source 1..9: note = Seed: VVGARGVGK (KRAS G12R)
YVGSRIVGL

SEQ ID NO: 49150 - protein, 9 aa, synthetic construct
  source 1..9: note = Seed: VVGARGVGK (KRAS G12R)
YVGSRIVGM

SEQ ID NO: 49151 - protein, 9 aa, synthetic construct
  source 1..9: note = Seed: VVGARGVGK (KRAS G12R)
YVGSRIVGN

SEQ ID NO: 49152 - protein, 9 aa, synthetic construct
  source 1..9: note = Seed: VVGARGVGK (KRAS G12R)
YVGSRIVGQ

SEQ ID NO: 49153 - protein, 9 aa, synthetic construct
  source 1..9: note = Seed: VVGARGVGK (KRAS G12R)
YVGSRIVGR

SEQ ID NO: 49154 - protein, 9 aa, synthetic construct
  source 1..9: note = Seed: VVGARGVGK (KRAS G12R)
YVGSRIVGS

SEQ ID NO: 49155 - protein, 9 aa, synthetic construct
  source 1..9: note = Seed: VVGARGVGK (KRAS G12R)
YVGSRIVGT

SEQ ID NO: 49156 - protein, 9 aa, synthetic construct
  source 1..9: note = Seed: VVGARGVGK (KRAS G12R)
YVGSRIVGV

SEQ ID NO: 49157 - protein, 9 aa, synthetic construct
  source 1..9: note = Seed: VVGARGVGK (KRAS G12R)
YVGSRIVGY

SEQ ID NO: 49158 - protein, 9 aa, synthetic construct
  source 1..9: note = Seed: VVGARGVGK (KRAS G12R)
YVGSRKVGA

SEQ ID NO: 49159 - protein, 9 aa, synthetic construct
  source 1..9: note = Seed: VVGARGVGK (KRAS G12R)
YVGSRKVGF

SEQ ID NO: 49160 - protein, 9 aa, synthetic construct
  source 1..9: note = Seed: VVGARGVGK (KRAS G12R)
YVGSRKVGG

SEQ ID NO: 49161 - protein, 9 aa, synthetic construct
  source 1..9: note = Seed: VVGARGVGK (KRAS G12R)
YVGSRKVGI

SEQ ID NO: 49162 - protein, 9 aa, synthetic construct
  source 1..9: note = Seed: VVGARGVGK (KRAS G12R)
YVGSRKVGL

SEQ ID NO: 49163 - protein, 9 aa, synthetic construct
  source 1..9: note = Seed: VVGARGVGK (KRAS G12R)
YVGSRKVGM

SEQ ID NO: 49164 - protein, 9 aa, synthetic construct
  source 1..9: note = Seed: VVGARGVGK (KRAS G12R)
YVGSRKVGN

SEQ ID NO: 49165 - protein, 9 aa, synthetic construct
  source 1..9: note = Seed: VVGARGVGK (KRAS G12R)
YVGSRKVGR

SEQ ID NO: 49166 - protein, 9 aa, synthetic construct
  source 1..9: note = Seed: VVGARGVGK (KRAS G12R)
YVGSRKVGS

SEQ ID NO: 49167 - protein, 9 aa, synthetic construct
  source 1..9: note = Seed: VVGARGVGK (KRAS G12R)
YVGSRKVGT

SEQ ID NO: 49168 - protein, 9 aa, synthetic construct
  source 1..9: note = Seed: VVGARGVGK (KRAS G12R)
YVGSRKVGV

SEQ ID NO: 49169 - protein, 9 aa, synthetic construct
  source 1..9: note = Seed: VVGARGVGK (KRAS G12R)
YVGSRKVGW

SEQ ID NO: 49170 - protein, 9 aa, synthetic construct
  source 1..9: note = Seed: VVGARGVGK (KRAS G12R)
YVGSRKVGY

SEQ ID NO: 49171 - protein, 9 aa, synthetic construct
  source 1..9: note = Seed: VVGARGVGK (KRAS G12R)
YVGSRLVGA

SEQ ID NO: 49172 - protein, 9 aa, synthetic construct
  source 1..9: note = Seed: VVGARGVGK (KRAS G12R)
YVGSRLVGF

SEQ ID NO: 49173 - protein, 9 aa, synthetic construct
  source 1..9: note = Seed: VVGARGVGK (KRAS G12R)
YVGSRLVGG

SEQ ID NO: 49174 - protein, 9 aa, synthetic construct
  source 1..9: note = Seed: VVGARGVGK (KRAS G12R)
YVGSRLVGI

SEQ ID NO: 49175 - protein, 9 aa, synthetic construct
  source 1..9: note = Seed: VVGARGVGK (KRAS G12R)
YVGSRLVGL

SEQ ID NO: 49176 - protein, 9 aa, synthetic construct
  source 1..9: note = Seed: VVGARGVGK (KRAS G12R)
YVGSRLVGM

SEQ ID NO: 49177 - protein, 9 aa, synthetic construct
  source 1..9: note = Seed: VVGARGVGK (KRAS G12R)
YVGSRLVGN

SEQ ID NO: 49178 - protein, 9 aa, synthetic construct
  source 1..9: note = Seed: VVGARGVGK (KRAS G12R)
YVGSRLVGS

SEQ ID NO: 49179 - protein, 9 aa, synthetic construct
  source 1..9: note = Seed: VVGARGVGK (KRAS G12R)
YVGSRLVGT

SEQ ID NO: 49180 - protein, 9 aa, synthetic construct
  source 1..9: note = Seed: VVGARGVGK (KRAS G12R)
YVGSRLVGV

SEQ ID NO: 49181 - protein, 9 aa, synthetic construct
  source 1..9: note = Seed: VVGARGVGK (KRAS G12R)
YVGSRMVGA

SEQ ID NO: 49182 - protein, 9 aa, synthetic construct
  source 1..9: note = Seed: VVGARGVGK (KRAS G12R)
YVGSRMVGF

SEQ ID NO: 49183 - protein, 9 aa, synthetic construct
  source 1..9: note = Seed: VVGARGVGK (KRAS G12R)
YVGSRMVGG

SEQ ID NO: 49184 - protein, 9 aa, synthetic construct
  source 1..9: note = Seed: VVGARGVGK (KRAS G12R)
YVGSRMVGI

SEQ ID NO: 49185 - protein, 9 aa, synthetic construct
  source 1..9: note = Seed: VVGARGVGK (KRAS G12R)
YVGSRMVGL

SEQ ID NO: 49186 - protein, 9 aa, synthetic construct
  source 1..9: note = Seed: VVGARGVGK (KRAS G12R)
YVGSRMVGM

SEQ ID NO: 49187 - protein, 9 aa, synthetic construct
  source 1..9: note = Seed: VVGARGVGK (KRAS G12R)
YVGSRMVGN

SEQ ID NO: 49188 - protein, 9 aa, synthetic construct
  source 1..9: note = Seed: VVGARGVGK (KRAS G12R)
YVGSRMVGR

SEQ ID NO: 49189 - protein, 9 aa, synthetic construct
  source 1..9: note = Seed: VVGARGVGK (KRAS G12R)
YVGSRMVGS

SEQ ID NO: 49190 - protein, 9 aa, synthetic construct
  source 1..9: note = Seed: VVGARGVGK (KRAS G12R)
YVGSRMVGT

SEQ ID NO: 49191 - protein, 9 aa, synthetic construct
  source 1..9: note = Seed: VVGARGVGK (KRAS G12R)
YVGSRMVGV

SEQ ID NO: 49192 - protein, 9 aa, synthetic construct
  source 1..9: note = Seed: VVGARGVGK (KRAS G12R)
YVGSRMVGY

SEQ ID NO: 49193 - protein, 9 aa, synthetic construct
  source 1..9: note = Seed: VVGARGVGK (KRAS G12R)
YVGSRNVGA

SEQ ID NO: 49194 - protein, 9 aa, synthetic construct
  source 1..9: note = Seed: VVGARGVGK (KRAS G12R)
YVGSRNVGF

SEQ ID NO: 49195 - protein, 9 aa, synthetic construct
  source 1..9: note = Seed: VVGARGVGK (KRAS G12R)
YVGSRNVGG

SEQ ID NO: 49196 - protein, 9 aa, synthetic construct
  source 1..9: note = Seed: VVGARGVGK (KRAS G12R)
YVGSRNVGI

SEQ ID NO: 49197 - protein, 9 aa, synthetic construct
  source 1..9: note = Seed: VVGARGVGK (KRAS G12R)
YVGSRNVGL

SEQ ID NO: 49198 - protein, 9 aa, synthetic construct
  source 1..9: note = Seed: VVGARGVGK (KRAS G12R)
YVGSRNVGM

SEQ ID NO: 49199 - protein, 9 aa, synthetic construct
  source 1..9: note = Seed: VVGARGVGK (KRAS G12R)
YVGSRNVGN

SEQ ID NO: 49200 - protein, 9 aa, synthetic construct
  source 1..9: note = Seed: VVGARGVGK (KRAS G12R)
YVGSRNVGR

SEQ ID NO: 49201 - protein, 9 aa, synthetic construct
  source 1..9: note = Seed: VVGARGVGK (KRAS G12R)
YVGSRNVGS

SEQ ID NO: 49202 - protein, 9 aa, synthetic construct
  source 1..9: note = Seed: VVGARGVGK (KRAS G12R)
YVGSRNVGT

SEQ ID NO: 49203 - protein, 9 aa, synthetic construct
  source 1..9: note = Seed: VVGARGVGK (KRAS G12R)
YVGSRNVGV

SEQ ID NO: 49204 - protein, 9 aa, synthetic construct
  source 1..9: note = Seed: VVGARGVGK (KRAS G12R)
YVGSRNVGY

SEQ ID NO: 49205 - protein, 9 aa, synthetic construct
  source 1..9: note = Seed: VVGARGVGK (KRAS G12R)
YVGSRPVGA

SEQ ID NO: 49206 - protein, 9 aa, synthetic construct
  source 1..9: note = Seed: VVGARGVGK (KRAS G12R)
YVGSRPVGC

SEQ ID NO: 49207 - protein, 9 aa, synthetic construct
  source 1..9: note = Seed: VVGARGVGK (KRAS G12R)
YVGSRPVGF

SEQ ID NO: 49208 - protein, 9 aa, synthetic construct
  source 1..9: note = Seed: VVGARGVGK (KRAS G12R)
YVGSRPVGG

SEQ ID NO: 49209 - protein, 9 aa, synthetic construct
  source 1..9: note = Seed: VVGARGVGK (KRAS G12R)
YVGSRPVGH

SEQ ID NO: 49210 - protein, 9 aa, synthetic construct
  source 1..9: note = Seed: VVGARGVGK (KRAS G12R)
YVGSRPVGI

SEQ ID NO: 49211 - protein, 9 aa, synthetic construct
  source 1..9: note = Seed: VVGARGVGK (KRAS G12R)
YVGSRPVGK

SEQ ID NO: 49212 - protein, 9 aa, synthetic construct
  source 1..9: note = Seed: VVGARGVGK (KRAS G12R)
YVGSRPVGL

SEQ ID NO: 49213 - protein, 9 aa, synthetic construct
  source 1..9: note = Seed: VVGARGVGK (KRAS G12R)
YVGSRPVGM

SEQ ID NO: 49214 - protein, 9 aa, synthetic construct
  source 1..9: note = Seed: VVGARGVGK (KRAS G12R)
YVGSRPVGN

SEQ ID NO: 49215 - protein, 9 aa, synthetic construct
  source 1..9: note = Seed: VVGARGVGK (KRAS G12R)
YVGSRPVGP

SEQ ID NO: 49216 - protein, 9 aa, synthetic construct
  source 1..9: note = Seed: VVGARGVGK (KRAS G12R)
YVGSRPVGQ

SEQ ID NO: 49217 - protein, 9 aa, synthetic construct
  source 1..9: note = Seed: VVGARGVGK (KRAS G12R)
YVGSRPVGR

SEQ ID NO: 49218 - protein, 9 aa, synthetic construct
  source 1..9: note = Seed: VVGARGVGK (KRAS G12R)
YVGSRPVGS

SEQ ID NO: 49219 - protein, 9 aa, synthetic construct
  source 1..9: note = Seed: VVGARGVGK (KRAS G12R)
YVGSRPVGT

SEQ ID NO: 49220 - protein, 9 aa, synthetic construct
  source 1..9: note = Seed: VVGARGVGK (KRAS G12R)
YVGSRPVGV

SEQ ID NO: 49221 - protein, 9 aa, synthetic construct
  source 1..9: note = Seed: VVGARGVGK (KRAS G12R)
YVGSRPVGW

SEQ ID NO: 49222 - protein, 9 aa, synthetic construct
  source 1..9: note = Seed: VVGARGVGK (KRAS G12R)
YVGSRPVGY

SEQ ID NO: 49223 - protein, 9 aa, synthetic construct
  source 1..9: note = Seed: VVGARGVGK (KRAS G12R)
YVGSRQVGA

SEQ ID NO: 49224 - protein, 9 aa, synthetic construct
  source 1..9: note = Seed: VVGARGVGK (KRAS G12R)
YVGSRQVGF

SEQ ID NO: 49225 - protein, 9 aa, synthetic construct
  source 1..9: note = Seed: VVGARGVGK (KRAS G12R)
YVGSRQVGI

SEQ ID NO: 49226 - protein, 9 aa, synthetic construct
  source 1..9: note = Seed: VVGARGVGK (KRAS G12R)
YVGSRQVGL

SEQ ID NO: 49227 - protein, 9 aa, synthetic construct
  source 1..9: note = Seed: VVGARGVGK (KRAS G12R)
YVGSRQVGM

SEQ ID NO: 49228 - protein, 9 aa, synthetic construct
  source 1..9: note = Seed: VVGARGVGK (KRAS G12R)
YVGSRQVGS

SEQ ID NO: 49229 - protein, 9 aa, synthetic construct
  source 1..9: note = Seed: VVGARGVGK (KRAS G12R)
YVGSRQVGT

SEQ ID NO: 49230 - protein, 9 aa, synthetic construct
  source 1..9: note = Seed: VVGARGVGK (KRAS G12R)
YVGSRQVGV

SEQ ID NO: 49231 - protein, 9 aa, synthetic construct
  source 1..9: note = Seed: VVGARGVGK (KRAS G12R)
YVGSRRVGA

SEQ ID NO: 49232 - protein, 9 aa, synthetic construct
  source 1..9: note = Seed: VVGARGVGK (KRAS G12R)
YVGSRRVGF

SEQ ID NO: 49233 - protein, 9 aa, synthetic construct
  source 1..9: note = Seed: VVGARGVGK (KRAS G12R)
YVGSRRVGG

SEQ ID NO: 49234 - protein, 9 aa, synthetic construct
  source 1..9: note = Seed: VVGARGVGK (KRAS G12R)
YVGSRRVGI

SEQ ID NO: 49235 - protein, 9 aa, synthetic construct
  source 1..9: note = Seed: VVGARGVGK (KRAS G12R)
YVGSRRVGK

SEQ ID NO: 49236 - protein, 9 aa, synthetic construct
  source 1..9: note = Seed: VVGARGVGK (KRAS G12R)
YVGSRRVGL

SEQ ID NO: 49237 - protein, 9 aa, synthetic construct
  source 1..9: note = Seed: VVGARGVGK (KRAS G12R)
YVGSRRVGM

SEQ ID NO: 49238 - protein, 9 aa, synthetic construct
  source 1..9: note = Seed: VVGARGVGK (KRAS G12R)
YVGSRRVGN

SEQ ID NO: 49239 - protein, 9 aa, synthetic construct
  source 1..9: note = Seed: VVGARGVGK (KRAS G12R)
YVGSRRVGQ

SEQ ID NO: 49240 - protein, 9 aa, synthetic construct
  source 1..9: note = Seed: VVGARGVGK (KRAS G12R)
YVGSRRVGR

SEQ ID NO: 49241 - protein, 9 aa, synthetic construct
  source 1..9: note = Seed: VVGARGVGK (KRAS G12R)
YVGSRRVGS

SEQ ID NO: 49242 - protein, 9 aa, synthetic construct
  source 1..9: note = Seed: VVGARGVGK (KRAS G12R)
YVGSRRVGT

SEQ ID NO: 49243 - protein, 9 aa, synthetic construct
  source 1..9: note = Seed: VVGARGVGK (KRAS G12R)
YVGSRRVGV

SEQ ID NO: 49244 - protein, 9 aa, synthetic construct
  source 1..9: note = Seed: VVGARGVGK (KRAS G12R)
YVGSRRVGY

SEQ ID NO: 49245 - protein, 9 aa, synthetic construct
  source 1..9: note = Seed: VVGARGVGK (KRAS G12R)
YVGSRSVGA

SEQ ID NO: 49246 - protein, 9 aa, synthetic construct
  source 1..9: note = Seed: VVGARGVGK (KRAS G12R)
YVGSRSVGC

SEQ ID NO: 49247 - protein, 9 aa, synthetic construct
  source 1..9: note = Seed: VVGARGVGK (KRAS G12R)
YVGSRSVGD

SEQ ID NO: 49248 - protein, 9 aa, synthetic construct
  source 1..9: note = Seed: VVGARGVGK (KRAS G12R)
YVGSRSVGE

SEQ ID NO: 49249 - protein, 9 aa, synthetic construct
  source 1..9: note = Seed: VVGARGVGK (KRAS G12R)
YVGSRSVGF

SEQ ID NO: 49250 - protein, 9 aa, synthetic construct
  source 1..9: note = Seed: VVGARGVGK (KRAS G12R)
YVGSRSVGG

SEQ ID NO: 49251 - protein, 9 aa, synthetic construct
  source 1..9: note = Seed: VVGARGVGK (KRAS G12R)
YVGSRSVGH

SEQ ID NO: 49252 - protein, 9 aa, synthetic construct
  source 1..9: note = Seed: VVGARGVGK (KRAS G12R)
YVGSRSVGI

SEQ ID NO: 49253 - protein, 9 aa, synthetic construct
  source 1..9: note = Seed: VVGARGVGK (KRAS G12R)
YVGSRSVGK

SEQ ID NO: 49254 - protein, 9 aa, synthetic construct
  source 1..9: note = Seed: VVGARGVGK (KRAS G12R)
YVGSRSVGL

SEQ ID NO: 49255 - protein, 9 aa, synthetic construct
  source 1..9: note = Seed: VVGARGVGK (KRAS G12R)
YVGSRSVGM

SEQ ID NO: 49256 - protein, 9 aa, synthetic construct
  source 1..9: note = Seed: VVGARGVGK (KRAS G12R)
YVGSRSVGN

SEQ ID NO: 49257 - protein, 9 aa, synthetic construct
  source 1..9: note = Seed: VVGARGVGK (KRAS G12R)
YVGSRSVGP

SEQ ID NO: 49258 - protein, 9 aa, synthetic construct
  source 1..9: note = Seed: VVGARGVGK (KRAS G12R)
YVGSRSVGQ

SEQ ID NO: 49259 - protein, 9 aa, synthetic construct
  source 1..9: note = Seed: VVGARGVGK (KRAS G12R)
YVGSRSVGR

SEQ ID NO: 49260 - protein, 9 aa, synthetic construct
  source 1..9: note = Seed: VVGARGVGK (KRAS G12R)
YVGSRSVGS

SEQ ID NO: 49261 - protein, 9 aa, synthetic construct
  source 1..9: note = Seed: VVGARGVGK (KRAS G12R)
YVGSRSVGT

SEQ ID NO: 49262 - protein, 9 aa, synthetic construct
  source 1..9: note = Seed: VVGARGVGK (KRAS G12R)
YVGSRSVGV

SEQ ID NO: 49263 - protein, 9 aa, synthetic construct
  source 1..9: note = Seed: VVGARGVGK (KRAS G12R)
YVGSRSVGW

SEQ ID NO: 49264 - protein, 9 aa, synthetic construct
  source 1..9: note = Seed: VVGARGVGK (KRAS G12R)
YVGSRSVGY

SEQ ID NO: 49265 - protein, 9 aa, synthetic construct
  source 1..9: note = Seed: VVGARGVGK (KRAS G12R)
YVGSRTVGA

SEQ ID NO: 49266 - protein, 9 aa, synthetic construct
  source 1..9: note = Seed: VVGARGVGK (KRAS G12R)
YVGSRTVGF

SEQ ID NO: 49267 - protein, 9 aa, synthetic construct
  source 1..9: note = Seed: VVGARGVGK (KRAS G12R)
YVGSRTVGG

SEQ ID NO: 49268 - protein, 9 aa, synthetic construct
  source 1..9: note = Seed: VVGARGVGK (KRAS G12R)
YVGSRTVGH

SEQ ID NO: 49269 - protein, 9 aa, synthetic construct
  source 1..9: note = Seed: VVGARGVGK (KRAS G12R)
YVGSRTVGI

SEQ ID NO: 49270 - protein, 9 aa, synthetic construct
  source 1..9: note = Seed: VVGARGVGK (KRAS G12R)
YVGSRTVGK

SEQ ID NO: 49271 - protein, 9 aa, synthetic construct
  source 1..9: note = Seed: VVGARGVGK (KRAS G12R)
YVGSRTVGL

SEQ ID NO: 49272 - protein, 9 aa, synthetic construct
  source 1..9: note = Seed: VVGARGVGK (KRAS G12R)
YVGSRTVGM

SEQ ID NO: 49273 - protein, 9 aa, synthetic construct
  source 1..9: note = Seed: VVGARGVGK (KRAS G12R)
YVGSRTVGN

SEQ ID NO: 49274 - protein, 9 aa, synthetic construct
  source 1..9: note = Seed: VVGARGVGK (KRAS G12R)
YVGSRTVGQ

SEQ ID NO: 49275 - protein, 9 aa, synthetic construct
  source 1..9: note = Seed: VVGARGVGK (KRAS G12R)
YVGSRTVGR

SEQ ID NO: 49276 - protein, 9 aa, synthetic construct
  source 1..9: note = Seed: VVGARGVGK (KRAS G12R)
YVGSRTVGS

SEQ ID NO: 49277 - protein, 9 aa, synthetic construct
  source 1..9: note = Seed: VVGARGVGK (KRAS G12R)
YVGSRTVGT

SEQ ID NO: 49278 - protein, 9 aa, synthetic construct
  source 1..9: note = Seed: VVGARGVGK (KRAS G12R)
YVGSRTVGV

SEQ ID NO: 49279 - protein, 9 aa, synthetic construct
  source 1..9: note = Seed: VVGARGVGK (KRAS G12R)
YVGSRTVGW

SEQ ID NO: 49280 - protein, 9 aa, synthetic construct
  source 1..9: note = Seed: VVGARGVGK (KRAS G12R)
YVGSRTVGY

SEQ ID NO: 49281 - protein, 9 aa, synthetic construct
  source 1..9: note = Seed: VVGARGVGK (KRAS G12R)
YVGSRVVGA

SEQ ID NO: 49282 - protein, 9 aa, synthetic construct
  source 1..9: note = Seed: VVGARGVGK (KRAS G12R)
YVGSRVVGF

SEQ ID NO: 49283 - protein, 9 aa, synthetic construct
  source 1..9: note = Seed: VVGARGVGK (KRAS G12R)
YVGSRVVGG

SEQ ID NO: 49284 - protein, 9 aa, synthetic construct
  source 1..9: note = Seed: VVGARGVGK (KRAS G12R)
YVGSRVVGH

SEQ ID NO: 49285 - protein, 9 aa, synthetic construct
  source 1..9: note = Seed: VVGARGVGK (KRAS G12R)
YVGSRVVGI

SEQ ID NO: 49286 - protein, 9 aa, synthetic construct
  source 1..9: note = Seed: VVGARGVGK (KRAS G12R)
YVGSRVVGK

SEQ ID NO: 49287 - protein, 9 aa, synthetic construct
  source 1..9: note = Seed: VVGARGVGK (KRAS G12R)
YVGSRVVGL

SEQ ID NO: 49288 - protein, 9 aa, synthetic construct
  source 1..9: note = Seed: VVGARGVGK (KRAS G12R)
YVGSRVVGM

SEQ ID NO: 49289 - protein, 9 aa, synthetic construct
  source 1..9: note = Seed: VVGARGVGK (KRAS G12R)
YVGSRVVGN

SEQ ID NO: 49290 - protein, 9 aa, synthetic construct
  source 1..9: note = Seed: VVGARGVGK (KRAS G12R)
YVGSRVVGP

SEQ ID NO: 49291 - protein, 9 aa, synthetic construct
  source 1..9: note = Seed: VVGARGVGK (KRAS G12R)
YVGSRVVGQ

SEQ ID NO: 49292 - protein, 9 aa, synthetic construct
  source 1..9: note = Seed: VVGARGVGK (KRAS G12R)
YVGSRVVGR

SEQ ID NO: 49293 - protein, 9 aa, synthetic construct
  source 1..9: note = Seed: VVGARGVGK (KRAS G12R)
YVGSRVVGS

SEQ ID NO: 49294 - protein, 9 aa, synthetic construct
  source 1..9: note = Seed: VVGARGVGK (KRAS G12R)
YVGSRVVGT

SEQ ID NO: 49295 - protein, 9 aa, synthetic construct
  source 1..9: note = Seed: VVGARGVGK (KRAS G12R)
YVGSRVVGV

SEQ ID NO: 49296 - protein, 9 aa, synthetic construct
  source 1..9: note = Seed: VVGARGVGK (KRAS G12R)
YVGSRVVGY

SEQ ID NO: 49297 - protein, 9 aa, synthetic construct
  source 1..9: note = Seed: VVGARGVGK (KRAS G12R)
YVGSRWVGI

SEQ ID NO: 49298 - protein, 9 aa, synthetic construct
  source 1..9: note = Seed: VVGARGVGK (KRAS G12R)
YVGSRYVGA

SEQ ID NO: 49299 - protein, 9 aa, synthetic construct
  source 1..9: note = Seed: VVGARGVGK (KRAS G12R)
YVGSRYVGI

SEQ ID NO: 49300 - protein, 9 aa, synthetic construct
  source 1..9: note = Seed: VVGARGVGK (KRAS G12R)
YVGSRYVGL

SEQ ID NO: 49301 - protein, 9 aa, synthetic construct
  source 1..9: note = Seed: VVGARGVGK (KRAS G12R)
YVGSRYVGM

SEQ ID NO: 49302 - protein, 9 aa, synthetic construct
  source 1..9: note = Seed: VVGARGVGK (KRAS G12R)
YVGSRYVGV

SEQ ID NO: 49303 - protein, 9 aa, synthetic construct
  source 1..9: note = Seed: VVGARGVGK (KRAS G12R)
YVGTRAVGA

SEQ ID NO: 49304 - protein, 9 aa, synthetic construct
  source 1..9: note = Seed: VVGARGVGK (KRAS G12R)
YVGTRAVGC

SEQ ID NO: 49305 - protein, 9 aa, synthetic construct
  source 1..9: note = Seed: VVGARGVGK (KRAS G12R)
YVGTRAVGE

SEQ ID NO: 49306 - protein, 9 aa, synthetic construct
  source 1..9: note = Seed: VVGARGVGK (KRAS G12R)
YVGTRAVGF

SEQ ID NO: 49307 - protein, 9 aa, synthetic construct
  source 1..9: note = Seed: VVGARGVGK (KRAS G12R)
YVGTRAVGG

SEQ ID NO: 49308 - protein, 9 aa, synthetic construct
  source 1..9: note = Seed: VVGARGVGK (KRAS G12R)
YVGTRAVGH

SEQ ID NO: 49309 - protein, 9 aa, synthetic construct
  source 1..9: note = Seed: VVGARGVGK (KRAS G12R)
YVGTRAVGI

SEQ ID NO: 49310 - protein, 9 aa, synthetic construct
  source 1..9: note = Seed: VVGARGVGK (KRAS G12R)
YVGTRAVGK

SEQ ID NO: 49311 - protein, 9 aa, synthetic construct
  source 1..9: note = Seed: VVGARGVGK (KRAS G12R)
YVGTRAVGL

SEQ ID NO: 49312 - protein, 9 aa, synthetic construct
  source 1..9: note = Seed: VVGARGVGK (KRAS G12R)
YVGTRAVGM

SEQ ID NO: 49313 - protein, 9 aa, synthetic construct
  source 1..9: note = Seed: VVGARGVGK (KRAS G12R)
YVGTRAVGN

SEQ ID NO: 49314 - protein, 9 aa, synthetic construct
  source 1..9: note = Seed: VVGARGVGK (KRAS G12R)
YVGTRAVGP

SEQ ID NO: 49315 - protein, 9 aa, synthetic construct
  source 1..9: note = Seed: VVGARGVGK (KRAS G12R)
YVGTRAVGQ

SEQ ID NO: 49316 - protein, 9 aa, synthetic construct
  source 1..9: note = Seed: VVGARGVGK (KRAS G12R)
YVGTRAVGR

SEQ ID NO: 49317 - protein, 9 aa, synthetic construct
  source 1..9: note = Seed: VVGARGVGK (KRAS G12R)
YVGTRAVGS

SEQ ID NO: 49318 - protein, 9 aa, synthetic construct
  source 1..9: note = Seed: VVGARGVGK (KRAS G12R)
YVGTRAVGT

SEQ ID NO: 49319 - protein, 9 aa, synthetic construct
  source 1..9: note = Seed: VVGARGVGK (KRAS G12R)
YVGTRAVGV

SEQ ID NO: 49320 - protein, 9 aa, synthetic construct
  source 1..9: note = Seed: VVGARGVGK (KRAS G12R)
YVGTRAVGW

SEQ ID NO: 49321 - protein, 9 aa, synthetic construct
  source 1..9: note = Seed: VVGARGVGK (KRAS G12R)
YVGTRAVGY

SEQ ID NO: 49322 - protein, 9 aa, synthetic construct
  source 1..9: note = Seed: VVGARGVGK (KRAS G12R)
YVGTRDVGI

SEQ ID NO: 49323 - protein, 9 aa, synthetic construct
  source 1..9: note = Seed: VVGARGVGK (KRAS G12R)
YVGTREVGI

SEQ ID NO: 49324 - protein, 9 aa, synthetic construct
  source 1..9: note = Seed: VVGARGVGK (KRAS G12R)
YVGTREVGL

SEQ ID NO: 49325 - protein, 9 aa, synthetic construct
  source 1..9: note = Seed: VVGARGVGK (KRAS G12R)
YVGTREVGV

SEQ ID NO: 49326 - protein, 9 aa, synthetic construct
  source 1..9: note = Seed: VVGARGVGK (KRAS G12R)
YVGTRGVGA

SEQ ID NO: 49327 - protein, 9 aa, synthetic construct
  source 1..9: note = Seed: VVGARGVGK (KRAS G12R)
YVGTRGVGC

SEQ ID NO: 49328 - protein, 9 aa, synthetic construct
  source 1..9: note = Seed: VVGARGVGK (KRAS G12R)
YVGTRGVGF

SEQ ID NO: 49329 - protein, 9 aa, synthetic construct
  source 1..9: note = Seed: VVGARGVGK (KRAS G12R)
YVGTRGVGG

SEQ ID NO: 49330 - protein, 9 aa, synthetic construct
  source 1..9: note = Seed: VVGARGVGK (KRAS G12R)
YVGTRGVGI

SEQ ID NO: 49331 - protein, 9 aa, synthetic construct
  source 1..9: note = Seed: VVGARGVGK (KRAS G12R)
YVGTRGVGL

SEQ ID NO: 49332 - protein, 9 aa, synthetic construct
  source 1..9: note = Seed: VVGARGVGK (KRAS G12R)
YVGTRGVGM

SEQ ID NO: 49333 - protein, 9 aa, synthetic construct
  source 1..9: note = Seed: VVGARGVGK (KRAS G12R)
YVGTRGVGN

SEQ ID NO: 49334 - protein, 9 aa, synthetic construct
  source 1..9: note = Seed: VVGARGVGK (KRAS G12R)
YVGTRGVGS

SEQ ID NO: 49335 - protein, 9 aa, synthetic construct
  source 1..9: note = Seed: VVGARGVGK (KRAS G12R)
YVGTRGVGT

SEQ ID NO: 49336 - protein, 9 aa, synthetic construct
  source 1..9: note = Seed: VVGARGVGK (KRAS G12R)
YVGTRGVGV

SEQ ID NO: 49337 - protein, 9 aa, synthetic construct
  source 1..9: note = Seed: VVGARGVGK (KRAS G12R)
YVGTRGVGY

SEQ ID NO: 49338 - protein, 9 aa, synthetic construct
  source 1..9: note = Seed: VVGARGVGK (KRAS G12R)
YVGTRHVGA

SEQ ID NO: 49339 - protein, 9 aa, synthetic construct
  source 1..9: note = Seed: VVGARGVGK (KRAS G12R)
YVGTRHVGI

SEQ ID NO: 49340 - protein, 9 aa, synthetic construct
  source 1..9: note = Seed: VVGARGVGK (KRAS G12R)
YVGTRHVGL

SEQ ID NO: 49341 - protein, 9 aa, synthetic construct
  source 1..9: note = Seed: VVGARGVGK (KRAS G12R)
YVGTRHVGM

SEQ ID NO: 49342 - protein, 9 aa, synthetic construct
  source 1..9: note = Seed: VVGARGVGK (KRAS G12R)
YVGTRHVGV

SEQ ID NO: 49343 - protein, 9 aa, synthetic construct
  source 1..9: note = Seed: VVGARGVGK (KRAS G12R)
YVGTRIVGA

SEQ ID NO: 49344 - protein, 9 aa, synthetic construct
  source 1..9: note = Seed: VVGARGVGK (KRAS G12R)
YVGTRIVGF

SEQ ID NO: 49345 - protein, 9 aa, synthetic construct
  source 1..9: note = Seed: VVGARGVGK (KRAS G12R)
YVGTRIVGI

SEQ ID NO: 49346 - protein, 9 aa, synthetic construct
  source 1..9: note = Seed: VVGARGVGK (KRAS G12R)
YVGTRIVGL

SEQ ID NO: 49347 - protein, 9 aa, synthetic construct
  source 1..9: note = Seed: VVGARGVGK (KRAS G12R)
YVGTRIVGM

SEQ ID NO: 49348 - protein, 9 aa, synthetic construct
  source 1..9: note = Seed: VVGARGVGK (KRAS G12R)
YVGTRIVGN

SEQ ID NO: 49349 - protein, 9 aa, synthetic construct
  source 1..9: note = Seed: VVGARGVGK (KRAS G12R)
YVGTRIVGR

SEQ ID NO: 49350 - protein, 9 aa, synthetic construct
  source 1..9: note = Seed: VVGARGVGK (KRAS G12R)
YVGTRIVGS

SEQ ID NO: 49351 - protein, 9 aa, synthetic construct
  source 1..9: note = Seed: VVGARGVGK (KRAS G12R)
YVGTRIVGT

SEQ ID NO: 49352 - protein, 9 aa, synthetic construct
  source 1..9: note = Seed: VVGARGVGK (KRAS G12R)
YVGTRIVGV

SEQ ID NO: 49353 - protein, 9 aa, synthetic construct
  source 1..9: note = Seed: VVGARGVGK (KRAS G12R)
YVGTRIVGY

SEQ ID NO: 49354 - protein, 9 aa, synthetic construct
  source 1..9: note = Seed: VVGARGVGK (KRAS G12R)
YVGTRKVGL

SEQ ID NO: 49355 - protein, 9 aa, synthetic construct
  source 1..9: note = Seed: VVGARGVGK (KRAS G12R)
YVGTRKVGV

SEQ ID NO: 49356 - protein, 9 aa, synthetic construct
  source 1..9: note = Seed: VVGARGVGK (KRAS G12R)
YVGTRLVGA

SEQ ID NO: 49357 - protein, 9 aa, synthetic construct
  source 1..9: note = Seed: VVGARGVGK (KRAS G12R)
YVGTRLVGI

SEQ ID NO: 49358 - protein, 9 aa, synthetic construct
  source 1..9: note = Seed: VVGARGVGK (KRAS G12R)
YVGTRLVGL

SEQ ID NO: 49359 - protein, 9 aa, synthetic construct
  source 1..9: note = Seed: VVGARGVGK (KRAS G12R)
YVGTRLVGM

SEQ ID NO: 49360 - protein, 9 aa, synthetic construct
  source 1..9: note = Seed: VVGARGVGK (KRAS G12R)
YVGTRLVGS

SEQ ID NO: 49361 - protein, 9 aa, synthetic construct
  source 1..9: note = Seed: VVGARGVGK (KRAS G12R)
YVGTRLVGV

SEQ ID NO: 49362 - protein, 9 aa, synthetic construct
  source 1..9: note = Seed: VVGARGVGK (KRAS G12R)
YVGTRMVGA

SEQ ID NO: 49363 - protein, 9 aa, synthetic construct
  source 1..9: note = Seed: VVGARGVGK (KRAS G12R)
YVGTRMVGF

SEQ ID NO: 49364 - protein, 9 aa, synthetic construct
  source 1..9: note = Seed: VVGARGVGK (KRAS G12R)
YVGTRMVGI

SEQ ID NO: 49365 - protein, 9 aa, synthetic construct
  source 1..9: note = Seed: VVGARGVGK (KRAS G12R)
YVGTRMVGL

SEQ ID NO: 49366 - protein, 9 aa, synthetic construct
  source 1..9: note = Seed: VVGARGVGK (KRAS G12R)
YVGTRMVGM

SEQ ID NO: 49367 - protein, 9 aa, synthetic construct
  source 1..9: note = Seed: VVGARGVGK (KRAS G12R)
YVGTRMVGS

SEQ ID NO: 49368 - protein, 9 aa, synthetic construct
  source 1..9: note = Seed: VVGARGVGK (KRAS G12R)
YVGTRMVGT

SEQ ID NO: 49369 - protein, 9 aa, synthetic construct
  source 1..9: note = Seed: VVGARGVGK (KRAS G12R)
YVGTRMVGV

SEQ ID NO: 49370 - protein, 9 aa, synthetic construct
  source 1..9: note = Seed: VVGARGVGK (KRAS G12R)
YVGTRNVGA

SEQ ID NO: 49371 - protein, 9 aa, synthetic construct
  source 1..9: note = Seed: VVGARGVGK (KRAS G12R)
YVGTRNVGF

SEQ ID NO: 49372 - protein, 9 aa, synthetic construct
  source 1..9: note = Seed: VVGARGVGK (KRAS G12R)
YVGTRNVGI

SEQ ID NO: 49373 - protein, 9 aa, synthetic construct
  source 1..9: note = Seed: VVGARGVGK (KRAS G12R)
YVGTRNVGL

SEQ ID NO: 49374 - protein, 9 aa, synthetic construct
  source 1..9: note = Seed: VVGARGVGK (KRAS G12R)
YVGTRNVGM

SEQ ID NO: 49375 - protein, 9 aa, synthetic construct
  source 1..9: note = Seed: VVGARGVGK (KRAS G12R)
YVGTRNVGN

SEQ ID NO: 49376 - protein, 9 aa, synthetic construct
  source 1..9: note = Seed: VVGARGVGK (KRAS G12R)
YVGTRNVGS

SEQ ID NO: 49377 - protein, 9 aa, synthetic construct
  source 1..9: note = Seed: VVGARGVGK (KRAS G12R)
YVGTRNVGT

SEQ ID NO: 49378 - protein, 9 aa, synthetic construct
  source 1..9: note = Seed: VVGARGVGK (KRAS G12R)
YVGTRNVGV

SEQ ID NO: 49379 - protein, 9 aa, synthetic construct
  source 1..9: note = Seed: VVGARGVGK (KRAS G12R)
YVGTRNVGY

SEQ ID NO: 49380 - protein, 9 aa, synthetic construct
  source 1..9: note = Seed: VVGARGVGK (KRAS G12R)
YVGTRPVGA

SEQ ID NO: 49381 - protein, 9 aa, synthetic construct
  source 1..9: note = Seed: VVGARGVGK (KRAS G12R)
YVGTRPVGF

SEQ ID NO: 49382 - protein, 9 aa, synthetic construct
  source 1..9: note = Seed: VVGARGVGK (KRAS G12R)
YVGTRPVGG

SEQ ID NO: 49383 - protein, 9 aa, synthetic construct
  source 1..9: note = Seed: VVGARGVGK (KRAS G12R)
YVGTRPVGH

SEQ ID NO: 49384 - protein, 9 aa, synthetic construct
  source 1..9: note = Seed: VVGARGVGK (KRAS G12R)
YVGTRPVGI

SEQ ID NO: 49385 - protein, 9 aa, synthetic construct
  source 1..9: note = Seed: VVGARGVGK (KRAS G12R)
YVGTRPVGK

SEQ ID NO: 49386 - protein, 9 aa, synthetic construct
  source 1..9: note = Seed: VVGARGVGK (KRAS G12R)
YVGTRPVGL

SEQ ID NO: 49387 - protein, 9 aa, synthetic construct
  source 1..9: note = Seed: VVGARGVGK (KRAS G12R)
YVGTRPVGM

SEQ ID NO: 49388 - protein, 9 aa, synthetic construct
  source 1..9: note = Seed: VVGARGVGK (KRAS G12R)
YVGTRPVGN

SEQ ID NO: 49389 - protein, 9 aa, synthetic construct
  source 1..9: note = Seed: VVGARGVGK (KRAS G12R)
YVGTRPVGQ

SEQ ID NO: 49390 - protein, 9 aa, synthetic construct
  source 1..9: note = Seed: VVGARGVGK (KRAS G12R)
YVGTRPVGR

SEQ ID NO: 49391 - protein, 9 aa, synthetic construct
  source 1..9: note = Seed: VVGARGVGK (KRAS G12R)
YVGTRPVGS

SEQ ID NO: 49392 - protein, 9 aa, synthetic construct
  source 1..9: note = Seed: VVGARGVGK (KRAS G12R)
YVGTRPVGT

SEQ ID NO: 49393 - protein, 9 aa, synthetic construct
  source 1..9: note = Seed: VVGARGVGK (KRAS G12R)
YVGTRPVGV

SEQ ID NO: 49394 - protein, 9 aa, synthetic construct
  source 1..9: note = Seed: VVGARGVGK (KRAS G12R)
YVGTRPVGW

SEQ ID NO: 49395 - protein, 9 aa, synthetic construct
  source 1..9: note = Seed: VVGARGVGK (KRAS G12R)
YVGTRPVGY

SEQ ID NO: 49396 - protein, 9 aa, synthetic construct
  source 1..9: note = Seed: VVGARGVGK (KRAS G12R)
YVGTRQVGI

SEQ ID NO: 49397 - protein, 9 aa, synthetic construct
  source 1..9: note = Seed: VVGARGVGK (KRAS G12R)
YVGTRQVGL

SEQ ID NO: 49398 - protein, 9 aa, synthetic construct
  source 1..9: note = Seed: VVGARGVGK (KRAS G12R)
YVGTRQVGM

SEQ ID NO: 49399 - protein, 9 aa, synthetic construct
  source 1..9: note = Seed: VVGARGVGK (KRAS G12R)
YVGTRQVGV

SEQ ID NO: 49400 - protein, 9 aa, synthetic construct
  source 1..9: note = Seed: VVGARGVGK (KRAS G12R)
YVGTRRVGA

SEQ ID NO: 49401 - protein, 9 aa, synthetic construct
  source 1..9: note = Seed: VVGARGVGK (KRAS G12R)
YVGTRRVGK

SEQ ID NO: 49402 - protein, 9 aa, synthetic construct
  source 1..9: note = Seed: VVGARGVGK (KRAS G12R)
YVGTRRVGL

SEQ ID NO: 49403 - protein, 9 aa, synthetic construct
  source 1..9: note = Seed: VVGARGVGK (KRAS G12R)
YVGTRRVGR

SEQ ID NO: 49404 - protein, 9 aa, synthetic construct
  source 1..9: note = Seed: VVGARGVGK (KRAS G12R)
YVGTRRVGV

SEQ ID NO: 49405 - protein, 9 aa, synthetic construct
  source 1..9: note = Seed: VVGARGVGK (KRAS G12R)
YVGTRSVGA

SEQ ID NO: 49406 - protein, 9 aa, synthetic construct
  source 1..9: note = Seed: VVGARGVGK (KRAS G12R)
YVGTRSVGC

SEQ ID NO: 49407 - protein, 9 aa, synthetic construct
  source 1..9: note = Seed: VVGARGVGK (KRAS G12R)
YVGTRSVGE

SEQ ID NO: 49408 - protein, 9 aa, synthetic construct
  source 1..9: note = Seed: VVGARGVGK (KRAS G12R)
YVGTRSVGF

SEQ ID NO: 49409 - protein, 9 aa, synthetic construct
  source 1..9: note = Seed: VVGARGVGK (KRAS G12R)
YVGTRSVGG

SEQ ID NO: 49410 - protein, 9 aa, synthetic construct
  source 1..9: note = Seed: VVGARGVGK (KRAS G12R)
YVGTRSVGH

SEQ ID NO: 49411 - protein, 9 aa, synthetic construct
  source 1..9: note = Seed: VVGARGVGK (KRAS G12R)
YVGTRSVGI

SEQ ID NO: 49412 - protein, 9 aa, synthetic construct
  source 1..9: note = Seed: VVGARGVGK (KRAS G12R)
YVGTRSVGL

SEQ ID NO: 49413 - protein, 9 aa, synthetic construct
  source 1..9: note = Seed: VVGARGVGK (KRAS G12R)
YVGTRSVGM

SEQ ID NO: 49414 - protein, 9 aa, synthetic construct
  source 1..9: note = Seed: VVGARGVGK (KRAS G12R)
YVGTRSVGN

SEQ ID NO: 49415 - protein, 9 aa, synthetic construct
  source 1..9: note = Seed: VVGARGVGK (KRAS G12R)
YVGTRSVGP

SEQ ID NO: 49416 - protein, 9 aa, synthetic construct
  source 1..9: note = Seed: VVGARGVGK (KRAS G12R)
YVGTRSVGQ

SEQ ID NO: 49417 - protein, 9 aa, synthetic construct
  source 1..9: note = Seed: VVGARGVGK (KRAS G12R)
YVGTRSVGR

SEQ ID NO: 49418 - protein, 9 aa, synthetic construct
  source 1..9: note = Seed: VVGARGVGK (KRAS G12R)
YVGTRSVGS

SEQ ID NO: 49419 - protein, 9 aa, synthetic construct
  source 1..9: note = Seed: VVGARGVGK (KRAS G12R)
YVGTRSVGT

SEQ ID NO: 49420 - protein, 9 aa, synthetic construct
  source 1..9: note = Seed: VVGARGVGK (KRAS G12R)
YVGTRSVGV

SEQ ID NO: 49421 - protein, 9 aa, synthetic construct
  source 1..9: note = Seed: VVGARGVGK (KRAS G12R)
YVGTRSVGW

SEQ ID NO: 49422 - protein, 9 aa, synthetic construct
  source 1..9: note = Seed: VVGARGVGK (KRAS G12R)
YVGTRSVGY

SEQ ID NO: 49423 - protein, 9 aa, synthetic construct
  source 1..9: note = Seed: VVGARGVGK (KRAS G12R)
YVGTRTVGA

SEQ ID NO: 49424 - protein, 9 aa, synthetic construct
  source 1..9: note = Seed: VVGARGVGK (KRAS G12R)
YVGTRTVGF

SEQ ID NO: 49425 - protein, 9 aa, synthetic construct
  source 1..9: note = Seed: VVGARGVGK (KRAS G12R)
YVGTRTVGG

SEQ ID NO: 49426 - protein, 9 aa, synthetic construct
  source 1..9: note = Seed: VVGARGVGK (KRAS G12R)
YVGTRTVGI

SEQ ID NO: 49427 - protein, 9 aa, synthetic construct
  source 1..9: note = Seed: VVGARGVGK (KRAS G12R)
YVGTRTVGL

SEQ ID NO: 49428 - protein, 9 aa, synthetic construct
  source 1..9: note = Seed: VVGARGVGK (KRAS G12R)
YVGTRTVGM

SEQ ID NO: 49429 - protein, 9 aa, synthetic construct
  source 1..9: note = Seed: VVGARGVGK (KRAS G12R)
YVGTRTVGN

SEQ ID NO: 49430 - protein, 9 aa, synthetic construct
  source 1..9: note = Seed: VVGARGVGK (KRAS G12R)
YVGTRTVGQ

SEQ ID NO: 49431 - protein, 9 aa, synthetic construct
  source 1..9: note = Seed: VVGARGVGK (KRAS G12R)
YVGTRTVGS

SEQ ID NO: 49432 - protein, 9 aa, synthetic construct
  source 1..9: note = Seed: VVGARGVGK (KRAS G12R)
YVGTRTVGT

SEQ ID NO: 49433 - protein, 9 aa, synthetic construct
  source 1..9: note = Seed: VVGARGVGK (KRAS G12R)
YVGTRTVGV

SEQ ID NO: 49434 - protein, 9 aa, synthetic construct
  source 1..9: note = Seed: VVGARGVGK (KRAS G12R)
YVGTRTVGY

SEQ ID NO: 49435 - protein, 9 aa, synthetic construct
  source 1..9: note = Seed: VVGARGVGK (KRAS G12R)
YVGTRVVGA

SEQ ID NO: 49436 - protein, 9 aa, synthetic construct
  source 1..9: note = Seed: VVGARGVGK (KRAS G12R)
YVGTRVVGF

SEQ ID NO: 49437 - protein, 9 aa, synthetic construct
  source 1..9: note = Seed: VVGARGVGK (KRAS G12R)
YVGTRVVGG

SEQ ID NO: 49438 - protein, 9 aa, synthetic construct
  source 1..9: note = Seed: VVGARGVGK (KRAS G12R)
YVGTRVVGH

SEQ ID NO: 49439 - protein, 9 aa, synthetic construct
  source 1..9: note = Seed: VVGARGVGK (KRAS G12R)
YVGTRVVGI

SEQ ID NO: 49440 - protein, 9 aa, synthetic construct
  source 1..9: note = Seed: VVGARGVGK (KRAS G12R)
YVGTRVVGL

SEQ ID NO: 49441 - protein, 9 aa, synthetic construct
  source 1..9: note = Seed: VVGARGVGK (KRAS G12R)
YVGTRVVGM

SEQ ID NO: 49442 - protein, 9 aa, synthetic construct
  source 1..9: note = Seed: VVGARGVGK (KRAS G12R)
YVGTRVVGN

SEQ ID NO: 49443 - protein, 9 aa, synthetic construct
  source 1..9: note = Seed: VVGARGVGK (KRAS G12R)
YVGTRVVGR

SEQ ID NO: 49444 - protein, 9 aa, synthetic construct
  source 1..9: note = Seed: VVGARGVGK (KRAS G12R)
YVGTRVVGS

SEQ ID NO: 49445 - protein, 9 aa, synthetic construct
  source 1..9: note = Seed: VVGARGVGK (KRAS G12R)
YVGTRVVGT

SEQ ID NO: 49446 - protein, 9 aa, synthetic construct
  source 1..9: note = Seed: VVGARGVGK (KRAS G12R)
YVGTRVVGV

SEQ ID NO: 49447 - protein, 9 aa, synthetic construct
  source 1..9: note = Seed: VVGARGVGK (KRAS G12R)
YVGTRVVGY

SEQ ID NO: 49448 - protein, 9 aa, synthetic construct
  source 1..9: note = Seed: VVGARGVGK (KRAS G12R)
YVGTRWVGI

SEQ ID NO: 49449 - protein, 9 aa, synthetic construct
  source 1..9: note = Seed: VVGARGVGK (KRAS G12R)
YVGTRYVGI

SEQ ID NO: 49450 - protein, 9 aa, synthetic construct
  source 1..9: note = Seed: VVGARGVGK (KRAS G12R)
YVGTRYVGL

SEQ ID NO: 49451 - protein, 9 aa, synthetic construct
  source 1..9: note = Seed: VVGARGVGK (KRAS G12R)
YVGTRYVGV

SEQ ID NO: 49452 - protein, 9 aa, synthetic construct
  source 1..9: note = Seed: VVGARGVGK (KRAS G12R)
YVGVRAVGA

SEQ ID NO: 49453 - protein, 9 aa, synthetic construct
  source 1..9: note = Seed: VVGARGVGK (KRAS G12R)
YVGVRAVGC

SEQ ID NO: 49454 - protein, 9 aa, synthetic construct
  source 1..9: note = Seed: VVGARGVGK (KRAS G12R)
YVGVRAVGD

SEQ ID NO: 49455 - protein, 9 aa, synthetic construct
  source 1..9: note = Seed: VVGARGVGK (KRAS G12R)
YVGVRAVGE

SEQ ID NO: 49456 - protein, 9 aa, synthetic construct
  source 1..9: note = Seed: VVGARGVGK (KRAS G12R)
YVGVRAVGF

SEQ ID NO: 49457 - protein, 9 aa, synthetic construct
  source 1..9: note = Seed: VVGARGVGK (KRAS G12R)
YVGVRAVGG

SEQ ID NO: 49458 - protein, 9 aa, synthetic construct
  source 1..9: note = Seed: VVGARGVGK (KRAS G12R)
YVGVRAVGH

SEQ ID NO: 49459 - protein, 9 aa, synthetic construct
  source 1..9: note = Seed: VVGARGVGK (KRAS G12R)
YVGVRAVGI

SEQ ID NO: 49460 - protein, 9 aa, synthetic construct
  source 1..9: note = Seed: VVGARGVGK (KRAS G12R)
YVGVRAVGK

SEQ ID NO: 49461 - protein, 9 aa, synthetic construct
  source 1..9: note = Seed: VVGARGVGK (KRAS G12R)
YVGVRAVGL

SEQ ID NO: 49462 - protein, 9 aa, synthetic construct
  source 1..9: note = Seed: VVGARGVGK (KRAS G12R)
YVGVRAVGM

SEQ ID NO: 49463 - protein, 9 aa, synthetic construct
  source 1..9: note = Seed: VVGARGVGK (KRAS G12R)
YVGVRAVGN

SEQ ID NO: 49464 - protein, 9 aa, synthetic construct
  source 1..9: note = Seed: VVGARGVGK (KRAS G12R)
YVGVRAVGP

SEQ ID NO: 49465 - protein, 9 aa, synthetic construct
  source 1..9: note = Seed: VVGARGVGK (KRAS G12R)
YVGVRAVGQ

SEQ ID NO: 49466 - protein, 9 aa, synthetic construct
  source 1..9: note = Seed: VVGARGVGK (KRAS G12R)
YVGVRAVGR

SEQ ID NO: 49467 - protein, 9 aa, synthetic construct
  source 1..9: note = Seed: VVGARGVGK (KRAS G12R)
YVGVRAVGS

SEQ ID NO: 49468 - protein, 9 aa, synthetic construct
  source 1..9: note = Seed: VVGARGVGK (KRAS G12R)
YVGVRAVGT

SEQ ID NO: 49469 - protein, 9 aa, synthetic construct
  source 1..9: note = Seed: VVGARGVGK (KRAS G12R)
YVGVRAVGV

SEQ ID NO: 49470 - protein, 9 aa, synthetic construct
  source 1..9: note = Seed: VVGARGVGK (KRAS G12R)
YVGVRAVGW

SEQ ID NO: 49471 - protein, 9 aa, synthetic construct
  source 1..9: note = Seed: VVGARGVGK (KRAS G12R)
YVGVRAVGY

SEQ ID NO: 49472 - protein, 9 aa, synthetic construct
  source 1..9: note = Seed: VVGARGVGK (KRAS G12R)
YVGVRCVGV

SEQ ID NO: 49473 - protein, 9 aa, synthetic construct
  source 1..9: note = Seed: VVGARGVGK (KRAS G12R)
YVGVREVGA

SEQ ID NO: 49474 - protein, 9 aa, synthetic construct
  source 1..9: note = Seed: VVGARGVGK (KRAS G12R)
YVGVREVGI

SEQ ID NO: 49475 - protein, 9 aa, synthetic construct
  source 1..9: note = Seed: VVGARGVGK (KRAS G12R)
YVGVREVGL

SEQ ID NO: 49476 - protein, 9 aa, synthetic construct
  source 1..9: note = Seed: VVGARGVGK (KRAS G12R)
YVGVREVGV

SEQ ID NO: 49477 - protein, 9 aa, synthetic construct
  source 1..9: note = Seed: VVGARGVGK (KRAS G12R)
YVGVRGVGA

SEQ ID NO: 49478 - protein, 9 aa, synthetic construct
  source 1..9: note = Seed: VVGARGVGK (KRAS G12R)
YVGVRGVGC

SEQ ID NO: 49479 - protein, 9 aa, synthetic construct
  source 1..9: note = Seed: VVGARGVGK (KRAS G12R)
YVGVRGVGD

SEQ ID NO: 49480 - protein, 9 aa, synthetic construct
  source 1..9: note = Seed: VVGARGVGK (KRAS G12R)
YVGVRGVGE

SEQ ID NO: 49481 - protein, 9 aa, synthetic construct
  source 1..9: note = Seed: VVGARGVGK (KRAS G12R)
YVGVRGVGF

SEQ ID NO: 49482 - protein, 9 aa, synthetic construct
  source 1..9: note = Seed: VVGARGVGK (KRAS G12R)
YVGVRGVGG

SEQ ID NO: 49483 - protein, 9 aa, synthetic construct
  source 1..9: note = Seed: VVGARGVGK (KRAS G12R)
YVGVRGVGH

SEQ ID NO: 49484 - protein, 9 aa, synthetic construct
  source 1..9: note = Seed: VVGARGVGK (KRAS G12R)
YVGVRGVGI

SEQ ID NO: 49485 - protein, 9 aa, synthetic construct
  source 1..9: note = Seed: VVGARGVGK (KRAS G12R)
YVGVRGVGK

SEQ ID NO: 49486 - protein, 9 aa, synthetic construct
  source 1..9: note = Seed: VVGARGVGK (KRAS G12R)
YVGVRGVGL

SEQ ID NO: 49487 - protein, 9 aa, synthetic construct
  source 1..9: note = Seed: VVGARGVGK (KRAS G12R)
YVGVRGVGM

SEQ ID NO: 49488 - protein, 9 aa, synthetic construct
  source 1..9: note = Seed: VVGARGVGK (KRAS G12R)
YVGVRGVGN

SEQ ID NO: 49489 - protein, 9 aa, synthetic construct
  source 1..9: note = Seed: VVGARGVGK (KRAS G12R)
YVGVRGVGP

SEQ ID NO: 49490 - protein, 9 aa, synthetic construct
  source 1..9: note = Seed: VVGARGVGK (KRAS G12R)
YVGVRGVGQ

SEQ ID NO: 49491 - protein, 9 aa, synthetic construct
  source 1..9: note = Seed: VVGARGVGK (KRAS G12R)
YVGVRGVGR

SEQ ID NO: 49492 - protein, 9 aa, synthetic construct
  source 1..9: note = Seed: VVGARGVGK (KRAS G12R)
YVGVRGVGS

SEQ ID NO: 49493 - protein, 9 aa, synthetic construct
  source 1..9: note = Seed: VVGARGVGK (KRAS G12R)
YVGVRGVGT

SEQ ID NO: 49494 - protein, 9 aa, synthetic construct
  source 1..9: note = Seed: VVGARGVGK (KRAS G12R)
YVGVRGVGV

SEQ ID NO: 49495 - protein, 9 aa, synthetic construct
  source 1..9: note = Seed: VVGARGVGK (KRAS G12R)
YVGVRGVGY

SEQ ID NO: 49496 - protein, 9 aa, synthetic construct
  source 1..9: note = Seed: VVGARGVGK (KRAS G12R)
YVGVRHVGA

SEQ ID NO: 49497 - protein, 9 aa, synthetic construct
  source 1..9: note = Seed: VVGARGVGK (KRAS G12R)
YVGVRHVGI

SEQ ID NO: 49498 - protein, 9 aa, synthetic construct
  source 1..9: note = Seed: VVGARGVGK (KRAS G12R)
YVGVRHVGL

SEQ ID NO: 49499 - protein, 9 aa, synthetic construct
  source 1..9: note = Seed: VVGARGVGK (KRAS G12R)
YVGVRHVGM

SEQ ID NO: 49500 - protein, 9 aa, synthetic construct
  source 1..9: note = Seed: VVGARGVGK (KRAS G12R)
YVGVRHVGN

SEQ ID NO: 49501 - protein, 9 aa, synthetic construct
  source 1..9: note = Seed: VVGARGVGK (KRAS G12R)
YVGVRHVGS

SEQ ID NO: 49502 - protein, 9 aa, synthetic construct
  source 1..9: note = Seed: VVGARGVGK (KRAS G12R)
YVGVRHVGT

SEQ ID NO: 49503 - protein, 9 aa, synthetic construct
  source 1..9: note = Seed: VVGARGVGK (KRAS G12R)
YVGVRHVGV

SEQ ID NO: 49504 - protein, 9 aa, synthetic construct
  source 1..9: note = Seed: VVGARGVGK (KRAS G12R)
YVGVRIVGA

SEQ ID NO: 49505 - protein, 9 aa, synthetic construct
  source 1..9: note = Seed: VVGARGVGK (KRAS G12R)
YVGVRIVGG

SEQ ID NO: 49506 - protein, 9 aa, synthetic construct
  source 1..9: note = Seed: VVGARGVGK (KRAS G12R)
YVGVRIVGH

SEQ ID NO: 49507 - protein, 9 aa, synthetic construct
  source 1..9: note = Seed: VVGARGVGK (KRAS G12R)
YVGVRIVGI

SEQ ID NO: 49508 - protein, 9 aa, synthetic construct
  source 1..9: note = Seed: VVGARGVGK (KRAS G12R)
YVGVRIVGL

SEQ ID NO: 49509 - protein, 9 aa, synthetic construct
  source 1..9: note = Seed: VVGARGVGK (KRAS G12R)
YVGVRIVGM

SEQ ID NO: 49510 - protein, 9 aa, synthetic construct
  source 1..9: note = Seed: VVGARGVGK (KRAS G12R)
YVGVRIVGN

SEQ ID NO: 49511 - protein, 9 aa, synthetic construct
  source 1..9: note = Seed: VVGARGVGK (KRAS G12R)
YVGVRIVGP

SEQ ID NO: 49512 - protein, 9 aa, synthetic construct
  source 1..9: note = Seed: VVGARGVGK (KRAS G12R)
YVGVRIVGQ

SEQ ID NO: 49513 - protein, 9 aa, synthetic construct
  source 1..9: note = Seed: VVGARGVGK (KRAS G12R)
YVGVRIVGR

SEQ ID NO: 49514 - protein, 9 aa, synthetic construct
  source 1..9: note = Seed: VVGARGVGK (KRAS G12R)
YVGVRIVGS

SEQ ID NO: 49515 - protein, 9 aa, synthetic construct
  source 1..9: note = Seed: VVGARGVGK (KRAS G12R)
YVGVRIVGT

SEQ ID NO: 49516 - protein, 9 aa, synthetic construct
  source 1..9: note = Seed: VVGARGVGK (KRAS G12R)
YVGVRIVGV

SEQ ID NO: 49517 - protein, 9 aa, synthetic construct
  source 1..9: note = Seed: VVGARGVGK (KRAS G12R)
YVGVRKVGI

SEQ ID NO: 49518 - protein, 9 aa, synthetic construct
  source 1..9: note = Seed: VVGARGVGK (KRAS G12R)
YVGVRKVGL

SEQ ID NO: 49519 - protein, 9 aa, synthetic construct
  source 1..9: note = Seed: VVGARGVGK (KRAS G12R)
YVGVRKVGM

SEQ ID NO: 49520 - protein, 9 aa, synthetic construct
  source 1..9: note = Seed: VVGARGVGK (KRAS G12R)
YVGVRKVGV

SEQ ID NO: 49521 - protein, 9 aa, synthetic construct
  source 1..9: note = Seed: VVGARGVGK (KRAS G12R)
YVGVRLVGA

SEQ ID NO: 49522 - protein, 9 aa, synthetic construct
  source 1..9: note = Seed: VVGARGVGK (KRAS G12R)
YVGVRLVGN

SEQ ID NO: 49523 - protein, 9 aa, synthetic construct
  source 1..9: note = Seed: VVGARGVGK (KRAS G12R)
YVGVRLVGS

SEQ ID NO: 49524 - protein, 9 aa, synthetic construct
  source 1..9: note = Seed: VVGARGVGK (KRAS G12R)
YVGVRLVGT

SEQ ID NO: 49525 - protein, 9 aa, synthetic construct
  source 1..9: note = Seed: VVGARGVGK (KRAS G12R)
YVGVRLVGV

SEQ ID NO: 49526 - protein, 9 aa, synthetic construct
  source 1..9: note = Seed: VVGARGVGK (KRAS G12R)
YVGVRMVGA

SEQ ID NO: 49527 - protein, 9 aa, synthetic construct
  source 1..9: note = Seed: VVGARGVGK (KRAS G12R)
YVGVRMVGH

SEQ ID NO: 49528 - protein, 9 aa, synthetic construct
  source 1..9: note = Seed: VVGARGVGK (KRAS G12R)
YVGVRMVGI

SEQ ID NO: 49529 - protein, 9 aa, synthetic construct
  source 1..9: note = Seed: VVGARGVGK (KRAS G12R)
YVGVRMVGL

SEQ ID NO: 49530 - protein, 9 aa, synthetic construct
  source 1..9: note = Seed: VVGARGVGK (KRAS G12R)
YVGVRMVGM

SEQ ID NO: 49531 - protein, 9 aa, synthetic construct
  source 1..9: note = Seed: VVGARGVGK (KRAS G12R)
YVGVRMVGN

SEQ ID NO: 49532 - protein, 9 aa, synthetic construct
  source 1..9: note = Seed: VVGARGVGK (KRAS G12R)
YVGVRMVGS

SEQ ID NO: 49533 - protein, 9 aa, synthetic construct
  source 1..9: note = Seed: VVGARGVGK (KRAS G12R)
YVGVRMVGT

SEQ ID NO: 49534 - protein, 9 aa, synthetic construct
  source 1..9: note = Seed: VVGARGVGK (KRAS G12R)
YVGVRMVGV

SEQ ID NO: 49535 - protein, 9 aa, synthetic construct
  source 1..9: note = Seed: VVGARGVGK (KRAS G12R)
YVGVRNVGA

SEQ ID NO: 49536 - protein, 9 aa, synthetic construct
  source 1..9: note = Seed: VVGARGVGK (KRAS G12R)
YVGVRNVGC

SEQ ID NO: 49537 - protein, 9 aa, synthetic construct
  source 1..9: note = Seed: VVGARGVGK (KRAS G12R)
YVGVRNVGF

SEQ ID NO: 49538 - protein, 9 aa, synthetic construct
  source 1..9: note = Seed: VVGARGVGK (KRAS G12R)
YVGVRNVGG

SEQ ID NO: 49539 - protein, 9 aa, synthetic construct
  source 1..9: note = Seed: VVGARGVGK (KRAS G12R)
YVGVRNVGH

SEQ ID NO: 49540 - protein, 9 aa, synthetic construct
  source 1..9: note = Seed: VVGARGVGK (KRAS G12R)
YVGVRNVGI

SEQ ID NO: 49541 - protein, 9 aa, synthetic construct
  source 1..9: note = Seed: VVGARGVGK (KRAS G12R)
YVGVRNVGL

SEQ ID NO: 49542 - protein, 9 aa, synthetic construct
  source 1..9: note = Seed: VVGARGVGK (KRAS G12R)
YVGVRNVGM

SEQ ID NO: 49543 - protein, 9 aa, synthetic construct
  source 1..9: note = Seed: VVGARGVGK (KRAS G12R)
YVGVRNVGN

SEQ ID NO: 49544 - protein, 9 aa, synthetic construct
  source 1..9: note = Seed: VVGARGVGK (KRAS G12R)
YVGVRNVGQ

SEQ ID NO: 49545 - protein, 9 aa, synthetic construct
  source 1..9: note = Seed: VVGARGVGK (KRAS G12R)
YVGVRNVGR

SEQ ID NO: 49546 - protein, 9 aa, synthetic construct
  source 1..9: note = Seed: VVGARGVGK (KRAS G12R)
YVGVRNVGS

SEQ ID NO: 49547 - protein, 9 aa, synthetic construct
  source 1..9: note = Seed: VVGARGVGK (KRAS G12R)
YVGVRNVGT

SEQ ID NO: 49548 - protein, 9 aa, synthetic construct
  source 1..9: note = Seed: VVGARGVGK (KRAS G12R)
YVGVRNVGV

SEQ ID NO: 49549 - protein, 9 aa, synthetic construct
  source 1..9: note = Seed: VVGARGVGK (KRAS G12R)
YVGVRNVGY

SEQ ID NO: 49550 - protein, 9 aa, synthetic construct
  source 1..9: note = Seed: VVGARGVGK (KRAS G12R)
YVGVRPVGA

SEQ ID NO: 49551 - protein, 9 aa, synthetic construct
  source 1..9: note = Seed: VVGARGVGK (KRAS G12R)
YVGVRPVGC

SEQ ID NO: 49552 - protein, 9 aa, synthetic construct
  source 1..9: note = Seed: VVGARGVGK (KRAS G12R)
YVGVRPVGD

SEQ ID NO: 49553 - protein, 9 aa, synthetic construct
  source 1..9: note = Seed: VVGARGVGK (KRAS G12R)
YVGVRPVGE

SEQ ID NO: 49554 - protein, 9 aa, synthetic construct
  source 1..9: note = Seed: VVGARGVGK (KRAS G12R)
YVGVRPVGF

SEQ ID NO: 49555 - protein, 9 aa, synthetic construct
  source 1..9: note = Seed: VVGARGVGK (KRAS G12R)
YVGVRPVGG

SEQ ID NO: 49556 - protein, 9 aa, synthetic construct
  source 1..9: note = Seed: VVGARGVGK (KRAS G12R)
YVGVRPVGH

SEQ ID NO: 49557 - protein, 9 aa, synthetic construct
  source 1..9: note = Seed: VVGARGVGK (KRAS G12R)
YVGVRPVGI

SEQ ID NO: 49558 - protein, 9 aa, synthetic construct
  source 1..9: note = Seed: VVGARGVGK (KRAS G12R)
YVGVRPVGK

SEQ ID NO: 49559 - protein, 9 aa, synthetic construct
  source 1..9: note = Seed: VVGARGVGK (KRAS G12R)
YVGVRPVGL

SEQ ID NO: 49560 - protein, 9 aa, synthetic construct
  source 1..9: note = Seed: VVGARGVGK (KRAS G12R)
YVGVRPVGM

SEQ ID NO: 49561 - protein, 9 aa, synthetic construct
  source 1..9: note = Seed: VVGARGVGK (KRAS G12R)
YVGVRPVGN

SEQ ID NO: 49562 - protein, 9 aa, synthetic construct
  source 1..9: note = Seed: VVGARGVGK (KRAS G12R)
YVGVRPVGP

SEQ ID NO: 49563 - protein, 9 aa, synthetic construct
  source 1..9: note = Seed: VVGARGVGK (KRAS G12R)
YVGVRPVGQ

SEQ ID NO: 49564 - protein, 9 aa, synthetic construct
  source 1..9: note = Seed: VVGARGVGK (KRAS G12R)
YVGVRPVGR

SEQ ID NO: 49565 - protein, 9 aa, synthetic construct
  source 1..9: note = Seed: VVGARGVGK (KRAS G12R)
YVGVRPVGS

SEQ ID NO: 49566 - protein, 9 aa, synthetic construct
  source 1..9: note = Seed: VVGARGVGK (KRAS G12R)
YVGVRPVGT

SEQ ID NO: 49567 - protein, 9 aa, synthetic construct
  source 1..9: note = Seed: VVGARGVGK (KRAS G12R)
YVGVRPVGV

SEQ ID NO: 49568 - protein, 9 aa, synthetic construct
  source 1..9: note = Seed: VVGARGVGK (KRAS G12R)
YVGVRPVGW

SEQ ID NO: 49569 - protein, 9 aa, synthetic construct
  source 1..9: note = Seed: VVGARGVGK (KRAS G12R)
YVGVRPVGY

SEQ ID NO: 49570 - protein, 9 aa, synthetic construct
  source 1..9: note = Seed: VVGARGVGK (KRAS G12R)
YVGVRQVGA

SEQ ID NO: 49571 - protein, 9 aa, synthetic construct
  source 1..9: note = Seed: VVGARGVGK (KRAS G12R)
YVGVRQVGI

SEQ ID NO: 49572 - protein, 9 aa, synthetic construct
  source 1..9: note = Seed: VVGARGVGK (KRAS G12R)
YVGVRQVGL

SEQ ID NO: 49573 - protein, 9 aa, synthetic construct
  source 1..9: note = Seed: VVGARGVGK (KRAS G12R)
YVGVRQVGM

SEQ ID NO: 49574 - protein, 9 aa, synthetic construct
  source 1..9: note = Seed: VVGARGVGK (KRAS G12R)
YVGVRQVGN

SEQ ID NO: 49575 - protein, 9 aa, synthetic construct
  source 1..9: note = Seed: VVGARGVGK (KRAS G12R)
YVGVRQVGS

SEQ ID NO: 49576 - protein, 9 aa, synthetic construct
  source 1..9: note = Seed: VVGARGVGK (KRAS G12R)
YVGVRQVGT

SEQ ID NO: 49577 - protein, 9 aa, synthetic construct
  source 1..9: note = Seed: VVGARGVGK (KRAS G12R)
YVGVRQVGV

SEQ ID NO: 49578 - protein, 9 aa, synthetic construct
  source 1..9: note = Seed: VVGARGVGK (KRAS G12R)
YVGVRRVGI

SEQ ID NO: 49579 - protein, 9 aa, synthetic construct
  source 1..9: note = Seed: VVGARGVGK (KRAS G12R)
YVGVRRVGL

SEQ ID NO: 49580 - protein, 9 aa, synthetic construct
  source 1..9: note = Seed: VVGARGVGK (KRAS G12R)
YVGVRRVGM

SEQ ID NO: 49581 - protein, 9 aa, synthetic construct
  source 1..9: note = Seed: VVGARGVGK (KRAS G12R)
YVGVRRVGV

SEQ ID NO: 49582 - protein, 9 aa, synthetic construct
  source 1..9: note = Seed: VVGARGVGK (KRAS G12R)
YVGVRRVGY

SEQ ID NO: 49583 - protein, 9 aa, synthetic construct
  source 1..9: note = Seed: VVGARGVGK (KRAS G12R)
YVGVRSVGA

SEQ ID NO: 49584 - protein, 9 aa, synthetic construct
  source 1..9: note = Seed: VVGARGVGK (KRAS G12R)
YVGVRSVGC

SEQ ID NO: 49585 - protein, 9 aa, synthetic construct
  source 1..9: note = Seed: VVGARGVGK (KRAS G12R)
YVGVRSVGD

SEQ ID NO: 49586 - protein, 9 aa, synthetic construct
  source 1..9: note = Seed: VVGARGVGK (KRAS G12R)
YVGVRSVGE

SEQ ID NO: 49587 - protein, 9 aa, synthetic construct
  source 1..9: note = Seed: VVGARGVGK (KRAS G12R)
YVGVRSVGF

SEQ ID NO: 49588 - protein, 9 aa, synthetic construct
  source 1..9: note = Seed: VVGARGVGK (KRAS G12R)
YVGVRSVGG

SEQ ID NO: 49589 - protein, 9 aa, synthetic construct
  source 1..9: note = Seed: VVGARGVGK (KRAS G12R)
YVGVRSVGH

SEQ ID NO: 49590 - protein, 9 aa, synthetic construct
  source 1..9: note = Seed: VVGARGVGK (KRAS G12R)
YVGVRSVGI

SEQ ID NO: 49591 - protein, 9 aa, synthetic construct
  source 1..9: note = Seed: VVGARGVGK (KRAS G12R)
YVGVRSVGK

SEQ ID NO: 49592 - protein, 9 aa, synthetic construct
  source 1..9: note = Seed: VVGARGVGK (KRAS G12R)
YVGVRSVGL

SEQ ID NO: 49593 - protein, 9 aa, synthetic construct
  source 1..9: note = Seed: VVGARGVGK (KRAS G12R)
YVGVRSVGM

SEQ ID NO: 49594 - protein, 9 aa, synthetic construct
  source 1..9: note = Seed: VVGARGVGK (KRAS G12R)
YVGVRSVGN

SEQ ID NO: 49595 - protein, 9 aa, synthetic construct
  source 1..9: note = Seed: VVGARGVGK (KRAS G12R)
YVGVRSVGP

SEQ ID NO: 49596 - protein, 9 aa, synthetic construct
  source 1..9: note = Seed: VVGARGVGK (KRAS G12R)
YVGVRSVGQ

SEQ ID NO: 49597 - protein, 9 aa, synthetic construct
  source 1..9: note = Seed: VVGARGVGK (KRAS G12R)
YVGVRSVGR

SEQ ID NO: 49598 - protein, 9 aa, synthetic construct
  source 1..9: note = Seed: VVGARGVGK (KRAS G12R)
YVGVRSVGS

SEQ ID NO: 49599 - protein, 9 aa, synthetic construct
  source 1..9: note = Seed: VVGARGVGK (KRAS G12R)
YVGVRSVGT

SEQ ID NO: 49600 - protein, 9 aa, synthetic construct
  source 1..9: note = Seed: VVGARGVGK (KRAS G12R)
YVGVRSVGV

SEQ ID NO: 49601 - protein, 9 aa, synthetic construct
  source 1..9: note = Seed: VVGARGVGK (KRAS G12R)
YVGVRSVGW

SEQ ID NO: 49602 - protein, 9 aa, synthetic construct
  source 1..9: note = Seed: VVGARGVGK (KRAS G12R)
YVGVRSVGY

SEQ ID NO: 49603 - protein, 9 aa, synthetic construct
  source 1..9: note = Seed: VVGARGVGK (KRAS G12R)
YVGVRTVGA

SEQ ID NO: 49604 - protein, 9 aa, synthetic construct
  source 1..9: note = Seed: VVGARGVGK (KRAS G12R)
YVGVRTVGC

SEQ ID NO: 49605 - protein, 9 aa, synthetic construct
  source 1..9: note = Seed: VVGARGVGK (KRAS G12R)
YVGVRTVGD

SEQ ID NO: 49606 - protein, 9 aa, synthetic construct
  source 1..9: note = Seed: VVGARGVGK (KRAS G12R)
YVGVRTVGE

SEQ ID NO: 49607 - protein, 9 aa, synthetic construct
  source 1..9: note = Seed: VVGARGVGK (KRAS G12R)
YVGVRTVGF

SEQ ID NO: 49608 - protein, 9 aa, synthetic construct
  source 1..9: note = Seed: VVGARGVGK (KRAS G12R)
YVGVRTVGG

SEQ ID NO: 49609 - protein, 9 aa, synthetic construct
  source 1..9: note = Seed: VVGARGVGK (KRAS G12R)
YVGVRTVGH

SEQ ID NO: 49610 - protein, 9 aa, synthetic construct
  source 1..9: note = Seed: VVGARGVGK (KRAS G12R)
YVGVRTVGI

SEQ ID NO: 49611 - protein, 9 aa, synthetic construct
  source 1..9: note = Seed: VVGARGVGK (KRAS G12R)
YVGVRTVGK

SEQ ID NO: 49612 - protein, 9 aa, synthetic construct
  source 1..9: note = Seed: VVGARGVGK (KRAS G12R)
YVGVRTVGL

SEQ ID NO: 49613 - protein, 9 aa, synthetic construct
  source 1..9: note = Seed: VVGARGVGK (KRAS G12R)
YVGVRTVGM

SEQ ID NO: 49614 - protein, 9 aa, synthetic construct
  source 1..9: note = Seed: VVGARGVGK (KRAS G12R)
YVGVRTVGN

SEQ ID NO: 49615 - protein, 9 aa, synthetic construct
  source 1..9: note = Seed: VVGARGVGK (KRAS G12R)
YVGVRTVGP

SEQ ID NO: 49616 - protein, 9 aa, synthetic construct
  source 1..9: note = Seed: VVGARGVGK (KRAS G12R)
YVGVRTVGQ

SEQ ID NO: 49617 - protein, 9 aa, synthetic construct
  source 1..9: note = Seed: VVGARGVGK (KRAS G12R)
YVGVRTVGR

SEQ ID NO: 49618 - protein, 9 aa, synthetic construct
  source 1..9: note = Seed: VVGARGVGK (KRAS G12R)
YVGVRTVGS

SEQ ID NO: 49619 - protein, 9 aa, synthetic construct
  source 1..9: note = Seed: VVGARGVGK (KRAS G12R)
YVGVRTVGT

SEQ ID NO: 49620 - protein, 9 aa, synthetic construct
  source 1..9: note = Seed: VVGARGVGK (KRAS G12R)
YVGVRTVGV

SEQ ID NO: 49621 - protein, 9 aa, synthetic construct
  source 1..9: note = Seed: VVGARGVGK (KRAS G12R)
YVGVRTVGY

SEQ ID NO: 49622 - protein, 9 aa, synthetic construct
  source 1..9: note = Seed: VVGARGVGK (KRAS G12R)
YVGVRVVGA

SEQ ID NO: 49623 - protein, 9 aa, synthetic construct
  source 1..9: note = Seed: VVGARGVGK (KRAS G12R)
YVGVRVVGD

SEQ ID NO: 49624 - protein, 9 aa, synthetic construct
  source 1..9: note = Seed: VVGARGVGK (KRAS G12R)
YVGVRVVGE

SEQ ID NO: 49625 - protein, 9 aa, synthetic construct
  source 1..9: note = Seed: VVGARGVGK (KRAS G12R)
YVGVRVVGG

SEQ ID NO: 49626 - protein, 9 aa, synthetic construct
  source 1..9: note = Seed: VVGARGVGK (KRAS G12R)
YVGVRVVGH

SEQ ID NO: 49627 - protein, 9 aa, synthetic construct
  source 1..9: note = Seed: VVGARGVGK (KRAS G12R)
YVGVRVVGI

SEQ ID NO: 49628 - protein, 9 aa, synthetic construct
  source 1..9: note = Seed: VVGARGVGK (KRAS G12R)
YVGVRVVGK

SEQ ID NO: 49629 - protein, 9 aa, synthetic construct
  source 1..9: note = Seed: VVGARGVGK (KRAS G12R)
YVGVRVVGL

SEQ ID NO: 49630 - protein, 9 aa, synthetic construct
  source 1..9: note = Seed: VVGARGVGK (KRAS G12R)
YVGVRVVGM

SEQ ID NO: 49631 - protein, 9 aa, synthetic construct
  source 1..9: note = Seed: VVGARGVGK (KRAS G12R)
YVGVRVVGN

SEQ ID NO: 49632 - protein, 9 aa, synthetic construct
  source 1..9: note = Seed: VVGARGVGK (KRAS G12R)
YVGVRVVGP

SEQ ID NO: 49633 - protein, 9 aa, synthetic construct
  source 1..9: note = Seed: VVGARGVGK (KRAS G12R)
YVGVRVVGQ

SEQ ID NO: 49634 - protein, 9 aa, synthetic construct
  source 1..9: note = Seed: VVGARGVGK (KRAS G12R)
YVGVRVVGR

SEQ ID NO: 49635 - protein, 9 aa, synthetic construct
  source 1..9: note = Seed: VVGARGVGK (KRAS G12R)
YVGVRVVGS

SEQ ID NO: 49636 - protein, 9 aa, synthetic construct
  source 1..9: note = Seed: VVGARGVGK (KRAS G12R)
YVGVRVVGT

SEQ ID NO: 49637 - protein, 9 aa, synthetic construct
  source 1..9: note = Seed: VVGARGVGK (KRAS G12R)
YVGVRVVGV

SEQ ID NO: 49638 - protein, 9 aa, synthetic construct
  source 1..9: note = Seed: VVGARGVGK (KRAS G12R)
YVGVRVVGY

SEQ ID NO: 49639 - protein, 9 aa, synthetic construct
  source 1..9: note = Seed: VVGARGVGK (KRAS G12R)
YVGWRAVGA

SEQ ID NO: 49640 - protein, 9 aa, synthetic construct
  source 1..9: note = Seed: VVGARGVGK (KRAS G12R)
YVGWRAVGF

SEQ ID NO: 49641 - protein, 9 aa, synthetic construct
  source 1..9: note = Seed: VVGARGVGK (KRAS G12R)
YVGWRAVGG

SEQ ID NO: 49642 - protein, 9 aa, synthetic construct
  source 1..9: note = Seed: VVGARGVGK (KRAS G12R)
YVGWRAVGH

SEQ ID NO: 49643 - protein, 9 aa, synthetic construct
  source 1..9: note = Seed: VVGARGVGK (KRAS G12R)
YVGWRAVGI

SEQ ID NO: 49644 - protein, 9 aa, synthetic construct
  source 1..9: note = Seed: VVGARGVGK (KRAS G12R)
YVGWRAVGL

SEQ ID NO: 49645 - protein, 9 aa, synthetic construct
  source 1..9: note = Seed: VVGARGVGK (KRAS G12R)
YVGWRAVGM

SEQ ID NO: 49646 - protein, 9 aa, synthetic construct
  source 1..9: note = Seed: VVGARGVGK (KRAS G12R)
YVGWRAVGN

SEQ ID NO: 49647 - protein, 9 aa, synthetic construct
  source 1..9: note = Seed: VVGARGVGK (KRAS G12R)
YVGWRAVGR

SEQ ID NO: 49648 - protein, 9 aa, synthetic construct
  source 1..9: note = Seed: VVGARGVGK (KRAS G12R)
YVGWRAVGS

SEQ ID NO: 49649 - protein, 9 aa, synthetic construct
  source 1..9: note = Seed: VVGARGVGK (KRAS G12R)
YVGWRAVGV

SEQ ID NO: 49650 - protein, 9 aa, synthetic construct
  source 1..9: note = Seed: VVGARGVGK (KRAS G12R)
YVGWRAVGY

SEQ ID NO: 49651 - protein, 9 aa, synthetic construct
  source 1..9: note = Seed: VVGARGVGK (KRAS G12R)
YVGWRGVGI

SEQ ID NO: 49652 - protein, 9 aa, synthetic construct
  source 1..9: note = Seed: VVGARGVGK (KRAS G12R)
YVGWRGVGL

SEQ ID NO: 49653 - protein, 9 aa, synthetic construct
  source 1..9: note = Seed: VVGARGVGK (KRAS G12R)
YVGWRGVGM

SEQ ID NO: 49654 - protein, 9 aa, synthetic construct
  source 1..9: note = Seed: VVGARGVGK (KRAS G12R)
YVGWRGVGS

SEQ ID NO: 49655 - protein, 9 aa, synthetic construct
  source 1..9: note = Seed: VVGARGVGK (KRAS G12R)
YVGWRGVGT

SEQ ID NO: 49656 - protein, 9 aa, synthetic construct
  source 1..9: note = Seed: VVGARGVGK (KRAS G12R)
YVGWRGVGV

SEQ ID NO: 49657 - protein, 9 aa, synthetic construct
  source 1..9: note = Seed: VVGARGVGK (KRAS G12R)
YVGWRKVGR

SEQ ID NO: 49658 - protein, 9 aa, synthetic construct
  source 1..9: note = Seed: VVGARGVGK (KRAS G12R)
YVGWRNVGI

SEQ ID NO: 49659 - protein, 9 aa, synthetic construct
  source 1..9: note = Seed: VVGARGVGK (KRAS G12R)
YVGWRNVGL

SEQ ID NO: 49660 - protein, 9 aa, synthetic construct
  source 1..9: note = Seed: VVGARGVGK (KRAS G12R)
YVGWRNVGV

SEQ ID NO: 49661 - protein, 9 aa, synthetic construct
  source 1..9: note = Seed: VVGARGVGK (KRAS G12R)
YVGWRPVGA

SEQ ID NO: 49662 - protein, 9 aa, synthetic construct
  source 1..9: note = Seed: VVGARGVGK (KRAS G12R)
YVGWRPVGI

SEQ ID NO: 49663 - protein, 9 aa, synthetic construct
  source 1..9: note = Seed: VVGARGVGK (KRAS G12R)
YVGWRPVGL

SEQ ID NO: 49664 - protein, 9 aa, synthetic construct
  source 1..9: note = Seed: VVGARGVGK (KRAS G12R)
YVGWRPVGM

SEQ ID NO: 49665 - protein, 9 aa, synthetic construct
  source 1..9: note = Seed: VVGARGVGK (KRAS G12R)
YVGWRPVGN

SEQ ID NO: 49666 - protein, 9 aa, synthetic construct
  source 1..9: note = Seed: VVGARGVGK (KRAS G12R)
YVGWRPVGS

SEQ ID NO: 49667 - protein, 9 aa, synthetic construct
  source 1..9: note = Seed: VVGARGVGK (KRAS G12R)
YVGWRPVGV

SEQ ID NO: 49668 - protein, 9 aa, synthetic construct
  source 1..9: note = Seed: VVGARGVGK (KRAS G12R)
YVGWRRVGK

SEQ ID NO: 49669 - protein, 9 aa, synthetic construct
  source 1..9: note = Seed: VVGARGVGK (KRAS G12R)
YVGWRRVGR

SEQ ID NO: 49670 - protein, 9 aa, synthetic construct
  source 1..9: note = Seed: VVGARGVGK (KRAS G12R)
YVGWRSVGF

SEQ ID NO: 49671 - protein, 9 aa, synthetic construct
  source 1..9: note = Seed: VVGARGVGK (KRAS G12R)
YVGWRSVGI

SEQ ID NO: 49672 - protein, 9 aa, synthetic construct
  source 1..9: note = Seed: VVGARGVGK (KRAS G12R)
YVGWRSVGL

SEQ ID NO: 49673 - protein, 9 aa, synthetic construct
  source 1..9: note = Seed: VVGARGVGK (KRAS G12R)
YVGWRSVGM

SEQ ID NO: 49674 - protein, 9 aa, synthetic construct
  source 1..9: note = Seed: VVGARGVGK (KRAS G12R)
YVGWRSVGS

SEQ ID NO: 49675 - protein, 9 aa, synthetic construct
  source 1..9: note = Seed: VVGARGVGK (KRAS G12R)
YVGWRSVGV

SEQ ID NO: 49676 - protein, 9 aa, synthetic construct
  source 1..9: note = Seed: VVGARGVGK (KRAS G12R)
YVGWRTVGA

SEQ ID NO: 49677 - protein, 9 aa, synthetic construct
  source 1..9: note = Seed: VVGARGVGK (KRAS G12R)
YVGWRTVGI

SEQ ID NO: 49678 - protein, 9 aa, synthetic construct
  source 1..9: note = Seed: VVGARGVGK (KRAS G12R)
YVGWRTVGL

SEQ ID NO: 49679 - protein, 9 aa, synthetic construct
  source 1..9: note = Seed: VVGARGVGK (KRAS G12R)
YVGWRTVGM

SEQ ID NO: 49680 - protein, 9 aa, synthetic construct
  source 1..9: note = Seed: VVGARGVGK (KRAS G12R)
YVGWRTVGN

SEQ ID NO: 49681 - protein, 9 aa, synthetic construct
  source 1..9: note = Seed: VVGARGVGK (KRAS G12R)
YVGWRTVGS

SEQ ID NO: 49682 - protein, 9 aa, synthetic construct
  source 1..9: note = Seed: VVGARGVGK (KRAS G12R)
YVGWRTVGV

SEQ ID NO: 49683 - protein, 9 aa, synthetic construct
  source 1..9: note = Seed: VVGARGVGK (KRAS G12R)
YVGWRVVGI

SEQ ID NO: 49684 - protein, 9 aa, synthetic construct
  source 1..9: note = Seed: VVGARGVGK (KRAS G12R)
YVGWRVVGL

SEQ ID NO: 49685 - protein, 9 aa, synthetic construct
  source 1..9: note = Seed: VVGARGVGK (KRAS G12R)
YVGWRVVGM

SEQ ID NO: 49686 - protein, 9 aa, synthetic construct
  source 1..9: note = Seed: VVGARGVGK (KRAS G12R)
YVGWRVVGR

SEQ ID NO: 49687 - protein, 9 aa, synthetic construct
  source 1..9: note = Seed: VVGARGVGK (KRAS G12R)
YVGYRAVGC

SEQ ID NO: 49688 - protein, 9 aa, synthetic construct
  source 1..9: note = Seed: VVGARGVGK (KRAS G12R)
YVGYRAVGF

SEQ ID NO: 49689 - protein, 9 aa, synthetic construct
  source 1..9: note = Seed: VVGARGVGK (KRAS G12R)
YVGYRAVGI

SEQ ID NO: 49690 - protein, 9 aa, synthetic construct
  source 1..9: note = Seed: VVGARGVGK (KRAS G12R)
YVGYRAVGL

SEQ ID NO: 49691 - protein, 9 aa, synthetic construct
  source 1..9: note = Seed: VVGARGVGK (KRAS G12R)
YVGYRAVGM

SEQ ID NO: 49692 - protein, 9 aa, synthetic construct
  source 1..9: note = Seed: VVGARGVGK (KRAS G12R)
YVGYRGVGI

SEQ ID NO: 49693 - protein, 9 aa, synthetic construct
  source 1..9: note = Seed: VVGARGVGK (KRAS G12R)
YVGYRGVGL

SEQ ID NO: 49694 - protein, 9 aa, synthetic construct
  source 1..9: note = Seed: VVGARGVGK (KRAS G12R)
YVGYRGVGM

SEQ ID NO: 49695 - protein, 9 aa, synthetic construct
  source 1..9: note = Seed: VVGARGVGK (KRAS G12R)
YVGYRGVGV

SEQ ID NO: 49696 - protein, 9 aa, synthetic construct
  source 1..9: note = Seed: VVGARGVGK (KRAS G12R)
YVGYRKVGL

SEQ ID NO: 49697 - protein, 9 aa, synthetic construct
  source 1..9: note = Seed: VVGARGVGK (KRAS G12R)
YVGYRKVGR

SEQ ID NO: 49698 - protein, 9 aa, synthetic construct
  source 1..9: note = Seed: VVGARGVGK (KRAS G12R)
YVGYRNVGI

SEQ ID NO: 49699 - protein, 9 aa, synthetic construct
  source 1..9: note = Seed: VVGARGVGK (KRAS G12R)
YVGYRPVGI

SEQ ID NO: 49700 - protein, 9 aa, synthetic construct
  source 1..9: note = Seed: VVGARGVGK (KRAS G12R)
YVGYRPVGL

SEQ ID NO: 49701 - protein, 9 aa, synthetic construct
  source 1..9: note = Seed: VVGARGVGK (KRAS G12R)
YVGYRPVGM

SEQ ID NO: 49702 - protein, 9 aa, synthetic construct
  source 1..9: note = Seed: VVGARGVGK (KRAS G12R)
YVGYRRVGR

SEQ ID NO: 49703 - protein, 9 aa, synthetic construct
  source 1..9: note = Seed: VVGARGVGK (KRAS G12R)
YVGYRSVGI

SEQ ID NO: 49704 - protein, 9 aa, synthetic construct
  source 1..9: note = Seed: VVGARGVGK (KRAS G12R)
YVGYRSVGL

SEQ ID NO: 49705 - protein, 9 aa, synthetic construct
  source 1..9: note = Seed: VVGARGVGK (KRAS G12R)
YVGYRSVGM

SEQ ID NO: 49706 - protein, 9 aa, synthetic construct
  source 1..9: note = Seed: VVGARGVGK (KRAS G12R)
YVGYRTVGL

SEQ ID NO: 49707 - protein, 9 aa, Homo sapiens
  source 1..9: note = Native (KRAS G12R)
ARGVGKSAL

SEQ ID NO: 49708 - protein, 9 aa, Homo sapiens
  source 1..9: note = Native (KRAS G12R)
GARGVGKSA

SEQ ID NO: 49709 - protein, 9 aa, Homo sapiens
  source 1..9: note = Native (KRAS G12R)
KLVVVGARG

SEQ ID NO: 49710 - protein, 9 aa, Homo sapiens
  source 1..9: note = Native (KRAS G12R)
LVVVGARGV

SEQ ID NO: 49711 - protein, 9 aa, Homo sapiens
  source 1..9: note = Native (KRAS G12R)
VVGARGVGK

SEQ ID NO: 49712 - protein, 9 aa, synthetic construct
  source 1..9: note = Seed: LVVVGAVGV (KRAS G12V)
FVVAGAVGA

SEQ ID NO: 49713 - protein, 9 aa, synthetic construct
  source 1..9: note = Seed: LVVVGAVGV (KRAS G12V)
FVVAGAVGI

SEQ ID NO: 49714 - protein, 9 aa, synthetic construct
  source 1..9: note = Seed: LVVVGAVGV (KRAS G12V)
FVVAGAVGL

SEQ ID NO: 49715 - protein, 9 aa, synthetic construct
  source 1..9: note = Seed: LVVVGAVGV (KRAS G12V)
FVVAGAVGM

SEQ ID NO: 49716 - protein, 9 aa, synthetic construct
  source 1..9: note = Seed: LVVVGAVGV (KRAS G12V)
FVVAGAVGS

SEQ ID NO: 49717 - protein, 9 aa, synthetic construct
  source 1..9: note = Seed: LVVVGAVGV (KRAS G12V)
FVVAGAVGT

SEQ ID NO: 49718 - protein, 9 aa, synthetic construct
  source 1..9: note = Seed: LVVVGAVGV (KRAS G12V)
FVVAGAVGV

SEQ ID NO: 49719 - protein, 9 aa, synthetic construct
  source 1..9: note = Seed: LVVVGAVGV (KRAS G12V)
FVVAGGVGA

SEQ ID NO: 49720 - protein, 9 aa, synthetic construct
  source 1..9: note = Seed: LVVVGAVGV (KRAS G12V)
FVVAGGVGI

SEQ ID NO: 49721 - protein, 9 aa, synthetic construct
  source 1..9: note = Seed: LVVVGAVGV (KRAS G12V)
FVVAGGVGL

SEQ ID NO: 49722 - protein, 9 aa, synthetic construct
  source 1..9: note = Seed: LVVVGAVGV (KRAS G12V)
FVVAGGVGM

SEQ ID NO: 49723 - protein, 9 aa, synthetic construct
  source 1..9: note = Seed: LVVVGAVGV (KRAS G12V)
FVVAGGVGV

SEQ ID NO: 49724 - protein, 9 aa, synthetic construct
  source 1..9: note = Seed: LVVVGAVGV (KRAS G12V)
FVVAGNVGL

SEQ ID NO: 49725 - protein, 9 aa, synthetic construct
  source 1..9: note = Seed: LVVVGAVGV (KRAS G12V)
FVVAGNVGV

SEQ ID NO: 49726 - protein, 9 aa, synthetic construct
  source 1..9: note = Seed: LVVVGAVGV (KRAS G12V)
FVVAGPVGA

SEQ ID NO: 49727 - protein, 9 aa, synthetic construct
  source 1..9: note = Seed: LVVVGAVGV (KRAS G12V)
FVVAGPVGI

SEQ ID NO: 49728 - protein, 9 aa, synthetic construct
  source 1..9: note = Seed: LVVVGAVGV (KRAS G12V)
FVVAGPVGL

SEQ ID NO: 49729 - protein, 9 aa, synthetic construct
  source 1..9: note = Seed: LVVVGAVGV (KRAS G12V)
FVVAGPVGM

SEQ ID NO: 49730 - protein, 9 aa, synthetic construct
  source 1..9: note = Seed: LVVVGAVGV (KRAS G12V)
FVVAGPVGV

SEQ ID NO: 49731 - protein, 9 aa, synthetic construct
  source 1..9: note = Seed: LVVVGAVGV (KRAS G12V)
FVVAGSVGA

SEQ ID NO: 49732 - protein, 9 aa, synthetic construct
  source 1..9: note = Seed: LVVVGAVGV (KRAS G12V)
FVVAGSVGI

SEQ ID NO: 49733 - protein, 9 aa, synthetic construct
  source 1..9: note = Seed: LVVVGAVGV (KRAS G12V)
FVVAGSVGL

SEQ ID NO: 49734 - protein, 9 aa, synthetic construct
  source 1..9: note = Seed: LVVVGAVGV (KRAS G12V)
FVVAGSVGM

SEQ ID NO: 49735 - protein, 9 aa, synthetic construct
  source 1..9: note = Seed: LVVVGAVGV (KRAS G12V)
FVVAGSVGS

SEQ ID NO: 49736 - protein, 9 aa, synthetic construct
  source 1..9: note = Seed: LVVVGAVGV (KRAS G12V)
FVVAGSVGT

SEQ ID NO: 49737 - protein, 9 aa, synthetic construct
  source 1..9: note = Seed: LVVVGAVGV (KRAS G12V)
FVVAGSVGV

SEQ ID NO: 49738 - protein, 9 aa, synthetic construct
  source 1..9: note = Seed: LVVVGAVGV (KRAS G12V)
FVVGGAVGL

SEQ ID NO: 49739 - protein, 9 aa, synthetic construct
  source 1..9: note = Seed: LVVVGAVGV (KRAS G12V)
FVVIGGVGA

SEQ ID NO: 49740 - protein, 9 aa, synthetic construct
  source 1..9: note = Seed: LVVVGAVGV (KRAS G12V)
FVVIGPVGV

SEQ ID NO: 49741 - protein, 9 aa, synthetic construct
  source 1..9: note = Seed: LVVVGAVGV (KRAS G12V)
FVVLGAVGA

SEQ ID NO: 49742 - protein, 9 aa, synthetic construct
  source 1..9: note = Seed: LVVVGAVGV (KRAS G12V)
FVVLGAVGT

SEQ ID NO: 49743 - protein, 9 aa, synthetic construct
  source 1..9: note = Seed: LVVVGAVGV (KRAS G12V)
FVVLGGVGA

SEQ ID NO: 49744 - protein, 9 aa, synthetic construct
  source 1..9: note = Seed: LVVVGAVGV (KRAS G12V)
FVVLGGVGL

SEQ ID NO: 49745 - protein, 9 aa, synthetic construct
  source 1..9: note = Seed: LVVVGAVGV (KRAS G12V)
FVVLGGVGM

SEQ ID NO: 49746 - protein, 9 aa, synthetic construct
  source 1..9: note = Seed: LVVVGAVGV (KRAS G12V)
FVVLGGVGS

SEQ ID NO: 49747 - protein, 9 aa, synthetic construct
  source 1..9: note = Seed: LVVVGAVGV (KRAS G12V)
FVVLGGVGT

SEQ ID NO: 49748 - protein, 9 aa, synthetic construct
  source 1..9: note = Seed: LVVVGAVGV (KRAS G12V)
FVVLGGVGV

SEQ ID NO: 49749 - protein, 9 aa, synthetic construct
  source 1..9: note = Seed: LVVVGAVGV (KRAS G12V)
FVVLGPVGA

SEQ ID NO: 49750 - protein, 9 aa, synthetic construct
  source 1..9: note = Seed: LVVVGAVGV (KRAS G12V)
FVVLGPVGI

SEQ ID NO: 49751 - protein, 9 aa, synthetic construct
  source 1..9: note = Seed: LVVVGAVGV (KRAS G12V)
FVVLGPVGL

SEQ ID NO: 49752 - protein, 9 aa, synthetic construct
  source 1..9: note = Seed: LVVVGAVGV (KRAS G12V)
FVVLGPVGT

SEQ ID NO: 49753 - protein, 9 aa, synthetic construct
  source 1..9: note = Seed: LVVVGAVGV (KRAS G12V)
FVVLGPVGV

SEQ ID NO: 49754 - protein, 9 aa, synthetic construct
  source 1..9: note = Seed: LVVVGAVGV (KRAS G12V)
FVVLGSVGA

SEQ ID NO: 49755 - protein, 9 aa, synthetic construct
  source 1..9: note = Seed: LVVVGAVGV (KRAS G12V)
FVVLGSVGS

SEQ ID NO: 49756 - protein, 9 aa, synthetic construct
  source 1..9: note = Seed: LVVVGAVGV (KRAS G12V)
FVVLGSVGT

SEQ ID NO: 49757 - protein, 9 aa, synthetic construct
  source 1..9: note = Seed: LVVVGAVGV (KRAS G12V)
FVVLGSVGV

SEQ ID NO: 49758 - protein, 9 aa, synthetic construct
  source 1..9: note = Seed: LVVVGAVGV (KRAS G12V)
FVVMGAVGA

SEQ ID NO: 49759 - protein, 9 aa, synthetic construct
  source 1..9: note = Seed: LVVVGAVGV (KRAS G12V)
FVVMGAVGL

SEQ ID NO: 49760 - protein, 9 aa, synthetic construct
  source 1..9: note = Seed: LVVVGAVGV (KRAS G12V)
FVVMGAVGM

SEQ ID NO: 49761 - protein, 9 aa, synthetic construct
  source 1..9: note = Seed: LVVVGAVGV (KRAS G12V)
FVVMGAVGT

SEQ ID NO: 49762 - protein, 9 aa, synthetic construct
  source 1..9: note = Seed: LVVVGAVGV (KRAS G12V)
FVVMGAVGV

SEQ ID NO: 49763 - protein, 9 aa, synthetic construct
  source 1..9: note = Seed: LVVVGAVGV (KRAS G12V)
FVVMGGVGA

SEQ ID NO: 49764 - protein, 9 aa, synthetic construct
  source 1..9: note = Seed: LVVVGAVGV (KRAS G12V)
FVVMGGVGI

SEQ ID NO: 49765 - protein, 9 aa, synthetic construct
  source 1..9: note = Seed: LVVVGAVGV (KRAS G12V)
FVVMGGVGL

SEQ ID NO: 49766 - protein, 9 aa, synthetic construct
  source 1..9: note = Seed: LVVVGAVGV (KRAS G12V)
FVVMGGVGM

SEQ ID NO: 49767 - protein, 9 aa, synthetic construct
  source 1..9: note = Seed: LVVVGAVGV (KRAS G12V)
FVVMGGVGS

SEQ ID NO: 49768 - protein, 9 aa, synthetic construct
  source 1..9: note = Seed: LVVVGAVGV (KRAS G12V)
FVVMGGVGT

SEQ ID NO: 49769 - protein, 9 aa, synthetic construct
  source 1..9: note = Seed: LVVVGAVGV (KRAS G12V)
FVVMGGVGV

SEQ ID NO: 49770 - protein, 9 aa, synthetic construct
  source 1..9: note = Seed: LVVVGAVGV (KRAS G12V)
FVVMGNVGL

SEQ ID NO: 49771 - protein, 9 aa, synthetic construct
  source 1..9: note = Seed: LVVVGAVGV (KRAS G12V)
FVVMGNVGV

SEQ ID NO: 49772 - protein, 9 aa, synthetic construct
  source 1..9: note = Seed: LVVVGAVGV (KRAS G12V)
FVVMGPVGA

SEQ ID NO: 49773 - protein, 9 aa, synthetic construct
  source 1..9: note = Seed: LVVVGAVGV (KRAS G12V)
FVVMGPVGI

SEQ ID NO: 49774 - protein, 9 aa, synthetic construct
  source 1..9: note = Seed: LVVVGAVGV (KRAS G12V)
FVVMGPVGL

SEQ ID NO: 49775 - protein, 9 aa, synthetic construct
  source 1..9: note = Seed: LVVVGAVGV (KRAS G12V)
FVVMGPVGV

SEQ ID NO: 49776 - protein, 9 aa, synthetic construct
  source 1..9: note = Seed: LVVVGAVGV (KRAS G12V)
FVVMGSVGA

SEQ ID NO: 49777 - protein, 9 aa, synthetic construct
  source 1..9: note = Seed: LVVVGAVGV (KRAS G12V)
FVVMGSVGI

SEQ ID NO: 49778 - protein, 9 aa, synthetic construct
  source 1..9: note = Seed: LVVVGAVGV (KRAS G12V)
FVVMGSVGL

SEQ ID NO: 49779 - protein, 9 aa, synthetic construct
  source 1..9: note = Seed: LVVVGAVGV (KRAS G12V)
FVVMGSVGM

SEQ ID NO: 49780 - protein, 9 aa, synthetic construct
  source 1..9: note = Seed: LVVVGAVGV (KRAS G12V)
FVVMGSVGS

SEQ ID NO: 49781 - protein, 9 aa, synthetic construct
  source 1..9: note = Seed: LVVVGAVGV (KRAS G12V)
FVVMGSVGT

SEQ ID NO: 49782 - protein, 9 aa, synthetic construct
  source 1..9: note = Seed: LVVVGAVGV (KRAS G12V)
FVVMGSVGV

SEQ ID NO: 49783 - protein, 9 aa, synthetic construct
  source 1..9: note = Seed: LVVVGAVGV (KRAS G12V)
FVVQGAVGA

SEQ ID NO: 49784 - protein, 9 aa, synthetic construct
  source 1..9: note = Seed: LVVVGAVGV (KRAS G12V)
FVVQGAVGI

SEQ ID NO: 49785 - protein, 9 aa, synthetic construct
  source 1..9: note = Seed: LVVVGAVGV (KRAS G12V)
FVVQGAVGL

SEQ ID NO: 49786 - protein, 9 aa, synthetic construct
  source 1..9: note = Seed: LVVVGAVGV (KRAS G12V)
FVVQGAVGV

SEQ ID NO: 49787 - protein, 9 aa, synthetic construct
  source 1..9: note = Seed: LVVVGAVGV (KRAS G12V)
FVVQGGVGI

SEQ ID NO: 49788 - protein, 9 aa, synthetic construct
  source 1..9: note = Seed: LVVVGAVGV (KRAS G12V)
FVVQGGVGL

SEQ ID NO: 49789 - protein, 9 aa, synthetic construct
  source 1..9: note = Seed: LVVVGAVGV (KRAS G12V)
FVVQGGVGV

SEQ ID NO: 49790 - protein, 9 aa, synthetic construct
  source 1..9: note = Seed: LVVVGAVGV (KRAS G12V)
FVVQGSVGI

SEQ ID NO: 49791 - protein, 9 aa, synthetic construct
  source 1..9: note = Seed: LVVVGAVGV (KRAS G12V)
FVVQGSVGL

SEQ ID NO: 49792 - protein, 9 aa, synthetic construct
  source 1..9: note = Seed: LVVVGAVGV (KRAS G12V)
FVVQGSVGV

SEQ ID NO: 49793 - protein, 9 aa, synthetic construct
  source 1..9: note = Seed: LVVVGAVGV (KRAS G12V)
FVVSGAVGA

SEQ ID NO: 49794 - protein, 9 aa, synthetic construct
  source 1..9: note = Seed: LVVVGAVGV (KRAS G12V)
FVVSGAVGI

SEQ ID NO: 49795 - protein, 9 aa, synthetic construct
  source 1..9: note = Seed: LVVVGAVGV (KRAS G12V)
FVVSGAVGL

SEQ ID NO: 49796 - protein, 9 aa, synthetic construct
  source 1..9: note = Seed: LVVVGAVGV (KRAS G12V)
FVVSGAVGV

SEQ ID NO: 49797 - protein, 9 aa, synthetic construct
  source 1..9: note = Seed: LVVVGAVGV (KRAS G12V)
YVVAGAVGA

SEQ ID NO: 49798 - protein, 9 aa, synthetic construct
  source 1..9: note = Seed: LVVVGAVGV (KRAS G12V)
YVVAGAVGI

SEQ ID NO: 49799 - protein, 9 aa, synthetic construct
  source 1..9: note = Seed: LVVVGAVGV (KRAS G12V)
YVVAGAVGL

SEQ ID NO: 49800 - protein, 9 aa, synthetic construct
  source 1..9: note = Seed: LVVVGAVGV (KRAS G12V)
YVVAGAVGV

SEQ ID NO: 49801 - protein, 9 aa, synthetic construct
  source 1..9: note = Seed: LVVVGAVGV (KRAS G12V)
YVVAGGVGL

SEQ ID NO: 49802 - protein, 9 aa, synthetic construct
  source 1..9: note = Seed: LVVVGAVGV (KRAS G12V)
YVVAGGVGV

SEQ ID NO: 49803 - protein, 9 aa, synthetic construct
  source 1..9: note = Seed: LVVVGAVGV (KRAS G12V)
YVVAGPVGI

SEQ ID NO: 49804 - protein, 9 aa, synthetic construct
  source 1..9: note = Seed: LVVVGAVGV (KRAS G12V)
YVVAGPVGL

SEQ ID NO: 49805 - protein, 9 aa, synthetic construct
  source 1..9: note = Seed: LVVVGAVGV (KRAS G12V)
YVVAGPVGV

SEQ ID NO: 49806 - protein, 9 aa, synthetic construct
  source 1..9: note = Seed: LVVVGAVGV (KRAS G12V)
YVVAGSVGA

SEQ ID NO: 49807 - protein, 9 aa, synthetic construct
  source 1..9: note = Seed: LVVVGAVGV (KRAS G12V)
YVVAGSVGI

SEQ ID NO: 49808 - protein, 9 aa, synthetic construct
  source 1..9: note = Seed: LVVVGAVGV (KRAS G12V)
YVVAGSVGL

SEQ ID NO: 49809 - protein, 9 aa, synthetic construct
  source 1..9: note = Seed: LVVVGAVGV (KRAS G12V)
YVVAGSVGV

SEQ ID NO: 49810 - protein, 9 aa, synthetic construct
  source 1..9: note = Seed: LVVVGAVGV (KRAS G12V)
YVVLGGVGA

SEQ ID NO: 49811 - protein, 9 aa, synthetic construct
  source 1..9: note = Seed: LVVVGAVGV (KRAS G12V)
YVVLGGVGV

SEQ ID NO: 49812 - protein, 9 aa, synthetic construct
  source 1..9: note = Seed: LVVVGAVGV (KRAS G12V)
YVVMGGVGL

SEQ ID NO: 49813 - protein, 9 aa, synthetic construct
  source 1..9: note = Seed: LVVVGAVGV (KRAS G12V)
YVVMGSVGL

SEQ ID NO: 49814 - protein, 9 aa, synthetic construct
  source 1..9: note = Seed: LVVVGAVGV (KRAS G12V)
YVVMGSVGV

SEQ ID NO: 49815 - protein, 9 aa, synthetic construct
  source 1..9: note = Seed: AVGVGKSAL (KRAS G12V)
IVGAGRSAR

SEQ ID NO: 49816 - protein, 9 aa, synthetic construct
  source 1..9: note = Seed: AVGVGKSAL (KRAS G12V)
IVGAGRSAY

SEQ ID NO: 49817 - protein, 9 aa, synthetic construct
  source 1..9: note = Seed: AVGVGKSAL (KRAS G12V)
IVGFGRSAR

SEQ ID NO: 49818 - protein, 9 aa, synthetic construct
  source 1..9: note = Seed: AVGVGKSAL (KRAS G12V)
IVGHGISAR

SEQ ID NO: 49819 - protein, 9 aa, synthetic construct
  source 1..9: note = Seed: AVGVGKSAL (KRAS G12V)
IVGHGKSAR

SEQ ID NO: 49820 - protein, 9 aa, synthetic construct
  source 1..9: note = Seed: AVGVGKSAL (KRAS G12V)
IVGHGRSAF

SEQ ID NO: 49821 - protein, 9 aa, synthetic construct
  source 1..9: note = Seed: AVGVGKSAL (KRAS G12V)
IVGHGRSAL

SEQ ID NO: 49822 - protein, 9 aa, synthetic construct
  source 1..9: note = Seed: AVGVGKSAL (KRAS G12V)
IVGHGRSAM

SEQ ID NO: 49823 - protein, 9 aa, synthetic construct
  source 1..9: note = Seed: AVGVGKSAL (KRAS G12V)
IVGHGRSAR

SEQ ID NO: 49824 - protein, 9 aa, synthetic construct
  source 1..9: note = Seed: AVGVGKSAL (KRAS G12V)
IVGHGRSAY

SEQ ID NO: 49825 - protein, 9 aa, synthetic construct
  source 1..9: note = Seed: AVGVGKSAL (KRAS G12V)
IVGIGKSAR

SEQ ID NO: 49826 - protein, 9 aa, synthetic construct
  source 1..9: note = Seed: AVGVGKSAL (KRAS G12V)
IVGIGRSAA

SEQ ID NO: 49827 - protein, 9 aa, synthetic construct
  source 1..9: note = Seed: AVGVGKSAL (KRAS G12V)
IVGIGRSAF

SEQ ID NO: 49828 - protein, 9 aa, synthetic construct
  source 1..9: note = Seed: AVGVGKSAL (KRAS G12V)
IVGIGRSAH

SEQ ID NO: 49829 - protein, 9 aa, synthetic construct
  source 1..9: note = Seed: AVGVGKSAL (KRAS G12V)
IVGIGRSAI

SEQ ID NO: 49830 - protein, 9 aa, synthetic construct
  source 1..9: note = Seed: AVGVGKSAL (KRAS G12V)
IVGIGRSAL

SEQ ID NO: 49831 - protein, 9 aa, synthetic construct
  source 1..9: note = Seed: AVGVGKSAL (KRAS G12V)
IVGIGRSAM

SEQ ID NO: 49832 - protein, 9 aa, synthetic construct
  source 1..9: note = Seed: AVGVGKSAL (KRAS G12V)
IVGIGRSAR

SEQ ID NO: 49833 - protein, 9 aa, synthetic construct
  source 1..9: note = Seed: AVGVGKSAL (KRAS G12V)
IVGIGRSAS

SEQ ID NO: 49834 - protein, 9 aa, synthetic construct
  source 1..9: note = Seed: AVGVGKSAL (KRAS G12V)
IVGIGRSAV

SEQ ID NO: 49835 - protein, 9 aa, synthetic construct
  source 1..9: note = Seed: AVGVGKSAL (KRAS G12V)
IVGIGRSAY

SEQ ID NO: 49836 - protein, 9 aa, synthetic construct
  source 1..9: note = Seed: AVGVGKSAL (KRAS G12V)
IVGKGRSAR

SEQ ID NO: 49837 - protein, 9 aa, synthetic construct
  source 1..9: note = Seed: AVGVGKSAL (KRAS G12V)
IVGKGRSAY

SEQ ID NO: 49838 - protein, 9 aa, synthetic construct
  source 1..9: note = Seed: AVGVGKSAL (KRAS G12V)
IVGLGKSAR

SEQ ID NO: 49839 - protein, 9 aa, synthetic construct
  source 1..9: note = Seed: AVGVGKSAL (KRAS G12V)
IVGLGRSAA

SEQ ID NO: 49840 - protein, 9 aa, synthetic construct
  source 1..9: note = Seed: AVGVGKSAL (KRAS G12V)
IVGLGRSAF

SEQ ID NO: 49841 - protein, 9 aa, synthetic construct
  source 1..9: note = Seed: AVGVGKSAL (KRAS G12V)
IVGLGRSAH

SEQ ID NO: 49842 - protein, 9 aa, synthetic construct
  source 1..9: note = Seed: AVGVGKSAL (KRAS G12V)
IVGLGRSAI

SEQ ID NO: 49843 - protein, 9 aa, synthetic construct
  source 1..9: note = Seed: AVGVGKSAL (KRAS G12V)
IVGLGRSAL

SEQ ID NO: 49844 - protein, 9 aa, synthetic construct
  source 1..9: note = Seed: AVGVGKSAL (KRAS G12V)
IVGLGRSAM

SEQ ID NO: 49845 - protein, 9 aa, synthetic construct
  source 1..9: note = Seed: AVGVGKSAL (KRAS G12V)
IVGLGRSAR

SEQ ID NO: 49846 - protein, 9 aa, synthetic construct
  source 1..9: note = Seed: AVGVGKSAL (KRAS G12V)
IVGLGRSAS

SEQ ID NO: 49847 - protein, 9 aa, synthetic construct
  source 1..9: note = Seed: AVGVGKSAL (KRAS G12V)
IVGLGRSAV

SEQ ID NO: 49848 - protein, 9 aa, synthetic construct
  source 1..9: note = Seed: AVGVGKSAL (KRAS G12V)
IVGLGRSAY

SEQ ID NO: 49849 - protein, 9 aa, synthetic construct
  source 1..9: note = Seed: AVGVGKSAL (KRAS G12V)
IVGMGKSAR

SEQ ID NO: 49850 - protein, 9 aa, synthetic construct
  source 1..9: note = Seed: AVGVGKSAL (KRAS G12V)
IVGMGRSAA

SEQ ID NO: 49851 - protein, 9 aa, synthetic construct
  source 1..9: note = Seed: AVGVGKSAL (KRAS G12V)
IVGMGRSAF

SEQ ID NO: 49852 - protein, 9 aa, synthetic construct
  source 1..9: note = Seed: AVGVGKSAL (KRAS G12V)
IVGMGRSAI

SEQ ID NO: 49853 - protein, 9 aa, synthetic construct
  source 1..9: note = Seed: AVGVGKSAL (KRAS G12V)
IVGMGRSAL

SEQ ID NO: 49854 - protein, 9 aa, synthetic construct
  source 1..9: note = Seed: AVGVGKSAL (KRAS G12V)
IVGMGRSAM

SEQ ID NO: 49855 - protein, 9 aa, synthetic construct
  source 1..9: note = Seed: AVGVGKSAL (KRAS G12V)
IVGMGRSAR

SEQ ID NO: 49856 - protein, 9 aa, synthetic construct
  source 1..9: note = Seed: AVGVGKSAL (KRAS G12V)
IVGMGRSAV

SEQ ID NO: 49857 - protein, 9 aa, synthetic construct
  source 1..9: note = Seed: AVGVGKSAL (KRAS G12V)
IVGMGRSAY

SEQ ID NO: 49858 - protein, 9 aa, synthetic construct
  source 1..9: note = Seed: AVGVGKSAL (KRAS G12V)
IVGRGRSAF

SEQ ID NO: 49859 - protein, 9 aa, synthetic construct
  source 1..9: note = Seed: AVGVGKSAL (KRAS G12V)
IVGRGRSAI

SEQ ID NO: 49860 - protein, 9 aa, synthetic construct
  source 1..9: note = Seed: AVGVGKSAL (KRAS G12V)
IVGRGRSAL

SEQ ID NO: 49861 - protein, 9 aa, synthetic construct
  source 1..9: note = Seed: AVGVGKSAL (KRAS G12V)
IVGRGRSAM

SEQ ID NO: 49862 - protein, 9 aa, synthetic construct
  source 1..9: note = Seed: AVGVGKSAL (KRAS G12V)
IVGRGRSAR

SEQ ID NO: 49863 - protein, 9 aa, synthetic construct
  source 1..9: note = Seed: AVGVGKSAL (KRAS G12V)
IVGRGRSAV

SEQ ID NO: 49864 - protein, 9 aa, synthetic construct
  source 1..9: note = Seed: AVGVGKSAL (KRAS G12V)
IVGRGRSAY

SEQ ID NO: 49865 - protein, 9 aa, synthetic construct
  source 1..9: note = Seed: AVGVGKSAL (KRAS G12V)
IVGVGRSAM

SEQ ID NO: 49866 - protein, 9 aa, synthetic construct
  source 1..9: note = Seed: AVGVGKSAL (KRAS G12V)
IVGVGRSAR

SEQ ID NO: 49867 - protein, 9 aa, synthetic construct
  source 1..9: note = Seed: AVGVGKSAL (KRAS G12V)
IVGVGRSAV

SEQ ID NO: 49868 - protein, 9 aa, synthetic construct
  source 1..9: note = Seed: AVGVGKSAL (KRAS G12V)
IVGWGRSAR

SEQ ID NO: 49869 - protein, 9 aa, synthetic construct
  source 1..9: note = Seed: AVGVGKSAL (KRAS G12V)
LVGFGRSAR

SEQ ID NO: 49870 - protein, 9 aa, synthetic construct
  source 1..9: note = Seed: AVGVGKSAL (KRAS G12V)
LVGHGRSAR

SEQ ID NO: 49871 - protein, 9 aa, synthetic construct
  source 1..9: note = Seed: AVGVGKSAL (KRAS G12V)
LVGIGRSAR

SEQ ID NO: 49872 - protein, 9 aa, synthetic construct
  source 1..9: note = Seed: AVGVGKSAL (KRAS G12V)
LVGLGRSAR

SEQ ID NO: 49873 - protein, 9 aa, synthetic construct
  source 1..9: note = Seed: AVGVGKSAL (KRAS G12V)
LVGMGRSAR

SEQ ID NO: 49874 - protein, 9 aa, synthetic construct
  source 1..9: note = Seed: AVGVGKSAL (KRAS G12V)
LVGRGRSAR

SEQ ID NO: 49875 - protein, 9 aa, synthetic construct
  source 1..9: note = Seed: AVGVGKSAL (KRAS G12V)
LVGRGRSAY

SEQ ID NO: 49876 - protein, 9 aa, synthetic construct
  source 1..9: note = Seed: AVGVGKSAL (KRAS G12V)
LVGVGRSAR

SEQ ID NO: 49877 - protein, 9 aa, synthetic construct
  source 1..9: note = Seed: KLVVVGAVG (KRAS G12V)
FLVAVPAVE

SEQ ID NO: 49878 - protein, 9 aa, synthetic construct
  source 1..9: note = Seed: KLVVVGAVG (KRAS G12V)
FLVAVPAVH

SEQ ID NO: 49879 - protein, 9 aa, synthetic construct
  source 1..9: note = Seed: KLVVVGAVG (KRAS G12V)
FLVAVPAVK

SEQ ID NO: 49880 - protein, 9 aa, synthetic construct
  source 1..9: note = Seed: KLVVVGAVG (KRAS G12V)
FLVAVPAVN

SEQ ID NO: 49881 - protein, 9 aa, synthetic construct
  source 1..9: note = Seed: KLVVVGAVG (KRAS G12V)
FLVAVPAVR

SEQ ID NO: 49882 - protein, 9 aa, synthetic construct
  source 1..9: note = Seed: KLVVVGAVG (KRAS G12V)
FLVAVPAVS

SEQ ID NO: 49883 - protein, 9 aa, synthetic construct
  source 1..9: note = Seed: KLVVVGAVG (KRAS G12V)
FLVHVPAVN

SEQ ID NO: 49884 - protein, 9 aa, synthetic construct
  source 1..9: note = Seed: KLVVVGAVG (KRAS G12V)
FLVSVAAVH

SEQ ID NO: 49885 - protein, 9 aa, synthetic construct
  source 1..9: note = Seed: KLVVVGAVG (KRAS G12V)
FLVSVAAVN

SEQ ID NO: 49886 - protein, 9 aa, synthetic construct
  source 1..9: note = Seed: KLVVVGAVG (KRAS G12V)
FLVSVPAVA

SEQ ID NO: 49887 - protein, 9 aa, synthetic construct
  source 1..9: note = Seed: KLVVVGAVG (KRAS G12V)
FLVSVPAVH

SEQ ID NO: 49888 - protein, 9 aa, synthetic construct
  source 1..9: note = Seed: KLVVVGAVG (KRAS G12V)
FLVSVPAVK

SEQ ID NO: 49889 - protein, 9 aa, synthetic construct
  source 1..9: note = Seed: KLVVVGAVG (KRAS G12V)
FLVSVPAVN

SEQ ID NO: 49890 - protein, 9 aa, synthetic construct
  source 1..9: note = Seed: KLVVVGAVG (KRAS G12V)
FLVSVPAVR

SEQ ID NO: 49891 - protein, 9 aa, synthetic construct
  source 1..9: note = Seed: KLVVVGAVG (KRAS G12V)
FLVSVPAVS

SEQ ID NO: 49892 - protein, 9 aa, synthetic construct
  source 1..9: note = Seed: KLVVVGAVG (KRAS G12V)
FLVTVPAVH

SEQ ID NO: 49893 - protein, 9 aa, synthetic construct
  source 1..9: note = Seed: KLVVVGAVG (KRAS G12V)
FLVTVPAVN

SEQ ID NO: 49894 - protein, 9 aa, synthetic construct
  source 1..9: note = Seed: KLVVVGAVG (KRAS G12V)
ILVSVPAVN

SEQ ID NO: 49895 - protein, 9 aa, synthetic construct
  source 1..9: note = Seed: KLVVVGAVG (KRAS G12V)
KLVAVAAVH

SEQ ID NO: 49896 - protein, 9 aa, synthetic construct
  source 1..9: note = Seed: KLVVVGAVG (KRAS G12V)
KLVAVAAVN

SEQ ID NO: 49897 - protein, 9 aa, synthetic construct
  source 1..9: note = Seed: KLVVVGAVG (KRAS G12V)
KLVAVPAVA

SEQ ID NO: 49898 - protein, 9 aa, synthetic construct
  source 1..9: note = Seed: KLVVVGAVG (KRAS G12V)
KLVAVPAVH

SEQ ID NO: 49899 - protein, 9 aa, synthetic construct
  source 1..9: note = Seed: KLVVVGAVG (KRAS G12V)
KLVAVPAVN

SEQ ID NO: 49900 - protein, 9 aa, synthetic construct
  source 1..9: note = Seed: KLVVVGAVG (KRAS G12V)
KLVAVPAVS

SEQ ID NO: 49901 - protein, 9 aa, synthetic construct
  source 1..9: note = Seed: KLVVVGAVG (KRAS G12V)
KLVSVAAVA

SEQ ID NO: 49902 - protein, 9 aa, synthetic construct
  source 1..9: note = Seed: KLVVVGAVG (KRAS G12V)
KLVSVAAVH

SEQ ID NO: 49903 - protein, 9 aa, synthetic construct
  source 1..9: note = Seed: KLVVVGAVG (KRAS G12V)
KLVSVAAVN

SEQ ID NO: 49904 - protein, 9 aa, synthetic construct
  source 1..9: note = Seed: KLVVVGAVG (KRAS G12V)
KLVSVAAVS

SEQ ID NO: 49905 - protein, 9 aa, synthetic construct
  source 1..9: note = Seed: KLVVVGAVG (KRAS G12V)
KLVSVPAVA

SEQ ID NO: 49906 - protein, 9 aa, synthetic construct
  source 1..9: note = Seed: KLVVVGAVG (KRAS G12V)
KLVSVPAVN

SEQ ID NO: 49907 - protein, 9 aa, synthetic construct
  source 1..9: note = Seed: KLVVVGAVG (KRAS G12V)
KLVSVPAVS

SEQ ID NO: 49908 - protein, 9 aa, synthetic construct
  source 1..9: note = Seed: KLVVVGAVG (KRAS G12V)
KLVTVAAVH

SEQ ID NO: 49909 - protein, 9 aa, synthetic construct
  source 1..9: note = Seed: KLVVVGAVG (KRAS G12V)
KLVTVAAVN

SEQ ID NO: 49910 - protein, 9 aa, synthetic construct
  source 1..9: note = Seed: KLVVVGAVG (KRAS G12V)
LLVAVPAVN

SEQ ID NO: 49911 - protein, 9 aa, synthetic construct
  source 1..9: note = Seed: KLVVVGAVG (KRAS G12V)
LLVSVPAVN

SEQ ID NO: 49912 - protein, 9 aa, synthetic construct
  source 1..9: note = Seed: KLVVVGAVG (KRAS G12V)
MLVAVPAVN

SEQ ID NO: 49913 - protein, 9 aa, synthetic construct
  source 1..9: note = Seed: KLVVVGAVG (KRAS G12V)
MLVSVPAVN

SEQ ID NO: 49914 - protein, 9 aa, synthetic construct
  source 1..9: note = Seed: KLVVVGAVG (KRAS G12V)
RLVAVAAVA

SEQ ID NO: 49915 - protein, 9 aa, synthetic construct
  source 1..9: note = Seed: KLVVVGAVG (KRAS G12V)
RLVAVAAVD

SEQ ID NO: 49916 - protein, 9 aa, synthetic construct
  source 1..9: note = Seed: KLVVVGAVG (KRAS G12V)
RLVAVAAVE

SEQ ID NO: 49917 - protein, 9 aa, synthetic construct
  source 1..9: note = Seed: KLVVVGAVG (KRAS G12V)
RLVAVAAVG

SEQ ID NO: 49918 - protein, 9 aa, synthetic construct
  source 1..9: note = Seed: KLVVVGAVG (KRAS G12V)
RLVAVAAVH

SEQ ID NO: 49919 - protein, 9 aa, synthetic construct
  source 1..9: note = Seed: KLVVVGAVG (KRAS G12V)
RLVAVAAVI

SEQ ID NO: 49920 - protein, 9 aa, synthetic construct
  source 1..9: note = Seed: KLVVVGAVG (KRAS G12V)
RLVAVAAVK

SEQ ID NO: 49921 - protein, 9 aa, synthetic construct
  source 1..9: note = Seed: KLVVVGAVG (KRAS G12V)
RLVAVAAVL

SEQ ID NO: 49922 - protein, 9 aa, synthetic construct
  source 1..9: note = Seed: KLVVVGAVG (KRAS G12V)
RLVAVAAVM

SEQ ID NO: 49923 - protein, 9 aa, synthetic construct
  source 1..9: note = Seed: KLVVVGAVG (KRAS G12V)
RLVAVAAVN

SEQ ID NO: 49924 - protein, 9 aa, synthetic construct
  source 1..9: note = Seed: KLVVVGAVG (KRAS G12V)
RLVAVAAVP

SEQ ID NO: 49925 - protein, 9 aa, synthetic construct
  source 1..9: note = Seed: KLVVVGAVG (KRAS G12V)
RLVAVAAVQ

SEQ ID NO: 49926 - protein, 9 aa, synthetic construct
  source 1..9: note = Seed: KLVVVGAVG (KRAS G12V)
RLVAVAAVR

SEQ ID NO: 49927 - protein, 9 aa, synthetic construct
  source 1..9: note = Seed: KLVVVGAVG (KRAS G12V)
RLVAVAAVS

SEQ ID NO: 49928 - protein, 9 aa, synthetic construct
  source 1..9: note = Seed: KLVVVGAVG (KRAS G12V)
RLVAVAAVT

SEQ ID NO: 49929 - protein, 9 aa, synthetic construct
  source 1..9: note = Seed: KLVVVGAVG (KRAS G12V)
RLVAVAAVV

SEQ ID NO: 49930 - protein, 9 aa, synthetic construct
  source 1..9: note = Seed: KLVVVGAVG (KRAS G12V)
RLVAVAAVY

SEQ ID NO: 49931 - protein, 9 aa, synthetic construct
  source 1..9: note = Seed: KLVVVGAVG (KRAS G12V)
RLVAVGAVH

SEQ ID NO: 49932 - protein, 9 aa, synthetic construct
  source 1..9: note = Seed: KLVVVGAVG (KRAS G12V)
RLVAVGAVN

SEQ ID NO: 49933 - protein, 9 aa, synthetic construct
  source 1..9: note = Seed: KLVVVGAVG (KRAS G12V)
RLVAVGAVS

SEQ ID NO: 49934 - protein, 9 aa, synthetic construct
  source 1..9: note = Seed: KLVVVGAVG (KRAS G12V)
RLVAVIAVD

SEQ ID NO: 49935 - protein, 9 aa, synthetic construct
  source 1..9: note = Seed: KLVVVGAVG (KRAS G12V)
RLVAVIAVE

SEQ ID NO: 49936 - protein, 9 aa, synthetic construct
  source 1..9: note = Seed: KLVVVGAVG (KRAS G12V)
RLVAVIAVH

SEQ ID NO: 49937 - protein, 9 aa, synthetic construct
  source 1..9: note = Seed: KLVVVGAVG (KRAS G12V)
RLVAVIAVK

SEQ ID NO: 49938 - protein, 9 aa, synthetic construct
  source 1..9: note = Seed: KLVVVGAVG (KRAS G12V)
RLVAVIAVN

SEQ ID NO: 49939 - protein, 9 aa, synthetic construct
  source 1..9: note = Seed: KLVVVGAVG (KRAS G12V)
RLVAVLAVE

SEQ ID NO: 49940 - protein, 9 aa, synthetic construct
  source 1..9: note = Seed: KLVVVGAVG (KRAS G12V)
RLVAVLAVH

SEQ ID NO: 49941 - protein, 9 aa, synthetic construct
  source 1..9: note = Seed: KLVVVGAVG (KRAS G12V)
RLVAVLAVK

SEQ ID NO: 49942 - protein, 9 aa, synthetic construct
  source 1..9: note = Seed: KLVVVGAVG (KRAS G12V)
RLVAVLAVN

SEQ ID NO: 49943 - protein, 9 aa, synthetic construct
  source 1..9: note = Seed: KLVVVGAVG (KRAS G12V)
RLVAVMAVE

SEQ ID NO: 49944 - protein, 9 aa, synthetic construct
  source 1..9: note = Seed: KLVVVGAVG (KRAS G12V)
RLVAVMAVH

SEQ ID NO: 49945 - protein, 9 aa, synthetic construct
  source 1..9: note = Seed: KLVVVGAVG (KRAS G12V)
RLVAVMAVK

SEQ ID NO: 49946 - protein, 9 aa, synthetic construct
  source 1..9: note = Seed: KLVVVGAVG (KRAS G12V)
RLVAVMAVN

SEQ ID NO: 49947 - protein, 9 aa, synthetic construct
  source 1..9: note = Seed: KLVVVGAVG (KRAS G12V)
RLVAVNAVN

SEQ ID NO: 49948 - protein, 9 aa, synthetic construct
  source 1..9: note = Seed: KLVVVGAVG (KRAS G12V)
RLVAVPAVA

SEQ ID NO: 49949 - protein, 9 aa, synthetic construct
  source 1..9: note = Seed: KLVVVGAVG (KRAS G12V)
RLVAVPAVD

SEQ ID NO: 49950 - protein, 9 aa, synthetic construct
  source 1..9: note = Seed: KLVVVGAVG (KRAS G12V)
RLVAVPAVE

SEQ ID NO: 49951 - protein, 9 aa, synthetic construct
  source 1..9: note = Seed: KLVVVGAVG (KRAS G12V)
RLVAVPAVF

SEQ ID NO: 49952 - protein, 9 aa, synthetic construct
  source 1..9: note = Seed: KLVVVGAVG (KRAS G12V)
RLVAVPAVG

SEQ ID NO: 49953 - protein, 9 aa, synthetic construct
  source 1..9: note = Seed: KLVVVGAVG (KRAS G12V)
RLVAVPAVH

SEQ ID NO: 49954 - protein, 9 aa, synthetic construct
  source 1..9: note = Seed: KLVVVGAVG (KRAS G12V)
RLVAVPAVI

SEQ ID NO: 49955 - protein, 9 aa, synthetic construct
  source 1..9: note = Seed: KLVVVGAVG (KRAS G12V)
RLVAVPAVK

SEQ ID NO: 49956 - protein, 9 aa, synthetic construct
  source 1..9: note = Seed: KLVVVGAVG (KRAS G12V)
RLVAVPAVL

SEQ ID NO: 49957 - protein, 9 aa, synthetic construct
  source 1..9: note = Seed: KLVVVGAVG (KRAS G12V)
RLVAVPAVM

SEQ ID NO: 49958 - protein, 9 aa, synthetic construct
  source 1..9: note = Seed: KLVVVGAVG (KRAS G12V)
RLVAVPAVN

SEQ ID NO: 49959 - protein, 9 aa, synthetic construct
  source 1..9: note = Seed: KLVVVGAVG (KRAS G12V)
RLVAVPAVP

SEQ ID NO: 49960 - protein, 9 aa, synthetic construct
  source 1..9: note = Seed: KLVVVGAVG (KRAS G12V)
RLVAVPAVQ

SEQ ID NO: 49961 - protein, 9 aa, synthetic construct
  source 1..9: note = Seed: KLVVVGAVG (KRAS G12V)
RLVAVPAVR

SEQ ID NO: 49962 - protein, 9 aa, synthetic construct
  source 1..9: note = Seed: KLVVVGAVG (KRAS G12V)
RLVAVPAVS

SEQ ID NO: 49963 - protein, 9 aa, synthetic construct
  source 1..9: note = Seed: KLVVVGAVG (KRAS G12V)
RLVAVPAVT

SEQ ID NO: 49964 - protein, 9 aa, synthetic construct
  source 1..9: note = Seed: KLVVVGAVG (KRAS G12V)
RLVAVPAVV

SEQ ID NO: 49965 - protein, 9 aa, synthetic construct
  source 1..9: note = Seed: KLVVVGAVG (KRAS G12V)
RLVAVPAVY

SEQ ID NO: 49966 - protein, 9 aa, synthetic construct
  source 1..9: note = Seed: KLVVVGAVG (KRAS G12V)
RLVAVSAVA

SEQ ID NO: 49967 - protein, 9 aa, synthetic construct
  source 1..9: note = Seed: KLVVVGAVG (KRAS G12V)
RLVAVSAVE

SEQ ID NO: 49968 - protein, 9 aa, synthetic construct
  source 1..9: note = Seed: KLVVVGAVG (KRAS G12V)
RLVAVSAVH

SEQ ID NO: 49969 - protein, 9 aa, synthetic construct
  source 1..9: note = Seed: KLVVVGAVG (KRAS G12V)
RLVAVSAVK

SEQ ID NO: 49970 - protein, 9 aa, synthetic construct
  source 1..9: note = Seed: KLVVVGAVG (KRAS G12V)
RLVAVSAVM

SEQ ID NO: 49971 - protein, 9 aa, synthetic construct
  source 1..9: note = Seed: KLVVVGAVG (KRAS G12V)
RLVAVSAVN

SEQ ID NO: 49972 - protein, 9 aa, synthetic construct
  source 1..9: note = Seed: KLVVVGAVG (KRAS G12V)
RLVAVSAVS

SEQ ID NO: 49973 - protein, 9 aa, synthetic construct
  source 1..9: note = Seed: KLVVVGAVG (KRAS G12V)
RLVAVSAVT

SEQ ID NO: 49974 - protein, 9 aa, synthetic construct
  source 1..9: note = Seed: KLVVVGAVG (KRAS G12V)
RLVAVTAVA

SEQ ID NO: 49975 - protein, 9 aa, synthetic construct
  source 1..9: note = Seed: KLVVVGAVG (KRAS G12V)
RLVAVTAVH

SEQ ID NO: 49976 - protein, 9 aa, synthetic construct
  source 1..9: note = Seed: KLVVVGAVG (KRAS G12V)
RLVAVTAVM

SEQ ID NO: 49977 - protein, 9 aa, synthetic construct
  source 1..9: note = Seed: KLVVVGAVG (KRAS G12V)
RLVAVTAVN

SEQ ID NO: 49978 - protein, 9 aa, synthetic construct
  source 1..9: note = Seed: KLVVVGAVG (KRAS G12V)
RLVAVTAVS

SEQ ID NO: 49979 - protein, 9 aa, synthetic construct
  source 1..9: note = Seed: KLVVVGAVG (KRAS G12V)
RLVAVVAVD

SEQ ID NO: 49980 - protein, 9 aa, synthetic construct
  source 1..9: note = Seed: KLVVVGAVG (KRAS G12V)
RLVAVVAVE

SEQ ID NO: 49981 - protein, 9 aa, synthetic construct
  source 1..9: note = Seed: KLVVVGAVG (KRAS G12V)
RLVAVVAVH

SEQ ID NO: 49982 - protein, 9 aa, synthetic construct
  source 1..9: note = Seed: KLVVVGAVG (KRAS G12V)
RLVAVVAVK

SEQ ID NO: 49983 - protein, 9 aa, synthetic construct
  source 1..9: note = Seed: KLVVVGAVG (KRAS G12V)
RLVAVVAVN

SEQ ID NO: 49984 - protein, 9 aa, synthetic construct
  source 1..9: note = Seed: KLVVVGAVG (KRAS G12V)
RLVAVVAVS

SEQ ID NO: 49985 - protein, 9 aa, synthetic construct
  source 1..9: note = Seed: KLVVVGAVG (KRAS G12V)
RLVDVAAVA

SEQ ID NO: 49986 - protein, 9 aa, synthetic construct
  source 1..9: note = Seed: KLVVVGAVG (KRAS G12V)
RLVDVAAVH

SEQ ID NO: 49987 - protein, 9 aa, synthetic construct
  source 1..9: note = Seed: KLVVVGAVG (KRAS G12V)
RLVDVAAVN

SEQ ID NO: 49988 - protein, 9 aa, synthetic construct
  source 1..9: note = Seed: KLVVVGAVG (KRAS G12V)
RLVDVAAVS

SEQ ID NO: 49989 - protein, 9 aa, synthetic construct
  source 1..9: note = Seed: KLVVVGAVG (KRAS G12V)
RLVEVAAVA

SEQ ID NO: 49990 - protein, 9 aa, synthetic construct
  source 1..9: note = Seed: KLVVVGAVG (KRAS G12V)
RLVEVAAVD

SEQ ID NO: 49991 - protein, 9 aa, synthetic construct
  source 1..9: note = Seed: KLVVVGAVG (KRAS G12V)
RLVEVAAVE

SEQ ID NO: 49992 - protein, 9 aa, synthetic construct
  source 1..9: note = Seed: KLVVVGAVG (KRAS G12V)
RLVEVAAVH

SEQ ID NO: 49993 - protein, 9 aa, synthetic construct
  source 1..9: note = Seed: KLVVVGAVG (KRAS G12V)
RLVEVAAVM

SEQ ID NO: 49994 - protein, 9 aa, synthetic construct
  source 1..9: note = Seed: KLVVVGAVG (KRAS G12V)
RLVEVAAVN

SEQ ID NO: 49995 - protein, 9 aa, synthetic construct
  source 1..9: note = Seed: KLVVVGAVG (KRAS G12V)
RLVEVAAVQ

SEQ ID NO: 49996 - protein, 9 aa, synthetic construct
  source 1..9: note = Seed: KLVVVGAVG (KRAS G12V)
RLVEVAAVS

SEQ ID NO: 49997 - protein, 9 aa, synthetic construct
  source 1..9: note = Seed: KLVVVGAVG (KRAS G12V)
RLVEVAAVT

SEQ ID NO: 49998 - protein, 9 aa, synthetic construct
  source 1..9: note = Seed: KLVVVGAVG (KRAS G12V)
RLVEVAAVV

SEQ ID NO: 49999 - protein, 9 aa, synthetic construct
  source 1..9: note = Seed: KLVVVGAVG (KRAS G12V)
RLVEVIAVH

SEQ ID NO: 50000 - protein, 9 aa, synthetic construct
  source 1..9: note = Seed: KLVVVGAVG (KRAS G12V)
RLVEVIAVN

SEQ ID NO: 50001 - protein, 9 aa, synthetic construct
  source 1..9: note = Seed: KLVVVGAVG (KRAS G12V)
RLVEVPAVA

SEQ ID NO: 50002 - protein, 9 aa, synthetic construct
  source 1..9: note = Seed: KLVVVGAVG (KRAS G12V)
RLVEVPAVH

SEQ ID NO: 50003 - protein, 9 aa, synthetic construct
  source 1..9: note = Seed: KLVVVGAVG (KRAS G12V)
RLVEVPAVI

SEQ ID NO: 50004 - protein, 9 aa, synthetic construct
  source 1..9: note = Seed: KLVVVGAVG (KRAS G12V)
RLVEVPAVL

SEQ ID NO: 50005 - protein, 9 aa, synthetic construct
  source 1..9: note = Seed: KLVVVGAVG (KRAS G12V)
RLVEVPAVM

SEQ ID NO: 50006 - protein, 9 aa, synthetic construct
  source 1..9: note = Seed: KLVVVGAVG (KRAS G12V)
RLVEVPAVN

SEQ ID NO: 50007 - protein, 9 aa, synthetic construct
  source 1..9: note = Seed: KLVVVGAVG (KRAS G12V)
RLVEVPAVS

SEQ ID NO: 50008 - protein, 9 aa, synthetic construct
  source 1..9: note = Seed: KLVVVGAVG (KRAS G12V)
RLVEVPAVV

SEQ ID NO: 50009 - protein, 9 aa, synthetic construct
  source 1..9: note = Seed: KLVVVGAVG (KRAS G12V)
RLVEVVAVH

SEQ ID NO: 50010 - protein, 9 aa, synthetic construct
  source 1..9: note = Seed: KLVVVGAVG (KRAS G12V)
RLVEVVAVN

SEQ ID NO: 50011 - protein, 9 aa, synthetic construct
  source 1..9: note = Seed: KLVVVGAVG (KRAS G12V)
RLVFVAAVH

SEQ ID NO: 50012 - protein, 9 aa, synthetic construct
  source 1..9: note = Seed: KLVVVGAVG (KRAS G12V)
RLVFVAAVN

SEQ ID NO: 50013 - protein, 9 aa, synthetic construct
  source 1..9: note = Seed: KLVVVGAVG (KRAS G12V)
RLVFVPAVA

SEQ ID NO: 50014 - protein, 9 aa, synthetic construct
  source 1..9: note = Seed: KLVVVGAVG (KRAS G12V)
RLVFVPAVH

SEQ ID NO: 50015 - protein, 9 aa, synthetic construct
  source 1..9: note = Seed: KLVVVGAVG (KRAS G12V)
RLVFVPAVM

SEQ ID NO: 50016 - protein, 9 aa, synthetic construct
  source 1..9: note = Seed: KLVVVGAVG (KRAS G12V)
RLVFVPAVN

SEQ ID NO: 50017 - protein, 9 aa, synthetic construct
  source 1..9: note = Seed: KLVVVGAVG (KRAS G12V)
RLVFVPAVS

SEQ ID NO: 50018 - protein, 9 aa, synthetic construct
  source 1..9: note = Seed: KLVVVGAVG (KRAS G12V)
RLVGVAAVA

SEQ ID NO: 50019 - protein, 9 aa, synthetic construct
  source 1..9: note = Seed: KLVVVGAVG (KRAS G12V)
RLVGVAAVD

SEQ ID NO: 50020 - protein, 9 aa, synthetic construct
  source 1..9: note = Seed: KLVVVGAVG (KRAS G12V)
RLVGVAAVE

SEQ ID NO: 50021 - protein, 9 aa, synthetic construct
  source 1..9: note = Seed: KLVVVGAVG (KRAS G12V)
RLVGVAAVH

SEQ ID NO: 50022 - protein, 9 aa, synthetic construct
  source 1..9: note = Seed: KLVVVGAVG (KRAS G12V)
RLVGVAAVK

SEQ ID NO: 50023 - protein, 9 aa, synthetic construct
  source 1..9: note = Seed: KLVVVGAVG (KRAS G12V)
RLVGVAAVL

SEQ ID NO: 50024 - protein, 9 aa, synthetic construct
  source 1..9: note = Seed: KLVVVGAVG (KRAS G12V)
RLVGVAAVM

SEQ ID NO: 50025 - protein, 9 aa, synthetic construct
  source 1..9: note = Seed: KLVVVGAVG (KRAS G12V)
RLVGVAAVN

SEQ ID NO: 50026 - protein, 9 aa, synthetic construct
  source 1..9: note = Seed: KLVVVGAVG (KRAS G12V)
RLVGVAAVQ

SEQ ID NO: 50027 - protein, 9 aa, synthetic construct
  source 1..9: note = Seed: KLVVVGAVG (KRAS G12V)
RLVGVAAVR

SEQ ID NO: 50028 - protein, 9 aa, synthetic construct
  source 1..9: note = Seed: KLVVVGAVG (KRAS G12V)
RLVGVAAVS

SEQ ID NO: 50029 - protein, 9 aa, synthetic construct
  source 1..9: note = Seed: KLVVVGAVG (KRAS G12V)
RLVGVAAVT

SEQ ID NO: 50030 - protein, 9 aa, synthetic construct
  source 1..9: note = Seed: KLVVVGAVG (KRAS G12V)
RLVGVAAVV

SEQ ID NO: 50031 - protein, 9 aa, synthetic construct
  source 1..9: note = Seed: KLVVVGAVG (KRAS G12V)
RLVGVIAVH

SEQ ID NO: 50032 - protein, 9 aa, synthetic construct
  source 1..9: note = Seed: KLVVVGAVG (KRAS G12V)
RLVGVIAVN

SEQ ID NO: 50033 - protein, 9 aa, synthetic construct
  source 1..9: note = Seed: KLVVVGAVG (KRAS G12V)
RLVGVPAVA

SEQ ID NO: 50034 - protein, 9 aa, synthetic construct
  source 1..9: note = Seed: KLVVVGAVG (KRAS G12V)
RLVGVPAVH

SEQ ID NO: 50035 - protein, 9 aa, synthetic construct
  source 1..9: note = Seed: KLVVVGAVG (KRAS G12V)
RLVGVPAVI

SEQ ID NO: 50036 - protein, 9 aa, synthetic construct
  source 1..9: note = Seed: KLVVVGAVG (KRAS G12V)
RLVGVPAVL

SEQ ID NO: 50037 - protein, 9 aa, synthetic construct
  source 1..9: note = Seed: KLVVVGAVG (KRAS G12V)
RLVGVPAVM

SEQ ID NO: 50038 - protein, 9 aa, synthetic construct
  source 1..9: note = Seed: KLVVVGAVG (KRAS G12V)
RLVGVPAVN

SEQ ID NO: 50039 - protein, 9 aa, synthetic construct
  source 1..9: note = Seed: KLVVVGAVG (KRAS G12V)
RLVGVPAVS

SEQ ID NO: 50040 - protein, 9 aa, synthetic construct
  source 1..9: note = Seed: KLVVVGAVG (KRAS G12V)
RLVGVPAVV

SEQ ID NO: 50041 - protein, 9 aa, synthetic construct
  source 1..9: note = Seed: KLVVVGAVG (KRAS G12V)
RLVGVVAVH

SEQ ID NO: 50042 - protein, 9 aa, synthetic construct
  source 1..9: note = Seed: KLVVVGAVG (KRAS G12V)
RLVGVVAVN

SEQ ID NO: 50043 - protein, 9 aa, synthetic construct
  source 1..9: note = Seed: KLVVVGAVG (KRAS G12V)
RLVHVAAVA

SEQ ID NO: 50044 - protein, 9 aa, synthetic construct
  source 1..9: note = Seed: KLVVVGAVG (KRAS G12V)
RLVHVAAVE

SEQ ID NO: 50045 - protein, 9 aa, synthetic construct
  source 1..9: note = Seed: KLVVVGAVG (KRAS G12V)
RLVHVAAVH

SEQ ID NO: 50046 - protein, 9 aa, synthetic construct
  source 1..9: note = Seed: KLVVVGAVG (KRAS G12V)
RLVHVAAVI

SEQ ID NO: 50047 - protein, 9 aa, synthetic construct
  source 1..9: note = Seed: KLVVVGAVG (KRAS G12V)
RLVHVAAVL

SEQ ID NO: 50048 - protein, 9 aa, synthetic construct
  source 1..9: note = Seed: KLVVVGAVG (KRAS G12V)
RLVHVAAVM

SEQ ID NO: 50049 - protein, 9 aa, synthetic construct
  source 1..9: note = Seed: KLVVVGAVG (KRAS G12V)
RLVHVAAVN

SEQ ID NO: 50050 - protein, 9 aa, synthetic construct
  source 1..9: note = Seed: KLVVVGAVG (KRAS G12V)
RLVHVAAVQ

SEQ ID NO: 50051 - protein, 9 aa, synthetic construct
  source 1..9: note = Seed: KLVVVGAVG (KRAS G12V)
RLVHVAAVS

SEQ ID NO: 50052 - protein, 9 aa, synthetic construct
  source 1..9: note = Seed: KLVVVGAVG (KRAS G12V)
RLVHVAAVT

SEQ ID NO: 50053 - protein, 9 aa, synthetic construct
  source 1..9: note = Seed: KLVVVGAVG (KRAS G12V)
RLVHVAAVV

SEQ ID NO: 50054 - protein, 9 aa, synthetic construct
  source 1..9: note = Seed: KLVVVGAVG (KRAS G12V)
RLVHVIAVA

SEQ ID NO: 50055 - protein, 9 aa, synthetic construct
  source 1..9: note = Seed: KLVVVGAVG (KRAS G12V)
RLVHVIAVH

SEQ ID NO: 50056 - protein, 9 aa, synthetic construct
  source 1..9: note = Seed: KLVVVGAVG (KRAS G12V)
RLVHVIAVN

SEQ ID NO: 50057 - protein, 9 aa, synthetic construct
  source 1..9: note = Seed: KLVVVGAVG (KRAS G12V)
RLVHVIAVS

SEQ ID NO: 50058 - protein, 9 aa, synthetic construct
  source 1..9: note = Seed: KLVVVGAVG (KRAS G12V)
RLVHVLAVA

SEQ ID NO: 50059 - protein, 9 aa, synthetic construct
  source 1..9: note = Seed: KLVVVGAVG (KRAS G12V)
RLVHVLAVN

SEQ ID NO: 50060 - protein, 9 aa, synthetic construct
  source 1..9: note = Seed: KLVVVGAVG (KRAS G12V)
RLVHVLAVS

SEQ ID NO: 50061 - protein, 9 aa, synthetic construct
  source 1..9: note = Seed: KLVVVGAVG (KRAS G12V)
RLVHVPAVA

SEQ ID NO: 50062 - protein, 9 aa, synthetic construct
  source 1..9: note = Seed: KLVVVGAVG (KRAS G12V)
RLVHVPAVL

SEQ ID NO: 50063 - protein, 9 aa, synthetic construct
  source 1..9: note = Seed: KLVVVGAVG (KRAS G12V)
RLVHVPAVM

SEQ ID NO: 50064 - protein, 9 aa, synthetic construct
  source 1..9: note = Seed: KLVVVGAVG (KRAS G12V)
RLVHVPAVN

SEQ ID NO: 50065 - protein, 9 aa, synthetic construct
  source 1..9: note = Seed: KLVVVGAVG (KRAS G12V)
RLVHVPAVS

SEQ ID NO: 50066 - protein, 9 aa, synthetic construct
  source 1..9: note = Seed: KLVVVGAVG (KRAS G12V)
RLVHVPAVV

SEQ ID NO: 50067 - protein, 9 aa, synthetic construct
  source 1..9: note = Seed: KLVVVGAVG (KRAS G12V)
RLVHVVAVA

SEQ ID NO: 50068 - protein, 9 aa, synthetic construct
  source 1..9: note = Seed: KLVVVGAVG (KRAS G12V)
RLVHVVAVH

SEQ ID NO: 50069 - protein, 9 aa, synthetic construct
  source 1..9: note = Seed: KLVVVGAVG (KRAS G12V)
RLVHVVAVN

SEQ ID NO: 50070 - protein, 9 aa, synthetic construct
  source 1..9: note = Seed: KLVVVGAVG (KRAS G12V)
RLVHVVAVS

SEQ ID NO: 50071 - protein, 9 aa, synthetic construct
  source 1..9: note = Seed: KLVVVGAVG (KRAS G12V)
RLVIVAAVE

SEQ ID NO: 50072 - protein, 9 aa, synthetic construct
  source 1..9: note = Seed: KLVVVGAVG (KRAS G12V)
RLVIVAAVH

SEQ ID NO: 50073 - protein, 9 aa, synthetic construct
  source 1..9: note = Seed: KLVVVGAVG (KRAS G12V)
RLVIVAAVN

SEQ ID NO: 50074 - protein, 9 aa, synthetic construct
  source 1..9: note = Seed: KLVVVGAVG (KRAS G12V)
RLVIVAAVP

SEQ ID NO: 50075 - protein, 9 aa, synthetic construct
  source 1..9: note = Seed: KLVVVGAVG (KRAS G12V)
RLVIVPAVA

SEQ ID NO: 50076 - protein, 9 aa, synthetic construct
  source 1..9: note = Seed: KLVVVGAVG (KRAS G12V)
RLVIVPAVD

SEQ ID NO: 50077 - protein, 9 aa, synthetic construct
  source 1..9: note = Seed: KLVVVGAVG (KRAS G12V)
RLVIVPAVE

SEQ ID NO: 50078 - protein, 9 aa, synthetic construct
  source 1..9: note = Seed: KLVVVGAVG (KRAS G12V)
RLVIVPAVH

SEQ ID NO: 50079 - protein, 9 aa, synthetic construct
  source 1..9: note = Seed: KLVVVGAVG (KRAS G12V)
RLVIVPAVI

SEQ ID NO: 50080 - protein, 9 aa, synthetic construct
  source 1..9: note = Seed: KLVVVGAVG (KRAS G12V)
RLVIVPAVK

SEQ ID NO: 50081 - protein, 9 aa, synthetic construct
  source 1..9: note = Seed: KLVVVGAVG (KRAS G12V)
RLVIVPAVL

SEQ ID NO: 50082 - protein, 9 aa, synthetic construct
  source 1..9: note = Seed: KLVVVGAVG (KRAS G12V)
RLVIVPAVM

SEQ ID NO: 50083 - protein, 9 aa, synthetic construct
  source 1..9: note = Seed: KLVVVGAVG (KRAS G12V)
RLVIVPAVN

SEQ ID NO: 50084 - protein, 9 aa, synthetic construct
  source 1..9: note = Seed: KLVVVGAVG (KRAS G12V)
RLVIVPAVP

SEQ ID NO: 50085 - protein, 9 aa, synthetic construct
  source 1..9: note = Seed: KLVVVGAVG (KRAS G12V)
RLVIVPAVQ

SEQ ID NO: 50086 - protein, 9 aa, synthetic construct
  source 1..9: note = Seed: KLVVVGAVG (KRAS G12V)
RLVIVPAVR

SEQ ID NO: 50087 - protein, 9 aa, synthetic construct
  source 1..9: note = Seed: KLVVVGAVG (KRAS G12V)
RLVIVPAVS

SEQ ID NO: 50088 - protein, 9 aa, synthetic construct
  source 1..9: note = Seed: KLVVVGAVG (KRAS G12V)
RLVIVPAVT

SEQ ID NO: 50089 - protein, 9 aa, synthetic construct
  source 1..9: note = Seed: KLVVVGAVG (KRAS G12V)
RLVIVPAVV

SEQ ID NO: 50090 - protein, 9 aa, synthetic construct
  source 1..9: note = Seed: KLVVVGAVG (KRAS G12V)
RLVIVSAVH

SEQ ID NO: 50091 - protein, 9 aa, synthetic construct
  source 1..9: note = Seed: KLVVVGAVG (KRAS G12V)
RLVKVAAVA

SEQ ID NO: 50092 - protein, 9 aa, synthetic construct
  source 1..9: note = Seed: KLVVVGAVG (KRAS G12V)
RLVKVAAVH

SEQ ID NO: 50093 - protein, 9 aa, synthetic construct
  source 1..9: note = Seed: KLVVVGAVG (KRAS G12V)
RLVKVAAVM

SEQ ID NO: 50094 - protein, 9 aa, synthetic construct
  source 1..9: note = Seed: KLVVVGAVG (KRAS G12V)
RLVKVAAVN

SEQ ID NO: 50095 - protein, 9 aa, synthetic construct
  source 1..9: note = Seed: KLVVVGAVG (KRAS G12V)
RLVKVAAVS

SEQ ID NO: 50096 - protein, 9 aa, synthetic construct
  source 1..9: note = Seed: KLVVVGAVG (KRAS G12V)
RLVLVAAVH

SEQ ID NO: 50097 - protein, 9 aa, synthetic construct
  source 1..9: note = Seed: KLVVVGAVG (KRAS G12V)
RLVLVAAVN

SEQ ID NO: 50098 - protein, 9 aa, synthetic construct
  source 1..9: note = Seed: KLVVVGAVG (KRAS G12V)
RLVLVPAVA

SEQ ID NO: 50099 - protein, 9 aa, synthetic construct
  source 1..9: note = Seed: KLVVVGAVG (KRAS G12V)
RLVLVPAVE

SEQ ID NO: 50100 - protein, 9 aa, synthetic construct
  source 1..9: note = Seed: KLVVVGAVG (KRAS G12V)
RLVLVPAVH

SEQ ID NO: 50101 - protein, 9 aa, synthetic construct
  source 1..9: note = Seed: KLVVVGAVG (KRAS G12V)
RLVLVPAVM

SEQ ID NO: 50102 - protein, 9 aa, synthetic construct
  source 1..9: note = Seed: KLVVVGAVG (KRAS G12V)
RLVLVPAVN

SEQ ID NO: 50103 - protein, 9 aa, synthetic construct
  source 1..9: note = Seed: KLVVVGAVG (KRAS G12V)
RLVLVPAVQ

SEQ ID NO: 50104 - protein, 9 aa, synthetic construct
  source 1..9: note = Seed: KLVVVGAVG (KRAS G12V)
RLVLVPAVS

SEQ ID NO: 50105 - protein, 9 aa, synthetic construct
  source 1..9: note = Seed: KLVVVGAVG (KRAS G12V)
RLVLVPAVT

SEQ ID NO: 50106 - protein, 9 aa, synthetic construct
  source 1..9: note = Seed: KLVVVGAVG (KRAS G12V)
RLVLVPAVV

SEQ ID NO: 50107 - protein, 9 aa, synthetic construct
  source 1..9: note = Seed: KLVVVGAVG (KRAS G12V)
RLVMVAAVA

SEQ ID NO: 50108 - protein, 9 aa, synthetic construct
  source 1..9: note = Seed: KLVVVGAVG (KRAS G12V)
RLVMVAAVE

SEQ ID NO: 50109 - protein, 9 aa, synthetic construct
  source 1..9: note = Seed: KLVVVGAVG (KRAS G12V)
RLVMVAAVH

SEQ ID NO: 50110 - protein, 9 aa, synthetic construct
  source 1..9: note = Seed: KLVVVGAVG (KRAS G12V)
RLVMVAAVK

SEQ ID NO: 50111 - protein, 9 aa, synthetic construct
  source 1..9: note = Seed: KLVVVGAVG (KRAS G12V)
RLVMVAAVN

SEQ ID NO: 50112 - protein, 9 aa, synthetic construct
  source 1..9: note = Seed: KLVVVGAVG (KRAS G12V)
RLVMVAAVP

SEQ ID NO: 50113 - protein, 9 aa, synthetic construct
  source 1..9: note = Seed: KLVVVGAVG (KRAS G12V)
RLVMVAAVS

SEQ ID NO: 50114 - protein, 9 aa, synthetic construct
  source 1..9: note = Seed: KLVVVGAVG (KRAS G12V)
RLVMVPAVA

SEQ ID NO: 50115 - protein, 9 aa, synthetic construct
  source 1..9: note = Seed: KLVVVGAVG (KRAS G12V)
RLVMVPAVD

SEQ ID NO: 50116 - protein, 9 aa, synthetic construct
  source 1..9: note = Seed: KLVVVGAVG (KRAS G12V)
RLVMVPAVE

SEQ ID NO: 50117 - protein, 9 aa, synthetic construct
  source 1..9: note = Seed: KLVVVGAVG (KRAS G12V)
RLVMVPAVH

SEQ ID NO: 50118 - protein, 9 aa, synthetic construct
  source 1..9: note = Seed: KLVVVGAVG (KRAS G12V)
RLVMVPAVI

SEQ ID NO: 50119 - protein, 9 aa, synthetic construct
  source 1..9: note = Seed: KLVVVGAVG (KRAS G12V)
RLVMVPAVK

SEQ ID NO: 50120 - protein, 9 aa, synthetic construct
  source 1..9: note = Seed: KLVVVGAVG (KRAS G12V)
RLVMVPAVL

SEQ ID NO: 50121 - protein, 9 aa, synthetic construct
  source 1..9: note = Seed: KLVVVGAVG (KRAS G12V)
RLVMVPAVM

SEQ ID NO: 50122 - protein, 9 aa, synthetic construct
  source 1..9: note = Seed: KLVVVGAVG (KRAS G12V)
RLVMVPAVN

SEQ ID NO: 50123 - protein, 9 aa, synthetic construct
  source 1..9: note = Seed: KLVVVGAVG (KRAS G12V)
RLVMVPAVP

SEQ ID NO: 50124 - protein, 9 aa, synthetic construct
  source 1..9: note = Seed: KLVVVGAVG (KRAS G12V)
RLVMVPAVQ

SEQ ID NO: 50125 - protein, 9 aa, synthetic construct
  source 1..9: note = Seed: KLVVVGAVG (KRAS G12V)
RLVMVPAVR

SEQ ID NO: 50126 - protein, 9 aa, synthetic construct
  source 1..9: note = Seed: KLVVVGAVG (KRAS G12V)
RLVMVPAVS

SEQ ID NO: 50127 - protein, 9 aa, synthetic construct
  source 1..9: note = Seed: KLVVVGAVG (KRAS G12V)
RLVMVPAVT

SEQ ID NO: 50128 - protein, 9 aa, synthetic construct
  source 1..9: note = Seed: KLVVVGAVG (KRAS G12V)
RLVMVPAVV

SEQ ID NO: 50129 - protein, 9 aa, synthetic construct
  source 1..9: note = Seed: KLVVVGAVG (KRAS G12V)
RLVMVSAVH

SEQ ID NO: 50130 - protein, 9 aa, synthetic construct
  source 1..9: note = Seed: KLVVVGAVG (KRAS G12V)
RLVNVAAVA

SEQ ID NO: 50131 - protein, 9 aa, synthetic construct
  source 1..9: note = Seed: KLVVVGAVG (KRAS G12V)
RLVNVAAVH

SEQ ID NO: 50132 - protein, 9 aa, synthetic construct
  source 1..9: note = Seed: KLVVVGAVG (KRAS G12V)
RLVNVAAVI

SEQ ID NO: 50133 - protein, 9 aa, synthetic construct
  source 1..9: note = Seed: KLVVVGAVG (KRAS G12V)
RLVNVAAVL

SEQ ID NO: 50134 - protein, 9 aa, synthetic construct
  source 1..9: note = Seed: KLVVVGAVG (KRAS G12V)
RLVNVAAVM

SEQ ID NO: 50135 - protein, 9 aa, synthetic construct
  source 1..9: note = Seed: KLVVVGAVG (KRAS G12V)
RLVNVAAVN

SEQ ID NO: 50136 - protein, 9 aa, synthetic construct
  source 1..9: note = Seed: KLVVVGAVG (KRAS G12V)
RLVNVAAVS

SEQ ID NO: 50137 - protein, 9 aa, synthetic construct
  source 1..9: note = Seed: KLVVVGAVG (KRAS G12V)
RLVNVAAVT

SEQ ID NO: 50138 - protein, 9 aa, synthetic construct
  source 1..9: note = Seed: KLVVVGAVG (KRAS G12V)
RLVNVAAVV

SEQ ID NO: 50139 - protein, 9 aa, synthetic construct
  source 1..9: note = Seed: KLVVVGAVG (KRAS G12V)
RLVNVIAVN

SEQ ID NO: 50140 - protein, 9 aa, synthetic construct
  source 1..9: note = Seed: KLVVVGAVG (KRAS G12V)
RLVNVPAVA

SEQ ID NO: 50141 - protein, 9 aa, synthetic construct
  source 1..9: note = Seed: KLVVVGAVG (KRAS G12V)
RLVNVPAVS

SEQ ID NO: 50142 - protein, 9 aa, synthetic construct
  source 1..9: note = Seed: KLVVVGAVG (KRAS G12V)
RLVNVVAVN

SEQ ID NO: 50143 - protein, 9 aa, synthetic construct
  source 1..9: note = Seed: KLVVVGAVG (KRAS G12V)
RLVPVAAVA

SEQ ID NO: 50144 - protein, 9 aa, synthetic construct
  source 1..9: note = Seed: KLVVVGAVG (KRAS G12V)
RLVPVAAVD

SEQ ID NO: 50145 - protein, 9 aa, synthetic construct
  source 1..9: note = Seed: KLVVVGAVG (KRAS G12V)
RLVPVAAVE

SEQ ID NO: 50146 - protein, 9 aa, synthetic construct
  source 1..9: note = Seed: KLVVVGAVG (KRAS G12V)
RLVPVAAVF

SEQ ID NO: 50147 - protein, 9 aa, synthetic construct
  source 1..9: note = Seed: KLVVVGAVG (KRAS G12V)
RLVPVAAVH

SEQ ID NO: 50148 - protein, 9 aa, synthetic construct
  source 1..9: note = Seed: KLVVVGAVG (KRAS G12V)
RLVPVAAVI

SEQ ID NO: 50149 - protein, 9 aa, synthetic construct
  source 1..9: note = Seed: KLVVVGAVG (KRAS G12V)
RLVPVAAVK

SEQ ID NO: 50150 - protein, 9 aa, synthetic construct
  source 1..9: note = Seed: KLVVVGAVG (KRAS G12V)
RLVPVAAVL

SEQ ID NO: 50151 - protein, 9 aa, synthetic construct
  source 1..9: note = Seed: KLVVVGAVG (KRAS G12V)
RLVPVAAVM

SEQ ID NO: 50152 - protein, 9 aa, synthetic construct
  source 1..9: note = Seed: KLVVVGAVG (KRAS G12V)
RLVPVAAVN

SEQ ID NO: 50153 - protein, 9 aa, synthetic construct
  source 1..9: note = Seed: KLVVVGAVG (KRAS G12V)
RLVPVAAVP

SEQ ID NO: 50154 - protein, 9 aa, synthetic construct
  source 1..9: note = Seed: KLVVVGAVG (KRAS G12V)
RLVPVAAVQ

SEQ ID NO: 50155 - protein, 9 aa, synthetic construct
  source 1..9: note = Seed: KLVVVGAVG (KRAS G12V)
RLVPVAAVS

SEQ ID NO: 50156 - protein, 9 aa, synthetic construct
  source 1..9: note = Seed: KLVVVGAVG (KRAS G12V)
RLVPVAAVT

SEQ ID NO: 50157 - protein, 9 aa, synthetic construct
  source 1..9: note = Seed: KLVVVGAVG (KRAS G12V)
RLVPVAAVV

SEQ ID NO: 50158 - protein, 9 aa, synthetic construct
  source 1..9: note = Seed: KLVVVGAVG (KRAS G12V)
RLVPVAAVY

SEQ ID NO: 50159 - protein, 9 aa, synthetic construct
  source 1..9: note = Seed: KLVVVGAVG (KRAS G12V)
RLVPVIAVA

SEQ ID NO: 50160 - protein, 9 aa, synthetic construct
  source 1..9: note = Seed: KLVVVGAVG (KRAS G12V)
RLVPVIAVH

SEQ ID NO: 50161 - protein, 9 aa, synthetic construct
  source 1..9: note = Seed: KLVVVGAVG (KRAS G12V)
RLVPVIAVN

SEQ ID NO: 50162 - protein, 9 aa, synthetic construct
  source 1..9: note = Seed: KLVVVGAVG (KRAS G12V)
RLVPVIAVS

SEQ ID NO: 50163 - protein, 9 aa, synthetic construct
  source 1..9: note = Seed: KLVVVGAVG (KRAS G12V)
RLVPVLAVA

SEQ ID NO: 50164 - protein, 9 aa, synthetic construct
  source 1..9: note = Seed: KLVVVGAVG (KRAS G12V)
RLVPVLAVH

SEQ ID NO: 50165 - protein, 9 aa, synthetic construct
  source 1..9: note = Seed: KLVVVGAVG (KRAS G12V)
RLVPVLAVN

SEQ ID NO: 50166 - protein, 9 aa, synthetic construct
  source 1..9: note = Seed: KLVVVGAVG (KRAS G12V)
RLVPVLAVS

SEQ ID NO: 50167 - protein, 9 aa, synthetic construct
  source 1..9: note = Seed: KLVVVGAVG (KRAS G12V)
RLVPVPAVA

SEQ ID NO: 50168 - protein, 9 aa, synthetic construct
  source 1..9: note = Seed: KLVVVGAVG (KRAS G12V)
RLVPVPAVL

SEQ ID NO: 50169 - protein, 9 aa, synthetic construct
  source 1..9: note = Seed: KLVVVGAVG (KRAS G12V)
RLVPVPAVM

SEQ ID NO: 50170 - protein, 9 aa, synthetic construct
  source 1..9: note = Seed: KLVVVGAVG (KRAS G12V)
RLVPVVAVA

SEQ ID NO: 50171 - protein, 9 aa, synthetic construct
  source 1..9: note = Seed: KLVVVGAVG (KRAS G12V)
RLVPVVAVH

SEQ ID NO: 50172 - protein, 9 aa, synthetic construct
  source 1..9: note = Seed: KLVVVGAVG (KRAS G12V)
RLVPVVAVM

SEQ ID NO: 50173 - protein, 9 aa, synthetic construct
  source 1..9: note = Seed: KLVVVGAVG (KRAS G12V)
RLVPVVAVN

SEQ ID NO: 50174 - protein, 9 aa, synthetic construct
  source 1..9: note = Seed: KLVVVGAVG (KRAS G12V)
RLVPVVAVS

SEQ ID NO: 50175 - protein, 9 aa, synthetic construct
  source 1..9: note = Seed: KLVVVGAVG (KRAS G12V)
RLVQVAAVA

SEQ ID NO: 50176 - protein, 9 aa, synthetic construct
  source 1..9: note = Seed: KLVVVGAVG (KRAS G12V)
RLVQVAAVE

SEQ ID NO: 50177 - protein, 9 aa, synthetic construct
  source 1..9: note = Seed: KLVVVGAVG (KRAS G12V)
RLVQVAAVH

SEQ ID NO: 50178 - protein, 9 aa, synthetic construct
  source 1..9: note = Seed: KLVVVGAVG (KRAS G12V)
RLVQVAAVI

SEQ ID NO: 50179 - protein, 9 aa, synthetic construct
  source 1..9: note = Seed: KLVVVGAVG (KRAS G12V)
RLVQVAAVL

SEQ ID NO: 50180 - protein, 9 aa, synthetic construct
  source 1..9: note = Seed: KLVVVGAVG (KRAS G12V)
RLVQVAAVM

SEQ ID NO: 50181 - protein, 9 aa, synthetic construct
  source 1..9: note = Seed: KLVVVGAVG (KRAS G12V)
RLVQVAAVN

SEQ ID NO: 50182 - protein, 9 aa, synthetic construct
  source 1..9: note = Seed: KLVVVGAVG (KRAS G12V)
RLVQVAAVP

SEQ ID NO: 50183 - protein, 9 aa, synthetic construct
  source 1..9: note = Seed: KLVVVGAVG (KRAS G12V)
RLVQVAAVQ

SEQ ID NO: 50184 - protein, 9 aa, synthetic construct
  source 1..9: note = Seed: KLVVVGAVG (KRAS G12V)
RLVQVAAVS

SEQ ID NO: 50185 - protein, 9 aa, synthetic construct
  source 1..9: note = Seed: KLVVVGAVG (KRAS G12V)
RLVQVAAVT

SEQ ID NO: 50186 - protein, 9 aa, synthetic construct
  source 1..9: note = Seed: KLVVVGAVG (KRAS G12V)
RLVQVAAVV

SEQ ID NO: 50187 - protein, 9 aa, synthetic construct
  source 1..9: note = Seed: KLVVVGAVG (KRAS G12V)
RLVQVPAVA

SEQ ID NO: 50188 - protein, 9 aa, synthetic construct
  source 1..9: note = Seed: KLVVVGAVG (KRAS G12V)
RLVQVPAVH

SEQ ID NO: 50189 - protein, 9 aa, synthetic construct
  source 1..9: note = Seed: KLVVVGAVG (KRAS G12V)
RLVQVPAVI

SEQ ID NO: 50190 - protein, 9 aa, synthetic construct
  source 1..9: note = Seed: KLVVVGAVG (KRAS G12V)
RLVQVPAVL

SEQ ID NO: 50191 - protein, 9 aa, synthetic construct
  source 1..9: note = Seed: KLVVVGAVG (KRAS G12V)
RLVQVPAVM

SEQ ID NO: 50192 - protein, 9 aa, synthetic construct
  source 1..9: note = Seed: KLVVVGAVG (KRAS G12V)
RLVQVPAVN

SEQ ID NO: 50193 - protein, 9 aa, synthetic construct
  source 1..9: note = Seed: KLVVVGAVG (KRAS G12V)
RLVQVPAVS

SEQ ID NO: 50194 - protein, 9 aa, synthetic construct
  source 1..9: note = Seed: KLVVVGAVG (KRAS G12V)
RLVQVPAVV

SEQ ID NO: 50195 - protein, 9 aa, synthetic construct
  source 1..9: note = Seed: KLVVVGAVG (KRAS G12V)
RLVQVVAVH

SEQ ID NO: 50196 - protein, 9 aa, synthetic construct
  source 1..9: note = Seed: KLVVVGAVG (KRAS G12V)
RLVQVVAVN

SEQ ID NO: 50197 - protein, 9 aa, synthetic construct
  source 1..9: note = Seed: KLVVVGAVG (KRAS G12V)
RLVRVAAVN

SEQ ID NO: 50198 - protein, 9 aa, synthetic construct
  source 1..9: note = Seed: KLVVVGAVG (KRAS G12V)
RLVRVAAVS

SEQ ID NO: 50199 - protein, 9 aa, synthetic construct
  source 1..9: note = Seed: KLVVVGAVG (KRAS G12V)
RLVSVAAVA

SEQ ID NO: 50200 - protein, 9 aa, synthetic construct
  source 1..9: note = Seed: KLVVVGAVG (KRAS G12V)
RLVSVAAVD

SEQ ID NO: 50201 - protein, 9 aa, synthetic construct
  source 1..9: note = Seed: KLVVVGAVG (KRAS G12V)
RLVSVAAVE

SEQ ID NO: 50202 - protein, 9 aa, synthetic construct
  source 1..9: note = Seed: KLVVVGAVG (KRAS G12V)
RLVSVAAVF

SEQ ID NO: 50203 - protein, 9 aa, synthetic construct
  source 1..9: note = Seed: KLVVVGAVG (KRAS G12V)
RLVSVAAVG

SEQ ID NO: 50204 - protein, 9 aa, synthetic construct
  source 1..9: note = Seed: KLVVVGAVG (KRAS G12V)
RLVSVAAVH

SEQ ID NO: 50205 - protein, 9 aa, synthetic construct
  source 1..9: note = Seed: KLVVVGAVG (KRAS G12V)
RLVSVAAVI

SEQ ID NO: 50206 - protein, 9 aa, synthetic construct
  source 1..9: note = Seed: KLVVVGAVG (KRAS G12V)
RLVSVAAVK

SEQ ID NO: 50207 - protein, 9 aa, synthetic construct
  source 1..9: note = Seed: KLVVVGAVG (KRAS G12V)
RLVSVAAVL

SEQ ID NO: 50208 - protein, 9 aa, synthetic construct
  source 1..9: note = Seed: KLVVVGAVG (KRAS G12V)
RLVSVAAVM

SEQ ID NO: 50209 - protein, 9 aa, synthetic construct
  source 1..9: note = Seed: KLVVVGAVG (KRAS G12V)
RLVSVAAVN

SEQ ID NO: 50210 - protein, 9 aa, synthetic construct
  source 1..9: note = Seed: KLVVVGAVG (KRAS G12V)
RLVSVAAVP

SEQ ID NO: 50211 - protein, 9 aa, synthetic construct
  source 1..9: note = Seed: KLVVVGAVG (KRAS G12V)
RLVSVAAVQ

SEQ ID NO: 50212 - protein, 9 aa, synthetic construct
  source 1..9: note = Seed: KLVVVGAVG (KRAS G12V)
RLVSVAAVR

SEQ ID NO: 50213 - protein, 9 aa, synthetic construct
  source 1..9: note = Seed: KLVVVGAVG (KRAS G12V)
RLVSVAAVS

SEQ ID NO: 50214 - protein, 9 aa, synthetic construct
  source 1..9: note = Seed: KLVVVGAVG (KRAS G12V)
RLVSVAAVT

SEQ ID NO: 50215 - protein, 9 aa, synthetic construct
  source 1..9: note = Seed: KLVVVGAVG (KRAS G12V)
RLVSVAAVV

SEQ ID NO: 50216 - protein, 9 aa, synthetic construct
  source 1..9: note = Seed: KLVVVGAVG (KRAS G12V)
RLVSVAAVY

SEQ ID NO: 50217 - protein, 9 aa, synthetic construct
  source 1..9: note = Seed: KLVVVGAVG (KRAS G12V)
RLVSVGAVA

SEQ ID NO: 50218 - protein, 9 aa, synthetic construct
  source 1..9: note = Seed: KLVVVGAVG (KRAS G12V)
RLVSVGAVH

SEQ ID NO: 50219 - protein, 9 aa, synthetic construct
  source 1..9: note = Seed: KLVVVGAVG (KRAS G12V)
RLVSVGAVN

SEQ ID NO: 50220 - protein, 9 aa, synthetic construct
  source 1..9: note = Seed: KLVVVGAVG (KRAS G12V)
RLVSVGAVS

SEQ ID NO: 50221 - protein, 9 aa, synthetic construct
  source 1..9: note = Seed: KLVVVGAVG (KRAS G12V)
RLVSVIAVA

SEQ ID NO: 50222 - protein, 9 aa, synthetic construct
  source 1..9: note = Seed: KLVVVGAVG (KRAS G12V)
RLVSVIAVD

SEQ ID NO: 50223 - protein, 9 aa, synthetic construct
  source 1..9: note = Seed: KLVVVGAVG (KRAS G12V)
RLVSVIAVE

SEQ ID NO: 50224 - protein, 9 aa, synthetic construct
  source 1..9: note = Seed: KLVVVGAVG (KRAS G12V)
RLVSVIAVH

SEQ ID NO: 50225 - protein, 9 aa, synthetic construct
  source 1..9: note = Seed: KLVVVGAVG (KRAS G12V)
RLVSVIAVK

SEQ ID NO: 50226 - protein, 9 aa, synthetic construct
  source 1..9: note = Seed: KLVVVGAVG (KRAS G12V)
RLVSVIAVM

SEQ ID NO: 50227 - protein, 9 aa, synthetic construct
  source 1..9: note = Seed: KLVVVGAVG (KRAS G12V)
RLVSVIAVN

SEQ ID NO: 50228 - protein, 9 aa, synthetic construct
  source 1..9: note = Seed: KLVVVGAVG (KRAS G12V)
RLVSVIAVP

SEQ ID NO: 50229 - protein, 9 aa, synthetic construct
  source 1..9: note = Seed: KLVVVGAVG (KRAS G12V)
RLVSVIAVQ

SEQ ID NO: 50230 - protein, 9 aa, synthetic construct
  source 1..9: note = Seed: KLVVVGAVG (KRAS G12V)
RLVSVIAVR

SEQ ID NO: 50231 - protein, 9 aa, synthetic construct
  source 1..9: note = Seed: KLVVVGAVG (KRAS G12V)
RLVSVIAVS

SEQ ID NO: 50232 - protein, 9 aa, synthetic construct
  source 1..9: note = Seed: KLVVVGAVG (KRAS G12V)
RLVSVIAVT

SEQ ID NO: 50233 - protein, 9 aa, synthetic construct
  source 1..9: note = Seed: KLVVVGAVG (KRAS G12V)
RLVSVLAVA

SEQ ID NO: 50234 - protein, 9 aa, synthetic construct
  source 1..9: note = Seed: KLVVVGAVG (KRAS G12V)
RLVSVLAVD

SEQ ID NO: 50235 - protein, 9 aa, synthetic construct
  source 1..9: note = Seed: KLVVVGAVG (KRAS G12V)
RLVSVLAVE

SEQ ID NO: 50236 - protein, 9 aa, synthetic construct
  source 1..9: note = Seed: KLVVVGAVG (KRAS G12V)
RLVSVLAVH

SEQ ID NO: 50237 - protein, 9 aa, synthetic construct
  source 1..9: note = Seed: KLVVVGAVG (KRAS G12V)
RLVSVLAVK

SEQ ID NO: 50238 - protein, 9 aa, synthetic construct
  source 1..9: note = Seed: KLVVVGAVG (KRAS G12V)
RLVSVLAVN

SEQ ID NO: 50239 - protein, 9 aa, synthetic construct
  source 1..9: note = Seed: KLVVVGAVG (KRAS G12V)
RLVSVLAVP

SEQ ID NO: 50240 - protein, 9 aa, synthetic construct
  source 1..9: note = Seed: KLVVVGAVG (KRAS G12V)
RLVSVLAVS

SEQ ID NO: 50241 - protein, 9 aa, synthetic construct
  source 1..9: note = Seed: KLVVVGAVG (KRAS G12V)
RLVSVMAVA

SEQ ID NO: 50242 - protein, 9 aa, synthetic construct
  source 1..9: note = Seed: KLVVVGAVG (KRAS G12V)
RLVSVMAVE

SEQ ID NO: 50243 - protein, 9 aa, synthetic construct
  source 1..9: note = Seed: KLVVVGAVG (KRAS G12V)
RLVSVMAVH

SEQ ID NO: 50244 - protein, 9 aa, synthetic construct
  source 1..9: note = Seed: KLVVVGAVG (KRAS G12V)
RLVSVMAVK

SEQ ID NO: 50245 - protein, 9 aa, synthetic construct
  source 1..9: note = Seed: KLVVVGAVG (KRAS G12V)
RLVSVMAVN

SEQ ID NO: 50246 - protein, 9 aa, synthetic construct
  source 1..9: note = Seed: KLVVVGAVG (KRAS G12V)
RLVSVMAVS

SEQ ID NO: 50247 - protein, 9 aa, synthetic construct
  source 1..9: note = Seed: KLVVVGAVG (KRAS G12V)
RLVSVNAVN

SEQ ID NO: 50248 - protein, 9 aa, synthetic construct
  source 1..9: note = Seed: KLVVVGAVG (KRAS G12V)
RLVSVPAVA

SEQ ID NO: 50249 - protein, 9 aa, synthetic construct
  source 1..9: note = Seed: KLVVVGAVG (KRAS G12V)
RLVSVPAVC

SEQ ID NO: 50250 - protein, 9 aa, synthetic construct
  source 1..9: note = Seed: KLVVVGAVG (KRAS G12V)
RLVSVPAVD

SEQ ID NO: 50251 - protein, 9 aa, synthetic construct
  source 1..9: note = Seed: KLVVVGAVG (KRAS G12V)
RLVSVPAVE

SEQ ID NO: 50252 - protein, 9 aa, synthetic construct
  source 1..9: note = Seed: KLVVVGAVG (KRAS G12V)
RLVSVPAVF

SEQ ID NO: 50253 - protein, 9 aa, synthetic construct
  source 1..9: note = Seed: KLVVVGAVG (KRAS G12V)
RLVSVPAVG

SEQ ID NO: 50254 - protein, 9 aa, synthetic construct
  source 1..9: note = Seed: KLVVVGAVG (KRAS G12V)
RLVSVPAVH

SEQ ID NO: 50255 - protein, 9 aa, synthetic construct
  source 1..9: note = Seed: KLVVVGAVG (KRAS G12V)
RLVSVPAVI

SEQ ID NO: 50256 - protein, 9 aa, synthetic construct
  source 1..9: note = Seed: KLVVVGAVG (KRAS G12V)
RLVSVPAVK

SEQ ID NO: 50257 - protein, 9 aa, synthetic construct
  source 1..9: note = Seed: KLVVVGAVG (KRAS G12V)
RLVSVPAVL

SEQ ID NO: 50258 - protein, 9 aa, synthetic construct
  source 1..9: note = Seed: KLVVVGAVG (KRAS G12V)
RLVSVPAVM

SEQ ID NO: 50259 - protein, 9 aa, synthetic construct
  source 1..9: note = Seed: KLVVVGAVG (KRAS G12V)
RLVSVPAVN

SEQ ID NO: 50260 - protein, 9 aa, synthetic construct
  source 1..9: note = Seed: KLVVVGAVG (KRAS G12V)
RLVSVPAVP

SEQ ID NO: 50261 - protein, 9 aa, synthetic construct
  source 1..9: note = Seed: KLVVVGAVG (KRAS G12V)
RLVSVPAVQ

SEQ ID NO: 50262 - protein, 9 aa, synthetic construct
  source 1..9: note = Seed: KLVVVGAVG (KRAS G12V)
RLVSVPAVR

SEQ ID NO: 50263 - protein, 9 aa, synthetic construct
  source 1..9: note = Seed: KLVVVGAVG (KRAS G12V)
RLVSVPAVS

SEQ ID NO: 50264 - protein, 9 aa, synthetic construct
  source 1..9: note = Seed: KLVVVGAVG (KRAS G12V)
RLVSVPAVT

SEQ ID NO: 50265 - protein, 9 aa, synthetic construct
  source 1..9: note = Seed: KLVVVGAVG (KRAS G12V)
RLVSVPAVV

SEQ ID NO: 50266 - protein, 9 aa, synthetic construct
  source 1..9: note = Seed: KLVVVGAVG (KRAS G12V)
RLVSVPAVY

SEQ ID NO: 50267 - protein, 9 aa, synthetic construct
  source 1..9: note = Seed: KLVVVGAVG (KRAS G12V)
RLVSVSAVA

SEQ ID NO: 50268 - protein, 9 aa, synthetic construct
  source 1..9: note = Seed: KLVVVGAVG (KRAS G12V)
RLVSVSAVE

SEQ ID NO: 50269 - protein, 9 aa, synthetic construct
  source 1..9: note = Seed: KLVVVGAVG (KRAS G12V)
RLVSVSAVH

SEQ ID NO: 50270 - protein, 9 aa, synthetic construct
  source 1..9: note = Seed: KLVVVGAVG (KRAS G12V)
RLVSVSAVI

SEQ ID NO: 50271 - protein, 9 aa, synthetic construct
  source 1..9: note = Seed: KLVVVGAVG (KRAS G12V)
RLVSVSAVL

SEQ ID NO: 50272 - protein, 9 aa, synthetic construct
  source 1..9: note = Seed: KLVVVGAVG (KRAS G12V)
RLVSVSAVM

SEQ ID NO: 50273 - protein, 9 aa, synthetic construct
  source 1..9: note = Seed: KLVVVGAVG (KRAS G12V)
RLVSVSAVN

SEQ ID NO: 50274 - protein, 9 aa, synthetic construct
  source 1..9: note = Seed: KLVVVGAVG (KRAS G12V)
RLVSVSAVS

SEQ ID NO: 50275 - protein, 9 aa, synthetic construct
  source 1..9: note = Seed: KLVVVGAVG (KRAS G12V)
RLVSVSAVT

SEQ ID NO: 50276 - protein, 9 aa, synthetic construct
  source 1..9: note = Seed: KLVVVGAVG (KRAS G12V)
RLVSVSAVV

SEQ ID NO: 50277 - protein, 9 aa, synthetic construct
  source 1..9: note = Seed: KLVVVGAVG (KRAS G12V)
RLVSVTAVA

SEQ ID NO: 50278 - protein, 9 aa, synthetic construct
  source 1..9: note = Seed: KLVVVGAVG (KRAS G12V)
RLVSVTAVH

SEQ ID NO: 50279 - protein, 9 aa, synthetic construct
  source 1..9: note = Seed: KLVVVGAVG (KRAS G12V)
RLVSVTAVM

SEQ ID NO: 50280 - protein, 9 aa, synthetic construct
  source 1..9: note = Seed: KLVVVGAVG (KRAS G12V)
RLVSVTAVN

SEQ ID NO: 50281 - protein, 9 aa, synthetic construct
  source 1..9: note = Seed: KLVVVGAVG (KRAS G12V)
RLVSVTAVS

SEQ ID NO: 50282 - protein, 9 aa, synthetic construct
  source 1..9: note = Seed: KLVVVGAVG (KRAS G12V)
RLVSVTAVT

SEQ ID NO: 50283 - protein, 9 aa, synthetic construct
  source 1..9: note = Seed: KLVVVGAVG (KRAS G12V)
RLVSVTAVV

SEQ ID NO: 50284 - protein, 9 aa, synthetic construct
  source 1..9: note = Seed: KLVVVGAVG (KRAS G12V)
RLVSVVAVA

SEQ ID NO: 50285 - protein, 9 aa, synthetic construct
  source 1..9: note = Seed: KLVVVGAVG (KRAS G12V)
RLVSVVAVD

SEQ ID NO: 50286 - protein, 9 aa, synthetic construct
  source 1..9: note = Seed: KLVVVGAVG (KRAS G12V)
RLVSVVAVE

SEQ ID NO: 50287 - protein, 9 aa, synthetic construct
  source 1..9: note = Seed: KLVVVGAVG (KRAS G12V)
RLVSVVAVH

SEQ ID NO: 50288 - protein, 9 aa, synthetic construct
  source 1..9: note = Seed: KLVVVGAVG (KRAS G12V)
RLVSVVAVK

SEQ ID NO: 50289 - protein, 9 aa, synthetic construct
  source 1..9: note = Seed: KLVVVGAVG (KRAS G12V)
RLVSVVAVM

SEQ ID NO: 50290 - protein, 9 aa, synthetic construct
  source 1..9: note = Seed: KLVVVGAVG (KRAS G12V)
RLVSVVAVN

SEQ ID NO: 50291 - protein, 9 aa, synthetic construct
  source 1..9: note = Seed: KLVVVGAVG (KRAS G12V)
RLVSVVAVP

SEQ ID NO: 50292 - protein, 9 aa, synthetic construct
  source 1..9: note = Seed: KLVVVGAVG (KRAS G12V)
RLVSVVAVQ

SEQ ID NO: 50293 - protein, 9 aa, synthetic construct
  source 1..9: note = Seed: KLVVVGAVG (KRAS G12V)
RLVSVVAVR

SEQ ID NO: 50294 - protein, 9 aa, synthetic construct
  source 1..9: note = Seed: KLVVVGAVG (KRAS G12V)
RLVSVVAVS

SEQ ID NO: 50295 - protein, 9 aa, synthetic construct
  source 1..9: note = Seed: KLVVVGAVG (KRAS G12V)
RLVSVVAVT

SEQ ID NO: 50296 - protein, 9 aa, synthetic construct
  source 1..9: note = Seed: KLVVVGAVG (KRAS G12V)
RLVSVVAVV

SEQ ID NO: 50297 - protein, 9 aa, synthetic construct
  source 1..9: note = Seed: KLVVVGAVG (KRAS G12V)
RLVTVAAVA

SEQ ID NO: 50298 - protein, 9 aa, synthetic construct
  source 1..9: note = Seed: KLVVVGAVG (KRAS G12V)
RLVTVAAVD

SEQ ID NO: 50299 - protein, 9 aa, synthetic construct
  source 1..9: note = Seed: KLVVVGAVG (KRAS G12V)
RLVTVAAVE

SEQ ID NO: 50300 - protein, 9 aa, synthetic construct
  source 1..9: note = Seed: KLVVVGAVG (KRAS G12V)
RLVTVAAVG

SEQ ID NO: 50301 - protein, 9 aa, synthetic construct
  source 1..9: note = Seed: KLVVVGAVG (KRAS G12V)
RLVTVAAVH

SEQ ID NO: 50302 - protein, 9 aa, synthetic construct
  source 1..9: note = Seed: KLVVVGAVG (KRAS G12V)
RLVTVAAVI

SEQ ID NO: 50303 - protein, 9 aa, synthetic construct
  source 1..9: note = Seed: KLVVVGAVG (KRAS G12V)
RLVTVAAVK

SEQ ID NO: 50304 - protein, 9 aa, synthetic construct
  source 1..9: note = Seed: KLVVVGAVG (KRAS G12V)
RLVTVAAVL

SEQ ID NO: 50305 - protein, 9 aa, synthetic construct
  source 1..9: note = Seed: KLVVVGAVG (KRAS G12V)
RLVTVAAVM

SEQ ID NO: 50306 - protein, 9 aa, synthetic construct
  source 1..9: note = Seed: KLVVVGAVG (KRAS G12V)
RLVTVAAVN

SEQ ID NO: 50307 - protein, 9 aa, synthetic construct
  source 1..9: note = Seed: KLVVVGAVG (KRAS G12V)
RLVTVAAVP

SEQ ID NO: 50308 - protein, 9 aa, synthetic construct
  source 1..9: note = Seed: KLVVVGAVG (KRAS G12V)
RLVTVAAVQ

SEQ ID NO: 50309 - protein, 9 aa, synthetic construct
  source 1..9: note = Seed: KLVVVGAVG (KRAS G12V)
RLVTVAAVR

SEQ ID NO: 50310 - protein, 9 aa, synthetic construct
  source 1..9: note = Seed: KLVVVGAVG (KRAS G12V)
RLVTVAAVS

SEQ ID NO: 50311 - protein, 9 aa, synthetic construct
  source 1..9: note = Seed: KLVVVGAVG (KRAS G12V)
RLVTVAAVT

SEQ ID NO: 50312 - protein, 9 aa, synthetic construct
  source 1..9: note = Seed: KLVVVGAVG (KRAS G12V)
RLVTVAAVV

SEQ ID NO: 50313 - protein, 9 aa, synthetic construct
  source 1..9: note = Seed: KLVVVGAVG (KRAS G12V)
RLVTVAAVY

SEQ ID NO: 50314 - protein, 9 aa, synthetic construct
  source 1..9: note = Seed: KLVVVGAVG (KRAS G12V)
RLVTVGAVN

SEQ ID NO: 50315 - protein, 9 aa, synthetic construct
  source 1..9: note = Seed: KLVVVGAVG (KRAS G12V)
RLVTVGAVS

SEQ ID NO: 50316 - protein, 9 aa, synthetic construct
  source 1..9: note = Seed: KLVVVGAVG (KRAS G12V)
RLVTVIAVE

SEQ ID NO: 50317 - protein, 9 aa, synthetic construct
  source 1..9: note = Seed: KLVVVGAVG (KRAS G12V)
RLVTVIAVH

SEQ ID NO: 50318 - protein, 9 aa, synthetic construct
  source 1..9: note = Seed: KLVVVGAVG (KRAS G12V)
RLVTVIAVN

SEQ ID NO: 50319 - protein, 9 aa, synthetic construct
  source 1..9: note = Seed: KLVVVGAVG (KRAS G12V)
RLVTVLAVH

SEQ ID NO: 50320 - protein, 9 aa, synthetic construct
  source 1..9: note = Seed: KLVVVGAVG (KRAS G12V)
RLVTVLAVN

SEQ ID NO: 50321 - protein, 9 aa, synthetic construct
  source 1..9: note = Seed: KLVVVGAVG (KRAS G12V)
RLVTVMAVH

SEQ ID NO: 50322 - protein, 9 aa, synthetic construct
  source 1..9: note = Seed: KLVVVGAVG (KRAS G12V)
RLVTVMAVN

SEQ ID NO: 50323 - protein, 9 aa, synthetic construct
  source 1..9: note = Seed: KLVVVGAVG (KRAS G12V)
RLVTVPAVA

SEQ ID NO: 50324 - protein, 9 aa, synthetic construct
  source 1..9: note = Seed: KLVVVGAVG (KRAS G12V)
RLVTVPAVD

SEQ ID NO: 50325 - protein, 9 aa, synthetic construct
  source 1..9: note = Seed: KLVVVGAVG (KRAS G12V)
RLVTVPAVE

SEQ ID NO: 50326 - protein, 9 aa, synthetic construct
  source 1..9: note = Seed: KLVVVGAVG (KRAS G12V)
RLVTVPAVF

SEQ ID NO: 50327 - protein, 9 aa, synthetic construct
  source 1..9: note = Seed: KLVVVGAVG (KRAS G12V)
RLVTVPAVG

SEQ ID NO: 50328 - protein, 9 aa, synthetic construct
  source 1..9: note = Seed: KLVVVGAVG (KRAS G12V)
RLVTVPAVH

SEQ ID NO: 50329 - protein, 9 aa, synthetic construct
  source 1..9: note = Seed: KLVVVGAVG (KRAS G12V)
RLVTVPAVI

SEQ ID NO: 50330 - protein, 9 aa, synthetic construct
  source 1..9: note = Seed: KLVVVGAVG (KRAS G12V)
RLVTVPAVK

SEQ ID NO: 50331 - protein, 9 aa, synthetic construct
  source 1..9: note = Seed: KLVVVGAVG (KRAS G12V)
RLVTVPAVL

SEQ ID NO: 50332 - protein, 9 aa, synthetic construct
  source 1..9: note = Seed: KLVVVGAVG (KRAS G12V)
RLVTVPAVM

SEQ ID NO: 50333 - protein, 9 aa, synthetic construct
  source 1..9: note = Seed: KLVVVGAVG (KRAS G12V)
RLVTVPAVN

SEQ ID NO: 50334 - protein, 9 aa, synthetic construct
  source 1..9: note = Seed: KLVVVGAVG (KRAS G12V)
RLVTVPAVP

SEQ ID NO: 50335 - protein, 9 aa, synthetic construct
  source 1..9: note = Seed: KLVVVGAVG (KRAS G12V)
RLVTVPAVQ

SEQ ID NO: 50336 - protein, 9 aa, synthetic construct
  source 1..9: note = Seed: KLVVVGAVG (KRAS G12V)
RLVTVPAVR

SEQ ID NO: 50337 - protein, 9 aa, synthetic construct
  source 1..9: note = Seed: KLVVVGAVG (KRAS G12V)
RLVTVPAVS

SEQ ID NO: 50338 - protein, 9 aa, synthetic construct
  source 1..9: note = Seed: KLVVVGAVG (KRAS G12V)
RLVTVPAVT

SEQ ID NO: 50339 - protein, 9 aa, synthetic construct
  source 1..9: note = Seed: KLVVVGAVG (KRAS G12V)
RLVTVPAVV

SEQ ID NO: 50340 - protein, 9 aa, synthetic construct
  source 1..9: note = Seed: KLVVVGAVG (KRAS G12V)
RLVTVPAVY

SEQ ID NO: 50341 - protein, 9 aa, synthetic construct
  source 1..9: note = Seed: KLVVVGAVG (KRAS G12V)
RLVTVSAVA

SEQ ID NO: 50342 - protein, 9 aa, synthetic construct
  source 1..9: note = Seed: KLVVVGAVG (KRAS G12V)
RLVTVSAVH

SEQ ID NO: 50343 - protein, 9 aa, synthetic construct
  source 1..9: note = Seed: KLVVVGAVG (KRAS G12V)
RLVTVSAVM

SEQ ID NO: 50344 - protein, 9 aa, synthetic construct
  source 1..9: note = Seed: KLVVVGAVG (KRAS G12V)
RLVTVSAVN

SEQ ID NO: 50345 - protein, 9 aa, synthetic construct
  source 1..9: note = Seed: KLVVVGAVG (KRAS G12V)
RLVTVSAVS

SEQ ID NO: 50346 - protein, 9 aa, synthetic construct
  source 1..9: note = Seed: KLVVVGAVG (KRAS G12V)
RLVTVSAVT

SEQ ID NO: 50347 - protein, 9 aa, synthetic construct
  source 1..9: note = Seed: KLVVVGAVG (KRAS G12V)
RLVTVTAVA

SEQ ID NO: 50348 - protein, 9 aa, synthetic construct
  source 1..9: note = Seed: KLVVVGAVG (KRAS G12V)
RLVTVTAVH

SEQ ID NO: 50349 - protein, 9 aa, synthetic construct
  source 1..9: note = Seed: KLVVVGAVG (KRAS G12V)
RLVTVTAVN

SEQ ID NO: 50350 - protein, 9 aa, synthetic construct
  source 1..9: note = Seed: KLVVVGAVG (KRAS G12V)
RLVTVTAVS

SEQ ID NO: 50351 - protein, 9 aa, synthetic construct
  source 1..9: note = Seed: KLVVVGAVG (KRAS G12V)
RLVTVVAVH

SEQ ID NO: 50352 - protein, 9 aa, synthetic construct
  source 1..9: note = Seed: KLVVVGAVG (KRAS G12V)
RLVTVVAVN

SEQ ID NO: 50353 - protein, 9 aa, synthetic construct
  source 1..9: note = Seed: KLVVVGAVG (KRAS G12V)
RLVTVVAVS

SEQ ID NO: 50354 - protein, 9 aa, synthetic construct
  source 1..9: note = Seed: KLVVVGAVG (KRAS G12V)
RLVVVAAVE

SEQ ID NO: 50355 - protein, 9 aa, synthetic construct
  source 1..9: note = Seed: KLVVVGAVG (KRAS G12V)
RLVVVAAVH

SEQ ID NO: 50356 - protein, 9 aa, synthetic construct
  source 1..9: note = Seed: KLVVVGAVG (KRAS G12V)
RLVVVAAVN

SEQ ID NO: 50357 - protein, 9 aa, synthetic construct
  source 1..9: note = Seed: KLVVVGAVG (KRAS G12V)
RLVVVPAVA

SEQ ID NO: 50358 - protein, 9 aa, synthetic construct
  source 1..9: note = Seed: KLVVVGAVG (KRAS G12V)
RLVVVPAVD

SEQ ID NO: 50359 - protein, 9 aa, synthetic construct
  source 1..9: note = Seed: KLVVVGAVG (KRAS G12V)
RLVVVPAVE

SEQ ID NO: 50360 - protein, 9 aa, synthetic construct
  source 1..9: note = Seed: KLVVVGAVG (KRAS G12V)
RLVVVPAVH

SEQ ID NO: 50361 - protein, 9 aa, synthetic construct
  source 1..9: note = Seed: KLVVVGAVG (KRAS G12V)
RLVVVPAVI

SEQ ID NO: 50362 - protein, 9 aa, synthetic construct
  source 1..9: note = Seed: KLVVVGAVG (KRAS G12V)
RLVVVPAVK

SEQ ID NO: 50363 - protein, 9 aa, synthetic construct
  source 1..9: note = Seed: KLVVVGAVG (KRAS G12V)
RLVVVPAVL

SEQ ID NO: 50364 - protein, 9 aa, synthetic construct
  source 1..9: note = Seed: KLVVVGAVG (KRAS G12V)
RLVVVPAVM

SEQ ID NO: 50365 - protein, 9 aa, synthetic construct
  source 1..9: note = Seed: KLVVVGAVG (KRAS G12V)
RLVVVPAVN

SEQ ID NO: 50366 - protein, 9 aa, synthetic construct
  source 1..9: note = Seed: KLVVVGAVG (KRAS G12V)
RLVVVPAVP

SEQ ID NO: 50367 - protein, 9 aa, synthetic construct
  source 1..9: note = Seed: KLVVVGAVG (KRAS G12V)
RLVVVPAVQ

SEQ ID NO: 50368 - protein, 9 aa, synthetic construct
  source 1..9: note = Seed: KLVVVGAVG (KRAS G12V)
RLVVVPAVR

SEQ ID NO: 50369 - protein, 9 aa, synthetic construct
  source 1..9: note = Seed: KLVVVGAVG (KRAS G12V)
RLVVVPAVS

SEQ ID NO: 50370 - protein, 9 aa, synthetic construct
  source 1..9: note = Seed: KLVVVGAVG (KRAS G12V)
RLVVVPAVT

SEQ ID NO: 50371 - protein, 9 aa, synthetic construct
  source 1..9: note = Seed: KLVVVGAVG (KRAS G12V)
RLVVVPAVV

SEQ ID NO: 50372 - protein, 9 aa, synthetic construct
  source 1..9: note = Seed: KLVVVGAVG (KRAS G12V)
RLVWVPAVA

SEQ ID NO: 50373 - protein, 9 aa, synthetic construct
  source 1..9: note = Seed: KLVVVGAVG (KRAS G12V)
RLVWVPAVH

SEQ ID NO: 50374 - protein, 9 aa, synthetic construct
  source 1..9: note = Seed: KLVVVGAVG (KRAS G12V)
RLVWVPAVM

SEQ ID NO: 50375 - protein, 9 aa, synthetic construct
  source 1..9: note = Seed: KLVVVGAVG (KRAS G12V)
RLVWVPAVN

SEQ ID NO: 50376 - protein, 9 aa, synthetic construct
  source 1..9: note = Seed: KLVVVGAVG (KRAS G12V)
RLVWVPAVR

SEQ ID NO: 50377 - protein, 9 aa, synthetic construct
  source 1..9: note = Seed: KLVVVGAVG (KRAS G12V)
RLVWVPAVS

SEQ ID NO: 50378 - protein, 9 aa, synthetic construct
  source 1..9: note = Seed: KLVVVGAVG (KRAS G12V)
YLVAVPAVN

SEQ ID NO: 50379 - protein, 9 aa, synthetic construct
  source 1..9: note = Seed: KLVVVGAVG (KRAS G12V)
YLVSVPAVN

SEQ ID NO: 50380 - protein, 9 aa, synthetic construct
  source 1..9: note = Seed: LVVVGAVGV (KRAS G12V)
AVVIGAVGA

SEQ ID NO: 50381 - protein, 9 aa, synthetic construct
  source 1..9: note = Seed: LVVVGAVGV (KRAS G12V)
AVVIGAVGI

SEQ ID NO: 50382 - protein, 9 aa, synthetic construct
  source 1..9: note = Seed: LVVVGAVGV (KRAS G12V)
AVVIGAVGL

SEQ ID NO: 50383 - protein, 9 aa, synthetic construct
  source 1..9: note = Seed: LVVVGAVGV (KRAS G12V)
AVVIGAVGM

SEQ ID NO: 50384 - protein, 9 aa, synthetic construct
  source 1..9: note = Seed: LVVVGAVGV (KRAS G12V)
AVVIGAVGV

SEQ ID NO: 50385 - protein, 9 aa, synthetic construct
  source 1..9: note = Seed: LVVVGAVGV (KRAS G12V)
AVVIGPVGI

SEQ ID NO: 50386 - protein, 9 aa, synthetic construct
  source 1..9: note = Seed: LVVVGAVGV (KRAS G12V)
AVVIGPVGV

SEQ ID NO: 50387 - protein, 9 aa, synthetic construct
  source 1..9: note = Seed: LVVVGAVGV (KRAS G12V)
AVVIGRVGR

SEQ ID NO: 50388 - protein, 9 aa, synthetic construct
  source 1..9: note = Seed: LVVVGAVGV (KRAS G12V)
AVVIGSVGL

SEQ ID NO: 50389 - protein, 9 aa, synthetic construct
  source 1..9: note = Seed: LVVVGAVGV (KRAS G12V)
AVVLGAVGA

SEQ ID NO: 50390 - protein, 9 aa, synthetic construct
  source 1..9: note = Seed: LVVVGAVGV (KRAS G12V)
AVVLGAVGI

SEQ ID NO: 50391 - protein, 9 aa, synthetic construct
  source 1..9: note = Seed: LVVVGAVGV (KRAS G12V)
AVVLGAVGL

SEQ ID NO: 50392 - protein, 9 aa, synthetic construct
  source 1..9: note = Seed: LVVVGAVGV (KRAS G12V)
AVVLGAVGM

SEQ ID NO: 50393 - protein, 9 aa, synthetic construct
  source 1..9: note = Seed: LVVVGAVGV (KRAS G12V)
AVVLGAVGV

SEQ ID NO: 50394 - protein, 9 aa, synthetic construct
  source 1..9: note = Seed: LVVVGAVGV (KRAS G12V)
AVVLGGVGA

SEQ ID NO: 50395 - protein, 9 aa, synthetic construct
  source 1..9: note = Seed: LVVVGAVGV (KRAS G12V)
AVVLGGVGI

SEQ ID NO: 50396 - protein, 9 aa, synthetic construct
  source 1..9: note = Seed: LVVVGAVGV (KRAS G12V)
AVVLGGVGL

SEQ ID NO: 50397 - protein, 9 aa, synthetic construct
  source 1..9: note = Seed: LVVVGAVGV (KRAS G12V)
AVVLGGVGV

SEQ ID NO: 50398 - protein, 9 aa, synthetic construct
  source 1..9: note = Seed: LVVVGAVGV (KRAS G12V)
AVVLGNVGL

SEQ ID NO: 50399 - protein, 9 aa, synthetic construct
  source 1..9: note = Seed: LVVVGAVGV (KRAS G12V)
AVVLGPVGI

SEQ ID NO: 50400 - protein, 9 aa, synthetic construct
  source 1..9: note = Seed: LVVVGAVGV (KRAS G12V)
AVVLGPVGL

SEQ ID NO: 50401 - protein, 9 aa, synthetic construct
  source 1..9: note = Seed: LVVVGAVGV (KRAS G12V)
AVVLGPVGM

SEQ ID NO: 50402 - protein, 9 aa, synthetic construct
  source 1..9: note = Seed: LVVVGAVGV (KRAS G12V)
AVVLGPVGV

SEQ ID NO: 50403 - protein, 9 aa, synthetic construct
  source 1..9: note = Seed: LVVVGAVGV (KRAS G12V)
AVVLGRVGR

SEQ ID NO: 50404 - protein, 9 aa, synthetic construct
  source 1..9: note = Seed: LVVVGAVGV (KRAS G12V)
AVVLGSVGA

SEQ ID NO: 50405 - protein, 9 aa, synthetic construct
  source 1..9: note = Seed: LVVVGAVGV (KRAS G12V)
AVVLGSVGI

SEQ ID NO: 50406 - protein, 9 aa, synthetic construct
  source 1..9: note = Seed: LVVVGAVGV (KRAS G12V)
AVVLGSVGL

SEQ ID NO: 50407 - protein, 9 aa, synthetic construct
  source 1..9: note = Seed: LVVVGAVGV (KRAS G12V)
AVVLGSVGM

SEQ ID NO: 50408 - protein, 9 aa, synthetic construct
  source 1..9: note = Seed: LVVVGAVGV (KRAS G12V)
AVVLGSVGV

SEQ ID NO: 50409 - protein, 9 aa, synthetic construct
  source 1..9: note = Seed: LVVVGAVGV (KRAS G12V)
AVVMGAVGA

SEQ ID NO: 50410 - protein, 9 aa, synthetic construct
  source 1..9: note = Seed: LVVVGAVGV (KRAS G12V)
AVVMGAVGI

SEQ ID NO: 50411 - protein, 9 aa, synthetic construct
  source 1..9: note = Seed: LVVVGAVGV (KRAS G12V)
AVVMGAVGL

SEQ ID NO: 50412 - protein, 9 aa, synthetic construct
  source 1..9: note = Seed: LVVVGAVGV (KRAS G12V)
AVVMGAVGM

SEQ ID NO: 50413 - protein, 9 aa, synthetic construct
  source 1..9: note = Seed: LVVVGAVGV (KRAS G12V)
AVVMGAVGV

SEQ ID NO: 50414 - protein, 9 aa, synthetic construct
  source 1..9: note = Seed: LVVVGAVGV (KRAS G12V)
AVVMGGVGI

SEQ ID NO: 50415 - protein, 9 aa, synthetic construct
  source 1..9: note = Seed: LVVVGAVGV (KRAS G12V)
AVVMGGVGL

SEQ ID NO: 50416 - protein, 9 aa, synthetic construct
  source 1..9: note = Seed: LVVVGAVGV (KRAS G12V)
AVVMGGVGV

SEQ ID NO: 50417 - protein, 9 aa, synthetic construct
  source 1..9: note = Seed: LVVVGAVGV (KRAS G12V)
AVVMGNVGL

SEQ ID NO: 50418 - protein, 9 aa, synthetic construct
  source 1..9: note = Seed: LVVVGAVGV (KRAS G12V)
AVVMGPVGA

SEQ ID NO: 50419 - protein, 9 aa, synthetic construct
  source 1..9: note = Seed: LVVVGAVGV (KRAS G12V)
AVVMGPVGI

SEQ ID NO: 50420 - protein, 9 aa, synthetic construct
  source 1..9: note = Seed: LVVVGAVGV (KRAS G12V)
AVVMGPVGL

SEQ ID NO: 50421 - protein, 9 aa, synthetic construct
  source 1..9: note = Seed: LVVVGAVGV (KRAS G12V)
AVVMGPVGM

SEQ ID NO: 50422 - protein, 9 aa, synthetic construct
  source 1..9: note = Seed: LVVVGAVGV (KRAS G12V)
AVVMGPVGV

SEQ ID NO: 50423 - protein, 9 aa, synthetic construct
  source 1..9: note = Seed: LVVVGAVGV (KRAS G12V)
AVVMGRVGR

SEQ ID NO: 50424 - protein, 9 aa, synthetic construct
  source 1..9: note = Seed: LVVVGAVGV (KRAS G12V)
AVVMGSVGA

SEQ ID NO: 50425 - protein, 9 aa, synthetic construct
  source 1..9: note = Seed: LVVVGAVGV (KRAS G12V)
AVVMGSVGI

SEQ ID NO: 50426 - protein, 9 aa, synthetic construct
  source 1..9: note = Seed: LVVVGAVGV (KRAS G12V)
AVVMGSVGL

SEQ ID NO: 50427 - protein, 9 aa, synthetic construct
  source 1..9: note = Seed: LVVVGAVGV (KRAS G12V)
AVVMGSVGM

SEQ ID NO: 50428 - protein, 9 aa, synthetic construct
  source 1..9: note = Seed: LVVVGAVGV (KRAS G12V)
AVVMGSVGV

SEQ ID NO: 50429 - protein, 9 aa, synthetic construct
  source 1..9: note = Seed: LVVVGAVGV (KRAS G12V)
AVVMGTVGL

SEQ ID NO: 50430 - protein, 9 aa, synthetic construct
  source 1..9: note = Seed: LVVVGAVGV (KRAS G12V)
AVVNGAVGI

SEQ ID NO: 50431 - protein, 9 aa, synthetic construct
  source 1..9: note = Seed: LVVVGAVGV (KRAS G12V)
AVVNGIVGI

SEQ ID NO: 50432 - protein, 9 aa, synthetic construct
  source 1..9: note = Seed: LVVVGAVGV (KRAS G12V)
AVVNGSVGI

SEQ ID NO: 50433 - protein, 9 aa, synthetic construct
  source 1..9: note = Seed: LVVVGAVGV (KRAS G12V)
AVVTGSVGI

SEQ ID NO: 50434 - protein, 9 aa, synthetic construct
  source 1..9: note = Seed: LVVVGAVGV (KRAS G12V)
AVVTGSVGL

SEQ ID NO: 50435 - protein, 9 aa, synthetic construct
  source 1..9: note = Seed: LVVVGAVGV (KRAS G12V)
AVVVGAVGI

SEQ ID NO: 50436 - protein, 9 aa, synthetic construct
  source 1..9: note = Seed: LVVVGAVGV (KRAS G12V)
AVVVGAVGL

SEQ ID NO: 50437 - protein, 9 aa, synthetic construct
  source 1..9: note = Seed: LVVVGAVGV (KRAS G12V)
AVVVGAVGV

SEQ ID NO: 50438 - protein, 9 aa, synthetic construct
  source 1..9: note = Seed: LVVVGAVGV (KRAS G12V)
AVVVGSVGI

SEQ ID NO: 50439 - protein, 9 aa, synthetic construct
  source 1..9: note = Seed: LVVVGAVGV (KRAS G12V)
AVVVGSVGV

SEQ ID NO: 50440 - protein, 9 aa, synthetic construct
  source 1..9: note = Seed: LVVVGAVGV (KRAS G12V)
CVVAGAVGA

SEQ ID NO: 50441 - protein, 9 aa, synthetic construct
  source 1..9: note = Seed: LVVVGAVGV (KRAS G12V)
CVVAGAVGI

SEQ ID NO: 50442 - protein, 9 aa, synthetic construct
  source 1..9: note = Seed: LVVVGAVGV (KRAS G12V)
CVVAGAVGL

SEQ ID NO: 50443 - protein, 9 aa, synthetic construct
  source 1..9: note = Seed: LVVVGAVGV (KRAS G12V)
CVVAGAVGM

SEQ ID NO: 50444 - protein, 9 aa, synthetic construct
  source 1..9: note = Seed: LVVVGAVGV (KRAS G12V)
CVVAGAVGT

SEQ ID NO: 50445 - protein, 9 aa, synthetic construct
  source 1..9: note = Seed: LVVVGAVGV (KRAS G12V)
CVVAGAVGV

SEQ ID NO: 50446 - protein, 9 aa, synthetic construct
  source 1..9: note = Seed: LVVVGAVGV (KRAS G12V)
CVVAGGVGI

SEQ ID NO: 50447 - protein, 9 aa, synthetic construct
  source 1..9: note = Seed: LVVVGAVGV (KRAS G12V)
CVVAGGVGL

SEQ ID NO: 50448 - protein, 9 aa, synthetic construct
  source 1..9: note = Seed: LVVVGAVGV (KRAS G12V)
CVVAGGVGM

SEQ ID NO: 50449 - protein, 9 aa, synthetic construct
  source 1..9: note = Seed: LVVVGAVGV (KRAS G12V)
CVVAGGVGV

SEQ ID NO: 50450 - protein, 9 aa, synthetic construct
  source 1..9: note = Seed: LVVVGAVGV (KRAS G12V)
CVVAGPVGV

SEQ ID NO: 50451 - protein, 9 aa, synthetic construct
  source 1..9: note = Seed: LVVVGAVGV (KRAS G12V)
CVVAGSVGA

SEQ ID NO: 50452 - protein, 9 aa, synthetic construct
  source 1..9: note = Seed: LVVVGAVGV (KRAS G12V)
CVVAGSVGI

SEQ ID NO: 50453 - protein, 9 aa, synthetic construct
  source 1..9: note = Seed: LVVVGAVGV (KRAS G12V)
CVVAGSVGV

SEQ ID NO: 50454 - protein, 9 aa, synthetic construct
  source 1..9: note = Seed: LVVVGAVGV (KRAS G12V)
CVVFGAVGA

SEQ ID NO: 50455 - protein, 9 aa, synthetic construct
  source 1..9: note = Seed: LVVVGAVGV (KRAS G12V)
CVVFGAVGI

SEQ ID NO: 50456 - protein, 9 aa, synthetic construct
  source 1..9: note = Seed: LVVVGAVGV (KRAS G12V)
CVVFGAVGL

SEQ ID NO: 50457 - protein, 9 aa, synthetic construct
  source 1..9: note = Seed: LVVVGAVGV (KRAS G12V)
CVVFGAVGV

SEQ ID NO: 50458 - protein, 9 aa, synthetic construct
  source 1..9: note = Seed: LVVVGAVGV (KRAS G12V)
CVVFGRVGR

SEQ ID NO: 50459 - protein, 9 aa, synthetic construct
  source 1..9: note = Seed: LVVVGAVGV (KRAS G12V)
CVVFGSVGV

SEQ ID NO: 50460 - protein, 9 aa, synthetic construct
  source 1..9: note = Seed: LVVVGAVGV (KRAS G12V)
CVVIGAVGA

SEQ ID NO: 50461 - protein, 9 aa, synthetic construct
  source 1..9: note = Seed: LVVVGAVGV (KRAS G12V)
CVVIGAVGI

SEQ ID NO: 50462 - protein, 9 aa, synthetic construct
  source 1..9: note = Seed: LVVVGAVGV (KRAS G12V)
CVVIGAVGL

SEQ ID NO: 50463 - protein, 9 aa, synthetic construct
  source 1..9: note = Seed: LVVVGAVGV (KRAS G12V)
CVVIGAVGM

SEQ ID NO: 50464 - protein, 9 aa, synthetic construct
  source 1..9: note = Seed: LVVVGAVGV (KRAS G12V)
CVVIGAVGS

SEQ ID NO: 50465 - protein, 9 aa, synthetic construct
  source 1..9: note = Seed: LVVVGAVGV (KRAS G12V)
CVVIGAVGT

SEQ ID NO: 50466 - protein, 9 aa, synthetic construct
  source 1..9: note = Seed: LVVVGAVGV (KRAS G12V)
CVVIGAVGV

SEQ ID NO: 50467 - protein, 9 aa, synthetic construct
  source 1..9: note = Seed: LVVVGAVGV (KRAS G12V)
CVVIGGVGA

SEQ ID NO: 50468 - protein, 9 aa, synthetic construct
  source 1..9: note = Seed: LVVVGAVGV (KRAS G12V)
CVVIGGVGI

SEQ ID NO: 50469 - protein, 9 aa, synthetic construct
  source 1..9: note = Seed: LVVVGAVGV (KRAS G12V)
CVVIGGVGL

SEQ ID NO: 50470 - protein, 9 aa, synthetic construct
  source 1..9: note = Seed: LVVVGAVGV (KRAS G12V)
CVVIGGVGM

SEQ ID NO: 50471 - protein, 9 aa, synthetic construct
  source 1..9: note = Seed: LVVVGAVGV (KRAS G12V)
CVVIGGVGS

SEQ ID NO: 50472 - protein, 9 aa, synthetic construct
  source 1..9: note = Seed: LVVVGAVGV (KRAS G12V)
CVVIGGVGT

SEQ ID NO: 50473 - protein, 9 aa, synthetic construct
  source 1..9: note = Seed: LVVVGAVGV (KRAS G12V)
CVVIGGVGV

SEQ ID NO: 50474 - protein, 9 aa, synthetic construct
  source 1..9: note = Seed: LVVVGAVGV (KRAS G12V)
CVVIGKVGR

SEQ ID NO: 50475 - protein, 9 aa, synthetic construct
  source 1..9: note = Seed: LVVVGAVGV (KRAS G12V)
CVVIGNVGA

SEQ ID NO: 50476 - protein, 9 aa, synthetic construct
  source 1..9: note = Seed: LVVVGAVGV (KRAS G12V)
CVVIGNVGI

SEQ ID NO: 50477 - protein, 9 aa, synthetic construct
  source 1..9: note = Seed: LVVVGAVGV (KRAS G12V)
CVVIGNVGL

SEQ ID NO: 50478 - protein, 9 aa, synthetic construct
  source 1..9: note = Seed: LVVVGAVGV (KRAS G12V)
CVVIGNVGV

SEQ ID NO: 50479 - protein, 9 aa, synthetic construct
  source 1..9: note = Seed: LVVVGAVGV (KRAS G12V)
CVVIGPVGA

SEQ ID NO: 50480 - protein, 9 aa, synthetic construct
  source 1..9: note = Seed: LVVVGAVGV (KRAS G12V)
CVVIGPVGI

SEQ ID NO: 50481 - protein, 9 aa, synthetic construct
  source 1..9: note = Seed: LVVVGAVGV (KRAS G12V)
CVVIGPVGL

SEQ ID NO: 50482 - protein, 9 aa, synthetic construct
  source 1..9: note = Seed: LVVVGAVGV (KRAS G12V)
CVVIGPVGM

SEQ ID NO: 50483 - protein, 9 aa, synthetic construct
  source 1..9: note = Seed: LVVVGAVGV (KRAS G12V)
CVVIGPVGV

SEQ ID NO: 50484 - protein, 9 aa, synthetic construct
  source 1..9: note = Seed: LVVVGAVGV (KRAS G12V)
CVVIGRVGA

SEQ ID NO: 50485 - protein, 9 aa, synthetic construct
  source 1..9: note = Seed: LVVVGAVGV (KRAS G12V)
CVVIGRVGR

SEQ ID NO: 50486 - protein, 9 aa, synthetic construct
  source 1..9: note = Seed: LVVVGAVGV (KRAS G12V)
CVVIGRVGS

SEQ ID NO: 50487 - protein, 9 aa, synthetic construct
  source 1..9: note = Seed: LVVVGAVGV (KRAS G12V)
CVVIGSVGA

SEQ ID NO: 50488 - protein, 9 aa, synthetic construct
  source 1..9: note = Seed: LVVVGAVGV (KRAS G12V)
CVVIGSVGI

SEQ ID NO: 50489 - protein, 9 aa, synthetic construct
  source 1..9: note = Seed: LVVVGAVGV (KRAS G12V)
CVVIGSVGL

SEQ ID NO: 50490 - protein, 9 aa, synthetic construct
  source 1..9: note = Seed: LVVVGAVGV (KRAS G12V)
CVVIGSVGM

SEQ ID NO: 50491 - protein, 9 aa, synthetic construct
  source 1..9: note = Seed: LVVVGAVGV (KRAS G12V)
CVVIGSVGS

SEQ ID NO: 50492 - protein, 9 aa, synthetic construct
  source 1..9: note = Seed: LVVVGAVGV (KRAS G12V)
CVVIGSVGT

SEQ ID NO: 50493 - protein, 9 aa, synthetic construct
  source 1..9: note = Seed: LVVVGAVGV (KRAS G12V)
CVVIGSVGV

SEQ ID NO: 50494 - protein, 9 aa, synthetic construct
  source 1..9: note = Seed: LVVVGAVGV (KRAS G12V)
CVVIGTVGA

SEQ ID NO: 50495 - protein, 9 aa, synthetic construct
  source 1..9: note = Seed: LVVVGAVGV (KRAS G12V)
CVVIGTVGI

SEQ ID NO: 50496 - protein, 9 aa, synthetic construct
  source 1..9: note = Seed: LVVVGAVGV (KRAS G12V)
CVVIGTVGL

SEQ ID NO: 50497 - protein, 9 aa, synthetic construct
  source 1..9: note = Seed: LVVVGAVGV (KRAS G12V)
CVVIGTVGV

SEQ ID NO: 50498 - protein, 9 aa, synthetic construct
  source 1..9: note = Seed: LVVVGAVGV (KRAS G12V)
CVVLGAVGA

SEQ ID NO: 50499 - protein, 9 aa, synthetic construct
  source 1..9: note = Seed: LVVVGAVGV (KRAS G12V)
CVVLGAVGF

SEQ ID NO: 50500 - protein, 9 aa, synthetic construct
  source 1..9: note = Seed: LVVVGAVGV (KRAS G12V)
CVVLGAVGG

SEQ ID NO: 50501 - protein, 9 aa, synthetic construct
  source 1..9: note = Seed: LVVVGAVGV (KRAS G12V)
CVVLGAVGH

SEQ ID NO: 50502 - protein, 9 aa, synthetic construct
  source 1..9: note = Seed: LVVVGAVGV (KRAS G12V)
CVVLGAVGI

SEQ ID NO: 50503 - protein, 9 aa, synthetic construct
  source 1..9: note = Seed: LVVVGAVGV (KRAS G12V)
CVVLGAVGL

SEQ ID NO: 50504 - protein, 9 aa, synthetic construct
  source 1..9: note = Seed: LVVVGAVGV (KRAS G12V)
CVVLGAVGM

SEQ ID NO: 50505 - protein, 9 aa, synthetic construct
  source 1..9: note = Seed: LVVVGAVGV (KRAS G12V)
CVVLGAVGS

SEQ ID NO: 50506 - protein, 9 aa, synthetic construct
  source 1..9: note = Seed: LVVVGAVGV (KRAS G12V)
CVVLGAVGT

SEQ ID NO: 50507 - protein, 9 aa, synthetic construct
  source 1..9: note = Seed: LVVVGAVGV (KRAS G12V)
CVVLGAVGV

SEQ ID NO: 50508 - protein, 9 aa, synthetic construct
  source 1..9: note = Seed: LVVVGAVGV (KRAS G12V)
CVVLGAVGY

SEQ ID NO: 50509 - protein, 9 aa, synthetic construct
  source 1..9: note = Seed: LVVVGAVGV (KRAS G12V)
CVVLGGVGA

SEQ ID NO: 50510 - protein, 9 aa, synthetic construct
  source 1..9: note = Seed: LVVVGAVGV (KRAS G12V)
CVVLGGVGI

SEQ ID NO: 50511 - protein, 9 aa, synthetic construct
  source 1..9: note = Seed: LVVVGAVGV (KRAS G12V)
CVVLGGVGL

SEQ ID NO: 50512 - protein, 9 aa, synthetic construct
  source 1..9: note = Seed: LVVVGAVGV (KRAS G12V)
CVVLGGVGM

SEQ ID NO: 50513 - protein, 9 aa, synthetic construct
  source 1..9: note = Seed: LVVVGAVGV (KRAS G12V)
CVVLGGVGS

SEQ ID NO: 50514 - protein, 9 aa, synthetic construct
  source 1..9: note = Seed: LVVVGAVGV (KRAS G12V)
CVVLGGVGT

SEQ ID NO: 50515 - protein, 9 aa, synthetic construct
  source 1..9: note = Seed: LVVVGAVGV (KRAS G12V)
CVVLGGVGV

SEQ ID NO: 50516 - protein, 9 aa, synthetic construct
  source 1..9: note = Seed: LVVVGAVGV (KRAS G12V)
CVVLGHVGL

SEQ ID NO: 50517 - protein, 9 aa, synthetic construct
  source 1..9: note = Seed: LVVVGAVGV (KRAS G12V)
CVVLGKVGR

SEQ ID NO: 50518 - protein, 9 aa, synthetic construct
  source 1..9: note = Seed: LVVVGAVGV (KRAS G12V)
CVVLGNVGA

SEQ ID NO: 50519 - protein, 9 aa, synthetic construct
  source 1..9: note = Seed: LVVVGAVGV (KRAS G12V)
CVVLGNVGI

SEQ ID NO: 50520 - protein, 9 aa, synthetic construct
  source 1..9: note = Seed: LVVVGAVGV (KRAS G12V)
CVVLGNVGL

SEQ ID NO: 50521 - protein, 9 aa, synthetic construct
  source 1..9: note = Seed: LVVVGAVGV (KRAS G12V)
CVVLGNVGM

SEQ ID NO: 50522 - protein, 9 aa, synthetic construct
  source 1..9: note = Seed: LVVVGAVGV (KRAS G12V)
CVVLGNVGT

SEQ ID NO: 50523 - protein, 9 aa, synthetic construct
  source 1..9: note = Seed: LVVVGAVGV (KRAS G12V)
CVVLGNVGV

SEQ ID NO: 50524 - protein, 9 aa, synthetic construct
  source 1..9: note = Seed: LVVVGAVGV (KRAS G12V)
CVVLGPVGA

SEQ ID NO: 50525 - protein, 9 aa, synthetic construct
  source 1..9: note = Seed: LVVVGAVGV (KRAS G12V)
CVVLGPVGI

SEQ ID NO: 50526 - protein, 9 aa, synthetic construct
  source 1..9: note = Seed: LVVVGAVGV (KRAS G12V)
CVVLGPVGL

SEQ ID NO: 50527 - protein, 9 aa, synthetic construct
  source 1..9: note = Seed: LVVVGAVGV (KRAS G12V)
CVVLGPVGM

SEQ ID NO: 50528 - protein, 9 aa, synthetic construct
  source 1..9: note = Seed: LVVVGAVGV (KRAS G12V)
CVVLGPVGS

SEQ ID NO: 50529 - protein, 9 aa, synthetic construct
  source 1..9: note = Seed: LVVVGAVGV (KRAS G12V)
CVVLGPVGT

SEQ ID NO: 50530 - protein, 9 aa, synthetic construct
  source 1..9: note = Seed: LVVVGAVGV (KRAS G12V)
CVVLGPVGV

SEQ ID NO: 50531 - protein, 9 aa, synthetic construct
  source 1..9: note = Seed: LVVVGAVGV (KRAS G12V)
CVVLGRVGA

SEQ ID NO: 50532 - protein, 9 aa, synthetic construct
  source 1..9: note = Seed: LVVVGAVGV (KRAS G12V)
CVVLGRVGH

SEQ ID NO: 50533 - protein, 9 aa, synthetic construct
  source 1..9: note = Seed: LVVVGAVGV (KRAS G12V)
CVVLGRVGK

SEQ ID NO: 50534 - protein, 9 aa, synthetic construct
  source 1..9: note = Seed: LVVVGAVGV (KRAS G12V)
CVVLGRVGR

SEQ ID NO: 50535 - protein, 9 aa, synthetic construct
  source 1..9: note = Seed: LVVVGAVGV (KRAS G12V)
CVVLGRVGS

SEQ ID NO: 50536 - protein, 9 aa, synthetic construct
  source 1..9: note = Seed: LVVVGAVGV (KRAS G12V)
CVVLGSVGA

SEQ ID NO: 50537 - protein, 9 aa, synthetic construct
  source 1..9: note = Seed: LVVVGAVGV (KRAS G12V)
CVVLGSVGI

SEQ ID NO: 50538 - protein, 9 aa, synthetic construct
  source 1..9: note = Seed: LVVVGAVGV (KRAS G12V)
CVVLGSVGL

SEQ ID NO: 50539 - protein, 9 aa, synthetic construct
  source 1..9: note = Seed: LVVVGAVGV (KRAS G12V)
CVVLGSVGM

SEQ ID NO: 50540 - protein, 9 aa, synthetic construct
  source 1..9: note = Seed: LVVVGAVGV (KRAS G12V)
CVVLGSVGS

SEQ ID NO: 50541 - protein, 9 aa, synthetic construct
  source 1..9: note = Seed: LVVVGAVGV (KRAS G12V)
CVVLGSVGT

SEQ ID NO: 50542 - protein, 9 aa, synthetic construct
  source 1..9: note = Seed: LVVVGAVGV (KRAS G12V)
CVVLGSVGV

SEQ ID NO: 50543 - protein, 9 aa, synthetic construct
  source 1..9: note = Seed: LVVVGAVGV (KRAS G12V)
CVVLGTVGA

SEQ ID NO: 50544 - protein, 9 aa, synthetic construct
  source 1..9: note = Seed: LVVVGAVGV (KRAS G12V)
CVVLGTVGI

SEQ ID NO: 50545 - protein, 9 aa, synthetic construct
  source 1..9: note = Seed: LVVVGAVGV (KRAS G12V)
CVVLGTVGL

SEQ ID NO: 50546 - protein, 9 aa, synthetic construct
  source 1..9: note = Seed: LVVVGAVGV (KRAS G12V)
CVVLGTVGM

SEQ ID NO: 50547 - protein, 9 aa, synthetic construct
  source 1..9: note = Seed: LVVVGAVGV (KRAS G12V)
CVVLGTVGT

SEQ ID NO: 50548 - protein, 9 aa, synthetic construct
  source 1..9: note = Seed: LVVVGAVGV (KRAS G12V)
CVVLGTVGV

SEQ ID NO: 50549 - protein, 9 aa, synthetic construct
  source 1..9: note = Seed: LVVVGAVGV (KRAS G12V)
CVVLGVVGI

SEQ ID NO: 50550 - protein, 9 aa, synthetic construct
  source 1..9: note = Seed: LVVVGAVGV (KRAS G12V)
CVVLGVVGL

SEQ ID NO: 50551 - protein, 9 aa, synthetic construct
  source 1..9: note = Seed: LVVVGAVGV (KRAS G12V)
CVVLGVVGV

SEQ ID NO: 50552 - protein, 9 aa, synthetic construct
  source 1..9: note = Seed: LVVVGAVGV (KRAS G12V)
CVVMGAVGA

SEQ ID NO: 50553 - protein, 9 aa, synthetic construct
  source 1..9: note = Seed: LVVVGAVGV (KRAS G12V)
CVVMGAVGF

SEQ ID NO: 50554 - protein, 9 aa, synthetic construct
  source 1..9: note = Seed: LVVVGAVGV (KRAS G12V)
CVVMGAVGH

SEQ ID NO: 50555 - protein, 9 aa, synthetic construct
  source 1..9: note = Seed: LVVVGAVGV (KRAS G12V)
CVVMGAVGI

SEQ ID NO: 50556 - protein, 9 aa, synthetic construct
  source 1..9: note = Seed: LVVVGAVGV (KRAS G12V)
CVVMGAVGL

SEQ ID NO: 50557 - protein, 9 aa, synthetic construct
  source 1..9: note = Seed: LVVVGAVGV (KRAS G12V)
CVVMGAVGM

SEQ ID NO: 50558 - protein, 9 aa, synthetic construct
  source 1..9: note = Seed: LVVVGAVGV (KRAS G12V)
CVVMGAVGS

SEQ ID NO: 50559 - protein, 9 aa, synthetic construct
  source 1..9: note = Seed: LVVVGAVGV (KRAS G12V)
CVVMGAVGT

SEQ ID NO: 50560 - protein, 9 aa, synthetic construct
  source 1..9: note = Seed: LVVVGAVGV (KRAS G12V)
CVVMGAVGV

SEQ ID NO: 50561 - protein, 9 aa, synthetic construct
  source 1..9: note = Seed: LVVVGAVGV (KRAS G12V)
CVVMGAVGY

SEQ ID NO: 50562 - protein, 9 aa, synthetic construct
  source 1..9: note = Seed: LVVVGAVGV (KRAS G12V)
CVVMGGVGA

SEQ ID NO: 50563 - protein, 9 aa, synthetic construct
  source 1..9: note = Seed: LVVVGAVGV (KRAS G12V)
CVVMGGVGI

SEQ ID NO: 50564 - protein, 9 aa, synthetic construct
  source 1..9: note = Seed: LVVVGAVGV (KRAS G12V)
CVVMGGVGL

SEQ ID NO: 50565 - protein, 9 aa, synthetic construct
  source 1..9: note = Seed: LVVVGAVGV (KRAS G12V)
CVVMGGVGM

SEQ ID NO: 50566 - protein, 9 aa, synthetic construct
  source 1..9: note = Seed: LVVVGAVGV (KRAS G12V)
CVVMGGVGS

SEQ ID NO: 50567 - protein, 9 aa, synthetic construct
  source 1..9: note = Seed: LVVVGAVGV (KRAS G12V)
CVVMGGVGT

SEQ ID NO: 50568 - protein, 9 aa, synthetic construct
  source 1..9: note = Seed: LVVVGAVGV (KRAS G12V)
CVVMGGVGV

SEQ ID NO: 50569 - protein, 9 aa, synthetic construct
  source 1..9: note = Seed: LVVVGAVGV (KRAS G12V)
CVVMGHVGI

SEQ ID NO: 50570 - protein, 9 aa, synthetic construct
  source 1..9: note = Seed: LVVVGAVGV (KRAS G12V)
CVVMGHVGL

SEQ ID NO: 50571 - protein, 9 aa, synthetic construct
  source 1..9: note = Seed: LVVVGAVGV (KRAS G12V)
CVVMGHVGV

SEQ ID NO: 50572 - protein, 9 aa, synthetic construct
  source 1..9: note = Seed: LVVVGAVGV (KRAS G12V)
CVVMGIVGI

SEQ ID NO: 50573 - protein, 9 aa, synthetic construct
  source 1..9: note = Seed: LVVVGAVGV (KRAS G12V)
CVVMGIVGV

SEQ ID NO: 50574 - protein, 9 aa, synthetic construct
  source 1..9: note = Seed: LVVVGAVGV (KRAS G12V)
CVVMGMVGV

SEQ ID NO: 50575 - protein, 9 aa, synthetic construct
  source 1..9: note = Seed: LVVVGAVGV (KRAS G12V)
CVVMGNVGA

SEQ ID NO: 50576 - protein, 9 aa, synthetic construct
  source 1..9: note = Seed: LVVVGAVGV (KRAS G12V)
CVVMGNVGI

SEQ ID NO: 50577 - protein, 9 aa, synthetic construct
  source 1..9: note = Seed: LVVVGAVGV (KRAS G12V)
CVVMGNVGL

SEQ ID NO: 50578 - protein, 9 aa, synthetic construct
  source 1..9: note = Seed: LVVVGAVGV (KRAS G12V)
CVVMGNVGM

SEQ ID NO: 50579 - protein, 9 aa, synthetic construct
  source 1..9: note = Seed: LVVVGAVGV (KRAS G12V)
CVVMGNVGT

SEQ ID NO: 50580 - protein, 9 aa, synthetic construct
  source 1..9: note = Seed: LVVVGAVGV (KRAS G12V)
CVVMGNVGV

SEQ ID NO: 50581 - protein, 9 aa, synthetic construct
  source 1..9: note = Seed: LVVVGAVGV (KRAS G12V)
CVVMGPVGA

SEQ ID NO: 50582 - protein, 9 aa, synthetic construct
  source 1..9: note = Seed: LVVVGAVGV (KRAS G12V)
CVVMGPVGI

SEQ ID NO: 50583 - protein, 9 aa, synthetic construct
  source 1..9: note = Seed: LVVVGAVGV (KRAS G12V)
CVVMGPVGL

SEQ ID NO: 50584 - protein, 9 aa, synthetic construct
  source 1..9: note = Seed: LVVVGAVGV (KRAS G12V)
CVVMGPVGM

SEQ ID NO: 50585 - protein, 9 aa, synthetic construct
  source 1..9: note = Seed: LVVVGAVGV (KRAS G12V)
CVVMGPVGT

SEQ ID NO: 50586 - protein, 9 aa, synthetic construct
  source 1..9: note = Seed: LVVVGAVGV (KRAS G12V)
CVVMGPVGV

SEQ ID NO: 50587 - protein, 9 aa, synthetic construct
  source 1..9: note = Seed: LVVVGAVGV (KRAS G12V)
CVVMGRVGA

SEQ ID NO: 50588 - protein, 9 aa, synthetic construct
  source 1..9: note = Seed: LVVVGAVGV (KRAS G12V)
CVVMGRVGH

SEQ ID NO: 50589 - protein, 9 aa, synthetic construct
  source 1..9: note = Seed: LVVVGAVGV (KRAS G12V)
CVVMGRVGK

SEQ ID NO: 50590 - protein, 9 aa, synthetic construct
  source 1..9: note = Seed: LVVVGAVGV (KRAS G12V)
CVVMGRVGR

SEQ ID NO: 50591 - protein, 9 aa, synthetic construct
  source 1..9: note = Seed: LVVVGAVGV (KRAS G12V)
CVVMGRVGS

SEQ ID NO: 50592 - protein, 9 aa, synthetic construct
  source 1..9: note = Seed: LVVVGAVGV (KRAS G12V)
CVVMGSVGA

SEQ ID NO: 50593 - protein, 9 aa, synthetic construct
  source 1..9: note = Seed: LVVVGAVGV (KRAS G12V)
CVVMGSVGF

SEQ ID NO: 50594 - protein, 9 aa, synthetic construct
  source 1..9: note = Seed: LVVVGAVGV (KRAS G12V)
CVVMGSVGI

SEQ ID NO: 50595 - protein, 9 aa, synthetic construct
  source 1..9: note = Seed: LVVVGAVGV (KRAS G12V)
CVVMGSVGL

SEQ ID NO: 50596 - protein, 9 aa, synthetic construct
  source 1..9: note = Seed: LVVVGAVGV (KRAS G12V)
CVVMGSVGM

SEQ ID NO: 50597 - protein, 9 aa, synthetic construct
  source 1..9: note = Seed: LVVVGAVGV (KRAS G12V)
CVVMGSVGS

SEQ ID NO: 50598 - protein, 9 aa, synthetic construct
  source 1..9: note = Seed: LVVVGAVGV (KRAS G12V)
CVVMGSVGT

SEQ ID NO: 50599 - protein, 9 aa, synthetic construct
  source 1..9: note = Seed: LVVVGAVGV (KRAS G12V)
CVVMGSVGV

SEQ ID NO: 50600 - protein, 9 aa, synthetic construct
  source 1..9: note = Seed: LVVVGAVGV (KRAS G12V)
CVVMGTVGA

SEQ ID NO: 50601 - protein, 9 aa, synthetic construct
  source 1..9: note = Seed: LVVVGAVGV (KRAS G12V)
CVVMGTVGI

SEQ ID NO: 50602 - protein, 9 aa, synthetic construct
  source 1..9: note = Seed: LVVVGAVGV (KRAS G12V)
CVVMGTVGL

SEQ ID NO: 50603 - protein, 9 aa, synthetic construct
  source 1..9: note = Seed: LVVVGAVGV (KRAS G12V)
CVVMGTVGM

SEQ ID NO: 50604 - protein, 9 aa, synthetic construct
  source 1..9: note = Seed: LVVVGAVGV (KRAS G12V)
CVVMGTVGT

SEQ ID NO: 50605 - protein, 9 aa, synthetic construct
  source 1..9: note = Seed: LVVVGAVGV (KRAS G12V)
CVVMGTVGV

SEQ ID NO: 50606 - protein, 9 aa, synthetic construct
  source 1..9: note = Seed: LVVVGAVGV (KRAS G12V)
CVVMGVVGA

SEQ ID NO: 50607 - protein, 9 aa, synthetic construct
  source 1..9: note = Seed: LVVVGAVGV (KRAS G12V)
CVVMGVVGI

SEQ ID NO: 50608 - protein, 9 aa, synthetic construct
  source 1..9: note = Seed: LVVVGAVGV (KRAS G12V)
CVVMGVVGL

SEQ ID NO: 50609 - protein, 9 aa, synthetic construct
  source 1..9: note = Seed: LVVVGAVGV (KRAS G12V)
CVVMGVVGM

SEQ ID NO: 50610 - protein, 9 aa, synthetic construct
  source 1..9: note = Seed: LVVVGAVGV (KRAS G12V)
CVVMGVVGV

SEQ ID NO: 50611 - protein, 9 aa, synthetic construct
  source 1..9: note = Seed: LVVVGAVGV (KRAS G12V)
CVVNGAVGF

SEQ ID NO: 50612 - protein, 9 aa, synthetic construct
  source 1..9: note = Seed: LVVVGAVGV (KRAS G12V)
CVVNGAVGI

SEQ ID NO: 50613 - protein, 9 aa, synthetic construct
  source 1..9: note = Seed: LVVVGAVGV (KRAS G12V)
CVVNGAVGL

SEQ ID NO: 50614 - protein, 9 aa, synthetic construct
  source 1..9: note = Seed: LVVVGAVGV (KRAS G12V)
CVVNGAVGM

SEQ ID NO: 50615 - protein, 9 aa, synthetic construct
  source 1..9: note = Seed: LVVVGAVGV (KRAS G12V)
CVVNGAVGV

SEQ ID NO: 50616 - protein, 9 aa, synthetic construct
  source 1..9: note = Seed: LVVVGAVGV (KRAS G12V)
CVVNGAVGY

SEQ ID NO: 50617 - protein, 9 aa, synthetic construct
  source 1..9: note = Seed: LVVVGAVGV (KRAS G12V)
CVVNGGVGI

SEQ ID NO: 50618 - protein, 9 aa, synthetic construct
  source 1..9: note = Seed: LVVVGAVGV (KRAS G12V)
CVVNGIVGI

SEQ ID NO: 50619 - protein, 9 aa, synthetic construct
  source 1..9: note = Seed: LVVVGAVGV (KRAS G12V)
CVVNGIVGV

SEQ ID NO: 50620 - protein, 9 aa, synthetic construct
  source 1..9: note = Seed: LVVVGAVGV (KRAS G12V)
CVVNGNVGF

SEQ ID NO: 50621 - protein, 9 aa, synthetic construct
  source 1..9: note = Seed: LVVVGAVGV (KRAS G12V)
CVVNGNVGI

SEQ ID NO: 50622 - protein, 9 aa, synthetic construct
  source 1..9: note = Seed: LVVVGAVGV (KRAS G12V)
CVVNGNVGL

SEQ ID NO: 50623 - protein, 9 aa, synthetic construct
  source 1..9: note = Seed: LVVVGAVGV (KRAS G12V)
CVVNGNVGV

SEQ ID NO: 50624 - protein, 9 aa, synthetic construct
  source 1..9: note = Seed: LVVVGAVGV (KRAS G12V)
CVVNGNVGY

SEQ ID NO: 50625 - protein, 9 aa, synthetic construct
  source 1..9: note = Seed: LVVVGAVGV (KRAS G12V)
CVVNGPVGI

SEQ ID NO: 50626 - protein, 9 aa, synthetic construct
  source 1..9: note = Seed: LVVVGAVGV (KRAS G12V)
CVVNGSVGF

SEQ ID NO: 50627 - protein, 9 aa, synthetic construct
  source 1..9: note = Seed: LVVVGAVGV (KRAS G12V)
CVVNGSVGI

SEQ ID NO: 50628 - protein, 9 aa, synthetic construct
  source 1..9: note = Seed: LVVVGAVGV (KRAS G12V)
CVVNGSVGL

SEQ ID NO: 50629 - protein, 9 aa, synthetic construct
  source 1..9: note = Seed: LVVVGAVGV (KRAS G12V)
CVVNGSVGV

SEQ ID NO: 50630 - protein, 9 aa, synthetic construct
  source 1..9: note = Seed: LVVVGAVGV (KRAS G12V)
CVVNGTVGI

SEQ ID NO: 50631 - protein, 9 aa, synthetic construct
  source 1..9: note = Seed: LVVVGAVGV (KRAS G12V)
CVVNGTVGV

SEQ ID NO: 50632 - protein, 9 aa, synthetic construct
  source 1..9: note = Seed: LVVVGAVGV (KRAS G12V)
CVVNGVVGI

SEQ ID NO: 50633 - protein, 9 aa, synthetic construct
  source 1..9: note = Seed: LVVVGAVGV (KRAS G12V)
CVVNGVVGV

SEQ ID NO: 50634 - protein, 9 aa, synthetic construct
  source 1..9: note = Seed: LVVVGAVGV (KRAS G12V)
CVVQGAVGA

SEQ ID NO: 50635 - protein, 9 aa, synthetic construct
  source 1..9: note = Seed: LVVVGAVGV (KRAS G12V)
CVVQGAVGI

SEQ ID NO: 50636 - protein, 9 aa, synthetic construct
  source 1..9: note = Seed: LVVVGAVGV (KRAS G12V)
CVVQGAVGL

SEQ ID NO: 50637 - protein, 9 aa, synthetic construct
  source 1..9: note = Seed: LVVVGAVGV (KRAS G12V)
CVVQGAVGM

SEQ ID NO: 50638 - protein, 9 aa, synthetic construct
  source 1..9: note = Seed: LVVVGAVGV (KRAS G12V)
CVVQGAVGV

SEQ ID NO: 50639 - protein, 9 aa, synthetic construct
  source 1..9: note = Seed: LVVVGAVGV (KRAS G12V)
CVVQGGVGL

SEQ ID NO: 50640 - protein, 9 aa, synthetic construct
  source 1..9: note = Seed: LVVVGAVGV (KRAS G12V)
CVVQGSVGI

SEQ ID NO: 50641 - protein, 9 aa, synthetic construct
  source 1..9: note = Seed: LVVVGAVGV (KRAS G12V)
CVVQGSVGL

SEQ ID NO: 50642 - protein, 9 aa, synthetic construct
  source 1..9: note = Seed: LVVVGAVGV (KRAS G12V)
CVVQGSVGV

SEQ ID NO: 50643 - protein, 9 aa, synthetic construct
  source 1..9: note = Seed: LVVVGAVGV (KRAS G12V)
CVVSGAVGI

SEQ ID NO: 50644 - protein, 9 aa, synthetic construct
  source 1..9: note = Seed: LVVVGAVGV (KRAS G12V)
CVVSGAVGL

SEQ ID NO: 50645 - protein, 9 aa, synthetic construct
  source 1..9: note = Seed: LVVVGAVGV (KRAS G12V)
CVVSGAVGV

SEQ ID NO: 50646 - protein, 9 aa, synthetic construct
  source 1..9: note = Seed: LVVVGAVGV (KRAS G12V)
CVVSGSVGI

SEQ ID NO: 50647 - protein, 9 aa, synthetic construct
  source 1..9: note = Seed: LVVVGAVGV (KRAS G12V)
CVVSGSVGL

SEQ ID NO: 50648 - protein, 9 aa, synthetic construct
  source 1..9: note = Seed: LVVVGAVGV (KRAS G12V)
CVVSGSVGV

SEQ ID NO: 50649 - protein, 9 aa, synthetic construct
  source 1..9: note = Seed: LVVVGAVGV (KRAS G12V)
CVVTGAVGI

SEQ ID NO: 50650 - protein, 9 aa, synthetic construct
  source 1..9: note = Seed: LVVVGAVGV (KRAS G12V)
CVVTGAVGL

SEQ ID NO: 50651 - protein, 9 aa, synthetic construct
  source 1..9: note = Seed: LVVVGAVGV (KRAS G12V)
CVVTGAVGV

SEQ ID NO: 50652 - protein, 9 aa, synthetic construct
  source 1..9: note = Seed: LVVVGAVGV (KRAS G12V)
CVVTGSVGI

SEQ ID NO: 50653 - protein, 9 aa, synthetic construct
  source 1..9: note = Seed: LVVVGAVGV (KRAS G12V)
CVVTGSVGL

SEQ ID NO: 50654 - protein, 9 aa, synthetic construct
  source 1..9: note = Seed: LVVVGAVGV (KRAS G12V)
CVVTGSVGV

SEQ ID NO: 50655 - protein, 9 aa, synthetic construct
  source 1..9: note = Seed: LVVVGAVGV (KRAS G12V)
CVVVGAVGA

SEQ ID NO: 50656 - protein, 9 aa, synthetic construct
  source 1..9: note = Seed: LVVVGAVGV (KRAS G12V)
CVVVGAVGI

SEQ ID NO: 50657 - protein, 9 aa, synthetic construct
  source 1..9: note = Seed: LVVVGAVGV (KRAS G12V)
CVVVGAVGL

SEQ ID NO: 50658 - protein, 9 aa, synthetic construct
  source 1..9: note = Seed: LVVVGAVGV (KRAS G12V)
CVVVGAVGM

SEQ ID NO: 50659 - protein, 9 aa, synthetic construct
  source 1..9: note = Seed: LVVVGAVGV (KRAS G12V)
CVVVGAVGV

SEQ ID NO: 50660 - protein, 9 aa, synthetic construct
  source 1..9: note = Seed: LVVVGAVGV (KRAS G12V)
CVVVGGVGA

SEQ ID NO: 50661 - protein, 9 aa, synthetic construct
  source 1..9: note = Seed: LVVVGAVGV (KRAS G12V)
CVVVGGVGI

SEQ ID NO: 50662 - protein, 9 aa, synthetic construct
  source 1..9: note = Seed: LVVVGAVGV (KRAS G12V)
CVVVGGVGL

SEQ ID NO: 50663 - protein, 9 aa, synthetic construct
  source 1..9: note = Seed: LVVVGAVGV (KRAS G12V)
CVVVGGVGM

SEQ ID NO: 50664 - protein, 9 aa, synthetic construct
  source 1..9: note = Seed: LVVVGAVGV (KRAS G12V)
CVVVGGVGV

SEQ ID NO: 50665 - protein, 9 aa, synthetic construct
  source 1..9: note = Seed: LVVVGAVGV (KRAS G12V)
CVVVGNVGL

SEQ ID NO: 50666 - protein, 9 aa, synthetic construct
  source 1..9: note = Seed: LVVVGAVGV (KRAS G12V)
CVVVGNVGV

SEQ ID NO: 50667 - protein, 9 aa, synthetic construct
  source 1..9: note = Seed: LVVVGAVGV (KRAS G12V)
CVVVGPVGL

SEQ ID NO: 50668 - protein, 9 aa, synthetic construct
  source 1..9: note = Seed: LVVVGAVGV (KRAS G12V)
CVVVGSVGA

SEQ ID NO: 50669 - protein, 9 aa, synthetic construct
  source 1..9: note = Seed: LVVVGAVGV (KRAS G12V)
CVVVGSVGI

SEQ ID NO: 50670 - protein, 9 aa, synthetic construct
  source 1..9: note = Seed: LVVVGAVGV (KRAS G12V)
CVVVGSVGL

SEQ ID NO: 50671 - protein, 9 aa, synthetic construct
  source 1..9: note = Seed: LVVVGAVGV (KRAS G12V)
CVVVGSVGM

SEQ ID NO: 50672 - protein, 9 aa, synthetic construct
  source 1..9: note = Seed: LVVVGAVGV (KRAS G12V)
CVVVGSVGV

SEQ ID NO: 50673 - protein, 9 aa, synthetic construct
  source 1..9: note = Seed: LVVVGAVGV (KRAS G12V)
DVVLGAVGL

SEQ ID NO: 50674 - protein, 9 aa, synthetic construct
  source 1..9: note = Seed: LVVVGAVGV (KRAS G12V)
DVVMGAVGL

SEQ ID NO: 50675 - protein, 9 aa, synthetic construct
  source 1..9: note = Seed: LVVVGAVGV (KRAS G12V)
EVVLGAVGI

SEQ ID NO: 50676 - protein, 9 aa, synthetic construct
  source 1..9: note = Seed: LVVVGAVGV (KRAS G12V)
EVVLGAVGL

SEQ ID NO: 50677 - protein, 9 aa, synthetic construct
  source 1..9: note = Seed: LVVVGAVGV (KRAS G12V)
EVVLGAVGM

SEQ ID NO: 50678 - protein, 9 aa, synthetic construct
  source 1..9: note = Seed: LVVVGAVGV (KRAS G12V)
EVVLGGVGL

SEQ ID NO: 50679 - protein, 9 aa, synthetic construct
  source 1..9: note = Seed: LVVVGAVGV (KRAS G12V)
EVVLGSVGL

SEQ ID NO: 50680 - protein, 9 aa, synthetic construct
  source 1..9: note = Seed: LVVVGAVGV (KRAS G12V)
EVVMGAVGL

SEQ ID NO: 50681 - protein, 9 aa, synthetic construct
  source 1..9: note = Seed: LVVVGAVGV (KRAS G12V)
EVVMGGVGL

SEQ ID NO: 50682 - protein, 9 aa, synthetic construct
  source 1..9: note = Seed: LVVVGAVGV (KRAS G12V)
EVVMGSVGL

SEQ ID NO: 50683 - protein, 9 aa, synthetic construct
  source 1..9: note = Seed: LVVVGAVGV (KRAS G12V)
FVVAGAVGC

SEQ ID NO: 50684 - protein, 9 aa, synthetic construct
  source 1..9: note = Seed: LVVVGAVGV (KRAS G12V)
FVVAGAVGD

SEQ ID NO: 50685 - protein, 9 aa, synthetic construct
  source 1..9: note = Seed: LVVVGAVGV (KRAS G12V)
FVVAGAVGE

SEQ ID NO: 50686 - protein, 9 aa, synthetic construct
  source 1..9: note = Seed: LVVVGAVGV (KRAS G12V)
FVVAGAVGF

SEQ ID NO: 50687 - protein, 9 aa, synthetic construct
  source 1..9: note = Seed: LVVVGAVGV (KRAS G12V)
FVVAGAVGG

SEQ ID NO: 50688 - protein, 9 aa, synthetic construct
  source 1..9: note = Seed: LVVVGAVGV (KRAS G12V)
FVVAGAVGH

SEQ ID NO: 50689 - protein, 9 aa, synthetic construct
  source 1..9: note = Seed: LVVVGAVGV (KRAS G12V)
FVVAGAVGK

SEQ ID NO: 50690 - protein, 9 aa, synthetic construct
  source 1..9: note = Seed: LVVVGAVGV (KRAS G12V)
FVVAGAVGN

SEQ ID NO: 50691 - protein, 9 aa, synthetic construct
  source 1..9: note = Seed: LVVVGAVGV (KRAS G12V)
FVVAGAVGP

SEQ ID NO: 50692 - protein, 9 aa, synthetic construct
  source 1..9: note = Seed: LVVVGAVGV (KRAS G12V)
FVVAGAVGQ

SEQ ID NO: 50693 - protein, 9 aa, synthetic construct
  source 1..9: note = Seed: LVVVGAVGV (KRAS G12V)
FVVAGAVGR

SEQ ID NO: 50694 - protein, 9 aa, synthetic construct
  source 1..9: note = Seed: LVVVGAVGV (KRAS G12V)
FVVAGAVGW

SEQ ID NO: 50695 - protein, 9 aa, synthetic construct
  source 1..9: note = Seed: LVVVGAVGV (KRAS G12V)
FVVAGAVGY

SEQ ID NO: 50696 - protein, 9 aa, synthetic construct
  source 1..9: note = Seed: LVVVGAVGV (KRAS G12V)
FVVAGCVGA

SEQ ID NO: 50697 - protein, 9 aa, synthetic construct
  source 1..9: note = Seed: LVVVGAVGV (KRAS G12V)
FVVAGCVGC

SEQ ID NO: 50698 - protein, 9 aa, synthetic construct
  source 1..9: note = Seed: LVVVGAVGV (KRAS G12V)
FVVAGCVGD

SEQ ID NO: 50699 - protein, 9 aa, synthetic construct
  source 1..9: note = Seed: LVVVGAVGV (KRAS G12V)
FVVAGCVGE

SEQ ID NO: 50700 - protein, 9 aa, synthetic construct
  source 1..9: note = Seed: LVVVGAVGV (KRAS G12V)
FVVAGCVGF

SEQ ID NO: 50701 - protein, 9 aa, synthetic construct
  source 1..9: note = Seed: LVVVGAVGV (KRAS G12V)
FVVAGCVGG

SEQ ID NO: 50702 - protein, 9 aa, synthetic construct
  source 1..9: note = Seed: LVVVGAVGV (KRAS G12V)
FVVAGCVGH

SEQ ID NO: 50703 - protein, 9 aa, synthetic construct
  source 1..9: note = Seed: LVVVGAVGV (KRAS G12V)
FVVAGCVGI

SEQ ID NO: 50704 - protein, 9 aa, synthetic construct
  source 1..9: note = Seed: LVVVGAVGV (KRAS G12V)
FVVAGCVGK

SEQ ID NO: 50705 - protein, 9 aa, synthetic construct
  source 1..9: note = Seed: LVVVGAVGV (KRAS G12V)
FVVAGCVGL

SEQ ID NO: 50706 - protein, 9 aa, synthetic construct
  source 1..9: note = Seed: LVVVGAVGV (KRAS G12V)
FVVAGCVGM

SEQ ID NO: 50707 - protein, 9 aa, synthetic construct
  source 1..9: note = Seed: LVVVGAVGV (KRAS G12V)
FVVAGCVGN

SEQ ID NO: 50708 - protein, 9 aa, synthetic construct
  source 1..9: note = Seed: LVVVGAVGV (KRAS G12V)
FVVAGCVGP

SEQ ID NO: 50709 - protein, 9 aa, synthetic construct
  source 1..9: note = Seed: LVVVGAVGV (KRAS G12V)
FVVAGCVGQ

SEQ ID NO: 50710 - protein, 9 aa, synthetic construct
  source 1..9: note = Seed: LVVVGAVGV (KRAS G12V)
FVVAGCVGR

SEQ ID NO: 50711 - protein, 9 aa, synthetic construct
  source 1..9: note = Seed: LVVVGAVGV (KRAS G12V)
FVVAGCVGS

SEQ ID NO: 50712 - protein, 9 aa, synthetic construct
  source 1..9: note = Seed: LVVVGAVGV (KRAS G12V)
FVVAGCVGT

SEQ ID NO: 50713 - protein, 9 aa, synthetic construct
  source 1..9: note = Seed: LVVVGAVGV (KRAS G12V)
FVVAGCVGV

SEQ ID NO: 50714 - protein, 9 aa, synthetic construct
  source 1..9: note = Seed: LVVVGAVGV (KRAS G12V)
FVVAGCVGY

SEQ ID NO: 50715 - protein, 9 aa, synthetic construct
  source 1..9: note = Seed: LVVVGAVGV (KRAS G12V)
FVVAGDVGA

SEQ ID NO: 50716 - protein, 9 aa, synthetic construct
  source 1..9: note = Seed: LVVVGAVGV (KRAS G12V)
FVVAGDVGC

SEQ ID NO: 50717 - protein, 9 aa, synthetic construct
  source 1..9: note = Seed: LVVVGAVGV (KRAS G12V)
FVVAGDVGD

SEQ ID NO: 50718 - protein, 9 aa, synthetic construct
  source 1..9: note = Seed: LVVVGAVGV (KRAS G12V)
FVVAGDVGE

SEQ ID NO: 50719 - protein, 9 aa, synthetic construct
  source 1..9: note = Seed: LVVVGAVGV (KRAS G12V)
FVVAGDVGF

SEQ ID NO: 50720 - protein, 9 aa, synthetic construct
  source 1..9: note = Seed: LVVVGAVGV (KRAS G12V)
FVVAGDVGG

SEQ ID NO: 50721 - protein, 9 aa, synthetic construct
  source 1..9: note = Seed: LVVVGAVGV (KRAS G12V)
FVVAGDVGH

SEQ ID NO: 50722 - protein, 9 aa, synthetic construct
  source 1..9: note = Seed: LVVVGAVGV (KRAS G12V)
FVVAGDVGI

SEQ ID NO: 50723 - protein, 9 aa, synthetic construct
  source 1..9: note = Seed: LVVVGAVGV (KRAS G12V)
FVVAGDVGL

SEQ ID NO: 50724 - protein, 9 aa, synthetic construct
  source 1..9: note = Seed: LVVVGAVGV (KRAS G12V)
FVVAGDVGM

SEQ ID NO: 50725 - protein, 9 aa, synthetic construct
  source 1..9: note = Seed: LVVVGAVGV (KRAS G12V)
FVVAGDVGN

SEQ ID NO: 50726 - protein, 9 aa, synthetic construct
  source 1..9: note = Seed: LVVVGAVGV (KRAS G12V)
FVVAGDVGQ

SEQ ID NO: 50727 - protein, 9 aa, synthetic construct
  source 1..9: note = Seed: LVVVGAVGV (KRAS G12V)
FVVAGDVGS

SEQ ID NO: 50728 - protein, 9 aa, synthetic construct
  source 1..9: note = Seed: LVVVGAVGV (KRAS G12V)
FVVAGDVGT

SEQ ID NO: 50729 - protein, 9 aa, synthetic construct
  source 1..9: note = Seed: LVVVGAVGV (KRAS G12V)
FVVAGDVGV

SEQ ID NO: 50730 - protein, 9 aa, synthetic construct
  source 1..9: note = Seed: LVVVGAVGV (KRAS G12V)
FVVAGDVGY

SEQ ID NO: 50731 - protein, 9 aa, synthetic construct
  source 1..9: note = Seed: LVVVGAVGV (KRAS G12V)
FVVAGEVGA

SEQ ID NO: 50732 - protein, 9 aa, synthetic construct
  source 1..9: note = Seed: LVVVGAVGV (KRAS G12V)
FVVAGEVGC

SEQ ID NO: 50733 - protein, 9 aa, synthetic construct
  source 1..9: note = Seed: LVVVGAVGV (KRAS G12V)
FVVAGEVGF

SEQ ID NO: 50734 - protein, 9 aa, synthetic construct
  source 1..9: note = Seed: LVVVGAVGV (KRAS G12V)
FVVAGEVGG

SEQ ID NO: 50735 - protein, 9 aa, synthetic construct
  source 1..9: note = Seed: LVVVGAVGV (KRAS G12V)
FVVAGEVGH

SEQ ID NO: 50736 - protein, 9 aa, synthetic construct
  source 1..9: note = Seed: LVVVGAVGV (KRAS G12V)
FVVAGEVGI

SEQ ID NO: 50737 - protein, 9 aa, synthetic construct
  source 1..9: note = Seed: LVVVGAVGV (KRAS G12V)
FVVAGEVGK

SEQ ID NO: 50738 - protein, 9 aa, synthetic construct
  source 1..9: note = Seed: LVVVGAVGV (KRAS G12V)
FVVAGEVGL

SEQ ID NO: 50739 - protein, 9 aa, synthetic construct
  source 1..9: note = Seed: LVVVGAVGV (KRAS G12V)
FVVAGEVGM

SEQ ID NO: 50740 - protein, 9 aa, synthetic construct
  source 1..9: note = Seed: LVVVGAVGV (KRAS G12V)
FVVAGEVGN

SEQ ID NO: 50741 - protein, 9 aa, synthetic construct
  source 1..9: note = Seed: LVVVGAVGV (KRAS G12V)
FVVAGEVGQ

SEQ ID NO: 50742 - protein, 9 aa, synthetic construct
  source 1..9: note = Seed: LVVVGAVGV (KRAS G12V)
FVVAGEVGR

SEQ ID NO: 50743 - protein, 9 aa, synthetic construct
  source 1..9: note = Seed: LVVVGAVGV (KRAS G12V)
FVVAGEVGS

SEQ ID NO: 50744 - protein, 9 aa, synthetic construct
  source 1..9: note = Seed: LVVVGAVGV (KRAS G12V)
FVVAGEVGT

SEQ ID NO: 50745 - protein, 9 aa, synthetic construct
  source 1..9: note = Seed: LVVVGAVGV (KRAS G12V)
FVVAGEVGV

SEQ ID NO: 50746 - protein, 9 aa, synthetic construct
  source 1..9: note = Seed: LVVVGAVGV (KRAS G12V)
FVVAGEVGY

SEQ ID NO: 50747 - protein, 9 aa, synthetic construct
  source 1..9: note = Seed: LVVVGAVGV (KRAS G12V)
FVVAGFVGA

SEQ ID NO: 50748 - protein, 9 aa, synthetic construct
  source 1..9: note = Seed: LVVVGAVGV (KRAS G12V)
FVVAGFVGD

SEQ ID NO: 50749 - protein, 9 aa, synthetic construct
  source 1..9: note = Seed: LVVVGAVGV (KRAS G12V)
FVVAGFVGE

SEQ ID NO: 50750 - protein, 9 aa, synthetic construct
  source 1..9: note = Seed: LVVVGAVGV (KRAS G12V)
FVVAGFVGF

SEQ ID NO: 50751 - protein, 9 aa, synthetic construct
  source 1..9: note = Seed: LVVVGAVGV (KRAS G12V)
FVVAGFVGI

SEQ ID NO: 50752 - protein, 9 aa, synthetic construct
  source 1..9: note = Seed: LVVVGAVGV (KRAS G12V)
FVVAGFVGL

SEQ ID NO: 50753 - protein, 9 aa, synthetic construct
  source 1..9: note = Seed: LVVVGAVGV (KRAS G12V)
FVVAGFVGM

SEQ ID NO: 50754 - protein, 9 aa, synthetic construct
  source 1..9: note = Seed: LVVVGAVGV (KRAS G12V)
FVVAGFVGN

SEQ ID NO: 50755 - protein, 9 aa, synthetic construct
  source 1..9: note = Seed: LVVVGAVGV (KRAS G12V)
FVVAGFVGS

SEQ ID NO: 50756 - protein, 9 aa, synthetic construct
  source 1..9: note = Seed: LVVVGAVGV (KRAS G12V)
FVVAGFVGV

SEQ ID NO: 50757 - protein, 9 aa, synthetic construct
  source 1..9: note = Seed: LVVVGAVGV (KRAS G12V)
FVVAGFVGY

SEQ ID NO: 50758 - protein, 9 aa, synthetic construct
  source 1..9: note = Seed: LVVVGAVGV (KRAS G12V)
FVVAGGVGC

SEQ ID NO: 50759 - protein, 9 aa, synthetic construct
  source 1..9: note = Seed: LVVVGAVGV (KRAS G12V)
FVVAGGVGD

SEQ ID NO: 50760 - protein, 9 aa, synthetic construct
  source 1..9: note = Seed: LVVVGAVGV (KRAS G12V)
FVVAGGVGE

SEQ ID NO: 50761 - protein, 9 aa, synthetic construct
  source 1..9: note = Seed: LVVVGAVGV (KRAS G12V)
FVVAGGVGF

SEQ ID NO: 50762 - protein, 9 aa, synthetic construct
  source 1..9: note = Seed: LVVVGAVGV (KRAS G12V)
FVVAGGVGG

SEQ ID NO: 50763 - protein, 9 aa, synthetic construct
  source 1..9: note = Seed: LVVVGAVGV (KRAS G12V)
FVVAGGVGH

SEQ ID NO: 50764 - protein, 9 aa, synthetic construct
  source 1..9: note = Seed: LVVVGAVGV (KRAS G12V)
FVVAGGVGK

SEQ ID NO: 50765 - protein, 9 aa, synthetic construct
  source 1..9: note = Seed: LVVVGAVGV (KRAS G12V)
FVVAGGVGN

SEQ ID NO: 50766 - protein, 9 aa, synthetic construct
  source 1..9: note = Seed: LVVVGAVGV (KRAS G12V)
FVVAGGVGP

SEQ ID NO: 50767 - protein, 9 aa, synthetic construct
  source 1..9: note = Seed: LVVVGAVGV (KRAS G12V)
FVVAGGVGQ

SEQ ID NO: 50768 - protein, 9 aa, synthetic construct
  source 1..9: note = Seed: LVVVGAVGV (KRAS G12V)
FVVAGGVGR

SEQ ID NO: 50769 - protein, 9 aa, synthetic construct
  source 1..9: note = Seed: LVVVGAVGV (KRAS G12V)
FVVAGGVGS

SEQ ID NO: 50770 - protein, 9 aa, synthetic construct
  source 1..9: note = Seed: LVVVGAVGV (KRAS G12V)
FVVAGGVGT

SEQ ID NO: 50771 - protein, 9 aa, synthetic construct
  source 1..9: note = Seed: LVVVGAVGV (KRAS G12V)
FVVAGGVGW

SEQ ID NO: 50772 - protein, 9 aa, synthetic construct
  source 1..9: note = Seed: LVVVGAVGV (KRAS G12V)
FVVAGGVGY

SEQ ID NO: 50773 - protein, 9 aa, synthetic construct
  source 1..9: note = Seed: LVVVGAVGV (KRAS G12V)
FVVAGHVGA

SEQ ID NO: 50774 - protein, 9 aa, synthetic construct
  source 1..9: note = Seed: LVVVGAVGV (KRAS G12V)
FVVAGHVGC

SEQ ID NO: 50775 - protein, 9 aa, synthetic construct
  source 1..9: note = Seed: LVVVGAVGV (KRAS G12V)
FVVAGHVGD

SEQ ID NO: 50776 - protein, 9 aa, synthetic construct
  source 1..9: note = Seed: LVVVGAVGV (KRAS G12V)
FVVAGHVGE

SEQ ID NO: 50777 - protein, 9 aa, synthetic construct
  source 1..9: note = Seed: LVVVGAVGV (KRAS G12V)
FVVAGHVGF

SEQ ID NO: 50778 - protein, 9 aa, synthetic construct
  source 1..9: note = Seed: LVVVGAVGV (KRAS G12V)
FVVAGHVGG

SEQ ID NO: 50779 - protein, 9 aa, synthetic construct
  source 1..9: note = Seed: LVVVGAVGV (KRAS G12V)
FVVAGHVGH

SEQ ID NO: 50780 - protein, 9 aa, synthetic construct
  source 1..9: note = Seed: LVVVGAVGV (KRAS G12V)
FVVAGHVGI

SEQ ID NO: 50781 - protein, 9 aa, synthetic construct
  source 1..9: note = Seed: LVVVGAVGV (KRAS G12V)
FVVAGHVGK

SEQ ID NO: 50782 - protein, 9 aa, synthetic construct
  source 1..9: note = Seed: LVVVGAVGV (KRAS G12V)
FVVAGHVGL

SEQ ID NO: 50783 - protein, 9 aa, synthetic construct
  source 1..9: note = Seed: LVVVGAVGV (KRAS G12V)
FVVAGHVGM

SEQ ID NO: 50784 - protein, 9 aa, synthetic construct
  source 1..9: note = Seed: LVVVGAVGV (KRAS G12V)
FVVAGHVGN

SEQ ID NO: 50785 - protein, 9 aa, synthetic construct
  source 1..9: note = Seed: LVVVGAVGV (KRAS G12V)
FVVAGHVGQ

SEQ ID NO: 50786 - protein, 9 aa, synthetic construct
  source 1..9: note = Seed: LVVVGAVGV (KRAS G12V)
FVVAGHVGR

SEQ ID NO: 50787 - protein, 9 aa, synthetic construct
  source 1..9: note = Seed: LVVVGAVGV (KRAS G12V)
FVVAGHVGS

SEQ ID NO: 50788 - protein, 9 aa, synthetic construct
  source 1..9: note = Seed: LVVVGAVGV (KRAS G12V)
FVVAGHVGT

SEQ ID NO: 50789 - protein, 9 aa, synthetic construct
  source 1..9: note = Seed: LVVVGAVGV (KRAS G12V)
FVVAGHVGV

SEQ ID NO: 50790 - protein, 9 aa, synthetic construct
  source 1..9: note = Seed: LVVVGAVGV (KRAS G12V)
FVVAGHVGW

SEQ ID NO: 50791 - protein, 9 aa, synthetic construct
  source 1..9: note = Seed: LVVVGAVGV (KRAS G12V)
FVVAGHVGY

SEQ ID NO: 50792 - protein, 9 aa, synthetic construct
  source 1..9: note = Seed: LVVVGAVGV (KRAS G12V)
FVVAGIVGA

SEQ ID NO: 50793 - protein, 9 aa, synthetic construct
  source 1..9: note = Seed: LVVVGAVGV (KRAS G12V)
FVVAGIVGC

SEQ ID NO: 50794 - protein, 9 aa, synthetic construct
  source 1..9: note = Seed: LVVVGAVGV (KRAS G12V)
FVVAGIVGD

SEQ ID NO: 50795 - protein, 9 aa, synthetic construct
  source 1..9: note = Seed: LVVVGAVGV (KRAS G12V)
FVVAGIVGE

SEQ ID NO: 50796 - protein, 9 aa, synthetic construct
  source 1..9: note = Seed: LVVVGAVGV (KRAS G12V)
FVVAGIVGF

SEQ ID NO: 50797 - protein, 9 aa, synthetic construct
  source 1..9: note = Seed: LVVVGAVGV (KRAS G12V)
FVVAGIVGG

SEQ ID NO: 50798 - protein, 9 aa, synthetic construct
  source 1..9: note = Seed: LVVVGAVGV (KRAS G12V)
FVVAGIVGH

SEQ ID NO: 50799 - protein, 9 aa, synthetic construct
  source 1..9: note = Seed: LVVVGAVGV (KRAS G12V)
FVVAGIVGI

SEQ ID NO: 50800 - protein, 9 aa, synthetic construct
  source 1..9: note = Seed: LVVVGAVGV (KRAS G12V)
FVVAGIVGK

SEQ ID NO: 50801 - protein, 9 aa, synthetic construct
  source 1..9: note = Seed: LVVVGAVGV (KRAS G12V)
FVVAGIVGL

SEQ ID NO: 50802 - protein, 9 aa, synthetic construct
  source 1..9: note = Seed: LVVVGAVGV (KRAS G12V)
FVVAGIVGM

SEQ ID NO: 50803 - protein, 9 aa, synthetic construct
  source 1..9: note = Seed: LVVVGAVGV (KRAS G12V)
FVVAGIVGN

SEQ ID NO: 50804 - protein, 9 aa, synthetic construct
  source 1..9: note = Seed: LVVVGAVGV (KRAS G12V)
FVVAGIVGP

SEQ ID NO: 50805 - protein, 9 aa, synthetic construct
  source 1..9: note = Seed: LVVVGAVGV (KRAS G12V)
FVVAGIVGQ

SEQ ID NO: 50806 - protein, 9 aa, synthetic construct
  source 1..9: note = Seed: LVVVGAVGV (KRAS G12V)
FVVAGIVGR

SEQ ID NO: 50807 - protein, 9 aa, synthetic construct
  source 1..9: note = Seed: LVVVGAVGV (KRAS G12V)
FVVAGIVGS

SEQ ID NO: 50808 - protein, 9 aa, synthetic construct
  source 1..9: note = Seed: LVVVGAVGV (KRAS G12V)
FVVAGIVGT

SEQ ID NO: 50809 - protein, 9 aa, synthetic construct
  source 1..9: note = Seed: LVVVGAVGV (KRAS G12V)
FVVAGIVGV

SEQ ID NO: 50810 - protein, 9 aa, synthetic construct
  source 1..9: note = Seed: LVVVGAVGV (KRAS G12V)
FVVAGIVGY

SEQ ID NO: 50811 - protein, 9 aa, synthetic construct
  source 1..9: note = Seed: LVVVGAVGV (KRAS G12V)
FVVAGKVGA

SEQ ID NO: 50812 - protein, 9 aa, synthetic construct
  source 1..9: note = Seed: LVVVGAVGV (KRAS G12V)
FVVAGKVGC

SEQ ID NO: 50813 - protein, 9 aa, synthetic construct
  source 1..9: note = Seed: LVVVGAVGV (KRAS G12V)
FVVAGKVGD

SEQ ID NO: 50814 - protein, 9 aa, synthetic construct
  source 1..9: note = Seed: LVVVGAVGV (KRAS G12V)
FVVAGKVGE

SEQ ID NO: 50815 - protein, 9 aa, synthetic construct
  source 1..9: note = Seed: LVVVGAVGV (KRAS G12V)
FVVAGKVGG

SEQ ID NO: 50816 - protein, 9 aa, synthetic construct
  source 1..9: note = Seed: LVVVGAVGV (KRAS G12V)
FVVAGKVGH

SEQ ID NO: 50817 - protein, 9 aa, synthetic construct
  source 1..9: note = Seed: LVVVGAVGV (KRAS G12V)
FVVAGKVGI

SEQ ID NO: 50818 - protein, 9 aa, synthetic construct
  source 1..9: note = Seed: LVVVGAVGV (KRAS G12V)
FVVAGKVGK

SEQ ID NO: 50819 - protein, 9 aa, synthetic construct
  source 1..9: note = Seed: LVVVGAVGV (KRAS G12V)
FVVAGKVGL

SEQ ID NO: 50820 - protein, 9 aa, synthetic construct
  source 1..9: note = Seed: LVVVGAVGV (KRAS G12V)
FVVAGKVGM

SEQ ID NO: 50821 - protein, 9 aa, synthetic construct
  source 1..9: note = Seed: LVVVGAVGV (KRAS G12V)
FVVAGKVGN

SEQ ID NO: 50822 - protein, 9 aa, synthetic construct
  source 1..9: note = Seed: LVVVGAVGV (KRAS G12V)
FVVAGKVGP

SEQ ID NO: 50823 - protein, 9 aa, synthetic construct
  source 1..9: note = Seed: LVVVGAVGV (KRAS G12V)
FVVAGKVGQ

SEQ ID NO: 50824 - protein, 9 aa, synthetic construct
  source 1..9: note = Seed: LVVVGAVGV (KRAS G12V)
FVVAGKVGR

SEQ ID NO: 50825 - protein, 9 aa, synthetic construct
  source 1..9: note = Seed: LVVVGAVGV (KRAS G12V)
FVVAGKVGS

SEQ ID NO: 50826 - protein, 9 aa, synthetic construct
  source 1..9: note = Seed: LVVVGAVGV (KRAS G12V)
FVVAGKVGT

SEQ ID NO: 50827 - protein, 9 aa, synthetic construct
  source 1..9: note = Seed: LVVVGAVGV (KRAS G12V)
FVVAGKVGV

SEQ ID NO: 50828 - protein, 9 aa, synthetic construct
  source 1..9: note = Seed: LVVVGAVGV (KRAS G12V)
FVVAGKVGY

SEQ ID NO: 50829 - protein, 9 aa, synthetic construct
  source 1..9: note = Seed: LVVVGAVGV (KRAS G12V)
FVVAGLVGA

SEQ ID NO: 50830 - protein, 9 aa, synthetic construct
  source 1..9: note = Seed: LVVVGAVGV (KRAS G12V)
FVVAGLVGD

SEQ ID NO: 50831 - protein, 9 aa, synthetic construct
  source 1..9: note = Seed: LVVVGAVGV (KRAS G12V)
FVVAGLVGE

SEQ ID NO: 50832 - protein, 9 aa, synthetic construct
  source 1..9: note = Seed: LVVVGAVGV (KRAS G12V)
FVVAGLVGG

SEQ ID NO: 50833 - protein, 9 aa, synthetic construct
  source 1..9: note = Seed: LVVVGAVGV (KRAS G12V)
FVVAGLVGH

SEQ ID NO: 50834 - protein, 9 aa, synthetic construct
  source 1..9: note = Seed: LVVVGAVGV (KRAS G12V)
FVVAGLVGI

SEQ ID NO: 50835 - protein, 9 aa, synthetic construct
  source 1..9: note = Seed: LVVVGAVGV (KRAS G12V)
FVVAGLVGL

SEQ ID NO: 50836 - protein, 9 aa, synthetic construct
  source 1..9: note = Seed: LVVVGAVGV (KRAS G12V)
FVVAGLVGM

SEQ ID NO: 50837 - protein, 9 aa, synthetic construct
  source 1..9: note = Seed: LVVVGAVGV (KRAS G12V)
FVVAGLVGN

SEQ ID NO: 50838 - protein, 9 aa, synthetic construct
  source 1..9: note = Seed: LVVVGAVGV (KRAS G12V)
FVVAGLVGQ

SEQ ID NO: 50839 - protein, 9 aa, synthetic construct
  source 1..9: note = Seed: LVVVGAVGV (KRAS G12V)
FVVAGLVGS

SEQ ID NO: 50840 - protein, 9 aa, synthetic construct
  source 1..9: note = Seed: LVVVGAVGV (KRAS G12V)
FVVAGLVGT

SEQ ID NO: 50841 - protein, 9 aa, synthetic construct
  source 1..9: note = Seed: LVVVGAVGV (KRAS G12V)
FVVAGLVGV

SEQ ID NO: 50842 - protein, 9 aa, synthetic construct
  source 1..9: note = Seed: LVVVGAVGV (KRAS G12V)
FVVAGMVGA

SEQ ID NO: 50843 - protein, 9 aa, synthetic construct
  source 1..9: note = Seed: LVVVGAVGV (KRAS G12V)
FVVAGMVGC

SEQ ID NO: 50844 - protein, 9 aa, synthetic construct
  source 1..9: note = Seed: LVVVGAVGV (KRAS G12V)
FVVAGMVGD

SEQ ID NO: 50845 - protein, 9 aa, synthetic construct
  source 1..9: note = Seed: LVVVGAVGV (KRAS G12V)
FVVAGMVGE

SEQ ID NO: 50846 - protein, 9 aa, synthetic construct
  source 1..9: note = Seed: LVVVGAVGV (KRAS G12V)
FVVAGMVGG

SEQ ID NO: 50847 - protein, 9 aa, synthetic construct
  source 1..9: note = Seed: LVVVGAVGV (KRAS G12V)
FVVAGMVGH

SEQ ID NO: 50848 - protein, 9 aa, synthetic construct
  source 1..9: note = Seed: LVVVGAVGV (KRAS G12V)
FVVAGMVGI

SEQ ID NO: 50849 - protein, 9 aa, synthetic construct
  source 1..9: note = Seed: LVVVGAVGV (KRAS G12V)
FVVAGMVGL

SEQ ID NO: 50850 - protein, 9 aa, synthetic construct
  source 1..9: note = Seed: LVVVGAVGV (KRAS G12V)
FVVAGMVGM

SEQ ID NO: 50851 - protein, 9 aa, synthetic construct
  source 1..9: note = Seed: LVVVGAVGV (KRAS G12V)
FVVAGMVGN

SEQ ID NO: 50852 - protein, 9 aa, synthetic construct
  source 1..9: note = Seed: LVVVGAVGV (KRAS G12V)
FVVAGMVGQ

SEQ ID NO: 50853 - protein, 9 aa, synthetic construct
  source 1..9: note = Seed: LVVVGAVGV (KRAS G12V)
FVVAGMVGS

SEQ ID NO: 50854 - protein, 9 aa, synthetic construct
  source 1..9: note = Seed: LVVVGAVGV (KRAS G12V)
FVVAGMVGT

SEQ ID NO: 50855 - protein, 9 aa, synthetic construct
  source 1..9: note = Seed: LVVVGAVGV (KRAS G12V)
FVVAGMVGV

SEQ ID NO: 50856 - protein, 9 aa, synthetic construct
  source 1..9: note = Seed: LVVVGAVGV (KRAS G12V)
FVVAGNVGA

SEQ ID NO: 50857 - protein, 9 aa, synthetic construct
  source 1..9: note = Seed: LVVVGAVGV (KRAS G12V)
FVVAGNVGC

SEQ ID NO: 50858 - protein, 9 aa, synthetic construct
  source 1..9: note = Seed: LVVVGAVGV (KRAS G12V)
FVVAGNVGD

SEQ ID NO: 50859 - protein, 9 aa, synthetic construct
  source 1..9: note = Seed: LVVVGAVGV (KRAS G12V)
FVVAGNVGE

SEQ ID NO: 50860 - protein, 9 aa, synthetic construct
  source 1..9: note = Seed: LVVVGAVGV (KRAS G12V)
FVVAGNVGF

SEQ ID NO: 50861 - protein, 9 aa, synthetic construct
  source 1..9: note = Seed: LVVVGAVGV (KRAS G12V)
FVVAGNVGG

SEQ ID NO: 50862 - protein, 9 aa, synthetic construct
  source 1..9: note = Seed: LVVVGAVGV (KRAS G12V)
FVVAGNVGH

SEQ ID NO: 50863 - protein, 9 aa, synthetic construct
  source 1..9: note = Seed: LVVVGAVGV (KRAS G12V)
FVVAGNVGI

SEQ ID NO: 50864 - protein, 9 aa, synthetic construct
  source 1..9: note = Seed: LVVVGAVGV (KRAS G12V)
FVVAGNVGK

SEQ ID NO: 50865 - protein, 9 aa, synthetic construct
  source 1..9: note = Seed: LVVVGAVGV (KRAS G12V)
FVVAGNVGM

SEQ ID NO: 50866 - protein, 9 aa, synthetic construct
  source 1..9: note = Seed: LVVVGAVGV (KRAS G12V)
FVVAGNVGN

SEQ ID NO: 50867 - protein, 9 aa, synthetic construct
  source 1..9: note = Seed: LVVVGAVGV (KRAS G12V)
FVVAGNVGP

SEQ ID NO: 50868 - protein, 9 aa, synthetic construct
  source 1..9: note = Seed: LVVVGAVGV (KRAS G12V)
FVVAGNVGQ

SEQ ID NO: 50869 - protein, 9 aa, synthetic construct
  source 1..9: note = Seed: LVVVGAVGV (KRAS G12V)
FVVAGNVGR

SEQ ID NO: 50870 - protein, 9 aa, synthetic construct
  source 1..9: note = Seed: LVVVGAVGV (KRAS G12V)
FVVAGNVGS

SEQ ID NO: 50871 - protein, 9 aa, synthetic construct
  source 1..9: note = Seed: LVVVGAVGV (KRAS G12V)
FVVAGNVGT

SEQ ID NO: 50872 - protein, 9 aa, synthetic construct
  source 1..9: note = Seed: LVVVGAVGV (KRAS G12V)
FVVAGNVGW

SEQ ID NO: 50873 - protein, 9 aa, synthetic construct
  source 1..9: note = Seed: LVVVGAVGV (KRAS G12V)
FVVAGNVGY

SEQ ID NO: 50874 - protein, 9 aa, synthetic construct
  source 1..9: note = Seed: LVVVGAVGV (KRAS G12V)
FVVAGPVGC

SEQ ID NO: 50875 - protein, 9 aa, synthetic construct
  source 1..9: note = Seed: LVVVGAVGV (KRAS G12V)
FVVAGPVGD

SEQ ID NO: 50876 - protein, 9 aa, synthetic construct
  source 1..9: note = Seed: LVVVGAVGV (KRAS G12V)
FVVAGPVGE

SEQ ID NO: 50877 - protein, 9 aa, synthetic construct
  source 1..9: note = Seed: LVVVGAVGV (KRAS G12V)
FVVAGPVGF

SEQ ID NO: 50878 - protein, 9 aa, synthetic construct
  source 1..9: note = Seed: LVVVGAVGV (KRAS G12V)
FVVAGPVGG

SEQ ID NO: 50879 - protein, 9 aa, synthetic construct
  source 1..9: note = Seed: LVVVGAVGV (KRAS G12V)
FVVAGPVGH

SEQ ID NO: 50880 - protein, 9 aa, synthetic construct
  source 1..9: note = Seed: LVVVGAVGV (KRAS G12V)
FVVAGPVGK

SEQ ID NO: 50881 - protein, 9 aa, synthetic construct
  source 1..9: note = Seed: LVVVGAVGV (KRAS G12V)
FVVAGPVGN

SEQ ID NO: 50882 - protein, 9 aa, synthetic construct
  source 1..9: note = Seed: LVVVGAVGV (KRAS G12V)
FVVAGPVGP

SEQ ID NO: 50883 - protein, 9 aa, synthetic construct
  source 1..9: note = Seed: LVVVGAVGV (KRAS G12V)
FVVAGPVGQ

SEQ ID NO: 50884 - protein, 9 aa, synthetic construct
  source 1..9: note = Seed: LVVVGAVGV (KRAS G12V)
FVVAGPVGR

SEQ ID NO: 50885 - protein, 9 aa, synthetic construct
  source 1..9: note = Seed: LVVVGAVGV (KRAS G12V)
FVVAGPVGS

SEQ ID NO: 50886 - protein, 9 aa, synthetic construct
  source 1..9: note = Seed: LVVVGAVGV (KRAS G12V)
FVVAGPVGT

SEQ ID NO: 50887 - protein, 9 aa, synthetic construct
  source 1..9: note = Seed: LVVVGAVGV (KRAS G12V)
FVVAGPVGW

SEQ ID NO: 50888 - protein, 9 aa, synthetic construct
  source 1..9: note = Seed: LVVVGAVGV (KRAS G12V)
FVVAGPVGY

SEQ ID NO: 50889 - protein, 9 aa, synthetic construct
  source 1..9: note = Seed: LVVVGAVGV (KRAS G12V)
FVVAGQVGA

SEQ ID NO: 50890 - protein, 9 aa, synthetic construct
  source 1..9: note = Seed: LVVVGAVGV (KRAS G12V)
FVVAGQVGC

SEQ ID NO: 50891 - protein, 9 aa, synthetic construct
  source 1..9: note = Seed: LVVVGAVGV (KRAS G12V)
FVVAGQVGD

SEQ ID NO: 50892 - protein, 9 aa, synthetic construct
  source 1..9: note = Seed: LVVVGAVGV (KRAS G12V)
FVVAGQVGE

SEQ ID NO: 50893 - protein, 9 aa, synthetic construct
  source 1..9: note = Seed: LVVVGAVGV (KRAS G12V)
FVVAGQVGF

SEQ ID NO: 50894 - protein, 9 aa, synthetic construct
  source 1..9: note = Seed: LVVVGAVGV (KRAS G12V)
FVVAGQVGG

SEQ ID NO: 50895 - protein, 9 aa, synthetic construct
  source 1..9: note = Seed: LVVVGAVGV (KRAS G12V)
FVVAGQVGH

SEQ ID NO: 50896 - protein, 9 aa, synthetic construct
  source 1..9: note = Seed: LVVVGAVGV (KRAS G12V)
FVVAGQVGI

SEQ ID NO: 50897 - protein, 9 aa, synthetic construct
  source 1..9: note = Seed: LVVVGAVGV (KRAS G12V)
FVVAGQVGL

SEQ ID NO: 50898 - protein, 9 aa, synthetic construct
  source 1..9: note = Seed: LVVVGAVGV (KRAS G12V)
FVVAGQVGM

SEQ ID NO: 50899 - protein, 9 aa, synthetic construct
  source 1..9: note = Seed: LVVVGAVGV (KRAS G12V)
FVVAGQVGN

SEQ ID NO: 50900 - protein, 9 aa, synthetic construct
  source 1..9: note = Seed: LVVVGAVGV (KRAS G12V)
FVVAGQVGQ

SEQ ID NO: 50901 - protein, 9 aa, synthetic construct
  source 1..9: note = Seed: LVVVGAVGV (KRAS G12V)
FVVAGQVGR

SEQ ID NO: 50902 - protein, 9 aa, synthetic construct
  source 1..9: note = Seed: LVVVGAVGV (KRAS G12V)
FVVAGQVGS

SEQ ID NO: 50903 - protein, 9 aa, synthetic construct
  source 1..9: note = Seed: LVVVGAVGV (KRAS G12V)
FVVAGQVGT

SEQ ID NO: 50904 - protein, 9 aa, synthetic construct
  source 1..9: note = Seed: LVVVGAVGV (KRAS G12V)
FVVAGQVGV

SEQ ID NO: 50905 - protein, 9 aa, synthetic construct
  source 1..9: note = Seed: LVVVGAVGV (KRAS G12V)
FVVAGQVGY

SEQ ID NO: 50906 - protein, 9 aa, synthetic construct
  source 1..9: note = Seed: LVVVGAVGV (KRAS G12V)
FVVAGRVGA

SEQ ID NO: 50907 - protein, 9 aa, synthetic construct
  source 1..9: note = Seed: LVVVGAVGV (KRAS G12V)
FVVAGRVGC

SEQ ID NO: 50908 - protein, 9 aa, synthetic construct
  source 1..9: note = Seed: LVVVGAVGV (KRAS G12V)
FVVAGRVGD

SEQ ID NO: 50909 - protein, 9 aa, synthetic construct
  source 1..9: note = Seed: LVVVGAVGV (KRAS G12V)
FVVAGRVGE

SEQ ID NO: 50910 - protein, 9 aa, synthetic construct
  source 1..9: note = Seed: LVVVGAVGV (KRAS G12V)
FVVAGRVGF

SEQ ID NO: 50911 - protein, 9 aa, synthetic construct
  source 1..9: note = Seed: LVVVGAVGV (KRAS G12V)
FVVAGRVGG

SEQ ID NO: 50912 - protein, 9 aa, synthetic construct
  source 1..9: note = Seed: LVVVGAVGV (KRAS G12V)
FVVAGRVGH

SEQ ID NO: 50913 - protein, 9 aa, synthetic construct
  source 1..9: note = Seed: LVVVGAVGV (KRAS G12V)
FVVAGRVGI

SEQ ID NO: 50914 - protein, 9 aa, synthetic construct
  source 1..9: note = Seed: LVVVGAVGV (KRAS G12V)
FVVAGRVGK

SEQ ID NO: 50915 - protein, 9 aa, synthetic construct
  source 1..9: note = Seed: LVVVGAVGV (KRAS G12V)
FVVAGRVGL

SEQ ID NO: 50916 - protein, 9 aa, synthetic construct
  source 1..9: note = Seed: LVVVGAVGV (KRAS G12V)
FVVAGRVGM

SEQ ID NO: 50917 - protein, 9 aa, synthetic construct
  source 1..9: note = Seed: LVVVGAVGV (KRAS G12V)
FVVAGRVGN

SEQ ID NO: 50918 - protein, 9 aa, synthetic construct
  source 1..9: note = Seed: LVVVGAVGV (KRAS G12V)
FVVAGRVGP

SEQ ID NO: 50919 - protein, 9 aa, synthetic construct
  source 1..9: note = Seed: LVVVGAVGV (KRAS G12V)
FVVAGRVGQ

SEQ ID NO: 50920 - protein, 9 aa, synthetic construct
  source 1..9: note = Seed: LVVVGAVGV (KRAS G12V)
FVVAGRVGR

SEQ ID NO: 50921 - protein, 9 aa, synthetic construct
  source 1..9: note = Seed: LVVVGAVGV (KRAS G12V)
FVVAGRVGS

SEQ ID NO: 50922 - protein, 9 aa, synthetic construct
  source 1..9: note = Seed: LVVVGAVGV (KRAS G12V)
FVVAGRVGT

SEQ ID NO: 50923 - protein, 9 aa, synthetic construct
  source 1..9: note = Seed: LVVVGAVGV (KRAS G12V)
FVVAGRVGV

SEQ ID NO: 50924 - protein, 9 aa, synthetic construct
  source 1..9: note = Seed: LVVVGAVGV (KRAS G12V)
FVVAGRVGY

SEQ ID NO: 50925 - protein, 9 aa, synthetic construct
  source 1..9: note = Seed: LVVVGAVGV (KRAS G12V)
FVVAGSVGC

SEQ ID NO: 50926 - protein, 9 aa, synthetic construct
  source 1..9: note = Seed: LVVVGAVGV (KRAS G12V)
FVVAGSVGD

SEQ ID NO: 50927 - protein, 9 aa, synthetic construct
  source 1..9: note = Seed: LVVVGAVGV (KRAS G12V)
FVVAGSVGE

SEQ ID NO: 50928 - protein, 9 aa, synthetic construct
  source 1..9: note = Seed: LVVVGAVGV (KRAS G12V)
FVVAGSVGF

SEQ ID NO: 50929 - protein, 9 aa, synthetic construct
  source 1..9: note = Seed: LVVVGAVGV (KRAS G12V)
FVVAGSVGG

SEQ ID NO: 50930 - protein, 9 aa, synthetic construct
  source 1..9: note = Seed: LVVVGAVGV (KRAS G12V)
FVVAGSVGH

SEQ ID NO: 50931 - protein, 9 aa, synthetic construct
  source 1..9: note = Seed: LVVVGAVGV (KRAS G12V)
FVVAGSVGK

SEQ ID NO: 50932 - protein, 9 aa, synthetic construct
  source 1..9: note = Seed: LVVVGAVGV (KRAS G12V)
FVVAGSVGN

SEQ ID NO: 50933 - protein, 9 aa, synthetic construct
  source 1..9: note = Seed: LVVVGAVGV (KRAS G12V)
FVVAGSVGP

SEQ ID NO: 50934 - protein, 9 aa, synthetic construct
  source 1..9: note = Seed: LVVVGAVGV (KRAS G12V)
FVVAGSVGQ

SEQ ID NO: 50935 - protein, 9 aa, synthetic construct
  source 1..9: note = Seed: LVVVGAVGV (KRAS G12V)
FVVAGSVGR

SEQ ID NO: 50936 - protein, 9 aa, synthetic construct
  source 1..9: note = Seed: LVVVGAVGV (KRAS G12V)
FVVAGSVGW

SEQ ID NO: 50937 - protein, 9 aa, synthetic construct
  source 1..9: note = Seed: LVVVGAVGV (KRAS G12V)
FVVAGSVGY

SEQ ID NO: 50938 - protein, 9 aa, synthetic construct
  source 1..9: note = Seed: LVVVGAVGV (KRAS G12V)
FVVAGTVGA

SEQ ID NO: 50939 - protein, 9 aa, synthetic construct
  source 1..9: note = Seed: LVVVGAVGV (KRAS G12V)
FVVAGTVGC

SEQ ID NO: 50940 - protein, 9 aa, synthetic construct
  source 1..9: note = Seed: LVVVGAVGV (KRAS G12V)
FVVAGTVGD

SEQ ID NO: 50941 - protein, 9 aa, synthetic construct
  source 1..9: note = Seed: LVVVGAVGV (KRAS G12V)
FVVAGTVGE

SEQ ID NO: 50942 - protein, 9 aa, synthetic construct
  source 1..9: note = Seed: LVVVGAVGV (KRAS G12V)
FVVAGTVGF

SEQ ID NO: 50943 - protein, 9 aa, synthetic construct
  source 1..9: note = Seed: LVVVGAVGV (KRAS G12V)
FVVAGTVGG

SEQ ID NO: 50944 - protein, 9 aa, synthetic construct
  source 1..9: note = Seed: LVVVGAVGV (KRAS G12V)
FVVAGTVGH

SEQ ID NO: 50945 - protein, 9 aa, synthetic construct
  source 1..9: note = Seed: LVVVGAVGV (KRAS G12V)
FVVAGTVGI

SEQ ID NO: 50946 - protein, 9 aa, synthetic construct
  source 1..9: note = Seed: LVVVGAVGV (KRAS G12V)
FVVAGTVGK

SEQ ID NO: 50947 - protein, 9 aa, synthetic construct
  source 1..9: note = Seed: LVVVGAVGV (KRAS G12V)
FVVAGTVGL

SEQ ID NO: 50948 - protein, 9 aa, synthetic construct
  source 1..9: note = Seed: LVVVGAVGV (KRAS G12V)
FVVAGTVGM

SEQ ID NO: 50949 - protein, 9 aa, synthetic construct
  source 1..9: note = Seed: LVVVGAVGV (KRAS G12V)
FVVAGTVGN

SEQ ID NO: 50950 - protein, 9 aa, synthetic construct
  source 1..9: note = Seed: LVVVGAVGV (KRAS G12V)
FVVAGTVGP

SEQ ID NO: 50951 - protein, 9 aa, synthetic construct
  source 1..9: note = Seed: LVVVGAVGV (KRAS G12V)
FVVAGTVGQ

SEQ ID NO: 50952 - protein, 9 aa, synthetic construct
  source 1..9: note = Seed: LVVVGAVGV (KRAS G12V)
FVVAGTVGR

SEQ ID NO: 50953 - protein, 9 aa, synthetic construct
  source 1..9: note = Seed: LVVVGAVGV (KRAS G12V)
FVVAGTVGS

SEQ ID NO: 50954 - protein, 9 aa, synthetic construct
  source 1..9: note = Seed: LVVVGAVGV (KRAS G12V)
FVVAGTVGT

SEQ ID NO: 50955 - protein, 9 aa, synthetic construct
  source 1..9: note = Seed: LVVVGAVGV (KRAS G12V)
FVVAGTVGV

SEQ ID NO: 50956 - protein, 9 aa, synthetic construct
  source 1..9: note = Seed: LVVVGAVGV (KRAS G12V)
FVVAGTVGW

SEQ ID NO: 50957 - protein, 9 aa, synthetic construct
  source 1..9: note = Seed: LVVVGAVGV (KRAS G12V)
FVVAGTVGY

SEQ ID NO: 50958 - protein, 9 aa, synthetic construct
  source 1..9: note = Seed: LVVVGAVGV (KRAS G12V)
FVVAGVVGA

SEQ ID NO: 50959 - protein, 9 aa, synthetic construct
  source 1..9: note = Seed: LVVVGAVGV (KRAS G12V)
FVVAGVVGC

SEQ ID NO: 50960 - protein, 9 aa, synthetic construct
  source 1..9: note = Seed: LVVVGAVGV (KRAS G12V)
FVVAGVVGD

SEQ ID NO: 50961 - protein, 9 aa, synthetic construct
  source 1..9: note = Seed: LVVVGAVGV (KRAS G12V)
FVVAGVVGE

SEQ ID NO: 50962 - protein, 9 aa, synthetic construct
  source 1..9: note = Seed: LVVVGAVGV (KRAS G12V)
FVVAGVVGF

SEQ ID NO: 50963 - protein, 9 aa, synthetic construct
  source 1..9: note = Seed: LVVVGAVGV (KRAS G12V)
FVVAGVVGG

SEQ ID NO: 50964 - protein, 9 aa, synthetic construct
  source 1..9: note = Seed: LVVVGAVGV (KRAS G12V)
FVVAGVVGH

SEQ ID NO: 50965 - protein, 9 aa, synthetic construct
  source 1..9: note = Seed: LVVVGAVGV (KRAS G12V)
FVVAGVVGI

SEQ ID NO: 50966 - protein, 9 aa, synthetic construct
  source 1..9: note = Seed: LVVVGAVGV (KRAS G12V)
FVVAGVVGK

SEQ ID NO: 50967 - protein, 9 aa, synthetic construct
  source 1..9: note = Seed: LVVVGAVGV (KRAS G12V)
FVVAGVVGL

SEQ ID NO: 50968 - protein, 9 aa, synthetic construct
  source 1..9: note = Seed: LVVVGAVGV (KRAS G12V)
FVVAGVVGM

SEQ ID NO: 50969 - protein, 9 aa, synthetic construct
  source 1..9: note = Seed: LVVVGAVGV (KRAS G12V)
FVVAGVVGN

SEQ ID NO: 50970 - protein, 9 aa, synthetic construct
  source 1..9: note = Seed: LVVVGAVGV (KRAS G12V)
FVVAGVVGP

SEQ ID NO: 50971 - protein, 9 aa, synthetic construct
  source 1..9: note = Seed: LVVVGAVGV (KRAS G12V)
FVVAGVVGQ

SEQ ID NO: 50972 - protein, 9 aa, synthetic construct
  source 1..9: note = Seed: LVVVGAVGV (KRAS G12V)
FVVAGVVGR

SEQ ID NO: 50973 - protein, 9 aa, synthetic construct
  source 1..9: note = Seed: LVVVGAVGV (KRAS G12V)
FVVAGVVGS

SEQ ID NO: 50974 - protein, 9 aa, synthetic construct
  source 1..9: note = Seed: LVVVGAVGV (KRAS G12V)
FVVAGVVGT

SEQ ID NO: 50975 - protein, 9 aa, synthetic construct
  source 1..9: note = Seed: LVVVGAVGV (KRAS G12V)
FVVAGVVGV

SEQ ID NO: 50976 - protein, 9 aa, synthetic construct
  source 1..9: note = Seed: LVVVGAVGV (KRAS G12V)
FVVAGVVGW

SEQ ID NO: 50977 - protein, 9 aa, synthetic construct
  source 1..9: note = Seed: LVVVGAVGV (KRAS G12V)
FVVAGVVGY

SEQ ID NO: 50978 - protein, 9 aa, synthetic construct
  source 1..9: note = Seed: LVVVGAVGV (KRAS G12V)
FVVAGWVGA

SEQ ID NO: 50979 - protein, 9 aa, synthetic construct
  source 1..9: note = Seed: LVVVGAVGV (KRAS G12V)
FVVAGWVGC

SEQ ID NO: 50980 - protein, 9 aa, synthetic construct
  source 1..9: note = Seed: LVVVGAVGV (KRAS G12V)
FVVAGWVGI

SEQ ID NO: 50981 - protein, 9 aa, synthetic construct
  source 1..9: note = Seed: LVVVGAVGV (KRAS G12V)
FVVAGWVGL

SEQ ID NO: 50982 - protein, 9 aa, synthetic construct
  source 1..9: note = Seed: LVVVGAVGV (KRAS G12V)
FVVAGWVGM

SEQ ID NO: 50983 - protein, 9 aa, synthetic construct
  source 1..9: note = Seed: LVVVGAVGV (KRAS G12V)
FVVAGWVGN

SEQ ID NO: 50984 - protein, 9 aa, synthetic construct
  source 1..9: note = Seed: LVVVGAVGV (KRAS G12V)
FVVAGWVGR

SEQ ID NO: 50985 - protein, 9 aa, synthetic construct
  source 1..9: note = Seed: LVVVGAVGV (KRAS G12V)
FVVAGWVGS

SEQ ID NO: 50986 - protein, 9 aa, synthetic construct
  source 1..9: note = Seed: LVVVGAVGV (KRAS G12V)
FVVAGWVGT

SEQ ID NO: 50987 - protein, 9 aa, synthetic construct
  source 1..9: note = Seed: LVVVGAVGV (KRAS G12V)
FVVAGWVGV

SEQ ID NO: 50988 - protein, 9 aa, synthetic construct
  source 1..9: note = Seed: LVVVGAVGV (KRAS G12V)
FVVAGWVGY

SEQ ID NO: 50989 - protein, 9 aa, synthetic construct
  source 1..9: note = Seed: LVVVGAVGV (KRAS G12V)
FVVAGYVGA

SEQ ID NO: 50990 - protein, 9 aa, synthetic construct
  source 1..9: note = Seed: LVVVGAVGV (KRAS G12V)
FVVAGYVGG

SEQ ID NO: 50991 - protein, 9 aa, synthetic construct
  source 1..9: note = Seed: LVVVGAVGV (KRAS G12V)
FVVAGYVGI

SEQ ID NO: 50992 - protein, 9 aa, synthetic construct
  source 1..9: note = Seed: LVVVGAVGV (KRAS G12V)
FVVAGYVGL

SEQ ID NO: 50993 - protein, 9 aa, synthetic construct
  source 1..9: note = Seed: LVVVGAVGV (KRAS G12V)
FVVAGYVGM

SEQ ID NO: 50994 - protein, 9 aa, synthetic construct
  source 1..9: note = Seed: LVVVGAVGV (KRAS G12V)
FVVAGYVGN

SEQ ID NO: 50995 - protein, 9 aa, synthetic construct
  source 1..9: note = Seed: LVVVGAVGV (KRAS G12V)
FVVAGYVGS

SEQ ID NO: 50996 - protein, 9 aa, synthetic construct
  source 1..9: note = Seed: LVVVGAVGV (KRAS G12V)
FVVAGYVGT

SEQ ID NO: 50997 - protein, 9 aa, synthetic construct
  source 1..9: note = Seed: LVVVGAVGV (KRAS G12V)
FVVAGYVGV

SEQ ID NO: 50998 - protein, 9 aa, synthetic construct
  source 1..9: note = Seed: LVVVGAVGV (KRAS G12V)
FVVCGAVGA

SEQ ID NO: 50999 - protein, 9 aa, synthetic construct
  source 1..9: note = Seed: LVVVGAVGV (KRAS G12V)
FVVCGAVGC

SEQ ID NO: 51000 - protein, 9 aa, synthetic construct
  source 1..9: note = Seed: LVVVGAVGV (KRAS G12V)
FVVCGAVGF

SEQ ID NO: 51001 - protein, 9 aa, synthetic construct
  source 1..9: note = Seed: LVVVGAVGV (KRAS G12V)
FVVCGAVGG

SEQ ID NO: 51002 - protein, 9 aa, synthetic construct
  source 1..9: note = Seed: LVVVGAVGV (KRAS G12V)
FVVCGAVGH

SEQ ID NO: 51003 - protein, 9 aa, synthetic construct
  source 1..9: note = Seed: LVVVGAVGV (KRAS G12V)
FVVCGAVGI

SEQ ID NO: 51004 - protein, 9 aa, synthetic construct
  source 1..9: note = Seed: LVVVGAVGV (KRAS G12V)
FVVCGAVGK

SEQ ID NO: 51005 - protein, 9 aa, synthetic construct
  source 1..9: note = Seed: LVVVGAVGV (KRAS G12V)
FVVCGAVGL

SEQ ID NO: 51006 - protein, 9 aa, synthetic construct
  source 1..9: note = Seed: LVVVGAVGV (KRAS G12V)
FVVCGAVGM

SEQ ID NO: 51007 - protein, 9 aa, synthetic construct
  source 1..9: note = Seed: LVVVGAVGV (KRAS G12V)
FVVCGAVGN

SEQ ID NO: 51008 - protein, 9 aa, synthetic construct
  source 1..9: note = Seed: LVVVGAVGV (KRAS G12V)
FVVCGAVGP

SEQ ID NO: 51009 - protein, 9 aa, synthetic construct
  source 1..9: note = Seed: LVVVGAVGV (KRAS G12V)
FVVCGAVGQ

SEQ ID NO: 51010 - protein, 9 aa, synthetic construct
  source 1..9: note = Seed: LVVVGAVGV (KRAS G12V)
FVVCGAVGR

SEQ ID NO: 51011 - protein, 9 aa, synthetic construct
  source 1..9: note = Seed: LVVVGAVGV (KRAS G12V)
FVVCGAVGS

SEQ ID NO: 51012 - protein, 9 aa, synthetic construct
  source 1..9: note = Seed: LVVVGAVGV (KRAS G12V)
FVVCGAVGT

SEQ ID NO: 51013 - protein, 9 aa, synthetic construct
  source 1..9: note = Seed: LVVVGAVGV (KRAS G12V)
FVVCGAVGV

SEQ ID NO: 51014 - protein, 9 aa, synthetic construct
  source 1..9: note = Seed: LVVVGAVGV (KRAS G12V)
FVVCGAVGY

SEQ ID NO: 51015 - protein, 9 aa, synthetic construct
  source 1..9: note = Seed: LVVVGAVGV (KRAS G12V)
FVVCGGVGA

SEQ ID NO: 51016 - protein, 9 aa, synthetic construct
  source 1..9: note = Seed: LVVVGAVGV (KRAS G12V)
FVVCGGVGF

SEQ ID NO: 51017 - protein, 9 aa, synthetic construct
  source 1..9: note = Seed: LVVVGAVGV (KRAS G12V)
FVVCGGVGG

SEQ ID NO: 51018 - protein, 9 aa, synthetic construct
  source 1..9: note = Seed: LVVVGAVGV (KRAS G12V)
FVVCGGVGI

SEQ ID NO: 51019 - protein, 9 aa, synthetic construct
  source 1..9: note = Seed: LVVVGAVGV (KRAS G12V)
FVVCGGVGL

SEQ ID NO: 51020 - protein, 9 aa, synthetic construct
  source 1..9: note = Seed: LVVVGAVGV (KRAS G12V)
FVVCGGVGM

SEQ ID NO: 51021 - protein, 9 aa, synthetic construct
  source 1..9: note = Seed: LVVVGAVGV (KRAS G12V)
FVVCGGVGN

SEQ ID NO: 51022 - protein, 9 aa, synthetic construct
  source 1..9: note = Seed: LVVVGAVGV (KRAS G12V)
FVVCGGVGS

SEQ ID NO: 51023 - protein, 9 aa, synthetic construct
  source 1..9: note = Seed: LVVVGAVGV (KRAS G12V)
FVVCGGVGT

SEQ ID NO: 51024 - protein, 9 aa, synthetic construct
  source 1..9: note = Seed: LVVVGAVGV (KRAS G12V)
FVVCGGVGV

SEQ ID NO: 51025 - protein, 9 aa, synthetic construct
  source 1..9: note = Seed: LVVVGAVGV (KRAS G12V)
FVVCGGVGY

SEQ ID NO: 51026 - protein, 9 aa, synthetic construct
  source 1..9: note = Seed: LVVVGAVGV (KRAS G12V)
FVVCGHVGA

SEQ ID NO: 51027 - protein, 9 aa, synthetic construct
  source 1..9: note = Seed: LVVVGAVGV (KRAS G12V)
FVVCGHVGL

SEQ ID NO: 51028 - protein, 9 aa, synthetic construct
  source 1..9: note = Seed: LVVVGAVGV (KRAS G12V)
FVVCGHVGV

SEQ ID NO: 51029 - protein, 9 aa, synthetic construct
  source 1..9: note = Seed: LVVVGAVGV (KRAS G12V)
FVVCGIVGA

SEQ ID NO: 51030 - protein, 9 aa, synthetic construct
  source 1..9: note = Seed: LVVVGAVGV (KRAS G12V)
FVVCGIVGN

SEQ ID NO: 51031 - protein, 9 aa, synthetic construct
  source 1..9: note = Seed: LVVVGAVGV (KRAS G12V)
FVVCGKVGA

SEQ ID NO: 51032 - protein, 9 aa, synthetic construct
  source 1..9: note = Seed: LVVVGAVGV (KRAS G12V)
FVVCGKVGG

SEQ ID NO: 51033 - protein, 9 aa, synthetic construct
  source 1..9: note = Seed: LVVVGAVGV (KRAS G12V)
FVVCGKVGH

SEQ ID NO: 51034 - protein, 9 aa, synthetic construct
  source 1..9: note = Seed: LVVVGAVGV (KRAS G12V)
FVVCGKVGM

SEQ ID NO: 51035 - protein, 9 aa, synthetic construct
  source 1..9: note = Seed: LVVVGAVGV (KRAS G12V)
FVVCGKVGN

SEQ ID NO: 51036 - protein, 9 aa, synthetic construct
  source 1..9: note = Seed: LVVVGAVGV (KRAS G12V)
FVVCGKVGQ

SEQ ID NO: 51037 - protein, 9 aa, synthetic construct
  source 1..9: note = Seed: LVVVGAVGV (KRAS G12V)
FVVCGKVGS

SEQ ID NO: 51038 - protein, 9 aa, synthetic construct
  source 1..9: note = Seed: LVVVGAVGV (KRAS G12V)
FVVCGKVGT

SEQ ID NO: 51039 - protein, 9 aa, synthetic construct
  source 1..9: note = Seed: LVVVGAVGV (KRAS G12V)
FVVCGMVGA

SEQ ID NO: 51040 - protein, 9 aa, synthetic construct
  source 1..9: note = Seed: LVVVGAVGV (KRAS G12V)
FVVCGNVGA

SEQ ID NO: 51041 - protein, 9 aa, synthetic construct
  source 1..9: note = Seed: LVVVGAVGV (KRAS G12V)
FVVCGNVGF

SEQ ID NO: 51042 - protein, 9 aa, synthetic construct
  source 1..9: note = Seed: LVVVGAVGV (KRAS G12V)
FVVCGNVGG

SEQ ID NO: 51043 - protein, 9 aa, synthetic construct
  source 1..9: note = Seed: LVVVGAVGV (KRAS G12V)
FVVCGNVGI

SEQ ID NO: 51044 - protein, 9 aa, synthetic construct
  source 1..9: note = Seed: LVVVGAVGV (KRAS G12V)
FVVCGNVGL

SEQ ID NO: 51045 - protein, 9 aa, synthetic construct
  source 1..9: note = Seed: LVVVGAVGV (KRAS G12V)
FVVCGNVGM

SEQ ID NO: 51046 - protein, 9 aa, synthetic construct
  source 1..9: note = Seed: LVVVGAVGV (KRAS G12V)
FVVCGNVGN

SEQ ID NO: 51047 - protein, 9 aa, synthetic construct
  source 1..9: note = Seed: LVVVGAVGV (KRAS G12V)
FVVCGNVGQ

SEQ ID NO: 51048 - protein, 9 aa, synthetic construct
  source 1..9: note = Seed: LVVVGAVGV (KRAS G12V)
FVVCGNVGS

SEQ ID NO: 51049 - protein, 9 aa, synthetic construct
  source 1..9: note = Seed: LVVVGAVGV (KRAS G12V)
FVVCGNVGT

SEQ ID NO: 51050 - protein, 9 aa, synthetic construct
  source 1..9: note = Seed: LVVVGAVGV (KRAS G12V)
FVVCGNVGV

SEQ ID NO: 51051 - protein, 9 aa, synthetic construct
  source 1..9: note = Seed: LVVVGAVGV (KRAS G12V)
FVVCGPVGA

SEQ ID NO: 51052 - protein, 9 aa, synthetic construct
  source 1..9: note = Seed: LVVVGAVGV (KRAS G12V)
FVVCGPVGC

SEQ ID NO: 51053 - protein, 9 aa, synthetic construct
  source 1..9: note = Seed: LVVVGAVGV (KRAS G12V)
FVVCGPVGF

SEQ ID NO: 51054 - protein, 9 aa, synthetic construct
  source 1..9: note = Seed: LVVVGAVGV (KRAS G12V)
FVVCGPVGG

SEQ ID NO: 51055 - protein, 9 aa, synthetic construct
  source 1..9: note = Seed: LVVVGAVGV (KRAS G12V)
FVVCGPVGH

SEQ ID NO: 51056 - protein, 9 aa, synthetic construct
  source 1..9: note = Seed: LVVVGAVGV (KRAS G12V)
FVVCGPVGI

SEQ ID NO: 51057 - protein, 9 aa, synthetic construct
  source 1..9: note = Seed: LVVVGAVGV (KRAS G12V)
FVVCGPVGL

SEQ ID NO: 51058 - protein, 9 aa, synthetic construct
  source 1..9: note = Seed: LVVVGAVGV (KRAS G12V)
FVVCGPVGM

SEQ ID NO: 51059 - protein, 9 aa, synthetic construct
  source 1..9: note = Seed: LVVVGAVGV (KRAS G12V)
FVVCGPVGN

SEQ ID NO: 51060 - protein, 9 aa, synthetic construct
  source 1..9: note = Seed: LVVVGAVGV (KRAS G12V)
FVVCGPVGQ

SEQ ID NO: 51061 - protein, 9 aa, synthetic construct
  source 1..9: note = Seed: LVVVGAVGV (KRAS G12V)
FVVCGPVGR

SEQ ID NO: 51062 - protein, 9 aa, synthetic construct
  source 1..9: note = Seed: LVVVGAVGV (KRAS G12V)
FVVCGPVGS

SEQ ID NO: 51063 - protein, 9 aa, synthetic construct
  source 1..9: note = Seed: LVVVGAVGV (KRAS G12V)
FVVCGPVGT

SEQ ID NO: 51064 - protein, 9 aa, synthetic construct
  source 1..9: note = Seed: LVVVGAVGV (KRAS G12V)
FVVCGPVGV

SEQ ID NO: 51065 - protein, 9 aa, synthetic construct
  source 1..9: note = Seed: LVVVGAVGV (KRAS G12V)
FVVCGPVGY

SEQ ID NO: 51066 - protein, 9 aa, synthetic construct
  source 1..9: note = Seed: LVVVGAVGV (KRAS G12V)
FVVCGQVGL

SEQ ID NO: 51067 - protein, 9 aa, synthetic construct
  source 1..9: note = Seed: LVVVGAVGV (KRAS G12V)
FVVCGRVGA

SEQ ID NO: 51068 - protein, 9 aa, synthetic construct
  source 1..9: note = Seed: LVVVGAVGV (KRAS G12V)
FVVCGRVGG

SEQ ID NO: 51069 - protein, 9 aa, synthetic construct
  source 1..9: note = Seed: LVVVGAVGV (KRAS G12V)
FVVCGRVGH

SEQ ID NO: 51070 - protein, 9 aa, synthetic construct
  source 1..9: note = Seed: LVVVGAVGV (KRAS G12V)
FVVCGRVGM

SEQ ID NO: 51071 - protein, 9 aa, synthetic construct
  source 1..9: note = Seed: LVVVGAVGV (KRAS G12V)
FVVCGRVGN

SEQ ID NO: 51072 - protein, 9 aa, synthetic construct
  source 1..9: note = Seed: LVVVGAVGV (KRAS G12V)
FVVCGRVGP

SEQ ID NO: 51073 - protein, 9 aa, synthetic construct
  source 1..9: note = Seed: LVVVGAVGV (KRAS G12V)
FVVCGRVGQ

SEQ ID NO: 51074 - protein, 9 aa, synthetic construct
  source 1..9: note = Seed: LVVVGAVGV (KRAS G12V)
FVVCGRVGS

SEQ ID NO: 51075 - protein, 9 aa, synthetic construct
  source 1..9: note = Seed: LVVVGAVGV (KRAS G12V)
FVVCGRVGT

SEQ ID NO: 51076 - protein, 9 aa, synthetic construct
  source 1..9: note = Seed: LVVVGAVGV (KRAS G12V)
FVVCGSVGA

SEQ ID NO: 51077 - protein, 9 aa, synthetic construct
  source 1..9: note = Seed: LVVVGAVGV (KRAS G12V)
FVVCGSVGF

SEQ ID NO: 51078 - protein, 9 aa, synthetic construct
  source 1..9: note = Seed: LVVVGAVGV (KRAS G12V)
FVVCGSVGG

SEQ ID NO: 51079 - protein, 9 aa, synthetic construct
  source 1..9: note = Seed: LVVVGAVGV (KRAS G12V)
FVVCGSVGH

SEQ ID NO: 51080 - protein, 9 aa, synthetic construct
  source 1..9: note = Seed: LVVVGAVGV (KRAS G12V)
FVVCGSVGI

SEQ ID NO: 51081 - protein, 9 aa, synthetic construct
  source 1..9: note = Seed: LVVVGAVGV (KRAS G12V)
FVVCGSVGL

SEQ ID NO: 51082 - protein, 9 aa, synthetic construct
  source 1..9: note = Seed: LVVVGAVGV (KRAS G12V)
FVVCGSVGM

SEQ ID NO: 51083 - protein, 9 aa, synthetic construct
  source 1..9: note = Seed: LVVVGAVGV (KRAS G12V)
FVVCGSVGN

SEQ ID NO: 51084 - protein, 9 aa, synthetic construct
  source 1..9: note = Seed: LVVVGAVGV (KRAS G12V)
FVVCGSVGQ

SEQ ID NO: 51085 - protein, 9 aa, synthetic construct
  source 1..9: note = Seed: LVVVGAVGV (KRAS G12V)
FVVCGSVGR

SEQ ID NO: 51086 - protein, 9 aa, synthetic construct
  source 1..9: note = Seed: LVVVGAVGV (KRAS G12V)
FVVCGSVGS

SEQ ID NO: 51087 - protein, 9 aa, synthetic construct
  source 1..9: note = Seed: LVVVGAVGV (KRAS G12V)
FVVCGSVGT

SEQ ID NO: 51088 - protein, 9 aa, synthetic construct
  source 1..9: note = Seed: LVVVGAVGV (KRAS G12V)
FVVCGSVGV

SEQ ID NO: 51089 - protein, 9 aa, synthetic construct
  source 1..9: note = Seed: LVVVGAVGV (KRAS G12V)
FVVCGSVGY

SEQ ID NO: 51090 - protein, 9 aa, synthetic construct
  source 1..9: note = Seed: LVVVGAVGV (KRAS G12V)
FVVCGTVGA

SEQ ID NO: 51091 - protein, 9 aa, synthetic construct
  source 1..9: note = Seed: LVVVGAVGV (KRAS G12V)
FVVCGTVGF

SEQ ID NO: 51092 - protein, 9 aa, synthetic construct
  source 1..9: note = Seed: LVVVGAVGV (KRAS G12V)
FVVCGTVGI

SEQ ID NO: 51093 - protein, 9 aa, synthetic construct
  source 1..9: note = Seed: LVVVGAVGV (KRAS G12V)
FVVCGTVGL

SEQ ID NO: 51094 - protein, 9 aa, synthetic construct
  source 1..9: note = Seed: LVVVGAVGV (KRAS G12V)
FVVCGTVGM

SEQ ID NO: 51095 - protein, 9 aa, synthetic construct
  source 1..9: note = Seed: LVVVGAVGV (KRAS G12V)
FVVCGTVGN

SEQ ID NO: 51096 - protein, 9 aa, synthetic construct
  source 1..9: note = Seed: LVVVGAVGV (KRAS G12V)
FVVCGTVGS

SEQ ID NO: 51097 - protein, 9 aa, synthetic construct
  source 1..9: note = Seed: LVVVGAVGV (KRAS G12V)
FVVCGTVGT

SEQ ID NO: 51098 - protein, 9 aa, synthetic construct
  source 1..9: note = Seed: LVVVGAVGV (KRAS G12V)
FVVCGTVGV

SEQ ID NO: 51099 - protein, 9 aa, synthetic construct
  source 1..9: note = Seed: LVVVGAVGV (KRAS G12V)
FVVCGVVGA

SEQ ID NO: 51100 - protein, 9 aa, synthetic construct
  source 1..9: note = Seed: LVVVGAVGV (KRAS G12V)
FVVCGVVGI

SEQ ID NO: 51101 - protein, 9 aa, synthetic construct
  source 1..9: note = Seed: LVVVGAVGV (KRAS G12V)
FVVCGVVGL

SEQ ID NO: 51102 - protein, 9 aa, synthetic construct
  source 1..9: note = Seed: LVVVGAVGV (KRAS G12V)
FVVCGVVGM

SEQ ID NO: 51103 - protein, 9 aa, synthetic construct
  source 1..9: note = Seed: LVVVGAVGV (KRAS G12V)
FVVCGVVGN

SEQ ID NO: 51104 - protein, 9 aa, synthetic construct
  source 1..9: note = Seed: LVVVGAVGV (KRAS G12V)
FVVCGVVGS

SEQ ID NO: 51105 - protein, 9 aa, synthetic construct
  source 1..9: note = Seed: LVVVGAVGV (KRAS G12V)
FVVCGVVGT

SEQ ID NO: 51106 - protein, 9 aa, synthetic construct
  source 1..9: note = Seed: LVVVGAVGV (KRAS G12V)
FVVCGVVGV

SEQ ID NO: 51107 - protein, 9 aa, synthetic construct
  source 1..9: note = Seed: LVVVGAVGV (KRAS G12V)
FVVDGAVGA

SEQ ID NO: 51108 - protein, 9 aa, synthetic construct
  source 1..9: note = Seed: LVVVGAVGV (KRAS G12V)
FVVDGAVGF

SEQ ID NO: 51109 - protein, 9 aa, synthetic construct
  source 1..9: note = Seed: LVVVGAVGV (KRAS G12V)
FVVDGAVGG

SEQ ID NO: 51110 - protein, 9 aa, synthetic construct
  source 1..9: note = Seed: LVVVGAVGV (KRAS G12V)
FVVDGAVGH

SEQ ID NO: 51111 - protein, 9 aa, synthetic construct
  source 1..9: note = Seed: LVVVGAVGV (KRAS G12V)
FVVDGAVGI

SEQ ID NO: 51112 - protein, 9 aa, synthetic construct
  source 1..9: note = Seed: LVVVGAVGV (KRAS G12V)
FVVDGAVGL

SEQ ID NO: 51113 - protein, 9 aa, synthetic construct
  source 1..9: note = Seed: LVVVGAVGV (KRAS G12V)
FVVDGAVGM

SEQ ID NO: 51114 - protein, 9 aa, synthetic construct
  source 1..9: note = Seed: LVVVGAVGV (KRAS G12V)
FVVDGAVGN

SEQ ID NO: 51115 - protein, 9 aa, synthetic construct
  source 1..9: note = Seed: LVVVGAVGV (KRAS G12V)
FVVDGAVGP

SEQ ID NO: 51116 - protein, 9 aa, synthetic construct
  source 1..9: note = Seed: LVVVGAVGV (KRAS G12V)
FVVDGAVGQ

SEQ ID NO: 51117 - protein, 9 aa, synthetic construct
  source 1..9: note = Seed: LVVVGAVGV (KRAS G12V)
FVVDGAVGS

SEQ ID NO: 51118 - protein, 9 aa, synthetic construct
  source 1..9: note = Seed: LVVVGAVGV (KRAS G12V)
FVVDGAVGT

SEQ ID NO: 51119 - protein, 9 aa, synthetic construct
  source 1..9: note = Seed: LVVVGAVGV (KRAS G12V)
FVVDGAVGV

SEQ ID NO: 51120 - protein, 9 aa, synthetic construct
  source 1..9: note = Seed: LVVVGAVGV (KRAS G12V)
FVVDGAVGY

SEQ ID NO: 51121 - protein, 9 aa, synthetic construct
  source 1..9: note = Seed: LVVVGAVGV (KRAS G12V)
FVVDGDVGA

SEQ ID NO: 51122 - protein, 9 aa, synthetic construct
  source 1..9: note = Seed: LVVVGAVGV (KRAS G12V)
FVVDGDVGG

SEQ ID NO: 51123 - protein, 9 aa, synthetic construct
  source 1..9: note = Seed: LVVVGAVGV (KRAS G12V)
FVVDGDVGH

SEQ ID NO: 51124 - protein, 9 aa, synthetic construct
  source 1..9: note = Seed: LVVVGAVGV (KRAS G12V)
FVVDGDVGI

SEQ ID NO: 51125 - protein, 9 aa, synthetic construct
  source 1..9: note = Seed: LVVVGAVGV (KRAS G12V)
FVVDGDVGL

SEQ ID NO: 51126 - protein, 9 aa, synthetic construct
  source 1..9: note = Seed: LVVVGAVGV (KRAS G12V)
FVVDGDVGM

SEQ ID NO: 51127 - protein, 9 aa, synthetic construct
  source 1..9: note = Seed: LVVVGAVGV (KRAS G12V)
FVVDGDVGN

SEQ ID NO: 51128 - protein, 9 aa, synthetic construct
  source 1..9: note = Seed: LVVVGAVGV (KRAS G12V)
FVVDGDVGQ

SEQ ID NO: 51129 - protein, 9 aa, synthetic construct
  source 1..9: note = Seed: LVVVGAVGV (KRAS G12V)
FVVDGDVGS

SEQ ID NO: 51130 - protein, 9 aa, synthetic construct
  source 1..9: note = Seed: LVVVGAVGV (KRAS G12V)
FVVDGDVGT

SEQ ID NO: 51131 - protein, 9 aa, synthetic construct
  source 1..9: note = Seed: LVVVGAVGV (KRAS G12V)
FVVDGDVGV

SEQ ID NO: 51132 - protein, 9 aa, synthetic construct
  source 1..9: note = Seed: LVVVGAVGV (KRAS G12V)
FVVDGFVGI

SEQ ID NO: 51133 - protein, 9 aa, synthetic construct
  source 1..9: note = Seed: LVVVGAVGV (KRAS G12V)
FVVDGFVGL

SEQ ID NO: 51134 - protein, 9 aa, synthetic construct
  source 1..9: note = Seed: LVVVGAVGV (KRAS G12V)
FVVDGFVGM

SEQ ID NO: 51135 - protein, 9 aa, synthetic construct
  source 1..9: note = Seed: LVVVGAVGV (KRAS G12V)
FVVDGFVGV

SEQ ID NO: 51136 - protein, 9 aa, synthetic construct
  source 1..9: note = Seed: LVVVGAVGV (KRAS G12V)
FVVDGGVGA

SEQ ID NO: 51137 - protein, 9 aa, synthetic construct
  source 1..9: note = Seed: LVVVGAVGV (KRAS G12V)
FVVDGGVGF

SEQ ID NO: 51138 - protein, 9 aa, synthetic construct
  source 1..9: note = Seed: LVVVGAVGV (KRAS G12V)
FVVDGGVGI

SEQ ID NO: 51139 - protein, 9 aa, synthetic construct
  source 1..9: note = Seed: LVVVGAVGV (KRAS G12V)
FVVDGGVGL

SEQ ID NO: 51140 - protein, 9 aa, synthetic construct
  source 1..9: note = Seed: LVVVGAVGV (KRAS G12V)
FVVDGGVGM

SEQ ID NO: 51141 - protein, 9 aa, synthetic construct
  source 1..9: note = Seed: LVVVGAVGV (KRAS G12V)
FVVDGGVGQ

SEQ ID NO: 51142 - protein, 9 aa, synthetic construct
  source 1..9: note = Seed: LVVVGAVGV (KRAS G12V)
FVVDGGVGS

SEQ ID NO: 51143 - protein, 9 aa, synthetic construct
  source 1..9: note = Seed: LVVVGAVGV (KRAS G12V)
FVVDGGVGT

SEQ ID NO: 51144 - protein, 9 aa, synthetic construct
  source 1..9: note = Seed: LVVVGAVGV (KRAS G12V)
FVVDGGVGV

SEQ ID NO: 51145 - protein, 9 aa, synthetic construct
  source 1..9: note = Seed: LVVVGAVGV (KRAS G12V)
FVVDGGVGY

SEQ ID NO: 51146 - protein, 9 aa, synthetic construct
  source 1..9: note = Seed: LVVVGAVGV (KRAS G12V)
FVVDGIVGA

SEQ ID NO: 51147 - protein, 9 aa, synthetic construct
  source 1..9: note = Seed: LVVVGAVGV (KRAS G12V)
FVVDGIVGF

SEQ ID NO: 51148 - protein, 9 aa, synthetic construct
  source 1..9: note = Seed: LVVVGAVGV (KRAS G12V)
FVVDGIVGG

SEQ ID NO: 51149 - protein, 9 aa, synthetic construct
  source 1..9: note = Seed: LVVVGAVGV (KRAS G12V)
FVVDGIVGH

SEQ ID NO: 51150 - protein, 9 aa, synthetic construct
  source 1..9: note = Seed: LVVVGAVGV (KRAS G12V)
FVVDGIVGI

SEQ ID NO: 51151 - protein, 9 aa, synthetic construct
  source 1..9: note = Seed: LVVVGAVGV (KRAS G12V)
FVVDGIVGL

SEQ ID NO: 51152 - protein, 9 aa, synthetic construct
  source 1..9: note = Seed: LVVVGAVGV (KRAS G12V)
FVVDGIVGM

SEQ ID NO: 51153 - protein, 9 aa, synthetic construct
  source 1..9: note = Seed: LVVVGAVGV (KRAS G12V)
FVVDGIVGN

SEQ ID NO: 51154 - protein, 9 aa, synthetic construct
  source 1..9: note = Seed: LVVVGAVGV (KRAS G12V)
FVVDGIVGQ

SEQ ID NO: 51155 - protein, 9 aa, synthetic construct
  source 1..9: note = Seed: LVVVGAVGV (KRAS G12V)
FVVDGIVGS

SEQ ID NO: 51156 - protein, 9 aa, synthetic construct
  source 1..9: note = Seed: LVVVGAVGV (KRAS G12V)
FVVDGIVGT

SEQ ID NO: 51157 - protein, 9 aa, synthetic construct
  source 1..9: note = Seed: LVVVGAVGV (KRAS G12V)
FVVDGIVGV

SEQ ID NO: 51158 - protein, 9 aa, synthetic construct
  source 1..9: note = Seed: LVVVGAVGV (KRAS G12V)
FVVDGIVGY

SEQ ID NO: 51159 - protein, 9 aa, synthetic construct
  source 1..9: note = Seed: LVVVGAVGV (KRAS G12V)
FVVDGNVGA

SEQ ID NO: 51160 - protein, 9 aa, synthetic construct
  source 1..9: note = Seed: LVVVGAVGV (KRAS G12V)
FVVDGNVGC

SEQ ID NO: 51161 - protein, 9 aa, synthetic construct
  source 1..9: note = Seed: LVVVGAVGV (KRAS G12V)
FVVDGNVGD

SEQ ID NO: 51162 - protein, 9 aa, synthetic construct
  source 1..9: note = Seed: LVVVGAVGV (KRAS G12V)
FVVDGNVGE

SEQ ID NO: 51163 - protein, 9 aa, synthetic construct
  source 1..9: note = Seed: LVVVGAVGV (KRAS G12V)
FVVDGNVGF

SEQ ID NO: 51164 - protein, 9 aa, synthetic construct
  source 1..9: note = Seed: LVVVGAVGV (KRAS G12V)
FVVDGNVGG

SEQ ID NO: 51165 - protein, 9 aa, synthetic construct
  source 1..9: note = Seed: LVVVGAVGV (KRAS G12V)
FVVDGNVGH

SEQ ID NO: 51166 - protein, 9 aa, synthetic construct
  source 1..9: note = Seed: LVVVGAVGV (KRAS G12V)
FVVDGNVGI

SEQ ID NO: 51167 - protein, 9 aa, synthetic construct
  source 1..9: note = Seed: LVVVGAVGV (KRAS G12V)
FVVDGNVGL

SEQ ID NO: 51168 - protein, 9 aa, synthetic construct
  source 1..9: note = Seed: LVVVGAVGV (KRAS G12V)
FVVDGNVGM

SEQ ID NO: 51169 - protein, 9 aa, synthetic construct
  source 1..9: note = Seed: LVVVGAVGV (KRAS G12V)
FVVDGNVGN

SEQ ID NO: 51170 - protein, 9 aa, synthetic construct
  source 1..9: note = Seed: LVVVGAVGV (KRAS G12V)
FVVDGNVGP

SEQ ID NO: 51171 - protein, 9 aa, synthetic construct
  source 1..9: note = Seed: LVVVGAVGV (KRAS G12V)
FVVDGNVGQ

SEQ ID NO: 51172 - protein, 9 aa, synthetic construct
  source 1..9: note = Seed: LVVVGAVGV (KRAS G12V)
FVVDGNVGS

SEQ ID NO: 51173 - protein, 9 aa, synthetic construct
  source 1..9: note = Seed: LVVVGAVGV (KRAS G12V)
FVVDGNVGT

SEQ ID NO: 51174 - protein, 9 aa, synthetic construct
  source 1..9: note = Seed: LVVVGAVGV (KRAS G12V)
FVVDGNVGV

SEQ ID NO: 51175 - protein, 9 aa, synthetic construct
  source 1..9: note = Seed: LVVVGAVGV (KRAS G12V)
FVVDGNVGW

SEQ ID NO: 51176 - protein, 9 aa, synthetic construct
  source 1..9: note = Seed: LVVVGAVGV (KRAS G12V)
FVVDGNVGY

SEQ ID NO: 51177 - protein, 9 aa, synthetic construct
  source 1..9: note = Seed: LVVVGAVGV (KRAS G12V)
FVVDGPVGA

SEQ ID NO: 51178 - protein, 9 aa, synthetic construct
  source 1..9: note = Seed: LVVVGAVGV (KRAS G12V)
FVVDGPVGF

SEQ ID NO: 51179 - protein, 9 aa, synthetic construct
  source 1..9: note = Seed: LVVVGAVGV (KRAS G12V)
FVVDGPVGI

SEQ ID NO: 51180 - protein, 9 aa, synthetic construct
  source 1..9: note = Seed: LVVVGAVGV (KRAS G12V)
FVVDGPVGL

SEQ ID NO: 51181 - protein, 9 aa, synthetic construct
  source 1..9: note = Seed: LVVVGAVGV (KRAS G12V)
FVVDGPVGM

SEQ ID NO: 51182 - protein, 9 aa, synthetic construct
  source 1..9: note = Seed: LVVVGAVGV (KRAS G12V)
FVVDGPVGQ

SEQ ID NO: 51183 - protein, 9 aa, synthetic construct
  source 1..9: note = Seed: LVVVGAVGV (KRAS G12V)
FVVDGPVGS

SEQ ID NO: 51184 - protein, 9 aa, synthetic construct
  source 1..9: note = Seed: LVVVGAVGV (KRAS G12V)
FVVDGPVGV

SEQ ID NO: 51185 - protein, 9 aa, synthetic construct
  source 1..9: note = Seed: LVVVGAVGV (KRAS G12V)
FVVDGPVGY

SEQ ID NO: 51186 - protein, 9 aa, synthetic construct
  source 1..9: note = Seed: LVVVGAVGV (KRAS G12V)
FVVDGSVGA

SEQ ID NO: 51187 - protein, 9 aa, synthetic construct
  source 1..9: note = Seed: LVVVGAVGV (KRAS G12V)
FVVDGSVGE

SEQ ID NO: 51188 - protein, 9 aa, synthetic construct
  source 1..9: note = Seed: LVVVGAVGV (KRAS G12V)
FVVDGSVGF

SEQ ID NO: 51189 - protein, 9 aa, synthetic construct
  source 1..9: note = Seed: LVVVGAVGV (KRAS G12V)
FVVDGSVGG

SEQ ID NO: 51190 - protein, 9 aa, synthetic construct
  source 1..9: note = Seed: LVVVGAVGV (KRAS G12V)
FVVDGSVGH

SEQ ID NO: 51191 - protein, 9 aa, synthetic construct
  source 1..9: note = Seed: LVVVGAVGV (KRAS G12V)
FVVDGSVGI

SEQ ID NO: 51192 - protein, 9 aa, synthetic construct
  source 1..9: note = Seed: LVVVGAVGV (KRAS G12V)
FVVDGSVGL

SEQ ID NO: 51193 - protein, 9 aa, synthetic construct
  source 1..9: note = Seed: LVVVGAVGV (KRAS G12V)
FVVDGSVGM

SEQ ID NO: 51194 - protein, 9 aa, synthetic construct
  source 1..9: note = Seed: LVVVGAVGV (KRAS G12V)
FVVDGSVGN

SEQ ID NO: 51195 - protein, 9 aa, synthetic construct
  source 1..9: note = Seed: LVVVGAVGV (KRAS G12V)
FVVDGSVGP

SEQ ID NO: 51196 - protein, 9 aa, synthetic construct
  source 1..9: note = Seed: LVVVGAVGV (KRAS G12V)
FVVDGSVGQ

SEQ ID NO: 51197 - protein, 9 aa, synthetic construct
  source 1..9: note = Seed: LVVVGAVGV (KRAS G12V)
FVVDGSVGS

SEQ ID NO: 51198 - protein, 9 aa, synthetic construct
  source 1..9: note = Seed: LVVVGAVGV (KRAS G12V)
FVVDGSVGT

SEQ ID NO: 51199 - protein, 9 aa, synthetic construct
  source 1..9: note = Seed: LVVVGAVGV (KRAS G12V)
FVVDGSVGV

SEQ ID NO: 51200 - protein, 9 aa, synthetic construct
  source 1..9: note = Seed: LVVVGAVGV (KRAS G12V)
FVVDGSVGY

SEQ ID NO: 51201 - protein, 9 aa, synthetic construct
  source 1..9: note = Seed: LVVVGAVGV (KRAS G12V)
FVVDGTVGA

SEQ ID NO: 51202 - protein, 9 aa, synthetic construct
  source 1..9: note = Seed: LVVVGAVGV (KRAS G12V)
FVVDGTVGE

SEQ ID NO: 51203 - protein, 9 aa, synthetic construct
  source 1..9: note = Seed: LVVVGAVGV (KRAS G12V)
FVVDGTVGF

SEQ ID NO: 51204 - protein, 9 aa, synthetic construct
  source 1..9: note = Seed: LVVVGAVGV (KRAS G12V)
FVVDGTVGG

SEQ ID NO: 51205 - protein, 9 aa, synthetic construct
  source 1..9: note = Seed: LVVVGAVGV (KRAS G12V)
FVVDGTVGH

SEQ ID NO: 51206 - protein, 9 aa, synthetic construct
  source 1..9: note = Seed: LVVVGAVGV (KRAS G12V)
FVVDGTVGI

SEQ ID NO: 51207 - protein, 9 aa, synthetic construct
  source 1..9: note = Seed: LVVVGAVGV (KRAS G12V)
FVVDGTVGL

SEQ ID NO: 51208 - protein, 9 aa, synthetic construct
  source 1..9: note = Seed: LVVVGAVGV (KRAS G12V)
FVVDGTVGM

SEQ ID NO: 51209 - protein, 9 aa, synthetic construct
  source 1..9: note = Seed: LVVVGAVGV (KRAS G12V)
FVVDGTVGN

SEQ ID NO: 51210 - protein, 9 aa, synthetic construct
  source 1..9: note = Seed: LVVVGAVGV (KRAS G12V)
FVVDGTVGP

SEQ ID NO: 51211 - protein, 9 aa, synthetic construct
  source 1..9: note = Seed: LVVVGAVGV (KRAS G12V)
FVVDGTVGQ

SEQ ID NO: 51212 - protein, 9 aa, synthetic construct
  source 1..9: note = Seed: LVVVGAVGV (KRAS G12V)
FVVDGTVGS

SEQ ID NO: 51213 - protein, 9 aa, synthetic construct
  source 1..9: note = Seed: LVVVGAVGV (KRAS G12V)
FVVDGTVGT

SEQ ID NO: 51214 - protein, 9 aa, synthetic construct
  source 1..9: note = Seed: LVVVGAVGV (KRAS G12V)
FVVDGTVGV

SEQ ID NO: 51215 - protein, 9 aa, synthetic construct
  source 1..9: note = Seed: LVVVGAVGV (KRAS G12V)
FVVDGTVGY

SEQ ID NO: 51216 - protein, 9 aa, synthetic construct
  source 1..9: note = Seed: LVVVGAVGV (KRAS G12V)
FVVDGVVGA

SEQ ID NO: 51217 - protein, 9 aa, synthetic construct
  source 1..9: note = Seed: LVVVGAVGV (KRAS G12V)
FVVDGVVGE

SEQ ID NO: 51218 - protein, 9 aa, synthetic construct
  source 1..9: note = Seed: LVVVGAVGV (KRAS G12V)
FVVDGVVGF

SEQ ID NO: 51219 - protein, 9 aa, synthetic construct
  source 1..9: note = Seed: LVVVGAVGV (KRAS G12V)
FVVDGVVGG

SEQ ID NO: 51220 - protein, 9 aa, synthetic construct
  source 1..9: note = Seed: LVVVGAVGV (KRAS G12V)
FVVDGVVGH

SEQ ID NO: 51221 - protein, 9 aa, synthetic construct
  source 1..9: note = Seed: LVVVGAVGV (KRAS G12V)
FVVDGVVGI

SEQ ID NO: 51222 - protein, 9 aa, synthetic construct
  source 1..9: note = Seed: LVVVGAVGV (KRAS G12V)
FVVDGVVGL

SEQ ID NO: 51223 - protein, 9 aa, synthetic construct
  source 1..9: note = Seed: LVVVGAVGV (KRAS G12V)
FVVDGVVGM

SEQ ID NO: 51224 - protein, 9 aa, synthetic construct
  source 1..9: note = Seed: LVVVGAVGV (KRAS G12V)
FVVDGVVGN

SEQ ID NO: 51225 - protein, 9 aa, synthetic construct
  source 1..9: note = Seed: LVVVGAVGV (KRAS G12V)
FVVDGVVGP

SEQ ID NO: 51226 - protein, 9 aa, synthetic construct
  source 1..9: note = Seed: LVVVGAVGV (KRAS G12V)
FVVDGVVGQ

SEQ ID NO: 51227 - protein, 9 aa, synthetic construct
  source 1..9: note = Seed: LVVVGAVGV (KRAS G12V)
FVVDGVVGS

SEQ ID NO: 51228 - protein, 9 aa, synthetic construct
  source 1..9: note = Seed: LVVVGAVGV (KRAS G12V)
FVVDGVVGT

SEQ ID NO: 51229 - protein, 9 aa, synthetic construct
  source 1..9: note = Seed: LVVVGAVGV (KRAS G12V)
FVVDGVVGV

SEQ ID NO: 51230 - protein, 9 aa, synthetic construct
  source 1..9: note = Seed: LVVVGAVGV (KRAS G12V)
FVVDGVVGY

SEQ ID NO: 51231 - protein, 9 aa, synthetic construct
  source 1..9: note = Seed: LVVVGAVGV (KRAS G12V)
FVVEGAVGA

SEQ ID NO: 51232 - protein, 9 aa, synthetic construct
  source 1..9: note = Seed: LVVVGAVGV (KRAS G12V)
FVVEGAVGC

SEQ ID NO: 51233 - protein, 9 aa, synthetic construct
  source 1..9: note = Seed: LVVVGAVGV (KRAS G12V)
FVVEGAVGD

SEQ ID NO: 51234 - protein, 9 aa, synthetic construct
  source 1..9: note = Seed: LVVVGAVGV (KRAS G12V)
FVVEGAVGE

SEQ ID NO: 51235 - protein, 9 aa, synthetic construct
  source 1..9: note = Seed: LVVVGAVGV (KRAS G12V)
FVVEGAVGF

SEQ ID NO: 51236 - protein, 9 aa, synthetic construct
  source 1..9: note = Seed: LVVVGAVGV (KRAS G12V)
FVVEGAVGG

SEQ ID NO: 51237 - protein, 9 aa, synthetic construct
  source 1..9: note = Seed: LVVVGAVGV (KRAS G12V)
FVVEGAVGH

SEQ ID NO: 51238 - protein, 9 aa, synthetic construct
  source 1..9: note = Seed: LVVVGAVGV (KRAS G12V)
FVVEGAVGI

SEQ ID NO: 51239 - protein, 9 aa, synthetic construct
  source 1..9: note = Seed: LVVVGAVGV (KRAS G12V)
FVVEGAVGK

SEQ ID NO: 51240 - protein, 9 aa, synthetic construct
  source 1..9: note = Seed: LVVVGAVGV (KRAS G12V)
FVVEGAVGL

SEQ ID NO: 51241 - protein, 9 aa, synthetic construct
  source 1..9: note = Seed: LVVVGAVGV (KRAS G12V)
FVVEGAVGM

SEQ ID NO: 51242 - protein, 9 aa, synthetic construct
  source 1..9: note = Seed: LVVVGAVGV (KRAS G12V)
FVVEGAVGN

SEQ ID NO: 51243 - protein, 9 aa, synthetic construct
  source 1..9: note = Seed: LVVVGAVGV (KRAS G12V)
FVVEGAVGP

SEQ ID NO: 51244 - protein, 9 aa, synthetic construct
  source 1..9: note = Seed: LVVVGAVGV (KRAS G12V)
FVVEGAVGQ

SEQ ID NO: 51245 - protein, 9 aa, synthetic construct
  source 1..9: note = Seed: LVVVGAVGV (KRAS G12V)
FVVEGAVGR

SEQ ID NO: 51246 - protein, 9 aa, synthetic construct
  source 1..9: note = Seed: LVVVGAVGV (KRAS G12V)
FVVEGAVGS

SEQ ID NO: 51247 - protein, 9 aa, synthetic construct
  source 1..9: note = Seed: LVVVGAVGV (KRAS G12V)
FVVEGAVGT

SEQ ID NO: 51248 - protein, 9 aa, synthetic construct
  source 1..9: note = Seed: LVVVGAVGV (KRAS G12V)
FVVEGAVGV

SEQ ID NO: 51249 - protein, 9 aa, synthetic construct
  source 1..9: note = Seed: LVVVGAVGV (KRAS G12V)
FVVEGAVGW

SEQ ID NO: 51250 - protein, 9 aa, synthetic construct
  source 1..9: note = Seed: LVVVGAVGV (KRAS G12V)
FVVEGAVGY

SEQ ID NO: 51251 - protein, 9 aa, synthetic construct
  source 1..9: note = Seed: LVVVGAVGV (KRAS G12V)
FVVEGCVGA

SEQ ID NO: 51252 - protein, 9 aa, synthetic construct
  source 1..9: note = Seed: LVVVGAVGV (KRAS G12V)
FVVEGCVGL

SEQ ID NO: 51253 - protein, 9 aa, synthetic construct
  source 1..9: note = Seed: LVVVGAVGV (KRAS G12V)
FVVEGCVGV

SEQ ID NO: 51254 - protein, 9 aa, synthetic construct
  source 1..9: note = Seed: LVVVGAVGV (KRAS G12V)
FVVEGDVGA

SEQ ID NO: 51255 - protein, 9 aa, synthetic construct
  source 1..9: note = Seed: LVVVGAVGV (KRAS G12V)
FVVEGDVGI

SEQ ID NO: 51256 - protein, 9 aa, synthetic construct
  source 1..9: note = Seed: LVVVGAVGV (KRAS G12V)
FVVEGDVGL

SEQ ID NO: 51257 - protein, 9 aa, synthetic construct
  source 1..9: note = Seed: LVVVGAVGV (KRAS G12V)
FVVEGDVGS

SEQ ID NO: 51258 - protein, 9 aa, synthetic construct
  source 1..9: note = Seed: LVVVGAVGV (KRAS G12V)
FVVEGDVGV

SEQ ID NO: 51259 - protein, 9 aa, synthetic construct
  source 1..9: note = Seed: LVVVGAVGV (KRAS G12V)
FVVEGEVGA

SEQ ID NO: 51260 - protein, 9 aa, synthetic construct
  source 1..9: note = Seed: LVVVGAVGV (KRAS G12V)
FVVEGEVGL

SEQ ID NO: 51261 - protein, 9 aa, synthetic construct
  source 1..9: note = Seed: LVVVGAVGV (KRAS G12V)
FVVEGEVGV

SEQ ID NO: 51262 - protein, 9 aa, synthetic construct
  source 1..9: note = Seed: LVVVGAVGV (KRAS G12V)
FVVEGFVGA

SEQ ID NO: 51263 - protein, 9 aa, synthetic construct
  source 1..9: note = Seed: LVVVGAVGV (KRAS G12V)
FVVEGFVGD

SEQ ID NO: 51264 - protein, 9 aa, synthetic construct
  source 1..9: note = Seed: LVVVGAVGV (KRAS G12V)
FVVEGFVGE

SEQ ID NO: 51265 - protein, 9 aa, synthetic construct
  source 1..9: note = Seed: LVVVGAVGV (KRAS G12V)
FVVEGFVGF

SEQ ID NO: 51266 - protein, 9 aa, synthetic construct
  source 1..9: note = Seed: LVVVGAVGV (KRAS G12V)
FVVEGFVGI

SEQ ID NO: 51267 - protein, 9 aa, synthetic construct
  source 1..9: note = Seed: LVVVGAVGV (KRAS G12V)
FVVEGFVGL

SEQ ID NO: 51268 - protein, 9 aa, synthetic construct
  source 1..9: note = Seed: LVVVGAVGV (KRAS G12V)
FVVEGFVGM

SEQ ID NO: 51269 - protein, 9 aa, synthetic construct
  source 1..9: note = Seed: LVVVGAVGV (KRAS G12V)
FVVEGFVGN

SEQ ID NO: 51270 - protein, 9 aa, synthetic construct
  source 1..9: note = Seed: LVVVGAVGV (KRAS G12V)
FVVEGFVGS

SEQ ID NO: 51271 - protein, 9 aa, synthetic construct
  source 1..9: note = Seed: LVVVGAVGV (KRAS G12V)
FVVEGFVGT

SEQ ID NO: 51272 - protein, 9 aa, synthetic construct
  source 1..9: note = Seed: LVVVGAVGV (KRAS G12V)
FVVEGFVGV

SEQ ID NO: 51273 - protein, 9 aa, synthetic construct
  source 1..9: note = Seed: LVVVGAVGV (KRAS G12V)
FVVEGFVGY

SEQ ID NO: 51274 - protein, 9 aa, synthetic construct
  source 1..9: note = Seed: LVVVGAVGV (KRAS G12V)
FVVEGGVGA

SEQ ID NO: 51275 - protein, 9 aa, synthetic construct
  source 1..9: note = Seed: LVVVGAVGV (KRAS G12V)
FVVEGGVGC

SEQ ID NO: 51276 - protein, 9 aa, synthetic construct
  source 1..9: note = Seed: LVVVGAVGV (KRAS G12V)
FVVEGGVGF

SEQ ID NO: 51277 - protein, 9 aa, synthetic construct
  source 1..9: note = Seed: LVVVGAVGV (KRAS G12V)
FVVEGGVGG

SEQ ID NO: 51278 - protein, 9 aa, synthetic construct
  source 1..9: note = Seed: LVVVGAVGV (KRAS G12V)
FVVEGGVGH

SEQ ID NO: 51279 - protein, 9 aa, synthetic construct
  source 1..9: note = Seed: LVVVGAVGV (KRAS G12V)
FVVEGGVGI

SEQ ID NO: 51280 - protein, 9 aa, synthetic construct
  source 1..9: note = Seed: LVVVGAVGV (KRAS G12V)
FVVEGGVGL

SEQ ID NO: 51281 - protein, 9 aa, synthetic construct
  source 1..9: note = Seed: LVVVGAVGV (KRAS G12V)
FVVEGGVGM

SEQ ID NO: 51282 - protein, 9 aa, synthetic construct
  source 1..9: note = Seed: LVVVGAVGV (KRAS G12V)
FVVEGGVGN

SEQ ID NO: 51283 - protein, 9 aa, synthetic construct
  source 1..9: note = Seed: LVVVGAVGV (KRAS G12V)
FVVEGGVGP

SEQ ID NO: 51284 - protein, 9 aa, synthetic construct
  source 1..9: note = Seed: LVVVGAVGV (KRAS G12V)
FVVEGGVGQ

SEQ ID NO: 51285 - protein, 9 aa, synthetic construct
  source 1..9: note = Seed: LVVVGAVGV (KRAS G12V)
FVVEGGVGS

SEQ ID NO: 51286 - protein, 9 aa, synthetic construct
  source 1..9: note = Seed: LVVVGAVGV (KRAS G12V)
FVVEGGVGT

SEQ ID NO: 51287 - protein, 9 aa, synthetic construct
  source 1..9: note = Seed: LVVVGAVGV (KRAS G12V)
FVVEGGVGV

SEQ ID NO: 51288 - protein, 9 aa, synthetic construct
  source 1..9: note = Seed: LVVVGAVGV (KRAS G12V)
FVVEGGVGY

SEQ ID NO: 51289 - protein, 9 aa, synthetic construct
  source 1..9: note = Seed: LVVVGAVGV (KRAS G12V)
FVVEGHVGA

SEQ ID NO: 51290 - protein, 9 aa, synthetic construct
  source 1..9: note = Seed: LVVVGAVGV (KRAS G12V)
FVVEGHVGI

SEQ ID NO: 51291 - protein, 9 aa, synthetic construct
  source 1..9: note = Seed: LVVVGAVGV (KRAS G12V)
FVVEGHVGL

SEQ ID NO: 51292 - protein, 9 aa, synthetic construct
  source 1..9: note = Seed: LVVVGAVGV (KRAS G12V)
FVVEGHVGM

SEQ ID NO: 51293 - protein, 9 aa, synthetic construct
  source 1..9: note = Seed: LVVVGAVGV (KRAS G12V)
FVVEGHVGV

SEQ ID NO: 51294 - protein, 9 aa, synthetic construct
  source 1..9: note = Seed: LVVVGAVGV (KRAS G12V)
FVVEGIVGA

SEQ ID NO: 51295 - protein, 9 aa, synthetic construct
  source 1..9: note = Seed: LVVVGAVGV (KRAS G12V)
FVVEGIVGG

SEQ ID NO: 51296 - protein, 9 aa, synthetic construct
  source 1..9: note = Seed: LVVVGAVGV (KRAS G12V)
FVVEGIVGH

SEQ ID NO: 51297 - protein, 9 aa, synthetic construct
  source 1..9: note = Seed: LVVVGAVGV (KRAS G12V)
FVVEGIVGI

SEQ ID NO: 51298 - protein, 9 aa, synthetic construct
  source 1..9: note = Seed: LVVVGAVGV (KRAS G12V)
FVVEGIVGL

SEQ ID NO: 51299 - protein, 9 aa, synthetic construct
  source 1..9: note = Seed: LVVVGAVGV (KRAS G12V)
FVVEGIVGM

SEQ ID NO: 51300 - protein, 9 aa, synthetic construct
  source 1..9: note = Seed: LVVVGAVGV (KRAS G12V)
FVVEGIVGN

SEQ ID NO: 51301 - protein, 9 aa, synthetic construct
  source 1..9: note = Seed: LVVVGAVGV (KRAS G12V)
FVVEGIVGQ

SEQ ID NO: 51302 - protein, 9 aa, synthetic construct
  source 1..9: note = Seed: LVVVGAVGV (KRAS G12V)
FVVEGIVGS

SEQ ID NO: 51303 - protein, 9 aa, synthetic construct
  source 1..9: note = Seed: LVVVGAVGV (KRAS G12V)
FVVEGIVGT

SEQ ID NO: 51304 - protein, 9 aa, synthetic construct
  source 1..9: note = Seed: LVVVGAVGV (KRAS G12V)
FVVEGIVGV

SEQ ID NO: 51305 - protein, 9 aa, synthetic construct
  source 1..9: note = Seed: LVVVGAVGV (KRAS G12V)
FVVEGKVGA

SEQ ID NO: 51306 - protein, 9 aa, synthetic construct
  source 1..9: note = Seed: LVVVGAVGV (KRAS G12V)
FVVEGKVGG

SEQ ID NO: 51307 - protein, 9 aa, synthetic construct
  source 1..9: note = Seed: LVVVGAVGV (KRAS G12V)
FVVEGKVGS

SEQ ID NO: 51308 - protein, 9 aa, synthetic construct
  source 1..9: note = Seed: LVVVGAVGV (KRAS G12V)
FVVEGLVGA

SEQ ID NO: 51309 - protein, 9 aa, synthetic construct
  source 1..9: note = Seed: LVVVGAVGV (KRAS G12V)
FVVEGLVGN

SEQ ID NO: 51310 - protein, 9 aa, synthetic construct
  source 1..9: note = Seed: LVVVGAVGV (KRAS G12V)
FVVEGLVGS

SEQ ID NO: 51311 - protein, 9 aa, synthetic construct
  source 1..9: note = Seed: LVVVGAVGV (KRAS G12V)
FVVEGLVGV

SEQ ID NO: 51312 - protein, 9 aa, synthetic construct
  source 1..9: note = Seed: LVVVGAVGV (KRAS G12V)
FVVEGMVGA

SEQ ID NO: 51313 - protein, 9 aa, synthetic construct
  source 1..9: note = Seed: LVVVGAVGV (KRAS G12V)
FVVEGMVGI

SEQ ID NO: 51314 - protein, 9 aa, synthetic construct
  source 1..9: note = Seed: LVVVGAVGV (KRAS G12V)
FVVEGMVGL

SEQ ID NO: 51315 - protein, 9 aa, synthetic construct
  source 1..9: note = Seed: LVVVGAVGV (KRAS G12V)
FVVEGMVGM

SEQ ID NO: 51316 - protein, 9 aa, synthetic construct
  source 1..9: note = Seed: LVVVGAVGV (KRAS G12V)
FVVEGMVGN

SEQ ID NO: 51317 - protein, 9 aa, synthetic construct
  source 1..9: note = Seed: LVVVGAVGV (KRAS G12V)
FVVEGMVGS

SEQ ID NO: 51318 - protein, 9 aa, synthetic construct
  source 1..9: note = Seed: LVVVGAVGV (KRAS G12V)
FVVEGMVGV

SEQ ID NO: 51319 - protein, 9 aa, synthetic construct
  source 1..9: note = Seed: LVVVGAVGV (KRAS G12V)
FVVEGNVGA

SEQ ID NO: 51320 - protein, 9 aa, synthetic construct
  source 1..9: note = Seed: LVVVGAVGV (KRAS G12V)
FVVEGNVGC

SEQ ID NO: 51321 - protein, 9 aa, synthetic construct
  source 1..9: note = Seed: LVVVGAVGV (KRAS G12V)
FVVEGNVGD

SEQ ID NO: 51322 - protein, 9 aa, synthetic construct
  source 1..9: note = Seed: LVVVGAVGV (KRAS G12V)
FVVEGNVGE

SEQ ID NO: 51323 - protein, 9 aa, synthetic construct
  source 1..9: note = Seed: LVVVGAVGV (KRAS G12V)
FVVEGNVGF

SEQ ID NO: 51324 - protein, 9 aa, synthetic construct
  source 1..9: note = Seed: LVVVGAVGV (KRAS G12V)
FVVEGNVGG

SEQ ID NO: 51325 - protein, 9 aa, synthetic construct
  source 1..9: note = Seed: LVVVGAVGV (KRAS G12V)
FVVEGNVGH

SEQ ID NO: 51326 - protein, 9 aa, synthetic construct
  source 1..9: note = Seed: LVVVGAVGV (KRAS G12V)
FVVEGNVGI

SEQ ID NO: 51327 - protein, 9 aa, synthetic construct
  source 1..9: note = Seed: LVVVGAVGV (KRAS G12V)
FVVEGNVGL

SEQ ID NO: 51328 - protein, 9 aa, synthetic construct
  source 1..9: note = Seed: LVVVGAVGV (KRAS G12V)
FVVEGNVGM

SEQ ID NO: 51329 - protein, 9 aa, synthetic construct
  source 1..9: note = Seed: LVVVGAVGV (KRAS G12V)
FVVEGNVGN

SEQ ID NO: 51330 - protein, 9 aa, synthetic construct
  source 1..9: note = Seed: LVVVGAVGV (KRAS G12V)
FVVEGNVGP

SEQ ID NO: 51331 - protein, 9 aa, synthetic construct
  source 1..9: note = Seed: LVVVGAVGV (KRAS G12V)
FVVEGNVGQ

SEQ ID NO: 51332 - protein, 9 aa, synthetic construct
  source 1..9: note = Seed: LVVVGAVGV (KRAS G12V)
FVVEGNVGS

SEQ ID NO: 51333 - protein, 9 aa, synthetic construct
  source 1..9: note = Seed: LVVVGAVGV (KRAS G12V)
FVVEGNVGT

SEQ ID NO: 51334 - protein, 9 aa, synthetic construct
  source 1..9: note = Seed: LVVVGAVGV (KRAS G12V)
FVVEGNVGV

SEQ ID NO: 51335 - protein, 9 aa, synthetic construct
  source 1..9: note = Seed: LVVVGAVGV (KRAS G12V)
FVVEGNVGY

SEQ ID NO: 51336 - protein, 9 aa, synthetic construct
  source 1..9: note = Seed: LVVVGAVGV (KRAS G12V)
FVVEGPVGA

SEQ ID NO: 51337 - protein, 9 aa, synthetic construct
  source 1..9: note = Seed: LVVVGAVGV (KRAS G12V)
FVVEGPVGC

SEQ ID NO: 51338 - protein, 9 aa, synthetic construct
  source 1..9: note = Seed: LVVVGAVGV (KRAS G12V)
FVVEGPVGF

SEQ ID NO: 51339 - protein, 9 aa, synthetic construct
  source 1..9: note = Seed: LVVVGAVGV (KRAS G12V)
FVVEGPVGG

SEQ ID NO: 51340 - protein, 9 aa, synthetic construct
  source 1..9: note = Seed: LVVVGAVGV (KRAS G12V)
FVVEGPVGH

SEQ ID NO: 51341 - protein, 9 aa, synthetic construct
  source 1..9: note = Seed: LVVVGAVGV (KRAS G12V)
FVVEGPVGI

SEQ ID NO: 51342 - protein, 9 aa, synthetic construct
  source 1..9: note = Seed: LVVVGAVGV (KRAS G12V)
FVVEGPVGL

SEQ ID NO: 51343 - protein, 9 aa, synthetic construct
  source 1..9: note = Seed: LVVVGAVGV (KRAS G12V)
FVVEGPVGM

SEQ ID NO: 51344 - protein, 9 aa, synthetic construct
  source 1..9: note = Seed: LVVVGAVGV (KRAS G12V)
FVVEGPVGN

SEQ ID NO: 51345 - protein, 9 aa, synthetic construct
  source 1..9: note = Seed: LVVVGAVGV (KRAS G12V)
FVVEGPVGP

SEQ ID NO: 51346 - protein, 9 aa, synthetic construct
  source 1..9: note = Seed: LVVVGAVGV (KRAS G12V)
FVVEGPVGQ

SEQ ID NO: 51347 - protein, 9 aa, synthetic construct
  source 1..9: note = Seed: LVVVGAVGV (KRAS G12V)
FVVEGPVGR

SEQ ID NO: 51348 - protein, 9 aa, synthetic construct
  source 1..9: note = Seed: LVVVGAVGV (KRAS G12V)
FVVEGPVGS

SEQ ID NO: 51349 - protein, 9 aa, synthetic construct
  source 1..9: note = Seed: LVVVGAVGV (KRAS G12V)
FVVEGPVGT

SEQ ID NO: 51350 - protein, 9 aa, synthetic construct
  source 1..9: note = Seed: LVVVGAVGV (KRAS G12V)
FVVEGPVGV

SEQ ID NO: 51351 - protein, 9 aa, synthetic construct
  source 1..9: note = Seed: LVVVGAVGV (KRAS G12V)
FVVEGPVGW

SEQ ID NO: 51352 - protein, 9 aa, synthetic construct
  source 1..9: note = Seed: LVVVGAVGV (KRAS G12V)
FVVEGPVGY

SEQ ID NO: 51353 - protein, 9 aa, synthetic construct
  source 1..9: note = Seed: LVVVGAVGV (KRAS G12V)
FVVEGQVGA

SEQ ID NO: 51354 - protein, 9 aa, synthetic construct
  source 1..9: note = Seed: LVVVGAVGV (KRAS G12V)
FVVEGQVGI

SEQ ID NO: 51355 - protein, 9 aa, synthetic construct
  source 1..9: note = Seed: LVVVGAVGV (KRAS G12V)
FVVEGQVGL

SEQ ID NO: 51356 - protein, 9 aa, synthetic construct
  source 1..9: note = Seed: LVVVGAVGV (KRAS G12V)
FVVEGQVGV

SEQ ID NO: 51357 - protein, 9 aa, synthetic construct
  source 1..9: note = Seed: LVVVGAVGV (KRAS G12V)
FVVEGRVGA

SEQ ID NO: 51358 - protein, 9 aa, synthetic construct
  source 1..9: note = Seed: LVVVGAVGV (KRAS G12V)
FVVEGRVGG

SEQ ID NO: 51359 - protein, 9 aa, synthetic construct
  source 1..9: note = Seed: LVVVGAVGV (KRAS G12V)
FVVEGRVGH

SEQ ID NO: 51360 - protein, 9 aa, synthetic construct
  source 1..9: note = Seed: LVVVGAVGV (KRAS G12V)
FVVEGRVGQ

SEQ ID NO: 51361 - protein, 9 aa, synthetic construct
  source 1..9: note = Seed: LVVVGAVGV (KRAS G12V)
FVVEGRVGS

SEQ ID NO: 51362 - protein, 9 aa, synthetic construct
  source 1..9: note = Seed: LVVVGAVGV (KRAS G12V)
FVVEGSVGA

SEQ ID NO: 51363 - protein, 9 aa, synthetic construct
  source 1..9: note = Seed: LVVVGAVGV (KRAS G12V)
FVVEGSVGC

SEQ ID NO: 51364 - protein, 9 aa, synthetic construct
  source 1..9: note = Seed: LVVVGAVGV (KRAS G12V)
FVVEGSVGF

SEQ ID NO: 51365 - protein, 9 aa, synthetic construct
  source 1..9: note = Seed: LVVVGAVGV (KRAS G12V)
FVVEGSVGG

SEQ ID NO: 51366 - protein, 9 aa, synthetic construct
  source 1..9: note = Seed: LVVVGAVGV (KRAS G12V)
FVVEGSVGH

SEQ ID NO: 51367 - protein, 9 aa, synthetic construct
  source 1..9: note = Seed: LVVVGAVGV (KRAS G12V)
FVVEGSVGI

SEQ ID NO: 51368 - protein, 9 aa, synthetic construct
  source 1..9: note = Seed: LVVVGAVGV (KRAS G12V)
FVVEGSVGK

SEQ ID NO: 51369 - protein, 9 aa, synthetic construct
  source 1..9: note = Seed: LVVVGAVGV (KRAS G12V)
FVVEGSVGL

SEQ ID NO: 51370 - protein, 9 aa, synthetic construct
  source 1..9: note = Seed: LVVVGAVGV (KRAS G12V)
FVVEGSVGM

SEQ ID NO: 51371 - protein, 9 aa, synthetic construct
  source 1..9: note = Seed: LVVVGAVGV (KRAS G12V)
FVVEGSVGN

SEQ ID NO: 51372 - protein, 9 aa, synthetic construct
  source 1..9: note = Seed: LVVVGAVGV (KRAS G12V)
FVVEGSVGP

SEQ ID NO: 51373 - protein, 9 aa, synthetic construct
  source 1..9: note = Seed: LVVVGAVGV (KRAS G12V)
FVVEGSVGQ

SEQ ID NO: 51374 - protein, 9 aa, synthetic construct
  source 1..9: note = Seed: LVVVGAVGV (KRAS G12V)
FVVEGSVGR

SEQ ID NO: 51375 - protein, 9 aa, synthetic construct
  source 1..9: note = Seed: LVVVGAVGV (KRAS G12V)
FVVEGSVGS

SEQ ID NO: 51376 - protein, 9 aa, synthetic construct
  source 1..9: note = Seed: LVVVGAVGV (KRAS G12V)
FVVEGSVGT

SEQ ID NO: 51377 - protein, 9 aa, synthetic construct
  source 1..9: note = Seed: LVVVGAVGV (KRAS G12V)
FVVEGSVGV

SEQ ID NO: 51378 - protein, 9 aa, synthetic construct
  source 1..9: note = Seed: LVVVGAVGV (KRAS G12V)
FVVEGSVGY

SEQ ID NO: 51379 - protein, 9 aa, synthetic construct
  source 1..9: note = Seed: LVVVGAVGV (KRAS G12V)
FVVEGTVGA

SEQ ID NO: 51380 - protein, 9 aa, synthetic construct
  source 1..9: note = Seed: LVVVGAVGV (KRAS G12V)
FVVEGTVGC

SEQ ID NO: 51381 - protein, 9 aa, synthetic construct
  source 1..9: note = Seed: LVVVGAVGV (KRAS G12V)
FVVEGTVGF

SEQ ID NO: 51382 - protein, 9 aa, synthetic construct
  source 1..9: note = Seed: LVVVGAVGV (KRAS G12V)
FVVEGTVGG

SEQ ID NO: 51383 - protein, 9 aa, synthetic construct
  source 1..9: note = Seed: LVVVGAVGV (KRAS G12V)
FVVEGTVGH

SEQ ID NO: 51384 - protein, 9 aa, synthetic construct
  source 1..9: note = Seed: LVVVGAVGV (KRAS G12V)
FVVEGTVGI

SEQ ID NO: 51385 - protein, 9 aa, synthetic construct
  source 1..9: note = Seed: LVVVGAVGV (KRAS G12V)
FVVEGTVGL

SEQ ID NO: 51386 - protein, 9 aa, synthetic construct
  source 1..9: note = Seed: LVVVGAVGV (KRAS G12V)
FVVEGTVGM

SEQ ID NO: 51387 - protein, 9 aa, synthetic construct
  source 1..9: note = Seed: LVVVGAVGV (KRAS G12V)
FVVEGTVGN

SEQ ID NO: 51388 - protein, 9 aa, synthetic construct
  source 1..9: note = Seed: LVVVGAVGV (KRAS G12V)
FVVEGTVGP

SEQ ID NO: 51389 - protein, 9 aa, synthetic construct
  source 1..9: note = Seed: LVVVGAVGV (KRAS G12V)
FVVEGTVGQ

SEQ ID NO: 51390 - protein, 9 aa, synthetic construct
  source 1..9: note = Seed: LVVVGAVGV (KRAS G12V)
FVVEGTVGS

SEQ ID NO: 51391 - protein, 9 aa, synthetic construct
  source 1..9: note = Seed: LVVVGAVGV (KRAS G12V)
FVVEGTVGT

SEQ ID NO: 51392 - protein, 9 aa, synthetic construct
  source 1..9: note = Seed: LVVVGAVGV (KRAS G12V)
FVVEGTVGV

SEQ ID NO: 51393 - protein, 9 aa, synthetic construct
  source 1..9: note = Seed: LVVVGAVGV (KRAS G12V)
FVVEGTVGY

SEQ ID NO: 51394 - protein, 9 aa, synthetic construct
  source 1..9: note = Seed: LVVVGAVGV (KRAS G12V)
FVVEGVVGA

SEQ ID NO: 51395 - protein, 9 aa, synthetic construct
  source 1..9: note = Seed: LVVVGAVGV (KRAS G12V)
FVVEGVVGG

SEQ ID NO: 51396 - protein, 9 aa, synthetic construct
  source 1..9: note = Seed: LVVVGAVGV (KRAS G12V)
FVVEGVVGH

SEQ ID NO: 51397 - protein, 9 aa, synthetic construct
  source 1..9: note = Seed: LVVVGAVGV (KRAS G12V)
FVVEGVVGI

SEQ ID NO: 51398 - protein, 9 aa, synthetic construct
  source 1..9: note = Seed: LVVVGAVGV (KRAS G12V)
FVVEGVVGL

SEQ ID NO: 51399 - protein, 9 aa, synthetic construct
  source 1..9: note = Seed: LVVVGAVGV (KRAS G12V)
FVVEGVVGM

SEQ ID NO: 51400 - protein, 9 aa, synthetic construct
  source 1..9: note = Seed: LVVVGAVGV (KRAS G12V)
FVVEGVVGN

SEQ ID NO: 51401 - protein, 9 aa, synthetic construct
  source 1..9: note = Seed: LVVVGAVGV (KRAS G12V)
FVVEGVVGQ

SEQ ID NO: 51402 - protein, 9 aa, synthetic construct
  source 1..9: note = Seed: LVVVGAVGV (KRAS G12V)
FVVEGVVGS

SEQ ID NO: 51403 - protein, 9 aa, synthetic construct
  source 1..9: note = Seed: LVVVGAVGV (KRAS G12V)
FVVEGVVGT

SEQ ID NO: 51404 - protein, 9 aa, synthetic construct
  source 1..9: note = Seed: LVVVGAVGV (KRAS G12V)
FVVEGVVGV

SEQ ID NO: 51405 - protein, 9 aa, synthetic construct
  source 1..9: note = Seed: LVVVGAVGV (KRAS G12V)
FVVEGYVGI

SEQ ID NO: 51406 - protein, 9 aa, synthetic construct
  source 1..9: note = Seed: LVVVGAVGV (KRAS G12V)
FVVEGYVGL

SEQ ID NO: 51407 - protein, 9 aa, synthetic construct
  source 1..9: note = Seed: LVVVGAVGV (KRAS G12V)
FVVEGYVGV

SEQ ID NO: 51408 - protein, 9 aa, synthetic construct
  source 1..9: note = Seed: LVVVGAVGV (KRAS G12V)
FVVFGAVGA

SEQ ID NO: 51409 - protein, 9 aa, synthetic construct
  source 1..9: note = Seed: LVVVGAVGV (KRAS G12V)
FVVFGAVGD

SEQ ID NO: 51410 - protein, 9 aa, synthetic construct
  source 1..9: note = Seed: LVVVGAVGV (KRAS G12V)
FVVFGAVGE

SEQ ID NO: 51411 - protein, 9 aa, synthetic construct
  source 1..9: note = Seed: LVVVGAVGV (KRAS G12V)
FVVFGAVGF

SEQ ID NO: 51412 - protein, 9 aa, synthetic construct
  source 1..9: note = Seed: LVVVGAVGV (KRAS G12V)
FVVFGAVGG

SEQ ID NO: 51413 - protein, 9 aa, synthetic construct
  source 1..9: note = Seed: LVVVGAVGV (KRAS G12V)
FVVFGAVGH

SEQ ID NO: 51414 - protein, 9 aa, synthetic construct
  source 1..9: note = Seed: LVVVGAVGV (KRAS G12V)
FVVFGAVGI

SEQ ID NO: 51415 - protein, 9 aa, synthetic construct
  source 1..9: note = Seed: LVVVGAVGV (KRAS G12V)
FVVFGAVGK

SEQ ID NO: 51416 - protein, 9 aa, synthetic construct
  source 1..9: note = Seed: LVVVGAVGV (KRAS G12V)
FVVFGAVGL

SEQ ID NO: 51417 - protein, 9 aa, synthetic construct
  source 1..9: note = Seed: LVVVGAVGV (KRAS G12V)
FVVFGAVGM

SEQ ID NO: 51418 - protein, 9 aa, synthetic construct
  source 1..9: note = Seed: LVVVGAVGV (KRAS G12V)
FVVFGAVGN

SEQ ID NO: 51419 - protein, 9 aa, synthetic construct
  source 1..9: note = Seed: LVVVGAVGV (KRAS G12V)
FVVFGAVGP

SEQ ID NO: 51420 - protein, 9 aa, synthetic construct
  source 1..9: note = Seed: LVVVGAVGV (KRAS G12V)
FVVFGAVGQ

SEQ ID NO: 51421 - protein, 9 aa, synthetic construct
  source 1..9: note = Seed: LVVVGAVGV (KRAS G12V)
FVVFGAVGR

SEQ ID NO: 51422 - protein, 9 aa, synthetic construct
  source 1..9: note = Seed: LVVVGAVGV (KRAS G12V)
FVVFGAVGS

SEQ ID NO: 51423 - protein, 9 aa, synthetic construct
  source 1..9: note = Seed: LVVVGAVGV (KRAS G12V)
FVVFGAVGT

SEQ ID NO: 51424 - protein, 9 aa, synthetic construct
  source 1..9: note = Seed: LVVVGAVGV (KRAS G12V)
FVVFGAVGV

SEQ ID NO: 51425 - protein, 9 aa, synthetic construct
  source 1..9: note = Seed: LVVVGAVGV (KRAS G12V)
FVVFGAVGY

SEQ ID NO: 51426 - protein, 9 aa, synthetic construct
  source 1..9: note = Seed: LVVVGAVGV (KRAS G12V)
FVVFGDVGA

SEQ ID NO: 51427 - protein, 9 aa, synthetic construct
  source 1..9: note = Seed: LVVVGAVGV (KRAS G12V)
FVVFGDVGD

SEQ ID NO: 51428 - protein, 9 aa, synthetic construct
  source 1..9: note = Seed: LVVVGAVGV (KRAS G12V)
FVVFGDVGE

SEQ ID NO: 51429 - protein, 9 aa, synthetic construct
  source 1..9: note = Seed: LVVVGAVGV (KRAS G12V)
FVVFGDVGG

SEQ ID NO: 51430 - protein, 9 aa, synthetic construct
  source 1..9: note = Seed: LVVVGAVGV (KRAS G12V)
FVVFGDVGI

SEQ ID NO: 51431 - protein, 9 aa, synthetic construct
  source 1..9: note = Seed: LVVVGAVGV (KRAS G12V)
FVVFGDVGL

SEQ ID NO: 51432 - protein, 9 aa, synthetic construct
  source 1..9: note = Seed: LVVVGAVGV (KRAS G12V)
FVVFGDVGM

SEQ ID NO: 51433 - protein, 9 aa, synthetic construct
  source 1..9: note = Seed: LVVVGAVGV (KRAS G12V)
FVVFGDVGS

SEQ ID NO: 51434 - protein, 9 aa, synthetic construct
  source 1..9: note = Seed: LVVVGAVGV (KRAS G12V)
FVVFGDVGV

SEQ ID NO: 51435 - protein, 9 aa, synthetic construct
  source 1..9: note = Seed: LVVVGAVGV (KRAS G12V)
FVVFGEVGA

SEQ ID NO: 51436 - protein, 9 aa, synthetic construct
  source 1..9: note = Seed: LVVVGAVGV (KRAS G12V)
FVVFGEVGL

SEQ ID NO: 51437 - protein, 9 aa, synthetic construct
  source 1..9: note = Seed: LVVVGAVGV (KRAS G12V)
FVVFGFVGD

SEQ ID NO: 51438 - protein, 9 aa, synthetic construct
  source 1..9: note = Seed: LVVVGAVGV (KRAS G12V)
FVVFGFVGE

SEQ ID NO: 51439 - protein, 9 aa, synthetic construct
  source 1..9: note = Seed: LVVVGAVGV (KRAS G12V)
FVVFGFVGH

SEQ ID NO: 51440 - protein, 9 aa, synthetic construct
  source 1..9: note = Seed: LVVVGAVGV (KRAS G12V)
FVVFGFVGN

SEQ ID NO: 51441 - protein, 9 aa, synthetic construct
  source 1..9: note = Seed: LVVVGAVGV (KRAS G12V)
FVVFGFVGR

SEQ ID NO: 51442 - protein, 9 aa, synthetic construct
  source 1..9: note = Seed: LVVVGAVGV (KRAS G12V)
FVVFGFVGY

SEQ ID NO: 51443 - protein, 9 aa, synthetic construct
  source 1..9: note = Seed: LVVVGAVGV (KRAS G12V)
FVVFGGVGA

SEQ ID NO: 51444 - protein, 9 aa, synthetic construct
  source 1..9: note = Seed: LVVVGAVGV (KRAS G12V)
FVVFGGVGD

SEQ ID NO: 51445 - protein, 9 aa, synthetic construct
  source 1..9: note = Seed: LVVVGAVGV (KRAS G12V)
FVVFGGVGF

SEQ ID NO: 51446 - protein, 9 aa, synthetic construct
  source 1..9: note = Seed: LVVVGAVGV (KRAS G12V)
FVVFGGVGG

SEQ ID NO: 51447 - protein, 9 aa, synthetic construct
  source 1..9: note = Seed: LVVVGAVGV (KRAS G12V)
FVVFGGVGH

SEQ ID NO: 51448 - protein, 9 aa, synthetic construct
  source 1..9: note = Seed: LVVVGAVGV (KRAS G12V)
FVVFGGVGI

SEQ ID NO: 51449 - protein, 9 aa, synthetic construct
  source 1..9: note = Seed: LVVVGAVGV (KRAS G12V)
FVVFGGVGK

SEQ ID NO: 51450 - protein, 9 aa, synthetic construct
  source 1..9: note = Seed: LVVVGAVGV (KRAS G12V)
FVVFGGVGL

SEQ ID NO: 51451 - protein, 9 aa, synthetic construct
  source 1..9: note = Seed: LVVVGAVGV (KRAS G12V)
FVVFGGVGM

SEQ ID NO: 51452 - protein, 9 aa, synthetic construct
  source 1..9: note = Seed: LVVVGAVGV (KRAS G12V)
FVVFGGVGN

SEQ ID NO: 51453 - protein, 9 aa, synthetic construct
  source 1..9: note = Seed: LVVVGAVGV (KRAS G12V)
FVVFGGVGP

SEQ ID NO: 51454 - protein, 9 aa, synthetic construct
  source 1..9: note = Seed: LVVVGAVGV (KRAS G12V)
FVVFGGVGQ

SEQ ID NO: 51455 - protein, 9 aa, synthetic construct
  source 1..9: note = Seed: LVVVGAVGV (KRAS G12V)
FVVFGGVGR

SEQ ID NO: 51456 - protein, 9 aa, synthetic construct
  source 1..9: note = Seed: LVVVGAVGV (KRAS G12V)
FVVFGGVGS

SEQ ID NO: 51457 - protein, 9 aa, synthetic construct
  source 1..9: note = Seed: LVVVGAVGV (KRAS G12V)
FVVFGGVGT

SEQ ID NO: 51458 - protein, 9 aa, synthetic construct
  source 1..9: note = Seed: LVVVGAVGV (KRAS G12V)
FVVFGGVGV

SEQ ID NO: 51459 - protein, 9 aa, synthetic construct
  source 1..9: note = Seed: LVVVGAVGV (KRAS G12V)
FVVFGGVGY

SEQ ID NO: 51460 - protein, 9 aa, synthetic construct
  source 1..9: note = Seed: LVVVGAVGV (KRAS G12V)
FVVFGHVGA

SEQ ID NO: 51461 - protein, 9 aa, synthetic construct
  source 1..9: note = Seed: LVVVGAVGV (KRAS G12V)
FVVFGHVGG

SEQ ID NO: 51462 - protein, 9 aa, synthetic construct
  source 1..9: note = Seed: LVVVGAVGV (KRAS G12V)
FVVFGHVGH

SEQ ID NO: 51463 - protein, 9 aa, synthetic construct
  source 1..9: note = Seed: LVVVGAVGV (KRAS G12V)
FVVFGHVGI

SEQ ID NO: 51464 - protein, 9 aa, synthetic construct
  source 1..9: note = Seed: LVVVGAVGV (KRAS G12V)
FVVFGHVGK

SEQ ID NO: 51465 - protein, 9 aa, synthetic construct
  source 1..9: note = Seed: LVVVGAVGV (KRAS G12V)
FVVFGHVGL

SEQ ID NO: 51466 - protein, 9 aa, synthetic construct
  source 1..9: note = Seed: LVVVGAVGV (KRAS G12V)
FVVFGHVGM

SEQ ID NO: 51467 - protein, 9 aa, synthetic construct
  source 1..9: note = Seed: LVVVGAVGV (KRAS G12V)
FVVFGHVGN

SEQ ID NO: 51468 - protein, 9 aa, synthetic construct
  source 1..9: note = Seed: LVVVGAVGV (KRAS G12V)
FVVFGHVGR

SEQ ID NO: 51469 - protein, 9 aa, synthetic construct
  source 1..9: note = Seed: LVVVGAVGV (KRAS G12V)
FVVFGHVGS

SEQ ID NO: 51470 - protein, 9 aa, synthetic construct
  source 1..9: note = Seed: LVVVGAVGV (KRAS G12V)
FVVFGHVGT

SEQ ID NO: 51471 - protein, 9 aa, synthetic construct
  source 1..9: note = Seed: LVVVGAVGV (KRAS G12V)
FVVFGHVGV

SEQ ID NO: 51472 - protein, 9 aa, synthetic construct
  source 1..9: note = Seed: LVVVGAVGV (KRAS G12V)
FVVFGIVGA

SEQ ID NO: 51473 - protein, 9 aa, synthetic construct
  source 1..9: note = Seed: LVVVGAVGV (KRAS G12V)
FVVFGIVGD

SEQ ID NO: 51474 - protein, 9 aa, synthetic construct
  source 1..9: note = Seed: LVVVGAVGV (KRAS G12V)
FVVFGIVGE

SEQ ID NO: 51475 - protein, 9 aa, synthetic construct
  source 1..9: note = Seed: LVVVGAVGV (KRAS G12V)
FVVFGIVGH

SEQ ID NO: 51476 - protein, 9 aa, synthetic construct
  source 1..9: note = Seed: LVVVGAVGV (KRAS G12V)
FVVFGIVGK

SEQ ID NO: 51477 - protein, 9 aa, synthetic construct
  source 1..9: note = Seed: LVVVGAVGV (KRAS G12V)
FVVFGIVGM

SEQ ID NO: 51478 - protein, 9 aa, synthetic construct
  source 1..9: note = Seed: LVVVGAVGV (KRAS G12V)
FVVFGIVGN

SEQ ID NO: 51479 - protein, 9 aa, synthetic construct
  source 1..9: note = Seed: LVVVGAVGV (KRAS G12V)
FVVFGIVGP

SEQ ID NO: 51480 - protein, 9 aa, synthetic construct
  source 1..9: note = Seed: LVVVGAVGV (KRAS G12V)
FVVFGIVGR

SEQ ID NO: 51481 - protein, 9 aa, synthetic construct
  source 1..9: note = Seed: LVVVGAVGV (KRAS G12V)
FVVFGIVGS

SEQ ID NO: 51482 - protein, 9 aa, synthetic construct
  source 1..9: note = Seed: LVVVGAVGV (KRAS G12V)
FVVFGIVGT

SEQ ID NO: 51483 - protein, 9 aa, synthetic construct
  source 1..9: note = Seed: LVVVGAVGV (KRAS G12V)
FVVFGIVGV

SEQ ID NO: 51484 - protein, 9 aa, synthetic construct
  source 1..9: note = Seed: LVVVGAVGV (KRAS G12V)
FVVFGKVGA

SEQ ID NO: 51485 - protein, 9 aa, synthetic construct
  source 1..9: note = Seed: LVVVGAVGV (KRAS G12V)
FVVFGKVGG

SEQ ID NO: 51486 - protein, 9 aa, synthetic construct
  source 1..9: note = Seed: LVVVGAVGV (KRAS G12V)
FVVFGKVGH

SEQ ID NO: 51487 - protein, 9 aa, synthetic construct
  source 1..9: note = Seed: LVVVGAVGV (KRAS G12V)
FVVFGKVGK

SEQ ID NO: 51488 - protein, 9 aa, synthetic construct
  source 1..9: note = Seed: LVVVGAVGV (KRAS G12V)
FVVFGKVGL

SEQ ID NO: 51489 - protein, 9 aa, synthetic construct
  source 1..9: note = Seed: LVVVGAVGV (KRAS G12V)
FVVFGKVGM

SEQ ID NO: 51490 - protein, 9 aa, synthetic construct
  source 1..9: note = Seed: LVVVGAVGV (KRAS G12V)
FVVFGKVGN

SEQ ID NO: 51491 - protein, 9 aa, synthetic construct
  source 1..9: note = Seed: LVVVGAVGV (KRAS G12V)
FVVFGKVGP

SEQ ID NO: 51492 - protein, 9 aa, synthetic construct
  source 1..9: note = Seed: LVVVGAVGV (KRAS G12V)
FVVFGKVGQ

SEQ ID NO: 51493 - protein, 9 aa, synthetic construct
  source 1..9: note = Seed: LVVVGAVGV (KRAS G12V)
FVVFGKVGR

SEQ ID NO: 51494 - protein, 9 aa, synthetic construct
  source 1..9: note = Seed: LVVVGAVGV (KRAS G12V)
FVVFGKVGS

SEQ ID NO: 51495 - protein, 9 aa, synthetic construct
  source 1..9: note = Seed: LVVVGAVGV (KRAS G12V)
FVVFGKVGT

SEQ ID NO: 51496 - protein, 9 aa, synthetic construct
  source 1..9: note = Seed: LVVVGAVGV (KRAS G12V)
FVVFGKVGY

SEQ ID NO: 51497 - protein, 9 aa, synthetic construct
  source 1..9: note = Seed: LVVVGAVGV (KRAS G12V)
FVVFGLVGA

SEQ ID NO: 51498 - protein, 9 aa, synthetic construct
  source 1..9: note = Seed: LVVVGAVGV (KRAS G12V)
FVVFGLVGH

SEQ ID NO: 51499 - protein, 9 aa, synthetic construct
  source 1..9: note = Seed: LVVVGAVGV (KRAS G12V)
FVVFGLVGN

SEQ ID NO: 51500 - protein, 9 aa, synthetic construct
  source 1..9: note = Seed: LVVVGAVGV (KRAS G12V)
FVVFGLVGR

SEQ ID NO: 51501 - protein, 9 aa, synthetic construct
  source 1..9: note = Seed: LVVVGAVGV (KRAS G12V)
FVVFGLVGS

SEQ ID NO: 51502 - protein, 9 aa, synthetic construct
  source 1..9: note = Seed: LVVVGAVGV (KRAS G12V)
FVVFGLVGT

SEQ ID NO: 51503 - protein, 9 aa, synthetic construct
  source 1..9: note = Seed: LVVVGAVGV (KRAS G12V)
FVVFGLVGY

SEQ ID NO: 51504 - protein, 9 aa, synthetic construct
  source 1..9: note = Seed: LVVVGAVGV (KRAS G12V)
FVVFGMVGA

SEQ ID NO: 51505 - protein, 9 aa, synthetic construct
  source 1..9: note = Seed: LVVVGAVGV (KRAS G12V)
FVVFGMVGH

SEQ ID NO: 51506 - protein, 9 aa, synthetic construct
  source 1..9: note = Seed: LVVVGAVGV (KRAS G12V)
FVVFGMVGM

SEQ ID NO: 51507 - protein, 9 aa, synthetic construct
  source 1..9: note = Seed: LVVVGAVGV (KRAS G12V)
FVVFGMVGN

SEQ ID NO: 51508 - protein, 9 aa, synthetic construct
  source 1..9: note = Seed: LVVVGAVGV (KRAS G12V)
FVVFGMVGR

SEQ ID NO: 51509 - protein, 9 aa, synthetic construct
  source 1..9: note = Seed: LVVVGAVGV (KRAS G12V)
FVVFGMVGS

SEQ ID NO: 51510 - protein, 9 aa, synthetic construct
  source 1..9: note = Seed: LVVVGAVGV (KRAS G12V)
FVVFGMVGT

SEQ ID NO: 51511 - protein, 9 aa, synthetic construct
  source 1..9: note = Seed: LVVVGAVGV (KRAS G12V)
FVVFGMVGV

SEQ ID NO: 51512 - protein, 9 aa, synthetic construct
  source 1..9: note = Seed: LVVVGAVGV (KRAS G12V)
FVVFGNVGA

SEQ ID NO: 51513 - protein, 9 aa, synthetic construct
  source 1..9: note = Seed: LVVVGAVGV (KRAS G12V)
FVVFGNVGD

SEQ ID NO: 51514 - protein, 9 aa, synthetic construct
  source 1..9: note = Seed: LVVVGAVGV (KRAS G12V)
FVVFGNVGE

SEQ ID NO: 51515 - protein, 9 aa, synthetic construct
  source 1..9: note = Seed: LVVVGAVGV (KRAS G12V)
FVVFGNVGF

SEQ ID NO: 51516 - protein, 9 aa, synthetic construct
  source 1..9: note = Seed: LVVVGAVGV (KRAS G12V)
FVVFGNVGG

SEQ ID NO: 51517 - protein, 9 aa, synthetic construct
  source 1..9: note = Seed: LVVVGAVGV (KRAS G12V)
FVVFGNVGH

SEQ ID NO: 51518 - protein, 9 aa, synthetic construct
  source 1..9: note = Seed: LVVVGAVGV (KRAS G12V)
FVVFGNVGI

SEQ ID NO: 51519 - protein, 9 aa, synthetic construct
  source 1..9: note = Seed: LVVVGAVGV (KRAS G12V)
FVVFGNVGK

SEQ ID NO: 51520 - protein, 9 aa, synthetic construct
  source 1..9: note = Seed: LVVVGAVGV (KRAS G12V)
FVVFGNVGL

SEQ ID NO: 51521 - protein, 9 aa, synthetic construct
  source 1..9: note = Seed: LVVVGAVGV (KRAS G12V)
FVVFGNVGM

SEQ ID NO: 51522 - protein, 9 aa, synthetic construct
  source 1..9: note = Seed: LVVVGAVGV (KRAS G12V)
FVVFGNVGN

SEQ ID NO: 51523 - protein, 9 aa, synthetic construct
  source 1..9: note = Seed: LVVVGAVGV (KRAS G12V)
FVVFGNVGP

SEQ ID NO: 51524 - protein, 9 aa, synthetic construct
  source 1..9: note = Seed: LVVVGAVGV (KRAS G12V)
FVVFGNVGQ

SEQ ID NO: 51525 - protein, 9 aa, synthetic construct
  source 1..9: note = Seed: LVVVGAVGV (KRAS G12V)
FVVFGNVGR

SEQ ID NO: 51526 - protein, 9 aa, synthetic construct
  source 1..9: note = Seed: LVVVGAVGV (KRAS G12V)
FVVFGNVGS

SEQ ID NO: 51527 - protein, 9 aa, synthetic construct
  source 1..9: note = Seed: LVVVGAVGV (KRAS G12V)
FVVFGNVGT

SEQ ID NO: 51528 - protein, 9 aa, synthetic construct
  source 1..9: note = Seed: LVVVGAVGV (KRAS G12V)
FVVFGNVGV

SEQ ID NO: 51529 - protein, 9 aa, synthetic construct
  source 1..9: note = Seed: LVVVGAVGV (KRAS G12V)
FVVFGNVGY

SEQ ID NO: 51530 - protein, 9 aa, synthetic construct
  source 1..9: note = Seed: LVVVGAVGV (KRAS G12V)
FVVFGPVGA

SEQ ID NO: 51531 - protein, 9 aa, synthetic construct
  source 1..9: note = Seed: LVVVGAVGV (KRAS G12V)
FVVFGPVGC

SEQ ID NO: 51532 - protein, 9 aa, synthetic construct
  source 1..9: note = Seed: LVVVGAVGV (KRAS G12V)
FVVFGPVGD

SEQ ID NO: 51533 - protein, 9 aa, synthetic construct
  source 1..9: note = Seed: LVVVGAVGV (KRAS G12V)
FVVFGPVGE

SEQ ID NO: 51534 - protein, 9 aa, synthetic construct
  source 1..9: note = Seed: LVVVGAVGV (KRAS G12V)
FVVFGPVGF

SEQ ID NO: 51535 - protein, 9 aa, synthetic construct
  source 1..9: note = Seed: LVVVGAVGV (KRAS G12V)
FVVFGPVGG

SEQ ID NO: 51536 - protein, 9 aa, synthetic construct
  source 1..9: note = Seed: LVVVGAVGV (KRAS G12V)
FVVFGPVGH

SEQ ID NO: 51537 - protein, 9 aa, synthetic construct
  source 1..9: note = Seed: LVVVGAVGV (KRAS G12V)
FVVFGPVGI

SEQ ID NO: 51538 - protein, 9 aa, synthetic construct
  source 1..9: note = Seed: LVVVGAVGV (KRAS G12V)
FVVFGPVGK

SEQ ID NO: 51539 - protein, 9 aa, synthetic construct
  source 1..9: note = Seed: LVVVGAVGV (KRAS G12V)
FVVFGPVGL

SEQ ID NO: 51540 - protein, 9 aa, synthetic construct
  source 1..9: note = Seed: LVVVGAVGV (KRAS G12V)
FVVFGPVGM

SEQ ID NO: 51541 - protein, 9 aa, synthetic construct
  source 1..9: note = Seed: LVVVGAVGV (KRAS G12V)
FVVFGPVGN

SEQ ID NO: 51542 - protein, 9 aa, synthetic construct
  source 1..9: note = Seed: LVVVGAVGV (KRAS G12V)
FVVFGPVGP

SEQ ID NO: 51543 - protein, 9 aa, synthetic construct
  source 1..9: note = Seed: LVVVGAVGV (KRAS G12V)
FVVFGPVGQ

SEQ ID NO: 51544 - protein, 9 aa, synthetic construct
  source 1..9: note = Seed: LVVVGAVGV (KRAS G12V)
FVVFGPVGR

SEQ ID NO: 51545 - protein, 9 aa, synthetic construct
  source 1..9: note = Seed: LVVVGAVGV (KRAS G12V)
FVVFGPVGS

SEQ ID NO: 51546 - protein, 9 aa, synthetic construct
  source 1..9: note = Seed: LVVVGAVGV (KRAS G12V)
FVVFGPVGT

SEQ ID NO: 51547 - protein, 9 aa, synthetic construct
  source 1..9: note = Seed: LVVVGAVGV (KRAS G12V)
FVVFGPVGV

SEQ ID NO: 51548 - protein, 9 aa, synthetic construct
  source 1..9: note = Seed: LVVVGAVGV (KRAS G12V)
FVVFGPVGY

SEQ ID NO: 51549 - protein, 9 aa, synthetic construct
  source 1..9: note = Seed: LVVVGAVGV (KRAS G12V)
FVVFGQVGA

SEQ ID NO: 51550 - protein, 9 aa, synthetic construct
  source 1..9: note = Seed: LVVVGAVGV (KRAS G12V)
FVVFGQVGI

SEQ ID NO: 51551 - protein, 9 aa, synthetic construct
  source 1..9: note = Seed: LVVVGAVGV (KRAS G12V)
FVVFGQVGL

SEQ ID NO: 51552 - protein, 9 aa, synthetic construct
  source 1..9: note = Seed: LVVVGAVGV (KRAS G12V)
FVVFGQVGM

SEQ ID NO: 51553 - protein, 9 aa, synthetic construct
  source 1..9: note = Seed: LVVVGAVGV (KRAS G12V)
FVVFGQVGR

SEQ ID NO: 51554 - protein, 9 aa, synthetic construct
  source 1..9: note = Seed: LVVVGAVGV (KRAS G12V)
FVVFGQVGV

SEQ ID NO: 51555 - protein, 9 aa, synthetic construct
  source 1..9: note = Seed: LVVVGAVGV (KRAS G12V)
FVVFGRVGA

SEQ ID NO: 51556 - protein, 9 aa, synthetic construct
  source 1..9: note = Seed: LVVVGAVGV (KRAS G12V)
FVVFGRVGG

SEQ ID NO: 51557 - protein, 9 aa, synthetic construct
  source 1..9: note = Seed: LVVVGAVGV (KRAS G12V)
FVVFGRVGH

SEQ ID NO: 51558 - protein, 9 aa, synthetic construct
  source 1..9: note = Seed: LVVVGAVGV (KRAS G12V)
FVVFGRVGK

SEQ ID NO: 51559 - protein, 9 aa, synthetic construct
  source 1..9: note = Seed: LVVVGAVGV (KRAS G12V)
FVVFGRVGL

SEQ ID NO: 51560 - protein, 9 aa, synthetic construct
  source 1..9: note = Seed: LVVVGAVGV (KRAS G12V)
FVVFGRVGM

SEQ ID NO: 51561 - protein, 9 aa, synthetic construct
  source 1..9: note = Seed: LVVVGAVGV (KRAS G12V)
FVVFGRVGN

SEQ ID NO: 51562 - protein, 9 aa, synthetic construct
  source 1..9: note = Seed: LVVVGAVGV (KRAS G12V)
FVVFGRVGP

SEQ ID NO: 51563 - protein, 9 aa, synthetic construct
  source 1..9: note = Seed: LVVVGAVGV (KRAS G12V)
FVVFGRVGQ

SEQ ID NO: 51564 - protein, 9 aa, synthetic construct
  source 1..9: note = Seed: LVVVGAVGV (KRAS G12V)
FVVFGRVGR

SEQ ID NO: 51565 - protein, 9 aa, synthetic construct
  source 1..9: note = Seed: LVVVGAVGV (KRAS G12V)
FVVFGRVGS

SEQ ID NO: 51566 - protein, 9 aa, synthetic construct
  source 1..9: note = Seed: LVVVGAVGV (KRAS G12V)
FVVFGRVGT

SEQ ID NO: 51567 - protein, 9 aa, synthetic construct
  source 1..9: note = Seed: LVVVGAVGV (KRAS G12V)
FVVFGRVGY

SEQ ID NO: 51568 - protein, 9 aa, synthetic construct
  source 1..9: note = Seed: LVVVGAVGV (KRAS G12V)
FVVFGSVGA

SEQ ID NO: 51569 - protein, 9 aa, synthetic construct
  source 1..9: note = Seed: LVVVGAVGV (KRAS G12V)
FVVFGSVGD

SEQ ID NO: 51570 - protein, 9 aa, synthetic construct
  source 1..9: note = Seed: LVVVGAVGV (KRAS G12V)
FVVFGSVGE

SEQ ID NO: 51571 - protein, 9 aa, synthetic construct
  source 1..9: note = Seed: LVVVGAVGV (KRAS G12V)
FVVFGSVGF

SEQ ID NO: 51572 - protein, 9 aa, synthetic construct
  source 1..9: note = Seed: LVVVGAVGV (KRAS G12V)
FVVFGSVGG

SEQ ID NO: 51573 - protein, 9 aa, synthetic construct
  source 1..9: note = Seed: LVVVGAVGV (KRAS G12V)
FVVFGSVGH

SEQ ID NO: 51574 - protein, 9 aa, synthetic construct
  source 1..9: note = Seed: LVVVGAVGV (KRAS G12V)
FVVFGSVGI

SEQ ID NO: 51575 - protein, 9 aa, synthetic construct
  source 1..9: note = Seed: LVVVGAVGV (KRAS G12V)
FVVFGSVGK

SEQ ID NO: 51576 - protein, 9 aa, synthetic construct
  source 1..9: note = Seed: LVVVGAVGV (KRAS G12V)
FVVFGSVGL

SEQ ID NO: 51577 - protein, 9 aa, synthetic construct
  source 1..9: note = Seed: LVVVGAVGV (KRAS G12V)
FVVFGSVGM

SEQ ID NO: 51578 - protein, 9 aa, synthetic construct
  source 1..9: note = Seed: LVVVGAVGV (KRAS G12V)
FVVFGSVGN

SEQ ID NO: 51579 - protein, 9 aa, synthetic construct
  source 1..9: note = Seed: LVVVGAVGV (KRAS G12V)
FVVFGSVGP

SEQ ID NO: 51580 - protein, 9 aa, synthetic construct
  source 1..9: note = Seed: LVVVGAVGV (KRAS G12V)
FVVFGSVGQ

SEQ ID NO: 51581 - protein, 9 aa, synthetic construct
  source 1..9: note = Seed: LVVVGAVGV (KRAS G12V)
FVVFGSVGR

SEQ ID NO: 51582 - protein, 9 aa, synthetic construct
  source 1..9: note = Seed: LVVVGAVGV (KRAS G12V)
FVVFGSVGS

SEQ ID NO: 51583 - protein, 9 aa, synthetic construct
  source 1..9: note = Seed: LVVVGAVGV (KRAS G12V)
FVVFGSVGT

SEQ ID NO: 51584 - protein, 9 aa, synthetic construct
  source 1..9: note = Seed: LVVVGAVGV (KRAS G12V)
FVVFGSVGV

SEQ ID NO: 51585 - protein, 9 aa, synthetic construct
  source 1..9: note = Seed: LVVVGAVGV (KRAS G12V)
FVVFGSVGY

SEQ ID NO: 51586 - protein, 9 aa, synthetic construct
  source 1..9: note = Seed: LVVVGAVGV (KRAS G12V)
FVVFGTVGA

SEQ ID NO: 51587 - protein, 9 aa, synthetic construct
  source 1..9: note = Seed: LVVVGAVGV (KRAS G12V)
FVVFGTVGD

SEQ ID NO: 51588 - protein, 9 aa, synthetic construct
  source 1..9: note = Seed: LVVVGAVGV (KRAS G12V)
FVVFGTVGE

SEQ ID NO: 51589 - protein, 9 aa, synthetic construct
  source 1..9: note = Seed: LVVVGAVGV (KRAS G12V)
FVVFGTVGF

SEQ ID NO: 51590 - protein, 9 aa, synthetic construct
  source 1..9: note = Seed: LVVVGAVGV (KRAS G12V)
FVVFGTVGG

SEQ ID NO: 51591 - protein, 9 aa, synthetic construct
  source 1..9: note = Seed: LVVVGAVGV (KRAS G12V)
FVVFGTVGH

SEQ ID NO: 51592 - protein, 9 aa, synthetic construct
  source 1..9: note = Seed: LVVVGAVGV (KRAS G12V)
FVVFGTVGI

SEQ ID NO: 51593 - protein, 9 aa, synthetic construct
  source 1..9: note = Seed: LVVVGAVGV (KRAS G12V)
FVVFGTVGK

SEQ ID NO: 51594 - protein, 9 aa, synthetic construct
  source 1..9: note = Seed: LVVVGAVGV (KRAS G12V)
FVVFGTVGL

SEQ ID NO: 51595 - protein, 9 aa, synthetic construct
  source 1..9: note = Seed: LVVVGAVGV (KRAS G12V)
FVVFGTVGM

SEQ ID NO: 51596 - protein, 9 aa, synthetic construct
  source 1..9: note = Seed: LVVVGAVGV (KRAS G12V)
FVVFGTVGN

SEQ ID NO: 51597 - protein, 9 aa, synthetic construct
  source 1..9: note = Seed: LVVVGAVGV (KRAS G12V)
FVVFGTVGP

SEQ ID NO: 51598 - protein, 9 aa, synthetic construct
  source 1..9: note = Seed: LVVVGAVGV (KRAS G12V)
FVVFGTVGQ

SEQ ID NO: 51599 - protein, 9 aa, synthetic construct
  source 1..9: note = Seed: LVVVGAVGV (KRAS G12V)
FVVFGTVGR

SEQ ID NO: 51600 - protein, 9 aa, synthetic construct
  source 1..9: note = Seed: LVVVGAVGV (KRAS G12V)
FVVFGTVGS

SEQ ID NO: 51601 - protein, 9 aa, synthetic construct
  source 1..9: note = Seed: LVVVGAVGV (KRAS G12V)
FVVFGTVGT

SEQ ID NO: 51602 - protein, 9 aa, synthetic construct
  source 1..9: note = Seed: LVVVGAVGV (KRAS G12V)
FVVFGTVGV

SEQ ID NO: 51603 - protein, 9 aa, synthetic construct
  source 1..9: note = Seed: LVVVGAVGV (KRAS G12V)
FVVFGTVGY

SEQ ID NO: 51604 - protein, 9 aa, synthetic construct
  source 1..9: note = Seed: LVVVGAVGV (KRAS G12V)
FVVFGVVGA

SEQ ID NO: 51605 - protein, 9 aa, synthetic construct
  source 1..9: note = Seed: LVVVGAVGV (KRAS G12V)
FVVFGVVGD

SEQ ID NO: 51606 - protein, 9 aa, synthetic construct
  source 1..9: note = Seed: LVVVGAVGV (KRAS G12V)
FVVFGVVGE

SEQ ID NO: 51607 - protein, 9 aa, synthetic construct
  source 1..9: note = Seed: LVVVGAVGV (KRAS G12V)
FVVFGVVGG

SEQ ID NO: 51608 - protein, 9 aa, synthetic construct
  source 1..9: note = Seed: LVVVGAVGV (KRAS G12V)
FVVFGVVGH

SEQ ID NO: 51609 - protein, 9 aa, synthetic construct
  source 1..9: note = Seed: LVVVGAVGV (KRAS G12V)
FVVFGVVGI

SEQ ID NO: 51610 - protein, 9 aa, synthetic construct
  source 1..9: note = Seed: LVVVGAVGV (KRAS G12V)
FVVFGVVGK

SEQ ID NO: 51611 - protein, 9 aa, synthetic construct
  source 1..9: note = Seed: LVVVGAVGV (KRAS G12V)
FVVFGVVGL

SEQ ID NO: 51612 - protein, 9 aa, synthetic construct
  source 1..9: note = Seed: LVVVGAVGV (KRAS G12V)
FVVFGVVGM

SEQ ID NO: 51613 - protein, 9 aa, synthetic construct
  source 1..9: note = Seed: LVVVGAVGV (KRAS G12V)
FVVFGVVGN

SEQ ID NO: 51614 - protein, 9 aa, synthetic construct
  source 1..9: note = Seed: LVVVGAVGV (KRAS G12V)
FVVFGVVGP

SEQ ID NO: 51615 - protein, 9 aa, synthetic construct
  source 1..9: note = Seed: LVVVGAVGV (KRAS G12V)
FVVFGVVGQ

SEQ ID NO: 51616 - protein, 9 aa, synthetic construct
  source 1..9: note = Seed: LVVVGAVGV (KRAS G12V)
FVVFGVVGR

SEQ ID NO: 51617 - protein, 9 aa, synthetic construct
  source 1..9: note = Seed: LVVVGAVGV (KRAS G12V)
FVVFGVVGS

SEQ ID NO: 51618 - protein, 9 aa, synthetic construct
  source 1..9: note = Seed: LVVVGAVGV (KRAS G12V)
FVVFGVVGT

SEQ ID NO: 51619 - protein, 9 aa, synthetic construct
  source 1..9: note = Seed: LVVVGAVGV (KRAS G12V)
FVVFGVVGV

SEQ ID NO: 51620 - protein, 9 aa, synthetic construct
  source 1..9: note = Seed: LVVVGAVGV (KRAS G12V)
FVVFGYVGA

SEQ ID NO: 51621 - protein, 9 aa, synthetic construct
  source 1..9: note = Seed: LVVVGAVGV (KRAS G12V)
FVVFGYVGF

SEQ ID NO: 51622 - protein, 9 aa, synthetic construct
  source 1..9: note = Seed: LVVVGAVGV (KRAS G12V)
FVVFGYVGI

SEQ ID NO: 51623 - protein, 9 aa, synthetic construct
  source 1..9: note = Seed: LVVVGAVGV (KRAS G12V)
FVVFGYVGL

SEQ ID NO: 51624 - protein, 9 aa, synthetic construct
  source 1..9: note = Seed: LVVVGAVGV (KRAS G12V)
FVVFGYVGV

SEQ ID NO: 51625 - protein, 9 aa, synthetic construct
  source 1..9: note = Seed: LVVVGAVGV (KRAS G12V)
FVVFGYVGY

SEQ ID NO: 51626 - protein, 9 aa, synthetic construct
  source 1..9: note = Seed: LVVVGAVGV (KRAS G12V)
FVVGGAVGA

SEQ ID NO: 51627 - protein, 9 aa, synthetic construct
  source 1..9: note = Seed: LVVVGAVGV (KRAS G12V)
FVVGGAVGC

SEQ ID NO: 51628 - protein, 9 aa, synthetic construct
  source 1..9: note = Seed: LVVVGAVGV (KRAS G12V)
FVVGGAVGD

SEQ ID NO: 51629 - protein, 9 aa, synthetic construct
  source 1..9: note = Seed: LVVVGAVGV (KRAS G12V)
FVVGGAVGE

SEQ ID NO: 51630 - protein, 9 aa, synthetic construct
  source 1..9: note = Seed: LVVVGAVGV (KRAS G12V)
FVVGGAVGF

SEQ ID NO: 51631 - protein, 9 aa, synthetic construct
  source 1..9: note = Seed: LVVVGAVGV (KRAS G12V)
FVVGGAVGG

SEQ ID NO: 51632 - protein, 9 aa, synthetic construct
  source 1..9: note = Seed: LVVVGAVGV (KRAS G12V)
FVVGGAVGH

SEQ ID NO: 51633 - protein, 9 aa, synthetic construct
  source 1..9: note = Seed: LVVVGAVGV (KRAS G12V)
FVVGGAVGI

SEQ ID NO: 51634 - protein, 9 aa, synthetic construct
  source 1..9: note = Seed: LVVVGAVGV (KRAS G12V)
FVVGGAVGK

SEQ ID NO: 51635 - protein, 9 aa, synthetic construct
  source 1..9: note = Seed: LVVVGAVGV (KRAS G12V)
FVVGGAVGM

SEQ ID NO: 51636 - protein, 9 aa, synthetic construct
  source 1..9: note = Seed: LVVVGAVGV (KRAS G12V)
FVVGGAVGN

SEQ ID NO: 51637 - protein, 9 aa, synthetic construct
  source 1..9: note = Seed: LVVVGAVGV (KRAS G12V)
FVVGGAVGP

SEQ ID NO: 51638 - protein, 9 aa, synthetic construct
  source 1..9: note = Seed: LVVVGAVGV (KRAS G12V)
FVVGGAVGQ

SEQ ID NO: 51639 - protein, 9 aa, synthetic construct
  source 1..9: note = Seed: LVVVGAVGV (KRAS G12V)
FVVGGAVGR

SEQ ID NO: 51640 - protein, 9 aa, synthetic construct
  source 1..9: note = Seed: LVVVGAVGV (KRAS G12V)
FVVGGAVGS

SEQ ID NO: 51641 - protein, 9 aa, synthetic construct
  source 1..9: note = Seed: LVVVGAVGV (KRAS G12V)
FVVGGAVGT

SEQ ID NO: 51642 - protein, 9 aa, synthetic construct
  source 1..9: note = Seed: LVVVGAVGV (KRAS G12V)
FVVGGAVGV

SEQ ID NO: 51643 - protein, 9 aa, synthetic construct
  source 1..9: note = Seed: LVVVGAVGV (KRAS G12V)
FVVGGAVGW

SEQ ID NO: 51644 - protein, 9 aa, synthetic construct
  source 1..9: note = Seed: LVVVGAVGV (KRAS G12V)
FVVGGAVGY

SEQ ID NO: 51645 - protein, 9 aa, synthetic construct
  source 1..9: note = Seed: LVVVGAVGV (KRAS G12V)
FVVGGCVGA

SEQ ID NO: 51646 - protein, 9 aa, synthetic construct
  source 1..9: note = Seed: LVVVGAVGV (KRAS G12V)
FVVGGCVGC

SEQ ID NO: 51647 - protein, 9 aa, synthetic construct
  source 1..9: note = Seed: LVVVGAVGV (KRAS G12V)
FVVGGCVGG

SEQ ID NO: 51648 - protein, 9 aa, synthetic construct
  source 1..9: note = Seed: LVVVGAVGV (KRAS G12V)
FVVGGCVGI

SEQ ID NO: 51649 - protein, 9 aa, synthetic construct
  source 1..9: note = Seed: LVVVGAVGV (KRAS G12V)
FVVGGCVGL

SEQ ID NO: 51650 - protein, 9 aa, synthetic construct
  source 1..9: note = Seed: LVVVGAVGV (KRAS G12V)
FVVGGCVGM

SEQ ID NO: 51651 - protein, 9 aa, synthetic construct
  source 1..9: note = Seed: LVVVGAVGV (KRAS G12V)
FVVGGCVGN

SEQ ID NO: 51652 - protein, 9 aa, synthetic construct
  source 1..9: note = Seed: LVVVGAVGV (KRAS G12V)
FVVGGCVGS

SEQ ID NO: 51653 - protein, 9 aa, synthetic construct
  source 1..9: note = Seed: LVVVGAVGV (KRAS G12V)
FVVGGCVGT

SEQ ID NO: 51654 - protein, 9 aa, synthetic construct
  source 1..9: note = Seed: LVVVGAVGV (KRAS G12V)
FVVGGCVGV

SEQ ID NO: 51655 - protein, 9 aa, synthetic construct
  source 1..9: note = Seed: LVVVGAVGV (KRAS G12V)
FVVGGDVGA

SEQ ID NO: 51656 - protein, 9 aa, synthetic construct
  source 1..9: note = Seed: LVVVGAVGV (KRAS G12V)
FVVGGDVGC

SEQ ID NO: 51657 - protein, 9 aa, synthetic construct
  source 1..9: note = Seed: LVVVGAVGV (KRAS G12V)
FVVGGDVGI

SEQ ID NO: 51658 - protein, 9 aa, synthetic construct
  source 1..9: note = Seed: LVVVGAVGV (KRAS G12V)
FVVGGDVGL

SEQ ID NO: 51659 - protein, 9 aa, synthetic construct
  source 1..9: note = Seed: LVVVGAVGV (KRAS G12V)
FVVGGDVGV

SEQ ID NO: 51660 - protein, 9 aa, synthetic construct
  source 1..9: note = Seed: LVVVGAVGV (KRAS G12V)
FVVGGEVGA

SEQ ID NO: 51661 - protein, 9 aa, synthetic construct
  source 1..9: note = Seed: LVVVGAVGV (KRAS G12V)
FVVGGEVGC

SEQ ID NO: 51662 - protein, 9 aa, synthetic construct
  source 1..9: note = Seed: LVVVGAVGV (KRAS G12V)
FVVGGEVGI

SEQ ID NO: 51663 - protein, 9 aa, synthetic construct
  source 1..9: note = Seed: LVVVGAVGV (KRAS G12V)
FVVGGEVGL

SEQ ID NO: 51664 - protein, 9 aa, synthetic construct
  source 1..9: note = Seed: LVVVGAVGV (KRAS G12V)
FVVGGEVGV

SEQ ID NO: 51665 - protein, 9 aa, synthetic construct
  source 1..9: note = Seed: LVVVGAVGV (KRAS G12V)
FVVGGFVGL

SEQ ID NO: 51666 - protein, 9 aa, synthetic construct
  source 1..9: note = Seed: LVVVGAVGV (KRAS G12V)
FVVGGFVGV

SEQ ID NO: 51667 - protein, 9 aa, synthetic construct
  source 1..9: note = Seed: LVVVGAVGV (KRAS G12V)
FVVGGGVGA

SEQ ID NO: 51668 - protein, 9 aa, synthetic construct
  source 1..9: note = Seed: LVVVGAVGV (KRAS G12V)
FVVGGGVGC

SEQ ID NO: 51669 - protein, 9 aa, synthetic construct
  source 1..9: note = Seed: LVVVGAVGV (KRAS G12V)
FVVGGGVGF

SEQ ID NO: 51670 - protein, 9 aa, synthetic construct
  source 1..9: note = Seed: LVVVGAVGV (KRAS G12V)
FVVGGGVGG

SEQ ID NO: 51671 - protein, 9 aa, synthetic construct
  source 1..9: note = Seed: LVVVGAVGV (KRAS G12V)
FVVGGGVGH

SEQ ID NO: 51672 - protein, 9 aa, synthetic construct
  source 1..9: note = Seed: LVVVGAVGV (KRAS G12V)
FVVGGGVGI

SEQ ID NO: 51673 - protein, 9 aa, synthetic construct
  source 1..9: note = Seed: LVVVGAVGV (KRAS G12V)
FVVGGGVGL

SEQ ID NO: 51674 - protein, 9 aa, synthetic construct
  source 1..9: note = Seed: LVVVGAVGV (KRAS G12V)
FVVGGGVGM

SEQ ID NO: 51675 - protein, 9 aa, synthetic construct
  source 1..9: note = Seed: LVVVGAVGV (KRAS G12V)
FVVGGGVGN

SEQ ID NO: 51676 - protein, 9 aa, synthetic construct
  source 1..9: note = Seed: LVVVGAVGV (KRAS G12V)
FVVGGGVGP

SEQ ID NO: 51677 - protein, 9 aa, synthetic construct
  source 1..9: note = Seed: LVVVGAVGV (KRAS G12V)
FVVGGGVGQ

SEQ ID NO: 51678 - protein, 9 aa, synthetic construct
  source 1..9: note = Seed: LVVVGAVGV (KRAS G12V)
FVVGGGVGS

SEQ ID NO: 51679 - protein, 9 aa, synthetic construct
  source 1..9: note = Seed: LVVVGAVGV (KRAS G12V)
FVVGGGVGT

SEQ ID NO: 51680 - protein, 9 aa, synthetic construct
  source 1..9: note = Seed: LVVVGAVGV (KRAS G12V)
FVVGGGVGV

SEQ ID NO: 51681 - protein, 9 aa, synthetic construct
  source 1..9: note = Seed: LVVVGAVGV (KRAS G12V)
FVVGGGVGY

SEQ ID NO: 51682 - protein, 9 aa, synthetic construct
  source 1..9: note = Seed: LVVVGAVGV (KRAS G12V)
FVVGGHVGA

SEQ ID NO: 51683 - protein, 9 aa, synthetic construct
  source 1..9: note = Seed: LVVVGAVGV (KRAS G12V)
FVVGGHVGF

SEQ ID NO: 51684 - protein, 9 aa, synthetic construct
  source 1..9: note = Seed: LVVVGAVGV (KRAS G12V)
FVVGGHVGG

SEQ ID NO: 51685 - protein, 9 aa, synthetic construct
  source 1..9: note = Seed: LVVVGAVGV (KRAS G12V)
FVVGGHVGI

SEQ ID NO: 51686 - protein, 9 aa, synthetic construct
  source 1..9: note = Seed: LVVVGAVGV (KRAS G12V)
FVVGGHVGL

SEQ ID NO: 51687 - protein, 9 aa, synthetic construct
  source 1..9: note = Seed: LVVVGAVGV (KRAS G12V)
FVVGGHVGM

SEQ ID NO: 51688 - protein, 9 aa, synthetic construct
  source 1..9: note = Seed: LVVVGAVGV (KRAS G12V)
FVVGGHVGN

SEQ ID NO: 51689 - protein, 9 aa, synthetic construct
  source 1..9: note = Seed: LVVVGAVGV (KRAS G12V)
FVVGGHVGQ

SEQ ID NO: 51690 - protein, 9 aa, synthetic construct
  source 1..9: note = Seed: LVVVGAVGV (KRAS G12V)
FVVGGHVGS

SEQ ID NO: 51691 - protein, 9 aa, synthetic construct
  source 1..9: note = Seed: LVVVGAVGV (KRAS G12V)
FVVGGHVGT

SEQ ID NO: 51692 - protein, 9 aa, synthetic construct
  source 1..9: note = Seed: LVVVGAVGV (KRAS G12V)
FVVGGHVGV

SEQ ID NO: 51693 - protein, 9 aa, synthetic construct
  source 1..9: note = Seed: LVVVGAVGV (KRAS G12V)
FVVGGHVGY

SEQ ID NO: 51694 - protein, 9 aa, synthetic construct
  source 1..9: note = Seed: LVVVGAVGV (KRAS G12V)
FVVGGIVGA

SEQ ID NO: 51695 - protein, 9 aa, synthetic construct
  source 1..9: note = Seed: LVVVGAVGV (KRAS G12V)
FVVGGIVGC

SEQ ID NO: 51696 - protein, 9 aa, synthetic construct
  source 1..9: note = Seed: LVVVGAVGV (KRAS G12V)
FVVGGIVGE

SEQ ID NO: 51697 - protein, 9 aa, synthetic construct
  source 1..9: note = Seed: LVVVGAVGV (KRAS G12V)
FVVGGIVGG

SEQ ID NO: 51698 - protein, 9 aa, synthetic construct
  source 1..9: note = Seed: LVVVGAVGV (KRAS G12V)
FVVGGIVGH

SEQ ID NO: 51699 - protein, 9 aa, synthetic construct
  source 1..9: note = Seed: LVVVGAVGV (KRAS G12V)
FVVGGIVGI

SEQ ID NO: 51700 - protein, 9 aa, synthetic construct
  source 1..9: note = Seed: LVVVGAVGV (KRAS G12V)
FVVGGIVGL

SEQ ID NO: 51701 - protein, 9 aa, synthetic construct
  source 1..9: note = Seed: LVVVGAVGV (KRAS G12V)
FVVGGIVGM

SEQ ID NO: 51702 - protein, 9 aa, synthetic construct
  source 1..9: note = Seed: LVVVGAVGV (KRAS G12V)
FVVGGIVGN

SEQ ID NO: 51703 - protein, 9 aa, synthetic construct
  source 1..9: note = Seed: LVVVGAVGV (KRAS G12V)
FVVGGIVGQ

SEQ ID NO: 51704 - protein, 9 aa, synthetic construct
  source 1..9: note = Seed: LVVVGAVGV (KRAS G12V)
FVVGGIVGS

SEQ ID NO: 51705 - protein, 9 aa, synthetic construct
  source 1..9: note = Seed: LVVVGAVGV (KRAS G12V)
FVVGGIVGT

SEQ ID NO: 51706 - protein, 9 aa, synthetic construct
  source 1..9: note = Seed: LVVVGAVGV (KRAS G12V)
FVVGGIVGV

SEQ ID NO: 51707 - protein, 9 aa, synthetic construct
  source 1..9: note = Seed: LVVVGAVGV (KRAS G12V)
FVVGGKVGA

SEQ ID NO: 51708 - protein, 9 aa, synthetic construct
  source 1..9: note = Seed: LVVVGAVGV (KRAS G12V)
FVVGGKVGG

SEQ ID NO: 51709 - protein, 9 aa, synthetic construct
  source 1..9: note = Seed: LVVVGAVGV (KRAS G12V)
FVVGGKVGH

SEQ ID NO: 51710 - protein, 9 aa, synthetic construct
  source 1..9: note = Seed: LVVVGAVGV (KRAS G12V)
FVVGGKVGI

SEQ ID NO: 51711 - protein, 9 aa, synthetic construct
  source 1..9: note = Seed: LVVVGAVGV (KRAS G12V)
FVVGGKVGL

SEQ ID NO: 51712 - protein, 9 aa, synthetic construct
  source 1..9: note = Seed: LVVVGAVGV (KRAS G12V)
FVVGGKVGM

SEQ ID NO: 51713 - protein, 9 aa, synthetic construct
  source 1..9: note = Seed: LVVVGAVGV (KRAS G12V)
FVVGGKVGN

SEQ ID NO: 51714 - protein, 9 aa, synthetic construct
  source 1..9: note = Seed: LVVVGAVGV (KRAS G12V)
FVVGGKVGQ

SEQ ID NO: 51715 - protein, 9 aa, synthetic construct
  source 1..9: note = Seed: LVVVGAVGV (KRAS G12V)
FVVGGKVGS

SEQ ID NO: 51716 - protein, 9 aa, synthetic construct
  source 1..9: note = Seed: LVVVGAVGV (KRAS G12V)
FVVGGKVGT

SEQ ID NO: 51717 - protein, 9 aa, synthetic construct
  source 1..9: note = Seed: LVVVGAVGV (KRAS G12V)
FVVGGKVGV

SEQ ID NO: 51718 - protein, 9 aa, synthetic construct
  source 1..9: note = Seed: LVVVGAVGV (KRAS G12V)
FVVGGLVGA

SEQ ID NO: 51719 - protein, 9 aa, synthetic construct
  source 1..9: note = Seed: LVVVGAVGV (KRAS G12V)
FVVGGLVGG

SEQ ID NO: 51720 - protein, 9 aa, synthetic construct
  source 1..9: note = Seed: LVVVGAVGV (KRAS G12V)
FVVGGLVGI

SEQ ID NO: 51721 - protein, 9 aa, synthetic construct
  source 1..9: note = Seed: LVVVGAVGV (KRAS G12V)
FVVGGLVGL

SEQ ID NO: 51722 - protein, 9 aa, synthetic construct
  source 1..9: note = Seed: LVVVGAVGV (KRAS G12V)
FVVGGLVGM

SEQ ID NO: 51723 - protein, 9 aa, synthetic construct
  source 1..9: note = Seed: LVVVGAVGV (KRAS G12V)
FVVGGLVGN

SEQ ID NO: 51724 - protein, 9 aa, synthetic construct
  source 1..9: note = Seed: LVVVGAVGV (KRAS G12V)
FVVGGLVGQ

SEQ ID NO: 51725 - protein, 9 aa, synthetic construct
  source 1..9: note = Seed: LVVVGAVGV (KRAS G12V)
FVVGGLVGS

SEQ ID NO: 51726 - protein, 9 aa, synthetic construct
  source 1..9: note = Seed: LVVVGAVGV (KRAS G12V)
FVVGGLVGT

SEQ ID NO: 51727 - protein, 9 aa, synthetic construct
  source 1..9: note = Seed: LVVVGAVGV (KRAS G12V)
FVVGGLVGV

SEQ ID NO: 51728 - protein, 9 aa, synthetic construct
  source 1..9: note = Seed: LVVVGAVGV (KRAS G12V)
FVVGGMVGA

SEQ ID NO: 51729 - protein, 9 aa, synthetic construct
  source 1..9: note = Seed: LVVVGAVGV (KRAS G12V)
FVVGGMVGD

SEQ ID NO: 51730 - protein, 9 aa, synthetic construct
  source 1..9: note = Seed: LVVVGAVGV (KRAS G12V)
FVVGGMVGG

SEQ ID NO: 51731 - protein, 9 aa, synthetic construct
  source 1..9: note = Seed: LVVVGAVGV (KRAS G12V)
FVVGGMVGI

SEQ ID NO: 51732 - protein, 9 aa, synthetic construct
  source 1..9: note = Seed: LVVVGAVGV (KRAS G12V)
FVVGGMVGL

SEQ ID NO: 51733 - protein, 9 aa, synthetic construct
  source 1..9: note = Seed: LVVVGAVGV (KRAS G12V)
FVVGGMVGM

SEQ ID NO: 51734 - protein, 9 aa, synthetic construct
  source 1..9: note = Seed: LVVVGAVGV (KRAS G12V)
FVVGGMVGN

SEQ ID NO: 51735 - protein, 9 aa, synthetic construct
  source 1..9: note = Seed: LVVVGAVGV (KRAS G12V)
FVVGGMVGQ

SEQ ID NO: 51736 - protein, 9 aa, synthetic construct
  source 1..9: note = Seed: LVVVGAVGV (KRAS G12V)
FVVGGMVGS

SEQ ID NO: 51737 - protein, 9 aa, synthetic construct
  source 1..9: note = Seed: LVVVGAVGV (KRAS G12V)
FVVGGMVGT

SEQ ID NO: 51738 - protein, 9 aa, synthetic construct
  source 1..9: note = Seed: LVVVGAVGV (KRAS G12V)
FVVGGMVGV

SEQ ID NO: 51739 - protein, 9 aa, synthetic construct
  source 1..9: note = Seed: LVVVGAVGV (KRAS G12V)
FVVGGNVGA

SEQ ID NO: 51740 - protein, 9 aa, synthetic construct
  source 1..9: note = Seed: LVVVGAVGV (KRAS G12V)
FVVGGNVGC

SEQ ID NO: 51741 - protein, 9 aa, synthetic construct
  source 1..9: note = Seed: LVVVGAVGV (KRAS G12V)
FVVGGNVGF

SEQ ID NO: 51742 - protein, 9 aa, synthetic construct
  source 1..9: note = Seed: LVVVGAVGV (KRAS G12V)
FVVGGNVGG

SEQ ID NO: 51743 - protein, 9 aa, synthetic construct
  source 1..9: note = Seed: LVVVGAVGV (KRAS G12V)
FVVGGNVGH

SEQ ID NO: 51744 - protein, 9 aa, synthetic construct
  source 1..9: note = Seed: LVVVGAVGV (KRAS G12V)
FVVGGNVGI

SEQ ID NO: 51745 - protein, 9 aa, synthetic construct
  source 1..9: note = Seed: LVVVGAVGV (KRAS G12V)
FVVGGNVGK

SEQ ID NO: 51746 - protein, 9 aa, synthetic construct
  source 1..9: note = Seed: LVVVGAVGV (KRAS G12V)
FVVGGNVGL

SEQ ID NO: 51747 - protein, 9 aa, synthetic construct
  source 1..9: note = Seed: LVVVGAVGV (KRAS G12V)
FVVGGNVGM

SEQ ID NO: 51748 - protein, 9 aa, synthetic construct
  source 1..9: note = Seed: LVVVGAVGV (KRAS G12V)
FVVGGNVGN

SEQ ID NO: 51749 - protein, 9 aa, synthetic construct
  source 1..9: note = Seed: LVVVGAVGV (KRAS G12V)
FVVGGNVGP

SEQ ID NO: 51750 - protein, 9 aa, synthetic construct
  source 1..9: note = Seed: LVVVGAVGV (KRAS G12V)
FVVGGNVGQ

SEQ ID NO: 51751 - protein, 9 aa, synthetic construct
  source 1..9: note = Seed: LVVVGAVGV (KRAS G12V)
FVVGGNVGR

SEQ ID NO: 51752 - protein, 9 aa, synthetic construct
  source 1..9: note = Seed: LVVVGAVGV (KRAS G12V)
FVVGGNVGS

SEQ ID NO: 51753 - protein, 9 aa, synthetic construct
  source 1..9: note = Seed: LVVVGAVGV (KRAS G12V)
FVVGGNVGT

SEQ ID NO: 51754 - protein, 9 aa, synthetic construct
  source 1..9: note = Seed: LVVVGAVGV (KRAS G12V)
FVVGGNVGV

SEQ ID NO: 51755 - protein, 9 aa, synthetic construct
  source 1..9: note = Seed: LVVVGAVGV (KRAS G12V)
FVVGGNVGW

SEQ ID NO: 51756 - protein, 9 aa, synthetic construct
  source 1..9: note = Seed: LVVVGAVGV (KRAS G12V)
FVVGGNVGY

SEQ ID NO: 51757 - protein, 9 aa, synthetic construct
  source 1..9: note = Seed: LVVVGAVGV (KRAS G12V)
FVVGGPVGA

SEQ ID NO: 51758 - protein, 9 aa, synthetic construct
  source 1..9: note = Seed: LVVVGAVGV (KRAS G12V)
FVVGGPVGC

SEQ ID NO: 51759 - protein, 9 aa, synthetic construct
  source 1..9: note = Seed: LVVVGAVGV (KRAS G12V)
FVVGGPVGE

SEQ ID NO: 51760 - protein, 9 aa, synthetic construct
  source 1..9: note = Seed: LVVVGAVGV (KRAS G12V)
FVVGGPVGF

SEQ ID NO: 51761 - protein, 9 aa, synthetic construct
  source 1..9: note = Seed: LVVVGAVGV (KRAS G12V)
FVVGGPVGG

SEQ ID NO: 51762 - protein, 9 aa, synthetic construct
  source 1..9: note = Seed: LVVVGAVGV (KRAS G12V)
FVVGGPVGH

SEQ ID NO: 51763 - protein, 9 aa, synthetic construct
  source 1..9: note = Seed: LVVVGAVGV (KRAS G12V)
FVVGGPVGI

SEQ ID NO: 51764 - protein, 9 aa, synthetic construct
  source 1..9: note = Seed: LVVVGAVGV (KRAS G12V)
FVVGGPVGK

SEQ ID NO: 51765 - protein, 9 aa, synthetic construct
  source 1..9: note = Seed: LVVVGAVGV (KRAS G12V)
FVVGGPVGL

SEQ ID NO: 51766 - protein, 9 aa, synthetic construct
  source 1..9: note = Seed: LVVVGAVGV (KRAS G12V)
FVVGGPVGM

SEQ ID NO: 51767 - protein, 9 aa, synthetic construct
  source 1..9: note = Seed: LVVVGAVGV (KRAS G12V)
FVVGGPVGN

SEQ ID NO: 51768 - protein, 9 aa, synthetic construct
  source 1..9: note = Seed: LVVVGAVGV (KRAS G12V)
FVVGGPVGP

SEQ ID NO: 51769 - protein, 9 aa, synthetic construct
  source 1..9: note = Seed: LVVVGAVGV (KRAS G12V)
FVVGGPVGQ

SEQ ID NO: 51770 - protein, 9 aa, synthetic construct
  source 1..9: note = Seed: LVVVGAVGV (KRAS G12V)
FVVGGPVGR

SEQ ID NO: 51771 - protein, 9 aa, synthetic construct
  source 1..9: note = Seed: LVVVGAVGV (KRAS G12V)
FVVGGPVGS

SEQ ID NO: 51772 - protein, 9 aa, synthetic construct
  source 1..9: note = Seed: LVVVGAVGV (KRAS G12V)
FVVGGPVGT

SEQ ID NO: 51773 - protein, 9 aa, synthetic construct
  source 1..9: note = Seed: LVVVGAVGV (KRAS G12V)
FVVGGPVGV

SEQ ID NO: 51774 - protein, 9 aa, synthetic construct
  source 1..9: note = Seed: LVVVGAVGV (KRAS G12V)
FVVGGPVGW

SEQ ID NO: 51775 - protein, 9 aa, synthetic construct
  source 1..9: note = Seed: LVVVGAVGV (KRAS G12V)
FVVGGPVGY

SEQ ID NO: 51776 - protein, 9 aa, synthetic construct
  source 1..9: note = Seed: LVVVGAVGV (KRAS G12V)
FVVGGQVGA

SEQ ID NO: 51777 - protein, 9 aa, synthetic construct
  source 1..9: note = Seed: LVVVGAVGV (KRAS G12V)
FVVGGQVGI

SEQ ID NO: 51778 - protein, 9 aa, synthetic construct
  source 1..9: note = Seed: LVVVGAVGV (KRAS G12V)
FVVGGQVGL

SEQ ID NO: 51779 - protein, 9 aa, synthetic construct
  source 1..9: note = Seed: LVVVGAVGV (KRAS G12V)
FVVGGQVGM

SEQ ID NO: 51780 - protein, 9 aa, synthetic construct
  source 1..9: note = Seed: LVVVGAVGV (KRAS G12V)
FVVGGQVGS

SEQ ID NO: 51781 - protein, 9 aa, synthetic construct
  source 1..9: note = Seed: LVVVGAVGV (KRAS G12V)
FVVGGQVGT

SEQ ID NO: 51782 - protein, 9 aa, synthetic construct
  source 1..9: note = Seed: LVVVGAVGV (KRAS G12V)
FVVGGQVGV

SEQ ID NO: 51783 - protein, 9 aa, synthetic construct
  source 1..9: note = Seed: LVVVGAVGV (KRAS G12V)
FVVGGRVGA

SEQ ID NO: 51784 - protein, 9 aa, synthetic construct
  source 1..9: note = Seed: LVVVGAVGV (KRAS G12V)
FVVGGRVGG

SEQ ID NO: 51785 - protein, 9 aa, synthetic construct
  source 1..9: note = Seed: LVVVGAVGV (KRAS G12V)
FVVGGRVGH

SEQ ID NO: 51786 - protein, 9 aa, synthetic construct
  source 1..9: note = Seed: LVVVGAVGV (KRAS G12V)
FVVGGRVGQ

SEQ ID NO: 51787 - protein, 9 aa, synthetic construct
  source 1..9: note = Seed: LVVVGAVGV (KRAS G12V)
FVVGGRVGS

SEQ ID NO: 51788 - protein, 9 aa, synthetic construct
  source 1..9: note = Seed: LVVVGAVGV (KRAS G12V)
FVVGGRVGT

SEQ ID NO: 51789 - protein, 9 aa, synthetic construct
  source 1..9: note = Seed: LVVVGAVGV (KRAS G12V)
FVVGGRVGV

SEQ ID NO: 51790 - protein, 9 aa, synthetic construct
  source 1..9: note = Seed: LVVVGAVGV (KRAS G12V)
FVVGGSVGA

SEQ ID NO: 51791 - protein, 9 aa, synthetic construct
  source 1..9: note = Seed: LVVVGAVGV (KRAS G12V)
FVVGGSVGC

SEQ ID NO: 51792 - protein, 9 aa, synthetic construct
  source 1..9: note = Seed: LVVVGAVGV (KRAS G12V)
FVVGGSVGF

SEQ ID NO: 51793 - protein, 9 aa, synthetic construct
  source 1..9: note = Seed: LVVVGAVGV (KRAS G12V)
FVVGGSVGG

SEQ ID NO: 51794 - protein, 9 aa, synthetic construct
  source 1..9: note = Seed: LVVVGAVGV (KRAS G12V)
FVVGGSVGH

SEQ ID NO: 51795 - protein, 9 aa, synthetic construct
  source 1..9: note = Seed: LVVVGAVGV (KRAS G12V)
FVVGGSVGI

SEQ ID NO: 51796 - protein, 9 aa, synthetic construct
  source 1..9: note = Seed: LVVVGAVGV (KRAS G12V)
FVVGGSVGK

SEQ ID NO: 51797 - protein, 9 aa, synthetic construct
  source 1..9: note = Seed: LVVVGAVGV (KRAS G12V)
FVVGGSVGL

SEQ ID NO: 51798 - protein, 9 aa, synthetic construct
  source 1..9: note = Seed: LVVVGAVGV (KRAS G12V)
FVVGGSVGM

SEQ ID NO: 51799 - protein, 9 aa, synthetic construct
  source 1..9: note = Seed: LVVVGAVGV (KRAS G12V)
FVVGGSVGN

SEQ ID NO: 51800 - protein, 9 aa, synthetic construct
  source 1..9: note = Seed: LVVVGAVGV (KRAS G12V)
FVVGGSVGP

SEQ ID NO: 51801 - protein, 9 aa, synthetic construct
  source 1..9: note = Seed: LVVVGAVGV (KRAS G12V)
FVVGGSVGQ

SEQ ID NO: 51802 - protein, 9 aa, synthetic construct
  source 1..9: note = Seed: LVVVGAVGV (KRAS G12V)
FVVGGSVGR

SEQ ID NO: 51803 - protein, 9 aa, synthetic construct
  source 1..9: note = Seed: LVVVGAVGV (KRAS G12V)
FVVGGSVGS

SEQ ID NO: 51804 - protein, 9 aa, synthetic construct
  source 1..9: note = Seed: LVVVGAVGV (KRAS G12V)
FVVGGSVGT

SEQ ID NO: 51805 - protein, 9 aa, synthetic construct
  source 1..9: note = Seed: LVVVGAVGV (KRAS G12V)
FVVGGSVGV

SEQ ID NO: 51806 - protein, 9 aa, synthetic construct
  source 1..9: note = Seed: LVVVGAVGV (KRAS G12V)
FVVGGSVGW

SEQ ID NO: 51807 - protein, 9 aa, synthetic construct
  source 1..9: note = Seed: LVVVGAVGV (KRAS G12V)
FVVGGSVGY

SEQ ID NO: 51808 - protein, 9 aa, synthetic construct
  source 1..9: note = Seed: LVVVGAVGV (KRAS G12V)
FVVGGTVGA

SEQ ID NO: 51809 - protein, 9 aa, synthetic construct
  source 1..9: note = Seed: LVVVGAVGV (KRAS G12V)
FVVGGTVGC

SEQ ID NO: 51810 - protein, 9 aa, synthetic construct
  source 1..9: note = Seed: LVVVGAVGV (KRAS G12V)
FVVGGTVGF

SEQ ID NO: 51811 - protein, 9 aa, synthetic construct
  source 1..9: note = Seed: LVVVGAVGV (KRAS G12V)
FVVGGTVGG

SEQ ID NO: 51812 - protein, 9 aa, synthetic construct
  source 1..9: note = Seed: LVVVGAVGV (KRAS G12V)
FVVGGTVGH

SEQ ID NO: 51813 - protein, 9 aa, synthetic construct
  source 1..9: note = Seed: LVVVGAVGV (KRAS G12V)
FVVGGTVGI

SEQ ID NO: 51814 - protein, 9 aa, synthetic construct
  source 1..9: note = Seed: LVVVGAVGV (KRAS G12V)
FVVGGTVGK

SEQ ID NO: 51815 - protein, 9 aa, synthetic construct
  source 1..9: note = Seed: LVVVGAVGV (KRAS G12V)
FVVGGTVGL

SEQ ID NO: 51816 - protein, 9 aa, synthetic construct
  source 1..9: note = Seed: LVVVGAVGV (KRAS G12V)
FVVGGTVGM

SEQ ID NO: 51817 - protein, 9 aa, synthetic construct
  source 1..9: note = Seed: LVVVGAVGV (KRAS G12V)
FVVGGTVGN

SEQ ID NO: 51818 - protein, 9 aa, synthetic construct
  source 1..9: note = Seed: LVVVGAVGV (KRAS G12V)
FVVGGTVGP

SEQ ID NO: 51819 - protein, 9 aa, synthetic construct
  source 1..9: note = Seed: LVVVGAVGV (KRAS G12V)
FVVGGTVGQ

SEQ ID NO: 51820 - protein, 9 aa, synthetic construct
  source 1..9: note = Seed: LVVVGAVGV (KRAS G12V)
FVVGGTVGR

SEQ ID NO: 51821 - protein, 9 aa, synthetic construct
  source 1..9: note = Seed: LVVVGAVGV (KRAS G12V)
FVVGGTVGS

SEQ ID NO: 51822 - protein, 9 aa, synthetic construct
  source 1..9: note = Seed: LVVVGAVGV (KRAS G12V)
FVVGGTVGT

SEQ ID NO: 51823 - protein, 9 aa, synthetic construct
  source 1..9: note = Seed: LVVVGAVGV (KRAS G12V)
FVVGGTVGV

SEQ ID NO: 51824 - protein, 9 aa, synthetic construct
  source 1..9: note = Seed: LVVVGAVGV (KRAS G12V)
FVVGGTVGY

SEQ ID NO: 51825 - protein, 9 aa, synthetic construct
  source 1..9: note = Seed: LVVVGAVGV (KRAS G12V)
FVVGGVVGA

SEQ ID NO: 51826 - protein, 9 aa, synthetic construct
  source 1..9: note = Seed: LVVVGAVGV (KRAS G12V)
FVVGGVVGC

SEQ ID NO: 51827 - protein, 9 aa, synthetic construct
  source 1..9: note = Seed: LVVVGAVGV (KRAS G12V)
FVVGGVVGF

SEQ ID NO: 51828 - protein, 9 aa, synthetic construct
  source 1..9: note = Seed: LVVVGAVGV (KRAS G12V)
FVVGGVVGG

SEQ ID NO: 51829 - protein, 9 aa, synthetic construct
  source 1..9: note = Seed: LVVVGAVGV (KRAS G12V)
FVVGGVVGH

SEQ ID NO: 51830 - protein, 9 aa, synthetic construct
  source 1..9: note = Seed: LVVVGAVGV (KRAS G12V)
FVVGGVVGI

SEQ ID NO: 51831 - protein, 9 aa, synthetic construct
  source 1..9: note = Seed: LVVVGAVGV (KRAS G12V)
FVVGGVVGL

SEQ ID NO: 51832 - protein, 9 aa, synthetic construct
  source 1..9: note = Seed: LVVVGAVGV (KRAS G12V)
FVVGGVVGM

SEQ ID NO: 51833 - protein, 9 aa, synthetic construct
  source 1..9: note = Seed: LVVVGAVGV (KRAS G12V)
FVVGGVVGN

SEQ ID NO: 51834 - protein, 9 aa, synthetic construct
  source 1..9: note = Seed: LVVVGAVGV (KRAS G12V)
FVVGGVVGP

SEQ ID NO: 51835 - protein, 9 aa, synthetic construct
  source 1..9: note = Seed: LVVVGAVGV (KRAS G12V)
FVVGGVVGQ

SEQ ID NO: 51836 - protein, 9 aa, synthetic construct
  source 1..9: note = Seed: LVVVGAVGV (KRAS G12V)
FVVGGVVGR

SEQ ID NO: 51837 - protein, 9 aa, synthetic construct
  source 1..9: note = Seed: LVVVGAVGV (KRAS G12V)
FVVGGVVGS

SEQ ID NO: 51838 - protein, 9 aa, synthetic construct
  source 1..9: note = Seed: LVVVGAVGV (KRAS G12V)
FVVGGVVGT

SEQ ID NO: 51839 - protein, 9 aa, synthetic construct
  source 1..9: note = Seed: LVVVGAVGV (KRAS G12V)
FVVGGVVGV

SEQ ID NO: 51840 - protein, 9 aa, synthetic construct
  source 1..9: note = Seed: LVVVGAVGV (KRAS G12V)
FVVGGVVGY

SEQ ID NO: 51841 - protein, 9 aa, synthetic construct
  source 1..9: note = Seed: LVVVGAVGV (KRAS G12V)
FVVGGYVGA

SEQ ID NO: 51842 - protein, 9 aa, synthetic construct
  source 1..9: note = Seed: LVVVGAVGV (KRAS G12V)
FVVGGYVGI

SEQ ID NO: 51843 - protein, 9 aa, synthetic construct
  source 1..9: note = Seed: LVVVGAVGV (KRAS G12V)
FVVGGYVGL

SEQ ID NO: 51844 - protein, 9 aa, synthetic construct
  source 1..9: note = Seed: LVVVGAVGV (KRAS G12V)
FVVGGYVGM

SEQ ID NO: 51845 - protein, 9 aa, synthetic construct
  source 1..9: note = Seed: LVVVGAVGV (KRAS G12V)
FVVGGYVGV

SEQ ID NO: 51846 - protein, 9 aa, synthetic construct
  source 1..9: note = Seed: LVVVGAVGV (KRAS G12V)
FVVHGAVGA

SEQ ID NO: 51847 - protein, 9 aa, synthetic construct
  source 1..9: note = Seed: LVVVGAVGV (KRAS G12V)
FVVHGAVGC

SEQ ID NO: 51848 - protein, 9 aa, synthetic construct
  source 1..9: note = Seed: LVVVGAVGV (KRAS G12V)
FVVHGAVGF

SEQ ID NO: 51849 - protein, 9 aa, synthetic construct
  source 1..9: note = Seed: LVVVGAVGV (KRAS G12V)
FVVHGAVGG

SEQ ID NO: 51850 - protein, 9 aa, synthetic construct
  source 1..9: note = Seed: LVVVGAVGV (KRAS G12V)
FVVHGAVGH

SEQ ID NO: 51851 - protein, 9 aa, synthetic construct
  source 1..9: note = Seed: LVVVGAVGV (KRAS G12V)
FVVHGAVGI

SEQ ID NO: 51852 - protein, 9 aa, synthetic construct
  source 1..9: note = Seed: LVVVGAVGV (KRAS G12V)
FVVHGAVGK

SEQ ID NO: 51853 - protein, 9 aa, synthetic construct
  source 1..9: note = Seed: LVVVGAVGV (KRAS G12V)
FVVHGAVGL

SEQ ID NO: 51854 - protein, 9 aa, synthetic construct
  source 1..9: note = Seed: LVVVGAVGV (KRAS G12V)
FVVHGAVGM

SEQ ID NO: 51855 - protein, 9 aa, synthetic construct
  source 1..9: note = Seed: LVVVGAVGV (KRAS G12V)
FVVHGAVGN

SEQ ID NO: 51856 - protein, 9 aa, synthetic construct
  source 1..9: note = Seed: LVVVGAVGV (KRAS G12V)
FVVHGAVGP

SEQ ID NO: 51857 - protein, 9 aa, synthetic construct
  source 1..9: note = Seed: LVVVGAVGV (KRAS G12V)
FVVHGAVGQ

SEQ ID NO: 51858 - protein, 9 aa, synthetic construct
  source 1..9: note = Seed: LVVVGAVGV (KRAS G12V)
FVVHGAVGR

SEQ ID NO: 51859 - protein, 9 aa, synthetic construct
  source 1..9: note = Seed: LVVVGAVGV (KRAS G12V)
FVVHGAVGS

SEQ ID NO: 51860 - protein, 9 aa, synthetic construct
  source 1..9: note = Seed: LVVVGAVGV (KRAS G12V)
FVVHGAVGT

SEQ ID NO: 51861 - protein, 9 aa, synthetic construct
  source 1..9: note = Seed: LVVVGAVGV (KRAS G12V)
FVVHGAVGV

SEQ ID NO: 51862 - protein, 9 aa, synthetic construct
  source 1..9: note = Seed: LVVVGAVGV (KRAS G12V)
FVVHGAVGW

SEQ ID NO: 51863 - protein, 9 aa, synthetic construct
  source 1..9: note = Seed: LVVVGAVGV (KRAS G12V)
FVVHGAVGY

SEQ ID NO: 51864 - protein, 9 aa, synthetic construct
  source 1..9: note = Seed: LVVVGAVGV (KRAS G12V)
FVVHGCVGA

SEQ ID NO: 51865 - protein, 9 aa, synthetic construct
  source 1..9: note = Seed: LVVVGAVGV (KRAS G12V)
FVVHGCVGI

SEQ ID NO: 51866 - protein, 9 aa, synthetic construct
  source 1..9: note = Seed: LVVVGAVGV (KRAS G12V)
FVVHGCVGL

SEQ ID NO: 51867 - protein, 9 aa, synthetic construct
  source 1..9: note = Seed: LVVVGAVGV (KRAS G12V)
FVVHGCVGM

SEQ ID NO: 51868 - protein, 9 aa, synthetic construct
  source 1..9: note = Seed: LVVVGAVGV (KRAS G12V)
FVVHGCVGV

SEQ ID NO: 51869 - protein, 9 aa, synthetic construct
  source 1..9: note = Seed: LVVVGAVGV (KRAS G12V)
FVVHGDVGL

SEQ ID NO: 51870 - protein, 9 aa, synthetic construct
  source 1..9: note = Seed: LVVVGAVGV (KRAS G12V)
FVVHGFVGA

SEQ ID NO: 51871 - protein, 9 aa, synthetic construct
  source 1..9: note = Seed: LVVVGAVGV (KRAS G12V)
FVVHGFVGD

SEQ ID NO: 51872 - protein, 9 aa, synthetic construct
  source 1..9: note = Seed: LVVVGAVGV (KRAS G12V)
FVVHGFVGE

SEQ ID NO: 51873 - protein, 9 aa, synthetic construct
  source 1..9: note = Seed: LVVVGAVGV (KRAS G12V)
FVVHGFVGF

SEQ ID NO: 51874 - protein, 9 aa, synthetic construct
  source 1..9: note = Seed: LVVVGAVGV (KRAS G12V)
FVVHGFVGI

SEQ ID NO: 51875 - protein, 9 aa, synthetic construct
  source 1..9: note = Seed: LVVVGAVGV (KRAS G12V)
FVVHGFVGL

SEQ ID NO: 51876 - protein, 9 aa, synthetic construct
  source 1..9: note = Seed: LVVVGAVGV (KRAS G12V)
FVVHGFVGM

SEQ ID NO: 51877 - protein, 9 aa, synthetic construct
  source 1..9: note = Seed: LVVVGAVGV (KRAS G12V)
FVVHGFVGN

SEQ ID NO: 51878 - protein, 9 aa, synthetic construct
  source 1..9: note = Seed: LVVVGAVGV (KRAS G12V)
FVVHGFVGS

SEQ ID NO: 51879 - protein, 9 aa, synthetic construct
  source 1..9: note = Seed: LVVVGAVGV (KRAS G12V)
FVVHGFVGT

SEQ ID NO: 51880 - protein, 9 aa, synthetic construct
  source 1..9: note = Seed: LVVVGAVGV (KRAS G12V)
FVVHGFVGV

SEQ ID NO: 51881 - protein, 9 aa, synthetic construct
  source 1..9: note = Seed: LVVVGAVGV (KRAS G12V)
FVVHGFVGY

SEQ ID NO: 51882 - protein, 9 aa, synthetic construct
  source 1..9: note = Seed: LVVVGAVGV (KRAS G12V)
FVVHGGVGA

SEQ ID NO: 51883 - protein, 9 aa, synthetic construct
  source 1..9: note = Seed: LVVVGAVGV (KRAS G12V)
FVVHGGVGC

SEQ ID NO: 51884 - protein, 9 aa, synthetic construct
  source 1..9: note = Seed: LVVVGAVGV (KRAS G12V)
FVVHGGVGF

SEQ ID NO: 51885 - protein, 9 aa, synthetic construct
  source 1..9: note = Seed: LVVVGAVGV (KRAS G12V)
FVVHGGVGG

SEQ ID NO: 51886 - protein, 9 aa, synthetic construct
  source 1..9: note = Seed: LVVVGAVGV (KRAS G12V)
FVVHGGVGH

SEQ ID NO: 51887 - protein, 9 aa, synthetic construct
  source 1..9: note = Seed: LVVVGAVGV (KRAS G12V)
FVVHGGVGI

SEQ ID NO: 51888 - protein, 9 aa, synthetic construct
  source 1..9: note = Seed: LVVVGAVGV (KRAS G12V)
FVVHGGVGL

SEQ ID NO: 51889 - protein, 9 aa, synthetic construct
  source 1..9: note = Seed: LVVVGAVGV (KRAS G12V)
FVVHGGVGM

SEQ ID NO: 51890 - protein, 9 aa, synthetic construct
  source 1..9: note = Seed: LVVVGAVGV (KRAS G12V)
FVVHGGVGN

SEQ ID NO: 51891 - protein, 9 aa, synthetic construct
  source 1..9: note = Seed: LVVVGAVGV (KRAS G12V)
FVVHGGVGQ

SEQ ID NO: 51892 - protein, 9 aa, synthetic construct
  source 1..9: note = Seed: LVVVGAVGV (KRAS G12V)
FVVHGGVGR

SEQ ID NO: 51893 - protein, 9 aa, synthetic construct
  source 1..9: note = Seed: LVVVGAVGV (KRAS G12V)
FVVHGGVGS

SEQ ID NO: 51894 - protein, 9 aa, synthetic construct
  source 1..9: note = Seed: LVVVGAVGV (KRAS G12V)
FVVHGGVGT

SEQ ID NO: 51895 - protein, 9 aa, synthetic construct
  source 1..9: note = Seed: LVVVGAVGV (KRAS G12V)
FVVHGGVGV

SEQ ID NO: 51896 - protein, 9 aa, synthetic construct
  source 1..9: note = Seed: LVVVGAVGV (KRAS G12V)
FVVHGGVGW

SEQ ID NO: 51897 - protein, 9 aa, synthetic construct
  source 1..9: note = Seed: LVVVGAVGV (KRAS G12V)
FVVHGGVGY

SEQ ID NO: 51898 - protein, 9 aa, synthetic construct
  source 1..9: note = Seed: LVVVGAVGV (KRAS G12V)
FVVHGHVGA

SEQ ID NO: 51899 - protein, 9 aa, synthetic construct
  source 1..9: note = Seed: LVVVGAVGV (KRAS G12V)
FVVHGHVGI

SEQ ID NO: 51900 - protein, 9 aa, synthetic construct
  source 1..9: note = Seed: LVVVGAVGV (KRAS G12V)
FVVHGHVGL

SEQ ID NO: 51901 - protein, 9 aa, synthetic construct
  source 1..9: note = Seed: LVVVGAVGV (KRAS G12V)
FVVHGHVGM

SEQ ID NO: 51902 - protein, 9 aa, synthetic construct
  source 1..9: note = Seed: LVVVGAVGV (KRAS G12V)
FVVHGHVGS

SEQ ID NO: 51903 - protein, 9 aa, synthetic construct
  source 1..9: note = Seed: LVVVGAVGV (KRAS G12V)
FVVHGHVGV

SEQ ID NO: 51904 - protein, 9 aa, synthetic construct
  source 1..9: note = Seed: LVVVGAVGV (KRAS G12V)
FVVHGIVGA

SEQ ID NO: 51905 - protein, 9 aa, synthetic construct
  source 1..9: note = Seed: LVVVGAVGV (KRAS G12V)
FVVHGIVGF

SEQ ID NO: 51906 - protein, 9 aa, synthetic construct
  source 1..9: note = Seed: LVVVGAVGV (KRAS G12V)
FVVHGIVGI

SEQ ID NO: 51907 - protein, 9 aa, synthetic construct
  source 1..9: note = Seed: LVVVGAVGV (KRAS G12V)
FVVHGIVGL

SEQ ID NO: 51908 - protein, 9 aa, synthetic construct
  source 1..9: note = Seed: LVVVGAVGV (KRAS G12V)
FVVHGIVGM

SEQ ID NO: 51909 - protein, 9 aa, synthetic construct
  source 1..9: note = Seed: LVVVGAVGV (KRAS G12V)
FVVHGIVGN

SEQ ID NO: 51910 - protein, 9 aa, synthetic construct
  source 1..9: note = Seed: LVVVGAVGV (KRAS G12V)
FVVHGIVGR

SEQ ID NO: 51911 - protein, 9 aa, synthetic construct
  source 1..9: note = Seed: LVVVGAVGV (KRAS G12V)
FVVHGIVGS

SEQ ID NO: 51912 - protein, 9 aa, synthetic construct
  source 1..9: note = Seed: LVVVGAVGV (KRAS G12V)
FVVHGIVGT

SEQ ID NO: 51913 - protein, 9 aa, synthetic construct
  source 1..9: note = Seed: LVVVGAVGV (KRAS G12V)
FVVHGIVGV

SEQ ID NO: 51914 - protein, 9 aa, synthetic construct
  source 1..9: note = Seed: LVVVGAVGV (KRAS G12V)
FVVHGKVGA

SEQ ID NO: 51915 - protein, 9 aa, synthetic construct
  source 1..9: note = Seed: LVVVGAVGV (KRAS G12V)
FVVHGKVGG

SEQ ID NO: 51916 - protein, 9 aa, synthetic construct
  source 1..9: note = Seed: LVVVGAVGV (KRAS G12V)
FVVHGKVGH

SEQ ID NO: 51917 - protein, 9 aa, synthetic construct
  source 1..9: note = Seed: LVVVGAVGV (KRAS G12V)
FVVHGKVGN

SEQ ID NO: 51918 - protein, 9 aa, synthetic construct
  source 1..9: note = Seed: LVVVGAVGV (KRAS G12V)
FVVHGKVGQ

SEQ ID NO: 51919 - protein, 9 aa, synthetic construct
  source 1..9: note = Seed: LVVVGAVGV (KRAS G12V)
FVVHGKVGR

SEQ ID NO: 51920 - protein, 9 aa, synthetic construct
  source 1..9: note = Seed: LVVVGAVGV (KRAS G12V)
FVVHGKVGS

SEQ ID NO: 51921 - protein, 9 aa, synthetic construct
  source 1..9: note = Seed: LVVVGAVGV (KRAS G12V)
FVVHGKVGT

SEQ ID NO: 51922 - protein, 9 aa, synthetic construct
  source 1..9: note = Seed: LVVVGAVGV (KRAS G12V)
FVVHGLVGA

SEQ ID NO: 51923 - protein, 9 aa, synthetic construct
  source 1..9: note = Seed: LVVVGAVGV (KRAS G12V)
FVVHGLVGF

SEQ ID NO: 51924 - protein, 9 aa, synthetic construct
  source 1..9: note = Seed: LVVVGAVGV (KRAS G12V)
FVVHGLVGI

SEQ ID NO: 51925 - protein, 9 aa, synthetic construct
  source 1..9: note = Seed: LVVVGAVGV (KRAS G12V)
FVVHGLVGL

SEQ ID NO: 51926 - protein, 9 aa, synthetic construct
  source 1..9: note = Seed: LVVVGAVGV (KRAS G12V)
FVVHGLVGM

SEQ ID NO: 51927 - protein, 9 aa, synthetic construct
  source 1..9: note = Seed: LVVVGAVGV (KRAS G12V)
FVVHGLVGR

SEQ ID NO: 51928 - protein, 9 aa, synthetic construct
  source 1..9: note = Seed: LVVVGAVGV (KRAS G12V)
FVVHGLVGV

SEQ ID NO: 51929 - protein, 9 aa, synthetic construct
  source 1..9: note = Seed: LVVVGAVGV (KRAS G12V)
FVVHGMVGA

SEQ ID NO: 51930 - protein, 9 aa, synthetic construct
  source 1..9: note = Seed: LVVVGAVGV (KRAS G12V)
FVVHGMVGF

SEQ ID NO: 51931 - protein, 9 aa, synthetic construct
  source 1..9: note = Seed: LVVVGAVGV (KRAS G12V)
FVVHGMVGI

SEQ ID NO: 51932 - protein, 9 aa, synthetic construct
  source 1..9: note = Seed: LVVVGAVGV (KRAS G12V)
FVVHGMVGL

SEQ ID NO: 51933 - protein, 9 aa, synthetic construct
  source 1..9: note = Seed: LVVVGAVGV (KRAS G12V)
FVVHGMVGM

SEQ ID NO: 51934 - protein, 9 aa, synthetic construct
  source 1..9: note = Seed: LVVVGAVGV (KRAS G12V)
FVVHGMVGR

SEQ ID NO: 51935 - protein, 9 aa, synthetic construct
  source 1..9: note = Seed: LVVVGAVGV (KRAS G12V)
FVVHGMVGS

SEQ ID NO: 51936 - protein, 9 aa, synthetic construct
  source 1..9: note = Seed: LVVVGAVGV (KRAS G12V)
FVVHGMVGT

SEQ ID NO: 51937 - protein, 9 aa, synthetic construct
  source 1..9: note = Seed: LVVVGAVGV (KRAS G12V)
FVVHGMVGV

SEQ ID NO: 51938 - protein, 9 aa, synthetic construct
  source 1..9: note = Seed: LVVVGAVGV (KRAS G12V)
FVVHGMVGY

SEQ ID NO: 51939 - protein, 9 aa, synthetic construct
  source 1..9: note = Seed: LVVVGAVGV (KRAS G12V)
FVVHGNVGA

SEQ ID NO: 51940 - protein, 9 aa, synthetic construct
  source 1..9: note = Seed: LVVVGAVGV (KRAS G12V)
FVVHGNVGF

SEQ ID NO: 51941 - protein, 9 aa, synthetic construct
  source 1..9: note = Seed: LVVVGAVGV (KRAS G12V)
FVVHGNVGG

SEQ ID NO: 51942 - protein, 9 aa, synthetic construct
  source 1..9: note = Seed: LVVVGAVGV (KRAS G12V)
FVVHGNVGH

SEQ ID NO: 51943 - protein, 9 aa, synthetic construct
  source 1..9: note = Seed: LVVVGAVGV (KRAS G12V)
FVVHGNVGI

SEQ ID NO: 51944 - protein, 9 aa, synthetic construct
  source 1..9: note = Seed: LVVVGAVGV (KRAS G12V)
FVVHGNVGL

SEQ ID NO: 51945 - protein, 9 aa, synthetic construct
  source 1..9: note = Seed: LVVVGAVGV (KRAS G12V)
FVVHGNVGM

SEQ ID NO: 51946 - protein, 9 aa, synthetic construct
  source 1..9: note = Seed: LVVVGAVGV (KRAS G12V)
FVVHGNVGN

SEQ ID NO: 51947 - protein, 9 aa, synthetic construct
  source 1..9: note = Seed: LVVVGAVGV (KRAS G12V)
FVVHGNVGR

SEQ ID NO: 51948 - protein, 9 aa, synthetic construct
  source 1..9: note = Seed: LVVVGAVGV (KRAS G12V)
FVVHGNVGS

SEQ ID NO: 51949 - protein, 9 aa, synthetic construct
  source 1..9: note = Seed: LVVVGAVGV (KRAS G12V)
FVVHGNVGT

SEQ ID NO: 51950 - protein, 9 aa, synthetic construct
  source 1..9: note = Seed: LVVVGAVGV (KRAS G12V)
FVVHGNVGV

SEQ ID NO: 51951 - protein, 9 aa, synthetic construct
  source 1..9: note = Seed: LVVVGAVGV (KRAS G12V)
FVVHGNVGY

SEQ ID NO: 51952 - protein, 9 aa, synthetic construct
  source 1..9: note = Seed: LVVVGAVGV (KRAS G12V)
FVVHGPVGA

SEQ ID NO: 51953 - protein, 9 aa, synthetic construct
  source 1..9: note = Seed: LVVVGAVGV (KRAS G12V)
FVVHGPVGC

SEQ ID NO: 51954 - protein, 9 aa, synthetic construct
  source 1..9: note = Seed: LVVVGAVGV (KRAS G12V)
FVVHGPVGF

SEQ ID NO: 51955 - protein, 9 aa, synthetic construct
  source 1..9: note = Seed: LVVVGAVGV (KRAS G12V)
FVVHGPVGG

SEQ ID NO: 51956 - protein, 9 aa, synthetic construct
  source 1..9: note = Seed: LVVVGAVGV (KRAS G12V)
FVVHGPVGH

SEQ ID NO: 51957 - protein, 9 aa, synthetic construct
  source 1..9: note = Seed: LVVVGAVGV (KRAS G12V)
FVVHGPVGI

SEQ ID NO: 51958 - protein, 9 aa, synthetic construct
  source 1..9: note = Seed: LVVVGAVGV (KRAS G12V)
FVVHGPVGK

SEQ ID NO: 51959 - protein, 9 aa, synthetic construct
  source 1..9: note = Seed: LVVVGAVGV (KRAS G12V)
FVVHGPVGL

SEQ ID NO: 51960 - protein, 9 aa, synthetic construct
  source 1..9: note = Seed: LVVVGAVGV (KRAS G12V)
FVVHGPVGM

SEQ ID NO: 51961 - protein, 9 aa, synthetic construct
  source 1..9: note = Seed: LVVVGAVGV (KRAS G12V)
FVVHGPVGN

SEQ ID NO: 51962 - protein, 9 aa, synthetic construct
  source 1..9: note = Seed: LVVVGAVGV (KRAS G12V)
FVVHGPVGQ

SEQ ID NO: 51963 - protein, 9 aa, synthetic construct
  source 1..9: note = Seed: LVVVGAVGV (KRAS G12V)
FVVHGPVGR

SEQ ID NO: 51964 - protein, 9 aa, synthetic construct
  source 1..9: note = Seed: LVVVGAVGV (KRAS G12V)
FVVHGPVGS

SEQ ID NO: 51965 - protein, 9 aa, synthetic construct
  source 1..9: note = Seed: LVVVGAVGV (KRAS G12V)
FVVHGPVGT

SEQ ID NO: 51966 - protein, 9 aa, synthetic construct
  source 1..9: note = Seed: LVVVGAVGV (KRAS G12V)
FVVHGPVGV

SEQ ID NO: 51967 - protein, 9 aa, synthetic construct
  source 1..9: note = Seed: LVVVGAVGV (KRAS G12V)
FVVHGPVGW

SEQ ID NO: 51968 - protein, 9 aa, synthetic construct
  source 1..9: note = Seed: LVVVGAVGV (KRAS G12V)
FVVHGPVGY

SEQ ID NO: 51969 - protein, 9 aa, synthetic construct
  source 1..9: note = Seed: LVVVGAVGV (KRAS G12V)
FVVHGQVGA

SEQ ID NO: 51970 - protein, 9 aa, synthetic construct
  source 1..9: note = Seed: LVVVGAVGV (KRAS G12V)
FVVHGQVGI

SEQ ID NO: 51971 - protein, 9 aa, synthetic construct
  source 1..9: note = Seed: LVVVGAVGV (KRAS G12V)
FVVHGQVGL

SEQ ID NO: 51972 - protein, 9 aa, synthetic construct
  source 1..9: note = Seed: LVVVGAVGV (KRAS G12V)
FVVHGQVGM

SEQ ID NO: 51973 - protein, 9 aa, synthetic construct
  source 1..9: note = Seed: LVVVGAVGV (KRAS G12V)
FVVHGQVGV

SEQ ID NO: 51974 - protein, 9 aa, synthetic construct
  source 1..9: note = Seed: LVVVGAVGV (KRAS G12V)
FVVHGRVGA

SEQ ID NO: 51975 - protein, 9 aa, synthetic construct
  source 1..9: note = Seed: LVVVGAVGV (KRAS G12V)
FVVHGRVGF

SEQ ID NO: 51976 - protein, 9 aa, synthetic construct
  source 1..9: note = Seed: LVVVGAVGV (KRAS G12V)
FVVHGRVGG

SEQ ID NO: 51977 - protein, 9 aa, synthetic construct
  source 1..9: note = Seed: LVVVGAVGV (KRAS G12V)
FVVHGRVGH

SEQ ID NO: 51978 - protein, 9 aa, synthetic construct
  source 1..9: note = Seed: LVVVGAVGV (KRAS G12V)
FVVHGRVGK

SEQ ID NO: 51979 - protein, 9 aa, synthetic construct
  source 1..9: note = Seed: LVVVGAVGV (KRAS G12V)
FVVHGRVGL

SEQ ID NO: 51980 - protein, 9 aa, synthetic construct
  source 1..9: note = Seed: LVVVGAVGV (KRAS G12V)
FVVHGRVGM

SEQ ID NO: 51981 - protein, 9 aa, synthetic construct
  source 1..9: note = Seed: LVVVGAVGV (KRAS G12V)
FVVHGRVGN

SEQ ID NO: 51982 - protein, 9 aa, synthetic construct
  source 1..9: note = Seed: LVVVGAVGV (KRAS G12V)
FVVHGRVGQ

SEQ ID NO: 51983 - protein, 9 aa, synthetic construct
  source 1..9: note = Seed: LVVVGAVGV (KRAS G12V)
FVVHGRVGR

SEQ ID NO: 51984 - protein, 9 aa, synthetic construct
  source 1..9: note = Seed: LVVVGAVGV (KRAS G12V)
FVVHGRVGS

SEQ ID NO: 51985 - protein, 9 aa, synthetic construct
  source 1..9: note = Seed: LVVVGAVGV (KRAS G12V)
FVVHGRVGT

SEQ ID NO: 51986 - protein, 9 aa, synthetic construct
  source 1..9: note = Seed: LVVVGAVGV (KRAS G12V)
FVVHGRVGV

SEQ ID NO: 51987 - protein, 9 aa, synthetic construct
  source 1..9: note = Seed: LVVVGAVGV (KRAS G12V)
FVVHGRVGY

SEQ ID NO: 51988 - protein, 9 aa, synthetic construct
  source 1..9: note = Seed: LVVVGAVGV (KRAS G12V)
FVVHGSVGA

SEQ ID NO: 51989 - protein, 9 aa, synthetic construct
  source 1..9: note = Seed: LVVVGAVGV (KRAS G12V)
FVVHGSVGC

SEQ ID NO: 51990 - protein, 9 aa, synthetic construct
  source 1..9: note = Seed: LVVVGAVGV (KRAS G12V)
FVVHGSVGF

SEQ ID NO: 51991 - protein, 9 aa, synthetic construct
  source 1..9: note = Seed: LVVVGAVGV (KRAS G12V)
FVVHGSVGG

SEQ ID NO: 51992 - protein, 9 aa, synthetic construct
  source 1..9: note = Seed: LVVVGAVGV (KRAS G12V)
FVVHGSVGH

SEQ ID NO: 51993 - protein, 9 aa, synthetic construct
  source 1..9: note = Seed: LVVVGAVGV (KRAS G12V)
FVVHGSVGI

SEQ ID NO: 51994 - protein, 9 aa, synthetic construct
  source 1..9: note = Seed: LVVVGAVGV (KRAS G12V)
FVVHGSVGK

SEQ ID NO: 51995 - protein, 9 aa, synthetic construct
  source 1..9: note = Seed: LVVVGAVGV (KRAS G12V)
FVVHGSVGL

SEQ ID NO: 51996 - protein, 9 aa, synthetic construct
  source 1..9: note = Seed: LVVVGAVGV (KRAS G12V)
FVVHGSVGM

SEQ ID NO: 51997 - protein, 9 aa, synthetic construct
  source 1..9: note = Seed: LVVVGAVGV (KRAS G12V)
FVVHGSVGN

SEQ ID NO: 51998 - protein, 9 aa, synthetic construct
  source 1..9: note = Seed: LVVVGAVGV (KRAS G12V)
FVVHGSVGQ

SEQ ID NO: 51999 - protein, 9 aa, synthetic construct
  source 1..9: note = Seed: LVVVGAVGV (KRAS G12V)
FVVHGSVGR

SEQ ID NO: 52000 - protein, 9 aa, synthetic construct
  source 1..9: note = Seed: LVVVGAVGV (KRAS G12V)
FVVHGSVGS

SEQ ID NO: 52001 - protein, 9 aa, synthetic construct
  source 1..9: note = Seed: LVVVGAVGV (KRAS G12V)
FVVHGSVGT

SEQ ID NO: 52002 - protein, 9 aa, synthetic construct
  source 1..9: note = Seed: LVVVGAVGV (KRAS G12V)
FVVHGSVGV

SEQ ID NO: 52003 - protein, 9 aa, synthetic construct
  source 1..9: note = Seed: LVVVGAVGV (KRAS G12V)
FVVHGSVGW

SEQ ID NO: 52004 - protein, 9 aa, synthetic construct
  source 1..9: note = Seed: LVVVGAVGV (KRAS G12V)
FVVHGSVGY

SEQ ID NO: 52005 - protein, 9 aa, synthetic construct
  source 1..9: note = Seed: LVVVGAVGV (KRAS G12V)
FVVHGTVGA

SEQ ID NO: 52006 - protein, 9 aa, synthetic construct
  source 1..9: note = Seed: LVVVGAVGV (KRAS G12V)
FVVHGTVGF

SEQ ID NO: 52007 - protein, 9 aa, synthetic construct
  source 1..9: note = Seed: LVVVGAVGV (KRAS G12V)
FVVHGTVGG

SEQ ID NO: 52008 - protein, 9 aa, synthetic construct
  source 1..9: note = Seed: LVVVGAVGV (KRAS G12V)
FVVHGTVGH

SEQ ID NO: 52009 - protein, 9 aa, synthetic construct
  source 1..9: note = Seed: LVVVGAVGV (KRAS G12V)
FVVHGTVGI

SEQ ID NO: 52010 - protein, 9 aa, synthetic construct
  source 1..9: note = Seed: LVVVGAVGV (KRAS G12V)
FVVHGTVGL

SEQ ID NO: 52011 - protein, 9 aa, synthetic construct
  source 1..9: note = Seed: LVVVGAVGV (KRAS G12V)
FVVHGTVGM

SEQ ID NO: 52012 - protein, 9 aa, synthetic construct
  source 1..9: note = Seed: LVVVGAVGV (KRAS G12V)
FVVHGTVGN

SEQ ID NO: 52013 - protein, 9 aa, synthetic construct
  source 1..9: note = Seed: LVVVGAVGV (KRAS G12V)
FVVHGTVGR

SEQ ID NO: 52014 - protein, 9 aa, synthetic construct
  source 1..9: note = Seed: LVVVGAVGV (KRAS G12V)
FVVHGTVGS

SEQ ID NO: 52015 - protein, 9 aa, synthetic construct
  source 1..9: note = Seed: LVVVGAVGV (KRAS G12V)
FVVHGTVGT

SEQ ID NO: 52016 - protein, 9 aa, synthetic construct
  source 1..9: note = Seed: LVVVGAVGV (KRAS G12V)
FVVHGTVGV

SEQ ID NO: 52017 - protein, 9 aa, synthetic construct
  source 1..9: note = Seed: LVVVGAVGV (KRAS G12V)
FVVHGTVGY

SEQ ID NO: 52018 - protein, 9 aa, synthetic construct
  source 1..9: note = Seed: LVVVGAVGV (KRAS G12V)
FVVHGVVGA

SEQ ID NO: 52019 - protein, 9 aa, synthetic construct
  source 1..9: note = Seed: LVVVGAVGV (KRAS G12V)
FVVHGVVGF

SEQ ID NO: 52020 - protein, 9 aa, synthetic construct
  source 1..9: note = Seed: LVVVGAVGV (KRAS G12V)
FVVHGVVGG

SEQ ID NO: 52021 - protein, 9 aa, synthetic construct
  source 1..9: note = Seed: LVVVGAVGV (KRAS G12V)
FVVHGVVGH

SEQ ID NO: 52022 - protein, 9 aa, synthetic construct
  source 1..9: note = Seed: LVVVGAVGV (KRAS G12V)
FVVHGVVGI

SEQ ID NO: 52023 - protein, 9 aa, synthetic construct
  source 1..9: note = Seed: LVVVGAVGV (KRAS G12V)
FVVHGVVGK

SEQ ID NO: 52024 - protein, 9 aa, synthetic construct
  source 1..9: note = Seed: LVVVGAVGV (KRAS G12V)
FVVHGVVGL

SEQ ID NO: 52025 - protein, 9 aa, synthetic construct
  source 1..9: note = Seed: LVVVGAVGV (KRAS G12V)
FVVHGVVGM

SEQ ID NO: 52026 - protein, 9 aa, synthetic construct
  source 1..9: note = Seed: LVVVGAVGV (KRAS G12V)
FVVHGVVGN

SEQ ID NO: 52027 - protein, 9 aa, synthetic construct
  source 1..9: note = Seed: LVVVGAVGV (KRAS G12V)
FVVHGVVGR

SEQ ID NO: 52028 - protein, 9 aa, synthetic construct
  source 1..9: note = Seed: LVVVGAVGV (KRAS G12V)
FVVHGVVGS

SEQ ID NO: 52029 - protein, 9 aa, synthetic construct
  source 1..9: note = Seed: LVVVGAVGV (KRAS G12V)
FVVHGVVGT

SEQ ID NO: 52030 - protein, 9 aa, synthetic construct
  source 1..9: note = Seed: LVVVGAVGV (KRAS G12V)
FVVHGVVGV

SEQ ID NO: 52031 - protein, 9 aa, synthetic construct
  source 1..9: note = Seed: LVVVGAVGV (KRAS G12V)
FVVHGVVGY

SEQ ID NO: 52032 - protein, 9 aa, synthetic construct
  source 1..9: note = Seed: LVVVGAVGV (KRAS G12V)
FVVHGWVGI

SEQ ID NO: 52033 - protein, 9 aa, synthetic construct
  source 1..9: note = Seed: LVVVGAVGV (KRAS G12V)
FVVHGWVGL

SEQ ID NO: 52034 - protein, 9 aa, synthetic construct
  source 1..9: note = Seed: LVVVGAVGV (KRAS G12V)
FVVHGWVGV

SEQ ID NO: 52035 - protein, 9 aa, synthetic construct
  source 1..9: note = Seed: LVVVGAVGV (KRAS G12V)
FVVHGYVGF

SEQ ID NO: 52036 - protein, 9 aa, synthetic construct
  source 1..9: note = Seed: LVVVGAVGV (KRAS G12V)
FVVHGYVGI

SEQ ID NO: 52037 - protein, 9 aa, synthetic construct
  source 1..9: note = Seed: LVVVGAVGV (KRAS G12V)
FVVHGYVGL

SEQ ID NO: 52038 - protein, 9 aa, synthetic construct
  source 1..9: note = Seed: LVVVGAVGV (KRAS G12V)
FVVHGYVGM

SEQ ID NO: 52039 - protein, 9 aa, synthetic construct
  source 1..9: note = Seed: LVVVGAVGV (KRAS G12V)
FVVHGYVGV

SEQ ID NO: 52040 - protein, 9 aa, synthetic construct
  source 1..9: note = Seed: LVVVGAVGV (KRAS G12V)
FVVIGAVGA

SEQ ID NO: 52041 - protein, 9 aa, synthetic construct
  source 1..9: note = Seed: LVVVGAVGV (KRAS G12V)
FVVIGAVGC

SEQ ID NO: 52042 - protein, 9 aa, synthetic construct
  source 1..9: note = Seed: LVVVGAVGV (KRAS G12V)
FVVIGAVGD

SEQ ID NO: 52043 - protein, 9 aa, synthetic construct
  source 1..9: note = Seed: LVVVGAVGV (KRAS G12V)
FVVIGAVGE

SEQ ID NO: 52044 - protein, 9 aa, synthetic construct
  source 1..9: note = Seed: LVVVGAVGV (KRAS G12V)
FVVIGAVGF

SEQ ID NO: 52045 - protein, 9 aa, synthetic construct
  source 1..9: note = Seed: LVVVGAVGV (KRAS G12V)
FVVIGAVGG

SEQ ID NO: 52046 - protein, 9 aa, synthetic construct
  source 1..9: note = Seed: LVVVGAVGV (KRAS G12V)
FVVIGAVGH

SEQ ID NO: 52047 - protein, 9 aa, synthetic construct
  source 1..9: note = Seed: LVVVGAVGV (KRAS G12V)
FVVIGAVGI

SEQ ID NO: 52048 - protein, 9 aa, synthetic construct
  source 1..9: note = Seed: LVVVGAVGV (KRAS G12V)
FVVIGAVGK

SEQ ID NO: 52049 - protein, 9 aa, synthetic construct
  source 1..9: note = Seed: LVVVGAVGV (KRAS G12V)
FVVIGAVGL

SEQ ID NO: 52050 - protein, 9 aa, synthetic construct
  source 1..9: note = Seed: LVVVGAVGV (KRAS G12V)
FVVIGAVGM

SEQ ID NO: 52051 - protein, 9 aa, synthetic construct
  source 1..9: note = Seed: LVVVGAVGV (KRAS G12V)
FVVIGAVGN

SEQ ID NO: 52052 - protein, 9 aa, synthetic construct
  source 1..9: note = Seed: LVVVGAVGV (KRAS G12V)
FVVIGAVGP

SEQ ID NO: 52053 - protein, 9 aa, synthetic construct
  source 1..9: note = Seed: LVVVGAVGV (KRAS G12V)
FVVIGAVGQ

SEQ ID NO: 52054 - protein, 9 aa, synthetic construct
  source 1..9: note = Seed: LVVVGAVGV (KRAS G12V)
FVVIGAVGR

SEQ ID NO: 52055 - protein, 9 aa, synthetic construct
  source 1..9: note = Seed: LVVVGAVGV (KRAS G12V)
FVVIGAVGS

SEQ ID NO: 52056 - protein, 9 aa, synthetic construct
  source 1..9: note = Seed: LVVVGAVGV (KRAS G12V)
FVVIGAVGT

SEQ ID NO: 52057 - protein, 9 aa, synthetic construct
  source 1..9: note = Seed: LVVVGAVGV (KRAS G12V)
FVVIGAVGV

SEQ ID NO: 52058 - protein, 9 aa, synthetic construct
  source 1..9: note = Seed: LVVVGAVGV (KRAS G12V)
FVVIGAVGW

SEQ ID NO: 52059 - protein, 9 aa, synthetic construct
  source 1..9: note = Seed: LVVVGAVGV (KRAS G12V)
FVVIGAVGY

SEQ ID NO: 52060 - protein, 9 aa, synthetic construct
  source 1..9: note = Seed: LVVVGAVGV (KRAS G12V)
FVVIGCVGA

SEQ ID NO: 52061 - protein, 9 aa, synthetic construct
  source 1..9: note = Seed: LVVVGAVGV (KRAS G12V)
FVVIGCVGH

SEQ ID NO: 52062 - protein, 9 aa, synthetic construct
  source 1..9: note = Seed: LVVVGAVGV (KRAS G12V)
FVVIGCVGI

SEQ ID NO: 52063 - protein, 9 aa, synthetic construct
  source 1..9: note = Seed: LVVVGAVGV (KRAS G12V)
FVVIGCVGL

SEQ ID NO: 52064 - protein, 9 aa, synthetic construct
  source 1..9: note = Seed: LVVVGAVGV (KRAS G12V)
FVVIGCVGN

SEQ ID NO: 52065 - protein, 9 aa, synthetic construct
  source 1..9: note = Seed: LVVVGAVGV (KRAS G12V)
FVVIGCVGS

SEQ ID NO: 52066 - protein, 9 aa, synthetic construct
  source 1..9: note = Seed: LVVVGAVGV (KRAS G12V)
FVVIGCVGT

SEQ ID NO: 52067 - protein, 9 aa, synthetic construct
  source 1..9: note = Seed: LVVVGAVGV (KRAS G12V)
FVVIGCVGV

SEQ ID NO: 52068 - protein, 9 aa, synthetic construct
  source 1..9: note = Seed: LVVVGAVGV (KRAS G12V)
FVVIGDVGA

SEQ ID NO: 52069 - protein, 9 aa, synthetic construct
  source 1..9: note = Seed: LVVVGAVGV (KRAS G12V)
FVVIGDVGD

SEQ ID NO: 52070 - protein, 9 aa, synthetic construct
  source 1..9: note = Seed: LVVVGAVGV (KRAS G12V)
FVVIGDVGE

SEQ ID NO: 52071 - protein, 9 aa, synthetic construct
  source 1..9: note = Seed: LVVVGAVGV (KRAS G12V)
FVVIGDVGF

SEQ ID NO: 52072 - protein, 9 aa, synthetic construct
  source 1..9: note = Seed: LVVVGAVGV (KRAS G12V)
FVVIGDVGG

SEQ ID NO: 52073 - protein, 9 aa, synthetic construct
  source 1..9: note = Seed: LVVVGAVGV (KRAS G12V)
FVVIGDVGH

SEQ ID NO: 52074 - protein, 9 aa, synthetic construct
  source 1..9: note = Seed: LVVVGAVGV (KRAS G12V)
FVVIGDVGI

SEQ ID NO: 52075 - protein, 9 aa, synthetic construct
  source 1..9: note = Seed: LVVVGAVGV (KRAS G12V)
FVVIGDVGL

SEQ ID NO: 52076 - protein, 9 aa, synthetic construct
  source 1..9: note = Seed: LVVVGAVGV (KRAS G12V)
FVVIGDVGM

SEQ ID NO: 52077 - protein, 9 aa, synthetic construct
  source 1..9: note = Seed: LVVVGAVGV (KRAS G12V)
FVVIGDVGN

SEQ ID NO: 52078 - protein, 9 aa, synthetic construct
  source 1..9: note = Seed: LVVVGAVGV (KRAS G12V)
FVVIGDVGP

SEQ ID NO: 52079 - protein, 9 aa, synthetic construct
  source 1..9: note = Seed: LVVVGAVGV (KRAS G12V)
FVVIGDVGQ

SEQ ID NO: 52080 - protein, 9 aa, synthetic construct
  source 1..9: note = Seed: LVVVGAVGV (KRAS G12V)
FVVIGDVGS

SEQ ID NO: 52081 - protein, 9 aa, synthetic construct
  source 1..9: note = Seed: LVVVGAVGV (KRAS G12V)
FVVIGDVGT

SEQ ID NO: 52082 - protein, 9 aa, synthetic construct
  source 1..9: note = Seed: LVVVGAVGV (KRAS G12V)
FVVIGDVGV

SEQ ID NO: 52083 - protein, 9 aa, synthetic construct
  source 1..9: note = Seed: LVVVGAVGV (KRAS G12V)
FVVIGEVGA

SEQ ID NO: 52084 - protein, 9 aa, synthetic construct
  source 1..9: note = Seed: LVVVGAVGV (KRAS G12V)
FVVIGEVGG

SEQ ID NO: 52085 - protein, 9 aa, synthetic construct
  source 1..9: note = Seed: LVVVGAVGV (KRAS G12V)
FVVIGEVGH

SEQ ID NO: 52086 - protein, 9 aa, synthetic construct
  source 1..9: note = Seed: LVVVGAVGV (KRAS G12V)
FVVIGEVGI

SEQ ID NO: 52087 - protein, 9 aa, synthetic construct
  source 1..9: note = Seed: LVVVGAVGV (KRAS G12V)
FVVIGEVGK

SEQ ID NO: 52088 - protein, 9 aa, synthetic construct
  source 1..9: note = Seed: LVVVGAVGV (KRAS G12V)
FVVIGEVGL

SEQ ID NO: 52089 - protein, 9 aa, synthetic construct
  source 1..9: note = Seed: LVVVGAVGV (KRAS G12V)
FVVIGEVGM

SEQ ID NO: 52090 - protein, 9 aa, synthetic construct
  source 1..9: note = Seed: LVVVGAVGV (KRAS G12V)
FVVIGEVGN

SEQ ID NO: 52091 - protein, 9 aa, synthetic construct
  source 1..9: note = Seed: LVVVGAVGV (KRAS G12V)
FVVIGEVGQ

SEQ ID NO: 52092 - protein, 9 aa, synthetic construct
  source 1..9: note = Seed: LVVVGAVGV (KRAS G12V)
FVVIGEVGR

SEQ ID NO: 52093 - protein, 9 aa, synthetic construct
  source 1..9: note = Seed: LVVVGAVGV (KRAS G12V)
FVVIGEVGS

SEQ ID NO: 52094 - protein, 9 aa, synthetic construct
  source 1..9: note = Seed: LVVVGAVGV (KRAS G12V)
FVVIGEVGT

SEQ ID NO: 52095 - protein, 9 aa, synthetic construct
  source 1..9: note = Seed: LVVVGAVGV (KRAS G12V)
FVVIGEVGV

SEQ ID NO: 52096 - protein, 9 aa, synthetic construct
  source 1..9: note = Seed: LVVVGAVGV (KRAS G12V)
FVVIGFVGA

SEQ ID NO: 52097 - protein, 9 aa, synthetic construct
  source 1..9: note = Seed: LVVVGAVGV (KRAS G12V)
FVVIGFVGD

SEQ ID NO: 52098 - protein, 9 aa, synthetic construct
  source 1..9: note = Seed: LVVVGAVGV (KRAS G12V)
FVVIGFVGE

SEQ ID NO: 52099 - protein, 9 aa, synthetic construct
  source 1..9: note = Seed: LVVVGAVGV (KRAS G12V)
FVVIGFVGN

SEQ ID NO: 52100 - protein, 9 aa, synthetic construct
  source 1..9: note = Seed: LVVVGAVGV (KRAS G12V)
FVVIGGVGC

SEQ ID NO: 52101 - protein, 9 aa, synthetic construct
  source 1..9: note = Seed: LVVVGAVGV (KRAS G12V)
FVVIGGVGD

SEQ ID NO: 52102 - protein, 9 aa, synthetic construct
  source 1..9: note = Seed: LVVVGAVGV (KRAS G12V)
FVVIGGVGE

SEQ ID NO: 52103 - protein, 9 aa, synthetic construct
  source 1..9: note = Seed: LVVVGAVGV (KRAS G12V)
FVVIGGVGF

SEQ ID NO: 52104 - protein, 9 aa, synthetic construct
  source 1..9: note = Seed: LVVVGAVGV (KRAS G12V)
FVVIGGVGG

SEQ ID NO: 52105 - protein, 9 aa, synthetic construct
  source 1..9: note = Seed: LVVVGAVGV (KRAS G12V)
FVVIGGVGH

SEQ ID NO: 52106 - protein, 9 aa, synthetic construct
  source 1..9: note = Seed: LVVVGAVGV (KRAS G12V)
FVVIGGVGI

SEQ ID NO: 52107 - protein, 9 aa, synthetic construct
  source 1..9: note = Seed: LVVVGAVGV (KRAS G12V)
FVVIGGVGK

SEQ ID NO: 52108 - protein, 9 aa, synthetic construct
  source 1..9: note = Seed: LVVVGAVGV (KRAS G12V)
FVVIGGVGL

SEQ ID NO: 52109 - protein, 9 aa, synthetic construct
  source 1..9: note = Seed: LVVVGAVGV (KRAS G12V)
FVVIGGVGM

SEQ ID NO: 52110 - protein, 9 aa, synthetic construct
  source 1..9: note = Seed: LVVVGAVGV (KRAS G12V)
FVVIGGVGN

SEQ ID NO: 52111 - protein, 9 aa, synthetic construct
  source 1..9: note = Seed: LVVVGAVGV (KRAS G12V)
FVVIGGVGP

SEQ ID NO: 52112 - protein, 9 aa, synthetic construct
  source 1..9: note = Seed: LVVVGAVGV (KRAS G12V)
FVVIGGVGQ

SEQ ID NO: 52113 - protein, 9 aa, synthetic construct
  source 1..9: note = Seed: LVVVGAVGV (KRAS G12V)
FVVIGGVGR

SEQ ID NO: 52114 - protein, 9 aa, synthetic construct
  source 1..9: note = Seed: LVVVGAVGV (KRAS G12V)
FVVIGGVGS

SEQ ID NO: 52115 - protein, 9 aa, synthetic construct
  source 1..9: note = Seed: LVVVGAVGV (KRAS G12V)
FVVIGGVGT

SEQ ID NO: 52116 - protein, 9 aa, synthetic construct
  source 1..9: note = Seed: LVVVGAVGV (KRAS G12V)
FVVIGGVGV

SEQ ID NO: 52117 - protein, 9 aa, synthetic construct
  source 1..9: note = Seed: LVVVGAVGV (KRAS G12V)
FVVIGGVGW

SEQ ID NO: 52118 - protein, 9 aa, synthetic construct
  source 1..9: note = Seed: LVVVGAVGV (KRAS G12V)
FVVIGGVGY

SEQ ID NO: 52119 - protein, 9 aa, synthetic construct
  source 1..9: note = Seed: LVVVGAVGV (KRAS G12V)
FVVIGHVGA

SEQ ID NO: 52120 - protein, 9 aa, synthetic construct
  source 1..9: note = Seed: LVVVGAVGV (KRAS G12V)
FVVIGHVGC

SEQ ID NO: 52121 - protein, 9 aa, synthetic construct
  source 1..9: note = Seed: LVVVGAVGV (KRAS G12V)
FVVIGHVGD

SEQ ID NO: 52122 - protein, 9 aa, synthetic construct
  source 1..9: note = Seed: LVVVGAVGV (KRAS G12V)
FVVIGHVGE

SEQ ID NO: 52123 - protein, 9 aa, synthetic construct
  source 1..9: note = Seed: LVVVGAVGV (KRAS G12V)
FVVIGHVGF

SEQ ID NO: 52124 - protein, 9 aa, synthetic construct
  source 1..9: note = Seed: LVVVGAVGV (KRAS G12V)
FVVIGHVGG

SEQ ID NO: 52125 - protein, 9 aa, synthetic construct
  source 1..9: note = Seed: LVVVGAVGV (KRAS G12V)
FVVIGHVGH

SEQ ID NO: 52126 - protein, 9 aa, synthetic construct
  source 1..9: note = Seed: LVVVGAVGV (KRAS G12V)
FVVIGHVGI

SEQ ID NO: 52127 - protein, 9 aa, synthetic construct
  source 1..9: note = Seed: LVVVGAVGV (KRAS G12V)
FVVIGHVGK

SEQ ID NO: 52128 - protein, 9 aa, synthetic construct
  source 1..9: note = Seed: LVVVGAVGV (KRAS G12V)
FVVIGHVGL

SEQ ID NO: 52129 - protein, 9 aa, synthetic construct
  source 1..9: note = Seed: LVVVGAVGV (KRAS G12V)
FVVIGHVGM

SEQ ID NO: 52130 - protein, 9 aa, synthetic construct
  source 1..9: note = Seed: LVVVGAVGV (KRAS G12V)
FVVIGHVGN

SEQ ID NO: 52131 - protein, 9 aa, synthetic construct
  source 1..9: note = Seed: LVVVGAVGV (KRAS G12V)
FVVIGHVGP

SEQ ID NO: 52132 - protein, 9 aa, synthetic construct
  source 1..9: note = Seed: LVVVGAVGV (KRAS G12V)
FVVIGHVGQ

SEQ ID NO: 52133 - protein, 9 aa, synthetic construct
  source 1..9: note = Seed: LVVVGAVGV (KRAS G12V)
FVVIGHVGR

SEQ ID NO: 52134 - protein, 9 aa, synthetic construct
  source 1..9: note = Seed: LVVVGAVGV (KRAS G12V)
FVVIGHVGS

SEQ ID NO: 52135 - protein, 9 aa, synthetic construct
  source 1..9: note = Seed: LVVVGAVGV (KRAS G12V)
FVVIGHVGT

SEQ ID NO: 52136 - protein, 9 aa, synthetic construct
  source 1..9: note = Seed: LVVVGAVGV (KRAS G12V)
FVVIGHVGV

SEQ ID NO: 52137 - protein, 9 aa, synthetic construct
  source 1..9: note = Seed: LVVVGAVGV (KRAS G12V)
FVVIGHVGY

SEQ ID NO: 52138 - protein, 9 aa, synthetic construct
  source 1..9: note = Seed: LVVVGAVGV (KRAS G12V)
FVVIGIVGA

SEQ ID NO: 52139 - protein, 9 aa, synthetic construct
  source 1..9: note = Seed: LVVVGAVGV (KRAS G12V)
FVVIGIVGD

SEQ ID NO: 52140 - protein, 9 aa, synthetic construct
  source 1..9: note = Seed: LVVVGAVGV (KRAS G12V)
FVVIGIVGE

SEQ ID NO: 52141 - protein, 9 aa, synthetic construct
  source 1..9: note = Seed: LVVVGAVGV (KRAS G12V)
FVVIGIVGG

SEQ ID NO: 52142 - protein, 9 aa, synthetic construct
  source 1..9: note = Seed: LVVVGAVGV (KRAS G12V)
FVVIGIVGH

SEQ ID NO: 52143 - protein, 9 aa, synthetic construct
  source 1..9: note = Seed: LVVVGAVGV (KRAS G12V)
FVVIGIVGI

SEQ ID NO: 52144 - protein, 9 aa, synthetic construct
  source 1..9: note = Seed: LVVVGAVGV (KRAS G12V)
FVVIGIVGK

SEQ ID NO: 52145 - protein, 9 aa, synthetic construct
  source 1..9: note = Seed: LVVVGAVGV (KRAS G12V)
FVVIGIVGL

SEQ ID NO: 52146 - protein, 9 aa, synthetic construct
  source 1..9: note = Seed: LVVVGAVGV (KRAS G12V)
FVVIGIVGM

SEQ ID NO: 52147 - protein, 9 aa, synthetic construct
  source 1..9: note = Seed: LVVVGAVGV (KRAS G12V)
FVVIGIVGN

SEQ ID NO: 52148 - protein, 9 aa, synthetic construct
  source 1..9: note = Seed: LVVVGAVGV (KRAS G12V)
FVVIGIVGP

SEQ ID NO: 52149 - protein, 9 aa, synthetic construct
  source 1..9: note = Seed: LVVVGAVGV (KRAS G12V)
FVVIGIVGQ

SEQ ID NO: 52150 - protein, 9 aa, synthetic construct
  source 1..9: note = Seed: LVVVGAVGV (KRAS G12V)
FVVIGIVGR

SEQ ID NO: 52151 - protein, 9 aa, synthetic construct
  source 1..9: note = Seed: LVVVGAVGV (KRAS G12V)
FVVIGIVGS

SEQ ID NO: 52152 - protein, 9 aa, synthetic construct
  source 1..9: note = Seed: LVVVGAVGV (KRAS G12V)
FVVIGIVGT

SEQ ID NO: 52153 - protein, 9 aa, synthetic construct
  source 1..9: note = Seed: LVVVGAVGV (KRAS G12V)
FVVIGIVGV

SEQ ID NO: 52154 - protein, 9 aa, synthetic construct
  source 1..9: note = Seed: LVVVGAVGV (KRAS G12V)
FVVIGIVGY

SEQ ID NO: 52155 - protein, 9 aa, synthetic construct
  source 1..9: note = Seed: LVVVGAVGV (KRAS G12V)
FVVIGKVGA

SEQ ID NO: 52156 - protein, 9 aa, synthetic construct
  source 1..9: note = Seed: LVVVGAVGV (KRAS G12V)
FVVIGKVGD

SEQ ID NO: 52157 - protein, 9 aa, synthetic construct
  source 1..9: note = Seed: LVVVGAVGV (KRAS G12V)
FVVIGKVGE

SEQ ID NO: 52158 - protein, 9 aa, synthetic construct
  source 1..9: note = Seed: LVVVGAVGV (KRAS G12V)
FVVIGKVGF

SEQ ID NO: 52159 - protein, 9 aa, synthetic construct
  source 1..9: note = Seed: LVVVGAVGV (KRAS G12V)
FVVIGKVGG

SEQ ID NO: 52160 - protein, 9 aa, synthetic construct
  source 1..9: note = Seed: LVVVGAVGV (KRAS G12V)
FVVIGKVGH

SEQ ID NO: 52161 - protein, 9 aa, synthetic construct
  source 1..9: note = Seed: LVVVGAVGV (KRAS G12V)
FVVIGKVGI

SEQ ID NO: 52162 - protein, 9 aa, synthetic construct
  source 1..9: note = Seed: LVVVGAVGV (KRAS G12V)
FVVIGKVGK

SEQ ID NO: 52163 - protein, 9 aa, synthetic construct
  source 1..9: note = Seed: LVVVGAVGV (KRAS G12V)
FVVIGKVGL

SEQ ID NO: 52164 - protein, 9 aa, synthetic construct
  source 1..9: note = Seed: LVVVGAVGV (KRAS G12V)
FVVIGKVGM

SEQ ID NO: 52165 - protein, 9 aa, synthetic construct
  source 1..9: note = Seed: LVVVGAVGV (KRAS G12V)
FVVIGKVGN

SEQ ID NO: 52166 - protein, 9 aa, synthetic construct
  source 1..9: note = Seed: LVVVGAVGV (KRAS G12V)
FVVIGKVGP

SEQ ID NO: 52167 - protein, 9 aa, synthetic construct
  source 1..9: note = Seed: LVVVGAVGV (KRAS G12V)
FVVIGKVGQ

SEQ ID NO: 52168 - protein, 9 aa, synthetic construct
  source 1..9: note = Seed: LVVVGAVGV (KRAS G12V)
FVVIGKVGR

SEQ ID NO: 52169 - protein, 9 aa, synthetic construct
  source 1..9: note = Seed: LVVVGAVGV (KRAS G12V)
FVVIGKVGS

SEQ ID NO: 52170 - protein, 9 aa, synthetic construct
  source 1..9: note = Seed: LVVVGAVGV (KRAS G12V)
FVVIGKVGT

SEQ ID NO: 52171 - protein, 9 aa, synthetic construct
  source 1..9: note = Seed: LVVVGAVGV (KRAS G12V)
FVVIGKVGV

SEQ ID NO: 52172 - protein, 9 aa, synthetic construct
  source 1..9: note = Seed: LVVVGAVGV (KRAS G12V)
FVVIGKVGY

SEQ ID NO: 52173 - protein, 9 aa, synthetic construct
  source 1..9: note = Seed: LVVVGAVGV (KRAS G12V)
FVVIGLVGA

SEQ ID NO: 52174 - protein, 9 aa, synthetic construct
  source 1..9: note = Seed: LVVVGAVGV (KRAS G12V)
FVVIGLVGD

SEQ ID NO: 52175 - protein, 9 aa, synthetic construct
  source 1..9: note = Seed: LVVVGAVGV (KRAS G12V)
FVVIGLVGE

SEQ ID NO: 52176 - protein, 9 aa, synthetic construct
  source 1..9: note = Seed: LVVVGAVGV (KRAS G12V)
FVVIGLVGG

SEQ ID NO: 52177 - protein, 9 aa, synthetic construct
  source 1..9: note = Seed: LVVVGAVGV (KRAS G12V)
FVVIGLVGH

SEQ ID NO: 52178 - protein, 9 aa, synthetic construct
  source 1..9: note = Seed: LVVVGAVGV (KRAS G12V)
FVVIGLVGI

SEQ ID NO: 52179 - protein, 9 aa, synthetic construct
  source 1..9: note = Seed: LVVVGAVGV (KRAS G12V)
FVVIGLVGK

SEQ ID NO: 52180 - protein, 9 aa, synthetic construct
  source 1..9: note = Seed: LVVVGAVGV (KRAS G12V)
FVVIGLVGL

SEQ ID NO: 52181 - protein, 9 aa, synthetic construct
  source 1..9: note = Seed: LVVVGAVGV (KRAS G12V)
FVVIGLVGM

SEQ ID NO: 52182 - protein, 9 aa, synthetic construct
  source 1..9: note = Seed: LVVVGAVGV (KRAS G12V)
FVVIGLVGN

SEQ ID NO: 52183 - protein, 9 aa, synthetic construct
  source 1..9: note = Seed: LVVVGAVGV (KRAS G12V)
FVVIGLVGP

SEQ ID NO: 52184 - protein, 9 aa, synthetic construct
  source 1..9: note = Seed: LVVVGAVGV (KRAS G12V)
FVVIGLVGQ

SEQ ID NO: 52185 - protein, 9 aa, synthetic construct
  source 1..9: note = Seed: LVVVGAVGV (KRAS G12V)
FVVIGLVGR

SEQ ID NO: 52186 - protein, 9 aa, synthetic construct
  source 1..9: note = Seed: LVVVGAVGV (KRAS G12V)
FVVIGLVGS

SEQ ID NO: 52187 - protein, 9 aa, synthetic construct
  source 1..9: note = Seed: LVVVGAVGV (KRAS G12V)
FVVIGLVGT

SEQ ID NO: 52188 - protein, 9 aa, synthetic construct
  source 1..9: note = Seed: LVVVGAVGV (KRAS G12V)
FVVIGLVGV

SEQ ID NO: 52189 - protein, 9 aa, synthetic construct
  source 1..9: note = Seed: LVVVGAVGV (KRAS G12V)
FVVIGLVGY

SEQ ID NO: 52190 - protein, 9 aa, synthetic construct
  source 1..9: note = Seed: LVVVGAVGV (KRAS G12V)
FVVIGMVGA

SEQ ID NO: 52191 - protein, 9 aa, synthetic construct
  source 1..9: note = Seed: LVVVGAVGV (KRAS G12V)
FVVIGMVGD

SEQ ID NO: 52192 - protein, 9 aa, synthetic construct
  source 1..9: note = Seed: LVVVGAVGV (KRAS G12V)
FVVIGMVGE

SEQ ID NO: 52193 - protein, 9 aa, synthetic construct
  source 1..9: note = Seed: LVVVGAVGV (KRAS G12V)
FVVIGMVGF

SEQ ID NO: 52194 - protein, 9 aa, synthetic construct
  source 1..9: note = Seed: LVVVGAVGV (KRAS G12V)
FVVIGMVGG

SEQ ID NO: 52195 - protein, 9 aa, synthetic construct
  source 1..9: note = Seed: LVVVGAVGV (KRAS G12V)
FVVIGMVGH

SEQ ID NO: 52196 - protein, 9 aa, synthetic construct
  source 1..9: note = Seed: LVVVGAVGV (KRAS G12V)
FVVIGMVGI

SEQ ID NO: 52197 - protein, 9 aa, synthetic construct
  source 1..9: note = Seed: LVVVGAVGV (KRAS G12V)
FVVIGMVGK

SEQ ID NO: 52198 - protein, 9 aa, synthetic construct
  source 1..9: note = Seed: LVVVGAVGV (KRAS G12V)
FVVIGMVGL

SEQ ID NO: 52199 - protein, 9 aa, synthetic construct
  source 1..9: note = Seed: LVVVGAVGV (KRAS G12V)
FVVIGMVGM

SEQ ID NO: 52200 - protein, 9 aa, synthetic construct
  source 1..9: note = Seed: LVVVGAVGV (KRAS G12V)
FVVIGMVGN

SEQ ID NO: 52201 - protein, 9 aa, synthetic construct
  source 1..9: note = Seed: LVVVGAVGV (KRAS G12V)
FVVIGMVGP

SEQ ID NO: 52202 - protein, 9 aa, synthetic construct
  source 1..9: note = Seed: LVVVGAVGV (KRAS G12V)
FVVIGMVGQ

SEQ ID NO: 52203 - protein, 9 aa, synthetic construct
  source 1..9: note = Seed: LVVVGAVGV (KRAS G12V)
FVVIGMVGR

SEQ ID NO: 52204 - protein, 9 aa, synthetic construct
  source 1..9: note = Seed: LVVVGAVGV (KRAS G12V)
FVVIGMVGS

SEQ ID NO: 52205 - protein, 9 aa, synthetic construct
  source 1..9: note = Seed: LVVVGAVGV (KRAS G12V)
FVVIGMVGT

SEQ ID NO: 52206 - protein, 9 aa, synthetic construct
  source 1..9: note = Seed: LVVVGAVGV (KRAS G12V)
FVVIGMVGV

SEQ ID NO: 52207 - protein, 9 aa, synthetic construct
  source 1..9: note = Seed: LVVVGAVGV (KRAS G12V)
FVVIGMVGY

SEQ ID NO: 52208 - protein, 9 aa, synthetic construct
  source 1..9: note = Seed: LVVVGAVGV (KRAS G12V)
FVVIGNVGA

SEQ ID NO: 52209 - protein, 9 aa, synthetic construct
  source 1..9: note = Seed: LVVVGAVGV (KRAS G12V)
FVVIGNVGC

SEQ ID NO: 52210 - protein, 9 aa, synthetic construct
  source 1..9: note = Seed: LVVVGAVGV (KRAS G12V)
FVVIGNVGD

SEQ ID NO: 52211 - protein, 9 aa, synthetic construct
  source 1..9: note = Seed: LVVVGAVGV (KRAS G12V)
FVVIGNVGE

SEQ ID NO: 52212 - protein, 9 aa, synthetic construct
  source 1..9: note = Seed: LVVVGAVGV (KRAS G12V)
FVVIGNVGF

SEQ ID NO: 52213 - protein, 9 aa, synthetic construct
  source 1..9: note = Seed: LVVVGAVGV (KRAS G12V)
FVVIGNVGG

SEQ ID NO: 52214 - protein, 9 aa, synthetic construct
  source 1..9: note = Seed: LVVVGAVGV (KRAS G12V)
FVVIGNVGH

SEQ ID NO: 52215 - protein, 9 aa, synthetic construct
  source 1..9: note = Seed: LVVVGAVGV (KRAS G12V)
FVVIGNVGI

SEQ ID NO: 52216 - protein, 9 aa, synthetic construct
  source 1..9: note = Seed: LVVVGAVGV (KRAS G12V)
FVVIGNVGK

SEQ ID NO: 52217 - protein, 9 aa, synthetic construct
  source 1..9: note = Seed: LVVVGAVGV (KRAS G12V)
FVVIGNVGL

SEQ ID NO: 52218 - protein, 9 aa, synthetic construct
  source 1..9: note = Seed: LVVVGAVGV (KRAS G12V)
FVVIGNVGM

SEQ ID NO: 52219 - protein, 9 aa, synthetic construct
  source 1..9: note = Seed: LVVVGAVGV (KRAS G12V)
FVVIGNVGN

SEQ ID NO: 52220 - protein, 9 aa, synthetic construct
  source 1..9: note = Seed: LVVVGAVGV (KRAS G12V)
FVVIGNVGP

SEQ ID NO: 52221 - protein, 9 aa, synthetic construct
  source 1..9: note = Seed: LVVVGAVGV (KRAS G12V)
FVVIGNVGQ

SEQ ID NO: 52222 - protein, 9 aa, synthetic construct
  source 1..9: note = Seed: LVVVGAVGV (KRAS G12V)
FVVIGNVGR

SEQ ID NO: 52223 - protein, 9 aa, synthetic construct
  source 1..9: note = Seed: LVVVGAVGV (KRAS G12V)
FVVIGNVGS

SEQ ID NO: 52224 - protein, 9 aa, synthetic construct
  source 1..9: note = Seed: LVVVGAVGV (KRAS G12V)
FVVIGNVGT

SEQ ID NO: 52225 - protein, 9 aa, synthetic construct
  source 1..9: note = Seed: LVVVGAVGV (KRAS G12V)
FVVIGNVGV

SEQ ID NO: 52226 - protein, 9 aa, synthetic construct
  source 1..9: note = Seed: LVVVGAVGV (KRAS G12V)
FVVIGNVGW

SEQ ID NO: 52227 - protein, 9 aa, synthetic construct
  source 1..9: note = Seed: LVVVGAVGV (KRAS G12V)
FVVIGNVGY

SEQ ID NO: 52228 - protein, 9 aa, synthetic construct
  source 1..9: note = Seed: LVVVGAVGV (KRAS G12V)
FVVIGPVGA

SEQ ID NO: 52229 - protein, 9 aa, synthetic construct
  source 1..9: note = Seed: LVVVGAVGV (KRAS G12V)
FVVIGPVGC

SEQ ID NO: 52230 - protein, 9 aa, synthetic construct
  source 1..9: note = Seed: LVVVGAVGV (KRAS G12V)
FVVIGPVGD

SEQ ID NO: 52231 - protein, 9 aa, synthetic construct
  source 1..9: note = Seed: LVVVGAVGV (KRAS G12V)
FVVIGPVGE

SEQ ID NO: 52232 - protein, 9 aa, synthetic construct
  source 1..9: note = Seed: LVVVGAVGV (KRAS G12V)
FVVIGPVGF

SEQ ID NO: 52233 - protein, 9 aa, synthetic construct
  source 1..9: note = Seed: LVVVGAVGV (KRAS G12V)
FVVIGPVGG

SEQ ID NO: 52234 - protein, 9 aa, synthetic construct
  source 1..9: note = Seed: LVVVGAVGV (KRAS G12V)
FVVIGPVGH

SEQ ID NO: 52235 - protein, 9 aa, synthetic construct
  source 1..9: note = Seed: LVVVGAVGV (KRAS G12V)
FVVIGPVGI

SEQ ID NO: 52236 - protein, 9 aa, synthetic construct
  source 1..9: note = Seed: LVVVGAVGV (KRAS G12V)
FVVIGPVGK

SEQ ID NO: 52237 - protein, 9 aa, synthetic construct
  source 1..9: note = Seed: LVVVGAVGV (KRAS G12V)
FVVIGPVGL

SEQ ID NO: 52238 - protein, 9 aa, synthetic construct
  source 1..9: note = Seed: LVVVGAVGV (KRAS G12V)
FVVIGPVGM

SEQ ID NO: 52239 - protein, 9 aa, synthetic construct
  source 1..9: note = Seed: LVVVGAVGV (KRAS G12V)
FVVIGPVGN

SEQ ID NO: 52240 - protein, 9 aa, synthetic construct
  source 1..9: note = Seed: LVVVGAVGV (KRAS G12V)
FVVIGPVGP

SEQ ID NO: 52241 - protein, 9 aa, synthetic construct
  source 1..9: note = Seed: LVVVGAVGV (KRAS G12V)
FVVIGPVGQ

SEQ ID NO: 52242 - protein, 9 aa, synthetic construct
  source 1..9: note = Seed: LVVVGAVGV (KRAS G12V)
FVVIGPVGR

SEQ ID NO: 52243 - protein, 9 aa, synthetic construct
  source 1..9: note = Seed: LVVVGAVGV (KRAS G12V)
FVVIGPVGS

SEQ ID NO: 52244 - protein, 9 aa, synthetic construct
  source 1..9: note = Seed: LVVVGAVGV (KRAS G12V)
FVVIGPVGT

SEQ ID NO: 52245 - protein, 9 aa, synthetic construct
  source 1..9: note = Seed: LVVVGAVGV (KRAS G12V)
FVVIGPVGW

SEQ ID NO: 52246 - protein, 9 aa, synthetic construct
  source 1..9: note = Seed: LVVVGAVGV (KRAS G12V)
FVVIGPVGY

SEQ ID NO: 52247 - protein, 9 aa, synthetic construct
  source 1..9: note = Seed: LVVVGAVGV (KRAS G12V)
FVVIGQVGA

SEQ ID NO: 52248 - protein, 9 aa, synthetic construct
  source 1..9: note = Seed: LVVVGAVGV (KRAS G12V)
FVVIGQVGF

SEQ ID NO: 52249 - protein, 9 aa, synthetic construct
  source 1..9: note = Seed: LVVVGAVGV (KRAS G12V)
FVVIGQVGG

SEQ ID NO: 52250 - protein, 9 aa, synthetic construct
  source 1..9: note = Seed: LVVVGAVGV (KRAS G12V)
FVVIGQVGH

SEQ ID NO: 52251 - protein, 9 aa, synthetic construct
  source 1..9: note = Seed: LVVVGAVGV (KRAS G12V)
FVVIGQVGI

SEQ ID NO: 52252 - protein, 9 aa, synthetic construct
  source 1..9: note = Seed: LVVVGAVGV (KRAS G12V)
FVVIGQVGK

SEQ ID NO: 52253 - protein, 9 aa, synthetic construct
  source 1..9: note = Seed: LVVVGAVGV (KRAS G12V)
FVVIGQVGL

SEQ ID NO: 52254 - protein, 9 aa, synthetic construct
  source 1..9: note = Seed: LVVVGAVGV (KRAS G12V)
FVVIGQVGM

SEQ ID NO: 52255 - protein, 9 aa, synthetic construct
  source 1..9: note = Seed: LVVVGAVGV (KRAS G12V)
FVVIGQVGN

SEQ ID NO: 52256 - protein, 9 aa, synthetic construct
  source 1..9: note = Seed: LVVVGAVGV (KRAS G12V)
FVVIGQVGP

SEQ ID NO: 52257 - protein, 9 aa, synthetic construct
  source 1..9: note = Seed: LVVVGAVGV (KRAS G12V)
FVVIGQVGQ

SEQ ID NO: 52258 - protein, 9 aa, synthetic construct
  source 1..9: note = Seed: LVVVGAVGV (KRAS G12V)
FVVIGQVGR

SEQ ID NO: 52259 - protein, 9 aa, synthetic construct
  source 1..9: note = Seed: LVVVGAVGV (KRAS G12V)
FVVIGQVGS

SEQ ID NO: 52260 - protein, 9 aa, synthetic construct
  source 1..9: note = Seed: LVVVGAVGV (KRAS G12V)
FVVIGQVGT

SEQ ID NO: 52261 - protein, 9 aa, synthetic construct
  source 1..9: note = Seed: LVVVGAVGV (KRAS G12V)
FVVIGQVGV

SEQ ID NO: 52262 - protein, 9 aa, synthetic construct
  source 1..9: note = Seed: LVVVGAVGV (KRAS G12V)
FVVIGQVGY

SEQ ID NO: 52263 - protein, 9 aa, synthetic construct
  source 1..9: note = Seed: LVVVGAVGV (KRAS G12V)
FVVIGRVGA

SEQ ID NO: 52264 - protein, 9 aa, synthetic construct
  source 1..9: note = Seed: LVVVGAVGV (KRAS G12V)
FVVIGRVGD

SEQ ID NO: 52265 - protein, 9 aa, synthetic construct
  source 1..9: note = Seed: LVVVGAVGV (KRAS G12V)
FVVIGRVGE

SEQ ID NO: 52266 - protein, 9 aa, synthetic construct
  source 1..9: note = Seed: LVVVGAVGV (KRAS G12V)
FVVIGRVGF

SEQ ID NO: 52267 - protein, 9 aa, synthetic construct
  source 1..9: note = Seed: LVVVGAVGV (KRAS G12V)
FVVIGRVGG

SEQ ID NO: 52268 - protein, 9 aa, synthetic construct
  source 1..9: note = Seed: LVVVGAVGV (KRAS G12V)
FVVIGRVGH

SEQ ID NO: 52269 - protein, 9 aa, synthetic construct
  source 1..9: note = Seed: LVVVGAVGV (KRAS G12V)
FVVIGRVGI

SEQ ID NO: 52270 - protein, 9 aa, synthetic construct
  source 1..9: note = Seed: LVVVGAVGV (KRAS G12V)
FVVIGRVGK

SEQ ID NO: 52271 - protein, 9 aa, synthetic construct
  source 1..9: note = Seed: LVVVGAVGV (KRAS G12V)
FVVIGRVGL

SEQ ID NO: 52272 - protein, 9 aa, synthetic construct
  source 1..9: note = Seed: LVVVGAVGV (KRAS G12V)
FVVIGRVGM

SEQ ID NO: 52273 - protein, 9 aa, synthetic construct
  source 1..9: note = Seed: LVVVGAVGV (KRAS G12V)
FVVIGRVGN

SEQ ID NO: 52274 - protein, 9 aa, synthetic construct
  source 1..9: note = Seed: LVVVGAVGV (KRAS G12V)
FVVIGRVGP

SEQ ID NO: 52275 - protein, 9 aa, synthetic construct
  source 1..9: note = Seed: LVVVGAVGV (KRAS G12V)
FVVIGRVGQ

SEQ ID NO: 52276 - protein, 9 aa, synthetic construct
  source 1..9: note = Seed: LVVVGAVGV (KRAS G12V)
FVVIGRVGR

SEQ ID NO: 52277 - protein, 9 aa, synthetic construct
  source 1..9: note = Seed: LVVVGAVGV (KRAS G12V)
FVVIGRVGS

SEQ ID NO: 52278 - protein, 9 aa, synthetic construct
  source 1..9: note = Seed: LVVVGAVGV (KRAS G12V)
FVVIGRVGT

SEQ ID NO: 52279 - protein, 9 aa, synthetic construct
  source 1..9: note = Seed: LVVVGAVGV (KRAS G12V)
FVVIGRVGV

SEQ ID NO: 52280 - protein, 9 aa, synthetic construct
  source 1..9: note = Seed: LVVVGAVGV (KRAS G12V)
FVVIGRVGW

SEQ ID NO: 52281 - protein, 9 aa, synthetic construct
  source 1..9: note = Seed: LVVVGAVGV (KRAS G12V)
FVVIGRVGY

SEQ ID NO: 52282 - protein, 9 aa, synthetic construct
  source 1..9: note = Seed: LVVVGAVGV (KRAS G12V)
FVVIGSVGA

SEQ ID NO: 52283 - protein, 9 aa, synthetic construct
  source 1..9: note = Seed: LVVVGAVGV (KRAS G12V)
FVVIGSVGC

SEQ ID NO: 52284 - protein, 9 aa, synthetic construct
  source 1..9: note = Seed: LVVVGAVGV (KRAS G12V)
FVVIGSVGD

SEQ ID NO: 52285 - protein, 9 aa, synthetic construct
  source 1..9: note = Seed: LVVVGAVGV (KRAS G12V)
FVVIGSVGE

SEQ ID NO: 52286 - protein, 9 aa, synthetic construct
  source 1..9: note = Seed: LVVVGAVGV (KRAS G12V)
FVVIGSVGF

SEQ ID NO: 52287 - protein, 9 aa, synthetic construct
  source 1..9: note = Seed: LVVVGAVGV (KRAS G12V)
FVVIGSVGG

SEQ ID NO: 52288 - protein, 9 aa, synthetic construct
  source 1..9: note = Seed: LVVVGAVGV (KRAS G12V)
FVVIGSVGH

SEQ ID NO: 52289 - protein, 9 aa, synthetic construct
  source 1..9: note = Seed: LVVVGAVGV (KRAS G12V)
FVVIGSVGI

SEQ ID NO: 52290 - protein, 9 aa, synthetic construct
  source 1..9: note = Seed: LVVVGAVGV (KRAS G12V)
FVVIGSVGK

SEQ ID NO: 52291 - protein, 9 aa, synthetic construct
  source 1..9: note = Seed: LVVVGAVGV (KRAS G12V)
FVVIGSVGL

SEQ ID NO: 52292 - protein, 9 aa, synthetic construct
  source 1..9: note = Seed: LVVVGAVGV (KRAS G12V)
FVVIGSVGM

SEQ ID NO: 52293 - protein, 9 aa, synthetic construct
  source 1..9: note = Seed: LVVVGAVGV (KRAS G12V)
FVVIGSVGN

SEQ ID NO: 52294 - protein, 9 aa, synthetic construct
  source 1..9: note = Seed: LVVVGAVGV (KRAS G12V)
FVVIGSVGP

SEQ ID NO: 52295 - protein, 9 aa, synthetic construct
  source 1..9: note = Seed: LVVVGAVGV (KRAS G12V)
FVVIGSVGQ

SEQ ID NO: 52296 - protein, 9 aa, synthetic construct
  source 1..9: note = Seed: LVVVGAVGV (KRAS G12V)
FVVIGSVGR

SEQ ID NO: 52297 - protein, 9 aa, synthetic construct
  source 1..9: note = Seed: LVVVGAVGV (KRAS G12V)
FVVIGSVGS

SEQ ID NO: 52298 - protein, 9 aa, synthetic construct
  source 1..9: note = Seed: LVVVGAVGV (KRAS G12V)
FVVIGSVGT

SEQ ID NO: 52299 - protein, 9 aa, synthetic construct
  source 1..9: note = Seed: LVVVGAVGV (KRAS G12V)
FVVIGSVGV

SEQ ID NO: 52300 - protein, 9 aa, synthetic construct
  source 1..9: note = Seed: LVVVGAVGV (KRAS G12V)
FVVIGSVGW

SEQ ID NO: 52301 - protein, 9 aa, synthetic construct
  source 1..9: note = Seed: LVVVGAVGV (KRAS G12V)
FVVIGSVGY

SEQ ID NO: 52302 - protein, 9 aa, synthetic construct
  source 1..9: note = Seed: LVVVGAVGV (KRAS G12V)
FVVIGTVGA

SEQ ID NO: 52303 - protein, 9 aa, synthetic construct
  source 1..9: note = Seed: LVVVGAVGV (KRAS G12V)
FVVIGTVGC

SEQ ID NO: 52304 - protein, 9 aa, synthetic construct
  source 1..9: note = Seed: LVVVGAVGV (KRAS G12V)
FVVIGTVGD

SEQ ID NO: 52305 - protein, 9 aa, synthetic construct
  source 1..9: note = Seed: LVVVGAVGV (KRAS G12V)
FVVIGTVGE

SEQ ID NO: 52306 - protein, 9 aa, synthetic construct
  source 1..9: note = Seed: LVVVGAVGV (KRAS G12V)
FVVIGTVGF

SEQ ID NO: 52307 - protein, 9 aa, synthetic construct
  source 1..9: note = Seed: LVVVGAVGV (KRAS G12V)
FVVIGTVGG

SEQ ID NO: 52308 - protein, 9 aa, synthetic construct
  source 1..9: note = Seed: LVVVGAVGV (KRAS G12V)
FVVIGTVGH

SEQ ID NO: 52309 - protein, 9 aa, synthetic construct
  source 1..9: note = Seed: LVVVGAVGV (KRAS G12V)
FVVIGTVGI

SEQ ID NO: 52310 - protein, 9 aa, synthetic construct
  source 1..9: note = Seed: LVVVGAVGV (KRAS G12V)
FVVIGTVGK

SEQ ID NO: 52311 - protein, 9 aa, synthetic construct
  source 1..9: note = Seed: LVVVGAVGV (KRAS G12V)
FVVIGTVGL

SEQ ID NO: 52312 - protein, 9 aa, synthetic construct
  source 1..9: note = Seed: LVVVGAVGV (KRAS G12V)
FVVIGTVGM

SEQ ID NO: 52313 - protein, 9 aa, synthetic construct
  source 1..9: note = Seed: LVVVGAVGV (KRAS G12V)
FVVIGTVGN

SEQ ID NO: 52314 - protein, 9 aa, synthetic construct
  source 1..9: note = Seed: LVVVGAVGV (KRAS G12V)
FVVIGTVGP

SEQ ID NO: 52315 - protein, 9 aa, synthetic construct
  source 1..9: note = Seed: LVVVGAVGV (KRAS G12V)
FVVIGTVGQ

SEQ ID NO: 52316 - protein, 9 aa, synthetic construct
  source 1..9: note = Seed: LVVVGAVGV (KRAS G12V)
FVVIGTVGR

SEQ ID NO: 52317 - protein, 9 aa, synthetic construct
  source 1..9: note = Seed: LVVVGAVGV (KRAS G12V)
FVVIGTVGS

SEQ ID NO: 52318 - protein, 9 aa, synthetic construct
  source 1..9: note = Seed: LVVVGAVGV (KRAS G12V)
FVVIGTVGT

SEQ ID NO: 52319 - protein, 9 aa, synthetic construct
  source 1..9: note = Seed: LVVVGAVGV (KRAS G12V)
FVVIGTVGV

SEQ ID NO: 52320 - protein, 9 aa, synthetic construct
  source 1..9: note = Seed: LVVVGAVGV (KRAS G12V)
FVVIGTVGY

SEQ ID NO: 52321 - protein, 9 aa, synthetic construct
  source 1..9: note = Seed: LVVVGAVGV (KRAS G12V)
FVVIGVVGA

SEQ ID NO: 52322 - protein, 9 aa, synthetic construct
  source 1..9: note = Seed: LVVVGAVGV (KRAS G12V)
FVVIGVVGD

SEQ ID NO: 52323 - protein, 9 aa, synthetic construct
  source 1..9: note = Seed: LVVVGAVGV (KRAS G12V)
FVVIGVVGE

SEQ ID NO: 52324 - protein, 9 aa, synthetic construct
  source 1..9: note = Seed: LVVVGAVGV (KRAS G12V)
FVVIGVVGG

SEQ ID NO: 52325 - protein, 9 aa, synthetic construct
  source 1..9: note = Seed: LVVVGAVGV (KRAS G12V)
FVVIGVVGH

SEQ ID NO: 52326 - protein, 9 aa, synthetic construct
  source 1..9: note = Seed: LVVVGAVGV (KRAS G12V)
FVVIGVVGI

SEQ ID NO: 52327 - protein, 9 aa, synthetic construct
  source 1..9: note = Seed: LVVVGAVGV (KRAS G12V)
FVVIGVVGK

SEQ ID NO: 52328 - protein, 9 aa, synthetic construct
  source 1..9: note = Seed: LVVVGAVGV (KRAS G12V)
FVVIGVVGL

SEQ ID NO: 52329 - protein, 9 aa, synthetic construct
  source 1..9: note = Seed: LVVVGAVGV (KRAS G12V)
FVVIGVVGM

SEQ ID NO: 52330 - protein, 9 aa, synthetic construct
  source 1..9: note = Seed: LVVVGAVGV (KRAS G12V)
FVVIGVVGN

SEQ ID NO: 52331 - protein, 9 aa, synthetic construct
  source 1..9: note = Seed: LVVVGAVGV (KRAS G12V)
FVVIGVVGP

SEQ ID NO: 52332 - protein, 9 aa, synthetic construct
  source 1..9: note = Seed: LVVVGAVGV (KRAS G12V)
FVVIGVVGQ

SEQ ID NO: 52333 - protein, 9 aa, synthetic construct
  source 1..9: note = Seed: LVVVGAVGV (KRAS G12V)
FVVIGVVGR

SEQ ID NO: 52334 - protein, 9 aa, synthetic construct
  source 1..9: note = Seed: LVVVGAVGV (KRAS G12V)
FVVIGVVGS

SEQ ID NO: 52335 - protein, 9 aa, synthetic construct
  source 1..9: note = Seed: LVVVGAVGV (KRAS G12V)
FVVIGVVGT

SEQ ID NO: 52336 - protein, 9 aa, synthetic construct
  source 1..9: note = Seed: LVVVGAVGV (KRAS G12V)
FVVIGVVGV

SEQ ID NO: 52337 - protein, 9 aa, synthetic construct
  source 1..9: note = Seed: LVVVGAVGV (KRAS G12V)
FVVIGVVGY

SEQ ID NO: 52338 - protein, 9 aa, synthetic construct
  source 1..9: note = Seed: LVVVGAVGV (KRAS G12V)
FVVIGWVGH

SEQ ID NO: 52339 - protein, 9 aa, synthetic construct
  source 1..9: note = Seed: LVVVGAVGV (KRAS G12V)
FVVIGWVGN

SEQ ID NO: 52340 - protein, 9 aa, synthetic construct
  source 1..9: note = Seed: LVVVGAVGV (KRAS G12V)
FVVIGWVGR

SEQ ID NO: 52341 - protein, 9 aa, synthetic construct
  source 1..9: note = Seed: LVVVGAVGV (KRAS G12V)
FVVIGYVGA

SEQ ID NO: 52342 - protein, 9 aa, synthetic construct
  source 1..9: note = Seed: LVVVGAVGV (KRAS G12V)
FVVIGYVGH

SEQ ID NO: 52343 - protein, 9 aa, synthetic construct
  source 1..9: note = Seed: LVVVGAVGV (KRAS G12V)
FVVIGYVGI

SEQ ID NO: 52344 - protein, 9 aa, synthetic construct
  source 1..9: note = Seed: LVVVGAVGV (KRAS G12V)
FVVIGYVGL

SEQ ID NO: 52345 - protein, 9 aa, synthetic construct
  source 1..9: note = Seed: LVVVGAVGV (KRAS G12V)
FVVIGYVGM

SEQ ID NO: 52346 - protein, 9 aa, synthetic construct
  source 1..9: note = Seed: LVVVGAVGV (KRAS G12V)
FVVIGYVGN

SEQ ID NO: 52347 - protein, 9 aa, synthetic construct
  source 1..9: note = Seed: LVVVGAVGV (KRAS G12V)
FVVIGYVGR

SEQ ID NO: 52348 - protein, 9 aa, synthetic construct
  source 1..9: note = Seed: LVVVGAVGV (KRAS G12V)
FVVIGYVGS

SEQ ID NO: 52349 - protein, 9 aa, synthetic construct
  source 1..9: note = Seed: LVVVGAVGV (KRAS G12V)
FVVIGYVGV

SEQ ID NO: 52350 - protein, 9 aa, synthetic construct
  source 1..9: note = Seed: LVVVGAVGV (KRAS G12V)
FVVKGAVGA

SEQ ID NO: 52351 - protein, 9 aa, synthetic construct
  source 1..9: note = Seed: LVVVGAVGV (KRAS G12V)
FVVKGAVGF

SEQ ID NO: 52352 - protein, 9 aa, synthetic construct
  source 1..9: note = Seed: LVVVGAVGV (KRAS G12V)
FVVKGAVGG

SEQ ID NO: 52353 - protein, 9 aa, synthetic construct
  source 1..9: note = Seed: LVVVGAVGV (KRAS G12V)
FVVKGAVGH

SEQ ID NO: 52354 - protein, 9 aa, synthetic construct
  source 1..9: note = Seed: LVVVGAVGV (KRAS G12V)
FVVKGAVGI

SEQ ID NO: 52355 - protein, 9 aa, synthetic construct
  source 1..9: note = Seed: LVVVGAVGV (KRAS G12V)
FVVKGAVGL

SEQ ID NO: 52356 - protein, 9 aa, synthetic construct
  source 1..9: note = Seed: LVVVGAVGV (KRAS G12V)
FVVKGAVGM

SEQ ID NO: 52357 - protein, 9 aa, synthetic construct
  source 1..9: note = Seed: LVVVGAVGV (KRAS G12V)
FVVKGAVGN

SEQ ID NO: 52358 - protein, 9 aa, synthetic construct
  source 1..9: note = Seed: LVVVGAVGV (KRAS G12V)
FVVKGAVGQ

SEQ ID NO: 52359 - protein, 9 aa, synthetic construct
  source 1..9: note = Seed: LVVVGAVGV (KRAS G12V)
FVVKGAVGR

SEQ ID NO: 52360 - protein, 9 aa, synthetic construct
  source 1..9: note = Seed: LVVVGAVGV (KRAS G12V)
FVVKGAVGS

SEQ ID NO: 52361 - protein, 9 aa, synthetic construct
  source 1..9: note = Seed: LVVVGAVGV (KRAS G12V)
FVVKGAVGT

SEQ ID NO: 52362 - protein, 9 aa, synthetic construct
  source 1..9: note = Seed: LVVVGAVGV (KRAS G12V)
FVVKGAVGV

SEQ ID NO: 52363 - protein, 9 aa, synthetic construct
  source 1..9: note = Seed: LVVVGAVGV (KRAS G12V)
FVVKGAVGY

SEQ ID NO: 52364 - protein, 9 aa, synthetic construct
  source 1..9: note = Seed: LVVVGAVGV (KRAS G12V)
FVVKGFVGL

SEQ ID NO: 52365 - protein, 9 aa, synthetic construct
  source 1..9: note = Seed: LVVVGAVGV (KRAS G12V)
FVVKGGVGA

SEQ ID NO: 52366 - protein, 9 aa, synthetic construct
  source 1..9: note = Seed: LVVVGAVGV (KRAS G12V)
FVVKGGVGF

SEQ ID NO: 52367 - protein, 9 aa, synthetic construct
  source 1..9: note = Seed: LVVVGAVGV (KRAS G12V)
FVVKGGVGI

SEQ ID NO: 52368 - protein, 9 aa, synthetic construct
  source 1..9: note = Seed: LVVVGAVGV (KRAS G12V)
FVVKGGVGL

SEQ ID NO: 52369 - protein, 9 aa, synthetic construct
  source 1..9: note = Seed: LVVVGAVGV (KRAS G12V)
FVVKGGVGM

SEQ ID NO: 52370 - protein, 9 aa, synthetic construct
  source 1..9: note = Seed: LVVVGAVGV (KRAS G12V)
FVVKGGVGS

SEQ ID NO: 52371 - protein, 9 aa, synthetic construct
  source 1..9: note = Seed: LVVVGAVGV (KRAS G12V)
FVVKGGVGT

SEQ ID NO: 52372 - protein, 9 aa, synthetic construct
  source 1..9: note = Seed: LVVVGAVGV (KRAS G12V)
FVVKGGVGV

SEQ ID NO: 52373 - protein, 9 aa, synthetic construct
  source 1..9: note = Seed: LVVVGAVGV (KRAS G12V)
FVVKGHVGA

SEQ ID NO: 52374 - protein, 9 aa, synthetic construct
  source 1..9: note = Seed: LVVVGAVGV (KRAS G12V)
FVVKGHVGG

SEQ ID NO: 52375 - protein, 9 aa, synthetic construct
  source 1..9: note = Seed: LVVVGAVGV (KRAS G12V)
FVVKGHVGH

SEQ ID NO: 52376 - protein, 9 aa, synthetic construct
  source 1..9: note = Seed: LVVVGAVGV (KRAS G12V)
FVVKGHVGI

SEQ ID NO: 52377 - protein, 9 aa, synthetic construct
  source 1..9: note = Seed: LVVVGAVGV (KRAS G12V)
FVVKGHVGL

SEQ ID NO: 52378 - protein, 9 aa, synthetic construct
  source 1..9: note = Seed: LVVVGAVGV (KRAS G12V)
FVVKGHVGM

SEQ ID NO: 52379 - protein, 9 aa, synthetic construct
  source 1..9: note = Seed: LVVVGAVGV (KRAS G12V)
FVVKGHVGN

SEQ ID NO: 52380 - protein, 9 aa, synthetic construct
  source 1..9: note = Seed: LVVVGAVGV (KRAS G12V)
FVVKGHVGQ

SEQ ID NO: 52381 - protein, 9 aa, synthetic construct
  source 1..9: note = Seed: LVVVGAVGV (KRAS G12V)
FVVKGHVGR

SEQ ID NO: 52382 - protein, 9 aa, synthetic construct
  source 1..9: note = Seed: LVVVGAVGV (KRAS G12V)
FVVKGHVGS

SEQ ID NO: 52383 - protein, 9 aa, synthetic construct
  source 1..9: note = Seed: LVVVGAVGV (KRAS G12V)
FVVKGHVGT

SEQ ID NO: 52384 - protein, 9 aa, synthetic construct
  source 1..9: note = Seed: LVVVGAVGV (KRAS G12V)
FVVKGHVGV

SEQ ID NO: 52385 - protein, 9 aa, synthetic construct
  source 1..9: note = Seed: LVVVGAVGV (KRAS G12V)
FVVKGHVGY

SEQ ID NO: 52386 - protein, 9 aa, synthetic construct
  source 1..9: note = Seed: LVVVGAVGV (KRAS G12V)
FVVKGIVGA

SEQ ID NO: 52387 - protein, 9 aa, synthetic construct
  source 1..9: note = Seed: LVVVGAVGV (KRAS G12V)
FVVKGIVGH

SEQ ID NO: 52388 - protein, 9 aa, synthetic construct
  source 1..9: note = Seed: LVVVGAVGV (KRAS G12V)
FVVKGIVGL

SEQ ID NO: 52389 - protein, 9 aa, synthetic construct
  source 1..9: note = Seed: LVVVGAVGV (KRAS G12V)
FVVKGIVGM

SEQ ID NO: 52390 - protein, 9 aa, synthetic construct
  source 1..9: note = Seed: LVVVGAVGV (KRAS G12V)
FVVKGIVGQ

SEQ ID NO: 52391 - protein, 9 aa, synthetic construct
  source 1..9: note = Seed: LVVVGAVGV (KRAS G12V)
FVVKGIVGR

SEQ ID NO: 52392 - protein, 9 aa, synthetic construct
  source 1..9: note = Seed: LVVVGAVGV (KRAS G12V)
FVVKGIVGS

SEQ ID NO: 52393 - protein, 9 aa, synthetic construct
  source 1..9: note = Seed: LVVVGAVGV (KRAS G12V)
FVVKGIVGV

SEQ ID NO: 52394 - protein, 9 aa, synthetic construct
  source 1..9: note = Seed: LVVVGAVGV (KRAS G12V)
FVVKGIVGY

SEQ ID NO: 52395 - protein, 9 aa, synthetic construct
  source 1..9: note = Seed: LVVVGAVGV (KRAS G12V)
FVVKGKVGA

SEQ ID NO: 52396 - protein, 9 aa, synthetic construct
  source 1..9: note = Seed: LVVVGAVGV (KRAS G12V)
FVVKGKVGC

SEQ ID NO: 52397 - protein, 9 aa, synthetic construct
  source 1..9: note = Seed: LVVVGAVGV (KRAS G12V)
FVVKGKVGF

SEQ ID NO: 52398 - protein, 9 aa, synthetic construct
  source 1..9: note = Seed: LVVVGAVGV (KRAS G12V)
FVVKGKVGG

SEQ ID NO: 52399 - protein, 9 aa, synthetic construct
  source 1..9: note = Seed: LVVVGAVGV (KRAS G12V)
FVVKGKVGH

SEQ ID NO: 52400 - protein, 9 aa, synthetic construct
  source 1..9: note = Seed: LVVVGAVGV (KRAS G12V)
FVVKGKVGI

SEQ ID NO: 52401 - protein, 9 aa, synthetic construct
  source 1..9: note = Seed: LVVVGAVGV (KRAS G12V)
FVVKGKVGK

SEQ ID NO: 52402 - protein, 9 aa, synthetic construct
  source 1..9: note = Seed: LVVVGAVGV (KRAS G12V)
FVVKGKVGL

SEQ ID NO: 52403 - protein, 9 aa, synthetic construct
  source 1..9: note = Seed: LVVVGAVGV (KRAS G12V)
FVVKGKVGM

SEQ ID NO: 52404 - protein, 9 aa, synthetic construct
  source 1..9: note = Seed: LVVVGAVGV (KRAS G12V)
FVVKGKVGN

SEQ ID NO: 52405 - protein, 9 aa, synthetic construct
  source 1..9: note = Seed: LVVVGAVGV (KRAS G12V)
FVVKGKVGP

SEQ ID NO: 52406 - protein, 9 aa, synthetic construct
  source 1..9: note = Seed: LVVVGAVGV (KRAS G12V)
FVVKGKVGQ

SEQ ID NO: 52407 - protein, 9 aa, synthetic construct
  source 1..9: note = Seed: LVVVGAVGV (KRAS G12V)
FVVKGKVGR

SEQ ID NO: 52408 - protein, 9 aa, synthetic construct
  source 1..9: note = Seed: LVVVGAVGV (KRAS G12V)
FVVKGKVGS

SEQ ID NO: 52409 - protein, 9 aa, synthetic construct
  source 1..9: note = Seed: LVVVGAVGV (KRAS G12V)
FVVKGKVGT

SEQ ID NO: 52410 - protein, 9 aa, synthetic construct
  source 1..9: note = Seed: LVVVGAVGV (KRAS G12V)
FVVKGKVGV

SEQ ID NO: 52411 - protein, 9 aa, synthetic construct
  source 1..9: note = Seed: LVVVGAVGV (KRAS G12V)
FVVKGKVGW

SEQ ID NO: 52412 - protein, 9 aa, synthetic construct
  source 1..9: note = Seed: LVVVGAVGV (KRAS G12V)
FVVKGKVGY

SEQ ID NO: 52413 - protein, 9 aa, synthetic construct
  source 1..9: note = Seed: LVVVGAVGV (KRAS G12V)
FVVKGLVGA

SEQ ID NO: 52414 - protein, 9 aa, synthetic construct
  source 1..9: note = Seed: LVVVGAVGV (KRAS G12V)
FVVKGLVGG

SEQ ID NO: 52415 - protein, 9 aa, synthetic construct
  source 1..9: note = Seed: LVVVGAVGV (KRAS G12V)
FVVKGLVGI

SEQ ID NO: 52416 - protein, 9 aa, synthetic construct
  source 1..9: note = Seed: LVVVGAVGV (KRAS G12V)
FVVKGLVGL

SEQ ID NO: 52417 - protein, 9 aa, synthetic construct
  source 1..9: note = Seed: LVVVGAVGV (KRAS G12V)
FVVKGLVGM

SEQ ID NO: 52418 - protein, 9 aa, synthetic construct
  source 1..9: note = Seed: LVVVGAVGV (KRAS G12V)
FVVKGLVGQ

SEQ ID NO: 52419 - protein, 9 aa, synthetic construct
  source 1..9: note = Seed: LVVVGAVGV (KRAS G12V)
FVVKGLVGR

SEQ ID NO: 52420 - protein, 9 aa, synthetic construct
  source 1..9: note = Seed: LVVVGAVGV (KRAS G12V)
FVVKGLVGS

SEQ ID NO: 52421 - protein, 9 aa, synthetic construct
  source 1..9: note = Seed: LVVVGAVGV (KRAS G12V)
FVVKGLVGV

SEQ ID NO: 52422 - protein, 9 aa, synthetic construct
  source 1..9: note = Seed: LVVVGAVGV (KRAS G12V)
FVVKGMVGA

SEQ ID NO: 52423 - protein, 9 aa, synthetic construct
  source 1..9: note = Seed: LVVVGAVGV (KRAS G12V)
FVVKGMVGF

SEQ ID NO: 52424 - protein, 9 aa, synthetic construct
  source 1..9: note = Seed: LVVVGAVGV (KRAS G12V)
FVVKGMVGG

SEQ ID NO: 52425 - protein, 9 aa, synthetic construct
  source 1..9: note = Seed: LVVVGAVGV (KRAS G12V)
FVVKGMVGI

SEQ ID NO: 52426 - protein, 9 aa, synthetic construct
  source 1..9: note = Seed: LVVVGAVGV (KRAS G12V)
FVVKGMVGK

SEQ ID NO: 52427 - protein, 9 aa, synthetic construct
  source 1..9: note = Seed: LVVVGAVGV (KRAS G12V)
FVVKGMVGL

SEQ ID NO: 52428 - protein, 9 aa, synthetic construct
  source 1..9: note = Seed: LVVVGAVGV (KRAS G12V)
FVVKGMVGM

SEQ ID NO: 52429 - protein, 9 aa, synthetic construct
  source 1..9: note = Seed: LVVVGAVGV (KRAS G12V)
FVVKGMVGQ

SEQ ID NO: 52430 - protein, 9 aa, synthetic construct
  source 1..9: note = Seed: LVVVGAVGV (KRAS G12V)
FVVKGMVGR

SEQ ID NO: 52431 - protein, 9 aa, synthetic construct
  source 1..9: note = Seed: LVVVGAVGV (KRAS G12V)
FVVKGMVGS

SEQ ID NO: 52432 - protein, 9 aa, synthetic construct
  source 1..9: note = Seed: LVVVGAVGV (KRAS G12V)
FVVKGMVGV

SEQ ID NO: 52433 - protein, 9 aa, synthetic construct
  source 1..9: note = Seed: LVVVGAVGV (KRAS G12V)
FVVKGNVGA

SEQ ID NO: 52434 - protein, 9 aa, synthetic construct
  source 1..9: note = Seed: LVVVGAVGV (KRAS G12V)
FVVKGNVGF

SEQ ID NO: 52435 - protein, 9 aa, synthetic construct
  source 1..9: note = Seed: LVVVGAVGV (KRAS G12V)
FVVKGNVGG

SEQ ID NO: 52436 - protein, 9 aa, synthetic construct
  source 1..9: note = Seed: LVVVGAVGV (KRAS G12V)
FVVKGNVGH

SEQ ID NO: 52437 - protein, 9 aa, synthetic construct
  source 1..9: note = Seed: LVVVGAVGV (KRAS G12V)
FVVKGNVGI

SEQ ID NO: 52438 - protein, 9 aa, synthetic construct
  source 1..9: note = Seed: LVVVGAVGV (KRAS G12V)
FVVKGNVGL

SEQ ID NO: 52439 - protein, 9 aa, synthetic construct
  source 1..9: note = Seed: LVVVGAVGV (KRAS G12V)
FVVKGNVGM

SEQ ID NO: 52440 - protein, 9 aa, synthetic construct
  source 1..9: note = Seed: LVVVGAVGV (KRAS G12V)
FVVKGNVGQ

SEQ ID NO: 52441 - protein, 9 aa, synthetic construct
  source 1..9: note = Seed: LVVVGAVGV (KRAS G12V)
FVVKGNVGS

SEQ ID NO: 52442 - protein, 9 aa, synthetic construct
  source 1..9: note = Seed: LVVVGAVGV (KRAS G12V)
FVVKGNVGT

SEQ ID NO: 52443 - protein, 9 aa, synthetic construct
  source 1..9: note = Seed: LVVVGAVGV (KRAS G12V)
FVVKGNVGV

SEQ ID NO: 52444 - protein, 9 aa, synthetic construct
  source 1..9: note = Seed: LVVVGAVGV (KRAS G12V)
FVVKGPVGA

SEQ ID NO: 52445 - protein, 9 aa, synthetic construct
  source 1..9: note = Seed: LVVVGAVGV (KRAS G12V)
FVVKGPVGG

SEQ ID NO: 52446 - protein, 9 aa, synthetic construct
  source 1..9: note = Seed: LVVVGAVGV (KRAS G12V)
FVVKGPVGH

SEQ ID NO: 52447 - protein, 9 aa, synthetic construct
  source 1..9: note = Seed: LVVVGAVGV (KRAS G12V)
FVVKGPVGI

SEQ ID NO: 52448 - protein, 9 aa, synthetic construct
  source 1..9: note = Seed: LVVVGAVGV (KRAS G12V)
FVVKGPVGL

SEQ ID NO: 52449 - protein, 9 aa, synthetic construct
  source 1..9: note = Seed: LVVVGAVGV (KRAS G12V)
FVVKGPVGM

SEQ ID NO: 52450 - protein, 9 aa, synthetic construct
  source 1..9: note = Seed: LVVVGAVGV (KRAS G12V)
FVVKGPVGQ

SEQ ID NO: 52451 - protein, 9 aa, synthetic construct
  source 1..9: note = Seed: LVVVGAVGV (KRAS G12V)
FVVKGPVGS

SEQ ID NO: 52452 - protein, 9 aa, synthetic construct
  source 1..9: note = Seed: LVVVGAVGV (KRAS G12V)
FVVKGPVGT

SEQ ID NO: 52453 - protein, 9 aa, synthetic construct
  source 1..9: note = Seed: LVVVGAVGV (KRAS G12V)
FVVKGPVGV

SEQ ID NO: 52454 - protein, 9 aa, synthetic construct
  source 1..9: note = Seed: LVVVGAVGV (KRAS G12V)
FVVKGQVGA

SEQ ID NO: 52455 - protein, 9 aa, synthetic construct
  source 1..9: note = Seed: LVVVGAVGV (KRAS G12V)
FVVKGQVGG

SEQ ID NO: 52456 - protein, 9 aa, synthetic construct
  source 1..9: note = Seed: LVVVGAVGV (KRAS G12V)
FVVKGRVGA

SEQ ID NO: 52457 - protein, 9 aa, synthetic construct
  source 1..9: note = Seed: LVVVGAVGV (KRAS G12V)
FVVKGRVGC

SEQ ID NO: 52458 - protein, 9 aa, synthetic construct
  source 1..9: note = Seed: LVVVGAVGV (KRAS G12V)
FVVKGRVGD

SEQ ID NO: 52459 - protein, 9 aa, synthetic construct
  source 1..9: note = Seed: LVVVGAVGV (KRAS G12V)
FVVKGRVGE

SEQ ID NO: 52460 - protein, 9 aa, synthetic construct
  source 1..9: note = Seed: LVVVGAVGV (KRAS G12V)
FVVKGRVGF

SEQ ID NO: 52461 - protein, 9 aa, synthetic construct
  source 1..9: note = Seed: LVVVGAVGV (KRAS G12V)
FVVKGRVGG

SEQ ID NO: 52462 - protein, 9 aa, synthetic construct
  source 1..9: note = Seed: LVVVGAVGV (KRAS G12V)
FVVKGRVGH

SEQ ID NO: 52463 - protein, 9 aa, synthetic construct
  source 1..9: note = Seed: LVVVGAVGV (KRAS G12V)
FVVKGRVGI

SEQ ID NO: 52464 - protein, 9 aa, synthetic construct
  source 1..9: note = Seed: LVVVGAVGV (KRAS G12V)
FVVKGRVGK

SEQ ID NO: 52465 - protein, 9 aa, synthetic construct
  source 1..9: note = Seed: LVVVGAVGV (KRAS G12V)
FVVKGRVGL

SEQ ID NO: 52466 - protein, 9 aa, synthetic construct
  source 1..9: note = Seed: LVVVGAVGV (KRAS G12V)
FVVKGRVGM

SEQ ID NO: 52467 - protein, 9 aa, synthetic construct
  source 1..9: note = Seed: LVVVGAVGV (KRAS G12V)
FVVKGRVGN

SEQ ID NO: 52468 - protein, 9 aa, synthetic construct
  source 1..9: note = Seed: LVVVGAVGV (KRAS G12V)
FVVKGRVGP

SEQ ID NO: 52469 - protein, 9 aa, synthetic construct
  source 1..9: note = Seed: LVVVGAVGV (KRAS G12V)
FVVKGRVGQ

SEQ ID NO: 52470 - protein, 9 aa, synthetic construct
  source 1..9: note = Seed: LVVVGAVGV (KRAS G12V)
FVVKGRVGR

SEQ ID NO: 52471 - protein, 9 aa, synthetic construct
  source 1..9: note = Seed: LVVVGAVGV (KRAS G12V)
FVVKGRVGS

SEQ ID NO: 52472 - protein, 9 aa, synthetic construct
  source 1..9: note = Seed: LVVVGAVGV (KRAS G12V)
FVVKGRVGT

SEQ ID NO: 52473 - protein, 9 aa, synthetic construct
  source 1..9: note = Seed: LVVVGAVGV (KRAS G12V)
FVVKGRVGV

SEQ ID NO: 52474 - protein, 9 aa, synthetic construct
  source 1..9: note = Seed: LVVVGAVGV (KRAS G12V)
FVVKGRVGW

SEQ ID NO: 52475 - protein, 9 aa, synthetic construct
  source 1..9: note = Seed: LVVVGAVGV (KRAS G12V)
FVVKGRVGY

SEQ ID NO: 52476 - protein, 9 aa, synthetic construct
  source 1..9: note = Seed: LVVVGAVGV (KRAS G12V)
FVVKGSVGA

SEQ ID NO: 52477 - protein, 9 aa, synthetic construct
  source 1..9: note = Seed: LVVVGAVGV (KRAS G12V)
FVVKGSVGF

SEQ ID NO: 52478 - protein, 9 aa, synthetic construct
  source 1..9: note = Seed: LVVVGAVGV (KRAS G12V)
FVVKGSVGG

SEQ ID NO: 52479 - protein, 9 aa, synthetic construct
  source 1..9: note = Seed: LVVVGAVGV (KRAS G12V)
FVVKGSVGH

SEQ ID NO: 52480 - protein, 9 aa, synthetic construct
  source 1..9: note = Seed: LVVVGAVGV (KRAS G12V)
FVVKGSVGI

SEQ ID NO: 52481 - protein, 9 aa, synthetic construct
  source 1..9: note = Seed: LVVVGAVGV (KRAS G12V)
FVVKGSVGK

SEQ ID NO: 52482 - protein, 9 aa, synthetic construct
  source 1..9: note = Seed: LVVVGAVGV (KRAS G12V)
FVVKGSVGL

SEQ ID NO: 52483 - protein, 9 aa, synthetic construct
  source 1..9: note = Seed: LVVVGAVGV (KRAS G12V)
FVVKGSVGM

SEQ ID NO: 52484 - protein, 9 aa, synthetic construct
  source 1..9: note = Seed: LVVVGAVGV (KRAS G12V)
FVVKGSVGQ

SEQ ID NO: 52485 - protein, 9 aa, synthetic construct
  source 1..9: note = Seed: LVVVGAVGV (KRAS G12V)
FVVKGSVGR

SEQ ID NO: 52486 - protein, 9 aa, synthetic construct
  source 1..9: note = Seed: LVVVGAVGV (KRAS G12V)
FVVKGSVGS

SEQ ID NO: 52487 - protein, 9 aa, synthetic construct
  source 1..9: note = Seed: LVVVGAVGV (KRAS G12V)
FVVKGSVGT

SEQ ID NO: 52488 - protein, 9 aa, synthetic construct
  source 1..9: note = Seed: LVVVGAVGV (KRAS G12V)
FVVKGSVGV

SEQ ID NO: 52489 - protein, 9 aa, synthetic construct
  source 1..9: note = Seed: LVVVGAVGV (KRAS G12V)
FVVKGSVGY

SEQ ID NO: 52490 - protein, 9 aa, synthetic construct
  source 1..9: note = Seed: LVVVGAVGV (KRAS G12V)
FVVKGTVGA

SEQ ID NO: 52491 - protein, 9 aa, synthetic construct
  source 1..9: note = Seed: LVVVGAVGV (KRAS G12V)
FVVKGTVGG

SEQ ID NO: 52492 - protein, 9 aa, synthetic construct
  source 1..9: note = Seed: LVVVGAVGV (KRAS G12V)
FVVKGTVGH

SEQ ID NO: 52493 - protein, 9 aa, synthetic construct
  source 1..9: note = Seed: LVVVGAVGV (KRAS G12V)
FVVKGTVGI

SEQ ID NO: 52494 - protein, 9 aa, synthetic construct
  source 1..9: note = Seed: LVVVGAVGV (KRAS G12V)
FVVKGTVGK

SEQ ID NO: 52495 - protein, 9 aa, synthetic construct
  source 1..9: note = Seed: LVVVGAVGV (KRAS G12V)
FVVKGTVGL

SEQ ID NO: 52496 - protein, 9 aa, synthetic construct
  source 1..9: note = Seed: LVVVGAVGV (KRAS G12V)
FVVKGTVGM

SEQ ID NO: 52497 - protein, 9 aa, synthetic construct
  source 1..9: note = Seed: LVVVGAVGV (KRAS G12V)
FVVKGTVGQ

SEQ ID NO: 52498 - protein, 9 aa, synthetic construct
  source 1..9: note = Seed: LVVVGAVGV (KRAS G12V)
FVVKGTVGR

SEQ ID NO: 52499 - protein, 9 aa, synthetic construct
  source 1..9: note = Seed: LVVVGAVGV (KRAS G12V)
FVVKGTVGS

SEQ ID NO: 52500 - protein, 9 aa, synthetic construct
  source 1..9: note = Seed: LVVVGAVGV (KRAS G12V)
FVVKGTVGV

SEQ ID NO: 52501 - protein, 9 aa, synthetic construct
  source 1..9: note = Seed: LVVVGAVGV (KRAS G12V)
FVVKGTVGY

SEQ ID NO: 52502 - protein, 9 aa, synthetic construct
  source 1..9: note = Seed: LVVVGAVGV (KRAS G12V)
FVVKGVVGA

SEQ ID NO: 52503 - protein, 9 aa, synthetic construct
  source 1..9: note = Seed: LVVVGAVGV (KRAS G12V)
FVVKGVVGH

SEQ ID NO: 52504 - protein, 9 aa, synthetic construct
  source 1..9: note = Seed: LVVVGAVGV (KRAS G12V)
FVVKGVVGI

SEQ ID NO: 52505 - protein, 9 aa, synthetic construct
  source 1..9: note = Seed: LVVVGAVGV (KRAS G12V)
FVVKGVVGK

SEQ ID NO: 52506 - protein, 9 aa, synthetic construct
  source 1..9: note = Seed: LVVVGAVGV (KRAS G12V)
FVVKGVVGL

SEQ ID NO: 52507 - protein, 9 aa, synthetic construct
  source 1..9: note = Seed: LVVVGAVGV (KRAS G12V)
FVVKGVVGM

SEQ ID NO: 52508 - protein, 9 aa, synthetic construct
  source 1..9: note = Seed: LVVVGAVGV (KRAS G12V)
FVVKGVVGQ

SEQ ID NO: 52509 - protein, 9 aa, synthetic construct
  source 1..9: note = Seed: LVVVGAVGV (KRAS G12V)
FVVKGVVGR

SEQ ID NO: 52510 - protein, 9 aa, synthetic construct
  source 1..9: note = Seed: LVVVGAVGV (KRAS G12V)
FVVKGVVGS

SEQ ID NO: 52511 - protein, 9 aa, synthetic construct
  source 1..9: note = Seed: LVVVGAVGV (KRAS G12V)
FVVKGVVGV

SEQ ID NO: 52512 - protein, 9 aa, synthetic construct
  source 1..9: note = Seed: LVVVGAVGV (KRAS G12V)
FVVKGVVGY

SEQ ID NO: 52513 - protein, 9 aa, synthetic construct
  source 1..9: note = Seed: LVVVGAVGV (KRAS G12V)
FVVLGAVGC

SEQ ID NO: 52514 - protein, 9 aa, synthetic construct
  source 1..9: note = Seed: LVVVGAVGV (KRAS G12V)
FVVLGAVGD

SEQ ID NO: 52515 - protein, 9 aa, synthetic construct
  source 1..9: note = Seed: LVVVGAVGV (KRAS G12V)
FVVLGAVGE

SEQ ID NO: 52516 - protein, 9 aa, synthetic construct
  source 1..9: note = Seed: LVVVGAVGV (KRAS G12V)
FVVLGAVGF

SEQ ID NO: 52517 - protein, 9 aa, synthetic construct
  source 1..9: note = Seed: LVVVGAVGV (KRAS G12V)
FVVLGAVGG

SEQ ID NO: 52518 - protein, 9 aa, synthetic construct
  source 1..9: note = Seed: LVVVGAVGV (KRAS G12V)
FVVLGAVGH

SEQ ID NO: 52519 - protein, 9 aa, synthetic construct
  source 1..9: note = Seed: LVVVGAVGV (KRAS G12V)
FVVLGAVGI

SEQ ID NO: 52520 - protein, 9 aa, synthetic construct
  source 1..9: note = Seed: LVVVGAVGV (KRAS G12V)
FVVLGAVGK

SEQ ID NO: 52521 - protein, 9 aa, synthetic construct
  source 1..9: note = Seed: LVVVGAVGV (KRAS G12V)
FVVLGAVGL

SEQ ID NO: 52522 - protein, 9 aa, synthetic construct
  source 1..9: note = Seed: LVVVGAVGV (KRAS G12V)
FVVLGAVGM

SEQ ID NO: 52523 - protein, 9 aa, synthetic construct
  source 1..9: note = Seed: LVVVGAVGV (KRAS G12V)
FVVLGAVGN

SEQ ID NO: 52524 - protein, 9 aa, synthetic construct
  source 1..9: note = Seed: LVVVGAVGV (KRAS G12V)
FVVLGAVGP

SEQ ID NO: 52525 - protein, 9 aa, synthetic construct
  source 1..9: note = Seed: LVVVGAVGV (KRAS G12V)
FVVLGAVGQ

SEQ ID NO: 52526 - protein, 9 aa, synthetic construct
  source 1..9: note = Seed: LVVVGAVGV (KRAS G12V)
FVVLGAVGR

SEQ ID NO: 52527 - protein, 9 aa, synthetic construct
  source 1..9: note = Seed: LVVVGAVGV (KRAS G12V)
FVVLGAVGS

SEQ ID NO: 52528 - protein, 9 aa, synthetic construct
  source 1..9: note = Seed: LVVVGAVGV (KRAS G12V)
FVVLGAVGV

SEQ ID NO: 52529 - protein, 9 aa, synthetic construct
  source 1..9: note = Seed: LVVVGAVGV (KRAS G12V)
FVVLGAVGW

SEQ ID NO: 52530 - protein, 9 aa, synthetic construct
  source 1..9: note = Seed: LVVVGAVGV (KRAS G12V)
FVVLGAVGY

SEQ ID NO: 52531 - protein, 9 aa, synthetic construct
  source 1..9: note = Seed: LVVVGAVGV (KRAS G12V)
FVVLGCVGA

SEQ ID NO: 52532 - protein, 9 aa, synthetic construct
  source 1..9: note = Seed: LVVVGAVGV (KRAS G12V)
FVVLGCVGH

SEQ ID NO: 52533 - protein, 9 aa, synthetic construct
  source 1..9: note = Seed: LVVVGAVGV (KRAS G12V)
FVVLGCVGI

SEQ ID NO: 52534 - protein, 9 aa, synthetic construct
  source 1..9: note = Seed: LVVVGAVGV (KRAS G12V)
FVVLGCVGL

SEQ ID NO: 52535 - protein, 9 aa, synthetic construct
  source 1..9: note = Seed: LVVVGAVGV (KRAS G12V)
FVVLGCVGM

SEQ ID NO: 52536 - protein, 9 aa, synthetic construct
  source 1..9: note = Seed: LVVVGAVGV (KRAS G12V)
FVVLGCVGN

SEQ ID NO: 52537 - protein, 9 aa, synthetic construct
  source 1..9: note = Seed: LVVVGAVGV (KRAS G12V)
FVVLGCVGS

SEQ ID NO: 52538 - protein, 9 aa, synthetic construct
  source 1..9: note = Seed: LVVVGAVGV (KRAS G12V)
FVVLGCVGT

SEQ ID NO: 52539 - protein, 9 aa, synthetic construct
  source 1..9: note = Seed: LVVVGAVGV (KRAS G12V)
FVVLGCVGV

SEQ ID NO: 52540 - protein, 9 aa, synthetic construct
  source 1..9: note = Seed: LVVVGAVGV (KRAS G12V)
FVVLGDVGA

SEQ ID NO: 52541 - protein, 9 aa, synthetic construct
  source 1..9: note = Seed: LVVVGAVGV (KRAS G12V)
FVVLGDVGC

SEQ ID NO: 52542 - protein, 9 aa, synthetic construct
  source 1..9: note = Seed: LVVVGAVGV (KRAS G12V)
FVVLGDVGD

SEQ ID NO: 52543 - protein, 9 aa, synthetic construct
  source 1..9: note = Seed: LVVVGAVGV (KRAS G12V)
FVVLGDVGE

SEQ ID NO: 52544 - protein, 9 aa, synthetic construct
  source 1..9: note = Seed: LVVVGAVGV (KRAS G12V)
FVVLGDVGF

SEQ ID NO: 52545 - protein, 9 aa, synthetic construct
  source 1..9: note = Seed: LVVVGAVGV (KRAS G12V)
FVVLGDVGG

SEQ ID NO: 52546 - protein, 9 aa, synthetic construct
  source 1..9: note = Seed: LVVVGAVGV (KRAS G12V)
FVVLGDVGH

SEQ ID NO: 52547 - protein, 9 aa, synthetic construct
  source 1..9: note = Seed: LVVVGAVGV (KRAS G12V)
FVVLGDVGI

SEQ ID NO: 52548 - protein, 9 aa, synthetic construct
  source 1..9: note = Seed: LVVVGAVGV (KRAS G12V)
FVVLGDVGL

SEQ ID NO: 52549 - protein, 9 aa, synthetic construct
  source 1..9: note = Seed: LVVVGAVGV (KRAS G12V)
FVVLGDVGM

SEQ ID NO: 52550 - protein, 9 aa, synthetic construct
  source 1..9: note = Seed: LVVVGAVGV (KRAS G12V)
FVVLGDVGN

SEQ ID NO: 52551 - protein, 9 aa, synthetic construct
  source 1..9: note = Seed: LVVVGAVGV (KRAS G12V)
FVVLGDVGP

SEQ ID NO: 52552 - protein, 9 aa, synthetic construct
  source 1..9: note = Seed: LVVVGAVGV (KRAS G12V)
FVVLGDVGQ

SEQ ID NO: 52553 - protein, 9 aa, synthetic construct
  source 1..9: note = Seed: LVVVGAVGV (KRAS G12V)
FVVLGDVGS

SEQ ID NO: 52554 - protein, 9 aa, synthetic construct
  source 1..9: note = Seed: LVVVGAVGV (KRAS G12V)
FVVLGDVGT

SEQ ID NO: 52555 - protein, 9 aa, synthetic construct
  source 1..9: note = Seed: LVVVGAVGV (KRAS G12V)
FVVLGDVGV

SEQ ID NO: 52556 - protein, 9 aa, synthetic construct
  source 1..9: note = Seed: LVVVGAVGV (KRAS G12V)
FVVLGDVGY

SEQ ID NO: 52557 - protein, 9 aa, synthetic construct
  source 1..9: note = Seed: LVVVGAVGV (KRAS G12V)
FVVLGEVGA

SEQ ID NO: 52558 - protein, 9 aa, synthetic construct
  source 1..9: note = Seed: LVVVGAVGV (KRAS G12V)
FVVLGEVGF

SEQ ID NO: 52559 - protein, 9 aa, synthetic construct
  source 1..9: note = Seed: LVVVGAVGV (KRAS G12V)
FVVLGEVGG

SEQ ID NO: 52560 - protein, 9 aa, synthetic construct
  source 1..9: note = Seed: LVVVGAVGV (KRAS G12V)
FVVLGEVGH

SEQ ID NO: 52561 - protein, 9 aa, synthetic construct
  source 1..9: note = Seed: LVVVGAVGV (KRAS G12V)
FVVLGEVGI

SEQ ID NO: 52562 - protein, 9 aa, synthetic construct
  source 1..9: note = Seed: LVVVGAVGV (KRAS G12V)
FVVLGEVGK

SEQ ID NO: 52563 - protein, 9 aa, synthetic construct
  source 1..9: note = Seed: LVVVGAVGV (KRAS G12V)
FVVLGEVGL

SEQ ID NO: 52564 - protein, 9 aa, synthetic construct
  source 1..9: note = Seed: LVVVGAVGV (KRAS G12V)
FVVLGEVGM

SEQ ID NO: 52565 - protein, 9 aa, synthetic construct
  source 1..9: note = Seed: LVVVGAVGV (KRAS G12V)
FVVLGEVGN

SEQ ID NO: 52566 - protein, 9 aa, synthetic construct
  source 1..9: note = Seed: LVVVGAVGV (KRAS G12V)
FVVLGEVGP

SEQ ID NO: 52567 - protein, 9 aa, synthetic construct
  source 1..9: note = Seed: LVVVGAVGV (KRAS G12V)
FVVLGEVGR

SEQ ID NO: 52568 - protein, 9 aa, synthetic construct
  source 1..9: note = Seed: LVVVGAVGV (KRAS G12V)
FVVLGEVGS

SEQ ID NO: 52569 - protein, 9 aa, synthetic construct
  source 1..9: note = Seed: LVVVGAVGV (KRAS G12V)
FVVLGEVGT

SEQ ID NO: 52570 - protein, 9 aa, synthetic construct
  source 1..9: note = Seed: LVVVGAVGV (KRAS G12V)
FVVLGEVGV

SEQ ID NO: 52571 - protein, 9 aa, synthetic construct
  source 1..9: note = Seed: LVVVGAVGV (KRAS G12V)
FVVLGEVGY

SEQ ID NO: 52572 - protein, 9 aa, synthetic construct
  source 1..9: note = Seed: LVVVGAVGV (KRAS G12V)
FVVLGFVGA

SEQ ID NO: 52573 - protein, 9 aa, synthetic construct
  source 1..9: note = Seed: LVVVGAVGV (KRAS G12V)
FVVLGFVGE

SEQ ID NO: 52574 - protein, 9 aa, synthetic construct
  source 1..9: note = Seed: LVVVGAVGV (KRAS G12V)
FVVLGFVGR

SEQ ID NO: 52575 - protein, 9 aa, synthetic construct
  source 1..9: note = Seed: LVVVGAVGV (KRAS G12V)
FVVLGGVGC

SEQ ID NO: 52576 - protein, 9 aa, synthetic construct
  source 1..9: note = Seed: LVVVGAVGV (KRAS G12V)
FVVLGGVGD

SEQ ID NO: 52577 - protein, 9 aa, synthetic construct
  source 1..9: note = Seed: LVVVGAVGV (KRAS G12V)
FVVLGGVGE

SEQ ID NO: 52578 - protein, 9 aa, synthetic construct
  source 1..9: note = Seed: LVVVGAVGV (KRAS G12V)
FVVLGGVGF

SEQ ID NO: 52579 - protein, 9 aa, synthetic construct
  source 1..9: note = Seed: LVVVGAVGV (KRAS G12V)
FVVLGGVGG

SEQ ID NO: 52580 - protein, 9 aa, synthetic construct
  source 1..9: note = Seed: LVVVGAVGV (KRAS G12V)
FVVLGGVGH

SEQ ID NO: 52581 - protein, 9 aa, synthetic construct
  source 1..9: note = Seed: LVVVGAVGV (KRAS G12V)
FVVLGGVGI

SEQ ID NO: 52582 - protein, 9 aa, synthetic construct
  source 1..9: note = Seed: LVVVGAVGV (KRAS G12V)
FVVLGGVGK

SEQ ID NO: 52583 - protein, 9 aa, synthetic construct
  source 1..9: note = Seed: LVVVGAVGV (KRAS G12V)
FVVLGGVGN

SEQ ID NO: 52584 - protein, 9 aa, synthetic construct
  source 1..9: note = Seed: LVVVGAVGV (KRAS G12V)
FVVLGGVGP

SEQ ID NO: 52585 - protein, 9 aa, synthetic construct
  source 1..9: note = Seed: LVVVGAVGV (KRAS G12V)
FVVLGGVGQ

SEQ ID NO: 52586 - protein, 9 aa, synthetic construct
  source 1..9: note = Seed: LVVVGAVGV (KRAS G12V)
FVVLGGVGR

SEQ ID NO: 52587 - protein, 9 aa, synthetic construct
  source 1..9: note = Seed: LVVVGAVGV (KRAS G12V)
FVVLGGVGW

SEQ ID NO: 52588 - protein, 9 aa, synthetic construct
  source 1..9: note = Seed: LVVVGAVGV (KRAS G12V)
FVVLGGVGY

SEQ ID NO: 52589 - protein, 9 aa, synthetic construct
  source 1..9: note = Seed: LVVVGAVGV (KRAS G12V)
FVVLGHVGA

SEQ ID NO: 52590 - protein, 9 aa, synthetic construct
  source 1..9: note = Seed: LVVVGAVGV (KRAS G12V)
FVVLGHVGF

SEQ ID NO: 52591 - protein, 9 aa, synthetic construct
  source 1..9: note = Seed: LVVVGAVGV (KRAS G12V)
FVVLGHVGG

SEQ ID NO: 52592 - protein, 9 aa, synthetic construct
  source 1..9: note = Seed: LVVVGAVGV (KRAS G12V)
FVVLGHVGH

SEQ ID NO: 52593 - protein, 9 aa, synthetic construct
  source 1..9: note = Seed: LVVVGAVGV (KRAS G12V)
FVVLGHVGI

SEQ ID NO: 52594 - protein, 9 aa, synthetic construct
  source 1..9: note = Seed: LVVVGAVGV (KRAS G12V)
FVVLGHVGK

SEQ ID NO: 52595 - protein, 9 aa, synthetic construct
  source 1..9: note = Seed: LVVVGAVGV (KRAS G12V)
FVVLGHVGL

SEQ ID NO: 52596 - protein, 9 aa, synthetic construct
  source 1..9: note = Seed: LVVVGAVGV (KRAS G12V)
FVVLGHVGM

SEQ ID NO: 52597 - protein, 9 aa, synthetic construct
  source 1..9: note = Seed: LVVVGAVGV (KRAS G12V)
FVVLGHVGN

SEQ ID NO: 52598 - protein, 9 aa, synthetic construct
  source 1..9: note = Seed: LVVVGAVGV (KRAS G12V)
FVVLGHVGP

SEQ ID NO: 52599 - protein, 9 aa, synthetic construct
  source 1..9: note = Seed: LVVVGAVGV (KRAS G12V)
FVVLGHVGQ

SEQ ID NO: 52600 - protein, 9 aa, synthetic construct
  source 1..9: note = Seed: LVVVGAVGV (KRAS G12V)
FVVLGHVGR

SEQ ID NO: 52601 - protein, 9 aa, synthetic construct
  source 1..9: note = Seed: LVVVGAVGV (KRAS G12V)
FVVLGHVGS

SEQ ID NO: 52602 - protein, 9 aa, synthetic construct
  source 1..9: note = Seed: LVVVGAVGV (KRAS G12V)
FVVLGHVGT

SEQ ID NO: 52603 - protein, 9 aa, synthetic construct
  source 1..9: note = Seed: LVVVGAVGV (KRAS G12V)
FVVLGHVGV

SEQ ID NO: 52604 - protein, 9 aa, synthetic construct
  source 1..9: note = Seed: LVVVGAVGV (KRAS G12V)
FVVLGHVGY

SEQ ID NO: 52605 - protein, 9 aa, synthetic construct
  source 1..9: note = Seed: LVVVGAVGV (KRAS G12V)
FVVLGIVGA

SEQ ID NO: 52606 - protein, 9 aa, synthetic construct
  source 1..9: note = Seed: LVVVGAVGV (KRAS G12V)
FVVLGIVGD

SEQ ID NO: 52607 - protein, 9 aa, synthetic construct
  source 1..9: note = Seed: LVVVGAVGV (KRAS G12V)
FVVLGIVGE

SEQ ID NO: 52608 - protein, 9 aa, synthetic construct
  source 1..9: note = Seed: LVVVGAVGV (KRAS G12V)
FVVLGIVGG

SEQ ID NO: 52609 - protein, 9 aa, synthetic construct
  source 1..9: note = Seed: LVVVGAVGV (KRAS G12V)
FVVLGIVGH

SEQ ID NO: 52610 - protein, 9 aa, synthetic construct
  source 1..9: note = Seed: LVVVGAVGV (KRAS G12V)
FVVLGIVGI

SEQ ID NO: 52611 - protein, 9 aa, synthetic construct
  source 1..9: note = Seed: LVVVGAVGV (KRAS G12V)
FVVLGIVGK

SEQ ID NO: 52612 - protein, 9 aa, synthetic construct
  source 1..9: note = Seed: LVVVGAVGV (KRAS G12V)
FVVLGIVGL

SEQ ID NO: 52613 - protein, 9 aa, synthetic construct
  source 1..9: note = Seed: LVVVGAVGV (KRAS G12V)
FVVLGIVGM

SEQ ID NO: 52614 - protein, 9 aa, synthetic construct
  source 1..9: note = Seed: LVVVGAVGV (KRAS G12V)
FVVLGIVGN

SEQ ID NO: 52615 - protein, 9 aa, synthetic construct
  source 1..9: note = Seed: LVVVGAVGV (KRAS G12V)
FVVLGIVGP

SEQ ID NO: 52616 - protein, 9 aa, synthetic construct
  source 1..9: note = Seed: LVVVGAVGV (KRAS G12V)
FVVLGIVGQ

SEQ ID NO: 52617 - protein, 9 aa, synthetic construct
  source 1..9: note = Seed: LVVVGAVGV (KRAS G12V)
FVVLGIVGR

SEQ ID NO: 52618 - protein, 9 aa, synthetic construct
  source 1..9: note = Seed: LVVVGAVGV (KRAS G12V)
FVVLGIVGS

SEQ ID NO: 52619 - protein, 9 aa, synthetic construct
  source 1..9: note = Seed: LVVVGAVGV (KRAS G12V)
FVVLGIVGT

SEQ ID NO: 52620 - protein, 9 aa, synthetic construct
  source 1..9: note = Seed: LVVVGAVGV (KRAS G12V)
FVVLGIVGV

SEQ ID NO: 52621 - protein, 9 aa, synthetic construct
  source 1..9: note = Seed: LVVVGAVGV (KRAS G12V)
FVVLGIVGY

SEQ ID NO: 52622 - protein, 9 aa, synthetic construct
  source 1..9: note = Seed: LVVVGAVGV (KRAS G12V)
FVVLGKVGA

SEQ ID NO: 52623 - protein, 9 aa, synthetic construct
  source 1..9: note = Seed: LVVVGAVGV (KRAS G12V)
FVVLGKVGD

SEQ ID NO: 52624 - protein, 9 aa, synthetic construct
  source 1..9: note = Seed: LVVVGAVGV (KRAS G12V)
FVVLGKVGE

SEQ ID NO: 52625 - protein, 9 aa, synthetic construct
  source 1..9: note = Seed: LVVVGAVGV (KRAS G12V)
FVVLGKVGF

SEQ ID NO: 52626 - protein, 9 aa, synthetic construct
  source 1..9: note = Seed: LVVVGAVGV (KRAS G12V)
FVVLGKVGG

SEQ ID NO: 52627 - protein, 9 aa, synthetic construct
  source 1..9: note = Seed: LVVVGAVGV (KRAS G12V)
FVVLGKVGH

SEQ ID NO: 52628 - protein, 9 aa, synthetic construct
  source 1..9: note = Seed: LVVVGAVGV (KRAS G12V)
FVVLGKVGI

SEQ ID NO: 52629 - protein, 9 aa, synthetic construct
  source 1..9: note = Seed: LVVVGAVGV (KRAS G12V)
FVVLGKVGK

SEQ ID NO: 52630 - protein, 9 aa, synthetic construct
  source 1..9: note = Seed: LVVVGAVGV (KRAS G12V)
FVVLGKVGL

SEQ ID NO: 52631 - protein, 9 aa, synthetic construct
  source 1..9: note = Seed: LVVVGAVGV (KRAS G12V)
FVVLGKVGM

SEQ ID NO: 52632 - protein, 9 aa, synthetic construct
  source 1..9: note = Seed: LVVVGAVGV (KRAS G12V)
FVVLGKVGN

SEQ ID NO: 52633 - protein, 9 aa, synthetic construct
  source 1..9: note = Seed: LVVVGAVGV (KRAS G12V)
FVVLGKVGP

SEQ ID NO: 52634 - protein, 9 aa, synthetic construct
  source 1..9: note = Seed: LVVVGAVGV (KRAS G12V)
FVVLGKVGQ

SEQ ID NO: 52635 - protein, 9 aa, synthetic construct
  source 1..9: note = Seed: LVVVGAVGV (KRAS G12V)
FVVLGKVGR

SEQ ID NO: 52636 - protein, 9 aa, synthetic construct
  source 1..9: note = Seed: LVVVGAVGV (KRAS G12V)
FVVLGKVGS

SEQ ID NO: 52637 - protein, 9 aa, synthetic construct
  source 1..9: note = Seed: LVVVGAVGV (KRAS G12V)
FVVLGKVGT

SEQ ID NO: 52638 - protein, 9 aa, synthetic construct
  source 1..9: note = Seed: LVVVGAVGV (KRAS G12V)
FVVLGKVGV

SEQ ID NO: 52639 - protein, 9 aa, synthetic construct
  source 1..9: note = Seed: LVVVGAVGV (KRAS G12V)
FVVLGKVGY

SEQ ID NO: 52640 - protein, 9 aa, synthetic construct
  source 1..9: note = Seed: LVVVGAVGV (KRAS G12V)
FVVLGLVGA

SEQ ID NO: 52641 - protein, 9 aa, synthetic construct
  source 1..9: note = Seed: LVVVGAVGV (KRAS G12V)
FVVLGLVGD

SEQ ID NO: 52642 - protein, 9 aa, synthetic construct
  source 1..9: note = Seed: LVVVGAVGV (KRAS G12V)
FVVLGLVGE

SEQ ID NO: 52643 - protein, 9 aa, synthetic construct
  source 1..9: note = Seed: LVVVGAVGV (KRAS G12V)
FVVLGLVGG

SEQ ID NO: 52644 - protein, 9 aa, synthetic construct
  source 1..9: note = Seed: LVVVGAVGV (KRAS G12V)
FVVLGLVGH

SEQ ID NO: 52645 - protein, 9 aa, synthetic construct
  source 1..9: note = Seed: LVVVGAVGV (KRAS G12V)
FVVLGLVGI

SEQ ID NO: 52646 - protein, 9 aa, synthetic construct
  source 1..9: note = Seed: LVVVGAVGV (KRAS G12V)
FVVLGLVGK

SEQ ID NO: 52647 - protein, 9 aa, synthetic construct
  source 1..9: note = Seed: LVVVGAVGV (KRAS G12V)
FVVLGLVGL

SEQ ID NO: 52648 - protein, 9 aa, synthetic construct
  source 1..9: note = Seed: LVVVGAVGV (KRAS G12V)
FVVLGLVGM

SEQ ID NO: 52649 - protein, 9 aa, synthetic construct
  source 1..9: note = Seed: LVVVGAVGV (KRAS G12V)
FVVLGLVGN

SEQ ID NO: 52650 - protein, 9 aa, synthetic construct
  source 1..9: note = Seed: LVVVGAVGV (KRAS G12V)
FVVLGLVGP

SEQ ID NO: 52651 - protein, 9 aa, synthetic construct
  source 1..9: note = Seed: LVVVGAVGV (KRAS G12V)
FVVLGLVGQ

SEQ ID NO: 52652 - protein, 9 aa, synthetic construct
  source 1..9: note = Seed: LVVVGAVGV (KRAS G12V)
FVVLGLVGR

SEQ ID NO: 52653 - protein, 9 aa, synthetic construct
  source 1..9: note = Seed: LVVVGAVGV (KRAS G12V)
FVVLGLVGS

SEQ ID NO: 52654 - protein, 9 aa, synthetic construct
  source 1..9: note = Seed: LVVVGAVGV (KRAS G12V)
FVVLGLVGT

SEQ ID NO: 52655 - protein, 9 aa, synthetic construct
  source 1..9: note = Seed: LVVVGAVGV (KRAS G12V)
FVVLGLVGV

SEQ ID NO: 52656 - protein, 9 aa, synthetic construct
  source 1..9: note = Seed: LVVVGAVGV (KRAS G12V)
FVVLGLVGY

SEQ ID NO: 52657 - protein, 9 aa, synthetic construct
  source 1..9: note = Seed: LVVVGAVGV (KRAS G12V)
FVVLGMVGA

SEQ ID NO: 52658 - protein, 9 aa, synthetic construct
  source 1..9: note = Seed: LVVVGAVGV (KRAS G12V)
FVVLGMVGD

SEQ ID NO: 52659 - protein, 9 aa, synthetic construct
  source 1..9: note = Seed: LVVVGAVGV (KRAS G12V)
FVVLGMVGE

SEQ ID NO: 52660 - protein, 9 aa, synthetic construct
  source 1..9: note = Seed: LVVVGAVGV (KRAS G12V)
FVVLGMVGF

SEQ ID NO: 52661 - protein, 9 aa, synthetic construct
  source 1..9: note = Seed: LVVVGAVGV (KRAS G12V)
FVVLGMVGG

SEQ ID NO: 52662 - protein, 9 aa, synthetic construct
  source 1..9: note = Seed: LVVVGAVGV (KRAS G12V)
FVVLGMVGH

SEQ ID NO: 52663 - protein, 9 aa, synthetic construct
  source 1..9: note = Seed: LVVVGAVGV (KRAS G12V)
FVVLGMVGI

SEQ ID NO: 52664 - protein, 9 aa, synthetic construct
  source 1..9: note = Seed: LVVVGAVGV (KRAS G12V)
FVVLGMVGK

SEQ ID NO: 52665 - protein, 9 aa, synthetic construct
  source 1..9: note = Seed: LVVVGAVGV (KRAS G12V)
FVVLGMVGL

SEQ ID NO: 52666 - protein, 9 aa, synthetic construct
  source 1..9: note = Seed: LVVVGAVGV (KRAS G12V)
FVVLGMVGM

SEQ ID NO: 52667 - protein, 9 aa, synthetic construct
  source 1..9: note = Seed: LVVVGAVGV (KRAS G12V)
FVVLGMVGN

SEQ ID NO: 52668 - protein, 9 aa, synthetic construct
  source 1..9: note = Seed: LVVVGAVGV (KRAS G12V)
FVVLGMVGP

SEQ ID NO: 52669 - protein, 9 aa, synthetic construct
  source 1..9: note = Seed: LVVVGAVGV (KRAS G12V)
FVVLGMVGQ

SEQ ID NO: 52670 - protein, 9 aa, synthetic construct
  source 1..9: note = Seed: LVVVGAVGV (KRAS G12V)
FVVLGMVGR

SEQ ID NO: 52671 - protein, 9 aa, synthetic construct
  source 1..9: note = Seed: LVVVGAVGV (KRAS G12V)
FVVLGMVGS

SEQ ID NO: 52672 - protein, 9 aa, synthetic construct
  source 1..9: note = Seed: LVVVGAVGV (KRAS G12V)
FVVLGMVGT

SEQ ID NO: 52673 - protein, 9 aa, synthetic construct
  source 1..9: note = Seed: LVVVGAVGV (KRAS G12V)
FVVLGMVGV

SEQ ID NO: 52674 - protein, 9 aa, synthetic construct
  source 1..9: note = Seed: LVVVGAVGV (KRAS G12V)
FVVLGMVGY

SEQ ID NO: 52675 - protein, 9 aa, synthetic construct
  source 1..9: note = Seed: LVVVGAVGV (KRAS G12V)
FVVLGNVGA

SEQ ID NO: 52676 - protein, 9 aa, synthetic construct
  source 1..9: note = Seed: LVVVGAVGV (KRAS G12V)
FVVLGNVGC

SEQ ID NO: 52677 - protein, 9 aa, synthetic construct
  source 1..9: note = Seed: LVVVGAVGV (KRAS G12V)
FVVLGNVGD

SEQ ID NO: 52678 - protein, 9 aa, synthetic construct
  source 1..9: note = Seed: LVVVGAVGV (KRAS G12V)
FVVLGNVGE

SEQ ID NO: 52679 - protein, 9 aa, synthetic construct
  source 1..9: note = Seed: LVVVGAVGV (KRAS G12V)
FVVLGNVGF

SEQ ID NO: 52680 - protein, 9 aa, synthetic construct
  source 1..9: note = Seed: LVVVGAVGV (KRAS G12V)
FVVLGNVGG

SEQ ID NO: 52681 - protein, 9 aa, synthetic construct
  source 1..9: note = Seed: LVVVGAVGV (KRAS G12V)
FVVLGNVGH

SEQ ID NO: 52682 - protein, 9 aa, synthetic construct
  source 1..9: note = Seed: LVVVGAVGV (KRAS G12V)
FVVLGNVGI

SEQ ID NO: 52683 - protein, 9 aa, synthetic construct
  source 1..9: note = Seed: LVVVGAVGV (KRAS G12V)
FVVLGNVGK

SEQ ID NO: 52684 - protein, 9 aa, synthetic construct
  source 1..9: note = Seed: LVVVGAVGV (KRAS G12V)
FVVLGNVGL

SEQ ID NO: 52685 - protein, 9 aa, synthetic construct
  source 1..9: note = Seed: LVVVGAVGV (KRAS G12V)
FVVLGNVGM

SEQ ID NO: 52686 - protein, 9 aa, synthetic construct
  source 1..9: note = Seed: LVVVGAVGV (KRAS G12V)
FVVLGNVGN

SEQ ID NO: 52687 - protein, 9 aa, synthetic construct
  source 1..9: note = Seed: LVVVGAVGV (KRAS G12V)
FVVLGNVGP

SEQ ID NO: 52688 - protein, 9 aa, synthetic construct
  source 1..9: note = Seed: LVVVGAVGV (KRAS G12V)
FVVLGNVGQ

SEQ ID NO: 52689 - protein, 9 aa, synthetic construct
  source 1..9: note = Seed: LVVVGAVGV (KRAS G12V)
FVVLGNVGR

SEQ ID NO: 52690 - protein, 9 aa, synthetic construct
  source 1..9: note = Seed: LVVVGAVGV (KRAS G12V)
FVVLGNVGS

SEQ ID NO: 52691 - protein, 9 aa, synthetic construct
  source 1..9: note = Seed: LVVVGAVGV (KRAS G12V)
FVVLGNVGT

SEQ ID NO: 52692 - protein, 9 aa, synthetic construct
  source 1..9: note = Seed: LVVVGAVGV (KRAS G12V)
FVVLGNVGV

SEQ ID NO: 52693 - protein, 9 aa, synthetic construct
  source 1..9: note = Seed: LVVVGAVGV (KRAS G12V)
FVVLGNVGW

SEQ ID NO: 52694 - protein, 9 aa, synthetic construct
  source 1..9: note = Seed: LVVVGAVGV (KRAS G12V)
FVVLGNVGY

SEQ ID NO: 52695 - protein, 9 aa, synthetic construct
  source 1..9: note = Seed: LVVVGAVGV (KRAS G12V)
FVVLGPVGC

SEQ ID NO: 52696 - protein, 9 aa, synthetic construct
  source 1..9: note = Seed: LVVVGAVGV (KRAS G12V)
FVVLGPVGD

SEQ ID NO: 52697 - protein, 9 aa, synthetic construct
  source 1..9: note = Seed: LVVVGAVGV (KRAS G12V)
FVVLGPVGE

SEQ ID NO: 52698 - protein, 9 aa, synthetic construct
  source 1..9: note = Seed: LVVVGAVGV (KRAS G12V)
FVVLGPVGF

SEQ ID NO: 52699 - protein, 9 aa, synthetic construct
  source 1..9: note = Seed: LVVVGAVGV (KRAS G12V)
FVVLGPVGG

SEQ ID NO: 52700 - protein, 9 aa, synthetic construct
  source 1..9: note = Seed: LVVVGAVGV (KRAS G12V)
FVVLGPVGH

SEQ ID NO: 52701 - protein, 9 aa, synthetic construct
  source 1..9: note = Seed: LVVVGAVGV (KRAS G12V)
FVVLGPVGK

SEQ ID NO: 52702 - protein, 9 aa, synthetic construct
  source 1..9: note = Seed: LVVVGAVGV (KRAS G12V)
FVVLGPVGM

SEQ ID NO: 52703 - protein, 9 aa, synthetic construct
  source 1..9: note = Seed: LVVVGAVGV (KRAS G12V)
FVVLGPVGN

SEQ ID NO: 52704 - protein, 9 aa, synthetic construct
  source 1..9: note = Seed: LVVVGAVGV (KRAS G12V)
FVVLGPVGP

SEQ ID NO: 52705 - protein, 9 aa, synthetic construct
  source 1..9: note = Seed: LVVVGAVGV (KRAS G12V)
FVVLGPVGQ

SEQ ID NO: 52706 - protein, 9 aa, synthetic construct
  source 1..9: note = Seed: LVVVGAVGV (KRAS G12V)
FVVLGPVGR

SEQ ID NO: 52707 - protein, 9 aa, synthetic construct
  source 1..9: note = Seed: LVVVGAVGV (KRAS G12V)
FVVLGPVGS

SEQ ID NO: 52708 - protein, 9 aa, synthetic construct
  source 1..9: note = Seed: LVVVGAVGV (KRAS G12V)
FVVLGPVGW

SEQ ID NO: 52709 - protein, 9 aa, synthetic construct
  source 1..9: note = Seed: LVVVGAVGV (KRAS G12V)
FVVLGPVGY

SEQ ID NO: 52710 - protein, 9 aa, synthetic construct
  source 1..9: note = Seed: LVVVGAVGV (KRAS G12V)
FVVLGQVGA

SEQ ID NO: 52711 - protein, 9 aa, synthetic construct
  source 1..9: note = Seed: LVVVGAVGV (KRAS G12V)
FVVLGQVGF

SEQ ID NO: 52712 - protein, 9 aa, synthetic construct
  source 1..9: note = Seed: LVVVGAVGV (KRAS G12V)
FVVLGQVGG

SEQ ID NO: 52713 - protein, 9 aa, synthetic construct
  source 1..9: note = Seed: LVVVGAVGV (KRAS G12V)
FVVLGQVGH

SEQ ID NO: 52714 - protein, 9 aa, synthetic construct
  source 1..9: note = Seed: LVVVGAVGV (KRAS G12V)
FVVLGQVGI

SEQ ID NO: 52715 - protein, 9 aa, synthetic construct
  source 1..9: note = Seed: LVVVGAVGV (KRAS G12V)
FVVLGQVGK

SEQ ID NO: 52716 - protein, 9 aa, synthetic construct
  source 1..9: note = Seed: LVVVGAVGV (KRAS G12V)
FVVLGQVGL

SEQ ID NO: 52717 - protein, 9 aa, synthetic construct
  source 1..9: note = Seed: LVVVGAVGV (KRAS G12V)
FVVLGQVGM

SEQ ID NO: 52718 - protein, 9 aa, synthetic construct
  source 1..9: note = Seed: LVVVGAVGV (KRAS G12V)
FVVLGQVGN

SEQ ID NO: 52719 - protein, 9 aa, synthetic construct
  source 1..9: note = Seed: LVVVGAVGV (KRAS G12V)
FVVLGQVGP

SEQ ID NO: 52720 - protein, 9 aa, synthetic construct
  source 1..9: note = Seed: LVVVGAVGV (KRAS G12V)
FVVLGQVGQ

SEQ ID NO: 52721 - protein, 9 aa, synthetic construct
  source 1..9: note = Seed: LVVVGAVGV (KRAS G12V)
FVVLGQVGR

SEQ ID NO: 52722 - protein, 9 aa, synthetic construct
  source 1..9: note = Seed: LVVVGAVGV (KRAS G12V)
FVVLGQVGS

SEQ ID NO: 52723 - protein, 9 aa, synthetic construct
  source 1..9: note = Seed: LVVVGAVGV (KRAS G12V)
FVVLGQVGT

SEQ ID NO: 52724 - protein, 9 aa, synthetic construct
  source 1..9: note = Seed: LVVVGAVGV (KRAS G12V)
FVVLGQVGV

SEQ ID NO: 52725 - protein, 9 aa, synthetic construct
  source 1..9: note = Seed: LVVVGAVGV (KRAS G12V)
FVVLGQVGY

SEQ ID NO: 52726 - protein, 9 aa, synthetic construct
  source 1..9: note = Seed: LVVVGAVGV (KRAS G12V)
FVVLGRVGA

SEQ ID NO: 52727 - protein, 9 aa, synthetic construct
  source 1..9: note = Seed: LVVVGAVGV (KRAS G12V)
FVVLGRVGD

SEQ ID NO: 52728 - protein, 9 aa, synthetic construct
  source 1..9: note = Seed: LVVVGAVGV (KRAS G12V)
FVVLGRVGE

SEQ ID NO: 52729 - protein, 9 aa, synthetic construct
  source 1..9: note = Seed: LVVVGAVGV (KRAS G12V)
FVVLGRVGF

SEQ ID NO: 52730 - protein, 9 aa, synthetic construct
  source 1..9: note = Seed: LVVVGAVGV (KRAS G12V)
FVVLGRVGG

SEQ ID NO: 52731 - protein, 9 aa, synthetic construct
  source 1..9: note = Seed: LVVVGAVGV (KRAS G12V)
FVVLGRVGH

SEQ ID NO: 52732 - protein, 9 aa, synthetic construct
  source 1..9: note = Seed: LVVVGAVGV (KRAS G12V)
FVVLGRVGI

SEQ ID NO: 52733 - protein, 9 aa, synthetic construct
  source 1..9: note = Seed: LVVVGAVGV (KRAS G12V)
FVVLGRVGK

SEQ ID NO: 52734 - protein, 9 aa, synthetic construct
  source 1..9: note = Seed: LVVVGAVGV (KRAS G12V)
FVVLGRVGL

SEQ ID NO: 52735 - protein, 9 aa, synthetic construct
  source 1..9: note = Seed: LVVVGAVGV (KRAS G12V)
FVVLGRVGM

SEQ ID NO: 52736 - protein, 9 aa, synthetic construct
  source 1..9: note = Seed: LVVVGAVGV (KRAS G12V)
FVVLGRVGN

SEQ ID NO: 52737 - protein, 9 aa, synthetic construct
  source 1..9: note = Seed: LVVVGAVGV (KRAS G12V)
FVVLGRVGP

SEQ ID NO: 52738 - protein, 9 aa, synthetic construct
  source 1..9: note = Seed: LVVVGAVGV (KRAS G12V)
FVVLGRVGQ

SEQ ID NO: 52739 - protein, 9 aa, synthetic construct
  source 1..9: note = Seed: LVVVGAVGV (KRAS G12V)
FVVLGRVGR

SEQ ID NO: 52740 - protein, 9 aa, synthetic construct
  source 1..9: note = Seed: LVVVGAVGV (KRAS G12V)
FVVLGRVGS

SEQ ID NO: 52741 - protein, 9 aa, synthetic construct
  source 1..9: note = Seed: LVVVGAVGV (KRAS G12V)
FVVLGRVGT

SEQ ID NO: 52742 - protein, 9 aa, synthetic construct
  source 1..9: note = Seed: LVVVGAVGV (KRAS G12V)
FVVLGRVGV

SEQ ID NO: 52743 - protein, 9 aa, synthetic construct
  source 1..9: note = Seed: LVVVGAVGV (KRAS G12V)
FVVLGRVGY

SEQ ID NO: 52744 - protein, 9 aa, synthetic construct
  source 1..9: note = Seed: LVVVGAVGV (KRAS G12V)
FVVLGSVGC

SEQ ID NO: 52745 - protein, 9 aa, synthetic construct
  source 1..9: note = Seed: LVVVGAVGV (KRAS G12V)
FVVLGSVGD

SEQ ID NO: 52746 - protein, 9 aa, synthetic construct
  source 1..9: note = Seed: LVVVGAVGV (KRAS G12V)
FVVLGSVGE

SEQ ID NO: 52747 - protein, 9 aa, synthetic construct
  source 1..9: note = Seed: LVVVGAVGV (KRAS G12V)
FVVLGSVGF

SEQ ID NO: 52748 - protein, 9 aa, synthetic construct
  source 1..9: note = Seed: LVVVGAVGV (KRAS G12V)
FVVLGSVGG

SEQ ID NO: 52749 - protein, 9 aa, synthetic construct
  source 1..9: note = Seed: LVVVGAVGV (KRAS G12V)
FVVLGSVGH

SEQ ID NO: 52750 - protein, 9 aa, synthetic construct
  source 1..9: note = Seed: LVVVGAVGV (KRAS G12V)
FVVLGSVGI

SEQ ID NO: 52751 - protein, 9 aa, synthetic construct
  source 1..9: note = Seed: LVVVGAVGV (KRAS G12V)
FVVLGSVGK

SEQ ID NO: 52752 - protein, 9 aa, synthetic construct
  source 1..9: note = Seed: LVVVGAVGV (KRAS G12V)
FVVLGSVGL

SEQ ID NO: 52753 - protein, 9 aa, synthetic construct
  source 1..9: note = Seed: LVVVGAVGV (KRAS G12V)
FVVLGSVGM

SEQ ID NO: 52754 - protein, 9 aa, synthetic construct
  source 1..9: note = Seed: LVVVGAVGV (KRAS G12V)
FVVLGSVGN

SEQ ID NO: 52755 - protein, 9 aa, synthetic construct
  source 1..9: note = Seed: LVVVGAVGV (KRAS G12V)
FVVLGSVGP

SEQ ID NO: 52756 - protein, 9 aa, synthetic construct
  source 1..9: note = Seed: LVVVGAVGV (KRAS G12V)
FVVLGSVGQ

SEQ ID NO: 52757 - protein, 9 aa, synthetic construct
  source 1..9: note = Seed: LVVVGAVGV (KRAS G12V)
FVVLGSVGR

SEQ ID NO: 52758 - protein, 9 aa, synthetic construct
  source 1..9: note = Seed: LVVVGAVGV (KRAS G12V)
FVVLGSVGW

SEQ ID NO: 52759 - protein, 9 aa, synthetic construct
  source 1..9: note = Seed: LVVVGAVGV (KRAS G12V)
FVVLGSVGY

SEQ ID NO: 52760 - protein, 9 aa, synthetic construct
  source 1..9: note = Seed: LVVVGAVGV (KRAS G12V)
FVVLGTVGA

SEQ ID NO: 52761 - protein, 9 aa, synthetic construct
  source 1..9: note = Seed: LVVVGAVGV (KRAS G12V)
FVVLGTVGC

SEQ ID NO: 52762 - protein, 9 aa, synthetic construct
  source 1..9: note = Seed: LVVVGAVGV (KRAS G12V)
FVVLGTVGD

SEQ ID NO: 52763 - protein, 9 aa, synthetic construct
  source 1..9: note = Seed: LVVVGAVGV (KRAS G12V)
FVVLGTVGE

SEQ ID NO: 52764 - protein, 9 aa, synthetic construct
  source 1..9: note = Seed: LVVVGAVGV (KRAS G12V)
FVVLGTVGF

SEQ ID NO: 52765 - protein, 9 aa, synthetic construct
  source 1..9: note = Seed: LVVVGAVGV (KRAS G12V)
FVVLGTVGG

SEQ ID NO: 52766 - protein, 9 aa, synthetic construct
  source 1..9: note = Seed: LVVVGAVGV (KRAS G12V)
FVVLGTVGH

SEQ ID NO: 52767 - protein, 9 aa, synthetic construct
  source 1..9: note = Seed: LVVVGAVGV (KRAS G12V)
FVVLGTVGI

SEQ ID NO: 52768 - protein, 9 aa, synthetic construct
  source 1..9: note = Seed: LVVVGAVGV (KRAS G12V)
FVVLGTVGK

SEQ ID NO: 52769 - protein, 9 aa, synthetic construct
  source 1..9: note = Seed: LVVVGAVGV (KRAS G12V)
FVVLGTVGL

SEQ ID NO: 52770 - protein, 9 aa, synthetic construct
  source 1..9: note = Seed: LVVVGAVGV (KRAS G12V)
FVVLGTVGM

SEQ ID NO: 52771 - protein, 9 aa, synthetic construct
  source 1..9: note = Seed: LVVVGAVGV (KRAS G12V)
FVVLGTVGN

SEQ ID NO: 52772 - protein, 9 aa, synthetic construct
  source 1..9: note = Seed: LVVVGAVGV (KRAS G12V)
FVVLGTVGP

SEQ ID NO: 52773 - protein, 9 aa, synthetic construct
  source 1..9: note = Seed: LVVVGAVGV (KRAS G12V)
FVVLGTVGQ

SEQ ID NO: 52774 - protein, 9 aa, synthetic construct
  source 1..9: note = Seed: LVVVGAVGV (KRAS G12V)
FVVLGTVGR

SEQ ID NO: 52775 - protein, 9 aa, synthetic construct
  source 1..9: note = Seed: LVVVGAVGV (KRAS G12V)
FVVLGTVGS

SEQ ID NO: 52776 - protein, 9 aa, synthetic construct
  source 1..9: note = Seed: LVVVGAVGV (KRAS G12V)
FVVLGTVGT

SEQ ID NO: 52777 - protein, 9 aa, synthetic construct
  source 1..9: note = Seed: LVVVGAVGV (KRAS G12V)
FVVLGTVGV

SEQ ID NO: 52778 - protein, 9 aa, synthetic construct
  source 1..9: note = Seed: LVVVGAVGV (KRAS G12V)
FVVLGTVGW

SEQ ID NO: 52779 - protein, 9 aa, synthetic construct
  source 1..9: note = Seed: LVVVGAVGV (KRAS G12V)
FVVLGTVGY

SEQ ID NO: 52780 - protein, 9 aa, synthetic construct
  source 1..9: note = Seed: LVVVGAVGV (KRAS G12V)
FVVLGVVGA

SEQ ID NO: 52781 - protein, 9 aa, synthetic construct
  source 1..9: note = Seed: LVVVGAVGV (KRAS G12V)
FVVLGVVGD

SEQ ID NO: 52782 - protein, 9 aa, synthetic construct
  source 1..9: note = Seed: LVVVGAVGV (KRAS G12V)
FVVLGVVGE

SEQ ID NO: 52783 - protein, 9 aa, synthetic construct
  source 1..9: note = Seed: LVVVGAVGV (KRAS G12V)
FVVLGVVGF

SEQ ID NO: 52784 - protein, 9 aa, synthetic construct
  source 1..9: note = Seed: LVVVGAVGV (KRAS G12V)
FVVLGVVGG

SEQ ID NO: 52785 - protein, 9 aa, synthetic construct
  source 1..9: note = Seed: LVVVGAVGV (KRAS G12V)
FVVLGVVGH

SEQ ID NO: 52786 - protein, 9 aa, synthetic construct
  source 1..9: note = Seed: LVVVGAVGV (KRAS G12V)
FVVLGVVGI

SEQ ID NO: 52787 - protein, 9 aa, synthetic construct
  source 1..9: note = Seed: LVVVGAVGV (KRAS G12V)
FVVLGVVGK

SEQ ID NO: 52788 - protein, 9 aa, synthetic construct
  source 1..9: note = Seed: LVVVGAVGV (KRAS G12V)
FVVLGVVGL

SEQ ID NO: 52789 - protein, 9 aa, synthetic construct
  source 1..9: note = Seed: LVVVGAVGV (KRAS G12V)
FVVLGVVGM

SEQ ID NO: 52790 - protein, 9 aa, synthetic construct
  source 1..9: note = Seed: LVVVGAVGV (KRAS G12V)
FVVLGVVGN

SEQ ID NO: 52791 - protein, 9 aa, synthetic construct
  source 1..9: note = Seed: LVVVGAVGV (KRAS G12V)
FVVLGVVGP

SEQ ID NO: 52792 - protein, 9 aa, synthetic construct
  source 1..9: note = Seed: LVVVGAVGV (KRAS G12V)
FVVLGVVGQ

SEQ ID NO: 52793 - protein, 9 aa, synthetic construct
  source 1..9: note = Seed: LVVVGAVGV (KRAS G12V)
FVVLGVVGR

SEQ ID NO: 52794 - protein, 9 aa, synthetic construct
  source 1..9: note = Seed: LVVVGAVGV (KRAS G12V)
FVVLGVVGS

SEQ ID NO: 52795 - protein, 9 aa, synthetic construct
  source 1..9: note = Seed: LVVVGAVGV (KRAS G12V)
FVVLGVVGT

SEQ ID NO: 52796 - protein, 9 aa, synthetic construct
  source 1..9: note = Seed: LVVVGAVGV (KRAS G12V)
FVVLGVVGV

SEQ ID NO: 52797 - protein, 9 aa, synthetic construct
  source 1..9: note = Seed: LVVVGAVGV (KRAS G12V)
FVVLGVVGY

SEQ ID NO: 52798 - protein, 9 aa, synthetic construct
  source 1..9: note = Seed: LVVVGAVGV (KRAS G12V)
FVVLGWVGA

SEQ ID NO: 52799 - protein, 9 aa, synthetic construct
  source 1..9: note = Seed: LVVVGAVGV (KRAS G12V)
FVVLGWVGH

SEQ ID NO: 52800 - protein, 9 aa, synthetic construct
  source 1..9: note = Seed: LVVVGAVGV (KRAS G12V)
FVVLGYVGA

SEQ ID NO: 52801 - protein, 9 aa, synthetic construct
  source 1..9: note = Seed: LVVVGAVGV (KRAS G12V)
FVVLGYVGH

SEQ ID NO: 52802 - protein, 9 aa, synthetic construct
  source 1..9: note = Seed: LVVVGAVGV (KRAS G12V)
FVVLGYVGI

SEQ ID NO: 52803 - protein, 9 aa, synthetic construct
  source 1..9: note = Seed: LVVVGAVGV (KRAS G12V)
FVVLGYVGL

SEQ ID NO: 52804 - protein, 9 aa, synthetic construct
  source 1..9: note = Seed: LVVVGAVGV (KRAS G12V)
FVVLGYVGM

SEQ ID NO: 52805 - protein, 9 aa, synthetic construct
  source 1..9: note = Seed: LVVVGAVGV (KRAS G12V)
FVVLGYVGN

SEQ ID NO: 52806 - protein, 9 aa, synthetic construct
  source 1..9: note = Seed: LVVVGAVGV (KRAS G12V)
FVVLGYVGR

SEQ ID NO: 52807 - protein, 9 aa, synthetic construct
  source 1..9: note = Seed: LVVVGAVGV (KRAS G12V)
FVVLGYVGS

SEQ ID NO: 52808 - protein, 9 aa, synthetic construct
  source 1..9: note = Seed: LVVVGAVGV (KRAS G12V)
FVVLGYVGT

SEQ ID NO: 52809 - protein, 9 aa, synthetic construct
  source 1..9: note = Seed: LVVVGAVGV (KRAS G12V)
FVVLGYVGV

SEQ ID NO: 52810 - protein, 9 aa, synthetic construct
  source 1..9: note = Seed: LVVVGAVGV (KRAS G12V)
FVVMGAVGC

SEQ ID NO: 52811 - protein, 9 aa, synthetic construct
  source 1..9: note = Seed: LVVVGAVGV (KRAS G12V)
FVVMGAVGD

SEQ ID NO: 52812 - protein, 9 aa, synthetic construct
  source 1..9: note = Seed: LVVVGAVGV (KRAS G12V)
FVVMGAVGE

SEQ ID NO: 52813 - protein, 9 aa, synthetic construct
  source 1..9: note = Seed: LVVVGAVGV (KRAS G12V)
FVVMGAVGF

SEQ ID NO: 52814 - protein, 9 aa, synthetic construct
  source 1..9: note = Seed: LVVVGAVGV (KRAS G12V)
FVVMGAVGG

SEQ ID NO: 52815 - protein, 9 aa, synthetic construct
  source 1..9: note = Seed: LVVVGAVGV (KRAS G12V)
FVVMGAVGH

SEQ ID NO: 52816 - protein, 9 aa, synthetic construct
  source 1..9: note = Seed: LVVVGAVGV (KRAS G12V)
FVVMGAVGI

SEQ ID NO: 52817 - protein, 9 aa, synthetic construct
  source 1..9: note = Seed: LVVVGAVGV (KRAS G12V)
FVVMGAVGK

SEQ ID NO: 52818 - protein, 9 aa, synthetic construct
  source 1..9: note = Seed: LVVVGAVGV (KRAS G12V)
FVVMGAVGN

SEQ ID NO: 52819 - protein, 9 aa, synthetic construct
  source 1..9: note = Seed: LVVVGAVGV (KRAS G12V)
FVVMGAVGP

SEQ ID NO: 52820 - protein, 9 aa, synthetic construct
  source 1..9: note = Seed: LVVVGAVGV (KRAS G12V)
FVVMGAVGQ

SEQ ID NO: 52821 - protein, 9 aa, synthetic construct
  source 1..9: note = Seed: LVVVGAVGV (KRAS G12V)
FVVMGAVGR

SEQ ID NO: 52822 - protein, 9 aa, synthetic construct
  source 1..9: note = Seed: LVVVGAVGV (KRAS G12V)
FVVMGAVGS

SEQ ID NO: 52823 - protein, 9 aa, synthetic construct
  source 1..9: note = Seed: LVVVGAVGV (KRAS G12V)
FVVMGAVGW

SEQ ID NO: 52824 - protein, 9 aa, synthetic construct
  source 1..9: note = Seed: LVVVGAVGV (KRAS G12V)
FVVMGAVGY

SEQ ID NO: 52825 - protein, 9 aa, synthetic construct
  source 1..9: note = Seed: LVVVGAVGV (KRAS G12V)
FVVMGCVGA

SEQ ID NO: 52826 - protein, 9 aa, synthetic construct
  source 1..9: note = Seed: LVVVGAVGV (KRAS G12V)
FVVMGCVGG

SEQ ID NO: 52827 - protein, 9 aa, synthetic construct
  source 1..9: note = Seed: LVVVGAVGV (KRAS G12V)
FVVMGCVGH

SEQ ID NO: 52828 - protein, 9 aa, synthetic construct
  source 1..9: note = Seed: LVVVGAVGV (KRAS G12V)
FVVMGCVGI

SEQ ID NO: 52829 - protein, 9 aa, synthetic construct
  source 1..9: note = Seed: LVVVGAVGV (KRAS G12V)
FVVMGCVGK

SEQ ID NO: 52830 - protein, 9 aa, synthetic construct
  source 1..9: note = Seed: LVVVGAVGV (KRAS G12V)
FVVMGCVGL

SEQ ID NO: 52831 - protein, 9 aa, synthetic construct
  source 1..9: note = Seed: LVVVGAVGV (KRAS G12V)
FVVMGCVGM

SEQ ID NO: 52832 - protein, 9 aa, synthetic construct
  source 1..9: note = Seed: LVVVGAVGV (KRAS G12V)
FVVMGCVGN

SEQ ID NO: 52833 - protein, 9 aa, synthetic construct
  source 1..9: note = Seed: LVVVGAVGV (KRAS G12V)
FVVMGCVGR

SEQ ID NO: 52834 - protein, 9 aa, synthetic construct
  source 1..9: note = Seed: LVVVGAVGV (KRAS G12V)
FVVMGCVGS

SEQ ID NO: 52835 - protein, 9 aa, synthetic construct
  source 1..9: note = Seed: LVVVGAVGV (KRAS G12V)
FVVMGCVGT

SEQ ID NO: 52836 - protein, 9 aa, synthetic construct
  source 1..9: note = Seed: LVVVGAVGV (KRAS G12V)
FVVMGCVGV

SEQ ID NO: 52837 - protein, 9 aa, synthetic construct
  source 1..9: note = Seed: LVVVGAVGV (KRAS G12V)
FVVMGDVGA

SEQ ID NO: 52838 - protein, 9 aa, synthetic construct
  source 1..9: note = Seed: LVVVGAVGV (KRAS G12V)
FVVMGDVGC

SEQ ID NO: 52839 - protein, 9 aa, synthetic construct
  source 1..9: note = Seed: LVVVGAVGV (KRAS G12V)
FVVMGDVGD

SEQ ID NO: 52840 - protein, 9 aa, synthetic construct
  source 1..9: note = Seed: LVVVGAVGV (KRAS G12V)
FVVMGDVGE

SEQ ID NO: 52841 - protein, 9 aa, synthetic construct
  source 1..9: note = Seed: LVVVGAVGV (KRAS G12V)
FVVMGDVGF

SEQ ID NO: 52842 - protein, 9 aa, synthetic construct
  source 1..9: note = Seed: LVVVGAVGV (KRAS G12V)
FVVMGDVGG

SEQ ID NO: 52843 - protein, 9 aa, synthetic construct
  source 1..9: note = Seed: LVVVGAVGV (KRAS G12V)
FVVMGDVGH

SEQ ID NO: 52844 - protein, 9 aa, synthetic construct
  source 1..9: note = Seed: LVVVGAVGV (KRAS G12V)
FVVMGDVGI

SEQ ID NO: 52845 - protein, 9 aa, synthetic construct
  source 1..9: note = Seed: LVVVGAVGV (KRAS G12V)
FVVMGDVGL

SEQ ID NO: 52846 - protein, 9 aa, synthetic construct
  source 1..9: note = Seed: LVVVGAVGV (KRAS G12V)
FVVMGDVGM

SEQ ID NO: 52847 - protein, 9 aa, synthetic construct
  source 1..9: note = Seed: LVVVGAVGV (KRAS G12V)
FVVMGDVGN

SEQ ID NO: 52848 - protein, 9 aa, synthetic construct
  source 1..9: note = Seed: LVVVGAVGV (KRAS G12V)
FVVMGDVGP

SEQ ID NO: 52849 - protein, 9 aa, synthetic construct
  source 1..9: note = Seed: LVVVGAVGV (KRAS G12V)
FVVMGDVGQ

SEQ ID NO: 52850 - protein, 9 aa, synthetic construct
  source 1..9: note = Seed: LVVVGAVGV (KRAS G12V)
FVVMGDVGS

SEQ ID NO: 52851 - protein, 9 aa, synthetic construct
  source 1..9: note = Seed: LVVVGAVGV (KRAS G12V)
FVVMGDVGT

SEQ ID NO: 52852 - protein, 9 aa, synthetic construct
  source 1..9: note = Seed: LVVVGAVGV (KRAS G12V)
FVVMGDVGV

SEQ ID NO: 52853 - protein, 9 aa, synthetic construct
  source 1..9: note = Seed: LVVVGAVGV (KRAS G12V)
FVVMGDVGY

SEQ ID NO: 52854 - protein, 9 aa, synthetic construct
  source 1..9: note = Seed: LVVVGAVGV (KRAS G12V)
FVVMGEVGA

SEQ ID NO: 52855 - protein, 9 aa, synthetic construct
  source 1..9: note = Seed: LVVVGAVGV (KRAS G12V)
FVVMGEVGF

SEQ ID NO: 52856 - protein, 9 aa, synthetic construct
  source 1..9: note = Seed: LVVVGAVGV (KRAS G12V)
FVVMGEVGG

SEQ ID NO: 52857 - protein, 9 aa, synthetic construct
  source 1..9: note = Seed: LVVVGAVGV (KRAS G12V)
FVVMGEVGH

SEQ ID NO: 52858 - protein, 9 aa, synthetic construct
  source 1..9: note = Seed: LVVVGAVGV (KRAS G12V)
FVVMGEVGI

SEQ ID NO: 52859 - protein, 9 aa, synthetic construct
  source 1..9: note = Seed: LVVVGAVGV (KRAS G12V)
FVVMGEVGK

SEQ ID NO: 52860 - protein, 9 aa, synthetic construct
  source 1..9: note = Seed: LVVVGAVGV (KRAS G12V)
FVVMGEVGL

SEQ ID NO: 52861 - protein, 9 aa, synthetic construct
  source 1..9: note = Seed: LVVVGAVGV (KRAS G12V)
FVVMGEVGM

SEQ ID NO: 52862 - protein, 9 aa, synthetic construct
  source 1..9: note = Seed: LVVVGAVGV (KRAS G12V)
FVVMGEVGN

SEQ ID NO: 52863 - protein, 9 aa, synthetic construct
  source 1..9: note = Seed: LVVVGAVGV (KRAS G12V)
FVVMGEVGP

SEQ ID NO: 52864 - protein, 9 aa, synthetic construct
  source 1..9: note = Seed: LVVVGAVGV (KRAS G12V)
FVVMGEVGQ

SEQ ID NO: 52865 - protein, 9 aa, synthetic construct
  source 1..9: note = Seed: LVVVGAVGV (KRAS G12V)
FVVMGEVGR

SEQ ID NO: 52866 - protein, 9 aa, synthetic construct
  source 1..9: note = Seed: LVVVGAVGV (KRAS G12V)
FVVMGEVGS

SEQ ID NO: 52867 - protein, 9 aa, synthetic construct
  source 1..9: note = Seed: LVVVGAVGV (KRAS G12V)
FVVMGEVGT

SEQ ID NO: 52868 - protein, 9 aa, synthetic construct
  source 1..9: note = Seed: LVVVGAVGV (KRAS G12V)
FVVMGEVGV

SEQ ID NO: 52869 - protein, 9 aa, synthetic construct
  source 1..9: note = Seed: LVVVGAVGV (KRAS G12V)
FVVMGEVGY

SEQ ID NO: 52870 - protein, 9 aa, synthetic construct
  source 1..9: note = Seed: LVVVGAVGV (KRAS G12V)
FVVMGFVGH

SEQ ID NO: 52871 - protein, 9 aa, synthetic construct
  source 1..9: note = Seed: LVVVGAVGV (KRAS G12V)
FVVMGFVGM

SEQ ID NO: 52872 - protein, 9 aa, synthetic construct
  source 1..9: note = Seed: LVVVGAVGV (KRAS G12V)
FVVMGFVGN

SEQ ID NO: 52873 - protein, 9 aa, synthetic construct
  source 1..9: note = Seed: LVVVGAVGV (KRAS G12V)
FVVMGFVGR

SEQ ID NO: 52874 - protein, 9 aa, synthetic construct
  source 1..9: note = Seed: LVVVGAVGV (KRAS G12V)
FVVMGGVGC

SEQ ID NO: 52875 - protein, 9 aa, synthetic construct
  source 1..9: note = Seed: LVVVGAVGV (KRAS G12V)
FVVMGGVGD

SEQ ID NO: 52876 - protein, 9 aa, synthetic construct
  source 1..9: note = Seed: LVVVGAVGV (KRAS G12V)
FVVMGGVGE

SEQ ID NO: 52877 - protein, 9 aa, synthetic construct
  source 1..9: note = Seed: LVVVGAVGV (KRAS G12V)
FVVMGGVGF

SEQ ID NO: 52878 - protein, 9 aa, synthetic construct
  source 1..9: note = Seed: LVVVGAVGV (KRAS G12V)
FVVMGGVGG

SEQ ID NO: 52879 - protein, 9 aa, synthetic construct
  source 1..9: note = Seed: LVVVGAVGV (KRAS G12V)
FVVMGGVGH

SEQ ID NO: 52880 - protein, 9 aa, synthetic construct
  source 1..9: note = Seed: LVVVGAVGV (KRAS G12V)
FVVMGGVGK

SEQ ID NO: 52881 - protein, 9 aa, synthetic construct
  source 1..9: note = Seed: LVVVGAVGV (KRAS G12V)
FVVMGGVGN

SEQ ID NO: 52882 - protein, 9 aa, synthetic construct
  source 1..9: note = Seed: LVVVGAVGV (KRAS G12V)
FVVMGGVGP

SEQ ID NO: 52883 - protein, 9 aa, synthetic construct
  source 1..9: note = Seed: LVVVGAVGV (KRAS G12V)
FVVMGGVGQ

SEQ ID NO: 52884 - protein, 9 aa, synthetic construct
  source 1..9: note = Seed: LVVVGAVGV (KRAS G12V)
FVVMGGVGR

SEQ ID NO: 52885 - protein, 9 aa, synthetic construct
  source 1..9: note = Seed: LVVVGAVGV (KRAS G12V)
FVVMGGVGW

SEQ ID NO: 52886 - protein, 9 aa, synthetic construct
  source 1..9: note = Seed: LVVVGAVGV (KRAS G12V)
FVVMGGVGY

SEQ ID NO: 52887 - protein, 9 aa, synthetic construct
  source 1..9: note = Seed: LVVVGAVGV (KRAS G12V)
FVVMGHVGA

SEQ ID NO: 52888 - protein, 9 aa, synthetic construct
  source 1..9: note = Seed: LVVVGAVGV (KRAS G12V)
FVVMGHVGC

SEQ ID NO: 52889 - protein, 9 aa, synthetic construct
  source 1..9: note = Seed: LVVVGAVGV (KRAS G12V)
FVVMGHVGD

SEQ ID NO: 52890 - protein, 9 aa, synthetic construct
  source 1..9: note = Seed: LVVVGAVGV (KRAS G12V)
FVVMGHVGE

SEQ ID NO: 52891 - protein, 9 aa, synthetic construct
  source 1..9: note = Seed: LVVVGAVGV (KRAS G12V)
FVVMGHVGF

SEQ ID NO: 52892 - protein, 9 aa, synthetic construct
  source 1..9: note = Seed: LVVVGAVGV (KRAS G12V)
FVVMGHVGG

SEQ ID NO: 52893 - protein, 9 aa, synthetic construct
  source 1..9: note = Seed: LVVVGAVGV (KRAS G12V)
FVVMGHVGH

SEQ ID NO: 52894 - protein, 9 aa, synthetic construct
  source 1..9: note = Seed: LVVVGAVGV (KRAS G12V)
FVVMGHVGI

SEQ ID NO: 52895 - protein, 9 aa, synthetic construct
  source 1..9: note = Seed: LVVVGAVGV (KRAS G12V)
FVVMGHVGK

SEQ ID NO: 52896 - protein, 9 aa, synthetic construct
  source 1..9: note = Seed: LVVVGAVGV (KRAS G12V)
FVVMGHVGL

SEQ ID NO: 52897 - protein, 9 aa, synthetic construct
  source 1..9: note = Seed: LVVVGAVGV (KRAS G12V)
FVVMGHVGM

SEQ ID NO: 52898 - protein, 9 aa, synthetic construct
  source 1..9: note = Seed: LVVVGAVGV (KRAS G12V)
FVVMGHVGN

SEQ ID NO: 52899 - protein, 9 aa, synthetic construct
  source 1..9: note = Seed: LVVVGAVGV (KRAS G12V)
FVVMGHVGP

SEQ ID NO: 52900 - protein, 9 aa, synthetic construct
  source 1..9: note = Seed: LVVVGAVGV (KRAS G12V)
FVVMGHVGQ

SEQ ID NO: 52901 - protein, 9 aa, synthetic construct
  source 1..9: note = Seed: LVVVGAVGV (KRAS G12V)
FVVMGHVGR

SEQ ID NO: 52902 - protein, 9 aa, synthetic construct
  source 1..9: note = Seed: LVVVGAVGV (KRAS G12V)
FVVMGHVGS

SEQ ID NO: 52903 - protein, 9 aa, synthetic construct
  source 1..9: note = Seed: LVVVGAVGV (KRAS G12V)
FVVMGHVGT

SEQ ID NO: 52904 - protein, 9 aa, synthetic construct
  source 1..9: note = Seed: LVVVGAVGV (KRAS G12V)
FVVMGHVGV

SEQ ID NO: 52905 - protein, 9 aa, synthetic construct
  source 1..9: note = Seed: LVVVGAVGV (KRAS G12V)
FVVMGHVGW

SEQ ID NO: 52906 - protein, 9 aa, synthetic construct
  source 1..9: note = Seed: LVVVGAVGV (KRAS G12V)
FVVMGHVGY

SEQ ID NO: 52907 - protein, 9 aa, synthetic construct
  source 1..9: note = Seed: LVVVGAVGV (KRAS G12V)
FVVMGIVGA

SEQ ID NO: 52908 - protein, 9 aa, synthetic construct
  source 1..9: note = Seed: LVVVGAVGV (KRAS G12V)
FVVMGIVGD

SEQ ID NO: 52909 - protein, 9 aa, synthetic construct
  source 1..9: note = Seed: LVVVGAVGV (KRAS G12V)
FVVMGIVGE

SEQ ID NO: 52910 - protein, 9 aa, synthetic construct
  source 1..9: note = Seed: LVVVGAVGV (KRAS G12V)
FVVMGIVGG

SEQ ID NO: 52911 - protein, 9 aa, synthetic construct
  source 1..9: note = Seed: LVVVGAVGV (KRAS G12V)
FVVMGIVGH

SEQ ID NO: 52912 - protein, 9 aa, synthetic construct
  source 1..9: note = Seed: LVVVGAVGV (KRAS G12V)
FVVMGIVGI

SEQ ID NO: 52913 - protein, 9 aa, synthetic construct
  source 1..9: note = Seed: LVVVGAVGV (KRAS G12V)
FVVMGIVGK

SEQ ID NO: 52914 - protein, 9 aa, synthetic construct
  source 1..9: note = Seed: LVVVGAVGV (KRAS G12V)
FVVMGIVGL

SEQ ID NO: 52915 - protein, 9 aa, synthetic construct
  source 1..9: note = Seed: LVVVGAVGV (KRAS G12V)
FVVMGIVGM

SEQ ID NO: 52916 - protein, 9 aa, synthetic construct
  source 1..9: note = Seed: LVVVGAVGV (KRAS G12V)
FVVMGIVGN

SEQ ID NO: 52917 - protein, 9 aa, synthetic construct
  source 1..9: note = Seed: LVVVGAVGV (KRAS G12V)
FVVMGIVGP

SEQ ID NO: 52918 - protein, 9 aa, synthetic construct
  source 1..9: note = Seed: LVVVGAVGV (KRAS G12V)
FVVMGIVGQ

SEQ ID NO: 52919 - protein, 9 aa, synthetic construct
  source 1..9: note = Seed: LVVVGAVGV (KRAS G12V)
FVVMGIVGR

SEQ ID NO: 52920 - protein, 9 aa, synthetic construct
  source 1..9: note = Seed: LVVVGAVGV (KRAS G12V)
FVVMGIVGS

SEQ ID NO: 52921 - protein, 9 aa, synthetic construct
  source 1..9: note = Seed: LVVVGAVGV (KRAS G12V)
FVVMGIVGT

SEQ ID NO: 52922 - protein, 9 aa, synthetic construct
  source 1..9: note = Seed: LVVVGAVGV (KRAS G12V)
FVVMGIVGV

SEQ ID NO: 52923 - protein, 9 aa, synthetic construct
  source 1..9: note = Seed: LVVVGAVGV (KRAS G12V)
FVVMGIVGY

SEQ ID NO: 52924 - protein, 9 aa, synthetic construct
  source 1..9: note = Seed: LVVVGAVGV (KRAS G12V)
FVVMGKVGA

SEQ ID NO: 52925 - protein, 9 aa, synthetic construct
  source 1..9: note = Seed: LVVVGAVGV (KRAS G12V)
FVVMGKVGD

SEQ ID NO: 52926 - protein, 9 aa, synthetic construct
  source 1..9: note = Seed: LVVVGAVGV (KRAS G12V)
FVVMGKVGE

SEQ ID NO: 52927 - protein, 9 aa, synthetic construct
  source 1..9: note = Seed: LVVVGAVGV (KRAS G12V)
FVVMGKVGF

SEQ ID NO: 52928 - protein, 9 aa, synthetic construct
  source 1..9: note = Seed: LVVVGAVGV (KRAS G12V)
FVVMGKVGG

SEQ ID NO: 52929 - protein, 9 aa, synthetic construct
  source 1..9: note = Seed: LVVVGAVGV (KRAS G12V)
FVVMGKVGH

SEQ ID NO: 52930 - protein, 9 aa, synthetic construct
  source 1..9: note = Seed: LVVVGAVGV (KRAS G12V)
FVVMGKVGI

SEQ ID NO: 52931 - protein, 9 aa, synthetic construct
  source 1..9: note = Seed: LVVVGAVGV (KRAS G12V)
FVVMGKVGK

SEQ ID NO: 52932 - protein, 9 aa, synthetic construct
  source 1..9: note = Seed: LVVVGAVGV (KRAS G12V)
FVVMGKVGL

SEQ ID NO: 52933 - protein, 9 aa, synthetic construct
  source 1..9: note = Seed: LVVVGAVGV (KRAS G12V)
FVVMGKVGM

SEQ ID NO: 52934 - protein, 9 aa, synthetic construct
  source 1..9: note = Seed: LVVVGAVGV (KRAS G12V)
FVVMGKVGN

SEQ ID NO: 52935 - protein, 9 aa, synthetic construct
  source 1..9: note = Seed: LVVVGAVGV (KRAS G12V)
FVVMGKVGP

SEQ ID NO: 52936 - protein, 9 aa, synthetic construct
  source 1..9: note = Seed: LVVVGAVGV (KRAS G12V)
FVVMGKVGQ

SEQ ID NO: 52937 - protein, 9 aa, synthetic construct
  source 1..9: note = Seed: LVVVGAVGV (KRAS G12V)
FVVMGKVGR

SEQ ID NO: 52938 - protein, 9 aa, synthetic construct
  source 1..9: note = Seed: LVVVGAVGV (KRAS G12V)
FVVMGKVGS

SEQ ID NO: 52939 - protein, 9 aa, synthetic construct
  source 1..9: note = Seed: LVVVGAVGV (KRAS G12V)
FVVMGKVGT

SEQ ID NO: 52940 - protein, 9 aa, synthetic construct
  source 1..9: note = Seed: LVVVGAVGV (KRAS G12V)
FVVMGKVGV

SEQ ID NO: 52941 - protein, 9 aa, synthetic construct
  source 1..9: note = Seed: LVVVGAVGV (KRAS G12V)
FVVMGKVGW

SEQ ID NO: 52942 - protein, 9 aa, synthetic construct
  source 1..9: note = Seed: LVVVGAVGV (KRAS G12V)
FVVMGKVGY

SEQ ID NO: 52943 - protein, 9 aa, synthetic construct
  source 1..9: note = Seed: LVVVGAVGV (KRAS G12V)
FVVMGLVGA

SEQ ID NO: 52944 - protein, 9 aa, synthetic construct
  source 1..9: note = Seed: LVVVGAVGV (KRAS G12V)
FVVMGLVGD

SEQ ID NO: 52945 - protein, 9 aa, synthetic construct
  source 1..9: note = Seed: LVVVGAVGV (KRAS G12V)
FVVMGLVGE

SEQ ID NO: 52946 - protein, 9 aa, synthetic construct
  source 1..9: note = Seed: LVVVGAVGV (KRAS G12V)
FVVMGLVGG

SEQ ID NO: 52947 - protein, 9 aa, synthetic construct
  source 1..9: note = Seed: LVVVGAVGV (KRAS G12V)
FVVMGLVGH

SEQ ID NO: 52948 - protein, 9 aa, synthetic construct
  source 1..9: note = Seed: LVVVGAVGV (KRAS G12V)
FVVMGLVGI

SEQ ID NO: 52949 - protein, 9 aa, synthetic construct
  source 1..9: note = Seed: LVVVGAVGV (KRAS G12V)
FVVMGLVGK

SEQ ID NO: 52950 - protein, 9 aa, synthetic construct
  source 1..9: note = Seed: LVVVGAVGV (KRAS G12V)
FVVMGLVGL

SEQ ID NO: 52951 - protein, 9 aa, synthetic construct
  source 1..9: note = Seed: LVVVGAVGV (KRAS G12V)
FVVMGLVGM

SEQ ID NO: 52952 - protein, 9 aa, synthetic construct
  source 1..9: note = Seed: LVVVGAVGV (KRAS G12V)
FVVMGLVGN

SEQ ID NO: 52953 - protein, 9 aa, synthetic construct
  source 1..9: note = Seed: LVVVGAVGV (KRAS G12V)
FVVMGLVGP

SEQ ID NO: 52954 - protein, 9 aa, synthetic construct
  source 1..9: note = Seed: LVVVGAVGV (KRAS G12V)
FVVMGLVGQ

SEQ ID NO: 52955 - protein, 9 aa, synthetic construct
  source 1..9: note = Seed: LVVVGAVGV (KRAS G12V)
FVVMGLVGR

SEQ ID NO: 52956 - protein, 9 aa, synthetic construct
  source 1..9: note = Seed: LVVVGAVGV (KRAS G12V)
FVVMGLVGS

SEQ ID NO: 52957 - protein, 9 aa, synthetic construct
  source 1..9: note = Seed: LVVVGAVGV (KRAS G12V)
FVVMGLVGT

SEQ ID NO: 52958 - protein, 9 aa, synthetic construct
  source 1..9: note = Seed: LVVVGAVGV (KRAS G12V)
FVVMGLVGV

SEQ ID NO: 52959 - protein, 9 aa, synthetic construct
  source 1..9: note = Seed: LVVVGAVGV (KRAS G12V)
FVVMGLVGY

SEQ ID NO: 52960 - protein, 9 aa, synthetic construct
  source 1..9: note = Seed: LVVVGAVGV (KRAS G12V)
FVVMGMVGA

SEQ ID NO: 52961 - protein, 9 aa, synthetic construct
  source 1..9: note = Seed: LVVVGAVGV (KRAS G12V)
FVVMGMVGD

SEQ ID NO: 52962 - protein, 9 aa, synthetic construct
  source 1..9: note = Seed: LVVVGAVGV (KRAS G12V)
FVVMGMVGE

SEQ ID NO: 52963 - protein, 9 aa, synthetic construct
  source 1..9: note = Seed: LVVVGAVGV (KRAS G12V)
FVVMGMVGF

SEQ ID NO: 52964 - protein, 9 aa, synthetic construct
  source 1..9: note = Seed: LVVVGAVGV (KRAS G12V)
FVVMGMVGG

SEQ ID NO: 52965 - protein, 9 aa, synthetic construct
  source 1..9: note = Seed: LVVVGAVGV (KRAS G12V)
FVVMGMVGH

SEQ ID NO: 52966 - protein, 9 aa, synthetic construct
  source 1..9: note = Seed: LVVVGAVGV (KRAS G12V)
FVVMGMVGI

SEQ ID NO: 52967 - protein, 9 aa, synthetic construct
  source 1..9: note = Seed: LVVVGAVGV (KRAS G12V)
FVVMGMVGK

SEQ ID NO: 52968 - protein, 9 aa, synthetic construct
  source 1..9: note = Seed: LVVVGAVGV (KRAS G12V)
FVVMGMVGL

SEQ ID NO: 52969 - protein, 9 aa, synthetic construct
  source 1..9: note = Seed: LVVVGAVGV (KRAS G12V)
FVVMGMVGM

SEQ ID NO: 52970 - protein, 9 aa, synthetic construct
  source 1..9: note = Seed: LVVVGAVGV (KRAS G12V)
FVVMGMVGN

SEQ ID NO: 52971 - protein, 9 aa, synthetic construct
  source 1..9: note = Seed: LVVVGAVGV (KRAS G12V)
FVVMGMVGP

SEQ ID NO: 52972 - protein, 9 aa, synthetic construct
  source 1..9: note = Seed: LVVVGAVGV (KRAS G12V)
FVVMGMVGQ

SEQ ID NO: 52973 - protein, 9 aa, synthetic construct
  source 1..9: note = Seed: LVVVGAVGV (KRAS G12V)
FVVMGMVGR

SEQ ID NO: 52974 - protein, 9 aa, synthetic construct
  source 1..9: note = Seed: LVVVGAVGV (KRAS G12V)
FVVMGMVGS

SEQ ID NO: 52975 - protein, 9 aa, synthetic construct
  source 1..9: note = Seed: LVVVGAVGV (KRAS G12V)
FVVMGMVGT

SEQ ID NO: 52976 - protein, 9 aa, synthetic construct
  source 1..9: note = Seed: LVVVGAVGV (KRAS G12V)
FVVMGMVGV

SEQ ID NO: 52977 - protein, 9 aa, synthetic construct
  source 1..9: note = Seed: LVVVGAVGV (KRAS G12V)
FVVMGMVGW

SEQ ID NO: 52978 - protein, 9 aa, synthetic construct
  source 1..9: note = Seed: LVVVGAVGV (KRAS G12V)
FVVMGMVGY

SEQ ID NO: 52979 - protein, 9 aa, synthetic construct
  source 1..9: note = Seed: LVVVGAVGV (KRAS G12V)
FVVMGNVGA

SEQ ID NO: 52980 - protein, 9 aa, synthetic construct
  source 1..9: note = Seed: LVVVGAVGV (KRAS G12V)
FVVMGNVGC

SEQ ID NO: 52981 - protein, 9 aa, synthetic construct
  source 1..9: note = Seed: LVVVGAVGV (KRAS G12V)
FVVMGNVGD

SEQ ID NO: 52982 - protein, 9 aa, synthetic construct
  source 1..9: note = Seed: LVVVGAVGV (KRAS G12V)
FVVMGNVGE

SEQ ID NO: 52983 - protein, 9 aa, synthetic construct
  source 1..9: note = Seed: LVVVGAVGV (KRAS G12V)
FVVMGNVGF

SEQ ID NO: 52984 - protein, 9 aa, synthetic construct
  source 1..9: note = Seed: LVVVGAVGV (KRAS G12V)
FVVMGNVGG

SEQ ID NO: 52985 - protein, 9 aa, synthetic construct
  source 1..9: note = Seed: LVVVGAVGV (KRAS G12V)
FVVMGNVGH

SEQ ID NO: 52986 - protein, 9 aa, synthetic construct
  source 1..9: note = Seed: LVVVGAVGV (KRAS G12V)
FVVMGNVGI

SEQ ID NO: 52987 - protein, 9 aa, synthetic construct
  source 1..9: note = Seed: LVVVGAVGV (KRAS G12V)
FVVMGNVGK

SEQ ID NO: 52988 - protein, 9 aa, synthetic construct
  source 1..9: note = Seed: LVVVGAVGV (KRAS G12V)
FVVMGNVGM

SEQ ID NO: 52989 - protein, 9 aa, synthetic construct
  source 1..9: note = Seed: LVVVGAVGV (KRAS G12V)
FVVMGNVGN

SEQ ID NO: 52990 - protein, 9 aa, synthetic construct
  source 1..9: note = Seed: LVVVGAVGV (KRAS G12V)
FVVMGNVGP

SEQ ID NO: 52991 - protein, 9 aa, synthetic construct
  source 1..9: note = Seed: LVVVGAVGV (KRAS G12V)
FVVMGNVGQ

SEQ ID NO: 52992 - protein, 9 aa, synthetic construct
  source 1..9: note = Seed: LVVVGAVGV (KRAS G12V)
FVVMGNVGR

SEQ ID NO: 52993 - protein, 9 aa, synthetic construct
  source 1..9: note = Seed: LVVVGAVGV (KRAS G12V)
FVVMGNVGS

SEQ ID NO: 52994 - protein, 9 aa, synthetic construct
  source 1..9: note = Seed: LVVVGAVGV (KRAS G12V)
FVVMGNVGT

SEQ ID NO: 52995 - protein, 9 aa, synthetic construct
  source 1..9: note = Seed: LVVVGAVGV (KRAS G12V)
FVVMGNVGW

SEQ ID NO: 52996 - protein, 9 aa, synthetic construct
  source 1..9: note = Seed: LVVVGAVGV (KRAS G12V)
FVVMGNVGY

SEQ ID NO: 52997 - protein, 9 aa, synthetic construct
  source 1..9: note = Seed: LVVVGAVGV (KRAS G12V)
FVVMGPVGC

SEQ ID NO: 52998 - protein, 9 aa, synthetic construct
  source 1..9: note = Seed: LVVVGAVGV (KRAS G12V)
FVVMGPVGD

SEQ ID NO: 52999 - protein, 9 aa, synthetic construct
  source 1..9: note = Seed: LVVVGAVGV (KRAS G12V)
FVVMGPVGE

SEQ ID NO: 53000 - protein, 9 aa, synthetic construct
  source 1..9: note = Seed: LVVVGAVGV (KRAS G12V)
FVVMGPVGF

SEQ ID NO: 53001 - protein, 9 aa, synthetic construct
  source 1..9: note = Seed: LVVVGAVGV (KRAS G12V)
FVVMGPVGG

SEQ ID NO: 53002 - protein, 9 aa, synthetic construct
  source 1..9: note = Seed: LVVVGAVGV (KRAS G12V)
FVVMGPVGH

SEQ ID NO: 53003 - protein, 9 aa, synthetic construct
  source 1..9: note = Seed: LVVVGAVGV (KRAS G12V)
FVVMGPVGK

SEQ ID NO: 53004 - protein, 9 aa, synthetic construct
  source 1..9: note = Seed: LVVVGAVGV (KRAS G12V)
FVVMGPVGM

SEQ ID NO: 53005 - protein, 9 aa, synthetic construct
  source 1..9: note = Seed: LVVVGAVGV (KRAS G12V)
FVVMGPVGN

SEQ ID NO: 53006 - protein, 9 aa, synthetic construct
  source 1..9: note = Seed: LVVVGAVGV (KRAS G12V)
FVVMGPVGP

SEQ ID NO: 53007 - protein, 9 aa, synthetic construct
  source 1..9: note = Seed: LVVVGAVGV (KRAS G12V)
FVVMGPVGQ

SEQ ID NO: 53008 - protein, 9 aa, synthetic construct
  source 1..9: note = Seed: LVVVGAVGV (KRAS G12V)
FVVMGPVGR

SEQ ID NO: 53009 - protein, 9 aa, synthetic construct
  source 1..9: note = Seed: LVVVGAVGV (KRAS G12V)
FVVMGPVGS

SEQ ID NO: 53010 - protein, 9 aa, synthetic construct
  source 1..9: note = Seed: LVVVGAVGV (KRAS G12V)
FVVMGPVGT

SEQ ID NO: 53011 - protein, 9 aa, synthetic construct
  source 1..9: note = Seed: LVVVGAVGV (KRAS G12V)
FVVMGPVGW

SEQ ID NO: 53012 - protein, 9 aa, synthetic construct
  source 1..9: note = Seed: LVVVGAVGV (KRAS G12V)
FVVMGPVGY

SEQ ID NO: 53013 - protein, 9 aa, synthetic construct
  source 1..9: note = Seed: LVVVGAVGV (KRAS G12V)
FVVMGQVGA

SEQ ID NO: 53014 - protein, 9 aa, synthetic construct
  source 1..9: note = Seed: LVVVGAVGV (KRAS G12V)
FVVMGQVGF

SEQ ID NO: 53015 - protein, 9 aa, synthetic construct
  source 1..9: note = Seed: LVVVGAVGV (KRAS G12V)
FVVMGQVGG

SEQ ID NO: 53016 - protein, 9 aa, synthetic construct
  source 1..9: note = Seed: LVVVGAVGV (KRAS G12V)
FVVMGQVGH

SEQ ID NO: 53017 - protein, 9 aa, synthetic construct
  source 1..9: note = Seed: LVVVGAVGV (KRAS G12V)
FVVMGQVGI

SEQ ID NO: 53018 - protein, 9 aa, synthetic construct
  source 1..9: note = Seed: LVVVGAVGV (KRAS G12V)
FVVMGQVGK

SEQ ID NO: 53019 - protein, 9 aa, synthetic construct
  source 1..9: note = Seed: LVVVGAVGV (KRAS G12V)
FVVMGQVGL

SEQ ID NO: 53020 - protein, 9 aa, synthetic construct
  source 1..9: note = Seed: LVVVGAVGV (KRAS G12V)
FVVMGQVGM

SEQ ID NO: 53021 - protein, 9 aa, synthetic construct
  source 1..9: note = Seed: LVVVGAVGV (KRAS G12V)
FVVMGQVGN

SEQ ID NO: 53022 - protein, 9 aa, synthetic construct
  source 1..9: note = Seed: LVVVGAVGV (KRAS G12V)
FVVMGQVGP

SEQ ID NO: 53023 - protein, 9 aa, synthetic construct
  source 1..9: note = Seed: LVVVGAVGV (KRAS G12V)
FVVMGQVGQ

SEQ ID NO: 53024 - protein, 9 aa, synthetic construct
  source 1..9: note = Seed: LVVVGAVGV (KRAS G12V)
FVVMGQVGR

SEQ ID NO: 53025 - protein, 9 aa, synthetic construct
  source 1..9: note = Seed: LVVVGAVGV (KRAS G12V)
FVVMGQVGS

SEQ ID NO: 53026 - protein, 9 aa, synthetic construct
  source 1..9: note = Seed: LVVVGAVGV (KRAS G12V)
FVVMGQVGT

SEQ ID NO: 53027 - protein, 9 aa, synthetic construct
  source 1..9: note = Seed: LVVVGAVGV (KRAS G12V)
FVVMGQVGV

SEQ ID NO: 53028 - protein, 9 aa, synthetic construct
  source 1..9: note = Seed: LVVVGAVGV (KRAS G12V)
FVVMGQVGY

SEQ ID NO: 53029 - protein, 9 aa, synthetic construct
  source 1..9: note = Seed: LVVVGAVGV (KRAS G12V)
FVVMGRVGA

SEQ ID NO: 53030 - protein, 9 aa, synthetic construct
  source 1..9: note = Seed: LVVVGAVGV (KRAS G12V)
FVVMGRVGC

SEQ ID NO: 53031 - protein, 9 aa, synthetic construct
  source 1..9: note = Seed: LVVVGAVGV (KRAS G12V)
FVVMGRVGD

SEQ ID NO: 53032 - protein, 9 aa, synthetic construct
  source 1..9: note = Seed: LVVVGAVGV (KRAS G12V)
FVVMGRVGE

SEQ ID NO: 53033 - protein, 9 aa, synthetic construct
  source 1..9: note = Seed: LVVVGAVGV (KRAS G12V)
FVVMGRVGF

SEQ ID NO: 53034 - protein, 9 aa, synthetic construct
  source 1..9: note = Seed: LVVVGAVGV (KRAS G12V)
FVVMGRVGG

SEQ ID NO: 53035 - protein, 9 aa, synthetic construct
  source 1..9: note = Seed: LVVVGAVGV (KRAS G12V)
FVVMGRVGH

SEQ ID NO: 53036 - protein, 9 aa, synthetic construct
  source 1..9: note = Seed: LVVVGAVGV (KRAS G12V)
FVVMGRVGI

SEQ ID NO: 53037 - protein, 9 aa, synthetic construct
  source 1..9: note = Seed: LVVVGAVGV (KRAS G12V)
FVVMGRVGK

SEQ ID NO: 53038 - protein, 9 aa, synthetic construct
  source 1..9: note = Seed: LVVVGAVGV (KRAS G12V)
FVVMGRVGL

SEQ ID NO: 53039 - protein, 9 aa, synthetic construct
  source 1..9: note = Seed: LVVVGAVGV (KRAS G12V)
FVVMGRVGM

SEQ ID NO: 53040 - protein, 9 aa, synthetic construct
  source 1..9: note = Seed: LVVVGAVGV (KRAS G12V)
FVVMGRVGN

SEQ ID NO: 53041 - protein, 9 aa, synthetic construct
  source 1..9: note = Seed: LVVVGAVGV (KRAS G12V)
FVVMGRVGP

SEQ ID NO: 53042 - protein, 9 aa, synthetic construct
  source 1..9: note = Seed: LVVVGAVGV (KRAS G12V)
FVVMGRVGQ

SEQ ID NO: 53043 - protein, 9 aa, synthetic construct
  source 1..9: note = Seed: LVVVGAVGV (KRAS G12V)
FVVMGRVGR

SEQ ID NO: 53044 - protein, 9 aa, synthetic construct
  source 1..9: note = Seed: LVVVGAVGV (KRAS G12V)
FVVMGRVGS

SEQ ID NO: 53045 - protein, 9 aa, synthetic construct
  source 1..9: note = Seed: LVVVGAVGV (KRAS G12V)
FVVMGRVGT

SEQ ID NO: 53046 - protein, 9 aa, synthetic construct
  source 1..9: note = Seed: LVVVGAVGV (KRAS G12V)
FVVMGRVGV

SEQ ID NO: 53047 - protein, 9 aa, synthetic construct
  source 1..9: note = Seed: LVVVGAVGV (KRAS G12V)
FVVMGRVGW

SEQ ID NO: 53048 - protein, 9 aa, synthetic construct
  source 1..9: note = Seed: LVVVGAVGV (KRAS G12V)
FVVMGRVGY

SEQ ID NO: 53049 - protein, 9 aa, synthetic construct
  source 1..9: note = Seed: LVVVGAVGV (KRAS G12V)
FVVMGSVGC

SEQ ID NO: 53050 - protein, 9 aa, synthetic construct
  source 1..9: note = Seed: LVVVGAVGV (KRAS G12V)
FVVMGSVGD

SEQ ID NO: 53051 - protein, 9 aa, synthetic construct
  source 1..9: note = Seed: LVVVGAVGV (KRAS G12V)
FVVMGSVGE

SEQ ID NO: 53052 - protein, 9 aa, synthetic construct
  source 1..9: note = Seed: LVVVGAVGV (KRAS G12V)
FVVMGSVGF

SEQ ID NO: 53053 - protein, 9 aa, synthetic construct
  source 1..9: note = Seed: LVVVGAVGV (KRAS G12V)
FVVMGSVGG

SEQ ID NO: 53054 - protein, 9 aa, synthetic construct
  source 1..9: note = Seed: LVVVGAVGV (KRAS G12V)
FVVMGSVGH

SEQ ID NO: 53055 - protein, 9 aa, synthetic construct
  source 1..9: note = Seed: LVVVGAVGV (KRAS G12V)
FVVMGSVGK

SEQ ID NO: 53056 - protein, 9 aa, synthetic construct
  source 1..9: note = Seed: LVVVGAVGV (KRAS G12V)
FVVMGSVGN

SEQ ID NO: 53057 - protein, 9 aa, synthetic construct
  source 1..9: note = Seed: LVVVGAVGV (KRAS G12V)
FVVMGSVGP

SEQ ID NO: 53058 - protein, 9 aa, synthetic construct
  source 1..9: note = Seed: LVVVGAVGV (KRAS G12V)
FVVMGSVGQ

SEQ ID NO: 53059 - protein, 9 aa, synthetic construct
  source 1..9: note = Seed: LVVVGAVGV (KRAS G12V)
FVVMGSVGR

SEQ ID NO: 53060 - protein, 9 aa, synthetic construct
  source 1..9: note = Seed: LVVVGAVGV (KRAS G12V)
FVVMGSVGW

SEQ ID NO: 53061 - protein, 9 aa, synthetic construct
  source 1..9: note = Seed: LVVVGAVGV (KRAS G12V)
FVVMGSVGY

SEQ ID NO: 53062 - protein, 9 aa, synthetic construct
  source 1..9: note = Seed: LVVVGAVGV (KRAS G12V)
FVVMGTVGA

SEQ ID NO: 53063 - protein, 9 aa, synthetic construct
  source 1..9: note = Seed: LVVVGAVGV (KRAS G12V)
FVVMGTVGC

SEQ ID NO: 53064 - protein, 9 aa, synthetic construct
  source 1..9: note = Seed: LVVVGAVGV (KRAS G12V)
FVVMGTVGD

SEQ ID NO: 53065 - protein, 9 aa, synthetic construct
  source 1..9: note = Seed: LVVVGAVGV (KRAS G12V)
FVVMGTVGE

SEQ ID NO: 53066 - protein, 9 aa, synthetic construct
  source 1..9: note = Seed: LVVVGAVGV (KRAS G12V)
FVVMGTVGF

SEQ ID NO: 53067 - protein, 9 aa, synthetic construct
  source 1..9: note = Seed: LVVVGAVGV (KRAS G12V)
FVVMGTVGG

SEQ ID NO: 53068 - protein, 9 aa, synthetic construct
  source 1..9: note = Seed: LVVVGAVGV (KRAS G12V)
FVVMGTVGH

SEQ ID NO: 53069 - protein, 9 aa, synthetic construct
  source 1..9: note = Seed: LVVVGAVGV (KRAS G12V)
FVVMGTVGI

SEQ ID NO: 53070 - protein, 9 aa, synthetic construct
  source 1..9: note = Seed: LVVVGAVGV (KRAS G12V)
FVVMGTVGK

SEQ ID NO: 53071 - protein, 9 aa, synthetic construct
  source 1..9: note = Seed: LVVVGAVGV (KRAS G12V)
FVVMGTVGL

SEQ ID NO: 53072 - protein, 9 aa, synthetic construct
  source 1..9: note = Seed: LVVVGAVGV (KRAS G12V)
FVVMGTVGM

SEQ ID NO: 53073 - protein, 9 aa, synthetic construct
  source 1..9: note = Seed: LVVVGAVGV (KRAS G12V)
FVVMGTVGN

SEQ ID NO: 53074 - protein, 9 aa, synthetic construct
  source 1..9: note = Seed: LVVVGAVGV (KRAS G12V)
FVVMGTVGP

SEQ ID NO: 53075 - protein, 9 aa, synthetic construct
  source 1..9: note = Seed: LVVVGAVGV (KRAS G12V)
FVVMGTVGQ

SEQ ID NO: 53076 - protein, 9 aa, synthetic construct
  source 1..9: note = Seed: LVVVGAVGV (KRAS G12V)
FVVMGTVGR

SEQ ID NO: 53077 - protein, 9 aa, synthetic construct
  source 1..9: note = Seed: LVVVGAVGV (KRAS G12V)
FVVMGTVGS

SEQ ID NO: 53078 - protein, 9 aa, synthetic construct
  source 1..9: note = Seed: LVVVGAVGV (KRAS G12V)
FVVMGTVGT

SEQ ID NO: 53079 - protein, 9 aa, synthetic construct
  source 1..9: note = Seed: LVVVGAVGV (KRAS G12V)
FVVMGTVGV

SEQ ID NO: 53080 - protein, 9 aa, synthetic construct
  source 1..9: note = Seed: LVVVGAVGV (KRAS G12V)
FVVMGTVGW

SEQ ID NO: 53081 - protein, 9 aa, synthetic construct
  source 1..9: note = Seed: LVVVGAVGV (KRAS G12V)
FVVMGTVGY

SEQ ID NO: 53082 - protein, 9 aa, synthetic construct
  source 1..9: note = Seed: LVVVGAVGV (KRAS G12V)
FVVMGVVGA

SEQ ID NO: 53083 - protein, 9 aa, synthetic construct
  source 1..9: note = Seed: LVVVGAVGV (KRAS G12V)
FVVMGVVGC

SEQ ID NO: 53084 - protein, 9 aa, synthetic construct
  source 1..9: note = Seed: LVVVGAVGV (KRAS G12V)
FVVMGVVGD

SEQ ID NO: 53085 - protein, 9 aa, synthetic construct
  source 1..9: note = Seed: LVVVGAVGV (KRAS G12V)
FVVMGVVGE

SEQ ID NO: 53086 - protein, 9 aa, synthetic construct
  source 1..9: note = Seed: LVVVGAVGV (KRAS G12V)
FVVMGVVGF

SEQ ID NO: 53087 - protein, 9 aa, synthetic construct
  source 1..9: note = Seed: LVVVGAVGV (KRAS G12V)
FVVMGVVGG

SEQ ID NO: 53088 - protein, 9 aa, synthetic construct
  source 1..9: note = Seed: LVVVGAVGV (KRAS G12V)
FVVMGVVGH

SEQ ID NO: 53089 - protein, 9 aa, synthetic construct
  source 1..9: note = Seed: LVVVGAVGV (KRAS G12V)
FVVMGVVGI

SEQ ID NO: 53090 - protein, 9 aa, synthetic construct
  source 1..9: note = Seed: LVVVGAVGV (KRAS G12V)
FVVMGVVGK

SEQ ID NO: 53091 - protein, 9 aa, synthetic construct
  source 1..9: note = Seed: LVVVGAVGV (KRAS G12V)
FVVMGVVGL

SEQ ID NO: 53092 - protein, 9 aa, synthetic construct
  source 1..9: note = Seed: LVVVGAVGV (KRAS G12V)
FVVMGVVGM

SEQ ID NO: 53093 - protein, 9 aa, synthetic construct
  source 1..9: note = Seed: LVVVGAVGV (KRAS G12V)
FVVMGVVGN

SEQ ID NO: 53094 - protein, 9 aa, synthetic construct
  source 1..9: note = Seed: LVVVGAVGV (KRAS G12V)
FVVMGVVGP

SEQ ID NO: 53095 - protein, 9 aa, synthetic construct
  source 1..9: note = Seed: LVVVGAVGV (KRAS G12V)
FVVMGVVGQ

SEQ ID NO: 53096 - protein, 9 aa, synthetic construct
  source 1..9: note = Seed: LVVVGAVGV (KRAS G12V)
FVVMGVVGR

SEQ ID NO: 53097 - protein, 9 aa, synthetic construct
  source 1..9: note = Seed: LVVVGAVGV (KRAS G12V)
FVVMGVVGS

SEQ ID NO: 53098 - protein, 9 aa, synthetic construct
  source 1..9: note = Seed: LVVVGAVGV (KRAS G12V)
FVVMGVVGT

SEQ ID NO: 53099 - protein, 9 aa, synthetic construct
  source 1..9: note = Seed: LVVVGAVGV (KRAS G12V)
FVVMGVVGV

SEQ ID NO: 53100 - protein, 9 aa, synthetic construct
  source 1..9: note = Seed: LVVVGAVGV (KRAS G12V)
FVVMGVVGY

SEQ ID NO: 53101 - protein, 9 aa, synthetic construct
  source 1..9: note = Seed: LVVVGAVGV (KRAS G12V)
FVVMGWVGA

SEQ ID NO: 53102 - protein, 9 aa, synthetic construct
  source 1..9: note = Seed: LVVVGAVGV (KRAS G12V)
FVVMGWVGH

SEQ ID NO: 53103 - protein, 9 aa, synthetic construct
  source 1..9: note = Seed: LVVVGAVGV (KRAS G12V)
FVVMGWVGK

SEQ ID NO: 53104 - protein, 9 aa, synthetic construct
  source 1..9: note = Seed: LVVVGAVGV (KRAS G12V)
FVVMGWVGL

SEQ ID NO: 53105 - protein, 9 aa, synthetic construct
  source 1..9: note = Seed: LVVVGAVGV (KRAS G12V)
FVVMGWVGM

SEQ ID NO: 53106 - protein, 9 aa, synthetic construct
  source 1..9: note = Seed: LVVVGAVGV (KRAS G12V)
FVVMGWVGN

SEQ ID NO: 53107 - protein, 9 aa, synthetic construct
  source 1..9: note = Seed: LVVVGAVGV (KRAS G12V)
FVVMGWVGR

SEQ ID NO: 53108 - protein, 9 aa, synthetic construct
  source 1..9: note = Seed: LVVVGAVGV (KRAS G12V)
FVVMGWVGS

SEQ ID NO: 53109 - protein, 9 aa, synthetic construct
  source 1..9: note = Seed: LVVVGAVGV (KRAS G12V)
FVVMGWVGT

SEQ ID NO: 53110 - protein, 9 aa, synthetic construct
  source 1..9: note = Seed: LVVVGAVGV (KRAS G12V)
FVVMGWVGV

SEQ ID NO: 53111 - protein, 9 aa, synthetic construct
  source 1..9: note = Seed: LVVVGAVGV (KRAS G12V)
FVVMGYVGA

SEQ ID NO: 53112 - protein, 9 aa, synthetic construct
  source 1..9: note = Seed: LVVVGAVGV (KRAS G12V)
FVVMGYVGG

SEQ ID NO: 53113 - protein, 9 aa, synthetic construct
  source 1..9: note = Seed: LVVVGAVGV (KRAS G12V)
FVVMGYVGH

SEQ ID NO: 53114 - protein, 9 aa, synthetic construct
  source 1..9: note = Seed: LVVVGAVGV (KRAS G12V)
FVVMGYVGI

SEQ ID NO: 53115 - protein, 9 aa, synthetic construct
  source 1..9: note = Seed: LVVVGAVGV (KRAS G12V)
FVVMGYVGK

SEQ ID NO: 53116 - protein, 9 aa, synthetic construct
  source 1..9: note = Seed: LVVVGAVGV (KRAS G12V)
FVVMGYVGL

SEQ ID NO: 53117 - protein, 9 aa, synthetic construct
  source 1..9: note = Seed: LVVVGAVGV (KRAS G12V)
FVVMGYVGM

SEQ ID NO: 53118 - protein, 9 aa, synthetic construct
  source 1..9: note = Seed: LVVVGAVGV (KRAS G12V)
FVVMGYVGN

SEQ ID NO: 53119 - protein, 9 aa, synthetic construct
  source 1..9: note = Seed: LVVVGAVGV (KRAS G12V)
FVVMGYVGP

SEQ ID NO: 53120 - protein, 9 aa, synthetic construct
  source 1..9: note = Seed: LVVVGAVGV (KRAS G12V)
FVVMGYVGQ

SEQ ID NO: 53121 - protein, 9 aa, synthetic construct
  source 1..9: note = Seed: LVVVGAVGV (KRAS G12V)
FVVMGYVGR

SEQ ID NO: 53122 - protein, 9 aa, synthetic construct
  source 1..9: note = Seed: LVVVGAVGV (KRAS G12V)
FVVMGYVGS

SEQ ID NO: 53123 - protein, 9 aa, synthetic construct
  source 1..9: note = Seed: LVVVGAVGV (KRAS G12V)
FVVMGYVGT

SEQ ID NO: 53124 - protein, 9 aa, synthetic construct
  source 1..9: note = Seed: LVVVGAVGV (KRAS G12V)
FVVMGYVGV

SEQ ID NO: 53125 - protein, 9 aa, synthetic construct
  source 1..9: note = Seed: LVVVGAVGV (KRAS G12V)
FVVMGYVGY

SEQ ID NO: 53126 - protein, 9 aa, synthetic construct
  source 1..9: note = Seed: LVVVGAVGV (KRAS G12V)
FVVNGAVGA

SEQ ID NO: 53127 - protein, 9 aa, synthetic construct
  source 1..9: note = Seed: LVVVGAVGV (KRAS G12V)
FVVNGAVGC

SEQ ID NO: 53128 - protein, 9 aa, synthetic construct
  source 1..9: note = Seed: LVVVGAVGV (KRAS G12V)
FVVNGAVGD

SEQ ID NO: 53129 - protein, 9 aa, synthetic construct
  source 1..9: note = Seed: LVVVGAVGV (KRAS G12V)
FVVNGAVGE

SEQ ID NO: 53130 - protein, 9 aa, synthetic construct
  source 1..9: note = Seed: LVVVGAVGV (KRAS G12V)
FVVNGAVGF

SEQ ID NO: 53131 - protein, 9 aa, synthetic construct
  source 1..9: note = Seed: LVVVGAVGV (KRAS G12V)
FVVNGAVGG

SEQ ID NO: 53132 - protein, 9 aa, synthetic construct
  source 1..9: note = Seed: LVVVGAVGV (KRAS G12V)
FVVNGAVGH

SEQ ID NO: 53133 - protein, 9 aa, synthetic construct
  source 1..9: note = Seed: LVVVGAVGV (KRAS G12V)
FVVNGAVGI

SEQ ID NO: 53134 - protein, 9 aa, synthetic construct
  source 1..9: note = Seed: LVVVGAVGV (KRAS G12V)
FVVNGAVGK

SEQ ID NO: 53135 - protein, 9 aa, synthetic construct
  source 1..9: note = Seed: LVVVGAVGV (KRAS G12V)
FVVNGAVGL

SEQ ID NO: 53136 - protein, 9 aa, synthetic construct
  source 1..9: note = Seed: LVVVGAVGV (KRAS G12V)
FVVNGAVGM

SEQ ID NO: 53137 - protein, 9 aa, synthetic construct
  source 1..9: note = Seed: LVVVGAVGV (KRAS G12V)
FVVNGAVGN

SEQ ID NO: 53138 - protein, 9 aa, synthetic construct
  source 1..9: note = Seed: LVVVGAVGV (KRAS G12V)
FVVNGAVGP

SEQ ID NO: 53139 - protein, 9 aa, synthetic construct
  source 1..9: note = Seed: LVVVGAVGV (KRAS G12V)
FVVNGAVGQ

SEQ ID NO: 53140 - protein, 9 aa, synthetic construct
  source 1..9: note = Seed: LVVVGAVGV (KRAS G12V)
FVVNGAVGR

SEQ ID NO: 53141 - protein, 9 aa, synthetic construct
  source 1..9: note = Seed: LVVVGAVGV (KRAS G12V)
FVVNGAVGS

SEQ ID NO: 53142 - protein, 9 aa, synthetic construct
  source 1..9: note = Seed: LVVVGAVGV (KRAS G12V)
FVVNGAVGT

SEQ ID NO: 53143 - protein, 9 aa, synthetic construct
  source 1..9: note = Seed: LVVVGAVGV (KRAS G12V)
FVVNGAVGV

SEQ ID NO: 53144 - protein, 9 aa, synthetic construct
  source 1..9: note = Seed: LVVVGAVGV (KRAS G12V)
FVVNGAVGW

SEQ ID NO: 53145 - protein, 9 aa, synthetic construct
  source 1..9: note = Seed: LVVVGAVGV (KRAS G12V)
FVVNGAVGY

SEQ ID NO: 53146 - protein, 9 aa, synthetic construct
  source 1..9: note = Seed: LVVVGAVGV (KRAS G12V)
FVVNGCVGA

SEQ ID NO: 53147 - protein, 9 aa, synthetic construct
  source 1..9: note = Seed: LVVVGAVGV (KRAS G12V)
FVVNGCVGC

SEQ ID NO: 53148 - protein, 9 aa, synthetic construct
  source 1..9: note = Seed: LVVVGAVGV (KRAS G12V)
FVVNGCVGF

SEQ ID NO: 53149 - protein, 9 aa, synthetic construct
  source 1..9: note = Seed: LVVVGAVGV (KRAS G12V)
FVVNGCVGG

SEQ ID NO: 53150 - protein, 9 aa, synthetic construct
  source 1..9: note = Seed: LVVVGAVGV (KRAS G12V)
FVVNGCVGH

SEQ ID NO: 53151 - protein, 9 aa, synthetic construct
  source 1..9: note = Seed: LVVVGAVGV (KRAS G12V)
FVVNGCVGI

SEQ ID NO: 53152 - protein, 9 aa, synthetic construct
  source 1..9: note = Seed: LVVVGAVGV (KRAS G12V)
FVVNGCVGK

SEQ ID NO: 53153 - protein, 9 aa, synthetic construct
  source 1..9: note = Seed: LVVVGAVGV (KRAS G12V)
FVVNGCVGL

SEQ ID NO: 53154 - protein, 9 aa, synthetic construct
  source 1..9: note = Seed: LVVVGAVGV (KRAS G12V)
FVVNGCVGM

SEQ ID NO: 53155 - protein, 9 aa, synthetic construct
  source 1..9: note = Seed: LVVVGAVGV (KRAS G12V)
FVVNGCVGN

SEQ ID NO: 53156 - protein, 9 aa, synthetic construct
  source 1..9: note = Seed: LVVVGAVGV (KRAS G12V)
FVVNGCVGP

SEQ ID NO: 53157 - protein, 9 aa, synthetic construct
  source 1..9: note = Seed: LVVVGAVGV (KRAS G12V)
FVVNGCVGQ

SEQ ID NO: 53158 - protein, 9 aa, synthetic construct
  source 1..9: note = Seed: LVVVGAVGV (KRAS G12V)
FVVNGCVGR

SEQ ID NO: 53159 - protein, 9 aa, synthetic construct
  source 1..9: note = Seed: LVVVGAVGV (KRAS G12V)
FVVNGCVGS

SEQ ID NO: 53160 - protein, 9 aa, synthetic construct
  source 1..9: note = Seed: LVVVGAVGV (KRAS G12V)
FVVNGCVGT

SEQ ID NO: 53161 - protein, 9 aa, synthetic construct
  source 1..9: note = Seed: LVVVGAVGV (KRAS G12V)
FVVNGCVGV

SEQ ID NO: 53162 - protein, 9 aa, synthetic construct
  source 1..9: note = Seed: LVVVGAVGV (KRAS G12V)
FVVNGCVGW

SEQ ID NO: 53163 - protein, 9 aa, synthetic construct
  source 1..9: note = Seed: LVVVGAVGV (KRAS G12V)
FVVNGCVGY

SEQ ID NO: 53164 - protein, 9 aa, synthetic construct
  source 1..9: note = Seed: LVVVGAVGV (KRAS G12V)
FVVNGDVGA

SEQ ID NO: 53165 - protein, 9 aa, synthetic construct
  source 1..9: note = Seed: LVVVGAVGV (KRAS G12V)
FVVNGDVGC

SEQ ID NO: 53166 - protein, 9 aa, synthetic construct
  source 1..9: note = Seed: LVVVGAVGV (KRAS G12V)
FVVNGDVGF

SEQ ID NO: 53167 - protein, 9 aa, synthetic construct
  source 1..9: note = Seed: LVVVGAVGV (KRAS G12V)
FVVNGDVGG

SEQ ID NO: 53168 - protein, 9 aa, synthetic construct
  source 1..9: note = Seed: LVVVGAVGV (KRAS G12V)
FVVNGDVGI

SEQ ID NO: 53169 - protein, 9 aa, synthetic construct
  source 1..9: note = Seed: LVVVGAVGV (KRAS G12V)
FVVNGDVGK

SEQ ID NO: 53170 - protein, 9 aa, synthetic construct
  source 1..9: note = Seed: LVVVGAVGV (KRAS G12V)
FVVNGDVGL

SEQ ID NO: 53171 - protein, 9 aa, synthetic construct
  source 1..9: note = Seed: LVVVGAVGV (KRAS G12V)
FVVNGDVGM

SEQ ID NO: 53172 - protein, 9 aa, synthetic construct
  source 1..9: note = Seed: LVVVGAVGV (KRAS G12V)
FVVNGDVGN

SEQ ID NO: 53173 - protein, 9 aa, synthetic construct
  source 1..9: note = Seed: LVVVGAVGV (KRAS G12V)
FVVNGDVGQ

SEQ ID NO: 53174 - protein, 9 aa, synthetic construct
  source 1..9: note = Seed: LVVVGAVGV (KRAS G12V)
FVVNGDVGR

SEQ ID NO: 53175 - protein, 9 aa, synthetic construct
  source 1..9: note = Seed: LVVVGAVGV (KRAS G12V)
FVVNGDVGS

SEQ ID NO: 53176 - protein, 9 aa, synthetic construct
  source 1..9: note = Seed: LVVVGAVGV (KRAS G12V)
FVVNGDVGT

SEQ ID NO: 53177 - protein, 9 aa, synthetic construct
  source 1..9: note = Seed: LVVVGAVGV (KRAS G12V)
FVVNGDVGV

SEQ ID NO: 53178 - protein, 9 aa, synthetic construct
  source 1..9: note = Seed: LVVVGAVGV (KRAS G12V)
FVVNGDVGY

SEQ ID NO: 53179 - protein, 9 aa, synthetic construct
  source 1..9: note = Seed: LVVVGAVGV (KRAS G12V)
FVVNGEVGA

SEQ ID NO: 53180 - protein, 9 aa, synthetic construct
  source 1..9: note = Seed: LVVVGAVGV (KRAS G12V)
FVVNGEVGF

SEQ ID NO: 53181 - protein, 9 aa, synthetic construct
  source 1..9: note = Seed: LVVVGAVGV (KRAS G12V)
FVVNGEVGI

SEQ ID NO: 53182 - protein, 9 aa, synthetic construct
  source 1..9: note = Seed: LVVVGAVGV (KRAS G12V)
FVVNGEVGL

SEQ ID NO: 53183 - protein, 9 aa, synthetic construct
  source 1..9: note = Seed: LVVVGAVGV (KRAS G12V)
FVVNGEVGM

SEQ ID NO: 53184 - protein, 9 aa, synthetic construct
  source 1..9: note = Seed: LVVVGAVGV (KRAS G12V)
FVVNGEVGR

SEQ ID NO: 53185 - protein, 9 aa, synthetic construct
  source 1..9: note = Seed: LVVVGAVGV (KRAS G12V)
FVVNGEVGS

SEQ ID NO: 53186 - protein, 9 aa, synthetic construct
  source 1..9: note = Seed: LVVVGAVGV (KRAS G12V)
FVVNGEVGT

SEQ ID NO: 53187 - protein, 9 aa, synthetic construct
  source 1..9: note = Seed: LVVVGAVGV (KRAS G12V)
FVVNGEVGV

SEQ ID NO: 53188 - protein, 9 aa, synthetic construct
  source 1..9: note = Seed: LVVVGAVGV (KRAS G12V)
FVVNGEVGY

SEQ ID NO: 53189 - protein, 9 aa, synthetic construct
  source 1..9: note = Seed: LVVVGAVGV (KRAS G12V)
FVVNGFVGA

SEQ ID NO: 53190 - protein, 9 aa, synthetic construct
  source 1..9: note = Seed: LVVVGAVGV (KRAS G12V)
FVVNGFVGD

SEQ ID NO: 53191 - protein, 9 aa, synthetic construct
  source 1..9: note = Seed: LVVVGAVGV (KRAS G12V)
FVVNGFVGE

SEQ ID NO: 53192 - protein, 9 aa, synthetic construct
  source 1..9: note = Seed: LVVVGAVGV (KRAS G12V)
FVVNGFVGF

SEQ ID NO: 53193 - protein, 9 aa, synthetic construct
  source 1..9: note = Seed: LVVVGAVGV (KRAS G12V)
FVVNGFVGI

SEQ ID NO: 53194 - protein, 9 aa, synthetic construct
  source 1..9: note = Seed: LVVVGAVGV (KRAS G12V)
FVVNGFVGL

SEQ ID NO: 53195 - protein, 9 aa, synthetic construct
  source 1..9: note = Seed: LVVVGAVGV (KRAS G12V)
FVVNGFVGM

SEQ ID NO: 53196 - protein, 9 aa, synthetic construct
  source 1..9: note = Seed: LVVVGAVGV (KRAS G12V)
FVVNGFVGN

SEQ ID NO: 53197 - protein, 9 aa, synthetic construct
  source 1..9: note = Seed: LVVVGAVGV (KRAS G12V)
FVVNGFVGS

SEQ ID NO: 53198 - protein, 9 aa, synthetic construct
  source 1..9: note = Seed: LVVVGAVGV (KRAS G12V)
FVVNGFVGT

SEQ ID NO: 53199 - protein, 9 aa, synthetic construct
  source 1..9: note = Seed: LVVVGAVGV (KRAS G12V)
FVVNGFVGV

SEQ ID NO: 53200 - protein, 9 aa, synthetic construct
  source 1..9: note = Seed: LVVVGAVGV (KRAS G12V)
FVVNGFVGY

SEQ ID NO: 53201 - protein, 9 aa, synthetic construct
  source 1..9: note = Seed: LVVVGAVGV (KRAS G12V)
FVVNGGVGA

SEQ ID NO: 53202 - protein, 9 aa, synthetic construct
  source 1..9: note = Seed: LVVVGAVGV (KRAS G12V)
FVVNGGVGC

SEQ ID NO: 53203 - protein, 9 aa, synthetic construct
  source 1..9: note = Seed: LVVVGAVGV (KRAS G12V)
FVVNGGVGD

SEQ ID NO: 53204 - protein, 9 aa, synthetic construct
  source 1..9: note = Seed: LVVVGAVGV (KRAS G12V)
FVVNGGVGE

SEQ ID NO: 53205 - protein, 9 aa, synthetic construct
  source 1..9: note = Seed: LVVVGAVGV (KRAS G12V)
FVVNGGVGF

SEQ ID NO: 53206 - protein, 9 aa, synthetic construct
  source 1..9: note = Seed: LVVVGAVGV (KRAS G12V)
FVVNGGVGG

SEQ ID NO: 53207 - protein, 9 aa, synthetic construct
  source 1..9: note = Seed: LVVVGAVGV (KRAS G12V)
FVVNGGVGH

SEQ ID NO: 53208 - protein, 9 aa, synthetic construct
  source 1..9: note = Seed: LVVVGAVGV (KRAS G12V)
FVVNGGVGI

SEQ ID NO: 53209 - protein, 9 aa, synthetic construct
  source 1..9: note = Seed: LVVVGAVGV (KRAS G12V)
FVVNGGVGK

SEQ ID NO: 53210 - protein, 9 aa, synthetic construct
  source 1..9: note = Seed: LVVVGAVGV (KRAS G12V)
FVVNGGVGL

SEQ ID NO: 53211 - protein, 9 aa, synthetic construct
  source 1..9: note = Seed: LVVVGAVGV (KRAS G12V)
FVVNGGVGM

SEQ ID NO: 53212 - protein, 9 aa, synthetic construct
  source 1..9: note = Seed: LVVVGAVGV (KRAS G12V)
FVVNGGVGN

SEQ ID NO: 53213 - protein, 9 aa, synthetic construct
  source 1..9: note = Seed: LVVVGAVGV (KRAS G12V)
FVVNGGVGP

SEQ ID NO: 53214 - protein, 9 aa, synthetic construct
  source 1..9: note = Seed: LVVVGAVGV (KRAS G12V)
FVVNGGVGQ

SEQ ID NO: 53215 - protein, 9 aa, synthetic construct
  source 1..9: note = Seed: LVVVGAVGV (KRAS G12V)
FVVNGGVGR

SEQ ID NO: 53216 - protein, 9 aa, synthetic construct
  source 1..9: note = Seed: LVVVGAVGV (KRAS G12V)
FVVNGGVGS

SEQ ID NO: 53217 - protein, 9 aa, synthetic construct
  source 1..9: note = Seed: LVVVGAVGV (KRAS G12V)
FVVNGGVGT

SEQ ID NO: 53218 - protein, 9 aa, synthetic construct
  source 1..9: note = Seed: LVVVGAVGV (KRAS G12V)
FVVNGGVGV

SEQ ID NO: 53219 - protein, 9 aa, synthetic construct
  source 1..9: note = Seed: LVVVGAVGV (KRAS G12V)
FVVNGGVGW

SEQ ID NO: 53220 - protein, 9 aa, synthetic construct
  source 1..9: note = Seed: LVVVGAVGV (KRAS G12V)
FVVNGGVGY

SEQ ID NO: 53221 - protein, 9 aa, synthetic construct
  source 1..9: note = Seed: LVVVGAVGV (KRAS G12V)
FVVNGHVGA

SEQ ID NO: 53222 - protein, 9 aa, synthetic construct
  source 1..9: note = Seed: LVVVGAVGV (KRAS G12V)
FVVNGHVGC

SEQ ID NO: 53223 - protein, 9 aa, synthetic construct
  source 1..9: note = Seed: LVVVGAVGV (KRAS G12V)
FVVNGHVGF

SEQ ID NO: 53224 - protein, 9 aa, synthetic construct
  source 1..9: note = Seed: LVVVGAVGV (KRAS G12V)
FVVNGHVGI

SEQ ID NO: 53225 - protein, 9 aa, synthetic construct
  source 1..9: note = Seed: LVVVGAVGV (KRAS G12V)
FVVNGHVGL

SEQ ID NO: 53226 - protein, 9 aa, synthetic construct
  source 1..9: note = Seed: LVVVGAVGV (KRAS G12V)
FVVNGHVGM

SEQ ID NO: 53227 - protein, 9 aa, synthetic construct
  source 1..9: note = Seed: LVVVGAVGV (KRAS G12V)
FVVNGHVGN

SEQ ID NO: 53228 - protein, 9 aa, synthetic construct
  source 1..9: note = Seed: LVVVGAVGV (KRAS G12V)
FVVNGHVGS

SEQ ID NO: 53229 - protein, 9 aa, synthetic construct
  source 1..9: note = Seed: LVVVGAVGV (KRAS G12V)
FVVNGHVGT

SEQ ID NO: 53230 - protein, 9 aa, synthetic construct
  source 1..9: note = Seed: LVVVGAVGV (KRAS G12V)
FVVNGHVGV

SEQ ID NO: 53231 - protein, 9 aa, synthetic construct
  source 1..9: note = Seed: LVVVGAVGV (KRAS G12V)
FVVNGHVGW

SEQ ID NO: 53232 - protein, 9 aa, synthetic construct
  source 1..9: note = Seed: LVVVGAVGV (KRAS G12V)
FVVNGHVGY

SEQ ID NO: 53233 - protein, 9 aa, synthetic construct
  source 1..9: note = Seed: LVVVGAVGV (KRAS G12V)
FVVNGIVGA

SEQ ID NO: 53234 - protein, 9 aa, synthetic construct
  source 1..9: note = Seed: LVVVGAVGV (KRAS G12V)
FVVNGIVGC

SEQ ID NO: 53235 - protein, 9 aa, synthetic construct
  source 1..9: note = Seed: LVVVGAVGV (KRAS G12V)
FVVNGIVGD

SEQ ID NO: 53236 - protein, 9 aa, synthetic construct
  source 1..9: note = Seed: LVVVGAVGV (KRAS G12V)
FVVNGIVGE

SEQ ID NO: 53237 - protein, 9 aa, synthetic construct
  source 1..9: note = Seed: LVVVGAVGV (KRAS G12V)
FVVNGIVGF

SEQ ID NO: 53238 - protein, 9 aa, synthetic construct
  source 1..9: note = Seed: LVVVGAVGV (KRAS G12V)
FVVNGIVGG

SEQ ID NO: 53239 - protein, 9 aa, synthetic construct
  source 1..9: note = Seed: LVVVGAVGV (KRAS G12V)
FVVNGIVGH

SEQ ID NO: 53240 - protein, 9 aa, synthetic construct
  source 1..9: note = Seed: LVVVGAVGV (KRAS G12V)
FVVNGIVGI

SEQ ID NO: 53241 - protein, 9 aa, synthetic construct
  source 1..9: note = Seed: LVVVGAVGV (KRAS G12V)
FVVNGIVGK

SEQ ID NO: 53242 - protein, 9 aa, synthetic construct
  source 1..9: note = Seed: LVVVGAVGV (KRAS G12V)
FVVNGIVGL

SEQ ID NO: 53243 - protein, 9 aa, synthetic construct
  source 1..9: note = Seed: LVVVGAVGV (KRAS G12V)
FVVNGIVGM

SEQ ID NO: 53244 - protein, 9 aa, synthetic construct
  source 1..9: note = Seed: LVVVGAVGV (KRAS G12V)
FVVNGIVGN

SEQ ID NO: 53245 - protein, 9 aa, synthetic construct
  source 1..9: note = Seed: LVVVGAVGV (KRAS G12V)
FVVNGIVGP

SEQ ID NO: 53246 - protein, 9 aa, synthetic construct
  source 1..9: note = Seed: LVVVGAVGV (KRAS G12V)
FVVNGIVGQ

SEQ ID NO: 53247 - protein, 9 aa, synthetic construct
  source 1..9: note = Seed: LVVVGAVGV (KRAS G12V)
FVVNGIVGR

SEQ ID NO: 53248 - protein, 9 aa, synthetic construct
  source 1..9: note = Seed: LVVVGAVGV (KRAS G12V)
FVVNGIVGS

SEQ ID NO: 53249 - protein, 9 aa, synthetic construct
  source 1..9: note = Seed: LVVVGAVGV (KRAS G12V)
FVVNGIVGT

SEQ ID NO: 53250 - protein, 9 aa, synthetic construct
  source 1..9: note = Seed: LVVVGAVGV (KRAS G12V)
FVVNGIVGV

SEQ ID NO: 53251 - protein, 9 aa, synthetic construct
  source 1..9: note = Seed: LVVVGAVGV (KRAS G12V)
FVVNGIVGW

SEQ ID NO: 53252 - protein, 9 aa, synthetic construct
  source 1..9: note = Seed: LVVVGAVGV (KRAS G12V)
FVVNGIVGY

SEQ ID NO: 53253 - protein, 9 aa, synthetic construct
  source 1..9: note = Seed: LVVVGAVGV (KRAS G12V)
FVVNGKVGA

SEQ ID NO: 53254 - protein, 9 aa, synthetic construct
  source 1..9: note = Seed: LVVVGAVGV (KRAS G12V)
FVVNGKVGC

SEQ ID NO: 53255 - protein, 9 aa, synthetic construct
  source 1..9: note = Seed: LVVVGAVGV (KRAS G12V)
FVVNGKVGF

SEQ ID NO: 53256 - protein, 9 aa, synthetic construct
  source 1..9: note = Seed: LVVVGAVGV (KRAS G12V)
FVVNGKVGG

SEQ ID NO: 53257 - protein, 9 aa, synthetic construct
  source 1..9: note = Seed: LVVVGAVGV (KRAS G12V)
FVVNGKVGH

SEQ ID NO: 53258 - protein, 9 aa, synthetic construct
  source 1..9: note = Seed: LVVVGAVGV (KRAS G12V)
FVVNGKVGI

SEQ ID NO: 53259 - protein, 9 aa, synthetic construct
  source 1..9: note = Seed: LVVVGAVGV (KRAS G12V)
FVVNGKVGL

SEQ ID NO: 53260 - protein, 9 aa, synthetic construct
  source 1..9: note = Seed: LVVVGAVGV (KRAS G12V)
FVVNGKVGM

SEQ ID NO: 53261 - protein, 9 aa, synthetic construct
  source 1..9: note = Seed: LVVVGAVGV (KRAS G12V)
FVVNGKVGN

SEQ ID NO: 53262 - protein, 9 aa, synthetic construct
  source 1..9: note = Seed: LVVVGAVGV (KRAS G12V)
FVVNGKVGQ

SEQ ID NO: 53263 - protein, 9 aa, synthetic construct
  source 1..9: note = Seed: LVVVGAVGV (KRAS G12V)
FVVNGKVGS

SEQ ID NO: 53264 - protein, 9 aa, synthetic construct
  source 1..9: note = Seed: LVVVGAVGV (KRAS G12V)
FVVNGKVGT

SEQ ID NO: 53265 - protein, 9 aa, synthetic construct
  source 1..9: note = Seed: LVVVGAVGV (KRAS G12V)
FVVNGKVGV

SEQ ID NO: 53266 - protein, 9 aa, synthetic construct
  source 1..9: note = Seed: LVVVGAVGV (KRAS G12V)
FVVNGKVGY

SEQ ID NO: 53267 - protein, 9 aa, synthetic construct
  source 1..9: note = Seed: LVVVGAVGV (KRAS G12V)
FVVNGLVGA

SEQ ID NO: 53268 - protein, 9 aa, synthetic construct
  source 1..9: note = Seed: LVVVGAVGV (KRAS G12V)
FVVNGLVGC
